United States Patent Application Publication US 2021/0199660 A1 - sequence listing, part 50

SEQ ID NO: 715315 - DNA, 120 bp, Artificial Sequence
  ENSG00000197312_52 (sequence is synthesized)
cataggttatagattttgctcattgatgctgttaagaattatttccactcatacctgttcagggctccagacagccaatagccttcatcccacagtttgggcttcagctattaacacata

SEQ ID NO: 715316 - DNA, 82 bp, Artificial Sequence
  ENSG00000197312_53 (sequence is synthesized)
taaccagttgcttggcaaaggaagctggagagatggcgagtgcatgtgttaaaactcttctgccttgcagcccacatcttct

SEQ ID NO: 715317 - DNA, 120 bp, Artificial Sequence
  ENSG00000197312_54 (sequence is synthesized)
catgtgttaaaactcttctgccttgcagcccacatcttctagagctccctgtcttcatatgtactaaagggagacacaaccctatgtgttttttcccaaagcatgtctctagcaagaggg

SEQ ID NO: 715318 - DNA, 120 bp, Artificial Sequence
  ENSG00000197312_55 (sequence is synthesized)
tacatagaaatggaacatgaggctttttgtcactgattttatgataaccagttaatgtggaatctgctggttgtcttactacagctttctatctccggtgaaagccataaaaatttaggt

SEQ ID NO: 715319 - DNA, 120 bp, Artificial Sequence
  ENSG00000197312_56 (sequence is synthesized)
taacttttaagctcatgtctatatatatgtgtgtaagctagcatatacatatggtgattgacaagtatagttaattttatatggatttaaaagcaagcaatttttatatctacagacgta

SEQ ID NO: 715320 - DNA, 120 bp, Artificial Sequence
  ENSG00000197312_57 (sequence is synthesized)
ctcttcacttatggtggcttttatcccgccacatatataaatatatatatatatagcaaacagccttgcaaatcatcggccagaaaagctgcagggcgttgcaatggccttttcctacct

SEQ ID NO: 715321 - DNA, 120 bp, Artificial Sequence
  ENSG00000197312_58 (sequence is synthesized)
gtttgccacctgtggtgagggtgagcaggatgattgaactgctgcatatttcaaacctgttatcactggcagtgtgtcccaagagaagctgaccagattatgcattctactgttctctag

SEQ ID NO: 715322 - DNA, 120 bp, Artificial Sequence
  ENSG00000197312_59 (sequence is synthesized)
cacaagtactcaccaaaaagccaaatttcccctttggagttggtgacttagtgtagtctgtggctgacctagaaagacacagagttatcaagagtttcccttcctagaagatgaatgtta

SEQ ID NO: 715323 - DNA, 120 bp, Artificial Sequence
  ENSG00000197312_60 (sequence is synthesized)
ccttttgtgttaggaggtagagaaaataaaaatagcttttttttccctagaattgctaattactcttaacaacaaattaaattcaaagcctgtccttgagaactggaaatgtaaaatcat

SEQ ID NO: 715324 - DNA, 120 bp, Artificial Sequence
  ENSG00000197312_61 (sequence is synthesized)
ggttcaagttttataccttagtgattcctcagtaggtgttactaggagttcactgaatgaacttaggagtgaaccttcgatgtgcttgattttcttttgtgccttagtttctctgaatag

SEQ ID NO: 715325 - DNA, 120 bp, Artificial Sequence
  ENSG00000197312_62 (sequence is synthesized)
cagaggcatcaaattttggtggggaatgagaggagtattaggggaaagtttgaaaatagctctcctggagatggagggcacacagagtggtcctcaggctcaccttgactgagttgattc

SEQ ID NO: 715326 - DNA, 120 bp, Artificial Sequence
  ENSG00000197312_63 (sequence is synthesized)
acagttatcctgcatcagaccattagatttctttagtgctatgattataatagggatttttgaatcaccaaaaacagtttttagatgtttatgttctttgttttactatcaatgttgtgc

SEQ ID NO: 715327 - DNA, 120 bp, Artificial Sequence
  ENSG00000197312_64 (sequence is synthesized)
tggttaagggagagaaaagttcaagaagatcttacatatttgaaaggaaattggtactcttgaaggctatgcaacatgagtctttgaacaagaattccttgctactttgattcattcatc

SEQ ID NO: 715328 - DNA, 120 bp, Artificial Sequence
  ENSG00000197312_65 (sequence is synthesized)
aaatactgagtgcctgtgtgccaggcacaggtgaactctggggattcaggggtaactaaaacagattggaaccctgcccttgtgaagctttcagtctagaagggagacgtgaaacaaatt

SEQ ID NO: 715329 - DNA, 120 bp, Artificial Sequence
  ENSG00000197312_66 (sequence is synthesized)
ttagcttcaaaagcaacatctatttttgcctgttagcatgcatttattttaaaagtcatattagagttacctggttccacttcagagcagactgggaaaatcaggcttacaatggaatca

SEQ ID NO: 715330 - DNA, 88 bp, Artificial Sequence
  ENSG00000197312_67 (sequence is synthesized)
ttcagagcagactgggaaaatcaggcttacaatggaatcagatgctgtgggcctaaaacagctctttaaaaatctatttttttaggcc

SEQ ID NO: 715331 - DNA, 89 bp, Artificial Sequence
  ENSG00000197312_68 (sequence is synthesized)
tcactgtactccagcctgggcaatttttttttaaatggaatcagagaaaccaacaaaatatgtaacatgtataaatgcctgaggagatc

SEQ ID NO: 715332 - DNA, 120 bp, Artificial Sequence
  ENSG00000197312_69 (sequence is synthesized)
ccaacaaaatatgtaacatgtataaatgcctgaggagatcagttattgagaaatccatttacaatgctggaggagaggggatggccaggaaagaagtgcaacaaataaatggaagatgac

SEQ ID NO: 715333 - DNA, 120 bp, Artificial Sequence
  ENSG00000197312_70 (sequence is synthesized)
cctaaaaatgcaccagtgacagtcagtcaatccatcagaccacctcacatgcagggtagaaacatggagtgtgcggcagcatcctcctcacatccctttgtgagcacggctgctccggaa

SEQ ID NO: 715334 - DNA, 120 bp, Artificial Sequence
  ENSG00000197312_71 (sequence is synthesized)
tactgaccatctgggctagcacgacttagcagagggttctgcaggatgtgctattttaaagcagctgggtgcaacttgtgaaaacgggaatctagagcagaacatgtaatcagcgatggc

SEQ ID NO: 715335 - DNA, 120 bp, Artificial Sequence
  ENSG00000197312_72 (sequence is synthesized)
tgggattggtggacaggattgacaggagtatttgaggctctaccaggcctgtctacaggacagcttcatcaaagggacattttttaacctgttattttaaatgccacatatatgttgtaa

SEQ ID NO: 715336 - DNA, 120 bp, Artificial Sequence
  ENSG00000197312_73 (sequence is synthesized)
tgctgaagcatacaggtagaatttctggatcgtaactactagtgacttctgaggtttacagttagaaaatgttctcaaaggtttatcagttatgtattgatgattggtaatctagaccct

SEQ ID NO: 715337 - DNA, 120 bp, Artificial Sequence
  ENSG00000197312_74 (sequence is synthesized)
ctggaggctgtagaatgtgaaaagatacagctgagctgacaagttttagggcactatcttctggaatgaaatcggccaagaaaatggttcaagggcatgggggttagagaatgtttcttt

SEQ ID NO: 715338 - DNA, 120 bp, Artificial Sequence
  ENSG00000197312_75 (sequence is synthesized)
tacctaaaaatgttaagccaactatggaagattggggtcgtgggggcatgaaatacaaaattatgataatttatacagaactaggtttctttatgttctgcaagaaggtttttattagct

SEQ ID NO: 715339 - DNA, 120 bp, Artificial Sequence
  ENSG00000197312_76 (sequence is synthesized)
aatttggggaggggggcatgctgcagtattttttttcctgggaacatgcatttctgatgggaagttattttgtttacaagagttggttttacacacaaccctgaatgaatgtgtctatgg

SEQ ID NO: 715340 - DNA, 120 bp, Artificial Sequence
  ENSG00000197312_77 (sequence is synthesized)
cctaaaaatggtagacctgtatttccttcccgaggcaggctgattcgtttcctgattccttctgtctgagattacctgatgctgaccagacttatttttcctttcctgaatcttcacagc

SEQ ID NO: 715341 - DNA, 120 bp, Artificial Sequence
  ENSG00000197312_78 (sequence is synthesized)
tgagtttatggcacccatccaagaccttcccatttgaatgactagatttctattctatccccgatcatccttttgaaatagttctagtgataaactcagagaaattcaatatattgattg

SEQ ID NO: 715342 - DNA, 120 bp, Artificial Sequence
  ENSG00000197312_79 (sequence is synthesized)
aattttattttttcgctttgtatctacaacagaaattgatttgttcatttttatttcaaatctcttcatggcaagttgggctaatggactttgcactcaagaaaggtttgtttaccagtt

SEQ ID NO: 715343 - DNA, 120 bp, Artificial Sequence
  ENSG00000197312_80 (sequence is synthesized)
ttgtagccatgtttggcaaatcttagcaactagaaaccccgtcctttcttttccttctttatatgttcttgcagttactcttgtattgcaagattttctgactttaagctttgagactac

SEQ ID NO: 715344 - DNA, 120 bp, Artificial Sequence
  ENSG00000197312_81 (sequence is synthesized)
tgcatcttaaaagaagaactaggctgactggcaaaaagtcttgccagtggccctgtcactcccatgatgctttggttttgagagttgggaaaactctgagaacttaagggaaccaaactc

SEQ ID NO: 715345 - DNA, 120 bp, Artificial Sequence
  ENSG00000197312_82 (sequence is synthesized)
aggaatcccaaaattggtggcattgtgccattcgtttaggggctgaacataggacctgtctgaaactgagtgagctagatgcatttgggtttgaatttttgtcacatactgaaatgtaag

SEQ ID NO: 715346 - DNA, 120 bp, Artificial Sequence
  ENSG00000197312_83 (sequence is synthesized)
tcagccctaaataatcaaaacactttattttatttttctttttttaaataggaactttctgaagaaaaagtggtgtgtaaaacatttgatatttaagacaataaagtttttatcataaga

SEQ ID NO: 715347 - DNA, 120 bp, Artificial Sequence
  ENSG00000197312_84 (sequence is synthesized)
cagaggagattgcagaccaagaattagcagaagcccttcaaaaatcagcagaggatgcagattgctgtgtgtattgtgagagaatggaagcaaccaacaaatattttggatgtccaaact

SEQ ID NO: 715348 - DNA, 120 bp, Artificial Sequence
  ENSG00000197312_85 (sequence is synthesized)
acagaaacatccctcaacttggaatctaccagttcctgattttaaagatggcaaaagaacggaaactataaccctgcatgctgtgtggtttgcattgttaacccaagtttgcttgtctgt

SEQ ID NO: 715349 - DNA, 120 bp, Artificial Sequence
  ENSG00000197312_86 (sequence is synthesized)
agccatgatgcatgtagtgtgtgtgtactgcagctggagtgggccccagaccaggtatttatagacaccatgttaagccttccatccagttgtcatctgtgatctgacagtctgtatccg

SEQ ID NO: 715350 - DNA, 120 bp, Artificial Sequence
  ENSG00000197312_87 (sequence is synthesized)
cagcagtttgggaagttagcatttgtcattcaccatttcaccttgttcaatctggttacaactagcctatatgcatttgtattttggcatgcatacatggatatgtaacataaactcctg

SEQ ID NO: 715351 - DNA, 120 bp, Artificial Sequence
  ENSG00000197312_88 (sequence is synthesized)
tttaaaaatggattcgttattagaaccatccaacagggagaaaatcccagttaaaacagtgtctattatatctaccccatcttggctactataaatatcacatcaagaatattggcctca

SEQ ID NO: 715352 - DNA, 120 bp, Artificial Sequence
  ENSG00000197312_89 (sequence is synthesized)
gaacaaaacttagagactccagatttcccagactgcaggttatctgacattggttgggcatctgcttggaggtagcttctctgttttgcagttgagatagtaacctcagtcttttaggtt

SEQ ID NO: 715353 - DNA, 120 bp, Artificial Sequence
  ENSG00000197312_90 (sequence is synthesized)
agtctctcctctttcattttctatgcatttcgatttgacatgacaaagatataggtgcttagtttaatgactttctttctaaaattttaaggaggactccctgactagcagacagagcat

SEQ ID NO: 715354 - DNA, 120 bp, Artificial Sequence
  ENSG00000197312_91 (sequence is synthesized)
cataacacagctttagataaatgacccccggactgagcagaagccaccatctggtgagaccacaaggctggttgcatattacatgggctgatttgactctctttctttagacatattgta

SEQ ID NO: 715355 - DNA, 120 bp, Artificial Sequence
  ENSG00000197312_92 (sequence is synthesized)
taagtcctgattaaatccagggcttaaacatgattggattagagagggctctgcgccgatggaacgttggtagtcctaagtctgttttcctgctgcatttcttgtactggcctcagtgga

SEQ ID NO: 715356 - DNA, 120 bp, Artificial Sequence
  ENSG00000197312_93 (sequence is synthesized)
taaactgaatgctggacatgtttccagctctcagtttctgtaatgcggtggttctcacctggggctatagtaaaatcacatgagaaacttttaaaaatgcagatgcttggactcttctcc

SEQ ID NO: 715357 - DNA, 120 bp, Artificial Sequence
  ENSG00000197312_94 (sequence is synthesized)
caaatctgatgaatcagaattgtcgggcatggagctcaagcaaggacagtgacgctgttccggcctcagtcacactgatagtcacaagcaagattctgttcagtcattctctgaaaaaaa

SEQ ID NO: 715358 - DNA, 120 bp, Artificial Sequence
  ENSG00000197312_95 (sequence is synthesized)
cagcagaaccatcagcaggtagcagagcatagcacctcagagttttggattcgctttggattcagactacagaatacagatcctgactctgccttttccctgccgtgtaaccttgaacaa

SEQ ID NO: 715359 - DNA, 120 bp, Artificial Sequence
  ENSG00000197312_96 (sequence is synthesized)
gtattttaatgtctctaaattggtttcctcttctataagttaggtgccataattaaccccaactcctaaagctgacgtgaggctaatgcatgtaaaatcttagcacacagcaagccctca

SEQ ID NO: 715360 - DNA, 120 bp, Artificial Sequence
  ENSG00000197321_0 (sequence is synthesized)
cactgctctgactgcgtcctccccaggctgaagtgtcctcaggtttcatgtggatttgcccagtaatggatggctccaccgaggccaggttggggaagttcagcctcgaggacactaggg

SEQ ID NO: 715361 - DNA, 120 bp, Artificial Sequence
  ENSG00000197321_1 (sequence is synthesized)
gacgaaaaacttcaaaaagaagactctttttattaatattttggcgttctttttggagaggaacttttgggatgtagcctttacctgtttcctgaatttgacatccaaaaagccttttgg

SEQ ID NO: 715362 - DNA, 120 bp, Artificial Sequence
  ENSG00000197321_2 (sequence is synthesized)
aaaacaccattctaaatttatcctgttctgaatcatcatcgcttctgatagatgcagttgcttgctgacatcgtgatctttgattttgtacaacgctatttgggctaacttttgggattt

SEQ ID NO: 715363 - DNA, 120 bp, Artificial Sequence
  ENSG00000197321_3 (sequence is synthesized)
tactttgtgcttagaatttgaaagtagtattcattggaaagagactccaagaaaatactcgaagacatcaaaagctggattcgagggtataacgtgttttgttttgttttttaaattaga

SEQ ID NO: 715364 - DNA, 120 bp, Artificial Sequence
  ENSG00000197321_4 (sequence is synthesized)
aaaataaggaattgcagtgtgattttctttccccctttaacttagaggaacgaggattatacagaaatttgaaatttcaacaagaaaaacttaagcttccttggattcccacgtcaaagg

SEQ ID NO: 715365 - DNA, 120 bp, Artificial Sequence
  ENSG00000197321_5 (sequence is synthesized)
aaagtttcaagctttcagaaggagttctcactcgaagataaagaacagctcgctaaccacgaaagaggaatcgatgctcagcttttagttgcacttcctaaagttgcagaattaagacaa

SEQ ID NO: 715366 - DNA, 120 bp, Artificial Sequence
  ENSG00000197321_6 (sequence is synthesized)
atctttgaaccaaagaagaaagaattcttagaaatgaaaagaaaagaaagaattgccaggcgcctggaagggattgaaaatgacactcagcccatcctcttgcagagctgcacaggattg

SEQ ID NO: 715367 - DNA, 120 bp, Artificial Sequence
  ENSG00000197321_7 (sequence is synthesized)
gtgactcaccgcctgctggaggaagacacccctcgatacatgagagccagcgaccctgccagcccccacatcggccgatcaaatgaagaggaggaaacttctgattcttctctagaaaag

SEQ ID NO: 715368 - DNA, 120 bp, Artificial Sequence
  ENSG00000197321_8 (sequence is synthesized)
caaactcgatccaaatactgcacagaaacctccggtgtccacggtgactcaccctatggttcgggtaccatggacacccacagtctggagtccaaagccgaaagaattgcaaggtacaaa

SEQ ID NO: 715369 - DNA, 120 bp, Artificial Sequence
  ENSG00000197321_9 (sequence is synthesized)
gcagaaagaaggcgacagctggcagagaagtatgggctgactctggatcccgaggccgactccgagtatttatcccgctataccaagtccaggaaggagcctgatgctgtcgagaagcgg

SEQ ID NO: 715370 - DNA, 120 bp, Artificial Sequence
  ENSG00000197321_10 (sequence is synthesized)
ggaggaaaaagtgacaaacaggaagagtcaagcagagatgctagttctctgtaccccgggaccgagacgatggggctcaggacctgtgccggtgaatccaaggactatgccctccatgtg

SEQ ID NO: 715371 - DNA, 120 bp, Artificial Sequence
  ENSG00000197321_11 (sequence is synthesized)
ggtgacggctcttccgacccggaggtgctgctgaacatagaaaaccaaagacgaggtcaagagctgagtgccacccggcaggcccatgacctgtccccagcagccgagagttcctcgacc

SEQ ID NO: 715372 - DNA, 120 bp, Artificial Sequence
  ENSG00000197321_12 (sequence is synthesized)
ttctctttctctgggcgagactcctccttcactgaagtgccacggtcccccaagcacgcccacagctcctccctgcagcaggcagcctcccggagcccctcctttggtgacccacagcta

SEQ ID NO: 715373 - DNA, 120 bp, Artificial Sequence
  ENSG00000197321_13 (sequence is synthesized)
tcccctgaggcccgacccagtacagggaaacccaaacatgagtggtttctccagaaagattccgaaggggacacaccttcacttatcaactggccttccagagttaaagttagagaaaaa

SEQ ID NO: 715374 - DNA, 120 bp, Artificial Sequence
  ENSG00000197321_14 (sequence is synthesized)
ttggtgaaagaggaaagtgctcgaaacagccctgaactcgcctcagagtccgtaactcagaggagacaccagccagcgccagtccattacgtgtcatttcagtctgagcactcagccttt

SEQ ID NO: 715375 - DNA, 120 bp, Artificial Sequence
  ENSG00000197321_15 (sequence is synthesized)
gatagggtccccagcaaggcagcaggctctacacgacagccaatccgtggctatgtccaacccgcagataccggtcacaccgccaagctagtgacgccagaaaccccagaaaatgcatct

SEQ ID NO: 715376 - DNA, 120 bp, Artificial Sequence
  ENSG00000197321_16 (sequence is synthesized)
gagtgtagctgggtagcatcagccacccagaatgtccccaaacctcccagcttgacggttctagaaggtgacggaagggatagcccagttctccatgtctgcgagtcaaaagcagaagaa

SEQ ID NO: 715377 - DNA, 120 bp, Artificial Sequence
  ENSG00000197321_17 (sequence is synthesized)
gaagaaggggaaggagaaggagaagaaaaagaagaagatgtgtgcttcactgaagctctcgagcaaagcaagaaaaccctactggctttggagggtgatgggctagtgagaagcccagaa

SEQ ID NO: 715378 - DNA, 120 bp, Artificial Sequence
  ENSG00000197321_18 (sequence is synthesized)
gatccctctagaaatgaggactttggtaagcctgctgtgagcacagtcaccttagagcatcagaaggaactggaaaacgtggcacaaccccctcaagctccgcaccagcccactgagagg

SEQ ID NO: 715379 - DNA, 120 bp, Artificial Sequence
  ENSG00000197321_19 (sequence is synthesized)
acaggcaggagcgagatggttctctacattcaaagtgagcctgtgtcccaagacgccaaaccaactggtcacaacagggaagcctcgaaaaagcgcaaggtccgtacccgctctctgtca

SEQ ID NO: 715380 - DNA, 120 bp, Artificial Sequence
  ENSG00000197321_20 (sequence is synthesized)
gatttcacaggcccccctcagctccaggccttgaagtataaggacccagcttccaggagagagctggagctgcccagctccaagaccgaagggccttatggggagatcagcatgctggac

SEQ ID NO: 715381 - DNA, 120 bp, Artificial Sequence
  ENSG00000197321_21 (sequence is synthesized)
acaaaagtctctgtcgcccagctccgaagtgcgttcctggcatctgccaacgcctgcaggagacctgaactcaaatcacgggtggagaggtcggctgaaggacctggcttgcccaccggt

SEQ ID NO: 715382 - DNA, 120 bp, Artificial Sequence
  ENSG00000197321_22 (sequence is synthesized)
gtggaacgggagagagggtcccggaaaccaagacgctatttttctcctggtgaaagtagaaaaacttccgagagatttagaacccaacctataacttcagcagaacgaaaggaatcggat

SEQ ID NO: 715383 - DNA, 120 bp, Artificial Sequence
  ENSG00000197321_23 (sequence is synthesized)
aggtgcacttcacattcagaaacgccaactgtcgatgatgaagaaaaggtggatgaacgagccaagctgagcgtcgccgccaagaggttgcttttcagggagatggaaaaatcttttgat

SEQ ID NO: 715384 - DNA, 120 bp, Artificial Sequence
  ENSG00000197321_24 (sequence is synthesized)
gaacaaaatgttccaaagcgacgctcaagaaacacagctgtggagcagaggctacgccgtctgcaggacaggtccctcacccagcccatcaccactgaagaggtggtcatcgcagccact

SEQ ID NO: 715385 - DNA, 120 bp, Artificial Sequence
  ENSG00000197321_25 (sequence is synthesized)
gaacctatccccgcttcgtgttctgggggcacccaccctgtaatggcgagacttcctagccccactgtagctaggagcgctgtgcagcctgccagattgcaggcctctgctcaccaaaag

SEQ ID NO: 715386 - DNA, 120 bp, Artificial Sequence
  ENSG00000197321_26 (sequence is synthesized)
gccttagccaaggaccagacaaatgagggcaaagagcttgctgagcaaggagaacctgattcctccactctaagcttggccgaaaagttggccttgtttaacaaattgtcccagccagtc

SEQ ID NO: 715387 - DNA, 120 bp, Artificial Sequence
  ENSG00000197321_27 (sequence is synthesized)
tcaaaagcgatttctacccggaacagaatagacacgagacagaggagaatgaacgctcgctatcaaactcagccagtcacactgggagaggtggagcaggtgcagagtggaaagctcatt

SEQ ID NO: 715388 - DNA, 120 bp, Artificial Sequence
  ENSG00000197321_28 (sequence is synthesized)
cctttctcacctgccgtgaacacatcagtgtctaccgtagcatccacggttgctccaatgtatgccggagatcttcgcacaaagccacctcttgaccacaatgcaagtgccactgactat

SEQ ID NO: 715389 - DNA, 120 bp, Artificial Sequence
  ENSG00000197321_29 (sequence is synthesized)
aagttttcttcttcaatagaaaattcggactctccagttagaagcattctgaaatcgcaagcttggcagcctttggtagagggtagcgagaacaagggaatgttgagagaatatggagag

SEQ ID NO: 715390 - DNA, 120 bp, Artificial Sequence
  ENSG00000197321_30 (sequence is synthesized)
acagaaagcaagagagctttgacaggtcgagacagtgggatggagaagtatgggtcctttgaggaagcagaagcatcctaccccatcctgaaccgagccagggaaggagacagccataag

SEQ ID NO: 715391 - DNA, 120 bp, Artificial Sequence
  ENSG00000197321_31 (sequence is synthesized)
aggaagcctggaacgggcgaaccctcccatcacccacctcggggatgaaccgaaggaattttccatggctaaaatgaatgcacaaggaaacttggacttgagggacaggctgccctttga

SEQ ID NO: 715392 - DNA, 120 bp, Artificial Sequence
  ENSG00000197321_32 (sequence is synthesized)
agagaaggtggaggtggagaatgttatgaaaaggaagttttcactaagagcggcagagttcggggagcccacttccgagcagacggggacagctgctgggaaaactattgctcaaaccac

SEQ ID NO: 715393 - DNA, 120 bp, Artificial Sequence
  ENSG00000197321_33 (sequence is synthesized)
agcccccgtgtcctggaagccccaggattcttcggaacagccacaggagaagctctgcaagaatccatgtgcgatgtttgctgctggagagatcaaaacgccgacaggggagggccttct

SEQ ID NO: 715394 - DNA, 120 bp, Artificial Sequence
  ENSG00000197321_34 (sequence is synthesized)
tgactcacccagcaaaaccatgtctattaaagaaagattggcactgttgaagaaaagcggggaggaagattggagaaacagactcagcaggaggcaggagggcggcaaggcgccggccag

SEQ ID NO: 715395 - DNA, 120 bp, Artificial Sequence
  ENSG00000197321_35 (sequence is synthesized)
cagcctgcacacccaggaagcagggcggtccctcatcaagaagcgggtcacagaaagtcgagagagccaaatgacgattgaggagaggaagcagctcatcactgtgagagaggaggcctg

SEQ ID NO: 715396 - DNA, 120 bp, Artificial Sequence
  ENSG00000197321_36 (sequence is synthesized)
gaagacgagaggcagaggagcggccaacgactcgacccagttcactgtggctggcaggatggtgaagaaaggtttggcgtcacctactgccataaccccagtagcctcacccatttgcgg

SEQ ID NO: 715397 - DNA, 120 bp, Artificial Sequence
  ENSG00000197321_37 (sequence is synthesized)
taaaacaagaggcaccacacccgtttccaaacccctggaagatatcgaagccagaccagatatgcagttagaatcggacctgaagttggacaggctggaaacctttctaagaaggctgaa

SEQ ID NO: 715398 - DNA, 120 bp, Artificial Sequence
  ENSG00000197321_38 (sequence is synthesized)
taacaaagttggcgggatgcacgaaacggtgctcactgtcaccggcaaatctgtgaaggaggtgatgaagccagatgatgatgaaacctttgccaaattttaccgcagcgtggattataa

SEQ ID NO: 715399 - DNA, 120 bp, Artificial Sequence
  ENSG00000197321_39 (sequence is synthesized)
tatgccaagaagtcctgtggagatggatgaggacttcgatgtcattttcgatccttatgcacccaaattgacgtcttccgtggccgagcacaagcgggcagttaggcccaagcgccgggt

SEQ ID NO: 715400 - DNA, 120 bp, Artificial Sequence
  ENSG00000197321_40 (sequence is synthesized)
tcaggcctccaaaaaccccctgaaaatgctggcggcaagagaagatctccttcaggaatacactgagcagagattaaacgttgccttcatggagtcaaagcggatgaaagtagaaaagat

SEQ ID NO: 715401 - DNA, 120 bp, Artificial Sequence
  ENSG00000197321_41 (sequence is synthesized)
gtcttccaactccaacttctcagaagtcaccctggcgggtttagccagtaaagaaaacttcagcaacgtcagcctgcggagcgtcaacctgacggaacagaactctaacaacagcgccgt

SEQ ID NO: 715402 - DNA, 120 bp, Artificial Sequence
  ENSG00000197321_42 (sequence is synthesized)
gccctacaagaggctgatgctgttgcagattaaaggaagaagacatgtgcagaccaggctggtggaacctcgagcttcggcgctcaacagtggggactgcttcctcctgctctctcccca

SEQ ID NO: 715403 - DNA, 120 bp, Artificial Sequence
  ENSG00000197321_43 (sequence is synthesized)
ctgctgcttcctgtgggtaggagagtttgcaaacgtcatagaaaaggcgaaggcctcagaacttgcaactttaattcagacaaagagggaacttggttgtagagctacttatatccaaac

SEQ ID NO: 715404 - DNA, 120 bp, Artificial Sequence
  ENSG00000197321_44 (sequence is synthesized)
cattgaagaaggaattaatacacacactcatgcagccaaagacttctggaagcttctgggtggccaaaccagttaccaatctgctggagacccaaaagaagatgaactctatgaagcagc

SEQ ID NO: 715405 - DNA, 120 bp, Artificial Sequence
  ENSG00000197321_45 (sequence is synthesized)
cataatagaaactaactgcatttaccgtctcatggatgacaaacttgttcctgatgacgactactgggggaaaattccgaagtgctcccttctgcaacccaaagaggtactggtgtttga

SEQ ID NO: 715406 - DNA, 120 bp, Artificial Sequence
  ENSG00000197321_46 (sequence is synthesized)
ttttggtagtgaagtttacgtatggcatgggaaagaagtcacattagcacaacgaaaaatagcatttcagctggcaaagcacttatggaatggaacctttgactatgagaactgtgacat

SEQ ID NO: 715407 - DNA, 120 bp, Artificial Sequence
  ENSG00000197321_47 (sequence is synthesized)
caatcccctggatcctggagaatgcaatccgcttatccccagaaaaggacaggggcggcccgactgggcgatatttgggagacttactgaacacaatgagacgattttgttcaaagagaa

SEQ ID NO: 715408 - DNA, 120 bp, Artificial Sequence
  ENSG00000197321_48 (sequence is synthesized)
gtttctggattggacggaactgaagagatcgaatgagaagaaccccggggaacttgcccagcacaaggaagaccccaggactgatgtcaaggcatacgatgtgacacggatggtgtccat

SEQ ID NO: 715409 - DNA, 120 bp, Artificial Sequence
  ENSG00000197321_49 (sequence is synthesized)
gccccagacgacagcaggcaccatcctggacggagtgaacgtcggccgtggctatggcctggtggaaggacacgacaggaggcagtttgagatcaccagcgtttccgtggatgtctggca

SEQ ID NO: 715410 - DNA, 120 bp, Artificial Sequence
  ENSG00000197321_50 (sequence is synthesized)
catcctggaattcgactatagcaggctccccaaacaaagcatcgggcagttccatgagggggatgcctatgtggtcaagtggaagttcatggtgagcacggcagtgggaagtcgccagaa

SEQ ID NO: 715411 - DNA, 120 bp, Artificial Sequence
  ENSG00000197321_51 (sequence is synthesized)
gggagagcactcggtgagggcagccggcaaagagaagtgcgtctacttcttctggcaaggccggcactccaccgtgagtgagaagggcacgtcggcgctgatgacggtggagctggacga

SEQ ID NO: 715412 - DNA, 120 bp, Artificial Sequence
  ENSG00000197321_52 (sequence is synthesized)
ggaaaggggggcccaggtccaggttctccagggaaaggagcccccctgtttcctgcagtgtttccagggggggatggtggtgcactcggggaggcgggaagaggaagaagaaaatgtgca

SEQ ID NO: 715413 - DNA, 120 bp, Artificial Sequence
  ENSG00000197321_53 (sequence is synthesized)
aagtgagtggcggctgtactgcgtgcgtggagaggtgcccgtggaagggaatttgctggaagtggcctgtcactgtagcagcctgaggtccagaacttccatggtggtgcttaacgtcaa

SEQ ID NO: 715414 - DNA, 120 bp, Artificial Sequence
  ENSG00000197321_54 (sequence is synthesized)
caaggccctcatctacctgtggcacggatgcaaagcccaggcccacacgaaggaggtcggaaggaccgctgcgaacaagatcaaggaacaatgtcccctggaagcaggactgcatagtag

SEQ ID NO: 715415 - DNA, 120 bp, Artificial Sequence
  ENSG00000197321_55 (sequence is synthesized)
cagcaaagtcacaatacacgagtgtgatgaaggctccgagccactcggattctgggatgccttaggaaggagagacaggaaagcctacgattgcatgcttcaagatcctggaagttttaa

SEQ ID NO: 715416 - DNA, 120 bp, Artificial Sequence
  ENSG00000197321_56 (sequence is synthesized)
cttcgcgccccgcctgttcatcctcagcagctcctctggggattttgcagccacagagtttgtgtaccctgcccgagccccctctgtggtcagttccatgcccttcctgcaggaagatct

SEQ ID NO: 715417 - DNA, 120 bp, Artificial Sequence
  ENSG00000197321_57 (sequence is synthesized)
gtacagcgcgccccagccagcacttttccttgttgacaatcaccacgaggtgtacctctggcaaggctggtggcccatcgagaacaagatcactggttccgcccgcatccgctgggcctc

SEQ ID NO: 715418 - DNA, 120 bp, Artificial Sequence
  ENSG00000197321_58 (sequence is synthesized)
cgaccggaagagtgcgatggagactgtgctccagtactgcaaaggaaaaaatctcaagaaaccagcccccaagtcttaccttatccacgctggtctggagcccctgacattcaccaatat

SEQ ID NO: 715419 - DNA, 120 bp, Artificial Sequence
  ENSG00000197321_59 (sequence is synthesized)
gtttcccagctgggagcacagagaggacatcgctgagatcacagagatggacacggaagtttccaatcagatcaccctcgtggaagacgtcttagccaagctctgtaaaaccatttaccc

SEQ ID NO: 715420 - DNA, 120 bp, Artificial Sequence
  ENSG00000197321_60 (sequence is synthesized)
gctggccgacctcctggccaggccactcccggagggggtcgatcctctgaagcttgagatctatctcaccgacgaagacttcgagtttgcactagacatgacgagggatgaatacaacgc

SEQ ID NO: 715421 - DNA, 120 bp, Artificial Sequence
  ENSG00000197321_61 (sequence is synthesized)
cctgcccgcctggaagcaggtgaacctgaagaaagcaaaaggcctgttctgagtggggagacgccagaggagcctcacggtcacgtccaacaacaccactgcaccagggaaatggatata

SEQ ID NO: 715422 - DNA, 120 bp, Artificial Sequence
  ENSG00000197321_62 (sequence is synthesized)
tatttttggactggtgtttttcacaaagtatttttcaatcagagttttcagaacctgacattgttaaagatactgcttgtcccggagttgtgtattttgtaaatgttcaagggaactgtt

SEQ ID NO: 715423 - DNA, 120 bp, Artificial Sequence
  ENSG00000197321_63 (sequence is synthesized)
taggcaatgccttttttttttttttttgaagcagttctctttataaagtgttattttgatagtttgtggattctaaaatatatatatatttatataaacaccatataagtcaaatatgta

SEQ ID NO: 715424 - DNA, 120 bp, Artificial Sequence
  ENSG00000197321_64 (sequence is synthesized)
acaaagcaatatgtattcattcactttcaagatttgttttggtgtcaaaataacatgaaaaggtagatggagttgcttctgttgaattagctctgccaccaatatgtatcttcatacacg

SEQ ID NO: 715425 - DNA, 120 bp, Artificial Sequence
  ENSG00000197321_65 (sequence is synthesized)
tttggaaatgtttcctgcagcattaggtatgacttgttctgagtactgcttccggtgctaaaatgaacaaagaatttgtacttaatggcatggactctggagaatctatgcgaatcaacc

SEQ ID NO: 715426 - DNA, 120 bp, Artificial Sequence
  ENSG00000197321_66 (sequence is synthesized)
tttctaccttaatatctccccaaaaatgtatagtgccttgtttttatgtacagtttatatacagaaaagtttgctctgcatttttgatgatggtttggaacattatctacaattttactc

SEQ ID NO: 715427 - DNA, 120 bp, Artificial Sequence
  ENSG00000197321_67 (sequence is synthesized)
tcaaatagtcaaaataaaaacatctcaatttctaataccggttgtaaacagtacacatgtcattttgtgatataggactcccaaataaaagtatcagaataaacacaacaattaactggt

SEQ ID NO: 715428 - DNA, 120 bp, Artificial Sequence
  ENSG00000197321_68 (sequence is synthesized)
ctgtcggcgggaagcggcgatcctgccaccgggaggtgtggaagagccgggtagattctggctacattggagattggttgctttctaaaactgaaggagaagcccatgaagagatggtgg

SEQ ID NO: 715429 - DNA, 120 bp, Artificial Sequence
  ENSG00000197321_69 (sequence is synthesized)
attctcactgagttttgactagcggaagaaaagagagagttcaagtggatggccttgaggacttgaaaagctgagatatgatgattttgaagtcatttcacatcgaagccatgatttaaa

SEQ ID NO: 715430 - DNA, 120 bp, Artificial Sequence
  ENSG00000197321_70 (sequence is synthesized)
ggaagaaggaggagttgcggatgatagtgccatttctaatctgctttgggtaagcctgactctaacacaggtgtcctctcgatggtggccagaattacacttcgcgtgggtaatcctgat

SEQ ID NO: 715431 - DNA, 120 bp, Artificial Sequence
  ENSG00000197321_71 (sequence is synthesized)
cctgggtggttccttcgtgcaccctccctggtgcttttcttatctccagaccagacacagcctttgtccggagtggagagctgagcccgtgcccttaaactattttttaatcatgtaatg

SEQ ID NO: 715432 - DNA, 120 bp, Artificial Sequence
  ENSG00000197321_72 (sequence is synthesized)
aagatactttaaagaagatgatattttctgttaaatgttaaaactgtcaatgaaagtcatggttcctctctctgtaactgacaatcttctataaattaactcatttaattactgcacaaa

SEQ ID NO: 715433 - DNA, 120 bp, Artificial Sequence
  ENSG00000197321_73 (sequence is synthesized)
cctgaggttcacatcaccctattgtgtgagcacgtgcatgctgctgtttgaacccaggcatgaaatacttgaaggtgattgcgatgccctgaccaggctcttctcttccaatactctgcc

SEQ ID NO: 715434 - DNA, 120 bp, Artificial Sequence
  ENSG00000197321_74 (sequence is synthesized)
gcacttgggctgtggtttcctggagatgggagatcgggagctttggtgtacttcttgaaggtttcagaaaaaggccaagacttcttcagaactatttcaacaagaaaaacttaagcttcc

SEQ ID NO: 715435 - DNA, 120 bp, Artificial Sequence
  ENSG00000197321_75 (sequence is synthesized)
aggaaatagatgaaaagtgaagtcggtgcctgcagtctctggggtctctgcgcctggtgttccaaggaggattttgatctggtccctcatcagactctgttgttgctcttagggttggat

SEQ ID NO: 715436 - DNA, 120 bp, Artificial Sequence
  ENSG00000197321_76 (sequence is synthesized)
ccactttttgtaagatgatcctggagaaaatgttgtatctgcaaataggaaatccacatgacaagtgcagatggccaatgggtggctttgaaaggtttccacctaaccaatcaaggcact

SEQ ID NO: 715437 - DNA, 120 bp, Artificial Sequence
  ENSG00000197321_77 (sequence is synthesized)
agccttcagagtcagtcctgttcattagctgcggagttaacggcctctgtgctaatgaactcctctgatgtctcttctcttaagcatccttctagtttggcgtcacctactgccataacc

SEQ ID NO: 715438 - DNA, 120 bp, Artificial Sequence
  ENSG00000197321_78 (sequence is synthesized)
gctctgcaggagcgcgcggagattctggctacattggagattggttgctttctaaaactgaaggagaagcccatgaagagatggtggattctcactgagttttgactagcggaagaaaag

SEQ ID NO: 715439 - DNA, 120 bp, Artificial Sequence
  ENSG00000197323_0 (sequence is synthesized)
gctgccgctcttgctgcggctgcggctggggctgggggcggcggcggcggcgacgcgggcggcgggcggcgcggggcggtccggcgggttcaaagaggaaaacatggcggaaaacaaagg

SEQ ID NO: 715440 - DNA, 120 bp, Artificial Sequence
  ENSG00000197323_1 (sequence is synthesized)
aagaggaaaacatggcggaaaacaaaggcggcggcgaggctgagagcggcggcgggggcagcggcagcgcgccggtaactgccggggccgccgggcccgccgcgcaggaggcggagccgc

SEQ ID NO: 715441 - DNA, 80 bp, Artificial Sequence
  ENSG00000197323_2 (sequence is synthesized)
caccgcggtgctggtggaggaggaggaggaggaaggcggcagggccggcgctgagggcggcgcggccgggcccgacgacg

SEQ ID NO: 715442 - DNA, 120 bp, Artificial Sequence
  ENSG00000197323_3 (sequence is synthesized)
ttcatctcctgcggcctcagtgggcactggagttgccgggggcgcagtatcgacgccggctccagctccagcctcggctcccgctccgggtccctcggcagggccgcctcctggaccgcc

SEQ ID NO: 715443 - DNA, 120 bp, Artificial Sequence
  ENSG00000197323_4 (sequence is synthesized)
agcctcgctcctggacacctgcgccgtgtgtcagcagagcttgcagagccggcgtgaggcggagcccaagctgctgccctgtcttcactccttctgcctgcgctgcctgcccgagccgga

SEQ ID NO: 715444 - DNA, 120 bp, Artificial Sequence
  ENSG00000197323_5 (sequence is synthesized)
gcgccagctcagcgtgcccatcccggggggcagcaacggcgacatccagcaagttggtgtaatacggtgcccagtatgccgccaagaatgcagacagatagaccttgtggataattattt

SEQ ID NO: 715445 - DNA, 120 bp, Artificial Sequence
  ENSG00000197323_6 (sequence is synthesized)
tgtgaaagacacatctgaagctcctagcagttctgatgaaaaatcagaacaggtatgtactagttgtgaagacaatgcaagtgcagttggcttttgtgtagaatgtggagagtggctatg

SEQ ID NO: 715446 - DNA, 120 bp, Artificial Sequence
  ENSG00000197323_7 (sequence is synthesized)
taagacatgtatcgaagcacatcaaagagtaaaatttactaaagatcacttgatcaggaagaaagaagatgtctcagagtctgttggagcatctggtcaacgccctgttttctgccctgt

SEQ ID NO: 715447 - DNA, 120 bp, Artificial Sequence
  ENSG00000197323_8 (sequence is synthesized)
acacaaacaagaacagttgaaacttttctgtgaaacatgtgatagattgacatgtagagactgtcagctattggaacacaaagaacataggtatcagtttttggaagaagcttttcaaaa

SEQ ID NO: 715448 - DNA, 120 bp, Artificial Sequence
  ENSG00000197323_9 (sequence is synthesized)
tcagaagggtgcaattgagaatctactggcgaaacttcttgagaagaagaattatgttcattttgcagctactcaggtgcagaataggataaaagaagtaaatgagactaacaaacgagt

SEQ ID NO: 715449 - DNA, 120 bp, Artificial Sequence
  ENSG00000197323_10 (sequence is synthesized)
agaacaggaaattaaagtggccattttcacccttatcaatgaaattaataagaaaggaaaatctctcttacaacagctagagaatgttacaaaggaaagacagatgaagttactacagca

SEQ ID NO: 715450 - DNA, 120 bp, Artificial Sequence
  ENSG00000197323_11 (sequence is synthesized)
gcagaatgacatcacaggcctttcccggcaggtgaagcatgttatgaacttcacaaattgggcaattgcaagtggcagcagcacagcactactatacagcaagcgactgattactttcca

SEQ ID NO: 715451 - DNA, 120 bp, Artificial Sequence
  ENSG00000197323_12 (sequence is synthesized)
gttgcgtcatattttgaaagcacggtgtgatcctgtccctgctgctaatggagcaatacgtttccattgtgatcccaccttctgggcaaagaatgtagtcaatttaggtaatctagtaat

SEQ ID NO: 715452 - DNA, 120 bp, Artificial Sequence
  ENSG00000197323_13 (sequence is synthesized)
agagagtaaaccagctcctggttatactcctaatgttgtagttgggcaagttcctccagggacaaaccacattagtaaaacccctggacagattaacttagcacagcttcgactccagca

SEQ ID NO: 715453 - DNA, 120 bp, Artificial Sequence
  ENSG00000197323_14 (sequence is synthesized)
catgcaacaacaagtatatgcacagaaacatcagcagttgcaacagatgaggatgcagcaaccaccagcacctgtaccaactacaacaacaacaacacaacagcatcctagacaagcagc

SEQ ID NO: 715454 - DNA, 120 bp, Artificial Sequence
  ENSG00000197323_15 (sequence is synthesized)
ccctcagatgttacaacaacagcctcctcgattgatcagtgtgcaaacaatgcaaagaggcaacatgaactgtggagcttttcaagcccatcagatgagactggctcagaatgctgccag

SEQ ID NO: 715455 - DNA, 120 bp, Artificial Sequence
  ENSG00000197323_16 (sequence is synthesized)
aataccagggatacccaggcacagcggccctcaatattccatgatgcagccacacctccaaagacaacactcaaacccagggcatgctggaccctttcccgtagtatcggtacacaacac

SEQ ID NO: 715456 - DNA, 120 bp, Artificial Sequence
  ENSG00000197323_17 (sequence is synthesized)
cacaatcaacccaacgagccctactacagcaactatggcaaatgcaaaccgaggtcccaccagcccatctgttacagcaatagagctaatcccctcagttaccaatccagaaaaccttcc

SEQ ID NO: 715457 - DNA, 120 bp, Artificial Sequence
  ENSG00000197323_18 (sequence is synthesized)
atcgctgccagatattccacccatacagttggaagatgctggctcaagtagtttagataatctactaagtagatacatctcaggcagtcacctacccccacagcctacaagcaccatgaa

SEQ ID NO: 715458 - DNA, 120 bp, Artificial Sequence
  ENSG00000197323_19 (sequence is synthesized)
tccttctccaggtccctctgccctttctccgggatcatcaggtttatccaattctcacacacctgtgagacccccaagtacttctagtactggcagtcgaggcagctgtgggtcatcagg

SEQ ID NO: 715459 - DNA, 120 bp, Artificial Sequence
  ENSG00000197323_20 (sequence is synthesized)
aagaactgctgagaagacaagtcttagtttcaaatctgatcaggtgaaggtcaagcaagaacctgggactgaagatgaaatatgtagcttttcaggaggtgtaaaacaagaaaaaacaga

SEQ ID NO: 715460 - DNA, 120 bp, Artificial Sequence
  ENSG00000197323_21 (sequence is synthesized)
ggatggcaggaggagtgcttgcatgttgagcagtcctgagagtagcttgacaccacctctctcaaccaacctgcatctagaaagtgaattggatgcattggcaagcctggaaaaccatgt

SEQ ID NO: 715461 - DNA, 120 bp, Artificial Sequence
  ENSG00000197323_22 (sequence is synthesized)
gaaaattgaacctgcagatatgaatgaaagctgcaaacagtcagggctcagcagccttgttaatggaaagtccccaattcgaagcctcatgcacaggtcggcaaggattggaggagatgg

SEQ ID NO: 715462 - DNA, 120 bp, Artificial Sequence
  ENSG00000197323_23 (sequence is synthesized)
caacaataaagatgatgacccaaatgaagactggtgtgctgtctgccaaaacggaggagatctcttgtgctgcgaaaaatgtccaaaggtctttcatctaacttgtcatgttccaacact

SEQ ID NO: 715463 - DNA, 120 bp, Artificial Sequence
  ENSG00000197323_24 (sequence is synthesized)
acttagctttccaagtggggactggatatgcacattttgtagagatattggaaagccagaagttgaatatgattgtgataatttgcaacatagtaagaaggggaaaactgcgcaggggtt

SEQ ID NO: 715464 - DNA, 120 bp, Artificial Sequence
  ENSG00000197323_25 (sequence is synthesized)
aagccccgtggaccaaaggaaatgtgaacgtcttctgctttacctctattgccatgaattaagtattgaattccaggagcctgttcctgcttcgataccaaactactataaaattataaa

SEQ ID NO: 715465 - DNA, 120 bp, Artificial Sequence
  ENSG00000197323_26 (sequence is synthesized)
gaaaccaatggatttatccaccgtgaaaaagaagcttcagaaaaaacattcccaacactaccaaatcccggatgactttgtggccgatgtccgtttgatcttcaagaactgtgaaaggtt

SEQ ID NO: 715466 - DNA, 120 bp, Artificial Sequence
  ENSG00000197323_27 (sequence is synthesized)
taatgaaatgatgaaagttgttcaagtttatgcagacacacaagagattaatttgaaggctgattcagaagtagctcaggcagggaaagcagttgcattgtactttgaagataaactcac

SEQ ID NO: 715467 - DNA, 120 bp, Artificial Sequence
  ENSG00000197323_28 (sequence is synthesized)
agagatctactcagacaggaccttcgcacctttgccagagtttgagcaggaagaggatgatggtgaggtaactgaggactctgatgaagactttatacagccccgcagaaaacgcctaaa

SEQ ID NO: 715468 - DNA, 120 bp, Artificial Sequence
  ENSG00000197323_29 (sequence is synthesized)
tgaagactttatacagccccgcagaaaacgcctaaagtcagatgagagaccagtacatataaagtaaaatgacatggatttaaatcaattgtttaaaaaaaaaaaaacgaaaaaaaaaaa

SEQ ID NO: 715469 - DNA, 120 bp, Artificial Sequence
  ENSG00000197323_30 (sequence is synthesized)
ctggaatatcctgcctacagtgggcacctccttgaagaagctgatagcttttacacagtattagattgaaataatggacagaaacacattcttgtcaagaaagggggagagaagtctgtt

SEQ ID NO: 715470 - DNA, 120 bp, Artificial Sequence
  ENSG00000197323_31 (sequence is synthesized)
tgcaagtttcaaagcaaaaagcaaaagtgaaatgatttgaggatttctgttctaatggagatgattctctgattgttagaaatggcaaatattgatgattgtgtgctattgattggtgca

SEQ ID NO: 715471 - DNA, 120 bp, Artificial Sequence
  ENSG00000197323_32 (sequence is synthesized)
ggatacttggtatacgagtaaatacttgagactcgtgtcacttgataaattttctttttggactaggtcgcacagttattaaaacaacttttaaccctcccccttcacacacatacatat

SEQ ID NO: 715472 - DNA, 120 bp, Artificial Sequence
  ENSG00000197323_33 (sequence is synthesized)
caggttgttttctagttaaaaacccaagtagctcagattctactttaatgtcagtgcagatttgcattgaatcatgccattatgttttttctcatttttatgctgttgggtcttagtttt

SEQ ID NO: 715473 - DNA, 120 bp, Artificial Sequence
  ENSG00000197323_34 (sequence is synthesized)
cttcaatggtctactgaaacaaaaatggtaacttttcattagtggattatttagagttatagtagttgtttccagaaaacacttcctcacaattgtacttcccaatcaaatcatgtgatc

SEQ ID NO: 715474 - DNA, 120 bp, Artificial Sequence
  ENSG00000197323_35 (sequence is synthesized)
atacagttattcccatgaaaggcagaatgtttgtttcaaaattaatctagttttctgtacatttaaatttgagaaggtgacaactggctcttttccagtcttccttcatgtcagttttct

SEQ ID NO: 715475 - DNA, 120 bp, Artificial Sequence
  ENSG00000197323_36 (sequence is synthesized)
gatagaccactattggcaaacagtatctgtcaactaccaaatgtgtaaaattttctgtatttcactttgtcttatttgtaaatagtgaactaaaacttttggcagatcagcaacatttgc

SEQ ID NO: 715476 - DNA, 120 bp, Artificial Sequence
  ENSG00000197323_37 (sequence is synthesized)
tgagcctgttttttaagctaatgtgtattcttactaatgttcctatcaagaatggatttgtaatatatgctgtctatttctaatgttcacattcatattttgaggttctatcttatttta

SEQ ID NO: 715477 - DNA, 120 bp, Artificial Sequence
  ENSG00000197323_38 (sequence is synthesized)
atagagaacagacttctcaaaaaatcttcagaagcagcttattattgaaatatcgaaatattgaaataaacccggtggggttagattactcatctgtccaccaagtgggacatttgcatg

SEQ ID NO: 715478 - DNA, 120 bp, Artificial Sequence
  ENSG00000197323_39 (sequence is synthesized)
gactgggggcttaaaggacttagaagagacctgtaagtaaatcctgaaaatgagccaatccccacttgaatggttactggagtaaacccacctttaccaccccaattacagcacccgagg

SEQ ID NO: 715479 - DNA, 120 bp, Artificial Sequence
  ENSG00000197323_40 (sequence is synthesized)
ccgataaaccaacttggctctggttcatttttcttttcttcatttgtgatgctcagattcaaaatgtgtgttctacactgttacaggcttctcttttgtttgattaaagattttagtcct

SEQ ID NO: 715480 - DNA, 120 bp, Artificial Sequence
  ENSG00000197323_41 (sequence is synthesized)
acttttgtatggacacattagaatattcagagaccaaaatagaagaatttgctgttagatatttttcagaagtcagcagatttgtggcaaatcatttatttgcctttttaaaaattcatt

SEQ ID NO: 715481 - DNA, 120 bp, Artificial Sequence
  ENSG00000197323_42 (sequence is synthesized)
taagcagttcagagagtagactactcagaaaattatttcacgtaattgtctaagaggtcaatattttttaatgcatattgaatcaaataaagtgctctaaagaaattattatacaaattc

SEQ ID NO: 715482 - DNA, 120 bp, Artificial Sequence
  ENSG00000197323_43 (sequence is synthesized)
ctttgggttgtttttcttttcttaacaaggggtgggggtaaacaggaatatgattcaggctttctggttgtgtatttaaagagtattgattttattattactattgatttactttattcc

SEQ ID NO: 715483 - DNA, 120 bp, Artificial Sequence
  ENSG00000197323_44 (sequence is synthesized)
tggcttccttttcacttttctttcaatttttaaaaaataatttaagccgttgaaaatataccaaactgttgaaacattttactcaaattttaaattcctaaaaatgttttttaataagag

SEQ ID NO: 715484 - DNA, 120 bp, Artificial Sequence
  ENSG00000197323_45 (sequence is synthesized)
ggagaaaattatttaaaaatacttatgcctatgccaatttccctcttttttcacaaaatccatgatttcagtttgtaagtagacatatatctaagggcacatttttggaaagtgaggaat

SEQ ID NO: 715485 - DNA, 120 bp, Artificial Sequence
  ENSG00000197323_46 (sequence is synthesized)
agcagcagtataacttcattttgtcaggcctttgagttctaatattttgtattgctcttcaaatggatccttttaaaaaaattgtagataatgagtcataaatagattctgccaactgag

SEQ ID NO: 715486 - DNA, 120 bp, Artificial Sequence
  ENSG00000197323_47 (sequence is synthesized)
gggagaaacattttaagtaaatatttttcagtatttggggccttaaaaaataattgtgtttccttaaaattacatgttagatagagtttttaggtttttttggttttaagattggttaaa

SEQ ID NO: 715487 - DNA, 120 bp, Artificial Sequence
  ENSG00000197323_48 (sequence is synthesized)
gcaatttaaaagccacttttttgtcaacatttaatagcctccacttctgttaagataatgtatactgctgaggaattactattaatagctatcaacataccaccattaaattaaggtatt

SEQ ID NO: 715488 - DNA, 120 bp, Artificial Sequence
  ENSG00000197323_49 (sequence is synthesized)
cactttagattttttattaaagcttttttcttgcacactgatcgttgtgtttctaagctgattttttcagctctaatatacctatggttaaaaagtataaaaacttaaattgatatttag

SEQ ID NO: 715489 - DNA, 120 bp, Artificial Sequence
  ENSG00000197323_50 (sequence is synthesized)
atatatgttttcctattagtttatgttttaaaaagacaaaattgtatctgtcagtccctgaaggcagtttgtttttatactctctcacatttgtatttgttttttaaatggcagtatttt

SEQ ID NO: 715490 - DNA, 120 bp, Artificial Sequence
  ENSG00000197323_51 (sequence is synthesized)
agaagatttggagaaaagtccacataataatgttttcttaaaagcttttaaagtttttgctgtacttcaatttacttcttccatcagaaaactaagaacaaagtgttgctcagtctgttc

SEQ ID NO: 715491 - DNA, 120 bp, Artificial Sequence
  ENSG00000197323_52 (sequence is synthesized)
cgctgacctaaatttgtgttttcagcacttggctcagccaattcactgagtgaaggaattgctttatgaggcaaagcatgtgaaagttctaaagtatggttagattgtaggtcgtgctct

SEQ ID NO: 715492 - DNA, 120 bp, Artificial Sequence
  ENSG00000197323_53 (sequence is synthesized)
atatggaaacatcaaaccattactacagagaaatgataaggcattggatccactattgaaattattatttttggatcaacaagttggtactttctgacttctgtatcttaacataaggga

SEQ ID NO: 715493 - DNA, 120 bp, Artificial Sequence
  ENSG00000197323_54 (sequence is synthesized)
attttaggtaatgctaagtcagttgtctcattttttgtgataagttttggaatttttagttaattgaaataaataatgcttttaaatagaagtaaaaggtttataagtgtgcaaattgta

SEQ ID NO: 715494 - DNA, 120 bp, Artificial Sequence
  ENSG00000197323_55 (sequence is synthesized)
gatttatcaattacctcagcaggtatcctgccatgtaattattagtgattagtgttaataagataatagattcaggtcttccaactatgcccttggattgtggcctactgtatgttatta

SEQ ID NO: 715495 - DNA, 120 bp, Artificial Sequence
  ENSG00000197323_56 (sequence is synthesized)
aatggtctcttactatccaaaatgggagtagatgctgtggccccgtctcccttggcttttacgtcccatatccacccccattcatgtacaacatgtgaaatataaaaatctcatttcttg

SEQ ID NO: 715496 - DNA, 120 bp, Artificial Sequence
  ENSG00000197323_57 (sequence is synthesized)
tcaaaatcagcactgcttatttgcatactcagcatcggatcagtgagtagttttataaaaaatccacgcacccaactcccttagttaaaacagattcttaattcataccatgaattctta

SEQ ID NO: 715497 - DNA, 120 bp, Artificial Sequence
  ENSG00000197323_58 (sequence is synthesized)
atttctgtaccatctatgttaatgatctgctgaaggtgactcaagattttcaaggtgtaatacagtttgatcatgtaccggacctggatatttaattttttttccctcacagttaatctc

SEQ ID NO: 715498 - DNA, 120 bp, Artificial Sequence
  ENSG00000197323_59 (sequence is synthesized)
ctccttgataaagcaataacactgctttgagtctgttgcctaatagcatgtcagaatcctctcctggatggtgattttataggaaagtttgtatgcatatcacccagtctatcttttaaa

SEQ ID NO: 715499 - DNA, 120 bp, Artificial Sequence
  ENSG00000197323_60 (sequence is synthesized)
aattaagaaatttaaatgtatgctggaagtaatgacactatattgtggcattttattttaaaaattggggaaagttgcatatttttttaaaagtaagtgtttgagtaaaaaaattgaagg

SEQ ID NO: 715500 - DNA, 120 bp, Artificial Sequence
  ENSG00000197323_61 (sequence is synthesized)
tacttttttaaggaaaaaaatttatatgccacagtttacatagacatttcagattcaacacgtactcttgaatataatggtttcttttacttggtcaaaatgcatgtatagcatttcttt

SEQ ID NO: 715501 - DNA, 120 bp, Artificial Sequence
  ENSG00000197323_62 (sequence is synthesized)
catcttagttccttgtgtttgcctatgtggtcctttatatattttttattgtatcgaagaaacaaaactatcttcaaaaataagttaatttggatatatttgtcatatcaaactacaaag

SEQ ID NO: 715502 - DNA, 120 bp, Artificial Sequence
  ENSG00000197323_63 (sequence is synthesized)
tgtacaaagttaagtttagcccttttctagaaagtgatctttaaaattaaaaatgctcctcttttaaattcaccaaatttatgtgtgggaaggcaccaaaatgattttgtaagtgccact

SEQ ID NO: 715503 - DNA, 120 bp, Artificial Sequence
  ENSG00000197323_64 (sequence is synthesized)
gcaatattccctttcaagtgtggcctaaatttcaatcttaaggatggaatgcatgtctgctccttgttctgaaaaatgtaggcatctactacattttaaaacacagtgaaacatatacat

SEQ ID NO: 715504 - DNA, 120 bp, Artificial Sequence
  ENSG00000197323_65 (sequence is synthesized)
aagcctataaaaaaagatttgtgcaatttgaaagcctgttaattttttatgtagacatacctacacacgaaagggttaaattcacagccttactagttccttgcttccagtatttcaatt

SEQ ID NO: 715505 - DNA, 120 bp, Artificial Sequence
  ENSG00000197323_66 (sequence is synthesized)
ggtctcctcccctcattattattattactactagtactattatttttgcacatagttaactgcccttcaatatgattcttaaaaagtgctgtttctgtggtatcgtattctctaaataat

SEQ ID NO: 715506 - DNA, 120 bp, Artificial Sequence
  ENSG00000197323_67 (sequence is synthesized)
catatttaattttttaaaacaaggttgcagtttctaattgtttcgttcctgtgtttttgctggtgtgtaataaaagcaagttttttcttttcatggttatttaatacattagctgcctgt

SEQ ID NO: 715507 - DNA, 120 bp, Artificial Sequence
  ENSG00000197323_68 (sequence is synthesized)
aaataattcttgttataatgctctggaatgtgttgtagaagttgtattagattagttttaaacccttgtttgaaagccacattgttttggttatttctattaaattagaaaattgaaaaa

SEQ ID NO: 715508 - DNA, 120 bp, Artificial Sequence
  ENSG00000197323_69 (sequence is synthesized)
tctataaaacagggagcctgttattcttttggtattagcttccagagaaactaacaataaaatatctaagatctaagtagtacattaatgttaaagagtagatttcatctcctggccttt

SEQ ID NO: 715509 - DNA, 120 bp, Artificial Sequence
  ENSG00000197323_70 (sequence is synthesized)
agtttatattcagtataaggaaaatagataaaactctaaattaatagggggctaaggttacaaaacctgcagtctggttctaattctgtagtaagcttgagcaattcactaattatcagg

SEQ ID NO: 715510 - DNA, 120 bp, Artificial Sequence
  ENSG00000197323_71 (sequence is synthesized)
gtggtaggttttggtttagcagagctgtagttcttcccttccatttattattttatgttcatgcaacctcttgtctcttgatttcagagaccataaaatagtagagtcatacttgttttt

SEQ ID NO: 715511 - DNA, 120 bp, Artificial Sequence
  ENSG00000197323_72 (sequence is synthesized)
ttcagtcttctccttcctctcttgtcccccaatttctttttggtgaaagtaagtcagtattcttggggtaaacccagcttttttcttgctataaattgaaaaaaaaaaaaaaaaaagata

SEQ ID NO: 715512 - DNA, 120 bp, Artificial Sequence
  ENSG00000197323_73 (sequence is synthesized)
tatcttctcaaattcctgagaagcagtaactttaattgaataatagtgccctctttgaaagtgttaaccttttggattagaaaactagtagatatttaaacagtgccagaatatttttct

SEQ ID NO: 715513 - DNA, 120 bp, Artificial Sequence
  ENSG00000197323_74 (sequence is synthesized)
gaagaattgtaatttcttacctaagtctttggagatagagttatttgctagagatgtaataagggccttctttttctttactcttatttagaaaagaaaagcattggcactttgatcttg

SEQ ID NO: 715514 - DNA, 120 bp, Artificial Sequence
  ENSG00000197323_75 (sequence is synthesized)
aaattaagaattttcttttctttgggtagtaatatttactggaatgtcagaattttgccactgaatgccttctttcaatagcaaatgctttgaaagggttgtaaaatgttggcgtaaatt

SEQ ID NO: 715515 - DNA, 80 bp, Artificial Sequence
  ENSG00000197324_0 (sequence is synthesized)
ccgcctgggcaagggccggggcgccgggccgagccacctcttcccctcccccgcttccctgtcgcgctccgctggctgga

SEQ ID NO: 715516 - DNA, 120 bp, Artificial Sequence
  ENSG00000197324_1 (sequence is synthesized)
cgcgctggaggagtggagcagcacccggccggccctgggggctgacagtcggcaaagtttggcccgaagaggaagtggtctcaaaccccggcaggtggcgaccaggccagaccaggggcg

SEQ ID NO: 715517 - DNA, 120 bp, Artificial Sequence
  ENSG00000197324_2 (sequence is synthesized)
ctcgctgcctgcgggcgggctgtaggcgagggcgcgccccagtgccgagacccggggcttcaggagccggccccgggagagaagagtgcggcggcggacggagaaaacaactccaaagtt

SEQ ID NO: 715518 - DNA, 120 bp, Artificial Sequence
  ENSG00000197324_3 (sequence is synthesized)
agttggcgaaaggcaccgcccctactcccgggctgccgccgcctccccgcccccagccctggcatccagagtacgggtcgagcccgggccatggagcccccctggggaggcggcaccagg

SEQ ID NO: 715519 - DNA, 120 bp, Artificial Sequence
  ENSG00000197324_4 (sequence is synthesized)
ctgggcgcccggggctccgccgcgaccccatcgggtagaccacagaagctccgggacccttccggcacctctggacagcccaggatgctgttggccaccctcctcctcctcctccttgga

SEQ ID NO: 715520 - DNA, 120 bp, Artificial Sequence
  ENSG00000197324_5 (sequence is synthesized)
ggcgctctggcccatccagaccggattatttttccaaatcatgcttgtgaggaccccccagcagtgctcttagaagtgcagggcaccttacagaggcccctggtccgggacagccgcacc

SEQ ID NO: 715521 - DNA, 120 bp, Artificial Sequence
  ENSG00000197324_6 (sequence is synthesized)
tcccctgccaactgcacctggctcatcctgggcagcaaggaacagactgtcaccatcaggttccagaagctacacctggcctgtggctcagagcgcttaaccctacgctcccctctccag

SEQ ID NO: 715522 - DNA, 120 bp, Artificial Sequence
  ENSG00000197324_7 (sequence is synthesized)
ccactgatctccctgtgtgaggcacctcccagccctctgcagctgcccgggggcaacgtcaccatcacttacagctatgctggggccagagcacccatgggccagggcttcctgctctcc

SEQ ID NO: 715523 - DNA, 120 bp, Artificial Sequence
  ENSG00000197324_8 (sequence is synthesized)
tacagccaagattggctgatgtgcctgcaggaagagtttcagtgcctgaaccaccgctgtgtatctgctgtccagcgctgtgatggggttgatgcctgtggcgatggctctgatgaagca

SEQ ID NO: 715524 - DNA, 120 bp, Artificial Sequence
  ENSG00000197324_9 (sequence is synthesized)
ggttgcagctcagaccccttccctggcctgaccccaagacccgtcccctccctgccttgcaatgtcaccttggaggacttctatggggtcttctcctctcctggatatacacacctagcc

SEQ ID NO: 715525 - DNA, 120 bp, Artificial Sequence
  ENSG00000197324_10 (sequence is synthesized)
tcagtctcccacccccagtcctgccattggctgctggacccccatgatggccggcggctggccgtgcgcttcacagccctggacttgggctttggagatgcagtgcatgtgtatgacggc

SEQ ID NO: 715526 - DNA, 120 bp, Artificial Sequence
  ENSG00000197324_11 (sequence is synthesized)
cctgggccccctgagagctcccgactactgcgtagtctcacccacttcagcaatggcaaggctgtcactgtggagacactgtctggccaggctgttgtgtcctaccacacagttgcttgg

SEQ ID NO: 715527 - DNA, 120 bp, Artificial Sequence
  ENSG00000197324_12 (sequence is synthesized)
agcaatggtcgtggcttcaatgccacctaccatgtgcggggctattgcttgccttgggacagaccctgtggcttaggctctggcctgggagctggcgaaggcctaggtgagcgctgctac

SEQ ID NO: 715528 - DNA, 120 bp, Artificial Sequence
  ENSG00000197324_13 (sequence is synthesized)
agtgaggcacagcgctgtgacggctcatgggactgtgctgacggcacagatgaggaggactgcccaggctgcccacctggacacttcccctgtggggctgctggcacctctggtgccaca

SEQ ID NO: 715529 - DNA, 120 bp, Artificial Sequence
  ENSG00000197324_14 (sequence is synthesized)
gcctgctacctgcctgctgaccgctgcaactaccagactttctgtgctgatggagcagatgagagacgctgtcggcattgccagcctggcaatttccgatgccgggacgagaagtgcgtg

SEQ ID NO: 715530 - DNA, 120 bp, Artificial Sequence
  ENSG00000197324_15 (sequence is synthesized)
tatgagacgtgggtgtgcgatgggcagccagactgtgcggacggcagtgatgagtgggactgctcctatgttctgccccgcaaggtcattacagctgcagtcattggcagcctagtgtgc

SEQ ID NO: 715531 - DNA, 120 bp, Artificial Sequence
  ENSG00000197324_16 (sequence is synthesized)
ggcctgctcctggtcatcgccctgggctgcacctgcaagctctatgccattcgcacccaggagtacagcatctttgcccccctctcccggatggaggctgagattgtgcagcagcaggca

SEQ ID NO: 715532 - DNA, 120 bp, Artificial Sequence
  ENSG00000197324_17 (sequence is synthesized)
cccccttcctacgggcagctcattgcccagggtgccatcccacctgtagaagactttcctacagagaatcctaatgataactcagtgctgggcaacctgcgttctctgctacagatctta

SEQ ID NO: 715533 - DNA, 120 bp, Artificial Sequence
  ENSG00000197324_18 (sequence is synthesized)
cgccaggatatgactccaggaggtggcccaggtgcccgccgtcgtcagcggggccgcttgatgcgacgcctggtacgccgtctccgccgctggggcttgctccctcgaaccaacaccccg

SEQ ID NO: 715534 - DNA, 120 bp, Artificial Sequence
  ENSG00000197324_19 (sequence is synthesized)
gctcgggcctctgaggccagatcccaggtcacaccttctgctgctccccttgaggccctagatggtggcacaggtccagcccgtgagggcggggcagtgggtgggcaagatggggagcag

SEQ ID NO: 715535 - DNA, 120 bp, Artificial Sequence
  ENSG00000197324_20 (sequence is synthesized)
gcacccccactgcccatcaaggctcccctcccatctgctagcacgtctccagcccccactactgtccctgaagccccagggccactgccctcactgcccctagagccatcactattgtct

SEQ ID NO: 715536 - DNA, 120 bp, Artificial Sequence
  ENSG00000197324_21 (sequence is synthesized)
ggagtggtgcaggccctgcgaggccgcctgttgcccagcctggggcccccaggaccaacccggagcccccctggaccccacacagcagtcctggccctggaagatgaggacgatgtgcta

SEQ ID NO: 715537 - DNA, 120 bp, Artificial Sequence
  ENSG00000197324_22 (sequence is synthesized)
ctggtgccactggctgagccgggggtgtgggtagctgaggcagaggatgagccactgcttacctgaggggacctgggggctctactgaggcctctcccctgggggctctactcatagtgg

SEQ ID NO: 715538 - DNA, 120 bp, Artificial Sequence
  ENSG00000197324_23 (sequence is synthesized)
cacaaccttttagaggtgggtcagcctcccctccaccacttccttccctgtccctggatttcagggacttggtgggcctcccgttgaccctatgtagctgctataaagttaagtgtccct

SEQ ID NO: 715539 - DNA, 120 bp, Artificial Sequence
  ENSG00000197324_24 (sequence is synthesized)
caggcagggagagggctcacagagtctcctctgtacgtggccatggccagacaccccagtcccttcaccaccacctgctccccacgccaccaccatttgggtggctgtttttaaaaagta

SEQ ID NO: 715540 - DNA, 120 bp, Artificial Sequence
  ENSG00000197324_25 (sequence is synthesized)
aagttcttagaggatcataggtctggacactccatccttgccaaacctctacccaaaagtggccttaagcaccggaatgccaattaactagagaccctccagcccccaaggggaggattt

SEQ ID NO: 715541 - DNA, 120 bp, Artificial Sequence
  ENSG00000197324_26 (sequence is synthesized)
gggcagaacctgaggttttgccatccacaatccctcctacagggcctggctcacaaaaagagtgcaacaaatgcttctattccatagctacggcattgctcagtaagttgaggtcaaaaa

SEQ ID NO: 715542 - DNA, 120 bp, Artificial Sequence
  ENSG00000197324_27 (sequence is synthesized)
taaaggaatcatacatctcaaaattttgcaaattagctgcgagcctgagccccgcctctgcccatctcagtctatgctcacctcatcccactcctccctgtggagccctttgcttggccc

SEQ ID NO: 715543 - DNA, 120 bp, Artificial Sequence
  ENSG00000197324_28 (sequence is synthesized)
ttataccacacagaaggtaagaaaattctaggaaccctaaggatcaatcctctccattttcactcaaatgcctggggcccagctctgcaatgactgactccagggcctctttcctcactg

SEQ ID NO: 715544 - DNA, 120 bp, Artificial Sequence
  ENSG00000197324_29 (sequence is synthesized)
ccagcatagaagtcaggggagccagctgggccctgcggtcaggaaggttctcatttttggagcataccctgagcccagatcataggagcagctgtccctggtgggacacaggagtcatga

SEQ ID NO: 715545 - DNA, 120 bp, Artificial Sequence
  ENSG00000197324_30 (sequence is synthesized)
ctcctaccctccaccctccacacccaccaggcatttagcagtctgtcctatgcaagacagatgaattctcagccaggatacctcaaggcaggcaaaggtgagtggagggagaattcacaa

SEQ ID NO: 715546 - DNA, 120 bp, Artificial Sequence
  ENSG00000197324_31 (sequence is synthesized)
acattcagggtgtgtggtgctggcatcaccatggccaaatccaagaggtcttcctggaagagggcccaaactggaaccaaaagaatgctgtcagcagttggaatagagctgtgaattcta

SEQ ID NO: 715547 - DNA, 120 bp, Artificial Sequence
  ENSG00000197324_32 (sequence is synthesized)
gacagggggagtgtccccagaacaagcaaacggaggagacaagagggcaagggttataggaaagaccctgggcctgagagcacaagcagcggccagagctgcagcgctggggtgggtgat

SEQ ID NO: 715548 - DNA, 120 bp, Artificial Sequence
  ENSG00000197324_33 (sequence is synthesized)
ggagggaatgattcgcaagcagtgttggaacccagcccctagtgagcaaagtgacagaagctgccccagagtttggaaggaagatcgaggcagaagatgtagaaggaagctgtgggggtg

SEQ ID NO: 715549 - DNA, 120 bp, Artificial Sequence
  ENSG00000197324_34 (sequence is synthesized)
ggagtgatgcctcaggaacaaaactgaggaattccctaacggacccagtccctggggaaagaggctcccctcaggctctccttgtctagccccacacctggcagagcctgtcacccagcc

SEQ ID NO: 715550 - DNA, 120 bp, Artificial Sequence
  ENSG00000197324_35 (sequence is synthesized)
tagccccacgcctggcagagcccatcacccagcctagccccacacctggtggagaggccctgttgattacaccctgtcagcctcctcaaacccagcactaattgcacaattttcctctct

SEQ ID NO: 715551 - DNA, 120 bp, Artificial Sequence
  ENSG00000197324_36 (sequence is synthesized)
tctagtgagcaagagcctgaggaagtagcagagaggggtgtgggcccatgtgcagttctgggaccctggcaccttggctcagggaagacccgagctcctttcactgcagaccctctccag

SEQ ID NO: 715552 - DNA, 120 bp, Artificial Sequence
  ENSG00000197324_37 (sequence is synthesized)
agactggggagagggctctggagaacctggttcttgcttactgttctccctttgggccctccttcccaaacgcaaacaatccaggatccactcagcgtcaggcccaatggaaatagtgaa

SEQ ID NO: 715553 - DNA, 120 bp, Artificial Sequence
  ENSG00000197324_38 (sequence is synthesized)
gcagtgattttccctcccctgcctctccatagcctggtcttttgccctctcctttgctcttctcttcccccatagccacctcaaatacctgcagcctgatatcttcatcccttcatccag

SEQ ID NO: 715554 - DNA, 120 bp, Artificial Sequence
  ENSG00000197324_39 (sequence is synthesized)
accttttctctcctagtggtattgcaaactgaaagtggacaaagacttaaggtaaacctgctcctcatggtggaatgcttccaaatgctggaaggaggactttagggcagagttcactaa

SEQ ID NO: 715555 - DNA, 120 bp, Artificial Sequence
  ENSG00000197324_40 (sequence is synthesized)
ggaggcttgtgcttatagatcagtgggcctgaaagaagtttctctaggttctggttgtgtgctgtacgaggtgtaggtagtaataatactcttgtcagccacagtgaagccccaagctag

SEQ ID NO: 715556 - DNA, 120 bp, Artificial Sequence
  ENSG00000197324_41 (sequence is synthesized)
ccgggataggggactgaccttgtacaggcagcatggagaaactaagacagagtgtcctgcccaagtgatggcactggggagcagtcactcaggtttatttccaccagggcccaagaaaaa

SEQ ID NO: 715557 - DNA, 120 bp, Artificial Sequence
  ENSG00000197324_42 (sequence is synthesized)
aagaaatgaggcaacctaaaattccatcaagatagataccaatatccaaggtgcttggtcttagcggtgtgggacccacgttaaggctcttggtgggaaggtgggaggtgttttcagcat

SEQ ID NO: 715558 - DNA, 120 bp, Artificial Sequence
  ENSG00000197324_43 (sequence is synthesized)
gaggtgttttcagcatgagatagggttcaggctgtgaatcagagtctagagcctaagataaaagaagataccagggctgggccacggtggctttcgcctgtaatcctagcactttgggag

SEQ ID NO: 715559 - DNA, 79 bp, Artificial Sequence
  ENSG00000197324_44 (sequence is synthesized)
gccaaggcaggcagactgcctgagctcaggagttcgagactagcctggtagccaggtgtggcggcatgcacctgtagtc

SEQ ID NO: 715560 - DNA, 64 bp, Artificial Sequence
  ENSG00000197324_45 (sequence is synthesized)
ttctccaaaaaaaaagaaaagaagataccagaactcagtccttaagaaacaaaattctgccagg

SEQ ID NO: 715561 - DNA, 75 bp, Artificial Sequence
  ENSG00000197324_46 (sequence is synthesized)
gacagagcgagactccttctccaaaaaaaaagaaaagaagataccagaactcagtccttaagaaacaaaattcgg

SEQ ID NO: 715562 - DNA, 120 bp, Artificial Sequence
  ENSG00000197324_47 (sequence is synthesized)
tgaaaccctgtctctaccaaaaatactaaaaattagccagtctcacaacctggtctcaaaataaataaatagatttaaaaaaaaaatcatgggcctgaaccaagctccagacctcactag

SEQ ID NO: 715563 - DNA, 120 bp, Artificial Sequence
  ENSG00000197324_48 (sequence is synthesized)
ctccagacctcactaggaggggagaaggaccccccagccacacagcccaaggctgcagaagcacctaggtggttagagagtgagtgcctggatggggcgcagtggctcacacctgtaatc

SEQ ID NO: 715564 - DNA, 120 bp, Artificial Sequence
  ENSG00000197324_49 (sequence is synthesized)
caagactccatctcaaaaaaaaaagtgagtgcccgatgatgccagattcttcatcacctgaagtgaacccacacaacagggctgggccatgggcatcataaaccccattttgcaagctca

SEQ ID NO: 715565 - DNA, 120 bp, Artificial Sequence
  ENSG00000197324_50 (sequence is synthesized)
ggaggagctttagggaaatcagaagactggcccagtctctaccaagtggtggatttagagccggcatggcttcgttccaaatctcacccttgtcccaccattccatgggacctcccattc

SEQ ID NO: 715566 - DNA, 120 bp, Artificial Sequence
  ENSG00000197324_51 (sequence is synthesized)
ctgagggagcctggatacgggcaagtgcacaacccgggaggttgaggttacagtgagccatgatcgcaccactgcagtccagcccgagcaatagggtgagaccctccctctgaaaaaaat

SEQ ID NO: 715567 - DNA, 120 bp, Artificial Sequence
  ENSG00000197324_52 (sequence is synthesized)
aaaaatactcattttggaaggaagtcattctaaaatgttacacttgtcttcagcatatctgcaatataataattttctgcataactgaggatcattcacagaaaccaatggcttttctcc

SEQ ID NO: 715568 - DNA, 120 bp, Artificial Sequence
  ENSG00000197324_53 (sequence is synthesized)
agcagtgtcttctgaagttgtaacagtaggggcacggggagctatttgcttttatgctaaatgaccttagaccacttataaaatgcatatgagtgctttaaatgttattttgtgtgtgtg

SEQ ID NO: 715569 - DNA, 120 bp, Artificial Sequence
  ENSG00000197324_54 (sequence is synthesized)
tggtgttgcctccctgactacaaggggtcacttgctactctaaatgtgtttctaatctactagtacaggaacacacatggacacgttaaaattgtgaataaaagtaagtaaaaagtaaaa

SEQ ID NO: 715570 - DNA, 120 bp, Artificial Sequence
  ENSG00000197324_55 (sequence is synthesized)
cagaattgttcgtgatattagtatttactggtgaagctatgaagaatgtggagagaaagagcgaagctagaaggctgtaactctaggctgtgtgtgggcaggggcagatactctgctcct

SEQ ID NO: 715571 - DNA, 120 bp, Artificial Sequence
  ENSG00000197324_56 (sequence is synthesized)
ccttgcagagcccagacttttggaaacctcaagcctccaagcggaaggggaagggtgggatgcaaaggggctgtctactacccgtgtcctaccttcctctctccagcttgtgaggacccc

SEQ ID NO: 715572 - DNA, 120 bp, Artificial Sequence
  ENSG00000197329_0 (sequence is synthesized)
agtgacccagaggcggtgtgaggcggagggaccgtcggggggcgccgccgccgcctccactagcagcagcggcagcagccctagtcccgcggtgcggtcgaattggtccccagccctccg

SEQ ID NO: 715573 - DNA, 120 bp, Artificial Sequence
  ENSG00000197329_1 (sequence is synthesized)
ggagcgcaccacaaagcagccccaacgcctctccctgcgtccgcggctcctcagcgctcggctccgtggtcaacttcccctcgctgggctcggctggcgggcgcggagggcagcggcgga

SEQ ID NO: 715574 - DNA, 120 bp, Artificial Sequence
  ENSG00000197329_2 (sequence is synthesized)
acggcgggctgtctgctcgcgctccccgcgcacaacacttcaccctctcgcctcgggtctcgggggccgctctgggatcccggccaccagcaattgtccggaaataatgcaaaaggtgtc

SEQ ID NO: 715575 - DNA, 120 bp, Artificial Sequence
  ENSG00000197329_3 (sequence is synthesized)
ccaaggctcctgaccagtgaacaaagatttgagaaagacagccaagctcatgttttctcctgatcaagaaaatcatccatctaaagcaccagtaaaatatggtgaactcattgtcttagg

SEQ ID NO: 715576 - DNA, 120 bp, Artificial Sequence
  ENSG00000197329_4 (sequence is synthesized)
gtataatgggtctctcccaaatggcgatagaggaaggaggaaaagtaggtttgctttgtttaaaagacctaaggcaaatggggtgaagcccagcactgtgcatattgcttgtactcctca

SEQ ID NO: 715577 - DNA, 120 bp, Artificial Sequence
  ENSG00000197329_5 (sequence is synthesized)
ggctgcaaaggcaataagcaacaaagaccagcatagcatatcatatactttatctcgggcccagactgtggtggttgaatatactcatgacagcaacaccgatatgtttcagattggccg

SEQ ID NO: 715578 - DNA, 120 bp, Artificial Sequence
  ENSG00000197329_6 (sequence is synthesized)
gtcgactgaaagccccattgattttgtagtaactgacacggttcctggaagtcaaagtaattctgatacacagtcagtacaaagcactatatcaagatttgcctgcagaatcatatgtga

SEQ ID NO: 715579 - DNA, 120 bp, Artificial Sequence
  ENSG00000197329_7 (sequence is synthesized)
acggaatcctccctttacagcacggatttatgctgcaggatttgactcatcaaaaaacatctttcttggggagaaggctgccaaatggaagacatcagatggacagatggatggcttgac

SEQ ID NO: 715580 - DNA, 120 bp, Artificial Sequence
  ENSG00000197329_8 (sequence is synthesized)
cactaatggtgttcttgtgatgcatccacgcaatgggttcacagaagactccaagcctggaatatggagagaaatatcggtgtgtggaaatgtatttagcctacgtgaaaccagatcggc

SEQ ID NO: 715581 - DNA, 120 bp, Artificial Sequence
  ENSG00000197329_9 (sequence is synthesized)
tcagcagagaggaaaaatggtggaaattgaaaccaatcagttacaagatggctcgttaattgacctctgtggtgcaacattgttatggcgtactgcagaaggcctttcccacactcctac

SEQ ID NO: 715582 - DNA, 120 bp, Artificial Sequence
  ENSG00000197329_10 (sequence is synthesized)
cgtgaagcatttagaagctttaagacaggaaatcaatgcagcacgacctcagtgccctgtagggttcaacacactagcatttcctagtatgaagaggaaagacgttgtagatgaaaaaca

SEQ ID NO: 715583 - DNA, 120 bp, Artificial Sequence
  ENSG00000197329_11 (sequence is synthesized)
accatgggtatatctaaactgcggccatgtacatggctatcataactggggaaacaaagaagaacgtgatggaaaagatcgtgaatgtcctatgtgtaggtctgttggtccctatgttcc

SEQ ID NO: 715584 - DNA, 120 bp, Artificial Sequence
  ENSG00000197329_12 (sequence is synthesized)
tctgtggcttggatgtgaagctggattttatgtggacgccggccctccaacccatgcgtttagcccgtgtgggcatgtgtgttcagaaaagacaactgcctattggtcccagatcccact

SEQ ID NO: 715585 - DNA, 120 bp, Artificial Sequence
  ENSG00000197329_13 (sequence is synthesized)
tcctcatggtactcatacttttcatgcagcctgtcccttttgtgcacatcagttggctggtgaacaaggctacatcagacttatttttcaaggacctctagactaacagaccattgtctt

SEQ ID NO: 715586 - DNA, 120 bp, Artificial Sequence
  ENSG00000197329_14 (sequence is synthesized)
gcaggactacattataaatttataagctaagtgagttgggttttcgaacctgttgtccacgtcacagtttttctgctctggtcatttgcattaagatgaagaattttttaaaacatttat

SEQ ID NO: 715587 - DNA, 120 bp, Artificial Sequence
  ENSG00000197329_15 (sequence is synthesized)
tagtctaatttgatgccttccttttagtgtttttgaatcacctatcctcagtgctgaaattgttttgtataactgagggtactgttggttcaaactatgttagtttacagtttgttgcaa

SEQ ID NO: 715588 - DNA, 120 bp, Artificial Sequence
  ENSG00000197329_16 (sequence is synthesized)
acattgtaaaatacagcgacatgtatattaacttttttctatttatctttattatagaaaataccttagaatgttcttgatagagtagcatggtaacgatggtgtcacacccttggtgtg

SEQ ID NO: 715589 - DNA, 120 bp, Artificial Sequence
  ENSG00000197329_17 (sequence is synthesized)
aatggtagcttagtgagcaacctagctcaaggatttgcaaagttaggaagaaggacgagagagcctctctccccaccccaatctaaatatggaatttggtaaattagaatactttgtaat

SEQ ID NO: 715590 - DNA, 120 bp, Artificial Sequence
  ENSG00000197329_18 (sequence is synthesized)
ttgtaagaccaaattcatactaattacccgcgtgaaaggtgtttgtttttaacaacattgaagataatcaggaaagattttttcttaatgtttctctcgagcgtagtactataacaaaaa

SEQ ID NO: 715591 - DNA, 120 bp, Artificial Sequence
  ENSG00000197329_19 (sequence is synthesized)
cttaatgctaagaaacattttatatgctcctttggatatgcaatttaatctagattatctatttttctcccatgataactaatctgtttttagtatcagcagcatttggcaagtttattt

SEQ ID NO: 715592 - DNA, 120 bp, Artificial Sequence
  ENSG00000197329_20 (sequence is synthesized)
tttggatataaactgtggttcatctgttcactgtttctagaaaaaaatcattgccataagaaaaagtataaattagcaagaaaggagagtgacttgatttgcttttggaaaaagaaatgc

SEQ ID NO: 715593 - DNA, 120 bp, Artificial Sequence
  ENSG00000197329_21 (sequence is synthesized)
ttaattaattattctgtatttggccttattcgggcattaggaaatctagagatctaaagggttgaatgacaatagtgcccccgtttttagcagaccagccttaactctgggtttgaatcc

SEQ ID NO: 715594 - DNA, 120 bp, Artificial Sequence
  ENSG00000197329_22 (sequence is synthesized)
taaggagattgccacagtgagacttaaggaaatgtttggttggcagatgagcaccaatgactgcagcgtggagtgacgcactgcatggtctgtttattctctaattccaatatgtctttt

SEQ ID NO: 715595 - DNA, 120 bp, Artificial Sequence
  ENSG00000197329_23 (sequence is synthesized)
gcttccagaagcaagaaaagtttcttctctcccctccttcccacccttttttcaaaggcaccacaagtatagacagttgcactacatcaaatctttttttgacacttgtagaaaccagta

SEQ ID NO: 715596 - DNA, 120 bp, Artificial Sequence
  ENSG00000197329_24 (sequence is synthesized)
cacttttagattagacagtatcttcttttaatattttgatttgttttcctttagtttgaaaagttgtataatacttaactgactgtagcaaagttttatatgtggtagcatacctttaat

SEQ ID NO: 715597 - DNA, 120 bp, Artificial Sequence
  ENSG00000197329_25 (sequence is synthesized)
ttatcctattacaaaactgttctgaattttcttttggtttttaaaaaacaaaacttgttgcttagaagccatgaattattttattttacttcaactgtcgaaacttccttgttttaaaaa

SEQ ID NO: 715598 - DNA, 120 bp, Artificial Sequence
  ENSG00000197329_26 (sequence is synthesized)
atgatcatttgggttcactcaggaaatgcatgtcaggaaacttgtattataagtttattagttgtgatgtatcagtaactgctgttacccctttttcaaagaaatgtaattgattttgaa

SEQ ID NO: 715599 - DNA, 120 bp, Artificial Sequence
  ENSG00000197329_27 (sequence is synthesized)
gttttctagattgtcacatgctttgtgactaatgcaagaaagcaagtcctgtgttgtatttgttctagtcatttttattcaggctatatattgtagcttaatttttatttgcaattaatt

SEQ ID NO: 715600 - DNA, 120 bp, Artificial Sequence
  ENSG00000197329_28 (sequence is synthesized)
tatttaaactaagtaaatacttttcaaaatacataattgaattcgtctctgtgagttcatttttgcataatcgagaatgagaaaccagaagtgaaaactgtgaacaactctattccacac

SEQ ID NO: 715601 - DNA, 120 bp, Artificial Sequence
  ENSG00000197329_29 (sequence is synthesized)
tccaaaaatactcatttgaaatagatgaagagtttgcatttaatgtaacactttaaagtatctggttcttttttaaaagcatctcttactaataaaggaactttgttagtggttgaataa

SEQ ID NO: 715602 - DNA, 120 bp, Artificial Sequence
  ENSG00000197329_30 (sequence is synthesized)
agagactttggagacatggcaataagcaacaaagaccagcatagcatatcatatactttatctcgggcccagactgtggtggttgaatatactcatgacagcaacaccgatatgtttcag

SEQ ID NO: 715603 - DNA, 120 bp, Artificial Sequence
  ENSG00000197329_31 (sequence is synthesized)
ccggaaacaagttaatacgcccgtttccctaagtgggtaaactgaggtcgtgaaaagctctcaaattgatggatacgcttgatcttctaccgcgcctcgtgtctgagtatatgaaagcgt

SEQ ID NO: 715604 - DNA, 120 bp, Artificial Sequence
  ENSG00000197329_32 (sequence is synthesized)
ttatgaggaagaacccgttctccaaagccccgtggaaaagttaaagatgctcattttacttacaggttaactgaagtccaaaagatgtctaggaaataatgcaaaaggtgtcccaaggct

SEQ ID NO: 715605 - DNA, 120 bp, Artificial Sequence
  ENSG00000197329_33 (sequence is synthesized)
gtgaagctggacaaggtttcatgctgttgctgcttagaaaagagctttgaactacaggaacgcaatgtgggactaaagagcaagatccagaagtgggatgagtcatgcaactcagaggac

SEQ ID NO: 715606 - DNA, 120 bp, Artificial Sequence
  ENSG00000197343_0 (sequence is synthesized)
attcgggaccctgcactccgtcgccggaagtgccaccgagaagcgccggcctcggggctgtctacagcggcccgggagaggctgtggtggccccgagcgcgagtgtgtaggtgacaggac

SEQ ID NO: 715607 - DNA, 120 bp, Artificial Sequence
  ENSG00000197343_1 (sequence is synthesized)
agcggccaggcccgcccctcccctcgtgatggtcattgtcctccagagcagtgatggaggaaataccagcccaggaagcagcagggtcaccaagggtccagtttcagtctttggagaccc

SEQ ID NO: 715608 - DNA, 120 bp, Artificial Sequence
  ENSG00000197343_2 (sequence is synthesized)
agtctgagtgtctgtccccagagcctcagtttgtgcaggacaccgacatggaacagggactcactggggatggagagaccagagaagagaacaagctgttgattcctaagcagaaaattt

SEQ ID NO: 715609 - DNA, 120 bp, Artificial Sequence
  ENSG00000197343_3 (sequence is synthesized)
cggaagaagtgcattcatacaaagtgagagtaggaagactcaaacacgatattacccaagttcctgagactagagaagtgtataagtctgaggacagattagaaagacttcaggaaattc

SEQ ID NO: 715610 - DNA, 120 bp, Artificial Sequence
  ENSG00000197343_4 (sequence is synthesized)
taaggaaatttctgtacctggagagagagtttaggcaaataacaatcagcaaggaaaccttcaccagtgagaagaacaatgaatgtcatgaacccgaaaaaagcttcagtctggactcta

SEQ ID NO: 715611 - DNA, 120 bp, Artificial Sequence
  ENSG00000197343_5 (sequence is synthesized)
ctattgatgcagatcagagagttcttagaatacagaataccgatgacaatgataagtatgacatgagcttcaaccagaattcagcctctggtaaacatgaacacttaaatctaacagagg

SEQ ID NO: 715612 - DNA, 120 bp, Artificial Sequence
  ENSG00000197343_6 (sequence is synthesized)
attttcagagtagtgaatgtaaggaaagcttaatggatctctcccaccttaataaatgggagagcatccctaacactgagaaatcctataaatgtgatgtatgtgggaaaattttccatc

SEQ ID NO: 715613 - DNA, 120 bp, Artificial Sequence
  ENSG00000197343_7 (sequence is synthesized)
agagctcagcccttactagacatcagagaatccatactagagagaagccctacaaatgtaaagaatgtgaaaagtctttcagtcagagctcaagtcttagtcgacataaaagaatacaca

SEQ ID NO: 715614 - DNA, 120 bp, Artificial Sequence
  ENSG00000197343_8 (sequence is synthesized)
ctagagaaaaaccttacaaatgtgaagcatctgataaatcctgtgaagcgtctgataaatcctgtagtccaagctcaggcataattcagcataagaaaattcacaccagagccaaatctt

SEQ ID NO: 715615 - DNA, 120 bp, Artificial Sequence
  ENSG00000197343_9 (sequence is synthesized)
acaaatgtagcagttgtgaaagagtcttcagtcgtagtgtccaccttactcaacatcagaaaattcacaaagagatgccctgtaagtgtactgtatgtggcagtgacttctgccatactt

SEQ ID NO: 715616 - DNA, 120 bp, Artificial Sequence
  ENSG00000197343_10 (sequence is synthesized)
catacctacttgaacatcagagggtccatcatgaagagaaagcctatgagtatgatgaatatgggttggcctatattaaacaacaaggaattcatttcagagaaaagccctatacgtgta

SEQ ID NO: 715617 - DNA, 120 bp, Artificial Sequence
  ENSG00000197343_11 (sequence is synthesized)
gtgaatgtggaaaagacttcagattgaattcacatcttattcagcatcaaagaattcacacaggagagaaagcacatgaatgtaatgaatgtggaaaagctttcagtcaaacctcatgcc

SEQ ID NO: 715618 - DNA, 120 bp, Artificial Sequence
  ENSG00000197343_12 (sequence is synthesized)
ttattcagcatcacaaaatgcataggaaagagaaatcgtatgaatgtaatgagtatgagggcagtttcagtcatagctcagatcttatcctgcaacaagaagtcctcaccagacagaaag

SEQ ID NO: 715619 - DNA, 120 bp, Artificial Sequence
  ENSG00000197343_13 (sequence is synthesized)
cctttgattgtgatgtatgggaaaagaactccagtcagagagcacatctagttcaacatcagagcattcataccaaagagaactcatgaatgtaatgaagatgggaagatatttatcaaa

SEQ ID NO: 715620 - DNA, 120 bp, Artificial Sequence
  ENSG00000197343_14 (sequence is synthesized)
ttcaggcttcattcagcatctgagagttcacaccagggagaaatcatgtatgtactgcatgtggtaaagccttcagtcatagctcagccattgctcagcatcagataattcacaccagag

SEQ ID NO: 715621 - DNA, 120 bp, Artificial Sequence
  ENSG00000197343_15 (sequence is synthesized)
agaaaccctctgaatgtgacgaatgaagaaaaggtattagtgttaaactcttaatcgactcctgcaaatctataccagtgagaaatcttacaaatgtattgaatgtggcaaatttttcat

SEQ ID NO: 715622 - DNA, 120 bp, Artificial Sequence
  ENSG00000197343_16 (sequence is synthesized)
gctattagtattttcataccttagtcacatttggagaattcacatgggaataaaattccattgctgcaatgaatgtgaaaaagccatcagtcaaagaaactaccttgtttagtatcaaat

SEQ ID NO: 715623 - DNA, 120 bp, Artificial Sequence
  ENSG00000197343_17 (sequence is synthesized)
tcacgccatgcaaaaagattataaatgtaataagcatgtatgtgtgtgaggagattcagtcataacccaacgctcattcaacatcaaagaatttatacctaagagaacttatttgggtgt

SEQ ID NO: 715624 - DNA, 120 bp, Artificial Sequence
  ENSG00000197343_18 (sequence is synthesized)
gtaacgcaaatggaaaaactcgacaccacatttcaggctttacccaacatcgaaataatggagagaaaattgttgattatttgtttatgaaattgttaatacatagtcccaatctttttc

SEQ ID NO: 715625 - DNA, 120 bp, Artificial Sequence
  ENSG00000197343_19 (sequence is synthesized)
attgcacaaaaatctagggttgacttggtaaatgcagtgacattttctcatggagttcctttatttaatatgtattctaagtaggtacgtttatttttacttttttattataattttgat

SEQ ID NO: 715626 - DNA, 80 bp, Artificial Sequence
  ENSG00000197343_20 (sequence is synthesized)
gtcctcccaaagtgctggggttacaggcgtgtgtcactgtgctgggcctattttatttatagaactcatttaagctgttt

SEQ ID NO: 715627 - DNA, 120 bp, Artificial Sequence
  ENSG00000197343_21 (sequence is synthesized)
gctgggcctattttatttatagaactcatttaagctgtttttattttaatatgccctataaacatttttatattttttgaaattggttcttagtgttcacaacttccataagatactgct

SEQ ID NO: 715628 - DNA, 120 bp, Artificial Sequence
  ENSG00000197343_22 (sequence is synthesized)
aatgcaccagtattaaaacacatcgacgtaagtagctcatttagctttttctgctgttcttggcccaagttctttccaaaaccaactcttaggcctgctctttactagggatcttatgtc

SEQ ID NO: 715629 - DNA, 120 bp, Artificial Sequence
  ENSG00000197343_23 (sequence is synthesized)
gtattgctttacagccacaacacttggattcctgttgattaacttctccattctcttaagcacctttagaagatttagaagtttcctagttttaagtgtttcaccagcaagtattccata

SEQ ID NO: 715630 - DNA, 120 bp, Artificial Sequence
  ENSG00000197343_24 (sequence is synthesized)
cctacttgatgttgctggtctggtgtcttatttcctaaagtgaagcatctttttttaaaaaagaatttgattgacaatatatccagtccaatataagtatgaaggattctctctcctgag

SEQ ID NO: 715631 - DNA, 120 bp, Artificial Sequence
  ENSG00000197343_25 (sequence is synthesized)
attgtagcaggcagccaaacattttcaaatgatgcccaaggttttagctgtcttgtgtgcatccacagtctgcgaagaagacatgataaggacatcagggagccaacaagactcctaata

SEQ ID NO: 715632 - DNA, 120 bp, Artificial Sequence
  ENSG00000197343_26 (sequence is synthesized)
gcctcactacattcatccagtgcctattctgcatgcctaagcttagagttcttttatatacctctacggccagcaaaatgctcaggtctgctcttggtagggtaaacataaagaagatac

SEQ ID NO: 715633 - DNA, 88 bp, Artificial Sequence
  ENSG00000197343_27 (sequence is synthesized)
ctcatacacacacacacacacacacaaatcagcatcataagggaatgtagccttccaacagagatgatgctgttcgtatgttaatctc

SEQ ID NO: 715634 - DNA, 120 bp, Artificial Sequence
  ENSG00000197343_28 (sequence is synthesized)
agccttccaacagagatgatgctgttcgtatgttaatctcagagacagtatttcaagagagtggcaggtctgttcctggtaaaattttaaccattaggattgcagataaatgtttgaatt

SEQ ID NO: 715635 - DNA, 120 bp, Artificial Sequence
  ENSG00000197343_29 (sequence is synthesized)
ctgctcctctctcatcaatccaggacagtatttgaagtgtgagggctttgtgtatagttgtttatccattaccacatttttgtattttaatagtctacaggctatataaaagaacatggc

SEQ ID NO: 715636 - DNA, 120 bp, Artificial Sequence
  ENSG00000197343_30 (sequence is synthesized)
tttttgactgataaaagtgattacagatgttggctcaagttcagggccaccatcatatacctaacaagagttcatgattctttaggtaatgtcaaaacattttgtatttttccatcttaa

SEQ ID NO: 715637 - DNA, 120 bp, Artificial Sequence
  ENSG00000197343_31 (sequence is synthesized)
gctttataacattttgtgagtaagacaaatgttatttaaaattcttgttgtcagtccagcaattgaggctttcatagttcagtgttataatattcagtagggaccctcaacaaatatata

SEQ ID NO: 715638 - DNA, 120 bp, Artificial Sequence
  ENSG00000197343_32 (sequence is synthesized)
aaaatatgttgctcactctataatcctcctatggctaacctctaggatagttctgccactatattttacttctttgccatcagcaagagtaggatttcatcaaggcaaggtaggaatcta

SEQ ID NO: 715639 - DNA, 120 bp, Artificial Sequence
  ENSG00000197343_33 (sequence is synthesized)
aatgaaattgatatataaatgaattgatctaaatgtaaaagcaaatgaaaaatgcatgtgttttttcctgtcaaacatgtatacccttatgtatagagaccagtagtcacgtatggtgac

SEQ ID NO: 715640 - DNA, 120 bp, Artificial Sequence
  ENSG00000197343_34 (sequence is synthesized)
tgaaacaggattatgtaatccctaaaaagcagaatatgtaaaaatcacatgtatgcgtttggtttaggaatgtgcttttgtacttccacttgaataaaggtgtgtttggtattctgagaa

SEQ ID NO: 715641 - DNA, 120 bp, Artificial Sequence
  ENSG00000197343_35 (sequence is synthesized)
cggcgtccggccgcggccgacggtagttcgcttccccgagagtgcgcggaggcccgggtgcgaggagggcctgtttctcttcagccctggttcattcacctcgcggaccgagggccccgc

SEQ ID NO: 715642 - DNA, 120 bp, Artificial Sequence
  ENSG00000197343_36 (sequence is synthesized)
tccaatttccaagcctgatgggatctcccagctggaacaggatctacaggtctttgatctggaaactaagactagagaagtcttaagagatgactgctcagatggagagaccagagaaga

SEQ ID NO: 715643 - DNA, 120 bp, Artificial Sequence
  ENSG00000197343_37 (sequence is synthesized)
ctgggagagtgggagtgcggaggggctcccgagggggctcctgggcctggtttgagagaggccaagaactggaataagaacatggtccctagagggaggaatgaaagagggggcagatgt

SEQ ID NO: 715644 - DNA, 120 bp, Artificial Sequence
  ENSG00000197343_38 (sequence is synthesized)
gactcagttcagtcctagtctgagcccctttattaaggatagctcatctttctcaaataagcagagtgatggctgcttactcgctgtggtggtttttccttcaggcaaccttcacttcat

SEQ ID NO: 715645 - DNA, 120 bp, Artificial Sequence
  ENSG00000197343_39 (sequence is synthesized)
aattcctgcccggccctgagtcatacccaggcaagtgctttctctggagaaacacttgccgtccttacagcaggaatctccaagagatggcccaagtatcggcttcccatcgatattgct

SEQ ID NO: 715646 - DNA, 120 bp, Artificial Sequence
  ENSG00000197343_40 (sequence is synthesized)
aacggctagagacgcccagtgagttagcatggagggcagtgggaccggaaaaagacgtggaaaagctgcgaaaacgagccttcgaatcatggacgcgcgggcccagctcctcctccgagt

SEQ ID NO: 715647 - DNA, 120 bp, Artificial Sequence
  ENSG00000197343_41 (sequence is synthesized)
ggcagctgcgctcttgacagccaggtaccaggagtttgtgacattcgaggatgtggctgtgcaccttactcgagaggaatggggatacctggaccctgttcagagggacctctacagaga

SEQ ID NO: 715648 - DNA, 120 bp, Artificial Sequence
  ENSG00000197343_42 (sequence is synthesized)
actgtgtaaaatcgcagctcctcaaattacctctgtttaatttcaaatgttagggtccaaggaagccctctgttgcaaccagatatgttttgaacccagttcattcagaaaccatggttg

SEQ ID NO: 715649 - DNA, 120 bp, Artificial Sequence
  ENSG00000197343_43 (sequence is synthesized)
gtggtcatcatctacttgtattgtgaaaaaccagaaattccaaattcagctcttcagttatggtcttttcatattattttagaatgtgaaacttatgctgtgtgcccctccttttatgtg

SEQ ID NO: 715650 - DNA, 120 bp, Artificial Sequence
  ENSG00000197343_44 (sequence is synthesized)
gcgaacacaacctgccccgtatggtgcctaactctcctgtgaaccctgggcttccctcatgtttaacattctggtttcctccttccttgaagtccctgtggccctcttcaaggtcctacc

SEQ ID NO: 715651 - DNA, 120 bp, Artificial Sequence
  ENSG00000197343_45 (sequence is synthesized)
ttcctaccctttattctttgtggttctgtacagattgatgcaattatattgcctttcctgattaagtgttccttactctgtccttgatggaggggagaagggagggcaaagaagttaaat

SEQ ID NO: 715652 - DNA, 120 bp, Artificial Sequence
  ENSG00000197343_46 (sequence is synthesized)
ttatttcagggcatcaaattgaatatctacttaataactttgtaaactgtaaagtgacatacatataattgtaaagtactgttaattttatctaataattacagagtttccaacagttaa

SEQ ID NO: 715653 - DNA, 120 bp, Artificial Sequence
  ENSG00000197343_47 (sequence is synthesized)
atatctcagagttaaaagttgcaaattatgttattggaattctgagaacaatattgattgctgcttcatgttacactaactttactttttaaacttctgaaacgatttcatttgacaggg

SEQ ID NO: 715654 - DNA, 120 bp, Artificial Sequence
  ENSG00000197343_48 (sequence is synthesized)
tggaccttaattaaatatatgtccacaaggagagttgactctaaatgtcccacaggatttcagaaacacagtaaatacctttcttctatctattctgatctccttgctcataggctctca

SEQ ID NO: 715655 - DNA, 120 bp, Artificial Sequence
  ENSG00000197343_49 (sequence is synthesized)
catggaatctttggggcagctgtcagttcttcatattttccagccccaatgccctttttataaaattgggtagctgttaatacattgatacttgggcgcacagagttggcactcaataag

SEQ ID NO: 715656 - DNA, 120 bp, Artificial Sequence
  ENSG00000197343_50 (sequence is synthesized)
tagccgttaagtaaattaatcaaaagaattgcaagatacaagatacctggtcccttctatcaaagagtttataaatcaagtatgaatgacaatacctgaaaccacttaaaaaaaaatcta

SEQ ID NO: 715657 - DNA, 120 bp, Artificial Sequence
  ENSG00000197343_51 (sequence is synthesized)
tgtaaacaccgttatatgtgacatgtcaggataagagggaacaactaataaattttgtacacattcagtaaatggagagaaaggtttttggagatgaggggcttgagccagaccttgtat

SEQ ID NO: 715658 - DNA, 120 bp, Artificial Sequence
  ENSG00000197343_52 (sequence is synthesized)
gtgtgctattagaagctttctgggctggacacatttaaaaactgccctttgatactaatagtattaaaattctgtctccttggaagcagactgcctgttgctttagctttaaaagagatt

SEQ ID NO: 715659 - DNA, 120 bp, Artificial Sequence
  ENSG00000197343_53 (sequence is synthesized)
tatatccaagcattgcattatgcaagccatagaaagactgttttatgtgaagatgcactgattgcacttccctctctatattttattgtagttagttgtttagagctgtctctgtgtaga

SEQ ID NO: 715660 - DNA, 120 bp, Artificial Sequence
  ENSG00000197343_54 (sequence is synthesized)
gtgtgaggtccttgagggaagggaccttcttggcctcttatcccctgcatactttgcatagaggaggcacttcataaatgtttgttgaataaatgctacactcctaatgggtaagaatgt

SEQ ID NO: 715661 - DNA, 120 bp, Artificial Sequence
  ENSG00000197343_55 (sequence is synthesized)
gtcatattactctttgttttcttatgtgtactgaaacaaattgtttcttgagattggtccttagaatatttattcagttttcactgattctcttgctacaggttagctaaccatgcagca

SEQ ID NO: 715662 - DNA, 120 bp, Artificial Sequence
  ENSG00000197343_56 (sequence is synthesized)
ggtgcttgagtttcacctttctccagtccagcagaattacattttgatgacctccattttgatacttgtagaccagatctaatccgaagattaatctttaggtaacagatggagagtgat

SEQ ID NO: 715663 - DNA, 120 bp, Artificial Sequence
  ENSG00000197343_57 (sequence is synthesized)
aatgataacttctgtgaagacaaacccatgcacacattctgttgtctgaataatatttaaatgaatccttctgctcccaagtcatcaacttgccccttaacacacatccctctagagcac

SEQ ID NO: 715664 - DNA, 120 bp, Artificial Sequence
  ENSG00000197343_58 (sequence is synthesized)
aaatctgagctccttgtagatctttgccctcttcactctccagaccttcctaattaatgtcttctcagaatcgaccttctgtctctcttaatcattagttaaaagaaaaagtggcagatg

SEQ ID NO: 715665 - DNA, 120 bp, Artificial Sequence
  ENSG00000197343_59 (sequence is synthesized)
ccgtgagggaagcccaggagaccaggcagctgcgctcttgacagccaggtaccaggtgagctgaggaaccctctgcttttcctcagggactattgctactgatggagtgtggcctctctc

SEQ ID NO: 715666 - DNA, 120 bp, Artificial Sequence
  ENSG00000197343_60 (sequence is synthesized)
tcatcccatctgtagaccttgcctggaatttttttcaatagcagactccagtttgggaattgatcctcttcggagacctggacttcacataaaccaacttcccatctccccagtgccatg

SEQ ID NO: 715667 - DNA, 120 bp, Artificial Sequence
  ENSG00000197343_61 (sequence is synthesized)
agcaaactctgttttctctttgtccatggttgtgtgatgggtgcttattagatgtttaagggttatgggctttattccgtaggttctaatctgttctccctcctcctcaacgtaagtaca

SEQ ID NO: 715668 - DNA, 120 bp, Artificial Sequence
  ENSG00000197345_0 (sequence is synthesized)
gtttccggccgaggctgcggccatggcagcatcttccctgacggtcaccttagggcggctggcgtccgcgtgcagccacagcatcctgagaccttcggggcccggagcagcctccctttg

SEQ ID NO: 715669 - DNA, 120 bp, Artificial Sequence
  ENSG00000197345_1 (sequence is synthesized)
gtctgcttctcgaaggttcaattcacagagcacttcatatctaccaggatatgttcctaaaacatccctgagttcaccaccttggccagaagttgttctgccagacccagttgaggagac

SEQ ID NO: 715670 - DNA, 120 bp, Artificial Sequence
  ENSG00000197345_2 (sequence is synthesized)
ccagtggaaggtgacctctgaagacctgatcttaattggaaatgaactagaccttgcgtgtggagagagaattcgactggagaaggtcctgctggttggggcagacaacttcacgctgct

SEQ ID NO: 715671 - DNA, 120 bp, Artificial Sequence
  ENSG00000197345_3 (sequence is synthesized)
tggcaagccactcctcggaaaggatcttgttcgagtagaagccacagtcattgaaaagacagaatcatggccaagaatcattatgagattcaggaaaaggaaaaacttcaagaagaaaag

SEQ ID NO: 715672 - DNA, 120 bp, Artificial Sequence
  ENSG00000197345_4 (sequence is synthesized)
aatcgtcacgaccccgcagactgtcctccggataaacagcattgagattgctccgtgtttgttgtgattaccgagttaatacttacaaaaggataaaaataaactcctgcttcccaagga

SEQ ID NO: 715673 - DNA, 120 bp, Artificial Sequence
  ENSG00000197345_5 (sequence is synthesized)
ttcatgtttccagatgctcccagacacagcacagtgccagcactcatgtccattttcaccagttaacaccagaatttcagatgtttttcattaactactccttgaacacctgccacactg

SEQ ID NO: 715674 - DNA, 120 bp, Artificial Sequence
  ENSG00000197345_6 (sequence is synthesized)
caggcaggtggcataattgagggcagggggcccctgctccatctcgtctgcttctgttggtgggtgcagcgacagctctccccagttagcacagttaagcacaattactggaagccggtg

SEQ ID NO: 715675 - DNA, 120 bp, Artificial Sequence
  ENSG00000197345_7 (sequence is synthesized)
ccaggcgcatgcggacggagggtgtggggcacgtgggtctcgggacaggaagcccaggcaggtctcaacctggctgccactgcccacttgccaccctcatcctagagggagcacccagag

SEQ ID NO: 715676 - DNA, 85 bp, Artificial Sequence
  ENSG00000197345_8 (sequence is synthesized)
tgcccacttgccaccctcatcctagagggagcacccagagggtccagcctcgctccccttctcctccacgctccgctccgcacgt

SEQ ID NO: 715677 - DNA, 120 bp, Artificial Sequence
  ENSG00000197345_9 (sequence is synthesized)
cctcgctccccttctcctccaccctccacgcatgaccccactttgttccaacccatgacgcctagcactgtccccaaagcagcagtgaatccgcaagcaggtgtagggctgtcctagcag

SEQ ID NO: 715678 - DNA, 120 bp, Artificial Sequence
  ENSG00000197345_10 (sequence is synthesized)
agcagtgaatccgcaagcaggtgtagggctgtcctagcaggtctgcactgaggacatcccccatagtgggcatcctgagggatggcacccacggggcatgggccacatagctgagcggct

SEQ ID NO: 715679 - DNA, 120 bp, Artificial Sequence
  ENSG00000197345_11 (sequence is synthesized)
gcagaattctgtccctcacagctcttgctataactgcagttgccggcctaaaccaccaacagtgggcatagttaaatatacccagaatactggtattggctgtcaccttagagtcatctg

SEQ ID NO: 715680 - DNA, 120 bp, Artificial Sequence
  ENSG00000197345_12 (sequence is synthesized)
ggtaggggagcctctcatgtaccttctgacacttccaggtagcctcaaggtcactcaggtggggccatcctcccacgcactccagaagtcacagcatagacagtgtgggaggagaggtga

SEQ ID NO: 715681 - DNA, 120 bp, Artificial Sequence
  ENSG00000197345_13 (sequence is synthesized)
ggtgccagcgcagggcactcctggccatgaggcgtctggtgtcccagcctctgcacctgccaacagagtgaacgaacaagctagcgaggcagtcagtgcacacctggagataaacacggc

SEQ ID NO: 715682 - DNA, 120 bp, Artificial Sequence
  ENSG00000197345_14 (sequence is synthesized)
catgtgcagcaggggacgttgccggggtcgcgctggctggggagggctgtgtgcagagcccctgctgtaactgatgacaacagtcagggtctgtggtcaagcctgtgacatcctttcttt

SEQ ID NO: 715683 - DNA, 120 bp, Artificial Sequence
  ENSG00000197345_15 (sequence is synthesized)
cagtcgtcacgaccccgcagactgtcctccggataaacagcattgagattgctccgtgtttgttgtgattaccgagttaatacttacaaaaggataaaaataaactcctgcttcccaagg

SEQ ID NO: 715684 - DNA, 120 bp, Artificial Sequence
  ENSG00000197345_16 (sequence is synthesized)
gaccaccgagcttctctggatattcagggactcagccaccaagtcctgctggttggggcagacaacttcacgctgcttggcaagccactcctcggaaaggatcttgttcgagtagaagcc

SEQ ID NO: 715685 - DNA, 120 bp, Artificial Sequence
  ENSG00000197345_17 (sequence is synthesized)
ggccatggcagcatcttccctgacggtcaccttagggcggctggcgtccgcgtgcagccacagcatcctgagaccttcggggcccggagcagatatgttcctaaaacatccctgagttca

SEQ ID NO: 715686 - DNA, 120 bp, Artificial Sequence
  ENSG00000197345_18 (sequence is synthesized)
ccaccttggccagaagttgttctgccagacccagttgaggagaccagacaccatgcagggggtggagcaggggctgggccgccagcagtgaggtgctcacaaggggtgctggctgtcagg

SEQ ID NO: 715687 - DNA, 120 bp, Artificial Sequence
  ENSG00000197345_19 (sequence is synthesized)
gagcaggtgagggtgactgcccacccacccgccttcccctgcagaggtcgtgaagaaggtgaatgagatgatcgtcacggggcagtatggcaggctctttgccgtggtgcactttgccag

SEQ ID NO: 715688 - DNA, 120 bp, Artificial Sequence
  ENSG00000197353_0 (sequence is synthesized)
agtctgtcgccacctcacttggtgtctgctgtccccgccaggcaagcctggggtgagagcacagaggagtgggccgggaccatgcgggggacgcggctggcgctcctggcgctggtgctg

SEQ ID NO: 715689 - DNA, 120 bp, Artificial Sequence
  ENSG00000197353_1 (sequence is synthesized)
gctgcctgcggagagctggcgccggccctgcgctgctacgtctgtccggagcccacaggagtgtcggactgtgtcaccatcgccacctgcaccaccaacgaaaccatgtgcaagaccaca

SEQ ID NO: 715690 - DNA, 120 bp, Artificial Sequence
  ENSG00000197353_2 (sequence is synthesized)
tgtcctgctgcaatactgagctgtgcaatgtagacggggcgcccgctctgaacagcctccactgcggggccctcacgctcctcccactcttgagcctccgactgtagagtccccgcccac

SEQ ID NO: 715691 - DNA, 120 bp, Artificial Sequence
  ENSG00000197353_3 (sequence is synthesized)
ccccatggccctatgcggcccagccccgaatgccttgaagaagtgccccctgcaccaggactcctgagtctcctttctgggcacagacctgccctgctgcatctctgacctcgtcgatgt

SEQ ID NO: 715692 - DNA, 120 bp, Artificial Sequence
  ENSG00000197355_0 (sequence is synthesized)
agacggcagcggcgacatggcttcggagcaggacgtgcgcgcccggctgcagcgcgctggccaggagcacctcctgcgcttctgggccgagctggcgccggagccacgagccgcgctgct

SEQ ID NO: 715693 - DNA, 80 bp, Artificial Sequence
  ENSG00000197355_1 (sequence is synthesized)
cacgagccgcgctgctggcggagctggcgctgctggagcccgaggcgctgcgcgagcactgccggcgggcggcggaggcc

SEQ ID NO: 715694 - DNA, 120 bp, Artificial Sequence
  ENSG00000197355_2 (sequence is synthesized)
cccagagcgcgtgggcagggccagccgcagcgaccccgagacacggcggcgctgggaggaggaaggtttccgtcagatttctctgaacaaggtggccgtcctgctgctggctggggggca

SEQ ID NO: 715695 - DNA, 120 bp, Artificial Sequence
  ENSG00000197355_3 (sequence is synthesized)
gggcactcgcctgggcgtgacctaccccaagggtatgtaccgtgtggggctgcccagccggaagaccctgtaccagctgcaggcggagcggattcggcgggtggagcagctggccggtga

SEQ ID NO: 715696 - DNA, 120 bp, Artificial Sequence
  ENSG00000197355_4 (sequence is synthesized)
gcgccacgggacccgctgcaccgtcccctggtacgtcatgaccagcgagttcactctggggcccacggccgagttcttcagggagcacaacttcttccacctggaccccgccaacgtggt

SEQ ID NO: 715697 - DNA, 120 bp, Artificial Sequence
  ENSG00000197355_5 (sequence is synthesized)
catgtttgagcagcgcctgctgcctgctgtgacctttgatggcaaggttatcctggagcggaaagacaaagttgccatggccccagacggcaacgggggcctctactgcgcgctggagga

SEQ ID NO: 715698 - DNA, 120 bp, Artificial Sequence
  ENSG00000197355_6 (sequence is synthesized)
ccacaagatcctggaggacatggagcgccggggagtggagtttgtgcacgtgtactgtgtggacaacatcctggtgcggctggcggaccctgtcttcatcggcttctgtgtgttgcaggg

SEQ ID NO: 715699 - DNA, 120 bp, Artificial Sequence
  ENSG00000197355_7 (sequence is synthesized)
cgcagactgtggcgccaaggtggtggaaaaggcataccccgaggagcccgtgggcgtggtgtgccaggtggacggtgtcccccaggtggtggagtacagcgagatcagtcctgagaccgc

SEQ ID NO: 715700 - DNA, 120 bp, Artificial Sequence
  ENSG00000197355_8 (sequence is synthesized)
acagctacgtgcctccgacgggagcctgctgtacaatgcaggcaacatctgcaaccacttcttcacccgaggcttccttaaggcggtcaccagggagtttgagcctttgctgaagccaca

SEQ ID NO: 715701 - DNA, 120 bp, Artificial Sequence
  ENSG00000197355_9 (sequence is synthesized)
cgtggctgtgaagaaggtcccgtatgtggatgaggaggggaatctggtaaagccgctaaaaccgaacgggataaagatggagaagtttgtgtttgatgtgttccggtttgctaagaactt

SEQ ID NO: 715702 - DNA, 120 bp, Artificial Sequence
  ENSG00000197355_10 (sequence is synthesized)
tgctgccttggaagtgctgcgggaggaggaattttccccactgaagaacgcagagccagccgacagggacagtccccgcaccgctcgccaggccctgctcacccagcactaccggtgggc

SEQ ID NO: 715703 - DNA, 120 bp, Artificial Sequence
  ENSG00000197355_11 (sequence is synthesized)
tctgcgggccggggcccgcttcctggatgcccatggggcctggctcccagagctgcccagcttgcccccaaatggagaccctccggccatctgtgagatatcgcccttggtgtcttactc

SEQ ID NO: 715704 - DNA, 120 bp, Artificial Sequence
  ENSG00000197355_12 (sequence is synthesized)
tggagagggtttagaagtgtacctgcaaggccgggagttccagtccccgctcatcctggatgaagaccaggccagggagccgcagctgcaggagtcctgacccgcccagactgtccccag

SEQ ID NO: 715705 - DNA, 120 bp, Artificial Sequence
  ENSG00000197355_13 (sequence is synthesized)
tgggaaagcagcctgccccatgcttccagcctgcagaacacagaatgaaacatgctggtagactccacgagggcagggcctctcctgtcgcctctggacacaagtggcgacagcctgctg

SEQ ID NO: 715706 - DNA, 120 bp, Artificial Sequence
  ENSG00000197355_14 (sequence is synthesized)
ggggctctgtggctccattcctggctgtggggtctagtcaagaggcagagggacttgggacctgggagaatggggctgagaggaggcttcgggttggggcccaagggaggtgtggtgtca

SEQ ID NO: 715707 - DNA, 120 bp, Artificial Sequence
  ENSG00000197355_15 (sequence is synthesized)
tctggggagaacaggagggcatgtccctttgggagcccgccttgtggatccaccacaccccaccgagcactagaagctgcataagctacacaggatgtgcttctgcagcctacagatgca

SEQ ID NO: 715708 - DNA, 120 bp, Artificial Sequence
  ENSG00000197355_16 (sequence is synthesized)
gaaccagaatgagggggacaattccacccactcgagggctgccccctcttccttagcagacgaaccagtaatgggggcaaggctggggcatcccagcccacacaccctggatgcccagca

SEQ ID NO: 715709 - DNA, 120 bp, Artificial Sequence
  ENSG00000197355_17 (sequence is synthesized)
aggccacagaaagagcctgatgtccatgatccaggtggctctgagaagcttggcctggacacctgagcctgcggccggtactcctgccttctccccatctatccccaaggcctctgcctc

SEQ ID NO: 715710 - DNA, 120 bp, Artificial Sequence
  ENSG00000197355_18 (sequence is synthesized)
tcagcctcttccatggtcggtttaggctgctgagttttctgtgcttccccaagaaccagtgggatcaatgccggcggcctctgtgatggttgctgactaatccgggatttcatgagtcag

SEQ ID NO: 715711 - DNA, 120 bp, Artificial Sequence
  ENSG00000197355_19 (sequence is synthesized)
aggcaccacccctcaccccagctgcctgctgcttctgacggatcttggtgctcaggctgcctggctctccgagtgaggacgcagcctccatatttggtgcactcaggcatggctgggaca

SEQ ID NO: 715712 - DNA, 120 bp, Artificial Sequence
  ENSG00000197355_20 (sequence is synthesized)
agccagctgccccagggttcttcccctggtgattctcgcctgctttctcatctcaggggaggcagtggcacctccctctccctgctgacatgaagagagctatgatatgccactgctgcc

SEQ ID NO: 715713 - DNA, 120 bp, Artificial Sequence
  ENSG00000197355_21 (sequence is synthesized)
aactcatcctctgcccccacctcgaaacccacagtccccagtggagggccactactcatccccattggtttcccaggggaggggtgttgtctggaagggcaggttcagatgcagccttcc

SEQ ID NO: 715714 - DNA, 120 bp, Artificial Sequence
  ENSG00000197355_22 (sequence is synthesized)
agatttagaggcactgggaggacagtggctgagtggaggcgcccagacctgggcaggcagcaggctcaggcccacaccttgtgatttttgaaaccaaagcccagaagatgatgtttactt

SEQ ID NO: 715715 - DNA, 120 bp, Artificial Sequence
  ENSG00000197355_23 (sequence is synthesized)
ctctctccctggctctgcccttcttactgcaaaccatgctgtgccttagggcccttctcatagctgttcctcatggccatgactggaacagggatgcaacctctttctacacaagcacag

SEQ ID NO: 715716 - DNA, 79 bp, Artificial Sequence
  ENSG00000197355_24 (sequence is synthesized)
gactggaacagggatgcaacctctttctacacaagcacagttagttgggtgaagtctttttttttgtttaagtggcgtg

SEQ ID NO: 715717 - DNA, 70 bp, Artificial Sequence
  ENSG00000197355_25 (sequence is synthesized)
gggccggttgctggcatcttaatgttctgtaggtggaatatttccaataaacacaaggtgccgtaattga

SEQ ID NO: 715718 - DNA, 120 bp, Artificial Sequence
  ENSG00000197355_26 (sequence is synthesized)
gtaccgtgtggggctgcccagccggaagaccctgtaccagctgcaggcggagcggattcggcgggtggagcagctggccggtgagcgccacgggacccgctgcaccgtcccctggtgtgt

SEQ ID NO: 715719 - DNA, 120 bp, Artificial Sequence
  ENSG00000197355_27 (sequence is synthesized)
cctgcctgccctacctcggcccggaggtacccttccccacgcccccccacatccccgctccagacgcgagccccaaccccggcacagaccgggacattgcccagaaccggcccaaaatgg

SEQ ID NO: 715720 - DNA, 120 bp, Artificial Sequence
  ENSG00000197355_28 (sequence is synthesized)
ggcctggccccagccccaactggacactggaccccgaaccccgatgccggctctggtccgagccccgtctgcctgcagggccaggcgtactcgcggccggctcaccgcgcctcccttgca

SEQ ID NO: 715721 - DNA, 120 bp, Artificial Sequence
  ENSG00000197355_29 (sequence is synthesized)
agagccgcctgcgttgaccagggacccgcggggtcccagtgagctgagtgccctgggccacagcggctgtggtcaggagtggctgtggtcaggcacggctgatgggtcggggtggagaat

SEQ ID NO: 715722 - DNA, 120 bp, Artificial Sequence
  ENSG00000197355_30 (sequence is synthesized)
ggatcctgagcttgcaaaggcagaggtgctggagatcaggcacaagccgtgctcagcaggcagctgctgtaaggctctgtgatcaagtctgccatctcctccttctggggacctgccctg

SEQ ID NO: 715723 - DNA, 120 bp, Artificial Sequence
  ENSG00000197355_31 (sequence is synthesized)
gtgcccagggtgctacctctgctctggggcttgccagtttgtttgcctgggcagggatgtggctgatggtgcctggcacttggcacagggatgcagggaggaggcctgtgcctgcttctc

SEQ ID NO: 715724 - DNA, 120 bp, Artificial Sequence
  ENSG00000197355_32 (sequence is synthesized)
cctggagatctggccctactctgccgcttctgtgccctgtagtgtccttctgccatcctgtcccacccagctgggtgtgctcagaagtggggacagagcccccagcggtgccatatctga

SEQ ID NO: 715725 - DNA, 120 bp, Artificial Sequence
  ENSG00000197355_33 (sequence is synthesized)
tgaggcgcagctggtagggaagtagaggcttgagggagccaagggccccgcgggcaagtctcagggagaagaccagagggtgctcttggccctgagggtaagcagcccctgaggtggggg

SEQ ID NO: 715726 - DNA, 120 bp, Artificial Sequence
  ENSG00000197355_34 (sequence is synthesized)
catagggagtccttggggctgtggacttgggaggacagtagtgccacctcccggaccttccactgcccccacccatggttaggagaggtctcctggccaggttgccagggcggctcgcag

SEQ ID NO: 715727 - DNA, 120 bp, Artificial Sequence
  ENSG00000197355_35 (sequence is synthesized)
ggcctttggccctcactgcaggggtcccagggttgggccttcggctgctggaaatggctgctgggattgggccatccctggcgtctcaggagcaaaaacactcagtacctgcgggggctc

SEQ ID NO: 715728 - DNA, 120 bp, Artificial Sequence
  ENSG00000197355_36 (sequence is synthesized)
ctccctagacttgctgcccatgggaccagaccttcactctgtcactggaaacctggcccagctctcacctgcccggatcagggcctctgtgctgggacgtgggtgactagccctttcccc

SEQ ID NO: 715729 - DNA, 120 bp, Artificial Sequence
  ENSG00000197355_37 (sequence is synthesized)
ggttaaccaatggggtcggtggtttaaatttgcagaagactttccaagatatgggttggggtggggtgaggcatccagaggcctttgcaggtcctgggagggcatggggatgagacagcc

SEQ ID NO: 715730 - DNA, 120 bp, Artificial Sequence
  ENSG00000197355_38 (sequence is synthesized)
cccttgcccctttctctggtcaggtcagacctgtgcgtgacaggagggtcccctgctggcctagggtcttgagtgtggtcttgggtggccttgcagtgtgtgtctgctcctggccctgga

SEQ ID NO: 715731 - DNA, 120 bp, Artificial Sequence
  ENSG00000197355_39 (sequence is synthesized)
agcctttctgtccccacccctccctgactccaggcagacctgggatcgcacctggggactgtggctcttggtgtggccagaggggctgtgacccgccaaaaggtgggtacttggccattg

SEQ ID NO: 715732 - DNA, 120 bp, Artificial Sequence
  ENSG00000197360_0 (sequence is synthesized)
gtctttgtctctcgctgcagccggagttcctggtctcgtcttcgcccttctgtgtcctctgctcgtagaggcccagcctctgtggccctgtgacctgcaggtattgggaatccacagcta

SEQ ID NO: 715733 - DNA, 120 bp, Artificial Sequence
  ENSG00000197360_1 (sequence is synthesized)
agatgccaggaccccttggaagcctagaaatgggagtgttgacatttagggatgtggccttagaattctctctggaggagtggcaatgcctggacaccgcacagcagaatttatatagga

SEQ ID NO: 715734 - DNA, 120 bp, Artificial Sequence
  ENSG00000197360_2 (sequence is synthesized)
atgtgatgttagagaactacagaaacctggtctttgtgggtattgctgcctctaagccagacctgatcacctgtctggagcaaggaaaagaaccttggaatgtgaagagacatgagatgg

SEQ ID NO: 715735 - DNA, 120 bp, Artificial Sequence
  ENSG00000197360_3 (sequence is synthesized)
taactgaacccccagttgtatattcttattttgcccaagacctttggccaaagcagggcaaaaaaaattatttccaaaaagtgatactgagaacatataaaaaatgtggacgtgaaaatt

SEQ ID NO: 715736 - DNA, 120 bp, Artificial Sequence
  ENSG00000197360_4 (sequence is synthesized)
tacagttaagaaaatactgtaaaagcatggatgagtgtaaggtgcacaaagaatgttacaatggacttaaccagtgtttgacaactacccagaacaaaatatttcaatatgacaaatatg

SEQ ID NO: 715737 - DNA, 120 bp, Artificial Sequence
  ENSG00000197360_5 (sequence is synthesized)
tgaaagtctttcataaattttcaaattcaaacagacataagataggacatactggaaagaaatctttcaagtgtaaagaatgtgaaaagtcattttgcatgctttcacacttagctcaac

SEQ ID NO: 715738 - DNA, 90 bp, Artificial Sequence
  ENSG00000197360_6 (sequence is synthesized)
gagaaaccctacaaatgtaaagaatgtgggaaagcctataatgaggcctcaaacctttctacacataaaagcgaagagtgtggaaaagcc

SEQ ID NO: 715739 - DNA, 62 bp, Artificial Sequence
  ENSG00000197360_7 (sequence is synthesized)
gcggagtgtggcaaagcttttaaccaatctgcaaaccttactacacataagagaattcatac

SEQ ID NO: 715740 - DNA, 74 bp, Artificial Sequence
  ENSG00000197360_8 (sequence is synthesized)
aaccctacaaatgtgaagaatgtggcagagcttttagccagtcctcaacccttactgcacataagataattcat

SEQ ID NO: 715741 - DNA, 85 bp, Artificial Sequence
  ENSG00000197360_9 (sequence is synthesized)
taattcattaaggcctttagccggttatcccaccttactacacataagagaattcattctggagagaaaccctacaagtgtgaag

SEQ ID NO: 715742 - DNA, 120 bp, Artificial Sequence
  ENSG00000197360_10 (sequence is synthesized)
gtgtgaagaatgtggcaaagcttttaaacaatcctcaacccttactacacataagagaattcatgctggagagaaattctacaaatgtgaagtatgtagcaaagcctttagccggttctc

SEQ ID NO: 715743 - DNA, 88 bp, Artificial Sequence
  ENSG00000197360_11 (sequence is synthesized)
cggcaaagcctttaacaactcctctattcttaacagacataagatgattcatactggagagaaactctacaaacctgaaagttgtaac

SEQ ID NO: 715744 - DNA, 120 bp, Artificial Sequence
  ENSG00000197360_12 (sequence is synthesized)
tcatactggagagaaactctacaaacctgaaagttgtaacaatgcttgtgacaacattgcaaagatttccaaatataaaagaaattgtgctggtgagaaataatagaaatatgaatgtga

SEQ ID NO: 715745 - DNA, 120 bp, Artificial Sequence
  ENSG00000197360_13 (sequence is synthesized)
caaagcctttaaatggttatcacactggattgtaggtaaggtaattcattctggagaaaacttctacaagtgtgaacagtgtggcaaaacttacacaatgctcaaaccttattgcacagg

SEQ ID NO: 715746 - DNA, 120 bp, Artificial Sequence
  ENSG00000197360_14 (sequence is synthesized)
aaagcctttatacttgatgagaacaaatgtacaaatataaagaaagtaaaaaagtgattaatatctgcacacatcttattcagcatcagagaatttatacttaatagcattaaaggtgca

SEQ ID NO: 715747 - DNA, 120 bp, Artificial Sequence
  ENSG00000197360_15 (sequence is synthesized)
attactgtcaaaagagttcagaaaatataagcatttaaagtgctgaagaggatttattttgaagacaaacattacaaatataaacgaagttgtggtaactttacttgtaacacagatctt

SEQ ID NO: 715748 - DNA, 120 bp, Artificial Sequence
  ENSG00000197360_16 (sequence is synthesized)
gttgtattcattctgtattagagcaaaccctgaggcaattgctcaaactttgttcaacatcagagaatttatatcaaagaaaaaccctgtaaatgtaataaatttagaaaaaaacattta

SEQ ID NO: 715749 - DNA, 120 bp, Artificial Sequence
  ENSG00000197360_17 (sequence is synthesized)
gatgtggcggggtctttgtctctcgctgcagccggagttcctggtctcgtcttcgcccttctgtgtcctctgctcgtagaggcccagcctctgtggccctgtgacctgcagggagtgttg

SEQ ID NO: 715750 - DNA, 120 bp, Artificial Sequence
  ENSG00000197360_18 (sequence is synthesized)
agtcgcacagttgcgcggtggccgacaggaattgttccccagtggtaagccgcaatctagctgacgtggccccaaccccacattccttcctgccctgcaatgtctgaagaaaccctacag

SEQ ID NO: 715751 - DNA, 120 bp, Artificial Sequence
  ENSG00000197360_19 (sequence is synthesized)
agcaaattggcggctgcaaagaaaaagctgccttggggtgcggtgcaggggtccagagccatgtcggacctgttactgttactactggacctgactctgttactgctgctgatgctgctg

SEQ ID NO: 715752 - DNA, 120 bp, Artificial Sequence
  ENSG00000197360_20 (sequence is synthesized)
actcagggcagttggctggggtggcagtgagtgccggctcaccccccatccctacaagttccatgtggagccctatggtgagactgggtggcttctcaccagagctgcagcatctccccc

SEQ ID NO: 715753 - DNA, 120 bp, Artificial Sequence
  ENSG00000197360_21 (sequence is synthesized)
aaactctgctccatcgctgtccactaggacaaccctgcatgggagtgttgacatttagggatgtggccttagaattctctctggaggagtggcaatgcctggacaccgcacagcagaatt

SEQ ID NO: 715754 - DNA, 120 bp, Artificial Sequence
  ENSG00000197360_22 (sequence is synthesized)
tggggtttcaccatattggccaggctgggctcgaactcctaacctgatccacgcaccttggcctcccagagtgccgggattgcagtcatgagcaaccacacccaccaggacaacatattt

SEQ ID NO: 715755 - DNA, 120 bp, Artificial Sequence
  ENSG00000197360_23 (sequence is synthesized)
ccaggacaacatattttttcctctctcagtggatctgattgtcatcaatctgcaattacaaaagcaatccagtcaatgtagttagctttgcacaatactattgtatctgtaattccttat

SEQ ID NO: 715756 - DNA, 120 bp, Artificial Sequence
  ENSG00000197360_24 (sequence is synthesized)
gtaacagttttacaatttgtctagtgaaataaacatctttatcattggaggctttttcagaaatgttccatgagaaaaatgtatttatttatatccttttagctactgttataacatcag

SEQ ID NO: 715757 - DNA, 120 bp, Artificial Sequence
  ENSG00000197360_25 (sequence is synthesized)
tttttcattgtttttgaaaacacatagataatctgcataattttgagaaactctatgttaaactgtttttcaagttctgtttttacatcatgtcctaaatgtgtgagagcagtggtttct

SEQ ID NO: 715758 - DNA, 120 bp, Artificial Sequence
  ENSG00000197361_0 (sequence is synthesized)
ggaggcaggtcagccgtcccccggctgcagctgcactcacatgtggccactgctcaccatgcacataacccagctcaaccgggagtgcctgctgcacctcttctccttcctagacaagga

SEQ ID NO: 715759 - DNA, 120 bp, Artificial Sequence
  ENSG00000197361_1 (sequence is synthesized)
cagcaggaagagccttgccaggacctgctcccagctccacgacgtgtttgaggaccccgcactctggtccctgctgcacttccgttccctcactgaactccagaaggacaacttcctcct

SEQ ID NO: 715760 - DNA, 120 bp, Artificial Sequence
  ENSG00000197361_2 (sequence is synthesized)
gggcccggcactccgcagcctctccatctgctggcactccagccgcgtgcaggtgtgcagcattgaggactggctcaagagtgccttccagagaagcatctgcagccggcacgagagcct

SEQ ID NO: 715761 - DNA, 120 bp, Artificial Sequence
  ENSG00000197361_3 (sequence is synthesized)
ggtcaatgatttcctcctccgggtgtgcgacaggctttctgctgtgcgctccccacggaggcgggaggcgcctgcaccgtcctcggggactccgatcgccgttggaccgaaatcacctcg

SEQ ID NO: 715762 - DNA, 120 bp, Artificial Sequence
  ENSG00000197361_4 (sequence is synthesized)
gtggggaggacctgaccactcggagttcgccgacttgcgctcgggggtgacgggggccagggctgccgcgcgcaggggtctggggagcctccgggcggagcgacccagcgagaccccgcc

SEQ ID NO: 715763 - DNA, 120 bp, Artificial Sequence
  ENSG00000197361_5 (sequence is synthesized)
ggctcccggagtgtcctggggaccgccacctccaggagccccggtggtgatctcggtgaagcaggaggaggggaagcaggggcgcacgggcagaaggagccaccgagccgctcctccttg

SEQ ID NO: 715764 - DNA, 120 bp, Artificial Sequence
  ENSG00000197361_6 (sequence is synthesized)
ttcgctcccaattgttgaatgcttacataaactgcatagttacccatattttctactgttctcataagggaaaaagaaatgatttggaagaaaaaaaaagcctcaaactaaacaaaaaca

SEQ ID NO: 715765 - DNA, 120 bp, Artificial Sequence
  ENSG00000197361_7 (sequence is synthesized)
aaaccagcagccctggctaagcttttgataatggaaccattataagctgacaagctagatttttcacctgttggatttgctggacatgagcacaagcctaggcttccaatttgaatttca

SEQ ID NO: 715766 - DNA, 120 bp, Artificial Sequence
  ENSG00000197361_8 (sequence is synthesized)
gggctgtagtcactgatgtgtcacatttagtgaaggctctcggccccccggcagccgcctggtcctgggtcactggggagaattctgggtgggtggaagaggcgaggagcactgtgatgg

SEQ ID NO: 715767 - DNA, 120 bp, Artificial Sequence
  ENSG00000197361_9 (sequence is synthesized)
gcgctgttcacactccggctccacccagcgccagctgcgacaaagccctttacccctcccaggccaggtgtttcttctgtgtgaaagaggagcttgatccctactcacaggttccttaat

SEQ ID NO: 715768 - DNA, 120 bp, Artificial Sequence
  ENSG00000197361_10 (sequence is synthesized)
tcattgctcaaatagggaaacggcaaggaaaaagacaaattctgttctcatgaagcttaccttctagtgggggaagagacaacaggtaactggtatataagagggtagaagggccaggtg

SEQ ID NO: 715769 - DNA, 74 bp, Artificial Sequence
  ENSG00000197361_11 (sequence is synthesized)
aacaggtaactggtatataagagggtagaagggccaggtgcgcgattcacgaggtcaggagatcgagaccatcc

SEQ ID NO: 715770 - DNA, 120 bp, Artificial Sequence
  ENSG00000197361_12 (sequence is synthesized)
gaggattaaatgacacagtggcacctggcacatagtaggtactgatgaacgtctactgaatctggttcttctggcactcagctcaggtcgggaggaatggctgaggatggctgggcaggg

SEQ ID NO: 715771 - DNA, 120 bp, Artificial Sequence
  ENSG00000197361_13 (sequence is synthesized)
ggacagtccgctctttgttttttccctgtatcagaattattccaaagattcttagaagaaaagatcacccaacacctttgaggcttaaacacctaatccttataaccaccttgaaggtaa

SEQ ID NO: 715772 - DNA, 120 bp, Artificial Sequence
  ENSG00000197361_14 (sequence is synthesized)
caattcctcccacttgacaaatgaggaagtgacgcccagcaaggttcagacatctgtcctgggtctgacagcaaataagtcaccagccagtcacctgagctgccggagccagtttcttca

SEQ ID NO: 715773 - DNA, 120 bp, Artificial Sequence
  ENSG00000197361_15 (sequence is synthesized)
tgtacaaaactgggggtgcagaggttgacggggtgactaatgagggcacacaaacctgaaggaggcccgggctcggtgtgacacctggctgcacccaacatatttaagttccttacttcc

SEQ ID NO: 715774 - DNA, 120 bp, Artificial Sequence
  ENSG00000197361_16 (sequence is synthesized)
ctcccctggcacaaaggagccgagctggcacagccaggggcagtcacggagctgcgggggaggctggcagggaaagggaaacgcttccccagcccagactctagctccctctggctgcgg

SEQ ID NO: 715775 - DNA, 120 bp, Artificial Sequence
  ENSG00000197361_17 (sequence is synthesized)
ggagccaaggccccggcccattagtcggtccttctggactggaagcaggctggtcccgtttgtttccagggaaagcgggttaggactgcctgtggaaggccccgttgcaggctcctcaca

SEQ ID NO: 715776 - DNA, 120 bp, Artificial Sequence
  ENSG00000197361_18 (sequence is synthesized)
accccagtggtagacattattccccccacgcagaggaaatgaaggctccgtgagtgactgacacggcgataaaccaagtctaacttggctcaagatcttttctttgctgggaggggctgg

SEQ ID NO: 715777 - DNA, 120 bp, Artificial Sequence
  ENSG00000197361_19 (sequence is synthesized)
cctgggtgggtgtccgtgactgtacctgctcagggcttgcctctagctgcctccgaaccctacccttttccaggctggtggcccaggggatgcaggaacagctctagtctactaagctga

SEQ ID NO: 715778 - DNA, 120 bp, Artificial Sequence
  ENSG00000197361_20 (sequence is synthesized)
acccggactcaatgctaacgcgtgcccccaccgccttgagggttgggatgggcctgtcactaggccacctccaaggaaacaaatccctcttcccactcacgtcccgccgggacattcagg

SEQ ID NO: 715779 - DNA, 120 bp, Artificial Sequence
  ENSG00000197361_21 (sequence is synthesized)
ggcctcagcttgaagctagactggagcaatcgccaagcaccgctcccctgcaaggcagcacatccagagcgaaacaaagagtcaagggttgtggctcctggaaccggcattccctctgtc

SEQ ID NO: 715780 - DNA, 120 bp, Artificial Sequence
  ENSG00000197361_22 (sequence is synthesized)
cacagccgccccaggactctgctgggccggggtcggggcttcccactaggggctcccaaggctacgagccaagaacccacgcagatgaaggtacggtggggtgcaggggcagaaagagga

SEQ ID NO: 715781 - DNA, 120 bp, Artificial Sequence
  ENSG00000197361_23 (sequence is synthesized)
gggaaaatgggccggccagaaagccgacttggaaccctgcagtgtcatcgcagccaagtgtcttcacctcgcagggcccgagtcctcctcggtaaatgagtccactcggtcccatggggc

SEQ ID NO: 715782 - DNA, 120 bp, Artificial Sequence
  ENSG00000197361_24 (sequence is synthesized)
ggttgggtagctttaacaagccagtgagccccgggtcaccgcactctcctcacaggtgccccaacctggcgtccgtcacgctctcgggctgcggccacgttaccgacgactgcctggcgc

SEQ ID NO: 715783 - DNA, 120 bp, Artificial Sequence
  ENSG00000197361_25 (sequence is synthesized)
gcctgctgcgctgctgcccacgcctgcgcgcactgcgcctggagaactgcgcgcgcgtcaccaaccgcacgttggctgccgtggcggcggacgggcgcgcgctgcagacattgcacgtgg

SEQ ID NO: 715784 - DNA, 120 bp, Artificial Sequence
  ENSG00000197361_26 (sequence is synthesized)
cagacattgcacgtggacttctgccgcaacgtgagcgcggccggcctgcgccgcctgcgcgccgcgtgcccgcgcctggccctgcgggcagagcacagcgccgccatgctgcccgaccag

SEQ ID NO: 715785 - DNA, 120 bp, Artificial Sequence
  ENSG00000197361_27 (sequence is synthesized)
cgcccgccgcggccctcggcaagctgctgcagcgctagacgccgccccgccgctgcccccggggaaggagcgcagccccagaccgtcctggcttcgaacccagctcttccaccttcagac

SEQ ID NO: 715786 - DNA, 120 bp, Artificial Sequence
  ENSG00000197361_28 (sequence is synthesized)
caccaccgcatattctgagcctcattttccccgtctgcacagtggggataagaaagcctacctcacgttacgattttatacataggataaacgcaagattaaatggatatttggaaaaca

SEQ ID NO: 715787 - DNA, 120 bp, Artificial Sequence
  ENSG00000197362_0 (sequence is synthesized)
agtgcgcagcagggcaggttcctgcggagccgccggagacggtcgggtttgccagggccgggcgggaccgcggggaccatggcggagccgcctcggctacctctgacttttgaggatgtt

SEQ ID NO: 715788 - DNA, 120 bp, Artificial Sequence
  ENSG00000197362_1 (sequence is synthesized)
gctatttatttctccgagcaagaatggcaggatctagaggcatggcagaaggaactttacaagcatgtgatgagaagcaattatgagactctcgtctctctagatgatggacttccaaaa

SEQ ID NO: 715789 - DNA, 120 bp, Artificial Sequence
  ENSG00000197362_2 (sequence is synthesized)
ccagaactaatatcctggattgaacacgggggagagcccttcaggaaatggagagaatcacagaaatcaggaaacataatttgctcctctgttgatatgcattttgatccaggttttgag

SEQ ID NO: 715790 - DNA, 120 bp, Artificial Sequence
  ENSG00000197362_3 (sequence is synthesized)
gaacagctgttttggggaagccagcaggctatgaattcaggaaaaactaaaagccatttccaattagatcctgaaagccagtgttcctttggatcctttgtttccttcaggcctgaccaa

SEQ ID NO: 715791 - DNA, 120 bp, Artificial Sequence
  ENSG00000197362_4 (sequence is synthesized)
ggcatcaccctcgggagcccacagagacacgacgccagggctcctccaccactagcctgcggccccagtgaatctaccctaaaagaaggaatcccaggtcccagaaatctggatcttcct

SEQ ID NO: 715792 - DNA, 120 bp, Artificial Sequence
  ENSG00000197362_5 (sequence is synthesized)
ggtttgtgggacgtccccgcctgggagagcacccagcacccttggcctgtctgcggggaaagctgttgggagaacaaccatttagtaatgcaccagagaggccactcaaaggaccggaca

SEQ ID NO: 715793 - DNA, 120 bp, Artificial Sequence
  ENSG00000197362_6 (sequence is synthesized)
cgtagggcctgggagaaattcaacaagagggcggagacgcagatgccgtggagcagccctcgggtacagaggcacttccggtgtggcgtgtgcggtaagagcttccgccggaagctgtgt

SEQ ID NO: 715794 - DNA, 120 bp, Artificial Sequence
  ENSG00000197362_7 (sequence is synthesized)
ctgctgcgccatctggcggcccacacggggaggggccccttccggaacgctgacggtgaaatgtgcttccgacacgagctgacccatcccagccaccgcctcccgcagcagggggagaag

SEQ ID NO: 715795 - DNA, 120 bp, Artificial Sequence
  ENSG00000197362_8 (sequence is synthesized)
cctgcccagtgcaccccatgcggcaagcgctccctcccagtggacagcacgcaggctcgccggtgccagcacagccgggaggggccggcctcttggagagaaggccgcggggcctccagc

SEQ ID NO: 715796 - DNA, 120 bp, Artificial Sequence
  ENSG00000197362_9 (sequence is synthesized)
agtgtgcactcgggacagaaaccaggctcgcgcctgccccaggaggggaacagccaccaggaaggggacacggaggcgctgcagcatggcgcagaggggccctgctcctgctcggagtgt

SEQ ID NO: 715797 - DNA, 120 bp, Artificial Sequence
  ENSG00000197362_10 (sequence is synthesized)
ggcgagcgctcccctatgagcgccaggctcgccagcccctgcagggcgcatactggagaaaagcccttccagtgtgcgcattgcaccaagcgcttccgcctgcgccgcctgctgcaggtc

SEQ ID NO: 715798 - DNA, 120 bp, Artificial Sequence
  ENSG00000197362_11 (sequence is synthesized)
caccagcacgcgcacggtggggagagaccgttctcctgcaggaagtgtggcaagggcttcgccaagcagtgtaaactcacggagcacattcgagtccacagcggagagaagcctttccgg

SEQ ID NO: 715799 - DNA, 120 bp, Artificial Sequence
  ENSG00000197362_12 (sequence is synthesized)
tgtgccaagtgtggcaggaacttccgtcagaggggacagctgctgcggcaccagcggctgcacacggacgagaagccctttcagtgcccagagtgtgggctgagcttccgcctggagagc

SEQ ID NO: 715800 - DNA, 120 bp, Artificial Sequence
  ENSG00000197362_13 (sequence is synthesized)
ccgtgagcacctgagagtgcacagcggggagaggcccttccagtgcctgaagtgcgacaagcgcttccgcctgaagggcatcctgaaggcccaccagcacacgcacagcaaggagaggcc

SEQ ID NO: 715801 - DNA, 120 bp, Artificial Sequence
  ENSG00000197362_14 (sequence is synthesized)
gttctcgtgcggggagtgtggcaagggcttcaccagacaatccaagctcacggagcacttgcgcgtgcacagcggggagagacccttccagtgcccagagtgcaacaggagcttccgcct

SEQ ID NO: 715802 - DNA, 120 bp, Artificial Sequence
  ENSG00000197362_15 (sequence is synthesized)
gaaggggcagctgctcagccatcagcgcctgcacacgggagagaggcccttccagtgtccggagtgcgacaagcgctatcgcgtgaaggccgacatgaaggcccaccagctgctgcacag

SEQ ID NO: 715803 - DNA, 120 bp, Artificial Sequence
  ENSG00000197362_16 (sequence is synthesized)
cggggagatgcctttctcctgtgagtgcggcaagggctttgtgaaacactcaaagctcatcgagcacatcagaacgcacacgggagagaagccttttcagtgtcccaagtgtgacaagag

SEQ ID NO: 715804 - DNA, 120 bp, Artificial Sequence
  ENSG00000197362_17 (sequence is synthesized)
tttccgcctgaaggcgcagctgctcagccatcagggcctgcacacaggggagaggccttttcactgccctgagtgtgacaagaacttccgggaaaggggacacatgctgaggcaccagcg

SEQ ID NO: 715805 - DNA, 120 bp, Artificial Sequence
  ENSG00000197362_18 (sequence is synthesized)
catccacaggcccgagaggccctttgcctgtggcgattgtgggaagggcttcatttacaagtctaagcttgcggagcacatcagagtacacacaaaatcctgtcctgctccaaatgaact

SEQ ID NO: 715806 - DNA, 120 bp, Artificial Sequence
  ENSG00000197362_19 (sequence is synthesized)
ggacattaagaaaaggctcagccaactgtttgcaatgatagaggccgattggagttgaggcagagtgggacatccaaagcgttgagcaggattggtattgcccaggaatccacagcaaca

SEQ ID NO: 715807 - DNA, 120 bp, Artificial Sequence
  ENSG00000197362_20 (sequence is synthesized)
gtagccagacccgctggtagacgggttttaggagcaggtatccttctttgagcaagagtgtcatgcaagttaggaatatgaagaaccacaaaggattttctcttcagaagcatcaccaat

SEQ ID NO: 715808 - DNA, 75 bp, Artificial Sequence
  ENSG00000197362_21 (sequence is synthesized)
atattggaaaagacagcattataaaacaaggacataattttatgaaaaaggaggcatctgcaaacgaaaacaatt

SEQ ID NO: 715809 - DNA, 120 bp, Artificial Sequence
  ENSG00000197362_22 (sequence is synthesized)
aattttatgaaaaaggaggcatctgcaaacgaaaacaatttctacgaggttatatgtgattgttaacatttttaagaaaaggtgcacacagaaatccagataagatgtgattacctttgt

SEQ ID NO: 715810 - DNA, 120 bp, Artificial Sequence
  ENSG00000197362_23 (sequence is synthesized)
atgtgattacctttgtgcatttgtataaaaatatatgtgtgtaattataaggaagttctgacattttaaaaagtaattgttataaaagtaaatttaggccaggcacagtggttcatgcct

SEQ ID NO: 715811 - DNA, 120 bp, Artificial Sequence
  ENSG00000197362_24 (sequence is synthesized)
tcccagctactcctgaagctgaggtgggaggatcgcctgagcccagggaggtcaaggctgcagtgagcaatgatggtgccactgcactccagtatggatgacatagtatgacactgtctc

SEQ ID NO: 715812 - DNA, 120 bp, Artificial Sequence
  ENSG00000197362_25 (sequence is synthesized)
gctgcgtttgggggccacccgggctgtgcgtgggagtcgggttggggcggagcggaggggagtcagtgcgcagcagggcaggttcctgcggagccgccggagacggtcgggtttgccagg

SEQ ID NO: 715813 - DNA, 120 bp, Artificial Sequence
  ENSG00000197363_0 (sequence is synthesized)
ggaaccggagcctgagagccgggcgccgtgcgctcctccccgcgctgtctcggcggcccaggaattcactgtctgtagcatctgctcctccacagagggaccctggaatggcgatggcac

SEQ ID NO: 715814 - DNA, 120 bp, Artificial Sequence
  ENSG00000197363_1 (sequence is synthesized)
tcccgatgcctggacctcaggaggcggttgtgttcgaggatgtggctgtgtacttcacaaggatagagtggagttgcctggcccccgaccagcaggcactctacagggacgtgatgctgg

SEQ ID NO: 715815 - DNA, 120 bp, Artificial Sequence
  ENSG00000197363_2 (sequence is synthesized)
agaactatgggaacctggcctcactaggctttcttgttgccaaaccagcactgatctccctattggagcaaggagaggagccgggggccttgattctgcaggtggctgaacagagcgtgg

SEQ ID NO: 715816 - DNA, 120 bp, Artificial Sequence
  ENSG00000197363_3 (sequence is synthesized)
ccaaagccagcctgtgcacagattccaggatggaggctgggatcatggagtctcctctgcagagaaagctctccaggcaggcaggactgccgggcaccgtgtgggggtgcctcccctggg

SEQ ID NO: 715817 - DNA, 120 bp, Artificial Sequence
  ENSG00000197363_4 (sequence is synthesized)
ggcaccctgtgggggggcaccctgcaccaccccacccgcatggcggtcctgaggacgggtcagataaacccacccacccccgggctcgggagcacagcgcctccccaagggttctgcagg

SEQ ID NO: 715818 - DNA, 120 bp, Artificial Sequence
  ENSG00000197363_5 (sequence is synthesized)
aagacctgggccggcctgtggggagctcagccccccgctacaggtgcgtgtgcggcaaggcgttcagatacaactcgctgcttctcaggcaccagatcatccacaccggcgccaagccct

SEQ ID NO: 715819 - DNA, 120 bp, Artificial Sequence
  ENSG00000197363_6 (sequence is synthesized)
tccagtgcacagagtgcgggaaggccttcaagcaaagctccatcctgctgcggcaccagctgatccacactgaggagaagccgttccagtgcggcgagtgcgggaaggccttccggcaga

SEQ ID NO: 715820 - DNA, 120 bp, Artificial Sequence
  ENSG00000197363_7 (sequence is synthesized)
gcacgcagctggctgcccaccaccgcgtccacacccgcgagcggccctacgcatgcggcgagtgcggcaaggccttcagccgcagctcccggctgctgcagcaccagaagttccacaccg

SEQ ID NO: 715821 - DNA, 120 bp, Artificial Sequence
  ENSG00000197363_8 (sequence is synthesized)
gggagaagcccttcgcgtgcacagagtgcggcaaggcgttctgccgcaggttcaccctcaacgagcacggccgcatccacagcggggagcggccctaccggtgcctgcggtgtgggcagc

SEQ ID NO: 715822 - DNA, 120 bp, Artificial Sequence
  ENSG00000197363_9 (sequence is synthesized)
caggacggcggcgtggggcagggcgccctgctcggagctgcgcagaggccccaggcgggggacccgccccacgagtgcccggtgtgcgggaggccgttccgacacaactccctgctgctg

SEQ ID NO: 715823 - DNA, 120 bp, Artificial Sequence
  ENSG00000197363_10 (sequence is synthesized)
gctgctgcacctgcgcctacacacgggcgagaagccgttcgagtgcgcggagtgcggcaaggccttcggtcgcaagtccaacctcactctgcaccagaagatccacaccaaggagaagcc

SEQ ID NO: 715824 - DNA, 120 bp, Artificial Sequence
  ENSG00000197363_11 (sequence is synthesized)
cttcgcgtgcaccgagtgcggcaaggcgttccgcaggagctacacgctgaacgagcactaccggctccacagcggcgagaggccataccggtgccgcgcctgcgggagggcctgcagccg

SEQ ID NO: 715825 - DNA, 120 bp, Artificial Sequence
  ENSG00000197363_12 (sequence is synthesized)
gctgtccaccctcatccagcaccagaaggtgcacggccgcgagcccggggaggacacagagggcaggcgggcgccctgttgggcttcctgatgacggggacgacaggccgaggattcacg

SEQ ID NO: 715826 - DNA, 120 bp, Artificial Sequence
  ENSG00000197363_13 (sequence is synthesized)
ctggaagcccacccaagccggcggggccctagcgcagaaattcagaaccccctgtcctgaaggtgaagcaaagtctaaagaaagggccagctcccatcaggagctcggcttcttgctcca

SEQ ID NO: 715827 - DNA, 120 bp, Artificial Sequence
  ENSG00000197363_14 (sequence is synthesized)
gccgggcactggggagggaaagggcaccaggcagcccgtggtgtggcctcaggaaccactatcagccaccatttcctggggccttccggaaatgtccaggagcgggcagaagggagagag

SEQ ID NO: 715828 - DNA, 120 bp, Artificial Sequence
  ENSG00000197363_15 (sequence is synthesized)
ggaggggcagctatgctcagtccccaaagagcagggcacagggggcgccacagacgcatatgcagctgagctccccacaggccggcccgggtcttcgtgcagaaccattgggcacagcca

SEQ ID NO: 715829 - DNA, 120 bp, Artificial Sequence
  ENSG00000197363_16 (sequence is synthesized)
ggccttagcgccaggctccgtgtggcggtcaattccaggtgctgtaaagccgactaacagggtacagggagccttagctggctgccatgtctcctgcctgtaatcccatcactttgggag

SEQ ID NO: 715830 - DNA, 78 bp, Artificial Sequence
  ENSG00000197363_17 (sequence is synthesized)
agaccagcttgggcaacatggtgaaacttctctacaaaaaatttaaaaataagtcaggtatcgtggtctgtgcctgta

SEQ ID NO: 715831 - DNA, 120 bp, Artificial Sequence
  ENSG00000197363_18 (sequence is synthesized)
ccctgtcctgaaggatctctctgtcagccagcctggagtgcaatggcacaatcatggcttactgcagcctccagctcccaggctcaagcgtttctcccaccttagcctcctgagtagctg

SEQ ID NO: 715832 - DNA, 120 bp, Artificial Sequence
  ENSG00000197363_19 (sequence is synthesized)
ggcgaagcattgtttctgagtgtgtgaggatgttttcagtggactcagtgaagatctgccctcagcgtgggcaggcacatccacttggttggggacccagatggaacacaaagggagaag

SEQ ID NO: 715833 - DNA, 120 bp, Artificial Sequence
  ENSG00000197363_20 (sequence is synthesized)
acaagcaaattctcttttctggagggagacacccatctcctgcccttggacatcaggactccaggttcttcggcctttggactcaggcttgccacagaggcctcccagggctctcggcca

SEQ ID NO: 715834 - DNA, 120 bp, Artificial Sequence
  ENSG00000197363_21 (sequence is synthesized)
gtcagcctcagaatgagagttacaccactggcttccttggttcaaccaccttcttacctggactgagcctcacttacagcttctctaggtctccagcttgcagacagcctatgggaggac

SEQ ID NO: 715835 - DNA, 120 bp, Artificial Sequence
  ENSG00000197363_22 (sequence is synthesized)
ttctcagcctccataagtgtgtgggccagttcgcctaataaatcccctctcctggccgggcgcggtagctctcccctgtaatctcagcattttgggaggcagaggtaggtggatcacctg

SEQ ID NO: 715836 - DNA, 66 bp, Artificial Sequence
  ENSG00000197363_23 (sequence is synthesized)
tggtgagacccccgtctctactaaaagtacaaaaagtagctgggtgtggcaacctgggaggtagag

SEQ ID NO: 715837 - DNA, 120 bp, Artificial Sequence
  ENSG00000197363_24 (sequence is synthesized)
gtgcgctcctccccgcgctgtctcggcggcccaggaattcactgtctgtagcatctgctcctccacagagggaccctggaatggcgatggcactcccgatgcctggacctcaggtgagca

SEQ ID NO: 715838 - DNA, 120 bp, Artificial Sequence
  ENSG00000197363_25 (sequence is synthesized)
ccccctgagcccgtccattgccccaggagactgcttcgcccctagcctcagcttttcagccctgagaaccttacagcttgcctcacacccacccacatcacaggatggagtctgcaagcc

SEQ ID NO: 715839 - DNA, 120 bp, Artificial Sequence
  ENSG00000197363_26 (sequence is synthesized)
gaggacagcctcctcgctctatggccaggcctcacacatggctctgccaaatccttccagcctttgggcagaagtgggcttcctgcggcctcctctggcccctgagcttctatggtcagc

SEQ ID NO: 715840 - DNA, 120 bp, Artificial Sequence
  ENSG00000197363_27 (sequence is synthesized)
cattgagggcagggtccctgtccttccccagtgcctgcctccttcctggtgtgaatggtcagcccatcctccctctcctgatgctgactcactgctggtgttagaaattgagacccagag

SEQ ID NO: 715841 - DNA, 120 bp, Artificial Sequence
  ENSG00000197363_28 (sequence is synthesized)
ggtggggatgctccccacagtgcaggtgctccttccccaaatccctgatagcctgtggagagggcgaggccaaggttgggacccccttcctggtaaatctctctccctcccccaagttca

SEQ ID NO: 715842 - DNA, 120 bp, Artificial Sequence
  ENSG00000197363_29 (sequence is synthesized)
gtttttccctcttcctctctggggcttctgctgagaatgaggccgctcactcggggggtgttgggctgccctttctctgctgggccctgtggatgcagcagtgggcagcaaggagagagg

SEQ ID NO: 715843 - DNA, 120 bp, Artificial Sequence
  ENSG00000197363_30 (sequence is synthesized)
gccgggaggtgcgtctgtgttagcttcaaaggaagttggttccattgcagattcaaggtctgacacatttttgaggggaagctggaggctccccaaggagcccctctctgcttcctgttg

SEQ ID NO: 715844 - DNA, 120 bp, Artificial Sequence
  ENSG00000197363_31 (sequence is synthesized)
ggcacccactgccagcgtcagcctgcctgaggcttctctcctggggcaggccccccatctccccctggccacctagctgcccccttctgggatagtgaatgttcctgacccactccaagc

SEQ ID NO: 715845 - DNA, 120 bp, Artificial Sequence
  ENSG00000197363_32 (sequence is synthesized)
ccctaatacactgcccagcagaagccaggaaggaagccctgccagctcagaaggtgggccaggagagaagggtgtggccggaagggtagccggtgggggtgctgcatcctcttggcccca

SEQ ID NO: 715846 - DNA, 120 bp, Artificial Sequence
  ENSG00000197363_33 (sequence is synthesized)
cggggagcaccctgtcacccctaacagatgaagagaagggtttctggtgtctccagatttttcaggcgccaccatgttcctctcatccagacgtcagcacccaaggtggaagcaggtcat

SEQ ID NO: 715847 - DNA, 120 bp, Artificial Sequence
  ENSG00000197363_34 (sequence is synthesized)
ggcatgcccggcccagctgcagtccgagtgcagatcccatggcgagcgtgggatccagcccaaagcacaagccacgcacagcccgccaggttgagtgggcaggtacctccaacagccagc

SEQ ID NO: 715848 - DNA, 120 bp, Artificial Sequence
  ENSG00000197363_35 (sequence is synthesized)
ccaggttgagtgggcaggtacctccaacagcctggagccgtgaggccttgcgcaggggcgttgccggccgtggaggtctctggctggcaaagtggcaccgaaagagtcctgtgtcataac

SEQ ID NO: 715849 - DNA, 120 bp, Artificial Sequence
  ENSG00000197363_36 (sequence is synthesized)
ggtgaggggggattgagttacctgcccactggtgtgtcaaactccatgatgggggtgggaacatgcagacctggcccctccaaggcccactgctccccgggctgtgcgccccacagtctg

SEQ ID NO: 715850 - DNA, 120 bp, Artificial Sequence
  ENSG00000197363_37 (sequence is synthesized)
gctggatccaccctccagagaacaagaatcctgggcagtagccgggacatggtgggggaggctgaagggttgtccctgagcatccccaacatggagctcggaagtctgggccatgggcag

SEQ ID NO: 715851 - DNA, 120 bp, Artificial Sequence
  ENSG00000197363_38 (sequence is synthesized)
gaaagcacgaaggtcagggccagcctggggaaccaagagctgtgccacgatcccttccacctggggcagctgcccacatgcccgccactgggttccatcacctgagactcctggcaggtg

SEQ ID NO: 715852 - DNA, 120 bp, Artificial Sequence
  ENSG00000197363_39 (sequence is synthesized)
cctctctgagtctttgtcctgtgctggaaactgggatgtgcagcacacatcttcacacccacagcacggacagcgggaataacacttcctttggggatccagggtttctggtgtctccag

SEQ ID NO: 715853 - DNA, 120 bp, Artificial Sequence
  ENSG00000197364_0 (sequence is synthesized)
atgcttcccagctctggctttttgaaagcaaagatgaatatccctctaggtgagaaagtcatgttggacatagtcgcgatgtttcgccaatacagtggagatgatggtaggatggacatg

SEQ ID NO: 715854 - DNA, 120 bp, Artificial Sequence
  ENSG00000197364_1 (sequence is synthesized)
gatgataataaggataagaaggttaattattctgagtttctttccttgctgggggatataaccatagaccaccacaagataatgcatggagtggcaccctgttccgggggaagccagtga

SEQ ID NO: 715855 - DNA, 120 bp, Artificial Sequence
  ENSG00000197372_0 (sequence is synthesized)
agacaagatggcttccgggatttggcggcgcctttgtctctcgctgcagccggagctccaggtctcgctttcattgctctgtgtcctctgctcctagaggtccagcctctgtgggcctgt

SEQ ID NO: 715856 - DNA, 120 bp, Artificial Sequence
  ENSG00000197372_1 (sequence is synthesized)
gaggtccagcctctgtgggcctgtgacctgcagaaattgagagatccacagctaagactccaggaccccctggaagcctagaaatgggactgttgacatttagggatgtggccatagaat

SEQ ID NO: 715857 - DNA, 120 bp, Artificial Sequence
  ENSG00000197372_2 (sequence is synthesized)
tggacactgcacagcggaatttatataaaaatgtgattttagagaactacagaaacctggtcttcctgggtattgctgtctctaagcaagacctgatcacctgtctggagcaagaaaaag

SEQ ID NO: 715858 - DNA, 120 bp, Artificial Sequence
  ENSG00000197372_3 (sequence is synthesized)
agcctttgactgtgaagagacatgagatggtgaatgaacccccagtaatgtgttctcattttgcccaagagttttggccagagcagaacataaaagattcttttgaaaaagtgacactga

SEQ ID NO: 715859 - DNA, 120 bp, Artificial Sequence
  ENSG00000197372_4 (sequence is synthesized)
gaagatatgaaaaatgtggaaatgataattttcagttaaaaggctgtaaaagtgtggatgaatgtaagttgcacaagggaggttataatggacttaaccaatgtttaccaactatgcaga

SEQ ID NO: 715860 - DNA, 120 bp, Artificial Sequence
  ENSG00000197372_5 (sequence is synthesized)
gcaaaatgtttcaatgtgataaatatgtgaaagtctttaataaattttcacattcagatagacataagataaaacatatggaaaataaacctttcaaatgtaaagaatgtggcagatcat

SEQ ID NO: 715861 - DNA, 120 bp, Artificial Sequence
  ENSG00000197372_6 (sequence is synthesized)
tttgcatgctttcacacctaactcgacatgaaagaaattataccaaggtgaatttctgcaaatgtgaagaatgtgaaaaagctgttaaccaatcttcaaagcttactaaacataaaagaa

SEQ ID NO: 715862 - DNA, 120 bp, Artificial Sequence
  ENSG00000197372_7 (sequence is synthesized)
tttatacttgtgagaaactctacaaatgtcaagaatgtgacagaacttttaaccaattctcaaaccttactgaatataaaaaagattatgctcgagagaaaccatacaaatgtgaagaat

SEQ ID NO: 715863 - DNA, 70 bp, Artificial Sequence
  ENSG00000197372_8 (sequence is synthesized)
taagataattcatactctcaaatcttactacacataaaaaaattcatactggagagcaaccctacatatg

SEQ ID NO: 715864 - DNA, 86 bp, Artificial Sequence
  ENSG00000197372_9 (sequence is synthesized)
atcttactacacataaaaaaattcatactggagagcaaccctacatatgtgaagaatgtggcaaggcttttacccaatcctcaaaa

SEQ ID NO: 715865 - DNA, 120 bp, Artificial Sequence
  ENSG00000197372_10 (sequence is synthesized)
atcctcaaaacttactgaacataaaaacattcatactggagagcaaccctacaaatgtgaggaatgcggcaaagcttttaaccgatcctcaaatcttacggaacataggaaaattcatac

SEQ ID NO: 715866 - DNA, 77 bp, Artificial Sequence
  ENSG00000197372_11 (sequence is synthesized)
atcttacggaacataggaaaattcataccgacactcctcagcccttactacacataagagaattcacactggagaga

SEQ ID NO: 715867 - DNA, 67 bp, Artificial Sequence
  ENSG00000197372_12 (sequence is synthesized)
ccaatcctcaaaacttactgaacataagaaaattcattctggagagataccctacaagtgtgaagaa

SEQ ID NO: 715868 - DNA, 120 bp, Artificial Sequence
  ENSG00000197372_13 (sequence is synthesized)
gaaaattcattctggagagataccctacaagtgtgaagaatgtggcaaagcttttaaacactcctcatcccttactacacataaaagaattcatactggggagaaaccctacaaatgtga

SEQ ID NO: 715869 - DNA, 85 bp, Artificial Sequence
  ENSG00000197372_14 (sequence is synthesized)
taaatgtgagagatgtgacaaagcttttaaccaatctgcaaaccttactaaacataaaaaaatacatactggagagaaactacag

SEQ ID NO: 715870 - DNA, 120 bp, Artificial Sequence
  ENSG00000197372_15 (sequence is synthesized)
tactaaacataaaaaaatacatactggagagaaactacagaactggaatgtgtgataatgattttgacaacacctcaaatttttctaaatataaaggaaatcatactggtgaaaaattct

SEQ ID NO: 715871 - DNA, 120 bp, Artificial Sequence
  ENSG00000197372_16 (sequence is synthesized)
agaaatgtaaagaatgtgtcaaagactttaaatggttttcacacttcattgtatgtaagataattcatactggagaaaactacaagtgtgaagaatttggcaatactgttaattaaggct

SEQ ID NO: 715872 - DNA, 120 bp, Artificial Sequence
  ENSG00000197372_17 (sequence is synthesized)
caaaccttattgcacaggaaagcgtttatacttaagaaaaattgtacaaatataaagagtgtaaaatagccattaatatctgttgacatcttaatatcagaatgttggtacttaataaaa

SEQ ID NO: 715873 - DNA, 120 bp, Artificial Sequence
  ENSG00000197372_18 (sequence is synthesized)
gcattataaatgcaattactgtctaaagactttaagaaaatataagcctttaaagtgaagaagagtattcgttttgaagacaaagattacaaacataaagagggttgtagtacatttact

SEQ ID NO: 715874 - DNA, 68 bp, Artificial Sequence
  ENSG00000197372_19 (sequence is synthesized)
tccttggcctcccaaagttctggtacaggtgtgagccacagagcctggcccaaaattgtctttgtttt

SEQ ID NO: 715875 - DNA, 120 bp, Artificial Sequence
  ENSG00000197372_20 (sequence is synthesized)
ccagatgccaaggaagagactctgggaggatcccaaggaccccctggttgcagccatgtcaagactgacactgagaaggaccccaactgtcatgagcaacacccattgaacacagccacc

SEQ ID NO: 715876 - DNA, 120 bp, Artificial Sequence
  ENSG00000197372_21 (sequence is synthesized)
gcactccagcctggttaacaagaccgaaactccgtcttaaaaaatatataaataaataagttaaataaataaataaattatggggatcaccacaaaaatattggagaatttaatcaaaga

SEQ ID NO: 715877 - DNA, 120 bp, Artificial Sequence
  ENSG00000197372_22 (sequence is synthesized)
aagagtgattcaaaaattgtggagcattcagctgtggtttggagcttgtgactttatgagagcagcttgaaggaaagacttttaaagggactgttgacatttagggatgtggccatagaa

SEQ ID NO: 715878 - DNA, 89 bp, Artificial Sequence
  ENSG00000197372_23 (sequence is synthesized)
ttttgggagattgatggtgcaggattactttagcctggcagtttgaggctacagtgagccataattgtgccactttactcaaacttgaa

SEQ ID NO: 715879 - DNA, 120 bp, Artificial Sequence
  ENSG00000197372_24 (sequence is synthesized)
tacagtgagccataattgtgccactttactcaaacttgaatgacagagtgagaacctgtctcaaaaaaactgtacatttcagccatgtttagtatatttgtattgttatgcaaaagactt

SEQ ID NO: 715880 - DNA, 120 bp, Artificial Sequence
  ENSG00000197372_25 (sequence is synthesized)
ctataaatttttcatcttgtgaaactaaaactcaatacccattaacaactgcccattttatcctctctccagccgttgacaaacacccttgcactttctatgagtgtgactaattaagat

SEQ ID NO: 715881 - DNA, 120 bp, Artificial Sequence
  ENSG00000197372_26 (sequence is synthesized)
atctcacataagtggaatcatatagtatccattttgttactggcttacttcaggtgatataatattctcaaagtttatcttaaaatgttgactagatttatttaaggctgaataatccat

SEQ ID NO: 715882 - DNA, 69 bp, Artificial Sequence
  ENSG00000197372_27 (sequence is synthesized)
tttatttaaggctgaatatttttgtttttttgagatggagtcccattttgtcacccaggctggagtgca

SEQ ID NO: 715883 - DNA, 68 bp, Artificial Sequence
  ENSG00000197372_28 (sequence is synthesized)
taatgcattttttatagagattatgttgaatttgttcaccacttttggttgcattgacatttttgaaa

SEQ ID NO: 715884 - DNA, 120 bp, Artificial Sequence
  ENSG00000197372_29 (sequence is synthesized)
aatttgttcaccacttttggttgcattgacatttttgaaaaattaagtgttttggcccttgagccaagaatatgttgaacactgttttattttcatatatttttcaatttgccaatttta

SEQ ID NO: 715885 - DNA, 120 bp, Artificial Sequence
  ENSG00000197372_30 (sequence is synthesized)
cttttccttttaattttttgttttattcacttttggtcagaaaatgtttataattttggttttcctaaatttatttgttgttgctgttagaagattttactgtgtcactcaggctggagt

SEQ ID NO: 715886 - DNA, 120 bp, Artificial Sequence
  ENSG00000197372_31 (sequence is synthesized)
gcagtggctccactgcagccataacctcccaggctcaagtgatccttttacctcagtctcccaagtagctggcactacagacgtgccatggctgctaccatgcctggctatttttttgat

SEQ ID NO: 715887 - DNA, 120 bp, Artificial Sequence
  ENSG00000197372_32 (sequence is synthesized)
cagggtctcgctatgttgcccaggctggtgtcaaatttctggcccagctgggtcttccaaagtgttgagattataggcatgcacccagccagcattcttaaatttaataagacttgattt

SEQ ID NO: 715888 - DNA, 120 bp, Artificial Sequence
  ENSG00000197372_33 (sequence is synthesized)
aagacttgatttgtgtcctaacagaatacaccaggtgcaaagaaaaatattgtgtattctcttgcttttgattgaaaaggtttgtacaggtctgttaagcctatttggtctgtgatatgg

SEQ ID NO: 715889 - DNA, 120 bp, Artificial Sequence
  ENSG00000197372_34 (sequence is synthesized)
cttggatgtctatgttctccaaacctcatattgcaatgtaatcatcattgttgatttgggtcctgatagaaggtgaatatgggacctagtgggaggtgcttaggtcatgagggaaagttc

SEQ ID NO: 715890 - DNA, 120 bp, Artificial Sequence
  ENSG00000197372_35 (sequence is synthesized)
ctcatgaatggcttggcactatcttcttgttaatcagtaagtttacactctgttaattcaagtaagagctagttcatttaaaaaaaaagaaaacctggcttctttacctgacacttgctt

SEQ ID NO: 715891 - DNA, 120 bp, Artificial Sequence
  ENSG00000197372_36 (sequence is synthesized)
tgtatcttaccatgtgatgtgtccagttaatctgtgcattgcactgtgattgtaagcttcctgagaccctcaccagaagcagatgctggcacatgctttttgtacagtctgccgaactgt

SEQ ID NO: 715892 - DNA, 120 bp, Artificial Sequence
  ENSG00000197372_37 (sequence is synthesized)
ctgccgaactgtgagccaaataaaccttttttctttataaattatctactctcaggtattcctctatatgtaaataattgaagtttgcaatttactttttttttttttttgagacagagt

SEQ ID NO: 715893 - DNA, 88 bp, Artificial Sequence
  ENSG00000197372_38 (sequence is synthesized)
gtcaccactgcaaccttatcctcccaggttcaagcagttctcctgccttagtctcccaattagctgggactacaggctcccgccacca

SEQ ID NO: 715894 - DNA, 87 bp, Artificial Sequence
  ENSG00000197372_39 (sequence is synthesized)
taaagtgctgggagtacaggtgtgagtcactgcacctggctgtaatttacttctgaaaacattatgttatattggggagtagaaaaa

SEQ ID NO: 715895 - DNA, 120 bp, Artificial Sequence
  ENSG00000197372_40 (sequence is synthesized)
tacttctgaaaacattatgttatattggggagtagaaaaagctgtgttgggtaaatgtgacagaattttttttttttttctatgtggctctttgcattgtgctcacctggggcaacacat

SEQ ID NO: 715896 - DNA, 120 bp, Artificial Sequence
  ENSG00000197372_41 (sequence is synthesized)
acacttaattatggcctgtggtgccatcttgcttatgtagtttgtgtaattttataagttaggtttggaaagtatatttatctgagtctgtaaagtaatgtgttatttttatttctttca

SEQ ID NO: 715897 - DNA, 120 bp, Artificial Sequence
  ENSG00000197372_42 (sequence is synthesized)
agagacatgagatggtgaatgaacccccaggatctgtgggacagacccagcaggtggtgccccatgtaagaagcaatgaaatgcatcatgatggaaccctcaaaaacgaaagtgaagtta

SEQ ID NO: 715898 - DNA, 120 bp, Artificial Sequence
  ENSG00000197372_43 (sequence is synthesized)
ctgcacaccccttaggtcctctttggattccagcatgatgcatcaaaccttaccacggcatgactagggcccaacctgctaccagaaataaaggaaatgacgatgcagaacccacaaccc

SEQ ID NO: 715899 - DNA, 120 bp, Artificial Sequence
  ENSG00000197372_44 (sequence is synthesized)
tggatgatgtggcttccttggatgacacaggccccagacattacctggggaatgctgaagaacacaactcaggaggctgaacaaatctgcttcagacacagataccattcaatccatata

SEQ ID NO: 715900 - DNA, 120 bp, Artificial Sequence
  ENSG00000197372_45 (sequence is synthesized)
gttctttgctatgctttttattccacattgcaactcttatagaatactgattcttcttattctctctttttgcctgcaacccacacctgctataaactattgggcccatcttctagatct

SEQ ID NO: 715901 - DNA, 120 bp, Artificial Sequence
  ENSG00000197372_46 (sequence is synthesized)
gcctttcttacggcattttacttgggaaggtacccccttctcagcctctgacaacgtgaccaattggctgggaggtattgacttacccccggtggggtccctcagtaatggcacacattg

SEQ ID NO: 715902 - DNA, 120 bp, Artificial Sequence
  ENSG00000197372_47 (sequence is synthesized)
gactcaggtgccaagtaacattacatatcaatccttgattggaaaagaataatattgattatactcatgtttgtcttatgttatttactggttctagggtgcaaagctggaacacaaact

SEQ ID NO: 715903 - DNA, 120 bp, Artificial Sequence
  ENSG00000197372_48 (sequence is synthesized)
gtaaccattgcaccagtcaaacctgtcgctgctcagatctgtatgcttcaatcaacaaaacctgatgcaaaaaaacagaaaaaggggagatgtgggagattggtcagagtggtggaaaaa

SEQ ID NO: 715904 - DNA, 120 bp, Artificial Sequence
  ENSG00000197372_49 (sequence is synthesized)
gggagatgtgggagattggtcagagtggtggaaaaaggatagggaaagaacgcaaattttctgaaatgttggaaggtcctgcagagctccaggggagaatagctgaaggcagctgttcta

SEQ ID NO: 715905 - DNA, 120 bp, Artificial Sequence
  ENSG00000197372_50 (sequence is synthesized)
gagtgtggaagaatttatcttaaacaggcttatttacttatgttgatcaggaactgacctttgatcatttgcgtgtgtgacattccctgaaaggggaacaataaatgttaattacctgca

SEQ ID NO: 715906 - DNA, 120 bp, Artificial Sequence
  ENSG00000197372_51 (sequence is synthesized)
gagaaagccagtccttaaaatgtgatttgggaagccgtgttttaaaggaaataatttctggaaagcctgagtattttatgctctcacatttgagcattttctgtcttatgcttttaaatt

SEQ ID NO: 715907 - DNA, 120 bp, Artificial Sequence
  ENSG00000197375_0 (sequence is synthesized)
gcggcccaggcccgcaaccttccctggtcgtgcgccctatgtaaggccagccgcggcaggaccaaggcggcggtgtcagctcgcgagcctaccctccgcggacggtcttgggtcgcctgc

SEQ ID NO: 715908 - DNA, 120 bp, Artificial Sequence
  ENSG00000197375_1 (sequence is synthesized)
tgcctggcttgcctggtcggcggcgggtgccccgcgcgcacgcgcaaagcccgccgcgttccccgaccccaggccgcgctctgtgggcctctgagggcggcatgcgggactacgacgagg

SEQ ID NO: 715909 - DNA, 120 bp, Artificial Sequence
  ENSG00000197375_2 (sequence is synthesized)
tgaccgccttcctgggcgagtgggggcccttccagcgcctcatcttcttcctgctcagcgccagcatcatccccaatggcttcaccggcctgtcctccgtgttcctgatagcgaccccgg

SEQ ID NO: 715910 - DNA, 120 bp, Artificial Sequence
  ENSG00000197375_3 (sequence is synthesized)
agcaccgctgccgggtgccggacgccgcgaacctgagcagcgcctggcgcaaccacactgtcccactgcggctgcgggacggccgcgaggtgccccacagctgccgccgctaccggctcg

SEQ ID NO: 715911 - DNA, 120 bp, Artificial Sequence
  ENSG00000197375_4 (sequence is synthesized)
ccaccatcgccaacttctcggcgcttgggctggagccggggcgcgacgtggacctggggcagctggagcaggagagctgtctggatggctgggagttcagtcaggacgtctacctgtcca

SEQ ID NO: 715912 - DNA, 120 bp, Artificial Sequence
  ENSG00000197375_5 (sequence is synthesized)
ccattgtgaccgagtggaacctggtgtgtgaggacgactggaaggccccactcacaatctccttgttcttcgtgggtgtgctgttgggctccttcatttcagggcagctgtcagacaggt

SEQ ID NO: 715913 - DNA, 120 bp, Artificial Sequence
  ENSG00000197375_6 (sequence is synthesized)
ttggccggaagaatgtgctgttcgtgaccatgggcatgcagacaggcttcagcttcctgcagatcttctcgaagaattttgagatgtttgtcgtgctgtttgtccttgtaggcatgggcc

SEQ ID NO: 715914 - DNA, 120 bp, Artificial Sequence
  ENSG00000197375_7 (sequence is synthesized)
agatctccaactatgtggcagcatttgtcctggggacagaaattcttggcaagtcagttcgtataatattctctacgttaggagtgtgcatattttatgcatttggctacatggtgctgc

SEQ ID NO: 715915 - DNA, 120 bp, Artificial Sequence
  ENSG00000197375_8 (sequence is synthesized)
cactgtttgcttacttcatccgagactggcggatgctgctggtggcgctgacgatgccgggggtgctatgcgtggcactctggtggttcatccctgagtccccccgatggctcatctctc

SEQ ID NO: 715916 - DNA, 120 bp, Artificial Sequence
  ENSG00000197375_9 (sequence is synthesized)
agggacgatttgaagaggcagaggtgatcatccgcaaggctgccaaagccaatgggattgttgtgccttccactatctttgacccgagtgagttacaagacctaagttccaagaagcagc

SEQ ID NO: 715917 - DNA, 120 bp, Artificial Sequence
  ENSG00000197375_10 (sequence is synthesized)
agtcccacaacattctggatctgcttcgaacctggaatatccggatggtcaccatcatgtccataatgctgtggatgaccatatcagtgggctattttgggctttcgcttgatactccta

SEQ ID NO: 715918 - DNA, 120 bp, Artificial Sequence
  ENSG00000197375_11 (sequence is synthesized)
acttgcatggggacatctttgtgaactgcttcctttcagcgatggttgaagtcccagcatatgtgttggcctggctgctgctgcaatatttgccccggcgctattccatggccactgccc

SEQ ID NO: 715919 - DNA, 120 bp, Artificial Sequence
  ENSG00000197375_12 (sequence is synthesized)
tcttcctgggtggcagtgtccttctcttcatgcagctggtacccccagacttgtattatttggctacagtcctggtgatggtgggcaagtttggagtcacggctgccttttccatggtct

SEQ ID NO: 715920 - DNA, 120 bp, Artificial Sequence
  ENSG00000197375_13 (sequence is synthesized)
acgaccgcttcctgccctacattctcatgggaagtctgaccatcctgacagccatcctcaccttgtttctcccagagagcttcggtaccccactcccagacaccattgaccagatgctaa

SEQ ID NO: 715921 - DNA, 120 bp, Artificial Sequence
  ENSG00000197375_14 (sequence is synthesized)
gagtcaaaggaatgaaacacagaaaaactccaagtcacacaaggatgttaaaagatggtcaagaaaggcccacaatccttaaaagcacagccttctaacatcgcttccagtaagggagaa

SEQ ID NO: 715922 - DNA, 120 bp, Artificial Sequence
  ENSG00000197375_15 (sequence is synthesized)
actgaagaggaaagactgtcttgccagaaatggccagcttgtgcagactccgagtccttcagtgacaaaaggcctttgctgtttgtcctcttgacctgtgtctgacttgctcctggatgg

SEQ ID NO: 715923 - DNA, 120 bp, Artificial Sequence
  ENSG00000197375_16 (sequence is synthesized)
gcacccacactcagaggctacatatggccctagagcaccaccttcctctagggacactggggctacctacagacaacttcatctaagtcctaactattacaatgatggactcagcacctc

SEQ ID NO: 715924 - DNA, 120 bp, Artificial Sequence
  ENSG00000197375_17 (sequence is synthesized)
caaagcagttaatttttcactagaaccagtgagatctggaggaatgtgagaagcatatgctaaatgtacattttaattttagactacttgaaaaggcccctaataaggctagaggtctaa

SEQ ID NO: 715925 - DNA, 120 bp, Artificial Sequence
  ENSG00000197375_18 (sequence is synthesized)
gtcccccacccctttccccactcccctctagtggtgaactttagaggaaaaggaagtaattgcacaaggagtttgattcttaccttttctcagttacagaggacattaactggatcattg

SEQ ID NO: 715926 - DNA, 120 bp, Artificial Sequence
  ENSG00000197375_19 (sequence is synthesized)
cttccccagggcaggagagcgcagagctagggaaagtgaaaggtaatgaagatggagcagaatgagcagatgcagatcaccagcaaagtgcactgatgtgtgagctcttaagaccactca

SEQ ID NO: 715927 - DNA, 120 bp, Artificial Sequence
  ENSG00000197375_20 (sequence is synthesized)
gcatgacgactgagtagacttgtttacatctgatcaaagcactgggcttgtccaggctcataataaatgctccattgaatctactattcttgttttccactgctgtggaaacctccttgc

SEQ ID NO: 715928 - DNA, 120 bp, Artificial Sequence
  ENSG00000197375_21 (sequence is synthesized)
tactatagcgtcttatgtatggtttaaaggaaatttatcaggtgagagagatgagcaacgttgtcttttctctcaaagctgtaatgtgggttttgttttattgtttatttgtttgttgtt

SEQ ID NO: 715929 - DNA, 120 bp, Artificial Sequence
  ENSG00000197375_22 (sequence is synthesized)
gtatccttttctccttgttatttgcccttcagaatgcacttgggaaaggctggttccttagcctcctggtttgtgtctttttttttttttttttaaaacagaatcactctggcaattgtc

SEQ ID NO: 715930 - DNA, 120 bp, Artificial Sequence
  ENSG00000197375_23 (sequence is synthesized)
tgcagctgccactggtgcaaggccttaccagccctagcctctagcacttctctaagtgccaaaaacagtgtcattgtgtgtgttcctttcttgatacttagtcatgggaggatattacaa

SEQ ID NO: 715931 - DNA, 120 bp, Artificial Sequence
  ENSG00000197375_24 (sequence is synthesized)
aaaagaaatttaaattgtgttcatagtctttcagagtagctcactttagtcctgtaactttattgggtgatattttgtgttcagtgtaattgtcttctctttgctgattatgttaccatg

SEQ ID NO: 715932 - DNA, 120 bp, Artificial Sequence
  ENSG00000197375_25 (sequence is synthesized)
gtactcctaaagcatatgcctcacctggttaaaaaagaacaaacatgtttttgtgaaagctactgaagtgccttgggaaatgagaaagttttaataagtaaaatgattttttaaataaca

SEQ ID NO: 715933 - DNA, 120 bp, Artificial Sequence
  ENSG00000197375_26 (sequence is synthesized)
gattctggccaagtcctggaacctactgcagtccatctggtggttgacagatatgtggacggattggcaggctgggacccaatctatgtttgcccttgtgttcagttttgagacctagca

SEQ ID NO: 715934 - DNA, 120 bp, Artificial Sequence
  ENSG00000197375_27 (sequence is synthesized)
cctttcctgatcctgctcacagaccccctgcggccaataggaaagaagtgttaatgcatatttgcttttggagggcccaaagccaggcccagagagttgtcaagggcggtcagtggtggg

SEQ ID NO: 715935 - DNA, 120 bp, Artificial Sequence
  ENSG00000197375_28 (sequence is synthesized)
tggatggcagagttaaccaaggagttacacacctgcctagactaaggacaggctggaccaagtagagagggtggggctaagggagcctgagagatgctctggggcctatctcaaaatgag

SEQ ID NO: 715936 - DNA, 120 bp, Artificial Sequence
  ENSG00000197375_29 (sequence is synthesized)
cactatagtcaccctgtcccctgcagagattgtctgacctggttttaggtcacacccaaccttgccagccaaggagtctttagaagcctgatattgggagacctgtcctggggtctacaa

SEQ ID NO: 715937 - DNA, 120 bp, Artificial Sequence
  ENSG00000197375_30 (sequence is synthesized)
ccccagaactcactgcagaagcccacgtggattgctagtctagctcagccatatgggtccccaaccctcacctcatgatagtcctgtgagaaaccgctgctgaccctttgttcatgtttt

SEQ ID NO: 715938 - DNA, 120 bp, Artificial Sequence
  ENSG00000197375_31 (sequence is synthesized)
catcttttccactataaaagacatgctagctgggaaatagagcccatcatactcaagagtggcaggagccaggtcctggcccctgaagcttggcctcacacacagaggccggcaccctgt

SEQ ID NO: 715939 - DNA, 120 bp, Artificial Sequence
  ENSG00000197375_32 (sequence is synthesized)
catcaattccctcagctttttctccgcctccactcccagtcctagatttagcagccatgtgtgggtgggggccactgcagggatacttacccacctaccagagagatggcctgtgggtgc

SEQ ID NO: 715940 - DNA, 120 bp, Artificial Sequence
  ENSG00000197375_33 (sequence is synthesized)
tggcccttctgaggctgtggaggttggaggctgtggcagcctgggcagtcaggctgtggtcctcccatgttcttgactcctgctagtctgggctgcctcctgattaggggttggatgctc

SEQ ID NO: 715941 - DNA, 120 bp, Artificial Sequence
  ENSG00000197375_34 (sequence is synthesized)
cagttcttccctgggttggggattgccaccctactcccagcccatccaggttcacgcttattccaaagcggagcaccagcagtgtgcctgctgcgggagttctccgtgtccagcctgagg

SEQ ID NO: 715942 - DNA, 120 bp, Artificial Sequence
  ENSG00000197375_35 (sequence is synthesized)
gttgcctgccaacccctctgagaggtgcccggaggctgtgcgcccacactgcccagcagtgcggagaagcaggcttgtttttccctgtcactggcttggaagagatgctttgttctaggg

SEQ ID NO: 715943 - DNA, 120 bp, Artificial Sequence
  ENSG00000197375_36 (sequence is synthesized)
agccgcatgtccccttgcctgcgttgttggtgaggagccagcaggctccgtggagggcaggctagcagcctggcaccagggaggcaagggtctgagttcctaggagggtggttgctcatg

SEQ ID NO: 715944 - DNA, 120 bp, Artificial Sequence
  ENSG00000197375_37 (sequence is synthesized)
tgagaagtctgcaaaggttactactgagcaccatctctctgtctgaaaaacatttttcatttttctgtgaaccactaagtttcccgtttgggctttcttcctgcttttggctcttgttta

SEQ ID NO: 715945 - DNA, 120 bp, Artificial Sequence
  ENSG00000197375_38 (sequence is synthesized)
ggcaggcgcagccagatccaagcgtctggctgcttccccatgtcttcagacctctttttctgttcatggtaactatagatggaaccacacattggaagctggaaactcaagcggtgcagc

SEQ ID NO: 715946 - DNA, 120 bp, Artificial Sequence
  ENSG00000197375_39 (sequence is synthesized)
ctattccttaccccaatccctgttttacaaatggggaaatcaaggcacagcatggggtgatgcttatctgaggttggaagagttttaatagtagagtgggagctaaaacccagtttctta

SEQ ID NO: 715947 - DNA, 120 bp, Artificial Sequence
  ENSG00000197375_40 (sequence is synthesized)
cctccaagctcaggactttcagctgtaattgagcctagtatagttggtgtgcagcatcagggattccagctctaaaggtcacaaaaaggacccgggggtcattggcccagggtgggaacc

SEQ ID NO: 715948 - DNA, 120 bp, Artificial Sequence
  ENSG00000197375_41 (sequence is synthesized)
cgagcagagcaggtccagatggtgcactctgtgccctggccttagtttcttgctggatgctttggcccgtagagccccagagccctgcttccagaaccactccagtgacgttcatgccaa

SEQ ID NO: 715949 - DNA, 120 bp, Artificial Sequence
  ENSG00000197375_42 (sequence is synthesized)
tggcctgaaccccactgagcgagggtgccctgcctcttccacagccctgggctccgctcagatttttaggagcaagcgttagaggccttgctttctccagggtcagcatgtggacagaac

SEQ ID NO: 715950 - DNA, 120 bp, Artificial Sequence
  ENSG00000197375_43 (sequence is synthesized)
acttactctctgcctgtctctcctcctcaaaatggaagcaagacagtggggcctacaatgctatgaaaaacaggatgggaaagaagcctgctctctgccttcctgcccagtggaacctgg

SEQ ID NO: 715951 - DNA, 120 bp, Artificial Sequence
  ENSG00000197375_44 (sequence is synthesized)
aggggacctcagcactgaggaagaagcgtgtgcctggcccttgatttcagttggtagtattctttcagcgcagggccctgtattttaaagaagaggaagctatgtctgtgatatagactc

SEQ ID NO: 715952 - DNA, 120 bp, Artificial Sequence
  ENSG00000197375_45 (sequence is synthesized)
catgcctagtaagaagagccaacaaatctgactccgtaattcttgctaagtaaagaaacctgagctgtctaagctgaatgtatctgtgacccggttgactaggtaatatgccatgattca

SEQ ID NO: 715953 - DNA, 120 bp, Artificial Sequence
  ENSG00000197375_46 (sequence is synthesized)
cttctgcagtagcctggcttgcctcccctgggtcactgtgactctgtcatgcccctgagcatgggagaggttgacatcatgcacacatgcacatgtgctagattgtagatctgtagtagt

SEQ ID NO: 715954 - DNA, 120 bp, Artificial Sequence
  ENSG00000197375_47 (sequence is synthesized)
gccacggtgtctgcctctgtagtcccaagaagaccagcattctctctgcaaagtgaaaggagctctcaccagccactagtggtatgaaaagcagaactcttttgtccacaaggctgatgc

SEQ ID NO: 715955 - DNA, 120 bp, Artificial Sequence
  ENSG00000197375_48 (sequence is synthesized)
cccttagctaagtggcctgtggttttggcatttactttatgacaggagggagaatagtgttttgatccatttcttataagcaggttatttgtataattctaaagcttttaactcaaggaa

SEQ ID NO: 715956 - DNA, 120 bp, Artificial Sequence
  ENSG00000197375_49 (sequence is synthesized)
acattaacggcttagagaatcccaaacccctcgaaattatatgcacaatgttagagactacatgtgagcatttttttggagagaggtccgtagctttcatgaagttcttagaggggtcca

SEQ ID NO: 715957 - DNA, 120 bp, Artificial Sequence
  ENSG00000197375_50 (sequence is synthesized)
ttatgttgtgtcttctttccctggagcttcagggtctgtcagagaagactgtgaagagagtagcagccttcagcaagtccttggccacatgacacatgtgagaacaccccacaaatcggt

SEQ ID NO: 715958 - DNA, 120 bp, Artificial Sequence
  ENSG00000197375_51 (sequence is synthesized)
caccccacaaatcggtgggttagccggtggaaaggagtcccagcatcttccctggtttttaattcctggcctcaagcaatcctccctccataacctcccaaagtgctgggattacaggcg

SEQ ID NO: 715959 - DNA, 70 bp, Artificial Sequence
  ENSG00000197375_52 (sequence is synthesized)
gctgggattacaggcgtgagacaccatgcgcagccagatattttttattgttgttgtttttttttggaaa

SEQ ID NO: 715960 - DNA, 87 bp, Artificial Sequence
  ENSG00000197375_53 (sequence is synthesized)
cccagccagatttttttttaaaaagcaggttaacctgtttattattcctactttacagatggagaaagtgagacagagggattaaat

SEQ ID NO: 715961 - DNA, 120 bp, Artificial Sequence
  ENSG00000197375_54 (sequence is synthesized)
ctactttacagatggagaaagtgagacagagggattaaataacttgcccagggtttcacagctggcaagtggcagagttaggatttggacccaggtagtcttgctcctctattgtgtatg

SEQ ID NO: 715962 - DNA, 120 bp, Artificial Sequence
  ENSG00000197375_55 (sequence is synthesized)
gactactgttctaggtccctgctgtcctaaaacttgctttctagcaaggtggaatgtattaaacaaccaagtgaggaagtcgttgttgtccttggccatggtaagagatacagagaagtg

SEQ ID NO: 715963 - DNA, 120 bp, Artificial Sequence
  ENSG00000197375_56 (sequence is synthesized)
cagggtgccacaggagtgtctaacagaggaggtcaggggcagcatccctgagaaggtgaagcatgagcgagagtgggaagatgagtcgaaagtagccagctgaggggtagagaggagaaa

SEQ ID NO: 715964 - DNA, 120 bp, Artificial Sequence
  ENSG00000197375_57 (sequence is synthesized)
gaacatccaggcagggagaatagcaagtgctaaagccggggctcatgaaaaggcatgggagcaggacaaagtccgtgtggtagaggtgcggagagtggtgttaagatgaaggggagaggc

SEQ ID NO: 715965 - DNA, 120 bp, Artificial Sequence
  ENSG00000197375_58 (sequence is synthesized)
aggcagagccctgggcagatgagcaaccagggcttagtggatcacagttaggactttgggcttcagccacagagcagcggtgggctactgagattttttaaagcaatagtgtgacaatca

SEQ ID NO: 715966 - DNA, 120 bp, Artificial Sequence
  ENSG00000197375_59 (sequence is synthesized)
gatttgtccttttttttttttaaagatgctttgacaaccttgtgaagaaagaattgaagggaagcaaaaggtgttgtagagagaccaattaaaaggttgtcacagtagttcatgccagag

SEQ ID NO: 715967 - DNA, 120 bp, Artificial Sequence
  ENSG00000197375_60 (sequence is synthesized)
atgatggtggcatggcctagcatgacggtggtagaaatggagggaagtggtaagaggtaaaatcaacaagacttgccgatgggctggatgtcggaattgggggaagaaagctttctggcc

SEQ ID NO: 715968 - DNA, 120 bp, Artificial Sequence
  ENSG00000197375_61 (sequence is synthesized)
tgagtaactgggtgaatgaaggtacacttctctaagacagagaatgctggaaaagaaccacgttcatggatattgagttcaatttgtgtgtactaaatttggggtgactatgagacccct

SEQ ID NO: 715969 - DNA, 120 bp, Artificial Sequence
  ENSG00000197375_62 (sequence is synthesized)
aagtggagaagtagagtgtgaagctggctgtatggatatggtactgcatgagaggttttggctagagaaacacatgtaggatttgtcagcatatagaaccctcagcagagccccagatag

SEQ ID NO: 715970 - DNA, 120 bp, Artificial Sequence
  ENSG00000197375_63 (sequence is synthesized)
ggatgaggttgcctggggagaggggagtggggaggggaggggggaactgggggaggattgtgctatgcttagaggccacctgagtggacatgggagattccttctcacggagctaagtga

SEQ ID NO: 715971 - DNA, 120 bp, Artificial Sequence
  ENSG00000197375_64 (sequence is synthesized)
cagctgcggctcagaagaatgcccttgatgtgaaaaggagataccccaagttcagagtagaaatgcagtgtatttttctgggtcagctgtgtcatgggtcagcttaagaaccttcttgcc

SEQ ID NO: 715972 - DNA, 120 bp, Artificial Sequence
  ENSG00000197375_65 (sequence is synthesized)
atgtgacacaatgattacctgaggaaagcatttaagttccaaaaggtctattcccagggaaactggaaacaaaatttgtgagtgtgtttaggaccactttagtctacagaagggctaata

SEQ ID NO: 715973 - DNA, 120 bp, Artificial Sequence
  ENSG00000197375_66 (sequence is synthesized)
tagtgtttttcaaacctttctaaacattttggccacagaactttcattaaagtaggataatttaagtctagtaaatgaaatacaccctaagtggctaaaagtatggctgttctgcctgca

SEQ ID NO: 715974 - DNA, 120 bp, Artificial Sequence
  ENSG00000197375_67 (sequence is synthesized)
ctaaaacctaagctaagtagattacctgaaagcaatcaattcatgccctaacttgtctaggacatcaatgtaactttttatatagtataaaggtttcaccttctttctggcctatgaata

SEQ ID NO: 715975 - DNA, 120 bp, Artificial Sequence
  ENSG00000197375_68 (sequence is synthesized)
tgtctgaaattcaagagcaattaaagtactcctgggttgtcaaagccctttatgtaacactattgagttatctttatgcgtctgacttgtaagagatgcacaactctaggaagaagtaga

SEQ ID NO: 715976 - DNA, 120 bp, Artificial Sequence
  ENSG00000197375_69 (sequence is synthesized)
ctgctgtgtcctgtttccaggtatgtgtgtgtttgccattttgttgacagactttaaaagcaaacatttctggccccaaccctgaactgccaaggactggtgctatgtaaagggttctct

SEQ ID NO: 715977 - DNA, 120 bp, Artificial Sequence
  ENSG00000197375_70 (sequence is synthesized)
ggatctgtctcttccctaccatcccagggagctcttaggaagggaaagggcatagagattataccagcctgccttgtggttaggaaccaccccttggttggcatatagaacatgcttgtt

SEQ ID NO: 715978 - DNA, 120 bp, Artificial Sequence
  ENSG00000197375_71 (sequence is synthesized)
aaaaaaaccatgcaggggaaagtagagtctactaccaggcgagagtttctcaacctcgaccctattaacattttgagccaaataattttgttctagggcattttcctgggcattttagaa

SEQ ID NO: 715979 - DNA, 120 bp, Artificial Sequence
  ENSG00000197375_72 (sequence is synthesized)
tatttaacaacatatctggcctctactcattagatgccagtgaaccccaagtgatggaaaaaaacaacaacaacagaaaaaaacctcttttattgaggaaaaacaccaaactcttccaca

SEQ ID NO: 715980 - DNA, 120 bp, Artificial Sequence
  ENSG00000197375_73 (sequence is synthesized)
tagttgcaagaccttgtgcaatttgcctcctagccaccactgtactcttgaattgcacgcctgatgccaaccacactggttcctcatgttcaccatgccccctccagccatgggggtgtg

SEQ ID NO: 715981 - DNA, 120 bp, Artificial Sequence
  ENSG00000197375_74 (sequence is synthesized)
tggtcttctcagagtctgaagcattccccacccaccccaacccaccccctgtggccttctttaaccatgctggctaattcaggatccctagttccttatgactttcctttaaaacgtcta

SEQ ID NO: 715982 - DNA, 120 bp, Artificial Sequence
  ENSG00000197375_75 (sequence is synthesized)
ccagaaattgggggaaaaaaagtgttattataggattaatgttggtcttccgcactatactgtgaatatcattgagagcttggtccctacaccttaaatcccccatcgtcaactattttt

SEQ ID NO: 715983 - DNA, 120 bp, Artificial Sequence
  ENSG00000197375_76 (sequence is synthesized)
tcccatctcagtgtcccatgatcaaggagaccctccctgaatgtccagttccccaacccttacccccagtccagggtagcttccttccttgtgcctctcattaacctgcatgccgatcct

SEQ ID NO: 715984 - DNA, 120 bp, Artificial Sequence
  ENSG00000197375_77 (sequence is synthesized)
tcagtgcacttgactcagtgtgtaattgtatattcagtagcgtgttgttagattaaaatgtggttaatatgtgtttcaccagttatactatgacactccttaagggcagaaacagcatct

SEQ ID NO: 715985 - DNA, 120 bp, Artificial Sequence
  ENSG00000197375_78 (sequence is synthesized)
tttttaatttattgatatccaagtgccctctataatagatgctcaataaacattgaatgaaagtgggtgtcagccagtactggccagactcaaactgaacccactgcttcccactagctt

SEQ ID NO: 715986 - DNA, 120 bp, Artificial Sequence
  ENSG00000197375_79 (sequence is synthesized)
gactttttcctcctgtttgtggcactctctttaaaacaaaccaaaataaacccaattttaaaaactttttaaaatgagcacggatacagaaaaccacacagaacaaatgtgtagcttaat

SEQ ID NO: 715987 - DNA, 120 bp, Artificial Sequence
  ENSG00000197375_80 (sequence is synthesized)
gaatttttttcagagaaataaccttatgaccaccaccaagtcgagcagtagaactttgctgtccactaagaagccctgtccatgtgccccatcccaattacagcatcctctctctctccc

SEQ ID NO: 715988 - DNA, 120 bp, Artificial Sequence
  ENSG00000197375_81 (sequence is synthesized)
cattaagtaaccgctagcctgactcctgtaataatcacttccttgtgagtttttttagttttattatcgaaatatgcatccttgacacaaatttagtgttgcccacttaatatatttgat

SEQ ID NO: 715989 - DNA, 120 bp, Artificial Sequence
  ENSG00000197375_82 (sequence is synthesized)
gtcttttagtctacttaatctatggattctccttctatcgccttctatgccttactgattatctatgaagaacctgagctattccacctatagaatttcccagtctggatttgttgattg

SEQ ID NO: 715990 - DNA, 120 bp, Artificial Sequence
  ENSG00000197375_83 (sequence is synthesized)
cacactgatgatgcagttcagcacattcctctatgctctgcatttcctcaaaattggcagttggatccagagacttgagattcaggttctgattcaggttcagtccttttggccagacca

SEQ ID NO: 715991 - DNA, 120 bp, Artificial Sequence
  ENSG00000197375_84 (sequence is synthesized)
taggaagcatgcaattcctgactgtctctttatgatgttaacagtaattagtatataatgcatagatctattaatccattgggggctataaatggtattattctaattttattacctttt

SEQ ID NO: 715992 - DNA, 120 bp, Artificial Sequence
  ENSG00000197375_85 (sequence is synthesized)
catttaaaagttagaatacttttgtacatgatactacctcttatctattattggttgctgttcacatagtttacaaaggaaaatcaggacaaatgtttctttctctttatttgccagttt

SEQ ID NO: 715993 - DNA, 120 bp, Artificial Sequence
  ENSG00000197375_86 (sequence is synthesized)
tcatttataatgaattgtttctctgttattctccaaatttggcagattcttttttaaaaaaaatatcattatgaatgtatggattaaataattgatgtatttcagtctcttgcaatcatt

SEQ ID NO: 715994 - DNA, 120 bp, Artificial Sequence
  ENSG00000197375_87 (sequence is synthesized)
atcataattgtagcattgctttttaggcaaccctggtacccaggctgtacatttgtcatggggagtggggagggggagaaatagcatgggcactgtgagaccgagactgtccctggcagc

SEQ ID NO: 715995 - DNA, 120 bp, Artificial Sequence
  ENSG00000197375_88 (sequence is synthesized)
cagtattctggcaacactgttcacacccacttactggatggatcttgagaaagccccacttggtggagcccattcctgctgcccttttccagctggttatctgtcactctccttttcttc

SEQ ID NO: 715996 - DNA, 120 bp, Artificial Sequence
  ENSG00000197375_89 (sequence is synthesized)
gttcctgcagttacaagacctaagttccaagaagcagcagtcccacaacattctggatctgcttcgaacctggaatatccggatggtcaccatcatgtccataatgctgtgacttgtatt

SEQ ID NO: 715997 - DNA, 120 bp, Artificial Sequence
  ENSG00000197375_90 (sequence is synthesized)
attctggatctgcttcgaacctggaatatccggatggtcaccatcatgtccataatgctgtggtatgtaaaagagacctgcctgaggcttccagacaaagcttcttgaagtggccattgg

SEQ ID NO: 715998 - DNA, 120 bp, Artificial Sequence
  ENSG00000197375_91 (sequence is synthesized)
gcctcttgtttacagacatgcctcagacaaaattcaaagcctatgtcatcagagagtgaaaaggatatgtcttgtgttagatggaaaaaatgggcatgtcacaattcttaatgggatgga

SEQ ID NO: 715999 - DNA, 120 bp, Artificial Sequence
  ENSG00000197375_92 (sequence is synthesized)
acctcagaaaaggagaatgaaaacaattgtggaggctgttgtgggaaatatggactcttgtggggaatctctccagatcttaagatgaatccttgcccaatttgggtcatttagttcccg

SEQ ID NO: 716000 - DNA, 120 bp, Artificial Sequence
  ENSG00000197375_93 (sequence is synthesized)
tctcctacccagttaccgacagtggctgaggaggccaggtagggcttttaagaaggatctgagtgaagacaccatgtcctgtaggctgcagaggctgccagttactttctggaaatgtgg

SEQ ID NO: 716001 - DNA, 120 bp, Artificial Sequence
  ENSG00000197375_94 (sequence is synthesized)
aagtgggatgtgctcctcctgggatgtccataaacggtcctggagtcagggctatagcctagatgtccttaccaggttcccactaatgaggcaaagtatgtcagaaagggatttgtgaat

SEQ ID NO: 716002 - DNA, 120 bp, Artificial Sequence
  ENSG00000197375_95 (sequence is synthesized)
taccagggagaggaaacatgtccaagtgcacatcgctagcttttgctcagcggccgaaccctgggattctaggcgacttctggagcctggtgggttagcggtgagaagatgggcgaggag

SEQ ID NO: 716003 - DNA, 120 bp, Artificial Sequence
  ENSG00000197375_96 (sequence is synthesized)
ggcggacttcatctcagagtccttattactagtctcatccagctttgaggcagtcagccactgtgcctactgagggagtgctatgagtcacccgcttccaaggaatggcccaggatccct

SEQ ID NO: 716004 - DNA, 120 bp, Artificial Sequence
  ENSG00000197375_97 (sequence is synthesized)
ccaggcagttcaccattccctgagttggcctcaagacaggagcagcatgtagcctgcaccacagacatgcaagcctgtgatgagtcacccacttttgtgttcacccaggctctcctccct

SEQ ID NO: 716005 - DNA, 120 bp, Artificial Sequence
  ENSG00000197375_98 (sequence is synthesized)
gctctggatttcctggggactcatgcacatactctttttattgtaccagctgtgtgttccacctgcagatgagtcaaaacagtctaatccataaaggtctggtttgtcaaagagtgtggg

SEQ ID NO: 716006 - DNA, 120 bp, Artificial Sequence
  ENSG00000197375_99 (sequence is synthesized)
tcatcaacagagagaatgcctactggggatgcccaggtcaggggtactgcagggcatcctgatgagaggcagtgtggcccctccattgggagccacctctgtgctccacaagtaccgcgg

SEQ ID NO: 716007 - DNA, 120 bp, Artificial Sequence
  ENSG00000197375_100 (sequence is synthesized)
ggctggtgtcagctgtctctgaccagcctcttcctgactggtcaccacaggtagtgtgtgagggtctctctccaagtgtttgacctaatgttgttccttttgttatcttatcccccaaat

SEQ ID NO: 716008 - DNA, 120 bp, Artificial Sequence
  ENSG00000197375_101 (sequence is synthesized)
cctatcacacctcacttgatgtctgcctcctgactcattctctagctccttctgcagttgctggatttgaggaggttcagcttaggatttttaaagctgaaaggcaggttggaatttttc

SEQ ID NO: 716009 - DNA, 120 bp, Artificial Sequence
  ENSG00000197375_102 (sequence is synthesized)
ttttcaatgaagtaaatctatctgaattatacaagcttttttgctgggacactgtctatatggaaggctctgagagcgcactggcgcagggtttacactgtaccacttgggctggggaaa

SEQ ID NO: 716010 - DNA, 120 bp, Artificial Sequence
  ENSG00000197375_103 (sequence is synthesized)
attatcttttgatctatgaagtaagacgcagggttacagttactgctgccttactagtctctgcttaaagatggtttggaatttactgaaataattgcattgtaaaagttgtacaggttg

SEQ ID NO: 716011 - DNA, 80 bp, Artificial Sequence
  ENSG00000197380_0 (sequence is synthesized)
agatgagacggtgacagcccggccagcgggcgggcgggcaggctgctggggcggggaggtgggaccgggagaggggtggc

SEQ ID NO: 716012 - DNA, 120 bp, Artificial Sequence
  ENSG00000197380_1 (sequence is synthesized)
gatccgggccttctcgttcccggtgagccctgagcggggccggctgcggggctggctggagggtagcctggccgggctctgcgagttacattggctccgggagaggcaggagtaccgcgt

SEQ ID NO: 716013 - DNA, 120 bp, Artificial Sequence
  ENSG00000197380_2 (sequence is synthesized)
caggcgctgcggctggcccagcccggaatggggggcgccgaggccgaggacgaggaggacgccgatgaggatgaagatgcggcggcggcgcgccgggccgcagcggccctggaggagcag

SEQ ID NO: 716014 - DNA, 120 bp, Artificial Sequence
  ENSG00000197380_3 (sequence is synthesized)
gcagctggaggccctgcctggtctcgtctgggacctgggacagcagctgggagacctgagcctggagtctgggggcctggaacaggagagcgggcgtagctcgggcttctatgaagatcc

SEQ ID NO: 716015 - DNA, 120 bp, Artificial Sequence
  ENSG00000197380_4 (sequence is synthesized)
cagctctacaggaggtccagattcaccaccctcaaccttctgtggggacagtggcttctctggatccagctcctatggtcgcctgggtccctctgagccccggggcatctatgccagtga

SEQ ID NO: 716016 - DNA, 120 bp, Artificial Sequence
  ENSG00000197380_5 (sequence is synthesized)
gaggcccaagtccctaggagacgccagtcccagcgctccggaggtggtgggcgcgcgggcagcggtgccgcggtccttctcagcgccctacccgacggcaggggggtccgccggcccgga

SEQ ID NO: 716017 - DNA, 80 bp, Artificial Sequence
  ENSG00000197380_6 (sequence is synthesized)
ggcctgctcctcggcggagcggcgggcccgcgccgggccctttctgacgcccagccccctgcacgccgtggcgatgcgca

SEQ ID NO: 716018 - DNA, 80 bp, Artificial Sequence
  ENSG00000197380_7 (sequence is synthesized)
cgactcgcccgacgcggggggcgcagggcggcccctggacggctacatctcggcgctcctgcgcaggcgccgccgccggg

SEQ ID NO: 716019 - DNA, 80 bp, Artificial Sequence
  ENSG00000197380_8 (sequence is synthesized)
ccagaacagcgtgcgccagcggccgcccgacgcgtctccgtcccccggcagcgcgcgacccgcgcgggagccctcgttgg

SEQ ID NO: 716020 - DNA, 80 bp, Artificial Sequence
  ENSG00000197380_9 (sequence is synthesized)
gagcccgctgcgccgcccgccgccccctcaccccccgacagcccggctgagggccgcttggtgaaggcgcagtacatccc

SEQ ID NO: 716021 - DNA, 120 bp, Artificial Sequence
  ENSG00000197380_10 (sequence is synthesized)
cttggtgaaggcgcagtacatcccgggcgcgcaggcggccacccgaggcctccctggccgcgccgcccgccgcaaaccgccgccactgacccgcggccgcagcgtggagcagtcaccacc

SEQ ID NO: 716022 - DNA, 120 bp, Artificial Sequence
  ENSG00000197380_11 (sequence is synthesized)
gacgcatggccgaggcttcgggccgccgcggctcgcccagggcccgcaaggcctcgcgctcccagtctgagaccagcctgctgggccgcgcctccgcggtcccttcggggccccctaagt

SEQ ID NO: 716023 - DNA, 120 bp, Artificial Sequence
  ENSG00000197380_12 (sequence is synthesized)
gagcgggaagagcctcggcctccacggccacgccgcggcccagcgcccacgctggcggcccaggccgcagggtcctgccgtcgctggcgctccactgcggagatcgacgctgccgatggg

SEQ ID NO: 716024 - DNA, 120 bp, Artificial Sequence
  ENSG00000197380_13 (sequence is synthesized)
cggcccgtccccgtcagctccccagcgtcgtctgctttacggctgcgcgggcagcgactccgagtgctcggctgggcgcctggggcccctgggacgccgggggcctgcgggaggcgtcgg

SEQ ID NO: 716025 - DNA, 120 bp, Artificial Sequence
  ENSG00000197380_14 (sequence is synthesized)
tcggcgggggttacggggagagcgaatcgagcgccagcgagggagaatcgcctgccttcagctctgcctccagcgactcagacggcagcggtggcctcgtgtggccgcagcagctggtgg

SEQ ID NO: 716026 - DNA, 120 bp, Artificial Sequence
  ENSG00000197380_15 (sequence is synthesized)
cggccaccgcggcctctgggggtggagcaggtgcaggggcgcccgcaggccccgccaaagtcttcgtgaaaatcaaagcttcccacgcgctcaagaaaaagatactgcgtttccgttcgg

SEQ ID NO: 716027 - DNA, 120 bp, Artificial Sequence
  ENSG00000197380_16 (sequence is synthesized)
gttctctcaaggtcatgactacagtgtgagtttggggatttgcttgggctcccccttcatggcctctgcacctccacactcccaaccactgacccttccacatctaccttccaaagacca

SEQ ID NO: 716028 - DNA, 120 bp, Artificial Sequence
  ENSG00000197380_17 (sequence is synthesized)
tcgttttctctgcttccaaagacccccctcactctccccactcctaacagtcttggttgaaaaggctcccccaccaccaccgagaggaatggggaggagccctgtttgacccagttcagc

SEQ ID NO: 716029 - DNA, 120 bp, Artificial Sequence
  ENSG00000197380_18 (sequence is synthesized)
ttctagcttggaagcccttgggcaagacagttccccttctctgggcgtcactttcctcatctgtacagtaagtgtccatgtatgcaaaaggggtaattcggtttgaatttccccgtttta

SEQ ID NO: 716030 - DNA, 120 bp, Artificial Sequence
  ENSG00000197380_19 (sequence is synthesized)
gtttagaagcctagtctgtttgttcccctccaccgctctccctctcattcctgatgagccctctcattcctcctttccttgcccagctatggccccctctcattcacaaagtgccccctc

SEQ ID NO: 716031 - DNA, 120 bp, Artificial Sequence
  ENSG00000197380_20 (sequence is synthesized)
catgtccctggacccttaagatatccccttggcaccctggtcagagactctgtgtctgactcaggtggtccctgcagagtgccctgggaagggaaggagcactgatttgggggttttgag

SEQ ID NO: 716032 - DNA, 120 bp, Artificial Sequence
  ENSG00000197380_21 (sequence is synthesized)
ggtcaagtaggggttggtaacacctggaaagaaggactctttcacttcgatccctggacaattatggaggattcggaggtagaagaggggaaggaagatggtttctatctcatgaccccc

SEQ ID NO: 716033 - DNA, 120 bp, Artificial Sequence
  ENSG00000197380_22 (sequence is synthesized)
actccctgtgagagggaatgggggaagcctgatgaccctcagctgttccaatctagtattttttttcttttttaaaattactgtatttattatgacgatggtgactccccagtgcaaagg

SEQ ID NO: 716034 - DNA, 120 bp, Artificial Sequence
  ENSG00000197380_23 (sequence is synthesized)
ggggccagattctgtgtgtttctctaacctctttgtaaataaatgcacagtgtaacatatgtggtggactctcactgaatgattaaatgggagaaatgctctttttcctttggactaaca

SEQ ID NO: 716035 - DNA, 120 bp, Artificial Sequence
  ENSG00000197380_24 (sequence is synthesized)
ggccagggaaaggacagtaggaggatggttgtgggcacagacttccgaatcgggcctggattccaattccagctgtgacatttccttttcacatggttatgagcaggtctcttatttctg

SEQ ID NO: 716036 - DNA, 70 bp, Artificial Sequence
  ENSG00000197380_25 (sequence is synthesized)
tttccttttcacatggttatgagcaggtctcttatttctgggtctctgtttttccatctgttaaaatgaa

SEQ ID NO: 716037 - DNA, 75 bp, Artificial Sequence
  ENSG00000197380_26 (sequence is synthesized)
tgggcggatcacttgaggatacaaaaattagttgggcgtggtagcgaacacctgtaattccagctactcgggagg

SEQ ID NO: 716038 - DNA, 79 bp, Artificial Sequence
  ENSG00000197380_27 (sequence is synthesized)
agaccaacctgaccaataggcgtggtgatgtgtgcctgtagtcccatctactctgaagactgaaacaggagaattgctt

SEQ ID NO: 716039 - DNA, 87 bp, Artificial Sequence
  ENSG00000197380_28 (sequence is synthesized)
aaaatacaaaacttagctaggcgtggtgatgtgtgcctgtagtcccatctactctgaagactgaaacaggagaattgcttgagcagc

SEQ ID NO: 716040 - DNA, 82 bp, Artificial Sequence
  ENSG00000197380_29 (sequence is synthesized)
ctccatctcaaaaaataaataaataaatataaaatggtataataacagtgcctcaatagccaggcattgtggtgcagattgc

SEQ ID NO: 716041 - DNA, 120 bp, Artificial Sequence
  ENSG00000197380_30 (sequence is synthesized)
acacacacacacacacacacacaaacagtgcctgccctaaggggatatttttgaatattcagtgagcctctgctctaaggcattggacttggtgcatggcagtcactggtaaacaggaac

SEQ ID NO: 716042 - DNA, 120 bp, Artificial Sequence
  ENSG00000197380_31 (sequence is synthesized)
cattggacttggtgcatggcagtcactggtaaacaggaactgctgtcattcattcatacaagtaagtttttgagcccccactatgtgctacctagcagtatcccaggagcaatgaacaaa

SEQ ID NO: 716043 - DNA, 120 bp, Artificial Sequence
  ENSG00000197380_32 (sequence is synthesized)
gcaatgaacaaaatgaacagtaatgaacaaaacaggcaaatccctgccctcaggaaactgccagcctagttggaggaatagataaaatacaggataaatggccaggcgcggtggctcatg

SEQ ID NO: 716044 - DNA, 120 bp, Artificial Sequence
  ENSG00000197380_33 (sequence is synthesized)
taaataaataaatagataaataaataaaccaggataaataagtaaaatatctagggtacgaaataatgccatgtgctatgacaagaaataagccggggaaagggactcagaagtgtccct

SEQ ID NO: 716045 - DNA, 120 bp, Artificial Sequence
  ENSG00000197380_34 (sequence is synthesized)
ccggggaaagggactcagaagtgtccctttgagtttggggagggaagtgcaattttagaaaatatggctggggagggcttcactgagactgtaacatttgagttgtgccctgaactaagt

SEQ ID NO: 716046 - DNA, 120 bp, Artificial Sequence
  ENSG00000197380_35 (sequence is synthesized)
gggggagtggacctagcagatatccagaaggaagagcattccgggcatctggaatctggaatgggaagcagaaaggctctgaggccagaatgtgactggcgcctgctttcaggaggccag

SEQ ID NO: 716047 - DNA, 79 bp, Artificial Sequence
  ENSG00000197380_36 (sequence is synthesized)
gaggccagaatgtgactggcgcctgctttcaggaggccagtgtggctggagtcctataagtagaggagaagggtcagct

SEQ ID NO: 716048 - DNA, 120 bp, Artificial Sequence
  ENSG00000197380_37 (sequence is synthesized)
tgggcaacacagtgagaccccatccctacaaaaaataaaaaaatcagcagggcatggtgatgcgttcctgtagtcccagccgttcaggaagataaggcgagaggatcccttgagcccagg

SEQ ID NO: 716049 - DNA, 66 bp, Artificial Sequence
  ENSG00000197380_38 (sequence is synthesized)
cgttcaggaagataaggcgagaggatcccttgagcccaggagctggaacaagaacctgtcttaaaa

SEQ ID NO: 716050 - DNA, 80 bp, Artificial Sequence
  ENSG00000197381_0 (sequence is synthesized)
caagcggccaggttggcggccggggctccgggccgcgcgaggccacggccacgccgcgccgctgcgcacaaccaacgagg

SEQ ID NO: 716051 - DNA, 120 bp, Artificial Sequence
  ENSG00000197381_1 (sequence is synthesized)
caaccaacgaggcagagcgccgcccggcgcgagactgcggccgaagcgtggggcgcgcgtgcggaggaccaggcgcggcgcggctgcggctgagagtggagcctttcaggctggcatgga

SEQ ID NO: 716052 - DNA, 120 bp, Artificial Sequence
  ENSG00000197381_2 (sequence is synthesized)
gagcttaaggggcaactgaaggagacacactggccaagcgcggagttctgcttacttcagtcctgctgagatactctctcagtccgctcgcaccgaaggaagctgccttgggatcagagc

SEQ ID NO: 716053 - DNA, 120 bp, Artificial Sequence
  ENSG00000197381_3 (sequence is synthesized)
agacataaagctagaaaaatttcaagacagaaacagtctccgccagtcaagaaaccctcaaaagtattttgccatggatatagaagatgaagaaaacatgagttccagcagcactgatgt

SEQ ID NO: 716054 - DNA, 120 bp, Artificial Sequence
  ENSG00000197381_4 (sequence is synthesized)
gaaggaaaaccgcaatctggacaacgtgtcccccaaggatggcagcacacctgggcctggcgagggctctcagctctccaatgggggtggtggtggccccggcagaaagcggcccctgga

SEQ ID NO: 716055 - DNA, 120 bp, Artificial Sequence
  ENSG00000197381_5 (sequence is synthesized)
ggagggcagcaatggccactccaagtaccgcctgaagaaaaggaggaaaacaccagggcccgtcctccccaagaacgccctgatgcagctgaatgagatcaagcctggtttgcagtacac

SEQ ID NO: 716056 - DNA, 120 bp, Artificial Sequence
  ENSG00000197381_6 (sequence is synthesized)
actcctgtcccagactgggcccgtgcacgcgcctttgtttgtcatgtctgtggaggtgaatggccaggtttttgagggctctggtcccacaaagaaaaaggcaaaactccatgctgctga

SEQ ID NO: 716057 - DNA, 120 bp, Artificial Sequence
  ENSG00000197381_7 (sequence is synthesized)
gaaggccttgaggtctttcgttcagtttcctaatgcctctgaggcccacctggccatggggaggaccctgtctgtcaacacggacttcacatctgaccaggccgacttccctgacacgct

SEQ ID NO: 716058 - DNA, 120 bp, Artificial Sequence
  ENSG00000197381_8 (sequence is synthesized)
cttcaatggttttgaaactcctgacaaggcggagcctcccttttacgtgggctccaatggggatgactccttcagttccagcggggacctcagcttgtctgcttccccggtgcctgccag

SEQ ID NO: 716059 - DNA, 120 bp, Artificial Sequence
  ENSG00000197381_9 (sequence is synthesized)
cctagcccagcctcctctccctgtcttaccaccattcccacccccgagtgggaagaatcccgtgatgatcttgaacgaactgcgcccaggactcaagtatgacttcctctccgagagcgg

SEQ ID NO: 716060 - DNA, 120 bp, Artificial Sequence
  ENSG00000197381_10 (sequence is synthesized)
ggagagccatgccaagagcttcgtcatgtctgtggtcgtggatggtcagttctttgaaggctcggggagaaacaagaagcttgccaaggcccgggctgcgcagtctgccctggccgccat

SEQ ID NO: 716061 - DNA, 120 bp, Artificial Sequence
  ENSG00000197381_11 (sequence is synthesized)
ttttaacttgcacttggatcagacgccatctcgccagcctattcccagtgagggtcttcagctgcatttaccgcaggttttagctgacgctgtctcacgcctggtcctgggtaagtttgg

SEQ ID NO: 716062 - DNA, 120 bp, Artificial Sequence
  ENSG00000197381_12 (sequence is synthesized)
tgacctgaccgacaacttctcctcccctcacgctcgcagaaaagtgctggctggagtcgtcatgacaacaggcacagatgttaaagatgccaaggtgataagtgtttctacaggaacaaa

SEQ ID NO: 716063 - DNA, 120 bp, Artificial Sequence
  ENSG00000197381_13 (sequence is synthesized)
atgtattaatggtgaatacatgagtgatcgtggccttgcattaaatgactgccatgcagaaataatatctcggagatccttgctcagatttctttatacacaacttgagctttacttaaa

SEQ ID NO: 716064 - DNA, 120 bp, Artificial Sequence
  ENSG00000197381_14 (sequence is synthesized)
taacaaagatgatcaaaaaagatccatctttcagaaatcagagcgaggggggtttaggctgaaggagaatgtccagtttcatctgtacatcagcacctctccctgtggagatgccagaat

SEQ ID NO: 716065 - DNA, 120 bp, Artificial Sequence
  ENSG00000197381_15 (sequence is synthesized)
cttctcaccacatgagccaatcctggaagaaccagcagatagacacccaaatcgtaaagcaagaggacagctacggaccaaaatagagtctggtgaggggacgattccagtgcgctccaa

SEQ ID NO: 716066 - DNA, 120 bp, Artificial Sequence
  ENSG00000197381_16 (sequence is synthesized)
tgcgagcatccaaacgtgggacggggtgctgcaaggggagcggctgctcaccatgtcctgcagtgacaagattgcacgctggaacgtggtgggcatccagggatccctgctcagcatttt

SEQ ID NO: 716067 - DNA, 120 bp, Artificial Sequence
  ENSG00000197381_17 (sequence is synthesized)
cgtggagcccatttacttctcgagcatcatcctgggcagcctttaccacggggaccacctttccagggccatgtaccagcggatctccaacatagaggacctgccacctctctacaccct

SEQ ID NO: 716068 - DNA, 120 bp, Artificial Sequence
  ENSG00000197381_18 (sequence is synthesized)
caacaagcctttgctcagtggcatcagcaatgcagaagcacggcagccagggaaggcccccaacttcagtgtcaactggacggtaggcgactccgctattgaggtcatcaacgccacgac

SEQ ID NO: 716069 - DNA, 120 bp, Artificial Sequence
  ENSG00000197381_19 (sequence is synthesized)
tgggaaggatgagctgggccgcgcgtcccgcctgtgtaagcacgcgttgtactgtcgctggatgcgtgtgcacggcaaggttccctcccacttactacgctccaagattaccaagcccaa

SEQ ID NO: 716070 - DNA, 120 bp, Artificial Sequence
  ENSG00000197381_20 (sequence is synthesized)
cgtgtaccatgagtccaagctggcggcaaaggagtaccaggccgccaaggcgcgtctgttcacagccttcatcaaggcggggctgggggcctgggtggagaagcccaccgagcaggacca

SEQ ID NO: 716071 - DNA, 120 bp, Artificial Sequence
  ENSG00000197381_21 (sequence is synthesized)
gttctcactcacgccctgacccgggcagacatgatggggggtgcagggggctgtgggcatccagcgtcatcctccagaacctcacatctgaactgggggcaggtgcataccttggggagg

SEQ ID NO: 716072 - DNA, 120 bp, Artificial Sequence
  ENSG00000197381_22 (sequence is synthesized)
gagtagggggacacgggggaccaccaggtgtccacggttgtccccagcatctcacatcagacctggggcaggtgcgcagtgtggggaggggatggggtgcgtcagggcccagcatcgccg

SEQ ID NO: 716073 - DNA, 120 bp, Artificial Sequence
  ENSG00000197381_23 (sequence is synthesized)
cctggcatctctctgccgcagcatttccccttctgaaccgtccagtgactgctttcaatctcggtttacgtttagaaattgagttctactgagtagggcttccttaagtttaggaaaata

SEQ ID NO: 716074 - DNA, 120 bp, Artificial Sequence
  ENSG00000197381_24 (sequence is synthesized)
gaaattactttgtgtgaaattcttgaataaataatttattcagagctaggaatgtggtttataaaataggaagtaattgtgtcaggtcacttttatgccacattattttaattgcaaaaa

SEQ ID NO: 716075 - DNA, 120 bp, Artificial Sequence
  ENSG00000197381_25 (sequence is synthesized)
agcatctatatatggaggagggtgggaaaatagaggtaggaaatagtagcctaaaggaaatcgccacacgtctgtctaaacttaggtctcttttctccgtaggtacctccctgggtagtt

SEQ ID NO: 716076 - DNA, 120 bp, Artificial Sequence
  ENSG00000197381_26 (sequence is synthesized)
ccacacactaggttgtaacagtctctccctgaggagcagactcccagcatggtgtagcgtggccctgtcatgcacatggggtcccgcagcagtgactgtgtgtcctgcagaggcgtgacc

SEQ ID NO: 716077 - DNA, 120 bp, Artificial Sequence
  ENSG00000197381_27 (sequence is synthesized)
caggcccctgtagccctcagcctcctctagaagcttctgtactccttgtaggatcagatcatggaaaacttttctcagtttacttctaagtaatcacagataatacatggccagtaatcc

SEQ ID NO: 716078 - DNA, 120 bp, Artificial Sequence
  ENSG00000197381_28 (sequence is synthesized)
acgagggctactgcacaatacatggcctaagttccctctgttccttcctctgaatcgaatggatgtgggtgaccgcccgaaggccttcacaggatggaagtagaatgatttcagtagata

SEQ ID NO: 716079 - DNA, 120 bp, Artificial Sequence
  ENSG00000197381_29 (sequence is synthesized)
ctcattcttggaaaatgccatagttttaaattattgtttccagctttatcaaagacatgtttgaaaaataaaaagcatccaagtgagagctggtgagaccacgtgctgctggcgtagtgt

SEQ ID NO: 716080 - DNA, 120 bp, Artificial Sequence
  ENSG00000197381_30 (sequence is synthesized)
aggccagacattgacagtcctgacgggagctcagggctgcccagcgcccagcgtgcacgggacggccccacgacagagggagtcagcccgggaggtcaggagcgcggcgggcgagggccc

SEQ ID NO: 716081 - DNA, 120 bp, Artificial Sequence
  ENSG00000197381_31 (sequence is synthesized)
tgtgtggaccacctccaccaagctcagagatttgcaccaggtgccttgttgcctccgctcaggatgaaagaggagctgagagaagtgctctgcctgccagtgcagtgcccagctccaagg

SEQ ID NO: 716082 - DNA, 120 bp, Artificial Sequence
  ENSG00000197381_32 (sequence is synthesized)
ctctagagggtgttcaggtgggtctcctggggccatggggagagattggtgcagaccttaccccacagcatacacctgccacagcgaaatccagggtgttggcacctgtgtgtccgtgat

SEQ ID NO: 716083 - DNA, 120 bp, Artificial Sequence
  ENSG00000197381_33 (sequence is synthesized)
gagcctaggaaaccagagcaggggcagaggggcgtcatcctcccaccggacgctgggagctcagaccccaaaactgaaacaccgtggcttcggcggggggtgtgcctcctgatgtcagga

SEQ ID NO: 716084 - DNA, 120 bp, Artificial Sequence
  ENSG00000197381_34 (sequence is synthesized)
gccccatccacgtgtgtccacacagatctcgtcgcagcacggcaggaaggggtgctgcttagggctcattgttggggacatgaccgggttcagcggctagaacatctgccccacagcagc

SEQ ID NO: 716085 - DNA, 120 bp, Artificial Sequence
  ENSG00000197381_35 (sequence is synthesized)
ctcctcctccaccgaagagggtagttgtctccctgaagcagtcacagcaggcgtctctgccgctccgtcaccacagtggggttttgttcaggcagatcgcgctggggttctgcacctgca

SEQ ID NO: 716086 - DNA, 120 bp, Artificial Sequence
  ENSG00000197381_36 (sequence is synthesized)
gaaggagaggggtctgttgtcgctggctttcccccaagcaggctcttgcacactctagaaaaaacaccttgtaagtctgtgcatttttattgtcttgataaattgtatttttttctaatg

SEQ ID NO: 716087 - DNA, 120 bp, Artificial Sequence
  ENSG00000197381_37 (sequence is synthesized)
gggattgggagatggacttcgtttttaaaaatatgtggattttggttaccaagtttagtgttaatatattccatatacatacaaaactacccggtatgtctggcttttcccttctgtcag

SEQ ID NO: 716088 - DNA, 120 bp, Artificial Sequence
  ENSG00000197381_38 (sequence is synthesized)
gtaatagctaaagtcagcatgattgctccctgtaccaccccaaataagtgagtgcctcaccttgtggggcctgagcagctaccttgagaccatgtgaggtggcacctttccggggtggac

SEQ ID NO: 716089 - DNA, 120 bp, Artificial Sequence
  ENSG00000197381_39 (sequence is synthesized)
tcgtgcggccttgaggacaggcacagggcaccctatcccaagccgtccaggcaggaggaaggcagccaaggcaactgggttctgggagccctgggtggggcagctgtggggaggaactgg

SEQ ID NO: 716090 - DNA, 120 bp, Artificial Sequence
  ENSG00000197381_40 (sequence is synthesized)
gttcggggagccctgggcggggcggctgttggggggaactgggttcggggtgccctgggcagggggctactggggggcggctgtgaggaggagttgggttcagggagccctgggcggggt

SEQ ID NO: 716091 - DNA, 120 bp, Artificial Sequence
  ENSG00000197381_41 (sequence is synthesized)
ggctgtcagggggaactgggttccgggagccctgggccggggcagggggcggctgtaggaaggaactggtttcggggagccctgggcggggcggctgtggggaggaaggtgacgtgcagg

SEQ ID NO: 716092 - DNA, 120 bp, Artificial Sequence
  ENSG00000197381_42 (sequence is synthesized)
ggaccagaggctctgcactgctcctaggacagctcatctgtaatcagaaaaaaaataaacaaaatacagaacgctgactcctccgtgagacagatcggggaccttagcactttaatccct

SEQ ID NO: 716093 - DNA, 120 bp, Artificial Sequence
  ENSG00000197381_43 (sequence is synthesized)
cccttctgagcgctcggtgtgcacttttagactatagctgtttcattgacgtgtcactctccatccagtgtccttgatgtggcttttagagacttagcagaaaattcgacacaagcagga

SEQ ID NO: 716094 - DNA, 120 bp, Artificial Sequence
  ENSG00000197381_44 (sequence is synthesized)
acttgattttttaagaaaaaatattacattttgaggacattttgacaagtaggggaagagagggcttctgttgttttgttttgttttgttttgttaactaaacctgaagtattaattcca

SEQ ID NO: 716095 - DNA, 120 bp, Artificial Sequence
  ENSG00000197381_45 (sequence is synthesized)
caaagacactgtccctcaggaccactcaggtacagctctgccagggacagagtcctgctagtgggaggtctcaggtggggcggtgtgttctgtgccatgaggcagcgacaggtccagatg

SEQ ID NO: 716096 - DNA, 120 bp, Artificial Sequence
  ENSG00000197381_46 (sequence is synthesized)
gatgtcgtcaccaccttcctcagctctcatcacctggtcgtacgccaggcccacctcttcccagcaagggacgccaaagaactgcagtttttattctgagtcttaatttaacttttcatc

SEQ ID NO: 716097 - DNA, 120 bp, Artificial Sequence
  ENSG00000197381_47 (sequence is synthesized)
atcttttcctattttggagaattttttgtaattaaaagcaattattttaaaatgtgcaagccagtatctcacaaggcatggatttctgtggaatttatttttattcaaataaccatattt

SEQ ID NO: 716098 - DNA, 120 bp, Artificial Sequence
  ENSG00000197381_48 (sequence is synthesized)
atctccaggctgtggaatcgccactttctttgtgaagacagtgtctctccttgtaatctcacacaggtacactgaggaggggacggctccgtcttcacattgtgcacagatctgaggatg

SEQ ID NO: 716099 - DNA, 120 bp, Artificial Sequence
  ENSG00000197381_49 (sequence is synthesized)
ggattagcgaagctgtggagactgcacatccggacctgcccatgtctcaaaacaaacacatgtacagtggctctttttccttctcaaacactttaccccagaagcaggtggtctgcccca

SEQ ID NO: 716100 - DNA, 120 bp, Artificial Sequence
  ENSG00000197381_50 (sequence is synthesized)
ggcataaagaaggaaaattggccatctttcccacctctaaattctgtaaaattatagacttgctcaaaagattcctttttatcatccccacgctgtgtaagtggaaagggcattgtgttc

SEQ ID NO: 716101 - DNA, 120 bp, Artificial Sequence
  ENSG00000197381_51 (sequence is synthesized)
cgtgtgtgtccagtttacagcgtctctgccccctagcgtgttttgtgacaatctccctgggtgaggagtgggtgcacccagccccgaggccagtggttgctcggggccttccgtgtgagt

SEQ ID NO: 716102 - DNA, 120 bp, Artificial Sequence
  ENSG00000197381_52 (sequence is synthesized)
tctagtgttcacttgatgccggggaatagaattagagaaaactctgacctgccgggttccagggactggtggaggtggatggcaggtccgactcgaccatgacttagttgtaagggtgtg

SEQ ID NO: 716103 - DNA, 120 bp, Artificial Sequence
  ENSG00000197381_53 (sequence is synthesized)
tcggctttttcagtctcatgtgaaaatcctcctgtctctggcagcactgtctgcactttcttgtttactgtttgaagggacgagtaccaagccacaagaacacttcttttggccacagca

SEQ ID NO: 716104 - DNA, 120 bp, Artificial Sequence
  ENSG00000197381_54 (sequence is synthesized)
taagctgatggtatgtaaggaaccgatgggccattaaacatgaactgaacggttaaaagcacagtctatggaacgctaatggagtcagcccctaaagctgtttgctttttcaggctttgg

SEQ ID NO: 716105 - DNA, 120 bp, Artificial Sequence
  ENSG00000197381_55 (sequence is synthesized)
attacatgcttttaatttgattttagaatctggacactttctatgaatgtaattcggctgagaaacatgttgctgagatgcaatcctcagtgttctctgtatgtaaatctgtgtatacac

SEQ ID NO: 716106 - DNA, 120 bp, Artificial Sequence
  ENSG00000197381_56 (sequence is synthesized)
cacacgttacaactgcatgagcttcctctcgcacaagaccagctggaactgagcatgagacgctgtcaaatacagacaaaggatttgagatgttctcaataaaaagaaaatgtttcacta

SEQ ID NO: 716107 - DNA, 120 bp, Artificial Sequence
  ENSG00000197381_57 (sequence is synthesized)
gaggaccccctagaggccaggcccatgagtgatgaagatcccgaggatgaagacgccttgccagccaggtggaagaaagaaatgggaagaaaaaggaagagaaccatagctacgttgtga

SEQ ID NO: 716108 - DNA, 77 bp, Artificial Sequence
  ENSG00000197381_58 (sequence is synthesized)
ttaagcgatccttccacctcaaccttccaaggagctgggactacagaaccagcagatagacacccaaatcgtaaagc

SEQ ID NO: 716109 - DNA, 120 bp, Artificial Sequence
  ENSG00000197381_59 (sequence is synthesized)
gtggttactctacctatttgtgtaggcctctcaggtcattgaaacaagatgttgtacaaattagcagatgacactggcgcatggaggaatgagtctagtgttggtaatgagaagttggat

SEQ ID NO: 716110 - DNA, 120 bp, Artificial Sequence
  ENSG00000197381_60 (sequence is synthesized)
atccgtttgatccttgttctactgcaggtagtgtatattttgagaacagcgtgaggtttattctactaatggaaatttacaaaaataccagtttgaatgattgagaaatctaagttaaag

SEQ ID NO: 716111 - DNA, 120 bp, Artificial Sequence
  ENSG00000197381_61 (sequence is synthesized)
tcaaggaagctgtcagtgtggtgttgggcctgattgattcgcatcagctcaggtggcgtcctattggaaggtcggcagtgggagagcagctggccagttcctcccgcctgcaaggcaggg

SEQ ID NO: 716112 - DNA, 120 bp, Artificial Sequence
  ENSG00000197381_62 (sequence is synthesized)
gagtgtacaaggtgtgtaccccaggggcaggatgctaacactgcactgactgagaaaagaatttgtcttacctgtacctgacaggtgtgtacctgaaagagatgaaattgaaatggccaa

SEQ ID NO: 716113 - DNA, 120 bp, Artificial Sequence
  ENSG00000197381_63 (sequence is synthesized)
tccacttgctggcacacagatttaccacaattaggatactgcttgtcctgtcatgccgggagagtctaaattactctgactttcaagaaaccaaaaatatgcatttttgatgttaggaag

SEQ ID NO: 716114 - DNA, 120 bp, Artificial Sequence
  ENSG00000197381_64 (sequence is synthesized)
atttactgtgcattgggctgtgtcatttgatgaggaaaaaaccaaatgatctctttatgaaaatgaagaattgtagcctgtggaggtgaccaaggaaccagatcccaagaggcctctgcc

SEQ ID NO: 716115 - DNA, 120 bp, Artificial Sequence
  ENSG00000197381_65 (sequence is synthesized)
actgaaaggagatttttattacttgcgtttcctagacgggggggcactcgcgccaagcaggcccacggggcacactggtgtcagtcaaggggcagaaaggagccacaggaaagcccagga

SEQ ID NO: 716116 - DNA, 120 bp, Artificial Sequence
  ENSG00000197381_66 (sequence is synthesized)
cagagcctgagtggggtttctgtgggaaaggcagggcagggcacccgtgtaggaatggctagtgtgaacagttccagtgggccctgggctgtaggagagatcactagctgcctgctacca

SEQ ID NO: 716117 - DNA, 120 bp, Artificial Sequence
  ENSG00000197381_67 (sequence is synthesized)
ggccctggggtgatttcgggcaggcgggcagttagataagggaggtgggtagagccgaccacctgcctggaaccctgtgctggctataagccctgggagggccagtctctccctgtgtct

SEQ ID NO: 716118 - DNA, 120 bp, Artificial Sequence
  ENSG00000197381_68 (sequence is synthesized)
gtaaggcccacaaatgccaaagcattaggaataagaaaatggacgtaatagaattgatcctgtgaggactggatgcctaactgccacatacagaatgtgagaaagcacagaacaactgcc

SEQ ID NO: 716119 - DNA, 120 bp, Artificial Sequence
  ENSG00000197381_69 (sequence is synthesized)
ttcattgacaagatggtgcccagagctcaagacaggcacacagcaggaggatgccggcaggatccctcaacaagcttaccgtggtatctttcacaatgttaactgtcatcccagatgaac

SEQ ID NO: 716120 - DNA, 120 bp, Artificial Sequence
  ENSG00000197381_70 (sequence is synthesized)
ttttaatgacagtgtatctctgaagattgtgcttttagcgtattttcacttaaagtcatatctcatttagtagacctgccagattcctgaaaagttacacacaagccagctgacatgacc

SEQ ID NO: 716121 - DNA, 120 bp, Artificial Sequence
  ENSG00000197381_71 (sequence is synthesized)
tttgccagtcatgttgaccacgttctcaccgagctgtggactcctcactaggagcctttacctacggccagatggctgttgtcactgcctgtggtggggttacggtttcggactcacctg

SEQ ID NO: 716122 - DNA, 120 bp, Artificial Sequence
  ENSG00000197381_72 (sequence is synthesized)
atccgttctgccgggattacctacggccagatggctgttgtcactgcctgtggtggggttatggtttcggacttacctgatccgttctgccgggattacctacggccagatggctgttgt

SEQ ID NO: 716123 - DNA, 120 bp, Artificial Sequence
  ENSG00000197381_73 (sequence is synthesized)
cactgcctgtggtggggttatggtttcggacgcacctgatccgttctgccgggattttaaagtatgggagtttaggcatactttgcaagttgtttcttgaatatacttttctgaattatg

SEQ ID NO: 716124 - DNA, 120 bp, Artificial Sequence
  ENSG00000197381_74 (sequence is synthesized)
ctgcatttaccgcaggtctcatccaagaatctcacattcaagataagtgacaccagcccgtcagcagctgaaaacccaagtctgggtcaagatggcagcctctgggctcccacatgactg

SEQ ID NO: 716125 - DNA, 120 bp, Artificial Sequence
  ENSG00000197381_75 (sequence is synthesized)
tgttcctaagccgaggagcccatcaaagcagcgaatgagccagcacagcagtgagcacctatcagagcgcagggagggaggggcctccaacaactgttctagggcctgccagttgcctgg

SEQ ID NO: 716126 - DNA, 120 bp, Artificial Sequence
  ENSG00000197381_76 (sequence is synthesized)
gagtctctactttgaatttcctacatgggctgtatgaggacttccccgcatgcccaggctggaggtggacagccacccttccatttgacctccccagcgcagtgaaatcaggatgaagga

SEQ ID NO: 716127 - DNA, 120 bp, Artificial Sequence
  ENSG00000197381_77 (sequence is synthesized)
aggggaagttccagggtgggcttagattggcttacgtgaaagagaaaaagtaaaggagaaaatcacctttagttctcatctctaaatcctaaaactctctgattatgtattccttctttt

SEQ ID NO: 716128 - DNA, 120 bp, Artificial Sequence
  ENSG00000197381_78 (sequence is synthesized)
ctcaaaagtattttgccatggatatagaagatgaagaaaacatgagtaagatctaggcctatcacgtagtatcagatagctaattttatgttaacattttggtgtttttgcaaatgtatt

SEQ ID NO: 716129 - DNA, 120 bp, Artificial Sequence
  ENSG00000197381_79 (sequence is synthesized)
tgtgctctgagcatgactaaactaaaagtaatgaatccagaccttgaagactggtgtgtgtgtaaaaggcaagaagtgagaagattcacgtgtagatccaggacaatctgaatttacttc

SEQ ID NO: 716130 - DNA, 120 bp, Artificial Sequence
  ENSG00000197381_80 (sequence is synthesized)
tgttcagtagttcccaaaggctttttctacatggagggactcggagtgacacagcagctccctcttgtgggcagattcccctgtgtaaggtgctggaggctgaggttccagcctgcagcc

SEQ ID NO: 716131 - DNA, 120 bp, Artificial Sequence
  ENSG00000197385_0 (sequence is synthesized)
gcacactccctctctcggtcttccgcacacgatgctgcgccagacgctcctacacagtaacctggaaattatcaccggcggagcaaagtcacagctcagggaggccctccgcgttgtctg

SEQ ID NO: 716132 - DNA, 120 bp, Artificial Sequence
  ENSG00000197385_1 (sequence is synthesized)
gcggaggaggggagtggcaggtgatcctcacagtcactctaggaaagccagctgccatgacataaggatactcaggccaccaatggatagcccaggcaggaggcatgaaggtgtgccagc

SEQ ID NO: 716133 - DNA, 120 bp, Artificial Sequence
  ENSG00000197385_2 (sequence is synthesized)
cactgtgtcagtcaccttataagcagattttctgagacctgctaacagccatgtgagtgaccttggaagtaggttgtcaccagtcaagccttgagatgactgcagccatgacccacagct

SEQ ID NO: 716134 - DNA, 120 bp, Artificial Sequence
  ENSG00000197385_3 (sequence is synthesized)
tgactacaacccagagagacactgagccaggaacacccagctgaagtgcctccaaaccccgacccacagcgactgtgagataatcagtgtttgttgccttaagccacgaagtttgtgata

SEQ ID NO: 716135 - DNA, 120 bp, Artificial Sequence
  ENSG00000197385_4 (sequence is synthesized)
atttgtttctcggaaacagataactaatacagagcaggaagcagatcgcctcagtgaaggtcacactgcagcactattgatttctaaagactcatgttacgtgaggaagcagctcagaag

SEQ ID NO: 716136 - DNA, 120 bp, Artificial Sequence
  ENSG00000197385_5 (sequence is synthesized)
aggaaagaaaaggagccaggcatggctcttcctcagggacacttgacttttagggatgtggctatagaattctctttggaggagtggaaatgcctggaccctacgcagagggctttatac

SEQ ID NO: 716137 - DNA, 120 bp, Artificial Sequence
  ENSG00000197385_6 (sequence is synthesized)
agggccatgatgttggagaactacaggaacctgcattctgtggatatctcttccaaatgcatgatgaagaagttctcatcaacagcgcaaggcaatacagaagtggacacagggacatta

SEQ ID NO: 716138 - DNA, 120 bp, Artificial Sequence
  ENSG00000197385_7 (sequence is synthesized)
gaaagacatgaaagtcatcacattggagatttttgcttccagaaaattgggaaagatattcatgactttgagtttcaatggcaagaagacaaaagaaatagccatgaagcaactatgaca

SEQ ID NO: 716139 - DNA, 120 bp, Artificial Sequence
  ENSG00000197385_8 (sequence is synthesized)
caaatcaaaaagttgactggtagcaccgacagatatgatcgaaggcatcctggaaacaagcctatcaaagatcagcttggattaagctttcattcgcatcttcctgaactccacatattt

SEQ ID NO: 716140 - DNA, 120 bp, Artificial Sequence
  ENSG00000197385_9 (sequence is synthesized)
cagaccaaagggaaagttggtaatcaagttgagaagtctatcaacgatgcttcctcagttctaacgtcccaaagaatttcttctaggcccaaaatccatatttctaataactatgaaaat

SEQ ID NO: 716141 - DNA, 120 bp, Artificial Sequence
  ENSG00000197385_10 (sequence is synthesized)
aatttcttccattcatcattactcacactaaaacaggaagtacacataagagaaaaatctttccaatgtaatgagagtggcaaagcctttaattgtagctcactcttaaggaaacatcag

SEQ ID NO: 716142 - DNA, 120 bp, Artificial Sequence
  ENSG00000197385_11 (sequence is synthesized)
aggaaacatcagataatctatttaggagggaaacaatataaatgtgatgtatgtggcaaggtctttaatcagaagcgataccttgcatgccatcatagatgtcacactggtgagaaacct

SEQ ID NO: 716143 - DNA, 63 bp, Artificial Sequence
  ENSG00000197385_12 (sequence is synthesized)
gttttagtcgcaaatcaaatcttgaaagacataggagaattcatactggagagaaaccataca

SEQ ID NO: 716144 - DNA, 120 bp, Artificial Sequence
  ENSG00000197385_13 (sequence is synthesized)
aatgagtgtggcaaagcctttagtgggcagtcaacacttattcaccatcaagcaatccatggtatagggaaactttataaatgtaatgattgtcacaaagtcttcagtaatgctacaacc

SEQ ID NO: 716145 - DNA, 120 bp, Artificial Sequence
  ENSG00000197385_14 (sequence is synthesized)
attgtcacaaagtcttcagtaatgctacaaccattgcaaatcattggagaatccataatgaagagagatcttacaagtgtaataaatgtggcaaattttttagacgtcgttcatatctcg

SEQ ID NO: 716146 - DNA, 66 bp, Artificial Sequence
  ENSG00000197385_15 (sequence is synthesized)
tagttcattggcatcacaattcagcccttgtaattcataaggcaattcatactggagagaaacctt

SEQ ID NO: 716147 - DNA, 62 bp, Artificial Sequence
  ENSG00000197385_16 (sequence is synthesized)
taattcatgtcacaattcagcccttgtaattcataaggcaattcatactggagagaaacctt

SEQ ID NO: 716148 - DNA, 76 bp, Artificial Sequence
  ENSG00000197385_17 (sequence is synthesized)
gaaaccttacaaatgtgaagaatgtgacacagttttcagtcgcaaatcacaccatgaatgattttgacgaggcctt

SEQ ID NO: 716149 - DNA, 120 bp, Artificial Sequence
  ENSG00000197385_18 (sequence is synthesized)
gagagaaaccttacaaatgtgatgattttgacgaggccttcagtcaagcttcatcttatgcaaaacaaaggagaattcatatgggagagaaacatcacaagtgtgatgattgtggcaaag

SEQ ID NO: 716150 - DNA, 120 bp, Artificial Sequence
  ENSG00000197385_19 (sequence is synthesized)
cctttacttcacattcacatcgcattagacatcagagaatccataccggacagaaatcttacaaatgtcataagcgtggcaaggtcttcagttagaggtcactccttgcaaaacatcaga

SEQ ID NO: 716151 - DNA, 120 bp, Artificial Sequence
  ENSG00000197385_20 (sequence is synthesized)
aaattcattcctgagataattgttccaaatgcaatgagtatagcaaaccatcaagcattaattgacattagagtcaattcagcattgacttgagtttcagttgacttgacattgagttca

SEQ ID NO: 716152 - DNA, 120 bp, Artificial Sequence
  ENSG00000197385_21 (sequence is synthesized)
agcattaattgacattaaagtgtttacgttaagaggattgggctgggcagggtggcttatacctgtaatcccagcactgtgggaggtcaagacggatagatcacttgaggtcaggagttt

SEQ ID NO: 716153 - DNA, 120 bp, Artificial Sequence
  ENSG00000197385_22 (sequence is synthesized)
gagaccatcctggccaaaagacgtgagccacttttcctagcctgttttttgtttctgatagggatttttatgggtattgtgttgaatctaaatcacattgggttatataatcatttaaca

SEQ ID NO: 716154 - DNA, 120 bp, Artificial Sequence
  ENSG00000197385_23 (sequence is synthesized)
atattaatctttccaatccatcaatatgggtcatatctctatttatataagtttttaatcattttgatcaatgtttgtagatttcaaggtacaaacttctcacctttttacgtttattcc

SEQ ID NO: 716155 - DNA, 120 bp, Artificial Sequence
  ENSG00000197385_24 (sequence is synthesized)
taaatatttcttactgtaagttctctagcaaatggaagtgttttcttaattttcttttaacattgtttattgttaatgtatggaaatttaactaatttttggtactgatattgtattctg

SEQ ID NO: 716156 - DNA, 120 bp, Artificial Sequence
  ENSG00000197385_25 (sequence is synthesized)
caaatacactgtgtttattagcttcagtagtattttagttgactctgtgattttctacacagcagatcatgtcatctacaaacaaatacaattttacttctttctttctgaaaaaaaaaa

SEQ ID NO: 716157 - DNA, 120 bp, Artificial Sequence
  ENSG00000197385_26 (sequence is synthesized)
tgatcctcacagcctaattttactgaggaagaaacagaaactcaaagaggaggagttgattctgaaccaaggccttctgactccaagtccagtgttcttgctgcctgaacttcagctgtg

SEQ ID NO: 716158 - DNA, 120 bp, Artificial Sequence
  ENSG00000197386_0 (sequence is synthesized)
gctgccgggacgggtccaagatggacggccgctcaggttctgcttttacctgcggcccagagccccattcattgccccggtgctgagcggcgccgcgagtcggcccgaggcctccgggga

SEQ ID NO: 716159 - DNA, 120 bp, Artificial Sequence
  ENSG00000197386_1 (sequence is synthesized)
ccgaggcctccggggactgccgtgccgggcgggagaccgccatggcgaccctggaaaagctgatgaaggccttcgagtccctcaagtccttccagcagcagcagcagcagcagcagcagc

SEQ ID NO: 716160 - DNA, 84 bp, Artificial Sequence
  ENSG00000197386_2 (sequence is synthesized)
cgccaccgccgccgccgccgccgccgcctcctcagcttcctcagccgccgccgcaggcacagccgctgctgcctcagccgcagc

SEQ ID NO: 716161 - DNA, 120 bp, Artificial Sequence
  ENSG00000197386_3 (sequence is synthesized)
cccgccgccacccggcccggctgtggctgaggagccgctgcaccgaccaaagaaagaactttcagctaccaagaaagaccgtgtgaatcattgtctgacaatatgtgaaaacatagtggc

SEQ ID NO: 716162 - DNA, 120 bp, Artificial Sequence
  ENSG00000197386_4 (sequence is synthesized)
acagtctgtcagaaattctccagaatttcagaaacttctgggcatcgctatggaactttttctgctgtgcagtgatgacgcagagtcagatgtcaggatggtggctgacgaatgcctcaa

SEQ ID NO: 716163 - DNA, 120 bp, Artificial Sequence
  ENSG00000197386_5 (sequence is synthesized)
caaagttatcaaagctttgatggattctaatcttccaaggttacagctcgagctctataaggaaattaaaaagaatggtgcccctcggagtttgcgtgctgccctgtggaggtttgctga

SEQ ID NO: 716164 - DNA, 120 bp, Artificial Sequence
  ENSG00000197386_6 (sequence is synthesized)
gctggctcacctggttcggcctcagaaatgcaggccttacctggtgaaccttctgccgtgcctgactcgaacaagcaagagacccgaagaatcagtccaggagaccttggctgcagctgt

SEQ ID NO: 716165 - DNA, 120 bp, Artificial Sequence
  ENSG00000197386_7 (sequence is synthesized)
tcccaaaattatggcttcttttggcaattttgcaaatgacaatgaaattaaggttttgttaaaggccttcatagcgaacctgaagtcaagctcccccaccattcggcggacagcggctgg

SEQ ID NO: 716166 - DNA, 120 bp, Artificial Sequence
  ENSG00000197386_8 (sequence is synthesized)
atcagcagtgagcatctgccagcactcaagaaggacacaatatttctatagttggctactaaatgtgctcttaggcttactcgttcctgtcgaggatgaacactccactctgctgattct

SEQ ID NO: 716167 - DNA, 120 bp, Artificial Sequence
  ENSG00000197386_9 (sequence is synthesized)
tggcgtgctgctcaccctgaggtatttggtgcccttgctgcagcagcaggtcaaggacacaagcctgaaaggcagcttcggagtgacaaggaaagaaatggaagtctctccttctgcaga

SEQ ID NO: 716168 - DNA, 120 bp, Artificial Sequence
  ENSG00000197386_10 (sequence is synthesized)
gcagcttgtccaggtttatgaactgacgttacatcatacacagcaccaagaccacaatgttgtgaccggagccctggagctgttgcagcagctcttcagaacgcctccacccgagcttct

SEQ ID NO: 716169 - DNA, 120 bp, Artificial Sequence
  ENSG00000197386_11 (sequence is synthesized)
gcaaaccctgaccgcagtcgggggcattgggcagctcaccgctgctaaggaggagtctggtggccgaagccgtagtgggagtattgtggaacttatagctggagggggttcctcatgcag

SEQ ID NO: 716170 - DNA, 120 bp, Artificial Sequence
  ENSG00000197386_12 (sequence is synthesized)
ccctgtcctttcaagaaaacaaaaaggcaaagtgctcttaggagaagaagaagccttggaggatgactctgaatcgagatcggatgtcagcagctctgccttaacagcctcagtgaagga

SEQ ID NO: 716171 - DNA, 120 bp, Artificial Sequence
  ENSG00000197386_13 (sequence is synthesized)
tgagatcagtggagagctggctgcttcttcaggggtttccactccagggtcagcaggtcatgacatcatcacagaacagccacggtcacagcacacactgcaggcggactcagtggatct

SEQ ID NO: 716172 - DNA, 120 bp, Artificial Sequence
  ENSG00000197386_14 (sequence is synthesized)
ggccagctgtgacttgacaagctctgccactgatggggatgaggaggatatcttgagccacagctccagccaggtcagcgccgtcccatctgaccctgccatggacctgaatgatgggac

SEQ ID NO: 716173 - DNA, 120 bp, Artificial Sequence
  ENSG00000197386_15 (sequence is synthesized)
ccaggcctcgtcgcccatcagcgacagctcccagaccaccaccgaagggcctgattcagctgttaccccttcagacagttctgaaattgtgttagacggtaccgacaaccagtatttggg

SEQ ID NO: 716174 - DNA, 120 bp, Artificial Sequence
  ENSG00000197386_16 (sequence is synthesized)
cctgcagattggacagccccaggatgaagatgaggaagccacaggtattcttcctgatgaagcctcggaggccttcaggaactcttccatggcccttcaacaggcacatttattgaaaaa

SEQ ID NO: 716175 - DNA, 120 bp, Artificial Sequence
  ENSG00000197386_17 (sequence is synthesized)
catgagtcactgcaggcagccttctgacagcagtgttgataaatttgtgttgagagatgaagctactgaaccgggtgatcaagaaaacaagccttgccgcatcaaaggtgacattggaca

SEQ ID NO: 716176 - DNA, 120 bp, Artificial Sequence
  ENSG00000197386_18 (sequence is synthesized)
gtccactgatgatgactctgcacctcttgtccattgtgtccgccttttatctgcttcgtttttgctaacagggggaaaaaatgtgctggttccggacagggatgtgagggtcagcgtgaa

SEQ ID NO: 716177 - DNA, 120 bp, Artificial Sequence
  ENSG00000197386_19 (sequence is synthesized)
ggccctggccctcagctgtgtgggagcagctgtggccctccacccggaatctttcttcagcaaactctataaagttcctcttgacaccacggaataccctgaggaacagtatgtctcaga

SEQ ID NO: 716178 - DNA, 120 bp, Artificial Sequence
  ENSG00000197386_20 (sequence is synthesized)
catcttgaactacatcgatcatggagacccacaggttcgaggagccactgccattctctgtgggaccctcatctgctccatcctcagcaggtcccgcttccacgtgggagattggatggg

SEQ ID NO: 716179 - DNA, 120 bp, Artificial Sequence
  ENSG00000197386_21 (sequence is synthesized)
caccattagaaccctcacaggaaatacattttctttggcggattgcattcctttgctgcggaaaacactgaaggatgagtcttctgttacttgcaagttagcttgtacagctgtgaggaa

SEQ ID NO: 716180 - DNA, 120 bp, Artificial Sequence
  ENSG00000197386_22 (sequence is synthesized)
ctgtgtcatgagtctctgcagcagcagctacagtgagttaggactgcagctgatcatcgatgtgctgactctgaggaacagttcctattggctggtgaggacagagcttctggaaaccct

SEQ ID NO: 716181 - DNA, 120 bp, Artificial Sequence
  ENSG00000197386_23 (sequence is synthesized)
tgcagagattgacttcaggctggtgagctttttggaggcaaaagcagaaaacttacacagaggggctcatcattatacagggcttttaaaactgcaagaacgagtgctcaataatgttgt

SEQ ID NO: 716182 - DNA, 120 bp, Artificial Sequence
  ENSG00000197386_24 (sequence is synthesized)
catccatttgcttggagatgaagaccccagggtgcgacatgttgccgcagcatcactaattaggcttgtcccaaagctgttttataaatgtgaccaaggacaagctgatccagtagtggc

SEQ ID NO: 716183 - DNA, 120 bp, Artificial Sequence
  ENSG00000197386_25 (sequence is synthesized)
cgtggcaagagatcaaagcagtgtttacctgaaacttctcatgcatgagacgcagcctccatctcatttctccgtcagcacaataaccagaatatatagaggctataacctactaccaag

SEQ ID NO: 716184 - DNA, 120 bp, Artificial Sequence
  ENSG00000197386_26 (sequence is synthesized)
cataacagacgtcactatggaaaataacctttcaagagttattgcagcagtttctcatgaactaatcacatcaaccaccagagcactcacatttggatgctgtgaagctttgtgtcttct

SEQ ID NO: 716185 - DNA, 120 bp, Artificial Sequence
  ENSG00000197386_27 (sequence is synthesized)
ttccactgccttcccagtttgcatttggagtttaggttggcactgtggagtgcctccactgagtgcctcagatgagtctaggaagagctgtaccgttgggatggccacaatgattctgac

SEQ ID NO: 716186 - DNA, 120 bp, Artificial Sequence
  ENSG00000197386_28 (sequence is synthesized)
cctgctctcgtcagcttggttcccattggatctctcagcccatcaagatgctttgattttggccggaaacttgcttgcagccagtgctcccaaatctctgagaagttcatgggcctctga

SEQ ID NO: 716187 - DNA, 120 bp, Artificial Sequence
  ENSG00000197386_29 (sequence is synthesized)
agaagaagccaacccagcagccaccaagcaagaggaggtctggccagccctgggggaccgggccctggtgcccatggtggagcagctcttctctcacctgctgaaggtgattaacatttg

SEQ ID NO: 716188 - DNA, 120 bp, Artificial Sequence
  ENSG00000197386_30 (sequence is synthesized)
tgcccacgtcctggatgacgtggctcctggacccgcaataaaggcagccttgccttctctaacaaaccccccttctctaagtcccatccgacgaaaggggaaggagaaagaaccaggaga

SEQ ID NO: 716189 - DNA, 120 bp, Artificial Sequence
  ENSG00000197386_31 (sequence is synthesized)
acaagcatctgtaccgttgagtcccaagaaaggcagtgaggccagtgcagcttctagacaatctgatacctcaggtcctgttacaacaagtaaatcctcatcactggggagtttctatca

SEQ ID NO: 716190 - DNA, 120 bp, Artificial Sequence
  ENSG00000197386_32 (sequence is synthesized)
tcttccttcatacctcaaactgcatgatgtcctgaaagctacacacgctaactacaaggtcacgctggatcttcagaacagcacggaaaagtttggagggtttctccgctcagccttgga

SEQ ID NO: 716191 - DNA, 120 bp, Artificial Sequence
  ENSG00000197386_33 (sequence is synthesized)
tgttctttctcagatactagagctggccacactgcaggacattgggaagtgtgttgaagagatcctaggatacctgaaatcctgctttagtcgagaaccaatgatggcaactgtttgtgt

SEQ ID NO: 716192 - DNA, 120 bp, Artificial Sequence
  ENSG00000197386_34 (sequence is synthesized)
tcaacaattgttgaagactctctttggcacaaacttggcctcccagtttgatggcttatcttccaaccccagcaagtcacaaggccgagcacagcgccttggctcctccagtgtgaggcc

SEQ ID NO: 716193 - DNA, 120 bp, Artificial Sequence
  ENSG00000197386_35 (sequence is synthesized)
aggcttgtaccactactgcttcatggccccgtacacccacttcacccaggccctcgctgacgccagcctgaggaacatggtgcaggcggagcaggagaacgacacctcgggatggtttga

SEQ ID NO: 716194 - DNA, 120 bp, Artificial Sequence
  ENSG00000197386_36 (sequence is synthesized)
tgtcctccagaaagtgtctacccagttgaagacaaacctcacgagtgtcacaaagaaccgtgcagataagaatgctattcataatcacattcgtttgtttgaacctcttgttataaaagc

SEQ ID NO: 716195 - DNA, 120 bp, Artificial Sequence
  ENSG00000197386_37 (sequence is synthesized)
tttaaaacagtacacgactacaacatgtgtgcagttacagaagcaggttttagatttgctggcgcagctggttcagttacgggttaattactgtcttctggattcagatcaggtgtttat

SEQ ID NO: 716196 - DNA, 120 bp, Artificial Sequence
  ENSG00000197386_38 (sequence is synthesized)
tggctttgtattgaaacagtttgaatacattgaagtgggccagttcagggaatcagaggcaatcattccaaacatctttttcttcttggtattactatcttatgaacgctatcattcaaa

SEQ ID NO: 716197 - DNA, 120 bp, Artificial Sequence
  ENSG00000197386_39 (sequence is synthesized)
acagatcattggaattcctaaaatcattcagctctgtgatggcatcatggccagtggaaggaaggctgtgacacatgccataccggctctgcagcccatagtccacgacctctttgtatt

SEQ ID NO: 716198 - DNA, 120 bp, Artificial Sequence
  ENSG00000197386_40 (sequence is synthesized)
aagaggaacaaataaagctgatgcaggaaaagagcttgaaacccaaaaagaggtggtggtgtcaatgttactgagactcatccagtaccatcaggtgttggagatgttcattcttgtcct

SEQ ID NO: 716199 - DNA, 120 bp, Artificial Sequence
  ENSG00000197386_41 (sequence is synthesized)
gcagcagtgccacaaggagaatgaagacaagtggaagcgactgtctcgacagatagctgacatcatcctcccaatgttagccaaacagcagatgcacattgactctcatgaagcccttgg

SEQ ID NO: 716200 - DNA, 120 bp, Artificial Sequence
  ENSG00000197386_42 (sequence is synthesized)
agtgttaaatacattatttgagattttggccccttcctccctccgtccggtagacatgcttttacggagtatgttcgtcactccaaacacaatggcgtccgtgagcactgttcaactgtg

SEQ ID NO: 716201 - DNA, 120 bp, Artificial Sequence
  ENSG00000197386_43 (sequence is synthesized)
gatatcgggaattctggccattttgagggttctgatttcccagtcaactgaagatattgttctttctcgtattcaggagctctccttctctccgtatttaatctcctgtacagtaattaa

SEQ ID NO: 716202 - DNA, 120 bp, Artificial Sequence
  ENSG00000197386_44 (sequence is synthesized)
taggttaagagatggggacagtacttcaacgctagaagaacacagtgaagggaaacaaataaagaatttgccagaagaaacattttcaaggtttctattacaactggttggtattctttt

SEQ ID NO: 716203 - DNA, 120 bp, Artificial Sequence
  ENSG00000197386_45 (sequence is synthesized)
agaagacattgttacaaaacagctgaaggtggaaatgagtgagcagcaacatactttctattgccaggaactaggcacactgctaatgtgtctgatccacatcttcaagtctggaatgtt

SEQ ID NO: 716204 - DNA, 120 bp, Artificial Sequence
  ENSG00000197386_46 (sequence is synthesized)
ccggagaatcacagcagctgccactaggctgttccgcagtgatggctgtggcggcagtttctacaccctggacagcttgaacttgcgggctcgttccatgatcaccacccacccggccct

SEQ ID NO: 716205 - DNA, 120 bp, Artificial Sequence
  ENSG00000197386_47 (sequence is synthesized)
ggtgctgctctggtgtcagatactgctgcttgtcaaccacaccgactaccgctggtgggcagaagtgcagcagaccccgaaaagacacagtctgtccagcacaaagttacttagtcccca

SEQ ID NO: 716206 - DNA, 120 bp, Artificial Sequence
  ENSG00000197386_48 (sequence is synthesized)
gatgtctggagaagaggaggattctgacttggcagccaaacttggaatgtgcaatagagaaatagtacgaagaggggctctcattctcttctgtgattatgtctgtcagaacctccatga

SEQ ID NO: 716207 - DNA, 120 bp, Artificial Sequence
  ENSG00000197386_49 (sequence is synthesized)
ctccgagcacttaacgtggctcattgtaaatcacattcaagatctgatcagcctttcccacgagcctccagtacaggacttcatcagtgccgttcatcggaactctgctgccagcggcct

SEQ ID NO: 716208 - DNA, 120 bp, Artificial Sequence
  ENSG00000197386_50 (sequence is synthesized)
gttcatccaggcaattcagtctcgttgtgaaaacctttcaactccaaccatgctgaagaaaactcttcagtgcttggaggggatccatctcagccagtcgggagctgtgctcacgctgta

SEQ ID NO: 716209 - DNA, 120 bp, Artificial Sequence
  ENSG00000197386_51 (sequence is synthesized)
tgtggacaggcttctgtgcacccctttccgtgtgctggctcgcatggtcgacatccttgcttgtcgccgggtagaaatgcttctggctgcaaatttacagagcagcatggcccagttgcc

SEQ ID NO: 716210 - DNA, 120 bp, Artificial Sequence
  ENSG00000197386_52 (sequence is synthesized)
aatggaagaactcaacagaatccaggaataccttcagagcagcgggctcgctcagagacaccaaaggctctattccctgctggacaggtttcgtctctccaccatgcaagactcacttag

SEQ ID NO: 716211 - DNA, 120 bp, Artificial Sequence
  ENSG00000197386_53 (sequence is synthesized)
tccctctcctccagtctcttcccacccgctggacggggatgggcacgtgtcactggaaacagtgagtccggacaaagactggtacgttcatcttgtcaaatcccagtgttggaccaggtc

SEQ ID NO: 716212 - DNA, 120 bp, Artificial Sequence
  ENSG00000197386_54 (sequence is synthesized)
agattctgcactgctggaaggtgcagagctggtgaatcggattcctgctgaagatatgaatgccttcatgatgaactcggagttcaacctaagcctgctagctccatgcttaagcctagg

SEQ ID NO: 716213 - DNA, 120 bp, Artificial Sequence
  ENSG00000197386_55 (sequence is synthesized)
gatgagtgaaatttctggtggccagaagagtgccctttttgaagcagcccgtgaggtgactctggcccgtgtgagcggcaccgtgcagcagctccctgctgtccatcatgtcttccagcc

SEQ ID NO: 716214 - DNA, 120 bp, Artificial Sequence
  ENSG00000197386_56 (sequence is synthesized)
agttgaatgatctgtttggggatgctgcactgtatcagtccctgcccactctggcccgggccctggcacagtacctggtggtggtctccaaactgcccagtcatttgcaccttcctcctg

SEQ ID NO: 716215 - DNA, 120 bp, Artificial Sequence
  ENSG00000197386_57 (sequence is synthesized)
agaaagagaaggacattgtgaaattcgtggtggcaacccttgaggccctgtcctggcatttgatccatgagcagatcccgctgagtctggatctccaggcagggctggactgctgctgcc

SEQ ID NO: 716216 - DNA, 120 bp, Artificial Sequence
  ENSG00000197386_58 (sequence is synthesized)
tggccctgcagctgcctggcctctggagcgtggtctcctccacagagtttgtgacccacgcctgctccctcatctactgtgtgcacttcatcctggaggccgttgcagtgcagcctggag

SEQ ID NO: 716217 - DNA, 120 bp, Artificial Sequence
  ENSG00000197386_59 (sequence is synthesized)
agcagcttcttagtccagaaagaaggacaaataccccaaaagccatcagcgaggaggaggaggaagtagatccaaacacacagaatcctaagtatatcactgcagcctgtgagatggtgg

SEQ ID NO: 716218 - DNA, 120 bp, Artificial Sequence
  ENSG00000197386_60 (sequence is synthesized)
cagaaatggtggagtctctgcagtcggtgttggccttgggtcataaaaggaatagcggcgtgccggcgtttctcacgccattgctaaggaacatcatcatcagcctggcccgcctgcccc

SEQ ID NO: 716219 - DNA, 120 bp, Artificial Sequence
  ENSG00000197386_61 (sequence is synthesized)
ttgtcaacagctacacacgtgtgcccccactggtgtggaagcttggatggtcacccaaaccgggaggggattttggcacagcattccctgagatccccgtggagttcctccaggaaaagg

SEQ ID NO: 716220 - DNA, 120 bp, Artificial Sequence
  ENSG00000197386_62 (sequence is synthesized)
aagtctttaaggagttcatctaccgcatcaacacactaggctggaccagtcgtactcagtttgaagaaacttgggccaccctccttggtgtcctggtgacgcagcccctcgtgatggagc

SEQ ID NO: 716221 - DNA, 120 bp, Artificial Sequence
  ENSG00000197386_63 (sequence is synthesized)
aggaggagagcccaccagaagaagacacagagaggacccagatcaacgtcctggccgtgcaggccatcacctcactggtgctcagtgcaatgactgtgcctgtggccggcaacccagctg

SEQ ID NO: 716222 - DNA, 120 bp, Artificial Sequence
  ENSG00000197386_64 (sequence is synthesized)
taagctgcttggagcagcagccccggaacaagcctctgaaagctctcgacaccaggtttgggaggaagctgagcattatcagagggattgtggagcaagagattcaagcaatggtttcaa

SEQ ID NO: 716223 - DNA, 120 bp, Artificial Sequence
  ENSG00000197386_65 (sequence is synthesized)
agagagagaatattgccacccatcatttatatcaggcatgggatcctgtcccttctctgtctccggctactacaggtgccctcatcagccacgagaagctgctgctacagatcaaccccg

SEQ ID NO: 716224 - DNA, 120 bp, Artificial Sequence
  ENSG00000197386_66 (sequence is synthesized)
agcgggagctggggagcatgagctacaaactcggccaggtgtccatacactccgtgtggctggggaacagcatcacacccctgagggaggaggaatgggacgaggaagaggaggaggagg

SEQ ID NO: 716225 - DNA, 120 bp, Artificial Sequence
  ENSG00000197386_67 (sequence is synthesized)
ccgacgcccctgcaccttcgtcaccacccacgtctccagtcaactccaggaaacaccgggctggagttgacatccactcctgttcgcagtttttgcttgagttgtacagccgctggatcc

SEQ ID NO: 716226 - DNA, 120 bp, Artificial Sequence
  ENSG00000197386_68 (sequence is synthesized)
tgccgtccagctcagccaggaggaccccggccatcctgatcagtgaggtggtcagatcccttctagtggtctcagacttgttcaccgagcgcaaccagtttgagctgatgtatgtgacgc

SEQ ID NO: 716227 - DNA, 120 bp, Artificial Sequence
  ENSG00000197386_69 (sequence is synthesized)
tgacagaactgcgaagggtgcacccttcagaagacgagatcctcgctcagtacctggtgcctgccacctgcaaggcagctgccgtccttgggatggacaaggccgtggcggagcctgtca

SEQ ID NO: 716228 - DNA, 120 bp, Artificial Sequence
  ENSG00000197386_70 (sequence is synthesized)
gccgcctgctggagagcacgctcaggagcagccacctgcccagcagggttggagccctgcacggcgtcctctatgtgctggagtgcgacctgctggacgacactgccaagcagctcatcc

SEQ ID NO: 716229 - DNA, 120 bp, Artificial Sequence
  ENSG00000197386_71 (sequence is synthesized)
cggtcatcagcgactatctcctctccaacctgaaagggatcgcccactgcgtgaacattcacagccagcagcacgtactggtcatgtgtgccactgcgttttacctcattgagaactatc

SEQ ID NO: 716230 - DNA, 120 bp, Artificial Sequence
  ENSG00000197386_72 (sequence is synthesized)
ctctggacgtagggccggaattttcagcatcaataatacagatgtgtggggtgatgctgtctggaagtgaggagtccaccccctccatcatttaccactgtgccctcagaggcctggagc

SEQ ID NO: 716231 - DNA, 120 bp, Artificial Sequence
  ENSG00000197386_73 (sequence is synthesized)
gcctcctgctctctgagcagctctcccgcctggatgcagaatcgctggtcaagctgagtgtggacagagtgaacgtgcacagcccgcaccgggccatggcggctctgggcctgatgctca

SEQ ID NO: 716232 - DNA, 120 bp, Artificial Sequence
  ENSG00000197386_74 (sequence is synthesized)
cctgcatgtacacaggaaaggagaaagtcagtccgggtagaacttcagaccctaatcctgcagcccccgacagcgagtcagtgattgttgctatggagcgggtatctgttctttttgata

SEQ ID NO: 716233 - DNA, 120 bp, Artificial Sequence
  ENSG00000197386_75 (sequence is synthesized)
ggatcaggaaaggctttccttgtgaagccagagtggtggccaggatcctgccccagtttctagacgacttcttcccaccccaggacatcatgaacaaagtcatcggagagtttctgtcca

SEQ ID NO: 716234 - DNA, 120 bp, Artificial Sequence
  ENSG00000197386_76 (sequence is synthesized)
accagcagccatacccccagttcatggccaccgtggtgtataaggtgtttcagactctgcacagcaccgggcagtcgtccatggtccgggactgggtcatgctgtccctctccaacttca

SEQ ID NO: 716235 - DNA, 120 bp, Artificial Sequence
  ENSG00000197386_77 (sequence is synthesized)
cgcagagggccccggtcgccatggccacgtggagcctctcctgcttctttgtcagcgcgtccaccagcccgtgggtcgcggcgatcctcccacatgtcatcagcaggatgggcaagctgg

SEQ ID NO: 716236 - DNA, 120 bp, Artificial Sequence
  ENSG00000197386_78 (sequence is synthesized)
agcaggtggacgtgaaccttttctgcctggtcgccacagacttctacagacaccagatagaggaggagctcgaccgcagggccttccagtctgtgcttgaggtggttgcagccccaggaa

SEQ ID NO: 716237 - DNA, 120 bp, Artificial Sequence
  ENSG00000197386_79 (sequence is synthesized)
gcccatatcaccggctgctgacttgtttacgaaatgtccacaaggtcaccacctgctgagcgccatggtgggagagactgtgaggcggcagctggggccggagcctttggaagtctgcgc

SEQ ID NO: 716238 - DNA, 120 bp, Artificial Sequence
  ENSG00000197386_80 (sequence is synthesized)
ccttgtgccctgcctccaccgagccagcttggtccctatgggcttccgcacatgccgcgggcggccaggcaacgtgcgtgtctctgccatgtggcagaagtgctctttgtggcagtggcc

SEQ ID NO: 716239 - DNA, 120 bp, Artificial Sequence
  ENSG00000197386_81 (sequence is synthesized)
aggcagggagtgtctgcagtcctggtggggctgagcctgaggccttccagaaagcaggagcagctgtgctgcaccccatgtgggtgaccaggtcctttctcctgatagtcacctgctggt

SEQ ID NO: 716240 - DNA, 120 bp, Artificial Sequence
  ENSG00000197386_82 (sequence is synthesized)
tgttgccaggttgcagctgctcttgcatctgggccagaagtcctccctcctgcaggctggctgttggcccctctgctgtcctgcagtagaaggtgccgtgagcaggctttgggaacactg

SEQ ID NO: 716241 - DNA, 120 bp, Artificial Sequence
  ENSG00000197386_83 (sequence is synthesized)
gcctgggtctccctggtggggtgtgcatgccacgccccgtgtctggatgcacagatgccatggcctgtgctgggccagtggctgggggtgctagacacccggcaccattctcccttctct

SEQ ID NO: 716242 - DNA, 120 bp, Artificial Sequence
  ENSG00000197386_84 (sequence is synthesized)
cttttcttctcaggatttaaaatttaattatatcagtaaagagattaattttaacgtaactctttctatgcccgtgtaaagtatgtgaatcgcaaggcctgtgctgcatgcgacagcgtc

SEQ ID NO: 716243 - DNA, 120 bp, Artificial Sequence
  ENSG00000197386_85 (sequence is synthesized)
cggggtggtggacagggcccccggccacgctccctctcctgtagccactggcatagccctcctgagcacccgctgacatttccgttgtacatgttcctgtttatgcattcacaaggtgac

SEQ ID NO: 716244 - DNA, 120 bp, Artificial Sequence
  ENSG00000197386_86 (sequence is synthesized)
tgggatgtagagaggcgttagtgggcaggtggccacagcaggactgaggacaggcccccattatcctaggggtgcgctcacctgcagcccctcctcctcgggcacagacgactgtcgttc

SEQ ID NO: 716245 - DNA, 120 bp, Artificial Sequence
  ENSG00000197386_87 (sequence is synthesized)
tccacccaccagtcagggacagcagcctccctgtcactcagctgagaaggccagccctccctggctgtgagcagcctccactgtgtccagagacatgggcctcccactcctgttccttgc

SEQ ID NO: 716246 - DNA, 120 bp, Artificial Sequence
  ENSG00000197386_88 (sequence is synthesized)
tagccctggggtggcgtctgcctaggagctggctggcaggtgttgggacctgctgctccatggatgcatgccctaagagtgtcactgagctgtgttttgtctgagcctctctcggtcaac

SEQ ID NO: 716247 - DNA, 120 bp, Artificial Sequence
  ENSG00000197386_89 (sequence is synthesized)
agcaaagcttggtgtcttggcactgttagtgacagagcccagcatcccttctgcccccgttccagctgacatcttgcacggtgaccccttttagtcaggagagtgcagatctgtgctcat

SEQ ID NO: 716248 - DNA, 120 bp, Artificial Sequence
  ENSG00000197386_90 (sequence is synthesized)
cggagactgccccacggccctgtcagagccgccactcctatccccaggccaggtccctggaccagcctcctgtttgcaggcccagaggagccaagtcattaaaatggaagtggattctgg

SEQ ID NO: 716249 - DNA, 120 bp, Artificial Sequence
  ENSG00000197386_91 (sequence is synthesized)
atggccgggctgctgctgatgtaggagctggatttgggagctctgcttgccgactggctgtgagacgaggcaggggctctgcttcctcagccctagaggcgagccaggcaaggttggcga

SEQ ID NO: 716250 - DNA, 120 bp, Artificial Sequence
  ENSG00000197386_92 (sequence is synthesized)
ctgtcatgtggcttggtttggtcatgcccgtcgatgttttgggtattgaatgtggtaagtggaggaaatgttggaactctgtgcaggtgctgccttgagacccccaagcttccacctgtc

SEQ ID NO: 716251 - DNA, 120 bp, Artificial Sequence
  ENSG00000197386_93 (sequence is synthesized)
cctctcctatgtggcagctggggagcagctgagatgtggacttgtatgctgcccacatacgtgagggggagctgaaagggagcccctcctctgagcagcctctgccaggcctgtatgagg

SEQ ID NO: 716252 - DNA, 120 bp, Artificial Sequence
  ENSG00000197386_94 (sequence is synthesized)
cttttcccaccagctcccaacagaggcctcccccagccaggaccacctcgtcctcgtggcggggcagcaggagcggtagaaaggggtccgatgtttgaggaggcccttaagggaagctac

SEQ ID NO: 716253 - DNA, 120 bp, Artificial Sequence
  ENSG00000197386_95 (sequence is synthesized)
tgaattataacacgtaagaaaatcaccattccgtattggttgggggctcctgtttctcatcctagctttttcctggaaagcccgctagaaggtttgggaacgaggggaaagttctcagaa

SEQ ID NO: 716254 - DNA, 120 bp, Artificial Sequence
  ENSG00000197386_96 (sequence is synthesized)
ctgttggctgctccccacccgcctcccgcctcccccgcaggttatgtcagcagctctgagacagcagtatcacaggccagatgttgttcctggctagatgtttacatttgtaagaaataa

SEQ ID NO: 716255 - DNA, 120 bp, Artificial Sequence
  ENSG00000197386_97 (sequence is synthesized)
cactgtgaatgtaaaacagagccattcccttggaatgcatatcgctgggctcaacatagagtttgtcttcctcttgtttacgacgtgatctaaaccagtccttagcaaggggctcagaac

SEQ ID NO: 716256 - DNA, 120 bp, Artificial Sequence
  ENSG00000197386_98 (sequence is synthesized)
accccgctctggcagtaggtgtcccccacccccaaagacctgcctgtgtgctccggagatgaatatgagctcattagtaaaaatgacttcacccacgcatatacataaagtatccatgca

SEQ ID NO: 716257 - DNA, 120 bp, Artificial Sequence
  ENSG00000197386_99 (sequence is synthesized)
tgtgcatatagacacatctataattttacacacacacctctcaagacggagatgcatggcctctaagagtgcccgtgtcggttcttcctggaagttgactttccttagacccgccaggtc

SEQ ID NO: 716258 - DNA, 120 bp, Artificial Sequence
  ENSG00000197386_100 (sequence is synthesized)
aagttagccgcgtgacggacatccaggcgtgggacgtggtcagggcagggctcattcattgcccactaggatcccactggcgaagatggtctccatatcagctctctgcagaagggagga

SEQ ID NO: 716259 - DNA, 120 bp, Artificial Sequence
  ENSG00000197386_101 (sequence is synthesized)
agactttatcatgttcctaaaaatctgtggcaagcacccatcgtattatccaaattttgttgcaaatgtgattaatttggttgtcaagttttgggggtgggctgtggggagattgctttt

SEQ ID NO: 716260 - DNA, 120 bp, Artificial Sequence
  ENSG00000197386_102 (sequence is synthesized)
gttttcctgctggtaatatcgggaaagattttaatgaaaccagggtagaattgtttggcaatgcactgaagcgtgtttctttcccaaaatgtgcctcccttccgctgcgggcccagctga

SEQ ID NO: 716261 - DNA, 120 bp, Artificial Sequence
  ENSG00000197386_103 (sequence is synthesized)
gtctatgtaggtgatgtttccagctgccaagtgctctttgttactgtccaccctcatttctgccagcgcatgtgtcctttcaaggggaaaatgtgaagctgaaccccctccagacaccca

SEQ ID NO: 716262 - DNA, 120 bp, Artificial Sequence
  ENSG00000197386_104 (sequence is synthesized)
gaatgtagcatctgagaaggccctgtgccctaaaggacacccctcgcccccatcttcatggagggggtcatttcagagccctcggagccaatgaacagctcctcctcttggagctgagat

SEQ ID NO: 716263 - DNA, 120 bp, Artificial Sequence
  ENSG00000197386_105 (sequence is synthesized)
gagccccacgtggagctcgggacggatagtagacagcaataactcggtgtgtggccgcctggcaggtggaacttcctcccgttgcggggtggagtgaggttagttctgtgtgtctggtgg

SEQ ID NO: 716264 - DNA, 120 bp, Artificial Sequence
  ENSG00000197386_106 (sequence is synthesized)
gtggagtcaggcttctcttgctacctgtgagcatccttcccagcagacatcctcatcgggctttgtccctcccccgcttcctccctctgcggggaggacccgggaccacagctgctggcc

SEQ ID NO: 716265 - DNA, 120 bp, Artificial Sequence
  ENSG00000197386_107 (sequence is synthesized)
agggtagacttggagctgtcctccagaggggtcacgtgtaggagtgagaagaaggaagatcttgagagctgctgagggaccttggagagctcaggatggctcagacgaggacactcgctt

SEQ ID NO: 716266 - DNA, 120 bp, Artificial Sequence
  ENSG00000197386_108 (sequence is synthesized)
gccgggcctgggcctcctgggaaggagggagctgctcagaatgccgcatgacaactgaaggcaacctggaaggttcaggggccgctcttcccccatgtgcctgtcacgctctggtgcagt

SEQ ID NO: 716267 - DNA, 120 bp, Artificial Sequence
  ENSG00000197386_109 (sequence is synthesized)
caaaggaacgccttcccctcagttgtttctaagagcagagtctcccgctgcaatctgggtggtaactgccagccttggaggatcgtggccaacgtggacctgcctacggagggtgggctc

SEQ ID NO: 716268 - DNA, 120 bp, Artificial Sequence
  ENSG00000197386_110 (sequence is synthesized)
tgacccaagtggggcctccttgtccaggtctcactgctttgcaccgtggtcagagggactgtcagctgagcttgagctcccctggagccagcagggctgtgatgggcgagtcccggagcc

SEQ ID NO: 716269 - DNA, 120 bp, Artificial Sequence
  ENSG00000197386_111 (sequence is synthesized)
ccacccagacctgaatgcttctgagagcaaagggaaggactgacgagagatgtatatttaattttttaactgctgcaaacattgtacatccaaattaaaggaaaaaaatggaaaccatca

SEQ ID NO: 716270 - DNA, 120 bp, Artificial Sequence
  ENSG00000197386_112 (sequence is synthesized)
taatggagagcttgacctcatctgataccttcactgaaggaaacaacttagtgtcttttgtgttgaacactgaggtaaaaaattggaatagttgattatatgaactctgctaaaattgag

SEQ ID NO: 716271 - DNA, 120 bp, Artificial Sequence
  ENSG00000197386_113 (sequence is synthesized)
tgcattttacattttttaaggccttgttgggccctggttaaataattatttttaaaaatccttaaggagcctattataaacagatctgtggtcttaatgaaatgtgattaatactgtgca

SEQ ID NO: 716272 - DNA, 120 bp, Artificial Sequence
  ENSG00000197386_114 (sequence is synthesized)
ttattttaagaacttttgacttttcaaaaaacttttacaacatttcccatttgatagcggcataggtttaagcacttctcatctctaagttagtggacaaaaaaccctcatggatagtct

SEQ ID NO: 716273 - DNA, 120 bp, Artificial Sequence
  ENSG00000197386_115 (sequence is synthesized)
aataatgtttgctacaagtccatgttgagttttatactccattttattttcagttttaaaaactgtggttaaatatgtgtaacataaaatttatgttcttaaccattttttgcgtataca

SEQ ID NO: 716274 - DNA, 120 bp, Artificial Sequence
  ENSG00000197386_116 (sequence is synthesized)
gttcgctggtattaaatacatttaaataatgtcatggaatcattgctaccacccatctctgtaaccttttgatcatgtaacactgaagctctgttcccattgaactctattcctcctttc

SEQ ID NO: 716275 - DNA, 120 bp, Artificial Sequence
  ENSG00000197386_117 (sequence is synthesized)
ccgccaagtccctggcaaccacgattcttctttctgtcttctgaatttgactactttgggttctcatatactttaggagtcacacagtatttgttttacttagcataatgtccccaaagc

SEQ ID NO: 716276 - DNA, 120 bp, Artificial Sequence
  ENSG00000197386_118 (sequence is synthesized)
tcatgcatgttgtagcctatgttagaacttcctaatgtttcaggccaaatactattccattgtatggataggccacattttgcttttccattcctctgtccatggacacttgtattgctt

SEQ ID NO: 716277 - DNA, 120 bp, Artificial Sequence
  ENSG00000197386_119 (sequence is synthesized)
catgttttagccattgtgaatcatgctgttatgaacgtgggtgtacagatagctcctggagactctgctttccatttttttggctaaatacccagaaatggagttgcttttacattccaa

SEQ ID NO: 716278 - DNA, 120 bp, Artificial Sequence
  ENSG00000197386_120 (sequence is synthesized)
ttttaatttaaaacattcatatcattgagtgttttacttaatagtatagtagttaacaaacttaataaaatagtattttggtaataatttgctggtagtccattgttcagtttttttagg

SEQ ID NO: 716279 - DNA, 120 bp, Artificial Sequence
  ENSG00000197386_121 (sequence is synthesized)
taaattacacaggacatttcaagtggacatgaaacatcttgtgatgtggaatcatgccccaagctgatggctaaacatatgaaataccataccctaaatttagtagatttagtctttgca

SEQ ID NO: 716280 - DNA, 120 bp, Artificial Sequence
  ENSG00000197386_122 (sequence is synthesized)
atttaggagataacctgttatattgttaggtttttgtcgaaaagctttgtcctcatatttccaacttgctgtaaaatttgtttgtgaagacaaatatttttgtatgggttttttcttttt

SEQ ID NO: 716281 - DNA, 120 bp, Artificial Sequence
  ENSG00000197386_123 (sequence is synthesized)
catattaaaaagaaatgtccacattggaatttttttggagtttttagagctaatagagcttttcataatgtagtgggaatgagtgatcagtaagctcttagcagtttccatgcgtgcatt

SEQ ID NO: 716282 - DNA, 120 bp, Artificial Sequence
  ENSG00000197386_124 (sequence is synthesized)
tctgtgccttgaaataaatgacagatgagtacatttgtgttctgtgtgtaaaatgtgctctttcctcattgcacttccatgttggagggcttgtctcttggtgatcacacttcaaaattc

SEQ ID NO: 716283 - DNA, 120 bp, Artificial Sequence
  ENSG00000197386_125 (sequence is synthesized)
gatactgttttctgagttctgaatagctgatgaaaatgaccaattgaggaataatcatactttttcttgatctaaatcttatacttttgagttatcttagcataaatgtataattgtatt

SEQ ID NO: 716284 - DNA, 120 bp, Artificial Sequence
  ENSG00000197386_126 (sequence is synthesized)
ggaataatacctggtcttgcttcacttctgagttgggtaaagaagtctgtatcagtgtaattttctaatccgtcctgcattatctatggctcttggttcatacctgtcttgaagttctgt

SEQ ID NO: 716285 - DNA, 120 bp, Artificial Sequence
  ENSG00000197386_127 (sequence is synthesized)
catgttctgtctcttgtcctcagtagagatgctacagcagtggctcgcctcaggcagggcagggcagtggggtggctgtcctgggggcaggcagtaggggcacgctgacgtcagggaagt

SEQ ID NO: 716286 - DNA, 120 bp, Artificial Sequence
  ENSG00000197386_128 (sequence is synthesized)
tgaaacccaagagaagccagtaaaagtgagtctcagattgtcaccatgtgctggcagttttacacgctgtcagtaataaaagtcttctccctgcagggcagcctgcctccaataaatacg

SEQ ID NO: 716287 - DNA, 120 bp, Artificial Sequence
  ENSG00000197386_129 (sequence is synthesized)
tgtagtatcaaatcctgtcttccctcataaattgtttggaagctccccaaggacagtgatgaggcactcgtaagtgcttgctgcctagatgggtccctctccacctttgctagattctga

SEQ ID NO: 716288 - DNA, 120 bp, Artificial Sequence
  ENSG00000197386_130 (sequence is synthesized)
gcattcactgagttagagctgcttctgcaaatgtgctgcttctgctaagtggctgtgacttcatgcagccttcacttggtttgtcatcagtggagatgccctgtgttgtcgaaggagata

SEQ ID NO: 716289 - DNA, 120 bp, Artificial Sequence
  ENSG00000197386_131 (sequence is synthesized)
agcccagtaagcctgctgggcaccttttggtttgcaggttcagcaggcagcccatggctttccctgtgtcgcattgaagcagctggctaaaattgatgatacattaaattcctgtgacag

SEQ ID NO: 716290 - DNA, 120 bp, Artificial Sequence
  ENSG00000197386_132 (sequence is synthesized)
atgatcagcttgtatttgtgtaatggtgtacagttcacaaagcttaaaaaaatgctacctgccatttcatcctcagtgaggaaggtgatacacagagagaccaagtgactgtgtccacgg

SEQ ID NO: 716291 - DNA, 120 bp, Artificial Sequence
  ENSG00000197386_133 (sequence is synthesized)
cgacggcgctctgcatttcactttagcggttaatgtactctacctatatttttactttatatttaccatatatcttttcatgtatacttggcgtaagtgctttatagtagtcacctaatt

SEQ ID NO: 716292 - DNA, 120 bp, Artificial Sequence
  ENSG00000197386_134 (sequence is synthesized)
tgggatgctgcgtgaacattcacagccagcagcacgtactggtcatgtgtgccactgcgttttacctcattgagaactatcctctggacgtagggccggaattttcagcatcaataatac

SEQ ID NO: 716293 - DNA, 120 bp, Artificial Sequence
  ENSG00000197386_135 (sequence is synthesized)
cgaaagagcaagcaggaaatactttgtaaaagaataaaaacgaaaaatgttagcgaacatcttctaatagtctgctgtattcagagaactctaggagatatatatggttgatgcaaagat

SEQ ID NO: 716294 - DNA, 120 bp, Artificial Sequence
  ENSG00000197386_136 (sequence is synthesized)
gatttaaggcatagcccggccttccaagaagtgtgtggccaatggtttgatgtcctccagaaagtgtctacccagttgaagacaaacctcacgagtgtcacaaagaaccgtgcagataag

SEQ ID NO: 716295 - DNA, 120 bp, Artificial Sequence
  ENSG00000197386_137 (sequence is synthesized)
actgtgtatggggattccaggagctctggtcctcgctagcacttggaattgctgatgcttttactcttagccttcctgatgggtgttttctggaatcacattatgattttaatttccatt

SEQ ID NO: 716296 - DNA, 120 bp, Artificial Sequence
  ENSG00000197386_138 (sequence is synthesized)
ttggaactgtcgtggatactttattgacccgtgcagatggaaggaagtgccatgtggtaacgctcactgttaactgtgttactttgaaccaggtttgggctttctggggcctgggtagat

SEQ ID NO: 716297 - DNA, 120 bp, Artificial Sequence
  ENSG00000197386_139 (sequence is synthesized)
agtaatactagttacactctattgattatgggcctgccctgtgctaagcagtctgcattccatcttccttgccaaaacttataatacaaatttcatctttattttataaataggggagtt

SEQ ID NO: 716298 - DNA, 76 bp, Artificial Sequence
  ENSG00000197386_140 (sequence is synthesized)
ggggagtaaggatcgcttcagcccaggagtttgagacaacctggccaagtgagaccctgtctctacaaaaaaaaaa

SEQ ID NO: 716299 - DNA, 120 bp, Artificial Sequence
  ENSG00000197386_141 (sequence is synthesized)
tggcaacccttgaggtaagaggcagctcgggagctcagtgttgctgtggggagggggcatggggctgacactgaagagggtaaagcagttttatttgaaaagcaagatctctgaccagtc

SEQ ID NO: 716300 - DNA, 120 bp, Artificial Sequence
  ENSG00000197386_142 (sequence is synthesized)
cagtcacttttccatctcagcctggcagtaagtcttgtcaccgtcaagttattgtagccatccttcaccctcacctcgccactcctcatggtggcctgtgaggtcagccaggtccccttc

SEQ ID NO: 716301 - DNA, 120 bp, Artificial Sequence
  ENSG00000197386_143 (sequence is synthesized)
tcatctgcacctaccatgttaggtggatcctaattttagagacatgaaaaataatcatctggaagtactttatgtcttaagttggcctggacatgtcagccaaggaatacttacttggtt

SEQ ID NO: 716302 - DNA, 120 bp, Artificial Sequence
  ENSG00000197386_144 (sequence is synthesized)
gtggaccggcactgaagcccgcggaggcacccgtgcgtgtgccagggcatgaagatttcccagggggcgacgttggagctgggcggggagcgaacaggagggacagggagggctgaggcc

SEQ ID NO: 716303 - DNA, 120 bp, Artificial Sequence
  ENSG00000197386_145 (sequence is synthesized)
ccagagctgaccctgctgagggccctcgctggcggccttgaagctgcgcccagatccttagagaagggctgcctggagcctgcagccgggatctctgtgctgcctgctgcgtgagaagcc

SEQ ID NO: 716304 - DNA, 120 bp, Artificial Sequence
  ENSG00000197386_146 (sequence is synthesized)
cacaagagcagcaggagcgaccaggcttccaggcggacgtttcccttgcatcggggtgtggggaaaatcagcttccgcaggtgcccaccgccggctccagcaggggcactggggcccgtc

SEQ ID NO: 716305 - DNA, 120 bp, Artificial Sequence
  ENSG00000197386_147 (sequence is synthesized)
ctgggaggaaaacaccagcggggatgtcaccatgagaaagaaagaactttcagctaccaagaaagaccgtgtgaatcattgtctgacaatatgtgaaaacatagtggcacagtctgtcag

SEQ ID NO: 716306 - DNA, 120 bp, Artificial Sequence
  ENSG00000197386_148 (sequence is synthesized)
agcatcacacccctgagggaggaggaatgggacgaggaagaggaggaggaggccgacgcccctgcaccttcgtcaccacccacgtctccagtcaactccaggttttccaatggccttttt

SEQ ID NO: 716307 - DNA, 120 bp, Artificial Sequence
  ENSG00000197386_149 (sequence is synthesized)
ctgcacacggggagtgggcttcccttctcttttccttgcaggatcataccagtgggccagttttgacttggtcgggaggaggcatgaacacctgagactgtgcagcgattctttgacaca

SEQ ID NO: 716308 - DNA, 120 bp, Artificial Sequence
  ENSG00000197386_150 (sequence is synthesized)
gaagccgtagtgggagtattgtggaacttatagctggagggggttcctcatgcagccctgtcctttcaagaaaacaaaaaggtgattatttcagaaatcagagtcttgtgttgaatctta

SEQ ID NO: 716309 - DNA, 120 bp, Artificial Sequence
  ENSG00000197386_151 (sequence is synthesized)
ctgattttcttgtatttctgtaatgtaatgtatcttgtatttcttgtaatactgtattggactctgtgtatatctcttctcagatgagtgattatatgtgtgaatgttgctggaatctga

SEQ ID NO: 716310 - DNA, 120 bp, Artificial Sequence
  ENSG00000197386_152 (sequence is synthesized)
gaatagttttgtagggtggcttttaaaaattactttcatatcagaattgctttgtcataaattttgaacgcatcataaatttctaatgttcggggtcagcagactttttttgtaaaggga

SEQ ID NO: 716311 - DNA, 120 bp, Artificial Sequence
  ENSG00000197386_153 (sequence is synthesized)
cagagtgtaaacatcttagctttatgggccatatggtctcttttgcaacattcagctctgccctgtgacaggaatgcagttgtaaagacatgagctactggccagctatgttccagtaga

SEQ ID NO: 716312 - DNA, 120 bp, Artificial Sequence
  ENSG00000197386_154 (sequence is synthesized)
actttacttacagaaacagacaggctgtagtttgccaatacctgccttagggaatgtgttgttatattttgtgagttaccttctcagtaaattttatttagtattagtcaggaatattat

SEQ ID NO: 716313 - DNA, 120 bp, Artificial Sequence
  ENSG00000197386_155 (sequence is synthesized)
gcaagcaggaaatactttgtaaaagaataaaaacgaaaaatatggtttgatgtcctccagaaagtgtctacccagttgaagacaaacctcacgagtgtcacaaagaaccgtgcagataag

SEQ ID NO: 716314 - DNA, 120 bp, Artificial Sequence
  ENSG00000197386_156 (sequence is synthesized)
gtggaggttaagggcgctgaaactgcacaagctgagagctcacagcagtgcgtggtgcctcttcagctggggtgctcacccgcggggagacgtggctttgtgcgcttggcgaaccccacg

SEQ ID NO: 716315 - DNA, 120 bp, Artificial Sequence
  ENSG00000197386_157 (sequence is synthesized)
tcgcaggatgggccggcccggcgctggctgcggcttccgcagggcagggcagcacttgacatggtgagggctggttcagggaggagctgacggggacaccagccgggtgccttcacctcc

SEQ ID NO: 716316 - DNA, 120 bp, Artificial Sequence
  ENSG00000197386_158 (sequence is synthesized)
ccccaggtcaaacacctcccctctgcggcctgtgcttcaccgccttgacagtgagaaaggtctcccttcggctcattctcgaagtctcaaacttcacttctcctgtgcgctgattctgaa

SEQ ID NO: 716317 - DNA, 120 bp, Artificial Sequence
  ENSG00000197386_159 (sequence is synthesized)
ttcagcccccgtccaaggtcctggcccctttctcttctgcttggcgtgttgttcatcaccactgtgcactgctgaggatgaaagaattccaggccaggctggaatgacaactgcacacag

SEQ ID NO: 716318 - DNA, 120 bp, Artificial Sequence
  ENSG00000197386_160 (sequence is synthesized)
tcatctgggccccctccttccagctcccatcaccccaggatgtggcttttatgcagatgatccaaaatggctgctcaagtcccagccaacacatcccattccagggagcaggaaaaaggc

SEQ ID NO: 716319 - DNA, 120 bp, Artificial Sequence
  ENSG00000197386_161 (sequence is synthesized)
aggaggctctggagaccaggaccctgcccgccacggcctgtgtcccaggcgtgagggggtgccccacagacctctgctgagctgctgctgaatgacgccccttgggggtcctgccggaag

SEQ ID NO: 716320 - DNA, 120 bp, Artificial Sequence
  ENSG00000197403_0 (sequence is synthesized)
agggacatgaatggtgagcaatggacacagggaactggagccaggtagcagaattcatcatcttgggcttcccccatctccagggtgtccagatttatctcttcctcttgttgcttctca

SEQ ID NO: 716321 - DNA, 120 bp, Artificial Sequence
  ENSG00000197403_1 (sequence is synthesized)
tttacctcatgactgtgttgggaaacctgctgatattcctggtggtctgcctggactcccggcttcacacacccatgtaccactttgtcagcattctctccttctcagagcttggctata

SEQ ID NO: 716322 - DNA, 120 bp, Artificial Sequence
  ENSG00000197403_2 (sequence is synthesized)
cagctgccaccatccctaagatgctggcaaacttgctcagtgagaaaaagaccatttcattctctgggtgtctcctgcagatctatttctttcactcccttggagcgactgagtgctatc

SEQ ID NO: 716323 - DNA, 120 bp, Artificial Sequence
  ENSG00000197403_3 (sequence is synthesized)
tcctgacagctatggcctacgataggtatttagccatctgccggcccctccactacccaaccctcatgaccccaacactttgtgcagagattgccattggctgttggttgggaggcttgg

SEQ ID NO: 716324 - DNA, 120 bp, Artificial Sequence
  ENSG00000197403_4 (sequence is synthesized)
cgtcttttgtgacttccctcctgtgctgagtttggcttgcactgatacgtctataaatgtcctagtagattttgttataaattcctgcaagatcctagccaccttcctgctgatcctctg

SEQ ID NO: 716325 - DNA, 120 bp, Artificial Sequence
  ENSG00000197403_5 (sequence is synthesized)
ctcctatgtgcagatcatctgcacagtgctcagaattccctcagctgccggcaagaggaaggccatctccacgtgtgcctcccacttcactgtggttctcatcttctatgggagcatcct

SEQ ID NO: 716326 - DNA, 120 bp, Artificial Sequence
  ENSG00000197403_6 (sequence is synthesized)
ttccatgtatgtgcagctgaagaagagctactcactggactatgaccaggccctggcagtggtctactcagtgctcacacccttcctcaaccccttcatctacagcttgcgcaacaagga

SEQ ID NO: 716327 - DNA, 120 bp, Artificial Sequence
  ENSG00000197403_7 (sequence is synthesized)
gatcaaggaggctgtgaggaggcagctaaagagaattgggatattggcatgagttggggctgagagtaggccaaggccgggcctgaggatatggtggccccagggatcaacagtggccag

SEQ ID NO: 716328 - DNA, 120 bp, Artificial Sequence
  ENSG00000197403_8 (sequence is synthesized)
gttccatcaaagtgataaacttcaacccctccaggccccgggaatggctgggtataatactgcaaatgagacataggaagtatacaggaagttctcttcaaacttcggactccgagcagt

SEQ ID NO: 716329 - DNA, 120 bp, Artificial Sequence
  ENSG00000197403_9 (sequence is synthesized)
agacgagaaactaaaaattcagtgcttttctatgtggggtggtggagctgcagcaagtgctgactgacttccagtgttatagcgaccttcatactgtctgctggagccacatttggcttg

SEQ ID NO: 716330 - DNA, 120 bp, Artificial Sequence
  ENSG00000197403_10 (sequence is synthesized)
agaccagagactagggaaagtacacatcccttcaacatgatgtagtgcagtgattttcaaaactcagatgtttatgtatcacacttaggttttttttaaaatctgtgtcttacctattat

SEQ ID NO: 716331 - DNA, 120 bp, Artificial Sequence
  ENSG00000197403_11 (sequence is synthesized)
acgtttataggcatttttcaaatttacttgacttaatataaatatagtcaggcatgtcctaaacaaaatgtgattcatgatgttttttgtaccacttgcaatcatttcatgtggagaaga

SEQ ID NO: 716332 - DNA, 120 bp, Artificial Sequence
  ENSG00000197403_12 (sequence is synthesized)
ctggtacagtagaaaaaagcatgttttttgaactcatatatatctggatttaaatcatgttttattcagtcacttgctaattacttaatctttagaaagtaacttagcatctctgagtct

SEQ ID NO: 716333 - DNA, 120 bp, Artificial Sequence
  ENSG00000197403_13 (sequence is synthesized)
taatttcattatttgataatggtattttcttgaagagtgttttgaatattaacgttaagatttgtaaaccacagtgcacagtgtctgacatgtaggtgatagtaaataaataaggacttg

SEQ ID NO: 716334 - DNA, 120 bp, Artificial Sequence
  ENSG00000197403_14 (sequence is synthesized)
tttttatttattttattctgcgaagacttcacatcattactctgggtcttagaacaatatctagtaaaacataaataaacaaaaatactttccaagtattttctccaaaggaaaggagca

SEQ ID NO: 716335 - DNA, 120 bp, Artificial Sequence
  ENSG00000197403_15 (sequence is synthesized)
aaccagccagaaggaatacttgtatagtatacaagtatactatacttgaaaagtatagtttgtcacagttctgttctgacaagtttcatgtacctgtcttagtggtcctaatatctatgg

SEQ ID NO: 716336 - DNA, 120 bp, Artificial Sequence
  ENSG00000197403_16 (sequence is synthesized)
ccagtataatgtatgaaagtataggagttgagtcagtggaaagaaataggattactttttacatcgaaccatttctttattgaattgtaagctaattatttcctgaaacgtgtgaaaaat

SEQ ID NO: 716337 - DNA, 120 bp, Artificial Sequence
  ENSG00000197403_17 (sequence is synthesized)
aattctaaaatgtagcatatgagagatctggggattcaattaatagctaatattatgtattctttatgtatccttccatgaatggaggatcaaatattaactacaagaaatctttgaatt

SEQ ID NO: 716338 - DNA, 120 bp, Artificial Sequence
  ENSG00000197403_18 (sequence is synthesized)
ctatagaacttcctaagaagattacaaaatatttttaataccacacttttaaaggtattcatccatccatgcattcaaattaacacgtttatttagctcttactatatatcagatgcagt

SEQ ID NO: 716339 - DNA, 120 bp, Artificial Sequence
  ENSG00000197403_19 (sequence is synthesized)
gtcaactctacaaaagcaatgaacaagacatatatatgtccaggtcctacctttagggtgttttaaaagagttgagaatataaatattaaaattataattaatttataattagttataat

SEQ ID NO: 716340 - DNA, 120 bp, Artificial Sequence
  ENSG00000197403_20 (sequence is synthesized)
taattataattgtgggaagtagtattaagataaacatgcattctccttttttttcacttgtctttgaagtttattgagaattttaagcagataaatgtttttacattaaataatcaccag

SEQ ID NO: 716341 - DNA, 120 bp, Artificial Sequence
  ENSG00000197403_21 (sequence is synthesized)
ctctagcagagcactccccaccaacaatctctagagacagaatctcactctattgctccggttgaagtgcagtggctgcttacaggggcgatcacggtgcactgcagcctcgaagtcatg

SEQ ID NO: 716342 - DNA, 120 bp, Artificial Sequence
  ENSG00000197405_0 (sequence is synthesized)
accttcgatcctcggggagcccaggagaccagaacatggactccttcaattataccacccctgattatgggcactatgatgacaaggataccctggacctcaacacccctgtggataaaa

SEQ ID NO: 716343 - DNA, 120 bp, Artificial Sequence
  ENSG00000197405_1 (sequence is synthesized)
cttctaacacgctgcgtgttccagacatcctggccttggtcatctttgcagtcgtcttcctggtgggagtgctgggcaatgccctggtggtctgggtgacggcattcgaggccaagcgga

SEQ ID NO: 716344 - DNA, 120 bp, Artificial Sequence
  ENSG00000197405_2 (sequence is synthesized)
ccatcaatgccatctggttcctcaacttggcggtagccgacttcctctcctgcctggcgctgcccatcttgttcacgtccattgtacagcatcaccactggccctttggcggggccgcct

SEQ ID NO: 716345 - DNA, 120 bp, Artificial Sequence
  ENSG00000197405_3 (sequence is synthesized)
gcagcatcctgccctccctcatcctgctcaacatgtacgccagcatcctgctcctggccaccatcagcgccgaccgctttctgctggtgtttaaacccatctggtgccagaacttccgag

SEQ ID NO: 716346 - DNA, 120 bp, Artificial Sequence
  ENSG00000197405_4 (sequence is synthesized)
gggctggcttggcctggatcgcctgtgccgtggcttggggtttagccctgctgctgaccataccctccttcctgtaccgggtggtccgggaggagtactttccaccaaaggtgttgtgtg

SEQ ID NO: 716347 - DNA, 120 bp, Artificial Sequence
  ENSG00000197405_5 (sequence is synthesized)
gcgtggactacagccacgacaaacggcgggagcgagccgtggccatcgtccggctggtcctgggcttcctgtggcctctactcacgctcacgatttgttacactttcatcctgctccgga

SEQ ID NO: 716348 - DNA, 120 bp, Artificial Sequence
  ENSG00000197405_6 (sequence is synthesized)
cgtggagccgcagggccacgcggtccaccaagacactcaaggtggtggtggcagtggtggccagtttctttatcttctggttgccctaccaggtgacggggataatgatgtccttcctgg

SEQ ID NO: 716349 - DNA, 120 bp, Artificial Sequence
  ENSG00000197405_7 (sequence is synthesized)
agccatcgtcacccaccttcctgctgctgaagaagctggactccctgtgtgtctcctttgcctacatcaactgctgcatcaaccccatcatctacgtggtggccggccagggcttccagg

SEQ ID NO: 716350 - DNA, 120 bp, Artificial Sequence
  ENSG00000197405_8 (sequence is synthesized)
gccgactgcggaaatccctccccagcctcctccggaacgtgttgactgaagagtccgtggttagggagagcaagtcattcacgcgctccacagtggacactatggcccagaagacccagg

SEQ ID NO: 716351 - DNA, 120 bp, Artificial Sequence
  ENSG00000197405_9 (sequence is synthesized)
cttccttcccggccattctccctcttgttttcacttcacttttcgtgggatggtgttaccttagctaactaactctcctccatgttgcctgtctttcccagacttgtccctccttttcca

SEQ ID NO: 716352 - DNA, 120 bp, Artificial Sequence
  ENSG00000197405_10 (sequence is synthesized)
gcgggactcttctcatccttcctcatttgcaaggtgaacacttccttctagggagcaccctcccaccccccaccccccccacacacaccatctttccatcccaggcttttgaaaaacaaa

SEQ ID NO: 716353 - DNA, 120 bp, Artificial Sequence
  ENSG00000197405_11 (sequence is synthesized)
cagaaacccgtgtatctgggatatttccatatggcaataggtgtgaacagggaactcagaatacagacaagtagaaagattctcgcttaaaaaaaatgtatttattttatggcaagttgg

SEQ ID NO: 716354 - DNA, 120 bp, Artificial Sequence
  ENSG00000197405_12 (sequence is synthesized)
aaaatatgtaactggaatctcaaaagttctttgggacaaaacagaagtccatggagttatctaagctcttgtaagtgagttaatttaaaaaagaaaattaggctgagagcagtggctcac

SEQ ID NO: 716355 - DNA, 88 bp, Artificial Sequence
  ENSG00000197405_13 (sequence is synthesized)
acttgggaggctgaggtgggagaattgctcgaacttggaggtggaggttgtggtgagccacgagggaggctctgtctcaaaagcaaag

SEQ ID NO: 716356 - DNA, 120 bp, Artificial Sequence
  ENSG00000197405_14 (sequence is synthesized)
tgaccgagggaggctctgtctcaaaagcaaagcaaaaacaaaaacaaaaacacctaaaaaacctgcagttttgtttgtactttgtttttaaattatgctttctattttgagatcattgca

SEQ ID NO: 716357 - DNA, 120 bp, Artificial Sequence
  ENSG00000197405_15 (sequence is synthesized)
aactcaacacaattgtaagtaatgatacagagggatcttgtgtacccttcacccagcctcccccaatggcaacatcttgcaaaactacaatgtagtctcataaccaggatattgacattg

SEQ ID NO: 716358 - DNA, 120 bp, Artificial Sequence
  ENSG00000197405_16 (sequence is synthesized)
atacagtgaagatacaggacattctcatcaccacagggatccccaggatgcccacttccctccacccccacaccccagccgtgtccctaacccctggcaaccaggaatccactctccatt

SEQ ID NO: 716359 - DNA, 120 bp, Artificial Sequence
  ENSG00000197405_17 (sequence is synthesized)
tctataatgttgtcatttcaagaatgttattcaatggaatcatatagtatgtaacctgttttgagcttaaaaaaaaagtatacatgactttaatgaggaaaataaaaatgaatattgaaa

SEQ ID NO: 716360 - DNA, 86 bp, Artificial Sequence
  ENSG00000197405_18 (sequence is synthesized)
tattgctcacacaaagcctgtttggtggtgtcttcacacggacgcgagtgaaagatgggatcacaggcccccaccaccacgcccag

SEQ ID NO: 716361 - DNA, 68 bp, Artificial Sequence
  ENSG00000197405_19 (sequence is synthesized)
aacacaccgtgagggggaagggaagctgctgtgttgaaggtgcttctggaatagtattttcatctcgt

SEQ ID NO: 716362 - DNA, 120 bp, Artificial Sequence
  ENSG00000197406_0 (sequence is synthesized)
agcccaagatttctagggcattggccgcgctgctgggtgatccctccgggctcaagttgcaagggggcgggccgggccggaggtggagtctcccgccaattgaagcctccgctataaatt

SEQ ID NO: 716363 - DNA, 120 bp, Artificial Sequence
  ENSG00000197406_1 (sequence is synthesized)
gaactccctgcactgctgaagcccagatgcctcgccaggccacgtcgcggttggtggtcggagagggcgaggggtcccagggggcttcggggcctgcagccaccatgctccgctccctgc

SEQ ID NO: 716364 - DNA, 120 bp, Artificial Sequence
  ENSG00000197406_2 (sequence is synthesized)
tgcttcactccttgaggctctgcgcccagaccgcctcgtgcctcgtgctcttcccgcgcttcctcggcacggccttcatgctctggcttctcgatttcttgtgtatccgcaagcatttcc

SEQ ID NO: 716365 - DNA, 120 bp, Artificial Sequence
  ENSG00000197406_3 (sequence is synthesized)
tgggccgccgccgccgggggcagcccgagcccgaagtggagctcaacagtgaaggcgaggaggtgcctcccgatgacccgcccatctgcgtgtccgacgacaaccgcctgtgcaccctgg

SEQ ID NO: 716366 - DNA, 120 bp, Artificial Sequence
  ENSG00000197406_4 (sequence is synthesized)
cgtcgctcaaggcggtgtggcatggccagaagttggatttcttcaagcaggcgcacgagggcggtccggcgcccaactccgaggtggttctgcccgacggcttccagagccagcacatcc

SEQ ID NO: 716367 - DNA, 120 bp, Artificial Sequence
  ENSG00000197406_5 (sequence is synthesized)
tcgactacgcgcaagggaaccgcccgctggttctcaatttcggcagctgcacctgaccaccgttcatggcgcgcatgagcgccttccagcgcctggtcactaagtaccagcgcgacgtcg

SEQ ID NO: 716368 - DNA, 120 bp, Artificial Sequence
  ENSG00000197406_6 (sequence is synthesized)
acttcctcatcatctacatcgaggaagcgcacccctccgacggctgggtcaccacggactctccctacatcatcccacagcaccggagcctggaggaccgggtcagcgcagcgagggtac

SEQ ID NO: 716369 - DNA, 120 bp, Artificial Sequence
  ENSG00000197406_7 (sequence is synthesized)
tgcagcaaggtgcacccggctgcgctctggtcctcgacaccatggccaactccagcagctcggcctatggcgcctacttcgagcgtctctatgtcatccagagtggcactattatgtacc

SEQ ID NO: 716370 - DNA, 120 bp, Artificial Sequence
  ENSG00000197406_8 (sequence is synthesized)
gatgagcaactgcacggcgctcggccccggagggtgtaaacatccaacggacaattgactgaacttggtgggctgggccttcgagccttcgaagcccacgtgcaagcgcctcaaaccaag

SEQ ID NO: 716371 - DNA, 120 bp, Artificial Sequence
  ENSG00000197406_9 (sequence is synthesized)
tcacgcttggcgaggccccagtgacactgatgtgctgagccaccatttcagactgagtctgcaccctcagccacatgaacaatctcccctacctccctgggactctgcttctgtaactgt

SEQ ID NO: 716372 - DNA, 120 bp, Artificial Sequence
  ENSG00000197406_10 (sequence is synthesized)
ctcattcacacctgcctggctcactggaaatcctcttttgagcgcgggatatggcttgcccttgtccgtgtgcccccaggactttgcctctacagcattttcttacaccccctccccagc

SEQ ID NO: 716373 - DNA, 120 bp, Artificial Sequence
  ENSG00000197406_11 (sequence is synthesized)
gtgccctcagccaagtgctttggcccggtgcttcccgcagctgcacagagaccttggccacgcccgcgcgccctgagcgcagctgggttccaggagactctcagctcagctgagctagtt

SEQ ID NO: 716374 - DNA, 120 bp, Artificial Sequence
  ENSG00000197406_12 (sequence is synthesized)
gcctggcacccacctgtcgcgcgcggagagggggttccctgttgcttttgtgtctgtttcctgtccctggtaggggaagtgatgtcgtggatggggaggggtgggcagggtagtttcccc

SEQ ID NO: 716375 - DNA, 120 bp, Artificial Sequence
  ENSG00000197406_13 (sequence is synthesized)
cgcttgttttgggtgcacaggagccccactgctgatgacgaactatctctaactggtcttgaccacgagctagttctgaattgcaggggcctcaaagcagcacctaaaccttgaggggga

SEQ ID NO: 716376 - DNA, 120 bp, Artificial Sequence
  ENSG00000197406_14 (sequence is synthesized)
gggtgctctgggtttccgtgaggtaaccaccttaaatgggagggaagttggggtgtctgctttgggaccagaggaagatagcttgagaggcattggcgaggttcgcagcgccccagggag

SEQ ID NO: 716377 - DNA, 120 bp, Artificial Sequence
  ENSG00000197406_15 (sequence is synthesized)
agagaaaaagctgagactcctggggaatgacgttggggtgatggagtccggggaaagagaggtggggggagagcctgaggtccccaagtgaggggagtcctaggcagagctgctgattgt

SEQ ID NO: 716378 - DNA, 120 bp, Artificial Sequence
  ENSG00000197406_16 (sequence is synthesized)
ggggctgggaggtggagggcccctgattcgaaggccatttggtgagtgttttgctggaaatatttcctgtatataaacttctttcaatctacaataataaaggcttgaggtaaactgctt

SEQ ID NO: 716379 - DNA, 120 bp, Artificial Sequence
  ENSG00000197408_0 (sequence is synthesized)
gtgcagggcagtcagaccaggaccatggaactcagcgtcctcctcttccttgcactcctcacaggactcttgctactcctggttcagcgccaccctaacacccatgaccgcctcccacca

SEQ ID NO: 716380 - DNA, 120 bp, Artificial Sequence
  ENSG00000197408_1 (sequence is synthesized)
gggccccgccctctgccccttttgggaaaccttctgcagatggatagaagaggcctactcaaatcctttctgaggttccgagagaaatatggggacgtcttcacggtacacctgggaccg

SEQ ID NO: 716381 - DNA, 120 bp, Artificial Sequence
  ENSG00000197408_2 (sequence is synthesized)
aggcccgtggtcatgctgtgtggagtagaggccatacgggaggcccttgtggacaaggctgaggccttctctggccggggaaaaatcgccatggtcgacccattcttccggggatatggt

SEQ ID NO: 716382 - DNA, 120 bp, Artificial Sequence
  ENSG00000197408_3 (sequence is synthesized)
gtgatctttgccaatggaaaccgctggaaggtgcttcggcgattctctgtgaccactatgagggacttcgggatgggaaagcggagtgtggaggagcggattcaggaggaggctcagtgt

SEQ ID NO: 716383 - DNA, 120 bp, Artificial Sequence
  ENSG00000197408_4 (sequence is synthesized)
ctgatagaggagcttcggaaatccaagggggccctcatggaccccaccttcctcttccagtccattaccgccaacatcatctgctccatcgtctttggaaaacgattccactaccaagat

SEQ ID NO: 716384 - DNA, 120 bp, Artificial Sequence
  ENSG00000197408_5 (sequence is synthesized)
caagagttcctgaagatgctgaacttgttctaccagactttttcactcatcagctctgtattcggccagctgtttgagctcttctctggcttcttgaaatactttcctggggcacacagg

SEQ ID NO: 716385 - DNA, 120 bp, Artificial Sequence
  ENSG00000197408_6 (sequence is synthesized)
caagtttacaaaaacctgcaggaaatcaatgcttacattggccacagtgtggagaagcaccgtgaaaccctggaccccagcgcccccaaggacctcatcgacacctacctgctccacatg

SEQ ID NO: 716386 - DNA, 120 bp, Artificial Sequence
  ENSG00000197408_7 (sequence is synthesized)
gaaaaagagaaatccaacgcacacagtgaattcagccaccagaacctcaacctcaacacgctctcgctcttctttgctggcactgagaccaccagcaccactctccgctacggcttcctg

SEQ ID NO: 716387 - DNA, 120 bp, Artificial Sequence
  ENSG00000197408_8 (sequence is synthesized)
ctcatgctcaaataccctcatgttgcagagagagtctacagggagattgaacaggtgattggcccacatcgccctccagagcttcatgaccgagccaaaatgccatacacagaggcagtc

SEQ ID NO: 716388 - DNA, 120 bp, Artificial Sequence
  ENSG00000197408_9 (sequence is synthesized)
atctatgagattcagagattttccgaccttctccccatgggtgtgccccacattgtcacccaacacaccagcttccgagggtacatcatccccaaggacacagaagtatttctcatcctg

SEQ ID NO: 716389 - DNA, 120 bp, Artificial Sequence
  ENSG00000197408_10 (sequence is synthesized)
agcactgctctccatgacccacactactttgaaaaaccagacgccttcaatcctgaccactttctggatgccaatggggcactgaaaaagactgaagcttttatccccttctccttaggg

SEQ ID NO: 716390 - DNA, 120 bp, Artificial Sequence
  ENSG00000197408_11 (sequence is synthesized)
aagcggatttgtcttggtgaaggcatcgcccgtgcggaattgttcctcttcttcaccaccatcctccagaacttctccatggccagccccgtggccccagaagacatcgatctgacaccc

SEQ ID NO: 716391 - DNA, 120 bp, Artificial Sequence
  ENSG00000197408_12 (sequence is synthesized)
gaagggggtcaaaggattccagggtcattcagtgtccccgcctctgtagacaatggctctgactccccgcaacttcctgcctctgagagacctgctacaagccagcttccttcccctcca

SEQ ID NO: 716392 - DNA, 120 bp, Artificial Sequence
  ENSG00000197408_13 (sequence is synthesized)
tggcaccagttgtctgaggtcacattgcaagtgagtgcaggagtgagattatcgaaaattataatatacaaaatcatatatatatatatgttcttgttttttgagacagagtctcacact

SEQ ID NO: 716393 - DNA, 120 bp, Artificial Sequence
  ENSG00000197408_14 (sequence is synthesized)
aggcgtgagtcaccgtgcccagccatgtatatatataattttaaaaattaagctgaaattcacataacataaaattagctgttttaaagtgtaaaatttagtggcgtgtggttcattcac

SEQ ID NO: 716394 - DNA, 81 bp, Artificial Sequence
  ENSG00000197408_15 (sequence is synthesized)
gttttaaagtgtaaaatttagtggcgtgtggttcattcacaaagctgtacaaccaccaccatctagttccaaacattttcc

SEQ ID NO: 716395 - DNA, 120 bp, Artificial Sequence
  ENSG00000197408_16 (sequence is synthesized)
gtgattctcctgcctcagcctctggaggagctggtatcacaggcgtcccccaccacgcctggctaaattttgtatttttaggtggtcttgaactcctgatgtcaggtgattctcctagct

SEQ ID NO: 716396 - DNA, 120 bp, Artificial Sequence
  ENSG00000197408_17 (sequence is synthesized)
attctcctagctccaaatgttttcattatctctcccccaacaaaacccatacctatcaagctgtcactccccataccccattctctttttcatctcggcccctgtcaatctggtttttgt

SEQ ID NO: 716397 - DNA, 120 bp, Artificial Sequence
  ENSG00000197408_18 (sequence is synthesized)
cactatggacttaccaattctgaatatttcccataaacagaatcatacaatatttgattttttttttttttttgaaactaagccttgctctgtctcccaggctggagtgctatggtgcaa

SEQ ID NO: 716398 - DNA, 120 bp, Artificial Sequence
  ENSG00000197408_19 (sequence is synthesized)
agccttgctctgtctcccaggctggagtgctatggtgcaatttttgttcactgcaacctctgccttccaagatcaagagattctccagtctcagctcccaagtagctgggattacaggca

SEQ ID NO: 716399 - DNA, 120 bp, Artificial Sequence
  ENSG00000197408_20 (sequence is synthesized)
tggcctcaggtgatccacccacctcagtgttccaaagtgctgatattacaggcataatatgtgatcttttgtgtctggttgctttcatgttgaatgctatttttgaggttcatgcctgtt

SEQ ID NO: 716400 - DNA, 120 bp, Artificial Sequence
  ENSG00000197408_21 (sequence is synthesized)
gttgaatgctatttttgaggttcatgcctgttgtagaccacagtcacacactgctgtagtcttccccagtcctcattcccagctgcctcttcctactgcttccgtctatcaaaaagcccc

SEQ ID NO: 716401 - DNA, 120 bp, Artificial Sequence
  ENSG00000197408_22 (sequence is synthesized)
cttggcccaggttccctgagctgtgggattctgcactggtgctttggattccctgatatgttccttcaaatctgctgagaattaaataaacatctctaaagcctgacctccccacgtcaa

SEQ ID NO: 716402 - DNA, 120 bp, Artificial Sequence
  ENSG00000197408_23 (sequence is synthesized)
attcggccaggtcagggagacggagagggacagggggtgtgggggtgaggtgaacacccagaacacacgagaaaaggatgacctgtcttgggggctcagaaatgcagcttatccttggaa

SEQ ID NO: 716403 - DNA, 120 bp, Artificial Sequence
  ENSG00000197408_24 (sequence is synthesized)
ctcagcctcccaagtagctgggactgcagctgtttgagctcttctctggcttcttgaaatactttcctggggcacacaggcaagtttacaaaaacctgcaggaaatcaatgcttacattg

SEQ ID NO: 716404 - DNA, 120 bp, Artificial Sequence
  ENSG00000197408_25 (sequence is synthesized)
gaattcggggcaagggacaaaaatacagcaacaagagaaaaaactcacagaggcagaaagagacggggacaaaaagagagaaacacatcaaagagatgtggagagagatagaaacagagt

SEQ ID NO: 716405 - DNA, 120 bp, Artificial Sequence
  ENSG00000197408_26 (sequence is synthesized)
taggaagactaaagagaggctgagagagatgagttagagatacgcggttggatgtgtagaggacagagaaaagcaaactgggccagatagtgtcaaagacctttaggccaacggagggca

SEQ ID NO: 716406 - DNA, 120 bp, Artificial Sequence
  ENSG00000197409_0 (sequence is synthesized)
atggctcgtaccaagcagactgctcgcaagtccacgggtgggaaagcgccacgcaagcagctggccaccaaggctgctcgaaagagcgctccagccaccggcggcgtgaagaagccccac

SEQ ID NO: 716407 - DNA, 120 bp, Artificial Sequence
  ENSG00000197409_1 (sequence is synthesized)
tcgaccgagctgctgattcgcaaactgccattccagcgtctagtccgtgagatcgcgcaggacttcaagactgatctgcgttttcagagctcggcggtgatggcgctgcaggaggcctgc

SEQ ID NO: 716408 - DNA, 120 bp, Artificial Sequence
  ENSG00000197409_2 (sequence is synthesized)
gaggcctacctggtggggctgtttgaggacaccaacctatgcgccattcacgccaagcgagtgactatcatgcccaaggacatccagcttgctcgccgcattcgtggggagagggcgtaa

SEQ ID NO: 716409 - DNA, 120 bp, Artificial Sequence
  ENSG00000197410_0 (sequence is synthesized)
actccaccccctactccggccagatccccatcctctccttgtgtgtgcgcgcttcatataatctcctcctttttggcaaaagaaataatgcacctgactttaccaggggggaacaaccag

SEQ ID NO: 716410 - DNA, 120 bp, Artificial Sequence
  ENSG00000197410_1 (sequence is synthesized)
ccgagtagaacaaggaacagatgtaaagggaataaaaggagagagaaaaagagatgagattcgtttaaagaaatccaggggcagaagaggtggctgccgcggcagaggcagctagagctt

SEQ ID NO: 716411 - DNA, 120 bp, Artificial Sequence
  ENSG00000197410_2 (sequence is synthesized)
acttccctgtctgcgtgagctgcaggcagaggacgctttcaccagttgcagatgtaacctcgggaattcctgggccgtcggtttgtttgccaaacaaagtcttttcttctctggctcaga

SEQ ID NO: 716412 - DNA, 120 bp, Artificial Sequence
  ENSG00000197410_3 (sequence is synthesized)
cactgaagaggctcctggatttttctgcgatcctgccacaagctggcagttacccgagagccttcccaaggagctggaggagaaatgagcccttgtgggcggaagatgggcgaagggcgt

SEQ ID NO: 716413 - DNA, 120 bp, Artificial Sequence
  ENSG00000197410_4 (sequence is synthesized)
cagcagcggcgggctccggtcgggaagctccttctgctccccgggaggagagatacaccccatgggcggtcaggcagcagcggcgccaggacgcagcgctccctgctctggctcttggtg

SEQ ID NO: 716414 - DNA, 120 bp, Artificial Sequence
  ENSG00000197410_5 (sequence is synthesized)
cacgtgtggctgtgggcggcctcgggctcctctgcccagttgttcaacctcaccctttccgtagatgaggggcttcccccggacacgctggtaggtgacatccgcgccgggctgccggcc

SEQ ID NO: 716415 - DNA, 120 bp, Artificial Sequence
  ENSG00000197410_6 (sequence is synthesized)
gcgcagcagcaggaggggagcggcttctttctgtcggaggactccgatgactccccgctgctggacgacttccacgtgcacccggacaccggcatcatccgcactgcgcggcgcctggac

SEQ ID NO: 716416 - DNA, 120 bp, Artificial Sequence
  ENSG00000197410_7 (sequence is synthesized)
cgcgagcggcgggaccactacagcttcgtcgccgccacgctgctgggcgctgtggtgcaggtggagattcgcgtcaacgacgtgaatgaccactcgccccgctttcccctcgactccctg

SEQ ID NO: 716417 - DNA, 120 bp, Artificial Sequence
  ENSG00000197410_8 (sequence is synthesized)
caactcgacgtctccgagctcagcccgccagggaccgccttccgcctgccagttgcccacgatccggacgccggactgttcagcactcagggctacaccctggtgcaaccgtccgacctg

SEQ ID NO: 716418 - DNA, 120 bp, Artificial Sequence
  ENSG00000197410_9 (sequence is synthesized)
cccaaggaccccgcaggcccgttcttccagttgcgctaccggactccggggccactaccgtcaccgcttttgccaggctcctcgtcacccctggagcctctagatctggtgctgctgcgg

SEQ ID NO: 716419 - DNA, 120 bp, Artificial Sequence
  ENSG00000197410_10 (sequence is synthesized)
cgcttggaccgagaggaggcggcggcgcaccggctgcagatcgaggcatgggacggcggccgaccccggcgcaccggcctcctgagcgtggagctgcgcgtgctggatgagaacgacaac

SEQ ID NO: 716420 - DNA, 120 bp, Artificial Sequence
  ENSG00000197410_11 (sequence is synthesized)
ccgccggtctttgagcaggacgagtaccgcgccgcggtgcgcgaggacgcccagccgggcgccgaggtctgtcgcgtgcgcgccaccgaccgcgacctggggcccaatggcttcgtgcgc

SEQ ID NO: 716421 - DNA, 120 bp, Artificial Sequence
  ENSG00000197410_12 (sequence is synthesized)
tacagcgtccgcgcccggcaagtgcctggggcgggtagcggcggcggggcactgggcgacgcggcctacttcgcggtggaggagctgagcggcgtggtgcgagtgtggagacctctggac

SEQ ID NO: 716422 - DNA, 120 bp, Artificial Sequence
  ENSG00000197410_13 (sequence is synthesized)
cgcgaggcacaggcctggcaccagttggtggtggaggcccgcgatggaggcgccgagcctgaggttgccacggtgcgcgtgtccatcgccgtgctggacgtgaatgacaaccggccagca

SEQ ID NO: 716423 - DNA, 120 bp, Artificial Sequence
  ENSG00000197410_14 (sequence is synthesized)
attcacgtgctctttctcacagagggaggcgtcgcccgtgtctctgaaggcgcccgaccgggcgactacgtggctcgcgtctcggtgtctgacgcggacggtgactgggagaaggaagat

SEQ ID NO: 716424 - DNA, 120 bp, Artificial Sequence
  ENSG00000197410_15 (sequence is synthesized)
gaggccacaggggagcttggtgtgggtcttggagacgggagcatctctctgtccttggaaggcggagagggagacttcgcgttgctacccggcggccccccaggggtatttttcctttgc

SEQ ID NO: 716425 - DNA, 120 bp, Artificial Sequence
  ENSG00000197410_16 (sequence is synthesized)
gtggaggggcccctggacagagagagccgcgatctgtatgagttactactggtggccacggacgcggggtccccgccgctgagcacggaggagacgctgctactccgggtcgctgacctc

SEQ ID NO: 716426 - DNA, 120 bp, Artificial Sequence
  ENSG00000197410_17 (sequence is synthesized)
aatgaccaaccacctctcttcagccaacagcattacaaggcctcagtgtccgaggccgcggcccctggcactgtagtcatgtgggtcagcgcctccgatgccgacgaggcaggcagtgat

SEQ ID NO: 716427 - DNA, 120 bp, Artificial Sequence
  ENSG00000197410_18 (sequence is synthesized)
cacgcctggctgcgctacactgtagtccaactctcggctccctgcaatctcggctccctgcaatcaaagatggtccacaccgcagagtgtggaccatcttttgccattgattccgaaagc

SEQ ID NO: 716428 - DNA, 120 bp, Artificial Sequence
  ENSG00000197410_19 (sequence is synthesized)
ggtgcgatcagcactatccggactctagaccgagaggtccaggaggcggtggagctgaaagtggtggcccaggacctcggagagcccccactctctgccacctgcctggtgagcatcacc

SEQ ID NO: 716429 - DNA, 120 bp, Artificial Sequence
  ENSG00000197410_20 (sequence is synthesized)
gtagatgatgtgaatgacaatgagcccatcttctggaggcaggtgtacaatgccaccattgcagagcatgccccggttggacactgctttctgcaggtgacagcctctgatgcagattca

SEQ ID NO: 716430 - DNA, 120 bp, Artificial Sequence
  ENSG00000197410_21 (sequence is synthesized)
ggactctatggctttattgaatattctctttatgatggattcctgagctatgaagcacctcaggcattccggatcgaccctcatgatgggcaaatctgtgtttctcaagatatcgacagg

SEQ ID NO: 716431 - DNA, 120 bp, Artificial Sequence
  ENSG00000197410_22 (sequence is synthesized)
gaaagggatccagctacctatgatctcctggtggaagctaaggatgggggtgggctaagtgcccaagcctttgttcgtgtggacctggaggacgtgaatgataatcatcctgtgtttaac

SEQ ID NO: 716432 - DNA, 120 bp, Artificial Sequence
  ENSG00000197410_23 (sequence is synthesized)
ccatcaacctatgtgacgagcatcagtgatgagacccagccaggcaccgagatcatcaatgttcttgccactgaccaggactctgggatatatgggacagtggcttatgagcttattcca

SEQ ID NO: 716433 - DNA, 120 bp, Artificial Sequence
  ENSG00000197410_24 (sequence is synthesized)
ggaaacgtgtcgtccctttttaccattgactccaccacaggaattatttacttaacattacctcttagtcatttggaatctaccacactttcgttgatggtctctgctcaagacggtggt

SEQ ID NO: 716434 - DNA, 120 bp, Artificial Sequence
  ENSG00000197410_25 (sequence is synthesized)
gggctcacagctgtcattaatgccgatgtcaccatacacattttccagacaactctggcacctgctgagtttgaaaggcctaagtacactttcttagtttatgaagatgtgcctgaagat

SEQ ID NO: 716435 - DNA, 120 bp, Artificial Sequence
  ENSG00000197410_26 (sequence is synthesized)
agtcccattggaacagtgaaagcaagagagcccttgaactcctcagaaccaatcttttacaggatttcttctggtgatctcggcggaaagttctccattcacccgcggctgggcactatt

SEQ ID NO: 716436 - DNA, 120 bp, Artificial Sequence
  ENSG00000197410_27 (sequence is synthesized)
cgcacccggaagcccctggatcacgagacgcagcccgtggttgtgctcacggtgcaggcgcagctcggcagcgccccagcctgcagcagcaccgaggtcaacataacagtcatggatgtc

SEQ ID NO: 716437 - DNA, 120 bp, Artificial Sequence
  ENSG00000197410_28 (sequence is synthesized)
aatgacaaccacccagcgttcctcaggacctcggatgagattagaatatcccagaccacgccccctggcacagccttgtacctcgcacgtgcggaagacagagacagtgggcggaacgga

SEQ ID NO: 716438 - DNA, 120 bp, Artificial Sequence
  ENSG00000197410_29 (sequence is synthesized)
ctcatccggtactccatcgccagcccgcagccaggcgtctttgccatcgacagagccctgggggtgctgttcctcaacggcagcctgggcgcgggcgagcagcgggagctcacgctgact

SEQ ID NO: 716439 - DNA, 120 bp, Artificial Sequence
  ENSG00000197410_30 (sequence is synthesized)
ctcagggccgaggaccaaggcgtgcatcctcaggcagccctgctggtgctgacagtcgttatcgagaaacgcgaacacagcccatcctggactttcgaacatttggtctatcaagtggaa

SEQ ID NO: 716440 - DNA, 120 bp, Artificial Sequence
  ENSG00000197410_31 (sequence is synthesized)
gtcagtgagtctctctcaccgatgacacaaatgctgcaaacacaggcgcacccacttggcccccagcgtgcagcctcgcctcttaggtactcgctggaacccagcgtagactctgctatg

SEQ ID NO: 716441 - DNA, 120 bp, Artificial Sequence
  ENSG00000197410_32 (sequence is synthesized)
tttggaatccgcccttacacgggctggatttatttgcggcgacagtttgactatgaatccacccaaacatataattttagagtgtttgcttggatccccgaggacggattcttgcaaaat

SEQ ID NO: 716442 - DNA, 120 bp, Artificial Sequence
  ENSG00000197410_33 (sequence is synthesized)
gtgagcactacagtcattgttcgtgtctgggatgagaatgacaattcccccaccttcttgcatgatgtgttgtttttgaaagtcgaagagagccctgttccccaaggggtaataggcaaa

SEQ ID NO: 716443 - DNA, 120 bp, Artificial Sequence
  ENSG00000197410_34 (sequence is synthesized)
attacagctattgacatggactctggaaagaatggacagctattatatttccttttgtctgatggaaaattcttcaagatgaatcctaatacaggagagttaatcaattgggtggcactg

SEQ ID NO: 716444 - DNA, 120 bp, Artificial Sequence
  ENSG00000197410_35 (sequence is synthesized)
gatcgtgagcaccgggggcaccatgagatgactgtgctagtgacagaccgcggctccccaccacgaaacgccaccatggcggtttacgtctcagttactgacatcaatgataacaggccc

SEQ ID NO: 716445 - DNA, 120 bp, Artificial Sequence
  ENSG00000197410_36 (sequence is synthesized)
ttcttcccccagtgtctccctggaaaggagttacacgtgaaggttctggaaggtcaaccagtaaatatgttggttacaactgtgtttgcaaaggatcctgatgaaggaaataatgcagaa

SEQ ID NO: 716446 - DNA, 120 bp, Artificial Sequence
  ENSG00000197410_37 (sequence is synthesized)
gttacatactcagtatcttcagaagatagttctgatcactttaagattgacgccaacaatggtgaaataagaacaaccacaatactttcgtatgattatagaccttcctacagaatgagt

SEQ ID NO: 716447 - DNA, 120 bp, Artificial Sequence
  ENSG00000197410_38 (sequence is synthesized)
gtcattgccactgaccagggagtgcctcctcttcaaggacaggcagttgttaatattcaggtgatcccactatccaaagggagagcaatcatgtctcagaatattagacatttaattata

SEQ ID NO: 716448 - DNA, 120 bp, Artificial Sequence
  ENSG00000197410_39 (sequence is synthesized)
ccagaaaatttgaagcccacaaaaataatgagcttgataaagtcatctgatcaccttcaacaacattataatggaaagttacattttagtattgttgcagatgataaggatggacacttt

SEQ ID NO: 716449 - DNA, 120 bp, Artificial Sequence
  ENSG00000197410_40 (sequence is synthesized)
gaaatagacagctcaaccggagacttgtttctttctaaggaacttgattatgagacgacatctcattatcttttcagagtgattactacagaccatagcaaaaacctttccctgagtagc

SEQ ID NO: 716450 - DNA, 120 bp, Artificial Sequence
  ENSG00000197410_41 (sequence is synthesized)
acagtcttccttagtatcgatgtggaagatcagaatgaccattccccatctttccaggatgagctcattgtgatcagtgtagaggagaatgttcccataggaaccctggtgtatgtcttc

SEQ ID NO: 716451 - DNA, 120 bp, Artificial Sequence
  ENSG00000197410_42 (sequence is synthesized)
aatgccaaagatgatgacggcagttttttgaacagtagaatacaatactacattgaatcccacaaccctggcacgaatccatttctcatccacccctcatttggcacactagtcactgtg

SEQ ID NO: 716452 - DNA, 120 bp, Artificial Sequence
  ENSG00000197410_43 (sequence is synthesized)
tcccgtcttgacagagaaagcattccaactgtcatcctgacagtaacagcatctgatcaggctgtgaatgtgacagaccggcgactgagatcactgacagcacaaatagtgattttggat

SEQ ID NO: 716453 - DNA, 120 bp, Artificial Sequence
  ENSG00000197410_44 (sequence is synthesized)
gtaaatgaccacaaccccacttttatttctttccccaatgcccatgtcaaagaggatgtcacagtgggctccttggtccaccacataactgctcacgatccagacgaaggaaggaatgga

SEQ ID NO: 716454 - DNA, 120 bp, Artificial Sequence
  ENSG00000197410_45 (sequence is synthesized)
aaagtaacatacagcatcctctcaggaaatgaaaacatgacgtttatgctagatgagtcatcaggcttactaaccacaacctgtcctttggattatgaaatgaaaactcagcatattctg

SEQ ID NO: 716455 - DNA, 120 bp, Artificial Sequence
  ENSG00000197410_46 (sequence is synthesized)
actgttctggcactggatgatggcacaccagcactttcttcatcccagactttgacagttactgttcttgatgtaaatgatgaagctccagtatttaagcagcacctgtatgaagcctca

SEQ ID NO: 716456 - DNA, 120 bp, Artificial Sequence
  ENSG00000197410_47 (sequence is synthesized)
gtgaaagaaaaccaaaatccaggggagtttgttaccagggttgaagctctggacagagattcaggagtcaattccaagcttcagtttgaaatcatgccaggtgcttcatttgaattattc

SEQ ID NO: 716457 - DNA, 120 bp, Artificial Sequence
  ENSG00000197410_48 (sequence is synthesized)
gagataaattctgacactggagaggtagtgacaaccaccatacttgacagagaaattcaagaagtcttcacccttcgagtactagtacgagatgggggattcccttcattgtccagcacc

SEQ ID NO: 716458 - DNA, 120 bp, Artificial Sequence
  ENSG00000197410_49 (sequence is synthesized)
acaacaatcctctgcactgttgaagatgaaaacgatcacgcaccagagtttattgtttccagttatgacattgaggttctggaaaaccaggaaccagaggttgtctatacggttttagcc

SEQ ID NO: 716459 - DNA, 120 bp, Artificial Sequence
  ENSG00000197410_50 (sequence is synthesized)
tctgatatggatgctggcaataacagagctgttgaatatcacataattgatggaaatactgatgagtgctttactataaatgagatgtcaggagaactctcaaccactcgtgctttggac

SEQ ID NO: 716460 - DNA, 120 bp, Artificial Sequence
  ENSG00000197410_51 (sequence is synthesized)
cgggagcaaatcagcaattttacccttgtcattctgtgctctgacctgggagatccacctaggagctctgtaatacacctgcaagttagagttttggatgccaatgaccacagtccttct

SEQ ID NO: 716461 - DNA, 120 bp, Artificial Sequence
  ENSG00000197410_52 (sequence is synthesized)
tttcccacactttattaccagtcctctgtgagagaagatgctgaagtgggaacagtggttcttgtgctttcagctgtggacaaggatgaaggcctgaatgggcaaactgagtattttctg

SEQ ID NO: 716462 - DNA, 120 bp, Artificial Sequence
  ENSG00000197410_53 (sequence is synthesized)
actgatgaggcttctggtgcattcaccattgatcctatgtcaggcacattgaaaaccagcaacaccctcgaccgtgaagccagatctcagcatacatttagtgctgtggccagagactgt

SEQ ID NO: 716463 - DNA, 120 bp, Artificial Sequence
  ENSG00000197410_54 (sequence is synthesized)
agcatccagggttcacgaagcaccactgtaattataaaagtatatgtcactgatgttaatgacaatgatccagttttggaacagaacccttttgatgtgtttctttcccccgagtcgcct

SEQ ID NO: 716464 - DNA, 120 bp, Artificial Sequence
  ENSG00000197410_55 (sequence is synthesized)
acctggacttggggcccaatggaactgtggtttttagttttgcagagacccagtcaatgttttctattgataaatacacaggagaaattcaatttcagcaaaatccatcttcagaatact

SEQ ID NO: 716465 - DNA, 120 bp, Artificial Sequence
  ENSG00000197410_56 (sequence is synthesized)
tccctatctggctgcagttaaaagttacagaccagggcattccagccaggacaaccacgggtctcttggtcattcacatggaaggagaagatgtaaagatttccttcagccaccacctgt

SEQ ID NO: 716466 - DNA, 120 bp, Artificial Sequence
  ENSG00000197410_57 (sequence is synthesized)
ataaagggctcgtgactgaaaattgtgaggcaggtacttctattgtgactgttaaagcttttgctcctgactcaattcaggacagcatgaaatattcaatttttagtggaaatgaagatg

SEQ ID NO: 716467 - DNA, 120 bp, Artificial Sequence
  ENSG00000197410_58 (sequence is synthesized)
gagttctttccctgtgctctaagtcaggacaactcactgtgaaagaacccaagtttcttgattttgaagtcagaaatgaggttcaactcatcgttttagctgaaagtagtgggcatagag

SEQ ID NO: 716468 - DNA, 120 bp, Artificial Sequence
  ENSG00000197410_59 (sequence is synthesized)
cctattgcaaagtagcagtcttgatacaggatgagaatgataattcaccatgctttgaacaaagcatttaccaggcatcagtgtctgaaagccaactctacaatgctcatgtcatacagg

SEQ ID NO: 716469 - DNA, 120 bp, Artificial Sequence
  ENSG00000197410_60 (sequence is synthesized)
tttttgctaccgacttggacagtggtttgaacggcctgattgagtattctattctgtctggcaaccaagaagaagcattccagattgatgcactgagtggtgtgataacaacaaaagcga

SEQ ID NO: 716470 - DNA, 120 bp, Artificial Sequence
  ENSG00000197410_61 (sequence is synthesized)
ttctagattacgagctcaccagctcctacagcttgattgtccaagccacagataaagggatgcccaggctttctaatacgactgtaatcaaggtacaggtgactgatataaatgacaatg

SEQ ID NO: 716471 - DNA, 120 bp, Artificial Sequence
  ENSG00000197410_62 (sequence is synthesized)
ccccagcttttctcccctctgaagcagtggaaattacagaagattctttgcctggtgtaattgtgactcatgtgtcagttcatgatgtggatttgaattcagctttcatattcagttttg

SEQ ID NO: 716472 - DNA, 120 bp, Artificial Sequence
  ENSG00000197410_63 (sequence is synthesized)
ccaaagagagtaatcctggaaccaagtttgctattgatcagaacactggagtggtggtgttggtgaaaacattggattttgaagaaatgactgaatatgagctgctcatccaaatttctg

SEQ ID NO: 716473 - DNA, 120 bp, Artificial Sequence
  ENSG00000197410_64 (sequence is synthesized)
attcagtgcactacacagagggagcacttgtagtccgtgtgctggatgtcaatgataatccaccagtgttttctcaagatttctatcaggtcacagttcctgaatcaatacctgtggggt

SEQ ID NO: 716474 - DNA, 120 bp, Artificial Sequence
  ENSG00000197410_65 (sequence is synthesized)
attcagtgctgactctgtcagccacagacttagaaagcaatgagaacatttcttacagaattctatcctcttctaaggaattctccattgatcctaagaatggcacaatatttactatca

SEQ ID NO: 716475 - DNA, 120 bp, Artificial Sequence
  ENSG00000197410_66 (sequence is synthesized)
gtcccgtattacttctggatacaatatcaacaactcaatttcttgtggaagccagtgatggtggaaatcctgacctgagagctcttactttagtggagataggaatagaagatatgaaca

SEQ ID NO: 716476 - DNA, 120 bp, Artificial Sequence
  ENSG00000197410_67 (sequence is synthesized)
attatgcccctgaattcacagtcaaatcctataatcttagcctaagtgaggatgctctggttggaagcacgcttgttacattttcaaacatcgaccatgactggacccgtgaaaacacat

SEQ ID NO: 716477 - DNA, 120 bp, Artificial Sequence
  ENSG00000197410_68 (sequence is synthesized)
atgttgaatattccatcatcagtggtaattcacagaacaattttcatgtggaaactaagttctttcattcagaatatccttataagcaagtcggttatcttgtgttgcttcacagtctgg

SEQ ID NO: 716478 - DNA, 120 bp, Artificial Sequence
  ENSG00000197410_69 (sequence is synthesized)
acagagaagcaagtgctagccatgagcttgtcattctggcatctgacagtggctgccctccattgagttccacagctgtcatatcaatacaagtacttgatgtcaatgacaatcccccaa

SEQ ID NO: 716479 - DNA, 120 bp, Artificial Sequence
  ENSG00000197410_70 (sequence is synthesized)
acttcagcagcctgagctatcacacccatgtcaaggaaagcacccctctagggagtcacatcactgtggtctcagcaaatgaccgtgacacagggtcacatgcagaaatcatctacaaca

SEQ ID NO: 716480 - DNA, 120 bp, Artificial Sequence
  ENSG00000197410_71 (sequence is synthesized)
tcatctctggaaatgagaagggacatttttacttagaagaaaacactggagttctttatttgattaaacctctggattatgaaaaaatgacaaaattcaccttaactgtccaagcttcag

SEQ ID NO: 716481 - DNA, 120 bp, Artificial Sequence
  ENSG00000197410_72 (sequence is synthesized)
atgcagaaaagaaacatttttcttttgcagttgtgtttgtcagtgtcctggatgataacgaccatgcacctcagtttatgttctcaagcttcagctgtattgttccagaaaatctgccta

SEQ ID NO: 716482 - DNA, 120 bp, Artificial Sequence
  ENSG00000197410_73 (sequence is synthesized)
tttcctctaccatatgctctataaatgctctggattttgatgctggtccgtatggagaattgacctattctattgtatcaccctgttttctcactcatggaatgtcttatgatcatgatc

SEQ ID NO: 716483 - DNA, 120 bp, Artificial Sequence
  ENSG00000197410_74 (sequence is synthesized)
tcttcctcattgaccctttgacaggggatattcatgctaagcaaatccttgactatgaaaatggcaataaatactgcctcacagtccaagccaaagacaaaggtgatgcaactgcctcct

SEQ ID NO: 716484 - DNA, 120 bp, Artificial Sequence
  ENSG00000197410_75 (sequence is synthesized)
tagtggtctgggtggatattgaagggatagatgaatttgagcccattttcactcaagatcagtattttttcaccctcccagaaaagaataaagacagacagttgattggcagagtggaag

SEQ ID NO: 716485 - DNA, 120 bp, Artificial Sequence
  ENSG00000197410_76 (sequence is synthesized)
cctcagatgcagatgctggtattgatggagtcattctttactcccttggaacctcatctcctttcttttcagtaaataaaaccaatggaaatatttatttgattagagcccttcccctaa

SEQ ID NO: 716486 - DNA, 120 bp, Artificial Sequence
  ENSG00000197410_77 (sequence is synthesized)
taaaaagtcaactcaacaaagaagacaccttggaaatgaaaataatcgctcatagtcccaaatcagattccaagtttgcatcttgcactgtttttgtgaatgtgtctttctcctctgaag

SEQ ID NO: 716487 - DNA, 120 bp, Artificial Sequence
  ENSG00000197410_78 (sequence is synthesized)
gaacacccttggcagtgttcgccagcagcttttcaatcagcctggtggtctcctttttagtgtttctgatactcatctgcattctaattgtaatgattttaagacataaacaaaaagaca

SEQ ID NO: 716488 - DNA, 120 bp, Artificial Sequence
  ENSG00000197410_79 (sequence is synthesized)
caataaacaattatgaggagaagaaaacctcatctttagatgcggacttgagagtgacccgggatgccagtgtgctcaaagccttccagaaaactgacgactgcagtaacgaggtggtcc

SEQ ID NO: 716489 - DNA, 120 bp, Artificial Sequence
  ENSG00000197410_80 (sequence is synthesized)
ctgtggatgccactccggaatggttgagtttaataagtatcatggagaaggatattgtcaatctgtacagacactcaaactccagtggccactgttctgtggaaggagaaactgcagaag

SEQ ID NO: 716490 - DNA, 120 bp, Artificial Sequence
  ENSG00000197410_81 (sequence is synthesized)
ataaggaaatccagaggataaatgagcatccctacagaaagtgctcagactcagctctgagtgaccacgagtccagggtgccagactcgggtatcccgagggactcagaccagctctcct

SEQ ID NO: 716491 - DNA, 120 bp, Artificial Sequence
  ENSG00000197410_82 (sequence is synthesized)
gcctatctggggaaactgatgtgatggtgactgccgaaacagcagaagccagccaaacatttggggaaggagatcaaggggaaggctgcagcaccacctgtgctcaaaataatgtgttac

SEQ ID NO: 716492 - DNA, 120 bp, Artificial Sequence
  ENSG00000197410_83 (sequence is synthesized)
cccagacagttcagaagagagaggcaaaagagagcatcctggctgacgttagaaaagagtctgtctttatttcaggtgatcaggaagtaaggtgtgcagctctttcaactcagacgacct

SEQ ID NO: 716493 - DNA, 120 bp, Artificial Sequence
  ENSG00000197410_84 (sequence is synthesized)
ctgatcatgatggaaaagacaactatcactggaattatcttcttagttgggagcccaaattccaacctcttgcctcagtatttaatgatattgcaaaactaaaggatgaacatttgcata

SEQ ID NO: 716494 - DNA, 120 bp, Artificial Sequence
  ENSG00000197410_85 (sequence is synthesized)
tgcctggcattccaaaagagaagaaatcttttgtttttccaccccctttgataacagcagtagcccagcctgggattaaagcagtcccaccaagaatgccggcagtaaacctggggcagg

SEQ ID NO: 716495 - DNA, 120 bp, Artificial Sequence
  ENSG00000197410_86 (sequence is synthesized)
tgcctccgaaacacccacgctctcccatcccctaccatcttggttctctgccagaaggcatgactcccaatttttctccatctctttccctattgacgatgcagcctcctgccttgtctc

SEQ ID NO: 716496 - DNA, 120 bp, Artificial Sequence
  ENSG00000197410_87 (sequence is synthesized)
cactgttgagagaaggagaattattaggaacacacatcagtggtacatgccatgaacttaaagcagaagatgaagttcaaatatgaaaccactgggatgccaagtacctgctcaccattg

SEQ ID NO: 716497 - DNA, 120 bp, Artificial Sequence
  ENSG00000197410_88 (sequence is synthesized)
gtcatgaatgaatgaacaaaatgttttcaagccagcaactcgagattgggctcatttttatctaaaagcaagtgatgtaatttagttagagtttttaaaacttccccattaaagtttctc

SEQ ID NO: 716498 - DNA, 120 bp, Artificial Sequence
  ENSG00000197410_89 (sequence is synthesized)
caatttcttccagccttaatgaaaagttatttcctcttttaatccttatgtgttgctctcaggactcacatttgtatatattaagtagtgtatattctgtcagacctgttgtctgtatga

SEQ ID NO: 716499 - DNA, 120 bp, Artificial Sequence
  ENSG00000197410_90 (sequence is synthesized)
ttagacttccaaaggacacagtgaacttaactgactgccagaatgtttatatggaaacaaaatatagtgtactctggtcacattgctgctgatcacactgctatatcaaaaacaaactag

SEQ ID NO: 716500 - DNA, 120 bp, Artificial Sequence
  ENSG00000197410_91 (sequence is synthesized)
taaaggctaaatggagaatgagtttaggtcagaacatatagcagagaggggaagtctagaggaataaactttcattttaagataaagcaatagttggtggatctgatatatttagaggag

SEQ ID NO: 716501 - DNA, 120 bp, Artificial Sequence
  ENSG00000197410_92 (sequence is synthesized)
tatttctccatttttccccatataccacacctgtagagtttagccataattgaatttcaatgtggagtcttttggaaaactaataaaaaattcagaaggaaatttgtcataactctgtga

SEQ ID NO: 716502 - DNA, 120 bp, Artificial Sequence
  ENSG00000197410_93 (sequence is synthesized)
caatagggagaaacaaataggatttataatgataggtaatataaataattattcatgattcaataaaccagaaatgcatgttcctgatagagggccaggattgatactcgcaatatttat

SEQ ID NO: 716503 - DNA, 120 bp, Artificial Sequence
  ENSG00000197410_94 (sequence is synthesized)
gtggtttgctaccacctgaaacatattatcttggccttctttacaaacagaatggcttttttttcaggtcttgtcttataagtaggtgtgggtaaagacattaaacttcaaaggttaatt

SEQ ID NO: 716504 - DNA, 120 bp, Artificial Sequence
  ENSG00000197410_95 (sequence is synthesized)
tatagcaatgtcttcattttattttcttctagatacagtaacttttttgtgtgaaataatttatccactcaatgtcagtttttaaaatttgtgtagataaaaatcatgtcattagctaat

SEQ ID NO: 716505 - DNA, 120 bp, Artificial Sequence
  ENSG00000197410_96 (sequence is synthesized)
gataaatctcatagagtaatttagcaatatatttttaaatgaagttttttatggaaatgtttctactataaaagttaagaatagaagtcagaagtctttttaccatttgctcacacactt

SEQ ID NO: 716506 - DNA, 120 bp, Artificial Sequence
  ENSG00000197410_97 (sequence is synthesized)
gcagctttaatttaactgtcattagatggagcagtttggcacatggttaaaatgactctgtacaattactattttagaaatatagcagtgctagatggtgctcacatacaatgctctagc

SEQ ID NO: 716507 - DNA, 120 bp, Artificial Sequence
  ENSG00000197410_98 (sequence is synthesized)
cttctttctgataagcctgggaatccctcacagattctcatccctttcaggaaggtggacagcatcctgacgatggtggttcagaagtcctcttcctgtggtcagcatgagggccaggtg

SEQ ID NO: 716508 - DNA, 120 bp, Artificial Sequence
  ENSG00000197410_99 (sequence is synthesized)
ttaggctaacagtttaggaattctaatgtgaaatctaaagggtatcgtgtggctttcttagtagttaggatgggcttctactacagatatagttcctttgtgttcttcttccataggcct

SEQ ID NO: 716509 - DNA, 120 bp, Artificial Sequence
  ENSG00000197410_100 (sequence is synthesized)
catctgtgaaattttgtgacataatttctctttactaaaaaatattgcaaggtgcagtgtttgatgtctggttttgtagataagtaattctacagcttcctatgctgatattttctatta

SEQ ID NO: 716510 - DNA, 120 bp, Artificial Sequence
  ENSG00000197410_101 (sequence is synthesized)
tctatctatgctgactgagattgggaacaaatgtataaagctatattacaaattgtatgaaacatgaaggtttttgaataagcctgaaatcctaggaaaaatcctttaggagtagaaaat

SEQ ID NO: 716511 - DNA, 120 bp, Artificial Sequence
  ENSG00000197410_102 (sequence is synthesized)
ttaaatactatgggactgatatatgatgtttctccttttcttcctggcatctggggaagaagatttcatgacttatgtaaaaaaaaaacccacacatatttaatcatttatgtgttccag

SEQ ID NO: 716512 - DNA, 120 bp, Artificial Sequence
  ENSG00000197410_103 (sequence is synthesized)
tatttattatctctgactcttttgaaaacattgctttgagcatagaaagaaaccctatactatattttcctaattatatatggaagttttcttttcacaatagaattatttctggaaact

SEQ ID NO: 716513 - DNA, 120 bp, Artificial Sequence
  ENSG00000197410_104 (sequence is synthesized)
aagaacattttgttgtttttaattaaacaggttcttcatttacttatgcttaaaaagagttattcatctacctattccctaagttagttatttattactgtgatttatttactcattatg

SEQ ID NO: 716514 - DNA, 120 bp, Artificial Sequence
  ENSG00000197410_105 (sequence is synthesized)
gatgtgattctgtatgttttctagccattgcataacaagagaagacatgtaatagagcttttttaccaatatttaatggatttttaattgatgggtttatcagtctgtatccagtgccac

SEQ ID NO: 716515 - DNA, 120 bp, Artificial Sequence
  ENSG00000197410_106 (sequence is synthesized)
aatgccaccaaacaagtactacaagtgggaatggggttaaaaatgtgaacacgctggttaagtgtttgcaataaatcgtatgtcagctctttcaactagagtgctttttttcctaagtaa

SEQ ID NO: 716516 - DNA, 120 bp, Artificial Sequence
  ENSG00000197410_107 (sequence is synthesized)
acaatataatttgtacatttttccttcaagtttaatattaacttgcctcatatgttctgggttactttgctgatctatgcactggctttagcactctggagggggtacagaacttgttag

SEQ ID NO: 716517 - DNA, 120 bp, Artificial Sequence
  ENSG00000197410_108 (sequence is synthesized)
tggaaaatcatattaagccccaaattcataagctataaaataaaagacagttgtctcttgtggaattttggctgcctgatgaaattctggactttcttgttggcagccttaaaaatactg

SEQ ID NO: 716518 - DNA, 120 bp, Artificial Sequence
  ENSG00000197410_109 (sequence is synthesized)
gtgtaaatcagtaccaaatggatatcaaaattccatgtcctagtagtaatcattgaattggcttccaaaacagattcctgggcaaagaaaaagaaaaatgctgtatctttagggatttga

SEQ ID NO: 716519 - DNA, 120 bp, Artificial Sequence
  ENSG00000197410_110 (sequence is synthesized)
tcatttaactcttttaaaaattattaaaatgcactctacattactggctgcctccatgtattcatattcaatctataatagacgtccagttgagacaggatttgtgtttctcagcacctt

SEQ ID NO: 716520 - DNA, 120 bp, Artificial Sequence
  ENSG00000197410_111 (sequence is synthesized)
gacctgaatctggtcagttctctagatctgcctcccaatttaaggaaaacataagaatagaggaacatattatgctacacgttggagatgcaacagcaaatctagatcatggaaaatgtc

SEQ ID NO: 716521 - DNA, 120 bp, Artificial Sequence
  ENSG00000197410_112 (sequence is synthesized)
aggatacaagttccagtttattcaacaaataaattgcaaggacaaatagagagatgggtggcaggaatccatagattaaagaaatatgcaatatatggactttattttgatcttaatgta

SEQ ID NO: 716522 - DNA, 120 bp, Artificial Sequence
  ENSG00000197410_113 (sequence is synthesized)
aacaagaaaaataaagagtatttatgggatggttgaaaatttgaaaacttactgaatatttggtgatactgtgaaccattattaatttttaaggtataatatggtactgtgatgattgtg

SEQ ID NO: 716523 - DNA, 120 bp, Artificial Sequence
  ENSG00000197410_114 (sequence is synthesized)
ttaaaatatttattttttaaagatgcattttgaaatatatacagaagaaataatatgacttctggaacttacttcaaaaaaaatgggagaagcgaagtatatacatggggaatagatgaa

SEQ ID NO: 716524 - DNA, 120 bp, Artificial Sequence
  ENSG00000197410_115 (sequence is synthesized)
ataagattggccatgagctgatcattgttgaagctaggtgatggactcgtgaaagtttattataccattttgtccacttttttgtatgcattttccataataaaaatttttaaaaagtga

SEQ ID NO: 716525 - DNA, 120 bp, Artificial Sequence
  ENSG00000197410_116 (sequence is synthesized)
gtaagtgcatgggccgttgttgaccaaaatgtcattatgtatgtgacagtgttactggaatgctggtcctggtctagaccccaagagagggttcttggacctcacgcaagaatgaattca

SEQ ID NO: 716526 - DNA, 120 bp, Artificial Sequence
  ENSG00000197410_117 (sequence is synthesized)
gcacagattctctctcttcagcacatggccactgccaggagatggggaaggtggggttgtattcaattcaagactgtccctacactcctcagtgcctcttttggtgatatgaagtaaaaa

SEQ ID NO: 716527 - DNA, 120 bp, Artificial Sequence
  ENSG00000197410_118 (sequence is synthesized)
tgtaggcggtacaatcttgaataatttttttcttctttccacgcaagtcaaaacaagggagataacacaaactgtggcttgctctttgttcttccaacattgtttctgtccatcccacaa

SEQ ID NO: 716528 - DNA, 120 bp, Artificial Sequence
  ENSG00000197410_119 (sequence is synthesized)
ttttttttctgatcacaaaaataataggcattttaaaaagaatgtttaaaataatacagattataatatacaaaatatatgtctcctataacccactcacaaaaacacacacatgtacac

SEQ ID NO: 716529 - DNA, 120 bp, Artificial Sequence
  ENSG00000197410_120 (sequence is synthesized)
acaatttacaaatttttgacaaaaatgcatctttctatatttgttgttatagagcttctttccccacttagtatatactgaacaactttccagataaatggatgccattctgtttcctta

SEQ ID NO: 716530 - DNA, 120 bp, Artificial Sequence
  ENSG00000197410_121 (sequence is synthesized)
aaagacagtttatagtgtttcaacttagatatgttttatgtttacatttgctaccaatttgaaggatttaaaaaatcttgctagtccaaatagtacttgagcaaatagccgtgtgtgact

SEQ ID NO: 716531 - DNA, 120 bp, Artificial Sequence
  ENSG00000197410_122 (sequence is synthesized)
ttttcacacctgtagaggaacctctgcaggataaattcctagaaatgaattacctttccaaagagcttgtcctcctcctagtcccctcctgttccttcctctctcccttccctcaatctc

SEQ ID NO: 716532 - DNA, 120 bp, Artificial Sequence
  ENSG00000197410_123 (sequence is synthesized)
tatggagagtatttgcccttcataggtagatataatagagtaacatcaacataaattgaacttgacttcctcaaatatatttaaaaaaaggtatttgaattattttctgaatatctttcc

SEQ ID NO: 716533 - DNA, 120 bp, Artificial Sequence
  ENSG00000197410_124 (sequence is synthesized)
cttttatctaatgcaagagggatgaaggaagagagtgaaacctgtggcttgctctttgcccattggacattcttttcgtacaccaaaaaaattcttaaaaccgtgtgtccacttttccgc

SEQ ID NO: 716534 - DNA, 120 bp, Artificial Sequence
  ENSG00000197410_125 (sequence is synthesized)
aggctttggagagtggagaaagtaagacattgcacagcagtctctgtagatggagaatatacaatcatgcgtccttaacgatgggaaatgttttgagaaatgcctcattagaaaattttg

SEQ ID NO: 716535 - DNA, 120 bp, Artificial Sequence
  ENSG00000197410_126 (sequence is synthesized)
tcagtgtgcagacatcacagagtgtactcacacgaacctggatggtgtggcctaccagacacctaggctaaatgttacagtcgattgctcctaggctacaaacctgcacagcatattact

SEQ ID NO: 716536 - DNA, 120 bp, Artificial Sequence
  ENSG00000197410_127 (sequence is synthesized)
gcacttaatactgtaggcagttgtaccccaatggtaaggatttatgtatgtgagcacagaaaaggtacaataaaatacggtgtcagaatcttacggaaccatcatagtatatgtgatcca

SEQ ID NO: 716537 - DNA, 120 bp, Artificial Sequence
  ENSG00000197410_128 (sequence is synthesized)
tcattgactgaagtgtcattaggcagtggatgactgtattaacatttcaatttctgagtttccagtgggtccacccttttgacatacagtggttgtcccctctctctttttcagactcct

SEQ ID NO: 716538 - DNA, 120 bp, Artificial Sequence
  ENSG00000197410_129 (sequence is synthesized)
tgagactggatgagataacgaaatcagagaatgaagacggagaaaagaagatgtttactcagcagtttgaaagtactgatgcctgtgtatatgaggtgtatgtgaaaataaattccattg

SEQ ID NO: 716539 - DNA, 120 bp, Artificial Sequence
  ENSG00000197410_130 (sequence is synthesized)
tgaaatctcagagtcagtgtggattgaaaagaggtagtcccgagactgagctctggggtgctatagtgttcagaagccaggaagagaacgcaaaaccagtgaaggaaactgaggtgacag

SEQ ID NO: 716540 - DNA, 120 bp, Artificial Sequence
  ENSG00000197410_131 (sequence is synthesized)
tgagtgctgtcaacttttcagcagacaaggaagtaatgaacagtttagagatgtttttacctctgctaaggcacttcaagaaggttgaaagagatgaggaagctgcagaaaaaaaatttg

SEQ ID NO: 716541 - DNA, 120 bp, Artificial Sequence
  ENSG00000197410_132 (sequence is synthesized)
tagcagaggttggttcatgaggtttaagggaagacgccatctccattacctaaaagtgcaagatgaagcagcaagtgctgatggagaagctgcagcaaggtatgtagcaaatctagctaa

SEQ ID NO: 716542 - DNA, 120 bp, Artificial Sequence
  ENSG00000197415_0 (sequence is synthesized)
gagacgcggctgcagcccacaggactgggcagcagctgcaaggctgcctctgagcatggtcatgggtcccagctgcagtgctctaaagatcaaggattttgccttctattttctatgacc

SEQ ID NO: 716543 - DNA, 120 bp, Artificial Sequence
  ENSG00000197415_1 (sequence is synthesized)
agagattcctgtgcaaagagagagtgtcaatgaagacctcaaagtctggagaaaaatgacctttcatggaataagaagtatacctccttctacatgtttttgtcttactgacctctgata

SEQ ID NO: 716544 - DNA, 120 bp, Artificial Sequence
  ENSG00000197415_2 (sequence is synthesized)
actggaacacatgactctgggtctgtagaaagtcaactgatcaaactcatcctcaccatgcatcaactgttcagactggttttgggacaaaaagatctttcacgagctggggacctcttc

SEQ ID NO: 716545 - DNA, 120 bp, Artificial Sequence
  ENSG00000197415_3 (sequence is synthesized)
tccttagatgactctgagattgaagacagccttacagaagctttggagcaaattaagataattagctcatcttcagattaccaaaccaataacaatgaccaggcagtagttgaaatctgt

SEQ ID NO: 716546 - DNA, 120 bp, Artificial Sequence
  ENSG00000197415_4 (sequence is synthesized)
atcacaagaatcacaacagccatcagagagaccgagtccattgaaaagcatgcaaaggcccttgtggggctctgggactcctgcttggaacataacctgagaccctttgggaaagacgaa

SEQ ID NO: 716547 - DNA, 120 bp, Artificial Sequence
  ENSG00000197415_5 (sequence is synthesized)
gacactcctcatgcaaaaatcgcatctgatatcatgagttgcattttacagaattacaaccgacccccagtgatggcattagccatccccattgcagtgaaattcctccacagaggcaac

SEQ ID NO: 716548 - DNA, 120 bp, Artificial Sequence
  ENSG00000197415_6 (sequence is synthesized)
aaggaactgtgcaggaatatgtctaactacctgtctctggctgcaattaccaaggcagatctcctggctgatcacacggaagttatagtaaagagcatactccaaggtaacaccatgttg

SEQ ID NO: 716549 - DNA, 120 bp, Artificial Sequence
  ENSG00000197415_7 (sequence is synthesized)
ttgagagtgttacctgctgtgtatgaaaagcagcctcagccaattaatagacacctgacagaactcctggccttgatgtctcagctggaacagccagaacagtaccatctactacggctt

SEQ ID NO: 716550 - DNA, 120 bp, Artificial Sequence
  ENSG00000197415_8 (sequence is synthesized)
ttgcatgtagcagcaaagaaaaaacaactcgaggtagttcagaagtgtattcctttcctaattgggcatttgaaggattcaacccataatgacatcatcctaaacatcctcatagagata

SEQ ID NO: 716551 - DNA, 120 bp, Artificial Sequence
  ENSG00000197415_9 (sequence is synthesized)
gcagtctatgagccagtggctttgaacagttttcttccaatgctgaaagagattggtgagagattcccctacctcactggacagatggcaaggatttatggagctgttgggcatgtggat

SEQ ID NO: 716552 - DNA, 120 bp, Artificial Sequence
  ENSG00000197415_10 (sequence is synthesized)
gaagagagagccaggagctgcctgacatacctggtgagccaactggccaacatggagcattcgtttcaccatattctcctgctggagattaaaagcatcaccgacaccttctcctcaatc

SEQ ID NO: 716553 - DNA, 120 bp, Artificial Sequence
  ENSG00000197415_11 (sequence is synthesized)
ttgggccctcagagcagagacatcttccgcatgagcaacagcttcaccgccattgctaaactccttacccgacaactggaaaataccaaggctggaagtggcaggagaaaaatcagcact

SEQ ID NO: 716554 - DNA, 120 bp, Artificial Sequence
  ENSG00000197415_12 (sequence is synthesized)
gaaattgaattccctgagaaactggaagaaaccaagctcatagtaactgaaaatgaagaccatgaaaaactccaagttaaaatccaggcttttgaagacaagataaatgcagggagcaat

SEQ ID NO: 716555 - DNA, 120 bp, Artificial Sequence
  ENSG00000197415_13 (sequence is synthesized)
acccctggctctatcagaagatatagtctgggccaagtttctaaagaagaaagaaaaaacattagatttaacaggtcaaaaagtttggctttccacactatgctcacaaagggtgtgggt

SEQ ID NO: 716556 - DNA, 120 bp, Artificial Sequence
  ENSG00000197415_14 (sequence is synthesized)
tcagatgacggcgaagatgaaaacaggggagacataccagccagcatctctctttcagaaatagacccacttggccaaggaaatgacaagctgccgtttaagacagacactgagagatca

SEQ ID NO: 716557 - DNA, 120 bp, Artificial Sequence
  ENSG00000197415_15 (sequence is synthesized)
cagctgggggagtcttcagtttcatacccaaatattatacatatagactcagagaatttgtcagaaactgttaaagaaaactcccaggaagaaactccagagacaactgcaagtcctata

SEQ ID NO: 716558 - DNA, 120 bp, Artificial Sequence
  ENSG00000197415_16 (sequence is synthesized)
gaataccaagataagctctacttgcacttaaaaaaaaacctcagcaaagtgaaagcatatgccatggaaattggaaagaagattccagtccctgatcagtgtaccattgaagacactgtg

SEQ ID NO: 716559 - DNA, 120 bp, Artificial Sequence
  ENSG00000197415_17 (sequence is synthesized)
atcatgtttctatttcagcagagcctgtttcctgaacccctgtccattcagagtcattctgtgcaattcctcagagctctgtgggagaagacccaggcagggggtgctcacagctttgaa

SEQ ID NO: 716560 - DNA, 120 bp, Artificial Sequence
  ENSG00000197415_18 (sequence is synthesized)
actgccatgatggagtccacgtttccacagcagaaggatctggaccaggtacagctccatctggaagaagtgaggttctttgacgtgtttggcttcagtgaaacagcaggagcatggcaa

SEQ ID NO: 716561 - DNA, 120 bp, Artificial Sequence
  ENSG00000197415_19 (sequence is synthesized)
tgcttcatgtgcaacaatcctgagaaagcaactgttgtaaatcaagatggccagcctctcatagaaggaaaacttaaagagaagcaagtcagatggaagttcatcaaaaggtggaaaaca

SEQ ID NO: 716562 - DNA, 120 bp, Artificial Sequence
  ENSG00000197415_20 (sequence is synthesized)
cgctattttacactggctggaaatcaacttctgtttcaaaaaggaaagtctaaagatgaccctgacgactgcccaatagaactcagcaaagtacagagtgtgaaggctgtggccaagaaa

SEQ ID NO: 716563 - DNA, 120 bp, Artificial Sequence
  ENSG00000197415_21 (sequence is synthesized)
cgcagggaccgctctctcccccgggctttcgaaatcttcacagacaataaaacctatgtctttaaggccaaggatgagaagaatgcagaagaatggctccagtgcatcaacgtggcagtt

SEQ ID NO: 716564 - DNA, 120 bp, Artificial Sequence
  ENSG00000197415_22 (sequence is synthesized)
gcccaagccaaagaaagggaaagtagagaagtaaccacatatctgtagggatttataagtcagccatgacaattatacaccacaggcattgtattatcattgccaatgtcaagaaaaaga

SEQ ID NO: 716565 - DNA, 120 bp, Artificial Sequence
  ENSG00000197415_23 (sequence is synthesized)
gctaaatttaccaagccatgttgttttttactaaataccaatggaattgttgtcctttaagaagaagggcctaaaatggcaggattcttagtaaatgtcatactctaacagctttagtat

SEQ ID NO: 716566 - DNA, 120 bp, Artificial Sequence
  ENSG00000197415_24 (sequence is synthesized)
tgacttcagaatatatctgatgcccacaaaaataaaataaaataaaaggagctacagagtatgccctcagatagtgtggggccaggaagggaaaagtcactgataaaagaacttctgtag

SEQ ID NO: 716567 - DNA, 120 bp, Artificial Sequence
  ENSG00000197415_25 (sequence is synthesized)
atatgtcatttaaaactgtgagaaaacaacatgaaaagatgcctgaactctccatcctgaggaaagattagcacttctgatgaaaatcacagtctgtcaaaggtattaaaagaaaacttt

SEQ ID NO: 716568 - DNA, 120 bp, Artificial Sequence
  ENSG00000197415_26 (sequence is synthesized)
aaaaaaaaaaacctttagaaacgttgaactaatgtacactgagaaaaaccatataacttacttatagacatataattacatgatcctctcttactacaactgaggctaacacatggtaaa

SEQ ID NO: 716569 - DNA, 120 bp, Artificial Sequence
  ENSG00000197415_27 (sequence is synthesized)
atggttcccaaatcaagccagttatgtcattaaatacttgtctttcagaattacttatttaattattccatttaagttcatataatataatctacagtttagatacttggacatatatcc

SEQ ID NO: 716570 - DNA, 120 bp, Artificial Sequence
  ENSG00000197415_28 (sequence is synthesized)
tgcccaaggcactaagtgtaatataggaaaaggatagaaagccattttctctatcttcaaaataatgtgccatctccgttaaaattaagactttaaagttctataattttttctttgtat

SEQ ID NO: 716571 - DNA, 120 bp, Artificial Sequence
  ENSG00000197415_29 (sequence is synthesized)
tcaactttttaatacctccaaattacaaacatctatttttttcactacatagatatataattacactatgatagacagaattctagagtgattctcaataatccatgccttggtataatc

SEQ ID NO: 716572 - DNA, 120 bp, Artificial Sequence
  ENSG00000197415_30 (sequence is synthesized)
ctctcccccattgagtgtgggtgggacatgtaacctgcttctaaccaacagaatatggcaaaagtgatgggatcatctctcccatattatgttatgttatataacaaaagtgaagagaag

SEQ ID NO: 716573 - DNA, 120 bp, Artificial Sequence
  ENSG00000197415_31 (sequence is synthesized)
ttgcagatatacataaggtttctaatcagctgactttgagttaatcaaagagatcccctgggtgggcctgacctaatcagactagtcctttaaaagagagtgaaccagtcagagactctc

SEQ ID NO: 716574 - DNA, 120 bp, Artificial Sequence
  ENSG00000197415_32 (sequence is synthesized)
tctcctattagccttaaataagcaagctgccatgagctctacggctgcaaggaaataagttttgtgaacaaccatgtgatcttggaagaagcatctgaacctcagataaaagcccagccc

SEQ ID NO: 716575 - DNA, 120 bp, Artificial Sequence
  ENSG00000197415_33 (sequence is synthesized)
cagccaacgccttgcttgcagctttgtgaaactctgagcagaggacccagctaaatcacgtttggactcctgacccacagaaactttcagataataaatgtatgctgttttaaatctaaa

SEQ ID NO: 716576 - DNA, 120 bp, Artificial Sequence
  ENSG00000197415_34 (sequence is synthesized)
attcttccacccggcaccggctccgcaatgaacaacttcaggttcactgagctgagcggattccactcgctgtgccctcggagcctgcctgaatctcccgcccagtctcaaaccatgcag

SEQ ID NO: 716577 - DNA, 120 bp, Artificial Sequence
  ENSG00000197415_35 (sequence is synthesized)
tagacacctgacagaactcctggccttgatgtctcagctggaacagccagaacagtaccatctactacggcttttgcatgtagcagcaaagaaaaaacaactcgagcttgcaaataggaa

SEQ ID NO: 716578 - DNA, 120 bp, Artificial Sequence
  ENSG00000197415_36 (sequence is synthesized)
ggactcaatcagtatttgtgaatgagtgaattaatggataaatataaagagaagggagtgaacagatctgtgggattcttgggcattggaatcaacaggacatgatgattgcttggataa

SEQ ID NO: 716579 - DNA, 120 bp, Artificial Sequence
  ENSG00000197415_37 (sequence is synthesized)
caaactccatggtttgatctttaagaagagcagagtctcctgtgggtttgcaatcttcagtccagaatttggccatgggggtagagacggcctggaatcacacaagttattgattggctt

SEQ ID NO: 716580 - DNA, 120 bp, Artificial Sequence
  ENSG00000197415_38 (sequence is synthesized)
atgcctcaccttctgtgcttgcataaagccaggtgtaagaactgcagggctggctactgggaaatgacagggtgtgcctgtctttcaaatgagtgcccatctgggtgagcagactgtttt

SEQ ID NO: 716581 - DNA, 120 bp, Artificial Sequence
  ENSG00000197415_39 (sequence is synthesized)
aagtggatgcaattgtttaggagaagagtgaaggagaagagaagagagcccgaaactaaacagggaggaatccaccatttagaagtctggcaggcaaagaggacaaggattaccaaacca

SEQ ID NO: 716582 - DNA, 120 bp, Artificial Sequence
  ENSG00000197415_40 (sequence is synthesized)
tgtgtactgagtggaacacgtcactcagtggggtatgaaaaacctgtcttcatttgcttccaaaagcaagaaatgtcttttgttagataaaatacatcagaaaatgtgtaatgacttctt

SEQ ID NO: 716583 - DNA, 120 bp, Artificial Sequence
  ENSG00000197415_41 (sequence is synthesized)
aaatgtgaacatgatttggataacaagcataaatactagcataaaaagccaaatagtacacctctgttaattgttacaacatttgaatgaataagaagctcaaattagttcatgcaaaat

SEQ ID NO: 716584 - DNA, 120 bp, Artificial Sequence
  ENSG00000197415_42 (sequence is synthesized)
cattaagtacaaaagtcctgaggttgtaggctggagtttctgaggtcggtgtggctgtagtgaagggaacaatgtggaaagggagatgaggttaggagagaagtggaggctggattgttg

SEQ ID NO: 716585 - DNA, 120 bp, Artificial Sequence
  ENSG00000197415_43 (sequence is synthesized)
gagtcttgggcagccactggagagttctgagcagaagtaacatggtctaatttttctattcctgttttgggaacagtctgtggaaaggcaagagtgaaatcagaaaggccagttgagtgg

SEQ ID NO: 716586 - DNA, 120 bp, Artificial Sequence
  ENSG00000197415_44 (sequence is synthesized)
gatgcaattgtttaggagaagagtgaaggagaagagaagagagcccgaaactaaacagggaggaatccaccatttagaagtctggcaggcaaagaggacaaggtgtaatatctggttgct

SEQ ID NO: 716587 - DNA, 120 bp, Artificial Sequence
  ENSG00000197415_45 (sequence is synthesized)
gttgccattctgccaccaagaaacctgatgacttcatttgggcctcttcaaccagctgcccctaaagctagcaagctccacccttcagtgtccactgataaattccttaatagcagagtg

SEQ ID NO: 716588 - DNA, 120 bp, Artificial Sequence
  ENSG00000197415_46 (sequence is synthesized)
ggttgttaggcaaatctaattctttcaaactacagatctgctcagagaaatctgtaaatctagtgtagaaataagtgaagctttgcgtcaattgttaggtctaagcagaagtttgggaga

SEQ ID NO: 716589 - DNA, 120 bp, Artificial Sequence
  ENSG00000197415_47 (sequence is synthesized)
ggaagcaagacctagagtattagaagcaaattaatttctctgttttgctgccagttgacctgtgaacatgcaaaaggttacttaatctggctgtctgtgtcccttcccaaggcagatgaa

SEQ ID NO: 716590 - DNA, 120 bp, Artificial Sequence
  ENSG00000197415_48 (sequence is synthesized)
ttacttagactcattaaaagaattgtaagcattcttccaaatctgtgtttctcagtttgaagaactgcatttccgtgcttctggtcacctgttcaactaccaactgtggagatcttatct

SEQ ID NO: 716591 - DNA, 120 bp, Artificial Sequence
  ENSG00000197415_49 (sequence is synthesized)
tgtaaatctagtgtagaaataagtgaagctttgcgtcaattgttaggtctaagcagaagtttgggagagagaagaaaagttactcatttgcctgattccgcacggaaacagagcgttgca

SEQ ID NO: 716592 - DNA, 120 bp, Artificial Sequence
  ENSG00000197415_50 (sequence is synthesized)
gctttggagcaaattaagataattagctcatcttcaaaacgtagaacaggaagggatcgtctaaattgccccttccaacttccagcacagaagattgctgaaaaataggtggcttctcct

SEQ ID NO: 716593 - DNA, 120 bp, Artificial Sequence
  ENSG00000197415_51 (sequence is synthesized)
tggatgcaattgtttaggagaagagtgaaggagaagagaagagagcccgaaactaaacagggaggaatccaccatttagaagtctggcaggcaaagaggacaaggctttgtgtttcacct

SEQ ID NO: 716594 - DNA, 120 bp, Artificial Sequence
  ENSG00000197416_0 (sequence is synthesized)
ttcagggaaaaccagcatacacatgaaactactgttctttgagatcaacttatctcagacagaatgattgaccagctccaaggaacatggaagtccatttcttgtgaaaattccgaagac

SEQ ID NO: 716595 - DNA, 120 bp, Artificial Sequence
  ENSG00000197416_1 (sequence is synthesized)
tacatgaaggagctgggtataggaagagccagcaggaaactgggccgtttggcaaaacccactgtgaccatcagtacagatggagatgtcatcacaataaaaaccaaaagcatctttaaa

SEQ ID NO: 716596 - DNA, 120 bp, Artificial Sequence
  ENSG00000197416_2 (sequence is synthesized)
taaagtaaccttagataaggagtccctgattcaagttcaggactgggatggcaaagaaaccaccataacgagaaagctggtggatgggaaaatggtggtggaaagtactgtgaacagtgt

SEQ ID NO: 716597 - DNA, 120 bp, Artificial Sequence
  ENSG00000197416_3 (sequence is synthesized)
tatctgtacacgaacatacgagaaagtatcatcaaactcagtctcaaactcttaaggctttctcaagctgtcatccaaactactgaggttgtttaaataaaactccaaagtaaaatatta

SEQ ID NO: 716598 - DNA, 120 bp, Artificial Sequence
  ENSG00000197417_0 (sequence is synthesized)
gcagactggagctgcgcgggtcagggagataatggctgcgcggccgatcaccctcggcattgacctgggcaccacatctgtgaaggcagctctgctgagggccgcgcccgacgacccatc

SEQ ID NO: 716599 - DNA, 120 bp, Artificial Sequence
  ENSG00000197417_1 (sequence is synthesized)
cgggttcgcagtgctggcgagctgtgcccgtgctgcgcgggcagaggcggcggtcgagagcgcggtggccgggccccaggggcgggagcaggatgtgagtagaatcctccaagccctaca

SEQ ID NO: 716600 - DNA, 120 bp, Artificial Sequence
  ENSG00000197417_2 (sequence is synthesized)
cgagtgccttgctgcccttccccgaccccagctccggagcgtcgtgggcatcggggtgtcgggccagatgcatggagtcgtgttttggaaaacaggccaaggctgtgaatggacagaggg

SEQ ID NO: 716601 - DNA, 120 bp, Artificial Sequence
  ENSG00000197417_3 (sequence is synthesized)
agggattaccccggtgttcgagccccgagctgttagccacctggtcacgtggcaggatggccgatgtagcagcgaattcctggcctctctgccccagccgaagtctcatctcagtgtggc

SEQ ID NO: 716602 - DNA, 120 bp, Artificial Sequence
  ENSG00000197417_4 (sequence is synthesized)
cacgggcttcggctgtgcaaccatcttctggcttttgaaatatcgcccagagttcctgaagtcctacgacgcagccggtaccatccacgactatgtggttgccatgctgtgtggcttgcc

SEQ ID NO: 716603 - DNA, 120 bp, Artificial Sequence
  ENSG00000197417_5 (sequence is synthesized)
aagacctctgatgtccgaccagaatgctgccagctggggctatttcaacacgcagagccaaagctggaacgtagagacactgaggagctcgggttttcctgtccacctgctcccagacat

SEQ ID NO: 716604 - DNA, 120 bp, Artificial Sequence
  ENSG00000197417_6 (sequence is synthesized)
cgccgagcctggcagtgtggcgggcagaacttcccacatgtggtttgaaatcccaaaggggacgcaggtgggagtggccttgggtgatttacaggcctctgtctattcctgcatggccca

SEQ ID NO: 716605 - DNA, 120 bp, Artificial Sequence
  ENSG00000197417_7 (sequence is synthesized)
gaggacagatgcagttctcaacatcagcacctcggttcagctggcagcctccatgccttcaggattccagcctgcacagactccagaccctacggccccagtcgcctacttcccatactt

SEQ ID NO: 716606 - DNA, 120 bp, Artificial Sequence
  ENSG00000197417_8 (sequence is synthesized)
caacaggacctacctgggggtggccgcgtcactcaacgggggcaatgtgctggccacgttcgtccacatgctggttcagtggatggcagatctaggcctggaggttgaagaatccactgt

SEQ ID NO: 716607 - DNA, 120 bp, Artificial Sequence
  ENSG00000197417_9 (sequence is synthesized)
gtattcacgcatgattcaggcagctgtgcagcagagagatacccacctgaccatcaccccgacagtgctgggggagaggcacctgccggaccagctggcctcagtgaccagaatctcctc

SEQ ID NO: 716608 - DNA, 120 bp, Artificial Sequence
  ENSG00000197417_10 (sequence is synthesized)
ctccgacctctccctggggcacgtgacccgggctctgtgccgaggcattgttcagaacctgcactccatgcttccgattcagcagctccaggagtggggcgtggagagggtgatgggcag

SEQ ID NO: 716609 - DNA, 120 bp, Artificial Sequence
  ENSG00000197417_11 (sequence is synthesized)
tgggagtgcgctgtccaggaatgacgtgctgaagcaggaggtgcagagggctttccctttgcccatgtcctttgggcaggatgtggatgcagctgtcggggcagctctggtcatgctccg

SEQ ID NO: 716610 - DNA, 120 bp, Artificial Sequence
  ENSG00000197417_12 (sequence is synthesized)
gagacacctcaaccagaaggaatcttagacagcaaactctttcgccaaacgactgctgtgaattttacctgattaacattcctgacaccatctgtgggtcatcctttccctggaccgttc

SEQ ID NO: 716611 - DNA, 120 bp, Artificial Sequence
  ENSG00000197417_13 (sequence is synthesized)
agtggacagctttcaagcagtgcttgttgtgaggtcccatctcggccaagaacttaccttcagaacatactctaataatgcagccaggagccgtcagccagatcccaaatgagtgccttc

SEQ ID NO: 716612 - DNA, 120 bp, Artificial Sequence
  ENSG00000197417_14 (sequence is synthesized)
cgaaattgacccacctgggagctatttacaaatgtccatgtgggagagagagagcatgagagcacagtagcccagcctgctggtcagcaggctcatctgtggttcacctgtagacagaga

SEQ ID NO: 716613 - DNA, 120 bp, Artificial Sequence
  ENSG00000197417_15 (sequence is synthesized)
ggaaaagagaactgccccatgcccagcttgtgattatcgtttttggagacctgaagcccacactcgggtcgtatggacttctggaaaagttcttgtctcctggactgaaccatgtgaccg

SEQ ID NO: 716614 - DNA, 120 bp, Artificial Sequence
  ENSG00000197417_16 (sequence is synthesized)
gaggcccctttcctagtctcatcctcccctggctgcagatgcttagctgggccagggattgacccaagcgcgatgcagcaggcaggctcagaagacgatgcggggctgtgtgccggcctt

SEQ ID NO: 716615 - DNA, 120 bp, Artificial Sequence
  ENSG00000197417_17 (sequence is synthesized)
cttgctgcatgtactcagcctcaggagagcttgctgcacccaggccgcccaggtcttcacagcacaactgcctggaaggcaggttgcgagaaggagaggcggatggcatgagcagcaagg

SEQ ID NO: 716616 - DNA, 120 bp, Artificial Sequence
  ENSG00000197417_18 (sequence is synthesized)
gggaccgatgctgtgcagctcacaccactccagaacctgacaaggcaccagcaggaccccttgccaggagcatgtctgtgcagcagtgtttttgcccctgcacattccagaagccctcat

SEQ ID NO: 716617 - DNA, 120 bp, Artificial Sequence
  ENSG00000197417_19 (sequence is synthesized)
gggaagggatgcagccaggcagactcctgccagatggggcaggtagtttattcaaagagaactctgtatcccataggcccaggctctcctttcgcttggcgtgggctttgctggcccagt

SEQ ID NO: 716618 - DNA, 120 bp, Artificial Sequence
  ENSG00000197417_20 (sequence is synthesized)
gtgtgctcctggctcagcagaaacatccatttgagttggcatccctgtagggatcccagagcgttgtaagccttcttgtgattggtagggatggctgtggggtggcttccaggagggggc

SEQ ID NO: 716619 - DNA, 120 bp, Artificial Sequence
  ENSG00000197417_21 (sequence is synthesized)
caccattgccgcatctacttctagactcccaaaggagcccaggctcaggcaggcctggcccagagtcacgctggcaaccacgagtttgggaagcagtcgtattctctctctctctctctc

SEQ ID NO: 716620 - DNA, 120 bp, Artificial Sequence
  ENSG00000197417_22 (sequence is synthesized)
tctctctctcagtatccatgacaggtatgaaacatattgtctctttataaatgtcattttacaaattatgtgattatctggaagctctaagatgagagcaaatgcctgatcactctggcc

SEQ ID NO: 716621 - DNA, 82 bp, Artificial Sequence
  ENSG00000197417_23 (sequence is synthesized)
gaagctctaagatgagagcaaatgcctgatcactctggccaaatgtcagatactaaagcccattcttggccgggcatgtagt

SEQ ID NO: 716622 - DNA, 120 bp, Artificial Sequence
  ENSG00000197417_24 (sequence is synthesized)
gtgacagagcaagactctgtctcataaataaatacaaagcccattcttccagagtcttgtgccttaaataaaacacacctctctgctgtgggaagactgtgcaatggcacagccgcagag

SEQ ID NO: 716623 - DNA, 120 bp, Artificial Sequence
  ENSG00000197417_25 (sequence is synthesized)
ctctgctgtgggaagactgtgcaatggcacagccgcagagcttggtttgggaggttgaagtgctctggggagaattcgtagatcatcctcagaaaagccttgccctggtgttctaccaga

SEQ ID NO: 716624 - DNA, 120 bp, Artificial Sequence
  ENSG00000197417_26 (sequence is synthesized)
aaaacgtctcccaatcacccaggaaagctgtccacagtagtccccccttatccacggtgtcactttccatgggttcagttatctgcggtcaaccacggtctgacaatattaaatggaaaa

SEQ ID NO: 716625 - DNA, 120 bp, Artificial Sequence
  ENSG00000197417_27 (sequence is synthesized)
ttcttcaaacagttcccaagttttcccttgtgcattgttctgagcagtgtgatggagagtctctgccgtgccatctgggatgcaaaccgtccctgtgttccccacgtccaggccgtagat

SEQ ID NO: 716626 - DNA, 120 bp, Artificial Sequence
  ENSG00000197417_28 (sequence is synthesized)
gctccccgccggtcagtcacttagtcgtcagatcgcccgtcctggtatcacagtgcttctgttcaggtcagtctttttttacttcattagggccccaaagcaccagagtagtgatgctgg

SEQ ID NO: 716627 - DNA, 120 bp, Artificial Sequence
  ENSG00000197417_29 (sequence is synthesized)
tagtgatgctggctgttcggatatgccaaagagaaaccgtaaggtgcttcctttaagtgaaaagatgggaagaaaacagtcatatgctgaatcttctatctgtgaaattctaaagaaaaa

SEQ ID NO: 716628 - DNA, 120 bp, Artificial Sequence
  ENSG00000197428_0 (sequence is synthesized)
cctttctctcctctgagccacaactaaatgatgtttctacttttccctttctactttcctagaccctggattttgtatgcagaagccccagctcttggtccctatcatagccacttcaaa

SEQ ID NO: 716629 - DNA, 120 bp, Artificial Sequence
  ENSG00000197428_1 (sequence is synthesized)
tggaaatctggtccacgcagcatacttccttttggtgggtatccctggcctggggcctaccatacacttttggctggctttcccactgtgttttatgtatgccttggccaccctgggtaa

SEQ ID NO: 716630 - DNA, 120 bp, Artificial Sequence
  ENSG00000197428_2 (sequence is synthesized)
cctgaccattgtcctcatcattcgtgtggagaggcgactgcatgagcccatgtacctcttcctggccatgctttccactattgacctagtcctctcctctatcaccatgcccaagatggc

SEQ ID NO: 716631 - DNA, 120 bp, Artificial Sequence
  ENSG00000197428_3 (sequence is synthesized)
cagtcttttcctgatgggcatccaggagatcgagttcaacatttgcctggcccagatgttccttatccatgctctgtcagccgtggagtcagctgtcctgctggccatggcttttgaccg

SEQ ID NO: 716632 - DNA, 120 bp, Artificial Sequence
  ENSG00000197428_4 (sequence is synthesized)
cagggtgtactgtggccaagattggactatctgccctgaccagggggtttgtattcttcttcccactgcccttcatcctcaagtggttgtcctactgccaaacacatactgtcacacact

SEQ ID NO: 716633 - DNA, 120 bp, Artificial Sequence
  ENSG00000197428_5 (sequence is synthesized)
ccttctgtctgcaccaagatattatgaagctgtcctgtactgacaccagggtcaatgtggtttatggactcttcatcatcctctcagtcatgggtgtggactctctcttcattggcttct

SEQ ID NO: 716634 - DNA, 120 bp, Artificial Sequence
  ENSG00000197428_6 (sequence is synthesized)
catatatcctcatcctgtgggctgttttggagctgtcctctcggagggcagcactcaaggctttcaacacctgcatctcccacctctgtgctgttctggtcttctatgtacccctcattg

SEQ ID NO: 716635 - DNA, 120 bp, Artificial Sequence
  ENSG00000197428_7 (sequence is synthesized)
ggctctcggtggtgcataggctgggtggtcccacctccctcctccatgtggttatggctaatacctacttgctgctaccacctgtagtcaacccccttgtctatggagccaagaccaaag

SEQ ID NO: 716636 - DNA, 120 bp, Artificial Sequence
  ENSG00000197428_8 (sequence is synthesized)
agatctgttcaagggtcctctgtatgttctcacaaggtggcaagtgagacaccttagtgtctcgcttctactactactacagaagatgggaatattaggatcctattgaatgccttggtg

SEQ ID NO: 716637 - DNA, 120 bp, Artificial Sequence
  ENSG00000197428_9 (sequence is synthesized)
caggctcagcccagggaggttaggcaacgggagggtccgcagagacaggcacagaaggctcattgcataaggaagccgggacttgatcagtcagcttggctgcttggagaggtcttctag

SEQ ID NO: 716638 - DNA, 120 bp, Artificial Sequence
  ENSG00000197428_10 (sequence is synthesized)
tgtacaccttttccagatcacagtagcccggttcctggaccttgttcctacacagaggaatttcttcaagcctgtgagacccgttccaagctttgcctatcctttgtcccaggacaggac

SEQ ID NO: 716639 - DNA, 120 bp, Artificial Sequence
  ENSG00000197428_11 (sequence is synthesized)
tggacatcctggagaatgactgcactagtccctctgctatggtggtcttgccttctccttctctctcagctagaaaatacatctagttttgacatggggaggctgtaaagatcacacctc

SEQ ID NO: 716640 - DNA, 120 bp, Artificial Sequence
  ENSG00000197428_12 (sequence is synthesized)
atggttcattccagttttgaagtatgattttaatgttcttgcccccatgtgcccatgttggtgaatttgcatggactataaacgttattgcaaataccctaaagtggttacccagccata

SEQ ID NO: 716641 - DNA, 120 bp, Artificial Sequence
  ENSG00000197428_13 (sequence is synthesized)
aagtttctgtatgcaagagggtgtgttggcagatttgtgaaatctgcccatttgcatctgtatggctctatatgactatttgtccataagggtgccatgtattctggttgtgggtgtgaa

SEQ ID NO: 716642 - DNA, 120 bp, Artificial Sequence
  ENSG00000197428_14 (sequence is synthesized)
tgtgtgggtgtgtttatgtggacacttgcttttcagtgtgcgtatatgtgagagagagggtgcacacatggaatacgtactggttgtgtcctggtgagtgtggtagctatgtcctggcac

SEQ ID NO: 716643 - DNA, 120 bp, Artificial Sequence
  ENSG00000197428_15 (sequence is synthesized)
atgtatgtttcatgagacgtgtctctgattgcgcatttgtatttctgtggtatctgttagttggtatatgatatgtgtctacgtgagaatgctggtgtctgtatctgcatggtgggcagt

SEQ ID NO: 716644 - DNA, 120 bp, Artificial Sequence
  ENSG00000197428_16 (sequence is synthesized)
acctttatgtgtatctggtaagaatgctgcctctaccttttcttcctatttgtactatgtgaatgtggtgcatgaatgtgtggaatgtgtggaatgtgtagtattgggatgcctgtatct

SEQ ID NO: 716645 - DNA, 120 bp, Artificial Sequence
  ENSG00000197428_17 (sequence is synthesized)
ttcagcgtgtttgggtgtatgtccactgtgcataatatttgagatgtaaaaccattttgtgcggtatatgtgttattagttgtaagtcggtgaaatgtacatctgaattctgtgtgcata

SEQ ID NO: 716646 - DNA, 120 bp, Artificial Sequence
  ENSG00000197428_18 (sequence is synthesized)
ttgttggtactgatgctattttcgtgcatatgtctagtgtatatgttttaaggcaaactttctttgtgtgttgggtgtgtatgtgacacgaatggggacagcatctgtatttctgagcat

SEQ ID NO: 716647 - DNA, 120 bp, Artificial Sequence
  ENSG00000197428_19 (sequence is synthesized)
ggattgatgtgtggtgtctgtatgtatcttggaatggaggagggagattgaagaagtctggctgtgagcagcagaaataatttccaaagttgagtgacatgactctaagatgcccagttt

SEQ ID NO: 716648 - DNA, 120 bp, Artificial Sequence
  ENSG00000197428_20 (sequence is synthesized)
ctcggcctggggtcagcctgggtgatagctcagtctgtcagaatgaaaggaaacacggtgcttccttgctccaccttttcacaggccagaccacaccttcttcatcctgaacacaaggat

SEQ ID NO: 716649 - DNA, 120 bp, Artificial Sequence
  ENSG00000197428_21 (sequence is synthesized)
ttcaagggcttttgttacctcttcctacgtttcctgcctctgctatccgaggcactggcctccctaaaccctgccctcctgcctcaatagcaagtcatggtatcctcacctctcccttcc

SEQ ID NO: 716650 - DNA, 85 bp, Artificial Sequence
  ENSG00000197428_22 (sequence is synthesized)
gcctcaatagcaagtcatggtatcctcacctctcccttccctttttggcttatctgccaaacatgtataaaagtccttggtttgt

SEQ ID NO: 716651 - DNA, 120 bp, Artificial Sequence
  ENSG00000197428_23 (sequence is synthesized)
ttggttgtagggagtttctcctaatccctctgggaaagcaagggtggaggggaagccagtcaatctcccttctgttgccgcatggaaactcccttaaggcaggaagctgaaaaaactgta

SEQ ID NO: 716652 - DNA, 120 bp, Artificial Sequence
  ENSG00000197428_24 (sequence is synthesized)
gcattcacctcattattcaccttgtctcatgtctcactgtccttccacatgtctcattgttactccatattggatggaagtagaagtccctttggtattttttaaagtctttgccatgtc

SEQ ID NO: 716653 - DNA, 120 bp, Artificial Sequence
  ENSG00000197428_25 (sequence is synthesized)
taagttaatgaggttaatggaggcagcagagatggctccagggttctgatagcaagtgtcaggctgcgtgctctgtaggcaccagaaactgttgtcaccagtaattttgatgtggtctga

SEQ ID NO: 716654 - DNA, 120 bp, Artificial Sequence
  ENSG00000197428_26 (sequence is synthesized)
gttagaatggtctgatttgccatgatctatttaacatagcttgatttagcgtgtcctgtgttctgaatttaaaactcacagttgtgaaactgatcagtaaaaaataaggggagaccaact

SEQ ID NO: 716655 - DNA, 120 bp, Artificial Sequence
  ENSG00000197429_0 (sequence is synthesized)
ggtcgcgactgcgcgcgcagggcctgagcgggcgccggagggaaggggaagcggcggggtagtaacagattatgggcaacagtccttttaattaatctaccgtcatcatggctaatgagg

SEQ ID NO: 716656 - DNA, 120 bp, Artificial Sequence
  ENSG00000197429_1 (sequence is synthesized)
actgtcccaaggctgctgatagtcctttttcatcagataaacatgcccaactcatcttggcccaaatcaataagatgagaaatggacagcatttctgtgatgtgcagctgcaagttggac

SEQ ID NO: 716657 - DNA, 120 bp, Artificial Sequence
  ENSG00000197429_2 (sequence is synthesized)
aggaaagttttaaagctcatcggctggttttggctgccagcagtccttactttgcagctttgttcactggaggaatgaaagagtcctcaaaagatgttgtaccgattctaggaattgaag

SEQ ID NO: 716658 - DNA, 120 bp, Artificial Sequence
  ENSG00000197429_3 (sequence is synthesized)
caggaatctttcagatacttctagatttcatttacacaggtatagtgaacataggtgtgaataatgtccaggagttgattattgcagcagacatgctacagttgactgaagttgttcatc

SEQ ID NO: 716659 - DNA, 120 bp, Artificial Sequence
  ENSG00000197429_4 (sequence is synthesized)
tttgctgtgaatttctgaaaggacaaattgatccactgaactgcattggaatttttcagttctctgagcaaattgcctgccatgatctcttggaattctcagaaaactacattcatgtcc

SEQ ID NO: 716660 - DNA, 120 bp, Artificial Sequence
  ENSG00000197429_5 (sequence is synthesized)
atttcttggaggttcatagtggagaagagttcctggcacttacgaaagatcagctgatcaaaattttgcgaagtgaagagcttagcattgaggatgaataccaggtcttcttagctgcaa

SEQ ID NO: 716661 - DNA, 120 bp, Artificial Sequence
  ENSG00000197429_6 (sequence is synthesized)
tgcaatggattctgaaagatttgggaaaaagaagaaaacatgtggtggaagtgctagacccaattcgattccctttattacctcctcagagacttttaaagtatatagaaggagtatccg

SEQ ID NO: 716662 - DNA, 120 bp, Artificial Sequence
  ENSG00000197429_7 (sequence is synthesized)
attttaatcttcgtgttgcattgcaaacacttctgaaagagtactgtgaagtatgcaaatctcccaaagagaacaagttttgtagttttctgcagacatctaaggttcgacctcggaaga

SEQ ID NO: 716663 - DNA, 120 bp, Artificial Sequence
  ENSG00000197429_8 (sequence is synthesized)
aagcaagaaagtacctgtatgcagtaggtggatatactcggttgcaggggggtcgctggagtgatagcagagccctcagctgtgtagaacgttttgacacctttagccagtactggacca

SEQ ID NO: 716664 - DNA, 120 bp, Artificial Sequence
  ENSG00000197429_9 (sequence is synthesized)
ctgtgtcttcacttcatcaggctcgaagtgggctgggagtaacagttctgggagggatggtctacgctattggaggtgaaaaggattcaatgatttttgattgtactgaatgctatgatc

SEQ ID NO: 716665 - DNA, 120 bp, Artificial Sequence
  ENSG00000197429_10 (sequence is synthesized)
cagttactaaacagtggacaactgtagcttcgatgaatcatccccgctgcggcttaggagtgtgtgtgtgttatggggctatctatgctttgggtggatgggttggagctgagataggga

SEQ ID NO: 716666 - DNA, 120 bp, Artificial Sequence
  ENSG00000197429_11 (sequence is synthesized)
acaccattgaacgatttgatcctgatgaaaataaatgggaagtagttggtaacatggctgtgtcacgctactactttgggtgctgtgaaatgcaaggtttaatttatgtaattgggggca

SEQ ID NO: 716667 - DNA, 120 bp, Artificial Sequence
  ENSG00000197429_12 (sequence is synthesized)
atgactgcatctattctgttggaggatggaatgagacccaagatgctcttcatactgtagaaaaatattcctttgaagaggaaaagtgggttgaagttgcctcaatgaaagtgcctagag

SEQ ID NO: 716668 - DNA, 120 bp, Artificial Sequence
  ENSG00000197429_13 (sequence is synthesized)
caggcatgtgtgttgtggcagtcaatggtcttctgtatgtttctggaggtcgatcttccagccatgattttttggctccaggtaccttggactcagttgaagtttataaccctcattcag

SEQ ID NO: 716669 - DNA, 120 bp, Artificial Sequence
  ENSG00000197429_14 (sequence is synthesized)
atacatggacagaaattggtaacatgatcaccagtcgttgtgaagggggcgttgctgtgctatgaaatataaagcataacagagcacaaggaacattttgaaaatgcaggacctgacctt

SEQ ID NO: 716670 - DNA, 120 bp, Artificial Sequence
  ENSG00000197429_15 (sequence is synthesized)
ttgcaaagcaaacatagatttggtgataagaccctctgattctgtgagttttccatgtatttggtagataaatgactaacgaggctgggcgcagtggcctcatgcctataatcccagcac

SEQ ID NO: 716671 - DNA, 120 bp, Artificial Sequence
  ENSG00000197429_16 (sequence is synthesized)
aggcagaaggatcacttgagcccaggaatttgaggttgtagtaagctacgatcatgccactgcactccactctgggcaacagaatgagatcctgtctcttaaagaaaaaaaataaactca

SEQ ID NO: 716672 - DNA, 120 bp, Artificial Sequence
  ENSG00000197429_17 (sequence is synthesized)
aaaataaactcaagaatgatttttctaaaaatatgagtgagaatggatatggaatatatcccaattaataaagagctcacacagatttgccaggtttactaataatagaaatgccattta

SEQ ID NO: 716673 - DNA, 120 bp, Artificial Sequence
  ENSG00000197429_18 (sequence is synthesized)
tgctgtagaattctccagtttaagtgtagacaactcctattttacaaatttgtagaaattatttactagaagcttcctggcaaatagtccctttagctacttctccagtgcagtataaat

SEQ ID NO: 716674 - DNA, 120 bp, Artificial Sequence
  ENSG00000197429_19 (sequence is synthesized)
tgtaacataaaactttatgtgatataggaatagtgtcaatgacacagtttaaagacctctatattcacaattatatccagagcataattttccatggccatagtttgagccacagagaaa

SEQ ID NO: 716675 - DNA, 120 bp, Artificial Sequence
  ENSG00000197429_20 (sequence is synthesized)
gccaatgaaatagattcctacttttatttaatgccaagagttttcactagccccaaactttttattggcagcagatatcctaggaggggtgtttgggaaatatctagctattttaataga

SEQ ID NO: 716676 - DNA, 120 bp, Artificial Sequence
  ENSG00000197429_21 (sequence is synthesized)
tagatacctttttgcttgatgataagtttttgcttgctcatattttttgtcttgatcctgagaatgcaagtaaggaattaataggaggttcttagtgaccagatgttgtaatgggctata

SEQ ID NO: 716677 - DNA, 78 bp, Artificial Sequence
  ENSG00000197429_22 (sequence is synthesized)
ataggaggttcttagtgaccagatgttgtaatgggctatacagtccagcaggcagtatgcacctagaaatttctccct

SEQ ID NO: 716678 - DNA, 120 bp, Artificial Sequence
  ENSG00000197429_23 (sequence is synthesized)
caggagttcgagactagcctgggcaacgtgatgagactccgtctctaccaaaaaatatataaaaattagccgggcgttgtggcttgtacctgtggtcccatctgcttgggaggctgaggt

SEQ ID NO: 716679 - DNA, 120 bp, Artificial Sequence
  ENSG00000197429_24 (sequence is synthesized)
taacaaaggggatttttaatctttaattttcaagatggttaaaatattgaaatgtttaagtggataactatattattcataaaatgactgagtgaaaactaatatactatgagatgaaaa

SEQ ID NO: 716680 - DNA, 120 bp, Artificial Sequence
  ENSG00000197429_25 (sequence is synthesized)
agcctgggccatagagcaagactttgtctcaaaaaaaaataaaacaaaaaatatttggtttagtctacaactataccttccttataacttaaccatatgcatttattaggaaaagtttat

SEQ ID NO: 716681 - DNA, 120 bp, Artificial Sequence
  ENSG00000197429_26 (sequence is synthesized)
gtaatgcagacaggaagctctatgttcccttctctggggcatcctgaacgtctgaagggtcacagatgtctgtgtagagatctgtaagatgtcaaagaataaagataatttatagactaa

SEQ ID NO: 716682 - DNA, 120 bp, Artificial Sequence
  ENSG00000197429_27 (sequence is synthesized)
gctgggattacaggcatgggccagcgtgcccggctgcatacagtaaaatttaactagttgacttaaggatttgatttcccgtttcttttttttttttttagatggagtcttgccctgtca

SEQ ID NO: 716683 - DNA, 120 bp, Artificial Sequence
  ENSG00000197430_0 (sequence is synthesized)
gtcagttaactgttcctacaaatgaaagacacaagccaataaagccagtgagaaaggagcttaccaaaggcagtgtacgaagaaggttcctgggagactgtcagaaatgagtttttcact

SEQ ID NO: 716684 - DNA, 120 bp, Artificial Sequence
  ENSG00000197430_1 (sequence is synthesized)
gaacttcaccctgccggcgaacacaacgtcctctcctgtcacaggtgggaaagaaacggactgtgggccctctcttggattagcggcgggcataccattgctggtggccacagccctgct

SEQ ID NO: 716685 - DNA, 120 bp, Artificial Sequence
  ENSG00000197430_2 (sequence is synthesized)
ggtggctttactatttactttgattcaccgaagaagaagcagcattgaggccatggaggaaagtgacagaccatgtgaaatttcagaaattgatgacaatcccaagatatctgagaatcc

SEQ ID NO: 716686 - DNA, 120 bp, Artificial Sequence
  ENSG00000197430_3 (sequence is synthesized)
taggagatcacccacacatgagaagaatacgatgggagcacaagaggcccacatatatgtgaagactgtagcaggaagcgaggaacctgtgcatgaccgttaccgtcctactatagaaat

SEQ ID NO: 716687 - DNA, 120 bp, Artificial Sequence
  ENSG00000197430_4 (sequence is synthesized)
ggaaagaaggaggggattgtggtggcttgtgcccagactgagcctggaatgatgcagctcagtcaaggagcagcagacctggcactggaacagggttgaaaacccagggttttgtacttg

SEQ ID NO: 716688 - DNA, 120 bp, Artificial Sequence
  ENSG00000197430_5 (sequence is synthesized)
gagaggaaagatgccaagctgcttcttaatcaatccaaatttcatttacagctctggaacactttggggctgatttgtctctttaggggacatccccaacatggttaattccaactctca

SEQ ID NO: 716689 - DNA, 120 bp, Artificial Sequence
  ENSG00000197430_6 (sequence is synthesized)
gatcttgtgctttagttagtacatgtgactcaccagatggggtccttagatcctattcctgctcccagtgggaatttgcttttctttgtcattttgggaaaggggcttggtttctgagtg

SEQ ID NO: 716690 - DNA, 120 bp, Artificial Sequence
  ENSG00000197430_7 (sequence is synthesized)
tcttgccttctcatctttttttttcatatcctttttctcaaaaaagccatcagatctgactttcatggaagtgttgctgaggtcagcctggtgcaagttgggatacaaatgaaacttatg

SEQ ID NO: 716691 - DNA, 120 bp, Artificial Sequence
  ENSG00000197430_8 (sequence is synthesized)
caggatgtgtgagaggaagcagttaattgtttctgaatatctcagggtaggaaccatgtggagccacacattccctgaccacagggaagcacctggctcaatcatgtcacacagcagtgg

SEQ ID NO: 716692 - DNA, 120 bp, Artificial Sequence
  ENSG00000197430_9 (sequence is synthesized)
aaagaatacggactcttaagtcacacctaccactgagcagctgtacgactttggagaagttgtttaacattttcaagcctcagtttttgcttttttaaaggaggggaaatatttgcctca

SEQ ID NO: 716693 - DNA, 120 bp, Artificial Sequence
  ENSG00000197430_10 (sequence is synthesized)
tgtcataattgaaaagattaaataagaaataaagggaagtgtctgctacttagttgccagtcaaaatgttagttctctctctctaccaccttcttcctacctcttcccatattgcttgcc

SEQ ID NO: 716694 - DNA, 120 bp, Artificial Sequence
  ENSG00000197430_11 (sequence is synthesized)
tgataaaacagctaatcaccagcatttgttccccatagtcacagggccacacaagggaacatttaggacaaactttctccatggcctatgatccaaattgttatctaaagatgattctag

SEQ ID NO: 716695 - DNA, 120 bp, Artificial Sequence
  ENSG00000197430_12 (sequence is synthesized)
gtgttgctggtagtatgtgaatcttccaatctaggtgtgatcgtgtcctcatatgaatcaggaaaaggcagtttcttacaagttccgaattccaaatacagagactggtggtgttacatt

SEQ ID NO: 716696 - DNA, 120 bp, Artificial Sequence
  ENSG00000197430_13 (sequence is synthesized)
tgttaatgttgatggaaattcatgtttcatattaaaacaacactttgtctttacaatgaaacattttgcttaatttttaaagtaagacattatgatacctctgatggcagttcctcaaat

SEQ ID NO: 716697 - DNA, 120 bp, Artificial Sequence
  ENSG00000197430_14 (sequence is synthesized)
aactttaacttttgtgctttagggatagttgttaaagttacaacttcttttattttattttttaaaggcttcagattaaacaagagcccttaagcccacgcatagcattgccgcttcagc

SEQ ID NO: 716698 - DNA, 120 bp, Artificial Sequence
  ENSG00000197430_15 (sequence is synthesized)
ttgctgaggactgtctccaaggaggccaaatggaaaaggagaggctacttcaagtggtgttggcccattgagcctattgggcaaactataaccaggttgccttattttgggtggattact

SEQ ID NO: 716699 - DNA, 120 bp, Artificial Sequence
  ENSG00000197430_16 (sequence is synthesized)
ccaggagaggccaccctccagctttctcttatcccagtaactcctcttcccattttccaatccatccccagccttttttttttttcttctgtactcttcttttgccttcaatatgagttt

SEQ ID NO: 716700 - DNA, 120 bp, Artificial Sequence
  ENSG00000197430_17 (sequence is synthesized)
catttcctctgtgtctttgggcagacttccttctaacatgtgtcagctaccctaccacacacctggcctaggagacacatcattcattgctcctacttgtgtctgtaatcagagagtatt

SEQ ID NO: 716701 - DNA, 120 bp, Artificial Sequence
  ENSG00000197430_18 (sequence is synthesized)
taaggagggcagttctgcgacggactgtgtgtgtgttgaaagtaaagatggggggccgcggggaaggcaagagtttttccaaaagattattagaaatgagggctgtatctactctgtgga

SEQ ID NO: 716702 - DNA, 120 bp, Artificial Sequence
  ENSG00000197430_19 (sequence is synthesized)
gtagaaccaagtctacttggagaaaagaaccaagtccttggatatctaggggaaagctgtttggcagaaagaaaaatcaagaggacccaaggggatggagacaggaccacaggaatgggc

SEQ ID NO: 716703 - DNA, 120 bp, Artificial Sequence
  ENSG00000197430_20 (sequence is synthesized)
caaggagcaacgtgcctgccattcagccagcttgggacaggctttcactttcactcccatgaggaggcttccaggcagcctggttcccccatgtatagccattgccctctagcaggccag

SEQ ID NO: 716704 - DNA, 120 bp, Artificial Sequence
  ENSG00000197430_21 (sequence is synthesized)
gcctcccagtgggaaggcctgggtccagggcatcttaagttcatccagcagctccatgagccacacagatatcctagaaaatattcctttctcacacagggcttctgattactcagaaac

SEQ ID NO: 716705 - DNA, 120 bp, Artificial Sequence
  ENSG00000197430_22 (sequence is synthesized)
atgcccctcttccctgaataaccaagaacatgttctatgaacccaatctctgccacatgtcaatacctgctcttcaaagccccttttgaaactcagttttgtgccaagtcctctggatct

SEQ ID NO: 716706 - DNA, 120 bp, Artificial Sequence
  ENSG00000197430_23 (sequence is synthesized)
aattaccttaaacaagcagatttagccatttttaaacagacattcccagtcatcctggtgcttgtacttctcctacatgtcatgaaggaccttggatttactgagaactcagccgtggcc

SEQ ID NO: 716707 - DNA, 120 bp, Artificial Sequence
  ENSG00000197430_24 (sequence is synthesized)
ttggctttgatacttataggtgtcagcccttgggccgattgttgatcatccagagcctcagttctgtacttgtaaagtggagacagcagttctcatcctccatccttttagcccatgggg

SEQ ID NO: 716708 - DNA, 120 bp, Artificial Sequence
  ENSG00000197430_25 (sequence is synthesized)
tggttgtaaggctggattgaaatatgcatgtgactaagccatgtagctataaagtgagggatgacttgtgttttggatcacttattttaattctacttataatccacggcttagaatatt

SEQ ID NO: 716709 - DNA, 120 bp, Artificial Sequence
  ENSG00000197430_26 (sequence is synthesized)
taaacattgtttctattaaactagaaaggttcagcatttctgtcatttacttctgctatgatacacaagaacttatgttggaatgaagtgaaaagtaaaatggccattcttatgaaccta

SEQ ID NO: 716710 - DNA, 120 bp, Artificial Sequence
  ENSG00000197430_27 (sequence is synthesized)
agtgcagcgaccatccagtgtccttgcagcacgtgttggtctggtgctagcgtgaagagcagtggttaggtcccttgagcaagaggaccctgacctaagaggcccagacgtccctgtgtt

SEQ ID NO: 716711 - DNA, 120 bp, Artificial Sequence
  ENSG00000197430_28 (sequence is synthesized)
ccaccgtcatcccagaagcagaggtgcacagtgctgtcagcctgggtgctctgattcatccacagagactactggagttgcttggaagccttgcagagtggtggaaagaggttgtcaccg

SEQ ID NO: 716712 - DNA, 120 bp, Artificial Sequence
  ENSG00000197430_29 (sequence is synthesized)
aatgactccatcattatcagtaacatggttaatgtggactcccgtcagctggggatggagtggccagcctcagcctcatgtaacccattgtttccaaagggctgcaggctgcagaagccc

SEQ ID NO: 716713 - DNA, 120 bp, Artificial Sequence
  ENSG00000197430_30 (sequence is synthesized)
ccaagctctcaggccagctgtggcttctttgctgagatggaggtatagccaagaaagcagcctgaaaagtaaggacagaaaatcaaggcaaagagggtgggtgaaccaggccatacacgt

SEQ ID NO: 716714 - DNA, 120 bp, Artificial Sequence
  ENSG00000197430_31 (sequence is synthesized)
cggccatgcagcagcagcccatctttcccgagggatggactgagggcttggctactcccctgaccataaatggcttggccagggttctcttggagccacctctcagcctgcctctgcagc

SEQ ID NO: 716715 - DNA, 120 bp, Artificial Sequence
  ENSG00000197437_0 (sequence is synthesized)
gccattcaatcacccaagcaggatgaatcacagcgttgtaactgagttcattattctgggcctcaccaaaaagcctgaactccagggaattatcttcctcttttttctcattgtctatct

SEQ ID NO: 716716 - DNA, 120 bp, Artificial Sequence
  ENSG00000197437_1 (sequence is synthesized)
tgtggcttttctcggcaacatgctcatcatcattgccaaaatctataacaacaccttgcatacgcccatgtatgttttccttctgacactggctgttgtggacatcatctgcacaacaag

SEQ ID NO: 716717 - DNA, 120 bp, Artificial Sequence
  ENSG00000197437_2 (sequence is synthesized)
catcataccgaagatgctggggaccatgctaacatcagaaaataccatttcatatgcaggctgcatgtcccagctcttcttgttcacatggtctctgggagctgagatggttctcttcac

SEQ ID NO: 716718 - DNA, 120 bp, Artificial Sequence
  ENSG00000197437_3 (sequence is synthesized)
caccatggcctatgaccgctatgtggccatttgtttccctcttcattacagtactattatgaaccaccatatgtgtgtagccttgctcagcatggtcatggctattgcagtcaccaattc

SEQ ID NO: 716719 - DNA, 120 bp, Artificial Sequence
  ENSG00000197437_4 (sequence is synthesized)
tggctttgtcctgtagccctgtaagaatcaatgaggtgatggtgtatgttgctgatattaccctggccataggggactttattcttacctgcatctcctatggttttatcattgttgcta

SEQ ID NO: 716720 - DNA, 120 bp, Artificial Sequence
  ENSG00000197437_5 (sequence is synthesized)
ttctccgtatccgcacagtagaaggcaagaggaaggccttctcaacatgctcatctcatctcacagtggtgaccctttactattctcctgtaatctacacctatatccgccctgcttcca

SEQ ID NO: 716721 - DNA, 120 bp, Artificial Sequence
  ENSG00000197437_6 (sequence is synthesized)
gctatacatttgaaagagacaaggtggtagctgcactctatactcttgtgactcccacattaaacccgatggtgtacagcttccagaatagggagatgcaggcaggaattaggaaggtgt

SEQ ID NO: 716722 - DNA, 120 bp, Artificial Sequence
  ENSG00000197437_7 (sequence is synthesized)
ttgcatttctgaaacactagtagtttcaacatgcaacatcacttctgtactccagaaccatcttctagagcatctcagattttactggtttttcatacttacctccactccaattttccc

SEQ ID NO: 716723 - DNA, 120 bp, Artificial Sequence
  ENSG00000197437_8 (sequence is synthesized)
tttgatagcaaactggcaagagctactgtacttttagttttttacagtgatttaatacaggtcaccatttgaacatgacaatactctgcaaaaaactacatttgagtcatcaatggagga

SEQ ID NO: 716724 - DNA, 120 bp, Artificial Sequence
  ENSG00000197437_9 (sequence is synthesized)
acatacatcagagaatgggattagtctggaaaacagagtatattgcctggaatacagaactccatcaaatgggaattcctgctgcaaagttgtgtccaatcaagaattaagtccctaagt

SEQ ID NO: 716725 - DNA, 120 bp, Artificial Sequence
  ENSG00000197437_10 (sequence is synthesized)
cttattcctgccttcttcctagcagtctcattgtctccaaaattctgtactctttatgtgaagaatattcataaagcaatatgcacaataccctcacataaatatatgtcataatatata

SEQ ID NO: 716726 - DNA, 120 bp, Artificial Sequence
  ENSG00000197437_11 (sequence is synthesized)
ttccaacattttccaaaaatatgtacataacttcgaatacttatatatgcatatacacaaatatttacctatatgtgcatgtgcacatcatacatgcaaatatcacaaaacattttgtgt

SEQ ID NO: 716727 - DNA, 120 bp, Artificial Sequence
  ENSG00000197437_12 (sequence is synthesized)
attttgtgccatttatttgttggtatgtgaatgtgagctggagagaagtagtgtgtgtgataaattttcccttgcttaataggctgggttcattcacttacagcattgtgataatgaggt

SEQ ID NO: 716728 - DNA, 120 bp, Artificial Sequence
  ENSG00000197437_13 (sequence is synthesized)
atctactctggggttgaacctcattacgttatttagatttcattggagaaaaatcgtgctctactgaataaaattattgggcaaactctaaagtctccatgtgttcaggaaaaagtgaca

SEQ ID NO: 716729 - DNA, 120 bp, Artificial Sequence
  ENSG00000197437_14 (sequence is synthesized)
gaatattactccagtccttttaaaccagtgagtacacttatgcctcatgcaacattagtctgacattaggcaggcagtcaatagtgtgtatggcggttcaatgggtccatcaatgaaaca

SEQ ID NO: 716730 - DNA, 120 bp, Artificial Sequence
  ENSG00000197437_15 (sequence is synthesized)
ggcaccttcagtcatcttgttctgcccttcaatattgttttccctaggatcatgaatggcttttgtattactaggcgtctcatccataacccaagtagaatgaaggctaaggacagagat

SEQ ID NO: 716731 - DNA, 120 bp, Artificial Sequence
  ENSG00000197437_16 (sequence is synthesized)
ttcatgaggcaaatgaagcactgcctattatttttataaggataacccagtaagtataagctacatctcattggctatagctatattattacaccatttcaagttgtaagtaccaattgg

SEQ ID NO: 716732 - DNA, 120 bp, Artificial Sequence
  ENSG00000197437_17 (sequence is synthesized)
aagagtatattctaaaattaggcacttggcacccctgaaaaaatttggatgtaacatagatgggatgagaaatgggtgtctatactatggcagttgctatgagtatctactagcaaatgt

SEQ ID NO: 716733 - DNA, 120 bp, Artificial Sequence
  ENSG00000197437_18 (sequence is synthesized)
atcataaatgcagatttgaagtcacaaactaaatcatgaaataaagttaggttgagagagtgagaatgccaaaactgaggctacataataaaaatatacaatatacaacacatcttataa

SEQ ID NO: 716734 - DNA, 120 bp, Artificial Sequence
  ENSG00000197437_19 (sequence is synthesized)
caagttggaagaaatatatcatttgctgtgattagtaaagcatatttttacaatatatttccacaattatgaaaacatgttggaattttgtcttacaaatacatctggagcagttgtgtc

SEQ ID NO: 716735 - DNA, 120 bp, Artificial Sequence
  ENSG00000197442_0 (sequence is synthesized)
gagccgacttgtcagccggccaagaaaaggaagctccgtcccttcccgctcacccggcttccccaccccttgtactctaaactctgcagagggcgagcggcgcggccacggaggcgccga

SEQ ID NO: 716736 - DNA, 80 bp, Artificial Sequence
  ENSG00000197442_1 (sequence is synthesized)
ccctcgggggagagggcgccggagaggaggcggcggcgcggcggcgagggcgcggcgcgcgatggcagctgcttagcccg

SEQ ID NO: 716737 - DNA, 120 bp, Artificial Sequence
  ENSG00000197442_2 (sequence is synthesized)
ggagcagccccgagctgtggctggccaggcggtgcggctgggcgggggacgccgccgccgttgctgcccggcccggagagatgagcacggaggcggacgagggcatcactttctctgtgc

SEQ ID NO: 716738 - DNA, 120 bp, Artificial Sequence
  ENSG00000197442_3 (sequence is synthesized)
cacccttcgccccctcgggcttctgcaccatccccgagggcggcatctgcaggaggggaggagcggcggcggtgggcgagggcgaggagcaccagctgccaccgccgccgccgggcagct

SEQ ID NO: 716739 - DNA, 120 bp, Artificial Sequence
  ENSG00000197442_4 (sequence is synthesized)
tctggaacgtggagagcgccgctgcccctggcatcggttgtccggcggccacctcctcgagcagtgccacccgaggccggggcagctctgttggcgggggcagccgacggaccacggtgg

SEQ ID NO: 716740 - DNA, 120 bp, Artificial Sequence
  ENSG00000197442_5 (sequence is synthesized)
catatgtgatcaacgaagcgagccaagggcaactggtggtggccgagagcgaggccctgcagagcttgcgggaggcgtgcgagacagtgggcgccaccctggaaaccctgcattttggga

SEQ ID NO: 716741 - DNA, 120 bp, Artificial Sequence
  ENSG00000197442_6 (sequence is synthesized)
aactcgactttggagaaaccaccgtgctggaccgcttttacaatgcagatattgcggtggtggagatgagcgatgccttccggcagccgtccttgttttaccaccttggggtgagagaaa

SEQ ID NO: 716742 - DNA, 120 bp, Artificial Sequence
  ENSG00000197442_7 (sequence is synthesized)
gtttcagcatggccaacaacatcatcctctactgtgatactaactcggactctctgcagtcactgaaggaaataatttgccagaagaatactatgtgcactgggaactacacctttgttc

SEQ ID NO: 716743 - DNA, 120 bp, Artificial Sequence
  ENSG00000197442_8 (sequence is synthesized)
cttacatgataactccacataacaaagtctactgctgtgacagcagcttcatgaaggggttgacagagctcatgcaaccgaacttcgagctgcttcttggacccatctgcttacctcttg

SEQ ID NO: 716744 - DNA, 120 bp, Artificial Sequence
  ENSG00000197442_9 (sequence is synthesized)
tggatcgttttattcaacttttgaaggtggcacaagcaagttctagccagtacttccgggaatctatactcaatgacatcaggaaagctcgtaatttatacactggtaaagaattggcag

SEQ ID NO: 716745 - DNA, 120 bp, Artificial Sequence
  ENSG00000197442_10 (sequence is synthesized)
ctgagttggcaagaattcggcagcgagtagataatatcgaagtcttgacagcagatattgtcataaatctgttactttcctacagagatatccaggactatgattctattgtgaagctgg

SEQ ID NO: 716746 - DNA, 120 bp, Artificial Sequence
  ENSG00000197442_11 (sequence is synthesized)
tagagactttagaaaaactgccaacctttgatttggcctcccatcaccatgtgaagtttcattatgcatttgcactgaataggagaaatctccctggtgacagagcaaaagctcttgata

SEQ ID NO: 716747 - DNA, 120 bp, Artificial Sequence
  ENSG00000197442_12 (sequence is synthesized)
ttatgattcccatggtgcaaagcgaaggacaagttgcttcagatatgtattgcctagttggtcgaatctacaaagatatgtttttggactctaatttcacggacactgaaagcagagacc

SEQ ID NO: 716748 - DNA, 120 bp, Artificial Sequence
  ENSG00000197442_13 (sequence is synthesized)
atggagcttcttggttcaaaaaggcatttgaatctgagccaacactacagtcaggaattaattatgcggtcctcctcctggcagctggacaccagtttgaatcttcctttgagctccgga

SEQ ID NO: 716749 - DNA, 120 bp, Artificial Sequence
  ENSG00000197442_14 (sequence is synthesized)
aagttggggtgaagctaagtagtcttcttggtaaaaagggaaacttggaaaaactccagagctactgggaagttggattttttctgggggccagcgtcctagccaatgaccacatgagag

SEQ ID NO: 716750 - DNA, 120 bp, Artificial Sequence
  ENSG00000197442_15 (sequence is synthesized)
tcattcaagcatctgaaaagctttttaaactgaagacaccagcatggtacctcaagtctattgtagagacaattttaatatataagcattttgtgaaactgaccacagaacagcctgtgg

SEQ ID NO: 716751 - DNA, 120 bp, Artificial Sequence
  ENSG00000197442_16 (sequence is synthesized)
ccaagcaagaacttgtggacttttggatggatttcctggtcgaggccacaaagacagatgttactgtggttaggtttccagtattaatattagaaccaaccaaaatctatcaaccttctt

SEQ ID NO: 716752 - DNA, 120 bp, Artificial Sequence
  ENSG00000197442_17 (sequence is synthesized)
atttgtctatcaacaatgaagttgaggaaaagacaatctctatttggcacgtgcttcctgatgacaagaaaggtatacatgagtggaattttagtgcctcttctgtcaggggagtgagta

SEQ ID NO: 716753 - DNA, 120 bp, Artificial Sequence
  ENSG00000197442_18 (sequence is synthesized)
tttctaaatttgaagaaagatgctgctttctttatgtgcttcacaattctgatgatttccaaatctatttctgtacagaacttcattgtaaaaagttttttgagatggtgaacaccatta

SEQ ID NO: 716754 - DNA, 120 bp, Artificial Sequence
  ENSG00000197442_19 (sequence is synthesized)
ccgaagagaaggggagaagcacagaggaaggagactgtgaaagtgacttgctggagtatgactatgaatatgatgaaaatggtgacagagtcgttttaggaaaaggcacttatgggatag

SEQ ID NO: 716755 - DNA, 120 bp, Artificial Sequence
  ENSG00000197442_20 (sequence is synthesized)
tctacgcaggtcgggacttgagcaaccaagtcagaattgctattaaggaaatcccagagagagacagcagatactctcagcccctgcatgaagaaatagcattgcataaacacctgaagc

SEQ ID NO: 716756 - DNA, 120 bp, Artificial Sequence
  ENSG00000197442_21 (sequence is synthesized)
taaaagacaatgagcaaacaattggcttttatacaaagcaaatactggaaggattaaaatatctccatgacaatcagatagttcaccgggacataaagggtgacaatgtgttgattaata

SEQ ID NO: 716757 - DNA, 120 bp, Artificial Sequence
  ENSG00000197442_22 (sequence is synthesized)
cctacagtggtgttctcaagatctctgacttcggaacatcaaagaggcttgctggcataaacccctgtactgaaacttttactggtaccctccagtatatggcaccagaaataatagata

SEQ ID NO: 716758 - DNA, 120 bp, Artificial Sequence
  ENSG00000197442_23 (sequence is synthesized)
aaggaccaagaggctacggaaaagcagcagacatctggtctctgggctgtacaatcattgaaatggccacaggaaaacccccattttatgaactgggagaaccacaagcagctatgttca

SEQ ID NO: 716759 - DNA, 120 bp, Artificial Sequence
  ENSG00000197442_24 (sequence is synthesized)
aggtgggaatgtttaaagtccaccctgagatcccagagtccatgtctgcagaggccaaggcattcatactgaaatgttttgaaccagatcctgacaagagagcctgtgctaacgacttgc

SEQ ID NO: 716760 - DNA, 120 bp, Artificial Sequence
  ENSG00000197442_25 (sequence is synthesized)
ttgttgatgagtttttaaaagtttcaagcaaaaagaaaaagacacaacctaagctttcagctctttcagctggatcaaatgaatatctcaggagtatatccttgccggtacctgtgctgg

SEQ ID NO: 716761 - DNA, 120 bp, Artificial Sequence
  ENSG00000197442_26 (sequence is synthesized)
tggaggacaccagcagcagcagtgagtacggctcagtttcacccgacacggagttgaaagtggaccccttctctttcaaaacaagagccaagtcctgcggagaaagagatgtcaagggaa

SEQ ID NO: 716762 - DNA, 120 bp, Artificial Sequence
  ENSG00000197442_27 (sequence is synthesized)
ttcggacactctttttgggcattccagatgagaattttgaagatcacagtgctcctccttcccctgaagaaaaagattctggattcttcatgctgaggaaggacagtgagaggcgagcta

SEQ ID NO: 716763 - DNA, 120 bp, Artificial Sequence
  ENSG00000197442_28 (sequence is synthesized)
cccttcacaggatcctgacggaagaccaagacaaaattgtgagaaacctaatggaatctttagctcagggggctgaagaaccgaaactaaaatgggaacacatcacaaccctcattgcaa

SEQ ID NO: 716764 - DNA, 120 bp, Artificial Sequence
  ENSG00000197442_29 (sequence is synthesized)
gcctcagagaatttgtgagatccactgaccgaaaaatcatagccaccacactgtcaaagctgaaactggagctggacttcgacagccatggcattagccaagtccaggtggtactctttg

SEQ ID NO: 716765 - DNA, 120 bp, Artificial Sequence
  ENSG00000197442_30 (sequence is synthesized)
gttttcaagatgctgtcaataaagttcttcggaatcataacatcaagccgcactggatgtttgccttagacagtatcattcggaaggcggtacagacagccattaccatcctggttccag

SEQ ID NO: 716766 - DNA, 120 bp, Artificial Sequence
  ENSG00000197442_31 (sequence is synthesized)
aactaaggccacatttcagccttgcatctgagagtgatactgctgatcaagaagacttggatgtagaagatgaccatgaggaacagccttcaaatcaaactgtccgaagacctcaggctg

SEQ ID NO: 716767 - DNA, 120 bp, Artificial Sequence
  ENSG00000197442_32 (sequence is synthesized)
tcattgaagatgctgtggctacctcaggcgtgagcacgctcagttctactgtgtctcatgattcccagagtgctcaccggtcactgaatgtacagcttggaaggatgaaaatagaaacca

SEQ ID NO: 716768 - DNA, 120 bp, Artificial Sequence
  ENSG00000197442_33 (sequence is synthesized)
atagattactggaagaattggttcggaaagagaaagaattacaagcactccttcatcgagctattgaagaaaaagaccaagaaattaaacacctgaagcttaagtcccaacccatagaaa

SEQ ID NO: 716769 - DNA, 120 bp, Artificial Sequence
  ENSG00000197442_34 (sequence is synthesized)
ttcctgaattgcctgtatttcatctaaattcttctggcacaaatactgaagattctgaacttaccgactggctgagagtgaatggagctgatgaagacactataagccggtttttggctg

SEQ ID NO: 716770 - DNA, 120 bp, Artificial Sequence
  ENSG00000197442_35 (sequence is synthesized)
aagattatacactattggatgttctctactatgttacacgtgatgacttaaaatgcttgagactaaggggagggatgctgtgcacactgtggaaggctatcattgactttcgaaacaaac

SEQ ID NO: 716771 - DNA, 120 bp, Artificial Sequence
  ENSG00000197442_36 (sequence is synthesized)
agacttgactgttgctcaatctaatcttcgatggaaattctaaaaattaatacagagctgatcttcttgggggtgggaaaatcgaagggagaggagaaaggcgctgcactttaaatccag

SEQ ID NO: 716772 - DNA, 120 bp, Artificial Sequence
  ENSG00000197442_37 (sequence is synthesized)
tatttgtttactcatgttaaaaaaaaaaaaaacagacaaaacacactgaaatttcctaactacatctatttctataatttttaaggactcttcataaggactcttaaaataatcctgaac

SEQ ID NO: 716773 - DNA, 120 bp, Artificial Sequence
  ENSG00000197442_38 (sequence is synthesized)
attagaaccctaatgttcaggaagattttaatctaagcatttttatggaaatatttttaatgcagcagctattgcacttcagccaaatgtttatttcacacaaaacggatgtaacatttc

SEQ ID NO: 716774 - DNA, 120 bp, Artificial Sequence
  ENSG00000197442_39 (sequence is synthesized)
atgtgatcgtgcaccactggaacaaaaccaaaatgtgaccataactgtttaggcttctgtgtgtttgtaatatgctctaataatctgagtagaaatgcgtaatttcaattactgtataaa

SEQ ID NO: 716775 - DNA, 120 bp, Artificial Sequence
  ENSG00000197442_40 (sequence is synthesized)
gtttatgtttttttaagtgtgcagaatctgagagcaatggtttttacttctctgtgttaattgtaatattgactctattttgtaacttaagtttctgacctgtcgtacatttgtttgagt

SEQ ID NO: 716776 - DNA, 120 bp, Artificial Sequence
  ENSG00000197442_41 (sequence is synthesized)
cgtttatgtactactgaactgtaccagttgcacatgcttgaactgtagtaatgttagcttgttctaaagctatccattgtgtcatatttactctaaaaattaaagagactctcaacatac

SEQ ID NO: 716777 - DNA, 120 bp, Artificial Sequence
  ENSG00000197444_0 (sequence is synthesized)
acggcgcgcgcgcaccccttccgcgcagccccctgacctgcagcctccggacctcgctgcagcgcggacccggcccgcccgcccgaatgagtcagctgaggctgctgccgtcccgtcttg

SEQ ID NO: 716778 - DNA, 120 bp, Artificial Sequence
  ENSG00000197444_1 (sequence is synthesized)
gggtacaggctgcgaggctcctggctgcacatgacgtcccggtgtttggctggcgcagcaggtcctccgggccaccggccaccttcccaagcagcaaaggtggaggcggctccagttaca

SEQ ID NO: 716779 - DNA, 120 bp, Artificial Sequence
  ENSG00000197444_2 (sequence is synthesized)
tggaggagatgtacttcgcctggttggaaaacccccagagtgtccacaagtcctgggacagcttcttcagggaagccagcgaggaagccttttctggctctgctcagccacggccccctt

SEQ ID NO: 716780 - DNA, 120 bp, Artificial Sequence
  ENSG00000197444_3 (sequence is synthesized)
ctgttgtccatgagagcaggtctgcagtctcaagtcggaccaagaccagcaaattggtggaggaccacctggctgtgcagtccctgatccgggcctaccagatccggggtcaccatgtgg

SEQ ID NO: 716781 - DNA, 120 bp, Artificial Sequence
  ENSG00000197444_4 (sequence is synthesized)
cccagctggaccccctgggcattctggatgcagacctggactcctttgtgccctcagacttgatcacaaccattgataaactggccttctatgaccttcaggaggctgaccttgataagg

SEQ ID NO: 716782 - DNA, 120 bp, Artificial Sequence
  ENSG00000197444_5 (sequence is synthesized)
agttccagctgccgacaaccaccttcattgggggctctgaaaacaccctctctctgcgggagatcattcggcgcctggagaacacctactgccagcacattggcctggagttcatgttca

SEQ ID NO: 716783 - DNA, 120 bp, Artificial Sequence
  ENSG00000197444_6 (sequence is synthesized)
tcaacgatgtggagcagtgccagtggatccggcagaagtttgagacccctggtgtgatgcagttctccagcgaggagaagcggaccctgctggcccggctagtgcgctccatgaggtttg

SEQ ID NO: 716784 - DNA, 120 bp, Artificial Sequence
  ENSG00000197444_7 (sequence is synthesized)
aagacttcctggcccggaaatggtcctcagagaagcggtttggcctggagggctgtgaagtgatgattcctgccctcaagaccatcatcgacaaatccagcgagatggggattgagaatg

SEQ ID NO: 716785 - DNA, 120 bp, Artificial Sequence
  ENSG00000197444_8 (sequence is synthesized)
tcatcttggggatgccacacaggggaaggctgaacgtgctggccaacgtgatccgcaaggacctggagcagatcttctgccagtttgaccccaagctggaggcggcggacgagggctccg

SEQ ID NO: 716786 - DNA, 120 bp, Artificial Sequence
  ENSG00000197444_9 (sequence is synthesized)
gggatgtcaagtaccacctgggcatgtaccatgagaggatcaaccgcgtcaccaaccggaacatcactctgtcgctggttgccaacccctcccacctggaggcagtggaccctgtggtgc

SEQ ID NO: 716787 - DNA, 120 bp, Artificial Sequence
  ENSG00000197444_10 (sequence is synthesized)
aggggaagacaaaggcagagcagttctaccgtggagatgcccagggcaagaaggtcatgtccatcctggttcatggggacgccgcctttgctggccagggcgtggtatatgagaccttcc

SEQ ID NO: 716788 - DNA, 120 bp, Artificial Sequence
  ENSG00000197444_11 (sequence is synthesized)
acctgagcgacctgccctcctacacgaccaatggtaccgtgcacgtcgtcgtcaacaaccagattggattcaccacagacccccgaatggcccgctcctcaccatacccgaccgacgtgg

SEQ ID NO: 716789 - DNA, 120 bp, Artificial Sequence
  ENSG00000197444_12 (sequence is synthesized)
cccgggtggtcaatgcgcctatcttccatgtgaatgccgatgacccagaggctgtgatatatgtgtgcagtgtggcagccgaatggagaaacactttcaacaaagatgttgtcgtggacc

SEQ ID NO: 716790 - DNA, 120 bp, Artificial Sequence
  ENSG00000197444_13 (sequence is synthesized)
tggtctgttaccgccggcgtggccacaatgagatggacgagcccatgttcacccagccgctcatgtacaagcagatccacagacaggtgcctgtgctgaagaagtacgcagacaagctga

SEQ ID NO: 716791 - DNA, 120 bp, Artificial Sequence
  ENSG00000197444_14 (sequence is synthesized)
ttgccgagggcacagtcaccctgcaggagtttgaggaagaaattgccaaatacgaccggatctgtgaggaggcttatggcaggtccaaggataaaaagattctgcatataaagcactggt

SEQ ID NO: 716792 - DNA, 120 bp, Artificial Sequence
  ENSG00000197444_15 (sequence is synthesized)
ggccagctctgtgcccctggaggactttaagatccacactggcctctctcgcattctgcggggccgtgcggacatgaccaagaaccggacggtggactgggcgttggcagagtacatggc

SEQ ID NO: 716793 - DNA, 120 bp, Artificial Sequence
  ENSG00000197444_16 (sequence is synthesized)
ctttggctccctgctgaaggaaggcatccacgtgcggctcagcgggcaggatgtggagaggggcacattcagtcaccggcaccatgttctccatgaccaggaggttgaccgcaggacgtg

SEQ ID NO: 716794 - DNA, 120 bp, Artificial Sequence
  ENSG00000197444_17 (sequence is synthesized)
tgtgcctatgaatcatctctggcctgaccaggccccgtacaccgtgtgcaacagctccctctcggagtacggagtcctgggctttgagctgggctatgccatggccagccccaatgccct

SEQ ID NO: 716795 - DNA, 120 bp, Artificial Sequence
  ENSG00000197444_18 (sequence is synthesized)
ggtcctctgggaggcccagtttggggacttccacaacacggcccagtgcatcatcgaccagttcatcagcaccggccaggccaagtgggtgcggcataatggcattgtgctgctgctgcc

SEQ ID NO: 716796 - DNA, 120 bp, Artificial Sequence
  ENSG00000197444_19 (sequence is synthesized)
ccatggcatggaaggcatgggcccagagcactcgtcagcgaggcccgaaaggttcctgcagatgagcaatgatgactcggatgcctaccctgcattcaccaaggacttcgaggtgagcca

SEQ ID NO: 716797 - DNA, 120 bp, Artificial Sequence
  ENSG00000197444_20 (sequence is synthesized)
gctctatgactgcaactggatcgtggtcaactgctccacaccggccaactacttccacgtgctgcgccggcagatcctgctgcccttccgcaagccgctgattatcttcacacctaaatc

SEQ ID NO: 716798 - DNA, 120 bp, Artificial Sequence
  ENSG00000197444_21 (sequence is synthesized)
tctgctgaggcacccagaggccaagtccagctttgaccaaatggtatccgggaccagcttccagcgggtgattcctgaagatggggccgcagcacgggcccctgagcaggtgcagcggct

SEQ ID NO: 716799 - DNA, 120 bp, Artificial Sequence
  ENSG00000197444_22 (sequence is synthesized)
catcttctgcacgggaaaggtgtactatgacctggtgaaggagcggagcagccaggacctggaggagaaagtggccatcacgcgcctggagcagatctctccattccccttcgacctgat

SEQ ID NO: 716800 - DNA, 120 bp, Artificial Sequence
  ENSG00000197444_23 (sequence is synthesized)
caagcaggaggcagagaagtacccaggtgcggagctggcctggtgtcaggaggagcacaagaacatgggctactatgactacatcagcccacgcttcatgaccatcctgaggcgcgcacg

SEQ ID NO: 716801 - DNA, 120 bp, Artificial Sequence
  ENSG00000197444_24 (sequence is synthesized)
gcccatatggtatgttggccgggacccagcggctgcaccagccacaggaaacaggaacactcacctggtgtcactgaagaagtttctggatactgccttcaatctccaggcctttgaggg

SEQ ID NO: 716802 - DNA, 120 bp, Artificial Sequence
  ENSG00000197444_25 (sequence is synthesized)
caagacattttagagctgggcaaaacctgtgtaggtctcgctgtgggtttgctggggaccaagggggtgatgaaaaggggaggggcggagctcctgcccaggagaggggctgtggggccc

SEQ ID NO: 716803 - DNA, 120 bp, Artificial Sequence
  ENSG00000197444_26 (sequence is synthesized)
caggataaaacagacacagtgacagggccaagagccagcactgctggccttggtgtcatgccagaatctaccaggactgagggagccagaggagtcctataggcaggctactgtgctgga

SEQ ID NO: 716804 - DNA, 120 bp, Artificial Sequence
  ENSG00000197444_27 (sequence is synthesized)
gcatcccccagctgctcccatcttgctggaatttcttgggcggcttctccacctgtatctcaagacagacacccgggggcctgtgtctgtggccgctcccatcccggcagccctggctgc

SEQ ID NO: 716805 - DNA, 120 bp, Artificial Sequence
  ENSG00000197444_28 (sequence is synthesized)
tgctcgccccaccctcgcttatctgtagattcaaagcgatgttctcttctgtgctcttagaagtagggagttcagcagtaacagccaggtgaagcgaacctgctgggtgatttgtttgcg

SEQ ID NO: 716806 - DNA, 120 bp, Artificial Sequence
  ENSG00000197444_29 (sequence is synthesized)
ctctgttttatggggcattcctgcgagatgtgtcagcttctgtgtgaaatgcagccacagctcatgtgtaccaaagtagaaaaccaaatcacagagaaataaaaacatgcttcagagaga

SEQ ID NO: 716807 - DNA, 120 bp, Artificial Sequence
  ENSG00000197444_30 (sequence is synthesized)
ggagattggttgggatgcaagagagatggtgtgtcgcattcctgctcagtctgtagtgggtccacgtagctctcggcaccatgtctgtgcccgtgacagtagctcttttcagggtgggcg

SEQ ID NO: 716808 - DNA, 120 bp, Artificial Sequence
  ENSG00000197444_31 (sequence is synthesized)
tggcgagctgggcagctccagatgccacactcccagctgggtaccagtgactagtcttaggttggggaccttggattttccaaatgcctttgccggggcgtccctgggtcaggcagaaga

SEQ ID NO: 716809 - DNA, 120 bp, Artificial Sequence
  ENSG00000197444_32 (sequence is synthesized)
gcaggaaagcaagggctcccatacaggggctggaacgcagcctggaacgtgggcagaattctgcagctgaaaggacggtggcttgccggggcctggaccaatgaccgagggcagcccccc

SEQ ID NO: 716810 - DNA, 120 bp, Artificial Sequence
  ENSG00000197444_33 (sequence is synthesized)
gggaaggggtctcagctccaacatcatctccccagagagcccttctccttgtcctctactgagcggcacctactcctctagccagtctttgccacatcaccattcagagcacttaccacc

SEQ ID NO: 716811 - DNA, 120 bp, Artificial Sequence
  ENSG00000197444_34 (sequence is synthesized)
gctgctgagacgatgatgctacccctggcagcagaaggcgctaccacgtatgagtgcttgctgtgcgccaggcactgttcaatgcttctgaatgttaactcttccaatccatacaactta

SEQ ID NO: 716812 - DNA, 120 bp, Artificial Sequence
  ENSG00000197444_35 (sequence is synthesized)
atgaagtaggctgtgttcctgcttttcagatgaggaaacagaggcacagagctggggagtaggttgcccaaggtttcacagctagtagctggggtttgaagctatcctgtgcagtactgc

SEQ ID NO: 716813 - DNA, 120 bp, Artificial Sequence
  ENSG00000197444_36 (sequence is synthesized)
ctgttctctggtcccctcctgtatgacctgcctctgcagccacacatggggcagagggaagacatgcaggctgggtgcatcctccggaggctcctgggctagcaggaagggaggaaggag

SEQ ID NO: 716814 - DNA, 120 bp, Artificial Sequence
  ENSG00000197444_37 (sequence is synthesized)
cagggtgtcatgtgataccatctggtgggcaggtggcctgaccaggcagaagggagacaggcagggggctcattgccaccattatccctgagtggcatgttatgagcactttacaggctg

SEQ ID NO: 716815 - DNA, 120 bp, Artificial Sequence
  ENSG00000197444_38 (sequence is synthesized)
catactcggcatcctcacaacaccgggtatcagtgaggagggaggtgaggctccctgcttggggctgcctgccgtgaaggcagcttcttgggaggccagatctgggccaggctgggtgtg

SEQ ID NO: 716816 - DNA, 120 bp, Artificial Sequence
  ENSG00000197444_39 (sequence is synthesized)
gggggctgggtccttggccgtccccaccaagagagggcaagtggcagctgtgcagtgggtcatccccgtcctgcaggagctggcttggagatgcccctgggcttgtcttgctgctttcat

SEQ ID NO: 716817 - DNA, 120 bp, Artificial Sequence
  ENSG00000197444_40 (sequence is synthesized)
ggagcagagcggtccgtgtgggtgagggtgggcgaggcccaggccgagttgggttggcccctgcctggctgtgtggtcatgggtggtttcttaccctctccttgcctcttcatctgtgca

SEQ ID NO: 716818 - DNA, 120 bp, Artificial Sequence
  ENSG00000197444_41 (sequence is synthesized)
gtggggaagagtgtctgcatcatggggctactttgggggttagcgataaggcgtgtgggattcctagaactctgcctcctgtacagcaggtgctcagtcagtggcagccactgttccagg

SEQ ID NO: 716819 - DNA, 120 bp, Artificial Sequence
  ENSG00000197444_42 (sequence is synthesized)
acattccagagaaagcacgtctcagtgcgggctttttgctttttcttctgtccctgcaagttcacatactgtgctagctctgggcagaccccactctgaggattcccattctgctcttgt

SEQ ID NO: 716820 - DNA, 120 bp, Artificial Sequence
  ENSG00000197444_43 (sequence is synthesized)
tccacattcttggttcttttctatggttcaggctccagggtgagggcacctctgctgagaagccctccagactttcccctgagcctggggtccctgcagggccagatgtctttcccatgg

SEQ ID NO: 716821 - DNA, 120 bp, Artificial Sequence
  ENSG00000197444_44 (sequence is synthesized)
tggggtccagccttggctgtctggcgtttgctttcagggcccagagcactcgtcagcgaggcccgaaaggttcctgcagatgagcaatgatgactcggatgcctaccctgtgagtgttgc

SEQ ID NO: 716822 - DNA, 120 bp, Artificial Sequence
  ENSG00000197444_45 (sequence is synthesized)
ggacagggacgcgccctattgtgcccacagggctaggggtccagggtgtgggtgcagcagacagccaccctggccatatgcatctcgtccccacaggcattcaccaaggacttcgaggtg

SEQ ID NO: 716823 - DNA, 120 bp, Artificial Sequence
  ENSG00000197446_0 (sequence is synthesized)
aagcacacccagagctgcaggctctagcgcatcccagccagtgtctcctgcagctcagcagctgccttcaccatggacagcataagcacagccatcttactcctgctcctggctctcgtc

SEQ ID NO: 716824 - DNA, 120 bp, Artificial Sequence
  ENSG00000197446_1 (sequence is synthesized)
tgtctgctcctgaccctaagctcaagagataagggaaagctgcctccgggacccagacccctctcaatcctgggaaacctgctgctgctttgctcccaagacatgctgacttctctcact

SEQ ID NO: 716825 - DNA, 120 bp, Artificial Sequence
  ENSG00000197446_2 (sequence is synthesized)
aagctgagcaaggagtatggctccatgtacacagtgcacctgggacccaggcgggtggtggtcctcagcgggtaccaagctgtgaaggaggccctggtggaccagggagaggagtttagt

SEQ ID NO: 716826 - DNA, 120 bp, Artificial Sequence
  ENSG00000197446_3 (sequence is synthesized)
ggccgcggtgactaccctgcctttttcaactttaccaagggcaatggcatcgccttctccagtggggatcgatggaaggtcctgagacagttctctatccagattctacggaatttcggg

SEQ ID NO: 716827 - DNA, 120 bp, Artificial Sequence
  ENSG00000197446_4 (sequence is synthesized)
atggggaagagaagcattgaggagcgaatcctagaggagggcagcttcctgctggcggagctgcggaaaactgaaggcgagccctttgaccccacgtttgtgctgagtcgctcagtgtcc

SEQ ID NO: 716828 - DNA, 120 bp, Artificial Sequence
  ENSG00000197446_5 (sequence is synthesized)
aacattatctgttccgtgctcttcggcagccgcttcgactatgatgatgagcgtctgctcaccattatccgccttatcaatgacaacttccaaatcatgagcagcccctggggcgagttg

SEQ ID NO: 716829 - DNA, 120 bp, Artificial Sequence
  ENSG00000197446_6 (sequence is synthesized)
tacgacatcttcccgagcctcctggactgggtgcctgggccgcaccaacgcatcttccagaacttcaagtgcctgagagacctcatcgcccacagcgtccacgaccaccaggcctcgcta

SEQ ID NO: 716830 - DNA, 120 bp, Artificial Sequence
  ENSG00000197446_7 (sequence is synthesized)
ggcagaggagaaggaggacccactgagccacttccacatggataccctgctgatgaccacacataacctgctctttggcggcaccaagacggtgagcaccacgctgcaccacgccttcct

SEQ ID NO: 716831 - DNA, 120 bp, Artificial Sequence
  ENSG00000197446_8 (sequence is synthesized)
ggcactcatgaagtacccaaaagttcaagcccgcgtgcaggaggagatcgacctcgtggtgggacgcgcgcggctgccggcgctgaaggaccgcgcggccatgccttacacagacgcggt

SEQ ID NO: 716832 - DNA, 120 bp, Artificial Sequence
  ENSG00000197446_9 (sequence is synthesized)
gatccacgaggtgcagcgctttgcagacatcatccccatgaacttgccgcaccgcgtcactagggacacggcctttcgcggcttcctgatacccaagggcaccgatgtcatcaccctcct

SEQ ID NO: 716833 - DNA, 120 bp, Artificial Sequence
  ENSG00000197446_10 (sequence is synthesized)
taacaccgtccactacgaccccagccagttcctgacgccccaggagttcaaccccgagcattttttggatgccaatcagtccttcaagaagagtccagccttcatgcccttctcagctgg

SEQ ID NO: 716834 - DNA, 120 bp, Artificial Sequence
  ENSG00000197446_11 (sequence is synthesized)
gcgccgtctgtgcctgggagagtcgctggcgcgcatggagctctttctgtacctcaccgccatcctgcagagcttttcgctgcagccgctgggtgcgcccgaggacatcgacctgacccc

SEQ ID NO: 716835 - DNA, 120 bp, Artificial Sequence
  ENSG00000197446_12 (sequence is synthesized)
actcagctcaggtcttggcaatttgccgcggcctttccagctgtgcctgcgcccgcgctaacgccccggcccttccagattcgcctgtgagcgatgaggcccgcccatgcgggttgctac

SEQ ID NO: 716836 - DNA, 120 bp, Artificial Sequence
  ENSG00000197446_13 (sequence is synthesized)
gtccccttcttggtccacagtctgccctcatccctctggcagtcacgctgtcttccctgcatgctgtgcctgccgcgtgcccttcccccatccctccaatctgtgccccgtctgcagggc

SEQ ID NO: 716837 - DNA, 120 bp, Artificial Sequence
  ENSG00000197446_14 (sequence is synthesized)
agaggcagatgtggcatgtctttttgtacccacagagcttgttctatggcacgcccttttctaggctttttgtatcatttcttagtacattgtaatagattcaaaccagtcttggctgaa

SEQ ID NO: 716838 - DNA, 120 bp, Artificial Sequence
  ENSG00000197446_15 (sequence is synthesized)
gtatcccaggcactagccatgaacaccccaggccttagcaactggcatcccaagccctagctacagacatctcagacccttaaatccagaagctcaggcctttgccaggaccccatctca

SEQ ID NO: 716839 - DNA, 120 bp, Artificial Sequence
  ENSG00000197446_16 (sequence is synthesized)
tatcatagtggactagaccccttcaccatgacaaatccccttcctagaacccctccctggaagccctggggtctggaacttcatctggaggatcccctgggcctaaacgctattctcagg

SEQ ID NO: 716840 - DNA, 120 bp, Artificial Sequence
  ENSG00000197446_17 (sequence is synthesized)
gacccctccttttccccagaaaccccacatctgttcccacaaaggttgggggtttcccacatccctgccaaagtccccaataatacagcatatagcacccatcacttggaaccctagaca

SEQ ID NO: 716841 - DNA, 120 bp, Artificial Sequence
  ENSG00000197446_18 (sequence is synthesized)
cccacacatatttccttggcccccgattgagtcctatacccacctatacccaccccttatcaagtccccaggacacccagcccaatacaatggaaaggagtttgggagcctcccagccct

SEQ ID NO: 716842 - DNA, 120 bp, Artificial Sequence
  ENSG00000197446_19 (sequence is synthesized)
cttgccaaatcctctcactccttccttccacccattctcagctttggatgcacagagacattcattcctcctctcaactctgctcctataggcaagtagtgactaaaatcctcgtgaagc

SEQ ID NO: 716843 - DNA, 120 bp, Artificial Sequence
  ENSG00000197446_20 (sequence is synthesized)
aggtgcccatgtgttccagcctcaccccagagcagggagccacggccccgcctcccaggtctgatatagcctcctgctggcaccaggattccacagccaaacccacaaacccacacggag

SEQ ID NO: 716844 - DNA, 120 bp, Artificial Sequence
  ENSG00000197446_21 (sequence is synthesized)
gccgatcccaccacatggcccatgaggtccatgcagcctgcccgaatcccgacccagatcccacccgcttaattgttggtttttttgtctttgttttgttttttggagacggagtctggc

SEQ ID NO: 716845 - DNA, 66 bp, Artificial Sequence
  ENSG00000197446_22 (sequence is synthesized)
ttgtctttgttttgtttttttccgctcactgcaacctccccctcccgagttcaagggattctcctg

SEQ ID NO: 716846 - DNA, 120 bp, Artificial Sequence
  ENSG00000197448_0 (sequence is synthesized)
agaagctgggcagcctctgccgggttccgggaaaaggagctcctgctgccactgctcttccggagcctgcagcatggggcccctgccgcgcaccgtggagctcttctatgacgtgctgtc

SEQ ID NO: 716847 - DNA, 120 bp, Artificial Sequence
  ENSG00000197448_1 (sequence is synthesized)
cccctactcctggctgggcttcgagatcctgtgccggtatcagaatatctggaacatcaacctgcagttgcggcccagcctcataacagggatcatgaaagacagtggaaacaagcctcc

SEQ ID NO: 716848 - DNA, 120 bp, Artificial Sequence
  ENSG00000197448_2 (sequence is synthesized)
aggtctgcttccccgcaaaggactatacatggcaaatgacttaaagctcctgagacaccatctccagattcccatccacttccccaaggatttcttgtctgtgatgcttgaaaaaggaag

SEQ ID NO: 716849 - DNA, 120 bp, Artificial Sequence
  ENSG00000197448_3 (sequence is synthesized)
tttgtctgccatgcgtttcctcaccgccgtgaacttggagcatccagagatgctggagaaagcgtcccgggagctgtggatgcgcgtctggtcaaggaatgaagacatcaccgagccgca

SEQ ID NO: 716850 - DNA, 120 bp, Artificial Sequence
  ENSG00000197448_4 (sequence is synthesized)
aacgccaaaggtgaagaaccagctcaaggagaccactgaggcagcctgcagatacggagcctttgggctgcccatcaccgtggcccatgtggatggccaaacccacatgttatttggctc

SEQ ID NO: 716851 - DNA, 120 bp, Artificial Sequence
  ENSG00000197448_5 (sequence is synthesized)
tgaccggatggagctgctggcgcacctgctgggagagaagtggatgggccctatacctccagccgtgaatgccagactttaagattgcccggaggaagcaaactcttcgtataaaaaaag

SEQ ID NO: 716852 - DNA, 120 bp, Artificial Sequence
  ENSG00000197448_6 (sequence is synthesized)
caggccatctgcttaacccttggctccaccataaggcactgggactcggatttctctatctgatagaggtattttctgtggccctgggagctgtctgtctttcccctacccccaaggatg

SEQ ID NO: 716853 - DNA, 120 bp, Artificial Sequence
  ENSG00000197448_7 (sequence is synthesized)
ccaggaagacgtccaccattagccatgtggcaacctttacttctatgcctcacaagtgcctttcagagagccccaattctgctttcccacaaaataaacctaatgccatcaggcaaaaca

SEQ ID NO: 716854 - DNA, 120 bp, Artificial Sequence
  ENSG00000197448_8 (sequence is synthesized)
aaggcactgggactcggatttctctatctgatagagaaactcccctggtctctctatcagcaacagaaaaccaagccagatggactttgcaactaatcaagtttgggatttactgtcttc

SEQ ID NO: 716855 - DNA, 120 bp, Artificial Sequence
  ENSG00000197448_9 (sequence is synthesized)
tgaccaaccacagtgactgagatggggctgggaccagaagcccagtgggagtgaacagccgagggaaccagagtctggctgagcttgtggccagatatttaaactgggtccagccacacc

SEQ ID NO: 716856 - DNA, 120 bp, Artificial Sequence
  ENSG00000197448_10 (sequence is synthesized)
tgcaaaaccagggcaaggcagtaccgggaaactggctggagttgctgcggtttggggaagttgcacaccctttcatagatacctcccttaaccctcagtgcagattctgagaaaactcca

SEQ ID NO: 716857 - DNA, 120 bp, Artificial Sequence
  ENSG00000197448_11 (sequence is synthesized)
cattcccccagtaattgacccaaagtccctgcctctagctgtgcccattgtgcaatgatcagaatcccttgtttcaatagtattttgacttctttaagaatactctgtatttggaagctg

SEQ ID NO: 716858 - DNA, 120 bp, Artificial Sequence
  ENSG00000197448_12 (sequence is synthesized)
aaacctcacttggatccattgttgggaaccaagtacggagccttacatagcccggaggagtttcaggagcaatgccactttcccttccatccctccctctgggtctggctcttcccatag

SEQ ID NO: 716859 - DNA, 120 bp, Artificial Sequence
  ENSG00000197448_13 (sequence is synthesized)
tccattttccccttttatctcccattaatttctgtcttcctctctcaccttttccatgtctctagcatcctccaggatttaaaatcatctttacccaacttatctgtgaagtaatggcaa

SEQ ID NO: 716860 - DNA, 120 bp, Artificial Sequence
  ENSG00000197448_14 (sequence is synthesized)
aagaacatctccaaattaagtactccttttcttcaaaggagtttcatgggatgtacagctagtataaaataaaaatatgggaagatgtccaatcttaaaaaccataagggcaaattaaga

SEQ ID NO: 716861 - DNA, 120 bp, Artificial Sequence
  ENSG00000197448_15 (sequence is synthesized)
caaaactaagctgcccagagcagggtgagtggaaccagttttatgaataaagatgcttgtctcagcactatatgtggatatcaaaaattgtgaacaacttgaacacctatcaggaggaga

SEQ ID NO: 716862 - DNA, 120 bp, Artificial Sequence
  ENSG00000197448_16 (sequence is synthesized)
acttgaacacctatcaggaggagaatactttaatcaattatggcacattcaggagataatgttttacagtcatcaaaaattgtatatgagggccagcacggtggctcacacctgtaatcc

SEQ ID NO: 716863 - DNA, 120 bp, Artificial Sequence
  ENSG00000197448_17 (sequence is synthesized)
gtatttctgaagaattgttaagaacattggaaattcttgagatataatattgattggaaaaagatgaaactatatggtatgatctcaatatgtcctgatgaataaaaacataatacagag

SEQ ID NO: 716864 - DNA, 120 bp, Artificial Sequence
  ENSG00000197448_18 (sequence is synthesized)
ggagattgagggattgataggatggaggggctgcgggagactaaagcaagtgaagcctgccttgggaaacctcaggatcagccttgagcgagctgaaggttgccgggcatgaaagggaag

SEQ ID NO: 716865 - DNA, 120 bp, Artificial Sequence
  ENSG00000197448_19 (sequence is synthesized)
aagagcaggcaaataggtcatgggaaccttgggtgagaggctgagggcggaggagctctgggggatgtcagaagcaaggaagagctagtcctccaccaggaaagcagcaagaggagccct

SEQ ID NO: 716866 - DNA, 120 bp, Artificial Sequence
  ENSG00000197448_20 (sequence is synthesized)
tcctgctgtcttctcttcttcccagaatgaagacatcaccgagccgcagagcatcctggcggctgcagagaaggctggtatgtctgcagaacaagcccagggacttctggaaaagatcgc

SEQ ID NO: 716867 - DNA, 76 bp, Artificial Sequence
  ENSG00000197448_21 (sequence is synthesized)
atctcagtggcccaagagagccgaccccagcgggtccttatattggcactggcagccagaaagctgccctctgcat

SEQ ID NO: 716868 - DNA, 120 bp, Artificial Sequence
  ENSG00000197448_22 (sequence is synthesized)
tccagcctgggcaacaagagcgaaacaacaagagaaaaaaaaggaagctgccctctgcccaaaacccacgtcgaggtccccaaacctgggacccttaggtcttttctcacttagcgtgcc

SEQ ID NO: 716869 - DNA, 120 bp, Artificial Sequence
  ENSG00000197448_23 (sequence is synthesized)
taggtttgttcatgtttctcacagaaaggacgtgaaaatgaaaatacttgagtggcctgagatttgcctagggaatcatcttagaagcaaagaaggaaaagaacatcacggaaattcccg

SEQ ID NO: 716870 - DNA, 120 bp, Artificial Sequence
  ENSG00000197448_24 (sequence is synthesized)
caggcataattccatggacagaactagacaacgtattctctagcagttttgaaaccaagatcagctcgtcccatgctcaggaatgaccaagggcagtttggaggttaaaggcacgatgga

SEQ ID NO: 716871 - DNA, 120 bp, Artificial Sequence
  ENSG00000197448_25 (sequence is synthesized)
gaaaaggagctcctgctgccactgctcttccggagcctgcagcatggggcccctgccgcgcaccgtggagctcttctatgacgtgctgtccccctactcctggctgggcttcgaggtgac

SEQ ID NO: 716872 - DNA, 120 bp, Artificial Sequence
  ENSG00000197448_26 (sequence is synthesized)
gctgggaggggtcgcctcggcagtgtctggggagtgagggcggagggaagagtgagcgcagggctccgggacagaggtctcgtgtaactcctggcgccgcccaaggggttaaggcaagca

SEQ ID NO: 716873 - DNA, 120 bp, Artificial Sequence
  ENSG00000197448_27 (sequence is synthesized)
gggagagctccggggctgaaggtcactttgtgcttttaaacggaatagagtcgctggctccaacccgagcctttatatcccgactgcagtttcccacggtggtggaaagaggggcggctc

SEQ ID NO: 716874 - DNA, 120 bp, Artificial Sequence
  ENSG00000197448_28 (sequence is synthesized)
gagagttttgccaatttcaaaccaaacaatgtagggtgtccgcataacccctgctctgcacttagcgcctcccttccctttccctcggctctttcacttttccatcttgcacactggcaa

SEQ ID NO: 716875 - DNA, 120 bp, Artificial Sequence
  ENSG00000197451_0 (sequence is synthesized)
aggcggcggcaccgcgcgggacggagcttggctgttggtcggtgggttcccgtgcggcggcggccaaggaggaggagacacagttggagcagctccgtgggctgactggggcgaggcctc

SEQ ID NO: 716876 - DNA, 120 bp, Artificial Sequence
  ENSG00000197451_1 (sequence is synthesized)
agcagcgcgagcttgagtgcggccgagcctgcggcgccttcccctgcgggtggggacgagcgggccccgcggcgtcatcggcggcgaggagccgccgcgcctcggcctagcatgtcggaa

SEQ ID NO: 716877 - DNA, 120 bp, Artificial Sequence
  ENSG00000197451_2 (sequence is synthesized)
ggaagcgggcgaggagcagcccatggagacgacgggcgccaccgagaacggacatgaggccgtccccgaaggcgagtcgccggccggggctggcacgggcgccgcggcgggggctggagg

SEQ ID NO: 716878 - DNA, 120 bp, Artificial Sequence
  ENSG00000197451_3 (sequence is synthesized)
accgcggcgcccccgagcgggaatcagaacggcgccgagggcgaccagatcaacgccagcaagaacgaggaggacgcgggaaaaatgttcgttggtggcctgagctgggatactagcaaa

SEQ ID NO: 716879 - DNA, 120 bp, Artificial Sequence
  ENSG00000197451_4 (sequence is synthesized)
aaagatttaaaagactattttactaaatttggagaggtcgttgactgtacaataaaaatggatcccaacactggacggtcaagagggtttgggtttatcctgttcaaagatgcagccagt

SEQ ID NO: 716880 - DNA, 120 bp, Artificial Sequence
  ENSG00000197451_5 (sequence is synthesized)
gtggagaaggtcctagaccagaaggagcacaggctggatggccgtgtcattgaccctaaaaaggccatggctatgaagaaggacccggtgaagaaaatcttcgttgggggtctgaatcct

SEQ ID NO: 716881 - DNA, 120 bp, Artificial Sequence
  ENSG00000197451_6 (sequence is synthesized)
gaagccactgaggaaaagatcagggagtactttggcgagtttggggagattgaggccattgaattgccaatggatccaaagttgaacaaaagacgaggttttgtgtttatcacctttaaa

SEQ ID NO: 716882 - DNA, 120 bp, Artificial Sequence
  ENSG00000197451_7 (sequence is synthesized)
gtctatcagcagcagcagtatggctctgggggccgtggaaaccgcaaccgagggaaccgaggcagcggaggtggtggtggaggtggaggtcagagtcagagttggaatcagggctacggc

SEQ ID NO: 716883 - DNA, 120 bp, Artificial Sequence
  ENSG00000197451_8 (sequence is synthesized)
aactactggaaccagggctacggctaccagcagggctacgggcctggctatggcggctacgactactcgccctatggctattacggctacggccccggctacgactacagtcagggtagt

SEQ ID NO: 716884 - DNA, 120 bp, Artificial Sequence
  ENSG00000197451_9 (sequence is synthesized)
acaaactacggcaagagccagcgacgtggtggccatcagaataactacaagccatactgaggcggcagcaggagcgaccaactgatcgcacacatgctttgtttggatatggagtgaaca

SEQ ID NO: 716885 - DNA, 120 bp, Artificial Sequence
  ENSG00000197451_10 (sequence is synthesized)
caattatgtaccaaatttaacttggcaaactttctattgcctgtcccatgtgcatcttatttaaaatttcccccatggaaatcactctcctgttgactatttccagagctctaggtgttt

SEQ ID NO: 716886 - DNA, 120 bp, Artificial Sequence
  ENSG00000197451_11 (sequence is synthesized)
aggcagcgtgtggtgtctgagaggccatagcgccatcatgggctgatttttattaccaggtcccccagaagcaggtgggaggctctgcttcctgctgccgctctgcagcctggacctgtg

SEQ ID NO: 716887 - DNA, 120 bp, Artificial Sequence
  ENSG00000197451_12 (sequence is synthesized)
gaccctggttgtaaagagtaaattgtatcttaggaaaccagtgtcacctttttttcaccttttaattttatattatttgcgtcatacatttcctgtaacggaagtgttaattttactgta

SEQ ID NO: 716888 - DNA, 120 bp, Artificial Sequence
  ENSG00000197451_13 (sequence is synthesized)
ctttttggtaccttttgggaatctaatgtattgtaaggtattttacacgtgtcctgattttgccacaacctggatattgaagctatccaagcttttgaaataaaatttaaaaacccccaa

SEQ ID NO: 716889 - DNA, 120 bp, Artificial Sequence
  ENSG00000197451_14 (sequence is synthesized)
ttccagttatgagtggttaggtcccatacccctggtgaggtggtcccttctttgcttctcacaggctggggctgcagagccttgttaagcctcgttagggtcctggttgagttcaatttg

SEQ ID NO: 716890 - DNA, 120 bp, Artificial Sequence
  ENSG00000197451_15 (sequence is synthesized)
gagggtagtggagatttaacatctttctaaggtgctccttgcagactctaagggtagctgtagacttcgtgagaactttgccagggccagtcctttccaaaatcacagcttgcttacaag

SEQ ID NO: 716891 - DNA, 120 bp, Artificial Sequence
  ENSG00000197454_0 (sequence is synthesized)
ctttgttcatatgatgactatacgactgctggcagccaacaaaggcagtgcgtgtttgaaattgaggagataataaaaggaaggatcgtatgaatgccccatggaaaattacaatcaaac

SEQ ID NO: 716892 - DNA, 120 bp, Artificial Sequence
  ENSG00000197454_1 (sequence is synthesized)
gtcaactgatttcatcttattggggctgttcccaccatcaaaaattggccttttcctcttcattctctttgttctcattttcctaatggctctaattggaaacctatccatgattcttct

SEQ ID NO: 716893 - DNA, 120 bp, Artificial Sequence
  ENSG00000197454_2 (sequence is synthesized)
catcttcttggacacccatctccacacacccatgtatttcctgcttagtcagctctccctcattgacctaaattacatctctacgattgttcctaagatggcttctgattttctgtatgg

SEQ ID NO: 716894 - DNA, 120 bp, Artificial Sequence
  ENSG00000197454_3 (sequence is synthesized)
aaacaagtctatctccttcattgggtgtgggattcagagtttcttcttcatgacttttgcaggtgcagaagcgctgctcctgacatcaatggcctatgatcgttatgtggccatttgctt

SEQ ID NO: 716895 - DNA, 120 bp, Artificial Sequence
  ENSG00000197454_4 (sequence is synthesized)
tcctctccactatcccatccgtatgagcaaaagaatgtatgtgctgatgataacaggatcttggatgataggctccatcaactcttgtgctcacacagtatatgcattccgtatcccata

SEQ ID NO: 716896 - DNA, 120 bp, Artificial Sequence
  ENSG00000197454_5 (sequence is synthesized)
ttgcaagtccagagccatcaatcattttttctgtgatgttccagctatgttgacattagcctgtacagacacctgggtctatgagtacacagtgtttttgagcagcaccatctttcttgt

SEQ ID NO: 716897 - DNA, 120 bp, Artificial Sequence
  ENSG00000197454_6 (sequence is synthesized)
gtttcccttcactggcattgcgtgttcctatggctgggttctccttgctgtctaccgcatgcactctgcagaagggaggaaaaaggcctattcgacctgcagcacccacctcactgtagt

SEQ ID NO: 716898 - DNA, 120 bp, Artificial Sequence
  ENSG00000197454_7 (sequence is synthesized)
aactttctactatgcaccctttgcttatacctatctatgtccaagatccctgcgatctctgacagaggacaaggttctggctgttttctacaccatcctcaccccaatgctcaaccccat

SEQ ID NO: 716899 - DNA, 120 bp, Artificial Sequence
  ENSG00000197454_8 (sequence is synthesized)
catctacagcctgagaaacaaggaggtgatgggggccctgacacgagtgattcagaatatcttctcggtgaaaatgtagacatacgttctgtgttagagtcaaagcgctaggttcatatc

SEQ ID NO: 716900 - DNA, 120 bp, Artificial Sequence
  ENSG00000197454_9 (sequence is synthesized)
aactcagcagtgtacagcagtgaagaaaaacattattacatgcccagtatgtcaaacagagattaatccagaatgtttgtcttttaatttagtcttgacattatagttgcatattctaag

SEQ ID NO: 716901 - DNA, 120 bp, Artificial Sequence
  ENSG00000197454_10 (sequence is synthesized)
ttttatcaaaagacagatcatatattttacactaaattgtaaggccatagaatttcattatcatgtataaatcaaaacaataaatgtccaaaggaatcatatcattcagcataatagtta

SEQ ID NO: 716902 - DNA, 120 bp, Artificial Sequence
  ENSG00000197454_11 (sequence is synthesized)
ttcccattattattaaaataagacaaaataacaaattatttaagattactgaatctaattgaatattaaataatattttatttactctcaactggtgtgtatgtgttcctctttttgcta

SEQ ID NO: 716903 - DNA, 120 bp, Artificial Sequence
  ENSG00000197454_12 (sequence is synthesized)
ctctttttgctaaagtaatgatttattaataaatttacctcaggataaataagtatgtctggggtgaagccaatttgcctttagtaaaacaacaatttctttataaaagattctatggaa

SEQ ID NO: 716904 - DNA, 120 bp, Artificial Sequence
  ENSG00000197454_13 (sequence is synthesized)
tttaccttctatagaacctcttagactacagttgacttagacttagttgaatgtggagtaggttatttgaaccattccccagtcacatcacaacacacacaatgtttgtctcctgagtag

SEQ ID NO: 716905 - DNA, 120 bp, Artificial Sequence
  ENSG00000197454_14 (sequence is synthesized)
ccacgggtattctcatgcaagacgttctcttctgaacaatttttttctacttactcttcaaaatcagcaagtctatacatcttggattgggatcaactcctctgctccactatttttata

SEQ ID NO: 716906 - DNA, 120 bp, Artificial Sequence
  ENSG00000197454_15 (sequence is synthesized)
cctgcttaggcctgtgcctagaaggatcaacattatttttataaaagttgtcagcttaggtccattctctgagtgaaaggccatggctctccacaagagcccattcctgagaaacgcttt

SEQ ID NO: 716907 - DNA, 120 bp, Artificial Sequence
  ENSG00000197454_16 (sequence is synthesized)
agtctctgaggagaggaggcaagaaggaaggtagaatgaacaagtaagagaaaagccctgcattatacaactttccataatgtaacatttttctataactatttttctaaagttctttct

SEQ ID NO: 716908 - DNA, 120 bp, Artificial Sequence
  ENSG00000197454_17 (sequence is synthesized)
ttctgttgctctcaaatagaataatcttcactctggaaatataattaaagtgcataaaaactatttatctgaagaataacatcatgtgatcagaaaatatatttttatttttatttgtta

SEQ ID NO: 716909 - DNA, 80 bp, Artificial Sequence
  ENSG00000197454_18 (sequence is synthesized)
gcatatgtggttgtggtttgctgcaccaataaacccgtcatctaagttttaagccccatatgctttaggtatttgtccta

SEQ ID NO: 716910 - DNA, 83 bp, Artificial Sequence
  ENSG00000197454_19 (sequence is synthesized)
acatgtgccgttgtggtttgctgcaccaataaacccgtcatctaagttttaagccccatatgctaagaatttgtaatgatagc

SEQ ID NO: 716911 - DNA, 120 bp, Artificial Sequence
  ENSG00000197457_0 (sequence is synthesized)
actgcagcaccagccgtctgcagctccggccgccacttgcgcctctccagcctccgcaggcccaaccgccgccagcaccatggccagcaccatttccgcctacaaggagaagatgaagga

SEQ ID NO: 716912 - DNA, 120 bp, Artificial Sequence
  ENSG00000197457_1 (sequence is synthesized)
gctgtcggtgctgtcgctcatctgctcctgcttctacacacagccgcaccccaataccgtctaccagtacggggacatggaggtgaagcagctggacaagcgggcctcaggccagagctt

SEQ ID NO: 716913 - DNA, 120 bp, Artificial Sequence
  ENSG00000197457_2 (sequence is synthesized)
cgaggtcatcctcaagtccccttctgacctgtccccagagagccctatgctctcctccccacccaagaagaaggacacctccctggaggagctgcaaaagcggctggaggcagccgagga

SEQ ID NO: 716914 - DNA, 120 bp, Artificial Sequence
  ENSG00000197457_3 (sequence is synthesized)
gcggaggaagacgcaggaggcgcaggtgctgaagcagctggcggagcggcgcgagcacgagcgcgaggtgctgcacaaggcgctggaggagaataacaacttcagccgccaggcggagga

SEQ ID NO: 716915 - DNA, 120 bp, Artificial Sequence
  ENSG00000197457_4 (sequence is synthesized)
gaagctcaactacaagatggagctcagcaaggagatccgcgaggcacacctggccgcactgcgcgagcggctgcgcgagaaggagctgcacgcggccgaggtgcgcaggaacaaggagca

SEQ ID NO: 716916 - DNA, 120 bp, Artificial Sequence
  ENSG00000197457_5 (sequence is synthesized)
gcgagaagagatgtcgggctaagggcccgggacgggcggcgcccatcctgcgacagaacacgttcgggttttggttttgtttcgttcacctctgtctagatgcaacttttgttcctcctc

SEQ ID NO: 716917 - DNA, 120 bp, Artificial Sequence
  ENSG00000197457_6 (sequence is synthesized)
ccccacccccgcccccagcttcatgcttctcttccgcactcagccgccctgccctgtcctcgtggtgagtcgctgaccacggcttcccctgcaggagccgccgggcgtgagacgcggtcc

SEQ ID NO: 716918 - DNA, 120 bp, Artificial Sequence
  ENSG00000197457_7 (sequence is synthesized)
ctcggtgcagacaccaggccgggcgcggctgggtcccccgggggccctgtgagagaggtggcggtgaccgtggtaaacccagggcggtggcgtgggatcacgggtccttacgctgggctg

SEQ ID NO: 716919 - DNA, 120 bp, Artificial Sequence
  ENSG00000197457_8 (sequence is synthesized)
tctggtcagcacgtgcaggtcagggcaggtcctctgagccggcgcccctggccagcaggcgaggctacagtacctgctgtctttccagggggaaggggctccccatgagggaggggcgac

SEQ ID NO: 716920 - DNA, 120 bp, Artificial Sequence
  ENSG00000197457_9 (sequence is synthesized)
ccttaatgtggttgcacaggggtcctctgagaccacctggcgtgaggtggacaccctgggccttcctggaagcctgcagttgggggcctgccctgagtctgctggggagtgggcattctc

SEQ ID NO: 716921 - DNA, 120 bp, Artificial Sequence
  ENSG00000197457_10 (sequence is synthesized)
tgccagggacccatgagcaggctgcatggtctagaggttgtgggcagcatggacagtcccccactcagaagtgcaagagttccaaagagcctctggcccaggcccctccccaccagggct

SEQ ID NO: 716922 - DNA, 120 bp, Artificial Sequence
  ENSG00000197457_11 (sequence is synthesized)
ttgcagatgtccttgaaagacccaccctagagccctttggagtgctggcccctcctgtgccctctgccctggtggaagcggcagccacaagtcctcctcagggagccccaagggggattt

SEQ ID NO: 716923 - DNA, 120 bp, Artificial Sequence
  ENSG00000197457_12 (sequence is synthesized)
tgtgggaccgctgcccacagatccaggtgttggaagggcagcgggtaaggttcccaagccagccccaacacccttcccacttggcacccagagggggctgtgggtggaggcctgactcca

SEQ ID NO: 716924 - DNA, 120 bp, Artificial Sequence
  ENSG00000197457_13 (sequence is synthesized)
ggcctctcctgcccacaccctctgggctgagttccttctttcccttggacgcccagtgctggccttggaggacggtcagctggaggatggcggtgggggaggctgtctttgtaccactgc

SEQ ID NO: 716925 - DNA, 120 bp, Artificial Sequence
  ENSG00000197457_14 (sequence is synthesized)
agcatcccccacttctccacggaagccccatcccaaagctgctgcctggccccttgctgtaaagtgtgaagggggcggctgagttctcttaggacccagagccagggccctcaacttcca

SEQ ID NO: 716926 - DNA, 120 bp, Artificial Sequence
  ENSG00000197457_15 (sequence is synthesized)
tcctgcgggaggccttggccgggcactgccagtgtcttccagagtcacacccagggaccacgggaggatcctgacccctgcagggctcaggggtcagcagggacccactgccccatctcc

SEQ ID NO: 716927 - DNA, 120 bp, Artificial Sequence
  ENSG00000197457_16 (sequence is synthesized)
ctctccccaccaagacagccccagaaggagcagccagctgggatgggaacccaaggctgtccacatctggcttttgtgggactcagaaagggaagcagaactgagggctgggatattcct

SEQ ID NO: 716928 - DNA, 120 bp, Artificial Sequence
  ENSG00000197457_17 (sequence is synthesized)
catggtggcagcgctcatagcgaaagcctactgtaatatgcacccatctcatccacgtagtaaagtgaacttaaaaattcaatcaaatgaacaattaaataaacacctgtgtgtttaaga

SEQ ID NO: 716929 - DNA, 120 bp, Artificial Sequence
  ENSG00000197457_18 (sequence is synthesized)
gcttcgtttttcactcgacgtttgggaggacaggacgaagggccgcacctccttcccatcgccgcccccgttcacgagccgcactccctcccaccttttcttacgcccccgggacaggtc

SEQ ID NO: 716930 - DNA, 120 bp, Artificial Sequence
  ENSG00000197457_19 (sequence is synthesized)
gccgcggtccctctcccgagctgactggttcaactcgggcgccttggcccggggcgcagaactccgcccacccacgcgtgcccgacctgaccccgcccctcaggccccacgggcttggag

SEQ ID NO: 716931 - DNA, 120 bp, Artificial Sequence
  ENSG00000197457_20 (sequence is synthesized)
acaccgctgcggcctcggggaccaccctttgcgacgcccgcgccacctgctctggccagaaaagccactgccctttgcgccgcggggtctggatgggggaggggcgactgcgatccccaa

SEQ ID NO: 716932 - DNA, 120 bp, Artificial Sequence
  ENSG00000197457_21 (sequence is synthesized)
cgcgcacggccggcaggcagcacttcttcgtggcttcttcatggctgtgtttaatgtccactgacggcacatgcgaatgccatgcgtgcccacgctcctgggtgtgagatagtgctcgga

SEQ ID NO: 716933 - DNA, 120 bp, Artificial Sequence
  ENSG00000197457_22 (sequence is synthesized)
gaagccccagcactcactggcacccagccccatgtgcctgttgtggtgaaggaactgcaggctgcctatctgagactcggcagggagttgaagatgaggagaccagccacacacactcgt

SEQ ID NO: 716934 - DNA, 120 bp, Artificial Sequence
  ENSG00000197461_0 (sequence is synthesized)
ttcttggggctgatgtccgcaaatatgcagaattaccggccgggtcgctcctgaagccagcgcggggagcgagcgcggcggcggccagcaccgggaacgcaccgaggaagaagcccagcc

SEQ ID NO: 716935 - DNA, 120 bp, Artificial Sequence
  ENSG00000197461_1 (sequence is synthesized)
cccgccctccgccccttccgtccccaccccctacccggcggcccaggaggctccccgcgctgcgggcgcgcactccctgtttctcctcctcctggctggcgctgcctgcctctccgcact

SEQ ID NO: 716936 - DNA, 120 bp, Artificial Sequence
  ENSG00000197461_2 (sequence is synthesized)
cactgctcgcgccgggcgcgctccgccagctccgtgctccccgcgccaccctcctccgggccgcgctccctaagggatggtactgaatttcgccgccacaggagaccggctggagcgccc

SEQ ID NO: 716937 - DNA, 120 bp, Artificial Sequence
  ENSG00000197461_3 (sequence is synthesized)
gccccgcggcctcgcctctcctccgagcagccagcgcctcgggacgcgatgaggaccttggcttgcctgctgctcctcggctgcggatacctcgcccatgttctggccgaggaagccgag

SEQ ID NO: 716938 - DNA, 120 bp, Artificial Sequence
  ENSG00000197461_4 (sequence is synthesized)
atcccccgcgaggtgatcgagaggctggcccgcagtcagatccacagcatccgggacctccagcgactcctggagatagactccgtagggagtgaggattctttggacaccagcctgaga

SEQ ID NO: 716939 - DNA, 120 bp, Artificial Sequence
  ENSG00000197461_5 (sequence is synthesized)
gctcacggggtccatgccactaagcatgtgcccgagaagcggcccctgcccattcggaggaagagaagcatcgaggaagctgtccccgctgtctgcaagaccaggacggtcatttacgag

SEQ ID NO: 716940 - DNA, 120 bp, Artificial Sequence
  ENSG00000197461_6 (sequence is synthesized)
attcctcggagtcaggtcgaccccacgtccgccaacttcctgatctggcccccgtgcgtggaggtgaaacgctgcaccggctgctgcaacacgagcagtgtcaagtgccagccctcccgc

SEQ ID NO: 716941 - DNA, 120 bp, Artificial Sequence
  ENSG00000197461_7 (sequence is synthesized)
gtccaccaccgcagcgtcaaggtggccaaggtggaatacgtcaggaagaagccaaaattaaaagaagtccaggtgaggttagaggagcatttggagtgcgcctgcgcgaccacaagcctg

SEQ ID NO: 716942 - DNA, 120 bp, Artificial Sequence
  ENSG00000197461_8 (sequence is synthesized)
aatccggattatcgggaagaggacacggatgtgaggtgaggatgagccgcagccctttcctgggacatggatgtacatggcgtgttacattcctgaacctactatgtacggtgctttatt

SEQ ID NO: 716943 - DNA, 120 bp, Artificial Sequence
  ENSG00000197461_9 (sequence is synthesized)
ccgtgaaaaactgtgtccgagaacactcgggagaacaaagagacagtgcacatttgtttaatgtgacatcaaagcaagtattgtagcactcggtgaagcagtaagaagcttccttgtcaa

SEQ ID NO: 716944 - DNA, 120 bp, Artificial Sequence
  ENSG00000197461_10 (sequence is synthesized)
aaagagagagagagaaagagagagagaaaacaaaaccacaaatgacaaaaacaaaacggactcacaaaaatatctaaactcgatgagatggagggtcgccccgtgggatggaagtgcaga

SEQ ID NO: 716945 - DNA, 120 bp, Artificial Sequence
  ENSG00000197461_11 (sequence is synthesized)
ggtctcagcagactggatttctgtccgggtggtcacaggtgcttttttgccgaggatgcagagcctgctttgggaacgactccagaggggtgctggtgggctctgcaggggcccgcagga

SEQ ID NO: 716946 - DNA, 120 bp, Artificial Sequence
  ENSG00000197461_12 (sequence is synthesized)
agcaggaatgtcttggaaaccgccacgcgaactttagaaaccacacctcctcgctgtagtatttaagcccatacagaaaccttcctgagagccttaagtggtttttttttttgtttttgt

SEQ ID NO: 716947 - DNA, 82 bp, Artificial Sequence
  ENSG00000197461_13 (sequence is synthesized)
ttgtttttttttttttttttttacaccataaagtgattattaagctttcctttttactctttggcggatgacatttacaccg

SEQ ID NO: 716948 - DNA, 120 bp, Artificial Sequence
  ENSG00000197461_14 (sequence is synthesized)
gatgacatttacaccgataacacacaggctgctgtaactgtcaggacagtgcgacggtatttttcctagcaagatgcaaactaatgagatgtattaaaataaacatggtatacctaccta

SEQ ID NO: 716949 - DNA, 120 bp, Artificial Sequence
  ENSG00000197461_15 (sequence is synthesized)
tgcatcatttcctaaatgtttctggctttgtgtttctcccttaccctgctttatttgttaatttaagccattttgaaagaactatgcgtcaaccaatcgtacgccgtccctgcggcacct

SEQ ID NO: 716950 - DNA, 120 bp, Artificial Sequence
  ENSG00000197461_16 (sequence is synthesized)
gccccagagcccgtttgtggctgagtgacaacttgttccccgcagtgcacacctagaatgctgtgttcccacgcggcacgtgagatgcattgccgcttctgtctgtgttgttggtgtgcc

SEQ ID NO: 716951 - DNA, 120 bp, Artificial Sequence
  ENSG00000197461_17 (sequence is synthesized)
ctggtgccgtggtggcggtcactccctctgctgccagtgtttggacagaacccaaattctttatttttggtaagatattgtgctttacctgtattaacagaaatgtgtgtgtgtggtttg

SEQ ID NO: 716952 - DNA, 120 bp, Artificial Sequence
  ENSG00000197461_18 (sequence is synthesized)
tttttttgtaaaggtgaagtttgtatgtttacctaatattacctgttttgtatacctgagagcctgctatgttctttttttgttgatccaaaattaaaaaaaaaaataccaccaacaaaa

SEQ ID NO: 716953 - DNA, 120 bp, Artificial Sequence
  ENSG00000197461_19 (sequence is synthesized)
ccggattatcgggaagaggacacgggaaggcctagggagtcaggtaaaaaacggaaaagaaaaaggttaaaacccacctaaagcagccaaccagatgtgaggtgaggatgagccgcagcc

SEQ ID NO: 716954 - DNA, 120 bp, Artificial Sequence
  ENSG00000197461_20 (sequence is synthesized)
ggggaccggctctctggccctttttggcgcagcagctctgggcgctgcccgctgccgccgctggggcccgagagaggcgagccggcgacggcggcgcttctgcggcggcctcctccctcc

SEQ ID NO: 716955 - DNA, 120 bp, Artificial Sequence
  ENSG00000197461_21 (sequence is synthesized)
cttctgcggcggcctcctccctccccacccggtgccgcaggattgcagctggcactggagggtgggcaagctcgagggaggggcgcggagccccggcgcggagccgggcgcggggctttg

SEQ ID NO: 716956 - DNA, 120 bp, Artificial Sequence
  ENSG00000197461_22 (sequence is synthesized)
agcgcttccgaggaagccgagatcccccgcgaggtgatcgagaggctggcccgcagtcagatccacagcatccgggacctccagcgactcctggagatagactccgtagggagtgaggat

SEQ ID NO: 716957 - DNA, 120 bp, Artificial Sequence
  ENSG00000197461_23 (sequence is synthesized)
ggcaaggaggcccagagccacccgcggtgcccaggtgcgggcagtgtgtccatgggcaggactgtgggtcctctccctactgcgggatttggagagacctgagactcccccagcctgtct

SEQ ID NO: 716958 - DNA, 120 bp, Artificial Sequence
  ENSG00000197461_24 (sequence is synthesized)
gctgtagccgtcagcgcctgtgaaggggtggtgtgtgcagctgggtggggtggcggggataggttctcagttctgctccccggtcagtgctggtcttggctctgggccactgccccacct

SEQ ID NO: 716959 - DNA, 120 bp, Artificial Sequence
  ENSG00000197461_25 (sequence is synthesized)
gcacctggccgcctggctgtaaacacggctcgcagatgccagcttctctcaacccctctccgcaggccgcctccctctgtcaggctgcgggaactcctccgtgtagcctccacgagaggc

SEQ ID NO: 716960 - DNA, 120 bp, Artificial Sequence
  ENSG00000197461_26 (sequence is synthesized)
cacgtgccctcctgcctctcctcatggccgctggccctagagtagactcatttcaggaatgagtggggtctggcccgcagcccagtctggcggcttccagtgcccctcagaggttaggcc

SEQ ID NO: 716961 - DNA, 120 bp, Artificial Sequence
  ENSG00000197461_27 (sequence is synthesized)
acttcttccaggagtgctttagtgagggggagggagggagacgtacaggcacctgcagaaatctcagcggcctctgcttctccctcgctccagcccccagacagaggtggggcctggctt

SEQ ID NO: 716962 - DNA, 120 bp, Artificial Sequence
  ENSG00000197461_28 (sequence is synthesized)
agccctgtgcccctcggggaggtgcacggagctgggcggcctcaggcccctcctgccccggggcagccctcacctgggctaccttggaggaggcaccgtaggggagaccacctgcaacct

SEQ ID NO: 716963 - DNA, 120 bp, Artificial Sequence
  ENSG00000197461_29 (sequence is synthesized)
cttccccgaagggccctgcgcttcgtcacgggcccctgaatgtggggacctctgtgctaacggggcgttttctgcggtttccagtgtttcatgccctgcatctctggaaagccctggtgg

SEQ ID NO: 716964 - DNA, 120 bp, Artificial Sequence
  ENSG00000197461_30 (sequence is synthesized)
gattatcgggaagaggacacgggtgagtggctgccttcgtcggcatcggtgttggagaacaggtcttcagagccttgcttttggggtgttaggtggcccccttgagcgcaacgcttactg

SEQ ID NO: 716965 - DNA, 120 bp, Artificial Sequence
  ENSG00000197461_31 (sequence is synthesized)
ctgtgagcatctgggctgctgttgaaggattcgttgccctgctcccgggccagatgcctgcgggggagacggatcccacacctgcaggtgtccggtggggagggtggcccaagctgcggc

SEQ ID NO: 716966 - DNA, 120 bp, Artificial Sequence
  ENSG00000197461_32 (sequence is synthesized)
actggcaggagaggagattcaggtctcactgagaggggctgggagtgcataagacacccaattcattagtgggctgcggggctgagctgagaagaatctgcagaagggcctcctgccagg

SEQ ID NO: 716967 - DNA, 120 bp, Artificial Sequence
  ENSG00000197465_0 (sequence is synthesized)
gtctttggtagtttttttgcactaacttcaggagccagctcgtgatctcaggatgtatggaaaaataatctttgtattactattgtcaggaattgtgagcatatcagcatcaagtaccac

SEQ ID NO: 716968 - DNA, 120 bp, Artificial Sequence
  ENSG00000197465_1 (sequence is synthesized)
tggtgtggcaatgcacacttcaacctcttcttcagtcacaaagagttacatctcatcacagacaaatgggataacactcattaattggtgggcgatggctcgtgttatttttgaggtgat

SEQ ID NO: 716969 - DNA, 120 bp, Artificial Sequence
  ENSG00000197465_2 (sequence is synthesized)
gcttgttgttgttggaatgatcatcttaatttcttactgtattcgatgactgataaaggttttcatgcctctgggattgagattagaggaagaaagcaaagaaaggacatttttttactt

SEQ ID NO: 716970 - DNA, 120 bp, Artificial Sequence
  ENSG00000197465_3 (sequence is synthesized)
cactgttcatggtgtaattgtgtgcctgacggctgtagctactaacttggcttacgttgactggctactaagggactctaggagtcagaaactaaatgctgagtctctcaaaggcgtaga

SEQ ID NO: 716971 - DNA, 120 bp, Artificial Sequence
  ENSG00000197465_4 (sequence is synthesized)
gagaatttcagagggccttaccatgacatgaggattaaactccagttctgcccgattctcatcacgaaatccttatcccatgcctcattgtgtttggtgtccccttgcctaggggacagt

SEQ ID NO: 716972 - DNA, 120 bp, Artificial Sequence
  ENSG00000197465_5 (sequence is synthesized)
cctcctgggtaagatcagcaagataactcttcagtcacattccatttgatactttgaatactctgaggtccttacccaccaaatggatggaattcagctgctcaatcactgcctttctca

SEQ ID NO: 716973 - DNA, 120 bp, Artificial Sequence
  ENSG00000197465_6 (sequence is synthesized)
gaactcggttgtccaaccacaattccctttcccttaggatagggctatattggcaaaatgccgcccgaacagactgctgacagtaaaccaaatattagtttctctcaccttcttgaaggc

SEQ ID NO: 716974 - DNA, 120 bp, Artificial Sequence
  ENSG00000197465_7 (sequence is synthesized)
gtctttgtaagcttttctcctagattttccctttcctgttcctgcttagattctaagaatgaagtgcatccttctccttttcttcattaggtgaagtgggatttacccattaccatatat

SEQ ID NO: 716975 - DNA, 120 bp, Artificial Sequence
  ENSG00000197465_8 (sequence is synthesized)
tcaccaccaggtcactgacgagagactccagtgaatcgctttccctctgcattcctctccttgtacagactagagggtcacattgtgtaaagcctaacatagccctgcaaagagatctgg

SEQ ID NO: 716976 - DNA, 120 bp, Artificial Sequence
  ENSG00000197465_9 (sequence is synthesized)
ccccagcagtgaacacaaactcagtaattctctttagagtgaggtggtaatcagtgcctcttggtttcagccgtggtcctagtggctacttatggaagaataggaatagttccacaacat

SEQ ID NO: 716977 - DNA, 120 bp, Artificial Sequence
  ENSG00000197465_10 (sequence is synthesized)
cctgtaacattggcttacctgtatattatatgccacccgtaaccataaaaacaccaggatttaggttccttgaaggtaatgactatgggtccctctctgtggaagaatactgaatagaag

SEQ ID NO: 716978 - DNA, 75 bp, Artificial Sequence
  ENSG00000197465_11 (sequence is synthesized)
gactatgggtccctctctgtggaagaatactgaatagaagagagaaatcactcaatatgtggaatgactagttcc

SEQ ID NO: 716979 - DNA, 120 bp, Artificial Sequence
  ENSG00000197465_12 (sequence is synthesized)
acttgaatcattgcggtggtttcccctgtgctattctcatgatagtgagtaaattctcacataatctgatagttttataaaggagcttcccccttcactcagctctcattcttctccttc

SEQ ID NO: 716980 - DNA, 120 bp, Artificial Sequence
  ENSG00000197465_13 (sequence is synthesized)
ctgccactatgtaagaaagatgtgtttgtttcccctttggtcatgattgtaagtatcctgagaccttcccagccatgcaaaactgtagatcaataaaacctctttcctttataaattaca

SEQ ID NO: 716981 - DNA, 120 bp, Artificial Sequence
  ENSG00000197465_14 (sequence is synthesized)
aatgatcatcttaatttcttactgtattcgatgactgataaaggcatgaggatgtggcctgcatgctgcctgatcttgcctagaaccagctgcacctgctgttctcttgcttatgcaaac

SEQ ID NO: 716982 - DNA, 120 bp, Artificial Sequence
  ENSG00000197465_15 (sequence is synthesized)
tggctgcacctgctattcctttgcttatgccccaacccttggctatcctaactccctgttctcctgcctattactgtattctctacttctaaataaaaataaaacaaaatacaaattatt

SEQ ID NO: 716983 - DNA, 120 bp, Artificial Sequence
  ENSG00000197465_16 (sequence is synthesized)
aagagttacatctcatcacagacaaatggttgtgttattggtaacataatttgctctgacaaaagcaaataaaggaaattttagacctttattattcaactggataaaactgaaggttca

SEQ ID NO: 716984 - DNA, 120 bp, Artificial Sequence
  ENSG00000197467_0 (sequence is synthesized)
ggagggagagattagtttgggaagtagcacggattgctcatccgatccgtgccgccgcagggagtgtgtcaagttacagaggcgccggaatcggcccctgcgctcctcgccagccgccac

SEQ ID NO: 716985 - DNA, 120 bp, Artificial Sequence
  ENSG00000197467_1 (sequence is synthesized)
gacccacctctgcccatggggccctccgtgtgcgccccttcgcccggggactgaaactgactggcccgggagacacgaggcgcccagaaggactgacagcgcggcaccaactgctctgca

SEQ ID NO: 716986 - DNA, 120 bp, Artificial Sequence
  ENSG00000197467_2 (sequence is synthesized)
gacacttgaagggaaagactgggcggagagaaggagagccggtcagattcccctaactttcctggacttggaacgttcttcgaaataacttttttctcacctaggtgtaccccaattacc

SEQ ID NO: 716987 - DNA, 120 bp, Artificial Sequence
  ENSG00000197467_3 (sequence is synthesized)
gctggttgtgctttttcggcacttcctctcctactgctaatttttccgtcctctttgccgggagcagcggaaagggacgttttccagcgatacaagccctttccccctgccccgcagttt

SEQ ID NO: 716988 - DNA, 120 bp, Artificial Sequence
  ENSG00000197467_4 (sequence is synthesized)
ggatagagccttttggcagcggctgtcgcctttatttattctatttatttatttattggttctcaagacgcgagaggatggtagcggagcgcacccacaaagcggcagccaccggtgccc

SEQ ID NO: 716989 - DNA, 120 bp, Artificial Sequence
  ENSG00000197467_5 (sequence is synthesized)
gcgcccgggacggtggctctggtggcggcgcgggcggagcgcggcgcacggctgccgagtccagggtcgtgcgggctgctgacgctggccctctgctcgctggcactcagcctgctcgcc

SEQ ID NO: 716990 - DNA, 120 bp, Artificial Sequence
  ENSG00000197467_6 (sequence is synthesized)
tggcactcagcctgctcgcccactttcggacggccgagctgcaggcccgggtgctgcgcctggaagcggagcgcggggagcagcaaatggagacggctattttgggacgagtcaatcaac

SEQ ID NO: 716991 - DNA, 120 bp, Artificial Sequence
  ENSG00000197467_7 (sequence is synthesized)
tgctggacgagaaatggaagctccactcaaggaggcgccgggaggccccaaagacatctccaggatgtaactgcccaccaggacctcctggtcccactggaagacccggactcccagggg

SEQ ID NO: 716992 - DNA, 120 bp, Artificial Sequence
  ENSG00000197467_8 (sequence is synthesized)
acaaaggtgccattgggatgcctggacgtgtgggagtaaagggccaaccaggcgagaaggggtcccccggagacgctgggctgtccatcattggtccccgcggcccccctggtcaaccag

SEQ ID NO: 716993 - DNA, 120 bp, Artificial Sequence
  ENSG00000197467_9 (sequence is synthesized)
gaactagaggtttccctggatttccgggtcccattgggctggacggcaaaccgggccacccaggaccaaagggcgacatgggtctgacgggtcccccaggacagccgggaccccagggac

SEQ ID NO: 716994 - DNA, 120 bp, Artificial Sequence
  ENSG00000197467_10 (sequence is synthesized)
aaaaaggagaaaagggtcagtgtggagagtacccacaccggctgctgcctctcctcaattcagtgcgactggctccacccccggtcataaaaaggcggacgttccagggcgaacagagcc

SEQ ID NO: 716995 - DNA, 120 bp, Artificial Sequence
  ENSG00000197467_11 (sequence is synthesized)
aggccagcatccaaggtccaccagggcccccaggcccccctggaccaagtggacctctggggcacccaggactgccagggcctatggggccacctggcttacctgggcctcctggaccaa

SEQ ID NO: 716996 - DNA, 120 bp, Artificial Sequence
  ENSG00000197467_12 (sequence is synthesized)
agggagacccagggatccagggctaccacggccggaagggagaacggggcatgccagggatgccaggcaagcatggagccaagggggcgcccggaattgccgtggctgggatgaagggtg

SEQ ID NO: 716997 - DNA, 120 bp, Artificial Sequence
  ENSG00000197467_13 (sequence is synthesized)
gggaaagagggggcagaggggtgagaagggggctgaaggctcccctgggcttcctggcctcctggggcagaagggagagaaaggcgatgctggcaactccattggaggaggcagagggga

SEQ ID NO: 716998 - DNA, 120 bp, Artificial Sequence
  ENSG00000197467_14 (sequence is synthesized)
acctggccctccagggctccctgggcccccagggccaaagggagaagcaggtgtcgatggccaggttggccccccagggcagccaggagacaagggggagcgtggagcagctggagaaca

SEQ ID NO: 716999 - DNA, 120 bp, Artificial Sequence
  ENSG00000197467_15 (sequence is synthesized)
gggaccagatggccccaagggctccaagggagaaccagggaaaggagagatggtggattacaatggaaacatcaatgaggctctccaggagatccggacgctggccttgatggggcctcc

SEQ ID NO: 717000 - DNA, 120 bp, Artificial Sequence
  ENSG00000197467_16 (sequence is synthesized)
tggtcttcctgggcaaattggcccacctggagctccagggattccaggccagaagggggagattggactgccaggccctccaggacacgatggggaaaagggacctcgcggtaaaccagg

SEQ ID NO: 717001 - DNA, 120 bp, Artificial Sequence
  ENSG00000197467_17 (sequence is synthesized)
agacatgggccctcctggtccccaaggccccccaggaaaggatggacctccaggagtgaagggagaaaacgggcacccagggagcccaggagagaagggggaaaaaggggagacaggaca

SEQ ID NO: 717002 - DNA, 120 bp, Artificial Sequence
  ENSG00000197467_18 (sequence is synthesized)
agcaggctcaccgggagagaaaggagaagccggggagaagggcaatccaggagcagaggttcctgggctgccagggccagaggggcctcccggacctccggggctccaaggtgttcctgg

SEQ ID NO: 717003 - DNA, 120 bp, Artificial Sequence
  ENSG00000197467_19 (sequence is synthesized)
accaaagggggaagcaggactagatggagcaaaaggagagaaaggcttccagggagaaaaaggagaccgtggtcccctgggactacccggagcttcaggtttggacggcaggcctgggcc

SEQ ID NO: 717004 - DNA, 120 bp, Artificial Sequence
  ENSG00000197467_20 (sequence is synthesized)
accgggtactccaggaccaattggagttccaggcccagcgggaccaaagggcgagaggggcagcaaaggagaccctgggatgacaggaccaacgggagcagctgggcttcctggtttaca

SEQ ID NO: 717005 - DNA, 120 bp, Artificial Sequence
  ENSG00000197467_21 (sequence is synthesized)
tggaccacccggggacaagggaaaccggggggagagggggaagaaaggctctagagggcctaaaggggataagggagaccaaggagcgcctggattagatgccccctgcccattgggcga

SEQ ID NO: 717006 - DNA, 120 bp, Artificial Sequence
  ENSG00000197467_22 (sequence is synthesized)
agatggcttaccagtccaaggctgctggaacaagtgatgcctctaaccttggattggcctgtgtgtgtgtttgtacatagaatatttatttttatacagttttcactttttgaaaatgcc

SEQ ID NO: 717007 - DNA, 120 bp, Artificial Sequence
  ENSG00000197467_23 (sequence is synthesized)
agaagtatgatgcatcttacagattattaaaaaagaaagaaaaacctgcatattttgtacagaaaatatcaacctcttcccttttgtttacaagatgttttgtataagcctatgtctcta

SEQ ID NO: 717008 - DNA, 120 bp, Artificial Sequence
  ENSG00000197467_24 (sequence is synthesized)
atacattttttgtttggtcgtaatgtctgcatgatatttgtgcacatttattaagtatcgaagcttaataaattattgtgtcctggtgccaaagggggccagccagaactgaggtgctgg

SEQ ID NO: 717009 - DNA, 120 bp, Artificial Sequence
  ENSG00000197467_25 (sequence is synthesized)
ctagctcatgtgtgaattcacataaatgtagaggtccatgatatttgctaagctaggtgtgtctaagagtattttaaacccttatggattttcattattaaaggaaatgaaacatggcaa

SEQ ID NO: 717010 - DNA, 120 bp, Artificial Sequence
  ENSG00000197467_26 (sequence is synthesized)
cttggccgcctaaccagcctcctctgcatcactgacctgtgctccgttcttccagaggtgtgtgtcctgccttctggcctcctgtgattctccacgccccctccctccaccttgcccggc

SEQ ID NO: 717011 - DNA, 120 bp, Artificial Sequence
  ENSG00000197467_27 (sequence is synthesized)
caggtccaaggactccaggcttgtctagcttggcaaagctttgttcttggtgttcagctggacctgcaaacctcctagacaccagcatcacaacacagtcctggggcaattcccccgatc

SEQ ID NO: 717012 - DNA, 120 bp, Artificial Sequence
  ENSG00000197467_28 (sequence is synthesized)
cccaccccaacctcagagtgtcctggccagctggggccatggcttctggggaggatttcctgacttagggagtaaagggccaaccaggcgagaagatgagaagacaggcacggggacatt

SEQ ID NO: 717013 - DNA, 120 bp, Artificial Sequence
  ENSG00000197467_29 (sequence is synthesized)
aggggagccggggttaccagggctggacggactggatgccccatgcccattgggcgaagatggcttaccagtccaaggctgctggaacaagggccagagtccttggttagtcgccaagaa

SEQ ID NO: 717014 - DNA, 120 bp, Artificial Sequence
  ENSG00000197467_30 (sequence is synthesized)
tttattcccgcctgcccagtccctctctaggcatggacagtctaggcctccacgctgatcctcttactgcaaaagaagctgaagggaacacttcactccaaggctcaaggggttacagct

SEQ ID NO: 717015 - DNA, 120 bp, Artificial Sequence
  ENSG00000197467_31 (sequence is synthesized)
ctccccaaatttccccaataggtttggagttcaagagctattttatcataccagtaataagagaatttggggtctcacatccccgccctggggtcacacaggaattctctttgaacaaaa

SEQ ID NO: 717016 - DNA, 120 bp, Artificial Sequence
  ENSG00000197467_32 (sequence is synthesized)
gagaaaaagatacaagaaattatgctgtgtgaccctgaaaggtggtcgtagagccccttgaagggcagtagggactttttaggaggagcataggcaacaaaaggagagtgcagagcaagc

SEQ ID NO: 717017 - DNA, 120 bp, Artificial Sequence
  ENSG00000197467_33 (sequence is synthesized)
aggcgggtagcatgcttcctgtccctgctggtcctgccaaaccctgcgcttgcagactgcacagccacctttctcaaccaggacttccaccatccacgcaccaatgggaatgccgctctg

SEQ ID NO: 717018 - DNA, 120 bp, Artificial Sequence
  ENSG00000197467_34 (sequence is synthesized)
gcccgcaggggctcccttgagcactggccaggtcttccctcagccacaatcccctcccacaatctgggcacctttagttctgccagcagctgccttggcctctctgttcctcaccataca

SEQ ID NO: 717019 - DNA, 120 bp, Artificial Sequence
  ENSG00000197467_35 (sequence is synthesized)
ttacttttcattctctgcctgccctgccctccatatccccctgccaccatccacacaccaatgggaatgccgctctggcccacagaggctcctctccctcccggcatccatgtgacgtgt

SEQ ID NO: 717020 - DNA, 120 bp, Artificial Sequence
  ENSG00000197467_36 (sequence is synthesized)
gtcataccgcaccgtggcaggctggggaaggggcacagggtcaccctgaaactgtggaatgcacctcctccccctgcaatcccctccccaacccagaggggaaaatgaaggtcaccctga

SEQ ID NO: 717021 - DNA, 120 bp, Artificial Sequence
  ENSG00000197467_37 (sequence is synthesized)
tttgactctccatgtaaaatggcattttcttccataacatcccatatcaatgtgtcaattttctattaattttactggggaagtgtcttccccttgtttctcactctgcctcctcctctg

SEQ ID NO: 717022 - DNA, 120 bp, Artificial Sequence
  ENSG00000197467_38 (sequence is synthesized)
tgttattatgggcttgaggggcaggggtagctattgctcatgacttttactacaagataaccagacttcctaagccctccatattgggaccaatttctgctgaatgccaggtgatgagag

SEQ ID NO: 717023 - DNA, 120 bp, Artificial Sequence
  ENSG00000197467_39 (sequence is synthesized)
gtttcagcccctggcgtgggtggatgacgtcagaccagggcagcagaggactctcattccacaagctccctcaggactgagcacttgctccgggtctcctgaagccccatgtccatctcc

SEQ ID NO: 717024 - DNA, 120 bp, Artificial Sequence
  ENSG00000197467_40 (sequence is synthesized)
ccttccccactgggtctctagatttctagattccccatagggtatgccagcaaggagaggatatgagggcccaagaaaactcaggaaagtttctatcaccaagggcagaacacgaacatc

SEQ ID NO: 717025 - DNA, 120 bp, Artificial Sequence
  ENSG00000197467_41 (sequence is synthesized)
ttgaggctaaaggagctgcatggttgctaccaacaaaggagaccgacggtgtgcagttgattcccatgtttttactgcacttcacccccaaattcccagcaaggtctaaggcttcgccag

SEQ ID NO: 717026 - DNA, 120 bp, Artificial Sequence
  ENSG00000197467_42 (sequence is synthesized)
gaacccttgtcttcttgccaaaggcatgtcagggccatcctgcaatactcatgaggttgcctgtcccttcatgcccctcaccccaccccaggattaatcatcaaagaaggactgtctaca

SEQ ID NO: 717027 - DNA, 120 bp, Artificial Sequence
  ENSG00000197467_43 (sequence is synthesized)
tgtcctcctccctgtgcttaggaagagagacaaataagagaatgagaaggctgggaaggcccttagcggtcacatcaagcaactgtccttgccaaggttttatggaggaggaaactgagg

SEQ ID NO: 717028 - DNA, 120 bp, Artificial Sequence
  ENSG00000197467_44 (sequence is synthesized)
ccgccttgtgctgagtggcttacccgtgagcagccggcactccatagggccacagcagagactgtttcttcgtggcacggaaggacatctctgcttgctggtcccacgggctaggacagc

SEQ ID NO: 717029 - DNA, 120 bp, Artificial Sequence
  ENSG00000197467_45 (sequence is synthesized)
ccctattgacgttgcactatagctgcatgtgacctttaaccaatggtaaaatagccggatttgtttccacctccttctgaggttctgacctgtagtagagaaaagaaatagacaagcgtg

SEQ ID NO: 717030 - DNA, 120 bp, Artificial Sequence
  ENSG00000197467_46 (sequence is synthesized)
ggtgggccacatcctgatcagctgccaaaatgcgtgtggcccttgttacccctgtcctgcccacttggtggaccattgcaggaagtctgagccctctgccttcctttctccttgcagggc

SEQ ID NO: 717031 - DNA, 120 bp, Artificial Sequence
  ENSG00000197471_0 (sequence is synthesized)
cctttccccttggggccctgtccttcccagtcttgccccagcctcgggaggtggtggagtgacctggccccagtgctgcgtccttatcagccgagccggtcccagctcttgctcctgcct

SEQ ID NO: 717032 - DNA, 120 bp, Artificial Sequence
  ENSG00000197471_1 (sequence is synthesized)
gtttgcctggaaatggccacgcttctccttctccttggggtgctggtggtaagcccagacgctctggggagcacaacagcagtgcagacacccacctccggagagcctttggtctctact

SEQ ID NO: 717033 - DNA, 120 bp, Artificial Sequence
  ENSG00000197471_2 (sequence is synthesized)
agcgagcccctgagctcaaagatgtacaccacttcaataacaagtgaccctaaggccgacagcactggggaccagacctcagccctacctccctcaacttccatcaatgagggatcccct

SEQ ID NO: 717034 - DNA, 120 bp, Artificial Sequence
  ENSG00000197471_3 (sequence is synthesized)
ctttggacttccattggtgccagcactggttcccctttacctgagccaacaacctaccaggaagtttccatcaagatgtcatcagtgccccaggaaacccctcatgcaaccagtcatcct

SEQ ID NO: 717035 - DNA, 120 bp, Artificial Sequence
  ENSG00000197471_4 (sequence is synthesized)
gctgttcccataacagcaaactctctaggatcccacaccgtgacaggtggaaccataacaacgaactctccagaaacctccagtaggaccagtggagcccctgttaccacggcagctagc

SEQ ID NO: 717036 - DNA, 120 bp, Artificial Sequence
  ENSG00000197471_5 (sequence is synthesized)
tctctggagacctccagaggcacctctggaccccctcttaccatggcaactgtctctctggagacttccaaaggcacctctggaccccctgttaccatggcaactgactctctggagacc

SEQ ID NO: 717037 - DNA, 120 bp, Artificial Sequence
  ENSG00000197471_6 (sequence is synthesized)
tccactgggaccactggaccccctgttaccatgacaactggctctctggagccctccagcggggccagtggaccccaggtctctagcgtaaaactatctacaatgatgtctccaacgacc

SEQ ID NO: 717038 - DNA, 120 bp, Artificial Sequence
  ENSG00000197471_7 (sequence is synthesized)
tccaccaacgcaagcactgtgcccttccggaacccagatgagaactcacgaggcatgctgccagtggctgtgcttgtggccctgctggcggtcatagtcctcgtggctctgctcctgctg

SEQ ID NO: 717039 - DNA, 120 bp, Artificial Sequence
  ENSG00000197471_8 (sequence is synthesized)
tggcgccggcggcagaagcggcggactggggccctcgtgctgagcagaggcggcaagcgtaacggggtggtggacgcctgggctgggccagcccaggtccctgaggagggggccgtgaca

SEQ ID NO: 717040 - DNA, 120 bp, Artificial Sequence
  ENSG00000197471_9 (sequence is synthesized)
gtgaccgtgggagggtccgggggcgacaagggctctgggttccccgatggggaggggtctagccgtcggcccacgctcaccactttctttggcagacggaagtctcgccagggctccctg

SEQ ID NO: 717041 - DNA, 120 bp, Artificial Sequence
  ENSG00000197471_10 (sequence is synthesized)
gcgatggaggagctgaagtctgggtcaggccccagcctcaaaggggaggaggagccactggtggccagtgaggatggggctgtggacgccccagctcctgatgagcccgaagggggagac

SEQ ID NO: 717042 - DNA, 120 bp, Artificial Sequence
  ENSG00000197471_11 (sequence is synthesized)
ggggctgccccttaagtgtcggtgaatagtgaggctggaggccggaatctcagccagcctccagcaccttccctctcaccatcccactgccccctcgctcccatgtttccacccggcacc

SEQ ID NO: 717043 - DNA, 120 bp, Artificial Sequence
  ENSG00000197471_12 (sequence is synthesized)
gtttccacccggcaccctgatcctcacccgaatctcctttttttttttcttttgagacagagtttcgctttgtcgcccaggctggagtgcaatgcacgatctcagttcactgcaacctct

SEQ ID NO: 717044 - DNA, 120 bp, Artificial Sequence
  ENSG00000197471_13 (sequence is synthesized)
aagtgctgagattacagacatgagcctccgcgccttgcctcctcacccacctcttcactctgaatcctcatgaggcttctcagccctggatttcctgctgccatcctcacccagcaccca

SEQ ID NO: 717045 - DNA, 120 bp, Artificial Sequence
  ENSG00000197471_14 (sequence is synthesized)
cagccctggatttcctgctgccatcctcacccagcacccacaactagcgcctgggcagggcagggctggcacctctcaacgtctgtggactgaatgaataaaccctcctcatccacccct

SEQ ID NO: 717046 - DNA, 120 bp, Artificial Sequence
  ENSG00000197471_15 (sequence is synthesized)
atttatctccatcaccatttccccctctttcttgttcctggaaacggctgctgagtctccatcggccaaacttatctgccctgtgatttctttgacaattctccttttcccccagaaccc

SEQ ID NO: 717047 - DNA, 120 bp, Artificial Sequence
  ENSG00000197471_16 (sequence is synthesized)
accctgggttgaccagagtctgggaagaaggacaagagaacccggcaaactccctcctaggattaactttgtaaagcacccttgccctgtagctgcaagggctgtggaacctgggcagcc

SEQ ID NO: 717048 - DNA, 120 bp, Artificial Sequence
  ENSG00000197471_17 (sequence is synthesized)
cgcaaccacctttagctctgggccccccaggccagcctggagcatggctgggtggggccaccagcccatgctctcaggcgggcctgtgatctttcccagggcacatggactgtaggctgg

SEQ ID NO: 717049 - DNA, 120 bp, Artificial Sequence
  ENSG00000197471_18 (sequence is synthesized)
ccctggcccacaccaccacactctccccagccatggacagaggcagccagaggcctcacggtttctcctccgagtttctggctgggtgtagttctcagaaaccccagtgcctgcgtgtgt

SEQ ID NO: 717050 - DNA, 120 bp, Artificial Sequence
  ENSG00000197471_19 (sequence is synthesized)
ccactcgtgggtgtggtttgtgtgcaagagctgaggatttggcgatgcttgggaggggtagttgtgggtacagacggtgtgggggtgggaagtggtgcagagactgaagagggtcaacct

SEQ ID NO: 717051 - DNA, 120 bp, Artificial Sequence
  ENSG00000197471_20 (sequence is synthesized)
gggcatgggggacacagggactgctgagaacgtgcgtgtcatctttgctctgatggggtggacatagcagaaaatctaactctgtctgtagccccatacagaatgccagggtgagcacag

SEQ ID NO: 717052 - DNA, 82 bp, Artificial Sequence
  ENSG00000197471_21 (sequence is synthesized)
tctgtctgtagccccatacagaatgccagggtgagcacagtggctggtgcctttaatcccagcactttggaaatctgaagtg

SEQ ID NO: 717053 - DNA, 120 bp, Artificial Sequence
  ENSG00000197471_22 (sequence is synthesized)
gtgagcccctgtctcaaaaaagaaaagaaaaagaaagccaggcttcatggaaagatcgtatgtgtgacccaaatatgagttcttcagctcagccatggtaatcccttccttgaagtctcc

SEQ ID NO: 717054 - DNA, 67 bp, Artificial Sequence
  ENSG00000197471_23 (sequence is synthesized)
tctcctgcgaacagaggcagggggagaggggtttgccctggtctcggggactggtctggctggcgct

SEQ ID NO: 717055 - DNA, 120 bp, Artificial Sequence
  ENSG00000197471_24 (sequence is synthesized)
ggggtttgccctggtctcggggactggtctggctggcgcttccccactgcacgtttccaggtttagtttgtctgtgtctcctcttccatcccaggggctgagccccttccatcctccaag

SEQ ID NO: 717056 - DNA, 120 bp, Artificial Sequence
  ENSG00000197471_25 (sequence is synthesized)
aggaaccagtgagagtgagtgaaggaggggcctggagccagggacttcccctgtggggcctgggtggagaggggagaactcaatggtgctgcctttgagaccagcccaggctacagccca

SEQ ID NO: 717057 - DNA, 120 bp, Artificial Sequence
  ENSG00000197471_26 (sequence is synthesized)
ggagcacacatgggccagggcagttggtatttcccgaggacaaagaggaaattttcaaagaggaagttgttgagttagagcttgcggtggctgagagcagacaggttgacctgcaaaaaa

SEQ ID NO: 717058 - DNA, 120 bp, Artificial Sequence
  ENSG00000197471_27 (sequence is synthesized)
tgggggaaagggtcaggtgggggatgggctcgtgcagtgggagaggagacggagggagggagcgggaaggggcttgcttagtgggtgggaagagctgagctcggatggaaccagcttcta

SEQ ID NO: 717059 - DNA, 120 bp, Artificial Sequence
  ENSG00000197471_28 (sequence is synthesized)
ccagccaggctgggcacccactgggctgcatctggtggccttttctgattgctatttggactcactgcagctgcagaatgacagaggccatgtccaaaatcccttagagacactgttgtc

SEQ ID NO: 717060 - DNA, 120 bp, Artificial Sequence
  ENSG00000197471_29 (sequence is synthesized)
ttagagttgttaaaataagagcccccatatcaggtttagaaaatactgtcaccgaacgaacgtcgctgtcctcagctccacctccctttcctttgacagatatggttgttttctaagcca

SEQ ID NO: 717061 - DNA, 120 bp, Artificial Sequence
  ENSG00000197471_30 (sequence is synthesized)
ggactggttttagtcaggtcctgggcgaatcctgaaaaaaagaggtagtacgggtaaggaaggcacccaacagggctttcacaatccagaaaatatcaaaatataagtgttaaaagagag

SEQ ID NO: 717062 - DNA, 89 bp, Artificial Sequence
  ENSG00000197471_31 (sequence is synthesized)
cagagaattgcttgaaccctggagtcagaggttgcagtgagccgggatcatgccactgtactccaggctgggtgacaaagtgagactgt

SEQ ID NO: 717063 - DNA, 90 bp, Artificial Sequence
  ENSG00000197471_32 (sequence is synthesized)
ctcgagaggcacaaacagtgttatgaatgcaccaaggaaaatggtgcattcataactctcaggtgaagcctaccaagccatgcgtgtgtg

SEQ ID NO: 717064 - DNA, 120 bp, Artificial Sequence
  ENSG00000197471_33 (sequence is synthesized)
cataactctcaggtgaagcctaccaagccatgcgtgtgtgcacatatgtgtgtacgtgtgcatgtgcgtgcgtgcatgtgcgtgcgtgcatgtgcctgtgtgtgtatgtgtgcacatgtg

SEQ ID NO: 717065 - DNA, 120 bp, Artificial Sequence
  ENSG00000197471_34 (sequence is synthesized)
tgtgcgcatgtgtgtgtgtgcgcgcatgtgtgtgtgcatgcatgttctcccatgcatgtgtactgtggcaagggagactttgaggaagagattccagtggctgagcagaagggctcgcat

SEQ ID NO: 717066 - DNA, 120 bp, Artificial Sequence
  ENSG00000197471_35 (sequence is synthesized)
tgccctggcgaaaggttggaaggcttcacctgagagtgtgtcgtggcctttgtcatatccactgcttgattcctttctttaaaaattatttttattgttttctacatatgagaaccacca

SEQ ID NO: 717067 - DNA, 81 bp, Artificial Sequence
  ENSG00000197471_36 (sequence is synthesized)
tgtagagatggggtttcaccatgttgtcccggctggtctcaaactcccgggcactataggcatgagccactgcacccagcc

SEQ ID NO: 717068 - DNA, 120 bp, Artificial Sequence
  ENSG00000197471_37 (sequence is synthesized)
gggactataggcatgagccactgcacccagccactgcttcattcctggtggctgctgtgcctggcatgttgcagatcctccatgaatatgcatttgaatgaatgaatgaatgaatgaatg

SEQ ID NO: 717069 - DNA, 120 bp, Artificial Sequence
  ENSG00000197471_38 (sequence is synthesized)
gagatgacgcctcagagattctttcttttgagatgaggtctcattctgtcacccagactagagggcagtggtgcaatcacagctcaccacagcctcaacctcctgggcctcccaagtagc

SEQ ID NO: 717070 - DNA, 120 bp, Artificial Sequence
  ENSG00000197471_39 (sequence is synthesized)
acagcctcaacctcctgggcctcccaagtagctgcgatcacaggtgtgcaccaacatgcccagctaatttttttttttaatttttaatttgtacagacagggtcttgctgtgttgcccag

SEQ ID NO: 717071 - DNA, 120 bp, Artificial Sequence
  ENSG00000197471_40 (sequence is synthesized)
attataggtgtgagccactgtgcccaggcttgcctcagatatttgaaggctgggaaggattttgcaaagctgggaaaaggaaaaggcattcccagcagaggggatagcaggtggaaatac

SEQ ID NO: 717072 - DNA, 120 bp, Artificial Sequence
  ENSG00000197471_41 (sequence is synthesized)
ggattttgcaaagctgggaaaaggaaaaggcattcccagcagaggggatagcaggtggaaatacataattaaaaaaaaaaaacgtggagcagatccagcgcagtggctcatgcctgtaat

SEQ ID NO: 717073 - DNA, 75 bp, Artificial Sequence
  ENSG00000197471_42 (sequence is synthesized)
gaaagaccctgtctctacaccagctacttgagaagctgaggcaggaggactgcttgaagccaggagtttgagacc

SEQ ID NO: 717074 - DNA, 120 bp, Artificial Sequence
  ENSG00000197471_43 (sequence is synthesized)
agcctgggcaacatagtgagaccccgtgtctacaaaaagtaaacatttatatatatattttttaaagtggagcagttcaatatagagtcttttttgaacaaacgtgaaatagatgtcttt

SEQ ID NO: 717075 - DNA, 86 bp, Artificial Sequence
  ENSG00000197471_44 (sequence is synthesized)
atttatatatatattttttaaagtggagcagttcaatatagagtcttttttgaacaaacgtgaaatagatgtcgttacccaggctg

SEQ ID NO: 717076 - DNA, 74 bp, Artificial Sequence
  ENSG00000197471_45 (sequence is synthesized)
gacaatagatgtcttttaattttctggaggaaaaagcaaagcaaaagaagcagtggatattttaagactaaaaa

SEQ ID NO: 717077 - DNA, 120 bp, Artificial Sequence
  ENSG00000197471_46 (sequence is synthesized)
gaggaaaaagcaaagcaaaagaagcagtggatattttaagactaaaaaggaaaacaaaaaaaggagatagagcaggccagacgtggtggctcaacgtctgtaatcccagcactttgggag

SEQ ID NO: 717078 - DNA, 70 bp, Artificial Sequence
  ENSG00000197471_47 (sequence is synthesized)
taaaaaactccatctcaaaaaaaaaaaaggagatagagcaaggaacagtaagaaaatagttgggtgcagt

SEQ ID NO: 717079 - DNA, 120 bp, Artificial Sequence
  ENSG00000197471_48 (sequence is synthesized)
gacaagtaaaaaactccatctcaaaaaaaaaaaaggagatagagcaaggaacagtaagaaaatagttgggtgcagtggctatgcggtggcactataggaggctgaggcgggcagatcacc

SEQ ID NO: 717080 - DNA, 120 bp, Artificial Sequence
  ENSG00000197471_49 (sequence is synthesized)
gacccctatctctacaaaaaatttgaaatatgaaaaattagccaggtgtagtggtgtgcgcctgtggtaccagctactcaagaggcgaaggcagggaagattgcttgagcccaggagttt

SEQ ID NO: 717081 - DNA, 76 bp, Artificial Sequence
  ENSG00000197471_50 (sequence is synthesized)
ttgagcccaggagtttgaggctatgtgagactctgtctcaaaagaaagaacatggccaggcgtggtggctcacacc

SEQ ID NO: 717082 - DNA, 62 bp, Artificial Sequence
  ENSG00000197471_51 (sequence is synthesized)
aaaaattagccaggcgtggtggcatgcccccgtaatcccagctacttgggggtctgaggcag

SEQ ID NO: 717083 - DNA, 120 bp, Artificial Sequence
  ENSG00000197471_52 (sequence is synthesized)
cctctgagcccagccctccctagcatcaccacttccatcccattcctcagccaagagccaggaatcctgattccagatcccacgcttccctgcctccctcaggtcccagctcttgctcct

SEQ ID NO: 717084 - DNA, 120 bp, Artificial Sequence
  ENSG00000197471_53 (sequence is synthesized)
aaatatggtataagattaaatatattagttatgaaaataattgtaaatggcttattgaacttatagtcagtaaaaatcatgtttttgaaaattatgtaatgactttggaaaataccagca

SEQ ID NO: 717085 - DNA, 120 bp, Artificial Sequence
  ENSG00000197471_54 (sequence is synthesized)
atataatgttaagtggggaaaaaagcaagttactcctctgtaatacatatgattttagttttgtaataaaaattcccaaccatatatgcacttatagggaaacaaaggacccatcgcaaa

SEQ ID NO: 717086 - DNA, 120 bp, Artificial Sequence
  ENSG00000197471_55 (sequence is synthesized)
tgttttccatgctgatctccaaagtggtgagtttatgtgtgatttttattttgtttatgctcttctgtattttccgaatttcatacaataaatatctgttacttttacaatatgaaaaaa

SEQ ID NO: 717087 - DNA, 120 bp, Artificial Sequence
  ENSG00000197472_0 (sequence is synthesized)
ctttgtctccttgcggccggcggggtgctgggttcccgtctgctgcctctcggagagtcccgggtgactgccgcaggctccatcgccctgtggcctgcaggtattgcgagatttataggg

SEQ ID NO: 717088 - DNA, 120 bp, Artificial Sequence
  ENSG00000197472_1 (sequence is synthesized)
aggacgctgggacccccaaaagctgggaaatgggactattggcattcagggatgtggctctagaattctctccagaggagtgggaatgcctggacccagctcagcggagtttgtataggg

SEQ ID NO: 717089 - DNA, 120 bp, Artificial Sequence
  ENSG00000197472_2 (sequence is synthesized)
atgtgatgttagagaactacagaaacctgatctcccttggtgaggatagcttcaatatgcaattcctatttcacagtcttgctatgtctaagccagaactgatcatctgtctggaggcaa

SEQ ID NO: 717090 - DNA, 120 bp, Artificial Sequence
  ENSG00000197472_3 (sequence is synthesized)
ggaaagagccctggaacgtgaacacagagaagacagccagacactcagttttgtcttcttatcttactgaagacattttgccagagcagggcctgcaagtttcattccaaaaagtgatgc

SEQ ID NO: 717091 - DNA, 120 bp, Artificial Sequence
  ENSG00000197472_4 (sequence is synthesized)
tgagaagatatgaaagatgttgtcttgagaaattacgcttaaggaatgactgggaaattgtgggtgagtggaaagggcagaaggcaagttataatggacttgacctatgctcagcaacta

SEQ ID NO: 717092 - DNA, 120 bp, Artificial Sequence
  ENSG00000197472_5 (sequence is synthesized)
ctcatagcaaaaactttcaatgcaataaatgtgtgaaaggttttagtaaatttgcaaatctaaataaatgtaagataagccatactggagaaaaaccattcaaatgcaaagaatgtggca

SEQ ID NO: 717093 - DNA, 120 bp, Artificial Sequence
  ENSG00000197472_6 (sequence is synthesized)
atgtctcttgcatgtctttaataatgactcaacagcagagaatccatattggagagaacccgtaccaatgtaaaaaatgtggcaaagcctttaatgagtgctcatgctttactgactgta

SEQ ID NO: 717094 - DNA, 120 bp, Artificial Sequence
  ENSG00000197472_7 (sequence is synthesized)
agagaattcatgttggagagaaacattgcaaatgtgaagaatgtaataacatttttaagtcttgctcaagtcttgctgttgttgagaaaaatcatactgaaaagaaaacctacagatgtg

SEQ ID NO: 717095 - DNA, 77 bp, Artificial Sequence
  ENSG00000197472_8 (sequence is synthesized)
taagaatgtggcaaatcctttaagttgttcccataccttactcaacacaagagaattcatagtagagagaaacccta

SEQ ID NO: 717096 - DNA, 120 bp, Artificial Sequence
  ENSG00000197472_9 (sequence is synthesized)
cctacaagtgtgaagaatgtggcaaagtctttaaattgttgtcataccttactcaacatagaagaattcatactggagagaaaaccttccgatgtgaagaatgtggaaaagcctttaacc

SEQ ID NO: 717097 - DNA, 120 bp, Artificial Sequence
  ENSG00000197472_10 (sequence is synthesized)
ccttccgatgtgaagaatgtggaaaagcctttaaccagagctcacatctgactgaacataggagaattcatactggtgagaaaccatacaaatgtgaggaatgtggcaaagcttttacct

SEQ ID NO: 717098 - DNA, 120 bp, Artificial Sequence
  ENSG00000197472_11 (sequence is synthesized)
ggttctcataccttattcagcataagagaattcatactgggcagaaaccctacaaatgtgaggaatgtggcaaagcttttacctggttttcataccttactcaacataagagaattcata

SEQ ID NO: 717099 - DNA, 72 bp, Artificial Sequence
  ENSG00000197472_12 (sequence is synthesized)
ttgaatgtggcaaagcttttaactggttttcatatcttactaatcataagagaattcatactggagagaaac

SEQ ID NO: 717100 - DNA, 120 bp, Artificial Sequence
  ENSG00000197472_13 (sequence is synthesized)
gcacaacttgctgtacatgagaaaactcatacctgagaaaaaccctacaattctaaacaatatggcatagtctttaatacctattcacaacttcacagcagaatatttttactgaataag

SEQ ID NO: 717101 - DNA, 120 bp, Artificial Sequence
  ENSG00000197472_14 (sequence is synthesized)
agtgttacaaatgtaatgactgtcaaaaggccatttacagtctatgagcctttgagtgcactaaaatgtttaggctacgaacaatacaaatagaccggttcaacacctccacttatatca

SEQ ID NO: 717102 - DNA, 120 bp, Artificial Sequence
  ENSG00000197472_15 (sequence is synthesized)
cagctcttactgtacacagaagaatttatactggagggaaaccctccagttgctcaaactgtattcaatttcaaagactttgtattggagagaaaccctacaaatgtaataaatgcagaa

SEQ ID NO: 717103 - DNA, 120 bp, Artificial Sequence
  ENSG00000197472_16 (sequence is synthesized)
acaacatttgttcaaaaaatatacctcagaaaacaccagagtgttcacactaaaaactgttttacagatgcagtaaatgtgaaaaaatgtctaatcaaaaattacatcaaaacacatcca

SEQ ID NO: 717104 - DNA, 120 bp, Artificial Sequence
  ENSG00000197472_17 (sequence is synthesized)
agaattcatagtaaaaagcactaagtcactgacactttcagacattactgtaaatctgagtgttggttatagagaataattcaaagttaagttaaagtaagtaggagattcaccttttgg

SEQ ID NO: 717105 - DNA, 120 bp, Artificial Sequence
  ENSG00000197472_18 (sequence is synthesized)
ggaagttataattacatttcaagtataccttttggtgccaggcacggtggctctttcctatagttgctgcacttttggatgccgaggtcgggggattgcttgagcccaggagtttgggac

SEQ ID NO: 717106 - DNA, 120 bp, Artificial Sequence
  ENSG00000197472_19 (sequence is synthesized)
catggcaaaacctcatctctacaaaaagtaaaataaaagccaggcttggtggcacatgcctgttgtcccagctacttggaaggctcaggtgggaggattgcttgagcctggaggttgagg

SEQ ID NO: 717107 - DNA, 120 bp, Artificial Sequence
  ENSG00000197472_20 (sequence is synthesized)
tggaggttgaggatgcagtgagctgctatctggcaacttcactcctgcctgggcaacagagcaagaccctttctcaataataataataacaacataataataaagtatactcggtgcact

SEQ ID NO: 717108 - DNA, 120 bp, Artificial Sequence
  ENSG00000197472_21 (sequence is synthesized)
gaaagagttttagcttttttgaaaatcacatatttatgtaattcaagtcttaaatcacttgataccatgccttcatttctagtgtttatgtgaaggcatgaggcctactgttgctacatg

SEQ ID NO: 717109 - DNA, 120 bp, Artificial Sequence
  ENSG00000197472_22 (sequence is synthesized)
aaagctgtgagagtttcttctatattcgggtgggtgttgttcatatccttttctttggaagattatggacattgcattgtaagcttcctgaagaaatttaactggagaggctctttgtac

SEQ ID NO: 717110 - DNA, 120 bp, Artificial Sequence
  ENSG00000197472_23 (sequence is synthesized)
ttgtcttataatagggttgtaagtgattcatgagataggtcttcagagtactattctgcattatatttaagaaagaaacatttgagttttacaagtcagttgtttttcctattgcacatt

SEQ ID NO: 717111 - DNA, 120 bp, Artificial Sequence
  ENSG00000197472_24 (sequence is synthesized)
aaggtaataaaattcagtggattttgaaatgctctttttagactgtttgaacttaatttgttttaataagacattgttttaatgtctttggaccgttgtacattaagtgatgcgtatcct

SEQ ID NO: 717112 - DNA, 120 bp, Artificial Sequence
  ENSG00000197472_25 (sequence is synthesized)
accaccaacgttaacctatctcaccttagttacggttgtaggtaacaaatggtaacaatacaatagtgggtaacatggtggaatagtatctctaatgatcccttctcccagtggcattaa

SEQ ID NO: 717113 - DNA, 120 bp, Artificial Sequence
  ENSG00000197472_26 (sequence is synthesized)
acttcaaataatttgaaaaatattgttcccacacgttacaccttcattctgtttgctctttttgtaatgacagtgtcattattaaggctataataaagcctatataggattataatcaaa

SEQ ID NO: 717114 - DNA, 120 bp, Artificial Sequence
  ENSG00000197472_27 (sequence is synthesized)
cctgaggcctccccagaagcagaagcatgtaaagcccacagaaccggtccagtcgtcgaccatcgagctgctttgaagaccctgcggaggttccgtcgctgcttgaacacagtgcctgga

SEQ ID NO: 717115 - DNA, 120 bp, Artificial Sequence
  ENSG00000197472_28 (sequence is synthesized)
cggaggttccgtcgctgcttgaacacagtgcctggactccctgctccgtgaggcgaatttacaccgggtccagctgcgtcagcccgagttctgaattaaaacatgcctcccacagaatct

SEQ ID NO: 717116 - DNA, 120 bp, Artificial Sequence
  ENSG00000197472_29 (sequence is synthesized)
atttctgatgaatatgaaaggaagattgttcttccatgttggtttttattgagatatctctttttttcccttttcatttggttgtcctaactccatgaatagaaaagaaaatgtattaat

SEQ ID NO: 717117 - DNA, 120 bp, Artificial Sequence
  ENSG00000197479_0 (sequence is synthesized)
agacagaaacaacaagccttcaagagggtgacctggaaaccattcaacagggttaaaatccttagaccacagaggatttggtggacaagtcagagacgcgttccgcagagctgaagcctt

SEQ ID NO: 717118 - DNA, 120 bp, Artificial Sequence
  ENSG00000197479_1 (sequence is synthesized)
tcttcaagaagcctacaagaaaggaactatggagaaccaagggacacgcactcagcagataaggcaagtcctgcttctctttgttttgctcggaatgtctcaggcgggctctgaaacctg

SEQ ID NO: 717119 - DNA, 120 bp, Artificial Sequence
  ENSG00000197479_2 (sequence is synthesized)
gagcttttctgtggcagaagaaatgcagagcgggagttttgtaggcaatctggcaaaggacctggggctgaaggtgagagaactgtcctcacggggggctcgggtggtctctaatgataa

SEQ ID NO: 717120 - DNA, 120 bp, Artificial Sequence
  ENSG00000197479_3 (sequence is synthesized)
gaaacagcgtttgcagctggacataaacactggggatttgctcttaagtgaaacactagacagggaggagctctgcggttccatcgagccttgcgtgctacatttgcaggtgttaatgca

SEQ ID NO: 717121 - DNA, 120 bp, Artificial Sequence
  ENSG00000197479_4 (sequence is synthesized)
aaaccccacgcagtttttacaaattgagcttcaggtcagggatataaatgatcactctcccatcttctcggaaaaacaaatgctcctagaaatcccagagaacagtcccgttggtgctgt

SEQ ID NO: 717122 - DNA, 120 bp, Artificial Sequence
  ENSG00000197479_5 (sequence is synthesized)
gttcttactagaaagtgcgaaggatttagatgtaggaatcaatgctgtaaaaagctacacaataagccccaactctcattttcacattaaaatgagagtcattccagacaataggaaata

SEQ ID NO: 717123 - DNA, 120 bp, Artificial Sequence
  ENSG00000197479_6 (sequence is synthesized)
ccccgagttagttctggacaaggcgctggattatgaagagctcccggagctcagtttcatcctctctgctctggatggtgggtcccctcccaggtctggaactgccttggtcagggtggt

SEQ ID NO: 717124 - DNA, 120 bp, Artificial Sequence
  ENSG00000197479_7 (sequence is synthesized)
ggttgtggacattaatgacaactcccctgaatttgagcaggctttttatgaggtgaagattcgggagaatagcatccttggctcgctgattttgattgtctcagcttgggatttagactc

SEQ ID NO: 717125 - DNA, 120 bp, Artificial Sequence
  ENSG00000197479_8 (sequence is synthesized)
tggaacaaatggtgaaatatgctataccttttcccatgcctcagaagatattcgcaagacatttgaaattaatcaaaagtctggagaaattactttaagagcacctctggattttgaaac

SEQ ID NO: 717126 - DNA, 120 bp, Artificial Sequence
  ENSG00000197479_9 (sequence is synthesized)
gattgagtcatactcaataatcattcaagccacagatgggggaggactttttggaaaatctacagtcataattcacgtgatagatgtaaatgacaatgctcctgaaatcactgtgtcatc

SEQ ID NO: 717127 - DNA, 120 bp, Artificial Sequence
  ENSG00000197479_10 (sequence is synthesized)
aattaccagtccaatcccagaaaatacgccagagaccgtggttatggtttttagtatccaagatatagactctggggacaacggaagaattgtttgttccattccggaagacctcccatt

SEQ ID NO: 717128 - DNA, 120 bp, Artificial Sequence
  ENSG00000197479_11 (sequence is synthesized)
cgtgctaaaatcttcagttgagaattactacacgttggaaacagagagaccactggacagagagagcacagccgagtacaatatcaccatcaccgtcaccgacttggggatacccaggct

SEQ ID NO: 717129 - DNA, 120 bp, Artificial Sequence
  ENSG00000197479_12 (sequence is synthesized)
caccatcaccgtcaccgacttggggatacccaggctgaaaaccgagcacaacacaactgtgttggtctctgacgtcaatgacaacgcccccaccttcacccaaacctcctacaccctgtt

SEQ ID NO: 717130 - DNA, 120 bp, Artificial Sequence
  ENSG00000197479_13 (sequence is synthesized)
cagtgtcagcgctacagacagagactcaggcaccaacgcccaggtcaactactcgctactcccgccccaggacctgcacctgcccctcgcctccctggtctccatcaacacagacaacgg

SEQ ID NO: 717131 - DNA, 120 bp, Artificial Sequence
  ENSG00000197479_14 (sequence is synthesized)
ccacctgttcgccctcaggtcgctggactacgaggccctgcaggctttcgacttccgcgtgggcgccacagaccgcggctccccggctttgagcagcgaggcgctggtgcgcgtgctggt

SEQ ID NO: 717132 - DNA, 120 bp, Artificial Sequence
  ENSG00000197479_15 (sequence is synthesized)
tcctggtggacggcttctcccagccctacctgccgctccctgaggcggcaccggcccaggcccaggccgactcgctcaccgtctacttggtggtggcgttggcctcggtgtcttcgctct

SEQ ID NO: 717133 - DNA, 84 bp, Artificial Sequence
  ENSG00000197479_16 (sequence is synthesized)
cggtgggaagctgctcggtgcctaagggcccctttccagggcatctggtggacgtgagcggcaccgggaccctttcccagagct

SEQ ID NO: 717134 - DNA, 120 bp, Artificial Sequence
  ENSG00000197479_17 (sequence is synthesized)
ctggtggacgtgagcggcaccgggaccctttcccagagctaccagtacgaggtgtgtctgacgggaggttccgagacaaatgaattcaagttcctaaaaccggttatccctaatatccag

SEQ ID NO: 717135 - DNA, 120 bp, Artificial Sequence
  ENSG00000197479_18 (sequence is synthesized)
gcaaaaggtcttgggaagaatagtgaagaaaactccacctttcgaaatagctttggatttaatttttagtaagaatgctatttacatttgcatgtacttttttagttttatgtaaccata

SEQ ID NO: 717136 - DNA, 120 bp, Artificial Sequence
  ENSG00000197479_19 (sequence is synthesized)
tatgtaaccatatcaatattatttagtcttaaactagttacgttattatgcaatacgactaattgtatttttaattttttcttttctcccccaattttttttttttttttgagaccgagt

SEQ ID NO: 717137 - DNA, 120 bp, Artificial Sequence
  ENSG00000197479_20 (sequence is synthesized)
agtagagacggggtttcaccacgttggccgggcaggttttaaactcttgacctcatgttccacccgccacggcctcccaaagtgctgtgattaccggtgtgagccactgcgcccggcctt

SEQ ID NO: 717138 - DNA, 86 bp, Artificial Sequence
  ENSG00000197479_21 (sequence is synthesized)
tcatgttccacccgccacggcctcccaaagtgctgtgattaccggtgtgagccactgcgcccggacagagtcttagtcacccagac

SEQ ID NO: 717139 - DNA, 82 bp, Artificial Sequence
  ENSG00000197479_22 (sequence is synthesized)
cttcttgtattttttgtagagacggatcgtcaccatatttcttaggctggcctttaacttctgagctcaagagatgcactcc

SEQ ID NO: 717140 - DNA, 86 bp, Artificial Sequence
  ENSG00000197479_23 (sequence is synthesized)
ccaggcctattttcaattttcaagtattgcatatcattgtgaataacattgtaaatcctttttatattaagtaacaggtagttaat

SEQ ID NO: 717141 - DNA, 120 bp, Artificial Sequence
  ENSG00000197479_24 (sequence is synthesized)
gtgaataacattgtaaatcctttttatattaagtaacaggtagttaatccatttctaatgaataattttaaggttttaatcctttccaagtgtacaataatttactgattattatttctt

SEQ ID NO: 717142 - DNA, 90 bp, Artificial Sequence
  ENSG00000197479_25 (sequence is synthesized)
agtgtacaataatttactgattattatttcttattctagaaaactgactttgatttttctcttaggatgtttcactcttgtcgcccaggc

SEQ ID NO: 717143 - DNA, 86 bp, Artificial Sequence
  ENSG00000197479_26 (sequence is synthesized)
aaaagctcccctagtatttttcactgtctgcatcctatgatcctaaccacctgtgtattgtagtttcttcatgggagaagtcatat

SEQ ID NO: 717144 - DNA, 120 bp, Artificial Sequence
  ENSG00000197479_27 (sequence is synthesized)
ccacctgtgtattgtagtttcttcatgggagaagtcatatctgcccttccaaccttattctaacattctatttattcatttaaaaagccacatcatctagttctaaatcacagcatttaa

SEQ ID NO: 717145 - DNA, 120 bp, Artificial Sequence
  ENSG00000197479_28 (sequence is synthesized)
agagaaacatttcattattaatgtgctcatggtaaattaaatattattttgtgatcaatattatacttcaatactaactttgtgcttgtattattttcttaaatatactacacttacttg

SEQ ID NO: 717146 - DNA, 120 bp, Artificial Sequence
  ENSG00000197479_29 (sequence is synthesized)
gctaatatttttaatgcttttgtgtgtgtatatatatatatagagagagagagagatcatggcttataatccaaacaaaatgtaataaactgcatgaaaataaataggaatattaaaaca

SEQ ID NO: 717147 - DNA, 68 bp, Artificial Sequence
  ENSG00000197479_30 (sequence is synthesized)
aaggccacggagcccgggctattcgggacgcggccaagcacaggctggtggtgctggtcaaggacaat

SEQ ID NO: 717148 - DNA, 120 bp, Artificial Sequence
  ENSG00000197483_0 (sequence is synthesized)
gtttgtgtgcgcgagaggccgccgataaaggttgggtgcctcgcgccgggggccgttgggagggagtgcgcccctgccccccctccccggtccccacagctgcaccgccgctgccggggc

SEQ ID NO: 717149 - DNA, 120 bp, Artificial Sequence
  ENSG00000197483_1 (sequence is synthesized)
cccaccttcccgtcgacccccgcgggaaggtcctggggctgccaccctcgttcccccgattggggccgcagaggcatgatcaaggacagggttgcctgccaagaacaggaggggagagga

SEQ ID NO: 717150 - DNA, 120 bp, Artificial Sequence
  ENSG00000197483_2 (sequence is synthesized)
ggggctggaggtttcaggagaaagaagcatgtcaggtgtgatggtcggctcccacgcggacatggcgccggcctctactgcggagggggccggggagaagccaggccctgcggcccctgc

SEQ ID NO: 717151 - DNA, 120 bp, Artificial Sequence
  ENSG00000197483_3 (sequence is synthesized)
cccggcggcccagtacgaatgtggggagtgtggcaagtcattccggtggtcgtcccggctcctgcaccaccagcgcacgcacacaggcgagcggccctacaagtgcccagactgccccaa

SEQ ID NO: 717152 - DNA, 120 bp, Artificial Sequence
  ENSG00000197483_4 (sequence is synthesized)
ggctttcaaaggctcctcggccctgctctaccaccagcgaggccacacgggcgagcggccctaccagtgccccgactgtcccaaggccttcaagcgctcctctctgctgcagatccaccg

SEQ ID NO: 717153 - DNA, 120 bp, Artificial Sequence
  ENSG00000197483_5 (sequence is synthesized)
tagcgtgcacaccggcctgcgggccttcatctgcggccagtgcggcctggccttcaagtggtcgtcccactaccagtaccacttaaggcagcacacaggcgagcgcccctacccgtgccc

SEQ ID NO: 717154 - DNA, 120 bp, Artificial Sequence
  ENSG00000197483_6 (sequence is synthesized)
ggactgccccaaggccttcaagaactcgtccagcctgcggcgccaccgccacgtgcacaccggcgagcggccctacacctgtggagtctgcgggaagagcttcacgcagagcaccaacct

SEQ ID NO: 717155 - DNA, 120 bp, Artificial Sequence
  ENSG00000197483_7 (sequence is synthesized)
gcggcagcaccagcgcgtgcacacgggcgagcggcccttccgctgcccgctctgccccaagaccttcacccactcctccaacctgctgctgcaccagcgcacgcacggcgccgcccccgc

SEQ ID NO: 717156 - DNA, 120 bp, Artificial Sequence
  ENSG00000197483_8 (sequence is synthesized)
gagcccggcaaggtcttcgtgtgcgacgcctacctgcagcggcacctccagccccacagcccgcccgcgcctcccgccccgccgcccccgcccccgcccgtggtgcctgagctctttttg

SEQ ID NO: 717157 - DNA, 120 bp, Artificial Sequence
  ENSG00000197483_9 (sequence is synthesized)
gccgcccccgcccccgcccgtggtgcctgagctctttttggcggcggcggagaccacggtggagctggtgtaccgctgcgatggctgcgagcagggattcagcagcgaggagctgctcct

SEQ ID NO: 717158 - DNA, 120 bp, Artificial Sequence
  ENSG00000197483_10 (sequence is synthesized)
attcagcagcgaggagctgctcctggagcaccagccgtgccccgggcccgatgcggcgccccagccccaggaggcacccgccgaggcgcccaaggccgaccagccaccgtcccctctgcc

SEQ ID NO: 717159 - DNA, 120 bp, Artificial Sequence
  ENSG00000197483_11 (sequence is synthesized)
ccccgcgcctggctttgcctgtctgccctgcggcaagtccttccggacggtggctgggctctcccgccaccagcacagccacggggctgccggcgggcaagcgttccgctgcggcagctg

SEQ ID NO: 717160 - DNA, 120 bp, Artificial Sequence
  ENSG00000197483_12 (sequence is synthesized)
cgacggctccttcccgcagctggccagcctcctggcgcatcagcagtgccacgtggaagaggccgcggccgggcgcccgcccccgcaggctgaggctgcggaggtgacctgcccccagga

SEQ ID NO: 717161 - DNA, 120 bp, Artificial Sequence
  ENSG00000197483_13 (sequence is synthesized)
accgctggcgcctgccgcccccgtcccgccgccacccccgtccgcccccgcttctgcggagcggccctacaaatgtgccgagtgcggcaagtccttcaagggctcctccgggctgcgcta

SEQ ID NO: 717162 - DNA, 120 bp, Artificial Sequence
  ENSG00000197483_14 (sequence is synthesized)
atccaccagcgggtgcacacgggcctgcgggccttcacctgtggccagtgcggcctcaccttcaagtggtcgtcccactaccagtaccacctgcggctgcactctggcgagcggccctac

SEQ ID NO: 717163 - DNA, 120 bp, Artificial Sequence
  ENSG00000197483_15 (sequence is synthesized)
gcctgcggggagtgtggcaaggccttccgcaacacgtcgtgcctgcgtcgccaccgccacgtgcacactggcgagaggccccacgcctgcggtgtctgcggcaagagcttcgcgcagacc

SEQ ID NO: 717164 - DNA, 120 bp, Artificial Sequence
  ENSG00000197483_16 (sequence is synthesized)
tccaacctgcggcagcaccagcgcgtgcacacgggcgagcggcccttccgctgcccgctctgccccaagaccttcacccactcctccaacctgctgctgcaccagcgcacgcactcggcg

SEQ ID NO: 717165 - DNA, 120 bp, Artificial Sequence
  ENSG00000197483_17 (sequence is synthesized)
gagcgccccttcacctgccccatctgcggtcgcggcttcgttatggccgcctatctgcagcggcacctgaggacgcacgccccggccaacacgcctcccagcaccacagcccctgccgcc

SEQ ID NO: 717166 - DNA, 120 bp, Artificial Sequence
  ENSG00000197483_18 (sequence is synthesized)
ggcccccagccccctgctccactggctgctgcgcgggccccgccagccacccaagatgtccacgtcctgccccacctccaggccacgctctccctcgaggtggcggggggcacggcccag

SEQ ID NO: 717167 - DNA, 120 bp, Artificial Sequence
  ENSG00000197483_19 (sequence is synthesized)
gccccgagcttggggccagcagcgcccaactctcagacgttcctcctggtgcaaactgcccagggcctccagctgatccccagcagcgtgcagccccctacacctccgccccctcccgca

SEQ ID NO: 717168 - DNA, 120 bp, Artificial Sequence
  ENSG00000197483_20 (sequence is synthesized)
cctcccaagctcatcctgctgccctcctccagtgctggggctgggggcggccgtgcaaggcagggcccgcgggcagtggggaaagcgggccagggggcgggagtggtctggctgccaggc

SEQ ID NO: 717169 - DNA, 120 bp, Artificial Sequence
  ENSG00000197483_21 (sequence is synthesized)
cctgggggtctaggggtgcagggagcggccagcgctggggccagcgggacagggcagagcctcatcgttctgcagaatgtggggggtggggaggcagggccacaggaaatgagtggggtg

SEQ ID NO: 717170 - DNA, 120 bp, Artificial Sequence
  ENSG00000197483_22 (sequence is synthesized)
cagctccagcccctccgaccagccccagaagtaaccacggtccagctccagccagcgcaggaggtgaccacagtccagctccagccagcacaggaagtaaccacggtccagctccagcca

SEQ ID NO: 717171 - DNA, 120 bp, Artificial Sequence
  ENSG00000197483_23 (sequence is synthesized)
gcacaggaggtgaccacggtccagctccagcccgtggccggccagctctccaattccagtgggggagctgtggctactgaggcacccaacctgctggttgttcagagcggggcagctgag

SEQ ID NO: 717172 - DNA, 120 bp, Artificial Sequence
  ENSG00000197483_24 (sequence is synthesized)
gagttgctcactggcccgggccccggggaggcgggggatggcgaggccagcactggtgtggtccaggatgtcctctttgagacactccagacggacgagggcttgcagagcgtgctggtg

SEQ ID NO: 717173 - DNA, 120 bp, Artificial Sequence
  ENSG00000197483_25 (sequence is synthesized)
ctgagcggggccgatggcgaacagactcgactctgcgtacaggaggtagaaacacttcctcctgggctgacggagccgcctgccaccggcccacccggacagaaactcctcatcatccgc

SEQ ID NO: 717174 - DNA, 120 bp, Artificial Sequence
  ENSG00000197483_26 (sequence is synthesized)
ccgcagcgccccagccactgagctgctggacagcagcaacactggaggaggcaccgccacgctgcagctcctggccccaccgccgtcaggcccagcctcgggccccgcggggctccccgg

SEQ ID NO: 717175 - DNA, 120 bp, Artificial Sequence
  ENSG00000197483_27 (sequence is synthesized)
ccagcctcccagatggtgcaagtggtccccgcaggagctgggcctggtgttatgacccctcagggcctgccctccatccagattgtccagactctacccgcagtccagctggtgcacacg

SEQ ID NO: 717176 - DNA, 120 bp, Artificial Sequence
  ENSG00000197483_28 (sequence is synthesized)
ttttgaggagaggcagtgattcccctcccgccccgcacagagaccccgactcactgccagccggggcggggcagggtgccgcaggctgggcttgctaataaagacccgagtctccccgcc

SEQ ID NO: 717177 - DNA, 120 bp, Artificial Sequence
  ENSG00000197487_0 (sequence is synthesized)
aggcgctggagcgaggagccagagagagctgcggagagctgccagctgcagcgggcgtgttccgcagctgtaggcacctgtcgtcctgccttcgatggctcctccctccgtccccctggt

SEQ ID NO: 717178 - DNA, 120 bp, Artificial Sequence
  ENSG00000197487_1 (sequence is synthesized)
cctcctcctcgtcctcttgctgagcctggcagagactccagcatccgcacctgcccaccggggacgaggaggctggaccctcaatagtgctggctaccttctgggtcccgtcctccacct

SEQ ID NO: 717179 - DNA, 120 bp, Artificial Sequence
  ENSG00000197487_2 (sequence is synthesized)
tccccaaatgggtgaccaagacggaaagagggagacagcccttgagatcctagacctgtggaaggccatcgacgggctcccctactcccaccctccacagccctccaagaggaatgtgat

SEQ ID NO: 717180 - DNA, 120 bp, Artificial Sequence
  ENSG00000197487_3 (sequence is synthesized)
cttcttctccagctcctcctgctccctctgaaaccttttctaggtaccctatgctgagactaagatcctgaagttaaatacccaggtctcatgaagacattgtaaagcatttgaattatt

SEQ ID NO: 717181 - DNA, 120 bp, Artificial Sequence
  ENSG00000197487_4 (sequence is synthesized)
ctaaaaaatttctggagtttcttaggttttattgattcatccttgaaatcagtataatgtgctattaatggaaccaatagtaattcgaggactagttgggagattctggggtaatcaggg

SEQ ID NO: 717182 - DNA, 120 bp, Artificial Sequence
  ENSG00000197487_5 (sequence is synthesized)
aatattcctgcaacacatttaaaggaattgtgttcttttggaatcatcccaattataacacgagctattgcataatacaaataaccctcttaagtctgagagtctgtgtctttatttgaa

SEQ ID NO: 717183 - DNA, 120 bp, Artificial Sequence
  ENSG00000197487_6 (sequence is synthesized)
aagattcttcaaattgcgtacttactcctccatattctttcaacccacatgagtctcctcgagaagtgaggagaggcagtttggagcagaatggagagaataaaatgtttcttgtcaaac

SEQ ID NO: 717184 - DNA, 120 bp, Artificial Sequence
  ENSG00000197496_0 (sequence is synthesized)
gtccggcggcagcggcgttggggactccggcgggggatgcgcgcccggcccctcagcgcccccagcacgccgccgagtcccgctcgccatgggccactccccacctgtcctgcctttgtg

SEQ ID NO: 717185 - DNA, 120 bp, Artificial Sequence
  ENSG00000197496_1 (sequence is synthesized)
tgcctctgtgtctttgctgggtggcctgacctttggttatgaactggcagtcatatcaggtgccctgctgccactgcagcttgactttgggctaagctgcttggagcaggagttcctggt

SEQ ID NO: 717186 - DNA, 120 bp, Artificial Sequence
  ENSG00000197496_2 (sequence is synthesized)
gggcagcctgctcctgggggctctcctcgcctccctggttggtggcttcctcattgactgctatggcaggaagcaagccatcctcgggagcaacttggtgctgctggcaggcagcctgac

SEQ ID NO: 717187 - DNA, 120 bp, Artificial Sequence
  ENSG00000197496_3 (sequence is synthesized)
cctgggcctggctggttccctggcctggctggtcctgggccgcgctgtggttggcttcgccatttccctctcctccatggcttgctgtatctacgtgtcagagctggtggggccacggca

SEQ ID NO: 717188 - DNA, 120 bp, Artificial Sequence
  ENSG00000197496_4 (sequence is synthesized)
gcggggagtgctggtgtccctctatgaggcaggcatcaccgtgggcatcctgctctcctatgccctcaactatgcactggctggtaccccctggggatggaggcacatgttcggctgggc

SEQ ID NO: 717189 - DNA, 120 bp, Artificial Sequence
  ENSG00000197496_5 (sequence is synthesized)
cactgcacctgctgtcctgcaatccctcagcctcctcttcctccctgctggtacagatgagactgcaacacacaaggacctcatcccactccagggaggtgaggcccccaagctgggccc

SEQ ID NO: 717190 - DNA, 120 bp, Artificial Sequence
  ENSG00000197496_6 (sequence is synthesized)
ggggaggccacggtactcctttctggacctcttcagggcacgcgataacatgcgaggccggaccacagtgggcctggggctggtgctcttccagcaactaacagggcagcccaacgtgct

SEQ ID NO: 717191 - DNA, 120 bp, Artificial Sequence
  ENSG00000197496_7 (sequence is synthesized)
gtgctatgcctccaccatcttcagctccgttggtttccatgggggatcctcagccgtgctggcctctgtggggcttggcgcagtgaaggtggcagctaccctgaccgccatggggctggt

SEQ ID NO: 717192 - DNA, 120 bp, Artificial Sequence
  ENSG00000197496_8 (sequence is synthesized)
ggaccgtgcaggccgcagggctctgttgctagctggctgtgccctcatggccctgtccgtcagtggcataggcctcgtcagctttgccgtgcccatggactcaggcccaagctgtctggc

SEQ ID NO: 717193 - DNA, 120 bp, Artificial Sequence
  ENSG00000197496_9 (sequence is synthesized)
tgtgcccaatgccaccgggcagacaggcctccctggagactctggcctgctgcaggactcctctctacctcccattccaaggaccaatgaggaccaaagggagccaatcttgtccactgc

SEQ ID NO: 717194 - DNA, 120 bp, Artificial Sequence
  ENSG00000197496_10 (sequence is synthesized)
taagaaaaccaagccccatcccagatctggagacccctcagcccctcctcggctggccctgagctctgccctccctgggccccctctgcccgctcgggggcatgcactgctgcgctggac

SEQ ID NO: 717195 - DNA, 120 bp, Artificial Sequence
  ENSG00000197496_11 (sequence is synthesized)
cgcactgctgtgcctgatggtctttgtcagtgccttctcctttgggtttgggccagtgacctggcttgtcctcagcgagatctaccctgtggagatacgaggaagagccttcgccttctg

SEQ ID NO: 717196 - DNA, 120 bp, Artificial Sequence
  ENSG00000197496_12 (sequence is synthesized)
caacagcttcaactgggcggccaacctcttcatcagcctctccttcctcgatctcattggcaccatcggcttgtcctggaccttcctgctctacggactgaccgctgtcctcggcctggg

SEQ ID NO: 717197 - DNA, 120 bp, Artificial Sequence
  ENSG00000197496_13 (sequence is synthesized)
cttcatctatttatttgttcctgaaacaaaaggccagtcgttggcagagatagaccagcagttccagaagagacggttcaccctgagctttggccacaggcagaactccactggcatccc

SEQ ID NO: 717198 - DNA, 120 bp, Artificial Sequence
  ENSG00000197496_14 (sequence is synthesized)
gtacagccgcatcgagatctctgcggcctcctgaggaatccgtctgcctggaaattctggaactgtggctttggcagaccatctccagcatcctgcttcctaggccccagagcacaagtt

SEQ ID NO: 717199 - DNA, 120 bp, Artificial Sequence
  ENSG00000197496_15 (sequence is synthesized)
ccagctggtcttttgggagtggcccctgcccccaaaggtggtctgcttttgctggggtaaaaaggatgaaagtctgagaatgcccaactcttcattttgagtctcaggccctgaaggttc

SEQ ID NO: 717200 - DNA, 120 bp, Artificial Sequence
  ENSG00000197496_16 (sequence is synthesized)
ctgaggatctagcttcatgcctcagtttccccattgacttgcacatctctgcagtatttataagaagaatattctatgaagtctttgttgcaccatggacttttctcaaagaatctcaag

SEQ ID NO: 717201 - DNA, 120 bp, Artificial Sequence
  ENSG00000197496_17 (sequence is synthesized)
ccgatatcacccctaaatccaaatgaggatatcatcttttctaatctcttttttcaactggctgggacattttcggaagggggaagtctctttttttactcttatcattttttttttttg

SEQ ID NO: 717202 - DNA, 68 bp, Artificial Sequence
  ENSG00000197496_18 (sequence is synthesized)
gggaagtctctttttttactcttatcattttttttttttgaggtggagtctcattctgttgcccaggc

SEQ ID NO: 717203 - DNA, 85 bp, Artificial Sequence
  ENSG00000197496_19 (sequence is synthesized)
tgtgcctcagcctcctaagcagctgggactacaggcgcatgcaaccatacccagctaatttatttttagcgtgaactcctgagct

SEQ ID NO: 717204 - DNA, 120 bp, Artificial Sequence
  ENSG00000197496_20 (sequence is synthesized)
tacaggccttttgactcttttatctgagttttattgacccctctaattctcttacccagaatatttatccttcaccagcaactctgactctttgacgggaggcctcagttctagtccttg

SEQ ID NO: 717205 - DNA, 120 bp, Artificial Sequence
  ENSG00000197496_21 (sequence is synthesized)
gtctgctggtgtcattgctgtaggaatgaccacgggcctcagtttccccatttgtataatgggaagcctgtaccaggtcattcttaagatttctcctgactccagtgagctggaattcta

SEQ ID NO: 717206 - DNA, 120 bp, Artificial Sequence
  ENSG00000197496_22 (sequence is synthesized)
aatgctggtctaggagctgtctccaggatggtgcaggatggctttgcggaaaggagatgggtttggaggccaacaaacctgcttgtcaatattgcctttgcctcttggcagcccttgaac

SEQ ID NO: 717207 - DNA, 120 bp, Artificial Sequence
  ENSG00000197496_23 (sequence is synthesized)
ttgagtaaataacaactccctgaacctcagtttcctcatctgcagaatggggataattatgtcccaggggtatatttagaccctgtttcctttcaggagggtccccagctggtccagggc

SEQ ID NO: 717208 - DNA, 120 bp, Artificial Sequence
  ENSG00000197496_24 (sequence is synthesized)
ctgggaaatttctacttatcctcattacccaggtccctcctttggaccctgtaaagggtcagggtgaatcagatgggggactgagcaagtagctatgactgcagatcatgtaaggaaggg

SEQ ID NO: 717209 - DNA, 120 bp, Artificial Sequence
  ENSG00000197496_25 (sequence is synthesized)
actgacaagaagctcccagatgctggggagaatgaagagctaaaatagatcctaggtgctggatgctttgtcatccatgcgtgcacatatgggtgctggcagagcccccaaggactctgg

SEQ ID NO: 717210 - DNA, 120 bp, Artificial Sequence
  ENSG00000197496_26 (sequence is synthesized)
cctctcgagttctcctatcttctccattctagatgcttcccttgtatccagtgatgtgctggagctggctttgccaagcttgtgagagctggttgctacattttcaggatttttacaagt

SEQ ID NO: 717211 - DNA, 120 bp, Artificial Sequence
  ENSG00000197496_27 (sequence is synthesized)
agagctggttgctacattttcaggatttttacaagttggtaaacacagccattataaaaaattaaatgatttaaatttataattaagtaaattacattaaaacaaaaaaattatactcaa

SEQ ID NO: 717212 - DNA, 120 bp, Artificial Sequence
  ENSG00000197496_28 (sequence is synthesized)
ctgtgcttttgaggctatttctacatagtaactcttatggagacctaggggagacaccgcgcatctcttcctgattccccactcaatgacatcatgttagtctttggttgcttaactggc

SEQ ID NO: 717213 - DNA, 120 bp, Artificial Sequence
  ENSG00000197496_29 (sequence is synthesized)
tgtggggagtgtttttgtatcacaaagattagagaggactacacatcagggcttgatttattgtttgttgattttctagacttcagaacatgctggataaaatgtcagtaatgcaaatta

SEQ ID NO: 717214 - DNA, 120 bp, Artificial Sequence
  ENSG00000197496_30 (sequence is synthesized)
aactttaaagtatgtcttgtttgtagccaatacatggtgtatagcaccaaaaaatggagggattattcttccagtagttgaacactgtcatccgtttcagctgacagctgctcaaatcat

SEQ ID NO: 717215 - DNA, 120 bp, Artificial Sequence
  ENSG00000197496_31 (sequence is synthesized)
ttaagaaggagttctgacattcattttcattgttttacttttgtcttcctcactagtgtaaacaaaaatttcaaccagcattcatgccgaacctatacccattcttcagtgcctagctgt

SEQ ID NO: 717216 - DNA, 120 bp, Artificial Sequence
  ENSG00000197496_32 (sequence is synthesized)
acagttatcagggatttttatttgtagtctaattttgtcaaatcatggccaaatcgcagtgatagttgactttggatacaaggtttggcaaaaaaaaaaatattaacaaaatattctgta

SEQ ID NO: 717217 - DNA, 120 bp, Artificial Sequence
  ENSG00000197496_33 (sequence is synthesized)
agaatcaattgtctatatggaatttaggataaagaatatttacaataaagaatatttacaataaagagtttattattatttgtaagttgtgtgcaacaaacataccctttatctctgtaa

SEQ ID NO: 717218 - DNA, 120 bp, Artificial Sequence
  ENSG00000197496_34 (sequence is synthesized)
ccctttatctctgtaaaatttatacacacaaaaattaacaaaagattctgtaagaattaattggctatatggaatttaggatagaatatttacaataaagagtatttacaataaagagtt

SEQ ID NO: 717219 - DNA, 120 bp, Artificial Sequence
  ENSG00000197496_35 (sequence is synthesized)
agatgtgtatacctggaggctccttggggaggtggcacaggacctgggactgaagagggagagtagaggaacaaggggaccctttccttggggaacaaggacagtgcacgtaggaggccc

SEQ ID NO: 717220 - DNA, 120 bp, Artificial Sequence
  ENSG00000197496_36 (sequence is synthesized)
cctcagcgcccccagcacgccgccgagtcccgctcgccatggcgcccactcgggcccaggcactctcccgggcgccctgatccgacagccccaggcaagtgcagctgttcctggtctgca

SEQ ID NO: 717221 - DNA, 120 bp, Artificial Sequence
  ENSG00000197496_37 (sequence is synthesized)
gatgaagaaatggaggctccgaaagaagcaaagcagttcatcgattcgctgagcgcggttgtgccccaggcgctgttgtgggcctggggacgctgtcgcgaacgaaactgcgaacaaaac

SEQ ID NO: 717222 - DNA, 120 bp, Artificial Sequence
  ENSG00000197496_38 (sequence is synthesized)
tggacgtgattctgcagagaggggacagagaaggagattctaacacagcattggggtgggacgcgtggggaatggctttgttgccactcgggactagggctctatttttctctctgcatt

SEQ ID NO: 717223 - DNA, 120 bp, Artificial Sequence
  ENSG00000197496_39 (sequence is synthesized)
cagaagcctcgaaggatcagtcgttgattcttgagtgagcacctactacgtgccagacattgatataggggttagagcttcagcaatgaacaaaatagacaataaacctctctctcatgg

SEQ ID NO: 717224 - DNA, 120 bp, Artificial Sequence
  ENSG00000197497_0 (sequence is synthesized)
gcaaacccggaagcagatctcttggagtgaaggctgttagtcgccgcgtagaaccctggaagaagaggaagaggaaggcaaaggagtcagggatggctcttcctcagggacagttgacat

SEQ ID NO: 717225 - DNA, 88 bp, Artificial Sequence
  ENSG00000197497_1 (sequence is synthesized)
gttgacattcaaggacatgcctggaccctgctcagaagactttgtacagggacgtcatgttggagaattataggaacctggtctccct

SEQ ID NO: 717226 - DNA, 120 bp, Artificial Sequence
  ENSG00000197497_2 (sequence is synthesized)
cttgtaaatgtgtaaacacggatttgccaccaaaggggaagaacaatatgggagaagcgttctacacggtgaagttggagagacttgaaagctgtgacactgtaggcttgtccttccagg

SEQ ID NO: 717227 - DNA, 120 bp, Artificial Sequence
  ENSG00000197497_3 (sequence is synthesized)
aagttcagaaaaatacatacgactttgagtgtcagtggaaagatgatgaaggaaattataaaacagtacttatgttgcaaaaagaaaatctccctggtagaagagctcaacgtgatagaa

SEQ ID NO: 717228 - DNA, 120 bp, Artificial Sequence
  ENSG00000197497_4 (sequence is synthesized)
gggctgcaggaaacaggcatattgaaaatcagcttggagtaagctttcagtcacatctccctgaactgcagcaatttcaacatgaagggaaaatttatgaatacaatcaagttgagaagt

SEQ ID NO: 717229 - DNA, 120 bp, Artificial Sequence
  ENSG00000197497_5 (sequence is synthesized)
ctcctaataatcgaggaaaacattataaatgtgatgaatgtggcaaggtcttcagtcaaaactcacggctaacaagtcataagagaattcatactggagagaagccttaccagtgtaata

SEQ ID NO: 717230 - DNA, 120 bp, Artificial Sequence
  ENSG00000197497_6 (sequence is synthesized)
agtgtggcaaagcctttactgttcgttcaaacctaacaatccatcaggtcatccatactggagaaaaaccttacaaatgtaatgaatgtggaaaggtcttcagtcaaccttcaaaccttg

SEQ ID NO: 717231 - DNA, 120 bp, Artificial Sequence
  ENSG00000197497_7 (sequence is synthesized)
gtgtaatgagtgtggcaaagcctttagagcacattcaaaactaactacacatcaggtcatccatactggagaaaaaccttacaaatgtaaggaatgtggcaagtgcttcactcaaaattc

SEQ ID NO: 717232 - DNA, 120 bp, Artificial Sequence
  ENSG00000197497_8 (sequence is synthesized)
gagaaaaaccttacaaatgtaaggaatgtggcaagtgcttcactcaaaattcacaccttgcaagtcatcgaagaattcatactggggagaagccttacaagtgtaatgagtgtggcaaag

SEQ ID NO: 717233 - DNA, 86 bp, Artificial Sequence
  ENSG00000197497_9 (sequence is synthesized)
caatccacactggagaatcaggcacaattcataccttgcaaagcatcggcgaattcatactggtgagaaaccttacaagtgtaatg

SEQ ID NO: 717234 - DNA, 120 bp, Artificial Sequence
  ENSG00000197497_10 (sequence is synthesized)
gtgtaatgagtgtgggaaagccttcagtatgcattcaaacttaactaagcatcagatcatccataccggagaaaagcctttcaaatgtaatgaatgcgtcaaggttttcactcagtattc

SEQ ID NO: 717235 - DNA, 120 bp, Artificial Sequence
  ENSG00000197497_11 (sequence is synthesized)
gaattcatactggagagaaaccttacaggtgtgatgagtgtggcaaagcctttagtgtgcgatcaagcctaactacccatcaggcaattcatactggagaaaagccttacaaatgtaatg

SEQ ID NO: 717236 - DNA, 120 bp, Artificial Sequence
  ENSG00000197497_12 (sequence is synthesized)
ctacccatcaggcaattcatactggagaaaagccttacaaatgtaatgactgcggtaaggtcttcacacaaaattcacaccttgcaagtcatcggggaattcattctggagagaaacctt

SEQ ID NO: 717237 - DNA, 120 bp, Artificial Sequence
  ENSG00000197497_13 (sequence is synthesized)
tctggagagaaaccttacaagtgtgatgaatgtggtaaagccttcagtcaaacatcacaacttgcaaggcattggagagttcatactggagaaaaaccttacaagtgtaatgagtgtggc

SEQ ID NO: 717238 - DNA, 120 bp, Artificial Sequence
  ENSG00000197497_14 (sequence is synthesized)
ctatacatcagacaatacatactggacaaaaaccatacaaatgtaatgattgcggcaaggtcttcagacacaattcgtaccttgcaattcatcagagaattcacactggtgagaaacctt

SEQ ID NO: 717239 - DNA, 120 bp, Artificial Sequence
  ENSG00000197497_15 (sequence is synthesized)
actggtgagaaaccttataagtgtaatgagtgcggcaaagcatttagtgtacattcaaacctagctacccatcaggtcatccatactggagaaaaaccttacaaatgtaatgaatgtggc

SEQ ID NO: 717240 - DNA, 89 bp, Artificial Sequence
  ENSG00000197497_16 (sequence is synthesized)
tcactcaaaattcacatcttgcaaatcatagaagaattcacactggagaaaaaccttataggtgtaatgagtgtgggaaagccttcagt

SEQ ID NO: 717241 - DNA, 65 bp, Artificial Sequence
  ENSG00000197497_17 (sequence is synthesized)
tttactcaaaattcaaaccttgcaaaacatcgaagaattcatagtggatagaaaccttacaaagg

SEQ ID NO: 717242 - DNA, 79 bp, Artificial Sequence
  ENSG00000197497_18 (sequence is synthesized)
ctgggcaacataaccttacaaaggagtgcggccagtttttcagccacaaattctttcacaacatcagagaattcattct

SEQ ID NO: 717243 - DNA, 120 bp, Artificial Sequence
  ENSG00000197497_19 (sequence is synthesized)
tcagccacaaattctttcacaacatcagagaattcattcttgagacaattcttacaaatacagtgactgtggcaaactcctgatgagtttaagcattaacagacatcagagttcaaatcc

SEQ ID NO: 717244 - DNA, 120 bp, Artificial Sequence
  ENSG00000197497_20 (sequence is synthesized)
tgtgaatatactatgtatgacagaagctttatccaggtctcagagctcaatacgcatcaaaagatacatctttgatgaagtcacacaaacgtaacatgcatgctgagactattactcctg

SEQ ID NO: 717245 - DNA, 120 bp, Artificial Sequence
  ENSG00000197497_21 (sequence is synthesized)
gaccacaactgtaggtgaggattcataggaagagtagaactcagtctctagtttcctcataaccctctgatattatatacttcagcataatcagaagtccaaatgtgttaaaactcatta

SEQ ID NO: 717246 - DNA, 120 bp, Artificial Sequence
  ENSG00000197497_22 (sequence is synthesized)
catgatacatatcaaaggttgtaggatgtttggaaatggccaattactttcagcttataaaatgttttgttgaagtatttaagatttattgaaaaggctactatttataacttccaacca

SEQ ID NO: 717247 - DNA, 120 bp, Artificial Sequence
  ENSG00000197497_23 (sequence is synthesized)
gaactttgcaatgtgctgattttatacatgattatacgcctaacatggtgttgttcgggaaagaatcaaaggatggaagggctcactcacttcattaggtgaggattatttctctccaag

SEQ ID NO: 717248 - DNA, 120 bp, Artificial Sequence
  ENSG00000197497_24 (sequence is synthesized)
ctcctgaagaaaaaagactctgccttttaaaattaaatatagtctgaattagagagcacttggaaagggcagaggatgatgaactatgatgtcactcatcatccttattgcactgcaggt

SEQ ID NO: 717249 - DNA, 88 bp, Artificial Sequence
  ENSG00000197497_25 (sequence is synthesized)
gaactatgatgtcactcatcatccttattgcactgcaggtgcccttcttctgacagaagagcactgtgggtatgggaagaaattctct

SEQ ID NO: 717250 - DNA, 87 bp, Artificial Sequence
  ENSG00000197497_26 (sequence is synthesized)
taagagcgaaactctgactcaaaaaaagaaagaaagaaattctctaccagtagaccatgaaatagagccaggaagacactcggattt

SEQ ID NO: 717251 - DNA, 120 bp, Artificial Sequence
  ENSG00000197497_27 (sequence is synthesized)
cagtagaccatgaaatagagccaggaagacactcggatttttattagaggagagtaatagcttattagggactgatgtgtggtacaaataatgcagaaaagtggaggctaccttctccat

SEQ ID NO: 717252 - DNA, 73 bp, Artificial Sequence
  ENSG00000197497_28 (sequence is synthesized)
ggtacaaataatgcagaaaagtggaggctaccttctccatcaaatgccaatagctgttgcatagcaaagattg

SEQ ID NO: 717253 - DNA, 120 bp, Artificial Sequence
  ENSG00000197497_29 (sequence is synthesized)
cttggcctgccaaagtgctgggattacgggctggagccaccgtgcccggccggccgagcataagaagtttaatcaaagtaaccagaatcccatgtttgttactaggatttacattaactg

SEQ ID NO: 717254 - DNA, 120 bp, Artificial Sequence
  ENSG00000197497_30 (sequence is synthesized)
accagaatcccatgtttgttactaggatttacattaactgctggaatcacattttgctactatttaagaatgcatcatagatttaatgttttaactaataaaatttgatgtattttataa

SEQ ID NO: 717255 - DNA, 63 bp, Artificial Sequence
  ENSG00000197497_31 (sequence is synthesized)
gcgcgggcagtttcttgcaaacccggaagcagatctcttggagtgaaggctgttagtcgccgc

SEQ ID NO: 717256 - DNA, 120 bp, Artificial Sequence
  ENSG00000197497_32 (sequence is synthesized)
cctttgcctactgcgcgggcagtttcttgcaaacccggaagcagatctcttggagtgaaggctgttagtcgccgcgtagaaccctggaagaagaggaagaggaaggcaaaggagtcaggg

SEQ ID NO: 717257 - DNA, 120 bp, Artificial Sequence
  ENSG00000197497_33 (sequence is synthesized)
atggctcttcctcaggaaaaacaactcaaaaaccatgttttcctctgctctcacaccaacaccacaatccacacagaagacttctgtggccaaatgcgaggggtttctccccaccaacaa

SEQ ID NO: 717258 - DNA, 120 bp, Artificial Sequence
  ENSG00000197497_34 (sequence is synthesized)
acagattgatggctcagttcccagttgcatgtccaggcctctgaaacttctgaccgaccaacttcaagttgaagttcccatgaacccttctttgggttggatttatttgctggagcaact

SEQ ID NO: 717259 - DNA, 120 bp, Artificial Sequence
  ENSG00000197497_35 (sequence is synthesized)
cttagaggtcagagaaacactcagttttactggttgattataaatactattacagaagataccagtgaagagatgcataaggtgaggtatggggaaaggggcgcagagcttccctgccct

SEQ ID NO: 717260 - DNA, 70 bp, Artificial Sequence
  ENSG00000197497_36 (sequence is synthesized)
ggctgttagtcgccgcaatctcactctatttcccagactggcgtgcaatggcacgatctcgactcactgt

SEQ ID NO: 717261 - DNA, 120 bp, Artificial Sequence
  ENSG00000197497_37 (sequence is synthesized)
gctgggattacagtaaagggaagagctctccaacgggcccacccacctgtcttaaggcctgcaatctcaactcaggaggtactgggaatggtctgtccctgctccgggctgttgctggct

SEQ ID NO: 717262 - DNA, 120 bp, Artificial Sequence
  ENSG00000197497_38 (sequence is synthesized)
acaaacgtaacatgcatgctgagactattactcctggaccacaactgtagataaacgacaaagtttgtatgttcaccctcataacattttgatcatttgaacttgtgacctctctactgg

SEQ ID NO: 717263 - DNA, 120 bp, Artificial Sequence
  ENSG00000197497_39 (sequence is synthesized)
tcccagttcccagaccgagatccccgattcccagatccccgttcctgagctgcagcagactccctagcaggactgggtccaacccgccggcaaacaattttaacataaaccgttttcaac

SEQ ID NO: 717264 - DNA, 120 bp, Artificial Sequence
  ENSG00000197497_40 (sequence is synthesized)
ttggtaagaggaaatcattttggtttctatcataagtggtccacgtaagtctattctttcaccttaaaactgcttcaaattggaacggtgctcccggggacatagtgaacactccagcgt

SEQ ID NO: 717265 - DNA, 120 bp, Artificial Sequence
  ENSG00000197497_41 (sequence is synthesized)
agtttcttgcaaacccggaagcagatctcttggagtgaaggctgttagtcgccgcgtagaaccctggaagaagaggaagaggaaggcaaaggagtcagggatggctcttcctcaggtgag

SEQ ID NO: 717266 - DNA, 120 bp, Artificial Sequence
  ENSG00000197497_42 (sequence is synthesized)
atgatattctcggtggattgttctgtctccttcctttcagaaaccttggaccttggagttgggaatcttctctgagtctgaagcatcctgcctgacaggtttgctcgcactcactcgtgc

SEQ ID NO: 717267 - DNA, 120 bp, Artificial Sequence
  ENSG00000197497_43 (sequence is synthesized)
cttccctcagtccctctcatctcacttagattccatctctggtgacccagtgacatgaacttgggaagaggctgcacggggcatggacctgggaagggctcacaccccgacatggatgga

SEQ ID NO: 717268 - DNA, 120 bp, Artificial Sequence
  ENSG00000197497_44 (sequence is synthesized)
gacggggtgagggtcccgtggtgtcagtgctgttgggcaacagggattgttcaggacatatttgaatatattgacagctctgtgtaaactgtgataagagaagctggttatgaagtcaga

SEQ ID NO: 717269 - DNA, 120 bp, Artificial Sequence
  ENSG00000197497_45 (sequence is synthesized)
tgttagtgtgtacaagcacccacgaaatgctgtaaaatgagacgactgtggggaaagctttgtcacctcatttatatttgcatttgatgccgaacaagtgagtcactgtgtttctgactc

SEQ ID NO: 717270 - DNA, 76 bp, Artificial Sequence
  ENSG00000197497_46 (sequence is synthesized)
catttgatgccgaacaagtgagtcactgtgtttctgactccaaactccttttttttgttgtttttacgcgatctca

SEQ ID NO: 717271 - DNA, 120 bp, Artificial Sequence
  ENSG00000197497_47 (sequence is synthesized)
tacaggcatgcatcaccatgcccggctatttttttttgtatttttaatagagatggtgtttcaccgtgttgcccaggccggtctccaattcgtgagctcaagcgatccacccgcctcggc

SEQ ID NO: 717272 - DNA, 120 bp, Artificial Sequence
  ENSG00000197497_48 (sequence is synthesized)
tgggattacaggcgtgaactaccgcgcccggccttcattacttatattcaaccaagagagaaacttatccctcaggcagcgccctgaaaagacagaatattggatgaatgttttcatact

SEQ ID NO: 717273 - DNA, 120 bp, Artificial Sequence
  ENSG00000197497_49 (sequence is synthesized)
gccctgaaaagacagaatattggatgaatgttttcatacttttcctctcccaggagaaatgggaaattggtgtttttcttgcagtgacactgcatcatgccagggtaaggcctctgggag

SEQ ID NO: 717274 - DNA, 120 bp, Artificial Sequence
  ENSG00000197497_50 (sequence is synthesized)
caaagcaattggttcatatattgctactacatttgtgtctccgtggtggaggtagtgtttgggagttctagtcctctattttattgacatcatcactttagtacagtcttataatttctt

SEQ ID NO: 717275 - DNA, 120 bp, Artificial Sequence
  ENSG00000197497_51 (sequence is synthesized)
taaataggtctggaaacgtattttaataggtagcattgtataattcctaatgtactcgtgagatgcattgtgtgtttgtgtctaatgagagctgctaaagaaagaatgaagattgttttc

SEQ ID NO: 717276 - DNA, 120 bp, Artificial Sequence
  ENSG00000197497_52 (sequence is synthesized)
acagtattgttattagttcttaaacttcaatgcattcttctcctgggttgtgagtatgtcatctgttagttttaacagatccagctcctactttacctttttcttggtctcagctcaggc

SEQ ID NO: 717277 - DNA, 120 bp, Artificial Sequence
  ENSG00000197497_53 (sequence is synthesized)
ctcagctcaggcatgctctgaagtgggctttagctggagccttggtgagcccccattttctcctttttttttttttctgatacaaggtccggccctgtcgcccagtctggagtgcagtgg

SEQ ID NO: 717278 - DNA, 82 bp, Artificial Sequence
  ENSG00000197497_54 (sequence is synthesized)
tgcaacctccacctcctgggctcaagccagcctcccatctcagcctctcaagtagctgggactacacgtaaagatgggggtc

SEQ ID NO: 717279 - DNA, 89 bp, Artificial Sequence
  ENSG00000197497_55 (sequence is synthesized)
ggtgttaggattacaggcatgagccatcatgcccagcccattttctccattttaatttagatcaaatgcatccagcatttactgcttga

SEQ ID NO: 717280 - DNA, 120 bp, Artificial Sequence
  ENSG00000197497_56 (sequence is synthesized)
ttttaatttagatcaaatgcatccagcatttactgcttgattatgatgtttggtgaaattttcttgtttaatattagcttttgggtgtttttcaaatttcctttttggactgatttttaa

SEQ ID NO: 717281 - DNA, 120 bp, Artificial Sequence
  ENSG00000197497_57 (sequence is synthesized)
ttatccaataatttctttgagtaagtattgttgcaatatgtacttctgaaatctattcatgtatgatattaaaaaatgtcctaatcttaggatttcatgagtaaaataaactaaaacctc

SEQ ID NO: 717282 - DNA, 120 bp, Artificial Sequence
  ENSG00000197497_58 (sequence is synthesized)
cattgggcttttgttaatgcctaaatatctaaatttaactggaaaaaaatggtatctgtacttttaatatttgtatttaataccaattggagtacaagttcttacatatttttgttttag

SEQ ID NO: 717283 - DNA, 120 bp, Artificial Sequence
  ENSG00000197497_59 (sequence is synthesized)
cgtttttacagcttaatttacaaaaatgtttgtaaactaaatcaagtacaattcatgcatttcagttgtcccagactttctgaaaagcacatgagcaaaaaagacaactaaagatgtcat

SEQ ID NO: 717284 - DNA, 120 bp, Artificial Sequence
  ENSG00000197498_0 (sequence is synthesized)
gttccggcgcacgtaatcgccgagggcacgtgcatgccccctggttaagagttgcaggtagcggtagcgatggacactctggatcgagtagtaaagcccaaaacgaaaagagccaagaga

SEQ ID NO: 717285 - DNA, 120 bp, Artificial Sequence
  ENSG00000197498_1 (sequence is synthesized)
ttccttgagaagagagaaccgaaactcaatgaaaatattaaaaatgccatgctgattaaagggggaaatgcaaatgcaacagtgacaaaagtacttaaagatgtgtatgcactgaaaaaa

SEQ ID NO: 717286 - DNA, 120 bp, Artificial Sequence
  ENSG00000197498_2 (sequence is synthesized)
ccatacggtgtactatataaaaagaaaaatattacaagaccttttgaggatcagacatcactggaattcttttcaaagaagtcagattgttctttattcatgtttggctcccataataag

SEQ ID NO: 717287 - DNA, 120 bp, Artificial Sequence
  ENSG00000197498_3 (sequence is synthesized)
aagcggccaaataatctagtaataggtcgtatgtatgactaccatgtgctggatatgattgaattaggtattgagaattttgtctctctaaaagacattaagaacagtaaatgtcctgag

SEQ ID NO: 717288 - DNA, 120 bp, Artificial Sequence
  ENSG00000197498_4 (sequence is synthesized)
ggaacaaaacccatgctgatatttgctggcgatgatttcgatgtaacagaagattatagaagactaaaaagtcttcttattgatttcttcagaggccccacagtatcaaatatccgcctg

SEQ ID NO: 717289 - DNA, 120 bp, Artificial Sequence
  ENSG00000197498_5 (sequence is synthesized)
gctggattagagtatgttctgcacttcactgcactgaatgggaagatttactttcgaagctataagttgctgttgaagaaatctggttgcagaacaccacggattgaattggaagagatg

SEQ ID NO: 717290 - DNA, 120 bp, Artificial Sequence
  ENSG00000197498_6 (sequence is synthesized)
ggaccctcattggatctggttctgaggaggacacacctggcatcggatgacctttataaattatctatgaaaatgccaaaagctctcaagccaaagaagaagaaaaatatttcccatgat

SEQ ID NO: 717291 - DNA, 120 bp, Artificial Sequence
  ENSG00000197498_7 (sequence is synthesized)
acttttggtacaacttatggaaggattcatatgcagaagcaagacctaagcaaactacaaaccaggaaaatgaaggggttgaagaagcgacctgcagaaaggataacagaagaccacgag

SEQ ID NO: 717292 - DNA, 120 bp, Artificial Sequence
  ENSG00000197498_8 (sequence is synthesized)
aaaaagtcaaaaagaattaaaaaaaattgatggaacttagccagccactactgtttcattgtgttctacttaagagaattatcaagcgtcaatccattcagagtttcttataagatctta

SEQ ID NO: 717293 - DNA, 120 bp, Artificial Sequence
  ENSG00000197498_9 (sequence is synthesized)
ttatatatttttataacatgataattttacgatatattattatgaacagtaatatactagtattaagtgtaaagtaagccttttatttgagacattacaccctggtgtgccattttctct

SEQ ID NO: 717294 - DNA, 120 bp, Artificial Sequence
  ENSG00000197498_10 (sequence is synthesized)
tgtgatatcccctgccctccacaaattcttctttctcattgggtggatggatgggtgaggagggatctccataaccattgggatttttttgaatttctggccttagctaaagaaagccac

SEQ ID NO: 717295 - DNA, 120 bp, Artificial Sequence
  ENSG00000197498_11 (sequence is synthesized)
agaaagccggacccgcaggagctgtgtaaacaatctcagtatgaattacctggaaagttaacctcctctcccaacatggatctacattctgatttttattttctacttttattttgcctg

SEQ ID NO: 717296 - DNA, 120 bp, Artificial Sequence
  ENSG00000197498_12 (sequence is synthesized)
aaatcctactcgttgacatttgagattttaagctttgtggctgaaaatatatagatctctgagagggatgtctgctatctgattattgataaattacactactgttgattgttttaagag

SEQ ID NO: 717297 - DNA, 120 bp, Artificial Sequence
  ENSG00000197498_13 (sequence is synthesized)
actctactactaagtagagcccaccccgcttctctgagacgaaacctgtgttttttggttggtttgtttttaagagatggggtcttgttctgtcacctagggtggagtgcagtggcacaa

SEQ ID NO: 717298 - DNA, 89 bp, Artificial Sequence
  ENSG00000197498_14 (sequence is synthesized)
tcctcctgcctgagcctcttacgtatactttttttttttaaagcaatgaggtcttgctgtgttgcccaggctggactcaaattcctggg

SEQ ID NO: 717299 - DNA, 120 bp, Artificial Sequence
  ENSG00000197498_15 (sequence is synthesized)
gcagccggaactacagatgttggtccactgcacctggcagaaaagaagttttgataggggcagaaatgaaaaaggagaaaacaggtgagttttaaggtgcagggcactttagggtactgg

SEQ ID NO: 717300 - DNA, 120 bp, Artificial Sequence
  ENSG00000197498_16 (sequence is synthesized)
gtagccctaggtagctaaaggttgcatgaaggccctgggcgtttgcagatggtgtagaagccagccaaagcctaactacttgttttgaaagtttcttgaagacaggccttgtgcctagga

SEQ ID NO: 717301 - DNA, 120 bp, Artificial Sequence
  ENSG00000197498_17 (sequence is synthesized)
aaacagaagctttcttcttccttctactagtattgcatacttgtttttctggaatagggtgttaagttccttgattcagtccttgacaaggaatctcctttatacaagtgccagtaatgt

SEQ ID NO: 717302 - DNA, 120 bp, Artificial Sequence
  ENSG00000197498_18 (sequence is synthesized)
atctcctttatacaagtgccagtaatgttgtaaaggtacagacatacgcaaatcataatttgttacatgaagtaccagtgctttcttttttgttgttttttgagacagagtctcgctctg

SEQ ID NO: 717303 - DNA, 61 bp, Artificial Sequence
  ENSG00000197498_19 (sequence is synthesized)
gattttttgtagagacagggtttcacttcaattccatgttagagagctccgtgcctgtgta

SEQ ID NO: 717304 - DNA, 120 bp, Artificial Sequence
  ENSG00000197498_20 (sequence is synthesized)
ttcacttcaattccatgttagagagctccgtgcctgtgtatacatgcctttatgtaagcttgctcagctacagatcaacaatgctggcactaagcaaaagttcgagcctcagctttacct

SEQ ID NO: 717305 - DNA, 120 bp, Artificial Sequence
  ENSG00000197498_21 (sequence is synthesized)
tctaccctttcccttctcttttgaatccattccttagctttccctagtcctctccggatagctgttactctcctcttgccagaaaaatgaaggagctggtatcatttatactttttgttt

SEQ ID NO: 717306 - DNA, 120 bp, Artificial Sequence
  ENSG00000197498_22 (sequence is synthesized)
gattatacgtttaaccaaagaccatacagtctcgtacctgaatcagacatttgcactttatatctaaatgagaagaaggggctcagataagtcgtttgctgccatctggaggtagatgga

SEQ ID NO: 717307 - DNA, 120 bp, Artificial Sequence
  ENSG00000197498_23 (sequence is synthesized)
caatagctgagaaggggagccatgaaaagaacatcaggagtgatggacgcatagtccttccccaaagcctcgctcatcactggtaggaggcaaagcagtgggtcctcctcaccagccgct

SEQ ID NO: 717308 - DNA, 120 bp, Artificial Sequence
  ENSG00000197498_24 (sequence is synthesized)
tacgggaccctgccatgcctggacccctctatcaggaagacctaccccagcactactggaaaatcagccaatcttaacccaaagatggccatgatttctgtatgtgagacgtcttaaggg

SEQ ID NO: 717309 - DNA, 120 bp, Artificial Sequence
  ENSG00000197498_25 (sequence is synthesized)
tgtttttgtttgttttaatcagccctcttgtttgagatttggcaatacatttctgttttctaggtaatttctgtgtctgatggtagaggatctaataagtattggaatgcttcctatttg

SEQ ID NO: 717310 - DNA, 120 bp, Artificial Sequence
  ENSG00000197498_26 (sequence is synthesized)
ctgatagaagtaccaaatagtattattgaagtctaacaaagactttttgttgagaacaccttgtagtgttgtactatctggaactcttgagctgccatttatatcactttttgtggagag

SEQ ID NO: 717311 - DNA, 120 bp, Artificial Sequence
  ENSG00000197498_27 (sequence is synthesized)
cacatcttgattttcagttgtccttactttagaatacaacacacataaattggagactatgtattcatttcaatggaggtggtaaattgcctgttttaagttttacttaatgttgggttt

SEQ ID NO: 717312 - DNA, 120 bp, Artificial Sequence
  ENSG00000197498_28 (sequence is synthesized)
tggtagatgaggaaagcattttggttatttgttttgttttaaataccaaatttcttatattttttctggaatattaatactattaccaagctattatttcatggaatttgggtttctttt

SEQ ID NO: 717313 - DNA, 120 bp, Artificial Sequence
  ENSG00000197498_29 (sequence is synthesized)
tttttgtttttttaaaattaagtgctgtttgttttcttggttattgaacataatccaaagtagagatgttattactcaattcaagaaaagaaagggctaataaaacttaacttcaagtca

SEQ ID NO: 717314 - DNA, 120 bp, Artificial Sequence
  ENSG00000197498_30 (sequence is synthesized)
aagtgggagccgtgggatgggagggatgtgggattgaagcgttggccgcttttatcctagccagttgaaaaacgtctgacttccgaagtatgagacagatggtatagtggggttaggagc

SEQ ID NO: 717315 - DNA, 120 bp, Artificial Sequence
  ENSG00000197506_0 (sequence is synthesized)
aaactgaagcaagctgtgcccaggtccctgtaacagcaggtggctttctgacatcagcagagactggtgctttttcccaggtacaaaggacctccagaccagagccagccagcagcaaaa

SEQ ID NO: 717316 - DNA, 120 bp, Artificial Sequence
  ENSG00000197506_1 (sequence is synthesized)
agagcatggagctgaggagtacagcagcccccagagctgagggctacagcaacgtgggcttccagaatgaagaaaactttcttgagaacgagaacacatcaggaaacaactcaataagaa

SEQ ID NO: 717317 - DNA, 120 bp, Artificial Sequence
  ENSG00000197506_2 (sequence is synthesized)
gcagagctgtgcaaagcagggagcacacaaacaccaaacaggatgaagaacaggtcacagttgagcaggattctccaagaaacagagaacacatggaggatgatgatgaggagatgcaac

SEQ ID NO: 717318 - DNA, 120 bp, Artificial Sequence
  ENSG00000197506_3 (sequence is synthesized)
aaaaagggtgtttggaaaggaggtatgacacagtatgtggtttctgtaggaaacacaaaacaactcttcggcacatcatctggggcattttattagcaggttatctggttatggtgattt

SEQ ID NO: 717319 - DNA, 120 bp, Artificial Sequence
  ENSG00000197506_4 (sequence is synthesized)
cggcctgtgtgctgaactttcacagagcccttcctctttttgtgatcaccgtggctgccatcttctttgttgtctgggatcacctgatggccaaatacgaacatcgaattgatgagatgc

SEQ ID NO: 717320 - DNA, 120 bp, Artificial Sequence
  ENSG00000197506_5 (sequence is synthesized)
tgtctcctggcagaaggcttctaaacagccattggttctggctgaagtgggtgatctggagctccctggtcctagcagttattttctggttggcctttgacactgccaaattgggtcaac

SEQ ID NO: 717321 - DNA, 120 bp, Artificial Sequence
  ENSG00000197506_6 (sequence is synthesized)
agcagctggtgtccttcggtgggctcataatgtacattgtcctgttatttctattttccaagtacccaaccagagtttactggagacctgtcttatggggaatcgggctacagtttcttc

SEQ ID NO: 717322 - DNA, 120 bp, Artificial Sequence
  ENSG00000197506_7 (sequence is synthesized)
ttgggctcttgattctaaggactgaccctggatttatagcttttgattggttgggcagacaagttcagacttttctggagtacacagatgctggtgcttcatttgtctttggtgagaaat

SEQ ID NO: 717323 - DNA, 120 bp, Artificial Sequence
  ENSG00000197506_8 (sequence is synthesized)
acaaagaccacttctttgcatttaaggtcctgccgatcgtggttttcttcagcactgtgatgtccatgctgtactacctgggactgatgcagtggattattagaaaggttggatggatca

SEQ ID NO: 717324 - DNA, 120 bp, Artificial Sequence
  ENSG00000197506_9 (sequence is synthesized)
tgctagttactacgggatcatctcctattgaatctgtagttgcttctggcaatatatttgttggacaaacggagtctccactgctggtccgaccatatttaccttacatcaccaagtctg

SEQ ID NO: 717325 - DNA, 120 bp, Artificial Sequence
  ENSG00000197506_10 (sequence is synthesized)
aactccacgccatcatgaccgccgggttctctaccattgctggaagcgtgctaggtgcatacatttcttttggggttccatcctcccacttgttaacagcgtcagttatgtcagcacctg

SEQ ID NO: 717326 - DNA, 120 bp, Artificial Sequence
  ENSG00000197506_11 (sequence is synthesized)
cgtcattggctgctgctaaactcttttggcctgagacagaaaaacctaaaataaccctcaagaatgccatgaaaatggaaagtggtgattcagggaatcttctagaagctgcaacacagg

SEQ ID NO: 717327 - DNA, 120 bp, Artificial Sequence
  ENSG00000197506_12 (sequence is synthesized)
gagcatcctcctccatctccctggtggccaacatcgctgtgaatctgattgccttcctggccctgctgtcttttatgaattcagccctgtcctggtttggaaacatgtttgactacccac

SEQ ID NO: 717328 - DNA, 120 bp, Artificial Sequence
  ENSG00000197506_13 (sequence is synthesized)
agctgagttttgagctaatctgctcctacatcttcatgcccttttccttcatgatgggagtggaatggcaggacagctttatggttgccagactcataggttataagaccttcttcaatg

SEQ ID NO: 717329 - DNA, 120 bp, Artificial Sequence
  ENSG00000197506_14 (sequence is synthesized)
aatttgtggcttatgagcacctctcaaaatggatccacttgaggaaagaaggtggacccaaatttgtaaacggtgtgcagcaatatatatcaattcgttctgagataatcgccacttacg

SEQ ID NO: 717330 - DNA, 120 bp, Artificial Sequence
  ENSG00000197506_15 (sequence is synthesized)
ctctctgtggttttgccaatatcgggtccctaggaatcgtgatcggcggactcacatccatggctccttccagaaagcgtgatatcgcctcgggggcagtgagagctctgattgcgggga

SEQ ID NO: 717331 - DNA, 120 bp, Artificial Sequence
  ENSG00000197506_16 (sequence is synthesized)
ccgtggcctgcttcatgacagcctgcatcgcaggcatactctccagcactcctgtggacatcaactgccatcacgttttagagaatgccttcaactccactttccctggaaacacaacca

SEQ ID NO: 717332 - DNA, 120 bp, Artificial Sequence
  ENSG00000197506_17 (sequence is synthesized)
aggtgatagcttgttgccaaagtctgttgagcagcactgttgccaagggtcctggtgaagtcatcccaggaggaaaccacagtctgtattctttgaagggctgctgcacattgttgaatc

SEQ ID NO: 717333 - DNA, 120 bp, Artificial Sequence
  ENSG00000197506_18 (sequence is synthesized)
catcgacctttaactgcaatgggatctctaatacattttgaggtcagccacttctccagtggaactctgaagtacagatgctgaattttctgctttggaaagaaaaaaaaaagaagctat

SEQ ID NO: 717334 - DNA, 120 bp, Artificial Sequence
  ENSG00000197506_19 (sequence is synthesized)
tgtccacagattgatgcttccataatggaatcagctttaattgcaaggaatgaagaaaaacaagagtggaccttcaaagctacaacattttcctcctcccctccctccccaccagcccct

SEQ ID NO: 717335 - DNA, 120 bp, Artificial Sequence
  ENSG00000197506_20 (sequence is synthesized)
ttgattccagtctcaatgggattttctgactttaatgtttgcaaggcatttcaccagaatacagctataaacggccgctcccaacaactgggctctgactcacccacacccacttagtgt

SEQ ID NO: 717336 - DNA, 120 bp, Artificial Sequence
  ENSG00000197506_21 (sequence is synthesized)
ccactaagtagtccagggtgactcagtttaagcacatctcaggtgaggtcactctgcatataccttggcttacctgaaatagcctgaacttgaatctcacataagggaaaactagtcatc

SEQ ID NO: 717337 - DNA, 120 bp, Artificial Sequence
  ENSG00000197506_22 (sequence is synthesized)
aatcaccaactcattgactaccctcaggaagtcctgcagaaatcaagagtccttgaggagaacacgtggatcataccaaaaccagggtttaaatccattctgcttaagagttctatcagt

SEQ ID NO: 717338 - DNA, 120 bp, Artificial Sequence
  ENSG00000197506_23 (sequence is synthesized)
cagtttaaccataaattacgctacagaaacaaacaacccaaaaacctcagtggcttacagatttatttttcactcacatgtttgtaatgatccatcttggttgtaatccatattgcttca

SEQ ID NO: 717339 - DNA, 120 bp, Artificial Sequence
  ENSG00000197506_24 (sequence is synthesized)
gcacccagtctaaaggagcagcctctaaggggggcatgttggtcttaagagggaaaagaaaggtgggaaccacatgatggctctttcatcttccgctaggaaatgataccctttacttcc

SEQ ID NO: 717340 - DNA, 120 bp, Artificial Sequence
  ENSG00000197506_25 (sequence is synthesized)
atgacattccattagccaaaacaagtcctgtgacaggcacgatgtcagtcaccacagttaaattatcctgtcatagggagggatagtgaatattttgcagaagtaatatgatacaccata

SEQ ID NO: 717341 - DNA, 120 bp, Artificial Sequence
  ENSG00000197506_26 (sequence is synthesized)
agggtacataatatccatgtctcccttcaaggagccatcctgttgtaggccataacggtaggcctattcatctgcacatttggtaatgtattcctggtgacaaagcagctactcttcaat

SEQ ID NO: 717342 - DNA, 120 bp, Artificial Sequence
  ENSG00000197506_27 (sequence is synthesized)
caaaagccgtgtaagaagcagttgaggaaaaaaagtcctggttgagctctgaaaaccttgcgttgataatttcattgaccaggatggcatcagtatcaaacttgaagaatgggtgtcagt

SEQ ID NO: 717343 - DNA, 120 bp, Artificial Sequence
  ENSG00000197506_28 (sequence is synthesized)
gtctaagaaaaagattccagagacaatggtggtgtgctctttaacgaaatgcccatcaccactgctcttaatagcatgaagaccacatgctgtgagaaaacacaaacatcaattaccaag

SEQ ID NO: 717344 - DNA, 120 bp, Artificial Sequence
  ENSG00000197506_29 (sequence is synthesized)
tcaagaaacagacactgaatgtgaaaaaggttttgaaataccttaagtaatttattttgtttctatttttccttctgtttgtgtacaagagtaatttaaaagaaaaagctatgtgaaaat

SEQ ID NO: 717345 - DNA, 120 bp, Artificial Sequence
  ENSG00000197506_30 (sequence is synthesized)
agttggggttttttgtgtgttttgttttttgtggtggtgaaggaggaggcctaatgtccagaggactgtttatccctgaagtatgatatactaaaatatttcttattatttgtatcaatt

SEQ ID NO: 717346 - DNA, 120 bp, Artificial Sequence
  ENSG00000197506_31 (sequence is synthesized)
ttccttggagctcaatgtgcccttgcagtcttcagactttattttaggaaaatatatttgcatgttttccccccattctcaatgtttggtgtcctggttcatcataccccacagaatgtt

SEQ ID NO: 717347 - DNA, 120 bp, Artificial Sequence
  ENSG00000197506_32 (sequence is synthesized)
atgtttatgtatcataccattcctctgtggacatgcatttactttgtttacaggttttggtttgggggttctctttttcctactctggacagtgcatgtacatttactttgcatgctggt

SEQ ID NO: 717348 - DNA, 120 bp, Artificial Sequence
  ENSG00000197506_33 (sequence is synthesized)
gcttttttttctatagcaatagtgtctgatagacatatgcaagtcacatgtaatttaagatctagtagccacgctaaaaaacaagtaaaattaattttaatatatttaactcaatacatt

SEQ ID NO: 717349 - DNA, 120 bp, Artificial Sequence
  ENSG00000197506_34 (sequence is synthesized)
ggagatattatttcagtaagatatttttcattcttatgaaactaagtctgtctggtttgcatatctcagttgagacactaaagttttactgataatacttaatccatgtttagatttcat

SEQ ID NO: 717350 - DNA, 120 bp, Artificial Sequence
  ENSG00000197506_35 (sequence is synthesized)
aaaatctaaatttgcaaagtaaatttacatacccatgttggtctaaatgtgcttaaaagttttccaataactgaaatgagtatcagttttaaatttaaaaatttgttacttggttactcc

SEQ ID NO: 717351 - DNA, 120 bp, Artificial Sequence
  ENSG00000197506_36 (sequence is synthesized)
atatttcaggtattagtggctaccatattggtcagagcagattcataggatgatttcccaggtttgaagtgtgtgtatatttctggtattataagatgtcagactggtttttggagaaat

SEQ ID NO: 717352 - DNA, 120 bp, Artificial Sequence
  ENSG00000197506_37 (sequence is synthesized)
atgttgtcttaatttttacctgctttgatatgacctttctgtgtgtacgtgtgacatttctttataaatgcaacatgttcacataggtcctacgttgattccttattaatgctgtgcatc

SEQ ID NO: 717353 - DNA, 120 bp, Artificial Sequence
  ENSG00000197506_38 (sequence is synthesized)
cttgaactgagaaagggggtgttattcctgagctatattataagaggatagtaaaggccaaggaccaggaaaatgagctggttaagcctcttgagcttgttacccccagaaacctcacca

SEQ ID NO: 717354 - DNA, 120 bp, Artificial Sequence
  ENSG00000197506_39 (sequence is synthesized)
ataccctgtgaacgtcgtaagtggcccttctcccagtgaaacaacctaatggaggtttttggtgcatggtgatgtttttattcctctttagtagacatagaagctggaggctgcttgtct

SEQ ID NO: 717355 - DNA, 120 bp, Artificial Sequence
  ENSG00000197506_40 (sequence is synthesized)
tccccagtttctccttcacccatgtacatatagtgggcaaagatggcatgcctatgtttttcagctgtttgagcccgctcactgttgacagattgttgctgttggtctgtgctccccaac

SEQ ID NO: 717356 - DNA, 120 bp, Artificial Sequence
  ENSG00000197520_0 (sequence is synthesized)
ggagtgttcagtgttgatttgatgtgaggtgtgattaaagaagaaccaagaatgactttagtgttgttggcctgagcaactggaagaacagagttgccatttattgagatgagaaggctg

SEQ ID NO: 717357 - DNA, 120 bp, Artificial Sequence
  ENSG00000197520_1 (sequence is synthesized)
ccagaagagtagagttgttttgtttcattatggagattgacggtttccagcagttagacctagagaagagtgtaccttccaaaaagactactcctaaaaggattatccattttgttgacg

SEQ ID NO: 717358 - DNA, 120 bp, Artificial Sequence
  ENSG00000197520_2 (sequence is synthesized)
gagacatcatggaagaatatagcacagaggaggaggaggaagaggaaaaggaggagcagagcacaaattcaacacttgacccttctaaactttcctgggggccctacctacgattttggg

SEQ ID NO: 717359 - DNA, 120 bp, Artificial Sequence
  ENSG00000197520_3 (sequence is synthesized)
ggtggaagatttgctgtcttctttggtcttactcaacccaaatatcagtatgtgttaaacgagttctataggatacaaaacaagaaaagtgacaacaaaagtgaaaggagaggatcaaag

SEQ ID NO: 717360 - DNA, 120 bp, Artificial Sequence
  ENSG00000197520_4 (sequence is synthesized)
gcccaggcagctgaggttcctaatgaaaagtgtcacttggaggctggggtccaagagtatggaaccatacaacaggatgtgacagaggccattcctcagtgaagcacctcatccagggag

SEQ ID NO: 717361 - DNA, 120 bp, Artificial Sequence
  ENSG00000197520_5 (sequence is synthesized)
ggtctggtggcagatcctagctcatgatggcagcaaagactgcagtttccctggatctgttccttggccattgattaccatggcaacaacaccagaggtagcacttctgagccagatctg

SEQ ID NO: 717362 - DNA, 120 bp, Artificial Sequence
  ENSG00000197520_6 (sequence is synthesized)
ccacctcaactccacccctgtgatacaagtcccatgagtactgacatttgcacagtagcataaatgccttaaggaactttgggactgggagtttttggctgaaatcctctgtcatgggac

SEQ ID NO: 717363 - DNA, 120 bp, Artificial Sequence
  ENSG00000197520_7 (sequence is synthesized)
gagggtacagtaaagaagctctattcctcagaagaaaatttgggcaccgcaaagtctaaataaatcccctttcaggatttgatatagtgtgtacttccaacaaccatcctggcgtagttg

SEQ ID NO: 717364 - DNA, 120 bp, Artificial Sequence
  ENSG00000197520_8 (sequence is synthesized)
gggattgttttacaataagtaaacattgctaataactgtgttacaagatcattatcaagatctttaagaattaggtacatccctccaaattaaaacaattgataaataatataagctcta

SEQ ID NO: 717365 - DNA, 120 bp, Artificial Sequence
  ENSG00000197520_9 (sequence is synthesized)
agcatatccaagtgcactgtatggcctcagcctacagaacccttaactcttaaatttatcatctattgaacaatttctaacatcaaaatttgtactactttcaacaccaaacatcactaa

SEQ ID NO: 717366 - DNA, 120 bp, Artificial Sequence
  ENSG00000197520_10 (sequence is synthesized)
ttaatgaaagaaaaatacagaggaattattctaaactttcctgggggccctacctacgattttgggcaggacgaatagcaagcacctcattttctagtaagtactgctaaggttattttt

SEQ ID NO: 717367 - DNA, 120 bp, Artificial Sequence
  ENSG00000197520_11 (sequence is synthesized)
taagctttcattcccaaaggcacagaacttcgcatcctcaggcagacccttcatcttttaccaactctcatcaggaaattcttatctcggcccaaattttatctacttctaaagttccta

SEQ ID NO: 717368 - DNA, 120 bp, Artificial Sequence
  ENSG00000197520_12 (sequence is synthesized)
cttatctttcttaaccatacaaaactgctatagatgcctctttcataggacagagggcaatatttgagggcaataatcagtcctccctgagttgactcttcttctgaataaacttccaag

SEQ ID NO: 717369 - DNA, 120 bp, Artificial Sequence
  ENSG00000197520_13 (sequence is synthesized)
ttaatgaaagaaaaatacagaggaattattcataacctaatgatcccagcaagataatgtcctgtcttctaagatgtgcatcaagcctggtacatactgaaaatcctataagttgttttg

SEQ ID NO: 717370 - DNA, 120 bp, Artificial Sequence
  ENSG00000197520_14 (sequence is synthesized)
agatacagcagtgaacataacaggtaaaaccctccccctctgccaaggggcaggacagggaggaaagggaagacagagacaggtggaatatggagtgttcagtgttgaaatatccaagac

SEQ ID NO: 717371 - DNA, 120 bp, Artificial Sequence
  ENSG00000197520_15 (sequence is synthesized)
gacgaatagcaagcacctcattttctatgctgagcctgcaggccaccttgctactgaaggcagaaaaggaaggccttaaacaacttctgagaagtctgtctggatgcatggaagaattcc

SEQ ID NO: 717372 - DNA, 120 bp, Artificial Sequence
  ENSG00000197520_16 (sequence is synthesized)
tgatgtgggtcttggtaacactggattgagtttgggtttaatttgaaatatacttggagcagatgtttagccggtatgcatggggataatgaacaatacctgttctgattgctcaggacc

SEQ ID NO: 717373 - DNA, 120 bp, Artificial Sequence
  ENSG00000197520_17 (sequence is synthesized)
catgctatacctgttgttaaagtatattgaaaatctctcctgatatatacatctggaaaaaatagtttatatataatcccatataaagatagaagatttgacaaatttcctttgaatcct

SEQ ID NO: 717374 - DNA, 120 bp, Artificial Sequence
  ENSG00000197520_18 (sequence is synthesized)
agaatttttgagaggccaaggcaattgaaatgttttgtcagccttgaagttaagtatagtaatagaccactattactatactatcagaatagtttaaactctgggcatctcaactgatgc

SEQ ID NO: 717375 - DNA, 120 bp, Artificial Sequence
  ENSG00000197520_19 (sequence is synthesized)
cttatttatttgtcaagaaattttcaaaacctggaaagatcgaacatggaaatcattgttagataacacagggtgtgctggccaaagtaactgtgatacattaatagcaaaaaacaaacc

SEQ ID NO: 717376 - DNA, 120 bp, Artificial Sequence
  ENSG00000197530_0 (sequence is synthesized)
gctccggcgggggcgggccctgggctcccgcccttcgggtcccacagtttccagccgccgctctcctcagtgcccggtggcccaggagggcctgggagcccgaagccgtccccgagtcgc

SEQ ID NO: 717377 - DNA, 120 bp, Artificial Sequence
  ENSG00000197530_1 (sequence is synthesized)
tgggagcccgaagccgtccccgagtcgctcctaggtcactggcgcgatgcgggccgtcctctcggctgatgggttggaagcccagcgaggctagaggccagtcccaaagtttccaggcat

SEQ ID NO: 717378 - DNA, 120 bp, Artificial Sequence
  ENSG00000197530_2 (sequence is synthesized)
cagggctgcagcccaggagcctcaaggcggcccggcgggcgactggacggccggacaggtcccgagcagcccggcccaccatggacccctctgcccacaggtcccgagcagccccgccca

SEQ ID NO: 717379 - DNA, 120 bp, Artificial Sequence
  ENSG00000197530_3 (sequence is synthesized)
acatggacccagacccccaggcgggcgtgcaggtgggcatgcgggtggtgcgcggcgtggactggaagtggggccagcaggacggcggcgagggcggcgtgggcacggtggtggagcttg

SEQ ID NO: 717380 - DNA, 120 bp, Artificial Sequence
  ENSG00000197530_4 (sequence is synthesized)
gccgccacggcagcccctcgacacccgaccgcacagtggtcgtgcagtgggaccagggcacgcgcaccaactaccgcgccggctaccagggcgcgcacgacctgctgctgtacgacaacg

SEQ ID NO: 717381 - DNA, 120 bp, Artificial Sequence
  ENSG00000197530_5 (sequence is synthesized)
cccagatcggcgtccggcaccccaacatcatctgtgactgctgcaagaagcacgggctgcgggggatgcgctggaagtgccgtgtgtgcctggactacgacctctgcacgcagtgctaca

SEQ ID NO: 717382 - DNA, 120 bp, Artificial Sequence
  ENSG00000197530_6 (sequence is synthesized)
tgcacaacaagcatgagctcgcccacgccttcgaccgctacgagaccgctcactcgcgccctgtcacactgagtccccgccagggcctcccgaggatcccactaaggggcatcttccagg

SEQ ID NO: 717383 - DNA, 120 bp, Artificial Sequence
  ENSG00000197530_7 (sequence is synthesized)
gagcgaaggtggtgcgaggccccgactgggagtggggctcacaggatggaggggaagggaaaccgggccgtgtggtggacatccgtggctgggatgtggagacaggccggagtgtggcca

SEQ ID NO: 717384 - DNA, 120 bp, Artificial Sequence
  ENSG00000197530_8 (sequence is synthesized)
gcgtgacgtgggctgatggtaccaccaatgtgtaccgtgtgggccacaagggcaaggtggacctcaagtgtgtgggcgaggcagcgggcggcttctactacaaggaccacctcccaaggc

SEQ ID NO: 717385 - DNA, 120 bp, Artificial Sequence
  ENSG00000197530_9 (sequence is synthesized)
tcggcaagccggcggagctgcagcgcagggtgagtgctgacagccagcccttccagcacggggacaaggtcaagtgtctgctggacactgatgtcctgcgggagatgcaggaaggccacg

SEQ ID NO: 717386 - DNA, 120 bp, Artificial Sequence
  ENSG00000197530_10 (sequence is synthesized)
gcggctggaaccccaggatggcggagtttatcggacagacgggcaccgtgcatcgtatcacggaccgcggggacgtgcgcgtgcagttcaaccacgagacgcgctggaccttccaccccg

SEQ ID NO: 717387 - DNA, 120 bp, Artificial Sequence
  ENSG00000197530_11 (sequence is synthesized)
gggcgctcaccaagcaccactccttctgggtgggcgacgtggtccgggtcatcggcgaccttgacacagtgaagcggctgcaggctgggcatggcgagtggacggacgacatggcccctg

SEQ ID NO: 717388 - DNA, 120 bp, Artificial Sequence
  ENSG00000197530_12 (sequence is synthesized)
ccctgggccgcgtcgggaaggtggtgaaagtgtttggagacgggaacctgcgtgtagcagtcgctggtcagcggtggaccttcagcccctcctgcctggtggcctaccggcccgaggagg

SEQ ID NO: 717389 - DNA, 120 bp, Artificial Sequence
  ENSG00000197530_13 (sequence is synthesized)
aagcttcgggcccagaagagtgacccagagcacccgggaaggctggtggtggaggtggcgctgggtaacgcagcccgggctctggacctgctgcggaggcgcccagagcaggtggacacc

SEQ ID NO: 717390 - DNA, 120 bp, Artificial Sequence
  ENSG00000197530_14 (sequence is synthesized)
aagaaccaaggcaggaccgctctgcaagtggctgcctacctgggccaggtggagttgatacggctgctgctacaagccagggcgggcgtggacctgccggacgacgagggcaacacggca

SEQ ID NO: 717391 - DNA, 120 bp, Artificial Sequence
  ENSG00000197530_15 (sequence is synthesized)
ctgcactacgcggccctggggaaccagcccgaggccaccagggtgctcctgagtgctgggtgccgggcggacgccatcaacagcacccagagcacagcactgcacgtggccgtgcagagg

SEQ ID NO: 717392 - DNA, 120 bp, Artificial Sequence
  ENSG00000197530_16 (sequence is synthesized)
ggcttcctggaggtggtgcgggccctgtgtgagcgcggctgtgacgtcaacctgcccgacgcccactcggacacgcccctgcactccgccatctcggcgggcactggagccagcggcatt

SEQ ID NO: 717393 - DNA, 120 bp, Artificial Sequence
  ENSG00000197530_17 (sequence is synthesized)
gtcgaggtcctcacggaggtgccaaacatcgatgttaccgccaccaacagccagggtttcaccctgctgcaccatgcctccctcaagggtcacgcgctagctgtgagaaagattctggct

SEQ ID NO: 717394 - DNA, 120 bp, Artificial Sequence
  ENSG00000197530_18 (sequence is synthesized)
cgggcgcggcagctggtggacgccaagaaggaggacggcttcacggcgctgcatctggctgccctcaacaaccaccgcgaggtggcccagatcctcatccgggagggccgctgtgacgtg

SEQ ID NO: 717395 - DNA, 120 bp, Artificial Sequence
  ENSG00000197530_19 (sequence is synthesized)
aacgtgcgcaaccggaagctgcagtccccgctgcatctcgccgtgcaacaggcccacgtggggctggtgccgctactggtggacgctgggtgcagtgtcaacgccgaggacgaggagggg

SEQ ID NO: 717396 - DNA, 120 bp, Artificial Sequence
  ENSG00000197530_20 (sequence is synthesized)
gacacagccctgcacgtggcgctgcagcgtcatcagctgctgcccctggtggctgatggggccgggggggacccagggcccttgcagctgctgtccaggctacaggcctcgggcctcccc

SEQ ID NO: 717397 - DNA, 120 bp, Artificial Sequence
  ENSG00000197530_21 (sequence is synthesized)
ggcagcgcggagctgacggtgggcgcggcggtcgcctgcttcctggcgctggagggcgccgacgtgagctacaccaaccaccgcggtcggagcccgctggacctggccgccgagggtcgc

SEQ ID NO: 717398 - DNA, 120 bp, Artificial Sequence
  ENSG00000197530_22 (sequence is synthesized)
gtgctcaaggcccttcagggctgcgcccagcgcttccgggagcggcaggcgggcgggggcgcggccccgggccccaggcaaacgctcgggacccccaacaccgtgacgaacctgcacgtg

SEQ ID NO: 717399 - DNA, 120 bp, Artificial Sequence
  ENSG00000197530_23 (sequence is synthesized)
ggcgccgcgccggggcccgaggccgctgagtgcctggtgtgctccgagctggcgctgctggtgctgttctcgccgtgccagcaccgcaccgtgtgtgaggagtgcgcgcgcaggatgaag

SEQ ID NO: 717400 - DNA, 120 bp, Artificial Sequence
  ENSG00000197530_24 (sequence is synthesized)
aagtgcatcaggtgccaggtggtcgtcagcaagaaactgcgcccagacggctctgaggtggcgagcgccgcccccgcccccggcccgccgcgccagctggtggaggagctgcagagccgc

SEQ ID NO: 717401 - DNA, 120 bp, Artificial Sequence
  ENSG00000197530_25 (sequence is synthesized)
taccggcagatggaggaacgcatcacctgccccatctgcatcgacagccacatccgcctcgtgttccagtgcggccacggcgcatgcgccccctgcggctccgcgctcagcgcctgcccc

SEQ ID NO: 717402 - DNA, 120 bp, Artificial Sequence
  ENSG00000197530_26 (sequence is synthesized)
atctgccgccagcccatccgcgaccgcatccagatcttcgtgtgagccgcgccgtccgccgcgcccgagctgccttcgcgtgcccccgccctgtgttttataaaaagaaagattctcgga

SEQ ID NO: 717403 - DNA, 120 bp, Artificial Sequence
  ENSG00000197530_27 (sequence is synthesized)
cagcctggcttgctggctgcccgtctggtttgctgtgttgtgtctccagtggctttagcttccaacaggaaagcctggtagccgagcgaatctgtgacccaggaagtagcaattaaatgc

SEQ ID NO: 717404 - DNA, 120 bp, Artificial Sequence
  ENSG00000197530_28 (sequence is synthesized)
gtgcatcgtatcacggaccgcggggacgtgcgcgtgcagttcaaccacgagacgcgctggaccttccaccccggggcgctcaccaagcttcccagggccagccacctcggcttcacacct

SEQ ID NO: 717405 - DNA, 120 bp, Artificial Sequence
  ENSG00000197530_29 (sequence is synthesized)
gcccagagctggcttctgtctgcctggacactcctcccatggctctggggctagggacacccagggctgccttggacacctggggctctcgtccagccagagcctctggcagtgcctggg

SEQ ID NO: 717406 - DNA, 120 bp, Artificial Sequence
  ENSG00000197530_30 (sequence is synthesized)
gtcgtcgtccgggccgggtgggctgcggcgcgcggcaggcgctctggcctggcctggccgccgctgagcagtcggggccggtgggtggcctcgaacgccgggacagaccgacagacggac

SEQ ID NO: 717407 - DNA, 120 bp, Artificial Sequence
  ENSG00000197530_31 (sequence is synthesized)
cctcgaacgccgggacagaccgacagacggactggccggcggtcccgcgcccccgagcggagcgggcgggacggaaacgtccgggcaagttggggtcggcagggttggaagcccagcgag

SEQ ID NO: 717408 - DNA, 120 bp, Artificial Sequence
  ENSG00000197530_32 (sequence is synthesized)
cgcgctgtgagtgtggggtgggcacacagctgcagccggcctcttgctgtgctgcctgggggcagtcccaggtcccagaccaacctccctgctccacagagctgtgagaaagattctggc

SEQ ID NO: 717409 - DNA, 80 bp, Artificial Sequence
  ENSG00000197530_33 (sequence is synthesized)
gcaattacgggcccggcgctggcggctcctgcgcgctcagaccccagggagcccatccgggcaggcggcggccctgagtg

SEQ ID NO: 717410 - DNA, 120 bp, Artificial Sequence
  ENSG00000197530_34 (sequence is synthesized)
gccccgggggcagacaggcgaccgagccgcgggtcgaggtgctaactgtgcatcttggcatctcccctcggccacagggttggaagcccagcgaggctagaggccagtcccaaagtttcc

SEQ ID NO: 717411 - DNA, 120 bp, Artificial Sequence
  ENSG00000197530_35 (sequence is synthesized)
gctgcagcccaggagcctcaaggcggcccggcgggcgactggacggccggacaggtgagctcttgatcgtccgcggcctgatagtttgcacttggctctcccactttggggctccgtgga

SEQ ID NO: 717412 - DNA, 120 bp, Artificial Sequence
  ENSG00000197530_36 (sequence is synthesized)
agccacgtcagagaggctgtgtttgtgtctgagcatgcatgcgagtggaggggagtggtgagtaatcccgcgtctcctctctgagttcggaacccatggaggaagaaagcagaggtgcca

SEQ ID NO: 717413 - DNA, 120 bp, Artificial Sequence
  ENSG00000197530_37 (sequence is synthesized)
gacaggcctctgataggcacctgcaggattggggcagagcggccgcagcgcaggagcgccggcaagcctggcccttcccgggaggccccctttgtccggttccaccctggcctgttgcct

SEQ ID NO: 717414 - DNA, 120 bp, Artificial Sequence
  ENSG00000197530_38 (sequence is synthesized)
cacatgcaacaagtgtctgaatgtggcgctctcctggccgagggcagccctgggcggtgagtgggatgacaccccagcctgcagggtgcctgtaggtctccacccagatgggcaggattg

SEQ ID NO: 717415 - DNA, 120 bp, Artificial Sequence
  ENSG00000197530_39 (sequence is synthesized)
gtgggctttccctcagcaggtgtctccatgctggcctccccgcctcagggcttcatcccactccgtgggcctgatctccctggggcacctgggatgtccatctgcgttagctggagctac

SEQ ID NO: 717416 - DNA, 120 bp, Artificial Sequence
  ENSG00000197530_40 (sequence is synthesized)
tccatggcctgtggcgtgccacacacagcggcatttcggtgtcattaggcacagctggaggtgcaaggaggagggcagcctcatgtccagttccatgtaacttgcttcttctgaataaag

SEQ ID NO: 717417 - DNA, 120 bp, Artificial Sequence
  ENSG00000197530_41 (sequence is synthesized)
gcaatttgctaactttctcgctaaataggatttggtttctatggcttttaaagcttctccgataaaatacttgcaataagggaactctctcctcctacactctcctgactgatggttcgg

SEQ ID NO: 717418 - DNA, 120 bp, Artificial Sequence
  ENSG00000197530_42 (sequence is synthesized)
aagtcctcctgccctctgagagcttgcagtttcttgtgaaaaagagaaactaagcagcaatagaacagacccggtgtctgcttgcgtggttaagacggtaaatgctaaatgtgtgacact

SEQ ID NO: 717419 - DNA, 120 bp, Artificial Sequence
  ENSG00000197530_43 (sequence is synthesized)
cctccatcattttaaacatcgggagcagttgcctgcagcggggttcagatgccagccaggggcacagcctgtgaactgtgggtagatggcaaagtctagcatttctggcaaaggaaaaaa

SEQ ID NO: 717420 - DNA, 120 bp, Artificial Sequence
  ENSG00000197530_44 (sequence is synthesized)
gccacagccatgtacgccacgatgtacaccaggggctgcgtggccacagctctggtctgctggtctgctccctggagcccctccaccagtgctgggctgtggctgtggctgtctctggtt

SEQ ID NO: 717421 - DNA, 120 bp, Artificial Sequence
  ENSG00000197530_45 (sequence is synthesized)
tgtctttctgggaaaccttggccaggttggtgtgagggcagggctagccttggacatctgcacttcccatagcagcctctggcccagagctcacccgctgtgggcaggtgatcagggtga

SEQ ID NO: 717422 - DNA, 120 bp, Artificial Sequence
  ENSG00000197530_46 (sequence is synthesized)
tcaggtcccacgggtcccctcctctgcacctggagccttgtgggtgtagaacagaaaaataggagggggcaacccagaggcctcctgctctccaggaaggaatggatgctggacaggtcc

SEQ ID NO: 717423 - DNA, 120 bp, Artificial Sequence
  ENSG00000197530_47 (sequence is synthesized)
agggtggaggcagagggagtgaggggcccttgggggaacatctgtcctagagggcttgatttccaggctgcccaccccactcctacccctaatctggtgttcctcacctgcctccaggaa

SEQ ID NO: 717424 - DNA, 120 bp, Artificial Sequence
  ENSG00000197530_48 (sequence is synthesized)
gtcctcacctgaggtctgcagcgggtgtgccaagcgccagccccacatcacctgctcccaggcctgcccaggggatgggtcctgtggccagtaccctcggggtcagcttgacccagaccc

SEQ ID NO: 717425 - DNA, 120 bp, Artificial Sequence
  ENSG00000197530_49 (sequence is synthesized)
agcccagaacctgtcccatggccccaggaggacaggatggtcagggaagcccaagggatgagcccttttgtccacaagcttccctctgacatgggcaggctgcttgtgcgaccccacagc

SEQ ID NO: 717426 - DNA, 120 bp, Artificial Sequence
  ENSG00000197530_50 (sequence is synthesized)
ccccacctctcatgaacaatgggaatggggcaggcccctcgatgctgggctggatcctcccgcccctaagcaggtgcactctgtcccctttgagaagagaccaagggatacaagtgctgg

SEQ ID NO: 717427 - DNA, 120 bp, Artificial Sequence
  ENSG00000197530_51 (sequence is synthesized)
gtcctggcggggtgcccctcctccctgcctgtgggggtctcattactgcctcctgcccccaccacaaacaccccctagagaggccttcggaggcaggtactgagccctggggccagggtg

SEQ ID NO: 717428 - DNA, 120 bp, Artificial Sequence
  ENSG00000197530_52 (sequence is synthesized)
ccaggagcccagtggcaggtcttgggtgactgctggccctggggcaatggtgagaaagccaggcaggcagctgcaggaaggagctgaggagaaaggcggcagagcctcaaaagctgctgg

SEQ ID NO: 717429 - DNA, 120 bp, Artificial Sequence
  ENSG00000197530_53 (sequence is synthesized)
ggtgaggcctgggaggggcccggcggggctgagcctgtgcgtcctggggtcgggcctggcggggctgagcctgtgcgtccagccaccgggcccggcgccctccctctcccacttcctctc

SEQ ID NO: 717430 - DNA, 120 bp, Artificial Sequence
  ENSG00000197530_54 (sequence is synthesized)
tgtaaccccttccacgtacccccttggccttggggggtcaggcaggactagggtgccagctgcacccacgagtccccagccctgaaggaaggggagggactggtgggtggaggtgggtgg

SEQ ID NO: 717431 - DNA, 120 bp, Artificial Sequence
  ENSG00000197530_55 (sequence is synthesized)
ggtcaaggagaagagggggttgggtgtgaaggaacccagaggagggtatgtctctgggagctggaatgggcaggttagggcctccctctgttccaggacaccaggaaggcaggacagctt

SEQ ID NO: 717432 - DNA, 120 bp, Artificial Sequence
  ENSG00000197530_56 (sequence is synthesized)
cgtgggcgggagggaggcggctgggctaagatgctcctggttagtgctgtatgggggccgatgggggtggctggttaggacagggaggtggatgcttggcctagagtggtgggggaggta

SEQ ID NO: 717433 - DNA, 120 bp, Artificial Sequence
  ENSG00000197530_57 (sequence is synthesized)
gtgagggctgcctgggaagcaggatggcagggagggggctggaggtggtggcggtggcagcttggatggccctgggaggggcaggcccggggcaaagcgtcagagctcagctctggatct

SEQ ID NO: 717434 - DNA, 120 bp, Artificial Sequence
  ENSG00000197530_58 (sequence is synthesized)
ggggtcctggataccaggcacctttgaggaggcgccgaagggagtcatgagacgggcttgtagagtgagttccctgcatatgagggctcaggtggggcagagtgggcccgtcctgcaccc

SEQ ID NO: 717435 - DNA, 120 bp, Artificial Sequence
  ENSG00000197530_59 (sequence is synthesized)
cttccgagagcgttatttgtgaacctttcatgaagcccccggggccaggctccctgatccctgggcccagaccaccctgcagttcccgcgccaggctggcacggcgcccgcctttcccac

SEQ ID NO: 717436 - DNA, 120 bp, Artificial Sequence
  ENSG00000197530_60 (sequence is synthesized)
cggcctccctggtgccagactgcgggcctccttgggccctagggcttgaaccagcctgcctgccccgttgggcctctctgctctcccgcggagcccactctgaccgggagtgtcccatgg

SEQ ID NO: 717437 - DNA, 120 bp, Artificial Sequence
  ENSG00000197530_61 (sequence is synthesized)
ctgtgcggcgggtacccaggccttgccactggggccttggccttcggggagggtgctgcctcctgaccgctcccaggaagacggagcaagtctctccagagccgtggccttaagcagtgg

SEQ ID NO: 717438 - DNA, 120 bp, Artificial Sequence
  ENSG00000197530_62 (sequence is synthesized)
tgccatgggcagggcacagagggtggcctctgggtggctctacaggcagcagtggccatcaggcagccagcatcccccagggcggcatgagacctccaggaggacagcccatacccggag

SEQ ID NO: 717439 - DNA, 120 bp, Artificial Sequence
  ENSG00000197530_63 (sequence is synthesized)
gcgccggggcccgaggccgctgagtgcctggtgtgctccgagctggcgctgctggtgctgttctcgccgtgccagcaccgcaccgtgtgtgagggtgagtggggggccccggggtgggga

SEQ ID NO: 717440 - DNA, 120 bp, Artificial Sequence
  ENSG00000197530_64 (sequence is synthesized)
gaagagatggcggttttcttctgagagctttatttgtgaaccctcttgcagtgtcacactgagtccccgccagggcctcccgaggatcccactaaggggcatcttccagggagcgaaggt

SEQ ID NO: 717441 - DNA, 120 bp, Artificial Sequence
  ENSG00000197530_65 (sequence is synthesized)
tgatggttcggaagtcctcctgccctctgagagcttgcagtttcttgtgaaaaagagaaactaagcagcaatagaacagacccggtgtctgcttgcgtggttaagacggtcccgagcagc

SEQ ID NO: 717442 - DNA, 120 bp, Artificial Sequence
  ENSG00000197532_0 (sequence is synthesized)
atgaccaccataattctggaagtagataatcatacagtgacaacacgtttcattcttctggggtttccaacacgaccagccttccagcttctctttttctccattttcctggcaacctat

SEQ ID NO: 717443 - DNA, 120 bp, Artificial Sequence
  ENSG00000197532_1 (sequence is synthesized)
ctgctgacactgctggagaatcttcttatcatcttagctatccacagtgatgggcagctgcataagcccatgtacttcttcttgagccacctctccttcctggagatgtggtatgtcaca

SEQ ID NO: 717444 - DNA, 120 bp, Artificial Sequence
  ENSG00000197532_2 (sequence is synthesized)
gtcatcagccccaagatgcttgttgacttcctcagtcatgacaagagtatttccttcaatggctgcatgactcaactttacttttttgtgacctttgtctgcactgagtacatccttctt

SEQ ID NO: 717445 - DNA, 120 bp, Artificial Sequence
  ENSG00000197532_3 (sequence is synthesized)
gctatcatggcctttgaccgctatgtagccatttgtaatccactacgctacccagtcatcatgaccaaccagctctgtggcacactggctggaggatgctggttctgtggactcatgact

SEQ ID NO: 717446 - DNA, 120 bp, Artificial Sequence
  ENSG00000197532_4 (sequence is synthesized)
tttatagcacaacttcactactgtggcatgcctcagatcaatcactacttttgtgatatctctccactccttaacgtctcctgtgaggatgcctcacaggctgagatggtggacttcttc

SEQ ID NO: 717447 - DNA, 120 bp, Artificial Sequence
  ENSG00000197532_5 (sequence is synthesized)
ttggccctcatggtcattgctattcctctttgtgttgtggtggcatcctacgctgctatccttgccaccatcctcaggatcccttctgctcagggccgccaaaaggcattctccacctgt

SEQ ID NO: 717448 - DNA, 120 bp, Artificial Sequence
  ENSG00000197532_6 (sequence is synthesized)
gcctcccacctgaccgtcgtaattctcttctattccatgacacttttcacctatgcccgtcccaaactcatgtatgcctacaattccaacaaagtggtatctgttctctacactgtcatt

SEQ ID NO: 717449 - DNA, 120 bp, Artificial Sequence
  ENSG00000197532_7 (sequence is synthesized)
gttccactcctcaaccccatcatttactgtctgaggaaccatgaagtaaaggcagccctcagaaagaccatacattgcagaggaagtgggccccagggaaatggggctttcagtagttaa

SEQ ID NO: 717450 - DNA, 120 bp, Artificial Sequence
  ENSG00000197532_8 (sequence is synthesized)
aaccagacttgcccagaaactctctaggcttatgtacattgttcttctcttggtctacatgatttcttctcttttctcagcgcaagctggccatctttgataaagctaggtgggaaaagg

SEQ ID NO: 717451 - DNA, 120 bp, Artificial Sequence
  ENSG00000197532_9 (sequence is synthesized)
tatcccccaatctccagtactgtaacactgctctcctctgtgtgtgtgtgcatgtgtgtgtgtgtgtatacacaatcatgactggagaaacatgttctcaagaagtaacctctggtatca

SEQ ID NO: 717452 - DNA, 120 bp, Artificial Sequence
  ENSG00000197532_10 (sequence is synthesized)
ggctgagagacaagttttaaaatgttagaaaagctatttgaaatcaggaagaaacacagagagagagacagagagagtgggtggtaggagggaggaaaggaggaagatgaatactttttc

SEQ ID NO: 717453 - DNA, 120 bp, Artificial Sequence
  ENSG00000197532_11 (sequence is synthesized)
cacacaacttatcaaaataaatgccatacaggacaaacaattaaatataaagaataaaaccatcgttcatctctcagatggttagaaaagggtttttaaacactctatattgtagaagta

SEQ ID NO: 717454 - DNA, 90 bp, Artificial Sequence
  ENSG00000197532_12 (sequence is synthesized)
agagactgaggcaggaggatcccctgagtccaggaacttgggcccagcctggtcaacatagggagtccccacccacttccctccaaataa

SEQ ID NO: 717455 - DNA, 120 bp, Artificial Sequence
  ENSG00000197532_13 (sequence is synthesized)
ggtcaacatagggagtccccacccacttccctccaaataacataaatgactaatttgttaaggcgtttaaaaacaaaagattaagtttataccaaataacaaagtgaaaactattactaa

SEQ ID NO: 717456 - DNA, 120 bp, Artificial Sequence
  ENSG00000197532_14 (sequence is synthesized)
agtatataaacataattttaaaaataggtagttgttatgggcaaagttatgtcccactcctccctccctccaaaaaagtatgttgtcctaaccccagtctctcagaatgtgaccatattt

SEQ ID NO: 717457 - DNA, 120 bp, Artificial Sequence
  ENSG00000197532_15 (sequence is synthesized)
gaaagtagggtttttatagtggtaatcgagctaaaatttgactgctagggtgggccctaagacaatatgactggtgtcattataaaaaggaaaaatttggacacagacacacacagagga

SEQ ID NO: 717458 - DNA, 120 bp, Artificial Sequence
  ENSG00000197532_16 (sequence is synthesized)
aagacaatgtgcacacacacagggcagagagcaaccatgtttctgcagtaatgcatctataagctaaggaagaagtattgctggcaaacaccagaagctagaagcagcaaggaaggatgt

SEQ ID NO: 717459 - DNA, 120 bp, Artificial Sequence
  ENSG00000197532_17 (sequence is synthesized)
tagcctagagctgaaagagagagagagagtatggccctcccaagtactttatttgtgattcctaagatcaaaaatactgagacagtatttggtactttttaatggcagccctaggaaact

SEQ ID NO: 717460 - DNA, 120 bp, Artificial Sequence
  ENSG00000197532_18 (sequence is synthesized)
aggaaactaatactggagccaataaacctcagcaatttttaaaaagatattaaaaaacaaaaattgacaaatgggatgtaattaaactgacaagcttctgcacagcaaaagaaattatca

SEQ ID NO: 717461 - DNA, 79 bp, Artificial Sequence
  ENSG00000197532_19 (sequence is synthesized)
tacaacatatttacaagatgaaaacaaacaactccatttaaaagtgggcaaaggatgtgaacagacacttttcaaaaga

SEQ ID NO: 717462 - DNA, 120 bp, Artificial Sequence
  ENSG00000197532_20 (sequence is synthesized)
aaaagtgggcaaaggatgtgaacagacacttttcaaaagaaaacatacatgcagccaacaatcatatgaaaaaaaggctcactgatcattagagaaatgaaaatcgaatccacaatgagt

SEQ ID NO: 717463 - DNA, 120 bp, Artificial Sequence
  ENSG00000197532_21 (sequence is synthesized)
ccctcccccctccccccacccacaacattccccggagtgtgatgttcctgtgtccataataatagccattctaactggtgtgaagtaacgtctaattttgttaccatctaacaccactcc

SEQ ID NO: 717464 - DNA, 120 bp, Artificial Sequence
  ENSG00000197532_22 (sequence is synthesized)
tgtgtccataataatagccattctaactggtgtgaagtaacgtctaattttgttaccatctaacaccactccaaatggctattactaaaatgtaaaaaaataacagatgctggtgaggtt

SEQ ID NO: 717465 - DNA, 120 bp, Artificial Sequence
  ENSG00000197532_23 (sequence is synthesized)
ggttgtggagaaaaaggaacacgtattcaatgttgttgggagtgtatattagttcaatctatgtaaaagacagtgtaacgattcctcaaagacttaaaaacagaaataccatttgaccca

SEQ ID NO: 717466 - DNA, 77 bp, Artificial Sequence
  ENSG00000197532_24 (sequence is synthesized)
tttattgcagcactatttacaatagcgaagacatggaaccaaccacaatgcacatgaaatactatgcagccataaaa

SEQ ID NO: 717467 - DNA, 120 bp, Artificial Sequence
  ENSG00000197532_25 (sequence is synthesized)
tacatatacaacatgaaatactatgcagccataaaaaaaaattagatcatgtcctttccgggaacatggatgggactggaggccatcacctttagcaaactaatgcaagaacagaaaacc

SEQ ID NO: 717468 - DNA, 120 bp, Artificial Sequence
  ENSG00000197532_26 (sequence is synthesized)
aaataccacatattctcacttgtaagtaggagctaaatgatgagaactcttggacacacagtagggaacacagtaggggcccattagagggtgcagggtgggaggaggtagaggatcagg

SEQ ID NO: 717469 - DNA, 79 bp, Artificial Sequence
  ENSG00000197532_27 (sequence is synthesized)
ccattagagggtgcagggtgggaggaggtagaggatcaggagaaataactaatgggtaataggcttaatacaagattac

SEQ ID NO: 717470 - DNA, 120 bp, Artificial Sequence
  ENSG00000197532_28 (sequence is synthesized)
gttatattcctgagaaaatggaatctaaagctgaaatctaagtgggaagaggaaatggatagtatgggcagtagttttctggctctgcaacctcatgatcattccttaaaaaaaaaaaaa

SEQ ID NO: 717471 - DNA, 120 bp, Artificial Sequence
  ENSG00000197532_29 (sequence is synthesized)
aaccatcccctagttgtcctacatatttatgccataaaatagagctgttgagaaatggggatcaagagtgactgtggctctggagaagagcagaaaagagaattgaagcaataggacaca

SEQ ID NO: 717472 - DNA, 120 bp, Artificial Sequence
  ENSG00000197532_30 (sequence is synthesized)
gagcaagacttgaaatgggaaggtgtttagtatcaatgggtttgggaatgattatcagcctaacacaaaaagaggtcacacattttgctaaattaatgaacagaaatgcagaagagtcac

SEQ ID NO: 717473 - DNA, 120 bp, Artificial Sequence
  ENSG00000197532_31 (sequence is synthesized)
taatagaattcttgcttgttttctctgatattactcccaacagattacagtttttaaatttattacccttggaaaagtcccacggtcctctcccttttttcattaacaatggctgctgtt

SEQ ID NO: 717474 - DNA, 120 bp, Artificial Sequence
  ENSG00000197532_32 (sequence is synthesized)
tgcaccagttttttgctgtttttggcaggggttgaagttggggtgggggaaactttgtgtggggtggagtgtgtgtttttttaaaaggaggaggagctatgtatgtggggtaagtaaagt

SEQ ID NO: 717475 - DNA, 120 bp, Artificial Sequence
  ENSG00000197532_33 (sequence is synthesized)
agcctggaaaggtcacagcaaatatcataggaactgaatttaaactctaaatcccatttgatgttcacaaaatgtgaaccccattgtattatccccattttagaaataaagtaactaata

SEQ ID NO: 717476 - DNA, 120 bp, Artificial Sequence
  ENSG00000197532_34 (sequence is synthesized)
ttctaaaagattatgtggtactctcacttagctatacaaagacaaaagttggatttgaatgcacttttgtcaaactcctaagcaagcactttatacaatggattgtattgaagaaactat

SEQ ID NO: 717477 - DNA, 120 bp, Artificial Sequence
  ENSG00000197532_35 (sequence is synthesized)
tacccttcatgttatccattcaattttgttctctgaaaagctggtgaataattgcatcaaacctgattttgctgttaatcctgtgggtatgctcaactattgcttcattcaagcttaagc

SEQ ID NO: 717478 - DNA, 120 bp, Artificial Sequence
  ENSG00000197532_36 (sequence is synthesized)
acattgttagacacaagcaagaacgttctctccattttacagataagtggggtcatgcaaccactccagagtcacccaaattgcccctagagaatgggtagttgggccttctttctcttc

SEQ ID NO: 717479 - DNA, 120 bp, Artificial Sequence
  ENSG00000197532_37 (sequence is synthesized)
tccatattcagcagatggggatgttttgcctgtagtgaaagggtggtctggagaccatttatgtgcccaaaagtgatatattggtaaagcacagaactgggatttagaaagttataaact

SEQ ID NO: 717480 - DNA, 120 bp, Artificial Sequence
  ENSG00000197532_38 (sequence is synthesized)
ctattttgtatgaccttggacaagttactgctcttgagaaaatctgaaaacaagttaaaatataagctccctaaattccatcttttctcaaaagctttggttctcttcataattcaagag

SEQ ID NO: 717481 - DNA, 120 bp, Artificial Sequence
  ENSG00000197532_39 (sequence is synthesized)
gcagtaagataaaaaagcagaaacctcctattgtgataaatttgctggtggtgggctctatcaatacaaataaccatagactagtgcttgtgtcatggaaggaactgactttgtctgtgc

SEQ ID NO: 717482 - DNA, 80 bp, Artificial Sequence
  ENSG00000197535_0 (sequence is synthesized)
cgggcaggtggagcgctcgcggctgctcgcggcgagcccgggagtgatggcgaggcccctgcgggcggccagcgcctgag

SEQ ID NO: 717483 - DNA, 120 bp, Artificial Sequence
  ENSG00000197535_1 (sequence is synthesized)
cggctgcgggcgcttcctagtccgctcgggcggccgcccaggcgaggtgcggcctccgcacaggcggggggcgtaggcgcgcggggcccgccatggctgcgtcggagctctacacaaagt

SEQ ID NO: 717484 - DNA, 120 bp, Artificial Sequence
  ENSG00000197535_2 (sequence is synthesized)
cgccatggctgcgtcggagctctacacaaagtttgccagggtttggatacctgatccagaggaagtctggaagtcagcagagctgctcaaagattataagccaggagataaagtcctcct

SEQ ID NO: 717485 - DNA, 120 bp, Artificial Sequence
  ENSG00000197535_3 (sequence is synthesized)
gcttcacctcgaggaaggaaaggatttggaataccatctagatccaaagaccaaggagctgcctcacttacgaaatcctgacatacttgttggtgaaaatgacctcacagccctcagcta

SEQ ID NO: 717486 - DNA, 120 bp, Artificial Sequence
  ENSG00000197535_4 (sequence is synthesized)
tcttcatgagcctgctgtgctccataatctcagagtccgctttattgattccaaacttatttatacgtattgtggtatagtcctagtagctataaatccctatgaacagctgcctattta

SEQ ID NO: 717487 - DNA, 120 bp, Artificial Sequence
  ENSG00000197535_5 (sequence is synthesized)
tggagaagatattattaatgcatacagtggtcagaacatgggtgatatggatccacatatctttgcagtagctgaagaagcttacaagcaaatggccagagatgaacgaaatcagtccat

SEQ ID NO: 717488 - DNA, 120 bp, Artificial Sequence
  ENSG00000197535_6 (sequence is synthesized)
catcgtaagtggagagtctggggcaggaaaaacagtctcagctaagtatgccatgcgatactttgcaactgtgagtggttctgccagtgaggccaatgtggaggaaaaggtcttggcctc

SEQ ID NO: 717489 - DNA, 120 bp, Artificial Sequence
  ENSG00000197535_7 (sequence is synthesized)
caaccccatcatggagtccattggaaatgctaaaacaaccaggaatgataatagcagccgttttgggaagtatattgagattggttttgataagagatatcgaatcattggtgccaatat

SEQ ID NO: 717490 - DNA, 120 bp, Artificial Sequence
  ENSG00000197535_8 (sequence is synthesized)
gagaacttatcttttagagaaatccagagtggtattccaggcagaagaggagagaaactatcatatcttctatcagctttgtgcctcagcaaagttacctgaatttaaaatgctacgatt

SEQ ID NO: 717491 - DNA, 120 bp, Artificial Sequence
  ENSG00000197535_9 (sequence is synthesized)
aggaaatgcagataactttaattacacaaaacaaggaggcagtcctgtgattgaaggagtggatgatgcaaaggagatggcacatactaggcaggcctgcactttgctaggaattagtga

SEQ ID NO: 717492 - DNA, 120 bp, Artificial Sequence
  ENSG00000197535_10 (sequence is synthesized)
atctcatcaaatgggaattttccgaatacttgctggcatccttcacttaggcaatgttggatttacatcccgagatgcagacagctgcacaatacctcccaagcatgaacctctctgcat

SEQ ID NO: 717493 - DNA, 120 bp, Artificial Sequence
  ENSG00000197535_11 (sequence is synthesized)
cttctgtgaactcatgggtgtggactatgaggagatgtgtcactggctctgccatcggaaactggctactgccacagagacatacatcaagcccatctccaagctgcaggccacgaatgc

SEQ ID NO: 717494 - DNA, 120 bp, Artificial Sequence
  ENSG00000197535_12 (sequence is synthesized)
ccgcgatgctttggccaagcacatctatgccaagctctttaactggattgtagataatgtcaatcaggctctccattctgctgtcaaacagcactcttttattggtgtgctagacattta

SEQ ID NO: 717495 - DNA, 120 bp, Artificial Sequence
  ENSG00000197535_13 (sequence is synthesized)
cggatttgaaacatttgagataaatagttttgaacagttttgcataaattatgcaaatgaaaaactacagcaacaattcaatatgcatgtcttcaaattggagcaagaagaatatatgaa

SEQ ID NO: 717496 - DNA, 120 bp, Artificial Sequence
  ENSG00000197535_14 (sequence is synthesized)
ggaacaaattccatggacactcatagatttttatgataatcagccttgtattaatcttatagaatcaaaactaggcattctagatttactggatgaggaatgcaagatgcctaaaggcac

SEQ ID NO: 717497 - DNA, 120 bp, Artificial Sequence
  ENSG00000197535_15 (sequence is synthesized)
agatgacacctgggcccaaaaattgtacaacacacatttgaacaaatgtgcactctttgaaaagcctcgtctatcaaacaaagctttcatcatccaacattttgctgacaaagtggaata

SEQ ID NO: 717498 - DNA, 120 bp, Artificial Sequence
  ENSG00000197535_16 (sequence is synthesized)
ccagtgtgaaggatttctcgaaaagaataaagacaccgtttttgaagaacaaattaaagttcttaaatcaagcaagtttaagatgctaccagaactatttcaagatgatgagaaggccat

SEQ ID NO: 717499 - DNA, 120 bp, Artificial Sequence
  ENSG00000197535_17 (sequence is synthesized)
cagtccaacttcagccacctcctcagggcgcacacccctcacacgaactcctgcaaagcccaccaaaggcagaccaggccaaatggccaaagagcacaagaaaacagtggggcatcagtt

SEQ ID NO: 717500 - DNA, 120 bp, Artificial Sequence
  ENSG00000197535_18 (sequence is synthesized)
cagaaactccctgcacctgcttatggagacactcaatgccactacccctcactatgtgcgctgtatcaagcctaatgacttcaagttcccattcacgtttgatgagaagagggcagtgca

SEQ ID NO: 717501 - DNA, 120 bp, Artificial Sequence
  ENSG00000197535_19 (sequence is synthesized)
gcagctgagagcatgtggtgtcctggaaaccatccgaatcagtgcggccggtttcccctcacggtggacttaccaagaatttttcagccgctaccgtgtcctaatgaagcagaaagatgt

SEQ ID NO: 717502 - DNA, 120 bp, Artificial Sequence
  ENSG00000197535_20 (sequence is synthesized)
gctgagtgacagaaagcaaacatgcaagaatgtgttagagaaactgatactggacaaggacaaataccagtttggtaagacaaagatctttttccgtgccggtcaagtggcctatctaga

SEQ ID NO: 717503 - DNA, 120 bp, Artificial Sequence
  ENSG00000197535_21 (sequence is synthesized)
aaaattgagagctgacaaactgagagctgcctgcatccggatccagaagaccatccgagggtggctgctgagaaagaagtacctacgcatgcggaaggcagccatcaccatgcagagata

SEQ ID NO: 717504 - DNA, 120 bp, Artificial Sequence
  ENSG00000197535_22 (sequence is synthesized)
cgtgcggggctaccaggcccgatgctatgctaagtttctgcgcagaaccaaggcagcaaccatcattcaaaagtactggcgcatgtatgtggtccgcaggaggtacaagattagacgagc

SEQ ID NO: 717505 - DNA, 120 bp, Artificial Sequence
  ENSG00000197535_23 (sequence is synthesized)
tgccactatcgttcttcagtcttacttgcgaggcttcttggccagaaataggtatcgcaagatactccgtgagcacaaagcagtcatcattcagaagcgagtccggggctggctggcccg

SEQ ID NO: 717506 - DNA, 120 bp, Artificial Sequence
  ENSG00000197535_24 (sequence is synthesized)
cacacactacaagaggagcatgcatgccatcatctaccttcagtgctgcttcaggcggatgatggccaagcgtgagctaaagaagctcaaaatcgaggctcgctcagtggagcgctataa

SEQ ID NO: 717507 - DNA, 120 bp, Artificial Sequence
  ENSG00000197535_25 (sequence is synthesized)
gaagctgcacatcggcatggagaacaagatcatgcagctgcagcgcaaagttgatgagcagaacaaagactacaaatgccttgtggagaaactaaccaatctggaaggaatatacaactc

SEQ ID NO: 717508 - DNA, 120 bp, Artificial Sequence
  ENSG00000197535_26 (sequence is synthesized)
tgagactgagaaactacgaagtgacttagaacgtcttcaactaagtgaagaggaagcgaaagttgccactgggcgggtccttagtctgcaggaagaaattgccaagctccggaaagacct

SEQ ID NO: 717509 - DNA, 120 bp, Artificial Sequence
  ENSG00000197535_27 (sequence is synthesized)
ggagcaaactcgttcagagaaaaaatgcattgaggaacatgcagatcgatacaaacaagaaacagagcagctggtatcaaatctgaaggaagaaaatactttgctgaagcaagaaaaaga

SEQ ID NO: 717510 - DNA, 120 bp, Artificial Sequence
  ENSG00000197535_28 (sequence is synthesized)
agccctcaatcaccgcatcgtgcagcaggctaaggagatgacagaaactatggagaagaagttagtagaagaaacgaaacaactggaactcgaccttaatgatgaaaggctgagatatca

SEQ ID NO: 717511 - DNA, 120 bp, Artificial Sequence
  ENSG00000197535_29 (sequence is synthesized)
gaaccttctgaatgagttcagtcgcctggaagaaagatatgatgacctcaaggaagagatgacccttatggtgcatgtgcctaagcctggacacaagagaacagactccacccacagcag

SEQ ID NO: 717512 - DNA, 120 bp, Artificial Sequence
  ENSG00000197535_30 (sequence is synthesized)
caacgagtctgaatatatctttagctctgaaattgcagaaatggaagacattccatcaaggacagaggaaccaagtgagaagaaggtacctctggacatgtcattgttccttaagctcca

SEQ ID NO: 717513 - DNA, 120 bp, Artificial Sequence
  ENSG00000197535_31 (sequence is synthesized)
gaagcgggtcacagagctggagcaggagaagcaggtgatgcaggatgagctggaccgcaaggaggagcaggtgctccgcagcaaggccaaggaagaagaaagaccacaaattagaggtgc

SEQ ID NO: 717514 - DNA, 120 bp, Artificial Sequence
  ENSG00000197535_32 (sequence is synthesized)
agaactggaatatgagtcactcaagcgtcaagaactagaatcagaaaacaaaaaactgaagaatgagctaaatgagttgcgcaaggccctcagtgagaaaagtgccccagaggtgaccgc

SEQ ID NO: 717515 - DNA, 120 bp, Artificial Sequence
  ENSG00000197535_33 (sequence is synthesized)
cccaggtgcacctgcctaccgtgtcctcatggagcagctgacctctgtgagcgaggagcttgatgtccgcaaggaggaagtcctcatcttaaggtctcaactggtgagccagaaagaggc

SEQ ID NO: 717516 - DNA, 120 bp, Artificial Sequence
  ENSG00000197535_34 (sequence is synthesized)
catccaacccaaggatgacaagaatacaatgacagattccacaatacttttggaagatgtacaaaaaatgaaagataaaggtgaaatagcacaagcatacattggtttgaaagaaacaaa

SEQ ID NO: 717517 - DNA, 120 bp, Artificial Sequence
  ENSG00000197535_35 (sequence is synthesized)
tagatcatctgctctggattaccatgagttgaatgaggatggagagctgtggctggtttatgaagggttaaaacaagccaacaggctcctggaatcccagctgcagtcacagaagaggag

SEQ ID NO: 717518 - DNA, 120 bp, Artificial Sequence
  ENSG00000197535_36 (sequence is synthesized)
ccatgagaatgaggccgaggccctccgtggggagatccagagcctgaaggaggagaacaaccgacagcagcagctgctggcccagaacctgcagctgcccccagaggcccgcattgaggc

SEQ ID NO: 717519 - DNA, 120 bp, Artificial Sequence
  ENSG00000197535_37 (sequence is synthesized)
cagcctgcagcacgagatcacccggctgaccaacgaaaacttggatttgatggaacaacttgaaaaacaggataagacggtccgtaaactgaaaaaacaactgaaagtatttgccaaaaa

SEQ ID NO: 717520 - DNA, 120 bp, Artificial Sequence
  ENSG00000197535_38 (sequence is synthesized)
aattggcgaactagaagtgggccagatggagaacatatccccaggacagatcattgatgaacccatccgaccagtcaacattcccaggaaagaaaaggatttccaagggatgctggaata

SEQ ID NO: 717521 - DNA, 120 bp, Artificial Sequence
  ENSG00000197535_39 (sequence is synthesized)
caagaaggaggatgagcaaaaacttgttaagaacctgattctggaactgaagccacgtggtgtagcagtcaatttgattccaggattaccggcatatatcctgttcatgtgtgttcgaca

SEQ ID NO: 717522 - DNA, 120 bp, Artificial Sequence
  ENSG00000197535_40 (sequence is synthesized)
tgctgactacctgaatgatgatcagaaagtaaggtcgttgctaacatcaacaattaacagcatcaaaaaagtattgaagaaaagaggtgatgattttgaaaccgtctccttctggctctc

SEQ ID NO: 717523 - DNA, 120 bp, Artificial Sequence
  ENSG00000197535_41 (sequence is synthesized)
taacacatgccgatttttgcactgcttgaaacagtacagtggagaagagggctttatgaagcacaacacatctcgccagaatgaacactgcctcaccaattttgacctggctgagtatcg

SEQ ID NO: 717524 - DNA, 120 bp, Artificial Sequence
  ENSG00000197535_42 (sequence is synthesized)
gcaggtgctgagtgacttggccattcagatctaccagcagctcgtgcgggtgttagagaacatccttcagccaatgattgtctcaggcatgctggaacatgaaacgattcagggcgtgtc

SEQ ID NO: 717525 - DNA, 120 bp, Artificial Sequence
  ENSG00000197535_43 (sequence is synthesized)
tggggtgaagcccacagggttgagaaagcgaacctccagtatcgccgatgagggcacctacacactggactccatcctccggcagctcaactccttccactcggtcatgtgtcagcatgg

SEQ ID NO: 717526 - DNA, 120 bp, Artificial Sequence
  ENSG00000197535_44 (sequence is synthesized)
catggaccctgaactgatcaagcaggtggtcaagcagatgttctacatcataggggccatcaccctgaacaaccttctcctgcggaaggacatgtgctcctggagtaaaggcatgcagat

SEQ ID NO: 717527 - DNA, 120 bp, Artificial Sequence
  ENSG00000197535_45 (sequence is synthesized)
caggtacaatgtcagtcaactggaagaatggctgcgtgacaagaatctgatgaatagtggggctaaagaaaccctggaacctctcattcaggctgctcaacttttgcaagtgaaaaagaa

SEQ ID NO: 717528 - DNA, 120 bp, Artificial Sequence
  ENSG00000197535_46 (sequence is synthesized)
aacagatgatgatgcagaagccatttgttctatgtgcaatgctttaactactgcccagattgtgaaagtgttgaatttgtatactccagttaatgagtttgaagaaagagtctctgtgtc

SEQ ID NO: 717529 - DNA, 120 bp, Artificial Sequence
  ENSG00000197535_47 (sequence is synthesized)
gttcattcgtactatacagatgcgtttacgagacaggaaagactctccccagctgctcatggatgctaaacacatctttcctgtcacctttcctttcaacccatcttccctcgcactaga

SEQ ID NO: 717530 - DNA, 120 bp, Artificial Sequence
  ENSG00000197535_48 (sequence is synthesized)
aaccatccagattccagccagcctcggcctgggcttcatttcacgggtctgaaagtgatgtccaggcaaaaattgacaatacatttcttgcccgaaataagaacccattatttccagtga

SEQ ID NO: 717531 - DNA, 120 bp, Artificial Sequence
  ENSG00000197535_49 (sequence is synthesized)
gttactgaaaatacatttttaaagagaaagtactgattatctcccaaatgagaagtcattaactggaaatctccctagaatactttcatcactttggaaacaaagataggctctttcgtg

SEQ ID NO: 717532 - DNA, 120 bp, Artificial Sequence
  ENSG00000197535_50 (sequence is synthesized)
gtgtcttcagctggcagcatttattttaaatccttagcactgagtttgaatggtataaaaagtataacttccatagatgagctgttgttaggaaggcaccaaagaacctcctctgcacta

SEQ ID NO: 717533 - DNA, 120 bp, Artificial Sequence
  ENSG00000197535_51 (sequence is synthesized)
aacaggagaatggaaagaaaagtctccattgagtacatatcatgtcagtttagtaatcaattatgttgatattgttaaactggttcaaagaaataaactggcaatatgtaaagtaattcc

SEQ ID NO: 717534 - DNA, 120 bp, Artificial Sequence
  ENSG00000197535_52 (sequence is synthesized)
tcatttgtgtcactatgatatagagatattaaaggaatgttggtttgctaaatagtatagatgtccatttgtactatagtttactgagcattttaaattgctgctacatactgtcttctt

SEQ ID NO: 717535 - DNA, 120 bp, Artificial Sequence
  ENSG00000197535_53 (sequence is synthesized)
aaaatgtaagtgatattaggcactacaataagtttctcttgtcaattctgtttacaattcaatcagatcacagttttaactggattatatgcaaatacctacagattcacctgcacaagt

SEQ ID NO: 717536 - DNA, 120 bp, Artificial Sequence
  ENSG00000197535_54 (sequence is synthesized)
agcagacactggaaagtcatgtagtaatatgacaaaatgcttgacatttaggggtaggattagacaaagtggctattgttgatgtcattatttattcaggatgtattacattgatgtgct

SEQ ID NO: 717537 - DNA, 120 bp, Artificial Sequence
  ENSG00000197535_55 (sequence is synthesized)
cattaattttccctgggtggatattgcgtcagggtacagtgttctgtgaagtgacttatttttaactaccagatctgattccttcagtgcatattttcaaccttgacaggttttctctct

SEQ ID NO: 717538 - DNA, 60 bp, Artificial Sequence
  ENSG00000197535_56 (sequence is synthesized)
ccttcagtgcatattttcaaccttgacaggttttctctcttcttaatttattaagaatta

SEQ ID NO: 717539 - DNA, 120 bp, Artificial Sequence
  ENSG00000197535_57 (sequence is synthesized)
ctccagcctgggtgacagagagagacactgccttggaaaaaaaaagaatctcactcactatctagagaggattgtcagaatattcacgattcaggtcttgaaactttgattatgcaaaag

SEQ ID NO: 717540 - DNA, 120 bp, Artificial Sequence
  ENSG00000197535_58 (sequence is synthesized)
aggtcttgaaactttgattatgcaaaagaaggtatataataaatatttcattatgattcagtttttaaggctttgcagcttctataagtgttctcagatgccactagataattttaaaag

SEQ ID NO: 717541 - DNA, 120 bp, Artificial Sequence
  ENSG00000197535_59 (sequence is synthesized)
catcatattagaaatactttaagaagacttatataagaaatagaagattgttgaattttacagaggatttggttcattaagacccagattctgtaagttttcattctgaaattctagtta

SEQ ID NO: 717542 - DNA, 120 bp, Artificial Sequence
  ENSG00000197535_60 (sequence is synthesized)
aacatattcaccatttttcttaggaatcttatacaataaatccttcaggttgcacaaaagcaaattattagttttcattagaaactctggttctgaattacaatcataggttatataaat

SEQ ID NO: 717543 - DNA, 120 bp, Artificial Sequence
  ENSG00000197535_61 (sequence is synthesized)
ttaactgttagatggtctataaatcttattaaaatatgtgcaatatttatggaagtcaaacagcttcatatcagtgataaagattgttattaaaagataaatactgtctgttaatttaca

SEQ ID NO: 717544 - DNA, 120 bp, Artificial Sequence
  ENSG00000197535_62 (sequence is synthesized)
tgggcctcaagttcctcgtttataaaataagagagttggacactgattcttaacatctcctccacatttaaaattctctcttctcagcccttagattctagagagaaaaagctgcagtta

SEQ ID NO: 717545 - DNA, 120 bp, Artificial Sequence
  ENSG00000197535_63 (sequence is synthesized)
ctcagtaagtccattctctgatggaaagaccagtgtgtagtgcctgtcaattccttaggattaatcaaatgtaaaatcacaagtttgtgtagctgtaacctttcttaaatgtacatgatt

SEQ ID NO: 717546 - DNA, 120 bp, Artificial Sequence
  ENSG00000197535_64 (sequence is synthesized)
tacatgcttttagaaggtcctactatatttgtattataattagtttaagtaatttttattacatcatgtattgctttattcagtttgaatacatttatttatttatttgcagtatcaacc

SEQ ID NO: 717547 - DNA, 120 bp, Artificial Sequence
  ENSG00000197535_65 (sequence is synthesized)
aaccagaaacactaccaattgcatcaaattctcccagtttttcctggttgtcaatgcggttttcaatgcacaattaagtcatagccatttggttcgtaccaaatgtgtcagaatctaaca

SEQ ID NO: 717548 - DNA, 120 bp, Artificial Sequence
  ENSG00000197535_66 (sequence is synthesized)
gcatccgataggctgtaagttggggagttgctaagaaaatgcaacgtggtacaggctgtccgcctcagccctggaaatctcccagacctcccccagcttcatcctgtgtagcacgactca

SEQ ID NO: 717549 - DNA, 120 bp, Artificial Sequence
  ENSG00000197535_67 (sequence is synthesized)
acgtgcaccctgaatcttctcaggtcttccaggtcatgctgtagctgtcactgccatgcagcccttttttttactccggacagctcatgtactgaagcgtcatgaaagaaaggctgtggt

SEQ ID NO: 717550 - DNA, 120 bp, Artificial Sequence
  ENSG00000197535_68 (sequence is synthesized)
ctgagcccttctctcccatctcctgtctttgtcctgtcaagtgctggagccagagctcctacagctgcccttggtggtttctcctgttcagcgatggtggcacaaaggttctgctattcc

SEQ ID NO: 717551 - DNA, 120 bp, Artificial Sequence
  ENSG00000197535_69 (sequence is synthesized)
agggctccagcttcctcccaggtctacccagagctccagatgggggtctgaattaacctctcttggtggcctggagatttttagtcattgacaagaataccttgtaaccagggaacccca

SEQ ID NO: 717552 - DNA, 120 bp, Artificial Sequence
  ENSG00000197535_70 (sequence is synthesized)
aggcccagtaaatgattctgtataccattttcttgaaggtacaagaagattctgccgactatggggatctttgggccagtttgaggattgctttccctctgaggttctttctctctgtca

SEQ ID NO: 717553 - DNA, 120 bp, Artificial Sequence
  ENSG00000197535_71 (sequence is synthesized)
gccacactttctcacccaacttcagacacaccctgccagcctttcccctactcattcactcttccccttccctcaacttaatcgtctatcccgttgcctgctgtttgactgtgcactgaa

SEQ ID NO: 717554 - DNA, 120 bp, Artificial Sequence
  ENSG00000197535_72 (sequence is synthesized)
ggcaggtggatggagtcagtcctcagttgcccctgctggccttcctggtgcttaccatcagcccaatctttgcacagtccttgttgttcttacttctctgcatgcattccttcagaagat

SEQ ID NO: 717555 - DNA, 120 bp, Artificial Sequence
  ENSG00000197535_73 (sequence is synthesized)
cagtcatcaactttttcttaattcctctgtgacacacaatgggaattcaaaggaagagatcttaaaagtcacaacagttctttatcttaataatcccctccccattcaccttactacatg

SEQ ID NO: 717556 - DNA, 120 bp, Artificial Sequence
  ENSG00000197535_74 (sequence is synthesized)
cagactcacctcacacccttacaacttgaagctgaaaatttaaaagtaatttccctttttgcagcttttcctcaggttaaggctttgatctgcctgagagtaactctaaaaggagggaag

SEQ ID NO: 717557 - DNA, 120 bp, Artificial Sequence
  ENSG00000197535_75 (sequence is synthesized)
ataaatatgggataaaatccacaaagtgtagcttctaattcctttggaagtttaaaaaatttccacatatctgatgcttcttttgtcaggtgcagaagcacaaaaacatattccgaagcc

SEQ ID NO: 717558 - DNA, 120 bp, Artificial Sequence
  ENSG00000197535_76 (sequence is synthesized)
aactgatagggaatttggggattattgtcagtttggagaatttgctgtgttatttcttcatttccatggatagctcatagttggctctttctgggtgagtaattatgtgtaatatagatc

SEQ ID NO: 717559 - DNA, 120 bp, Artificial Sequence
  ENSG00000197535_77 (sequence is synthesized)
aaatcttttactaaggttacagctacatgttaggggaggctatgaaaatactatattattataatttcagtgcagtgattgttgtgagaaataactttcatggtaaccctaggaaaatgg

SEQ ID NO: 717560 - DNA, 88 bp, Artificial Sequence
  ENSG00000197535_78 (sequence is synthesized)
gttgtgagaaataactttcatggtaaccctaggaaaatgggcacctgccaccatcctgagaagtcctcacacaatgccctttctctct

SEQ ID NO: 717561 - DNA, 120 bp, Artificial Sequence
  ENSG00000197535_79 (sequence is synthesized)
gtcaaggatcctctgggtaatgtcagctgcttagtgataaaacagagccaaaactagtgcatcctgttgaaagtaatgcagaaacagtacctgggtccagatatgctttcctgcggcgct

SEQ ID NO: 717562 - DNA, 120 bp, Artificial Sequence
  ENSG00000197535_80 (sequence is synthesized)
ttcctctgttacctcgtttcatcctcacagcagcatggacggtaggtggggtcgcttctacaatcatttctgatgatagcttgggaatagagataggggcagtgacttgcctgatgtcgc

SEQ ID NO: 717563 - DNA, 120 bp, Artificial Sequence
  ENSG00000197535_81 (sequence is synthesized)
acagccctctggctgtcctgctttcccatatggagcagtggtggtgtgggcacctgtgatgcaggagactttaaaaatgtcgtgaggtcacgtgctgcccctcctggtacgtgtggaatg

SEQ ID NO: 717564 - DNA, 120 bp, Artificial Sequence
  ENSG00000197535_82 (sequence is synthesized)
cccctggccagcaaggggtgcttttttatcagagttggcagctggcatgtgggaaccgagcaagtgctgcgtaccaagttacttgttttaaggagaccaagtgctcagcgccaggtggtt

SEQ ID NO: 717565 - DNA, 120 bp, Artificial Sequence
  ENSG00000197535_83 (sequence is synthesized)
ttcttttttgtcatagttacttgctataactcagcttgacttctgtcatgaatcagtgctctctgggaggatgcaatactctgtttgggcattaattggtagcaggttgtctcaaccaaa

SEQ ID NO: 717566 - DNA, 120 bp, Artificial Sequence
  ENSG00000197535_84 (sequence is synthesized)
aagacaggaaacagcaaaagcctctctgaaattaagaggaaagttactctccccacacccatcagagtctttattggagccaccaggtgagctgtgcagcctggacaggcctgcagctat

SEQ ID NO: 717567 - DNA, 120 bp, Artificial Sequence
  ENSG00000197535_85 (sequence is synthesized)
aggccaccttcccagtttaggtcctcagcacaggggagcccaagtcactgggtgccttccgagggctgtcactgggcaggccatatacaagtcagtgtgtgcgtgggcactgcagtgtgt

SEQ ID NO: 717568 - DNA, 120 bp, Artificial Sequence
  ENSG00000197535_86 (sequence is synthesized)
gcatgccgtaggtgttgatgggtgctaggaggggtgtcgtgtgcatgcgcgttgaagaggatctgtattgccgtgacctctgttcatggatgagtgcattgtaatttgttctcaggctgt

SEQ ID NO: 717569 - DNA, 120 bp, Artificial Sequence
  ENSG00000197535_87 (sequence is synthesized)
gctgtgagggccgccttaacccttgctcccttcccttctagagctgccttaagttctccagaacttttcttctgtaaaggatatcttgcctggaagggatatcttgccctgtttctcaag

SEQ ID NO: 717570 - DNA, 120 bp, Artificial Sequence
  ENSG00000197535_88 (sequence is synthesized)
gttttgtgagagttttgactggatgtggccctgcatgaccctccttctcctgtacttcctctttcctttccaaatgggaattagaactgtggggcagcaacagtctcagagccagtgaga

SEQ ID NO: 717571 - DNA, 120 bp, Artificial Sequence
  ENSG00000197535_89 (sequence is synthesized)
ggccagcttagagaatgcttctgagttagtgggactctgtgtcacaagtaagcaaatgaatatatgaaagaaattatggagataagttagattcttggtaatacttaaatgtcttgcttt

SEQ ID NO: 717572 - DNA, 120 bp, Artificial Sequence
  ENSG00000197535_90 (sequence is synthesized)
ctactaaccttttgttactaaaggtaaagggtataactcaaactttttgtggacattcttttcaaaattttttaagaaccctgtactataaaaggttgagtaaaaacaggaaagcgtgct

SEQ ID NO: 717573 - DNA, 120 bp, Artificial Sequence
  ENSG00000197535_91 (sequence is synthesized)
ataagttcaaatctgttgtattaccctaaattagataaaccaacctgaattatagtagatttctcaatagatgaggaactgaaaaatactatgtaaaatatcttccaaaatgctttttat

SEQ ID NO: 717574 - DNA, 120 bp, Artificial Sequence
  ENSG00000197535_92 (sequence is synthesized)
actttttttatttgtaatttggtctatctaaaatgttcgttagcttaacttaatgggcgttattggattcatatgactaacgtttcctcagtattgtaatgcttgaaatatttgaaagaa

SEQ ID NO: 717575 - DNA, 120 bp, Artificial Sequence
  ENSG00000197535_93 (sequence is synthesized)
aaaatgttgttttttagttgaaactggtatatataattcagtgcttggcaggttagtatatttttatgcatttttcagagtcagcagtttcaaatcttattgttatcatgttataaaatt

SEQ ID NO: 717576 - DNA, 120 bp, Artificial Sequence
  ENSG00000197535_94 (sequence is synthesized)
ttagcccacatttcaggctccgtaaatcatttgagccattattttttcccaacaaatggtgaattttttctttaaatgtggatatatatgttgtaatttatgattcctggttatgtattt

SEQ ID NO: 717577 - DNA, 120 bp, Artificial Sequence
  ENSG00000197535_95 (sequence is synthesized)
ttgtgggatcctgcagtaaaattgacttttttgtgtctttgggagatttaaattgcgctaacagtgttgcgcaaaaatgagttcatgccatttaacatattgtattttaattattaactg

SEQ ID NO: 717578 - DNA, 120 bp, Artificial Sequence
  ENSG00000197535_96 (sequence is synthesized)
tattaatttactatgaaatggacatccttttaactaaaatggaattgaacattgcagttttcaaatatttttccttgttgggtctggaaaaggaattctactttgatctgcatagaaaat

SEQ ID NO: 717579 - DNA, 120 bp, Artificial Sequence
  ENSG00000197535_97 (sequence is synthesized)
tttgatacaattttttgaaagttcttaggtgaaacatttacccattaaaaaggaagcagaaatactgagacatgaaaggcattatcaactaactctagactctagaacccattctagcat

SEQ ID NO: 717580 - DNA, 120 bp, Artificial Sequence
  ENSG00000197535_98 (sequence is synthesized)
atctcacgtgcaatttttaaaaataagttaataattcatctcatatcaacaaaagcctttgaaacatgggttttcactagatatcacctagtgctaagataaaaaccaaaacaatatcag

SEQ ID NO: 717581 - DNA, 120 bp, Artificial Sequence
  ENSG00000197535_99 (sequence is synthesized)
aattacatttatgctctaaatttgtagttgtccattgttgtgcttagtaaatgtgtgtcattaatgctgtattctcctagctattatggaaacttgtttaaataaagatatggatataaa

SEQ ID NO: 717582 - DNA, 120 bp, Artificial Sequence
  ENSG00000197535_100 (sequence is synthesized)
ctttcttcctatattctcttgataagaaacatgctcaaaaaattgattgatacagcatgtctcagaaagcctggggtctccagccactaaaattaagaaaatgcttttctacatgtttat

SEQ ID NO: 717583 - DNA, 120 bp, Artificial Sequence
  ENSG00000197535_101 (sequence is synthesized)
tacaggtgtgagccaccgcgcccagccgggtgaatttttttctgcttaaaggagcagctaaattcgcatcagtttaattttctatgccaaaaaagtgaatggcaagcaaagcaacaaact

SEQ ID NO: 717584 - DNA, 120 bp, Artificial Sequence
  ENSG00000197535_102 (sequence is synthesized)
tgtttataatggtaactgaaagaaatgggtcttttggtatctgttcaattttttttaggttgttatttccctaaggaaaaggcaagtttagacttattctctctttcagaaaagaggtga

SEQ ID NO: 717585 - DNA, 120 bp, Artificial Sequence
  ENSG00000197535_103 (sequence is synthesized)
ccgtttttgaagaacaaattaaagttcttaaatcaagcaaggtaactatggataggcttactctaatccaggatgtatgcaaagcattagctttttaacaataaaaatgatttttttaac

SEQ ID NO: 717586 - DNA, 120 bp, Artificial Sequence
  ENSG00000197535_104 (sequence is synthesized)
cttgtattttgaggaattatatgcagatgaccctaagaagtatcaatcatatcggatttccctttacaaacggatgattgatttgatggaacaacttgaaaaacaggataagacggtccg

SEQ ID NO: 717587 - DNA, 120 bp, Artificial Sequence
  ENSG00000197540_0 (sequence is synthesized)
actgggtctccacagcggcatggaggcctgcgtgtcttcactgctggtgctggccctgggggccctgtcagtaggcagctcctttgggacccagatcatcgggggccgggaggtgatccc

SEQ ID NO: 717588 - DNA, 120 bp, Artificial Sequence
  ENSG00000197540_1 (sequence is synthesized)
ccactcgcgcccgtacatggcctcactgcagagaaatggctcccacctgtgcgggggtgtcctggtgcacccaaagtgggtgctgacggctgcccactgcctggcccagcggatggccca

SEQ ID NO: 717589 - DNA, 120 bp, Artificial Sequence
  ENSG00000197540_2 (sequence is synthesized)
gctgaggctggtgctggggctccacaccctggacagccccggtctcaccttccacatcaaggcagccatccagcaccctcgctacaagcccgtccctgccctggagaacgacctcgcgct

SEQ ID NO: 717590 - DNA, 120 bp, Artificial Sequence
  ENSG00000197540_3 (sequence is synthesized)
gactcggtgcagcatggccggctgggggctgacccaccagggcgggcgcctgtcccgggtgctgcgggagctggacctccaagtgctggacacccgcatgtgtaacaacagccgcttctg

SEQ ID NO: 717591 - DNA, 120 bp, Artificial Sequence
  ENSG00000197540_4 (sequence is synthesized)
gaacggcagcctctcccccagcatggtctgcctggcggccgactccaaggaccaggctccctgcaagggtgactcgggcgggcccctggtgtgtggcaaaggccgggtgttggccagagt

SEQ ID NO: 717592 - DNA, 120 bp, Artificial Sequence
  ENSG00000197540_5 (sequence is synthesized)
cctgtccttcagctccagggtctgcactgacatcttcaagcctcccgtggccaccgctgtggcgccttacgtgtcctggatcaggaaggtcaccggccgatcggcctgatgccctggggt

SEQ ID NO: 717593 - DNA, 120 bp, Artificial Sequence
  ENSG00000197540_6 (sequence is synthesized)
gatggggaccccctcgctgtctccacaggacccttcccctccaggggtgcagtggggtgggtgaggacgggtgggagggacagggagggaccaataaatcataatgaagaaacgctcaga

SEQ ID NO: 717594 - DNA, 120 bp, Artificial Sequence
  ENSG00000197540_7 (sequence is synthesized)
ggccggggccagcacccacactgggtctccacagcggcatggaggcctgcgtgtcttcactgctggtgctggccctgggggccctgtcagtagctcctttgggacccagatcatcggggg

SEQ ID NO: 717595 - DNA, 120 bp, Artificial Sequence
  ENSG00000197548_0 (sequence is synthesized)
ggaagttgagcggcggcaagaaataatggcggcagctacgggggatcctggactctctaaactgcagtttgccccttttagtagtgccttggatgttgggttttggcatgagttgaccca

SEQ ID NO: 717596 - DNA, 120 bp, Artificial Sequence
  ENSG00000197548_1 (sequence is synthesized)
gaagaagctgaacgagtatcggctggatgaagctcccaaggacattaagggttattactacaatggtgactctgctgggctgccagctcgcttaacattggagttcagtgcttttgacat

SEQ ID NO: 717597 - DNA, 120 bp, Artificial Sequence
  ENSG00000197548_2 (sequence is synthesized)
gagtgctcccaccccagcccgttgctgcccagctattggaacactgtataacaccaacacactcgagtctttcaagactgcagataagaagctccttttggaacaagcagcaaatgagat

SEQ ID NO: 717598 - DNA, 120 bp, Artificial Sequence
  ENSG00000197548_3 (sequence is synthesized)
atgggaatccataaaatcaggcactgctcttgaaaaccctgtactcctcaacaagttcctcctcttgacatttgcagatctaaagaagtaccacttctactattggttttgctatcctgc

SEQ ID NO: 717599 - DNA, 120 bp, Artificial Sequence
  ENSG00000197548_4 (sequence is synthesized)
cctctgtcttccagagagtttacctctcattcaggggccagtgggtttggatcaaaggttttcactaaaacagattgaagcactagagtgtgcatatgataatctttgtcaaacagaagg

SEQ ID NO: 717600 - DNA, 120 bp, Artificial Sequence
  ENSG00000197548_5 (sequence is synthesized)
agtcacagctcttccttacttcttaatcaagtatgatgagaacatggtgctggtttccttgcttaaacactacagtgatttcttccaaggtcaaaggacgaagataacaattggtgtata

SEQ ID NO: 717601 - DNA, 120 bp, Artificial Sequence
  ENSG00000197548_6 (sequence is synthesized)
tgatccctgtaacttagcccagtaccctggatggcctttgaggaattttttggtcctagcagcccacagatggagtagcagtttccagtctgttgaagttgtttgcttccgtgaccgtac

SEQ ID NO: 717602 - DNA, 120 bp, Artificial Sequence
  ENSG00000197548_7 (sequence is synthesized)
catgcagggggcgagagacgttgcccacagcatcatcttcgaagtgaagcttccagaaatggcatttagcccagattgtcctaaagcagttggatgggaaaagaaccagaaaggaggcat

SEQ ID NO: 717603 - DNA, 120 bp, Artificial Sequence
  ENSG00000197548_8 (sequence is synthesized)
gggaccaaggatggtgaacctcagtgaatgtatggaccctaaaaggttagctgagtcatcagtggatctaaatctcaaactgatgtgttggagattggttcctactttagacttggacaa

SEQ ID NO: 717604 - DNA, 120 bp, Artificial Sequence
  ENSG00000197548_9 (sequence is synthesized)
ggttgtgtctgtcaaatgtctgctgcttggagccggcaccttgggttgcaatgtagctaggacgttgatgggttggggcgtgagacacatcacatttgtggacaatgccaagatctccta

SEQ ID NO: 717605 - DNA, 120 bp, Artificial Sequence
  ENSG00000197548_10 (sequence is synthesized)
ctccaatcctgtgaggcagcctctctatgagtttgaagattgcctagggggtggtaagcccaaggctctggcagcagcggaccggctccagaaaatattccccggtgtgaatgccagagg

SEQ ID NO: 717606 - DNA, 120 bp, Artificial Sequence
  ENSG00000197548_11 (sequence is synthesized)
attcaacatgagcatacctatgcctgggcatccagtgaacttctccagtgtcactctggagcaagcccgcagagatgtggagcaactggagcagctcatcgaaagccatgatgtcgtctt

SEQ ID NO: 717607 - DNA, 120 bp, Artificial Sequence
  ENSG00000197548_12 (sequence is synthesized)
cctattgatggacaccagggagagccggtggcttcctgccgtcattgctgcaagcaagagaaagctggtcatcaatgctgctttgggatttgacacatttgttgtcatgagacatggtct

SEQ ID NO: 717608 - DNA, 120 bp, Artificial Sequence
  ENSG00000197548_13 (sequence is synthesized)
gaagaaaccaaagcagcaaggagctggggacttgtgtccaaaccaccctgtggcatctgctgacctcctgggctcatcgctttttgccaacatccctggttacaagcttggctgctactt

SEQ ID NO: 717609 - DNA, 120 bp, Artificial Sequence
  ENSG00000197548_14 (sequence is synthesized)
ctgcaatgatgtggtggccccaggagattcaaccagagaccggaccttggaccagcagtgcactgtgagtcgtccaggactggccgtgattgcaggagccctggccgtggaattgatggt

SEQ ID NO: 717610 - DNA, 120 bp, Artificial Sequence
  ENSG00000197548_15 (sequence is synthesized)
atctgttttgcagcatccagaagggggctatgccattgccagcagcagtgacgatcggatgaatgagcctccaacctctcttgggcttgtgcctcaccagatccggggatttctttcacg

SEQ ID NO: 717611 - DNA, 120 bp, Artificial Sequence
  ENSG00000197548_16 (sequence is synthesized)
gtttgataatgtccttcccgtcagcctggcatttgacaaatgtacagcttgttcttccaaagttcttgatcaatatgaacgagaaggatttaacttcctagccaaggtgtttaattcttc

SEQ ID NO: 717612 - DNA, 120 bp, Artificial Sequence
  ENSG00000197548_17 (sequence is synthesized)
acattccttcttagaagacttgactggtcttacattgctgcatcaagaaacccaagctgctgagatctgggacatgagcgatgatgagaccatctgagatggccccgctgtggggctgac

SEQ ID NO: 717613 - DNA, 120 bp, Artificial Sequence
  ENSG00000197548_18 (sequence is synthesized)
ttctccccggccgcctgctgaggagctctccatcgccagagcaggactgctgaccccaggcctggtgattctgggcccctcctccataccccgaggtctgggattcccccctctgctgcc

SEQ ID NO: 717614 - DNA, 120 bp, Artificial Sequence
  ENSG00000197548_19 (sequence is synthesized)
caggagtggccagtgttcggcgttgctcgggattcaagataccaccagttcagagctaaataataaccttggccttggccttgctattgacctgggacttggtcctccatgcagttttta

SEQ ID NO: 717615 - DNA, 120 bp, Artificial Sequence
  ENSG00000197548_20 (sequence is synthesized)
tttccccttggccctgagggggtgacccaacacagaccaaatggggaaatgagcaaccagctcctgcccagagccactgcgggaggtggcaccctcatccccggaatgtgctgcccaccg

SEQ ID NO: 717616 - DNA, 120 bp, Artificial Sequence
  ENSG00000197548_21 (sequence is synthesized)
caccgcaggctcctcctgtgggggccctgggcatgggtgagggtgggaccccgtgagcgcactgcaccctggccctggtggagcgggaggaggaggagagccgagctgggtacgagacta

SEQ ID NO: 717617 - DNA, 120 bp, Artificial Sequence
  ENSG00000197548_22 (sequence is synthesized)
aagggcccacatgacccagtgacgccagatttccaccaaggactgagtgagctgctcagacatggctttctgcctcccagcctgtcctccactgtgggcatagcatctgtgcctgcctgc

SEQ ID NO: 717618 - DNA, 120 bp, Artificial Sequence
  ENSG00000197548_23 (sequence is synthesized)
ctgcttgagggagaggagtttctgctgctgccttgagctggggggaagagcccaggggcagatcctggcagctgcctggatggggctcctccctgcccttatgagcaggccaggcccaga

SEQ ID NO: 717619 - DNA, 120 bp, Artificial Sequence
  ENSG00000197548_24 (sequence is synthesized)
aaggccgagcctgggctgccttcctgccccagccgagggaggggtcagacggctctaccatgggtaactcaggcaagagctggttttcctctttattctgggtgtgtgcagctgtgaggc

SEQ ID NO: 717620 - DNA, 120 bp, Artificial Sequence
  ENSG00000197548_25 (sequence is synthesized)
cccaacccaggagaggccatggcctaggtacctgtgaccaccctgcccccgtgtagagggcatcgtctttcctgctattttattctttcagcttttgtcttaggcccagaatcaaagtga

SEQ ID NO: 717621 - DNA, 120 bp, Artificial Sequence
  ENSG00000197548_26 (sequence is synthesized)
aaattgagtcgagctgacccttacaacagtaggatttagtagggtagatttcaaatgaggcttcgcttctcccaaagtagccagtccaagttccagtggctgtcgttcagctcatgggag

SEQ ID NO: 717622 - DNA, 120 bp, Artificial Sequence
  ENSG00000197548_27 (sequence is synthesized)
cttcatggggacacagccggcacaggtgcagggcccgagtccgcccacccagcctggcgctgaaactgcacacgtacactatgtggtttaagagcactttattattgttcttaaggctac

SEQ ID NO: 717623 - DNA, 120 bp, Artificial Sequence
  ENSG00000197548_28 (sequence is synthesized)
ttttaagtacaaaaaaagatggcctgccaaacctttttttttcttcttccaggaaaaacaggccacagagaatggtatattacagatttacacacatgaagagaaggtcagagcgcactg

SEQ ID NO: 717624 - DNA, 120 bp, Artificial Sequence
  ENSG00000197548_29 (sequence is synthesized)
caggcagcgcggctctgggaagaacttcacggagccccttcttagagcagggagggggctttctcagtgaaatgtttggttttctgctgcctcctctgccccaggcccccctccagggta

SEQ ID NO: 717625 - DNA, 120 bp, Artificial Sequence
  ENSG00000197548_30 (sequence is synthesized)
ctgcctatcccagataggtcagtgcaccagggacccggccgccagcaccgccgacccctcccagagtgacgcccttgttcactgacaaagagacctgtcccaggagtgtcctccaccgag

SEQ ID NO: 717626 - DNA, 120 bp, Artificial Sequence
  ENSG00000197548_31 (sequence is synthesized)
ccggtcagctgtgggtggttttcctgttacgacgctcagtagcctgtagcaataacaaactcgtggctatgaatgcagatgcagtgttctcatagaataactgttcctgcacttttacag

SEQ ID NO: 717627 - DNA, 120 bp, Artificial Sequence
  ENSG00000197548_32 (sequence is synthesized)
acaaatctacgacaaaaaaaaagatcaactttttttttccgaacaacaaaaaaaatgaatgattacaataggaaagggaaaaattaaatagctacatatcattaacaaattaatgttctt

SEQ ID NO: 717628 - DNA, 120 bp, Artificial Sequence
  ENSG00000197548_33 (sequence is synthesized)
caaaaaatacctacaaatttctctgtacattctttacgcacagcgtaacgatggtctcaaaatcacccatatagaaaagtgttctcaacgatttttcctacagaaaatataggggcctga

SEQ ID NO: 717629 - DNA, 120 bp, Artificial Sequence
  ENSG00000197548_34 (sequence is synthesized)
atgccaaagcttggaagcccagtacagtgggagtgaaatgtgtgcggggcaaggagaagggcttttctttcctccacttttcaaaggcctgcagccactctgtgactacaagagccagtc

SEQ ID NO: 717630 - DNA, 120 bp, Artificial Sequence
  ENSG00000197548_35 (sequence is synthesized)
ctccgaccttttcacccagtgccaatttccaaaattcaacagctaaaaactgtaaaaccgggggtcatacggtgtgcagagtccacaaagccttgcaggtgaggtgaccacgcccacgtc

SEQ ID NO: 717631 - DNA, 120 bp, Artificial Sequence
  ENSG00000197548_36 (sequence is synthesized)
acctggtcaggtgccatcgtcgtgagcctctggtgggccaggtgggacacagcacaccccagggggaggggatagaaacgctcattgaccaaaaaggagcagctgtgacctccacagctg

SEQ ID NO: 717632 - DNA, 120 bp, Artificial Sequence
  ENSG00000197548_37 (sequence is synthesized)
tgtctgtcatgcttgcttcatctaatttctagttagtagctattaatatagcaaataataaatgcagtaataacagtataaagtcagaggaatgtatactgccttggccccagcgtacga

SEQ ID NO: 717633 - DNA, 120 bp, Artificial Sequence
  ENSG00000197548_38 (sequence is synthesized)
ggaagcgtataaaacaccatatcacagattgtctgtcagtaatctgctgttcagccaagagagttcaaagggagcagtttctgcatgtagggaagttggaagacacaaaccccacctccc

SEQ ID NO: 717634 - DNA, 120 bp, Artificial Sequence
  ENSG00000197548_39 (sequence is synthesized)
ctgggagcttgtaacaaagcagacagggatgcaaaaataaatgatgtcagcctgcagccaaactccagcatcccacaccgcagctgacccactgctcatcgcgagggcctgccaggagct

SEQ ID NO: 717635 - DNA, 120 bp, Artificial Sequence
  ENSG00000197548_40 (sequence is synthesized)
ggcctcccgcactacttgtgagtaaagtgaatatcaaataccaatcttagagtacaactgtaccagcagtaagtatatctaggactgtaactgacaaaaataaactaattctgaaaagaa

SEQ ID NO: 717636 - DNA, 120 bp, Artificial Sequence
  ENSG00000197548_41 (sequence is synthesized)
tatgttgttgcttttgcagaggttttctgttatatgtataaatgtttaagtcttgggaaatgaggcctgtggcattgaagaaagagagtcagatatctgtcactttctaccagccactcg

SEQ ID NO: 717637 - DNA, 120 bp, Artificial Sequence
  ENSG00000197548_42 (sequence is synthesized)
gatgtgtctggagtttgttccttcagatgtgtctggagtttggtgggttcatagtctcgctgactttaagaatgaagccacggacgttcgcatgttacagctcttaaaggtggtgtggac

SEQ ID NO: 717638 - DNA, 74 bp, Artificial Sequence
  ENSG00000197548_43 (sequence is synthesized)
agcaagatttattgtgaagaagctgctgctggctggggtggccagtttttattccctgatttgtccccacccac

SEQ ID NO: 717639 - DNA, 120 bp, Artificial Sequence
  ENSG00000197548_44 (sequence is synthesized)
cttccccgcccatcaggccacctgcactcaggagtcggctgcctgtcctgaaatagatctctaccagctctcaagcagaacaattccttgcattcatacttgaatgtataatttgtgtta

SEQ ID NO: 717640 - DNA, 120 bp, Artificial Sequence
  ENSG00000197548_45 (sequence is synthesized)
tggacggaagaatcaagcacttctgtgaatggaatcttttattcctcgcccatctgattcttggctgctttgttccataaggtagatgaacaatgatgataaaataaaatgtaaataaga

SEQ ID NO: 717641 - DNA, 120 bp, Artificial Sequence
  ENSG00000197548_46 (sequence is synthesized)
agtggcaagcgcgggcaggaccgcgttgcgtcatcggggcgcgcgcctcagagagagctgtggttgccggaagttgagcggcggatccaattcctgtatcttcaccttgtctaccgggat

SEQ ID NO: 717642 - DNA, 120 bp, Artificial Sequence
  ENSG00000197548_47 (sequence is synthesized)
ttctagagcagccttgtgagagacatttctgagacctgtatgtcctgcgtctatgattcttccctgatcaaggcttctcaaaccccataatgctggtatccagtgcatccgttctcaaaa

SEQ ID NO: 717643 - DNA, 120 bp, Artificial Sequence
  ENSG00000197548_48 (sequence is synthesized)
tagcagaaggaaaccaaaataaaagaaaaacagctcctggaagtaaccaatgagaaggacagataagagtttgaagactgtggatgtgactgcttgttccctggttgacacactgaagaa

SEQ ID NO: 717644 - DNA, 120 bp, Artificial Sequence
  ENSG00000197548_49 (sequence is synthesized)
tgcaatatgattgtagaaagaaatcacctagaaagaaatcacagccaattcatttttcagcctctaaacacttggacagaggagccatatatgaatatgttcaaaagagttaaggccatc

SEQ ID NO: 717645 - DNA, 120 bp, Artificial Sequence
  ENSG00000197548_50 (sequence is synthesized)
tcctgtgggtatcagagaggcataattagaatgcattgaattctctccaactggtttgctgaagctcttatgtgagctttttcttttccttcctttaaaaaaaaataataaataaataaa

SEQ ID NO: 717646 - DNA, 120 bp, Artificial Sequence
  ENSG00000197548_51 (sequence is synthesized)
actctccccgttccccagcagagtctgcagaggattcctcccataaattctacctacttctgtgacagcaaatcctacatggtggtgaagttatacatttacgccagtctctctatctag

SEQ ID NO: 717647 - DNA, 120 bp, Artificial Sequence
  ENSG00000197548_52 (sequence is synthesized)
actgcgagtgtcttgagggtagggactgactgtgtcttttatttctgtaaccctgatgtgcctggtatatagtagacaataagtaaatatttgctgaaggagattgtgaaggcatgaaaa

SEQ ID NO: 717648 - DNA, 120 bp, Artificial Sequence
  ENSG00000197548_53 (sequence is synthesized)
ggcatgcctctgctcctttgcgcacgcgcgccgcttcccagtggcaagcgcgggcaggaccgcgttgcgtcatcggggcgcgcgcctcagagagagctgtggttgccggaagttgagcgg

SEQ ID NO: 717649 - DNA, 120 bp, Artificial Sequence
  ENSG00000197548_54 (sequence is synthesized)
gtcataaatgagcctttaaaagaatgaggcacatgatacatcatggtacttgagcagactgcaagcctgaccagactgaattcatgaattcctgacttttgacttcttcctgtaagatgc

SEQ ID NO: 717650 - DNA, 120 bp, Artificial Sequence
  ENSG00000197548_55 (sequence is synthesized)
taccccactgccagggactcaacctctaaatccagtcaaggggctacttgggcctggaaccaaggcacagtcaaggtgaaccagctatgctccagggggaggtggttgaaatcactggtc

SEQ ID NO: 717651 - DNA, 120 bp, Artificial Sequence
  ENSG00000197548_56 (sequence is synthesized)
tcctggactgggccatgagtgatggttattggggctggggaggtatgagagacatcgtgttgtccatctacctctgtgtatcttcaaaggtctctgtaataaaaagttttctgaaattta

SEQ ID NO: 717652 - DNA, 120 bp, Artificial Sequence
  ENSG00000197548_57 (sequence is synthesized)
gagcggcggtaagtgagccgcggcgggcgagggtgtagtggggtcttgctgggccggttttggaggcctggagtcaaggggcgagctcgccagggagggcgagggtcacagcaagtctca

SEQ ID NO: 717653 - DNA, 120 bp, Artificial Sequence
  ENSG00000197548_58 (sequence is synthesized)
ggatcctcctctgccagtttctgggtggtccttcctcctccagggactcactgattccggctggcgcccttcgtctgtagccgcgtcccctcagactggttcagtccggggtcttctgac

SEQ ID NO: 717654 - DNA, 120 bp, Artificial Sequence
  ENSG00000197548_59 (sequence is synthesized)
gcgtcatcggggcgcgcgcctcagagagagctgtggttgccggaagttgagcggcgcagctttcttgggaggcaaccgccactgcacatttcctgtggggatttgatcttaaaaaacaaa

SEQ ID NO: 717655 - DNA, 120 bp, Artificial Sequence
  ENSG00000197548_60 (sequence is synthesized)
caggtatgatgagcacaggtgctcttccagaggatttattccgttctgaccacctgcctgcctgttggccaagtgtaaataactggtgcaacacagccccagcactttcctgagtcatcg

SEQ ID NO: 717656 - DNA, 120 bp, Artificial Sequence
  ENSG00000197548_61 (sequence is synthesized)
agttgttcatcagtgtctcccatggccttttctcagtctgactttacagagaatttcactatttcaccctcaaaaaaacaagactagaaaaagcaggtctggttctttgggctgagataa

SEQ ID NO: 717657 - DNA, 120 bp, Artificial Sequence
  ENSG00000197548_62 (sequence is synthesized)
agtctggtcctcactgctgtggattgcctttactaaaatagagatctatgcagaaatacagttgcatagcttttcacataaggctcttcatgatatggcctttgcctgcttttatggcat

SEQ ID NO: 717658 - DNA, 120 bp, Artificial Sequence
  ENSG00000197548_63 (sequence is synthesized)
ttagaaagagacagccttgtcttttataatcagtgctcttcactagtttctattttacttcctgactttttgatcccagttcattttcatttattttctcttgttgtggggaaaaagaaa

SEQ ID NO: 717659 - DNA, 120 bp, Artificial Sequence
  ENSG00000197548_64 (sequence is synthesized)
gagagtagtgaaactcaaattattaatccaaataatacccattacttagcattgctgtgggaagagattggaaatattttttccattgaatcttttttatattcttggcgaatgtctcat

SEQ ID NO: 717660 - DNA, 120 bp, Artificial Sequence
  ENSG00000197548_65 (sequence is synthesized)
cctaagtcagcccctcctgtcctcttggatccaattcctgtatcttcaccttgtctaccgggatttctagagcagccttgtgagagacatttctgagacctgtatgtcctgcgtctatga

SEQ ID NO: 717661 - DNA, 120 bp, Artificial Sequence
  ENSG00000197548_66 (sequence is synthesized)
tgtgtagcattccaggaaaccaaaaggttggggcgtgagacacatcacatttgtggacaatgccaagatctcctactccaatcctgtgaggcagcctctctatgagtttgaagattgcct

SEQ ID NO: 717662 - DNA, 120 bp, Artificial Sequence
  ENSG00000197555_0 (sequence is synthesized)
ggtgtggacgttgtctaaatttcggtagccatggcacaagaatataagaaagcatgggattatggcaaccacagaatctcagtagtacaagttccattcagttttttctgaaagaaagcc

SEQ ID NO: 717663 - DNA, 120 bp, Artificial Sequence
  ENSG00000197555_1 (sequence is synthesized)
ctctgttaaagtgaagcaaagaaactgttgtggattataacgtttagaagttccaatttttcagtgctttacaaataaagcatcatttaaccttttaaatgaaaaagattaagatctcat

SEQ ID NO: 717664 - DNA, 120 bp, Artificial Sequence
  ENSG00000197555_2 (sequence is synthesized)
gcaactgttgtattttctggaagccattctccaaaagggaagtgcacatttaaaacacagatatgatggtccttgctgcagggatttaagtctacttgcttttacatcatgaccagcttg

SEQ ID NO: 717665 - DNA, 120 bp, Artificial Sequence
  ENSG00000197555_3 (sequence is synthesized)
aaacggtcacagacagaaaggcctcttgccactgacagggcctctgttgttggcacagacggcacccccaaagtccacactgatgatttctacatgcggcgcttccggtcccaaaatggc

SEQ ID NO: 717666 - DNA, 120 bp, Artificial Sequence
  ENSG00000197555_4 (sequence is synthesized)
agcttaggatcatcagttatggctcctgtaggacccccccgaagtgaaggttctcaccatataacctcaacccccggagtcccaaaaatgggggtaagggcaaggattgcagattggccc

SEQ ID NO: 717667 - DNA, 120 bp, Artificial Sequence
  ENSG00000197555_5 (sequence is synthesized)
ccaagaaaggaaaacataaaagaatctagccgttcaagccaggaaatagaaacctcaagttgccttgatagcctgtcctccaaaagcagtcctgtgagtcagggaagttctgttagcctc

SEQ ID NO: 717668 - DNA, 120 bp, Artificial Sequence
  ENSG00000197555_6 (sequence is synthesized)
aattccaatgactcagccatgctgaaaagcatacagaacacgctgaaaaacaagacaagaccgtcggagaacatggactccagatttctcatgcctgaagcctaccccagctcccccaga

SEQ ID NO: 717669 - DNA, 120 bp, Artificial Sequence
  ENSG00000197555_7 (sequence is synthesized)
aaagctcttcgcagaatacgccagcgaagcaacagtgatatcaccataagtgaacttgatgtggatagctttgatgaatgtatctcacctacatacaagactggaccatcactgcacagg

SEQ ID NO: 717670 - DNA, 120 bp, Artificial Sequence
  ENSG00000197555_8 (sequence is synthesized)
gaatatggtagcacatcttcaattgataaacagggaacatctggagaaagcttttttgatttgttaaagggctacaaagatgacaaatctgatcgaggtccaactccaaccaagctcagt

SEQ ID NO: 717671 - DNA, 120 bp, Artificial Sequence
  ENSG00000197555_9 (sequence is synthesized)
gactttctcattactggtggtggcaagggttctggtttctctttggatgtaatagacgggcctatctcacagagagagaacctcaggctttttaaggaaagggaaaaaccactcaagcga

SEQ ID NO: 717672 - DNA, 120 bp, Artificial Sequence
  ENSG00000197555_10 (sequence is synthesized)
cgttcaaaatctgaaactggagactcatctatttttcgtaaattgcgcaatgccaaaggtgaagaacttgggaagtcatcagatcttgaagataaccgatcagaagactctgtcaggccc

SEQ ID NO: 717673 - DNA, 120 bp, Artificial Sequence
  ENSG00000197555_11 (sequence is synthesized)
tggacatgtccaaagtgctttgcccactatgatgtccagagtatattatttgatttgaatgaggcaattatgaacaggcacaatgttattaagaggagaaacaccaccactggagcttcc

SEQ ID NO: 717674 - DNA, 120 bp, Artificial Sequence
  ENSG00000197555_12 (sequence is synthesized)
gcagctgccgtggcatccttggtctctggacctctgtctcattcagccagttttagctccccaatgggcagcacagaggacctgaattccaaaggaagcctcagcatggaccagggagat

SEQ ID NO: 717675 - DNA, 120 bp, Artificial Sequence
  ENSG00000197555_13 (sequence is synthesized)
gataaaagcaatgagcttgtaatgagctgtccatattttcggaatgagataggtggagaaggggagaggaaaatcagcctttcaaaatcaaattctggctcctttagtggatgtgaaagt

SEQ ID NO: 717676 - DNA, 120 bp, Artificial Sequence
  ENSG00000197555_14 (sequence is synthesized)
gcctcctttgagtctacccttagttcccattgcacaaatgcaggagtggcagtacttgaagtgcccaaggagaacttggtgttgcacctagatagagtgaaaagatacatcgtggaacac

SEQ ID NO: 717677 - DNA, 120 bp, Artificial Sequence
  ENSG00000197555_15 (sequence is synthesized)
gtagatctgggtgcatactattatagaaaatttttctaccagaaggaacactggaactattttggggctgatgagaatcttggtccagtggctgtgagcattcgaagggaaaaaccagat

SEQ ID NO: 717678 - DNA, 120 bp, Artificial Sequence
  ENSG00000197555_16 (sequence is synthesized)
gaaatgaaagaaaatggatctccgtacaactaccgaataatttttagaactagtgagctcatgacactgagaggttcggtcctggaggacgccattccgtcgacagccaagcactcgaca

SEQ ID NO: 717679 - DNA, 120 bp, Artificial Sequence
  ENSG00000197555_17 (sequence is synthesized)
gccagaggcctgcctctcaaagaagtgctggagcacgtggttcctgagctcaatgtccagtgcctgcggttggccttcaacacacccaaggtcacagagcagctcatgaaactggatgaa

SEQ ID NO: 717680 - DNA, 120 bp, Artificial Sequence
  ENSG00000197555_18 (sequence is synthesized)
caagggctgaactaccagcagaaagtaggcatcatgtactgcaaagctggacagagcactgaagaagagatgtacaacaatgagtcagctggcccagcctttgaagaatttcttcaacta

SEQ ID NO: 717681 - DNA, 120 bp, Artificial Sequence
  ENSG00000197555_19 (sequence is synthesized)
ttgggagagcgagttcggctcaaaggatttgagaagtatcgagcacagcttgataccaaaactgactccactggaacccattctctgtacacaacatacaaagattatgaaattatgttc

SEQ ID NO: 717682 - DNA, 120 bp, Artificial Sequence
  ENSG00000197555_20 (sequence is synthesized)
catgtttctaccatgctgccatacacacccaacaacaaacaacagctcctgaggaagcggcacattggaaatgatatcgtaacaattgttttccaagagcctggagcacagccattcagc

SEQ ID NO: 717683 - DNA, 120 bp, Artificial Sequence
  ENSG00000197555_21 (sequence is synthesized)
ccaaaaaacatccgatcccacttccagcacgttttcgtcatcgtcagggtgcacaatccgtgctctgacagtgtctgttatagtgtggctgttaccaggtccagagatgtgccttccttt

SEQ ID NO: 717684 - DNA, 120 bp, Artificial Sequence
  ENSG00000197555_22 (sequence is synthesized)
gggcctcccattcctaaaggggtcactttccctaagtcaaatgtgttcagggacttccttttggcgaaagtgattaatgcagaaaatgctgctcataaatcggagaagtttcgggccatg

SEQ ID NO: 717685 - DNA, 120 bp, Artificial Sequence
  ENSG00000197555_23 (sequence is synthesized)
gcaactcggacccgccaggaatacctgaaagatctggcagaaaagaatgtcaccaacacccctatcgacccttctggcaagtttccgttcatctctctggcttccaagaagaaggaaaag

SEQ ID NO: 717686 - DNA, 120 bp, Artificial Sequence
  ENSG00000197555_24 (sequence is synthesized)
tctaagccatatccaggagccgagctcagcagcatgggggccattgtatgggcagtccgggctgaagactacaacaaggccatggaactagactgccttttagggatctccaatgagttc

SEQ ID NO: 717687 - DNA, 120 bp, Artificial Sequence
  ENSG00000197555_25 (sequence is synthesized)
attgtgctcattgaacaggaaacaaagagcgtggtcttcaattgttcctgtagagatgtgatagggtggacttcaactgacaccagcctcaaaatcttctatgaacgaggagaatgtgtt

SEQ ID NO: 717688 - DNA, 120 bp, Artificial Sequence
  ENSG00000197555_26 (sequence is synthesized)
tcagtgggtagttttattaacattgaggagatcaaagagattgtcaaaaggttgcagtttgtttcaaaaggctgtgaatcggtggagatgactctgcgaagaaatgggctaggacagctt

SEQ ID NO: 717689 - DNA, 120 bp, Artificial Sequence
  ENSG00000197555_27 (sequence is synthesized)
ggcttccatgtcaactatgagggcattgtggcggatgtggagccctacggttatgcctggcaggcagggctgaggcagggcagtcgcctggtggagatctgcaaggtggcggtagccact

SEQ ID NO: 717690 - DNA, 120 bp, Artificial Sequence
  ENSG00000197555_28 (sequence is synthesized)
ctgagccatgagcagatgatcgacctcctgagaacatctgtcacggtgaaggttgtcatcattcccccgcatgatgactgcaccccgcggaggagttgctctgaaacctaccgcatgcca

SEQ ID NO: 717691 - DNA, 120 bp, Artificial Sequence
  ENSG00000197555_29 (sequence is synthesized)
gtgatggagtacaaaatgaatgaaggtgtttcatacgaattcaagtttcccttccgaaataataacaagtggcagaggaacgccagcaaggggcctcattcacctcaagtcccgtcccag

SEQ ID NO: 717692 - DNA, 120 bp, Artificial Sequence
  ENSG00000197555_30 (sequence is synthesized)
gtgcagagtcccatgacctcgcggctgaatgctggaaaaggagatgggaagatgcctcctccagaaagagccgccaacatccctcgaagcatctccagtgacgggcgcccactagagagg

SEQ ID NO: 717693 - DNA, 120 bp, Artificial Sequence
  ENSG00000197555_31 (sequence is synthesized)
cggctgtctcctggttcggacatctatgtgacggtctcatccatggctttagcaagatcccagtgtcggaactctcctagcaacttgtcttcatccagtgatactggttctgtggggggc

SEQ ID NO: 717694 - DNA, 120 bp, Artificial Sequence
  ENSG00000197555_32 (sequence is synthesized)
ttggagtgagccgtagatccccagcctccattgacaggcagaacacccagtcagatattggtggcagcggaaaatccacgcctagctggcaaagaagtgaggatagcattgctgaccaga

SEQ ID NO: 717695 - DNA, 120 bp, Artificial Sequence
  ENSG00000197555_33 (sequence is synthesized)
tggcttacagttatagaggacctcaggatttcaattcttttgtcctcgagcagcatgaatatacagagccaacatgccatctcccagcagtatcaaaggtactgccagctttccgagaga

SEQ ID NO: 717696 - DNA, 120 bp, Artificial Sequence
  ENSG00000197555_34 (sequence is synthesized)
gccccagtgggagattaatgcggcaggatccagtggttcatttgtctccaaacaaacaagggcattctgatagccactactcgagccactccagtagcaatactctctccagcaatgcgt

SEQ ID NO: 717697 - DNA, 120 bp, Artificial Sequence
  ENSG00000197555_35 (sequence is synthesized)
caagtgcccatagtgatgagaagtggtacgatggggaccgcacagaatccgaactcaacagctataactatctgcaaggcacctctgctgacagtggcattgacaccacctcttatggcc

SEQ ID NO: 717698 - DNA, 120 bp, Artificial Sequence
  ENSG00000197555_36 (sequence is synthesized)
ccagccacggcagcacagcctcgctgggggctgccacatcgtcacctcgctcagggccaggcaaggagaaagtggcacccctatggcacagctccagtgaagtaatctccatggcagatc

SEQ ID NO: 717699 - DNA, 120 bp, Artificial Sequence
  ENSG00000197555_37 (sequence is synthesized)
ggactttggagacagagagccacggcctggaccggaaaacagagtcttccctgagcttagacatacacagcaagagccaagccggctcgacccctctgacaagggagaacagcaccttca

SEQ ID NO: 717700 - DNA, 120 bp, Artificial Sequence
  ENSG00000197555_38 (sequence is synthesized)
gtataaacgatgctgcttcccacacaagtaccatgagctcccgacactctgccagcccagtggttttcaccagtgcccggagttcacctaaagaagagcttcatccagctgccccctcac

SEQ ID NO: 717701 - DNA, 120 bp, Artificial Sequence
  ENSG00000197555_39 (sequence is synthesized)
agctcgcaccatccttctcctcctcttcctcctcctcctctggtcctaggagtttttaccctcgccagggcgctactagcaagtacctgattggatggaaaaaacccgaaggaaccataa

SEQ ID NO: 717702 - DNA, 120 bp, Artificial Sequence
  ENSG00000197555_40 (sequence is synthesized)
actccgtgggatttatggacacgagaaagcgtcatcagagcgatggcaatgaaatagcccacaccaggctgcgtgcctcaaccagagacctccgggcatctcctaagccaacctccaagt

SEQ ID NO: 717703 - DNA, 120 bp, Artificial Sequence
  ENSG00000197555_41 (sequence is synthesized)
ccaccattgaagaagatctaaagaaactaattgatcttgaaagcccaactcctgaatcacagaagagttttaagttccacgcactctcctctcctcagtctcctttccccagcaccccca

SEQ ID NO: 717704 - DNA, 120 bp, Artificial Sequence
  ENSG00000197555_42 (sequence is synthesized)
cctcacggcgggccttgcacagaacactgtcggacgagagcatttacaatagccagagggagcactttttcacctccagggcgtcacttctggaccaagccctgcccaacgacgtcctct

SEQ ID NO: 717705 - DNA, 120 bp, Artificial Sequence
  ENSG00000197555_43 (sequence is synthesized)
tcagtagcacgtacccttctctccccaagtcgctcccgttgaggaggccttcttacaccttaggaatgaaatcgctgcatggagagttctcagcctcggacagctccctcactgacatcc

SEQ ID NO: 717706 - DNA, 120 bp, Artificial Sequence
  ENSG00000197555_44 (sequence is synthesized)
aggagacccgcaggcagcctatgcccgaccctggcctgatgcccctgcctgacactgctgcagacttggattggtccaacctggtagatgctgccaaagcctatgaggtccagagagcct

SEQ ID NO: 717707 - DNA, 120 bp, Artificial Sequence
  ENSG00000197555_45 (sequence is synthesized)
cattttttgctgctagtgatgaaaaccatcgccccttgagtgctgcatccaacagtgatcagctggaggaccaggctctggcccagatgaagccttacagcagcagtaaagactcctctc

SEQ ID NO: 717708 - DNA, 120 bp, Artificial Sequence
  ENSG00000197555_46 (sequence is synthesized)
ccactctggcttctaaagtggaccagctggaaggtatgctgaagatgcttcgggaagatttgaagaaggaaaaagaagacaaagctcaccttcaggcggaggtgcagcacctgcgagagg

SEQ ID NO: 717709 - DNA, 120 bp, Artificial Sequence
  ENSG00000197555_47 (sequence is synthesized)
acaacctgaggctacaggaggagtcccagaacgcctcggacaagctgaagaagttcacagaatgggtcttcaacaccatagacatgagctagggaaggctgaggaggacaggagaagggc

SEQ ID NO: 717710 - DNA, 120 bp, Artificial Sequence
  ENSG00000197555_48 (sequence is synthesized)
ccagacactccctccagtgagtgtcctgcagcccttattccctccatagaaagcatcctcagagcaccttccctggcttcctactctgccccctttcggggagtgcacaacacaatagtt

SEQ ID NO: 717711 - DNA, 120 bp, Artificial Sequence
  ENSG00000197555_49 (sequence is synthesized)
gcagatcaacaatcatcacctgccttttgtagaaaagaaaaacaaaaaaagtaaataaaaattttaaacagtaaaataaaagtttaactgctaaaatgtgaatgtctttatttttttgca

SEQ ID NO: 717712 - DNA, 120 bp, Artificial Sequence
  ENSG00000197555_50 (sequence is synthesized)
caatatctttatctgttatgtatttaagaagaaactgggccttggaccagggcgccccctggcccatccgcctctattcccatcagctttcttatcaacttcaggtaacccaagctttcc

SEQ ID NO: 717713 - DNA, 120 bp, Artificial Sequence
  ENSG00000197555_51 (sequence is synthesized)
cttgttattctaacaaatatcattattcctagaaaaagaatgtttttataacttgtttggggagtagagagggatatttccttaccttcttccctaaaatgcctggagagggagttgctt

SEQ ID NO: 717714 - DNA, 120 bp, Artificial Sequence
  ENSG00000197555_52 (sequence is synthesized)
tgagaaaatgcctacctcccttgaatgactcgtgcatgagctagtgctgtctgtacctgtcctccagagatcagcaggaccggagttaaatatttaacagcaagtctgtaaaccagagca

SEQ ID NO: 717715 - DNA, 120 bp, Artificial Sequence
  ENSG00000197555_53 (sequence is synthesized)
gctctgacagtgcctgcaggccacaccccttctcagtcctgcattgtgaggtcatttcctgcttctccctttccccaggaagatggtcccacttgtgctgcaagactcttttttgtttgg

SEQ ID NO: 717716 - DNA, 120 bp, Artificial Sequence
  ENSG00000197555_54 (sequence is synthesized)
cttaattgagccccactaaattggaatcaatctctcttacagcttcctggctccaaacattaattgatttcagaattcccccaaactaaaaccttatctgtctgcattttgaatgcattt

SEQ ID NO: 717717 - DNA, 120 bp, Artificial Sequence
  ENSG00000197555_55 (sequence is synthesized)
tggtcaaaagtatacgttttaaagatttttaaagataaaaatgtggcacaactggtttttttagcttgctgaaaatgaccatatctctaaattaatctttctctccagagcaagacttca

SEQ ID NO: 717718 - DNA, 120 bp, Artificial Sequence
  ENSG00000197555_56 (sequence is synthesized)
ccagtatttgtaactaggagaagctaacagtgaatgtttaattgtgaattttaatcattgcttgttaggaataatgactgtgatactagaatgggcttttgaaacctgcatgtcccagtg

SEQ ID NO: 717719 - DNA, 120 bp, Artificial Sequence
  ENSG00000197555_57 (sequence is synthesized)
tgaaatttcagcacggcattttctgcatcctttcatggccatccaaaggattccgctgcagaaattattgatgtgctatttttgctgtcttgtgatgcaggctgctttgggcccctgggt

SEQ ID NO: 717720 - DNA, 120 bp, Artificial Sequence
  ENSG00000197555_58 (sequence is synthesized)
cactcttccaaggctgctgtagagcacagagacatggggctggccagtgttgactgacctgaggagacccctttgtttgttgccttcataactgtcactaaaccgacccctctgcccttt

SEQ ID NO: 717721 - DNA, 120 bp, Artificial Sequence
  ENSG00000197555_59 (sequence is synthesized)
cagtggcaactctggtctaagggaacattcagcactctagcggcatctgattggaagttccctcacccaagtaatctcaattccttcctctctccatccctgaaagaaacaggatggatt

SEQ ID NO: 717722 - DNA, 120 bp, Artificial Sequence
  ENSG00000197555_60 (sequence is synthesized)
ttcctctcttctccctgctacattcactaccagatttttatgctacagtttcattcttgattgtgatttctccatggaattttttttttctggtgacatttctatcatggaaataggaag

SEQ ID NO: 717723 - DNA, 120 bp, Artificial Sequence
  ENSG00000197555_61 (sequence is synthesized)
atttcggagtgctttgtgaagatttcaattgtctgtctctttctctctttgacttgtatgaaggagattgtacattgcctgatatctctttgtaaatgagaaatattgctaacatccaag

SEQ ID NO: 717724 - DNA, 120 bp, Artificial Sequence
  ENSG00000197555_62 (sequence is synthesized)
cattctgaagtcttgcttatccttctgagtttagttctcattttgttttacattttgtttggggacttggggcaagctatttattagagttttgcaacagagttcttgtttgaagcctct

SEQ ID NO: 717725 - DNA, 120 bp, Artificial Sequence
  ENSG00000197555_63 (sequence is synthesized)
aaagactacctgtaaaattcaaagaataaaattcattttaaacgctcttttaaaacactttggtattattgcttgaggtttgcttatttgaaagaccacccaataactcattgaccctcc

SEQ ID NO: 717726 - DNA, 120 bp, Artificial Sequence
  ENSG00000197555_64 (sequence is synthesized)
ttgcatccgaattttttcatcaagctttgttaacactaatgatgattcttgaaaatttctgtccttctcagaatgttaataaacttttttactctgtccacatgtcgatagagaattact

SEQ ID NO: 717727 - DNA, 120 bp, Artificial Sequence
  ENSG00000197555_65 (sequence is synthesized)
gagtcttctaaagtgatgctgtgtgctgcaagagaaatgaaagcgcctgccttggaggcaggaagccgactagggagatgcttaattatcgtggaagtaggtgcttgttaccattgagtg

SEQ ID NO: 717728 - DNA, 120 bp, Artificial Sequence
  ENSG00000197555_66 (sequence is synthesized)
gagagtgcagcaagtgcaggtcgtcctccggtgtcagagccgtgatttgtagacaatgccgccctgtcagctcagtgctggttcagcagcatctttccaaacatgtatttggcaagaatt

SEQ ID NO: 717729 - DNA, 120 bp, Artificial Sequence
  ENSG00000197555_67 (sequence is synthesized)
taaaggccacctcttgtgtaatttgtggagtcttggaaaaggagcctctgcctttcttttcagaatgtacgcaaccatgcagaattttgtactcagaatctgtgtctcctgccttctgcc

SEQ ID NO: 717730 - DNA, 120 bp, Artificial Sequence
  ENSG00000197555_68 (sequence is synthesized)
tgacgtgctcatgaggaagtttgtttccatgcccgtcacctggaaggatgctaacagttctctgtaatctgttggggatatggagagggccacccagagctgtgttttgtttctgccgtc

SEQ ID NO: 717731 - DNA, 120 bp, Artificial Sequence
  ENSG00000197555_69 (sequence is synthesized)
ttcataaattagcactgatggggtggagtaggttgtactgcatgaggaaatgcaggcattttgttcattagtgagatacttctagcttttaagagtacaagaaactaaggagagcttggg

SEQ ID NO: 717732 - DNA, 120 bp, Artificial Sequence
  ENSG00000197555_70 (sequence is synthesized)
gcaccccagaacccgaatctgcacaactactgggcaggcgtctctgcgggaggccaggagacccgcgtcccggtccgggcggttgcgtccaccccgctgagctggtcgccacctggcgac

SEQ ID NO: 717733 - DNA, 120 bp, Artificial Sequence
  ENSG00000197555_71 (sequence is synthesized)
ccttcccctccagtcacctgggccctccctatcctgaagacattagctgagagtctggcaccttttaaaggtctgatcatcaattgtctctctgggcggccacctatgagacttcatctg

SEQ ID NO: 717734 - DNA, 120 bp, Artificial Sequence
  ENSG00000197555_72 (sequence is synthesized)
agtgcgtgcgtgagcgagtgagcgaaaaggagagcgcgcggcggacgcgcccgggacgcgcggcggcaccgggaggccgggccgagcggttttgagagattacctgaagttgcactcaaa

SEQ ID NO: 717735 - DNA, 120 bp, Artificial Sequence
  ENSG00000197555_73 (sequence is synthesized)
agcaagatatactactaactttgaaatggaataagaacataagagagcagctgcccatgccaaatagttacctcttttaaactcattctactggagcaaatggccctccctatcctgaag

SEQ ID NO: 717736 - DNA, 120 bp, Artificial Sequence
  ENSG00000197555_74 (sequence is synthesized)
cagctgcacaaggaagggcaaaccagcagagctcctgggacctgctgaaggaggaaagatgcccgagagctgggcagaggaaaatccctcctgctttcaacaactatgcatttccaaatg

SEQ ID NO: 717737 - DNA, 120 bp, Artificial Sequence
  ENSG00000197555_75 (sequence is synthesized)
cattatctctagcgacatgtctattttaactttgtcactgttaacagtggttactggtattccagtactttttcctaatgtgtatagtgttgttttgatttgtatgcctttgatgcttat

SEQ ID NO: 717738 - DNA, 120 bp, Artificial Sequence
  ENSG00000197555_76 (sequence is synthesized)
tatactcagaacagtagatgggccttttcttgtgcttgtgttctgtcaaagaatttttcttagttcaacatattctttctttaaaacttgttttaactgcagtgatgccagaaagtttca

SEQ ID NO: 717739 - DNA, 120 bp, Artificial Sequence
  ENSG00000197555_77 (sequence is synthesized)
aaaagacagttcctcactttttcttggcagcagttctggtgttagaaggtaataacacatagtgaaatcatgatttatttaaagtagaaattttgatttctacaacaaaaatcttgattt

SEQ ID NO: 717740 - DNA, 120 bp, Artificial Sequence
  ENSG00000197555_78 (sequence is synthesized)
gtaatcccaagggatgctgtaaaaagaataaggtggggtaggggtgggagtggaaggggtggacaacttcctgaaagagaacataccccagtgcaatcttgaaggaggagtaagagttag

SEQ ID NO: 717741 - DNA, 120 bp, Artificial Sequence
  ENSG00000197555_79 (sequence is synthesized)
aggagtaaagggtggataagaataaaacaggaggaggaaggaagagaattgaatggagttgtgttccagcaaaagttaccacttggcttcacctgaagtctcacgagaacccggtgcatt

SEQ ID NO: 717742 - DNA, 120 bp, Artificial Sequence
  ENSG00000197555_80 (sequence is synthesized)
caagaaattttaactggtttcctttccctttgactggagctcagggttcagggagcatggtgggaagagtgtggagagattgggctgttaattagggagatttatcttgcacttaggaaa

SEQ ID NO: 717743 - DNA, 120 bp, Artificial Sequence
  ENSG00000197555_81 (sequence is synthesized)
ttctgacattgcaaaaacagagaggctatctccttgaggatttaagcgaaggaggctaagactcgtgctaatatgcaccttataaacagtcttgaataggcaaagtgatcagtttttaaa

SEQ ID NO: 717744 - DNA, 120 bp, Artificial Sequence
  ENSG00000197555_82 (sequence is synthesized)
ataagcattattgcagacacacaagactatgttttaagatcaaacttacattctagttagaggatttattttactttgtcacaaaaatgaaaaggttggcaaaaaaaaaaaaagacttcc

SEQ ID NO: 717745 - DNA, 120 bp, Artificial Sequence
  ENSG00000197555_83 (sequence is synthesized)
tgccacaaggttttatctttgaacactttattggtttgcgttttgattaattttttttctagttaataagagtttaaatgatcaagttaatacatttgtgaggaaaatctcacttagaaa

SEQ ID NO: 717746 - DNA, 120 bp, Artificial Sequence
  ENSG00000197555_84 (sequence is synthesized)
tcagagatttttaagtttaggggattagattaaaaataattttatttgaaagttaggcataaaatgtatgtatatttgcatatgtgcatagtttttaaaaaaaactggaaggatgtggta

SEQ ID NO: 717747 - DNA, 120 bp, Artificial Sequence
  ENSG00000197555_85 (sequence is synthesized)
tgcattaaagaaagatactttgtttgctcctgctttcatttctgttgacaagttgccagaattatttgtatagggcctctattttcggaaccatgatataaataaaggattcaaaatgtt

SEQ ID NO: 717748 - DNA, 120 bp, Artificial Sequence
  ENSG00000197555_86 (sequence is synthesized)
attgtaaactttactggacacaactgatggaagctaaaatcagtgaatgactgtttcaggagaaatgggaggagaagcaggatttgcatgatctccagaacactggaactattttggggc

SEQ ID NO: 717749 - DNA, 120 bp, Artificial Sequence
  ENSG00000197555_87 (sequence is synthesized)
ttcagtgcgtgcgtgagcgagtgagcgaaaaggagagcgcgcggcggacgcgcccgggacgcgcggcggcaccgggaggccgggccgagcgaaatgtggtctcgctgtgttgcccagtac

SEQ ID NO: 717750 - DNA, 88 bp, Artificial Sequence
  ENSG00000197555_88 (sequence is synthesized)
acagtcttaaaacattttggaaaaagttgaagctctccttttctaccctcctgattctgtgcttctgttggagtgcatatcacttgat

SEQ ID NO: 717751 - DNA, 120 bp, Artificial Sequence
  ENSG00000197555_89 (sequence is synthesized)
ccacacggagtagctgagtgaagctgatcactgcagggctagacactttacattttagtcagaacgctttgtaactgaatactgtagacataattaaactattcttgatgacttatacgg

SEQ ID NO: 717752 - DNA, 120 bp, Artificial Sequence
  ENSG00000197555_90 (sequence is synthesized)
agtgcgtgcgtgagcgagtgagcgaaaaggagagcgcgcggcggacgcgcccgggacgcgcggcggcaccgggaggccgggccgagcggtcttaaaacattttggaaaaagttgaagctc

SEQ ID NO: 717753 - DNA, 120 bp, Artificial Sequence
  ENSG00000197555_91 (sequence is synthesized)
tgtggttataccttattggtgtggacgttgtctaaatttcggtagccatggcacaagaatatagtggacttacagtttctggctactactggtggaaaatgatgggctcagacaagagaa

SEQ ID NO: 717754 - DNA, 120 bp, Artificial Sequence
  ENSG00000197555_92 (sequence is synthesized)
agagattacctgaagttgcactcaaaagcaagatatactactaactttgaaatggaataaggtgagttggtggattagttccaaagtcacattgcagggaggaaatgtcactcaaactgt

SEQ ID NO: 717755 - DNA, 120 bp, Artificial Sequence
  ENSG00000197555_93 (sequence is synthesized)
atgacagttttgagcaggcaccttaagttctgtatactaccgtgaggccaggcacttgtttagcttctgtgtcatacagctaccccttgtattttgttctttttttttttagtataataa

SEQ ID NO: 717756 - DNA, 120 bp, Artificial Sequence
  ENSG00000197555_94 (sequence is synthesized)
atctatagttttattaacacagaaactgatagtgtggtatgaggtttacgtttaaacaaagttttcacagaaatctaacacatgcctaaaaagattttacaatctagctctagatgcaag

SEQ ID NO: 717757 - DNA, 78 bp, Artificial Sequence
  ENSG00000197555_95 (sequence is synthesized)
tccctatcctgaagacattagctgagagtctggcaccttttaaaggtctgatcatcaattgtctctctgggcggccac

SEQ ID NO: 717758 - DNA, 120 bp, Artificial Sequence
  ENSG00000197555_96 (sequence is synthesized)
gttagccacacttggcaatgaatgaatttcataaatttaattcatataatctaaatttttcccccaaaccaaaagttgattctgaactttgctgcgttgttcatggcctttggtttggtg

SEQ ID NO: 717759 - DNA, 120 bp, Artificial Sequence
  ENSG00000197555_97 (sequence is synthesized)
gtacttggctatgctaatgtgtatgacgtgacaagttgtcaccagctgcaagctttatccatcagccacttaagtttctgacctgctgtctatcaaatagactcttaacaagcttactgc

SEQ ID NO: 717760 - DNA, 120 bp, Artificial Sequence
  ENSG00000197555_98 (sequence is synthesized)
tgaaatgcagagtttgctggtcagtgaactgaaagatgcaatggcaagccatcttcatttgtcaccatgtgcttgtttctgcttagtgcctgcaccataatgtcctatgctgtattccag

SEQ ID NO: 717761 - DNA, 120 bp, Artificial Sequence
  ENSG00000197557_0 (sequence is synthesized)
ctgttgccgtggtaaccgcacgcataacagccgtggtggttatggctggtctgagcggcgcgcagatccccgacggggagtttaccgcgctagtgtaccggctcatccgcgatgcccgct

SEQ ID NO: 717762 - DNA, 120 bp, Artificial Sequence
  ENSG00000197557_1 (sequence is synthesized)
acgccgaggcggtgcagctgctgggccgagaactgcagcggagccccaggagccgtgccggcctgtcgctgctaggctactgctactaccgcctgcaggagttcgcgctggcggccgagt

SEQ ID NO: 717763 - DNA, 120 bp, Artificial Sequence
  ENSG00000197557_2 (sequence is synthesized)
gctatgagcagctgggccagctgcacccggaactggagcagtaccgcctgtaccaggcccaggccctgtacaaggcctgcctttatccggaggccactcgggtcgccttccttctcctgg

SEQ ID NO: 717764 - DNA, 120 bp, Artificial Sequence
  ENSG00000197557_3 (sequence is synthesized)
ataaccccgcctaccacagccgggtcctccgcctgcaagctgccatcaagtatagcgagggcgatctgccagggtccaggagcctggtggagcagctgctgagtggggaagggggagaag

SEQ ID NO: 717765 - DNA, 120 bp, Artificial Sequence
  ENSG00000197557_4 (sequence is synthesized)
aaagtggaggcgacaatgagaccgatggccaggtcaacctgggttgtttgctctacaaggagggacagtatgaagctgcatgctccaagttttctgccacactgcaggcctcgggctacc

SEQ ID NO: 717766 - DNA, 120 bp, Artificial Sequence
  ENSG00000197557_5 (sequence is synthesized)
agcctgacctttcctacaacctggctttggcctattacagcagccgacagtatgcctcagcactgaagcatatcgctgagattattgagcgtggcatccgccagcatcctgagctaggtg

SEQ ID NO: 717767 - DNA, 120 bp, Artificial Sequence
  ENSG00000197557_6 (sequence is synthesized)
tgggcatgaccaccgagggctttgatgttcgcagtgttggcaacaccttagttctccatcagactgctctggtggaagccttcaaccttaaggcagccatagaataccaactgagaaact

SEQ ID NO: 717768 - DNA, 120 bp, Artificial Sequence
  ENSG00000197557_7 (sequence is synthesized)
atgaggtagctcaagaaaccctcaccgacatgccacccagggcagaggaagagttggaccctgtgaccctgcacaaccaggcactaatgaacatggatgccaggcctacagaagggtttg

SEQ ID NO: 717769 - DNA, 120 bp, Artificial Sequence
  ENSG00000197557_8 (sequence is synthesized)
aaaagctacagtttttgctccaacagaatccctttcctccagagacttttggcaacctgttgctgctctactgtaaatatgagtattttgacctggcagcagatgtcctggcagaaaatg

SEQ ID NO: 717770 - DNA, 120 bp, Artificial Sequence
  ENSG00000197557_9 (sequence is synthesized)
cccatttgacgtataagttcctcacaccctatctctatgacttcttagatgccctgatcacttgccagacagctcctgaagaggctttcattaagcttgatgggctagcagggatgctga

SEQ ID NO: 717771 - DNA, 120 bp, Artificial Sequence
  ENSG00000197557_10 (sequence is synthesized)
ctgagcagcttcggagactcaccaagcaagtacaggaagcaagacacaacagagatgatgaagctatcaaaaaggcagtgaatgaatatgatgaaaccatggagaaatacattcctgtgt

SEQ ID NO: 717772 - DNA, 120 bp, Artificial Sequence
  ENSG00000197557_11 (sequence is synthesized)
tgatggctcaggcaaaaatctactggaatcttgaaaattatccaatggtggaaaaggtcttccgcaaatctgtggaattctgtaacgaccatgatgtgtggaagttgaatgtggctcatg

SEQ ID NO: 717773 - DNA, 120 bp, Artificial Sequence
  ENSG00000197557_12 (sequence is synthesized)
ttctgttcatgcaggaaaacaaatacaaagaagccattggtttctatgaacccatagtcaagaagcattatgataacatcctgaatgtcagtgctattgtactggctaatctctgtgttt

SEQ ID NO: 717774 - DNA, 120 bp, Artificial Sequence
  ENSG00000197557_13 (sequence is synthesized)
cctatattatgacaagtcaaaatgaagaagcagaggagttgatgaggaagattgaaaaggaggaagagcagctctcttatgatgacccaaatcggaaaatgtaccatctctgcattgtga

SEQ ID NO: 717775 - DNA, 120 bp, Artificial Sequence
  ENSG00000197557_14 (sequence is synthesized)
atttggtgataggaactctttattgtgccaaaggaaactatgagtttggtatttctcgagttatcaaaagcttggagccttataataaaaagctgggaacagatacctggtattatgcca

SEQ ID NO: 717776 - DNA, 120 bp, Artificial Sequence
  ENSG00000197557_15 (sequence is synthesized)
aaagatgcttcctgtccttgttagaaaacatgtcaaaacacatgatagtcattcatgacagtgttattcaagaatgtgtccagtttttaggacactgtgaactttatggcacaaacatac

SEQ ID NO: 717777 - DNA, 120 bp, Artificial Sequence
  ENSG00000197557_16 (sequence is synthesized)
ctgctgttattgaacaacccctcgaagaagaaagaatgcatgttgggaagaatacagtcacagatgagtccagacaattgaaagctttgatttatgagattataggatggaataagtagt

SEQ ID NO: 717778 - DNA, 120 bp, Artificial Sequence
  ENSG00000197557_17 (sequence is synthesized)
tatgactgatagtggcttttttcaaaatggctttcttacgtaccacacttttttttatctgtatttagccttggcatctttatatttgtcttattttgaatcttatccactttgtaagaa

SEQ ID NO: 717779 - DNA, 120 bp, Artificial Sequence
  ENSG00000197557_18 (sequence is synthesized)
caagtttatgtttgagcaactttttcatttaatccagaagggtagggactatgcagtgtaagctgcatcacttctgctttcttcctactagtgacaatcatctggtcttgccctcaagca

SEQ ID NO: 717780 - DNA, 120 bp, Artificial Sequence
  ENSG00000197557_19 (sequence is synthesized)
acaattgctagagtaacatctttgtataagcaagtaaccccagatagagttgacgtttcagctttgggctgtcaaaagggtatgtcatggaccaaagcactgttagtacgggtatgtttg

SEQ ID NO: 717781 - DNA, 120 bp, Artificial Sequence
  ENSG00000197557_20 (sequence is synthesized)
catttggtcactgatatgtaaatgactgctagcccacggctggaccacttctcaatcagcaaataaagccatgtctattttgctatctcagcatagactatgctgtctgataaatctaat

SEQ ID NO: 717782 - DNA, 120 bp, Artificial Sequence
  ENSG00000197557_21 (sequence is synthesized)
tcttaactctatttctccagttttttagtcctttaactttctggattgcaacgaagtctagtttagacctctaagcccttttagaagtacaagtataatgggaatttcttttcttggttc

SEQ ID NO: 717783 - DNA, 120 bp, Artificial Sequence
  ENSG00000197557_22 (sequence is synthesized)
ttttcaggttatgaggtttggtcagtgacaaaattttttttcataatttggttgattggttgcttcttaagttttataataaacgtttttcttcatgttctatttttgattttacagaaa

SEQ ID NO: 717784 - DNA, 120 bp, Artificial Sequence
  ENSG00000197557_23 (sequence is synthesized)
ttaggaaaaaataagcactgaactgagaatgagaagaataaaagtatgagttccataccttctaattttaggctgtcagaaattcctttattctttgggatttcacaatcatttgaacta

SEQ ID NO: 717785 - DNA, 120 bp, Artificial Sequence
  ENSG00000197557_24 (sequence is synthesized)
tcagaagcctttacaattacttttagctgtaacatccgattctgtataagccacatagaaaaaagttgcctttctttttttatgacctggatatataagcaaatcagctaggaaatatat

SEQ ID NO: 717786 - DNA, 120 bp, Artificial Sequence
  ENSG00000197557_25 (sequence is synthesized)
aattgtattttatattaatgttttctaggattttggcttacagtaaatgttaacccctatggtaagtgattgttattgttggatgttatactgattattaataagaaatttggatttttg

SEQ ID NO: 717787 - DNA, 120 bp, Artificial Sequence
  ENSG00000197557_26 (sequence is synthesized)
cctttttacctggaatttttgcttacagccgtagctatgaatatatatagggtggtccccagtctctgttatggttgcgcataaattaataattttataagtatttagaaatggtataat

SEQ ID NO: 717788 - DNA, 120 bp, Artificial Sequence
  ENSG00000197557_27 (sequence is synthesized)
tctcttaacttcctctttcagtttttgtactaatgtttgtttttgttcgggaagaggagatttgcttttaatccttccaaaaaatgatgaaccaccgttccattcagtagtttgacaagc

SEQ ID NO: 717789 - DNA, 120 bp, Artificial Sequence
  ENSG00000197557_28 (sequence is synthesized)
tgttataatgtgtattttttcctcaattattcttgaaatatttagagcctctcctgcttctaacatgaaggcctttagatgccagtctgccagaaatctggaaacagaggaaccggtgaa

SEQ ID NO: 717790 - DNA, 120 bp, Artificial Sequence
  ENSG00000197557_29 (sequence is synthesized)
gtgaagatgtaatggagatttagctaatgatgtacttcacaatccaccttggatctcctgcatgtccaaatctcagtagttaatcaagtgtctgctgccattaacagaacagaagtaatg

SEQ ID NO: 717791 - DNA, 120 bp, Artificial Sequence
  ENSG00000197557_30 (sequence is synthesized)
gataacagaatggaaataagagatgccagaactacttccataactaactcaccaaatcaaatcatcagtcctcatattcttgttttatttaatacaaggagaagaggccatgcactttcc

SEQ ID NO: 717792 - DNA, 120 bp, Artificial Sequence
  ENSG00000197557_31 (sequence is synthesized)
aaaaggtcaaagccacatagaataggaaggcaatctctagtttaaagctttctcttggagtgttttctccccctgtcttcaaagggtctacttgagagatagtggtgtttactgctgcag

SEQ ID NO: 717793 - DNA, 120 bp, Artificial Sequence
  ENSG00000197557_32 (sequence is synthesized)
catgtatcacaagataagaaatgaaaaatcaatctttcttaccaccctgttctctttcccttttttatcttttcccttttgtcaattatagaattatagggacatttttctctgatagct

SEQ ID NO: 717794 - DNA, 120 bp, Artificial Sequence
  ENSG00000197557_33 (sequence is synthesized)
ggaagttgaacctcaaccaggtataaaagatgcataacaaccttttagcagtaagtgtcaagtgagtgagcactatgattatcaaggtgactttggaaaccttttaaaaatgcatttttg

SEQ ID NO: 717795 - DNA, 120 bp, Artificial Sequence
  ENSG00000197557_34 (sequence is synthesized)
caaaacaagataacatatattgataaaaagtgactctcagattggtaatgccagaaaaaattttaagaggactcaccaaaagtactagatctatgtaagttgtagaatagagtgaagttt

SEQ ID NO: 717796 - DNA, 120 bp, Artificial Sequence
  ENSG00000197557_35 (sequence is synthesized)
ttttatatatttgtggtagcctccatcttttaaactttttgaactcagtagaaaaacagactgaaattttaaagacatgcagtatttgtatcattttaaattctgtaacactgggaatta

SEQ ID NO: 717797 - DNA, 120 bp, Artificial Sequence
  ENSG00000197557_36 (sequence is synthesized)
aatatactcaactttagaggacacttgccttactgtaatctataatcattttatattgaaaaatagggccagacattagccaaacggtaattaatttactagccataggtatagtgttta

SEQ ID NO: 717798 - DNA, 120 bp, Artificial Sequence
  ENSG00000197557_37 (sequence is synthesized)
atattctcttggggagtgagtctttactaagtgattactctatacttgataccactattaattgaggttcttttggttgtttaattaaatcagctcctttggatttgggccaagattgat

SEQ ID NO: 717799 - DNA, 120 bp, Artificial Sequence
  ENSG00000197557_38 (sequence is synthesized)
ccaccacatactgaaatccgttctacaacatcataatgtgtatttactagaaaaggacttgcttcataaggaaaaattattagaatatagagacttataagtacatttctagtgtgaaaa

SEQ ID NO: 717800 - DNA, 120 bp, Artificial Sequence
  ENSG00000197557_39 (sequence is synthesized)
ataagcatttgttagtttaagtgagacctgccaataacttgattgcaaatattaatatcatgtgaacatataaaatgggcccaaatccttgttcaaaagtgaaatttgcacgtttgtgaa

SEQ ID NO: 717801 - DNA, 120 bp, Artificial Sequence
  ENSG00000197557_40 (sequence is synthesized)
ataaaacacatcaatatcaatgactgaataccttaattcaaaacagcaaatggctaaaattatactatgcaagcaggaccctagtaagttatgtgggaaagcatttattgctgctaatat

SEQ ID NO: 717802 - DNA, 120 bp, Artificial Sequence
  ENSG00000197557_41 (sequence is synthesized)
tttattttcaattatttcattaggagagtcaaatgcttaagatagaggacacatgactaaaagtttcaccagcactcatggcatctgctataaaacatgtgtccacagagtacccacaaa

SEQ ID NO: 717803 - DNA, 120 bp, Artificial Sequence
  ENSG00000197557_42 (sequence is synthesized)
ctctcaagatcttaagtctcaacagtaaattactggttagtttttctaatcagagtctcaacgtcttagtcccaattcttccaaattttccaaaaccatacactatagtgtatatggaaa

SEQ ID NO: 717804 - DNA, 120 bp, Artificial Sequence
  ENSG00000197557_43 (sequence is synthesized)
ggagaatatgtacttttgtgaatataaagtgtctgttccatttttagtcatgaagtaccataggaagagatggtcacaccctaacattgtaaagcaaaagaaagcttcaggaatcagacc

SEQ ID NO: 717805 - DNA, 120 bp, Artificial Sequence
  ENSG00000197557_44 (sequence is synthesized)
ataacagcaacactttgctgaaaaatatttaattagaaggcaataccacatactcacatatgctaaggagtgcaattattttgtatgtttactggaaaaggcaaaaaatttttctgtagt

SEQ ID NO: 717806 - DNA, 120 bp, Artificial Sequence
  ENSG00000197557_45 (sequence is synthesized)
taaaacaatatttttgtttctagaacttttgttcttgtactgattcattaccattaaactgttttcacaaaatgccaaagaacagaggagagctatacatgatttgaccaagacgctgca

SEQ ID NO: 717807 - DNA, 120 bp, Artificial Sequence
  ENSG00000197557_46 (sequence is synthesized)
agtagtttcagaaactgaggagactatttttctgacaatgtatataagatctataatgaaatgattggtaaaattataaaatggttctggaaataatcatgtaaaatataaaatgggaaa

SEQ ID NO: 717808 - DNA, 120 bp, Artificial Sequence
  ENSG00000197558_0 (sequence is synthesized)
atgctactccctgccctcctctttgggatggcgtgggccctggctgacgggcggtggtgtgagtggacagagaccatccgtgtggaggaggaagtggcaccccgtcaggaggacctggta

SEQ ID NO: 717809 - DNA, 120 bp, Artificial Sequence
  ENSG00000197558_1 (sequence is synthesized)
ccctgtgccagcctcgaccattacagccgcctgggctggcggctggacctgccctggagtggccgctcggggcttacccggtccccagcgcctgggctctgtcctatctacaaacctcca

SEQ ID NO: 717810 - DNA, 120 bp, Artificial Sequence
  ENSG00000197558_2 (sequence is synthesized)
gaaacccggcctgccaagtggaaccggacagtgaggacttgttgcccaggctgggggggcgcccactgcactgaggcccttgccaaagccagtcctgaaggccactgctttgccatgtgg

SEQ ID NO: 717811 - DNA, 120 bp, Artificial Sequence
  ENSG00000197558_3 (sequence is synthesized)
cagtgccagctacaggcaggctcagctaatgcctcagcaggaagcctggaggagtgctgcgcccggccctggggacaaagctggtgggatggcagctcccaggcctgccgcagctgctcc

SEQ ID NO: 717812 - DNA, 120 bp, Artificial Sequence
  ENSG00000197558_4 (sequence is synthesized)
agccgacacctgccaggcagtgcctcttctccagccctcctgcagcccctggcaggggctgtgggccagctctggagccagcaccagcgtccctcggccacctgtgcctcctggtcgggc

SEQ ID NO: 717813 - DNA, 120 bp, Artificial Sequence
  ENSG00000197558_5 (sequence is synthesized)
ttccactaccgcacctttgatggccgccactatcacttcctgggccgctgcacctacctgctggcgggtgctgcggactccacctgggctgtccacctaacacccggggaccgctgcccc

SEQ ID NO: 717814 - DNA, 120 bp, Artificial Sequence
  ENSG00000197558_6 (sequence is synthesized)
cagcctggacactgtcagcgggtgactatgggacccgaggaggtgctgatccaggctggaaatgtgtctgtgaaggggcagctggtacctgaagggcagtcttggctgctccacgggctg

SEQ ID NO: 717815 - DNA, 120 bp, Artificial Sequence
  ENSG00000197558_7 (sequence is synthesized)
agcctgcaatggctgggggactggctggtgctgtcaggaggcctgggggtcgtggtgcggctggacaggactggctccatctccatctctgtggaccacgagctctggggacagacacaa

SEQ ID NO: 717816 - DNA, 120 bp, Artificial Sequence
  ENSG00000197558_8 (sequence is synthesized)
ggcctctgtgggctctacaatggctggccagaggatgacttcatggagccaggcggagggctggccatgttagcagccacctttggaaattcctggaggctccctggctcggagtctggg

SEQ ID NO: 717817 - DNA, 120 bp, Artificial Sequence
  ENSG00000197558_9 (sequence is synthesized)
tgtctggatgcagtggaggtggcccagggctgtgacagccccctggggctcatagacgcagatgtagaacctggccacctgcgggctgaagcccaggacgtgtgccatcagctgctggaa

SEQ ID NO: 717818 - DNA, 120 bp, Artificial Sequence
  ENSG00000197558_10 (sequence is synthesized)
ggtccattcgggcagtgccatgcccaggtttcccctgctgagtaccacgaggcctgtctctttgcctactgcgcaggggccatggcaggcagtgggcaagaggggcggcagcaggctgtt

SEQ ID NO: 717819 - DNA, 120 bp, Artificial Sequence
  ENSG00000197558_11 (sequence is synthesized)
tgtgccacctttgccagctatgtccaggcctgtgccaggcggcacatccacattcgctggaggaagcctggcttctgcgagcgcctgtgccccgggggccagctctactccgactgcgtc

SEQ ID NO: 717820 - DNA, 120 bp, Artificial Sequence
  ENSG00000197558_12 (sequence is synthesized)
tccctctgcccacccagctgcgaggcggtgggtcagggagaggaggagtcctgcagggaagagtgtgtgagtggctgtgagtgcccgcgaggcctcttctggaatggcaccctctgtgtg

SEQ ID NO: 717821 - DNA, 120 bp, Artificial Sequence
  ENSG00000197558_13 (sequence is synthesized)
cctgctgcccactgcccctgctactactgccgccagcgctatgtacccggtgacaccgtgcgccagctgtgtaacccctgcgtgtgcagggatggccgctggcactgtgcccaggcactg

SEQ ID NO: 717822 - DNA, 120 bp, Artificial Sequence
  ENSG00000197558_14 (sequence is synthesized)
tgccccgccgagtgtgcagtgggtggggacgggcactacctcaccttcgatgggcggagctactccttctggggtggtcaaggttgccgctacagcctggtgcaggactatgtgaaggga

SEQ ID NO: 717823 - DNA, 120 bp, Artificial Sequence
  ENSG00000197558_15 (sequence is synthesized)
cagctactgatcctactggagcatggggcctgcgacgctgggagctgcctgcacgccatctccgtctccctggaggacacccacatccagctcagggactcaggagctgtgctggtcaat

SEQ ID NO: 717824 - DNA, 120 bp, Artificial Sequence
  ENSG00000197558_16 (sequence is synthesized)
gggcaggatgtgggcttgccctggattggcgctgagggcctcagtgtgcgccgagcttcctctgcctttctgctgctgcgctggcctggggcccaggtgctctggggactgtctgaccct

SEQ ID NO: 717825 - DNA, 120 bp, Artificial Sequence
  ENSG00000197558_17 (sequence is synthesized)
gtagcctacatcaccctggacccccgccatgcccaccaggtgcagggtctgtgtggcaccttcacccagaaccagcaggacgacttcctgacaccagccggagatgtggaaactagcatt

SEQ ID NO: 717826 - DNA, 120 bp, Artificial Sequence
  ENSG00000197558_18 (sequence is synthesized)
gctgcctttgctagcaagttccaggtggccggcaagggaagatgcccctctgaggacagtgccctgctgtctccctgcaccacccactcccagcgccacgccttcgcagaggcggcctgt

SEQ ID NO: 717827 - DNA, 120 bp, Artificial Sequence
  ENSG00000197558_19 (sequence is synthesized)
gccatcctgcacagctctgtcttccaggaatgccacaggctggtggacaaagagccattctatctgcgctgcctggcagccgtgtgtggctgtgatcccggcagtgactgcctgtgcccg

SEQ ID NO: 717828 - DNA, 120 bp, Artificial Sequence
  ENSG00000197558_20 (sequence is synthesized)
gtgctgtctgcctatgcgcgtcgctgtgcccaggaaggtgcctcacctccctggaggaaccagaccctctgccctgttatgtgtcctggtggccaggagtaccgagagtgtgccccagca

SEQ ID NO: 717829 - DNA, 120 bp, Artificial Sequence
  ENSG00000197558_21 (sequence is synthesized)
tgcggtcaacactgcgggaaaccagaggactgtggagagctgggcagctgtgtggctggttgtaactgtcctctggggctgctgtgggaccctgagggccagtgtgtgccccccagcttg

SEQ ID NO: 717830 - DNA, 120 bp, Artificial Sequence
  ENSG00000197558_22 (sequence is synthesized)
tgcccctgccagctcggagcccgtcgctatgcccctggcagtgccaccatgaaggagtgcaaccgctgcatctgccaggaaaggggcctctggaattgcacggctcgccactgcccttca

SEQ ID NO: 717831 - DNA, 120 bp, Artificial Sequence
  ENSG00000197558_23 (sequence is synthesized)
caggcattctgccccagggagcttgtctatgcccctggtgcctgtctcctcacctgtgacagccccagcgccaatcactcctgccctgcaggcagtactgatggctgtgtctgtccacca

SEQ ID NO: 717832 - DNA, 120 bp, Artificial Sequence
  ENSG00000197558_24 (sequence is synthesized)
ggcacggtgctgctggacgagcgctgtgtgcctcctgacctctgtccctgccgtcacagtgggcagtggtacctgcccaacgccaccatccaggaagactgcaacgtttgcgtgtgccgg

SEQ ID NO: 717833 - DNA, 120 bp, Artificial Sequence
  ENSG00000197558_25 (sequence is synthesized)
ggccggcagtggcactgcacaggccagcggcgcagtgggcggtgccaggcatcaggcgccccccactatgtgacatttgacggactggccttcacctatcctggggcctgcgagtatctg

SEQ ID NO: 717834 - DNA, 120 bp, Artificial Sequence
  ENSG00000197558_26 (sequence is synthesized)
ctggtgcgagaggccagtggcctattcacagtctctgcccagaacctgccctgtggggccagcggtctcacctgcaccaaagcgctggccgtgcgtctggagggcactgttgtgcacatg

SEQ ID NO: 717835 - DNA, 120 bp, Artificial Sequence
  ENSG00000197558_27 (sequence is synthesized)
ctcagaggccgggcagtgacggtgaatggggtgagcgtgacgccccccaaggtctacacaggccctgggctgagcctgcgtcgtgctggcctcttcctgctgctctcgacccacctgggc

SEQ ID NO: 717836 - DNA, 120 bp, Artificial Sequence
  ENSG00000197558_28 (sequence is synthesized)
ctcaccctgctctgggatggagggactcgggtcctggtgcaactgtcccctcagttccgtggtcgcgtggctgggctgtgtggtgactttgatggagatgccagtaatgatctgcggagc

SEQ ID NO: 717837 - DNA, 120 bp, Artificial Sequence
  ENSG00000197558_29 (sequence is synthesized)
cgccagggcgtcctggagcccacagctgaactggctgcccactcctggcgcctcagccccctctgccctgagccaggagacctgccacacccctgcacgatgaacacacaccgggctggt

SEQ ID NO: 717838 - DNA, 120 bp, Artificial Sequence
  ENSG00000197558_30 (sequence is synthesized)
tgggctcgggcccgctgtggggcgctgctgcagccgctcttcacattatgccacgcggaggtccccccgcagcagcactatgagtggtgcctgtatgacgcctgcggctgcgactcgggg

SEQ ID NO: 717839 - DNA, 120 bp, Artificial Sequence
  ENSG00000197558_31 (sequence is synthesized)
ggtgactgtgagtgcctctgctcggccattgccacctatgcagatgagtgtgcccggcatgggcaccacgtgcgctggcgtagccaggagctctgctccctgcagtgtgaagggggacag

SEQ ID NO: 717840 - DNA, 120 bp, Artificial Sequence
  ENSG00000197558_32 (sequence is synthesized)
gtatatgaggcctgtggccccacgtgtccccccacctgccatgagcagcatcctgagcccgggtggcactgccaggtggtggcctgtgtggagggctgcttctgccccgaggggactctg

SEQ ID NO: 717841 - DNA, 120 bp, Artificial Sequence
  ENSG00000197558_33 (sequence is synthesized)
ctgcacggaggagcctgcttggagccagcttcctgcccctgtgagtggggccgcaactccttcccgccggggtctgtgctgcaaaaggactgcgggaactgcacgtgccaggaaggtcaa

SEQ ID NO: 717842 - DNA, 120 bp, Artificial Sequence
  ENSG00000197558_34 (sequence is synthesized)
tggcattgtgggggtgacggtggccactgtgaggagcttgtgcctgcctgtgcagagggagaggccctgtgccaagagaatgggcactgtgtgccccatgggtggctttgtgacaaccag

SEQ ID NO: 717843 - DNA, 120 bp, Artificial Sequence
  ENSG00000197558_35 (sequence is synthesized)
gacgactgtggcgatggctctgatgaggagggttgtgccgccccaggctgtggggaggggcagatgacttgcagctccggccactgcctgcccctggccctgctctgtgaccgccaggat

SEQ ID NO: 717844 - DNA, 120 bp, Artificial Sequence
  ENSG00000197558_36 (sequence is synthesized)
gactgtggagatggcacggatgagccgagctatccgtgcccccagggcttgctggcctgtgccgatggacgctgcctgccgccggccctgctctgcgatgggcatcctgactgtctggat

SEQ ID NO: 717845 - DNA, 120 bp, Artificial Sequence
  ENSG00000197558_37 (sequence is synthesized)
gccgccgacgaggagtcctgtctggggcaggtgacctgcgtccccggggaggtgtcctgtgttgatggcacctgcctgggggccatccagctgtgtgacggagtctgggactgcccagat

SEQ ID NO: 717846 - DNA, 120 bp, Artificial Sequence
  ENSG00000197558_38 (sequence is synthesized)
ggagccgatgaggggccgggacactgccccctaccttctctgcccacacctcctgccagcaccttgcctggcccctccccaggctccctggacactgcgtcaagtcccctggccagcgcc

SEQ ID NO: 717847 - DNA, 120 bp, Artificial Sequence
  ENSG00000197558_39 (sequence is synthesized)
agccctgcgccaccctgcggccccttcgagtttcggtgcggcagcggcgagtgcaccccgcggggctggcgctgcgaccaggaggaagactgcgccgacggcagcgacgagcgcggctgc

SEQ ID NO: 717848 - DNA, 120 bp, Artificial Sequence
  ENSG00000197558_40 (sequence is synthesized)
cgcggccctcactgcgtgtcccccgagcagctgtgcgacggcgtgcggcagtgtcccgacggctcggacgagggccccgacgcctgcggggggctgccagccctgggaggccccaacagg

SEQ ID NO: 717849 - DNA, 120 bp, Artificial Sequence
  ENSG00000197558_41 (sequence is synthesized)
tgcggggggctgccagccctgggaggccccaacaggacagggcttccctgcccagaatacacctgccccaatggcacctgcataggcttccagctggtgtgtgatgggcagcctgactgt

SEQ ID NO: 717850 - DNA, 120 bp, Artificial Sequence
  ENSG00000197558_42 (sequence is synthesized)
ctgtggaaggccagggcaggtgggcccctccccagaagagcagggttgtggggcctggggcccctggagcccatgggggccctgcagccggacgtgtgggccctggggccagggccggag

SEQ ID NO: 717851 - DNA, 120 bp, Artificial Sequence
  ENSG00000197558_43 (sequence is synthesized)
cgctgctccccactcggcctcctggtgctacagaactgcccagggcctgagcaccagtctcaggcctgcttcacggcagcctgcccagtggacggtgaatggagcacctggtccccctgg

SEQ ID NO: 717852 - DNA, 120 bp, Artificial Sequence
  ENSG00000197558_44 (sequence is synthesized)
tctgtgtgctctgagccgtgcaggggcaccatgacgcggcaacggcagtgccactcaccccagaatgggggccgcacctgtgctgcactgcccggaggcctgcacagcacccgccagacc

SEQ ID NO: 717853 - DNA, 120 bp, Artificial Sequence
  ENSG00000197558_45 (sequence is synthesized)
aagccttgccctcaggacggctgccccaatgccacttgctctggggagctgatgttccagccctgtgccccctgcccactgacctgtgatgacatctctggccaggtcacgtgcccacct

SEQ ID NO: 717854 - DNA, 120 bp, Artificial Sequence
  ENSG00000197558_46 (sequence is synthesized)
gattggccctgcggcagcccgggctgctggtgcccagaagggcaggtgctgggcagcgaggggtggtgtgtgtggccccggcagtgcccctgcctggtggacggtgcccgctactggcct

SEQ ID NO: 717855 - DNA, 120 bp, Artificial Sequence
  ENSG00000197558_47 (sequence is synthesized)
gggcaacgcatcaaggccgactgccagctctgcatctgccaagacggacggccccgacgctgccgactcaacccggactgcgctgtggactgtggctggtcctcctggtcaccctgggcc

SEQ ID NO: 717856 - DNA, 120 bp, Artificial Sequence
  ENSG00000197558_48 (sequence is synthesized)
aagtgcctgggcccctgtggaagccagagcatccagtggtccttccggagctccaacaacccccgcccctccggccgaggtcgccagtgccgtggcatccaccgcaaggcacgcaggtgc

SEQ ID NO: 717857 - DNA, 120 bp, Artificial Sequence
  ENSG00000197558_49 (sequence is synthesized)
cagacggagccctgtgaggggtgtgagcatcagggccaggtccaccgtgtcggggaacgctggcatgggggcccctgcagggtgtgccagtgtctgcacaacctcaccgcacactgctca

SEQ ID NO: 717858 - DNA, 120 bp, Artificial Sequence
  ENSG00000197558_50 (sequence is synthesized)
ccctactgcccgctcggcagctgcccccagggctgggtcttggtggaggggacgggagaatcatgctgccactgtgccctacctggagagaaccagacggtccagcccatggccactcct

SEQ ID NO: 717859 - DNA, 120 bp, Artificial Sequence
  ENSG00000197558_51 (sequence is synthesized)
gccgcagctccggctcccagtccccagatcagattccctttggccacttacattctgcctccgtcaggagacccctgctattctcccctggggctggccggactggctgaggggagtctg

SEQ ID NO: 717860 - DNA, 120 bp, Artificial Sequence
  ENSG00000197558_52 (sequence is synthesized)
catgcatcgtcccagcagctggaacaccccacccaggctgccctcctgggggctcccacccaggggcccagccctcagggatggcacgctggaggggatgcttatgccaagtggcacact

SEQ ID NO: 717861 - DNA, 120 bp, Artificial Sequence
  ENSG00000197558_53 (sequence is synthesized)
cggccccattacctgcagctggacctgcttcagcctcggaacctcactggcatcctagtgccggagactggctcctccaacgcatatgccagcagcttctcactccagttcagcagcaat

SEQ ID NO: 717862 - DNA, 120 bp, Artificial Sequence
  ENSG00000197558_54 (sequence is synthesized)
ggtctacactggcatgactatcgtgacctcctgcctggcatcttgcccctgcccaagcttttccccagaaactgggatgacctggaccctgccgtatggactttcggccgcatggtgcag

SEQ ID NO: 717863 - DNA, 120 bp, Artificial Sequence
  ENSG00000197558_55 (sequence is synthesized)
gcgaggtttgtcagggtgtggccccacgatgtccaccacagcgatgtccccctgcaggtggagctgctgggctgcgagccagggtccccaccggcacctctgtgcccaggggttggactc

SEQ ID NO: 717864 - DNA, 120 bp, Artificial Sequence
  ENSG00000197558_56 (sequence is synthesized)
cgctgtgccagtggtgagtgtgtcctgagagggggcccttgtgacggtgttctggactgcgaggatggctcggatgaggagggctgtgtgttgctgcctgagggcactggcagattccat

SEQ ID NO: 717865 - DNA, 120 bp, Artificial Sequence
  ENSG00000197558_57 (sequence is synthesized)
tccacagccaagaccctggccctctcctctgcccagccggggcagctgctgcactggcccagggagggcctggcagagactgagcactggccccctgggcaggaatcccccacgtccccg

SEQ ID NO: 717866 - DNA, 120 bp, Artificial Sequence
  ENSG00000197558_58 (sequence is synthesized)
acagagacaaggcccgtgagtcctggcccagcctccggggtgcctcaccatggggaatctgtgcagatggtgaccaccacccccataccccagatggaggccaggaccctgccaccaggt

SEQ ID NO: 717867 - DNA, 120 bp, Artificial Sequence
  ENSG00000197558_59 (sequence is synthesized)
atggcagctgtgacggtggtgcccccacaccctgtgactccagcgacccctgctggccagagcgtcgccccaggacccttcccacctgtgcagtgtggccccggccagacgccctgtgag

SEQ ID NO: 717868 - DNA, 120 bp, Artificial Sequence
  ENSG00000197558_60 (sequence is synthesized)
gtgctgggctgcgtggaacaggcgcaggtgtgtgatggcagggaggattgcctcgacggctccgacgagaggcactgcgccaggaatctacttatgtggctcccttctctccctgccttg

SEQ ID NO: 717869 - DNA, 120 bp, Artificial Sequence
  ENSG00000197558_61 (sequence is synthesized)
tgggcagcgagcactgtgcccttcatgatgcctaccatggccctgcctgggcttccagcctcaagggccctctgttccccgagccagctgagctgtggcagcggggagtgtctgtctgct

SEQ ID NO: 717870 - DNA, 120 bp, Artificial Sequence
  ENSG00000197558_62 (sequence is synthesized)
gagcggcgctgtgacctgcggcctgactgccaggatggctcggacgaggatggctgtgtggactgcgtgctggccccctggtctgtctggagcagctgcagccgcagctgtggcctgggc

SEQ ID NO: 717871 - DNA, 120 bp, Artificial Sequence
  ENSG00000197558_63 (sequence is synthesized)
ctcaccttccagcgccaggagctgctgcggcctcctctgccagggggcagctgcccgcgtgaccggttccgaagccagtcctgctttgtgcaggcctgcccagtggctggggcatgggcc

SEQ ID NO: 717872 - DNA, 120 bp, Artificial Sequence
  ENSG00000197558_64 (sequence is synthesized)
gggcctcccaagagagggcaccctgcggcttgcagccctgctcaggtggcacagactgcgagctgggccgtgtgtatgtgagtgccgatctgtgccagaaggggctggtgcccccatgcc

SEQ ID NO: 717873 - DNA, 120 bp, Artificial Sequence
  ENSG00000197558_65 (sequence is synthesized)
caccctcctgcctggatcccaaggccaacagaagctgcagtgggcattgtgtggaaggatgccgctgtcccccggggctccttctgcatgacactcgctgcctgcccctctctgagtgcc

SEQ ID NO: 717874 - DNA, 120 bp, Artificial Sequence
  ENSG00000197558_66 (sequence is synthesized)
cctgcctggtgggcgaagagctgaagtggccaggggtgtccttcctcctgggcaactgcagccaatgcgtgtgtgagaagggggagttgctgtgccaaccagggggctgccccctgccct

SEQ ID NO: 717875 - DNA, 120 bp, Artificial Sequence
  ENSG00000197558_67 (sequence is synthesized)
gcggctggtcagcctggtcctcctgggctccctgcgaccgctcctgtggctctggagtgagggccaggttcaggtctccctccaaccctccggcagcctgggggggtgccccgtgtgaag

SEQ ID NO: 717876 - DNA, 120 bp, Artificial Sequence
  ENSG00000197558_68 (sequence is synthesized)
gtgaccggcaggaactgcagggctgccacacagtgtgtgggacagaggtgttcggctggacgccctggacttcctggtcctcctgctcccaaagctgccttgccccgggagggggccctg

SEQ ID NO: 717877 - DNA, 120 bp, Artificial Sequence
  ENSG00000197558_69 (sequence is synthesized)
gctggcgcagtcgttcccgactctgccccagccctggggattcatcctgcccaggagatgccacccaggaggagccctgcagcccccctgtatgcccagtgccaagcatctggggtctgt

SEQ ID NO: 717878 - DNA, 120 bp, Artificial Sequence
  ENSG00000197558_70 (sequence is synthesized)
gggctccctggtccacttgctcagccccctgtgatggaggcatccagacacgtgggcgcagctgctccagcttggctccaggggacaccacgtgcccaggaccccacagtcagaccaggg

SEQ ID NO: 717879 - DNA, 120 bp, Artificial Sequence
  ENSG00000197558_71 (sequence is synthesized)
actgcaacacgcagccctgcacagcccagtgcccagagaacatgttgttccgctcagcagagcagtgtcaccaggaggggggtccttgccctcggctatgcctgacgcagggccccggga

SEQ ID NO: 717880 - DNA, 120 bp, Artificial Sequence
  ENSG00000197558_72 (sequence is synthesized)
tagagtgtacgggcttctgcgcccccggctgcacctgcccccctggtcttttcctgcacaatgctagctgcctgccccgcagccagtgcccctgccagctgcacgggcagctctatgcat

SEQ ID NO: 717881 - DNA, 120 bp, Artificial Sequence
  ENSG00000197558_73 (sequence is synthesized)
caggagcaatggctcgcctggactcctgcaacaactgcacctgtgtctctggtaagatggcatgcacctcggagcgctgcccagtggcctgtggctggagtccctggaccctgtggagtc

SEQ ID NO: 717882 - DNA, 120 bp, Artificial Sequence
  ENSG00000197558_74 (sequence is synthesized)
tctgtagctgcagctgcaacgtgggcattcggcgccgcttccgggcaggcactgcacccccagctgcctttgggggtgctgagtgccaaggccccaccatggaggctgaattctgcagcc

SEQ ID NO: 717883 - DNA, 120 bp, Artificial Sequence
  ENSG00000197558_75 (sequence is synthesized)
tgcggccatgtccaggtcctggtggggagtggggcccttggtctccgtgctccgtgccctgtggtggtggctacaggaaccgcacccgaggcagcagccgcagcctcatggagttttcca

SEQ ID NO: 717884 - DNA, 120 bp, Artificial Sequence
  ENSG00000197558_76 (sequence is synthesized)
cctgtggcctgcagccctgcgcagggccagtgcctggcatgtgtcccagggacaagcagtggctggactgtgcccagggccctgcctcttgtgcagagctcagcgccccaagagggacta

SEQ ID NO: 717885 - DNA, 120 bp, Artificial Sequence
  ENSG00000197558_77 (sequence is synthesized)
accagacctgccaccctggctgccactgcccctctgggatgcttctgctgaacaacgtgtgtgtgcccacccaggactgcccctgtgcccacgaggggcacctctaccccccgggcagca

SEQ ID NO: 717886 - DNA, 120 bp, Artificial Sequence
  ENSG00000197558_78 (sequence is synthesized)
ctgtggttcgtccatgtgaaaactgctcctgtgtctccgggctcatcgccaactgcagctcctggccttgtgcggagggtgagcccacgtggtcaccctggaccccttggagccagtgtt

SEQ ID NO: 717887 - DNA, 120 bp, Artificial Sequence
  ENSG00000197558_79 (sequence is synthesized)
cagcctcctgtggccctgcccggtgccatcggcaccggttctgtgccaggtcccccagtgcagtgccatccaccgtggctccgctgcccctgccagccacccccacacctctctgctcag

SEQ ID NO: 717888 - DNA, 120 bp, Artificial Sequence
  ENSG00000197558_80 (sequence is synthesized)
gccccgaggctgaagaggagccatgtctcctgcaggggtgtgatcgagctgggggatggggtccatgggggccctggtcccactgtagccggagctgtgggggaggcctgcggagccgga

SEQ ID NO: 717889 - DNA, 120 bp, Artificial Sequence
  ENSG00000197558_81 (sequence is synthesized)
cccgggcctgtgaccagcccccaccccagggcctgggggattactgcgaggggccacgggcacagggggaggtctgccaggctctgccctgcccagtgaccaactgcactgccattgaag

SEQ ID NO: 717890 - DNA, 120 bp, Artificial Sequence
  ENSG00000197558_82 (sequence is synthesized)
gggccgagtatagcccctgtggccctccgtgccctcgctcctgtgatgacctagtgcactgcgtgtggcgctgccagcctggctgctactgcccaccaggccaggtactgagttccaacg

SEQ ID NO: 717891 - DNA, 120 bp, Artificial Sequence
  ENSG00000197558_83 (sequence is synthesized)
gggccatctgcgtgcagccgggtcactgcagctgcctggacctgctgaccgggcagcggcaccatccgggtgctcggctggcaaggcctgacggctgcaaccactgcacctgcctggagg

SEQ ID NO: 717892 - DNA, 120 bp, Artificial Sequence
  ENSG00000197558_84 (sequence is synthesized)
ggaggctgaactgcacagacctgccctgcccagtgcccggaggctggtgcccgtggtcggagtggacaatgtgctcccagccctgcaggggccagaccaggagccgctccagggcctgtg

SEQ ID NO: 717893 - DNA, 120 bp, Artificial Sequence
  ENSG00000197558_85 (sequence is synthesized)
cctgccccactcctcagcacggtggtgccccgtgcactggagaggctggggaggcaggggcccagcatcagagggaggcctgccccagctacgccacgtgcccagtggacggagcctggg

SEQ ID NO: 717894 - DNA, 120 bp, Artificial Sequence
  ENSG00000197558_86 (sequence is synthesized)
gcccatgggggccatggtctccctgcgacatgtgcttggggcagtcccaccggagccgggcgtgcagccggccccccacccctgagggagggaggccctgccctgggaaccacacgcaga

SEQ ID NO: 717895 - DNA, 120 bp, Artificial Sequence
  ENSG00000197558_87 (sequence is synthesized)
gtcgcccttgccaggaaaattccacccagtgcacagactgcgggggtggccagagtctgcatccctgtgggcagccctgcccccgctcctgccaggacctgtcccctgggagtgtgtgcc

SEQ ID NO: 717896 - DNA, 120 bp, Artificial Sequence
  ENSG00000197558_88 (sequence is synthesized)
agccaggctctgtgggctgccagcccacttgtgggtgccccctgggccagctctcccaggacgggctgtgcgtgcccccagcccactgccgctgccagtaccagcctggagccatgggga

SEQ ID NO: 717897 - DNA, 120 bp, Artificial Sequence
  ENSG00000197558_89 (sequence is synthesized)
tccctgagaaccagagccgctcagcagggtctaggtttagctcctgggagagcctggaacccggagaggtggtcactgggccatgtgacaactgcacctgtgtggcaggcattctgcaat

SEQ ID NO: 717898 - DNA, 120 bp, Artificial Sequence
  ENSG00000197558_90 (sequence is synthesized)
gccaggaggtgcctgactgcccggaccctggggtgtggagctcttggggcccttgggaagactgcagtgtttcgtgtgggggcggggagcagctgcgctcccggcgctgtgctcgtcctc

SEQ ID NO: 717899 - DNA, 120 bp, Artificial Sequence
  ENSG00000197558_91 (sequence is synthesized)
cctgcccagggcctgcccgccagagccgcacatgcagcacacaggtctgcagagaggcaggctgcccggctggccgcctgtaccgtgaatgccagcccggcgagggatgccccttctcct

SEQ ID NO: 717900 - DNA, 120 bp, Artificial Sequence
  ENSG00000197558_92 (sequence is synthesized)
gcgcccacgtcacgcagcaggtgggctgcttctctgagggctgcgaggagggctgccactgccccgagggcaccttccagcaccgcctggcctgtgtgcaggagtgcccttgtgtgctga

SEQ ID NO: 717901 - DNA, 120 bp, Artificial Sequence
  ENSG00000197558_93 (sequence is synthesized)
cagcctggctgctgcaggagctgggagccaccataggtgaccctggtcagcccctcgggcctggagatgagctggactcaggccagacacttcgtacaagctgtggcaactgctcgtgtg

SEQ ID NO: 717902 - DNA, 120 bp, Artificial Sequence
  ENSG00000197558_94 (sequence is synthesized)
cacacgggaagctgtcttgctccctggacgactgcttcgaggccgatggtggtttcggtccctggagcccgtggggcccgtgctcccgctcctgtggagggctgggcacccgtacccgca

SEQ ID NO: 717903 - DNA, 120 bp, Artificial Sequence
  ENSG00000197558_95 (sequence is synthesized)
gccgccagtgtgtgctcaccatgcccaccctcagtggtcagggctgccgtgggccccgccaggacctcgagtactgccccagcccagactgccctggggctgaagggtccacggtggagc

SEQ ID NO: 717904 - DNA, 120 bp, Artificial Sequence
  ENSG00000197558_96 (sequence is synthesized)
cagtaacaggccttccaggtggctggggcccatggtcctcctggtccccctgctccagaagctgcacggaccccgctcgccctgcatggcgcagccgcacccgcctctgcctggctaact

SEQ ID NO: 717905 - DNA, 120 bp, Artificial Sequence
  ENSG00000197558_97 (sequence is synthesized)
gcaccatgggggacccattacaggagcgcccctgcaacctgccctcatgcacagagctgcccgtgtgccctggccctggctgtggggctgggaactgttcctggacctcctgggccccgt

SEQ ID NO: 717906 - DNA, 120 bp, Artificial Sequence
  ENSG00000197558_98 (sequence is synthesized)
gggaaccttgctcccgcagctgcggagtgggccagcagcgccgcctgcgggcataccgtccccctgggcccggcgggcactggtgccccaacatccttactgcctaccaagagcgccgct

SEQ ID NO: 717907 - DNA, 120 bp, Artificial Sequence
  ENSG00000197558_99 (sequence is synthesized)
tctgcaacctgcgagcctgcccagtgcccgggggctggtcacgctggagtccctggtcctggtgtgaccgcagctgtgggggaggccaatccctgagaagccgcagctgctcaagccccc

SEQ ID NO: 717908 - DNA, 120 bp, Artificial Sequence
  ENSG00000197558_100 (sequence is synthesized)
catccaagaacgggggagccccctgtgctggggagcggcaccaggcccgcctctgcaatcccatgccttgtgaggccggctgcccagcaggcatggaggtggtcacctgtgccaaccgct

SEQ ID NO: 717909 - DNA, 120 bp, Artificial Sequence
  ENSG00000197558_101 (sequence is synthesized)
gcccccgccgctgctcagacctccaggagggaattgtgtgtcaggacgaccaggtctgccagaagggctgccgctgcccaaaggggtccctggagcaggatggtggctgcgtgccaattg

SEQ ID NO: 717910 - DNA, 120 bp, Artificial Sequence
  ENSG00000197558_102 (sequence is synthesized)
ggcactgtgactgcaccgatgcccagggccacagctgggccccggggagccagcaccaggatgcctgcaacaactgctcatgccaagctgggcagctctcctgcacggctcagccctgcc

SEQ ID NO: 717911 - DNA, 120 bp, Artificial Sequence
  ENSG00000197558_103 (sequence is synthesized)
cgcctcccacccactgtgcctggagccactggtcggcctggagtccctgcagccactcatgcgggcccagagggcagcagagccgcttccggtcctccacgtcgggctcgtgggccccag

SEQ ID NO: 717912 - DNA, 120 bp, Artificial Sequence
  ENSG00000197558_104 (sequence is synthesized)
agtgtcgggaggagcagtcccagagccagccctgccctcagccctcgtgcccacccctgtgcctgcagggcactcgctcccgcaccctgggggacagctggctgcagggggagtgccagc

SEQ ID NO: 717913 - DNA, 120 bp, Artificial Sequence
  ENSG00000197558_105 (sequence is synthesized)
ggtgctcctgcaccccggagggtgtgatctgcgaagatacggagtgtgcagtgcctgaggcttggacgctgtggtcctcctggtccgactgccctgtctcctgtggaggtggaaaccagg

SEQ ID NO: 717914 - DNA, 120 bp, Artificial Sequence
  ENSG00000197558_106 (sequence is synthesized)
tccgaacccgggcctgcagggccgcagcccctcaccacaggagcccaccctgcctgggccctgacacccagaccaggcagcagccttgcccagggctgctggaggcctgctcctggggcc

SEQ ID NO: 717915 - DNA, 120 bp, Artificial Sequence
  ENSG00000197558_107 (sequence is synthesized)
cgtgggggccctgttcccgcagctgcggcccgggcctggcctctcgctctgggtcctgcccctgcctgatggccaaggccgaccccacctgcaacagcaccttcctccacctggacaccc

SEQ ID NO: 717916 - DNA, 120 bp, Artificial Sequence
  ENSG00000197558_108 (sequence is synthesized)
agggctgctactcagggccctgcccagaggagtgtgtgtggagcagctggagcagctggacgcgctgctcttgccgggtgctggtgcagcagcgctaccgacaccagggcccggcgtccc

SEQ ID NO: 717917 - DNA, 120 bp, Artificial Sequence
  ENSG00000197558_109 (sequence is synthesized)
gaggggccagggcaggcgccccctgcacgcggctggatggccacttccggccttgccttatcagcaactgctctgaggacagctgcacgcctccctttgagttccatgcctgcggctccc

SEQ ID NO: 717918 - DNA, 120 bp, Artificial Sequence
  ENSG00000197558_110 (sequence is synthesized)
cctgtgctgggctctgtgccacacacctgagccatcagctctgccaggacctgccaccctgccagccgggctgctactgccccaaggggctgctggagcaggctgggggctgcattcccc

SEQ ID NO: 717919 - DNA, 120 bp, Artificial Sequence
  ENSG00000197558_111 (sequence is synthesized)
cagaggagtgtaactgctggcatacctcagcagcaggagccgggatgaccctggcccctggggaccgcctgcagctgggctgtaaggagtgtgaatgccggcgtggggagctgcactgca

SEQ ID NO: 717920 - DNA, 120 bp, Artificial Sequence
  ENSG00000197558_112 (sequence is synthesized)
ccagccagggctgtcaaggtcttctgcctctgagtgagtggtccgagtggtcgccctgtgggccctgcctgccgcccagcgccctggcccctgcctccaggactgccctagaggagcact

SEQ ID NO: 717921 - DNA, 120 bp, Artificial Sequence
  ENSG00000197558_113 (sequence is synthesized)
ggctccgagacccaactggcctctcccccaccttggccccgctgctggcttcagagcagcaccgccaccggctctgtctggatcctgcgacagggaggccctggactggagcccctcacc

SEQ ID NO: 717922 - DNA, 120 bp, Artificial Sequence
  ENSG00000197558_114 (sequence is synthesized)
tctgcaccgcacccctcagccagcagcgcctctgccctgaccctggagcctgccctgactcatgccagtggagtctgtgggggccatggagcccctgccaggtgccctgcagtggggggt

SEQ ID NO: 717923 - DNA, 120 bp, Artificial Sequence
  ENSG00000197558_115 (sequence is synthesized)
tcaggctacgctggagagaggcagaggccctctgtggaggaggctgccgggagccatgggctcaagaaagctgcaacggagggccctgcccagagagctgcgaggcccaagacactgtat

SEQ ID NO: 717924 - DNA, 120 bp, Artificial Sequence
  ENSG00000197558_116 (sequence is synthesized)
tcaccctggactgtgccaaccagtgcccacacagctgtgccgacctctgggaccgcgttcagtgtctgcagggaccctgccgcccaggctgccgctgtccccctggccagctggtccagg

SEQ ID NO: 717925 - DNA, 120 bp, Artificial Sequence
  ENSG00000197558_117 (sequence is synthesized)
atgggcgctgtgtgccgatctcctcttgccgctgtggcctccccagtgccaatgcctcttgggagctggccccggcccaggcggtgcagctggactgccaaaactgcacctgtgtcaacg

SEQ ID NO: 717926 - DNA, 120 bp, Artificial Sequence
  ENSG00000197558_118 (sequence is synthesized)
agtccctggtgtgcccacaccaggagtgtccagtccttgggccttggtcagcctggagcagttgctcggccccctgtggtgggggcactatggagcgacatcggacttgtgaggggggtc

SEQ ID NO: 717927 - DNA, 120 bp, Artificial Sequence
  ENSG00000197558_119 (sequence is synthesized)
ctggggtggcaccatgccaggcccaggacacagagcaacggcaggagtgtaacctgcagccctgccctgagtgcccccctggccaggtgcttagtgcctgtgccacctcatgcccgtgcc

SEQ ID NO: 717928 - DNA, 120 bp, Artificial Sequence
  ENSG00000197558_120 (sequence is synthesized)
tctgctggcatctgcagcctggtgccatctgtgtgcaggagccctgccagcctggctgtggctgccctggagggcagctgctgcacaatggcacgtgtgtgcctcccactgcctgcccct

SEQ ID NO: 717929 - DNA, 120 bp, Artificial Sequence
  ENSG00000197558_121 (sequence is synthesized)
gcacccagcattctctgccctggggcctcaccctgaccctggaagagcaggcccaggagctgcccccagggactgtgctcacccggaactgcacccgctgtgtctgccacggtggagcct

SEQ ID NO: 717930 - DNA, 120 bp, Artificial Sequence
  ENSG00000197558_122 (sequence is synthesized)
tcagctgctccctcgttgactgtcaggtgccccctggggaaacgtggcagcaggtggccccgggggagctggggctctgcgagcagacgtgcctggagatgaacgccacaaagacccaga

SEQ ID NO: 717931 - DNA, 120 bp, Artificial Sequence
  ENSG00000197558_123 (sequence is synthesized)
gtaactgcagttcagctcgagcctcgggctgcgtgtgccagcccgggcacttccgcagccaggcaggcccctgcgtccccgaagaccactgcgagtgctggcaccttgggcgtccccacc

SEQ ID NO: 717932 - DNA, 120 bp, Artificial Sequence
  ENSG00000197558_124 (sequence is synthesized)
tgcctggatctgaatggcaggaggcctgtgagagctgcctctgcctcagtgggaggcctgtctgcacccagcactgctccccactcacctgtgctcagggcgaggagatggtgctggagc

SEQ ID NO: 717933 - DNA, 120 bp, Artificial Sequence
  ENSG00000197558_125 (sequence is synthesized)
cagggagctgctgtccctcttgccgcagggaggctccggaggagcagtcgccctcctgccagctcctcacggagcttcgaaacttcaccaaagggacctgttacctggaccaggtagaag

SEQ ID NO: 717934 - DNA, 120 bp, Artificial Sequence
  ENSG00000197558_126 (sequence is synthesized)
tgagctactgcagtgggtactgcccatccagcacccatgtcatgccagaggagccatacctgcagagccagtgtgactgctgcagctaccgtctagacccggagagccctgtgcggatcc

SEQ ID NO: 717935 - DNA, 120 bp, Artificial Sequence
  ENSG00000197558_127 (sequence is synthesized)
tgaacctgcgctgtctgggtggccacacagagcccgtggtgctgccggtcatccacagctgccagtgcagctcctgccagggtggtgacttctcaaagcgctaacaggctccgctgggtg

SEQ ID NO: 717936 - DNA, 120 bp, Artificial Sequence
  ENSG00000197558_128 (sequence is synthesized)
agtccacagctgtccctcttgtgatcatgggactcagcagcactgaccacgtccttccacgctctctcacctgcccccaactgggggcccatgacttggcattagcatgttccaaataaa

SEQ ID NO: 717937 - DNA, 120 bp, Artificial Sequence
  ENSG00000197558_129 (sequence is synthesized)
ataacgggtggggtgcagccttgttggttgcagcgtgcatgctgggggtgacagagtgctgatcacttcccctcggtcgtggggcactttagggtccataaagcactttcgtgtgcatca

SEQ ID NO: 717938 - DNA, 120 bp, Artificial Sequence
  ENSG00000197558_130 (sequence is synthesized)
ggagatcaggcccctgccctccctcaaccattggacctgtgccccgccttagcaccatagggttgaactcaccccaacttctttctcccaacgcctgaccctccctcctcctggtctccc

SEQ ID NO: 717939 - DNA, 120 bp, Artificial Sequence
  ENSG00000197558_131 (sequence is synthesized)
tccactgagcccctgacacctccacagggcagatttccaggctgagagctaagctgacagccaggctaggaccctgagctctcaccttacttccctgcctggctggcacttgccctgccc

SEQ ID NO: 717940 - DNA, 120 bp, Artificial Sequence
  ENSG00000197558_132 (sequence is synthesized)
gcctggctggcacttgccctgccccatgcccaacccagtgccacccctacctcccagtccatgcaagaggtccgagtttccaaattaggtttttggccaggtgcagtggctcacaactgt

SEQ ID NO: 717941 - DNA, 82 bp, Artificial Sequence
  ENSG00000197558_133 (sequence is synthesized)
cactttgggaggctgaggcgagcagatcccttgagcccagggctttgagactagcctgggttgaacatggcaagactccctg

SEQ ID NO: 717942 - DNA, 120 bp, Artificial Sequence
  ENSG00000197558_134 (sequence is synthesized)
gctacctgggagctaagatgggaagattgcttgagcctgggacgtcaaggctgcagtgagctgtgatcaccccactgcactctgcctgggcaatagagcgagaaaaaaattttttttaaa

SEQ ID NO: 717943 - DNA, 120 bp, Artificial Sequence
  ENSG00000197558_135 (sequence is synthesized)
ttaggttttcataattatctttttcatcattatgaaagcaatccttccacaccaagggaaacattgagaaaataccaagttttagaaaggcgaaatgaaaataaatctcctaacttccca

SEQ ID NO: 717944 - DNA, 120 bp, Artificial Sequence
  ENSG00000197558_136 (sequence is synthesized)
tcacccatataagcagttggcttatatgttatatctaactgcttctgtggaactgagggaaacccagataacccccatatggacttggctctgagccgctgggccaccctcccagcctgc

SEQ ID NO: 717945 - DNA, 120 bp, Artificial Sequence
  ENSG00000197558_137 (sequence is synthesized)
cgccaccgaggctggtgctgctgggcctcacagtccatcctggagtctggtttcccagaatctgacctgatggagaatttctctccccctcagcccttggcttggtgttagttaggaaaa

SEQ ID NO: 717946 - DNA, 120 bp, Artificial Sequence
  ENSG00000197558_138 (sequence is synthesized)
taggctcctaattcctaccttgagccccctaaatataggtctcttcatttatcatcaccaatcatccccccacaaaagaggtaaccataccccctggtgggggtggcacctggtggtggt

SEQ ID NO: 717947 - DNA, 120 bp, Artificial Sequence
  ENSG00000197558_139 (sequence is synthesized)
cgccatccccaccttcgcctcctgaggcacagggagagggcaggaagggacaggagcggagcaggacacatctcacagtgcccgcaggctccacccagctgcctctgtgccctggcctct

SEQ ID NO: 717948 - DNA, 120 bp, Artificial Sequence
  ENSG00000197558_140 (sequence is synthesized)
ttccctgtggtgtggctccggggctgtgcctgacccctgagcagctctgtgatgggatcccagactgtccccagggcgaggacgagctggactgcggggggctgccagccctgggaggcc

SEQ ID NO: 717949 - DNA, 120 bp, Artificial Sequence
  ENSG00000197558_141 (sequence is synthesized)
ccaacaggacagggcttccctgcccagaatacacctgccccaatggcacctgcataggcttccagctggtgagggtgggagtgggtggaggaggcggcagtgccatgttgcctcccagca

SEQ ID NO: 717950 - DNA, 120 bp, Artificial Sequence
  ENSG00000197558_142 (sequence is synthesized)
gggttccatagtctttgtccccaagggccttccagtgtccccgaggggcatggcctgcattcgatgcttgttgaatacctggtgagtagcagggactgtgctctgtggagccgaggcttg

SEQ ID NO: 717951 - DNA, 120 bp, Artificial Sequence
  ENSG00000197558_143 (sequence is synthesized)
ggtgccactgtcacatggatgctggaaaccatccaagtggctcagactcagggcaggtatgtgaagcctgcaagggagagaggatggggagacaccaagttcactgagggcctccgggag

SEQ ID NO: 717952 - DNA, 120 bp, Artificial Sequence
  ENSG00000197558_144 (sequence is synthesized)
cccagacccacgcacgtcttcgtggagagcagcctgggcacagccctgccctcagggggtttgcatccttcccggagacaaaccgcacgaagcggtaggaatcagtccgtgctgtgttaa

SEQ ID NO: 717953 - DNA, 120 bp, Artificial Sequence
  ENSG00000197558_145 (sequence is synthesized)
gtcttaactgtttcaggagcacctgctctgtgccaggtgccgagccaggccctggggacacagcagtgaacaggacctggcctttgccctaggggcacctccagcttagcgagaggagct

SEQ ID NO: 717954 - DNA, 120 bp, Artificial Sequence
  ENSG00000197558_146 (sequence is synthesized)
cagtccaggaccagccccctccagccttgagaggcccaaatgcctactgccagggtggggggcatggctctgggaggggccgtgaaaactggggaaaaagtggggtcactcaaagtcatg

SEQ ID NO: 717955 - DNA, 120 bp, Artificial Sequence
  ENSG00000197558_147 (sequence is synthesized)
agcctcaccagccctgctcctgcaccagctggcggcgtctcccctctccgcagcatttcctcctgtgtgttccctggtactgctctcaggagccttgccggtgcctggctgcagagacgt

SEQ ID NO: 717956 - DNA, 120 bp, Artificial Sequence
  ENSG00000197558_148 (sequence is synthesized)
gcaggcagagcgagggcccagaggggtttggggacaagagaagcctgcacccctgatagggagcttatgcccacggggcaggcaccagggcatctggtgctcagagccgaaaagagccct

SEQ ID NO: 717957 - DNA, 120 bp, Artificial Sequence
  ENSG00000197558_149 (sequence is synthesized)
gtgcccgggtccccaggggcttcccggacaagacttgagggctggagaggggtgtctatagtgtggagaaggcgcggagcaccttcccacctggaatggcctggtcagcaacccagagtg

SEQ ID NO: 717958 - DNA, 120 bp, Artificial Sequence
  ENSG00000197558_150 (sequence is synthesized)
tgtgggtggggtagggggtagggggtggacatgtgcattgggtgggggaaggggagtttgaggggcaagagctgaaatggatcaccctggtgggctgctgagaataaggtccctgagctc

SEQ ID NO: 717959 - DNA, 120 bp, Artificial Sequence
  ENSG00000197558_151 (sequence is synthesized)
cttgagggcagtgggctggtgcctggaagcgcagttgcgtgctcagctctgccctgggctgcgggggaggaagatggacaggaagcagtgctgggactgtgagcgcccaggctgtatcct

SEQ ID NO: 717960 - DNA, 120 bp, Artificial Sequence
  ENSG00000197558_152 (sequence is synthesized)
caggggatgggagctgccctcagggccgggggctgtgcagggtgctgagccctctccctctgcagggcctggcagagactgagcactggccccctgggcaggaatcccccacgtccccga

SEQ ID NO: 717961 - DNA, 120 bp, Artificial Sequence
  ENSG00000197558_153 (sequence is synthesized)
caggtgtgtgcacagactccaggcctcctccccaaactcttgtcccacctgttcttccagagccaggggccgttacatctcaggggttcaaatcccatgacccctgacttccccacaacc

SEQ ID NO: 717962 - DNA, 120 bp, Artificial Sequence
  ENSG00000197558_154 (sequence is synthesized)
aagagagtcacggggttggctcagggaggagacactggtcactttggacatggccaggtcctgcccctgcccaccccctgggattccaaggtatgtggctgtaggttggcggggcaggta

SEQ ID NO: 717963 - DNA, 120 bp, Artificial Sequence
  ENSG00000197558_155 (sequence is synthesized)
gctccaggccagctcccaggactgagcctgtgccctgtaatgtggctgcctctccagatgcctggtcaggacaggtctcccccatgggggtgggaggccacttggctccagcctgcactc

SEQ ID NO: 717964 - DNA, 120 bp, Artificial Sequence
  ENSG00000197558_156 (sequence is synthesized)
tctctgctcaccatccatggagccaggcccccctttctgaagcgtttgctggcatcaaatgtctcttaagtgggcacgggggttggatgtggtcaccaagttggcatgctcctatataag

SEQ ID NO: 717965 - DNA, 120 bp, Artificial Sequence
  ENSG00000197558_157 (sequence is synthesized)
gaaggaagaggctctgcctggttgtgaaccggcctccctggagctacctgattattcacctgtgtgctagccagcagagagctgcctcctggagggcctgctgtcctgcggggatgaggg

SEQ ID NO: 717966 - DNA, 120 bp, Artificial Sequence
  ENSG00000197558_158 (sequence is synthesized)
ggtggtaagagggcttttggtgtgggtgaattcttgccctcatttctagcccctatgggagggatctgggtgaggcttggggcagcaggggctggagaggaaggagggtgagggcaccag

SEQ ID NO: 717967 - DNA, 120 bp, Artificial Sequence
  ENSG00000197558_159 (sequence is synthesized)
gtctgctctttcattctggctcatcctcccctgggcctcagcttttccccatctgtgacactaggaggccttatagacaactgtggcccctccctgtgagttctgatggaagttattcag

SEQ ID NO: 717968 - DNA, 120 bp, Artificial Sequence
  ENSG00000197558_160 (sequence is synthesized)
aacctggccggactgtttctgtgtcttttgtgaaaagcagacaaagcaattgatgccacccctcagatccataacatgcagacccatgggatacattataatttcattctcagtctggtt

SEQ ID NO: 717969 - DNA, 120 bp, Artificial Sequence
  ENSG00000197558_161 (sequence is synthesized)
ttaccctgcccccacaccaccctcagcctttctgtttccagcacttcctggtcatgaccctgagcccctcctgcctgtccaccagggtctctgggcccaggggtggtcactgggaagggc

SEQ ID NO: 717970 - DNA, 120 bp, Artificial Sequence
  ENSG00000197558_162 (sequence is synthesized)
ctggccgggaggggctaggctatagagcacattgacctgctacccctcctgcttgtctctaaggcctgcaggatttgaagctgggggtggggtccaggcagcagctagaaagagaagcgg

SEQ ID NO: 717971 - DNA, 120 bp, Artificial Sequence
  ENSG00000197558_163 (sequence is synthesized)
gagagcctagagggctttaaggcctgccggagcgtttgcgacgacagagctcaaggcttgagggggaggcaagaggtgggcctgggtactgactccatcataccttccccagactcatgc

SEQ ID NO: 717972 - DNA, 120 bp, Artificial Sequence
  ENSG00000197558_164 (sequence is synthesized)
tggctgccctggagggcaggtgggtacggggtgctgtgtcctgactccctgtgggggaagccggcaggtggggagggaagaggcggtggtctgagtgtcactgagcctgccctgctgcag

SEQ ID NO: 717973 - DNA, 120 bp, Artificial Sequence
  ENSG00000197558_165 (sequence is synthesized)
gccacggtggagccttcagctgctccctcgttgactgtcagggtgagatgtggctgtccatgccctgctgcacctccaaagtcaaggcccgggactggcactgaggaggagagacgggcc

SEQ ID NO: 717974 - DNA, 120 bp, Artificial Sequence
  ENSG00000197558_166 (sequence is synthesized)
ctgctcacagactagacagagcttcagaaagccctcccctgtctgtccacactgacctctctctaactggagacccagcaccccctgccgagggctccctgggcactcagtgtggtctgc

SEQ ID NO: 717975 - DNA, 120 bp, Artificial Sequence
  ENSG00000197558_167 (sequence is synthesized)
cccacttgtgggggcattccctagcacacagtatacacagagccagggctgtgatgccaggaagtggaaggttctttccctgccagtgaggaaactgaggtctggaggggtgagcggaaa

SEQ ID NO: 717976 - DNA, 120 bp, Artificial Sequence
  ENSG00000197558_168 (sequence is synthesized)
tgaggggcctggcctggcagcccccgggctgatagcatttgccctgtggggtgcagtgttacccccatctgatcaagaccaagggcccacccaccgtgttcccagctctgccacgctggg

SEQ ID NO: 717977 - DNA, 120 bp, Artificial Sequence
  ENSG00000197558_169 (sequence is synthesized)
ctctgtgaatgcagacatgcagcatggccagcctccgggcagaccacccacccccagaacaggcagagacagggcacagtctctaggtctctgacaggcaggtagaaccccagagggtga

SEQ ID NO: 717978 - DNA, 120 bp, Artificial Sequence
  ENSG00000197558_170 (sequence is synthesized)
gacatcagtgctgagaatagaggccgagtggacaggattggtcagggagccttttctggaggaggtgagacctggcctgggtccagctagtgtttgggtgggtggataagaaagatcagg

SEQ ID NO: 717979 - DNA, 120 bp, Artificial Sequence
  ENSG00000197558_171 (sequence is synthesized)
aggtgtggttggaggctgctgtggctgagaaggcaagatggggacgtgtgggtgctcagcttgggaggggaggaatcgaggctggatccagggctgacctgaaagctgggttggatggtc

SEQ ID NO: 717980 - DNA, 120 bp, Artificial Sequence
  ENSG00000197558_172 (sequence is synthesized)
gttagagctgcgaggcccaagacactgtattcaccctggactgtgccaaccagtgcccacacagctgtgccgacctctgggaccgcgttcagtgtctgcagggaccctgccgcccagagt

SEQ ID NO: 717981 - DNA, 120 bp, Artificial Sequence
  ENSG00000197561_0 (sequence is synthesized)
agagaccccggagccccagccccaccatgaccctcggccgccgactcgcgtgtcttttcctcgcctgtgtcctgccggccttgctgctggggggcaccgcgctggcctcggagattgtgg

SEQ ID NO: 717982 - DNA, 120 bp, Artificial Sequence
  ENSG00000197561_1 (sequence is synthesized)
ggggccggcgagcgcggccccacgcgtggcccttcatggtgtccctgcagctgcgcggaggccacttctgcggcgccaccctgattgcgcccaacttcgtcatgtcggccgcgcactgcg

SEQ ID NO: 717983 - DNA, 120 bp, Artificial Sequence
  ENSG00000197561_2 (sequence is synthesized)
tggcgaatgtaaacgtccgcgcggtgcgggtggtcctgggagcccataacctctcgcggcgggagcccacccggcaggtgttcgccgtgcagcgcatcttcgaaaacggctacgaccccg

SEQ ID NO: 717984 - DNA, 120 bp, Artificial Sequence
  ENSG00000197561_3 (sequence is synthesized)
tggcccagctgccggctcagggacgccgcctgggcaacggggtgcagtgcctggccatgggctggggccttctgggcaggaaccgtgggatcgccagcgtcctgcaggagctcaacgtga

SEQ ID NO: 717985 - DNA, 120 bp, Artificial Sequence
  ENSG00000197561_4 (sequence is synthesized)
cggtggtgacgtccctctgccgtcgcagcaacgtctgcactctcgtgaggggccggcaggccggcgtctgtttcggggactccggcagccccttggtctgcaacgggctaatccacggaa

SEQ ID NO: 717986 - DNA, 120 bp, Artificial Sequence
  ENSG00000197561_5 (sequence is synthesized)
ttgcctccttcgtccggggaggctgcgcctcagggctctaccccgatgcctttgccccggtggcacagtttgtaaactggatcgactctatcatccaacgctccgaggacaacccctgtc

SEQ ID NO: 717987 - DNA, 120 bp, Artificial Sequence
  ENSG00000197561_6 (sequence is synthesized)
cccacccccgggacccggacccggccagcaggacccactgagaagggctgcccgggtcacctcagctgcccacacccacactctccagcatctggcacaataaacattctctgttttgta

SEQ ID NO: 717988 - DNA, 120 bp, Artificial Sequence
  ENSG00000197562_0 (sequence is synthesized)
gcgcgggctctctcacgccgcggcctcacccggcggtgcttcggcaggcggccggcgcggggcgcaggcggcgcggccatgggctcgcagggcagtccggtgaagagctacgactacctg

SEQ ID NO: 717989 - DNA, 120 bp, Artificial Sequence
  ENSG00000197562_1 (sequence is synthesized)
cagtccggtgaagagctacgactacctgctcaagttcctgctggtgggcgacagcgacgtgggcaagggcgagatcctggagagcctgcaggacggcgcggcagagtccccgtacgccta

SEQ ID NO: 717990 - DNA, 120 bp, Artificial Sequence
  ENSG00000197562_2 (sequence is synthesized)
cagtaacgggatcgactacaagaccaccaccatcctgctggacggccggcgcgtgaagctggagctctgggacacgtcgggccagggccggttctgcaccatcttcaggtcctactccag

SEQ ID NO: 717991 - DNA, 120 bp, Artificial Sequence
  ENSG00000197562_3 (sequence is synthesized)
gggcgctcaggggatcctcttggtgtatgacatcaccaaccgctggtcctttgacggcatcgaccgctggatcaaggagatcgatgagcatgcacccggagtcccccggatcttggttgg

SEQ ID NO: 717992 - DNA, 120 bp, Artificial Sequence
  ENSG00000197562_4 (sequence is synthesized)
aaaccggctgcacctggccttcaagcggcaggtcccgacggagcaggcccgcgcgtacgcagagaagaactgcatgaccttctttgaggtcagccccctgtgcaacttcaacgtcatcga

SEQ ID NO: 717993 - DNA, 120 bp, Artificial Sequence
  ENSG00000197562_5 (sequence is synthesized)
gtccttcacggagctatcccgcatcgtgctcatgcggcacggcatggagaagatctggaggcccaaccgagtgttcagcctgcaggacctctgctgccgggccatcgtctcctgcacccc

SEQ ID NO: 717994 - DNA, 120 bp, Artificial Sequence
  ENSG00000197562_6 (sequence is synthesized)
cgtgcacctcatcgacaagcttccactgcccgtcaccatcaagagccacctcaagtccttctcgatggccaacggcatgaacgcggtcatgatgcacggccgttcctactccctggccag

SEQ ID NO: 717995 - DNA, 120 bp, Artificial Sequence
  ENSG00000197562_7 (sequence is synthesized)
cggggccgggggcggcggcagcaagggcaacagcctcaagaggtccaagtccatccgtccaccccagagccccccccagaactgctcgcggagtaactgcaagatctcctagcggggatg

SEQ ID NO: 717996 - DNA, 120 bp, Artificial Sequence
  ENSG00000197562_8 (sequence is synthesized)
ggcggggccgcctgtgcagatgccaggagggctcgagctggacactcctggctggacgccaggccagtgccgcctacgtggagactgtccacacagctgcctcagaagcgccgggctttc

SEQ ID NO: 717997 - DNA, 120 bp, Artificial Sequence
  ENSG00000197562_9 (sequence is synthesized)
ctcacacctgagccgggtgcgaggaggagcatgcacggaccaagcgcggcaggcgggaggagggggcgcggctgggctgctggtgcttccgggaatcttggtcggaaacaagccgggcct

SEQ ID NO: 717998 - DNA, 120 bp, Artificial Sequence
  ENSG00000197562_10 (sequence is synthesized)
acatttttaaggggccttcagggaagcctgggtgtggcccggtggtggtgcactggtgacttcatggccacgccagctgcggggacgcacttgggactcctcgagaggggactcgcggcc

SEQ ID NO: 717999 - DNA, 120 bp, Artificial Sequence
  ENSG00000197562_11 (sequence is synthesized)
gcgatggcaaggcatcctgtgaattcatgcgctgcgagtggcggggctgcccagaggccgggggagcagacagggccggtgctccctctggaagcttgggtgaccggggccctggctccc

SEQ ID NO: 718000 - DNA, 120 bp, Artificial Sequence
  ENSG00000197562_12 (sequence is synthesized)
acgggatggagggtgtggtcctgtggtcagagcccaagcagcactcaggagaggggagaaaggaggtgcacctggcagcccacatttttgttgctccccaaatccctccccacgtgggga

SEQ ID NO: 718001 - DNA, 120 bp, Artificial Sequence
  ENSG00000197562_13 (sequence is synthesized)
tgagaaccttcctgctgtgatgtgacaccttcggggacattgaccactcaaaactcagatcatctcgcccaccctggagagtgcagagctatctgtagacttaggaatacttgatgggca

SEQ ID NO: 718002 - DNA, 120 bp, Artificial Sequence
  ENSG00000197562_14 (sequence is synthesized)
gcggtgcagaccccgggcacctgcgtgcagcctcctgttctcggcagcttctgtcgctggccctggggtccccacagctgcagctctcctgtgaggttgcacggcatcagaaccatcctg

SEQ ID NO: 718003 - DNA, 120 bp, Artificial Sequence
  ENSG00000197562_15 (sequence is synthesized)
accttcttagggacgtgcctggaaccacctcgtccacgtccacgtccacctgggggcctcgggaggctaggcccctcctcaaaggcccaccagcccggcgctcatgctgagccccaggca

SEQ ID NO: 718004 - DNA, 120 bp, Artificial Sequence
  ENSG00000197562_16 (sequence is synthesized)
cgcagggccggccacctctctcctgaagccattggccgctcctccacccagtgcttctgcccatgcctgccccagcagcccctctgcacggtcaccatcgcctgggcctgcccacagcac

SEQ ID NO: 718005 - DNA, 120 bp, Artificial Sequence
  ENSG00000197562_17 (sequence is synthesized)
tggtgctcacctctacctcctgtcctcaggccgtgcggcacgacatggccagcacgcagaaggagccctcccgggacccaggaccccccgtggtggactccgcggcacatgcttcccaag

SEQ ID NO: 718006 - DNA, 120 bp, Artificial Sequence
  ENSG00000197562_18 (sequence is synthesized)
gtggtcccacggagggtgttactgggcaccagtggactcgccccatggcccgttcctgggagatgagggccgtggcctgcatgaactaccagatgagtaagggaaccccaggcaggcggc

SEQ ID NO: 718007 - DNA, 120 bp, Artificial Sequence
  ENSG00000197562_19 (sequence is synthesized)
cctgccacagcccccaaagacactggcctcctgctccagcttccctgtcctggccccacctgtcctgttgctgccagcagggcccttgtttgggattatgaacaaacctcacagactttg

SEQ ID NO: 718008 - DNA, 120 bp, Artificial Sequence
  ENSG00000197562_20 (sequence is synthesized)
aggacctggatggtcctgcattcacggcatcaacactacccgcgctgctgttagacactccgccattcctggttctctccgaaccgttctttgtacagtaaatgtaattcagctgtggtc

SEQ ID NO: 718009 - DNA, 120 bp, Artificial Sequence
  ENSG00000197562_21 (sequence is synthesized)
cgcccggggccaccccgccgctccctccgagggttctgcggaagcaggcggcacagcctgcgaggggctttcgtttcccggactcagccgcatcgcctcggctcgggcgcgcctgcatcc

SEQ ID NO: 718010 - DNA, 120 bp, Artificial Sequence
  ENSG00000197562_22 (sequence is synthesized)
ggatttctctgggaggcagccgcagggaagggaatgatcttggtgaacttataatcgaaccaatggttccgggaaagcaggaggcggccggcgcggggcgcaggcggcgcggccatgggc

SEQ ID NO: 718011 - DNA, 120 bp, Artificial Sequence
  ENSG00000197562_23 (sequence is synthesized)
gcatttttaaacttgtttggccctccctaacaccaaccttggcagttcctgggctgcagtaagccgagacttggaaatacattcgccttggagaattcaacttcaaaatgcatacgaagt

SEQ ID NO: 718012 - DNA, 120 bp, Artificial Sequence
  ENSG00000197562_24 (sequence is synthesized)
aggtcagggtggaaataaaggcactgccctttctccaggcacgctggagtccacgccctgcctttgcccaatgccctctgagggagaggccctgtgccttgcacccagcgcgggccacag

SEQ ID NO: 718013 - DNA, 120 bp, Artificial Sequence
  ENSG00000197562_25 (sequence is synthesized)
gcggaggccccattccaggcaagccgtgcccatggagaggctggcctgctaggctgtggggcccgatggcctgacactgtatggaccacgctcctgccctgccctgccccgccctgcccg

SEQ ID NO: 718014 - DNA, 120 bp, Artificial Sequence
  ENSG00000197562_26 (sequence is synthesized)
ggggagctgcttctccacttccgcgtgggtcttggccctgggaggccagtggccgaggctggtctcgcgggcgctcgctccaggagtggcgcgtcccctcagcgccctgtgcttcctcgc

SEQ ID NO: 718015 - DNA, 120 bp, Artificial Sequence
  ENSG00000197562_27 (sequence is synthesized)
cggctctgcaccctgcactgtcccacggcctacgcctgggcatgctggtcactgtgcacacgacagtcgggcgtggagcccagcaagaccaggagctacggggccacccggaagggctgc

SEQ ID NO: 718016 - DNA, 120 bp, Artificial Sequence
  ENSG00000197562_28 (sequence is synthesized)
actgtagggcctgagccctggggtctgcccaccttgacctccgcccaccttgacctcccacggccctcaccccatcatagtccagacaatgagggcgggccctgctgcggctgaggggtg

SEQ ID NO: 718017 - DNA, 120 bp, Artificial Sequence
  ENSG00000197563_0 (sequence is synthesized)
agcagcggccgggcaggtattgggggcgttccggaattgaggggtggttgtagtggtggcttaggaataccctcccggctatcgcttcagtgggtagaggggaccactgcccgagagctt

SEQ ID NO: 718018 - DNA, 120 bp, Artificial Sequence
  ENSG00000197563_1 (sequence is synthesized)
taatggagctgggtcctgccttcgcgctgaggagccctcgttttcgagatcaggcctgaccgggataagctccagagattcaccaacaatagcaaattacacactggcttggaaagtact

SEQ ID NO: 718019 - DNA, 120 bp, Artificial Sequence
  ENSG00000197563_2 (sequence is synthesized)
cccatgttccgtttgatcttggcaatttaatgctgttcttgaagactaattagttacactggatatgctgctgttctttactttgggattgcttatacattttgtgttcttcgcctccat

SEQ ID NO: 718020 - DNA, 120 bp, Artificial Sequence
  ENSG00000197563_3 (sequence is synthesized)
ctttgacatttattttacatctcctttggttcatggaatgactcctcagtttacaccattgcctcctccagcgagaagattagtgttgtttgttgctgatggccttcgagcagatgcact

SEQ ID NO: 718021 - DNA, 120 bp, Artificial Sequence
  ENSG00000197563_4 (sequence is synthesized)
ttacgaattagatgaaaatggaaactctagagcaccgtttattaggaatatcataatgcatgaaggcagctggggcatatctcatacacgtgtgccaacagaatctcggccaggtcatgt

SEQ ID NO: 718022 - DNA, 120 bp, Artificial Sequence
  ENSG00000197563_5 (sequence is synthesized)
agctctgatagctgggttttatgaagatgtcagtgcagttgccaaaggatggaaggaaaatcctgtagagtttgattctctttttaatgaaagtaaatacacatggagctggggaagccc

SEQ ID NO: 718023 - DNA, 120 bp, Artificial Sequence
  ENSG00000197563_6 (sequence is synthesized)
agatatcctgcctatgtttgccaaaggtgctagtggagaccacgtttatacatatagttatgatgctaaaagagaggattttggtgctcaagatgcaacaaaactggatacgtgggtttt

SEQ ID NO: 718024 - DNA, 120 bp, Artificial Sequence
  ENSG00000197563_7 (sequence is synthesized)
tgataatgttaaggacttctttcatcatgccagaaacaaccagtctttgttttctaaaataaatgaagagaaaatagtttttttcttacatttattaggaatagatacaaacggacatgc

SEQ ID NO: 718025 - DNA, 120 bp, Artificial Sequence
  ENSG00000197563_8 (sequence is synthesized)
tcatcgaccatcctcgagagactacaagcacaatattaaaaaagttgatgatggagttaaagaaatcgtgtctatgtttaaccacttctatggaaatgatgggaaaacaacatttatctt

SEQ ID NO: 718026 - DNA, 120 bp, Artificial Sequence
  ENSG00000197563_9 (sequence is synthesized)
tacctctgaccatggaatgacagactggggttcccatggggctggtcatccttcagagactttaactcctttagtcacttggggagctggaatcaagtatccccaaagagtatcagctca

SEQ ID NO: 718027 - DNA, 120 bp, Artificial Sequence
  ENSG00000197563_10 (sequence is synthesized)
gcaatttgatgatgcatttttgaaagagtggagattggagaattggaagaggctagatgtcaatcaggctgatattgcaccattgatgacttcccttattggagttccctttcctcttaa

SEQ ID NO: 718028 - DNA, 120 bp, Artificial Sequence
  ENSG00000197563_11 (sequence is synthesized)
ctcagtgggaatccttcctgtggattatcttaacaacactgatctcttcaaagcagagagcatgtttacaaatgcagtacagattcttgaacagttcaaggtgaaaatgactcagaagaa

SEQ ID NO: 718029 - DNA, 120 bp, Artificial Sequence
  ENSG00000197563_12 (sequence is synthesized)
agaagttactttaccatttttgtttacaccatttaaactgctttctgattccaaacagttcaacattttaagaaaagcaagatcttatataaaacacagaaagtttgatgaagtggtctc

SEQ ID NO: 718030 - DNA, 120 bp, Artificial Sequence
  ENSG00000197563_13 (sequence is synthesized)
cctttgcaaggagctaattcatcttgcattgaaaggattgtcctattatcacacatatgacagattctttttgggcgtcaatgttgttattggttttgtgggatggatatcttatgcctc

SEQ ID NO: 718031 - DNA, 120 bp, Artificial Sequence
  ENSG00000197563_14 (sequence is synthesized)
tttgttgatcatcaagtctcattccaaccttataaaaggtgttagtaaagaagtgaagaaaccaagccatctcctgccttgtagttttgtagctattggcattttagtagcattttttct

SEQ ID NO: 718032 - DNA, 120 bp, Artificial Sequence
  ENSG00000197563_15 (sequence is synthesized)
gctgattcaagcctgtccctggacatattatgtatatggtttgttgccactgccaatatggtatgcggttctaagagaatttcaagttattcaggaccttgttgtatcagtgttgaccta

SEQ ID NO: 718033 - DNA, 120 bp, Artificial Sequence
  ENSG00000197563_16 (sequence is synthesized)
tcctctgagccattttgttgggtacctgttagcctttaccctgggaattgaagtattagttctcagttttttctaccgctatatgcttaccgctggacttactgcctttgcagcttggcc

SEQ ID NO: 718034 - DNA, 120 bp, Artificial Sequence
  ENSG00000197563_17 (sequence is synthesized)
atttctcactcggctgtggactcgagcaaagatgacctcactgagttggactttcttctctttgctcctggcagtgttcccactgatgccggttgtaggtcgaaagccagacatctctct

SEQ ID NO: 718035 - DNA, 120 bp, Artificial Sequence
  ENSG00000197563_18 (sequence is synthesized)
agtgatgggtgcaggcttgctggttcttctgttatccctgtgtgttgtaacatctctcatgaaaagaaaagatagctttataaaggaagagctattggtacatctgttacaggtgctgag

SEQ ID NO: 718036 - DNA, 120 bp, Artificial Sequence
  ENSG00000197563_19 (sequence is synthesized)
ctactcaggaagcaaggactgcctctcatgaatcaaattattagctgggcaacattagcctcttccttggttgtgccactactgagttctccagttctctttcagcgattgttcagcata

SEQ ID NO: 718037 - DNA, 120 bp, Artificial Sequence
  ENSG00000197563_20 (sequence is synthesized)
cttctttcattgatgtcaacctacctacttctaagcacagggtatgaagctctctttccactagtgttgtcttgtttgatgtttgtctggataaacatagaacaagaaactctacaacaa

SEQ ID NO: 718038 - DNA, 120 bp, Artificial Sequence
  ENSG00000197563_21 (sequence is synthesized)
tctggtgtttgctgtaaacaaaagctcaccagtatccagttctcttataatactgatataactcagtttcgacagctatatctggatgacatccgtagggcctttttccttgttttcttc

SEQ ID NO: 718039 - DNA, 120 bp, Artificial Sequence
  ENSG00000197563_22 (sequence is synthesized)
ttagtgacagcattttttggaactggaaatatagcttctattaacagctttgatcttgcctctgtctattgctttctgactgtgttcagtccttttatgatgggagccctgatgatgtgg

SEQ ID NO: 718040 - DNA, 120 bp, Artificial Sequence
  ENSG00000197563_23 (sequence is synthesized)
aagattttaatcccctttgttcttgttatgtgtgcttttgaagcagttcagttgactactcagttatcgtcaaaaagcctttttctcattgttctcgtcatatcagacattatggctttg

SEQ ID NO: 718041 - DNA, 120 bp, Artificial Sequence
  ENSG00000197563_24 (sequence is synthesized)
cattttttcttcttggtcaaggattatggcagctggcttgatattgggacaagcatcagccactatgtgattgtcatgtccatgaccatctttttggtgttcctcaatggcctggcccag

SEQ ID NO: 718042 - DNA, 120 bp, Artificial Sequence
  ENSG00000197563_25 (sequence is synthesized)
ctgctcacaacgaagaaactcagactatgtggcaaacccaaaagtcacttcatgtgaggttgctgaagcaccattcagcatctggatcctgattctccttttaagctaaaatctcatcaa

SEQ ID NO: 718043 - DNA, 120 bp, Artificial Sequence
  ENSG00000197563_26 (sequence is synthesized)
ggcttcaataagaagatggatatggatatatagtatattctactcctgtaaggaaaatggtatttggaattccgaattgacaggttatctggaacaaaggagcttctttttttttctagg

SEQ ID NO: 718044 - DNA, 120 bp, Artificial Sequence
  ENSG00000197563_27 (sequence is synthesized)
ttttgcaggcatgaaatagtgattatatctgtggaaaagcataggaaggcattctcctttttcatttttttcctttggctggcagctcttcccagtgatgttgagagcacctgcagcaat

SEQ ID NO: 718045 - DNA, 120 bp, Artificial Sequence
  ENSG00000197563_28 (sequence is synthesized)
ctggtccccagtcgcacaacttcccacatacccagaggagagcatatgcctgtgggggcagtgctgatggcatccagagtcattgctgtggctgagctggaaggaaatcaccaggtgcca

SEQ ID NO: 718046 - DNA, 120 bp, Artificial Sequence
  ENSG00000197563_29 (sequence is synthesized)
ccgtcaatatttatcagctttcagcactggttttgttagacagtcagggtgtattatttcaagagcttcaataaaaaaagtgtttgcaggtatttgtcatatttctttagtatgcaataa

SEQ ID NO: 718047 - DNA, 120 bp, Artificial Sequence
  ENSG00000197563_30 (sequence is synthesized)
tgctatcttatcctttttagtgctatttctcaggttttctcagtcaaccagctagatgcatgtgatgcatgtctatccttcactttttttttttcatttctggattttcctgggatttct

SEQ ID NO: 718048 - DNA, 120 bp, Artificial Sequence
  ENSG00000197563_31 (sequence is synthesized)
gacaacacaaaagtagaaagtgcttggtatttctgtcttatacataggaaaacatttaaaataaatagtttttaattgtaggctcaacatctgttaccccatagctttttcgtatattgt

SEQ ID NO: 718049 - DNA, 120 bp, Artificial Sequence
  ENSG00000197563_32 (sequence is synthesized)
ttctttccctttgaatttctttttactgtcatctattattttaacaggagttaaaataactcctgttaaactttctgacaatatcataagaattcatattaaaggtgttattctttctgg

SEQ ID NO: 718050 - DNA, 120 bp, Artificial Sequence
  ENSG00000197563_33 (sequence is synthesized)
ttgtgagattctagcacaaaggcctaaaatcatcaaattagatttccatttgtaaacaaattctaatgggcaaaatatcttgagagcagtttttatatggattatccataaaatgacctt

SEQ ID NO: 718051 - DNA, 120 bp, Artificial Sequence
  ENSG00000197563_34 (sequence is synthesized)
tacatatccctgcagagttggccttttgcccgtggtgtgctagtagctttggctgatgctaagctttcctggtatgcgccctatttttaagaagtaattgcttttgaattaagttatagc

SEQ ID NO: 718052 - DNA, 120 bp, Artificial Sequence
  ENSG00000197563_35 (sequence is synthesized)
attactaattcatgttaatgactaggaaaccctctgtaatttacaagatttttcaaattggtggggagtgaataaatacaatttaaaagtcagaaatcagtttggcaaagtgtactttct

SEQ ID NO: 718053 - DNA, 120 bp, Artificial Sequence
  ENSG00000197563_36 (sequence is synthesized)
taatttctatttatgatgaagtatagtcataatttatttgtaatactactttatggtataccagtgaaagaactgtagtataaaaaagaggtattaatgttttatgaaatctcatgcatc

SEQ ID NO: 718054 - DNA, 120 bp, Artificial Sequence
  ENSG00000197563_37 (sequence is synthesized)
agttcatagcataaaatctagctggacaactaagaagctatggtagcaaacagtgatgttgatggaatgagaatcatgaactttcatattacctcaaaggatttttttatcagttttttt

SEQ ID NO: 718055 - DNA, 120 bp, Artificial Sequence
  ENSG00000197563_38 (sequence is synthesized)
cacacatcagaaaaaactgactgtataaacacttatcactgacctttttctatgtgtagttttgccttttatcttttcccaaatttttataaagagaaattaataaatattttattacaa

SEQ ID NO: 718056 - DNA, 120 bp, Artificial Sequence
  ENSG00000197563_39 (sequence is synthesized)
gcggactgacgggagactggcccgagaattatcgcgatagcagcagcggccgggcagaaacagtattatgtctcagtcctgtgcaaagtgagatgagctgtagcctttggagacctataa

SEQ ID NO: 718057 - DNA, 120 bp, Artificial Sequence
  ENSG00000197563_40 (sequence is synthesized)
ttcctcagagttgtaagaacttgcatgtagaggaattcttcccatacaaatctgtggttttctgcttctatttctgcctcctatcctataaccatgaacttgtgtgtttgatcttgtaag

SEQ ID NO: 718058 - DNA, 120 bp, Artificial Sequence
  ENSG00000197563_41 (sequence is synthesized)
tttgtcctttcaggtcagtgtgagtctgtagaataggttgaacttccttctgacagtatcatagagtttgtggagtttgtgttgtgtgcctgcagccacaggctcgccttgctgcaccgt

SEQ ID NO: 718059 - DNA, 120 bp, Artificial Sequence
  ENSG00000197563_42 (sequence is synthesized)
aactggccccttcagactcacatgggaacaagccttttctgttgcagtttcccagatatctttaaatgttttgaaatgtatatttttatgttgcaaaacagaaaaaagaaacgagttagg

SEQ ID NO: 718060 - DNA, 120 bp, Artificial Sequence
  ENSG00000197563_43 (sequence is synthesized)
gaaaaagtatttctatttaaggtatttattttttcattctacctatgccatagatttctgaatcaagacttaggacatttgctgattaacaatgtttaaattaggaattgttataagaat

SEQ ID NO: 718061 - DNA, 120 bp, Artificial Sequence
  ENSG00000197563_44 (sequence is synthesized)
taaaataggcagaacaagttgtgaaaatattgaaccaaaaaaaggccatgctatcatcttagagggcccatgaataaaccttagagggaatcctaaggctttaggaaaccgctgcagctt

SEQ ID NO: 718062 - DNA, 120 bp, Artificial Sequence
  ENSG00000197563_45 (sequence is synthesized)
tgcagcttgtctgtcattttccaatatgttaattattatacttagtgtacagtatttagaatacaaaatgcttttttattttttaggaaaataatgttataaatgattgtatattttcat

SEQ ID NO: 718063 - DNA, 120 bp, Artificial Sequence
  ENSG00000197563_46 (sequence is synthesized)
ctttataattatttattaatgatagagctgaattagaaaagctcttcatccattataatatggtttctcatgaaaaacttattacaaatttcagccaactcagatattaagaacatcagt

SEQ ID NO: 718064 - DNA, 120 bp, Artificial Sequence
  ENSG00000197563_47 (sequence is synthesized)
gtcaatcctcctcccctcctgcgacctttttacacttgttttggtggactaggggctccttttctcctcctttttgacatataactgtgccattaaaaacatgatttctgatgaagctgg

SEQ ID NO: 718065 - DNA, 120 bp, Artificial Sequence
  ENSG00000197563_48 (sequence is synthesized)
cctagagggaatgaaggagattgcgtgggtatggtctctaggacaggcgtagctgttgcagggccaccctgtccttgggagaacctggtgagctcccatattcacactagatgccatcat

SEQ ID NO: 718066 - DNA, 120 bp, Artificial Sequence
  ENSG00000197563_49 (sequence is synthesized)
gtcagggggctgaagagaatggagctaatcaactctgtcatttggagaagacccccttcagaccagttctgagaactccttcttttaagagaccagagataacttgatcatttctcacct

SEQ ID NO: 718067 - DNA, 120 bp, Artificial Sequence
  ENSG00000197563_50 (sequence is synthesized)
tttcgtagttgttcttttttatgttgacattccccttactgtttttaaaatgcttcaaagcattaatgattgttatgctgtgtgctttcagtactatggcaatatctttgtagcattttc

SEQ ID NO: 718068 - DNA, 84 bp, Artificial Sequence
  ENSG00000197563_51 (sequence is synthesized)
tgtgctttcagtactatggcaatatctttgtagcattttcccatttctgtataagcaagacagggtctcactcttgttcaggct

SEQ ID NO: 718069 - DNA, 120 bp, Artificial Sequence
  ENSG00000197563_52 (sequence is synthesized)
tgagtagctgagactacaggcacatgcccccacacctagctaattttaaaatattttttgatggagacagggtttcactatgttttccaggcagcagcatttttttttgactgggatttc

SEQ ID NO: 718070 - DNA, 120 bp, Artificial Sequence
  ENSG00000197563_53 (sequence is synthesized)
ttccaggcagcagcatttttttttgactgggatttctttatgatgctttgttatttaaaaaaaaaatgagaaggaaacattaataatcaaaattatctttaattggcctcacagggctaa

SEQ ID NO: 718071 - DNA, 120 bp, Artificial Sequence
  ENSG00000197563_54 (sequence is synthesized)
aatctagaattattattactcttgggtaaactcatgaaaagtacttaatattcattctataaagaaacaaaaagaacctttgagatgtgtctcttattcatttccttgggtacacttaaa

SEQ ID NO: 718072 - DNA, 120 bp, Artificial Sequence
  ENSG00000197563_55 (sequence is synthesized)
acgggttacagttactgctcaactttctaccttcagaactgcagcatttatttgccacacagcagcatttatcagagattgtcccttagaacattggttccttgtaatacaaataaatgt

SEQ ID NO: 718073 - DNA, 120 bp, Artificial Sequence
  ENSG00000197563_56 (sequence is synthesized)
cataataaaaatagtttcttttttctttctttctttttttttcaagacagactctggctctctcgccaaggctggaatgcagtggcgcaatgtcagctcactgcaagctccgcctccctg

SEQ ID NO: 718074 - DNA, 84 bp, Artificial Sequence
  ENSG00000197563_57 (sequence is synthesized)
catatttttagtactgacaaggtttcaccatgtttgtcaggctcatcttgaactcctgacctcaagcagttcacccgcctcggc

SEQ ID NO: 718075 - DNA, 85 bp, Artificial Sequence
  ENSG00000197563_58 (sequence is synthesized)
tcacccagctgaaaagagtttcttaattaaatatatttgagaaacatctagtcaaaccaccttaaataggtatatttacattagt

SEQ ID NO: 718076 - DNA, 120 bp, Artificial Sequence
  ENSG00000197563_59 (sequence is synthesized)
atctagtcaaaccaccttaaataggtatatttacattagttctaagggaatttaacttgtgatgtacgttgtgaagggaggaagatagcattatgccaaaagtttccactagcttgacag

SEQ ID NO: 718077 - DNA, 120 bp, Artificial Sequence
  ENSG00000197563_60 (sequence is synthesized)
atgccaaaagtttccactagcttgacagcagaccctgtcttagagttttcttcctgattggtaaacataagaaatgtttccaaagccgggcttggtggctcacccctgtaattccagcac

SEQ ID NO: 718078 - DNA, 84 bp, Artificial Sequence
  ENSG00000197563_61 (sequence is synthesized)
aggagcatttgcaatgagccgagatggtgccactctgggcgacaaagtgagactctgcctcaaaaagaaatgtctccatataat

SEQ ID NO: 718079 - DNA, 120 bp, Artificial Sequence
  ENSG00000197563_62 (sequence is synthesized)
aagtgagactctgcctcaaaaagaaatgtctccatataattttgcactaaaaccttaatttgtcatagttttgaaaatagggtgttgtatgttgattgaatttttttccctgagaactgg

SEQ ID NO: 718080 - DNA, 120 bp, Artificial Sequence
  ENSG00000197563_63 (sequence is synthesized)
aataccatttttactttaacccttaatgtgagaaaactttacaatttcctgcaatttttcctgcctctgtatatattacacctgtcatcatttagtctttcatgtgggaaaggccagtgg

SEQ ID NO: 718081 - DNA, 120 bp, Artificial Sequence
  ENSG00000197563_64 (sequence is synthesized)
taccagattgcattcggttcatcatggctcattgtctagccctgctagagtatagactaagccttcataccttatgttttatatcttttacctgaaaaataaatttgcaccaaatttcaa

SEQ ID NO: 718082 - DNA, 83 bp, Artificial Sequence
  ENSG00000197563_65 (sequence is synthesized)
cagacattatggctttgcattttttcttcttggtcaaggattatggcagctggcttgatattgggacaagaaaacttccttca

SEQ ID NO: 718083 - DNA, 88 bp, Artificial Sequence
  ENSG00000197563_66 (sequence is synthesized)
catatcagacattatggctttgcattttttcttcttggtcaaggattatggcagctggcttgatattgggacaatctcaaattcctaa

SEQ ID NO: 718084 - DNA, 120 bp, Artificial Sequence
  ENSG00000197563_67 (sequence is synthesized)
ggttagaagcatgagccactacacctggcctggattgaggattttaatctcaggagctggtaccaattttggagtgtcttctgaggcctcagaaacagaatagagttgaagatttctctg

SEQ ID NO: 718085 - DNA, 120 bp, Artificial Sequence
  ENSG00000197563_68 (sequence is synthesized)
gttgaagatttctctggaggtggagctcaggcagtaatgccagcgatgcagagcagctgcaaatacagatgaagcttcgctcacttccccgccgctcacctcctgctgtgtggcccagtt

SEQ ID NO: 718086 - DNA, 120 bp, Artificial Sequence
  ENSG00000197563_69 (sequence is synthesized)
ttccaaccttataaaaggtgttagtaaagaagtgaaggtacgtttagaaaatgtgaggattcagatgatggtataaaatcactagtactgaatccagtgtaatgagtttataggatgtgc

SEQ ID NO: 718087 - DNA, 120 bp, Artificial Sequence
  ENSG00000197563_70 (sequence is synthesized)
aagtcattgttctaagctaactcttgtttatctttcatttgcttttattgtattggatttttcctcagttatctctgtttcttcagttgagaaaaagatatattgataataatgatccta

SEQ ID NO: 718088 - DNA, 120 bp, Artificial Sequence
  ENSG00000197563_71 (sequence is synthesized)
taacttaagaaagctataaagatagaggtgtaagtaatttaagtgctcctatgttatcaatggtgtcgaccttctgttttattttataactagcattttataagtattccatatctttct

SEQ ID NO: 718089 - DNA, 120 bp, Artificial Sequence
  ENSG00000197563_72 (sequence is synthesized)
gaataaatggtcctcaagttctggctgcattggcagctaaaaactttaatttttatctctccagtcttccaagattgccaaagactcttggattctctacttcctggcagcagctatatc

SEQ ID NO: 718090 - DNA, 120 bp, Artificial Sequence
  ENSG00000197563_73 (sequence is synthesized)
aagaagacatggaaggtgtttctgcccatcacttaatagtggtgttaagtactttaacctccctgaactatagttttctcatgtaattcacattaaaaatttttttgaactatagaaaag

SEQ ID NO: 718091 - DNA, 120 bp, Artificial Sequence
  ENSG00000197563_74 (sequence is synthesized)
aataattttatgtatgtatatatatatattcctgctattcagatattagccattagtactttgtcacatatgttttttaaaaatgtgtttttaagaagttaaaacattagagctaaagcc

SEQ ID NO: 718092 - DNA, 120 bp, Artificial Sequence
  ENSG00000197563_75 (sequence is synthesized)
gtttatcagaatagttaaaaacaaatagtggcatcaccaaatgctgttgaggatgtaaggaaattgctctcatgcattgctagtggaaatgtaacatggtacaaccactctgaaaagagt

SEQ ID NO: 718093 - DNA, 120 bp, Artificial Sequence
  ENSG00000197563_76 (sequence is synthesized)
tttacagtttcttatgaaactaaacatgctactgttgtatgacctagcaattgcactcttgatgtattttcctagagaaatgaaaggtttacacaaaaaattagacacaaatgtttataa

SEQ ID NO: 718094 - DNA, 120 bp, Artificial Sequence
  ENSG00000197563_77 (sequence is synthesized)
aagctttatttgtaagagccacaaactggaacaatagccacaagtagaaacaacccttgatgtcctttggtgcttgaatggttaagtaaaccattgtatatccatatgatggagtactat

SEQ ID NO: 718095 - DNA, 120 bp, Artificial Sequence
  ENSG00000197563_78 (sequence is synthesized)
tcagccataaaagtaaatgacccattgatacagcaccttggatgattcttgagaaaattatgctaagtgagaaaagccaatcccagaaggttacaaaaggtaacaaagtgttatataaat

SEQ ID NO: 718096 - DNA, 120 bp, Artificial Sequence
  ENSG00000197563_79 (sequence is synthesized)
tgttcaacttgttatgtatgtgattctactcataaaacactcttaaaatgacaaaattatagaaatgggggacagattagtggctctcaggggtgagggattaggcagagggatggtgag

SEQ ID NO: 718097 - DNA, 120 bp, Artificial Sequence
  ENSG00000197563_80 (sequence is synthesized)
gggaggacagatgtggctataaaatggcatcatgagagatctttgtgctgatgggaacactctttaccttgacagtatcagtgtcattgtcctgcttgggatattatactatggttttac

SEQ ID NO: 718098 - DNA, 120 bp, Artificial Sequence
  ENSG00000197563_81 (sequence is synthesized)
gggtaaagggtacagaggatccctctgtattatttcttgaaattgcatattagttaacaattacctcaaaagtttagttttgaaaatcataatgtatgtccctttcattttactgaaata

SEQ ID NO: 718099 - DNA, 120 bp, Artificial Sequence
  ENSG00000197563_82 (sequence is synthesized)
aatattcagagcacttaataacacattttacagtccagctcatctctatggtatggtcacccatgataatatgaaaagaacctttgaaagttgtattttcagaagcaaaaataccaacaa

SEQ ID NO: 718100 - DNA, 120 bp, Artificial Sequence
  ENSG00000197563_83 (sequence is synthesized)
tactaggttatttgcctagtctcacttggattttaatgagcttgaaaaatgcacctgttgtattagatgtaatttttccttctttttttttccagcctttttctcattgttctcgtcata

SEQ ID NO: 718101 - DNA, 120 bp, Artificial Sequence
  ENSG00000197563_84 (sequence is synthesized)
catcctttccttccatgatgtgattcttcaggccaagaagaaaaagatgtgtctgtagctaaaattacctcatccttggtgtttttcagcctaggatcactatatgtagctaatgccgtt

SEQ ID NO: 718102 - DNA, 120 bp, Artificial Sequence
  ENSG00000197563_85 (sequence is synthesized)
acattacaactaagacaagttccaatacttttttttttctcctcgatctgcagagattcaccaacaatagcaaattacacactggcttggaaagtactcccatgttccgtttgatcttgg

SEQ ID NO: 718103 - DNA, 120 bp, Artificial Sequence
  ENSG00000197563_86 (sequence is synthesized)
tgggacaaggcacttcactgggcctgactgcagaagcactgcctggaggtgtaggaaacatctcacaaaaatggagctgaaggccatggtctcggatgaaagaggacagagctcaaaata

SEQ ID NO: 718104 - DNA, 120 bp, Artificial Sequence
  ENSG00000197563_87 (sequence is synthesized)
ggaatgttctcttggaggaaactctgctctttgctacaaggtggctgccgtcatcctactatcatatgcagattcggtaacatccagcagcagaagagaagctgccgctttgcgcatctc

SEQ ID NO: 718105 - DNA, 120 bp, Artificial Sequence
  ENSG00000197563_88 (sequence is synthesized)
tttttgatagtgaggaatgctttttctagaagccttccagccgacttcctctcatctctcattgtccaatactggtcacatcccgatccttaaaccaatcatgagcacaagaaatgggac

SEQ ID NO: 718106 - DNA, 120 bp, Artificial Sequence
  ENSG00000197563_89 (sequence is synthesized)
gtttgcaatttttcactgagtgataggattagtttacttatacagtttgccattttatatacattagtgtaaactccaaattgaaatcctcttctattgctgttgttaaataatgagcca

SEQ ID NO: 718107 - DNA, 120 bp, Artificial Sequence
  ENSG00000197563_90 (sequence is synthesized)
ggtgctagataactttgaatggctggaagagggatgagggaatggagagatacatgagaaatattaagcaggtgaactccacagggcttgactggttggctaggaaggtgtgggggcagg

SEQ ID NO: 718108 - DNA, 120 bp, Artificial Sequence
  ENSG00000197563_91 (sequence is synthesized)
aacgagtgtgacttcctggcacttggcttggttgattaggaagatgctggtaccatatggctttttgaaagaagaactagttcaggagacaaagatgaatgttactaagttcaacttaca

SEQ ID NO: 718109 - DNA, 120 bp, Artificial Sequence
  ENSG00000197563_92 (sequence is synthesized)
tttgaagatatcagttaattaattagaaagaggggcttgggtctcagaagatgtatgttgcttgtgaagattttgaagccgtgagaataaagataggctgggcgcagtggctcattcctg

SEQ ID NO: 718110 - DNA, 80 bp, Artificial Sequence
  ENSG00000197563_93 (sequence is synthesized)
acacatgtaggaggctctagaattctgggagacatcagcttctactgggtgggtgtattagggttctctagagggacaga

SEQ ID NO: 718111 - DNA, 85 bp, Artificial Sequence
  ENSG00000197563_94 (sequence is synthesized)
gatgtatatgaatcacaaggtgacgtcccagaatagaccgtctgcaatatgaggagtaaagaagccagtctgagtcccaaaacct

SEQ ID NO: 718112 - DNA, 120 bp, Artificial Sequence
  ENSG00000197563_95 (sequence is synthesized)
gtctgtggccaaaggcccgagagcccctagcaaaccactggtgtaagtccaagagtctaaaagctgaagaattcggagtctgatgttcaagtgcaagcagcatccagcgcaggagaaata

SEQ ID NO: 718113 - DNA, 84 bp, Artificial Sequence
  ENSG00000197563_96 (sequence is synthesized)
tcggagtctgatgttcaagtgcaagcagcatccagcgcaggagaaatatgaggctggaaaactcagcaagtctgctcattccac

SEQ ID NO: 718114 - DNA, 120 bp, Artificial Sequence
  ENSG00000197563_97 (sequence is synthesized)
ggtgggtctgcttctcccactccactgactcaaaggttaatctcctttggcaacaatgtcacagacatacccaggaacaatactttacatccttcaatcaagttgacactcaatattaac

SEQ ID NO: 718115 - DNA, 120 bp, Artificial Sequence
  ENSG00000197563_98 (sequence is synthesized)
gaagagagctgactttggtgagcagcagattttgctgtcccaggtccaggaagatgtgttttccttgcatcaggaaagggaagatctagatcacagacctggctctgcactactgactgc

SEQ ID NO: 718116 - DNA, 120 bp, Artificial Sequence
  ENSG00000197563_99 (sequence is synthesized)
atatgtgggcttgcatctttgaggttcacattcaattagcaaggattttgctattgaccaattaaatagaaattgttttatctatgaatcttaaggatgtgattgaatgacttcattgga

SEQ ID NO: 718117 - DNA, 120 bp, Artificial Sequence
  ENSG00000197563_100 (sequence is synthesized)
tgaatcttaaggatgtgattgaatgacttcattggagttatttttgacaacttctgttgcactagtgtgatattcataaattagaaaggcggccgggcacggtggctcactcctataatc

SEQ ID NO: 718118 - DNA, 120 bp, Artificial Sequence
  ENSG00000197563_101 (sequence is synthesized)
acattaccctctgaatactgtggttgtatacttgagtttttatgtgtgtatatatatgtgtataggagagtaaaaataaaatgaaattaggattttgcaagttataatcatataaaattg

SEQ ID NO: 718119 - DNA, 120 bp, Artificial Sequence
  ENSG00000197563_102 (sequence is synthesized)
attaccctaaatatatcattaggatattatgttatttacatctcttatgctaattctaattttcttttattgtagtatagtagaattgagatttgttaatggaattggttctgaggaata

SEQ ID NO: 718120 - DNA, 120 bp, Artificial Sequence
  ENSG00000197563_103 (sequence is synthesized)
tataaatgttcatatgtttttcaagaaatattgattgactagtatgtgttttgcggatatagcagtgaacaggatagacaaaggctttgcattcatagagtttatttgtacagtagtgtc

SEQ ID NO: 718121 - DNA, 120 bp, Artificial Sequence
  ENSG00000197563_104 (sequence is synthesized)
acaggcaaactataaccaaatgaagaagtgaataaggaatacattatcaattccttttatgaagaaaatacaccggctgttgagagtgagaataagtgagggttactttagaccagccac

SEQ ID NO: 718122 - DNA, 120 bp, Artificial Sequence
  ENSG00000197563_105 (sequence is synthesized)
ccactttagaaaggctggttaggagcctggccagtgtggtgaaaccctgtctctaccaaaaaatataaaaatgagccaggcatggtggcacctgcttgtaatcccagctactcgggaggc

SEQ ID NO: 718123 - DNA, 69 bp, Artificial Sequence
  ENSG00000197563_106 (sequence is synthesized)
tcaacaatgaaatatcattacacacttaccagaacagtttatcagaatagttaaaaacaaatagtggca

SEQ ID NO: 718124 - DNA, 120 bp, Artificial Sequence
  ENSG00000197563_107 (sequence is synthesized)
tctaaaaaattacacattctaaataaataagagaagttttaaactcctttgtttctattagtaaaatgagccctagattaggatttaggaaacctgtttttcgtttctagtttgtgattc

SEQ ID NO: 718125 - DNA, 120 bp, Artificial Sequence
  ENSG00000197563_108 (sequence is synthesized)
atcctgggtaaattttgatctttcattgaccatggaatcagactcttgtagtaatggaccatatgagatgtaggaaagcctttgggaaaatgctgttcaaatgtaatacatttataataa

SEQ ID NO: 718126 - DNA, 120 bp, Artificial Sequence
  ENSG00000197563_109 (sequence is synthesized)
caaagtggatgattttttaaaaaatactttaaagaaaaattagataagcagattatataggcaaaaacaaattagcaaattgatcataataaaaatctatggttcctttaagtactagtt

SEQ ID NO: 718127 - DNA, 120 bp, Artificial Sequence
  ENSG00000197563_110 (sequence is synthesized)
ttttgaacattttataatgacaattatcatagtttcatgaggaatacgatataatttatattctcaaaaagtgtgtgaaaatctcaattgtggacattggctctcttcttttaccagtgc

SEQ ID NO: 718128 - DNA, 120 bp, Artificial Sequence
  ENSG00000197563_111 (sequence is synthesized)
attattcctcatctccaaataacaactcataattcatccattataagaagctttgattgatacttcttttttctagtaatgtcttttgaactgactttgtggacttctccatgatatagc

SEQ ID NO: 718129 - DNA, 120 bp, Artificial Sequence
  ENSG00000197563_112 (sequence is synthesized)
catttttgtttgtttgtaaatgtactccttagtatatatctgcctttttctttgtatttgcttagcagaaattaagtgctctaaaattcattgctaaaccctatttttttccaagggttt

SEQ ID NO: 718130 - DNA, 120 bp, Artificial Sequence
  ENSG00000197563_113 (sequence is synthesized)
ttcccttgaaattttctttttacttttaatatatacttttgtcaacagggaaaactttcaacttaaataaaatctgtgtaagaaaatgattagcaaattattttgctaatcatcacttct

SEQ ID NO: 718131 - DNA, 120 bp, Artificial Sequence
  ENSG00000197563_114 (sequence is synthesized)
taacttaatgtgctaatattaatatctgcatgaaatcctttggcttctaatttcatatgtgtagctaaaatccctccaaaatcatggaattgattccttgtgaatgtacatacatagctg

SEQ ID NO: 718132 - DNA, 120 bp, Artificial Sequence
  ENSG00000197563_115 (sequence is synthesized)
ggttatttatgtacatatctgcctctcccaatagactgtggatgctctcagatccaggattggatttgaatctcttacatgccatacgtgcttgcatcagccactatgtgattgtcatgt

SEQ ID NO: 718133 - DNA, 120 bp, Artificial Sequence
  ENSG00000197563_116 (sequence is synthesized)
tctattttcaatacacttttttttcctcaattaacactgtaaaatttgaacctaatcttggtcaagaatataaaatcatgtgaactaacgggaatttaaaataccaatatcaaaccatta

SEQ ID NO: 718134 - DNA, 120 bp, Artificial Sequence
  ENSG00000197563_117 (sequence is synthesized)
gtcatgattttggcctaggttctaagagtcattaaacctcctagtaggtgctttcgggctttcataatgaaattgtgccactgataacttaaaatcccgcccatttttttttgtttaagt

SEQ ID NO: 718135 - DNA, 120 bp, Artificial Sequence
  ENSG00000197563_118 (sequence is synthesized)
ctagaaggttttctttcttttatgcttggaggaatcagtaaaagttttagtttcatgtgaaaaaacattctgttgccaaaacaaaaatgtctcaaagctactgtgttagccctctttgct

SEQ ID NO: 718136 - DNA, 120 bp, Artificial Sequence
  ENSG00000197563_119 (sequence is synthesized)
ttaatcatgtccacactaaaatgtcatgtaaaaattaaattttctgctattctaaattgaatgtaaagatctccatgggaggaaactctattcaccttgccagctttcccatgtttaacc

SEQ ID NO: 718137 - DNA, 120 bp, Artificial Sequence
  ENSG00000197563_120 (sequence is synthesized)
actggtcagaaaactacttcaaaacaatatgtttaattttatttgatattaaaagtttgggagctagagaacaataaaattatttgctcataatgtttcttcttaaatgatgtatacatt

SEQ ID NO: 718138 - DNA, 120 bp, Artificial Sequence
  ENSG00000197563_121 (sequence is synthesized)
ttttaattacttaccttcttttaactttttgaagtttctcaaaatgcagatttctagacctctccaagtattcttattttaagaatttgttcctactttactatgctttcagtgaaaaaa

SEQ ID NO: 718139 - DNA, 120 bp, Artificial Sequence
  ENSG00000197563_122 (sequence is synthesized)
ggggattcctgctttgcattcttcttaggatgggtgcaggcttgctggttcttctgttatccctgtgtgttgtaacatctctcatgaaaagaaaagatagctttataaaggaagagctat

SEQ ID NO: 718140 - DNA, 120 bp, Artificial Sequence
  ENSG00000197563_123 (sequence is synthesized)
tatgctcctcaaataatagatttttttccttgtcttaatgcagctctttgattaatcatctagtagtataaccattgaaagaaagtaataggttttctttactttataaaatctctttta

SEQ ID NO: 718141 - DNA, 84 bp, Artificial Sequence
  ENSG00000197563_124 (sequence is synthesized)
ttctggcatcagccactatgtgattgtcatgtccatgaccatctttttggtgttcctcaatggcctggcccagctgctcacaac

SEQ ID NO: 718142 - DNA, 120 bp, Artificial Sequence
  ENSG00000197563_125 (sequence is synthesized)
agcaaattcatgctgctgcattcagctggtagatgctaggaatgggctcacctggaatttgaaaaattcctttccttcttaagttttgacttaagttttttgcttttgattccttctgta

SEQ ID NO: 718143 - DNA, 120 bp, Artificial Sequence
  ENSG00000197563_126 (sequence is synthesized)
ggttaatatacaaaaagcatatttttacctgaagtattggagactgtatcccacgttttttctgttttcatgagctttgaaagttctatgttgtagcacactgttctgaattctaagatt

SEQ ID NO: 718144 - DNA, 120 bp, Artificial Sequence
  ENSG00000197563_127 (sequence is synthesized)
tcatttgtctcttatacttgaaagtttagggaaagtttagatatccccttctgcttcccagccctctcattctaaagtgtccaggcggatagtggccagagcatgggctttaaaccagag

SEQ ID NO: 718145 - DNA, 120 bp, Artificial Sequence
  ENSG00000197563_128 (sequence is synthesized)
cgcctgggtttgaatctcatttctgccacttttgagctgtgaaacctttgctaagtgacttaatctctctaagccccccgtttctcttgtagtcattttgaatgaattaatttatataaa

SEQ ID NO: 718146 - DNA, 120 bp, Artificial Sequence
  ENSG00000197563_129 (sequence is synthesized)
gcatttaagtatttagcatagtgcctggcatctaataagcttcagtgaatgtcagcaattgttactgttgtcattctgtaattctgtttttttgtcctttatagtgcttcttgcatttgg

SEQ ID NO: 718147 - DNA, 120 bp, Artificial Sequence
  ENSG00000197563_130 (sequence is synthesized)
catacctttctttaccatttgattattttcattttagacattggtcagaattttgtttcaaaaatattctggtaaaatacagtattttgtttatgagactttttcttttatttttaattg

SEQ ID NO: 718148 - DNA, 120 bp, Artificial Sequence
  ENSG00000197563_131 (sequence is synthesized)
tggtaaactacacataatgaaatttgtcatcataacaatttttaagtgtacagttcaatggtattaagtatacattcacatggttgtgcaactattaccacacaccatctgtctccagaa

SEQ ID NO: 718149 - DNA, 120 bp, Artificial Sequence
  ENSG00000197563_132 (sequence is synthesized)
ctctttccatcttgagaaacaaactctgaatgcattaatcagtcacaccccattctcccgctcatcagcccctggcaaccaccattctacctttgtttctatgaatttgatgactctggg

SEQ ID NO: 718150 - DNA, 120 bp, Artificial Sequence
  ENSG00000197563_133 (sequence is synthesized)
tatctcatataaatgaaatcatacagtatttgtctttcttgcaactgacttatttcacttggtgtaatatcgtcaaggttcatgtatattgtagcatgtgtcagaattttgttcctttta

SEQ ID NO: 718151 - DNA, 120 bp, Artificial Sequence
  ENSG00000197563_134 (sequence is synthesized)
aaggctgaatgatagttcattgtacgtatatatgcatatgccatattgttcacctgttcatctgtcaatggatactagagttgtttccacctttgtttattgtaaataatgctgctgtga

SEQ ID NO: 718152 - DNA, 120 bp, Artificial Sequence
  ENSG00000197563_135 (sequence is synthesized)
tttgcattttttcttcttggtcaaggattatggcagctggcttgatattgggacaaggtatagtatatatggtcatgcattgcttaacaacagggataagttctgagaaatatattgtta

SEQ ID NO: 718153 - DNA, 120 bp, Artificial Sequence
  ENSG00000197563_136 (sequence is synthesized)
ggcaatttcttcactgtgcaaacatcacagagtatattcacacaaacctagatggtgtagcctacaacacacctaggatatggtacagcctattgctcctagactataaacctgtacagc

SEQ ID NO: 718154 - DNA, 120 bp, Artificial Sequence
  ENSG00000197563_137 (sequence is synthesized)
atgttatcatactgaatactgtaggcaattgtaacccaatggtaagtatttatgtatctacacatagaaaaggtatagtaaaaaattcagtgtaaaagattttttaactggtatacctat

SEQ ID NO: 718155 - DNA, 120 bp, Artificial Sequence
  ENSG00000197565_0 (sequence is synthesized)
tccctgggctgctggtcttctttaccttccagctgctcacagaacagagagtttctacatacaagcagaagatgtgaaaatattgggaataaataaagtatatgcttataaacaagttgt

SEQ ID NO: 718156 - DNA, 120 bp, Artificial Sequence
  ENSG00000197565_1 (sequence is synthesized)
ggctgctcctggttacgttgtgcctgaccgaggaactggcagcagcgggagagaagtcttatggaaagccatgtgggggccaggactgcagtgggagctgtcagtgttttcctgagaaag

SEQ ID NO: 718157 - DNA, 120 bp, Artificial Sequence
  ENSG00000197565_2 (sequence is synthesized)
gagcgagaggacgacctggaccaattggaattcaaggcccaacaggtcctcaaggattcactggctctactggtttatcgggattgaaaggagaaaggggtttcccaggccttctgggac

SEQ ID NO: 718158 - DNA, 120 bp, Artificial Sequence
  ENSG00000197565_3 (sequence is synthesized)
cttatggaccaaaaggagataagggtcccatgggagttcctggctttcttggcatcaatgggattccgggccaccctggacaaccaggccccagaggcccacctggtctggatggctgta

SEQ ID NO: 718159 - DNA, 120 bp, Artificial Sequence
  ENSG00000197565_4 (sequence is synthesized)
atggaactcaaggagctgttggatttccaggccctgatggctatcctgggcttctcggaccacccgggcttcctggtcagaaaggatcaaaaggtgaccctgtccttgctccaggtagtt

SEQ ID NO: 718160 - DNA, 120 bp, Artificial Sequence
  ENSG00000197565_5 (sequence is synthesized)
tcaaaggaatgaagggggatcctgggctgcctggactggatggaatcactggcccacaaggagcacccggatttcctggagctgtaggacctgcaggaccaccaggattacaaggtcctc

SEQ ID NO: 718161 - DNA, 120 bp, Artificial Sequence
  ENSG00000197565_6 (sequence is synthesized)
cagggcctcctggtcctcttggtcctgatgggaatatggggctaggttttcaaggagagaaaggagtcaagggggatgttggcctccctggcccagcaggacctccaccatctactggag

SEQ ID NO: 718162 - DNA, 120 bp, Artificial Sequence
  ENSG00000197565_7 (sequence is synthesized)
agctggaattcatgggattccccaaagggaagaaaggatccaagggtgaaccagggcctaagggttttccaggcataagtggccctccaggcttcccgggccttggaactactggagaaa

SEQ ID NO: 718163 - DNA, 120 bp, Artificial Sequence
  ENSG00000197565_8 (sequence is synthesized)
agggagaaaagggagaaaagggaatccctggtttgccaggacctaggggtcccatgggttcagaaggagtccaaggccctccagggcaacagggcaagaaagggaccctgggatttcctg

SEQ ID NO: 718164 - DNA, 120 bp, Artificial Sequence
  ENSG00000197565_9 (sequence is synthesized)
ggcttaatggattccaaggaattgagggtcaaaagggtgacattggcctgccaggcccagatgttttcatcgatatagatggtgctgtgatctcaggtaatcctggagatcctggtgtac

SEQ ID NO: 718165 - DNA, 120 bp, Artificial Sequence
  ENSG00000197565_10 (sequence is synthesized)
ctggcctcccaggccttaaaggagatgaaggcatccaaggcctacgtggcccttctggtgtccctggattgccagcattatcaggtgtcccaggagccctagggcctcagggatttccag

SEQ ID NO: 718166 - DNA, 120 bp, Artificial Sequence
  ENSG00000197565_11 (sequence is synthesized)
ggctgaagggggaccaaggaaacccaggccgtaccacaattggagcagctggcctccctggcagagatggtttgccaggcccaccaggtccaccaggcccacctagtccagaatttgaga

SEQ ID NO: 718167 - DNA, 120 bp, Artificial Sequence
  ENSG00000197565_12 (sequence is synthesized)
ctgaaactctacacaacaaagagtcagggttccctggtctccgaggagaacaaggtccaaaaggaaacctaggcctcaaaggaataaaaggagactcaggtttctgtgcttgtgacggtg

SEQ ID NO: 718168 - DNA, 120 bp, Artificial Sequence
  ENSG00000197565_13 (sequence is synthesized)
gtgttcccaacactggaccacccggggaaccaggcccacctggtccatggggtctcataggccttccaggccttaaaggagccagaggagatcgaggctctgggggtgcacagggcccag

SEQ ID NO: 718169 - DNA, 120 bp, Artificial Sequence
  ENSG00000197565_14 (sequence is synthesized)
caggggctccaggcttagttgggcctctgggtccttcaggacccaaaggaaagaagggggaaccaattctcagtacaatccaaggaatgccaggagatcggggtgattctggctcccagg

SEQ ID NO: 718170 - DNA, 120 bp, Artificial Sequence
  ENSG00000197565_15 (sequence is synthesized)
gcttccgtggtgtaataggagaaccaggcaaggacggagtaccaggtttaccaggtctgccaggccttccgggtgatggtggacagggcttcccaggtgaaaaggggttacctggacttc

SEQ ID NO: 718171 - DNA, 120 bp, Artificial Sequence
  ENSG00000197565_16 (sequence is synthesized)
ctggtgaaaaaggccatcctggtccacctggcctcccaggaaatgggttaccaggacttcctggaccccgtgggcttcctggagataaaggcaaggatggattaccgggacaacaaggcc

SEQ ID NO: 718172 - DNA, 120 bp, Artificial Sequence
  ENSG00000197565_17 (sequence is synthesized)
ttcccggatctaagggaatcaccctgccctgtattattcctgggtcatacggtccatcaggatttccaggcactcccggattcccaggccctaaagggtctcgaggcctccctgggaccc

SEQ ID NO: 718173 - DNA, 120 bp, Artificial Sequence
  ENSG00000197565_18 (sequence is synthesized)
caggccagcctgggtcaagtggaagtaaaggagagccagggagtccaggattggttcatcttcctgaattaccaggatttcctggacctcgtggggagaagggcttgcctgggtttcctg

SEQ ID NO: 718174 - DNA, 120 bp, Artificial Sequence
  ENSG00000197565_19 (sequence is synthesized)
ggctccctggaaaagatggcttgcctgggatgattggcagtccaggcttacctggttccaagggagccactggtgacatctttggtgctgaaaatggtgctccgggggaacaaggcctac

SEQ ID NO: 718175 - DNA, 120 bp, Artificial Sequence
  ENSG00000197565_20 (sequence is synthesized)
aaggattaacagggcacaaaggatttcttggagactctggccttccaggactcaagggtgtgcacgggaagcctggcttactaggccccaaaggtgagcggggcagccctgggacaccag

SEQ ID NO: 718176 - DNA, 120 bp, Artificial Sequence
  ENSG00000197565_21 (sequence is synthesized)
gacaggtgggacagccaggcaccccaggatctagtggtccatatggcatcaagggcaaatctgggctcccaggagcaccaggcttcccaggcatctcaggacatcctggaaagaaaggaa

SEQ ID NO: 718177 - DNA, 120 bp, Artificial Sequence
  ENSG00000197565_22 (sequence is synthesized)
caagaggcaagaaaggtcctcctggatcaattgtaaagaaagggctgccagggctaaaaggccttcctggaaatccaggcctagtaggactgaaaggaagcccaggctctccaggggtcg

SEQ ID NO: 718178 - DNA, 120 bp, Artificial Sequence
  ENSG00000197565_23 (sequence is synthesized)
ctgggttgccagccctctctggacccaagggagagaaggggtctgttggattcgtaggttttccaggaataccaggtctgcctggtattcctggaacaagaggattaaaaggaattccag

SEQ ID NO: 718179 - DNA, 120 bp, Artificial Sequence
  ENSG00000197565_24 (sequence is synthesized)
gatcaactggaaaaatgggaccatctggacgtgctggtactcctggtgaaaagggagacagaggcaatccggggccagtcggaatacctagtccaagacgtccaatgtcaaacctttggc

SEQ ID NO: 718180 - DNA, 120 bp, Artificial Sequence
  ENSG00000197565_25 (sequence is synthesized)
tcaaaggagacaaaggctctcaaggctcagccggatccaatggatttcctgggccaagaggtgacaaaggagaggctggtcgacctggaccaccaggcctacctggagctcctggcctcc

SEQ ID NO: 718181 - DNA, 120 bp, Artificial Sequence
  ENSG00000197565_26 (sequence is synthesized)
caggcattatcaaaggagttagtggaaagccagggccccctggcttcatgggaatccggggcttacctggcctgaaggggtcctctgggatcacaggtttcccaggaatgccaggagaaa

SEQ ID NO: 718182 - DNA, 120 bp, Artificial Sequence
  ENSG00000197565_27 (sequence is synthesized)
tttccggtagcccaggacccaagggacagcctggcgaatctggttttaaaggcacaaaaggaagagatggactaataggcaatataggcttccctggaaacaaaggtgaagatggaaaag

SEQ ID NO: 718183 - DNA, 120 bp, Artificial Sequence
  ENSG00000197565_28 (sequence is synthesized)
ttggtgtttctggagatgttggccttcctggagctccaggatttccaggagttgccggcatgagaggagaaccaggacttccaggttcttctggtcaccaaggggcaattgggcctctag

SEQ ID NO: 718184 - DNA, 120 bp, Artificial Sequence
  ENSG00000197565_29 (sequence is synthesized)
gatcccccggattaataggacccaaaggcttccctggatttcctggtttacatggactgaatgggcttccgggcaccaagggtacccatggcactccaggacctagtatcaccggtgtgc

SEQ ID NO: 718185 - DNA, 120 bp, Artificial Sequence
  ENSG00000197565_30 (sequence is synthesized)
ctgggcctgctggtctccctggacccaaaggagaaaaaggatatccaggaattggcatcggagctccagggaagccgggcctgagagggcaaaaaggtgatcgaggtttcccaggtctcc

SEQ ID NO: 718186 - DNA, 120 bp, Artificial Sequence
  ENSG00000197565_31 (sequence is synthesized)
agggccctgctggtctccccggtgccccaggcatctccttgccctcactcatagcaggacagcctggtgaccccgggcgaccaggcctagatggagaacgaggccgcccaggccccgctg

SEQ ID NO: 718187 - DNA, 120 bp, Artificial Sequence
  ENSG00000197565_32 (sequence is synthesized)
gacccccaggtccccctgggccatcctcgaatcaaggcgacaccggagaccctggcttccctggaattcctggacctaaagggcctaagggagaccaaggaattccaggtttttctggcc

SEQ ID NO: 718188 - DNA, 120 bp, Artificial Sequence
  ENSG00000197565_33 (sequence is synthesized)
tccctggagagctaggactgaaaggcatgagaggtgagcctggcttcatggggactccaggcaaggttgggccacctggagacccaggatttcccggaatgaaggggaaggcagggccaa

SEQ ID NO: 718189 - DNA, 120 bp, Artificial Sequence
  ENSG00000197565_34 (sequence is synthesized)
gaggctcttctggcctccaaggtgatcctggacaaacaccaactgcagaagctgtccaggttcctcctggacccttgggtctaccagggatcgatggcatccctggcctcactggggacc

SEQ ID NO: 718190 - DNA, 120 bp, Artificial Sequence
  ENSG00000197565_35 (sequence is synthesized)
ctggggctcaaggccctgtaggcctacaaggctccaaaggtttacctggcatccccggtaaagatggccccagtgggctcccaggcccacctggggctcttggtgatcctggtctgcctg

SEQ ID NO: 718191 - DNA, 120 bp, Artificial Sequence
  ENSG00000197565_36 (sequence is synthesized)
gactgcaaggccctccaggatttgaaggagctccagggcagcaaggccccttcgggatgcctggaatgcctggccagagcatgagagtgggctacacgttggtaaagcacagccagtcgg

SEQ ID NO: 718192 - DNA, 120 bp, Artificial Sequence
  ENSG00000197565_37 (sequence is synthesized)
aacaggtgcccccgtgtcccatcgggatgagccagctgtgggtggggtacagcttactgtttgtggaggggcaagagaaagcccacaaccaggacctgggctttgctggctcctgtctgc

SEQ ID NO: 718193 - DNA, 120 bp, Artificial Sequence
  ENSG00000197565_38 (sequence is synthesized)
cccgcttcagcaccatgcccttcatctactgcaacatcaacgaggtgtgccactatgccaggcgcaatgataaatcttactggctctccactaccgcccctatccccatgatgcccgtca

SEQ ID NO: 718194 - DNA, 120 bp, Artificial Sequence
  ENSG00000197565_39 (sequence is synthesized)
gccagacccagattccccagtacatcagccgctgctctgtgtgtgaggcaccctcgcaagccattgctgtgcacagccaggacatcaccatcccgcagtgccccctgggctggcgcagcc

SEQ ID NO: 718195 - DNA, 120 bp, Artificial Sequence
  ENSG00000197565_40 (sequence is synthesized)
tctggattgggtactctttcctcatgcacactgccgctggtgccgagggtggaggccagtccctggtctcacctggctcctgcctagaggactttcgggccactcctttcatcgaatgca

SEQ ID NO: 718196 - DNA, 120 bp, Artificial Sequence
  ENSG00000197565_41 (sequence is synthesized)
gtggtgcccgaggcacctgccactactttgcaaacaagtacagtttctggttgaccacagtggaggagaggcagcagtttggggagttgcctgtgtctgaaacgctgaaagctgggcagc

SEQ ID NO: 718197 - DNA, 120 bp, Artificial Sequence
  ENSG00000197565_42 (sequence is synthesized)
tccacactcgagtcagtcgctgccaggtgtgtatgaaaagcctgtagggtggcacctgccactctgccccttgccctcccctgcccctcacaacagtcacctcacaaacctgaatggtct

SEQ ID NO: 718198 - DNA, 120 bp, Artificial Sequence
  ENSG00000197565_43 (sequence is synthesized)
gaagaaggaaggcctgagcccctttgcctgtcaagttgtacattggagtctcatttgggctagactaccggacactcgtcaccccagccctcgggtccatagagatgagcccaccctgct

SEQ ID NO: 718199 - DNA, 120 bp, Artificial Sequence
  ENSG00000197565_44 (sequence is synthesized)
gagatctgctgtcctgtttctgtcaagctggtgctactgtttgatttggatgattgtgtgactattcatggctacctcagaaagatttgatgggccacaactgtcttagactgctagctt

SEQ ID NO: 718200 - DNA, 120 bp, Artificial Sequence
  ENSG00000197565_45 (sequence is synthesized)
tctccttaccgtcttgatcggaaagctcttcctaatcgctaatcagtcatttcttcatgtacagaggtcagcacacattatttggcttaaaccagaacccagtgtttccacacttaaatt

SEQ ID NO: 718201 - DNA, 120 bp, Artificial Sequence
  ENSG00000197565_46 (sequence is synthesized)
ctctaaccgaatattcatggatggctcaagtctgcacagagcaagtcctcactcttcaaggaggcccactgtgtctaggcaggcaagagaattgaaatgaggtgccacccagtagcccag

SEQ ID NO: 718202 - DNA, 120 bp, Artificial Sequence
  ENSG00000197565_47 (sequence is synthesized)
agtgagctttagctctctctagaatgagcaagactgggccccacatggcttagagaggcttgaaggccagcagctgggttgggggtggtggtcattaatggcatatggtcctagacaaac

SEQ ID NO: 718203 - DNA, 120 bp, Artificial Sequence
  ENSG00000197565_48 (sequence is synthesized)
catctcctccttgccggctccccctccagccagagacagaggatgtggcctggttcaaagtaaagcagaggatgcaacaaatgtggccaagcctatcaaaggaaatgagaatgacagcct

SEQ ID NO: 718204 - DNA, 120 bp, Artificial Sequence
  ENSG00000197565_49 (sequence is synthesized)
tttttcctgggccagaagtagaggggtgggtgcgtaaggatgtgtgagttttgcttttgactccaggaacaaaaaggtaaatcccacatcccagtttctcagaagtccctgtttattcca

SEQ ID NO: 718205 - DNA, 120 bp, Artificial Sequence
  ENSG00000197565_50 (sequence is synthesized)
aatgccatccagatgtgtgcaatgtggcaaactgaagctgcacagtgttggtttccttgtattctgaggatgttaaagactttgttaaatggttatccaattgctctttcacaggtagcc

SEQ ID NO: 718206 - DNA, 120 bp, Artificial Sequence
  ENSG00000197565_51 (sequence is synthesized)
tattaaactattttaatatgtttttttaaacctcataaaaatctagcacactcttctcttgagcagttagcagacctaaagcaagcctgaattggctatgcagtacattgtattctgttt

SEQ ID NO: 718207 - DNA, 120 bp, Artificial Sequence
  ENSG00000197565_52 (sequence is synthesized)
gggggaatttgttttagccattttctttaattaccagttttccagaacactcttagctatgttgacatgaggcagttccttccaggtgattctgtttccttaagtattatataaactgtg

SEQ ID NO: 718208 - DNA, 120 bp, Artificial Sequence
  ENSG00000197565_53 (sequence is synthesized)
ccaatacagacaaagcataatcaatataatctgaattattgttatctttacctcctgagtaataagcatggtgtcagttttgtacatagcaaataaaataaatgaaatctgaacatgtga

SEQ ID NO: 718209 - DNA, 120 bp, Artificial Sequence
  ENSG00000197565_54 (sequence is synthesized)
atggaactatctcctgagtgctgcaagttgtaacgggcaccgctgagcctgtttccctttggagcacttcttatctagaagcagtgtttagtttcttccaaactgggccacttcgtccac

SEQ ID NO: 718210 - DNA, 120 bp, Artificial Sequence
  ENSG00000197565_55 (sequence is synthesized)
ctactctgttctgagtaaggaaacagcctccaagcatcagcagagcccagatgagcacgggccgcggagccgcttagcagtctcccgggacccagctccggaggagccgcaagcatgcac

SEQ ID NO: 718211 - DNA, 120 bp, Artificial Sequence
  ENSG00000197565_56 (sequence is synthesized)
atgtggctcagccacagcaaggaggctgagttctgatgttctctttccccatacttctatggaagactggaagacagattacttgcagtgatttctggaggcagaagataagcaagtggc

SEQ ID NO: 718212 - DNA, 120 bp, Artificial Sequence
  ENSG00000197565_57 (sequence is synthesized)
ctctatgatggtagaaccaagaaagaatgatcattgcccttaagccttcagagatgacagctaaatccagagggaaaataaatagggataagattgtaaaaaaagttgctgctggagaaa

SEQ ID NO: 718213 - DNA, 120 bp, Artificial Sequence
  ENSG00000197565_58 (sequence is synthesized)
aaatagctgctgctgataaagaacctcaataaattcaaacaatgtctgcgtttggccctcaaatgtcatgctggctcattgctcgggagaaagagccgtacaactaccatgtcagaggag

SEQ ID NO: 718214 - DNA, 120 bp, Artificial Sequence
  ENSG00000197565_59 (sequence is synthesized)
atgaggaagcaaagaagtctgactaagggcactgccatggatattcttgcccctgctttggaacaatctatcattggattgtggagaggaagcaaggaggcagctggcagtgtgacacca

SEQ ID NO: 718215 - DNA, 120 bp, Artificial Sequence
  ENSG00000197565_60 (sequence is synthesized)
tttggcaaatttctaaactctaagtcttagctgtctcatatacaaaatgggcataatacatcctccctcatatggttgttgtgaggattaataaaacagtgtttataaagtgcttggcac

SEQ ID NO: 718216 - DNA, 120 bp, Artificial Sequence
  ENSG00000197565_61 (sequence is synthesized)
agtgctgaacacatagcagtaaataaatattagtcattattaatattagctgatgcacatttgggggcaatttcaagaaagaattgattacaatagtaaattcagactatggcatctatt

SEQ ID NO: 718217 - DNA, 120 bp, Artificial Sequence
  ENSG00000197565_62 (sequence is synthesized)
gattgttcctttttaaatgaaccattttaaatacagtaaaagccctcctccctggcctctgcttaacttcctttatggagtaagtcgatgtttttccttcctattggaatatacactggc

SEQ ID NO: 718218 - DNA, 120 bp, Artificial Sequence
  ENSG00000197565_63 (sequence is synthesized)
caatgctcagggcacaatggaagctcatgggcaggtaagttacttctggtgaacacttatatttctgcttccacacaacaagttgatcacttaccaaaagttagctgtgtttttgccaag

SEQ ID NO: 718219 - DNA, 120 bp, Artificial Sequence
  ENSG00000197565_64 (sequence is synthesized)
cccatttatggcagttgtactcgttattacaagtaggtaatttaatgtaaatttgtgaaatatgagtataaaaagaaaactattattttcatgaaaactaagttcaatgctttggaaaga

SEQ ID NO: 718220 - DNA, 120 bp, Artificial Sequence
  ENSG00000197565_65 (sequence is synthesized)
cttactaaagaaaagttgcttttgaaaactgccatattgttaaaaataaaacaaaactgaaagtggaaatcaaatgtgatgcattaggaatgtaacttacgtgaaaaagagtctgtgaaa

SEQ ID NO: 718221 - DNA, 120 bp, Artificial Sequence
  ENSG00000197565_66 (sequence is synthesized)
tcccagggtgtggcctcacgctcaaagaaaaggccttggccttacaacacatcaccagagtggtgaatgaatgtacctttgtgtgttttaggttgaaataaaatgttttatgtatgtata

SEQ ID NO: 718222 - DNA, 120 bp, Artificial Sequence
  ENSG00000197565_67 (sequence is synthesized)
ccataaatgtctgtcatattcattgctctatccccagagctaccaggaccctggcatataataagcactggggaaatatttgttcaatgacttactaagcaaattatgctattagaaagg

SEQ ID NO: 718223 - DNA, 120 bp, Artificial Sequence
  ENSG00000197565_68 (sequence is synthesized)
cagctggctggcgccgggttcctaggctgggatgccaactgaacctctggggttagaagcgtcccctcagcctccttggcactgtgctctaaccagtgagtaaaccagccaccccagccc

SEQ ID NO: 718224 - DNA, 120 bp, Artificial Sequence
  ENSG00000197565_69 (sequence is synthesized)
tgagagaaggctcagctcaccatattagcagcaaatgcttctggactgcctgtcacccactgggcacaatgctgggccctgaggagacaggatgaatatgacccagttcctgccctcttg

SEQ ID NO: 718225 - DNA, 120 bp, Artificial Sequence
  ENSG00000197565_70 (sequence is synthesized)
tccaggccctgatggctatcctgggcttctcggaccacccgtatgctgccagatatttgcattttatttcaaatggctttgcttgtctctacgtgtgccctttttctgcctctctggaaa

SEQ ID NO: 718226 - DNA, 120 bp, Artificial Sequence
  ENSG00000197565_71 (sequence is synthesized)
cctcaagattttgtggggcagccactacacacccttgtccaatgtaggagtcaatactggcagcaccacaacagtaaaagtctaaagaagaataccagttgcagtggggtgtgcacatgc

SEQ ID NO: 718227 - DNA, 120 bp, Artificial Sequence
  ENSG00000197565_72 (sequence is synthesized)
tacactgcttagggttgccttttttttaatgcagcttgtgaaattggcaagattgttaaaaggctgtagtaaatttcatggcaaaatacacacttgggctatttgacatggtcccacatc

SEQ ID NO: 718228 - DNA, 120 bp, Artificial Sequence
  ENSG00000197566_0 (sequence is synthesized)
gccggcaccgccgagccgccgccattgctggaagcgttcccgccctgctctgcgagttccctcagttgtcctcagttcggccgccaggtatgtctttgcaagactccactctttccagag

SEQ ID NO: 718229 - DNA, 120 bp, Artificial Sequence
  ENSG00000197566_1 (sequence is synthesized)
aggggaaaccagagggagagattatggctgctgtgtttttctcagttggacgcctgagccctgaagttacccagccagatgaagatcttcaccttcaggcagaagaaacacaattggtaa

SEQ ID NO: 718230 - DNA, 120 bp, Artificial Sequence
  ENSG00000197566_2 (sequence is synthesized)
aggaatcggtgacatttaaggatgtggctatagacttcacattggaggagtggaggttgatggaccctacacagaggaacctgcacaaggatgtgatgctagagaattacaggaatctgg

SEQ ID NO: 718231 - DNA, 120 bp, Artificial Sequence
  ENSG00000197566_3 (sequence is synthesized)
tctccctggggcttgcagtttccaaaccagacatgatatctcatttggagaatgggaaaggaccatgggtgacggtgagagaaatttcaagaattccctatcctgacatggagcccaaac

SEQ ID NO: 718232 - DNA, 120 bp, Artificial Sequence
  ENSG00000197566_4 (sequence is synthesized)
ctgcaaccaagaaggctacacgaacaaaggctatttctgaagatttatcacaggaggccatactagagaaacttacagagaatggtctgtgggattccagaatggaagggttatggaaat

SEQ ID NO: 718233 - DNA, 120 bp, Artificial Sequence
  ENSG00000197566_5 (sequence is synthesized)
ggaatgataggatattgagattacaaaataatcaggagaatcatttgagtcaaagaataattccactcaagaagactcccactagtcaaagaggctttagatttgaatctattcttattc

SEQ ID NO: 718234 - DNA, 120 bp, Artificial Sequence
  ENSG00000197566_6 (sequence is synthesized)
cagaaccaggcattgccacagaagagcttcacagcagatgccaaacacaagaggaaaatttcacagagaatttaaatttgattacagatacccatttggggaagataatttgcaaggaga

SEQ ID NO: 718235 - DNA, 120 bp, Artificial Sequence
  ENSG00000197566_7 (sequence is synthesized)
tgaaaggcagcaaagccataaggcagacttcagaactaactttggggaaaaaatccaataataaggaaaaaccctacaaatgtagtacatgcgaaaaggcctttcattatagatcattgc

SEQ ID NO: 718236 - DNA, 120 bp, Artificial Sequence
  ENSG00000197566_8 (sequence is synthesized)
tcattcaacatcaaagaactcatactaaagaaaaaccttatgaatgtaatgaatgtgggaaaacattcagccagccttcatatctcagtcagcacaaaaaaatccacactggagaaaaac

SEQ ID NO: 718237 - DNA, 120 bp, Artificial Sequence
  ENSG00000197566_9 (sequence is synthesized)
cctataaatgtaatgaatgtggaaaggccttcattgcttcttcatcacttatggtacatcagagaattcacactaaagagaaaccttatcagtgtaatgtgtgtgggaaatcttttagcc

SEQ ID NO: 718238 - DNA, 120 bp, Artificial Sequence
  ENSG00000197566_10 (sequence is synthesized)
agtgtgcccgtcttaatcagcaccagagaattcaaactggagagaaaccctataaatgtagtgaatgcgggaaagcttttagtgataaatcaaaacttgcaagacatcaggaaactcaca

SEQ ID NO: 718239 - DNA, 120 bp, Artificial Sequence
  ENSG00000197566_11 (sequence is synthesized)
atggtgagaaaccctacaaatgtgatgattgtgggaaagcctttaggaacaagtcatatcttagtgtacatcagaagacccacactgaagagaaaccatatcagtgcaacgagtgtggga

SEQ ID NO: 718240 - DNA, 120 bp, Artificial Sequence
  ENSG00000197566_12 (sequence is synthesized)
agtcttttaagaataccacaatttttaatgtgcatcagaggattcatactggagagaaaccttttagatgtaacgaatgtggaaaagcctatagaagtaattcaagccttatcgtacata

SEQ ID NO: 718241 - DNA, 120 bp, Artificial Sequence
  ENSG00000197566_13 (sequence is synthesized)
taagaactcacactggggaaaaaccctatgaatgtaatgaatgtgggaaagcattcaaccgcatcgcaaatttcacagaacatcagcgaattcacacaggagaaaaaccctataaatgta

SEQ ID NO: 718242 - DNA, 120 bp, Artificial Sequence
  ENSG00000197566_14 (sequence is synthesized)
atgaatgtgggaaagcattcattaattattcatgccttactgtacaccacagaatgcatacaggagagaaaccttataaatgtactgaatgtggaaaggccttcatgcgttcttcttctc

SEQ ID NO: 718243 - DNA, 120 bp, Artificial Sequence
  ENSG00000197566_15 (sequence is synthesized)
taattatacatcagcgtattcatactgaagagaaaccttatctgtgcaatgaatgtggggagtctttcagaataaaatcacacttaactgtacatcagagaattcacactggagagaaac

SEQ ID NO: 718244 - DNA, 120 bp, Artificial Sequence
  ENSG00000197566_16 (sequence is synthesized)
catataaatgtactgactgcgagagggcattcaccaaaatggtaaatctcaaggagcatcagaaaattcatactggagtgaaaccctataaatgttatgactgtggaaagtcctttagga

SEQ ID NO: 718245 - DNA, 120 bp, Artificial Sequence
  ENSG00000197566_17 (sequence is synthesized)
gaaaaaccatataaatgtaatgaatgtgagaaagccttcactaatacatcacagcttaccgtgcaccaacgaaggcatactggagagaagccctataaatgcaatgaatgtggaaaggtt

SEQ ID NO: 718246 - DNA, 120 bp, Artificial Sequence
  ENSG00000197566_18 (sequence is synthesized)
ttcacaagtaactcaggctttaatacacatcaaagaacacatactggagagaaaccatttaaatgtaatgactgtgggaaagcatttagccagatggtacatgtcacagaacatcagaaa

SEQ ID NO: 718247 - DNA, 120 bp, Artificial Sequence
  ENSG00000197566_19 (sequence is synthesized)
atccatagtggagagaagccctataagtgtgatgtctgtggaaaagccttcaggaggggttcttaccttacagtgcattggagaacacacactggagaaaaaccctacacctgtaaggaa

SEQ ID NO: 718248 - DNA, 120 bp, Artificial Sequence
  ENSG00000197566_20 (sequence is synthesized)
tgtggaaagggttgtattactctatcacagctaaccctacatcagagaattcatactggggagaggccctataaatgtgaagaatgtggaaaagccttcagaactaactcagactttact

SEQ ID NO: 718249 - DNA, 120 bp, Artificial Sequence
  ENSG00000197566_21 (sequence is synthesized)
gtacacttgaggatgcatactggagaaaaaccctataaatgtaatgaatgtggaaaagccttcaggagtagttcgagccttactgtacatcaaagaatacatcaaagagaaactcagtta

SEQ ID NO: 718250 - DNA, 120 bp, Artificial Sequence
  ENSG00000197566_22 (sequence is synthesized)
atataaagaacaataagtcattcacctagatgtcaactccacaagatgaatcttataaactatattttatgaatataggaaaatcttcattaggaatttatcagaaagtatacagagaaa

SEQ ID NO: 718251 - DNA, 120 bp, Artificial Sequence
  ENSG00000197566_23 (sequence is synthesized)
ctataagcaattatgtgggaaatcatttaataatattaaatcttagaagttataaggaaactctcactagaggaaaataatgaacaaatgaaagtgttcatccagatttcatactttact

SEQ ID NO: 718252 - DNA, 120 bp, Artificial Sequence
  ENSG00000197566_24 (sequence is synthesized)
catttaacaaattatctttagttaattgcctatatatgtatttgcctatttttctattcatttatctgtcttttcttataaacctggaggtgctttttatatatttttgatattaatcct

SEQ ID NO: 718253 - DNA, 120 bp, Artificial Sequence
  ENSG00000197566_25 (sequence is synthesized)
ttgtcattatgtagcagatgtttttcttaatctagcatttgtctttatactttatagtaatgcacaacatttttataggaaaatatttgtatcatttcctttttagattttttattttac

SEQ ID NO: 718254 - DNA, 120 bp, Artificial Sequence
  ENSG00000197566_26 (sequence is synthesized)
tcattttacttaaaagagatctccttaatccctaggttatacgtagtatcctaaatgtgtttttaagatttttatgattttattttttacacttaagtctttaatccctctggactggat

SEQ ID NO: 718255 - DNA, 120 bp, Artificial Sequence
  ENSG00000197566_27 (sequence is synthesized)
ggttcttcataggagagcaactgtaggtgatcattatcctgtgaaaatattttgaacctaaaaagcactcagggaaatgcaaattgaaatgctcagtgagatgaaacttccccttcatgg

SEQ ID NO: 718256 - DNA, 120 bp, Artificial Sequence
  ENSG00000197566_28 (sequence is synthesized)
atctggcaaaaattaagagatcttttgctagctattggggtttgggaaaccatgtactattacttaaaggttgtgtaacatacttccaccagcagtccaacaatatatgtttaaaaattt

SEQ ID NO: 718257 - DNA, 120 bp, Artificial Sequence
  ENSG00000197566_29 (sequence is synthesized)
aaaacatatatactcttagacccagcagtctcacttttggaatctgtccgttagaaataaaagcagcatcaatgcataagaatgtaaataaacatgtttgttgaagtactgtttgtagag

SEQ ID NO: 718258 - DNA, 120 bp, Artificial Sequence
  ENSG00000197566_30 (sequence is synthesized)
gggggcaaagccccaactgcaaacaaagtgaatgcccattaatagggaactggttagataaattgtgacatacccatattatggaacagtgtgagagtaattttaaaaacgacttatatc

SEQ ID NO: 718259 - DNA, 120 bp, Artificial Sequence
  ENSG00000197566_31 (sequence is synthesized)
tatgctagctgatttcaatgtatttccacaatgtattgataaataattgctttataacaaatgtatatatacaatatatcatttttgttaaaataatcacacccatttattttgtgttta

SEQ ID NO: 718260 - DNA, 120 bp, Artificial Sequence
  ENSG00000197566_32 (sequence is synthesized)
tgtgtgtgtgtgtggttagatgcacatggagacaggtatggaagaatatacaccaggctgttaatattgattaccttgaggggagtgagaaaaggagaagtagagataagggaaggggag

SEQ ID NO: 718261 - DNA, 120 bp, Artificial Sequence
  ENSG00000197566_33 (sequence is synthesized)
actgtaaaaacagaaaaatgtaaatgctgcctttatggtataaaactgtaaatgtaatattatgtaattatgtgaacttttgagagagatgaaaggatggtctccaaaaaattaatgatg

SEQ ID NO: 718262 - DNA, 120 bp, Artificial Sequence
  ENSG00000197566_34 (sequence is synthesized)
gttatttctgttttagtggttcatcaattttttgttttttactttcttttctgtgtttttaagttaattttttccttgcaatgaacctgtaatatttacattaaaaggaaaaatattttc

SEQ ID NO: 718263 - DNA, 120 bp, Artificial Sequence
  ENSG00000197566_35 (sequence is synthesized)
attataggcatgagccactgtgcccagctgaatggacttttttaacgggaaagtttcattgaatttgctactttagtttttgctaaaccagcctcccttaaccctaccttcttctcacta

SEQ ID NO: 718264 - DNA, 120 bp, Artificial Sequence
  ENSG00000197566_36 (sequence is synthesized)
cttaaccctaccttcttctcactaaaaaacaagtcagtgtgaaagcaattaaaaccatatattcattatccatgtatttattgcttttattattctgtttagtgagattgccccagctta

SEQ ID NO: 718265 - DNA, 120 bp, Artificial Sequence
  ENSG00000197566_37 (sequence is synthesized)
ggaatctggtctccctggggcttgcagtttccaaaccagacatgatatctcatttggagaatgggaaaggaccatgggtgacggtgagagaaatttcaagaattccctatcctgggtctc

SEQ ID NO: 718266 - DNA, 73 bp, Artificial Sequence
  ENSG00000197566_38 (sequence is synthesized)
tcctcctacatagctgggagtagaggcacacaccaccacacctaagatttttattttttgtagaggaaggggt

SEQ ID NO: 718267 - DNA, 120 bp, Artificial Sequence
  ENSG00000197566_39 (sequence is synthesized)
tcctacatagctgggagtagaggcacacaccaccacacctaagatttttattttttgtagaggaaggggtctcactatgttgaccaagctgttctcgaactcctgggctcaagctatcct

SEQ ID NO: 718268 - DNA, 120 bp, Artificial Sequence
  ENSG00000197566_40 (sequence is synthesized)
gtgagtcaccatgcctgacattacttggcttttaaaaacattactgtttttagtcctttttcttgtatgtttgagttttattactttctgttctttattattttattccattcttagagc

SEQ ID NO: 718269 - DNA, 120 bp, Artificial Sequence
  ENSG00000197566_41 (sequence is synthesized)
ctggaggccggcaccgccgagccgccgccattgctggaagcgttcccgccctgctctgcgagttccctcaagcccctgtccctgagcggacccgcccactcctgagaggcgattggggct

SEQ ID NO: 718270 - DNA, 120 bp, Artificial Sequence
  ENSG00000197566_42 (sequence is synthesized)
gagccgccgccattgctggaagcgttcccgccctgctctgcgagttccctcagttgtcctcagttcggccgccaggtactcgttgtcccgggcgcctggcctcggttgcccgccgcccct

SEQ ID NO: 718271 - DNA, 120 bp, Artificial Sequence
  ENSG00000197566_43 (sequence is synthesized)
cccttggcgcttggctcccggcggcgtccggggcgtggccgttccctctagagcccctgtccctgagcggacccgcccactcctgagaggcgattggggctgggcctccttcccgagtgt

SEQ ID NO: 718272 - DNA, 120 bp, Artificial Sequence
  ENSG00000197568_0 (sequence is synthesized)
attcccagaatcactaggcgccggcgcctccgaggcagtgtgtttccgcccagagctggagtctcccagctgccagccgaccccgaacccgcactcccgccaaccgcgctttttgtgggc

SEQ ID NO: 718273 - DNA, 120 bp, Artificial Sequence
  ENSG00000197568_1 (sequence is synthesized)
ggtcggaaaccacagcctccgttggatatgttcggtgcatgttataaacaaccacttaaaccctccggatctgagcctcccgcagaggaatgcagaatgacgccacggcacgcaggatgt

SEQ ID NO: 718274 - DNA, 120 bp, Artificial Sequence
  ENSG00000197568_2 (sequence is synthesized)
agaccccaagagagcattcttggatctcttgcaagaaagaatttgaggcgaatccatagagtaagcttagtgatgtgtgtcagacctctgagcccaagcaaagccatcatatcccctgtg

SEQ ID NO: 718275 - DNA, 86 bp, Artificial Sequence
  ENSG00000197568_3 (sequence is synthesized)
ccccaccttaactgagcgattaacctgtgaacttccttctcctggctcagaagctttgccatagaacaaccccctttgattgtaat

SEQ ID NO: 718276 - DNA, 120 bp, Artificial Sequence
  ENSG00000197568_4 (sequence is synthesized)
ccgagatgcagaggatactcagtcaaccaacatttactgagcatctacttcgtgccgtatgtacgaagctagcaaatatgtacagcaccagtactgattgcagggagcactgtagaagag

SEQ ID NO: 718277 - DNA, 76 bp, Artificial Sequence
  ENSG00000197568_5 (sequence is synthesized)
ggggtccctatccagaccccaagagagcattcttggatctcttgcaagaaagaatttgaggcgaatccatagagtg

SEQ ID NO: 718278 - DNA, 120 bp, Artificial Sequence
  ENSG00000197568_6 (sequence is synthesized)
ccaaacaattaaaagcggaggcggggagattgactcttttcgccgacaccttgtatttcgtctggcaaccttactcacccctcaaccatttgtttgagttgtttagagttatggatatag

SEQ ID NO: 718279 - DNA, 120 bp, Artificial Sequence
  ENSG00000197568_7 (sequence is synthesized)
agagttatggatatagttaaagtacgaagccaaatgtgtgggaataataacgccaaattcaagatagtggtttcaatggagcacgaaggagaaaaacaccatcaggggtcttgtcaacgg

SEQ ID NO: 718280 - DNA, 120 bp, Artificial Sequence
  ENSG00000197576_0 (sequence is synthesized)
agtatttttgcacttcacaaattaatgaccatgagctcgtttttgataaactccaactacatcgagcccaagttccctcccttcgaggagtacgcgcagcacagcggctcgggcggcgca

SEQ ID NO: 718281 - DNA, 120 bp, Artificial Sequence
  ENSG00000197576_1 (sequence is synthesized)
cagcgcccccgacccagcacctgccgctgcagcagccccagctccctcacgcgggcggcggccgagagcccactgcctcctactacgcgccgcggaccgcccgcgagcccgcctaccctg

SEQ ID NO: 718282 - DNA, 120 bp, Artificial Sequence
  ENSG00000197576_2 (sequence is synthesized)
ctcctactacgcgccgcggaccgcccgcgagcccgcctaccctgctgccgcgctgtaccccgcgcatggggccgcggacaccgcctacccctatggctaccgcggcggcgccagccccgg

SEQ ID NO: 718283 - DNA, 80 bp, Artificial Sequence
  ENSG00000197576_3 (sequence is synthesized)
ccgccccagcccgagcagcccccggcgcaagccaagggcccagcgcacggcctgcatgcgagccacgtcctgcagcccca

SEQ ID NO: 718284 - DNA, 120 bp, Artificial Sequence
  ENSG00000197576_4 (sequence is synthesized)
ggcccccgccaccccaggcgtcccggcagggggcagcgcccccgcgtgcccgctgctcttggccgacaagagcccgctgggcctgaagggcaaggagcccgtggtgtacccctggatgaa

SEQ ID NO: 718285 - DNA, 120 bp, Artificial Sequence
  ENSG00000197576_5 (sequence is synthesized)
gtggtgtacccctggatgaagaagatccatgtcagcgccgttaaccccagttataacggaggggagcctaagcgctctcgaaccgcctacacccggcagcaggtcttggagctggagaag

SEQ ID NO: 718286 - DNA, 120 bp, Artificial Sequence
  ENSG00000197576_6 (sequence is synthesized)
gagttccacttcaatcgatacctgacccggcggcgccgcatcgagatcgcccacacgctctgtttgtctgagcgccaggtcaagatctggtttcagaaccggaggatgaagtggaagaaa

SEQ ID NO: 718287 - DNA, 120 bp, Artificial Sequence
  ENSG00000197576_7 (sequence is synthesized)
aactgcccaacaccaagatgcgatcctccaattcggcctcggcctctgccggcccaccagggaaagcacaaactcagagcccacacctccatccccacccccacccgagcacctccacac

SEQ ID NO: 718288 - DNA, 120 bp, Artificial Sequence
  ENSG00000197576_8 (sequence is synthesized)
ccgttccctcctccatataatcttctagagatcttaaccagtttctatcccttacctgcttttctcttctcttctcctgctccgttcctcatccacccctccccatctggaccataatag

SEQ ID NO: 718289 - DNA, 120 bp, Artificial Sequence
  ENSG00000197576_9 (sequence is synthesized)
acaccaaaacaaacccaaattggtgaaaagaataatcaaaaagaagacattatccggttaagagtctgtgctggttgccacccaagagagaacagttgtccaggatgctggctggtggaa

SEQ ID NO: 718290 - DNA, 120 bp, Artificial Sequence
  ENSG00000197576_10 (sequence is synthesized)
caacctgctggcccgaaacaaggctgccaggtgtggatacctgagaaggactacttggtatcaaatacttttgagatggctacagtcagctagctggacagcccatgctgagtggggaca

SEQ ID NO: 718291 - DNA, 120 bp, Artificial Sequence
  ENSG00000197576_11 (sequence is synthesized)
tacacttgcatctttgttgaaagcagaagaagacagaccctttccccaccttccttacctcctcttcccccattaaggcagctcatccaagcttgtatttaactgaataaatgagtagac

SEQ ID NO: 718292 - DNA, 120 bp, Artificial Sequence
  ENSG00000197576_12 (sequence is synthesized)
attgtggacctcacaagattatttaattcttaagatgtgtagaccttgatggtaggtgtgacatgttagtttttcttacttgcatttatttaagacactgttacagagatactgttgtcc

SEQ ID NO: 718293 - DNA, 120 bp, Artificial Sequence
  ENSG00000197576_13 (sequence is synthesized)
ccttctggggcacggtctttggggagaggggagtgcatttagacttatgtggaactgtacaaattgtgatgtggctacatagaaagccatgtgctaagaataaactccatttaaaaaaca

SEQ ID NO: 718294 - DNA, 120 bp, Artificial Sequence
  ENSG00000197579_0 (sequence is synthesized)
aattcaggaatggattttggagtttctgggtgctgaagaaatagggcctttccgcctgcgggcccagtgagtcgacacggtgggggcccgcgatccccgggacttaccactgaataaatc

SEQ ID NO: 718295 - DNA, 120 bp, Artificial Sequence
  ENSG00000197579_1 (sequence is synthesized)
cagtccagcgtgcgacgacttactggcttcatggggtcgcagccgccgctggggtctccgctgtctcgcgaggagggtgaagcgcccccgcctgctcccgcttcggagggtaggcggaga

SEQ ID NO: 718296 - DNA, 120 bp, Artificial Sequence
  ENSG00000197579_2 (sequence is synthesized)
agtcgccgggtacgccttcgcggatcctgccgacaccgacctagctttctgggctgccgggagctcgcggcgagcgccccagccaggcctgcgccggcatcctccgagataatggcatca

SEQ ID NO: 718297 - DNA, 120 bp, Artificial Sequence
  ENSG00000197579_3 (sequence is synthesized)
gctgctaaggaatttaaaatggacaacttttcacctaaagctggcactagcaaattgcaacagacagtaccagctgatgcatctcctgattctaagtgtcctatatgcttggatagattt

SEQ ID NO: 718298 - DNA, 120 bp, Artificial Sequence
  ENSG00000197579_4 (sequence is synthesized)
gataatgtgtcttacttagatcgctgcttacataagttctgttttcgctgtgtacaggagtggtcaaaaaacaaagctgaatgcccactatgtaaacagccctttgattctattttccat

SEQ ID NO: 718299 - DNA, 120 bp, Artificial Sequence
  ENSG00000197579_5 (sequence is synthesized)
tctgtgagggcagaagatgacttcaaggagtatgtcctaaggccttcgtataatggttcttttgtcacccctgatcgacgatttcgctaccgtacaactctgacaagggaacgaaatgct

SEQ ID NO: 718300 - DNA, 120 bp, Artificial Sequence
  ENSG00000197579_6 (sequence is synthesized)
tctgtgtattcacctagtggtcctgtgaacagaagaacaacaactccaccggatagtggagtactgtttgaagggttaggcatttcaacaagacctagagatgttgaaattcctcagttt

SEQ ID NO: 718301 - DNA, 120 bp, Artificial Sequence
  ENSG00000197579_7 (sequence is synthesized)
atgagacagattgcagtaaggaggccaactacggcagatgaaagatctttgcggaaaattcaagaacaagatattattaattttagacgaactctttatcgtgctggtgctcgagttaga

SEQ ID NO: 718302 - DNA, 120 bp, Artificial Sequence
  ENSG00000197579_8 (sequence is synthesized)
aatattgaagatggtggccgctacagggatatttcagctgaatttttccgtagaaatccagcttgccttcacagattagtcccctggttaaaacgtgaacttacagttctttttggagct

SEQ ID NO: 718303 - DNA, 120 bp, Artificial Sequence
  ENSG00000197579_9 (sequence is synthesized)
catggatctttagtgaatattgtccagcatattatcatgagtaatgttactcgctatgacttggagagtcaggcatttgtgtctgatttaagaccatttttacttaatcgaactgagcat

SEQ ID NO: 718304 - DNA, 120 bp, Artificial Sequence
  ENSG00000197579_10 (sequence is synthesized)
tttatacatgaatttatcagttttgcccgatctccttttaacatggcagcctttgaccagcatgccaattatgattgccctgctccttcatacgaagaaggcagccattctgattcttca

SEQ ID NO: 718305 - DNA, 120 bp, Artificial Sequence
  ENSG00000197579_11 (sequence is synthesized)
gtcataacaatatctccagatgaggctgagacccaagagctggatattaatgtagccactgttagtcaggcaccatgggatgatgaaactccaggaccatcttactcaagctcagagcag

SEQ ID NO: 718306 - DNA, 120 bp, Artificial Sequence
  ENSG00000197579_12 (sequence is synthesized)
gtacacgttactatgtcttctcttttaaatacttctgacagttcagatgaagaacttgtcacaggaggagccacgtctcagatacaaggagtacaaaccaatgacgacctaaataatgac

SEQ ID NO: 718307 - DNA, 120 bp, Artificial Sequence
  ENSG00000197579_13 (sequence is synthesized)
agtgatgattcttcagataattgtgtcattgttgggtttgttaaaccactagctgagaggaccccagaacttgttgaactgtcctctgattctgaggacttaggttcttatgagaaaatg

SEQ ID NO: 718308 - DNA, 120 bp, Artificial Sequence
  ENSG00000197579_14 (sequence is synthesized)
gagacagtgaagacacaagaacaggagcaatcttacagttctggtgatagcgatgttagtagatgctcatctccacactctgtccttggaaaggatgaacaaataaataaaggtcattgt

SEQ ID NO: 718309 - DNA, 120 bp, Artificial Sequence
  ENSG00000197579_15 (sequence is synthesized)
gattctagtacaagaatcaaatcaaagaaggaagagaaacgatctacatcattgtcatctcccagaaacctgaactcatctgtaagaggagacagagtatattctccatataaccataga

SEQ ID NO: 718310 - DNA, 120 bp, Artificial Sequence
  ENSG00000197579_16 (sequence is synthesized)
cacagaaagaggggaagatcaagaagttcagattcacgttctcagagtagaagtgggcatgatcagaagaatcatagaaagcatcatgggaagaaaagaatgaaaagtaaacgatccaga

SEQ ID NO: 718311 - DNA, 120 bp, Artificial Sequence
  ENSG00000197579_17 (sequence is synthesized)
actagagatagcagttggtccagaagaagccaaactctgtctctaagtagtgaaagcacaagcagatcaaggtctcgtagcagtgatcatggtaaaagaagatcacggagcagaaataga

SEQ ID NO: 718312 - DNA, 120 bp, Artificial Sequence
  ENSG00000197579_18 (sequence is synthesized)
gatcgttattatttaagaaataattatggaagcagatacaaatgggagtatacttattacagtagaaacaaggacagggatgggtacgaatcatcttacaggaggaggactctgtccaga

SEQ ID NO: 718313 - DNA, 120 bp, Artificial Sequence
  ENSG00000197579_19 (sequence is synthesized)
gctcattattctagacagtcttcaagtccagaatttagagttcagtccttttctgaaagaacaaatgctaggaaaaaaaataatcacagtgagaggaagtattactactatgaaaggcac

SEQ ID NO: 718314 - DNA, 120 bp, Artificial Sequence
  ENSG00000197579_20 (sequence is synthesized)
agatcaaggagcctgtctagtaacagatcaaggactgcatctaccgggactgaccgggtgagaaatgaaaagcctggagggaaacgaaaatacaaaacacggcatttggagggtactaac

SEQ ID NO: 718315 - DNA, 120 bp, Artificial Sequence
  ENSG00000197579_21 (sequence is synthesized)
gaagtggctcagccatctcgtgaatttgcttctaaagcaaaggacagtcattaccaaaaatcttcatcaaaattggatggaaactacaaaaatgagagtgataccttttcagacagccga

SEQ ID NO: 718316 - DNA, 120 bp, Artificial Sequence
  ENSG00000197579_22 (sequence is synthesized)
tcatcagacagagagacaaaacacaaaaggagaaaaaggaagacccggagcctaagtgtagagatagtttatgaaggaaaagctactgatacaactaaacaccataaaaagaaaaagaag

SEQ ID NO: 718317 - DNA, 120 bp, Artificial Sequence
  ENSG00000197579_23 (sequence is synthesized)
aaacataagaagaagcataagaaacaccatggagataatgcttcacgttccccagttgtaattaccattgacagtgacagtgataaggattctgaagtaaaggaggatacagaatgtgac

SEQ ID NO: 718318 - DNA, 120 bp, Artificial Sequence
  ENSG00000197579_24 (sequence is synthesized)
aatagtggtcctcaagaccctctacaaaatgagtttttggctccttccttggaaccatttgaaactaaagatgtagttacaatagaagctgaatttggtgtgctggacaaggaatgtgat

SEQ ID NO: 718319 - DNA, 120 bp, Artificial Sequence
  ENSG00000197579_25 (sequence is synthesized)
attgccacacttagtaacaacttgaataatgccaacaaaactgtagataatattccacctctggcagcttcagttgaacaaactctcgatgtaagagaagagagcacctttgtttctgat

SEQ ID NO: 718320 - DNA, 120 bp, Artificial Sequence
  ENSG00000197579_26 (sequence is synthesized)
ttggagaaccagcccagtaacattgtgtctcttcaaactgagccatcaaggcaattgccatcgccacggacatcattaatgtcagtatgtcttggtagagactgtgatatgtcttaaaac

SEQ ID NO: 718321 - DNA, 120 bp, Artificial Sequence
  ENSG00000197579_27 (sequence is synthesized)
tgccaaagcatttcattgagaattatgatgttataaaaaggaaaaaggaagaatgtcgtctactgcagtctatttaaagatgacatttggtgaaaactctcttcctccttacaatatttt

SEQ ID NO: 718322 - DNA, 120 bp, Artificial Sequence
  ENSG00000197579_28 (sequence is synthesized)
aaatgattttttttttggtgttaatttgtaaaaatcattatttgttcaaaatgtatgtcccaccctcaaagatatgcacttttaagtgaagaaaatgatactgctagcagcttatttaaa

SEQ ID NO: 718323 - DNA, 120 bp, Artificial Sequence
  ENSG00000197579_29 (sequence is synthesized)
acttggggtcctttttaaataagaaaaattatataaattttagaagttatttcataaagccatacggtattgacatatttttaaggtagtcaatgagtatttttgaattttttttttttg

SEQ ID NO: 718324 - DNA, 120 bp, Artificial Sequence
  ENSG00000197579_30 (sequence is synthesized)
agagttattctggaaatgtgttataagctaggagaatccctttggacagtctttatttttcttcttaaaaatttatatgattcaaaaccatttcttcaggttaaattgaggcattttaat

SEQ ID NO: 718325 - DNA, 120 bp, Artificial Sequence
  ENSG00000197579_31 (sequence is synthesized)
ctgcacagtttatcttctgccaaaataaaaatttactatttcctttatatacttgtttatctggactgccagtaaaacaaatgtgtattcaacaaaagaaaaaaaataaaacagtaacac

SEQ ID NO: 718326 - DNA, 120 bp, Artificial Sequence
  ENSG00000197579_32 (sequence is synthesized)
tttaaaacaagaatcagacattttcctatgcagtatttttttttaaagtttattttagtaaagttaaaatcttgaaagtagctaagggcataattatgtcataaatactgaacttcaggt

SEQ ID NO: 718327 - DNA, 120 bp, Artificial Sequence
  ENSG00000197579_33 (sequence is synthesized)
gaacaaatactttatagttttaattattttctttgattttgaggagtatcttatttgctttctatcatcagtaaaaacagcatttaacttgctaaataaacatgaaaaacccttgtcata

SEQ ID NO: 718328 - DNA, 120 bp, Artificial Sequence
  ENSG00000197580_0 (sequence is synthesized)
aggcagttctgtgcgtgttcactgtttagtagtactcaaaactgccagtgtgagaggatttggaaatcactggatctgctcaatacaaaaatgttttttcgagtctttctccattttatc

SEQ ID NO: 718329 - DNA, 120 bp, Artificial Sequence
  ENSG00000197580_1 (sequence is synthesized)
aggagtcattctgccactgcagtggatttccttcctgtgatggtgcaccggctcccagttttcaaaaggtacatgggaaatactcctcagaaaaaagccgtctttgggcagtgtcggggt

SEQ ID NO: 718330 - DNA, 120 bp, Artificial Sequence
  ENSG00000197580_2 (sequence is synthesized)
ctgccatgtgttgcaccgctgctgaccacagtggaagaggctccacggggcatctctgctcgagtctggggacattttcctaagtggctcaatggctctctacttcgaattggacctggg

SEQ ID NO: 718331 - DNA, 120 bp, Artificial Sequence
  ENSG00000197580_3 (sequence is synthesized)
aaattcgagtttgggaaggataagtacaatcattggtttgatgggatggcgctgcttcaccagttcagaatggcaaagggcacagtgacatacaggagcaagtttctacagagtgataca

SEQ ID NO: 718332 - DNA, 120 bp, Artificial Sequence
  ENSG00000197580_4 (sequence is synthesized)
tataaggccaacagtgctaaaaaccgaattgtgatctcagaatttggcacactggctctcccggatccatgcaagaatgtttttgaacgtttcatgtccaggtttgagctgcctggtaaa

SEQ ID NO: 718333 - DNA, 120 bp, Artificial Sequence
  ENSG00000197580_5 (sequence is synthesized)
gctgcagccatgactgacaatactaatgtcaactatgtgcggtacaagggtgattactacctctgcactgagaccaactttatgaataaagtggacattgaaactctggaaaaaacagaa

SEQ ID NO: 718334 - DNA, 120 bp, Artificial Sequence
  ENSG00000197580_6 (sequence is synthesized)
aaggtagattggagcaaatttattgctgtgaatggagcaactgcacatcctcattatgacctggatggaacagcatacaatatggggaactcctttgggccatatggtttctcctataag

SEQ ID NO: 718335 - DNA, 120 bp, Artificial Sequence
  ENSG00000197580_7 (sequence is synthesized)
gttattcgggttcctccagagaaggtggaccttggggagacaatccatggagtccaggtgatatgttctattgcttctacagagaaagggaaaccttcttactaccatagctttggaatg

SEQ ID NO: 718336 - DNA, 120 bp, Artificial Sequence
  ENSG00000197580_8 (sequence is synthesized)
acaaggaactatataattttcattgaacaacctctaaagatgaacctgtggaaaattgccacttctaaaattcggggaaaggccttttcagatgggataagctgggaaccccagtgtaat

SEQ ID NO: 718337 - DNA, 120 bp, Artificial Sequence
  ENSG00000197580_9 (sequence is synthesized)
acgcggtttcatgtggtggaaaaacgcactggacagctccttccagggagatactacagcaaaccttttgttacatttcatcaaatcaatgcctttgaggaccagggctgtgttataatt

SEQ ID NO: 718338 - DNA, 120 bp, Artificial Sequence
  ENSG00000197580_10 (sequence is synthesized)
gatttgtgctgtcaagataatggaagaaccctagaagtttaccagttacagaatctcaggaaggctggggaagggcttgatcaggtccataattcagcagccaaatctttccctcgaagg

SEQ ID NO: 718339 - DNA, 120 bp, Artificial Sequence
  ENSG00000197580_11 (sequence is synthesized)
tttgttttgcctttaaatgtcagtttgaatgcccctgagggagacaacctgagtccattgtcctatacttcagccagtgctgtgaaacaggctgatggaacgatctggtgctctcatgaa

SEQ ID NO: 718340 - DNA, 120 bp, Artificial Sequence
  ENSG00000197580_12 (sequence is synthesized)
caggaggacctagaaaaggaaggaggcattgaatttcctcagatctactatgatcgattcagtggcaaaaagtatcatttcttttatggctgtggctttcggcatttagtgggggattct

SEQ ID NO: 718341 - DNA, 120 bp, Artificial Sequence
  ENSG00000197580_13 (sequence is synthesized)
ctgatcaaggttgatgtggtgaataagacactgaaggtttggagagaagatggcttttatccctcagaacctgtttttgttccagcaccaggaaccaatgaagaagatggtggggttatt

SEQ ID NO: 718342 - DNA, 120 bp, Artificial Sequence
  ENSG00000197580_14 (sequence is synthesized)
ctttctgtggtgatcactcccaaccagaatgaaagcaattttatcctagttttggatgccaagaactttgaagagctgggccgagcagaggtacctgtgcagatgccttatgggttccat

SEQ ID NO: 718343 - DNA, 120 bp, Artificial Sequence
  ENSG00000197580_15 (sequence is synthesized)
ggtaccttcatacccatctgatgggacaaccacaaggtctggaaactaggtttaaaataagtgtgcacttggacataaagactggagaaataaacactgaggactccaaaaggggggcaa

SEQ ID NO: 718344 - DNA, 120 bp, Artificial Sequence
  ENSG00000197580_16 (sequence is synthesized)
ggaggaagaggggcaggggttaaaaagctacctattgaatactatgttccctatttgggtgatgggttcgttagaagtccaaacctcagcagcacacaatatactcatgtaacaagcctg

SEQ ID NO: 718345 - DNA, 120 bp, Artificial Sequence
  ENSG00000197580_17 (sequence is synthesized)
cacatgtaccccagaatctaaaataaaaataaaaagaaaaacaaagaatgtactctatacaaaagacagagcataaagggcaccgtacctcccaaaccaatgtcccaaatagacatttag

SEQ ID NO: 718346 - DNA, 120 bp, Artificial Sequence
  ENSG00000197580_18 (sequence is synthesized)
tttaaaaatttctgttaaaaacagaattcactatttccttgccactgccaagtcacgccatggcagaggctcgagtgcatacaagcttcggttttacccttaatacaccatcatgaccaa

SEQ ID NO: 718347 - DNA, 120 bp, Artificial Sequence
  ENSG00000197580_19 (sequence is synthesized)
tggaggcattgctgctggaggtgtcatggccattaacactactttataagaggtgcggaagactgccctcactcatcatggcctagcatgtgcaatttgtgaagctgccaaagcgttaga

SEQ ID NO: 718348 - DNA, 120 bp, Artificial Sequence
  ENSG00000197580_20 (sequence is synthesized)
caagcaccaagcccacttttgtctgcctgcacccaactgcaatgagcctatgtatgtcaagttggtggagtcccatggtgctgaacaccaactcaccctaattaaggttgatgacaacaa

SEQ ID NO: 718349 - DNA, 120 bp, Artificial Sequence
  ENSG00000197580_21 (sequence is synthesized)
gaaaccagaggaatgggtaggcctctgtaaaactgagagggaaacccccgaaaagtggttggctgcagttgtgcagtagttaaggactaggtcaaagaatcttaagtcaaggatgtcatc

SEQ ID NO: 718350 - DNA, 120 bp, Artificial Sequence
  ENSG00000197580_22 (sequence is synthesized)
gaagagtatttcaaatgtaagaaatgaacaaataaaactttggcactcatgtttcttaagaaaaaacaccacaaagcagaattcataatataactatggttatagatatttattttttag

SEQ ID NO: 718351 - DNA, 120 bp, Artificial Sequence
  ENSG00000197580_23 (sequence is synthesized)
ggctcttacttgaaataattaagaaagtattgatacaaccttttgaagagggttttaaatttcatttattggatatatcttcctctaggtaataataagaatacacgaaataaaaattca

SEQ ID NO: 718352 - DNA, 120 bp, Artificial Sequence
  ENSG00000197580_24 (sequence is synthesized)
gcctctttcctgaaggttgctgggagcttctgaagctttgtgtcctgtgtggctcagatgagatagcaattccgcagagtcctggaagttaaagaaggctgagttaggattgtttcctca

SEQ ID NO: 718353 - DNA, 120 bp, Artificial Sequence
  ENSG00000197580_25 (sequence is synthesized)
tggtcagggaaacagccttcacatttgtatattttatgcaatatttaaggcaggattcagggacttggtattctttgggatttgcaataagaagaatattcaatatttaggcttttctaa

SEQ ID NO: 718354 - DNA, 120 bp, Artificial Sequence
  ENSG00000197580_26 (sequence is synthesized)
attgaaaaatcactgccacacgttctaatgtaattgtttggtttctctatttgcattttgcggggactgccttaaaactcatttatgttttatagccttctattatagttaccattgtta

SEQ ID NO: 718355 - DNA, 120 bp, Artificial Sequence
  ENSG00000197580_27 (sequence is synthesized)
catgattttatgtatagaaattggctgatctagagctttcagaaatcatactaatatgcactataaattttaaaattacttaatgtagtaatttaatgtttgcagtatgcaagggaatgt

SEQ ID NO: 718356 - DNA, 120 bp, Artificial Sequence
  ENSG00000197580_28 (sequence is synthesized)
attacgtactggaaggagagaggagacaaacaccagaccctgtactcaaggagtactggtagtatcatttatcatacaagacagataagataaggtccatatgagagctataaacagatg

SEQ ID NO: 718357 - DNA, 120 bp, Artificial Sequence
  ENSG00000197580_29 (sequence is synthesized)
ctgtgagttcagactaaggagaatcagttcttgctgtaggtaaggggaatgctgtgtttataaagcaaatgacatggcaactggatcttgaaggatgagttagttttcaaaaggtacatg

SEQ ID NO: 718358 - DNA, 120 bp, Artificial Sequence
  ENSG00000197580_30 (sequence is synthesized)
atcatatacagtgatgatttttctcatatagagtggagctgtcctctccagtacctggaacaatgccagccacatagtagatgcccaataaatatttagtgaaagagtgaatggaagcaa

SEQ ID NO: 718359 - DNA, 120 bp, Artificial Sequence
  ENSG00000197580_31 (sequence is synthesized)
gaggtgacatgattctgggaactgtgtgtagtttggttactcttgtgagtagatgtgaggaaacaagatcctttcactctcaatgtgtctacactggcagaagaattgctaatatgtgtt

SEQ ID NO: 718360 - DNA, 120 bp, Artificial Sequence
  ENSG00000197580_32 (sequence is synthesized)
taggggtgtctgtattcacactatgccaacccagagtaataaatgggtccatacatgcttgtggataagaatggctttagaatttcccttagtaaggatcattacacaacagtccaaagg

SEQ ID NO: 718361 - DNA, 120 bp, Artificial Sequence
  ENSG00000197580_33 (sequence is synthesized)
attacacaacagtccaaaggactgttgtcacgtggtcctatttgtgctctcaaattcttgctctttaaaaatttttttttaaagaaacggtattaatcctaagcaaaaagaacaaagctg

SEQ ID NO: 718362 - DNA, 82 bp, Artificial Sequence
  ENSG00000197580_34 (sequence is synthesized)
catcacgctacctgacttcgaactatactacaagcctacagtaacaaaaacagcatggtatgggtaccaaaacagatatata

SEQ ID NO: 718363 - DNA, 120 bp, Artificial Sequence
  ENSG00000197580_35 (sequence is synthesized)
agccttgattttggagaacaacttggatttcttggcatgggctggttctgtggaatatgcattaatatctgcttcctctgtgaggttaatatttccattccatccctttgattacagata

SEQ ID NO: 718364 - DNA, 120 bp, Artificial Sequence
  ENSG00000197580_36 (sequence is synthesized)
aagaaactgtagcctagaggagaagaaaggagactttttaaacaaaatgtcctgctttttctgctctgtagactattgtaaatttgaagccctctgtggtttgtaccaaaagaagagagg

SEQ ID NO: 718365 - DNA, 120 bp, Artificial Sequence
  ENSG00000197580_37 (sequence is synthesized)
tgtcagaagctgtcagtgtggtgactgagctgtttccccacaagttcctgaaggaagggcaatgtctcctcataccactctctccctcacccagcacttgccagacacatggtctttttc

SEQ ID NO: 718366 - DNA, 120 bp, Artificial Sequence
  ENSG00000197580_38 (sequence is synthesized)
ttgaaatactttttagagtagtatatatcaagaagaaattgaagccttaactacacaaaaagaaagttattcatgatgcaggtcacctttactctctggcctgatggcctctgggttggt

SEQ ID NO: 718367 - DNA, 120 bp, Artificial Sequence
  ENSG00000197580_39 (sequence is synthesized)
tttccttaaatataattctaaactccttccttagtcctaatatctgaaggctagggtaaaggagaaatagaagagtactgatctactttggctagttggggtgttcttcctagctatggt

SEQ ID NO: 718368 - DNA, 120 bp, Artificial Sequence
  ENSG00000197580_40 (sequence is synthesized)
tagtattggactggaggttgtctatacctgtatttccttcacataacatgttaattaaaaagaaaattttagactagatttttaattttaattcttatgcttcttttgaattttcctgtg

SEQ ID NO: 718369 - DNA, 120 bp, Artificial Sequence
  ENSG00000197580_41 (sequence is synthesized)
atattaggcaaatttattcagggtggttttgttgttagtagtggtgatgtgtttttgtttgttgttttaatcttgatttcttttttttagtgggaaaaataatttttatttctcagaggc

SEQ ID NO: 718370 - DNA, 120 bp, Artificial Sequence
  ENSG00000197580_42 (sequence is synthesized)
aagaaattagggcttacattgcagttttcttatcatatttttaaaaacattagatatttctactatttatgcatgtgaatagagatctgcccattaaaaatctccagtggtctcaaattt

SEQ ID NO: 718371 - DNA, 120 bp, Artificial Sequence
  ENSG00000197580_43 (sequence is synthesized)
tgtgcggtacaagggtgattactacctctgcactgagaccaactttatgaataaagtggacattgaaactctggaaaaaacagaaaagctccttccagggagatactacagcaaaccttt

SEQ ID NO: 718372 - DNA, 120 bp, Artificial Sequence
  ENSG00000197580_44 (sequence is synthesized)
cacacatccaaactacatcacagccaaattcatgcttggagtgacaaaagccatagaaagctccctacttactacttgccttttatcaaatgctttttttgggacttgcaggtttggaga

SEQ ID NO: 718373 - DNA, 120 bp, Artificial Sequence
  ENSG00000197580_45 (sequence is synthesized)
aagtagctcttaagattcttcagtatttaagcagctgagccattttcttttatttgagaactatgaaatcatctaagttaggggtatgttccttctagggaatccaaattgaccccaggc

SEQ ID NO: 718374 - DNA, 120 bp, Artificial Sequence
  ENSG00000197580_46 (sequence is synthesized)
ccagcaaaataattctatgtttgattttgatgttattttgggagcaattgtggggttagggttgttaggacacctatatttaaagttgatggcaaattatagttacacaaattgtgtttg

SEQ ID NO: 718375 - DNA, 120 bp, Artificial Sequence
  ENSG00000197580_47 (sequence is synthesized)
atggtgatggaatctgggactgcaaagactccctctctttctcccatattcaactcagtaggcctgattcttttacttttggaatattctattgacagcctgtgttagtctgttctgtgt

SEQ ID NO: 718376 - DNA, 90 bp, Artificial Sequence
  ENSG00000197580_48 (sequence is synthesized)
ggaatattctattgacagcctgtgttagtctgttctgtgttgttataaagaaatccccgaggctggataatttataaagaaaagaggcat

SEQ ID NO: 718377 - DNA, 120 bp, Artificial Sequence
  ENSG00000197580_49 (sequence is synthesized)
agataaaaagcaagctgagaacatgcaacccaagctattctaagcagttcccttttttataaaggaacaggaaatacgtatagtaaagctgggagacagtaaacatgtatttctggctgg

SEQ ID NO: 718378 - DNA, 120 bp, Artificial Sequence
  ENSG00000197580_50 (sequence is synthesized)
catttgtttagggcatcagtaacgtgtccaggcattcagacaagtccccataactggcacatttcagacaactctagtttgccaaataacatttttattgtttgctggaaccttttagga

SEQ ID NO: 718379 - DNA, 120 bp, Artificial Sequence
  ENSG00000197584_0 (sequence is synthesized)
tctaggtctttttgccattcctccaggacatccaccataaggaaaggagaccctggaccaacattctctaagatgtttatatggaccagtggccggacctcttcatcttatagacatgat

SEQ ID NO: 718380 - DNA, 120 bp, Artificial Sequence
  ENSG00000197584_1 (sequence is synthesized)
gaaaaaagaaatatttaccagaaaatcagggaccatgacctcctggacaaaaggaaaacagtcacagcactgaaggcaggagaggaccgagctattctcctgggactggctatgatggtg

SEQ ID NO: 718381 - DNA, 120 bp, Artificial Sequence
  ENSG00000197584_2 (sequence is synthesized)
tgctccatcatgatgtattttctgctgggaatcacactcctgcgctcatacatgcagagcgtgtggaccgaagagtctcaatgcaccttgctgaatgcgtccatcacggaaacatttaat

SEQ ID NO: 718382 - DNA, 120 bp, Artificial Sequence
  ENSG00000197584_3 (sequence is synthesized)
tgctccttcagctgtggtccagactgctggaaactttctcagtacccctgcctccaggtgtacgttaacctgacttcttccggggaaaagctcctcctctaccacacagaagagacaata

SEQ ID NO: 718383 - DNA, 120 bp, Artificial Sequence
  ENSG00000197584_4 (sequence is synthesized)
aaaatcaatcagaagtgctcctatatacctaaatgtggaaaaaattttgaagaatccatgtccctggtgaatgttgtcatggaaaacttcaggaagtatcaacacttctcctgctattct

SEQ ID NO: 718384 - DNA, 120 bp, Artificial Sequence
  ENSG00000197584_5 (sequence is synthesized)
gacccagaaggaaaccagaagagtgttatcctaacaaaactctacagttccaacgtgctgttccattcactcttctggccaacctgtatgatggctgggggtgtggcaattgttgccatg

SEQ ID NO: 718385 - DNA, 120 bp, Artificial Sequence
  ENSG00000197584_6 (sequence is synthesized)
gtgaaacttacacagtacctctccctactatgtgagaggatccaacggatcaatagataaatgcaaaaatggataaaataatttttgttaaagctcaaatactgttttctttcattcttc

SEQ ID NO: 718386 - DNA, 120 bp, Artificial Sequence
  ENSG00000197584_7 (sequence is synthesized)
accaaagaaccttaagtttgtaacgtgcagtctgttatgagttccctaatatattcttatatgtagagcaataatgcaaaagctgttctatatgcaaacatgatgtctttattattcagg

SEQ ID NO: 718387 - DNA, 120 bp, Artificial Sequence
  ENSG00000197584_8 (sequence is synthesized)
agaataaataactgttttgtgttggttggtggttttcataatcttatttctgtactggaactagtactttcttctctcattccgccaaaacagggctcagttattcatttgccaagcttc

SEQ ID NO: 718388 - DNA, 120 bp, Artificial Sequence
  ENSG00000197584_9 (sequence is synthesized)
tatttttttttcttattctaaactgagccctatagcaagtgaagggaccagatttcctaattaaaggaagttaggtacttttcttgtattttttaccatatcactgtaaagaagagggga

SEQ ID NO: 718389 - DNA, 120 bp, Artificial Sequence
  ENSG00000197584_10 (sequence is synthesized)
aacccagccagctactttttttcatcactttttattcataacttcagatttgtaaaactaatttccaaaatataagctgttttcattagccagttctataatatcttcctgtgatttatg

SEQ ID NO: 718390 - DNA, 120 bp, Artificial Sequence
  ENSG00000197584_11 (sequence is synthesized)
tagaaaatgaacacaccccttttccatttaagaccctgctactgtgtgaagagatgatacttacaaggagtgtcattacctgtgagctgactgaatgttggtaggtgctccattacaatc

SEQ ID NO: 718391 - DNA, 120 bp, Artificial Sequence
  ENSG00000197584_12 (sequence is synthesized)
caggaaagtctgtgttactgatatttgtgtggaaatctttatttcacttcaatttaaccattagatggtaaaattaagatgctacttgttggtaaaaattggtggactggtttcaatggg

SEQ ID NO: 718392 - DNA, 120 bp, Artificial Sequence
  ENSG00000197584_13 (sequence is synthesized)
taaatgtgttgtggcaaattaatgtgttggaatattgctctttgtgaatttgtgcttaagtcaatgaatgtgtagtatctccttctgacaagcattccctattgggattttaaagctatg

SEQ ID NO: 718393 - DNA, 120 bp, Artificial Sequence
  ENSG00000197584_14 (sequence is synthesized)
tgcacagaatattagtctcttctacatgttttatttttctatttataattcccttttttgttgttatattttatacacagaatagatcttttttctaacacatatttgaactgaataaca

SEQ ID NO: 718394 - DNA, 120 bp, Artificial Sequence
  ENSG00000197584_15 (sequence is synthesized)
gacttaaagaaagcctttgttcacattgctatttacttttgtgtttgggggaaaatacgagggattgattttaaataaaaaacattccatctttcatttaatatcaatatcaaaagaaga

SEQ ID NO: 718395 - DNA, 120 bp, Artificial Sequence
  ENSG00000197584_16 (sequence is synthesized)
agacaaacatctatctttctcatctatatttaagtacctttttgtaatgtagtatcaaagttttttaggtaatgcaaaattttacaaatcatttgtggaatgaatggtaaaactaatctg

SEQ ID NO: 718396 - DNA, 120 bp, Artificial Sequence
  ENSG00000197584_17 (sequence is synthesized)
atgaaatggaaaattattctgcaatattgtaattcatagtttgacttttcataagcaaataaatccctaggatgtaatcaggacttcaaatgtgtaattaaatttttttaaaaaaaatct

SEQ ID NO: 718397 - DNA, 120 bp, Artificial Sequence
  ENSG00000197584_18 (sequence is synthesized)
tatagttaaggaggatttggaaatctgatccagtgcagggcgatgtcggtctgggaaggaagactgtgagccctctctccctttttaatatgagaattcgaaagcagtggggaagtgatg

SEQ ID NO: 718398 - DNA, 120 bp, Artificial Sequence
  ENSG00000197584_19 (sequence is synthesized)
ttggacctatcacagcattgctaacagacagcctattacagtatttaataaaaacagaaacagcatgcctatcataggctaataaatcctacctcctgcacgctttaaaacagtatgaag

SEQ ID NO: 718399 - DNA, 120 bp, Artificial Sequence
  ENSG00000197584_20 (sequence is synthesized)
cagctttaacggagctccagataactaatttcaagcatggctgtctagcgtgcctgtcactcctattgtccttccaaactctttcagacattttgagcagggagtattaaagctatgagt

SEQ ID NO: 718400 - DNA, 120 bp, Artificial Sequence
  ENSG00000197584_21 (sequence is synthesized)
tagaaagggttgtgacattaatggtccacaaaggctttaggcacaagaggtaatgatgattaccggtggctatttggaggactgcaccggatcgctgtcattaaaaattaagcgtggctt

SEQ ID NO: 718401 - DNA, 120 bp, Artificial Sequence
  ENSG00000197584_22 (sequence is synthesized)
ctgtgcttcagtgggcttttcactacctttagttagttgcactaggctggttgctgtttaccttgcatggttgactgctctcttctcacattgtgtgccaggaagggcactgcaccttgg

SEQ ID NO: 718402 - DNA, 120 bp, Artificial Sequence
  ENSG00000197584_23 (sequence is synthesized)
tataaatgctgctgggcaccgttctgttttctttcttttcttaatcctatccaagtatgcagtacgctcttgggtcgtctcatgagacccaggggcatgttggaaagaactgagagaaag

SEQ ID NO: 718403 - DNA, 120 bp, Artificial Sequence
  ENSG00000197584_24 (sequence is synthesized)
tccatatttgtatgtgcatggcctcaaaaataatttgtttatgaattatgggctgacccccaatatcaaacttcaagaaactacataaaaggagctcaaaataaaattttactaggttga

SEQ ID NO: 718404 - DNA, 74 bp, Artificial Sequence
  ENSG00000197584_25 (sequence is synthesized)
ttatagacatgatgaaagtctgatcttgtgatccgcccgcctcggcatccgaaagtgctgggattacaggcatg

SEQ ID NO: 718405 - DNA, 120 bp, Artificial Sequence
  ENSG00000197586_0 (sequence is synthesized)
gcggagcccaggccctagggaatcgtggggtcgtatcccgcgggtggaggccggggtggcgccggccggggcgggggagcccaaaagaccggctgccgcctgctccccggaaaagggcac

SEQ ID NO: 718406 - DNA, 120 bp, Artificial Sequence
  ENSG00000197586_1 (sequence is synthesized)
tcgtctccgtgggtgtggcggagcgcgcggtgcatggaatgggctatgtgaatgaaaaaaggtatccgttatgaaacttccagaaaaacgagctacatttttcagcagccgcagcacggt

SEQ ID NO: 718407 - DNA, 120 bp, Artificial Sequence
  ENSG00000197586_2 (sequence is synthesized)
ccttggcaaacaaggatgagaaaaatatccaaccacgggagcctgcgggtggcgaaggtggcataccccctggggctgtgtgtgggcgtgttcatctatgttgcctacatcaagtggcac

SEQ ID NO: 718408 - DNA, 120 bp, Artificial Sequence
  ENSG00000197586_3 (sequence is synthesized)
cgggccaccgccacccaggccttcttcagcatcaccagggcagccccgggggcccggtggggtcagcaggcccacagccccctggggacagctgcagacgggcacgaggtcttctacggg

SEQ ID NO: 718409 - DNA, 120 bp, Artificial Sequence
  ENSG00000197586_4 (sequence is synthesized)
atcatgtttgatgcaggaagcactggcacccgagtacacgtcttccagttcacccggccccccagagaaactcccacgttaacccacgaaaccttcaaagcactgaagccaggtctttct

SEQ ID NO: 718410 - DNA, 120 bp, Artificial Sequence
  ENSG00000197586_5 (sequence is synthesized)
gcctatgctgatgatgttgaaaagagcgctcagggaatccgggaactactggatgttgctaaacaggacattccgttcgacttctggaaggccacccctctggtcctcaaggccacagct

SEQ ID NO: 718411 - DNA, 120 bp, Artificial Sequence
  ENSG00000197586_6 (sequence is synthesized)
ggcttacgcctgttacctggagaaaaggcccagaagttactgcagaaggtgaaaaaagtatttaaagcatcgcctttccttgtaggggatgactgtgtttccatcatgaacggaacagat

SEQ ID NO: 718412 - DNA, 120 bp, Artificial Sequence
  ENSG00000197586_7 (sequence is synthesized)
gaaggcgtttcggcgtggatcaccatcaacttcctgacaggcagcttgaaaactccaggagggagcagcgtgggcatgctggacttgggcggaggatccactcagatcgccttcctgcca

SEQ ID NO: 718413 - DNA, 120 bp, Artificial Sequence
  ENSG00000197586_8 (sequence is synthesized)
cgcgtggagggcaccctgcaggcctccccacccggctacctgacggcactgcggatgtttaacaggacctacaagctctattcctacagctacctcgggctcgggctgatgtcggcacgc

SEQ ID NO: 718414 - DNA, 120 bp, Artificial Sequence
  ENSG00000197586_9 (sequence is synthesized)
ctggcgatcctgggcggcgtggaggggcagcctgctaaggatggaaaggagttggtcagcccttgcttgtctcccagtttcaaaggagagtgggaacacgcagaagtcacgtacagggtt

SEQ ID NO: 718415 - DNA, 120 bp, Artificial Sequence
  ENSG00000197586_10 (sequence is synthesized)
tcagggcagaaagcagcggcaagcctgcacgagctgtgtgctgccagagtgtcagaggtccttcaaaacagagtgcacaggacggaggaagtgaagcatgtggacttctatgctttctcc

SEQ ID NO: 718416 - DNA, 120 bp, Artificial Sequence
  ENSG00000197586_11 (sequence is synthesized)
tactattacgaccttgcagctggtgtgggcctcatagatgcggagaagggaggcagcctggtggtgggggacttcgagatcgcagccaagtacgtgtgtcggaccctggagacacagccg

SEQ ID NO: 718417 - DNA, 120 bp, Artificial Sequence
  ENSG00000197586_12 (sequence is synthesized)
cagagcagccccttctcatgcatggacctcacctacgtcagcctgctactccaggagttcggctttcccaggagcaaagtgctgaagctcactcggaaaattgacaatgttgagaccagc

SEQ ID NO: 718418 - DNA, 120 bp, Artificial Sequence
  ENSG00000197586_13 (sequence is synthesized)
tgggctctgggggccatttttcattacatcgactccctgaacagacagaagagtccagcctcatagtggccgagccatccctgtccccgtcagcagtgtctgtgtgtctgcataaaccct

SEQ ID NO: 718419 - DNA, 120 bp, Artificial Sequence
  ENSG00000197586_14 (sequence is synthesized)
cctgtcctggacgtgacttcatcctgaggagccacagcacaggccgtgctggcactttctgcacactggctctgggacttgcagaaggcctggtgctgccctggcatcagcctcttccag

SEQ ID NO: 718420 - DNA, 120 bp, Artificial Sequence
  ENSG00000197586_15 (sequence is synthesized)
tcacatctggccagagggctgtctggacctgggccctgctcaatgccacctgtctgcctgggctccaagtgggcaggaccaggacagaaccacaggcacacactgagggggcagtgtggc

SEQ ID NO: 718421 - DNA, 120 bp, Artificial Sequence
  ENSG00000197586_16 (sequence is synthesized)
tccctgcctgtcccatccccatgccccgtccgcggggctgtggctgctgctgtgcatgtccctgcgatgggagtcttgtctcccagcctgtcagtttcctccccagggcagagctcccct

SEQ ID NO: 718422 - DNA, 120 bp, Artificial Sequence
  ENSG00000197586_17 (sequence is synthesized)
gcaggctgtcctggctgctctggggaagccgagggacagccataacacccccgggacagtaggtctgggcggcaccactgggaactctggacttgagtgtgtttgcctcttccttgggta

SEQ ID NO: 718423 - DNA, 120 bp, Artificial Sequence
  ENSG00000197586_18 (sequence is synthesized)
tgaatgtgtgagttcacccagaggcctgctctcctcacacattgtgtggtttggggttaatgatggagggagacacctcctcatagacggcaggtgcccacctttcagggagtctcccag

SEQ ID NO: 718424 - DNA, 120 bp, Artificial Sequence
  ENSG00000197586_19 (sequence is synthesized)
catgggcggatgccgggcatgagctgctgtaaactatttgtggctgtgctgcttgagtgacgtctctgtcgtgtgggtgccaagtgcttgtgtagaaactgtgttctgagcccccttttc

SEQ ID NO: 718425 - DNA, 120 bp, Artificial Sequence
  ENSG00000197586_20 (sequence is synthesized)
tggacaccaactgtgtcctgtgaatgtatcgctactgtgagctgttcccgcctagccagggccatgtcttaggtgcagctgtgccacgggtcagctgagccacagtcccagaaccaagct

SEQ ID NO: 718426 - DNA, 120 bp, Artificial Sequence
  ENSG00000197586_21 (sequence is synthesized)
ctcggtgtctcgggccaccatccgcccacctcgggctgaccccacctcctccatggacagtgtgagccccgggccgtgcatcctgctcagtgtggcgtcagtgtcggggctgagcccctt

SEQ ID NO: 718427 - DNA, 120 bp, Artificial Sequence
  ENSG00000197586_22 (sequence is synthesized)
gagctgcttcagtgaatgtacagtgcccggcacgagctgaacctcatgtgttccactcccaataaaaggttgacaggggcttctccttctctgggattcctctcgttgagcgacagtagc

SEQ ID NO: 718428 - DNA, 120 bp, Artificial Sequence
  ENSG00000197586_23 (sequence is synthesized)
atttgcccacctggcacctgagatccctgtttactaaaccttagaaaagctgccaaagggggtggcgtatttccagtcctgtcgacatccctctcgaggacacagcagtggagggcccct

SEQ ID NO: 718429 - DNA, 120 bp, Artificial Sequence
  ENSG00000197586_24 (sequence is synthesized)
gggggctggggctggtgaagggtctggctggtggccccggccctcccagcgtctgttgagcacagctcctcctgtgccaggccagcagcccacagcacggccaggtgaggcctgggcaca

SEQ ID NO: 718430 - DNA, 120 bp, Artificial Sequence
  ENSG00000197586_25 (sequence is synthesized)
taacctcgagtgagctgcaagtccccatgtcattctgttcagcaaggatctggttttggtctggaagcgtcccaaaggtgtcgcatgccagggaaactgcagaccagcccacatcccgag

SEQ ID NO: 718431 - DNA, 120 bp, Artificial Sequence
  ENSG00000197586_26 (sequence is synthesized)
tgcttgtgcctgaagccccccccaaccaactgtcacaggaggacaggatctggccctagggcctcccagggctgcagcgaatgctgatggagccacgtggtggaggcctgcacagagcag

SEQ ID NO: 718432 - DNA, 120 bp, Artificial Sequence
  ENSG00000197586_27 (sequence is synthesized)
gaaaggacaaaagacaaaaagaggaacagtttcctccctcccgcctgggctgggtccccaccagcgcctttacttccataatatccaccagcttaaatatttaaagaactccggaggctg

SEQ ID NO: 718433 - DNA, 120 bp, Artificial Sequence
  ENSG00000197586_28 (sequence is synthesized)
agaatcagacgcatgaaggtaaagccaaaatcaatttggtccatttaaagaaggtcggtgacctcatgcctgaaaaaggcaaacaactggaagttttccaaaagtgcaccaaataagtca

SEQ ID NO: 718434 - DNA, 120 bp, Artificial Sequence
  ENSG00000197586_29 (sequence is synthesized)
tggaatatttctgggcccggcaaagtatgcaagtcatttctctctgagtgtcttttgtgataatgaagtaggctctcatttgtcaaaaatagctacacgtgcacatcgtaaaagaagcaa

SEQ ID NO: 718435 - DNA, 120 bp, Artificial Sequence
  ENSG00000197586_30 (sequence is synthesized)
actagggttgcttgaaaattctgttccctcaggatgtgtgcattgacaagctcagacaggtctcacacgccccacatgccaccccagcccgcgtaccccacatcacttagcacccattgc

SEQ ID NO: 718436 - DNA, 120 bp, Artificial Sequence
  ENSG00000197586_31 (sequence is synthesized)
tgcccactgagctgcctcagtcctgcagtccccgtgtttggatggcaggatcccagggcagtgagtttcagggcataagcagacgttgccacgttgccttcaatcctactggacaagcat

SEQ ID NO: 718437 - DNA, 120 bp, Artificial Sequence
  ENSG00000197586_32 (sequence is synthesized)
cggtgctggcctcccccatgtcctaacagctacagccagtttaatctttgccattctggcagatttaaaaaaatgataactggtagttttaatatgcatggatctaattcatcgggtata

SEQ ID NO: 718438 - DNA, 120 bp, Artificial Sequence
  ENSG00000197586_33 (sequence is synthesized)
tctaagttgtatttccgtgaaacatctgttcatatcccttgccgattttctataagattgtcatcatttttttgttaattgtagatctttatttattaaggaaattatcccattatgata

SEQ ID NO: 718439 - DNA, 120 bp, Artificial Sequence
  ENSG00000197586_34 (sequence is synthesized)
acatgggatctaagacaggaggaggtttcaagaaactgcgcagatctgaagcagcagcaccccaggccgcacaagcagcacacaccggggccctctgtcagctgctgtgtttaatgaacg

SEQ ID NO: 718440 - DNA, 120 bp, Artificial Sequence
  ENSG00000197586_35 (sequence is synthesized)
gttggagcatgggtctgtggaccgtgggaaccctggaagcactcggaaggatggggcctggtggaggaggactgggaaagccgggaagctgggtcaaggtgtggggtgtagaggcgccct

SEQ ID NO: 718441 - DNA, 120 bp, Artificial Sequence
  ENSG00000197586_36 (sequence is synthesized)
cagatgtccacacggtccattggcctccggggtcctctgttcctgttctccctcaagccatgggagcttggcaacggcaagcctgcacgagctgtgtgctgccagagtgtcagaggtcct

SEQ ID NO: 718442 - DNA, 120 bp, Artificial Sequence
  ENSG00000197586_37 (sequence is synthesized)
actgcagggttgggttgtggggtgaccctctcagcccccaaacccaccccacaccacatcacccagaagccgtcctcagagcacgtgagtgccgcctacagctggagggcctgcctcaga

SEQ ID NO: 718443 - DNA, 120 bp, Artificial Sequence
  ENSG00000197586_38 (sequence is synthesized)
agccagtcagtgccttggggctcttgggctggcgttccccgtgccagcctcacgtctcagtggcatcgccaacctcacagtgctcctgcagactgggtgttgtgtctcccacagatgcgg

SEQ ID NO: 718444 - DNA, 120 bp, Artificial Sequence
  ENSG00000197586_39 (sequence is synthesized)
tgttcaaacgccattcccagactgggcactcggcatgaggggtgcatgccttcgcgaaccgttcaggtccttccaagtcaatcacccactggtgcgtgtaccggggggccgcatcaggca

SEQ ID NO: 718445 - DNA, 120 bp, Artificial Sequence
  ENSG00000197586_40 (sequence is synthesized)
cagcaggactgcacagctgtgtcccacaggaggagccagacagtgaagctcatcgggaaagccttccaagagaaataacacggggcggggatctgagagggcgatcgcagctgtaactag

SEQ ID NO: 718446 - DNA, 120 bp, Artificial Sequence
  ENSG00000197586_41 (sequence is synthesized)
ttcctgttctccctcaagccatgggagcttggcaagtgagctgggcctccacttccttatctatgacatagggagggtgcaggccccctgaggaggtgggactccgggctggcggagggg

SEQ ID NO: 718447 - DNA, 120 bp, Artificial Sequence
  ENSG00000197586_42 (sequence is synthesized)
gaatgtagggcagatggtcccaacaggccagaggccactggtgtcaggcatcagcagcttcctcctcagagtccaggtctgccgctgccttcgtgcccacggtcttcactccctgcgccg

SEQ ID NO: 718448 - DNA, 120 bp, Artificial Sequence
  ENSG00000197586_43 (sequence is synthesized)
ggaccaacaatgccctggctcctgagggctgcttttgacctgtgcggggagcagccccaacttggggtggggtcttacaggcttctggacctgccttttcctgacaattcaggtcagagt

SEQ ID NO: 718449 - DNA, 120 bp, Artificial Sequence
  ENSG00000197586_44 (sequence is synthesized)
atgtgtgggtccaaagagctcaaatttgtacatctttccagaaaaagtactacccttcccctcccccaaaagtggcttttttaaagcttttgtgtcattttcccatttgtgcccatggac

SEQ ID NO: 718450 - DNA, 120 bp, Artificial Sequence
  ENSG00000197586_45 (sequence is synthesized)
actgggtatccacaactacagcaggaaaaggctttgagcagaatcccaggacagctcttggtggatttgtccttcctcaagagcaggagtggattgttctgagctggctttggtgttttc

SEQ ID NO: 718451 - DNA, 120 bp, Artificial Sequence
  ENSG00000197586_46 (sequence is synthesized)
tttccccagaaagcttaggttttatgcagcttgacacctgggagaggtgtccagggtcttagatgtagaaatgtggcttgggagacattggcccatgaccctaacaccaggcgtgcaaat

SEQ ID NO: 718452 - DNA, 120 bp, Artificial Sequence
  ENSG00000197586_47 (sequence is synthesized)
ccccttggagcccagacccagtggcagccggggttgccgcccacctgcctgtgctgtgcactgggtgccttctgcgctcagctgcggccttgtctgtgaatccggagtgcggagccagcg

SEQ ID NO: 718453 - DNA, 120 bp, Artificial Sequence
  ENSG00000197586_48 (sequence is synthesized)
ggtgcctgtagtgggtggaattggggtctgcacttgcccctccgcccccaggtgggagtcacctggagcgtgaagggacgtgtctcatccccagtgtgtcggaccctggagacacagccg

SEQ ID NO: 718454 - DNA, 120 bp, Artificial Sequence
  ENSG00000197586_49 (sequence is synthesized)
ctggccctgactctcctgggtgtagcccctcctaaacaatggccacaggcaggggcctcggccccagctgagaaaggaccaccgtccttgtcccaccctcatggggtcgtgaggaactgg

SEQ ID NO: 718455 - DNA, 120 bp, Artificial Sequence
  ENSG00000197586_50 (sequence is synthesized)
gtccctcgattccacttcctcagatgccattttactgctactagggtaaccccaagagtgatttcccctgggatgtcccagtaagttcatgattgtcacacaacccttaagaagccaagg

SEQ ID NO: 718456 - DNA, 120 bp, Artificial Sequence
  ENSG00000197586_51 (sequence is synthesized)
ccctacagaatggagcctgggatgtggggtggagggctgtccccggggtcgcaggtgaccagcccagcagaccctgtgccacacactatgcctctccactgtctccttcacgcctggccc

SEQ ID NO: 718457 - DNA, 120 bp, Artificial Sequence
  ENSG00000197586_52 (sequence is synthesized)
agcagccaagccttggtgaacatgtcctgctcttggttgcccttcccaatgtgtgggtccaaagagctcaaatttgtacatctttccagaaaaagtactacccttcccctcccccaaaag

SEQ ID NO: 718458 - DNA, 120 bp, Artificial Sequence
  ENSG00000197586_53 (sequence is synthesized)
ccaaaagaccggctgccgcctgctccccggaaaagggcactcgtctccgtgggtgtggcggagcgcgcggtgcatgcccgcttttgcggacccgcccccagtctgcgtcagggacagacc

SEQ ID NO: 718459 - DNA, 120 bp, Artificial Sequence
  ENSG00000197586_54 (sequence is synthesized)
cctccgccctggatgagcccggcggggaagcttcgcgtagcagtttctgggaaacagcgtgcatggcaggcatttgcattcatgacccttccgtgtacttgaactgaaaacctgaagaaa

SEQ ID NO: 718460 - DNA, 120 bp, Artificial Sequence
  ENSG00000197586_55 (sequence is synthesized)
ctggccaacagattaggcagccatcaatccacatcagatggcccctgtatttccaagaggaatgggctatgtgaatgaaaaaaggtatccgttatgaaacttccagaaaaacgagctaca

SEQ ID NO: 718461 - DNA, 120 bp, Artificial Sequence
  ENSG00000197587_0 (sequence is synthesized)
aggcggatgccgccatgcagcactacggggtgaacggctactcactgcacgccatgaactcactcagcgccatgtacaacctgcaccagcaggcagcccagcaggcccagcatgcccccg

SEQ ID NO: 718462 - DNA, 120 bp, Artificial Sequence
  ENSG00000197587_1 (sequence is synthesized)
actaccggccttcagtgcatgcgcttacattggctgagcgcctggctgacatcatcttggaggcccgttatggttcccagcaccgcaaacaacgtcgcagccgcacagcgttcacggctc

SEQ ID NO: 718463 - DNA, 120 bp, Artificial Sequence
  ENSG00000197587_2 (sequence is synthesized)
agcagctcgaggccctggaaaagaccttccagaagactcactacccagatgtggtgatgcgtgagaggctggccatgtgcaccaacctgcctgaggcccgggtgcaggtgtggttcaaga

SEQ ID NO: 718464 - DNA, 120 bp, Artificial Sequence
  ENSG00000197587_3 (sequence is synthesized)
accgccgggccaagttccggaagaagcagcgtagcctgcagaaggaacagctccagaagcagaaggaggctgagggctcccatggggaaggcaaggccgaggcccccactccagataccc

SEQ ID NO: 718465 - DNA, 120 bp, Artificial Sequence
  ENSG00000197587_4 (sequence is synthesized)
agctggacactgagcagcccccacgtctgcctggcagcgacccccctgctgagcttcacctgagtctgtctgagcagtcagccagtgagtcagcccccgaggatcagccggaccgtgagg

SEQ ID NO: 718466 - DNA, 120 bp, Artificial Sequence
  ENSG00000197587_5 (sequence is synthesized)
aggaccccagggcaggggctgaggaccccaaagctgagaagagccctggggctgacagcaaggggctgggctgcaagaggggcagccccaaggcagattccccaggcagcctgaccatca

SEQ ID NO: 718467 - DNA, 120 bp, Artificial Sequence
  ENSG00000197587_6 (sequence is synthesized)
ctcctgtggccccagggggtggcctcctgggcccctcccactcctattcctcgtccccgctgagcctcttccgtctgcaggagcaattccgccagcacatggcggccaccaacaacctgg

SEQ ID NO: 718468 - DNA, 120 bp, Artificial Sequence
  ENSG00000197587_7 (sequence is synthesized)
tgcactactcgtccttcgaagtagggggtccggcccctgctgctgcagcggcggctgctgctgtgccctacctgggcgtcaacatggccccgctgggctcactgcactgccagtcctact

SEQ ID NO: 718469 - DNA, 120 bp, Artificial Sequence
  ENSG00000197587_8 (sequence is synthesized)
accagtccctgtcagcagccgctgctgcccaccagggtgtgtgggggtctcctctgctgcctgcacccccagcaggcctggctcctgcatcagctaccctgaacagtaaaaccacaagca

SEQ ID NO: 718470 - DNA, 120 bp, Artificial Sequence
  ENSG00000197587_9 (sequence is synthesized)
tcgagaacctgcggctccgggccaagcagcacgcggcctccctgggactcgatacgctgcccaactgactgtctggcttccaacccagccaggggtcttaggtgtcccctcctagccctg

SEQ ID NO: 718471 - DNA, 120 bp, Artificial Sequence
  ENSG00000197587_10 (sequence is synthesized)
tggttatccctaggtggctctcgaggagttaactccatgagcccagggatcctagggcctggggtcctgttccctgctccgcttccccataccccagcccgaggtgaagcccacacctac

SEQ ID NO: 718472 - DNA, 120 bp, Artificial Sequence
  ENSG00000197587_11 (sequence is synthesized)
acaccctctgcatggccctgcctggaccccatggaggccgaatagggaggaggtgagaggctggggtgccccaagcttccctcggagaagtgagaggctctccctggctagatcctcatc

SEQ ID NO: 718473 - DNA, 120 bp, Artificial Sequence
  ENSG00000197587_12 (sequence is synthesized)
tcaatagcacctcctcccttttctccctatccttctgccccctagtaagtctacgtgtggaatgtgagatataaatataaatatataaagctatattttcaggctcctgcctgccccagg

SEQ ID NO: 718474 - DNA, 120 bp, Artificial Sequence
  ENSG00000197587_13 (sequence is synthesized)
ccccctgccccactcccatctcttcttccctgccacccctccctgcagcctccgcggctcactccagccatcccttctgtttctccttctctctccttccttcttcccttgatctccctc

SEQ ID NO: 718475 - DNA, 120 bp, Artificial Sequence
  ENSG00000197587_14 (sequence is synthesized)
ttcctgtctctgtcctggtccctgcccccgtctcggcccagcctctgtattctccacccttgatctttctccttgtctctcccgctgcccctggtttcttcctttggtgttggctgtgtt

SEQ ID NO: 718476 - DNA, 120 bp, Artificial Sequence
  ENSG00000197587_15 (sequence is synthesized)
ggtatcatcagttcttgagctatattttgtttggggttgtggctggttttggttttagtaattttgcgacttcccgttgctctccttctattcccttccttctgccctgcctgcctccct

SEQ ID NO: 718477 - DNA, 120 bp, Artificial Sequence
  ENSG00000197587_16 (sequence is synthesized)
gcacctgcggcctctctaggaagctgttcctttctatgcccaatagaagcaacaaggccctagctggagactctggggatctggagctgcaggcaggaggtggcactggctcccactccc

SEQ ID NO: 718478 - DNA, 120 bp, Artificial Sequence
  ENSG00000197587_17 (sequence is synthesized)
acccctgcccaggctggcatctagaaggcgtcatgaattactttctcttctctcttctcaattttgaggtcctcattcccaagattgaggaggcagtagttaatctgggaaggcagtaga

SEQ ID NO: 718479 - DNA, 120 bp, Artificial Sequence
  ENSG00000197587_18 (sequence is synthesized)
atggccagcattcctgcctgtaagtcttcccaagacagaggcccggtgacacagttcagccaggactgaccacagggctctagagctctctttggtgagacttccctggatggagagcag

SEQ ID NO: 718480 - DNA, 120 bp, Artificial Sequence
  ENSG00000197587_19 (sequence is synthesized)
cagcaggggaagaggtgctctcagagacagcagggctggtgctcttctcccacaagctgagcctccacgttcagcagatactgtccaaggcaggggtacggctgaccaggaatgaaggtt

SEQ ID NO: 718481 - DNA, 120 bp, Artificial Sequence
  ENSG00000197587_20 (sequence is synthesized)
gaactctgctcctgagcacggtgcgtgcaaagcatatagcagcacataggctcaggcttctgtaggcttcctgtcccagagccaattatggaagtaagggcttccctccagctagtcact

SEQ ID NO: 718482 - DNA, 120 bp, Artificial Sequence
  ENSG00000197587_21 (sequence is synthesized)
cttccctccagctagtcactggaatggaaaagtgtgttcctgttcatagccaggaaacccagctcagcaaactccctttcaaagctgtgtgaccggctgggcatggtggctcacacctgt

SEQ ID NO: 718483 - DNA, 120 bp, Artificial Sequence
  ENSG00000197591_0 (sequence is synthesized)
atggagccccaaaatacctccactgtgactaactttcagctgttaggattccagaaccttcttgaatggcaggccctgctctttgtcattttcctgctcatctactgcctgaccattata

SEQ ID NO: 718484 - DNA, 120 bp, Artificial Sequence
  ENSG00000197591_1 (sequence is synthesized)
gggaatgttgtcatcatcaccgtggtgagccagggcctgcgactgcactcccctatgtacatgttcctccagcatctctcctttctggaggtctggtacacgtccaccactgtgcccctt

SEQ ID NO: 718485 - DNA, 120 bp, Artificial Sequence
  ENSG00000197591_2 (sequence is synthesized)
ctcctagccaacctgctgtcctggggccaagccatctccttctctgcctgcatggcacagctctacttcttcgtattcctcggcgccaccgagtgctttctcctggccttcatggcctat

SEQ ID NO: 718486 - DNA, 120 bp, Artificial Sequence
  ENSG00000197591_3 (sequence is synthesized)
gaccgttacctggccatctgcagcccactccgctaccccttcctcatgcatcgtgggctctgtgccaggttggtggtggtctcctggtgcacaggggtcagcacaggctttctgccttcc

SEQ ID NO: 718487 - DNA, 120 bp, Artificial Sequence
  ENSG00000197591_4 (sequence is synthesized)
tccaggttggacttctgtgggcgcaatcagattaaccatttcttctgcgacctcccgccactcatgcagctctcctgttccagagtttatatcaccgaggtgaccatcttcatcctgtca

SEQ ID NO: 718488 - DNA, 120 bp, Artificial Sequence
  ENSG00000197591_5 (sequence is synthesized)
attgccgtgctgtgcatttgtttttttctgacactggggccctatgttttcattgtgtcctccatattgagaatcccttccacctctggccggagaaagaccttttccacatgtggctcc

SEQ ID NO: 718489 - DNA, 120 bp, Artificial Sequence
  ENSG00000197591_6 (sequence is synthesized)
cacctggctgttgtcactctctactacgggaccatgatctccatgtatgtgtgtcccagtccccacctgttgcctgaaatcaacaagatcatttctgtcttctacactgtggtcacacca

SEQ ID NO: 718490 - DNA, 120 bp, Artificial Sequence
  ENSG00000197591_7 (sequence is synthesized)
ctgctgaacccagttatctacagcttgaggaacaaagacttcaaagaagctgttagaaaggtcatgagaaggaaatgtggtattctatggagtacaagtaaaaggaagttcctttattag

SEQ ID NO: 718491 - DNA, 120 bp, Artificial Sequence
  ENSG00000197594_0 (sequence is synthesized)
cgctgccgaggcgcccggggacccgcaggcggccgcgtccttgctggcccctatggacgtgggggaggagccgctggagaaggcggcgcgcgcccgcactgccaaggaccccaacaccta

SEQ ID NO: 718492 - DNA, 120 bp, Artificial Sequence
  ENSG00000197594_1 (sequence is synthesized)
taaagtactctcgctggtattgtcagtatgtgtgttaacaacaatacttggttgtatatttgggttgaaaccaagctgtgccaaagaagttaaaagttgcaaaggtcgctgtttcgagag

SEQ ID NO: 718493 - DNA, 120 bp, Artificial Sequence
  ENSG00000197594_2 (sequence is synthesized)
aacatttgggaactgtcgctgtgatgctgcctgtgttgagcttggaaactgctgtttagattaccaggagacgtgcatagaaccagaacatatatggacttgcaacaaattcaggtgtgg

SEQ ID NO: 718494 - DNA, 120 bp, Artificial Sequence
  ENSG00000197594_3 (sequence is synthesized)
tgagaaaaggttgaccagaagcctctgtgcctgttcagatgactgcaaggacaagggcgactgctgcatcaactacagttctgtgtgtcaaggtgagaaaagttgggtagaagaaccatg

SEQ ID NO: 718495 - DNA, 120 bp, Artificial Sequence
  ENSG00000197594_4 (sequence is synthesized)
tgagagcattaatgagccacagtgcccagcagggtttgaaacgcctcctaccctcttattttctttggatggattcagggcagaatatttacacacttggggtggacttcttcctgttat

SEQ ID NO: 718496 - DNA, 120 bp, Artificial Sequence
  ENSG00000197594_5 (sequence is synthesized)
tagcaaactaaaaaaatgtggaacatatactaaaaacatgagaccggtatatccaacaaaaactttccccaatcactacagcattgtcaccggattgtatccagaatctcatggcataat

SEQ ID NO: 718497 - DNA, 120 bp, Artificial Sequence
  ENSG00000197594_6 (sequence is synthesized)
cgacaataaaatgtatgatcccaaaatgaatgcttccttttcacttaaaagtaaagagaaatttaatcctgagtggtacaaaggagaaccaatttgggtcacagctaagtatcaaggcct

SEQ ID NO: 718498 - DNA, 120 bp, Artificial Sequence
  ENSG00000197594_7 (sequence is synthesized)
caagtctggcacatttttctggccaggatcagatgtggaaattaacggaattttcccagacatctataaaatgtataatggttcagtaccatttgaagaaaggattttagctgttcttca

SEQ ID NO: 718499 - DNA, 120 bp, Artificial Sequence
  ENSG00000197594_8 (sequence is synthesized)
gtggctacagcttcctaaagatgaaagaccacacttttacactctgtatttagaagaaccagattcttcaggtcattcatatggaccagtcagcagtgaagtcatcaaagccttgcagag

SEQ ID NO: 718500 - DNA, 120 bp, Artificial Sequence
  ENSG00000197594_9 (sequence is synthesized)
ggttgatggtatggttggtatgctgatggatggtctgaaagagctgaacttgcacagatgcctgaacctcatccttatttcagatcatggcatggaacaaggcagttgtaagaaatacat

SEQ ID NO: 718501 - DNA, 120 bp, Artificial Sequence
  ENSG00000197594_10 (sequence is synthesized)
atatctgaataaatatttgggggatgttaaaaatattaaagttatctatggacctgcagctcgattgagaccctctgatgtcccagataaatactattcatttaactatgaaggcattgc

SEQ ID NO: 718502 - DNA, 120 bp, Artificial Sequence
  ENSG00000197594_11 (sequence is synthesized)
ccgaaatctttcttgccgggaaccaaaccagcacttcaaaccttacctgaaacatttcttacctaagcgtttgcactttgctaagagtgatagaattgagcccttgacattctatttgga

SEQ ID NO: 718503 - DNA, 120 bp, Artificial Sequence
  ENSG00000197594_12 (sequence is synthesized)
ccctcagtggcaacttgcattgaatccctcagaaaggaaatattgtggaagtggatttcatggctctgacaatgtattttcaaatatgcaagccctctttgttggctatggacctggatt

SEQ ID NO: 718504 - DNA, 120 bp, Artificial Sequence
  ENSG00000197594_13 (sequence is synthesized)
caagcatggcattgaggctgacacctttgaaaacattgaagtctataacttaatgtgtgatttactgaatttgacaccggctcctaataacggaactcatggaagtcttaaccaccttct

SEQ ID NO: 718505 - DNA, 120 bp, Artificial Sequence
  ENSG00000197594_14 (sequence is synthesized)
aaagaatcctgtttatacgccaaagcatcccaaagaagtgcaccccctggtacagtgccccttcacaagaaaccccagagataaccttggctgctcatgtaacccttcgattttgccgat

SEQ ID NO: 718506 - DNA, 120 bp, Artificial Sequence
  ENSG00000197594_15 (sequence is synthesized)
tgaggattttcaaacacagttcaatctgactgtggcagaagagaagattattaagcatgaaactttaccctatggaagacctagagttctccagaaggaaaacaccatctgtcttctttc

SEQ ID NO: 718507 - DNA, 120 bp, Artificial Sequence
  ENSG00000197594_16 (sequence is synthesized)
ccagcaccagtttatgagtggatacagccaagacatcttaatgcccctttggacatcctataccgtggacagaaatgacagtttctctacggaagacttctccaactgtctgtaccagga

SEQ ID NO: 718508 - DNA, 120 bp, Artificial Sequence
  ENSG00000197594_17 (sequence is synthesized)
ctttagaattcctcttagtcctgtccataaatgttcattttataaaaataacaccaaagtgagttacgggttcctctccccaccacaactaaataaaaattcaagtggaatatattctga

SEQ ID NO: 718509 - DNA, 120 bp, Artificial Sequence
  ENSG00000197594_18 (sequence is synthesized)
agctttgcttactacaaatatagtgccaatgtaccagagttttcaagttatatggcgctactttcatgacaccctactgcgaaagtatgctgaagaaagaaatggtgtcaatgtcgtcag

SEQ ID NO: 718510 - DNA, 120 bp, Artificial Sequence
  ENSG00000197594_19 (sequence is synthesized)
tggtcctgtgtttgactttgattatgatggacgttgtgattccttagagaatctgaggcaaaaaagaagagtcatccgtaaccaagaaattttgattccaactcacttctttattgtgct

SEQ ID NO: 718511 - DNA, 120 bp, Artificial Sequence
  ENSG00000197594_20 (sequence is synthesized)
aacaagctgtaaagatacatctcagacgcctttgcactgtgaaaacctagacaccttagctttcattttgcctcacaggactgataacagcgagagctgtgtgcatgggaagcatgactc

SEQ ID NO: 718512 - DNA, 120 bp, Artificial Sequence
  ENSG00000197594_21 (sequence is synthesized)
ctcatgggttgaagaattgttaatgttacacagagcacggatcacagatgttgagcacatcactggactcagcttctatcaacaaagaaaagagccagtttcagacattttaaagttgaa

SEQ ID NO: 718513 - DNA, 120 bp, Artificial Sequence
  ENSG00000197594_22 (sequence is synthesized)
aacacatttgccaacctttagccaagaagactgatatgttttttatccccaaacaccatgaatctttttgagagaaccttatattttatatagtcctctagctacactattgcattgttc

SEQ ID NO: 718514 - DNA, 120 bp, Artificial Sequence
  ENSG00000197594_23 (sequence is synthesized)
agaaactgtcgaccagagttagaacggagccctcggtgatgcggacatctcagggaaacttgcgtactcagcacagcagtggagagtgttcctgttgaatcttgcacatatttgaatgtg

SEQ ID NO: 718515 - DNA, 120 bp, Artificial Sequence
  ENSG00000197594_24 (sequence is synthesized)
taagcattgtatacattgatcaagttcgggggaataaagacagaccacacctaaaactgcctttctgcttctcttaaaggagaagtagctgtgaacattgtctggataccagatatttga

SEQ ID NO: 718516 - DNA, 120 bp, Artificial Sequence
  ENSG00000197594_25 (sequence is synthesized)
atctttcttactattggtaataaaccttgatggcattgggcaaacagtagacttatagtagggttggggtagcccatgttatgtgactatctttatgagaattttaaagtggttctggat

SEQ ID NO: 718517 - DNA, 120 bp, Artificial Sequence
  ENSG00000197594_26 (sequence is synthesized)
atcttttaacttggagtttcatttcttttcattgtaatcaaaaaaaaaattaacagaagccaaaatacttctgagaccttgtttcaatctttgctgtatatcccctcaaaatccaagtta

SEQ ID NO: 718518 - DNA, 120 bp, Artificial Sequence
  ENSG00000197594_27 (sequence is synthesized)
ttaatcttatgtgttttctttttaattttttgattggatttctttagatttaatggttcaaatgagttcaactttgagggacgatctttgaatatacttacctattataaaatcttactt

SEQ ID NO: 718519 - DNA, 120 bp, Artificial Sequence
  ENSG00000197594_28 (sequence is synthesized)
tgtatttgtatttaaaaaagaaaaatattcctatcctgctcactggtaattaacataggtttaaaatggcttcaaatgtggccctatagacggttaaaattgtaccttatcttggcaaaa

SEQ ID NO: 718520 - DNA, 120 bp, Artificial Sequence
  ENSG00000197594_29 (sequence is synthesized)
cattttgaagttccacagattgaagagaacatgccaccaatcacctcacatcttcttggtggacatgataaatgacacaatgaacttgatttctttactaccttgactgtagctttttat

SEQ ID NO: 718521 - DNA, 120 bp, Artificial Sequence
  ENSG00000197594_30 (sequence is synthesized)
ccctacctgtgaaccttcaaagactgcattaacttttaggctacataggtccaattgaggtataatatcagtacaccaaagatttttatatgtccttcgtgtgaccattcttcaacggcc

SEQ ID NO: 718522 - DNA, 120 bp, Artificial Sequence
  ENSG00000197594_31 (sequence is synthesized)
taagggccagctgcaaagacttttggaaaatacaatttacaactcaaaattatttaataatttaggaagttgctttttttttttttttttttcagtcctgcagtttcctgaagctctgta

SEQ ID NO: 718523 - DNA, 120 bp, Artificial Sequence
  ENSG00000197594_32 (sequence is synthesized)
tatgatatttttttcagcctgcttctctctgttgttcagattaggtaattttattcttctgtctcgaagctcactgattctttattctgtctaatctgttctgctgttgagcccatttat

SEQ ID NO: 718524 - DNA, 120 bp, Artificial Sequence
  ENSG00000197594_33 (sequence is synthesized)
tcctgatttttatattttagttattgtatgttttatttctaaaatttccattcagtttttctttatatcttctatttgctgagaatttctgtctctttgctgagactttctacgttttca

SEQ ID NO: 718525 - DNA, 120 bp, Artificial Sequence
  ENSG00000197594_34 (sequence is synthesized)
tttgtttcaagtgcatttatacttgcttgttgaagaatttttatgatggctgctgtaaaatccttatcagataattccaacatctgtcacctcattgtttgcatctactgatggtctttt

SEQ ID NO: 718526 - DNA, 120 bp, Artificial Sequence
  ENSG00000197594_35 (sequence is synthesized)
ttccattcggaaacattttcctgtttcttggtgtgtggaatgattttttattgaaacctggatatttttaggtattatgttatgagactatgggtcttatttaaaccttctgctttagcc

SEQ ID NO: 718527 - DNA, 120 bp, Artificial Sequence
  ENSG00000197594_36 (sequence is synthesized)
aactttctcagataccaccacagcaggggaattgggagcactgcttcattattaccaggtgtggctaggagtccaggttccccagtcagcctccctttatactgagtaacagggtcccct

SEQ ID NO: 718528 - DNA, 120 bp, Artificial Sequence
  ENSG00000197594_37 (sequence is synthesized)
cattactactgggcaaggtgagaattcagtttcccattaggtctttattgattcttccctggctggaatgtgcagcggcaccttttggtgcaccctgggaatctccactaatgctatggg

SEQ ID NO: 718529 - DNA, 120 bp, Artificial Sequence
  ENSG00000197594_38 (sequence is synthesized)
acagagtgaccaggaagagcttcattacaccaggtgggaatgaaattcccagtagcctacacagccttctccgacaccactctggagttgtattcttccagcacacaaacatacacaatt

SEQ ID NO: 718530 - DNA, 120 bp, Artificial Sequence
  ENSG00000197594_39 (sequence is synthesized)
taactcaaagcatcttagcagagcttaattaaatggatagatgcctgttccctttgctggataccaagaatacaaaagtcagggagttggggcacctctttacagcttggtgagagtgta

SEQ ID NO: 718531 - DNA, 120 bp, Artificial Sequence
  ENSG00000197594_40 (sequence is synthesized)
agtctggactccccactcagcatttgctggtatgggtggggccatggtgtttttccatggtgtttggttggagtacagccttttttacccttgcttggctacccttttctggtcctttgg

SEQ ID NO: 718532 - DNA, 120 bp, Artificial Sequence
  ENSG00000197594_41 (sequence is synthesized)
caggagagagcaggactctcttagggcttttttttcccctgcatttattgacatttccaggttgctgactttttcagctccaagttggaaatatatgagctgaaaagaaaatgtagggaa

SEQ ID NO: 718533 - DNA, 120 bp, Artificial Sequence
  ENSG00000197594_42 (sequence is synthesized)
ctcatcacagtgttgttacttgggccccaatgttcctagcctattttctgtctactattcagagtcttgctgtgttttaatataatatccaggatttttatatgcatttagcagaaggat

SEQ ID NO: 718534 - DNA, 120 bp, Artificial Sequence
  ENSG00000197594_43 (sequence is synthesized)
gtctactctgcctttgtagaagtgtctcactgatttttacatatttttccagcacacaaacatacacaatttaactcaaagcatcttagcagagcttaattaaatggatagatgtctgtt

SEQ ID NO: 718535 - DNA, 120 bp, Artificial Sequence
  ENSG00000197594_44 (sequence is synthesized)
ccctttgctggacgccaagaatacaaaaaagaacaagtgacaattttctctgtcttagggagaagagacagcagaagtgtaaatgatccctaaagagtgatagatgttatcatgaagcca

SEQ ID NO: 718536 - DNA, 120 bp, Artificial Sequence
  ENSG00000197594_45 (sequence is synthesized)
caggaggggtgccaggctgcacaaaagagacactggatgcttcttggtagtagaggcagtggcttcccagccttggggctaaggcttgtagggtgaattggaacttttcagatgagcaag

SEQ ID NO: 718537 - DNA, 120 bp, Artificial Sequence
  ENSG00000197594_46 (sequence is synthesized)
gcaaagaagggaccttctaacattccttggatggaacatttttgacattttcccatttacagctacttatattttctacaagtgtcactgtgaccaacttatgtacacatactttttctt

SEQ ID NO: 718538 - DNA, 120 bp, Artificial Sequence
  ENSG00000197594_47 (sequence is synthesized)
gcttagttataataatctgttcttaaagaaaatgtcagtctctacattctatgctgactgttaaggaaagagcacccacatctgctcctacttagctttttttctgtggttcttacacag

SEQ ID NO: 718539 - DNA, 120 bp, Artificial Sequence
  ENSG00000197594_48 (sequence is synthesized)
tattcctttttttcttttcttgaaagagactcctcctttcttttcttttcttgaaagagttttaaacagataagatggcaaaagtgactgatctctactcccccagtttgaatggtaaat

SEQ ID NO: 718540 - DNA, 120 bp, Artificial Sequence
  ENSG00000197594_49 (sequence is synthesized)
ttgaatggtaaattcccatgaacatatatggaaatgtctttatcctactttctccaataaaggctgttcttagcttttcaaatgcaaagtgaaacctttatttatcttgatttctttttt

SEQ ID NO: 718541 - DNA, 75 bp, Artificial Sequence
  ENSG00000197594_50 (sequence is synthesized)
agtgctgggattacaggctcgagccactgcctccagcctatcctgatttctactgtcatgcctcacatcagtcag

SEQ ID NO: 718542 - DNA, 120 bp, Artificial Sequence
  ENSG00000197594_51 (sequence is synthesized)
catgccacacctggctttttgtattttagtggagatggggtttcactgtgttgctcaggctggtcttgatctcctgagctcagacaatccccccgccttggcctcccaaagtgctaggat

SEQ ID NO: 718543 - DNA, 120 bp, Artificial Sequence
  ENSG00000197594_52 (sequence is synthesized)
ggcgagagctgctgtgtgcttcttaagtgaggtaagtaacttccatagaaaatttccatcagttcattcatgaaagaacaaagaacctggcaaaacttaaaaaaacgtttccaagaatca

SEQ ID NO: 718544 - DNA, 120 bp, Artificial Sequence
  ENSG00000197594_53 (sequence is synthesized)
gataaaagaggacaaaccttagggagaagaaggcagctgctcatttccagcaggggaagtagctgcatagagtacaaggactggtaggcctgttggctgttcctgtttaaggagacaaga

SEQ ID NO: 718545 - DNA, 120 bp, Artificial Sequence
  ENSG00000197594_54 (sequence is synthesized)
tgggcatggaacagggaccaccccctcctctgggagaagctgttacccccttcacttttcctcctctgtcattacccacaatcactctccttctttgcgctatggtaggtgtttacccat

SEQ ID NO: 718546 - DNA, 120 bp, Artificial Sequence
  ENSG00000197594_55 (sequence is synthesized)
cataggaatgggcatttgaactttgaaactgaatgtggtgattacacttcatgctgaagcttttcacatgagtgctttcataagcattaagtaaaattttataatgactgcagtccaagg

SEQ ID NO: 718547 - DNA, 120 bp, Artificial Sequence
  ENSG00000197594_56 (sequence is synthesized)
acattttccctggtttttggccagtctaaatattgtaagagagagagaagaaaagtgtacggaatataattgtctctaagctaagaaatgtggatgttcaaataaaacatacgtacagaa

SEQ ID NO: 718548 - DNA, 120 bp, Artificial Sequence
  ENSG00000197594_57 (sequence is synthesized)
ttaggagtgggggtaggtaaacatatgttttaattctagggggcgcatgtagatcttttgtgatatatcttttctctttctagtttttgcattttccactctatttttaattccttggag

SEQ ID NO: 718549 - DNA, 120 bp, Artificial Sequence
  ENSG00000197594_58 (sequence is synthesized)
ctgtgacttgacttgggtgcaggtgtggtgaagtctagttagttgacttgggtacgggtgtggagaagtctagttcagttcttgagcatcctgaattagggaatctgtgctgttaactct

SEQ ID NO: 718550 - DNA, 120 bp, Artificial Sequence
  ENSG00000197594_59 (sequence is synthesized)
agcagtgaggtgatgagcacatagtaaaccaatcacaatgtacctttttaaaaatacaattcagattgtttaaatgtagggagaaaaaagatttcttggtatgaaatgaatatattacac

SEQ ID NO: 718551 - DNA, 120 bp, Artificial Sequence
  ENSG00000197594_60 (sequence is synthesized)
acactgtccttttttacttccatgttaatatgtcattattataaaaagataaaaatactagacaagttatgaacaaaattgataacatccatgagggcacctgtaatcccagctacttgg

SEQ ID NO: 718552 - DNA, 120 bp, Artificial Sequence
  ENSG00000197594_61 (sequence is synthesized)
gcaaaggtcgctgtttcgagagaacatttgggaactgtcgctgtgatgctgcctgtgttgagcttggaaactgctgtttagattaccaggagacgtgcatagaaccaggtttgaaacgcc

SEQ ID NO: 718553 - DNA, 120 bp, Artificial Sequence
  ENSG00000197594_62 (sequence is synthesized)
cttccagcgtcttagcggggctttacataggtgttatcttttatattaggagtcatggctattggccaactatattagctgaaaaaaataattttaaaactttttattaaagaaactttt

SEQ ID NO: 718554 - DNA, 120 bp, Artificial Sequence
  ENSG00000197594_63 (sequence is synthesized)
tttctattgtaaatacttcgttttgtagaaatgatatactattttaaaatagactacaacaaaactttgctatttgctatgatgttttatatcgaaataaattctttagtaaatgatcat

SEQ ID NO: 718555 - DNA, 120 bp, Artificial Sequence
  ENSG00000197594_64 (sequence is synthesized)
tcataccacattttgaagaatttcaaagctgtaaattatttctcagtagaactgttacaccagtgttataaaatttaatccctatcaattgatgaattattttttccattctgtttttca

SEQ ID NO: 718556 - DNA, 120 bp, Artificial Sequence
  ENSG00000197594_65 (sequence is synthesized)
agcagtgaagtaagtacatttttatcagtaattatttcattaaacccagtcatcaaactgaacctcgctttgaaggaggctgctagaccattttataagattctatcatttctggaaaaa

SEQ ID NO: 718557 - DNA, 120 bp, Artificial Sequence
  ENSG00000197594_66 (sequence is synthesized)
gcaagtattatacacaatattactaaatataaggatgcactttaaacaaaataagagttgggagaattgtttagcctgtgttttccacagtgctaaattaaactgatgatcaattagctt

SEQ ID NO: 718558 - DNA, 120 bp, Artificial Sequence
  ENSG00000197594_67 (sequence is synthesized)
ctatattttcaatttgaaagcctttatccactccatcgccccttaccttggcctaaatactaagtgctttttgagaatgttataaacagctaaacctccagtgtgaaaatacagggtaat

SEQ ID NO: 718559 - DNA, 120 bp, Artificial Sequence
  ENSG00000197594_68 (sequence is synthesized)
aagtcaaatagcagaggaagcctcctatgaactctcttccttaggagataggtctttggccacctgagaccatgcttacaacagaggtcccatagaaggatgggagattttatcaaaagt

SEQ ID NO: 718560 - DNA, 120 bp, Artificial Sequence
  ENSG00000197594_69 (sequence is synthesized)
gtagcgatatttgaatacgtgattttgttgaatatttcctaggaaactagaggtacgaaacagctcatggactaacactttcagtgtaacatctcgtttgacctgacaccctttcaggaa

SEQ ID NO: 718561 - DNA, 120 bp, Artificial Sequence
  ENSG00000197594_70 (sequence is synthesized)
cttagccagcgcctagctatgtttttaatctgtgtagcactttaaaacagcaaacactgctttcagttttcacgtggccatatcatttttgttaccattttaatggcaaaaaaacacaat

SEQ ID NO: 718562 - DNA, 120 bp, Artificial Sequence
  ENSG00000197594_71 (sequence is synthesized)
taatggcaaaaaaacacaattacttttgcaccaacctagtattttggaacacaggaagcattagaacagaaaaggatctgaaggctcggcaccatggctaacgcctgtaatcccagcact

SEQ ID NO: 718563 - DNA, 120 bp, Artificial Sequence
  ENSG00000197594_72 (sequence is synthesized)
tcagaaaaattcagttccagttcaagctctgccactgagcagctgcatgactttgagaactcagaccaaatttcttctgtgaaatgagggtcgtgcagtaaagattctcttttgggctgt

SEQ ID NO: 718564 - DNA, 120 bp, Artificial Sequence
  ENSG00000197599_0 (sequence is synthesized)
gaaggcagccagacgagggcagcagctcgtccctcaaggcccagagctctcacgggacttcctctggctcctgacccccctggcctgtgcccagctctgggcaacctcagaggccccaag

SEQ ID NO: 718565 - DNA, 120 bp, Artificial Sequence
  ENSG00000197599_1 (sequence is synthesized)
gcccaagctacagccgagggcagggtggccggtgcagcccagcagccatgtcagagttggctgacagtggaccctcaggggcatcggccccttcccagctgagagccgtcaccctggaag

SEQ ID NO: 718566 - DNA, 120 bp, Artificial Sequence
  ENSG00000197599_2 (sequence is synthesized)
acctggggctcctcctggcaggaggcctggccagccccgagcccttgagcctggaggagctctcggagaggtatgagtccagccatccgacatccacggcctctgtccccgagcaggaca

SEQ ID NO: 718567 - DNA, 120 bp, Artificial Sequence
  ENSG00000197599_3 (sequence is synthesized)
ccgccaagcactggaaccagctggagcagtgggtggtggagctgcaggccgaggtggcctgcctgcgggagcacaagcagcgctgtgagcgcgccacgcggagcctgctgcgggagctgc

SEQ ID NO: 718568 - DNA, 120 bp, Artificial Sequence
  ENSG00000197599_4 (sequence is synthesized)
tccaggtgcgggcccgcgtgcagctgcagggctcagagctgaggcagttgcagcaggaggcgcggccggcagcccaggcccccgaaaaggaggcgccggagttctctggtctccagaacc

SEQ ID NO: 718569 - DNA, 120 bp, Artificial Sequence
  ENSG00000197599_5 (sequence is synthesized)
agatgcaggccctggacaaaaggctggtggaggtccgggaagccttgacccggctcaggaggaggcaggtgcaacaggaggcggagagaaggggcgccgagcaagaggccggcctcagac

SEQ ID NO: 718570 - DNA, 120 bp, Artificial Sequence
  ENSG00000197599_6 (sequence is synthesized)
tggccaagctgaccgacttgctgcagcaggaggagcagggccgggaggtggcctgcggcgccctgcagaagaaccaagaggacagcagccggagggtggacctggaggtggccagaatgc

SEQ ID NO: 718571 - DNA, 120 bp, Artificial Sequence
  ENSG00000197599_7 (sequence is synthesized)
aggcccaggtgaccaagctcggcgaagaggtgagcctgcgcttcctgaagagggaggccaagctgtgcggcttcctgcagaagagcttcctggccctggagaagagaatgaaggcctcgg

SEQ ID NO: 718572 - DNA, 120 bp, Artificial Sequence
  ENSG00000197599_8 (sequence is synthesized)
agagctcacggctgaagctggagggcagcctgcggggcgagctggagagccggtgggagaagcttcgggggctgatggaggagcgcctgcgggccctgcaggggcagcatgaggtggggc

SEQ ID NO: 718573 - DNA, 120 bp, Artificial Sequence
  ENSG00000197599_9 (sequence is synthesized)
ggatgctgccgtggcccagctgaccaagtttgtgcagcagaaccaggcgtcgctgaaccgtgtcctactggccgaggagaaagcctgggacgccaaggggcgcttggaggaaagccgggc

SEQ ID NO: 718574 - DNA, 120 bp, Artificial Sequence
  ENSG00000197599_10 (sequence is synthesized)
tggggagctggccgcctatgtgcaggagaacctggaggccgcacagctggctggcgagctggcccggcaggagatgcatggagagctggtgctgctccgagagaagagccgggctctgga

SEQ ID NO: 718575 - DNA, 120 bp, Artificial Sequence
  ENSG00000197599_11 (sequence is synthesized)
ggcatccgtggcgcagctggccgggcagttaaaggagctgagtggccatctcccggctctgagcagccggctcgatctgcaggagcagatgctgggcctcaggctgtccgaggcaaagac

SEQ ID NO: 718576 - DNA, 120 bp, Artificial Sequence
  ENSG00000197599_12 (sequence is synthesized)
cgaatgggaaggtgcagagaggaagtccctggaggacctggccaggtggcggaaggaggtgaccgaacacctgcgaggggtgcgggagaaggtggatggcctcccccagcagatagagag

SEQ ID NO: 718577 - DNA, 120 bp, Artificial Sequence
  ENSG00000197599_13 (sequence is synthesized)
tgtctccgacaagtgcctgcttcataagagcgactcagacctcaggatttccgccgaaggcaaggccagggagttcaaggttggggccctgcggcaggagctggccacgctactatcatc

SEQ ID NO: 718578 - DNA, 120 bp, Artificial Sequence
  ENSG00000197599_14 (sequence is synthesized)
cgtgcagctgctaaaggaagacaaccctgggcggaagatcgcggagatgcagggcaagctggccacgaaccaaataatgaagctggaaaactgcgtccaggccaacaagaccatccagaa

SEQ ID NO: 718579 - DNA, 120 bp, Artificial Sequence
  ENSG00000197599_15 (sequence is synthesized)
cctcaggttcaacactgaggcccggctgcgcacgcaggagatggccaccctgtgggagagtgtgctccggctgtggagtgaggagggcccgcggacgccgctgggcagctggaaggcgct

SEQ ID NO: 718580 - DNA, 120 bp, Artificial Sequence
  ENSG00000197599_16 (sequence is synthesized)
cccatccctggtgaggccgcgggtcttcatcaaggacatggcgcctggcaaggtggtgcccatgaactgctggggcgtgtaccaggctgtgaggtggctgcgctggaaggcgtccctcat

SEQ ID NO: 718581 - DNA, 120 bp, Artificial Sequence
  ENSG00000197599_17 (sequence is synthesized)
aaagctcagggccctgcggaggccaggaggggtcctggagaagccccacagccaggagcaggtgcagcagctcacaccctcactgtttatccagaaataaacgtgctggctttgtactca

SEQ ID NO: 718582 - DNA, 120 bp, Artificial Sequence
  ENSG00000197599_18 (sequence is synthesized)
cgaggaccagcatttcagcaggtggcccctgcccaagctgtaagcactcaacagtggatatcggggtgcctgtggggacagcaggatgccagcagactggccctgtctgtgcccaaatgg

SEQ ID NO: 718583 - DNA, 120 bp, Artificial Sequence
  ENSG00000197599_19 (sequence is synthesized)
ggtgaccagagcggaggagcggggcccagggaggggcttgccacaggtgtgagggtggggaccgctctgcttctgaccccgggctccctccagctcgcttgttcctgccgcccagtgctg

SEQ ID NO: 718584 - DNA, 120 bp, Artificial Sequence
  ENSG00000197599_20 (sequence is synthesized)
tgtgtcttcaggcagggccctggacttgtctgagccaagcccgtctggatcctgtgtgacccaaggagacgcgttgagctctgggtggtgggcgagggtcctgcgggggtttggggcctt

SEQ ID NO: 718585 - DNA, 120 bp, Artificial Sequence
  ENSG00000197601_0 (sequence is synthesized)
gccactgcccgtccgctcttcagcagccggtcgcgggcggtggaaaagcgagtgaagagagcgcgacggcggcggcggcggcggcgcagctattgctggacggccagtgggagagcgagg

SEQ ID NO: 718586 - DNA, 120 bp, Artificial Sequence
  ENSG00000197601_1 (sequence is synthesized)
cctgagcctctgcgtctaggatcaaaatggtttcaatcccagaatactatgaaggcaagaacgtcctcctcacaggagctaccggttttctagggaaggtgcttctggaaaagttgctga

SEQ ID NO: 718587 - DNA, 120 bp, Artificial Sequence
  ENSG00000197601_2 (sequence is synthesized)
ggtcttgtcctaaggtgaattcagtatatgttttggtgaggcagaaagctggacagacaccacaagagcgagtggaagaagtccttagtggcaagctttttgacagattgagagatgaaa

SEQ ID NO: 718588 - DNA, 120 bp, Artificial Sequence
  ENSG00000197601_3 (sequence is synthesized)
atccagattttagagagaaaattatagcaatcaacagcgaactcacccaacctaaactggctctcagtgaagaagataaagaggtgatcatagattctaccaatattatattccactgtg

SEQ ID NO: 718589 - DNA, 120 bp, Artificial Sequence
  ENSG00000197601_4 (sequence is synthesized)
cagctacagtaaggtttaatgaaaatttaagagatgctgttcagttaaatgtgattgcaacgcgacagcttattctccttgcacaacaaatgaagaatctggaagtgttcatgcatgtat

SEQ ID NO: 718590 - DNA, 120 bp, Artificial Sequence
  ENSG00000197601_5 (sequence is synthesized)
caacagcatatgcctactgtaatcgcaagcatattgatgaagtagtctatccaccacctgtggatcccaagaagctgattgattctttagagtggatggatgatggcctagtaaatgata

SEQ ID NO: 718591 - DNA, 120 bp, Artificial Sequence
  ENSG00000197601_6 (sequence is synthesized)
tcacgccaaaattgataggagacagacctaatacatacatatacacaaaagcattggcagaatatgttgtacaacaagaaggagcaaaactaaatgtggcaattgtaaggccatcgattg

SEQ ID NO: 718592 - DNA, 120 bp, Artificial Sequence
  ENSG00000197601_7 (sequence is synthesized)
ttggtgccagttggaaagaaccttttccaggatggattgataactttaatggaccaagtggtctctttattgcggcagggaaaggaattcttcgaacaatacgtgcctccaacaatgccc

SEQ ID NO: 718593 - DNA, 120 bp, Artificial Sequence
  ENSG00000197601_8 (sequence is synthesized)
ttgcagatcttgttcctgtagatgtagttgtcaacatgagtcttgcggcagcctggtattccggagttaatagaccaagaaacatcatggtgtataattgtacaacaggcagcactaatc

SEQ ID NO: 718594 - DNA, 120 bp, Artificial Sequence
  ENSG00000197601_9 (sequence is synthesized)
ctttccactggggtgaagttgagtaccatgtaatttccactttcaagaggaatcctctcgaacaggccttcagacggcccaatgtaaatctaacctccaatcatcttttatatcattact

SEQ ID NO: 718595 - DNA, 120 bp, Artificial Sequence
  ENSG00000197601_10 (sequence is synthesized)
ggattgctgtaagccataaggccccagcattcctgtatgatatctacctcaggatgactggaagaagcccaaggatgatgaaaacaataactcgtcttcacaaagctatggtgtttcttg

SEQ ID NO: 718596 - DNA, 120 bp, Artificial Sequence
  ENSG00000197601_11 (sequence is synthesized)
aatatttcacaagtaattcttgggtttggaatactgagaatgtcaatatgttaatgaatcaactaaaccctgaagataaaaagaccttcaatattgatgtacggcagttacattgggcag

SEQ ID NO: 718597 - DNA, 120 bp, Artificial Sequence
  ENSG00000197601_12 (sequence is synthesized)
aatatatagagaactactgcttgggaactaagaagtacgtattgaatgaagaaatgtctggcctccctgcagccagaaaacatctgaacaagttgcggaatatacgttatggttttaata

SEQ ID NO: 718598 - DNA, 120 bp, Artificial Sequence
  ENSG00000197601_13 (sequence is synthesized)
ctatccttgtgatcctcatctggcgcatttttattgcaagatcacaaatggcaagaaatatctggtactttgtggttagtctgtgttacaagtttttgtcatacttccgagcatccagca

SEQ ID NO: 718599 - DNA, 120 bp, Artificial Sequence
  ENSG00000197601_14 (sequence is synthesized)
ctatgagatactgaagaccaaggattcagcattagaacatctatacatatggtgatctaaatgtacaaaatgtaaaatgtataagtcatctcactttttgtcaagacattaaaccatctt

SEQ ID NO: 718600 - DNA, 120 bp, Artificial Sequence
  ENSG00000197601_15 (sequence is synthesized)
agatcggagtgtgaagtaaattatggtatattttatgtaacattttaatgtttatgctcataaaacttagtgaacacactgtgttatgccagctcaaatctacagtagccaccaaaacca

SEQ ID NO: 718601 - DNA, 120 bp, Artificial Sequence
  ENSG00000197601_16 (sequence is synthesized)
tgacttaatattttgagccctagaagaaaggggtgtgctgaggacaagagtggggaaataggaacactgaccagtataactgtgcaattctggaacatattaattaaaataatatgcctt

SEQ ID NO: 718602 - DNA, 120 bp, Artificial Sequence
  ENSG00000197601_17 (sequence is synthesized)
aacatatagtgaatttctaattctaatgttcagtgcaatggaagacatttatttggacagtaatactagcaaagttggtagatatttgattcttcattttttgtttttttcattagttga

SEQ ID NO: 718603 - DNA, 120 bp, Artificial Sequence
  ENSG00000197601_18 (sequence is synthesized)
agtgggttttagttttgtttaaaattataaccagcgtattttcacatcattctgtaagttaaatgatatcaaacatgaaagagatgttctcatttttctttttctgattaaacgtctgat

SEQ ID NO: 718604 - DNA, 120 bp, Artificial Sequence
  ENSG00000197601_19 (sequence is synthesized)
gcatatcatttttctataagtaatcagttgcttttaaaatcagaaggctatattattctaatgaccctattcgatctaaatgggtttgagaatccatatcagcaacatacgtgttttttg

SEQ ID NO: 718605 - DNA, 120 bp, Artificial Sequence
  ENSG00000197601_20 (sequence is synthesized)
acagaaagtgaaaacaaattccgtaaaactgttagtatcaaaaagaataggaatacagttttcttttccacattatgatcaaataaaaatcttgtgagattgtttatgttttgaagcagg

SEQ ID NO: 718606 - DNA, 120 bp, Artificial Sequence
  ENSG00000197601_21 (sequence is synthesized)
tatctttccagtgaaaactgaaagtgcattattatggaagaatgtatttgcaggtagtaatagcattaaaaaatatactcgtgtgtaaacacatactaattttgaccttgaaagatgaat

SEQ ID NO: 718607 - DNA, 120 bp, Artificial Sequence
  ENSG00000197601_22 (sequence is synthesized)
tccttcaagaaaaataaaataatgcttaagataatgtgtacgaaattaaataaaggactttatttacatactacataaggtagcaaactgttgaatgagtttgaaggtatcacttatttt

SEQ ID NO: 718608 - DNA, 120 bp, Artificial Sequence
  ENSG00000197601_23 (sequence is synthesized)
ttatgcatgtgattttagctttagaaagaaatgcgttatagaaacaagtaatagcaagaaaattgatgtatattttaatgatacattaaaattcccttttaatcataatagttaactcta

SEQ ID NO: 718609 - DNA, 120 bp, Artificial Sequence
  ENSG00000197601_24 (sequence is synthesized)
cttactgttttaacatacatttgatttaacaaattgttcagcataacacttctaattaagtttatcaagttgtactgtattagataatcagcagtgtatctggagtatgtttaaagagaa

SEQ ID NO: 718610 - DNA, 120 bp, Artificial Sequence
  ENSG00000197601_25 (sequence is synthesized)
cagttcgcaatacaaaaagttacatggagctttacatcttaactttctttgtcaatttaaatgcaatgtataaaaagtttattttgctattgtgaaaaactaaatgtaaaggaaatcacc

SEQ ID NO: 718611 - DNA, 120 bp, Artificial Sequence
  ENSG00000197601_26 (sequence is synthesized)
tactttcatgcaggtgtataatcttgaaaaggaaaaatgcttccatgttgaagccagattttctgtagtaaaacttttaaatattattttaaaagaaatatgtatataaatatctctata

SEQ ID NO: 718612 - DNA, 120 bp, Artificial Sequence
  ENSG00000197601_27 (sequence is synthesized)
ttctttggaatgatactaaagtctctggtctaggaccataccttatataaaggtataagagaccatgacaatgtctgaaaatggaatagataatgatgccttttatttaaagtggcccac

SEQ ID NO: 718613 - DNA, 120 bp, Artificial Sequence
  ENSG00000197601_28 (sequence is synthesized)
ataatatacattgagtactccatctctccaaatgtatttccataatgtgttgaaaacatgctaacatttgtatgatttttatacttctgccgaatagacttagaatcagatgaattgtct

SEQ ID NO: 718614 - DNA, 120 bp, Artificial Sequence
  ENSG00000197601_29 (sequence is synthesized)
gtgtgtcttgcaaaagagttggggacaacttgggcaggcctatgaagtgcatagggagtgtatgtcttctgaatggttttattgttcttgtaatctagcttaaagaaatgttaactggga

SEQ ID NO: 718615 - DNA, 120 bp, Artificial Sequence
  ENSG00000197601_30 (sequence is synthesized)
gggtgctgaggccactcactgcattaattttgtgtgtttagagttctgttgtcaaaagaaaactaatgaataaattagtttgtcattctagaatttaaagttctaagattagtataaaga

SEQ ID NO: 718616 - DNA, 120 bp, Artificial Sequence
  ENSG00000197601_31 (sequence is synthesized)
gtatatagattgttaatccccaccagctagactttgaacttaagtcagacttaaagatttgagaaattatttgtgtcatttactagacgtgatttttagttctgtttgattatatttcct

SEQ ID NO: 718617 - DNA, 120 bp, Artificial Sequence
  ENSG00000197601_32 (sequence is synthesized)
acacaaacttcttatttaacaggatagcctactaaattaaatgtttcttatttcacttaactcatttgattaaactgtattctaaaacatttggggtttttccccctattcagttttaat

SEQ ID NO: 718618 - DNA, 120 bp, Artificial Sequence
  ENSG00000197601_33 (sequence is synthesized)
cttggaatatgcatttgtaaattgtgatgtcattgagactatatttatatttgacttggcaacattaacatgtcctaagacttagtgcagagaagcttggcagtacgttctttgacttaa

SEQ ID NO: 718619 - DNA, 120 bp, Artificial Sequence
  ENSG00000197601_34 (sequence is synthesized)
ggatggcataaaataatcatttttgaacctgtgtaataaagcttgaaagcagggaaaagaatttccttttcccccttttttgtgttgtctataggaattaacttgggattgttttgtggg

SEQ ID NO: 718620 - DNA, 120 bp, Artificial Sequence
  ENSG00000197601_35 (sequence is synthesized)
tttttgtttgttttaaatgtaaattgagaatcttttataagaaataaaagcattattgggtgcctttgtttgtaaaccaaaaagtaataaatgaatccctatatttccattatagtattt

SEQ ID NO: 718621 - DNA, 120 bp, Artificial Sequence
  ENSG00000197601_36 (sequence is synthesized)
attgtatttttatgttctgaaaattacccatggaacaatatgcttaggattacaggaagcagtccttacttacacttcttgtctgttttaggtgtacttgttaattcttatgtcctaatt

SEQ ID NO: 718622 - DNA, 120 bp, Artificial Sequence
  ENSG00000197601_37 (sequence is synthesized)
ttatttaattctgagttccttacacagcattttagggaaagaatacaggcaggatgacactttgtgttaaagtgttatttttatgtattacctggaatgaggcaggtttttttctgtttt

SEQ ID NO: 718623 - DNA, 120 bp, Artificial Sequence
  ENSG00000197601_38 (sequence is synthesized)
ctaaaaagagtaaccaagatacctccagggtgtcattgggttccagctgctctcctccacattgaatgatatcttgttaatttataggcacatttgtggtaatttatatgtctatagagt

SEQ ID NO: 718624 - DNA, 120 bp, Artificial Sequence
  ENSG00000197601_39 (sequence is synthesized)
aagtataagagataattcattagtaataggaattaactgaccccttttggatgggggagagcatcaggctggggtcaggtaagtgtaaatggccttctgagcatgctcttctaggctgac

SEQ ID NO: 718625 - DNA, 120 bp, Artificial Sequence
  ENSG00000197601_40 (sequence is synthesized)
tcccagccctgacttgaaaccattagcgctaacttgctctgttttgagaaaaactttccaaacttttgcatgagaaactagaaaaaggaatgtatgccacgtaactggattacagaaatg

SEQ ID NO: 718626 - DNA, 120 bp, Artificial Sequence
  ENSG00000197601_41 (sequence is synthesized)
agttaattgtctctgtgataaaaaaaaaaaatgaaatattttcttattgaattaatatttttgtcttgaagcattttctagtgatagaatgtatttgtcttttttcctggtggtaccctc

SEQ ID NO: 718627 - DNA, 120 bp, Artificial Sequence
  ENSG00000197601_42 (sequence is synthesized)
ttagcatatatctttgctatccttaagatcctaaacaaatcatctttgtcagttaagtatagttgcgcaaaaattgttaaatcctttgtctttattaaagaaaaatttgagtaacattaa

SEQ ID NO: 718628 - DNA, 120 bp, Artificial Sequence
  ENSG00000197601_43 (sequence is synthesized)
agttgccataataaagaataaatacatattcagaacatacctggcaatgtagtcataaacatctgttctaaggtatgtttaaccaaggagtgatggtgcaaagttttacatttcttattc

SEQ ID NO: 718629 - DNA, 120 bp, Artificial Sequence
  ENSG00000197601_44 (sequence is synthesized)
cccaatagttttcaatccagtatttttgttgcatgataaatattctataaatttcacacacaaatatatggcctttcaaatttcttccccctccccgattttttattgcaattatttttt

SEQ ID NO: 718630 - DNA, 120 bp, Artificial Sequence
  ENSG00000197601_45 (sequence is synthesized)
gaatggctgaattactgattgatgttagggtgattgtgtcacttgaatgaatctgaagataagattaggtgagagaattatcagtgaacaagagttaagaaaaactttttaataaggtat

SEQ ID NO: 718631 - DNA, 120 bp, Artificial Sequence
  ENSG00000197601_46 (sequence is synthesized)
atataggaaaaccgtgttagctgtgtgtgtgtgtgagatttaagtatgctaaactggcgtgatagtatatattgatgtagtgacaaacttgttgtatctttttgtttagaaaaaaataat

SEQ ID NO: 718632 - DNA, 120 bp, Artificial Sequence
  ENSG00000197601_47 (sequence is synthesized)
cacctaatcttttctaagagcagcatgtgtttttcccccagatgctttttatctacagaactatccctgtccagaaattgccttagatgcttgataattcgttttgtgtttgagatttta

SEQ ID NO: 718633 - DNA, 120 bp, Artificial Sequence
  ENSG00000197601_48 (sequence is synthesized)
ttttgaagttactttattggatgaaatatagtttttttttacatagtttatattgcttcattttcttccagtattctggattcagagtttatttctaaatgtattgaattgtgttatcag

SEQ ID NO: 718634 - DNA, 120 bp, Artificial Sequence
  ENSG00000197601_49 (sequence is synthesized)
aagtgcttagctaatgatacttttttgatttttttctccttatttctaatgtaatttccctccatgcccctcccatttctaaaacccctaattttgagactgtctaaactacatgataca

SEQ ID NO: 718635 - DNA, 120 bp, Artificial Sequence
  ENSG00000197601_50 (sequence is synthesized)
tataatcctaatcgttattataatataaatgaaatctttaaaaagtacttctccaaaaattctttttctgttcacagaagtggggatttttttggtgtttgttttgtttcagaaagttct

SEQ ID NO: 718636 - DNA, 120 bp, Artificial Sequence
  ENSG00000197601_51 (sequence is synthesized)
ttcttccctttccctacttataataaatattattgtatagatgttactgctcaagttagtgttatgatatcaatgacttacagtgagccatgatatataaaatgacagatttaaagatta

SEQ ID NO: 718637 - DNA, 120 bp, Artificial Sequence
  ENSG00000197601_52 (sequence is synthesized)
aagctccttgtacttttaaaaacaaagaatcacagtctttctttaaagacacactttaaaaagagtgtcacactcctttatttctgtaaggatgagtattggtggggtatggagaggtga

SEQ ID NO: 718638 - DNA, 120 bp, Artificial Sequence
  ENSG00000197601_53 (sequence is synthesized)
gtggatatctatttcagatagttttcagcatgagtcattgatttcacagcacatccagatgatcaagagtggtgccaatcattgttaaagaaaagttgttttgtttttttaaatgaatag

SEQ ID NO: 718639 - DNA, 120 bp, Artificial Sequence
  ENSG00000197601_54 (sequence is synthesized)
agttgactatgtggcaaacgaatatttctgtattgtttgcttcagcagtgctgaagagttggaattataaatataacacagtatgttattaattcacaggaaatcttagcaaatgcagct

SEQ ID NO: 718640 - DNA, 120 bp, Artificial Sequence
  ENSG00000197601_55 (sequence is synthesized)
gtgaattaaaatgtagtttaaggaatagaaagcaaggaaatattaattgaatccattcatttgcttagtattttatgtagaaaatttaagagtattgtataccctttgagaattaattct

SEQ ID NO: 718641 - DNA, 120 bp, Artificial Sequence
  ENSG00000197601_56 (sequence is synthesized)
gtatatcagcagaactctgtttaggtggtattaaatgcatttgctgctgctttcaaaaaaaatttgttttccttttggatttataaattgttcatccaagatgcagaaatagtcttattc

SEQ ID NO: 718642 - DNA, 120 bp, Artificial Sequence
  ENSG00000197601_57 (sequence is synthesized)
cctgctgatttggtacacttaatgattaaatgttataattttaatactaatgtctatattatagggggaaacttgcaccctgggtggtgataggatttttcctaatctatacaaaatatg

SEQ ID NO: 718643 - DNA, 120 bp, Artificial Sequence
  ENSG00000197601_58 (sequence is synthesized)
aaccttttccagtaagttgttagaaacctttataaataactggagttgagaattttaagttgtaactctgtataaaaagagctggcagttctttaagaacaggtattatttactaaaggt

SEQ ID NO: 718644 - DNA, 120 bp, Artificial Sequence
  ENSG00000197601_59 (sequence is synthesized)
gaattaccatggcaaagctgttttgtgttcatagagttaattttattggtactttcatttctataatgtgacgctgggtatatagaaatgtagatcaacatttaaaaaatcctaagtgaa

SEQ ID NO: 718645 - DNA, 120 bp, Artificial Sequence
  ENSG00000197603_0 (sequence is synthesized)
ggttctgagcaggcgccgtggcagcgcccgcgccccctgcccgccctccgccgtcgccaggacgcaggctcgcgtcagggctggcggtagggcccgcagctgtcggcctggcgtcttcac

SEQ ID NO: 718646 - DNA, 120 bp, Artificial Sequence
  ENSG00000197603_1 (sequence is synthesized)
cccgcgcagtcggcctcgcctagccttctcgcgcctgactggccggaccctgcccctggcggagaatcttgggactgttttacttaattggtcattgatagcttaacaaacatggagata

SEQ ID NO: 718647 - DNA, 120 bp, Artificial Sequence
  ENSG00000197603_2 (sequence is synthesized)
agattagaaatcttgacatcaacaggtattaagcagaaaaaaccatggccacgtgtctcctggttgggaaaggaaaaagaagccgtttttcttttggatgataaattcataaatgaaatt

SEQ ID NO: 718648 - DNA, 120 bp, Artificial Sequence
  ENSG00000197603_3 (sequence is synthesized)
aatttgctatcaggaaagataaagaagaaaattcctagtctgcagcctttcttgaaggatgttattgtcctaacaacatccagtaatgatgcctggctggctggggtactaactacagga

SEQ ID NO: 718649 - DNA, 120 bp, Artificial Sequence
  ENSG00000197603_4 (sequence is synthesized)
gagcttttcctttggaacaaagatcaagattgtttgaaaactataccaataactgaaaagcctaaggaaatgatcaaagctacagtcgcaagctctttgagactgtacttgtatgtatct

SEQ ID NO: 718650 - DNA, 120 bp, Artificial Sequence
  ENSG00000197603_5 (sequence is synthesized)
ggaaatgggaaaagaattgtgctcataacaccttctggatgcatatttctttgggaatatttggaattaaagaatatcttatcttctaaaagcctttcattggcgggtcggtggtcccag

SEQ ID NO: 718651 - DNA, 120 bp, Artificial Sequence
  ENSG00000197603_6 (sequence is synthesized)
gtcatacctgaagaagcagttctcttgccttccaccgaagataaagaagctgtagtgaatgctgtttttataaaaaatgagttatttggagactgctgcctgtgttcatttactttttat

SEQ ID NO: 718652 - DNA, 120 bp, Artificial Sequence
  ENSG00000197603_7 (sequence is synthesized)
tctggggaatgcctgaagttaacatttctagcaattcggtggcatgagaatgtatttacatctgtaagatcattgccataccatgttcattgggctcaacaagactgtcatctctgtagt

SEQ ID NO: 718653 - DNA, 120 bp, Artificial Sequence
  ENSG00000197603_8 (sequence is synthesized)
ttaattcctaaatgtgaatcagtaaagtcaagaggagctctaatttctgccttttcaagagatggccttaccctggcagtaactcttaatcagaaagaccccaaggcaactcaggtatta

SEQ ID NO: 718654 - DNA, 120 bp, Artificial Sequence
  ENSG00000197603_9 (sequence is synthesized)
tttataaacacactgaattttgttactctctgtggtagccttaaaggatgtagtaacaagagtcccgtggttccagctacacttattaggtcctactgggtaggtgatatcagctggacg

SEQ ID NO: 718655 - DNA, 120 bp, Artificial Sequence
  ENSG00000197603_10 (sequence is synthesized)
catgatagtctttttctggcttgtatgttaaaacgtggctctctggttttattgacctgccaaggtgaattgctaacattaattacatttggttgctctatagaatttggcccagcagaa

SEQ ID NO: 718656 - DNA, 120 bp, Artificial Sequence
  ENSG00000197603_11 (sequence is synthesized)
tttattcctcttcatccactaataacgtatagaccacagcagtttacgtttcaagattcaaataattctgttgattcatcagcttctgatagtgaccctatgagacagagattttctata

SEQ ID NO: 718657 - DNA, 120 bp, Artificial Sequence
  ENSG00000197603_12 (sequence is synthesized)
aaagcacactcacggttaccctacctcgttatatctgatggatatatggtcacaacccttcgatttcttgatagcctatctccatcagtacacatgagatcacttctacttgattcaacc

SEQ ID NO: 718658 - DNA, 120 bp, Artificial Sequence
  ENSG00000197603_13 (sequence is synthesized)
cagaggcttgagaaaatatatcaaagtgtgatattgtctaagccaaaaggcaaaggactgaacttgcgatcactgaattccctaaggtctagcctgttagaacaccaaggaaatgaaagt

SEQ ID NO: 718659 - DNA, 120 bp, Artificial Sequence
  ENSG00000197603_14 (sequence is synthesized)
tcagccgatttcactgtccccaaattcttgcaggcagaagaaacaataaatgaaaatgcagcagattttcaggattttgaagcagaagaaactaacgaaggcagacactttccagacaac

SEQ ID NO: 718660 - DNA, 120 bp, Artificial Sequence
  ENSG00000197603_15 (sequence is synthesized)
ttatgtcctttttggaacaaaagagatgatgtgctgtgtagtagtatgaaggaaggaagattggaatttgcatctatgtttgatacgatacatgcaaaggatgatagtgaggagacagat

SEQ ID NO: 718661 - DNA, 120 bp, Artificial Sequence
  ENSG00000197603_16 (sequence is synthesized)
agaaccattacagaactgcattctatccagaaaagtctacttgcagcgtggactataggaatttcaaaaactgtgacagaaaaaaatttaatgttaaattacatagtagtttgtatcact

SEQ ID NO: 718662 - DNA, 120 bp, Artificial Sequence
  ENSG00000197603_17 (sequence is synthesized)
cattttttttacattcttcaatttataaaatgtccttttcctaaacttgatcttgttttaagcaaaagctcaagacataatgcatggatactttgtatctttcaactttttcatcagtgt

SEQ ID NO: 718663 - DNA, 120 bp, Artificial Sequence
  ENSG00000197603_18 (sequence is synthesized)
ttatcaatccattattgggatataagatacaaacaagatgtggggcatttgataaagctgacctcaaatactgtaaaacttttgctgactcagcaacaaaagggtcagttattctcagag

SEQ ID NO: 718664 - DNA, 120 bp, Artificial Sequence
  ENSG00000197603_19 (sequence is synthesized)
aaacttttagcttgtttttatttactcaaaatggtagctgacaatttaaatggtgtatacattcttcaacctgaagttatttcagcatcagctgatggaagtaaaataacagctcaagac

SEQ ID NO: 718665 - DNA, 120 bp, Artificial Sequence
  ENSG00000197603_20 (sequence is synthesized)
tcattggtggtacctatttttcagatgtttcaagatagtggttttcagaaaaactggtcttggaactcatttttcaagattcatcctcaagtagtaaatcctgtgcaacagccaggacac

SEQ ID NO: 718666 - DNA, 120 bp, Artificial Sequence
  ENSG00000197603_21 (sequence is synthesized)
agattgcttattctctggagaatactgtacaaaaaaactttatggtatcaagcacaattaaatcgaagagttcctgaagctgatagtcagttaactgaaaagatgacacatgaagcatct

SEQ ID NO: 718667 - DNA, 120 bp, Artificial Sequence
  ENSG00000197603_22 (sequence is synthesized)
actgtcaagtccctgttatgtcatttgcaggctaacctacagagtactggagattgcttgaatcaaaccttagaacttaaatctatcaatggggaagaatgttttttattaggatcatat

SEQ ID NO: 718668 - DNA, 120 bp, Artificial Sequence
  ENSG00000197603_23 (sequence is synthesized)
gaaaagtctgttcagctgtggaaaaaagctctacaagaaatcgaagagaaaggaggaagaaggacgtattttcttcagatacgctattatctttctctcttatactgccacctctatagc

SEQ ID NO: 718669 - DNA, 120 bp, Artificial Sequence
  ENSG00000197603_24 (sequence is synthesized)
tataatttaaatgatgctcaaggattgtgtgatcagctagcaagagaaatcctgagatggtcccaactacctgtaaaagaaaataaagatttttcaggtgctgcaaagtctcattttgag

SEQ ID NO: 718670 - DNA, 120 bp, Artificial Sequence
  ENSG00000197603_25 (sequence is synthesized)
tgtggaatggtgggcggtgttcatcctgaggcagcagtgagagtcgtccagtccatggctcgtttcatggctgcctatttcaccaatcagcagctttgcattttgccccctcatcatgtg

SEQ ID NO: 718671 - DNA, 120 bp, Artificial Sequence
  ENSG00000197603_26 (sequence is synthesized)
aatgttcttcccccacttcatattaaaacagagcagtcctttcgacttattcctctgcaacactctaaggtggccagtgttgttagagatcagaatctctctaatgtgtggacagttgaa

SEQ ID NO: 718672 - DNA, 120 bp, Artificial Sequence
  ENSG00000197603_27 (sequence is synthesized)
tatgcacttgaattactatttattggtggcctggttccagaggctgtgtggttggcatataaacttggagactggaagacgtctgtttcaattggtgtggctttccagctgttctgtaaa

SEQ ID NO: 718673 - DNA, 120 bp, Artificial Sequence
  ENSG00000197603_28 (sequence is synthesized)
cgtgatagcaatttcatgaggtccaagaaaaagagtctgaatctaccactccgtatgactccagcacagatttttcaggaaaaactgcagtgtgttttaggtcaaccagcctctttggaa

SEQ ID NO: 718674 - DNA, 120 bp, Artificial Sequence
  ENSG00000197603_29 (sequence is synthesized)
gcaaaaaatgaaatgggctcaaaatataaacagtttacagatcccattgaagaggaagatgcaaatctgctatttggttcagtacaagaagtactgaaagcatcagttatggccgatgca

SEQ ID NO: 718675 - DNA, 120 bp, Artificial Sequence
  ENSG00000197603_30 (sequence is synthesized)
gatattctttcggagacatttcaacttctgatagactctgccaaggacttcagtaaaagactgtggggcttagtgccattcggcttgtatcttccagctcctccattgtactgtccccag

SEQ ID NO: 718676 - DNA, 120 bp, Artificial Sequence
  ENSG00000197603_31 (sequence is synthesized)
ccagctattcttagtgaagaagatggtgatgatcttcttttaaaagctgaaaaaaataatcgccagaaggtatctggaatccttcagcgtgttctcctgcttttccgggcggctcagtgt

SEQ ID NO: 718677 - DNA, 120 bp, Artificial Sequence
  ENSG00000197603_32 (sequence is synthesized)
tcttttcctgtagcacagtggtatatattgcagttgaggtgggcaagaaaagtcatgcagaagattcgaatgaaaggatcccttccttcactgagtccttttcctcagtcattacttaat

SEQ ID NO: 718678 - DNA, 120 bp, Artificial Sequence
  ENSG00000197603_33 (sequence is synthesized)
tactgtaaaggaggtatcgcattttttagacctggagcagctggagaccacaagcttgatgaagtttccattagagcaataggttgcttcagagaactttgtgctctgtgttggatgctg

SEQ ID NO: 718679 - DNA, 120 bp, Artificial Sequence
  ENSG00000197603_34 (sequence is synthesized)
catgtccgtgataagttatcctatagttgcaggcaatatcagaaagcaagagaaaatgtaaaaggagaaaaggaccttgaagtggagtttgattcttgtatgattgagcactgtcttagt

SEQ ID NO: 718680 - DNA, 120 bp, Artificial Sequence
  ENSG00000197603_35 (sequence is synthesized)
gcagtggaatgggcttatagaatgctgcctttctctcggttttttaatatggaagaacttattcaggatataattttgagccttattggagaactgccaccaatcagaaaggtagcagaa

SEQ ID NO: 718681 - DNA, 120 bp, Artificial Sequence
  ENSG00000197603_36 (sequence is synthesized)
attttcgtgaaagcatttccctatcctgaggacgtgagggttcctttaagagacaaatatcactctcttcaccagagactcagacactgtgttgtgaaaggaccccagactgaggaaatg

SEQ ID NO: 718682 - DNA, 120 bp, Artificial Sequence
  ENSG00000197603_37 (sequence is synthesized)
atgtctgttgtcatgcattctatccagaaagtgagggtgaaagctctaaaacgtgtgcagagaaatataggctcttttgaagtgaatatatgggaaccaattgaagaagagaaaccagat

SEQ ID NO: 718683 - DNA, 120 bp, Artificial Sequence
  ENSG00000197603_38 (sequence is synthesized)
gaggctccaggtgttgacagatattccctggggactagtttgagcagaagtacactcacagaactaggagattctgtggttcacagtgatgcagatacgttctctgaagctttgtcggtt

SEQ ID NO: 718684 - DNA, 120 bp, Artificial Sequence
  ENSG00000197603_39 (sequence is synthesized)
gaagaaaaaagtaggataaatatctatcaaagaaatgccccaaatcacatggaattaacatcaattcataagccaactgataaaaggaaaatgtgtaatcagaaagaaaatcctacaaag

SEQ ID NO: 718685 - DNA, 120 bp, Artificial Sequence
  ENSG00000197603_40 (sequence is synthesized)
aaagaagatcatgaaaagttatcacaaaatacacttcctgtaataggtgtttgggaatttgaacgtgatgatgatgaatatattaaattccttgatctgtttttgagttacattcttgaa

SEQ ID NO: 718686 - DNA, 120 bp, Artificial Sequence
  ENSG00000197603_41 (sequence is synthesized)
agagacctaccttattccagggatgctgacattccatttctaactagtttttctggaaagcttagagaacatgaacttaattctttactttttgatgtacatacaacattaaaacgacat

SEQ ID NO: 718687 - DNA, 120 bp, Artificial Sequence
  ENSG00000197603_42 (sequence is synthesized)
cagagcaaaactaaaagccagaatgtgtttagagctggttcttgctttgttgttgctcctgagtcctatgaatcagaaaaatcatcctctttaaatgatgaatatggcatgcatttagaa

SEQ ID NO: 718688 - DNA, 120 bp, Artificial Sequence
  ENSG00000197603_43 (sequence is synthesized)
aaccagaaactttcatcatcagtactggttaatcaagggatcaaaccttttttacaatatccttcgaatgaagtcaataagaatgaaggaatgagtggattatttggtttaaaacaaagg

SEQ ID NO: 718689 - DNA, 120 bp, Artificial Sequence
  ENSG00000197603_44 (sequence is synthesized)
tcaatttacaaaatacaagatgacactagagagaaatgtctaatccagagatcatcaaaccacattttttggactcccaagtccattaaaactagaagatgtattttcaaagctattcag

SEQ ID NO: 718690 - DNA, 120 bp, Artificial Sequence
  ENSG00000197603_45 (sequence is synthesized)
tgcaatgatattaaccctcaagaagatcttcctttagcactaaacacttttggcagtataggaagactgctggaatggatgataaggtggtctaatagaaggctactctgtgattctggt

SEQ ID NO: 718691 - DNA, 120 bp, Artificial Sequence
  ENSG00000197603_46 (sequence is synthesized)
gtaaagacctctacagctgccattcttacatcattatggcttttggaacaaccctattttgctacatataaggcaaaaaatgccattattaagatggtagagaatcgtgacactgggtgt

SEQ ID NO: 718692 - DNA, 120 bp, Artificial Sequence
  ENSG00000197603_47 (sequence is synthesized)
cagattggacccaatattgagagggagagcaaatcagatgctggcggttcagttgcagtagcaactccaggtggaactgaggaaagaaatggtcagaataaatcttgtcaaaatatcttg

SEQ ID NO: 718693 - DNA, 120 bp, Artificial Sequence
  ENSG00000197603_48 (sequence is synthesized)
aatagaatgccaactgaagcaaaaaatcctgatataaaagaaatcaatgatgatattatttccatcactcataatactaaaaaagaatttatagatattgatgagaatcttttagaagta

SEQ ID NO: 718694 - DNA, 120 bp, Artificial Sequence
  ENSG00000197603_49 (sequence is synthesized)
gaagcatttacagaagaggaaatggatatgcacatatcagactatgaagaagacattgaagaatctgttggaggtttcagaagtcccagtcttgccatttgcatgatgactttaccacag

SEQ ID NO: 718695 - DNA, 120 bp, Artificial Sequence
  ENSG00000197603_50 (sequence is synthesized)
cagttagaagaagagttcacagaagaggttcagtgtcaaagggaagaaccactggagacaattatggaggaaaaatcgactgaacaaaaaggtatgatcgaagccttttcacatcctggg

SEQ ID NO: 718696 - DNA, 120 bp, Artificial Sequence
  ENSG00000197603_51 (sequence is synthesized)
cataccactcctcaatcaatgcaagtagatacgagttcagaaatttctagtgcacagatttctacatataaagaaaaatcttcctcagttccacttctgatatcaaatggagtcaatgtt

SEQ ID NO: 718697 - DNA, 120 bp, Artificial Sequence
  ENSG00000197603_52 (sequence is synthesized)
gcttcacaaccacctgctccaacacctcagaagacccagagaaatgaattcacggctcagttaccagattgttcggagtccgttaggcagatgctgcaagatgaaatgtttaaattagtt

SEQ ID NO: 718698 - DNA, 120 bp, Artificial Sequence
  ENSG00000197603_53 (sequence is synthesized)
cagctgcaacagatcaacttcatgagcctaatgcaaatagtaggatcatcctttgctaatctcccagatacacaacaacttgtacagcagtctcagtctgtgcatttaggggaaagccaa

SEQ ID NO: 718699 - DNA, 120 bp, Artificial Sequence
  ENSG00000197603_54 (sequence is synthesized)
gaatcaaacctaagaggatgtggtgatgttgaagacagcaacaaaaatcttaaggagagattttttattaaaccacagtcaatgggagagaacgccagagagcctcgcaagaacagccca

SEQ ID NO: 718700 - DNA, 120 bp, Artificial Sequence
  ENSG00000197603_55 (sequence is synthesized)
cactgccatgaaggaactatcccatctggtcaaaatagtactggaaacgtacagaatgttccacatgggagtattcctttatgtcaattaaatggccagccccggaaaaaaggaccaatt

SEQ ID NO: 718701 - DNA, 120 bp, Artificial Sequence
  ENSG00000197603_56 (sequence is synthesized)
ccatcatctcaaaacttaccatccacttcgttttatccagctcctgctggaaatactcacctctaccttttgtccacaccttctgttgttcagaaggcacctagacttatcccacatgca

SEQ ID NO: 718702 - DNA, 120 bp, Artificial Sequence
  ENSG00000197603_57 (sequence is synthesized)
aaaacatttagtcctggtgatggctttcctttgcttcaatttaagtctaaacaagaattccagccccttttcttacatacaggaagtattccacaagttcccttcaggcctttgccacaa

SEQ ID NO: 718703 - DNA, 120 bp, Artificial Sequence
  ENSG00000197603_58 (sequence is synthesized)
ccaagagaggcttggggattatctgactccttccaacctgctctgccacagagagcagcacaaactactccagcatcccatttgaatgtaagccagtataacactgaagccagaaaaaaa

SEQ ID NO: 718704 - DNA, 120 bp, Artificial Sequence
  ENSG00000197603_59 (sequence is synthesized)
gaagttgagcagaagacgtgggcagaaactgtaattacagaaattcctaatcatgtgaacttggatcaatatgttggacaagaaaatttgacacctcaacaggactcttcagtgtttata

SEQ ID NO: 718705 - DNA, 120 bp, Artificial Sequence
  ENSG00000197603_60 (sequence is synthesized)
aaaccagaaaaactatttgatgttaagccagggacccttgagatatctcctcaccattcctttggacttccgttactatacctgccacttaaacctcctaatatgtttccatcaacctca

SEQ ID NO: 718706 - DNA, 120 bp, Artificial Sequence
  ENSG00000197603_61 (sequence is synthesized)
agagcatctattacagttccctcaacacctatccaacctatagcagaagaaagaaaatacccaagattgtcattacttcattcacatttgtccccagaaaataggtgcaaaaaaacacaa

SEQ ID NO: 718707 - DNA, 120 bp, Artificial Sequence
  ENSG00000197603_62 (sequence is synthesized)
cttatcccacttgaaaacctcattgcgtttaaacaaagccaacagaaactaacacataatttatttgaacaaggtgatgctggacaccttcaacttctaaaggtcaaaatagaaccacct

SEQ ID NO: 718708 - DNA, 120 bp, Artificial Sequence
  ENSG00000197603_63 (sequence is synthesized)
gaagtaagacaaggaaaggacagtaaaaaaaggcaaagaagaagagctgagaaagagctgcaagaaaaaagatgtgagaaactgaggagaaaaccaaatgtgacttttcgaccagagaat

SEQ ID NO: 718709 - DNA, 120 bp, Artificial Sequence
  ENSG00000197603_64 (sequence is synthesized)
tccataattaataatgatgattcagaaatcattaagaaacccaaggaacaacaagaacattgtggttcccatcctttggatgacttcgacgttccttttgaaatgctacaagatgataat

SEQ ID NO: 718710 - DNA, 120 bp, Artificial Sequence
  ENSG00000197603_65 (sequence is synthesized)
acttcagctggattgcatttcatggcctctgtaaaaaagaaagctataggaagtcaagatgcaagtacaaatacagacccagaacatgagcctttgactgctcctcagctcttggtccca

SEQ ID NO: 718711 - DNA, 120 bp, Artificial Sequence
  ENSG00000197603_66 (sequence is synthesized)
gatgtctatctaaatctgaagctttccagtgaaatgtcagagaaaccttggtcaccctcaatacctcatacagtaacaaacttggaattacctgtgagagaagagccttcaaatgataat

SEQ ID NO: 718712 - DNA, 120 bp, Artificial Sequence
  ENSG00000197603_67 (sequence is synthesized)
gttatcaaacagcaaagcgatcatctagcagttccatcgtctgcagagttacattatatggcagcttcagttactaatgctgttcccccacataattttaagagtcaaggtctgccaaaa

SEQ ID NO: 718713 - DNA, 120 bp, Artificial Sequence
  ENSG00000197603_68 (sequence is synthesized)
ccagagttccgattcaaaggacagagcacaaagtcagactctgcagaagattatctattgtggaaacggctgcaaggtgtctctgcagcttgccctgcaccaagctctgcagctcaccaa

SEQ ID NO: 718714 - DNA, 120 bp, Artificial Sequence
  ENSG00000197603_69 (sequence is synthesized)
ctagagcatctcagtgctaagcttcagaaaattgacgagcagttgctagcaatacagaacattgctgaaaacatagaacaggatttccccaagcctgaaatgctagatctacattgtgat

SEQ ID NO: 718715 - DNA, 120 bp, Artificial Sequence
  ENSG00000197603_70 (sequence is synthesized)
aagattggaccagtggatcacattgaattctcttctggccctgaattcaaaaaaacattagcttcaaaaaccattagcatttctgaagaagtgcgttttttgacccatatggatgaagaa

SEQ ID NO: 718716 - DNA, 120 bp, Artificial Sequence
  ENSG00000197603_71 (sequence is synthesized)
gatcaaagtgacaaaaaggagacttcagaacctgaattttcaataacagaaaattattctggtcagaaaacctgtgtgtttcctactgccgattcagctgtcagcctttccagttccagt

SEQ ID NO: 718717 - DNA, 120 bp, Artificial Sequence
  ENSG00000197603_72 (sequence is synthesized)
gatcagaatactacttctcctggtatgaatagcagtgatgaattgtgtgagagtgtttcagtacatccgctccagatgactggattgactgatattgcagacattattgatgaccttata

SEQ ID NO: 718718 - DNA, 120 bp, Artificial Sequence
  ENSG00000197603_73 (sequence is synthesized)
attaaagacggagtttccagtgaagaacttggcttaacagaacaagctatgggcacctccagaattcagcattattctggcagacattcacaaagaactgacaaggaaagaagagagatt

SEQ ID NO: 718719 - DNA, 120 bp, Artificial Sequence
  ENSG00000197603_74 (sequence is synthesized)
caagcctggatgaaaagaaaacgaaaagaaagaatggcaaagtacttaaatgagctggcagaaaagagagggcaagaacatgatcctttctgtcccagaagcaatccactttacatgact

SEQ ID NO: 718720 - DNA, 120 bp, Artificial Sequence
  ENSG00000197603_75 (sequence is synthesized)
tcaagggaaataaggctgagacaaaagatgaagcatgaaaaagacagattgctgctctctgaacactatagtcgtcgaatctcacaagcgtacggtctgatgaatgaactgttatctgag

SEQ ID NO: 718721 - DNA, 120 bp, Artificial Sequence
  ENSG00000197603_76 (sequence is synthesized)
tcagtacagctaccaactctaccacagaaaccattgcctaacaaacccagccctactcagtcttccagttgtcaacactgcccttctccaagaggagagaatcaacatggtcacagtttt

SEQ ID NO: 718722 - DNA, 120 bp, Artificial Sequence
  ENSG00000197603_77 (sequence is synthesized)
ctaataaatcgacctggaaaagtcaaatatatgtccaaaccgagttatatccataagaggaagtcttttgggcaacctcaaggctcaccttggccacatggaactgccactttcaccata

SEQ ID NO: 718723 - DNA, 120 bp, Artificial Sequence
  ENSG00000197603_78 (sequence is synthesized)
cagaaaaaagctggtggagccaaagcagcagtaagaaaggctacgcagtctccagttaccttccaaaaaggctctaatgctccgtgtcatagtctgcagcatacaaaaaaacatggaagt

SEQ ID NO: 718724 - DNA, 120 bp, Artificial Sequence
  ENSG00000197603_79 (sequence is synthesized)
gctgggcttgcacctcaaaccaagcaggtgtgtgtagagtatgaaagagaggagactgtggtgagtccctggacgataccttcagaaatccataagattcttcatgagagtcacaattcc

SEQ ID NO: 718725 - DNA, 120 bp, Artificial Sequence
  ENSG00000197603_80 (sequence is synthesized)
cttctacaagacttgtctccaactgaagaggaagagccagagcatccttttggggtgggcggtgtggacagcgtgtctgagagcactggcagcatcctcagcaagctggactggaatgcc

SEQ ID NO: 718726 - DNA, 120 bp, Artificial Sequence
  ENSG00000197603_81 (sequence is synthesized)
atcgaagacatggtggccagcgtggaggaccagggcctgtctgtccactgggccctggacctgtaagacctggatatcattgggtttccatgcacaggccagcacctcagtaatgtggtt

SEQ ID NO: 718727 - DNA, 120 bp, Artificial Sequence
  ENSG00000197603_82 (sequence is synthesized)
ctgaaagattaacaggtttaagggacagaagcaatgaaagaagcaatgtgaattttccatttgctttcatattattacctggattagccattaccagaggaaaaataaacatttctcagt

SEQ ID NO: 718728 - DNA, 120 bp, Artificial Sequence
  ENSG00000197603_83 (sequence is synthesized)
aactttgcctttatggggaaagggttgactattgatgtattatatgtttttgtatttgatgcatcattaggcataatttttaaaatgataagtacctttcaagccaagtttgcataacct

SEQ ID NO: 718729 - DNA, 120 bp, Artificial Sequence
  ENSG00000197603_84 (sequence is synthesized)
actttcaataaaaaccctctatcttgcctcctcctttattaccctctgagttttgagaaacaaccatatacagatgaatctaataggaaaaaaaaaaatcttttcattgagaagaaaatc

SEQ ID NO: 718730 - DNA, 120 bp, Artificial Sequence
  ENSG00000197603_85 (sequence is synthesized)
agtctcacctgagaactcaattatgaaccctattttaaaacacctatgcagggtttagcctaggagtgaaaagaaaaaccaactaccttttaccaaccctgaatctctaaataagcaaag

SEQ ID NO: 718731 - DNA, 120 bp, Artificial Sequence
  ENSG00000197603_86 (sequence is synthesized)
tttcatggaggccaggagatcttctgtcttctgccctgtagcctgaagccttggaggaagaaacaggaatggatgctttgggcaggaaagtaagggaatatgactccggcctctagaagg

SEQ ID NO: 718732 - DNA, 120 bp, Artificial Sequence
  ENSG00000197603_87 (sequence is synthesized)
ctcatcttaaatttgtaagaaccatggtacagagacctgattagtttttggtattgtgctccaataatgtcatagttttaagagataatttttatgagaattgactaagaaccagtatcc

SEQ ID NO: 718733 - DNA, 120 bp, Artificial Sequence
  ENSG00000197603_88 (sequence is synthesized)
ttcaactacttcatcaatgtttggtataatataaaagcacactatcatctgaaaaagctattaaatacccctctttttccaaatatctacctgtgtgaagccaggttttacaacatgtat

SEQ ID NO: 718734 - DNA, 120 bp, Artificial Sequence
  ENSG00000197603_89 (sequence is synthesized)
tgcagcaagttgaatgcagaagcaggtatggtaattcagctgccttctatcaagctaaacattaaagagatttgtagaactataaaacaatgctactctccttaccaaattgttttagaa

SEQ ID NO: 718735 - DNA, 120 bp, Artificial Sequence
  ENSG00000197603_90 (sequence is synthesized)
tctccttaccaaattgttttagaaaatagctttataggctaacattattgttaattgtcatttaattgttttgtcatttaaaatattttaaattgttttctgttagtttcttttttgtat

SEQ ID NO: 718736 - DNA, 120 bp, Artificial Sequence
  ENSG00000197603_91 (sequence is synthesized)
atgatagttgtacatttttatggggtgcatgtgatattttgatatgtgcatacaatgtgtagcaatcaaatcagggtaattgggatattcatcacctcaaacatttatcatttatttgtg

SEQ ID NO: 718737 - DNA, 120 bp, Artificial Sequence
  ENSG00000197603_92 (sequence is synthesized)
ttggaaacattcaaaccttttcttctagctatttatccattgttggatacttatatcaattctatatcttagctgttgtgaatagagctgcaataaatgtaggagtgcagatatctcttt

SEQ ID NO: 718738 - DNA, 120 bp, Artificial Sequence
  ENSG00000197603_93 (sequence is synthesized)
aaaggtttgtgaagtcattttgtaatatttattttaggggaaggaaagttaaaacttttgctagtcacatgaagaactgtgacatcttgtcaccttcataagacatactgcaattatgta

SEQ ID NO: 718739 - DNA, 120 bp, Artificial Sequence
  ENSG00000197603_94 (sequence is synthesized)
tgtatcatatcttggtgtaacttattaatatgaaatatatagcaactggaattactgtaatagttgatttttacaaaaattgaaaaattaaaactcttccaattataagaactttgaatt

SEQ ID NO: 718740 - DNA, 120 bp, Artificial Sequence
  ENSG00000197603_95 (sequence is synthesized)
tttgaaaacaaaatagtagccatcatttcttgagcctctaccatgtgccaaacatcactgttttatatgcatagattctggtttaagcctgatctatgaggtgtagacactattattatc

SEQ ID NO: 718741 - DNA, 120 bp, Artificial Sequence
  ENSG00000197603_96 (sequence is synthesized)
tccattttacagttgaggagattgagatttagaaggatttagtgccactttttgttttatttcatttggaggtagcaattaaaactgttattctttagtcctaatgaatatactttgtcc

SEQ ID NO: 718742 - DNA, 120 bp, Artificial Sequence
  ENSG00000197603_97 (sequence is synthesized)
tatgaataatagaacatagtaaatacatcagttcaatcactgacagtggcttggaaatattttttttctctcagatattgatggtcaattaaaatgattttactgagtgtttagtatatg

SEQ ID NO: 718743 - DNA, 120 bp, Artificial Sequence
  ENSG00000197603_98 (sequence is synthesized)
ttctattaccattattaaagtgatataaacagtaaaaatgctattttaaatggcattactgttacttaaataaaagaaaacctattaagaagctgactttaaatcttgtaattattttct

SEQ ID NO: 718744 - DNA, 120 bp, Artificial Sequence
  ENSG00000197603_99 (sequence is synthesized)
cagttctttctagatgccatgtgtgttttagtcatcaacatatggggataataatttccacttcacaaagttgtgaagactgagtatcatatataaagcatctgagaatcttgttttatt

SEQ ID NO: 718745 - DNA, 120 bp, Artificial Sequence
  ENSG00000197603_100 (sequence is synthesized)
ttcttggtcactgatagcttttctcttctcttctctggggaggattgacaaatgaggttaaacaggactcatatggctagatggtagagggttctaattatatctgagaagtttacactc

SEQ ID NO: 718746 - DNA, 120 bp, Artificial Sequence
  ENSG00000197603_101 (sequence is synthesized)
cattttatccttgggaacatgggagaattccaagcagagaagtaaaacaaggaggttttgaggaaaaatagaatggaggcatagagaccactgaggaggctactaaaatctgacctggga

SEQ ID NO: 718747 - DNA, 120 bp, Artificial Sequence
  ENSG00000197603_102 (sequence is synthesized)
actaggtgggtaaaagaggaggagagggggaacgtggttgtttagtgttgccagagtctaaggcaaaggtataactaggtctgatgtcaaagtctagactccagtcttttggcttccctg

SEQ ID NO: 718748 - DNA, 88 bp, Artificial Sequence
  ENSG00000197603_103 (sequence is synthesized)
gaaaaaaaaaaaaagtccatgcataaatctcataatgttttaagaacgtttacttggtaataaacaggtactgtggccgtgggttagt

SEQ ID NO: 718749 - DNA, 120 bp, Artificial Sequence
  ENSG00000197603_104 (sequence is synthesized)
tttacttggtaataaacaggtactgtggccgtgggttagtgatcctgggttactaataggagaaagggcaacttgttacttaccaacctttgatgacaaacacttcaatctttaacccaa

SEQ ID NO: 718750 - DNA, 120 bp, Artificial Sequence
  ENSG00000197603_105 (sequence is synthesized)
gaggtcaccatcttcgctaatctcacctacttccccatatgcagcccagtcgttattggaagagaatccttcaagctttttttcgtgaataggccagcaggggcctctcaaatactgata

SEQ ID NO: 718751 - DNA, 120 bp, Artificial Sequence
  ENSG00000197603_106 (sequence is synthesized)
gaaagtgtctctttaatggaccttctctttcctaagtacataggattaatatctttttctacctagtaaaaagctataaggggtagaactattactattacgctaatcttagatttatgt

SEQ ID NO: 718752 - DNA, 120 bp, Artificial Sequence
  ENSG00000197603_107 (sequence is synthesized)
gaaatatttctctcttagttaaattgaattagttgctcttaacccacaaatgcccagattctgagaacgaaaataaaatccttgatttggaggttaataaattaaatagaacaatatgtt

SEQ ID NO: 718753 - DNA, 120 bp, Artificial Sequence
  ENSG00000197603_108 (sequence is synthesized)
ttcaagaaaacaggtatttcatattaaaaccatgtgaatgtgtaagtcttagggacagatttggtttatctcaagataataaaatcttaaggaatattttttgagaagagatgtcagaac

SEQ ID NO: 718754 - DNA, 120 bp, Artificial Sequence
  ENSG00000197603_109 (sequence is synthesized)
acttttccctatattaattcaatcctgtttttagaattaaacatatagaagaattaaacatttagaatgaaacatatagaagactgaatagattaagtgtttttctctgaagacatatag

SEQ ID NO: 718755 - DNA, 120 bp, Artificial Sequence
  ENSG00000197603_110 (sequence is synthesized)
ttaatactggacaagacttaaaaattatattttgggacacattcttacaggtaaattgcttctcggatttaaataagatattttctaaaatatattactttcagatcaccagagatttgt

SEQ ID NO: 718756 - DNA, 120 bp, Artificial Sequence
  ENSG00000197603_111 (sequence is synthesized)
tttttgtttgtgtatattttataaagtaaattgcactccagtactctaaactgtgtactaagcaaagaagggttgtgccttctgacatattacactgagtactcaggatagaaaaagtaa

SEQ ID NO: 718757 - DNA, 68 bp, Artificial Sequence
  ENSG00000197603_112 (sequence is synthesized)
tctgacatattacactgagtactcaggatagaaaaagtaataatcttatactggctgggtgcgatggc

SEQ ID NO: 718758 - DNA, 120 bp, Artificial Sequence
  ENSG00000197603_113 (sequence is synthesized)
cccgtgtctacaaaaaatacaaaaattagcctgcattgcggcacacacctgtaatcccagccattcaggaggttaaggtgggaggtttgcttgagcccggaggcagaggttgtagtatgc

SEQ ID NO: 718759 - DNA, 120 bp, Artificial Sequence
  ENSG00000197603_114 (sequence is synthesized)
catgaccatgtcgctgcacttagcctgggtgacagagtgagacatggtctcaaaaaatatgtagacagtattcactatcagatagcatattcaggaagaggataaatatgctgtaaatat

SEQ ID NO: 718760 - DNA, 120 bp, Artificial Sequence
  ENSG00000197603_115 (sequence is synthesized)
ttaatttctggttatataatttctaaattagattaacaattgaaagcaaaaaaaaacccaaaatttttattaataatgattttttttttaggtatgaatagcagtgatgaattgtgtgag

SEQ ID NO: 718761 - DNA, 120 bp, Artificial Sequence
  ENSG00000197603_116 (sequence is synthesized)
aacaagaggaggaggttgagtgattgggtgaccaattggagttcttcctttaattttcaatgagagtcattggcagttgcgacaaccaactatgtgtattaaagccattttaaaaactca

SEQ ID NO: 718762 - DNA, 120 bp, Artificial Sequence
  ENSG00000197603_117 (sequence is synthesized)
atagaagattagaggatgtttagactcttagatggctgagcatagatcactcataccttagataatgcaaagaatatcttgcttactaatcacctgttaatttttattgatagtatgatc

SEQ ID NO: 718763 - DNA, 120 bp, Artificial Sequence
  ENSG00000197603_118 (sequence is synthesized)
ggcggagtgaccacatagagtaaaaagaatgtaaccctctttggttttatgtgttttggctcaggttggacatacttatataaatgtgattgacattgaagctaatgatcttctacagga

SEQ ID NO: 718764 - DNA, 120 bp, Artificial Sequence
  ENSG00000197603_119 (sequence is synthesized)
tgtgttatgtatgtatagtctgattcgtgtcagattaatataaaccttataataccttaaaaagtttatacatgtctacaaatgtattaacactttgaaataaacttatcaaaaatgaaa

SEQ ID NO: 718765 - DNA, 120 bp, Artificial Sequence
  ENSG00000197603_120 (sequence is synthesized)
attttttattaaattcattatacagtagaaagctattagcataatatgtgacaaacttctaatatctgggttgccagttggaaatagtggcaattgtcttttccatgtgatcttttttcc

SEQ ID NO: 718766 - DNA, 120 bp, Artificial Sequence
  ENSG00000197608_0 (sequence is synthesized)
tgactttcagatttgacttttaaagaattaattatattgactgagagagaggcccaggagagaaagaagaaagaaaaggagccagggatggctcttcctcagggatctttgacattcagg

SEQ ID NO: 718767 - DNA, 120 bp, Artificial Sequence
  ENSG00000197608_1 (sequence is synthesized)
tcaggaggagtggaaatgcctggaccctgttcagaaagctttgtacagggacgtgatgttggagaactacaggaacctcggcttcctgggactctgtcttcctgacctgaatattatctc

SEQ ID NO: 718768 - DNA, 120 bp, Artificial Sequence
  ENSG00000197608_2 (sequence is synthesized)
cctgacctgaatattatctccatgttggagcaagggaaagagccctggactgtggtgagccaagtgaaaatagcgaggaacccaaactgtggggaatgcatgaaaggcgtgatcaccggt

SEQ ID NO: 718769 - DNA, 120 bp, Artificial Sequence
  ENSG00000197608_3 (sequence is synthesized)
atctctcctaaatgtgtgatcaaggaattaccaccaatacagaacagtaacacaggagaaaaattccaagcagtgatgttggaaggacatgaaagctatgacactgaaaatttttacttc

SEQ ID NO: 718770 - DNA, 120 bp, Artificial Sequence
  ENSG00000197608_4 (sequence is synthesized)
agggaaatccggaaaaatctacaggaagttgactttcaatggaaagatggtgaaataaattataaagaagggccgatgacccataaaaacaatcttactggtcaaagagttcgacatagt

SEQ ID NO: 718771 - DNA, 120 bp, Artificial Sequence
  ENSG00000197608_5 (sequence is synthesized)
caaggggacgtagaaaacaagcatatggaaaatcagcttatattaaggtttcagtccggtctgggtgaattgcagaaatttcaaactgcagagaaaatttatggatgtaatcaaattgag

SEQ ID NO: 718772 - DNA, 120 bp, Artificial Sequence
  ENSG00000197608_6 (sequence is synthesized)
aggacagttaataattgttttttagcttcaccacttcaaagaatttttcctggtgtccaaaccaacatttctaggaaatatgggaatgattttttgcaactttcgttacctacacaagac

SEQ ID NO: 718773 - DNA, 120 bp, Artificial Sequence
  ENSG00000197608_7 (sequence is synthesized)
gagaaaacacatattagggaaaaaccttacataggtaatgagtgtggcaaagccttcagagtgtcttcaagtcttattaatcatcagatgatacatactacagagaaaccttacagatgc

SEQ ID NO: 718774 - DNA, 120 bp, Artificial Sequence
  ENSG00000197608_8 (sequence is synthesized)
aatgagtctggtaaagcctttcatcggggctcactactaacagtacatcagatagtccatacaagagggaaaccataccaatgtgatgtatgtggcaggatcttcagacaaaattcagat

SEQ ID NO: 718775 - DNA, 120 bp, Artificial Sequence
  ENSG00000197608_9 (sequence is synthesized)
cttgtaaatcaccggagaagtcacactggagacaaaccctacatatgtaatgaatgtggcaagtcctttagtaaaagttcccaccttgcagttcatcagagaattcatactggagagaaa

SEQ ID NO: 718776 - DNA, 120 bp, Artificial Sequence
  ENSG00000197608_10 (sequence is synthesized)
ccttacaaatgtaatcgatgtgggaagtgctttagtcaaagttcctctcttgcaactcatcagacagttcatactggagacaaaccctacaaatgtaatgaatgtggcaaaacctttaaa

SEQ ID NO: 718777 - DNA, 120 bp, Artificial Sequence
  ENSG00000197608_11 (sequence is synthesized)
cggaactcaagcctcactgcacatcatataatccatgcaggaaagaaaccatatacatgtgatgtatgtggcaaggtcttttatcagaattcacaacttgtaaggcaccagataattcat

SEQ ID NO: 718778 - DNA, 88 bp, Artificial Sequence
  ENSG00000197608_12 (sequence is synthesized)
taaggcaccagataattcatactggagagactctttcaacgttcacgtcttgcagggcaccggagaattcatactggagagaaaccct

SEQ ID NO: 718779 - DNA, 76 bp, Artificial Sequence
  ENSG00000197608_13 (sequence is synthesized)
gaagcctttaattggggctcattactaactgtacatcagagaattcataccggagagaaaccttacaaatgtaatg

SEQ ID NO: 718780 - DNA, 120 bp, Artificial Sequence
  ENSG00000197608_14 (sequence is synthesized)
accttacaaatgtaatgtgtgtggcaaggtctttaattacggtggatacctttcggttcatatgagatgtcatactggagagaaacctctccattgtaataaatgtggcatggtcttcac

SEQ ID NO: 718781 - DNA, 120 bp, Artificial Sequence
  ENSG00000197608_15 (sequence is synthesized)
ttactattcatgcctagcacgtcatcaaagaatgcataccggagagaaaccttacaaatgtaatgtgtgtggcaaggtcttcattgacagtggaaacctttcaattcataggcgaagtca

SEQ ID NO: 718782 - DNA, 120 bp, Artificial Sequence
  ENSG00000197608_16 (sequence is synthesized)
taccggagagaaacctttccagtgtaacgaatgcggcaaggtcttcagttactactcatgcctagcacgtcatcggaaaattcataccggagagaaaccttataaatgtaatgattgtgg

SEQ ID NO: 718783 - DNA, 120 bp, Artificial Sequence
  ENSG00000197608_17 (sequence is synthesized)
caaagcctatactcagcgttcaagcctcactaaacatctggtaattcatactggagagaacccttaccactgtaatgaatttggtgaggcttttatccaaagttcaaaacttgcaagata

SEQ ID NO: 718784 - DNA, 120 bp, Artificial Sequence
  ENSG00000197608_18 (sequence is synthesized)
tcacagaaatcctactggggagaaaccacacaaatgtagtgaatgtggtagaacttttagtcataaaacaagtctggtgtaccatcagagaagacatactggagagatgccatacaaatg

SEQ ID NO: 718785 - DNA, 90 bp, Artificial Sequence
  ENSG00000197608_19 (sequence is synthesized)
accatcagagaagacatactggagagatgccatacaaatgtattgaatgtgggaaagtctttaactccactacaaccctggcaaggcatc

SEQ ID NO: 718786 - DNA, 120 bp, Artificial Sequence
  ENSG00000197608_20 (sequence is synthesized)
accttacaaatgtaatgagtgtggcaaagcctttagagtacgttcaattctgcttaatcatcagatgatgcatactggagagaaaccttataaatgtaatgaatgtggtaaagcttttat

SEQ ID NO: 718787 - DNA, 120 bp, Artificial Sequence
  ENSG00000197608_21 (sequence is synthesized)
accttataaatgtaatgaatgtggtaaagcttttatcgaaaggtcaaacttggtttaccatcagagaaaccatactggagagaagccatacaaatgtatggaatgtggcaaggcgtttgg

SEQ ID NO: 718788 - DNA, 120 bp, Artificial Sequence
  ENSG00000197608_22 (sequence is synthesized)
gcggcggtcttgcctcactaaacaccaacgaattcattctagtgaaaaaccttataaatgtaatgagtgtggcaaatcttacattagtcgctcaggcctcactaaacatcagataaaaca

SEQ ID NO: 718789 - DNA, 120 bp, Artificial Sequence
  ENSG00000197608_23 (sequence is synthesized)
tgctggagagaaccttacaactaaactcaatgtggaaaggccgttagatgttgtcctaacctctgggatccccaaataatttatacttactcatatagcttgtatatttgtcctttccct

SEQ ID NO: 718790 - DNA, 120 bp, Artificial Sequence
  ENSG00000197608_24 (sequence is synthesized)
ttgaagtctcatgtggaattgtagtaatctccagtattggaggtggagcctagtgggaggtgattggatgatgggggtggctttctcaagaaagttttagtaccatccccttgttgctgt

SEQ ID NO: 718791 - DNA, 62 bp, Artificial Sequence
  ENSG00000197608_25 (sequence is synthesized)
ctttctcaagaaagttttagtaccatccccttgttgctgtccttgtgatagttctcatgagg

SEQ ID NO: 718792 - DNA, 89 bp, Artificial Sequence
  ENSG00000197608_26 (sequence is synthesized)
cctggccaacatggtgaaaccctgtttctgccaaaaatacaaaaattagctgggcttcgtggcgggtactggtagtaccagctactcgt

SEQ ID NO: 718793 - DNA, 120 bp, Artificial Sequence
  ENSG00000197608_27 (sequence is synthesized)
agcctgggtgacagagtgagactccatcacgcacacgcacgcacgaaagtgaatggcacctccctcttgtttgttcttctggccatgtgacatgcccttcacctcccaccatcattttaa

SEQ ID NO: 718794 - DNA, 120 bp, Artificial Sequence
  ENSG00000197608_28 (sequence is synthesized)
cttcacctcccaccatcattttaaccttcctcaggtttcccgagagggtgaacagacgtcagcgccatgtttcctataaagcctgcaaaattgtgagtcaattaaacctctttatacatt

SEQ ID NO: 718795 - DNA, 120 bp, Artificial Sequence
  ENSG00000197608_29 (sequence is synthesized)
ggagtagagcataaaggaggggagaaatggggcaagaaatgactgactgtcactacaagatatgtctttggtgttttttttggctttgttctgttttgttttggggggggacatggtctc

SEQ ID NO: 718796 - DNA, 120 bp, Artificial Sequence
  ENSG00000197608_30 (sequence is synthesized)
gagcagtggcatgatctcggctcactgcagcttctacttcctggcctcaagcagtctttccacctcagcctctcaacgcactggaattacagatgtgagccaccacactaggcctacaag

SEQ ID NO: 718797 - DNA, 120 bp, Artificial Sequence
  ENSG00000197608_31 (sequence is synthesized)
tgcttggcctatccctgtgtttttgattcagtatttcttgggagagagctagatatcttcatcttacagtgttcactaagcattcagaaggaggcaatcaatggatgagtttgtgaaata

SEQ ID NO: 718798 - DNA, 120 bp, Artificial Sequence
  ENSG00000197608_32 (sequence is synthesized)
gcagatcgcgctggggaaaggccacgtcgctatgagtgtgtttcagtctacctggattaaacgtttgcttctcttcgtctaccttgattaaacgtgcacttcgcagtcctcggttctcca

SEQ ID NO: 718799 - DNA, 120 bp, Artificial Sequence
  ENSG00000197614_0 (sequence is synthesized)
attgtaacacacattctacgcctagcctggctttcttgctctccctcatctcattgtttcagcggaggccaaatctgaagtcctttccagggagtggctctgttcatcttattcgccagc

SEQ ID NO: 718800 - DNA, 120 bp, Artificial Sequence
  ENSG00000197614_1 (sequence is synthesized)
caaagtaggaacagcgtaagaggagagagacacattcagcagccaaaggactcggtggaaagagcagaacaccatagacaatatgtcgctcttgggacccaaggtgctgctgtttcttgc

SEQ ID NO: 718801 - DNA, 120 bp, Artificial Sequence
  ENSG00000197614_2 (sequence is synthesized)
tgcattcatcatcacctctgactggatacccctgggggtcaatagtcaacgaggagacgatgtgactcaagcgactccagaaacattcacagaagatcctaatctggtgaatgatcccgc

SEQ ID NO: 718802 - DNA, 120 bp, Artificial Sequence
  ENSG00000197614_3 (sequence is synthesized)
tacagatgaaacagttttggctgttttggctgatattgcaccttccacagatgacttggcctccctcagtgaaaaaaataccactgcagagtgctgggatgagaaatttacctgcacaag

SEQ ID NO: 718803 - DNA, 120 bp, Artificial Sequence
  ENSG00000197614_4 (sequence is synthesized)
gctctactctgtgcatcggccggttaaacaatgcattcatcagttatgcttcaccagtttacgacgtatgtacatcgtcaacaaggagatctgctctcgtcttgtctgtaaggaacacga

SEQ ID NO: 718804 - DNA, 120 bp, Artificial Sequence
  ENSG00000197614_5 (sequence is synthesized)
agctatgaaagatgagctttgccgtcagatggctggtctgccccctaggagactccgtcgctccaattacttccgacttcctccctgtgaaaatgtggatttgcagagacccaatggtct

SEQ ID NO: 718805 - DNA, 120 bp, Artificial Sequence
  ENSG00000197614_6 (sequence is synthesized)
gtgatcattgaaaaagaggaaagaagaaaaaatgtatgggtgagaggaaggaggatctccttcttctccaaccattgacagctaacccttagacagtatttcttaaaccaatccttttgc

SEQ ID NO: 718806 - DNA, 120 bp, Artificial Sequence
  ENSG00000197614_7 (sequence is synthesized)
aatgtccagcttttacccctactctctactttttcacccaaactgataacatttatctcattttctagcacttaaaatacaaagtctatattattgcataattttgctgcttctcaatat

SEQ ID NO: 718807 - DNA, 120 bp, Artificial Sequence
  ENSG00000197614_8 (sequence is synthesized)
catagacacagtgaatagatgatgactatatggcttatatacaaacattctatgtacaatttcaagggagactaaactttaggctaataatctttactattgaatctgtctgatatagat

SEQ ID NO: 718808 - DNA, 120 bp, Artificial Sequence
  ENSG00000197614_9 (sequence is synthesized)
cttagggttgaagaagctatctttgtctatttgggctaaccatagaatttcatttattttcctcacaatattttcctagaccaactccccatcattcacgtgttcctctttactcttact

SEQ ID NO: 718809 - DNA, 120 bp, Artificial Sequence
  ENSG00000197614_10 (sequence is synthesized)
ttaactattttgctggcttgcccgaaaatttgcctggcaagtcttccttataagacacatcatggtaagttttgtagtcctgtaagattctgcaacacagtcaagaattatacaatccta

SEQ ID NO: 718810 - DNA, 120 bp, Artificial Sequence
  ENSG00000197614_11 (sequence is synthesized)
tcatgcagttgtctagtcgggaagtaaggttggaaactaagtctcatttactgattcgtttatgggtagtaccgggatgaacccaccaccacaaagcaaattagacaacttaatgtgaaa

SEQ ID NO: 718811 - DNA, 120 bp, Artificial Sequence
  ENSG00000197614_12 (sequence is synthesized)
tcataccattggttgacgtttccttgagttgctacttcgttcatcttcacaacttaacaagtgcacggtcgaattattgtgcaagtggcttttggatatcctgattggggcctaagaagg

SEQ ID NO: 718812 - DNA, 120 bp, Artificial Sequence
  ENSG00000197614_13 (sequence is synthesized)
gcattcagacttgaattttaataggcagacagaaagtttgcctaatagttaatacgaaagagtgaaagaaacacaatattcagacaacccacattcttatcctggctctagcagtaacca

SEQ ID NO: 718813 - DNA, 120 bp, Artificial Sequence
  ENSG00000197614_14 (sequence is synthesized)
accacgtagccttggataagccattttccttcattaggtcctggtttaatttcctcatctttaaaatgagaaggttaaatttatcttagtactgctgggcgcagtggctcatgcctgtaa

SEQ ID NO: 718814 - DNA, 120 bp, Artificial Sequence
  ENSG00000197614_15 (sequence is synthesized)
tgggtgacaaaagcaaaagtccatcttaagaaatatatatatatattatatatattcttagttctaagatttcctttaattctatgattctctggatttaaatgcattattcatatttct

SEQ ID NO: 718815 - DNA, 120 bp, Artificial Sequence
  ENSG00000197614_16 (sequence is synthesized)
tctaattcatagcaaccatatctgctttatcctaggtgagggtagcagtccacaatggaatagaagaaaatcccattataacaaatgacaaattatatatcatgaatccttctgtctgac

SEQ ID NO: 718816 - DNA, 120 bp, Artificial Sequence
  ENSG00000197614_17 (sequence is synthesized)
taactcaataactttctataaaagccaatggaattcaaataggagctaggagacaacaagttatatatgacagtggaggttgtattccttttatattgctgagaaaactagttaaatgat

SEQ ID NO: 718817 - DNA, 120 bp, Artificial Sequence
  ENSG00000197614_18 (sequence is synthesized)
cagattcttgctgttaagaaacaatttcgtttaatgggatctgtacaactgattttaaaaaaatgctacaaaaagccccaaagcatataatctctactccttacagtctctagaattaaa

SEQ ID NO: 718818 - DNA, 120 bp, Artificial Sequence
  ENSG00000197614_19 (sequence is synthesized)
tgtactcatttagacaacatattaaatgcatattttagccactttagagaaacctcataggcacagagtttccaagattaattttaagaatatcttcacgaacttgaccctcctactcca

SEQ ID NO: 718819 - DNA, 120 bp, Artificial Sequence
  ENSG00000197614_20 (sequence is synthesized)
cattgcaacatttccatcagacagcatttcaattccagtattatgtatattgcaaattaaacattttaaaatatttttttccaatttatttctcaaaataaaatgtcttttgttctggtt

SEQ ID NO: 718820 - DNA, 120 bp, Artificial Sequence
  ENSG00000197614_21 (sequence is synthesized)
gtgatcattgaaaaagaggaaagaagaaaaaattttgcttgcacttgctgtccttccaccatgggatgactctcatcagatgatggcaccatgttcttggacttctcagcctccagaact

SEQ ID NO: 718821 - DNA, 120 bp, Artificial Sequence
  ENSG00000197614_22 (sequence is synthesized)
agagcccattctggatagtgtgcagctgctgaaggatcctaaaaagacaggatgacagtttatggagcacatatttccagtagttcaattcaaattaatgacattgttgaacacctgaca

SEQ ID NO: 718822 - DNA, 120 bp, Artificial Sequence
  ENSG00000197614_23 (sequence is synthesized)
gggatcccagaatgcccaaaaagcatcttccatggtagtgtttctgtgttgataactatttaatgagcacccactatggaattgcaaactttgatggggccaaagtttttagcacaaccc

SEQ ID NO: 718823 - DNA, 120 bp, Artificial Sequence
  ENSG00000197614_24 (sequence is synthesized)
atttgattacctgaaaccctaaagagacagagggaatgtgtgtatgtctgtgtgtgtgtgaaagggctggagggggcaatggggaatgtcactgaacttagtcttgagcagacctcccaa

SEQ ID NO: 718824 - DNA, 120 bp, Artificial Sequence
  ENSG00000197614_25 (sequence is synthesized)
ataaccgtggaattctgatgaaggagacgccaagatgagcagatgatatgaaaaagtcacgcatatgagaaaggaagattccacatcaggggtgaaagaggccaaagggtagggccaagt

SEQ ID NO: 718825 - DNA, 120 bp, Artificial Sequence
  ENSG00000197616_0 (sequence is synthesized)
agagagactcctgcggcccagattcttcaggattctccgtgaagggataaccaggggaagcaccaagatgaccgatgcccagatggctgactttggggcagcggcccagtacctccgcaa

SEQ ID NO: 718826 - DNA, 120 bp, Artificial Sequence
  ENSG00000197616_1 (sequence is synthesized)
gtcagagaaggagcgtctagaggcccagacccggccctttgacattcgcactgagtgcttcgtgcccgatgacaaggaagagtttgtcaaagccaagattttgtcccgggagggaggcaa

SEQ ID NO: 718827 - DNA, 120 bp, Artificial Sequence
  ENSG00000197616_2 (sequence is synthesized)
ggtcattgctgaaaccgagaatgggaagacggtgactgtgaaggaggaccaggtgttgcagcagaacccacccaagttcgacaagattgaggacatggccatgctgaccttcctgcacga

SEQ ID NO: 718828 - DNA, 120 bp, Artificial Sequence
  ENSG00000197616_3 (sequence is synthesized)
gcccgcggtgcttttcaacctcaaggagcgctacgcggcctggatgatatatacctactcgggcctcttctgtgtcactgtcaacccctacaagtggctgccggtgtacaatgccgaggt

SEQ ID NO: 718829 - DNA, 120 bp, Artificial Sequence
  ENSG00000197616_4 (sequence is synthesized)
ggtggccgcctaccggggcaagaagaggagtgaggccccgccccacatcttctccatctccgacaacgcctatcagtacatgctgacagatcgggagaaccagtccatcctcatcacggg

SEQ ID NO: 718830 - DNA, 120 bp, Artificial Sequence
  ENSG00000197616_5 (sequence is synthesized)
agaatccggggcggggaagactgtgaacaccaagcgtgtcatccagtactttgccagcattgcagccataggtgaccgtggcaagaaggacaatgccaatgcgaacaagggcaccctgga

SEQ ID NO: 718831 - DNA, 120 bp, Artificial Sequence
  ENSG00000197616_6 (sequence is synthesized)
ggaccagatcatccaggccaaccccgctctggaggccttcggcaatgccaagactgtccggaacgacaactcctcccgctttgggaaattcattaggatccactttggggccactggaaa

SEQ ID NO: 718832 - DNA, 120 bp, Artificial Sequence
  ENSG00000197616_7 (sequence is synthesized)
gctggcttctgcagacatagagacctacctgctggagaagtcccgggtgatcttccagctgaaagctgagagaaactaccacatcttctaccagattctgtccaacaagaagccggagtt

SEQ ID NO: 718833 - DNA, 120 bp, Artificial Sequence
  ENSG00000197616_8 (sequence is synthesized)
gctggacatgctgctggtcaccaacaatccctacgactacgccttcgtgtctcagggagaggtgtccgtggcctccattgatgactccgaggagctcatggccaccgatagtgcctttga

SEQ ID NO: 718834 - DNA, 120 bp, Artificial Sequence
  ENSG00000197616_9 (sequence is synthesized)
cgtgctgggcttcacttcagaggagaaagctggcgtctacaagctgacgggagccatcatgcactacgggaacatgaagttcaagcagaagcagcgggaggagcaggcggagccagacgg

SEQ ID NO: 718835 - DNA, 120 bp, Artificial Sequence
  ENSG00000197616_10 (sequence is synthesized)
caccgaagatgctgacaagtcggcctacctcatggggctgaactcagctgacctgctcaaggggctgtgccaccctcgggtgaaagtgggcaacgagtatgtcaccaaggggcagagcgt

SEQ ID NO: 718836 - DNA, 120 bp, Artificial Sequence
  ENSG00000197616_11 (sequence is synthesized)
gcagcaggtgtactactccatcggggctctggccaaggcagtgtatgagaagatgttcaactggatggtgacgcgcatcaacgccaccctggagaccaagcagccacgccagtacttcat

SEQ ID NO: 718837 - DNA, 120 bp, Artificial Sequence
  ENSG00000197616_12 (sequence is synthesized)
aggagtcctggacatcgctggcttcgagatcttcgacttcaacagctttgagcagctctgcatcaacttcaccaacgagaagctgcagcagttcttcaaccaccacatgttcgtgctgga

SEQ ID NO: 718838 - DNA, 120 bp, Artificial Sequence
  ENSG00000197616_13 (sequence is synthesized)
gcaggaggagtacaagaaggagggcattgagtggacattcattgactttggcatggacctgcaggcctgcattgacctcatcgagaagcccatgggcatcatgtccatcctggaggagga

SEQ ID NO: 718839 - DNA, 120 bp, Artificial Sequence
  ENSG00000197616_14 (sequence is synthesized)
gtgcatgttccccaaggccactgacatgaccttcaaggccaagctgtacgacaaccacctgggcaagtccaacaatttccagaagccacgcaacatcaaggggaagcaggaagcccactt

SEQ ID NO: 718840 - DNA, 120 bp, Artificial Sequence
  ENSG00000197616_15 (sequence is synthesized)
ctccctgatccactacgccggcactgtggactacaacatcctgggctggctggaaaaaaacaaggatcctctcaacgagactgttgtggccctgtaccagaagtcctccctcaagctcat

SEQ ID NO: 718841 - DNA, 120 bp, Artificial Sequence
  ENSG00000197616_16 (sequence is synthesized)
ggccactctcttctcctcctacgcaactgccgatactggggacagtggtaaaagcaaaggaggcaagaaaaagggctcatccttccagacggtgtcggctctccaccgggaaaatctcaa

SEQ ID NO: 718842 - DNA, 120 bp, Artificial Sequence
  ENSG00000197616_17 (sequence is synthesized)
caagctaatgaccaacctgaggaccacccatcctcactttgtgcgttgcatcatccccaatgagcggaaggctccaggggtgatggacaaccccctggtcatgcaccagctgcgctgcaa

SEQ ID NO: 718843 - DNA, 120 bp, Artificial Sequence
  ENSG00000197616_18 (sequence is synthesized)
tggcgtgctggagggcatccgcatctgcaggaagggcttccccaaccgcatcctctacggggacttccggcagaggtatcgcatcctgaacccagtggccatccctgagggacagttcat

SEQ ID NO: 718844 - DNA, 120 bp, Artificial Sequence
  ENSG00000197616_19 (sequence is synthesized)
tgatagcaggaaggggacagagaagctgctcagctctctggacattgatcacaaccagtacaagtttggccacaccaaggtgttcttcaaggcagggctgcttgggctgctggaggagat

SEQ ID NO: 718845 - DNA, 120 bp, Artificial Sequence
  ENSG00000197616_20 (sequence is synthesized)
gcgggatgagaggctgagccgcatcatcacgcgcatgcaggcccaagcccggggccagctcatgcgcattgagttcaagaagatagtggaacgcagggatgccctgctggtaatccagtg

SEQ ID NO: 718846 - DNA, 120 bp, Artificial Sequence
  ENSG00000197616_21 (sequence is synthesized)
gaacattcgggccttcatgggggtcaagaattggccctggatgaagctctacttcaagatcaagccgctgctgaagagcgcagagacggagaaggagatggccaccatgaaggaagagtt

SEQ ID NO: 718847 - DNA, 120 bp, Artificial Sequence
  ENSG00000197616_22 (sequence is synthesized)
cgggcgcatcaaagagacgctggagaagtccgaggctcgccgcaaggagctggaggagaagatggtgtccctgctgcaggagaagaatgacctgcagctccaagtgcaggcggaacaaga

SEQ ID NO: 718848 - DNA, 120 bp, Artificial Sequence
  ENSG00000197616_23 (sequence is synthesized)
caacctcaatgatgctgaggagcgctgcgaccagctgatcaaaaacaagattcagctggaggccaaagtaaaggagatgaatgagaggctggaggatgaggaggagatgaacgcggagct

SEQ ID NO: 718849 - DNA, 120 bp, Artificial Sequence
  ENSG00000197616_24 (sequence is synthesized)
agctgacactggccaaggtggagaaggagaagcatgcaacagagaacaaggtgaagaacctaacagaggagatggctgggctggatgaaatcatcgctaagctgaccaaggagaagaaag

SEQ ID NO: 718850 - DNA, 120 bp, Artificial Sequence
  ENSG00000197616_25 (sequence is synthesized)
ctctacaagaggcccatcagcaggccctggatgaccttcaggttgaggaagacaaggtcaacagcctgtccaagtctaaggtcaagctggagcagcaggtggatgatctggagggatccc

SEQ ID NO: 718851 - DNA, 120 bp, Artificial Sequence
  ENSG00000197616_26 (sequence is synthesized)
tagagcaagagaagaaggtgcgcatggacctggagcgagcaaagcggaaactggagggcgacctgaagctgacccaggagagcatcatggacctggaaaatgataaactgcagctggaag

SEQ ID NO: 718852 - DNA, 120 bp, Artificial Sequence
  ENSG00000197616_27 (sequence is synthesized)
aaaagcttaagaagaaggagtttgacattaatcagcagaacagtaagattgaggatgagcaggtgctggcccttcaactacagaagaaactgaaggaaaaccaggcacgcatcgaggagc

SEQ ID NO: 718853 - DNA, 120 bp, Artificial Sequence
  ENSG00000197616_28 (sequence is synthesized)
tggaggaggagctggaggccgagcgcaccgccagggctaaggtggagaagctgcgctcagacctgtctcgggagctggaggagatcagcgagcggctggaagaggccggcggggccacgt

SEQ ID NO: 718854 - DNA, 120 bp, Artificial Sequence
  ENSG00000197616_29 (sequence is synthesized)
ccgtgcagatcgagatgaacaagaagcgcgaggccgagttccagaagatgcggcgggacctggaggaggccacgctgcagcacgaggccactgccgcggccctgcgcaagaagcacgccg

SEQ ID NO: 718855 - DNA, 120 bp, Artificial Sequence
  ENSG00000197616_30 (sequence is synthesized)
acagcgtggccgagctgggcgagcagatcgacaacctgcagcgggtgaagcagaagctggagaaggagaagagcgagttcaagctggagctggatgacgtcacctccaacatggagcaga

SEQ ID NO: 718856 - DNA, 120 bp, Artificial Sequence
  ENSG00000197616_31 (sequence is synthesized)
tcatcaaggccaaggcaaacctggagaaagtgtctcggacgctggaggaccaggccaatgagtaccgcgtgaagctagaagaggcccaacgctccctcaatgatttcaccacccagcgag

SEQ ID NO: 718857 - DNA, 120 bp, Artificial Sequence
  ENSG00000197616_32 (sequence is synthesized)
ccaagctgcagaccgagaatggagagttggcccggcagctagaggaaaaggaggcgctaatctcgcagctgacccgggggaagctctcttatacccagcaaatggaggacctcaaaaggc

SEQ ID NO: 718858 - DNA, 120 bp, Artificial Sequence
  ENSG00000197616_33 (sequence is synthesized)
agctggaggaggagggcaaggcgaagaacgccctggcccatgcactgcagtcggcccggcatgactgcgacctgctgcgggagcagtacgaggaggagacagaggccaaggccgagctgc

SEQ ID NO: 718859 - DNA, 120 bp, Artificial Sequence
  ENSG00000197616_34 (sequence is synthesized)
agcgcgtcctgtccaaggccaactcggaggtggcccagtggaggaccaagtatgagacggacgccattcagcggactgaggagctcgaagaggccaaaaagaagctggcccagcggctgc

SEQ ID NO: 718860 - DNA, 120 bp, Artificial Sequence
  ENSG00000197616_35 (sequence is synthesized)
aggatgccgaggaggccgtggaggctgttaatgccaagtgctcctcactggagaagaccaagcaccggctacagaatgagatagaggacttgatggtggacgtagagcgctccaatgctg

SEQ ID NO: 718861 - DNA, 120 bp, Artificial Sequence
  ENSG00000197616_36 (sequence is synthesized)
ctgctgcagccctggacaagaagcagagaaactttgacaagatcctggccgagtggaagcagaagtatgaggagtcgcagtctgagctggagtcctcacagaaggaggctcgctccctca

SEQ ID NO: 718862 - DNA, 120 bp, Artificial Sequence
  ENSG00000197616_37 (sequence is synthesized)
gcacagagctcttcaagctcaagaacgcctacgaggagtccctggagcacctagagaccttcaagcgggagaacaagaaccttcaggaggaaatctcggaccttactgagcagctaggag

SEQ ID NO: 718863 - DNA, 120 bp, Artificial Sequence
  ENSG00000197616_38 (sequence is synthesized)
aaggaggaaagaatgtgcatgagctggagaaggtccgcaaacagctggaggtggagaagctggagctgcagtcagccctggaggaggcagaggcctccctggagcacgaggagggcaaga

SEQ ID NO: 718864 - DNA, 120 bp, Artificial Sequence
  ENSG00000197616_39 (sequence is synthesized)
tcctccgggcccagctagagttcaaccagatcaaggcagagatcgagcggaagctggcagagaaggacgaggagatggaacaggccaagcgcaaccaccagcgggtggtggactcgctgc

SEQ ID NO: 718865 - DNA, 120 bp, Artificial Sequence
  ENSG00000197616_40 (sequence is synthesized)
agacctccctggatgcagagacacgcagccgcaacgaggtcctgagggtgaagaagaagatggaaggagacctcaatgagatggagatccagctcagccacgccaaccgcatggctgccg

SEQ ID NO: 718866 - DNA, 120 bp, Artificial Sequence
  ENSG00000197616_41 (sequence is synthesized)
aggcccagaagcaagtcaagagcctccagagcttgctgaaggacacccagatccagctggacgatgcggtccgtgccaacgacgacctgaaggagaacatcgccatcgtggagcggcgca

SEQ ID NO: 718867 - DNA, 120 bp, Artificial Sequence
  ENSG00000197616_42 (sequence is synthesized)
acaacctgctgcaggctgagctggaggagctgcgtgccgtggtggagcagacagagcggtcccggaagctggcggagcaggagctgattgagaccagcgagcgggtgcagctgctgcatt

SEQ ID NO: 718868 - DNA, 120 bp, Artificial Sequence
  ENSG00000197616_43 (sequence is synthesized)
cccagaacaccagcctcatcaaccagaagaagaagatggagtcggatctgacccagctccagtcggaagtggaggaggcagtgcaggagtgcagaaacgccgaggagaaggccaagaagg

SEQ ID NO: 718869 - DNA, 120 bp, Artificial Sequence
  ENSG00000197616_44 (sequence is synthesized)
ccatcacggatgccgccatgatggcagaggagctgaagaaggagcaggacaccagcgcccacctggagcgcatgaagaagaacatggagcagaccattaaggacctgcagcaccggctgg

SEQ ID NO: 718870 - DNA, 120 bp, Artificial Sequence
  ENSG00000197616_45 (sequence is synthesized)
acgaggccgagcagatcgccctcaagggaggcaagaagcagctgcagaagctggaagcgcgggtgcgggagctggagggtgagctggaggccgagcagaagcgcaacgcagagtcggtga

SEQ ID NO: 718871 - DNA, 120 bp, Artificial Sequence
  ENSG00000197616_46 (sequence is synthesized)
agggcatgaggaagagcgagcggcgcatcaaggagctcacctaccagacagaggaagacaaaaagaacctgctgcggctacaggacctggtggacaagctgcaactgaaggtcaaggcct

SEQ ID NO: 718872 - DNA, 120 bp, Artificial Sequence
  ENSG00000197616_47 (sequence is synthesized)
acaagcgccaggccgaggaggcggaggagcaagccaacaccaacctgtccaagttccgcaaggtgcagcatgagctggatgaggcagaggagcgggcggacatcgctgagtcccaggtca

SEQ ID NO: 718873 - DNA, 120 bp, Artificial Sequence
  ENSG00000197616_48 (sequence is synthesized)
acaagcttcgagccaagagccgtgacattggtgccaagcaaaaaatgcacgatgaggagtgacactgcctcgggaacctcactcttgccaacctgtaataaatatgagtgccaaactctg

SEQ ID NO: 718874 - DNA, 120 bp, Artificial Sequence
  ENSG00000197616_49 (sequence is synthesized)
cccttctacacccaagaaactagagtcccaagaatcccaggcctttctccaggcccagcttctccccactgtgaagtcatgggcatgaacaggatgatccccccactcttcctttcccag

SEQ ID NO: 718875 - DNA, 120 bp, Artificial Sequence
  ENSG00000197616_50 (sequence is synthesized)
gaccttgcactttatgcccctttgtggtggtcccctcagtgtcttaagagtgagatgtagtgaaggagaggcccctggcccctctgaccgcccatgagaagcgtcattcatggaaagatc

SEQ ID NO: 718876 - DNA, 120 bp, Artificial Sequence
  ENSG00000197616_51 (sequence is synthesized)
ctaggctgaaattagagatgtttggcctcccaccaccttcctgttggttgagaaataagccagtctccagccctcttgcttatgggcattcctcagaagagacaaggccgcaggcgggag

SEQ ID NO: 718877 - DNA, 120 bp, Artificial Sequence
  ENSG00000197616_52 (sequence is synthesized)
gccccataggctggggctgacttgctctcagtgaacctctgctctttgtcagcataggccagagcccggattgtctgacccacacccagcccagccacggccttcatgaaatgggagctt

SEQ ID NO: 718878 - DNA, 120 bp, Artificial Sequence
  ENSG00000197616_53 (sequence is synthesized)
caggggaggggaaaagacccggaaatcttccatagaacttctggcacacaaagagaaggccacagagaaagaggaccctagaatgctctaaaacctccacttgcatagctgagagctgtg

SEQ ID NO: 718879 - DNA, 120 bp, Artificial Sequence
  ENSG00000197616_54 (sequence is synthesized)
cccttggcccgttattttcagtgtacctgggaagaaaaggccaaggagacgagggtgtcagtccatttgatagatggataccagaggcacaagaaagaggttacagatacagaaccacag

SEQ ID NO: 718880 - DNA, 120 bp, Artificial Sequence
  ENSG00000197616_55 (sequence is synthesized)
agtgatttgtggacagaagtagaaatggcatcctggcacatacaatgataaagagataggaatgatcgagtgacgttggagccagtgatcccgatgcctgaattctggcccagtacaata

SEQ ID NO: 718881 - DNA, 120 bp, Artificial Sequence
  ENSG00000197616_56 (sequence is synthesized)
tattagaatgtagaataatctggattatgataatacccccttctttctgcattctttttctggtcaagaactactggccaagagaacctatgtaagtccaggttggagctttatccacca

SEQ ID NO: 718882 - DNA, 120 bp, Artificial Sequence
  ENSG00000197616_57 (sequence is synthesized)
cttttatattaccacattagggaattccattaggttctgagcccctccccctacttctagctttatgacttcagccttcattgctctgtggatccctgactgacaaccttgcattgcccc

SEQ ID NO: 718883 - DNA, 120 bp, Artificial Sequence
  ENSG00000197616_58 (sequence is synthesized)
tttgacctacgatagagtcagagaatcttccccaccacctctttgacctggatcattgcagggaggggcagcaaaggcaaggggagaagagtaaaatgatggaggagggaaaggtgattg

SEQ ID NO: 718884 - DNA, 120 bp, Artificial Sequence
  ENSG00000197619_0 (sequence is synthesized)
aaacgctgggaacgcctccgaccctggatagtcgccgtcaggcactgaggaggccgagagatgaggccggagcccaccaagttctgggaagttctttctgacacaagtaagataacatct

SEQ ID NO: 718885 - DNA, 120 bp, Artificial Sequence
  ENSG00000197619_1 (sequence is synthesized)
ctgccatgcccacaggtgctgagaacaagagaaatcaagtgaaggaaggaggcggagtttccaagacttgggtgtcatcatttctggggacatccttgattggagattgaagtttttgaa

SEQ ID NO: 718886 - DNA, 120 bp, Artificial Sequence
  ENSG00000197619_2 (sequence is synthesized)
ccgaaatttagagctgattcagaagagacaaatacagaacgtccaagttagcagtcatttcccaaatttaggagacaatgatgcaggcccaggaatccctaacactggaggatgtggctg

SEQ ID NO: 718887 - DNA, 120 bp, Artificial Sequence
  ENSG00000197619_3 (sequence is synthesized)
tggacttcacctgggaggagtggcagttcctgagccctgctcagaaggacctgtaccgggacgtgatgttggagaactacagcaacctggtggcagtggggtatcaagccagcaaaccag

SEQ ID NO: 718888 - DNA, 120 bp, Artificial Sequence
  ENSG00000197619_4 (sequence is synthesized)
atgcactctccaaattggaacgaggagaagaaacttgcacaacagaagatgaaatctactctcgaatctgttctgaaatcaggaaaattgatgatcctctgcagcatcacttgcaaaatc

SEQ ID NO: 718889 - DNA, 120 bp, Artificial Sequence
  ENSG00000197619_5 (sequence is synthesized)
aaagtattcagaagagtgtgaaacagtgccatgaacagaatatgtttggaaatattgttaatcagaacaaaggtcatttcctgctgaagcaagattgtgatacgtttgacttacatgaaa

SEQ ID NO: 718890 - DNA, 120 bp, Artificial Sequence
  ENSG00000197619_6 (sequence is synthesized)
aacctttaaaatcaaatttaagttttgaaaaccagaaaaggagctctggcctaaagaactctgctgagtttaatagagatgggaaatccctttttcatgctaaccataaacaattttata

SEQ ID NO: 718891 - DNA, 120 bp, Artificial Sequence
  ENSG00000197619_7 (sequence is synthesized)
ctgaaatgaagtttcctgcaattgcaaaacctattaataagtcccagttcattaagcaacagagaactcacaacatagagaatgcccatgtatgcagtgaatgtgggaaagccttcctca

SEQ ID NO: 718892 - DNA, 120 bp, Artificial Sequence
  ENSG00000197619_8 (sequence is synthesized)
agttgtctcagtttattgatcatcagagagttcacactggagaaaaacctcatgtatgcagtatgtgtgggaaagctttctccagaaaatccagactaatggaccatcagagaactcata

SEQ ID NO: 718893 - DNA, 120 bp, Artificial Sequence
  ENSG00000197619_9 (sequence is synthesized)
cagaactgaaacattatgaatgcactgaatgtgacaaaaccttcctcaagaaatcacagctcaatatacatcagaaaactcatatgggagggaaaccttacacatgtagccaatgtggga

SEQ ID NO: 718894 - DNA, 120 bp, Artificial Sequence
  ENSG00000197619_10 (sequence is synthesized)
aagccttcatcaagaagtgtcggctcatttatcatcaacgaactcatacaggagagaaaccccatggatgcagtgtatgtgggaaggccttctctacaaagttcagtctcactacacatc

SEQ ID NO: 718895 - DNA, 120 bp, Artificial Sequence
  ENSG00000197619_11 (sequence is synthesized)
agaaaactcatacaggagaaaaaccttatatatgtagtgaatgtggaaaaggcttcattgagaagaggcgtcttactgcacatcatcgaactcatactggtgagaaaccctttatatgca

SEQ ID NO: 718896 - DNA, 120 bp, Artificial Sequence
  ENSG00000197619_12 (sequence is synthesized)
ataaatgtgggaaaggcttcaccttgaagaacagtcttatcacacatcagcaaactcatacaggagagaaattatatacatgtagtgaatgtggaaaaggcttttcaatgaagcactgtc

SEQ ID NO: 718897 - DNA, 120 bp, Artificial Sequence
  ENSG00000197619_13 (sequence is synthesized)
tcatggtacatcaacgaactcatactggagagaaaccttataaatgcaatgagtgtggaaagggcttcgctttgaagagcccactcatcagacatcagcgaacacatactggagagaaac

SEQ ID NO: 718898 - DNA, 120 bp, Artificial Sequence
  ENSG00000197619_14 (sequence is synthesized)
cctatgtatgcaccgaatgtcgaaaaggtttcaccatgaagagtgacctcattgtacatcagcgaactcatactgcagagaagccatatatatgcaatgattgtggaaaaggcttcactg

SEQ ID NO: 718899 - DNA, 120 bp, Artificial Sequence
  ENSG00000197619_15 (sequence is synthesized)
tgaagagccgccttattgtgcatcagcgaactcatactggagaaaaaccctatgtatgtggtgagtgtggaaaaggctttccagcaaagatccggctaatgggacatcaacgaactcata

SEQ ID NO: 718900 - DNA, 120 bp, Artificial Sequence
  ENSG00000197619_16 (sequence is synthesized)
agagaaaccctatgtatgcagtgaatgtggcaaaggcttaactgggaaaagcatgctcattgcacatcagcgaactcatactggggagaaaccttatatatgcaatgaatgtggaaaggg

SEQ ID NO: 718901 - DNA, 120 bp, Artificial Sequence
  ENSG00000197619_17 (sequence is synthesized)
cttcaccatgaagagtactctcagtatacatcagcaaactcatactggagagaagccatacaaatgcaatgaatgtgataaaaccttcaggaagaagacatgcctcatacaacatcagcg

SEQ ID NO: 718902 - DNA, 120 bp, Artificial Sequence
  ENSG00000197619_18 (sequence is synthesized)
atttcacacaggaaagacttcctttgcatgtactgaatgtggaaaattctctttgcgcaaaaatgatcttattacacatcagagaattcacacaggagagaaaccgtacaaatgcagtga

SEQ ID NO: 718903 - DNA, 120 bp, Artificial Sequence
  ENSG00000197619_19 (sequence is synthesized)
ctgcgggaaagccttcactacaaaatcagggctcaatgttcatcaaagaaaacatacaggagagaggccctatggatgtagtgattgtgggaaagcttttgcgcacttgtctatccttgt

SEQ ID NO: 718904 - DNA, 120 bp, Artificial Sequence
  ENSG00000197619_20 (sequence is synthesized)
taaacacaggagaattcacaggtagtcattttgggaaagcctcttgccagatgtaggcccttaagatatctgcaaagaagagtaatttcatgaatgcagactacatggttgtttatttag

SEQ ID NO: 718905 - DNA, 120 bp, Artificial Sequence
  ENSG00000197619_21 (sequence is synthesized)
tgatcagttacttcatgttttgtgtcagagaaaacatgtacaaaacatttgagaaaatattttaggacattatgtctaaaaattgtatactgagaaaaatcctatgaatgtggcagacta

SEQ ID NO: 718906 - DNA, 120 bp, Artificial Sequence
  ENSG00000197619_22 (sequence is synthesized)
taaaagcctttggtgggaagataaaccccctcagaagtgatcatagatcatgaataaactactaattcgtggaaatgtaataattataggaacgtctttgcccaaaaataaaacttcaac

SEQ ID NO: 718907 - DNA, 120 bp, Artificial Sequence
  ENSG00000197619_23 (sequence is synthesized)
agattgagagagttcacactggagaaatactttcctctggcaaacccctgtggcagggttttcagtaaaatgttttgcctcatcgtgtgctaggaaataatgcagaaaaaacttatgaaa

SEQ ID NO: 718908 - DNA, 120 bp, Artificial Sequence
  ENSG00000197619_24 (sequence is synthesized)
acattcaatgtagaagacttttaggaaaatatcagagaatttaatgaaggaaagaagccttggcaaaatgatggatgagagctttctgtcacaattctaaccttaacagataatatgcct

SEQ ID NO: 718909 - DNA, 120 bp, Artificial Sequence
  ENSG00000197619_25 (sequence is synthesized)
catgtgcatttgggaacaggatagcttgagccatattcctagttgccttgtcactgattttatacattttaaattgtgacttcctctaatcacgaactaaaatttaatattgtatataat

SEQ ID NO: 718910 - DNA, 120 bp, Artificial Sequence
  ENSG00000197619_26 (sequence is synthesized)
accggagtattttatgcctgcctcattttattatatgattagctcctgcatttctttggttctaagtttgtgttatttcagaataactaaagtacttcagaatgaaactggatacagtat

SEQ ID NO: 718911 - DNA, 120 bp, Artificial Sequence
  ENSG00000197619_27 (sequence is synthesized)
tggatacagtatattcagttcataagtgtaattgaccatacttgaatatgtttaagtttataagtaacatcaggtgttatgaaattaatataaataagatgtttttgtaagtttttattt

SEQ ID NO: 718912 - DNA, 120 bp, Artificial Sequence
  ENSG00000197619_28 (sequence is synthesized)
agattcacaaaatcttaccaaaatattccagagttcttgcccttaacccagcttcttccaaagataacaacttacataagcatagttcattaccaaatacaggaaagtgaaattgttaca

SEQ ID NO: 718913 - DNA, 120 bp, Artificial Sequence
  ENSG00000197619_29 (sequence is synthesized)
atactgttaactacagaatttatttggaaatcaccagttttaacatgcatgcatttttgtttgttttttatatgtagctttaagaaatcttaacacatatattgattcatgtcaccacca

SEQ ID NO: 718914 - DNA, 120 bp, Artificial Sequence
  ENSG00000197619_30 (sequence is synthesized)
ccgtaatcgagattcagaatgttgcatcaatgcaaactccctcatgctccttgtttatagtcacaacctctcctcagccctaacccttggcaatcagaaatcttttcatctttagttttg

SEQ ID NO: 718915 - DNA, 120 bp, Artificial Sequence
  ENSG00000197619_31 (sequence is synthesized)
tcattagtagcatgttataaaaatggaatcatacagcatgtacccttttggtattggctatttcaactaaagcagattaacctgaaatccatccaagttgttctgcatatcattgttctg

SEQ ID NO: 718916 - DNA, 120 bp, Artificial Sequence
  ENSG00000197619_32 (sequence is synthesized)
tttttattggccactaataatctatgatacgaatataccactatttgtttattcacccactgaaggacattagttttgttcccggtttttcttactgttacaaataaaaatcctatgaac

SEQ ID NO: 718917 - DNA, 120 bp, Artificial Sequence
  ENSG00000197619_33 (sequence is synthesized)
gggcgtgttcgtggacagtggtgatggactggtatctgtcggcgccagcgtttggcgacgccagtggaattctttcaggagcttagcgtgggtccgattcctatcgcaggggaactacaa

SEQ ID NO: 718918 - DNA, 120 bp, Artificial Sequence
  ENSG00000197619_34 (sequence is synthesized)
agtcgccgtcaggcactgaggaggccgagagatgaggccggagcccaccaagttctgggaaaatactttgcaagtatcaagatgtggatggcggccgggtgcagtggctcatgcctgtag

SEQ ID NO: 718919 - DNA, 120 bp, Artificial Sequence
  ENSG00000197619_35 (sequence is synthesized)
gcctccgaccctggatagtcgccgtcaggcactgaggaggccgagagatgaggccggagcccaccaagttctgggaagttctttctgacacaagtaagataacatctctgccatgaatac

SEQ ID NO: 718920 - DNA, 86 bp, Artificial Sequence
  ENSG00000197619_36 (sequence is synthesized)
agagatcacgccactggagtcttactcactccagcctgggcaacagacccacaggtgctgagaacaagagaaatcaagtgaaggaa

SEQ ID NO: 718921 - DNA, 120 bp, Artificial Sequence
  ENSG00000197619_37 (sequence is synthesized)
gtcgccgtcaggcactgaggaggccgagagatgaggccggagcccaccaagttctgggaagttctttctgacacaagtaagataacatctctgccatggaatccctaacactggaggatg

SEQ ID NO: 718922 - DNA, 120 bp, Artificial Sequence
  ENSG00000197619_38 (sequence is synthesized)
agtcgccgtcaggcactgaggaggccgagagatgaggccggagcccaccaagttctgggaagttctttctgacacaagtaagataacatctctgccatgaccttgctcctctgcttacac

SEQ ID NO: 718923 - DNA, 120 bp, Artificial Sequence
  ENSG00000197619_39 (sequence is synthesized)
tggagtcatctttcttttgcttgaagaatatccgttaggatttgctgtaatatgtaattcctcaaggatatttttgctgagtatcctttatacatttatacttagaatactttgcaagta

SEQ ID NO: 718924 - DNA, 120 bp, Artificial Sequence
  ENSG00000197619_40 (sequence is synthesized)
tcaggaggtgcatatgcaggtttgtctcatggatatattgcctgatgccgaggattcactagaagctcaatcctgtcacccaagtagtgaacatagtaccaaataggtggttcttcaacc

SEQ ID NO: 718925 - DNA, 120 bp, Artificial Sequence
  ENSG00000197619_41 (sequence is synthesized)
cttgccttcctcccttcttcctcttggagtccccagtgtctattgttcctgtcttgatgtccctgtgttcccaatgtttagctcttgcctacaagtgagaatacacagtatttggttttc

SEQ ID NO: 718926 - DNA, 120 bp, Artificial Sequence
  ENSG00000197620_0 (sequence is synthesized)
gacggaagcaggagaccatcaaggtcagtgcgatttaggccacctgagagacacggggggaaggtcaggccactgcccatgagcttggagggctggcgtgtgatgcgcttctgtgcttcc

SEQ ID NO: 718927 - DNA, 120 bp, Artificial Sequence
  ENSG00000197620_1 (sequence is synthesized)
gcaggctacgggaggcccggggcgcttgcgaagatgaagtttggctgcctctccttccggcagccttatgctggctttgtcttaaatggaatcaagactgtggagacgcgctggcgtccc

SEQ ID NO: 718928 - DNA, 120 bp, Artificial Sequence
  ENSG00000197620_2 (sequence is synthesized)
ctgctgagcagccagcggaactgtaccatcgccgtccacattgctcacagggactgggaaggcgatgcctggcgggagctgctggtggagagactcgggatgactcctgctcagattcag

SEQ ID NO: 718929 - DNA, 120 bp, Artificial Sequence
  ENSG00000197620_3 (sequence is synthesized)
gccttgctcaggaaaggggaaaagtttggtcgaggagtgatagcgggactcgttgacattggggaaactttgcaatgccccgaagacttaactcccgatgaggttgtggaactagaaaat

SEQ ID NO: 718930 - DNA, 120 bp, Artificial Sequence
  ENSG00000197620_4 (sequence is synthesized)
caacctgaagcagaagtacctgactgtgatttcaaaccccaggtggttactggagcccatacctaggaaaggaggcaaggatgtattccaggtagacatcccagagcacctgatcccttt

SEQ ID NO: 718931 - DNA, 120 bp, Artificial Sequence
  ENSG00000197620_5 (sequence is synthesized)
ggggcatgaagtgtgacaagtgtgggctcctgaaaggaatgttccagagaaaccagctaaatcatgacaccttcaatttgccatcatgacgcagacctgtatacattaggttaaatctga

SEQ ID NO: 718932 - DNA, 120 bp, Artificial Sequence
  ENSG00000197620_6 (sequence is synthesized)
atttccactgctttggagagtcccacccactaagcactgtgcatgtaaacaggttcctttgctcagatgaaggaagtagggggtggggctttccttgtgtgatgcctccttaggcacaca

SEQ ID NO: 718933 - DNA, 120 bp, Artificial Sequence
  ENSG00000197620_7 (sequence is synthesized)
ggcaatgtctcaagtactttgaccttagggtagaaggcaaagctgccagtaaatgtctcagcattgctgctaattttggtcctgctagtttctggattgtacaaataaatgtgttgtaga

SEQ ID NO: 718934 - DNA, 120 bp, Artificial Sequence
  ENSG00000197620_8 (sequence is synthesized)
ggaagagttatagaccgctaacacctgtcactggccactggtttcccggagttagcggcaacgaccttgcagcctggacactagccaggcgctccctcttctcacagcggcccacgtctc

SEQ ID NO: 718935 - DNA, 120 bp, Artificial Sequence
  ENSG00000197620_9 (sequence is synthesized)
cttgcttgggagcccatcgtcctggctccggtggcctcgctgggtctcggggaagcagaggactgttcattcctgtggcgaaaagccggagtcggccctagacacccacgactcgcaggg

SEQ ID NO: 718936 - DNA, 120 bp, Artificial Sequence
  ENSG00000197620_10 (sequence is synthesized)
tccatggttccggaggccgtgagacctgccggggctgacaggtgccagggcccatgctgcgggagcctgtgtgctcagccttcttgcggacggtaaagaagctaagtggaagagtgtttc

SEQ ID NO: 718937 - DNA, 120 bp, Artificial Sequence
  ENSG00000197620_11 (sequence is synthesized)
ctcctctggccgtaaagcaggtactctctgcagcaccagctgtccccgccctactccggaccgccccaaagactccatgggatggacctgagtcagccgaatcccagccccttcccttgg

SEQ ID NO: 718938 - DNA, 120 bp, Artificial Sequence
  ENSG00000197620_12 (sequence is synthesized)
aaatgtgtaactagcatccaggcgacaatacagaaagtctgggacctggcactgaatgtttgcctggtagtgactagccgttaatcaaccgactcatccaggatgaagaggacgtcagac

SEQ ID NO: 718939 - DNA, 120 bp, Artificial Sequence
  ENSG00000197620_13 (sequence is synthesized)
ttagagcagctgtctgtcctttcaggttactctcactcttctgaaagtgtctgtcagtttctgaagcatgtgtgttacctgcatcacacagctacttcctatcctagcaatacatccaaa

SEQ ID NO: 718940 - DNA, 120 bp, Artificial Sequence
  ENSG00000197620_14 (sequence is synthesized)
atacagctctagtagagtgaggttaacttggaaatgtgatcagtagtgttgttttattttgtagtaatttttttttttttttggtgatttagcaaagtttctagttgttatccatgagga

SEQ ID NO: 718941 - DNA, 120 bp, Artificial Sequence
  ENSG00000197620_15 (sequence is synthesized)
tgatgggcatttccccccaggtattgactgcagtggcccttctcttctgagccaggatgttatggtggttgtacatcccatggcagatggggtggcctgactttcaagtgggcctctttg

SEQ ID NO: 718942 - DNA, 120 bp, Artificial Sequence
  ENSG00000197620_16 (sequence is synthesized)
gaggcccctggatgctaggctagggatgctgagctgctgaccagacacttcctggcaacattgggagggacccatgaggaaacaatctcctgtttgaagatacaggaagatattgccgga

SEQ ID NO: 718943 - DNA, 120 bp, Artificial Sequence
  ENSG00000197620_17 (sequence is synthesized)
atcaggcgtctattctttctcctgaccagcaggccaatctcaggggaccaggtcttcctgggcttggcctcgacacttcctagcaacatcctttgctgagtgtgtgaaaatgctgcttct

SEQ ID NO: 718944 - DNA, 120 bp, Artificial Sequence
  ENSG00000197620_18 (sequence is synthesized)
ccaaataaacaaggacaatggggaccaaagcctgtcttggacaggatttccagcctcccctggtttctgccaatgagatgtatataatatacaaggttaaaaaaaacacagacaacagtt

SEQ ID NO: 718945 - DNA, 120 bp, Artificial Sequence
  ENSG00000197620_19 (sequence is synthesized)
ctcatttaaattgtttattatttatttccatggaattttgtttttctttattaagaccaaaaatgtgtttctcattaaaaaatggcaacttttatgggccattagtggcctgtgacttca

SEQ ID NO: 718946 - DNA, 120 bp, Artificial Sequence
  ENSG00000197620_20 (sequence is synthesized)
agctctgggcccaaaactcctgcctggtgtcctcgtcccacccttccacttactcttcctccctcccgttccttttcctccttccggttcttcgtcgaggctgccggtctcgaggtcccc

SEQ ID NO: 718947 - DNA, 120 bp, Artificial Sequence
  ENSG00000197620_21 (sequence is synthesized)
tggccttggcctggttggctggcgcgcatcagggccaggtaaagagaatagcgtctcctagcagccagggcgtgcgtacgtgcgtgatgtcgtcagtgcgtgtcttcgagaatgcgagat

SEQ ID NO: 718948 - DNA, 120 bp, Artificial Sequence
  ENSG00000197620_22 (sequence is synthesized)
tcataatgtttgctgtctatatgcatggctgagtacgtgcctcccgcgtacgtgcgtggtgtgcatacatgcgtgattgcgcgcccacgtacgttcttcgtgaaagggatgacgggagct

SEQ ID NO: 718949 - DNA, 120 bp, Artificial Sequence
  ENSG00000197620_23 (sequence is synthesized)
ttccctggatgtggggctgggaactcgtgcggggcgcgaccgaggcgccttttcctgtcccctgctgtcggcagggtctcggctccgctccttctaagcgcgtgtacccgcgacgtgcgt

SEQ ID NO: 718950 - DNA, 120 bp, Artificial Sequence
  ENSG00000197620_24 (sequence is synthesized)
ctgcgagtagaaagcccgtgtactgctccacacacagcggccccacctcagtccggtcttccctgcctcccgttggcccttctgctgtgagctcgcctggacctgaggccgggcggtgca

SEQ ID NO: 718951 - DNA, 120 bp, Artificial Sequence
  ENSG00000197620_25 (sequence is synthesized)
cagctctgtggcctgtggcgccgtgctcagcgtgacctacccagaattaagctgaggacaatgggatttagagtcccaaacactcgccccgtgacaatgggaggggaagtgtcatttttc

SEQ ID NO: 718952 - DNA, 120 bp, Artificial Sequence
  ENSG00000197620_26 (sequence is synthesized)
tcccttcgaatggagcatgcttggctgcaagaatgctgctcaacatggtgaaatgattttctgccctgcgggctggtgcaccctgtggtccttgacccagacaggtgcggagggtcccac

SEQ ID NO: 718953 - DNA, 120 bp, Artificial Sequence
  ENSG00000197620_27 (sequence is synthesized)
gcagaaccaaactgtgatgtgcacatgtgtgttactgataagaccaggcctcccagctcttcttggtttccaatgcctgctaagtacatgaccttcttagggccattaaccagctttgct

SEQ ID NO: 718954 - DNA, 120 bp, Artificial Sequence
  ENSG00000197620_28 (sequence is synthesized)
gtcttgcacttaatgacctttcctctttatcttccttgttgtgcaggtaaagaagctaagtggaagagtgtttcctcctctggccgtaaagcagctgtccccgccctactccggaccgcc

SEQ ID NO: 718955 - DNA, 120 bp, Artificial Sequence
  ENSG00000197620_29 (sequence is synthesized)
attaggtgccacgtactgggctgggtgctcttggtgccttatctcccttcctcacagccatgtggaaactgaggcatctcaagagtctatgactgggctgaggttctggtttcgagccca

SEQ ID NO: 718956 - DNA, 120 bp, Artificial Sequence
  ENSG00000197620_30 (sequence is synthesized)
gggttccttccaaggcacagggccgtcctccatgcaagaggaggggaccctctcccaagccagacacgcaggaggctgggcaagagttgtgggaagtcagagcccgtgtgactgtgggct

SEQ ID NO: 718957 - DNA, 120 bp, Artificial Sequence
  ENSG00000197620_31 (sequence is synthesized)
ggtgcctcattctcctcagccatagagtgggcctcacagtaccactgaccctgctgggttacttgaagattcaatttgatgatccgaggatcatgccatcccagaggctggcacgtggaa

SEQ ID NO: 718958 - DNA, 120 bp, Artificial Sequence
  ENSG00000197620_32 (sequence is synthesized)
aaggaggcaaggatgtattccagaatccatagaggttcagctggcgaatgaaactcgtcaagctgtctgttttgaagatcctctctgcacctttccgttgaagaacctccctctggaaga

SEQ ID NO: 718959 - DNA, 120 bp, Artificial Sequence
  ENSG00000197620_33 (sequence is synthesized)
gatccttgtcgatgatcacggcgtctccatcatcgttccagctcacagacttgaatgtgtcttcctccacaatcgtccaaagctttcttgggaaggagagcctaaaaaggttgtggttgt

SEQ ID NO: 718960 - DNA, 120 bp, Artificial Sequence
  ENSG00000197620_34 (sequence is synthesized)
cttccacgttgaccacgcgttggtttcggtcttctggtggtgagttatcttgggagcctggatcttggctcatggcttggtcctcgtgcctgtccaaaacctcgctggaatctggatttg

SEQ ID NO: 718961 - DNA, 120 bp, Artificial Sequence
  ENSG00000197620_35 (sequence is synthesized)
gatcaggtgaagaaccagatgggcccccgcttgttggctctccaccaacagatggggccagcttggcttcatattcctgttcagtgttctgactcgccatggagctacaccagaatcagg

SEQ ID NO: 718962 - DNA, 120 bp, Artificial Sequence
  ENSG00000197620_36 (sequence is synthesized)
agcattttgtacccaaggcccttatcactgtcctagcaagtccaaaatgccttcagtcagagtaggcgtgcccaataaatactgtccacaaaattctagagtctcggtatcagggcaacc

SEQ ID NO: 718963 - DNA, 120 bp, Artificial Sequence
  ENSG00000197620_37 (sequence is synthesized)
gaccgctaacacctgtcactggccactggtttcccggagttagcggcaacgaccttgcagcctggacactagccaggcgctccctcttctcacagcggcccacgtaaagaagctaagtgg

SEQ ID NO: 718964 - DNA, 120 bp, Artificial Sequence
  ENSG00000197620_38 (sequence is synthesized)
tgtcacaaaggtggctctcagccaatctggagagggggccctggccaggtgttgggggagtagacaggtggcatggccttcagcttctccctcttctaaaagtataaacaggcatggttc

SEQ ID NO: 718965 - DNA, 120 bp, Artificial Sequence
  ENSG00000197620_39 (sequence is synthesized)
aagttcccagaaaagtctcccatcttctgacagtcacattgtgtcaaagggccaggccccagatgagctgagaaaccatggctctatggccactcccaaccctgaagacaggggaggcca

SEQ ID NO: 718966 - DNA, 120 bp, Artificial Sequence
  ENSG00000197620_40 (sequence is synthesized)
tttgctggcctctaatttgctcaagagccagcccctagttatccctagcttgggtttcaccaagactgcctgactcatatggacccctcatgggtgactgccttctaggagatggtggtc

SEQ ID NO: 718967 - DNA, 120 bp, Artificial Sequence
  ENSG00000197620_41 (sequence is synthesized)
cctaccaggctgtttggcctgatctgtgtggtagcacccctcttttccaatccccccatctcctttctgctttggtctcttccaggtactcctaatgattggttgcatgtgctccagtgg

SEQ ID NO: 718968 - DNA, 120 bp, Artificial Sequence
  ENSG00000197620_42 (sequence is synthesized)
ctctcagcggacacctgcctccccctgctgattctcaagagtccgcgagctcttcctgcagcttctcctcgctcagctctcccacggccctgcccacaatggctgccggtctcgaggtcc

SEQ ID NO: 718969 - DNA, 120 bp, Artificial Sequence
  ENSG00000197622_0 (sequence is synthesized)
agccggccccacctctgccggctcgtactcggctcccccacctcgccgcagagctagcccgggaagcccacactggcggccacggagcagagtccctcacccccaccagctgtagctgaa

SEQ ID NO: 718970 - DNA, 120 bp, Artificial Sequence
  ENSG00000197622_1 (sequence is synthesized)
cgtctggatggtggagaagagcagggttccgagtctgaggaagacataaccttgtgcctgcctgcccacctctctctctggtcctgttcatctctcaggctctgagacactgaccttcac

SEQ ID NO: 718971 - DNA, 120 bp, Artificial Sequence
  ENSG00000197622_2 (sequence is synthesized)
tgctcagttaaaggttccagggattccactttgtctggacccatccagctgagtgaacccagggtggtggtgtatctggggagagtgaggagtgggttgtccaaacaccagggaaagagc

SEQ ID NO: 718972 - DNA, 120 bp, Artificial Sequence
  ENSG00000197622_3 (sequence is synthesized)
cctttggggcctcagacagcggagtgaagctggaaccatcagggaacatgagtgaattttggcacaaactgggctgctgtgtggtagagaaaccccagccgaagaagaagagaagacgga

SEQ ID NO: 718973 - DNA, 120 bp, Artificial Sequence
  ENSG00000197622_4 (sequence is synthesized)
ttgaccggaccatgattggggaaccaatgaattttgttcacctgactcacattggctcaggggagatgggggccggagatggacttgccatgacaggtgcagttcaggagcagatgagat

SEQ ID NO: 718974 - DNA, 120 bp, Artificial Sequence
  ENSG00000197622_5 (sequence is synthesized)
ccaagggaaaccgagataggccatggagcaattctaggggcttatagctccaataatggaatggttctgccatcttgaaacccccattctgtttccagcccagaagaaatgctgccccta

SEQ ID NO: 718975 - DNA, 120 bp, Artificial Sequence
  ENSG00000197622_6 (sequence is synthesized)
ccagatccctccttgaaccagtgatctaaggacccctcttttccctatctgcctaacagtgcctcacaaggcttgggggctggactccctctactccctctggccatagcccctcctgga

SEQ ID NO: 718976 - DNA, 120 bp, Artificial Sequence
  ENSG00000197622_7 (sequence is synthesized)
gatggggtcaaggcagcaggactgatcaagtgactactggttagccagaggagctcagctgaagccctggaaaccctcaggtctgagataggagttctctaggaacctggaatgagttcc

SEQ ID NO: 718977 - DNA, 120 bp, Artificial Sequence
  ENSG00000197622_8 (sequence is synthesized)
tgtctcctgaatgatggtctgggtgccacctgtttttaaactcttaaacctggaactccttaaatggggtaggtgggtgagattatcaaagctgaagctggctttgctgagaagctccct

SEQ ID NO: 718978 - DNA, 120 bp, Artificial Sequence
  ENSG00000197622_9 (sequence is synthesized)
acctccctgcccttctcctccttcctgctggaatgaactaaagcagatgtcaagcaggggctggtgggggtgcctactcccttttccactctatctttagatttcaaaccttaggcttac

SEQ ID NO: 718979 - DNA, 120 bp, Artificial Sequence
  ENSG00000197622_10 (sequence is synthesized)
agcccctcaatatctctctgctaacaccagtgtctctttctagttaggcctctaatcttctgtttctgtttaccagcttcccagcaactttccttttttaaaatattaaaaatttaattc

SEQ ID NO: 718980 - DNA, 120 bp, Artificial Sequence
  ENSG00000197622_11 (sequence is synthesized)
aggttctcttaattatcctcatcctgctgttgcctccgcccttaactctatccctattaggaaccttgtttcccaccgaataagagttaaggtaagaggtagctcttcacctgatgacat

SEQ ID NO: 718981 - DNA, 120 bp, Artificial Sequence
  ENSG00000197622_12 (sequence is synthesized)
taagttttggggcatctttcctgccctctgccaacctccctgctggcccaggtgagaggaggaagaggggtctggaaagaaacccagaatgcggcagaactaggagtaagtccatctcaa

SEQ ID NO: 718982 - DNA, 120 bp, Artificial Sequence
  ENSG00000197622_13 (sequence is synthesized)
ggtggacttctgatcattgaggatggtgagataaataggttgaaaacaatcatctgtgagtttaggagtcttaagatcctcacagcacgggagcagggagaggctctagaacaaggtttc

SEQ ID NO: 718983 - DNA, 120 bp, Artificial Sequence
  ENSG00000197622_14 (sequence is synthesized)
acaaccgagatgcctttgacattttgggctgaagtgttctttgtaaggaaaacctgtttcctattttgtgcattacaggatatttagcagcaaccctggcccactctagttatgacaacc

SEQ ID NO: 718984 - DNA, 120 bp, Artificial Sequence
  ENSG00000197622_15 (sequence is synthesized)
aaaaatgtctctatacattgccagatttctcctagggggcaaaatcgcctccatttgagaaccacaactctaaagtcaagatatttttctctgaagtgatttctgcttggcacgctaccc

SEQ ID NO: 718985 - DNA, 120 bp, Artificial Sequence
  ENSG00000197622_16 (sequence is synthesized)
tcatcatcttactcatcttaagcccgagccatggatcaactaggagcccatataaatgaggctcagtagggctgcacataatctccaaacaattctttattcagtgttttgcttgtgttt

SEQ ID NO: 718986 - DNA, 120 bp, Artificial Sequence
  ENSG00000197622_17 (sequence is synthesized)
gcatgttgctatgatggacaggtccccctcctccattcttgccctctggagaagtggttcctgcagtgtagagatatgaacagggtatggtaggattggggaaaggggagagagaagcag

SEQ ID NO: 718987 - DNA, 120 bp, Artificial Sequence
  ENSG00000197622_18 (sequence is synthesized)
tagatacactccttatcctccccaaattttaagctctatttctgtgccctagtcctagacacacattagactcagggagttttgtctgaagaccaggtcccactgccccctggctgaaga

SEQ ID NO: 718988 - DNA, 120 bp, Artificial Sequence
  ENSG00000197622_19 (sequence is synthesized)
gtctgctttaaatgggaaaacaacgtaggagcaggggtttttaggcactttcagtattctcaggtgttcttcgttctggcccttccagggtaattaggaaggcagaacaagacagatgag

SEQ ID NO: 718989 - DNA, 120 bp, Artificial Sequence
  ENSG00000197622_20 (sequence is synthesized)
ctcctgcctgctctgagacaagaagggtggggtctcattagctttgcaacaggaaacatcctgttttatggtagtggggtcaggaatgtaggaactggtatccattctgccaattccacc

SEQ ID NO: 718990 - DNA, 81 bp, Artificial Sequence
  ENSG00000197622_21 (sequence is synthesized)
catgtattttctgccatttttcagggtctaagattggtcatacattcccaatttactctcagttccagtcaagctggttgc

SEQ ID NO: 718991 - DNA, 120 bp, Artificial Sequence
  ENSG00000197622_22 (sequence is synthesized)
acattcccaatttactctcagttccagtcaagctggttgctctgaaagtaacccagcttgttgctctaaaatacctcagtagcctgagtgttatactagagatctaaagggttaacagga

SEQ ID NO: 718992 - DNA, 120 bp, Artificial Sequence
  ENSG00000197622_23 (sequence is synthesized)
tagggtggaaaggttagagactcctagaaatctctggtcaccgtgatcttcggcctcattctaatacctgttctttggacagtctttttcctttggtgctctcttgcctttagctacctt

SEQ ID NO: 718993 - DNA, 120 bp, Artificial Sequence
  ENSG00000197622_24 (sequence is synthesized)
ctctaatatgtatgctaccatcactaataaagtgatgggaatgggtttgagagtcgtaatttatattaaaaagttgttggacttttaaatacattttttcaaataaaaaattaagcaaaa

SEQ ID NO: 718994 - DNA, 120 bp, Artificial Sequence
  ENSG00000197622_25 (sequence is synthesized)
cctggctttgtgcattgggttctggtgcctgatggacacatttttccagttacaggccgaatggtctcaatgtagctgaagaactgtgcccactgatcagtattacgtattgcaaatgca

SEQ ID NO: 718995 - DNA, 120 bp, Artificial Sequence
  ENSG00000197622_26 (sequence is synthesized)
ggaggtggctgtatctgacagacccaggccttccagctccgacagatccagttctgggatgggcatcctccagaaaagaaaggaactgtactggctactcacagggtccctcatagcttc

SEQ ID NO: 718996 - DNA, 120 bp, Artificial Sequence
  ENSG00000197622_27 (sequence is synthesized)
ctagaaagaaaccacttgtcagtcttcatgctacagcaacttctttgtggcccatggcctttccttgcttagatactccacatactgttctccccgcaggggcggcggccttgaggggct

SEQ ID NO: 718997 - DNA, 120 bp, Artificial Sequence
  ENSG00000197622_28 (sequence is synthesized)
accatctaggatctgccatctaaaaaagcacacttcttgcctccctctgtgtcaggagcttctatggtcaggcagctgtatatgtggaacaaaggggactgggtgatggaagaagtgaat

SEQ ID NO: 718998 - DNA, 120 bp, Artificial Sequence
  ENSG00000197622_29 (sequence is synthesized)
agtcctagctattacctcctgttcctgtccattctgagctgggtggggtttgtaggtggagctgcatacctgtcagttttccccattatttcatcatcagtcagaggtgactttgacatg

SEQ ID NO: 718999 - DNA, 120 bp, Artificial Sequence
  ENSG00000197622_30 (sequence is synthesized)
tcctttctttgtccagtgttcactctgcaggccactgccctcactactctggttcatgtcttctgtgtgcttttgttgttccagctttgcctttcatgccctagtgatttccctgttaaa

SEQ ID NO: 719000 - DNA, 120 bp, Artificial Sequence
  ENSG00000197622_31 (sequence is synthesized)
atgccacatcccctcttcccaccaggcccttagcttttcagtggttttgaagactcttttcccttcctccgtgctgactggaggaggggccttaagacatgactccttatcttctccaag

SEQ ID NO: 719001 - DNA, 120 bp, Artificial Sequence
  ENSG00000197622_32 (sequence is synthesized)
atggtggagaagagcagatgatctgtactggacacacgtggagatatggccatgccacgcatgtgcaaacagaggtgtacacacaggagtgcagtgatacaggacacagataaacagaat

SEQ ID NO: 719002 - DNA, 120 bp, Artificial Sequence
  ENSG00000197629_0 (sequence is synthesized)
agtttgcccaaagcttgctggccgctgtgtagggctggtgagtggctggggctgtctgagccatgaacaacttcagggccaccatcctcttctgggcagcggcagcatgggctaaatcag

SEQ ID NO: 719003 - DNA, 120 bp, Artificial Sequence
  ENSG00000197629_1 (sequence is synthesized)
gcaagccttcgggagagatggacgaagttggagttcaaaaatgcaagaatgccttgaaactacctgtcctggaagtcctacctggagggggctgggacaatctgcggaatgtggacatgg

SEQ ID NO: 719004 - DNA, 120 bp, Artificial Sequence
  ENSG00000197629_2 (sequence is synthesized)
gacgagttatggaattgacttactccaactgcaggacaacagaggatggacagtatatcatccctgatgaaatcttcaccattccccagaaacagagcaacctggagatgaactcagaaa

SEQ ID NO: 719005 - DNA, 120 bp, Artificial Sequence
  ENSG00000197629_3 (sequence is synthesized)
tcctggaatcctgggcaaattaccagagtagcacctcctactccatcaacacagaactctctcttttttccaaagtcaatggcaagttttccactgagttccagaggatgaagaccctcc

SEQ ID NO: 719006 - DNA, 120 bp, Artificial Sequence
  ENSG00000197629_4 (sequence is synthesized)
aagtgaaggaccaagctataactacccgagttcaggtaagaaacctcgtctacacagtcaaaatcaacccaactttagagctaagctcaggttttaggaaggaactccttgacatctctg

SEQ ID NO: 719007 - DNA, 120 bp, Artificial Sequence
  ENSG00000197629_5 (sequence is synthesized)
accgtctagagaacaaccagacgaggatggccacctacctggcagaactcctggtgctcaactatggcacccacgtcaccaccagtgtcgacgctggggctgctcttattcaggaggacc

SEQ ID NO: 719008 - DNA, 120 bp, Artificial Sequence
  ENSG00000197629_6 (sequence is synthesized)
acctcagggcctccttcctccaagacagccagagcagtcgtagtgccgtgaccgcctctgctggacttgcctttcaaaacaccgtgaacttcaaatttgaggaaaactatacctcgcaga

SEQ ID NO: 719009 - DNA, 120 bp, Artificial Sequence
  ENSG00000197629_7 (sequence is synthesized)
atgtcctcaccaagagctacctctcaaaccgaaccaactccagggtgcagagcattggaggggttcctttttacccaggcatcaccctccaggcctggcagcagggtatcaccaaccacc

SEQ ID NO: 719010 - DNA, 120 bp, Artificial Sequence
  ENSG00000197629_8 (sequence is synthesized)
tggtggccatcgaccgctctggcctgccgctgcatttcttcatcaaccccaacatgctacctgacttgccaggccccctggtgaagaaggtgtcaaagacagtggaaactgctgtgaagc

SEQ ID NO: 719011 - DNA, 120 bp, Artificial Sequence
  ENSG00000197629_9 (sequence is synthesized)
gctattatacattcaacacctaccctggctgcacagatctcaattctcccaacttcaattttcaggccaacacggatgatggctcctgcgaggggaaaatgaccaacttctctttcggtg

SEQ ID NO: 719012 - DNA, 120 bp, Artificial Sequence
  ENSG00000197629_10 (sequence is synthesized)
gggtttatcaggaatgcactcagctctcagggaatagggatgtcctcctctgccaaaagttggagcagaagaatccactcactggtgatttctcctgcccctctggctactccccggtgc

SEQ ID NO: 719013 - DNA, 120 bp, Artificial Sequence
  ENSG00000197629_11 (sequence is synthesized)
acctgttatcccagatccacgaggagggttacaaccacctggagtgtcatcgaaagtgcactctcctcgtcttctgcaagaccgtgtgtgaagatgtgttccaggtggcaaaagctgaat

SEQ ID NO: 719014 - DNA, 120 bp, Artificial Sequence
  ENSG00000197629_12 (sequence is synthesized)
ttagggctttttggtgtgtggccagcagccaagtacctgaaaactcaggactgctttttgggggcctcttcagcagcaagagcataaaccccatgacaaatgcacagtcatgcccagccg

SEQ ID NO: 719015 - DNA, 120 bp, Artificial Sequence
  ENSG00000197629_13 (sequence is synthesized)
gctactttccactgagactctttgaaaacctcaaggtatgtgtttctcaggactatgagttgggaagcaggtttgcggtcccctttggcgggttctttagctgcacagttgggaaccccc

SEQ ID NO: 719016 - DNA, 120 bp, Artificial Sequence
  ENSG00000197629_14 (sequence is synthesized)
tggtagatcctgctatatccagagatttaggggcaccgtctctgaaaaagtgccccgggggcttcagccagcacccagccctcatcagcgatggatgccaagtgtcctattgcgtcaaat

SEQ ID NO: 719017 - DNA, 120 bp, Artificial Sequence
  ENSG00000197629_15 (sequence is synthesized)
ccgggctcttcacaggagggtccctgccccctgccaggctcccacctttcacccggccacccctcatgagtcaggctgccaccaatactgtcatagtgaccaattctgagaatgcgagat

SEQ ID NO: 719018 - DNA, 120 bp, Artificial Sequence
  ENSG00000197629_16 (sequence is synthesized)
cctggattaaagactcccagacccaccagtggaggctgggagaaccgatagagctgcggagggccatgaatgtcatccatggggatggtggtggtctgtcaggaggggctgcagctgggg

SEQ ID NO: 719019 - DNA, 120 bp, Artificial Sequence
  ENSG00000197629_17 (sequence is synthesized)
tcacagtgggggtcaccaccattctggctgttgttatcaccttggccatctacggcacccggaagttcaagaagaaagcatatcaggcaattgaggaaaggcagagtttggttccaggca

SEQ ID NO: 719020 - DNA, 120 bp, Artificial Sequence
  ENSG00000197629_18 (sequence is synthesized)
ctgaccactctgttttcctaagcattgaaatggcaagtgcaaccaaaagtaggtatattcgtgacttcttgtttaggtctctgggccaggaaattcatactgttacatggataaggttgg

SEQ ID NO: 719021 - DNA, 120 bp, Artificial Sequence
  ENSG00000197629_19 (sequence is synthesized)
gattggggagagggaacagttgggactagaagcaaaagtgattctgggactaaaataggaagcagatgtcctttcccaatgtgtgttgctgtcttcacctgaatgcatttgtgtaaaaat

SEQ ID NO: 719022 - DNA, 120 bp, Artificial Sequence
  ENSG00000197629_20 (sequence is synthesized)
agcggagggacaatgtgaacatttgtatttggaagctatgaatttactctgaagtttgcagttgtttccaatttgtgagctctaagagtttctgcctgtaagaactactctccttttatt

SEQ ID NO: 719023 - DNA, 120 bp, Artificial Sequence
  ENSG00000197629_21 (sequence is synthesized)
ttgatttttaaaaacctgtctgaatttcacactcttagagcctggaagagccctgaaaagacacaagtcttgcctggctactgctttttaactttgagggctctatgttgacagactgtt

SEQ ID NO: 719024 - DNA, 120 bp, Artificial Sequence
  ENSG00000197629_22 (sequence is synthesized)
atctcctctgggtgacctcaaacatctgaaaagaaagatgttgcctgtgccaattccactttttccagctgccccttgatgaacactcccttataccagaccactcttggacttctgact

SEQ ID NO: 719025 - DNA, 120 bp, Artificial Sequence
  ENSG00000197629_23 (sequence is synthesized)
ggtgtcatcaagtcctcagaaaatattttaagttattttaagttattaaggaagggatgatttggagacaaggagtaatgaaagatgggtaaaaactggaaaagattctggtgctaagta

SEQ ID NO: 719026 - DNA, 90 bp, Artificial Sequence
  ENSG00000197629_24 (sequence is synthesized)
aaagatgggtaaaaactggaaaagattctggtgctaagtactaccccttcatcttccatggatggtcattacctttcctgtcctcctgtt

SEQ ID NO: 719027 - DNA, 81 bp, Artificial Sequence
  ENSG00000197629_25 (sequence is synthesized)
acacacacacacacgcacacacataccacatttcaataagtcttcattgttctgggtccttacctttcctgtcctcctgtt

SEQ ID NO: 719028 - DNA, 120 bp, Artificial Sequence
  ENSG00000197629_26 (sequence is synthesized)
aaggcaagaagttaaagtaagaccacatttgagtattacttactctgtagaatcaaaacagagtagttaacaccaattatgcaaactacttttttttccagcagaaagggagctgacatg

SEQ ID NO: 719029 - DNA, 120 bp, Artificial Sequence
  ENSG00000197629_27 (sequence is synthesized)
atcaaatccatgttttcaaatgaactgaaaaaggcatccagcaccacttataacacatttatttcagttccaggctgacagccctggggcatctagcaggatgcataattgtcatctggt

SEQ ID NO: 719030 - DNA, 120 bp, Artificial Sequence
  ENSG00000197629_28 (sequence is synthesized)
gagagttgggactttgctcaattttaataccaatctctcctgattgtaattacctccactactttcatgatccccctacaatatttttttaaatgatatatttattcactgaatcaaatg

SEQ ID NO: 719031 - DNA, 120 bp, Artificial Sequence
  ENSG00000197629_29 (sequence is synthesized)
tcattaatgagttatcttctgtggaggatgactgttctctttgttaatgttcacaatcaagatcttgggctgagaagaggcccttcacccaaggagtttgaagtatcacagtgtgtggga

SEQ ID NO: 719032 - DNA, 120 bp, Artificial Sequence
  ENSG00000197629_30 (sequence is synthesized)
aggtgggaaccaggatacccattcatttccaaccgagacacagagaagtgagtcacagaatttgagcccgctctcttgactgcccagccagagacactgatttctgtaacctcttcactt

SEQ ID NO: 719033 - DNA, 120 bp, Artificial Sequence
  ENSG00000197629_31 (sequence is synthesized)
gatcctgcctcttaagcattaaaacattctcctaaacctctgagtgttttgtgggttctgggtgttttgtacattttagccaagctaaccacttgtctgcaagtactgactttcctatga

SEQ ID NO: 719034 - DNA, 120 bp, Artificial Sequence
  ENSG00000197629_32 (sequence is synthesized)
attctttgaagattattgagtcagaaaggaaaaatatagccccaaattcccaggcttttaatgcattacattaactgcctattgaaatgagaagttcttcacaaacttgtatacccacta

SEQ ID NO: 719035 - DNA, 120 bp, Artificial Sequence
  ENSG00000197629_33 (sequence is synthesized)
acaagattgcacataaacatgcattaaagtatatactaagaaaccctctgtccaacggctcatgcatatgaagtccgaacatgggagtttgccaattgcattcatcaagtcgttttgcgg

SEQ ID NO: 719036 - DNA, 120 bp, Artificial Sequence
  ENSG00000197629_34 (sequence is synthesized)
agtcagatccctgatggaagagctcacaggctctgccttccaagtcctgggttcctaactggtgaccttagcctggggtctgtggggagaccaaccctggcttccaagaaaaccacattc

SEQ ID NO: 719037 - DNA, 120 bp, Artificial Sequence
  ENSG00000197629_35 (sequence is synthesized)
catggactatcagaaatagacacagatttgggtgacaaagctggctctgtatttgcattttatttttgtgttcttgtcagtttgggaatgattaatattaaacatttatttgagaaacaa

SEQ ID NO: 719038 - DNA, 120 bp, Artificial Sequence
  ENSG00000197632_0 (sequence is synthesized)
gtaacaactctcagaggagcattgcccgtcagacagcaactcagagaataaccagagaacaaccagattgaaacaatggaggatctttgtgtggcaaacacactctttgccctcaattta

SEQ ID NO: 719039 - DNA, 120 bp, Artificial Sequence
  ENSG00000197632_1 (sequence is synthesized)
ttcaagcatctggcaaaagcaagccccacccagaacctcttcctctccccatggagcatctcgtccaccatggccatggtctacatgggctccaggggcagcaccgaagaccagatggcc

SEQ ID NO: 719040 - DNA, 120 bp, Artificial Sequence
  ENSG00000197632_2 (sequence is synthesized)
aaggtgcttcagtttaatgaagtgggagccaatgcagttacccccatgactccagagaactttaccagctgtgggttcatgcagcagatccagaagggtagttatcctgatgcgattttg

SEQ ID NO: 719041 - DNA, 120 bp, Artificial Sequence
  ENSG00000197632_3 (sequence is synthesized)
caggcacaagctgcagataaaatccattcatccttccgctctctcagctctgcaatcaatgcatccacagggaattatttactggaaagtgtcaataagctgtttggtgagaagtctgcg

SEQ ID NO: 719042 - DNA, 120 bp, Artificial Sequence
  ENSG00000197632_4 (sequence is synthesized)
agcttccgggaagaatatattcgactctgtcagaaatattactcctcagaaccccaggcagtagacttcctagaatgtgcagaagaagctagaaaaaagattaattcctgggtcaagact

SEQ ID NO: 719043 - DNA, 120 bp, Artificial Sequence
  ENSG00000197632_5 (sequence is synthesized)
caaaccaaaggcaaaatcccaaacttgttacctgaaggttctgtagatggggataccaggatggtcctggtgaatgctgtctacttcaaaggaaagtggaaaactccatttgagaagaaa

SEQ ID NO: 719044 - DNA, 120 bp, Artificial Sequence
  ENSG00000197632_6 (sequence is synthesized)
ctaaatgggctttatcctttccgtgtaaactcggctcagcgcacacctgtacagatgatgtacttgcgtgaaaagctaaacattggatacatagaagacctaaaggctcagattctagaa

SEQ ID NO: 719045 - DNA, 120 bp, Artificial Sequence
  ENSG00000197632_7 (sequence is synthesized)
tcaacaagtggaccagcaaagacaaaatggctgaagatgaagttgaggtatacataccccagttcaaattagaagagcattatgaactcagatccattctgagaagcatgggcatggagg

SEQ ID NO: 719046 - DNA, 120 bp, Artificial Sequence
  ENSG00000197632_8 (sequence is synthesized)
acgccttcaacaagggacgggccaatttctcagggatgtcggagaggaatgacctgtttctttctgaagtgttccaccaagccatggtggatgtgaatgaggagggcactgaagcagccg

SEQ ID NO: 719047 - DNA, 120 bp, Artificial Sequence
  ENSG00000197632_9 (sequence is synthesized)
ctggcacaggaggtgttatgacagggagaactggacatggaggcccacagtttgtggcagatcatccttttctttttcttattatgcataagataaccaactgcattttatttttcggca

SEQ ID NO: 719048 - DNA, 120 bp, Artificial Sequence
  ENSG00000197632_10 (sequence is synthesized)
gattttcctcaccctaaaactaagcgtgctgcttctgcaaaagatttttgtagatgagctgtgtgcctcagaattgctatttcaaattgccaaaaatttagagatgttttctacatattt

SEQ ID NO: 719049 - DNA, 120 bp, Artificial Sequence
  ENSG00000197632_11 (sequence is synthesized)
ctgctcttctgaacaacttctgctacccactaaataaaaacacagaaataattagacaattgtctattataacatgacaaccctattaatcatttggtcttctaaaatgggatcatgccc

SEQ ID NO: 719050 - DNA, 120 bp, Artificial Sequence
  ENSG00000197632_12 (sequence is synthesized)
gcccatttagattttccttactatcagtttatttttataacattaacttttactttgttatttattattttatataatggtgagtttttaaattattgctcactgcctatttaatgtagc

SEQ ID NO: 719051 - DNA, 120 bp, Artificial Sequence
  ENSG00000197632_13 (sequence is synthesized)
aaagttatagaagcagatgatctgttaatttcctatctaataaatgcctttaattgttctcataatgaagaataagtaggtatccctccatgcccttctgtaataaatatctggaaaaaa

SEQ ID NO: 719052 - DNA, 120 bp, Artificial Sequence
  ENSG00000197632_14 (sequence is synthesized)
cattaaacaataggcaaatatatgttatgtgcatttctagaaatacataacacatatatatgtctgtatcttatattcaattgcaagtatataataaataaacctgcttccaaacaacaa

SEQ ID NO: 719053 - DNA, 120 bp, Artificial Sequence
  ENSG00000197632_15 (sequence is synthesized)
gtaacaactctcagaggagcattgcccgtcagacagcaactcagagaataaccagagaacaaccagcatttcttgcactacaacttgcttaagctcttacacttcatagtgaagctatgc

SEQ ID NO: 719054 - DNA, 120 bp, Artificial Sequence
  ENSG00000197632_16 (sequence is synthesized)
accaccgagtgaagcgatgtggaacattggaaagagtgggcttccttagacagacctgggcttgaatccctgctccactacctaccagctgtgtgaccttatacaagttacttaatgttt

SEQ ID NO: 719055 - DNA, 120 bp, Artificial Sequence
  ENSG00000197632_17 (sequence is synthesized)
ctgagcatcaggatataatctataaaatagggagaatcacctctacctcatacagattctgcaaagattaaacgaggagaggagattgaaacaatggaggatctttgtgtggcaaacaca

SEQ ID NO: 719056 - DNA, 120 bp, Artificial Sequence
  ENSG00000197632_18 (sequence is synthesized)
gttgtgcccgctttcctactcagtgcaattgttccaggtttgcaggtcccaggttccaagactttgcggtcttcttttgttcacttggaaccgatatcttttggaggtgcatttcttgca

SEQ ID NO: 719057 - DNA, 120 bp, Artificial Sequence
  ENSG00000197632_19 (sequence is synthesized)
ttgcctgcagagcctgaggtcagggaaggtctcagatggttcataccttggtgtatacatgagtttcataggcctgggattaaggattatccctgcaatcttgcctggcattgactttct

SEQ ID NO: 719058 - DNA, 120 bp, Artificial Sequence
  ENSG00000197632_20 (sequence is synthesized)
acctggtggggtggcagaagaagggggtcttctagtcctcccagtaatgaacaccccagtataggaagtcttttttagtaaggctgtggtatgtgtggtgcatatagggaaggggttctg

SEQ ID NO: 719059 - DNA, 120 bp, Artificial Sequence
  ENSG00000197632_21 (sequence is synthesized)
ggataggggctgggtgaaactccaaaccttcaaacaatgagtcaaagtcactttagaagcaggaaagcagaaagaagattgaccgtcttaccagatgcaacaagattgaaacaatggagg

SEQ ID NO: 719060 - DNA, 120 bp, Artificial Sequence
  ENSG00000197632_22 (sequence is synthesized)
gtacctgagtgtaaatacattctttccatgcacatggtgacccatgtaaggtgggcctcatttgaagtttgaagtttcacagagagagcattggccaatattgctgcaggaagacaaggg

SEQ ID NO: 719061 - DNA, 120 bp, Artificial Sequence
  ENSG00000197635_0 (sequence is synthesized)
agtgccccgcgccacgcgcgcctgctcccgcgccgcctgccctgcagcctgcccgcggcgcctttatacccagcgggctcggcgctcactaatgtttaactcggggccgaaacttgccag

SEQ ID NO: 719062 - DNA, 120 bp, Artificial Sequence
  ENSG00000197635_1 (sequence is synthesized)
cggcgagtgactccaccgcccggagcagcggtgcaggacgcgcgtctccgccgcccgcggtgacttctgcctgcgctccttctctgaacgctcacttccgaggagacgccgacgatgaag

SEQ ID NO: 719063 - DNA, 120 bp, Artificial Sequence
  ENSG00000197635_2 (sequence is synthesized)
acaccgtggaaggttcttctgggactgctgggtgctgctgcgcttgtcaccatcatcaccgtgcccgtggttctgctgaacaaaggcacagatgatgctacagctgacagtcgcaaaact

SEQ ID NO: 719064 - DNA, 120 bp, Artificial Sequence
  ENSG00000197635_3 (sequence is synthesized)
tacactctaactgattacttaaaaaatacttatagactgaagttatactccttaagatggatttcagatcatgaatatctctacaaacaagaaaataatatcttggtattcaatgctgaa

SEQ ID NO: 719065 - DNA, 120 bp, Artificial Sequence
  ENSG00000197635_4 (sequence is synthesized)
tatggaaacagctcagttttcttggagaacagtacatttgatgagtttggacattctatcaatgattattcaatatctcctgatgggcagtttattctcttagaatacaactacgtgaag

SEQ ID NO: 719066 - DNA, 120 bp, Artificial Sequence
  ENSG00000197635_5 (sequence is synthesized)
caatggaggcattcctacacagcttcatatgacatttatgatttaaataaaaggcagctgattacagaagagaggattccaaacaacacacagtgggtcacatggtcaccagtgggtcat

SEQ ID NO: 719067 - DNA, 120 bp, Artificial Sequence
  ENSG00000197635_6 (sequence is synthesized)
aaattggcatatgtttggaacaatgacatttatgttaaaattgaaccaaatttaccaagttacagaatcacatggacggggaaagaagatataatatataatggaataactgactgggtt

SEQ ID NO: 719068 - DNA, 120 bp, Artificial Sequence
  ENSG00000197635_7 (sequence is synthesized)
tatgaagaggaagtcttcagtgcctactctgctctgtggtggtctccaaacggcacttttttagcatatgcccaatttaacgacacagaagtcccacttattgaatactccttctactct

SEQ ID NO: 719069 - DNA, 120 bp, Artificial Sequence
  ENSG00000197635_8 (sequence is synthesized)
gatgagtcactgcagtacccaaagactgtacgggttccatatccaaaggcaggagctgtgaatccaactgtaaagttctttgttgtaaatacagactctctcagctcagtcaccaatgca

SEQ ID NO: 719070 - DNA, 120 bp, Artificial Sequence
  ENSG00000197635_9 (sequence is synthesized)
acttccatacaaatcactgctcctgcttctatgttgataggggatcactacttgtgtgatgtgacatgggcaacacaagaaagaatttctttgcagtggctcaggaggattcagaactat

SEQ ID NO: 719071 - DNA, 120 bp, Artificial Sequence
  ENSG00000197635_10 (sequence is synthesized)
tcggtcatggatatttgtgactatgatgaatccagtggaagatggaactgcttagtggcacggcaacacattgaaatgagtactactggctgggttggaagatttaggccttcagaacct

SEQ ID NO: 719072 - DNA, 120 bp, Artificial Sequence
  ENSG00000197635_11 (sequence is synthesized)
cattttacccttgatggtaatagcttctacaagatcatcagcaatgaagaaggttacagacacatttgctatttccaaatagataaaaaagactgcacatttattacaaaaggcacctgg

SEQ ID NO: 719073 - DNA, 120 bp, Artificial Sequence
  ENSG00000197635_12 (sequence is synthesized)
gaagtcatcgggatagaagctctaaccagtgattatctatactacattagtaatgaatataaaggaatgccaggaggaaggaatctttataaaatccaacttagtgactatacaaaagtg

SEQ ID NO: 719074 - DNA, 120 bp, Artificial Sequence
  ENSG00000197635_13 (sequence is synthesized)
acatgcctcagttgtgagctgaatccggaaaggtgtcagtactattctgtgtcattcagtaaagaggcgaagtattatcagctgagatgttccggtcctggtctgcccctctatactcta

SEQ ID NO: 719075 - DNA, 120 bp, Artificial Sequence
  ENSG00000197635_14 (sequence is synthesized)
ctggacttcattattttgaatgaaacaaaattttggtatcagatgatcttgcctcctcattttgataaatccaagaaatatcctctactattagatgtgtatgcaggcccatgtagtcaa

SEQ ID NO: 719076 - DNA, 120 bp, Artificial Sequence
  ENSG00000197635_15 (sequence is synthesized)
aaagcagacactgtcttcagactgaactgggccacttaccttgcaagcacagaaaacattatagtagctagctttgatggcagaggaagtggttaccaaggagataagatcatgcatgca

SEQ ID NO: 719077 - DNA, 120 bp, Artificial Sequence
  ENSG00000197635_16 (sequence is synthesized)
atcaacagaagactgggaacatttgaagttgaagatcaaattgaagcagccagacaattttcaaaaatgggatttgtggacaacaaacgaattgcaatttggggctggtcatatggaggg

SEQ ID NO: 719078 - DNA, 120 bp, Artificial Sequence
  ENSG00000197635_17 (sequence is synthesized)
tacgtaacctcaatggtcctgggatcgggaagtggcgtgttcaagtgtggaatagccgtggcgcctgtatcccggtgggagtactatgactcagtgtacacagaacgttacatgggtctc

SEQ ID NO: 719079 - DNA, 120 bp, Artificial Sequence
  ENSG00000197635_18 (sequence is synthesized)
ccaactccagaagacaaccttgaccattacagaaattcaacagtcatgagcagagctgaaaattttaaacaagttgagtacctccttattcatggaacagcagatgataacgttcacttt

SEQ ID NO: 719080 - DNA, 120 bp, Artificial Sequence
  ENSG00000197635_19 (sequence is synthesized)
cagcagtcagctcagatctccaaagccctggtcgatgttggagtggatttccaggcaatgtggtatactgatgaagaccatggaatagctagcagcacagcacaccaacatatatatacc

SEQ ID NO: 719081 - DNA, 120 bp, Artificial Sequence
  ENSG00000197635_20 (sequence is synthesized)
cacatgagccacttcataaaacaatgtttctctttaccttagcacctcaaaataccatgccatttaaagcttattaaaactcatttttgttttcattatctcaaaactgcactgtcaaga

SEQ ID NO: 719082 - DNA, 120 bp, Artificial Sequence
  ENSG00000197635_21 (sequence is synthesized)
tgatgatgatctttaaaatacacactcaaatcaagaaacttaaggttacctttgttcccaaatttcatacctatcatcttaagtagggacttctgtcttcacaacagattattaccttac

SEQ ID NO: 719083 - DNA, 120 bp, Artificial Sequence
  ENSG00000197635_22 (sequence is synthesized)
agaagtttgaattatccggtcgggttttattgtttaaaatcatttctgcatcagctgctgaaacaacaaataggaattgtttttatggaggctttgcatagattccctgagcaggatttt

SEQ ID NO: 719084 - DNA, 120 bp, Artificial Sequence
  ENSG00000197635_23 (sequence is synthesized)
aatctttttctaactggactggttcaaatgttgttctcttctttaaagggatggcaagatgtgggcagtgatgtcactagggcagggacaggataagagggattagggagagaagatagc

SEQ ID NO: 719085 - DNA, 120 bp, Artificial Sequence
  ENSG00000197635_24 (sequence is synthesized)
agggcatggctgggaacccaagtccaagcataccaacacgagcaggctactgtcagctcccctcggagaagagctgttcacagccagactggcacagttttctgagaaagactattcaaa

SEQ ID NO: 719086 - DNA, 120 bp, Artificial Sequence
  ENSG00000197635_25 (sequence is synthesized)
cagtctcaggaaatcaaatatgcaaagcactgacttctaagtaaaaccacagcagttgaaaagactccaaagaaatgtaagggaaactgccagcaacgcaggcccccaggtgccagttat

SEQ ID NO: 719087 - DNA, 120 bp, Artificial Sequence
  ENSG00000197635_26 (sequence is synthesized)
ggctataggtgctacaaaaacacagcaagggtgatgggaaagcattgtaaatgtgcttttaaaaaaaaatactgatgttcctagtgaaagaggcagcttgaaactgagatgtgaacacat

SEQ ID NO: 719088 - DNA, 120 bp, Artificial Sequence
  ENSG00000197635_27 (sequence is synthesized)
cagcttgccctgttaaaagatgaaaatatttgtatcacaaatcttaacttgaaggagtccttgcatcaatttttcttatttcatttctttgagtgtcttaattaaaagaatattttaact

SEQ ID NO: 719089 - DNA, 120 bp, Artificial Sequence
  ENSG00000197635_28 (sequence is synthesized)
tccttggactcattttaaaaaatggaacataaaatacaatgttatgtattattattcccattctacatactatggaatttctcccagtcatttaataaatgtgccttcattttttcagaa

SEQ ID NO: 719090 - DNA, 120 bp, Artificial Sequence
  ENSG00000197635_29 (sequence is synthesized)
acaaccttgaccattacagagtaagagatgaggacctatacctattttataacctatttataagtggtttaagaaccttcttaattgtatctattctagaaaatacatatttttatttcc

SEQ ID NO: 719091 - DNA, 120 bp, Artificial Sequence
  ENSG00000197635_30 (sequence is synthesized)
aattcgctttgaatcactaaatagaagagggaagcatttttcttccttcccaaaatgggagctgatgagagaggaaacatcgagggcgaagtgaaccaacaattttaaaagaccatctcc

SEQ ID NO: 719092 - DNA, 120 bp, Artificial Sequence
  ENSG00000197635_31 (sequence is synthesized)
gctctgcagcccacctgggcagagcctgaaaaaccctgtgggatcacggatttagagtggggaaggatgtcagctcacattttactttgcagatgagtatattaagttcagagatgataa

SEQ ID NO: 719093 - DNA, 120 bp, Artificial Sequence
  ENSG00000197635_32 (sequence is synthesized)
tgtgcccaaggtgcccagcagggcacagattcatttcctacttcattctactgagccctgtgcctttccagtcctggtctgcccctctatactctacacagcagcgtgaatgataaaggg

SEQ ID NO: 719094 - DNA, 120 bp, Artificial Sequence
  ENSG00000197635_33 (sequence is synthesized)
cctttggaatcacgagtactgtcatttctcaacctgttggactctttctgcagcatatggcaaagtggatctttctctccttcttgaaatgctccctgccttggctactttttagtctcc

SEQ ID NO: 719095 - DNA, 120 bp, Artificial Sequence
  ENSG00000197635_34 (sequence is synthesized)
gagtttcagttaattagactttttagtatcacagacaggtttgcaatttcactactgacaaaacaaaagcatgaggggcaagactgttacatttacttcaataaaacagtgttgctttcc

SEQ ID NO: 719096 - DNA, 120 bp, Artificial Sequence
  ENSG00000197635_35 (sequence is synthesized)
ttcaaacctgactttctggcttgaacgaacaagctattagatactgcttcgtgtctccctctgtgtgattacagctggtgccctcagattcctgaaggcaccatcacagcagtacggaag

SEQ ID NO: 719097 - DNA, 120 bp, Artificial Sequence
  ENSG00000197641_0 (sequence is synthesized)
ctataaattaaggatcccagctacttaattgacttatgcttcctagttcgttgcccagccaccaccgtctctccaaaaacccgaggtctcgctaaaatcatcatggattcacttggcgcc

SEQ ID NO: 719098 - DNA, 120 bp, Artificial Sequence
  ENSG00000197641_1 (sequence is synthesized)
gtcagcactcgacttgggtttgatcttttcaaagagctgaagaaaacaaatgatggcaacatcttcttttcccctgtgggcatcttgactgcaattggcatggtcctcctggggacccga

SEQ ID NO: 719099 - DNA, 120 bp, Artificial Sequence
  ENSG00000197641_2 (sequence is synthesized)
ggagccaccgcttcccagttggaggaggtgtttcactctgaaaaagagacgaagagctcaagaataaaggctgaagaaaaagaggtgattgagaacacagaagcagtacatcaacaattc

SEQ ID NO: 719100 - DNA, 120 bp, Artificial Sequence
  ENSG00000197641_3 (sequence is synthesized)
caaaagtttttgactgaaataagcaaactcactaatgattatgaactgaacataaccaacaggctgtttggagaaaaaacatacctcttccttcaaaaatacttagattatgttgaaaaa

SEQ ID NO: 719101 - DNA, 120 bp, Artificial Sequence
  ENSG00000197641_4 (sequence is synthesized)
tattatcatgcatctctggaacctgttgattttgtaaatgcagccgatgaaagtcgaaagaagattaattcctgggttgaaagcaaaacaaatgaaaaaatcaaggacttgttcccagat

SEQ ID NO: 719102 - DNA, 120 bp, Artificial Sequence
  ENSG00000197641_5 (sequence is synthesized)
ggctctattagtagctctaccaagctggtgctggtgaacatggtttattttaaagggcaatgggacagggagtttaagaaagaaaatactaaggaagagaaattttggatgaataagagc

SEQ ID NO: 719103 - DNA, 120 bp, Artificial Sequence
  ENSG00000197641_6 (sequence is synthesized)
acaagtaaatctgtacagatgatgacacagagccattcctttagcttcactttcctggaggacttgcaggccaaaattctagggattccatataaaaacaacgacctaagcatgtttgtg

SEQ ID NO: 719104 - DNA, 120 bp, Artificial Sequence
  ENSG00000197641_7 (sequence is synthesized)
cttctgcccaacgacatcgatggcctggagaagataatagataaaataagtcctgagaaattggtagagtggactagtccagggcatatggaagaaagaaaggtgaatctgcacttgccc

SEQ ID NO: 719105 - DNA, 120 bp, Artificial Sequence
  ENSG00000197641_8 (sequence is synthesized)
cggtttgaggtggaggacggttacgatctagaggcggtcctggctgccatggggatgggcgatgccttcagtgagcacaaagccgactactcgggaatgtcgtcaggctccgggttgtac

SEQ ID NO: 719106 - DNA, 120 bp, Artificial Sequence
  ENSG00000197641_9 (sequence is synthesized)
gcccagaagttcctgcacagttcctttgtggcagtaactgaggaaggcaccgaggctgcagctgccaccggcataggctttactgtcacatccgccccaggtcatgaaaatgttcactgc

SEQ ID NO: 719107 - DNA, 120 bp, Artificial Sequence
  ENSG00000197641_10 (sequence is synthesized)
aatcatcccttcctgttcttcatcaggcacaatgaatccaacagcatcctcttcttcggcagattttcttctccttaagatgatcgttgccatggcattgctgcttttagcaaaaaacaa

SEQ ID NO: 719108 - DNA, 120 bp, Artificial Sequence
  ENSG00000197641_11 (sequence is synthesized)
ctaccagtgttactcatatgattatgaaaatcgtccattcttttaaatgttgtctcacttgcatttccagtcttggccatcaaatcaatgatttaatgactccaataatgtgtgtgttta

SEQ ID NO: 719109 - DNA, 120 bp, Artificial Sequence
  ENSG00000197641_12 (sequence is synthesized)
tagttttgtgcacacgaaaggagagaaagtctctccagtaaagagtacgaactagtaattttggggggtctctctaattctggtattttgacatgttataatacgcaagtaaaataaaac

SEQ ID NO: 719110 - DNA, 120 bp, Artificial Sequence
  ENSG00000197641_13 (sequence is synthesized)
aatagtttactcagctcatgttactattccccaacagatattgtggcaaatcacacataggaaagagaatttgggaatacagtagcaaaacataaattaaaactcaaatgccaggacaaa

SEQ ID NO: 719111 - DNA, 120 bp, Artificial Sequence
  ENSG00000197641_14 (sequence is synthesized)
ataaaacaatataccagatggagaggatgcccgtattttcatcttccattctaacattatccattgttagatgcataagcattttgatattgtgtaataaatgtggtatttgagaagata

SEQ ID NO: 719112 - DNA, 120 bp, Artificial Sequence
  ENSG00000197641_15 (sequence is synthesized)
aatgatgtagttgatcagtattcctcctctatcacctttttagactttgtaaggtaaatatttggactaacttttagaaaagtttccctttttttctccatttacatttttctggttttt

SEQ ID NO: 719113 - DNA, 120 bp, Artificial Sequence
  ENSG00000197641_16 (sequence is synthesized)
ttttttttttgagtgaggtacgagtattaccaaatgatattttctgaagatgctttttggaaagctctgaatctatacctaatgctcttaattattggcttgtttcatttttttcctcca

SEQ ID NO: 719114 - DNA, 120 bp, Artificial Sequence
  ENSG00000197641_17 (sequence is synthesized)
gtttttaacaagatcacataactggcttatttttaacagctttgtcaaactacaatttacatgccgtaaaatgtacacactgtaattttataattcattgacttttagtaaatttctagc

SEQ ID NO: 719115 - DNA, 120 bp, Artificial Sequence
  ENSG00000197641_18 (sequence is synthesized)
gttatgcatcgccacaatccagttttagaatatttccatgaccctaagaagtttcctcatgtctattaatattcccaatcctaggcaccactgagttgttttctgtctttataagttttt

SEQ ID NO: 719116 - DNA, 120 bp, Artificial Sequence
  ENSG00000197641_19 (sequence is synthesized)
ctttctacatcttatataaatggaatcataatacatgtagtattttgtgtctggcgtcttgcacttagcatggtgttcttgaggttcatctgttgtagtatgtattgatacttaattttt

SEQ ID NO: 719117 - DNA, 120 bp, Artificial Sequence
  ENSG00000197641_20 (sequence is synthesized)
ttattgccgaatactattccattgcatggaaaagacctattttatttctaggttcaccagttgagggacatttggattgttcccacttcttggctgttaggaataatgttgctctgaaca

SEQ ID NO: 719118 - DNA, 120 bp, Artificial Sequence
  ENSG00000197641_21 (sequence is synthesized)
tgtaaataaagatctttgtgttcacatatgttttcatttctgttggggagattcctaggctagaaattgctgggccatatgaaaaatcaatagttagctttgtaagaaacagtcaaactg

SEQ ID NO: 719119 - DNA, 120 bp, Artificial Sequence
  ENSG00000197641_22 (sequence is synthesized)
ttttccaacgtgacattttatattcccaccaggaatgtttaaaactagtgtcttcaaatcctcaccaacatccaggattgtgtctttatgattatagccatttttgtaggtacaaagtgg

SEQ ID NO: 719120 - DNA, 120 bp, Artificial Sequence
  ENSG00000197641_23 (sequence is synthesized)
catctcatggtggttttaatttgcatttccataatatctaattaggttgagctttttttatgtgcttattggccatttgtttgactttgtttggtgaaatgtatacaaatcatttgctca

SEQ ID NO: 719121 - DNA, 120 bp, Artificial Sequence
  ENSG00000197641_24 (sequence is synthesized)
tttttaatttgggttgtctgtcttgtcttctcattttattgagttaaatgagttcttaataatctctggcttacaagtccttaatttatcaaatatatgatacgtggacatttcctcata

SEQ ID NO: 719122 - DNA, 120 bp, Artificial Sequence
  ENSG00000197641_25 (sequence is synthesized)
gcttcatacttctgaggtaggagtctggacatgactcagcaggcaagactcaactctggcagtggggttcagacatcagacaaattgaggactagctaaaacagggaagagttggaagca

SEQ ID NO: 719123 - DNA, 120 bp, Artificial Sequence
  ENSG00000197641_26 (sequence is synthesized)
acccagaagttatggatgaagctgctatggatgaagctggaggacattatgctaagtgaaaagtaatacacaaaaagaaaagtactgaatgatctcacttaaatgtgtaatataaaaaag

SEQ ID NO: 719124 - DNA, 120 bp, Artificial Sequence
  ENSG00000197641_27 (sequence is synthesized)
tcaaatacatagagaaagagaataaaatggtaactatcagggattggggagatgcagggagagggagaaaaaatagagagatataggtcaaaggatccaaagttgaagatatgtaggatg

SEQ ID NO: 719125 - DNA, 120 bp, Artificial Sequence
  ENSG00000197641_28 (sequence is synthesized)
aacgagtctagagctctaacgtacaagacaaggatgatggttaataataatgtattatatataagatttttgtgaaaatagtagatttaaggtgctcttgccacacatacaaaaaggata

SEQ ID NO: 719126 - DNA, 120 bp, Artificial Sequence
  ENSG00000197641_29 (sequence is synthesized)
actatgtgagatgacggatatatgttaatttacttcactagagcaaccatttcactgtgtacatgtatatcaaaacatcaggttgtatatagagatataaaataaaaaagtaaaaaaaga

SEQ ID NO: 719127 - DNA, 120 bp, Artificial Sequence
  ENSG00000197641_30 (sequence is synthesized)
cattttaggtgtggggtctctggggaaaaggactgagaaaggcatgaaagcaatattgttgctttactattaagcaataataatcaccatagacaaatattgttgtaaggattatacaat

SEQ ID NO: 719128 - DNA, 120 bp, Artificial Sequence
  ENSG00000197641_31 (sequence is synthesized)
aataataaccccttaatattgagaagagaccttaggtgtaatggacaataccgctatgatagaactggtaaaggctaatagacagaaaagttcccatagcagagtggatgggttttggag

SEQ ID NO: 719129 - DNA, 120 bp, Artificial Sequence
  ENSG00000197641_32 (sequence is synthesized)
cccagagtctggactcttaaccatgaaccttaatttatccactgggataaataggcgatgggcaaaatgagaacctccccgtcgattctgccagcaaaccctttgtcagcaaggccctca

SEQ ID NO: 719130 - DNA, 120 bp, Artificial Sequence
  ENSG00000197641_33 (sequence is synthesized)
ttcttttttcttgttcctttgtagcaagatagttttctttcattttcttcctggcatttggcactcctaaataatgcaaatgcaaaaataactctgttacagagaatgacttgtcaggac

SEQ ID NO: 719131 - DNA, 120 bp, Artificial Sequence
  ENSG00000197646_0 (sequence is synthesized)
actctcatgttacggcaaaccttaagctgaatgaacaacttttcttctcttgaatatatcttaacgccaaattttgagtgcttttttgttacccatcctcatatgtcccagctagaaaga

SEQ ID NO: 719132 - DNA, 120 bp, Artificial Sequence
  ENSG00000197646_1 (sequence is synthesized)
atcctgggttggagctactgcatgttgattgttttgtttttccttttggctgttcattttggtggctactataaggaaatctaacacaaacagcaactgttttttgttgtttacttttgc

SEQ ID NO: 719133 - DNA, 120 bp, Artificial Sequence
  ENSG00000197646_2 (sequence is synthesized)
atctttacttgtggagctgtggcaagtcctcatatcaaatacagaacatgatcttcctcctgctaatgttgagcctggaattgcagcttcaccagatagcagctttattcacagtgacag

SEQ ID NO: 719134 - DNA, 120 bp, Artificial Sequence
  ENSG00000197646_3 (sequence is synthesized)
tccctaaggaactgtacataatagagcatggcagcaatgtgaccctggaatgcaactttgacactggaagtcatgtgaaccttggagcaataacagccagtttgcaaaaggtggaaaatg

SEQ ID NO: 719135 - DNA, 120 bp, Artificial Sequence
  ENSG00000197646_4 (sequence is synthesized)
atacatccccacaccgtgaaagagccactttgctggaggagcagctgcccctagggaaggcctcgttccacatacctcaagtccaagtgagggacgaaggacagtaccaatgcataatca

SEQ ID NO: 719136 - DNA, 120 bp, Artificial Sequence
  ENSG00000197646_5 (sequence is synthesized)
tctatggggtcgcctgggactacaagtacctgactctgaaagtcaaagcttcctacaggaaaataaacactcacatcctaaaggttccagaaacagatgaggtagagctcacctgccagg

SEQ ID NO: 719137 - DNA, 120 bp, Artificial Sequence
  ENSG00000197646_6 (sequence is synthesized)
ctacaggttatcctctggcagaagtatcctggccaaacgtcagcgttcctgccaacaccagccactccaggacccctgaaggcctctaccaggtcaccagtgttctgcgcctaaagccac

SEQ ID NO: 719138 - DNA, 120 bp, Artificial Sequence
  ENSG00000197646_7 (sequence is synthesized)
cccctggcagaaacttcagctgtgtgttctggaatactcacgtgagggaacttactttggccagcattgaccttcaaagtcagatggaacccaggacccatccaacttggctgcttcaca

SEQ ID NO: 719139 - DNA, 120 bp, Artificial Sequence
  ENSG00000197646_8 (sequence is synthesized)
ttttcatccccttctgcatcattgctttcattttcatagccacagtgatagccctaagaaaacaactctgtcaaaagctgtattcttcaaaagacacaacaaaaagacctgtcaccacaa

SEQ ID NO: 719140 - DNA, 120 bp, Artificial Sequence
  ENSG00000197646_9 (sequence is synthesized)
caaagagggaagtgaacagtgctatctgaacctgtggtcttgggagccagggtgacctgatatgacatctaaagaagcttctggactctgaacaagaattcggtggcctgcagagcttgc

SEQ ID NO: 719141 - DNA, 120 bp, Artificial Sequence
  ENSG00000197646_10 (sequence is synthesized)
cagcactttaatctgaaacctgcaacaagactagccaacacctggccatgaaacttgccccttcactgatctggactcacctctggagcctatggctttaagcaagcactactgcacttt

SEQ ID NO: 719142 - DNA, 120 bp, Artificial Sequence
  ENSG00000197646_11 (sequence is synthesized)
acagaattaccccactggatcctggacccacagaattccttcaggatccttcttgctgccagactgaaagcaaaaggaattatttcccctcaagttttctaagtgatttccaaaagcaga

SEQ ID NO: 719143 - DNA, 120 bp, Artificial Sequence
  ENSG00000197646_12 (sequence is synthesized)
ggtgtgtggaaatttccagtaacagaaacagatgggttgccaatagagttattttttatctatagcttcctctgggtactagaagaggctattgagactatgagctcacagacagggctt

SEQ ID NO: 719144 - DNA, 120 bp, Artificial Sequence
  ENSG00000197646_13 (sequence is synthesized)
cgcacaaactcaaatcataattgacatgttttatggattactggaatcttgatagcataatgaagttgttctaattaacagagagcatttaaatatacactaagtgcacaaattgtggag

SEQ ID NO: 719145 - DNA, 120 bp, Artificial Sequence
  ENSG00000197646_14 (sequence is synthesized)
taaagtcatcaagctctgtttttgaggtctaagtcacaaagcatttgttttaacctgtaatggcaccatgtttaatggtggttttttttttgaactacatctttcctttaaaaattattg

SEQ ID NO: 719146 - DNA, 120 bp, Artificial Sequence
  ENSG00000197646_15 (sequence is synthesized)
gtttctttttatttgtttttaccttagaaatcaattatatacagtcaaaaatatttgatatgctcatacgttgtatctgcagcaatttcagataagtagctaaaatggccaaagccccaa

SEQ ID NO: 719147 - DNA, 120 bp, Artificial Sequence
  ENSG00000197646_16 (sequence is synthesized)
actaagcctccttttctggccctcaatatgactttaaatttgacttttcagtgcctcagtttgcacatctgtaatacagcaatgctaagtagtcaaggcctttgataattggcactatgg

SEQ ID NO: 719148 - DNA, 120 bp, Artificial Sequence
  ENSG00000197646_17 (sequence is synthesized)
aaatcctgcaagatcccactacatatgtgtggagcagaagggtaactcggctacagtaacagcttaattttgttaaatttgttctttatactggagccatgaagctcagagcattagctg

SEQ ID NO: 719149 - DNA, 120 bp, Artificial Sequence
  ENSG00000197646_18 (sequence is synthesized)
acccttgaactattcaaatgggcacattagctagtataacagacttacataggtgggcctaaagcaagctccttaactgagcaaaatttggggcttatgagaatgaaagggtgtgaaatt

SEQ ID NO: 719150 - DNA, 120 bp, Artificial Sequence
  ENSG00000197646_19 (sequence is synthesized)
gactaacagacaaatcatacatctcagtttctcaattctcatgtaaatcagagaatgcctttaaagaataaaactcaattgttattcttcaacgttctttatatattctacttttgggta

SEQ ID NO: 719151 - DNA, 120 bp, Artificial Sequence
  ENSG00000197647_0 (sequence is synthesized)
gtccatcggggagggcgaaggccctgctctcctcggttcccggctccaggcggcgagctgaggttgggagcctggctttcccctccgagagggttcaggtgcctctgccatagcttctgt

SEQ ID NO: 719152 - DNA, 120 bp, Artificial Sequence
  ENSG00000197647_1 (sequence is synthesized)
cgcctgtgctgtgacccgcactggtcgtgggagtcacctgaaaggcaagaaatgatgtttcaggattcagtggcctttgaggatgtggctgtgaccttcacccaagaggagtgggctttg

SEQ ID NO: 719153 - DNA, 120 bp, Artificial Sequence
  ENSG00000197647_2 (sequence is synthesized)
ctggatccttcccagaaaaatctctgtagagatgtgatgcaagaaaccttcaggaacctggcctctatagggaaaaaatggaaaccccagaacatatatgtagagtacgaaaatctaagg

SEQ ID NO: 719154 - DNA, 120 bp, Artificial Sequence
  ENSG00000197647_3 (sequence is synthesized)
agaaacctaagaattgtgggagagagactctttgaaagtaaagaaggtcatcagcatggagaaattttgacccaggttccagatgacatgctgaagaaaacaactactggagtaaaatca

SEQ ID NO: 719155 - DNA, 120 bp, Artificial Sequence
  ENSG00000197647_4 (sequence is synthesized)
tgcgaaagcagtgtgtatggagaagtaggcagtgctcattcatctcttaataggcacatcagagatgacactggacacaaggcatatgagtatcaagaatatggacagaaaccatataaa

SEQ ID NO: 719156 - DNA, 120 bp, Artificial Sequence
  ENSG00000197647_5 (sequence is synthesized)
tgtaaatactgtaaaaaacctttcaactgtctctcctctgttcagacacatgaaagggctcatagtggaaggaaactctatgtttgtgaggaatgcggaaaaacatttatttcccattca

SEQ ID NO: 719157 - DNA, 120 bp, Artificial Sequence
  ENSG00000197647_6 (sequence is synthesized)
aaccttcaaagacacaggataatgcaccgtggagatggaccttataagtgtaaattttgtgggaaagccttgatgtttctcagtttgtatcttatccacaaacgaactcacactggagag

SEQ ID NO: 719158 - DNA, 120 bp, Artificial Sequence
  ENSG00000197647_7 (sequence is synthesized)
aaaccatatcaatgtaaacagtgtggtaaagcctttagtcattctagtagccttcgaatacatgaaagaactcacactggggagaagccttataaatgtaatgaatgtgggaaagcattc

SEQ ID NO: 719159 - DNA, 120 bp, Artificial Sequence
  ENSG00000197647_8 (sequence is synthesized)
catagttccacatgccttcatgctcataaaagaactcacactggggagaagccatatgaatgtaaacagtgtgggaaagccttcagctcttcccattcctttcaaatacatgaaagaact

SEQ ID NO: 719160 - DNA, 120 bp, Artificial Sequence
  ENSG00000197647_9 (sequence is synthesized)
cacacgggggagaagccatatgaatgtaaggaatgtggaaaagcattcaagtgtcccagttctgttcgcagacatgaaagaacccactctaggaaaaaaccctatgaatgtaaacattgt

SEQ ID NO: 719161 - DNA, 120 bp, Artificial Sequence
  ENSG00000197647_10 (sequence is synthesized)
gggaaagtattatcttatcttaccagctttcaaaaccacttgggaatgcacactggagagatatctcataaatgtaagatatgtgggaaagccttttattctcccagttcacttcaaaca

SEQ ID NO: 719162 - DNA, 120 bp, Artificial Sequence
  ENSG00000197647_11 (sequence is synthesized)
catgaaaaaactcacactggagagaaaccctataaatgcaaccaatgtggtaaagcctttaattcttccagttccttccgatatcatgaaagaactcacactggagagaaaccttacgag

SEQ ID NO: 719163 - DNA, 120 bp, Artificial Sequence
  ENSG00000197647_12 (sequence is synthesized)
tgtaagcaatgtgggaaagccttcagatctgcctcactccttcaaacacatggtaggactcacacgggagagaaaccctatgcatgtaaggaatgtggaaaaccatttagtaatttctct

SEQ ID NO: 719164 - DNA, 120 bp, Artificial Sequence
  ENSG00000197647_13 (sequence is synthesized)
ttctttcaaatacatgaaaggatgcacagagaagagaagccgtatgaatgtaagggttatgggaaaacattcagtttgcccagtttatttcatagacatgaaaggactcacactggagga

SEQ ID NO: 719165 - DNA, 120 bp, Artificial Sequence
  ENSG00000197647_14 (sequence is synthesized)
tagacatgaaaggactcacactggaggaaaaacctatgaatgcaagcagtgtggcagatccttcaactgttcgagctcctttcgatatcatggaaggactcacactggagagaaacccta

SEQ ID NO: 719166 - DNA, 120 bp, Artificial Sequence
  ENSG00000197647_15 (sequence is synthesized)
agatctgcctcacagcttcaaattcatggaaggactcacactggagagaaaccttatgaatgtaagcagtgtgggaaagcctttggatctgcctcacaccttcaaatgcatggaaggact

SEQ ID NO: 719167 - DNA, 120 bp, Artificial Sequence
  ENSG00000197647_16 (sequence is synthesized)
cacactggagagaaaccctatgaatgtaagcagtgtgggaagtcttttggatgtgcctcgcgacttcaaatgcatggaaggactcacactggagagaaaccgtataaatgtaagcaatgt

SEQ ID NO: 719168 - DNA, 120 bp, Artificial Sequence
  ENSG00000197647_17 (sequence is synthesized)
gggaaagcttttggatgtccctcaaaccttcgaaggcatggaaggactcacactggagagaaaccctataaatgtaaccaatgtggtaaagtctttagatgttcttcacaacttcaagtg

SEQ ID NO: 719169 - DNA, 120 bp, Artificial Sequence
  ENSG00000197647_18 (sequence is synthesized)
ctttagatgttcttcacaacttcaagtgcatggaagggctcactgcatagacaccccataaccccaggctttaggaggctgaggtggggggactgcttaagcccaggagttcaagaccag

SEQ ID NO: 719170 - DNA, 120 bp, Artificial Sequence
  ENSG00000197647_19 (sequence is synthesized)
ggtcgtgggagtcacctgaaaggcaagaaatgggagacaggaattgcagggagaatcatgcatcaatgcctggaaaggtgattcagtggcctttgaggatgtggctgtgaccttcaccca

SEQ ID NO: 719171 - DNA, 120 bp, Artificial Sequence
  ENSG00000197647_20 (sequence is synthesized)
ccagatttgggggcctgttcccaacacctaagtctctatcacagcgtgacggttgaattggcagccagtaccgccaggcatcctgcatcatcactgcaggaggattcagtggcctttgag

SEQ ID NO: 719172 - DNA, 120 bp, Artificial Sequence
  ENSG00000197647_21 (sequence is synthesized)
gcatcatcactgcaggaggattcagtggcctttgaggatgtggctgtgaccttcacccaagaggagtgggctttgctggatccttcccagaaaaatctctgtagagatgtgatgcaagaa

SEQ ID NO: 719173 - DNA, 120 bp, Artificial Sequence
  ENSG00000197647_22 (sequence is synthesized)
taggcatttttttttcaaggatatgcagcctcaggactgctaatgttaactttttctgcacaggaatttggaagactttgttatggcaggtgccgtactcccactttacaaacaaacatt

SEQ ID NO: 719174 - DNA, 120 bp, Artificial Sequence
  ENSG00000197647_23 (sequence is synthesized)
aggggcagcccaggcagcacacctttctggatttaccaaaaatacacattttcctattctactgttgctttaccacatggttcagttgtagcctcagaattactttatggaagaaactga

SEQ ID NO: 719175 - DNA, 120 bp, Artificial Sequence
  ENSG00000197651_0 (sequence is synthesized)
acagtcctgccaggacggcgacagtgaagcacctgggttgagagggagcagcaggtaactgcgcaacccctgcctcccccggccccagcccgtgcctcagcagagccgggtgtggtgggg

SEQ ID NO: 719176 - DNA, 120 bp, Artificial Sequence
  ENSG00000197651_1 (sequence is synthesized)
acccgggagtgggtctcactgcgtgtcgcctgccaacaccttcctcccccaccatccttacccagccccagtcccacccagcacacctgggcgagacaacccaggtgcgaaggacaagcg

SEQ ID NO: 719177 - DNA, 120 bp, Artificial Sequence
  ENSG00000197651_2 (sequence is synthesized)
attactaccgaagagcgtgcaaaccaggaagagagcagcctcctggagaggaaaacgtgatcccaggggtagacacgtggcgctgcgtggagagacaggttgacgagacgaggctcttct

SEQ ID NO: 719178 - DNA, 120 bp, Artificial Sequence
  ENSG00000197651_3 (sequence is synthesized)
gaccgtcctacctggcaaaacttgacgacagcttcaggtcgctaccatctggacctctcggagctccctgaaccatgactcagaccctcgacacaagggaagaccctctgaacctgggcg

SEQ ID NO: 719179 - DNA, 120 bp, Artificial Sequence
  ENSG00000197651_4 (sequence is synthesized)
gcggtggcggcggcggctgtggctgtggctgggcacactcggcctccttgagctcctggtcgtcctgccatcgaaggcgcccgggtgctccagcgtacaatagaccgcaccgatatagcc

SEQ ID NO: 719180 - DNA, 120 bp, Artificial Sequence
  ENSG00000197651_5 (sequence is synthesized)
ccaagaccgagtatgggcccccaaggaagcagccgaagcaacagcacggcccgggcttttggttccaaccacccgtgtgctctaactgggggtgctggggagggccctggcgcccacccc

SEQ ID NO: 719181 - DNA, 120 bp, Artificial Sequence
  ENSG00000197651_6 (sequence is synthesized)
ctccaggattctggaaattcccctgcccggtgcaagtgtttcgggtgtatggcctgcaccctctctgcttttgctgctgctcctgctggagcgggtcctggaaccctggctgggtgaagc

SEQ ID NO: 719182 - DNA, 120 bp, Artificial Sequence
  ENSG00000197651_7 (sequence is synthesized)
ccccaggcaggaagaagcgctggggccgcagaggccgcggcctgcgccaccaccctcgccactcctacccgcggagcccgccagcggatgtgagcacgctgccgcggccggtcaagctgt

SEQ ID NO: 719183 - DNA, 120 bp, Artificial Sequence
  ENSG00000197651_8 (sequence is synthesized)
atgagtggagagagcctggcatgcgagcgccgcccaacaccacccaattcatcatgaaccagatctacgaggacatgaggcagcaggagaaggtggagcgtcagcaggaggcgctgcggg

SEQ ID NO: 719184 - DNA, 120 bp, Artificial Sequence
  ENSG00000197651_9 (sequence is synthesized)
cgcagaaggccacggtgagcggcgaggcctccccagccagatcctccggaaacgacgcgccccctggcggcagcaaggaaacctggggactgcaggaaactctgtatggctttgtgcaga

SEQ ID NO: 719185 - DNA, 120 bp, Artificial Sequence
  ENSG00000197651_10 (sequence is synthesized)
atccctctctagcattcagtcccaacccagaggaaaaccagtctcttgccccgctgctggtggaagaagaggaggagaagaaaaatgatgatgaggaggagtatgaccaggaggtgtgtg

SEQ ID NO: 719186 - DNA, 120 bp, Artificial Sequence
  ENSG00000197651_11 (sequence is synthesized)
atgcaaaggaggcgagcgaggaggaagaagaggtcgaagatgaggaggaagaggtcgaagatgaggaggaagaagaggtcgaagaggctgaatatgtggaggagggagaggaggagctgg

SEQ ID NO: 719187 - DNA, 120 bp, Artificial Sequence
  ENSG00000197651_12 (sequence is synthesized)
gcctttatcaatcttcgtagaggctgaagaaaagagagagaactttataagctgcacttttttaaacccagagcagataattcccaaagtgccacaggaatccctgttcatggcacagga

SEQ ID NO: 719188 - DNA, 120 bp, Artificial Sequence
  ENSG00000197651_13 (sequence is synthesized)
ctttaactgttagacatcagaaaagggattgagaaaagggatggaactgatttgaggctaaactggattagcaatttattaaaaactgattaaaaagtgagttccattaataaacagatc

SEQ ID NO: 719189 - DNA, 120 bp, Artificial Sequence
  ENSG00000197651_14 (sequence is synthesized)
tatgtaaacaccttctttggccattataaaatgtttaaaatttgatgcgtatgtgtatgactatgggtgggtggtggggaagctttcaaatataattttactggaactgattaaaggcca

SEQ ID NO: 719190 - DNA, 120 bp, Artificial Sequence
  ENSG00000197651_15 (sequence is synthesized)
agtattttattactaccatttgaatattttcatttggtgttttcccctctagaaaacagagttgctgttgtttttttaaatctggcaatgctgaaaaagcgtttgtttttgaaacaaatt

SEQ ID NO: 719191 - DNA, 120 bp, Artificial Sequence
  ENSG00000197651_16 (sequence is synthesized)
tatacaacttggccacttaatgagcttggaatcaagagatagtttattacatgcgtaagaagcacattctaacgctactaaatgttcaccagtgctcttaacataactgaagccattttc

SEQ ID NO: 719192 - DNA, 120 bp, Artificial Sequence
  ENSG00000197651_17 (sequence is synthesized)
aatccctgtattttttcaacaatatttttcctcatagatttttccaccatcagagttcatttttgagggttatattttgttaacctcatttgcaggctcttgtgtcatcgcttattgata

SEQ ID NO: 719193 - DNA, 120 bp, Artificial Sequence
  ENSG00000197651_18 (sequence is synthesized)
ttccttgttccacagtgctatggatcttcctcagaagaacatgaagttgcttctgtggaactggttatctgccatggcctcaacaatccataatccagtcatggagaggattccccatgg

SEQ ID NO: 719194 - DNA, 120 bp, Artificial Sequence
  ENSG00000197651_19 (sequence is synthesized)
tcagaagtcaacttgcacatctagttaaagtccaaggtaactgcaaacagtggaacatggcttaggttttgaagcctcgttattggatatagtctttatcctaagttctgaggagccata

SEQ ID NO: 719195 - DNA, 120 bp, Artificial Sequence
  ENSG00000197651_20 (sequence is synthesized)
aaaatagttttccagaatggatttttttttttagataaaaagattatctaccttttgggggtggaatatcttattttgtttttgaatttgtctttgttataaagaagagtaaaacaaaga

SEQ ID NO: 719196 - DNA, 120 bp, Artificial Sequence
  ENSG00000197651_21 (sequence is synthesized)
tgtgtaagtgtgagtctgtgtgagctagtttctgatgtctaaacagcaattacctatggagaatacatcattcaaagtaatagcttttgttcaaacatttttaggaagtaataatacatt

SEQ ID NO: 719197 - DNA, 120 bp, Artificial Sequence
  ENSG00000197651_22 (sequence is synthesized)
tcttcctggacagttgataaaagttccatccatagcatatttccagaatatccctagatgatgaatttaaacatgccttctcagaaattaaatcttttgactttgaaccacaagttagca

SEQ ID NO: 719198 - DNA, 120 bp, Artificial Sequence
  ENSG00000197651_23 (sequence is synthesized)
tttatttgttgaagagaagaatgtgtggtgatgtcttacctgaatgttggttgttactgatatattacaattttcaaggtgataagcttgagctattaaataataaaaagtattaaagta

SEQ ID NO: 719199 - DNA, 120 bp, Artificial Sequence
  ENSG00000197651_24 (sequence is synthesized)
ttgataacaaaacactgcctactgatctgcatgagacactccatctcagagtctacttcctgaagaactcaacaagtaacaactcgtactaggaacaattcaaagcagcaggagattcat

SEQ ID NO: 719200 - DNA, 120 bp, Artificial Sequence
  ENSG00000197651_25 (sequence is synthesized)
aggaatttggaaaatatgcttattcaccatcaagctagcaataggatcctaatatttaatttgatgggtacagatagactctggtacaaaatggtagtctagttgttaaaagttccacta

SEQ ID NO: 719201 - DNA, 120 bp, Artificial Sequence
  ENSG00000197653_0 (sequence is synthesized)
ctcggcgctcttcatctaccgcactatggtgccggaggaggtggaggtggagattgatgagatacctgtcctgtctgaagagggagaagaggaagaagagacttattctcaaaaagtgga

SEQ ID NO: 719202 - DNA, 120 bp, Artificial Sequence
  ENSG00000197653_1 (sequence is synthesized)
gtccgtggataaagtgcgagctaagcgtgtgtcactgagaaccgaatctctaggccaacctctaaacagagaggatgaagaaatggacaaagagatttcagaaaaactcccttccaaaag

SEQ ID NO: 719203 - DNA, 120 bp, Artificial Sequence
  ENSG00000197653_2 (sequence is synthesized)
aactgcgaagcacatcatggaaaagatgcatctccacatgctctgtacccctcttcccgaggagttcctggaccaaaacgtggtgtttttcctcagaaataccaaagaggcaatctctga

SEQ ID NO: 719204 - DNA, 120 bp, Artificial Sequence
  ENSG00000197653_3 (sequence is synthesized)
agctaccgacatgaaggaagctatggaaattatgccagaaacactggagtatggaattataaacgctaatgtgctccattttctgaagaatattatatgtcaggtttttttgccagcatt

SEQ ID NO: 719205 - DNA, 120 bp, Artificial Sequence
  ENSG00000197653_4 (sequence is synthesized)
gtccttcaatcagcacaggacgagtacaaccgtgggagtcacatctggagaagtctctaattcctctgagcatgaatcagacctgccgcccatgcctggggaggcagtagaatatcacag

SEQ ID NO: 719206 - DNA, 120 bp, Artificial Sequence
  ENSG00000197653_5 (sequence is synthesized)
tattcaattaatacgggatgaatttttaatgaacgtgcagaaatttgcaagtaatattcaaagaaccatgcagcaacttgaaggtgagatcaagttagaaatgccaatcatcagtgtgga

SEQ ID NO: 719207 - DNA, 120 bp, Artificial Sequence
  ENSG00000197653_6 (sequence is synthesized)
gggagaggtgtctgacctggcagctgacccggaaaccgttgacatcttggagcagtgtgtgataaactggctgaatcagatatccacagcggttgaggcccaactgaagaagacacctca

SEQ ID NO: 719208 - DNA, 120 bp, Artificial Sequence
  ENSG00000197653_7 (sequence is synthesized)
gggtaaaggccctctggctgaaattgaattctggagggaaagaaatgcaaccttaagtgcgctgcatgaacaaacaaagcttccaatagtcagaaaagtcttggatgtgatcaaggaatc

SEQ ID NO: 719209 - DNA, 120 bp, Artificial Sequence
  ENSG00000197653_8 (sequence is synthesized)
cgactccatgcttgtggctaatctgcagccagtgttcaccgagttattcaagttccacacggaggcctcagacaatgtgcgctttctctccaccgtggagcgttatttcaagaacataac

SEQ ID NO: 719210 - DNA, 120 bp, Artificial Sequence
  ENSG00000197653_9 (sequence is synthesized)
gcacgggtctggcttccacgtggtcctggacaccatccccgccatgatgagtgccctgcggatggtgtggatcatctcccgacactacaacaaagacgagaggatgattccgctcatgga

SEQ ID NO: 719211 - DNA, 120 bp, Artificial Sequence
  ENSG00000197653_10 (sequence is synthesized)
gcgcatcgcctgggaaatcgctgagagagtctgccgagtggtcaacctgcggactttgttcaaagaaaatcgagcgagtgcccaaagcaaaaccttggaagccaggaacaccctcaggct

SEQ ID NO: 719212 - DNA, 120 bp, Artificial Sequence
  ENSG00000197653_11 (sequence is synthesized)
gtggaaaaaggcctattttgacacccgggccaagatagaggcttcggggagggaagatcggtgggagtttgaccggaagcggctgttcgagaggacggattatatggccaccatctgcca

SEQ ID NO: 719213 - DNA, 120 bp, Artificial Sequence
  ENSG00000197653_12 (sequence is synthesized)
ggacctctccgacgttctgcagattttggaggaattttataacatatttggtccagaactaaaggcagtgacgggggaccccaagcgcattgatgatgtcctatgcagagtggacggcct

SEQ ID NO: 719214 - DNA, 120 bp, Artificial Sequence
  ENSG00000197653_13 (sequence is synthesized)
agtcacccccatggaaaacctgacctttgaccccttcagcatcaagtcctcccagttctggaaatatgtgatggatgaattcaagattgaagttctgattgacatcattaataaaatctt

SEQ ID NO: 719215 - DNA, 120 bp, Artificial Sequence
  ENSG00000197653_14 (sequence is synthesized)
tgtccagaaccttgaaaatccaccactgtataagaatcaccctccagtagcaggtgcaatatactgggaacgatctctgttctttcggattaagcataccatcctccgatttcaagaggt

SEQ ID NO: 719216 - DNA, 120 bp, Artificial Sequence
  ENSG00000197653_15 (sequence is synthesized)
acaagagatactggacagtgatcgaggacaggaggtcaaacaaaaatatttggaagtaggtaggacaatgaaggagtatgaagacagaaagtatgagcagtggatggaggtgacggagca

SEQ ID NO: 719217 - DNA, 120 bp, Artificial Sequence
  ENSG00000197653_16 (sequence is synthesized)
ggtgctgccagctctcatgaagaagagccttttgaccaagtcttccatcgccacagaggagccttcgactttagaaaggggagctgtttttgcaatcaacttttcaccggctctcagaga

SEQ ID NO: 719218 - DNA, 120 bp, Artificial Sequence
  ENSG00000197653_17 (sequence is synthesized)
gattattaatgaaacaaagtacttagagcagctggggttcactgtccctgaattagcaagaaatgttgctctccaggaagacaaattccttaggtacacagctgggatacagcgcatgtt

SEQ ID NO: 719219 - DNA, 120 bp, Artificial Sequence
  ENSG00000197653_18 (sequence is synthesized)
ggatcattatcacatgctcataggaacgttaaacgatgcggagtctgtgcttctcaaagatcattcccaggaactgctccgagtgtttaggtcgggatataagaggttgaactggaactc

SEQ ID NO: 719220 - DNA, 120 bp, Artificial Sequence
  ENSG00000197653_19 (sequence is synthesized)
actaggtatcggtgactatataactggttgcaaacaggccattgggaaatttgagtctctcgtccaccagattcataagaatgcagatgacatttcttccaggctgacattaatagaggc

SEQ ID NO: 719221 - DNA, 120 bp, Artificial Sequence
  ENSG00000197653_20 (sequence is synthesized)
cataaatctctttaaatatccagccgctaaaagtgaggaagaactcccaggcgtgaaggaattttttgaacacattgagcgagaaagggccagcgacgtggaccacatggtccggtggta

SEQ ID NO: 719222 - DNA, 120 bp, Artificial Sequence
  ENSG00000197653_21 (sequence is synthesized)
tcttgccattggaccactgctgaccaaagttgagggcctggtcgtccacaccaacacaggcaaggcccccaagctggcctcctactacaaatactgggaaaagaaaatttatgaggtcct

SEQ ID NO: 719223 - DNA, 120 bp, Artificial Sequence
  ENSG00000197653_22 (sequence is synthesized)
gacaaagctcatcctgaagaacttgcagtcttttaattctttgatccttggaaatgtccctctgttccacactgaaaccattctgacggcacctgagatcatccttcatcccaacacaaa

SEQ ID NO: 719224 - DNA, 120 bp, Artificial Sequence
  ENSG00000197653_23 (sequence is synthesized)
tgagatcgacaagatgtgcttccattgtgtccggaattgcgtggagatcaccaagcattttgttcgttggatgaatggcagctgcatagaatgcccacctcagaagggggaggaagagga

SEQ ID NO: 719225 - DNA, 120 bp, Artificial Sequence
  ENSG00000197653_24 (sequence is synthesized)
agttgttataataaacttttacaatgatatctctctgaaccctcagataattgaacaagctgttatgatcccccaaaatgtccacaggattctgatcaatcttatgaagtatctacaaaa

SEQ ID NO: 719226 - DNA, 120 bp, Artificial Sequence
  ENSG00000197653_25 (sequence is synthesized)
atggaagcggtatcgacctctctggaaattggacaaagctattgtgatggagaaatttgctgccaagaaacctccttgtgtagcatatgatgaaaagttgcagttctattccaagatagc

SEQ ID NO: 719227 - DNA, 120 bp, Artificial Sequence
  ENSG00000197653_26 (sequence is synthesized)
ttatgaggttatgcgccaccctctaattaaggatgagcattgcatcagacttcagctcaggcatctggcaaacacagtgcaggaaaatgccaagtcctgggtgatttcgcttggaaaact

SEQ ID NO: 719228 - DNA, 120 bp, Artificial Sequence
  ENSG00000197653_27 (sequence is synthesized)
tctcaatgagtcagcaaaagaggagctctataatctccatgaagagatggagcacctggccaaaaaccttaggaagatccccaatacccttgaagatctcaagtttgtccttgcaacaat

SEQ ID NO: 719229 - DNA, 120 bp, Artificial Sequence
  ENSG00000197653_28 (sequence is synthesized)
tgcagaaattagaagtaaatctctagtcatggaactcagatatagggacgtccaggagcgataccgtaccatggcaatgtataacctctttcctcctgatgcagagaaagaactggttga

SEQ ID NO: 719230 - DNA, 120 bp, Artificial Sequence
  ENSG00000197653_29 (sequence is synthesized)
taagattgagagcatatggtccaatctgtttaatgattcagtgaatgtggagcatgctcttggggacataaagagaactttcacagagcttactcgaggcgaaataatgaactacagagt

SEQ ID NO: 719231 - DNA, 120 bp, Artificial Sequence
  ENSG00000197653_30 (sequence is synthesized)
tcagatagaggagtttgcaaagcgtttttacagtgaaggccctggttctgttggtgatgatcttgataaaggagtagagcttttaggtgtttatgaaagagagctggcaagacatgaaaa

SEQ ID NO: 719232 - DNA, 120 bp, Artificial Sequence
  ENSG00000197653_31 (sequence is synthesized)
gagccgtcaggaactggctaacgctgagaaacttttcgatcttcctattacaatgtacccagagctgctgaaagtgcagaaggaaatgagtgggctgaggatgatttacgagctctatga

SEQ ID NO: 719233 - DNA, 120 bp, Artificial Sequence
  ENSG00000197653_32 (sequence is synthesized)
aggactaaaggttgcaaaagaagaatggtctcagaccctttggatcaacctgaatgtgcagattctccaggaaggaattgaaggttttctcagggctctcagaaagctacctcggccagt

SEQ ID NO: 719234 - DNA, 120 bp, Artificial Sequence
  ENSG00000197653_33 (sequence is synthesized)
ccgtggcttatcagtgacctactacttggaagcaaaaatgaaggcattcaaagactcgattcctttacttcttgacttgaaaaacgaggcactaagagacaggcattggaaagaacttat

SEQ ID NO: 719235 - DNA, 120 bp, Artificial Sequence
  ENSG00000197653_34 (sequence is synthesized)
ggaaaaaacgtctgtcttttttgaaatgaccgaaacgttcaccttggaaaatatgtttgctatggaactgcacaaacacacagatgttctcaatgagattgtcacagcagcaatcaagga

SEQ ID NO: 719236 - DNA, 120 bp, Artificial Sequence
  ENSG00000197653_35 (sequence is synthesized)
ggttgccattgagaaggctgtgaaggaaatcctagacacgtgggaaaatatgaaattcactgtagtcaagtattgcaaaggcacacaggagcgaggctacatcctgggttctgttgacga

SEQ ID NO: 719237 - DNA, 120 bp, Artificial Sequence
  ENSG00000197653_36 (sequence is synthesized)
aattattcagtctcttgatgacaacactttcaacctgcagagcatctcaggaagcagatttgtggggccttttctgcaaactgttcacaaatgggaaaaaacgctttctctaatagggga

SEQ ID NO: 719238 - DNA, 120 bp, Artificial Sequence
  ENSG00000197653_37 (sequence is synthesized)
agtcattgagatttggatgttggttcagagaaaatggatgtatcttgaaagtatttttattggtggagatataagatcacaacttccggaagaggcaaaaaagtttgacaacatcgataa

SEQ ID NO: 719239 - DNA, 120 bp, Artificial Sequence
  ENSG00000197653_38 (sequence is synthesized)
agtatttaaaaggatcatgggtgagaccttaaaagaccccgtgatcaagaggtgctgtgaagccccaaaccgcctcagtgacctacagaacgtcagcgagggcctggagaaatgccagaa

SEQ ID NO: 719240 - DNA, 120 bp, Artificial Sequence
  ENSG00000197653_39 (sequence is synthesized)
aagcctcaacgactacttagattcgaagagaaatgctttcccaaggttcttcttcatttctgacgatgagttgcttagcattctggggagcagcgacccactctgcgtccaggagcacat

SEQ ID NO: 719241 - DNA, 120 bp, Artificial Sequence
  ENSG00000197653_40 (sequence is synthesized)
gatcaagatgtacgacaacatagcatcactgaggtttaatgacggcgatagtggagaaaaactggtgtccgcgatgatttcagcagaaggagaagtcatggagtttcggaagatcttgcg

SEQ ID NO: 719242 - DNA, 120 bp, Artificial Sequence
  ENSG00000197653_41 (sequence is synthesized)
ggctgaagggcgcgtggaggactggatgacggcagttttgaatgagatgagaagaactaatagactaattaccaaagaggctatttttagatactgtgaagacagaagcagagtcgactg

SEQ ID NO: 719243 - DNA, 120 bp, Artificial Sequence
  ENSG00000197653_42 (sequence is synthesized)
gatgctcctgtaccagggcatggtggtgctggccgctagccaggtgtggtggacctgggaggtggaagacgtcttccacaaagcgcaaaaaggggagaagcaggccatgaagaactatgg

SEQ ID NO: 719244 - DNA, 120 bp, Artificial Sequence
  ENSG00000197653_43 (sequence is synthesized)
caggaaaatgcaccggcagatcgatgagttggtaacgcgcatcaccatgccgctaagcaaaaacgacaggaaaaaatacaacactgttctcatcattgatgtgcatgccagagacatagt

SEQ ID NO: 719245 - DNA, 120 bp, Artificial Sequence
  ENSG00000197653_44 (sequence is synthesized)
tgattctttcataagaggcagtatcctggaggcccgagagtttgactgggaaagtcagttgcggttttattgggaccgggagccggatgagctgaacatccgccagtgcacgggaacctt

SEQ ID NO: 719246 - DNA, 120 bp, Artificial Sequence
  ENSG00000197653_45 (sequence is synthesized)
tggctacggctacgagtacatgggcctgaacggcaggctggtcatcacgcccctcaccgatcggatttacctgacgctcacccaggcgctgtccatgtatctaggtggggcccccgccgg

SEQ ID NO: 719247 - DNA, 120 bp, Artificial Sequence
  ENSG00000197653_46 (sequence is synthesized)
cccagcaggaaccggcaaaaccgagaccaccaaggacctggcgaaagccttgggcttgctctgtgttgtcaccaactgtggcgaaggcatggattacagggccgtggggaagattttctc

SEQ ID NO: 719248 - DNA, 120 bp, Artificial Sequence
  ENSG00000197653_47 (sequence is synthesized)
tggcctggcacagtgcggggcttggggctgctttgatgagtttaatcgaatcgatgcttctgtgctctccgtgatctcctcccagatccagacgatccgaaatgctctgatccatcagtt

SEQ ID NO: 719249 - DNA, 120 bp, Artificial Sequence
  ENSG00000197653_48 (sequence is synthesized)
aaccacgttccagtttgaagggcaggagatttccctggactcccgcatgggcatcttcatcaccatgaaccccggctacgcaggccgcacggagctgcccgagtcggtgaaggcgctgtt

SEQ ID NO: 719250 - DNA, 120 bp, Artificial Sequence
  ENSG00000197653_49 (sequence is synthesized)
caggcctgtggtcgtgatcgtgcccgacctgcagcagatctgtgagatcatgctcttctctgagggcttcctggaggccaagactctggcgaaaaagatgacggttctgtataagctggc

SEQ ID NO: 719251 - DNA, 120 bp, Artificial Sequence
  ENSG00000197653_50 (sequence is synthesized)
ccgggagcagctgtccaagcagtatcactatgattttggactcagagccctgaaatcggtgctggtcatggctggtgagctgaagagaggctcctctgaccttagggaggacgtggtgct

SEQ ID NO: 719252 - DNA, 120 bp, Artificial Sequence
  ENSG00000197653_51 (sequence is synthesized)
gatgagggccttgcgagacatgaacttgcccaaatttgtgtttgaagatgttcctcttttccttggtttgatttcggatctgtttcctgggctggactgccctcgcgtccgctaccctga

SEQ ID NO: 719253 - DNA, 120 bp, Artificial Sequence
  ENSG00000197653_52 (sequence is synthesized)
cttcaacgatgcggtagagcaggtcctggaggagaacggctacgcggtcctacccatccaggtggataaagtggttcaaatgttcgagaccatgttaacccgccacacgacgatggtggt

SEQ ID NO: 719254 - DNA, 120 bp, Artificial Sequence
  ENSG00000197653_53 (sequence is synthesized)
ggggcccaccagagggggcaagtccgtcgtcattaacactctgtgtcaggcccagaccaagcttgggctgacgacaaagttgtacatcctgaaccccaaagccgtgagtgtcatagaact

SEQ ID NO: 719255 - DNA, 120 bp, Artificial Sequence
  ENSG00000197653_54 (sequence is synthesized)
ctacggcatcctggacccaaccacccgagactggacagatggggtgttgtcaaacatcttcagggaaatcaacaagccaacagacaagaaggagcgaaagtatattttatttgatggtga

SEQ ID NO: 719256 - DNA, 120 bp, Artificial Sequence
  ENSG00000197653_55 (sequence is synthesized)
tgtggatgctctatgggtggaaaacatgaattctgtgatggatgacaacaggttgttgacattggccaacggggaacgcatccggctccaagcacactgtgccctgctctttgaggttgg

SEQ ID NO: 719257 - DNA, 120 bp, Artificial Sequence
  ENSG00000197653_56 (sequence is synthesized)
gtggagcaatacaatttgaatagtctctttgagaagtatgtgccctatctcatggatgtgatagtggaaggaattgtggatggaagacaagcagaaaagctgaagacaatagttcctcag

SEQ ID NO: 719258 - DNA, 120 bp, Artificial Sequence
  ENSG00000197653_57 (sequence is synthesized)
acagacctcaatatggtaacccagttagccaagatgttggatgcgttgctagaaggagaaatagaagaccttgacctgctggagtgctacttcctggaggctttgtactgctctctggga

SEQ ID NO: 719259 - DNA, 120 bp, Artificial Sequence
  ENSG00000197653_58 (sequence is synthesized)
gcctccctgcttgaggatggaaggatgaaatttgacgaatatatcaaacgccttgcttctttgtctactgttgacacagaaggagtttgggccaaccctggggaactgccaggtcaactt

SEQ ID NO: 719260 - DNA, 120 bp, Artificial Sequence
  ENSG00000197653_59 (sequence is synthesized)
ccaaccttgtatgactttcattttgataacaaacggaatcaatgggtcccatggagtaaattagttccagagtatattcatgcccccgagaggaaattcatcaacatcctggttcacaca

SEQ ID NO: 719261 - DNA, 120 bp, Artificial Sequence
  ENSG00000197653_60 (sequence is synthesized)
gtggataccactcggactacctggatattggaacaaatggttaaaattaagcaacctgttatttttgttggtgaatctggcacttctaagacagccactacccagaatttcctcaaaaat

SEQ ID NO: 719262 - DNA, 120 bp, Artificial Sequence
  ENSG00000197653_61 (sequence is synthesized)
ctgagtgaagaaactaacattgtgttaatggtcaacttctcctcccgcaccacgtccatggatatccaaagaaatttagaagcaaatgtggaaaagcgaaccaaagatacttacggccca

SEQ ID NO: 719263 - DNA, 120 bp, Artificial Sequence
  ENSG00000197653_62 (sequence is synthesized)
cccatgggaaaacgcctgctggtgttcatggatgacatgaatatgccaagggtggatgaatatggcacgcagcagcccattgccttgctgaagctgctgttggaaaaaggctacttatat

SEQ ID NO: 719264 - DNA, 120 bp, Artificial Sequence
  ENSG00000197653_63 (sequence is synthesized)
gaccgtgggaaggagctgaactgtaaaagcattcgagaccttggctttattgctgcaatgggaaaggctggaggaggccgcaatgaagttgacccaagatttatttcgctattcagtgtc

SEQ ID NO: 719265 - DNA, 120 bp, Artificial Sequence
  ENSG00000197653_64 (sequence is synthesized)
ttcaatgtgccatttccttcagaggagtctctgcatttaatttattcctccatcctgaaaggccacacctcgacgtttcatgagagcattgtggctgtgagtggcaagctgacattctgc

SEQ ID NO: 719266 - DNA, 120 bp, Artificial Sequence
  ENSG00000197653_65 (sequence is synthesized)
acgctagcactttacaaaaatattgtgcaagacctacctcccactccgtcaaagttccattacatcttcaaccttcgagatctctcacgggtttttaatggtcttgtcctcactaacccg

SEQ ID NO: 719267 - DNA, 120 bp, Artificial Sequence
  ENSG00000197653_66 (sequence is synthesized)
gagcgattccagacggtggcccagatggtgagagtctggaggaatgagtgtctgagagtcttccacgaccggctgatcagtgaaacagacaagcagctggtacaacagcacataggcagc

SEQ ID NO: 719268 - DNA, 120 bp, Artificial Sequence
  ENSG00000197653_67 (sequence is synthesized)
ttggttgtggaacattttaaagatgacgtggaggtggtgatgagggatcccatattgtttggagacttccagatggctctgcacgaaggagaaccacgcatttatgaagacatccaggac

SEQ ID NO: 719269 - DNA, 120 bp, Artificial Sequence
  ENSG00000197653_68 (sequence is synthesized)
tacgaggcggccaaggctctgttccaggaaattcttgaagagtataatgaaagcaacaccaaaatgaacttggttctcttcgacgatgctctggagcatttaacccgggtgcaccgtatc

SEQ ID NO: 719270 - DNA, 120 bp, Artificial Sequence
  ENSG00000197653_69 (sequence is synthesized)
atccgcatggaccgcggccacgccctgctggtcggggtagggggctcagggaagcagtctctttcgaggctggctgccttcacagccagctgtgaggtgtttgagatcctgctgagccga

SEQ ID NO: 719271 - DNA, 120 bp, Artificial Sequence
  ENSG00000197653_70 (sequence is synthesized)
ggctactcggagaacagtttccgggaagacctgaagagcctctatttgaaacttgggattgagaacaaagcgatgatctttctgttcacggatgcccatgtggctgaggagggcttcctg

SEQ ID NO: 719272 - DNA, 120 bp, Artificial Sequence
  ENSG00000197653_71 (sequence is synthesized)
gagctcatcaacaacatgctgacctcaggaattgtacctgcgcttttttctgaagaggagaaagagtctatcctgagtcagattggacaggaagctctgaagcaaggcatggggccggcc

SEQ ID NO: 719273 - DNA, 120 bp, Artificial Sequence
  ENSG00000197653_72 (sequence is synthesized)
aaggagtctgtgtggcagtacttcgtgaacaaaagtgcaaataacctgcacattgtcctgggcatgtcgccagtgggggacaccctgaggacctggtgcagaaacttcccaggtatggta

SEQ ID NO: 719274 - DNA, 120 bp, Artificial Sequence
  ENSG00000197653_73 (sequence is synthesized)
aataacactggtattgactggttcatgccctggcctccccaagccctccatgcggtcgcaaagtcctttctagggtataatccaatgatcccggcagaaaatatagaaaatgtggtgaag

SEQ ID NO: 719275 - DNA, 120 bp, Artificial Sequence
  ENSG00000197653_74 (sequence is synthesized)
catgttgtcttggttcaccaatccgtggaccactacagccaacagtttctacagaaattgaggcgcagcaactatgtcactcccaagaactaccttgattttattaacacctattcaaaa

SEQ ID NO: 719276 - DNA, 120 bp, Artificial Sequence
  ENSG00000197653_75 (sequence is synthesized)
ttgctggatgagaaaactcagtgtaatatagctcagtgcaagcgtctggatgggggactggacaagctgaaggaggccaccatccagctggacgagctgaaccagaagctggccgagcag

SEQ ID NO: 719277 - DNA, 120 bp, Artificial Sequence
  ENSG00000197653_76 (sequence is synthesized)
aagatcgtgctggcggagaagtccgccgcctgcgaggccttgctggaggagatcgccgtcaacaccgctgtagccgaggagaagaagaaactggcagaggaaaaggccatggagatagag

SEQ ID NO: 719278 - DNA, 120 bp, Artificial Sequence
  ENSG00000197653_77 (sequence is synthesized)
gagcagaacaaagtcattgccatggagaaggccgaggccgagacgaccctggcagaggtcatgcccatcctggaggccgccaagctggaactgcagaagctggacaagtcggacgtgact

SEQ ID NO: 719279 - DNA, 120 bp, Artificial Sequence
  ENSG00000197653_78 (sequence is synthesized)
gagattaggtcgtttgctaagcccccgaagcaggtgcagacggtctgcgaatgcatcctcatcatgaaagggtacaaagagctgaactggaaaacagccaagggcgtgatgtccgacccg

SEQ ID NO: 719280 - DNA, 120 bp, Artificial Sequence
  ENSG00000197653_79 (sequence is synthesized)
aatttcctgcggtctctgatggagattgattttgattcgattacccagagccaagtgaaaaacatcaaaggcctcttgaagactcttaataccacaactgaagaaatggaagctgtcagc

SEQ ID NO: 719281 - DNA, 120 bp, Artificial Sequence
  ENSG00000197653_80 (sequence is synthesized)
aaagccgggctggggatgctgaaatttgttgaagctgtaatgggctactgtgatgttttcagagaaatcaagcccaaaagagagaaggtggccaggctggagcggaatttttacctcact

SEQ ID NO: 719282 - DNA, 120 bp, Artificial Sequence
  ENSG00000197653_81 (sequence is synthesized)
aaacgggaactggaaaggatccagaatgagttggcagcaattcagaaagagctggaaacattgggtgccaaatatgaggccgccatactggaaaagcagaagctgcaggaagaagccgag

SEQ ID NO: 719283 - DNA, 120 bp, Artificial Sequence
  ENSG00000197653_82 (sequence is synthesized)
atcatggagaggcggctgattgccgcagacaaactcatctcgggtctggggtcagaaaacatcaggtggctgaacgacctggatgagctgatgcaccggcgcgtgaagctgctgggggac

SEQ ID NO: 719284 - DNA, 120 bp, Artificial Sequence
  ENSG00000197653_83 (sequence is synthesized)
tgcctgctctgcgcggctttcctcagctacgagggagccttcacctgggagttccgtgacgagatggtcaatcggatttggcaaaatgacatcctggagcgggagatccccctgagccag

SEQ ID NO: 719285 - DNA, 120 bp, Artificial Sequence
  ENSG00000197653_84 (sequence is synthesized)
cctttccggctggaaagcctgctcacggatgatgttgagatcagcagatggggatcccagggccttccccccgatgagctctccgttcagaatggcatcctcaccacccgggccagccgc

SEQ ID NO: 719286 - DNA, 120 bp, Artificial Sequence
  ENSG00000197653_85 (sequence is synthesized)
ttccctctgtgtatcgacccccagcagcaggccctcaactggatcaagagaaaagaggagaagaacaatctgcgggtcgcttcctttaatgaccctgacttcctcaagcagctagagatg

SEQ ID NO: 719287 - DNA, 120 bp, Artificial Sequence
  ENSG00000197653_86 (sequence is synthesized)
tccataaagtacgggacccctttcctgttccgcgatgttgatgaatacatcgatcctgtgattgacaacgtcttagaaaaaaatataaaagtctcccaaggacggcagtttattatcctg

SEQ ID NO: 719288 - DNA, 120 bp, Artificial Sequence
  ENSG00000197653_87 (sequence is synthesized)
ggagacaaggaagtggactatgattcaaatttcagactgtacctgaacaccaagctggccaatcccagatattccccatccgtgtttgggaaagctatggtgatcaattacactgtcacg

SEQ ID NO: 719289 - DNA, 120 bp, Artificial Sequence
  ENSG00000197653_88 (sequence is synthesized)
ctgaagggcctggaggaccagctgctgagcgtgctggtggcttacgagaggcgggagctggaggagcagcgggagcacctcatccaggagaccagcgagaacaagaacctgctcaaggac

SEQ ID NO: 719290 - DNA, 120 bp, Artificial Sequence
  ENSG00000197653_89 (sequence is synthesized)
ctggaagattccctccttcgggagctggccacgtccacggggaacatgctggacaatgtggacctggtgcacaccctggaggagaccaaatccaaggcaacagaggtctcagagaaactc

SEQ ID NO: 719291 - DNA, 120 bp, Artificial Sequence
  ENSG00000197653_90 (sequence is synthesized)
aagctggcggagaagacagccttggacatcgacaggctgcgggatggctaccggccagcagccaggaggggggccatcctgttcttcgtcctgtctgagatggccctggtgaactccatg

SEQ ID NO: 719292 - DNA, 120 bp, Artificial Sequence
  ENSG00000197653_91 (sequence is synthesized)
taccagtactccctgattgccttcttagaggtcttcaggctgtcactgaagaagtcgctgcctgattccatcctcatgaaacgcctgaggaacatcatggacacgctgaccttcagcatc

SEQ ID NO: 719293 - DNA, 120 bp, Artificial Sequence
  ENSG00000197653_92 (sequence is synthesized)
tataaccacggctgcacagggctgtttgagaggcacaagctactcttttcttttaatatgaccatcaagatagaacaagcagaagggagagtccctcaagaagaactagatttcttttta

SEQ ID NO: 719294 - DNA, 120 bp, Artificial Sequence
  ENSG00000197653_93 (sequence is synthesized)
aaaggaaacatttccctggagaaaagcaaaagaaaaaagccctgcgcttggttgtctgaccaaggatgggaagatatcattcttttatcagaaatgttttcagacaactttgggcaactt

SEQ ID NO: 719295 - DNA, 120 bp, Artificial Sequence
  ENSG00000197653_94 (sequence is synthesized)
cctgatgatgttgagaataatcagactgtctggcaggagtggtatgacctggattcactggagcagtttcccgtccccttgggttacgataacaacatcacccctttccagaagttgctt

SEQ ID NO: 719296 - DNA, 120 bp, Artificial Sequence
  ENSG00000197653_95 (sequence is synthesized)
attttgcgctgtttccgtgtggatcgggtctatcgggccgtgactgactatgtgactgtaacaatgggagagaagtatgtgcagcccccaatgatcagctttgaagctatttttgagcag

SEQ ID NO: 719297 - DNA, 120 bp, Artificial Sequence
  ENSG00000197653_96 (sequence is synthesized)
agcactccacattcgcccattgtgtttatcctgagtcctggctccgaccctgccactgatcttatgaaattagcagagcgaagtggttttggaggaaatcgcctcaaattccttgcaatg

SEQ ID NO: 719298 - DNA, 120 bp, Artificial Sequence
  ENSG00000197653_97 (sequence is synthesized)
ggtcaaggtcaagaaaaggtggccctgcagctgctggagacggcggtggctcgggggcagtggctgatgctgcagaactgccacctcctggtcaagtggctgaaagatctggagaagtcc

SEQ ID NO: 719299 - DNA, 120 bp, Artificial Sequence
  ENSG00000197653_98 (sequence is synthesized)
ctggagaggatcaccaagccccacccagacttccgcctgtggctcaccacggaccccaccaagggcttccccattgggattctgcagaagtccctaaaggttgtcaccgagccacccaat

SEQ ID NO: 719300 - DNA, 120 bp, Artificial Sequence
  ENSG00000197653_99 (sequence is synthesized)
gggctgaaactcaacatgagggcaacttacttcaagatctctcacgaaatgctggaccagtgcccgcaccctgccttcaagccgctggtctacgtgctggcgttctttcatgctgtggtg

SEQ ID NO: 719301 - DNA, 120 bp, Artificial Sequence
  ENSG00000197653_100 (sequence is synthesized)
caggagagaaggaagtttgggaagattggctggaacgtgtactatgacttcaatgagtctgacttccaggtctgcatggaaattctgaacacgtacttaacgaaagccttccagcaacgg

SEQ ID NO: 719302 - DNA, 120 bp, Artificial Sequence
  ENSG00000197653_101 (sequence is synthesized)
gacccaaggatcccgtggggcagcctcaagtacctaattggagaggtcatgtatggaggacgggccatcgacagctttgatcgccgcatcctgaccatctacatggatgagtacctgggg

SEQ ID NO: 719303 - DNA, 120 bp, Artificial Sequence
  ENSG00000197653_102 (sequence is synthesized)
gacttcatttttgatactttccagccattccacttcttccggaacaaggaagtggactacaaaatccctgttggtgatgaaaaggagaaatttgttgaagccatcgaggccctcccgctt

SEQ ID NO: 719304 - DNA, 120 bp, Artificial Sequence
  ENSG00000197653_103 (sequence is synthesized)
gccaacacgccagaagtgtttggtctccaccccaacgctgagattggctattacacgcaggcggctcgagacatgtgggctcacctgctggagctgcagcctcagacaggggaatccagc

SEQ ID NO: 719305 - DNA, 120 bp, Artificial Sequence
  ENSG00000197653_104 (sequence is synthesized)
agtggtatcagccgcgatgattatattggccaagtggccaaagaaatagaaaacaagatgcccaaagtctttgacttggaccaggtgaggaagcgcctcggaacaggactctcccccact

SEQ ID NO: 719306 - DNA, 120 bp, Artificial Sequence
  ENSG00000197653_105 (sequence is synthesized)
tcggtggtgctcctgcaggaactggaacgcttcaacaagcttgtggtccggatgacgaagtctctggctgaacttcaaagggccttggctggagaagttggaatgagcaatgagttagat

SEQ ID NO: 719307 - DNA, 120 bp, Artificial Sequence
  ENSG00000197653_106 (sequence is synthesized)
gatgtggccaggtctctttttatcgggcatatccctaatatctggagaaggcttgctcctgacaccttaaagtcccttggaaactggatggtctacttcctgcggcggttcagccagtac

SEQ ID NO: 719308 - DNA, 120 bp, Artificial Sequence
  ENSG00000197653_107 (sequence is synthesized)
atgttgtgggtgaccgagagcgagcccagcgtgatgtggctctcggggctgcacatccctgagtcctacctcacggcgctggtgcaggccacctgccggaagaacggctggccactggac

SEQ ID NO: 719309 - DNA, 120 bp, Artificial Sequence
  ENSG00000197653_108 (sequence is synthesized)
cgctccaccttgttcacacaagtgaccaagttccaggatgcagatgaagtgaatgagcgggcgggacaaggatgctttgtctcaggactgtacctggaaggtgctgactgggatatagaa

SEQ ID NO: 719310 - DNA, 120 bp, Artificial Sequence
  ENSG00000197653_109 (sequence is synthesized)
aaaggatgtcttatcaagagcaaacccaaggtgctggttgtggacctgccgatcctgaagatcatccccattgaagcccatcgcctcaagctgcagaatactttccggacccccgtctac

SEQ ID NO: 719311 - DNA, 120 bp, Artificial Sequence
  ENSG00000197653_110 (sequence is synthesized)
accacctccatgagaaggaacgccatgggagtcggcttggtttttgaagctgatctctttaccacgaggcacatttctcactgggtgctgcaaggagtatgcctcaccctgaattctgat

SEQ ID NO: 719312 - DNA, 120 bp, Artificial Sequence
  ENSG00000197653_111 (sequence is synthesized)
taacctttgggtgaagaaaactgcttaatgaattcggagcctggggttgtcagagtgatcgggtctgctgtcatttcttggggcctctcaagaggcaggagggggactgacactgatttt

SEQ ID NO: 719313 - DNA, 120 bp, Artificial Sequence
  ENSG00000197653_112 (sequence is synthesized)
tcatttgaaatcagccacttaaatctctttccatacaaattaacctgaatggttttgtttttaatactactttttaaaaggaatttatataatcaaaaagtaaatattggagagtatttt

SEQ ID NO: 719314 - DNA, 80 bp, Artificial Sequence
  ENSG00000197653_113 (sequence is synthesized)
gcgccgtcggcggggcgagctgcggccgtttccggggcgcccattgctagggccgccgttgccacggacgcccgccctgc

SEQ ID NO: 719315 - DNA, 120 bp, Artificial Sequence
  ENSG00000197653_114 (sequence is synthesized)
gcccggctccctctgcactgcgcggcgccatggacgacctgcgggtgctgtggatgcgcgaccgcgtgtatgcggctttcggcatcaccgacccccagcttttcgaggacctgctcaacc

SEQ ID NO: 719316 - DNA, 120 bp, Artificial Sequence
  ENSG00000197653_115 (sequence is synthesized)
tggagttttcttttccttctcagagaaaacacttgattaggcaaaagtgcctggcatacatagcattggcacaagtgagaatcctaatgtaatttccaaaggtgtgttttcgatgatcca

SEQ ID NO: 719317 - DNA, 120 bp, Artificial Sequence
  ENSG00000197653_116 (sequence is synthesized)
ggtctgtttcagcagatgctcctttttggcaagaagggctgatgatgtcgggcacagagcagaagtgaccagtcacctggagccacttctcccccttccagaactctctggccctagctt

SEQ ID NO: 719318 - DNA, 120 bp, Artificial Sequence
  ENSG00000197653_117 (sequence is synthesized)
ctttggctctgacctgctacggcgactgtgaagttgttgagcttagtgtttagttcctgcatgagcttctacccccagcctgcctgggtctgtgtggggtcaggtaaggacacagaacct

SEQ ID NO: 719319 - DNA, 120 bp, Artificial Sequence
  ENSG00000197653_118 (sequence is synthesized)
ccaggaccagtggtcactgggcaccccttccctctgtgcaccatgaggctggcctggagccctggctggccacctggaggtgaggggtggcttcactccatgagggaggagaggggctag

SEQ ID NO: 719320 - DNA, 120 bp, Artificial Sequence
  ENSG00000197653_119 (sequence is synthesized)
atctgctgaagcagcatttgacatgcttttaaaatttaagcacattcgttcacgggaggctgttaatcgacaaatgatgatgaaatttaatgatattcttgcacagtactgtaaagagat

SEQ ID NO: 719321 - DNA, 120 bp, Artificial Sequence
  ENSG00000197653_120 (sequence is synthesized)
taattgaaactacttttcgtgtaagttgggtcttcatttgcgccattactgttttttctgtgtttgcttagtgttctttgtactttctgttatagcacctggccaaaaaccttaggaaga

SEQ ID NO: 719322 - DNA, 120 bp, Artificial Sequence
  ENSG00000197653_121 (sequence is synthesized)
caaggatcccgtggggcagcctcaagtacctaattggagaggtaggggtgaccggggatccttccgcaggtgcctctggggctacagagctgtggcctcgtgcccctattttcctctgag

SEQ ID NO: 719323 - DNA, 120 bp, Artificial Sequence
  ENSG00000197653_122 (sequence is synthesized)
ccctcagaaccagcctcttctgcccctgtgttccccttgggtttctgtgacaattctctctgctctcacctggttgttctttgtcctaagtgagctctgttcacatggaggttccctgag

SEQ ID NO: 719324 - DNA, 120 bp, Artificial Sequence
  ENSG00000197653_123 (sequence is synthesized)
ctggatccatggctggggatccaggcaaggcatcctctagccccttgcctcagctgttgctgtatacagagctcacaggaagcatccccggtggtctgcacacggctcaggcagtgacat

SEQ ID NO: 719325 - DNA, 120 bp, Artificial Sequence
  ENSG00000197653_124 (sequence is synthesized)
caattccaaagacagaagcagctgctggcttcttcagctgtttgtttgatgtgtttgggggactttgcctgctgcacaggagctcccaacacttcctgagggcttcttactgctttgggc

SEQ ID NO: 719326 - DNA, 120 bp, Artificial Sequence
  ENSG00000197653_125 (sequence is synthesized)
cctatcccttgggaagccagcaaagccacagatcaattgtgtgaacagtggcccgaaaggttatgcaagtcaacaggttcaagccttgcagcagccaggctgctggagtctcttgaccct

SEQ ID NO: 719327 - DNA, 120 bp, Artificial Sequence
  ENSG00000197653_126 (sequence is synthesized)
ctccctgataggtgaccgagagcgagcccagcgtgatgtggctctcggggctgcacatccctgagtcctacctcacggcgctggtgcaggccacctgccggaagaacggctggccactgg

SEQ ID NO: 719328 - DNA, 120 bp, Artificial Sequence
  ENSG00000197653_127 (sequence is synthesized)
tacatattggaacaatccacagcagatcatagcatgatgttttcatagagtatcgaggtgggtgttttggtttgttttattttttcttgtttttggcttgatattactatattttaactg

SEQ ID NO: 719329 - DNA, 120 bp, Artificial Sequence
  ENSG00000197653_128 (sequence is synthesized)
aatagccagagcatctaagtacaggtgttctttggcttaggatagggttacatcctgataaaataatcataagtcaaaaatattgtcagttgaaaatacatttaatatcccaattaaccc

SEQ ID NO: 719330 - DNA, 120 bp, Artificial Sequence
  ENSG00000197653_129 (sequence is synthesized)
atcataaagttgaaaaatcctaagtggaaccatcaaagccggggaccatctgtattgctttgtttttaggatggagaatgtcagatcaagttagaaagtcaaatacaagcacatcctgtg

SEQ ID NO: 719331 - DNA, 120 bp, Artificial Sequence
  ENSG00000197653_130 (sequence is synthesized)
tctccttggaaatggcttccttaggcggcccacttcctcccgactttcctccgggttcaaccacagcagggttgcaccgttcccagcagccttttcagaaaagtatcagaatgtgaacag

SEQ ID NO: 719332 - DNA, 120 bp, Artificial Sequence
  ENSG00000197653_131 (sequence is synthesized)
cttggtgggtttcagtataactgagcgtgttctcttctttcaaggtctgcatggaaattctgaacacgtacttaacgaaagccttccagcaacgggacccaaggatcccgtggggcagcc

SEQ ID NO: 719333 - DNA, 120 bp, Artificial Sequence
  ENSG00000197653_132 (sequence is synthesized)
atgtataacctctttgtaagtcaacttgtattttcttattcatttaacaattggattgaccactaacgacccttttcagaaatgcttctcaagtatactgccattgatttgttttcaaat

SEQ ID NO: 719334 - DNA, 120 bp, Artificial Sequence
  ENSG00000197653_133 (sequence is synthesized)
aagtgactttaagtaatacattgtaaatgtaaagcaatgccactgttatttagaataatgaaaatatagagtatttttcaatctgtatggctcaaatggattgatctgtaactataccat

SEQ ID NO: 719335 - DNA, 120 bp, Artificial Sequence
  ENSG00000197653_134 (sequence is synthesized)
ttccattctcccttttcttttcttcttttttttgtgttaatttcctttaatagataaagagctcttgcaaaaatgataagaagagagtgaaagatttaagataataaaagaaactggtag

SEQ ID NO: 719336 - DNA, 120 bp, Artificial Sequence
  ENSG00000197653_135 (sequence is synthesized)
cctctttcttctctggctcaccccagcctcctaccagagcacaaatgcctgggcccctgcctggccgcccccacactgcatccatgccctccgggacctctgtctcctgctcttctctcc

SEQ ID NO: 719337 - DNA, 120 bp, Artificial Sequence
  ENSG00000197653_136 (sequence is synthesized)
tgcttttccttcctctcctgctttgccttgtctgtgctgttctcttccacttctgtctttccatggcgtggtctgggagactcctgtggctttcactgaccttgcctggcagtgggatgc

SEQ ID NO: 719338 - DNA, 120 bp, Artificial Sequence
  ENSG00000197658_0 (sequence is synthesized)
gcaattcactttggattttctaatatcccatttctaagaagaatggcagactattgaacaggtgtattttaggtcacgtggggactgcatccacctgaaaatccaccgttgacttatcag

SEQ ID NO: 719339 - DNA, 120 bp, Artificial Sequence
  ENSG00000197658_1 (sequence is synthesized)
gaaactcagagatcaggatctttcacagagtagtcttttaagaagattcagttgtcaacagctagcagtctctttgccaaataattatatctgtgacttctgaaactatttggctgccta

SEQ ID NO: 719340 - DNA, 120 bp, Artificial Sequence
  ENSG00000197658_2 (sequence is synthesized)
aagttaaaggacttggggaaagtccttccactgctcttctgcagtagtgtcacaccactcagtgcagggcccaccaagaagaaagcagtgtcaggatccacatggcactatggtaacttt

SEQ ID NO: 719341 - DNA, 120 bp, Artificial Sequence
  ENSG00000197658_3 (sequence is synthesized)
gtgaaaggggacattttctccctctgaacttctcttcataaagtcattgtgcttcctcttggggatcacctgttcagtctcaatgggctttgatgtgctcctggatcaagtgggtggcat

SEQ ID NO: 719342 - DNA, 120 bp, Artificial Sequence
  ENSG00000197658_4 (sequence is synthesized)
ggggagattccagatttgtctgatagctttcttttgcatcaccaacatcctactgttccctaatattgtgttggagaacttcactgcattcacccctagtcatcgctgctgggtccccct

SEQ ID NO: 719343 - DNA, 120 bp, Artificial Sequence
  ENSG00000197658_5 (sequence is synthesized)
cctggacaatgacactgtgtctgacaatgataccgggaccctcagcaaggatgacctcctgagaatctccatcccactggactcaaacctgaggccacagaagtgtcagcgctttatcca

SEQ ID NO: 719344 - DNA, 120 bp, Artificial Sequence
  ENSG00000197658_6 (sequence is synthesized)
tccccagtggcagctccttcacctgaacgggaccttccccaacacaaatgagccagacacggagccctgtgtggatggctgggtgtacgacagaagctctttcctctccaccatcgtgac

SEQ ID NO: 719345 - DNA, 120 bp, Artificial Sequence
  ENSG00000197658_7 (sequence is synthesized)
tgagtgggacctggtatgtgaatctcagtcactaaaatcaatggttcaatccctatttatggctgggtcacttctgggaggtctaatatatggccatctttcagacagggttggacggaa

SEQ ID NO: 719346 - DNA, 120 bp, Artificial Sequence
  ENSG00000197658_8 (sequence is synthesized)
cccaccttccttgtttactgcatactgcgcttcttggcagggttctccaccatgactattttgggaaacacttttattctcagcttagagtggacattgccccggtcacgatctatgaca

SEQ ID NO: 719347 - DNA, 120 bp, Artificial Sequence
  ENSG00000197658_9 (sequence is synthesized)
ataatggtgctattatgttcctacagtgttgggcagatgctcctaggagggctggcttttgccattcaggactggcacatattgcaactgactgtgtctacacccataattgtcctcttc

SEQ ID NO: 719348 - DNA, 120 bp, Artificial Sequence
  ENSG00000197658_10 (sequence is synthesized)
ttgtcctcttggaagatggtggagtctgctcggtggctgattatcaacaatcagctagatgagggcttaaaggagcttagaagagttgcacacataaatggaaaaaagaatactgaagag

SEQ ID NO: 719349 - DNA, 120 bp, Artificial Sequence
  ENSG00000197658_11 (sequence is synthesized)
acactgaccactgagcttgtgagatccaccatgaagaaggagttggatgcagtccgaattaaaacatccattttttccctgttccgtgcacccaaattgcgaatgagagtcttcggcctg

SEQ ID NO: 719350 - DNA, 120 bp, Artificial Sequence
  ENSG00000197658_12 (sequence is synthesized)
tgctttgtgagattcgcaatcactgtacccttttatggcctgatactcaacttgcagcacttagggagcaatgtctccctgttccagattctctgtggagctgtcacattcacagccaga

SEQ ID NO: 719351 - DNA, 120 bp, Artificial Sequence
  ENSG00000197658_13 (sequence is synthesized)
tgtgtttcccttttgacactgaatcatatgggtcgtcgaataagccagatattgttcacgttcccggtgggacttttcattctggtcaacacctttttgccccaagaaatgcagatcctg

SEQ ID NO: 719352 - DNA, 120 bp, Artificial Sequence
  ENSG00000197658_14 (sequence is synthesized)
cgtgtggttttagcaactttgggaattggtagtgtttctgctgctagcaacagtgcttctgtccaccacaacgagctcgtccccaccatattgaggtcaacagttgcaggaatcaatgca

SEQ ID NO: 719353 - DNA, 120 bp, Artificial Sequence
  ENSG00000197658_15 (sequence is synthesized)
gtgtccggtaggactggggcagcactggctcctctgttgatgaccttaatggcgtattctccccacctaccctggatttcctatggagtcttccccatccttgctgtccctgttatcctc

SEQ ID NO: 719354 - DNA, 120 bp, Artificial Sequence
  ENSG00000197658_16 (sequence is synthesized)
ctccttccagaaaccagggatctacctcttcctaacaccatccaggatgtggaaaatgacagaaaagattcaagaaacataaagcaggaagatacttgcatgaaagtaacacagttttaa

SEQ ID NO: 719355 - DNA, 120 bp, Artificial Sequence
  ENSG00000197658_17 (sequence is synthesized)
agcgaggctatggtagacatagaaaggaaaattctgacacctgggatctgttcggtctctggcctagtcctgagccatgatgtccatagtacctattgtgtcacctgagaagcaaacaat

SEQ ID NO: 719356 - DNA, 120 bp, Artificial Sequence
  ENSG00000197658_18 (sequence is synthesized)
ggaataggatgacactatatgtggggaggctggcactttgcattcattattttagacatggaattatcatgaaattatttttcttaatagaaaaaatacccacttatttttgaagcaaat

SEQ ID NO: 719357 - DNA, 120 bp, Artificial Sequence
  ENSG00000197658_19 (sequence is synthesized)
gtattatttatctaacttttggaatattatgtgatggagataatttgggggcttttgtcattgtaactgagattgaatataaggaaaacacaataaatttatctacataactatttaaaa

SEQ ID NO: 719358 - DNA, 120 bp, Artificial Sequence
  ENSG00000197674_0 (sequence is synthesized)
gaagacacagtgagttagcaccaccaccaggaattggcctttcagctctgtgcctgtctccagtcaggctggaataagtctcctcatatttgcaagctcggccctcccctggaatctaaa

SEQ ID NO: 719359 - DNA, 120 bp, Artificial Sequence
  ENSG00000197674_1 (sequence is synthesized)
gcctcctcagccttctgagtcagcctgaaaggaacaggccgaactgctgtatgggctctaatatcacctccacttccatcattttcctgctcactggtgttcctgggctggaagccttcc

SEQ ID NO: 719360 - DNA, 120 bp, Artificial Sequence
  ENSG00000197674_2 (sequence is synthesized)
acacctggatctccattcccttctgcttcctctctgtaactgctctcttgggaaacagcctgatcctcttcgctaccatcactcagcccagcctccacgaaccaatgtactatttcctct

SEQ ID NO: 719361 - DNA, 120 bp, Artificial Sequence
  ENSG00000197674_3 (sequence is synthesized)
ccatgctgtccgccactgacctcggcctgtccatatccactctggtcaccatgctgagtatattctggttcaatgtgagggaaatcagctttaatgcctgcttgtcccacatgttcttta

SEQ ID NO: 719362 - DNA, 120 bp, Artificial Sequence
  ENSG00000197674_4 (sequence is synthesized)
ttaaattcttcactgtcatggaatcctcagtgctgttggccatggcttttgatcgttttgtggccgtctctaatccccttaggtatgccatgattttaactgactccagaatagctcaaa

SEQ ID NO: 719363 - DNA, 120 bp, Artificial Sequence
  ENSG00000197674_5 (sequence is synthesized)
ttggagtggcaagtgtcatcagggggctcctaatgctgacaccaatggtagcacttcttataagactttcctactgccacagccaagtactccaccactcctactgctaccaccctgatg

SEQ ID NO: 719364 - DNA, 120 bp, Artificial Sequence
  ENSG00000197674_6 (sequence is synthesized)
gaagctctcatgcacagacaccagaatcaacagtgcagttgggctgactgccatgttctctactgttggtgtagacttacttctcatcctcctttcttatgttttgatcattaggactgt

SEQ ID NO: 719365 - DNA, 120 bp, Artificial Sequence
  ENSG00000197674_7 (sequence is synthesized)
ccttagcgttgcttccccagaagagaggaaggaaaccttcagtacatgtgtctcccacattgtggcttttgctatatattacattccattgatcagtctgtccattgttcacagatttgg

SEQ ID NO: 719366 - DNA, 120 bp, Artificial Sequence
  ENSG00000197674_8 (sequence is synthesized)
gaaacaagccccagcctatgtacatactatgattgctaacacctacctgctgatctcccctttgatgaaccctgtcatctacagtgtgaaaaccaaacagatacgtagagctgtgataaa

SEQ ID NO: 719367 - DNA, 120 bp, Artificial Sequence
  ENSG00000197674_9 (sequence is synthesized)
aattctccattccaaagaaacataaaattgtagaattctagcactagatggacccctcaagatggtatacttcaggtcatgtttccaattaaaaacaaaaaacaaccaaagaactggtgc

SEQ ID NO: 719368 - DNA, 120 bp, Artificial Sequence
  ENSG00000197674_10 (sequence is synthesized)
ccattgaagctaagcacataatcatttaaagttaaagctggaatgtatctagaacatcagctagtttgactactttattttccagatgaggaggtgaagacatgggatggaagagatgaa

SEQ ID NO: 719369 - DNA, 120 bp, Artificial Sequence
  ENSG00000197674_11 (sequence is synthesized)
cagcctaaaattagccttatatataaaatttctccttctcacaccactgttgggtccaaactgttgttgccttctgtccctgccaacaccctttctgttattatctcatctacttcatag

SEQ ID NO: 719370 - DNA, 120 bp, Artificial Sequence
  ENSG00000197683_0 (sequence is synthesized)
agaaggatagatcctattaaaactcagtcgcattggtttatagatagacgtaatcaatggatggcattgcaaggagcatccagttttatggagggtggaagcctcacttccttggctata

SEQ ID NO: 719371 - DNA, 120 bp, Artificial Sequence
  ENSG00000197683_1 (sequence is synthesized)
ataaagagttctgatgcatcttcatacaacaagaggaagagtctgcacgcagaagcaccaccttctagggataaataaagggtcaagctaaggaagggcagaacaaacttcagacactca

SEQ ID NO: 719372 - DNA, 120 bp, Artificial Sequence
  ENSG00000197683_2 (sequence is synthesized)
cttctttgcctcaacttcagcctgctctcacaacctcactatgtcttgccccaactactgctcgggaaactccaactcaggatctctcagaacctcccgccatattcctctcacctccat

SEQ ID NO: 719373 - DNA, 120 bp, Artificial Sequence
  ENSG00000197683_3 (sequence is synthesized)
cgacctctgccctaccagcgtgagctgtggagatgtcctctacttacccactagctctcaagaccatacctgggtcacagacaactgccaagagacctgcggtgaaccaaccagctgcca

SEQ ID NO: 719374 - DNA, 120 bp, Artificial Sequence
  ENSG00000197683_4 (sequence is synthesized)
agttcctgccttccagtatcctgtagaccacagaggtatgtgtccagcggctgtcgtccactgaggccgctgctcaatagttaccagcccataggagactgtgtgcccaatgcctatcgc

SEQ ID NO: 719375 - DNA, 120 bp, Artificial Sequence
  ENSG00000197683_5 (sequence is synthesized)
ccccaattctgcttgtccaagagttgccagccccaaaacctcctcacttctggatgccaaccctcgagttgcttggcctatcgtcctcaaagtcttcacgttgtgtccagcagcctcaga

SEQ ID NO: 719376 - DNA, 120 bp, Artificial Sequence
  ENSG00000197683_6 (sequence is synthesized)
cctctggggcctctgttcagtggttgccaacctctgacccatgtgttcagcacgtgtcgtccatcttgctctggactgtgaaaccagcagcttctttgttccagtgaataatcactctga

SEQ ID NO: 719377 - DNA, 120 bp, Artificial Sequence
  ENSG00000197683_7 (sequence is synthesized)
gcatccacaacaaaaattcaaactccatggacttttgcttctttgctagtagcaactgatgtttcttagttttactgtgcctgatctaatgcaagctgcttctctcgcatgttttatctt

SEQ ID NO: 719378 - DNA, 120 bp, Artificial Sequence
  ENSG00000197683_8 (sequence is synthesized)
gttttcatctttccttgacatcaaaaaaattagtttacaatgctattcaatgttgctctggtctgggaagaatgtatttgttttgcactataataaatgcgattaagtccaaattaagaa

SEQ ID NO: 719379 - DNA, 120 bp, Artificial Sequence
  ENSG00000197694_0 (sequence is synthesized)
actacccgctgcggagtgaacggtgtggagcggaggccgcggaggctcctcggtccttcagcacccctcggcccgacgcacccacgcccctcaccccccgagagccgaaaatggacccaa

SEQ ID NO: 719380 - DNA, 120 bp, Artificial Sequence
  ENSG00000197694_1 (sequence is synthesized)
gtggggtcaaagtgctggaaacagcagaggacatccaggagaggcggcagcaggtcctagaccgataccaccgcttcaaggaactctcaacccttaggcgtcagaagctggaagattcct

SEQ ID NO: 719381 - DNA, 120 bp, Artificial Sequence
  ENSG00000197694_2 (sequence is synthesized)
atcgattccagttctttcaaagagatgctgaagagctggagaaatggatacaggaaaaacttcagattgcatctgatgagaattataaagacccaaccaacttgcagggaaagcttcaga

SEQ ID NO: 719382 - DNA, 120 bp, Artificial Sequence
  ENSG00000197694_3 (sequence is synthesized)
agcatcaagcatttgaagctgaagtgcaggccaactcaggagccattgttaagctggatgaaactggaaacctgatgatctcagaagggcattttgcatctgaaaccatacggacccgtt

SEQ ID NO: 719383 - DNA, 120 bp, Artificial Sequence
  ENSG00000197694_4 (sequence is synthesized)
tgatggagctgcaccgccagtgggaattacttttggagaagatgcgagaaaaaggaatcaaactgctgcaggcccagaagttggtgcagtacttacgagaatgtgaggacgtgatggact

SEQ ID NO: 719384 - DNA, 120 bp, Artificial Sequence
  ENSG00000197694_5 (sequence is synthesized)
ggatcaatgacaaggaagcaattgttacttctgaagagctgggccaggatctggagcatgtagaggttttacagaagaaatttgaagagtttcaaacagatatggctgctcatgaagaaa

SEQ ID NO: 719385 - DNA, 120 bp, Artificial Sequence
  ENSG00000197694_6 (sequence is synthesized)
gagttaatgaagtgaaccagtttgctgccaaactcatacaggagcagcaccctgaggaggaactgatcaagactaagcaggatgaagtcaatgcagcctggcagcggctgaagggcctgg

SEQ ID NO: 719386 - DNA, 120 bp, Artificial Sequence
  ENSG00000197694_7 (sequence is synthesized)
ctctgcagaggcaggggaagctctttggggcagcagaagttcagcgctttaacagggatgtggatgagactatcagttggattaaggaaaaggagcagttaatggcctctgatgattttg

SEQ ID NO: 719387 - DNA, 120 bp, Artificial Sequence
  ENSG00000197694_8 (sequence is synthesized)
gccgagacctggcaagtgttcaggctctgcttcggaagcacgagggtctggagagagatcttgctgctctagaagacaaggtcaaagccctgtgtgctgaggctgaccgcctgcaacagt

SEQ ID NO: 719388 - DNA, 120 bp, Artificial Sequence
  ENSG00000197694_9 (sequence is synthesized)
cccaccctctgagtgcaacacagattcaagtgaagcgagaggaactgattacaaactgggagcagatccgcaccttggcggcagagagacatgcacggctcaatgattcatacaggcttc

SEQ ID NO: 719389 - DNA, 120 bp, Artificial Sequence
  ENSG00000197694_10 (sequence is synthesized)
aacgcttccttgctgacttccgtgacctcaccagctgggtgactgagatgaaagccctcatcaatgcagatgagcttgccagtgatgtggctggggctgaagccctgctagatagacacc

SEQ ID NO: 719390 - DNA, 120 bp, Artificial Sequence
  ENSG00000197694_11 (sequence is synthesized)
aagagcacaagggtgaaattgatgcccatgaagacagcttcaaatctgcagatgaatctggacaggcactgcttgctgctggtcactatgcctcagatgaagtgagggagaagctgaccg

SEQ ID NO: 719391 - DNA, 120 bp, Artificial Sequence
  ENSG00000197694_12 (sequence is synthesized)
tcctttccgaggagagagcggcgctgctggagctgtgggagctgcgcaggcagcagtacgagcagtgcatggacctgcagctcttctaccgggacactgagcaggtggacaactggatga

SEQ ID NO: 719392 - DNA, 120 bp, Artificial Sequence
  ENSG00000197694_13 (sequence is synthesized)
gcaagcaggaggcgttcctgttgaatgaagacttgggagattccttggatagtgtggaagcgcttcttaagaagcacgaagactttgagaaatcccttagtgcccaggaggaaaagatta

SEQ ID NO: 719393 - DNA, 120 bp, Artificial Sequence
  ENSG00000197694_14 (sequence is synthesized)
cagcattagatgaatttgcaaccaagctaattcagaacaaccactatgcaatggaagatgtggccactcgccgagatgctctgttgagccgccgcaatgcccttcacgagagagccatgc

SEQ ID NO: 719394 - DNA, 120 bp, Artificial Sequence
  ENSG00000197694_15 (sequence is synthesized)
gtcgccgggcccagctagccgattctttccatctgcagcagtttttccgtgattctgatgagctcaagagttgggtcaatgagaagatgaaaactgccacagatgaagcttataaagatc

SEQ ID NO: 719395 - DNA, 120 bp, Artificial Sequence
  ENSG00000197694_16 (sequence is synthesized)
catccaacctacaaggaaaagtacagaagcatcaggcttttgaggctgagctctcagcaaaccagagccgaattgatgccttggagaaagctggccaaaagctgattgatgtcaaccact

SEQ ID NO: 719396 - DNA, 120 bp, Artificial Sequence
  ENSG00000197694_17 (sequence is synthesized)
atgccaaggatgaagtggcagctcgtatgaatgaggtgatcagtttgtggaagaaactgctagaggccactgaactgaaaggaataaagcttcgtgaagccaaccagcaacagcaattta

SEQ ID NO: 719397 - DNA, 120 bp, Artificial Sequence
  ENSG00000197694_18 (sequence is synthesized)
atcgcaatgttgaggatattgaattgtggctatatgaagtagaaggtcacttggcttcggatgattacggcaaagatcttaccaatgtgcagaacctccagaagaaacatgcactgctag

SEQ ID NO: 719398 - DNA, 120 bp, Artificial Sequence
  ENSG00000197694_19 (sequence is synthesized)
aggcagatgtggctgctcaccaggaccgaattgatggcatcaccattcaggcccgccagttccaagatgctggccattttgatgcagaaaacatcaagaagaaacaggaagccctcgtgg

SEQ ID NO: 719399 - DNA, 120 bp, Artificial Sequence
  ENSG00000197694_20 (sequence is synthesized)
ctcgctatgaggcactcaaggagcccatggttgcccggaagcagaagctggccgattctctgcggttgcagcagctcttccgggatgttgaggatgaggagacgtggattcgagagaaag

SEQ ID NO: 719400 - DNA, 120 bp, Artificial Sequence
  ENSG00000197694_21 (sequence is synthesized)
agcccattgccgcatctaccaacagaggtaaggatttaattggggtccagaatctgctaaagaaacatcaagccttacaagcagaaattgctggacatgaaccacgcatcaaagcagtta

SEQ ID NO: 719401 - DNA, 120 bp, Artificial Sequence
  ENSG00000197694_22 (sequence is synthesized)
cacagaaggggaatgccatggtggaggaaggccattttgctgcagaggatgtgaaggccaagcttcacgagctgaaccaaaagtgggaggcactgaaagccaaagcttcccagcgtcggc

SEQ ID NO: 719402 - DNA, 120 bp, Artificial Sequence
  ENSG00000197694_23 (sequence is synthesized)
aggacctggaggactctctgcaggcccagcagtactttgctgatgctaacgaggctgaatcctggatgcgggagaaggaacccattgtgggcagcactgactatggcaaggacgaagact

SEQ ID NO: 719403 - DNA, 120 bp, Artificial Sequence
  ENSG00000197694_24 (sequence is synthesized)
ctgctgaggctctactgaagaaacacgaagctttgatgtcagatctcagtgcctacggcagcagcatccaggctttgcgagaacaagcacagtcctgccggcaacaagtggcccccacgg

SEQ ID NO: 719404 - DNA, 120 bp, Artificial Sequence
  ENSG00000197694_25 (sequence is synthesized)
atgatgagactgggaaggagctggtcttggctctctacgactatcaggagaagagtccccgagaggtcaccatgaagaagggagatatccttaccttactcaacagcaccaacaaggatt

SEQ ID NO: 719405 - DNA, 120 bp, Artificial Sequence
  ENSG00000197694_26 (sequence is synthesized)
ggtggaaagtggaagtgaacgatcgtcagggttttgtgccggctgcgtacgtgaagaaattggaccccgcccagtcagcctcccgggagaatctcctggaggagcaaggcagcatagcac

SEQ ID NO: 719406 - DNA, 120 bp, Artificial Sequence
  ENSG00000197694_27 (sequence is synthesized)
tgcggcaggagcagattgacaatcagacacgcataactaaggaggccggcagtgtatctctgcgtatgaagcaggtggaagaactatatcattctctgctggaactgggtgagaagcgta

SEQ ID NO: 719407 - DNA, 120 bp, Artificial Sequence
  ENSG00000197694_28 (sequence is synthesized)
aaggcatgttggagaagagttgcaagaagtttatgttgttccgtgaagcgaatgaactacagcaatggatcaatgagaaggaagccgctctgacaagtgaggaggtcggagcagacttgg

SEQ ID NO: 719408 - DNA, 120 bp, Artificial Sequence
  ENSG00000197694_29 (sequence is synthesized)
agcaggttgaggtgctccagaagaagtttgatgacttccagaaggacctgaaggccaatgagtcacggttgaaggacattaacaaggtagctgaagacctggagtctgaaggtctcatgg

SEQ ID NO: 719409 - DNA, 120 bp, Artificial Sequence
  ENSG00000197694_30 (sequence is synthesized)
cagaggaggtgcaggctgtgcaacaacaggaagtgtatggcatgatgcccagggatgaaactgattccaagacagcctccccgtggaagtctgctcgtctgatggttcacaccgtggcca

SEQ ID NO: 719410 - DNA, 120 bp, Artificial Sequence
  ENSG00000197694_31 (sequence is synthesized)
cctttaattccatcaaggagctgaatgagcgctggcggtccctacagcagctggccgaggaacggagccagctcttgggcagcgcccatgaagtacagaggttccacagagatgctgatg

SEQ ID NO: 719411 - DNA, 120 bp, Artificial Sequence
  ENSG00000197694_32 (sequence is synthesized)
agtgtccaggccctgcaacgcaagcatgagggcttcgagagggaccttgcggctctcggtgacaaggtaaactcccttggtgaaacagcagagcgcctgatccagtcccatcccgagtca

SEQ ID NO: 719412 - DNA, 120 bp, Artificial Sequence
  ENSG00000197694_33 (sequence is synthesized)
gcagaagacctgcaggaaaagtgcacagagttaaaccaggcctggagcagcctggggaaacgtgcagatcagcgcaaggcaaagttgggtgactcccacgacctgcagcgcttccttagc

SEQ ID NO: 719413 - DNA, 120 bp, Artificial Sequence
  ENSG00000197694_34 (sequence is synthesized)
gatttccgggacctcatgtcttggatcaatggaatacgggggttggtgtcctcagatgagctagccaaggatgtcaccggagctgaggcattgctggagcgacaccaggaacaccggaca

SEQ ID NO: 719414 - DNA, 120 bp, Artificial Sequence
  ENSG00000197694_35 (sequence is synthesized)
gaaatcgatgccagggctggcactttccaggcatttgagcagtttggacagcagctgttggctcacggacactatgccagccctgagatcaagcagaaacttgatattcttgaccaggag

SEQ ID NO: 719415 - DNA, 120 bp, Artificial Sequence
  ENSG00000197694_36 (sequence is synthesized)
cgtgcagacctggagaaggcctgggttcagcgcaggatgatgctggatcagtgccttgaactgcagctgttccatcgggactgtgagcaagctgagaactggatggctgcccgggaggcc

SEQ ID NO: 719416 - DNA, 120 bp, Artificial Sequence
  ENSG00000197694_37 (sequence is synthesized)
ttcttgaataccgaagacaaaggagactcactggacagcgtagaggctctgatcaaaaaacatgaagactttgacaaagcgattaacgtccaggaagagaagattgctgctctgcaggcc

SEQ ID NO: 719417 - DNA, 120 bp, Artificial Sequence
  ENSG00000197694_38 (sequence is synthesized)
tttgccgaccagctcatcgctgccggccattatgccaagggagacatttctagccggcgcaatgaggtcttggacaggtggcgacgtctgaaagcccagatgattgagaaaaggtcaaag

SEQ ID NO: 719418 - DNA, 120 bp, Artificial Sequence
  ENSG00000197694_39 (sequence is synthesized)
ctaggagaatctcaaaccctccaacagttcagccgggatgtggatgagattgaggcttggatcagtgaaaaattgcaaacagcgagtgatgagtcgtacaaggatcccaccaacatccag

SEQ ID NO: 719419 - DNA, 120 bp, Artificial Sequence
  ENSG00000197694_40 (sequence is synthesized)
ctttccaagctgctgagcaagcaccagaagcaccaggcttttgaagcagagctgcatgccaacgctgaccggatccgtggggttatcgacatgggcaactccctcattgaacgtggagcc

SEQ ID NO: 719420 - DNA, 120 bp, Artificial Sequence
  ENSG00000197694_41 (sequence is synthesized)
tgtgccggcagtgaggatgctgtcaaggcccgcctggctgccttagctgaccagtggcagttcttggtgcaaaagtcagcggaaaagagccagaaactgaaagaagccaacaagcagcag

SEQ ID NO: 719421 - DNA, 120 bp, Artificial Sequence
  ENSG00000197694_42 (sequence is synthesized)
aacttcaacacagggatcaaggactttgacttctggctgtctgaggtggaggccctgctggcatccgaagattatggcaaagacctagcttctgtgaacaacctgctgaaaaagcatcaa

SEQ ID NO: 719422 - DNA, 120 bp, Artificial Sequence
  ENSG00000197694_43 (sequence is synthesized)
ctgctggaagcagatatatctgcccatgaggatcgcctgaaggacctgaacagccaggcagacagcctgatgaccagcagtgccttcgacacctcccaagtaaaggacaagagggacacc

SEQ ID NO: 719423 - DNA, 120 bp, Artificial Sequence
  ENSG00000197694_44 (sequence is synthesized)
atcaacgggcgcttccagaagatcaagagcatggcggcctcccggcgagccaagctgaatgaatcccatcgcctgcaccagttcttccgggacatggatgacgaggagtcctggatcaag

SEQ ID NO: 719424 - DNA, 120 bp, Artificial Sequence
  ENSG00000197694_45 (sequence is synthesized)
gagaagaagctgctggtgggctcagaggactacggccgggacctaaccggcgtgcagaacctgaggaagaagcacaagcggctggaagcagaactggctgcgcatgagccggctattcag

SEQ ID NO: 719425 - DNA, 120 bp, Artificial Sequence
  ENSG00000197694_46 (sequence is synthesized)
ggtgtcctggacactggcaagaagctgtccgatgacaacaccatcgggaaagaggagatccagcagcggctggcgcagtttgtggagcactggaaagagctgaagcagctggcagctgcc

SEQ ID NO: 719426 - DNA, 120 bp, Artificial Sequence
  ENSG00000197694_47 (sequence is synthesized)
cggggtcagcggctggaagagtccttggaatatcagcagtttgtagccaatgtggaagaggaagaagcctggatcaatgagaaaatgaccctggtggccagcgaagattatggcgacact

SEQ ID NO: 719427 - DNA, 120 bp, Artificial Sequence
  ENSG00000197694_48 (sequence is synthesized)
cttgccgccatccagggcttactgaagaaacatgaagcttttgagacagacttcaccgtccacaaggatcgcgtgaatgatgtctgcaccaatggacaagacctcattaagaagaacaat

SEQ ID NO: 719428 - DNA, 120 bp, Artificial Sequence
  ENSG00000197694_49 (sequence is synthesized)
caccatgaggagaacatctcttcaaagatgaagggcctgaacgggaaagtgtcagacctggagaaagctgcagcccagagaaaggcgaagctggatgagaactcggccttccttcagttc

SEQ ID NO: 719429 - DNA, 120 bp, Artificial Sequence
  ENSG00000197694_50 (sequence is synthesized)
aactggaaggcggacgtggtggagtcctggatcggtgaaaaggagaacagcttgaagacagatgattatggccgagacctgtcttctgtgcagacgctcctcaccaaacaggaaactttt

SEQ ID NO: 719430 - DNA, 120 bp, Artificial Sequence
  ENSG00000197694_51 (sequence is synthesized)
gacgctgggctgcaggccttccagcaggaaggcattgccaacatcactgccctcaaagatcagcttctcgccgccaaacacgttcagtccaaggccatcgaggcccggcacgcctccctc

SEQ ID NO: 719431 - DNA, 120 bp, Artificial Sequence
  ENSG00000197694_52 (sequence is synthesized)
atgaagaggtggagccagcttctggccaactcagccgcccgcaagaagaagcttctggaggctcagagtcacttccgcaaggtggaggacctcttcctgaccttcgccaaaaaggcttct

SEQ ID NO: 719432 - DNA, 120 bp, Artificial Sequence
  ENSG00000197694_53 (sequence is synthesized)
gccttcaacagctggtttgaaaatgcagaggaggacttaacagaccccgtgcgctgcaactccttggaagaaatcaaagctttgcgcgaggcccacgacgccttccgctcctccctcagc

SEQ ID NO: 719433 - DNA, 120 bp, Artificial Sequence
  ENSG00000197694_54 (sequence is synthesized)
tctgcccaggctgacttcaaccagctggccgagctggaccgccagatcaagagcttccgcgtagcctccaacccctacacctggtttaccatggaggccctggaggagacctggaggaac

SEQ ID NO: 719434 - DNA, 120 bp, Artificial Sequence
  ENSG00000197694_55 (sequence is synthesized)
ctacagaaaatcatcaaggagagggagctggagctgcagaaggaacagcggcggcaggaggagaacgacaagctgcgccaggagtttgcccagcacgccaacgccttccaccagtggatc

SEQ ID NO: 719435 - DNA, 120 bp, Artificial Sequence
  ENSG00000197694_56 (sequence is synthesized)
caagagaccaggacatacctcctcgatgggtcctgtatggtggaagagtcggggaccctcgaatcccagcttgaagctaccaaacgcaagcaccaggaaatccgagccatgagaagtcag

SEQ ID NO: 719436 - DNA, 120 bp, Artificial Sequence
  ENSG00000197694_57 (sequence is synthesized)
ctcaaaaagatcgaggacctgggggccgccatggaggaggccctcatcctggacaacaagtacacggagcacagcaccgtgggcctcgcccagcagtgggaccagctggaccagctgggc

SEQ ID NO: 719437 - DNA, 120 bp, Artificial Sequence
  ENSG00000197694_58 (sequence is synthesized)
atgcgcatgcagcacaacctggagcagcagatccaggccaggaacacaacaggtgtgactgaggaggccctcaaagaattcagcatgatgtttaaacactttgacaaggacaagtctggc

SEQ ID NO: 719438 - DNA, 120 bp, Artificial Sequence
  ENSG00000197694_59 (sequence is synthesized)
aggctgaaccatcaggagttcaaatcttgcctgcgctccctgggctatgacctgcccatggtggaggaaggggaacctgaccctgagttcgaggcaatcctggacacggtggatccgaac

SEQ ID NO: 719439 - DNA, 120 bp, Artificial Sequence
  ENSG00000197694_60 (sequence is synthesized)
agagatggccatgtctccttgcaagaatacatggctttcatgatcagccgcgaaactgagaacgtcaagtccagcgaggagattgagagcgccttccgggccctcagctcagagggaaag

SEQ ID NO: 719440 - DNA, 120 bp, Artificial Sequence
  ENSG00000197694_61 (sequence is synthesized)
ccttacgtgaccaaggaggagctctaccagaacctgacccgggaacaagccgactactgcgtctcccacatgaagccctacgtggacggcaagggccgcgagctccccaccgcgttcgac

SEQ ID NO: 719441 - DNA, 120 bp, Artificial Sequence
  ENSG00000197694_62 (sequence is synthesized)
tacgtggagttcacccgctcgcttttcgtgaactgagccactccctgggtcacccacccctcgctgcttgccctgcgtcgccttgctgcatgtccgctcctctgtgtgctctcactttcc

SEQ ID NO: 719442 - DNA, 120 bp, Artificial Sequence
  ENSG00000197694_63 (sequence is synthesized)
actgtaaccttaagcctgcttagcttggaataagacttaggagaaaatggtgcttcactaacccgcttccggtccagtcacaatcatcatgtcactgtggggacccagatctgtgtcttg

SEQ ID NO: 719443 - DNA, 120 bp, Artificial Sequence
  ENSG00000197694_64 (sequence is synthesized)
aagcagctgccctcattccgacttcagaaaatcgaagcagctggctcctccccttgttctctctcccaccctcccccaaatctgttttcatgtaaaagacaaataaatgatgacttcccc

SEQ ID NO: 719444 - DNA, 120 bp, Artificial Sequence
  ENSG00000197694_65 (sequence is synthesized)
caggctgtgcaacaacaggtaggtgtctccatcttggagtgaggctctgttgctgtaaggatgcagctttgttcctcttgtgtctgtcatagcccaacaagcagtgtttcataacacaga

SEQ ID NO: 719445 - DNA, 120 bp, Artificial Sequence
  ENSG00000197694_66 (sequence is synthesized)
actgtggcttggctgtaggtcaggtcctctatgtgaccaaaaccattttgattaacttctttatacccatatccctcactttcacttggtttggaggggggtgggggcttctgtcttctc

SEQ ID NO: 719446 - DNA, 84 bp, Artificial Sequence
  ENSG00000197694_67 (sequence is synthesized)
ttgagcctaggaattcaagaccagcctggtcaatgcagtgaaacatcgcatgggcacctgttagttccagctactcaggagatt

SEQ ID NO: 719447 - DNA, 120 bp, Artificial Sequence
  ENSG00000197694_68 (sequence is synthesized)
caggagaatcacttgaacccgggaggttgcagtgagcgtgattgcgccactgcactctagcctaggcgacagtgagactccatctcaaaaaaatttataaaaatctttggccactgcttc

SEQ ID NO: 719448 - DNA, 120 bp, Artificial Sequence
  ENSG00000197694_69 (sequence is synthesized)
cttcctggagtcctcgccgtacttgtccttggcgtgcactgccctctggcaggtctaccagctgctttggaaccctcacattgaaagtctctccctctattgaggtggttgggatttctt

SEQ ID NO: 719449 - DNA, 120 bp, Artificial Sequence
  ENSG00000197694_70 (sequence is synthesized)
cagcttcaccccatcccactattcctattctagaatgttcttgttttacgaggtctcaggccaggcctggagcaggaaccagagggcagtaagtggctcctgggctggtgactgagctga

SEQ ID NO: 719450 - DNA, 120 bp, Artificial Sequence
  ENSG00000197694_71 (sequence is synthesized)
gccttgaactgcaggtgtgtgtgctcctggtttctgaccaagtgtttccttgctgaagggcctcattttctcacctgcctcttgccctctttagctgttccatcgggactgtgagcaagc

SEQ ID NO: 719451 - DNA, 120 bp, Artificial Sequence
  ENSG00000197694_72 (sequence is synthesized)
agaagcttctggaggctcagagtcacttccgcaaggaaccaccccgcaccccacctcctgcactgcgtcggcacgtccagccctggcgactccgccaactcagtctcttctgcttccagg

SEQ ID NO: 719452 - DNA, 120 bp, Artificial Sequence
  ENSG00000197694_73 (sequence is synthesized)
actacccgctgcggagtgaacggtgtggagcggaggccgcggaggctcctcggtccttcagcacccctcggcccgacgcacccacgcccctcaccccccgagagccgactccacattcct

SEQ ID NO: 719453 - DNA, 120 bp, Artificial Sequence
  ENSG00000197694_74 (sequence is synthesized)
tgggtagtagtaatagcaactgaactagaagacgggctgcagggagctcgtcatggcacagatggaggccaggcctgggtgcagggaggggcctgctaatgtgggttctgaggctgtagt

SEQ ID NO: 719454 - DNA, 120 bp, Artificial Sequence
  ENSG00000197694_75 (sequence is synthesized)
cagagcccatctgctctcagaacttggtcctagagaggaggctccctccctggctgtgtctagaggatggaaccgggatctggggtttagtcacagccatctctctccttttggcacagt

SEQ ID NO: 719455 - DNA, 120 bp, Artificial Sequence
  ENSG00000197694_76 (sequence is synthesized)
tggtcgtgatctcccagcactccacttgtgtcctttgtctgcagggtcgtgctctcattccccctagaatggggctccctccctcaggaaccttgccgggacactccagggtttctgtgg

SEQ ID NO: 719456 - DNA, 120 bp, Artificial Sequence
  ENSG00000197694_77 (sequence is synthesized)
ggaggctgtcaggttctcagcctcccctctgccctgaggtctcctgtctgtcaggtgtcagggtgtgccatcccccacatggctgcagagaggatgctcagacaggcctgcagccaccct

SEQ ID NO: 719457 - DNA, 120 bp, Artificial Sequence
  ENSG00000197694_78 (sequence is synthesized)
gcacccatgggggaatttaaactccattcctgagtcatcctggccttgggagcaagacgagtgggctcagccctggcccacaccaaggcagcagcttcccatctctaaaacgggagaaat

SEQ ID NO: 719458 - DNA, 120 bp, Artificial Sequence
  ENSG00000197694_79 (sequence is synthesized)
gctccctgccatccctcgatccctggggcccattaggtaaagatggccagttgcagttaggtttggtttccttaaaaggaatgtgaggttgccaggcattgctctctctgagagaaggtt

SEQ ID NO: 719459 - DNA, 120 bp, Artificial Sequence
  ENSG00000197694_80 (sequence is synthesized)
gaatcgcaccagcaatgccggccagccgtagagggaggaagagcccggggagcccgagcatagcgtaaacggctctctgaccttaatttcatcctgcatggcgaatctctgccgtctctc

SEQ ID NO: 719460 - DNA, 120 bp, Artificial Sequence
  ENSG00000197694_81 (sequence is synthesized)
tttcgggtgctgtgtgtggatcttgaacatgagaaggacttaaatcttgggaagaatatcaagccaagaacttcttcatcagaattgctgttcctgaacctcagatgccttttgtgtgta

SEQ ID NO: 719461 - DNA, 85 bp, Artificial Sequence
  ENSG00000197694_82 (sequence is synthesized)
agaattgctgttcctgaacctcagatgccttttgtgtgtaaagatttgtggaaaactccaaaaattgaaccaggctggagtgcag

SEQ ID NO: 719462 - DNA, 62 bp, Artificial Sequence
  ENSG00000197694_83 (sequence is synthesized)
cacctcccaggttcaagcgattctcccatctcagcttcctgagtagctggaattccacgcat

SEQ ID NO: 719463 - DNA, 82 bp, Artificial Sequence
  ENSG00000197694_84 (sequence is synthesized)
cccagcagaaattgatttctatttgccattctccaaaagacaaaaaaagttggtttttttttttttcggtcttttgtttgtt

SEQ ID NO: 719464 - DNA, 120 bp, Artificial Sequence
  ENSG00000197694_85 (sequence is synthesized)
aaaaaagttggtttttttttttttcggtcttttgtttgtttgtttgttttttaagagatagggtcttgctttgttgcccagactggaggtcagtggcttttcacagctgcagttatagcc

SEQ ID NO: 719465 - DNA, 120 bp, Artificial Sequence
  ENSG00000197694_86 (sequence is synthesized)
tcaagcaatcctcccacctcagcctcccaggtatctaggacaacaggcatgcaacacaaagcacagctctaaaaaaaaaaaaaaaaaaaaagtcttctgtctcttcagttttctaaaact

SEQ ID NO: 719466 - DNA, 120 bp, Artificial Sequence
  ENSG00000197694_87 (sequence is synthesized)
ctgtctcttcagttttctaaaactttttctatagctatctttaggttcatttattacccctttgcagacaatcttatgagtacaacataaaagttggtggttttcttattaaatttcttt

SEQ ID NO: 719467 - DNA, 120 bp, Artificial Sequence
  ENSG00000197694_88 (sequence is synthesized)
attctctccatttcttctactggataaaaaaattggaatttttctctcccctgtttgttggcttaatttttcttaaccagccttgtagtttgttaccagccaaactatggagggaaaatg

SEQ ID NO: 719468 - DNA, 120 bp, Artificial Sequence
  ENSG00000197694_89 (sequence is synthesized)
ctgttttggttaatgtattagtatctgggatctcccctgggggaaactagagtcattcgctggaaaggccaggtgctttgtttcatggtcaattgcttggctgcctaaattcctctttct

SEQ ID NO: 719469 - DNA, 120 bp, Artificial Sequence
  ENSG00000197694_90 (sequence is synthesized)
agccaccccccagggtaccccttcccttcctggcttaaagtcaggaaccagatgtgctattattgtacccttttcccttggcctaaagcagtctagggctcttcactatctctctctctt

SEQ ID NO: 719470 - DNA, 120 bp, Artificial Sequence
  ENSG00000197694_91 (sequence is synthesized)
tgtgggggtctcgtgcgcttgcccctcgtggcctggcttgtggaggatcccgggatgggccttcctgcccagggcgggctgcacttcccctcccacccttctcgtcacctgatgaggagt

SEQ ID NO: 719471 - DNA, 120 bp, Artificial Sequence
  ENSG00000197694_92 (sequence is synthesized)
gtgtgccttgccccatagcccatggtccctggtccccgatagagccttcaagccagggggagccgtccttgcctcactgggcgattccaagggctcactttgggtagggaaggtgatgaa

SEQ ID NO: 719472 - DNA, 120 bp, Artificial Sequence
  ENSG00000197694_93 (sequence is synthesized)
tggtcagtgggcatgaagcagatggcagtgctgggggctcaggcagggtacagtaagtccacagctgagaagggctgggcactgacaccccctaagtagctgaggctgccactttacttt

SEQ ID NO: 719473 - DNA, 120 bp, Artificial Sequence
  ENSG00000197694_94 (sequence is synthesized)
cctggggtcagggagggtaacaagactgtccgccctaatagaaggcaaaaatgcacccgttatgtgatagacaggacgtgggaggagccccagggaggagcagggctgggctgtcccgcc

SEQ ID NO: 719474 - DNA, 120 bp, Artificial Sequence
  ENSG00000197694_95 (sequence is synthesized)
cagtcccggcagggacttctctgcttggcctggggcctctgcctggccgggtcacctttgtaatctgccaagcctgctgtgaaagccagggctgctgggactggagtggcttggcctgca

SEQ ID NO: 719475 - DNA, 120 bp, Artificial Sequence
  ENSG00000197694_96 (sequence is synthesized)
ctcctgaggctctgcacccaggcacatcaagcctgtataggcggccaggggagaaatagacccatccagccgggccacacattctgatggcagagcagctggggacgtagggatcgcagt

SEQ ID NO: 719476 - DNA, 120 bp, Artificial Sequence
  ENSG00000197694_97 (sequence is synthesized)
ttccggcctgtgcccgtaggacaccctggccacctgactcccctccctgccccatgcctgtgtctgctggtcttgctcttgtctccgtgaggtgccacgctcccctcaccttatggctcc

SEQ ID NO: 719477 - DNA, 120 bp, Artificial Sequence
  ENSG00000197694_98 (sequence is synthesized)
tcccaagccctgcccatcttgcccattcctagtgtgagctgcctggggtgaaccactgggcctgctgcctccaggtacccgccgggcaccaggttgcccttgcctgcgccctgccagctt

SEQ ID NO: 719478 - DNA, 120 bp, Artificial Sequence
  ENSG00000197694_99 (sequence is synthesized)
agaactgccacccggaactgggctggcaccagggtcaataaacaaaagcctgtaaacgctgctgcacgcagagatggcataatgtgacgtcatggcatgaacaaagttggcacagcaaag

SEQ ID NO: 719479 - DNA, 120 bp, Artificial Sequence
  ENSG00000197694_100 (sequence is synthesized)
gcaccactagctgccctggtcaggggcgccacccagctcctgggtgaaaaggagaacagcttgaagacagatgattatggccgagacctgtcttctgtgcagacgctcctcaccaaacag

SEQ ID NO: 719480 - DNA, 120 bp, Artificial Sequence
  ENSG00000197694_101 (sequence is synthesized)
aggagcaaggcagcatagcactgcggcaggagcagattgacaatcagacacgcataactaaggaggccggcagtgtatctctgcgtatgaagcaggtggaagaactgtgagtaggctgag

SEQ ID NO: 719481 - DNA, 120 bp, Artificial Sequence
  ENSG00000197694_102 (sequence is synthesized)
actgcctgtccgtgcagcagctttggctcacaagggaagaggtcgcggtgcagctgtgtcggtcgatgactgcttatctcattggttgcttccatgtgcagctgtgtgttcagagtggtg

SEQ ID NO: 719482 - DNA, 120 bp, Artificial Sequence
  ENSG00000197694_103 (sequence is synthesized)
actgtcaacctgatataataacttggacatacagtcttaagacactaaatggattatagaagactttaggctgaattacagatggggaatgctagtgagaatggctcctatgagtgtttt

SEQ ID NO: 719483 - DNA, 120 bp, Artificial Sequence
  ENSG00000197694_104 (sequence is synthesized)
tctttgtctccttccgtgtcattggttttcttctgcagagaagaaactgatcaattgtgggcatggcagagaacctactaccagggcagaccactgactgccagctaggaggagacagtg

SEQ ID NO: 719484 - DNA, 120 bp, Artificial Sequence
  ENSG00000197694_105 (sequence is synthesized)
gcctgcgctccctgggctatgacctgcccatggtggaggaaggggaacctgaccctgagttcgaggcaatcctggacacggtggatccgaacaggtaaattaattaaggccaggtgctgt

SEQ ID NO: 719485 - DNA, 120 bp, Artificial Sequence
  ENSG00000197694_106 (sequence is synthesized)
aacctcgaggctgtacagggcattttagaaatgaatctacttcattcgcagcccttttgggagaaaaaataaaggggcttggtgctttctcagcagcagcgaagccacatccctcccaca

SEQ ID NO: 719486 - DNA, 120 bp, Artificial Sequence
  ENSG00000197694_107 (sequence is synthesized)
cagaagctctagactgaaggcagtgtgtccgtgggtcgggaattcaccagcaatcactcaggtgcagtgacgcacctggagtgcctcaggacagaggttttaacagctatggtttcctgt

SEQ ID NO: 719487 - DNA, 120 bp, Artificial Sequence
  ENSG00000197694_108 (sequence is synthesized)
cacacacacatcatgagtaagatttctcatcacagaggttgcactcagcagtcatggccttcagactagggtttgatccataggcagcaacaatgtagctaaaatccacttcactggaga

SEQ ID NO: 719488 - DNA, 120 bp, Artificial Sequence
  ENSG00000197694_109 (sequence is synthesized)
gagtgaacggtgtggagcggaggccgcggaggctcctcggtccttcagcacccctcggcccgacgcacccacgcccctcaccccccgagagccgaacgctccccgcaccgcccccggtcc

SEQ ID NO: 719489 - DNA, 120 bp, Artificial Sequence
  ENSG00000197694_110 (sequence is synthesized)
cttatgttattgagtagattttgttaaataaagcatttataaaacaatctccttgcacccatgggaagtcagtgagaaatatttcagtaagcccagccagtgggaaagccctagtcaagt

SEQ ID NO: 719490 - DNA, 120 bp, Artificial Sequence
  ENSG00000197694_111 (sequence is synthesized)
ttcagagccatttaaaagttgccttcctcatttgtctccattaaaactatttctgctgtaataaaagtctatagaatcccccttctattactgttcccaaatgctgagcttcctggggga

SEQ ID NO: 719491 - DNA, 120 bp, Artificial Sequence
  ENSG00000197694_112 (sequence is synthesized)
gttctatagttttccttagtaggaaggaaatcatatgcttctcttaaagtgctctgattcttggtaactcattgcttttttattttactttgggacacttagatttgatgatgattctag

SEQ ID NO: 719492 - DNA, 120 bp, Artificial Sequence
  ENSG00000197694_113 (sequence is synthesized)
ttttttttaatttttagttttttattgtttgttgttttcgtgttcaaagataatatttcagccttttgtattttagttcccgagggttagaatattctttgattcttaagaaatctttca

SEQ ID NO: 719493 - DNA, 120 bp, Artificial Sequence
  ENSG00000197694_114 (sequence is synthesized)
agtaacagaatggcacagatactcagtactgtgcctgattttccttctgaacttgccaaaactttctgagagctgaatgtatcattttagaaatgtcctactaatatggagataaaacat

SEQ ID NO: 719494 - DNA, 120 bp, Artificial Sequence
  ENSG00000197694_115 (sequence is synthesized)
cctatatgaggatattttaaagctcagtgtaccctcccccacctcaccccagcctgggggctcttcagagaattataaaagacagaaaaaccctctgtatacattctgcccagcaagttc

SEQ ID NO: 719495 - DNA, 120 bp, Artificial Sequence
  ENSG00000197694_116 (sequence is synthesized)
atctcgtctctccactgtagttgcatgagccctgtgttactgtgctaagcgcttggtttcagtcccttgtggttgtgttgttctaagtgcagaatcggcctggggataagtgtgcctggc

SEQ ID NO: 719496 - DNA, 120 bp, Artificial Sequence
  ENSG00000197694_117 (sequence is synthesized)
tgttctagccacctggttgtgaacagtacagtgtgcgcatatctctcaggctgtggcgtgggtacttgggatcctcgtcttcatctgataactctgttactagggcatcatcattacaaa

SEQ ID NO: 719497 - DNA, 120 bp, Artificial Sequence
  ENSG00000197694_118 (sequence is synthesized)
acaggtgtgagccactgtacccagccagaagtttccatttctgacagtccagcaactccctgcttgactgaccagtcgcttccctccaggagagggagctggagctgcagaaggaacagc

SEQ ID NO: 719498 - DNA, 120 bp, Artificial Sequence
  ENSG00000197694_119 (sequence is synthesized)
agctggagctgcagaaggaacagcggcggcaggaggagaacgacaagctgcgccaggagtttgcccagcacgccaacgccttccaccagtggatccaagagaccaggtgccagcccgctg

SEQ ID NO: 719499 - DNA, 120 bp, Artificial Sequence
  ENSG00000197694_120 (sequence is synthesized)
ttaagccctggggagcttccagccccaaggaggtggtggtgctttgtgtaaaaccagaggcagcctgggaataaagctgggctggcaacgcctggtcgggctctggagccgggagtgggg

SEQ ID NO: 719500 - DNA, 120 bp, Artificial Sequence
  ENSG00000197694_121 (sequence is synthesized)
gcataggtggagcagcctctcagtgctgcatgtcccagacatcaagttgttagagatcccggattgagtgggaccatgcagggcgcgtggtcagccccagccatgacttggtgacagacg

SEQ ID NO: 719501 - DNA, 120 bp, Artificial Sequence
  ENSG00000197694_122 (sequence is synthesized)
atgcagggtctgtgcgttgggtactgatgttcttgcttttgttttcctttctttcttgtgtcttctctctgtccccccgattgctgctgttgtccggacaccaccttgtctcccggctgc

SEQ ID NO: 719502 - DNA, 120 bp, Artificial Sequence
  ENSG00000197694_123 (sequence is synthesized)
ttggatctgctctccacaggacatacctcctcgatgggttaatattgttttcttccttctctgggcttgtcatgtgggggtctcgtgcgcttgcccctcgtggcctggcttgtggaggat

SEQ ID NO: 719503 - DNA, 120 bp, Artificial Sequence
  ENSG00000197694_124 (sequence is synthesized)
accaggtatgggcctcaggaggtgggtgaagaggtgtcctttggaaaactaaagccaaatttgtggcagagctgagtctggggtaacaggccctgcgctgggtattctccccatttacaa

SEQ ID NO: 719504 - DNA, 120 bp, Artificial Sequence
  ENSG00000197694_125 (sequence is synthesized)
atcaaactcagtatggacagaagtcccggatctgcttgtagaagcagctccgagcccccagcatcctgagacctgggaggtcgggtttgaagtgggtgcagctggctcaggcaccaggtg

SEQ ID NO: 719505 - DNA, 120 bp, Artificial Sequence
  ENSG00000197694_126 (sequence is synthesized)
taccccagttctttatgtttgctgccactccctgcctctgagaaccccttccccctgaaaagacataacctagcaggaactggtttggaaaaaatttttttggtatttttagagcaagca

SEQ ID NO: 719506 - DNA, 120 bp, Artificial Sequence
  ENSG00000197694_127 (sequence is synthesized)
tggaagttctagcatcttccctcctgacccagctcttcaggaatacatcacttgagttacagtctgctcgtctgatggttcacaccgtggccacctttaattccatcaaggagctgaatg

SEQ ID NO: 719507 - DNA, 120 bp, Artificial Sequence
  ENSG00000197696_0 (sequence is synthesized)
gaacgaagccgcggcccgggcacagccatggcccggcgggcggggggcgctcggatgttcggcagcctcctgctcttcgccctgctcgctgccggcgtcgccccgctcagctgggatctc

SEQ ID NO: 719508 - DNA, 120 bp, Artificial Sequence
  ENSG00000197696_1 (sequence is synthesized)
ccccgctcagctgggatctcccggagccccgcagccgagccagcaagatccgagtgcactcgcgaggcaacctctgggccaccggtcacttcatgggcaagaagagtctggagccttcca

SEQ ID NO: 719509 - DNA, 120 bp, Artificial Sequence
  ENSG00000197696_2 (sequence is synthesized)
gctgagtcatgatctgctcggaatcctcctgctaaagaaggctctgggcgtgagcctcagccgccccgcaccccaaatccagtacaggaggctgctggtacaaatactgcagaaatgaca

SEQ ID NO: 719510 - DNA, 120 bp, Artificial Sequence
  ENSG00000197696_3 (sequence is synthesized)
ccaataatggggcagacacaacagcgtggcttagattgtgcccacccagggaaggtgctgaatgggaccctgttgatggccccatctggatgtaaatcctgagctcaaatctctgttact

SEQ ID NO: 719511 - DNA, 120 bp, Artificial Sequence
  ENSG00000197696_4 (sequence is synthesized)
ccattactgtgatttctggctgggtcaccagaaatatcgctgatgcagacacagattatgttcctgctgtatttcctgcttccctgttgaattggtgaataaaaccttgctctttacata

SEQ ID NO: 719512 - DNA, 120 bp, Artificial Sequence
  ENSG00000197696_5 (sequence is synthesized)
gaagagaggctcagagggctgaagtgcctatttggccgaaagccgtggcagagtggcaaggcagggccaggggaagcggctccgccgccggggccgggcccctgtttggccggtgcccgg

SEQ ID NO: 719513 - DNA, 120 bp, Artificial Sequence
  ENSG00000197696_6 (sequence is synthesized)
tccttagcctgaaggtggcgggcttccgccagaagcccctggcggaagcggtgcccgcgtgcgggccagagtgtgggtgtgcaggtctctgggcggcccaaagggggtgcccctgcctgg

SEQ ID NO: 719514 - DNA, 120 bp, Artificial Sequence
  ENSG00000197696_7 (sequence is synthesized)
taacctagcgggagggtggggacggcggggagggcggcgggcgcggggcacggctccgctgctcagggcaggctccgcccccaggggcgcggatttaaaaggatcgaaggcagccccgga

SEQ ID NO: 719515 - DNA, 120 bp, Artificial Sequence
  ENSG00000197702_0 (sequence is synthesized)
cgccgcccgctgcgtccgcccagcgccagctccgcgtcccgaccggcccgcggcagcctgcgccgcgccatggccacctccccgcagaagtcgccttctgtccccaagtctcccactccc

SEQ ID NO: 719516 - DNA, 120 bp, Artificial Sequence
  ENSG00000197702_1 (sequence is synthesized)
ccactcccaagtcgcccccgtcccgcaagaaagatgattccttcttggggaaactcggagggaccctggcccggaggaagaaagccaaggaggtgtccgagctgcaggaggagggaatga

SEQ ID NO: 719517 - DNA, 120 bp, Artificial Sequence
  ENSG00000197702_2 (sequence is synthesized)
acgccatcaacctgcccctcagcccaattccctttgagctggaccccgaggacacgatgctggaggagaatgaggtgcgaacaatggtggatccaaactcacgcagtgaccccaagcttc

SEQ ID NO: 719518 - DNA, 120 bp, Artificial Sequence
  ENSG00000197702_3 (sequence is synthesized)
aagaactgatgaaggtattaattgactggattaatgatgtgttggttggagaaagaatcattgtgaaagacctagctgaagatttgtatgatggacaagtcctgcagaagcttttcgaga

SEQ ID NO: 719519 - DNA, 120 bp, Artificial Sequence
  ENSG00000197702_4 (sequence is synthesized)
aactggagagtgagaagctaaatgtggctgaggtcacccagtcagagattgctcagaagcaaaaactgcagactgtcctggagaagatcaatgaaaccctgaaacttcctcccaggagca

SEQ ID NO: 719520 - DNA, 120 bp, Artificial Sequence
  ENSG00000197702_5 (sequence is synthesized)
tcaagtggaatgtggattctgttcatgccaagagcctggtggccatcttacacctgctcgttgctctgtctcagtatttccgcgcaccaattcgactcccagaccatgtttccatccaag

SEQ ID NO: 719521 - DNA, 120 bp, Artificial Sequence
  ENSG00000197702_6 (sequence is synthesized)
tggttgtggtccagaaacgagaaggaatcctccagtctcggcaaatccaagaggaaataactggtaacacagaggctctttccgggaggcatgaacgtgatgcctttgacaccttgttcg

SEQ ID NO: 719522 - DNA, 120 bp, Artificial Sequence
  ENSG00000197702_7 (sequence is synthesized)
accatgccccagacaagctgaatgtggtgaaaaagacactcatcactttcgtgaacaagcacctgaataaactgaacctggaggtcacagaactggaaacccagtttgcagatggggtgt

SEQ ID NO: 719523 - DNA, 120 bp, Artificial Sequence
  ENSG00000197702_8 (sequence is synthesized)
acctggtgctgctcatggggctcctggagggctactttgtgcccctgcacagcttcttcctgaccccggacagctttgaacagaaggtcttgaatgtctcctttgcctttgagctcatgc

SEQ ID NO: 719524 - DNA, 120 bp, Artificial Sequence
  ENSG00000197702_9 (sequence is synthesized)
aagatggagggttggaaaagccaaaaccgcggccagaagacatagtcaactgtgacctgaaatctacactacgagtgttgtacaacctcttcaccaagtaccgtaacgtggagtgagggg

SEQ ID NO: 719525 - DNA, 120 bp, Artificial Sequence
  ENSG00000197702_10 (sequence is synthesized)
ctgccctgggcccaccactgcccaagagttcttgctgttggcgtactggaccctcctccgaactgccttaccctgcttattcctgtctcttgcactgtgctctcccacaagtccagctgc

SEQ ID NO: 719526 - DNA, 120 bp, Artificial Sequence
  ENSG00000197702_11 (sequence is synthesized)
aacccagagatagtggaaactgaaattaggaaggaaatcatcaataactcagtgggctgacccatccctcccaggcgctggggaccaacctagcaatgaaggttgggaaggttgttccct

SEQ ID NO: 719527 - DNA, 120 bp, Artificial Sequence
  ENSG00000197702_12 (sequence is synthesized)
tcccggtgccaggtccagatttccctccatgatttgggaaccagcttaggcaaaagagtccccacaagatgaaaataaagatcctagttaccattcaaaggatgctaactgtgtgtcagg

SEQ ID NO: 719528 - DNA, 120 bp, Artificial Sequence
  ENSG00000197702_13 (sequence is synthesized)
ccccacactaagtgctctgctctgatatactcaaggccattaatcttcaggactcccattgacgtaggtgtttcattccccttttacagatgaggaaactaaggcttggaggttaaatga

SEQ ID NO: 719529 - DNA, 120 bp, Artificial Sequence
  ENSG00000197702_14 (sequence is synthesized)
cttgccagaagttggaatttttttcctctttgaacataacctctcccttctccctaaaggtaaccactattctgagtccaatcatcaaggttttgcttttctttttagctaagtatgcat

SEQ ID NO: 719530 - DNA, 120 bp, Artificial Sequence
  ENSG00000197702_15 (sequence is synthesized)
tcctcaatagtagacagtacaacatgtttataacaagccaattacattatgttctttgcatgttctaaagttgtgtatgtgtgtgcacatctgagcacgtgcacatgtacacctgagcca

SEQ ID NO: 719531 - DNA, 120 bp, Artificial Sequence
  ENSG00000197702_16 (sequence is synthesized)
aaaacacgagaacccactgatctcaccactggggcaagctaggtcagagcttagtgattcacactgaaattggcaaattggatttaacccaattaatagtgtgtgtgtggcaggagtcat

SEQ ID NO: 719532 - DNA, 120 bp, Artificial Sequence
  ENSG00000197702_17 (sequence is synthesized)
gtccctcacatcctttgtacaaatgaaaattactcttaattccttcagatttataataactctgtactttggtttcagggtgacatttgggaaggattttgtttagaattaatggagtgg

SEQ ID NO: 719533 - DNA, 120 bp, Artificial Sequence
  ENSG00000197702_18 (sequence is synthesized)
cacattttgcagcctttttgcttgattgcatgtaatggaaatgccctatattttcctgcaaaataagtactaaattcattatcgttaagcaaatgtacaatatgctcaggcaccgcagag

SEQ ID NO: 719534 - DNA, 120 bp, Artificial Sequence
  ENSG00000197702_19 (sequence is synthesized)
agctgggcacgggcccatgtgagcatcactttggaagtagggctcttcaacagggacccttgaactttaaagaaaggaacttctttttgccttctaattgatcatttagactattctggc

SEQ ID NO: 719535 - DNA, 120 bp, Artificial Sequence
  ENSG00000197702_20 (sequence is synthesized)
taagtctgcccacatgtaattaccggctaattcaagcgaggaaaaatgtaagtcatttagaccaaagccaagcagtttctttgcgtgggttactcaagggcttgtggttacttgtatctc

SEQ ID NO: 719536 - DNA, 120 bp, Artificial Sequence
  ENSG00000197702_21 (sequence is synthesized)
ctctatgtgaacttgactttgaaagacagagctctagtgtgccagcctgctaagtcctgtaagaatagggaagggcggaggggggtgggcagtgactaggggacgagaagcatggggaaa

SEQ ID NO: 719537 - DNA, 120 bp, Artificial Sequence
  ENSG00000197702_22 (sequence is synthesized)
atatttgcactctaaacatacagagatagaggtggggcttgtggtacttaacacttgtagccatcaactgactgagaccttgggctaaataatcaattgtgctgatattacatctcgtta

SEQ ID NO: 719538 - DNA, 120 bp, Artificial Sequence
  ENSG00000197702_23 (sequence is synthesized)
tggaatgttcctaaatatgccaggtagacaccagcccaagtaccctcctccagaagtctgtgactaccttgtcactactttaggcccattccacaaagcccatctctggtttgagaattc

SEQ ID NO: 719539 - DNA, 120 bp, Artificial Sequence
  ENSG00000197702_24 (sequence is synthesized)
attttgatctgtatctacaccacccaaagttaggcctcctataatgtccaaaacattcctttcagcctttttatttcttactgtactgtctcttactgtactgtctatctgcagtaattg

SEQ ID NO: 719540 - DNA, 120 bp, Artificial Sequence
  ENSG00000197702_25 (sequence is synthesized)
aggacccataaaatttagataactacatgtctttgctcttagaattgtcactcagcataatgagcatttaacatacaaaggcaatgtactgttttgtgttgatctatgtaaaagaataca

SEQ ID NO: 719541 - DNA, 120 bp, Artificial Sequence
  ENSG00000197702_26 (sequence is synthesized)
attcttttttacataattagtgaaattttattttttattaggaaacactaaatagtgtaatatttcttttgcttttaaaaaaattcctggtagcaaatcaagataaataattgcttcatt

SEQ ID NO: 719542 - DNA, 120 bp, Artificial Sequence
  ENSG00000197702_27 (sequence is synthesized)
ttcttgagcaatactgaagcaggatgaagtaagaggaatgcattcatttaaacatgctttgctttatgaattttgtctcttttttggtctctttttcttatattcaagttacaaatgtac

SEQ ID NO: 719543 - DNA, 120 bp, Artificial Sequence
  ENSG00000197702_28 (sequence is synthesized)
aagtatccttactaagagtgctccttttgtattttacatatatacagtatgaaaatacattggaacactaggaaagtttttaaataacagttctaatttatcagaaaattgtgttttggg

SEQ ID NO: 719544 - DNA, 120 bp, Artificial Sequence
  ENSG00000197702_29 (sequence is synthesized)
attgagttctttgtctcagcccagaatcccaggtcctgggcctggttttctaatgctgtcatctcagttcgatattttactttagaacctggaatctcctacttaatatatgaccatgac

SEQ ID NO: 719545 - DNA, 120 bp, Artificial Sequence
  ENSG00000197702_30 (sequence is synthesized)
tttgaaaggcaaaagaggaatcaagaataaataaaacaaacttaatcttcatctttaaaaaaaagaaaaaagaaaccaaaatgagaatcaacacttcataggctcactgggttttctttt

SEQ ID NO: 719546 - DNA, 120 bp, Artificial Sequence
  ENSG00000197702_31 (sequence is synthesized)
cttttctgttaatttaaactcagttatttttaatgcttaatacatacatggtgcaaaatttaaaaagcgcaaataggtatctagtggaaaacctaagcctccctctctcctccggcaccc

SEQ ID NO: 719547 - DNA, 120 bp, Artificial Sequence
  ENSG00000197702_32 (sequence is synthesized)
attacctctccctggaggcaactgttttgatccatttcttacacacactgccagagatactctaggcatgtaaagcacaaacatacatataaaatctgcgggcttcaaaaaatataagta

SEQ ID NO: 719548 - DNA, 120 bp, Artificial Sequence
  ENSG00000197702_33 (sequence is synthesized)
ggatgtcatctatactgtcatacactttgttttttatcacttaatgttatatcttggatattgtattaccctgggtattaaaaagaactcctttcacattttaaaataacaatctgagca

SEQ ID NO: 719549 - DNA, 120 bp, Artificial Sequence
  ENSG00000197702_34 (sequence is synthesized)
cttcataaatccaaatgcgtatctccagtctgctcgagctaggaaaggaaaaaagccctagccgaaggaggaaaggctgcctagacaatgatttcaaaagtagagtctaaaacctatggg

SEQ ID NO: 719550 - DNA, 120 bp, Artificial Sequence
  ENSG00000197702_35 (sequence is synthesized)
gatgaaggtttcatttttatatattaccaggactacgaatttgtaatccactaagcatcacaaaggttactacatacgctataatactgtactataaagtctagctgccagcaatgcagt

SEQ ID NO: 719551 - DNA, 120 bp, Artificial Sequence
  ENSG00000197702_36 (sequence is synthesized)
gctcgcctgctatattagaaggctccagtttcacatgtgcaggcacagagatgacatttcccgatctgggagaaggcttctttatcagcacatcatcagtgttgcctcgagttggttgca

SEQ ID NO: 719552 - DNA, 120 bp, Artificial Sequence
  ENSG00000197702_37 (sequence is synthesized)
attttcaattgctgctattggtgctttttaattatgaattactgttagcttgcattatcatcagtttgttttgttgtgggttgcttggttaaccctacagagtatacttgaagcttattt

SEQ ID NO: 719553 - DNA, 120 bp, Artificial Sequence
  ENSG00000197702_38 (sequence is synthesized)
gcatcaacagtattctggagctgtaatttttcaataactagactctgagacatgtatacattgtggttcaaataggaatcatccatagtccagtgctagaacaaatgtatacataatcca

SEQ ID NO: 719554 - DNA, 120 bp, Artificial Sequence
  ENSG00000197702_39 (sequence is synthesized)
ctccccacaaattatcactcatttatttttccactggaaaataagactagatggagtcggtaggtgaaacagttttgccgtgcctaagtggaggctgatcaaaactaatttgagatccgc

SEQ ID NO: 719555 - DNA, 120 bp, Artificial Sequence
  ENSG00000197702_40 (sequence is synthesized)
tgcctttaatagagctccacctcaggaatcttacctttataatacatcctagataggcaagagggatatgtcctgaaatcttcactaattccaagattgcgtgtcatttcccccaaaaat

SEQ ID NO: 719556 - DNA, 120 bp, Artificial Sequence
  ENSG00000197702_41 (sequence is synthesized)
ttgcttaactctattggaaaatccaagagaattgctgcagctgctgaaaacaagagagctgcattaagctgcaaggccgggtagggtaggtagactgactcaccacctatgggacctgcc

SEQ ID NO: 719557 - DNA, 120 bp, Artificial Sequence
  ENSG00000197702_42 (sequence is synthesized)
tccacacatcagcttcccaaatacttgcagatttgggtcttaccaaaagaaaagtcagtatgagttactcacaatcctaactacaaaggctacatttacaaataccagagtttcgactgt

SEQ ID NO: 719558 - DNA, 120 bp, Artificial Sequence
  ENSG00000197702_43 (sequence is synthesized)
gtttttactctctgctccctgaaaactgtaaccccaggctagctccaaactctgcttatagcccatgctttactacagtggtggtcgcatatgtgaacgtgtgcatgcgtgttcacgtgt

SEQ ID NO: 719559 - DNA, 120 bp, Artificial Sequence
  ENSG00000197702_44 (sequence is synthesized)
tcatgacaacagcaatgcagccatgagggtgctgcccccaaaccaagcctgatgaccttgagaacctcaggcttcccagtaggatcctgcaagaaagcatctcttaaaaataaattctac

SEQ ID NO: 719560 - DNA, 120 bp, Artificial Sequence
  ENSG00000197702_45 (sequence is synthesized)
aggatattagtaaatgttagatgaaaaaaaaagtcacgtttaaatatgtttaggaaacatgaggtgaagaaagttagcttactgacgctttttgttttctagttggagcgcacctcagag

SEQ ID NO: 719561 - DNA, 120 bp, Artificial Sequence
  ENSG00000197702_46 (sequence is synthesized)
tcccctacataatgcgtattaggactttctaagggaagacggggtacgatgggtcccaatcttgtttgatcacaggatgtatctgtcccctgagaaatttctaggatgagtactctgaac

SEQ ID NO: 719562 - DNA, 120 bp, Artificial Sequence
  ENSG00000197702_47 (sequence is synthesized)
tcaggacttcatttagtcatatattcggcaagtatgtgttgagtgcagcatgtccaagggtgagtgagagattatagctagcaggggagacagatgaaaaataactatgaatcgacgtta

SEQ ID NO: 719563 - DNA, 120 bp, Artificial Sequence
  ENSG00000197702_48 (sequence is synthesized)
gttacaaattgtgactgtcgcgatggagaagtactaaaatctatgaaagagttctaatgtagatttaaggtcatgagaagtctccggcaaagtggcattttaaagtaatccctcagtcgt

SEQ ID NO: 719564 - DNA, 120 bp, Artificial Sequence
  ENSG00000197702_49 (sequence is synthesized)
ggagctactccaatgagaagcctgccactccagggcgcaccacggaggaggatccccagacaagaagacctggctccccagaggagtgcggaaagccagcatggctagaggacacagaat

SEQ ID NO: 719565 - DNA, 120 bp, Artificial Sequence
  ENSG00000197702_50 (sequence is synthesized)
gagggagaagacggatccgatcgcaggcatcgggagtgctgatttttctcctttgaaaaacaggttgccatctacctttttaaatgtcccactgtgtaggaaaactctggggaaagctac

SEQ ID NO: 719566 - DNA, 120 bp, Artificial Sequence
  ENSG00000197702_51 (sequence is synthesized)
gtcagcaatatggagtctggggttgcctttctcatgtcataccatggtcctggctggggagcggaggagaccaggagaggagatcagacctctgcccaccccaacaccaatctggtctta

SEQ ID NO: 719567 - DNA, 120 bp, Artificial Sequence
  ENSG00000197702_52 (sequence is synthesized)
gcaacctctgggcatcccatagctcctcctaacctgctgctgctgatggacaggaactcctggactacccccagcctctccacaatgtgtcctgagaagagctaggggaactggacagag

SEQ ID NO: 719568 - DNA, 120 bp, Artificial Sequence
  ENSG00000197702_53 (sequence is synthesized)
tggacgaggctgcatgtgtggagggaatgaaataaggggcctaccaggccagaacgctgatccatggagaccagtgcttccagccctctcacctcggaggaggactcctgttttaccaac

SEQ ID NO: 719569 - DNA, 120 bp, Artificial Sequence
  ENSG00000197702_54 (sequence is synthesized)
ggcaggagcaggaatcccaccattcagcctgtgggcttgacaaactataagcaagcctcctggatgtggaataatacattttcaaaattcatactaatcagcatgaactataactgctcc

SEQ ID NO: 719570 - DNA, 120 bp, Artificial Sequence
  ENSG00000197702_55 (sequence is synthesized)
aatgcccaccacattatataaaatctaccaaaagggggtcacttaatgtttcacaatgtttggtgaaacaactttcatatgaaagtacggttgatccttgaatgatatgggcaccgaccc

SEQ ID NO: 719571 - DNA, 120 bp, Artificial Sequence
  ENSG00000197702_56 (sequence is synthesized)
ctgagcagctgaaaatttgcatgtaacttgactcccccaaaacgtaactataatactaatagccttactgaacacggtcaattaacacatagctagtatgttatgtgcattatatactat

SEQ ID NO: 719572 - DNA, 120 bp, Artificial Sequence
  ENSG00000197702_57 (sequence is synthesized)
atccttaccatacggtaagctagagaaaaaatgttactaagaaaaacataagcaagagaaaatatatttactattaagtgaaagcaggtcatcataaagtcctcatcctcatggtcatca

SEQ ID NO: 719573 - DNA, 120 bp, Artificial Sequence
  ENSG00000197702_58 (sequence is synthesized)
atcacattgagtaggcggaggaggaggaggaggaggaggagtaggggttggtcttgctgtctgaggggtggcagaggcagaaaaaaaatccatgggccgagcacggtggctcacacctgt

SEQ ID NO: 719574 - DNA, 120 bp, Artificial Sequence
  ENSG00000197702_59 (sequence is synthesized)
aaaaaacaaaacaaaacaaaacaaaaatccatgaacaagtggacctgcccagttcaaatcattgttgttcaagggtcaattgtatattattttcactggaagttttgaaattccagaaat

SEQ ID NO: 719575 - DNA, 120 bp, Artificial Sequence
  ENSG00000197702_60 (sequence is synthesized)
aattccagaaatatgcttggaaatccccgcttgaaatctccttggttggaaaccagtccagtgggtgactggcccagaatgatgcttctcctcggtggaccccctgggctgagcagcctg

SEQ ID NO: 719576 - DNA, 120 bp, Artificial Sequence
  ENSG00000197702_61 (sequence is synthesized)
tgttcctgcctcaactcccctgaaccctcctgaactttctacacacatgtgggcactggctttgatactggcatttggaagggcacttgggaaattcagagaagtacccattattaagat

SEQ ID NO: 719577 - DNA, 120 bp, Artificial Sequence
  ENSG00000197702_62 (sequence is synthesized)
aaatgatgttttatcaatgaagcagacttttcatttctttttattgatcttcatgttttcacatcttgagatgcaatttgttagcacaggctgtcattccaagacacacaaatgtcatta

SEQ ID NO: 719578 - DNA, 120 bp, Artificial Sequence
  ENSG00000197702_63 (sequence is synthesized)
aggcaaccgcttaaaggagtgtgatattttattgaggtagacaggacaatagataaatatttaatctgttacatgtttgctctgtgtggagccagggttggggctgcacaactctctggc

SEQ ID NO: 719579 - DNA, 120 bp, Artificial Sequence
  ENSG00000197702_64 (sequence is synthesized)
tgctatgtgtcttcctggaaaccctgtcaaaggccttaccgcctgcctggagaaacacagtgcctgcccttggcaaatatatgttggtgtatctgaaaaacagctcctggaagctttttc

SEQ ID NO: 719580 - DNA, 120 bp, Artificial Sequence
  ENSG00000197702_65 (sequence is synthesized)
tcattcaggctttaggggttaccccatctttccttatgtgtgtaatattggagaatgtacactctcactgaactggggatgtttgacttaaaatgatggacaataagatagtgagcagta

SEQ ID NO: 719581 - DNA, 120 bp, Artificial Sequence
  ENSG00000197702_66 (sequence is synthesized)
agtgtgctctaggctaggctacgagaggccatgagctcctcatctcttctctgttctgagctctctgatccactgcacttggggcagggggtgcattctctgtgcctctcctgagtctac

SEQ ID NO: 719582 - DNA, 120 bp, Artificial Sequence
  ENSG00000197702_67 (sequence is synthesized)
tttctgcatcattggttctcccagctcacttccataatgtcctcctaggctgcattggaattgtgtgttgtctagacccatggccaagactgtcattgcctgtgagggagaccaagctca

SEQ ID NO: 719583 - DNA, 120 bp, Artificial Sequence
  ENSG00000197702_68 (sequence is synthesized)
ccaccaagggcttttgccagattgctttcatttacagaatttgcccattcatgtgtctttgtgtttatggattaaatggctttctgaccagcatccctttggtgtgctttgtcaataaga

SEQ ID NO: 719584 - DNA, 120 bp, Artificial Sequence
  ENSG00000197702_69 (sequence is synthesized)
caaatgtgtggagcatggaataacagctcagtgaaggctttagatgtcctcttggaatgtttcatatgaatgaattgtagagggagtctccatgactaggtgggcctgctccttctagca

SEQ ID NO: 719585 - DNA, 120 bp, Artificial Sequence
  ENSG00000197702_70 (sequence is synthesized)
gccaagaatcatcagctagatgaaaagaccccactgtatattaataactagaaagcacgcctccgcctctccagaaaagcatgcctgtgtggcctctgtcggtatatttacatgcatggg

SEQ ID NO: 719586 - DNA, 120 bp, Artificial Sequence
  ENSG00000197702_71 (sequence is synthesized)
cctgagtatgcatttttagacctctgtcaccttcagatgcatgtgtgtgtgttcctctgtcatctgtggacttgtgtgtgtgtgtattcctccctgggtcactttgcagctgttcatgtg

SEQ ID NO: 719587 - DNA, 120 bp, Artificial Sequence
  ENSG00000197702_72 (sequence is synthesized)
aaaatgtaaggacaatggggagagaaaggagaattcaggggtaatcttagtgttgaaaggacaaattttagcttgaatggagttaaggtgtcccccactgctcctaatctaactgtggcc

SEQ ID NO: 719588 - DNA, 120 bp, Artificial Sequence
  ENSG00000197702_73 (sequence is synthesized)
caaaccgtcccctcagattctcgacttcaatccttagctgccctctgggcacctctacctgaatctgctttagactgaattcatccacttttctaaagctgtttcatcccctctgagttc

SEQ ID NO: 719589 - DNA, 120 bp, Artificial Sequence
  ENSG00000197702_74 (sequence is synthesized)
atagaatcctctcccttcctcctctgcccccatgtatacagggatcagcaagacccatttctacctctcctgaatacatcctctgccattttgacttctctgaactattgaaaaaacttc

SEQ ID NO: 719590 - DNA, 120 bp, Artificial Sequence
  ENSG00000197702_75 (sequence is synthesized)
caaactcacttctttgcttcccatctcacctcctccaacctattccctacacagctagcagaggaaacttttaaaatcacaagtccagtcttgcctgtacttatttataactcttagtgc

SEQ ID NO: 719591 - DNA, 120 bp, Artificial Sequence
  ENSG00000197702_76 (sequence is synthesized)
ctctctcctgctggacaaagtccaaaccccttggcacaacattcaaagcattccatcatccgatgacccccagctgtctccttggtctcacccacacatgtggctcatccgtgtagtaat

SEQ ID NO: 719592 - DNA, 120 bp, Artificial Sequence
  ENSG00000197702_77 (sequence is synthesized)
tatatgccacacatattaacatgcctgtacctttgatcatgctagtccttctgcctctaaggcctgccttcctcctttacccaccaggggagaccattattgctcatccttctgatctct

SEQ ID NO: 719593 - DNA, 120 bp, Artificial Sequence
  ENSG00000197702_78 (sequence is synthesized)
cttctgatctctagaattaatcaaattaatcaaatgtgcctccctattatagcctttacagtactgtcacttttttttttttcttgagacagattctcgctgtcacccaggctggagtgc

SEQ ID NO: 719594 - DNA, 82 bp, Artificial Sequence
  ENSG00000197702_79 (sequence is synthesized)
gtgcagtggcatgatcttggcttattgcagtctcgacctccagggttcaagtgacgcatgtaccatcatgcccagctaattt

SEQ ID NO: 719595 - DNA, 120 bp, Artificial Sequence
  ENSG00000197702_80 (sequence is synthesized)
ggtctcaaactcctgggctcaagcaacccgcctcagcctcccaaagtactgtgattacagcagtgagccactgcgcctggccctatagtcacatttagaaaagatagtcatatacttttt

SEQ ID NO: 719596 - DNA, 120 bp, Artificial Sequence
  ENSG00000197702_81 (sequence is synthesized)
atttagaaaagatagtcatatacttttttttgtgttcctccccacacacacacaaatgtttctctctctgagggactatatatacacttgcacatatgtgcatatatgtataggtgtgta

SEQ ID NO: 719597 - DNA, 120 bp, Artificial Sequence
  ENSG00000197702_82 (sequence is synthesized)
gatataaacgtgtacacacatatctgtatacatacatgtaagtatatatacatgccttattataagactttccatgtcatctgtagctgtttaggtaaatgtgtataggcttcccaaggg

SEQ ID NO: 719598 - DNA, 120 bp, Artificial Sequence
  ENSG00000197702_83 (sequence is synthesized)
agggcacgagccatgtcctatatatttatccaggcttctccagcaccatcaggttgtctagcatatgttgcctagcacttaatcaatgtatattgaggctgggcgcggtggctcatgcct

SEQ ID NO: 719599 - DNA, 66 bp, Artificial Sequence
  ENSG00000197702_84 (sequence is synthesized)
ggagatcacgccgttgcactctagcatgggggacagagtaagactccctctcaaaaaaaaaaaaaa

SEQ ID NO: 719600 - DNA, 120 bp, Artificial Sequence
  ENSG00000197702_85 (sequence is synthesized)
actccctctcaaaaaaaaaaaaaaaaaagtgtattgaatgaatgaatggctaatgtaatttctaggaagttaaactgatttggttctcagacatcagtattaatgagtgttaatatttaa

SEQ ID NO: 719601 - DNA, 120 bp, Artificial Sequence
  ENSG00000197702_86 (sequence is synthesized)
ttaaaggcttgtaaactccaactgaatacagagaggaaatgaaaaagcttcggcacatgaagacatggctaagccgggagcctcaccacgcatctgtcccagtgactacagcttttaact

SEQ ID NO: 719602 - DNA, 120 bp, Artificial Sequence
  ENSG00000197702_87 (sequence is synthesized)
cctccagcagacatctagtcaggatctgaaactgccaaaatgttctatgctaggctgtcaaagcaaggtagaacatggccacagagtaatggaacatggttgtggaggaatcttgcctcc

SEQ ID NO: 719603 - DNA, 120 bp, Artificial Sequence
  ENSG00000197702_88 (sequence is synthesized)
aggaatggttacaaaaccatccagcatcacatctatgcaaccccacgttaggcattgcgtacaagcagattagatcatttcacatttcacccttcatgctgaaaaggtgattcactatgg

SEQ ID NO: 719604 - DNA, 120 bp, Artificial Sequence
  ENSG00000197702_89 (sequence is synthesized)
aggtgatgcttcttttgtgaacttaagtttagaccctaatctcaaaggtctgaggcagggcatacacattcaaagcccataatgggtaggatactcaggtggagggaaccagtttgcggt

SEQ ID NO: 719605 - DNA, 120 bp, Artificial Sequence
  ENSG00000197702_90 (sequence is synthesized)
tgacctcccggttcaagcaattctcctacctcagccacccaagtattaattgactggattaatgatgtgttggttggagaaagaatcattgtgaaagacctagctgaagatttgtatgat

SEQ ID NO: 719606 - DNA, 120 bp, Artificial Sequence
  ENSG00000197702_91 (sequence is synthesized)
agaggcgagaggcagaatcccgcttgctttgcagcaggtctgtgagtctccagtggcatcgtattaaattatataggcagccacttgtttgcaactgacgcactgagctgagagttgtgc

SEQ ID NO: 719607 - DNA, 120 bp, Artificial Sequence
  ENSG00000197702_92 (sequence is synthesized)
cgagcaggaggcattctcttcgggaagcatttgagaagatcctatagcttcacagacctccagttggtctgaaagcagaagggtagaaaccacagggagggggtcagctctgggcagaag

SEQ ID NO: 719608 - DNA, 120 bp, Artificial Sequence
  ENSG00000197702_93 (sequence is synthesized)
acattccaagagctgccctccttgggacttagatcactccctgagaacaacaccccaaccaggctgcggaggaagaccagctgctgtttgctggcctgcatgacagggaccagtgtccga

SEQ ID NO: 719609 - DNA, 120 bp, Artificial Sequence
  ENSG00000197702_94 (sequence is synthesized)
gaccatgccccagacaagctgaatgtggtgaaaaaggtgggaaaggggtgcctgggatggacagagggaagcgagatgcaacagaacattgggaaaacccatccctgcagcttgcgagct

SEQ ID NO: 719610 - DNA, 120 bp, Artificial Sequence
  ENSG00000197702_95 (sequence is synthesized)
tcctgccagaactggtggcatcacctaacctctgcacacacagggctttcccccttgccatccatgtacctgtctgttcctcactggatgttgcacctgggccttttcccctccatcagc

SEQ ID NO: 719611 - DNA, 120 bp, Artificial Sequence
  ENSG00000197702_96 (sequence is synthesized)
atgaacagcctgtcttcccacccaggctaaccccagcaatctcagccttccccactcctcacagaattccctgtctccctggcctaggcacctgtgccgaagaagggacaggaaggagag

SEQ ID NO: 719612 - DNA, 120 bp, Artificial Sequence
  ENSG00000197702_97 (sequence is synthesized)
atccagtggaatcattttatttcagttcccccacccagacactggctcagacactccacctatcattctgcctcttgggacctccttgttccttacacgccctgagttgtatgggactgc

SEQ ID NO: 719613 - DNA, 120 bp, Artificial Sequence
  ENSG00000197705_0 (sequence is synthesized)
actctcgttacgactcactgagccccaggcccaaggataatgatgtgttgtttcttggtagcataatttgtcacacgtacattttttcttcttcttctcttgcagaaagctctgctccct

SEQ ID NO: 719614 - DNA, 120 bp, Artificial Sequence
  ENSG00000197705_1 (sequence is synthesized)
ctctctctccctctctctttctctcttttctccctctcctacattttcttgctgttgctaattcatggtgatcaaatgatgtacgacaaaataaattgtaaagagtgactgcctggagtt

SEQ ID NO: 719615 - DNA, 120 bp, Artificial Sequence
  ENSG00000197705_2 (sequence is synthesized)
gggaaccagaaggtgttttccccctcccaaggagacagcaaacctttaaaaaggaaggacaattgatttttggggggagcttaagtgagccttgactttgcagctggttgagaacaggtt

SEQ ID NO: 719616 - DNA, 120 bp, Artificial Sequence
  ENSG00000197705_3 (sequence is synthesized)
ggaggagggtttaaagccaggtgcaccgagtcagctcgccatgtccagatccggggacaggacctccaccttcgaccccagccacagcgacaacctgctgcacggcctcaacctgctgtg

SEQ ID NO: 719617 - DNA, 120 bp, Artificial Sequence
  ENSG00000197705_4 (sequence is synthesized)
gaggaagcagctgttttgcgacgtgaccctgacggcccagggccagcagttccattgccacaaggccgtgctggcctcctgctcgcagtacttccgatcgctcttctccagccacccccc

SEQ ID NO: 719618 - DNA, 120 bp, Artificial Sequence
  ENSG00000197705_5 (sequence is synthesized)
gaggggtcggcggccaggacggcctgggggcccccaaggaccagcagcagccgccgcagcagcagccgtcacagcagcagcagccgccgccgcaggaggagcccgggactccttcttcct

SEQ ID NO: 719619 - DNA, 120 bp, Artificial Sequence
  ENSG00000197705_6 (sequence is synthesized)
ttcttcctcccccgacgacaagctgctgaccagcccccgggccatcaacaacctggtgctgcagggctgctcgtccatcgggctgcgcctggtgctcgagtacctctacacggccaacgt

SEQ ID NO: 719620 - DNA, 120 bp, Artificial Sequence
  ENSG00000197705_7 (sequence is synthesized)
gaccctgtccctggacacggtggaggaggtgctgtcggtcagcaagatcctgcacatcccccaggtcaccaagctctgcgtgcagttcctcaacgaccagatctcggtgcagaactacaa

SEQ ID NO: 719621 - DNA, 120 bp, Artificial Sequence
  ENSG00000197705_8 (sequence is synthesized)
gcaggtgtgcaagatcgccgcgctgcacggcctggaggagaccaagaagctggccaacaagtacctggtggaggatgtgctgctgctcaacttcgaggagatgcgcgccctgctggactc

SEQ ID NO: 719622 - DNA, 120 bp, Artificial Sequence
  ENSG00000197705_9 (sequence is synthesized)
gctgccgccccccgtggagtcggagctggcgctcttccagatgtccgtgctgtggctggagcacgaccgcgagacccgcatgcagtatgcgcctgacctcatgaagcgcctccgcttcgc

SEQ ID NO: 719623 - DNA, 120 bp, Artificial Sequence
  ENSG00000197705_10 (sequence is synthesized)
cctcatcccggccccggagctggtggagcgggtccagtcagtggatttcatgcgaaccgacccggtctgccagaagctgctgctggacgccatgaactaccacctgatgcccttcaggca

SEQ ID NO: 719624 - DNA, 120 bp, Artificial Sequence
  ENSG00000197705_11 (sequence is synthesized)
gcactgcaggcagagcctggccagcagaattcgctctaacaagaaaatgctgttattggttggagggctgcctcctggaccggaccggctccccagcaatttggttcagtattacgacga

SEQ ID NO: 719625 - DNA, 120 bp, Artificial Sequence
  ENSG00000197705_12 (sequence is synthesized)
tgaaaagaagacatggaaaatactcacaattatgccatacaacagtgcccaccactgcgttgtggaggtggaaaacttcttgttcgtgttgggtggagaggaccagtggaatccgaatgg

SEQ ID NO: 719626 - DNA, 120 bp, Artificial Sequence
  ENSG00000197705_13 (sequence is synthesized)
aaaacacagtacaaattttgtcagccgatatgatcctcgatttaatagctggattcaacttccacccatgcaggaaagaagagccagtttctatgcatgtcggttggacaagcatttata

SEQ ID NO: 719627 - DNA, 120 bp, Artificial Sequence
  ENSG00000197705_14 (sequence is synthesized)
cgtaattggtggaaggaatgaaactggctacttgtccagcgtggagtgctataacctagaaacgaatgaatggcgctatgtgtcctctttgccacagcctctggcggctcatgcgggagc

SEQ ID NO: 719628 - DNA, 120 bp, Artificial Sequence
  ENSG00000197705_15 (sequence is synthesized)
agtgcacaatgggaaaatatacatttcagggggtgtacacaatggagaatatgtcccatggctatattgctatgacccagtaatggatgtctgggctcgaaaacaagatatgaacacaaa

SEQ ID NO: 719629 - DNA, 120 bp, Artificial Sequence
  ENSG00000197705_16 (sequence is synthesized)
acgtgcaattcacactttggctgtaatgaatgatcgcttgtatgcaattggaggaaatcatttgaaaggtttctcccaccttgatgtaatgcttgtggaatgctatgacccaaaaggtga

SEQ ID NO: 719630 - DNA, 120 bp, Artificial Sequence
  ENSG00000197705_17 (sequence is synthesized)
gcatttaccttgtgggaggctacagctggagtatgggggcctacaagtcatctacaatatgctattgtccagagaaaggaacctggacagaactcgaaggagatgtagcagaaccgttgg

SEQ ID NO: 719631 - DNA, 120 bp, Artificial Sequence
  ENSG00000197705_18 (sequence is synthesized)
caggccctgcctgtgtgacagttattctgccctcttgtgtaccatacaacaaataacaccaggaaactctggaatgaacagtatcacattctaggaagcaatggcaggtgacatcactat

SEQ ID NO: 719632 - DNA, 120 bp, Artificial Sequence
  ENSG00000197705_19 (sequence is synthesized)
tataataggaacaatgcattctaatggtacaactgccaaaacccacccttggtttctgatgatttataagtaactacaaaagaaagagacctgttcttgaacagatactatgtctataac

SEQ ID NO: 719633 - DNA, 120 bp, Artificial Sequence
  ENSG00000197705_20 (sequence is synthesized)
tcagatcgcaccaaacttcctgtggtgacagactcttccatttcagactggttttaacttatcccagctttacaaaaactcttcatgtgaatcttaacttgcaaaaggagaaagataaaa

SEQ ID NO: 719634 - DNA, 120 bp, Artificial Sequence
  ENSG00000197705_21 (sequence is synthesized)
tacagaagactggccccagagagacctcagatcagtattgtgcattgtagtctacctgcatgtgatctatgttgacatttcggggatattgtgttcaagaatgattccaaatttgagcca

SEQ ID NO: 719635 - DNA, 120 bp, Artificial Sequence
  ENSG00000197705_22 (sequence is synthesized)
ccaaaatacactgcattacagaaattgccacttgattctgtactcttaacctttggctacttcacagactccattggcaacactgttattgaaaatcatgtaagattaaagagaggcatt

SEQ ID NO: 719636 - DNA, 120 bp, Artificial Sequence
  ENSG00000197705_23 (sequence is synthesized)
ttcgtttctatacaacttcatttcatacaccttctgcccttacagcacctcatgggatcagaaaagagaaagatgttggctcttgtaataaatgctttctaccctataggttctaggcta

SEQ ID NO: 719637 - DNA, 120 bp, Artificial Sequence
  ENSG00000197705_24 (sequence is synthesized)
gacagagtcgtcatttctgtgtcctcaattttatctgaaagattaaaacaaaatatattatgtcactattcagttcatggaggtttgtgctttttcatattttgtgatatataagtagtg

SEQ ID NO: 719638 - DNA, 120 bp, Artificial Sequence
  ENSG00000197705_25 (sequence is synthesized)
aacacacatgttatttacttcaaaagacaggattgacaaattcagtcaatactattttagagattctgttagatgatatgtctgacccaaatttaatccataataaaaaaaaatgggaga

SEQ ID NO: 719639 - DNA, 120 bp, Artificial Sequence
  ENSG00000197705_26 (sequence is synthesized)
ttgttttcaggaattcagggatgaaaagaaagaataatttccattaagtagaattccagttgtctttctgtttctaaaacacagaacttacaagagccacaggagccaattatagcacct

SEQ ID NO: 719640 - DNA, 120 bp, Artificial Sequence
  ENSG00000197705_27 (sequence is synthesized)
gacagaatacttctcctcttcctcaccttcgggtgcctctagacacttgacttacgatcgttattcccccaattcatcatattttgtttgttatcaccagagatgcctgaactcagttaa

SEQ ID NO: 719641 - DNA, 120 bp, Artificial Sequence
  ENSG00000197705_28 (sequence is synthesized)
gcgagcaattgctagttgtcttgaggagcatgaggaattcaggagcagaaggtcaggatagcatgagatagtctcaatgtggccaaccaaaaggacaaaactgacaggaatgcacattcg

SEQ ID NO: 719642 - DNA, 120 bp, Artificial Sequence
  ENSG00000197705_29 (sequence is synthesized)
attttcaagccctccagagcttgaacaacaactttaggagtaaataaaagcctaaaatatattttaaccatccagagatggtgttgaatccttcaacaaatgtgtcattcaaaacagtaa

SEQ ID NO: 719643 - DNA, 120 bp, Artificial Sequence
  ENSG00000197705_30 (sequence is synthesized)
ttagggaaatcccacagatgaaaaatgccttagtgataagctttcatggcagagcacgtcaagataaatgggtatactggaatccgatgccgtttctacagtaaagtgcaatcttcgttg

SEQ ID NO: 719644 - DNA, 120 bp, Artificial Sequence
  ENSG00000197705_31 (sequence is synthesized)
tttttgtatttatttgtatgttcagatccaaaggatccgttgtaaaaatatatatatataaatatatgtatatccagtgcaatcaactgtcatttctttttccttaaaacatatgagtat

SEQ ID NO: 719645 - DNA, 120 bp, Artificial Sequence
  ENSG00000197705_32 (sequence is synthesized)
atagaaagaaaagttacagtactctgtgggaaaatctcagctgacatcatgaatagaatgaggtctgcttcagaaccttttgttgtcaactgtcactgtttcttccaaaagtcacaattt

SEQ ID NO: 719646 - DNA, 120 bp, Artificial Sequence
  ENSG00000197705_33 (sequence is synthesized)
gtacaagaacctttgctttccttagacttgttctgcattttattttttatttctcaccaaaataaaagcatttatgagaattataagtaaagctttctgtatttcagagagacataagtt

SEQ ID NO: 719647 - DNA, 120 bp, Artificial Sequence
  ENSG00000197705_34 (sequence is synthesized)
actagaaagtgaaaagtgaataaataagtcacagagaatgtaaattttgtacagtattagaatgtgtaaatgaagcttgcttggaaggggaaaactttaaataaaaactttatgtactaa

SEQ ID NO: 719648 - DNA, 120 bp, Artificial Sequence
  ENSG00000197705_35 (sequence is synthesized)
ttcaaacaacacaatgtgactatcataattatactactagacatcaaatattcagtgtattcttctgctgtgctcaaagcgctctcacctctcctccaaggggagattacccaaaatcat

SEQ ID NO: 719649 - DNA, 120 bp, Artificial Sequence
  ENSG00000197705_36 (sequence is synthesized)
caagctcattgtggaggacctctgggtgagaagaatagtcatcccaacatcaagctgatttgagactcctcttgacccggaatgaataaactaaagagaaattatctggtccctcacaca

SEQ ID NO: 719650 - DNA, 120 bp, Artificial Sequence
  ENSG00000197705_37 (sequence is synthesized)
taatgcaccgtgatggaatagggacaggatcaccccagtaaacacgttcatttggaaagaccgtagcaatttagcaattctaccaaatagacattatgaagggcacctatccaagaggtg

SEQ ID NO: 719651 - DNA, 120 bp, Artificial Sequence
  ENSG00000197705_38 (sequence is synthesized)
ggttgtgttccttgattagggttctgcccaattctgttcattattttttttgttttcccatgccccctgcttctccctgtgggagatccttcttttcctgttatcttcattggccatgtc

SEQ ID NO: 719652 - DNA, 120 bp, Artificial Sequence
  ENSG00000197705_39 (sequence is synthesized)
ggcggcggcggctctcccccgggcgggcgggccggcgggccggcgggccggcgcgcgggcgggatgcaagcagagggtccctttctgctcagccctggaaggttggaggagggtttaaag

SEQ ID NO: 719653 - DNA, 120 bp, Artificial Sequence
  ENSG00000197706_0 (sequence is synthesized)
tggtggatttcaagaaaaatgggtatctcatgcagacctttcctcttctgttctaatttttcttcttatttttaaaaatagaaatcaactatgagaaaccatacaacagtagcaaacttt

SEQ ID NO: 719654 - DNA, 120 bp, Artificial Sequence
  ENSG00000197706_1 (sequence is synthesized)
attcttcttggactgacagatgatccacaattacaggtgattatttttcttctcctttttttcacctacatgttgagcatcactgggaatctaaccatcatcactctcaccctactggat

SEQ ID NO: 719655 - DNA, 120 bp, Artificial Sequence
  ENSG00000197706_2 (sequence is synthesized)
ttgcatctcaagacacccatgtatttcttcctccgaaatttctcatttttagaagtctcattcacaactgtctacattcccaaatttcttgttagtatggcaacaggtgataagaccatt

SEQ ID NO: 719656 - DNA, 120 bp, Artificial Sequence
  ENSG00000197706_3 (sequence is synthesized)
tcttacaacgattgtgcagcacagctgtttttcactattctcttgggggcaactgaattttttcttctggctgccatgtcctatgagcgctatgtggccatctgcaaacccctgcattac

SEQ ID NO: 719657 - DNA, 120 bp, Artificial Sequence
  ENSG00000197706_4 (sequence is synthesized)
gcagcttgctggtctttgcttcatggatggctggcttcctaataatttttccgccactcctgatgggtctccagcttgatttctgtgcagccaacactgtagatcatttcttctgtgatg

SEQ ID NO: 719658 - DNA, 120 bp, Artificial Sequence
  ENSG00000197706_5 (sequence is synthesized)
tttctcctatactgcagctctcttgcacagacactgacataatagaattaatgatgcttctctcagccattttgacgctcctggttacactggtattagtgattctctcctacacaaata

SEQ ID NO: 719659 - DNA, 120 bp, Artificial Sequence
  ENSG00000197706_6 (sequence is synthesized)
ttatcaggactattctgaaaataccttcttctcaacagagaaaaaaagcattttctacatgttcttcccacatggtggtcgtgtccatttcttatggcagctgcatcttcatgtatgtga

SEQ ID NO: 719660 - DNA, 120 bp, Artificial Sequence
  ENSG00000197706_7 (sequence is synthesized)
aaccctcagcaaaagaaagagtgtcattaaataaagggatagctctgctcagcacttctgttgcccccatgttgaatccctttatttatacactgagaaacaaacaagtaaaagatgttt

SEQ ID NO: 719661 - DNA, 120 bp, Artificial Sequence
  ENSG00000197706_8 (sequence is synthesized)
ttaagcacacagtcaaaaagattgaacttttctcaatgaaatgaatcactttaacgatattattaaggttattagtaaaataaaacaagaagagtggagtatgtgcaaagtttttcaatg

SEQ ID NO: 719662 - DNA, 120 bp, Artificial Sequence
  ENSG00000197712_0 (sequence is synthesized)
actcccgcgcgtactcggccgcctgagcgccgacccacgccctgcctgctcttccagtccagccaacactctaagcaggcaccgcctccactcgcagcccccgggatgggtcccactccc

SEQ ID NO: 719663 - DNA, 120 bp, Artificial Sequence
  ENSG00000197712_1 (sequence is synthesized)
taccgcagatccccaggccccctccacccagtcggctagccctcgcctctgccatccgatactaaaatgtctgatgatgctggtgacaccttagccactggagacaaagcagaagttact

SEQ ID NO: 719664 - DNA, 120 bp, Artificial Sequence
  ENSG00000197712_2 (sequence is synthesized)
gagatgcctaatagtgattctttacctgaggatgcagaagtgcattgtgattcagctgcagtttcacatgagccaacaccagctgaccccagaggggaggggcatgaaaatgcagctgtg

SEQ ID NO: 719665 - DNA, 120 bp, Artificial Sequence
  ENSG00000197712_3 (sequence is synthesized)
cagggtgcaggggctgccgccattgggccccctgtgcagcctcaggatgccaacgccctggagccccctctcaatggagacgtgactgaggatacacttgctgaatgtattgattccgtc

SEQ ID NO: 719666 - DNA, 120 bp, Artificial Sequence
  ENSG00000197712_4 (sequence is synthesized)
agccttgaggcagaacccagatccgaaatacccctgcaagaacagaattatctggctgtggattcccctccaagtggaggaggatgggcaggctggggatcctggggcaaatctctgctg

SEQ ID NO: 719667 - DNA, 120 bp, Artificial Sequence
  ENSG00000197712_5 (sequence is synthesized)
tcgtcagcatctgccacagtaggtcatggattgacggcagtcaaggaaaaagcaggagccactctacggattcatggtgtaaattctggatcttctgaaggagcccaaccaaatactgaa

SEQ ID NO: 719668 - DNA, 120 bp, Artificial Sequence
  ENSG00000197712_6 (sequence is synthesized)
aacggagtccctgaaataacagatgcagccacagatcagggccctgcagaaagcccacccacttccccttcatcagcctctcggggtatgctgtctgccatcaccaatgtggttcaaaac

SEQ ID NO: 719669 - DNA, 120 bp, Artificial Sequence
  ENSG00000197712_7 (sequence is synthesized)
acaggtaaaagtgtcttaactggaggccttgatgcgttggaattcatcggcaagaaaaccatgaatgtccttgcagaaagtgacccgggctttaagcggaccaagacgctcatggagaga

SEQ ID NO: 719670 - DNA, 120 bp, Artificial Sequence
  ENSG00000197712_8 (sequence is synthesized)
actgtttccttgtctcagatgttaagggaagctaaggagaaggagaagcagagactggcacagcagctcacgatggagagaaccgcgcactacgggatgctgtttgatgaatatcaaggc

SEQ ID NO: 719671 - DNA, 120 bp, Artificial Sequence
  ENSG00000197712_9 (sequence is synthesized)
ttgtcacacctggaagccctggaaattctgtccaatgaaagcgaaagcaaggttcagtcatttttagcatcacttgatggagagaagctggaactcttaaaaaatgacctaatttccatt

SEQ ID NO: 719672 - DNA, 120 bp, Artificial Sequence
  ENSG00000197712_10 (sequence is synthesized)
aaagacatctttgcagccaaagaattagagaatgaagaaaatcaagaagaacaaggcttagaagaaaagggagaagaatttgctcgcatgcttacagagcttctctttgaattacatgtg

SEQ ID NO: 719673 - DNA, 120 bp, Artificial Sequence
  ENSG00000197712_11 (sequence is synthesized)
gcggccacacctgacaaactcaataaggccatgaagagggctcatgactgggtggaagaggatcaaaccgtggtgtcagtagatgtggcaaaagtgtccgaagaagaaacaaagaaggaa

SEQ ID NO: 719674 - DNA, 120 bp, Artificial Sequence
  ENSG00000197712_12 (sequence is synthesized)
gaaaaggaagagaaatctcaagaccctcaagaagacaaaaaggaggaaaagaaaactaagaccatagaggaagtatacatgtcgtccattgaaagtctggcggaggtaacagcgcgctgt

SEQ ID NO: 719675 - DNA, 120 bp, Artificial Sequence
  ENSG00000197712_13 (sequence is synthesized)
attgagcagcttcataaagtagcagaattaattcttcatggacaagaagaggaaaaaccagctcaggaccaagcaaaagttctaataaaattaactactgcaatgtgcaatgaagtggcc

SEQ ID NO: 719676 - DNA, 120 bp, Artificial Sequence
  ENSG00000197712_14 (sequence is synthesized)
tctttatcaaagaagtttacgaattctttaaccactgttgggagcaacaagaaggccgaggtccttaaccccatgatcagtagtgtattgttagagggctgcaacagtacaacgtacata

SEQ ID NO: 719677 - DNA, 120 bp, Artificial Sequence
  ENSG00000197712_15 (sequence is synthesized)
caggatgccttccagctgctgctgcctgttctgcaggtctcacatatccagaccagttgtttgaaagcacagccgtgacctggccagactccatctagttaaaggagacagctggccgcc

SEQ ID NO: 719678 - DNA, 120 bp, Artificial Sequence
  ENSG00000197712_16 (sequence is synthesized)
aatgcaaatttagagagagttatcatttctctcaatgtgtataattgtttttacaaacaattgtgttttctttatgttaatttaaacttacacagcttatattgaaaatttcctttcatc

SEQ ID NO: 719679 - DNA, 120 bp, Artificial Sequence
  ENSG00000197712_17 (sequence is synthesized)
tgaaatttatttacaaatattcgtgttcattttcctggttaagcatgctatatttagaaactcatggggagaccttagacttttgtttaatcctttatgtttcaacctttaaatgttcca

SEQ ID NO: 719680 - DNA, 120 bp, Artificial Sequence
  ENSG00000197712_18 (sequence is synthesized)
ttcttatagtattactttaaatcaattctaaaactgaactttgttttgttacataaatgtcgcaggcaaaaataacactacttatagattttacctattatggtaaaaaataggaacata

SEQ ID NO: 719681 - DNA, 88 bp, Artificial Sequence
  ENSG00000197712_19 (sequence is synthesized)
tcattcattcttgcaacaagcatttattgagcacctactgtgtgctcacagtaaagaaacgtgatcttatcccagtagaggtagatat

SEQ ID NO: 719682 - DNA, 120 bp, Artificial Sequence
  ENSG00000197712_20 (sequence is synthesized)
cagtaaagaaacgtgatcttatcccagtagaggtagatattctgaaaaagaataattcttaaactgcttaaaacaggggtccccacccccaggccacagaccagtaccagtccgtggcac

SEQ ID NO: 719683 - DNA, 120 bp, Artificial Sequence
  ENSG00000197712_21 (sequence is synthesized)
ccccacccccaggccacagaccagtaccagtccgtggcactggttaggaaccaggccacacagcagggggtgagcggtgggtgagtgagcacagcttcatctgtatttacagctgctccc

SEQ ID NO: 719684 - DNA, 120 bp, Artificial Sequence
  ENSG00000197712_22 (sequence is synthesized)
gcttgcattactgcctgagctctgcctcccgtcaggtcagcagcagcattagagtctcatgggagtgcgaaccctgttgtgaactgcacatgcgagggatctaggttgtgcactccttat

SEQ ID NO: 719685 - DNA, 120 bp, Artificial Sequence
  ENSG00000197712_23 (sequence is synthesized)
aatgcctgatgaatctaatgcctcatgatctgaggttgaatagcttcgtgccgaaaccatcccccacccccatcccgctaccccgagtccgtgaaaaaattgtcttccatgaaaccggtc

SEQ ID NO: 719686 - DNA, 120 bp, Artificial Sequence
  ENSG00000197712_24 (sequence is synthesized)
ggcttaaaataccaataaatttttgaaccttaaaaactttgaagaacaaggtaaattggtgttttatttaatgtcctaccctttaatttgttgcattttcctatactctttacactattt

SEQ ID NO: 719687 - DNA, 120 bp, Artificial Sequence
  ENSG00000197712_25 (sequence is synthesized)
tatcccaaactatgtatatgaggtgaaaatatatatgaaaagggatactgaagaatatttagtttaaaattaatttcttacgatcacgagcacatggtggcataattacaaagcttggaa

SEQ ID NO: 719688 - DNA, 120 bp, Artificial Sequence
  ENSG00000197712_26 (sequence is synthesized)
gtattcaaatagaaaatcaaaggtgtttcaatacagtagaatcccaggactgcattttaaaatcgcctcacagatcacactcgctggtggcaaatatcatcatcgttgctaaaggacaga

SEQ ID NO: 719689 - DNA, 120 bp, Artificial Sequence
  ENSG00000197712_27 (sequence is synthesized)
aaatactgatgtgtgttttaactaactggtatattgatccatgggaggctgcacagaagaccctgcggccaggaggggcattgtcagtggctgcttctcctgagctccacgccttcattg

SEQ ID NO: 719690 - DNA, 120 bp, Artificial Sequence
  ENSG00000197712_28 (sequence is synthesized)
cagctgcatgttcgatacaatacacctgcttcacagccccatggacatccctacaggtactgtcatgtgaagccttgcctagtagttctctccagggcaaatgaagctcacagttttgca

SEQ ID NO: 719691 - DNA, 120 bp, Artificial Sequence
  ENSG00000197712_29 (sequence is synthesized)
aggtggaaacctcttattcacatttgctttgattccccgatggagtagactgcctttgttccatacaggcaaagtaaggatattttaatatcatcctacttcttattagcatttcatttg

SEQ ID NO: 719692 - DNA, 120 bp, Artificial Sequence
  ENSG00000197712_30 (sequence is synthesized)
tctatgtactgtatttcatttgtatgtctcctgaaacatccaaatagagaacataagaacactttatgtacaatctggaaaaaaattacctgagaaatcaattaaagatttttccccttt

SEQ ID NO: 719693 - DNA, 120 bp, Artificial Sequence
  ENSG00000197712_31 (sequence is synthesized)
tgtgcaatgaagtggcctctttatcaaagaagtttacgaattctttaaccactgttggggccttcagcaatagagcttcactgtatacaagcagaatgacaagggaggtggaagctcatt

SEQ ID NO: 719694 - DNA, 120 bp, Artificial Sequence
  ENSG00000197712_32 (sequence is synthesized)
tatccatggactttgatataaacactaggcttgcagagaggtgcgaggtcttaatcaagatggaatagccttagtgacaccggttcctaaggctctattgcaccctcttgttaccctttt

SEQ ID NO: 719695 - DNA, 80 bp, Artificial Sequence
  ENSG00000197712_33 (sequence is synthesized)
ccggccgcgtccccgccggccctgcagacgtggcggggcgggacccgctgggcactcccgcgcgtactcggccgcctgag

SEQ ID NO: 719696 - DNA, 120 bp, Artificial Sequence
  ENSG00000197712_34 (sequence is synthesized)
ctccggccgcgtccccgccggccctgcagacgtggcggggcgggacccgctgggcactcccgcgcgtactcggccgcctgagcggctgtggattcccctccaagtggaggaggatgggca

SEQ ID NO: 719697 - DNA, 120 bp, Artificial Sequence
  ENSG00000197712_35 (sequence is synthesized)
tcatctttgcccagcggctggcgggcaggctgctacaacctccacttagtctaccccagctgcaggctgtaatgttgggggagctgccacatcctgaaggatgaaaaataaatcacgctt

SEQ ID NO: 719698 - DNA, 120 bp, Artificial Sequence
  ENSG00000197712_36 (sequence is synthesized)
aaacgcctcagtggaaaccactgttaaagcttttggtgtgtttcttaacagtttattcccaggcattgaatttttgctttgttttgcctttcacataatgaacatgtaaaatgtgaagta

SEQ ID NO: 719699 - DNA, 120 bp, Artificial Sequence
  ENSG00000197712_37 (sequence is synthesized)
ggatatgatgtaaaagttatcaataggatcaatcaaaaaaatcattttttagaaattctaaagtgaccagaatctccccctctccaacacaaaatcagtcctcccaacctcccccatgtc

SEQ ID NO: 719700 - DNA, 120 bp, Artificial Sequence
  ENSG00000197713_0 (sequence is synthesized)
aacttgcttttgggagccagcggtatggcgtcgggctgcaagattggcccgtccatcctcaacagcgacctggccaatttaggggccgagtgcctccggatgctagactctggggccgat

SEQ ID NO: 719701 - DNA, 120 bp, Artificial Sequence
  ENSG00000197713_1 (sequence is synthesized)
tatctgcacctggacgtaatggacgggcattttgttcccaacatcacctttggtcaccctgtggtagaaagccttcgaaagcagctaggccaggaccctttctttgacatgcacatgatg

SEQ ID NO: 719702 - DNA, 120 bp, Artificial Sequence
  ENSG00000197713_2 (sequence is synthesized)
gtgtccaagccagaacagtgggtaaagccaatggctgtagcaggagccaatcagtacacctttcatctcgaggctactgagaacccaggggctttgattaaagacattcgggagaatggg

SEQ ID NO: 719703 - DNA, 120 bp, Artificial Sequence
  ENSG00000197713_3 (sequence is synthesized)
atgaaggttggccttgccatcaaaccaggaacctcagttgagtatttggcaccatgggctaatcagatagatatggccttggttatgacagtggaaccggggtttggagggcagaaattc

SEQ ID NO: 719704 - DNA, 120 bp, Artificial Sequence
  ENSG00000197713_4 (sequence is synthesized)
atggaagatatgatgccaaaggttcactggttgaggacccagttcccatctttggatatagaggtcgatggtggagtaggtcctgacactgtccataaatgtgcagaggcaggagctaac

SEQ ID NO: 719705 - DNA, 120 bp, Artificial Sequence
  ENSG00000197713_5 (sequence is synthesized)
atgattgtgtctggcagtgctattatgaggagtgaagaccccagatctgtgatcaatctattaagaaatgtttgctcagaagctgctcagaaacgttctcttgatcggtgaaaccataag

SEQ ID NO: 719706 - DNA, 120 bp, Artificial Sequence
  ENSG00000197713_6 (sequence is synthesized)
gagcccagtgttcctgttcatgaaatctcccttttactggaaaacaggaatattgactaccaaatcacaatgcaattgaagccgtactgcttttttgagcagttattcattccagtgatt

SEQ ID NO: 719707 - DNA, 120 bp, Artificial Sequence
  ENSG00000197713_7 (sequence is synthesized)
aaaactgattgtgcagaatattctaagaggtcagaaattggtgtgtataactacatttttagtgatgcaatttattgattagtgagtaagatactgtttttattgagagatttgattttt

SEQ ID NO: 719708 - DNA, 120 bp, Artificial Sequence
  ENSG00000197713_8 (sequence is synthesized)
ataaagtaaaaatacggctgcattagggttacaaacagaaaagtgtcttaatgtctaaggagggcatattagctacactacaaaaacaaattttgtctgtacttctgaaaagaattttgt

SEQ ID NO: 719709 - DNA, 120 bp, Artificial Sequence
  ENSG00000197713_9 (sequence is synthesized)
tgtttctcagctgttttccaaaagcaaaggaagtctttatggtttttttctatttcatgttattgtgatttgtttataagtttgggtggggtgcataccatattcttggttcttaaaatc

SEQ ID NO: 719710 - DNA, 120 bp, Artificial Sequence
  ENSG00000197713_10 (sequence is synthesized)
tatcacttttcaccttacacttgatgtgtgaaaactataaaaacaatgtgtgaaacccaggggttctaaaatacaagcatagattttatcagggtgttttgtcaaagcaggttattcagt

SEQ ID NO: 719711 - DNA, 120 bp, Artificial Sequence
  ENSG00000197713_11 (sequence is synthesized)
gattcctccccaccattcttaagaacgttaaataatgctgttgtgttagctctgagtagaaaggaaaaagtaaaacctctgtttggaggtaatattgggttgaattctgactgccccttt

SEQ ID NO: 719712 - DNA, 120 bp, Artificial Sequence
  ENSG00000197713_12 (sequence is synthesized)
ctagctggacctttaacaaatcacccaatcttttttgtgtttctctaaagtcatttatacattaaatgtaattatagcaactgtggggttctgttgagaattaagagctaacactatata

SEQ ID NO: 719713 - DNA, 120 bp, Artificial Sequence
  ENSG00000197713_13 (sequence is synthesized)
agcattatataagtttatatttttgtgagttataaagtactttgatatattctcattaaatctgtaaatcacctctataagtaagtggtaataataaagcagatatttttgtccccattt

SEQ ID NO: 719714 - DNA, 120 bp, Artificial Sequence
  ENSG00000197713_14 (sequence is synthesized)
aatgaagaaattaatgcttaatagggtggtaccctggaaaggatctgggaagtggtagaatttctggtctgtacttttacaaatggagcccttgggaggtgggttaggtaaaagaagctt

SEQ ID NO: 719715 - DNA, 120 bp, Artificial Sequence
  ENSG00000197713_15 (sequence is synthesized)
tttacttaacgttgtcttatttccagtctaattttacgctgtagcagaaccagatggctgagaaaattctggaactatggatcttgaccccaaggatatattattttattccaagaaaga

SEQ ID NO: 719716 - DNA, 120 bp, Artificial Sequence
  ENSG00000197713_16 (sequence is synthesized)
tcaggtaggcgaaaagatgacaggatacagagtcaatccataaactaaatatttataactgttctgaattatacagagtctaaaaatatgtgtcagctacttcattcctgtaaatactct

SEQ ID NO: 719717 - DNA, 120 bp, Artificial Sequence
  ENSG00000197713_17 (sequence is synthesized)
tgctgtgttataaatatggcaagaaataaacatgaccaatatcaatagacttcttgaggctactataagttttgagaaataaggttcaaaaaataagaatgctaacacttaagcacagac

SEQ ID NO: 719718 - DNA, 120 bp, Artificial Sequence
  ENSG00000197713_18 (sequence is synthesized)
tagagcttgcttgggtttcttcctgcattacaaggtaaaaatttgttaatgtttgtttttattcagcttgggaaagctttgtgccatgaatacgtcgcatttaataacaagcaacacacg

SEQ ID NO: 719719 - DNA, 120 bp, Artificial Sequence
  ENSG00000197713_19 (sequence is synthesized)
gcatatagaaataactttaattaaaaaacttacatagaagattataatatcagacgtgacaaagatttgagtttatttgcctggacaacttgggtttgtctggcttttgttttctttttc

SEQ ID NO: 719720 - DNA, 120 bp, Artificial Sequence
  ENSG00000197713_20 (sequence is synthesized)
tttaaaaataaatgtacagtaaaactacaagcaaaagtttgtcagtattgaattgaattttttaccccttaaaaggactagtataatttccaatctctaacaaaaacttagtgtcaaatc

SEQ ID NO: 719721 - DNA, 120 bp, Artificial Sequence
  ENSG00000197713_21 (sequence is synthesized)
tcacagataaggccaaatggccaatattttcagttatgtgggtagtacaacttgagtaaccttttttacatgacaaaaagtgagttatataaattgtcctcaactttcacataggaaaaa

SEQ ID NO: 719722 - DNA, 120 bp, Artificial Sequence
  ENSG00000197713_22 (sequence is synthesized)
aatggtttaatagcttcaaaaggaattttctttcatgtatactcttcagtatccaatattgaagctttgttctttgaaaaattttaatttccaatctaggatgcaagcaagaatatatgt

SEQ ID NO: 719723 - DNA, 120 bp, Artificial Sequence
  ENSG00000197713_23 (sequence is synthesized)
ttatttgaatagagtaagctatggcaaagaatgaccaaattagctagaaatagaaatcagccagaattaactaatttcttgctaatctagaaatacaatcatcttttttttttttttcaa

SEQ ID NO: 719724 - DNA, 120 bp, Artificial Sequence
  ENSG00000197713_24 (sequence is synthesized)
attttatactgatagggctttactgtttgtggctcattttaaaactggtgtcttctcttcatgagacacattaattggtaaaactcaaattgagttttcaaagatgtgatagtattaaag

SEQ ID NO: 719725 - DNA, 120 bp, Artificial Sequence
  ENSG00000197713_25 (sequence is synthesized)
tgcaccaatatttgactcaaatttgcttgctttattttgttaggagtaaacagaaagtagcctgtgtttagtcccaaagatagcagtgattttgaataaaggagttttgtgttgcctgga

SEQ ID NO: 719726 - DNA, 62 bp, Artificial Sequence
  ENSG00000197713_26 (sequence is synthesized)
agctaacatgattgtgtctggcagtgctattatgaggagtgaagaccccagatctgtgatca

SEQ ID NO: 719727 - DNA, 120 bp, Artificial Sequence
  ENSG00000197714_0 (sequence is synthesized)
gaaacagtgtggggcctagagcgctgggtgggcgcgttctgcggcctgagcagggacgggtagtgaagcggttacgccccttcttcgcgtcttggcgggagcctgacgccccgcttctcc

SEQ ID NO: 719728 - DNA, 120 bp, Artificial Sequence
  ENSG00000197714_1 (sequence is synthesized)
cctaacgaggtgtcccaccggcgcccgccgaggcctaggcctccgcagccgccctccgtctcctcagccccgacgctgcgccttgggccttgtgcgcatttttttcgggggaaaactgag

SEQ ID NO: 719729 - DNA, 120 bp, Artificial Sequence
  ENSG00000197714_2 (sequence is synthesized)
gctcggagtgcgaaagtcagccgaggtcgccccgcccaggacagagaagggctgtggtcggctgatccgcggcattcccgggatggcggcggcgtggatggctccggcgcaggagtctgt

SEQ ID NO: 719730 - DNA, 120 bp, Artificial Sequence
  ENSG00000197714_3 (sequence is synthesized)
gaccttcgaggatgtggctgtgacatttacccaggaggagtgggggcagttggacgtgacccagagggccttgtacgtggaggtgatgctggagacctgtgggcttctggtcgcactggg

SEQ ID NO: 719731 - DNA, 120 bp, Artificial Sequence
  ENSG00000197714_4 (sequence is synthesized)
tgacagcacaaaacctgagaccgtagagcctatcccttctcatctggccttgcctgaggaagtctcactccaggaacagctggcacagggagtcccaagatactcctatttggggcaggc

SEQ ID NO: 719732 - DNA, 120 bp, Artificial Sequence
  ENSG00000197714_5 (sequence is synthesized)
catggatcaagatgggccatctgaaatgcaggaatactttttgagaccagggacagacccacagagtgagaaactccatgggaaaatgagccttgaacacgaaggtttggcgacagctga

SEQ ID NO: 719733 - DNA, 120 bp, Artificial Sequence
  ENSG00000197714_6 (sequence is synthesized)
tggtatttgttcaatgatgatacagaaccaagtctcaccagaagatgctctctatggatttgactcatatggaccagttacagattccttgattcatgaaggggaaaattcctataaatt

SEQ ID NO: 719734 - DNA, 120 bp, Artificial Sequence
  ENSG00000197714_7 (sequence is synthesized)
cgaggaaatgtttaatgagaattgcttccttgttcagcatgagcagattctccctcgtgtgaagccctatgattgcccagaatgtgggaaagccttcggcaagagcaaacacctccttca

SEQ ID NO: 719735 - DNA, 120 bp, Artificial Sequence
  ENSG00000197714_8 (sequence is synthesized)
gcatcacatcatccatactggggagaagccctataaatgcctggagtgtgggaaagacttcaaccgcaggtcacacctcacacggcaccagcggactcacaatggagataagccctttgt

SEQ ID NO: 719736 - DNA, 120 bp, Artificial Sequence
  ENSG00000197714_9 (sequence is synthesized)
gtgcagtgaatgtggaaggaccttcaatcgcgggtcgcaccttacacggcaccagcgggttcacagtggagagaagccttttgtgtgcaatgaatgtggaaaggcctttacctaccgctc

SEQ ID NO: 719737 - DNA, 120 bp, Artificial Sequence
  ENSG00000197714_10 (sequence is synthesized)
caattttgtcttgcataacaagagccacaatgagaagaaacccttcgcatgcagcgaatgtggaaaaggcttttatgagagtacagccctcattcaacacttcattatccatactgggga

SEQ ID NO: 719738 - DNA, 120 bp, Artificial Sequence
  ENSG00000197714_11 (sequence is synthesized)
gaggccctttaagtgccttgagtgtgggaaggccttcaactgcaggtcacacctcaagcagcatgagcggattcacactggtgagaagccctttgtgtgcagtcaatgtggaaaggcctt

SEQ ID NO: 719739 - DNA, 120 bp, Artificial Sequence
  ENSG00000197714_12 (sequence is synthesized)
cactcactattccacctatgtcctgcatgaaagagcccacactggagaaaagccttttgagtgcaaagaatgtgggaaagcctttagcattcgaaaagacctcattcgacacttcaacat

SEQ ID NO: 719740 - DNA, 120 bp, Artificial Sequence
  ENSG00000197714_13 (sequence is synthesized)
ccacactggagagaagccctatgagtgtttacagtgtggaaaggcttttacccgcatgtcagggctcacaaggcaccagtggattcatactggagagaagccgtatgtatgcatccaatg

SEQ ID NO: 719741 - DNA, 120 bp, Artificial Sequence
  ENSG00000197714_14 (sequence is synthesized)
tgggaaagccttttgtcggaccacaaacctgattcgacactttagcatccacactggagagaagccctatgaatgcgtggagtgcgggaaggccttcaaccgcaggtcacccctcacaag

SEQ ID NO: 719742 - DNA, 120 bp, Artificial Sequence
  ENSG00000197714_15 (sequence is synthesized)
gcaccagcggattcacactgcagagaagtcccacgaacccatccagagtgggaacgtttcttgtgagagcacagatctcattcaacactccatcatccacactgagagtagcccagtgag

SEQ ID NO: 719743 - DNA, 120 bp, Artificial Sequence
  ENSG00000197714_16 (sequence is synthesized)
atggaaacgccttcaattgccgctcattcctcctcactcgacatcaacggattcatagtggaagaaaccctaccattgtaacagatgtggaaagactttttacgtacacttcagtcaaca

SEQ ID NO: 719744 - DNA, 120 bp, Artificial Sequence
  ENSG00000197714_17 (sequence is synthesized)
tccaagaattcctattagcgaaatagttttttaatataaccactgaagaaaatctgtggtgagaggaaacatcttaccatctggtcattcatactgaagagaaactccataagtatcatc

SEQ ID NO: 719745 - DNA, 120 bp, Artificial Sequence
  ENSG00000197714_18 (sequence is synthesized)
tctgtgggaaaacctgttttagatcatcatttgtcatctaaacaattatgttagaaattgacacagccaagagtcttattctacatctgataattcacccatgaaagagacccagtggtt

SEQ ID NO: 719746 - DNA, 120 bp, Artificial Sequence
  ENSG00000197714_19 (sequence is synthesized)
actgtgcacttaggaaaaccttcagccacatctttcttattagtttacagtgaaatgttatctcagggacattcaaacaaaggaggaggagtcatagggaagagaaagaaatggaagcac

SEQ ID NO: 719747 - DNA, 120 bp, Artificial Sequence
  ENSG00000197714_20 (sequence is synthesized)
agcttctttcagacttccctgacaagcccatggcaatttgtcatcccctccttattttatttgggagagggaaatgtttcagaaacaaaagggcctcatcccctttattttccctgtgta

SEQ ID NO: 719748 - DNA, 120 bp, Artificial Sequence
  ENSG00000197714_21 (sequence is synthesized)
tacattcactgctgtccagtgctgtagacaaacggtttgtttgaaaacattttgtgaaagcctgctttgttccacagcattgtctccactcttgaggagcagaagcatatatctttatga

SEQ ID NO: 719749 - DNA, 120 bp, Artificial Sequence
  ENSG00000197714_22 (sequence is synthesized)
gaaagatggaggcttgagttatgaaatacttttacatttaaggagataaaggatgtacatatgaatgggcacattttactgcacacttcagacgctttgacttttttaaaaaaattgttt

SEQ ID NO: 719750 - DNA, 120 bp, Artificial Sequence
  ENSG00000197714_23 (sequence is synthesized)
ctccgtgtgtctttaaccacccagtaccatacttttttcttgatctggatctacttgtcaatttcttctttatttttctgtaggatggagatgatattgtagctgtttgtacataatgta

SEQ ID NO: 719751 - DNA, 120 bp, Artificial Sequence
  ENSG00000197714_24 (sequence is synthesized)
atccagggagtcctaattcttccctctgattgtggtttctcagcttttttactgctctttagagagagtaaatagttcaaaattcacctcaacaattttctagaggtcaatttggaacca

SEQ ID NO: 719752 - DNA, 120 bp, Artificial Sequence
  ENSG00000197714_25 (sequence is synthesized)
aaaatgaaataagacatgtagctaaagtaagttaaaagattatgataaactcagaaaataaacacagagaaggaatctcatttttcagtcttacagaagattgtgtgaaggctgactata

SEQ ID NO: 719753 - DNA, 120 bp, Artificial Sequence
  ENSG00000197714_26 (sequence is synthesized)
cataaagtgactggaattttaacaggtgaacctgcatatgtatatgcaggtagttgtcaccatggattgagtccagtcgtagtaattaatatgtttaatcagaatattttggaatttctc

SEQ ID NO: 719754 - DNA, 120 bp, Artificial Sequence
  ENSG00000197714_27 (sequence is synthesized)
ttttggtattctttttgtttcttttattgtttttaattgacaatgtttatggggtttggtgtgatatttcaatacatgtgtgctaagagtaatgatcaaatcagggtaattagcatatcc

SEQ ID NO: 719755 - DNA, 120 bp, Artificial Sequence
  ENSG00000197714_28 (sequence is synthesized)
atctcaatcatttatcatttctttgtgtttagaaacattcacagtctgcttttctagctatttgaaaatataaaatgtattattgccaattgtactcattctgcagtgccacagaacact

SEQ ID NO: 719756 - DNA, 120 bp, Artificial Sequence
  ENSG00000197714_29 (sequence is synthesized)
acaacttattcaaatggaatcttacttgctgtaattttgtatttgttaaccaatctctatctgcctctctgctgtccttcccagcctctggttaccaccattctcaaccttttatgcttg

SEQ ID NO: 719757 - DNA, 120 bp, Artificial Sequence
  ENSG00000197714_30 (sequence is synthesized)
catatgagtagaaacatggagtatttctctttctgtgtctagcttatttcacttaatgtctttcaagctcattcatgttgctgtgaatgacaggtttatttttcatggctgagtagtatt

SEQ ID NO: 719758 - DNA, 120 bp, Artificial Sequence
  ENSG00000197714_31 (sequence is synthesized)
ccattgtgtatatatgccatgttttctttcttcattcatctgataatggacacttagactgatttcttagctattatgaatagtgcttcaataaacataggagtgtagatctctctttga

SEQ ID NO: 719759 - DNA, 120 bp, Artificial Sequence
  ENSG00000197721_0 (sequence is synthesized)
gttgtgtccactaaccggactcagaagggacttccctgctcggctggctttcggtttctctgctcacctccggataaatcacggggtctcccgcgccgctcatggcgcctcccgtccgtc

SEQ ID NO: 719760 - DNA, 120 bp, Artificial Sequence
  ENSG00000197721_1 (sequence is synthesized)
tcgagcgtccctttccttcccggcgctttcctgggttgcttctggcggccctggtgttgctgctgtcctccttctccgatcaatgcaatgtcccggaatggcttccatttgccaggccta

SEQ ID NO: 719761 - DNA, 120 bp, Artificial Sequence
  ENSG00000197721_2 (sequence is synthesized)
ccaacctaactgatgactttgagtttcccattgggacatatctgaactatgaatgccgccctggttattccggaagaccgttttctatcatctgcctaaaaaactcagtctggacaagtg

SEQ ID NO: 719762 - DNA, 120 bp, Artificial Sequence
  ENSG00000197721_3 (sequence is synthesized)
ctaaggacaagtgcaaacgtaaatcatgtcgtaatcctccagatcctgtgaatggcatggcacatgtgatcaaagacatccagttcagatcccaaattaaatattcttgtcctaaaggat

SEQ ID NO: 719763 - DNA, 120 bp, Artificial Sequence
  ENSG00000197721_4 (sequence is synthesized)
accgactcattggttcctcgtctgccacatgcatcatctcaggcaacactgtcatttgggataataaaacacctgtttgtgacagaattatttgtgggctaccccccaccatcgccaatg

SEQ ID NO: 719764 - DNA, 120 bp, Artificial Sequence
  ENSG00000197721_5 (sequence is synthesized)
gagatttcactagcatcagcagagagtattttcactatggatcagtggtgacctaccactgcaatcttggaagcagagggaaaaaggtgtttgagcttgtgggtgagccctccatatact

SEQ ID NO: 719765 - DNA, 120 bp, Artificial Sequence
  ENSG00000197721_6 (sequence is synthesized)
gcaccagcaaagatgatcaagtgggcatctggagtggcccagcccctcagtgcattatacctaacaaatgcacgcctccaaatgtggaaaatggaatattggtatctgacaacagaagct

SEQ ID NO: 719766 - DNA, 120 bp, Artificial Sequence
  ENSG00000197721_7 (sequence is synthesized)
aggtgtcagcctggctttggcatgaaagggccctcccatgtgaagtgccaggccctgaacaaatgggagccagagttaccaagctgctccagggtatgtcagccacctccagatgtcctg

SEQ ID NO: 719767 - DNA, 120 bp, Artificial Sequence
  ENSG00000197721_8 (sequence is synthesized)
catgctgagcgtacccaaagggacaaggacaacttttcacccgggcaggaagtgttctacagctgtgagcccggctacgacctcagaggatctacgtatttgcactgcacaccccaggga

SEQ ID NO: 719768 - DNA, 120 bp, Artificial Sequence
  ENSG00000197721_9 (sequence is synthesized)
gactggagccctgcagcccccagatgtgaagtgaaatcctgtgatgacttcctgggccaacttcctaatggccatgtgctatttccacttaatctccagcttggagcaaaagtggatttt

SEQ ID NO: 719769 - DNA, 120 bp, Artificial Sequence
  ENSG00000197721_10 (sequence is synthesized)
gtttgtgatgaaggatttcaattaaaaggcagctctgctagttactgtgttttggctggaatggaaagcctttggaatagcagtgttccagtgtgtgaacgtaaatcatgtgaaactcct

SEQ ID NO: 719770 - DNA, 120 bp, Artificial Sequence
  ENSG00000197721_11 (sequence is synthesized)
ccagttccagtgaatggcatggtgcatgtgatcacagacatccatgttggatccagaatcaactattcttgtactacagggcaccgactcattggtcactcatctgctgaatgtatcctc

SEQ ID NO: 719771 - DNA, 120 bp, Artificial Sequence
  ENSG00000197721_12 (sequence is synthesized)
tcgggcaatactgcccattggagcatgaagccaccaatttgtcaacaaatcttttgtccaaatcctccagctatccttaatgggagacacacaggaactccccttggagatattccctat

SEQ ID NO: 719772 - DNA, 120 bp, Artificial Sequence
  ENSG00000197721_13 (sequence is synthesized)
ggaaaagaagtatcttacacatgtgacccccacccagacagagggatgaccttcaacctcattggggagagcaccatccgccgcacaagtgaacctcatgggaatggggtttggagcagc

SEQ ID NO: 719773 - DNA, 120 bp, Artificial Sequence
  ENSG00000197721_14 (sequence is synthesized)
cctgcccctcgctgtgaacttcctgttggtgctggttcacatgatgctcttatagttggtaagttttatgaagtgtttgctgaggaattctgtcatctttaacagtaagtacctacttat

SEQ ID NO: 719774 - DNA, 120 bp, Artificial Sequence
  ENSG00000197721_15 (sequence is synthesized)
ggtgctggttcacatgatgctcttatagttggcactttacttggtacgatcatctttattttaatcatcattttcctctattggataattttcaagcacagaaaaagggaccttccttga

SEQ ID NO: 719775 - DNA, 120 bp, Artificial Sequence
  ENSG00000197721_16 (sequence is synthesized)
atccaccgcctttgtctggaaggaagcgcagggcctcacacgcgggatccatcggaagcccaagcattgtcaagctctgctgctgcacctgggtcagcaagatcaatgcaatgtcccgga

SEQ ID NO: 719776 - DNA, 120 bp, Artificial Sequence
  ENSG00000197721_17 (sequence is synthesized)
gggaggatgggggtctcttctccgagaagccgggagcctgttgggcagccggcgcccggtctccccttctgctgcggaggatccctgctggcggtcgtggtgctgctcgcgctgccggtg

SEQ ID NO: 719777 - DNA, 120 bp, Artificial Sequence
  ENSG00000197721_18 (sequence is synthesized)
tcagtggtgacctaccactgcaatcttggaagcagagggagaaaggtgtttgagctcgtgggtgagccctccatatactgcaccagcaaagatgatcaagtggtcgtctggagcggccca

SEQ ID NO: 719778 - DNA, 120 bp, Artificial Sequence
  ENSG00000197721_19 (sequence is synthesized)
gtccctcagtgcattatacctaacaaatgcacacctccaaatgtggaaaatggaatattggtgtctgacaacagaagcttattttccttaaatgaagttgtggagtttaggtgtcagcct

SEQ ID NO: 719779 - DNA, 120 bp, Artificial Sequence
  ENSG00000197721_20 (sequence is synthesized)
ggctttgtcatgaaaggaccccccgcaccgtgtgcaatgccaggccctgaacaaatgggagccggagctaccaagctgctccaggggtgtgtttgcctgaggcctagaagggccctgcaa

SEQ ID NO: 719780 - DNA, 120 bp, Artificial Sequence
  ENSG00000197724_0 (sequence is synthesized)
cccggcccggaccgacccgggcagcgcagcggcggggccgagcggcggcgcggcgcggcaacatggcgacggtgcccgtgtactgcgtctgccggctcccctacgacgttacccgcttca

SEQ ID NO: 719781 - DNA, 120 bp, Artificial Sequence
  ENSG00000197724_1 (sequence is synthesized)
ccgcttcatgatcgagtgcgacgcctgcaaggactggttccacggcagctgtgttggggtggaagaggaggaggcgcccgacatcgacatataccactgcccaaactgtgagaaaaccca

SEQ ID NO: 719782 - DNA, 120 bp, Artificial Sequence
  ENSG00000197724_2 (sequence is synthesized)
tgggaagtccaccttaaagaagaagcggacctggcacaaacacggcccggggcaagcgcctgacgtcaagcccgtgcagaatggcagccagctcttcatcaaggagctgcggagccggac

SEQ ID NO: 719783 - DNA, 120 bp, Artificial Sequence
  ENSG00000197724_3 (sequence is synthesized)
ctttcccagtgctgaagacgtggtggcccgtgtgccaggaagtcagctcacgctgggctacatggaggagcacggcttcaccgagcccatcctcgtccctaagaaagacgggctgggtct

SEQ ID NO: 719784 - DNA, 120 bp, Artificial Sequence
  ENSG00000197724_4 (sequence is synthesized)
ggctgtcccggcccccacgttctatgtcagtgacgtcgagaactacgtggggccggaacggagtgtggatgtgacagatgtcaccaagcagaaggactgcaagatgaagctgaaggagtt

SEQ ID NO: 719785 - DNA, 120 bp, Artificial Sequence
  ENSG00000197724_5 (sequence is synthesized)
tgtggactattactacagcaccaaccgcaagcgggtcctcaacgtcaccaacctcgagttctctgacacccgaatgtccagcttcgtggagccacctgacattgtaaagaaactgtcatg

SEQ ID NO: 719786 - DNA, 120 bp, Artificial Sequence
  ENSG00000197724_6 (sequence is synthesized)
ggtagaaaactactggccagatgatgcattgctggccaagcccaaagtgaccaagtactgcctaatctgcgtgaaggacagttacaccgacttccacatcgactctgggggcgcctctgc

SEQ ID NO: 719787 - DNA, 120 bp, Artificial Sequence
  ENSG00000197724_7 (sequence is synthesized)
ctggtaccacgtgctcaagggggagaagaccttctatctcatcaggccggcctcggccaacatctccctgtatgagcgctggcggtctgcctctaaccacagcgagatgttctttgctga

SEQ ID NO: 719788 - DNA, 120 bp, Artificial Sequence
  ENSG00000197724_8 (sequence is synthesized)
ccaggtcgacaaatgctacaagtgcatcgtcaagcagggccagaccctcttcatcccctcaggctggatctacgccacactcacccctgtggactgcctggccttcgcgggacatttcct

SEQ ID NO: 719789 - DNA, 120 bp, Artificial Sequence
  ENSG00000197724_9 (sequence is synthesized)
ccacagcctgagtgtggagatgcagatgagagcatatgaagtggaaaggaggttgaaactgggcagcctgactcagtttcccaactttgaaactgcgtgctggtacatggggaagcacct

SEQ ID NO: 719790 - DNA, 120 bp, Artificial Sequence
  ENSG00000197724_10 (sequence is synthesized)
gctggaggcattcaaaggctctcacaaatctgggaagcagctgccccctcatctagtccaaggagctaaaattctcaatggtgctttccgatcgtggacgaagaagcaggctttggcaga

SEQ ID NO: 719791 - DNA, 120 bp, Artificial Sequence
  ENSG00000197724_11 (sequence is synthesized)
gcatgaggacgagctcccggagcacttcaaaccttcacagctaatcaaagacctggccaaagagatccggctcagtgagaatgcctccaaagccgtccgaccggaagtgaatactgtcgc

SEQ ID NO: 719792 - DNA, 120 bp, Artificial Sequence
  ENSG00000197724_12 (sequence is synthesized)
ctcgtcagatgaggtgtgtgacggggaccgggagaaggaggagcccccgtctcccattgaggccaccccgcctcaatccctcctggagaaagtgtccaaaaaaaagactcccaaaactgt

SEQ ID NO: 719793 - DNA, 120 bp, Artificial Sequence
  ENSG00000197724_13 (sequence is synthesized)
gaagatgcccaagccatccaaaatccccaagcccccgaagccccctaagcccccaaggccccccaaaacgctgaagctcaaagatggaggcaagaagaaagggaagaagtcccgggagtc

SEQ ID NO: 719794 - DNA, 120 bp, Artificial Sequence
  ENSG00000197724_14 (sequence is synthesized)
agcctcacccaccatccccaacctggacctgctcgaagcccacaccaaggaggcactgaccaagatggagccgcccaagaagggcaaggccacaaagagtgtcctgagtgtgcccaacaa

SEQ ID NO: 719795 - DNA, 120 bp, Artificial Sequence
  ENSG00000197724_15 (sequence is synthesized)
agatgtggttcacatgcagaatgatgtggagaggctggaaattcgagagcaaaccaagagcaagtcagaggccaagtggaagtacaagaacagcaaacctgactccttactgaagatgga

SEQ ID NO: 719796 - DNA, 120 bp, Artificial Sequence
  ENSG00000197724_16 (sequence is synthesized)
agaggagcagaagctagagaagtcgcctctagctggaaacaaagacaataagttctctttttctttctccaacaagaaactcctcggctccaaggctctcaggcccccgacgagccctgg

SEQ ID NO: 719797 - DNA, 120 bp, Artificial Sequence
  ENSG00000197724_17 (sequence is synthesized)
tgtgttcggggccttgcagaacttcaaggaggacaagcccaagcccgtgcgggatgagtatgagtacgtgtcggatgacggtgagctcaagatcgacgagtttcccatcaggaggaagaa

SEQ ID NO: 719798 - DNA, 120 bp, Artificial Sequence
  ENSG00000197724_18 (sequence is synthesized)
aaacgccccgaaaagggacttgtccttcttgttggataagaaggctgtgctgcccacgcctgtcacgaagccaaagctggactcggcagcgtacaagagtgatgactcctcggacgaggg

SEQ ID NO: 719799 - DNA, 120 bp, Artificial Sequence
  ENSG00000197724_19 (sequence is synthesized)
ttcgctgcacatcgacacagacaccaagcccggccgcaatgccagagtcaagaaggagagtgggagctcggcagctggcatcttggacctgctgcaggccagtgaggaggttggcgcgct

SEQ ID NO: 719800 - DNA, 120 bp, Artificial Sequence
  ENSG00000197724_20 (sequence is synthesized)
ggagtacaaccccagcagccagcccccggcctcccccagcacacaggaagccattcagggaatgctgtccatggccaacctgcaggcctccgactcctgcctgcagaccacgtggggagc

SEQ ID NO: 719801 - DNA, 120 bp, Artificial Sequence
  ENSG00000197724_21 (sequence is synthesized)
gacctggacgactacgaggaagagcaggaccacctggatgcctgcttcaaggactcagactacgtttacccctcactggagtcagatgaagacaaccccatctttaagtcccggtcgaag

SEQ ID NO: 719802 - DNA, 120 bp, Artificial Sequence
  ENSG00000197724_22 (sequence is synthesized)
aaaaggaaaggctcagacgacgctccctacagcccaacagcaagggtcggcccatcggtgccaagacaggacaggcctgtgcgtgagggtacacgggtggcttccatcgagaccgggctg

SEQ ID NO: 719803 - DNA, 120 bp, Artificial Sequence
  ENSG00000197724_23 (sequence is synthesized)
gcggctgctgcagctaagttgtcccagcaggaggagcagaaaagcaagaaaaaaaagagtgccaagaggaagctgactcctaacaccacctccccttccacctccacctccatctctgcc

SEQ ID NO: 719804 - DNA, 120 bp, Artificial Sequence
  ENSG00000197724_24 (sequence is synthesized)
ggcaccacctccacctccaccacgccagcctctaccaccccggcctccaccaccccggcctccaccagcacggccagcagccaggcctcgcaggagggcagctcgccagagcccccgcct

SEQ ID NO: 719805 - DNA, 120 bp, Artificial Sequence
  ENSG00000197724_25 (sequence is synthesized)
gagtcgcatagcagcagcctggcggaccatgagtacacagccgctggcaccttcaccggggcccaggctggccgcacctcccagcccatggcccctggggtctttctcacacagaggcgg

SEQ ID NO: 719806 - DNA, 120 bp, Artificial Sequence
  ENSG00000197724_26 (sequence is synthesized)
ccctccgcatcgtctccaaacaacaacaccgctgccaaaggaaaacgtacgaaaaagggcatggcgaccgccaagcagaggcttgggaaaattttgaaaattcatcggaacgggaaacta

SEQ ID NO: 719807 - DNA, 120 bp, Artificial Sequence
  ENSG00000197724_27 (sequence is synthesized)
ctcctttaagatttggaaagccaggatccttctgctccgctcaggacccccggagccccgcgaaaacatctgcctcccaggagggtgccgagctgcctcaccagggagggccttgcctct

SEQ ID NO: 719808 - DNA, 120 bp, Artificial Sequence
  ENSG00000197724_28 (sequence is synthesized)
tcccggctgccatctccccaacaagcgtctgtcccttcagccggcagagcgagcccagcgtggcccctcaatttgaaaatggacgtcttttctcaagttgctaagagtgatctgtcccag

SEQ ID NO: 719809 - DNA, 120 bp, Artificial Sequence
  ENSG00000197724_29 (sequence is synthesized)
aaaagcggccctgcaagtttgaggaccgcttattccactttaaggacagccttcaggccccctgagcgtgggtgtgattgcagggcctctgcagctctgctgagagcatgagtccttcaa

SEQ ID NO: 719810 - DNA, 120 bp, Artificial Sequence
  ENSG00000197724_30 (sequence is synthesized)
ggaagacagagtgagccaatgctcaccagccccagagtcagagctggccacaggctggcagcctccaggggcttaaaaaaaaaggcaaagaacacagaaagaggaggagcaagtgggatg

SEQ ID NO: 719811 - DNA, 120 bp, Artificial Sequence
  ENSG00000197724_31 (sequence is synthesized)
tttatgtccccccttctcttcctgagtgattctcagccaagtccagacagtgctcggcgggtgaggaagggtctgccccgagctttctggttggcaggtggcagcaggatggtgggtgtt

SEQ ID NO: 719812 - DNA, 120 bp, Artificial Sequence
  ENSG00000197724_32 (sequence is synthesized)
cagcctgaatgcccaggagcatttctggggggcagctaagactggcagctgggttggtgtgttagcgggcaggggagccattgtggggtccccaggaaagggcaagggctcagccacatc

SEQ ID NO: 719813 - DNA, 120 bp, Artificial Sequence
  ENSG00000197724_33 (sequence is synthesized)
ttggggtctgggaggcccaggctaagccatgtggcagggaccgtcttgccctgctggccacactctggagaagcacttctcagccaaggcacccctgccctgggactggcagggcagggg

SEQ ID NO: 719814 - DNA, 120 bp, Artificial Sequence
  ENSG00000197724_34 (sequence is synthesized)
caggggcagggacagtggccaggcggcccgaggacttacggtcggcacttctctgttctcccgtgtcagcgtgtggtgtcgcctgcatgggtcgtacctggatggtgtgtccaccatcga

SEQ ID NO: 719815 - DNA, 120 bp, Artificial Sequence
  ENSG00000197724_35 (sequence is synthesized)
cacggaggggctggatttgtttctcaggcaatcctgtattttaattttagatgtatttcctgaagcatatttttcatagaatgtagcgtgtaaatagctttttaaataacttctttttta

SEQ ID NO: 719816 - DNA, 120 bp, Artificial Sequence
  ENSG00000197724_36 (sequence is synthesized)
taagagtaaaagtatctttaggaatttctttctatagagttcttcattaacatttatacgagttttttgctgagtcagatggacagttgggttctgatgctttttccttctcctttcctt

SEQ ID NO: 719817 - DNA, 120 bp, Artificial Sequence
  ENSG00000197724_37 (sequence is synthesized)
ttattattattatttttttcttttaagaactaaggtattgcctgaaaaacaagtgatgtctgtgcagccttacactctgtctttacagaagcaaatagtacacaaaagatctatttcaga

SEQ ID NO: 719818 - DNA, 120 bp, Artificial Sequence
  ENSG00000197724_38 (sequence is synthesized)
cacattttgaagatgaatcttcaactttaataccagctctttgttttccttgtatgatgaggggattgggggatacagttattttactagcaccttgtgaagtgtttccgtgttttgtga

SEQ ID NO: 719819 - DNA, 120 bp, Artificial Sequence
  ENSG00000197724_39 (sequence is synthesized)
tgctgtaatttattaatgtttgtagctttttatatttgtacatttcttatgagctttgtttatatacccattacctggatgtttttgtccactgggagaggcagcttggtggaggcctta

SEQ ID NO: 719820 - DNA, 120 bp, Artificial Sequence
  ENSG00000197724_40 (sequence is synthesized)
tccactcccacttgtcctgtttggagggacgcagtccctagggcccgagactgggtgggagagggggagtctcacggggccccaggcttattcagaactggtgtttttaaagtttccttt

SEQ ID NO: 719821 - DNA, 120 bp, Artificial Sequence
  ENSG00000197724_41 (sequence is synthesized)
accctgcccttgttgaacatttatataatctaacctggacatcaagctgttctctctctctcttttttttaattttattattattattttggcaacatgtacatttctaacaaagtttat

SEQ ID NO: 719822 - DNA, 120 bp, Artificial Sequence
  ENSG00000197724_42 (sequence is synthesized)
cgtggctattaaagtgttttatttcccaattcatattactcttgtatcgagtccatgaggtctaaggcaacttagatcaaagttttaaaaaagtaaaaatatttcaggttttgtacagaa

SEQ ID NO: 719823 - DNA, 120 bp, Artificial Sequence
  ENSG00000197728_0 (sequence is synthesized)
tacaggcgcccaccaccaggccgggctaaattcttcaatctttaaacgtctggcaactttcacgcctagcgtcgcgtataccggaaaactgcatcgtccagaattgcttccgagtcggcg

SEQ ID NO: 719824 - DNA, 120 bp, Artificial Sequence
  ENSG00000197728_1 (sequence is synthesized)
cggcgcaaggcttgctgggagacacataacctcgattttcttccgccatccggctaaatagtcccatgtgcactttgttccatggataaataaacactaggaacgcatttccaccctaga

SEQ ID NO: 719825 - DNA, 120 bp, Artificial Sequence
  ENSG00000197728_2 (sequence is synthesized)
tttcagcagaaatgctgaatgtaaaggaatatttgagtaaagtgagttgccgttcttgaagcccgtctcctaaggattctcccggtgtccgcgtagggatctcatgctatataggagggc

SEQ ID NO: 719826 - DNA, 61 bp, Artificial Sequence
  ENSG00000197728_3 (sequence is synthesized)
cccggtgtccgcgtagggatctcatgctatataggagggccctgccaggcaccgtctcctc

SEQ ID NO: 719827 - DNA, 120 bp, Artificial Sequence
  ENSG00000197728_4 (sequence is synthesized)
gaaaaataaaatggaaattgtacttaatattgcatgttaagtgtatctgtgccagataaggtggggattttgtgtgttagaccaagtgtgaagtgacacacattattttcatggggaaga

SEQ ID NO: 719828 - DNA, 70 bp, Artificial Sequence
  ENSG00000197728_5 (sequence is synthesized)
accaagtgtgaagtgacacacattattttcatggggaagaaagcttattcatggtcgcccaagctgaatt

SEQ ID NO: 719829 - DNA, 62 bp, Artificial Sequence
  ENSG00000197728_6 (sequence is synthesized)
actatgttgtccaggctggtcttgaacttctgacctcagttagctatttatgtaaattaaac

SEQ ID NO: 719830 - DNA, 86 bp, Artificial Sequence
  ENSG00000197728_7 (sequence is synthesized)
gagcgtcttcgatggtaagtgggtcaccggcgcgaactgtgtgaggatcccagtatcttaaagccttcgcccaacttcgccctttt

SEQ ID NO: 719831 - DNA, 120 bp, Artificial Sequence
  ENSG00000197728_8 (sequence is synthesized)
atcccagtatcttaaagccttcgcccaacttcgcccttttggaggctctgttctttggagcctctcaggcaatttccacgtatttaaggttgttactggtagaagagaattctcttgttt

SEQ ID NO: 719832 - DNA, 120 bp, Artificial Sequence
  ENSG00000197728_9 (sequence is synthesized)
gccgttttgattcttttctgggcagagggtgactttgtgatagagtgcacagcctttactctgaggtaaaggtttgcctgtttcggttatgagattgcaaaaactagaaacttggtaaat

SEQ ID NO: 719833 - DNA, 120 bp, Artificial Sequence
  ENSG00000197728_10 (sequence is synthesized)
ttgacaattcttgtgctattgattatttgaatatttgtgaaaatatacaggtgaggaagaatgtcttcaacgtttcgagaatggaggccgtctagtttggtgtgcaaggatgatgtttgg

SEQ ID NO: 719834 - DNA, 120 bp, Artificial Sequence
  ENSG00000197728_11 (sequence is synthesized)
ataagaacgtcgctttgtttttttccttttatagaaagagcaaggttcagggtaggcattagggcgggtgtaggtgtagaaggaactggattattggtttattgcatttagaatgtcagt

SEQ ID NO: 719835 - DNA, 120 bp, Artificial Sequence
  ENSG00000197728_12 (sequence is synthesized)
ctggtccttgcggtgtcaagatgaactcacgtgggatgttaattcacttgtaaaactgagggttatacatatgtgctcaggtattgggctgaacaggtgctttgggggtgcttttatgtg

SEQ ID NO: 719836 - DNA, 120 bp, Artificial Sequence
  ENSG00000197728_13 (sequence is synthesized)
cccgacaggcatttaaataggtttagttttaattgacgtaaacatgtaaggtgctcttcattcatgtaacaaaaaagcaaggtaggtatataataccagtataactctattttctattcc

SEQ ID NO: 719837 - DNA, 120 bp, Artificial Sequence
  ENSG00000197734_0 (sequence is synthesized)
cccgcaagatgctcacgcgaaaaacccactcttcagtgtctgagaccactccgcagctttcggcctcggtgagcgggtgaactaaacccgggaaaccgctgaaagaccccagcttcgact

SEQ ID NO: 719838 - DNA, 120 bp, Artificial Sequence
  ENSG00000197734_1 (sequence is synthesized)
aggcctagtcgtagcggcggccagcgggagggcgtagccgtagtcttggcccacgtcattctgtgccccgggtcaggtcaccgcccggagggtatgggaagagaaatgaagaagactggt

SEQ ID NO: 719839 - DNA, 79 bp, Artificial Sequence
  ENSG00000197734_2 (sequence is synthesized)
agacccttccgtatcgaggaccccaatcaacaacccacctggcatgatcaaccagagatggggtcccactattcctgcc

SEQ ID NO: 719840 - DNA, 120 bp, Artificial Sequence
  ENSG00000197734_3 (sequence is synthesized)
gtgcccggcccggagaacatgatcttaaccatactgtcttccaagtgaaagattctacctttctaagacatctggagtcagacagacctgagttcaagtcgtgccttcctccccacttta

SEQ ID NO: 719841 - DNA, 120 bp, Artificial Sequence
  ENSG00000197734_4 (sequence is synthesized)
ctgaaccttcagtgagtctttctacctcagaaggctgtgaggatgccatggggtaatgaatgtaaagtgtttaagtgcttggctgacactgagtactaaataaatatcaatttattcttc

SEQ ID NO: 719842 - DNA, 120 bp, Artificial Sequence
  ENSG00000197745_0 (sequence is synthesized)
aggctcctggagtcgaatccaaatcactcattgtgaaagctgagctcacagccgaataagccaccatgaggctgtcagtgtgtctcctgatggtctcgctggccctttgctgctaccagg

SEQ ID NO: 719843 - DNA, 120 bp, Artificial Sequence
  ENSG00000197745_1 (sequence is synthesized)
aaacttaatccacctccagaagctcttgcagccaagttggaagtgaagcactgcaccgatcagatatcttttaagaaacgactctcattgaaaaagtcctggtggaaatagtgaaaaaat

SEQ ID NO: 719844 - DNA, 120 bp, Artificial Sequence
  ENSG00000197745_2 (sequence is synthesized)
gtggtgtgtgacatgtaaaaatgctcaacctggtttccaaagtctttcaacgacaccctgatcttcactaaaaattgtaaaggtttcaacacgttgctttaataaatcacttgccctgca

SEQ ID NO: 719845 - DNA, 120 bp, Artificial Sequence
  ENSG00000197746_0 (sequence is synthesized)
gcattgcagactgcggagtcagacggcgctatgtacgccctcttcctcctggccagcctcctgggcgcggctctagccggcccggtccttggactgaaagaatgcaccaggggctcggca

SEQ ID NO: 719846 - DNA, 120 bp, Artificial Sequence
  ENSG00000197746_1 (sequence is synthesized)
gtgtggtgccagaatgtgaagacggcgtccgactgcggggcagtgaagcactgcctgcagaccgtttggaacaagccaacagtgaaatcccttccctgcgacatatgcaaagacgttgtc

SEQ ID NO: 719847 - DNA, 120 bp, Artificial Sequence
  ENSG00000197746_2 (sequence is synthesized)
accgcagctggtgatatgctgaaggacaatgccactgaggaggagatccttgtttacttggagaagacctgtgactggcttccgaaaccgaacatgtctgcttcatgcaaggagatagtg

SEQ ID NO: 719848 - DNA, 120 bp, Artificial Sequence
  ENSG00000197746_3 (sequence is synthesized)
gactcctacctccctgtcatcctggacatcattaaaggagaaatgagccgtcctggggaggtgtgctctgctctcaacctctgcgagtctctccagaagcacctagcagagctgaatcac

SEQ ID NO: 719849 - DNA, 120 bp, Artificial Sequence
  ENSG00000197746_4 (sequence is synthesized)
cagaagcagctggagtccaataagatcccagagctggacatgactgaggtggtggcccccttcatggccaacatccctctcctcctctaccctcaggacggcccccgcagcaagccccag

SEQ ID NO: 719850 - DNA, 120 bp, Artificial Sequence
  ENSG00000197746_5 (sequence is synthesized)
ccaaaggataatggggacgtttgccaggactgcattcagatggtgactgacatccagactgctgtacggaccaactccacctttgtccaggccttggtggaacatgtcaaggaggagtgt

SEQ ID NO: 719851 - DNA, 120 bp, Artificial Sequence
  ENSG00000197746_6 (sequence is synthesized)
gaccgcctgggccctggcatggccgacatatgcaagaactatatcagccagtattctgaaattgctatccagatgatgatgcacatgcaacccaaggagatctgtgcgctggttgggttc

SEQ ID NO: 719852 - DNA, 120 bp, Artificial Sequence
  ENSG00000197746_7 (sequence is synthesized)
tgtgatgaggtgaaagagatgcccatgcagactctggtccccgccaaagtggcctccaagaatgtcatccctgccctggaactggtggagcccattaagaagcacgaggtcccagcaaag

SEQ ID NO: 719853 - DNA, 120 bp, Artificial Sequence
  ENSG00000197746_8 (sequence is synthesized)
tctgatgtttactgtgaggtgtgtgaattcctggtgaaggaggtgaccaagctgattgacaacaacaagactgagaaagaaatactcgacgcttttgacaaaatgtgctcgaagctgccg

SEQ ID NO: 719854 - DNA, 120 bp, Artificial Sequence
  ENSG00000197746_9 (sequence is synthesized)
aagtccctgtcggaagagtgccaggaggtggtggacacgtacggcagctccatcctgtccatcctgctggaggaggtcagccctgagctggtgtgcagcatgctgcacctctgctctggc

SEQ ID NO: 719855 - DNA, 120 bp, Artificial Sequence
  ENSG00000197746_10 (sequence is synthesized)
acgcggctgcctgcactgaccgttcacgtgactcagccaaaggacggtggcttctgcgaagtgtgcaagaagctggtgggttatttggatcgcaacctggagaaaaacagcaccaagcag

SEQ ID NO: 719856 - DNA, 120 bp, Artificial Sequence
  ENSG00000197746_11 (sequence is synthesized)
gtggaggtgatggatccttccttcgtgtgcttgaaaattggagcctgcccctcggcccataagcccttgttgggaactgagaagtgtatatggggcccaagctactggtgccagaacaca

SEQ ID NO: 719857 - DNA, 120 bp, Artificial Sequence
  ENSG00000197746_12 (sequence is synthesized)
gagacagcagcccagtgcaatgctgtcgagcattgcaaacgccatgtgtggaactaggaggaggaatattccatcttggcagaaaccacagcattggtttttttctacttgtgtgtctgg

SEQ ID NO: 719858 - DNA, 120 bp, Artificial Sequence
  ENSG00000197746_13 (sequence is synthesized)
gggaatgaacgcacagatctgtttgactttgttataaaaatagggctcccccacctcccccatttctgtgtcctttattgtagcattgctgtctgcaagggagcccctagcccctggcag

SEQ ID NO: 719859 - DNA, 120 bp, Artificial Sequence
  ENSG00000197746_14 (sequence is synthesized)
acatagctgcttcagtgccccttttctctctgctagatggatgttgatgcactggaggtcttttagcctgcccttgcatggcgcctgctggaggaggagagagctctgctggcatgagcc

SEQ ID NO: 719860 - DNA, 120 bp, Artificial Sequence
  ENSG00000197746_15 (sequence is synthesized)
acagtttcttgactggaggccatcaaccctcttggttgaggccttgttctgagccctgacatgtgcttgggcactggtgggcctgggcttctgaggtggcctcctgccctgatcagggac

SEQ ID NO: 719861 - DNA, 120 bp, Artificial Sequence
  ENSG00000197746_16 (sequence is synthesized)
cctccccgctttcctgggcctctcagttgaacaaagcagcaaaacaaaggcagttttatatgaaagattagaagcctggaataatcaggctttttaaatgatgtaattcccactgtaata

SEQ ID NO: 719862 - DNA, 120 bp, Artificial Sequence
  ENSG00000197746_17 (sequence is synthesized)
gcatagggattttggaagcagctgctggtggcttgggacatcagtggggccaagggttctctgtccctggttcaactgtgatttggctttcccgtgtctttcctggtgatgccttgtttg

SEQ ID NO: 719863 - DNA, 120 bp, Artificial Sequence
  ENSG00000197746_18 (sequence is synthesized)
gggttctgtgggtttgggtgggaagagggccatctgcctgaatgtaacctgctagctctccgaaggccctgcgggcctggcttgtgtgagcgtgtggacagtggtggccgcgctgtgcct

SEQ ID NO: 719864 - DNA, 120 bp, Artificial Sequence
  ENSG00000197746_19 (sequence is synthesized)
gctcgtgttgcctacatgtccctggctgttgaggcgctgcttcagcctgcacccctcccttgtctcatagatgctccttttgaccttttcaaataaatatggatggcgagctcctaggcc

SEQ ID NO: 719865 - DNA, 120 bp, Artificial Sequence
  ENSG00000197746_20 (sequence is synthesized)
tctggcttcctggtagagggcggcatgccgaagggtctgctgggtgtggattggatgctggggtgtgggggttggaagctgtctgtggcccacttgggcacccacgcttctgtccacttc

SEQ ID NO: 719866 - DNA, 120 bp, Artificial Sequence
  ENSG00000197746_21 (sequence is synthesized)
tggttgccaggagacagcaagcaaagccagcaggacatgaagttgctattaaatggacttcgtgatttttgttttgcactaaagtttctgtgatttaacaataaaattctgttagccaga

SEQ ID NO: 719867 - DNA, 120 bp, Artificial Sequence
  ENSG00000197746_22 (sequence is synthesized)
actggcacatatgcactgcttcagacacgagccctttaacatggaaactggaatctgccccgttgtgggagggggagagggaggtagccttgacctgggcccagggtgctgtccagctcc

SEQ ID NO: 719868 - DNA, 120 bp, Artificial Sequence
  ENSG00000197746_23 (sequence is synthesized)
tgtagatagggtgtctggaaagggaggccccaggacccagtgggctgggaatgccaggagctctcagggaacagtgtatccagggcctgcctggccttttgtgccccactatgctcggac

SEQ ID NO: 719869 - DNA, 120 bp, Artificial Sequence
  ENSG00000197747_0 (sequence is synthesized)
actccctgaaggaaaaggagaactgtgccatctcagagggcattttccaagaggaagcttcaacggaccacaccaaaatgccatctcaaatggaacacgccatggaaaccatgatgttta

SEQ ID NO: 719870 - DNA, 120 bp, Artificial Sequence
  ENSG00000197747_1 (sequence is synthesized)
catttcacaaattcgctggggataaaggctacttaacaaaggaggacctgagagtactcatggaaaaggagttccctggatttttggaaaatcaaaaagaccctctggctgtggacaaaa

SEQ ID NO: 719871 - DNA, 120 bp, Artificial Sequence
  ENSG00000197747_2 (sequence is synthesized)
ccagtgtagagatggcaaagtgggcttccagagcttcttttccctaattgcgggcctcaccattgcatgcaatgactattttgtagtacacatgaagcagaagggaaagaagtaggcaga

SEQ ID NO: 719872 - DNA, 120 bp, Artificial Sequence
  ENSG00000197747_3 (sequence is synthesized)
aatgagcagttcgctcctccctgataagagttgtcccaaagggtcgcttaaggaatctgccccacagcttcccccatagaaggatttcatgagcagatcaggacacttagcaaatgtaaa

SEQ ID NO: 719873 - DNA, 120 bp, Artificial Sequence
  ENSG00000197747_4 (sequence is synthesized)
aataaaatctaactctcatttgacaagcagagaaagaaaagttaaataccagataagcttttgatttttgtattgtttgcatccccttgccctcaataaataaagttcttttttagttcc

SEQ ID NO: 719874 - DNA, 120 bp, Artificial Sequence
  ENSG00000197747_5 (sequence is synthesized)
acccacccgccgcacgtactaaggaaggcgcacagcccgccgcgctcgcctctccgccccgcgtccagctcgcccagctcgcccagcgtccgccgcgcctcggccaaggcttcaacggac

SEQ ID NO: 719875 - DNA, 120 bp, Artificial Sequence
  ENSG00000197747_6 (sequence is synthesized)
aaaaggagtgctgaagccaatcaccataatcaaaaagaccctctggctgtggacaaaataatgaaggacctggaccagtgtagagatggcaaagtgggcttccagagcttcttttcccta

SEQ ID NO: 719876 - DNA, 120 bp, Artificial Sequence
  ENSG00000197747_7 (sequence is synthesized)
tagactgaaatgcaagcccttctttccctaccacaattgtagtcacctgaaaagattgtttctgtgcttggtgttgaataatgcattaacctgtaaagggtgagaggagatacggtaaaa

SEQ ID NO: 719877 - DNA, 120 bp, Artificial Sequence
  ENSG00000197748_0 (sequence is synthesized)
acgggtgtacacagcagcggcgtcgcggcccgcagccccgcggcggcggaaaggtaaccgacccgccctggggtgctgcgtgcgctgcctgctcccgcctgaggaaaacactgcccatgg

SEQ ID NO: 719878 - DNA, 120 bp, Artificial Sequence
  ENSG00000197748_1 (sequence is synthesized)
cgcaaggccgggagcgcgacgaaggcccccactccgccggcggcgcgtccttgtccgtgagatgggtgcaaggattccctaagcagaatgttcattttgtcaacgacaacaccatttgct

SEQ ID NO: 719879 - DNA, 120 bp, Artificial Sequence
  ENSG00000197748_2 (sequence is synthesized)
acccttgtgggaattatgtaatatttattaatattgaaaccaagaaaaagactgtactgcagtgtagtaatggaattgtgggcgtcatggcaactaacatcccctgtgaagttgtggctt

SEQ ID NO: 719880 - DNA, 120 bp, Artificial Sequence
  ENSG00000197748_3 (sequence is synthesized)
tttctgaccggaagctaaaacctctcatctacgtatacagctttccaggattgaccagaaggaccaaattgaaaggcaacattctcctggactacactttactttcattcagttactgtg

SEQ ID NO: 719881 - DNA, 120 bp, Artificial Sequence
  ENSG00000197748_4 (sequence is synthesized)
gcacctacctggctagttactcctctctcccagaatttgaactggccctttggaactgggaatcgagtatcattttgtgtaagaaatcacagcctggaatggatgtgaaccaaatgtctt

SEQ ID NO: 719882 - DNA, 120 bp, Artificial Sequence
  ENSG00000197748_5 (sequence is synthesized)
ttaaccccatgaactggcgccagctgtgcttatcaagtccaagtacagtgagcgtgtggaccattgaaagaagtaaccaggagcattgtttcagagcaaggtcggtgaaattacctctag

SEQ ID NO: 719883 - DNA, 120 bp, Artificial Sequence
  ENSG00000197748_6 (sequence is synthesized)
aagatgggtcattttttaatgaaacggatgtcgttttcccccagtcgttgccgaaagatctcatctatggtcccgtgctgccactgtcagccattgccgggctggtaggcaaagaggcag

SEQ ID NO: 719884 - DNA, 120 bp, Artificial Sequence
  ENSG00000197748_7 (sequence is synthesized)
agactttccggccgaaagatgatctatatcctttgcttcacccgactatgcattgctggactccaacaagtgacttgtacattggctgtgaagagggtcatcttttaatgattaatggag

SEQ ID NO: 719885 - DNA, 120 bp, Artificial Sequence
  ENSG00000197748_8 (sequence is synthesized)
acaccttgcaagtgactgtacttaataagatagaagaggaatcgccattggacagaagaaattttatcagtccagtaaccttggtatatcagaaggagggcgtgctggcttctggaattg

SEQ ID NO: 719886 - DNA, 120 bp, Artificial Sequence
  ENSG00000197748_9 (sequence is synthesized)
atggctttgtgtattcttttattattaaagatagaagttacatgatcgaggattttcttgagattgaaagacctgtagaacatatgacattttctcccaattatacagtgttgctgattc

SEQ ID NO: 719887 - DNA, 120 bp, Artificial Sequence
  ENSG00000197748_10 (sequence is synthesized)
aaacagacaagggatctgtttatatctacacttttggtaaggagccaaccttaaataaagtcctagatgcttgtgatgggaaatttcaggcaattgactttatcacacctggaacccaat

SEQ ID NO: 719888 - DNA, 120 bp, Artificial Sequence
  ENSG00000197748_11 (sequence is synthesized)
acttcatgacacttacatattcaggggaaatttgtgtttggtggctggaggattgtgcttgtgtaagcaagatttatctgaataccctagcaacggttctggcttgctgtccatcctccc

SEQ ID NO: 719889 - DNA, 120 bp, Artificial Sequence
  ENSG00000197748_12 (sequence is synthesized)
tctctgcagccgtgggcacggaggatggctcggtctacttcatcagcgtatatgataaggaatcccctcaggtcgtgcacaaggcctttctctcggaatcgtccgtgcagcacgtcgttt

SEQ ID NO: 719890 - DNA, 120 bp, Artificial Sequence
  ENSG00000197748_13 (sequence is synthesized)
atgatcagcaaggaatatttctgttagttggaacagcagaaggaaaagtctttattatcaatgccaactcctcaagctcatttcagattattggattcacagaggtggccaaagacattt

SEQ ID NO: 719891 - DNA, 120 bp, Artificial Sequence
  ENSG00000197748_14 (sequence is synthesized)
tacagatatccacagtgtctcttttagaaacagacatagtggaagtgatggtgctttcctcgcttccagaagcagggagaagcaggttggagatgttcacactgcctacattactgccac

SEQ ID NO: 719892 - DNA, 120 bp, Artificial Sequence
  ENSG00000197748_15 (sequence is synthesized)
aagtttccacaacctttgctgatgaaagaggaaggctgaaagatgaaatcattcataagtacctgtatgagttggagcacgctctgtcctctgcagtcttgggctttcaaagtaaccaaa

SEQ ID NO: 719893 - DNA, 120 bp, Artificial Sequence
  ENSG00000197748_16 (sequence is synthesized)
tatatggcttctgtagtcaagtgccatacatctgtagctaccttcttcctgaagaagaacataccggtatctacattcttaaaccatacaaaaaagtacaaagcagacagtatggacctg

SEQ ID NO: 719894 - DNA, 120 bp, Artificial Sequence
  ENSG00000197748_17 (sequence is synthesized)
gactgctctatctgtcttcacatggattgtggctcataacaatagctaaatgtggaattctgtgtatccgagacgtttatactttggaaacatttgcttggtgtcggagtcattctcacc

SEQ ID NO: 719895 - DNA, 120 bp, Artificial Sequence
  ENSG00000197748_18 (sequence is synthesized)
agggtcatgggattcagtcaatgagaatttcaatggatggacaaaacattctggtgaatgggagagatgatggcacccttgtctacctaaagtggaagcgatttggaggacacctagcca

SEQ ID NO: 719896 - DNA, 120 bp, Artificial Sequence
  ENSG00000197748_19 (sequence is synthesized)
gtgaaattctggactattaccagaaactattaatttccctgagcagcgccatggacaaggagaatcattatttaagcacaacaccaaaagtttccgtagatttgggatccgattctgaac

SEQ ID NO: 719897 - DNA, 120 bp, Artificial Sequence
  ENSG00000197748_20 (sequence is synthesized)
acacaaaacagaaggcaagcactgacttatcacaagatgaattagttctaaccgatgttaagaaggaaattccttggatacaacaaaaaagccaagaggccatcaaaaaggaggttaatc

SEQ ID NO: 719898 - DNA, 120 bp, Artificial Sequence
  ENSG00000197748_21 (sequence is synthesized)
tgttttccaagaaaaggaaagagataaaacaaggaatcaaatcactttccaaaactattctgaatatgatggaagaaaatgacaaactagaaaatattgcaaaattagaccaacaggaat

SEQ ID NO: 719899 - DNA, 120 bp, Artificial Sequence
  ENSG00000197748_22 (sequence is synthesized)
taacttagccaagagctatttggctgaacttatcaaagaagaatgttggaattcgatggctgtgaaaggtcgagctcttaagtgttttcatatcccctgtgtggttgaaaacttcccgat

SEQ ID NO: 719900 - DNA, 120 bp, Artificial Sequence
  ENSG00000197748_23 (sequence is synthesized)
gaaagcgcgcacggttgaagagctgaaagaattggaaagagttttacagcaaaagaagattgaagcagagtgtcttaaactacggaaggaaattgtagaggctcagtctggagttaagtt

SEQ ID NO: 719901 - DNA, 120 bp, Artificial Sequence
  ENSG00000197748_24 (sequence is synthesized)
gattaaacagcgtcatgaagaggatgatgaagaagaggaagaggaagacaagacagtaaaatatagcaatttgcccaattacctgcttggtagtctgagtactgattttggggtagatac

SEQ ID NO: 719902 - DNA, 120 bp, Artificial Sequence
  ENSG00000197748_25 (sequence is synthesized)
ctctttattgtcaagccaattggagcttcattccagagaagagaaaatcaaccaaattatattattgaaagatatcatttacaaggtaaaaactgttttcaataatgagtttgacgctgc

SEQ ID NO: 719903 - DNA, 120 bp, Artificial Sequence
  ENSG00000197748_26 (sequence is synthesized)
atataaacaaaaagagtttgaaattgcacgcgtgaaggaaagaaatgttcgaattcgagaaattattttagatctggaattggaagaagcagtctggcaaccagaatttgaagactgtga

SEQ ID NO: 719904 - DNA, 120 bp, Artificial Sequence
  ENSG00000197748_27 (sequence is synthesized)
gaagccagagagaacgcttgttgtgcaagatgaggagattacagcccacaaacacattaagccgtggcacaaagccaaagaattgatcgtgaatcatgaaaaggagcactggcttctgat

SEQ ID NO: 719905 - DNA, 120 bp, Artificial Sequence
  ENSG00000197748_28 (sequence is synthesized)
acaggatgccagtacaagactccgagctctgatggacatgatgggaggagttctggaagtcaagaaggaagatattttgagaatggtgattcctcaacctgctttcatggcaaaacctga

SEQ ID NO: 719906 - DNA, 120 bp, Artificial Sequence
  ENSG00000197748_29 (sequence is synthesized)
tgctgtgtggactgaagaagaaagaaaacaattcaaagattatgagaaaaaagtaaaggagttaaatgaagaaagagataagtatagaaagtcattagaagcagaactgaagaaacttca

SEQ ID NO: 719907 - DNA, 120 bp, Artificial Sequence
  ENSG00000197748_30 (sequence is synthesized)
aaactctattcaagaaagcacacaggcctttgatgaacatttgaaaagactttttgaaaggagagtgaaggcagagatggttaccaaccaggaggaactgaaaataagtaaccttgcatt

SEQ ID NO: 719908 - DNA, 120 bp, Artificial Sequence
  ENSG00000197748_31 (sequence is synthesized)
ttctttattgttggatgaagaattaagctctagagaaaaattcctgaacaactaccttacaaggaaacagcacgagaaaagccagacttcagaagctgttcggaaatctagagaagacct

SEQ ID NO: 719909 - DNA, 120 bp, Artificial Sequence
  ENSG00000197748_32 (sequence is synthesized)
ggatgtgtgcaaggagcactatgacaacttactggcagaagacaaagttatggatcgcagctttaaaaaggaattttctgaaattcctggtcatcaagtggatatactctacaaactttt

SEQ ID NO: 719910 - DNA, 120 bp, Artificial Sequence
  ENSG00000197748_33 (sequence is synthesized)
taaacgccgaccaaggatttccaaacagaaaacgcactcagaaacaaccagcgttgtccctttcggagaactaccaggatctggcaagttgaataaggatgcctttgcccagttaatgaa

SEQ ID NO: 719911 - DNA, 120 bp, Artificial Sequence
  ENSG00000197748_34 (sequence is synthesized)
agctatggatgagttggacaatattagtaacatgccagaaggcttggaccctttggtctggaatcatttctgcatgacaagacgagcaaaagtggaaaatgaacagaaagtaaagcagaa

SEQ ID NO: 719912 - DNA, 120 bp, Artificial Sequence
  ENSG00000197748_35 (sequence is synthesized)
agcagctgacttattggaaatggcaactttcctccagaagagagttgaggaggaagagaaggtgcaacaggagattgagagagtgttccatgaactcatcctattacaggaagagaaagt

SEQ ID NO: 719913 - DNA, 120 bp, Artificial Sequence
  ENSG00000197748_36 (sequence is synthesized)
gagattccagttgaatttgacaatccaaattcttcttaaacaaggacaagtagaactggaaaatttccagctagtactggagtattctgatgcaattctcatcaacaagaacataattga

SEQ ID NO: 719914 - DNA, 120 bp, Artificial Sequence
  ENSG00000197748_37 (sequence is synthesized)
agacttgaattctgtgattcggactcaaggacaaaagaaagttgctagcatgatggaaagtaaagatgtacacaaaagaatacttcagattgagtgggaacataagaaaatggagatgga

SEQ ID NO: 719915 - DNA, 120 bp, Artificial Sequence
  ENSG00000197748_38 (sequence is synthesized)
aagggaagatctaaatcagaaggcttgggatattcagatgctatttttttcaagagatcgtcaaaagtacctaaatgaaccaaactatgaggctctgattagtattcagattggaataat

SEQ ID NO: 719916 - DNA, 120 bp, Artificial Sequence
  ENSG00000197748_39 (sequence is synthesized)
ggaacaaaccattgctgttttagataagatgcacaaaaagaatgtggaaaactgcaagaaactactcaaaaaacttggaaagttcagcaatcaaaaagatatagcaaattatgccctaag

SEQ ID NO: 719917 - DNA, 120 bp, Artificial Sequence
  ENSG00000197748_40 (sequence is synthesized)
ctgcaatctacgagaagagttggtagctgtctcagagagaaaagacatctgtaatgcaatggggtctaaactgacttgtgaaaagattgtcaaagaacggtatgaaaacatgatgcaaca

SEQ ID NO: 719918 - DNA, 120 bp, Artificial Sequence
  ENSG00000197748_41 (sequence is synthesized)
gcagaagttaacaaatatttcaaaacaacaagctgaacagatttcaatactacagactgaagttgaaagattaagaatgaaaacatttcctgctcttgttcaaatgtaaaaacgctggca

SEQ ID NO: 719919 - DNA, 120 bp, Artificial Sequence
  ENSG00000197748_42 (sequence is synthesized)
ggaaaacacaaggccaaatcaatcatttaaaaaatcatttcatttgggtaaaatgatttccttttctttcttactgggaaattgaagtagcatgtcctctgagttgcatgttttagataa

SEQ ID NO: 719920 - DNA, 120 bp, Artificial Sequence
  ENSG00000197748_43 (sequence is synthesized)
aaaattgtttaattttagccttaattgtatacaaatttttgtcctgcatgaataaatgtgtaaaataccatgaattgctgtttttattcaagaataaacaagacttgaagtcagaaagta

SEQ ID NO: 719921 - DNA, 120 bp, Artificial Sequence
  ENSG00000197748_44 (sequence is synthesized)
atgttggatggtaatttcttgatatgtgattttcagatagtattattatcatcattacatgacaggaatgaggagcagagtatgctgcacagtggtactctacttgtcaagactctaggt

SEQ ID NO: 719922 - DNA, 120 bp, Artificial Sequence
  ENSG00000197748_45 (sequence is synthesized)
tgtaaatgaaaaaatacccaatttaaaaggcctaaattacaaagagctattggtttatttttgtgcatgtaactgaaagggcaaggagtgaatctgaataaaagagctaccatgatgcca

SEQ ID NO: 719923 - DNA, 120 bp, Artificial Sequence
  ENSG00000197748_46 (sequence is synthesized)
aattctagtgaagccatcctttcttttaattttaagttttacgtgtttcatttgttttgaatgttaatatattcacacagttcaacactcaaaaggtacagagggctgtgtagtaaagta

SEQ ID NO: 719924 - DNA, 120 bp, Artificial Sequence
  ENSG00000197748_47 (sequence is synthesized)
ccccccatacccaggtctgtccttgcaggcagcctggtaccaatttctcatgtctctcctgagatgttttatccatgaacaagcaaaacataataagcacttctttttacttgtatcaat

SEQ ID NO: 719925 - DNA, 120 bp, Artificial Sequence
  ENSG00000197748_48 (sequence is synthesized)
ggccatcatgtgtgtatagtgtgccaggcacttctgctgtattaactccatgaggtaaacactcttgttgtctctatttgacaggtgaggaagataaggcacaaggattttaaataactt

SEQ ID NO: 719926 - DNA, 120 bp, Artificial Sequence
  ENSG00000197748_49 (sequence is synthesized)
gctcaatagtacacagatagtgaatggcaaatgttgggatttgaacccaggtagttgggctgcagagtcactgcctttgctcttaaaaggagaaaactatgtacaatgcctcatttcttt

SEQ ID NO: 719927 - DNA, 120 bp, Artificial Sequence
  ENSG00000197748_50 (sequence is synthesized)
tttcacttaatcgtatatcttggagaatgttttatatccacacataaagaccagcctgattatttgtatagccacatagtattccattatatgaatatactatcattttttaaaaacggt

SEQ ID NO: 719928 - DNA, 120 bp, Artificial Sequence
  ENSG00000197748_51 (sequence is synthesized)
atattaatgaacatttagagtatttcaaaacttttgaagcaatacttttaagatgataatatagagacattagatttggacttgtaggtgctatcattattactgtttctttttaattta

SEQ ID NO: 719929 - DNA, 120 bp, Artificial Sequence
  ENSG00000197748_52 (sequence is synthesized)
ttatattattaggtattaataagaacagacatttgtattctgctttacagcttgagatcactgtagcttgtggcatgtgatcctcaaaacaccagtcagaaaggtgttattcttatccct

SEQ ID NO: 719930 - DNA, 120 bp, Artificial Sequence
  ENSG00000197748_53 (sequence is synthesized)
attagacaaattagggaattcagggttagagaggtgaggaaaagcattgtccaagattacacattacacagctagcacactgaggagctggccctgccactgtggactgcccagctccac

SEQ ID NO: 719931 - DNA, 120 bp, Artificial Sequence
  ENSG00000197748_54 (sequence is synthesized)
caccctagctcagtggggaaggatggataacctccttccatttaccccctgcctttctgcactgtcatttttttgtgcctttcctttctcagatcctcttattctaatttacatcttccc

SEQ ID NO: 719932 - DNA, 120 bp, Artificial Sequence
  ENSG00000197748_55 (sequence is synthesized)
actttttctaatttgataaagttgtagacatgtttcactacattcttcctcccactgccaggtaccagacacagggtaatgaaatgtcacacccaccactaatttgagaattgcttattt

SEQ ID NO: 719933 - DNA, 120 bp, Artificial Sequence
  ENSG00000197748_56 (sequence is synthesized)
gcgcttgaaacatcaagaaagctctaccgacagacatgtttcattcacttatgatgaaccaactgcccatctttactgaatcttcttgactgtatttattaaagttgcaatttggaaata

SEQ ID NO: 719934 - DNA, 120 bp, Artificial Sequence
  ENSG00000197748_57 (sequence is synthesized)
tgtattcattcatttaaccagtatttaataagaagcctctgtgatatcaagcatattctaagccaggagtgtttcaaaatatatctgtgagttatttttcttccaacagtttacatttgc

SEQ ID NO: 719935 - DNA, 120 bp, Artificial Sequence
  ENSG00000197753_0 (sequence is synthesized)
ctcgggagccgtgagccgggaagagggagacgggcagggcggcgccagcaggccctggtgggcttgggaggaggcaggagactggagacagcctcggctagagcggacacaggcacctgg

SEQ ID NO: 719936 - DNA, 120 bp, Artificial Sequence
  ENSG00000197753_1 (sequence is synthesized)
caagctttccttgaccaaatcaaggttgtccttgtcctattaagcctcttccccttgccttgaagggacctcacctggtgccctgacctcagcctcctccccaaaccccgctggggagtg

SEQ ID NO: 719937 - DNA, 120 bp, Artificial Sequence
  ENSG00000197753_2 (sequence is synthesized)
acctgcttctaggcctccatccacaaagctacggacttgcagcccacgggaccccagcccagggcctgctgccctcaccatggtgaaattgctgccggcccaggaggcagccaagatcta

SEQ ID NO: 719938 - DNA, 120 bp, Artificial Sequence
  ENSG00000197753_3 (sequence is synthesized)
ccataccaactatgtgcggaactcgcgagccgtgggcgtgatgtggggtaccctcaccatctgcttctccgtactggtcatggccctcttcatccagccctactggatcggcgacagcgt

SEQ ID NO: 719939 - DNA, 120 bp, Artificial Sequence
  ENSG00000197753_4 (sequence is synthesized)
caacacaccgcaggcaggctacttcggccttttctcctactgcgtgggtaacgtgctgtcctccgagctcatctgcaagggcggccccctagacttctcctccatcccctctagagcctt

SEQ ID NO: 719940 - DNA, 120 bp, Artificial Sequence
  ENSG00000197753_5 (sequence is synthesized)
caagactgccatgttctttgtggccttgggcatgttcctcatcattggctccatcatctgcttcagcctgttcttcatctgcaacacggccacagtctataagatctgtgcatggatgca

SEQ ID NO: 719941 - DNA, 120 bp, Artificial Sequence
  ENSG00000197753_6 (sequence is synthesized)
gctggctgcggccacaggcctaatgattggctgcctggtctaccctgatggttgggactcaagtgaggtgcggcgcatgtgtggggagcagacgggcaagtacacgctgggccactgcac

SEQ ID NO: 719942 - DNA, 120 bp, Artificial Sequence
  ENSG00000197753_7 (sequence is synthesized)
catccgctgggccttcatgctggccatcctcagcattggcgacgccctcatcctctccttcctggccttcgtgttgggctaccggcaggacaagctcctccctgacgactacaaggcaga

SEQ ID NO: 719943 - DNA, 120 bp, Artificial Sequence
  ENSG00000197753_8 (sequence is synthesized)
ttcccagacacaggaaaactagggaatcaaattcttcagagataagaacttgttcttccaagtttccttgttcctggctactataggcctgaagcctgaagccttttattataacactaa

SEQ ID NO: 719944 - DNA, 120 bp, Artificial Sequence
  ENSG00000197753_9 (sequence is synthesized)
aactggacagtctcctgagacaagacctcctactgtactctttctggggaagcagaactgcagtgacccacttcaaagatattcagaggctgagcggtgcagggagtgctcagttgctgg

SEQ ID NO: 719945 - DNA, 120 bp, Artificial Sequence
  ENSG00000197753_10 (sequence is synthesized)
ggatgggatccaagtccatttcttagttccacacagcagcaaatcgcttcaccttcttgaagcctctcctctgtaaagcgagagggctaaatgggtccatctctaggggccttccctccc

SEQ ID NO: 719946 - DNA, 120 bp, Artificial Sequence
  ENSG00000197753_11 (sequence is synthesized)
acacacactctctctctctctcaaacacacacaaatgcccaaccagctctaagagggcactgaagaggtggctggacatgtgctgggtcatttttagggtgaggtgtagggggtcttttg

SEQ ID NO: 719947 - DNA, 120 bp, Artificial Sequence
  ENSG00000197753_12 (sequence is synthesized)
cttctcccttctcatattttgttttcttattgctgctcagaggggggtaaggaatggaggggccatcagaacttgaatcctttaacatccaccaggaagttttatgaagagtgggtgata

SEQ ID NO: 719948 - DNA, 120 bp, Artificial Sequence
  ENSG00000197753_13 (sequence is synthesized)
ggatctaaaatctctgcagacttttttcctcccgggagccaaatatcacatttccttatggtgcccacactgactcaaccagaactggctaccagcttcagaaatgtgttacttatgttc

SEQ ID NO: 719949 - DNA, 120 bp, Artificial Sequence
  ENSG00000197753_14 (sequence is synthesized)
aagtaatttgttataggaatagatgacatttttttttttcaaaaactttggatttggcatatagtcatctatagggggattggttccaggatcccctgcagatgccaaaatacatggatg

SEQ ID NO: 719950 - DNA, 64 bp, Artificial Sequence
  ENSG00000197753_15 (sequence is synthesized)
tggttccaggatcccctgcagatgccaaaatacatggatgcccaagtcctcagctaaaaatagc

SEQ ID NO: 719951 - DNA, 120 bp, Artificial Sequence
  ENSG00000197753_16 (sequence is synthesized)
aggttgataatgatcccccgggggccaggagctgcataggccacagagagggcgacaagcaggaggatcaggatcttctccatgggctggccgtgggcagaggcacagctgtggccaatc

SEQ ID NO: 719952 - DNA, 85 bp, Artificial Sequence
  ENSG00000197753_17 (sequence is synthesized)
catgggctggccgtgggcagaggcacagctgtggccaatctgctgtggggcggttcctgataaggaaactgcacctctgcttccc

SEQ ID NO: 719953 - DNA, 120 bp, Artificial Sequence
  ENSG00000197753_18 (sequence is synthesized)
aaatgaccttattgatagggaagcacagttataaaataagcgctagtcataggtcaattttgattaaatcaatggtactaagcagtccaaacaacctcaagaactgtagagtccaggact

SEQ ID NO: 719954 - DNA, 120 bp, Artificial Sequence
  ENSG00000197753_19 (sequence is synthesized)
tagttggggcatattctcaatttagacccaagtttaggtcctggtggctcaccagtgtcagtttctgcagtttcatgacagaacagcctttctcaaaactgtactaccgtccagagggag

SEQ ID NO: 719955 - DNA, 120 bp, Artificial Sequence
  ENSG00000197753_20 (sequence is synthesized)
accacaaaaccagaagtttcaggataggtttaggaatcaaatactatctctaaatgtcagcagtgctatggcttcttgcttggcattgcttattttacatttcagttgtttattaagaaa

SEQ ID NO: 719956 - DNA, 120 bp, Artificial Sequence
  ENSG00000197753_21 (sequence is synthesized)
ctgaaccacagtgatagagcagatacttgttctaccctgagttgttccgaggtttatagtcccaaagcaacagagaaacaaatcatgattcttgttcaccaaaacttgtcaatcattcct

SEQ ID NO: 719957 - DNA, 120 bp, Artificial Sequence
  ENSG00000197753_22 (sequence is synthesized)
gataccagtactttaaaaaaaaatctcatggtctcatatatagagttcagtaaaaatactgaaattaaagttaaaaaaaacaaaaaacaaaaaacacagagccagccgcggcagtgctat

SEQ ID NO: 719958 - DNA, 120 bp, Artificial Sequence
  ENSG00000197753_23 (sequence is synthesized)
acgcctgtggtcccagctattcaggaggctagaaaatgaaatactcttcagtgctaaaaagaaatgagctattaagccgtgaagatatggaggaaccttaaatgcatattactaagtgaa

SEQ ID NO: 719959 - DNA, 120 bp, Artificial Sequence
  ENSG00000197753_24 (sequence is synthesized)
agaacctaatctaaaaaggctacatactgtatgattccaactatttgacattatggagacaataaaaatatcagtggttgccagcgagtgggggacgggagggatgaataggcagagcac

SEQ ID NO: 719960 - DNA, 120 bp, Artificial Sequence
  ENSG00000197753_25 (sequence is synthesized)
agaggagttttagagcagtgaaacgatattgtatataataatgatagatacatttgtcaaaacttctaaaagagtgaaatgaaatgtaaactactgactttggttaataatgatgtgcca

SEQ ID NO: 719961 - DNA, 120 bp, Artificial Sequence
  ENSG00000197753_26 (sequence is synthesized)
atgtaggttcattgtttgtaacaaatgtatcactctggagcagcagatcgacagttggggaggctctgtgtgtggggagcatataaaacttatttgtactttttgttcaatttttctgtg

SEQ ID NO: 719962 - DNA, 120 bp, Artificial Sequence
  ENSG00000197753_27 (sequence is synthesized)
ggcatccatgtcactgaggtggcttctgtctgactccaatgtcaataataatagcagtgactaacattaattggccactttccatgtacaagacatcatagtaagcgttttctgtaaatg

SEQ ID NO: 719963 - DNA, 60 bp, Artificial Sequence
  ENSG00000197753_28 (sequence is synthesized)
tgtctgatttcaggagtacccaatgaaggatccgatgaatggctggccagttactcagag

SEQ ID NO: 719964 - DNA, 120 bp, Artificial Sequence
  ENSG00000197753_29 (sequence is synthesized)
caatgaaggatccgatgaatggctggccagttactcagagtaatatgtttatgagttaaatggattgcataacggcaccacttttcctttgtcactgtggtggataaatgacaaagtaga

SEQ ID NO: 719965 - DNA, 120 bp, Artificial Sequence
  ENSG00000197753_30 (sequence is synthesized)
ttccaatctcctgtatagaaaggtggttacccaatagcctcactggtggcttgctagcagagcctcaagttgcacctctgtggctttctgtaaattcgagtcctacagccacttcgagaa

SEQ ID NO: 719966 - DNA, 120 bp, Artificial Sequence
  ENSG00000197753_31 (sequence is synthesized)
ttttgctcttcagtattacttactggaggaatatgtaatattctaggtcaagtctaggagaggctcatcctaaaaaaaaaattgcaaagtcttttctcaattaaaacaaaaaagcctcaa

SEQ ID NO: 719967 - DNA, 120 bp, Artificial Sequence
  ENSG00000197753_32 (sequence is synthesized)
gtacatctcaatcatgtcaaaattatggttaaaaattgacattatgtagggaaatagcagcagagaatggctaatcttaaaaaataacgaaccaaccaaccaaaaaacaaaacaaaacaa

SEQ ID NO: 719968 - DNA, 120 bp, Artificial Sequence
  ENSG00000197753_33 (sequence is synthesized)
gaccaacaaaaaaaagtgccatcccacccctccccttggttctttcatttggggttatattaaagactcgagcctctgagaaaatcagaaaggcaaagccatagaggaaaactgcttcaa

SEQ ID NO: 719969 - DNA, 120 bp, Artificial Sequence
  ENSG00000197753_34 (sequence is synthesized)
ggccagaattttgggtaaggtaaagaaaaagctgtacatgaaagcaggggactgtttggaaaagaatcagaatctcaagatctatttttcttaaatgggaaagctctgaaacccagatct

SEQ ID NO: 719970 - DNA, 120 bp, Artificial Sequence
  ENSG00000197753_35 (sequence is synthesized)
ccgttctaccatcatcctgatcctttagttatggggcaataaactcaagtgcaatgagtaaagtgccagccatggatacaaaaacaaaaaataaaacaaaacaaccaaccaaaataactc

SEQ ID NO: 719971 - DNA, 120 bp, Artificial Sequence
  ENSG00000197753_36 (sequence is synthesized)
tggtcttagggtaatagaagacatacaggaaaggactgtttatagaacacctgaggttctcaagaaattactattcaatggttctgtttttgcttacattaaaaatcagactgaagattc

SEQ ID NO: 719972 - DNA, 120 bp, Artificial Sequence
  ENSG00000197753_37 (sequence is synthesized)
aaagatcttaactattaaaggatgaaaggaatttgacagtgctttgaacagtgataaaatggtacccaaatttggtgttcatatagctatttaaaaaagacagtagcttaaaagttgcag

SEQ ID NO: 719973 - DNA, 120 bp, Artificial Sequence
  ENSG00000197753_38 (sequence is synthesized)
gaaaaaatgtgaacacagagaacaacagaaacagtccaggaagatgatgcagcccggacacagcaagtttaatgtctctgctgtacatagaattaagaccctttccccctcctcatcctt

SEQ ID NO: 719974 - DNA, 120 bp, Artificial Sequence
  ENSG00000197753_39 (sequence is synthesized)
atgctggcaataggatatgcactagaaaatttgactcttagagtcaatgaataaaaggatgggctcatacaccttcatagctcttttcaaaaaggatgcttataatttaaaggatgtcct

SEQ ID NO: 719975 - DNA, 120 bp, Artificial Sequence
  ENSG00000197753_40 (sequence is synthesized)
aaccaaggccaaattcacctaggatgcccaatggctgtggggatctccacagggtcaagtaagcaaacccaaatgaacatgttggattaaaaaaaaaacaagatctagaaactcttgaag

SEQ ID NO: 719976 - DNA, 120 bp, Artificial Sequence
  ENSG00000197753_41 (sequence is synthesized)
gaagagcttcaccctgaaaagggaagaggaaaatgcttgaaggggaagggcggagggtcagtgtgtgatctctgctgtggtgctgggcaggggcttaggagttaagccaagggtgccgga

SEQ ID NO: 719977 - DNA, 120 bp, Artificial Sequence
  ENSG00000197753_42 (sequence is synthesized)
gacactcggcggcagtggctctcttctcagggatcagctccaacatgggcagtaagaaatctgtgaagccagctgcctcttcctgcgaccactcatacttctccactagaacctcaaaaa

SEQ ID NO: 719978 - DNA, 120 bp, Artificial Sequence
  ENSG00000197753_43 (sequence is synthesized)
ggccccaaggtttcagcttcgtgatatgtttcaggtcacctgcagtgaagacagtacagaaaaagccactgatcaacacagacaaatgacaaggtactcttgtggaaacccacaaactaa

SEQ ID NO: 719979 - DNA, 120 bp, Artificial Sequence
  ENSG00000197753_44 (sequence is synthesized)
cccatgtagtctatgaggaatcaaattttgcaatcagaatctaatccttcattcacaaagcatttcttttctgacatatgcctcagaaagaagtgcctctattcttcatacggctccaaa

SEQ ID NO: 719980 - DNA, 120 bp, Artificial Sequence
  ENSG00000197753_45 (sequence is synthesized)
aatttaaggtaatttgttttctcccctattctaggatttttttggtcccagtcaaactgggtgtgacaatcaagaagtaggtatttactactaaaataaacatgaaatgcctatgtcttc

SEQ ID NO: 719981 - DNA, 120 bp, Artificial Sequence
  ENSG00000197753_46 (sequence is synthesized)
aacatggtcttatatggtgtgcagagacactctagtaccacataccgagaataatttgcttatactctttttttgtgtatgtgctcaatagtttagtaaatgttgctttacagtgaggca

SEQ ID NO: 719982 - DNA, 120 bp, Artificial Sequence
  ENSG00000197753_47 (sequence is synthesized)
gtaaagttaaaacatcatgtcaagcatggataaaagcaacaaaaaaaaccccaaatcctacacagttttcagatacaacagcttcatatactctataccaggggtccccaactctatacc

SEQ ID NO: 719983 - DNA, 120 bp, Artificial Sequence
  ENSG00000197753_48 (sequence is synthesized)
aataccccctatggtaccagtctgcggtctgtcaggtctgcacagcagcaggtcagtggtgggccagcaagcattactgcctaagctccacctcctgtcagctcagtggctgcattagat

SEQ ID NO: 719984 - DNA, 120 bp, Artificial Sequence
  ENSG00000197753_49 (sequence is synthesized)
tctcacaggagcgtgaatcctactgtgaactgcagtagggatctaggttgcatgttccataaaagaacctaatgcctgacaatctgaggtgacacagttttatctccaaaccacccccca

SEQ ID NO: 719985 - DNA, 120 bp, Artificial Sequence
  ENSG00000197753_50 (sequence is synthesized)
ccacaaaaccagtccctggtgccaaaaagattggggaccgctgctctacactatactggagtatcaacctaattgcttctttgaagtgacaactttttaaaagatagtcaattattaata

SEQ ID NO: 719986 - DNA, 120 bp, Artificial Sequence
  ENSG00000197753_51 (sequence is synthesized)
tggagtatcaacctaattgcttctttgaagtgacaactttttaaaagatagtcaattattaatagctaaggcaaatgctgctttaaaattttaagttggccaggcacagtggctcatgcc

SEQ ID NO: 719987 - DNA, 85 bp, Artificial Sequence
  ENSG00000197753_52 (sequence is synthesized)
accagcctgggcaacatagtgaaaccctgcctctaccaaaaatacaaaaaaattagctgtgtatggtggcacatgcctgtggttt

SEQ ID NO: 719988 - DNA, 120 bp, Artificial Sequence
  ENSG00000197753_53 (sequence is synthesized)
aataataataataataattttttttaaacataaaaattttaagtctcttttgtgagcagtgagtgcctatttgattacctacctggtaaacacacatgccttaatctgactgcacatgag

SEQ ID NO: 719989 - DNA, 120 bp, Artificial Sequence
  ENSG00000197753_54 (sequence is synthesized)
gaggaactcttatgaaacattttacaattttcccacctaaaaagaggtttaagaaagggtaatgtttctgaggatggctcctgccaaggattgagaaaagtcatttttctcagcacttct

SEQ ID NO: 719990 - DNA, 120 bp, Artificial Sequence
  ENSG00000197753_55 (sequence is synthesized)
gtagaagttgtgaggaaaaagggaaccatggcacaatgggggtagaaaaaccagaccatttcctagatgcttctaggtcaggttttcacatttcaggttttttttgcaatgcttaagaaa

SEQ ID NO: 719991 - DNA, 120 bp, Artificial Sequence
  ENSG00000197756_0 (sequence is synthesized)
ctttctgggctcggacctaggtcgcggcgacatggccaaacgtaccaagaaagtcgggatcgtcggtaaatacgggacccgctatggggcctccctccggaaaatggtgaagaaaattga

SEQ ID NO: 719992 - DNA, 120 bp, Artificial Sequence
  ENSG00000197756_1 (sequence is synthesized)
aatcagccagcacgccaagtacacttgctctttctgtggcaaaaccaagatgaagagacgagctgtggggatctggcactgtggttcctgcatgaagacagtggctggcggtgcctggac

SEQ ID NO: 719993 - DNA, 120 bp, Artificial Sequence
  ENSG00000197756_2 (sequence is synthesized)
gtacaataccacttccgctgtcacggtaaagtccgccatcagaagactgaaggagttgaaagaccagtagacgctcctctactctttgagacatcactggcctataataaatgggttaat

SEQ ID NO: 719994 - DNA, 120 bp, Artificial Sequence
  ENSG00000197756_3 (sequence is synthesized)
ttatgtaacaaaattgccttggcttgttaactttattagacattctgatgtttgcattgtgtaaatactgttgtattggaaaagcatgccaagatggattattgtaattcagtgtctttt

SEQ ID NO: 719995 - DNA, 120 bp, Artificial Sequence
  ENSG00000197756_4 (sequence is synthesized)
ttagtagtcaaatggtaaaatgcagcataagaatataagtcttccaagttagatatgagtgttagctttttataagtctgctcctgccagtttgactttgagatacattggagccaactg

SEQ ID NO: 719996 - DNA, 120 bp, Artificial Sequence
  ENSG00000197756_5 (sequence is synthesized)
taaactttagtttttaaattacagttagtttttttgtttgtttttgaggcggagtctctgttacccaggctggagtgcagtataccagtcttggcccacttcaacctccacttcttaggt

SEQ ID NO: 719997 - DNA, 66 bp, Artificial Sequence
  ENSG00000197756_6 (sequence is synthesized)
agttttcaccacattggccaggctgttcttgaactgacctcaagcgatccacctgccttggccttc

SEQ ID NO: 719998 - DNA, 76 bp, Artificial Sequence
  ENSG00000197756_7 (sequence is synthesized)
catttaatatttttataatgtgtctaggctgggtgcggtgactcacgcctgaaatcccagcactttgggtggctga

SEQ ID NO: 719999 - DNA, 120 bp, Artificial Sequence
  ENSG00000197756_8 (sequence is synthesized)
ggtgactcacgcctgaaatcccagcactttgggtggctgaggcaggtggattacttgaggccaggagattgagaccagtgtggccaacatagcaaaaacccgtctcgacgaaaaatacaa

SEQ ID NO: 720000 - DNA, 120 bp, Artificial Sequence
  ENSG00000197756_9 (sequence is synthesized)
tgcctgtaatcccagctactttggaggctcaggcacaagaatcacttgaacctacgaggcggaggttgcagtgggccaggatcgtgccactgcactttatttagccaggacaacactctg

SEQ ID NO: 720001 - DNA, 120 bp, Artificial Sequence
  ENSG00000197756_10 (sequence is synthesized)
ttatttagccaggacaacactctgtctccaaaaaaaagtttctgaaggtaaaagatatactaaaggatatacatatactgcctcttctatgatgtttcatttgacctacaccatcagcat

SEQ ID NO: 720002 - DNA, 120 bp, Artificial Sequence
  ENSG00000197756_11 (sequence is synthesized)
cttcaggaaacagtatgaaactaatttcacattaaatgttgcaaacgtctgcaattctccagtttttagtttgcacgtaaggattcgtaggattgatttcagattgacagatggttgtag

SEQ ID NO: 720003 - DNA, 120 bp, Artificial Sequence
  ENSG00000197756_12 (sequence is synthesized)
atggacttctcagtcctcctaattggtatgtcttttatctatcccagagtcagtagtcctttaaggatgcaaatttaattcgataagaatgtggatttacttcatctttaggacagagta

SEQ ID NO: 720004 - DNA, 120 bp, Artificial Sequence
  ENSG00000197756_13 (sequence is synthesized)
aaaacctttatttcacttggtctgacccctatcttctataacttgtttttttgctcattactggcctttgcacggatgtctcccttcacctgtacctcctgcattgcctctggcagaaac

SEQ ID NO: 720005 - DNA, 120 bp, Artificial Sequence
  ENSG00000197756_14 (sequence is synthesized)
atcgctaccccaggagaatacttcactgggtcaggcatttgctagatccatagcagtaactcatctgtggatctcatttgtgtcacaaaatggtactcctactgattttgtaatgtgaag

SEQ ID NO: 720006 - DNA, 120 bp, Artificial Sequence
  ENSG00000197756_15 (sequence is synthesized)
caagtactgtgggtcagtaggggtaggaccaggagtgacaagtcaggattttcaggcttcataggaatgacacagctctccaggtgaatctcctggagaattctccataggatctccagg

SEQ ID NO: 720007 - DNA, 120 bp, Artificial Sequence
  ENSG00000197756_16 (sequence is synthesized)
tgagtgaccaggatttcatgtaagcatagggaattgaatgagcattagatggtctaatgctgcggttaagaacaccaacttagccaaactgcctagatagttgggtgacttgggttaagt

SEQ ID NO: 720008 - DNA, 120 bp, Artificial Sequence
  ENSG00000197756_17 (sequence is synthesized)
gacttaacctctctgcttcagtttcctgtataattcttggtagtagaatggagtatatgctgggtgtttggattattaatttggagtcttacaaagctgctatgttacatgattaggcat

SEQ ID NO: 720009 - DNA, 120 bp, Artificial Sequence
  ENSG00000197756_18 (sequence is synthesized)
ttacaaagctgctatgttacatgattaggcatggaaaacttcggtttttataatcagtgaagtactgctttttgtttgttttctgagagagtgtctgtcacccaggctgaagtgcagtgg

SEQ ID NO: 720010 - DNA, 86 bp, Artificial Sequence
  ENSG00000197756_19 (sequence is synthesized)
ctcccgggttcaagcagttctcgttatgccacaaagctcagctagtttttgtattttttatttttagtagagatgggctttcgcca

SEQ ID NO: 720011 - DNA, 89 bp, Artificial Sequence
  ENSG00000197756_20 (sequence is synthesized)
tgtaagccacctcacccagccatgtattgcttttttatgacagttaaaagaggaaagggcgggggacagtttacagaccagtgaaagtg

SEQ ID NO: 720012 - DNA, 120 bp, Artificial Sequence
  ENSG00000197756_21 (sequence is synthesized)
gaggaaagggcgggggacagtttacagaccagtgaaagtgctgagataaatatttttatacctaaggaaatagtgattttcccaagatgatagggaggcaggtgatgtagatagggctga

SEQ ID NO: 720013 - DNA, 120 bp, Artificial Sequence
  ENSG00000197756_22 (sequence is synthesized)
agattagatttctggctcctatctgtgattttctgctgtaccagtctgccttctattttatgggctcagtattccttacctgcctcttcccatgctaaagatggcccaccttcgttttgt

SEQ ID NO: 720014 - DNA, 120 bp, Artificial Sequence
  ENSG00000197756_23 (sequence is synthesized)
tatttaagcaacttcatcccctggcttgttttcacagtggttttctgagcctttgactctaagtcatctaattgaacattgtgttgtgatataaaaagtaagttaggcttgtgtttttca

SEQ ID NO: 720015 - DNA, 120 bp, Artificial Sequence
  ENSG00000197756_24 (sequence is synthesized)
gcggcgacatggtgagtgtgggtctctgtgcggcctagaactctatctgcctgcatctgtccttgttttcttctcccgcacccatctcctctcctgccttaccccgtgttctctcctgtc

SEQ ID NO: 720016 - DNA, 120 bp, Artificial Sequence
  ENSG00000197756_25 (sequence is synthesized)
tccatgcctttgcaggagacaccattgtcggaagctccccaaggcggaggggcgggggcgccttggctgggcctggcgcgctccagccgggttaacgccgggccttcggagcgcgcggcc

SEQ ID NO: 720017 - DNA, 120 bp, Artificial Sequence
  ENSG00000197756_26 (sequence is synthesized)
agccctgggcactggtttcgttgggttgaatttagggaaaactaggtcatatgtaattcacatgtcggtcacacgtcagtgaggtggaggaacggtgtgtggaggctccagggcctgcct

SEQ ID NO: 720018 - DNA, 120 bp, Artificial Sequence
  ENSG00000197756_27 (sequence is synthesized)
aatcagccagcacgccaagtacacttgctctttctgtggcaaagtaagtaaggcaaagtctctggtgagaggagagggagggcaggtttcttacccaagtgaggcctgacttcaaggtat

SEQ ID NO: 720019 - DNA, 120 bp, Artificial Sequence
  ENSG00000197756_28 (sequence is synthesized)
tttataagccgtgtgctggtgggcagttggaattactcataccgttgattatgagttttaagataaaagtgttgatggtaacttcagattttgtgagacgtttttcatttaaagaaaacc

SEQ ID NO: 720020 - DNA, 120 bp, Artificial Sequence
  ENSG00000197756_29 (sequence is synthesized)
gcttaaacgttaatgggtaaaataatcatttgacagagtgcccccagcctaagccaaacctgctttgtgggaaatgattccatcagttttgtctactgatgtttctgcaccaactcccaa

SEQ ID NO: 720021 - DNA, 120 bp, Artificial Sequence
  ENSG00000197756_30 (sequence is synthesized)
gatgtctgtgcatctaataccattctacttgttctgcgagggatttttgtttgataaaggtttgaacgtttatgtgcaaaatactgcattacagcaatccctgttttgtttttgagggag

SEQ ID NO: 720022 - DNA, 120 bp, Artificial Sequence
  ENSG00000197756_31 (sequence is synthesized)
aaagggaggctttcacatccctgacaataaggtgaatccaaatttagacttctggatgcttgtaagagaaaatacttacttggttcatagtgaaaattggttctcttttatagaccaaga

SEQ ID NO: 720023 - DNA, 120 bp, Artificial Sequence
  ENSG00000197756_32 (sequence is synthesized)
aggcccaaattccaggttgctgctggatgggctagttttaacactttctcaggactgagagaataaggatgcctttgtattttcaggattcttccgtggtggtttattttcagttattga

SEQ ID NO: 720024 - DNA, 120 bp, Artificial Sequence
  ENSG00000197756_33 (sequence is synthesized)
aagagtaaacacaaaactaccaaaatagaagtcggaaatctaattcacagactactttagaatttgatggtcactgggcacattgttgtgaacattgtcatgatactgtgcaggtccatt

SEQ ID NO: 720025 - DNA, 120 bp, Artificial Sequence
  ENSG00000197756_34 (sequence is synthesized)
cagttagttcaaaactgtatttggaacttgaggccatcaggaccaccacagtttcgtctttctgaacagtattagactgctgcaggtttgtgaatctgcaactcagtatcacctgacagg

SEQ ID NO: 720026 - DNA, 120 bp, Artificial Sequence
  ENSG00000197756_35 (sequence is synthesized)
gcgatactacaaacactatactacaaactagcatctagacctgtgttgtccaatacactaagcacatatatggctagtgtaattaaagaattggattttaaagtttcagtcaatttaaac

SEQ ID NO: 720027 - DNA, 120 bp, Artificial Sequence
  ENSG00000197756_36 (sequence is synthesized)
ttaaaccgaagcagtggaaaatgttgaaatatatatatattccttgtgggggtttttattagggcagaatggaaaatgggaactagagtgctttcttggttctgataggaaagtgaatta

SEQ ID NO: 720028 - DNA, 120 bp, Artificial Sequence
  ENSG00000197756_37 (sequence is synthesized)
tttatatacttacaatacaggatggtgattttcaggtatagttcctgaattttatggtaaaacttttgtagtcatttcaatagctgtctttcccaaaggcactttagtgtccgctcttat

SEQ ID NO: 720029 - DNA, 120 bp, Artificial Sequence
  ENSG00000197756_38 (sequence is synthesized)
ttccttaatcattgttctcactgtatcatcttgtaatttattcatttcttgtaatctgtccattcccttttaataagtttaggtcagcctcttagaaccatttctttttcatgggatggg

SEQ ID NO: 720030 - DNA, 120 bp, Artificial Sequence
  ENSG00000197756_39 (sequence is synthesized)
gtagggggagttaaagcttgcttgtccacaactgagttacttataaaaaaaaaagcaactctggttgagaaatcagatgcatgagattgtatgtctaattctgcaagatcctgaaggcat

SEQ ID NO: 720031 - DNA, 120 bp, Artificial Sequence
  ENSG00000197756_40 (sequence is synthesized)
ggctcttaaaggatgccatcatgtagtttagaagccactaatttccgaggagtaatctaatgttggttagatctttggattgactgcagcaaagtattggtagagcagtctatctcagta

SEQ ID NO: 720032 - DNA, 120 bp, Artificial Sequence
  ENSG00000197756_41 (sequence is synthesized)
taattctttctaggaaaatttgggaagcgactttaacacaaaaacgaggcagatttacttatttgccattttctatgttaacatgcttaattatgttggaaactgaatctttctttccag

SEQ ID NO: 720033 - DNA, 120 bp, Artificial Sequence
  ENSG00000197756_42 (sequence is synthesized)
caacattggaggaggacttgtctgggagagcagccattttaaagaagagcacattaagtcacaaacagtcgcagctgatctactttgcagcatcgccatacatgcctaactaaatattga

SEQ ID NO: 720034 - DNA, 120 bp, Artificial Sequence
  ENSG00000197756_43 (sequence is synthesized)
aatcccgggaaaaactcactgtgcatcatgttccagaaactagctttgcaaacagtcttttcagatgtgtacattttgtgtatttgaggcatataatatatatattttcctccatgttca

SEQ ID NO: 720035 - DNA, 120 bp, Artificial Sequence
  ENSG00000197756_44 (sequence is synthesized)
aatctccatgaactctgctaatggaagacgaggaaaaggcaggtaacctaagcaaacccaaatggaccaaatgcaacgctgatggaatctaagtgctcagaccaaggaacggggactgaa

SEQ ID NO: 720036 - DNA, 120 bp, Artificial Sequence
  ENSG00000197756_45 (sequence is synthesized)
ataacagtggacaccacatggcatgatccaatcagattgagccctggaaagatcatcccatggcaagatccagttagattacacttcctggcatcacctcattgcaagatccaagatcat

SEQ ID NO: 720037 - DNA, 120 bp, Artificial Sequence
  ENSG00000197756_46 (sequence is synthesized)
gcctcattaccttctgcctgtaaaacctgccccagcccccagctccaggagacagatttgagccaggctcctgtctttctctgcagccttgcaataaacttttctttctacaaaaaccca

SEQ ID NO: 720038 - DNA, 120 bp, Artificial Sequence
  ENSG00000197756_47 (sequence is synthesized)
ggttgaaactgaggcttcttgttgatgtaatccaacagtggaaatcagtctgactgtggtcccacactctcttaccttctgccatcccgcccaatctgctgttgtgtagctgaggctatg

SEQ ID NO: 720039 - DNA, 120 bp, Artificial Sequence
  ENSG00000197756_48 (sequence is synthesized)
ttgtgttagataagccaagggagccatcagctaggtggttctacatgcataactgcaaaaccagcccaatctggttcaactttgtgttataaaatggttacatttcagttacctccatgt

SEQ ID NO: 720040 - DNA, 120 bp, Artificial Sequence
  ENSG00000197757_0 (sequence is synthesized)
ataaccatctagttccgagtacaaactggagacagaaataaatattaaagaaatcatagaccgaccaggtaaaggcaaagggatgaattcctacttcactaacccttccttatcctgcca

SEQ ID NO: 720041 - DNA, 120 bp, Artificial Sequence
  ENSG00000197757_1 (sequence is synthesized)
cctcgccgggggccaggacgtcctccccaacgtcgccctcaattccaccgcctatgatccagtgaggcatttctcgacctatggagcggccgttgcccagaaccggatctactcgactcc

SEQ ID NO: 720042 - DNA, 120 bp, Artificial Sequence
  ENSG00000197757_2 (sequence is synthesized)
cttttattcgccacaggagaatgtcgtgttcagttccagccgggggccgtatgactatggatctaattccttttaccaggagaaagacatgctctcaaactgcagacaaaacaccttagg

SEQ ID NO: 720043 - DNA, 120 bp, Artificial Sequence
  ENSG00000197757_3 (sequence is synthesized)
acataacacacagacctcaatcgctcaggattttagttctgagcagggcaggactgcgccccaggaccagaaagccagtatccagatttacccctggatgcagcgaatgaattcgcacag

SEQ ID NO: 720044 - DNA, 120 bp, Artificial Sequence
  ENSG00000197757_4 (sequence is synthesized)
tggggtcggctacggagcggaccggaggcgcggccgccagatctactcgcggtaccagaccctggaactggagaaggaatttcacttcaatcgctacctaacgcggcgccggcgcatcga

SEQ ID NO: 720045 - DNA, 120 bp, Artificial Sequence
  ENSG00000197757_5 (sequence is synthesized)
gatcgccaacgcgctttgcctgaccgagcgacagatcaaaatctggttccagaaccgccggatgaagtggaaaaaagaatctaatctcacatccactctctcggggggcggcggaggggc

SEQ ID NO: 720046 - DNA, 120 bp, Artificial Sequence
  ENSG00000197757_6 (sequence is synthesized)
ctctctccctttctccctcgctccccaccaactctcccctaatcacacactctgtatttatcactggcacaattgatgtgttttgattccctaaaacaaaattagggagtcaaacgtgga

SEQ ID NO: 720047 - DNA, 120 bp, Artificial Sequence
  ENSG00000197757_7 (sequence is synthesized)
cctgaaagtcagctctggaccccctccctcaccgcacaactctctttcaccacgcgcctcctcctcctcgctcccttgctagctcgttctcggcttgtctacaggcccttttccccgtcc

SEQ ID NO: 720048 - DNA, 120 bp, Artificial Sequence
  ENSG00000197757_8 (sequence is synthesized)
aggccttgggggctcggaccctgaactcagactctacagattgccctccaagtgaggacttggctcccccactccttcgacgcccccacccccgccccccgtgcagagagccggctcctg

SEQ ID NO: 720049 - DNA, 120 bp, Artificial Sequence
  ENSG00000197757_9 (sequence is synthesized)
ctggcagccggggagggccggaggcccaaggagggcgcgccttggccccacaccaacccccagggcctccccgcagtccctgcctagcccctctgccccagcaaatgcccagcccaggca

SEQ ID NO: 720050 - DNA, 120 bp, Artificial Sequence
  ENSG00000197757_10 (sequence is synthesized)
tgcctagcccctctgccccagcaaatgcccagcccaggcaaattgtatttaaagaatcctgggggtcattatggcattttacaaactgtgaccgtttctgtgtgaagatttttagctgta

SEQ ID NO: 720051 - DNA, 120 bp, Artificial Sequence
  ENSG00000197757_11 (sequence is synthesized)
tttgtggtctctgtatttatatttatgtttagcaccgtcagtgttcctatccaatttcaaaaaaggaaaaaaaagagggaaaattacaaaaagagagaaaaaaagtgaatgacgtttgtt

SEQ ID NO: 720052 - DNA, 120 bp, Artificial Sequence
  ENSG00000197757_12 (sequence is synthesized)
tagccagtaggagaaaataaataaataaataaatcccttcgtgttaccctcctgtataaatccaacctctgggtccgttctcgaatatttaataaaactgatattatttttaaaacttta

SEQ ID NO: 720053 - DNA, 120 bp, Artificial Sequence
  ENSG00000197757_13 (sequence is synthesized)
acattgaatcaggaaatttttctgagaaaggcaggtgggtatgggcaatctgacacgatccaaaaggcttactgccttgcacccctccccgcaaaaaggaagtagagaccaagatcttgg

SEQ ID NO: 720054 - DNA, 120 bp, Artificial Sequence
  ENSG00000197757_14 (sequence is synthesized)
gctttaattttatttttaattgtaaaaagatttcaaataagccaccatttgaactgggaagggaaactagggatggtcttgggggaaaatgtcattctctctaagaaagggaccccgggg

SEQ ID NO: 720055 - DNA, 120 bp, Artificial Sequence
  ENSG00000197757_15 (sequence is synthesized)
atgtgggtcgttttgagggtcctagaagttgaccccaattctcacctctcctgctgcactgcaggattgcccagggtaggtctagtcccctaggttcttcagaccactccaggtcaggtt

SEQ ID NO: 720056 - DNA, 120 bp, Artificial Sequence
  ENSG00000197757_16 (sequence is synthesized)
tggttgggtggctgccagtggtcttccactactgttcctgtctagggtggagtaggagctttcaggggtacggcatagaggggatgttgttctcttactaaaaaaaaaaaaaaaaaaaaa

SEQ ID NO: 720057 - DNA, 120 bp, Artificial Sequence
  ENSG00000197757_17 (sequence is synthesized)
aggtaggggtagggaggcaccctttcaatccctgcaattcaccagccatcactgcctcaaggccacaaatctttgcaaagctttgaattccgcctgatccaaccttaatgcccccattta

SEQ ID NO: 720058 - DNA, 120 bp, Artificial Sequence
  ENSG00000197757_18 (sequence is synthesized)
ttaaggacaatatttaaaactcggcaagccaggagaggcaaccgaccctcagtgcttgaagctttctttcgcctgggcgtccgccctcagctctttctgcgctcgcctgcagcagcctgg

SEQ ID NO: 720059 - DNA, 120 bp, Artificial Sequence
  ENSG00000197757_19 (sequence is synthesized)
cccgtggggagtgggcggtgggtgggggtaggggtggggtgggggtccggggatgctccctctatgagagaattgggtaaacatggcgaccgcggcgcccatttgcacacgctacacaaa

SEQ ID NO: 720060 - DNA, 120 bp, Artificial Sequence
  ENSG00000197757_20 (sequence is synthesized)
tgcatcgcattcccggttgtttgcagaaaatttacagctgagtaataaaagtttacgatcgactcacaagttggattggccacaagaagtcatgtggattccatccatgaacgtgaactt

SEQ ID NO: 720061 - DNA, 120 bp, Artificial Sequence
  ENSG00000197757_21 (sequence is synthesized)
tttattgtggtttgtccgttccgagcgctccgcagaacagtcctccctgtaagagcctaaccattgccagggaaacctgccctgggcgctcccttcattagcagtattttttttaaatta

SEQ ID NO: 720062 - DNA, 120 bp, Artificial Sequence
  ENSG00000197757_22 (sequence is synthesized)
atctgattaataattatttttcccccatttaattttttttcctcccaggtggagttgccgaagctgggggcagctggggagggtggggatgggaggggagagacagaagttgagggcatc

SEQ ID NO: 720063 - DNA, 120 bp, Artificial Sequence
  ENSG00000197757_23 (sequence is synthesized)
tctctcttccttcccgaccctctggcccccaaggggcaggaggaatgcaggagcaggagttgagcttgggagctgcagatgcctccgcccctcctctctcccaggctcttcctcctgccc

SEQ ID NO: 720064 - DNA, 120 bp, Artificial Sequence
  ENSG00000197757_24 (sequence is synthesized)
ccttcttgcaactctccttaattttgtttggcttttggatgattataattatttttatttttgaatttatataaagtatatgtgtgtgtgtgtggagctgagacaggctcggcagcggca

SEQ ID NO: 720065 - DNA, 120 bp, Artificial Sequence
  ENSG00000197757_25 (sequence is synthesized)
cggatctgattgcctggggtgctgggctgggcgcaccccactgctgctgggggtcaccccaagagccccccacccatccaaggaaaggaataaacttaaccgctggaggggcatgaggag

SEQ ID NO: 720066 - DNA, 120 bp, Artificial Sequence
  ENSG00000197763_0 (sequence is synthesized)
gcggattcgcgcgggtggtgagagtggccagcgagggcagcgttcgccgcccctcaggccccgtcccggcgccgcagccgcctgcgtttcggtttgtgagcaggcccggccgggccagga

SEQ ID NO: 720067 - DNA, 120 bp, Artificial Sequence
  ENSG00000197763_1 (sequence is synthesized)
gcgagagcgagactctggagcggtcgccgccgcagtcgcccgggccgggaaaggcgggcgatgcccccaaccgccgctcgggccatgtccgaggggcgcgcgtgttgtcgccgccggggc

SEQ ID NO: 720068 - DNA, 120 bp, Artificial Sequence
  ENSG00000197763_2 (sequence is synthesized)
gccgtgcccgcctgtcgtcccccgggcccagccgctcgtccgaggcccgcgaggagctgcgccgccacctcgtgggcctcatcgagcgcagccgggtggtgatcttcagcaagagctact

SEQ ID NO: 720069 - DNA, 120 bp, Artificial Sequence
  ENSG00000197763_3 (sequence is synthesized)
gtccccatagtactcgggtgaaagaactcttttcttctttgggagtcgaatgtaatgtcttggaacttgatcaagttgatgatggggccagggttcaagaagtgctgtcagaaatcacta

SEQ ID NO: 720070 - DNA, 120 bp, Artificial Sequence
  ENSG00000197763_4 (sequence is synthesized)
atcagaaaactgtgcccaatattttcgtgaataaagtgcatgtaggtggatgtgaccaaactttccaggcatatcagagtggtttgttacagaagctccttcaggaagatttggcatatg

SEQ ID NO: 720071 - DNA, 120 bp, Artificial Sequence
  ENSG00000197763_5 (sequence is synthesized)
attatgatctcatcatcatcggtggtggttctggaggcctttcatgtgcgaaggaagctgccattttgggaaagaaagttatggtgctagactttgttgtcccgtcacctcagggcacat

SEQ ID NO: 720072 - DNA, 120 bp, Artificial Sequence
  ENSG00000197763_6 (sequence is synthesized)
cctggggtcttggtggcacttgtgtaaatgtaggttgtattcctaagaaattgatgcatcaggctgcccttttggggcaggcattatgtgactcaaggaaatttggctgggaatataatc

SEQ ID NO: 720073 - DNA, 120 bp, Artificial Sequence
  ENSG00000197763_7 (sequence is synthesized)
aacaagtgaggcacaactgggagacaatgacaaaagcgattcagaaccacatcagctctctaaactggggctacaggttgtctctgagggaaaaggctgtggcctatgtcaattcctatg

SEQ ID NO: 720074 - DNA, 120 bp, Artificial Sequence
  ENSG00000197763_8 (sequence is synthesized)
gagaatttgttgaacatcataaaataaaggcaaccaataaaaaaggacaggagacttattatactgctgcacagtttgtcatagcaacgggtgaaaggccacggtatttaggaatccaag

SEQ ID NO: 720075 - DNA, 120 bp, Artificial Sequence
  ENSG00000197763_9 (sequence is synthesized)
gagataaagaatactgtattactagtgatgaccttttttctctgccttattgccctggcaaaacattagtggtgggtgcctcttatgttgccctggagtgtgcagggtttctggctggct

SEQ ID NO: 720076 - DNA, 120 bp, Artificial Sequence
  ENSG00000197763_10 (sequence is synthesized)
ttggcctagatgtcacagttatggtacgctcaatccttctccgtggcttcgaccaagaaatggcagaaaaagtgggttcctacatggagcagcatggtgtgaagttcctacggaaattca

SEQ ID NO: 720077 - DNA, 120 bp, Artificial Sequence
  ENSG00000197763_11 (sequence is synthesized)
tacctgtgatggttcaacagttggagaaaggttcacctggaaagctgaaagtgttggctaaatccactgaaggaacagaaacaattgaaggagtctataacacagttttgttagctattg

SEQ ID NO: 720078 - DNA, 120 bp, Artificial Sequence
  ENSG00000197763_12 (sequence is synthesized)
gagaagattggtgtcaaaattaatgagaagagtggaaaaatacctgtaaatgatgtggaacagaccaatgtgccatatgtctatgctgttggtgatattttggaggataagccagagctc

SEQ ID NO: 720079 - DNA, 120 bp, Artificial Sequence
  ENSG00000197763_13 (sequence is synthesized)
actcctgtcgccatacagtcaggcaagctgctagctcagagactttttggggcctctttagaaaagtgtgattatattaatgttccgactacagtgtttactcctctggagtatggttgc

SEQ ID NO: 720080 - DNA, 120 bp, Artificial Sequence
  ENSG00000197763_14 (sequence is synthesized)
tgtggattatctgaagagaaagctattgaagtatataaaaaagagaatctagaaatatatcatactttgttctggcctcttgaatggacagtagctggcagagagaacaacacttgttat

SEQ ID NO: 720081 - DNA, 120 bp, Artificial Sequence
  ENSG00000197763_15 (sequence is synthesized)
gcaaagataatctgcaataaattcgaccatgatcgggtgataggatttcatattcttggaccaaacgccggtgaggttacccaaggatttgcagctgcaatgaaatgtgggctcacaaaa

SEQ ID NO: 720082 - DNA, 120 bp, Artificial Sequence
  ENSG00000197763_16 (sequence is synthesized)
cagctacttgatgacaccattggaattcaccccacatgtggggaggtgttcacgactttggaaatcacaaagtcgtcaggactagacatcactcagaaaggctgctgaggctaggcctgc

SEQ ID NO: 720083 - DNA, 120 bp, Artificial Sequence
  ENSG00000197763_17 (sequence is synthesized)
tgctgtttagttctccttgtcatattctcatttctctcaaagataagaatgctctcggataaaatgagcctgtgctcatgacagctgctctgttactcagggaccagtgcagggctgtct

SEQ ID NO: 720084 - DNA, 120 bp, Artificial Sequence
  ENSG00000197763_18 (sequence is synthesized)
tacgacacttagatgagaaagtagacaaggaaagaggacagcagtgggcatctgccttgtggtcttgctgacagcgagaagcagtgggactgcttccttgacgccttagcttggagcccc

SEQ ID NO: 720085 - DNA, 120 bp, Artificial Sequence
  ENSG00000197763_19 (sequence is synthesized)
gttatgaggtgagccaaggctgactctcgcaagccaggactgagcttccctcggaaagacctttgagtggcaccattcacctaagttagcttttctggtcgctattgtttttatcccctt

SEQ ID NO: 720086 - DNA, 120 bp, Artificial Sequence
  ENSG00000197763_20 (sequence is synthesized)
tgctttgttgtttctgtgaaaatatattttcagttaagaaatgctataaagtagtggttttctagtgcgtgggcctagaattcacacatgctcactggtgaacagtgtctgtgggctgct

SEQ ID NO: 720087 - DNA, 120 bp, Artificial Sequence
  ENSG00000197763_21 (sequence is synthesized)
gtgggctgcatttggatagctgtctgcattagcaggaagctgtacacactgtgtagggttagtcatctcttttcttttttgaggcacatttaacctactgtcaaaacgctgactcatgct

SEQ ID NO: 720088 - DNA, 120 bp, Artificial Sequence
  ENSG00000197763_22 (sequence is synthesized)
tcaccctcacactcactacttggtggtgataaccttgaagctattctcccctaattaatatctcgagactgagcaaaatatctcatgtaagataaaagtacttgaattgctttttcatgt

SEQ ID NO: 720089 - DNA, 120 bp, Artificial Sequence
  ENSG00000197763_23 (sequence is synthesized)
tcatcttaatagtattatttccaaaagtttttaatactgtattatgtgaaatctaactaatttatctgtgaaataattccatcacagtctgtttaatgatgataaagttccataaatgaa

SEQ ID NO: 720090 - DNA, 120 bp, Artificial Sequence
  ENSG00000197763_24 (sequence is synthesized)
gaagatcacagtgaaggataatctgatgaaggaacattgacaaatggacagcctagaatgcaccgttaccgtggaaaacgactgcacatcttgcttcccatcttggatcgggtgatagga

SEQ ID NO: 720091 - DNA, 120 bp, Artificial Sequence
  ENSG00000197766_0 (sequence is synthesized)
agtgtctcagccacagcggcttcaccatgcacagctgggagcgcctggcagttctggtcctcctaggagcggccgcctgcgcggcgccgccccgtggtcggatcctgggcggcagagagg

SEQ ID NO: 720092 - DNA, 120 bp, Artificial Sequence
  ENSG00000197766_1 (sequence is synthesized)
ccgaggcgcacgcgcggccctacatggcgtcggtgcagctgaacggcgcgcacctgtgcggcggcgtcctggtggcggagcagtgggtgctgagcgcggcgcactgcctggaggacgcgg

SEQ ID NO: 720093 - DNA, 120 bp, Artificial Sequence
  ENSG00000197766_2 (sequence is synthesized)
ccgacgggaaggtgcaggttctcctgggcgcgcactccctgtcgcagccggagccctccaagcgcctgtacgacgtgctccgcgcagtgccccacccggacagccagcccgacaccatcg

SEQ ID NO: 720094 - DNA, 120 bp, Artificial Sequence
  ENSG00000197766_3 (sequence is synthesized)
accacgacctcctgctgctacagctgtcggagaaggccacactgggccctgctgtgcgccccctgccctggcagcgcgtggaccgcgacgtggcaccgggaactctctgcgacgtggccg

SEQ ID NO: 720095 - DNA, 120 bp, Artificial Sequence
  ENSG00000197766_4 (sequence is synthesized)
tcaccgagcgcttgatgtgcgcggagagcaatcgccgggacagctgcaagggtgactccgggggcccgctggtgtgcgggggcgtgctcgagggcgtggtcacctcgggctcgcgcgttt

SEQ ID NO: 720096 - DNA, 120 bp, Artificial Sequence
  ENSG00000197766_5 (sequence is synthesized)
gcggcaaccgcaagaagcccgggatctacacccgcgtggcgagctatgcggcctggatcgacagcgtcctggcctagggtgccggggcctgaaggtcagggtcacccaagcaacaaagtc

SEQ ID NO: 720097 - DNA, 120 bp, Artificial Sequence
  ENSG00000197766_6 (sequence is synthesized)
ccgagcaatgaagtcatccactcctgcatctggttggtctttattgagcacctactatatgcagaaggggaggccgaggtgggaggatcattggatctcaggagttcgagatcagcatgg

SEQ ID NO: 720098 - DNA, 120 bp, Artificial Sequence
  ENSG00000197766_7 (sequence is synthesized)
ttcgagatcagcatgggccacgtagcgcgactccatctctacaaataaataaaaaattagctgggcaattggcgggcatggaggtgggtgcttgtagttccagctactcaggaggctgag

SEQ ID NO: 720099 - DNA, 82 bp, Artificial Sequence
  ENSG00000197766_8 (sequence is synthesized)
caggaggctgaggtgggaggatgacttgaacgcaggaggctgaggctgcagtgagttgtaaccttgtctctctctacaaaaa

SEQ ID NO: 720100 - DNA, 120 bp, Artificial Sequence
  ENSG00000197766_9 (sequence is synthesized)
agtgtctcagccacagcggcttcaccatgcacagctgggagcgcctggcagttctggtcctcctaggagcggccgcctgcggtgaggaggcctgggcctgggcggcgccgccccgtggtc

SEQ ID NO: 720101 - DNA, 120 bp, Artificial Sequence
  ENSG00000197768_0 (sequence is synthesized)
ttggggaagagagccaggagactctgatgatgaattctgaccagaaggcagtgaaattcctggcaaatttttacatcaatggaggcaaacactggacccatggtcacctgaggcagacac

SEQ ID NO: 720102 - DNA, 120 bp, Artificial Sequence
  ENSG00000197768_1 (sequence is synthesized)
aaccagagcccacccagcccaaggcatctgtgctgttgttgggcccggagccggggatggcctgggatgagacacagcccccaaagatgaaggagatcccagttggcctcaggttacaga

SEQ ID NO: 720103 - DNA, 120 bp, Artificial Sequence
  ENSG00000197768_2 (sequence is synthesized)
cgggcaccccccaggagtccctgcccacctacacccagaccctgagggaactattgctggagcaacgccccctgatcacagctgacctggaagtccccagccccaccaggtaccaggtgc

SEQ ID NO: 720104 - DNA, 120 bp, Artificial Sequence
  ENSG00000197768_3 (sequence is synthesized)
cgagcccgtccgtacgagagtcctccccacacccccactacagcatcggctgcaagcaccagggccgagagggcggtggccgcagggcatggcagactttgtggttccagagcgaaagcc

SEQ ID NO: 720105 - DNA, 120 bp, Artificial Sequence
  ENSG00000197768_4 (sequence is synthesized)
ccgcttccaagacacctgaaggccacacccacctagggctgcctggggctagggggctgggcctcagggtgcagccccagtccctgcttcaggcctctttgcaggcacctggcaagagat

SEQ ID NO: 720106 - DNA, 120 bp, Artificial Sequence
  ENSG00000197768_5 (sequence is synthesized)
gccctggccccaacacctacaatatccttcctgggagccgcctgcagagcccccgctcgccggccttctcgatgagccgctcccctgcgttcacctcctggctcagcacctcccgaaccc

SEQ ID NO: 720107 - DNA, 120 bp, Artificial Sequence
  ENSG00000197768_6 (sequence is synthesized)
ctggcccagccgcctaccacgtggaggactgcaactcacgcttcccttcggcgcctggcgtggtcatccagggtgtacgcagacccaagcgccacgacacaggccccttctgcacgctct

SEQ ID NO: 720108 - DNA, 120 bp, Artificial Sequence
  ENSG00000197768_7 (sequence is synthesized)
agagccagctgggcacaacctgcttggcccggccaccgagtggaaccatggcctcccccggggctttcccaggcctcccctgggacttggggccccagcctggccttctgaccctctggg

SEQ ID NO: 720109 - DNA, 120 bp, Artificial Sequence
  ENSG00000197768_8 (sequence is synthesized)
caccccgatgcacccttctggctggccaacccttctatgggctgtggacaaggctggcccagcctggatcccccatctgcccatctccccgctacactgagatgctgttggttttcccga

SEQ ID NO: 720110 - DNA, 120 bp, Artificial Sequence
  ENSG00000197768_9 (sequence is synthesized)
cacccagaccctgagggaactatgtgagtgagggtcctggccaccccacccccaagctggtctttggggggctgtgggaggggcccgctgaaaggagcccaggcccagagcttgcttcct

SEQ ID NO: 720111 - DNA, 120 bp, Artificial Sequence
  ENSG00000197768_10 (sequence is synthesized)
gcctttgcctctgtgctgaaacccccacggcctgagggcccctccacccttccctgcgttcacctctaggctcagcacctgtaaggaggcctggagagaggagggctagggctggggcat

SEQ ID NO: 720112 - DNA, 120 bp, Artificial Sequence
  ENSG00000197768_11 (sequence is synthesized)
gggtggacattgtgaagacaagggttcaggggccgagggtgggaaccgggagacaggttcgagtggggactgtcacctgggtggggctcccagccttctctctctccatcctccaactac

SEQ ID NO: 720113 - DNA, 120 bp, Artificial Sequence
  ENSG00000197769_0 (sequence is synthesized)
agtttggaagcagctggaggaatgagttaggttcccggttgcgggacagtttttttttcttttttaaaacagacacagctactgagtgcaatgccgcctccacagaaaatcccaagcgtc

SEQ ID NO: 720114 - DNA, 120 bp, Artificial Sequence
  ENSG00000197769_1 (sequence is synthesized)
agacccttcaagcagaggaaaagcttggcaatcagacaagaggaagttgctggaatccgggcaaagttccccaacaaaatcccggtggtagtggagcgctaccccagggagacgttcctg

SEQ ID NO: 720115 - DNA, 120 bp, Artificial Sequence
  ENSG00000197769_2 (sequence is synthesized)
cccccgctggacaaaaccaagttcctggtcccgcaggagctgaccatgacccagttcctcagcatcatccggagccgcatggtcctgagagccacggaagccttttacttgctggtgaac

SEQ ID NO: 720116 - DNA, 120 bp, Artificial Sequence
  ENSG00000197769_3 (sequence is synthesized)
aacaagagcctggtcagcatgagcgcaaccatggcagagatctacagagactacaaggatgaggatggcttcgtgtacatgacctacgcctcccaggagacatttggctgcctggagtca

SEQ ID NO: 720117 - DNA, 120 bp, Artificial Sequence
  ENSG00000197769_4 (sequence is synthesized)
gcagcccccagggatgggagcagccttgaggacagaccctgcaatcctctctagcccatgtcgggaaggatgtgtgctctgacagacgtgtcagatgctggcagaagggattggttttct

SEQ ID NO: 720118 - DNA, 120 bp, Artificial Sequence
  ENSG00000197769_5 (sequence is synthesized)
atacagtggaggagtctgagaagcagggatgcctggggtgatcagctccaaccagtggcagcagagtggtggctcttcctagtttagtttttgtgctccgtgttcttgtgtccttctaag

SEQ ID NO: 720119 - DNA, 89 bp, Artificial Sequence
  ENSG00000197769_6 (sequence is synthesized)
agtttagtttttgtgctccgtgttcttgtgtccttctaagaaaaatgtgggctgctcttgaaagttatataattatcaattgcctaggc

SEQ ID NO: 720120 - DNA, 65 bp, Artificial Sequence
  ENSG00000197769_7 (sequence is synthesized)
ataaccgtattctaaataagaaatggttggcttgtgtgatggttttgtgtaatgagctagagata

SEQ ID NO: 720121 - DNA, 120 bp, Artificial Sequence
  ENSG00000197769_8 (sequence is synthesized)
gttggcttgtgtgatggttttgtgtaatgagctagagataatattttaagtgtcttctgtggtatatgtgggagggccattaaggagtgggtttcactccctgcatgtgggcaggtgtcc

SEQ ID NO: 720122 - DNA, 80 bp, Artificial Sequence
  ENSG00000197771_0 (sequence is synthesized)
gggagggcgcgagcgaacgcgggcgaggagcggccgagccgctgaagaggagctgggcgccggccgcccggccgcgctcg

SEQ ID NO: 720123 - DNA, 120 bp, Artificial Sequence
  ENSG00000197771_1 (sequence is synthesized)
gcccgcggatcgcctccgcccggtcttcgccggccccggcccctggcgagatgccgtgtggggaggattggctcagccacccgctgggaatcgtgcagggattcttcgcccaaaatggag

SEQ ID NO: 720124 - DNA, 120 bp, Artificial Sequence
  ENSG00000197771_2 (sequence is synthesized)
ttaatcctgactgggagaagaaagtaattgagtattttaaggaaaagctgaaggaaaataatgctcctaagtgggtaccatcactgaacgaagttccccttcattatttgaaacctaata

SEQ ID NO: 720125 - DNA, 120 bp, Artificial Sequence
  ENSG00000197771_3 (sequence is synthesized)
gttttgtgaaatttcgttgcatgattcaggatatgtttgaccctgagttttacatgggagtttatgaaacggttaaccaaaacacaaaagcacatgttcttcattttggaaaatatagag

SEQ ID NO: 720126 - DNA, 120 bp, Artificial Sequence
  ENSG00000197771_4 (sequence is synthesized)
atgtagcagagtgtgggcctcaacaagaacttgatttaaactctccacgaaataccactttggaaagacagactttctattgtgttccggtgcctggggaatctacgtgggtaaaagaag

SEQ ID NO: 720127 - DNA, 120 bp, Artificial Sequence
  ENSG00000197771_5 (sequence is synthesized)
cctatgttaatgcaaaccaagctcgagtcagtccctcaacatcctacactcctagtcgccacaagaggagttatgaagatgatgacgatatggacctacagcccaataagcagaaagacc

SEQ ID NO: 720128 - DNA, 120 bp, Artificial Sequence
  ENSG00000197771_6 (sequence is synthesized)
aacatgcaggtgccagacaagcagggagtgttggtggtcttcaatggtgtggagagccaaaacgtttagaaactgaagcttctactgggcaacagctgaactctctgaacttgtcttctc

SEQ ID NO: 720129 - DNA, 120 bp, Artificial Sequence
  ENSG00000197771_7 (sequence is synthesized)
cttttgatttgaattttccattgccaggagagaagggccctgcatgccttgtgaaggtttatgaagattgggattgtttcaaagtaaatgacattcttgagctatatggcatactgtctg

SEQ ID NO: 720130 - DNA, 120 bp, Artificial Sequence
  ENSG00000197771_8 (sequence is synthesized)
tggatcctgtgctgagtatactgaataatgatgaaagggatgcctctgcactgctggatccgatggagtgcacagacacagcagaggagcagagagtacacagtcctcctgcttcattag

SEQ ID NO: 720131 - DNA, 120 bp, Artificial Sequence
  ENSG00000197771_9 (sequence is synthesized)
tgccgagaattcatgtgatcttagcccagaagttgcaacacatcaacccattattgcctgcctgccttaacaaagaggagagcaaaacctgtaagtttgtttcaagtttcatgtccgaat

SEQ ID NO: 720132 - DNA, 120 bp, Artificial Sequence
  ENSG00000197771_10 (sequence is synthesized)
tgtctccagtcagagcagaacttcttgggttccttactcatgcccttctgggggatagtttggctgctgaataccttatattacatctcatctccacagtatatacaagaagagatgtcc

SEQ ID NO: 720133 - DNA, 120 bp, Artificial Sequence
  ENSG00000197771_11 (sequence is synthesized)
ttccactaggaaaatttacagttaacttgagtggttgcccacggaatagtaccttcacagaacacttgtatcgaattattcaacatcttgttccagcatcttttcgtctgcagatgacta

SEQ ID NO: 720134 - DNA, 120 bp, Artificial Sequence
  ENSG00000197771_12 (sequence is synthesized)
tagagaacatgaaccatttgaaattcattccccacaaagactacacagccaatcgcttggtcagtgggctcctccagctgcccagcaatacttcccttgtaatcgatgagactctcctgg

SEQ ID NO: 720135 - DNA, 120 bp, Artificial Sequence
  ENSG00000197771_13 (sequence is synthesized)
aacaggggcagctggataccccaggtgttcataatgtgacagccctgagcaacctcataacgtggcagaaggtggattatgacttcagctaccatcagatggaattcccctgcaatatta

SEQ ID NO: 720136 - DNA, 120 bp, Artificial Sequence
  ENSG00000197771_14 (sequence is synthesized)
acgttttcattacttcggaggggaggtcactcctcccggcagactgccagattcacttacagccccagctaattccaccaaacatggaggagtacatgaacagccttctctcagcggtgc

SEQ ID NO: 720137 - DNA, 120 bp, Artificial Sequence
  ENSG00000197771_15 (sequence is synthesized)
tgccttccgtgctgaacaaattccgcatttatctaactcttttgagattcttggaatatagcatatctgatgaaataaccaaggcagttgaagatgactttgtggaaatgcggaagaacg

SEQ ID NO: 720138 - DNA, 120 bp, Artificial Sequence
  ENSG00000197771_16 (sequence is synthesized)
accctcagagcatcactgctgatgatcttcaccagctgctcgtggtggctcggtgtctgtctctcagtgctggtcagacaacgctgtcaagagaacgatggctgagagcaaagcagctag

SEQ ID NO: 720139 - DNA, 120 bp, Artificial Sequence
  ENSG00000197771_17 (sequence is synthesized)
aactgtagccacataattgtaaaattcagatattcatttataccacattgttttataggtaatttctatcacaaaccagtgacatttcctgaaatcaagcctggtaacacctgatgttta

SEQ ID NO: 720140 - DNA, 120 bp, Artificial Sequence
  ENSG00000197771_18 (sequence is synthesized)
acctgatgtttatatgatattcagtaaggacttttaccttactgatttcatggagcttttgaagtttgttttataataattatataaattagtaatgatgtaaaaaaagtatttgatatt

SEQ ID NO: 720141 - DNA, 120 bp, Artificial Sequence
  ENSG00000197771_19 (sequence is synthesized)
ttgataatgttgctgattgtaccatttccttagcttcagctgagtcataggccagactgttgaaatgctgaaatgaagaaggttgttgcagtttcaaagtcagaggaatcgtgcttcgga

SEQ ID NO: 720142 - DNA, 120 bp, Artificial Sequence
  ENSG00000197771_20 (sequence is synthesized)
tttcttatgttttctagttctctgtttttccagttcacagtgggttggggtgcattcagtagtccatctttggggaacggaggcgtacttgccattgattcacatgactacatgaaattc

SEQ ID NO: 720143 - DNA, 120 bp, Artificial Sequence
  ENSG00000197771_21 (sequence is synthesized)
tgtactgtcatttcccagatgtttggccacagaaactttttcccacttaacatttgttaacagcctgcaaaactaaacttgtacatggcagtggttcccagacttttgtattttatggac

SEQ ID NO: 720144 - DNA, 120 bp, Artificial Sequence
  ENSG00000197771_22 (sequence is synthesized)
cggtagtaatatttccaaaaatctggggtactataaggttgccaatttaccttgccaagtaatccgaataaatcactgtattatcaccatttttttcataaaaggaaaggacaatctatc

SEQ ID NO: 720145 - DNA, 120 bp, Artificial Sequence
  ENSG00000197771_23 (sequence is synthesized)
tctgaataagaggagtcctttaaacggaatgaatgtggcttttgggggcaaaagaaaccaagacactacattgtctttattttctcctatcccagtgcatttgagaaccatgcataaggg

SEQ ID NO: 720146 - DNA, 120 bp, Artificial Sequence
  ENSG00000197771_24 (sequence is synthesized)
aatgctgtgctacaaagctgtgcccaaatatgaaaacaaaataggaaacttaaaaagcaataccccctttagaaagtttttattttcttaaatgtcattgagttgctttgattctattgg

SEQ ID NO: 720147 - DNA, 120 bp, Artificial Sequence
  ENSG00000197771_25 (sequence is synthesized)
atttttggcattttttatgggatcatcagttggttccaagtatgttagatcagctaacatctgctactccagtaacagcctcgtacaactgcaggtaggttttctccagaccaattagtt

SEQ ID NO: 720148 - DNA, 120 bp, Artificial Sequence
  ENSG00000197771_26 (sequence is synthesized)
ttaatagagcaaactaacaacagactgtagtagcatggttatggcaaccagaatcttcagaaaggttaggacattactttttaagctgtcagtggtatcaaataacttacctagttggag

SEQ ID NO: 720149 - DNA, 120 bp, Artificial Sequence
  ENSG00000197771_27 (sequence is synthesized)
gcagataaaggatcccttacgttttttcctataaggcctaaattgaaattgttaaccaaggaaacagggtcagccttgaaaaatcaaggaattcattgtacctaataactgaagtaaaaa

SEQ ID NO: 720150 - DNA, 120 bp, Artificial Sequence
  ENSG00000197771_28 (sequence is synthesized)
taactagttgttcaacttttcctaaactcaaatctatttttataaacaaatgtaaataatgtttatattagagttgaactggttttcatttttataactggtagactagaccttccttaa

SEQ ID NO: 720151 - DNA, 120 bp, Artificial Sequence
  ENSG00000197771_29 (sequence is synthesized)
acttttagaaataaaatgaaggcttcactggatttgtgaggataaaatacattttctttaattgtcctagagcaaagtacattagtcaccatgtgttttttgtgccaatgtaaattgtaa

SEQ ID NO: 720152 - DNA, 120 bp, Artificial Sequence
  ENSG00000197771_30 (sequence is synthesized)
tttaccaaagaaaaatacatacattgcttggtcttgcagaaaagttcccttgaaagaacctttccaataaataaaacgtcccaaattagcagtaccttgggctgtttttcatgagtaaga

SEQ ID NO: 720153 - DNA, 120 bp, Artificial Sequence
  ENSG00000197771_31 (sequence is synthesized)
agattcaccatcccatgtgatctgtgtggaaaaagaccatgtcctcttggtggaagacatgagagagctgaactgaagtggaggaggtggtgcaagagggaccttcctgctcaaggcccg

SEQ ID NO: 720154 - DNA, 120 bp, Artificial Sequence
  ENSG00000197771_32 (sequence is synthesized)
cccaggcagcggaatggagtgcagtgcttggctgcagaaaccctttgtccctcacctatatatacacggacagtcaagtttgttgctctaacgtaaggcacagcgttaatcctgtatggc

SEQ ID NO: 720155 - DNA, 120 bp, Artificial Sequence
  ENSG00000197771_33 (sequence is synthesized)
caggaaactgagtagactcctgtgtaaccctgtttggaactttgccttcttaaaatgatttttcaaagatctctttcgaactaatttctgtagagtttaaacgtgtattttatcacctaa

SEQ ID NO: 720156 - DNA, 120 bp, Artificial Sequence
  ENSG00000197771_34 (sequence is synthesized)
aaattgcctcagcaaaaggctgctgtagtcggtcttcgtagcttccttctccagggtatcctagcggcgcgcagtgcaggagcctcgcaccgctccccgacggcggctgccagcttccag

SEQ ID NO: 720157 - DNA, 120 bp, Artificial Sequence
  ENSG00000197771_35 (sequence is synthesized)
gaggccgggcgggaggatggggacgtggtccccgcaggttctggatagacgtgcgaattgagacgcaattgaccctgaaagtcacagtggtgtaagagagcaaggtagccacagggactg

SEQ ID NO: 720158 - DNA, 120 bp, Artificial Sequence
  ENSG00000197771_36 (sequence is synthesized)
ggaatgagaatgagaaccacctccttgaaggcttgcaattcaagagacaaacccccaggtccttgagaagacagttctcagtggtcatgtgtccggagttggttccttccggtgggttct

SEQ ID NO: 720159 - DNA, 120 bp, Artificial Sequence
  ENSG00000197771_37 (sequence is synthesized)
gtcacacatggacagcctcatctattttattgacccatttccagatgctgggattaccgagttacattaatacacagctttttatggtatacagtaatgtaatatattagcctaatgtgt

SEQ ID NO: 720160 - DNA, 120 bp, Artificial Sequence
  ENSG00000197771_38 (sequence is synthesized)
taggactccttaaacaagggatactgtaatcattaatacagttgatccattaggcttggcacagtgtttattttatggaaacactctaaaagaaaaacagacctgaagttcatcatgtgt

SEQ ID NO: 720161 - DNA, 120 bp, Artificial Sequence
  ENSG00000197771_39 (sequence is synthesized)
aaggttacacaaatctatctttcaaatgagttcattactctaaataattgtcagaagttacatttttgtttaatataatctttgcagtaaccttccaaattagggcaatttttctgtcca

SEQ ID NO: 720162 - DNA, 120 bp, Artificial Sequence
  ENSG00000197771_40 (sequence is synthesized)
gatctgcctactgaactagaatatttaatgagcaacaacttctgttgtgaattaacggactgatattggggtttgataaatcagtttcctaaggtttggataagccaagagttagactct

SEQ ID NO: 720163 - DNA, 120 bp, Artificial Sequence
  ENSG00000197771_41 (sequence is synthesized)
aagaatataaaaaggcctagataacatcataaaagtaaggttctagatccacaaagcagagaactagacccagattataagtcactccagaggtcccatttttctggatttgagggagga

SEQ ID NO: 720164 - DNA, 120 bp, Artificial Sequence
  ENSG00000197771_42 (sequence is synthesized)
agtgtttgatgacagtatttgaagtgattttatatccattttcttttaaaaagtaatagtttggaattagttacttgttaattaatctgtaaaatatttgctgtggtgttataatgtgaa

SEQ ID NO: 720165 - DNA, 120 bp, Artificial Sequence
  ENSG00000197771_43 (sequence is synthesized)
caaaacctgtaagtgtaagtgttacagcctagtcaactatcgactgttagcctcagtgtgtccagagctgcctgtaacgtgctcatagtggaattgagagtcaggtcttcattcctcaca

SEQ ID NO: 720166 - DNA, 120 bp, Artificial Sequence
  ENSG00000197771_44 (sequence is synthesized)
tcctcacaataagtgttttcagtaatctctctctcgttgccccatttttctcttacattaattctcttcactgaaatgaggacaaaagagtatacaaggctgggtgcagtggctcacgcc

SEQ ID NO: 720167 - DNA, 120 bp, Artificial Sequence
  ENSG00000197774_0 (sequence is synthesized)
agtcgggccgcacccgcgtgaggcgccagtagcacggctcgtcgtgctgccacagccaggacttgcgcgtgaccaggcggcccaggccgaagagcgggaggcggccgagcagctgcaaga

SEQ ID NO: 720168 - DNA, 120 bp, Artificial Sequence
  ENSG00000197774_1 (sequence is synthesized)
ggcggctctcgcggcgcacgtcggcccaggcccggaccggcagccggcgtccagagaacggccgcgtcaaggtctcgtagtccaccgcgtagagctgggagtcgcgcggcctgttcagtt

SEQ ID NO: 720169 - DNA, 120 bp, Artificial Sequence
  ENSG00000197774_2 (sequence is synthesized)
gctcccgcagggcgcgcacgcggcgggccagctccgcgatcagccgcggacgcaccttcttccgcgccatggcgggtccgcgtcctcagcggtccggccggaagtcaccggaagaggccg

SEQ ID NO: 720170 - DNA, 120 bp, Artificial Sequence
  ENSG00000197774_3 (sequence is synthesized)
gtgtcccaggctaaagtgttcggtcgcggccggaagcgaggaagaggtcggtccggccatggcgcgggttggacccgggagggcgggggtctcttgccagggccggggccggggacgggg

SEQ ID NO: 720171 - DNA, 120 bp, Artificial Sequence
  ENSG00000197774_4 (sequence is synthesized)
cgggagcggtcagcggcgacctccaacctgggagatctcagactccgacgctgaggactccgccggctcggaggccgccgcgagagcccgggacccagcgggtgagcgcagggcggctgc

SEQ ID NO: 720172 - DNA, 120 bp, Artificial Sequence
  ENSG00000197774_5 (sequence is synthesized)
cgaggcgttgcggctgctgcggccggagcaggtcctgaagcgcctcgcggtgtgcgtggacacagccatcctggaagacgccggtgccgacgtcctgatggaggccctggaggccctggg

SEQ ID NO: 720173 - DNA, 120 bp, Artificial Sequence
  ENSG00000197774_6 (sequence is synthesized)
ctgcgagtgccgcatcgagccccagcgcccggcccgcagcctgcggtggacccgagcgagtcccgacccctgcccccgcagcctgcctcctgaagtgtgggctgcaggtgaacaggaatt

SEQ ID NO: 720174 - DNA, 120 bp, Artificial Sequence
  ENSG00000197774_7 (sequence is synthesized)
gctgctgctgctggagcccgaggagtttctgcagggcgtcgccacactgacccagatctctggcccaacccactgggtgccctggatctcccccgagaccaccgcccggccccacctggc

SEQ ID NO: 720175 - DNA, 120 bp, Artificial Sequence
  ENSG00000197774_8 (sequence is synthesized)
tgtcatcgggctggatgcctacctgtggtctcgccagcacgtttcccgggggacacagcagccagagagcccgaaggtggccggtgccgaggtggccgtcagctggccggaggtggaaga

SEQ ID NO: 720176 - DNA, 120 bp, Artificial Sequence
  ENSG00000197774_9 (sequence is synthesized)
ggccctggtactcctgcagctctgggcaaacctggacgtgctactggtggcctcttggcaggagctgagtcggcacgtgtgcgccgttaccaaggctctcgcccagtatcccctcaagca

SEQ ID NO: 720177 - DNA, 120 bp, Artificial Sequence
  ENSG00000197774_10 (sequence is synthesized)
gtaccgggaatcccaggccttctccttctgcacagcagggcgctgggcagccggcgagccagtggcaagagacggcgcagggctgcaggcggcctggcggaggcagatcaggcagttcag

SEQ ID NO: 720178 - DNA, 120 bp, Artificial Sequence
  ENSG00000197774_11 (sequence is synthesized)
tcgggtcagcccagccgtggctgatgcagttgtcacagccttcccctccccccgccttctgcagcaggcgctggaggcctgcagcacggagcgggagcgcatgggcctcctggccgacct

SEQ ID NO: 720179 - DNA, 120 bp, Artificial Sequence
  ENSG00000197774_12 (sequence is synthesized)
tcctgtgccgcccagtgaaggcgggcgtccccgcagggtggggcctgacctctcccgccgcatctgcctcttcctgaccacagccaaccctgatctcctgctggacctgggctcctgacc

SEQ ID NO: 720180 - DNA, 120 bp, Artificial Sequence
  ENSG00000197774_13 (sequence is synthesized)
acacgtgggaccaccaggacagcatgcagccttggggacagaccagacaccctgggcggtgggggaggacccccagccacatgtggaccctcagcctgggtgggttctctggctgagcag

SEQ ID NO: 720181 - DNA, 120 bp, Artificial Sequence
  ENSG00000197774_14 (sequence is synthesized)
gtctgacctcaggggaagggtgggtggttgcaggggaagttttaggtagctgggagaagaggggcttctggctggcagatggctggcggttcctgtgctgagtcctgaacacgtaggccc

SEQ ID NO: 720182 - DNA, 120 bp, Artificial Sequence
  ENSG00000197774_15 (sequence is synthesized)
caggggaggcctcagcagcagggctgtgcccccccaacacacacacacactcggcagggaccagaaggcagctccagggccccactgccacctggaggcttggggtgtggcaccctcagc

SEQ ID NO: 720183 - DNA, 120 bp, Artificial Sequence
  ENSG00000197774_16 (sequence is synthesized)
cagaagcagtaggggactcccaaggatgtggaggggcagtgaggcctgggagaaggcccaggctgctcgcaagcccggcctctgcacggatacgtttcagctcacgccatgtgggtgtta

SEQ ID NO: 720184 - DNA, 120 bp, Artificial Sequence
  ENSG00000197774_17 (sequence is synthesized)
gacatcaactctacatttattgcagtcctttaagtctatgacggcggggcagccgctgacagcatgcagagcaagttaggaaaaaccgaggccctgtgggaacagcaacgcgggctccag

SEQ ID NO: 720185 - DNA, 120 bp, Artificial Sequence
  ENSG00000197774_18 (sequence is synthesized)
ccaggctctcgtcctcgcagcctcccacaagacctggggctcagggcagccgcttccccacccagcacagcagcagaggggccctagagcccccacagaaaggactgtcccagcctcggg

SEQ ID NO: 720186 - DNA, 120 bp, Artificial Sequence
  ENSG00000197774_19 (sequence is synthesized)
agcaagagatggctccctccggacgggcctcatccaactccgccctggagtgtggctggaaggaagggacagagaaagaagggacagaggaaaggggctgtcccagcccaagaaggcagt

SEQ ID NO: 720187 - DNA, 120 bp, Artificial Sequence
  ENSG00000197774_20 (sequence is synthesized)
tccactgggaagtcagtcaggtccggcggcagcgcttcctctggcagggccgaggctcgcgactgctggggtgggcggaggtcgctgcctggggatcggacactggagccttgcggcggc

SEQ ID NO: 720188 - DNA, 120 bp, Artificial Sequence
  ENSG00000197774_21 (sequence is synthesized)
tgcaactcatgctcaggacccagcccagcttgttgtgtagcacctgcttgaggcccggcggcagcggcagaccctccagcgtgtctcccgagtctggccgcagctggcgcaggcggtggc

SEQ ID NO: 720189 - DNA, 120 bp, Artificial Sequence
  ENSG00000197774_22 (sequence is synthesized)
agcacaggtactggagggaagtggcgctggcacaggagcgggtgaccttcatgctgctccgggccgccgtggagcacaccatcgggtagaatctcttgttctgcagcttggtggctgcca

SEQ ID NO: 720190 - DNA, 120 bp, Artificial Sequence
  ENSG00000197774_23 (sequence is synthesized)
cacctggaagggaggggcccagcctgaaccccaggcagggaaggggccagctactgggcgcagcccctcagacctcacgctacagtcacccgggtgggcagctggcacagctgaggcaag

SEQ ID NO: 720191 - DNA, 120 bp, Artificial Sequence
  ENSG00000197774_24 (sequence is synthesized)
cttctgggaggaaccctttcagaaaacctcagtgtcccctgggctggggcggggtggctgcctccctcggggtgacagctgagaggagctcaagtcctgtgacggcctcacctatacact

SEQ ID NO: 720192 - DNA, 120 bp, Artificial Sequence
  ENSG00000197774_25 (sequence is synthesized)
tcctgttcttgaaaaaggtgagtgtgccgtgccaggtgtccaggtgcacgccaatgatggagccctggccgaaccgcgatgagaagctggtcttgtcgcccttgtggtggaggaggcctg

SEQ ID NO: 720193 - DNA, 120 bp, Artificial Sequence
  ENSG00000197774_26 (sequence is synthesized)
ggggcagccagggtcgcagtgagcccgggagctccaggctcggccccgccccaccctgggcctcacgcacccgtgtaggagaggccccagctgtcctcatccctgcccagcaggctgcag

SEQ ID NO: 720194 - DNA, 120 bp, Artificial Sequence
  ENSG00000197774_27 (sequence is synthesized)
aacgtgtggcggtatttgtccaggtccacatccgacgtcccgatgcccaccatctaggaacaggggccaggcagagggcgcggggctgggctgccggagccaggttccccagaagcaccc

SEQ ID NO: 720195 - DNA, 120 bp, Artificial Sequence
  ENSG00000197774_28 (sequence is synthesized)
tgggccgaagcaacttaccatgtcggtgccgtagacgggagaggtcatcttgatctcccagaagtgctggccctcccccagctccttggtgccccggatggccgctgtgccgcagctgta

SEQ ID NO: 720196 - DNA, 120 bp, Artificial Sequence
  ENSG00000197774_29 (sequence is synthesized)
ctccatgtggaagctgaccttacggttgtcacagctcagcagggtggctgatgacttatttaagtcatcccagacccagtcgaaatctgcaagagaggcccaggctggggcagccctgag

SEQ ID NO: 720197 - DNA, 120 bp, Artificial Sequence
  ENSG00000197774_30 (sequence is synthesized)
agctccatggggctctgccctgcccacccccaggcccgcccgcagtgcagtcccagcaggggctgggccccacgctcacactcgtcttcctctccgcagcggcagtccctgccccggtgg

SEQ ID NO: 720198 - DNA, 120 bp, Artificial Sequence
  ENSG00000197774_31 (sequence is synthesized)
gccgagtgcaggctgctacagaaggaggcctcgctctgcccagcacagtcacagaaggactcgccggtcacgggcaccgcactggggatggatggcggcagcgtggagtactcggggtcg

SEQ ID NO: 720199 - DNA, 120 bp, Artificial Sequence
  ENSG00000197774_32 (sequence is synthesized)
gagtccgagtcgctgtgctgggagagaagggccggctgttactacctgttgcccgctctctaccctctcacccttgccctctgtccctgtcccaccctgtccctgacccacccaggaaag

SEQ ID NO: 720200 - DNA, 120 bp, Artificial Sequence
  ENSG00000197774_33 (sequence is synthesized)
gatgggggtccaggcctccagggacttcacagtaccccgagcgcacagcccaggctccctcccaacgggctccggctctgccccattctgcatgaccaggagggccctggaggcccagcc

SEQ ID NO: 720201 - DNA, 120 bp, Artificial Sequence
  ENSG00000197774_34 (sequence is synthesized)
acagagcagtagccaaggctgcctggcctccaagtggtttctagacggtggataagccccaggtccaccccacctgcccagagctgagatggtgtggacaccttccctgctaggccagcc

SEQ ID NO: 720202 - DNA, 120 bp, Artificial Sequence
  ENSG00000197774_35 (sequence is synthesized)
ctgcaggggcccccaggcaaggccaccacccccacaccaggcccagctgcagccacccggcctcagggcagtccccaccacactgtggcccaacgaccttcctgttacctgagcagacct

SEQ ID NO: 720203 - DNA, 120 bp, Artificial Sequence
  ENSG00000197774_36 (sequence is synthesized)
ggctcaccacagggtcctactgcccagtgcccactacaggccccgcccctcctggtgcaggtttcagctgtcacctccctgaggcttctccagccccttcacccctgttccatttttctt

SEQ ID NO: 720204 - DNA, 120 bp, Artificial Sequence
  ENSG00000197774_37 (sequence is synthesized)
cttttgcttcactgaagttctccttggtcctgattcttggcctcctcccaccagaacgtgagctccttgtgggaggcagtgcccctcccagcctcctccctgtcacagactgtgtggggg

SEQ ID NO: 720205 - DNA, 120 bp, Artificial Sequence
  ENSG00000197774_38 (sequence is synthesized)
ccacccaggggctgaatggaccagggggtcagcagggagagtgctaagtggtggcggggggcctgtggcagaggccttgtgacagtgagggttgagggctggtccagagagatgatgtga

SEQ ID NO: 720206 - DNA, 120 bp, Artificial Sequence
  ENSG00000197774_39 (sequence is synthesized)
tccccaggagaagccacaggggaccatgacatgggcgccaccagcttccaggtgaacgtggacctatcgaaagccagcttcagggcaggacactgtcctttctggaggggatggccccac

SEQ ID NO: 720207 - DNA, 120 bp, Artificial Sequence
  ENSG00000197774_40 (sequence is synthesized)
cccacagacaaggcaggcccagacaactctaccccactgcctagaagtgcgggtccccagagccagggtagaccccctgagtcaggagcccgggcacagaactgagcacctgcactgcag

SEQ ID NO: 720208 - DNA, 120 bp, Artificial Sequence
  ENSG00000197774_41 (sequence is synthesized)
gcccagggccgggttccctggagaaggagaaagactgaagccactgcctacctcctgcccacaacagactgcaggcccatttggtgacacaggacaagcagcacatgtgtcgaacactgc

SEQ ID NO: 720209 - DNA, 120 bp, Artificial Sequence
  ENSG00000197774_42 (sequence is synthesized)
cgagcccgcaggcacgcctgcatcccacagccacgagcctgtgaggctcaggcatgtgacctgcaggagctggaggcgggcgggaaggcaggtgggggcctctccctggctggagcaggg

SEQ ID NO: 720210 - DNA, 120 bp, Artificial Sequence
  ENSG00000197774_43 (sequence is synthesized)
agctccaggagacctcaggacggcccccacccggtgggtaaggaccctgtttcccaatttgcccccaaggcctaatggacccaccgggcttagggagtcctcactcagaggagaggagcc

SEQ ID NO: 720211 - DNA, 120 bp, Artificial Sequence
  ENSG00000197774_44 (sequence is synthesized)
cacccctcccaggacacctggctgagccggaacagcagcgcaggggagctgtgacagcagagagcagcaccaggtcacacaagcagccgccccggaaggacacggcccatggtgacagag

SEQ ID NO: 720212 - DNA, 120 bp, Artificial Sequence
  ENSG00000197774_45 (sequence is synthesized)
gacaagcagcatgcgtgtgtcagacactggcctggcctgtggacacgcccgcgtcccacagccatgaccctgcgaggccaggagagactgctccagggcacatgacctgtggtagctgga

SEQ ID NO: 720213 - DNA, 120 bp, Artificial Sequence
  ENSG00000197774_46 (sequence is synthesized)
agtggggcagggaggcgcagccacactcctgctctggtccgagggagatctcaggaaaccgactgggaaatcaccccccacagggacccccacccctcccagcctcactgcgcccgtcag

SEQ ID NO: 720214 - DNA, 120 bp, Artificial Sequence
  ENSG00000197774_47 (sequence is synthesized)
gccaggcagctgccctcagggtctgccaaggtgggggtcaggggccatgggggcaggtagctctgcctgcaaagcccacaagcatgtcagatcacctgggctgcagacagacaaacacct

SEQ ID NO: 720215 - DNA, 120 bp, Artificial Sequence
  ENSG00000197774_48 (sequence is synthesized)
gagctgttctgaataccttcaggttcctggcctccctgagcaagtgcagaaatttttaccttcaaggatcagggtttttctgtttgtttgttttttaacacacatatatgtgaacaaaga

SEQ ID NO: 720216 - DNA, 120 bp, Artificial Sequence
  ENSG00000197774_49 (sequence is synthesized)
tgtggaccctcagcctggcctcccacaagacctggggctcagggcagccgcttccccacccagcacagcagcagaggggccctagagcccccacagaaaggactgtcccagcctcgggag

SEQ ID NO: 720217 - DNA, 120 bp, Artificial Sequence
  ENSG00000197774_50 (sequence is synthesized)
gctgtggcacagctgatcccacttctccaggtgggctctggcagaggccaagctcgggcagggcaggccccatggggagcggggaggaatggtcacctctgctcaggtctcgccagcacg

SEQ ID NO: 720218 - DNA, 90 bp, Artificial Sequence
  ENSG00000197774_51 (sequence is synthesized)
tcccagctcagcctcctgagtcgtacacattttttaaatttttgtagagacagtgtttcaccatgttgcccaggcaggtctcaaactcct

SEQ ID NO: 720219 - DNA, 120 bp, Artificial Sequence
  ENSG00000197774_52 (sequence is synthesized)
aaagtgctaggattataggtgtgagccacagtgcccagccccgtagtggagaatttctgttgaatgaaccaaaagcaactgccaacctctccatgcaccatgtgtttcagaggagaaagc

SEQ ID NO: 720220 - DNA, 120 bp, Artificial Sequence
  ENSG00000197774_53 (sequence is synthesized)
aagcacagtgaagaatgcagtgtgttctgaggtcctgtcacccctgaggctgtgtgtgtcctttgccaaattaaagagtcttactgaatgcggtgcatccaggagacaggcccaggtttg

SEQ ID NO: 720221 - DNA, 120 bp, Artificial Sequence
  ENSG00000197774_54 (sequence is synthesized)
gactggtcctctagcctcagaagcatctttttctccgactgattccgtgttcaggtaatgtctgcctgcctgcctagggcatctccacaccttaggccagccacgtccgcctcgcccgct

SEQ ID NO: 720222 - DNA, 120 bp, Artificial Sequence
  ENSG00000197774_55 (sequence is synthesized)
ggaacctacctgcccatcagagtcgtagccccagttagtggagcctgctagagccacggcccgggcatctgcgtctcggcgggctgcactcaggacgaagtgccaggccctgctgttccg

SEQ ID NO: 720223 - DNA, 120 bp, Artificial Sequence
  ENSG00000197774_56 (sequence is synthesized)
ggggcgtctggccatggtggaaagaatctagaagaaaacacaggctctgggcaaaggaagactcacagcactcccagccctgagcttccaggctgggccacggacccactcaaagtgggg

SEQ ID NO: 720224 - DNA, 120 bp, Artificial Sequence
  ENSG00000197774_57 (sequence is synthesized)
actgcaggggccgcaccggtgcccagccagggctccagaacgcttcaggagcccgtacctcactccaggatctgagcagctcaataaaacccaggtagatcctgtgaaacgccacccaga

SEQ ID NO: 720225 - DNA, 120 bp, Artificial Sequence
  ENSG00000197774_58 (sequence is synthesized)
aggcttgctgttctgcaaaccagctgtggcctggtggcccatggccataggccgcagcctcctgtgaacaactgtgccacacgttctcatcttcagatctctggcccaacccactgggtg

SEQ ID NO: 720226 - DNA, 120 bp, Artificial Sequence
  ENSG00000197776_0 (sequence is synthesized)
agtcggggctggaggcgaggccgccgggcgggcaggggttgtggcgcggcaagcggcgggccagcgacggcgcgaatggcggactctcagctgttctgtgtggcggaggaacgcagcggc

SEQ ID NO: 720227 - DNA, 120 bp, Artificial Sequence
  ENSG00000197776_1 (sequence is synthesized)
cactgcgccgtggtggacggaaacttcctctacgtgtgggggggctacgtgtctattgaagacaatgaagtatatttgcctaatgatgaaatttggacctatgatattgatagtgggttg

SEQ ID NO: 720228 - DNA, 120 bp, Artificial Sequence
  ENSG00000197776_2 (sequence is synthesized)
tggagaatgcacctcatggaaggagaactcccagcctccatgtcaggaagctgtggtgcttgcattaatggaaagctgtacatttttggaggatatgatgacaaaggatacagcaatcga

SEQ ID NO: 720229 - DNA, 120 bp, Artificial Sequence
  ENSG00000197776_3 (sequence is synthesized)
ctttattttgttaatttacgaacaagagatgaaacctacatttgggagaaaatcaccgactttgaagggcaaccacctacaccacgtgataaactttcctgctgggtatataaagacaga

SEQ ID NO: 720230 - DNA, 120 bp, Artificial Sequence
  ENSG00000197776_4 (sequence is synthesized)
ctaatatattttggtggttatgggtgtaggagacacagtgaactccaagactgttttgatgttcatgatgcatcttgggaagagcagatattctggggatggcataatgatgtccacata

SEQ ID NO: 720231 - DNA, 120 bp, Artificial Sequence
  ENSG00000197776_5 (sequence is synthesized)
tttgacacaaagacacagacttggtttcaaccagaaattaaaggtggagttccaccacagccacgagccgcgcatacatgtgcagttcttggaaataagggttatatctttggcggacgt

SEQ ID NO: 720232 - DNA, 120 bp, Artificial Sequence
  ENSG00000197776_6 (sequence is synthesized)
gttctgcaaactaggatgaatgatttgcactatctaaacctagacacctggacttggtctggaaggattactattaatggagaaagcccaaaacatcggtcatggcatactttaacacct

SEQ ID NO: 720233 - DNA, 120 bp, Artificial Sequence
  ENSG00000197776_7 (sequence is synthesized)
atagctgatgataaacttttcctatgtggtggactaagtgcagataatatcccattaagtgatggttggattcataatgtcacaacaaattgttggaaacaacttacacatttacctaaa

SEQ ID NO: 720234 - DNA, 120 bp, Artificial Sequence
  ENSG00000197776_8 (sequence is synthesized)
acaagacctaggttatggcacacagcctgtttgggaaaagaaaatgaaataatggtatttggtgggagcaaagatgacttacttgccttggatacaggtcactgtaatgatttattgatc

SEQ ID NO: 720235 - DNA, 120 bp, Artificial Sequence
  ENSG00000197776_9 (sequence is synthesized)
tttcaaacacagccttattcactactcaggtcatgccttgactgcattggtaaaaattctatcatgttagaaagtcagatatctttattacctcctaaacttctgcaacaagtactcaaa

SEQ ID NO: 720236 - DNA, 120 bp, Artificial Sequence
  ENSG00000197776_10 (sequence is synthesized)
aaaataacattttgggctgcagctaatcaccgagaagaacaaagagtccaaaaagaagaaacagaaaataaatatcagtggatcagtagcaattaaattgttatatactttacatattta

SEQ ID NO: 720237 - DNA, 120 bp, Artificial Sequence
  ENSG00000197776_11 (sequence is synthesized)
acactcccaaattgcaggctttatttaaaggataaaatttaaaggataaaaaaacagtcactctgttaagtgactatatgccatgggatatatggaaaaaagatattaatgcagattaat

SEQ ID NO: 720238 - DNA, 120 bp, Artificial Sequence
  ENSG00000197776_12 (sequence is synthesized)
ttatatttgtaaacaaatttccttacaaactgcagaacaaatattctttctgaaagtaagtacagttataacagattttaaatcaatgtgtattctttactggaaagattacatacattt

SEQ ID NO: 720239 - DNA, 120 bp, Artificial Sequence
  ENSG00000197776_13 (sequence is synthesized)
gagaataagaaattactctcaagaacttcagaaatctgcaacataattttataaatatataaatacatgtatgtatgtcaaaacactacatatacactttcagaaagaataaactttctc

SEQ ID NO: 720240 - DNA, 120 bp, Artificial Sequence
  ENSG00000197776_14 (sequence is synthesized)
aagtcattttaaagttacctaacgttcttcttgaataactaatacagtgggtcaaatattataaaataggcaaacaccaaaatggtattaaatattgaactcctgaccttttcgacactt

SEQ ID NO: 720241 - DNA, 120 bp, Artificial Sequence
  ENSG00000197776_15 (sequence is synthesized)
acctagtaaagtattcttaggcatcatcataacttttcctcacctttattcgaatagaggaataaatgtcttcagttgtctctccattacccctaagttattagtttgtctagtttatat

SEQ ID NO: 720242 - DNA, 120 bp, Artificial Sequence
  ENSG00000197776_16 (sequence is synthesized)
ataaagaccatgttttaaagtacataaagtggaggtttatttatcatacaggctttgaaacattaagaagcagtatttttattaactttttgagacatattaaaatacattttgccttag

SEQ ID NO: 720243 - DNA, 120 bp, Artificial Sequence
  ENSG00000197776_17 (sequence is synthesized)
aagactgcttctaaagtaatttttgtaagtaatgagatgggatggtaatctagtaatttgactttatagaaatccctcagtttggcccccaccattctacagagttgtactcaagacaga

SEQ ID NO: 720244 - DNA, 120 bp, Artificial Sequence
  ENSG00000197776_18 (sequence is synthesized)
tactgaaaaaatctaataccttcccttgtattttcagcattaccatctatacagaaatggaacactgtatctttatattcctaaaaatggtacttttggcataattaagaaatttttctt

SEQ ID NO: 720245 - DNA, 120 bp, Artificial Sequence
  ENSG00000197776_19 (sequence is synthesized)
catattatcacaatcatgcccttccattgaattattaattacaattaattactaaaaagcttggtatgtaaaattattctccacaatattaccatgcaagttatctctgaaatttaaaat

SEQ ID NO: 720246 - DNA, 120 bp, Artificial Sequence
  ENSG00000197776_20 (sequence is synthesized)
tgtaaagcttctatgtattgaaatatttttttacgttttatttattgtacaaagtgtatataattactgttttcttttttgtcagtgtaaagcagtcattagaattgattatacaaaaaa

SEQ ID NO: 720247 - DNA, 120 bp, Artificial Sequence
  ENSG00000197776_21 (sequence is synthesized)
agtaaatatgtgataaaactgtaataataatgtaaaaattattaaagctttgagatatttaaaacatttctcttttaggaagagcagatattctggggatggcataatgatgtccacata

SEQ ID NO: 720248 - DNA, 120 bp, Artificial Sequence
  ENSG00000197776_22 (sequence is synthesized)
acacagccttattcactactcagaagcaaaggacagttctgtgagaagggtatatggttattgggctgactgaaaggatgacataaacaggagctgccatagactcatctggtttgaaat

SEQ ID NO: 720249 - DNA, 88 bp, Artificial Sequence
  ENSG00000197776_23 (sequence is synthesized)
cccaccatgcccagtctattgaagacaatgaagtatatttgcctaatgatgaaatttggacctatgatattgatagtgggttgtggag

SEQ ID NO: 720250 - DNA, 120 bp, Artificial Sequence
  ENSG00000197779_0 (sequence is synthesized)
ggaagcggctgcggttctcgccggttctcagccggggtttgatagttgtcaggaggattcgacgttcagtgcccagggatgtggagagttcttggagtctctgcggagtccctgggccag

SEQ ID NO: 720251 - DNA, 120 bp, Artificial Sequence
  ENSG00000197779_1 (sequence is synthesized)
atctcacagtgaaagctgcaggatcttccttctgaccccagcagtccccgttgagtccaccgatcccactggaattataaagttgtcagcaagaaagccccagggctgaagtccaagtcc

SEQ ID NO: 720252 - DNA, 120 bp, Artificial Sequence
  ENSG00000197779_2 (sequence is synthesized)
gtcgggaacatgccagctaacgaggacgctccccagccaggggaacatggcagtgcctgtgaggtatcagtgtcatttgaggatgtgactgtggacttcagtagagaggagtggcagcaa

SEQ ID NO: 720253 - DNA, 120 bp, Artificial Sequence
  ENSG00000197779_3 (sequence is synthesized)
ctggactctactcaaagacgcctgtaccaggatgtaatgttggagaactacagccacctgctctcagtggggttcgaagttcctaaaccagaggtcatcttcaagttggagcaaggagag

SEQ ID NO: 720254 - DNA, 120 bp, Artificial Sequence
  ENSG00000197779_4 (sequence is synthesized)
gggccatggacattggaaggggaagccccacatcagagctgttcagatgggaaatttggaattaagccttcccagaggagaatttctgggaaatctacatttcatagtgaaatggagggt

SEQ ID NO: 720255 - DNA, 120 bp, Artificial Sequence
  ENSG00000197779_5 (sequence is synthesized)
gaagacacaagagatgattcattatactctattttagaagaattgtggcaagatgctgaacagataaagagatgtcaggaaaaacacaacaaacttctgagtcgcactactttcctcaat

SEQ ID NO: 720256 - DNA, 120 bp, Artificial Sequence
  ENSG00000197779_6 (sequence is synthesized)
aagaaaatattgaatacagagtgggattatgaatataaagactttggaaaatttgttcatccaagcccaaatctcattctttcacagaaaagaccccataaacgtgattcatttgggaag

SEQ ID NO: 720257 - DNA, 120 bp, Artificial Sequence
  ENSG00000197779_7 (sequence is synthesized)
agttttaagcataatttagacttacatattcataataaaagcaatgcagcaaagaacctggataaaactattgggcatggtcaagtttttacccagaactcttcttatagtcaccacgaa

SEQ ID NO: 720258 - DNA, 120 bp, Artificial Sequence
  ENSG00000197779_8 (sequence is synthesized)
aatacacatacaggagtgaagttctgtgaacgtaatcaatgtggaaaagtcctcagcctcaaacactcactcagtcaaaatgtgaaatttcccattggagagaaagcaaacacatgtact

SEQ ID NO: 720259 - DNA, 120 bp, Artificial Sequence
  ENSG00000197779_9 (sequence is synthesized)
gaatttgggaagatcttcacccagaggtcacatttctttgctcctcaaaaaattcatactgtggaaaaacctcatgagcttagcaaatgtgtaaatgtttttacacagaagccactactc

SEQ ID NO: 720260 - DNA, 120 bp, Artificial Sequence
  ENSG00000197779_10 (sequence is synthesized)
agtatatatctgagagttcatagagatgaaaaactctacatatgtactaaatgtgggaaggccttcatccagaattcagaattaattatgcatgagaaaactcatactagagagaaaccc

SEQ ID NO: 720261 - DNA, 120 bp, Artificial Sequence
  ENSG00000197779_11 (sequence is synthesized)
tataaatgcaatgaatgtgggaaatcatttttccaggtgtcatctctactcaggcatcagacaactcatactggagaaaaactctttgaatgcagtgaatgtggtaaaggcttctccctg

SEQ ID NO: 720262 - DNA, 120 bp, Artificial Sequence
  ENSG00000197779_12 (sequence is synthesized)
aactcagccctcaatatacatcagaaaattcacactggagagagacatcacaaatgcagtgagtgtgggaaagcctttacccaaaaatcaacactcaggatgcatcagagaattcataca

SEQ ID NO: 720263 - DNA, 120 bp, Artificial Sequence
  ENSG00000197779_13 (sequence is synthesized)
ggagagaggtcctatatctgtactcaatgtgggcaggccttcatccagaaggcacacttgattgcacatcaaagaattcatactggagagaagccttatgaatgcagtgactgtgggaaa

SEQ ID NO: 720264 - DNA, 120 bp, Artificial Sequence
  ENSG00000197779_14 (sequence is synthesized)
tctttcccttctaagtcacaactccagatgcataagagaattcatacaggagagaaaccctatatatgcactgaatgtgggaaggctttcaccaacaggtcaaatctcaatactcaccag

SEQ ID NO: 720265 - DNA, 120 bp, Artificial Sequence
  ENSG00000197779_15 (sequence is synthesized)
aagtctcatactggagaaaagtcttatatatgtgctgaatgtgggaaggccttcaccgacaggtcaaatttcaataaacaccagaccattcacactggagagaaaccctatgtttgtgct

SEQ ID NO: 720266 - DNA, 120 bp, Artificial Sequence
  ENSG00000197779_16 (sequence is synthesized)
gattgtgggagggccttcatccagaagtcagagttgattacacatcagagaattcatactacagagaagccttataaatgtcctgactgtgagaaatccttctccaagaaaccacatctc

SEQ ID NO: 720267 - DNA, 120 bp, Artificial Sequence
  ENSG00000197779_17 (sequence is synthesized)
aaagtacatcaacgaattcacacaggggagaaaccatatatatgtgcagaatgtgggaaagccttcactgataggtcaaatttcaataaacatcagacaattcatactggagataaaccg

SEQ ID NO: 720268 - DNA, 120 bp, Artificial Sequence
  ENSG00000197779_18 (sequence is synthesized)
tataaatgcagcgactgtggaaaggggttcacccagaaatcagttctcagtatgcatcgcaatattcatacatgaaagtaatcctgtttcttgaaaatgagagccttataaggctgacaa

SEQ ID NO: 720269 - DNA, 120 bp, Artificial Sequence
  ENSG00000197779_19 (sequence is synthesized)
aagtcaggtctaactatatattataaaattcatccaagacagatcctatatgaatacattgtataaggaaaagcatcaggctatctcacttgagatggaaaaaaattattcagaagaaac

SEQ ID NO: 720270 - DNA, 120 bp, Artificial Sequence
  ENSG00000197779_20 (sequence is synthesized)
tctcttaaaaatgcattgaaggagagagaatttgcacagcctcatgaaatatagtaaaagtcatactgggaaaaatgttgtcagtttggtgtgttaggaaaagccttcctatagaaagta

SEQ ID NO: 720271 - DNA, 120 bp, Artificial Sequence
  ENSG00000197779_21 (sequence is synthesized)
ttataagttaaattgttaccaaattctttataggaaggagagtgcaaaattatgtaaatgatggtcaggtttactgtgttatattaagcaatttaaagtgataacaaaatgaaaggtagt

SEQ ID NO: 720272 - DNA, 120 bp, Artificial Sequence
  ENSG00000197779_22 (sequence is synthesized)
gcagcaaaataatataactggtgagtagacctactttcagttccatagggtgtttgtggcagaacacagtgcagaacaggaggaatattacattttttttcaaatttagaataattatgt

SEQ ID NO: 720273 - DNA, 120 bp, Artificial Sequence
  ENSG00000197779_23 (sequence is synthesized)
ccatcaaatgtttcttactgaatatgtctatcaaatatgtttcttattgaatatttctatcaagtgaatccacaatttaaaagtcactttggttttatatatacacacatctgcagatat

SEQ ID NO: 720274 - DNA, 120 bp, Artificial Sequence
  ENSG00000197779_24 (sequence is synthesized)
aattttataagaacacacaaatataatcctgtcattcgtactggtttccatgacatagtatcttgttttctttcattgtggtacaatgcaaagtagccacagattcctcccatcccaagt

SEQ ID NO: 720275 - DNA, 120 bp, Artificial Sequence
  ENSG00000197779_25 (sequence is synthesized)
agcgtctctttgtctactacttgactttgaacttggccacgtgactttctttggccaatggaaattagcaaagagaatcaataagaagcttgagaagtgtgcaaagcctgccttgaagct

SEQ ID NO: 720276 - DNA, 120 bp, Artificial Sequence
  ENSG00000197779_26 (sequence is synthesized)
taccctctcttgctgctctttgcaaacctgaagaatctcaaattgccctactcgggggtgaggagccaccacatggagcagtggtgagccagccttgctgaggccccttagaccaagtag

SEQ ID NO: 720277 - DNA, 120 bp, Artificial Sequence
  ENSG00000197779_27 (sequence is synthesized)
cctgccaattgtcagaattgggagtgaggttttccaagacctctagccccagctgagccagcctagcccagaagagccataccagttattccagctgatttacagaattgtgagataaat

SEQ ID NO: 720278 - DNA, 120 bp, Artificial Sequence
  ENSG00000197779_28 (sequence is synthesized)
aaaatgatgatagttttaagcaacatgagttttggggttagtttgttgtacagaaaatgctaagtaatatttgaaagtatatgtttgggggagggggcatagtggaccaaaacgtgacaa

SEQ ID NO: 720279 - DNA, 120 bp, Artificial Sequence
  ENSG00000197779_29 (sequence is synthesized)
gtggcattggctttgggtctgagtggcacgtagaaactggaaaaacagtgaggaaaactgtttttcctcaaataacaaaggttggatagttggcaacccatgttatttagtagggaaaga

SEQ ID NO: 720280 - DNA, 120 bp, Artificial Sequence
  ENSG00000197779_30 (sequence is synthesized)
tacagaaaaacagtcatcaccatactctgtgggaagatagagaatggaccaaacgaactggtggatctggctaaggagatttgcagcagaatatgggaagtatcagtttgcttcttttag

SEQ ID NO: 720281 - DNA, 120 bp, Artificial Sequence
  ENSG00000197779_31 (sequence is synthesized)
ctgcatatgatacgatacagaaagagagaaatgaactaaagaaataactgtttctttggcaagcagaattcagaagaaatatggaaaagccaaggattgctgggttgaaaaataatgctt

SEQ ID NO: 720282 - DNA, 120 bp, Artificial Sequence
  ENSG00000197779_32 (sequence is synthesized)
taaagatcaaatcatggttgtgtctgtaagactctttattacagtgtgtgaaatagttcagttggtgcttaggagaccatctcagctaaacttaagggcttctaaaaatcttcatgacgt

SEQ ID NO: 720283 - DNA, 120 bp, Artificial Sequence
  ENSG00000197779_33 (sequence is synthesized)
tgtcccatagaagcctgacatactactcaaagtggagagagacctatcttaaaaagaattgctgatgtggcatttggggaaaggagtagatccaaaccagattcataggaaactcacaaa

SEQ ID NO: 720284 - DNA, 120 bp, Artificial Sequence
  ENSG00000197779_34 (sequence is synthesized)
gtttttaatagagttttactagtaaaactacctccaggttggacttccagggactgaaacagttcaaaatgaaaagtggcctctggattcccctccctaacttctatgaataggatacaa

SEQ ID NO: 720285 - DNA, 120 bp, Artificial Sequence
  ENSG00000197779_35 (sequence is synthesized)
gctgagaaagttactcagatgcaaacacggtccatttcttatggaaaatgaagggcatctcagagggaagacccaagaacaatatattaaaatgagctggggagccgttcccagggagaa

SEQ ID NO: 720286 - DNA, 120 bp, Artificial Sequence
  ENSG00000197779_36 (sequence is synthesized)
ctgtgccctaatcaagaaacgtatctgcccctggagccaagggaaccgacaacatttgctctgtgggatttcagaatcgttatggaacagtgactgatatgtgcctcatggtcctcctct

SEQ ID NO: 720287 - DNA, 120 bp, Artificial Sequence
  ENSG00000197779_37 (sequence is synthesized)
ttttgaatgggagtgtctattacagttatcctgtacctatcccaccattgtatatattgggtgtatgttggggggcatgtaacttgtcatttagctcacaggtatctggatcaagaaact

SEQ ID NO: 720288 - DNA, 120 bp, Artificial Sequence
  ENSG00000197779_38 (sequence is synthesized)
gaaaaactgtacccaaggaacctcagccacacctgaacctgatacagaagacttgagattctggattggagcttgatgccacaattttggatgagaaatttggaggtcctggaatagggg

SEQ ID NO: 720289 - DNA, 120 bp, Artificial Sequence
  ENSG00000197779_39 (sequence is synthesized)
tgaacacattttgcatggggtggtaatgtgaatactttgtgaccagaagacacactgtgttaggtagaaaaatgctacagatgtcttcatccctgtatatgtgtccttcttcagtcttta

SEQ ID NO: 720290 - DNA, 120 bp, Artificial Sequence
  ENSG00000197779_40 (sequence is synthesized)
tttctctttgtgtttcagttaggataatttctattgatctgtcttcaaattcactgatgttttttctctcaccctggctttgtcaagtctactgctgaacccattgaaggcattcttcaa

SEQ ID NO: 720291 - DNA, 120 bp, Artificial Sequence
  ENSG00000197779_41 (sequence is synthesized)
ctcagttatgttttatttttatttgtaatatttccatttgattcttacaattttcatatatctgctgaaattccccatcttttcatgcatgttcatgttttcccctttaccctttgtctt

SEQ ID NO: 720292 - DNA, 120 bp, Artificial Sequence
  ENSG00000197779_42 (sequence is synthesized)
agtcagtttgagctgctataataaagcaccatagacttggtggcttataaacaacagaaatttattcctcacagttctggagcctggaagtctgagatcagaatctagcaaggttaggtc

SEQ ID NO: 720293 - DNA, 120 bp, Artificial Sequence
  ENSG00000197779_43 (sequence is synthesized)
ttggtgacggccctcttcaaggttgcaaactgctcacttcttgcattttcccatgtctacagctagagaactctttgggatcccttttataagggcaccaatcccattcatgagttctcc

SEQ ID NO: 720294 - DNA, 120 bp, Artificial Sequence
  ENSG00000197779_44 (sequence is synthesized)
acccacattacctaactaccacccaaaggctccacctcctaataccatcacattgaggattaggattttaacatatgaattttgggggggatgcaatcattcagcccataataccctcta

SEQ ID NO: 720295 - DNA, 120 bp, Artificial Sequence
  ENSG00000197779_45 (sequence is synthesized)
acatattaatcatagttatttttaactccctgtctgatagttccaactactaggtcaactgagtctaggtctgttgttgtcttctcttgctcttttgcatctaataatttttggctgaat

SEQ ID NO: 720296 - DNA, 120 bp, Artificial Sequence
  ENSG00000197779_46 (sequence is synthesized)
gtcacagatgttgtatgtaggacagtagaaactgaggtaaatagtaattattcctggaaacagccatggttgcccttttgataggccattagcatggggagattgaatccatctaatcag

SEQ ID NO: 720297 - DNA, 120 bp, Artificial Sequence
  ENSG00000197779_47 (sequence is synthesized)
gagttgggctgagtttgtgtttctttgttgccagtgttacctttgctgtaccatagacttaaaattcctctattgttatcttatgcttgaggtaggcactggtttgcccagagaattttt

SEQ ID NO: 720298 - DNA, 120 bp, Artificial Sequence
  ENSG00000197779_48 (sequence is synthesized)
atttttcccagaccacacttgcctttaggcctgtaggcctttcctgtgtgcctgcatctcagggagggtctctctccatgttgttgcctctatgttagtagtagacaactgttattactt

SEQ ID NO: 720299 - DNA, 120 bp, Artificial Sequence
  ENSG00000197779_49 (sequence is synthesized)
ggttcttgctgacctggtgagttggggggcaggggttgtcttgggccagcctcagtttttgtcaggccatgaatccctgggtcttgagggtgggattttttagtgatcctgccctcttcc

SEQ ID NO: 720300 - DNA, 120 bp, Artificial Sequence
  ENSG00000197779_50 (sequence is synthesized)
actggtagaaggcctttaatgatctgggcccaggatgatttcctgcccttttatcatgggtggaatttttttttccatttccctcactctagtcacagtgaatctttaactgtgtcctga

SEQ ID NO: 720301 - DNA, 120 bp, Artificial Sequence
  ENSG00000197779_51 (sequence is synthesized)
gggcaacagggtttgctgcacttcttttagtggcttaaggattttgttctgtaggggagtagggtttcattggagctttgtgccatttctatgttaacagcagcccccttgcaggcctac

SEQ ID NO: 720302 - DNA, 120 bp, Artificial Sequence
  ENSG00000197779_52 (sequence is synthesized)
cccatggaggtaggctttctccagtcttcttccttgtccccgtgtttcttgagagcactcagtggatgactatggagaagagcctgcaagcagagaccaactacccttaggtctacagct

SEQ ID NO: 720303 - DNA, 120 bp, Artificial Sequence
  ENSG00000197779_53 (sequence is synthesized)
ctcatgagtctcccgcactcagcctttagcaattcattaaaaattcttgttgaattcttactgcttgtatagtggcctcatcttccttcctgctgtaccacagatggcccaggagaggca

SEQ ID NO: 720304 - DNA, 120 bp, Artificial Sequence
  ENSG00000197779_54 (sequence is synthesized)
cttgtcttttattatatttcaagctagttggttgctctgtaatcttagctctctgatgggttcgagaaaacttatgtttttgcagattacccagctttgttcttgttataaagatgggag

SEQ ID NO: 720305 - DNA, 120 bp, Artificial Sequence
  ENSG00000197779_55 (sequence is synthesized)
cagtgttctttccagatgtctacatgctaggcagaaactagaagtctggacagtctccatggtctcctactatcagaatatgtgcccttttcagtgtgactttgccacttcacccatcaa

SEQ ID NO: 720306 - DNA, 120 bp, Artificial Sequence
  ENSG00000197779_56 (sequence is synthesized)
gaggtagaatctatttcttcaacccctgcaactgagcttggctattttgttggccaatgggacattaacaagtatgatacaagcagaggcttgagaagtgcctgcacaatgaggcttgcc

SEQ ID NO: 720307 - DNA, 120 bp, Artificial Sequence
  ENSG00000197779_57 (sequence is synthesized)
cacttttgcagctctttggaatcctgaacccatgtgtggaaaagcctgaactgtgctgttggaaaatgagagcgatcacatggagcagtaatggagcaaagaccagccatcccagttgag

SEQ ID NO: 720308 - DNA, 120 bp, Artificial Sequence
  ENSG00000197779_58 (sequence is synthesized)
ataccctacaccaaccagattttcaactgctggacatatgaatgaagctatcctaggcatgcagtcttggtcaaggcaactttggctggcagtctctgagatgaccctgaatgatcccca

SEQ ID NO: 720309 - DNA, 120 bp, Artificial Sequence
  ENSG00000197779_59 (sequence is synthesized)
cctcctggtattctcactcttatataatcccctcctcttgagtttggactggaattagtgacttggttctagtgaatagaatgaggcagaggtaatgggatgtcatgttcaagattggtt

SEQ ID NO: 720310 - DNA, 120 bp, Artificial Sequence
  ENSG00000197779_60 (sequence is synthesized)
acaaaaagactgtggcttccattttgggtgcttgcttactctctcagatggctcatcataggggaaacctgctgctacatcatgagatagccctgtggaaaggtccacatgagtgaactt

SEQ ID NO: 720311 - DNA, 120 bp, Artificial Sequence
  ENSG00000197779_61 (sequence is synthesized)
tgaagcatatcctcccccagtttagcctttagatgaggaccacagccaaatagcttgactgtaagccagatagcttgactcatgagggaccttcagccagaggcatcttttgagccatac

SEQ ID NO: 720312 - DNA, 120 bp, Artificial Sequence
  ENSG00000197779_62 (sequence is synthesized)
gaattcctgacccatagaaactgcaagacaataaatgttgttttaagttgctaaattttagggtaatttgttacacagtaataggttaataatacactggcccagattaggaaggttctg

SEQ ID NO: 720313 - DNA, 120 bp, Artificial Sequence
  ENSG00000197779_63 (sequence is synthesized)
ccatccatcccagccatcccaaacaactaccagaataatggattaaaacgttaactgttttaagtcactaagttttgggcagcatgataacaacccagcaaaaagctaactgatacattg

SEQ ID NO: 720314 - DNA, 120 bp, Artificial Sequence
  ENSG00000197779_64 (sequence is synthesized)
attatttattgcatttcttcctccactattcttctctaacagatgaccaatactaataaactactgtgaacactttcatgttttaatctctgctctgtgctcataatcatatatagacat

SEQ ID NO: 720315 - DNA, 83 bp, Artificial Sequence
  ENSG00000197779_65 (sequence is synthesized)
ggaagcggctgcggttctcgccggttctcagccggggtttgatagttgtcaggaggattcgacgttcagtgcccagggatgtg

SEQ ID NO: 720316 - DNA, 120 bp, Artificial Sequence
  ENSG00000197779_66 (sequence is synthesized)
agaagacgtagaagctctgcgccccttcccacataccttgccctatgtatgtggataggggtgctaggaacatctgctgttctaacatttggtctttgacccttgttcttgacacagagc

SEQ ID NO: 720317 - DNA, 120 bp, Artificial Sequence
  ENSG00000197779_67 (sequence is synthesized)
tcctaatcccatgcagtttcctgggtgataggagcatcttttgttctaatcaggctgtttatctggctgttcatctgtgtcttttgtaatattctttataataaaccagtaaatgtaaat

SEQ ID NO: 720318 - DNA, 83 bp, Artificial Sequence
  ENSG00000197779_68 (sequence is synthesized)
gttgtcaggaggattcgacgttcagtgcccagggatgtggaggtgatggggggccggggtgtgtgatctcaactcactgcaac

SEQ ID NO: 720319 - DNA, 120 bp, Artificial Sequence
  ENSG00000197779_69 (sequence is synthesized)
aatgttggagaactacagccacctgctctcagtgggtaaggacaaccatcctgtgaagttgtgaggagcctgttatgggttaaattgtgcccccaaataaaatatgttgaagtcctaata

SEQ ID NO: 720320 - DNA, 120 bp, Artificial Sequence
  ENSG00000197780_0 (sequence is synthesized)
agtgtaaccagctgggagccagccggcaggacgctgtgagttggcgtgctagtgggatggcagatgaggaagaagaccccacgtttgaggaagaaaatgaagaaattggaggaggtgcag

SEQ ID NO: 720321 - DNA, 120 bp, Artificial Sequence
  ENSG00000197780_1 (sequence is synthesized)
aaggtggacagggtaaaagaaagagacttttttctaaagaattgcgatgtatgatgtatggctttggggatgaccagaatccttatactgagtcagtggatattcttgaagatcttgtca

SEQ ID NO: 720322 - DNA, 120 bp, Artificial Sequence
  ENSG00000197780_2 (sequence is synthesized)
tagagtttatcactgaaatgactcacaaggcaatgtcaattggaagacaaggtcgagtacaagttgaagatatcgtcttcttgattcgaaaggacccaaggaagtttgccagggttaaag

SEQ ID NO: 720323 - DNA, 120 bp, Artificial Sequence
  ENSG00000197780_3 (sequence is synthesized)
taccatctggggaaaccatatataataattgtatattttctaaagtaagattctgatatctagccatgtaaatgaaagatggagaaacacaaagttttcagcctttatttttatgccttt

SEQ ID NO: 720324 - DNA, 120 bp, Artificial Sequence
  ENSG00000197780_4 (sequence is synthesized)
gattttagggtgatattggtgcatgtaattgcctgcctttatattaccatacttgaattacttactgggttttaatgaccacacataagtcaaagtaccttgcaaaccatgccgttgttc

SEQ ID NO: 720325 - DNA, 120 bp, Artificial Sequence
  ENSG00000197780_5 (sequence is synthesized)
tgcaaaccatgccgttgttctgacttttgactatttaaaggataaagtagtatttaatgtgttaggtatgtttatgcccttgtaagctatactgtagctttttttttttttttttttttt

SEQ ID NO: 720326 - DNA, 120 bp, Artificial Sequence
  ENSG00000197780_6 (sequence is synthesized)
atttaaaatcttttcggatttataacatcctgttaagttttaggagaacccgttttcccagagcagattcaagcttctaaaaataaatgctttcagtagcaggaatggcattgtttaaaa

SEQ ID NO: 720327 - DNA, 120 bp, Artificial Sequence
  ENSG00000197780_7 (sequence is synthesized)
agctgatggcagggtaagcatttgggttagtgttttattaacatatttgtaagtacttgttcattgtggaaatgtgtccttgactaaaaccatacgtggctatggaaaccatgtttgtag

SEQ ID NO: 720328 - DNA, 120 bp, Artificial Sequence
  ENSG00000197780_8 (sequence is synthesized)
ttctgaatacacaggttttgtgtgtatttactctatgtattaaattattattgcccttagtttaaagtaaggattacaattggatttaagtagatcactgaatgttattgtttatgaaac

SEQ ID NO: 720329 - DNA, 120 bp, Artificial Sequence
  ENSG00000197780_9 (sequence is synthesized)
ttaactttttgtatgctgcttataaacatgatctataaatcagtgcttgggaaaattttactttcttaatctactgatacaggaataaaatatgaacaattaaacaggttgatccttgaa

SEQ ID NO: 720330 - DNA, 120 bp, Artificial Sequence
  ENSG00000197782_0 (sequence is synthesized)
aaggtcttcacgtctgaggaagagatctgtggctgcgggagatctctgcggattggggctccagcctgactgacccgacagtgcgggtggcctagggggaggcgctcagatcgtattttt

SEQ ID NO: 720331 - DNA, 120 bp, Artificial Sequence
  ENSG00000197782_1 (sequence is synthesized)
atccaaaagaaggacctggaggaggatgagagcgttactgctgcacacctaaagtcaagggggagaagcccgaggaagattgaccagttttgtaattctagcaacatggtccatggatca

SEQ ID NO: 720332 - DNA, 120 bp, Artificial Sequence
  ENSG00000197782_2 (sequence is synthesized)
gtgacattcagggatgtggccattgacttctctcaggaggagtgggagtgcctgcagcctgatcagaggaccttgtacagggatgtgatgttggagaactacagccacctgatctcactg

SEQ ID NO: 720333 - DNA, 120 bp, Artificial Sequence
  ENSG00000197782_3 (sequence is synthesized)
ggaagttccatttctaaaccagatgtaattacgttactagagcaagagaaagagccctggatggttgtaaggaaagaaacaagcagacggtatccagatttggagttaaaatatggacct

SEQ ID NO: 720334 - DNA, 120 bp, Artificial Sequence
  ENSG00000197782_4 (sequence is synthesized)
gagaaagtatctccagaaaatgatacctctgaagtaaatttacccaaacaggttataaagcaaataagtacaactcttggcattgaggccttttattttagaaatgactcagaatataga

SEQ ID NO: 720335 - DNA, 120 bp, Artificial Sequence
  ENSG00000197782_5 (sequence is synthesized)
caatttgagggactacagggatatcaagaaggaaatatcaatcaaaagatgatcagctatgaaaaactgcctactcatactcctcatgcttctcttatttgcaatacacataaaccgtat

SEQ ID NO: 720336 - DNA, 120 bp, Artificial Sequence
  ENSG00000197782_6 (sequence is synthesized)
gaatgtaaggaatgtgggaaatactttagtcgtagtgcaaatcttattcagcatcagagtattcatactggagagaaaccctttgaatgtaaggagtgtgggaaagcctttcgacttcac

SEQ ID NO: 720337 - DNA, 120 bp, Artificial Sequence
  ENSG00000197782_7 (sequence is synthesized)
atacaatttactcgacatcagaaatttcatactggtgagaaaccttttgaatgtaacgaatgtggaaaggcctttagtcttcttaccctgcttaatcgccataagaacattcacacaggt

SEQ ID NO: 720338 - DNA, 120 bp, Artificial Sequence
  ENSG00000197782_8 (sequence is synthesized)
gagaaactgtttgaatgtaaggaatgtgggaagtcctttaatcgtagctcaaaccttgttcaacatcagagtattcattctggtgtaaaaccatatgaatgtaaggagtgtgggaaaggc

SEQ ID NO: 720339 - DNA, 120 bp, Artificial Sequence
  ENSG00000197782_9 (sequence is synthesized)
tttaatcgtggtgcacaccttattcagcatcagaaaattcattccaatgagaaaccctttgtatgtaaggaatgtgggatggcctttcgatatcattaccaacttattgaacattgccaa

SEQ ID NO: 720340 - DNA, 120 bp, Artificial Sequence
  ENSG00000197782_10 (sequence is synthesized)
attcatactggtgagaaaccctttgaatgtaaagaatgtggaaaggcgtttactcttctgacaaagcttgttcgacatcagaagattcatactggtgagaaaccctttgaatgcagggaa

SEQ ID NO: 720341 - DNA, 120 bp, Artificial Sequence
  ENSG00000197782_11 (sequence is synthesized)
tgtgggaaggcctttagtcttctcaaccagcttaatcgccataagaacattcacacaggtgaaaaaccgtttgaatgtaaggaatgtgggaagtcctttaatcgtagctcaaaccttgtt

SEQ ID NO: 720342 - DNA, 120 bp, Artificial Sequence
  ENSG00000197782_12 (sequence is synthesized)
caacatcagagtattcatgctggtataaaaccatatgaatgtaaggagtgtgggaaaggctttaatcgtggtgcacaccttattcagcatcagaaaattcattccaatgagaaacctttt

SEQ ID NO: 720343 - DNA, 120 bp, Artificial Sequence
  ENSG00000197782_13 (sequence is synthesized)
gtatgtagggaatgtgagatggcctttagatatcattgccaacttattgaacattctcgaattcatactggtgacaagccatttgaatgtcaagactgtgggaaggccttcaatcgtggc

SEQ ID NO: 720344 - DNA, 120 bp, Artificial Sequence
  ENSG00000197782_14 (sequence is synthesized)
tcaagccttgttcaacatcagagtattcacactggtgagaagccctatgaatgtaaggagtgtgggaaggcttttagactttacctacaactttcccaacatcagaaaactcacacaggt

SEQ ID NO: 720345 - DNA, 120 bp, Artificial Sequence
  ENSG00000197782_15 (sequence is synthesized)
tcatactggaaagaaaccctttgaatgtaaggaatgtgggaaagcctttcgacttcatatgcaccttattcgacatcagaaattgcatactggtgagaaaccctttgaatgtaaggagtg

SEQ ID NO: 720346 - DNA, 120 bp, Artificial Sequence
  ENSG00000197782_16 (sequence is synthesized)
tgggaaagcctttcgacttcatatgcaacttattcgacatcagaaattgcatactggtgagaaaccctttgaatgtaaggaatgtggaaaggtttttagtcttcccacccagcttaatcg

SEQ ID NO: 720347 - DNA, 120 bp, Artificial Sequence
  ENSG00000197782_17 (sequence is synthesized)
ccataagaacattcacacaggtgagaaggcatcttgaatgtaaggaatgtggaaagtcctttaatcgtgtctcaaaccatgttcaacatcagagtattcgtgctggtgtaaaaccatgtg

SEQ ID NO: 720348 - DNA, 120 bp, Artificial Sequence
  ENSG00000197782_18 (sequence is synthesized)
aatgtaaggggtgtgggaaaggcttcatttgtggttcaaacgttattcagcatcagaaaattcattccagtgagaaactctttgtatgcaaggagtggaggacgacctttagatatcatt

SEQ ID NO: 720349 - DNA, 120 bp, Artificial Sequence
  ENSG00000197782_19 (sequence is synthesized)
accacttatttaacattaccaaattcacactggtaaaaaaccctttgaatgtaaagaatgtggaaaggccttcagttttctgacacagcttgctggacttcaggtcattcatactggcga

SEQ ID NO: 720350 - DNA, 120 bp, Artificial Sequence
  ENSG00000197782_20 (sequence is synthesized)
gaagccatttgaatttgagaaatgtgggaaggccttcaatagtggctcaaaccttgttcaacatcagagtattcatactggtgagaaactctatgaatgtaaggagtgtgggaaaacttt

SEQ ID NO: 720351 - DNA, 120 bp, Artificial Sequence
  ENSG00000197782_21 (sequence is synthesized)
cagatttagtttggtcctgactgcacatcaaagaattcatactggtatgaaaccctgtgaatgtacagaatgtgggaagacctttagttgtagctcaaacattgttcaacatgttaaaat

SEQ ID NO: 720352 - DNA, 120 bp, Artificial Sequence
  ENSG00000197782_22 (sequence is synthesized)
tcatactggtgagaaacgctataatgtaaggaatatgggaaagcatttgctgtggatgatcagctgtctcaacatcagaaaattcagaatagttagaaattttgtgacaataaggagtgt

SEQ ID NO: 720353 - DNA, 120 bp, Artificial Sequence
  ENSG00000197782_23 (sequence is synthesized)
ggacaagccttcactgtgtacgaaaaatttactcaacaccagagagctcatattgatgagaaatcttgtgaacataaaagaatgtgtgaagaactttcatcatggcctgggatttgctca

SEQ ID NO: 720354 - DNA, 120 bp, Artificial Sequence
  ENSG00000197782_24 (sequence is synthesized)
acttctgagtattcatacttctgagaaatctttgagtgtaaggaatgtggggcgttttatagccacactaaataccttagagttcggagaagataattcttgtgagaaagtctttgaatg

SEQ ID NO: 720355 - DNA, 120 bp, Artificial Sequence
  ENSG00000197782_25 (sequence is synthesized)
aggaatatagggtagttgtcatgttcacaatgtactccctatgaaataatttaccagatacaggcatacctcgctgaattgtgcattgcagttattgtgttttatacaaactgaaggttt

SEQ ID NO: 720356 - DNA, 120 bp, Artificial Sequence
  ENSG00000197782_26 (sequence is synthesized)
gtggcaaccctgtggtgagcaagacgatcaggtccattttcccaacgtcaggtgtgcatttcatgtctttatgtcacattttggtaattctcagaatatttcaaactatttcattgttat

SEQ ID NO: 720357 - DNA, 120 bp, Artificial Sequence
  ENSG00000197782_27 (sequence is synthesized)
atatctatcatggtgatcaatgaccagtgatttttgatgttgctattgtaattgctttgggataccacaaattctgcccataaaagatggtaaacctagttgatacttgttgtgggtttt

SEQ ID NO: 720358 - DNA, 120 bp, Artificial Sequence
  ENSG00000197782_28 (sequence is synthesized)
gaaagaatagtcaaatatacaatcatataccccaacctagattcaaaattgttaacaatttgcacgtttattttttgtatatttgttgtaccattgagaataagttttagacatcatgac

SEQ ID NO: 720359 - DNA, 120 bp, Artificial Sequence
  ENSG00000197782_29 (sequence is synthesized)
actttaccctttatttaatcaacgtgtgtatcaaccaaacatgaagacaatatagacaatatcatatagccattgtaccataattaccgttaaggaaagtattcataattctgtaatatc

SEQ ID NO: 720360 - DNA, 120 bp, Artificial Sequence
  ENSG00000197782_30 (sequence is synthesized)
acttccggtctccggggtcgacgacatagcgggtcgtatttttatccaaaagaaggacctggaggaggatgagagcgttactgctgcacacctaaagtcaaggaacaggagcattgggaa

SEQ ID NO: 720361 - DNA, 120 bp, Artificial Sequence
  ENSG00000197782_31 (sequence is synthesized)
tatgtgattcattgcgactgctggttgtatattaagaaaatgagtgaggggctcaaatgatctaggacagaaattctttctttttaaatcgacagatataattgtatgtatttatcatgt

SEQ ID NO: 720362 - DNA, 120 bp, Artificial Sequence
  ENSG00000197782_32 (sequence is synthesized)
cccaaacagatttcttcattggcttccaaaccatcttttacagctattcatattcaaaggagaatccattgcagaatctgcattgcatttggttatctctctttagtgtattgtagcctg

SEQ ID NO: 720363 - DNA, 70 bp, Artificial Sequence
  ENSG00000197782_33 (sequence is synthesized)
cattgcatttggttatctctctttagtgtattgtagcctggaaatcctatgaatgtaggcgctcaaattt

SEQ ID NO: 720364 - DNA, 64 bp, Artificial Sequence
  ENSG00000197782_34 (sequence is synthesized)
gggctctctttcttacctgatgggtcgggtgtgagctgagttgcaagccccgtgtttaaaggtg

SEQ ID NO: 720365 - DNA, 86 bp, Artificial Sequence
  ENSG00000197782_35 (sequence is synthesized)
acttcccatctaggcttagggattcttaatcggcctaggaaatcctgctagtcctgtttctcagtaccccctctcaacaggaaaac

SEQ ID NO: 720366 - DNA, 120 bp, Artificial Sequence
  ENSG00000197782_36 (sequence is synthesized)
tgtgcagttgagatttcctctggaggggtgccttcgatgtcattaacattggagcatgggctagcaggccggtccaggggtccgcggtagattttagtcatggactgcatctggggctcc

SEQ ID NO: 720367 - DNA, 87 bp, Artificial Sequence
  ENSG00000197782_37 (sequence is synthesized)
atctggggctccatttgaagaatgagttgtggctttacagcttcgattctggaaaagacaaacttaacaaggaggttaaagatacag

SEQ ID NO: 720368 - DNA, 120 bp, Artificial Sequence
  ENSG00000197782_38 (sequence is synthesized)
gatagttttgaaaaggcctggtccatctcctcattcttaaaaaatgagattgaattttgattagcccaggaaaattgtctatgtgtttagatttctttctttatagtgtcatttagtgtt

SEQ ID NO: 720369 - DNA, 120 bp, Artificial Sequence
  ENSG00000197782_39 (sequence is synthesized)
gttctctttgttgcatattctgtacaagggaatttgagtccagaggctctgttaggtcagattaaacattttggggaagaatactttgtaggctatttgtatggcatatttcactgtcag

SEQ ID NO: 720370 - DNA, 120 bp, Artificial Sequence
  ENSG00000197782_40 (sequence is synthesized)
aaaacatttaagtacaggtccttgcattagtgaaactaagtttgatcatttgggtaagctggtaaccgccataagtccattgtaaagatctaatttgtagtgcataaataatctatggag

SEQ ID NO: 720371 - DNA, 120 bp, Artificial Sequence
  ENSG00000197782_41 (sequence is synthesized)
agactttgacctctgaatatttataatcatgtgtattttagctgtggattgaatacaaaatgaaaattgaaatagactattcaaaaatgaatgccattaaggttgtcaacataagtcaac

SEQ ID NO: 720372 - DNA, 120 bp, Artificial Sequence
  ENSG00000197782_42 (sequence is synthesized)
ttgtgtgataaggctgacagtatattcagtacaaaattagcaccctctagtttattcagggagccaagattattttgtctggaaccttgtttttgttcagcatttatcatcagcacctat

SEQ ID NO: 720373 - DNA, 120 bp, Artificial Sequence
  ENSG00000197782_43 (sequence is synthesized)
acatcatggctggtatgtgagctgttgataaactttgaaaaaaattaagcctttaaatcaagctataaaacatgataccattgtggcatcatgaattagagagattaacttttttaaaga

SEQ ID NO: 720374 - DNA, 120 bp, Artificial Sequence
  ENSG00000197782_44 (sequence is synthesized)
tcaataataatcctttgtgattttattccagtgcatttaaaaatctataaaatgataatttatattgatagctttcttctttttgtgaatatatccttatcagattattatgcttttgat

SEQ ID NO: 720375 - DNA, 120 bp, Artificial Sequence
  ENSG00000197782_45 (sequence is synthesized)
agactacttaattctatttcttaacatttaattgtatctataatcataggtaaagttataattttctaaacatttttcaggttttgttaatgcagtgatcttataaatcttacaaaacga

SEQ ID NO: 720376 - DNA, 120 bp, Artificial Sequence
  ENSG00000197782_46 (sequence is synthesized)
ctatgttttttattatttctccaggtgattgtgataccaaccagagttagagagccactgacctagaacatttctcctttctcctcattcttctttttttttttttttttgcagttgcaa

SEQ ID NO: 720377 - DNA, 120 bp, Artificial Sequence
  ENSG00000197782_47 (sequence is synthesized)
tcatctttttcatattgattctctttgactttcttttttgaactcaacagattccctgggtattaacccagcacaactcctttatgggtcattgcacattctggtatctcattaagaatt

SEQ ID NO: 720378 - DNA, 120 bp, Artificial Sequence
  ENSG00000197782_48 (sequence is synthesized)
gtcataaaaaagagatcccaggaggccttccagtgaaactctatcatcatgcaatcttgggatttctaagttggaagtcacagtccctttgcaaacataataaaacactttaaaatattt

SEQ ID NO: 720379 - DNA, 120 bp, Artificial Sequence
  ENSG00000197782_49 (sequence is synthesized)
gctaaagttacaaaccaattatgtaaaaatttaaaaatcacctactacttttaaaagcagagaaggcatccatagactatttccttgcttacaagctcagtgaacatactgaattcactt

SEQ ID NO: 720380 - DNA, 120 bp, Artificial Sequence
  ENSG00000197782_50 (sequence is synthesized)
ataaaaagaattttctcaattttagttgcttttcaaaaaattcttattccttttatttgtaattctttgacattgttgctgcttcacagttttggtaattggacagtttggtctttatta

SEQ ID NO: 720381 - DNA, 120 bp, Artificial Sequence
  ENSG00000197782_51 (sequence is synthesized)
tgatattaacatttttacctgtcctgaaacaaggaaatacaatcaaagaaacagaagattggtggaccttgaaccacattatgatatcagatgacccagagtcatggttactaagttgct

SEQ ID NO: 720382 - DNA, 120 bp, Artificial Sequence
  ENSG00000197782_52 (sequence is synthesized)
taaatttttagtaacaaagatgtattagaaagtgacaggtcaattcaataatggtttttttggatacatttaattatataatccccttaagttgtgcttagtcagcagtatttaatctgt

SEQ ID NO: 720383 - DNA, 120 bp, Artificial Sequence
  ENSG00000197782_53 (sequence is synthesized)
tgtctattatatatctaactggtctgttatgtttattatatatttatatattgcttattcatatcttattggagtaactcatttttaaaacaatatatttcatctcctaggagaagagga

SEQ ID NO: 720384 - DNA, 120 bp, Artificial Sequence
  ENSG00000197782_54 (sequence is synthesized)
tcgagtatgtgtttttattctttttcattaggacattggggtattttcttattgtgaaatgtattgaatatttcatttatttggtttgtgagtctgaccttcactccctagcactgattt

SEQ ID NO: 720385 - DNA, 120 bp, Artificial Sequence
  ENSG00000197782_55 (sequence is synthesized)
ttatttggccctccttttacctgattcataggagttacgagtagccgttaatatggatacatttttcccatttctagtacactgccccttccaaaagtgtctggcttactcaaacttttc

SEQ ID NO: 720386 - DNA, 120 bp, Artificial Sequence
  ENSG00000197782_56 (sequence is synthesized)
tgtatttgttccatcttgcttttacagatcaatacaaataggtaactataccttctaaacaaacatcaagttggtggaaaaaaggcatatgaacagttctttctcacctactatcaacaa

SEQ ID NO: 720387 - DNA, 120 bp, Artificial Sequence
  ENSG00000197782_57 (sequence is synthesized)
acagtaaattaaacattcctaactgcagcctccttttgtaaaatttataaccatttatcttttgagtgtgacatgatactagatgtatgataattacatgttttgtgtatcagtatgaac

SEQ ID NO: 720388 - DNA, 120 bp, Artificial Sequence
  ENSG00000197782_58 (sequence is synthesized)
atgatttttaacagacttgttccaatgaactattatagagatggtccccaacaatgtcaactaacaatttctcagctttatgatggtacaaaagtgatatgttgctatagtttggatatt

SEQ ID NO: 720389 - DNA, 120 bp, Artificial Sequence
  ENSG00000197782_59 (sequence is synthesized)
tgtccctccaaatctcatgttgaagtttgatctcagtgttggaggtggggcctaatggaaggtgtttgggtcatggtggaagatccctcatgaataaattaatgccctctctggattgag

SEQ ID NO: 720390 - DNA, 120 bp, Artificial Sequence
  ENSG00000197782_60 (sequence is synthesized)
gggtgagtgagctatcgctctgttaatttttgtgagagctggttgttcaaaagaacctggcacctcctccctcaccctcttgttttctctcttgccatgtgatgtctgcatacactggct

SEQ ID NO: 720391 - DNA, 120 bp, Artificial Sequence
  ENSG00000197782_61 (sequence is synthesized)
ctcccttcatcatctgccatgagtggaagcagcctgagacccttagcagaagcagatgctgcaccatgattcttgtacattctgcagaacagtgagccaaataaacctctttattaatca

SEQ ID NO: 720392 - DNA, 120 bp, Artificial Sequence
  ENSG00000197782_62 (sequence is synthesized)
ggggggcagctacatgttgagaaccacagcgtcctcagagctctgtccccagaaaccagctccaaactggttgtactggttgaatcgattcctcttccttttacttccttcctatttcgt

SEQ ID NO: 720393 - DNA, 120 bp, Artificial Sequence
  ENSG00000197782_63 (sequence is synthesized)
ctctgcggattggggctccagcctgactgacccgacagtgcgggtggcctagggggaggcgctcagagtaggaacccgggggtgcagacgggatctgccggatccccaggctcgtatttt

SEQ ID NO: 720394 - DNA, 120 bp, Artificial Sequence
  ENSG00000197785_0 (sequence is synthesized)
accggctcgcggcgcgtggaggctgctcccagccgcgcgcgagtcagactcgggtgggggtcccggcggcggtagcggcggcggcggtgcgagcatgtcgtggctcttcggcattaacaa

SEQ ID NO: 720395 - DNA, 120 bp, Artificial Sequence
  ENSG00000197785_1 (sequence is synthesized)
gcatgtcgtggctcttcggcattaacaagggccccaagggtgaaggcgcggggccgccgccgcctttgccgcccgcgcagcccggggccgagggcggcggggaccgcgggttgggagacc

SEQ ID NO: 720396 - DNA, 120 bp, Artificial Sequence
  ENSG00000197785_2 (sequence is synthesized)
cttcgaccccaccggcctggagcgcgccgccaaggcggcgcgcgagctggagcactcgcgttatgccaaggacgccctgaatctggcacagatgcaggagcagacgctgcagttggagca

SEQ ID NO: 720397 - DNA, 120 bp, Artificial Sequence
  ENSG00000197785_3 (sequence is synthesized)
acagtccaagctcaaaatgcggctggaagccctgagcctgctgcacacactagtctgggcatggagtctctgccgtgccggagccgtgcagacacaggagcggctgtcaggcagtgccag

SEQ ID NO: 720398 - DNA, 120 bp, Artificial Sequence
  ENSG00000197785_4 (sequence is synthesized)
ccctgagcaagtgccagctggtgagtgctgtgctctgcaggagtatgaggccgccgtggagcagctcaagagcgagcagatccgggcgcaggctgaggagaggaggaagaccctgagcga

SEQ ID NO: 720399 - DNA, 120 bp, Artificial Sequence
  ENSG00000197785_5 (sequence is synthesized)
ggagacccggcagcaccaggccagggcccagtatcaagacaagctggcccggcagcgctacgaggaccaactgaagcagcagcaacttctcaatgaggagaatttacggaagcaggagga

SEQ ID NO: 720400 - DNA, 120 bp, Artificial Sequence
  ENSG00000197785_6 (sequence is synthesized)
gtccgtgcagaagcaggaagccatgcggcgagccaccgtggagcgggagatggagctgcggcacaagaatgagatgctgcgagtggaggccgaggcccgggcgcgcgccaaggccgagcg

SEQ ID NO: 720401 - DNA, 120 bp, Artificial Sequence
  ENSG00000197785_7 (sequence is synthesized)
ggagaatgcagacatcatccgcgagcagatccgcctgaaggcggccgagcaccgtcagaccgtcttggagtccatcaggacggctggcaccttgtttggggaaggattccgtgcctttgt

SEQ ID NO: 720402 - DNA, 120 bp, Artificial Sequence
  ENSG00000197785_8 (sequence is synthesized)
gacagactgggacaaagtgacagccacggtggctgggctgacgctgctggctgttggggtctactcagccaagaatgccacgcttgtcgccggccgcttcatcgaggctcggctggggaa

SEQ ID NO: 720403 - DNA, 120 bp, Artificial Sequence
  ENSG00000197785_9 (sequence is synthesized)
gccgtccctagtgagggagacgtcccgcatcacggtgcttgaggcgctgcggcaccccatccaggtcagccggcggctcctcagtcgaccccaggacgcgctggagggtgttgtgctcag

SEQ ID NO: 720404 - DNA, 120 bp, Artificial Sequence
  ENSG00000197785_10 (sequence is synthesized)
ggccaccaggcaccgggaagacgctgtttgccaagaaactcgccctgcactcaggcatggactacgccatcatgacaggcggggacgtggcccccatggggcgggaaggcgtgaccgcca

SEQ ID NO: 720405 - DNA, 120 bp, Artificial Sequence
  ENSG00000197785_11 (sequence is synthesized)
tgcacaagctctttgactgggccaataccagccggcgcggcctcctgctctttgtggatgaagcggacgccttccttcggaagcgagccaccgagaagataagcgaggacctcagggcca

SEQ ID NO: 720406 - DNA, 120 bp, Artificial Sequence
  ENSG00000197785_12 (sequence is synthesized)
cactgaacgccttcctgtaccgcacgggccagcacagcaacaagttcatgctggtcctggccagcaaccaaccagagcagttcgactgggccatcaatgaccgcatcaatgagatggtcc

SEQ ID NO: 720407 - DNA, 120 bp, Artificial Sequence
  ENSG00000197785_13 (sequence is synthesized)
acttcgacctgccagggcaggaggaacgggagcgcctggtgagaatgtattttgacaagtatgttcttaagccggccacagaaggaaagcagcgcctgaagctggcccagtttgactacg

SEQ ID NO: 720408 - DNA, 120 bp, Artificial Sequence
  ENSG00000197785_14 (sequence is synthesized)
ggaggaagtgctcggaggtcgctcggctgacggagggcatgtcgggccgggagatcgctcagctggccgtgtcctggcaggccacggcgtatgcctccgaggacggggtcctgaccgagg

SEQ ID NO: 720409 - DNA, 120 bp, Artificial Sequence
  ENSG00000197785_15 (sequence is synthesized)
ccatgatggacacccgcgtgcaagatgctgtccagcagcaccagcagaagatgtgctggctgaaggcggaagggcctgggcgtggggacgagccctccccatcctgagtccacagggaga

SEQ ID NO: 720410 - DNA, 120 bp, Artificial Sequence
  ENSG00000197785_16 (sequence is synthesized)
tccacagctcacggagcctggccgcggacccctcccacccctgccttgccggcccctgcacatttaggatatgctcctgggtggggactgggctgtgcccagggcctctgtcccccagga

SEQ ID NO: 720411 - DNA, 120 bp, Artificial Sequence
  ENSG00000197785_17 (sequence is synthesized)
tgtcttgtggtgcgggtcggccgttctgccccccagggcaccccctgttgtaggcactggctagggaggggcaggcctccttcctgcccctcgagacactcttgggagatgcattttccg

SEQ ID NO: 720412 - DNA, 120 bp, Artificial Sequence
  ENSG00000197785_18 (sequence is synthesized)
tctggctcacagggggagggtgaggctttgcaccccagcccctgcccaggccactgtgagggtgggtgctggctgagcccccggggcagcaggagccaggcaggtgatgtctttgttctc

SEQ ID NO: 720413 - DNA, 120 bp, Artificial Sequence
  ENSG00000197785_19 (sequence is synthesized)
ggctcccacagcagagccaggtgagggggcgcctgccagggccagacccaggtggggcagcctgaaccctgcttccccctgtggccggcatgccccgatctttcacacactggtgaccct

SEQ ID NO: 720414 - DNA, 120 bp, Artificial Sequence
  ENSG00000197785_20 (sequence is synthesized)
gagagaggagggaggagggaacctggcgggggtgtctgaggccgcactgtcagctggccggtccaagcctgtggctggagctggggtctgtttacctaataaagtcccacaggtgcctca

SEQ ID NO: 720415 - DNA, 120 bp, Artificial Sequence
  ENSG00000197785_21 (sequence is synthesized)
gggagccctggcccttgccgctcctcgccgctgtcggcagccacttcccgggcgagactgcgcccccggagcacccccggccggagccgtgtcgcgtgccgggaggatcggactctttcc

SEQ ID NO: 720416 - DNA, 120 bp, Artificial Sequence
  ENSG00000197785_22 (sequence is synthesized)
gggccagcacagcaacaaccccagtcacgtgtcacacggaggatcaagtcctgctggtcggccgtggctgactcctcaggcacgttgggctcccaggttcatgctggtcctggccagcaa

SEQ ID NO: 720417 - DNA, 120 bp, Artificial Sequence
  ENSG00000197785_23 (sequence is synthesized)
accaggccgtaagagcgcaagaggccgcgagggaggccgcccggctgcggggagcggcctggggcaggactgggagctgggtgtggtcccggggcactctggagtcagccattagagctg

SEQ ID NO: 720418 - DNA, 120 bp, Artificial Sequence
  ENSG00000197785_24 (sequence is synthesized)
ccctcggaacggccttgcacaaacgcctaagacctgtaaggtccctcactgctgagccggacgggaggtccccgcgcctccccacgtttgtgtgaggctgatggcgcgtcggagtccccg

SEQ ID NO: 720419 - DNA, 120 bp, Artificial Sequence
  ENSG00000197786_0 (sequence is synthesized)
atggagaataatacagaggtgagtgaattcatcctgcttggtctaaccaatgccccagaactacaggttcccctctttatcatgtttaccctcatctacctcatcactctgactgggaac

SEQ ID NO: 720420 - DNA, 120 bp, Artificial Sequence
  ENSG00000197786_1 (sequence is synthesized)
ctggggatgatcatattaatcctgctggactctcatctccacactcccatgtacttttttctcagtaacctgtctcttgcaggcattggttactcctcagctgtcactccaaaggtttta

SEQ ID NO: 720421 - DNA, 120 bp, Artificial Sequence
  ENSG00000197786_2 (sequence is synthesized)
actgggttgcttatagaagacaaagccatctcctacagtgcctgtgctgctcagatgttcttttgtgcagtctttgccactgtggaaaattacctcttgtcctcaatggcctatgaccgc

SEQ ID NO: 720422 - DNA, 120 bp, Artificial Sequence
  ENSG00000197786_3 (sequence is synthesized)
tccaaattggagatacatttcgcctctctttctgcatgtccaatgtgattcatcactttttctgtgacaaaccagcagtcattactctgacctgctctgagaaacacattagtgagttga

SEQ ID NO: 720423 - DNA, 120 bp, Artificial Sequence
  ENSG00000197786_4 (sequence is synthesized)
ttcttgttcttatatcaagttttaatgtcttttttgcacttcttgttaccttgatttcctatctgttcatattgatcaccattcttaagaggcacacaggtaagggataccagaagcctt

SEQ ID NO: 720424 - DNA, 120 bp, Artificial Sequence
  ENSG00000197786_5 (sequence is synthesized)
tatctacctgtggttctcacctcattgccattttcttattttatataactgtcatcatcatgtacatacgaccaagttccagtcattccatggacacagacaaaattgcatctgtgttct

SEQ ID NO: 720425 - DNA, 120 bp, Artificial Sequence
  ENSG00000197786_6 (sequence is synthesized)
acactatgatcatccccatgctcagtcctatagtctataccctgaggaacaaagacgtgaagaatgcattcatgaaggttgttgagaaggcaaaatattctctagattcagtcttttaat

SEQ ID NO: 720426 - DNA, 120 bp, Artificial Sequence
  ENSG00000197790_0 (sequence is synthesized)
atgctcacttttcataatgtctgctcagtacccagctccttctggctcactggcatcccagggctggagtccctacacgtctggctctccatcccctttggctccatgtacctggtggct

SEQ ID NO: 720427 - DNA, 120 bp, Artificial Sequence
  ENSG00000197790_1 (sequence is synthesized)
gtggtggggaatgtgaccatcctggctgtggtaaagatagaacgcagcctgcaccagcccatgtactttttcttgtgcatgttggctgccattgacctggttctgtctacttccactata

SEQ ID NO: 720428 - DNA, 120 bp, Artificial Sequence
  ENSG00000197790_2 (sequence is synthesized)
cccaaacttctgggaatcttctggttcggtgcttgtgacattggcctggacgcctgcttgggccaaatgttccttatccactgctttgccactgttgagtcaggcatcttccttgccatg

SEQ ID NO: 720429 - DNA, 120 bp, Artificial Sequence
  ENSG00000197790_3 (sequence is synthesized)
ggacctctgcctctgatgatccgcctgcggctgcccctttataaaacccatgttatctcccactcctactgtgagcacatggctgtagttgccttgacatgtggcgacagcagggtcaat

SEQ ID NO: 720430 - DNA, 120 bp, Artificial Sequence
  ENSG00000197790_4 (sequence is synthesized)
aatgtctatgggctgagcatcggctttctggtgttgatcctggactcagtggctattgctgcatcctatgtgatgattttcagggccgtgatggggttagccactcctgaggctaggctt

SEQ ID NO: 720431 - DNA, 120 bp, Artificial Sequence
  ENSG00000197790_5 (sequence is synthesized)
aaaaccctggggacatgcgcttctcacctctgtgccatcctgatcttttatgttcccattgctgtttcttccctgattcaccgatttggtcagtgtgtgcctcctccagtccacactctg

SEQ ID NO: 720432 - DNA, 120 bp, Artificial Sequence
  ENSG00000197790_6 (sequence is synthesized)
ctggccaacttctatctcctcattcctccaatcctcaatcccattgtctatgctgttcgcaccaagcagatccgagagagccttctccaaataccaaggatagaaatgaagattagatga

SEQ ID NO: 720433 - DNA, 120 bp, Artificial Sequence
  ENSG00000197798_0 (sequence is synthesized)
gcgccggccggtagctgcagctggagcagtggcgtttggaggagactcggatataccttctcagaagctgcacaggaggaaagcagtgacaaagaaagaagttgtcattctttgcacgaa

SEQ ID NO: 720434 - DNA, 120 bp, Artificial Sequence
  ENSG00000197798_1 (sequence is synthesized)
actggatggcttctacagggagccaggcctctgatatagacgagatttttggattcttcaacgatggcgaacctcccaccaaaaagcccaggaagctgcttccaagcttaaaaactaaga

SEQ ID NO: 720435 - DNA, 120 bp, Artificial Sequence
  ENSG00000197798_2 (sequence is synthesized)
agcctcgagaacttgtgctagtgattggaacaggcattagtgctgcagttgcgccccaagttccagccctcaaatcctggaaggggttaattcaggccttactggatgctgccattgatt

SEQ ID NO: 720436 - DNA, 120 bp, Artificial Sequence
  ENSG00000197798_3 (sequence is synthesized)
ttgatcttttagaagatgaggagagcaaaaagtttcagaaatgtctccatgaagacaagaacctggtccatgttgcccatgaccttatccagaaactctctcctcgtaccagtaatgttc

SEQ ID NO: 720437 - DNA, 120 bp, Artificial Sequence
  ENSG00000197798_4 (sequence is synthesized)
gatccacatttttcaaggactgtttatatgaagtatttgatgacttggagtcaaagatggaagattctggaaaacagctacttcagtcagttctccacctgatggaaaatggagccctcg

SEQ ID NO: 720438 - DNA, 120 bp, Artificial Sequence
  ENSG00000197798_5 (sequence is synthesized)
tattaactacaaattttgataatctcttggaactgtatgcagcagatcaggggaaacagcttgaatcccttgaccttactgatgagaaaaaggtcctcgagtgggctcaggagaagcgta

SEQ ID NO: 720439 - DNA, 120 bp, Artificial Sequence
  ENSG00000197798_6 (sequence is synthesized)
agctgagcgtgttgcatattcacggagtctacaccaaccctagtggcattgtccttcatccggctggatatcagaacgtgctcaggaacactgaagtcatgagagaaattcagaaactct

SEQ ID NO: 720440 - DNA, 120 bp, Artificial Sequence
  ENSG00000197798_7 (sequence is synthesized)
acgaaaacaagtcatttcttttcctgggctgtggctggactgtggatgacaccactttccaggcccttttcttggaggctgtcaagcataaatctgacctagaacatttcatgctggttc

SEQ ID NO: 720441 - DNA, 120 bp, Artificial Sequence
  ENSG00000197798_8 (sequence is synthesized)
cagaatatttcaagcgactgacatgtgagatctccacaaggggtacatcagcagggatggtgagagaaggtcagctaaatggctcatctgcagcacacagtgaaataagaggctgtagta

SEQ ID NO: 720442 - DNA, 120 bp, Artificial Sequence
  ENSG00000197798_9 (sequence is synthesized)
catgagcgagctagagaaatcaccaccgtttagaccaagctgtaaggccctactacagacagtgtttaacaagtaaacttacaagaacccaacacaattcccagaaagtaacaatagcca

SEQ ID NO: 720443 - DNA, 120 bp, Artificial Sequence
  ENSG00000197798_10 (sequence is synthesized)
gaggttgaagggcggggtagaagaggggggaatgttgcagcgtaatccttcataccacctggttcttgatattctgccgcctgttcaagttcaagaataaaagcgacagcaggacccaaa

SEQ ID NO: 720444 - DNA, 120 bp, Artificial Sequence
  ENSG00000197798_11 (sequence is synthesized)
tgcagctcccaacccactccccaggctagacatgcttgtgtccacacagcacaccaatgtgatacttccactgaccggctgcagctctgcatgaaggactcggggtctggatgccatgga

SEQ ID NO: 720445 - DNA, 120 bp, Artificial Sequence
  ENSG00000197798_12 (sequence is synthesized)
atcactgtggctcttgttgcagttttgtactctatacttggtttttcaattaagcttaatggcttttttaaaacatgacttgaagctctagttttctagatcttttacagtgtacagtat

SEQ ID NO: 720446 - DNA, 120 bp, Artificial Sequence
  ENSG00000197798_13 (sequence is synthesized)
tttacataactaagctgtattaaaagcttgttcatttacttgccaggaccctggctctacttttagagtcattgtaagaaactctaacttgcatcaaggtactaataagcttaattttaa

SEQ ID NO: 720447 - DNA, 120 bp, Artificial Sequence
  ENSG00000197798_14 (sequence is synthesized)
taacccaaagtttaaaggttccgatctttctccttggggtggagtgatctcattctcaggacaaccgtttacttacctgattcctcggagcattatcaacttctgctctgttgtcctgac

SEQ ID NO: 720448 - DNA, 120 bp, Artificial Sequence
  ENSG00000197798_15 (sequence is synthesized)
catacatatgtcctagaactacagttaagtgtgttgtggaattttagttttgaatcctgtataaaagaactccaagacctaaaaggcaatttatttatgaaatttattttcttatataaa

SEQ ID NO: 720449 - DNA, 120 bp, Artificial Sequence
  ENSG00000197798_16 (sequence is synthesized)
tttttttttttttggtcctttgaaaattcagtagtggattgtacattttcccacatccctatcttcataaccactattttaattgacttttatattccagtaggggtgttacagtttacc

SEQ ID NO: 720450 - DNA, 120 bp, Artificial Sequence
  ENSG00000197798_17 (sequence is synthesized)
taattattcctgttaggcaacgtctgatattttttttgccagttttttgtaagtcatgttgtgaaaataacatctgtatctcttcagtttttccagtaatttccttgatgagttctcact

SEQ ID NO: 720451 - DNA, 120 bp, Artificial Sequence
  ENSG00000197798_18 (sequence is synthesized)
gtaatcaggtcaaagatcaggaacatttcagtaatttataaatactgctaaattgttttctacgagggtaatatcaatttgtatatttgagtaccatgcctgtttatactgtaattgacc

SEQ ID NO: 720452 - DNA, 120 bp, Artificial Sequence
  ENSG00000197798_19 (sequence is synthesized)
atatttctaatgactattttcttccatgtgttcagctttttactttttctgaactattatctatgccaagtgttatccagtagaatttcctgcagtcataaaaatactgtataatcttca

SEQ ID NO: 720453 - DNA, 120 bp, Artificial Sequence
  ENSG00000197798_20 (sequence is synthesized)
ctgtctagtatcatagttaggagccacatgtggctggtgcaccgttgaaatgtggccagtgtgactgaggaatggaatttttaatttgaaaccaagtagctgcatatggctagtgctacc

SEQ ID NO: 720454 - DNA, 120 bp, Artificial Sequence
  ENSG00000197798_21 (sequence is synthesized)
gtattttattttgtgggagtattctgctgcttttcactcttctatttgaagttgctcactcacatgccatttgcccatccctggtgagattgaatttttaccgaaacttggccctctaga

SEQ ID NO: 720455 - DNA, 120 bp, Artificial Sequence
  ENSG00000197798_22 (sequence is synthesized)
ctgtttagggacagcagacacatgttgcctgtatgtgaaatgtaaaatgtaaaatgtaaaatgttttgtctacaagcaatcgtagtgcactgtggaaactcactgcttccctgttaggta

SEQ ID NO: 720456 - DNA, 120 bp, Artificial Sequence
  ENSG00000197798_23 (sequence is synthesized)
agtcgtaccatatgtcctcatctccctttagttttctttttgctattaatagttttagcttttcagtctaatgtctgatgctgatgtcctctatttagcagggatggtgagagaaggtca

SEQ ID NO: 720457 - DNA, 120 bp, Artificial Sequence
  ENSG00000197798_24 (sequence is synthesized)
cctgtgagtaccctagtatgtgccacagtatttggaatttcctaaaatttaactatcacaactagcatgatttggctgtcaaaactagcatgccaaatgtaacagggatattcatttaca

SEQ ID NO: 720458 - DNA, 120 bp, Artificial Sequence
  ENSG00000197798_25 (sequence is synthesized)
gcttgtaggtttccataacatttgactcttctgcgcaatgtctgtttatggaccctactcaggacagttgtcttaaccccatttcactgtgtgtctatgagagagaaatgatgttgagga

SEQ ID NO: 720459 - DNA, 120 bp, Artificial Sequence
  ENSG00000197808_0 (sequence is synthesized)
acttccggtaggagcctcgcaggaatggtctccgggtagaggcaggtaaggatgtcccgggccggtggagaaggaagagctgggcgtgtggcttcgcttggaatccgaatcagagcttgg

SEQ ID NO: 720460 - DNA, 120 bp, Artificial Sequence
  ENSG00000197808_1 (sequence is synthesized)
accagagccttccctgagaatgctgaagcaacaccttctttggattgagtttcttccagagggaacgaagaagaggattaaataatacattcaattctaaaataagacatggcccatgag

SEQ ID NO: 720461 - DNA, 120 bp, Artificial Sequence
  ENSG00000197808_2 (sequence is synthesized)
ttggtgatgttcagagatgtggctatagatgtctctcaggaggaatgggaatgcctgaacccagcgcagaggaatttgtacaaggaggtgatgttggagaattatagcaacttggtgtca

SEQ ID NO: 720462 - DNA, 120 bp, Artificial Sequence
  ENSG00000197808_3 (sequence is synthesized)
cttggactttctgtttctaagccagccgtaatctcctcattggagcaagggaaggagccctggatggttgtgagggaagagacaggaagatggtgcccaggtacatggaaaacttgggga

SEQ ID NO: 720463 - DNA, 120 bp, Artificial Sequence
  ENSG00000197808_4 (sequence is synthesized)
tttcacaataatttcttggacaataatgaggctacagacataaatgcagacttggcatccagagatgagccccagaagttatctccaaaaagggatatttatgaaacagaattatcccag

SEQ ID NO: 720464 - DNA, 120 bp, Artificial Sequence
  ENSG00000197808_5 (sequence is synthesized)
tgggttaacatggaagaatttaaaagccatagtcctgagagatcaattttcagcgctatctgggaaggcaactgtcattttgagcaacatcagggacaagaggagggttattttagacaa

SEQ ID NO: 720465 - DNA, 120 bp, Artificial Sequence
  ENSG00000197808_6 (sequence is synthesized)
cttatgattaaccatgaaaacatgcccatttttagccaacatactttactcactcaagaattttatgatagagagaaaatctctgaatgtaaaaagtgtagaaaaatcttcagttaccat

SEQ ID NO: 720466 - DNA, 120 bp, Artificial Sequence
  ENSG00000197808_7 (sequence is synthesized)
ttattttttagtcaccacaaaagaactcattctaaagaactttctgaatgtaaagaatgcacagaaattgttaatacaccatgcctttttaaacaacagacaattcaaaatggtgacaaa

SEQ ID NO: 720467 - DNA, 120 bp, Artificial Sequence
  ENSG00000197808_8 (sequence is synthesized)
tgcaatgagtgtaaagaatgttggaaggcctttgttcattgctcacaacttaaacatctaagaattcataatggtgaaaaacgctatgaatgtaacgaatgtgggaaggcctttaattat

SEQ ID NO: 720468 - DNA, 120 bp, Artificial Sequence
  ENSG00000197808_9 (sequence is synthesized)
ggctcagaacttactctacatcaaagaattcacactggtgagaaaccttatgaatgtaaagaatgtgggaaggcctttagacagcgatcacagcttactcaacatcagagacttcatact

SEQ ID NO: 720469 - DNA, 120 bp, Artificial Sequence
  ENSG00000197808_10 (sequence is synthesized)
ggtgaaaaaccctatgaatgtaagcaatgtgggaaggcttttattcgtggctttcaacttactgaacacctgcgactccatactggagagaaaccttatgaatgtaaagaatgtggaaag

SEQ ID NO: 720470 - DNA, 120 bp, Artificial Sequence
  ENSG00000197808_11 (sequence is synthesized)
acttttaggcatcgctcacatcttactatacatcagagaattcatactggtgagaaaccctatgaatgtcgggaatgtgggaaggcctttagctatcactcaagcttctcacaccatcag

SEQ ID NO: 720471 - DNA, 120 bp, Artificial Sequence
  ENSG00000197808_12 (sequence is synthesized)
aaaattcattctggcaagaaaccttatgaatgtcatgaatgtgggaaggctttttgtgatggcttacaactaaccctacatcagaggattcatactggtgagaaaccctatgagtgtaag

SEQ ID NO: 720472 - DNA, 120 bp, Artificial Sequence
  ENSG00000197808_13 (sequence is synthesized)
gaatgtgggaagacttttagacagtgttcacacctcaaaagacatcagagaattcatactggtgagaaacctcatgaatgcatgatatgtggtaaggcctttagacttcattcacacctt

SEQ ID NO: 720473 - DNA, 120 bp, Artificial Sequence
  ENSG00000197808_14 (sequence is synthesized)
agaaaccctatgaatgtaaggaatgtgggaaggcctttagctatcattcaagcttctcacaccatcagagaattcattctggaaagaaaccttatcaatgcgggaaggcgtttaatcata

SEQ ID NO: 720474 - DNA, 120 bp, Artificial Sequence
  ENSG00000197808_15 (sequence is synthesized)
tatcaatgcgggaaggcgtttaatcatagattacaacttaacttacatcagactcttcatactggcgagaagccagtcaggtttcctctcctccctccccatcctagtctagcatcatga

SEQ ID NO: 720475 - DNA, 120 bp, Artificial Sequence
  ENSG00000197808_16 (sequence is synthesized)
agtgagaaagtggataactaaagtgtaaattttggtctcattttaatgctgtttctgagttattgtattaaccattattgagaataaatttttttattgagaataaattttctaaaatta

SEQ ID NO: 720476 - DNA, 120 bp, Artificial Sequence
  ENSG00000197808_17 (sequence is synthesized)
catgtttcactgaaaccagtgaaatatttcactgaaacagtgaaataaaatgaaaacaatttcctcccttccctcaaatctctgagataaccagtatgtgtatttcttcttcctttatgc

SEQ ID NO: 720477 - DNA, 120 bp, Artificial Sequence
  ENSG00000197808_18 (sequence is synthesized)
tcaaacaacctgtacacagaaagcattttttgcatgtgtttggaggagcttttacccccatacagacatttgacagcgtcttgtccttttcataataatcatgaatacttttccaggtca

SEQ ID NO: 720478 - DNA, 120 bp, Artificial Sequence
  ENSG00000197808_19 (sequence is synthesized)
gtacgtaaagatgtaacccattctttgtaaggttcagaatatttctagaatggaatgtatgtccgtattttgggccattacctactacagacattgaagttgtttctaatgttcacctag

SEQ ID NO: 720479 - DNA, 120 bp, Artificial Sequence
  ENSG00000197808_20 (sequence is synthesized)
aactctaattttaccttcttttgtttctattgtgcagattcccaacagtgggattaaagagtatctggcgtatatattttgacattacatttattttttaaaatcttctaaattttttgt

SEQ ID NO: 720480 - DNA, 120 bp, Artificial Sequence
  ENSG00000197808_21 (sequence is synthesized)
ttaataaaagcacacattataaaaattcaaaaattaccaaaaatgtgaaaattaattctcccctaacatccagttctgtagccactcactttccacagatgcaacaactgctatcagttt

SEQ ID NO: 720481 - DNA, 120 bp, Artificial Sequence
  ENSG00000197808_22 (sequence is synthesized)
ccttttattctaacgggaatatttcatgtaaatttcataaattctttggacaaaagtaggttattcataatatgtgatttattacacattctcattattagtccacatttggcctacttc

SEQ ID NO: 720482 - DNA, 68 bp, Artificial Sequence
  ENSG00000197808_23 (sequence is synthesized)
attacacattctcattattagtccacatttggcctacttcattttttttttttttgagacacccaggt

SEQ ID NO: 720483 - DNA, 120 bp, Artificial Sequence
  ENSG00000197808_24 (sequence is synthesized)
ctgagtagctgggactacaggcatgcgcagccactatgcccggccaataagctatatttattcttatttgatgtggatgaaaattatcaaaattggccaggcttggtggctcatgcctgt

SEQ ID NO: 720484 - DNA, 120 bp, Artificial Sequence
  ENSG00000197808_25 (sequence is synthesized)
ctcaaaaagaaaaaaaaaaaagaaaattgtcaaaacacaaccaatagataatgttaacatgcattctaacatgcaatttattggatttagcgaatagaatgtgagtggaagttacttttg

SEQ ID NO: 720485 - DNA, 76 bp, Artificial Sequence
  ENSG00000197808_26 (sequence is synthesized)
ttggatttagcgaatagaatgtgagtggaagttacttttggtagaactgttgggaaaagggcttgtggagtgcctg

SEQ ID NO: 720486 - DNA, 120 bp, Artificial Sequence
  ENSG00000197808_27 (sequence is synthesized)
cacgttcctatgaccagagtgtgacctgctctcttatctataaacactgtgctcaaggagaaagacactcctttgaagcattggaatgtggccagatatgctggcttctagttaggccca

SEQ ID NO: 720487 - DNA, 120 bp, Artificial Sequence
  ENSG00000197808_28 (sequence is synthesized)
ctccccacagctgctctctgataagtaaaagaataaatcagtagttaagtttatgctgcttcagcacaaagaaaatgtacctaaactgccattgcccccctttcactgtttcacccctga

SEQ ID NO: 720488 - DNA, 120 bp, Artificial Sequence
  ENSG00000197808_29 (sequence is synthesized)
acatctgcttcttagatctaagtgattgtactcaataaatagtgtggagaccagagcttggcgcctttgcagcttttgatttgctctggccccttggctcccacctttatgaactcttaa

SEQ ID NO: 720489 - DNA, 120 bp, Artificial Sequence
  ENSG00000197808_30 (sequence is synthesized)
ctattaatttagggctagctttcaaataactggatgaattttctctttatgtattgtagaaaccagcacagctaaatggaggtacattttcattttccccatccttacacgttcttttgg

SEQ ID NO: 720490 - DNA, 120 bp, Artificial Sequence
  ENSG00000197808_31 (sequence is synthesized)
agaatctctcctgtccagtggtaagagaataagtaaaaaaggcaaatgtctcggaattagtatgaaaatagctttgaccttatagacttcctgatagggtctcaggtaccctctgtggtc

SEQ ID NO: 720491 - DNA, 120 bp, Artificial Sequence
  ENSG00000197808_32 (sequence is synthesized)
cttggaccacccattgagtactgctgctatatagtaatgaaaattaagaaactactactatttgtaatattacaaatgaacctcacatgtggtactggacagaagatgctggagaaaaaa

SEQ ID NO: 720492 - DNA, 120 bp, Artificial Sequence
  ENSG00000197808_33 (sequence is synthesized)
gtacctcctatatcattccatttattggaaattcagaaatagacaaaaaccactgcatagtgtaagaaggcaggatatcgcctacctttggtggacttggcatccagagatgagccccag

SEQ ID NO: 720493 - DNA, 120 bp, Artificial Sequence
  ENSG00000197816_0 (sequence is synthesized)
gagcgccgttaacttttccccgaagagcatggcagagtgaagcacaagcaataatcctgtattattcgcgttcccagagtcccttcggatttgcgccatgcgcggcggggagaaccggcc

SEQ ID NO: 720494 - DNA, 120 bp, Artificial Sequence
  ENSG00000197816_1 (sequence is synthesized)
tcctgctcgagttcagagctcatctgaggaattggaattgagacaccaaagcctagacgcgtttcctggacgacggcttcccggcaggggcatccagccagcggccaagatgtcgtcagt

SEQ ID NO: 720495 - DNA, 120 bp, Artificial Sequence
  ENSG00000197816_2 (sequence is synthesized)
ggggaaggtgacccaggttccgaatgggaaagcctaccagcagatcttccaggctgaggtgcagctggtccactccctggcggccaccaggaagcgggctgcagagcgttctgtgaccct

SEQ ID NO: 720496 - DNA, 120 bp, Artificial Sequence
  ENSG00000197816_3 (sequence is synthesized)
gaagagtggcaggatacccatgatgaagaaggtggagactcctgaaggggaggtgatgtctccccgacagcagaagtggatgcacagcctccccaacgactggatcatggaaaaccctgt

SEQ ID NO: 720497 - DNA, 120 bp, Artificial Sequence
  ENSG00000197816_4 (sequence is synthesized)
tctccacagggaaaaggaaagagccaagagggaaaaagcccgagagagtgagaacaccatcgctgcccgagaagtgcggggtctcatggatactatagttcctgagaagataagcaccag

SEQ ID NO: 720498 - DNA, 120 bp, Artificial Sequence
  ENSG00000197816_5 (sequence is synthesized)
cacctttcaaaggcaagcagaacacaagaggaagagctacgagagcgctctggccagctttcaggaggagattgcgcaggtgggaaaggaaatggaacctctcatcgtggacacaggggg

SEQ ID NO: 720499 - DNA, 120 bp, Artificial Sequence
  ENSG00000197816_6 (sequence is synthesized)
actttttttgaagaagctgactgagtctgatgaagaaatgaaccgtctcttcctaaaggtggaaaatgacaccaaccttgaggactacaccatccaagccctgctggagctgtgggataa

SEQ ID NO: 720500 - DNA, 120 bp, Artificial Sequence
  ENSG00000197816_7 (sequence is synthesized)
ggtggccgggcggttactgctccggaagcaggagattaaggagctggatgaggccctgcactcgctggagttctcccgaaccgataaactaaaaagcgtgttgaagaaatatgcagaagt

SEQ ID NO: 720501 - DNA, 120 bp, Artificial Sequence
  ENSG00000197816_8 (sequence is synthesized)
catagagaaaacttcctacctcatgcggcccgaagtgtacaggctgataaatgaagaagccatggtcatgaactatgccctgctgggcaaccggaaggctctcgcccagctgtttgtcaa

SEQ ID NO: 720502 - DNA, 120 bp, Artificial Sequence
  ENSG00000197816_9 (sequence is synthesized)
cctgatggagtccaccctgcagcaggagctggacagccgccaccgctggcaaggcttggtggacacctggaaggctctcaagaaggaggccctgctgcagagtttcagtgagttcatggc

SEQ ID NO: 720503 - DNA, 120 bp, Artificial Sequence
  ENSG00000197816_10 (sequence is synthesized)
cagtgagagtatccatactcccccggctgtgacgaaggagctagaggtcatgctgaagacccagaacgtcctgcagcaaaggcggctgaagcatctctgcaccatctgtgacctcctgcc

SEQ ID NO: 720504 - DNA, 120 bp, Artificial Sequence
  ENSG00000197816_11 (sequence is synthesized)
ccccagttacagcaaaactcagctgactgagtggcattcttccctcaactccctgaacaaggagctagacacctaccacgtggactgcatgatgcggatccgcctgctgtatgagaagac

SEQ ID NO: 720505 - DNA, 120 bp, Artificial Sequence
  ENSG00000197816_12 (sequence is synthesized)
atggcaggagtgcctgatgcatgtgcagaattgtaagaagcagctgctggactggaaagccttcactgaggaggaggcagagaccctggtgaaccagttcttcttccagatggtgggagc

SEQ ID NO: 720506 - DNA, 120 bp, Artificial Sequence
  ENSG00000197816_13 (sequence is synthesized)
actccagggcaaagtggaggaggacctggagctcttggacaaatccttcgagactctggcagatcagacagagtggcagagttcacacctcttcaagtatttccaggaggtggtacaact

SEQ ID NO: 720507 - DNA, 120 bp, Artificial Sequence
  ENSG00000197816_14 (sequence is synthesized)
gtgggaggcacaccagagcgagctgttggtgcaggagctggagctggagaagaggatggagcagcaccggcagaagcacagcctggagagccaggtgcaggaggcccacctcgataggct

SEQ ID NO: 720508 - DNA, 120 bp, Artificial Sequence
  ENSG00000197816_15 (sequence is synthesized)
cttggaccaactgaggcagcaaagtgacaaagaaacactggcgtttcacctggaaaaggtcaaagattatctgaagaacatgaaatccaggtatgaatgttttcacaccctcctgacaaa

SEQ ID NO: 720509 - DNA, 120 bp, Artificial Sequence
  ENSG00000197816_16 (sequence is synthesized)
ggaagtgatggagtacccagcgatcatgctgaaagaactcaactcctacagctctgccctcagccaatacttctttgtgcgtgaaatctttgaacagaacttggctggagaagtcatttt

SEQ ID NO: 720510 - DNA, 120 bp, Artificial Sequence
  ENSG00000197816_17 (sequence is synthesized)
caaattcaggcaaccagaagcacatgaaaaaccctcccagaagagagtgaaaaaactgaggaagaagcaagggtctaaagaggacatgaccagaagtgaggaaagcataagtagtgggac

SEQ ID NO: 720511 - DNA, 120 bp, Artificial Sequence
  ENSG00000197816_18 (sequence is synthesized)
aagtactgccaggtcagtagaagaggtggaagaagaaaacgatcaagaaatggagtccttcataactgaagaggtgctggggcagcagaaaaaatctccactgcatgctaagatggatga

SEQ ID NO: 720512 - DNA, 120 bp, Artificial Sequence
  ENSG00000197816_19 (sequence is synthesized)
gtccaaagaaggctctattcagggactggaagaaatgcaggttgaaagagagggctccttaaacccatccctgaatgaggagaatgtgaagggtcaaggagaaaagaaggaggagtcaga

SEQ ID NO: 720513 - DNA, 120 bp, Artificial Sequence
  ENSG00000197816_20 (sequence is synthesized)
ggaggaagatgagaaggaggaagaggaggaggaggagaagctggaggaagagaaggaggagaaggaggcacaggaagagcaagagagtttatctgtgggtgaggaagaagacaaggaaga

SEQ ID NO: 720514 - DNA, 120 bp, Artificial Sequence
  ENSG00000197816_21 (sequence is synthesized)
gggtctagaggagatatactatgaggacatggagtccttcacaatctccagtggaaacacttattttgtctttgtacccctggaagaagagcattgtaggaagtcccattccaccttctc

SEQ ID NO: 720515 - DNA, 120 bp, Artificial Sequence
  ENSG00000197816_22 (sequence is synthesized)
agccatgttcatcaacgacacttccagtgccaagttcatagaacaagtgacaattccatcgagactaattttagaaattaagaaacaacttcgagctggcttcttcgagcaccttgagaa

SEQ ID NO: 720516 - DNA, 120 bp, Artificial Sequence
  ENSG00000197816_23 (sequence is synthesized)
gtggtttgaccagtgttccctcaacacccgggtcaccgtggccaccaaaatcaatgagctggattcagaactggagctgcatctgcacctgcaccagccaagagcccagcagattgaaaa

SEQ ID NO: 720517 - DNA, 120 bp, Artificial Sequence
  ENSG00000197816_24 (sequence is synthesized)
agacatccacaacgtcagggcagccgagcttttgcttcatcaagagcagttggacagccactgtgctggggtgaccgagacgctgaagaagaagcggctgatgttctgccagttccaaga

SEQ ID NO: 720518 - DNA, 120 bp, Artificial Sequence
  ENSG00000197816_25 (sequence is synthesized)
agagcaaaacgtgaggagcaaaaacttccgccttaagatctatgacatggagcacatcttcttgaatgccaccaggagccaaaagctggtcactctcagcaacacactgcaccaggagtt

SEQ ID NO: 720519 - DNA, 120 bp, Artificial Sequence
  ENSG00000197816_26 (sequence is synthesized)
gcttagctatgttgatgtcacccaggtgtccctgcgcagcttccggcagtacttggaggagagtctgggcaaactccgctactcaaatattgagttcatcaaacactgcagattgttttc

SEQ ID NO: 720520 - DNA, 120 bp, Artificial Sequence
  ENSG00000197816_27 (sequence is synthesized)
agagggaggcaacttttctcctaaagaaatcaattcactgtgttcccgactggagaaggaagctgcccggatagagttggttgaaagtgtcatcatgctcaacatggagaagttggagaa

SEQ ID NO: 720521 - DNA, 120 bp, Artificial Sequence
  ENSG00000197816_28 (sequence is synthesized)
tgagtacctggaccaggccaatgatgtcatcaacaagtttgaaagcaaattccataacctgtctgtggaccttattttcatagagaaaatccagcggttgctgacgaatctgcaagtgaa

SEQ ID NO: 720522 - DNA, 120 bp, Artificial Sequence
  ENSG00000197816_29 (sequence is synthesized)
ggagagaaaaccacagtgaccacagaagaactcctcagcttcgtccaaacttggaaggaaaaactgagccagaggattcagtaccttaactgcagcctggacagggtgtccatgactgaa

SEQ ID NO: 720523 - DNA, 120 bp, Artificial Sequence
  ENSG00000197816_30 (sequence is synthesized)
ctggtctttaccaacaccatcctgaaggaccaggaggaagacagtgacatcctgacatcttcagaagcccttgaagaggaggccaagctggacgtggtcacccctgagtccttcacccag

SEQ ID NO: 720524 - DNA, 120 bp, Artificial Sequence
  ENSG00000197816_31 (sequence is synthesized)
ctgagccgcgtggggaagcccctgattgaggacccagctgtggatgtgatcaggaagctcctgcaacttcccaacacaaaatggccaacccaccattgtgacaaagatccgtcccagaca

SEQ ID NO: 720525 - DNA, 120 bp, Artificial Sequence
  ENSG00000197816_32 (sequence is synthesized)
ggtagaggcgcatgggcctgtgggtctcggggcagcagtgaggcaggggctggtggtgctgtgtgctcacctcctgtcctctgctcctgtcctgggccctcgtcacccaaaggcttcaag

SEQ ID NO: 720526 - DNA, 120 bp, Artificial Sequence
  ENSG00000197816_33 (sequence is synthesized)
cgacatcggtgccagccagaaaactctgggaagaaggctgtacccagtgccagtgctacctctgcaggcagcttcacaccgcaccccaagcccaacaaaatggagagaaagtaccgggtg

SEQ ID NO: 720527 - DNA, 120 bp, Artificial Sequence
  ENSG00000197816_34 (sequence is synthesized)
cttggggacaagcctccccctgctgccgaggattttaaggggatcatcttgaccctcctctgggagagcagtgagaacctgctgacagtcgcagaggagttctaccgtaaagaaaaacgc

SEQ ID NO: 720528 - DNA, 120 bp, Artificial Sequence
  ENSG00000197816_35 (sequence is synthesized)
ccagtcaccaggcctgactgcatgtgtgacacctttgaccagtgcgccgagaacattagcaaaaagatcctggagtatcagagccaggcaaataagtaccacaactcctgcctcatagaa

SEQ ID NO: 720529 - DNA, 120 bp, Artificial Sequence
  ENSG00000197816_36 (sequence is synthesized)
ttacggatccagatcaggagatttgaggagctgctgccccaagtgtgttggctggtgatggagaatttcaaggaacaccactggaaaaagtttttcacctctgtgaaggagatccgagga

SEQ ID NO: 720530 - DNA, 120 bp, Artificial Sequence
  ENSG00000197816_37 (sequence is synthesized)
cagttcgaggaacagcagaagcggctggagaaaagaaaggacaaaaatgcccagaagctccatctaaatcttggacaccccgtacatttccaagaaatggagtctctacacttaagtgaa

SEQ ID NO: 720531 - DNA, 120 bp, Artificial Sequence
  ENSG00000197816_38 (sequence is synthesized)
gaggaaaggcaggaagagctggacagcatgattaggatgaacaaggagaagctggaggaatgtaccagaaggaatggccaggttttcataaccaacttggccaccttcaccgagaagttc

SEQ ID NO: 720532 - DNA, 120 bp, Artificial Sequence
  ENSG00000197816_39 (sequence is synthesized)
ctactgcagttggatgaggtggtcaccattgacgatgtccaggttgcaaggatggagccccccaaacagaaattatcaatgctcatacgaaggaaactcgctgggctctccctgaaggaa

SEQ ID NO: 720533 - DNA, 120 bp, Artificial Sequence
  ENSG00000197816_40 (sequence is synthesized)
gagagtgagaaacccctgattgaacgtggaagcaggaagtggccagggatcaaacccaccgaagtcaccatccaaaacaagattcttctccagccaacatcatcgatttccaccaccaaa

SEQ ID NO: 720534 - DNA, 120 bp, Artificial Sequence
  ENSG00000197816_41 (sequence is synthesized)
accaccctgggccacctggcggccgtggaagcccgagatgctgtgtacctgaaatatttagcatcatttgaggaggagctaaagaggatccaggatgactgtacatctcagataaaggag

SEQ ID NO: 720535 - DNA, 120 bp, Artificial Sequence
  ENSG00000197816_42 (sequence is synthesized)
gctcagcgctggaaggacagctggaagcagtccctgcacactatccaaggcctgtatgtgtgaccctccgccccaccatgaataaacactttcttatacagactccttccctgtccatct

SEQ ID NO: 720536 - DNA, 120 bp, Artificial Sequence
  ENSG00000197816_43 (sequence is synthesized)
acctgcctacctactttccgtccatccctccctcccttcatccctccacccctgctctgtgccgggcactgtagctttaccagcgaacaggacacagcatggtccctgcccacgtggagc

SEQ ID NO: 720537 - DNA, 120 bp, Artificial Sequence
  ENSG00000197816_44 (sequence is synthesized)
cctcttcccatgaggaaggcaagcatgaaaggggaattccacgtggttagcagggagggtgagtaccaggaatcagtcacttcaaataggcaccagagcttcaaaggacatcacctccaa

SEQ ID NO: 720538 - DNA, 120 bp, Artificial Sequence
  ENSG00000197816_45 (sequence is synthesized)
acagcatgctgggcagggcacgtcatcttgaaaaatgaaataaaggtcatgggaaaatgatattttaatttaacagaataaacaagtatgggttataattgcaactctgcactggttcct

SEQ ID NO: 720539 - DNA, 120 bp, Artificial Sequence
  ENSG00000197816_46 (sequence is synthesized)
agacccaacaaataactaatccaatgttgattggtatttgtgccacaatttgtctgagcaaattgcaatattttggaaaaaaaaaaatcttccaggctcctttagtcctgtgttgcccag

SEQ ID NO: 720540 - DNA, 120 bp, Artificial Sequence
  ENSG00000197816_47 (sequence is synthesized)
atcattctcttggagtcctccagcctgccagtctcttgttcgtcaactctcttcttcaattacatggcgtgagcgtacagccttcatttgtcggtagctgtgtgtgtcatctggacaggt

SEQ ID NO: 720541 - DNA, 120 bp, Artificial Sequence
  ENSG00000197816_48 (sequence is synthesized)
ttcctcagccatagacctaggaggccccagctcccaaatttccagcccctgaaagctgtgtgaccctccaagtgcagttccctcacctggggacactcactctgctctcctggtttgctc

SEQ ID NO: 720542 - DNA, 120 bp, Artificial Sequence
  ENSG00000197816_49 (sequence is synthesized)
cacccagtgaggccctgcttggttagcttggttagcttggtggcctttgtgcactgaagccaggagagtgaggagtccccttccatcaaggcaaaagcaatctcctgttcttttctgtgc

SEQ ID NO: 720543 - DNA, 120 bp, Artificial Sequence
  ENSG00000197816_50 (sequence is synthesized)
tccccccacccccaccccaatgtgctacctttcattgcttattattccgaaaggaatatatgcgcattgtagaaaaaagaatttatgaaaccagcaaaaggataactttaaaatcctgag

SEQ ID NO: 720544 - DNA, 69 bp, Artificial Sequence
  ENSG00000197816_51 (sequence is synthesized)
ttgggaggccaaggcgagcagatcatctgagctcaggagttcggggccagctgaggcaacatgacacac

SEQ ID NO: 720545 - DNA, 120 bp, Artificial Sequence
  ENSG00000197816_52 (sequence is synthesized)
cacttcactctggcctgagcaacagaatgagactctgtctcaaataaacgaataaataaataataaaatcctggaatctagagacagtcactgtccatagcatctttccatgtatgtgag

SEQ ID NO: 720546 - DNA, 120 bp, Artificial Sequence
  ENSG00000197816_53 (sequence is synthesized)
ttatttttataaaatggaatcataacatgcattaggttccataaactgcttggtaaatgttaactggataaaccctatgccatatccttcagtattcatttacatcattggttttcatac

SEQ ID NO: 720547 - DNA, 120 bp, Artificial Sequence
  ENSG00000197816_54 (sequence is synthesized)
ttttctgactctgacccactgtataaacatgttctaaacacacggtccttgcacacatacacaacttgagaccaacaggtcacaggacagcacttaaccttactagaaaggctgctttct

SEQ ID NO: 720548 - DNA, 120 bp, Artificial Sequence
  ENSG00000197816_55 (sequence is synthesized)
aatattttctccctgctttttaaatcctagcccagtccactaactcagttcatggcccacaaaggggctttgattgcagtgtgggacactgtcatttaaacagctgcagagtgttcccac

SEQ ID NO: 720549 - DNA, 120 bp, Artificial Sequence
  ENSG00000197816_56 (sequence is synthesized)
tgcctggggaaccagatcgcctctgtcggacaagggcgaggatgtcccatgcagggctcctagaaagaaggcagagatgacatcctcccacattagctctttgtacacatctgtaatcat

SEQ ID NO: 720550 - DNA, 120 bp, Artificial Sequence
  ENSG00000197816_57 (sequence is synthesized)
tctagttttatttcctcttctgtgaattgtctgtgtgtgtcccttggccgtttctgaatcatttattatgtttaaaccagatcacatcttgggagaggcctcctggctgagggccagatg

SEQ ID NO: 720551 - DNA, 120 bp, Artificial Sequence
  ENSG00000197816_58 (sequence is synthesized)
ctggttacttggacacagtggatataatggcttgggtccccagatctccctgcagagttcacccatcccctcttcagctggccttggagggatgatcctctcctagcagcactgtgctca

SEQ ID NO: 720552 - DNA, 120 bp, Artificial Sequence
  ENSG00000197816_59 (sequence is synthesized)
gactaattttagaaattaagaaacagctggtcactctcagcaacacactgcaccaggagttgcttagctatgttgatgtcacccaggtgtccctgcgcagcttccggcagtacttggagg

SEQ ID NO: 720553 - DNA, 120 bp, Artificial Sequence
  ENSG00000197816_60 (sequence is synthesized)
gccctggggggctggtgagggctaggttgggcaggggtctgctttccccaactctatcaaagtgaaaacaagtgatccattgaggggactgattaatttttgttttccttaaaaataatt

SEQ ID NO: 720554 - DNA, 120 bp, Artificial Sequence
  ENSG00000197816_61 (sequence is synthesized)
ttttgattaaaaagcaaatgccagatggctcaacgtttatatataaaaaatgaaaccctattaagtaaacactcccatactcttggggttagggataccttttctaagtatgacaggaga

SEQ ID NO: 720555 - DNA, 120 bp, Artificial Sequence
  ENSG00000197816_62 (sequence is synthesized)
tgccttgagaggtgctttctgcaggcggggacgcggccaggccggacgcaaggcctccctccaatctaccgggctcagggggacggccaggggctgctcagtctacttggcgggctaggg

SEQ ID NO: 720556 - DNA, 88 bp, Artificial Sequence
  ENSG00000197816_63 (sequence is synthesized)
cgacacttccagtgccaagttcatagaacaagtgacaattccatcgagactaattttagaaattaagaaacaccgggcaagaggctga

SEQ ID NO: 720557 - DNA, 90 bp, Artificial Sequence
  ENSG00000197816_64 (sequence is synthesized)
aatcgcctgaacccaggaggcggaggttacagtgaaccaagagagtgctgctgcactcctgactgggattaaattatatattctatataa

SEQ ID NO: 720558 - DNA, 120 bp, Artificial Sequence
  ENSG00000197816_65 (sequence is synthesized)
ggaatggctggctctttgtagccaaaaaaatcccgaaaaatgtcaaaagatggaaagacaaaccacaaactggaaaagtattcctcacaacttacagatcagagaaagggttaatatcct

SEQ ID NO: 720559 - DNA, 120 bp, Artificial Sequence
  ENSG00000197816_66 (sequence is synthesized)
tgtggtacaaagaactctcacaggtcaaatttttaaagagacgaaggacaaacacatgctcttcaaaagagaagcagttcatatggctagtcactgtaaaaaatgctcaacttcactgat

SEQ ID NO: 720560 - DNA, 120 bp, Artificial Sequence
  ENSG00000197816_67 (sequence is synthesized)
gatgaaaaatgaaaatctaagcattatttagatatcatttctcaccaatagcctggcaaagtttttacatttggtaacaacgtaaaagaatgtcaagaaacagagactctgcagagactc

SEQ ID NO: 720561 - DNA, 120 bp, Artificial Sequence
  ENSG00000197816_68 (sequence is synthesized)
ttggtagagcgtacatggataccgctgtcatagggaacaatttgtcagtccctgtcaaaattctgagtgtgtagacgtttggcctagcacgtctaattctaggaatttatctgagagaaa

SEQ ID NO: 720562 - DNA, 120 bp, Artificial Sequence
  ENSG00000197816_69 (sequence is synthesized)
tacttggacactttttcaaaggtatatgttcaaaaatgttcacagcactgtttgaaatggcaaagaattggaagcaacactaacattgatatacagaaaattcaatgggccaggcacagt

SEQ ID NO: 720563 - DNA, 89 bp, Artificial Sequence
  ENSG00000197816_70 (sequence is synthesized)
taacattgatatacagaaaattcaatgggccaggcacagtggcccacacctgcagtcccagcacttgagaggctgaggtgggtggatct

SEQ ID NO: 720564 - DNA, 120 bp, Artificial Sequence
  ENSG00000197816_71 (sequence is synthesized)
tagctcggtgtggtggtgtgcacgtgtagttccagctcctagaggtggagggcggttgggagggtgctgaggtgggaggattgcttaagtctttaagtcgagactgctgtgagctttgat

SEQ ID NO: 720565 - DNA, 120 bp, Artificial Sequence
  ENSG00000197816_72 (sequence is synthesized)
cataccactgcactccagcctggtgagagagcaagaccgtgactcaaaaataacgaaaattggatgcataaatgagggtgccagatgtgcaggtaaataccacacagctgttaaagtagg

SEQ ID NO: 720566 - DNA, 120 bp, Artificial Sequence
  ENSG00000197816_73 (sequence is synthesized)
tctgcatgtgctgacatggaaagacatgaaggagggctgttgtgtgaaaaaacaaatggacaaacaggacatgtctgtgatcccatcttttaaaacacatgcatgatatcaacatgcata

SEQ ID NO: 720567 - DNA, 120 bp, Artificial Sequence
  ENSG00000197816_74 (sequence is synthesized)
ctcacatctgtttaaatgaatctgtgtgagagacagagacagagagacaggtaccaaactgctgatgatcacctctgctgggtgggactgagagagatccctaaaaccttttttctcatc

SEQ ID NO: 720568 - DNA, 120 bp, Artificial Sequence
  ENSG00000197816_75 (sequence is synthesized)
atccctaaaaccttttttctcatcatgaagtgatgtttacatttttaataatgtgcatattacttttataaatataagattaaaatcatacattaaatgttatccatttatcactgatct

SEQ ID NO: 720569 - DNA, 120 bp, Artificial Sequence
  ENSG00000197816_76 (sequence is synthesized)
tgaagaacacagtccttccgccctgaaagcagcgccctttgcacttgctgttcatcctgccaggcctttccctttgggcacaggcctgtgtgtcagggtggctggggaagattacagggc

SEQ ID NO: 720570 - DNA, 120 bp, Artificial Sequence
  ENSG00000197816_77 (sequence is synthesized)
ttgggcgcttttgcgacctgatttccctgcaggtgaaccttggctgggctggccagtcaacactcctcctcttcagcattttcagttgctgcacaccataatgtaataagcattgtaact

SEQ ID NO: 720571 - DNA, 120 bp, Artificial Sequence
  ENSG00000197816_78 (sequence is synthesized)
tactaattagtccctttgctattgaactttggaccatttccaatttcccactcctgtaattgtgctgaagagaatctctgcatccatgcatctctagagcaacagactcctagaagtgcg

SEQ ID NO: 720572 - DNA, 120 bp, Artificial Sequence
  ENSG00000197816_79 (sequence is synthesized)
atgtctggatcaaagtgtgtacagatttttgaagtgttggtcacttttctctatcagaggtctctgtcaaaggtgagccttgtttgggaaatcagcgccttgcagagatgctggggtcga

SEQ ID NO: 720573 - DNA, 120 bp, Artificial Sequence
  ENSG00000197816_80 (sequence is synthesized)
gaccccagggagaacaggcaggtgagctggtagtggagcagatcacagtgccttgcaaggaacccctgagccaggaagactccctgcaccaggccctaggaggcctctgcctactctgca

SEQ ID NO: 720574 - DNA, 120 bp, Artificial Sequence
  ENSG00000197816_81 (sequence is synthesized)
actcggcttctgagccaggccaccgggccctgccattcatggcagaggagtgtacatgttacctgctggctctctgcacacagagccccccaccccctcgcccctgatctagaaagaaca

SEQ ID NO: 720575 - DNA, 120 bp, Artificial Sequence
  ENSG00000197816_82 (sequence is synthesized)
tcagagcatcaaagattggattattgagctagatagtcaagggacaaccttgaacgtgtttgttccaggggaggttcttagttcggaacccatatgagctagcctaagccaaagaagtct

SEQ ID NO: 720576 - DNA, 120 bp, Artificial Sequence
  ENSG00000197816_83 (sequence is synthesized)
ctatgaaccatatccggggactcatggaaactgcagcaacgtcagagcatcaggcttgggtttggagctgggaacagcacccacaccaccgcttagattcctccatccatgaccccctgc

SEQ ID NO: 720577 - DNA, 120 bp, Artificial Sequence
  ENSG00000197816_84 (sequence is synthesized)
ccctgtcaccaccccgagctgtgtggctggtgcattcagcttctccatggagagggctcagcctgccataactccaagtgggaggaggggtgccagtcctcccttttctaagtgtaatgc

SEQ ID NO: 720578 - DNA, 120 bp, Artificial Sequence
  ENSG00000197816_85 (sequence is synthesized)
ctctgcaacagcttcagaacaagataaaaacttgtcaagagtccaggggagagaaaaccgtaagtgttcaatagattctgcatgtgaataataaagatatatcatgctaaagtcataaat

SEQ ID NO: 720579 - DNA, 120 bp, Artificial Sequence
  ENSG00000197816_86 (sequence is synthesized)
gtgaaataaatttacctgtgtgtataggatttctccagcacaaggttggcggggtggggggacatctctgagccttcctacttaacccctgtttcatggaatgaagaaaggaacaaaaga

SEQ ID NO: 720580 - DNA, 120 bp, Artificial Sequence
  ENSG00000197816_87 (sequence is synthesized)
gaaagcagccactgttcacctccaacccctcccaggcaagcatggagcagcgtctagtgttgggggaggcctgagtctggcttcctctgacctcactcccttgggatgtcaccaggtgtc

SEQ ID NO: 720581 - DNA, 120 bp, Artificial Sequence
  ENSG00000197816_88 (sequence is synthesized)
gtgctttcccccatttctcttttcctttattgtaactccagtgattaaaacaaaagctgttcaacttagtatagcttcattgcaagcaaacaagcaaaattccaaggtcagaaaacaaaa

SEQ ID NO: 720582 - DNA, 120 bp, Artificial Sequence
  ENSG00000197816_89 (sequence is synthesized)
agccttcggagaaagtcaagcaccacaaaggagctcccactcccactatgtcagagatccccccagacagcggccccctctcatcagccctctcaccctggagacctcgtctctgggggt

SEQ ID NO: 720583 - DNA, 120 bp, Artificial Sequence
  ENSG00000197816_90 (sequence is synthesized)
gattggttaagcttacatttcattttcctagactatgaccattcattctgagttacgtttgttttctagctagaaactccaggcactggaaccgtgtcagcctgatggcctcctgtttat

SEQ ID NO: 720584 - DNA, 120 bp, Artificial Sequence
  ENSG00000197816_91 (sequence is synthesized)
gatcttaaacacctggtggcctttacagtctgctgggagagatggaggttaatcagccagtcacacaaatcaatcccaaatccacctgattagcatgtcataaggctgagggggcattaa

SEQ ID NO: 720585 - DNA, 120 bp, Artificial Sequence
  ENSG00000197816_92 (sequence is synthesized)
tccaagatcattaaagccaggtggtcagaaattgcagctgagctggggtctgaggaagggcaggaacaaatacaaccaagaagagaagaaagttagctgctgttatggagtggaatcaga

SEQ ID NO: 720586 - DNA, 120 bp, Artificial Sequence
  ENSG00000197816_93 (sequence is synthesized)
agcagtgagtaatttcaaggagtgtcacggccaaaacagagcacttggaaagttctgttcatgtggttttgtccatgtttgtgtgtctagaccaggcccctcagggatctgtctcgtgtg

SEQ ID NO: 720587 - DNA, 120 bp, Artificial Sequence
  ENSG00000197816_94 (sequence is synthesized)
gggagacctagaatcaaggcaatagttgaaataatggatgagaacttgcccaaaatgccaagagacacagtgcattttaaatgagatgagaagtccgcagagtatataggagaagccctt

SEQ ID NO: 720588 - DNA, 80 bp, Artificial Sequence
  ENSG00000197816_95 (sequence is synthesized)
gaaagagggtcttgctctgtggcccaggctagagtgtggtgcaattatagttcaccatagcctcaaactcctgggcttaa

SEQ ID NO: 720589 - DNA, 84 bp, Artificial Sequence
  ENSG00000197816_96 (sequence is synthesized)
gggcttcatgtaccaccatgcctggctaatgtttaaatatttttttagagacagggtcttgcccaagctggtcttgaactcctg

SEQ ID NO: 720590 - DNA, 64 bp, Artificial Sequence
  ENSG00000197816_97 (sequence is synthesized)
gctggctaaccctgtattttctatactggtttgacctcaggacctcttttgatggaatagctct

SEQ ID NO: 720591 - DNA, 120 bp, Artificial Sequence
  ENSG00000197816_98 (sequence is synthesized)
actggtttgacctcaggacctcttttgatggaatagctcttaccacgttggagaccaagattttctctttgggaagctgctttgggcctttgttgtagagatcgcctctgcaagttgatt

SEQ ID NO: 720592 - DNA, 120 bp, Artificial Sequence
  ENSG00000197816_99 (sequence is synthesized)
ttcgccagtccaggcatgctccaaatatagcccgatggacagccactgacagtgccaggtgcagccctttcttggtatcttgcccaaagcaggcatgatcgtggttgggttttgtaggta

SEQ ID NO: 720593 - DNA, 66 bp, Artificial Sequence
  ENSG00000197816_100 (sequence is synthesized)
tgcccaaagcaggcatgatcgtggttgggttttgtaggtaaaaatggccattattggctgttttaa

SEQ ID NO: 720594 - DNA, 120 bp, Artificial Sequence
  ENSG00000197816_101 (sequence is synthesized)
tgggaagggggagcttcccatcacccggcacccaacatttggctggtgcagcaggcaacacatgtcagcacaccccagagctgcaggtctcaacactcaggacagtcaccattcacaggc

SEQ ID NO: 720595 - DNA, 120 bp, Artificial Sequence
  ENSG00000197816_102 (sequence is synthesized)
acgaggacattaatgtgggtctgaggcgtgatcccaatgctgtgggagcccagctgagggacatcccacccagattaggggtgaaggctttccaaaggcacagtagtgtcacagctaggg

SEQ ID NO: 720596 - DNA, 120 bp, Artificial Sequence
  ENSG00000197816_103 (sequence is synthesized)
aacattgtcaccaggcacggaagcaatggtagccgtaggctcaggggggacacagcagcaggagcagtcacagctcctgagaacttactgggaagtacttactgagagcttctgctcttg

SEQ ID NO: 720597 - DNA, 120 bp, Artificial Sequence
  ENSG00000197816_104 (sequence is synthesized)
acatgaggcatctcactgaatcctcctaacaactccacaagggaggtaaaattattatcatttcattgatgaggacactgaggcttaaagaaacttgtcccttctatgccactacagagt

SEQ ID NO: 720598 - DNA, 120 bp, Artificial Sequence
  ENSG00000197816_105 (sequence is synthesized)
ggcagagccaggatttgatcccagtgcctgtcagaccccctggggacagcctgatgaggaggctacacccagttgccacttgagggacctcttggctttgaagatctgtggacctttggt

SEQ ID NO: 720599 - DNA, 120 bp, Artificial Sequence
  ENSG00000197816_106 (sequence is synthesized)
cctgatgtccagagagaaaccttgtcctgcccagagaccagctggcccccttactgggagaggctgaagtgcccagggtcagccctcccccagcttcccctccaagccccaggcagaggg

SEQ ID NO: 720600 - DNA, 120 bp, Artificial Sequence
  ENSG00000197816_107 (sequence is synthesized)
tgcagttcggcctgctgagttcagtgagggtgggaggcctggaaggcccagcctaccaaaaaatcgggagccctgagctcccgagaggccacagtgtgggacagagctcaggaaggagtg

SEQ ID NO: 720601 - DNA, 120 bp, Artificial Sequence
  ENSG00000197816_108 (sequence is synthesized)
ctgagcctagagtcagatagacacaggtcctagtccctgctcagcctccttctagctgggtgaccccaggccaggctctgagcctcagttttcctgtcttgtaaaatggggaaaacaact

SEQ ID NO: 720602 - DNA, 120 bp, Artificial Sequence
  ENSG00000197816_109 (sequence is synthesized)
aggactacctggtttctacctgagaagtgacttggagaactcttgccagtgcctggaatgggttaaaaaccacctgccagcaagttacagcattgccctaggggagagggtccagatgtc

SEQ ID NO: 720603 - DNA, 120 bp, Artificial Sequence
  ENSG00000197816_110 (sequence is synthesized)
agttcagagctcatctgaggttagtttcatcgtttcgttgaaagttaaaaccctaagtcgacgttccccagccgcctaccccccagcagagagtccttccccggggagtcctgccctggg

SEQ ID NO: 720604 - DNA, 120 bp, Artificial Sequence
  ENSG00000197818_0 (sequence is synthesized)
gccccgcggctccgaactcggtggtcctggaagctccgcaggatgggggagaagatggcggaagaggagaggttccccaatacaactcatgagggtttcaatgtcaccctccacaccacc

SEQ ID NO: 720605 - DNA, 120 bp, Artificial Sequence
  ENSG00000197818_1 (sequence is synthesized)
ctggttgtcacgacgaaactggtgctcccgacccctggcaagcccatcctccccgtgcagacaggggagcaggcccagcaagaggagcagtccagcggcatgaccattttcttcagcctc

SEQ ID NO: 720606 - DNA, 120 bp, Artificial Sequence
  ENSG00000197818_2 (sequence is synthesized)
cttgtcctagctatctgcatcatattggtgcatttactgatccgatacagattacatttcttgccagagagtgttgctgttgtttctttaggtattctcatgggagcagttataaaaatt

SEQ ID NO: 720607 - DNA, 120 bp, Artificial Sequence
  ENSG00000197818_3 (sequence is synthesized)
atagagtttaaaaaactggcgaattggaaggaagaagaaatgtttcgtccaaacatgtttttcctcctcctgcttccccctattatctttgagtctggatattcattacacaagggtaac

SEQ ID NO: 720608 - DNA, 120 bp, Artificial Sequence
  ENSG00000197818_4 (sequence is synthesized)
ttctttcaaaatattggttccatcaccctgtttgctgtttttgggacggcaatctccgcttttgtagtaggtggaggaatttattttctgggtcaggctgatgtaatctctaaactcaac

SEQ ID NO: 720609 - DNA, 120 bp, Artificial Sequence
  ENSG00000197818_5 (sequence is synthesized)
atgacagacagttttgcgtttggctccctaatatctgctgtcgatccagtggccactattgccattttcaatgcacttcatgtggaccccgtgctcaacatgctggtctttggagaaagt

SEQ ID NO: 720610 - DNA, 120 bp, Artificial Sequence
  ENSG00000197818_6 (sequence is synthesized)
attctcaacgatgcagtctccattgttctgaccaacacagctgaaggtttaacaagaaaaaatatgtcagatgtcagtgggtggcaaacatttttacaagcccttgactacttcctcaaa

SEQ ID NO: 720611 - DNA, 120 bp, Artificial Sequence
  ENSG00000197818_7 (sequence is synthesized)
atgttctttggctctgcagcgctcggcactctcactggcttaatttctgcattagtgctgaagcatattgacttgaggaaaacgccttccttggagtttggcatgatgatcatttttgct

SEQ ID NO: 720612 - DNA, 120 bp, Artificial Sequence
  ENSG00000197818_8 (sequence is synthesized)
tatctgccttatgggcttgcagaaggaatctcactctcaggcatcatggccatccttttctcaggcatcgtgatgtcccactacacgcaccataacctctccccagtcacccagatcctc

SEQ ID NO: 720613 - DNA, 120 bp, Artificial Sequence
  ENSG00000197818_9 (sequence is synthesized)
atgcagcagaccctccgcaccgtggccttcttatgtgaaacatgtgtgtttgcatttcttggcctgtccatttttagttttcctcacaagtttgaaatttcctttgtcatctggtgcata

SEQ ID NO: 720614 - DNA, 120 bp, Artificial Sequence
  ENSG00000197818_10 (sequence is synthesized)
gtgcttgtactatttggcagagcggtaaacattttccctctttcctacctcctgaatttcttccgggatcataaaatcacaccgaagatgatgttcatcatgtggtttagtggcctgcgg

SEQ ID NO: 720615 - DNA, 120 bp, Artificial Sequence
  ENSG00000197818_11 (sequence is synthesized)
ggagccatcccctatgccctgagcctacacctggacctggagcccatggagaagcggcagctcatcggcaccaccaccatcgtcatcgtgctcttcaccatcctgctgctgggcggcagc

SEQ ID NO: 720616 - DNA, 120 bp, Artificial Sequence
  ENSG00000197818_12 (sequence is synthesized)
accatgcccctcattcgcctcatggacatcgaggacgccaaggcacaccgcaggaacaagaaggacgtcaacctcagcaagactgagaagatgggcaacactgtggagtcggagcacctg

SEQ ID NO: 720617 - DNA, 120 bp, Artificial Sequence
  ENSG00000197818_13 (sequence is synthesized)
tcggagctcacggaggaggagtacgaggcccactacatcaggcggcaggaccttaagggcttcgtgtggctggacgccaagtacctgaaccccttcttcactcggaggctgacgcaggag

SEQ ID NO: 720618 - DNA, 120 bp, Artificial Sequence
  ENSG00000197818_14 (sequence is synthesized)
gacctgcaccacgggcgcatccagatgaaaactctcaccaacaagtggtacgaggaggtacgccagggcccctccggctccgaggacgacgagcaggagctgctctgacgccaggtgcca

SEQ ID NO: 720619 - DNA, 120 bp, Artificial Sequence
  ENSG00000197818_15 (sequence is synthesized)
aggcttcaggcaggcaggcccaggatgggcgtttgctgcgcacagacactcagcaggggcctcgcagagatgcgtgcatccagcagccccttcaagacataagagggcggggcgaggtac

SEQ ID NO: 720620 - DNA, 120 bp, Artificial Sequence
  ENSG00000197818_16 (sequence is synthesized)
tggctgcagagtcgccttagtccagaacctgacaggcctctggagccaggcgacttcttgggaaactgtcatctcccgactcctccctgagccagcctccgctcagtgtggctcctcagc

SEQ ID NO: 720621 - DNA, 120 bp, Artificial Sequence
  ENSG00000197818_17 (sequence is synthesized)
ccacagaggggagggagcatggggccaggtgccagtcatctgtgaagctagggcgcctacccccccacccggaggacccctgcggccccctgcctagaggagcaccatctacagttgtgc

SEQ ID NO: 720622 - DNA, 120 bp, Artificial Sequence
  ENSG00000197818_18 (sequence is synthesized)
cattccccagccactgccttcatgctgcccccgccggactggcagagccaggggtcagccacctgcctttgagtcatcaagatgcctctgcagccacaattctgacctaagtggcagggc

SEQ ID NO: 720623 - DNA, 120 bp, Artificial Sequence
  ENSG00000197818_19 (sequence is synthesized)
ccagaaatcctgaaaacctcccgctgccttttgtgatacttcctgtgctccctcagagagaaacggagtgaccttttgtcctttacctgattggcacttcgcagtctatctccctgggta

SEQ ID NO: 720624 - DNA, 120 bp, Artificial Sequence
  ENSG00000197818_20 (sequence is synthesized)
gcagacggctgctgcccttctctgggcatgttctgaatgtttacactggtaccttctggtatcttctttagagccccctgcaagctgcaactctaggcttttatcttgcggggtcagagc

SEQ ID NO: 720625 - DNA, 120 bp, Artificial Sequence
  ENSG00000197818_21 (sequence is synthesized)
gccctctagagggaaaagctagaggcacagggtttctgccggcccacaactgctgtcttgatttgcattttacagcaaagtgctgagagcctctagtcgcctcctgccatctgatctccc

SEQ ID NO: 720626 - DNA, 120 bp, Artificial Sequence
  ENSG00000197818_22 (sequence is synthesized)
tccccaccattcccgtactcagttgttcttttgtctaatcggaggccactgtgctgaggccctgcagtgtctgctcactgctgccatcttcgctgctagtcagggttccatcctctttcc

SEQ ID NO: 720627 - DNA, 120 bp, Artificial Sequence
  ENSG00000197818_23 (sequence is synthesized)
cctctcccagttccctaccacgttggatcccattcgtcacccatgctagggtccccaaagcactggggcaggggccagagcagcagcacccagtgctccctcctctactctgacctgggg

SEQ ID NO: 720628 - DNA, 120 bp, Artificial Sequence
  ENSG00000197818_24 (sequence is synthesized)
ccccagcatcctggagcacacgctccacgcacacacaccccagccctgtcccaggggcctggccccctcagccatctcagggtgaggagctgccagtcatgtccagatggaatgactccc

SEQ ID NO: 720629 - DNA, 120 bp, Artificial Sequence
  ENSG00000197818_25 (sequence is synthesized)
gccttggaacctggcaccctggggtggtttaattcatcattaagaagcattcctgcttctcaagggacacagtggcctgcatgggccagcatggaccctgggctgatcatgtgcattcct

SEQ ID NO: 720630 - DNA, 120 bp, Artificial Sequence
  ENSG00000197818_26 (sequence is synthesized)
gcttctctggggacacagtgggcccacatgggccagcatggaccctgggctagagcaagcacatctccatctcttccacctcaggcagtgtggctccagatgtcaggagggactgacctc

SEQ ID NO: 720631 - DNA, 120 bp, Artificial Sequence
  ENSG00000197818_27 (sequence is synthesized)
aggaccttccaggttcctctgtgccaggaatgagaggccaggcccgatcctaccacctcgccttgaccctgaagtcagagcaggccagccaagcaggaagcacactgtttactttttgca

SEQ ID NO: 720632 - DNA, 120 bp, Artificial Sequence
  ENSG00000197818_28 (sequence is synthesized)
tgaaaagtaaatgtgtacttgatagagctaaaatatgatcttttttaatttctcaaccccataatttgagccattgccttgcttaattttggtttccaccatttccttttagtggagaag

SEQ ID NO: 720633 - DNA, 120 bp, Artificial Sequence
  ENSG00000197818_29 (sequence is synthesized)
agaggaagtcagagggtagggacctttgcctgcccctgggcgagtgcgggcagggatctgagaccagattgttctcgcacccctgccagaactcactctcccctgaagtttagggtccca

SEQ ID NO: 720634 - DNA, 120 bp, Artificial Sequence
  ENSG00000197818_30 (sequence is synthesized)
tctcccagatgtaagttgttttgcaaactcagtttgccaggatttctttctttcctaatcttaaattcacagataaagcaatgaaaagagtcagatcccatttccgtctgccccctcgtc

SEQ ID NO: 720635 - DNA, 120 bp, Artificial Sequence
  ENSG00000197818_31 (sequence is synthesized)
accaggtgtgatagccccagccaggtcacacctggcctcacactttgagctgagacttgaaaacgatgctgtggcggaagagcatgtggggcttggtggaggggccccaggatttgttgg

SEQ ID NO: 720636 - DNA, 120 bp, Artificial Sequence
  ENSG00000197818_32 (sequence is synthesized)
gggcaaagggggtggcgggaccgttcccaggaggtaccagcacctgcctcgatctcctctgagcctcttctgccccctgtcggccaggtgaggtcagcagcctgggagagtgcccccaag

SEQ ID NO: 720637 - DNA, 120 bp, Artificial Sequence
  ENSG00000197818_33 (sequence is synthesized)
agatgagggcaccccgtgttccttggcaatcttggctcaccttggtaacaaaaggccatagaagtctgtttttctgggtcagttttttttgcctgagaataacaaattgctgctgtctac

SEQ ID NO: 720638 - DNA, 120 bp, Artificial Sequence
  ENSG00000197818_34 (sequence is synthesized)
ctttagcacacccaataattctatttggggcagtgaatgcatagaagatataaaaatacgcagcttaactatatcttcctgcgtgtgtatttattttcttctgggtctaggccatggtac

SEQ ID NO: 720639 - DNA, 120 bp, Artificial Sequence
  ENSG00000197818_35 (sequence is synthesized)
aggagaactgtggcgtgtaggaggaatacttcaggatgagtgaaggctggagccagggagcgctggaggaaaccagccctttagccagcagcccctccaccacaggcactgctgtgtgga

SEQ ID NO: 720640 - DNA, 120 bp, Artificial Sequence
  ENSG00000197818_36 (sequence is synthesized)
acgagttcttggaatgaatcccatgctttctgcagcctgtagttgttatgacccctcggaacaaccaccccgtggcttgtgtggggtctcgcagggaaaagggctggcttctaggtcccc

SEQ ID NO: 720641 - DNA, 120 bp, Artificial Sequence
  ENSG00000197818_37 (sequence is synthesized)
gagataagtgtgcagggggatgggccagggccaggctaagggtggctcagttccatcatctggaggtcagacacactgtccagaggcagaactgaagccctctcggcccctaccctaagc

SEQ ID NO: 720642 - DNA, 120 bp, Artificial Sequence
  ENSG00000197818_38 (sequence is synthesized)
cagccacccctcttcacagtgggtgagctgggctgggctggctggcatgaggccaaggggtaggcctgagcgccagagtcgcccaggttagcccacaggattcctttgtgtgccatggaa

SEQ ID NO: 720643 - DNA, 120 bp, Artificial Sequence
  ENSG00000197818_39 (sequence is synthesized)
tgctgaaagatgggtgactggggacccttcttaaaacctttggcaaaggtgccatcggcagggcttggcctcatgaagtctcaggtccgtgttcccgcagggcgcacatgcttggagagt

SEQ ID NO: 720644 - DNA, 120 bp, Artificial Sequence
  ENSG00000197818_40 (sequence is synthesized)
cctcagcagggtagccgaggccaggccacttctgctgaggatggggcaggctggggtgtgggtgtggcctggggtggctcagggctggaactgctgcctgattcctgtgtggggagaagc

SEQ ID NO: 720645 - DNA, 120 bp, Artificial Sequence
  ENSG00000197818_41 (sequence is synthesized)
tcagtggccgtttgctgccactgacaaggatttcacatgcagaagagaaaaggcccccctccaccccccgcattccctgccgagtgagagccagtgtttgctgcccttgctgggggcggg

SEQ ID NO: 720646 - DNA, 120 bp, Artificial Sequence
  ENSG00000197818_42 (sequence is synthesized)
taggaaaccctgagcttcctgatgcggagtcatgaagcagagtcctcgggaaggcatctccacagccccgggtcctctgtctaacgccctccatttcacgccctccatctcacagtcaag

SEQ ID NO: 720647 - DNA, 120 bp, Artificial Sequence
  ENSG00000197818_43 (sequence is synthesized)
ataaaggcctcgagaataaagagccagcccccttccatttagtctcctgccgtttcccaaacagttgtccaacagttagacattgaggggcttcactgttaccaggcatgtaacagaagg

SEQ ID NO: 720648 - DNA, 120 bp, Artificial Sequence
  ENSG00000197818_44 (sequence is synthesized)
aggaagactaacacacaccccctgccccatcccatccccctctcccgagctattttcttgctgtggcctctggtgcccttgagttggtctccccggctgctctgcgggggcttcactggc

SEQ ID NO: 720649 - DNA, 120 bp, Artificial Sequence
  ENSG00000197818_45 (sequence is synthesized)
ttcggagtgagcgcgaagtgctggtgagcagtgggcctgtgattggatgggaagatgtgcatccgtggtcaaaagtcagctgccagccctgcggaaccagagcctcaggctgggatgggg

SEQ ID NO: 720650 - DNA, 120 bp, Artificial Sequence
  ENSG00000197818_46 (sequence is synthesized)
aggcctccctgcttccacctgcatggtgggcatggcctggcttacaccaaaggctttgacggtttctccaagtaaggatctgcaaatcttgaatcgtcctcaaaatgacgaagcttgaat

SEQ ID NO: 720651 - DNA, 120 bp, Artificial Sequence
  ENSG00000197818_47 (sequence is synthesized)
tgtcctcaagatggatgtgaatcttacattccttttcatcatttcctttgtaaaaatgacgagtgctgggtttttgttttaagaagcattatgaaggccagacttactcatttttctccc

SEQ ID NO: 720652 - DNA, 120 bp, Artificial Sequence
  ENSG00000197818_48 (sequence is synthesized)
ccaagtgagctgcaagaggcccctgttaggcccctgtttcctgagcagtgatgtgctgctcttcttggtggggctttgggctgggaggggaaggcgggtcagagatgggggacctgtggc

SEQ ID NO: 720653 - DNA, 120 bp, Artificial Sequence
  ENSG00000197818_49 (sequence is synthesized)
tgccatgcaggagcccctgcgtcatctcgttggactctttaagggagtcaggaatagatgtatgaacagtcgtgtcactggatgcctatttagaaataaagtgtatgctgctgaattgga

SEQ ID NO: 720654 - DNA, 120 bp, Artificial Sequence
  ENSG00000197818_50 (sequence is synthesized)
aatagagccacaggcaaagagacaaaaagcctccctgtgcgatttgctgctaatgaaaagcccagaacagcagttctggtcctggttgcatgatagaatcacccaaaagcttgaaaagct

SEQ ID NO: 720655 - DNA, 120 bp, Artificial Sequence
  ENSG00000197818_51 (sequence is synthesized)
taaagaccaagccccagcctggcccagtccttctgttttagctgtcctaggtggggtcctgggcatccattgtgccctgatggacgttcctgcctccctgcaggctcccaggaggccgtc

SEQ ID NO: 720656 - DNA, 120 bp, Artificial Sequence
  ENSG00000197818_52 (sequence is synthesized)
tgctgcccgtcaccctgcattgatggtcaagtggagttagggttggggacactggcggcctgggtggtgtgggggcttccaggaggtgccccccgatggtgccagctggtggccgtcggg

SEQ ID NO: 720657 - DNA, 120 bp, Artificial Sequence
  ENSG00000197818_53 (sequence is synthesized)
gtcatccccatcatctgccatcccgtgtctgtgtgctcggtctgtgtgtttaaccctgtcactcctcttgactgtcaagtcttcctcccatttggttttcatatcaaacactgagggaac

SEQ ID NO: 720658 - DNA, 120 bp, Artificial Sequence
  ENSG00000197818_54 (sequence is synthesized)
atgatcagtttataacatcattaacaggaaactctcttctttataaaatcatggtgcttagcaagttctgaagagctgttgatgtaatatcttggcctttgaaagaaggattaaaaaaat

SEQ ID NO: 720659 - DNA, 120 bp, Artificial Sequence
  ENSG00000197818_55 (sequence is synthesized)
ccgaaagccccgggagagactaagaagcaatcctcccacgcgctttctcccaccctcgggccactgagacggagggacagagggccgccctcgcgcggccgaggccccgcctcccgctcg

SEQ ID NO: 720660 - DNA, 120 bp, Artificial Sequence
  ENSG00000197822_0 (sequence is synthesized)
gcctctctccatcagacaccccaaggttccatccgaagcaggcggagcaccgaacgcaccccggggtggtcagggacccccatccgtgctgccccctaggagcccgcgcctctcctctgc

SEQ ID NO: 720661 - DNA, 120 bp, Artificial Sequence
  ENSG00000197822_1 (sequence is synthesized)
gccccgcctctcgggccgcaacgtcgcgcggttcctttaacagcgcgctggcagggtgtgggaagcaggaccgcgtcctcccgccccctcccatccgagtttcaggtgaattggtcaccg

SEQ ID NO: 720662 - DNA, 120 bp, Artificial Sequence
  ENSG00000197822_2 (sequence is synthesized)
agggaggaggccgacacaccacacctacactcccgcgtccacctctccctccctgcttcctctggcggaggcggcaggaaccgagagccaggtccagagcgccgaggagccggtctagga

SEQ ID NO: 720663 - DNA, 120 bp, Artificial Sequence
  ENSG00000197822_3 (sequence is synthesized)
cgcagcagattggtttatcttggaagctaaagggcattgctcatcctgaagatcagctgaccattgacaatcagccatgtcatccaggcctcttgaaagtccacctccttacaggcctga

SEQ ID NO: 720664 - DNA, 120 bp, Artificial Sequence
  ENSG00000197822_4 (sequence is synthesized)
tgaattcaaaccgaatcattatgcaccaagcaatgacatatatggtggagagatgcatgttcgaccaatgctctctcagccagcctactctttttacccagaagatgaaattcttcactt

SEQ ID NO: 720665 - DNA, 120 bp, Artificial Sequence
  ENSG00000197822_5 (sequence is synthesized)
ctacaaatggacctctcctccaggagtgattcggatcctgtctatgctcattattgtgatgtgcattgccatctttgcctgtgtggcctccacgcttgcctgggacagaggctatggaac

SEQ ID NO: 720666 - DNA, 120 bp, Artificial Sequence
  ENSG00000197822_6 (sequence is synthesized)
ttcccttttaggaggtagtgtaggctacccttatggaggaagtggctttggtagctacggaagtggctatggctatggctatggttatggctatggctacggaggctatacagacccaag

SEQ ID NO: 720667 - DNA, 120 bp, Artificial Sequence
  ENSG00000197822_7 (sequence is synthesized)
agcagcaaagggcttcatgttggccatggctgccttttgtttcattgccgcgttggtgatctttgttaccagtgttataagatctgaaatgtccagaacaagaagatactacttaagtgt

SEQ ID NO: 720668 - DNA, 120 bp, Artificial Sequence
  ENSG00000197822_8 (sequence is synthesized)
gataatagtgagtgctatcctgggcatcatggtgtttattgccacaattgtctatataatgggagtgaacccaactgctcagtcttctggatctctatatggttcacaaatatatgccct

SEQ ID NO: 720669 - DNA, 120 bp, Artificial Sequence
  ENSG00000197822_9 (sequence is synthesized)
ctgcaaccaattttatacacctgcagctactggactctacgtggatcagtatttgtatcactactgtgttgtggatccccaggaggccattgccattgtactggggttcatgattattgt

SEQ ID NO: 720670 - DNA, 120 bp, Artificial Sequence
  ENSG00000197822_10 (sequence is synthesized)
ggcttttgctttaataattttctttgctgtgaaaactcgaagaaagatggacaggtatgacaagtccaatattttgtgggacaaggaacacatttatgatgagcagccccccaatgtcga

SEQ ID NO: 720671 - DNA, 120 bp, Artificial Sequence
  ENSG00000197822_11 (sequence is synthesized)
ggagtgggttaaaaatgtgtctgcaggcacacaggacgtgccttcacccccatctgactatgtggaaagagttgacagtcccatggcatactcttccaatggcaaagtgaatgacaagcg

SEQ ID NO: 720672 - DNA, 120 bp, Artificial Sequence
  ENSG00000197822_12 (sequence is synthesized)
gttttatccagagtcttcctataaatccacgccggttcctgaagtggttcaggagcttccattaacttcgcctgtggatgacttcaggcagcctcgttacagcagcggtggtaactttga

SEQ ID NO: 720673 - DNA, 120 bp, Artificial Sequence
  ENSG00000197822_13 (sequence is synthesized)
gacaccttcaaaaagagcacctgcaaagggaagagcaggaaggtcaaagagaacagagcaagatcactatgagacagactacacaactggcggcgagtcctgtgatgagctggaggagga

SEQ ID NO: 720674 - DNA, 120 bp, Artificial Sequence
  ENSG00000197822_14 (sequence is synthesized)
ctggatcagggaatatccacctatcacttcagatcaacaaagacaactgtacaagaggaattttgacactggcctacaggaatacaagagcttacaatcagaacttgatgagatcaataa

SEQ ID NO: 720675 - DNA, 120 bp, Artificial Sequence
  ENSG00000197822_15 (sequence is synthesized)
agaactctcccgtttggataaagaattggatgactatagagaagaaagtgaagagtacatggctgctgctgatgaatacaatagactgaagcaagtgaagggatctgcagattacaaaag

SEQ ID NO: 720676 - DNA, 120 bp, Artificial Sequence
  ENSG00000197822_16 (sequence is synthesized)
taagaagaatcattgcaagcagttaaagagcaaattgtcacacatcaagaagatggttggagactatgatagacagaaaacatagaaggctgatgccaagttgtttgagaaattaagtat

SEQ ID NO: 720677 - DNA, 120 bp, Artificial Sequence
  ENSG00000197822_17 (sequence is synthesized)
ctgacatctctgcaatcttctcagaaggcaaatgactttggaccataaccccggaagccaaacctctgtgagcatcacaaagttttggttgctttaacatcatcagtattgaagcatttt

SEQ ID NO: 720678 - DNA, 120 bp, Artificial Sequence
  ENSG00000197822_18 (sequence is synthesized)
ataaatcgcttttgataatcaactgggctgaacactccaattaaggattttatgctttaaacattggttcttgtattaagaatgaaatactgtttgaggtttttaagccttaaaggaagg

SEQ ID NO: 720679 - DNA, 120 bp, Artificial Sequence
  ENSG00000197822_19 (sequence is synthesized)
ttctggtgtgaactaaactttcacaccccagacgatgtcttcatacctacatgtatttgtttgcataggtgatctcatttaatcctctcaaccacctttcagataactgttatttataat

SEQ ID NO: 720680 - DNA, 120 bp, Artificial Sequence
  ENSG00000197822_20 (sequence is synthesized)
cacttttttccacataaggaaactgggttcctgcaatgaagtctctgaagtgaaactgcttgtttcctagcacacacttttggttaagtctgttttatgacttcattaataataaattcc

SEQ ID NO: 720681 - DNA, 120 bp, Artificial Sequence
  ENSG00000197822_21 (sequence is synthesized)
ctggcctttcatattttagctactatatatgtgatgatctaccagcctccctattttttttctgttatataaatggttaaaagaggtttttcttaaataataaagatcatgtaaaagtaa

SEQ ID NO: 720682 - DNA, 120 bp, Artificial Sequence
  ENSG00000197822_22 (sequence is synthesized)
caaatgtgtgaaatttaaagattgtaaatatatatttacttttttaagatcaaagtttaaaccccgtggttagaattttgtgtgtttttaaatactttttatctttttgcatgccttttt

SEQ ID NO: 720683 - DNA, 120 bp, Artificial Sequence
  ENSG00000197822_23 (sequence is synthesized)
taaaaaaccaactagaacttttcattatatcagaatatctgattacatttataattcaattgtgacttgaactgtatcttacaggaatgttcaatttctatacatattttataaggtatt

SEQ ID NO: 720684 - DNA, 120 bp, Artificial Sequence
  ENSG00000197822_24 (sequence is synthesized)
aaacctggtgttttctttccataataacctgtttgatgttattagtgctgttaacatacagcaatggaaaaccacactcaggagttgtatctgttgttgtttatactcctttggatgctg

SEQ ID NO: 720685 - DNA, 120 bp, Artificial Sequence
  ENSG00000197822_25 (sequence is synthesized)
tgctggttagtcgtttcccattcctttggctgtaagaatgctgatatgtctgggaatagaatgctataccacgaaataccaaataatttcaaatggtgcccttaaattgtatcacttttt

SEQ ID NO: 720686 - DNA, 120 bp, Artificial Sequence
  ENSG00000197822_26 (sequence is synthesized)
ttgtgatcatcccagcttagacttttctaaaaacttttttttagaataatctataaactgaactttagtatgcatttcagatatttaggtatataatttttttttttttttgagacagag

SEQ ID NO: 720687 - DNA, 120 bp, Artificial Sequence
  ENSG00000197822_27 (sequence is synthesized)
tgattttgaattattttccagagataaaattttaaatgtttccattatatcactgatttatttctgcaaattgaataaattcttaattttctgcatgcacataatacaaaaggtattttc

SEQ ID NO: 720688 - DNA, 120 bp, Artificial Sequence
  ENSG00000197822_28 (sequence is synthesized)
atagttttggatttataccaaatgaaaaggattctcttgatgagcacctttaactgatttttctgttaaagttttaacaatttgttcttggaagtcagttcgtgaaggcaagtttgtcag

SEQ ID NO: 720689 - DNA, 120 bp, Artificial Sequence
  ENSG00000197822_29 (sequence is synthesized)
tattttcacaaaactattcagctgaatccagaaagtgaaacagcaagaatttgcattgtaaaattgtgttataaaattggactttgaaatttcaaaaataagaaaaattttcatgtgtat

SEQ ID NO: 720690 - DNA, 120 bp, Artificial Sequence
  ENSG00000197822_30 (sequence is synthesized)
ttatactaaataccgttttaggaaactaggatcagggtgtttctgttggcgttggcattaactagctggatgtaaatttgaaaagccactcaagcagcttcctagtctagaaagtcagag

SEQ ID NO: 720691 - DNA, 120 bp, Artificial Sequence
  ENSG00000197822_31 (sequence is synthesized)
gtttagattagatttccgacatcccttccatttctgacctgtagttcttgtctggaattctgctttgttataaactattgttctaaggagtttgttgtgatagcacatagttcattttgt

SEQ ID NO: 720692 - DNA, 120 bp, Artificial Sequence
  ENSG00000197822_32 (sequence is synthesized)
aaagattccctgcgtataaagtgatgccctacatatgtgattttgtattaaaagtatataggatcattattttattttgaaaaatttaaatacagaaaagtataaaatataagtaccatc

SEQ ID NO: 720693 - DNA, 120 bp, Artificial Sequence
  ENSG00000197822_33 (sequence is synthesized)
cgcccagaaataacatgtgttaatgttttgtcatatgtgctttatattttttgaaataaagtgaagtcaactagtatttatagtaaataagttacatacacataagtacatatatgatat

SEQ ID NO: 720694 - DNA, 120 bp, Artificial Sequence
  ENSG00000197822_34 (sequence is synthesized)
ttaatcctcacaacgatcttttgacatgtgaccatttcttattcttcttttatagacaaggaactaatgatatgatagattaactggctgttgtcacactagcaagtggcaaaacaaggg

SEQ ID NO: 720695 - DNA, 120 bp, Artificial Sequence
  ENSG00000197822_35 (sequence is synthesized)
attaggatcttagtctcttcaactgttagattctatacttccatcctgtgttgactttgttaatggattggataatgtgagatcactctgatgtaaataaagtatcctatattaatttcg

SEQ ID NO: 720696 - DNA, 120 bp, Artificial Sequence
  ENSG00000197822_36 (sequence is synthesized)
agtgcattttaagtacttgtaacataaatgcttcctgtgaaatatctgtaaagacctgaatgggtacatgtgtgtaaagaagaatcagggcagaaaagtgcttttatcatggctccgggg

SEQ ID NO: 720697 - DNA, 120 bp, Artificial Sequence
  ENSG00000197822_37 (sequence is synthesized)
accttagcttcagttggtgttgtgagaattcctcacacaaggacattctccttgcttcagcatcaggatggaagtgtttctcatctggactttttcaaagactcagctggaggaatcaga

SEQ ID NO: 720698 - DNA, 120 bp, Artificial Sequence
  ENSG00000197822_38 (sequence is synthesized)
attcataatttcctggcagctcatgattctgctacactacaccatgccatctcttgtgtgaaaggacagatttgatggaggactatgtcatccctcatgcgtttcttattgtctacattt

SEQ ID NO: 720699 - DNA, 120 bp, Artificial Sequence
  ENSG00000197822_39 (sequence is synthesized)
attctaatgggaagaagtgagcaaaaacacctcaataatttgggtagtttttagaaaaccttgttagtaaattagaatagtgccactttggcattatgagaaagaagcatggatacataa

SEQ ID NO: 720700 - DNA, 120 bp, Artificial Sequence
  ENSG00000197822_40 (sequence is synthesized)
ctagggttttgtgtatgactacaacgaaatgcagaatggtgtctccaaaaggtttccaattgctgccacaagaactgcttggtattgcctacatgtgttgtcctatttttgctttgccct

SEQ ID NO: 720701 - DNA, 120 bp, Artificial Sequence
  ENSG00000197822_41 (sequence is synthesized)
tctgcagttacttgctgtgggaccttggagaaattaacttagcctctctgtacttcagttttttgtatttgtaaaatatatttgtaataatctcatagttaagaaggtagttaatgtgtg

SEQ ID NO: 720702 - DNA, 120 bp, Artificial Sequence
  ENSG00000197822_42 (sequence is synthesized)
actcagtccttgtctaaaagtaaatatgcctagctacccccatcttccaaagccagaaggtgaaactttaacaagttttctaaaagcaaattgtgttttttaaaagtgcatgtgtcatcc

SEQ ID NO: 720703 - DNA, 120 bp, Artificial Sequence
  ENSG00000197822_43 (sequence is synthesized)
aatcccatatgattgatctgtgctgggtgcagccttagaatgtaaattcttttgaattctaggcagagaatgcaggattggcattctaaatatttgtacatgataaacaaatgcttcttt

SEQ ID NO: 720704 - DNA, 120 bp, Artificial Sequence
  ENSG00000197822_44 (sequence is synthesized)
aggttagagcaaatagtttacttatcaagatcacaattgttagatactgttgtcaattacagaggttttagatgaggctttctggaatgatttagtttccctgtaagggagcctgtctat

SEQ ID NO: 720705 - DNA, 120 bp, Artificial Sequence
  ENSG00000197822_45 (sequence is synthesized)
tggaatagacaggttcacttctcccagtctttcaagttgcatgctttttatatctgattccactggctgagctgattgtgaatgtcctaaccctgttgattgtgtctggccactcatggg

SEQ ID NO: 720706 - DNA, 120 bp, Artificial Sequence
  ENSG00000197822_46 (sequence is synthesized)
caaagaacagattatccattctttatagttgtcttttagttttacaagttgaaaaaacatctgagtaggttagataatttattctaccactttgtaaatgattagaatatgtcagtcata

SEQ ID NO: 720707 - DNA, 120 bp, Artificial Sequence
  ENSG00000197822_47 (sequence is synthesized)
atcatgccaagagattatggatttatgcatattttgttttgctgtagtaccattcctagttgaatcttaacatccatgtctaaaatctatacagaacaaatattacagttgggaaaactg

SEQ ID NO: 720708 - DNA, 120 bp, Artificial Sequence
  ENSG00000197822_48 (sequence is synthesized)
attggtttatcttggaagctaaagggcattgctcatcctgaagatcagctgaccattgacaatcagccatgtcatccaggcctcttgaaagtccacctccttacaggcctgatgaattgc

SEQ ID NO: 720709 - DNA, 120 bp, Artificial Sequence
  ENSG00000197822_49 (sequence is synthesized)
cagaaaacgaggcatctgctcagtgttgaacatctgaagtcctcgcgtgagtgcacctgcgtgcagatgtctgctggtgtttattatggctgtgctctgtgattacagtgcactggcaaa

SEQ ID NO: 720710 - DNA, 120 bp, Artificial Sequence
  ENSG00000197822_50 (sequence is synthesized)
aacctactacttgtgtgtattagaggactctgaactgctgtcaaattgaatgcagaaaacgaggcatctgctcagtgttgaacatctgaagtcctcgcggttcctgaagtggttcaggag

SEQ ID NO: 720711 - DNA, 120 bp, Artificial Sequence
  ENSG00000197826_0 (sequence is synthesized)
ctgccctcctgcttccgttgctagggacgcttcggccgaggataccgcaatggatcaggaagaggggctgaaggccttggacaatattgtcactcaattcaacgcctatgaagatttcct

SEQ ID NO: 720712 - DNA, 120 bp, Artificial Sequence
  ENSG00000197826_1 (sequence is synthesized)
ggactcgcagatcactactgtggacttgtactacctggaggatgaaaccctggcccgccagttggtggagctaggctaccgagggactggagagagagtgaaaagggaagattttgaagc

SEQ ID NO: 720713 - DNA, 120 bp, Artificial Sequence
  ENSG00000197826_2 (sequence is synthesized)
aaggaaagcggctatagagattgcaagactggctgaaagagctcagcaaaagacgctaacaagtgctggtaaagacctacaagataattttctgacggccctggcaatgagagaagaaga

SEQ ID NO: 720714 - DNA, 120 bp, Artificial Sequence
  ENSG00000197826_3 (sequence is synthesized)
gggcaagagatatcaggatacatcgactatgcccacaggctaaagacggaagattttgaagtctactttactggaaaaaaaagacttcttccaaggcctacagatataagcttttacaac

SEQ ID NO: 720715 - DNA, 120 bp, Artificial Sequence
  ENSG00000197826_4 (sequence is synthesized)
tgggacgctgatattgctgttagtaattcaagtcccaactatcaagtgattgccgataatccagaaggcttacttttcagatacaaaagagacagaaaaattcttaatgtggacccaaag

SEQ ID NO: 720716 - DNA, 120 bp, Artificial Sequence
  ENSG00000197826_5 (sequence is synthesized)
gcgcagccaggtgacaactctactagaatcactatcctgacagaactctacgtacaagctgtcatttttgaccacatttccagaaggaagacttaagtaccaacatgttaatttcctaat

SEQ ID NO: 720717 - DNA, 120 bp, Artificial Sequence
  ENSG00000197826_6 (sequence is synthesized)
aatttgctaaatttaaataaattccgtagacagagcaaattagaataataaatgagccctgtagctggaaggcaaattagaacaataaagttaataaagaagttagaaagaaaactgtaa

SEQ ID NO: 720718 - DNA, 120 bp, Artificial Sequence
  ENSG00000197826_7 (sequence is synthesized)
ggaaaactgagtgtaagtacatttcatccaacagcttaaaatgtatacactaaatgcacaattaatattaaaaaatgtaacattaaatatctttcttaaagtaatttacaagatataaaa

SEQ ID NO: 720719 - DNA, 120 bp, Artificial Sequence
  ENSG00000197826_8 (sequence is synthesized)
tcttgaatcatgctatggaccgaaagtctgtgacctccccacctaaattcatacgttgaaatcttcactccctaagtgatagtattaggaggtgagggcctttgaaggacaattacatca

SEQ ID NO: 720720 - DNA, 120 bp, Artificial Sequence
  ENSG00000197826_9 (sequence is synthesized)
gcaagactggctgaaagagctcagcaaaagtgtcagactctcagttaatctttcctagatctggacaaagaaaagcctcaaagaaaacctgtttccatcaatgctgattctctacagatg

SEQ ID NO: 720721 - DNA, 120 bp, Artificial Sequence
  ENSG00000197826_10 (sequence is synthesized)
ttctgacggccctggcaatgagagaagaagacaatcgcagtggaaaactgagtggtatacaaaaatggttaaaactctgtccaagctttcaagaaacaacagtggacaacatcaaattga

SEQ ID NO: 720722 - DNA, 120 bp, Artificial Sequence
  ENSG00000197826_11 (sequence is synthesized)
caccaaggagatagatggatggtgagtttacttctcactaagaagataagggagacttcacctagaaagtgcggtttaaactgcaacttaaaataagcagttttctggtatacagctaga

SEQ ID NO: 720723 - DNA, 120 bp, Artificial Sequence
  ENSG00000197826_12 (sequence is synthesized)
gggaaaggtcatttcagagggaggaaactggactaacaaagggcgataggaggagagcagaaagtattacagagggaagaaactatgggtcaggaggagaagggagctacctgaagtcca

SEQ ID NO: 720724 - DNA, 68 bp, Artificial Sequence
  ENSG00000197826_13 (sequence is synthesized)
tccgtgatctttattcgtgacagaaattctcatgggcaagagatatcaggatacatcgactatgccca

SEQ ID NO: 720725 - DNA, 120 bp, Artificial Sequence
  ENSG00000197826_14 (sequence is synthesized)
gaaaaaggattcttcagagacaagataagtaaattcccagtgacattcctttttaatgataagtagtgcctaaattttgttaacctcatgaggcttttgcagcacttgggacttggtctg

SEQ ID NO: 720726 - DNA, 120 bp, Artificial Sequence
  ENSG00000197826_15 (sequence is synthesized)
tccagaagcctcaagaactgctcatctaacatgttttcctccacttttctttggtcaccagccaaagtgctggcccctgatcagctcaccctcatttctctcatctctgtcctattctgg

SEQ ID NO: 720727 - DNA, 120 bp, Artificial Sequence
  ENSG00000197826_16 (sequence is synthesized)
gacacccattccttaacacccatcattctttttactaccaatgcttgccttttattctagaacccttatctatcacctagcatctaccctacactgccaatctattcacagatgggttct

SEQ ID NO: 720728 - DNA, 120 bp, Artificial Sequence
  ENSG00000197826_17 (sequence is synthesized)
tctactcccttctaaatagcatgcaagctaaaactttttattccctcttacttaactatagaaccccaaaattaagtagcagcattatgctttaactctccactgctgtattcagatcat

SEQ ID NO: 720729 - DNA, 120 bp, Artificial Sequence
  ENSG00000197826_18 (sequence is synthesized)
tatttgatgattataacaatacctacctcctctgagatgcctgttatcctctatccacccttactgatattatctgaagacttccttatccatcacctttttttgatttgtttgtttttg

SEQ ID NO: 720730 - DNA, 87 bp, Artificial Sequence
  ENSG00000197826_19 (sequence is synthesized)
gtgcaatcttggatcactgctacttccacctcactgcagctgggactacaggcacataccaccacgtctggatactttttgtatttt

SEQ ID NO: 720731 - DNA, 77 bp, Artificial Sequence
  ENSG00000197826_20 (sequence is synthesized)
aagcaattctcttgtctcagcctcccatgcagctgggactacaggcacataccaccacgtctggatcaagctggtct

SEQ ID NO: 720732 - DNA, 120 bp, Artificial Sequence
  ENSG00000197826_21 (sequence is synthesized)
gtgctgggattacaggcgtcagccaccgagcctgactcccatctccactgtaatggacttagctctttcctgtcctacctaggataacatttcatttaacttctctcttgcagtaatgcc

SEQ ID NO: 720733 - DNA, 120 bp, Artificial Sequence
  ENSG00000197826_22 (sequence is synthesized)
tactgctgaaggaaattttaggaaatttcacaaaactgtggattgctgtgctaataacttatggtttccaaactcaattgagtcctttatgattcttaaaacttatgttcaaaattaaat

SEQ ID NO: 720734 - DNA, 120 bp, Artificial Sequence
  ENSG00000197826_23 (sequence is synthesized)
tcattttaattcctgaagcctgctattgcttctgtgtcacctgtcttggcaaatggcatcacccttgaaaccaaaggcaaaatccagatgttatcctagacctcttgtttttcatcacca

SEQ ID NO: 720735 - DNA, 120 bp, Artificial Sequence
  ENSG00000197826_24 (sequence is synthesized)
cctttataactaataatttattaaaaacactgaattctattatcttagcagctttgttttgttaaagcaaatttaagatatctcatttcacctgcaaacacttcagcatggatctttatc

SEQ ID NO: 720736 - DNA, 120 bp, Artificial Sequence
  ENSG00000197826_25 (sequence is synthesized)
tgataccatttttaaagaaaacatcttggcattatcatacctaacaaaatactttccttaatgtcatctaatacctagttcacatttcattttcacccttaataacatttaattgactgt

SEQ ID NO: 720737 - DNA, 120 bp, Artificial Sequence
  ENSG00000197826_26 (sequence is synthesized)
ctaatttattttttatagtttgtttgaccagtcaaaattcaagtgattttgtgttttgtcttactatatcttgacctcttgcatgcttttttttttttttacaacagtccccctcattct

SEQ ID NO: 720738 - DNA, 120 bp, Artificial Sequence
  ENSG00000197826_27 (sequence is synthesized)
ttttatcttctacgctattgatttgttggagaaaccaggtcctgataaacattgtcctcaaatgtctcacattctggattttactgatccagtaaaatcgtgctgtttattctactatct

SEQ ID NO: 720739 - DNA, 120 bp, Artificial Sequence
  ENSG00000197826_28 (sequence is synthesized)
atgttcctctattccctataaactgatttgattaaatgcagtataatttttttctaagtaagaaattttaatatgtgatgctctgtactgactatcgccccagttttagatctcctgagc

SEQ ID NO: 720740 - DNA, 120 bp, Artificial Sequence
  ENSG00000197826_29 (sequence is synthesized)
tcgatcagtaggttcaagtggtgtcagtctaattacttcattacaagattttccataaaatttcacccaatggtgttagcatctattattgaaagctacctaaatgtttttactaagggt

SEQ ID NO: 720741 - DNA, 120 bp, Artificial Sequence
  ENSG00000197826_30 (sequence is synthesized)
tgaataatggtgaatctataattatattatttatcctgaattttttaacttgaattcttctatagagaaaaacttttccttatcacttatttggttaccttgaaataaattcctgcagaa

SEQ ID NO: 720742 - DNA, 120 bp, Artificial Sequence
  ENSG00000197826_31 (sequence is synthesized)
atacaaaataaatatttttttcatttatagaaaatttgaagccagaaacacaaaagagtgtagagattataccaaattatttttcagagtagttgtatcattttgtatccatgagaaata

SEQ ID NO: 720743 - DNA, 120 bp, Artificial Sequence
  ENSG00000197826_32 (sequence is synthesized)
ctgcataagtgatctggttatccctcatcctcaccaacacaagatattaacaaactgttctttcccactgtagtgagttataaatgatctctcaatgtggttttcatttttatttacttg

SEQ ID NO: 720744 - DNA, 120 bp, Artificial Sequence
  ENSG00000197826_33 (sequence is synthesized)
attatttattagattgggtatcttttattggctgttcagattttctttctgtgaagtacctattaagatttttccctgttatttcaagtgagctattctttttcttgcaaattataagat

SEQ ID NO: 720745 - DNA, 120 bp, Artificial Sequence
  ENSG00000197826_34 (sequence is synthesized)
tcgttttatttatttttggatattgattaatcctttgcctcttatgtgtatttcaaaatatcatctctctgtgtgtagttcttcttcttttttttttttcattgattttgatggtcagaa

SEQ ID NO: 720746 - DNA, 120 bp, Artificial Sequence
  ENSG00000197826_35 (sequence is synthesized)
atcagaagttctgatagtcatcttaatgcattttaaactttacctctgcagtttgtgcttttgtattttgtttaataaaccccatcctttttggaagtcataaatatactgtcttatagg

SEQ ID NO: 720747 - DNA, 120 bp, Artificial Sequence
  ENSG00000197837_0 (sequence is synthesized)
acagtgggcagcccgattttctgctgagtaggcgctgtgatttcagaatgtctgggcgaggtaaaggtggcaaggggctgggtaagggaggcgccaagcgccaccggaaggtgctgcggg

SEQ ID NO: 720748 - DNA, 120 bp, Artificial Sequence
  ENSG00000197837_1 (sequence is synthesized)
acaatatccaaggcattacaaagccggcgattcgccgtctcgcccgacgtgggggcgtcaagcgcatttctggtctcatctacgaggagacccggggagtcctcaaagtcttcctggaga

SEQ ID NO: 720749 - DNA, 120 bp, Artificial Sequence
  ENSG00000197837_2 (sequence is synthesized)
cctttatggtttcggcggttgagctgtccccacagcttctctacagactccaaaaggcccttttcagggcccccaaactgtcacagaaagagctgttaacacttcctagataacgggtaa

SEQ ID NO: 720750 - DNA, 120 bp, Artificial Sequence
  ENSG00000197837_3 (sequence is synthesized)
atatcaaccctttgatgtcgccttccggataccggaaatgggatattcgcggcccgagcatctgctcgggattagacttggcgggcacggggagaactagacctcaaggagggggttccg

SEQ ID NO: 720751 - DNA, 83 bp, Artificial Sequence
  ENSG00000197837_4 (sequence is synthesized)
gcctccgcctcccaaagtgctggcatttcaggcgtgagccaccacgcttggtcttgctctagctattctaaacatgaagaagt

SEQ ID NO: 720752 - DNA, 120 bp, Artificial Sequence
  ENSG00000197837_5 (sequence is synthesized)
acgcttggtcttgctctagctattctaaacatgaagaagtcatatagcttccttggtgcggtgggctgaagtcactctaagggagtttcccagccccaggggttaaagaactggagtcaa

SEQ ID NO: 720753 - DNA, 120 bp, Artificial Sequence
  ENSG00000197837_6 (sequence is synthesized)
ctactccataaagacttcaagtgagtacacaatactggtgttagtttaatttctaagacagtgagacactcggagaagttcaattttctttaatgcaagtgaaaaattgagttacttaaa

SEQ ID NO: 720754 - DNA, 120 bp, Artificial Sequence
  ENSG00000197837_7 (sequence is synthesized)
agaaatagagtctggcatactttcgtgccctcgatatttgttgcatgaccaaatgagtgattttgggtttcacataaattaaggatgaaagttagggccccgatggaggatagaaatact

SEQ ID NO: 720755 - DNA, 120 bp, Artificial Sequence
  ENSG00000197837_8 (sequence is synthesized)
gtagatatttgtatgacaattaaaactcttccttaagtatttaacttatatggaattgtttaaatatttcatggttttggggtttttttttatttttgtagtggtctcaattctttgatt

SEQ ID NO: 720756 - DNA, 120 bp, Artificial Sequence
  ENSG00000197837_9 (sequence is synthesized)
agaatagaacttatattttcccttgtagcatagttatttttttgtttgtgttttgttctttataaaatataacctaattatctaaacccaagaaatatttatttttgtctgtgactctga

SEQ ID NO: 720757 - DNA, 120 bp, Artificial Sequence
  ENSG00000197837_10 (sequence is synthesized)
gtcctatggtatagtaagtacccagtcctgacagtaatcatatcttccaaaccaaaactgggtcacacggttcaataactgaacagaatatctcaaactgaaaacgatcaagattttctg

SEQ ID NO: 720758 - DNA, 120 bp, Artificial Sequence
  ENSG00000197837_11 (sequence is synthesized)
aagtttactattaatagtaaaattgcttactaaaaatgttaaagaacttgatttaaaactctgtaatgcctcacttaaaatgtgaatgaggggggcggggtgggggtggctataatgcca

SEQ ID NO: 720759 - DNA, 120 bp, Artificial Sequence
  ENSG00000197837_12 (sequence is synthesized)
gcactttgggaaggctgaggcagtaggattgctggaggccaggagtttgagaccagcatggccaacatagtgagaccccatctctacataaaataagaattataaaatgtaaagtgaatg

SEQ ID NO: 720760 - DNA, 120 bp, Artificial Sequence
  ENSG00000197837_13 (sequence is synthesized)
gaatgcattgaaatttgatcctgtagcaaagtcatcccttttgaattttgaacatttgtttaatgcctcttttccaagcatattttgaatattcagagataaatgagcaagttactgcca

SEQ ID NO: 720761 - DNA, 120 bp, Artificial Sequence
  ENSG00000197837_14 (sequence is synthesized)
ctttatggtttcggcggttgagctgtccccacagcttctctacagactccaaaaggcccttttcagggcccccaaactgtcacagaaagagctgttaacacttcctagataacggtctag

SEQ ID NO: 720762 - DNA, 120 bp, Artificial Sequence
  ENSG00000197837_15 (sequence is synthesized)
ccggcctccggtaaagctccgtataacagcctcgctctactcctggctctgtccttcctaacttctcattaggcttggcaccccaggatgcggtgtgatccatgccgcgttaactaatct

SEQ ID NO: 720763 - DNA, 84 bp, Artificial Sequence
  ENSG00000197837_16 (sequence is synthesized)
gtgtgatccatgccgcgttaactaatctgccccttctctaccttttcttttttcctttcttttcgagaccaagtctagctctgc

SEQ ID NO: 720764 - DNA, 120 bp, Artificial Sequence
  ENSG00000197837_17 (sequence is synthesized)
gaggtgaccaagctcagatgctgagattaaggcggccgggcgaaactcgcgacaccctgcgattccctcttagccagctgcgtaaagttgcctacgccaagcgggtagcgtcctgctcgg

SEQ ID NO: 720765 - DNA, 120 bp, Artificial Sequence
  ENSG00000197837_18 (sequence is synthesized)
ccacctggcggcgggcgtggagttggcaggcaggcagtgggggtcacgccggcatgaaaggccagatcacctgcaggtcgccaagttgccgggaatcccccgctccgagcagtgtcatgc

SEQ ID NO: 720766 - DNA, 120 bp, Artificial Sequence
  ENSG00000197838_0 (sequence is synthesized)
atctatcatcccactgccaccatgctggcctcagggctgcttctggtgaccttgctggcctgcctgactgtgatggtcttgatgtcagtctggcggcagaggaagagcagggggaagctg

SEQ ID NO: 720767 - DNA, 120 bp, Artificial Sequence
  ENSG00000197838_1 (sequence is synthesized)
cctccgggacccaccccattgcccttcattggaaactacctgcagctgaacacagagcagatgtacaactccctcatgaagatcagtgagcgctatggccctgtgttcaccattcacttg

SEQ ID NO: 720768 - DNA, 120 bp, Artificial Sequence
  ENSG00000197838_2 (sequence is synthesized)
gggccccggcgggtcgtggtgctgtgcggacatgatgccgtcaaggaggctctggtggaccaggctgaggagttcagcgggcgaggcgagcaggccaccttcgactggctcttcaaaggc

SEQ ID NO: 720769 - DNA, 120 bp, Artificial Sequence
  ENSG00000197838_3 (sequence is synthesized)
tatggcgtggcgttcagcaacggggagcgcgccaagcagctccggcgcttctccatcgccaccctaaggggttttggcgtgggcaagcgcggcatcgaggaacgcatccaggaggaggcg

SEQ ID NO: 720770 - DNA, 120 bp, Artificial Sequence
  ENSG00000197838_4 (sequence is synthesized)
ggcttcctcatcgacgccctccggggcacgcacggcgccaatatcgatcccaccttcttcctgagccgcacagtctccaatgtcatcagctccattgtctttggggaccgctttgactat

SEQ ID NO: 720771 - DNA, 120 bp, Artificial Sequence
  ENSG00000197838_5 (sequence is synthesized)
gaggacaaagagttcctgtcactgttgcgcatgatgctgggaagcttccagttcacggcaacctccacggggcagctctatgagatgttctcttcggtgatgaaacacctgccaggacca

SEQ ID NO: 720772 - DNA, 120 bp, Artificial Sequence
  ENSG00000197838_6 (sequence is synthesized)
cagcaacaggcctttaaggagctgcaagggctggaggacttcatcgccaagaaggtggagcacaaccagcgcacgctggatcccaattccccacgggacttcatcgactcctttctcatc

SEQ ID NO: 720773 - DNA, 120 bp, Artificial Sequence
  ENSG00000197838_7 (sequence is synthesized)
tgcgggcactgagaccgtgagcaccaccctgcgctacggtttcctgctgctcatgaagcacccagaggtggaggccaaggtccatgaggagattgacagagtgatcggcaagaaccggca

SEQ ID NO: 720774 - DNA, 120 bp, Artificial Sequence
  ENSG00000197838_8 (sequence is synthesized)
gcccaagtttgaggaccgggccaagatgccctacacagaggcagtgatccacgagatccaaagatttggagacatgctccccatgggtttggcccacagggtcaacaaggacaccaagtt

SEQ ID NO: 720775 - DNA, 120 bp, Artificial Sequence
  ENSG00000197838_9 (sequence is synthesized)
tcgggatttcttcctccctaagggcactgaagtgttccctatgctgggctccgtgctgagagaccccaggttcttctccaacccccgggacttcaatccccagcacttcctggataagaa

SEQ ID NO: 720776 - DNA, 120 bp, Artificial Sequence
  ENSG00000197838_10 (sequence is synthesized)
ggggcagtttaagaagagtgatgcttttgtgcccttttccatcggaaagcggtactgttttggagaaggcctggccagaatggagctctttctcttcttcaccaccatcatgcagaactt

SEQ ID NO: 720777 - DNA, 120 bp, Artificial Sequence
  ENSG00000197838_11 (sequence is synthesized)
tcgcttcaagtcccctcagtcgcctaaggatatcgacgtgtcccccaaacacgtgggctttgccacgatcccacgaaactacaccatgagcttcctgccccgctgagcgagggctgtgct

SEQ ID NO: 720778 - DNA, 120 bp, Artificial Sequence
  ENSG00000197838_12 (sequence is synthesized)
ggtgcagggctggtgggcggggccagggaaacggccggggcaggggcggggcttgtgggaggggcggggctaagaatgggggcagtgggggaaggaaggggagaggtggttagagggaac

SEQ ID NO: 720779 - DNA, 120 bp, Artificial Sequence
  ENSG00000197838_13 (sequence is synthesized)
agaagaaacagaaggggctcagttcaccttgatgatgtccttcagagctgtgatgagaggaagggaaaccttacagtatgctacaaagagtagtaataatagcagctcttatttcctgaa

SEQ ID NO: 720780 - DNA, 120 bp, Artificial Sequence
  ENSG00000197841_0 (sequence is synthesized)
gctgtagcctcaggcctgacggcgactcccaggctccgggacgattctgggcagtgtcgtccccagaggtcggcggccgttgcccgctcaccagcgacgcggggcgcctgcggggacggt

SEQ ID NO: 720781 - DNA, 120 bp, Artificial Sequence
  ENSG00000197841_1 (sequence is synthesized)
gaggccctgctgaggactccggccagtatgagtcccgggggcggcggcggggctcaggccctgggtctgccccgcggtgtgaccccggccggtgccttggttttcctggccttcatgtcc

SEQ ID NO: 720782 - DNA, 120 bp, Artificial Sequence
  ENSG00000197841_2 (sequence is synthesized)
tcctatgtaaacgcggggtgatgacggcgccgacctcttggcgctgttgtgagagtgaagtgggcgcgtggttagacgccagccacagttgtctttgggttatgtcgtcatgaagccggc

SEQ ID NO: 720783 - DNA, 120 bp, Artificial Sequence
  ENSG00000197841_3 (sequence is synthesized)
gctctacagttgtgtaaccttgaacaaatgggttcagtatcttggaatttcagttttgtcatcgtttaaaaaatagatctggaaaaatgtgaacgcacaccgtgcatagtggtgaagact

SEQ ID NO: 720784 - DNA, 120 bp, Artificial Sequence
  ENSG00000197841_4 (sequence is synthesized)
gaacgagctgataaagtttttaccattgttttatgaggattttatttacagagtaattgattttcctcgcaggtggcacctggtaaatggttagcccttgcggagaaacaccctgttagt

SEQ ID NO: 720785 - DNA, 120 bp, Artificial Sequence
  ENSG00000197841_5 (sequence is synthesized)
tcccagggagagattggcgccctggagagtgattaccagtgtgcctttccattatggtgtgtcacaggtgccgcaagataagcctgatttttcatgactgctttttcctgcccttctgtg

SEQ ID NO: 720786 - DNA, 120 bp, Artificial Sequence
  ENSG00000197841_6 (sequence is synthesized)
ccctcaggacactgcccatctctaagataagagcctggaaagaggactctgttggctgttggaaattgcagagtaatgcctcaggtgacatttaatgatgtggctatagacttcactcat

SEQ ID NO: 720787 - DNA, 120 bp, Artificial Sequence
  ENSG00000197841_7 (sequence is synthesized)
gaagagtggggatggctcagttctgctcagagggacttatacaaggatgtgatggtccagaattatgagaacctggtctctgtagcaggtctttctgtaactaagccatatgtgatcacg

SEQ ID NO: 720788 - DNA, 120 bp, Artificial Sequence
  ENSG00000197841_8 (sequence is synthesized)
ttattggaggatggaaaagagccctggatgatggagaaaaaactgtcaaaaggtatgattccagattgggaatcaagatgggaaaacaaggaattatcaacaaagaaggataattatgat

SEQ ID NO: 720789 - DNA, 120 bp, Artificial Sequence
  ENSG00000197841_9 (sequence is synthesized)
gaagattcaccccaaacagtaataatagaaaaagttgtaaaacaaagttatgaattttcaaattctaagaagaatttggaatatatagagaagttggaagggaagcatggaagtcaggta

SEQ ID NO: 720790 - DNA, 120 bp, Artificial Sequence
  ENSG00000197841_10 (sequence is synthesized)
gaccatttcagaccagcaattctcacctctagagaaagccccactgcagacagtgtttacaaatacaatatatttagaagcacctttcattcaaagtctactctttctgaaccacaaaaa

SEQ ID NO: 720791 - DNA, 120 bp, Artificial Sequence
  ENSG00000197841_11 (sequence is synthesized)
atttctgctgaagggaattcacacaaatatgatatattaaagaagaacttaccaaaaaagtcagttataaaaaatgagaaagtcaatggtggaaagaaacttttgaattctaataaaagt

SEQ ID NO: 720792 - DNA, 120 bp, Artificial Sequence
  ENSG00000197841_12 (sequence is synthesized)
ggggcagccttcagccagggcaaatctcttacccttccccagacttgtaatagagagaaaatctatacatgcagtgaatgtgggaaagcctttggcaaacagtcaatcctcaatcgccac

SEQ ID NO: 720793 - DNA, 120 bp, Artificial Sequence
  ENSG00000197841_13 (sequence is synthesized)
tggagaattcatacaggagagaagccctatgaatgtcgtgaatgtgggaagacttttagccatggctcatcccttacacgacatctgataagccatagtggagagaaaccttacaaatgt

SEQ ID NO: 720794 - DNA, 120 bp, Artificial Sequence
  ENSG00000197841_14 (sequence is synthesized)
acatctgataagccatagtggagagaaaccttacaaatgtattgaatgtgggaaggcctttagccatgtctcatcacttactaaccatcagagcactcacactggagagaaaccatatga

SEQ ID NO: 720795 - DNA, 120 bp, Artificial Sequence
  ENSG00000197841_15 (sequence is synthesized)
cttattgaacatctaagaattcatactcaagaaaaactctatgagtgtcgtatatgtggaaaggccttcattcataggtcatctctcattcaccatcagaaaatccatactggagagaag

SEQ ID NO: 720796 - DNA, 120 bp, Artificial Sequence
  ENSG00000197841_16 (sequence is synthesized)
ccttatgaatgtagagaatgtgggaaagctttctgctgtagctcacaccttactcgacatcaaagaattcacactatggagaaacaatatgaatgcaacaaatgtctgaaagtctttagt

SEQ ID NO: 720797 - DNA, 120 bp, Artificial Sequence
  ENSG00000197841_17 (sequence is synthesized)
agcctctcatttcttgttcagcatcagagtattcatactgaagaaaaaccctttgaatgtcagaaatgcaggaaatccttcaaccagcttgaatcactgaatatgcatttgagaaatcac

SEQ ID NO: 720798 - DNA, 120 bp, Artificial Sequence
  ENSG00000197841_18 (sequence is synthesized)
attagattgaaaccctacgaatgcagtatatgtgggaaagcctttagtcataggtcatccctgcttcaacatcacagaattcatactggagagaaaccttatgaatgtattaaatgtggg

SEQ ID NO: 720799 - DNA, 120 bp, Artificial Sequence
  ENSG00000197841_19 (sequence is synthesized)
aagaccttcagctgtagttcaaaccttaccgtacatcagagaattcacactggagaaaagccatataaatgtaatgagtgtgggaaagcttttagcaaaggctcaaatcttactgcccat

SEQ ID NO: 720800 - DNA, 120 bp, Artificial Sequence
  ENSG00000197841_20 (sequence is synthesized)
caaagagtacataatggagagaaacccaatagtgtggtaagtgtggaaaagcctttagactatatgaatcactatacatgtgagaaatcttacagaagagaaactgtatgaagcagtggt

SEQ ID NO: 720801 - DNA, 120 bp, Artificial Sequence
  ENSG00000197841_21 (sequence is synthesized)
tatcatggtaaatttcctagattctcccttatttaacattagaaaaatttatactggggaaagtcttatgaatgtggtgaatataggaagaccttttagcaaagatgcaggccagtttgt

SEQ ID NO: 720802 - DNA, 120 bp, Artificial Sequence
  ENSG00000197841_22 (sequence is synthesized)
ttattagactttatactgtagagaaatcatatgaagaccataaatgtgggaaagcctttgtcagtattaatcccttaattgacataagtatactcacactaggataaaaccctgtacatg

SEQ ID NO: 720803 - DNA, 120 bp, Artificial Sequence
  ENSG00000197841_23 (sequence is synthesized)
tagcaaatgtgggaaagactacagacaataggaatcttttacaaactcctacaggagagaagctgtatgaatgtagaaaatttagaaattgagggaagtcttcagttccaagtatatccc

SEQ ID NO: 720804 - DNA, 120 bp, Artificial Sequence
  ENSG00000197841_24 (sequence is synthesized)
aaatctcatttaagagatgtagcaaagtgttcactaagagtgtttatcttggtacacatcagaagattaatggtagaacaacctgaaggatttaggagttatgtgtaaatctttgcagtc

SEQ ID NO: 720805 - DNA, 120 bp, Artificial Sequence
  ENSG00000197841_25 (sequence is synthesized)
atgctatttgtaaactggattctacaggagagcaaataaacattataataaaatatgcatttcttagagcagtagcttgcagtttcagttgagttctacttagaaattctttttagctag

SEQ ID NO: 720806 - DNA, 120 bp, Artificial Sequence
  ENSG00000197841_26 (sequence is synthesized)
tgggcatgtgaagatatttagtcacccagaggagccagtaagtgttataatattgaaaattaaagctgcaaaagaaataaagtgatgttaataaaagttttggcatctaataaaatcatt

SEQ ID NO: 720807 - DNA, 120 bp, Artificial Sequence
  ENSG00000197841_27 (sequence is synthesized)
ttgtatatcacaaactctttcactgtgactatttcctgtaaaaaaaatttcactaagattagccttagcgtagcctttagtgggagactagcaaacctagagaaaaatgacctgctcttt

SEQ ID NO: 720808 - DNA, 120 bp, Artificial Sequence
  ENSG00000197841_28 (sequence is synthesized)
atactaagaatagcagtattttgatgaggattattcagagtcaatttccagtaggcttaatcaaatacatttcaaaaaaatttactgagcatcactcgtgtattattacacagcgatggg

SEQ ID NO: 720809 - DNA, 120 bp, Artificial Sequence
  ENSG00000197841_29 (sequence is synthesized)
atataggaatccagtagttctgagctttagtggtgtgtcaaagtcagtaggagggcttgttaaagcacagattgctaagtctgaatcttagggtttctgtatgagttgatttgaatttgc

SEQ ID NO: 720810 - DNA, 120 bp, Artificial Sequence
  ENSG00000197841_30 (sequence is synthesized)
atttttcatgcgttcttaggcgacacactgtccagaaagcacattttgataaccattgtaataatgaacaaaacaaatctgatctttttctcgcagggatgttatctgacaagaaagatg

SEQ ID NO: 720811 - DNA, 120 bp, Artificial Sequence
  ENSG00000197841_31 (sequence is synthesized)
gatagcaaataaatttgaaataatggtttacaagtgctatgaggacataaccaagaaacaacatactacaagagatcagagcaggcttagcgagatgtgatttttgaaatgaatcctaaa

SEQ ID NO: 720812 - DNA, 120 bp, Artificial Sequence
  ENSG00000197841_32 (sequence is synthesized)
tgatgaacactaattatgtaatgagtactactcatgtagccatgtgcatccctgcatgtgcctgtgcgtgtgtgtatgcggtgtgctgggtgttaatctaggtaaagcagacagtcgagt

SEQ ID NO: 720813 - DNA, 120 bp, Artificial Sequence
  ENSG00000197841_33 (sequence is synthesized)
tctgtcatacttgctgcagctggattccacgttcccatgtctagtttcagattctgtggctttgaggtagtgctgctggcagcatcattgcagcaaccgtcatttctctatccctgagtc

SEQ ID NO: 720814 - DNA, 120 bp, Artificial Sequence
  ENSG00000197841_34 (sequence is synthesized)
atagttacgggagtttaccttgaaatcactagcccagaagtgttctcattacttttacagcccacctaccaattttgaaagcactaatttgcagcaatatatgtcttgaaatagttaaga

SEQ ID NO: 720815 - DNA, 120 bp, Artificial Sequence
  ENSG00000197841_35 (sequence is synthesized)
gagattttgttctctgcactgaaccttgacagataattatgttttgtaaggaggcaggatggcttcaaatattctaagttctagataagaaatggaacagtctcactggccctgtgatta

SEQ ID NO: 720816 - DNA, 120 bp, Artificial Sequence
  ENSG00000197841_36 (sequence is synthesized)
gaatcctatcttgtgattagaaaggtaatgcagatcaatttgatttggagtgtatggacactgatgcaagtgaaggggtgtgatatggattatgcttcagattttgttctttatctcagg

SEQ ID NO: 720817 - DNA, 120 bp, Artificial Sequence
  ENSG00000197841_37 (sequence is synthesized)
tgagagtagtaagatatgttattttaaaaaggaacattatgttatagttatgataattctggtgtggaatgagtgataaggtttctgactttcaacaaaatgtatctcctctgatatatg

SEQ ID NO: 720818 - DNA, 120 bp, Artificial Sequence
  ENSG00000197841_38 (sequence is synthesized)
tgctaccttaacagaaagccaaagcacagaggcatattccaatagcaatttgcaagagacagtaggtttggaatggggtggtaaacttttactattttgcagggattttatctttcattt

SEQ ID NO: 720819 - DNA, 120 bp, Artificial Sequence
  ENSG00000197841_39 (sequence is synthesized)
gatttatttttaatcatgaaatttatattgaaattctgtgaaacattgaaggatctttggaagatttataattagggaagggccagatgtagtggctaatgtctgtactcccagcacttt

SEQ ID NO: 720820 - DNA, 120 bp, Artificial Sequence
  ENSG00000197841_40 (sequence is synthesized)
gtttgagaccagcctgggcaatatagcaaaactcattagtctgttaaaaaaaaaaattacccaggtgtaggcacacatctgcagtcctagctattcaggaggctgagtggggagggattg

SEQ ID NO: 720821 - DNA, 120 bp, Artificial Sequence
  ENSG00000197841_41 (sequence is synthesized)
tcctagctattcaggaggctgagtggggagggattgcttgagtacaggagttttaaggtcacagtgagctatcatcacaccactgctttccagcctggacagcagaacaccaccctgtct

SEQ ID NO: 720822 - DNA, 120 bp, Artificial Sequence
  ENSG00000197841_42 (sequence is synthesized)
ccaaagtaaataaatacaattaaggaagcatgatgtggtatcagacagttgcaagtatggatagactggctaccacatatatacttatgggataatgagagtagctttcttttctctcat

SEQ ID NO: 720823 - DNA, 120 bp, Artificial Sequence
  ENSG00000197841_43 (sequence is synthesized)
tctgtgtcctttctctgctctcccaagcaactggtaccacagagatgaagtagtcctataatgcccagattttgtttccactacacatagtttaatgctaccatgtcactttgttatgag

SEQ ID NO: 720824 - DNA, 120 bp, Artificial Sequence
  ENSG00000197841_44 (sequence is synthesized)
aggattcatcgaaatacctgtgctttgtcatttaaaaagcatgggcatacacatgataatgctttacgtttctggatttaaagtgccttcacaatacagaactaggaaaaagaaggccat

SEQ ID NO: 720825 - DNA, 120 bp, Artificial Sequence
  ENSG00000197841_45 (sequence is synthesized)
ctttttaaatgaagatagttttaagagagcaataagagactattactttgttatgatagaaggttgggctgatgtcataatgatgttatgatgtcactgacatcatattatttcctcagt

SEQ ID NO: 720826 - DNA, 120 bp, Artificial Sequence
  ENSG00000197841_46 (sequence is synthesized)
catacctattaaccatttcttgagcatccactatgggcttaatagataagaaacactccataccctttaagagccctgaggtgtgtgtgtgtgaacagcattaaactttggagtcatgtt

SEQ ID NO: 720827 - DNA, 120 bp, Artificial Sequence
  ENSG00000197841_47 (sequence is synthesized)
acctgggtttaaatccaagttgcatgaatactggctttgtgtgaccttggacaaactatttcactgtgtcttgcctcagtttctccatctgtaaaatgataataaagctatctcacagca

SEQ ID NO: 720828 - DNA, 120 bp, Artificial Sequence
  ENSG00000197841_48 (sequence is synthesized)
aaaagattgggaatcaagatgggaaaacaaggaattatcaacaaagaaggataattatgatgaagattcaccccaaacagtaataatagaaaaagttgtaaaacaaagttatgaattttc

SEQ ID NO: 720829 - DNA, 120 bp, Artificial Sequence
  ENSG00000197841_49 (sequence is synthesized)
cggttcgttgcgcctggaattttgtcccctgcgcggatgattctgggaaatgtcgatcggctgtgggcggcgcactgggtccgccccgctgtagcctcaggacactgcccatctctaaga

SEQ ID NO: 720830 - DNA, 120 bp, Artificial Sequence
  ENSG00000197841_50 (sequence is synthesized)
taagagcctggaaagaggactctgttggctgttggaaattgcagagtaatgcctcagcttcagtacccagagggttacctggcaccaaatagatgcttagtaagtaattgtggagtgaat

SEQ ID NO: 720831 - DNA, 120 bp, Artificial Sequence
  ENSG00000197841_51 (sequence is synthesized)
cctggtctctgtaggtaaggatattaccccttccactccagtaggggacacctttcttttgccaccctgaattgctggagaccctcctaagtaaatggctgaatttctgtagcatgttcc

SEQ ID NO: 720832 - DNA, 120 bp, Artificial Sequence
  ENSG00000197841_52 (sequence is synthesized)
caaggaaatgtgcagctctgttgtgccctgcctgaagcttatctttccatttcgatgaatacccttcatcccttcctgtggtccctcttgtgatggcctctcataatagaggaccacggc

SEQ ID NO: 720833 - DNA, 120 bp, Artificial Sequence
  ENSG00000197849_0 (sequence is synthesized)
atgtcaggagaaaataattcctcagtgactgagttcattctggctgggctctcagaacagccagagctccagctgcccctcttcctcctgttcttaggaatctatgtggtcacagtggtg

SEQ ID NO: 720834 - DNA, 120 bp, Artificial Sequence
  ENSG00000197849_1 (sequence is synthesized)
ggcaacctgggcatgaccacactgatttggctcagttctcacctgcacacccctatgtactatttcctcagcagtctgtccttcattgacttctgccattccactgtcattacccctaag

SEQ ID NO: 720835 - DNA, 120 bp, Artificial Sequence
  ENSG00000197849_2 (sequence is synthesized)
atgctggtgaactttgtgacagagaagaacatcatctcctaccctgaatgcatgactcagctctacttcttcctcgtttttgctattgcagagtgtcacatgttggctgcaatggcgtat

SEQ ID NO: 720836 - DNA, 120 bp, Artificial Sequence
  ENSG00000197849_3 (sequence is synthesized)
ctggtttgtgcatcagttcatacaggctgtatgtttagggttcaattctgcaaatttgatttgattaaccattatttctgtgatcttcttcccctcctaaagctctcttgctctagtatc

SEQ ID NO: 720837 - DNA, 120 bp, Artificial Sequence
  ENSG00000197849_4 (sequence is synthesized)
tatgtcaacaaactacttattctatgtgttggtgcatttaacatccttgtccccagcctgaccatcctttgctcttacatctttattattgccagcatcctccacattcgctccactgag

SEQ ID NO: 720838 - DNA, 120 bp, Artificial Sequence
  ENSG00000197849_5 (sequence is synthesized)
ggcaggtccaaagccttcagcacttgtagctcccacatgttggcggttgtaatcttttttggatctgcagcattcatgtacttgcagccatcttcaatcagctccatggaccaggggaaa

SEQ ID NO: 720839 - DNA, 120 bp, Artificial Sequence
  ENSG00000197849_6 (sequence is synthesized)
gtatcctctgtgttttatactattattgtgcccatgttgaaccctctgatttatagcctgaggaataaagatgtccatgtttccctgaagaaaatgctacagagaagaacattattgtaa

SEQ ID NO: 720840 - DNA, 120 bp, Artificial Sequence
  ENSG00000197849_7 (sequence is synthesized)
ttgccaccctgaagctggagaaacaaaaactgcaaagtcataattagaaatactgacctgtgatgcagaccagcttcaaagtgactctgagactgagggctgggccctgccctctcaaca

SEQ ID NO: 720841 - DNA, 120 bp, Artificial Sequence
  ENSG00000197849_8 (sequence is synthesized)
ctaaagattccagaatgctgggtgtctatgactctcaacaccaacattaatgccatgtcaggaagagaacattccaagccaacattctccatgtcaggaagaggaaattgcaagtaaaat

SEQ ID NO: 720842 - DNA, 120 bp, Artificial Sequence
  ENSG00000197849_9 (sequence is synthesized)
caagcattgaagtttttaggcagtggaaagtttggggctcttatgaataaggctgtcatgaacatttttgtataaatcttcatgtagacaaacgtttacatttttcttggaaactgactg

SEQ ID NO: 720843 - DNA, 120 bp, Artificial Sequence
  ENSG00000197849_10 (sequence is synthesized)
tgatatattaatcctaagtagtggactgttacattgtatgaatggatgtctttcactttaatgcatctgtcaataatttttaccatttggtgagattatattaccattattttttcattt

SEQ ID NO: 720844 - DNA, 120 bp, Artificial Sequence
  ENSG00000197849_11 (sequence is synthesized)
catgaccctttgatgtcatttcccatgtggggttttaactcatatgtatcaatgagacacaaattaatataaatactaaaatcgacatgagtacatagactcattaatgccagccccatg

SEQ ID NO: 720845 - DNA, 120 bp, Artificial Sequence
  ENSG00000197849_12 (sequence is synthesized)
ttcttacctcttttcttttacacaattgataaaattcagctcagttctcaaccataatgaaaataccatcttccaaaagtgataccaatctcccttattctgtcttttcaataacaacat

SEQ ID NO: 720846 - DNA, 120 bp, Artificial Sequence
  ENSG00000197849_13 (sequence is synthesized)
aaattattgcaatatgatagctgtaattttagcctgcagcaatctcttttctgccttattcatctatttacctcatttgtctgctgtatttcttctttagcaacataatcaaaatttcag

SEQ ID NO: 720847 - DNA, 120 bp, Artificial Sequence
  ENSG00000197849_14 (sequence is synthesized)
aatataagttacatatccgtgtatgtgttataattgtgcaatccaatatatcatctgctttgcattttcctattctagtttgtacttgccttcaacctacactggacttcagtcttcatg

SEQ ID NO: 720848 - DNA, 120 bp, Artificial Sequence
  ENSG00000197849_15 (sequence is synthesized)
aagattcccccgtacatgtggtttattgccacgtctccagcgtctatcatagttcttgccaccttaggtccttgaaagcttttttattatttcctcatttaagctaagtataggaaagcc

SEQ ID NO: 720849 - DNA, 120 bp, Artificial Sequence
  ENSG00000197849_16 (sequence is synthesized)
agccatatgtatgtcatacttactttatctatttatctctcgaagagctacatatgtttttaaatctaatctaatttaatttatatttcaagttgattaaaatttactttagaaggttct

SEQ ID NO: 720850 - DNA, 120 bp, Artificial Sequence
  ENSG00000197849_17 (sequence is synthesized)
gaatctataatataactggtaacattctgacctattctatgctaagatgtatgtgtatttgttctgtgaaaaatcccaatgcagatatgataacttgttaacacctgattttttaagtca

SEQ ID NO: 720851 - DNA, 120 bp, Artificial Sequence
  ENSG00000197849_18 (sequence is synthesized)
ttaaaccctctcaacaaccaaggagtccctaaagcaatacttattttttctttcttttcaaacatgtggcacaggaaggttaaaaaatatgtttgatgcctgatgggtaaacatagcaaa

SEQ ID NO: 720852 - DNA, 120 bp, Artificial Sequence
  ENSG00000197849_19 (sequence is synthesized)
tctggtgatagagttggaacctgaatagcatggtctaaactacccttaattctctatgcctagagcagaacataattttacctgtgctggtaatgagaaaattccttgctatgtagatat

SEQ ID NO: 720853 - DNA, 120 bp, Artificial Sequence
  ENSG00000197849_20 (sequence is synthesized)
atatataaaatatacttcaataaaattgctttaaaatgaaagtgagggtgctacgtgatcaaatacaataagctatgtttctataaccagaagaaatatttcacttgtctatatttggat

SEQ ID NO: 720854 - DNA, 120 bp, Artificial Sequence
  ENSG00000197849_21 (sequence is synthesized)
ggggctggttaagttgctttgatcagattccaggtaatgcagcttactctgtttatatatatttaatcacaggctcctggatatcgaaactatagtttgtccatccttttagttgaaggg

SEQ ID NO: 720855 - DNA, 120 bp, Artificial Sequence
  ENSG00000197849_22 (sequence is synthesized)
agtgtaggtgaatgagccataggttaataggactatttcccgggaactctaaaaacatggcatgtataaaattgagcataccaagtagatttggatcttcttgcctgagaaaattctcaa

SEQ ID NO: 720856 - DNA, 120 bp, Artificial Sequence
  ENSG00000197849_23 (sequence is synthesized)
tcaatcatggactctattaacctgagtctgggaagattcaactgttaatctatttcttccatgtggagccaagttaaatgatttctttaagcttatttacttattacttatttgctatta

SEQ ID NO: 720857 - DNA, 120 bp, Artificial Sequence
  ENSG00000197849_24 (sequence is synthesized)
ctagtgtatctaagtataactagtgaaaaaattgccaggatccgacttagaaaaaaatatatttctaaaagctaaggggacttaaagttatttcctcagaaaactcatctctgaaactca

SEQ ID NO: 720858 - DNA, 120 bp, Artificial Sequence
  ENSG00000197849_25 (sequence is synthesized)
atctgcattacttttccatatcatccttatgttctctttcagaaaaactatctctttttcttcttagcttgcattgcttgtggtaattttatgatcatttgaacgtctactctgtacatt

SEQ ID NO: 720859 - DNA, 120 bp, Artificial Sequence
  ENSG00000197849_26 (sequence is synthesized)
tcccttgcttcaatggactataagctcgagtagagaatacacactcaaatatttattaatgattataccaaacacccttggtttctcatgccacattctttcagactacctcctgtttct

SEQ ID NO: 720860 - DNA, 120 bp, Artificial Sequence
  ENSG00000197849_27 (sequence is synthesized)
catttcagcagacttgaggcacatttattagctgtgtgcaagctgagagttaacttgcattgaaggtgttacacttcaaatttccagcaagtgctttgcactttcactctggaaacttct

SEQ ID NO: 720861 - DNA, 120 bp, Artificial Sequence
  ENSG00000197849_28 (sequence is synthesized)
ccacaatttcagatgctcatttggcttatgtacagtcagctcaaagaattcttgctcttggggtcacctttacccagtaacagtgaaaattgtgtgtaatgccacatcatcctgtcacac

SEQ ID NO: 720862 - DNA, 120 bp, Artificial Sequence
  ENSG00000197849_29 (sequence is synthesized)
aggacagccatcttgggaaacatcatatgcacttctgaggaagtgctggtaaaattgaaccaccattgctcataccagcttttcaataacatactccaatattagcttttccttcttcgc

SEQ ID NO: 720863 - DNA, 120 bp, Artificial Sequence
  ENSG00000197849_30 (sequence is synthesized)
attttgactcaaatttgtaaacattactaaaaaattaacagcttaaatgaagataaaacaataatttaaagtccgttagaaaactatttatgtttgctgagtgcagtggctcatgcctgt

SEQ ID NO: 720864 - DNA, 86 bp, Artificial Sequence
  ENSG00000197849_31 (sequence is synthesized)
gctcatgcctgtagtcccagcactttggggagctgaggtgggtgaatcacttctagaaacctcatttctgcagaaaatacaaaaat

SEQ ID NO: 720865 - DNA, 120 bp, Artificial Sequence
  ENSG00000197849_32 (sequence is synthesized)
tacttgggaggctgaggcaggagtattgcttgggtccaggaagttggggctgcagtgagccttgattgtgccactgtacgtcagcctgggcgacagagagagattgtcccccaaactacc

SEQ ID NO: 720866 - DNA, 120 bp, Artificial Sequence
  ENSG00000197849_33 (sequence is synthesized)
agagagattgtcccccaaactaccaccaccaccaatgaacaaacaaacaaaaactttgacaacttttaatggtcaaaaaatattgtatatattattgtgtacaagttattttgaatgtgt

SEQ ID NO: 720867 - DNA, 120 bp, Artificial Sequence
  ENSG00000197849_34 (sequence is synthesized)
gtgtgtgtgtatagcgaaatgcctaaattgagctagttaacatatatattacctaacatatttatttgtgtgtgtgtggtgagaacactaatccaatagatttttattactatagttacc

SEQ ID NO: 720868 - DNA, 120 bp, Artificial Sequence
  ENSG00000197849_35 (sequence is synthesized)
atttatacaatagtttttaacttattccttctatctaattaaaatattatatcctttgaccaacatctcctcccacacgcccagctgcagataaacacaattctactgtctacctctgtg

SEQ ID NO: 720869 - DNA, 88 bp, Artificial Sequence
  ENSG00000197849_36 (sequence is synthesized)
ttgtaatataatgtcctacaggttcatctgtattgttgcaaatttttaaatctaaatattattccattgtgcacatataccacatttt

SEQ ID NO: 720870 - DNA, 120 bp, Artificial Sequence
  ENSG00000197849_37 (sequence is synthesized)
aatctaaatattattccattgtgcacatataccacattttgtttatccattcttcctaagcgatggacacctaggttaatctatatcttggctattgtgaataatgctacaataaacatg

SEQ ID NO: 720871 - DNA, 120 bp, Artificial Sequence
  ENSG00000197849_38 (sequence is synthesized)
ggagtgcagatatttctttgacgtgctgattgtattttttgaatatatacccgatagtggtattgctaggtcatatggtagttcaatttttaattttttgaggaagctttatgctgtttt

SEQ ID NO: 720872 - DNA, 120 bp, Artificial Sequence
  ENSG00000197849_39 (sequence is synthesized)
ccataatgactgtactaatttacattcccataaacagcatgtaatggttcactttcctccacatcctctccaacagttatccgttctctttttgatagtaactatcctaacaagtatgag

SEQ ID NO: 720873 - DNA, 120 bp, Artificial Sequence
  ENSG00000197849_40 (sequence is synthesized)
aacaagtatgaggtgatatctcactgtagtttctctgcaatttgatgatttgtaattttgaacactttttcatatacctgttgaccatttttatgtcttcttttgagaaatgtctattta

SEQ ID NO: 720874 - DNA, 120 bp, Artificial Sequence
  ENSG00000197852_0 (sequence is synthesized)
gactctgagtcccgggctcggagcgcaggctcagctccgcgctgcgagcgctacgggcgcaggggcggggagccggcccggagcgcagtttccagtggggccggggtttcacccgggccc

SEQ ID NO: 720875 - DNA, 120 bp, Artificial Sequence
  ENSG00000197852_1 (sequence is synthesized)
tctctgtttgaaccgaacccgacaaatgggcgcatgacgatggagagcagggaaatggactgctatctccgtcgcctcaaacaggagctgatgtccatgaaggaggtgggtgatggctta

SEQ ID NO: 720876 - DNA, 120 bp, Artificial Sequence
  ENSG00000197852_2 (sequence is synthesized)
caggatcagatgaactgcatgatgggtgcactgcaagaactgaagctcctccaggtgcagacagcactggaacagctggagatctctggagggggtcctgtgccaggcagccctgaaggt

SEQ ID NO: 720877 - DNA, 120 bp, Artificial Sequence
  ENSG00000197852_3 (sequence is synthesized)
cccaggacccagtgcgagcacccttgttgggagggtggcagaggtcctgccaggcccacagtctgttccccctccagtcaaccttctcttggcagcagcaccaagtttccatcccatagg

SEQ ID NO: 720878 - DNA, 120 bp, Artificial Sequence
  ENSG00000197852_4 (sequence is synthesized)
agtgtctgtggaagggatttagcccccttgcccaggacacagccacatcaaagctgtgctcagcaggggccagagcgagtggaaccggatgactggacctccacgttgatgtcccggggc

SEQ ID NO: 720879 - DNA, 120 bp, Artificial Sequence
  ENSG00000197852_5 (sequence is synthesized)
cggaatcgacagcctctggtgttaggggacaacgtttttgcagacctggtgggcaattggctagacttgccagaactggagaagggtggggagaagggtgagactgggggggcacgtgaa

SEQ ID NO: 720880 - DNA, 120 bp, Artificial Sequence
  ENSG00000197852_6 (sequence is synthesized)
cccaaaggagagaaaggccagccccaggagctgggccgcaggttcgccctgacagcaaacatctttaagaagttcttgcgtagtgtgcggcctgaccgtgaccggctgctgaaggagaag

SEQ ID NO: 720881 - DNA, 120 bp, Artificial Sequence
  ENSG00000197852_7 (sequence is synthesized)
ccaggctgggtgacacccatggtccctgagtcccgaaccggccgctcacagaaggtcaagaagcggagcctttccaagggctctggacatttccccttcccaggcaccggggagcacagg

SEQ ID NO: 720882 - DNA, 120 bp, Artificial Sequence
  ENSG00000197852_8 (sequence is synthesized)
cgaggggagaatccccccacaagctgccccaaggccctggagcactcaccctcaggatttgatattaacacagctgtttgggtctgaatcctagagacagaaagttgactgagcctgaaa

SEQ ID NO: 720883 - DNA, 120 bp, Artificial Sequence
  ENSG00000197852_9 (sequence is synthesized)
gggccaggtcccagtgctgggcccctggggaggagggagggtgggcggtatggctctcgaaagcccaactccaagttcctttcccccagaaagcggggagaagccagagttcttggctca

SEQ ID NO: 720884 - DNA, 120 bp, Artificial Sequence
  ENSG00000197852_10 (sequence is synthesized)
ggactgaagggaaggtggttgggagaggctgtcttgggggctagctggtggaggaggtaagagtagctggagagtgagctgtgcgtgtgtgtgtgtgtgtgtgcatgtgtgtgtctgtct

SEQ ID NO: 720885 - DNA, 120 bp, Artificial Sequence
  ENSG00000197852_11 (sequence is synthesized)
ggcatgcatgcactcactttggggctggaggtgacagtaggtgagggcagaggaggagatcagaaaatccctctgacatctccactgcccccaaagacctccgttgaacattctgtatgg

SEQ ID NO: 720886 - DNA, 120 bp, Artificial Sequence
  ENSG00000197852_12 (sequence is synthesized)
aaaagagccctggagcatcaggttccccagataggcccccaaataaagacctgtctatggctctcccaaccttctgtcagcttctttggcaagacattgctccaggcacagggactgaac

SEQ ID NO: 720887 - DNA, 120 bp, Artificial Sequence
  ENSG00000197852_13 (sequence is synthesized)
cccaggcctcctgggactggagcagcagtgaggcaaaacccgacctgctagccctttctgccttggaggtttcagtccatacctggactctgagaaaatgagctgaataaggagtacagt

SEQ ID NO: 720888 - DNA, 120 bp, Artificial Sequence
  ENSG00000197852_14 (sequence is synthesized)
gtgtaaggagcagccagggaagccctagacactccccgcgtctcccccatgcacaggggaaggatgttgacatagcactgggctgtttgaatgccttttcatctccatggtctcatttga

SEQ ID NO: 720889 - DNA, 120 bp, Artificial Sequence
  ENSG00000197852_15 (sequence is synthesized)
aagtgagcgaggcaggcaggcatgatcccattttccagataaggaaacaagcctagatatgctacatgtccaggaacaactgcagccaggaggcagaacagcctaggtctaactgcagag

SEQ ID NO: 720890 - DNA, 120 bp, Artificial Sequence
  ENSG00000197852_16 (sequence is synthesized)
gccaggaggcagaacagcctaggtctaactgcagagtagaagctggaccctggagttaccaacactcctccccaacagttcttagcaccccgcaggctgggcgctgtggctcacgcctgt

SEQ ID NO: 720891 - DNA, 61 bp, Artificial Sequence
  ENSG00000197852_17 (sequence is synthesized)
cctgtctcaaaaaaaataaaaaaaaacagttcgtagggccccataccccacaacccctgtc

SEQ ID NO: 720892 - DNA, 120 bp, Artificial Sequence
  ENSG00000197852_18 (sequence is synthesized)
aaaaacagttcgtagggccccataccccacaacccctgtctcctgcacttaactcccacctgggtcagagaacagccaattcaccagtgaggtagaagtgaacccagaagaaatagccac

SEQ ID NO: 720893 - DNA, 120 bp, Artificial Sequence
  ENSG00000197852_19 (sequence is synthesized)
ttgattttaaaattcccagctccattccgtggccttctccccactagacacagcagtcccaggcctcctgttccctcctcacctagaggcagccgggacggagggggaagggccaggcag

SEQ ID NO: 720894 - DNA, 120 bp, Artificial Sequence
  ENSG00000197852_20 (sequence is synthesized)
cagctcagctccggcttctctaaagccactctgggcacgtggcccaggagggccacctagtgatccaggcccccccccaggactgccctgggaagccactgtccctcccactccagtagg

SEQ ID NO: 720895 - DNA, 120 bp, Artificial Sequence
  ENSG00000197852_21 (sequence is synthesized)
gaacactcactggctgggaaaagacaatgtggatcttcttttgggctgaccaagccaggagggcacaccctcccactgcccctctctgcctcccactgattgtccctcagcctgatgggg

SEQ ID NO: 720896 - DNA, 120 bp, Artificial Sequence
  ENSG00000197852_22 (sequence is synthesized)
tgtgacagctgcaattagaggcaggattccttcccaccctcaaagcattaatagccagttggagaggcaaaatagtaagaaaaggctcttctgcttgcttcctggatccctggggagagt

SEQ ID NO: 720897 - DNA, 120 bp, Artificial Sequence
  ENSG00000197852_23 (sequence is synthesized)
tacccagtcaaatggtaagatgtttcatttttggtgggggagctgcaggagggaggaaggcgctcatgctttttgggttttgttgagcactcactgtctgtcaggtaatgtgcacatctc

SEQ ID NO: 720898 - DNA, 120 bp, Artificial Sequence
  ENSG00000197852_24 (sequence is synthesized)
tcaaacttagaaggaccctagaaggcattgttctccagacacatctatggaggttattagggggcgtgtaaactgccccgattaggctgctagcaaaggaaaggacagagatttgaacag

SEQ ID NO: 720899 - DNA, 120 bp, Artificial Sequence
  ENSG00000197852_25 (sequence is synthesized)
agggttgggttatctggctccaaaacccctgtccttttcttgctatttctctacctggagtttgccaactgagcaagcccactctggtggagccagccactgcaaatcctttgtgtcttc

SEQ ID NO: 720900 - DNA, 120 bp, Artificial Sequence
  ENSG00000197852_26 (sequence is synthesized)
ccagagaataccaacatttcagttttgagtgagggaacgttggctctgactgcctttggaggtggagatggtggaggtggtggtggtggtggtggtagtggtggtgtgtgtgtgtgtgtg

SEQ ID NO: 720901 - DNA, 120 bp, Artificial Sequence
  ENSG00000197852_27 (sequence is synthesized)
tgtgtgtgtgtgtgtgtgcctgcgcgtgctaagaaactgcatgttaagattccacctactgaatcatgagcggaggaagtcgtgggacactggctggtggagaagccatctagcatatta

SEQ ID NO: 720902 - DNA, 120 bp, Artificial Sequence
  ENSG00000197852_28 (sequence is synthesized)
ttcaagatgacaccagctccaagtctggaatgagtctgtgggaaaccaaggtacttcttggacattcacctataactcacgtgtttcgtggactggtcacagtggttcggataaattgaa

SEQ ID NO: 720903 - DNA, 120 bp, Artificial Sequence
  ENSG00000197852_29 (sequence is synthesized)
cagaactttatgaacacctcccagcaccaggtgttgttatagaaactaagaacagagcaatgagaaggacccaactcctgctctcaaatggatgcagtggaaaataagcagactttgaac

SEQ ID NO: 720904 - DNA, 120 bp, Artificial Sequence
  ENSG00000197852_30 (sequence is synthesized)
cattggttagtcagaagagacttgggagactgaaaacttgtttcaacttgggccagaacaaaaaattaggaagcaacacttgctgccaacatgatttacaagtgccagcaccttcacctc

SEQ ID NO: 720905 - DNA, 120 bp, Artificial Sequence
  ENSG00000197852_31 (sequence is synthesized)
tgttacttccttctcactacacactgaaagcagttgctcttgttttacatggacaggctcagagaagttaagcaacttgtccaaggtcacacagtagtggaattgagattgaatcagttc

SEQ ID NO: 720906 - DNA, 120 bp, Artificial Sequence
  ENSG00000197852_32 (sequence is synthesized)
caactgacttgcaatcttgtgcttttcagacgatcccactaattgtccatatctgttccaaagccaaatcaagaggaacaagagcaaaatctgtcctctcatattattcatggtcctgcg

SEQ ID NO: 720907 - DNA, 120 bp, Artificial Sequence
  ENSG00000197852_33 (sequence is synthesized)
tggatcataaatggcatgctgactgtctgatggagacttacttttcccttccccctggacacctgccatggcaatgacagaggctgtattttactgaagtggagggaagaggtgaatgca

SEQ ID NO: 720908 - DNA, 120 bp, Artificial Sequence
  ENSG00000197852_34 (sequence is synthesized)
aatgcctagggcctaagtatacaggaaggtgtagggagaggtaagcagtgtgtatgtggaggagatagcagacgtaagcagagagaaatcagagagcttagttcttcctctggggcgcac

SEQ ID NO: 720909 - DNA, 120 bp, Artificial Sequence
  ENSG00000197852_35 (sequence is synthesized)
tttgtggttaattaggacatgcaaatgagctagaagctcatttaatatcctccctgacatgtagccccaccccaccctgccccacttccctggcaggtacaagggccacctgattggccc

SEQ ID NO: 720910 - DNA, 120 bp, Artificial Sequence
  ENSG00000197852_36 (sequence is synthesized)
aggtatctgtggaaggttccacctgcttctttgtggcccagggaacagaaaagagtccctgctgggcatgctagtggggccggcctggtctccctcctccctttctcttcccaacctttc

SEQ ID NO: 720911 - DNA, 120 bp, Artificial Sequence
  ENSG00000197852_37 (sequence is synthesized)
agacttgggacctctcttttccctctccctcagacacttcccttgtgccccgcccctcagggtgatctctgaacccaaacttgccccaaagaaggttgctctgtcctctccacatcccca

SEQ ID NO: 720912 - DNA, 120 bp, Artificial Sequence
  ENSG00000197852_38 (sequence is synthesized)
tctcctccctagggccttgttggggagaggctcctccatctttcccaagtcacaccatcgtttcctacgtggtctggacaagagcaagagcacaccttgtccccaccttctccagagcag

SEQ ID NO: 720913 - DNA, 120 bp, Artificial Sequence
  ENSG00000197852_39 (sequence is synthesized)
ccagaacccacctcaggtgccttccccatccggtgcagttaaggcacttctgccagcaccatggtatgagcactagacttggagttaagatttgagagccccctctgtcactgtggaagc

SEQ ID NO: 720914 - DNA, 120 bp, Artificial Sequence
  ENSG00000197852_40 (sequence is synthesized)
ttgagcatgttgcttgatctctctgaaccttgtgtttctcatctgtgaaaggtgataatgtggggctgctgtgagatttaaaggacataatgcacctacggtccaagcactgcctggaat

SEQ ID NO: 720915 - DNA, 120 bp, Artificial Sequence
  ENSG00000197852_41 (sequence is synthesized)
acagcagaagctcagcagatactggacaacccatccccttagtagaggcactaaccatgtgacccaaggcaaaagtgcttaagaaaaagtgctttctctgagcgttggtctcttcttctg

SEQ ID NO: 720916 - DNA, 120 bp, Artificial Sequence
  ENSG00000197852_42 (sequence is synthesized)
tcgaaacatttatattgatttaatatctcacaggattgtagcaagggtcagagaagacaataggtgacatgtttttgtacactgtatactagccacccagatgggctgttatttgctaaa

SEQ ID NO: 720917 - DNA, 120 bp, Artificial Sequence
  ENSG00000197852_43 (sequence is synthesized)
tggcaaatttacactgttccccaaaggatgacatgcactggggaggcggggggtgtggaggtggagaaaggctgagcttggagaaaaggtgcttgaggaccccactgcctaaggacctgc

SEQ ID NO: 720918 - DNA, 120 bp, Artificial Sequence
  ENSG00000197852_44 (sequence is synthesized)
tctaggaaacattcccactccctacaccctagctgcccctcacagtcaacccttaaggacctcaaattcttggcaaggggtaaagagttgaaagtgccaagtcctagtggttttgagaag

SEQ ID NO: 720919 - DNA, 120 bp, Artificial Sequence
  ENSG00000197852_45 (sequence is synthesized)
cctctggtctgctctttctgctctgtaaagtcttagttgccagagtcccctatagcccccacatcgctcccttcctcctgccctccggccaccctggaaactaatggcctaaaggtgctg

SEQ ID NO: 720920 - DNA, 120 bp, Artificial Sequence
  ENSG00000197852_46 (sequence is synthesized)
tggctgtcctcctaaaatccattccctcctgatggggtggaggaatctgtgaagcccaccttcaggagaggtctcggggctcgggctggtgctgccagagaaagggtgactgaaccagaa

SEQ ID NO: 720921 - DNA, 120 bp, Artificial Sequence
  ENSG00000197852_47 (sequence is synthesized)
aggcctaggggaaagcagctcaaactgcagccatccccttagtacgattactaggatgtcccttgccttccttttgcctcctccacccaacccctaaaataaacagtatgatgaaacctc

SEQ ID NO: 720922 - DNA, 120 bp, Artificial Sequence
  ENSG00000197852_48 (sequence is synthesized)
aacacgcccggcctggaagtggaagaaagggacgggagtcggaggctgagagactgcccagacacacaaaaaatgtggcctgaggaaagccccaagagggaggagaggaaagatgaggca

SEQ ID NO: 720923 - DNA, 120 bp, Artificial Sequence
  ENSG00000197852_49 (sequence is synthesized)
caaatgggcgcatgacgatggagagcagggaaatggactgctatctccgtcgcctcaaacaggagctggccccatgctttctctctcccctgcagatgtccatgaaggaggtgggtgatg

SEQ ID NO: 720924 - DNA, 72 bp, Artificial Sequence
  ENSG00000197852_50 (sequence is synthesized)
tgcagtggcacaatcacaactcactgcagtctccacctcccttgctcaagtcatccttactgggtctgctgg

SEQ ID NO: 720925 - DNA, 120 bp, Artificial Sequence
  ENSG00000197857_0 (sequence is synthesized)
aattgtcaatcaggcgcgaggcagagaggagggtgtgacgttccaggagctagtggcctcttcaccctggtgacctctgttccgtattctgtcactgagagacgccctgggacatctgtg

SEQ ID NO: 720926 - DNA, 120 bp, Artificial Sequence
  ENSG00000197857_1 (sequence is synthesized)
gtggcttttgtcgcgctgggacctaccctgactacgggagttgggaggacccgggacaccgcacagccgggaaatggactcagtggcctttgaggatgtggctgtgaacttcacccatga

SEQ ID NO: 720927 - DNA, 120 bp, Artificial Sequence
  ENSG00000197857_2 (sequence is synthesized)
ggagtgggctttgctgggtccatcacagaagaatctctacagagatgtgatgcgagaaaccattaggaacctgaactgtataggaatgaaatgggaaaaccagaacattgatgatcagca

SEQ ID NO: 720928 - DNA, 120 bp, Artificial Sequence
  ENSG00000197857_3 (sequence is synthesized)
ccaaaatctcaggagaaatccaaggtgtgatgtggtagagagatttggtaaaagtaaagatggtagtcagtgtggagaaaccttaagccagattcgaaatagtattgtaaacaagaacac

SEQ ID NO: 720929 - DNA, 120 bp, Artificial Sequence
  ENSG00000197857_4 (sequence is synthesized)
tcccgccagagtagatgcatgtggaagcagtgtgaatggagaagtcataatgggtcattcatccctgaattgctacatcagagttgatactggacacaaacaccgggagtgtcatgaata

SEQ ID NO: 720930 - DNA, 120 bp, Artificial Sequence
  ENSG00000197857_5 (sequence is synthesized)
tgcagagaagtcatatacacataagcagtgtgggaaaggcttaagttatcgccactcctttcaaacatgtgaaaggcctcacactggaaagaaaccctatgattgtaaggaatgtggaaa

SEQ ID NO: 720931 - DNA, 120 bp, Artificial Sequence
  ENSG00000197857_6 (sequence is synthesized)
aaccttcagttctcctggaaaccttcgaagacatatggtagtaaaaggtggagatggaccttataaatgtgaattgtgtgggaaagcctttttttggcccagtttattacgtatgcatga

SEQ ID NO: 720932 - DNA, 120 bp, Artificial Sequence
  ENSG00000197857_7 (sequence is synthesized)
acactggagagaaaccatatgaatgtaagcagtgttctaaagccttccctgtttacagttcctatctaagacatgaaaaaatacacactggggagaaaccgtatgaatgtaagcagtgtt

SEQ ID NO: 720933 - DNA, 120 bp, Artificial Sequence
  ENSG00000197857_8 (sequence is synthesized)
tgtaaacaatgtgggaaagccttcagtgtttccggttcccttcgagtacatgaaagaattcacactggagagaaaccctatacatgtaaacagtgtgggaaagcgttttgtcatcttgga

SEQ ID NO: 720934 - DNA, 120 bp, Artificial Sequence
  ENSG00000197857_9 (sequence is synthesized)
agctttcaaagacacatgataatgcacagtggagatggacctcataaatgtaagatatgtgggaaaggctttgattttcctggttcagcacgaattcatgaaggaactcacactctagag

SEQ ID NO: 720935 - DNA, 120 bp, Artificial Sequence
  ENSG00000197857_10 (sequence is synthesized)
cctatgaatgtaagcaatgtgggaaattgttatctcatcgctcaagctttcgaagacacatgatggcacacactggagatggccctcataaatgcacagtatgtgggaaagcctttgatt

SEQ ID NO: 720936 - DNA, 120 bp, Artificial Sequence
  ENSG00000197857_11 (sequence is synthesized)
gactcacactggagagaaaccctatgaatgcaagcaatgtgggaaagccttccgtacttccagttcccttcgaaaacatgaaacaacacacactggagagcaaccctataaatgtaaatg

SEQ ID NO: 720937 - DNA, 120 bp, Artificial Sequence
  ENSG00000197857_12 (sequence is synthesized)
cacactggagagcaaccctataaatgtaaatgtggaaaagcttttagtgatttattttcctttcaaagtcatgaaacaacacacagtgaagaggagccttatgaatgtaaggagtgtggg

SEQ ID NO: 720938 - DNA, 120 bp, Artificial Sequence
  ENSG00000197857_13 (sequence is synthesized)
aaagcatttagttcttttaaatacttttgtcgccatgaaaggactcacagtgaagaaaaatcttatgagtgtcaaatttgtggcaaagccttcagtcgtttcagttacttaaaaactcat

SEQ ID NO: 720939 - DNA, 120 bp, Artificial Sequence
  ENSG00000197857_14 (sequence is synthesized)
gaaaggactcacacggcagagaagccatatgaatgtaagcaatgcaggaaagcattcttttggccctctttccttctaagacatgaaaggactcacactggagaaagaccctatgaatgt

SEQ ID NO: 720940 - DNA, 120 bp, Artificial Sequence
  ENSG00000197857_15 (sequence is synthesized)
aaacactgtggtaaagccttcagtcgttccagtttctgtcgagaacatgaaagaactcacactggagagaagccctatgaatgtaaggaatgtgggaaagccttcagttctctcagttcc

SEQ ID NO: 720941 - DNA, 120 bp, Artificial Sequence
  ENSG00000197857_16 (sequence is synthesized)
tttaatagacataaaaggacacactggaaggatattctataagtgtatggaatgtgggaaagcattcattggttttatcacattcagatacttgaaagaaataaatcctgtgaatgtaaa

SEQ ID NO: 720942 - DNA, 120 bp, Artificial Sequence
  ENSG00000197857_17 (sequence is synthesized)
tggccctgtgttatggaactttctggggctaccctaagatgctggaagctgccaatctcatggagggcctagtggatatcggcccttgggtcactcttcccagaggacagcctgaggtgt

SEQ ID NO: 720943 - DNA, 120 bp, Artificial Sequence
  ENSG00000197857_18 (sequence is synthesized)
ctccatctcaaaaaaaaaaaaaaaagtttccatttctttcaaatagagttgctgcctgctatatgcaagaagattggttccagtacaccctgagtatacctaaatccacagatgccagct

SEQ ID NO: 720944 - DNA, 120 bp, Artificial Sequence
  ENSG00000197857_19 (sequence is synthesized)
agtatacctaaatccacagatgccagctcttttataaaatggaatattcgcatgtacctacccacattctcctgtatactctataaatgtctagattaattaaaatatctcatgcattgt

SEQ ID NO: 720945 - DNA, 120 bp, Artificial Sequence
  ENSG00000197857_20 (sequence is synthesized)
gcctcccaaaggatcaggctggagaacttgggacagtggataagtctggtctgttcctgttatctggacttggcagattaatgcaacattctgtgggactttgcaatagctaaagaactt

SEQ ID NO: 720946 - DNA, 120 bp, Artificial Sequence
  ENSG00000197857_21 (sequence is synthesized)
aaatatcctttgtttactaaaggcttcattattatggaagtagtaactgatgtttattatctgagatggatagatacttgtgcttttcttgttgagctataaaatagaagtgacttacaa

SEQ ID NO: 720947 - DNA, 120 bp, Artificial Sequence
  ENSG00000197857_22 (sequence is synthesized)
gagaagccctatgaatgactcagtgacctttgaagatgtggctgtgaacttcacccaggaggaatggactttgctggatccttcacagaaaaaactctacagagacgtgatgtgggaaac

SEQ ID NO: 720948 - DNA, 120 bp, Artificial Sequence
  ENSG00000197857_23 (sequence is synthesized)
cttcaggaacctggccactataggaacaaaacaaaaagaatggaacattgaagagcagtacaaaaaccaggggagaaatctcagaaatcatatggtagagagactctgtgaaagtaaaga

SEQ ID NO: 720949 - DNA, 120 bp, Artificial Sequence
  ENSG00000197857_24 (sequence is synthesized)
aggtagtcatggcggagaaggtttcagccagattgcaaatctcagtctgaacaagaaaactccttctggaggaaagctttgggaaagcagtgtatgtggaaaagtcttgagccatcattc

SEQ ID NO: 720950 - DNA, 120 bp, Artificial Sequence
  ENSG00000197857_25 (sequence is synthesized)
atcccttaacaggcacattagatcttacaccagacacaaactgtataagtgtcaggaatatggagagaagccatataaatgtaagaaatgtgggaaacccttcagttatctgcagtcttt

SEQ ID NO: 720951 - DNA, 120 bp, Artificial Sequence
  ENSG00000197857_26 (sequence is synthesized)
aaatgtaaggcctgtgggaaagccttcagttgtcaacgttctttccaaatacatggaaggactcacactggagataaaccctttaagtgtaaagaatgtggaaaagcattccgataccac

SEQ ID NO: 720952 - DNA, 120 bp, Artificial Sequence
  ENSG00000197857_27 (sequence is synthesized)
atactggagagaaaccctacaaatgtaaggaatgtgggaaacccttcatttaccgccattctgctcgagcacatgaaaggaatcacactgtacagaaacgctatgaatgtaaacaatgtg

SEQ ID NO: 720953 - DNA, 120 bp, Artificial Sequence
  ENSG00000197857_28 (sequence is synthesized)
cagaaacgctatgaatgtaaacaatgtggaaaaacctacatatcttctgtaggttttcaagcacatgaaagaactcacactggagaaaaaccctatgaatgtaaaaaatgtgggaaagtg

SEQ ID NO: 720954 - DNA, 120 bp, Artificial Sequence
  ENSG00000197857_29 (sequence is synthesized)
ttcgtatatcacaactctgctcaaagacatgaaaagactcatactggagagaaaccctacaaatgcaaggaatgtgggaaagccttcagttaccactgtactgctcaaaaacatgagagg

SEQ ID NO: 720955 - DNA, 120 bp, Artificial Sequence
  ENSG00000197857_30 (sequence is synthesized)
aatcacactgcacagaaacactatgaatgtaaactgtgtgggaaaacttacttgtctcctttaggttttcaagcacatgaaagtactcacactggagataaaccctttgagtgtaaaaaa

SEQ ID NO: 720956 - DNA, 90 bp, Artificial Sequence
  ENSG00000197857_31 (sequence is synthesized)
aagtactcacactggagataaaccctttgagtgtaaaaaatgtggaaaagcatttagatactactactcagctcaaagacatgaaaggac

SEQ ID NO: 720957 - DNA, 120 bp, Artificial Sequence
  ENSG00000197857_32 (sequence is synthesized)
ggggctcctgttcccctaacccactgaattcagccttccagaggccgaggtggctccaccacagcttctgtccggtggtgaccagcactgatctccggagccaagggaggacccgggaca

SEQ ID NO: 720958 - DNA, 120 bp, Artificial Sequence
  ENSG00000197857_33 (sequence is synthesized)
cctgggagccgggaaatgttttccatggctccgagacaatgacaccgcttcagtgtgaactctcatgaattgagtctagatccccagtgctgtccgtctcacctgtcctcctctacacat

SEQ ID NO: 720959 - DNA, 120 bp, Artificial Sequence
  ENSG00000197857_34 (sequence is synthesized)
atctgggatatgtcacggcttggtggtctttgaagatgtgactctgaacttcatccagaaggagtaggctttgctggatttttccgtgaagaatctgtagagatgtgatgagggaagcca

SEQ ID NO: 720960 - DNA, 120 bp, Artificial Sequence
  ENSG00000197857_35 (sequence is synthesized)
gggaaaactggttattttaccaaggctttaactggaatggtgtgccttcctttaaggaatcaaatttgacttatggagccaataaagcccttggaaagctggcctcagatttcatgtaca

SEQ ID NO: 720961 - DNA, 120 bp, Artificial Sequence
  ENSG00000197857_36 (sequence is synthesized)
taaagaatgtcactttctgacaggccaggagtcccaagttatcttagaacctcaagaagagaggatttctcccaactcataggtattcagtggtacaaatctatggctggccttgccttt

SEQ ID NO: 720962 - DNA, 120 bp, Artificial Sequence
  ENSG00000197857_37 (sequence is synthesized)
agtggtacaaatctatggctggccttgcctttaaaaaggtcttatctcacattccttctacaaaacaaagttccatcaaagccaatttaaaggacctaagtaacaaataattattcttgc

SEQ ID NO: 720963 - DNA, 120 bp, Artificial Sequence
  ENSG00000197857_38 (sequence is synthesized)
tacagaatttcattttgatccattatggtcacctggtagctttgtctgatggaggtttgttacagttttcaacaggacagggtctccctgtcacccaggctggagttcagtagtgttctc

SEQ ID NO: 720964 - DNA, 81 bp, Artificial Sequence
  ENSG00000197857_39 (sequence is synthesized)
cactaccatgcccagactgagataaggtatgaggaagccttggccatgccaccagccgcttatcccaaattcctgatccct

SEQ ID NO: 720965 - DNA, 120 bp, Artificial Sequence
  ENSG00000197857_40 (sequence is synthesized)
ggccatgccaccagccgcttatcccaaattcctgatccctggaagacatctgggctctccctcctgttccagcccagtagcttccagcaaaggtactggctcaattggacacggagtgtg

SEQ ID NO: 720966 - DNA, 120 bp, Artificial Sequence
  ENSG00000197857_41 (sequence is synthesized)
tctgtgagattttttaaactgacaggatcatggccatttcacagacaactacccaaaaatatctacagacggcactgctcctaccaacccgataccagagaactctctgtcccctcgtca

SEQ ID NO: 720967 - DNA, 120 bp, Artificial Sequence
  ENSG00000197857_42 (sequence is synthesized)
gcaggaagtagccagaaagaacatgccgcccctcgtcctttttataactatgaggtctggattgacagagcagaagcatcaccattgtggataagcgcctcattttaaaattcaccttaa

SEQ ID NO: 720968 - DNA, 120 bp, Artificial Sequence
  ENSG00000197857_43 (sequence is synthesized)
cagcctaatggctaaggtcagcatgatcacaaaccacaaataacatctccaaccaaaaacattccagacacctcccacagagaaatgctagcctcgggataacccctctcctgccggaaa

SEQ ID NO: 720969 - DNA, 120 bp, Artificial Sequence
  ENSG00000197857_44 (sequence is synthesized)
ctcgggataacccctctcctgccggaaagatgtcacccccaagataaccacccctccgcccagaacattccaaccctgccacaaacttctcccccacacagaaacattccaagcttgtaa

SEQ ID NO: 720970 - DNA, 120 bp, Artificial Sequence
  ENSG00000197857_45 (sequence is synthesized)
taagctccctcaccctaaaaccaacgtacattcttagtctgcaaggaaaagtgctcctgactgaccagccagaatcctctctcaggtcttttctataataaacctgtctttgactgtcaa

SEQ ID NO: 720971 - DNA, 120 bp, Artificial Sequence
  ENSG00000197858_0 (sequence is synthesized)
gagcgcgggtccccgggtctgacaggagcagcctgtgggcaccgcggcggtagttggaggcgggagagggtccgtagccgcgccgccctgccccgccatgggcctcctgtcggacccggt

SEQ ID NO: 720972 - DNA, 120 bp, Artificial Sequence
  ENSG00000197858_1 (sequence is synthesized)
tcgccggcgcgcgctcgcccgcctagtgctgcgcctcaacgcgccgttgtgcgtgctgagctacgtggcgggcatcgcctggttcttggcgctggttttcccgccgctgacccagcgcac

SEQ ID NO: 720973 - DNA, 120 bp, Artificial Sequence
  ENSG00000197858_2 (sequence is synthesized)
ttacatgtcggagaacgccatgggctccaccatggtggaggagcagtttgcgggcggagaccgtgcccgggcttttgcccgggacttcgccgcccaccgcaagaagtcgggggctctgcc

SEQ ID NO: 720974 - DNA, 120 bp, Artificial Sequence
  ENSG00000197858_3 (sequence is synthesized)
agtggcctggcttgaacggacgatgcggtcagtagggctggaggtctacacgcagagtttctcccggaaactgcccttcccagatgagacccacgagcgctatatggtgtcgggcaccaa

SEQ ID NO: 720975 - DNA, 120 bp, Artificial Sequence
  ENSG00000197858_4 (sequence is synthesized)
cgtgtacggcatcctgcgggccccgcgtgctgccagcaccgagtcgcttgtgctcaccgtgccctgtggctctgactctaccaacagccaggctgtggggctgctgctggcactggctgc

SEQ ID NO: 720976 - DNA, 120 bp, Artificial Sequence
  ENSG00000197858_5 (sequence is synthesized)
ccacttccgggggcagatttattgggccaaagatatcgtcttcctggtaacagaacatgaccttctgggcactgaggcttggcttgaagcctaccacgatgtcaatgtcactggcatgca

SEQ ID NO: 720977 - DNA, 120 bp, Artificial Sequence
  ENSG00000197858_6 (sequence is synthesized)
gtcgtctcccctgcagggccgagctggggccattcaggcagccgtggccctggagctgagcagtgatgtggtcaccagcctcgatgtggccgtggaggggcttaacgggcagctgcccaa

SEQ ID NO: 720978 - DNA, 120 bp, Artificial Sequence
  ENSG00000197858_7 (sequence is synthesized)
ccttgacctgctcaatctcttccagaccttctgccagaaagggggcctgttgtgcacgcttcagggcaagctgcagcccgaggactggacatcattggatggaccgctgcagggcctgca

SEQ ID NO: 720979 - DNA, 120 bp, Artificial Sequence
  ENSG00000197858_8 (sequence is synthesized)
tggttctgcggcaggcctccggccgcccccacggctcccatggcctcttcctgcgctaccgtgtggaggccctaaccctgcgtggcatcaatagcttccgccagtacaagtatgacctgg

SEQ ID NO: 720980 - DNA, 120 bp, Artificial Sequence
  ENSG00000197858_9 (sequence is synthesized)
tggcagtgggcaaggctttggagggcatgttccgcaagctcaaccacctcctggagcgcctgcaccagtccttcttcctctacttgctccccggcctctcccgcttcgtctccatcggcc

SEQ ID NO: 720981 - DNA, 120 bp, Artificial Sequence
  ENSG00000197858_10 (sequence is synthesized)
tctacatgcccgctgtcggcttcttgctcctggtccttggtctcaaggctctggaactgtggatgcagctgcatgaggctggaatgggccttgaggagcccgggggtgcccctggcccca

SEQ ID NO: 720982 - DNA, 120 bp, Artificial Sequence
  ENSG00000197858_11 (sequence is synthesized)
gtgtaccccttcccccatcacagggtgtggggctggcctcgctcgtggcacctctgctgatctcacaggccatgggactggccctctatgtcctgccagtgctgggccaacacgttgcca

SEQ ID NO: 720983 - DNA, 120 bp, Artificial Sequence
  ENSG00000197858_12 (sequence is synthesized)
cccagcacttcccagtggcagaggctgaggctgtggtgctgacactgctggcgatttatgcagctggcctggccctgccccacaatacccaccgggtggtaagcacacaggccccagaca

SEQ ID NO: 720984 - DNA, 120 bp, Artificial Sequence
  ENSG00000197858_13 (sequence is synthesized)
ggggctggatggcactgaagctggtagccctgatctacctagcactgcagctgggctgcatcgccctcaccaacttctcactgggcttcctgctggccaccaccatggtgcccactgctg

SEQ ID NO: 720985 - DNA, 120 bp, Artificial Sequence
  ENSG00000197858_14 (sequence is synthesized)
cgcttgccaagcctcatgggccccggaccctctatgctgccctgctggtgctgaccagcccggcagccacgctccttggcagcctgttcctgtggcgggagctgcaggaggcgccactgt

SEQ ID NO: 720986 - DNA, 120 bp, Artificial Sequence
  ENSG00000197858_15 (sequence is synthesized)
cactggccgagggctggcagctcttcctggcagcgctagcccagggtgtgctggagcaccacacctacggcgccctgctcttcccactgctgtccctgggcctctacccctgctggctgc

SEQ ID NO: 720987 - DNA, 120 bp, Artificial Sequence
  ENSG00000197858_16 (sequence is synthesized)
ttttctggaatgtgctcttctggaagtgagatctgcctgtccgggctgggacagagactccccaaggaccccattctgcctccttctggggaaataaatgagtgtctgtttcagcagcta

SEQ ID NO: 720988 - DNA, 120 bp, Artificial Sequence
  ENSG00000197858_17 (sequence is synthesized)
ccgtgcccgggcttttgcccgggacttcgccgcccaccgcaagaagtcggggtgagcggcagagcagggcgtatggggcgagcagtggtggctaaggccggggagctctgctcagaggct

SEQ ID NO: 720989 - DNA, 120 bp, Artificial Sequence
  ENSG00000197858_18 (sequence is synthesized)
agcgctatgtactgggggagtggggtgtgcctgggcccagaaagcaccttggagggaggggtctgggctgggtatcaccttgcgggggtgtcatggggccaggaagctcagtgggaggga

SEQ ID NO: 720990 - DNA, 120 bp, Artificial Sequence
  ENSG00000197858_19 (sequence is synthesized)
ttgctcctggtccttggtctcaagatatcctctgccccttgccatctacctgtgaccagcctccagtctcctcaactctaggctggggagagtcttccatcctgatggggggtggggtac

SEQ ID NO: 720991 - DNA, 120 bp, Artificial Sequence
  ENSG00000197858_20 (sequence is synthesized)
tcgcgcccctccggctgctcgcgcccttccgctcctgccctctggaagcactgagggtatcaggcccaggcttagggctcgggtccggcgtcccgatgcaggactccgggtttaggtctc

SEQ ID NO: 720992 - DNA, 120 bp, Artificial Sequence
  ENSG00000197858_21 (sequence is synthesized)
ccagacccgcgcgatcgaccccgggtgcggaggttgtggcctcgggtcggcgtctgaggacccgctgacgctccggtgcccctccgtcctctctcacagcgtgctgagctacgtggcggg

SEQ ID NO: 720993 - DNA, 120 bp, Artificial Sequence
  ENSG00000197859_0 (sequence is synthesized)
cactggcggagaaaatccccttcttttttttctctctctttttttctttttgagacggaatctcactctttcacccagactggagggcagcggcgagatctcggctcactgcaacctcca

SEQ ID NO: 720994 - DNA, 80 bp, Artificial Sequence
  ENSG00000197859_1 (sequence is synthesized)
gcttcagcctctcaacaatccccttctaaaggcaggtggtgtctccagcaccagggccatacggctgcaacacccctaca

SEQ ID NO: 720995 - DNA, 120 bp, Artificial Sequence
  ENSG00000197859_2 (sequence is synthesized)
gtctccagcaccagggccatacggctgcaacacccctacaagtgccgggtctgccagacaaccacgaccaactagtcccagataaccttgaggcctgggcactggctgggccccgagggc

SEQ ID NO: 720996 - DNA, 120 bp, Artificial Sequence
  ENSG00000197859_3 (sequence is synthesized)
tcttcccaaagcgtaccctggtcatctggaagaggatcggagctggcctggtggtgacagtggccttgcttcctaggatggatggcagatggcaatgttcctgctgggcctggttcctgc

SEQ ID NO: 720997 - DNA, 120 bp, Artificial Sequence
  ENSG00000197859_4 (sequence is synthesized)
tggttctggcagttgtagctggggacacagtgtcaaccgggtccacggacaacagcccaacatccaatagcctggaggggggcaccgacgccacggccttctggtggggggagtggacca

SEQ ID NO: 720998 - DNA, 120 bp, Artificial Sequence
  ENSG00000197859_5 (sequence is synthesized)
agtggacggcgtgttcccgcagttgcgggggtggggtgacatcccaggagcggcactgcctgcagcagaggaggaagtccgtcccgggccccgggaacaggacctgcacgggcacgtcca

SEQ ID NO: 720999 - DNA, 120 bp, Artificial Sequence
  ENSG00000197859_6 (sequence is synthesized)
agcggtaccagctctgcagagtgcaggagtgtccgccggacgggaggagcttccgcgaggagcagtgcgtctccttcaactcccacgtgtacaacgggcggacgcaccagtggaagcctc

SEQ ID NO: 721000 - DNA, 120 bp, Artificial Sequence
  ENSG00000197859_7 (sequence is synthesized)
tgtacccggatgactatgtccacatctccagcaaaccgtgtgacctgcactgtaccaccgtggacggccagcggcagctcatggtccccgcccgcgacggcacatcctgcaagctcactg

SEQ ID NO: 721001 - DNA, 120 bp, Artificial Sequence
  ENSG00000197859_8 (sequence is synthesized)
acctgcgaggggtttgcgtgtctggaaaatgtgagcccatcggctgtgacggggtgcttttctccacccacacactggacaagtgtggcatctgccagggggacggtagcagctgcaccc

SEQ ID NO: 721002 - DNA, 120 bp, Artificial Sequence
  ENSG00000197859_9 (sequence is synthesized)
acgtgacgggcaactatcgcaaggggaatgcccaccttggttactctctggtgacccacatcccggctggtgcccgagacatccagattgtagagaggaagaagtccgctgacgtgctag

SEQ ID NO: 721003 - DNA, 120 bp, Artificial Sequence
  ENSG00000197859_10 (sequence is synthesized)
ctcttgcagacgaagctggctactacttcttcaacggcaactacaaggtggacagccccaagaacttcaacatcgcaggcacggtggtcaagtacaggcggcccatggatgtctatgaga

SEQ ID NO: 721004 - DNA, 120 bp, Artificial Sequence
  ENSG00000197859_11 (sequence is synthesized)
ccggaatcgagtacatcgtggcacaggggcccaccaaccagggcctgaatgtcatggtgtggaaccagaacggcaaaagcccctccatcaccttcgagtacacgctgctgcagccgccac

SEQ ID NO: 721005 - DNA, 120 bp, Artificial Sequence
  ENSG00000197859_12 (sequence is synthesized)
acgagagccgcccccagcccatctactatggcttctccgagagcgctgagagccagggcctggacggggccgggctgatgggcttcgtcccgcacaacggctccctctacggccaggcct

SEQ ID NO: 721006 - DNA, 120 bp, Artificial Sequence
  ENSG00000197859_13 (sequence is synthesized)
cctcagagcggctgggcctggacaaccggctgttcggccacccgggcctggacatggagctgggccccagccagggccaggagaccaacgaggtgtgcgagcaggccggcggcggggcct

SEQ ID NO: 721007 - DNA, 120 bp, Artificial Sequence
  ENSG00000197859_14 (sequence is synthesized)
gcgaggggccccccaggggcaagggcttccgagaccgcaacgtcacggggactcctctcaccggggacaaggatgacgaagaggttgacacccacttcgcctcccaggagttcttctcgg

SEQ ID NO: 721008 - DNA, 120 bp, Artificial Sequence
  ENSG00000197859_15 (sequence is synthesized)
tggccgagagcttcttcgtggattatgaggagaacgagggggctggcccttacctgctcaacgggtcctacctggagctgagcagcgacagggttgccaacagctcctccgaggccccat

SEQ ID NO: 721009 - DNA, 120 bp, Artificial Sequence
  ENSG00000197859_16 (sequence is synthesized)
tccccaacgttagcaccagcctgctcacctcggccgggaacaggactcacaaggccaggaccaggcccaaggcgcgcaagcaaggcgtgagtcccgcggacatgtaccggtggaagctct

SEQ ID NO: 721010 - DNA, 120 bp, Artificial Sequence
  ENSG00000197859_17 (sequence is synthesized)
cgtcccacgagccctgcagtgccacctgcaccacaggggtcatgtctgcgtacgccatgtgtgtccgctatgatggcgtcgaggtggatgacagctactgtgacgccctgacccgtcccg

SEQ ID NO: 721011 - DNA, 120 bp, Artificial Sequence
  ENSG00000197859_18 (sequence is synthesized)
agcctgtccacgagttctgcgctgggagggagtgccagcccaggtgggagacgagcagctggagcgagtgttcgcgcacctgcggagagggctaccagttccgcgtcgtgcgctgctgga

SEQ ID NO: 721012 - DNA, 120 bp, Artificial Sequence
  ENSG00000197859_19 (sequence is synthesized)
agatgctctcgcccggcttcgacagctccgtgtacagcgacctgtgcgaggcagccgaggccgtgcggcccgaggaacgcaagacctgccggaaccccgcctgcgggccccagtgggaga

SEQ ID NO: 721013 - DNA, 120 bp, Artificial Sequence
  ENSG00000197859_20 (sequence is synthesized)
tgtcggagtggtccgagtgcactgccaagtgtggggagcgcagtgtggtgaccagggacatccgctgctcggaggatgagaagctgtgtgaccccaacaccaggcctgtaggggagaaga

SEQ ID NO: 721014 - DNA, 120 bp, Artificial Sequence
  ENSG00000197859_21 (sequence is synthesized)
actgcacgggcccgccctgtgaccggcagtggaccgtctccgactggggaccgtgcagtggaagctgcgggcaaggccgcaccatcaggcacgtgtactgcaagaccagcgacggacggg

SEQ ID NO: 721015 - DNA, 120 bp, Artificial Sequence
  ENSG00000197859_22 (sequence is synthesized)
tagtacctgagtcccagtgccagatggagaccaagcctctggccatccacccctgtggggacaaaaactgtcccgcccactggctggcccaggactgggagcggtgcaacaccacctgcg

SEQ ID NO: 721016 - DNA, 120 bp, Artificial Sequence
  ENSG00000197859_23 (sequence is synthesized)
ggcgcggggtcaagaagcggctggtgctctgcatggagctggccaacgggaagccgcagacgcgcagtggccccgagtgcgggctcgccaagaagcctcccgaggagagcacgtgtttcg

SEQ ID NO: 721017 - DNA, 120 bp, Artificial Sequence
  ENSG00000197859_24 (sequence is synthesized)
agaggccctgcttcaagtggtacaccagcccctggtcagagtgcaccaagacctgcggggtgggcgtgaggatgcgagacgtcaagtgctaccaggggaccgacatcgtccgtggttgcg

SEQ ID NO: 721018 - DNA, 120 bp, Artificial Sequence
  ENSG00000197859_25 (sequence is synthesized)
atccgttggtgaagcccgttggcagacaggcctgtgatctgcagccctgccccacggagcccccagatgacagctgccaggaccagccaggcaccaactgtgccctggccatcaaagtga

SEQ ID NO: 721019 - DNA, 120 bp, Artificial Sequence
  ENSG00000197859_26 (sequence is synthesized)
acctctgcgggcactggtactacagcaaggcgtgctgccgctcctgcaggcccccccactcctaggcccggcagctgcagccccttccagatgaagaccaagcgcccctcctggggctgc

SEQ ID NO: 721020 - DNA, 120 bp, Artificial Sequence
  ENSG00000197859_27 (sequence is synthesized)
tgcagcttctggggcctccacagacccccctcctgcggggcacgctggcctaagagacgtggcactgagcctcggctgtcgagaggggacttcccacggcccgtggacctttgtgctcct

SEQ ID NO: 721021 - DNA, 120 bp, Artificial Sequence
  ENSG00000197859_28 (sequence is synthesized)
ggggcagagcctccggcacccagtggcctcccccagacagagccacccctgccgtgggaacctgtccgtgttcctgcgtggatcctgtgtttgtggctcccactccccagccccccagca

SEQ ID NO: 721022 - DNA, 120 bp, Artificial Sequence
  ENSG00000197859_29 (sequence is synthesized)
gcccccagccgaggggcccagggcccacagccagcggtggaggtgtcttgctccgggcccgtagcccacgccctctctgggtggcagggccttctgaaggaaacttgcaggcgagcccaa

SEQ ID NO: 721023 - DNA, 120 bp, Artificial Sequence
  ENSG00000197859_30 (sequence is synthesized)
cgtggtggggggccttcctccctcagaggccatggggtgagaggggctcaggcagccaaggaggcccaggcgtgctccctcttatggagcccctcccatggagctctcttcccgccgcac

SEQ ID NO: 721024 - DNA, 120 bp, Artificial Sequence
  ENSG00000197859_31 (sequence is synthesized)
tttctaccccgggcagaggcgcttgcccacgggacgtttggggatggacctcggcccccgcccctgcagtcagcgtcagtgctcatctacgttaataaagtggtcctatttatggcggca

SEQ ID NO: 721025 - DNA, 120 bp, Artificial Sequence
  ENSG00000197859_32 (sequence is synthesized)
actgggctgcgcccctcccgggaaccccctctcttggatgctctttgaagtgggagagggaggcggcgcgggggaggaggggaaggggagagggaggccgggccgcagcctctgcactca

SEQ ID NO: 721026 - DNA, 120 bp, Artificial Sequence
  ENSG00000197859_33 (sequence is synthesized)
cgccgcccccgcacgcacagcgcacctggcgccgtctgccctccgcagcgctcgcccctttctctgggaggacaacctgctgacccgaagccagggtctgccagacaaccacgaccaact

SEQ ID NO: 721027 - DNA, 120 bp, Artificial Sequence
  ENSG00000197859_34 (sequence is synthesized)
acgggacacctcatacatcccagaccccattctcaggagccccagggacagggcccgctctggaggcagaagccggacaggcggggctggggctttgccaccgccagcctccccggtaac

SEQ ID NO: 721028 - DNA, 120 bp, Artificial Sequence
  ENSG00000197859_35 (sequence is synthesized)
ctcaggccagcggctgctccgtctggacacccgacatgtggcccccagttctggacccgggaagaaggcctccctgctcgccgctcctgggccgccgccgccggcagcagccaacaggca

SEQ ID NO: 721029 - DNA, 120 bp, Artificial Sequence
  ENSG00000197859_36 (sequence is synthesized)
gctgggccggcctggccgggctccagaggcgcagagcgggttaaagtgtgcgccaggccggccggcgcgggcgggggagcggcctggtgggaagtgtgagtgttcctccccgtctgcctg

SEQ ID NO: 721030 - DNA, 120 bp, Artificial Sequence
  ENSG00000197860_0 (sequence is synthesized)
agaccctgccgcctgagagagagcacagcctggtgggttctggggtctacggcctaggggccggggaagtttgcgccgccgcgaccagtgctgcgatcccgagccgggctccagccccga

SEQ ID NO: 721031 - DNA, 120 bp, Artificial Sequence
  ENSG00000197860_1 (sequence is synthesized)
ggaccaggggtcgggcgggcctgcctacggaaccccgcgggccagcagcagtcgtctcgcgtcctcctgcttggaaaagtgtttaagcttctaaaatgtcatctatcaagcacctggttt

SEQ ID NO: 721032 - DNA, 120 bp, Artificial Sequence
  ENSG00000197860_2 (sequence is synthesized)
atgcagttattcgtttcttacgggaacaaagtcagatggacacttacacctcggatgaacaagaaagtttggaagttgcaattcagtgcttggagacagtttttaagatcagcccagaag

SEQ ID NO: 721033 - DNA, 120 bp, Artificial Sequence
  ENSG00000197860_3 (sequence is synthesized)
atacacacctagcagtttcacagcctttgacagaaatgtttaccagttccttctgtaagaatgacgttctgcccctttcaaactcagtgcctgaagatgtgggaaaagctgaccaattaa

SEQ ID NO: 721034 - DNA, 120 bp, Artificial Sequence
  ENSG00000197860_4 (sequence is synthesized)
aagatgaaggcaataaccacatgaaagaagaaaattatgctgctgcagtggattgttacacacaggcaatagaattggatcccaataatgcagtttactattgcaacagggctgctgctc

SEQ ID NO: 721035 - DNA, 120 bp, Artificial Sequence
  ENSG00000197860_5 (sequence is synthesized)
agagcaaattaggtcactacacagatgcgataaaggattgtgaaaaagcaatagcaattgattcaaagtacagcaaggcctatgggagaatggggctggccctcactgccttgaataaat

SEQ ID NO: 721036 - DNA, 120 bp, Artificial Sequence
  ENSG00000197860_6 (sequence is synthesized)
ttgaagaagcagttacaagttatcaaaaggcattagatcttgaccctgaaaatgattcctataagtcaaatctgaaaatagcagaacagaagttaagagaggtatccagtcctacaggaa

SEQ ID NO: 721037 - DNA, 120 bp, Artificial Sequence
  ENSG00000197860_7 (sequence is synthesized)
ctggactgagctttgacatggctagcttgataaataatccagccttcattagtatggcggcaagtttaatgcagaaccctcaagttcaacagctaatgtcaggaatgatgacaaatgcca

SEQ ID NO: 721038 - DNA, 120 bp, Artificial Sequence
  ENSG00000197860_8 (sequence is synthesized)
ttgggggacctgctgctggagttgggggcctaactgacctgtcaagcctcatccaagcgggacagcagtttgctcagcagatacagcaacaaaatcctgaacttatagagcaactgagaa

SEQ ID NO: 721039 - DNA, 120 bp, Artificial Sequence
  ENSG00000197860_9 (sequence is synthesized)
atcacatccggagcagatcattcagcagcagcgctgaagagcattcctgatttaaccaggggctcaagcccaagatacaaatggtttatggctatgaatgaagtatttgttgtagatagt

SEQ ID NO: 721040 - DNA, 120 bp, Artificial Sequence
  ENSG00000197860_10 (sequence is synthesized)
accccctccctccttcaaaaaaccaaacaccatatctgatgtgtgaaaataatggaggaaaacctcttgtgtatattcttaaagaataaatctgtttagacaataggtttatcacaaaca

SEQ ID NO: 721041 - DNA, 120 bp, Artificial Sequence
  ENSG00000197860_11 (sequence is synthesized)
aactcaaaacataacatgactccttttgaaatgatcactagccatgttacgtgccaatatagcactgggataaggttccattttcaaacttctatcatatttgtatattagacttaatag

SEQ ID NO: 721042 - DNA, 120 bp, Artificial Sequence
  ENSG00000197860_12 (sequence is synthesized)
caaagcatatttattgaactctagtagggctatttgttggtaagctctttagctccaatttcccttaagcaaagttttttgagaagggaaatgacccaaaggaaaggtttcctatgctgg

SEQ ID NO: 721043 - DNA, 120 bp, Artificial Sequence
  ENSG00000197860_13 (sequence is synthesized)
ttgagaagaagtgtacttgccactgagcagtatgtcaggaaagaaggaatattatctaggtttagctttgataagtgctattagtaatgaatatataacatgggaaccaatgttatcttt

SEQ ID NO: 721044 - DNA, 120 bp, Artificial Sequence
  ENSG00000197860_14 (sequence is synthesized)
aatgttgcttgttctggtgaacagagaatcttaagagctgttagaaagtagcacttgatgcaagggatgttttgaaaagaaaaaattggtaatgcgaatgtatagaaagtaaaggtagga

SEQ ID NO: 721045 - DNA, 120 bp, Artificial Sequence
  ENSG00000197860_15 (sequence is synthesized)
tgctcaggttttctgcatagttcttaactaatcttgtctgcagtttggtattgataatattagcatggccacttatgctaaatacacaataagatacatttagaaatccttaatgtactg

SEQ ID NO: 721046 - DNA, 120 bp, Artificial Sequence
  ENSG00000197860_16 (sequence is synthesized)
gttaggtcagtggtacaactgtttgacttaattatcacaatttccccaatggtaaccttaccttggaaactatcaaatataaatatactttaactaagccagtgacctggtcctaagtta

SEQ ID NO: 721047 - DNA, 120 bp, Artificial Sequence
  ENSG00000197860_17 (sequence is synthesized)
aggattttctaaatggtatttaattgtgtgcccataaacactgattttttttaaaaagaaaacttagtaattatttgatggataacaaaaagcatctatcactaacattgcttgttcatg

SEQ ID NO: 721048 - DNA, 120 bp, Artificial Sequence
  ENSG00000197860_18 (sequence is synthesized)
taatcttctgtgataatttggcttggcatgccagtcttataattaacataatttaaatttgatgcaatttaaatataacaggagacttaaaatattttattataaattagatgccatatt

SEQ ID NO: 721049 - DNA, 120 bp, Artificial Sequence
  ENSG00000197860_19 (sequence is synthesized)
agttagtggagaaaaggggcattaggtattaattgcatgggtctaactacattgatgatgagagtttaattccaactagagtatattttttgtttattaataatgaaattggtgctgaca

SEQ ID NO: 721050 - DNA, 120 bp, Artificial Sequence
  ENSG00000197860_20 (sequence is synthesized)
tgtaatgacttcacaagttttacgagggaaaactgaaaaaggaagtaatataaattttgtggggtttttttgagatggagtcttactcttttgccaggctagagtggtgttgcaatgtca

SEQ ID NO: 721051 - DNA, 78 bp, Artificial Sequence
  ENSG00000197860_21 (sequence is synthesized)
ctccacctcctggattcaagtgattctcgagccttaagctcccaagtagctgggattaccttgagatggagtctctct

SEQ ID NO: 721052 - DNA, 66 bp, Artificial Sequence
  ENSG00000197860_22 (sequence is synthesized)
acaggcgtgagccaccgtgcctggccgctaatttttgtttttaatggagagagttccaccgtcctc

SEQ ID NO: 721053 - DNA, 120 bp, Artificial Sequence
  ENSG00000197860_23 (sequence is synthesized)
gtgagccactgtgcctggccaggaagtaatatacaattaaatgagtaataatgcagatgattaggccttatagaacccttatcaaaagactaattggccgggcgctgtggctcatgcctg

SEQ ID NO: 721054 - DNA, 120 bp, Artificial Sequence
  ENSG00000197860_24 (sequence is synthesized)
aaaaaaaaaaaaaagaaaaagagactaagagactaattattttgtatcttgaagtttaaaatccaacttttctctttctcctttgtgacattagaacagtagttctataacttcattgta

SEQ ID NO: 721055 - DNA, 120 bp, Artificial Sequence
  ENSG00000197860_25 (sequence is synthesized)
agaatcacctggataattcattaaagatgcagattcagggccacgtgttcaattctgatacagtaggtcctgtaataaggcctaggaatggccatttttaaacagtacactaggtggttt

SEQ ID NO: 721056 - DNA, 120 bp, Artificial Sequence
  ENSG00000197860_26 (sequence is synthesized)
tgatacagatccaaggactctaatttagaggaacactaggttagaggtttctcagacctgcaaacacctaagcacctgggccaaacaaagctacaacgaagatctgtatgaagatatata

SEQ ID NO: 721057 - DNA, 120 bp, Artificial Sequence
  ENSG00000197860_27 (sequence is synthesized)
gttctgcagaatttaaaaagagcacaatttaagtcttcggccctcagaagttaaattcatattccatctaagccaactttgattttcattaagttagaatgaactcctagtattccagta

SEQ ID NO: 721058 - DNA, 120 bp, Artificial Sequence
  ENSG00000197860_28 (sequence is synthesized)
ttacacagaacgaagtactactactaacacatagaagtcattactgtgatataaaaagcaaaatagatccttaattaaaaattagtcactcatattcagtgttgaataagaagttaaagt

SEQ ID NO: 721059 - DNA, 120 bp, Artificial Sequence
  ENSG00000197860_29 (sequence is synthesized)
ttctagcataactatcttgagtgcattaaaaatgcttttagagcaataagataagcttctagctgactgcctagaaaaacagaagatacaaattcagtgtcagaaatgaaagggaataca

SEQ ID NO: 721060 - DNA, 120 bp, Artificial Sequence
  ENSG00000197860_30 (sequence is synthesized)
ctacagacactatagttattaaaaggctaactagaaaacaccatgaccaactcaaggattgtatatttaacaacttagatgaaacagattccctataggatacaaactagaaagctcact

SEQ ID NO: 721061 - DNA, 120 bp, Artificial Sequence
  ENSG00000197860_31 (sequence is synthesized)
gtagaaacagataacctaaacagaaccatatttattaaggaaattgagtttgtggttaagttaaaaaccttccagtaaagaaaactacaggcccagataacttccgtgatgaattttacc

SEQ ID NO: 721062 - DNA, 120 bp, Artificial Sequence
  ENSG00000197860_32 (sequence is synthesized)
aaacacttaagggagaaataatatcaattctaaacaatctcttccaggaaacagaagaggaggaaatacttcccaactcattttatttgaccagtattacccagacaaagatactataag

SEQ ID NO: 721063 - DNA, 120 bp, Artificial Sequence
  ENSG00000197860_33 (sequence is synthesized)
aaaaaaaactttaaaacaatgtcttcatgtgctaacatctgtagttaaattagccattctttttacatgaaataatgggaattggtatatttcttccatttcatttttctatttctttgc

SEQ ID NO: 721064 - DNA, 120 bp, Artificial Sequence
  ENSG00000197860_34 (sequence is synthesized)
taatataccacctgtaacaaattcaatctagatgctatctgtccacttgcctacatttccattctattcaagccatttttgctcttcaagtaccttgatcactttggaatcatagcattg

SEQ ID NO: 721065 - DNA, 120 bp, Artificial Sequence
  ENSG00000197860_35 (sequence is synthesized)
caagctatttcaaaaaaagttgcgtggttggattgtgctagctacttttaaatttataaaaaatgccccatatattttcttgcttgtctgggaaatatagttgctatctaactagaaaaa

SEQ ID NO: 721066 - DNA, 120 bp, Artificial Sequence
  ENSG00000197860_36 (sequence is synthesized)
taagagggcattattaaagtaactctttaagcatcgtactaaatgtttgacttccattaaccatatttcttgtagtagctgtagctattatgatactgtgtaaaacagaacaggttctat

SEQ ID NO: 721067 - DNA, 120 bp, Artificial Sequence
  ENSG00000197860_37 (sequence is synthesized)
atatgcaaatgacattttcatttaatgtaccaaattgtgtatctaacttttataatataggttaaacagatcctttctaagatggcattatttaatctttacttaaaactatgaaaaata

SEQ ID NO: 721068 - DNA, 120 bp, Artificial Sequence
  ENSG00000197860_38 (sequence is synthesized)
tgtgtaagttattgtttataaacagaagagactataattaaaatatagagcagattccaagtgaccatcattttactttttagatttaaaacagaatgaaacagaagatttagtcataag

SEQ ID NO: 721069 - DNA, 120 bp, Artificial Sequence
  ENSG00000197860_39 (sequence is synthesized)
aagatgcttgaaaaacaatccaagtatccaatgcagtggctataaaatattatttcatcatttaatcttaatcattttgaaacaaagacagacttcaattttacactgcttgcactttat

SEQ ID NO: 721070 - DNA, 120 bp, Artificial Sequence
  ENSG00000197860_40 (sequence is synthesized)
tttgtacagacatttcattaattattactcaattttgaggtgcaaaccttctgaatatagctttcattttggaccaaacaatttgttatggcaataaataatgatgcattgaaaaaccaa

SEQ ID NO: 721071 - DNA, 120 bp, Artificial Sequence
  ENSG00000197860_41 (sequence is synthesized)
aagcaatccaaaacagcagctcaggctgcccaaagccgtgtccaagcgatcattttctccattttgggccaagtcaatttgcaccggcaagaggcagaatgtttgttttatggggaggag

SEQ ID NO: 721072 - DNA, 120 bp, Artificial Sequence
  ENSG00000197860_42 (sequence is synthesized)
gaaaataaaaaaggaagtcagagagcatggacggaaacaagcaacaccaccaaagaggtttcatctcgggtggatgttaaacgattggaatgctaataatgggcgcgaggagcaaacaca

SEQ ID NO: 721073 - DNA, 120 bp, Artificial Sequence
  ENSG00000197863_0 (sequence is synthesized)
gttaatagaaagatcgcggaaccttccaccatcaagggaccgcagggccggctctgctttcccagcacgctgcctcaccaagaaagaatccagagaaggactggtggacttggaatgtta

SEQ ID NO: 721074 - DNA, 120 bp, Artificial Sequence
  ENSG00000197863_1 (sequence is synthesized)
agtcatggcccatttgatgatgttcagggatgtggctgtagatttctctcaggaggagtgggagtgcctggacctggaacagagggatttatatagagatgtgatgttggagaactacag

SEQ ID NO: 721075 - DNA, 120 bp, Artificial Sequence
  ENSG00000197863_2 (sequence is synthesized)
caacatggtctcactgggtttttgcatttatcagccagaagcgttctctttattggagaaagggaaagagccctggaagattttgagggatgagacaagaggaccttgcccagacatgca

SEQ ID NO: 721076 - DNA, 120 bp, Artificial Sequence
  ENSG00000197863_3 (sequence is synthesized)
gtcgaggtgtcagaccaagaagttattaccaaaaaatggcatttttgagagagaaatagcccaattggaaataatgagaatttgtaaaaaccacagccttgactgtttatgttttagagg

SEQ ID NO: 721077 - DNA, 120 bp, Artificial Sequence
  ENSG00000197863_4 (sequence is synthesized)
tgactgggaaggcaacactcagtttcaaacacttcaagataatcaagaggaatgcttcaagcaggtgatacgcacctgtgaaaaaaggcccacttttaaccagcatacagtgtttaatct

SEQ ID NO: 721078 - DNA, 120 bp, Artificial Sequence
  ENSG00000197863_5 (sequence is synthesized)
acaccagagacttaatacaggagacaaactgaatgaatttaaagaactggggaaagcctttatttctggttcagatcatactcaacatcagttaattcacacaagtgagaaattctgtgg

SEQ ID NO: 721079 - DNA, 120 bp, Artificial Sequence
  ENSG00000197863_6 (sequence is synthesized)
agataaagaatgtgggaatacctttcttcctgattcagaagttattcaatatcagacagttcacactgttaagaaaacatatgaatgtaaagaatgtgggaagtcttttagtttacgttc

SEQ ID NO: 721080 - DNA, 120 bp, Artificial Sequence
  ENSG00000197863_7 (sequence is synthesized)
gagtcttactggtcataagagaattcataccggtgagaaaccttttaaatgtaaggattgtgggaaagcctttagatttcattcacaacttagtgtccataagcgaattcatactggtga

SEQ ID NO: 721081 - DNA, 120 bp, Artificial Sequence
  ENSG00000197863_8 (sequence is synthesized)
gaaatcttatgaatgtaaggaatgtgggaaggcctttagttgtggctcagatcttactcgacatcagagaattcatactggtgaaaaaccctatgaatgtaatgaatgtagaaaggcctt

SEQ ID NO: 721082 - DNA, 120 bp, Artificial Sequence
  ENSG00000197863_9 (sequence is synthesized)
tagtcagcgatcacatcttattaaacatcagagaattcacactggtgaaaaaccttatgaatgtaaggagtgtgggaaagcttttactcgtggatcacacctaactcagcatcagagaat

SEQ ID NO: 721083 - DNA, 120 bp, Artificial Sequence
  ENSG00000197863_10 (sequence is synthesized)
tcatactggtgagaaatctcatgagtgtaaggaatgtggaaaagcctttattcgtggttcaaatcttgctcaacatcagaatgttcatgttggtaggaaaccttataaatgtgagaaatg

SEQ ID NO: 721084 - DNA, 120 bp, Artificial Sequence
  ENSG00000197863_11 (sequence is synthesized)
tgggaaagcctatatttggagctcacaccttgctcgacatcagcgaattcatactggcaggaaaccttatgaatgtaagcaatgcgggaagacttttacttgggcttcgtatcttgctca

SEQ ID NO: 721085 - DNA, 120 bp, Artificial Sequence
  ENSG00000197863_12 (sequence is synthesized)
aaggaatgtggaaagacctttcttcatggctcagagtttaatcgacatcagaaaattcatactggtgagagaaactatgaatgtaaggaatgtggaaagaccttttttcgtggttcagaa

SEQ ID NO: 721086 - DNA, 120 bp, Artificial Sequence
  ENSG00000197863_13 (sequence is synthesized)
cttaatcgacaccagaaaattcatactggaaagaggccatatgaatgtgaagaatgtggaaaagcctttctctggggttcacaacttactcgacatcagagaatgcatactggtgaggaa

SEQ ID NO: 721087 - DNA, 120 bp, Artificial Sequence
  ENSG00000197863_14 (sequence is synthesized)
ccttacgtatgtaaagaatgtgggaaatcttttatctggggttcacagcttacacgacataagaaaattcatactgatgcagaaccttatggatgcaagaaaagtagccacatctttagt

SEQ ID NO: 721088 - DNA, 120 bp, Artificial Sequence
  ENSG00000197863_15 (sequence is synthesized)
caccattcatattttactgaacaaaaaattcataatagtgcaaatctctgtgaatggacagactatgggaacacctttagtcatgagtcaaactttgctcaacaccagaatatttacact

SEQ ID NO: 721089 - DNA, 120 bp, Artificial Sequence
  ENSG00000197863_16 (sequence is synthesized)
tttgagaaatcctatgaatttaaagattttgagaaagcattttcttcaagctctcacttcatttcactcttgtgaaatattatataaaagtgtaggaagggctttattcatgactcatta

SEQ ID NO: 721090 - DNA, 120 bp, Artificial Sequence
  ENSG00000197863_17 (sequence is synthesized)
attgatgtcatttatttttttctcttgaggaacaccacaaatgtaagtaatattggaaggcattttaacagagcacacatccagcagcagcagcagcagcagcagcagagaattcatcat

SEQ ID NO: 721091 - DNA, 120 bp, Artificial Sequence
  ENSG00000197863_18 (sequence is synthesized)
gcaatcaatataggaaagaaattactgatcagttatcaattgcagaatatcagggtaaaattttatgagatagcatgaattctttttgaatcattctcaaaacattctcatcagagatgt

SEQ ID NO: 721092 - DNA, 120 bp, Artificial Sequence
  ENSG00000197863_19 (sequence is synthesized)
aacattctcatcagagatgttgcataaagaatttatatataatttggccaagcatggtggctcacacctgttatcctagcactttgggaaacagaggtgggtggatcacctgaggtcagg

SEQ ID NO: 721093 - DNA, 120 bp, Artificial Sequence
  ENSG00000197863_20 (sequence is synthesized)
tcacatcactgcactccagcctgggtgatagaacaagactccatctcaaaaacaaaaacccacaagaatttatatataattcattttggaaatctttcatcattagcaaaattctgttgt

SEQ ID NO: 721094 - DNA, 120 bp, Artificial Sequence
  ENSG00000197863_21 (sequence is synthesized)
cattagcaaaattctgttgtatttccacaaaaatcatgtaattaatctagaaaagccttgaactatgtcatacaatttatttggcatgtcttgtttcaatacatcctgcctctatttttt

SEQ ID NO: 721095 - DNA, 120 bp, Artificial Sequence
  ENSG00000197863_22 (sequence is synthesized)
ttttttggaaagtatcttaaatctatgtctgtttaatcgtattcattagattataagggttgaatgatttgagatttacatgacttagtgactgtcatttgtattggtattaagccattt

SEQ ID NO: 721096 - DNA, 120 bp, Artificial Sequence
  ENSG00000197863_23 (sequence is synthesized)
tatgagaggaggacttttaagactataatgattatagacaaatatgtcatctctatttatgtcttactgaacatcagaatgttaattctgaaaaaaaatcagtaaaatacaatgaagaaa

SEQ ID NO: 721097 - DNA, 120 bp, Artificial Sequence
  ENSG00000197863_24 (sequence is synthesized)
agaaagcgacaggttgccgaaagctacagcccagccatcccgattcccctggcgcggactctggcaccaacaaaactatctctttgagctctgctttcccagcacgctgcctcaccaaga

SEQ ID NO: 721098 - DNA, 120 bp, Artificial Sequence
  ENSG00000197863_25 (sequence is synthesized)
gccggggatagatgggcccaactaaagtgtgctgcgttctctgggtcctgaggcggcagtctggccgcagtgaccagactaactgtgccccggaggctgcttggaattccacttaacgct

SEQ ID NO: 721099 - DNA, 120 bp, Artificial Sequence
  ENSG00000197863_26 (sequence is synthesized)
ggaagcacgcagacgctcttgaggcgggcagctgcgtagcgtgtggaggagccgggagagcgcaccccaatgtggcacctgagcgtctgggaccgaaccagcatggggagtcggaagggg

SEQ ID NO: 721100 - DNA, 120 bp, Artificial Sequence
  ENSG00000197863_27 (sequence is synthesized)
atgactgcgtcgcgttgtgcgtgaccacgttcgtaaaggtggtgatagcagccgctatggggccaaaaacaaagaattgagctttgcgttgagtgacaggcatagtccttcgtgaatgtg

SEQ ID NO: 721101 - DNA, 120 bp, Artificial Sequence
  ENSG00000197863_28 (sequence is synthesized)
tggggagcagtttttgtgctggcccgtagctggattggagtgggggcaacctagaaggaggggagaagaatgggacacagtgtagacaacatagttcaagagtttctccgtaaattagag

SEQ ID NO: 721102 - DNA, 120 bp, Artificial Sequence
  ENSG00000197863_29 (sequence is synthesized)
cagagaaatggagcagcaggttggggtagagggctggggaagacggctggggaacaaccacccatcaacatgttgttggaaatgagccacgagaggggggaaaagtccaggcaaggctct

SEQ ID NO: 721103 - DNA, 120 bp, Artificial Sequence
  ENSG00000197870_0 (sequence is synthesized)
agaacccagtctctggggtggtgaggcccacccagtgtggagctcaaaggtgccactgttctgctcctctttataaagggagctgccatggttctcccagcacagagttgggagtgactc

SEQ ID NO: 721104 - DNA, 120 bp, Artificial Sequence
  ENSG00000197870_1 (sequence is synthesized)
cagagcctccagcaagatgctactgattctgctgtcggtggccctgctggccctgagctcagctcagagcttaaatgaagatgtcagccaggaagaatctccctccgtaatatcaggaaa

SEQ ID NO: 721105 - DNA, 120 bp, Artificial Sequence
  ENSG00000197870_2 (sequence is synthesized)
gccagaaggacgacgcccacaaggaggaaaccagccccaacgtaccccacctcctccaggaaagccagaaggacgacccccacaaggaggcaaccagtcccaaggtcccccacctcgtcc

SEQ ID NO: 721106 - DNA, 120 bp, Artificial Sequence
  ENSG00000197870_3 (sequence is synthesized)
aggaaagccagaaggaccacccccacaaggaggaaaccagtcccaaggtcccccacctcgtccgggaaagccagaaggacaacccccacaaggaggaaaccagtcccaaggtcccccacc

SEQ ID NO: 721107 - DNA, 120 bp, Artificial Sequence
  ENSG00000197870_4 (sequence is synthesized)
tcgtccgggaaagccagaaggaccacccccacaaggaggaaaccagtcccaaggtcccccgcctcgtccgggaaagccagaaggaccacccccacaaggaggaaaccagtcccaaggtcc

SEQ ID NO: 721108 - DNA, 120 bp, Artificial Sequence
  ENSG00000197870_5 (sequence is synthesized)
cagaaggaccacccccacaaggaggaaaccagtcccaaggtcccccacctcgtccgggaaagccagaaggaccacccccacaaggaggaaaccagtcccaaggtcccccacctcgtccgg

SEQ ID NO: 721109 - DNA, 120 bp, Artificial Sequence
  ENSG00000197870_6 (sequence is synthesized)
gaaagccagaaggaccacccccacaaggaggcaacaaacctcaaggtcccccacctcgtccaggaaagccagaaggaccacccccacaaggaggaaaccagtcccaaggtcccccacctc

SEQ ID NO: 721110 - DNA, 120 bp, Artificial Sequence
  ENSG00000197870_7 (sequence is synthesized)
ggaaaccagtcccaaggtcccccacctcgtccaggaaagccagaaggaccaccttcacaaggaggcaacaaacctcaaggtcccccacctcatccaggaaagccacaaggaccaccccca

SEQ ID NO: 721111 - DNA, 120 bp, Artificial Sequence
  ENSG00000197870_8 (sequence is synthesized)
ctcctccaggaaggccacaaggaccacccccaccaggaggcaatccccagcagcctctgccacctcccgctggaaagccccagggaccacctccacctcctcaagggggcagaccacaca

SEQ ID NO: 721112 - DNA, 120 bp, Artificial Sequence
  ENSG00000197870_9 (sequence is synthesized)
gacctccccagggacagcctccccagtaatcaaggttcaatgacaggaagtgaacaagaagatgacagtgattcaaatgattcaaatgccatgacattggaagaaggtggtcatagctct

SEQ ID NO: 721113 - DNA, 120 bp, Artificial Sequence
  ENSG00000197872_0 (sequence is synthesized)
agaggcgtactcggcggcggcggagcgggcggcagagcagggcggcggcgactcgcagggtaccaccatcttaaggacagaaaagctacaggactctaggaggccaccgtcctgatttgg

SEQ ID NO: 721114 - DNA, 120 bp, Artificial Sequence
  ENSG00000197872_1 (sequence is synthesized)
gaagtccaacttactttggccagacagcagctaagctggttcatcccatcagcctggattggtgaaactgaatcacaggagatatttccaggtttgctgggatgggaaacctgctcaaag

SEQ ID NO: 721115 - DNA, 120 bp, Artificial Sequence
  ENSG00000197872_2 (sequence is synthesized)
tccttaccagggaaattgaaaactatccacactttttcctggattttgaaaatgctcagcctacagaaggagagagagaaatctggaaccagatcagcgccgtccttcaggattctgaga

SEQ ID NO: 721116 - DNA, 120 bp, Artificial Sequence
  ENSG00000197872_3 (sequence is synthesized)
gcatccttgcagacctgcaggcttacaaaggcgcaggcccagagatccgagatgcaattcaaaatcccaatgacattcagcttcaagaaaaagcttggaatgcggtgtgccctcttgttg

SEQ ID NO: 721117 - DNA, 120 bp, Artificial Sequence
  ENSG00000197872_4 (sequence is synthesized)
tgaggctaaagagattttacgagttttccattagactagaaaaagctcttcagagtttattggaatctctgacttgtccaccctacacaccaacccaacacctggaaagggaacaggccc

SEQ ID NO: 721118 - DNA, 120 bp, Artificial Sequence
  ENSG00000197872_5 (sequence is synthesized)
tggcaaaggagtttgccgaaattttacattttacccttcgattcgatgagctgaagatgaggaacccggctattcagaatgacttcagctactacagaagaacaatcagtcgcaaccgca

SEQ ID NO: 721119 - DNA, 120 bp, Artificial Sequence
  ENSG00000197872_6 (sequence is synthesized)
tcaacaacatgcacctagacattgagaatgaagtcaataatgagatggccaatcgaatgtccctcttctatgcagaagccacgccaatgctgaaaacccttagcaatgccacaatgcact

SEQ ID NO: 721120 - DNA, 120 bp, Artificial Sequence
  ENSG00000197872_7 (sequence is synthesized)
ttgtctctgaaaacaaaactctgccaatagagaacaccacagactgcctcagcacaatgacaagtgtctgtaaagtcatgctggaaactccggagtacagaagtaggtttacgagtgaag

SEQ ID NO: 721121 - DNA, 120 bp, Artificial Sequence
  ENSG00000197872_8 (sequence is synthesized)
agaccctgatgttctgcatgagggtgatggtgggagtcatcatcctctatgaccatgtccaccctgtgggagctttctgcaagacatccaagatcgatatgaaaggctgcataaaagttt

SEQ ID NO: 721122 - DNA, 120 bp, Artificial Sequence
  ENSG00000197872_9 (sequence is synthesized)
tgaaggagcaggccccagacagtgtggaggggctgctaaatgccctcaggttcactacaaagcacttgaacgatgaatcaacttccaaacagattcgagcaatgcttcagtagagctctg

SEQ ID NO: 721123 - DNA, 120 bp, Artificial Sequence
  ENSG00000197872_10 (sequence is synthesized)
ctcaaagaagaggatctatgtgctgacctcagaagatgtatatgtttacataatttaatacagattgatgttaatacttgtgtatttacataaccgtttccttcttgtcactgaaatata

SEQ ID NO: 721124 - DNA, 120 bp, Artificial Sequence
  ENSG00000197872_11 (sequence is synthesized)
tggaccttaatttgtatcctgactgactcaacccagcagagcataaattgacttgagagccttacctttgatgtctgaaatgaaacccccttctccaaaggcaaaattcggagactttga

SEQ ID NO: 721125 - DNA, 120 bp, Artificial Sequence
  ENSG00000197872_12 (sequence is synthesized)
tctttgctactggagtcctttaacaacatctataacgataaaaaattcctaattgtttgtggtagtattttaattctagatgtgttatctctctgggaagtatagtttatagaaacacaa

SEQ ID NO: 721126 - DNA, 120 bp, Artificial Sequence
  ENSG00000197872_13 (sequence is synthesized)
aatatttgatttcctgtgtcggctcagctacaagaaacacaactgttatcttgacagaggaagagaggaatccaagaaaaatgcatgtggagaattaaacccaagtgtttcgaattcagc

SEQ ID NO: 721127 - DNA, 120 bp, Artificial Sequence
  ENSG00000197872_14 (sequence is synthesized)
acaccccctctctgtcctcagactgcagtccacacgtgcaacttttctgtttgcacgtgttttattaatcagcatactccttttctgtttggatttatatccctctaatgttctccttta

SEQ ID NO: 721128 - DNA, 120 bp, Artificial Sequence
  ENSG00000197872_15 (sequence is synthesized)
atttcacatgaaaaaaaaatctcctgtatttttttcagttagtgggagagcagcagaaatagatagatgtgctgttgccactggactgatgaaggtggctgtcttggaactgggagacag

SEQ ID NO: 721129 - DNA, 120 bp, Artificial Sequence
  ENSG00000197872_16 (sequence is synthesized)
gtcctcagaggtgcactcaggcaacaggacagccatctctctgcttcagccctctgcctacagggattagggaaatggagctctggctttgaagttatttgtgagtttagcaaccttcca

SEQ ID NO: 721130 - DNA, 120 bp, Artificial Sequence
  ENSG00000197872_17 (sequence is synthesized)
gttacctgcagagttctgggtgcacagccacccctcataagagccctgttctctgaagaccattcatatgagaacaaaggtctaggatactgcattagttaccagaaaactaggggaatt

SEQ ID NO: 721131 - DNA, 120 bp, Artificial Sequence
  ENSG00000197872_18 (sequence is synthesized)
tagagggaaaaaaaatccatgttttctatttcccaggtttttaaaaagtagctcttccccaaccccgttgctagcttgttgcaatataaaagccctggtgcacctgaatttactcctggc

SEQ ID NO: 721132 - DNA, 120 bp, Artificial Sequence
  ENSG00000197872_19 (sequence is synthesized)
gttaatgccgataaaatgactgactccgcccttcttccttagtacgtagtatccagcaagcatttgccccaccttgtcttgttgatgaacaatattatgaagcctgcagtcattctctct

SEQ ID NO: 721133 - DNA, 120 bp, Artificial Sequence
  ENSG00000197872_20 (sequence is synthesized)
gtacatcagagcttagttcgaatggaatcatgaaaatctctgattctgacctcctaaggaaaaatgaaacccagaggatgtggtcatacaggatggctcccatgtgggcctagaacccag

SEQ ID NO: 721134 - DNA, 120 bp, Artificial Sequence
  ENSG00000197872_21 (sequence is synthesized)
gatgcttcactcttgactccatgctcttccttttataccatgtggctgtgaatacatactatgggatgggattcaacccttctaagtaaatcctcagtctggtctatattgttacttgcc

SEQ ID NO: 721135 - DNA, 120 bp, Artificial Sequence
  ENSG00000197872_22 (sequence is synthesized)
tgtttccactagaaggagtcacccaggcatttagtgaatgataatcctagaagttgagtctgagtacatcagagtttggcattatttgcaacatcccaggaatgagctataagactccat

SEQ ID NO: 721136 - DNA, 120 bp, Artificial Sequence
  ENSG00000197872_23 (sequence is synthesized)
tgctttctggactttagtgaccagctgatcttcccttggatcctccaataaaggggaaaaaatacttgtcttatgttgttttagcaagggagttcagccaagtgacaggaaagattccct

SEQ ID NO: 721137 - DNA, 120 bp, Artificial Sequence
  ENSG00000197872_24 (sequence is synthesized)
ggtctgcatctaaacattagtcaacagaaggaaaaggctcttttccttggagattttcaagttgaaaaagtacagctgcttggatggagtttctctcatcagaatagaaatatgctaggt

SEQ ID NO: 721138 - DNA, 120 bp, Artificial Sequence
  ENSG00000197872_25 (sequence is synthesized)
ggtcttcaagacctttttgaacctacagattctaaaccttagaggaagccagaatatgtgatcataccaggtgaggaaagttaggagatattcatcttaagagatatcctatttggcagt

SEQ ID NO: 721139 - DNA, 120 bp, Artificial Sequence
  ENSG00000197872_26 (sequence is synthesized)
cacatgttacacttgagcaacaattgtctaggctagaaatatagaaccacacaatatttatcatcattgggtcaatttctccccctctatcaagtgaggagattaaggcttaaagaaagg

SEQ ID NO: 721140 - DNA, 120 bp, Artificial Sequence
  ENSG00000197872_27 (sequence is synthesized)
aaaggacttgccagccaccacagggctcatgaggggcttgaacccatgtcgtgtgtctctaccacagctgactctcagctggctaatggagaaaatgtgaggaattacctgtcaaattag

SEQ ID NO: 721141 - DNA, 120 bp, Artificial Sequence
  ENSG00000197872_28 (sequence is synthesized)
attgagctcagagtaaatagatgagcacatttataactctaaattagactttctatcaaatgggaccaaacatatggaaggggctgctgtcctgcctcaatttagccaagacttgtcttg

SEQ ID NO: 721142 - DNA, 120 bp, Artificial Sequence
  ENSG00000197872_29 (sequence is synthesized)
tctcaaagccaagactcagcagtacatggattctgagaagtccagggtctgaattgttgtctctgattactggaaggacaggttaactgaatgtctgtgatcactaacaggtgatgggct

SEQ ID NO: 721143 - DNA, 120 bp, Artificial Sequence
  ENSG00000197872_30 (sequence is synthesized)
ttgtgcccactccagagatattgtgggagacaaattcttttaacagcctgtcctcccggcatcaggagtcattgaacaatcatggattgttgtgtttgggatttttttttttttggcttt

SEQ ID NO: 721144 - DNA, 120 bp, Artificial Sequence
  ENSG00000197872_31 (sequence is synthesized)
gtttttggtttttgtgtgtgtgtgtgtgtgctgcatgcacatgcgtccaagacttacgggtggtttaggggaaagtgctagcaacagtgtcaatgtcattgttaactatatttcatattt

SEQ ID NO: 721145 - DNA, 120 bp, Artificial Sequence
  ENSG00000197872_32 (sequence is synthesized)
gaggtctcattgttttcaaataaacagtgttttccatgactgagatatttatttttgggaaagcaacgaggtaaaaattatgtttctcagatgcactgctactttggcgttattactgtg

SEQ ID NO: 721146 - DNA, 85 bp, Artificial Sequence
  ENSG00000197872_33 (sequence is synthesized)
tggaaatggatgtcttcacattaggggtggagtattaacaaccagaaagaaagtttggatattaccttttaactactagttaaca

SEQ ID NO: 721147 - DNA, 120 bp, Artificial Sequence
  ENSG00000197872_34 (sequence is synthesized)
aaagaaagtttggatattaccttttaactactagttaacatcatgcttgatcaacatttgctcctagttatcaccattaaattaagaccttaatggtaaactgaggttactgatgcatca

SEQ ID NO: 721148 - DNA, 120 bp, Artificial Sequence
  ENSG00000197872_35 (sequence is synthesized)
tcacatttaagtaaaaataatttcatgttttccccaaagaaaaattaagcctcccaatcttaggatccaattgtgcagtagaattcagagacttctcattcaatcttgtatcctatgcag

SEQ ID NO: 721149 - DNA, 120 bp, Artificial Sequence
  ENSG00000197872_36 (sequence is synthesized)
ctacaaatattttttaaatgttagtaataaacattggaattttgtcttaaagagttcaaaaccttggaacccagttttctcactacgtctataaaggccattacagacccaaggctgttt

SEQ ID NO: 721150 - DNA, 120 bp, Artificial Sequence
  ENSG00000197872_37 (sequence is synthesized)
tgcagttttcatatgttgtttgctgaagtcattgtaattttttttgcctgctttgcctttttttctacaggagttttgagtgtgaaatgaaaattaaagtttggtacatatatttaaaaa

SEQ ID NO: 721151 - DNA, 120 bp, Artificial Sequence
  ENSG00000197872_38 (sequence is synthesized)
aaaaatgccaacacactgagatggccacacatcttcactcttgcactagtttttggtgttatcttctgctatcctgtcttgaagctctttttcagctagataccttgacttttctgaaaa

SEQ ID NO: 721152 - DNA, 120 bp, Artificial Sequence
  ENSG00000197872_39 (sequence is synthesized)
ttaatagggtgggcagaaagggactgggagcgagactgggttcagaatctcaagtaatttggagtgtgcctagggattgggatgatttggctgggcattaatttgaagatccttttgtga

SEQ ID NO: 721153 - DNA, 120 bp, Artificial Sequence
  ENSG00000197872_40 (sequence is synthesized)
agaaggggcaggggcgaccgtgctggggcgggtccgcaccagctcctgggagcagagagcagagccgggcaaagagatggggttgtccaggctaggcagggtaccaccatcttaaggaca

SEQ ID NO: 721154 - DNA, 120 bp, Artificial Sequence
  ENSG00000197872_41 (sequence is synthesized)
acaccctaaagttttcatgtatattatctgctttaatttcactaagaactctgagtggtaggtgtcactatcactactgcatagctgaagaagctgaggcccaaagtggttgactgactt

SEQ ID NO: 721155 - DNA, 120 bp, Artificial Sequence
  ENSG00000197872_42 (sequence is synthesized)
cccaacaactgcatagcttgtcaggtggcagaaccaaggctcagatcacagatgctgtagaagatctgtaagaaccaaatggagggtgtgttaaatgatgggacatcatgataaatatat

SEQ ID NO: 721156 - DNA, 120 bp, Artificial Sequence
  ENSG00000197879_0 (sequence is synthesized)
gcggatccccaagcccgccacgccgcccagcccggccccgcccgcgccggaagagccacgccggccctgggcagtgacggggttcgggtgaccatggagagtgcgctcaccgcccgtgac

SEQ ID NO: 721157 - DNA, 120 bp, Artificial Sequence
  ENSG00000197879_1 (sequence is synthesized)
gtgcgctcaccgcccgtgaccgggtgggggtgcaggatttcgtgctgctggagaacttcaccagcgaggccgccttcatcgagaacctgcggcggcgatttcgggagaatctcatctaca

SEQ ID NO: 721158 - DNA, 120 bp, Artificial Sequence
  ENSG00000197879_2 (sequence is synthesized)
cctacattggccccgtcctggtctctgtcaatccctaccgggacctgcagatctacagccggcagcatatggagcgttaccgtggcgtcagcttctatgaagtgccccctcacctgtttg

SEQ ID NO: 721159 - DNA, 120 bp, Artificial Sequence
  ENSG00000197879_3 (sequence is synthesized)
ccgtggcggacactgtgtaccgagcactgcgcacggagcgtcgggaccaggctgtgatgatctctggggagagcggggcaggcaagaccgaggccaccaagaggctgctgcagttctatg

SEQ ID NO: 721160 - DNA, 120 bp, Artificial Sequence
  ENSG00000197879_4 (sequence is synthesized)
cagagacctgcccagcccccgagcgcggaggtgccgtgcgggaccggctgctacagagcaacccggtgctggaggcctttggaaatgccaagaccctccggaacgataactccagcaggt

SEQ ID NO: 721161 - DNA, 120 bp, Artificial Sequence
  ENSG00000197879_5 (sequence is synthesized)
tcgggaagtacatggatgtgcagtttgacttcaagggtgcccccgtgggtggccacatcctcagttacctcctggaaaagtcacgagtggtgcaccagaatcatggggagcggaacttcc

SEQ ID NO: 721162 - DNA, 120 bp, Artificial Sequence
  ENSG00000197879_6 (sequence is synthesized)
acatcttctaccagctgctggaggggggcgaggaggagactcttcgcaggctgggcttggaacggaacccccagagctacctgtacctggtgaagggccagtgtgccaaagtctcctcca

SEQ ID NO: 721163 - DNA, 120 bp, Artificial Sequence
  ENSG00000197879_7 (sequence is synthesized)
tcaacgacaagagtgactggaaggtcgtcaggaaggctctgacagtcattgatttcaccgaggatgaagtggaggacctgctgagcatcgtggccagcgtccttcatttgggcaacatcc

SEQ ID NO: 721164 - DNA, 120 bp, Artificial Sequence
  ENSG00000197879_8 (sequence is synthesized)
actttgctgccaacgaggagagcaatgcccaggtcaccaccgagaaccagctcaagtatctgaccaggctcctcagcgtggaaggctcgacgctgcgagaagccctgacacacaggaaga

SEQ ID NO: 721165 - DNA, 120 bp, Artificial Sequence
  ENSG00000197879_9 (sequence is synthesized)
tcatcgccaagggggaggagctcctgagcccgctgaacctggagcaggccgcgtacgcacgagacgccctcgccaaggctgtgtacagccgcacttttacctggctcgtcgggaagatca

SEQ ID NO: 721166 - DNA, 120 bp, Artificial Sequence
  ENSG00000197879_10 (sequence is synthesized)
acaggtcgctggcctccaaggacgtggagagccccagctggcggagcaccacggttctcgggctcctggatatttatggctttgaagtgtttcagcataacagctttgagcagttctgca

SEQ ID NO: 721167 - DNA, 120 bp, Artificial Sequence
  ENSG00000197879_11 (sequence is synthesized)
tcaattactgcaacgagaagctgcagcagctcttcatcgagctcacgctcaagtcggagcaggaggagtacgaggcagagggcatcgcgtgggagcccgtccagtatttcaacaacaaaa

SEQ ID NO: 721168 - DNA, 120 bp, Artificial Sequence
  ENSG00000197879_12 (sequence is synthesized)
tcatctgtgatctggtggaggagaagtttaagggcatcatctcgattttggatgaggagtgtctgcgccccggggaggccacagacctgaccttcctggagaagctggaggatactgtca

SEQ ID NO: 721169 - DNA, 120 bp, Artificial Sequence
  ENSG00000197879_13 (sequence is synthesized)
agcaccatccacacttcctgacgcacaagctggctgaccagcggaccaggaaatctctgggccgaggggaattccgccttctgcactatgcgggggaggtgacctacagcgtgaccgggt

SEQ ID NO: 721170 - DNA, 120 bp, Artificial Sequence
  ENSG00000197879_14 (sequence is synthesized)
ttctggacaaaaacaatgaccttctcttccggaaccttaaggagaccatgtgtagctcaaagaatcccattatgagccagtgctttgaccggagcgagctcagtgacaagaagcggccag

SEQ ID NO: 721171 - DNA, 120 bp, Artificial Sequence
  ENSG00000197879_15 (sequence is synthesized)
agacggtcgccacccagttcaagatgagcctcctgcagctggtggagatcctgcagtctaaggagcccgcctacgtccgctgcatcaaacccaatgatgccaaacagcccggccgctttg

SEQ ID NO: 721172 - DNA, 120 bp, Artificial Sequence
  ENSG00000197879_16 (sequence is synthesized)
acgaggtgctgatccgccaccaggtgaagtacctggggctgttggaaaacctgcgcgtgcgcagagccggctttgcctatcgccgcaaatacgaagctttcctgcaaaggtacaagtcac

SEQ ID NO: 721173 - DNA, 120 bp, Artificial Sequence
  ENSG00000197879_17 (sequence is synthesized)
tgtgcccagagacgtggcccacgtgggcaggacggccgcaggatggggtggctgtgctggtccgacacctgggctacaagccagaagagtacaagatgggcaggaccaagatcttcatcc

SEQ ID NO: 721174 - DNA, 120 bp, Artificial Sequence
  ENSG00000197879_18 (sequence is synthesized)
gcttccccaagaccctgtttgccacagaggatgccctggaggtccggcggcagagcctggccacaaagatccaagctgcctggaggggctttcactggcggcagaaattcctccgggtga

SEQ ID NO: 721175 - DNA, 120 bp, Artificial Sequence
  ENSG00000197879_19 (sequence is synthesized)
tggaacactgggccggaggaaggcagccaagaggaagtgggcggcacagaccatccggcggctcatccgaggcttcgtcctgcgccacgccccccgctgccccgagaacgccttcttcct

SEQ ID NO: 721176 - DNA, 120 bp, Artificial Sequence
  ENSG00000197879_20 (sequence is synthesized)
ggaccatgtgcgcacctcttttttgctaaacctgaggcggcagctgccccagaatgtcctggacacctcgtggcccacgcccccacctgccctgcgtgaggcctcagagcttctgcggga

SEQ ID NO: 721177 - DNA, 120 bp, Artificial Sequence
  ENSG00000197879_21 (sequence is synthesized)
gttgtgcataaagaacatggtgtggaaatactgccggagtatcagccctgagtggaagcagcagctgcagcagaaggccgtggctagtgagatcttcaagggcaagaaggataattaccc

SEQ ID NO: 721178 - DNA, 120 bp, Artificial Sequence
  ENSG00000197879_22 (sequence is synthesized)
tcagagtgtacccaggctcttcatcagcactcggcttggtacagatgagatcagcccccgagtgctgcaggccttgggctctgagcccattcagtatgcggtgcctgttgtgaaatacga

SEQ ID NO: 721179 - DNA, 120 bp, Artificial Sequence
  ENSG00000197879_23 (sequence is synthesized)
ccgcaagggctacaagcctcgctcccggcagctgctgctcacgcccaacgccgtcgtcatcgtggaggacgccaaagtcaagcagaggattgattacgccaacctgaccggaatctctgt

SEQ ID NO: 721180 - DNA, 120 bp, Artificial Sequence
  ENSG00000197879_24 (sequence is synthesized)
cagcagcctgagcgacagtctttttgtgcttcatgtacagcgtgcggacaataagcaaaagggagatgtggtgctgcagagtgaccacgtgattgagacgctgaccaagacagccctcag

SEQ ID NO: 721181 - DNA, 120 bp, Artificial Sequence
  ENSG00000197879_25 (sequence is synthesized)
tgccaaccgcgtgaacagcatcaacatcaaccagggcagcatcacgtttgcagggggccccggcagggatggcaccattgacttcacacccggctcggagctgctcatcaccaaggccaa

SEQ ID NO: 721182 - DNA, 120 bp, Artificial Sequence
  ENSG00000197879_26 (sequence is synthesized)
gaacgggcacctggctgtggtcgccccacggctgaattctcggtgataaaggcgcccactggaccctcccaacgcccaatgctttgcttttctcctcctccccttcccagttaccaaaga

SEQ ID NO: 721183 - DNA, 120 bp, Artificial Sequence
  ENSG00000197879_27 (sequence is synthesized)
ctcgaacttccagacagggacccagggacaccccgaagcccacctgcaatctcccacctcctgcccatccctctcttgagggagcagcaggggccaggagctaccccaggagtgggccag

SEQ ID NO: 721184 - DNA, 120 bp, Artificial Sequence
  ENSG00000197879_28 (sequence is synthesized)
gccgggccacagcaataggaaagccagggccagagcgagccatgccagccctactgccgatgccaaatatttgagagaagggaacttttgctgaggttttctctgaggtttttttgatgc

SEQ ID NO: 721185 - DNA, 120 bp, Artificial Sequence
  ENSG00000197879_29 (sequence is synthesized)
tttataggaaactattttttaaaaaaagccatttcccacccaaggacacagtggatgtgttttccctgactccagcagggcaaggaatgtagccgagaggttgtgtgggctgggctctgg

SEQ ID NO: 721186 - DNA, 120 bp, Artificial Sequence
  ENSG00000197879_30 (sequence is synthesized)
tgccctcttccctggccaggacacctctcctcctgattcccttggcaccttgtctttctgtctgtttacctgtctccctgcctgcccatctgcatcttttgcagcccactctgacttcca

SEQ ID NO: 721187 - DNA, 120 bp, Artificial Sequence
  ENSG00000197879_31 (sequence is synthesized)
cccatctgcatcttttgcagcccactctgacttccatctgggggctgagaccacccttgcctgcccccttctttctgccttaagaatgtccttttaggctgggcatggtggctcacgcct

SEQ ID NO: 721188 - DNA, 120 bp, Artificial Sequence
  ENSG00000197879_32 (sequence is synthesized)
ccccagcactttgggaggcggagacgggcagataacctgaggtcaggatttcgagaccaacctgacctacatggagaaactccgcctctagtaaaaatacaaaattagccgggcatggtg

SEQ ID NO: 721189 - DNA, 120 bp, Artificial Sequence
  ENSG00000197879_33 (sequence is synthesized)
gcccttttactgtcctcatcatcccagtttgaggcagtgctggagtggggaaggccgtcttagaccatagaggttggaagacgctgagagatcatccagcccagccccttgatgttacag

SEQ ID NO: 721190 - DNA, 120 bp, Artificial Sequence
  ENSG00000197879_34 (sequence is synthesized)
agcagaagacagatgcccaaacaggagaaggcacttgcccacggtcatacggcaggttgccacaaaaccaagatggcagcccttcctcagcgtgcctcactgccactcccagagccaggg

SEQ ID NO: 721191 - DNA, 120 bp, Artificial Sequence
  ENSG00000197879_35 (sequence is synthesized)
agccccataaaacccacatcatgtcttaagagtatatctggctccttgaccagcaatcggccctgggagccaccaggtgggaaaagcgcctctgccagagtccaggccttgggatgacag

SEQ ID NO: 721192 - DNA, 120 bp, Artificial Sequence
  ENSG00000197879_36 (sequence is synthesized)
acagcttgcccgcacactcgggccccactcaaggatgtagggccttttctggcccctgacccctccctggcatgggagcgtggggacggggctggccttgggaggagcggcaggggcatc

SEQ ID NO: 721193 - DNA, 120 bp, Artificial Sequence
  ENSG00000197879_37 (sequence is synthesized)
acctccttctgctgcttctccctgctcctaccctcaagggcctgggggctgcccagctgcctctatgcccttctgggggtctcagcccactgctgacacttctgcaatccagagaaacac

SEQ ID NO: 721194 - DNA, 120 bp, Artificial Sequence
  ENSG00000197879_38 (sequence is synthesized)
gtatttggacattggttctatttttaactttcccgggactcgagttcgggggttgggggaggaaaatcccgcttcctctgggacccgcaggcctcggtgcccgcccagcgcccaggcccg

SEQ ID NO: 721195 - DNA, 120 bp, Artificial Sequence
  ENSG00000197879_39 (sequence is synthesized)
gagccacgccggcctgtgttagcctcatgttagggatgaagaacagaagccgaaacgttaagtgacttgctcagagtcccaccgcgaggaagaaccagcccagccttttgcagactctag

SEQ ID NO: 721196 - DNA, 120 bp, Artificial Sequence
  ENSG00000197879_40 (sequence is synthesized)
agacctggacggctccagccgtgtcctgaggagctggaccagccacatcccctggggctgcagttgaagcagaaccaagtggccatcccggcgttagaccgtaggttcctggtcccggag

SEQ ID NO: 721197 - DNA, 120 bp, Artificial Sequence
  ENSG00000197879_41 (sequence is synthesized)
tggtcggagcccgccagtgggcaggcagctcttgctcacaggccgcggtgcccaggccgctggctctccgcagggcggaatggcgctgcaagtggagctggtacccaccggggagatcat

SEQ ID NO: 721198 - DNA, 120 bp, Artificial Sequence
  ENSG00000197879_42 (sequence is synthesized)
caaggaggtgaccagggacggtgctgagttaaggacccctcacatgtgtccagaaactaagaagcttagccaggcatgctgacacgcctggagtcccatctatgcagaaggctggggcaa

SEQ ID NO: 721199 - DNA, 120 bp, Artificial Sequence
  ENSG00000197879_43 (sequence is synthesized)
gcttgaacaacgagaaggatgtagtcaccactgaccaaggagggcagacactaacaggagcttgtttgaagagggagaaggtccggtgttgagcttcaggcctgttgaatttgcgatacc

SEQ ID NO: 721200 - DNA, 120 bp, Artificial Sequence
  ENSG00000197879_44 (sequence is synthesized)
tgtcaggcatccaggtggagcagccaggtcgttggagttgaatctccccatttcctagatgaagtaactgagtccagcgtgggtggcgtgcctgagccgacgcagctagtggcagggctg

SEQ ID NO: 721201 - DNA, 120 bp, Artificial Sequence
  ENSG00000197879_45 (sequence is synthesized)
gagtaaggaccaggcagaatcagaggctgctgcgcgcgtcaccagccaggggagtggggtactcgctgctggggtcagcagctttagcccagctccggccaacctcccatgcctcttggc

SEQ ID NO: 721202 - DNA, 120 bp, Artificial Sequence
  ENSG00000197879_46 (sequence is synthesized)
cacagaggatgccctggaggtccggcggcagagcctggccactctcccattcatgccactcgtggagcgcacacggcaccaggctcccagctggctccccgcgctctggccaattgcctt

SEQ ID NO: 721203 - DNA, 120 bp, Artificial Sequence
  ENSG00000197879_47 (sequence is synthesized)
gcccccggccagaaatctgggcctttcgtggtcagaggacaccggcggcccctttgggatccacccccaatcaccaccaccttgttcttctctgaccctggatactctgggtgtccattt

SEQ ID NO: 721204 - DNA, 120 bp, Artificial Sequence
  ENSG00000197879_48 (sequence is synthesized)
tttggagccctgagaccctgtttgaagagggatccatctcagccctggttgtggggcgagggtcttgctcagcctgcaccaccctccaccctccagtaggacccagaggcagctgggctt

SEQ ID NO: 721205 - DNA, 120 bp, Artificial Sequence
  ENSG00000197879_49 (sequence is synthesized)
aagaacatggtgtggaaatactgccggagtatcagccctgagtggaagcagcaggtacggagagcggggctgggtgaggatgaggaagtggagtcagggagtcgcaagcattgctcaaag

SEQ ID NO: 721206 - DNA, 120 bp, Artificial Sequence
  ENSG00000197879_50 (sequence is synthesized)
ggtgtccgcctggaggggcatttaccccggtctaccgtatttaccgcgttctaccgtatttaccccgatctaccgtatttaccctggtctactctatttaccccagtctaccgtatttac

SEQ ID NO: 721207 - DNA, 120 bp, Artificial Sequence
  ENSG00000197879_51 (sequence is synthesized)
gcaatctactgtatttaccccgtctatagtattgaccccggtctaccgtattttgccctgcctaccatatttaccccgcctaccgtatttaccccggtctactctgtttaccccggtctg

SEQ ID NO: 721208 - DNA, 120 bp, Artificial Sequence
  ENSG00000197879_52 (sequence is synthesized)
ctctatttaccccggtctgctctatttaccctagtctaccgtatttaccccggtctaccggtgacctcagttggatgccaggccctgctgggcctcgtgtaggaagtggacactggagta

SEQ ID NO: 721209 - DNA, 120 bp, Artificial Sequence
  ENSG00000197879_53 (sequence is synthesized)
cagctggggtggccagtagggttcatatcgtgggccaactgcccttgattggtagagactgctcagaaccctgtgttgaaaagtctgcgtcttcactcgggtcgattggtgatatctgcc

SEQ ID NO: 721210 - DNA, 120 bp, Artificial Sequence
  ENSG00000197879_54 (sequence is synthesized)
ctgattacaggcattggttgatgtgccgtgtttttgccaactcagtattggatgatgctaaagggcccacccagtaaccttgagtattagtgatctgctgcttacaagaccccaagctgg

SEQ ID NO: 721211 - DNA, 120 bp, Artificial Sequence
  ENSG00000197879_55 (sequence is synthesized)
ccactgacttccctccccgccatctgagttgcaggtacagatgagatcagcccccgagtgctgcaggccttgggctctgagcccattcaggtaagagcctgcctgcagccctgagtccag

SEQ ID NO: 721212 - DNA, 120 bp, Artificial Sequence
  ENSG00000197879_56 (sequence is synthesized)
cgagtgtgacgggcggggggctccggggtggccggagaaggaggatggccacgcggccctcagtcctcacgctccggcctcccgcgcacacgcctggctctgagattcattcattcatcc

SEQ ID NO: 721213 - DNA, 120 bp, Artificial Sequence
  ENSG00000197879_57 (sequence is synthesized)
aggggtccgggaaggggtgactgagccccaccgtgtgcctcgctgcgtgtagggagtgggagccgtctcctgggagggactgacaaggaaacagctgattcctgcggggtgcgataagga

SEQ ID NO: 721214 - DNA, 120 bp, Artificial Sequence
  ENSG00000197885_0 (sequence is synthesized)
caagattcgagcctgagcggcctgggcgtctcgagaggtgagagagttggcggcgaggtctcggcggctaagcgagcgtcggcgactgtctctccgcgagaggaggcaagttggggtcca

SEQ ID NO: 721215 - DNA, 120 bp, Artificial Sequence
  ENSG00000197885_1 (sequence is synthesized)
ggctccaaagccggtggccgcgtaccgcggtggagccgctgtctttgaggtctgaggagagaacagagtctagctctttcacccaggctggagtgaagtggtgcaatctcagctcagtgc

SEQ ID NO: 721216 - DNA, 120 bp, Artificial Sequence
  ENSG00000197885_2 (sequence is synthesized)
tcagcctccccagtagctgggattacagtgatatcctgagagaagatgggaaagggctgcaaggttgtggtttgtggattgttatctgtggggaaaactgcaattttggagcagctcctt

SEQ ID NO: 721217 - DNA, 120 bp, Artificial Sequence
  ENSG00000197885_3 (sequence is synthesized)
tctgtggggaaaactgcaattttggagcagctcctttatggaaatcatactattggaatggaagattgcgaaacaatggaagatgtatacatggcttcagtagaaacagaccgaggagta

SEQ ID NO: 721218 - DNA, 120 bp, Artificial Sequence
  ENSG00000197885_4 (sequence is synthesized)
aaagaacagttacatctttatgacaccagaggtctacaggaaggcgtggagctgccaaagcattatttttcatttgctgatggcttcgttcttgtgtacagtgtgaataaccttgaatcc

SEQ ID NO: 721219 - DNA, 120 bp, Artificial Sequence
  ENSG00000197885_5 (sequence is synthesized)
tttcaaagagtggagcttctgaagaaagaaatcgataagttcaaagacaaaaaagaggtagcaattgtggtattaggaaacaaaatcgacctttctgagcagagacaagtggacgctgaa

SEQ ID NO: 721220 - DNA, 120 bp, Artificial Sequence
  ENSG00000197885_6 (sequence is synthesized)
gtggcacagcagtgggcaaaaagtgagaaagtaagactgtgggaggtgactgttacagatcggaaaactctgattgaaccattcactttattagccagtaaactttctcaaccccagagc

SEQ ID NO: 721221 - DNA, 120 bp, Artificial Sequence
  ENSG00000197885_7 (sequence is synthesized)
aaatcaagctttcctttgcctgggaggaaaaacaaagggaactctaattctgagaactaaaaatcagtaatttccacaattgtatgttgaatagtgattgcctttaagtgtctgtgaaca

SEQ ID NO: 721222 - DNA, 120 bp, Artificial Sequence
  ENSG00000197885_8 (sequence is synthesized)
tggagtaatattactatttaaaataggccatttgtatctacctttggtccttaggaaaattcctaaggaagtcaattaatgcactttagatgttaaaagtatttgggctaaggttattat

SEQ ID NO: 721223 - DNA, 120 bp, Artificial Sequence
  ENSG00000197885_9 (sequence is synthesized)
attagcacctttgttatttatgttgtacttgtgaaaacagtaaaatagtttggatagttatgcaaatgcacctatgtgtaacttccccccaaccccaagctgtttcggaagatatcataa

SEQ ID NO: 721224 - DNA, 120 bp, Artificial Sequence
  ENSG00000197885_10 (sequence is synthesized)
tcattctgtgtaacattatgcaaacttctaagcccaaacatgactttgtttttaaaaagttcattaatctaatgtctaggattataaaacatttttttgtgtctaaattggacccaaaac

SEQ ID NO: 721225 - DNA, 120 bp, Artificial Sequence
  ENSG00000197885_11 (sequence is synthesized)
attgaacagtttggggtagtaagctaaatttcatcttgtggagattttgctaaacagactaagacccatgatttagctttgctcaaattagaatgtttagcatgagttgaggtaccaggt

SEQ ID NO: 721226 - DNA, 120 bp, Artificial Sequence
  ENSG00000197885_12 (sequence is synthesized)
agtgttaagtaggttcatcacgctctaaggccgttttttccttagccagacccctgttgatagaccagatacttgagggcaaactgtttgctcctcctcttgaaaatgattaggcactta

SEQ ID NO: 721227 - DNA, 120 bp, Artificial Sequence
  ENSG00000197885_13 (sequence is synthesized)
aggacagtaaagctgtattttctggaaggaagactgtatcttctggaatagttttctagaaaactagtcatatacaataaaagtatcaaaaatattgggctctaatttgatctgacttag

SEQ ID NO: 721228 - DNA, 120 bp, Artificial Sequence
  ENSG00000197885_14 (sequence is synthesized)
atgtctgagtttgtgttgtttctctaaagattttggcaagactcaagcaatgtggctgactgtaactttattaatttaaaaggtaggaagtaagctacttagtggtttcacctgtgaaat

SEQ ID NO: 721229 - DNA, 120 bp, Artificial Sequence
  ENSG00000197885_15 (sequence is synthesized)
aactattttgactgaaatgtaaaataagctattcaacaaagaacatattaaaacatcaagtaatttgtaacatcttaaatggaatacttttttcatgagctctagtgaagaactactaca

SEQ ID NO: 721230 - DNA, 120 bp, Artificial Sequence
  ENSG00000197885_16 (sequence is synthesized)
tataaaagacgatacttacaaatcagctattgctgctacagtataattcttcaaaatttctcatcataaattcattttttggtaaaaaaaaattaccagacactaactcacccccttacc

SEQ ID NO: 721231 - DNA, 120 bp, Artificial Sequence
  ENSG00000197885_17 (sequence is synthesized)
cttttcccccggttattgaatattaatctagcttcccacccatgcatgttacatagatggacaaatgctttcataatgatttttaaataagtaccttccagtttgctttgtttcctacta

SEQ ID NO: 721232 - DNA, 120 bp, Artificial Sequence
  ENSG00000197885_18 (sequence is synthesized)
atgcaacttagtctatattagtacaaacagttaccaattctttttaaattctgtaatgaatgtatgtgtatccagataagtttctctgaaagagacatacagaaacagaactgctgggtc

SEQ ID NO: 721233 - DNA, 120 bp, Artificial Sequence
  ENSG00000197885_19 (sequence is synthesized)
aaaactccagcccgaagggatctggaagcagtttttaagactgtgtgtgtatgagacaggtcgcgtcctagagcaaacggttttttttgtaaacagacggcatcctaacaggggcggtgc

SEQ ID NO: 721234 - DNA, 120 bp, Artificial Sequence
  ENSG00000197885_20 (sequence is synthesized)
tacccagtctgcggggagtcgctcgggatcgaagcacctcagagctccttcgagcgtatcccttcgggaaagccccacgccttccccgaggcgcctcctccggcctgcagcacgccctcg

SEQ ID NO: 721235 - DNA, 120 bp, Artificial Sequence
  ENSG00000197885_21 (sequence is synthesized)
gtccctctctggccaccgcacgacgggcgcagaaatctgggccccagagctgcgctgagagatcccccgacgcttccccagcctcccagggaggccttcgcggagtcggggcgtcgcggg

SEQ ID NO: 721236 - DNA, 120 bp, Artificial Sequence
  ENSG00000197885_22 (sequence is synthesized)
tcggggcgctcgctgtgtcccttcagctccagactgcgtgaagctcctccagcaggccccagcgcccagggattttgtcctaaaaaagggtcatggagtgggtggattgcgggcggcccg

SEQ ID NO: 721237 - DNA, 120 bp, Artificial Sequence
  ENSG00000197885_23 (sequence is synthesized)
gcgctttttctgcatacggatttcgtcccaaatttgctaacatgagaaccacagtttttcagaagagcagaatgtttatttgccaagacctgtttggcaggtgtgaatgttttagagaag

SEQ ID NO: 721238 - DNA, 120 bp, Artificial Sequence
  ENSG00000197885_24 (sequence is synthesized)
aaatgccgagaaaatgctggcattttgcgttgcgggtttttttttaaattgagaaataggttactggcttactttgtttctccagaatattttcacttggctttaatttaagtcatgtgg

SEQ ID NO: 721239 - DNA, 120 bp, Artificial Sequence
  ENSG00000197885_25 (sequence is synthesized)
ctttaatttccttccagattatgcgttcagatgtggcaaaggcttaagagaatcattatctcttaatcgtagcggttttgattatcttttttcccacatcatatttttctttctttcttt

SEQ ID NO: 721240 - DNA, 120 bp, Artificial Sequence
  ENSG00000197885_26 (sequence is synthesized)
ttaaatcacagctttacgtttttaagagtctctatctggttcattgattgattcaacaaatatttattaagtgtctaatatgtgccaggcatagttgctggggatgcagcaggaaacaac

SEQ ID NO: 721241 - DNA, 120 bp, Artificial Sequence
  ENSG00000197885_27 (sequence is synthesized)
tcgagcctgagcggcctgggcgtctcgagaggtgagagagttggcggcgaggtctcggcggctaagcgagcgtcggcgactgtctctccgcgagaggaggcaaagtctagctctttcacc

SEQ ID NO: 721242 - DNA, 120 bp, Artificial Sequence
  ENSG00000197885_28 (sequence is synthesized)
tttcaaagagtggagcttctgaagaaagaaatcgataagttcaaagacaaaaaagaggcaacaattgtggtattaggaaacaaaatcgacctttctgagcagagacaagtggacgctgaa

SEQ ID NO: 721243 - DNA, 120 bp, Artificial Sequence
  ENSG00000197887_0 (sequence is synthesized)
atgaagactttgtgttcctttcttcagatcagcagaaatatgcatcaagaaaaccaaaccaccatcactgaattcattctcctgggactctccaaccaggctgaacatcaaaacctcctc

SEQ ID NO: 721244 - DNA, 120 bp, Artificial Sequence
  ENSG00000197887_1 (sequence is synthesized)
tttgtgcttttcctgagtatgtatgtggtcactgtggttgggaacgggctcatcattgtggctatcagcttggatatataccttcacacccccatgtatctcttccttgcctacctatcc

SEQ ID NO: 721245 - DNA, 120 bp, Artificial Sequence
  ENSG00000197887_2 (sequence is synthesized)
tttgctgatatttcctccatttccaactcagtccccaaaatgctggtgaatattcaaaccaacagccaatccatctcttatgagagctgcatcacacagatgtacttttctattgtgttt

SEQ ID NO: 721246 - DNA, 120 bp, Artificial Sequence
  ENSG00000197887_3 (sequence is synthesized)
gtcgtcactgacaatttgcttttggggaccatggccttcgaccactttgtggcgatctgccaccctctgaactatacaactttcatgcgggccaggttcggcactttgctcacagtcatc

SEQ ID NO: 721247 - DNA, 120 bp, Artificial Sequence
  ENSG00000197887_4 (sequence is synthesized)
attattgctcttacacacacccttctgctcattcaattgctcttctgtgaccacaacactctcccacacttcttctgtgacttggcccctctgctcaaactgtcctgttcagatacaatg

SEQ ID NO: 721248 - DNA, 120 bp, Artificial Sequence
  ENSG00000197887_5 (sequence is synthesized)
atcaatgagcttgtgttgtttattgtgggtttatcagttatcatcttcccctttgtactcatcttcttctcctatgtctgcatcatcagagctgtcctgggagtatcatccacacaggga

SEQ ID NO: 721249 - DNA, 120 bp, Artificial Sequence
  ENSG00000197887_6 (sequence is synthesized)
aagtggaaagccttctccacttgtggctctcacctgacaattgcattactgttctacggaaccactgtaggcgtgtactttttcccctcctccactcaccctgaggacactgataagatt

SEQ ID NO: 721250 - DNA, 120 bp, Artificial Sequence
  ENSG00000197887_7 (sequence is synthesized)
ggtgctgtcctattcactgtggtgacacccatgatgaaccccttcatctacagcttgaggaataaggatatgaaaggtgccctgagaaagctcatcaatagaaaaatttcttccctttga

SEQ ID NO: 721251 - DNA, 120 bp, Artificial Sequence
  ENSG00000197888_0 (sequence is synthesized)
gaaagaaacaacaactggaaaagaagcactgcataagaccaggatgtctctgaaatggatgtcagtctttctgctgatgcagctcagttgttactttagctctgggagttgtggaaaggt

SEQ ID NO: 721252 - DNA, 120 bp, Artificial Sequence
  ENSG00000197888_1 (sequence is synthesized)
gctggtgtggcccacagaatacagccattggataaatatgaagacaatcctggaagagcttgttcagaggggtcatgaggtgattgtgttgacatcttcggcttctattcttgtcaatgc

SEQ ID NO: 721253 - DNA, 120 bp, Artificial Sequence
  ENSG00000197888_2 (sequence is synthesized)
cagtaaatcatctgctattaaattagaagtttatcctacatctttaactaaaaatgatttggaagatttttttatgaaaatgttcgatagatggacatatagtatttcaaaaaatacatt

SEQ ID NO: 721254 - DNA, 120 bp, Artificial Sequence
  ENSG00000197888_3 (sequence is synthesized)
ttggtcatatttttcacaactacaagaattgtgttgggaatattctgactataatataaagctctgtgaagatgcagttttgaacaagaaacttatgagaaaactacaagagtcaaaatt

SEQ ID NO: 721255 - DNA, 120 bp, Artificial Sequence
  ENSG00000197888_4 (sequence is synthesized)
tgatgtccttctggcagatgccgttaatccctgtggtgagctgctggctgagctacttaacataccctttctgtacagtctccgcttctctgttggctacacagttgagaagaatggtgg

SEQ ID NO: 721256 - DNA, 120 bp, Artificial Sequence
  ENSG00000197888_5 (sequence is synthesized)
aggatttctgttccctccttcctatgtacctgttgttatgtcagaattaagtgatcaaatgattttcatggagaggataaaaaatatgatatatatgctttattttgacttttggtttca

SEQ ID NO: 721257 - DNA, 120 bp, Artificial Sequence
  ENSG00000197888_6 (sequence is synthesized)
agcatatgatctgaagaagtgggaccagttttatagtgaagttctaggaagacccactacattatttgagacaatggggaaagctgaaatgtggctcattcgaacctattgggattttga

SEQ ID NO: 721258 - DNA, 120 bp, Artificial Sequence
  ENSG00000197888_7 (sequence is synthesized)
atttcctcgcccattcttaccaaatgttgattttgttggaggacttcactgtaaaccagccaaacccttgcctaaggaaatggaagagtttgtgcagagctctggagaaaatggtattgt

SEQ ID NO: 721259 - DNA, 120 bp, Artificial Sequence
  ENSG00000197888_8 (sequence is synthesized)
gaagaaagtgccaacatgattgcatcagcccttgcccagatcccacaaaaggttctatggagatttgatggcaagaagccaaatactttaggttccaatactcgactgtataagtggtta

SEQ ID NO: 721260 - DNA, 120 bp, Artificial Sequence
  ENSG00000197888_9 (sequence is synthesized)
ccccagaatgaccttcttggtcatcccaaaaccaaagcttttataactcatggtggaaccaatggcatctatgaggcaatctaccatgggatccctatggtgggcattcccttgtttgcg

SEQ ID NO: 721261 - DNA, 120 bp, Artificial Sequence
  ENSG00000197888_10 (sequence is synthesized)
gatcaacatgataacattgctcacatgaaagccaagggagcagccctcagtgtggacatcaggaccatgtcaagtagagatttgctcaatgcattgaagtcagtcattaatgaccctatc

SEQ ID NO: 721262 - DNA, 120 bp, Artificial Sequence
  ENSG00000197888_11 (sequence is synthesized)
tataaagagaatatcatgaaattatcaagaattcatcatgatcaaccggtgaagcccctggatcgagcagtcttctggattgagtttgtcatgcgccataaaggagccaagcaccttcgg

SEQ ID NO: 721263 - DNA, 120 bp, Artificial Sequence
  ENSG00000197888_12 (sequence is synthesized)
gtcgcagcccacaacctcacctggatccagtaccactctttggatgtgatagcattcctgctggcctgcgtggcaactatgatatttatgatcacaaaatgttgcctgttttgtttccga

SEQ ID NO: 721264 - DNA, 120 bp, Artificial Sequence
  ENSG00000197888_13 (sequence is synthesized)
aagcttgccaaaacaggaaagaagaagaaaagggattagttatatcaaaagcctgaagtggaatgaccaaaagatgggactcctcctttattccagcatggagggttttaaatggaggat

SEQ ID NO: 721265 - DNA, 120 bp, Artificial Sequence
  ENSG00000197888_14 (sequence is synthesized)
ttcctttttcctgcgacaaaacgtcttttcacaacttaccctgttaagtcaaaatttattttccaggaatttaatatgtactttagttggaattattctatgtcaatgatttttaagcta

SEQ ID NO: 721266 - DNA, 120 bp, Artificial Sequence
  ENSG00000197888_15 (sequence is synthesized)
tgaaaaataataatataaaaccttatgggcttatattgaaatttattattctaatccaaaagttaccccacacaaaagttactgagcttccttatgtttcacacattgtatttgaacaca

SEQ ID NO: 721267 - DNA, 120 bp, Artificial Sequence
  ENSG00000197888_16 (sequence is synthesized)
aaacattaacaactccactcatagtatcaacattgttttgcaaatactcagaatattttggcttcattttgagcagaatttttgtttttaattttgccaatgaaatcttcaataattaaa

SEQ ID NO: 721268 - DNA, 120 bp, Artificial Sequence
  ENSG00000197889_0 (sequence is synthesized)
gatattattgataataaggcctctgtaaccatggctagttctgacgtaaaaccaaaatcagtaagtcatgccaaaaaatggtcagaagagatagaaaatctgtacagatttcaacaagca

SEQ ID NO: 721269 - DNA, 120 bp, Artificial Sequence
  ENSG00000197889_1 (sequence is synthesized)
ggatatcgggatgaaaccgaatatagacaagtgaaacaagtttctatggtagatcgttggccggagacaggatatgtgaagaaacttcagagaagggacaatacgttctattactacaac

SEQ ID NO: 721270 - DNA, 120 bp, Artificial Sequence
  ENSG00000197889_2 (sequence is synthesized)
gtccacaaagtgaaaatttatgcttactagcctgtcttctttgtattacttgtcaattatattttaagtattcatcatttccttctacatcatgtgtttgtcatttgatgaaataattca

SEQ ID NO: 721271 - DNA, 120 bp, Artificial Sequence
  ENSG00000197889_3 (sequence is synthesized)
agatgcagtctgcagtttaatgttttgtgaaacacaaaagccatgagaattggtatctgctaatcaccttgtcctgttctaagaactggctgcagatgcattaaagttgtactttcttgg

SEQ ID NO: 721272 - DNA, 120 bp, Artificial Sequence
  ENSG00000197889_4 (sequence is synthesized)
actaagagacgcgagggtcgcgaagggcacaacacttggcctctcgctggccctgctcgcggatcccgagtagagaacgcaagcacccacgcccgcctgcaagctcccgggcgcccccgg

SEQ ID NO: 721273 - DNA, 120 bp, Artificial Sequence
  ENSG00000197889_5 (sequence is synthesized)
cctgctcgcggatcccgagtagagaacgcaagcacccacgcccgcctgcaagctcccgggcgcccccggcctctcctgctcggcggaacgaggataacccagtagagccggacccagggg

SEQ ID NO: 721274 - DNA, 120 bp, Artificial Sequence
  ENSG00000197889_6 (sequence is synthesized)
tctcctgctcggcggaacgaggataacccagtagagccggacccaggggcaagaaagtttcccagatcaaatggaaatgatcaagttgaaagtcaagaagaaaagaaagttcagagatgc

SEQ ID NO: 721275 - DNA, 120 bp, Artificial Sequence
  ENSG00000197889_7 (sequence is synthesized)
caagggacatcaaaaggaaaaatgtctagaagtcaacaagcaaaggagcaacttagctgtcctaaggattgtcccatatcaagtagctcagctccagatgttcggaagaggcattggttg

SEQ ID NO: 721276 - DNA, 90 bp, Artificial Sequence
  ENSG00000197889_8 (sequence is synthesized)
aatgtgatgacaaagaagtccacagggtctcgaactcctggactcaagtgatcccagcgactcagcctcccagagttgagaagttgagag

SEQ ID NO: 721277 - DNA, 120 bp, Artificial Sequence
  ENSG00000197889_9 (sequence is synthesized)
atcccagcgactcagcctcccagagttgagaagttgagaggggtcacagacaaaatgagagatttccacattcttgatgatggtgaattgtcacacaatccaaccgtgcagctgggaatc

SEQ ID NO: 721278 - DNA, 77 bp, Artificial Sequence
  ENSG00000197889_10 (sequence is synthesized)
acacacgagagctacgaccccattatctgaaaacgaaatcgaaccttatagttctcaatgggaacaccttttcacat

SEQ ID NO: 721279 - DNA, 88 bp, Artificial Sequence
  ENSG00000197889_11 (sequence is synthesized)
ggacgacacgagagctacgaccccattatctgaaaacgaaatcgaaccttatagttctcaatgggaacaccttttcacatacctgtta

SEQ ID NO: 721280 - DNA, 120 bp, Artificial Sequence
  ENSG00000197891_0 (sequence is synthesized)
agtctaaaattaaagtcttcagtctccacattccctactttccaaattcagctttcccgggaggtctggagcagctgcctctctggggagatgctggaggtctcggaatcacctcacgcg

SEQ ID NO: 721281 - DNA, 120 bp, Artificial Sequence
  ENSG00000197891_1 (sequence is synthesized)
gcctcagggcccagttggagccaccccaagtgacaccagcaggcagatgaccagagagcctgagcctccggccccgagtctgtgaagcctagccgctgggctggagaagccactgtgggc

SEQ ID NO: 721282 - DNA, 120 bp, Artificial Sequence
  ENSG00000197891_2 (sequence is synthesized)
accaccgtgggggaaacaggcccgttgccctggcctctttgccctgggccagcctttgtgaagtgggcccctcttctgggccccttgagtaggttccatggcattttctgaactcctgga

SEQ ID NO: 721283 - DNA, 120 bp, Artificial Sequence
  ENSG00000197891_3 (sequence is synthesized)
cctcgtgggtggcctgggcaggttccaggttctccagacgatggctctgatggtctccatcatgtggctgtgtacccagagcatgctggagaacttctcggccgccgtgcccagccaccg

SEQ ID NO: 721284 - DNA, 120 bp, Artificial Sequence
  ENSG00000197891_4 (sequence is synthesized)
ctgctgggcacccctcctggacaacagcacggctcaggccagcatcctagggagcttgagtcctgaggccctcctggctatttccatcccgccgggccccaaccagaggccccaccagtg

SEQ ID NO: 721285 - DNA, 120 bp, Artificial Sequence
  ENSG00000197891_5 (sequence is synthesized)
ccgccgcttccgccagccacagtggcagctcttggaccccaatgccacggccaccagctggagcgaggccgacacggagccgtgtgtggatggctgggtctatgaccgcagcatcttcac

SEQ ID NO: 721286 - DNA, 120 bp, Artificial Sequence
  ENSG00000197891_6 (sequence is synthesized)
ctccacaatcgtggccaagtggaacctcgtgtgtgactctcatgctctgaagcccatggcccagtccatctacctggctgggattctggtgggagctgctgcgtgcggccctgcctcaga

SEQ ID NO: 721287 - DNA, 120 bp, Artificial Sequence
  ENSG00000197891_7 (sequence is synthesized)
caggtttgggcgcaggctggtgctaacctggagctaccttcagatggctgtgatgggtacggcagctgccttcgcccctgccttccccgtgtactgcctgttccgcttcctgttggcctt

SEQ ID NO: 721288 - DNA, 120 bp, Artificial Sequence
  ENSG00000197891_8 (sequence is synthesized)
tgccgtggcaggcgtcatgatgaacacgggcactctcctgatggagtggacggcggcacgggcccgacccttggtgatgaccttgaactctctgggcttcagcttcggccatggcctgac

SEQ ID NO: 721289 - DNA, 120 bp, Artificial Sequence
  ENSG00000197891_9 (sequence is synthesized)
agctgcagtggcctacggtgtgcgggactggacactgctgcagctggtggtctcggtccccttcttcctctgctttttgtactcctggtggctggcagagtcggcacgatggctcctcac

SEQ ID NO: 721290 - DNA, 120 bp, Artificial Sequence
  ENSG00000197891_10 (sequence is synthesized)
cacaggcaggctggattggggcctgcaggagctgtggagggtggctgccatcaacggaaagggggcagtgcaggacaccctgacccctgaggtcttgctttcagccatgcgggaggagct

SEQ ID NO: 721291 - DNA, 120 bp, Artificial Sequence
  ENSG00000197891_11 (sequence is synthesized)
ccctgctccgcatgcccggactgcgcttccggacctgtatctccacgttgtgctggttcgcctttggcttcaccttcttcggcctggccctggacctgcaggccctgggcagcaacatct

SEQ ID NO: 721292 - DNA, 120 bp, Artificial Sequence
  ENSG00000197891_12 (sequence is synthesized)
tcctgctccaaatgttcattggtgtcgtggacatcccagccaagatgggcgccctgctgctgctgagccacctgggccgccgccccacgctggccgcatccctgttgctggcagggctct

SEQ ID NO: 721293 - DNA, 120 bp, Artificial Sequence
  ENSG00000197891_13 (sequence is synthesized)
gcattctggccaacacgctggtgccccacgaaatgggggctctgcgctcagccttggccgtgctggggctgggcggggtgggggctgccttcacctgcatcaccatctacagcagcgagc

SEQ ID NO: 721294 - DNA, 120 bp, Artificial Sequence
  ENSG00000197891_14 (sequence is synthesized)
tcttccccactgtgctcaggatgacggcagtgggcttgggccagatggcagcccgtggaggagccatcctggggcctctggtccggctgctgggtgtccatggcccctggctgcccttgc

SEQ ID NO: 721295 - DNA, 120 bp, Artificial Sequence
  ENSG00000197891_15 (sequence is synthesized)
tggtgtatgggacggtgccagtgctgagtggcctggccgcactgcttctgcccgagacccagagcttgccgctgcccgacaccatccaagatgtgcagaaccaggcagtaaagaaggcaa

SEQ ID NO: 721296 - DNA, 120 bp, Artificial Sequence
  ENSG00000197891_16 (sequence is synthesized)
cacatggcacgctggggaactctgtcctaaaatccacacagttttagcctcctggggaacctgcgatgggacggtcagaggaagagacttcttctgttctctggagaaggcaggaggaaa

SEQ ID NO: 721297 - DNA, 120 bp, Artificial Sequence
  ENSG00000197891_17 (sequence is synthesized)
gcaaagacctccatttccagaggcccagaggctgccctctgaggtccccactctcccccagggctgcccctccaggtgagccctgcccctctcacagtccaaggggcccccttcaatact

SEQ ID NO: 721298 - DNA, 120 bp, Artificial Sequence
  ENSG00000197891_18 (sequence is synthesized)
gaaggggaaaaggacagtttgattggcaggaggtgacccagtgcaccatcaccctgccctgccctcgtggcttcggagagcagaggggtcaggcccaggggaacgagctggccttgccaa

SEQ ID NO: 721299 - DNA, 120 bp, Artificial Sequence
  ENSG00000197891_19 (sequence is synthesized)
ccctctgcttgactccgcactgccacttgtccccccacacccgtccacctgcccagagctcagagctaaccaccatccatggtcaagacctctcctagctccacacaagcagtagagtct

SEQ ID NO: 721300 - DNA, 120 bp, Artificial Sequence
  ENSG00000197891_20 (sequence is synthesized)
cagctccacagctttacccagaagccctgtaagcctggcccctggcccctccccatgtccctccaggcctcagccacctgcccgccacatcctctgcctgctgtccccttcccaccctca

SEQ ID NO: 721301 - DNA, 120 bp, Artificial Sequence
  ENSG00000197891_21 (sequence is synthesized)
tccctgaccgactccacttaacccccaaacccagccccccttccaggggtccagggccagcctgagatgcccgtgaaactcctacccacagttacagccacaagcctgcctcctcccacc

SEQ ID NO: 721302 - DNA, 120 bp, Artificial Sequence
  ENSG00000197891_22 (sequence is synthesized)
ctgccagcctatgagttcccagagggttggggcagtcccatgaccccatgtcccagctccccacacagcgctgggccagagaggcattggtgcgagggattgaataaagaaacaaatgaa

SEQ ID NO: 721303 - DNA, 120 bp, Artificial Sequence
  ENSG00000197891_23 (sequence is synthesized)
atagctgaggtggggctctgcaggaggcatagatttggggaggggacagagatctcagggtggcattgggcacaccgaacctggggagtctgtggggtgtctgttgatgctgggaagctc

SEQ ID NO: 721304 - DNA, 120 bp, Artificial Sequence
  ENSG00000197891_24 (sequence is synthesized)
ccacagcaggtgagtggaggcaggagccacgggtggggccaggccacacagcctgggaggcgcaggggctgggcagctgccagtgacccaagcccacacagagacttgcacagctgcccc

SEQ ID NO: 721305 - DNA, 120 bp, Artificial Sequence
  ENSG00000197891_25 (sequence is synthesized)
agccccaaattagggggatcccctggcccaccttctcttggctcagccactctgggaggtgggcacacaggggcaccgaagggagcaggcagccctggcatcccacagccgccaggagaa

SEQ ID NO: 721306 - DNA, 120 bp, Artificial Sequence
  ENSG00000197891_26 (sequence is synthesized)
aaacttaggcctccccaagacctggcacagagcaggccggccctggcccccaagcagaggaggctgcacctccctcgcgtctgtgcctgcctcaacgcgggttaaactttgaccaaggaa

SEQ ID NO: 721307 - DNA, 120 bp, Artificial Sequence
  ENSG00000197892_0 (sequence is synthesized)
agacggaagccgaacgagttcctcggcggctgcaggatgggggactccaaagtgaaagtggcggtgcggatacgacccatgaaccggcgagagactgacttgcataccaaatgtgtggtg

SEQ ID NO: 721308 - DNA, 120 bp, Artificial Sequence
  ENSG00000197892_1 (sequence is synthesized)
gatgtggatgcaaacaaggttattcttaatcctgtaaatacgaatctttccaaaggagatgcccggggccagccgaaggtgtttgcttatgatcattgtttctggtctatggatgaatct

SEQ ID NO: 721309 - DNA, 120 bp, Artificial Sequence
  ENSG00000197892_2 (sequence is synthesized)
gtcaaagaaaagtatgcaggtcaagatattgttttcaagtgccttggagagaatatcctgcagaatgcttttgatggctacaatgcatgtatctttgcctatggacagactggctctgga

SEQ ID NO: 721310 - DNA, 120 bp, Artificial Sequence
  ENSG00000197892_3 (sequence is synthesized)
aaatcttataccatgatgggcacagctgaccaacctggattaatcccaagactttgcagtggactctttgaacgaactcagaaagaggaaaatgaagaacagagttttaaagtagaagtg

SEQ ID NO: 721311 - DNA, 120 bp, Artificial Sequence
  ENSG00000197892_4 (sequence is synthesized)
tcctacatggaaatttataatgaaaaagttcgagaccttcttgatcccaaaggaagccgtcagacgttgaaagtcagagagcatagtgtgttgggaccttatgtcgacggactttctaaa

SEQ ID NO: 721312 - DNA, 120 bp, Artificial Sequence
  ENSG00000197892_5 (sequence is synthesized)
ctggctgtcacaagctacaaggatattgagtcgttgatgtctgagggtaacaaatctcgcacagttgctgcaaccaacatgaacgaggagagtagccgatcccatgcagttttcaaaatc

SEQ ID NO: 721313 - DNA, 120 bp, Artificial Sequence
  ENSG00000197892_6 (sequence is synthesized)
accctcacacatactctctacgatgtgaagtctgggacatctggagagaaagtgggcaaactcagcctggtggatttagctggcagtgaacgagcaacgaagacaggcgctgcaggggac

SEQ ID NO: 721314 - DNA, 120 bp, Artificial Sequence
  ENSG00000197892_7 (sequence is synthesized)
aggctgaaggaagggagcaacattaacaagtccctcacaaccctcggtctggttatctcagctcttgcagatcagagtgctggcaaaaacaagaataaatttgttccatatcgtgactca

SEQ ID NO: 721315 - DNA, 120 bp, Artificial Sequence
  ENSG00000197892_8 (sequence is synthesized)
gttctcacttggctgctcaaagacagcctcgggggtaacagcaagaccgccatggtggctactgtgagtcctgcagctgataactatgatgaaaccctctcaactctgcggtatgcagat

SEQ ID NO: 721316 - DNA, 120 bp, Artificial Sequence
  ENSG00000197892_9 (sequence is synthesized)
cgagccaagcacattgtaaaccacgctgtggtgaatgaggaccctaatgcccgaattatccgggatctccgggaagaagttgagaaactccgggagcagctgaccaaagcagaggcaatg

SEQ ID NO: 721317 - DNA, 120 bp, Artificial Sequence
  ENSG00000197892_10 (sequence is synthesized)
aaatctccagagctaaaggaccggctggaagaatctgagaagctaatccaggaaatgactgtgacctgggaggagaaattaaggaaaacggaggagattgcacaggaacgacagaaacag

SEQ ID NO: 721318 - DNA, 120 bp, Artificial Sequence
  ENSG00000197892_11 (sequence is synthesized)
cttgagagtcttggaatatctcttcagtcttcgggaatcaaagttggggatgataaatgcttccttgtgaatctgaatgctgacccagctctgaatgagcttctggtgtactatttaaag

SEQ ID NO: 721319 - DNA, 120 bp, Artificial Sequence
  ENSG00000197892_12 (sequence is synthesized)
gaacatacattgatagggtcagcaaattcccaagatatccaactgtgcggcatgggaattcttcctgaacactgtattatagacatcacgtcagaaggccaggttatgctgactcctcag

SEQ ID NO: 721320 - DNA, 120 bp, Artificial Sequence
  ENSG00000197892_13 (sequence is synthesized)
aagaacaccagaacatttgtaaatgggtcatctgtctccagtccaatacagctacaccatggggacaggatattatggggaaacaatcatttcttcagactcaatttgcctaaaaagaaa

SEQ ID NO: 721321 - DNA, 120 bp, Artificial Sequence
  ENSG00000197892_14 (sequence is synthesized)
aagaaagcagaacgagaggatgaggaccaggatccctccatgaagaacgagaatagttctgagcagctggatgtagacggagactcctccagcgaggtgtccagtgaagttaactttaat

SEQ ID NO: 721322 - DNA, 120 bp, Artificial Sequence
  ENSG00000197892_15 (sequence is synthesized)
tacgaatacgcacagatggaggtcaccatgaaggccctgggcagcaatgatccgatgcagtccatattaaacagcttagaacaacagcatgaagaagaaaaacgatctgcactggagcgc

SEQ ID NO: 721323 - DNA, 120 bp, Artificial Sequence
  ENSG00000197892_16 (sequence is synthesized)
cagaggcttatgtatgagcacgaattggagcagctccggagaaggctgtctcctgagaagcagaactgccggagcatggacaggttttctttccactcgcccagcgctcagcaacgctta

SEQ ID NO: 721324 - DNA, 120 bp, Artificial Sequence
  ENSG00000197892_17 (sequence is synthesized)
agacagtgggctgaggagagagaagcaacgttgaataacagcctgatgaggctgagggaacaaattgttaaggccaatctattggtgagagaagctaattacattgctgaggagctggat

SEQ ID NO: 721325 - DNA, 120 bp, Artificial Sequence
  ENSG00000197892_18 (sequence is synthesized)
aaaagaacagaatacaaagttaccctacagattccagcctccagcctggatgccaacaggaagcgaggctctcttcttagtgagcctgcaatccaggtgagaagaaaaggaaaaggaaag

SEQ ID NO: 721326 - DNA, 120 bp, Artificial Sequence
  ENSG00000197892_19 (sequence is synthesized)
cagatttggtctttggaaaaactggacaacaggctgttggatatgagagacctttatcaggagtggaaagagtgtgaagaagataacccagtaatacgatcatacttcaaacgtgctgat

SEQ ID NO: 721327 - DNA, 120 bp, Artificial Sequence
  ENSG00000197892_20 (sequence is synthesized)
ccattctatgatgagcaggaaaatcacagtctcattggggtggccaatgtcttcctcgagtcacttttctatgatgtgaagttacaatacgctgttcccatcatcaaccagaaaggagag

SEQ ID NO: 721328 - DNA, 120 bp, Artificial Sequence
  ENSG00000197892_21 (sequence is synthesized)
gtggcaggtcggctgcacgtggaggtgatgcgactcagtggtgatgttggggagaggatcgcaggaggcgatgaggtggcagaggtctcctttgagaaggagacccaggagaacaaactg

SEQ ID NO: 721329 - DNA, 120 bp, Artificial Sequence
  ENSG00000197892_22 (sequence is synthesized)
gtgtgcatggttaaaatcctgcaagctactgggttgccacagcatctgtcccactttgtgttctgcaaatacagcttctgggatcaacaggagccggtgattgtcgctcctgaagtggac

SEQ ID NO: 721330 - DNA, 120 bp, Artificial Sequence
  ENSG00000197892_23 (sequence is synthesized)
acctcctcctcttccgtcagcaaggagccgcactgcatggttgtctttgatcattgcaatgagttttctgttaacatcaccgaagactttatcgagcatctttccgaaggagcattggca

SEQ ID NO: 721331 - DNA, 120 bp, Artificial Sequence
  ENSG00000197892_24 (sequence is synthesized)
attgaagtatatggacataaaataaacgatccccggaaaaaccccgccctgtgggatttgggaatcatccaagcaaagacacgtagtcttcgggacagatggagtgaagtgaccaggaaa

SEQ ID NO: 721332 - DNA, 120 bp, Artificial Sequence
  ENSG00000197892_25 (sequence is synthesized)
ttggaattctgggttcaaatcttggaacagaatgagaatggtgaatactgccctgtagaagtgatttctgcaaaggatgtcccaacaggaggaatcttccagctccggcaggggcagtcc

SEQ ID NO: 721333 - DNA, 120 bp, Artificial Sequence
  ENSG00000197892_26 (sequence is synthesized)
cggagagttcaagtcgaagtgaagtcagtgcaggaatctgggactttaccactgatggaagaatgtatactgtctgttggcattggatgtgtcaaagttagaccgctcagagcccccaga

SEQ ID NO: 721334 - DNA, 120 bp, Artificial Sequence
  ENSG00000197892_27 (sequence is synthesized)
acacatgagaccttccatgaggaagaggaagacatggacagctaccaggatcgagatttagagagacttcgtagaaaatggctaaatgcattaacaaaacgtcaggagtacttggatcaa

SEQ ID NO: 721335 - DNA, 120 bp, Artificial Sequence
  ENSG00000197892_28 (sequence is synthesized)
caattgcaaaagcttgtcagtaaacgtgataaaacagaggatgatgctgaccgtgaagcgcagcttctggagatgcggttgaccctaactgaggagaggaacgcggtgatggtcccctct

SEQ ID NO: 721336 - DNA, 120 bp, Artificial Sequence
  ENSG00000197892_29 (sequence is synthesized)
gctggcagtggtattccaggggccccagcagaatggaccccagtacctgggatggagacacacattcctgttatattcctggacttaaatgctgatgatttcagctctcaggataatctt

SEQ ID NO: 721337 - DNA, 120 bp, Artificial Sequence
  ENSG00000197892_30 (sequence is synthesized)
gatgacccagaagctggtggatgggatgcgaccttgactggggaagaagaagaggagttctttgaattgcagattgtgaagcagcatgatggggaggtgaaagcagaagcctcctgggac

SEQ ID NO: 721338 - DNA, 120 bp, Artificial Sequence
  ENSG00000197892_31 (sequence is synthesized)
tccgcggtgcatggctgccctcagctcagcaggggcacgcccgtggacgagcggttgttcctgatcgtgcgcgtgacggtccagctcagccaccctgctgacatgcaactggtgttacgc

SEQ ID NO: 721339 - DNA, 120 bp, Artificial Sequence
  ENSG00000197892_32 (sequence is synthesized)
aagagaatctgtgtcaatgttcacggccgccagggttttgcacagagtctcctaaaaaagatgtctcatcgaagttctattcctggctgtggagtgacttttgaaattgtctccaatatt

SEQ ID NO: 721340 - DNA, 120 bp, Artificial Sequence
  ENSG00000197892_33 (sequence is synthesized)
ccagaggatgcccagggagtggaagaacgggaagcattagcaagaatggcagccaatgttgaaaacccagcttctgctgactcggaggcttatattgaaaagtacctcaggagcgtgctg

SEQ ID NO: 721341 - DNA, 120 bp, Artificial Sequence
  ENSG00000197892_34 (sequence is synthesized)
gctgtagaaaacctcctgactttagatcgtctgcgccaggaagttgcagtgaaggaacagttaacaggaaaaggaaagttgagcaggaggagtatcagttctccaaatgtgaacagattg

SEQ ID NO: 721342 - DNA, 120 bp, Artificial Sequence
  ENSG00000197892_35 (sequence is synthesized)
tctggaagccgacaagatctcattccatcatacagtctaggcagcaacaagggccggtgggaaagtcagcaggatgtatcccaaaccacagtttccagaggaatagctcctgcccccgcc

SEQ ID NO: 721343 - DNA, 120 bp, Artificial Sequence
  ENSG00000197892_36 (sequence is synthesized)
agctcctcaagtctctctttcccgtccgcgatgagaagaggggcaagcggccgtctcccctcgcacaccagcccgtgccccgcatcatggtgcagtcagccagcccggacatcagggtga

SEQ ID NO: 721344 - DNA, 120 bp, Artificial Sequence
  ENSG00000197892_37 (sequence is synthesized)
ccaggatggaggaggctcagccggagatgggccctgacgtgctggtgcagacgatgggggccccggccttgaagatctgcgacaaacctgccaaagtgccttccccaccgcctgtcatag

SEQ ID NO: 721345 - DNA, 120 bp, Artificial Sequence
  ENSG00000197892_38 (sequence is synthesized)
ctgtcacagcggtcaccccggctccggaggcacaggacgggccccccagccccctgagtgaagcctctagcgggtacttctcccacagcgtctccaccgcgaccctgtcggacgccctgg

SEQ ID NO: 721346 - DNA, 80 bp, Artificial Sequence
  ENSG00000197892_39 (sequence is synthesized)
caccgcccctgaggccgagcccgaggcgcccatcagccaccccccaccgcccacggccgtccccgccgaggagccccctg

SEQ ID NO: 721347 - DNA, 120 bp, Artificial Sequence
  ENSG00000197892_40 (sequence is synthesized)
gcccccagcagctcgtgagccccggtcgggagcgccccgacctcgaggccccggcgcccggctccccgttccgcgtccggagggtgcgggcctcggagttgcgctccttctcgcgcatgc

SEQ ID NO: 721348 - DNA, 120 bp, Artificial Sequence
  ENSG00000197892_41 (sequence is synthesized)
tggctggggaccccggctgctccccgggggccgaggggaatgcgccggccccgggcgccgggggacaggccctggcctctgattccgaggaagctgacgaggtcccggagtggctccgag

SEQ ID NO: 721349 - DNA, 120 bp, Artificial Sequence
  ENSG00000197892_42 (sequence is synthesized)
agggcgagttcgtcaccgtgggcgcccacaaaacgggcgtggtgagatacgtggggcctgccgacttccaagagggcacgtgggtcggcgtggagctcgacctgccctcaggtaagaatg

SEQ ID NO: 721350 - DNA, 120 bp, Artificial Sequence
  ENSG00000197892_43 (sequence is synthesized)
acggttccatcggcgggaagcagtacttcaggtgtaaccctggctacgggctgctggtcaggcccagccgggtccgcagggccacgggccctgtgcggcggcgcagcacaggactccggc

SEQ ID NO: 721351 - DNA, 120 bp, Artificial Sequence
  ENSG00000197892_44 (sequence is synthesized)
tgggtgcccccgaggcccgccggagcgccaccctctcgggctccgccaccaacctggcctcgctgacagctgccctggccaaggccgacaggagccacaagaaccctgagaaccggaaat

SEQ ID NO: 721352 - DNA, 120 bp, Artificial Sequence
  ENSG00000197892_45 (sequence is synthesized)
cctgggccagctgagccgctgccttagggcgaacttttctgggggtgcccggccccttttgagccctgccagtgacagccctgaggagccaggagcccggtggccccttccccaggggca

SEQ ID NO: 721353 - DNA, 120 bp, Artificial Sequence
  ENSG00000197892_46 (sequence is synthesized)
gggcgatgaatgctttttgcacgacacagggctggtgacctccctgggcctctggaagctttgtttcttctgtacccgggtaaagtgggggcctcaactgtgcctcctcaggtggatgga

SEQ ID NO: 721354 - DNA, 120 bp, Artificial Sequence
  ENSG00000197892_47 (sequence is synthesized)
aggttctgggtgcccgcaggggctgggggatgctaggactgagaccctgggtggtgcagcgcctggtgatcttgctgtgtgcctgtgcctggggccttatgttgctctttctatcatttc

SEQ ID NO: 721355 - DNA, 120 bp, Artificial Sequence
  ENSG00000197892_48 (sequence is synthesized)
cattctggtggccccactaatgtcttaacctaaaccataattgtaaccagtgcctttcctccccactggagggcaagcccccccacccacccaggatgtcctggctcactccgcaagccc

SEQ ID NO: 721356 - DNA, 120 bp, Artificial Sequence
  ENSG00000197892_49 (sequence is synthesized)
cccagcctcccaccctggtcccagtttcccgcaaagtgcctctgggggaccccccagcctcccaccctggtcccaggttccacaagtgcctctggagggccctgggctctggcagatggt

SEQ ID NO: 721357 - DNA, 120 bp, Artificial Sequence
  ENSG00000197892_50 (sequence is synthesized)
cctggtgccccagacgggggccgagggcctgagcccccccatccctcctctgccagggtttcttagcggtttctctgtggatgttttggcatctttagacacctggaaagtctcttatgt

SEQ ID NO: 721358 - DNA, 120 bp, Artificial Sequence
  ENSG00000197892_51 (sequence is synthesized)
ttgccgtttattcccttcacagaaggcttggaatgtatttatttatatttattttttcaaaatccgaaatcatttgcgagccgcaatcgtcgtctgcctgtgtgggggggcccagggcct

SEQ ID NO: 721359 - DNA, 120 bp, Artificial Sequence
  ENSG00000197892_52 (sequence is synthesized)
gccttgcacgttgcagcctctctggccattgcagagctgctggcctcctgcccaggtggagggtcctggggacggcagaggataaagccccctcctcacatccctctattgcggatccac

SEQ ID NO: 721360 - DNA, 120 bp, Artificial Sequence
  ENSG00000197892_53 (sequence is synthesized)
agtggccttactcttaacttggatgagagcaaaaacctgggagaatgatgtgcttctgtagtcggtgacaaaggaagaggcattgctactttatttggtgcacttttggtttctaggaag

SEQ ID NO: 721361 - DNA, 120 bp, Artificial Sequence
  ENSG00000197892_54 (sequence is synthesized)
gtctttgggtcattttaacttctcggcaactcccagactctcagagtgtggggctggggcctggcggctgggctggtgcagggagtgtgctggttagtctccagaccctcacagcagcca

SEQ ID NO: 721362 - DNA, 120 bp, Artificial Sequence
  ENSG00000197892_55 (sequence is synthesized)
cgcccccaggcccaccgtgcatggtgtgggcgggacagccggaagcttccggggtggcctccacctcctggctggggcacttatgctcccagagcctttggtgccaggtttgtgggatgg

SEQ ID NO: 721363 - DNA, 120 bp, Artificial Sequence
  ENSG00000197892_56 (sequence is synthesized)
gggttagcgtctatgtgtggaaggccaccaatctagggacaggagtcctgggtcaagattcacacagccacccttggagctggtttctagttctcacatttagtcaacatctagaaagcg

SEQ ID NO: 721364 - DNA, 120 bp, Artificial Sequence
  ENSG00000197892_57 (sequence is synthesized)
ctgcggaaggctctggttctctagggacttgaaggcgccaacagagtagtctccatggtgggcctgtcccagccctggctgcgaggacaggttgtctttctctccccagttggcgaggga

SEQ ID NO: 721365 - DNA, 120 bp, Artificial Sequence
  ENSG00000197892_58 (sequence is synthesized)
cacgaaggctgcggccgggctggcagagggcccggcccctggggggaggcactcctccagggctctccctgtccttagccgattttgagggaaccctgtggcacctgtccctggatgaag

SEQ ID NO: 721366 - DNA, 120 bp, Artificial Sequence
  ENSG00000197892_59 (sequence is synthesized)
agctgtcacctctgccttgccctttaactcaacccgcttcccagcacagcggctttctttttaaaacctgtttcactgagaagtttgtttttgggtccgctggtgtcactatggcctggg

SEQ ID NO: 721367 - DNA, 120 bp, Artificial Sequence
  ENSG00000197892_60 (sequence is synthesized)
tgagaggccagcactgctgctgccctgaggggaaacgcctgggccgtgtagtggggacgctctgggaatggtggcggacgggcagcgtgggtgggacctggcacttcgtggtggctgagc

SEQ ID NO: 721368 - DNA, 120 bp, Artificial Sequence
  ENSG00000197892_61 (sequence is synthesized)
catccacccagcagcggcctcctgtagcaccatcttgggaaagtcctgggggacgtgtgtgtcgtgctttttaccatcggtttgacttacagtggagtagaacgagccagagttcctgac

SEQ ID NO: 721369 - DNA, 120 bp, Artificial Sequence
  ENSG00000197892_62 (sequence is synthesized)
ttgagcaggtggatttgggcccaggccctgttcactcttgcttctcggtgcggactaatgtcagcttgtggctgggaaagagggatgtgcagtgacgtggtcaccaaggcagtgagcccc

SEQ ID NO: 721370 - DNA, 120 bp, Artificial Sequence
  ENSG00000197892_63 (sequence is synthesized)
gctgaccccgggccagcacttggcaggcaggaggtgcggtctccagagtggtgggccagggcgggctggcctccgtcttctatcttcttttcttgcctccctgaccagcagactcacctc

SEQ ID NO: 721371 - DNA, 120 bp, Artificial Sequence
  ENSG00000197892_64 (sequence is synthesized)
ccaagaacgcctgcccgcccacccgccttaggactcccgatgcgctcctggaaggccccaggagtggcaccttagtgtgggtcggcccgcagatggcacccaaggccgggaagggcagta

SEQ ID NO: 721372 - DNA, 120 bp, Artificial Sequence
  ENSG00000197892_65 (sequence is synthesized)
actgcacacgcggcgctgtcagagatgggggtgggggatgcttctgggggccctgcctccccattgtgtgcccagaacatccctggccccaccccgccacttccctcgggcccttatgaa

SEQ ID NO: 721373 - DNA, 120 bp, Artificial Sequence
  ENSG00000197892_66 (sequence is synthesized)
ggactgaggctccagggtgagaaggctcacttctgccccgggcactgcgtccagcagcagaggggacagggggcaggtgtgtgactgggttcctgggtacccaggcctgaccagagggag

SEQ ID NO: 721374 - DNA, 120 bp, Artificial Sequence
  ENSG00000197892_67 (sequence is synthesized)
cgggagggcagaggtgaggagggggaagatgtttctgggcctaccaaggttcaacaagagaacggagctgggaatgtgactgctggagcctgagaggtggaggagttctgatcccccgtt

SEQ ID NO: 721375 - DNA, 120 bp, Artificial Sequence
  ENSG00000197892_68 (sequence is synthesized)
acttcctagcattttctcctcttgccttaaaagttccctgtatgtgaaacgggaagtcctgagagtgtgtgttggtggctgtgcgcacgcacacaagacgggagtcaccctgtgcttcct

SEQ ID NO: 721376 - DNA, 120 bp, Artificial Sequence
  ENSG00000197892_69 (sequence is synthesized)
gcccaagatactgacccattgaacccccaaagcatctttctctccacaaagtccgtggtgccttcctggtgggctgcagacactaatggtgttggggggtcttggaacagcttctctatg

SEQ ID NO: 721377 - DNA, 120 bp, Artificial Sequence
  ENSG00000197892_70 (sequence is synthesized)
tgtggattcgtgtaaatgcgaagagttcacatataaagaagtgactttgattctgtgattatattgatttggtacacagtaaatgggagtttaaaaaatccaaagactctaatgacttgt

SEQ ID NO: 721378 - DNA, 120 bp, Artificial Sequence
  ENSG00000197892_71 (sequence is synthesized)
aaagactctaatgatttgtatcatgtaatgaactaaaccacctgtaattttgtaccgtatgtgtctttccatcaaatgaccaacagcttctcaataaaaccagaccatttctcacctgca

SEQ ID NO: 721379 - DNA, 120 bp, Artificial Sequence
  ENSG00000197892_72 (sequence is synthesized)
gccgaacgagttcctcggcggctgcaggatgggggactccaaagtgaaagtggcggtgcggatacgacccatgaaccggcgagatttgactgtaaggagccagctgatacaatatggtca

SEQ ID NO: 721380 - DNA, 120 bp, Artificial Sequence
  ENSG00000197892_73 (sequence is synthesized)
cattggataagatcgcctgatatttcctggtgttatttaagcttcagatccctgtctgtgcctgccccaagtccagatcctttgtcctccatgcttttgggtagaattgacttccttttc

SEQ ID NO: 721381 - DNA, 120 bp, Artificial Sequence
  ENSG00000197892_74 (sequence is synthesized)
cattctctacctttgagtgtatgtatattttatctgctaggggaatatactctgcatctcacctggccctgacagttcatttcactcaactttcttccttcaaatctgtttaaattcttt

SEQ ID NO: 721382 - DNA, 120 bp, Artificial Sequence
  ENSG00000197892_75 (sequence is synthesized)
cttagaagtcttttctgattaatcttccccgaatgtctttttttccttccttatgctaccactctacaaccccttctccacaagttaggtgttcattttgcttatgttattttctacttg

SEQ ID NO: 721383 - DNA, 120 bp, Artificial Sequence
  ENSG00000197892_76 (sequence is synthesized)
gaatagcttgctctgtaaaactgctcattagttgtgtcatggtgtcatgtatatattcaggatcatactttttttggtataataaatttaataaaatgtagggggaaagtcccatcacaa

SEQ ID NO: 721384 - DNA, 120 bp, Artificial Sequence
  ENSG00000197892_77 (sequence is synthesized)
ggatgaatctgtcaaagaaaagtatgcaggtaatagaatccagcatcctgtcaactactgatggtgtagaagaggggttcagtattttttcccttacacgattgcttggcaaacccccca

SEQ ID NO: 721385 - DNA, 120 bp, Artificial Sequence
  ENSG00000197892_78 (sequence is synthesized)
aactgtgtgtttcctctgctgtcacaccacaataacagtcatcaacacagaagatgacttaatgtgaccaaatgttgggggagttttccctgcaccccaagcggcagacactggctgggt

SEQ ID NO: 721386 - DNA, 120 bp, Artificial Sequence
  ENSG00000197892_79 (sequence is synthesized)
gtcctctaactcagttccgatgctctctacctggggacagcgtcagatccacagactgagggctcagtcccacaagaccgctccctccttcccaccagcgcaggtccaggcctctagaac

SEQ ID NO: 721387 - DNA, 120 bp, Artificial Sequence
  ENSG00000197892_80 (sequence is synthesized)
ttctgacctactggcttccaattagggttcccacaacctcctctttgggtttgattaatttcctagagcggctcacagaactcagggaaacacttgtgtttaggggtttattacgaggga

SEQ ID NO: 721388 - DNA, 120 bp, Artificial Sequence
  ENSG00000197892_81 (sequence is synthesized)
ttttctttaaaggagacaggtaaacagccagatgaagagatacagagggtgagatctggaagggtcccaagcgcaggagcttctgtcctcatggaggtggcgcggcgccctcccggcgtg

SEQ ID NO: 721389 - DNA, 120 bp, Artificial Sequence
  ENSG00000197892_82 (sequence is synthesized)
tggatgagttcttaccttcctattgggccctgtgtgtttagcaatccagaagctctctgaacccagtccttttaggtttttatggaggcttccttatataggcatgattgtcaaccgatt

SEQ ID NO: 721390 - DNA, 120 bp, Artificial Sequence
  ENSG00000197892_83 (sequence is synthesized)
ctgtctgttcagacttttcttggccattctgtgtagcattccttcctttaggatatgaggcaagaccttgtggaatgagaagctcttgacccacaatcagatgagagtcttgcctccggc

SEQ ID NO: 721391 - DNA, 120 bp, Artificial Sequence
  ENSG00000197892_84 (sequence is synthesized)
aggtaaaaggagggcaggagatcagatagtttcctgaggctaaaatgccccaacatgtaaaagactgcaacaagggttaatgagccaggaactgcggatggtaacctacatctctataat

SEQ ID NO: 721392 - DNA, 120 bp, Artificial Sequence
  ENSG00000197892_85 (sequence is synthesized)
taccataggatatatatgagtaccataggattcttttgcataactgtagaaagtacagacaacaccctcccgtgtttgctattagagtttttaatgttgattggaaaatgggagattcac

SEQ ID NO: 721393 - DNA, 120 bp, Artificial Sequence
  ENSG00000197892_86 (sequence is synthesized)
tgtgtgccattcttggtatacgttgatgaaattacatcactagtacacacagtggctattccacattcacacgccccagctcttacatgaggccgggagcacaaggtcgccccttagatt

SEQ ID NO: 721394 - DNA, 120 bp, Artificial Sequence
  ENSG00000197892_87 (sequence is synthesized)
gccctggaggcctgagactgggctggagagacaggatggcatagtgaaagaaggggagcaccggccaaggagaaaaggaaccctaggctgcaggcccagccctgcttcttaccgcccctg

SEQ ID NO: 721395 - DNA, 120 bp, Artificial Sequence
  ENSG00000197892_88 (sequence is synthesized)
cgcctttcagtaaatcacctcacctgtcagagcttcagttttctctttttgatggaaaggaatatgccatattctctctaaattttcttttggctctggaagtctgttactctattattc

SEQ ID NO: 721396 - DNA, 120 bp, Artificial Sequence
  ENSG00000197892_89 (sequence is synthesized)
ttctaaatgatgactgtctcaagccccatctcaccacaagtttaggactgcagtgacagcctttgattgcctttattccttactgcttttgtcgcctgtttttaaacaatctcttttaaa

SEQ ID NO: 721397 - DNA, 120 bp, Artificial Sequence
  ENSG00000197892_90 (sequence is synthesized)
tattaagcatcatattgttttggcttctgttatgagaaagatgaatattatggctgttttgaagttaagattcatttggtctaggtggcccaatatcagaagtataagttaactggtatt

SEQ ID NO: 721398 - DNA, 120 bp, Artificial Sequence
  ENSG00000197893_0 (sequence is synthesized)
agacacatgcgtgctgagtgagtggccaaaatagccccttgagtaagtggcagctttaaaaaccatccaactgctgacttcaaactagaaggtcagcaaaggaaagtggaagttggattc

SEQ ID NO: 721399 - DNA, 120 bp, Artificial Sequence
  ENSG00000197893_1 (sequence is synthesized)
tgaaagatcgaggtgcccacaggaattttatggtcgtcggattttgaagacttgaactagactgggggttctccttgcatttcttgcctgttgcctatctttgtcctctctcttccggct

SEQ ID NO: 721400 - DNA, 120 bp, Artificial Sequence
  ENSG00000197893_2 (sequence is synthesized)
tcgagatgaatgtgcagccctgttctaggtgtgggtatggggtttatcctgccgagaagatcagctgtatagatcagatatggcataaagcctgttttcactgtgaagtttgcaagatga

SEQ ID NO: 721401 - DNA, 120 bp, Artificial Sequence
  ENSG00000197893_3 (sequence is synthesized)
tgctgtctgttaataactttgtgagtcaccagaaaaagccgtactgtcacgcccataaccctaagaacaacactttcaccagtgtctatcacactccattaaatctaaatgtgaggacat

SEQ ID NO: 721402 - DNA, 120 bp, Artificial Sequence
  ENSG00000197893_4 (sequence is synthesized)
ttccagaggccatcagtgggatccatgaccaagaagatggtgaacagtgtaaatcagtttttcactgggacatgaaatccaaggataaggaaggtgcacctaacaggcagccactggcaa

SEQ ID NO: 721403 - DNA, 120 bp, Artificial Sequence
  ENSG00000197893_5 (sequence is synthesized)
atgagagagcctattggactggatatggggaagggaatgcttggtgcccaggagctctgccagaccccgaaattgtaaggatggttgaggctcgaaagtctcttggtgaggaatatacag

SEQ ID NO: 721404 - DNA, 120 bp, Artificial Sequence
  ENSG00000197893_6 (sequence is synthesized)
aagactatgagcaacccaggggcaaggggagctttccagccatgatcacacctgcttatcaaagggccaagaaagccaaccagctggccagccaagtggagtataagagagggcatgatg

SEQ ID NO: 721405 - DNA, 120 bp, Artificial Sequence
  ENSG00000197893_7 (sequence is synthesized)
aacgcatctccaggttctccacggtggtggatactcctgagctgctacggagcaaggctggggcacagcttcaaagtgatgtgagatacacagaggactatgaacaacaaagagggaaag

SEQ ID NO: 721406 - DNA, 120 bp, Artificial Sequence
  ENSG00000197893_8 (sequence is synthesized)
gcagtttccctgcgatgatcacacccgcctatcagatagccaaaagagccaatgagctggcaagtgatgtgaggtaccatcaacaatatcaaaaagaaatgaggggaatggctggtccag

SEQ ID NO: 721407 - DNA, 120 bp, Artificial Sequence
  ENSG00000197893_9 (sequence is synthesized)
ccattggagctgagggcatcttgacaagggaatgtgcagaccaatatggccagggttacccggaggagtatgaggagcacaggggaaagggcagcttcccagctatgatcactccagcat

SEQ ID NO: 721408 - DNA, 120 bp, Artificial Sequence
  ENSG00000197893_10 (sequence is synthesized)
atcagaacgccaagaaagctcacgaactcgctagtgacataaaatacaggcaggacttcaataagatgaaaggcgctgcacattatcactcgcttccagctcaagacaacttggttctca

SEQ ID NO: 721409 - DNA, 120 bp, Artificial Sequence
  ENSG00000197893_11 (sequence is synthesized)
aacaggctcagagcgtaaacaaactcgtgagtgaggtggagtataagaaggatctggaaagtagtagaggtcacagtatcaactactgtgaaacacctcaattcaggaacgtgagcaaga

SEQ ID NO: 721410 - DNA, 120 bp, Artificial Sequence
  ENSG00000197893_12 (sequence is synthesized)
tctcaaaatttaccagtgataataaatataaagaaaactaccagaaccacatgagaggccgctatgaaggagttggtatggacagacgcactctgcatgctatgaaagttggcagcctgg

SEQ ID NO: 721411 - DNA, 120 bp, Artificial Sequence
  ENSG00000197893_13 (sequence is synthesized)
caagcaacgttgcctacaaagctgattataaacatgatattgtcgactacaactacccagccactctcacgccttcctatcaaacagctatgaaactggtgcccttgaaagatgccaatt

SEQ ID NO: 721412 - DNA, 120 bp, Artificial Sequence
  ENSG00000197893_14 (sequence is synthesized)
ataggcagagcatcgacaagttgaagtacagctcggtgactgacaccccacagattgttcaagccaaaatcaatgcccagcagctgagtcatgtgaattaccgtgctgactatgagaaaa

SEQ ID NO: 721413 - DNA, 120 bp, Artificial Sequence
  ENSG00000197893_15 (sequence is synthesized)
ataagttgaattacacattgccccaggatgttcctcagctggtgaaggccaaaaccaatgccaaactcttcagtgaggttaagtataaagaaggctgggagaagacaaaggggaaaggat

SEQ ID NO: 721414 - DNA, 120 bp, Artificial Sequence
  ENSG00000197893_16 (sequence is synthesized)
ttgagatgaagctggatgccatgtctctgctggccgccaaagcctctggggagcttgctagcaatattaaatataaagaagaatatgaaaagacaaaaggcaaagccatgggaacagccg

SEQ ID NO: 721415 - DNA, 120 bp, Artificial Sequence
  ENSG00000197893_17 (sequence is synthesized)
actctaggcttctgcactccctgcagattgctaagatgagcagtgaggttgaatataagaaaggctttgaagagagtaagacccggtttcacctgcccatggatatggtaaacatcaggc

SEQ ID NO: 721416 - DNA, 120 bp, Artificial Sequence
  ENSG00000197893_18 (sequence is synthesized)
atgctaagaaggcccaaactctcgccagtgacctggactacaggaagaaactgcatgaatacactgtgctgcctgaagatatgaagactcagtgggccaagaaggcctatgggctccaga

SEQ ID NO: 721417 - DNA, 120 bp, Artificial Sequence
  ENSG00000197893_19 (sequence is synthesized)
gcgagctgcagtacaaggctgacctggcatggatgaagggagttgggtggctgacagaggggagtctcaacttggaacaagccaagaaggctggacagctggtcagcgagaaaaactacc

SEQ ID NO: 721418 - DNA, 120 bp, Artificial Sequence
  ENSG00000197893_20 (sequence is synthesized)
ggcagagggtcgatgagctgaagttcaccagcgtgaccgacagctcccagatggagcacgccaagaagagccaggagctacagagcggggtggcctacaaggcaggaaatgagcagtctg

SEQ ID NO: 721419 - DNA, 120 bp, Artificial Sequence
  ENSG00000197893_21 (sequence is synthesized)
tccatcagtataccatcagcaaagacgagcctctcttcctgcaggcccgagccaatgctgcaaatctcagcgagaaactgtataagagcagctgggaaaaccagaaagcaaaagggtttg

SEQ ID NO: 721420 - DNA, 120 bp, Artificial Sequence
  ENSG00000197893_22 (sequence is synthesized)
agctgcgtcttgattccttgaccttcctggcagccaaagccaagagggacctggctagcgaggtgaagtacaaggaggattatgagagatccagagggaagctcattggggcaaaagatg

SEQ ID NO: 721421 - DNA, 120 bp, Artificial Sequence
  ENSG00000197893_23 (sequence is synthesized)
agtacaagaagggattcgaggacaccaaatcccaatgccacgtctccctggacatggtccacctcgtgcatgcccgcaaagctcagcatttagccacagacgtaggctacaagacagcgg

SEQ ID NO: 721422 - DNA, 120 bp, Artificial Sequence
  ENSG00000197893_24 (sequence is synthesized)
aacatcactttacggctttgcccacagacatgaaggtggaatgggccaagaaggcttatggcttacagagtgataaccaatacagggcagatgtgaagtggatgaaaggcatgggctggg

SEQ ID NO: 721423 - DNA, 120 bp, Artificial Sequence
  ENSG00000197893_25 (sequence is synthesized)
tcgccaccgggtcattaaatgtggagcaggcgaagaaggcaggagaactcattagcgagaagaagtaccgtcagcatccagatgctttgaagtttaccagtattaaagacactccggaga

SEQ ID NO: 721424 - DNA, 120 bp, Artificial Sequence
  ENSG00000197893_26 (sequence is synthesized)
tggtccaggccagaattagttatacccaagcagtggatagattatacagggaacaaggagaaaacataaagcatcattacacaccgactgctgacctccctgaagtcctgctggccaagc

SEQ ID NO: 721425 - DNA, 120 bp, Artificial Sequence
  ENSG00000197893_27 (sequence is synthesized)
tgaatgccatgaatatcagtgagacgcgttataaggaatcctggagcaaacttcgagatggtggctataaactgaggttggatgcccttccattccaagcagcaaaggcttctggtgaaa

SEQ ID NO: 721426 - DNA, 120 bp, Artificial Sequence
  ENSG00000197893_28 (sequence is synthesized)
tcataagtgattacaaatacaaagaggcatttgagaaaatgaaaggacagatgcttggttcccggagcttggaagatgatatcagccttgcacattcagtgtatgcgacctcactgcaga

SEQ ID NO: 721427 - DNA, 120 bp, Artificial Sequence
  ENSG00000197893_29 (sequence is synthesized)
gtgatgtgaattacaagaaaggctttgaacactcaaaggcgcagttccatctgccgttggacatggccgccctggtgcatgccaagaaggctcagaccctggccagcaatcaggactaca

SEQ ID NO: 721428 - DNA, 120 bp, Artificial Sequence
  ENSG00000197893_30 (sequence is synthesized)
aacatccactgccccagtacacttccttggcagaagacctgaggctgagctgtgccaagaaagctcacaaattgcagagtgagaatttgtaccggtcagacctgaactttatgcgaggtg

SEQ ID NO: 721429 - DNA, 120 bp, Artificial Sequence
  ENSG00000197893_31 (sequence is synthesized)
ttgcatgtgtcattccaggcacgttagagattgaagggaggaagaaagcatcggaactcatcagtgagagtaaatatcggcagcatccccactcattcaagtacacagctgtgacagaca

SEQ ID NO: 721430 - DNA, 120 bp, Artificial Sequence
  ENSG00000197893_32 (sequence is synthesized)
ctcccaacctccttcatgcgaaattcagcaaccagataacgaatgagcgcctctataaagcagctggagaggatgcaagacacgagtatacaatgaccctgggtctgcccgagttcatcc

SEQ ID NO: 721431 - DNA, 120 bp, Artificial Sequence
  ENSG00000197893_33 (sequence is synthesized)
gagcaaaaacgaatgcagccaacctgagtgacgcaagatacaaagagtcctggcgtaatcttcgtgctcaaggctacaagctgacaatagaagcgctccccttccaggctgcccgggcct

SEQ ID NO: 721432 - DNA, 120 bp, Artificial Sequence
  ENSG00000197893_34 (sequence is synthesized)
ctggagatatagccagtgattttctctacagacatgactttgtgaaggagcgagggaaactcatagggccccagagtgtaagagacgacccccggatccagcactgccggcgcatgggcc

SEQ ID NO: 721433 - DNA, 120 bp, Artificial Sequence
  ENSG00000197893_35 (sequence is synthesized)
agctgcagagcgagcttcagtacaggaggggggcgaccagcagccaagcccagttccatctgcccatggacatggtgcacctggtccatgccaagaatgcccaggctctggccagcgacc

SEQ ID NO: 721434 - DNA, 120 bp, Artificial Sequence
  ENSG00000197893_36 (sequence is synthesized)
acgactacaggacacagtatcacaagttcacagcactgcccgaggacctgaagatggcctgggccaagaaagcccatgccctgcagagtgagttgcgctacaagtcagacctgatcggca

SEQ ID NO: 721435 - DNA, 120 bp, Artificial Sequence
  ENSG00000197893_37 (sequence is synthesized)
tgaagggcataggatggctggcgctgagatccccacagatggagagtgcaaagaaggctggagaactcatcagcgagaccaagtaccgtaaaaaaccagacagtatcaagttcaccacag

SEQ ID NO: 721436 - DNA, 120 bp, Artificial Sequence
  ENSG00000197893_38 (sequence is synthesized)
tggttgactccccagacctggttcatgccaagaacagctatatgcactgcaatgagcgcatgtatagatctggagatgcagaatccctgcacagatacaccctgatccccgaccatcccg

SEQ ID NO: 721437 - DNA, 120 bp, Artificial Sequence
  ENSG00000197893_39 (sequence is synthesized)
atttcacccgagctcgcctcaatgcgctgcatctgagtgacaaagtctacagaaactcctgggagcagacccgggctggcagttatgacttcaggctggatgccatccccttccagactg

SEQ ID NO: 721438 - DNA, 120 bp, Artificial Sequence
  ENSG00000197893_40 (sequence is synthesized)
cccgggcatctagggagatcgccagtgatttccggtacaaagaggctttcctgcgggaccgaggcctgcagatcgggtaccgcagtgtcgacgatgacccaaggatgaagcatttcctca

SEQ ID NO: 721439 - DNA, 120 bp, Artificial Sequence
  ENSG00000197893_41 (sequence is synthesized)
acgttggcaggctccagagtgacaatgagtacaagaaggactttgccaagagtcggtcccagtttcacagcagcacagaccagcccggcctccttcaggccaagaggagccagcagctgg

SEQ ID NO: 721440 - DNA, 120 bp, Artificial Sequence
  ENSG00000197893_42 (sequence is synthesized)
ccagtgatgtgcactacaggcagcccctgccccagcccacctgcgacccggagcagctgggcctcaggcatgctcagaaggcccaccagctgcagagtgatgtcaagtataaatcagact

SEQ ID NO: 721441 - DNA, 120 bp, Artificial Sequence
  ENSG00000197893_43 (sequence is synthesized)
tgaacctgaccagaggtgttggctggacccctcctggctcctacaaagtggaaatggctcggcgggctgcggaactggccaacgcaaggggcctgggtctccagggagcttaccgggggg

SEQ ID NO: 721442 - DNA, 120 bp, Artificial Sequence
  ENSG00000197893_44 (sequence is synthesized)
cagaagcagtggaggctggagatcatcagagtggggaggtgaacccagatgccactgagattctgcacgtcaaaaagaagaaggccctgctgttgtgagccatgtccaccctgattcctg

SEQ ID NO: 721443 - DNA, 120 bp, Artificial Sequence
  ENSG00000197893_45 (sequence is synthesized)
agaggccagagaggaagtttgttcaccagagacaggcttcagatggctttgatttcggcaagctggaatggcccaccagcccatcccagatcttcctttattaaaataataactctgaaa

SEQ ID NO: 721444 - DNA, 120 bp, Artificial Sequence
  ENSG00000197894_0 (sequence is synthesized)
agccccccgcgccgaccagaatccgtgaacatggcgaacgaggttatcaagtgcaaggctgcagttgcttgggaggctggaaagcctctctccatagaggagatagaggtggcaccccca

SEQ ID NO: 721445 - DNA, 120 bp, Artificial Sequence
  ENSG00000197894_1 (sequence is synthesized)
aaggctcatgaagttcgaatcaagatcattgccactgcggtttgccacaccgatgcctataccctgagtggagctgatcctgagggttgttttccagtgatcttgggacatgaaggtgct

SEQ ID NO: 721446 - DNA, 120 bp, Artificial Sequence
  ENSG00000197894_2 (sequence is synthesized)
ggaattgtggaaagtgttggtgagggagttactaagctgaaggcgggtgacactgtcatcccactttacatcccacagtgtggagaatgcaaattttgtctaaatcctaaaactaacctt

SEQ ID NO: 721447 - DNA, 120 bp, Artificial Sequence
  ENSG00000197894_3 (sequence is synthesized)
tgccagaagataagagtcactcaagggaaaggattaatgccagatggtaccagcagatttacttgcaaaggaaagacaattttgcattacatgggaaccagcacattttctgaatacaca

SEQ ID NO: 721448 - DNA, 120 bp, Artificial Sequence
  ENSG00000197894_4 (sequence is synthesized)
gttgtggctgatatctctgttgctaaaatagatcctttagcacctttggataaagtctgccttctaggttgtggcatttcaaccggttatggtgctgctgtgaacactgccaagttggag

SEQ ID NO: 721449 - DNA, 120 bp, Artificial Sequence
  ENSG00000197894_5 (sequence is synthesized)
cctggctctgtttgtgccgtctttggtctgggaggagtcggattggcagttatcatgggctgtaaagtggctggtgcttcccggatcattggtgtggacatcaataaagataaatttgca

SEQ ID NO: 721450 - DNA, 120 bp, Artificial Sequence
  ENSG00000197894_6 (sequence is synthesized)
agggccaaagagtttggagccactgaatgtattaaccctcaggattttagtaaacccatccaggaagtgctcattgagatgaccgatggaggagtggactattcctttgaatgtattggt

SEQ ID NO: 721451 - DNA, 120 bp, Artificial Sequence
  ENSG00000197894_7 (sequence is synthesized)
aatgtgaaggtcatgagagcagcacttgaggcatgtcacaagggctggggcgtcagcgtcgtggttggagtagctgcttcaggtgaagaaattgccactcgtccattccagctggtaaca

SEQ ID NO: 721452 - DNA, 120 bp, Artificial Sequence
  ENSG00000197894_8 (sequence is synthesized)
ggtcgcacatggaaaggcactgcctttggaggatggaagagtgtagaaagtgtcccaaagttggtgtctgaatatatgtccaaaaagataaaagttgatgaatttgtgactcacaatctg

SEQ ID NO: 721453 - DNA, 120 bp, Artificial Sequence
  ENSG00000197894_9 (sequence is synthesized)
tcttttgatgaaatcaacaaagcctttgaactgatgcattctggaaagagcattcgaactgttgtaaagatttaattcaaaagagaaaaataatgtccatcctgtcgtgatgtgatagga

SEQ ID NO: 721454 - DNA, 120 bp, Artificial Sequence
  ENSG00000197894_10 (sequence is synthesized)
ggttatgtgtgtcattcatgaatctctataatcaaggacaaggataattcagtcatgaacctgttttctggatgctcctccacataaataattgctagtttattaaggaatattttaaca

SEQ ID NO: 721455 - DNA, 120 bp, Artificial Sequence
  ENSG00000197894_11 (sequence is synthesized)
taataaaagtaatttctacatttgtgtggaaattgtcttgttttatgctgtcatcattgtcacggtttgtctgcccattatcttcattctgcaagggaaagggaaaggaagcagggcagt

SEQ ID NO: 721456 - DNA, 120 bp, Artificial Sequence
  ENSG00000197894_12 (sequence is synthesized)
ggtgggtgtctgaaacctcagaaacataacgttgaacttttaagggtctcagtccccgttgattaaagaacagatcctagccatcagtgacaaagttaatcaggacccaagtctgcttct

SEQ ID NO: 721457 - DNA, 120 bp, Artificial Sequence
  ENSG00000197894_13 (sequence is synthesized)
gtgatattatcttgaagggaggtactgtgccttgttcatacctgtaccccaaattcctaggatggcatctgcccttcagggggcactaaaatgtattattgaaacagcattctgggctta

SEQ ID NO: 721458 - DNA, 120 bp, Artificial Sequence
  ENSG00000197894_14 (sequence is synthesized)
aataggtgtatgtatgtgttggttgtgactgtactatttctagtatagtgaactacatactgaatatccaagttctcagcacctacttttgtcaaatcttaacattttgccacttcgaga

SEQ ID NO: 721459 - DNA, 120 bp, Artificial Sequence
  ENSG00000197894_15 (sequence is synthesized)
tcacattgccattcctcccctccagaggtaacaattatccacaatttgatgtttatcattcctgtgttgttgtactttcactgtgtataacctaaaccatctactctttagtactgtttt

SEQ ID NO: 721460 - DNA, 120 bp, Artificial Sequence
  ENSG00000197894_16 (sequence is synthesized)
atatatttttaagcctcatacttgctcattctacagcttttttcactcattattgtataattatatctgaagctctcgttcattaattttagtcctgtgtagcagaattcaattacggga

SEQ ID NO: 721461 - DNA, 120 bp, Artificial Sequence
  ENSG00000197894_17 (sequence is synthesized)
actaccataatttatctgttctccagttgaaggcatgaagttgttgccagtttctgtattataacactgtagtggaacattcttctgcattgggctcactgcgtgttacctaagacgtat

SEQ ID NO: 721462 - DNA, 120 bp, Artificial Sequence
  ENSG00000197894_18 (sequence is synthesized)
cacagaataaacacatttagccttatagacattgccaaattgctcttcaaagtaaatgtgagtttttgtgaattacatgagtatggaatggtgttttattatgactttagtttgcatttt

SEQ ID NO: 721463 - DNA, 120 bp, Artificial Sequence
  ENSG00000197894_19 (sequence is synthesized)
cctcaattctcgttaaatccttcattctaatggacattttattgtgaagaacctgttcatatcctgtgctcaactttgtattgaattatttttctctgaataatttttaggagttctttt

SEQ ID NO: 721464 - DNA, 120 bp, Artificial Sequence
  ENSG00000197894_20 (sequence is synthesized)
attctagacatcaatcatttgtcagttttatatgttgcaaatatcttctagtctatcttgtgacttttctttttactttatggtattttgttgaataaagttttaatgtagtcacataaa

SEQ ID NO: 721465 - DNA, 120 bp, Artificial Sequence
  ENSG00000197894_21 (sequence is synthesized)
gcaaaccataaatatactgacttttcttacagataaaagagaaactaaaggggtgtgcccagtatcaccagccgttaagatataaaacagaattttctgtacccattctcttcacataac

SEQ ID NO: 721466 - DNA, 120 bp, Artificial Sequence
  ENSG00000197894_22 (sequence is synthesized)
aatttttctagtgaaagaaggggaaaatatctatttgaactacaatgggaaatgatacaagaacagctcagggaaggatgagaaaagatgtttctttgcctttcaatgcctgctaagtgc

SEQ ID NO: 721467 - DNA, 120 bp, Artificial Sequence
  ENSG00000197894_23 (sequence is synthesized)
atgtctcatgaaatgaaaagacagaataaagcagttgtgcagagcatgatctttggaatcaaatacacatccacttactaactcagtgaccctgaacaaacagcttctctcaacctcagt

SEQ ID NO: 721468 - DNA, 120 bp, Artificial Sequence
  ENSG00000197894_24 (sequence is synthesized)
ttcctcatctgtaaaatgcaggtacaggttgaacatctatccctaatccaaaaatccaaaatgctccaaaatctgaaactttgagcaccaacatgatgctcaaagaaaatgctcattggg

SEQ ID NO: 721469 - DNA, 120 bp, Artificial Sequence
  ENSG00000197894_25 (sequence is synthesized)
gcatttcagattaggaatgctcagctaataaatacgatgcaaatattccaaatccgaaaaaacccaaaattcaaaacactctggtcccaagcatctcagataaaagataatcaacctgta

SEQ ID NO: 721470 - DNA, 120 bp, Artificial Sequence
  ENSG00000197894_26 (sequence is synthesized)
gtaacaacacctacttaaacctacatagacactcagtaaaagtattactattaattctgctgcctgctttttaaaattaaatcttttagagttttgaactacagtttactttttaaaata

SEQ ID NO: 721471 - DNA, 120 bp, Artificial Sequence
  ENSG00000197894_27 (sequence is synthesized)
acagtttactttttaaaatagaaagcaaataaacacttcaaattattttaatttatgttaatatttaaccaggttaatttgttaaaataaattgttcaggccgggcatggtggctcacac

SEQ ID NO: 721472 - DNA, 120 bp, Artificial Sequence
  ENSG00000197894_28 (sequence is synthesized)
ttgggaggccaaggcaggtggatacttgaggccagccagggcaacatgacgaaaccccgtctcaactagaaatacgaaaattagctgggtgtcgtggcgcacgcctgtaatcccagctac

SEQ ID NO: 721473 - DNA, 80 bp, Artificial Sequence
  ENSG00000197894_29 (sequence is synthesized)
cattgccatgagccaggatcatgcactacactccagcctgggtgccagagggagactcttatctcaaaaaaaaaaaaaac

SEQ ID NO: 721474 - DNA, 120 bp, Artificial Sequence
  ENSG00000197894_30 (sequence is synthesized)
atgtaataatgatgttgagtttgaggggatggagagtcgaaaaacacaattttagttgtcttaaaggtatcatttaaaacttagtatgttgcttccttttacagcattcgaactgttgta

SEQ ID NO: 721475 - DNA, 120 bp, Artificial Sequence
  ENSG00000197894_31 (sequence is synthesized)
agccggtggtattcagaacagcctgagcaaaagaatttcttcaggcatatgttaagcatgcagatttcttggaccccatgccagacctgctgaatcagattctctcggaacttgtgttct

SEQ ID NO: 721476 - DNA, 120 bp, Artificial Sequence
  ENSG00000197894_32 (sequence is synthesized)
taacctgcttttgcatatgcactgtagaaggccattaaatatttgatgagtacaactttttaaccaaaagatacttttctatctgaccaggttatcaagtgcaaggctgcagttgcttgg

SEQ ID NO: 721477 - DNA, 120 bp, Artificial Sequence
  ENSG00000197894_33 (sequence is synthesized)
ttttctgataaaactacccactatttatgaataggtatcatctaagtagattgtcaagattaagttgattcctcatctgggaagcacaaatatttggatatttttttctctctgattttg

SEQ ID NO: 721478 - DNA, 120 bp, Artificial Sequence
  ENSG00000197894_34 (sequence is synthesized)
cagactactgtttttgtgaaacttttctaagtacatttccaaaaccaattttggcatattaagcaagaatttttagagatgcatcaatgaagcaggattttgaagcatataacttcattg

SEQ ID NO: 721479 - DNA, 120 bp, Artificial Sequence
  ENSG00000197894_35 (sequence is synthesized)
gagagggtacctgggcacagcaacagccttctctaccatttgcggttttctgcctaattgtgcaactgaagaaacatttatttttcacatgaggaaatgtgtagcttgtagaggtggctg

SEQ ID NO: 721480 - DNA, 120 bp, Artificial Sequence
  ENSG00000197894_36 (sequence is synthesized)
atttaagtaacttgtgcagctctcaaggggtgtctgccttctgtctcctttctaccccataaaagaaagaagcggggggatgtgaagagaccaggggagtgactccaccttatgcctcac

SEQ ID NO: 721481 - DNA, 120 bp, Artificial Sequence
  ENSG00000197901_0 (sequence is synthesized)
caagggtcaggtctccagcagaccctgaaagctgagctgccctgacccccaaagtgaggagaagctgcaagggaaaagggagggacagatcagggagaccggggaagaaggaggagcagc

SEQ ID NO: 721482 - DNA, 120 bp, Artificial Sequence
  ENSG00000197901_1 (sequence is synthesized)
caaggaggctgctgtccccccacagagcagctcggactcagctcccggagcaacccagctgcggaggcaacggcagtgctgctcctccagcgaaggacagcaggcaggcagacagacaga

SEQ ID NO: 721483 - DNA, 120 bp, Artificial Sequence
  ENSG00000197901_2 (sequence is synthesized)
ggtcctgggactggaaggcctcagcccccagccactgggctgggcctggcccaatggcctttaatgacctcctgcagcaggtggggggtgtcggccgcttccagcagatccaggtcaccc

SEQ ID NO: 721484 - DNA, 120 bp, Artificial Sequence
  ENSG00000197901_3 (sequence is synthesized)
tggtggtcctccccctgctcctgatggcttctcacaacaccctgcagaacttcactgctgccatccctacccaccactgccgcccgcctgccgatgccaacctcagcaagaacggggggc

SEQ ID NO: 721485 - DNA, 120 bp, Artificial Sequence
  ENSG00000197901_4 (sequence is synthesized)
tggaggtctggctgccccgggacaggcaggggcagcctgagtcctgcctccgcttcacctccccgcagtggggactgccctttctcaatggcacagaagccaatggcacaggggccacag

SEQ ID NO: 721486 - DNA, 120 bp, Artificial Sequence
  ENSG00000197901_5 (sequence is synthesized)
agccctgcaccgatggctggatctatgacaacagcaccttcccatctaccatcgtgactgagtgggaccttgtgtgctctcacagggccctacgccagctggcccagtccttgtacatgg

SEQ ID NO: 721487 - DNA, 120 bp, Artificial Sequence
  ENSG00000197901_6 (sequence is synthesized)
tgggggtgctgctcggagccatggtgttcggctaccttgcagacaggctaggccgccggaaggtactcatcttgaactacctgcagacagctgtgtcagggacctgcgcagccttcgcac

SEQ ID NO: 721488 - DNA, 120 bp, Artificial Sequence
  ENSG00000197901_7 (sequence is synthesized)
ccaacttccccatctactgcgccttccggctcctctcgggcatggctctggctggcatctccctcaactgcatgacactgaatgtggagtggatgcccattcacacacgggcctgcgtgg

SEQ ID NO: 721489 - DNA, 120 bp, Artificial Sequence
  ENSG00000197901_8 (sequence is synthesized)
tttttttgccttcttcatctactcctggttcttcattgagtcggcccgctggcactcctcctccgggaggctggacctcaccctgagggccctgcagagagtcgcccggatcaatgggaa

SEQ ID NO: 721490 - DNA, 120 bp, Artificial Sequence
  ENSG00000197901_9 (sequence is synthesized)
gcgggaagaaggagccaaattgagtatggaggtactccgggccagtctgcagaaggagctgaccatgggcaaaggccaggcatcggccatggagctgctgcgctgccccaccctccgcca

SEQ ID NO: 721491 - DNA, 120 bp, Artificial Sequence
  ENSG00000197901_10 (sequence is synthesized)
cctcttcctctgcctctccatgctgtggtttgccactagctttgcatactatgggctggtcatggacctgcagggctttggagtcagcatctacctaatccaggtgatctttggtgctgt

SEQ ID NO: 721492 - DNA, 120 bp, Artificial Sequence
  ENSG00000197901_11 (sequence is synthesized)
ggacctgcctgccaagcttgtgggcttccttgtcatcaactccctgggtcgccggcctgcccagatggctgcactgctgctggcaggcatctgcatcctgctcaatggggtgatacccca

SEQ ID NO: 721493 - DNA, 120 bp, Artificial Sequence
  ENSG00000197901_12 (sequence is synthesized)
ggaccagtccattgtccgaacctctcttgctgtgctggggaagggttgtctggctgcctccttcaactgcatcttcctgtatactggggaactgtatcccacaatgatccggcagacagg

SEQ ID NO: 721494 - DNA, 120 bp, Artificial Sequence
  ENSG00000197901_13 (sequence is synthesized)
catgggaatgggcagcaccatggcccgagtgggcagcatcgtgagcccactggtgagcatgactgccgagctctacccctccatgcctctcttcatctacggtgctgttcctgtggccgc

SEQ ID NO: 721495 - DNA, 120 bp, Artificial Sequence
  ENSG00000197901_14 (sequence is synthesized)
cagcgctgtcactgtcctcctgccagagaccctgggccagccactgccagacacggtgcaggacctggagagcaggaaagggaaacagacgcgacagcaacaagagcaccagaagtatat

SEQ ID NO: 721496 - DNA, 120 bp, Artificial Sequence
  ENSG00000197901_15 (sequence is synthesized)
ggtcccactgcaggcctcagcacaagagaagaatggactctgaggactgagaaggggccttacagaaccctaaagggagggaaggtcctacaggtctccggccacccacacaaggaggag

SEQ ID NO: 721497 - DNA, 120 bp, Artificial Sequence
  ENSG00000197901_16 (sequence is synthesized)
gaagaggaaatggtgacccaagtgtgggggttgtggttcaggaaagcatcttcccaggggtccacctccctttataaaccccaccagaaccacatcattaaaaggtttgactgcgcacca

SEQ ID NO: 721498 - DNA, 120 bp, Artificial Sequence
  ENSG00000197901_17 (sequence is synthesized)
agctgggctcagggtgtctaggtgggagcttggcattgccagccggcgctggtttgaggatctacagcaccagcctcatacttcagaggtcctcaaaaggccccagcccaggcatcatcc

SEQ ID NO: 721499 - DNA, 120 bp, Artificial Sequence
  ENSG00000197901_18 (sequence is synthesized)
gcaggacctggagagcaggtggaaagagaaactggggcagcagcaacaggaacagcagatggtcccactccaagcctcctgaggactgagaaggagcagagggtggagaggaggagccct

SEQ ID NO: 721500 - DNA, 120 bp, Artificial Sequence
  ENSG00000197901_19 (sequence is synthesized)
ggccagccactgccagacacggtgcaggacctggagagcaggtgggcccccactcagaaagaagcagggatatatcccaggaaagggaaacagacgcgacagcaacaagagcaccagaag

SEQ ID NO: 721501 - DNA, 120 bp, Artificial Sequence
  ENSG00000197903_0 (sequence is synthesized)
atgccggaaccagcgaagtccgctcccgcgcccaagaagggctcgaagaaagccgtgactaaggcgcagaagaaggacggcaagaagcgcaagcgcagccgcaaggagagctactccgta

SEQ ID NO: 721502 - DNA, 120 bp, Artificial Sequence
  ENSG00000197903_1 (sequence is synthesized)
caggtccaccccgacaccggcatctcctctaaggccatgggaatcatgaactccttcgtcaacgacatcttcgaacgcatcgcgggtgaggcttcccgcctggcgcattacaacaagcgc

SEQ ID NO: 721503 - DNA, 85 bp, Artificial Sequence
  ENSG00000197903_2 (sequence is synthesized)
gcgcctgctgctgcccggggagttggccaagcacgccgtgtccgagggcaccaaggccgtcaccaagtacaccagcgctaagtaa

SEQ ID NO: 721504 - DNA, 120 bp, Artificial Sequence
  ENSG00000197905_0 (sequence is synthesized)
attccgcgcattccagcgtcctcctcgcacactcgaggccagggggcgggagggccgcagctccggcgccgccgcgtcccgccagaacgatcgccgcggccggaagagttggcgctcggg

SEQ ID NO: 721505 - DNA, 120 bp, Artificial Sequence
  ENSG00000197905_1 (sequence is synthesized)
gcggactccttggaactggcttagcgcacccatcccaccttcccgcaccctgggaccggtccaacgagcgctcctccaagcggagccttggagggcacggccggcaccattacctccaac

SEQ ID NO: 721506 - DNA, 120 bp, Artificial Sequence
  ENSG00000197905_2 (sequence is synthesized)
gagtggagctctcccacctcccctgaggggagcaccgcctctgggggcagtcaggcactggacaagcccatcgacaatgacgcagagggcgtgtggagcccggatattgagcagagtttc

SEQ ID NO: 721507 - DNA, 120 bp, Artificial Sequence
  ENSG00000197905_3 (sequence is synthesized)
caggaggccctcgccatctacccgccctgtggcaggcgcaaaatcatcctgtcggacgagggcaagatgtatggtcggaacgagctgattgcccgctacatcaagctccggacagggaag

SEQ ID NO: 721508 - DNA, 120 bp, Artificial Sequence
  ENSG00000197905_4 (sequence is synthesized)
acccgcaccaggaagcaggtctccagccacatccaggtgctggctcgtcgcaaagctcgcgagatccaggccaagctaaaggaccaggcagctaaggacaaggccctgcagagcatggct

SEQ ID NO: 721509 - DNA, 120 bp, Artificial Sequence
  ENSG00000197905_5 (sequence is synthesized)
gccatgtcgtctgcacagatcatctccgccacggccttccacagtagcatggccctcgcccggggccccggccgcccagcagtctcagggttttggcaaggagctttgccaggccaagcc

SEQ ID NO: 721510 - DNA, 120 bp, Artificial Sequence
  ENSG00000197905_6 (sequence is synthesized)
ggaacgtcccatgatgtgaagcctttctctcagcaaacctatgctgtccagcctccgctgcctctgccagggtttgagtctcctgcagggcccgccccatcgccctctgcgcccccggca

SEQ ID NO: 721511 - DNA, 120 bp, Artificial Sequence
  ENSG00000197905_7 (sequence is synthesized)
tccaagctctggatgttggagttctctgccttcctggagcagcagcaggacccggacacgtacaacaagcacctgttcgtgcacattggccagtccagcccaagctacagcgacccctac

SEQ ID NO: 721512 - DNA, 120 bp, Artificial Sequence
  ENSG00000197905_8 (sequence is synthesized)
ctcgaagccgtggacatccgccaaatctatgacaaattcccggagaaaaagggtggactcaaggatctcttcgaacggggaccctccaatgccttttttcttgtgaagttctgggcagac

SEQ ID NO: 721513 - DNA, 120 bp, Artificial Sequence
  ENSG00000197905_9 (sequence is synthesized)
ctcaacaccaacatcgaggatgaaggcagctccttctatggggtctccagccagtatgagagccccgagaacatgatcatcacctgctccacgaaggtctgctctttcggcaagcaggtg

SEQ ID NO: 721514 - DNA, 120 bp, Artificial Sequence
  ENSG00000197905_10 (sequence is synthesized)
gtggagaaagttgagacagagtatgctcgctatgagaatggacactactcttaccgcatccaccggtccccgctctgtgagtacatgatcaacttcatccacaagctcaagcacctccct

SEQ ID NO: 721515 - DNA, 120 bp, Artificial Sequence
  ENSG00000197905_11 (sequence is synthesized)
gagaagtacatgatgaacagcgtgctggagaacttcaccatcctgcaggtggtcaccaacagagacacacaggagaccttgctgtgcattgcctatgtctttgaggtgtcagccagtgag

SEQ ID NO: 721516 - DNA, 120 bp, Artificial Sequence
  ENSG00000197905_12 (sequence is synthesized)
cacggggctcagcaccacatctacaggctggtgaaagaatgagagactcggggagcagggaggggggaagagacgtgtgtgcaggaaacggggacgtggggaggggacctgcaggggcag

SEQ ID NO: 721517 - DNA, 120 bp, Artificial Sequence
  ENSG00000197905_13 (sequence is synthesized)
ccccctgaagtgccaagagagctgagaggagcagttgtgactctacccaggaacaaactgtgcctgaacctgaggtgcccaaccccaaataaacccaagatgctgtgtattttcagagga

SEQ ID NO: 721518 - DNA, 120 bp, Artificial Sequence
  ENSG00000197905_14 (sequence is synthesized)
ttggaactggcttagcgcacccatcccaccttcccgcaccctgggaccggtaaggctggggcgcggggacttggtaggactttgccggagggcaggagtctgcgcggtgcgtgcggagct

SEQ ID NO: 721519 - DNA, 120 bp, Artificial Sequence
  ENSG00000197905_15 (sequence is synthesized)
acactcgggactttgggggaaagggaggccggtgtggaaaggaccggagaggcagaaccgagagcatcggcaacagaagagacccagcacccatgcctcttttctgctgggcccttttcg

SEQ ID NO: 721520 - DNA, 120 bp, Artificial Sequence
  ENSG00000197905_16 (sequence is synthesized)
agcctggaagggagagacctggaggtccaacgagcgctcctccaagcggagccttggagggcacggccggcaccattacctccaacgagtggagctctcccacctcccctgaggggagca

SEQ ID NO: 721521 - DNA, 120 bp, Artificial Sequence
  ENSG00000197905_17 (sequence is synthesized)
agggaagacccgcaccaggaagcaggtctccagccacatccaggtgctggctcgtcgcaaagctcgcgagatccaggccaagctaaagacaggtgctgagctaggcacctgtggtagaga

SEQ ID NO: 721522 - DNA, 80 bp, Artificial Sequence
  ENSG00000197905_18 (sequence is synthesized)
ccccgccttcactgcgccgcccgtcggccccggccggagcccggctctgcgcgctgacgccctgtcgtccccgcagaacg

SEQ ID NO: 721523 - DNA, 120 bp, Artificial Sequence
  ENSG00000197912_0 (sequence is synthesized)
cgaccacgcagccacgacccggccggttattcacccgccaggccctgggaatacaaggccggcttcaaaaaaaccagggcacccgcgacctcctcgcagacgcgcgcccccatacccggg

SEQ ID NO: 721524 - DNA, 120 bp, Artificial Sequence
  ENSG00000197912_1 (sequence is synthesized)
cccatacccgggcctcaggcagccacgaggtagacgggctcaggctcgggggtgcggcaagcggcacccgggcgcggcggggcgcagctgtggggaccgcgcaggcgccacgtcagaccc

SEQ ID NO: 721525 - DNA, 120 bp, Artificial Sequence
  ENSG00000197912_2 (sequence is synthesized)
cgcgcaggcgccgtgtagcgccccgcggatcacgcaggcgcggctttcaggccaacatggccgtgctgctgctgctgctccgtgccctccgccggggtccaggcccgggtcctcggccgc

SEQ ID NO: 721526 - DNA, 120 bp, Artificial Sequence
  ENSG00000197912_3 (sequence is synthesized)
gggcccaggcccggcctggagtccagggttccccgccaggcccgggagggggcggccgtacatggccagcaggcctccgggggacctcgccgaggctggaggccgagctctgcagagctt

SEQ ID NO: 721527 - DNA, 120 bp, Artificial Sequence
  ENSG00000197912_4 (sequence is synthesized)
gcttacaattgagactgctaacccctacctttgaagggatcaacggattgttgttgaaacaacatttagttcagaatccagtcagactctggcaacttttaggtggtactttctatttta

SEQ ID NO: 721528 - DNA, 120 bp, Artificial Sequence
  ENSG00000197912_5 (sequence is synthesized)
acacctcaaggttgaagcagaagaataaggagaaggataagtcgaaggggaaggcgcctgaagaggacgaagaggagaggagacgccgtgagcgggacgaccagatgtaccgagagcggc

SEQ ID NO: 721529 - DNA, 120 bp, Artificial Sequence
  ENSG00000197912_6 (sequence is synthesized)
tgcgcaccttgctggtcatcgcggttgtcatgagcctcctgaatgctctcagcaccagcggaggcagcatttcctggaacgactttgtccacgagatgctggccaagggcgaggtgcagc

SEQ ID NO: 721530 - DNA, 120 bp, Artificial Sequence
  ENSG00000197912_7 (sequence is synthesized)
gcgtccaggtggtgcctgagagcgacgtggtggaagtctacctgcaccctggagccgtggtgtttgggcggcctcggctagccttgatgtaccgaatgcaggttgcaaatattgacaagt

SEQ ID NO: 721531 - DNA, 120 bp, Artificial Sequence
  ENSG00000197912_8 (sequence is synthesized)
ttgaagagaagcttcgagcagctgaagatgagctgaatatcgaggccaaggacaggatcccagtttcctacaagcgaacaggattctttggaaatgccctgtactctgtggggatgacgg

SEQ ID NO: 721532 - DNA, 120 bp, Artificial Sequence
  ENSG00000197912_9 (sequence is synthesized)
cagtgggcctggccatcctgtggtatgttttccgtctggccgggatgactggaagggaaggtggattcagtgcttttaatcagcttaaaatggctcgtttcaccattgtggatgggaaga

SEQ ID NO: 721533 - DNA, 120 bp, Artificial Sequence
  ENSG00000197912_10 (sequence is synthesized)
tggggaaaggagtcagcttcaaagacgtggcaggaatgcacgaagccaaactggaagtccgcgagtttgtggattatctgaagagcccagaacgcttcctccagcttggcgccaaggtcc

SEQ ID NO: 721534 - DNA, 120 bp, Artificial Sequence
  ENSG00000197912_11 (sequence is synthesized)
caaagggcgcactgctgctcggcccccccggctgtgggaagacgctgctggccaaggcggtggccacggaggctcaggtgcccttcctggcgatggccggcccagagttcgtggaggtca

SEQ ID NO: 721535 - DNA, 120 bp, Artificial Sequence
  ENSG00000197912_12 (sequence is synthesized)
ttggaggcctcggcgctgcccgtgtgcggagcctctttaaggaagcccgagcccgggccccctgcatcgtctacatcgatgagatcgacgcggtgggcaagaagcgctccaccaccatgt

SEQ ID NO: 721536 - DNA, 120 bp, Artificial Sequence
  ENSG00000197912_13 (sequence is synthesized)
gacggtgctctgatgaggccaggccgactggaccggcacgtcttcattgatctccccacgctgcaggagaggcgggagatttttgagcagcacctgaagagcctgaagctgacccagtcc

SEQ ID NO: 721537 - DNA, 120 bp, Artificial Sequence
  ENSG00000197912_14 (sequence is synthesized)
agcaccttttactcccagcgtctggcagagctgacaccaggattcagtggggctgacatcgccaacatctgcaatgaggctgcgctgcacgcggcgcgggagggacacacttccgtgcac

SEQ ID NO: 721538 - DNA, 120 bp, Artificial Sequence
  ENSG00000197912_15 (sequence is synthesized)
actctcaacttcgagtacgccgtggagcgcgtcctcgcagggactgccaaaaagagcaagatcctgtccaaggaagaacagaaagtggttgcgtttcatgagtcgggccacgccttggtg

SEQ ID NO: 721539 - DNA, 120 bp, Artificial Sequence
  ENSG00000197912_16 (sequence is synthesized)
ggctggatgctggagcacacggaggccgtgatgaaggtctccataacccctcggacaaacgccgccctgggctttgctcagatgctccccagagaccagcacctcttcaccaaggagcag

SEQ ID NO: 721540 - DNA, 120 bp, Artificial Sequence
  ENSG00000197912_17 (sequence is synthesized)
ctgtttgagcggatgtgcatggccctgggaggacgggcctcggaagcactgtccttcaacgaggtcacttctggggcacaggacgacctgaggaaggtcacccgcatcgcctactccatg

SEQ ID NO: 721541 - DNA, 120 bp, Artificial Sequence
  ENSG00000197912_18 (sequence is synthesized)
gtgaagcagtttgggatggcacctggcatcgggcccatctccttccctgaggcgcaggagggcctcatgggcatcgggcggcgccccttcagccaaggcctgcagcagatgatggaccat

SEQ ID NO: 721542 - DNA, 120 bp, Artificial Sequence
  ENSG00000197912_19 (sequence is synthesized)
gaagcaagactgctggtggccaaggcctacagacacaccgagaaggtgctgcaggacaacctggacaagttgcaggcgctggcaaacgcccttctggaaaaggaagtgataaactatgag

SEQ ID NO: 721543 - DNA, 120 bp, Artificial Sequence
  ENSG00000197912_20 (sequence is synthesized)
gacattgaggctctcattggcccgccgccccatgggccgaagaaaatgatcgcaccgcagaggtggatcgacgcccagagggagaaacaggacttgggcgaggaggagaccgaagagacc

SEQ ID NO: 721544 - DNA, 120 bp, Artificial Sequence
  ENSG00000197912_21 (sequence is synthesized)
cagcagcctccacttggaggcgaagagccgacttggcccaagtagttgggaggtgttggctgcacgtgcgggtggtccgggaagtgagggctcactcagccaccctgagttgcttttcag

SEQ ID NO: 721545 - DNA, 120 bp, Artificial Sequence
  ENSG00000197912_22 (sequence is synthesized)
ctgaggtttgcacttcctctcgcggccctcagtagtccctgcacagtgacttctgagatctgttgattgatgacccttttcatgattttaagtttctctgcagaaactactgacggagtc

SEQ ID NO: 721546 - DNA, 120 bp, Artificial Sequence
  ENSG00000197912_23 (sequence is synthesized)
ctgtgtttgtgagtcgtttcccctatggggaaggttatcagtgcttcccgagtgagcatggaacacttcgagttcccagggttatagacagtcgttcccagtgtggctgaggccacccag

SEQ ID NO: 721547 - DNA, 120 bp, Artificial Sequence
  ENSG00000197912_24 (sequence is synthesized)
aggcagcagagcattcagactccaaacagacccctgttcatgccgacgcttgcacgaccgccccagttcctgtggctccctcggaatgctaaggggatcggacatgaaaggaccctgtga

SEQ ID NO: 721548 - DNA, 120 bp, Artificial Sequence
  ENSG00000197912_25 (sequence is synthesized)
gccgattgtcctatctccagcggccctgtcatccagctcactcatcaatggggccagtcaggcccaggcactgggctccggaggactcaccactgccccctgctgccatgtggactggtg

SEQ ID NO: 721549 - DNA, 120 bp, Artificial Sequence
  ENSG00000197912_26 (sequence is synthesized)
caagttgaggacttcttgctggtctagtcacgcatgcagtgttggggatgccttggtttttactgctctgagaattgttgagatactttactaataaactgtgtagttggaaaatctaca

SEQ ID NO: 721550 - DNA, 120 bp, Artificial Sequence
  ENSG00000197912_27 (sequence is synthesized)
gttgcaggcgcgagcactgtgtgtcacgtggggatcgtgtttggggcccttagactgtcgtccccagccagcagcagccgcctctgggcaggtgtgggcggtgccgtccccggctgaagc

SEQ ID NO: 721551 - DNA, 120 bp, Artificial Sequence
  ENSG00000197912_28 (sequence is synthesized)
aggcctgcctgtggacccatgctcatcacggttgacaaagcagctctgcagagctcgggcacatcacagtgggagccacaacgggagcaaagctgcagctggcaaacgcccttctggaaa

SEQ ID NO: 721552 - DNA, 120 bp, Artificial Sequence
  ENSG00000197912_29 (sequence is synthesized)
accttcatgttttcaaagtaattattttgccacctttttagtgggtttcattttgtgtttttaagccgatttaaaaattgtttgaattcgtctaaaatgattgttggaaaggaaggtggt

SEQ ID NO: 721553 - DNA, 120 bp, Artificial Sequence
  ENSG00000197912_30 (sequence is synthesized)
acatgggacgtgcccaggccaggctttgatcccagcatgaagcccccgcaagacaatgcaggaggagaagagctgtgaatctcaagaagacgtgagcctctcgtcccggctgctgggtcc

SEQ ID NO: 721554 - DNA, 120 bp, Artificial Sequence
  ENSG00000197912_31 (sequence is synthesized)
gtggcggtttgtccgcaggcgcaggtgttctggaaatgacgtcgttaccaccgctgggtctgtggcggtttgtccgcaggcgctggtgttctggaaatgacgtcgttcccgccgctgggt

SEQ ID NO: 721555 - DNA, 120 bp, Artificial Sequence
  ENSG00000197912_32 (sequence is synthesized)
ccgtggcgctgtgtccgcaggcgcaggggcgcaggtgttctggagatgatgtcgttcccgctgctgtgtccgtggtggtttgtccgcaggcgcaggtgttctgcagatgacgcccttccc

SEQ ID NO: 721556 - DNA, 120 bp, Artificial Sequence
  ENSG00000197912_33 (sequence is synthesized)
agaactggaggagagactgacctgcctagggggtttgagggaagactgtggcttggcctgtggtggtcactgttgggagcctgtctggctgcaggactactccccacctgggccctggac

SEQ ID NO: 721557 - DNA, 120 bp, Artificial Sequence
  ENSG00000197912_34 (sequence is synthesized)
tgtgggaagtgacccctgcgggcattttgcccagtggccatcctggctgtccttttccccaccatgccctcctcagaggcgtctccctggcttcgctgcctggcgctgcttgccacgcct

SEQ ID NO: 721558 - DNA, 120 bp, Artificial Sequence
  ENSG00000197912_35 (sequence is synthesized)
ccttgcaggcctccatgaagagtgagtgagcgcccgctgctccagatcccctctgtgctggccccaggccggccttgagtcggtctcttgctgtctgcagggtgcacctgtccacctccc

SEQ ID NO: 721559 - DNA, 120 bp, Artificial Sequence
  ENSG00000197912_36 (sequence is synthesized)
ctcgaggtatcccaatgtctggagaacaggggccgaatgtcttttccatcctctgagagctaagcataatgccaccgtgtcttcagtagggtgttaataactgaggaaggtaatttagaa

SEQ ID NO: 721560 - DNA, 120 bp, Artificial Sequence
  ENSG00000197912_37 (sequence is synthesized)
gaattcacctggtgcttctcataaagagttggtctctgggaaaattctagagtcaagtggtctggagtatatgcctttagactcaacagtgtatctcatgatatttttaagttctatttt

SEQ ID NO: 721561 - DNA, 120 bp, Artificial Sequence
  ENSG00000197912_38 (sequence is synthesized)
cagatgttgtgataacctacaactttctgttaaatgttagtcattctgatgagtaaaaagttcagaatggttgttgggtagggagagagaaggcacaagggtcttcagtgggattgggaa

SEQ ID NO: 721562 - DNA, 120 bp, Artificial Sequence
  ENSG00000197912_39 (sequence is synthesized)
ggtattatttcttgaggcaggttgtggtaaaaggtatttgttttaatcgtttttaataacttttgtgtatgttttgatatttagtatttgatcaaactccaagcaactggattcatggcc

SEQ ID NO: 721563 - DNA, 120 bp, Artificial Sequence
  ENSG00000197912_40 (sequence is synthesized)
attgtgagcttgcactttgcagcaggagagctgactgcatctgtgacggctcggacggcctgggacggtcgtttcttttctgagacagggtcgttctctgtcacccaggctggagcacag

SEQ ID NO: 721564 - DNA, 84 bp, Artificial Sequence
  ENSG00000197912_41 (sequence is synthesized)
gttgtgcccaggtctaagtgtttcgatttagaaatggtttcctcttaggtgggaaccactcctgctcctcactgaagtgacctc

SEQ ID NO: 721565 - DNA, 120 bp, Artificial Sequence
  ENSG00000197912_42 (sequence is synthesized)
ttaggtgggaaccactcctgctcctcactgaagtgacctcagcgaatgaagtgtgggtgacctcgaacagcacagcgttagtctttgtctctgataacgtcagggaagaattggaggaag

SEQ ID NO: 721566 - DNA, 120 bp, Artificial Sequence
  ENSG00000197912_43 (sequence is synthesized)
tgcaggatcttctgtgcaggacgctgcccctccccgtccagctgagctttcctgaggaagctctggatgtcgcccgtgtctgttgctcatgtgtttgtttctcccttttgcttctctgcc

SEQ ID NO: 721567 - DNA, 120 bp, Artificial Sequence
  ENSG00000197912_44 (sequence is synthesized)
gtcagagccaggatcccagcctctcccactccacctgggccgcccccactcgctctgagtggtctggcctctcctctaagacacttcttggtgtgaagcctgtcacagccccacaggtgc

SEQ ID NO: 721568 - DNA, 120 bp, Artificial Sequence
  ENSG00000197912_45 (sequence is synthesized)
tggcagtgtccagcgtggcccccgcatcggctgcacgcccccagcagacctgcccaccggctgcactcactgctgtggcccccacattggctgcacgccccctggcagacctgcccaatg

SEQ ID NO: 721569 - DNA, 120 bp, Artificial Sequence
  ENSG00000197912_46 (sequence is synthesized)
actgctcggggttttgcagttctgttcacctgctattggttttccttttatcctgggtatcagtctggtttttatagcaaatcctttgaaacaaaatccaggaggaaaaattgtgggaaa

SEQ ID NO: 721570 - DNA, 120 bp, Artificial Sequence
  ENSG00000197912_47 (sequence is synthesized)
ctttattcttgtgtggcatcacttccttccatccgtagcgtgggctctggggacgtggactgtgcagctgccctgaaattggggtgggagtagaagtcctgaggcctctcgcctgatccc

SEQ ID NO: 721571 - DNA, 120 bp, Artificial Sequence
  ENSG00000197912_48 (sequence is synthesized)
tcctctgtcacagggctctggttggacgttacacttcctggccaaagggcctttgttgctgccctgagggagcaggagttcagctcatggagcggagggtttggagagagggcctccggg

SEQ ID NO: 721572 - DNA, 120 bp, Artificial Sequence
  ENSG00000197912_49 (sequence is synthesized)
tctgctggtgggttaatgttccatcagtgcagcctggggagcagggctgggctcagcggctctcagccggtgctcagtctctgttgggatggagagtgaagggcggagcagaagcccttc

SEQ ID NO: 721573 - DNA, 120 bp, Artificial Sequence
  ENSG00000197912_50 (sequence is synthesized)
ccgctgggacacggcttctccaggggacactgcttctccaggggacatggcttctccaggggacacggcttctccaggggacatggcttctccaggggacactgtttctccaggggacac

SEQ ID NO: 721574 - DNA, 120 bp, Artificial Sequence
  ENSG00000197912_51 (sequence is synthesized)
tgtttctccaggggatggcagcttctccaggggacacggcttctccaggggagggcagcttctccaggggagggcggctcctggctttttgactgtgtaagaaacattttacatcaggat

SEQ ID NO: 721575 - DNA, 120 bp, Artificial Sequence
  ENSG00000197912_52 (sequence is synthesized)
ggatttagacgcatggaacatgtgtgggaattggaagttttgcagaataagcatttgctgtgtgtgacgtgcttcattagctattctgctataattttttcttttttctttttaattttt

SEQ ID NO: 721576 - DNA, 120 bp, Artificial Sequence
  ENSG00000197912_53 (sequence is synthesized)
caatttttagagaaagggtgttgcgctgtcacccaggctggagtgcagtgctgcgatcaccactcactgcggcctcaaccttcagggctcaagctgaggagctaggactactatgggcgt

SEQ ID NO: 721577 - DNA, 120 bp, Artificial Sequence
  ENSG00000197912_54 (sequence is synthesized)
gcgccgccgtgctggttaatttttaacagagtctcgctgtgttgccaaggctggtgtcaaacccctggcctcaagtgatccccacccacctctccttccaagagcgttctcttttttttt

SEQ ID NO: 721578 - DNA, 76 bp, Artificial Sequence
  ENSG00000197912_55 (sequence is synthesized)
tttttgagacagtctcactctatcaccatctcccaggttcaagtgattgtcccgcctcagcctcccgagtagctgg

SEQ ID NO: 721579 - DNA, 86 bp, Artificial Sequence
  ENSG00000197912_56 (sequence is synthesized)
gtagctgggattacaggcacccgccgtcttgcctggctaatttttgtattttagtagggatggggtttcaccgtgttggccagact

SEQ ID NO: 721580 - DNA, 62 bp, Artificial Sequence
  ENSG00000197912_57 (sequence is synthesized)
tacaggtgtgagccaccgggcccggccatccaacagtgttctgttcgtgtttaaaatgctgc

SEQ ID NO: 721581 - DNA, 120 bp, Artificial Sequence
  ENSG00000197912_58 (sequence is synthesized)
accccgtctctactaaaaatacaaaactcaggcatgatggcacacacttgtaatcccagctacttggggaccccccccccccacagacaaacatgccgcacctgtggcagtaactaggct

SEQ ID NO: 721582 - DNA, 120 bp, Artificial Sequence
  ENSG00000197912_59 (sequence is synthesized)
ccacagacaaacatgccgcacctgtggcagtaactaggcttgagcccgactgtctttcctcccctggttctggcaggagaggcgggagatttttgagcagcacctgaagagcctgaagct

SEQ ID NO: 721583 - DNA, 120 bp, Artificial Sequence
  ENSG00000197912_60 (sequence is synthesized)
gacccagtccagcaccttttactcccagcgtctggcagagctgacaccaggattcagtggtacgttctcaacccgcagcctgggcagcgtcacgtcctgagggcaggtggtgtcacctgc

SEQ ID NO: 721584 - DNA, 120 bp, Artificial Sequence
  ENSG00000197912_61 (sequence is synthesized)
gcaaacagcatcgaggcctcctctgtggggtgggcgctgctccttctctgggggcctctgctcagtacaagcctgggagggagctgatgtgtatgtggggcagcaggaggtccagacggc

SEQ ID NO: 721585 - DNA, 120 bp, Artificial Sequence
  ENSG00000197912_62 (sequence is synthesized)
acccgcactccgtcctccgccccggggtggaaaagcagacggtggttcccggtctgtgttgtttccagagatagtggagttatgttgcttccacacagtgaccagtcatgccggcgtttc

SEQ ID NO: 721586 - DNA, 120 bp, Artificial Sequence
  ENSG00000197912_63 (sequence is synthesized)
ccgtcagacccagagtcagaccacgcagtcccggcaaagccgcctccctctgaccctcacggtctctgtcaagttgtagaaatagaaatcatacctcaagatgcttttcctgctgtgtgg

SEQ ID NO: 721587 - DNA, 120 bp, Artificial Sequence
  ENSG00000197912_64 (sequence is synthesized)
ttcacattttaaaagttaatgtcaacaaacctcccttttattatgagatgaatttgccctttgattattcgttagggtctttcactagaattttgtggttactagagagcctttaatttc

SEQ ID NO: 721588 - DNA, 120 bp, Artificial Sequence
  ENSG00000197912_65 (sequence is synthesized)
tttgccatcaatgctcatgagctgttaggtggaatcagccacaagatggggtgtggaactaactgcccttgggaggagagacgggcgtcagggcggatggagcctggcggttctgtgtct

SEQ ID NO: 721589 - DNA, 120 bp, Artificial Sequence
  ENSG00000197912_66 (sequence is synthesized)
cgtctgtggaatggcctcagtggaacacggtgcaagtgcctgccgctctccccacccctgctcctggcgccggcgcctgccgctctccccagctctgctcctggcgccagctccccgtgc

SEQ ID NO: 721590 - DNA, 120 bp, Artificial Sequence
  ENSG00000197912_67 (sequence is synthesized)
ctctctcccagacgctctcaccagcactcttggttcttggtctcttttccctctttgttcttccttttatttatttacttatttattttgagacagagtcctactctgtcgcccagactg

SEQ ID NO: 721591 - DNA, 75 bp, Artificial Sequence
  ENSG00000197912_68 (sequence is synthesized)
atttattttgagacagagtcctcgcagcctccgcctcctgggttcaaccgattttcctgcctcagcctcctgagt

SEQ ID NO: 721592 - DNA, 120 bp, Artificial Sequence
  ENSG00000197912_69 (sequence is synthesized)
catgcccggccatctttgttctcccttgagggccccttcctcctcttaagccctgatagcagaaacccacccacccacaccgtggctgtttgtgttgacaggggctgacatcgccaacat

SEQ ID NO: 721593 - DNA, 120 bp, Artificial Sequence
  ENSG00000197912_70 (sequence is synthesized)
cctccttagcagggcttgaaccccagaaatacccaggcaggtattgagaggtgaggtggatggaaccatcacacaggaaggaacacacgttgcgtttcagttctgcgtaactcatgtctt

SEQ ID NO: 721594 - DNA, 120 bp, Artificial Sequence
  ENSG00000197912_71 (sequence is synthesized)
agccgtggtgtttgggcggcctaatcagcttaaaatggctcgtttcaccattgtggatgggaagatggggaaaggagtcagcttcaaagacgtggcaggaatgcacgaagccaaactgga

SEQ ID NO: 721595 - DNA, 120 bp, Artificial Sequence
  ENSG00000197912_72 (sequence is synthesized)
ggcgtgagccaccgcgcctggctatatcctgttcttacattagtcacgggtcctgttcttacattagtcaaggtaggtcttgtcgtatctttacttttaacactgtttattgtggacctt

SEQ ID NO: 721596 - DNA, 88 bp, Artificial Sequence
  ENSG00000197912_73 (sequence is synthesized)
cccgagtagccaggattacaggcatgcgaatgaggtttcacccttttggccaggatggtctagaacttctgacctcaggtgatccacc

SEQ ID NO: 721597 - DNA, 81 bp, Artificial Sequence
  ENSG00000197912_74 (sequence is synthesized)
ccagtggattctttttttttttttttttttttcctgacggagtcttgccctgtagcccaggctggagtgcagtggtgtcat

SEQ ID NO: 721598 - DNA, 69 bp, Artificial Sequence
  ENSG00000197912_75 (sequence is synthesized)
cccaggttcaagcgattcttctgctttaacctcctgagtatgtggggtttcaccattttggccagtctt

SEQ ID NO: 721599 - DNA, 72 bp, Artificial Sequence
  ENSG00000197912_76 (sequence is synthesized)
ctcttggctacaggcgtgagccactgcacctggtggactggattcttttaaagcaaacccatagttttgaat

SEQ ID NO: 721600 - DNA, 120 bp, Artificial Sequence
  ENSG00000197912_77 (sequence is synthesized)
gtggactggattcttttaaagcaaacccatagttttgaatcttatatgctctgagtacgtttctttaaattcagagaaacaccacagcatcataacacctgaacgttcttacgagcatcc

SEQ ID NO: 721601 - DNA, 120 bp, Artificial Sequence
  ENSG00000197912_78 (sequence is synthesized)
agtcaggtgttcccagcagcttcataaatctcttttcgcagttgatttattcacatcaagggccagtcaaggttcacatacaccagggatcagtgatcgtttctggactcacttttaaat

SEQ ID NO: 721602 - DNA, 120 bp, Artificial Sequence
  ENSG00000197912_79 (sequence is synthesized)
tctccgatgacaaacgtcaagcctgaaacccagggcctagggccagacgttgaagataaaatgtttccaagtcacagcctaaagctgggtgttagctaaaatgttacaaagtcacaataa

SEQ ID NO: 721603 - DNA, 120 bp, Artificial Sequence
  ENSG00000197912_80 (sequence is synthesized)
tgatgacagggcggtggggggtggggggtggctgttaggaccggctcccagatggcaccgtgaggcagggagaggctccaggatgctgtaggagctcccggagggccttggacagttctg

SEQ ID NO: 721604 - DNA, 120 bp, Artificial Sequence
  ENSG00000197912_81 (sequence is synthesized)
ggaccgggctgttcctttctctctgggccttaggggggtctctctccctcctgtgtcctgaaggggaacctgcaggggaaatctgttgtgtcaggacccctaccctcagagccactgtct

SEQ ID NO: 721605 - DNA, 120 bp, Artificial Sequence
  ENSG00000197912_82 (sequence is synthesized)
ggaagcaacagggatgtcgtctggaaacaaaatctgaactaaaccaaaaagcaaggtgaacaaaatcggtgctccttcagtttcttctttagttctgcatgttactggggactaagacaa

SEQ ID NO: 721606 - DNA, 120 bp, Artificial Sequence
  ENSG00000197912_83 (sequence is synthesized)
ttagttctgcatgttactggggactaagacaacgggctggactgcaatagtatgaccaagactcactgtaaccttaaattcctgggctcaagggatcctcccagctcagcctcctgagta

SEQ ID NO: 721607 - DNA, 89 bp, Artificial Sequence
  ENSG00000197912_84 (sequence is synthesized)
aaactcctaggctcgaaggagccttctacgagcacctccacaacatgcactttttatttcctttattttaatttttttttattttttta

SEQ ID NO: 721608 - DNA, 120 bp, Artificial Sequence
  ENSG00000197912_85 (sequence is synthesized)
cctcagcctcccaaagtattaagatcacaggcataagctaccacgcccagcctgtaccttttatttctttttattgcctaattatagccctatccgttttggtgtcattttaaagtctaa

SEQ ID NO: 721609 - DNA, 120 bp, Artificial Sequence
  ENSG00000197912_86 (sequence is synthesized)
tccgttttggtgtcattttaaagtctaaatatatgatgtgtttttttgtcaatatatcacaaattacatatttacaatccaactgggaagcttgggagtaaaaaaaaaaaaaaaaaaaaa

SEQ ID NO: 721610 - DNA, 120 bp, Artificial Sequence
  ENSG00000197912_87 (sequence is synthesized)
agggctgctgccgcccgtggctgtggagggacagccgtgctttcagcgcagcaggggctctgcggagaggtgtggatctgcagcaccacctctggtgaaactcatggtcccgaccgtcag

SEQ ID NO: 721611 - DNA, 120 bp, Artificial Sequence
  ENSG00000197912_88 (sequence is synthesized)
taggaacgggagatgagttttggtgacgggtgaccggtgggctgaccgcctctgactgccgttccgtggctgctcagtgtggggtctgcgacgtctgtgaggagagaggaccaaactggg

SEQ ID NO: 721612 - DNA, 120 bp, Artificial Sequence
  ENSG00000197912_89 (sequence is synthesized)
aatcggagctgctggaggtttccatagctatgatggcaacacccagacgtgatcagtcatctcatggaatggagttcagacccgcactgtcagtgtgagacaggttgaacgtttgaaaag

SEQ ID NO: 721613 - DNA, 120 bp, Artificial Sequence
  ENSG00000197912_90 (sequence is synthesized)
ggaagtggttcttgccccaggtgtttgaggagcacgagcctcctttgcgagctatccctgcgagaaccgagttcctcaccctcaattcgagtgaattcctagcacgaacacgcctcttgc

SEQ ID NO: 721614 - DNA, 120 bp, Artificial Sequence
  ENSG00000197912_91 (sequence is synthesized)
aggtccccagggcttcagcttgggaaagcagtgggttcctgcagaggagtggggcagctgctgtgccagacactgcaaaacacacctggcttctctccgacagccctgcgggtcgagagg

SEQ ID NO: 721615 - DNA, 120 bp, Artificial Sequence
  ENSG00000197912_92 (sequence is synthesized)
actggcgctgcctgtgtcttactgaaatttattttcgtgtaaccatttacttttatgtggaaatcgaaaagcttttgataatagtagcaaagcaggaaggactgagtgggaaccacaagc

SEQ ID NO: 721616 - DNA, 120 bp, Artificial Sequence
  ENSG00000197912_93 (sequence is synthesized)
cagttgaaagaaaatacatgacgtacttgagtgctcaggaccacgagctgattcaagttgtacagaatggacacttacagatgtgtggaaaatctgagacaggaaatgaagcctcaccag

SEQ ID NO: 721617 - DNA, 120 bp, Artificial Sequence
  ENSG00000197912_94 (sequence is synthesized)
gagtttgagaccagcctgggcaatacagcaagaccccatctcttaaaagaaaagaataaagagtattagccaggcatggtggtggagcacacctctggtctcagctactcaggaggctgc

SEQ ID NO: 721618 - DNA, 120 bp, Artificial Sequence
  ENSG00000197912_95 (sequence is synthesized)
tggtggtggagcacacctctggtctcagctactcaggaggctgcagcaggaggattgcttgaacctgggaggttgaagcaacagtgagccgtgatcgcaccactgccctccagcctgggc

SEQ ID NO: 721619 - DNA, 61 bp, Artificial Sequence
  ENSG00000197912_96 (sequence is synthesized)
gtggtgcaatctcagcttactgcagcctcgacctcccaggattccagctaagtttttttgt

SEQ ID NO: 721620 - DNA, 90 bp, Artificial Sequence
  ENSG00000197912_97 (sequence is synthesized)
acatttttcagctcaggctggagttcagtggcacgatcttgactcactgcagccttcacctcctaggttcaagcatttctcctgcctcag

SEQ ID NO: 721621 - DNA, 82 bp, Artificial Sequence
  ENSG00000197912_98 (sequence is synthesized)
tttgctttttactcttaggctgatcttgcctgcctgattgaagctgatcgcttacatttgaaaacaaaatatactgaaaata

SEQ ID NO: 721622 - DNA, 120 bp, Artificial Sequence
  ENSG00000197912_99 (sequence is synthesized)
gctgatcgcttacatttgaaaacaaaatatactgaaaatagaaaaacctgaacgttgttattgtcacaaggctggctagatctccggcatctgcacactcagtctgaccatttgggaagc

SEQ ID NO: 721623 - DNA, 120 bp, Artificial Sequence
  ENSG00000197912_100 (sequence is synthesized)
tttcatgaaaaagcacagtcagcgagaatgagacgagagaacccatttccacaaccattttaatctgcgcatcggtcccagacgtagggattcctcgtctcatcttggaaacattgccag

SEQ ID NO: 721624 - DNA, 120 bp, Artificial Sequence
  ENSG00000197912_101 (sequence is synthesized)
gcagacgctcaaccagcttctggtagaaatggatgctaccctcccaggggaccatgaggaagctcagaggaaagacccccgcctgctcctgtctcacggagcccacagggtcacggaggg

SEQ ID NO: 721625 - DNA, 120 bp, Artificial Sequence
  ENSG00000197912_102 (sequence is synthesized)
caatggagggtcattcgctctgctggggttgccttttgcactgaagatagagaccacctttttgagtgacttgagcccaaaggcaagcgtatatcaaacgatcttctccacataacctct

SEQ ID NO: 721626 - DNA, 120 bp, Artificial Sequence
  ENSG00000197912_103 (sequence is synthesized)
ctgtgccatcataagaatagctgcttccgcccccggatttgctcaggcctgggaatccgctgactgaaggcctcttgttgagtgccagctctaaacaagtccctttatgcagagccacag

SEQ ID NO: 721627 - DNA, 120 bp, Artificial Sequence
  ENSG00000197912_104 (sequence is synthesized)
ctgtgcatgctcagccctgccgaggtcccaggccaggctttgttgcttccgttcatggaagcgcacaggatagggccgacgctgtgccggtcgtggggaaatctcactggggaagagaaa

SEQ ID NO: 721628 - DNA, 82 bp, Artificial Sequence
  ENSG00000197912_105 (sequence is synthesized)
gtaattttttttaaagcaaattgctagataagtttcttactaattaatgacgaaacatttcccttctgtgcttgaagactga

SEQ ID NO: 721629 - DNA, 120 bp, Artificial Sequence
  ENSG00000197912_106 (sequence is synthesized)
attaatgacgaaacatttcccttctgtgcttgaagactgactgtgagcctcgtcagcctgacatgagtgaagccttgggatcctaggatggagacgtggggttggggcggctcaggtgcg

SEQ ID NO: 721630 - DNA, 120 bp, Artificial Sequence
  ENSG00000197912_107 (sequence is synthesized)
ggagggaggtgtgagcagaggccggccgtcctcctctcccagaagggctcctgcgggacctggaattccatcgatgacgtgtcgtgggttggcggtgacctctaccatgtcccatgggga

SEQ ID NO: 721631 - DNA, 80 bp, Artificial Sequence
  ENSG00000197912_108 (sequence is synthesized)
ctcaagctgaggagctaggactactatgggcgtgcgccgccgtgctggttaatttttaacagagtctcgctgtgttgcca

SEQ ID NO: 721632 - DNA, 120 bp, Artificial Sequence
  ENSG00000197912_109 (sequence is synthesized)
agcactggaggcaccgccggcgatggacgtccaggtcccggctcctgtgctggaaagcgttgatggggagcgtcggcgctgaccacacgcgggagctgcggaagcccagcggttcacaca

SEQ ID NO: 721633 - DNA, 120 bp, Artificial Sequence
  ENSG00000197912_110 (sequence is synthesized)
ggcctcccttcaacgtagtcatcccctggtggtggaagcaagacgacggcccctgacgtgcagccacacacagaaaaggctgctgtgaacattttatgcttcgactttttttttcttcag

SEQ ID NO: 721634 - DNA, 120 bp, Artificial Sequence
  ENSG00000197912_111 (sequence is synthesized)
gttctgtcgcccaggctggagtgcagtgccaccatcatagctcactgcagcctccacctcctaggctcaagcttcctaagtagttgggactcaaggcttgagtcaccatgccaggctctg

SEQ ID NO: 721635 - DNA, 120 bp, Artificial Sequence
  ENSG00000197912_112 (sequence is synthesized)
tgccaggctctgttttttcagtctgtgaaaaataaagtcatcagcatgtgagcttggcagtgcttgccgtgagctctttcaggtccaggctcccagtgtctgggcagtgaatgaggtcct

SEQ ID NO: 721636 - DNA, 120 bp, Artificial Sequence
  ENSG00000197912_113 (sequence is synthesized)
gggaagctggggtcctggtcctggtcccagtgtgacccgggacacccctacctttgtccttaatgtggcagtaaatgtatcaagcacgctctgccctgggagccgtggactgcctgccag

SEQ ID NO: 721637 - DNA, 120 bp, Artificial Sequence
  ENSG00000197912_114 (sequence is synthesized)
cgtaagatgccgaagtctcagcccccgacgtaggatggcgaagtctcagcccccgacgtaggatgccgaagtctcagcccccgacgtaggatgccgaagtctcagcccccgacgtaggat

SEQ ID NO: 721638 - DNA, 120 bp, Artificial Sequence
  ENSG00000197912_115 (sequence is synthesized)
gccgaagtctcagcccccgacgtaggatggcgaagtctcagcccccgacgtaggatggcgaagtctcagcccccgacgtaggatggcgaagtctcagcccctggtgtaaaatgccgaaat

SEQ ID NO: 721639 - DNA, 120 bp, Artificial Sequence
  ENSG00000197912_116 (sequence is synthesized)
agcgaacaggattctttggaaagtatgttggatgtatttgttgatgcttgaactaaacctaacttggctttgtaatctgagaaacagattgcaatcaaaaatctcaaactgtctttgcct

SEQ ID NO: 721640 - DNA, 120 bp, Artificial Sequence
  ENSG00000197912_117 (sequence is synthesized)
tttgtgtgtaacctaagaacattctctgatatgctttaaatcatctgtaggttgataataatacccaataccctgtaaatactatttcaatcgttgttatactttagggaataatgacaa

SEQ ID NO: 721641 - DNA, 120 bp, Artificial Sequence
  ENSG00000197912_118 (sequence is synthesized)
aaatgtgtctgtgcatgttgagtatagatgcacgtttttccccagatacattcattctgtgcttggttaaacctgcagagatgaaacctgtggctgtggaggccaaccgtgtgcaagtcc

SEQ ID NO: 721642 - DNA, 120 bp, Artificial Sequence
  ENSG00000197912_119 (sequence is synthesized)
gttggagtttgtttagtcactttctttagttgtgtggcgcttctgaattcacattcttgtataattttcactgactgtgctctttgatgaaagcttcccaaatggtcagagtgagtgtgc

SEQ ID NO: 721643 - DNA, 120 bp, Artificial Sequence
  ENSG00000197912_120 (sequence is synthesized)
agaaggtgctgcaggacaacctggacaagttgcaggcggtgaggccctggccaggcgtgggggctacggcgtcacacagtgtccacacagcacccacggtccccacccctctcgtgaagt

SEQ ID NO: 721644 - DNA, 120 bp, Artificial Sequence
  ENSG00000197912_121 (sequence is synthesized)
cagagaacactctgaccgatgtgaattctacccagctcaactgaaacttacgtgttccatactttttatcctgaactcgtcaagtgtgttcccccgaggtagaaagaaggctgccacagt

SEQ ID NO: 721645 - DNA, 120 bp, Artificial Sequence
  ENSG00000197912_122 (sequence is synthesized)
ctcctgtgcctcttcctgccattagcaattaccaatgttttgtcagttttgtttaatcttttcccaagtcttacacttttttcttgaacatttttttaaaacaaagctttaattttagag

SEQ ID NO: 721646 - DNA, 70 bp, Artificial Sequence
  ENSG00000197912_123 (sequence is synthesized)
ttcttgaacatttttttaaaacaaagctttaattttagagtaggaatttttttttatggcgacatcttgg

SEQ ID NO: 721647 - DNA, 75 bp, Artificial Sequence
  ENSG00000197912_124 (sequence is synthesized)
tgcctcagcctcccgagtagctgcgactgcaggcatgcaccaacacactcgggaggctggagtgcagtggtgcaa

SEQ ID NO: 721648 - DNA, 120 bp, Artificial Sequence
  ENSG00000197912_125 (sequence is synthesized)
gcagtggtgcaatctcagcttactgccacctccacctccccagttcaagcattctcctgtctcagcctcccaagtgtctgggattacaggcacgcgtcaccatgcccagctaatttttgt

SEQ ID NO: 721649 - DNA, 120 bp, Artificial Sequence
  ENSG00000197912_126 (sequence is synthesized)
agtgttagatgtagaaaagttgcaggcgcggtgcagagagctccctgccaccctgcctcgctcccgtggaggcccccatggggcagtcctcccacctgaggagcccccgccgacccgcgg

SEQ ID NO: 721650 - DNA, 120 bp, Artificial Sequence
  ENSG00000197912_127 (sequence is synthesized)
tgttgggtccacacgtgattcagatgtgctgagtctccccagtgtcctttccggtcttgggagtccacatggcgtttgatcgcccatcttcttaggctcctctggggtgacagttcctca

SEQ ID NO: 721651 - DNA, 120 bp, Artificial Sequence
  ENSG00000197912_128 (sequence is synthesized)
gacctcccttgttttgagggctctggcagttttgaggattggtctcatgttttgtaggacgttcctcagttgcgattgtctgatgtgtttctcacagtgggcagagctggagtgaacgtt

SEQ ID NO: 721652 - DNA, 120 bp, Artificial Sequence
  ENSG00000197912_129 (sequence is synthesized)
tttgtccctgggtttggtaactgctgcttagaactcaggagaggtgcacggctctttgtcccatgttgtgaacagatgggtaggcagtggataggtagttgtttcttcagcctccccttg

SEQ ID NO: 721653 - DNA, 120 bp, Artificial Sequence
  ENSG00000197912_130 (sequence is synthesized)
cacttctggtgaggagcagcggcgcgggccctggaggtttcagagcgcttttccctgcatgactccttctgttccagtgcatgccatggggtgaatctggtgtagacgtagctttgaatt

SEQ ID NO: 721654 - DNA, 120 bp, Artificial Sequence
  ENSG00000197912_131 (sequence is synthesized)
tattaagtattttgtaaaagataagttgtggtcataagagagttggagctaagcaagacttcttagataatttaattggacaaaaacttaacctatatgccaactctagacacatttaat

SEQ ID NO: 721655 - DNA, 120 bp, Artificial Sequence
  ENSG00000197912_132 (sequence is synthesized)
tctacgcagaaatagaagagctgaaactggtgtatccttatcacggcgttctacacagcgactagaagagctgaaactggtgtatccttatcacggtgttgtacgcagaaatagaagagc

SEQ ID NO: 721656 - DNA, 120 bp, Artificial Sequence
  ENSG00000197912_133 (sequence is synthesized)
tgaaactggtgtatccttatcacggtgttgtacgcagaaatagaagagctgaaactggtgtatccttatcacggtgttctacgcagaaatagaagagctgaaactggtgtatccttatca

SEQ ID NO: 721657 - DNA, 120 bp, Artificial Sequence
  ENSG00000197912_134 (sequence is synthesized)
cggtgttctacgcagaaatagaagagctgaaactggtgtatccttatcacggtgttctacgcagcaatagaagagctgaaactggtgtatccttatcatggtgttctatgcagcagtaga

SEQ ID NO: 721658 - DNA, 120 bp, Artificial Sequence
  ENSG00000197912_135 (sequence is synthesized)
aggaaactttcttcctgcagcaacaaggaaatgacgcaaagtgagaagagccaggcttagtatcgtatgactccacttgtacgaaattgtcaaaataacaaaattctggggatggagaac

SEQ ID NO: 721659 - DNA, 120 bp, Artificial Sequence
  ENSG00000197912_136 (sequence is synthesized)
gggttactggttgtcagcagttaggggaggtctccagggaggagggatgcctctggggagggcggttctgtgtcttgaggggagatgctcgttatgtgaacgtgcgtgtgacacaggtgt

SEQ ID NO: 721660 - DNA, 120 bp, Artificial Sequence
  ENSG00000197912_137 (sequence is synthesized)
ccatctgtggagcacacacacaggtgagagcacataggagtgggggcatctgagcaggggcctggcgtttccatgtcagtctcctggctttgcctttgttttgcagctactgaacgcaca

SEQ ID NO: 721661 - DNA, 120 bp, Artificial Sequence
  ENSG00000197912_138 (sequence is synthesized)
gctgctgggggaccagggccaaagggactgctctgtgctgtttttgcaatttgttgtgtgtctgttaccatcagaatacaaaacttaaaaagtcacaccagggatccggtcccagaaagt

SEQ ID NO: 721662 - DNA, 120 bp, Artificial Sequence
  ENSG00000197912_139 (sequence is synthesized)
tccctgacacatagctgcccagggggagcatgtgtccagtcccaggaagtctgtatcctgaaaccacatgtccctgacacatagcggcccggtagggagcacgtgccctgcagggtggcc

SEQ ID NO: 721663 - DNA, 120 bp, Artificial Sequence
  ENSG00000197912_140 (sequence is synthesized)
accctgatacatagcggcccggtggggagcacgtgccccgcagggtggccatcctaacacatagcggcccggggggagcacgtgccccgcagggtggccatcctgacacatagcccggtg

SEQ ID NO: 721664 - DNA, 120 bp, Artificial Sequence
  ENSG00000197912_141 (sequence is synthesized)
gggagcacgtgccccgcagggtggctgggctctgctgaaggccgagctgtgcttgaacccggcgccgccccctctaggagctcgcactgcacctctttggcctggctgctgtttttcttt

SEQ ID NO: 721665 - DNA, 120 bp, Artificial Sequence
  ENSG00000197912_142 (sequence is synthesized)
gagaccggtgttcctattacttttcccatttttttcactgtttatacaatctttcagaattctgtatccacagccctggcctctgcaaggaaggcgctccacgacactgagcagaatggg

SEQ ID NO: 721666 - DNA, 120 bp, Artificial Sequence
  ENSG00000197912_143 (sequence is synthesized)
actggaagggaaggtggattcagtgcttttgtaagttctgtaaatcagagctctctgaactctttctggtttgtgtttgctgaatacttttcccataagctatacgatgaatacacaggg

SEQ ID NO: 721667 - DNA, 120 bp, Artificial Sequence
  ENSG00000197912_144 (sequence is synthesized)
aaaacctgttgcagagagtagcctgaagccacaattagacagcagctcaccttcctttcccatggtccggctgtaaggcgtgtagtaaccaatgttgcctgagggcctctcacccctaac

SEQ ID NO: 721668 - DNA, 120 bp, Artificial Sequence
  ENSG00000197912_145 (sequence is synthesized)
tctggggtgcctgagccttgtgagattacagggcagttgaatctgcgtttttcttttctttttttttgagacggagtttcgcccttcttgcccaggctggagtgcagccgtgcgatctca

SEQ ID NO: 721669 - DNA, 65 bp, Artificial Sequence
  ENSG00000197912_146 (sequence is synthesized)
gcccttcttgcccaggctggagtgcagccgtgcgatctcagctcaccgcaacttgcacctcccgc

SEQ ID NO: 721670 - DNA, 120 bp, Artificial Sequence
  ENSG00000197912_147 (sequence is synthesized)
ttcagccaagcagaggctgccaagacccatgcctactgtgccgttagccgtcctgggcccttcatcccttgcaaagctctgtgctttttccagaaccacataaacaccttagccagttgg

SEQ ID NO: 721671 - DNA, 120 bp, Artificial Sequence
  ENSG00000197912_148 (sequence is synthesized)
tggcagtgcatgagctgcctatcacgtgcgtcacttacacgtttcctccgcgggcctggtacggtgggtcgcacctgtagtcctggcacctcgaggggctgacatgtgttccctctgcag

SEQ ID NO: 721672 - DNA, 120 bp, Artificial Sequence
  ENSG00000197912_149 (sequence is synthesized)
gcctggtacagtgggtcacgcctgtagtcctggcacctcggggcgctgaggcaggggagtgactgagcccaggagtaggagatcagcctgggcaacagtgagaccctgtctctgcaaaac

SEQ ID NO: 721673 - DNA, 85 bp, Artificial Sequence
  ENSG00000197912_150 (sequence is synthesized)
gatcagcctgggcaacagtgagaccctgtctctgcaaaacatttttttatttaattaattttttttttcgagacagagtctcact

SEQ ID NO: 721674 - DNA, 120 bp, Artificial Sequence
  ENSG00000197912_151 (sequence is synthesized)
tgaggatgcaaagaaaccagatcccttgtacgctgctgatgggggtgtgacgtggtgcagcctcactgggaaacagtttggcagcttcttaaaaaactaaacgtgtgctcaccatgtgac

SEQ ID NO: 721675 - DNA, 120 bp, Artificial Sequence
  ENSG00000197912_152 (sequence is synthesized)
cccgtgtccacatgcgctcaccacatgaccccgcatccaccctcctgggtgctcatcccaggaaagcaaagacttaggctcacacgaaatgcctgggcgccgacgctcatttacctgtaa

SEQ ID NO: 721676 - DNA, 120 bp, Artificial Sequence
  ENSG00000197912_153 (sequence is synthesized)
gcgcctgaagaggacgaagagggattttggcaacaaaacttgccagtggtcctgcaggctgccgtccacgaggtgtgcatatgaggctcaggaggcatgtgcgtttcctgagcgccttgg

SEQ ID NO: 721677 - DNA, 120 bp, Artificial Sequence
  ENSG00000197912_154 (sequence is synthesized)
gaagcacacaggaggaaggtacctgcagccctgggtgcgcaggcacaaatgaccacaacactgaaggcgtggcgggaagagaggagaggagacgccgtgagcgggacgaccagatgtacc

SEQ ID NO: 721678 - DNA, 81 bp, Artificial Sequence
  ENSG00000197912_155 (sequence is synthesized)
ttaagaaagaaaaaagcgacggcgagactcttgtctcaaaaaaaaagaaaaaagaaaaaagtcgtaagagaaaatatattt

SEQ ID NO: 721679 - DNA, 120 bp, Artificial Sequence
  ENSG00000197912_156 (sequence is synthesized)
aaaaagaaaaaagaaaaaagtcgtaagagaaaatatatttcctatttatgcagtggaagcggatcaccataaagagcttcatcctcatggccttcaccttgagtgggctgaggaggagga

SEQ ID NO: 721680 - DNA, 120 bp, Artificial Sequence
  ENSG00000197912_157 (sequence is synthesized)
cgaggggctggtcttgttgtcttgggtagcaggggtggaagaaaatccacgtgtccgtgatcatacatagctcactcctgtgttgctgaagggtcacctgtcatagaagagggaagaatt

SEQ ID NO: 721681 - DNA, 120 bp, Artificial Sequence
  ENSG00000197912_158 (sequence is synthesized)
gtgtggcctgtgcggattctgcattcagccttgtgtgttgtgttacggttaaccagggacgtgtgccccactaataactctgattcctggaaggaatggcatggcagcctccgttgtcat

SEQ ID NO: 721682 - DNA, 120 bp, Artificial Sequence
  ENSG00000197912_159 (sequence is synthesized)
ggttcctggagggaatggcatggcagcctccgttgtcatggttcctggaaggaatggcatggcagcctccgttgtcatggttcctggaaggaatggcatggcagcctccgttgccatggc

SEQ ID NO: 721683 - DNA, 120 bp, Artificial Sequence
  ENSG00000197912_160 (sequence is synthesized)
aaggcaaagccatggcagcttcctggttatcactcctggcatgtggtaggtgcttgtccagtgaaatcctagtcgttgctgcattggcaggtgccctggcgtgaggaagggcaggcagtc

SEQ ID NO: 721684 - DNA, 120 bp, Artificial Sequence
  ENSG00000197912_161 (sequence is synthesized)
accatgccctttgctctcctgggccctgcatctgcttatggatgaggctgcgtgtagctgacatgcgtgtctctcctgcatctgagtaattgtcgtcgtctttttttttttttttttttt

SEQ ID NO: 721685 - DNA, 79 bp, Artificial Sequence
  ENSG00000197912_162 (sequence is synthesized)
ttttgagatggagcttcgctcttgttgccgaagttggagtgcaatgccacgatctcggctcattgcaaactccacctcg

SEQ ID NO: 721686 - DNA, 66 bp, Artificial Sequence
  ENSG00000197912_163 (sequence is synthesized)
aggtgcccgcgagctaggatgatctcgatctcctgacgttgtggtctgcccacctcggcctcccaa

SEQ ID NO: 721687 - DNA, 120 bp, Artificial Sequence
  ENSG00000197912_164 (sequence is synthesized)
ataggcgtgagccaccacgcccggccaagtgattgttttatgtttattctgttttgggttgaactatagtttgcttggagaaaataatgtctgttaaatttgcgttagaggataattgtt

SEQ ID NO: 721688 - DNA, 120 bp, Artificial Sequence
  ENSG00000197912_165 (sequence is synthesized)
ttagaggataattgtttactgagccaaataatctttcttgtgagaacctattctgggtttcccctgggccctctgctgtggtttcggcgggagttggtttgtgtggattttcaggactgc

SEQ ID NO: 721689 - DNA, 120 bp, Artificial Sequence
  ENSG00000197912_166 (sequence is synthesized)
tgacttgatcagacaggcacaacacagtcccggccctcaggcaggccttctccctggtctgatgctgaactgcatggcgtctgttcagatgaagattcttttgccacctccttaaatgaa

SEQ ID NO: 721690 - DNA, 120 bp, Artificial Sequence
  ENSG00000197912_167 (sequence is synthesized)
agaacgatactgaatgtggcttagaaacagctttgccagccgtgcagaatgattgtaagtagtggttgcccgaaaagtatttgcttggaataccactcactgataacactggtgaacctg

SEQ ID NO: 721691 - DNA, 120 bp, Artificial Sequence
  ENSG00000197912_168 (sequence is synthesized)
gaaggaattatacggagtgaaaaaaggcaccactcactgataacacgaatgaacctggaaggaattatacggagtgaaaaaaggctccgctcactgataacgcgggtgaacctggaagga

SEQ ID NO: 721692 - DNA, 120 bp, Artificial Sequence
  ENSG00000197912_169 (sequence is synthesized)
attacacggagtgaaaaaagaccctgctcactggtaaggcgggtgaacccagaaggaattacacagagtggaaaaaagactccgctcactgataacgcgggtgaacccagaaggaattac

SEQ ID NO: 721693 - DNA, 120 bp, Artificial Sequence
  ENSG00000197912_170 (sequence is synthesized)
acggagtggaaaaaaggccccgctcactgataacgcgggtgaacccagaaggaattatacggagtgaaaaaaggccgagctgaaagatcacatgccgtatgattttttttttatacagca

SEQ ID NO: 721694 - DNA, 120 bp, Artificial Sequence
  ENSG00000197912_171 (sequence is synthesized)
ttctctaaagacaaaaattaaagagatggaacacagattcgtggttgctaggggttaaggatgggggaaggagacagccggagggagcctgtggttggattgcctcagctgcggtgggca

SEQ ID NO: 721695 - DNA, 120 bp, Artificial Sequence
  ENSG00000197912_172 (sequence is synthesized)
cacactgcgcgtgtgtcatgggatgaccccggggagcttggtggaccgtcgtggtgggagagcctggctgtgatactgttcatagttttgtgagatggaacccctggaagcagggggaca

SEQ ID NO: 721696 - DNA, 120 bp, Artificial Sequence
  ENSG00000197912_173 (sequence is synthesized)
cccctggaagcagggggacaaggtattgctctgcgtcatttatttttatttatttatttttttttgagatggggtctggctctgtcacccaggatggagtgcagtggctcgatctctgct

SEQ ID NO: 721697 - DNA, 74 bp, Artificial Sequence
  ENSG00000197912_174 (sequence is synthesized)
tccctctgtgccatttcttacaactacatgtgaaggtacagttacttcacggttgctaactagaactagaaaac

SEQ ID NO: 721698 - DNA, 120 bp, Artificial Sequence
  ENSG00000197912_175 (sequence is synthesized)
ttcttacaactacatgtgaaggtacagttacttcacggttgctaactagaactagaaaactagaaaaaaagcagttgctaacattttttttttctttttttgagacggaatttcgctctt

SEQ ID NO: 721699 - DNA, 72 bp, Artificial Sequence
  ENSG00000197912_176 (sequence is synthesized)
ttgtatttttagtaaagatggggtttctgcatgttggtcaggcttgtctcagactcccgacctcaggtgatg

SEQ ID NO: 721700 - DNA, 120 bp, Artificial Sequence
  ENSG00000197912_177 (sequence is synthesized)
acacagcttcttgtggagaaggcccctttccactgtgaagtgtgaatgcgtcaaggtggagcccctgccccggaggcctctcctctgtcagggtcagctgtggcgctcggggctgctgtc

SEQ ID NO: 721701 - DNA, 120 bp, Artificial Sequence
  ENSG00000197912_178 (sequence is synthesized)
ttcaggggcggtttccaagtgggatgagcctgatgtggcccctgtggctgcttccttgagactcagtggtatcagccgtttgtttttagatgactgattgaagtgagttatgtgatcata

SEQ ID NO: 721702 - DNA, 120 bp, Artificial Sequence
  ENSG00000197912_179 (sequence is synthesized)
tgggcgtttgggttgaacagaagttaaggacttcatgggaaggagatggggggtcttgcaggcagaggaagttccttttatacctagagtgcttttgtttgtttgtttgtttgtttgttt

SEQ ID NO: 721703 - DNA, 120 bp, Artificial Sequence
  ENSG00000197912_180 (sequence is synthesized)
agtttcactcttcgttgcccaggcaggagtgaagtggcgcgatctcagcccactgcaacctccgcccgccatgtttaagcgattctcctgcgttagcctccctagtagctgggcttacag

SEQ ID NO: 721704 - DNA, 120 bp, Artificial Sequence
  ENSG00000197912_181 (sequence is synthesized)
gtgcctggatgacagtcgtaagccactgcgcccagccccagctacgttgtgttttttttttccccctgtagagatgggttttcgctatgttgcccaggctggtttctaactcctggactc

SEQ ID NO: 721705 - DNA, 120 bp, Artificial Sequence
  ENSG00000197912_182 (sequence is synthesized)
caaagtgctgggatgacaggtgtgagccattgcgtccggctggaatttcttatggttcgtttccttaggttaaagtttcagaagtaggatttttgaattaaagaaactaaatactgtcta

SEQ ID NO: 721706 - DNA, 120 bp, Artificial Sequence
  ENSG00000197912_183 (sequence is synthesized)
attaaagaaactaaatactgtctatggcgcttgatacatcttgccaggcagttatcagacagggttgtactggtttgcgccaccccagaacgtgtgcaaggcctgtttgtggaccctcct

SEQ ID NO: 721707 - DNA, 120 bp, Artificial Sequence
  ENSG00000197912_184 (sequence is synthesized)
tggcctggctctctaggtcatccacctgcgtgtgctcacagagcatatggatttttccctgcggtgccttcacttgtggctggaagagccttctctgtgatcctgtgtcctgggtgctct

SEQ ID NO: 721708 - DNA, 120 bp, Artificial Sequence
  ENSG00000197912_185 (sequence is synthesized)
gttggcctccttcttgccaccgaggaagacacggaggctagagagggctcactgaacagtgaaatgattggaacctaaggagcttcagcagaaggtgtcatgatggggctaggctctccc

SEQ ID NO: 721709 - DNA, 120 bp, Artificial Sequence
  ENSG00000197912_186 (sequence is synthesized)
gagggctgtgtggcctcagcgtcttgttgggcagatcctgctccctgacacagcggggctaagagccagcctgtgtcacacacctgtgaattaacatgcctggctgaccctcactggaga

SEQ ID NO: 721710 - DNA, 120 bp, Artificial Sequence
  ENSG00000197912_187 (sequence is synthesized)
agggctacacgtttgtgacgaaagcagaagaggtgtttattgtagaccaaatccaagctgtcattttacttttattagaaattatttgggatttggctcatgcctataatcccagcactt

SEQ ID NO: 721711 - DNA, 120 bp, Artificial Sequence
  ENSG00000197912_188 (sequence is synthesized)
aggctgaggtgggagaatcacctgagctcagtcgtttgagactgccttggcaacatagtgagacctcatcttctactcaaatttaaaaaattagccgggcgcagtggcgtgcacctgtac

SEQ ID NO: 721712 - DNA, 88 bp, Artificial Sequence
  ENSG00000197912_189 (sequence is synthesized)
cagatatgctcatgaagcactgtgggtttctcctgcagtgcaccaccgcactccagcctgggtgacggagagagaccccatctcaaca

SEQ ID NO: 721713 - DNA, 120 bp, Artificial Sequence
  ENSG00000197912_190 (sequence is synthesized)
cactccagcctgggtgacggagagagaccccatctcaacaaaaataaaaaagaaaagaaaatgggacactgttgatacagtcacagagctgaaggagcagcatgggtcgtgattctggat

SEQ ID NO: 721714 - DNA, 120 bp, Artificial Sequence
  ENSG00000197912_191 (sequence is synthesized)
cgtccctccagggcagctagagtagctgctgggaagtatttctctcagtttcccgggagcagtgtgggtcgtgattctggattggccctccagggcagctagagtagctgctgggaagta

SEQ ID NO: 721715 - DNA, 120 bp, Artificial Sequence
  ENSG00000197912_192 (sequence is synthesized)
tttctcagtttcccagtgcaccccatgtttctagtagaaaacacaattggtaattaaatattggaagtagtttctaacaattggatactcacctgagaacataaatttgctctctgaaat

SEQ ID NO: 721716 - DNA, 120 bp, Artificial Sequence
  ENSG00000197912_193 (sequence is synthesized)
aagcggtgggctttaaataattgcctttgtgaatatgaaatttaagtattagatgcacgattaggatcgattgtaacaaaacagtgatatctaaaatataccttcatgttttcaaagtaa

SEQ ID NO: 721717 - DNA, 120 bp, Artificial Sequence
  ENSG00000197912_194 (sequence is synthesized)
aaaagcagcaggagctatttcgatgattgcaacatttataaaagaagaaatcacgacctccttcaacagccctttgacctgaagagtgtcgttttgagttggggtgtccagagccgcagc

SEQ ID NO: 721718 - DNA, 120 bp, Artificial Sequence
  ENSG00000197912_195 (sequence is synthesized)
tgcagctccaagaggcagatgtgcagagagaggcttgctttgaccacacggggcaggagcagggcccagccagggagaggccggggtctcagctcacccccccgtcattcttttttgttt

SEQ ID NO: 721719 - DNA, 86 bp, Artificial Sequence
  ENSG00000197912_196 (sequence is synthesized)
tctcgggctggtctcgaactcctgtcctcaggtcatccgcccgccttggcctcccacagcgctgggattacaggcgtgagccaccg

SEQ ID NO: 721720 - DNA, 120 bp, Artificial Sequence
  ENSG00000197912_197 (sequence is synthesized)
acgggagcaaagctgcaggcaaggcttctcactggctgaggagtggtgtgtctgccccgtgtatgaactgtcagctactcacacactcagtgggttgcagaacttagtaaaatcccacac

SEQ ID NO: 721721 - DNA, 120 bp, Artificial Sequence
  ENSG00000197912_198 (sequence is synthesized)
cagccctagagaggaagtgtttgtctcttgcaatacagccacaggtaaatcaccctagcttcaggggttaccattttctttagaaaatctggaagagtgaggaaaggagcaggtaattaa

SEQ ID NO: 721722 - DNA, 120 bp, Artificial Sequence
  ENSG00000197912_199 (sequence is synthesized)
caacaacaacaacaaaaaatctggaagagttctgccttcacagaaaccagtgaaatgtggctgtggcagtgttttctgtggtctggccaggccaccccaggggcaggtccaccggcacag

SEQ ID NO: 721723 - DNA, 120 bp, Artificial Sequence
  ENSG00000197912_200 (sequence is synthesized)
gacagtcggtgtctcaagtgttttccaggatcccacctagaatggcagaaattcacttccccaacttgagaggtcccagctcacacaacttcgcctcagattccttctcccagtgctgct

SEQ ID NO: 721724 - DNA, 120 bp, Artificial Sequence
  ENSG00000197912_201 (sequence is synthesized)
ctcctcaatcaggagggttcagcattttacccatctccttccctgtagacacacacgtcttgtttggtgaaagaaattgcagttgccaaaaataagccaagattttgaatagaagtagaa

SEQ ID NO: 721725 - DNA, 120 bp, Artificial Sequence
  ENSG00000197912_202 (sequence is synthesized)
aaattaatgaggctggccgccggaaaatcatttatgaggttgagatgggggtgattcttctttcggagctgcctccgtgcctccgcttccctgggaaagtggcctgtcctgggtgtcctg

SEQ ID NO: 721726 - DNA, 120 bp, Artificial Sequence
  ENSG00000197912_203 (sequence is synthesized)
cacacagacaggccctcacgcctcttgccacctccccaggacatagagatgctctgtctgccctggggactcacacactgctatgcctgttctttctagctggcaaacgcccttctggaa

SEQ ID NO: 721727 - DNA, 120 bp, Artificial Sequence
  ENSG00000197912_204 (sequence is synthesized)
aagcaacagggatgtcgtctggaaacaaaatctggtattgaagcgcagggagacaaaacgtccacctctagagccgaggcggcggttgcctgtcgcgtgcccgtggtcttctgcctgccc

SEQ ID NO: 721728 - DNA, 120 bp, Artificial Sequence
  ENSG00000197912_205 (sequence is synthesized)
ccggacatctcgggccacgtccggcccggcctccggccgcgctgccctaacgggcgtcacggggcatgaagagctctgggcggctgcgaggggagggtaccggggcagcggggcggtcgc

SEQ ID NO: 721729 - DNA, 120 bp, Artificial Sequence
  ENSG00000197912_206 (sequence is synthesized)
tcggggctcccgcgcggtgactcttgctctgccgtcgaagagaacggccctcgggcgcgtcgcggccgcggctccagagcccctgggcctcgcgctctgagagcctgagccgcttgagga

SEQ ID NO: 721730 - DNA, 120 bp, Artificial Sequence
  ENSG00000197912_207 (sequence is synthesized)
ggtcagtgctcgtgcgccccgcacccccattgcaccatcagaggaggttttccgatgtctttcagaacaggttgtggtgagccaagatcgtgtcactgcactccggcctgggtgacagag

SEQ ID NO: 721731 - DNA, 86 bp, Artificial Sequence
  ENSG00000197912_208 (sequence is synthesized)
gagaaaaatacaaaagtcagccgggtgtggtggcaggtgcttataatcgctagtactctggagaatcgcttgaactcgggaggtgg

SEQ ID NO: 721732 - DNA, 120 bp, Artificial Sequence
  ENSG00000197912_209 (sequence is synthesized)
tcaaaaaaaaaaaaaaaaaaaacacagcttttaattaaaaaaaggtcaagacaatagtaaaaaagacaagtaggaatataagtggtacgtcagatgtaatctttccttttcttttttaga

SEQ ID NO: 721733 - DNA, 79 bp, Artificial Sequence
  ENSG00000197912_210 (sequence is synthesized)
agtggtacgtcagatgtaatctttccttttcttttttagatagtcttgctctctcggctctgtctcccgggttctcgcc

SEQ ID NO: 721734 - DNA, 120 bp, Artificial Sequence
  ENSG00000197912_211 (sequence is synthesized)
gctgagattacagacgtgagccttagcacccaggctttttttttcattattactgttttttaggggctttgcagcaaaacccagagggactgctagacagattctggaagagctgtgcca

SEQ ID NO: 721735 - DNA, 120 bp, Artificial Sequence
  ENSG00000197912_212 (sequence is synthesized)
ctcataattttaggtgtaatgagtctgtctggttgtgctgccacgtctctccctgtgccccctggagagggtgtgacgctggttagagggcggagcagagcatcagggtgctgcactgca

SEQ ID NO: 721736 - DNA, 120 bp, Artificial Sequence
  ENSG00000197912_213 (sequence is synthesized)
gcgagggagacaccccatttgttgtgaccccttgaaaatgacttctggtctggctttgacaatttttttttttaatggagctgacccaataaaggtgacatggaattatttttcttctga

SEQ ID NO: 721737 - DNA, 120 bp, Artificial Sequence
  ENSG00000197912_214 (sequence is synthesized)
tctgagcctgtgcctgcctctctttcttccggcagtgccctgtactctgtggggatgacggcagtgggcctggccatcctgtgaatcagcttaaaatggctcgtttcaccattgtggatg

SEQ ID NO: 721738 - DNA, 120 bp, Artificial Sequence
  ENSG00000197912_215 (sequence is synthesized)
cttgctagttagttctccaacacgcgaaaaaggtagacgaggactggttttctttgcagctaaaatgaatcaagcctctggtaagtgtggatcctgttctaagtgcacctgtgttctcct

SEQ ID NO: 721739 - DNA, 120 bp, Artificial Sequence
  ENSG00000197912_216 (sequence is synthesized)
aggctggtctcaaactcctgatctcaagctacgcgcctgcctcagcctcccaaaatgttggaattccaggtgtgagccaccgcacctggcctgcaagaagtttttaaaagtagctgggcg

SEQ ID NO: 721740 - DNA, 120 bp, Artificial Sequence
  ENSG00000197912_217 (sequence is synthesized)
cgcacctggcctgcaagaagtttttaaaagtagctgggcgtggtgccacatgcctgtatattcccagctactcgagaggctgaggtgagagggtggcttgaacccaggagtttgaggctg

SEQ ID NO: 721741 - DNA, 120 bp, Artificial Sequence
  ENSG00000197912_218 (sequence is synthesized)
cagtgagctatcatggcacccactgcactccagcctgcgtgacccagagagaccttacctctaaaaaacaaaaaaacggaatccccaagtagttagtgttgcattgtctgctgccgtcca

SEQ ID NO: 721742 - DNA, 120 bp, Artificial Sequence
  ENSG00000197912_219 (sequence is synthesized)
ccgactgcccctgtacttccctgggggttgcgagcactgccgagccctgggtgacgctggtgtggccaggctggagcgcagagaaccacacttggggttcagagtgtgttctcccactca

SEQ ID NO: 721743 - DNA, 120 bp, Artificial Sequence
  ENSG00000197912_220 (sequence is synthesized)
gaagcattggctctgccgggagcgggatggggatgcagctttcttccccattttagacctcaggttggaagggcgcactcaggtggcagcagccacttcgggttgggcgtctcgtgctgt

SEQ ID NO: 721744 - DNA, 120 bp, Artificial Sequence
  ENSG00000197912_221 (sequence is synthesized)
cctggtgcgttgagacatccctcaaagaaagcacgagtaccctccacacccacatagccagggcatccactgtcaccactccatgtggaagtcctgttggtaaaatcttgacaagagcca

SEQ ID NO: 721745 - DNA, 120 bp, Artificial Sequence
  ENSG00000197912_222 (sequence is synthesized)
tttagagagcacggggggaaattctcccaggtccaagcagaatggacagtgagcctgggggacggatggacaggaggaggcctgggcttctgggctccgcaggcagggaggggccggcag

SEQ ID NO: 721746 - DNA, 120 bp, Artificial Sequence
  ENSG00000197912_223 (sequence is synthesized)
tgtggcttattccccgggtggacgaggagccctgggcttctgggctccgcaggcggggaggggccggcagtatggcttattcccacttgagtcagctcttgagcacttgctcgtggccca

SEQ ID NO: 721747 - DNA, 120 bp, Artificial Sequence
  ENSG00000197912_224 (sequence is synthesized)
gaggtgatgctgctgtttctgccctctgtcctctcagaggaagtgggtgctggttcaaggatctcaggctctgagcgggagagcggggtcaggtctagcttctgtccgtggcttgctccc

SEQ ID NO: 721748 - DNA, 120 bp, Artificial Sequence
  ENSG00000197912_225 (sequence is synthesized)
tgtggtgctgcctctgcctgccctgccgtcttccacatgcgtctccaacagggaatggaaggagcctctgacccaaaaacatcccccaaactgtcgggtcctgcggcaagttgagggcct

SEQ ID NO: 721749 - DNA, 120 bp, Artificial Sequence
  ENSG00000197912_226 (sequence is synthesized)
ctcaggggtcctgtctgcggccctgtgggaagtgaggctgtggcagccggtcctttatcctgagtttggttgcttgttttttggacaatgtcttaggtcccagtgatggtggaccagcag

SEQ ID NO: 721750 - DNA, 120 bp, Artificial Sequence
  ENSG00000197912_227 (sequence is synthesized)
gcagccctgaacactgaggatactgtgggaaacccaggcaggagctaaggggtgggagctcagggcttgggggtgcagatctcgaggcccaaggggccattttcccagtgggtgtcttga

SEQ ID NO: 721751 - DNA, 120 bp, Artificial Sequence
  ENSG00000197912_228 (sequence is synthesized)
ctgagttctgagtgttttccagggctctgaacacagcccttttttggacatgtggtttacgcactctatgtgtcccttgtcctttcaccctctaacggggaacagcaaaagctgctcatt

SEQ ID NO: 721752 - DNA, 120 bp, Artificial Sequence
  ENSG00000197912_229 (sequence is synthesized)
aagctgctcattttgataaagttcagtttatcaatttttgcttttatagatctcgtttttactgtgaagtctaagaactgtttgcccgccgggcatggtggatcacctgaggtcaggagt

SEQ ID NO: 721753 - DNA, 120 bp, Artificial Sequence
  ENSG00000197912_230 (sequence is synthesized)
aagagcgaaactccttctcaaaaaaacaaataaataaaagaactgtttgcctattcctagatcctaaagattttctcctgtgggtttcttttttcttttctttgagacagagtcttgctc

SEQ ID NO: 721754 - DNA, 81 bp, Artificial Sequence
  ENSG00000197912_231 (sequence is synthesized)
aggctggagtgcagtggtgcgatcatgggtcactgcagcctcagcctctgggactcaagccgtcctcccaccaacatgcct

SEQ ID NO: 721755 - DNA, 120 bp, Artificial Sequence
  ENSG00000197912_232 (sequence is synthesized)
aagaattttttttgtgtagttgggggtctcaccttgttgcccagcctgctcttgaactcctgggctcaaatgatcttttcacctcagctcctcaaagtgtggggaatacaggtgtgagcc

SEQ ID NO: 721756 - DNA, 120 bp, Artificial Sequence
  ENSG00000197912_233 (sequence is synthesized)
cccatgcctggcctctcatgggtatcttatagaagttttatatttaatccatgatcttattttaagttaacgtctacatgaagtgggaggtttggtcaggttcattttctgcctgtggaa

SEQ ID NO: 721757 - DNA, 120 bp, Artificial Sequence
  ENSG00000197912_234 (sequence is synthesized)
aagtgctccagccccactggtctgaaatgctgtcttctttccaccaagttgtgcttgcacctttgccggagctcaggtgcatgtgggggtctgtgctggctctgtgagtctgtccttccg

SEQ ID NO: 721758 - DNA, 120 bp, Artificial Sequence
  ENSG00000197912_235 (sequence is synthesized)
cacacaactggtctctcgcttctgtgagacgagagcaggtggagtgattcctcccactttgttctttaccagaattgtttcagctattcctttgccttttcctgtaatttttagaatacg

SEQ ID NO: 721759 - DNA, 120 bp, Artificial Sequence
  ENSG00000197912_236 (sequence is synthesized)
cttgttcctatctaccaaagtatcttgctgagattttgataggaacacacacctcttaggagagctagagtaaagagcagtgaccggcccagatctgggccatacgtgtgatcccagcat

SEQ ID NO: 721760 - DNA, 120 bp, Artificial Sequence
  ENSG00000197912_237 (sequence is synthesized)
tttgcgcgtctgagttggaagcattactttagcccgggagtttgaaaccagcctgagcaacatagtgagattctgtctctaaaaaaatacaaaaattagctggcagtggtggtgcgcacc

SEQ ID NO: 721761 - DNA, 120 bp, Artificial Sequence
  ENSG00000197912_238 (sequence is synthesized)
agtggtggtgcgcacctgtagtcttagctgctcagaagattgaggtgggaggatcacttgagcctggcagttcgaggctacagggagccgtggtcaccccactgcactccagcctgggca

SEQ ID NO: 721762 - DNA, 120 bp, Artificial Sequence
  ENSG00000197912_239 (sequence is synthesized)
ggagagaggcgggattgacagcctctctggcggtccggaggcgggactaggaggacgtcccggtaacgattgggcagggtcctgcgtaagggcgcatgcgacactggaagtagcgagcaa

SEQ ID NO: 721763 - DNA, 120 bp, Artificial Sequence
  ENSG00000197912_240 (sequence is synthesized)
ttccttagtttaaaatatcacagatttacctaagagtagacgctcgtccaacagaaataaaaaatgccttgccaaagaaagtgaaaaaataaaaataaaaaatgccccccaaaaataaaa

SEQ ID NO: 721764 - DNA, 120 bp, Artificial Sequence
  ENSG00000197912_241 (sequence is synthesized)
tagaagccataaggatccagaaagtgatggggatgggagctgcgcctccaggtctgaggggagagggaaagtaagcaggaggcccgtaactcagaggaggcctctgcccatcctgccagg

SEQ ID NO: 721765 - DNA, 120 bp, Artificial Sequence
  ENSG00000197912_242 (sequence is synthesized)
ttgccccgcgccacctccttgcacacctgatgtggggctgtgggggagcagcagaggtgaggacagcctctgctgcctcagcatcgtggggttctcattgctctgaaccctcagtagctg

SEQ ID NO: 721766 - DNA, 120 bp, Artificial Sequence
  ENSG00000197912_243 (sequence is synthesized)
tcgctggtgtgaggggtcagcgcagcggccatcgggggtgaaacttgtccttcgcctctcagctgtcttctacgggccttgtcttcttgactccctgcctgtctagtcatgtatgagaag

SEQ ID NO: 721767 - DNA, 120 bp, Artificial Sequence
  ENSG00000197912_244 (sequence is synthesized)
acacttcccggcagtgtgtgaacaggcacctgtggtgggaacgctgctgtctctgggctggccatctagagtgttaggatcccctgttgttgtagaggatgctgcacatttgccttcctg

SEQ ID NO: 721768 - DNA, 120 bp, Artificial Sequence
  ENSG00000197912_245 (sequence is synthesized)
ctttgagacgctttaatgacggagacctcttagtcccacaccttcctcctcaaagcccacgcatcctgcctactgacctgggtcatcttgaccttgtgccaggtctccataacccctcgg

SEQ ID NO: 721769 - DNA, 120 bp, Artificial Sequence
  ENSG00000197912_246 (sequence is synthesized)
ctgtgggcccgcggatcccccagctgtggacctcggcgcggagcgactgttggggccctggatcgtgggcgctgggcgggccgggaagaggcagggctgggatccgcgcagtcctcggcg

SEQ ID NO: 721770 - DNA, 120 bp, Artificial Sequence
  ENSG00000197912_247 (sequence is synthesized)
tggactttcccaacccgtctgttgtgtgtggatgttctccgcccgtcttcctcgccttttaaagtggaatccagtaacggtttccggcgtagcactaatttacagtccacgcctgtggat

SEQ ID NO: 721771 - DNA, 74 bp, Artificial Sequence
  ENSG00000197912_248 (sequence is synthesized)
agaagaataaggagaaggataagtcgaaggggaaggcgcctgaagaggacgaagaatctcactctgttgccctc

SEQ ID NO: 721772 - DNA, 120 bp, Artificial Sequence
  ENSG00000197912_249 (sequence is synthesized)
actcaacaagctttccagctcttggcgtcagctctagacctaaggcggacggaggaaggggtcggggtggcggaggaccccgcgcgcctgggagcccacgagggaccctgcccgggcccg

SEQ ID NO: 721773 - DNA, 120 bp, Artificial Sequence
  ENSG00000197912_250 (sequence is synthesized)
gagggcggaccctgaagagaacagagcctcttcctaagcttccagacggcgcctccccgcttcctacgatgggctcgcgcagcggccggggcaggaccgaggctcgaagcgcctccgaga

SEQ ID NO: 721774 - DNA, 120 bp, Artificial Sequence
  ENSG00000197912_251 (sequence is synthesized)
gggagtccgagtgctgccaagaggaggtctctactcggaacgcaggtgccgtctttacagtggagccccaggaagccgtgcaggtttgaggctcacctgagaaggcggcagtgctgtgtt

SEQ ID NO: 721775 - DNA, 120 bp, Artificial Sequence
  ENSG00000197912_252 (sequence is synthesized)
cctacctcagggttcactgcaaacaatgcatacgctgtagcagttgccagcttggtttgtcagtgctggtctccgtgattggttctcaggtgtgagttgtagcaaagttgcgtgttaatc

SEQ ID NO: 721776 - DNA, 120 bp, Artificial Sequence
  ENSG00000197912_253 (sequence is synthesized)
agagagcgtcctgcccatcccagggtctcagcagggctgaggcagcgtttggggaccagatccgtgctgctccttggcgatgtgcaccacagtcatgggaccagagctaggcccactgtg

SEQ ID NO: 721777 - DNA, 120 bp, Artificial Sequence
  ENSG00000197912_254 (sequence is synthesized)
gggcgagtggacactcagctgggggtcccatttatgggacactaaaaaactcagcagtgaacacgacgttttaacacggtatgtcaagaaatcaaaattaatgcagggactttgggaggc

SEQ ID NO: 721778 - DNA, 74 bp, Artificial Sequence
  ENSG00000197912_255 (sequence is synthesized)
aattagctgggcgtggtggtgcgtacctgtaaccctagccacttgagaggtagaggcacaagaatcgcttaaac

SEQ ID NO: 721779 - DNA, 120 bp, Artificial Sequence
  ENSG00000197912_256 (sequence is synthesized)
caaaagaattagctgggcgtggtggtgcgtacctgtaaccctagccacttgagaggtagaggcacaagaatcgcttaaacccgggaggcagagtctgcagtgagccaagactgtgccact

SEQ ID NO: 721780 - DNA, 120 bp, Artificial Sequence
  ENSG00000197912_257 (sequence is synthesized)
gggaaaaaaaaagaatttttactgtatttgatgggcaaaagtcagatagtcacaatgaaaaagtgagtctctttcccaaggctcagtgtcctgccaggaaaaggttgtgaattggctgtt

SEQ ID NO: 721781 - DNA, 120 bp, Artificial Sequence
  ENSG00000197912_258 (sequence is synthesized)
atggttttggtcattaatgcaatcatcactgcagccgttatttagagcttctttttgttttgagacagggtctctctctctgttgcccagaccggagtccagtggtgcgatcacagctca

SEQ ID NO: 721782 - DNA, 120 bp, Artificial Sequence
  ENSG00000197912_259 (sequence is synthesized)
ctgcagcctcgaccttccgggctcacacgatcctcctacctcagcctcctgcatagctgggactacaggcatgccccactggtggctcgagtgatttttatattttttgtagcgaagggg

SEQ ID NO: 721783 - DNA, 120 bp, Artificial Sequence
  ENSG00000197912_260 (sequence is synthesized)
gcccaggctagtctcgaactcctgggctcatgcaatctgcccacctctaactcccaaagtaccgagatcacagatgtgagcgaccccgcccagcctagttttagattttaaattaagcgt

SEQ ID NO: 721784 - DNA, 120 bp, Artificial Sequence
  ENSG00000197912_261 (sequence is synthesized)
taaattaagcgtcctcgggattctcagagcacttggatgtggccatctcgccgccacaattctcagaagcagcagctgggccagcccctgccccgtctccgtccgtctcccactcagcgg

SEQ ID NO: 721785 - DNA, 120 bp, Artificial Sequence
  ENSG00000197912_262 (sequence is synthesized)
tgaaggagggtcccgggggcccctgggctccaggtccatgggtttgcctcgcataggcctgggcttgtgcttgagaactgccatgcagtgagctccagtatgcccccgggttctagattt

SEQ ID NO: 721786 - DNA, 120 bp, Artificial Sequence
  ENSG00000197912_263 (sequence is synthesized)
ccaaataaaagagcatttcggaaagttttaagactctcttaaggaacagtggtgaggtgccaacgtcctcactgtccagcttcacggtgggtcctcgggaggaaggggatggaggtggtg

SEQ ID NO: 721787 - DNA, 120 bp, Artificial Sequence
  ENSG00000197912_264 (sequence is synthesized)
ctgcctcagtgctctgaccgggacacctggggcccagcactgctctgcgcctgcagtgctgaggatgcctctgtctcgaccccgccctccaggggcacaggacgacctgaggaaggtcac

SEQ ID NO: 721788 - DNA, 89 bp, Artificial Sequence
  ENSG00000197912_265 (sequence is synthesized)
accatctcccaggagaggcgggagatttttgagcagcacctgaagagcctgaagctgacccagtccagcaccttttactcccagcgtct

SEQ ID NO: 721789 - DNA, 120 bp, Artificial Sequence
  ENSG00000197912_266 (sequence is synthesized)
gcgagactccatctcaaaaaaaaaaagaaaacttctcaggactttttcgtaataaggctgtcataatactgcctgatgtattttatgtaatgaattgcagactgcagaaagcagggactt

SEQ ID NO: 721790 - DNA, 120 bp, Artificial Sequence
  ENSG00000197912_267 (sequence is synthesized)
gcagactgcagaaagcagggacttagctgagaaaattaatcgtgcactcattcagcaaaggtttcagggcctgctgtgtggagacacggttccaagcactgctgcagtagcagggaggaa

SEQ ID NO: 721791 - DNA, 120 bp, Artificial Sequence
  ENSG00000197912_268 (sequence is synthesized)
acagaacggacctcaaacgctgtcccagcaaggactccagtctctgccttgtggatgtgtaactggcacatgatgtaccagaaactcctgtgtgtggttgtatccggtgcgtgacacagt

SEQ ID NO: 721792 - DNA, 120 bp, Artificial Sequence
  ENSG00000197912_269 (sequence is synthesized)
actctctccagctgctccttggatttgggaagcagccgaagatttacgggccatggaggctccttctatccctggaaatcggcccttgggaattaagctgagttatgtggttaaagccgt

SEQ ID NO: 721793 - DNA, 120 bp, Artificial Sequence
  ENSG00000197912_270 (sequence is synthesized)
catgacagccatcccctggctgggccagttctgggaataactataatgcttatactacaggatggccaattcagaacttcttactagtgctgaattcaataaaggtttaataacacattt

SEQ ID NO: 721794 - DNA, 120 bp, Artificial Sequence
  ENSG00000197915_0 (sequence is synthesized)
accctgaaagctgtttctgtctctaccctacttgttcctctggtgagctaggttactcaaacttgcaaaaaaaaaaatgcctaaactcctacaaggcgtcatcactgtcatcgatgtttt

SEQ ID NO: 721795 - DNA, 120 bp, Artificial Sequence
  ENSG00000197915_1 (sequence is synthesized)
ctaccaatatgccacccagcatggggagtatgatacgttgaacaaggcagagctgaaagaacttctggaaaatgagtttcatcaaattctgaagaatccaaacgatccagatactgtgga

SEQ ID NO: 721796 - DNA, 120 bp, Artificial Sequence
  ENSG00000197915_2 (sequence is synthesized)
tatcatcttgcaaagtctggatcgagaccataacaagaaagtggattttactgagtatcttctgatgatattcaagctggttcaggctcgtaataaaatcattggcaaagattactgcca

SEQ ID NO: 721797 - DNA, 120 bp, Artificial Sequence
  ENSG00000197915_3 (sequence is synthesized)
agtttcagggtcaaagctgagagatgacactcaccagcaccaagaggaacaagaagaaactgaaaaagaggagaacaaacggcaagaatcctcttttagtcattcaagttggagtgcagg

SEQ ID NO: 721798 - DNA, 120 bp, Artificial Sequence
  ENSG00000197915_4 (sequence is synthesized)
agagaatgattcctattccagaaacgtcagaggaagtcttaaacctgggactgaatccatatccagaagactgagttttcaaagagacttttctggccaacataactcctactcaggtca

SEQ ID NO: 721799 - DNA, 120 bp, Artificial Sequence
  ENSG00000197915_5 (sequence is synthesized)
gtcttccagctatggtgagcaaaactccgactcccatcagtcttcaggccgcggccaatgtgggtctgggtcagggcagtctcccaactatggccaacacggctctggctccggacagtc

SEQ ID NO: 721800 - DNA, 120 bp, Artificial Sequence
  ENSG00000197915_6 (sequence is synthesized)
ttccagcaatgacacacatgggtctggctcaggccagtcttctggctttagtcaacacaagtctagctcagggcagtcctctggttacagtcagcatggatctggctcaggtcactcctc

SEQ ID NO: 721801 - DNA, 120 bp, Artificial Sequence
  ENSG00000197915_7 (sequence is synthesized)
tggctacggacaacacggctctaggtcaggacagtcatctaggggtgaacgacacagatctagctcaggttcgtcttccagctatggtcagcatgggtctggttcccgtcagtctttggg

SEQ ID NO: 721802 - DNA, 120 bp, Artificial Sequence
  ENSG00000197915_8 (sequence is synthesized)
ccacggccgacaagggtctggatctcgccagtctcctagccacgtccgacatgggtccggttcggggcactcctccagccacggccaacacgggtctggctcaagttactcttacagccg

SEQ ID NO: 721803 - DNA, 120 bp, Artificial Sequence
  ENSG00000197915_9 (sequence is synthesized)
tggccattatgagtctggctcaggccagacttctggctttgggcaacatgagtctggctcaggacagtcctctggctatagtaagcatggttctggctcaggtcactcctctagccaggg

SEQ ID NO: 721804 - DNA, 120 bp, Artificial Sequence
  ENSG00000197915_10 (sequence is synthesized)
acaacatggatctacgtcagggcaggcatcaagctctggccaacatggctccagctcacgtcagtcttccagctatggtcagcatgagtctgcctcccgtcactcttcaggccgcggcca

SEQ ID NO: 721805 - DNA, 120 bp, Artificial Sequence
  ENSG00000197915_11 (sequence is synthesized)
acacagctctggatctggccagtctccaggccacggccagcgtgggtctgggtcagggcagtctcccagctccggccaacatgggactggctttggtcgatcttccagcagtggcccata

SEQ ID NO: 721806 - DNA, 120 bp, Artificial Sequence
  ENSG00000197915_12 (sequence is synthesized)
tgtgtctggttcaggctactcttctggctttggtcaccacgagtctagctcagagcattcctctggttacactcagcatggatctggctcaggtcactcctccggccacggacaacacgg

SEQ ID NO: 721807 - DNA, 120 bp, Artificial Sequence
  ENSG00000197915_13 (sequence is synthesized)
ctctaggtcaggacagtcatctaggggtgaacgacaaggatctagtgcaggttcatcttccagctatggtcagcatgggtctggctcccgtcaatctttgggacacagccgacatgggtc

SEQ ID NO: 721808 - DNA, 120 bp, Artificial Sequence
  ENSG00000197915_14 (sequence is synthesized)
tggatctggccagtctcctagccctagccgtggccgacatgagtctggttccaggcagtcttccagctatggcccacatgggtatggctcagggaggtcttcaagccgtggcccatatga

SEQ ID NO: 721809 - DNA, 120 bp, Artificial Sequence
  ENSG00000197915_15 (sequence is synthesized)
gtctggctccggtcactcttctggcttaggtcaccaagagtctcgctcaggacagtcctctggctacggtcaacacggatctagctcgggtcattcctctacccatgggcaacatggttc

SEQ ID NO: 721810 - DNA, 120 bp, Artificial Sequence
  ENSG00000197915_16 (sequence is synthesized)
tacatcaggacagtcatcgagctgtggccaacatggagctacctcaggtcagtcttccagccacggtcagcatggctctggctcaagtcagtcttctcgctatggccaacagggctctgg

SEQ ID NO: 721811 - DNA, 120 bp, Artificial Sequence
  ENSG00000197915_17 (sequence is synthesized)
atctggccagtctcctagtcgcggccgacatgggtccgattttgggcactcttccagctacggccaacatgggtctggctccggttggtcttcaagcaatggcccacatgggtctgtctc

SEQ ID NO: 721812 - DNA, 120 bp, Artificial Sequence
  ENSG00000197915_18 (sequence is synthesized)
aggccagtcttccggctttggtcacaagtctggctcagggcagtcctctggttacagtcagcatggatctggctcaagtcactcctccggctacagaaaacacggctctaggtcaggaca

SEQ ID NO: 721813 - DNA, 120 bp, Artificial Sequence
  ENSG00000197915_19 (sequence is synthesized)
gtcatctaggagtgaacaacacggatctagctcaggtttgtcttccagctatggtcagcatgggtcgggctcccatcaatcttcgggccacggccgacaagggtctggatctggccactc

SEQ ID NO: 721814 - DNA, 120 bp, Artificial Sequence
  ENSG00000197915_20 (sequence is synthesized)
tcctagccgtgtccgacatgggtccagttcagggcactcctccagccacggccaacacgggtctggcacaagttgttcttccagctgtggccattatgagtctggctcaggccaggcttc

SEQ ID NO: 721815 - DNA, 120 bp, Artificial Sequence
  ENSG00000197915_21 (sequence is synthesized)
tggttttgggcaacacgagtctggctcaggacagggctatagtcagcatggttctgcctcaggtcacttctctagccagggacgacatggatctacgtcagggcagtcatcaagctccgg

SEQ ID NO: 721816 - DNA, 120 bp, Artificial Sequence
  ENSG00000197915_22 (sequence is synthesized)
ccaacatgactctagctcaggtcaatcttccagctatggtcagcatgagtctgcctcccatcacgcttcgggccgcggccgacatggctctggatctggccagtctccaggccacggcca

SEQ ID NO: 721817 - DNA, 120 bp, Artificial Sequence
  ENSG00000197915_23 (sequence is synthesized)
gcgtgggtctgggtcagggcagtctcccagctatggccgacatgggtctggctccggtcggtcttccagcagtggccgacatgggtctggctcaggccagtcttctggctttggtcacaa

SEQ ID NO: 721818 - DNA, 120 bp, Artificial Sequence
  ENSG00000197915_24 (sequence is synthesized)
gtctagctcagggcagtcctctggttacactcagcatggatctggctcaggtcactcctccagctacgaacaacacggctctaggtcaggacagtcatctaggagcgaacaacatggatc

SEQ ID NO: 721819 - DNA, 120 bp, Artificial Sequence
  ENSG00000197915_25 (sequence is synthesized)
tagctcaggttcgtcttccagctatggtcagcatgggtctggctcccgtcagtctttgggccacggccaacatgggtctggatctggccagtctcctagccctagccgtggccgacatgg

SEQ ID NO: 721820 - DNA, 120 bp, Artificial Sequence
  ENSG00000197915_26 (sequence is synthesized)
gtctggttccgggcagtcttccagctatggcccatataggtctggctcagggtggtcttcaagccgtggcccatatgagtctggctccggtcactcttctggcttaggtcaccgagagtc

SEQ ID NO: 721821 - DNA, 120 bp, Artificial Sequence
  ENSG00000197915_27 (sequence is synthesized)
tcgctcaggacagtcctctggctacggtcaacatggatctagctcaggtcattcctctacccatgggcaacacggttctacatcaggacagtcatcgagctgtggccaacatggagctag

SEQ ID NO: 721822 - DNA, 120 bp, Artificial Sequence
  ENSG00000197915_28 (sequence is synthesized)
ctcaggtcagtcttccagccacggtcagcatggctctggctcaagtcagtcttctggctatggccgacagggctctggatctggccagtctccaggccacggccagcgtgggtctgggtc

SEQ ID NO: 721823 - DNA, 120 bp, Artificial Sequence
  ENSG00000197915_29 (sequence is synthesized)
aaggcagtctcccagctacggccgacatgggtctggctccggtcggtcttccagcagtggccaacatgggtctggcttaggcgagtcttctggctttggtcaccacgagtctagctcagg

SEQ ID NO: 721824 - DNA, 120 bp, Artificial Sequence
  ENSG00000197915_30 (sequence is synthesized)
gcagtcctctagttacagtcagcatgggtctggctcaggtcactcctctggctacggacaacacggctctagatcaggacagtcatctaggggtgaacgacacggatctagctcaggttc

SEQ ID NO: 721825 - DNA, 120 bp, Artificial Sequence
  ENSG00000197915_31 (sequence is synthesized)
gtcttcccactatggtcagcatgggtctggctcccgtcagtcttcgggccacggccgacaagggtctggatctggccattcccctagccgcggccgacatgggtccggtttggggcactc

SEQ ID NO: 721826 - DNA, 120 bp, Artificial Sequence
  ENSG00000197915_32 (sequence is synthesized)
ctccagccacggccaacatgggtctggctcaggtcgttcttccagccgtggcccatatgagtctcgctcgggtcactcttctgtctttggtcaacatgagtctggctcaggacattcctc

SEQ ID NO: 721827 - DNA, 120 bp, Artificial Sequence
  ENSG00000197915_33 (sequence is synthesized)
tgcttacagtcagcatggtagtggctcagggcacttctgtagccaaggacagcatggttctacatcaggacagtcatcaacctttgaccaggagggatctagcacaggccagtcttccag

SEQ ID NO: 721828 - DNA, 120 bp, Artificial Sequence
  ENSG00000197915_34 (sequence is synthesized)
ctatggccaccgtggctctggctccagtcagtcttctggctatggccgacatggggctggatctggccagtctcctagtcgcggccgacatgggtccggttctgggcactcttccagcta

SEQ ID NO: 721829 - DNA, 120 bp, Artificial Sequence
  ENSG00000197915_35 (sequence is synthesized)
cggccaacatgggtctggctccggttggtcttccagcagtggccgacatgggtctggctcaggtcagtcttctggatttggtcaccacgagtctagctcatggcagtcctctggttgcac

SEQ ID NO: 721830 - DNA, 120 bp, Artificial Sequence
  ENSG00000197915_36 (sequence is synthesized)
tcagcatggatctggctcaggtcactcctccagctacgaacaacacggctctaggtcaggacagtcatctaggggtgaacgacacggatctagctcaggttcatcttccagctatggtca

SEQ ID NO: 721831 - DNA, 120 bp, Artificial Sequence
  ENSG00000197915_37 (sequence is synthesized)
gcatgggtctggctcccgtcagtctttgggccacggccaacatgggtctggatctggccagtctcctagccctagccgtggccgacatgggtctggttctgggcagtcttccagctacag

SEQ ID NO: 721832 - DNA, 120 bp, Artificial Sequence
  ENSG00000197915_38 (sequence is synthesized)
cccatatgggtctggctcagggtggtcttccagccgtggcccatatgagtctggctccagtcactcttctggcttaggtcaccgagagtctcgctcaggacagtcctctggctacggtca

SEQ ID NO: 721833 - DNA, 120 bp, Artificial Sequence
  ENSG00000197915_39 (sequence is synthesized)
acatggatctagctcaggtcattcctctacccatgggcaacatggttctacatcaggacagtcatcgagctgtggccaacatggagctagctcaggtcagtcttccagccacggtcagca

SEQ ID NO: 721834 - DNA, 120 bp, Artificial Sequence
  ENSG00000197915_40 (sequence is synthesized)
atggccgacagggctctggatctggccagtctccaggccacggccagcgtgggtctgggtcaaggcagtctcccagctacggccgacatgggtctggctccggtcggtcttccagcagtg

SEQ ID NO: 721835 - DNA, 120 bp, Artificial Sequence
  ENSG00000197915_41 (sequence is synthesized)
gccaacatgggtctggcttaggcgagtcttctggctttggtcaccacgagtctagctcagggcagtcctctagttacagtcagcatgggtctggctcaggtcactcctctggctacggac

SEQ ID NO: 721836 - DNA, 120 bp, Artificial Sequence
  ENSG00000197915_42 (sequence is synthesized)
aacacggctctagatcaggacagtcatctaggggtgaacgacacggatctagctcacgttcgtcttcccgctatggtcagcatgggtctggctcccgtcagtcttcgggccacggccgac

SEQ ID NO: 721837 - DNA, 120 bp, Artificial Sequence
  ENSG00000197915_43 (sequence is synthesized)
aagggtctggatctggccagtcccctagccgcggccgacatgggtccggtttggggcactcctccagccacggccaacatgggtctggctcaggtcgttcttccagccgtggcccatatg

SEQ ID NO: 721838 - DNA, 120 bp, Artificial Sequence
  ENSG00000197915_44 (sequence is synthesized)
agtctcgctcgggtcactcttctgtctttggtcaacatgagtctggctcaggacattcctctgcttacagtcagcatggtagtggctcagggcacttctgtagccaaggacagcatggtt

SEQ ID NO: 721839 - DNA, 120 bp, Artificial Sequence
  ENSG00000197915_45 (sequence is synthesized)
ctacatcaggacagtcatcaacctttgaccaggagggatctagcacaggtcagtcttccagccacggtcagcatggctctggctcaagtcagtcttctagctatggccaacagggctctg

SEQ ID NO: 721840 - DNA, 120 bp, Artificial Sequence
  ENSG00000197915_46 (sequence is synthesized)
gatctggccagtctcctagtcgcggccgacatgggtccggttccgggcactcttccagctacggccaacatgggtctggctccggttggtcttccagcagtggccgacatgggtctggct

SEQ ID NO: 721841 - DNA, 120 bp, Artificial Sequence
  ENSG00000197915_47 (sequence is synthesized)
caggtcagtcttctggatttggtcaccatgagtctagctcatggcagtcctctggttacactcagcatggatctggctcaggtcactcctccagctacgaacaacacggctctaggtcag

SEQ ID NO: 721842 - DNA, 120 bp, Artificial Sequence
  ENSG00000197915_48 (sequence is synthesized)
gacagtcatctaggggtgaacaacacggatctagctcaggttcatcttccagctatggtcagcatgggtctggctcccgtcagtctttgggccacggccaacatgggtctggatctggcc

SEQ ID NO: 721843 - DNA, 120 bp, Artificial Sequence
  ENSG00000197915_49 (sequence is synthesized)
agtctcctagccctagccgtggccgacatgggtctggttctgggcagtcttccagctacggcccatatgggtctggctcagggtggtcttccagccgtggcccatatgagtctggctccg

SEQ ID NO: 721844 - DNA, 120 bp, Artificial Sequence
  ENSG00000197915_50 (sequence is synthesized)
gtcactcttctggcttaggtcaccgagagtctcgctcaggacagtcctctggctacggtcaacatggatctagctcaggtcattcctctacccatgggcaacatggttctgcatcaggac

SEQ ID NO: 721845 - DNA, 120 bp, Artificial Sequence
  ENSG00000197915_51 (sequence is synthesized)
agtcatcgagctgtggccaacatggagctagctcaggtcagtcttccagccacggtcagcatggctctggctcaagtcagtcttctggctatggccgacagggctctggatctggccagt

SEQ ID NO: 721846 - DNA, 120 bp, Artificial Sequence
  ENSG00000197915_52 (sequence is synthesized)
ctccaggccacggccagcgtgggtctgggtcaaggcagtctcccagctatggccgacatgggtctggctccggtcggtcttccagcagtggccaacatgggcctggcttaggcgagtctt

SEQ ID NO: 721847 - DNA, 120 bp, Artificial Sequence
  ENSG00000197915_53 (sequence is synthesized)
ctggctttggtcaccacgagtctagctcagggcagtcctctagttacagtcagcatgggtctggctcaggtcactcctctggctacggacaacacggctctagatcaggacagtcatcta

SEQ ID NO: 721848 - DNA, 120 bp, Artificial Sequence
  ENSG00000197915_54 (sequence is synthesized)
ggggtgaacgacacggatctagctcaggttcgtcttcccgctatggtcagcatgggtctggctcccgtcagtcttcgggccacggccgacaagggtctggatctggccattcccctagcc

SEQ ID NO: 721849 - DNA, 120 bp, Artificial Sequence
  ENSG00000197915_55 (sequence is synthesized)
gcggccgacatgggtccggttcggggcactcctccagccacggccaacatgggtctggctcaggtcgttcttccagccgtggcccatatgagtctcgctcgggtcactcttctgtctttg

SEQ ID NO: 721850 - DNA, 120 bp, Artificial Sequence
  ENSG00000197915_56 (sequence is synthesized)
gtcaacatgagtctggctcaggacattcctctgcttacagtcagcatggtagtggctcagggcacttctgtagccaaggacagcatggttctacatcaggacagtcatcaacctttgacc

SEQ ID NO: 721851 - DNA, 120 bp, Artificial Sequence
  ENSG00000197915_57 (sequence is synthesized)
aggagggatctagcacaggtcagtcttccagccacggtcagcatggctctggctcaagtcagtcttctagctatggccaacagggctctggatctggccagtctcctagtcgcggccgac

SEQ ID NO: 721852 - DNA, 120 bp, Artificial Sequence
  ENSG00000197915_58 (sequence is synthesized)
atgggtccggttccgggcactcttccagctacggccaacatgggtctggctccggttggtcttccagcagtggccgacatgggtctggctcaggtcagtcttctggatttggtcaccacg

SEQ ID NO: 721853 - DNA, 120 bp, Artificial Sequence
  ENSG00000197915_59 (sequence is synthesized)
agtctagctcatggcagtcctctggttacactcagcatggatctggctcaggtcactcctccagctacgaacaacacggctctaggtcaggacagtcatctaggggtgaacgacacggat

SEQ ID NO: 721854 - DNA, 120 bp, Artificial Sequence
  ENSG00000197915_60 (sequence is synthesized)
ctagctcaggttcatcttccagctatggtcagcatgggtctggctcccgtcagtctttgggccacggccaacatgggtctggatctggccagtctcctagccctagccgtggccgacatg

SEQ ID NO: 721855 - DNA, 120 bp, Artificial Sequence
  ENSG00000197915_61 (sequence is synthesized)
ggtctggttctgggcagtcttccagctacagcccatatgggtctggctcagggtggtcttccagccgtggcccatatgagtctggctccggtcactcttctggcttaggtcaccgagagt

SEQ ID NO: 721856 - DNA, 120 bp, Artificial Sequence
  ENSG00000197915_62 (sequence is synthesized)
ctcgctcaggacagtcctctggctacggtcaacatggatctagctcaggtcattcctctacccatgggcaacatggttctacatcaggacagtcatcgagctgtggccaacatggagcta

SEQ ID NO: 721857 - DNA, 120 bp, Artificial Sequence
  ENSG00000197915_63 (sequence is synthesized)
gctcaggtcagtcttccagccacggtcagcatggctctggctcaagtcagtcttctggctatggccgacagggctctggatctggccagtctccaggccacggccagcgtgggtctgggt

SEQ ID NO: 721858 - DNA, 120 bp, Artificial Sequence
  ENSG00000197915_64 (sequence is synthesized)
caaggcagtctcccagctacggccgacatgggtctggctccggtcggtcttccagcagtggccaacatgggtctggcttaggcgagtcttctggctttggtcaccacgagtctagctcag

SEQ ID NO: 721859 - DNA, 120 bp, Artificial Sequence
  ENSG00000197915_65 (sequence is synthesized)
ggcagtcctctagttacagtcagcatgggtctggctcaggtcactcctctggctacggacaacacggctctagatcaggacagtcatctaggggtgaacgacacggatctagctcaggtt

SEQ ID NO: 721860 - DNA, 120 bp, Artificial Sequence
  ENSG00000197915_66 (sequence is synthesized)
cgtcttcccactatggtcagcatgggtctggctcccgtcagtcttcgggccacggccgacaagggtctggatctggccagtcccctagccgcggccgacatgggtccggtttggggcact

SEQ ID NO: 721861 - DNA, 120 bp, Artificial Sequence
  ENSG00000197915_67 (sequence is synthesized)
cctccagccacggccaacatgggtctggctcaggtcgttcttccagccgtggcccatatgagtctcgcttgggtcactcttctgtctttggtcaacatgagtctggctcaggacattcct

SEQ ID NO: 721862 - DNA, 120 bp, Artificial Sequence
  ENSG00000197915_68 (sequence is synthesized)
ctgcttacagtcagcatggtagtggctcagggcacttctgtagccaaggacagcatggttctacatcaggacagtcatcaacctttgaccaggagggatctagcacaggccagtcttcca

SEQ ID NO: 721863 - DNA, 120 bp, Artificial Sequence
  ENSG00000197915_69 (sequence is synthesized)
gctatggccaccgtggctctggctccagtcagtcttctggctatggccgacatggggctggatctggccagtctcttagccacggccgacacgggtctggttcagggcagtcttccagct

SEQ ID NO: 721864 - DNA, 120 bp, Artificial Sequence
  ENSG00000197915_70 (sequence is synthesized)
acggccaacatgggtctggctcaggacagtcctctggttatagtcagcatggaagtggctcagggcaagatgggtattcttattgcaaaggaggaagtaaccatgatgggggaagttctg

SEQ ID NO: 721865 - DNA, 120 bp, Artificial Sequence
  ENSG00000197915_71 (sequence is synthesized)
gctcatattttctcagttttcctagtagcacttcaccctatgaatatgtccaagagcagaggtgctacttttatcagtgaataataaacataaatgcaatttactcaagtagcaatttaa

SEQ ID NO: 721866 - DNA, 120 bp, Artificial Sequence
  ENSG00000197915_72 (sequence is synthesized)
gaaataggaaagtcatctatgaattcatcatgaaagacaagcaatccatcatgaaattcgttctaaaagtgaatcaatgcatttctgtctctttctttagagcctaaaactgtagcatat

SEQ ID NO: 721867 - DNA, 120 bp, Artificial Sequence
  ENSG00000197915_73 (sequence is synthesized)
atcttgttatggggttccttccaaagactgttaggcatttgtgctactttgttagaaaatactgagtggaataacttgttagaatgagggttaaactttgaggaataatgaaaagctttt

SEQ ID NO: 721868 - DNA, 120 bp, Artificial Sequence
  ENSG00000197915_74 (sequence is synthesized)
aaagagctttgggtttagttggagttgtctttttgagagctcatcattcatttatagatggtgccaaagctaaccttacatttcttagaagcaaaatattacaaatgcattaccagtcct

SEQ ID NO: 721869 - DNA, 120 bp, Artificial Sequence
  ENSG00000197915_75 (sequence is synthesized)
agatacaaagctttgttttacagcaattagtgtaccctaatttttagtgtgccccaagtttggtgtgtcccaatttttggtattgtggcagaaggtgaaggctctgaaagcaaagatgca

SEQ ID NO: 721870 - DNA, 120 bp, Artificial Sequence
  ENSG00000197915_76 (sequence is synthesized)
gcagcggtagtgtctttacttatcaaaaccatcaagtcctttttcttgggtatatatttaatcagtaagttaattagtggcataaaaaagtagcatcagggtcttttcccaagccagtga

SEQ ID NO: 721871 - DNA, 120 bp, Artificial Sequence
  ENSG00000197915_77 (sequence is synthesized)
gcaagagcattatttcataaagaatagggatttatcatttcaggaaaaaaaaaaacattcaaatgtgggctttagcttgttttcagcagaaagatcttgctccctatttctaagaggctg

SEQ ID NO: 721872 - DNA, 120 bp, Artificial Sequence
  ENSG00000197915_78 (sequence is synthesized)
ctcaatattgggaaatatattgaggagttattccatggaaatacaatgctttccacctactactgtagttcaataacgtttccacctgaaaaaatatcatccatgcccagatgaaaagga

SEQ ID NO: 721873 - DNA, 120 bp, Artificial Sequence
  ENSG00000197915_79 (sequence is synthesized)
agagtatctgtcactgctacatagttccttaatttgactgtaacacatttgtttcaagtctttggattcaaacaaccggattgtattaaaattgacaataaataaatgttgattaaatac

SEQ ID NO: 721874 - DNA, 120 bp, Artificial Sequence
  ENSG00000197919_0 (sequence is synthesized)
agagaacctagagcccaaggttcagagtcacccatctcagcaagcccagaagtatctgcaatatctacgatggcctcgccctttgctttactgatggtcctggtggtgctcagctgcaag

SEQ ID NO: 721875 - DNA, 120 bp, Artificial Sequence
  ENSG00000197919_1 (sequence is synthesized)
tcaagctgctctctgggctgtgatctccctgagacccacagcctggataacaggaggaccttgatgctcctggcacaaatgagcagaatctctccttcctcctgtctgatggacagacat

SEQ ID NO: 721876 - DNA, 120 bp, Artificial Sequence
  ENSG00000197919_2 (sequence is synthesized)
gactttggatttccccaggaggagtttgatggcaaccagttccagaaggctccagccatctctgtcctccatgagctgatccagcagatcttcaacctctttaccacaaaagattcatct

SEQ ID NO: 721877 - DNA, 120 bp, Artificial Sequence
  ENSG00000197919_3 (sequence is synthesized)
cgaactctaccagcagctgaatgacttggaagcctgtgtgatgcaggaggagagggtgggagaaactcccctgatgaatgcggactccatcttggctgtgaagaaatacttccgaagaat

SEQ ID NO: 721878 - DNA, 87 bp, Artificial Sequence
  ENSG00000197919_4 (sequence is synthesized)
ctctctttatcaacaaacttgcaagaaagattaaggaggaaggaataacatctggtccaacatgaaaacaattcttattgactcata

SEQ ID NO: 721879 - DNA, 120 bp, Artificial Sequence
  ENSG00000197919_5 (sequence is synthesized)
acatctggtccaacatgaaaacaattcttattgactcatacaccaggtcacgctttcatgaattctgtcatttcaaagactctcacccctgctataactatgaccatgctgataaactga

SEQ ID NO: 721880 - DNA, 120 bp, Artificial Sequence
  ENSG00000197919_6 (sequence is synthesized)
tttatctatttaaatatttatttaactattcataagatttaaattatttttgttcatataacgtcatgtgcacctttacactgtggttagtgtaataaaacatgttccttatatttactc

SEQ ID NO: 721881 - DNA, 120 bp, Artificial Sequence
  ENSG00000197921_0 (sequence is synthesized)
ccgggacgcgcttggccttgcccgcgcccgctcgcctcgtctcgcccggcctccccgcgtcgcctcgtcgcctgttccgcgccaggcatggcccccagcactgtggccgtggagctgctc

SEQ ID NO: 721882 - DNA, 120 bp, Artificial Sequence
  ENSG00000197921_1 (sequence is synthesized)
gtggagctgctcagccccaaagagaaaaaccgactgcggaagccggtggtggagaagatgcgccgcgaccgcatcaacagcagcatcgagcagctgaagctgctgctggagcaggagttc

SEQ ID NO: 721883 - DNA, 120 bp, Artificial Sequence
  ENSG00000197921_2 (sequence is synthesized)
gcgcggcaccagcccaactccaagctggagaaggccgacatcctggagatggctgtcagctacctgaagcacagcaaagccttcgtcgccgccgccggccccaagagcctgcaccaggac

SEQ ID NO: 721884 - DNA, 120 bp, Artificial Sequence
  ENSG00000197921_3 (sequence is synthesized)
tacagcgaaggctactcgtggtgcctgcaggaggccgtgcagttcctgacgctccacgccgccagcgacacgcagatgaagctgctgtaccacttccagcggcccccggccgcgcccgcc

SEQ ID NO: 721885 - DNA, 120 bp, Artificial Sequence
  ENSG00000197921_4 (sequence is synthesized)
gcgggacctgcgggcgcgcggcccgacgaccagagggcgagcctgctcctctcgcctgtagggaagcgccttcccgccgtcgtccgccccgggcttggacgcgcccttctccggaaggct

SEQ ID NO: 721886 - DNA, 120 bp, Artificial Sequence
  ENSG00000197921_5 (sequence is synthesized)
ctggccccaagctggccggcccgcaggagccccattctcagagaatgtgtgtgcagagtccctgccgttttaggacaatcagggcccatcttctgccaagtgtctgaccccatggggttg

SEQ ID NO: 721887 - DNA, 120 bp, Artificial Sequence
  ENSG00000197921_6 (sequence is synthesized)
ttctgtgtttgcatttaagcaagtgacttctgggaagtccccggccgcccggggttctatgatatttgtagtgccggggctcgcacactgctgcccccagcctgtagaggactttcttca

SEQ ID NO: 721888 - DNA, 120 bp, Artificial Sequence
  ENSG00000197921_7 (sequence is synthesized)
gggcccgtagctgctgggcgtacccctggcaggcgggctgtgccgcgggcacatttgccttttgtgaaggccgaactcgagctgtatcctcataggaaacagtgatcaccccggacgggc

SEQ ID NO: 721889 - DNA, 120 bp, Artificial Sequence
  ENSG00000197921_8 (sequence is synthesized)
gtccaggaccctgagggccatggccaaaaggctcctgagtgtgcctggtggtctggctggggctcacggtgggctgtctggggagggtgggtgcctccactatgatccttaaaggattcc

SEQ ID NO: 721890 - DNA, 120 bp, Artificial Sequence
  ENSG00000197921_9 (sequence is synthesized)
tctgtgtgggtggatgcgtgtgggcacgactttgtactcagaaattgaactctcagtcacgtggaagccacgggactgctccgaagccgccataataaaatctgattgttcagcccccaa

SEQ ID NO: 721891 - DNA, 120 bp, Artificial Sequence
  ENSG00000197928_0 (sequence is synthesized)
taaacaacatatttttgacatacagactgacttacctgagaaagaaactcagaggaagaggaaagaaagaagaggagggaatggctctttctcagggactgtttacattcaaggatgtgg

SEQ ID NO: 721892 - DNA, 120 bp, Artificial Sequence
  ENSG00000197928_1 (sequence is synthesized)
ccatagaattctctcaagaggagtgggagtgcctggaccctgcccagagggccttgtacagggacgtgatgttggagaactacaggaacctgctttctctcgatgaggataacatccctc

SEQ ID NO: 721893 - DNA, 120 bp, Artificial Sequence
  ENSG00000197928_2 (sequence is synthesized)
cagaagatgatatttctgttggatttacaagcaagggattatcaccaaaggaaaataataaagaggaattataccatctggtgatattagaaagaaaggaaagccatggcatcaacaatt

SEQ ID NO: 721894 - DNA, 120 bp, Artificial Sequence
  ENSG00000197928_3 (sequence is synthesized)
ttgacctcaaggaagtctgggaaaatatgcctaagtttgacagcctgtgggactatgatgtaaaaaattacaaaggaatgcctttgacctgtaacaaaaatctcactcacagaaaagatc

SEQ ID NO: 721895 - DNA, 120 bp, Artificial Sequence
  ENSG00000197928_4 (sequence is synthesized)
aacaacataataaatcctcaatacatttctctttaaagcagagtgtttctataagagatagtgcacaccagtatttcatccatgacaagccatttataaggaatttgttaaaactgaaaa

SEQ ID NO: 721896 - DNA, 120 bp, Artificial Sequence
  ENSG00000197928_5 (sequence is synthesized)
ataacataaggtatgccggaaacaaatacgtgaagtgttttgaaaataaaattggattaagcttacaggcacagctggctgaactacagagatttcaaactggggagaaaatgtatgaat

SEQ ID NO: 721897 - DNA, 120 bp, Artificial Sequence
  ENSG00000197928_6 (sequence is synthesized)
gtaatccagttgagaagtctatcaatagttcctcagtttcaccacttcctccttgtgtcaaaaacatttgtaataaatataggaagattttgaaataccctttattacatacacagtatg

SEQ ID NO: 721898 - DNA, 120 bp, Artificial Sequence
  ENSG00000197928_7 (sequence is synthesized)
ggagaacacacattagagaaaaatcatacaagtgtaatgactgtggaaaggcttttagcaaaagttcgaacctcactaatcatcagagaattcactctggacagagaccttacaaatgta

SEQ ID NO: 721899 - DNA, 120 bp, Artificial Sequence
  ENSG00000197928_8 (sequence is synthesized)
acgagtgtggcaaagcctttaaccagtgttcgaacctcactaggcatcagagagtccatacaggagagaaaccatatcaatgtaatatatgtggcaaggtctgtagtcaaaattcaaatc

SEQ ID NO: 721900 - DNA, 82 bp, Artificial Sequence
  ENSG00000197928_9 (sequence is synthesized)
aagtcatcagaggatgtaaggcatttatccagcgttcacacctttggggtcatgaaagaattcatactggagagaaacctta

SEQ ID NO: 721901 - DNA, 120 bp, Artificial Sequence
  ENSG00000197928_10 (sequence is synthesized)
cttacaaatgtaatgaatgtgacaaagcctttgctgaacgttcaagccttacccaacataagagaatccatactggagagaagccttacatatgtaatgagtgtggcaaagcttttaagc

SEQ ID NO: 721902 - DNA, 120 bp, Artificial Sequence
  ENSG00000197928_11 (sequence is synthesized)
agtgctcacatctcactaggcatcagaatatacatcctggagagaaaccacacaaatgtaatgtgtgtggcagggcttttatccaaagttcaagtcttgtggaacatcagagaattcaca

SEQ ID NO: 721903 - DNA, 120 bp, Artificial Sequence
  ENSG00000197928_12 (sequence is synthesized)
ctggagaaaaaccttacaaatgtaataaatgtgataaagcttttatcaaacgttcacacctttggggtcatcagagaactcatactggagagaaaccttacaaatgtactgaatgtggca

SEQ ID NO: 721904 - DNA, 120 bp, Artificial Sequence
  ENSG00000197928_13 (sequence is synthesized)
aagcctttactgaacgttcaaatcttactcagcataagaaaatccatactggagagaaaccttacaaatgtactgaatgtggcaaagcttttacccaatttgcaaacctcactagacacc

SEQ ID NO: 721905 - DNA, 120 bp, Artificial Sequence
  ENSG00000197928_14 (sequence is synthesized)
agttcaaaccttggagatcatcaaaaaagttataatagagaaaaacatatcaaatataatgagacaaaaattaagtattcaagctgtacctagcatcaggggctccattgtgaaaagaaa

SEQ ID NO: 721906 - DNA, 120 bp, Artificial Sequence
  ENSG00000197928_15 (sequence is synthesized)
ccatataaaacgaaaatgtggtaaagcctttagctatggcttatgtctcacttgataccagaatatacatctttgagataaaccacacaaagataacatgtatggcaaggcttatccaaa

SEQ ID NO: 721907 - DNA, 120 bp, Artificial Sequence
  ENSG00000197928_16 (sequence is synthesized)
gttcaagccttgtggaacatcatagaattcttactgtagagaagccttacaaatataatgaatgtgaacagctttataaaaatatttaccctattatggttataacagaagacattcagg

SEQ ID NO: 721908 - DNA, 120 bp, Artificial Sequence
  ENSG00000197928_17 (sequence is synthesized)
atggaaaccatacaaatgtggcaagtcctttaagcaatgttctgacttcaggatacaccattcatattggagagaagcattacaagtgaaggtggtaaattattttaaatttctcaatgg

SEQ ID NO: 721909 - DNA, 120 bp, Artificial Sequence
  ENSG00000197928_18 (sequence is synthesized)
aaattcatccttatatgcaagcattttgtcatacaaaaattcaggctagagggaactaagtcttttttccttcttgaagattaagtgattgatgttaaattcacagacaattttaaaaag

SEQ ID NO: 721910 - DNA, 120 bp, Artificial Sequence
  ENSG00000197928_19 (sequence is synthesized)
tcacaaactcatggtgtgtgtcagaggagcaaggacatctgtggaaagatgtaacttcagtgttaaaaattttttattcagttatttcatatttttaaaagtatgaaatctgttgctgtt

SEQ ID NO: 721911 - DNA, 120 bp, Artificial Sequence
  ENSG00000197928_20 (sequence is synthesized)
aaatcttcatggcatgcttttcatttatcatgattgtctcaaggaatggatgtaagatggaagggactacttccttaggtgtggcttctttatattactgaaacctggaaaaagcaagaa

SEQ ID NO: 721912 - DNA, 77 bp, Artificial Sequence
  ENSG00000197928_21 (sequence is synthesized)
cactaatatacaatatactataagagcatgggggtttgtgccagaagagaggtaaaactattgtctaacatatatgc

SEQ ID NO: 721913 - DNA, 120 bp, Artificial Sequence
  ENSG00000197928_22 (sequence is synthesized)
gtgccagaagagaggtaaaactattgtctaacatatatgctttatgtggtcaggaccccttagaattgttgatgtgactggggacctttgtcgattataggagagattggttacagtaca

SEQ ID NO: 721914 - DNA, 120 bp, Artificial Sequence
  ENSG00000197928_23 (sequence is synthesized)
agatgaccatgaaacaagaagagtagggtgggacattgagagattttcatggaagtgaaatggtcggttactagagactgcatatgtggtagaaagaaatggagggggaatgatagtcac

SEQ ID NO: 721915 - DNA, 120 bp, Artificial Sequence
  ENSG00000197928_24 (sequence is synthesized)
cctctcttgaaaggtagttactgttgcatatcacagattattgaacatagataggtcttatttttggaaactgaagagagaatggttaccatagaggacagttccatcaaaagaaccaga

SEQ ID NO: 721916 - DNA, 120 bp, Artificial Sequence
  ENSG00000197928_25 (sequence is synthesized)
gtagtgttcttataggggattcacatttggcccctgagattgcatttgataccattttatttagaatatattatacttcttatgtcttaattagtaaaatataatcatttttagtaaccc

SEQ ID NO: 721917 - DNA, 120 bp, Artificial Sequence
  ENSG00000197928_26 (sequence is synthesized)
cctgccgacccggaagcggatctcgcggggctactggcgctctcggcccacacaatatgacctcggggaggatgcgaggaagatgaactgtgatgatccacttcttcttaatgaatgact

SEQ ID NO: 721918 - DNA, 120 bp, Artificial Sequence
  ENSG00000197928_27 (sequence is synthesized)
gttctcaccttgcagcctgtggacagagcacactgcctcttccttagaatcctacaaaatccgacccttttattttactcccgtaccttttatttctctcccttttctagctttctactc

SEQ ID NO: 721919 - DNA, 120 bp, Artificial Sequence
  ENSG00000197928_28 (sequence is synthesized)
tatccgggaacttagggagaccttagtcttcctgattccatattcttctaagatttgcctctgaaagttgcttttgaaatacacattccggatgggcgtggtgcctcacgcctataatcc

SEQ ID NO: 721920 - DNA, 120 bp, Artificial Sequence
  ENSG00000197928_29 (sequence is synthesized)
ccctgatgtgcttgtctgaatccgatccctgttctaaaaggggagattgaaactttttgattgagagtggaaaggcttcataatgtagcatatagactttaaacttcccctttcttcaga

SEQ ID NO: 721921 - DNA, 120 bp, Artificial Sequence
  ENSG00000197928_30 (sequence is synthesized)
agttctgcgcataatcaggtttgacgagtggtggttccagaatatcagtacttacaaaaccttatggaaaacgttttaaagtgtctggtatcatggttttatccctgtgcctttgattca

SEQ ID NO: 721922 - DNA, 120 bp, Artificial Sequence
  ENSG00000197928_31 (sequence is synthesized)
gtagttttttcagagtctgcatatttaaaataatccctaagcattcagaagaaggcagtccgttgactaatttatgaaattgttttgggaaatagttttgcagacccatgtgtaatgtcc

SEQ ID NO: 721923 - DNA, 120 bp, Artificial Sequence
  ENSG00000197928_32 (sequence is synthesized)
tgaaagagaacattaattaatctgtcacagtatcattctgctacatagaggtgcctcttgaagccactgagtagagtagcctgcatgtcccagtatgctgagagagaatcaggacagccg

SEQ ID NO: 721924 - DNA, 120 bp, Artificial Sequence
  ENSG00000197928_33 (sequence is synthesized)
gagggataagtgcttctgaccttctggtttctgtggagtttccagtgtctcccaagggcagtgtgacaacgctggttagatatatgctgatcatcctcttggagccagcagtacaaggtg

SEQ ID NO: 721925 - DNA, 120 bp, Artificial Sequence
  ENSG00000197928_34 (sequence is synthesized)
taggagtttctcctgggaagagcattctccaagttctcaacctcatatctgcgaacatgttgaccaaactgttgctcataccacattattcatcccatacgtgcagttgtacatttttct

SEQ ID NO: 721926 - DNA, 120 bp, Artificial Sequence
  ENSG00000197928_35 (sequence is synthesized)
tcagtatgatttttatgcctttattgagggagcttacaaagttgaattaggcatacatttttaaagttcagtataatttggttaagccactgacactttcattttgccaatgtcattggt

SEQ ID NO: 721927 - DNA, 120 bp, Artificial Sequence
  ENSG00000197928_36 (sequence is synthesized)
ataaatgaacttgtatgtatttaatcagcagttacatgttttcatgatactcttagtgttttttgttttatatctacagtgtgtggggccatgagatgaatgaatattgttttattatat

SEQ ID NO: 721928 - DNA, 120 bp, Artificial Sequence
  ENSG00000197928_37 (sequence is synthesized)
atatttttttctgcttcatatactttcatgatgttttatatgttttaccagaagatttcttccttgagtatttatgtctgagtattagtttcctcaaaacatatataacctccaaaactt

SEQ ID NO: 721929 - DNA, 120 bp, Artificial Sequence
  ENSG00000197928_38 (sequence is synthesized)
tgttaaaggatagtattagttattccttttacttctgtttcctgtaactttatatcaactcttagcttatactttttaaaaatagactttctattttttagcaattttatgttcacagca

SEQ ID NO: 721930 - DNA, 120 bp, Artificial Sequence
  ENSG00000197928_39 (sequence is synthesized)
aactagatttcctgtatactctgttcccccacacgtgcacagcgtcttcccccattatcaccatcccccatcacagtggtacatttgttaaaattgataaacctacattgacacatcatt

SEQ ID NO: 721931 - DNA, 120 bp, Artificial Sequence
  ENSG00000197928_40 (sequence is synthesized)
atcacccaaagtccatagtcgatgttggggttcactctatgtatatgctttgggtttgggcaaatatataatagacatatatcctccataatagtatcttacagaataattacactgccc

SEQ ID NO: 721932 - DNA, 120 bp, Artificial Sequence
  ENSG00000197928_41 (sequence is synthesized)
taaaaaatctgtgctctgtctgttcatctctccctccccccagcacctggcaaccactgatctctttactgtctccatagatttgcctttttcagaatgtcatatagttggaaccatata

SEQ ID NO: 721933 - DNA, 120 bp, Artificial Sequence
  ENSG00000197928_42 (sequence is synthesized)
atttgcctttttcagaatgtcatatagttggaaccatatagtatatggccttttcagattggcttctttcacttaataatatgcatttcaatttctagggctgggcgtggtggctcacgc

SEQ ID NO: 721934 - DNA, 120 bp, Artificial Sequence
  ENSG00000197928_43 (sequence is synthesized)
atgactcctgcttatacacaggacagcttactcaggacagcaacatgatctggtcactgtctaaacaacttgtgcaagataaggtgacttaaatgctatctgagagcagtggtgctgtca

SEQ ID NO: 721935 - DNA, 120 bp, Artificial Sequence
  ENSG00000197928_44 (sequence is synthesized)
cactataggtgacacagctcaggtcccataatctgccttgaaacatttcttcctacactcctcgtatttgctgtgatttataatccgtgctgccctgggtggccagtggtgcttaatgct

SEQ ID NO: 721936 - DNA, 120 bp, Artificial Sequence
  ENSG00000197928_45 (sequence is synthesized)
gtgaacatggcatcttagcccgcacacacaggttcagattctggctttcagatgtgctttctctgtgagttagggatagatatgtaaacctcttcagccctttgttttggtatgaaaagg

SEQ ID NO: 721937 - DNA, 120 bp, Artificial Sequence
  ENSG00000197928_46 (sequence is synthesized)
tgcgataatttacctcaagaggatttacatcaattagtgctgttagagaccttagtaacttgcatagcatttagtatgctttgaaaagttacctttatgaataagatatgtcaagtgtct

SEQ ID NO: 721938 - DNA, 120 bp, Artificial Sequence
  ENSG00000197928_47 (sequence is synthesized)
gtcatgtttcttatgagattgacctttgccttcattatatcttacatattttcttttttgtaattttttttttcatatcaacatttctctgactctacataataaaatgttaaagcacac

SEQ ID NO: 721939 - DNA, 120 bp, Artificial Sequence
  ENSG00000197928_48 (sequence is synthesized)
agctttcattatatgtattttttggccatagaactggaaaactagatgacatttcctagtcagggagtttctctatatactgctgtcatataactgcaggcatgaaattatttcagactc

SEQ ID NO: 721940 - DNA, 120 bp, Artificial Sequence
  ENSG00000197928_49 (sequence is synthesized)
ccctcctaattcttcatctttatagtaatgtgcatttacctgaagctgatatttcaaaatttagtgattctcaacatattatttttcctattgtgtgtcccttctgttttttctgtagtt

SEQ ID NO: 721941 - DNA, 120 bp, Artificial Sequence
  ENSG00000197928_50 (sequence is synthesized)
cataagcagtaattctttagaatttcactgacaattttgtgtaattgtggttgttcattaacttgcctgttagattttcacaggttactaaagtgttttatttatttttgtaatgattta

SEQ ID NO: 721942 - DNA, 120 bp, Artificial Sequence
  ENSG00000197928_51 (sequence is synthesized)
cagatgatggtttttcagtatatattatgcaatagaaccaccatgcacaaattgttaatgctgcaaaatgcacattctacatgggtgtaagtagttttataacaagtactcacatttgca

SEQ ID NO: 721943 - DNA, 120 bp, Artificial Sequence
  ENSG00000197928_52 (sequence is synthesized)
atttgtaaatattcaaaattttattaaattcttccgaattttttctttcagtgttttgtttgcaattatgaattgtcatttttaaatattttttattagataagcttgagctgtgcctta

SEQ ID NO: 721944 - DNA, 120 bp, Artificial Sequence
  ENSG00000197928_53 (sequence is synthesized)
ccttttgtgtgtaataattatgtactaaataatgcattactatttgtttatcttcaaatatgagactaccatatagctatgccaatttacgtgttccttggagtggtggtggaaaaatac

SEQ ID NO: 721945 - DNA, 120 bp, Artificial Sequence
  ENSG00000197928_54 (sequence is synthesized)
ctcttctttcagagtttatgtggatttacatagtatgagtgttttagctatagggtgttttaaactgtgcttaaaataatttgttacatgttttgttactgtgttactttattgaggaca

SEQ ID NO: 721946 - DNA, 120 bp, Artificial Sequence
  ENSG00000197928_55 (sequence is synthesized)
gctagtccctttgtgttgttaaacgtttaaagacagttgagaagcttcataactctgttcattgtaaatcttagctttcttgtaatatgtattttaataaaatatttaccttgcaactct

SEQ ID NO: 721947 - DNA, 120 bp, Artificial Sequence
  ENSG00000197928_56 (sequence is synthesized)
ggccaactgtactacagctgtgtgaggattcctccaggttgggcaatttgaagcatgattactggcttaatgatgcttctgaggaagctcagacattacacttactaaaaaatactttaa

SEQ ID NO: 721948 - DNA, 120 bp, Artificial Sequence
  ENSG00000197928_57 (sequence is synthesized)
atcaactatcttaaccatgcttagagagctgaagtaaacggtggacaaagaactaaaggaaagtaggacaacagtgtttcaacgaatatcagtaaaaacatagaaattattaaaaagaag

SEQ ID NO: 721949 - DNA, 120 bp, Artificial Sequence
  ENSG00000197928_58 (sequence is synthesized)
gagtctccgtctttcgggttcaagcctgcgcctcgcgggccacaggttcccacgctccgctgtcgggttttggggtcgccctgtaggttaaaaccccgaacctgctcattcctctcgcgg

SEQ ID NO: 721950 - DNA, 120 bp, Artificial Sequence
  ENSG00000197928_59 (sequence is synthesized)
cgtggccctaagacgttcccagtcccgtcgctccgagagggtctagagatctgcgtccatttcggattaaaatcgttctgaagtgggtactggccccgacctttttgctttagcccacac

SEQ ID NO: 721951 - DNA, 62 bp, Artificial Sequence
  ENSG00000197928_60 (sequence is synthesized)
gagaccagcctgaccatgcctgtaataccagctgctcgggaggctgaggcaggagagttgct

SEQ ID NO: 721952 - DNA, 120 bp, Artificial Sequence
  ENSG00000197928_61 (sequence is synthesized)
gttgcttgcattaactcacataaatcagtgaatatgtacacctcttttctgccattttgtgtgaaaataagaaattttcctgtgtccacttggtgaagtgtgtttttatttcagggactg

SEQ ID NO: 721953 - DNA, 120 bp, Artificial Sequence
  ENSG00000197928_62 (sequence is synthesized)
aaagcacagcataccatgttcctttttttctttataagttgaaatctttcctgagctgaatattgtgttcattttggagcacaggaaagagtcctagactatggaaagtgaagtgaaaat

SEQ ID NO: 721954 - DNA, 120 bp, Artificial Sequence
  ENSG00000197928_63 (sequence is synthesized)
gggaaaaaatcaggtaggtcggaatgtgagcacaaataagcgctcagatggccacagagtaagctactccattgagtattgtttgggaaactctgcaaatgggaaagatcagtgggaaaa

SEQ ID NO: 721955 - DNA, 120 bp, Artificial Sequence
  ENSG00000197928_64 (sequence is synthesized)
caaaagtttatttcttatgagctctcaaagcaaggtccacacccgctcctactgtcccccaacatactgttattcaaatgtgtaaaaggttgaactcccactctcccgtgatgccccaac

SEQ ID NO: 721956 - DNA, 120 bp, Artificial Sequence
  ENSG00000197928_65 (sequence is synthesized)
tcatacagacacaaaagcaaaggtgctatcatgacctacaatactgtttggcccctctgaccattttggtctcttggttttgagagggaccgaaatggctgtttttaaggactctctttt

SEQ ID NO: 721957 - DNA, 120 bp, Artificial Sequence
  ENSG00000197928_66 (sequence is synthesized)
agtgtatataatttcatctgatgtgtggttttcagtctatacagatcagagctggggcctttgtagccctggctccagaacctattcaatttctattcctatttcttatacctgcaagaa

SEQ ID NO: 721958 - DNA, 120 bp, Artificial Sequence
  ENSG00000197928_67 (sequence is synthesized)
cttttcaggaaaatgggaaaacagtggctcccccaaaatgtatctggggttccctgaaatttgaaagactgtcggtctctctacttgttcaagccccttggccattccttcagttctgct

SEQ ID NO: 721959 - DNA, 120 bp, Artificial Sequence
  ENSG00000197928_68 (sequence is synthesized)
tttgccacatgtgtctaaaggggaatgggcaggcttttgagattgttactcagcattaatgtaaagacttgacagagagatcctctttttgattgccattccaaaatgggaatatatctc

SEQ ID NO: 721960 - DNA, 120 bp, Artificial Sequence
  ENSG00000197930_0 (sequence is synthesized)
atctgagggcgcacggcccgcgaccgagcgtgcggactggcctcccaagcgtggggcgacaagctgccggagctgcaatgggccgcggctggggattcttgtttggcctcctgggcgccg

SEQ ID NO: 721961 - DNA, 120 bp, Artificial Sequence
  ENSG00000197930_1 (sequence is synthesized)
tgtggctgctcagctcgggccacggagaggagcagcccccggagacagcggcacagaggtgcttctgccaggttagtggttacttggatgattgtacctgtgatgttgaaaccattgata

SEQ ID NO: 721962 - DNA, 120 bp, Artificial Sequence
  ENSG00000197930_2 (sequence is synthesized)
gatttaataactacaggcttttcccaagactacaaaaacttcttgaaagtgactactttaggtattacaaggtaaacctgaagaggccgtgtcctttctggaatgacatcagccagtgtg

SEQ ID NO: 721963 - DNA, 120 bp, Artificial Sequence
  ENSG00000197930_3 (sequence is synthesized)
gaagaagggactgtgctgtcaaaccatgtcaatctgatgaagttcctgatggaattaaatctgcgagctacaagtattctgaagaagccaataatctcattgaagaatgtgaacaagctg

SEQ ID NO: 721964 - DNA, 120 bp, Artificial Sequence
  ENSG00000197930_4 (sequence is synthesized)
aacgacttggagcagtggatgaatctctgagtgaggaaacacagaaggctgttcttcagtggaccaagcatgatgattcttcagataacttctgtgaagctgatgacattcagtcccctg

SEQ ID NO: 721965 - DNA, 120 bp, Artificial Sequence
  ENSG00000197930_5 (sequence is synthesized)
aagctgaatatgtagatttgcttcttaatcctgagcgctacactggttacaagggaccagatgcttggaaaatatggaatgtcatctacgaagaaaactgttttaagccacagacaatta

SEQ ID NO: 721966 - DNA, 120 bp, Artificial Sequence
  ENSG00000197930_6 (sequence is synthesized)
aaagacctttaaatcctttggcttctggtcaagggacaagtgaagagaacactttttacagttggctagaaggtctctgtgtagaaaaaagagcattctacagacttatatctggcctac

SEQ ID NO: 721967 - DNA, 120 bp, Artificial Sequence
  ENSG00000197930_7 (sequence is synthesized)
atgcaagcattaatgtgcatttgagtgcaagatatcttttacaagagacctggttagaaaagaaatggggacacaacattacagaatttcaacagcgatttgatggaattttgactgaag

SEQ ID NO: 721968 - DNA, 120 bp, Artificial Sequence
  ENSG00000197930_8 (sequence is synthesized)
gagaaggtccaagaaggcttaagaacttgtattttctctacttaatagaactaagggctttatccaaagtgttaccattcttcgagcgcccagattttcaactctttactggaaataaaa

SEQ ID NO: 721969 - DNA, 120 bp, Artificial Sequence
  ENSG00000197930_9 (sequence is synthesized)
ttcaggatgaggaaaacaaaatgttacttctggaaatacttcatgaaatcaagtcatttcctttgcattttgatgagaattcattttttgctggggataaaaaagaagcacacaaactaa

SEQ ID NO: 721970 - DNA, 120 bp, Artificial Sequence
  ENSG00000197930_10 (sequence is synthesized)
aggaggactttcgactgcattttagaaatatttcaagaattatggattgtgttggttgttttaaatgtcgtctgtggggaaagcttcagactcagggtttgggcactgctctgaagatct

SEQ ID NO: 721971 - DNA, 120 bp, Artificial Sequence
  ENSG00000197930_11 (sequence is synthesized)
tattttctgagaaattgatagcaaatatgccagaaagtggacctagttatgaattccatctaaccagacaagaaatagtatcattattcaacgcatttggaagaatttctacaagtgtga

SEQ ID NO: 721972 - DNA, 120 bp, Artificial Sequence
  ENSG00000197930_12 (sequence is synthesized)
aagaattagaaaacttcaggaacttgttacagaatattcattaaagaaaacaagctgatatgtgcctgtttctggacaatggaggcgaaagagtggaatttcattcaaaggcataatagc

SEQ ID NO: 721973 - DNA, 120 bp, Artificial Sequence
  ENSG00000197930_13 (sequence is synthesized)
aatgacagtcttaagccaaacattttatataaagttgcttttgtaaaggagaattatattgttttaagtaaacacatttttaaaaattgtgttaagtctatgtataatactactgtgagt

SEQ ID NO: 721974 - DNA, 120 bp, Artificial Sequence
  ENSG00000197930_14 (sequence is synthesized)
aaaagtaatactttaataatgtggtacaaattttaaagtttaatattgaataaaaggaggattatcaaattcatatatgataaaagtgaatgttctaagtctctcaaactagcgttttat

SEQ ID NO: 721975 - DNA, 120 bp, Artificial Sequence
  ENSG00000197930_15 (sequence is synthesized)
gtaataatatgtaatataaataaaactatggtaaatgtgacaagcatttaataggaaaatgctaaggaggcctcataaatgacccataattaccaacgtagaatttttcagtacatttag

SEQ ID NO: 721976 - DNA, 120 bp, Artificial Sequence
  ENSG00000197930_16 (sequence is synthesized)
ggttgctggatttagcaaataaaaataaagattgcccagttagatttgaatttcagataaacaattagttttttaatattttacatggaatatttggaaaatacttatactaaaaaatta

SEQ ID NO: 721977 - DNA, 120 bp, Artificial Sequence
  ENSG00000197930_17 (sequence is synthesized)
tttgtttgaaattcaaatttaactgggagtcttgtattttatctggcaatcctaaaatacattggtatgaaacaaatcacttttagaagtatattgctattttgattgggttgtttttgt

SEQ ID NO: 721978 - DNA, 120 bp, Artificial Sequence
  ENSG00000197930_18 (sequence is synthesized)
gtgtagaaacgtacaataacaactcaaaggcacaggagatttctaaacattgtgaaaagttgaatagattatatatttattctcataatactttcactaatactaaataaaatttgggga

SEQ ID NO: 721979 - DNA, 120 bp, Artificial Sequence
  ENSG00000197930_19 (sequence is synthesized)
acactttttatttttatataatttccaatttacagaaaagtttcaaaaatagtacaaagagctctcttacccagattcactaattgttcatacgtgctttatctttcatgctttctctgt

SEQ ID NO: 721980 - DNA, 120 bp, Artificial Sequence
  ENSG00000197930_20 (sequence is synthesized)
acacacacacacacacacaaatttttcctcaatcatttgaaagtcagttataggcatcatgccccttaaaccctaaatacttcagtgtgtaatactgaataattactaaaaatgattttc

SEQ ID NO: 721981 - DNA, 120 bp, Artificial Sequence
  ENSG00000197930_21 (sequence is synthesized)
ttgcccgttttatgcttgatgtgtatagtaatagggtaggctatttattttattaaaattttttttagagacaaggttttgctgtgttgcccaagctggaacttgaacgactgggctgaa

SEQ ID NO: 721982 - DNA, 120 bp, Artificial Sequence
  ENSG00000197930_22 (sequence is synthesized)
agcctcccaagtagctgggaatacaggtgtctgccaccatacccagtttcatttttgttttttatacccgaagttcatttcctttgtctccctaaaactgaactgtaattttgggaggtt

SEQ ID NO: 721983 - DNA, 120 bp, Artificial Sequence
  ENSG00000197930_23 (sequence is synthesized)
gtaattttgggaggttttcattagtggaagctcttcatttataaagctatttgaaggggtttaggaatttatatcacatggtaattgtagagaaaaagaagctatatacctcaaaatcgt

SEQ ID NO: 721984 - DNA, 120 bp, Artificial Sequence
  ENSG00000197930_24 (sequence is synthesized)
gccctctttacatatgtcttatcaggtataacatgttgaaatgtcacattagtagtaaagtggggtttatttatatagtggttaagaaatgtcagtttacactgctgtatacttcttctt

SEQ ID NO: 721985 - DNA, 120 bp, Artificial Sequence
  ENSG00000197930_25 (sequence is synthesized)
ctgtgtccctaaggcctggtacagtgccaagcacatacttggtatccaataaatatttgttggatgaatgtatgcatatgtattcagtatattttaaatgaataatcacagaagtaagtt

SEQ ID NO: 721986 - DNA, 120 bp, Artificial Sequence
  ENSG00000197930_26 (sequence is synthesized)
taataatttgtcctatttttctctgtcacttcctttttctctaaggcaggaaaggaaagacattaaaccattaattaagtcaatcctcttggagactcaaaagactatgaagtgatcact

SEQ ID NO: 721987 - DNA, 120 bp, Artificial Sequence
  ENSG00000197930_27 (sequence is synthesized)
ctatataaaatataaatacagtgtgggttcaaatggccattttttgtgtgtccctctctctcatcttatgcttcccttcctttttttatttttattttttggagacggagtcttgctgtg

SEQ ID NO: 721988 - DNA, 120 bp, Artificial Sequence
  ENSG00000197930_28 (sequence is synthesized)
ggcgtgagccaccacgcccggcctcttttttttttagctgccaatctttttgaaggaatattcttacctctactttgtcaccttctactggctccttaactaaaatctgccatttggctc

SEQ ID NO: 721989 - DNA, 120 bp, Artificial Sequence
  ENSG00000197930_29 (sequence is synthesized)
gccatttggctctctggttaacagtcccttcctgtaaagtctaaaatcttaattctaaatccacagtttaattcacaagctagtacttgactttttttctgtatttgacatttttgacaa

SEQ ID NO: 721990 - DNA, 120 bp, Artificial Sequence
  ENSG00000197930_30 (sequence is synthesized)
cccctactttaaagatttattcccttgacttcttacattttgctcactcctgaaccaccccccaccttttggcctcttcatttattccttaaatgttattcctcagacctccattttttt

SEQ ID NO: 721991 - DNA, 120 bp, Artificial Sequence
  ENSG00000197930_31 (sequence is synthesized)
tttctctcttaatcacaacaccacttctcacgcttgggtaattttaattcagcagttcctaaatccttatctttagccagactcctcaatccatctgcctgttgcacttttcttggttgt

SEQ ID NO: 721992 - DNA, 120 bp, Artificial Sequence
  ENSG00000197930_32 (sequence is synthesized)
cccagagacacctgtgtgtgtcttaaaacattcattctctgcaaaacctactctaatgcctgtgtcccttactttggttaattttagaaccattatattctaagttttctaggctcattc

SEQ ID NO: 721993 - DNA, 120 bp, Artificial Sequence
  ENSG00000197930_33 (sequence is synthesized)
ctctcctccaccttcccctatcatttagtgtctaagttttactgattttatctccacctctctgatacatcactctttcatcttcattgctattattaataaatacctacagtactaacc

SEQ ID NO: 721994 - DNA, 120 bp, Artificial Sequence
  ENSG00000197930_34 (sequence is synthesized)
tgcctcctatacctagctggtctcctctctgttgctcaatgttaccacagcaggctttctagaagcactctgacagtgttactccctaatatccttcagtgacttcaggaactttcagga

SEQ ID NO: 721995 - DNA, 120 bp, Artificial Sequence
  ENSG00000197930_35 (sequence is synthesized)
gaaagccaaactcctctgtttggtgtacaaggtcttctgatgtgtttcctccaccgaatgttctggtgaaacagacttacacttcttcagaagccacatttggccaggcctcccgccttg

SEQ ID NO: 721996 - DNA, 120 bp, Artificial Sequence
  ENSG00000197930_36 (sequence is synthesized)
gtaaatgctgtactctttgcatcaagtatgctagtcatccttccccacttggaaaattcctatgcatcttgcaggcctgacataagcatttcctctgtgaaacctcctttgctccactca

SEQ ID NO: 721997 - DNA, 120 bp, Artificial Sequence
  ENSG00000197930_37 (sequence is synthesized)
aggagagtcatctaacttccactttcgtgtcaccactgtaattacaacctacctctattgtatgtcacttaaatcgtactgtattgttttatttttcaaaagtctttactagaatgtgag

SEQ ID NO: 721998 - DNA, 120 bp, Artificial Sequence
  ENSG00000197930_38 (sequence is synthesized)
ctccttaagggcaggaaaaggaacctttttattttttgcatctccatagcatagtttttggcatatgaatgtttaataaatgtttgttgaataaattgattttaaagtgacatctttatt

SEQ ID NO: 721999 - DNA, 120 bp, Artificial Sequence
  ENSG00000197930_39 (sequence is synthesized)
atattagaggtcctacctatattccaaatactttcactcccttcactttacagcaagggtcagtagagtcccaaggatttgtagactttagggggtcaataaagctgaaattgtattcaa

SEQ ID NO: 722000 - DNA, 120 bp, Artificial Sequence
  ENSG00000197930_40 (sequence is synthesized)
tgacttcaggtgatccacctgcctcgggctcccacagtgccgggattataggcgtgagccaccgtacctggcctgattatgggcaattttatgaaaaattaaaagcaataagaacatatt

SEQ ID NO: 722001 - DNA, 80 bp, Artificial Sequence
  ENSG00000197930_41 (sequence is synthesized)
tgggaactggaaggacccccgactcccgcgcagggtctggggttgtgcgcgtcgggttgcgtctccaggccgggggcgtc

SEQ ID NO: 722002 - DNA, 120 bp, Artificial Sequence
  ENSG00000197930_42 (sequence is synthesized)
ccgagccgggaagctggtcggtgcgtcagcctcacgcggcgggaaggaaccggtccgaggccccgggctgccggcgcgggcgccgcggcacgtccacaggctgggtcgcgaggtggcgat

SEQ ID NO: 722003 - DNA, 120 bp, Artificial Sequence
  ENSG00000197930_43 (sequence is synthesized)
ggttgttttaaatgtcgtctgtggggaaagcttcaggtaagcaaatttagtcattcctatttctcatttaccctttgcatgaataattttctaatttttcttttttccttatttctatta

SEQ ID NO: 722004 - DNA, 69 bp, Artificial Sequence
  ENSG00000197930_44 (sequence is synthesized)
cagattcccccactgcactccagcttgggtgacagggcgatactctcaaaaaaaaaaaaaaaaaaaaaa

SEQ ID NO: 722005 - DNA, 120 bp, Artificial Sequence
  ENSG00000197930_45 (sequence is synthesized)
aaaaaaaaaaaaaaagaaaccaaaggattttttttttcctttccattcctgccttctctcattccctccctccattccttctggtaaatgatgctctctaaccctgtctcaccctccttt

SEQ ID NO: 722006 - DNA, 120 bp, Artificial Sequence
  ENSG00000197930_46 (sequence is synthesized)
tgtctcaccctcctttctccacctattgacatatagttaatcacctacaatggacaccttgacaaagttattttgtatatttttgcagatagtttagctttggagtcagacaggcctggt

SEQ ID NO: 722007 - DNA, 120 bp, Artificial Sequence
  ENSG00000197930_47 (sequence is synthesized)
gttttttgtttactagatgtgggaatttaggcaagttacctaaacactctgaatcttgttttttacattcattaggtgtagattataataataactacctttggatttgtggtgaagatt

SEQ ID NO: 722008 - DNA, 120 bp, Artificial Sequence
  ENSG00000197930_48 (sequence is synthesized)
aaatgagattgtgtatgtaaggatctggtatgtagaatcaatgaatattagtgctgttctcatttttggtaccccatagtaccttgcacagtgttaggcacatagaacctgctcagaaaa

SEQ ID NO: 722009 - DNA, 120 bp, Artificial Sequence
  ENSG00000197930_49 (sequence is synthesized)
gggtacactttgtgccatacacacacacatatacatagatatgtatatataatatatataaaaacatagtagtgactccgagagaagagcttggctgatattttctcttcttttgtttga

SEQ ID NO: 722010 - DNA, 120 bp, Artificial Sequence
  ENSG00000197930_50 (sequence is synthesized)
agaagtgattaggaaatggcctgctggccgccacaatgggagaagatcaggaactattatcactacaacaaatagccaccctcccttaaagcaattagaggaaactaagtgttttataat

SEQ ID NO: 722011 - DNA, 120 bp, Artificial Sequence
  ENSG00000197930_51 (sequence is synthesized)
ctcaataaaacaatttgattttggatattaagcagttttctgagataatatcacttaaatataacatgattggtaacatatttgtgttgatatttttaattctttttacttctaggccac

SEQ ID NO: 722012 - DNA, 120 bp, Artificial Sequence
  ENSG00000197930_52 (sequence is synthesized)
aaacttgaaaaacccatttccgttgtacctactatcccatttatctgcttccagtggtgaaaccccttgagagtattctgaagaagccaataatctcattgaagaatgtgaacaagctga

SEQ ID NO: 722013 - DNA, 120 bp, Artificial Sequence
  ENSG00000197930_53 (sequence is synthesized)
ttttttctagtttaaaaagcatgtaatgaatccttagttttcatggcatgaattgttatcaaggctaggtattttcccattcttgactgatttactatttaaattctgtattttgacctc

SEQ ID NO: 722014 - DNA, 120 bp, Artificial Sequence
  ENSG00000197930_54 (sequence is synthesized)
ctgtaaaacactttaaccagaacgttatgagactgggtcaacctaaggcaatgctaaagccttttaaagaccaagcagcaggctggtacttaactgaatccataacctttcttcttcctt

SEQ ID NO: 722015 - DNA, 120 bp, Artificial Sequence
  ENSG00000197930_55 (sequence is synthesized)
tcgagaaattgcaattaagacttggaccgttaggttaaataatctttacattgttgtttggcacaaatttgctataatgctttaaaacttttgaaaaacttgtattttggcatttttcta

SEQ ID NO: 722016 - DNA, 120 bp, Artificial Sequence
  ENSG00000197933_0 (sequence is synthesized)
ccctgcgctctgagtcctggctctggcgctgagagagagacgccctggaaggtctgtatcagcgtctgtcgcgctgggacccacactggcttttaaggaggacacccggacacctggaag

SEQ ID NO: 722017 - DNA, 120 bp, Artificial Sequence
  ENSG00000197933_1 (sequence is synthesized)
ctgggaaatggactcagtggcctttgaagatgtggctgtgaacttcacacaagaggagtgggctttgctgggtccatcacagaagagtctctacagaaatgtcatgcaggaaaccattag

SEQ ID NO: 722018 - DNA, 120 bp, Artificial Sequence
  ENSG00000197933_2 (sequence is synthesized)
gaacctggactgtatagaaatgaaatgggaggaccagaacattggagatcagtgccaaaatgccaagagaaatctaagaagtcatacatgtgaaattaaagatgacagtcaatgtggaga

SEQ ID NO: 722019 - DNA, 120 bp, Artificial Sequence
  ENSG00000197933_3 (sequence is synthesized)
aacttttggccagattccagatagtattgtgaacaagaacactcctcgagtaaatccatgtgacagtggtgagtgtggagaagtcgtcttgggtcattcgtctcttaattgcaacatcag

SEQ ID NO: 722020 - DNA, 120 bp, Artificial Sequence
  ENSG00000197933_4 (sequence is synthesized)
agttgacactggacacaaatcatgtgagcatcaggaatatggagagaagccatatacacataaacaacgtgggaaagccatcagtcatcagcactccttccagacacatgaaaggccccc

SEQ ID NO: 722021 - DNA, 120 bp, Artificial Sequence
  ENSG00000197933_5 (sequence is synthesized)
caccggaaagaaacccttcgattgtaaagaatgtgcaaaaacctttagttctcttggaaacctccgaagacacatggcggcacaccatggagatggaccttataaatgtaagttgtgtgg

SEQ ID NO: 722022 - DNA, 90 bp, Artificial Sequence
  ENSG00000197933_6 (sequence is synthesized)
cacaccatggagatggaccttataaatgtaagttgtgtgggaaagcctttgtttggcccagtttatttcatttgcacgaaagaacacagt

SEQ ID NO: 722023 - DNA, 120 bp, Artificial Sequence
  ENSG00000197933_7 (sequence is synthesized)
tgaaagaatccacacgggagagaaagcgtatgaatgtaagcagtgttccaaagcctttcctgattacagtacctatctaagacatgagagaactcacaccggagagaaaccctataaatg

SEQ ID NO: 722024 - DNA, 120 bp, Artificial Sequence
  ENSG00000197933_8 (sequence is synthesized)
tacacaatgtgggaaagccttcagctgttactattacactcgactacatgaaaggactcacacgggagaacaaccctatgcatgtaagcaatgtgggaaaacgttttatcatcacacaag

SEQ ID NO: 722025 - DNA, 120 bp, Artificial Sequence
  ENSG00000197933_9 (sequence is synthesized)
agaaaccctatgaatgtaagcagtgtgggaaagtgttatctcatagctcgagctttcgaagtcacatgataacacacacaggagatggaccccagaaatgcaagatatgtgggaaagcct

SEQ ID NO: 722026 - DNA, 120 bp, Artificial Sequence
  ENSG00000197933_10 (sequence is synthesized)
aggactcacactggagagaaaccctatcaatgtaaacaatgtggtaaagccttcagtcttgccggttcccttcgaagacatgaagcaactcacactggagtgaaaccctataaatgtcag

SEQ ID NO: 722027 - DNA, 120 bp, Artificial Sequence
  ENSG00000197933_11 (sequence is synthesized)
ctcacactggagtgaaaccctataaatgtcagtgtgggaaagcctttagtgatctctcttcctttcaaaatcatgagacaactcacactggagagaagccatatgagtgtaaggaatgtg

SEQ ID NO: 722028 - DNA, 120 bp, Artificial Sequence
  ENSG00000197933_12 (sequence is synthesized)
ggaaagcattcagttgtttcaaatacctttctcaacataaaaggacccacacagtagaaaaaccttatgagtgtaaaacatgtagaaaagccttcagtcatttcagtaacttaaaagtcc

SEQ ID NO: 722029 - DNA, 120 bp, Artificial Sequence
  ENSG00000197933_13 (sequence is synthesized)
atgaaaggattcactctggagagaagccatatgaatgtaaggaatgtggaaaagcattctcttggctcacttgccttctacgacatgaaagaattcacactggagagaaaccctatgaat

SEQ ID NO: 722030 - DNA, 120 bp, Artificial Sequence
  ENSG00000197933_14 (sequence is synthesized)
gtctacaatgtggtaaagccttcactcgttcccgtttccttcgaggacatgaaaaaactcacactggagagaagctgtatgaatgtaaggaatgtgggaaagcattgagttctctccgtt

SEQ ID NO: 722031 - DNA, 120 bp, Artificial Sequence
  ENSG00000197933_15 (sequence is synthesized)
ccttgcatagacataaaaggactcactggaaagatactctctaaatgtatggaatgtgggaaaacattcagtactttaatttcagaaacttgaaagaactcactttggagatagacccta

SEQ ID NO: 722032 - DNA, 120 bp, Artificial Sequence
  ENSG00000197933_16 (sequence is synthesized)
tgaatgtaaacatgggataaagccttaagtagtttcaatttttttaaatacagttatcccccaatatattgcaggggattggttccagcaccctctaaatccacagatgccaagtccttt

SEQ ID NO: 722033 - DNA, 120 bp, Artificial Sequence
  ENSG00000197933_17 (sequence is synthesized)
gttatatggcatatttgcatgtaacctatgcatatcttccagtatactgtgtaaatcatctctagatgacttttaatacctcatgcattgtaaaagctatgtaaatagttgtttgattgt

SEQ ID NO: 722034 - DNA, 120 bp, Artificial Sequence
  ENSG00000197933_18 (sequence is synthesized)
attgtttagagaatcatgacaagaaaaatagtctctacatgttcgatgcagacacaaccattgcaggcccacctacgtggtatatgtcacccagaacattaaaatttgttttaacattca

SEQ ID NO: 722035 - DNA, 120 bp, Artificial Sequence
  ENSG00000197935_0 (sequence is synthesized)
agcatccattcatatattcattcagtcagctaatttttaatccagcacatactattgcaagcgctgttttaggcgttgagaatacaactgtgaacaagacgacaaaaattcctgccctca

SEQ ID NO: 722036 - DNA, 120 bp, Artificial Sequence
  ENSG00000197935_1 (sequence is synthesized)
tggagcctaagagcctagattttagcgaaggtagaaccaccgtaaacaatgtatatattaataagtaacttatgcaccatactggaaaattataaagtgctatagaggaaaagaagaatt

SEQ ID NO: 722037 - DNA, 120 bp, Artificial Sequence
  ENSG00000197935_2 (sequence is synthesized)
catgtaaagcaagggaaacaagatgtgagatcacagcggtttagtgttgctaatgaaccccaaatccagggcagtgtttgacacattaagccaaacagtagcggcactgtgggtcaagaa

SEQ ID NO: 722038 - DNA, 120 bp, Artificial Sequence
  ENSG00000197935_3 (sequence is synthesized)
gggccctttggctggcaccaccaaaacatgtgttctccaaaggaggctggcatcaactggagccacttcacagcttgtttgagaactggatctgaccagtaggaagaaaccaggacagca

SEQ ID NO: 722039 - DNA, 120 bp, Artificial Sequence
  ENSG00000197935_4 (sequence is synthesized)
gtggaagactgttaaagaaacctgagtaaaaagatgcaggaggttgtgctgttggatgagagttcaggaccaccaagccagctgctttggacccgccaggatacccagctccctcaggaa

SEQ ID NO: 722040 - DNA, 120 bp, Artificial Sequence
  ENSG00000197935_5 (sequence is synthesized)
agcgctctattacctgctccatatcctgccttcactaaagatggaagccaaggaaacctgccgcaagcagatatcacactaatgagccaggcccaagagtcagtgacatttgaggatgta

SEQ ID NO: 722041 - DNA, 120 bp, Artificial Sequence
  ENSG00000197935_6 (sequence is synthesized)
gctgtgaacttcactaacagggagtggcagtgtctgacctacgctcaaaggcatctctataaggatgtgatgttggaaaattatgggaacatggtatcacttggatttccatttcctaaa

SEQ ID NO: 722042 - DNA, 120 bp, Artificial Sequence
  ENSG00000197935_7 (sequence is synthesized)
cctcctttaatctctcatctggagcgagaagtagacccctgtgtgcaggatccacaggacagggagtccctaagctgctcctacccagtgtcagctgacaagatgtggcctgagaatgaa

SEQ ID NO: 722043 - DNA, 120 bp, Artificial Sequence
  ENSG00000197935_8 (sequence is synthesized)
aaggcaagttcacaacaagagatttttgaaaatggagaagcctactggatgaaatttaacagtctcctaaaagttgattcccgggatcctaaggttagagaagtttgtgttcaggatgtc

SEQ ID NO: 722044 - DNA, 120 bp, Artificial Sequence
  ENSG00000197935_9 (sequence is synthesized)
aaattagagaatcaatgggaaacatctataagggagaaactgagagaagagaaagaaggctctgaggaagtgacctgcaaaaaaggaaagaaccagaaagtgcttagtaaaaacttgaat

SEQ ID NO: 722045 - DNA, 120 bp, Artificial Sequence
  ENSG00000197935_10 (sequence is synthesized)
ccaaactcaaaacatagtcaatgtaataaagttcttatagcacagaaactccatgaatgtgccaggtgtggcaaaaacttcagttggcactcagatctaattctccatgagcaaattcat

SEQ ID NO: 722046 - DNA, 120 bp, Artificial Sequence
  ENSG00000197935_11 (sequence is synthesized)
gagaaaccttttaattgcacccagtgtgggaaggctttcaacagtagatcagctctttgccgacataaaaaaacccacagtggggagaagcctcacgagtgcagggactgtgggaaggcc

SEQ ID NO: 722047 - DNA, 120 bp, Artificial Sequence
  ENSG00000197935_12 (sequence is synthesized)
ttcaagaccaggaaccgtctctgtatgcatcagcttatccacaccggggagaagccttacaaatgtaactgctgtgggaaggccttccagtttaagcattcccttaccatccatggcaga

SEQ ID NO: 722048 - DNA, 120 bp, Artificial Sequence
  ENSG00000197935_13 (sequence is synthesized)
atccacactggggagaagccatatgaatgtgaggagtgcgggaaggccttcagtgggagttcagacctcaccaaacacataagaatccacactggggaacgaccttatgagtgcagcaag

SEQ ID NO: 722049 - DNA, 120 bp, Artificial Sequence
  ENSG00000197935_14 (sequence is synthesized)
tgtggaagggccttcagtcggagctcagacctaagcaaacacaaacgaatccatactcgggagaaacactatgggtgtccccagtgtggaaaagacttcagcatcaaggcagaactcacc

SEQ ID NO: 722050 - DNA, 120 bp, Artificial Sequence
  ENSG00000197935_15 (sequence is synthesized)
aaacacagaaggatccacactgaagagaaacgttacaggtgtgaggagtgtgggaaagcctttcgtcataactgtaagcgcagggctcatgaacgagagcatacaggggagaagccctat

SEQ ID NO: 722051 - DNA, 120 bp, Artificial Sequence
  ENSG00000197935_16 (sequence is synthesized)
caatgcagggattgtgggaaaaccttccaagataagcactgccttaccatccatcagagaatccacactggagagaaaccttacaaatgtttagagtgtgggaaagctttcagtgggaag

SEQ ID NO: 722052 - DNA, 120 bp, Artificial Sequence
  ENSG00000197935_17 (sequence is synthesized)
tcaaacttgaccaatcatcgaagaattcacactggagagaagcctcacaaatgtgaggtatgtggaatggccttccatcatagttcagtcctgaggcagcacaaaagaatccacactggt

SEQ ID NO: 722053 - DNA, 120 bp, Artificial Sequence
  ENSG00000197935_18 (sequence is synthesized)
gagaagccatacacctgcagtgagtgtggcacgtccttccgtcagggctcagctctgattggacataagcgagttcatactggggagaaaccttatgaatgtgaggaatgtggaaaagct

SEQ ID NO: 722054 - DNA, 120 bp, Artificial Sequence
  ENSG00000197935_19 (sequence is synthesized)
tttagagtgagctcaaatcttactggacataagaaaagaaaacatcaagtatggagtacccatgaacttgatgggagtaggaaatccctctctccagtgactgtttctcagacctcagta

SEQ ID NO: 722055 - DNA, 120 bp, Artificial Sequence
  ENSG00000197935_20 (sequence is synthesized)
gtcagtattttgaccagtgcctgagtataacgattctggtgttactttctgtttttcctacctcttaggctggtccttctgtctcttatattagttattcctgatttcctgacccttaat

SEQ ID NO: 722056 - DNA, 120 bp, Artificial Sequence
  ENSG00000197935_21 (sequence is synthesized)
tgtgagattccccaaagacattgtcctttaccttcttattcactattttttcagtgagcacatttacttccaagagtttatcaatcacttcctaatattaataaacacttattagtgctt

SEQ ID NO: 722057 - DNA, 120 bp, Artificial Sequence
  ENSG00000197935_22 (sequence is synthesized)
tgcgttctctggctgtgcaactcctaaatcaatgttctccctctcataaggaacattttgttgcatgataaaccacttgtgggttgttttctctttcattattttttgctatcaaaaccc

SEQ ID NO: 722058 - DNA, 120 bp, Artificial Sequence
  ENSG00000197935_23 (sequence is synthesized)
catgctccctttcatctcatttgtacatacccaccaaaagggaagagcctttcacttctataaacctcctccttgcaaattcctttcttctgcctctgtttcctgaggaaactatggcgt

SEQ ID NO: 722059 - DNA, 120 bp, Artificial Sequence
  ENSG00000197937_0 (sequence is synthesized)
gggtgcgggtgacgccgccgagcgaagaacccttgaagaagaggaagaggaaagaaagacaagtcaggcatggctctcacccagggacaggtgacattcagggatgtggctatagaattc

SEQ ID NO: 722060 - DNA, 120 bp, Artificial Sequence
  ENSG00000197937_1 (sequence is synthesized)
tctcaggaggagtggacatgcctggaccccgctcagaggactttgtacagggacgtgatgttggagaattataggaacctggcctccctgggaatctcttgttttgacctcagtattatc

SEQ ID NO: 722061 - DNA, 120 bp, Artificial Sequence
  ENSG00000197937_2 (sequence is synthesized)
tctatgttggagcaagggaaggagcctttcactttggagagccaagtacaaatagcaggaaacccagatggatgggaatggatcaaagctgtgatcacagctctctcttccgaatttgta

SEQ ID NO: 722062 - DNA, 120 bp, Artificial Sequence
  ENSG00000197937_3 (sequence is synthesized)
atgaaagatttactacacaaagggaagagtaatacaggagaagtattccaaacagtgatgttggaaagacaggaaagccaagacattgaaggatgttccttcagggaagtccagaaaaat

SEQ ID NO: 722063 - DNA, 120 bp, Artificial Sequence
  ENSG00000197937_4 (sequence is synthesized)
acacatggccttgagtatcaatgcagagatgctgaaggaaattacaaaggagtgcttttgacccaagaaggcaatctcactcatggaagagatgaacatgataaaagagatgcaagaaac

SEQ ID NO: 722064 - DNA, 120 bp, Artificial Sequence
  ENSG00000197937_5 (sequence is synthesized)
aagcttattaaaaatcagcttggattaagccttcagtcacatctgcctgaactgcagctttttcaatatgaagggaaaatttatgaatgtaatcaggttgagaagtctttcaacaataat

SEQ ID NO: 722065 - DNA, 120 bp, Artificial Sequence
  ENSG00000197937_6 (sequence is synthesized)
tcctcagtttcaccacctcaacaaatgccttataatgtcaaaacccacatttctaagaaatatctcaaagattttatctcttctttattactcacacaggggcaaaaagcaaataattgg

SEQ ID NO: 722066 - DNA, 120 bp, Artificial Sequence
  ENSG00000197937_7 (sequence is synthesized)
ggaagcccttacaaatctaatggatgtggcatggtctttcctcaaaattcacaccttgcaagtcatcagagaagtcatactaaagagaaaccttacaaatgttatgagtgtggcaaagcc

SEQ ID NO: 722067 - DNA, 120 bp, Artificial Sequence
  ENSG00000197937_8 (sequence is synthesized)
tttagaacacgttcaaacctaactacccatcaggtgatccatactggcgaaaaacgttacaaatgtaatgagtgtggtaaggtctttagtcgaaattcacaactctcacaacatcagaaa

SEQ ID NO: 722068 - DNA, 120 bp, Artificial Sequence
  ENSG00000197937_9 (sequence is synthesized)
caacatcagaaaattcacactggagagaaaccttataaatgtaacgaatgtggcaaggtcttcactcagaattcacaccttgtaagacatcgaggaattcatactggagagaaaccttac

SEQ ID NO: 722069 - DNA, 86 bp, Artificial Sequence
  ENSG00000197937_10 (sequence is synthesized)
aagtgtaatgagtgtgggaaagcctttagagctcgttcaagcttagctatccatcaggcaacccacagtggagaatcactcaaaat

SEQ ID NO: 722070 - DNA, 120 bp, Artificial Sequence
  ENSG00000197937_11 (sequence is synthesized)
gagaaaccttacaagtgtaatgagtgcggcaaagcctttggtgttcgttcaagcctagctattcatctggtaattcacaccggagaaaagccttacaaatgtcatgaatgcggcaaggtc

SEQ ID NO: 722071 - DNA, 120 bp, Artificial Sequence
  ENSG00000197937_12 (sequence is synthesized)
aaatgtcatgaatgcggcaaggtctttaggcgtaattcacaccttgcaaggcatcagctaattcatactggagagaaaccttataagtgtaatgagtgtggcaaagcctttagagcacat

SEQ ID NO: 722072 - DNA, 89 bp, Artificial Sequence
  ENSG00000197937_13 (sequence is synthesized)
agtcactcaaaattcacaccttgcaaatcatcaaagaattcatactggagtgaagccttatatgtgtaatgagtgcggcaaagccttca

SEQ ID NO: 722073 - DNA, 120 bp, Artificial Sequence
  ENSG00000197937_14 (sequence is synthesized)
tggagtgaagccttatatgtgtaatgagtgcggcaaagccttcagtgtgtattcaagcctaactacccatcaggtcatccatactggagaaaaaccttacaaatgtaatgagtgtggcaa

SEQ ID NO: 722074 - DNA, 120 bp, Artificial Sequence
  ENSG00000197937_15 (sequence is synthesized)
ttcactcagaattcacaccttgcaagacatcggggaattcatactggagagaaaccttataaatgtaatgaatgtggcaaggtctttaggcataattcatacctttcaaggcatcagcga

SEQ ID NO: 722075 - DNA, 120 bp, Artificial Sequence
  ENSG00000197937_16 (sequence is synthesized)
attcatactggagagaaaccttacaagtataatgagtatggcaaagcctttagtgaacattcaaacctaactacccatcaggtcatccatactggtgaaaaaccttacaaatgtaatgag

SEQ ID NO: 722076 - DNA, 120 bp, Artificial Sequence
  ENSG00000197937_17 (sequence is synthesized)
tgtggcaaggtcttcactcagaattcacaccttgcaagacatcggagagttcatactggaggtaaaccttaccagtgtaatgaatgtggcaaagcctttagtcaaacatcaaagcttgca

SEQ ID NO: 722077 - DNA, 120 bp, Artificial Sequence
  ENSG00000197937_18 (sequence is synthesized)
aggcatcagagagttcatactggagagaaaccatatgagtgtaatcagtgtgggaaagcctttagtgtccgttcaagcctaactacccatcaggcaatccatactggaaaaaaaccttac

SEQ ID NO: 722078 - DNA, 120 bp, Artificial Sequence
  ENSG00000197937_19 (sequence is synthesized)
aactacccatcaggcaatccatactggaaaaaaaccttacaaatgcaatgagtgtgggaaggtcttcactcagaattcacaccttgcaagacatcggggaattcatactggagagaaacc

SEQ ID NO: 722079 - DNA, 120 bp, Artificial Sequence
  ENSG00000197937_20 (sequence is synthesized)
tcaaaacttgcaaggcatcagagaattcataccggagagaaaccatatgagtgtgggaaaccctttagtatctgttcaagcctaactacccatcagacaatccatactggtgggaaacct

SEQ ID NO: 722080 - DNA, 120 bp, Artificial Sequence
  ENSG00000197937_21 (sequence is synthesized)
tacaaatgtaacgtgtggaaagttctaaagtcagagttcaaaccttgcaagccatcacagaattcatagtggagagaaaccttacaaatgaaggtggtaacttttgcagttagaattcat

SEQ ID NO: 722081 - DNA, 120 bp, Artificial Sequence
  ENSG00000197937_22 (sequence is synthesized)
caaatgaaggtggtaacttttgcagttagaattcattcctttgacaacgtcagagaatttatgcctgagagattccttgaaaatgcaatgactggctgggtgcagtggctcatgcctgta

SEQ ID NO: 722082 - DNA, 77 bp, Artificial Sequence
  ENSG00000197937_23 (sequence is synthesized)
aacatggcgaaaccccatttctactaaaagtacacaattagctaggcctggtggcgtgcgcctgtaatcccagctat

SEQ ID NO: 722083 - DNA, 120 bp, Artificial Sequence
  ENSG00000197937_24 (sequence is synthesized)
gtgagccaagatcgtgccaatgcactccatcctgggcaaaaagagcaaaactccatcttaaaggaaaaaaaaaaaatgcaatgactgtggcaaactcctcatgagttcaagtattaatag

SEQ ID NO: 722084 - DNA, 120 bp, Artificial Sequence
  ENSG00000197937_25 (sequence is synthesized)
atgactgtggcaaactcctcatgagttcaagtattaatagacatccaagagtccataataatgagaaatcacataaatgtactgtgtgtgacagaggctttattcaggcctcacagcttt

SEQ ID NO: 722085 - DNA, 120 bp, Artificial Sequence
  ENSG00000197937_26 (sequence is synthesized)
gcaggcattaaaatctacgtatttgatggaaccacacaaatgtaatgtgtaagagcatcctgaagctcttactctaagactgtaactgtaggtgaggattcatacaaagagtgactcagt

SEQ ID NO: 722086 - DNA, 120 bp, Artificial Sequence
  ENSG00000197937_27 (sequence is synthesized)
ctctagttctttgattcacttttaaaatgataaactgcacaataattacacgttccaatatggtaaaacttaagacattatatatttcaaaggtcaaaggacatttggaaatggctactt

SEQ ID NO: 722087 - DNA, 120 bp, Artificial Sequence
  ENSG00000197937_28 (sequence is synthesized)
accttcaggttataaaatcttttattccattgtttgaggtttctcaaaaaggctactgtttgtgactttcaacctgaactatggatctgtggctattttgcatccttaagcacctttcgt

SEQ ID NO: 722088 - DNA, 120 bp, Artificial Sequence
  ENSG00000197937_29 (sequence is synthesized)
ggtgcctatctgggaaagaaccacagtatggaaaggcttacttcattacatgaggatcatttttatccatgtttattgaagaaggaggactctgccttgtaaaattaaatattctctcaa

SEQ ID NO: 722089 - DNA, 120 bp, Artificial Sequence
  ENSG00000197937_30 (sequence is synthesized)
ttgagagaccatggttttggggcagaaaataatgtaaaactatgatatcaatcatcatactgattgtgttcagggtgcttttctgagagaaagacaccatgggttttagggaagtaaggc

SEQ ID NO: 722090 - DNA, 120 bp, Artificial Sequence
  ENSG00000197937_31 (sequence is synthesized)
tctacctgcattgagcaggccaagacctcaggacactggaatttttatgagaggagagtaataagttattagtgactgattatgtgatgggaatagtgcaggggaaatggttgccacttt

SEQ ID NO: 722091 - DNA, 120 bp, Artificial Sequence
  ENSG00000197937_32 (sequence is synthesized)
ctctactgaatggcaatagctgttttatagcagagattgatgaaaaataggcttatttttgaaattgaagaggtaacagttattagagtggagagcttggtcagaaaaaccagaatacca

SEQ ID NO: 722092 - DNA, 120 bp, Artificial Sequence
  ENSG00000197937_33 (sequence is synthesized)
ctaattgctggaattacattttgctacagttttattaagaatgtgtcacagacataatgttttgctaaaaaaaattcaacgttttcttataactataaacaaatcacattctttgtacca

SEQ ID NO: 722093 - DNA, 120 bp, Artificial Sequence
  ENSG00000197937_34 (sequence is synthesized)
acatcattttatcctacctcagtaggatacttcatagcagataataacaatacactcagtcttttaggttggaggatgtagaacaattttttttttctttgtggaatcaacatacaattt

SEQ ID NO: 722094 - DNA, 120 bp, Artificial Sequence
  ENSG00000197937_35 (sequence is synthesized)
tgggaaaatgtaatcatactctgcacttgaattattctctctacactctgccttagaatatttatatggatataatgaaaatcccatagaaagtgcagttttcatactcttacactctga

SEQ ID NO: 722095 - DNA, 120 bp, Artificial Sequence
  ENSG00000197937_36 (sequence is synthesized)
aagctgccacagtgttggtgaatatataccatattatatttttacatgcttgtgtgctaaataactatggcatgcatctttatttacatgaagtgaaaatacaaatatagaaagtgtatg

SEQ ID NO: 722096 - DNA, 82 bp, Artificial Sequence
  ENSG00000197937_37 (sequence is synthesized)
tggttcatgcctgtaatcctagcactttgagagcccaaggcaggggggtcacttgagtccaggagtttgaaccagccagaaa

SEQ ID NO: 722097 - DNA, 120 bp, Artificial Sequence
  ENSG00000197937_38 (sequence is synthesized)
ctctacaaaaaaaatagaaatattacccaggcagggtggctcatgcctgtagtcccagctcctcagggagactgaggcaggtggatcacttgagcctggaggcagaggttgcagtgagcc

SEQ ID NO: 722098 - DNA, 79 bp, Artificial Sequence
  ENSG00000197937_39 (sequence is synthesized)
cacttagggaggccaaggcgggtggatcatggggtcagaaaatcgagaccaccaaatatatatatattggttggatgtg

SEQ ID NO: 722099 - DNA, 120 bp, Artificial Sequence
  ENSG00000197937_40 (sequence is synthesized)
aaaaaaaaattatgaaattataaatagtgcagaataacaaaaataacactaagaatgctatgctcacataatttgacaagactaatattcatgagtttcctcttaaaaatgaacatatat

SEQ ID NO: 722100 - DNA, 120 bp, Artificial Sequence
  ENSG00000197937_41 (sequence is synthesized)
aatggaaattttgtttttgtaggtaaactagaagtttcataaatttagccttatcatgtttttggtaatgttaatttgtcacctctccacaggaagtgtattgaactccatttacagttt

SEQ ID NO: 722101 - DNA, 120 bp, Artificial Sequence
  ENSG00000197937_42 (sequence is synthesized)
ggtttagatatggaaaatgaggatgctgaacaatgaagttttagggaaatgtgtattgcataatgaggctttctgtgagaagcaggattgacttcccaaactggtccaaaatggcttgag

SEQ ID NO: 722102 - DNA, 120 bp, Artificial Sequence
  ENSG00000197937_43 (sequence is synthesized)
agagcagggataaataacttgcttggggtgttatggtaataacctttaataaaagggtgggttggggtgaggatcccacacgtgatttgaacttccatctagtgccaaaggagggaacac

SEQ ID NO: 722103 - DNA, 120 bp, Artificial Sequence
  ENSG00000197937_44 (sequence is synthesized)
ggacattatcagcttggccagatgggcagaataagaagagggagtgcagaggtataaatggtggtataagacaaaaatcacaaaatggaaactgactgtagtacaacactgaatatttac

SEQ ID NO: 722104 - DNA, 81 bp, Artificial Sequence
  ENSG00000197937_45 (sequence is synthesized)
caaaatggaaactgactgtagtacaacactgaatatttactcttgcaacttctgatttctggccaggcatggccagaaatt

SEQ ID NO: 722105 - DNA, 120 bp, Artificial Sequence
  ENSG00000197937_46 (sequence is synthesized)
tccagcctgggcaatagagtgagactctcaaaaaaacaaaagaaatttctaacttctttgttagggaagacctccgctttcttcataatagtagataatactcttcctttctgctgaacc

SEQ ID NO: 722106 - DNA, 120 bp, Artificial Sequence
  ENSG00000197937_47 (sequence is synthesized)
cttcataatagtagataatactcttcctttctgctgaacccatagggcccattacacaacgtcattcttgaaaatatttgtgaaatgctgtttaaattgcctaaaatatttttacagtag

SEQ ID NO: 722107 - DNA, 120 bp, Artificial Sequence
  ENSG00000197937_48 (sequence is synthesized)
ttcaatgcaaatgaatttgtggaaaagtttattacataatatgatcaagcaattttagccaaagggcatttttccaaaggctgtgttatattcatgtcttgttcagtttatggtattgtg

SEQ ID NO: 722108 - DNA, 86 bp, Artificial Sequence
  ENSG00000197937_49 (sequence is synthesized)
ctgtgttatattcatgtcttgttcagtttatggtattgtgtaacatattctccatagacgtggggtctcgctatgttggccaggtt

SEQ ID NO: 722109 - DNA, 120 bp, Artificial Sequence
  ENSG00000197937_50 (sequence is synthesized)
cttcccaaagtgctaggattacagccatgagccaatagtagtaaaatgactttttgtttttgtatatgatttttactttaaggattttttccttccatacattttaatccaaattatatg

SEQ ID NO: 722110 - DNA, 120 bp, Artificial Sequence
  ENSG00000197937_51 (sequence is synthesized)
tttactgcatttcttctctgtgttactccagtgaacacttagaaaatacataaatgagggtgttgtttagaaataaaattttgtgacatgaaaatgtatgtaaaacaatggcaggtacag

SEQ ID NO: 722111 - DNA, 120 bp, Artificial Sequence
  ENSG00000197937_52 (sequence is synthesized)
actaggttctctgtaaataggaaaatggagtgtccttgtaaatctttagttcaattaaagtacagggatactagatggtgaaatgaagtctcttaatatggaagttatcaaagatcagat

SEQ ID NO: 722112 - DNA, 120 bp, Artificial Sequence
  ENSG00000197937_53 (sequence is synthesized)
gcttgaaaatcaagcgtgtggaggttaaccagcatctggagaagtaaatgaaaatacagttaataagagagtccccaagatattaattatcatttatgcaaaggagataatttctctcat

SEQ ID NO: 722113 - DNA, 120 bp, Artificial Sequence
  ENSG00000197937_54 (sequence is synthesized)
tgaatccctggaggcaattcaacttcctactgtggctggtatttcttttctgagccagaggatcttacagcaaaacatgatatttgtgcaacttttgcaatgacagctgccatttaatat

SEQ ID NO: 722114 - DNA, 120 bp, Artificial Sequence
  ENSG00000197937_55 (sequence is synthesized)
actccccttagatttgtttccattttaaaaaactgatatatattctttaataagtgatttatctttgcatatatattttatatcaatcacatttagagtaagaatcacagttattaatgc

SEQ ID NO: 722115 - DNA, 120 bp, Artificial Sequence
  ENSG00000197937_56 (sequence is synthesized)
tttatgtgtaacaactgaatcatcagctcctgaaataagtattaatgatattctcatttcagaggtgaggaaacttaggacagataagcaaaataatcaaattaggctgggcacagtggc

SEQ ID NO: 722116 - DNA, 79 bp, Artificial Sequence
  ENSG00000197937_57 (sequence is synthesized)
tgttgcagttagccgagttcccaccattgcactccagtctcagtgacagagcgggactccatctctctctctctctctc

SEQ ID NO: 722117 - DNA, 61 bp, Artificial Sequence
  ENSG00000197937_58 (sequence is synthesized)
atgttgcagttagccgagttcccaccattgcactccagtctcagtgacagagcgggactcc

SEQ ID NO: 722118 - DNA, 120 bp, Artificial Sequence
  ENSG00000197937_59 (sequence is synthesized)
gaaaatgggtagaactatgaagagacatttcactgaagcagttatactgagataaataggcacataaaaagatttccaacatcaccatccatcaaatctcagatctcagcatattctgct

SEQ ID NO: 722119 - DNA, 120 bp, Artificial Sequence
  ENSG00000197937_60 (sequence is synthesized)
ttaaaagactcatcttgtcacatttcagtaagaggcagaatcgagatttgaatccatgttgtctggttgcaaagacaaagcttttaatgatgatgctacagtaacaatgctagttatttt

SEQ ID NO: 722120 - DNA, 120 bp, Artificial Sequence
  ENSG00000197937_61 (sequence is synthesized)
tgtcctttactcaccatctatacctattttgttagtatctcttgtaatttttaaatggtttatcttcatatatcattgtgattgtggtaactttgtattaaatctatatttttatagatc

SEQ ID NO: 722121 - DNA, 120 bp, Artificial Sequence
  ENSG00000197937_62 (sequence is synthesized)
tttctgcagttccggaagcggatcgtgttgggtgcgggtgacgccgccgagcgtgagtgtccctcagtatggattaaacttgcgaaccgccgtgccccgtttccgcagccagttcccggg

SEQ ID NO: 722122 - DNA, 63 bp, Artificial Sequence
  ENSG00000197937_63 (sequence is synthesized)
tgcgaaccgccgtgccccgtttccgcagccagttcccgggctcgctacatccaggctggagtg

SEQ ID NO: 722123 - DNA, 120 bp, Artificial Sequence
  ENSG00000197937_64 (sequence is synthesized)
agttccggaagcggatcgtgttgggtgcgggtgacgccgccgagcgaagaacccttgaagaagaggaagaggaaagaaagacaagtcaggcatggctctcacccagcaggaatctcttgt

SEQ ID NO: 722124 - DNA, 78 bp, Artificial Sequence
  ENSG00000197937_65 (sequence is synthesized)
tggatcaaagctgtgatcacagcttcctgaggccctcatcagaggcagatgctggcactgtgtttttttttgagacgg

SEQ ID NO: 722125 - DNA, 120 bp, Artificial Sequence
  ENSG00000197937_66 (sequence is synthesized)
gtgagatgtatgtcaggaaagggggatgaagaccatatgtatattttattatatcacaacttggatatcggcccacttactccagtttaatctattctgtcttctcattttatgtgaaga

SEQ ID NO: 722126 - DNA, 120 bp, Artificial Sequence
  ENSG00000197937_67 (sequence is synthesized)
ggcctccctgggtgaggatgactttcttccagaagtcaggatctgcccctgtgtatcttttcattttccatgtggctctcctgggagctcatgcattgcttggctgagactgaagctgtg

SEQ ID NO: 722127 - DNA, 120 bp, Artificial Sequence
  ENSG00000197937_68 (sequence is synthesized)
ttgactgaaaaatgaaaatctccataatgtggaaactggattttaattttcctcttcctgatgtcactggagggtttcaggacttttaaaatatccaattccctgttttctatccccatg

SEQ ID NO: 722128 - DNA, 120 bp, Artificial Sequence
  ENSG00000197937_69 (sequence is synthesized)
ctttgattcagtggttttgggatgagagctatatatttgcatattatagtgtttcctaacaatttataaagaagcatttagtggatgaatttttgaagtgtttttttagatacagctgta

SEQ ID NO: 722129 - DNA, 120 bp, Artificial Sequence
  ENSG00000197938_0 (sequence is synthesized)
atggaacaggataatacaacattgctgacagagtttgttctcacaggacttacatatcagccagagtggaaaatgcccctgttcttggtgttcttggtgatctatctcatcactattgtg

SEQ ID NO: 722130 - DNA, 120 bp, Artificial Sequence
  ENSG00000197938_1 (sequence is synthesized)
tggaaccttggtctgattgctcttatctggaatgacccacaacttcacatccccatgtacttttttcttgggagtttagcctttgttgatgcttggatatcttccacagtaactcccaaa

SEQ ID NO: 722131 - DNA, 120 bp, Artificial Sequence
  ENSG00000197938_2 (sequence is synthesized)
atgttggttaatttcttggccaaaaacaggatgatatctctgtctgaatgcatgattcaatttttttcctttgcatttggtggaactacagaatgttttctcttggcaacaatggcatat

SEQ ID NO: 722132 - DNA, 120 bp, Artificial Sequence
  ENSG00000197938_3 (sequence is synthesized)
ggtggcttcctccatgccttaattcatgaagtccttatattcagattaaccttctgcaattctaacataatacatcatttttactgtgatattataccactgtttatgatttcctgtact

SEQ ID NO: 722133 - DNA, 120 bp, Artificial Sequence
  ENSG00000197938_4 (sequence is synthesized)
gacccttctattaattttctaatggtttttattttgtctggctcaattcaggtattcaccattgtgacagttcttaattcttacacatttgctcttttcacaatcctaaaaaagaagtct

SEQ ID NO: 722134 - DNA, 120 bp, Artificial Sequence
  ENSG00000197938_5 (sequence is synthesized)
gttagaggcgtaaggaaagccttttccacctgtggagcccatctcttatctgtctctttatattatggcccacttatcttcatgtatttgcgccctgcatctccacaagcagatgaccaa

SEQ ID NO: 722135 - DNA, 120 bp, Artificial Sequence
  ENSG00000197938_6 (sequence is synthesized)
gatatgatagactctgtcttttatacaatcataattcctttgctaaatcccattatctacagtctgagaaataaacaagtaatagattcattcacaaaaatggtaaaaagaaatgtttag

SEQ ID NO: 722136 - DNA, 120 bp, Artificial Sequence
  ENSG00000197943_0 (sequence is synthesized)
cgtgagcggcgctgagtgacccgagtcgggacgcgggctgcgcgcgcgggaccccggagcccaaacccggggcaggcgggcagctgtgcccgggcggcacggccagcttcctgatttctc

SEQ ID NO: 722137 - DNA, 120 bp, Artificial Sequence
  ENSG00000197943_1 (sequence is synthesized)
ggcggcacggccagcttcctgatttctcccgattccttccttctccctggagcggccgacaatgtccaccacggtcaatgtagattcccttgcggaatatgagaagagccagatcaagag

SEQ ID NO: 722138 - DNA, 120 bp, Artificial Sequence
  ENSG00000197943_2 (sequence is synthesized)
agccctggagctggggacggtgatgactgtgttcagcttccgcaagtccacccccgagcggagaaccgtccaggtgatcatggagacgcggcaggtggcctggagcaagaccgctgacaa

SEQ ID NO: 722139 - DNA, 120 bp, Artificial Sequence
  ENSG00000197943_3 (sequence is synthesized)
gatcgagggcttcttggatatcatggaaataaaagaaatccgcccagggaagaactccaaagatttcgagcgagcaaaagcagttcgccagaaagaagactgctgcttcaccatcctata

SEQ ID NO: 722140 - DNA, 120 bp, Artificial Sequence
  ENSG00000197943_4 (sequence is synthesized)
tggcactcagttcgtcctcagcacgctcagcttggcagctgactctaaagaggatgcagttaactggctctctggcttgaaaatcttacaccaggaagcgatgaatgcgtccacgcccac

SEQ ID NO: 722141 - DNA, 120 bp, Artificial Sequence
  ENSG00000197943_5 (sequence is synthesized)
cattatcgagagttggctgagaaagcagatatattctgtggatcaaaccagaagaaacagcatcagtctccgagagttgaagaccatcttgcccctgatcaactttaaagtgagcagtgc

SEQ ID NO: 722142 - DNA, 120 bp, Artificial Sequence
  ENSG00000197943_6 (sequence is synthesized)
caagttccttaaagataagtttgtggaaataggagcacacaaagatgagctcagctttgaacagttccatctcttctataaaaaacttatgtttgaacagcaaaaatcgattctcgatga

SEQ ID NO: 722143 - DNA, 120 bp, Artificial Sequence
  ENSG00000197943_7 (sequence is synthesized)
attcaaaaaggattcgtccgtgttcatcctggggaacactgacaggccggatgcctctgctgtttacctgcatgacttccagaggtttctcatacatgaacagcaggagcattgggctca

SEQ ID NO: 722144 - DNA, 120 bp, Artificial Sequence
  ENSG00000197943_8 (sequence is synthesized)
ggatctgaacaaagtccgtgagcggatgacaaagttcattgatgacaccatgcgtgaaactgctgagcctttcttgtttgtggatgagttcctcacgtacctgttttcacgagaaaacag

SEQ ID NO: 722145 - DNA, 120 bp, Artificial Sequence
  ENSG00000197943_9 (sequence is synthesized)
catctgggatgagaagtatgacgcggtggacatgcaggacatgaacaaccccctgtctcattactggatctcctcgtcacataacacgtaccttacaggtgaccagctgcggagcgagtc

SEQ ID NO: 722146 - DNA, 120 bp, Artificial Sequence
  ENSG00000197943_10 (sequence is synthesized)
gtccccagaagcttacatccgctgcctgcgcatgggctgtcgctgcattgaactggactgctgggacgggcccgatgggaagccggtcatctaccatggctggacgcggactaccaagat

SEQ ID NO: 722147 - DNA, 120 bp, Artificial Sequence
  ENSG00000197943_11 (sequence is synthesized)
caagtttgacgacgtcgtgcaggccatcaaagaccacgcctttgttacctcgagcttcccagtgatcctgtccatcgaggagcactgcagcgtggagcaacagcgtcacatggccaaggc

SEQ ID NO: 722148 - DNA, 120 bp, Artificial Sequence
  ENSG00000197943_12 (sequence is synthesized)
cttcaaggaagtatttggcgacctgctgttgacgaagcccacggaggccagtgctgaccagctgccctcgcccagccagctgcgggagaagatcatcatcaagcataagaagctgggccc

SEQ ID NO: 722149 - DNA, 120 bp, Artificial Sequence
  ENSG00000197943_13 (sequence is synthesized)
ccgaggcgatgtggatgtcaacatggaggacaagaaggacgaacacaagcaacagggggagctgtacatgtgggattccattgaccagaaatggactcggcactactgcgccattgccga

SEQ ID NO: 722150 - DNA, 120 bp, Artificial Sequence
  ENSG00000197943_14 (sequence is synthesized)
tgccaagctgtccttcagtgatgacattgaacagactatggaggaggaagtgccccaggatataccccctacagaactacattttggggagaaatggttccacaagaaggtggagaagag

SEQ ID NO: 722151 - DNA, 120 bp, Artificial Sequence
  ENSG00000197943_15 (sequence is synthesized)
gacgagtgccgagaagttgctgcaggaatactgcatggagacggggggcaaggatggcaccttcctggttcgggagagcgagaccttccccaatgactacaccctgtccttctggcggtc

SEQ ID NO: 722152 - DNA, 120 bp, Artificial Sequence
  ENSG00000197943_16 (sequence is synthesized)
aggccgggtccagcactgccggatccgctccaccatggagggcgggaccctgaaatactacttgactgacaacctcaccttcagcagcatctatgccctcatccagcactaccgcgagac

SEQ ID NO: 722153 - DNA, 120 bp, Artificial Sequence
  ENSG00000197943_17 (sequence is synthesized)
gcacctgcgctgcgccgagttcgagctgcggctcacggaccctgtgcccaaccccaacccccacgagtccaagccgtggtactatgacagcctgagccgcggagaggcagaggacatgct

SEQ ID NO: 722154 - DNA, 120 bp, Artificial Sequence
  ENSG00000197943_18 (sequence is synthesized)
gatgaggattccccgggacggggccttcctgatccggaagcgagaggggagcgactcctatgccatcaccttcagggctaggggcaaggtaaagcattgtcgcatcaaccgggacggccg

SEQ ID NO: 722155 - DNA, 120 bp, Artificial Sequence
  ENSG00000197943_19 (sequence is synthesized)
gcactttgtgctggggacctccgcctattttgagagtctggtggagctcgtcagttactacgagaagcattcactctaccgaaagatgagactgcgctaccccgtgacccccgagctcct

SEQ ID NO: 722156 - DNA, 120 bp, Artificial Sequence
  ENSG00000197943_20 (sequence is synthesized)
ggagcgctacaatatggaaagagatataaactccctctacgacgtcagcagaatgtatgtggatcccagtgaaatcaatccgtccatgcctcagagaaccgtgaaagctctgtatgacta

SEQ ID NO: 722157 - DNA, 120 bp, Artificial Sequence
  ENSG00000197943_21 (sequence is synthesized)
caaagccaagcgaagcgatgagctgagcttctgccgtggtgccctcatccacaatgtctccaaggagcccgggggctggtggaaaggagactatggaaccaggatccagcagtacttccc

SEQ ID NO: 722158 - DNA, 120 bp, Artificial Sequence
  ENSG00000197943_22 (sequence is synthesized)
atccaactacgtcgaggacatctcaactgcagacttcgaggagctagaaaagcagattattgaagacaatcccttagggtctctttgcagaggaatattggacctcaatacctataacgt

SEQ ID NO: 722159 - DNA, 120 bp, Artificial Sequence
  ENSG00000197943_23 (sequence is synthesized)
cgtgaaagcccctcagggaaaaaaccagaagtcctttgtcttcatcctggagcccaagcagcagggcgatcctccggtggagtttgccacagacagggtggaggagctctttgagtggtt

SEQ ID NO: 722160 - DNA, 120 bp, Artificial Sequence
  ENSG00000197943_24 (sequence is synthesized)
tcagagcatccgagagatcacctggaagattgacaccaaggagaacaacatgaagtactgggagaagaaccagtccatcgccatcgagctctctgacctggttgtctactgcaaaccaac

SEQ ID NO: 722161 - DNA, 120 bp, Artificial Sequence
  ENSG00000197943_25 (sequence is synthesized)
cagcaaaaccaaggacaacttagaaaatcctgacttccgagaaatccgctcctttgtggagacgaaggctgacagcatcatcagacagaagcccgtcgacctcctgaagtacaatcaaaa

SEQ ID NO: 722162 - DNA, 120 bp, Artificial Sequence
  ENSG00000197943_26 (sequence is synthesized)
gggcctgacccgcgtctacccaaagggacaaagagttgactcttcaaactacgaccccttccgcctctggctgtgcggttctcagatggtggcactcaatttccagacggcagataagta

SEQ ID NO: 722163 - DNA, 120 bp, Artificial Sequence
  ENSG00000197943_27 (sequence is synthesized)
catgcagatgaatcacgcattgttttctctcaatgggcgcacgggctacgttctgcagcctgagagcatgaggacagagaaatatgacccgatgccacccgagtcccagaggaagatcct

SEQ ID NO: 722164 - DNA, 120 bp, Artificial Sequence
  ENSG00000197943_28 (sequence is synthesized)
gatgacgctgacagtcaaggttctcggtgctcgccatctccccaaacttggacgaagtattgcctgtccctttgtagaagtggagatctgtggagccgagtatgacaacaacaagttcaa

SEQ ID NO: 722165 - DNA, 120 bp, Artificial Sequence
  ENSG00000197943_29 (sequence is synthesized)
gacgacggttgtgaatgataatggcctcagccctatctgggctccaacacaggagaaggtgacatttgaaatttatgacccaaacctggcatttctgcgctttgtggtttatgaagaaga

SEQ ID NO: 722166 - DNA, 120 bp, Artificial Sequence
  ENSG00000197943_30 (sequence is synthesized)
tatgttcagcgatcccaactttcttgctcatgccacttaccccattaaagcagtcaaatcaggattcaggtccgttcctctgaagaatgggtacagcgaggacatagagctggcttccct

SEQ ID NO: 722167 - DNA, 120 bp, Artificial Sequence
  ENSG00000197943_31 (sequence is synthesized)
cctggttttctgtgagatgcggccagtcctggagagcgaagaggaactttactcctcctgtcgccagctgaggaggcggcaagaagaactgaacaaccagctctttctgtatgacacaca

SEQ ID NO: 722168 - DNA, 120 bp, Artificial Sequence
  ENSG00000197943_32 (sequence is synthesized)
ccagaacttgcgcaatgccaaccgggatgccctggttaaagagttcagtgttaatgagaaccagctccagctgtaccaggagaaatgcaacaagaggttaagagagaagagagtcagcaa

SEQ ID NO: 722169 - DNA, 120 bp, Artificial Sequence
  ENSG00000197943_33 (sequence is synthesized)
cagcaagttttactcatagaagctggggtatgtgtgtaagggtattgtgtgtgtgcgcatgtgtgtttgcatgtaggagaacgtgccctattcacactctgggaagacgctaatctgtga

SEQ ID NO: 722170 - DNA, 120 bp, Artificial Sequence
  ENSG00000197943_34 (sequence is synthesized)
catcttttcttcaagcctgccatcaaggacatttcttaagacccaactggcatgagttggggtaatttcctattattttcatcttggacaactttcttaacttatattctttatagagga

SEQ ID NO: 722171 - DNA, 120 bp, Artificial Sequence
  ENSG00000197943_35 (sequence is synthesized)
ttccccaaaatgtgctcctcatttttggcctctcatgttccaaacctcattgaataaaagcaatgaaaaccttgatcaattaagccttctgttgcacgacctgtgcagtgaacaggattt

SEQ ID NO: 722172 - DNA, 120 bp, Artificial Sequence
  ENSG00000197943_36 (sequence is synthesized)
ctaatgatccaggtaactgatgtccatggaggatgagctggaaatgtaagaaactattcatgagattctgaaaaggattttaactcaaaggcaaatgattccataagggcccaaagagaa

SEQ ID NO: 722173 - DNA, 120 bp, Artificial Sequence
  ENSG00000197943_37 (sequence is synthesized)
gccctacccacaggcagcctgctcagttcaatgtactttaactaccaccggctgcctgctgcagtccacaagaaaatggctgagtgatgggatctgttcattaagacaatttctaattaa

SEQ ID NO: 722174 - DNA, 120 bp, Artificial Sequence
  ENSG00000197943_38 (sequence is synthesized)
tggtgacagcttgttttgtgactagagttactgggatggagggtaggaatcttggggcctctttgttttaaaaagcccatcagagagaccagagccgtgctgcaggggcaggttctcact

SEQ ID NO: 722175 - DNA, 120 bp, Artificial Sequence
  ENSG00000197943_39 (sequence is synthesized)
tgcccctggctctgccagctgctgggaggctctggccccactagtccctcatggccctactgaactggctgggaggctgctggaatggcccttggtccacagctctccacaggcaagagg

SEQ ID NO: 722176 - DNA, 120 bp, Artificial Sequence
  ENSG00000197943_40 (sequence is synthesized)
tcaactgctgcttgaaagaggtagacaaaagttaggttgatggcgaaatgtctctgggttacccagtcttctggagcagcaagctgagctttaatgggctaagcattagggtgttacaga

SEQ ID NO: 722177 - DNA, 120 bp, Artificial Sequence
  ENSG00000197943_41 (sequence is synthesized)
aaatttcaaatgcagccatctcccttggggcagatctacctagttcatgacagtatgtgcggctggccagggctttacacctctgcatcttaagttgttaatacataccaataatgtaat

SEQ ID NO: 722178 - DNA, 120 bp, Artificial Sequence
  ENSG00000197943_42 (sequence is synthesized)
atggctttttaaaggagaggagagtgctgggttgggaagggaggtggttggtagagtcacaacttctcaatgagtgaatttacagctgatgggaaaaggagtgtaactgtgaaaaacgat

SEQ ID NO: 722179 - DNA, 120 bp, Artificial Sequence
  ENSG00000197943_43 (sequence is synthesized)
ggctgtggtggggaagaacaaaccagcagtaagcctgatgtttgatgtggatggaactggcccctagaaacccatctgaccctcctcttgttacccgaaatgctgggcttagtatgcatg

SEQ ID NO: 722180 - DNA, 120 bp, Artificial Sequence
  ENSG00000197943_44 (sequence is synthesized)
tactgctgaaaagcagggcagaacaaatcaggctctgaccagaagatccttctggtcccttcactctacaaaaacttactgatcacctccacatgccaaatacagtgccaagatttgggg

SEQ ID NO: 722181 - DNA, 120 bp, Artificial Sequence
  ENSG00000197943_45 (sequence is synthesized)
gtgtggatgtttaaacaaaaagctgtgggtctcatcaatcatctccatccacaagctcctaaaagaaagccatttacctcgcttgaagccaggaacacagggaacagcagtctggccaag

SEQ ID NO: 722182 - DNA, 120 bp, Artificial Sequence
  ENSG00000197943_46 (sequence is synthesized)
gaagggctgttatctggtgctatcactccagttactcctccaactgggagctgctattttatttggcagtcagcaactgaagaaagaacattcctcttagtggcagatgttcaaagcaac

SEQ ID NO: 722183 - DNA, 120 bp, Artificial Sequence
  ENSG00000197943_47 (sequence is synthesized)
tttcaagaaaggctaggtgagaaaggcactgggatgagtgctgcaggcactctgtagccagggccccattagcctttggccaggtagccaccagaacctatttattgcacctggcatctc

SEQ ID NO: 722184 - DNA, 120 bp, Artificial Sequence
  ENSG00000197943_48 (sequence is synthesized)
ccccaacccctctcagctctgttaggacttccacacagcagagctcaggtgttgctgtcattacctcctttcagctcctcacttcattctactttaaagccacagtgctaaggcctgcat

SEQ ID NO: 722185 - DNA, 120 bp, Artificial Sequence
  ENSG00000197943_49 (sequence is synthesized)
cccctttctgcccaaatgggttttttgctaccatatcaaagaacctgacatatggcggcataggaagcagaagctaagcctctctccagctgctgctgtgtaaaatccatgcgtggccaa

SEQ ID NO: 722186 - DNA, 120 bp, Artificial Sequence
  ENSG00000197943_50 (sequence is synthesized)
agagaagtcaggggattatgacataaatggtgctgggaagaaccctctgcctaaaactgtctccttctcctggtgctacaaccggaatccaccatgagagagtactttcttcggttcttt

SEQ ID NO: 722187 - DNA, 120 bp, Artificial Sequence
  ENSG00000197943_51 (sequence is synthesized)
cctcctgtccttgacagagtaacacgttaatctggttcttggtggtgttagggactgattctctcaggaaaggcacacatggtatgatggctcttcccagagtctatgtgatgctacata

SEQ ID NO: 722188 - DNA, 120 bp, Artificial Sequence
  ENSG00000197943_52 (sequence is synthesized)
acttcagtatctagctgagacatgcttcctacatgactgttaaagcacagccaatccaggccaagaagactagtaacaggcacattctgaaagatggaagcagcactgatagatcaaaac

SEQ ID NO: 722189 - DNA, 120 bp, Artificial Sequence
  ENSG00000197943_53 (sequence is synthesized)
caccactgcatatgtattacactgtttttgttcaccattttcctaagtgtgttatttagaatattggttattacaaggaaaaataaagtggggaggctggttaggccttgtgagtttggg

SEQ ID NO: 722190 - DNA, 120 bp, Artificial Sequence
  ENSG00000197943_54 (sequence is synthesized)
aaacttaggttataaaaactaaataaagtttttctactgtgagactagatgtgcaggagtgaaaggtgtagagggtcttgttttccaaattcgatctcagaatctttttgccagaagtgt

SEQ ID NO: 722191 - DNA, 120 bp, Artificial Sequence
  ENSG00000197943_55 (sequence is synthesized)
ctcatgggacttatctatagtggaacacatttgaagacctactgctctattaagaaggcagccggacaacatgttctaatacttcgtatgctttgtgacctagttaaaatctaaacttaa

SEQ ID NO: 722192 - DNA, 120 bp, Artificial Sequence
  ENSG00000197943_56 (sequence is synthesized)
gtcgccatggccagtggcctttagattaagctagccttacccctgggagtataccagagctttccaaggaatacacagactccagtactctcaggggagcagtgttcagagcctcatctt

SEQ ID NO: 722193 - DNA, 120 bp, Artificial Sequence
  ENSG00000197943_57 (sequence is synthesized)
cctgttatattcttctctaagattcatctgcctgagaaaatgcccttttctcaccttacaaaagaaaatatggctgtctccacctctagtcttactgtagagcatgtcccaaggtgtaaa

SEQ ID NO: 722194 - DNA, 120 bp, Artificial Sequence
  ENSG00000197943_58 (sequence is synthesized)
aattcaaaatgtggatatttggaaagtgaaagacttatcaacagggcacaaatctttttgcaaatggattttccaagtttttctggtggttccaaattttttgctttcaacaaagtggga

SEQ ID NO: 722195 - DNA, 120 bp, Artificial Sequence
  ENSG00000197943_59 (sequence is synthesized)
ggaacagcctgtagatttctgagtctcttagcatgtaactacaaaggggttggaagaattcagtgattctgctatcataaagcttccgttcccattgatgtatctgtgtgaacaaggatc

SEQ ID NO: 722196 - DNA, 120 bp, Artificial Sequence
  ENSG00000197943_60 (sequence is synthesized)
aacatctccataaatgaaattgaaaacggaaaatagaattgatgatgaactttggctcaatcttaagatgttatcaatctacatagatgaaataattgtggagaaaagccctctttatct

SEQ ID NO: 722197 - DNA, 120 bp, Artificial Sequence
  ENSG00000197943_61 (sequence is synthesized)
cattaagtgatacatttccaaagaagttttactatgtttaataatttagtgaaatttgggctatgtgtttattgattcagctcaatccagaggaaaattttaaaggcttacagccttagg

SEQ ID NO: 722198 - DNA, 120 bp, Artificial Sequence
  ENSG00000197943_62 (sequence is synthesized)
attataggatactatataatacttttggtacagagatagaattaaataacataaaaatcaaaaatttattaggctaaaattttgagggagaagtggtatgaaaatacaaattcaaggagt

SEQ ID NO: 722199 - DNA, 120 bp, Artificial Sequence
  ENSG00000197943_63 (sequence is synthesized)
aaaaggaaaagtggggcattccttgctactaaaaattgccttgttccaggtaagactgatcataaaaaaatggccctgttcataaaatttttaaaaagatcatagtatctatcaaataac

SEQ ID NO: 722200 - DNA, 120 bp, Artificial Sequence
  ENSG00000197943_64 (sequence is synthesized)
ttatattaagaacctcctgggctaaatttaaaaagtaatacaacagttttatttaaacatgtagtgtctacggtatgccagcactttgcagctatttataatgagaaattttagatgtca

SEQ ID NO: 722201 - DNA, 120 bp, Artificial Sequence
  ENSG00000197943_65 (sequence is synthesized)
atatagcaatgtgcaagaagatagagattttcaaaattcacttaagagtatctgagcataaaatgttaagattgctgatcggatgtgagggcgatctggctgcgacatctgtcaccccat

SEQ ID NO: 722202 - DNA, 120 bp, Artificial Sequence
  ENSG00000197943_66 (sequence is synthesized)
tgatcgccagggttgattcggctgatctggctggctaggtgggtgtccccttcctacctcaccgctccatgtgcgtccctcccgaagctgcgcgctccgtcgaagaggacgaccaacccc

SEQ ID NO: 722203 - DNA, 120 bp, Artificial Sequence
  ENSG00000197943_67 (sequence is synthesized)
gatagaggaggaccggtcttcggtcaagggtatacgagtagctgcgctcccctgctggaacctccaaacaagctctcaagattgctgatctagggccactaagtgatgaattgtatttgg

SEQ ID NO: 722204 - DNA, 120 bp, Artificial Sequence
  ENSG00000197943_68 (sequence is synthesized)
aagcaaaaaggatggctaaaaaggacctcaacccttttgactttaaaaggaaaatagcttaaccttcaacctgtgtgacatttaactttttgaacccaaccgtaaaagctatcttctaac

SEQ ID NO: 722205 - DNA, 120 bp, Artificial Sequence
  ENSG00000197943_69 (sequence is synthesized)
caacaaaaagttaataattagatttggaattatacagaattagaaaattggcatttaaaaatactcaataatttgtccctggtttttaattttcaaaatattttctttttgaagagccag

SEQ ID NO: 722206 - DNA, 120 bp, Artificial Sequence
  ENSG00000197943_70 (sequence is synthesized)
attccagtgatcctgcctctcagaaatttccacatttcttatttttcattaggccttaagaagctgcatttgtaaacttgtgtttcattattaaagcttaatttattttttatataaata

SEQ ID NO: 722207 - DNA, 120 bp, Artificial Sequence
  ENSG00000197943_71 (sequence is synthesized)
gtatgtgctttgtgtacatagagaattaagtgaatgagtcacacagatgttggctgttgttaatgtgaaaattaaacagctgtatcacattttgaaaaataaaagtttcatctgaatgaa

SEQ ID NO: 722208 - DNA, 120 bp, Artificial Sequence
  ENSG00000197943_72 (sequence is synthesized)
gagttcagtgttaatgagaaccagtccagctgtaccaggagaaatgcaacaagaggttaagagagaagagagtcagcaacagcaagttttactcatagaagctggggtatgtgtgtaagg

SEQ ID NO: 722209 - DNA, 120 bp, Artificial Sequence
  ENSG00000197943_73 (sequence is synthesized)
acagtccaccttcatccactgcagaaggttgctccggcttttccagtgaatctaggaaaattagggctggcattgaactcatccagtgtcactctagaacccagctgcaatccacgctag

SEQ ID NO: 722210 - DNA, 120 bp, Artificial Sequence
  ENSG00000197943_74 (sequence is synthesized)
tccctccaggggcccaagagccactggtactcagtgtctgggtgggggcaggggggatttttgttctcccagcacctgcggctgttgagaccagagaagctggtggtcgaccacagcctg

SEQ ID NO: 722211 - DNA, 120 bp, Artificial Sequence
  ENSG00000197943_75 (sequence is synthesized)
gggtattagttcacccctagcttctccccagcgagaccccagggcccttgggcacaggggattaagcctctatctgcttacgtgcaagcggaagaaataggcccagagagcaacagtggc

SEQ ID NO: 722212 - DNA, 120 bp, Artificial Sequence
  ENSG00000197943_76 (sequence is synthesized)
gggtctgcagtcacacagccaacttgcgcttgtggcagtggcaaggttgaagttctgagggtacccctcactcaagctccaggcgtcaggaaaagaacattccacgaagtccatctggaa

SEQ ID NO: 722213 - DNA, 120 bp, Artificial Sequence
  ENSG00000197943_77 (sequence is synthesized)
ccacgcctttgttacctcgagatgtcccttgagctgggtggaggtgttgctgtgagacaatgaaattatggacgtcttttcgcacttggtgaaaacctttcaatgaaggcatatgatttc

SEQ ID NO: 722214 - DNA, 120 bp, Artificial Sequence
  ENSG00000197943_78 (sequence is synthesized)
acagacactgtgcagtggcagcttacactctgctttgagagtttgctttcatttgcaggacataggtgcttatggttgtgagctgacagtcattcatcgaacattatctcattcatgact

SEQ ID NO: 722215 - DNA, 120 bp, Artificial Sequence
  ENSG00000197943_79 (sequence is synthesized)
agaggaagttttttctggttaaaatagggctggaatcatctaacacctatagggctagaactctgtaatcaaacattaatgcattaatgttttggcagcaaaagccatccttattggtat

SEQ ID NO: 722216 - DNA, 120 bp, Artificial Sequence
  ENSG00000197943_80 (sequence is synthesized)
taagagggatttaagaaaatgattgcaagcagcgttcattcgaatggttcagattttgctgtcagttacattttgataccaacttactaggtagcctttgttgtaaaagctttttagctg

SEQ ID NO: 722217 - DNA, 120 bp, Artificial Sequence
  ENSG00000197943_81 (sequence is synthesized)
ttatgttctagtaagggtgtgtggatcaggatcggggagtgagctgggtccacgcttcccaggagtgatgaggctatgatttacttgagctggaacatggttaaggattttatttttatc

SEQ ID NO: 722218 - DNA, 120 bp, Artificial Sequence
  ENSG00000197943_82 (sequence is synthesized)
atcgtcactttattttcacatttgccttcatttctattgagtgacgtgatttcctatttatggaagtgacatagctgcctttagaataattttgtttcatagtaaatgccatgcacaagc

SEQ ID NO: 722219 - DNA, 120 bp, Artificial Sequence
  ENSG00000197943_83 (sequence is synthesized)
aatcagtagcgggaggaggaaggaaatgggagcttgaagaacagggtcatggcccggccagcaaaggggtcggtggtgtaaagcggggagtgagaggaagctatgagacgtacggagggg

SEQ ID NO: 722220 - DNA, 120 bp, Artificial Sequence
  ENSG00000197943_84 (sequence is synthesized)
ggtactggtgacctgacacatcttttcggaggaccctactgaatctactgcatcccttgagtagtcatctgtgatgtgtacttaccccgatggaaagtagacgtccccatcagtgctaac

SEQ ID NO: 722221 - DNA, 120 bp, Artificial Sequence
  ENSG00000197943_85 (sequence is synthesized)
acacagggtcctgtcttgaatgccagctccttccctggctgaagctgagtatttaggtcaggctggtcagtgagtatgatgctatgtctgctattaatctctactaaaactgtaagtgct

SEQ ID NO: 722222 - DNA, 120 bp, Artificial Sequence
  ENSG00000197943_86 (sequence is synthesized)
gtcaacatggaggacaagaaggacgaacacaagcaacagggggagctgtacatgtgggattccattgaccaggatccagtacccggtgctgccgtgcatttaggttgtcctgactccttc

SEQ ID NO: 722223 - DNA, 120 bp, Artificial Sequence
  ENSG00000197943_87 (sequence is synthesized)
gtgtcctccaactgggggtcgttccaccagaaaccttatttttcagactttaatgctgcctctatccctttacctaatgtgtatatccattttgagtatatttttacatgtccgttctta

SEQ ID NO: 722224 - DNA, 120 bp, Artificial Sequence
  ENSG00000197943_88 (sequence is synthesized)
acacttcagtttccatttaaacctttgtgtcctgccttagctctctgagtggccagcgatgccttgccactagaaccttctcctaaaactcatcctgattgacatgagacaggattttgg

SEQ ID NO: 722225 - DNA, 120 bp, Artificial Sequence
  ENSG00000197943_89 (sequence is synthesized)
tgaaatcaatccgtccatggtacggtgccgaacctccaattcacatgattttggagtcacgaggctgatgtggattccatcttgttcccatggcagttataacagggcaagggaagactt

SEQ ID NO: 722226 - DNA, 120 bp, Artificial Sequence
  ENSG00000197943_90 (sequence is synthesized)
tggaaaacctggccaaaataatttttttttttttttgagaagaaaggatgattgataatatcaagcctagtttcagggaaaatgttaatagaattccatccaaatgcaacagtgttttgc

SEQ ID NO: 722227 - DNA, 120 bp, Artificial Sequence
  ENSG00000197943_91 (sequence is synthesized)
taaaattctgaggtttgacgaaccacctttgggccaaatggcttctaatgaaaagtctttcaaatgtttttggctcgctgacagagcctgtggtgtttataaattccatttggttcactg

SEQ ID NO: 722228 - DNA, 120 bp, Artificial Sequence
  ENSG00000197943_92 (sequence is synthesized)
aaggtgtgtgggtgcctgagggagctggcgggatgctgctggggactagtctcacccttctgccgcctgtgctcacctggtcacctgtgctcacctggccacctgtgctcacctggccac

SEQ ID NO: 722229 - DNA, 120 bp, Artificial Sequence
  ENSG00000197943_93 (sequence is synthesized)
ctgtcttcatggaacgattgcagtctgccagatgccagagacttcagattgctgtctgatgccactgaaactctggatgagaagagcctcatgtcgggcctcttttgaaggcacacattg

SEQ ID NO: 722230 - DNA, 120 bp, Artificial Sequence
  ENSG00000197943_94 (sequence is synthesized)
acttgcattatgtaagcgcacagggaaccctgcggatacagggaaagccatgtcctcgtgttggcagccgaatggagggagtgtgggtgtccttgtctagtaactgaactggtgtgtggg

SEQ ID NO: 722231 - DNA, 120 bp, Artificial Sequence
  ENSG00000197943_95 (sequence is synthesized)
ccgggggctgacctcggggctgtcagtgaacacacgtggtattgaggctgccgcgtttctccctgtagtggactgctgggacgggcccgatgggaagccggtcatctaccatggctggac

SEQ ID NO: 722232 - DNA, 120 bp, Artificial Sequence
  ENSG00000197943_96 (sequence is synthesized)
gctcaaatgatgttaacaatgtcatagtgatagttcccaccactccctccattcttagctgattccatttggcacaggaaataacccacttgtcatccctgtggtacaaagctcatcatg

SEQ ID NO: 722233 - DNA, 120 bp, Artificial Sequence
  ENSG00000197943_97 (sequence is synthesized)
aatgtgtggccccatctcagacaaaaagcaggtcctagggccatgacggtgtgaaaggggatgctttctttgccttctgcaaaactagaaaccagcataggcttctcccatcttcgtgat

SEQ ID NO: 722234 - DNA, 120 bp, Artificial Sequence
  ENSG00000197943_98 (sequence is synthesized)
accagaagaaacaggtaagagtcattcagtttttttctgatcactttggatttcgatcctcattctatctttaaaccttccaagggggtgggagcatgacttgtcgggagcaaggtcctc

SEQ ID NO: 722235 - DNA, 120 bp, Artificial Sequence
  ENSG00000197943_99 (sequence is synthesized)
tggcattttcttttctgggaactatttgtgcttcttacctgatgtatctactgcagtaggtatttatagcatagatgtatcagaactaagaggttaaaaatttatattcacatatttgtc

SEQ ID NO: 722236 - DNA, 120 bp, Artificial Sequence
  ENSG00000197943_100 (sequence is synthesized)
atttgaattaaaattgcctatgcaatttattgctacatagacacttttagcaagtttgaatcttttcttttatgattcgggatttggtgacatacttggaaaggtgttccccagtctggg

SEQ ID NO: 722237 - DNA, 120 bp, Artificial Sequence
  ENSG00000197943_101 (sequence is synthesized)
agtttgctgtctagaaaccctatattttctttgagtgagatacctatttgaacagctgcctcacattaatttggggaaaaggtgaaattcattccccacctagaaactcctggcctaggg

SEQ ID NO: 722238 - DNA, 120 bp, Artificial Sequence
  ENSG00000197943_102 (sequence is synthesized)
gaggcctgggcttggagaaggagcgtcgacagggtgaaggtgaagttctggaaatagaaacagtgatgataccacatcacagcctgggggccactccactgtcacagggctgttgggaag

SEQ ID NO: 722239 - DNA, 120 bp, Artificial Sequence
  ENSG00000197943_103 (sequence is synthesized)
aagctgtaaggtgctgctttcatctatacaagttgtgctggaggccaggggtaggcgtgagttttgggaggtgaagtatctgtgtgtgtgaaggattctgttttgagaaagaaggaaatg

SEQ ID NO: 722240 - DNA, 120 bp, Artificial Sequence
  ENSG00000197943_104 (sequence is synthesized)
ggaacttactaatttgtagaatggaaactagcaaaattaggcaaggcatggtgagagcatgtgcagcaggaagaggagaccccgcagagctcagaagaggtggaggaggggctggcctcc

SEQ ID NO: 722241 - DNA, 120 bp, Artificial Sequence
  ENSG00000197948_0 (sequence is synthesized)
gcttcctccagttccggagtccagtggctgaccgccttgctggagcggagatgcagccgccgccccgaaaagtgaagccggcccaggaggtgaagcttcgcttcctggaacagctgagca

SEQ ID NO: 722242 - DNA, 120 bp, Artificial Sequence
  ENSG00000197948_1 (sequence is synthesized)
tccttcagacctggcagcagagggaggcggatctgctggaggacatcagatcctacagcaagcagagggcagccattgaacgggagtatgggcaggcactccagaaactggctggcccat

SEQ ID NO: 722243 - DNA, 120 bp, Artificial Sequence
  ENSG00000197948_2 (sequence is synthesized)
tcctgaagagggaagggcaccggagcggtgagatggacagcaggggcaggacagtgttcggtgcctggcgctgcctgctggatgccaccgtggctgggggccaaacccgactccaggcgt

SEQ ID NO: 722244 - DNA, 120 bp, Artificial Sequence
  ENSG00000197948_3 (sequence is synthesized)
ctgaccgataccgtgacctagcagggggtacagggcggagcgccaaggagcaggtgcttaggaagggaacagagaacctccagagggcgcaggctgaggtgctgcagtctgtccgggagc

SEQ ID NO: 722245 - DNA, 120 bp, Artificial Sequence
  ENSG00000197948_4 (sequence is synthesized)
tgagccgaagtcggaagctgtatgggcagcgggaacgtgtgtgggccttggcacaggagaaggcggctgatgtccaggccaggctaaaccgaagtgaccatgggatcttccactctcgga

SEQ ID NO: 722246 - DNA, 120 bp, Artificial Sequence
  ENSG00000197948_5 (sequence is synthesized)
ccagtctccagaaactgagcaccaagctgtccgcccagtcagcccagtactcccagcagctgcaagcagcccgcaatgagtacctgcttaacttggtggctaccaatgcccacctcgacc

SEQ ID NO: 722247 - DNA, 120 bp, Artificial Sequence
  ENSG00000197948_6 (sequence is synthesized)
attactaccaggaggaactgccagctctgctcaaggccctggtcagtgagctgtcagagcacttgagggaccccctgacctccctgagccacactgagctggaagccgcagaggtcatcc

SEQ ID NO: 722248 - DNA, 120 bp, Artificial Sequence
  ENSG00000197948_7 (sequence is synthesized)
tggagcatgcccaccgcggggagcagacaacctcccaggtaagctgggagcaagacctgaagctgtttcttcaggagcctggtgtattttcccccaccccacctcagcagtttcagccag

SEQ ID NO: 722249 - DNA, 120 bp, Artificial Sequence
  ENSG00000197948_8 (sequence is synthesized)
cagggactgatcaggtgtgtgtcctggagtggggagcagaaggcgtggctggcaagagtggcctggagaaagaggttcagcgcttgaccagccgagctgcccgtgactacaagatccaga

SEQ ID NO: 722250 - DNA, 120 bp, Artificial Sequence
  ENSG00000197948_9 (sequence is synthesized)
accatgggcatcgggtactgcaacgactggagcagaggcggcagcaggcttcagagcgggaggctccaagcatagaacagaggttacaggaagtgcgagagagcatccgccgggcacagg

SEQ ID NO: 722251 - DNA, 120 bp, Artificial Sequence
  ENSG00000197948_10 (sequence is synthesized)
tgagccaggtgaagggggctgcccggctggccctgctgcagggggctggcttagatgtggagcgctggctgaagccagccatgacccaggcccaggatgaggtggagcaggagcggcggc

SEQ ID NO: 722252 - DNA, 120 bp, Artificial Sequence
  ENSG00000197948_11 (sequence is synthesized)
tcagtgaggctcggctgtcccagagggacctctctccaaccgctgaggatgctgagctttctgactttgaggaatgtgaggagacgggagagctctttgaggagcctgccccccaagccc

SEQ ID NO: 722253 - DNA, 120 bp, Artificial Sequence
  ENSG00000197948_12 (sequence is synthesized)
tggccacgagggccctcccctgccctgcacacgtggtatttcgctatcaggcagggcgtgaggatgagctgacaatcacggagggtgagtggctggaggtcatagaggagggagatgctg

SEQ ID NO: 722254 - DNA, 120 bp, Artificial Sequence
  ENSG00000197948_13 (sequence is synthesized)
acgaatgggtcaaggctcggaaccagcacggcgaggtaggctttgtccctgagcgatatctcaacttcccggacctctccctcccagagagcagccaagacagtgacaatccctgcgggg

SEQ ID NO: 722255 - DNA, 120 bp, Artificial Sequence
  ENSG00000197948_14 (sequence is synthesized)
cagagcccacagcattcctggcacaggccctgtacagctacaccggacagagtgcagaggagctgagcttccctgagggggcactcatccgtctgctgccccgggcccaagatggagtag

SEQ ID NO: 722256 - DNA, 120 bp, Artificial Sequence
  ENSG00000197948_15 (sequence is synthesized)
atgacggcttctggaggggagaatttgggggccgtgttggggtcttcccctccctgctggtggaagagctgcttggccccccagggccacctgaactctctgaccctgaacagatgctgc

SEQ ID NO: 722257 - DNA, 120 bp, Artificial Sequence
  ENSG00000197948_16 (sequence is synthesized)
cgtccccttctcctcccagcttctccccacctgcacctacctctgtgttggatgggccccctgcacctgtcctgcctggggacaaagccctggacttccctgggttcctggacatgatgg

SEQ ID NO: 722258 - DNA, 120 bp, Artificial Sequence
  ENSG00000197948_17 (sequence is synthesized)
tccctatcttcaagctgtcagaccacaccatcaatgatccagagcaacacagccaaaagctggaatcgcccttatttccaccctcacctccaagggtggaaacttgccccttcccatttc

SEQ ID NO: 722259 - DNA, 120 bp, Artificial Sequence
  ENSG00000197948_18 (sequence is synthesized)
tagagctggaacccactcctttttttcccattgttctatcatctctaggaccggaactaccttctcttctgtcatgaccctatctagggtggtgaaatgcctgaaatctctggggctgga

SEQ ID NO: 722260 - DNA, 120 bp, Artificial Sequence
  ENSG00000197948_19 (sequence is synthesized)
aaccatccatcaaggtctctagtagttctggcccacctctttccccaccctggctccatgacccaccccactctggatgccagggtcactggggttgggctggggagaggaacaggcctt

SEQ ID NO: 722261 - DNA, 120 bp, Artificial Sequence
  ENSG00000197948_20 (sequence is synthesized)
gggaatcaggagctggagccaggatgcgaagcagctgtaatggtctgagcggatttattgacaatgaataaagggcacgaaggccaggccagggcctgggcctcttgtgctaagagggca

SEQ ID NO: 722262 - DNA, 120 bp, Artificial Sequence
  ENSG00000197948_21 (sequence is synthesized)
gggggcctacggtgctattgctttaggggcccaccacgggcaggggcctgctcccagctgccacgctctatcatatggagcgaggtgttggggaaggcggggcaggcagcctgttgcagg

SEQ ID NO: 722263 - DNA, 120 bp, Artificial Sequence
  ENSG00000197948_22 (sequence is synthesized)
caggggaaggagaagagactgaggggctgtgacctctcctgaggcccccagcctgagactgtgcaactccaggtggaagtagagctggtccctcagctggggggcagtgctgtccagtgg

SEQ ID NO: 722264 - DNA, 120 bp, Artificial Sequence
  ENSG00000197948_23 (sequence is synthesized)
aggggagggctttcacgcccacccaccccctggccctgccagctggtagtccatcagcacaatgaaggagacttggagaagaggaagaataacactgttgcttcctgttcaagctgtgtc

SEQ ID NO: 722265 - DNA, 120 bp, Artificial Sequence
  ENSG00000197948_24 (sequence is synthesized)
cagcttttcccctggggctccaggaccttccctacctccaccaccaaaccaagggatttatagcaaaggctaagcctgcagtttactcggggggttcagggagccgaaaggcttaaatag

SEQ ID NO: 722266 - DNA, 120 bp, Artificial Sequence
  ENSG00000197948_25 (sequence is synthesized)
tttaagtaggtgatgggaagatgagattacctcatttagggctcaggcagactcacctcacatactccctgctccctgtggtagagacacctgagagaaaggggaggggtcaacaatgag

SEQ ID NO: 722267 - DNA, 120 bp, Artificial Sequence
  ENSG00000197948_26 (sequence is synthesized)
agaccaggagtaggtcctatcagtgccccccagagtagagagcaataagagcccagcccagtgcagtcccggctgtgttttcctacctggtgatcagaagtgtctggtttgcttggctgc

SEQ ID NO: 722268 - DNA, 120 bp, Artificial Sequence
  ENSG00000197948_27 (sequence is synthesized)
ccatttgcctcttgagtgggcagccctgggcttgggcccctccctccggccctcagtgttggctctgcagaagctctggggttcccttcaagtgcacgaggggttaggctgctgtccctg

SEQ ID NO: 722269 - DNA, 120 bp, Artificial Sequence
  ENSG00000197948_28 (sequence is synthesized)
agtcctccattctgtactggggggctggctaggacctggggctgtggcctctcagggggcagcctctccatggcaggcatccctgccttgggctgccctcccccagacccctgaccaccc

SEQ ID NO: 722270 - DNA, 120 bp, Artificial Sequence
  ENSG00000197948_29 (sequence is synthesized)
cctgggtcctgtcccccaccagagccccagctcctgtctgtgggggagccatcacggtgttcgtgcagtccatagcgcttctcaatgtgtgtcacccggaacctgggaggggagggaaca

SEQ ID NO: 722271 - DNA, 120 bp, Artificial Sequence
  ENSG00000197948_30 (sequence is synthesized)
ctggggtttaggaccacaactcagaggctgcttggccctcccctctgaccagggacatcctgagtttggtggctacttccctctggcctaaggtaggggaggccttctcagattgtgggg

SEQ ID NO: 722272 - DNA, 120 bp, Artificial Sequence
  ENSG00000197948_31 (sequence is synthesized)
cacattgtgtagcctgacttctgccggagctcccagtccaggaggaaagagccaaggcccacttttgggatcaggtgcctgatcactgggccccctacctcagcccccctttccctggag

SEQ ID NO: 722273 - DNA, 120 bp, Artificial Sequence
  ENSG00000197948_32 (sequence is synthesized)
cacctgccccacctgcccacagagaacacagtggtctcccctgtccgggggcggctttttccttccttggagcgtccctgacggacaagtggaggcctcttgctgcggctgcaatggagg

SEQ ID NO: 722274 - DNA, 120 bp, Artificial Sequence
  ENSG00000197948_33 (sequence is synthesized)
caaggggctgcagagcccaggtgcactgtgtgatgatgggagggggctccgtcctgcaggctggaggtggcatccacactggacagcagggaggaggggagtgagggtaacatttccatt

SEQ ID NO: 722275 - DNA, 120 bp, Artificial Sequence
  ENSG00000197948_34 (sequence is synthesized)
tcccttcatgttttgtttcttacgttctttcagcatgctccttaaaaccccagaagccccaatttccccaagccccattttttcttgtctttatctaataaactcaatattaagatgtta

SEQ ID NO: 722276 - DNA, 120 bp, Artificial Sequence
  ENSG00000197948_35 (sequence is synthesized)
ctctggttctgctcctagctggctgcatggcattgtacagtacacttaaactcttccgaaccccagattcctcatcagggataaccctttctctgcctatcttatagcactagtggggct

SEQ ID NO: 722277 - DNA, 120 bp, Artificial Sequence
  ENSG00000197948_36 (sequence is synthesized)
caaaggagagaatggatgtgaacgtgttttaaacttctaagtgctctgcacacgagggcctttctcatgaagaatgtcttcttctctccttcctatacctcatgcccatcacctgtcaaa

SEQ ID NO: 722278 - DNA, 120 bp, Artificial Sequence
  ENSG00000197948_37 (sequence is synthesized)
agcattgtgcctggcacacagtaagtatgcagtcactgttattattttaaaaattagctaacttctctcacggtgtcctcccaatatgcaccttttgctcctagtgtccagatacctagc

SEQ ID NO: 722279 - DNA, 120 bp, Artificial Sequence
  ENSG00000197948_38 (sequence is synthesized)
tttgtatcattattttttctgatgcccactttttttcttttttaaatgtctatagcagttttattttattatttattttagattcaggaggtacatgtgcttgtttgtcatatggatata

SEQ ID NO: 722280 - DNA, 120 bp, Artificial Sequence
  ENSG00000197948_39 (sequence is synthesized)
gagaggggatcttggagccattgagggtgtcatggagctacagaggggagggaaaggtattttaaggtaacagtgtggcacaatagttaagagcacagtttttggagctagaccgacata

SEQ ID NO: 722281 - DNA, 120 bp, Artificial Sequence
  ENSG00000197948_40 (sequence is synthesized)
ggttcaaattctcttctgttgcttcctagttctgtagccccaggtaagggagtgacttaacctctctggacttcaatttcctcatcactaaagtagggccaataatagcacccacctcat

SEQ ID NO: 722282 - DNA, 120 bp, Artificial Sequence
  ENSG00000197948_41 (sequence is synthesized)
agggaagattaaatgacataatgtatgtgatgcaactagcaaagtaccagtcccatagtaagtcatgccccacagtatttccacccacccctgttctctgccttcccaaccaggtactgc

SEQ ID NO: 722283 - DNA, 120 bp, Artificial Sequence
  ENSG00000197948_42 (sequence is synthesized)
ttcaaccctcgcccctgcctctactcctacctttgccccctttggagtcctgggagtctgttatttccatctctatgtccatgtgtacccgttgtttagctcccacttataagtgagaac

SEQ ID NO: 722284 - DNA, 90 bp, Artificial Sequence
  ENSG00000197948_43 (sequence is synthesized)
atgcaatatttggttttctgtttctgagttagttcacttaggataatggcatccaactccattcatgttgctgcagtggaatgcctgcct

SEQ ID NO: 722285 - DNA, 120 bp, Artificial Sequence
  ENSG00000197948_44 (sequence is synthesized)
actttctggtacttccaccttgtccacaaggagtctccctccctggagttaccaccatctccaccaccccaagttcactttgcatgacttagcacttagtcatttattgtgtttgttgag

SEQ ID NO: 722286 - DNA, 120 bp, Artificial Sequence
  ENSG00000197948_45 (sequence is synthesized)
gtttcattattggtttcttgacagccattgggggtgggagcactatgcatcctatctcccttagttttgtaccttgagcagagctgattatacagcagttgcccaataaatgttgaggac

SEQ ID NO: 722287 - DNA, 120 bp, Artificial Sequence
  ENSG00000197948_46 (sequence is synthesized)
agtggatagagtgatggattttatggtctaggatggtgaccattaatttaacaaatatttatagaatgccactgtcctaagtgctggagatacagcattgaacaaaacaaagtctgaaga

SEQ ID NO: 722288 - DNA, 120 bp, Artificial Sequence
  ENSG00000197951_0 (sequence is synthesized)
aggcgcactgccgtcgggcgggcctagcgggcgcggtcattgtcctggcagagcggcgagccggtgagtgtggctgcggggtcgcgcccaccctctacctgtgccgggggccggaacctg

SEQ ID NO: 722289 - DNA, 120 bp, Artificial Sequence
  ENSG00000197951_1 (sequence is synthesized)
gccccggggagggcgcggcctcggggagacggcgtgcaggcccagcactgttggtcaccgcaggcctgtcttcctattcaccgtgggcagcagagggatggctgctcagctgctgactga

SEQ ID NO: 722290 - DNA, 120 bp, Artificial Sequence
  ENSG00000197951_2 (sequence is synthesized)
tgaggcactggaatcagtgacgttcagggatgtgactgtggacttcacccaggaggagtggcagcagctggagcctgcccagaaggacctgtacagggatgtcatgctggagaactacag

SEQ ID NO: 722291 - DNA, 120 bp, Artificial Sequence
  ENSG00000197951_3 (sequence is synthesized)
gaacctggtctcactggactgggagactagacctgaaatgaaagagttggatccaaagaatgacatttcggaagacaagctctccgttgttggggaggccacggggggacccacgaggaa

SEQ ID NO: 722292 - DNA, 120 bp, Artificial Sequence
  ENSG00000197951_4 (sequence is synthesized)
tggtgccaggggtcctggctcagaaggagtgtgggaaccaggcagctggccagagaggccgcggggagatgcaggtgcagagtgggagccattgggaattccccaggggaacaaactctt

SEQ ID NO: 722293 - DNA, 120 bp, Artificial Sequence
  ENSG00000197951_5 (sequence is synthesized)
agggggctcagtacccgcatgtcatgaactgaaggcatttgccaaccaaggctgtgtcctggtcccaccacggctggacgaccccacagaaaagggggcctgtccacccgtaaggcgtgg

SEQ ID NO: 722294 - DNA, 120 bp, Artificial Sequence
  ENSG00000197951_6 (sequence is synthesized)
caagaacttctccagcacttcagacctcagtaagccccccatgccctgcgaggagaagaaaacctacgactgcagcgagtgtggcaaggcctttagccgaagctcgtccctgataaagca

SEQ ID NO: 722295 - DNA, 120 bp, Artificial Sequence
  ENSG00000197951_7 (sequence is synthesized)
ccaaaggatccacacgggagaaaagccgtttgagtgtgacacctgtgggaagcacttcatcgagcgctcgtccctcaccatccaccagcgggtgcacacgggcgagaagccctatgcctg

SEQ ID NO: 722296 - DNA, 120 bp, Artificial Sequence
  ENSG00000197951_8 (sequence is synthesized)
cggggactgcggcaaggccttcagccagcgcatgaacctcactgtgcaccagcgcacgcacacgggcgagaagccgtatgtgtgcgacgtgtgtggcaaggccttccggaagacttcctc

SEQ ID NO: 722297 - DNA, 120 bp, Artificial Sequence
  ENSG00000197951_9 (sequence is synthesized)
tctcacccagcacgagcggatccacacgggggagaagccctacgcgtgcggggactgcggcaaggccttcagccagaacatgcacctcatcgtgcaccagcgcacgcacaccggggagaa

SEQ ID NO: 722298 - DNA, 120 bp, Artificial Sequence
  ENSG00000197951_10 (sequence is synthesized)
gccgtacgtgtgccccgagtgcgggcgagccttcagccagaacatgcacctgaccgagcaccagcgcacgcacaccggggagaagccgtacgcctgcaaggagtgcggcaaggccttcaa

SEQ ID NO: 722299 - DNA, 120 bp, Artificial Sequence
  ENSG00000197951_11 (sequence is synthesized)
caagagctcctcgctcaccctgcaccagaggaaccacaccggcgagaagccctacgtgtgcggcgagtgcggcaaggccttcagccagagctcctacctcatccagcaccagcgcttcca

SEQ ID NO: 722300 - DNA, 120 bp, Artificial Sequence
  ENSG00000197951_12 (sequence is synthesized)
catcggcgtgaagccgttcgagtgcagcgagtgcggcaaggccttcagcaagaactcctcgctcacgcagcaccagcgcatccacaccggcgagaagccctacgagtgctacatctgcaa

SEQ ID NO: 722301 - DNA, 120 bp, Artificial Sequence
  ENSG00000197951_13 (sequence is synthesized)
gaagcacttcacggggcgctcgtccctcatcgtgcaccagatcgtgcacaccggggagaagccctacgtgtgcggcgagtgcggcaaggccttcagccagagcgcctacctcatcgagca

SEQ ID NO: 722302 - DNA, 120 bp, Artificial Sequence
  ENSG00000197951_14 (sequence is synthesized)
cacgggcgagaagccctaccgatgcggcgagtgcgggaagaccttcagccgcaacacgaacctgacgcgccacctgcggattcacacctgagcgcctctgtgcagggctctcactggcgg

SEQ ID NO: 722303 - DNA, 120 bp, Artificial Sequence
  ENSG00000197951_15 (sequence is synthesized)
tgcccaggacggacgccagatggctgcgcgctttgtcagcagtgctgtgagaagttctcccctggggtggggactcggggtcaggggagctcaggaatgtggggttgtggaggggctggc

SEQ ID NO: 722304 - DNA, 120 bp, Artificial Sequence
  ENSG00000197951_16 (sequence is synthesized)
tgatcacacatgccccctccttactgagcctcagaaagcaagcccctcggtgtctgacgtatctggggacacttcaaggttcactgtagctgagccatggccgctggtaacagacatcag

SEQ ID NO: 722305 - DNA, 120 bp, Artificial Sequence
  ENSG00000197951_17 (sequence is synthesized)
ggttccagactagccctcttgagtaactgtcctagagctgggacaggtcacgcctgcctccacatctctgtttcttcagcgggaaagtggagctggtggaggggagggaggagacatctc

SEQ ID NO: 722306 - DNA, 120 bp, Artificial Sequence
  ENSG00000197951_18 (sequence is synthesized)
cctctttgtcagatacatcctggagtccagatgcagcttgtcaccatctgcattttctccgtgggttgggagcgtgagggccttcctatccctccacccaccgtttccctgcagtgcacg

SEQ ID NO: 722307 - DNA, 120 bp, Artificial Sequence
  ENSG00000197951_19 (sequence is synthesized)
ctggcagccaccaagctaggaagtggcaggagtttgccggttgtttgtgaggggaaaaatttttttttcagagttagcaaataacagtaactactgctttgaatgccaaagtttcttaga

SEQ ID NO: 722308 - DNA, 120 bp, Artificial Sequence
  ENSG00000197951_20 (sequence is synthesized)
gtggtctgttacgttttttaaaaataaaacttttaattaagggagactatgttattttaaacagtcttctgttttggccagttgtctggtcaaaatcggcttcagtgattgtgggagggg

SEQ ID NO: 722309 - DNA, 120 bp, Artificial Sequence
  ENSG00000197951_21 (sequence is synthesized)
caagaaggaaaagaaacagcagcaggtttgatattcagaaagaaatatgcatggattcaataagtatatacatctgagcacagattatttttatagtgatttttgcagctaaatgtgaag

SEQ ID NO: 722310 - DNA, 120 bp, Artificial Sequence
  ENSG00000197951_22 (sequence is synthesized)
gcaactgtcttaagtcccttcctgctgctgtaacaaaagaccttagactgggtaatttataaacaatagaaatttgtcactcatggttctggatgctgggaagtccaagatcaaggctct

SEQ ID NO: 722311 - DNA, 120 bp, Artificial Sequence
  ENSG00000197951_23 (sequence is synthesized)
ggcagatttggtgtctgatggggtatgttcttcataggtagtgcttgtgtcttgatgtgtgtcttcacgtggttgtaaacggcagacttcctcaggccccttataagggtgctaatccca

SEQ ID NO: 722312 - DNA, 120 bp, Artificial Sequence
  ENSG00000197951_24 (sequence is synthesized)
gtcacaagggccctgacctcatgacctcccaaaggtcctccctcttcatactgttacattggggatcaagtttccaatatgtgaatacagggaagcaccaacagaccatatcagtaactt

SEQ ID NO: 722313 - DNA, 120 bp, Artificial Sequence
  ENSG00000197951_25 (sequence is synthesized)
cgagtgagtttcctaaggccgactgaagctctgtttacacataagagtgttccccaaagtgcactttctctggggccttttaggccatacttttaattttgttatttgatactactggtt

SEQ ID NO: 722314 - DNA, 120 bp, Artificial Sequence
  ENSG00000197951_26 (sequence is synthesized)
gctaatgttctggcatttccagttgttccacactccctgacactggtgtacacaaataaataatacagaaaaaaaattatatcagcaagcacattctgcaaataagaaaaacagccactc

SEQ ID NO: 722315 - DNA, 120 bp, Artificial Sequence
  ENSG00000197951_27 (sequence is synthesized)
gggcacgtataaacaaggtggaccgtttttcaaattctggcagtcaagtgggcctcagggtgggtttgattcaggctctcatcattggagccatagctgtggttctctgtgatgctctgg

SEQ ID NO: 722316 - DNA, 120 bp, Artificial Sequence
  ENSG00000197951_28 (sequence is synthesized)
ctctcccttcatacttcttaacatcatcctcaggctggcttcccacgtgggattgtggtggtttccagcagcgagtcttgatcagacattgctttagttgcatctgttgtgggaataaat

SEQ ID NO: 722317 - DNA, 120 bp, Artificial Sequence
  ENSG00000197951_29 (sequence is synthesized)
ttcgtcaggagatggacatttgagtcgtttccactttgggactattgcgagtaacattgctatgagcatcagtgtatagtttttgtgtggcactctgttttcatttttcttagatatcta

SEQ ID NO: 722318 - DNA, 120 bp, Artificial Sequence
  ENSG00000197951_30 (sequence is synthesized)
tttattcacttgaggaaatgccagactgtcttccaaagcagctgaaccattttacatccccaccagctgtgcattcttaccagtttcttgcattcacttccataaagaggtctgcgcctg

SEQ ID NO: 722319 - DNA, 120 bp, Artificial Sequence
  ENSG00000197951_31 (sequence is synthesized)
tataagcacatatgtgtaaatttccctttattatttcctcttatggaaatgttaacaaactagacacactgttctgggcattgatctgttttttcatgtaacagtatattcgggagatca

SEQ ID NO: 722320 - DNA, 120 bp, Artificial Sequence
  ENSG00000197951_32 (sequence is synthesized)
ttctgcacctgcagctaaggggctgccccctttttttttgttatggctgtgtgtattccactgtggtggattcactgacctgatttatccaaacccctactgatggccatttgggatgtg

SEQ ID NO: 722321 - DNA, 120 bp, Artificial Sequence
  ENSG00000197951_33 (sequence is synthesized)
atggaggggaagaccttctaaggccctttggagagatgaaatggctcatttaaccctcacaagatcctcgaggtagggattcatgtgcatgtcgtatagataaggaatctgaggttcagt

SEQ ID NO: 722322 - DNA, 120 bp, Artificial Sequence
  ENSG00000197951_34 (sequence is synthesized)
gaggcaaggtaagcttcctgagggcacacaacatggaagtggaggggacagggtgtgagctggggtccacctgggctccgaggtccgtgctccttgcctacactggactacttctagaga

SEQ ID NO: 722323 - DNA, 120 bp, Artificial Sequence
  ENSG00000197951_35 (sequence is synthesized)
tggacatattgaatttctcaggacttgactcctggccttggtttcctggactccccagtgtgtgaagcagagatgggatcgaggctgcaccaccaccatccccctctcccatccagagaa

SEQ ID NO: 722324 - DNA, 120 bp, Artificial Sequence
  ENSG00000197951_36 (sequence is synthesized)
ccagccgggccacctctcaggtccctcctgtttcttttctctgcaacccaagctgatgtggagggcattgaggctcctctggggggatgctgtggtaccaggtgggtctcacatccctgg

SEQ ID NO: 722325 - DNA, 120 bp, Artificial Sequence
  ENSG00000197951_37 (sequence is synthesized)
tctcccgcctcctgggcaagctccccactcagggctccacgtttccccaagaggaaccctgaggtggctggaataatggccacattgacggagtcacttgtccaactctgagggggcgct

SEQ ID NO: 722326 - DNA, 120 bp, Artificial Sequence
  ENSG00000197951_38 (sequence is synthesized)
ctcatcacccccactctacagatggggaaacaggctcgcagaggttcaggcacctgcccaaggtcacacagctgctggattcaaacccattctgactccagaagctggactgcagtccac

SEQ ID NO: 722327 - DNA, 120 bp, Artificial Sequence
  ENSG00000197951_39 (sequence is synthesized)
ggcaccactccacccaccagttcctcagtcaggtacttactgaagccaaattaaatttacccccctgaaaatgtgggtttggcagggatcaagcaggtcaggaacctgctttttaacaag

SEQ ID NO: 722328 - DNA, 120 bp, Artificial Sequence
  ENSG00000197951_40 (sequence is synthesized)
tcttctatcccatacatctgtccaaggcactatttggggttatgtgctggccttcgagttcaccctcactgggccctgtgtccctgtgtccctgtgtccccaggcctgacccaagcctgg

SEQ ID NO: 722329 - DNA, 120 bp, Artificial Sequence
  ENSG00000197951_41 (sequence is synthesized)
ccttgaggtagaggtcatgggtgctgggtggggtctgaatgacccctttatcacttggagtaaatgccaaactcctcacaaacccctgtgtgacgcagcctctcccagctcccgtcccgc

SEQ ID NO: 722330 - DNA, 120 bp, Artificial Sequence
  ENSG00000197951_42 (sequence is synthesized)
tccccctgctcactctgcttcagccacactgtgctttcgttcagtcccagcgctggcccagcccactcccaccgcaggggcctctcccttcctggcccagcacccacgctgagcttcctc

SEQ ID NO: 722331 - DNA, 120 bp, Artificial Sequence
  ENSG00000197951_43 (sequence is synthesized)
aggtccctgatgctcagtttcacgtgtcggcctggctgggctccagtgcccagcaggcccatcgcagtgagtcccggtggtgctgagaagacactttatagatgtggatgtcacccatgt

SEQ ID NO: 722332 - DNA, 120 bp, Artificial Sequence
  ENSG00000197951_44 (sequence is synthesized)
cagctgactttaagtaaacgattattatctgcaatgtgtgtgggcctcatctaatcagttgaaggccttaagagcaaaaccagtttcttggagagtaaaaaactctgcctcaggattaca

SEQ ID NO: 722333 - DNA, 120 bp, Artificial Sequence
  ENSG00000197951_45 (sequence is synthesized)
gtgccaactccggcctgagtttccagcctaccagcctaccttatggatttgggacttgccagctcccacagtagcatgacccggttatttaaattaaatctatttatatataaaagtata

SEQ ID NO: 722334 - DNA, 120 bp, Artificial Sequence
  ENSG00000197951_46 (sequence is synthesized)
tatatataaaagtatacatatgccatatgtataacaagaaatatgaggtatataaaaggatatgtataagatatatatagggtagggcatggtgacccacacctgtaatcccagcacttt

SEQ ID NO: 722335 - DNA, 72 bp, Artificial Sequence
  ENSG00000197951_47 (sequence is synthesized)
gagaccagcctaggcaacatagcaagacctcatctttacaaaacgttaaagagacggaggtgggaggattgc

SEQ ID NO: 722336 - DNA, 84 bp, Artificial Sequence
  ENSG00000197951_48 (sequence is synthesized)
aagagacggaggtgggaggattgcccgagtccaggaattagaggttgcagtgaggtatgatcatgccattgcactccagcctgg

SEQ ID NO: 722337 - DNA, 120 bp, Artificial Sequence
  ENSG00000197953_0 (sequence is synthesized)
atatcacctgagagagttcccaagtctacaattgctctactagttactattcagtgtttgtgaaaaattttaatctcagtactgtgaagaagctggaaaaagggatattatggggctaaa

SEQ ID NO: 722338 - DNA, 120 bp, Artificial Sequence
  ENSG00000197953_1 (sequence is synthesized)
agctctctgtttggggctgctttgtgttctttttgtctctcatttttacacacccatgccagacaacattgaagaaagctggaaaataatggccttggatgccatcgctaaaacttgtac

SEQ ID NO: 722339 - DNA, 120 bp, Artificial Sequence
  ENSG00000197953_2 (sequence is synthesized)
atttacggctatgtgttttgaaaatatgcgtattatgagatatgaagagtttatatccatgatattcaggctggattatacccaaccactttcagatgaatacatcacagtgactgatac

SEQ ID NO: 722340 - DNA, 120 bp, Artificial Sequence
  ENSG00000197953_3 (sequence is synthesized)
aacatttgttgacattccagtacgattgtacttgccaaaaagaaagtcagaaacccgaaggcgagctgtgatatattttcatggtggtggtttttgttttggaagttccaaacagagggc

SEQ ID NO: 722341 - DNA, 120 bp, Artificial Sequence
  ENSG00000197953_4 (sequence is synthesized)
ttttgacttcctgaatagatggacggcaaacacgcttgatgctgttgttgtaggcgtggactataggctggctcctcaacaccactttcctgctcagtttgaagatggccttgctgcagt

SEQ ID NO: 722342 - DNA, 120 bp, Artificial Sequence
  ENSG00000197953_5 (sequence is synthesized)
caaattttttcttttggaaaaaattcttacaaaatatggagtggatcccacccgaatctgcattgcgggagacagttctgggggcaatttagcaacagcggtcactcaacaggtgcagaa

SEQ ID NO: 722343 - DNA, 120 bp, Artificial Sequence
  ENSG00000197953_6 (sequence is synthesized)
tgatgctgaaataaaacataaaatcaagatgcaagtcttactttaccctggcttacagataacagattcttatttgccatctcaccgagaaaatgagcatggtatagttttgaccaggga

SEQ ID NO: 722344 - DNA, 120 bp, Artificial Sequence
  ENSG00000197953_7 (sequence is synthesized)
tgtagccataaaactcgtgagcttatatttcaccaaggatgaagcacttccctgggcaatgagaagaaaccaacacatgcctctggagtcaagacatctgtttaagtttgttaactggag

SEQ ID NO: 722345 - DNA, 120 bp, Artificial Sequence
  ENSG00000197953_8 (sequence is synthesized)
tattcttcttcctgagaagtatagaaaagactatgtatatactgaaccaattcttggaggacttagttattcattgccaggacttacagacagcagagcattacccttgttggccaatga

SEQ ID NO: 722346 - DNA, 120 bp, Artificial Sequence
  ENSG00000197953_9 (sequence is synthesized)
ttctcagttacagaatttgccactaacctatattcttacttgtcaacatgatctcttaagagatgatggacttatgtatgttacaagacttcgaaatgttggagtccaagttgttcatga

SEQ ID NO: 722347 - DNA, 120 bp, Artificial Sequence
  ENSG00000197953_10 (sequence is synthesized)
acatattgaggatggaattcatggagctttatcattcatgacttcaccattttatttacgtctaggtcttaggataagagatatgtatgtaagttggctggataagaatttataaatatg

SEQ ID NO: 722348 - DNA, 120 bp, Artificial Sequence
  ENSG00000197953_11 (sequence is synthesized)
tgatgtgtatgtatagcccttacatagtggattgtaatttgtgatattttgtggttttggagcaaagaacaatgtcatttgagttatctaaatctacatttgcaacatttgtagcagtta

SEQ ID NO: 722349 - DNA, 120 bp, Artificial Sequence
  ENSG00000197953_12 (sequence is synthesized)
atgtgtgtccttgaagagttattaaattttctgacttgcagaccctgaatatgtaaaatgtatgtaatcctgcctattttctccttacttataatttattataattatgttggttctaat

SEQ ID NO: 722350 - DNA, 120 bp, Artificial Sequence
  ENSG00000197953_13 (sequence is synthesized)
aagaaccaatgcttattaaagttgagaaataagagtggttattggcaaattaagcaagatactttccagataggcacagaaattgttgtagtgagtgggaagaggaaaaaacatggaaca

SEQ ID NO: 722351 - DNA, 120 bp, Artificial Sequence
  ENSG00000197953_14 (sequence is synthesized)
aacttgctgctaaaaatatatggaaaccactggactaaataaaccctaaggaccctatattagtttcctgtgactattgtagcaaattactacaaattcagtcgctttaaacaacagata

SEQ ID NO: 722352 - DNA, 120 bp, Artificial Sequence
  ENSG00000197953_15 (sequence is synthesized)
tttattcttttacagttctggggtcctaaagcatgaaattagtattaactaggcccaaaccaagtcacaggcaagagacatgactcccttggagactctctagaaggtgctctttgcctc

SEQ ID NO: 722353 - DNA, 120 bp, Artificial Sequence
  ENSG00000197953_16 (sequence is synthesized)
ttttaacctctggtggctgccagtattctttgactattcttagatcagtttaatcttgaaggccagcatcttccaatctctttctgcttcatcttcacattgccttcttctctgcctgtg

SEQ ID NO: 722354 - DNA, 120 bp, Artificial Sequence
  ENSG00000197953_17 (sequence is synthesized)
tctaatctccctatgggcttctcttagaaaaacacatgtgtttacatttaggagggtccacctgaatagtctaggataatctctgcatctcacgatcctcaatttaattgtatttgcaga

SEQ ID NO: 722355 - DNA, 120 bp, Artificial Sequence
  ENSG00000197953_18 (sequence is synthesized)
tttccccacccttttctatataaagtaaccttcagagattaggatgtagttatcttttgggaggccatttttaaaaatattttttaaaggaggcagcagatcaatattataattcaagaa

SEQ ID NO: 722356 - DNA, 120 bp, Artificial Sequence
  ENSG00000197953_19 (sequence is synthesized)
tctgatctaaatatgcattcaataatgaagaacatttgagtatggactagaaaagcttctccaaaaaactttcaaatatatcatctcaaattacctaaagaataaatcacttctgtagcc

SEQ ID NO: 722357 - DNA, 120 bp, Artificial Sequence
  ENSG00000197953_20 (sequence is synthesized)
cttttgttgagtggaatcataaacaaaaaactgaaaatttattgctatgaaaacagatccatggtacaatgttataaattttgagtattaagcatagtcagttgaatccaactaagaagt

SEQ ID NO: 722358 - DNA, 120 bp, Artificial Sequence
  ENSG00000197953_21 (sequence is synthesized)
tgtatatgtatgagtatgtgcatgtgtgtgggaaaaatctaccatccaattgacccaaaaacaacttactcagttgggaccagacatttttctcaattctccatgattcagaaggcaatt

SEQ ID NO: 722359 - DNA, 120 bp, Artificial Sequence
  ENSG00000197953_22 (sequence is synthesized)
aagaattacaatttcaacagtccacaaacaaaataagatttttttaatgtagagagaaattaattatgttcaaagagccctttttctttcactcaatttcagtaccccaaagctaaaaac

SEQ ID NO: 722360 - DNA, 120 bp, Artificial Sequence
  ENSG00000197953_23 (sequence is synthesized)
gcaaacatgactatgacaaatgaaaataagtatcatgggaatctgtttttttcctctgagaaataaaatctaaatggagatttgatactatatgctatactacatacactaagaatattg

SEQ ID NO: 722361 - DNA, 120 bp, Artificial Sequence
  ENSG00000197953_24 (sequence is synthesized)
tatttttcataattctgatttaatctcctgtaaacttgatatattttaaaatttgtaatttgtttttcatgatactgaatctggttccagttctttttcatcatttaatatactggctac

SEQ ID NO: 722362 - DNA, 120 bp, Artificial Sequence
  ENSG00000197953_25 (sequence is synthesized)
ccgttctaattaggaaaacaagtcctagaaatctcttcattttgacagcaagtgctgatttgtaagaaaatcattaaaaatgcagctctctaggaagcacattttgttgattgtcctatt

SEQ ID NO: 722363 - DNA, 120 bp, Artificial Sequence
  ENSG00000197953_26 (sequence is synthesized)
gtctgaacattttcacagtgattcctgactaaaaatccttttaattttgtaagcactacactagtgtgtcatgtcactagtatgtactttcaagcctttaaacagaaaggatggctcaca

SEQ ID NO: 722364 - DNA, 120 bp, Artificial Sequence
  ENSG00000197953_27 (sequence is synthesized)
gctagataataactaagtttgttttcgttttgaaaaagtttgtatcttgcagagcagaaaagcacttctttttttgctacataagtatgtggtagaaatgtatgctaaggtaggccagtc

SEQ ID NO: 722365 - DNA, 120 bp, Artificial Sequence
  ENSG00000197953_28 (sequence is synthesized)
aatccttttttatttattttgtaaatttggtcccagaatatttctggaaggaaccacaggtagactagcttccattgcagtcccttacctcactaacttcttttgtggctttatccaggc

SEQ ID NO: 722366 - DNA, 120 bp, Artificial Sequence
  ENSG00000197953_29 (sequence is synthesized)
actgttactgtttgtatgctaaagggttcatttcactgggtcttactttcaaagtttgttccattttgtgtggtggcatgagcattgtgatcaagccattaagtttggaaacaactgaat

SEQ ID NO: 722367 - DNA, 120 bp, Artificial Sequence
  ENSG00000197953_30 (sequence is synthesized)
gaaagtcgtctgttataatgtattttactttatttttaaatttcattttaaattgacaataattgtacatattcatgggatacatagtgacgtttcaatacatatcatgtatagtgatta

SEQ ID NO: 722368 - DNA, 120 bp, Artificial Sequence
  ENSG00000197953_31 (sequence is synthesized)
acatttatcatttctttgtgttgggaatttcaatatcttttttttagctgtttgagattatgtaatatattattgttaactatagtcatcctacagtggtatagaaactacctagctgta

SEQ ID NO: 722369 - DNA, 120 bp, Artificial Sequence
  ENSG00000197953_32 (sequence is synthesized)
acagtggtatagaaactacctagctgtaatgatgtatcttttaacaaatctaatttatttcttgacagtataggggaagacttgattacaccccatggcattacagctaaaaattccaac

SEQ ID NO: 722370 - DNA, 120 bp, Artificial Sequence
  ENSG00000197953_33 (sequence is synthesized)
gttttcagtctctttgtagctatgttatccagacattgatttgtatttacatctcatcttcctttctaagagaaacagtgatgcagaacctgagagtcaaatttaatattctctaggtac

SEQ ID NO: 722371 - DNA, 120 bp, Artificial Sequence
  ENSG00000197953_34 (sequence is synthesized)
caaggcaagggtttatgttacagtttgtgtactagtccaagtcccaagttgtgacgatacagctccataacctacctttataccacccagggaaagtatacagaagaaattcttgacttc

SEQ ID NO: 722372 - DNA, 120 bp, Artificial Sequence
  ENSG00000197953_35 (sequence is synthesized)
atctatccgaatttctacaagtcatctgttatttttctgataatctgcctgtgtctcctggaaacataaggtgtaggtttctgacacatatatctaacatgtaaagaagtaacaatttcc

SEQ ID NO: 722373 - DNA, 120 bp, Artificial Sequence
  ENSG00000197953_36 (sequence is synthesized)
aaaatacctccaaacagcgccacatcctaaaggaaatttctaggtttttctgctgaaatatccattccagcattgtgtttgtttgctagagctgctataacaaagtatcacaaactgagt

SEQ ID NO: 722374 - DNA, 120 bp, Artificial Sequence
  ENSG00000197953_37 (sequence is synthesized)
gccttaaataaacaaaaggaatttattactttgtggttcagaaggctagaagttggagatcaaggtgtcatcacaccatggtccctctgaaggcaccaaggatggatctgtttcaggact

SEQ ID NO: 722375 - DNA, 120 bp, Artificial Sequence
  ENSG00000197953_38 (sequence is synthesized)
cctggcctgtagcagcataactccaatcttcacatgatattctcccgttgtatgtgttcttccccaattttccctttttataaagatagcagtcagattagattagggcctatcctaata

SEQ ID NO: 722376 - DNA, 120 bp, Artificial Sequence
  ENSG00000197953_39 (sequence is synthesized)
atttcattttaacctgactgtctttgtaaagaccctatctgcaaataaaatcacatgtaaagtattggggcttaggactccaacatatagatatgttttatatatatggtgagatatata

SEQ ID NO: 722377 - DNA, 120 bp, Artificial Sequence
  ENSG00000197953_40 (sequence is synthesized)
tatatatatatatatatatatatgaatttggtggaacacaaaagaacacctagcaagtatcatatgttccaatttcttaaaagtaaataaaggccttgtgccattggtggtgttctgaaa

SEQ ID NO: 722378 - DNA, 120 bp, Artificial Sequence
  ENSG00000197956_0 (sequence is synthesized)
atcccctcgaccgctcgcgtcgcatttggccgcctccctaccgctccaagcccagccctcagccatggcatgccccctggatcaggccattggcctcctcgtggccatcttccacaagta

SEQ ID NO: 722379 - DNA, 120 bp, Artificial Sequence
  ENSG00000197956_1 (sequence is synthesized)
ttggctcgaagctgcaggatgctgaaattgcaaggctgatggaagacttggaccggaacaaggaccaggaggtgaacttccaggagtatgtcaccttcctgggggccttggctttgatct

SEQ ID NO: 722380 - DNA, 120 bp, Artificial Sequence
  ENSG00000197956_2 (sequence is synthesized)
acaatgaagccctcaagggctgaaaataaatagggaagatggagacaccctctgggggtcctctctgagtcaaatccagtggtgggtaattgtacaataaattttttttggtcaaattta

SEQ ID NO: 722381 - DNA, 120 bp, Artificial Sequence
  ENSG00000197956_3 (sequence is synthesized)
gagctgcgcagatgaggggagactcgtcaccaggcgtgcagtgggcactgctgggctcccccatcccgtcctaacccggaacagccccgggcaggaggcgtggaaagtcgagggggtaaa

SEQ ID NO: 722382 - DNA, 120 bp, Artificial Sequence
  ENSG00000197956_4 (sequence is synthesized)
ccgcgaatgtgcgttgtgagccctgggtactttccagggccagctgccctcacgctgggggtccagccatcccctgcccagttcagccgctggatccagactggggccatctgtggcgct

SEQ ID NO: 722383 - DNA, 120 bp, Artificial Sequence
  ENSG00000197956_5 (sequence is synthesized)
ccaggcgtgcagtgggcactgctgggctcccccatcccgtcctaacccggaacagccccgggcaggaggcgtggaaagtcgagggggtaaaccgcgaatgtgcgttgtgtaagccacggc

SEQ ID NO: 722384 - DNA, 120 bp, Artificial Sequence
  ENSG00000197956_6 (sequence is synthesized)
gcagggtggggcgcgggcgggacttgggcgggcggggtgggcttggccgagctggcctccggggcaccgaccgctataaggccagtcggactgcgacacagcccatcccctcgaccgctc

SEQ ID NO: 722385 - DNA, 120 bp, Artificial Sequence
  ENSG00000197956_7 (sequence is synthesized)
ccattggctcggtgagtggcctcctccccaggaccccttttcccacccttgtcctttggaagcaggattaggggagagagaggtgccaggtgcatctgactcacatttacccacattctg

SEQ ID NO: 722386 - DNA, 120 bp, Artificial Sequence
  ENSG00000197958_0 (sequence is synthesized)
cctctcggctttcggctcggaggaggccaaggtgcaacttccttcggtcgtcccgaatccgggttcatccgacaccagccgcctccaccatgccgccgaagttcgaccccaacgagatca

SEQ ID NO: 722387 - DNA, 120 bp, Artificial Sequence
  ENSG00000197958_1 (sequence is synthesized)
aagtcgtatacctgaggtgcaccggaggtgaagtcggtgccacttctgccctggcccccaagatcggccccctgggtctgtctccaaaaaaagttggtgatgacattgccaaggcaacgg

SEQ ID NO: 722388 - DNA, 81 bp, Artificial Sequence
  ENSG00000197958_2 (sequence is synthesized)
gattgaggtggtgccttctgcctctgccctgatcatcaaagccctcaaggaaccaccaagagacagaaagaaacagaatgt

SEQ ID NO: 722389 - DNA, 81 bp, Artificial Sequence
  ENSG00000197958_3 (sequence is synthesized)
agaaacagaatgtcaacattgctcgacagatgcggcaccgatccttagccagagaactctctggaaccattaaagagatcc

SEQ ID NO: 722390 - DNA, 120 bp, Artificial Sequence
  ENSG00000197958_4 (sequence is synthesized)
tgttgatggccgccatcctcatgacatcatcgatgacatcaacagtggtgctgtggaatgcccagccagttaagcacaaaggaaaacatttcaataaaggatcatttgacaactggtgga

SEQ ID NO: 722391 - DNA, 120 bp, Artificial Sequence
  ENSG00000197958_5 (sequence is synthesized)
agtcggtgcgtgctctggttgtggccggggctgcgggatggagcatccctcggccctgccgcgcgtgcaaagctttccccgtatggggctcttaaagccgctgcctcccagagaccttcc

SEQ ID NO: 722392 - DNA, 120 bp, Artificial Sequence
  ENSG00000197958_6 (sequence is synthesized)
cggtgttgcgccgccccggccaagcctcagcctttctgggccttagcttcttcacgtgtaggtggggagggaggactggaccacctgtggcggcttgggagcccgcacgccctaggtata

SEQ ID NO: 722393 - DNA, 120 bp, Artificial Sequence
  ENSG00000197958_7 (sequence is synthesized)
ggcttgtctccgggcgtttcgccccattggcctgggttagcgggcgacggggctctctccacgcctccccggtgtgagtttcggagctgcccacacccgagggaggagcgggtggcccgc

SEQ ID NO: 722394 - DNA, 120 bp, Artificial Sequence
  ENSG00000197958_8 (sequence is synthesized)
ctcgcgctctgtgctgtttcgagaagaggcagagggtggcgtgtccaaccccggaaagacgctgagagggctgtggctcggggctccctctgcacagacactaactcttcttttccccca

SEQ ID NO: 722395 - DNA, 120 bp, Artificial Sequence
  ENSG00000197958_9 (sequence is synthesized)
gtatacctgaggtgcaccggaggtgaagtcggtgccacttctgccctggcccccaagatcggccccctgggtctggtacgttatcccctccaaggggcatttttttcacatttgtttcac

SEQ ID NO: 722396 - DNA, 120 bp, Artificial Sequence
  ENSG00000197958_10 (sequence is synthesized)
tttaagcgccggctcgtggagtcacgcctgtgccagaggtgccctcgtggcttggactgtcaccctcagtaggcctgagccactgaacaagtactaggtaccttaggaaggtcgtgtgtg

SEQ ID NO: 722397 - DNA, 120 bp, Artificial Sequence
  ENSG00000197958_11 (sequence is synthesized)
aaaaatcgaacctggtgcctttaaattgtaattagctccatgtgtctccactgctgctttagtgtacctgaggggtgggcccaagggggagttttgaagttaggactggcttagagacat

SEQ ID NO: 722398 - DNA, 120 bp, Artificial Sequence
  ENSG00000197958_12 (sequence is synthesized)
tgggcagccaacatctgtatttcctcgtcaggaagtgggcatggcgttgttgggagattaaacggggtgtgggtgaagatccagtgagcgtttccagctgtgttgtagatgtaaacctag

SEQ ID NO: 722399 - DNA, 120 bp, Artificial Sequence
  ENSG00000197958_13 (sequence is synthesized)
tgctcccctgccccaaatgctcttccccattggtcttttttaacctgtatcttaactattcttccttggccgttagctggcacttaagggacacttagcctcctgttgaggctaaggatt

SEQ ID NO: 722400 - DNA, 120 bp, Artificial Sequence
  ENSG00000197958_14 (sequence is synthesized)
actagaggaggagaacttcagagtagcaaataatcagacctccatccaggaagatggacgtgggtggtctgacatgggagcctagtattttgaaagctccttaggtgattctaatgtcag

SEQ ID NO: 722401 - DNA, 120 bp, Artificial Sequence
  ENSG00000197958_15 (sequence is synthesized)
cagggctgaaaatccccctccttaagcacatgggcacttaggagggggtctaggttacattgtggccaagtctgcagtttacagttctggacaagaaccccaacccccaatttatgctat

SEQ ID NO: 722402 - DNA, 120 bp, Artificial Sequence
  ENSG00000197958_16 (sequence is synthesized)
ggtgatagctgtgctctgattgagaaggtgcccttaggtacttgagatagcttcctttgttgccaagtgagaagtggtgggcaggtttcaaggctgtggttcacctctggacaccatgtt

SEQ ID NO: 722403 - DNA, 120 bp, Artificial Sequence
  ENSG00000197958_17 (sequence is synthesized)
catcatcgatgacatcaacagtggtgctgtggaatgcccagccgtaagtgacattttcattgttacagtaggggtgaaaggggggccacccagtgtattcacagagataagctgggaagt

SEQ ID NO: 722404 - DNA, 120 bp, Artificial Sequence
  ENSG00000197958_18 (sequence is synthesized)
tttggaaatggttactggtggggtgggataatccttttaaactttttactgattttttttttctttcccacagagttaagcacaaaggaaaacatttcaataaaggatcatttgacaact

SEQ ID NO: 722405 - DNA, 120 bp, Artificial Sequence
  ENSG00000197958_19 (sequence is synthesized)
gatatatgtggctgtgttttcccttaaaggaaacctggggttgacatgggtattgggtgttgatatggttagggctgctagagccaggtagtatgaaaaagtgccacgtatgctgggtgg

SEQ ID NO: 722406 - DNA, 120 bp, Artificial Sequence
  ENSG00000197959_0 (sequence is synthesized)
agccaagcggcgggctggcggcgggctccgacgtctgcgccaggacctggctggctgagcccggcgcagcagcagcagccagggcagcgcggcccctactccctgtcaggtcgtagaggc

SEQ ID NO: 722407 - DNA, 120 bp, Artificial Sequence
  ENSG00000197959_1 (sequence is synthesized)
gagcagggaccagctggtcgccggcccctcgggcaagatggggaaccgggagatggaggagctgatcccgctggtgaaccgtctgcaggacgcgttttcggcgctgggacagagctgcct

SEQ ID NO: 722408 - DNA, 120 bp, Artificial Sequence
  ENSG00000197959_2 (sequence is synthesized)
gctggagctgccgcagatcgccgtggtgggcggccagagcgccggcaagagctcggtgctcgagaacttcgtgggcagggactttctccctcgagggtcgggcattgtaacaagacgacc

SEQ ID NO: 722409 - DNA, 120 bp, Artificial Sequence
  ENSG00000197959_3 (sequence is synthesized)
tcttgtgctgcagcttgttacttctaaagcagaatatgccgagtttctacattgcaaaggaaagaaatttacagattttgatgaagttcgccttgagattgaagcagaaacagatcgcgt

SEQ ID NO: 722410 - DNA, 120 bp, Artificial Sequence
  ENSG00000197959_4 (sequence is synthesized)
gactggaatgaataaaggcatttcctccatacccattaatttacgagtctattccccacacgtgttaaatctaacccttattgatctacctggaataactaaagtgcctgtgggagatca

SEQ ID NO: 722411 - DNA, 120 bp, Artificial Sequence
  ENSG00000197959_5 (sequence is synthesized)
gccaccagatatcgagtatcagatcagagaaatgattatgcagttcatcacgagggagaactgtctgattttagctgttactccagccaacactgatcttgcaaactcagatgcgctgaa

SEQ ID NO: 722412 - DNA, 120 bp, Artificial Sequence
  ENSG00000197959_6 (sequence is synthesized)
gctagctaaagaagttgatcctcaaggtctgagaaccattggagttatcaccaaactggaccttatggatgaaggaacggatgccagggatgttctagagaacaaactgttgcctcttcg

SEQ ID NO: 722413 - DNA, 120 bp, Artificial Sequence
  ENSG00000197959_7 (sequence is synthesized)
caggggttacgtgggggtggtaaacagaagccagaaggacatagatgggaagaaggacataaaggcagccatgctggcagagaggaagtttttcctttcccacccggcttacagacatat

SEQ ID NO: 722414 - DNA, 120 bp, Artificial Sequence
  ENSG00000197959_8 (sequence is synthesized)
cgctgaccgaatgggaaccccacacctgcagaaggtccttaatcagcaacttaccaaccacattcgggataccctaccaaacttcaggaacaaactacagggacagttgctctccataga

SEQ ID NO: 722415 - DNA, 120 bp, Artificial Sequence
  ENSG00000197959_9 (sequence is synthesized)
acatgaagtagaagcctacaaaaatttcaaaccagaagacccaacaaggaagaccaaagcattgctgcagatggttcagcaatttgctgtggactttgagaagagaattgaagggtcagg

SEQ ID NO: 722416 - DNA, 120 bp, Artificial Sequence
  ENSG00000197959_10 (sequence is synthesized)
ggatcaagtagataccctggaactctcaggtggtgctaaaatcaatcgtatttttcatgaacgctttccttttgagatagtaaagatggagttcaatgagaaagaattgcgaagagaaat

SEQ ID NO: 722417 - DNA, 120 bp, Artificial Sequence
  ENSG00000197959_11 (sequence is synthesized)
aagctatgcaatcaaaaacatacatggtatcaggacagggttgtttactccagacatggcatttgaagcgatagtcaagaaacagattgtaaagttgaaagggccttccttgaagagtgt

SEQ ID NO: 722418 - DNA, 120 bp, Artificial Sequence
  ENSG00000197959_12 (sequence is synthesized)
ggatctggtaatacaagaattaatcaacactgtgaagaagtgtaccaaaaaactggcaaacttccccagactctgcgaggaaacggaaaggattgttgctaaccacattcgtgagcgaga

SEQ ID NO: 722419 - DNA, 120 bp, Artificial Sequence
  ENSG00000197959_13 (sequence is synthesized)
agggaagacaaaggaccaggtattgctattgattgacattcaagtctcttacatcaacaccaaccatgaagacttcattggcttcgcaaatgctcagcagaggagcagtcaggttcacaa

SEQ ID NO: 722420 - DNA, 120 bp, Artificial Sequence
  ENSG00000197959_14 (sequence is synthesized)
gaaaaccacagttggaaatcaggtgattcgcaaggggtggctcaccatcagcaacattggcatcatgaaaggcggctcgaagggatactggttcgtccttactgcggaaagcttgtcctg

SEQ ID NO: 722421 - DNA, 120 bp, Artificial Sequence
  ENSG00000197959_15 (sequence is synthesized)
gtataaagatgatgaggaaaaagaaaagaagtacatgcttcccttggacaacctgaaagttcgggatgtggaaaagagctttatgtctagcaagcacatctttgcactctttaatacaga

SEQ ID NO: 722422 - DNA, 120 bp, Artificial Sequence
  ENSG00000197959_16 (sequence is synthesized)
gcaaaggaatgtatacaaagactatcgcttccttgagctggcatgtgattcccaggaggatgtcgacagctggaaggcatctctactaagagctggggtctatcctgacaaatctgtagc

SEQ ID NO: 722423 - DNA, 120 bp, Artificial Sequence
  ENSG00000197959_17 (sequence is synthesized)
tgaaaatgatgagaatggacaagcagaaaacttttccatggacccacaattggagaggcaagtggagaccattcgcaacctcgtagactcctacatgtccattatcaacaaatgtatccg

SEQ ID NO: 722424 - DNA, 120 bp, Artificial Sequence
  ENSG00000197959_18 (sequence is synthesized)
agatctaattccaaaaacaataatgcaccttatgatcaataacgttaaagatttcataaattccgagctcctagcacagttgtattcttcagaggaccaaaataccctgatggaggaatc

SEQ ID NO: 722425 - DNA, 120 bp, Artificial Sequence
  ENSG00000197959_19 (sequence is synthesized)
tgctgagcaggctcagcgccgggatgagatgcttcgaatgtatcaagcactgaaagaagcccttgggataattggggacatcagcacagccaccgtgtccactccggcaccccctccagt

SEQ ID NO: 722426 - DNA, 120 bp, Artificial Sequence
  ENSG00000197959_20 (sequence is synthesized)
ggatgactcctggatacagcactctcgcaggtcacctcctccaagccccacaacccaaaggaggccaacactaagtgctcccctcgcaaggcccacatccggccgaggaccagctcctgc

SEQ ID NO: 722427 - DNA, 120 bp, Artificial Sequence
  ENSG00000197959_21 (sequence is synthesized)
cattccctctcctggcccccactctggggctcctccagtcccattccgtccaggcccattacctcctttccccagcagcagtgactccttcggagcccctccacaagttccatctaggcc

SEQ ID NO: 722428 - DNA, 120 bp, Artificial Sequence
  ENSG00000197959_22 (sequence is synthesized)
tacgagggccccgcccagtgtcccaagccggagaccacccccatcaccaactcgtcccactataatccgcccactagaatcctccctgttagactaaacgaagtgtctggcatggcaatt

SEQ ID NO: 722429 - DNA, 120 bp, Artificial Sequence
  ENSG00000197959_23 (sequence is synthesized)
aatcactaatgaattatgcgaaagcaacatatttgataaccgttgcagtaaatcatgagtagtcgcatgtgtggacatcagtaggcaagtaaccagttttactaatgcattcatcgctca

SEQ ID NO: 722430 - DNA, 120 bp, Artificial Sequence
  ENSG00000197959_24 (sequence is synthesized)
tcttcattgctcatggtatgtcaaacctttggggtttgactcagaaactgctaaccttttagaggctttatatgttgtactgaccaaggtaggtttgtatagcagccctatactttgggg

SEQ ID NO: 722431 - DNA, 120 bp, Artificial Sequence
  ENSG00000197959_25 (sequence is synthesized)
atcatttgcctaccatggcatatatttgaaattgctttggacaagttttctaggctatctaccaggtagctcattaaacgtaattcttcagatatgagatagtgggcttagacctaagcc

SEQ ID NO: 722432 - DNA, 120 bp, Artificial Sequence
  ENSG00000197959_26 (sequence is synthesized)
atacatatttcttttcccacattctgtttaggatgacagtaattctgttgtctaccattaatgctactacctactccataattgcctatttagctcctcttttcttcctttttatttcat

SEQ ID NO: 722433 - DNA, 120 bp, Artificial Sequence
  ENSG00000197959_27 (sequence is synthesized)
aagactgctaggaagtgattttttaaaattaggactccttaagaataaacttttccagaagcacgaggtagtttgcaaaggaaaagtctgcactgtttgctctaaagagcttctcctcat

SEQ ID NO: 722434 - DNA, 120 bp, Artificial Sequence
  ENSG00000197959_28 (sequence is synthesized)
tccaatgtgttttgcttcatgctagaagcatatgcaacagtgaataaaagcttctttttttgttaatcagtcaataaatttggctaattagtttcagagttcaaggaagaagcaaaatat

SEQ ID NO: 722435 - DNA, 120 bp, Artificial Sequence
  ENSG00000197959_29 (sequence is synthesized)
cacatctctagaagtgttgggaaaaatataatttctttctttacttatattcacctcatggtaggttatattgaaggctgacatggagaatgtttacttttctatttggcatagctaact

SEQ ID NO: 722436 - DNA, 120 bp, Artificial Sequence
  ENSG00000197959_30 (sequence is synthesized)
acactttgatactaactccagttttactattattattttggttggaaaaaaaattcactctttacgtgctaatttgtaatcttgttttgtaagaatttatcctacccttgaaacaggctc

SEQ ID NO: 722437 - DNA, 120 bp, Artificial Sequence
  ENSG00000197959_31 (sequence is synthesized)
ataatcacatttaaagaatggttcctgaaatgaagtcagtagaaatggcatgggataagagcagagctcacacttttacagttgcagtatttcaaagtccctatccaggtcactccagaa

SEQ ID NO: 722438 - DNA, 120 bp, Artificial Sequence
  ENSG00000197959_32 (sequence is synthesized)
aagggtattgaaacgttgaaatctaaagcaaatttgcaatttcttaagatttctaaaatttaccagaacagtttagcctgggggttaatagttaagtcttgaggctaagttttggactac

SEQ ID NO: 722439 - DNA, 120 bp, Artificial Sequence
  ENSG00000197959_33 (sequence is synthesized)
caaggaccagatgattcacatgtaggaaacagccagaagccaactggaattttgtgtgctaactgttcccagacagcagagcaagtattcactgagtaggggtgtcccatgacactattt

SEQ ID NO: 722440 - DNA, 120 bp, Artificial Sequence
  ENSG00000197959_34 (sequence is synthesized)
catattctacagaagtaaatcaggtttcaccaactgaaatgtctccctttgaaagtagcaaacatgatttgtatgttaacttaactttaatttcctgtgtagtttacacccagagcagat

SEQ ID NO: 722441 - DNA, 120 bp, Artificial Sequence
  ENSG00000197959_35 (sequence is synthesized)
actcataaagtataaagtaaaaacttttaaccattattaaacagagaacttgccatgttgagtgccattgtattgaacttattctaaaggcttatgctaacccatttataattggtaaaa

SEQ ID NO: 722442 - DNA, 120 bp, Artificial Sequence
  ENSG00000197959_36 (sequence is synthesized)
atcagaaaatacaagatttacataaaggtcatttcaacttttaaggttaccagtgattgtataaaaacatcacaatcctaaatcctctcgtatctcaccccaaaccccaaactgggggaa

SEQ ID NO: 722443 - DNA, 120 bp, Artificial Sequence
  ENSG00000197959_37 (sequence is synthesized)
aaaaagttaactctttgtgaatggaaccaatgtgcaagatacatactgcatttttaaaatagtgtctcagctaaatggaaaactgttaagcaaacatccatagtaaaacaaataatcttc

SEQ ID NO: 722444 - DNA, 120 bp, Artificial Sequence
  ENSG00000197959_38 (sequence is synthesized)
agtgagatctttttataaaacttcttgtttttaggattccctttgcttcttcctttgaattctctaaaataggcagctaacggattatatacttcagggtttggctttgtgctaaatgtg

SEQ ID NO: 722445 - DNA, 120 bp, Artificial Sequence
  ENSG00000197959_39 (sequence is synthesized)
gttttgtgttttgctgtatttcaaaattttccttctgttaaaggaaaatattgtgaataaccactggtgtgttcttagatcagcacaaaccatgtcaaaaaaaattggagatttttttcc

SEQ ID NO: 722446 - DNA, 120 bp, Artificial Sequence
  ENSG00000197959_40 (sequence is synthesized)
aattttccttccactgatcttaggcagtaataaacaatggcatttgtcatctttggcacttgcttttagattatagtcccacagttgcactgccccaattgtctacctttgtgggtacat

SEQ ID NO: 722447 - DNA, 120 bp, Artificial Sequence
  ENSG00000197959_41 (sequence is synthesized)
ttttgttctttactcctaagttatttctcatagaacccagcctactctagaatttcagcagtgacattggagaatatttttaatttgctgcagtactatgtcatattattagtatgaatc

SEQ ID NO: 722448 - DNA, 120 bp, Artificial Sequence
  ENSG00000197959_42 (sequence is synthesized)
tcatttcccaaagggtttgtattctgctaaaaggagatgccaatgttgaatgaagtctgaaactctagtatgtgcatagtttgacgtgcagcatgcacaccaggccttaagatgggaatg

SEQ ID NO: 722449 - DNA, 120 bp, Artificial Sequence
  ENSG00000197959_43 (sequence is synthesized)
tagcttaatgattttctgtttcccataccatttctaatcttttgtgtaattttctcttaactgattgctctgatattgtaaacacaatagatgtagctctatcatgtctagcataattta

SEQ ID NO: 722450 - DNA, 120 bp, Artificial Sequence
  ENSG00000197959_44 (sequence is synthesized)
aaaaatcagtgtttttaggatttgggaaaataaactgtaaatgtttatttgataggtaaatatagttttattgtcacatgctaaatattgcatgcatattgactaattggaataaccatt

SEQ ID NO: 722451 - DNA, 120 bp, Artificial Sequence
  ENSG00000197959_45 (sequence is synthesized)
tactcaattatggacagcttattgaaatagtattgatttagaaaaagtatattgcatttctaaaaaacatctaccaaggttactcgtctgaatattgcttttagccgtgttttataacat

SEQ ID NO: 722452 - DNA, 120 bp, Artificial Sequence
  ENSG00000197959_46 (sequence is synthesized)
agacgagcagtagggtctgtttattagcaaatttcctatttgttccaatacaaactcactttattctaaagtatattaatgaaaccagttcctgtgatgtaactgtaagccttctcgact

SEQ ID NO: 722453 - DNA, 120 bp, Artificial Sequence
  ENSG00000197959_47 (sequence is synthesized)
tagacttaaaaagtggtcacatagattaattttgtgactttttagtatagactgtagccataattctcaaatatgaaatgggacctaataccagtatgtgataaatgttgatgttttctg

SEQ ID NO: 722454 - DNA, 120 bp, Artificial Sequence
  ENSG00000197959_48 (sequence is synthesized)
tgtacaaacacattttctatgcatgtgtctctgtgtatatggcatatacctagtaagtatgtttctgtaagtatgtgtattttatgtccatttgagtaggtaggtaggttttaaaaatac

SEQ ID NO: 722455 - DNA, 120 bp, Artificial Sequence
  ENSG00000197959_49 (sequence is synthesized)
tagttaaaatgccacaagcatgagtgtgattgtatgtgcactgtgtgtatatatataaatatatgtatatgtatggttgtaaatatctatgtatacatgtacttagtatgtgtggtatca

SEQ ID NO: 722456 - DNA, 120 bp, Artificial Sequence
  ENSG00000197959_50 (sequence is synthesized)
ggatattttttaaactgtgataatacaacagatagctttgaatgatctgccataacatgtggtaacaatagttcatttctcataacatatatgaggtatacaaaattttctaactccaga

SEQ ID NO: 722457 - DNA, 120 bp, Artificial Sequence
  ENSG00000197959_51 (sequence is synthesized)
ttgtagtcattttgagaggtacaaagctcataattaccatgacaacatggtaatgtccatagacatttgtatctgaatccacaagaagatctgaatctaagaaggaattacctttgacaa

SEQ ID NO: 722458 - DNA, 120 bp, Artificial Sequence
  ENSG00000197959_52 (sequence is synthesized)
tatttttcggtaagaagtaaaacctctggagacctatctttaagatctctaattggaattataaattatttttggattgctgagctgaatcttaaaaagccaagttgatatacatagtca

SEQ ID NO: 722459 - DNA, 120 bp, Artificial Sequence
  ENSG00000197959_53 (sequence is synthesized)
tttttcctctatggtagaagtaaaaaaaaaaaaaaaggacatagcaacattaaagtagtggatttttctgagtaaatttgctgaaaatataagagagaagctatctaataccttggaggt

SEQ ID NO: 722460 - DNA, 120 bp, Artificial Sequence
  ENSG00000197959_54 (sequence is synthesized)
aggtcatccactttttcaggtaaacatttttcatttggcaaatggcataattatttgaaagtgacaggaatctcctcagaatgaagaataaagcctactaggtctctaactgttgaactc

SEQ ID NO: 722461 - DNA, 120 bp, Artificial Sequence
  ENSG00000197959_55 (sequence is synthesized)
atgaaagaagatagtgtatgagacttaagccatgagttttgtatcatttcaattagaagactactagctgtgagctcagagtttaatgtaaatgaatctagatgattttgaagaaatgat

SEQ ID NO: 722462 - DNA, 120 bp, Artificial Sequence
  ENSG00000197959_56 (sequence is synthesized)
tattcgttcaccagatcactcattgtacattctaaaaagctcaaatgagtcttctagatactcttactcatcctgtctggttgctatgtttaaaattatgtggtgctgtgtaggtgaaac

SEQ ID NO: 722463 - DNA, 120 bp, Artificial Sequence
  ENSG00000197959_57 (sequence is synthesized)
tttaagaatatttttgaagcatatgtaatatatgcactgctatttgtgtgtgtgtgtgtgtctttgtatatatgtaagaatgtgtgtatgtgtgagagcaagagagaggaaactcaaaga

SEQ ID NO: 722464 - DNA, 120 bp, Artificial Sequence
  ENSG00000197959_58 (sequence is synthesized)
ggagtgtttgtcttaagacctgttcatactggtatattggtgagacttctcacttctggttggaggtttcacatatggctcaactcaagtcattaatctctttttaatttttactcttga

SEQ ID NO: 722465 - DNA, 120 bp, Artificial Sequence
  ENSG00000197959_59 (sequence is synthesized)
attccttaaacttcgctcattatgaaatgttttaaaattatgacaaaaattactctgtctaaccacttgccttgtctgctaccagtttgttaaaaattattccccccaaccagtaattcc

SEQ ID NO: 722466 - DNA, 120 bp, Artificial Sequence
  ENSG00000197959_60 (sequence is synthesized)
accagtactacttgatttgtgttatatttcctatgtacatgtacagcctttgttttgcttgcttgtctatttttactttcccttttttgggtcaaatttttcttttgctttgtttgaaga

SEQ ID NO: 722467 - DNA, 120 bp, Artificial Sequence
  ENSG00000197959_61 (sequence is synthesized)
aggaatatacagaagtaaaatcttgtcttctctgctgattctttaattaatatgagccggatactttccactgtcttcttggcactttcaggatttcttaatgctgatatatggactctt

SEQ ID NO: 722468 - DNA, 120 bp, Artificial Sequence
  ENSG00000197959_62 (sequence is synthesized)
agaatggaatttttgaagaaaaatctcaaagcctgtatcgttcttgaaggtcacatgtacctattgtgaaaatgtgaagctgtatttctgaagctgaaataaattataacatttgaagga

SEQ ID NO: 722469 - DNA, 120 bp, Artificial Sequence
  ENSG00000197959_63 (sequence is synthesized)
ccaacttaccaaagtcacacagctagttggtggcaaagcagaaatttgaacccaggctgttgagctccagagcctatgctttcaaccacaaataaaggcaagaatcccagagatgcctgg

SEQ ID NO: 722470 - DNA, 120 bp, Artificial Sequence
  ENSG00000197959_64 (sequence is synthesized)
agttgtccaagccaacctcatcccacagaggacttatgaagatgaattccaggcatctcagcattgacatgttcctgggtgttagcagcagagacactgaagactctggagtagctactg

SEQ ID NO: 722471 - DNA, 120 bp, Artificial Sequence
  ENSG00000197959_65 (sequence is synthesized)
ctgttggagtgtggcattagtctggctctgtgagtcctgaaaataagcccattggaaggtataggatgctctctgtagggaaggaagaagctttgaaggcttggtgagctcttggttatt

SEQ ID NO: 722472 - DNA, 120 bp, Artificial Sequence
  ENSG00000197959_66 (sequence is synthesized)
ggctcatctcctctcctccagactcaggataattctttacaaaatcactgcccttgtagcttccttatgagtacttgattacaacaaatggaaaataaatatgcacagttataatattaa

SEQ ID NO: 722473 - DNA, 120 bp, Artificial Sequence
  ENSG00000197959_67 (sequence is synthesized)
ctgcatcctactgctattttcattttatcgatggaatactttgaagcacgaaaaatcattatatcttgaaataatttttaaaataatccaataacaaactcagaactactgaagaataat

SEQ ID NO: 722474 - DNA, 120 bp, Artificial Sequence
  ENSG00000197959_68 (sequence is synthesized)
acaacatgtctatccatggtatttaaaagcttttcatttgcactatatgtcgtatgtacataaaaacttttatttttcatccatgtgtataataaaaacaaagtttattctatataaaaa

SEQ ID NO: 722475 - DNA, 120 bp, Artificial Sequence
  ENSG00000197959_69 (sequence is synthesized)
agaatgacagacaaaatttatttgaaagagaaaattgcaaagatcttatcgtacgtgtttgcagttttcacaatgaacagagactataggaaaattgccaaccctgttatgccatttaaa

SEQ ID NO: 722476 - DNA, 120 bp, Artificial Sequence
  ENSG00000197959_70 (sequence is synthesized)
aatcacttgtgatcattgaaatttctcatttatcaattggcacagactaaataggactaaagaacactccgtcccaatgaatgacattttggcagctattgggagaatttgagggctttg

SEQ ID NO: 722477 - DNA, 120 bp, Artificial Sequence
  ENSG00000197959_71 (sequence is synthesized)
aaacaaaagagctatggaggattgtagcaagctgtgtgttctataggtcatgagagttccatggactaaagtcttgccttctccattatcaaaagaattcttgaaaaccactgacttaga

SEQ ID NO: 722478 - DNA, 120 bp, Artificial Sequence
  ENSG00000197959_72 (sequence is synthesized)
attattagctatgcttaagaaaatattaatcctacataccataagctggagaaactagttttcttactgacttaattaattagttacacttttagctgatacttcgcttactctttttat

SEQ ID NO: 722479 - DNA, 120 bp, Artificial Sequence
  ENSG00000197959_73 (sequence is synthesized)
ctttttctctgttagatttctatttgaagaagttaaacaatatatttgttaaagaaaatgtcctactcagccataaaacacatatgcaatctcagctcaagacaaagtttgttttatttc

SEQ ID NO: 722480 - DNA, 120 bp, Artificial Sequence
  ENSG00000197959_74 (sequence is synthesized)
aaaatttcatttttctctatatgctttttcatacttatcatggtattaatacaatcagtatatcatcaatcataacaccagcattttgacttgcttaaaatatactcattttaataaaaa

SEQ ID NO: 722481 - DNA, 120 bp, Artificial Sequence
  ENSG00000197959_75 (sequence is synthesized)
tctatcccctttcattatgtctatattccctgtatccataagtatatctgtgtgcaaactctgtttaatatcctcatgagtgtgaaagaacaaaaagaaatatattgctatttccacttg

SEQ ID NO: 722482 - DNA, 120 bp, Artificial Sequence
  ENSG00000197959_76 (sequence is synthesized)
tctttattaatatgcttcacgtgtctttaagacacttctctcattcaagttaataaacagaccttttctttgtgttctttggaaaatgtaatattacacagactagtctaaatttaaaca

SEQ ID NO: 722483 - DNA, 120 bp, Artificial Sequence
  ENSG00000197959_77 (sequence is synthesized)
gaagtctcacccaacatatgtgcacccaccgttaaacagactctgccactgagtggacctctccacttgctgcttcctcctgtatatctagattatccaggtttctccccagaactaaag

SEQ ID NO: 722484 - DNA, 120 bp, Artificial Sequence
  ENSG00000197959_78 (sequence is synthesized)
tactgagactaagccttggggatttagttcagcttaactcctgaggtgcctacttggctctcgatcagtttataggaatgatcatgcatgagttgggtcctttttaggttcaaaataggg

SEQ ID NO: 722485 - DNA, 120 bp, Artificial Sequence
  ENSG00000197959_79 (sequence is synthesized)
agagagtcttttcaagagaaagtctgagatatgggtgaaacataggacaattaaagtatttctaggggggtttcagggctgaccacatctctggggttatactaaaatgtaacagagttt

SEQ ID NO: 722486 - DNA, 120 bp, Artificial Sequence
  ENSG00000197959_80 (sequence is synthesized)
caggaatacaggattgaggacttgcaccaaaatgtcgtcctctctgctgttattttaactcacacatagacctctttatgccattgcatgctatacttgtcatcctatacctgtctgaca

SEQ ID NO: 722487 - DNA, 120 bp, Artificial Sequence
  ENSG00000197959_81 (sequence is synthesized)
cctaaaacaatgaacctcccacaatatgctttgtgccctccaaatggaagttaaactagatgctttcctgtcaatagccaggagtacagaagcacgcatatatgattttcataattgttg

SEQ ID NO: 722488 - DNA, 120 bp, Artificial Sequence
  ENSG00000197959_82 (sequence is synthesized)
tcgagttgttctcctgttatatgcgtagatatttgcatagatatataccactctaaagactacatgtgagaagtcattaaacatcagagtaccacttttacttttgtttttaactctatt

SEQ ID NO: 722489 - DNA, 120 bp, Artificial Sequence
  ENSG00000197959_83 (sequence is synthesized)
acttattactcttccctatccattgatggtagtgtgtttaatttcacaaatgttctatattaaaaatgcacacatacctaattttttattaactcattccacacaaacctttggagcata

SEQ ID NO: 722490 - DNA, 120 bp, Artificial Sequence
  ENSG00000197959_84 (sequence is synthesized)
tgctttttgccagctgccattctaggccctggtgatacagaggtgaacaatagcaataaagtcctgcccccactggagcagacattaaacaagggagtgaataacgataattgtgcacca

SEQ ID NO: 722491 - DNA, 120 bp, Artificial Sequence
  ENSG00000197959_85 (sequence is synthesized)
ttatttaagatagtgataagttctataaaatgttaagtaagttaaagggacagacagtgagagtaaggggcaggcaagctttatttttgtcaaggtgatgagggaaggcctctttgaaga

SEQ ID NO: 722492 - DNA, 120 bp, Artificial Sequence
  ENSG00000197959_86 (sequence is synthesized)
gttgacattagagcaggctcttcaaagaagggagggagtaaaggatctggaagtctgaagaagagtattcttggcagaagatagcaagtgcaaaaccaagctcagtgtcttagaggagca

SEQ ID NO: 722493 - DNA, 120 bp, Artificial Sequence
  ENSG00000197959_87 (sequence is synthesized)
gcaaggccagtgtgtctggaacactgtgagggaagacaaaggtggtagttggttaacaaggaaagaggtcagggaccaggtgatgtaggccttgaaggatggggcgagccttttgaattt

SEQ ID NO: 722494 - DNA, 120 bp, Artificial Sequence
  ENSG00000197959_88 (sequence is synthesized)
tattctaagtgagatggaagccactactaggtttcaagtcacttagtgacgatttatatatttaaaagctcattatggttgagaatgatgagaggtagtaaagcatgtgagttcaagcag

SEQ ID NO: 722495 - DNA, 120 bp, Artificial Sequence
  ENSG00000197959_89 (sequence is synthesized)
ggctgttgtgtcacaccacttatatttacattccaggtgcttacttccaagctgtgaggtcttgggcaggttacctagccttttcacatttcaagattcttatttctgagatgaagataa

SEQ ID NO: 722496 - DNA, 120 bp, Artificial Sequence
  ENSG00000197959_90 (sequence is synthesized)
cagtagtcttttatagggcggttgataggattgaatgagataatgcagggaaagcattgaacagggcaggtacaagtaagcactatattttcacttataattataattattatgattctt

SEQ ID NO: 722497 - DNA, 120 bp, Artificial Sequence
  ENSG00000197959_91 (sequence is synthesized)
attatgaacattttcatcaaaactactttctttaacagctaggggaaggttgaaatactgtgaatattatcatacagcccagtgagattataaatactttgttattttctatcttccaaa

SEQ ID NO: 722498 - DNA, 120 bp, Artificial Sequence
  ENSG00000197961_0 (sequence is synthesized)
atcttttccggcgctggctccgcatggtcagtgccatttcgcctttatcgtggtggagtccaccctggctgtggacctattcaaactcagtctgtctcttgactggaggaggagaaggaa

SEQ ID NO: 722499 - DNA, 120 bp, Artificial Sequence
  ENSG00000197961_1 (sequence is synthesized)
aagttgagcacattgccaaccggagttccccaagaatggcaagttaaaaccaaagtgtcagcacctcaacaacatttttttttggcttaacaaaacatcaaacggcatacaaatggcaga

SEQ ID NO: 722500 - DNA, 120 bp, Artificial Sequence
  ENSG00000197961_2 (sequence is synthesized)
aatccacaatggaggggaactctgtgactttatggaaaatggagaaatcttcagtgaacactcatgccttaatgcacacatgggaactgaaaatacaggggacacttatgactgtgatga

SEQ ID NO: 722501 - DNA, 120 bp, Artificial Sequence
  ENSG00000197961_3 (sequence is synthesized)
gtatggagaaaactttcccatgttacacaacagtgcccctgctggagagacactttctgtgttgaatcagtgcagaaaagccttcagcctgccaccaaatgttcaccagagaacgtggat

SEQ ID NO: 722502 - DNA, 120 bp, Artificial Sequence
  ENSG00000197961_4 (sequence is synthesized)
aggagacaaatcctttgaatacagtgactgtgaggaagcctttgttgatcagtcacatcttcaggcaaataggataactcacaatggagaaacactctatgaacagaagcaatgtgggag

SEQ ID NO: 722503 - DNA, 120 bp, Artificial Sequence
  ENSG00000197961_5 (sequence is synthesized)
agcttttacttactccacaagccatgctgtgtctgttaaaatgcatactgtagaaaaaccctacgaatgtaaggaatgtggaaaattctttagatattcttcatatcttaatagtcacat

SEQ ID NO: 722504 - DNA, 120 bp, Artificial Sequence
  ENSG00000197961_6 (sequence is synthesized)
aacccatactggggagaaaccctatgaatgtaaggaatgtgggaaatgcttcactgtttcttcacacctagttgaacatgtaagaattcatactggagagaaaccttatcaatgtaagga

SEQ ID NO: 722505 - DNA, 120 bp, Artificial Sequence
  ENSG00000197961_7 (sequence is synthesized)
atgtggaagagccttcgctgggcgctcaggccttactaaacatgtacgaatacacactggagagaagccctatgaatgtaacgaatgtgggaaagcctacaataggttttatctactaac

SEQ ID NO: 722506 - DNA, 120 bp, Artificial Sequence
  ENSG00000197961_8 (sequence is synthesized)
tgaacattttaaaactcacacagaggagaagccctttgaatgtaaggtatgtggaaaatccttcagaagctcttcatgccttaagaatcactttagaattcacactggaataaaacccta

SEQ ID NO: 722507 - DNA, 120 bp, Artificial Sequence
  ENSG00000197961_9 (sequence is synthesized)
taaatgtaaggagtgtgggaaagcattcactgtttcctcaagcttacataatcatgtaaaaatccatactggagagaagccctatgaatgtaaggactgtgggaaagcctttgctacatc

SEQ ID NO: 722508 - DNA, 120 bp, Artificial Sequence
  ENSG00000197961_10 (sequence is synthesized)
ttcacaactcattgaacatataagaactcacactggagagaaaccgtatatatgtaaggaatgtgggaaaaccttccgtgcttcttcacatctacagaaacatgttagaattcacactgg

SEQ ID NO: 722509 - DNA, 120 bp, Artificial Sequence
  ENSG00000197961_11 (sequence is synthesized)
agagaaaccctatatatgtaacgaatgtgggaaagcctacaatagattttatttacttactaaacatttaaaaacacactgaagaaaaactctgaatgtaaggaatgtggaaatctttta

SEQ ID NO: 722510 - DNA, 120 bp, Artificial Sequence
  ENSG00000197961_12 (sequence is synthesized)
ggaatttctcataccataattaccacatttgaattcacactgaagagaaattttattggtacaaagaatgtgaggaggccttcagttatccccattcacttcgaagacatgaaagaactc

SEQ ID NO: 722511 - DNA, 120 bp, Artificial Sequence
  ENSG00000197961_13 (sequence is synthesized)
tttcgcctttatcgtggtggagtccaccctggctgtggggctgtcggtcctccttgcgcggccagtggctagaggccgcaggctcagtgggtcccagtcaggagccaggtcgggaagtgt

SEQ ID NO: 722512 - DNA, 120 bp, Artificial Sequence
  ENSG00000197961_14 (sequence is synthesized)
gtttgtcccgactccgcgcgttttctggagtggtttcatccgctgtgctcccttcttcaaaagcttggaaagcaacctttgacctattcaaactcagtctgtctcttgactggaggagga

SEQ ID NO: 722513 - DNA, 89 bp, Artificial Sequence
  ENSG00000197961_15 (sequence is synthesized)
ttgctgttgtcatcacacaggctggagtgcaatggcatgatcccagctcactgcaacctttgtctcctgggttcaggcgattctgcctc

SEQ ID NO: 722514 - DNA, 120 bp, Artificial Sequence
  ENSG00000197961_16 (sequence is synthesized)
caatggcatgatcccagctcactgcaacctttgtctcctgggttcaggcgattctgcctcagccttcaagtagcttggattacaggtgccgtcaaccacacccagctaatttttgtattt

SEQ ID NO: 722515 - DNA, 120 bp, Artificial Sequence
  ENSG00000197961_17 (sequence is synthesized)
ttttttttttttttttgtaagtcgttgttaatacacattcttttctcaagggattggattgtggtcacaatccaacatttgagaactcaccatggggccatacaatgtagaaaacacaga

SEQ ID NO: 722516 - DNA, 120 bp, Artificial Sequence
  ENSG00000197961_18 (sequence is synthesized)
aagccctcattatttccttaggcctttctaagtatataagatgttgcaatggagaagagaaaccctattgatacaagatacaggcatgccctgtagatattgtgagttttgttccagact

SEQ ID NO: 722517 - DNA, 120 bp, Artificial Sequence
  ENSG00000197961_19 (sequence is synthesized)
accactataaagtgaatatcacaataacatgaatcatacaaatgttttggtttcccagtgcatataagttaggtttacatcatatggtagtctcttgtgtgcagttgtgttatgtctaag

SEQ ID NO: 722518 - DNA, 120 bp, Artificial Sequence
  ENSG00000197961_20 (sequence is synthesized)
taaagtaccttagtttaaaatactttattgccaaaaagtgctaatgatcatgtgagactttggtgagttgtaatctttttgcttgtggtaggtcttgcctcagtgttgatggctgttgat

SEQ ID NO: 722519 - DNA, 120 bp, Artificial Sequence
  ENSG00000197961_21 (sequence is synthesized)
cagggtggctgtggcagtttcttaaaataagacagcagtgaagattgctgcattgattgactcttcattacatgaaaaacttctctttagcattcgacgctgtttgataacattttacgc

SEQ ID NO: 722520 - DNA, 120 bp, Artificial Sequence
  ENSG00000197961_22 (sequence is synthesized)
atagtggaacttcttttagaattggacttaatcctctcaaacttcgccactgcttgatcaactaagttgatgtaatattctaagtctgttgtcttttcaacaatgttcacagcatcttca

SEQ ID NO: 722521 - DNA, 120 bp, Artificial Sequence
  ENSG00000197961_23 (sequence is synthesized)
ggagtagatttcatttcaggaaaccactttctttgcttatctatacaaagcagcctctcatctgttcaagttttttcacgagattgaaacaattctgtcacatcttcaggctccacttct

SEQ ID NO: 722522 - DNA, 120 bp, Artificial Sequence
  ENSG00000197961_24 (sequence is synthesized)
aattctagttctcttttttccatcacatccacagttactttttccactgaagacttgaacccctcagagtcacctatgaaggttggaatcaacttcttccaaactctggttaatgttggt

SEQ ID NO: 722523 - DNA, 120 bp, Artificial Sequence
  ENSG00000197961_25 (sequence is synthesized)
ttttatttttttaattaaaaaaattttttttagagacaaggtctcgctgtgttgttcatgctggagtacaagtgggtattcaccagcacgatgagagcacactgtagccttgaactcctg

SEQ ID NO: 722524 - DNA, 120 bp, Artificial Sequence
  ENSG00000197961_26 (sequence is synthesized)
gcctcaagtgatcctccttcctatgcctcctgagtagccaagactccaggcacacaccaccacacctgccttaatgttgatattttgacctccttccatgaatcataaatgttgttaatg

SEQ ID NO: 722525 - DNA, 120 bp, Artificial Sequence
  ENSG00000197961_27 (sequence is synthesized)
ataaatgttgttaatggcatctagaatggagaatcctttctgcaaggtctgcaacttaatttatccagatccctcagaagaagcattattagtggcagctatagccttatgaaatgtatt

SEQ ID NO: 722526 - DNA, 120 bp, Artificial Sequence
  ENSG00000197961_28 (sequence is synthesized)
cttgtttatacctccataagagctcttggttagtaggttcattatcagtggtaatattttgaaaggaatctctgaacagtatgttttacagtgggcttaaaatattcagtaaaccatgct

SEQ ID NO: 722527 - DNA, 120 bp, Artificial Sequence
  ENSG00000197961_29 (sequence is synthesized)
atgtagcataattcttaactggctcttggatttttggaatggtaattgaatattagcattcatttaaagtcaccaactgcattgacctctaacaagaaagccagcccaggctgggaaaag

SEQ ID NO: 722528 - DNA, 87 bp, Artificial Sequence
  ENSG00000197961_30 (sequence is synthesized)
ttggaagcacaacagagcgtgacgctgtctctacaaagtaaagagtcagcccgtcctttgaatctttgaagtcagatattagcttac

SEQ ID NO: 722529 - DNA, 120 bp, Artificial Sequence
  ENSG00000197961_31 (sequence is synthesized)
agcccgtcctttgaatctttgaagtcagatattagcttacctagagctgtgaaagtcctaaatggcatctcctgaagtaaggctgttttgtctctgttaaaactctagtagagctacctc

SEQ ID NO: 722530 - DNA, 120 bp, Artificial Sequence
  ENSG00000197961_32 (sequence is synthesized)
tgccatttatctagatattctggaaatgcttgctgcagattccacatcagcaattgctacttcactttgtacttttatgttatggaaatgacttgttaaacctcacgaactgatctttgc

SEQ ID NO: 722531 - DNA, 120 bp, Artificial Sequence
  ENSG00000197961_33 (sequence is synthesized)
cagcttccagcatttcttctgcagctaactcacctctcagccttcatagaattagagttagggccttgctctggattaggttttggcttaagggaatgttgtggctggtctgatcttcta

SEQ ID NO: 722532 - DNA, 120 bp, Artificial Sequence
  ENSG00000197961_34 (sequence is synthesized)
tccagaccactaaaacttattccgtgttagtggtgaggctgttttcctttcttattatgtgtgtgttcactggagtagcacttttagtttccttcaagaactttacattcacaacttggc

SEQ ID NO: 722533 - DNA, 87 bp, Artificial Sequence
  ENSG00000197961_35 (sequence is synthesized)
ccttttgcccaggctggagtgtagtacagttatagcccattgcagcctcaaacttacgggttccagtgatcttcctgtctcctgagt

SEQ ID NO: 722534 - DNA, 120 bp, Artificial Sequence
  ENSG00000197961_36 (sequence is synthesized)
agttatagcccattgcagcctcaaacttacgggttccagtgatcttcctgtctcctgagtagctaaagactgcaggtgtgcaccaccatggccagctaattttttttttttttttttttt

SEQ ID NO: 722535 - DNA, 120 bp, Artificial Sequence
  ENSG00000197961_37 (sequence is synthesized)
ttttttttttaaagaggcaggactttactgtttacccggctgatcttgaacttaaaacctcaagtgatgctcccctatctgcctcccaacactctgggattacaggtgtgagccactgca

SEQ ID NO: 722536 - DNA, 120 bp, Artificial Sequence
  ENSG00000197961_38 (sequence is synthesized)
catgactttctcactgaggttaatcatttccagcttttgatctaaagtgagaaatttgcaactccttctttcacttgaacagttagaggccattgtggggtaatgaattggcctaatttc

SEQ ID NO: 722537 - DNA, 120 bp, Artificial Sequence
  ENSG00000197961_39 (sequence is synthesized)
aatattgtccctcagggaattaggaggcctgggaagaggaggagagaggggagagtggccagttggtggagcagtgagaacatagcatttgttaagtttgctgtcttcgaaggttgtggt

SEQ ID NO: 722538 - DNA, 88 bp, Artificial Sequence
  ENSG00000197961_40 (sequence is synthesized)
catagcatttgttaagtttgctgtcttcgaaggttgtggtttgtggtaccccaaaacaattaaaataggaacatcaaagatcacagag

SEQ ID NO: 722539 - DNA, 87 bp, Artificial Sequence
  ENSG00000197961_41 (sequence is synthesized)
agatcacattccttctcaaaaaaaaaaaaaaaaaaaaatcacacagcaccacagtaagtataataataaggaaaatgtttgaaatat

SEQ ID NO: 722540 - DNA, 120 bp, Artificial Sequence
  ENSG00000197961_42 (sequence is synthesized)
accacagtaagtataataataaggaaaatgtttgaaatattgtcagaattgtcaggatgtgagagacaaagtaagcacatgctgttggaaaaaatggtgttatagatttattcgacatga

SEQ ID NO: 722541 - DNA, 120 bp, Artificial Sequence
  ENSG00000197961_43 (sequence is synthesized)
cattgccacaggacttctacttgtgaaaaatatctgtaaagtgagatgaagcaaagtgaagtaacatgaggtatgtctgtagctgttgctgtagtggtttccaaatggtggttttctttt

SEQ ID NO: 722542 - DNA, 120 bp, Artificial Sequence
  ENSG00000197961_44 (sequence is synthesized)
ttttccttttttttttttttctttttggtctgcattggggtcttgctctgttgcctagggtgtggagtgcggtggcatgatcatgcctcactatagccttgacctcctgggctcaagcga

SEQ ID NO: 722543 - DNA, 120 bp, Artificial Sequence
  ENSG00000197961_45 (sequence is synthesized)
cccacctgagtctcctgagtacctgggaccacaggcacatgctaacgcacccacttaatttttttattcgtagagccgaggtctcactatgttgcccagactggtctcaagctcttgggc

SEQ ID NO: 722544 - DNA, 120 bp, Artificial Sequence
  ENSG00000197961_46 (sequence is synthesized)
ttacaggtgtgagccaccacacccagtccaaaaagtgattttctaattccatagtttcttctacatttcttaactggaattttgtaaggaagagttatccttattcatttatttacccat

SEQ ID NO: 722545 - DNA, 120 bp, Artificial Sequence
  ENSG00000197961_47 (sequence is synthesized)
tttgtaaggaagagttatccttattcatttatttacccatttacttgtaggagcatgtatcataaattcttaatctatggggtgtagttagctactgtaaatttgatgcacatatttttc

SEQ ID NO: 722546 - DNA, 120 bp, Artificial Sequence
  ENSG00000197961_48 (sequence is synthesized)
cagattcaataagtaggatccccatcaagctatcttctgaatctttaaaaatgtattctccttatttcatgggtatataattattttctgggcaacagtttgttcatggtacatttgtct

SEQ ID NO: 722547 - DNA, 120 bp, Artificial Sequence
  ENSG00000197961_49 (sequence is synthesized)
ccagccctagactcagaaaaatgtaatttattttaatggagaatactatttagaagctgcagtctctgtgtagggaggtgttcctaggtaatagtgccctggcttttaggtcttctctat

SEQ ID NO: 722548 - DNA, 120 bp, Artificial Sequence
  ENSG00000197961_50 (sequence is synthesized)
ggaggatatggcaaagacatacaaaattatatatacgtatccacacattaataactctatttctatattaaaaacatgaccacaagccaacacttttaattccactgcagcactgctggg

SEQ ID NO: 722549 - DNA, 120 bp, Artificial Sequence
  ENSG00000197961_51 (sequence is synthesized)
ttatttcttgctttccaaattcccttgtctgtagctatctttcatcacttgcaaaaatagcacgtgctcaatcctagattaaaatataagctactctcagaattgataactcataccact

SEQ ID NO: 722550 - DNA, 120 bp, Artificial Sequence
  ENSG00000197961_52 (sequence is synthesized)
ctttttaaaaatcaactaaccagaattcagtttttattcacagttcttatctttagctcagggcgtaatataaaagcactaggtttaaaacttacttggtcagcagcaatccacttctag

SEQ ID NO: 722551 - DNA, 120 bp, Artificial Sequence
  ENSG00000197961_53 (sequence is synthesized)
gtacatgtccaaaggaactgaagaaagcatctcaatgtgtgaatgcctacctgtgttcattgcagcattattcagaagagccaagaggtggaagcaaagtaaatgtccattgacagatga

SEQ ID NO: 722552 - DNA, 120 bp, Artificial Sequence
  ENSG00000197961_54 (sequence is synthesized)
attggtaaacaaaatgcattatatacatacaatgcaatatcatttagccttaaaaacaaaattctgccatatgctacaacatggacgttatgctaagtgaaataaaccagttccgaaagg

SEQ ID NO: 722553 - DNA, 120 bp, Artificial Sequence
  ENSG00000197961_55 (sequence is synthesized)
acaaatacacccatttccacttatatggggtatctaacgtcaaactcagaagaacaaagtactgcggtatttgccacaagctggtggaggagaaaatgagttgttcaatgggtattgagt

SEQ ID NO: 722554 - DNA, 120 bp, Artificial Sequence
  ENSG00000197961_56 (sequence is synthesized)
gtcagccacgcaagatggaaaagctttttgagatttgttgtataaaaatatgcctatagttaacaatactcttcggtacacacaaagtatgtgaaagggtaaattttatgtgtttttatc

SEQ ID NO: 722555 - DNA, 120 bp, Artificial Sequence
  ENSG00000197965_0 (sequence is synthesized)
gcagagctggagagccgcggctgggaccggagtggggagcgcggcgtggaggtgccacccggcgcgggtggcggagagatcagaagcctcttccccaagccgagccaacctcagcgggga

SEQ ID NO: 722556 - DNA, 120 bp, Artificial Sequence
  ENSG00000197965_1 (sequence is synthesized)
cccgggctcagggacgcggcggcggcggcggcgactgcagtggctggacgatggcagcgtccgccggagccggggcggtgattgcagccccagacagccggcgctggctgtggtcggtgc

SEQ ID NO: 722557 - DNA, 120 bp, Artificial Sequence
  ENSG00000197965_2 (sequence is synthesized)
tggcggcggcgcttgggctcttgacagctggagtatcagccttggaagtatatacgccaaaagaaatcttcgtggcaaatggtacacaagggaagctgacctgcaagttcaagtctacta

SEQ ID NO: 722558 - DNA, 120 bp, Artificial Sequence
  ENSG00000197965_3 (sequence is synthesized)
gtacgactggcgggttgacctcagtctcctggagcttccagccagagggggccgacactactgtgtcgtttttccactactcccaagggcaagtgtaccttgggaattatccaccattta

SEQ ID NO: 722559 - DNA, 120 bp, Artificial Sequence
  ENSG00000197965_4 (sequence is synthesized)
aagacagaatcagctgggctggagaccttgacaagaaagatgcatcaatcaacatagaaaatatgcagtttatacacaatggcacctatatctgtgatgtcaaaaaccctcctgacatcg

SEQ ID NO: 722560 - DNA, 120 bp, Artificial Sequence
  ENSG00000197965_5 (sequence is synthesized)
ttgtccagcctggacacattaggctctatgtcgtagaaaaagagaatttgcctgtgtttccagtttgggtagtggtgggcatagttactgctgtggtcctaggtctcactctgctcatca

SEQ ID NO: 722561 - DNA, 120 bp, Artificial Sequence
  ENSG00000197965_6 (sequence is synthesized)
gcatgattctggctgtcctctatagaaggaaaaactctaaacgggattacactggctgcagtacatcagagagtttgtcaccagttaagcaggctcctcggaagtccccctccgacactg

SEQ ID NO: 722562 - DNA, 120 bp, Artificial Sequence
  ENSG00000197965_7 (sequence is synthesized)
agggtcttgtaaagagtctgccttctggatctcaccagggcccagtcatatatgcacagttagaccactccggcggacatcacagtgacaagattaacaagtcagagtctgtggtgtatg

SEQ ID NO: 722563 - DNA, 120 bp, Artificial Sequence
  ENSG00000197965_8 (sequence is synthesized)
cggatatccgaaagaattaagagaatacctagaacatatcctcagcaagaaacaaaaccaaactggactctcgtgcagaaaatgtagcccattaccacatgtagccttggagacccaggc

SEQ ID NO: 722564 - DNA, 120 bp, Artificial Sequence
  ENSG00000197965_9 (sequence is synthesized)
aaggacaagtacacgtgtactcacagagggagagaaagatgtgtacaaaggatatgtataaatattctatttagtcatcctgatatgaggagccagtgttgcatgatgaaaagatggtat

SEQ ID NO: 722565 - DNA, 120 bp, Artificial Sequence
  ENSG00000197965_10 (sequence is synthesized)
gattctacatatgtacccattgtcttgctgtttttgtactttcttttcaggtcatttacaattgggagatttcagaaacattcctttcaccatcatttagaaatggtttgccttaatgga

SEQ ID NO: 722566 - DNA, 120 bp, Artificial Sequence
  ENSG00000197965_11 (sequence is synthesized)
gacaatagcagatcctgtagtatttccagtagacatggccttttaatctaagggcttaagactgattagtcttagcatttactgtagttggaggatggagatgctatgatggaagcatac

SEQ ID NO: 722567 - DNA, 120 bp, Artificial Sequence
  ENSG00000197965_12 (sequence is synthesized)
ccagggtggcctttagcacagtatcagtaccatttatttgtctgccgcttttaaaaaatacccattggctatgccacttgaaaacaatttgagaagtttttttgaagtttttctcactaa

SEQ ID NO: 722568 - DNA, 120 bp, Artificial Sequence
  ENSG00000197965_13 (sequence is synthesized)
aatatggggcaattgttagccttacatgttgtgtagacttactttaagtttgcacccttgaaatgtgtcatatcaatttctggattcataatagcaagattagcaaaggataaatgccga

SEQ ID NO: 722569 - DNA, 120 bp, Artificial Sequence
  ENSG00000197965_14 (sequence is synthesized)
aggtcacttcattctggacacagttggatcaatactgattaagtagaaaatccaagctttgcttgagaacttttgtaacgtggagagtaaaaagtatcggttttattctttgctgatgtc

SEQ ID NO: 722570 - DNA, 120 bp, Artificial Sequence
  ENSG00000197965_15 (sequence is synthesized)
ctttctgcttgaaataacagtcaccatacagctaaaggagaggagtttctttccttctaagtaggcagaaatggtatcattatgttgccgctctccaatctcccagagctcgctctctag

SEQ ID NO: 722571 - DNA, 88 bp, Artificial Sequence
  ENSG00000197965_16 (sequence is synthesized)
ctagagaatcaccttctttcgcatgttgcccagactagccttgaactcttgggctcaagtgattctccctcctcagcctcccgagtag

SEQ ID NO: 722572 - DNA, 120 bp, Artificial Sequence
  ENSG00000197965_17 (sequence is synthesized)
aacgaactatagttgcaccactgcagctggcaagaatcaccttctttataaagcgtcagtcatgcttccagcaagaggcagcatcagtcatggctttataacagcttcatggtgcctcaa

SEQ ID NO: 722573 - DNA, 120 bp, Artificial Sequence
  ENSG00000197965_18 (sequence is synthesized)
agactgttgaggttaatgagagcctagattagacagtttggctgtccttccctaaaacttgttttctcctattcactactccccaccgcacttaaaatctatgagtttttactttttact

SEQ ID NO: 722574 - DNA, 120 bp, Artificial Sequence
  ENSG00000197965_19 (sequence is synthesized)
gggaatggaaagtgtggtgaagatcattcaacacttatgttgtcatttctcccattttctgaatttttttttaaatttccccccttttaaaattgttcgaaagcccacagttatggaaag

SEQ ID NO: 722575 - DNA, 120 bp, Artificial Sequence
  ENSG00000197965_20 (sequence is synthesized)
gttactttttctccctgtagtttggagtccattatgagctgctgctttttcttctcatcttgtcatcttctggggatgtttgaaggctgagttccaacagaattcacaaagggaataaaa

SEQ ID NO: 722576 - DNA, 120 bp, Artificial Sequence
  ENSG00000197965_21 (sequence is synthesized)
caggattgagattttgaggtgtgcacaaggtggtaagataaagggcatatgagcttcaaaactaatgctgttgcatacatgaagccttttgttttttgaggagctatttttgttattctt

SEQ ID NO: 722577 - DNA, 120 bp, Artificial Sequence
  ENSG00000197965_22 (sequence is synthesized)
gtaacgctccaccttacatgccacatctgtgtgagtcaacagggatcaggtttggtcaccacacatgtctgaagctgggcagcgtctgctctgtgttctgtgtggaatggagaaaaaaac

SEQ ID NO: 722578 - DNA, 120 bp, Artificial Sequence
  ENSG00000197965_23 (sequence is synthesized)
gcctgccctgctgccttccatgttcataggcccagcccaagagagtgacacacagtgctggccctgagacatttccacaaagtggtcaactctgccttgcatcctaaaactttttgggca

SEQ ID NO: 722579 - DNA, 120 bp, Artificial Sequence
  ENSG00000197965_24 (sequence is synthesized)
tctattttgaaaactataggagcctttggaaggcctcttatgtttggaggggaagggtgttgagattgtcaccatccttcaagctgagactcctggtgagcctttgccaccatgaaaacc

SEQ ID NO: 722580 - DNA, 120 bp, Artificial Sequence
  ENSG00000197965_25 (sequence is synthesized)
acatagctgaccagggctgtgcttgaggtacagaggacacacattgtagacaggcctgtgtcatgtttccttacagtcgttttttacagagaaaaggggcattgttttttcactgctttc

SEQ ID NO: 722581 - DNA, 120 bp, Artificial Sequence
  ENSG00000197965_26 (sequence is synthesized)
tcaacagttcctgtgaataaatgaaacatttcggagctccctgagagcaagagccttcacttcttcttgcggtgccgggaccatgtgttggtgaagctggtgctgtgggggccactcact

SEQ ID NO: 722582 - DNA, 120 bp, Artificial Sequence
  ENSG00000197965_27 (sequence is synthesized)
cgaatgacacctggaggcctgttcctcccttaccactcccttccccagcccgacttcttggcctcctgcccaaccagacacctcaaactctgtcagtgccctggcattctggcagagaat

SEQ ID NO: 722583 - DNA, 120 bp, Artificial Sequence
  ENSG00000197965_28 (sequence is synthesized)
cctcaccagttctcaccaaccttccccccaggcaagggcagctgccagcatggtgctctgccaggacaggtttccctgaaggaagctgctcacactgagatgagcctctcagggcaggac

SEQ ID NO: 722584 - DNA, 120 bp, Artificial Sequence
  ENSG00000197965_29 (sequence is synthesized)
ctcttcccaagccctgcacacccacccctgcagcccttttggctccccttttccctgtgcctcagcactcctttcctggttgcagataacgaactaaggttgcctaaagggcagatctgc

SEQ ID NO: 722585 - DNA, 120 bp, Artificial Sequence
  ENSG00000197965_30 (sequence is synthesized)
cctctccatgtcttcgtcctggcaaacagggtcgtcttaaaattatgcgctaattctgtatgggagcactcaaaaggcattacttagagattgaaatttcaaactatctctagtttttca

SEQ ID NO: 722586 - DNA, 120 bp, Artificial Sequence
  ENSG00000197965_31 (sequence is synthesized)
atggaaatatatcagctagggaaaaaccatcaagctcattattattttttgatcttcagttgtatttttgtgaatattttaatacatctttttcaatttctgaattgtgttgtgtgctca

SEQ ID NO: 722587 - DNA, 120 bp, Artificial Sequence
  ENSG00000197965_32 (sequence is synthesized)
ttttgaccagaatagaaaaagagatatgcctttcactcatatcattccagctacacctgccttcttttcttcaaaaatgccgtccgtgtgcctgcttctgggcctttgcacatgctgttc

SEQ ID NO: 722588 - DNA, 120 bp, Artificial Sequence
  ENSG00000197965_33 (sequence is synthesized)
cctgggcctgaagcatgccttctgccaatattcctgtggtttgctctctgacttcctttaagcctctgctcaaatgttacctcctcagggagaccttctgtgatatataaaagagcaagc

SEQ ID NO: 722589 - DNA, 120 bp, Artificial Sequence
  ENSG00000197965_34 (sequence is synthesized)
cccccaccccaccgcctcagccttcctggccccctcagttctgctctagttactctatttctctccctctttcccagtacacacttgtctgttctcccgcattagaacatagttaacaag

SEQ ID NO: 722590 - DNA, 120 bp, Artificial Sequence
  ENSG00000197965_35 (sequence is synthesized)
agaccagaaccttgctgttttgttcactgctccgtctgcagtaaagggaacagcacctggcacttagctgctcaatacatgttacgtggatggatgagtaggtggaagcattcatccatt

SEQ ID NO: 722591 - DNA, 120 bp, Artificial Sequence
  ENSG00000197965_36 (sequence is synthesized)
cagcaacctacactgagaacaatcctgtgccaagcactgtgctaagcataaggaaacaaaacaagacaaagctcctcaaggagcttgccacagggtggaggtgacaggtgacatgaatgg

SEQ ID NO: 722592 - DNA, 120 bp, Artificial Sequence
  ENSG00000197965_37 (sequence is synthesized)
aagtaactagtagttaccaaatacttggtgtgagccaggcactttgcatttctttctctattatttctgtgagttaacagtaattgtactaatcttaatcccattgtttgaaagattata

SEQ ID NO: 722593 - DNA, 120 bp, Artificial Sequence
  ENSG00000197965_38 (sequence is synthesized)
tggcttacccagggccacttagctaataaaggaacagagaagaggggctgggcctggggccgctgtttgatccacagccttgttcctaaccactatgccctgtggcctctcacaccaaaa

SEQ ID NO: 722594 - DNA, 120 bp, Artificial Sequence
  ENSG00000197965_39 (sequence is synthesized)
ggaagtaccaaactgcttccttactcaaataaatgtgctgaaatgcagttgcagttttctcccagtcccttaggagctggttagagagtcccttaggaacttgagagggtagtgtagtct

SEQ ID NO: 722595 - DNA, 120 bp, Artificial Sequence
  ENSG00000197965_40 (sequence is synthesized)
aggtggtaggcacagatgtctgagagctttaacctcagtctggaagacaatgtggtgacttaatttgttgagaactatgttacaaataatgtgttactaataaaacattgaggcttcgca

SEQ ID NO: 722596 - DNA, 120 bp, Artificial Sequence
  ENSG00000197965_41 (sequence is synthesized)
atggtggagacgtcactattcacctttgtcaaaatccataagatctacaacactaacacaaatcctaatgtaaactatggactgtggttaacaatgatgtaaccatattggctcatcaat

SEQ ID NO: 722597 - DNA, 120 bp, Artificial Sequence
  ENSG00000197965_42 (sequence is synthesized)
taaaacaaacgtataacactaatgccagatgttaataataggagaaacaggttggccatgggagagtgagggaatatgagaattctaccttctattcaatgtttctgtaaacctgaaact

SEQ ID NO: 722598 - DNA, 120 bp, Artificial Sequence
  ENSG00000197965_43 (sequence is synthesized)
gctctttaaaaagtctattagtttaaaaaaaaaattcaatataaccagactaataaaaatatcttaactaaaaagcaatacaaacctaaactgtcagcaattattctgtttatagtgcta

SEQ ID NO: 722599 - DNA, 120 bp, Artificial Sequence
  ENSG00000197965_44 (sequence is synthesized)
ttctgattgaacttagctgtagaatattctgccagaaatatgtaatggcagtgaattactgtatatatctagtaactttgctgtatcttttcttgtctggcaaaaatgcacagtggtatt

SEQ ID NO: 722600 - DNA, 120 bp, Artificial Sequence
  ENSG00000197965_45 (sequence is synthesized)
tctgtatttaatgaaaaaaggattttaaagaattaactactattttctttcatgtcagaatcaggcagtctccttaggaggtgttctaacatgggcaagtggaaatcagtgggcctgcta

SEQ ID NO: 722601 - DNA, 120 bp, Artificial Sequence
  ENSG00000197965_46 (sequence is synthesized)
ttaaatgtggaatatgattctaatctctgttccagtttccttcttaggtttggtgagatgagctgctcagcagtctgtgctctgtgtttcaataccatccactatgcaattagtattctt

SEQ ID NO: 722602 - DNA, 120 bp, Artificial Sequence
  ENSG00000197965_47 (sequence is synthesized)
aagacatcacttacccaatttaagagtttaatttcaatttcttgctaataaactcacaaggtggttctttccagttaggaaatataaaaccctaattaagaagttgtgagctggaattag

SEQ ID NO: 722603 - DNA, 120 bp, Artificial Sequence
  ENSG00000197965_48 (sequence is synthesized)
tggcatgtgcctgtaagtcccagctacttaggctgtggcaggaggattgcttgagccgaggcgtttgaatctagcctaggcaacatagcaagatcctgtctctttaaaaaaaaaaaaaaa

SEQ ID NO: 722604 - DNA, 120 bp, Artificial Sequence
  ENSG00000197965_49 (sequence is synthesized)
ccttactgctgaggctgagaagaggatcttttctactttactccatttagggtttttctttatatctgtgtagattgtggctttttgttttttctttttaattttattttaaaacaggaa

SEQ ID NO: 722605 - DNA, 120 bp, Artificial Sequence
  ENSG00000197965_50 (sequence is synthesized)
gtcctgcctcacaggtttctttactgctgtataattggtgatccatttttctgatggttcatttccaaaatgagtgtattttttatctgttatagacttcaaggcccttcttttgcttca

SEQ ID NO: 722606 - DNA, 120 bp, Artificial Sequence
  ENSG00000197965_51 (sequence is synthesized)
aatcagtgtcgggaacttctgcagggcacttcagaatcagtgttgggaacttctgctttctatttttcacggacacagacaggaacacagatatgcgaaagcaaaacaatcaaaaagcat

SEQ ID NO: 722607 - DNA, 120 bp, Artificial Sequence
  ENSG00000197965_52 (sequence is synthesized)
ttagtacccagcaaagacctgtggcgaggagagacaatgaagaggaccacgggactggaccctgagaaaggcagaggagacgctggctggcggggccttcccggcggacggatgatggac

SEQ ID NO: 722608 - DNA, 120 bp, Artificial Sequence
  ENSG00000197965_53 (sequence is synthesized)
agcctgactctccaatcgcgtccttaaaagggtgcgggcaggccaatgagcggacagcgagggccggagtggggctgaggcttcggtgcagagctggagagccgcggctgggaccggagt

SEQ ID NO: 722609 - DNA, 120 bp, Artificial Sequence
  ENSG00000197965_54 (sequence is synthesized)
tggactattggtttcaacatgagactaatccagggtggtgacatgccggtctttgtagttcttgcttcggggttaatgaggggcaggaaagagttccttagactcctgcatggcatcatg

SEQ ID NO: 722610 - DNA, 120 bp, Artificial Sequence
  ENSG00000197965_55 (sequence is synthesized)
aatgctgctgttcttcttaccttggtttttttcctcctcctctaccttttctaccttggtgtgctgggatcagatcctgcttatcttccacttcttaagaaaagctgacatagaagacac

SEQ ID NO: 722611 - DNA, 120 bp, Artificial Sequence
  ENSG00000197969_0 (sequence is synthesized)
gcctccgtctctcgctgggctcgctagggctgcgcgttgggccagcgggggcgccgcagctgaagccgccccggagccggtgaaccgaattacctcgagggaggggcgtggggaaggcgg

SEQ ID NO: 722612 - DNA, 120 bp, Artificial Sequence
  ENSG00000197969_1 (sequence is synthesized)
cgggaggaggagcgcacgggccggctgccgtgcccaccacggctgaggaacatggttttcgagtcggtggtcgtggacgtgttgaaccggttcttgggggactatgtggtggacttggac

SEQ ID NO: 722613 - DNA, 120 bp, Artificial Sequence
  ENSG00000197969_2 (sequence is synthesized)
acgtcccagctctctctgggcatctggaaaggagctgtggccctcaagaatcttcaaattaaagaaaatgccctgagtcaactggatgtaccatttaaagttaaagttggtcacataggt

SEQ ID NO: 722614 - DNA, 120 bp, Artificial Sequence
  ENSG00000197969_3 (sequence is synthesized)
aatcttaaacttataattccatggaaaaacctttatactcaacctgttgaagccgtattggaagaaatttatttacttatagtgccttcttctagaataaaatatgatcctttaaaagaa

SEQ ID NO: 722615 - DNA, 120 bp, Artificial Sequence
  ENSG00000197969_4 (sequence is synthesized)
gagaaacaactcatggaagcaaagcaacaggaactgaaaagaatagaagaagcaaaacaaaaagtagttgatcaagaacaacatctgccggaaaaacaggacacttttgcagaaaaatta

SEQ ID NO: 722616 - DNA, 120 bp, Artificial Sequence
  ENSG00000197969_5 (sequence is synthesized)
gttacacagatcataaaaaatcttcaggtgaaaatttccagtatccatattcgttatgaagatgatatcacaaatcgggacaaaccgctgtcatttggtatttcccttcaaaatctgagc

SEQ ID NO: 722617 - DNA, 120 bp, Artificial Sequence
  ENSG00000197969_6 (sequence is synthesized)
atgcagacaactgatcaatactgggttccatgtttacatgatgaaactgagaaactggttcgtaagttaatccgattggataacctgtttgcctattggaatgtgaagtctcagatgttt

SEQ ID NO: 722618 - DNA, 120 bp, Artificial Sequence
  ENSG00000197969_7 (sequence is synthesized)
tatcttagtgattatgataactccttggacgacttgaagaatggcattgtcaatgaaaatattgttccagaaggttatgattttgtatttcgtcccatatctgctaatgccaaacttgtg

SEQ ID NO: 722619 - DNA, 120 bp, Artificial Sequence
  ENSG00000197969_8 (sequence is synthesized)
atgaatcgccgatctgattttgacttttctgcccccaaaataaacttggaaattgagttacataacatagcaattgaatttaataaaccacagtatttcagtattatggagcttcttgaa

SEQ ID NO: 722620 - DNA, 120 bp, Artificial Sequence
  ENSG00000197969_9 (sequence is synthesized)
tcagttgatatgatggcacaaaatctgccatataggaagttcaaacctgatgtgcctcttcaccaccatgccagagaatggtgggcttatgctatacatggcgttcttgaagtaaatgtt

SEQ ID NO: 722621 - DNA, 120 bp, Artificial Sequence
  ENSG00000197969_10 (sequence is synthesized)
tgccccaggttatggatgtggtcatggaagcatattagaaaacataggcaaaaagtgaagcaatataaagaactgtataaaaaaaagttaacaagtaagaagccacctggtgaacttctc

SEQ ID NO: 722622 - DNA, 120 bp, Artificial Sequence
  ENSG00000197969_11 (sequence is synthesized)
gtgtctttggaggagttggaaaaaaccttggatgtctttaatataactatagctagacagacggcagaagttgaggtaaagaaagctggatacaaaatttacaaagaaggagtaaaagat

SEQ ID NO: 722623 - DNA, 120 bp, Artificial Sequence
  ENSG00000197969_12 (sequence is synthesized)
ccagaggataataaagggtggtttagctggctatggtcttggtcagaacaaaatactaatgaacagcaaccagatgttcaacctgaaactcttgaagaaatgttgacacctgaagaaaaa

SEQ ID NO: 722624 - DNA, 120 bp, Artificial Sequence
  ENSG00000197969_13 (sequence is synthesized)
gctttactctatgaagcaattggctatagtgaaacagcagttgatccaactttactaaaaacatttgaagccttgaagttttttgtccacttgaaaagtatgtctattgttctaagagaa

SEQ ID NO: 722625 - DNA, 120 bp, Artificial Sequence
  ENSG00000197969_14 (sequence is synthesized)
aatcatcaaaaacctgagctggtagatattgtaatagaagaatttagcaccttaattgtgcaaagaccaggagcacaagcaataaaatttgaaactaaaatagattcatttcatattact

SEQ ID NO: 722626 - DNA, 120 bp, Artificial Sequence
  ENSG00000197969_15 (sequence is synthesized)
ggcttaccagataattcagaaaaaccccgcctcctgtcttcattggatgatgcaatgtcacttttccaaattacatttgagataaatccattagatgaaactgtttctcagaggtgtatc

SEQ ID NO: 722627 - DNA, 120 bp, Artificial Sequence
  ENSG00000197969_16 (sequence is synthesized)
atagaagctgaacctttagaaatcatatatgatgcaaggacagtgaatagtatagtggaattcttcagacctccaaaagaggtacatctagcacagctcactgcagcaactttgacaaaa

SEQ ID NO: 722628 - DNA, 120 bp, Artificial Sequence
  ENSG00000197969_17 (sequence is synthesized)
ctggaagaatttcgcagtaagacagcaacaggtctactgtatattattgaaacacagaaagttcttgatctcaaaattaatttgaaggcttcatatattattgtcccacaagatggaatt

SEQ ID NO: 722629 - DNA, 120 bp, Artificial Sequence
  ENSG00000197969_18 (sequence is synthesized)
tttagtcctacatcaaatctgcttcttttggaccttggtcatctaaaggtgacgagtaaaagtcgttctgaattaccagatgtgaaacaaggtgaggccaatcttaaagagataatggat

SEQ ID NO: 722630 - DNA, 120 bp, Artificial Sequence
  ENSG00000197969_19 (sequence is synthesized)
agagcttatgattcatttgatattcaacttacaagtgtacagctgctttacagtagagttggtgataattggagagaagcacgaaaactcagtgtatctacccagcatattttggtaccc

SEQ ID NO: 722631 - DNA, 120 bp, Artificial Sequence
  ENSG00000197969_20 (sequence is synthesized)
atgcacttcaatttggaactgtctaaggccatggttttcatggatgtaaggatgcccaaattcaagatttatggaaagttacctcttatttctttacgaatctcagataaaaaactacaa

SEQ ID NO: 722632 - DNA, 120 bp, Artificial Sequence
  ENSG00000197969_21 (sequence is synthesized)
gggattatggaattgattgaaagcattccaaaacctgaaccagtaactgaagtatctgcccctgtcaaatcattccagattcaaacatctacttctttgggaacatcacagatttcacag

SEQ ID NO: 722633 - DNA, 120 bp, Artificial Sequence
  ENSG00000197969_22 (sequence is synthesized)
aaaataattcctctcttggaacttccatctgtttctgaagatgattcagaggaggaattttttgatgcaccatgtagtcccttggaagaacctcttcagtttccaactggagttaaaagt

SEQ ID NO: 722634 - DNA, 120 bp, Artificial Sequence
  ENSG00000197969_23 (sequence is synthesized)
attcgaaccagaaagttacaaaagcaggattgttcagtaaatatgactacatttaaaataagatttgaagtaccaaaggttttgatcgagttttatcaccttgttggagattgtgaacta

SEQ ID NO: 722635 - DNA, 120 bp, Artificial Sequence
  ENSG00000197969_24 (sequence is synthesized)
tctgtggtagaaattcttgttttaggattgggtgcagaaattgagattagaacatacgatttgaaagcaaatgcctttttgaaagagttctgcttaaaatgcccagaatacttggatgaa

SEQ ID NO: 722636 - DNA, 120 bp, Artificial Sequence
  ENSG00000197969_25 (sequence is synthesized)
aacaagaaaccagtttatttggttacaaccctggataacacaatggaagacctgttaacgctggaatatgtaaaggctgaaaagaatgtacccgacttgaaaagtacctataacaatgtt

SEQ ID NO: 722637 - DNA, 120 bp, Artificial Sequence
  ENSG00000197969_26 (sequence is synthesized)
ttacaattgattaaggtaaatttttcctctttggatattcatttacacactgaagcacttctgaatacaataaattatcttcataatatccttccgcaatcagaggaaaaatcagcccca

SEQ ID NO: 722638 - DNA, 120 bp, Artificial Sequence
  ENSG00000197969_27 (sequence is synthesized)
gtgtccactacagagactgaagacaaaggagatgtcattaaaaaattagctttaaaactatccacaaatgaagatatcattactttgcagattttagcagaattatcgtgtttacagatc

SEQ ID NO: 722639 - DNA, 120 bp, Artificial Sequence
  ENSG00000197969_28 (sequence is synthesized)
tttattcaagatcagaaatgtaacatttctgaaattaagattgaagggcttgattctgagatgattatgaggccttcagaaactgaaataaacgcaaagctaaggaatataattgtttta

SEQ ID NO: 722640 - DNA, 120 bp, Artificial Sequence
  ENSG00000197969_29 (sequence is synthesized)
gattctgatataacagctatatacaaaaaggctgtttatatcactggaaaagaagttttcagcttcaaaatggtttcttacatggatgcaactgctggttctgcatacacagatatgaat

SEQ ID NO: 722641 - DNA, 120 bp, Artificial Sequence
  ENSG00000197969_30 (sequence is synthesized)
gtggttgacattcaggttaatttaatagttggttgcattgaagtagtttttgtcacgaaatttctatattctatattggcttttatagataattttcaggcagctaaacaagccttggct

SEQ ID NO: 722642 - DNA, 120 bp, Artificial Sequence
  ENSG00000197969_31 (sequence is synthesized)
gaggcaactgttcaggcagctggaatggctgctactggtgtaaaagaactcgcacaaaggagttccagaatggcactggatattaacatcaaagccccagttgtggtcatcccgcagtct

SEQ ID NO: 722643 - DNA, 120 bp, Artificial Sequence
  ENSG00000197969_32 (sequence is synthesized)
ccagtttctgaaaatgtttttgttgctgattttggactaattacaatgacaaatacctttcatatgataacagagagccagagctctcccccacctgttattgatttgataacaataaag

SEQ ID NO: 722644 - DNA, 120 bp, Artificial Sequence
  ENSG00000197969_33 (sequence is synthesized)
ctgagtgaaatgcgactatacagatctcgatttattaatgatgcataccaggaagtactggatctactcctgccattaaatcttgaggttgtggttgaacgaaatttatgctgggagtgg

SEQ ID NO: 722645 - DNA, 120 bp, Artificial Sequence
  ENSG00000197969_34 (sequence is synthesized)
taccaggaagttccttgttttaatgtaaatgctcagctgaaaccaatggagttcattcttagtcaagaagatataacaactatttttaaaacattgcatggcaatatatggtatgaaaaa

SEQ ID NO: 722646 - DNA, 120 bp, Artificial Sequence
  ENSG00000197969_35 (sequence is synthesized)
gatggtagtgcctcacctgctgtaacaaaagaccaatacagtgccactagtggagttactactaatgcttcacaccattcaggaggagcaactgtggtgacagctgctgtggtagaagta

SEQ ID NO: 722647 - DNA, 120 bp, Artificial Sequence
  ENSG00000197969_36 (sequence is synthesized)
cattcacgtgccttactagttaagacaacactaaacataagcttcaaaactgatgatctcaccatggtgctgtatagtccaggtcctaaacaggcttcctttacagatgttcgtgatcct

SEQ ID NO: 722648 - DNA, 120 bp, Artificial Sequence
  ENSG00000197969_37 (sequence is synthesized)
tctctgaaacttgctgaatttaaattggagaatattataagtactttaaaaatgtatacagatggctcaacattttcttccttctcattaaaaaactgtattttagatgataaaagacct

SEQ ID NO: 722649 - DNA, 120 bp, Artificial Sequence
  ENSG00000197969_38 (sequence is synthesized)
catgtcaagaaagcaactcctcgaatgataggactgacagttggttttgacaaaaaagacatgatggatataaagtacaggaaagtcagagatggttgtgtgactgatgcggtctttcaa

SEQ ID NO: 722650 - DNA, 120 bp, Artificial Sequence
  ENSG00000197969_39 (sequence is synthesized)
gaaatgtatatttgtgcaagcgtagaatttctgcagactgttgcaaatgtctttcttgaggcctacaccacaggcactgctgtagaaaccagtgtgcaaacatggactgctaaggaagaa

SEQ ID NO: 722651 - DNA, 120 bp, Artificial Sequence
  ENSG00000197969_40 (sequence is synthesized)
gtacctacacaggaatcagtgaagtgggaaattaatgttattattaaaaatcctgaaattgtgtttgtagctgacatgacaaaaaatgatgctcctgctttagtcattacaacacaatgt

SEQ ID NO: 722652 - DNA, 120 bp, Artificial Sequence
  ENSG00000197969_41 (sequence is synthesized)
gaaatttgctataaaggtaaccttgaaaatagtacaatgactgctgccattaaagatctccaagtgagagcctgcccgtttcttccagtcaagagaaaaggcaaaatcactactgttttg

SEQ ID NO: 722653 - DNA, 120 bp, Artificial Sequence
  ENSG00000197969_42 (sequence is synthesized)
cagccctgtgacttgttttatcaaactactcagaaaggtacagatccacaagtgatcgatatgtcagtaaaatccctgacactaaaggtttcaccagttattataaatactatgattacc

SEQ ID NO: 722654 - DNA, 120 bp, Artificial Sequence
  ENSG00000197969_43 (sequence is synthesized)
ataacttcagcactgtatacaactaaggaaaccatcccagaagaaacggcttcttctactgcacatttatgggaaaagaaggatacaaagactttaaaaatgtggtttcttgaagaatca

SEQ ID NO: 722655 - DNA, 120 bp, Artificial Sequence
  ENSG00000197969_44 (sequence is synthesized)
aatgaaactgaaaaaatagctcccacaactgaattggtacccaaaggcgagatgataaaaatgaacattgattctatttttatagttcttgaggctggaattggtcatagaacagtacct

SEQ ID NO: 722656 - DNA, 120 bp, Artificial Sequence
  ENSG00000197969_45 (sequence is synthesized)
atgcttctggcaaagtcacgtttttcaggggaaggcaaaaactggagttccctaataaatctgcactgtcagcttgagctagaagtgcattattataatgaaatgtttggtgtatgggag

SEQ ID NO: 722657 - DNA, 120 bp, Artificial Sequence
  ENSG00000197969_46 (sequence is synthesized)
cctttgcttgaacccttagaaattgatcagactgaggattttagaccatggaatcttggtatcaagatgaaaaagaaagcaaaaatggccattgttgagtcagatcctgaagaagaaaac

SEQ ID NO: 722658 - DNA, 120 bp, Artificial Sequence
  ENSG00000197969_47 (sequence is synthesized)
tacaaagtgccagaatataaaactgtcatcagtttccattcaaaagaccaattaaacattacattatccaaatgtggtcttgtaatgttaaacaatttagtcaaggcatttacagaagct

SEQ ID NO: 722659 - DNA, 120 bp, Artificial Sequence
  ENSG00000197969_48 (sequence is synthesized)
gccactggatcttcagctgacttcgtaaaggatctagcaccatttatgattttaaattcccttggacttactatttctgtttcgccaagtgattcttttagtgtactcaacattcctatg

SEQ ID NO: 722660 - DNA, 120 bp, Artificial Sequence
  ENSG00000197969_49 (sequence is synthesized)
gcaaaatcatatgtattgaaaaatggagaaagtttaagtatggattatatccgaaccaaggacaatgatcatttcaatgcaatgaccagcctaagcagcaaactcttcttcattcttctt

SEQ ID NO: 722661 - DNA, 120 bp, Artificial Sequence
  ENSG00000197969_50 (sequence is synthesized)
acacctgttaaccattctactgctgataagattcctttaacaaaagtgggacgacgtctgtacactgtaagacacagagagtctggcgttgaaagatctattgtttgtcaaattgataca

SEQ ID NO: 722662 - DNA, 120 bp, Artificial Sequence
  ENSG00000197969_51 (sequence is synthesized)
gtagaaggaagtaagaaggtcacaattcgctccccagtgcagataagaaatcatttttcagtcccactgtctgtttacgaaggggataccttattgggaactgcctcacctgaaaatgaa

SEQ ID NO: 722663 - DNA, 120 bp, Artificial Sequence
  ENSG00000197969_52 (sequence is synthesized)
ttcaacataccattaggatcttaccgatcattcatttttctgaagccagaagatgagaactatcaaatgtgtgaaggaattgactttgaagagattataaaaaatgatggtgctcttcta

SEQ ID NO: 722664 - DNA, 120 bp, Artificial Sequence
  ENSG00000197969_53 (sequence is synthesized)
aagaagaaatgtagatctaaaaacccttctaaggaatcatttctcattaatattgttccagaaaaagataatttaacatctctatcagtgtattcagaagatggttgggatttaccatac

SEQ ID NO: 722665 - DNA, 120 bp, Artificial Sequence
  ENSG00000197969_54 (sequence is synthesized)
ataatgcatttgtggccacctatcctgctccgaaatcttcttccttacaaaattgcttattatatagagggaattgaaaattcggtttttactctaagtgaaggacattcagcccagatt

SEQ ID NO: 722666 - DNA, 120 bp, Artificial Sequence
  ENSG00000197969_55 (sequence is synthesized)
tgtactgcacagttgggtaaagccaggctacatttaaaattacttgactatctcaatcacgattggaaaagtgaatatcacataaagcctaatcagcaagacattagttttgtcagtttt

SEQ ID NO: 722667 - DNA, 120 bp, Artificial Sequence
  ENSG00000197969_56 (sequence is synthesized)
acttgtgttacagaaatggaaaagactgatttagatattgctgtccatatgacttacaatactggtcagacagttgtggcatttcatagtccttattggatggtcaataaaactggccgc

SEQ ID NO: 722668 - DNA, 120 bp, Artificial Sequence
  ENSG00000197969_57 (sequence is synthesized)
atgttacagtacaaagcagacggaattcatcgaaagcatccacctaattataaaaagccagttctcttttcttttcagccaaatcacttttttaataacaataaggttcaacttatggta

SEQ ID NO: 722669 - DNA, 120 bp, Artificial Sequence
  ENSG00000197969_58 (sequence is synthesized)
actgatagtgagttgtccaatcagttttcaattgatactgttggtagtcatggagctgttaaatgtaaaggcctgaaaatggactatcaagttggtgtcactatagacctgagcagtttt

SEQ ID NO: 722670 - DNA, 120 bp, Artificial Sequence
  ENSG00000197969_59 (sequence is synthesized)
aacattactagaattgtgacatttacccctttttatatgattaaaaacaaaagcaaataccatatatcagtggctgaagaaggaaatgataaatggctctctcttgatttggagcagtgt

SEQ ID NO: 722671 - DNA, 120 bp, Artificial Sequence
  ENSG00000197969_60 (sequence is synthesized)
atccccttttggcctgagtatgcttctagtaaacttcttattcaagtcgaaaggagtgaagatcctcccaaaaggatatattttaacaagcaggaaaattgtattctattgcgtctagat

SEQ ID NO: 722672 - DNA, 120 bp, Artificial Sequence
  ENSG00000197969_61 (sequence is synthesized)
aacgagcttggaggtattatagcagaagtgaatttggccgagcattctacagttattacatttttagattatcatgatggagcagctacattcctcttaataaatcacacaaagaatgaa

SEQ ID NO: 722673 - DNA, 120 bp, Artificial Sequence
  ENSG00000197969_62 (sequence is synthesized)
cttgttcaatacaatcaaagttctctcagtgaaatagaagattccctccctcctggtaaagccgtgttttatacatgggctgatccggtgggctctagaaggctgaagtggagatgtaga

SEQ ID NO: 722674 - DNA, 120 bp, Artificial Sequence
  ENSG00000197969_63 (sequence is synthesized)
tttattcactgaagatccaagggtatttaaagtaacatatgaaagtgagaaagcagagttagcagagcaagaaattgcagtggcattacaagatgttggaatttctcttgtcaacaatta

SEQ ID NO: 722675 - DNA, 120 bp, Artificial Sequence
  ENSG00000197969_64 (sequence is synthesized)
cacgaagcaagaagtagcctatataggcattacaagttctgatgtggtttgggaaacaaagcccaagaagaaggcaagatggaagccaatgagtgtaaagcacactgagaagttagagag

SEQ ID NO: 722676 - DNA, 120 bp, Artificial Sequence
  ENSG00000197969_65 (sequence is synthesized)
agaatttaaggaatatactgaatcttctccttcagaagataaggttattcagttggacactaatgttccggttcgcctaacccctactggtcataacatgaaaattctgcagccgcatgt

SEQ ID NO: 722677 - DNA, 120 bp, Artificial Sequence
  ENSG00000197969_66 (sequence is synthesized)
aatagctctacgaagaaattatcttccagcattaaaagtggaatataacacatctgcacatcaatcatcatttagaattcagatttacagaatacagatccaaaatcagatacatggtgc

SEQ ID NO: 722678 - DNA, 120 bp, Artificial Sequence
  ENSG00000197969_67 (sequence is synthesized)
tgtatttccctttgtgttttatcctgttaaacctccaaagtcggtcaccatggattcagcaccaaagccctttacagatgtcagtattgtcatgagatctgcaggacattcccagatatc

SEQ ID NO: 722679 - DNA, 120 bp, Artificial Sequence
  ENSG00000197969_68 (sequence is synthesized)
acgtattaagtatttcaaagtattgattcaagaaatggatctcaggttagatcttgggtttatctatgctttaacagaccttatgacagaagctgaggtgactgaaaatacagaggttga

SEQ ID NO: 722680 - DNA, 120 bp, Artificial Sequence
  ENSG00000197969_69 (sequence is synthesized)
gctttttcataaagatatagaagctttcaaagaagaatataaaacagcctcattagtagatcaatcacaagtcagcctctatgaatattttcatatatctcctatcaagttacatttaag

SEQ ID NO: 722681 - DNA, 120 bp, Artificial Sequence
  ENSG00000197969_70 (sequence is synthesized)
tgtttcactgagttccggcagagaagaagctaaagattcaaaacaaaatggaggactgattccagttcattctttaaatcttttgctgaagagtattggtgccacactgacagatgtaca

SEQ ID NO: 722682 - DNA, 120 bp, Artificial Sequence
  ENSG00000197969_71 (sequence is synthesized)
agatgtagtttttaagcttgcattttttgaactcaactatcagttccatacaacatccgatctacagtctgaagtcataagacactattcaaaacaggccattaagcagatgtatgtact

SEQ ID NO: 722683 - DNA, 120 bp, Artificial Sequence
  ENSG00000197969_72 (sequence is synthesized)
cattcttggacttgatgttttgggaaatccatttggcttaattagagaattttctgaaggtgtagaagcatttttttatgaaccttaccagggagccatccagggtcctgaagagtttgt

SEQ ID NO: 722684 - DNA, 120 bp, Artificial Sequence
  ENSG00000197969_73 (sequence is synthesized)
ggaaggaatggcactaggacttaaggcactagttggtggagctgttggtggattggctggtgctgcctccaaaatcaccggtgctatggctaagggggtagcagctatgaccatggatga

SEQ ID NO: 722685 - DNA, 120 bp, Artificial Sequence
  ENSG00000197969_74 (sequence is synthesized)
agactaccaacagaagagaagagaagccatgaataagcaaccagctggttttagagaaggcatcactcgtggaggaaaaggcttagtttctggatttgttagtggcataacaggaattgt

SEQ ID NO: 722686 - DNA, 120 bp, Artificial Sequence
  ENSG00000197969_75 (sequence is synthesized)
tacaaaaccaatcaaaggagctcaaaaaggaggagcagctggtttctttaaaggtgttgggaaaggtttagtaggagcggtagcaaggccaactggaggcatcatagacatggctagcag

SEQ ID NO: 722687 - DNA, 120 bp, Artificial Sequence
  ENSG00000197969_76 (sequence is synthesized)
tacatttcagggaataaaaagagctacagagacttctgaagtggagagtctgcgacctcctcggttcttcaatgaagatggagttatcagaccgtacaggttgagggatgggactggaaa

SEQ ID NO: 722688 - DNA, 120 bp, Artificial Sequence
  ENSG00000197969_77 (sequence is synthesized)
tcaaatgttacaggtcatggaaaatggaagatttgcaaaatacaaatattttacccatgtcatgatcaataagacagatatgctaatgataaccagacgtggtgtattgtttgtaacaaa

SEQ ID NO: 722689 - DNA, 120 bp, Artificial Sequence
  ENSG00000197969_78 (sequence is synthesized)
gggaacatttggacaactcacgtgtgagtggcagtatagttttgatgaatttaccaaagagccattcattgttcatgggagaagattgcgcattgaagcaaaggaacgagtgaagtctgt

SEQ ID NO: 722690 - DNA, 120 bp, Artificial Sequence
  ENSG00000197969_79 (sequence is synthesized)
atttcatgccagagagtttggaaaaataattaacttcaagaccccagaggatgccaggtggatcctcacaaagctacaagaagcaagagaaccttctccgagcctctgacagagaacact

SEQ ID NO: 722691 - DNA, 120 bp, Artificial Sequence
  ENSG00000197969_80 (sequence is synthesized)
gcctgaagacacacagcaataagtgattacagctcctagactaccttccaaaacctgtttgggaagcatattacagaaatgatttcaagtaccctgtattctggatgctaaaaaacaaaa

SEQ ID NO: 722692 - DNA, 120 bp, Artificial Sequence
  ENSG00000197969_81 (sequence is synthesized)
acaaaaaaacaaaaacaaaaaaacaaaaccagaatcaggtaaaacagctatgtgattaaaatattttaattcttcagcaattacccggttttctaaattgaatcatgcatctatttataa

SEQ ID NO: 722693 - DNA, 120 bp, Artificial Sequence
  ENSG00000197969_82 (sequence is synthesized)
ataattctaattattttgtaaaagaagacaaaattatgaatcttaagtatttgctccatctttttctctgtaatggtggagaggctgcccataattcatctccacatggagccaagttta

SEQ ID NO: 722694 - DNA, 120 bp, Artificial Sequence
  ENSG00000197969_83 (sequence is synthesized)
atgtttctagttcacattttgtacttctgtcatgcttatttcaaactccctgagtgatgggtaagaaatcaaacattgcctcagtggtatcaagagaactttggtggtggtttcttcaga

SEQ ID NO: 722695 - DNA, 120 bp, Artificial Sequence
  ENSG00000197969_84 (sequence is synthesized)
cagaatcatgaagttcttttgccagataaatattttgatattattttcctttttaatataaaggataggtttgaattgtacttaaaatgcatagcattattaaaaacaatcttttaaaat

SEQ ID NO: 722696 - DNA, 120 bp, Artificial Sequence
  ENSG00000197969_85 (sequence is synthesized)
tttataacatagattgaagcctccccttaagaaaccttaaagaaataagtatcctactcaaaaaaggaagtctgtttcagaactttagggcctttgaaatatttcctcaagcctatttca

SEQ ID NO: 722697 - DNA, 120 bp, Artificial Sequence
  ENSG00000197969_86 (sequence is synthesized)
tgagatctacttggtttacccaagtcatgtttttaatagactgctaatatcaaaggagaatttttaaagccttaacaatgcctactttccattcactgttaacatggaataaacacaatt

SEQ ID NO: 722698 - DNA, 120 bp, Artificial Sequence
  ENSG00000197969_87 (sequence is synthesized)
cccaacatcttagatagtgtattatgcttccaacagacagtccctctcatataaagtttatgtaccctaaaatctaacccaataacctgtcccgttgccaatagattgagaatttctggt

SEQ ID NO: 722699 - DNA, 120 bp, Artificial Sequence
  ENSG00000197969_88 (sequence is synthesized)
ttgcttactctacagttattcaaatgagagtcacgcttttaaatttacagctcatcacagaaatcatcagctatacattagtaaaaataaggacatgaggttttctttcttggtttttgt

SEQ ID NO: 722700 - DNA, 120 bp, Artificial Sequence
  ENSG00000197969_89 (sequence is synthesized)
ccaagatctttgcaccttaatattaatggactgtttcaggtaaaagagaatgaatgtatgattgtgaactgtgaagagaatgatgcaggatcctatttagttactgaataatacagagta

SEQ ID NO: 722701 - DNA, 120 bp, Artificial Sequence
  ENSG00000197969_90 (sequence is synthesized)
ttcaatgcatgttgtatgtgccaccaagttactattaactgtttttggaattgaagactctgtatagtcaatagttgtgaaattcttctcaggctccttaaaccctcgctttgttgtaaa

SEQ ID NO: 722702 - DNA, 120 bp, Artificial Sequence
  ENSG00000197969_91 (sequence is synthesized)
agctaaaataaacagcatgctatattgtaattgtatttcttgctgaccaaatctactaaatgctattgatttctctctgattactaaaacacattgtttattctcagtagtttcccccaa

SEQ ID NO: 722703 - DNA, 120 bp, Artificial Sequence
  ENSG00000197969_92 (sequence is synthesized)
aatgcttttttctttgctgaacttaaattgaatcaaaccacaagtttaaaatcacatgaaagtgtgtttccatgttgacctttgtttaaaaaaaaaaaaaagtgcttattttctctgtcg

SEQ ID NO: 722704 - DNA, 120 bp, Artificial Sequence
  ENSG00000197969_93 (sequence is synthesized)
ctaagctcctccagttttgcttttgtcagaattaaacttaacagtagaggtagtcagaaagcttgcatcagactgtcctcatccaaaacgaaatacttcattacccaatgttatgatttc

SEQ ID NO: 722705 - DNA, 120 bp, Artificial Sequence
  ENSG00000197969_94 (sequence is synthesized)
accattctcagaaaaattacagtcccctgcctccctgggtgtagtgtcgtgaagtagaaaagccttacataaatagtaaacatagaaattcttctggtgccctctggcagccagcaggag

SEQ ID NO: 722706 - DNA, 120 bp, Artificial Sequence
  ENSG00000197969_95 (sequence is synthesized)
tgggtcttgtgactaatccacatggaaaggatagtgcctgtctttcctgttcccttgccataagaaccgtgaaatctctcctttccctgccactcgtttactcatcacctcctcccatca

SEQ ID NO: 722707 - DNA, 120 bp, Artificial Sequence
  ENSG00000197969_96 (sequence is synthesized)
cttccttgtctctagactagagggacccacagttttaagagctacatcatatcatttgttgttttagaagattgtcttcatctaaacaaaaacactaagaaatcagtagatcactagata

SEQ ID NO: 722708 - DNA, 120 bp, Artificial Sequence
  ENSG00000197969_97 (sequence is synthesized)
atgagtcagtgtttttagcatcacattttacaatttacagtttttgtttgattctgtagcccatttttcttgaaggttagaataagaatcttcttgtatttgaaaaccatctgccctaaa

SEQ ID NO: 722709 - DNA, 120 bp, Artificial Sequence
  ENSG00000197969_98 (sequence is synthesized)
ttacatttaactacaagaaatggctctctgctggagaaatttaagcttgtcttagttgtttggtagtggctatggaatgagaggtgttgagtcttgtgccccttccatgtattatttgct

SEQ ID NO: 722710 - DNA, 120 bp, Artificial Sequence
  ENSG00000197969_99 (sequence is synthesized)
aactaactatattactaggcccttaattccagcacagcatgtcttctggtctatgataattgtgtgaggactaaggcagagtgcctgttccctgccaactctccaccagaaaatcataat

SEQ ID NO: 722711 - DNA, 120 bp, Artificial Sequence
  ENSG00000197969_100 (sequence is synthesized)
cagaaagagtgactttgatttctggtacttgtgatcaaaagcagcttgtgatttcttcacatttgcaaaatactctctgagccaaaaggcacatacagttctccagtgtcttccctttta

SEQ ID NO: 722712 - DNA, 120 bp, Artificial Sequence
  ENSG00000197969_101 (sequence is synthesized)
gagtatacatatttgctgcttttcctttagtgttcacaaaaatcccaaggtcagtttagtgtggctgagttgttgttatctggaccctaaacaatcattaccacctgtagacagttctta

SEQ ID NO: 722713 - DNA, 120 bp, Artificial Sequence
  ENSG00000197969_102 (sequence is synthesized)
cctacccctctcctccacaatcctagtccatttggaggcaactatcctgtggcctccaagtgaataaatctttcttacacttacttacgtgatattttctatcataattatctctctcat

SEQ ID NO: 722714 - DNA, 120 bp, Artificial Sequence
  ENSG00000197969_103 (sequence is synthesized)
ttcttccaatagtaatagcggtaatattgttccattgaatatctatgcacctagctcatctcttagaaacatcccacatagtagcatcgtattactctctggtaaaaagaaagattaaat

SEQ ID NO: 722715 - DNA, 120 bp, Artificial Sequence
  ENSG00000197969_104 (sequence is synthesized)
taaaaggactctacacagtgctgaatttcctgcacctaaattattcagttatcacttgccagtattagttgatccttcaggctatgccaagtgccccctcatgtaggcctctgtattaaa

SEQ ID NO: 722716 - DNA, 120 bp, Artificial Sequence
  ENSG00000197969_105 (sequence is synthesized)
aagattgggacaaaatacttgattagtttgcctgtagaagctcaaagtgtgtaccaaatacattgacagtggatgctttcatggctcagccaacacagttcagaggaatcttttcggctt

SEQ ID NO: 722717 - DNA, 120 bp, Artificial Sequence
  ENSG00000197969_106 (sequence is synthesized)
ccagggcattgcttgttaccttttgtcaggatcaacccaaatcctcagggatgctgtttttccacactgtaagtcctaactcattagtgggtcatgaaatcaacttaacagctcaagacc

SEQ ID NO: 722718 - DNA, 120 bp, Artificial Sequence
  ENSG00000197969_107 (sequence is synthesized)
agtatattttaaacgtgaaataataaaaaatagaggaacaatagagcatataaaatggttaagtattggttcctgaaatactgtttcagctaaatattctatttactgtgtatactgggt

SEQ ID NO: 722719 - DNA, 120 bp, Artificial Sequence
  ENSG00000197969_108 (sequence is synthesized)
cacaatataaagtgtttcctgttatgaaatgcaatttaaaaaaagaaagcttgaaagactgctgcaggaggcaccggccatccagtgattgttggaagagtctggattgtgtggagcctg

SEQ ID NO: 722720 - DNA, 120 bp, Artificial Sequence
  ENSG00000197969_109 (sequence is synthesized)
accttagataaggagcagcagatccacaactcaggaagtctagagatgcttagcacttcttcttttgagtgagaagatggaatcactcttggtttctaaaatatttttcttctctgctgt

SEQ ID NO: 722721 - DNA, 120 bp, Artificial Sequence
  ENSG00000197969_110 (sequence is synthesized)
gtatcgggcaacctcacatgattcagtgggaccagaaaaagcatagaaaaattagatccacacacagcacccaaaaaaggccatagtcttttgtttacctagatgtattttaacctcttt

SEQ ID NO: 722722 - DNA, 120 bp, Artificial Sequence
  ENSG00000197969_111 (sequence is synthesized)
accactaagcattttactataatagaactggggacatacattgtccttttgagtccgttgaatctgcaccatctaccttttggctgattcaccatacaggtggcaaaggcctttaaaaat

SEQ ID NO: 722723 - DNA, 120 bp, Artificial Sequence
  ENSG00000197969_112 (sequence is synthesized)
ggggagctaatacgtagggcacattctggtagggccaaaatattcagtgtctggggggtgctatgcaaatatcaatgactttttactaaaaacagtggatttcctcatttctttaagatc

SEQ ID NO: 722724 - DNA, 120 bp, Artificial Sequence
  ENSG00000197969_113 (sequence is synthesized)
caagtagaaaatgtaaataacttacattctgtatgcaggactcaatacagacttagtcaatctgattttttttggtgcttttcagtatagcgcaactctaaaaggaaacccattcaccct

SEQ ID NO: 722725 - DNA, 120 bp, Artificial Sequence
  ENSG00000197969_114 (sequence is synthesized)
ccttagtcctttgaagtatacttttgaaattataccttattgttaatggcaacctaatcaagctaggatttgtcggttaaaattttgattcttgtaatctgtactgtcaatttttggcca

SEQ ID NO: 722726 - DNA, 120 bp, Artificial Sequence
  ENSG00000197969_115 (sequence is synthesized)
ctctggctgttacagcaaacttttctcccactgtcataattggtctaaagtagtatttgtttcaggactatccaaaaagcaaggccagcacattgagaagatgcagaatcctactctatt

SEQ ID NO: 722727 - DNA, 120 bp, Artificial Sequence
  ENSG00000197969_116 (sequence is synthesized)
acaaacctcactcatgtttcttttattgaaacctttttctactttatatttcctcttttgtaaatttttccatgtcatttaaaaaattttttactttagaattacagattagttcttttt

SEQ ID NO: 722728 - DNA, 120 bp, Artificial Sequence
  ENSG00000197969_117 (sequence is synthesized)
ttaaagcattatggcattttcaaaaaaaaaattattttggttacccaaaaagctatacaagaaatataacttcaattttttaggttgatatgggtatatttttaaagtttttattacttt

SEQ ID NO: 722729 - DNA, 120 bp, Artificial Sequence
  ENSG00000197969_118 (sequence is synthesized)
atacaaatacaaattaatttatattatagtttaacacctgctatgatgatagatatcacactgctatgatagaaaatccctgtctgtcattgaactattcatttagtgttactctgatat

SEQ ID NO: 722730 - DNA, 120 bp, Artificial Sequence
  ENSG00000197969_119 (sequence is synthesized)
gttaataatgtattccttctaatgaagtccttgtaacaagaaaccctgtgagattggtataatgagatatcaaataatcagaagtataattaaaatagaacatgttggaaaatcccaaca

SEQ ID NO: 722731 - DNA, 120 bp, Artificial Sequence
  ENSG00000197969_120 (sequence is synthesized)
tttcctgttatgccgtcatacctccggtgttcagtttgttactcaaaagttcccagttcttaggctgaaaaacattcaagtaaaaatgtagcatagattacactgaaatattttcagtat

SEQ ID NO: 722732 - DNA, 120 bp, Artificial Sequence
  ENSG00000197969_121 (sequence is synthesized)
caatgatttaatatccacacaaactattaggaatggtatctggaacttgttacaaggtcagataaactgttacagaattttagaaataattatctctgtatgtgactgtgtattacatat

SEQ ID NO: 722733 - DNA, 120 bp, Artificial Sequence
  ENSG00000197969_122 (sequence is synthesized)
aaaaatgaatttttcaggaaaagtgcactttaaaaatactttctcttgctagttttttaaattgatgaaatagcctgtgctgctttggaatgcttattctttctttgatgaaaatacggt

SEQ ID NO: 722734 - DNA, 120 bp, Artificial Sequence
  ENSG00000197969_123 (sequence is synthesized)
cattgattatgataattttaaaaatatctatttctgcatcgctgcaggatttcctacacttttctgttcctcatccctcttttatgtgtgcttggctcagttgcctgttacacagcctct

SEQ ID NO: 722735 - DNA, 120 bp, Artificial Sequence
  ENSG00000197969_124 (sequence is synthesized)
gccttggttttgtgtattctaagataatttataaacacagatatttacagtgaagttcttccttttgaaactaatcttattcttttattcctctctctaaaaattggttggccatgctca

SEQ ID NO: 722736 - DNA, 120 bp, Artificial Sequence
  ENSG00000197969_125 (sequence is synthesized)
ctaatgattttttttcttaacaataagcatttcttggtattggtagatttggattgcatggtaagatgactgcccattttcaccatgtatacctttgtcaaataaagatttctgatcttt

SEQ ID NO: 722737 - DNA, 86 bp, Artificial Sequence
  ENSG00000197969_126 (sequence is synthesized)
gtagtcagatctaaaccattaaaattcatatgttctttattttacttggaatgtttcattaacatgttttgtatgacttataccat

SEQ ID NO: 722738 - DNA, 120 bp, Artificial Sequence
  ENSG00000197969_127 (sequence is synthesized)
atgtttcattaacatgttttgtatgacttataccataatgcccatatgtccatttatagggaggtaaaacacattttcttttaaaatgttttcctacacattttcataaagcaaaataat

SEQ ID NO: 722739 - DNA, 120 bp, Artificial Sequence
  ENSG00000197969_128 (sequence is synthesized)
tgtattatttaagcacagaaaaaaatgtatcttacatccaaagtagggagggcatccaacatattatagatttgcttttatatattttatagctttgtattgcatagtttgtctttaaga

SEQ ID NO: 722740 - DNA, 120 bp, Artificial Sequence
  ENSG00000197969_129 (sequence is synthesized)
gttcaagttagacttaaatataattttgatgttcactggttttattttaaattgccttcttatttgttagcaaaatgcctttttttaatggtctctgtaaattttctgggctttaatgta

SEQ ID NO: 722741 - DNA, 120 bp, Artificial Sequence
  ENSG00000197969_130 (sequence is synthesized)
tctgggctttaatgtaatgccactgtgtaaaaaaaaaggaagaaaatagtaatagccatttaatgttttatatttatcattttaaagatatttttgtcaaatttcttttaataataataa

SEQ ID NO: 722742 - DNA, 120 bp, Artificial Sequence
  ENSG00000197969_131 (sequence is synthesized)
aagtttgatatgaaaagttaatgcatgactttgcaagtgaaagccaacagtagattttagtcttaaaatttacaaactacgtacagctgtttcagtattttgaatacaaagaaaaccttt

SEQ ID NO: 722743 - DNA, 120 bp, Artificial Sequence
  ENSG00000197969_132 (sequence is synthesized)
tgtattggtaacttttaataggaattttaatgaatctggtttttttatagggtgttcttagttctgcactggatttgctagatttgttggaagcctttgtaccttatgtatcctcgtcat

SEQ ID NO: 722744 - DNA, 120 bp, Artificial Sequence
  ENSG00000197969_133 (sequence is synthesized)
tggtggtacttacttaaccaattaaaccatttctgttgtggggttattaaaccactggtagcttttataccagatatataatccttatatccaattacacatgaagaaggaaaagcaaaa

SEQ ID NO: 722745 - DNA, 120 bp, Artificial Sequence
  ENSG00000197969_134 (sequence is synthesized)
ctcaggaacactgctattgtgaattactcttggattcttgtgctttgcctttgaaaatgcttaaatggccatgaccctcttcctgctttattctagtgtagtctttataaaacttgtggg

SEQ ID NO: 722746 - DNA, 120 bp, Artificial Sequence
  ENSG00000197969_135 (sequence is synthesized)
atttgataagcagttcacatgcaaaccagtatcttttaataatacaaagtagcatctggaacaatagacagtttgaagttagaatctgcttagacaactttcttacttggtaaattcgac

SEQ ID NO: 722747 - DNA, 120 bp, Artificial Sequence
  ENSG00000197969_136 (sequence is synthesized)
tttttaaaacctggattatgctgtaggtaactagtaatcatatataggctataccagtgtcatgttgtttctgtggtttagaggtggaatactaaattaaatcatttgtttgaaaacaaa

SEQ ID NO: 722748 - DNA, 120 bp, Artificial Sequence
  ENSG00000197969_137 (sequence is synthesized)
caattggaagataactgccgtcagccgacgtggtctttccctttacttcaggaggagaatgactactaatctggaagaaaggtcttactatagcagtcagatcaccagagtagtgccgaa

SEQ ID NO: 722749 - DNA, 120 bp, Artificial Sequence
  ENSG00000197969_138 (sequence is synthesized)
cacttcctggcttcatctgaaaatttgaatgaataccagtttatgcaagttcttagtcatcattatataaattcctcatttttgtcctctttggcaagacaaaatctattctatttaaga

SEQ ID NO: 722750 - DNA, 120 bp, Artificial Sequence
  ENSG00000197969_139 (sequence is synthesized)
ttttctccttgaagttagatacctaaagtcaccatgtaatgttttaactctccccttactccaattttgttttagtttcatgaatctttattgaatatttgtgccctgctctagatagat

SEQ ID NO: 722751 - DNA, 120 bp, Artificial Sequence
  ENSG00000197969_140 (sequence is synthesized)
actattttaaagatctaataaaaattagaatactagtaaagaataggtaatgcagatattcttttgcaacaagtatgagaattattattgaaataacatttaagaactagacttcagtga

SEQ ID NO: 722752 - DNA, 120 bp, Artificial Sequence
  ENSG00000197969_141 (sequence is synthesized)
atgctacattatgttgtattcttttagtgctgattttcttaaaagattgtatactttgtgaagttgctttttttctttcatactctgtgtggtttcttcctgttgttataggaatccata

SEQ ID NO: 722753 - DNA, 120 bp, Artificial Sequence
  ENSG00000197969_142 (sequence is synthesized)
catcttaagattttatgtaaatatttcatttgcagtgcttatcaaatggaagaaagtagttcttcattgtcatctattataggtttattttacttttagaattaccatttgctttttaaa

SEQ ID NO: 722754 - DNA, 120 bp, Artificial Sequence
  ENSG00000197969_143 (sequence is synthesized)
aaaatttttttgagactaggtttctctctgttgctcagactggagtgcaatgatgcgatcatagctcactgtagtctcaaacttctaggctcaagtgatccttccacctcagccccccga

SEQ ID NO: 722755 - DNA, 89 bp, Artificial Sequence
  ENSG00000197969_144 (sequence is synthesized)
ccctgcctggataatattttttaatttttaattttgtagggacagggactcactatggcttgtcttgaactcttgggctcaagtgatcc

SEQ ID NO: 722756 - DNA, 120 bp, Artificial Sequence
  ENSG00000197969_145 (sequence is synthesized)
caaagtgctggaattacaggcatgagccagtacacccagccgtttacacttttctgatacatgtctcttttggaggaaaaagttaacatatttatggttttaaatgtgtatttccatatt

SEQ ID NO: 722757 - DNA, 120 bp, Artificial Sequence
  ENSG00000197969_146 (sequence is synthesized)
tccatattgaataacaaattatcatagtggttaagaatttgtactttgctgtcaggtagatttgaaattgcatcctagctctgtcatttgctagctgtatgttcttaagcaggctttatt

SEQ ID NO: 722758 - DNA, 120 bp, Artificial Sequence
  ENSG00000197969_147 (sequence is synthesized)
gcttttctaaatcttttgctgtggtctgtaaaatgagaataataataaaatttgcttggttaagacatgggggaaatcaaattagattgtgtatgtaaaggatttggtacagtgcctccc

SEQ ID NO: 722759 - DNA, 120 bp, Artificial Sequence
  ENSG00000197969_148 (sequence is synthesized)
agacacagggttgccatttatttatcactctagcactaccaccaccattgttattttgtggaatattatttaacttgtaaagaatcaagaactccttacttttgctttaattaatttaaa

SEQ ID NO: 722760 - DNA, 120 bp, Artificial Sequence
  ENSG00000197969_149 (sequence is synthesized)
atcatgagatgaagagattcctatattataataataggaaaagaataggatagagatgctggaaaaactggtgagatattcagatgtactgtcaatttatatttctgttctcatagaact

SEQ ID NO: 722761 - DNA, 120 bp, Artificial Sequence
  ENSG00000197969_150 (sequence is synthesized)
tttaattggatgctgttagtgatcacattctgtctgccagtttccaaagggtgtgatcagtttttagaaagacaattgagccatggtgtggggaagggactagaggggacaagagcggtt

SEQ ID NO: 722762 - DNA, 120 bp, Artificial Sequence
  ENSG00000197969_151 (sequence is synthesized)
aggggactcttaaactgagacgtcatatagtgacatgaactaagataatagaagggagggtcgagggaaatgagcagtttggagagatacatatgacgtaataatataaacagtgattgg

SEQ ID NO: 722763 - DNA, 120 bp, Artificial Sequence
  ENSG00000197969_152 (sequence is synthesized)
aaatgggtgatgagggattgtggaggtagtagggattacttattttggattaccatcagtttttgcccacattttacgttgttttgtagttttcaaaataaaaatcacgagtggttaaga

SEQ ID NO: 722764 - DNA, 120 bp, Artificial Sequence
  ENSG00000197969_153 (sequence is synthesized)
cttcaggtgaaaatttccagtatccatattcgttatgaagatgatatcacaaatcgggacaaaccgctgtcatttggtatttcccttcaaaatctgagcatgcaggaataagctgttttg

SEQ ID NO: 722765 - DNA, 120 bp, Artificial Sequence
  ENSG00000197969_154 (sequence is synthesized)
gataaagtttgaatcccttttgttttctacttccacccacccgtccttccccagagataagtatcctaaattttaaaacttttatataatatatctattaaaaatgtaggattataaaag

SEQ ID NO: 722766 - DNA, 120 bp, Artificial Sequence
  ENSG00000197969_155 (sequence is synthesized)
ttcctttttgcactttccagtgttgttgacatttatctgtgttaccacatgtaacaaaattcattcagtttaactgctgtgtatttcattgcatgattttatttgttgtatctattgggt

SEQ ID NO: 722767 - DNA, 120 bp, Artificial Sequence
  ENSG00000197969_156 (sequence is synthesized)
tttgtgtaagatttctttttaattttattattatttttaaattgggcagcctcccaagccagagcaggctcagagagactccacagtttctttttaaaatgtggccccactgcaacgaaa

SEQ ID NO: 722768 - DNA, 120 bp, Artificial Sequence
  ENSG00000197969_157 (sequence is synthesized)
ttaaaatgtgtttgcatgggtatgtgtgtgtatgattcctgtgtccttcattgtgtctgaatgttgacagctgagttgttgtcctgtgggtgtagtatagtgtgttcttaaacatttcag

SEQ ID NO: 722769 - DNA, 120 bp, Artificial Sequence
  ENSG00000197969_158 (sequence is synthesized)
gtatttttgaatttatctatgttgtctttgaatcttttacagggattctataactgccgtcatgtaagttgttacagaagggaggctgtttttgtgtcttgtatatttcttttctttcag

SEQ ID NO: 722770 - DNA, 120 bp, Artificial Sequence
  ENSG00000197969_159 (sequence is synthesized)
gattgcgcattgaagcaaaggaacgagtgaagtctgtatttcatgccagagagtttggaaaaataattaacttcaagaccccagaggatgccagggtaaatataataaatcttttattta

SEQ ID NO: 722771 - DNA, 120 bp, Artificial Sequence
  ENSG00000197969_160 (sequence is synthesized)
ttttaaagaataatttagttactttgtttttgctctagtaagaccaatacttaggaaagagttaccaattaaattatcttagaattggtataaatagggtaaaatagttggaataatttt

SEQ ID NO: 722772 - DNA, 120 bp, Artificial Sequence
  ENSG00000197969_161 (sequence is synthesized)
ccataattaatttgtattaaaaaattgacaaaacagttttaaagacttgaagacctttatttcctaagtagaacatgtattttctaagtgggaaaataatgagaaatattcattagtgaa

SEQ ID NO: 722773 - DNA, 120 bp, Artificial Sequence
  ENSG00000197969_162 (sequence is synthesized)
cccttttttaattgtataaggtaagaatttcagccttgttttaatcagaacgatcacagatctcagtgaactaagaattaatgaagtattattttagtttttttttaatctcttcgtgta

SEQ ID NO: 722774 - DNA, 120 bp, Artificial Sequence
  ENSG00000197971_0 (sequence is synthesized)
agacagtgcagccacctccgagagcctggatgtgatggcgtcacagaagagaccctcccagaggcacggatccaagtacctggccacagcaagtaccatggaccatgccaggcatggctt

SEQ ID NO: 722775 - DNA, 120 bp, Artificial Sequence
  ENSG00000197971_1 (sequence is synthesized)
cctcccaaggcacagagacacgggcatccttgactccatcgggcgcttctttggcggtgacaggggtgcgcccaagcggggctctggcaaggtaccctggctaaagccgggccggagccc

SEQ ID NO: 722776 - DNA, 120 bp, Artificial Sequence
  ENSG00000197971_2 (sequence is synthesized)
tctgccctctcatgcccgcagccagcctgggctgtgcaacatgtacaaggactcacaccacccggcaagaactgctcactacggctccctgccccagaagtcacacggccggacccaaga

SEQ ID NO: 722777 - DNA, 120 bp, Artificial Sequence
  ENSG00000197971_3 (sequence is synthesized)
tgaaaaccccgtagtccacttcttcaagaacattgtgacgcctcgcacaccacccccgtcgcagggaaagggggccgaaggccagagaccaggatttggctacggaggcagagcgtccga

SEQ ID NO: 722778 - DNA, 120 bp, Artificial Sequence
  ENSG00000197971_4 (sequence is synthesized)
ctataaatcggctcacaagggattcaagggagtcgatgcccagggcacgctttccaaaatttttaagctgggaggaagagatagtcgctctggatcacccatggctagacgctgaaaacc

SEQ ID NO: 722779 - DNA, 120 bp, Artificial Sequence
  ENSG00000197971_5 (sequence is synthesized)
aatcccacttgcccctgttacctaattagagcagatgacccctcccctaatgcctgcggagttgtgcacgtagtagggtcaggccacggcagcctaccggcaatttccggccaacagtta

SEQ ID NO: 722780 - DNA, 120 bp, Artificial Sequence
  ENSG00000197971_6 (sequence is synthesized)
aatgagaacatgaaaacagaaaacggttaaaactgtccctttctgtgtgaagatcacgttccttcccccgcaatgtgcccccagacgcacgtgggtcttcagggggccaggtgcacagac

SEQ ID NO: 722781 - DNA, 120 bp, Artificial Sequence
  ENSG00000197971_7 (sequence is synthesized)
gtccctccacgttcacccctccacccttggactttcttttcgccgtggctgcggcacccttgcgcttttgctggtcactgccatggaggcacacagctgcagagacagagaggacgtggg

SEQ ID NO: 722782 - DNA, 120 bp, Artificial Sequence
  ENSG00000197971_8 (sequence is synthesized)
cggcagagaggactgttgacatccaagcttcctttgtttttttttcctgtccttctctcacctcctaaagtagacttcatttttcctaacaggattagacagtcaaggagtggcttacta

SEQ ID NO: 722783 - DNA, 120 bp, Artificial Sequence
  ENSG00000197971_9 (sequence is synthesized)
catgtgggagcttttggtatgtgacatgcgggctgggcagctgttagagtccaacgtggggcagcacagagagggggccacctccccaggccgtggctgcccacacaccccaattagctg

SEQ ID NO: 722784 - DNA, 120 bp, Artificial Sequence
  ENSG00000197971_10 (sequence is synthesized)
agtcaccgccgccgcgcgccagagagaagcagcctccggccccggcggcccctgtctcccgaccccggaaggcgaagcaggctgcccggggaccccgcgcgtgggcgcttgaagccgaga

SEQ ID NO: 722785 - DNA, 120 bp, Artificial Sequence
  ENSG00000197971_11 (sequence is synthesized)
ccagcctgcccgggcctgggcaggcggagcagggccttggaccccgcggcgcccctcggcctcggagcaacgagcgcagcgccgcctctgaagagccaatccattcaggatgggaaacca

SEQ ID NO: 722786 - DNA, 120 bp, Artificial Sequence
  ENSG00000197971_12 (sequence is synthesized)
cgcaggcaaacgagaattaaatgccgagaaggccagtacgaatagtgaaactaacagaggagaatctgaaaaaaagagaaacctgggtgaactttcacggacaacctcagaggacaacga

SEQ ID NO: 722787 - DNA, 120 bp, Artificial Sequence
  ENSG00000197971_13 (sequence is synthesized)
agtgttcggagaggcagatgcgaaccagaacaatgggacctcctctcaggacacagcggtgactgactccaagcgcacagcggacccgaagaatgcctggcaggatgcccacccagctga

SEQ ID NO: 722788 - DNA, 120 bp, Artificial Sequence
  ENSG00000197971_14 (sequence is synthesized)
gagatgtcaagcaggtggcctctggacgtcaccgttgccctgcatggtggccccagagcagcctctatgaacaacctcgtttccaaaccacagcccacagccggagagtccaggaagact

SEQ ID NO: 722789 - DNA, 120 bp, Artificial Sequence
  ENSG00000197971_15 (sequence is synthesized)
tgcgcactcagagcagaagggtaggagtcctctagacagcctcgcagccgcgccagtcgcccatagacactggctgtgaccgggcgtgctggcagcggcagtgcacagtggccagcacta

SEQ ID NO: 722790 - DNA, 120 bp, Artificial Sequence
  ENSG00000197971_16 (sequence is synthesized)
accctccctgagaagataaccggctcattcacttcctcccagaagacgcgtggtagcgagtaggcacaggcgtgcacctgctcccgaattactcaccgagacacacgggctgagcagacg

SEQ ID NO: 722791 - DNA, 120 bp, Artificial Sequence
  ENSG00000197971_17 (sequence is synthesized)
gccccgtggatggagacaaagagctcttctgaccatatccttcttaacacccgctggcatctcctttcgcgcctccctccctaacctactgacccaccttttgattttagcgcacctgtg

SEQ ID NO: 722792 - DNA, 120 bp, Artificial Sequence
  ENSG00000197971_18 (sequence is synthesized)
attgataggccttccaaagagtcccacgctggcatcaccctccccgaggacggagatgaggagtagtcagcgtgatgccaaaacgcgtcttcttaatccaattctaattctgaatgtttc

SEQ ID NO: 722793 - DNA, 120 bp, Artificial Sequence
  ENSG00000197971_19 (sequence is synthesized)
gtgtgggcttaataccatgtctattaatatatagcctcgatgatgagagagttacaaagaacaaaactccagacacaaacctccaaatttttcagcagaagcactctgcgtcgctgagct

SEQ ID NO: 722794 - DNA, 120 bp, Artificial Sequence
  ENSG00000197971_20 (sequence is synthesized)
gaggtcggctctgcgatccatacgtggccgcacccacacagcacgtgctgtgacgatggctgaacggaaagtgtacactgttcctgaatattgaaataaaacaataaacttttaatggta

SEQ ID NO: 722795 - DNA, 120 bp, Artificial Sequence
  ENSG00000197971_21 (sequence is synthesized)
aacattgtgacgcctcgcacaccacccccgtcgcagggaaaggggagaggactgtccctgagcagatttagctggggggccgaaggccagagaccaggatttggctacggaggcagagcg

SEQ ID NO: 722796 - DNA, 120 bp, Artificial Sequence
  ENSG00000197971_22 (sequence is synthesized)
aagctgtgttgtgtgtttcctgcgtgaagggggccgaaggccagagaccaggatttggctacggaggcagagcgtccgactataaatcggctcacaagggattcaagggagtcgatgccc

SEQ ID NO: 722797 - DNA, 120 bp, Artificial Sequence
  ENSG00000197971_23 (sequence is synthesized)
caggctgctccaggtcccctggaagctccagatccagatccctgactgggggtgtaggtcaggaggaacgcggggcctcattctgggactcccccaacctcctcctcttccaccatcagg

SEQ ID NO: 722798 - DNA, 120 bp, Artificial Sequence
  ENSG00000197971_24 (sequence is synthesized)
actgtccctgagcagatttagctgggtaggtgacgaacgcacttccatcggcttcctcttccgtcccagtcctcacagccccgcaacttttgtgttctgctctgtttcggttgcttcctg

SEQ ID NO: 722799 - DNA, 120 bp, Artificial Sequence
  ENSG00000197971_25 (sequence is synthesized)
gcctccttttctctcctctcgagacctctctgcccacagctgggatcgggccgccttgtcttccactggggaaatgaaacgtggtcttcccttccggaaggtctggtctcttgcttctgt

SEQ ID NO: 722800 - DNA, 120 bp, Artificial Sequence
  ENSG00000197971_26 (sequence is synthesized)
accacgtccgagaaaatgtttaacttcctccaacacaaccagtgcgagaagccccaggaacccgcatgtggaagtgggactggctggcccgtctcagtgaccccagatgctgacactggg

SEQ ID NO: 722801 - DNA, 120 bp, Artificial Sequence
  ENSG00000197971_27 (sequence is synthesized)
aaaatgattctgctgatgaacagaaaaagaggctaaatagagttgctcgatttataataacctcattaatccaaagatttttgttttgtatgtgtttaaataataattaaaacatagata

SEQ ID NO: 722802 - DNA, 120 bp, Artificial Sequence
  ENSG00000197971_28 (sequence is synthesized)
tcaagccatccagaaaatcttccttaggaattttaggctggttaatactgaaagcaaactttcaaggaaggtttaaaatggccaatttgaactttctagtgaaaaaatttggtgtctgag

SEQ ID NO: 722803 - DNA, 120 bp, Artificial Sequence
  ENSG00000197971_29 (sequence is synthesized)
ccaaattaaaatgccaatcattatattctaaccaaacttacagactttagttactagcaaataccagatatgattcttactgtataaaagttataattttagaataaaatggaggaataa

SEQ ID NO: 722804 - DNA, 120 bp, Artificial Sequence
  ENSG00000197971_30 (sequence is synthesized)
ccaccaacgtattgtagataggttgtgtctgtctccgaaactgcaatgctctcatacgctagaacagagcctacctacactttctgctcaattaataagcatcatataaatgaatgaata

SEQ ID NO: 722805 - DNA, 120 bp, Artificial Sequence
  ENSG00000197971_31 (sequence is synthesized)
tacggacatcgcccagagcagcaacatcctgcggaaaagagtgtcagtggcatcttttgttatgcagaggagatggaatcctcccaggtgactgatagctgagagggagggaaactatca

SEQ ID NO: 722806 - DNA, 120 bp, Artificial Sequence
  ENSG00000197971_32 (sequence is synthesized)
caggaagagctgccacagggctcccctctgcctggctcctgcagaccccatcttcacagaaaggaaagccagatcactcagaaagtcacttccttccggtcacccaaacccacacctgga

SEQ ID NO: 722807 - DNA, 120 bp, Artificial Sequence
  ENSG00000197971_33 (sequence is synthesized)
ttgctgtgacacggctgtcatgccattgagcgccaaattccctgggaaattcttcctttctgatctgactgcagtgtgctggcaattgacagatctgtacgtgtaaaatttctactttat

SEQ ID NO: 722808 - DNA, 120 bp, Artificial Sequence
  ENSG00000197971_34 (sequence is synthesized)
ccctacagcgctgcgcgactgctttgcagaagccagatgattctgcctgtgcaggaatgaagtgcgacccggcgcgcgagggagggaggcctctgcgctttggctccggccgcgcctcct

SEQ ID NO: 722809 - DNA, 120 bp, Artificial Sequence
  ENSG00000197971_35 (sequence is synthesized)
ccctgggatccggtctagggctggcgagctccgcggatccctgctcagagcggggctgctgcaccacctgccgcgggtggccaaagcagaaaaaaaagaaaaaaatgggagtggggaata

SEQ ID NO: 722810 - DNA, 120 bp, Artificial Sequence
  ENSG00000197971_36 (sequence is synthesized)
cgtgcacctgcactctcactcggggaagcctttgatttttttattgcatgggtgatccatggatctgtctgtactcattactaaaacatagaggctgggatcattgcttcatgtctgtaa

SEQ ID NO: 722811 - DNA, 120 bp, Artificial Sequence
  ENSG00000197971_37 (sequence is synthesized)
cgcttgagcccaggagctcaagaccagcccgggcaacacaatgagacctcgtctctacaaaaaataaaataaataaattagccaggtgtggtggcatgcacccgtggccccagatacttg

SEQ ID NO: 722812 - DNA, 120 bp, Artificial Sequence
  ENSG00000197971_38 (sequence is synthesized)
acaaaaaataaaataaataaattagccaggtgtggtggcatgcacccgtggccccagatacttgggaggctgaagtgagaggatcacttgggcccaggaggtcgaggctgcagtgagcta

SEQ ID NO: 722813 - DNA, 120 bp, Artificial Sequence
  ENSG00000197971_39 (sequence is synthesized)
agagcaagacgctgtctaaaaaaaattaaaatgtcggctgtgtagatacgtggcagatacagccccttcctcccctcctgcaatcccttcccatctcggttttgtttttgctcgcatgcc

SEQ ID NO: 722814 - DNA, 120 bp, Artificial Sequence
  ENSG00000197971_40 (sequence is synthesized)
caattctaaatgccccacttctttcatgcatgaattgcaaaaagatgtggcaagttttgtttctaccaagaaaactaaaaacaccttttgtcaaataaatgctccttgcatatttaactt

SEQ ID NO: 722815 - DNA, 120 bp, Artificial Sequence
  ENSG00000197971_41 (sequence is synthesized)
atgcaccagtggccttttaaacagtcaatgtcccatcaaggtgcctgcacatctgggctctccgggagcagccatggcagcacccgggaagaaacgctgatgtggctgctctgcatgctc

SEQ ID NO: 722816 - DNA, 120 bp, Artificial Sequence
  ENSG00000197971_42 (sequence is synthesized)
agatgacttcatcgggaagcctgggtgcattttacgctgggtgccaaatctcgagtaactgaggaattcccagagccttctgaaacacagagctgcaataaggctgctccatccaggaga

SEQ ID NO: 722817 - DNA, 120 bp, Artificial Sequence
  ENSG00000197971_43 (sequence is synthesized)
aacattgtctatacttcttcaccaactaggacagaagtggggaggctgggcacccgggtgcttctggcagctgatggatgctagccaccctcagcaggcaggagcccgttaggaaatgga

SEQ ID NO: 722818 - DNA, 120 bp, Artificial Sequence
  ENSG00000197971_44 (sequence is synthesized)
ctactttttaattggattgtttggttttaacaactgagttttcctaattctttatattttctagatgctggccttaccactcggtgattattttctaccactttatcttgttttttcacc

SEQ ID NO: 722819 - DNA, 120 bp, Artificial Sequence
  ENSG00000197971_45 (sequence is synthesized)
ctcttcacagagtcctttgcagaaagttttacattttgttgaattcaagtttattaattttaccttttttggattttgatttttggtgtgaagtctaagtcttcacctagcctgaggttc

SEQ ID NO: 722820 - DNA, 120 bp, Artificial Sequence
  ENSG00000197971_46 (sequence is synthesized)
tgtgaggtttaggttgaggcttatttgttttggtttggtttgggttttgccaacgaatgtccaatagctccgggactattagttgaaaagcctctgaagagccaatccattcaggatggg

SEQ ID NO: 722821 - DNA, 120 bp, Artificial Sequence
  ENSG00000197971_47 (sequence is synthesized)
gaaagaacagggaaagaaaacagaaggtggggaagaggaaggaagagagggaggaaggggcagggtacttgagagaccatgaggatcccagatcagtcccacacatgattacactgaatt

SEQ ID NO: 722822 - DNA, 120 bp, Artificial Sequence
  ENSG00000197971_48 (sequence is synthesized)
atgaactaagatatttaccgaaacgttttccattaatgcatatttgacttgctttttctgacctaatgaatttgcaaaacgatgacaatcatgtagcaaatgtacatggactagtactca

SEQ ID NO: 722823 - DNA, 120 bp, Artificial Sequence
  ENSG00000197971_49 (sequence is synthesized)
caattaattttttattttctatgccagcaggagacaaagatgatagaagaatgaaattcatttttgacccagaaatcttattttagctactgctttatctgctcttaattttctaggagt

SEQ ID NO: 722824 - DNA, 120 bp, Artificial Sequence
  ENSG00000197971_50 (sequence is synthesized)
ggactttggggccgtcgtgccggatcctccctgaatgtggagcgatggggggttgcacacaggccgttctgccccagcagctaacaagaaagacccttgcattcctccctgcatctctcc

SEQ ID NO: 722825 - DNA, 120 bp, Artificial Sequence
  ENSG00000197971_51 (sequence is synthesized)
cttttgggtcctactaatgtctgttgaatttctcttttttccaaagcaaaatccttctctgcattttgtctgcttgtctgtttcccagagccgcaggactctctccttgtctggagttcc

SEQ ID NO: 722826 - DNA, 120 bp, Artificial Sequence
  ENSG00000197971_52 (sequence is synthesized)
agagagcccccactttctctttctaagctgtgttgtgtgtttcctggtacattctaggttccccaaagataaacatgactaaggattggaaaggaggaaaggccgcgcagattgttaatc

SEQ ID NO: 722827 - DNA, 120 bp, Artificial Sequence
  ENSG00000197971_53 (sequence is synthesized)
tgaaagtcaatccccggatttagctctcaaaaatgctttatttttggagaaaagcaatagagtaagacagaaggacttaacgcttgcagggaagtggctttctgccatgtagagccaggc

SEQ ID NO: 722828 - DNA, 120 bp, Artificial Sequence
  ENSG00000197971_54 (sequence is synthesized)
tggcaacctgccctctgccatcagggagtgagcatgaacctggaaacctctaggacgcaagagcgaggctggctgtcccctcgtgtgcagtgcttagaccttcttgccacacatcccgtc

SEQ ID NO: 722829 - DNA, 120 bp, Artificial Sequence
  ENSG00000197971_55 (sequence is synthesized)
cctcacctcactggatagcccccgaatcaactgttcacacgaaagcagctgcctggttctgagtggccatgctcactcccaagcacaggctgaatgaaaagaaaactgtgcaagtagctt

SEQ ID NO: 722830 - DNA, 120 bp, Artificial Sequence
  ENSG00000197971_56 (sequence is synthesized)
gtatggtgggaagcccccagcagaggctgagggtgcagccaggtgctctggaagccttgaggcctctggtgtcatcttcctcacctctaaataagagatgggctaggttggtcaaggtcc

SEQ ID NO: 722831 - DNA, 120 bp, Artificial Sequence
  ENSG00000197971_57 (sequence is synthesized)
tccctgtcctaaaacactttaatgaaatggaagaaaggctgcaggctgatagaggagggacagtctggtttggttccctcaagtcttcaggagagggctcaaggacagtctcccatttct

SEQ ID NO: 722832 - DNA, 120 bp, Artificial Sequence
  ENSG00000197971_58 (sequence is synthesized)
tgttggcaaaatgtaaagtgcagtctggaccctgtccattgagtagagactcaggaggccaaccaagatccctgaaaagctaacagcgtggtcagccttcccacagacagtgcacccacc

SEQ ID NO: 722833 - DNA, 120 bp, Artificial Sequence
  ENSG00000197971_59 (sequence is synthesized)
gtgggaggacacttcgccccccattgttaacgtccaccgcgcccagactcccacagcgagctccttcccttcctccccatgtttgcagtggagttcccactcgagaagacagcacagtag

SEQ ID NO: 722834 - DNA, 120 bp, Artificial Sequence
  ENSG00000197971_60 (sequence is synthesized)
caagtagaggctggtcctgggacactcgcacccatgtgtgtcaggaagcccctgcggtcacacggcccatgaggaagccagaggggctgctggggctgatgaggccagggcagggcggcc

SEQ ID NO: 722835 - DNA, 120 bp, Artificial Sequence
  ENSG00000197971_61 (sequence is synthesized)
tgctcttccataaatgacagctggcaccaaagcccagagctggcagcctccacctgaggagtggcatctccatgaacggcttgtgttctcgcacagccccattgcgtagatgaggaaact

SEQ ID NO: 722836 - DNA, 120 bp, Artificial Sequence
  ENSG00000197971_62 (sequence is synthesized)
gaagctcagagaggttcctgcccttgcccaaggccacacagccggatgagctagaaaggtgctaggggactgggaggtgggggagctgagacgctgtcccgctgctgccaggatgcggcc

SEQ ID NO: 722837 - DNA, 120 bp, Artificial Sequence
  ENSG00000197971_63 (sequence is synthesized)
gccccccgtgccagccaggcctgcctcctccctctgtccggctcagcagccccggcctcctgttgctcccagtccgagctatggccaagggagactgattcctgctcaccctgggagaga

SEQ ID NO: 722838 - DNA, 120 bp, Artificial Sequence
  ENSG00000197971_64 (sequence is synthesized)
gctcaggattttgtctcaaaaccttataaaagatacgaggctcgacattttactaaggccgaggactcttgatctcccagacagatcctagaaccacagggcacatgtgaccagaatcca

SEQ ID NO: 722839 - DNA, 120 bp, Artificial Sequence
  ENSG00000197971_65 (sequence is synthesized)
atctgtgcaaatcaatcagcaaaaggagcccccagcaaaggcgcaggccggggcctccggggaccggcacctacacagcgcacagccccccagggtccgagtcctccaaacccgtgtagg

SEQ ID NO: 722840 - DNA, 120 bp, Artificial Sequence
  ENSG00000197971_66 (sequence is synthesized)
caggagcctccttaccttgatttgcttgatgtttgctaatcttctcttgaacaccccacagcgtgaaggtaagcaactgttccctaaacgacttagatccttaaaatatgtgtggttggg

SEQ ID NO: 722841 - DNA, 120 bp, Artificial Sequence
  ENSG00000197971_67 (sequence is synthesized)
ccgcatatctcatgagagagcctccgcccaaaccagagccctcctctctctgcggccaacaccctggtagacctgggggagcagcctctcccgcccccaccccctcagcgtggtgctggc

SEQ ID NO: 722842 - DNA, 120 bp, Artificial Sequence
  ENSG00000197971_68 (sequence is synthesized)
ccgtggctcctgaaccactcaccagtccagtccggggcctgggcccttccccggggccctggtggcagctcccagtggctcaagcagcgtgcccagcaccgcgggtggaggttgagctcc

SEQ ID NO: 722843 - DNA, 120 bp, Artificial Sequence
  ENSG00000197971_69 (sequence is synthesized)
ccaaaatttttaagctggtaaggtaccctctgctcagctccactgagcggggactaagggctcccagaatccccaactaagctgagtacaagggtggctgccgcctctggctcagccgca

SEQ ID NO: 722844 - DNA, 120 bp, Artificial Sequence
  ENSG00000197971_70 (sequence is synthesized)
ctgtaccctggacgtgctctgtcccagcaggcgtgcaggggctcaggtggcattgcccacccgcatttacgcgtggatttcctccgagatgcatgtgaagccggaggtgcttgaggaagg

SEQ ID NO: 722845 - DNA, 120 bp, Artificial Sequence
  ENSG00000197971_71 (sequence is synthesized)
gctgcgcctgggctggttcaggggccctggagcaggcgactgaccttgactctggggcagggcccagctggagtccaacttgctcatgcccaggggttggggccctcagggagctaaagc

SEQ ID NO: 722846 - DNA, 120 bp, Artificial Sequence
  ENSG00000197971_72 (sequence is synthesized)
aggagtcaagcagacgtgggtgtcggggggagatccctggagccacgggagggaatgcccaggagacctccagggagtggggagtgtcccgtcggctcatgaggacctggaaccagaccc

SEQ ID NO: 722847 - DNA, 120 bp, Artificial Sequence
  ENSG00000197971_73 (sequence is synthesized)
aggacgaatgccaggcccgctgtttataagctctgtctctgagacttggttttctcatctgtaaaatggaggtaacccgcccactcagctcacaaaatcgctgtgaaagtaaaaggtagt

SEQ ID NO: 722848 - DNA, 120 bp, Artificial Sequence
  ENSG00000197971_74 (sequence is synthesized)
gacaaacacaaaacgcggctggcaggtgcgcggctcggattccttagataagcagtcacctttattattgttaaacgtcacccagaaaacccttaactcttagacagcggctctcattaa

SEQ ID NO: 722849 - DNA, 120 bp, Artificial Sequence
  ENSG00000197971_75 (sequence is synthesized)
gcaaaaggggaggcacatgaagctccaggcagggccgggagggaaccgtgaagccaaaggctctgggagcccccaggcacctgcgtttgcattttcatcctggaggagaccaggcttctg

SEQ ID NO: 722850 - DNA, 120 bp, Artificial Sequence
  ENSG00000197971_76 (sequence is synthesized)
gggctgctccccggggtgcagagaggaggggtctttcttggtgtgtaacatactcattgattcagtcacctgacctttgactccatgtattttgttgagtctggatgtgtggtgtgctct

SEQ ID NO: 722851 - DNA, 120 bp, Artificial Sequence
  ENSG00000197971_77 (sequence is synthesized)
cctcgattctgggaggttctgggaggttctgtggacaacaggcaattcagggcacagcccctgctcttaaggatagccggtcttaggagaagcttttaatatgtgaagtgagcagggagt

SEQ ID NO: 722852 - DNA, 120 bp, Artificial Sequence
  ENSG00000197971_78 (sequence is synthesized)
aactgagctgctaagtaagcagctttatgtcagatgaagtggtaggcaggatccactcctcaacgtaaattctgagttaagaaaaaaattctccaaatattcaagtctcagggccatcat

SEQ ID NO: 722853 - DNA, 120 bp, Artificial Sequence
  ENSG00000197971_79 (sequence is synthesized)
gctgtacattgccgcagttctgggatgtggccacaagagggcggagatgaggctccccggggagcagtgtctgaacccagcactgcagtcaggacggccccgccccacctggccagcacg

SEQ ID NO: 722854 - DNA, 120 bp, Artificial Sequence
  ENSG00000197971_80 (sequence is synthesized)
tcacctgcctctgaatcgcctgggatgcacgcccagacccctatctgcgctccgccacagcctcactgagtcagaatgtccaagggcgaactaggtgttgctagttgtgatgattttgca

SEQ ID NO: 722855 - DNA, 120 bp, Artificial Sequence
  ENSG00000197971_81 (sequence is synthesized)
gacaccgtgctcacctgggaaacacggattcatcccatctggaaaactaattactccactaccagcttaaggactgttagacacaccgggagagctgagtgctggctcagagttgatggg

SEQ ID NO: 722856 - DNA, 120 bp, Artificial Sequence
  ENSG00000197971_82 (sequence is synthesized)
agggcccagatgagtgaggggccccatttagcaaatattgtccttgcaatatatgcaaggcttacaaccagtcactcaaagatgcttgcaaggccagagcttaccaagaccaccctgagg

SEQ ID NO: 722857 - DNA, 120 bp, Artificial Sequence
  ENSG00000197971_83 (sequence is synthesized)
aacagaaagctgcatttagatctgcacatttactgtgtgcaaatataaccagtgtactatacacatgtgtttcctgaaataagttcagtattttccctgaacttttttgtaagaagcttt

SEQ ID NO: 722858 - DNA, 120 bp, Artificial Sequence
  ENSG00000197971_84 (sequence is synthesized)
taaaaattatttaatttctgtagagttcaagggaagcttctatgtatcaaagcaaatttcaaatcatatggttgtaattaaattttactgcataaaaagttcataactggcctactatgg

SEQ ID NO: 722859 - DNA, 120 bp, Artificial Sequence
  ENSG00000197971_85 (sequence is synthesized)
ccatatggctgaattagttgacttggagcacttccaatagattaataaatcagctcccccagaaatgagggggtctagaggcaggcagatggagaggacagggacttcatagcatttaac

SEQ ID NO: 722860 - DNA, 120 bp, Artificial Sequence
  ENSG00000197971_86 (sequence is synthesized)
atcattttaccatctttccttcctgttctttttggtgctgttggaaatcagtagtgagaggaaaacactcaaatctggaagtctagcgctgtcggtaggaactgggtagaaaaaactatg

SEQ ID NO: 722861 - DNA, 120 bp, Artificial Sequence
  ENSG00000197971_87 (sequence is synthesized)
catgtccccccatcactcggaaactacatcagaacatcataggagcatcctgtttccatgtgcattagtttccacgaacatacatgtgaatgttttcccacctgtagtgttgctgtggag

SEQ ID NO: 722862 - DNA, 120 bp, Artificial Sequence
  ENSG00000197971_88 (sequence is synthesized)
ttgtgagatgtcaaagtggaggcaagagtatctgccttttgcagtaggctctgttcttttcctgtcctgagagaggaggtcagtctaaccctcaccttgtgagttcagccttatactgac

SEQ ID NO: 722863 - DNA, 120 bp, Artificial Sequence
  ENSG00000197971_89 (sequence is synthesized)
ctgagcccagggtggatcagatgctgagatcatgtgactccaagttgcaagacacgtaatagagagaagcgtgactgttgcatccatgcaggctctaatcctggctccttcgggctggct

SEQ ID NO: 722864 - DNA, 120 bp, Artificial Sequence
  ENSG00000197971_90 (sequence is synthesized)
gagctttggctcctgagctataaagagaggatgataggaacacctactccaggaggtgctgtgagcacaaaagagaaaacggggaaaaacgggtttcctgcatggtcagtgctcaacaaa

SEQ ID NO: 722865 - DNA, 120 bp, Artificial Sequence
  ENSG00000197971_91 (sequence is synthesized)
ttgtagtttcaatgataaaaagtaaaaccaatacacccaccattttcaatgtcaaaagggggcatcaagaaagttaagattgtacctcggtaggttaccttgccagaggctgcagggaac

SEQ ID NO: 722866 - DNA, 120 bp, Artificial Sequence
  ENSG00000197971_92 (sequence is synthesized)
ttactccatttcagcacagaagcactttgtttcataggacagtggttctaccactttccaggaagtccaaaggctgatctcttggaaatgcagcaaaaggtgaggtgagtgccaacttct

SEQ ID NO: 722867 - DNA, 120 bp, Artificial Sequence
  ENSG00000197971_93 (sequence is synthesized)
gggctactccagagggcagctccaatgccagagatgttcaagttaagccaggatcaaacaggaaaaacccacgctcccgagggagaggctggccctcgaggggcagggccctgcacctgt

SEQ ID NO: 722868 - DNA, 120 bp, Artificial Sequence
  ENSG00000197971_94 (sequence is synthesized)
cagtccccaggccggcaggaggcctccacggtatgtgagaaagctgcctgtcttgggagggaaatctcactagatggttcctgaagcggcttcgcaggctagcatttcataaacgttttc

SEQ ID NO: 722869 - DNA, 120 bp, Artificial Sequence
  ENSG00000197971_95 (sequence is synthesized)
acttgtgaaaacaaaaatcccttgagtgagttgtgtaagcacaacatagaggcttgtttataatgctacgtatgtacttggaaaaccccccaagaagtcagaactgtcaccttggtctgt

SEQ ID NO: 722870 - DNA, 120 bp, Artificial Sequence
  ENSG00000197971_96 (sequence is synthesized)
tagctgcgttacttggaaggattcttggcgtctgcgctctggttatttgtgttactgggcagtgtggaagacgtagaattagatgaggacagtgttggttcgttgctgatcggccacggt

SEQ ID NO: 722871 - DNA, 120 bp, Artificial Sequence
  ENSG00000197971_97 (sequence is synthesized)
aaagagcatatttcttttctatcttgctttctgggggctcttcgccaaaattgatcatttcataaaagaggggaaacccaaggagagagactaaactttgaataaaaatttgaatgcaaa

SEQ ID NO: 722872 - DNA, 120 bp, Artificial Sequence
  ENSG00000197971_98 (sequence is synthesized)
aaaagtgcagttctgcttcgtcgatctaagtgacattctgagtgaccaacgcattcctctttctagagggatggccacgcctggctacctccacaccgtgggccacagcacacctgtgca

SEQ ID NO: 722873 - DNA, 120 bp, Artificial Sequence
  ENSG00000197971_99 (sequence is synthesized)
ccatctcaattagctgccaactctcttttaaacatcgaaattatttgtcccccaaacgtgtaaatgcatggttttaagaccccttcaagtcaaagtttgcagacaaagctctctgtgcat

SEQ ID NO: 722874 - DNA, 120 bp, Artificial Sequence
  ENSG00000197971_100 (sequence is synthesized)
ttgatttgtctggtgtggcagatgagatggcacataggagggacgtccccagggatggacacgtggctttgctctttgctggcgcgtgtagcaaggggtgtgctagggtcccgccgaaaa

SEQ ID NO: 722875 - DNA, 120 bp, Artificial Sequence
  ENSG00000197971_101 (sequence is synthesized)
agaagttgctcctgttgtcgctggcagttcccctcggctgccctggcacctctagctgacgagaaaaagtgctcattcaaagcaaagcaatggagcggctgcactttcacccacagaagt

SEQ ID NO: 722876 - DNA, 120 bp, Artificial Sequence
  ENSG00000197971_102 (sequence is synthesized)
gcagcgttgttttgcagagcagtggttatgccaggcaccactccctggggcctgggaatccgattccagttctctctcacagaactggaaattcaattagcatttgctgagggaggtcgg

SEQ ID NO: 722877 - DNA, 120 bp, Artificial Sequence
  ENSG00000197971_103 (sequence is synthesized)
gagaaatggaatgaaaagaccagctctccggggtgccatttctattagcagatgagagagacacccaatggctcagcatccacccgggaccacagaagaggggatgctggtgtgggagga

SEQ ID NO: 722878 - DNA, 120 bp, Artificial Sequence
  ENSG00000197971_104 (sequence is synthesized)
gctcttccttccatcatccatcatctgcacatgccttcttctctccctgtcgtccttcatcctccaccccccgctcactcctcctcactctgggctcttgccaagccagctctagaggag

SEQ ID NO: 722879 - DNA, 120 bp, Artificial Sequence
  ENSG00000197971_105 (sequence is synthesized)
caagaacattgtaagtgacgatcgatgggaagaggtagcaactgtgagggggaggaggggtgctggccactgctgtcatccacacaggacgttcgtacgctcgggggtggcaccggggtc

SEQ ID NO: 722880 - DNA, 120 bp, Artificial Sequence
  ENSG00000197971_106 (sequence is synthesized)
atcatcagggtgaggccggccggggaactcccccctcgcacctgatcgcgagttccaggcaagcgcttcccgactgtatctgccacggattgcaccgtgcgctccgtgcgttctccagag

SEQ ID NO: 722881 - DNA, 120 bp, Artificial Sequence
  ENSG00000197971_107 (sequence is synthesized)
tagaccttctctaaaatcccataatgtaccaaagagagagttaggctccgagctaccagaatccatcccaaaacgtgttgccaggcagctcccaagtagaacaggtcggcagatccatgc

SEQ ID NO: 722882 - DNA, 120 bp, Artificial Sequence
  ENSG00000197971_108 (sequence is synthesized)
acccctcctgtccctcccgcacctgcacagccgctgtggccctgagcctgcggcccccctcggagctccgggtggaacctgtttttaccacctcagctccactgtgctttgactgtgttt

SEQ ID NO: 722883 - DNA, 120 bp, Artificial Sequence
  ENSG00000197971_109 (sequence is synthesized)
cctgttgattgaaaggactttcccttcactgaccaccatgtcattatttctctgtcttcctcatgcaggggagaggactgtccctgagcagatttagctgggtaggtgacgaacgcactt

SEQ ID NO: 722884 - DNA, 120 bp, Artificial Sequence
  ENSG00000197971_110 (sequence is synthesized)
gacgagctccagaccatccaagaagacagtgcagccacctccgagagcctggatgtgatggcgtcacagaagagaccctcccagaggcacagagacacgggcatccttgactccatcggg

SEQ ID NO: 722885 - DNA, 120 bp, Artificial Sequence
  ENSG00000197971_111 (sequence is synthesized)
gagaaatcagtaggtgaactcagccattagaggaagaactggcacgtagcctcttgctgtctaaggtctcgttccgtgctggagaatgcatatgagcccaagagtgtgggcctgagtggc

SEQ ID NO: 722886 - DNA, 120 bp, Artificial Sequence
  ENSG00000197971_112 (sequence is synthesized)
tgcttaggacgttttcgtttaactcaccccctcttttcctcacaagggatggtggccggggtgtggctcaggaatgtaaggacatgctgaattctggatctctaagggtgcctggacatg

SEQ ID NO: 722887 - DNA, 120 bp, Artificial Sequence
  ENSG00000197971_113 (sequence is synthesized)
ggcgttgcagaaagagagccacattctcagggtctctggtggtgtgtgcttgcggacttgatgactgatgttgcctctgcagcccacacgctggggttcaacactgggttatgctcgttt

SEQ ID NO: 722888 - DNA, 120 bp, Artificial Sequence
  ENSG00000197971_114 (sequence is synthesized)
tttcctggagtcagtgctgctagcttcatgttgctctgcgacaatcataggattgaggtcgaggaagacttttgaacaaactcctcaatttaaatccgccttgagcaaacgttctctgtg

SEQ ID NO: 722889 - DNA, 120 bp, Artificial Sequence
  ENSG00000197971_115 (sequence is synthesized)
gtctgagaagtggaaggggggagggataaatgagtgtctatgaatcaaagctttattatcttgtgattccattaatttgcatacagagtcttagaagtttctttattcaaaagcaaatgt

SEQ ID NO: 722890 - DNA, 120 bp, Artificial Sequence
  ENSG00000197971_116 (sequence is synthesized)
ggataaaaatgtattacaaaaaaaaaaaactctgctatggggtccagagtctaggagtggtttctgcagttgattgtcagtggagaacctgtggctgctggttcatcaaagcgctggtcc

SEQ ID NO: 722891 - DNA, 120 bp, Artificial Sequence
  ENSG00000197971_117 (sequence is synthesized)
ctgagtgccattcagattgcagatgcagtattttacgtgatgtttagagtgtttggtggttgtgtaattttggagagaaagaagtttttcccaaaaaagtccctagtttattgggtgttc

SEQ ID NO: 722892 - DNA, 120 bp, Artificial Sequence
  ENSG00000197971_118 (sequence is synthesized)
tcacacaacctgtaagatgaagctgtttttctgcctgtgtgcagggctgattctggaattccagaaggccttgtgggagcgtaaaaggcttttgaataaagtgtggaacagagcgcctca

SEQ ID NO: 722893 - DNA, 120 bp, Artificial Sequence
  ENSG00000197971_119 (sequence is synthesized)
ttctgataacatgcaatcataaaaaccatagggcaacttggagttaaggagtttctagaatttgctttagtctccaactgcaattctttattgatcatgaaattgttgaagagaaacaca

SEQ ID NO: 722894 - DNA, 120 bp, Artificial Sequence
  ENSG00000197971_120 (sequence is synthesized)
aatgtcagttttacctttcctgtgggcgtgaaagcacatcgaagtttcaggcaactgttaacatctctaccatctgtctgagttgagatttcaggttgtgacacttgccgtgacttattt

SEQ ID NO: 722895 - DNA, 120 bp, Artificial Sequence
  ENSG00000197971_121 (sequence is synthesized)
gtaaatgacattttgtgtgtcttagatactaatggaattcatattctggctagttctttcagtgcatttgtagacatgttcttttcctttgtagcagtcctccctcaccctgaaatgttg

SEQ ID NO: 722896 - DNA, 120 bp, Artificial Sequence
  ENSG00000197971_122 (sequence is synthesized)
gtgttctaaccgatttctaatgctaatttcaactggaagcactttttcaagcccagctatcaaaccacaccagacatgtatggattcgggttgcccaataaagcgttgctattatgtaag

SEQ ID NO: 722897 - DNA, 120 bp, Artificial Sequence
  ENSG00000197971_123 (sequence is synthesized)
catccctcacgcatacagcatcaccagttttgaaagcttgaactattctgcttacttcaaggtacagaaaaaaaaaatgtacttaaactgtgcagaaaagatgaaatcactggataatat

SEQ ID NO: 722898 - DNA, 120 bp, Artificial Sequence
  ENSG00000197971_124 (sequence is synthesized)
aaataaaatggtgaaagcattgatatcaatcattgtgactttatctcaaaacaatattgacacacatagatgtttttcttcctttatggtaagattacagcctttattgtcttaaatctc

SEQ ID NO: 722899 - DNA, 120 bp, Artificial Sequence
  ENSG00000197971_125 (sequence is synthesized)
ttatactcttcaatattttcaaagaaaacattctagtctcagaaatagtccatctctttgcaaaacagggctggccaattatcaaggacccataaaaatcaaaacactttcaaaaatttt

SEQ ID NO: 722900 - DNA, 120 bp, Artificial Sequence
  ENSG00000197971_126 (sequence is synthesized)
aaaaataaaaataattttcacatgattgctttaggaattttgaagtatccattcttttcactatggagtgttgaatatagaagattttttaatgaacaggcttgccctttgatgccaaag

SEQ ID NO: 722901 - DNA, 120 bp, Artificial Sequence
  ENSG00000197971_127 (sequence is synthesized)
gcaaaaaataataataataacatttgcacgtgtgatcacagagcagctgtgaggcatcccgggggagcgcacgcagtggggatgtgattgctccactcaactattttatcacaaagtgtt

SEQ ID NO: 722902 - DNA, 120 bp, Artificial Sequence
  ENSG00000197971_128 (sequence is synthesized)
gtaaacatgggagatgaaagcttaactctctctacacccagctacagacccgcaatggccctaaaaatctggggtattcattgggtgggctgccatggaggaatttttggttttgttttt

SEQ ID NO: 722903 - DNA, 120 bp, Artificial Sequence
  ENSG00000197971_129 (sequence is synthesized)
atttttatttgttgttctgtttacaaatcaggagagcccctgtttttatatgctaggaaggtccttgggataggccgaagaggtgtgcaaacgagcagtggaaggcccgggccctgtctc

SEQ ID NO: 722904 - DNA, 120 bp, Artificial Sequence
  ENSG00000197971_130 (sequence is synthesized)
tcaggaccacggcggcctgccccacacacagttctgcttctccctatctagaacgaggttttcctggcagattcctgccagactctgagtggagcccccccatgaccctataaaaggggc

SEQ ID NO: 722905 - DNA, 120 bp, Artificial Sequence
  ENSG00000197971_131 (sequence is synthesized)
tgtttgtcctcctcccaccctcctgtgctcttcctccctccccttgagggcacatggccgctggtaccacatgttggagcggccgcccccgagcccgggaatgccctaacaacacccatg

SEQ ID NO: 722906 - DNA, 120 bp, Artificial Sequence
  ENSG00000197971_132 (sequence is synthesized)
cttgtgttgctgggagctgacattcaagaaaagtgcattaaaaattccttgagaaggcatattcttttgagagccgtaaatgaaaagtgcattcacggagaacatgctcctttgttgtga

SEQ ID NO: 722907 - DNA, 120 bp, Artificial Sequence
  ENSG00000197971_133 (sequence is synthesized)
gaggaaagaaaggactgttgttgcctttaaggaacaggtttcccagttccccggaatgtcagggtcacatgaggaatgggtgagcacttagggccaagattgtcgtgtgcttggcccggc

SEQ ID NO: 722908 - DNA, 120 bp, Artificial Sequence
  ENSG00000197971_134 (sequence is synthesized)
agcttctctctaagtgacctctccagcatcactctgtgccagtgctcatatctgaggccacttgagtgtcacgaggcagagcctggaaacattagctttggaaaccgttccttccttttt

SEQ ID NO: 722909 - DNA, 120 bp, Artificial Sequence
  ENSG00000197971_135 (sequence is synthesized)
atgtggaggaagtaaggtttcacaagacacctaagctggacatggtgatgtgccacttggatagttcccaaagcagaaagcagccaggacatcccagtaccccacttctccgtgccgtgt

SEQ ID NO: 722910 - DNA, 120 bp, Artificial Sequence
  ENSG00000197971_136 (sequence is synthesized)
acttttagggaggttttcgaaagctagcttcttaccgatgattttgtctatttttctgttttatgtgaaaaccttcatttataacctgctcttctcagtgttcttctattcagcattcag

SEQ ID NO: 722911 - DNA, 120 bp, Artificial Sequence
  ENSG00000197971_137 (sequence is synthesized)
tatgacttctatgcctctaattgcgactgtatggagaagaactgtttgtcattcagtgccgtgggatataatcagtcctgtaaattcatcagaatgttctgttgcctgattttttttcca

SEQ ID NO: 722912 - DNA, 120 bp, Artificial Sequence
  ENSG00000197971_138 (sequence is synthesized)
ttgcattttaatttcattaaacatattttagttctacagtaacctaattcctcattgttaccatgagatcctaattctgtagctgtgttctgtaatcccatggggcgtgtaccatttgga

SEQ ID NO: 722913 - DNA, 120 bp, Artificial Sequence
  ENSG00000197971_139 (sequence is synthesized)
gacacatgaaggatacagtagacagcacggaaggcagcagcaacacacaggggtgtcctccctccccagagcccagtgtgcacacagaaccaaattcaatctcattcatcgtgagcttgc

SEQ ID NO: 722914 - DNA, 120 bp, Artificial Sequence
  ENSG00000197971_140 (sequence is synthesized)
atggtaactgatccagccactcagtacctccattggataagagatttggccacagattcttctagagaaaatccaaatgtggagggtgcatttgtttctgcacccaaacaaatacctttt

SEQ ID NO: 722915 - DNA, 120 bp, Artificial Sequence
  ENSG00000197971_141 (sequence is synthesized)
gagatttcttataggcattcctctcaaagtctcattactctgatcagttattgatcggaggctaccctggctcagtcaccagctgctcactgtgtccttctgtggtctcaggagctgcag

SEQ ID NO: 722916 - DNA, 120 bp, Artificial Sequence
  ENSG00000197971_142 (sequence is synthesized)
ttgttgctgttgtatgaatagacgatagttaattagactggatgtgtctgtactggcagtgattttgcaacttcctctgtataagcgatacatttgtaaatcatgggaatgtatttgatg

SEQ ID NO: 722917 - DNA, 120 bp, Artificial Sequence
  ENSG00000197971_143 (sequence is synthesized)
gtaattgcctgtggtggttgtatcatgatttaattttattatgagcttttggctttatatatttttctgcctttttatgcattcattaaacagtttaacagaccaaggacagtgtactaa

SEQ ID NO: 722918 - DNA, 120 bp, Artificial Sequence
  ENSG00000197971_144 (sequence is synthesized)
tcctttcgcgtccacctgagcccccccgttttggaaggtggagtggggcttgggaaaaggttcaagcgtctttggggacccccgtgcgactctggctggaaacaggcgagctctggttcc

SEQ ID NO: 722919 - DNA, 120 bp, Artificial Sequence
  ENSG00000197971_145 (sequence is synthesized)
tttaggaagcaaagcattttgtgccatgggaaagcacaggaggaagaaccaaaaatgcttggctcaggtctcatggcactgcgtcatagccgtggacctggggcaggtgtctgtcttctc

SEQ ID NO: 722920 - DNA, 120 bp, Artificial Sequence
  ENSG00000197971_146 (sequence is synthesized)
tgagcttccttccctctcctgtgaaacagcaatggtggcaaaagcgtcacctgtcctgcagatgctttggaacgttgtgctgatcaagcaagaaaagcaatgcaaaggccccacaggagc

SEQ ID NO: 722921 - DNA, 120 bp, Artificial Sequence
  ENSG00000197976_0 (sequence is synthesized)
gtcatagagggcgggcggcgacggcggtggcggcgtcggaggcgcctccgggggacggtggcggctcccggcggtgaggccgcgcctgtccggggatcgtcgagggacggcgggagcttg

SEQ ID NO: 722922 - DNA, 120 bp, Artificial Sequence
  ENSG00000197976_1 (sequence is synthesized)
ggccagcggcggcggcggcctgggacgcaggcggagccccgcgcaggcccaaggtcccggaggctatggcagcggctaccatcgtgcacgacacgtctgaggccgtggagctctgccctg

SEQ ID NO: 722923 - DNA, 120 bp, Artificial Sequence
  ENSG00000197976_2 (sequence is synthesized)
cttacggcttgtacctgaagcccatcaccaagatgaccatcagcgtggcactcccgcagctgaagcagccggggaagtccatctccaactgggaggtgatggagaggctgaagggcatgg

SEQ ID NO: 722924 - DNA, 120 bp, Artificial Sequence
  ENSG00000197976_3 (sequence is synthesized)
tgcagaaccaccagttctccacgctgcgtatttccaagagcaccatggacttcatccgcttcgagggggaggtggagaacaagagcctggtcaagtcttttctggcctgcctggacggca

SEQ ID NO: 722925 - DNA, 120 bp, Artificial Sequence
  ENSG00000197976_4 (sequence is synthesized)
agaccatcaagctcagcggcttctccgacatcctgaaggtgcgcgcggccgagttcaagatcgacttccccacccgccacgactgggactccttcttccgcgacgccaaggacatgaacg

SEQ ID NO: 722926 - DNA, 120 bp, Artificial Sequence
  ENSG00000197976_5 (sequence is synthesized)
agaccctgccgggggagcggccggacaccatccacctggaggggctgccctgcaagtggttcgccctgaaggagtcgggctccgagaagcccagcgaggacgtcctggtcaaggtgtttg

SEQ ID NO: 722927 - DNA, 120 bp, Artificial Sequence
  ENSG00000197976_6 (sequence is synthesized)
agaagttcggggagatccggaatgtggacatccccatgctggacccctaccgggaggagatgacgggccgcaacttccacaccttcagtttcggggggcacttgaacttcgaggcctatg

SEQ ID NO: 722928 - DNA, 120 bp, Artificial Sequence
  ENSG00000197976_7 (sequence is synthesized)
tgcagtaccgcgagtacatgggcttcatccaggccatgagcgccctgcgcgggatgaaactcatgtacaagggcgaggacggcaaggccgtggcctgcaacatcaaggtttcttttgatt

SEQ ID NO: 722929 - DNA, 120 bp, Artificial Sequence
  ENSG00000197976_8 (sequence is synthesized)
cgaccaaacacctgagtgatgcctcaattaagaagcggcagctggagaggcagaagcttcaggaactggagcagcaaagagaagaacaaaagcgcagagagaaggaagcggaggagaggc

SEQ ID NO: 722930 - DNA, 120 bp, Artificial Sequence
  ENSG00000197976_9 (sequence is synthesized)
agcgagcggaggaaaggaaacaaaaggagctggaagagctggagcgagagaggaaaagagaagagaagcttcgcaagagggagcagaagcagagggaccgtgagctgcgccggaatcaga

SEQ ID NO: 722931 - DNA, 120 bp, Artificial Sequence
  ENSG00000197976_10 (sequence is synthesized)
agaagctggagaagctgcaggcggaggagcagaagcagctgcaggagaagatcaagctggaggagcgcaagctgctgctggcccagaggaacctgcagtccatccggctcatcgccgagc

SEQ ID NO: 722932 - DNA, 120 bp, Artificial Sequence
  ENSG00000197976_11 (sequence is synthesized)
tgctcagcagagccaaggctgtgaagctacgggaacaggagcagaaggaggagaagctgaggctccagcagcaggaggagcggcggcggctgcaggaggccgagctgcggcgcgtggagg

SEQ ID NO: 722933 - DNA, 120 bp, Artificial Sequence
  ENSG00000197976_12 (sequence is synthesized)
aggagaaggagcgcgcgctgggcctgcagcggaaagagcgggagctgcgcgagcggctgctgagcatcctgctgagcaagaagccggacgacagccacacacacgacgagctgggcgtgg

SEQ ID NO: 722934 - DNA, 120 bp, Artificial Sequence
  ENSG00000197976_13 (sequence is synthesized)
ccccctcgggggccagcccccggccggtgcccccaaggagagcccggcccacccagaggccgacggcgctcccaaaagcgtgaacgggagcgtggccgaggaggccccatgcaaggaggt

SEQ ID NO: 722935 - DNA, 120 bp, Artificial Sequence
  ENSG00000197976_14 (sequence is synthesized)
tcagagctcctgtcgtgtggtccccgaggatggctctccagagaagaggtgcccgggcggcgtcctctcctgcattcctgacaacaaccaacagcccaagggcatccctgcctgcgagca

SEQ ID NO: 722936 - DNA, 120 bp, Artificial Sequence
  ENSG00000197976_15 (sequence is synthesized)
gaatgtctccagaaaggacacccggtcagaacaggacaagtgcaaccgggagcccagcaagggccggggccgggccaccggagacgggcttgctgaccggcacaagcgggagaggagccg

SEQ ID NO: 722937 - DNA, 120 bp, Artificial Sequence
  ENSG00000197976_16 (sequence is synthesized)
ggccaggcgggccagcagcagggaggacgggaggccacgcaaggagcggcggccccacaagaagcacgcctacaaggatgacagcccccgccggcgcagcacgagcccggaccacacccg

SEQ ID NO: 722938 - DNA, 120 bp, Artificial Sequence
  ENSG00000197976_17 (sequence is synthesized)
gtcccggaggtcccacagcaaagacaggcaccggagggagcggagccgggagcggaggggcagcgccagcaggaagcacagccgccaccgccgccgaagcgagcggtcgcgctcccggtc

SEQ ID NO: 722939 - DNA, 120 bp, Artificial Sequence
  ENSG00000197976_18 (sequence is synthesized)
cccgagcaggcaccgcagtacctggaacaggtaatgacgggcacggcctccccacggcctgtccgggaaagaccaggacctgctcgagcctcctggccgctccttggccgctctccgtcc

SEQ ID NO: 722940 - DNA, 120 bp, Artificial Sequence
  ENSG00000197976_19 (sequence is synthesized)
acccctgcaaagccaagacccttctgcagccacgaatgtccacggagcccgccggcaggaaggaagacaccatgctttagagatccatctttctccactcaccgcagcgtacttggcact

SEQ ID NO: 722941 - DNA, 120 bp, Artificial Sequence
  ENSG00000197976_20 (sequence is synthesized)
tcagtttcaaacacgtagtcctttaaaacttgatccgatagctttaatgcggccggtcctctctcagtcaggaaaattgcacagaccgacagtcgtgaggatggcagagctgctgcattc

SEQ ID NO: 722942 - DNA, 120 bp, Artificial Sequence
  ENSG00000197976_21 (sequence is synthesized)
ccccacacggggatttctgtgtctgcttggcgacctccctgcgtgcacggcctaggaggtgcacgggccaccatagtcacactggcactgaaaagaaagcgttgccctggtgattctttc

SEQ ID NO: 722943 - DNA, 120 bp, Artificial Sequence
  ENSG00000197976_22 (sequence is synthesized)
ccccccgtttgtaatgttaactgatcaggaagtgcagtttgggtgggatgccgaatcgtcgtgctgacattgagtcacggatgaggaaggtacaagtcctttaagatcaaaactcaaacg

SEQ ID NO: 722944 - DNA, 120 bp, Artificial Sequence
  ENSG00000197976_23 (sequence is synthesized)
ggccgttctttctaaggtgtcggtatgtggggagtggtacaaaatggtctgatgctccttcaaaaacattcactttttacaacgtcaaggaattaagcataaaaaagattggttaaaagc

SEQ ID NO: 722945 - DNA, 120 bp, Artificial Sequence
  ENSG00000197976_24 (sequence is synthesized)
tttggtttctagtaaaggttagtgtgtgtggtttttttaagaagctgttttgctaaattatttttacttggaatgtttcaaacagatttcaggctgcaaacttgttttataatcgtttgc

SEQ ID NO: 722946 - DNA, 120 bp, Artificial Sequence
  ENSG00000197976_25 (sequence is synthesized)
ttctccaagtgaagctcagaaatacctaaaaatagctgtaacgttcgcgttaggaaagatggtgtttattccagtttgcatttttatggtgaaataaaatccttttccaatgaactaaaa

SEQ ID NO: 722947 - DNA, 120 bp, Artificial Sequence
  ENSG00000197976_26 (sequence is synthesized)
cgcgcccgggctgccctcagtgccctcccctgaaatgcgggcggcgtcacggcgccgtttccccgccggctgcagctgtagctacgaaaccagctttaatgccgaggatgacggctcctt

SEQ ID NO: 722948 - DNA, 120 bp, Artificial Sequence
  ENSG00000197976_27 (sequence is synthesized)
cccgggagggtgtagcgctcgtctgtcgttcccgatgatttcagagctgtgacggtttccttttgcaaagctggtgcattcaggttccccgagcaggctggcagcctcccgggggccagg

SEQ ID NO: 722949 - DNA, 120 bp, Artificial Sequence
  ENSG00000197976_28 (sequence is synthesized)
gcagaggctctctgtttcctttgggtcggggcagtggcagagagtgcagggggccgctccctctggcccgcgcctctgtgtgtggtcagctggcctggctgtgacctcaccagtggccca

SEQ ID NO: 722950 - DNA, 120 bp, Artificial Sequence
  ENSG00000197976_29 (sequence is synthesized)
gagcagaggggcaaggtgggctggggggagggctgagcgcacagagggggcctgccgtgggcccgggtccctcctccgcagcgtgaacctgacaggtctcaccagcgccggtactgacga

SEQ ID NO: 722951 - DNA, 120 bp, Artificial Sequence
  ENSG00000197976_30 (sequence is synthesized)
ccccctcagcaccaagagcctccctgctcctcctgcaggcgcgactggtaactcccatgagcccggggccagggcccacagacagacagacctccccaggacagacgtccccggcacgct

SEQ ID NO: 722952 - DNA, 120 bp, Artificial Sequence
  ENSG00000197976_31 (sequence is synthesized)
ccttgtcctcaggagggctgcgtccccctggagtccaacgcggggcgaccccataacctgttgtctgattacagttgtgataagtccccgggaaggagcatgacaagaggctgagacatg

SEQ ID NO: 722953 - DNA, 120 bp, Artificial Sequence
  ENSG00000197976_32 (sequence is synthesized)
tggcagcccagtccttacctcatggtgaatattgaagacactaacccaggctaggccaggctcgccccgcagctacggcggtggcatgcgtctgcggcgtcatctcagctccctgttgct

SEQ ID NO: 722954 - DNA, 120 bp, Artificial Sequence
  ENSG00000197977_0 (sequence is synthesized)
gggcagagggacccggctaccctggacagcgcatcgccgcccgcccgggtcgccgcgccacagccgctgcggatcatggaacatctaaaggcctttgatgatgaaatcaatgcttttttg

SEQ ID NO: 722955 - DNA, 120 bp, Artificial Sequence
  ENSG00000197977_1 (sequence is synthesized)
gacaatatgtttggaccgcgagattctcgagtcagagggtggttcatgttggactcttaccttcctaccttttttcttactgtcatgtatctgctctcaatatggctgggtaacaagtat

SEQ ID NO: 722956 - DNA, 120 bp, Artificial Sequence
  ENSG00000197977_2 (sequence is synthesized)
atgaagaacagacctgctctttctctcaggggtatcctcaccttgtataatcttggaatcacacttctctccgcgtacatgctggcagagctcattctctccacttgggaaggaggctac

SEQ ID NO: 722957 - DNA, 120 bp, Artificial Sequence
  ENSG00000197977_3 (sequence is synthesized)
aacttacagtgtcaagatcttaccagcgcaggggaagctgacatccgggtagccaaggtgctttggtggtactatttctccaaatcagtagagttcctggacacaattttcttcgttttg

SEQ ID NO: 722958 - DNA, 120 bp, Artificial Sequence
  ENSG00000197977_4 (sequence is synthesized)
cggaaaaaaacgagtcagattacttttcttcatgtatatcatcatgcttctatgtttaacatctggtggtgtgtcttgaactggataccttgtggacaaagtttctttggaccaacactg

SEQ ID NO: 722959 - DNA, 120 bp, Artificial Sequence
  ENSG00000197977_5 (sequence is synthesized)
aacagttttatccacattcttatgtactcctactatggactttctgtgtttccatctatgcacaagtatctttggtggaagaaatatctcacacaggctcagctggtgcagttcgtgctc

SEQ ID NO: 722960 - DNA, 120 bp, Artificial Sequence
  ENSG00000197977_6 (sequence is synthesized)
accatcacgcacaccatgagcgccgtcgtgaaaccgtgtggcttccccttcggttgtctcatcttccagtcatcttatatgctaacgttagtcatcctcttcttaaatttttacgttcag

SEQ ID NO: 722961 - DNA, 120 bp, Artificial Sequence
  ENSG00000197977_7 (sequence is synthesized)
acataccgaaaaaagccaatgaagaaagatatgcaagagccacctgcagggaaagaagtgaagaatggtttttccaaagcctacttcactgcagcaaatggagtgatgaacaagaaagca

SEQ ID NO: 722962 - DNA, 120 bp, Artificial Sequence
  ENSG00000197977_8 (sequence is synthesized)
caataaaaatgagtaacagaaaaagcacatatactagcctaacagattggcttgttttaaagcaaagactgaattgaaggttacatgttttaggataaactaatttcttttgagttcata

SEQ ID NO: 722963 - DNA, 120 bp, Artificial Sequence
  ENSG00000197977_9 (sequence is synthesized)
aatcatttgtacccagaatgtattaatatattgctattaggttaatctgttaactgaatgctttgatcagcattgaggtgatgctcacctccgaggacctcagaactggtgcagcttctc

SEQ ID NO: 722964 - DNA, 120 bp, Artificial Sequence
  ENSG00000197977_10 (sequence is synthesized)
tctccctccctcccacagactgaacctttcgccagaagctgtccttataacgccttatacgcatacacagccaggaaacgtggagcattgtttctcacagagagtctccaaataaaaagg

SEQ ID NO: 722965 - DNA, 120 bp, Artificial Sequence
  ENSG00000197977_11 (sequence is synthesized)
gttttgttcagattaaaatgtttacaacaaaatgttaattatattctaaatacagggtatgttctaatctatattaagcaataatgccagtgcataatcattccatttgttcctttagca

SEQ ID NO: 722966 - DNA, 120 bp, Artificial Sequence
  ENSG00000197977_12 (sequence is synthesized)
atcaaccccagaaaatattaaaatgggatcatacacagaagatagaaaaatctagcaaaacttctctttctgtaagccagagtcttgtctatcagattcccacaaccactcctgattcta

SEQ ID NO: 722967 - DNA, 120 bp, Artificial Sequence
  ENSG00000197977_13 (sequence is synthesized)
aatttagtgatatggtaatgaaattggtatttattttaaatattagttattctaaggagaaaaaaatgcttctgcaagattttcataattcaggggctgtggataggattgttcctctgt

SEQ ID NO: 722968 - DNA, 120 bp, Artificial Sequence
  ENSG00000197977_14 (sequence is synthesized)
ttccctaatcattcatctgttcatgtctccctcttgtgccagtcagcctaggttatacagatgccatgctccacaccacgagcagtgtacaaatctggctgcccgtttactttctgagca

SEQ ID NO: 722969 - DNA, 120 bp, Artificial Sequence
  ENSG00000197977_15 (sequence is synthesized)
agcactggagtccactccgacctttttctttgaacatgcatgctgctggaatatgtataaatcagaactagcagaagtagcagagtgatgggagcaaaataggcactgaattcgtcaact

SEQ ID NO: 722970 - DNA, 120 bp, Artificial Sequence
  ENSG00000197977_16 (sequence is synthesized)
acctcagatacctgttgtcactcttcacaggttatttaagtttttgaagctgggaggaaaaagatggagtagcttggaaagattccagcactgagccgtgggccggtcatgagccacgat

SEQ ID NO: 722971 - DNA, 120 bp, Artificial Sequence
  ENSG00000197977_17 (sequence is synthesized)
aaaaaatgccagtttggcaaactcagcactcctgttccctgctcaggtatatgcgatctctaccgagaagcaagcacaaaagtagacaaaagtattaatgagtatttcctttctccataa

SEQ ID NO: 722972 - DNA, 120 bp, Artificial Sequence
  ENSG00000197977_18 (sequence is synthesized)
gtgcaggactgttactcactactaaactctaccaagaatggaaacaaagaatattttctgaagatttttttgaagattaatttataccctataaaataaaacttgttagcttcgatgaag

SEQ ID NO: 722973 - DNA, 120 bp, Artificial Sequence
  ENSG00000197977_19 (sequence is synthesized)
tcacttcatcttctctcctgccttatttttttaaataagtttttaggtcctgacactgacatcaaatacatgcacaccagaaaggcatttccaccaccgtccccactcattagcgtccag

SEQ ID NO: 722974 - DNA, 120 bp, Artificial Sequence
  ENSG00000197977_20 (sequence is synthesized)
agtgcctttctctctcggctttttttcccccctgagctctagttttaaactttctcctgttaaaaaaattgtacttttatttcatgtaaactgcccctctgaggatttgggcatattttt

SEQ ID NO: 722975 - DNA, 120 bp, Artificial Sequence
  ENSG00000197977_21 (sequence is synthesized)
tggaaggtgcctaatgcttaggatagtctctagggtgatgcactgcacctgcttccttcccttcagtgcggccgacccatttctgttgaacagatgtctcctgtgtgatgcccctgactc

SEQ ID NO: 722976 - DNA, 120 bp, Artificial Sequence
  ENSG00000197977_22 (sequence is synthesized)
ttacatttatctttctaaatcattttctgaagctgacttgctctagggtgcttcatcaccacttccatcttgcatcaccttataactgttctgtcttgttctctcccagcaatttatttt

SEQ ID NO: 722977 - DNA, 120 bp, Artificial Sequence
  ENSG00000197977_23 (sequence is synthesized)
aaaacaagggctagcttcaagcatgactgttaatggctcctctgtgacaaaacacaagttggaccaaggagaaagccctttggagaaactggaccctagttcagtttagatctcaaatat

SEQ ID NO: 722978 - DNA, 120 bp, Artificial Sequence
  ENSG00000197977_24 (sequence is synthesized)
aggctgaaatctcttaccaaagtgcgttccagataaaaatgagacttagaagacagactggtctaatatgctcactggtcatcacattcagcttattcttacgtgccagtgaggccctaa

SEQ ID NO: 722979 - DNA, 120 bp, Artificial Sequence
  ENSG00000197977_25 (sequence is synthesized)
ggtctcagtgcatagcatacctgccactctggatgttttcctgggcttcatatctgtatggcaaggagggagctgtccttcagcagacaaagtcaagcagctttaagtacaaggcagctt

SEQ ID NO: 722980 - DNA, 120 bp, Artificial Sequence
  ENSG00000197977_26 (sequence is synthesized)
gaaacctctctgatgaaagtgaaaaatgtgggtagcttatactttcaaactaatgccagtgactagagagaggtttcattcatgatgtgtatttccaatttggtcttcaattcaagagat

SEQ ID NO: 722981 - DNA, 120 bp, Artificial Sequence
  ENSG00000197977_27 (sequence is synthesized)
gcttcataaaacacttatagccttaaaccattcaagggctaattaaaaaaatagttatgaaatcttagccacaaaaaataaatcaggtaaacattttaacctgtcgttaagtgttgtaac

SEQ ID NO: 722982 - DNA, 120 bp, Artificial Sequence
  ENSG00000197977_28 (sequence is synthesized)
ttcaaaaaaccaaaatgcttattttaatgtgatttttctaaaactattgaaaaattaatatttctataatctattaaaaaaaatggagaatgttttctctcaaatttcctctgacccatg

SEQ ID NO: 722983 - DNA, 120 bp, Artificial Sequence
  ENSG00000197977_29 (sequence is synthesized)
ggaatgaaaatacttaaatactgtaaagcatatctattaataattcccccaattttttaaactaacaaaatggaatgttaactgaatggaattaaacatagcaattgtcaagccatcaaa

SEQ ID NO: 722984 - DNA, 120 bp, Artificial Sequence
  ENSG00000197977_30 (sequence is synthesized)
attatatatcgaaccacttaggcatgttacggggtaaagtcctcacccctgcatttgagaaatattttattatttttattttaaggcaaaacagtgtttactgtgatgggcagaacagcc

SEQ ID NO: 722985 - DNA, 120 bp, Artificial Sequence
  ENSG00000197977_31 (sequence is synthesized)
ttttgtatctaggagtccatttgagttctttccaatatttccatatcgttcataaatgtgtctgggggcttccttgtttggaaaatatggatatcgctttgttttcctttgaaagtaatt

SEQ ID NO: 722986 - DNA, 120 bp, Artificial Sequence
  ENSG00000197977_32 (sequence is synthesized)
atatcttaagaacatagtatcatgaatggagtagacagggaggctgcagaagccatttctctttgtagataaaaagcattatctatgattgttgtataataaattgatttttacattaaa

SEQ ID NO: 722987 - DNA, 120 bp, Artificial Sequence
  ENSG00000197978_0 (sequence is synthesized)
ttgcacagctgcctggtaggtgactggaggcattgagcagtgctcactggtatttcgctgatgtggccccaaccccgcctccctccccaccccgcgatgtcagaaaaaacacaacagggg

SEQ ID NO: 722988 - DNA, 80 bp, Artificial Sequence
  ENSG00000197978_1 (sequence is synthesized)
ccctccccaccccgcgatgtcagaaaaaacacaacaggggaaattggccgcagccaagaaacagcaggagctaacaggaa

SEQ ID NO: 722989 - DNA, 120 bp, Artificial Sequence
  ENSG00000197978_2 (sequence is synthesized)
ggtggttaccactcacctggggattcagcaacaggtatctacggggagggccgtgcatcctctactaccctgcaggatctggagagccagtaccaagaactagcagtagccctggattca

SEQ ID NO: 722990 - DNA, 120 bp, Artificial Sequence
  ENSG00000197978_3 (sequence is synthesized)
agctccgcaataatcagtcaactcactgaaaacatcaattcactggttcgcacatctaaggaggagaagaagcatgagatacatctggtacagaagcttgggaggagcttgttcaaactc

SEQ ID NO: 722991 - DNA, 120 bp, Artificial Sequence
  ENSG00000197978_4 (sequence is synthesized)
ctggtacagaagcttgggaggagcttgttcaaactcaaaaaccagacggctgaacccctggccccacagcccccagcagggccatctaagatggagcagctacaagatgagaccaaccac

SEQ ID NO: 722992 - DNA, 120 bp, Artificial Sequence
  ENSG00000197978_5 (sequence is synthesized)
agggagaggctgctggacgaggtggaggagctcctggagcaggagaggcttcggcaacaggatgagaggctgtggcagcaggagactctgcgggagctggagaggctgcgggagctggag

SEQ ID NO: 722993 - DNA, 120 bp, Artificial Sequence
  ENSG00000197978_6 (sequence is synthesized)
gctgcgggagctggagaggatgctggagctggggtgggaagccctgtacgagcagcgggccgagccacgcagcggcttcgaggagctgaacaacgagaacaagagcacactgcagttgga

SEQ ID NO: 722994 - DNA, 120 bp, Artificial Sequence
  ENSG00000197978_7 (sequence is synthesized)
ctggagaagtcgggtggagctgaagagccaagaggctccgagtctgcagcagcagccagaccagtagctggagccccagtcccacaaggagcttggatgtgcggacaagcagggtggact

SEQ ID NO: 722995 - DNA, 86 bp, Artificial Sequence
  ENSG00000197978_8 (sequence is synthesized)
atgccattcttttcgggctgccgagaacagggagctaaacatcaccatcatctaagagcgggtcaagaaattgaaaaaaaaaaaca

SEQ ID NO: 722996 - DNA, 120 bp, Artificial Sequence
  ENSG00000197978_9 (sequence is synthesized)
atcatctaagagcgggtcaagaaattgaaaaaaaaaaacaaaacatttaaggggttaatatcctacacaattcatttacttcatttgaatgttagagccacttatgtttgtgtttctaat

SEQ ID NO: 722997 - DNA, 120 bp, Artificial Sequence
  ENSG00000197978_10 (sequence is synthesized)
ataatttaaatttatttgtaaaaagttaaatgagagtgggtctttctctcatgttcactctggcatcttttagcatttctttaatttgataattataggacgttagcatgcatatcgagt

SEQ ID NO: 722998 - DNA, 120 bp, Artificial Sequence
  ENSG00000197978_11 (sequence is synthesized)
ggaggcattgagcagtgctcactggtatttcgctgatgtggccccaaccccgcctccctccccaccccgcgatgtcagaaaaaacacaacaggggaaattggccgcagccaagaaaaagg

SEQ ID NO: 722999 - DNA, 120 bp, Artificial Sequence
  ENSG00000197978_12 (sequence is synthesized)
ccacagatcccctccgatgacaagaccggtgccagagtccataccactcctgaggcataccagatggggccccccaaccccagcccctctgggctcccccaaccaaagcctagtcagtca

SEQ ID NO: 723000 - DNA, 120 bp, Artificial Sequence
  ENSG00000197978_13 (sequence is synthesized)
gccccccaaccccagcccctctgggctcccccaaccaaagcctagtcagtcagccccaccccttcagcaagcagcccagtccctgcccttgccaatcaccccagggtgactttgggcagg

SEQ ID NO: 723001 - DNA, 120 bp, Artificial Sequence
  ENSG00000197978_14 (sequence is synthesized)
tccataatcagccctcacctcctgccaccccaagcccaacctccctgggctctttgggcttgcgtctcccaggacctgggtcccccagccccaggccctgccctcaccagtcatccctgg

SEQ ID NO: 723002 - DNA, 120 bp, Artificial Sequence
  ENSG00000197978_15 (sequence is synthesized)
gcagactctgccctcccctcctgctgccccaagctcgacctccctaggcttcttgggctggcgtctctgaggacctgggtcgaaaccgtgtgtttccctcccccatcgtggagcagcgac

SEQ ID NO: 723003 - DNA, 120 bp, Artificial Sequence
  ENSG00000197978_16 (sequence is synthesized)
gggtcgaaaccgtgtgtttccctcccccatcgtggagcagcgactcgggcatcgcgctgatgtggtcccctcccctgggaggagtggaatgcaatgatgtcacagtgcccctaggaactg

SEQ ID NO: 723004 - DNA, 90 bp, Artificial Sequence
  ENSG00000197978_17 (sequence is synthesized)
acatagacattgacagtgggaaaagcctacacttcccctgtgagctcaaaatgttcacagtatctctgggtggcaatgggagaatgggtt

SEQ ID NO: 723005 - DNA, 77 bp, Artificial Sequence
  ENSG00000197978_18 (sequence is synthesized)
aatgggagaatgggtttggtttggttttttcccaggcttctactttccagagagactttaacatttttttctgactc

SEQ ID NO: 723006 - DNA, 71 bp, Artificial Sequence
  ENSG00000197978_19 (sequence is synthesized)
acttgacagcttgaatcttcctcatatcgtctcaacctggggtactttgagtgccacaggataaatggcat

SEQ ID NO: 723007 - DNA, 85 bp, Artificial Sequence
  ENSG00000197978_20 (sequence is synthesized)
cattttcccttgattctcttgagaaaatgcattaatgtacttagggatgacagacacataggtttccaagcgtataccagacttc

SEQ ID NO: 723008 - DNA, 74 bp, Artificial Sequence
  ENSG00000197978_21 (sequence is synthesized)
taaattcccagatttaagagaggtactggtacgcttcttcacgctagcagacctgtgaggatgtatgactctaa

SEQ ID NO: 723009 - DNA, 120 bp, Artificial Sequence
  ENSG00000197978_22 (sequence is synthesized)
ggagtcagaggactgagtttaagttccagtattgccttttttgatctttctttttttttttttctatccatgatatcaatccctctcagtcactaagtgattgtgacaacaccttgtaca

SEQ ID NO: 723010 - DNA, 120 bp, Artificial Sequence
  ENSG00000197978_23 (sequence is synthesized)
attacatcagatggtatataagggtattttgtcaaaactgtaaaggaggatgtggctgtaggggctgatcattctcatgagtgttactgctcttctttcccacagttaaaagcatattgg

SEQ ID NO: 723011 - DNA, 120 bp, Artificial Sequence
  ENSG00000197978_24 (sequence is synthesized)
ccaggctcctggggacagggagcccaaggggcagtagagggtaattgttaagattgtagatggactgttgggtactggttaagaattctggatttgaatcctgcctctccgtctgctaag

SEQ ID NO: 723012 - DNA, 120 bp, Artificial Sequence
  ENSG00000197978_25 (sequence is synthesized)
aagaattctggatttgaatcctgcctctccgtctgctaagaattgattagggattgattagcatatgatttagggcaagttgcttgaggtctttgggcctctcttttcacatctgtataa

SEQ ID NO: 723013 - DNA, 120 bp, Artificial Sequence
  ENSG00000197978_26 (sequence is synthesized)
gtgaagtttaaatgagattcgttattgttgcttttatgtgaatccttagtacatggcctgctgcaaacacccaggacaccgaggaaatggtcgttgctgtttgattttcctcatccccag

SEQ ID NO: 723014 - DNA, 60 bp, Artificial Sequence
  ENSG00000197978_27 (sequence is synthesized)
aagaagcttttgccagttgatgggggaagaaaggaagagtcagcaacaggtatctacggg

SEQ ID NO: 723015 - DNA, 120 bp, Artificial Sequence
  ENSG00000197978_28 (sequence is synthesized)
tctcatctcttggagtcagcaacaggtatctacggggagggccgtgcatcctctactaccctgcaggatctggaggtaagaggccctgggccgaggtgcagtgaccctgcaggccagccc

SEQ ID NO: 723016 - DNA, 120 bp, Artificial Sequence
  ENSG00000197978_29 (sequence is synthesized)
ggggcttgttgcccctctgccagctgaggcagcccacacacccccaccagccctaatgattattctctctacccctccccacaatctttctccaactccttctctctgcatgcacctcag

SEQ ID NO: 723017 - DNA, 120 bp, Artificial Sequence
  ENSG00000197978_30 (sequence is synthesized)
atattcattacggaattcagataaaatttccttatgttctgctgttatgtttgatcgaatcctaatcacagtgagctcttcattagctcaatatgtggtttgccctctggaaacagcctt

SEQ ID NO: 723018 - DNA, 120 bp, Artificial Sequence
  ENSG00000197978_31 (sequence is synthesized)
atgggagtaataacattttggggaggtttttaaatctcccagaagaggaaagtggcctgctttggcaggtgtgtgcaggatagaatatgtttcatttgttccggtgccaagaatgagcgc

SEQ ID NO: 723019 - DNA, 89 bp, Artificial Sequence
  ENSG00000197978_32 (sequence is synthesized)
ctaaggctcatgaagatactgcctcatgagctgtggcagttgtactcttttttgatgacctgaaaagggattatttctgaggaatgaaa

SEQ ID NO: 723020 - DNA, 79 bp, Artificial Sequence
  ENSG00000197978_33 (sequence is synthesized)
agttgtactcttttttgatgacctactgtggatgtggaaaaccttttctagctgagagcatttatatctacaatacatt

SEQ ID NO: 723021 - DNA, 74 bp, Artificial Sequence
  ENSG00000197978_34 (sequence is synthesized)
tacacaaaagggcactggttggcgttctccttaccctggaacaggcatatacaggctctagtcaagaatgaatt

SEQ ID NO: 723022 - DNA, 120 bp, Artificial Sequence
  ENSG00000197978_35 (sequence is synthesized)
agctgtgtgacacctggcattcctctgtgttcatggagcttatttgaggctagaagatggattttaccatctagacctctctggctaatagctagtcttcaaccatctgacataggaatt

SEQ ID NO: 723023 - DNA, 120 bp, Artificial Sequence
  ENSG00000197978_36 (sequence is synthesized)
agacctctctggctaatagctagtcttcaaccatctgacataggaatttacttcttttccttgaatggagaacactttaaaaataataacaaacattattataaactaatatatgtgaga

SEQ ID NO: 723024 - DNA, 120 bp, Artificial Sequence
  ENSG00000197978_37 (sequence is synthesized)
ttttagtagacagtattatactacatttgaaaatcaaggagcagtttatgcaacgtaaaacgtttacaaactgcagcacaatctactgttcgtgaatgtcaaagtgtcatgaggaaagtg

SEQ ID NO: 723025 - DNA, 120 bp, Artificial Sequence
  ENSG00000197978_38 (sequence is synthesized)
gcagcacaatctactgttcgtgaatgtcaaagtgtcatgaggaaagtgtctatacaatcacagagttatatttcctcacaaagttctttacaaagagtgaaatatgtttttatacctctc

SEQ ID NO: 723026 - DNA, 71 bp, Artificial Sequence
  ENSG00000197978_39 (sequence is synthesized)
agtttcagttagaggcatattttgtgtaatatttatggcttaaaatggactaaaggtcctgttcttgcctt

SEQ ID NO: 723027 - DNA, 120 bp, Artificial Sequence
  ENSG00000197978_40 (sequence is synthesized)
taagcccattttaaaccctcaggctagaaatcgtaccactgttaattagccacattatttggtctaacagtttatcattctgaaactgagcttacctaatacattgataaattatttcaa

SEQ ID NO: 723028 - DNA, 89 bp, Artificial Sequence
  ENSG00000197978_41 (sequence is synthesized)
cttcacttttaccctgacacgtataaatgactaggaatgaccttcagatagcatttagcaactgtaaccaatctgacaataatgtgttc

SEQ ID NO: 723029 - DNA, 120 bp, Artificial Sequence
  ENSG00000197978_42 (sequence is synthesized)
tttaagctgaatgtcagtctgaaaaataaatgtactatattaactcaaataccactctctgtgtaggtattttgtcatatgtttaagaaaaagctaaagagaatggaaatcctatgacaa

SEQ ID NO: 723030 - DNA, 120 bp, Artificial Sequence
  ENSG00000197978_43 (sequence is synthesized)
taactatgacaataactatgacaagtctttcttcaaagtgcatgcagtcttttgcagtacctcattcagccaagtatttgttctctacctcattcagtataaggcagcctttaatttgct

SEQ ID NO: 723031 - DNA, 120 bp, Artificial Sequence
  ENSG00000197978_44 (sequence is synthesized)
tagaaggcaacattagaaggttagagttcagcaggaacatagaattttaaaatgtgacttcaactgaataaatttgaatttctgtagggagtaaagaatcaaaacacctatttaaagact

SEQ ID NO: 723032 - DNA, 120 bp, Artificial Sequence
  ENSG00000197978_45 (sequence is synthesized)
aatcaaaacacctatttaaagactgcaaaatatgataattatttttaaagtaattgattaaacctggtaggttttcccaaaatgaaaaacaatcagttctaaaaccaaagctgattttta

SEQ ID NO: 723033 - DNA, 120 bp, Artificial Sequence
  ENSG00000197978_46 (sequence is synthesized)
gtagtttaaaacaaagaatctaggggaaggaaaagtagacaaagaaatgccaattccagtccaaagctgtatttgccaagttttcttagaatgacttttaccgatttatgaattcttata

SEQ ID NO: 723034 - DNA, 120 bp, Artificial Sequence
  ENSG00000197978_47 (sequence is synthesized)
cacagaatgcataatggaaatactgatttttgtctaaagtggcattattgactgctgctgtgatgctactataatgtaatacattattaaattgtttcaaggtgctgttttgcctaaaaa

SEQ ID NO: 723035 - DNA, 120 bp, Artificial Sequence
  ENSG00000197980_0 (sequence is synthesized)
agccgactggcggcgcggtcgcccgggagaccgggaaagccgtttcacacccgtcctagtcgaagtcgagatttcctttggcttcaaagctctctcaccatattttgggaagttatggat

SEQ ID NO: 723036 - DNA, 120 bp, Artificial Sequence
  ENSG00000197980_1 (sequence is synthesized)
catcacattcccatgcatgcgttgcctgaagaaatccaaaagatgttgcctgaagaaaaagtttgtaagtactgtggagtcagctatctaattcttcatgaatttaaggctatggaagaa

SEQ ID NO: 723037 - DNA, 120 bp, Artificial Sequence
  ENSG00000197980_2 (sequence is synthesized)
aaagtgaaagcaatggaaaaagagatgaaattttatcaaggaagtgtagatcgtgaaaagagacttcaagaaaagctgcattctcttagccaagaacttgaacagtacaaaattgacaac

SEQ ID NO: 723038 - DNA, 120 bp, Artificial Sequence
  ENSG00000197980_3 (sequence is synthesized)
aaatccaaaacagaaagaatttacgatgtaggcatgcagttaaaaagtcaacaaaatgaatttcagaaagtaaagaaacaactgagtcatttgcaagatgagctaaaaattaaatataga

SEQ ID NO: 723039 - DNA, 120 bp, Artificial Sequence
  ENSG00000197980_4 (sequence is synthesized)
caatcatacatcttcagtcaaagattgtcagagtacaaatatttctggaataagactctttcattacttacttttactaaaagggaactaaccagtattaaaaatgaagtatatgataat

SEQ ID NO: 723040 - DNA, 120 bp, Artificial Sequence
  ENSG00000197980_5 (sequence is synthesized)
taccaaaactggacttcattgaaaggagcagtttttctacaaattaaatctataagtgaaacagccttgacagaaatagacatactgaataaaagtttgacagtatcccagagaaataaa

SEQ ID NO: 723041 - DNA, 120 bp, Artificial Sequence
  ENSG00000197980_6 (sequence is synthesized)
gtatgccttgaaaaggaaatgaaaaatctgaaattgttgtcagatgcagccatattgagatctcagcagattcggacatctagacaacaggaagtaaacttgcaaaccagatgctatgat

SEQ ID NO: 723042 - DNA, 120 bp, Artificial Sequence
  ENSG00000197980_7 (sequence is synthesized)
ttgcaaaaagaagtactagatttacaatgtctagtagaggcacttggattaaaacttcagaaggcggtgacagagatggacaactataaagaaatgcttatgaataaatctaatgaagct

SEQ ID NO: 723043 - DNA, 120 bp, Artificial Sequence
  ENSG00000197980_8 (sequence is synthesized)
gatgactgtcaaagagaacttaaaaaactgaagtttgaatccattatttctgagtcacagcatactatgctgcttaaggaaaaagaagactctttaatgacttgtcaacagatatataaa

SEQ ID NO: 723044 - DNA, 120 bp, Artificial Sequence
  ENSG00000197980_9 (sequence is synthesized)
gcattacaggaagagctgactgtgaaagaaaagcaagaagaagacataaagagaagaattaaccttgcagaaaatgaactggagataaccaaaactcttctgaatcagacaagggaagag

SEQ ID NO: 723045 - DNA, 120 bp, Artificial Sequence
  ENSG00000197980_10 (sequence is synthesized)
gcatcgagcagctgcaagaaacccttagacagaagctgctgagtgatgataactggaaggagaagattgaagcagaacttgccaaggaaagggcccaacacttggttgaatttgaagagc

SEQ ID NO: 723046 - DNA, 120 bp, Artificial Sequence
  ENSG00000197980_11 (sequence is synthesized)
aagctcttctctttaaggaagaaacaaaattgcaacttgatattgaaaaagaaaaacaccaagatgtaatccaaaagtataagaaagaacaagaggaactacaaatgaagatatctgact

SEQ ID NO: 723047 - DNA, 120 bp, Artificial Sequence
  ENSG00000197980_12 (sequence is synthesized)
taatcacaggcgctacaagagatctaaggcaggaagtgaccactcttaaagaaaaacttcacaaatcccatattcggtacactgaagaatctaattcaaaggaaaaagaaattgaaaatc

SEQ ID NO: 723048 - DNA, 120 bp, Artificial Sequence
  ENSG00000197980_13 (sequence is synthesized)
ttaaaaatttggttgcagaatttgaatctcgcttgaagaaggaaattgacagtaatgattcagtttcagaaaacttgaggaaggaaatggaacagaagtcggatgaactgaaaagagtaa

SEQ ID NO: 723049 - DNA, 120 bp, Artificial Sequence
  ENSG00000197980_14 (sequence is synthesized)
tgctggctcaaacacaactgatagagcaatttaaccagtcccaggaagagaatacttttcttcaggagacagtgcgtagagaatgtgaagaacgctttgaactgacagaggctttgagtc

SEQ ID NO: 723050 - DNA, 120 bp, Artificial Sequence
  ENSG00000197980_15 (sequence is synthesized)
aagccagagaacagctcctggagctcagtaagcttcgtggaagtttaccattctcaccgtgttccctcagcaagggcagcctaacctcccctgctgcagcagtcagtaatcatggagaga

SEQ ID NO: 723051 - DNA, 120 bp, Artificial Sequence
  ENSG00000197980_16 (sequence is synthesized)
gaagccttgcaagactgaactctgaaaaaggaatccaaattcccaacctgcgcggggtgtcaaaacccaccactttcccaacctcagataagccgaagagggttagatcaggcgtgccca

SEQ ID NO: 723052 - DNA, 120 bp, Artificial Sequence
  ENSG00000197980_17 (sequence is synthesized)
ttctcccccagccacatcctcccaggggtggagcatcttcagcaaatgagactagacagagactggctgccattcttaggagaaggcggagtcagcaatgatccaaaatgaggagcagga

SEQ ID NO: 723053 - DNA, 120 bp, Artificial Sequence
  ENSG00000197980_18 (sequence is synthesized)
agctccctacagcgtgcacgctctttcagagagtgccaggaattcactgtaactgagaatgacaatgataaaattattttcacagatcaggaaggcatacctatagatgtatttaacaaa

SEQ ID NO: 723054 - DNA, 120 bp, Artificial Sequence
  ENSG00000197980_19 (sequence is synthesized)
agactgtaaaaagctggaaaattgtgaagccttatttttcaagagggttttgatagagtaacagatcattaagttgttggtattccagaggtccgatttctatgtttatgttggaatgtg

SEQ ID NO: 723055 - DNA, 120 bp, Artificial Sequence
  ENSG00000197980_20 (sequence is synthesized)
ctctatgaatatagccttttagagatcacaggtaaaatttttcacccataacatcttttcaatttcttgcgccactacaagcagatatatttccacaaaaaaatagattgtttgagattt

SEQ ID NO: 723056 - DNA, 120 bp, Artificial Sequence
  ENSG00000197980_21 (sequence is synthesized)
atcatacatcttcaggtaagattaaagaactgaaaattataaagattgaaaagatatgcttaatactaactttgtaaatagccaaacacattttagtaatatggtttctatatctggtgt

SEQ ID NO: 723057 - DNA, 120 bp, Artificial Sequence
  ENSG00000197980_22 (sequence is synthesized)
gattgagaaaagtgaaacagcattaggttttcttttttcttttttaaaccattatctcaatgaatagtgttgctaattaaatttaaattaggcatataccttgttctattagtgccttgt

SEQ ID NO: 723058 - DNA, 120 bp, Artificial Sequence
  ENSG00000197980_23 (sequence is synthesized)
tactgttcttattttgtggtggcatttagaatgaaagcacggtaactaatttccctcttcaccaatatttcttggtgtatttgatcctctgagtgatagtccagtgacaagaaaagtaat

SEQ ID NO: 723059 - DNA, 120 bp, Artificial Sequence
  ENSG00000197980_24 (sequence is synthesized)
atgtgttacaaaatggcaagaattaggaagaaatgacaagaattataaagaccctggtgtgttctctgtgattcttttggcagtgatttactggtgtgggtaatagtttactgctgcttt

SEQ ID NO: 723060 - DNA, 120 bp, Artificial Sequence
  ENSG00000197980_25 (sequence is synthesized)
tcttgcccactttactggcctagattatatattgaagaacctgtaaatatttttaaatacatggaggatttctttctctcaataagaaacttacttatccatatattaaagctttccctg

SEQ ID NO: 723061 - DNA, 120 bp, Artificial Sequence
  ENSG00000197980_26 (sequence is synthesized)
acagaaaggttgagtatgtttttcttttctatcatttatttagttgaaagacagctacaggaaataaatacactttgaatgtttttctaaaatttctctacatcaggtatagtttatact

SEQ ID NO: 723062 - DNA, 120 bp, Artificial Sequence
  ENSG00000197980_27 (sequence is synthesized)
gtcctagtcgaagtcgaggtgagggacgatggctttcctcagcctgggatgacccggtcctccaaatgcagttccggagtggaggcgtgctcgcacccggggagagagccagaaagctga

SEQ ID NO: 723063 - DNA, 120 bp, Artificial Sequence
  ENSG00000197980_28 (sequence is synthesized)
ctgagccgcggcgccccagcgagagcacgaggccccgggtctggactccgccaccacgctcctctgcggccccttcctggtgtctgccagcccgcggggcccaggcgcggtccgccttcc

SEQ ID NO: 723064 - DNA, 120 bp, Artificial Sequence
  ENSG00000197980_29 (sequence is synthesized)
agccccggggaacgcgcggctctgcttcctcacccccgcaccctcctcctcctcctcttccggccactgcaggtccagggggaacggggttagaaagggacagatttgaaagccattcca

SEQ ID NO: 723065 - DNA, 120 bp, Artificial Sequence
  ENSG00000197980_30 (sequence is synthesized)
gcagttttgtctggccttgcggttggtttctgtgtggaagagcctgccgcttcaggaaagtcttaggatgtgaactcccgccttcacctgcccctgacctgctcgttgtgggtgattcac

SEQ ID NO: 723066 - DNA, 120 bp, Artificial Sequence
  ENSG00000197980_31 (sequence is synthesized)
gccatgggaatggttctttacgtaagggcttgaaagctgaacgtgagttaatggcctgacgtgacactagtgtgagaaacggaattggaaacgaacaaggacgtgtctgcattttaaaaa

SEQ ID NO: 723067 - DNA, 120 bp, Artificial Sequence
  ENSG00000197980_32 (sequence is synthesized)
atgtcttttcggtgatcttgttagagaggaggttcacaaacacccacgtagctgcagccacttatcactgcacctcttgccaaagtgcggtccacatacgtgcaatgagaaaggattaaa

SEQ ID NO: 723068 - DNA, 120 bp, Artificial Sequence
  ENSG00000197980_33 (sequence is synthesized)
gtcagaaggattttctcctgtattttcttctaagtgttttatagttttagctcttctttagatctatgatctatttcagctaacttctgtgtatgatatgaggtaagaatctaaattcat

SEQ ID NO: 723069 - DNA, 120 bp, Artificial Sequence
  ENSG00000197980_34 (sequence is synthesized)
cctgtttcacgtggatattcaattgttccagtgctgtttgttagaggccaatttttccttattgaattgcctcagcatctttgcctaaaataaattcaccataaatgtaaaggattattt

SEQ ID NO: 723070 - DNA, 120 bp, Artificial Sequence
  ENSG00000197980_35 (sequence is synthesized)
ttggattttctattctattccattaatctatatgtcttatgtcagtgccacactctcttaagtactacagtttttaataaattttaaaatcaagaaatataattactctaacttccttct

SEQ ID NO: 723071 - DNA, 120 bp, Artificial Sequence
  ENSG00000197980_36 (sequence is synthesized)
tcgttttcaaaattgtttttgctattctgcgccctccataatgaattttaggatcagcttgtgaatttctgcaaagtaacctgctgggattttgataggtatagtattgaatctatagat

SEQ ID NO: 723072 - DNA, 120 bp, Artificial Sequence
  ENSG00000197980_37 (sequence is synthesized)
caatttggggagaatttctaccttaaaatttttgtatctttcaattcatgaatgtggtatgtttttccatggagatctttagccctctcaaaaatgttttgttttcttgaacttctttta

SEQ ID NO: 723073 - DNA, 120 bp, Artificial Sequence
  ENSG00000197980_38 (sequence is synthesized)
ttacaatttatttctaagtgttttattctttttatgttgttatgaattgggactgttaattttatcttggggattggtcattgttaatatacagaaataaaattgatttttgtatatgta

SEQ ID NO: 723074 - DNA, 87 bp, Artificial Sequence
  ENSG00000197980_39 (sequence is synthesized)
atgcgtgttggcacctgggaagatcacctaagcctagaaagttgaagctacagtgaaccatgatcatgccactacactccagcctgg

SEQ ID NO: 723075 - DNA, 120 bp, Artificial Sequence
  ENSG00000197980_40 (sequence is synthesized)
agcaaaccagtctctttgcctgctacagagccatcgatgttttctttggttcttggaagaactgtacttcgaccttatataatcctcagaaaggcaagatctggactacgaatgagtcac

SEQ ID NO: 723076 - DNA, 120 bp, Artificial Sequence
  ENSG00000197980_41 (sequence is synthesized)
aagaacgaatgccagatctacaacattctgtcactgagccatacataggtctgtgatttgttttccttagcttttcttaataactttgtttttgcaaaataaatatttttttgaaatgaa

SEQ ID NO: 723077 - DNA, 120 bp, Artificial Sequence
  ENSG00000197982_0 (sequence is synthesized)
acctgtagacgtcggccacgcggccgaggcatacggccagaggcttggcctcgctgcgacccttgaggcggtacacagcgcgcagagccgccgagcagctcgccgcgcaggccaggccgt

SEQ ID NO: 723078 - DNA, 80 bp, Artificial Sequence
  ENSG00000197982_1 (sequence is synthesized)
acagcgtatcggtggggacggccaccacggcgccggcgcgcagctcggccacggcggcccgcagcgcctcggtccagccg

SEQ ID NO: 723079 - DNA, 120 bp, Artificial Sequence
  ENSG00000197982_2 (sequence is synthesized)
cgccggagcgggactcggcgggcggaagaggcgaccgctccgggagccagcaggcccctcgctcaaccccacgctggcagccaccgcggccctcatccccctgcaccgacgcgccggaga

SEQ ID NO: 723080 - DNA, 120 bp, Artificial Sequence
  ENSG00000197982_3 (sequence is synthesized)
tcatccccctgcaccgacgcgccggagacatccgcccaggcccgcttccgggaggaagtgacgctcccagccagcttccggtccaggagactcggccccgcctctgcgccgggcagctta

SEQ ID NO: 723081 - DNA, 120 bp, Artificial Sequence
  ENSG00000197982_4 (sequence is synthesized)
aagggaccacgacccccaggaggattgaaggagaccggtggggacggggcggggcgcagccttgcgaagccctaacgcagcgctggggaggggggcggccgaaaggggggcggtggtcgg

SEQ ID NO: 723082 - DNA, 120 bp, Artificial Sequence
  ENSG00000197982_5 (sequence is synthesized)
aaaggggggcggtggtcgggccgcgcaagcggagatggaatggggcccgggctcagactggtcacggggggaggctgccggcgtggaccgcgggaaggcggggctggggctcggcgggag

SEQ ID NO: 723083 - DNA, 120 bp, Artificial Sequence
  ENSG00000197982_6 (sequence is synthesized)
cgcgcccagcagctgctggacgcggtggagcagcggcagcggcagctcctggacaccatcgcagcctgcgaggagatgttacggcagctgggccgccggcgcccggagccggctggtggc

SEQ ID NO: 723084 - DNA, 120 bp, Artificial Sequence
  ENSG00000197982_7 (sequence is synthesized)
gggaacgtctcagccaaacctggagcgcccccccagccggctgtctccgccagaggcggctttccaaaggatgctggcgatggagctgcggagccctgaccatccccgagcagaataccc

SEQ ID NO: 723085 - DNA, 120 bp, Artificial Sequence
  ENSG00000197982_8 (sequence is synthesized)
tgacttctctccctccccagggccggtggctggactctgaacaactcccttcagtaaaggggccagtcttcactggcagtggctggtacttggctctcagcctggagtggcagctctgct

SEQ ID NO: 723086 - DNA, 120 bp, Artificial Sequence
  ENSG00000197982_9 (sequence is synthesized)
agcagctgggttcactcccacttcatcctggctgaaagcagtgctgtgctttgaaatgcagccaatgaatacccagtctgattacccagatttgggcagaccagcagtgctcgccagagt

SEQ ID NO: 723087 - DNA, 120 bp, Artificial Sequence
  ENSG00000197982_10 (sequence is synthesized)
ggtctggcctgctatgggggatccaggtggtgttacatgtccatttcatgttttgggggcttttagccccacaaaacaccttcagtagagccttgattaaaaggaaacctgcagactctc

SEQ ID NO: 723088 - DNA, 120 bp, Artificial Sequence
  ENSG00000197982_11 (sequence is synthesized)
gtaaggcaaggggaaagggatcatgagaaaggttggaagggataagagggtaagtcttatctggatcctagtgaaagccaagtggcctggagtctggggacacaagagaaaacttgactc

SEQ ID NO: 723089 - DNA, 120 bp, Artificial Sequence
  ENSG00000197982_12 (sequence is synthesized)
acaggcgtaaaagggtttaggtccttgttgagctcctccgagcgttccatcaccagggtcactggtcctggcagtaggtctttcaggagcccctcaggtactctcacacggcagtatctg

SEQ ID NO: 723090 - DNA, 120 bp, Artificial Sequence
  ENSG00000197982_13 (sequence is synthesized)
ggaaacacagaagaataaatccattcaaaattgaagggccactggtggtcctttcctagactctaggcagacgtagaaaaggaatccttcgagtttacaatgggagccgcctgtctccct

SEQ ID NO: 723091 - DNA, 120 bp, Artificial Sequence
  ENSG00000197982_14 (sequence is synthesized)
gcttcacctccctaagagcttgagcagaaagcagggctccagaggcgcacccctggcttgacgcccatgtgcctctggtctcagggactacaacagctgcaccgctgtgatatcatgata

SEQ ID NO: 723092 - DNA, 120 bp, Artificial Sequence
  ENSG00000197982_15 (sequence is synthesized)
gtgggatcaagctccacgttttattttcttcaaggcattcgctattaaattaagctactgtgtttgtttgcttttttcccgggggcctccccaattagcacaaatacgccaagggaacag

SEQ ID NO: 723093 - DNA, 120 bp, Artificial Sequence
  ENSG00000197982_16 (sequence is synthesized)
ggtccctgcctttctcgtgtgttgctgcttcccagcagcatgtagttcagggcccggggcacgttaagtcctcggtacatatttccagttccggattccttggtgagcctggacaagccc

SEQ ID NO: 723094 - DNA, 120 bp, Artificial Sequence
  ENSG00000197992_0 (sequence is synthesized)
gtacccggctgtggcaatctgtggtgaagttgaaatgcttttctgctagactggcaacatgttttgattcttctcaaataactcgcaagctcttgtgaagcacaacggcctaccttgtcc

SEQ ID NO: 723095 - DNA, 120 bp, Artificial Sequence
  ENSG00000197992_1 (sequence is synthesized)
tgaagaaaacatactctaaggcccacagatgattaaacccagccatttatgtgacaatagcatttttatttttcttatcaagatctgggtatttgatccacacaatggtaaagattccca

SEQ ID NO: 723096 - DNA, 120 bp, Artificial Sequence
  ENSG00000197992_2 (sequence is synthesized)
tgttagccaagatctaaatgattcaaactgatgatactctctgcagaagaggtgactataaacgcagcccctgtgatgccaactggacatattatggagatagctgctatgggttcttca

SEQ ID NO: 723097 - DNA, 120 bp, Artificial Sequence
  ENSG00000197992_3 (sequence is synthesized)
aacacaacttgacatggaaagagagtgagcagtactgcactgacatgaaggctactctcctgaagactgacaaccagaacattctgtggatagaagtcaagggctccaatgtctcccaag

SEQ ID NO: 723098 - DNA, 120 bp, Artificial Sequence
  ENSG00000197992_4 (sequence is synthesized)
acgaaagaatcccaagtctcatttggaggaatgctatcactaactaggattcctggagctaaaacattataggagttacttgttccagcctcctgtgtggactgctttcctatcaaagca

SEQ ID NO: 723099 - DNA, 120 bp, Artificial Sequence
  ENSG00000197992_5 (sequence is synthesized)
ccttagacatgcacgaggaagaaatatacacctctcttcagtgggatagcccagcaccagacacttaccagaaatgtctgtcttccaacaaatgttcaggagcatgctgtcttgtgatgg

SEQ ID NO: 723100 - DNA, 120 bp, Artificial Sequence
  ENSG00000197992_6 (sequence is synthesized)
tgatttcatgtgttttctgcatgggattattaacagcatccattttcttgggcgtcaagttgttgcaggtgtccaccattgcgatgcagcagcaagaaaaactcatccaacaagagaggg

SEQ ID NO: 723101 - DNA, 120 bp, Artificial Sequence
  ENSG00000197992_7 (sequence is synthesized)
tgccaagccttcatgcaaaactcattaagttcagcccataacagcagtccttgtccaaacaattggattcagaacagagaaagttgttactatgtctctgaaatttggagcatttggcac

SEQ ID NO: 723102 - DNA, 120 bp, Artificial Sequence
  ENSG00000197992_8 (sequence is synthesized)
accagtcaagagaattgtttaaaggaaggttccacgctgctacaaatagagagcaaagaagaaatggattttatcactggcagcttgaggaagattaaaggaagctatgattactgggtg

SEQ ID NO: 723103 - DNA, 120 bp, Artificial Sequence
  ENSG00000197992_9 (sequence is synthesized)
gggttgtctcaggatggacacagcggacgctggctttggcaagatggctcctctccttctcctggcctgttgccagcagagagatcccagtcagctaaccaagtctgtggatacgtgaaa

SEQ ID NO: 723104 - DNA, 120 bp, Artificial Sequence
  ENSG00000197992_10 (sequence is synthesized)
agcaattcccttctttcgtctaactgcagcacgtggaagtattttatctgtgagaagtatgcgttgagatcctctgtctgaaagaaattgtgttcaaagtgttctattacactgttattt

SEQ ID NO: 723105 - DNA, 120 bp, Artificial Sequence
  ENSG00000197992_11 (sequence is synthesized)
ggagcatgccattggaaaacccacccccaccccccctcaaaaaaacagaacagtaaaccaaaatgtgggccatgaaattagcaacctgggactcaataatacacttgggaatattcttcc

SEQ ID NO: 723106 - DNA, 120 bp, Artificial Sequence
  ENSG00000197992_12 (sequence is synthesized)
acaccgtccagatttcatttgatgttgttcacattgcaagagtaaaacttatttagagctacagaagacaaaaccctgaagagttaagaacaaacgcaaggaaataatttttattgttta

SEQ ID NO: 723107 - DNA, 120 bp, Artificial Sequence
  ENSG00000197992_13 (sequence is synthesized)
aagcccggaatgactgtaactttcacacaaggtacgcatctatgtttttgggggaggtgatgtagttacagctgactaatatttttaaaataaataaataaatttggcctttaaaactca

SEQ ID NO: 723108 - DNA, 120 bp, Artificial Sequence
  ENSG00000197992_14 (sequence is synthesized)
ctgatggtagtggaggagccgagtatcttgattgtatcaatgtcaatatcctggttgtgctattgaactaaattttgcatgtctatgtactgatatggaactgagttcaaatatgcatgt

SEQ ID NO: 723109 - DNA, 120 bp, Artificial Sequence
  ENSG00000197992_15 (sequence is synthesized)
taatgataaaacaaaaggtgcaaaaccatgtaaatatattgttaccatttgtgttaaggggagagagcgagttttatattcatttgccttcatttgtaaagtttctttttgttttatctt

SEQ ID NO: 723110 - DNA, 120 bp, Artificial Sequence
  ENSG00000197992_16 (sequence is synthesized)
atgtgtaatattcaaaagctcccaaataataaaatataaattggtaaatctggttgtttgggggtagtaaatcaagcaaattaaaaatgggtgcaaagagacattttgttccacgtcttt

SEQ ID NO: 723111 - DNA, 120 bp, Artificial Sequence
  ENSG00000197992_17 (sequence is synthesized)
ttgtacttgtctttagtctgtgttgaaggattattttgctataaaatgtcaggattttattaggaatgattgctatcatgtgaagtgttgcaggtgtccaccattgcgatgcagcagcaa

SEQ ID NO: 723112 - DNA, 120 bp, Artificial Sequence
  ENSG00000197992_18 (sequence is synthesized)
acccagtgatctcccaccctttacaccgtggtttgcccaatgtgagttatctttatatcttcactatctaggtcaccccacgcttcatctcctataccaaatgcaagtgcgttctttgca

SEQ ID NO: 723113 - DNA, 120 bp, Artificial Sequence
  ENSG00000197992_19 (sequence is synthesized)
cttacatctttttcttctgaactcactgctatcaccttcaacatctgctacattttggaaaccggataaaaaaatgttctatcattggccattctaaattcagttctctctcatttcctt

SEQ ID NO: 723114 - DNA, 120 bp, Artificial Sequence
  ENSG00000197992_20 (sequence is synthesized)
tttcaccaagttgtgttttggcttagacttcataaacttccactttctgaatgaaggtgcatctattctactccttaaacacaaacatattttcccactactgtgaaaatgtaaccaatt

SEQ ID NO: 723115 - DNA, 120 bp, Artificial Sequence
  ENSG00000197993_0 (sequence is synthesized)
agtcctgtgtgtctggggacaaggcgaaagagcagcagaagtgccccttctccaggatcaaggaactggggcggggggtgtttcctggaccccagtcctccgaatcagctcctagagtgg

SEQ ID NO: 723116 - DNA, 120 bp, Artificial Sequence
  ENSG00000197993_1 (sequence is synthesized)
aaccaggaaggattctggagccacagaagatagacagatggaaggtggggaccaaagtgaggaagagccgagggaacgcagccaggcaggtggaatgggaactctctggagccaagagag

SEQ ID NO: 723117 - DNA, 120 bp, Artificial Sequence
  ENSG00000197993_2 (sequence is synthesized)
cactccagaagagaggctgcccgtggaagggagcaggccatgggcagtggccaggcgggtgctgacagctatcctgattttgggcctgctcctttgtttttctgtgcttttgttctacaa

SEQ ID NO: 723118 - DNA, 120 bp, Artificial Sequence
  ENSG00000197993_3 (sequence is synthesized)
cttccagaactgtggccctcgcccctgtgagacatctgtgtgtttggatctccgggatcattacctggcctctgggaacacaagtgtggccccctgcaccgacttcttcagctttgcctg

SEQ ID NO: 723119 - DNA, 120 bp, Artificial Sequence
  ENSG00000197993_4 (sequence is synthesized)
tggaagggccaaagagaccaataattcttttcaggagcttgccacaaagaacaaaaaccgacttcggagaatactggaggtccagaattcctggcacccaggctctggggaggagaaagc

SEQ ID NO: 723120 - DNA, 120 bp, Artificial Sequence
  ENSG00000197993_5 (sequence is synthesized)
cttccagttctacaactcctgcatggatacacttgccattgaagctgcagggactggtcccctcagacaagttattgaggagcttggaggctggcgcatctctggtaaatggacttcctt

SEQ ID NO: 723121 - DNA, 120 bp, Artificial Sequence
  ENSG00000197993_6 (sequence is synthesized)
aaactttaaccgaacgctgagacttctgatgagtcagtatggccatttccctttcttcagagcctacctaggacctcatcctgcctctccacacacaccagtcatccagatagaccagcc

SEQ ID NO: 723122 - DNA, 120 bp, Artificial Sequence
  ENSG00000197993_7 (sequence is synthesized)
agagtttgatgttcccctcaagcaagatcaagaacagaagatctatgcccagatctttcgggaatacctgacttacctgaatcagctgggaaccttgctgggaggagacccaagcaaggt

SEQ ID NO: 723123 - DNA, 120 bp, Artificial Sequence
  ENSG00000197993_8 (sequence is synthesized)
gcaagaacactcttccttgtcaatctccatcacttcacggctgttccagtttctgaggcccctggagcagcggcgggcacagggcaagctcttccagatggtcactatcgaccagctcaa

SEQ ID NO: 723124 - DNA, 120 bp, Artificial Sequence
  ENSG00000197993_9 (sequence is synthesized)
ggaaatggcccccgccatcgactggttgtcctgcttgcaagcgacattcacaccgatgtccctgagcccttctcagtccctcgtggtccatgacgtggaatatttgaaaaacatgtcaca

SEQ ID NO: 723125 - DNA, 120 bp, Artificial Sequence
  ENSG00000197993_10 (sequence is synthesized)
caattccaggaggcacgcagaaagctcagccagaaactgcgggaactgacagagcaaccacccatgcctgcccgcccacgatggatgaagtgcgtggaggagacaggcacgttcttcgag

SEQ ID NO: 723126 - DNA, 120 bp, Artificial Sequence
  ENSG00000197993_11 (sequence is synthesized)
cccacgctggcggctttgtttgttcgtgaggcctttggcccgagcacccgaagtgctgccatgaaattattcactgcgatccgggatgccctcatcactcgcctcagaaaccttccctgg

SEQ ID NO: 723127 - DNA, 120 bp, Artificial Sequence
  ENSG00000197993_12 (sequence is synthesized)
atgaatgaggagacccagaacatggcccaggacaaggttgctcaactgcaggtggagatgggggcttcagaatgggccctgaagccagagctggcccgacaagaatacaacgatatacag

SEQ ID NO: 723128 - DNA, 120 bp, Artificial Sequence
  ENSG00000197993_13 (sequence is synthesized)
cttggatcgagcttcctgcagtctgtcctgagctgtgtccggtccctccgagctagaattgtccagagcttcttgcagcctcacccccaacacaggtggaaggtgtccccttgggacgtc

SEQ ID NO: 723129 - DNA, 120 bp, Artificial Sequence
  ENSG00000197993_14 (sequence is synthesized)
aatgcttactattcggtatctgaccatgtggtagtctttccagctggactcctccaacccccattcttccaccctggctatcccagagccgtgaactttggcgctgctggcagcatcatg

SEQ ID NO: 723130 - DNA, 120 bp, Artificial Sequence
  ENSG00000197993_15 (sequence is synthesized)
gcccacgagctgttgcacatcttctaccagctcttactgcctgggggctgcctcgcctgtgacaaccatgccctccaggaagctcacctgtgcctgaagcgccattatgctgcctttcca

SEQ ID NO: 723131 - DNA, 120 bp, Artificial Sequence
  ENSG00000197993_16 (sequence is synthesized)
ttacctagcagaacctccttcaatgactccctcacattcttagagaatgctgcagacgttggggggctagccatcgcgctgcaggcatacagcaagaggctgttacggcaccatggggag

SEQ ID NO: 723132 - DNA, 120 bp, Artificial Sequence
  ENSG00000197993_17 (sequence is synthesized)
actgtcctgcccagcctggacctcagcccccagcagatcttctttcgaagctatgcccaggtgatgtgtaggaagcccagcccccaggactctcacgacactcacagccctccacacctc

SEQ ID NO: 723133 - DNA, 120 bp, Artificial Sequence
  ENSG00000197993_18 (sequence is synthesized)
cgagtccacgggcccctcagcagcaccccagcctttgccaggtatttccgctgtgcacgtggtgctctcttgaacccctccagccgctgccagctctggtaacttggttaccaaagatgc

SEQ ID NO: 723134 - DNA, 120 bp, Artificial Sequence
  ENSG00000197993_19 (sequence is synthesized)
cacagcacagaaatatcgaccaacacctccctggtcacatccatggaatcagagcaagatttcctttctgcttctgttccaaaaataaaagctggcacttggcttccgcttgtctcttaa

SEQ ID NO: 723135 - DNA, 120 bp, Artificial Sequence
  ENSG00000197993_20 (sequence is synthesized)
atggtaagtccccttttggagtcagaggcttagcggggaggggtgagggtggctgtgtgcaaaagtcctgcccccactggaggggagggaatgaaggtggggaccaaagtgaggaagagc

SEQ ID NO: 723136 - DNA, 120 bp, Artificial Sequence
  ENSG00000197993_21 (sequence is synthesized)
taggcaataacatgaaggatttactcagccaggctcatgagaccagctctgaggaagctgtgcttttcttgtactgatcggtgatgtgcatcaccctaagggatagtaaacagatgaaac

SEQ ID NO: 723137 - DNA, 120 bp, Artificial Sequence
  ENSG00000197993_22 (sequence is synthesized)
ccagaaagtccagtcaaaagagcaccctctgggaatgaagatctagtgaagactggggagacagatgaggaaagagtcctgaacaggagccactcattccagctttgtctccatagcctg

SEQ ID NO: 723138 - DNA, 120 bp, Artificial Sequence
  ENSG00000197993_23 (sequence is synthesized)
cccgcccacgatggatgaagtgcgtggaggagacaggcacgttcttcgagcccacgctggcggctttgtttgttcgtgaggcctttggcccgagcacccgaagtgctgtatgtgagagct

SEQ ID NO: 723139 - DNA, 120 bp, Artificial Sequence
  ENSG00000197993_24 (sequence is synthesized)
cttcccagcccacatccctccaccccttcctacccaaagcagccttccctcttctattaactttgactttctcagtggtgtgtgtgattggggaattgggcagtcagagaagggccactg

SEQ ID NO: 723140 - DNA, 120 bp, Artificial Sequence
  ENSG00000197993_25 (sequence is synthesized)
tgccatgctcctgggagctgattcagtctgtggtaccacccacatcctcacctaggcagcaccaaccctatgttctcttgctgtatgttctcttgtcccattttcaacagtactgcctgg

SEQ ID NO: 723141 - DNA, 120 bp, Artificial Sequence
  ENSG00000197993_26 (sequence is synthesized)
ttcctttctccacagatcctttagttgctttagttgagctgctcctctagcagcagctccagcccaggcagctccttggggccaagcccttttccaagggtcagaagctgtgggcagggc

SEQ ID NO: 723142 - DNA, 120 bp, Artificial Sequence
  ENSG00000197993_27 (sequence is synthesized)
cggccacctcccgccacagcttgctttatgtcagttgaacgccttattactgaagctcatggaagtcccctcttcagacactccgtcaaataccccaaaccctcttctgcagatgtcctc

SEQ ID NO: 723143 - DNA, 120 bp, Artificial Sequence
  ENSG00000197993_28 (sequence is synthesized)
actgttatcttttctcttccctccctaccccttggaatcacccctcagatgactacaggttcttctacctagttcagcacccccacaactcaaaaggtagaaaaaactctattcccaagt

SEQ ID NO: 723144 - DNA, 120 bp, Artificial Sequence
  ENSG00000197993_29 (sequence is synthesized)
aactctattcccaagttcctccaggagaggaggagaccaacttttttttcctctcatacccccaaaatacagatgccttaaaaatgagcctgtggttgggcacagtggctcacacctgta

SEQ ID NO: 723145 - DNA, 120 bp, Artificial Sequence
  ENSG00000198000_0 (sequence is synthesized)
agaagttaggggctgcagcggcgctggctttaggtgaacgacgtgaaaattacttttcccactgaaacacacccaagtatatgcccagccttcatgaaagtgaacagagaaacgaagcgc

SEQ ID NO: 723146 - DNA, 120 bp, Artificial Sequence
  ENSG00000198000_1 (sequence is synthesized)
ctttatgtgggtggccttagccaggacatttctgaggcagacctacaaaatcagttcagcagatttggagaagtttcggatgtggagatcatcacacggaaagatgaccaaggaaaccca

SEQ ID NO: 723147 - DNA, 120 bp, Artificial Sequence
  ENSG00000198000_2 (sequence is synthesized)
cagaaagtttttgcatatatcaacatcagtgtagcagaagcggacctgaaaaaatgtatgtctgttttaaataaaacaaaatggaaaggtggaacattacaaattcaactagcaaaagaa

SEQ ID NO: 723148 - DNA, 120 bp, Artificial Sequence
  ENSG00000198000_3 (sequence is synthesized)
agctttctgcacagattggcccaagagagagaagcagcaaaagctaagaaagaagaatcaacaacaggtaacgccaacttgttagaaaagacaggaggagtggatttccatatgaaagct

SEQ ID NO: 723149 - DNA, 120 bp, Artificial Sequence
  ENSG00000198000_4 (sequence is synthesized)
gtgccagggacagaagtgccagggcataagaattgggttgtgagcaaatttggaagagtcttacctgttcttcaccttaaaaatcaacataaacgtaaaatcatcaaatatgatccctca

SEQ ID NO: 723150 - DNA, 120 bp, Artificial Sequence
  ENSG00000198000_5 (sequence is synthesized)
aaatactgccacaacctgaagaagataggggaggatttctcaaacaccattcctatatccagcctgacttgggaattagaaggagggaatgaccctatgagtaagaaacggcgaggagag

SEQ ID NO: 723151 - DNA, 120 bp, Artificial Sequence
  ENSG00000198000_6 (sequence is synthesized)
ttctctgactttcatggccctcccaagaagataataaaagtgcagaaggatgagagttccactgggtctctggccatgagtacaaggcccaggagggtaatagagagaccacccttaaca

SEQ ID NO: 723152 - DNA, 120 bp, Artificial Sequence
  ENSG00000198000_7 (sequence is synthesized)
cagcaacaggctgcacaaaaaagaacttgtgattccattactccttctaaatcatctcctgtacctgtttctgatactcagaaacttaaaaatctaccttttaagacttctggcttggaa

SEQ ID NO: 723153 - DNA, 120 bp, Artificial Sequence
  ENSG00000198000_8 (sequence is synthesized)
actgccaagaagagaaacagcatttctgatgatgatactgattctgaagatgaattgagaatgatgattgcgaaagaggaaaacttacagagaactacacaaccctcaataaatgaatct

SEQ ID NO: 723154 - DNA, 120 bp, Artificial Sequence
  ENSG00000198000_9 (sequence is synthesized)
gaaagtgatccttttgaagttgtaagggatgatttcaaatcaggcgttcacaaactgcattctttaataggtttaggtatcaaaaatcgtgtctcttgccatgatagtgatgatgatatt

SEQ ID NO: 723155 - DNA, 120 bp, Artificial Sequence
  ENSG00000198000_10 (sequence is synthesized)
atgagaaatgatcgtgagtatgactcaggagatacagatgaaattattgcgatgaaaaaaaatgttgctaaggtcaaaaacagtacagaattttcacaaatggaaaaatctacgaagaaa

SEQ ID NO: 723156 - DNA, 120 bp, Artificial Sequence
  ENSG00000198000_11 (sequence is synthesized)
acttctttcaaaaatagagaaaactgtgagctttctgatcactgtattaaactacaaaaaagaaaaagcaatgtagagtcagccctcagtcatggattaaagtctcttaatcgtaaatct

SEQ ID NO: 723157 - DNA, 120 bp, Artificial Sequence
  ENSG00000198000_12 (sequence is synthesized)
ccctctcactccagtagcagtgaagatgctgattctgcatcagaattagctgactctgaaggaggtgaggagtataatgccatgatgaaaaactgccttcgtgtgaatctcactttagct

SEQ ID NO: 723158 - DNA, 120 bp, Artificial Sequence
  ENSG00000198000_13 (sequence is synthesized)
gatttggaacaattggctggcagtgatctgaaggttccaaatgaagatactaagagtgatggaccagaaaccaccacccaatgcaagtttgacagaggctccaagagccccaagactccc

SEQ ID NO: 723159 - DNA, 120 bp, Artificial Sequence
  ENSG00000198000_14 (sequence is synthesized)
actggcctccgcagaggccgacagtgtattcgtcctgcggagattgtggcttccctgttagaaggagaggagaacacctgtggcaaacagaaaccaaaggaaaacaatttaaagccaaaa

SEQ ID NO: 723160 - DNA, 120 bp, Artificial Sequence
  ENSG00000198000_15 (sequence is synthesized)
tttcaggctttcaagggagtaggctgtctatatgaaaaggagtcaatgaaaaaatccttgaaagacagtgttgcctctaacaataaagatcagaattccatgaaacatgaggatcccagt

SEQ ID NO: 723161 - DNA, 120 bp, Artificial Sequence
  ENSG00000198000_16 (sequence is synthesized)
agaccacttttgaaagccaggatcgcaaggcagtgtcccctagcagttctgaaaagagaagtaagaatcctatttctaggccattagaaggtaagaagtccttaagtcttagtgcaaaga

SEQ ID NO: 723162 - DNA, 120 bp, Artificial Sequence
  ENSG00000198000_17 (sequence is synthesized)
ctcacaacataggctttgacaaagacagctgccatagtaccacaaagacagaagcttcacaggaagagcggtctgattcaagcggcctcacatctctcaagaaatcaccaaaggtctcat

SEQ ID NO: 723163 - DNA, 120 bp, Artificial Sequence
  ENSG00000198000_18 (sequence is synthesized)
ccaaggacactcgggaaatcaaaactgatttctcactttctattagtaattcgtcagatgtgagtgctaaagataagcatgctgaagacaatgagaagcgtttggcagccttggaagcga

SEQ ID NO: 723164 - DNA, 120 bp, Artificial Sequence
  ENSG00000198000_19 (sequence is synthesized)
ggcaaaaagcaaaagaagtgcagaagaagctggtgcataatgctctggcaaatttggatggtcatccagaggataagccaacgcacatcatcttcggttctgacagtgaatgtgaaacag

SEQ ID NO: 723165 - DNA, 120 bp, Artificial Sequence
  ENSG00000198000_20 (sequence is synthesized)
aggagacatcgactcaggagcagagccatccaggagaggaatgggtgaaagagtctatgggtaaaacatcagggaagctgtttgatagcagtgatgatgacgaatctgattctgaagatg

SEQ ID NO: 723166 - DNA, 120 bp, Artificial Sequence
  ENSG00000198000_21 (sequence is synthesized)
acagtaataggttcaaaattaaacctcagtttgagggcagagctggacagaagctcatggatttacagtcgcactttggcaccgatgacagattccgcatggactctcgatttctagaaa

SEQ ID NO: 723167 - DNA, 120 bp, Artificial Sequence
  ENSG00000198000_22 (sequence is synthesized)
ctgacagtgaagaggaacaggaagaggtaaatgaaaagaaaactgctgaggaagaagagcttgctgaagaaaaaaagaaagccctgaatgttgtacaaagtgttttgcaaatcaacttaa

SEQ ID NO: 723168 - DNA, 120 bp, Artificial Sequence
  ENSG00000198000_23 (sequence is synthesized)
gcaattctacaaacagaggatcagtagctgctaagaaatttaaggacatcatacattatgatccaacgaagcaagaccatgccacttacgaaagaaaaagagatgataagccaaaagaaa

SEQ ID NO: 723169 - DNA, 120 bp, Artificial Sequence
  ENSG00000198000_24 (sequence is synthesized)
gtaaagcaaaacgaaaaaagaaaagggaggaagctgagaaactacctgaggtgtctaaagaaatgtattataatattgctatggatctgaaagaaatattccaaactacaaaatatacca

SEQ ID NO: 723170 - DNA, 120 bp, Artificial Sequence
  ENSG00000198000_25 (sequence is synthesized)
gtgaaaaggaagagggcacaccctggaatgaggactgtggtaaagagaaacctgaggaaatccaggaccctgcagctctgaccagtgacgctgagcagcccagcgggttcacgttctctt

SEQ ID NO: 723171 - DNA, 120 bp, Artificial Sequence
  ENSG00000198000_26 (sequence is synthesized)
tttttgattcagacactaaagacataaaggaagagacctacagagttgaaacagtgaaacctggaaagattgtctggcaggaagaccctcgtttacaagacagcagttcagaagaggaag

SEQ ID NO: 723172 - DNA, 120 bp, Artificial Sequence
  ENSG00000198000_27 (sequence is synthesized)
atgttactgaagaaacagatcacagaaactccagtcctggagaagcatcattacttgagaaagagaccactagatttttctttttctctaagaatgatgaacgacttcaaggttctgact

SEQ ID NO: 723173 - DNA, 120 bp, Artificial Sequence
  ENSG00000198000_28 (sequence is synthesized)
tattctggagaggagtaggaagtaatatgagcaggaactcttgggaggccagaacaaccaacctgcgtatggattgtcgaaagaaacataaagacgcaaaaaggaaaatgaaaccaaaat

SEQ ID NO: 723174 - DNA, 120 bp, Artificial Sequence
  ENSG00000198000_29 (sequence is synthesized)
aataaatgtcagctggttttgatactgaatgtgaacaaggctcacctaaggaaactgacccagaaaacagttttagctgacaaagaagaaatttcagagtgaaggaattttaaaaatctg

SEQ ID NO: 723175 - DNA, 120 bp, Artificial Sequence
  ENSG00000198000_30 (sequence is synthesized)
gctgacggaatatcattctggttgccatctttttctgtggaactcctctgcatttcttcctaagtaattacttcaaaaattaaattcaacttcttataaaggaagaacaagatagtcctt

SEQ ID NO: 723176 - DNA, 120 bp, Artificial Sequence
  ENSG00000198000_31 (sequence is synthesized)
gaaaatactttttgtatataatctctttgccctctatcctgagtaactaatggacatcttctcatgcaaggtttatatgaagcctttttaaataaatgagtcaaagcacttgtattttcc

SEQ ID NO: 723177 - DNA, 120 bp, Artificial Sequence
  ENSG00000198000_32 (sequence is synthesized)
agcctaggctttgtgtgaattataggctatttgaaattttatttctgattatgtcaaatacaccttccattttgtcatttttgtttaaactgataaattacaagtcaacattgagtttta

SEQ ID NO: 723178 - DNA, 120 bp, Artificial Sequence
  ENSG00000198000_33 (sequence is synthesized)
agaagttaggggctgcagcggcgctggctttaggtgaacgacgtggtgaggagtgggtttcgggcatgagaagtcacagggccgtttcctagtctctcttcacttctttgggtcttctca

SEQ ID NO: 723179 - DNA, 120 bp, Artificial Sequence
  ENSG00000198000_34 (sequence is synthesized)
gagaaagaaggctgccgtgggtaggctgggggcggagactatcgggaagaggtaggccgaagttctgcccagaatacacgccatgtggtggacgctggttgggagtctcttctggaaaga

SEQ ID NO: 723180 - DNA, 120 bp, Artificial Sequence
  ENSG00000198000_35 (sequence is synthesized)
gtctgtcagctcttggggaagggaagggcgagagctgagcgcctgccgggtgctaaacgaaatgagagatactatgatgggccctagtacctctggaaaagttttcctgagtcccctgtg

SEQ ID NO: 723181 - DNA, 120 bp, Artificial Sequence
  ENSG00000198000_36 (sequence is synthesized)
atacagcaaccttcatagtatagtgttaagaattccaagttctgaaggtagacctgcattataatcctggattcactaattttcgaaaattacttttcccactgaaacacacccaagtat

SEQ ID NO: 723182 - DNA, 120 bp, Artificial Sequence
  ENSG00000198000_37 (sequence is synthesized)
gccccatgctgagcaggttgagcacacagtgctgctgcttggagtatctgcgtggatatgcctgagaagcatgggtctgatggttattctgggacataaaggagacagaccagaggcaaa

SEQ ID NO: 723183 - DNA, 120 bp, Artificial Sequence
  ENSG00000198000_38 (sequence is synthesized)
gaggccagtgaggactgctctgtgcagttgtccaggcctgaagaaggtggcggtgatttgaatcagaagaggtggcattctcttcattaggaggatatggataatcaagacctaacaaat

SEQ ID NO: 723184 - DNA, 120 bp, Artificial Sequence
  ENSG00000198000_39 (sequence is synthesized)
tgggctccgaaagataccttcgtcatggggaagagtgaatggagagaagataatataaaatgccaaacgtatataaattgaaaggggaaaattgagagaacttgcgatccatggtcttgg

SEQ ID NO: 723185 - DNA, 120 bp, Artificial Sequence
  ENSG00000198000_40 (sequence is synthesized)
ggacagcagtgatgaagagaattccagtatcgtataactcagcaggtttaggtccattccatttggcatcagcagacatggtagcactttactggtgggtttacttaaaactgctattct

SEQ ID NO: 723186 - DNA, 120 bp, Artificial Sequence
  ENSG00000198000_41 (sequence is synthesized)
caaatattttggacaagggaccaaactttcatagaaactgcctgttacatatatcccactgaatatcatgccacattccccctcagtctgatcatttctttgacagctaatccttgtcac

SEQ ID NO: 723187 - DNA, 120 bp, Artificial Sequence
  ENSG00000198000_42 (sequence is synthesized)
taaacactcttgagggggctttaaaatacacccttgtaagaccgtatccttgaaattgtgaaatctcttgttgataagtttagtaaagtcaagggcaaacagtggccttcaatgaagaat

SEQ ID NO: 723188 - DNA, 120 bp, Artificial Sequence
  ENSG00000198000_43 (sequence is synthesized)
gggagataatccatactgccgctgacacagtaacatattctagttatttggaggccaaaaagtgaaaaaagacacggaaaataagtaaagggaacacgctaatagaggaagagggcaatc

SEQ ID NO: 723189 - DNA, 120 bp, Artificial Sequence
  ENSG00000198000_44 (sequence is synthesized)
ggaggaagaaggctggggtgggtaggttgggggtggagacaattaggaagaggtaggctagctctttttatcttttagtgcgttacatcctgtttctgtcagactttgttaaagacagta

SEQ ID NO: 723190 - DNA, 120 bp, Artificial Sequence
  ENSG00000198000_45 (sequence is synthesized)
aatgaatgtatgagtgagtcaaggaaaaacatctaaaaacatgaatacataaaattaagagggatagagtgtaatattatggccatttggaggaaaaaaactctgtctgtacctgtgtct

SEQ ID NO: 723191 - DNA, 120 bp, Artificial Sequence
  ENSG00000198000_46 (sequence is synthesized)
atatgggtatggggttgctgttccaaagtgcattcatgaaagatgtggatgtagggcttgggcaaaacctcgaagactaaaatttggaagtaatacaataggaagtgaaatacagatcca

SEQ ID NO: 723192 - DNA, 120 bp, Artificial Sequence
  ENSG00000198000_47 (sequence is synthesized)
ggagacggatttgatacagaaggttcagaggaagtagttgttttgttagattttagaagaactaagggaaagaactcttctctgtatacagaaaattacttttcccactgaaacacaccc

SEQ ID NO: 723193 - DNA, 120 bp, Artificial Sequence
  ENSG00000198000_48 (sequence is synthesized)
tgcctgttcaaattagcagccagtgttttttgtaaaccatcttacacggtttacttgggattgatagctgctccaaatcttcctttttttttctttcctctcacaatttttctctttggt

SEQ ID NO: 723194 - DNA, 120 bp, Artificial Sequence
  ENSG00000198000_49 (sequence is synthesized)
aactcttatttcattgtcagaaaactaaacccaacagtaatcatagcccactgatttttttgttgtatttacctaatattgttattaaatcttttccatttgtgtcacatatagtaaata

SEQ ID NO: 723195 - DNA, 120 bp, Artificial Sequence
  ENSG00000198000_50 (sequence is synthesized)
tagaacaggtaataatacagctacagtaattcacatccaggaattttgaccgttggtaatgtcatgtggtttaaccccatttgttcacactgatgaatgttaacttgtaaagctgtcaag

SEQ ID NO: 723196 - DNA, 120 bp, Artificial Sequence
  ENSG00000198000_51 (sequence is synthesized)
gtctgagagctccccactcaccactttctttgcccgctcattctcatcaacaaagggttgttttgttccaagggcttccttagatgttagacatataaaacccctaagttttagtgccat

SEQ ID NO: 723197 - DNA, 120 bp, Artificial Sequence
  ENSG00000198000_52 (sequence is synthesized)
aaattccatgtgaaaactcaggctgttggggagctcatttcttaaagcctagcataaacaaagttacataatagtaaatgatatatataaacagtaaaagcaatattatatttttcattt

SEQ ID NO: 723198 - DNA, 120 bp, Artificial Sequence
  ENSG00000198000_53 (sequence is synthesized)
ctgagggaaaagaatgatcttaactggtattcgagaccttgataatgccaacacttagaatattaccaattttagtagtagtttgctgcctcatctttcttctttttcccctaataggtt

SEQ ID NO: 723199 - DNA, 120 bp, Artificial Sequence
  ENSG00000198000_54 (sequence is synthesized)
cgccgacctagtccaggaattggtacacacagcgatagtgttcaatagaaactaggggattttggaaattaaaagctcttgggaactgaattgtggtaacggaaccttaggaggctgggt

SEQ ID NO: 723200 - DNA, 120 bp, Artificial Sequence
  ENSG00000198000_55 (sequence is synthesized)
tggaaatcgagtaggaaggaagagaggatgctccgttgggacacgtgaccagaagttaggggctgcagcggcgctggctttagaaaattacttttcccactgaaacacacccaagtatat

SEQ ID NO: 723201 - DNA, 120 bp, Artificial Sequence
  ENSG00000198000_56 (sequence is synthesized)
tctttgggtcttctaggaggaagaaggctggggtgggtaggttgggggtggagacaattaggaagaggaaacccacagaaagtttttgcatatatcaacatcagtgtagcagaagcggac

SEQ ID NO: 723202 - DNA, 120 bp, Artificial Sequence
  ENSG00000198000_57 (sequence is synthesized)
agtcaggaatttccacctgacctgccatttactcattcctggtagatgagtctgggttactggctttcaatgtgagggagaagattacgttatgaagggaaatactgcttgtttgcctct

SEQ ID NO: 723203 - DNA, 120 bp, Artificial Sequence
  ENSG00000198000_58 (sequence is synthesized)
gtgcagtggtgcaatctcggttcactagcagataataccaactccgtggtactttaaaaggaagtataacaatctagtagttgttcaaaaagtattgcaaataagacttcattttcttgt

SEQ ID NO: 723204 - DNA, 120 bp, Artificial Sequence
  ENSG00000198000_59 (sequence is synthesized)
ttgtctatataaactgttgagtagagttggcatgatgtaaatagtaacgatagtttttctaactttgagagcaaaacgtgagaaattgaccttgaaacgagtcctaaagacatcagcaac

SEQ ID NO: 723205 - DNA, 120 bp, Artificial Sequence
  ENSG00000198000_60 (sequence is synthesized)
ttgaaagatgttttttaagtacttgggaaattttgaagacttgtgaggtgattgtcctgatcttatagcagtagtttttccagcagttctagcaaaaagttttgggtattgaaaatgtaa

SEQ ID NO: 723206 - DNA, 120 bp, Artificial Sequence
  ENSG00000198000_61 (sequence is synthesized)
agatatattccttttctcatttataaatagacaagagggaaacctgatttccctgtatcctattatattttaggcttctcatgcaagcacagatgccatggttattttaggtgtcatttt

SEQ ID NO: 723207 - DNA, 120 bp, Artificial Sequence
  ENSG00000198000_62 (sequence is synthesized)
taaaaattatatagctcatttataaacctttattttttaaaccttttttatattactgctgtccttatcagatcattctagcaatgccaaaattatgatagtggcttctgaaaatatttg

SEQ ID NO: 723208 - DNA, 120 bp, Artificial Sequence
  ENSG00000198000_63 (sequence is synthesized)
aaaaatctaaaaagatgatactacctatttttttgatactattttaaattaatgattaacatattggaactttagatatgtctacgtggtaaaagtaatcaaatgaatgtgttcagaaat

SEQ ID NO: 723209 - DNA, 120 bp, Artificial Sequence
  ENSG00000198000_64 (sequence is synthesized)
cttacgccgacctagtccaggaattggtacacacagcgatagtgttcaatagaaactaggggattttggtttaggctcttttgcagtcgttgagggggaggtgacggaggcgtcagggaa

SEQ ID NO: 723210 - DNA, 120 bp, Artificial Sequence
  ENSG00000198001_0 (sequence is synthesized)
cttcctagttcggctggttcttctgtcgccggcttcagcagcccgcgcccgggcaggggcctggagcagtatctagcacaaagtagacactcagtaaatatttggaatagaagatgaaca

SEQ ID NO: 723211 - DNA, 120 bp, Artificial Sequence
  ENSG00000198001_1 (sequence is synthesized)
aacccataacaccatcaacatatgtgcgctgcctcaatgttggactaattaggaagctgtcagattttattgatcctcaagaaggatggaagaagttagctgtagctattaaaaaaccat

SEQ ID NO: 723212 - DNA, 120 bp, Artificial Sequence
  ENSG00000198001_2 (sequence is synthesized)
ctggtgatgatagatacaatcagtttcacataaggagatttgaagcattacttcaaactggaaaaagtcccacttctgaattactgtttgactggggcaccacaaattgcacagttggtg

SEQ ID NO: 723213 - DNA, 120 bp, Artificial Sequence
  ENSG00000198001_3 (sequence is synthesized)
atcttgtggatcttttgatccaaaatgaattttttgctcctgcgagtcttttgctcccagatgctgttcccaaaactgctaatacactaccttctaaagaagctataacagttcagcaaa

SEQ ID NO: 723214 - DNA, 120 bp, Artificial Sequence
  ENSG00000198001_4 (sequence is synthesized)
aacagatgcctttctgtgacaaagacaggacattgatgacacctgtgcagaatcttgaacaaagctatatgccacctgactcctcaagtccagaaaataaaagtttagaagttagtgata

SEQ ID NO: 723215 - DNA, 120 bp, Artificial Sequence
  ENSG00000198001_5 (sequence is synthesized)
cacgttttcacagtttttcattttatgaattgaagaatgtcacaaataactttgatgaacgacccatttctgttggtggtaataaaatgggagagggaggatttggagttgtatataaag

SEQ ID NO: 723216 - DNA, 120 bp, Artificial Sequence
  ENSG00000198001_6 (sequence is synthesized)
gctacgtaaataacacaactgtggcagtgaagaagcttgcagcaatggttgacattactactgaagaactgaaacagcagtttgatcaagaaataaaagtaatggcaaagtgtcaacatg

SEQ ID NO: 723217 - DNA, 120 bp, Artificial Sequence
  ENSG00000198001_7 (sequence is synthesized)
cttagtagaactacttggtttctcaagtgatggagatgacctctgcttagtatatgtttacatgcctaatggttcattgctagacagactctcttgcttggatggtactccaccactttc

SEQ ID NO: 723218 - DNA, 120 bp, Artificial Sequence
  ENSG00000198001_8 (sequence is synthesized)
ttggcacatgagatgcaagattgctcagggtgcagctaatggcatcaattttctacatgaaaatcatcatattcatagagatattaaaagtgcaaatatcttactggatgaagcttttac

SEQ ID NO: 723219 - DNA, 120 bp, Artificial Sequence
  ENSG00000198001_9 (sequence is synthesized)
tgctaaaatatctgactttggccttgcacgggcttctgagaagtttgcccagacagtcatgactagcagaattgtgggaacaacagcttatatggcaccagaagctttgcgtggagaaat

SEQ ID NO: 723220 - DNA, 120 bp, Artificial Sequence
  ENSG00000198001_10 (sequence is synthesized)
aacacccaaatctgatatttacagctttggtgtggttttactagaaataataactggacttccagctgtggatgaacaccgtgaacctcagttattgctagatattaaagaagaaattga

SEQ ID NO: 723221 - DNA, 120 bp, Artificial Sequence
  ENSG00000198001_11 (sequence is synthesized)
agatgaagaaaagacaattgaagattatattgataaaaagatgaatgatgctgattccacttcagttgaagctatgtactctgttgctagtcaatgtctgcatgaaaagaaaaataagag

SEQ ID NO: 723222 - DNA, 120 bp, Artificial Sequence
  ENSG00000198001_12 (sequence is synthesized)
accagacattaagaaggttcaacagctgctgcaagagatgacagcttcttaaaactttattggaaaagactcttgactttttatatacacctatctcaaccatttttttaactgattttt

SEQ ID NO: 723223 - DNA, 120 bp, Artificial Sequence
  ENSG00000198001_13 (sequence is synthesized)
ttcctaaatattcttctttacctttaacaaggcataggctgttgcaggacagtggttattaaagcatgggttgaacttccaaaatataaaaatagagccaccatatcaacacttagccct

SEQ ID NO: 723224 - DNA, 120 bp, Artificial Sequence
  ENSG00000198001_14 (sequence is synthesized)
gagaaatctccttcaagcatcaccaaacacagtttgaaaattacagggttagcaaaaagagcctgggctgtatgtagggtggaaacactctgatctgaagcccagctgactccactacta

SEQ ID NO: 723225 - DNA, 120 bp, Artificial Sequence
  ENSG00000198001_15 (sequence is synthesized)
atttgctgtaaagctttggacatacacttagctgctgtgagccactaataacattgggctaatatctgctgtgcttctctgacaggtagtcatgaaaatcaaatgatgcaaaatatatac

SEQ ID NO: 723226 - DNA, 120 bp, Artificial Sequence
  ENSG00000198001_16 (sequence is synthesized)
aagcactttgtaaattgtaaaatgatacaaaatttaaagtttatagagccagttacaaaatcctattagtcatatatttatagattgtgttcacagcaatcatttaaccacaaataaaat

SEQ ID NO: 723227 - DNA, 120 bp, Artificial Sequence
  ENSG00000198001_17 (sequence is synthesized)
cagttaaggttcctaaacaactcactttgagactgttgaaagggcctgacctaatcaagtgaacccttgcaagaagaattctccttgtaagccttgaagaagtatgtgagagggccacat

SEQ ID NO: 723228 - DNA, 120 bp, Artificial Sequence
  ENSG00000198001_18 (sequence is synthesized)
tggctaaaacctaaaggtggcctctaggagatgagacctaccttccagttgtcagcaagcaggaaaaaaaaattgggacctcagttgcaaccacaaggaactgaattctgccaaaaatct

SEQ ID NO: 723229 - DNA, 120 bp, Artificial Sequence
  ENSG00000198001_19 (sequence is synthesized)
gagtcagcttagaagagtactccaagcttcagatgataaccacagcctgggctgacacctggatttcagctttgcatgatcctcagtatgagaatctatctgttctgtgctggacttcta

SEQ ID NO: 723230 - DNA, 120 bp, Artificial Sequence
  ENSG00000198001_20 (sequence is synthesized)
cctcagtatgagaatctatctgttctgtgctggacttctaatatatagaactgtgagataatgggtcacattggctggatgtggtggctcatacctgtaaatcccagcactttgggaggc

SEQ ID NO: 723231 - DNA, 64 bp, Artificial Sequence
  ENSG00000198001_21 (sequence is synthesized)
ctactaaaaatacaaaaattagacgagctggaaccagggaggtagaggttgcagtgagctgaga

SEQ ID NO: 723232 - DNA, 120 bp, Artificial Sequence
  ENSG00000198001_22 (sequence is synthesized)
tggtaatttattattcagtaatagaaaacaaatacagatactctcccatgatgtttttcccatgatgatttcccatgatatttacaggttttgcccacatttgaggggtatgtggaaatt

SEQ ID NO: 723233 - DNA, 120 bp, Artificial Sequence
  ENSG00000198001_23 (sequence is synthesized)
atacagagcatgtacagcgggaggcttatagtgtacgtactgaaatgtggggttggagccccaacacagagaccccagcaggacactgcctagtagagctatgggaagggtgctgccacc

SEQ ID NO: 723234 - DNA, 120 bp, Artificial Sequence
  ENSG00000198001_24 (sequence is synthesized)
ctccagacttgagaattgtagagccaccagcagcttgcactctgagcttggaaaagccacaggcactcaacttcaaccatgagggaagccacgcaccctgcaaagccacaggagtggagc

SEQ ID NO: 723235 - DNA, 120 bp, Artificial Sequence
  ENSG00000198001_25 (sequence is synthesized)
gccacaggagtggagctgcccacggcctcgagggcccaccccttgcaccagtgtgccaggatgtgggacatggaatcaaggaatatgttagggcttttttttttttttttttgagacgga

SEQ ID NO: 723236 - DNA, 120 bp, Artificial Sequence
  ENSG00000198001_26 (sequence is synthesized)
aatgtcttcccagctgggtttcagacttgccaggatcctgttgcccctttctttagccaatttctcccttttgggacaagaatgttttacttattgcctgtaccaccaactgtatcttgg

SEQ ID NO: 723237 - DNA, 120 bp, Artificial Sequence
  ENSG00000198001_27 (sequence is synthesized)
aaataaataacttatattttatttcagaggctcataggcggcaggaacttaccttgagtctcaaatgagacttaggacttttgagtgatgctagaatgagttaagactttgggaagggat

SEQ ID NO: 723238 - DNA, 120 bp, Artificial Sequence
  ENSG00000198001_28 (sequence is synthesized)
gattatattttgcaatgtgagaaagacattagatttggggggctgggggtagaatgacattgtttagatgtttgtctccttcaaatttcatgtttaaatgtaatccccagtgttgggggt

SEQ ID NO: 723239 - DNA, 120 bp, Artificial Sequence
  ENSG00000198001_29 (sequence is synthesized)
ggaggtggggcctgatgggaagtgtttgggtcatggtggatgatccctcatgaatggcttagagccactggtgatgagtgagttctcactcagttcgtgtgagatctggtggcttaaaag

SEQ ID NO: 723240 - DNA, 120 bp, Artificial Sequence
  ENSG00000198001_30 (sequence is synthesized)
agtctgctccccctttgccttccattgtgattgtaaccttcctggggccttcatcaaaggccaggcaaatattggtgccgtgctagtatggcctgcagaaccgtaagccaaaacaaacct

SEQ ID NO: 723241 - DNA, 120 bp, Artificial Sequence
  ENSG00000198001_31 (sequence is synthesized)
tttttctttataaattacccagcctcagttattcctttatagtgatgcaaaacgggctaactatataaatttgtaatttttaagttatagattgtttttattaaacacttatgaatactg

SEQ ID NO: 723242 - DNA, 120 bp, Artificial Sequence
  ENSG00000198001_32 (sequence is synthesized)
ccttcgcggcgcttcctagttcggctggttcttctgtcgccggcttcagcagcccgcgcccgggcaggggcctggagcagtatctagcacaaagtagacactcagtaaatatttgctgga

SEQ ID NO: 723243 - DNA, 120 bp, Artificial Sequence
  ENSG00000198001_33 (sequence is synthesized)
ttttcttcatatacatcaaccaaaacaacatgctgcagtgggttgagtgcagaagcagatacaagaattcagctctcttctattaagttaaatattgaagagattagcaaaactttaaaa

SEQ ID NO: 723244 - DNA, 120 bp, Artificial Sequence
  ENSG00000198001_34 (sequence is synthesized)
gccttgagcaaatcactagtatttctagatctcagttattctgtagaattgggagaataatacactattgttttaaagaaagggagatgagccagctgatctcttgatccctctgagcat

SEQ ID NO: 723245 - DNA, 120 bp, Artificial Sequence
  ENSG00000198001_35 (sequence is synthesized)
cttcgcggcgcttcctagttcggctggttcttctgtcgccggcttcagcagcccgcgcccgggcaggtaaggcattccccgccttaatgcctcggtcaaacgtcgtccgaggtccgcttc

SEQ ID NO: 723246 - DNA, 120 bp, Artificial Sequence
  ENSG00000198001_36 (sequence is synthesized)
caggcctcggcacctctgccccagggttgctggggtcggctgcggaacggaaatctctttatcatccgtgagaaaagttagagaggaagtgggttcctttgacagagcttactccagaag

SEQ ID NO: 723247 - DNA, 120 bp, Artificial Sequence
  ENSG00000198001_37 (sequence is synthesized)
aaagacttgggtaggtccccggtaatcaagaagttcgtcggccctgaggaagagcctgaggcttggagggacgtcacccagctgttctggggcgcagtcggacctcaagtttctcacctc

SEQ ID NO: 723248 - DNA, 120 bp, Artificial Sequence
  ENSG00000198001_38 (sequence is synthesized)
tcaggccctggattccgtgaacccgactgcgaaatgaagtctcttttccccagaaccaggaagtcaggccagcacctgacagatgcctgtggcgccagcagctcgctgagcctccacacg

SEQ ID NO: 723249 - DNA, 120 bp, Artificial Sequence
  ENSG00000198001_39 (sequence is synthesized)
attgtaattcgcttgtttctccggcctccaagcttccagggaattagaaagtggaggcggcttatgggatcagatgagtacattcgcagatgggggaaaaaagtgtacctgtcagcttgg

SEQ ID NO: 723250 - DNA, 120 bp, Artificial Sequence
  ENSG00000198001_40 (sequence is synthesized)
tggcagtttagaaagtaaacctctccactatggaggagacattggtagtaggtaacctctttttgattgttccttttgcagttttgtcttctttgtcccatatgtcaatagggctaatac

SEQ ID NO: 723251 - DNA, 120 bp, Artificial Sequence
  ENSG00000198001_41 (sequence is synthesized)
tgtgatctctcaaataagttttttgggttagaatcaagattcccacctttgctgtggttccctgtttggcaagccaagtgaagttcactctgcctcacacttctcatttccagattgaag

SEQ ID NO: 723252 - DNA, 120 bp, Artificial Sequence
  ENSG00000198001_42 (sequence is synthesized)
ctggtgatgatagatacaatcagtttcacataagatgatgtagcaagaaggccctaaccagatgcagcctctcgatcttggacttcccagcctccagaaccgagatttgaagcattactt

SEQ ID NO: 723253 - DNA, 120 bp, Artificial Sequence
  ENSG00000198001_43 (sequence is synthesized)
cccgccccttcgcggcgcttcctagttcggctggttcttctgtcgccggcttcagcagcccgcgcccgggcagatgctgttcccaaaactgctaatacactaccttctaaagaagctata

SEQ ID NO: 723254 - DNA, 120 bp, Artificial Sequence
  ENSG00000198003_0 (sequence is synthesized)
gcatttttcagagccctaggaatccgagctgacggatccctgacaggggcgactgactcctagttatccccctaacccctaggggccttcagccccaaccccatcatgacatctcctctg

SEQ ID NO: 723255 - DNA, 120 bp, Artificial Sequence
  ENSG00000198003_1 (sequence is synthesized)
tgcagggcggcctccgccaacgccctgcctcctcaggaccaggcttcgacgccctcttccagggtcaagggcagggaggcttcgggcaaacccagccacctccgaggcaagggcacagcc

SEQ ID NO: 723256 - DNA, 120 bp, Artificial Sequence
  ENSG00000198003_2 (sequence is synthesized)
caggcgtggaccccaggccgttccaagggaggatccttccacagaggtgcagggaagccctctgtgcactctcaggtggctgagttacataaaaagatacaactgttagagggtgaccgg

SEQ ID NO: 723257 - DNA, 120 bp, Artificial Sequence
  ENSG00000198003_3 (sequence is synthesized)
aaggctttttttgagagctctcagtggaacatcaagaagaaccaggagaccatcagtcagctccgcaaggagactaaggcactggaactaaagctgctggacctgctcaagggagatgag

SEQ ID NO: 723258 - DNA, 120 bp, Artificial Sequence
  ENSG00000198003_4 (sequence is synthesized)
aaagtggtccaggcagtgattcgcgaatggaagtgggagaagccatacctgaagaacaggacaggacaggccctggagcacctagaccaccggctgagggagaaggtgaagcagcagaac

SEQ ID NO: 723259 - DNA, 120 bp, Artificial Sequence
  ENSG00000198003_5 (sequence is synthesized)
gccctgcggcaccaggtggtgttgcggcagaggcggctggaggagctccagctgcagcacagcctgcgccttctggagatggcggaggcgcaaaacagacacacggaggtggccaagacc

SEQ ID NO: 723260 - DNA, 120 bp, Artificial Sequence
  ENSG00000198003_6 (sequence is synthesized)
atgcggaacctggagaaccgcctggagaaggcccagatgaaggcgcaggaggccgagcacattaccagcgtgtacctgcagctcaaggcctatctaatggacgagagcctcaacttggag

SEQ ID NO: 723261 - DNA, 120 bp, Artificial Sequence
  ENSG00000198003_7 (sequence is synthesized)
aaccggctggactccatggaggctgaggtggtgaggaccaaacatgagctggaggcactgcacgtggtgaaccaagaggccctcaatgcccgggacattgccaagaaccagctgcagtac

SEQ ID NO: 723262 - DNA, 120 bp, Artificial Sequence
  ENSG00000198003_8 (sequence is synthesized)
ggagaacgagcgcatggagcgcaagacccaccgcgagcacctgctgctacagtccgacgacaccatccaggacagcctgcatgccaaggaggaggagctgcggcagcgctggagcatgta

SEQ ID NO: 723263 - DNA, 120 bp, Artificial Sequence
  ENSG00000198003_9 (sequence is synthesized)
ccagatggaggtgatctttggcaaggtcaaggacgccactggcactgacgagacgcactcgttggtgcggcggttcctggcccagggcgacaccttcgcgcagttggagacgctcaagag

SEQ ID NO: 723264 - DNA, 120 bp, Artificial Sequence
  ENSG00000198003_10 (sequence is synthesized)
cgagaacgagcagacgttggtgaggctgaagcaggagaagcaacaactgcagcgggagctggaagacctcaagtactcgggggaggccacgctggtgagccagcagaaactgcaagccga

SEQ ID NO: 723265 - DNA, 120 bp, Artificial Sequence
  ENSG00000198003_11 (sequence is synthesized)
ggcgcaggagcgtctcaagaaggaggagcggcggcacgccgaggccaaggaccagctggagcgcgccttgcgggcgatgcaagtggccaaggacagcctggagcacctggccagcaagct

SEQ ID NO: 723266 - DNA, 120 bp, Artificial Sequence
  ENSG00000198003_12 (sequence is synthesized)
gatccacatcactgtggaggacggccgcttcgcgggaaaggagctggatccccaggcagataactatgtgccaaacctgctgggcctcgtggaggaaaagctgctgaaactgcaggcgca

SEQ ID NO: 723267 - DNA, 120 bp, Artificial Sequence
  ENSG00000198003_13 (sequence is synthesized)
gctccagggccacgacgtgcaggagatgctgtgccacatcgctaaccgcgagttcctcgccagcttagagggaaggctgcccgaatacaacacccgcatcgccctgccccttgccacttc

SEQ ID NO: 723268 - DNA, 120 bp, Artificial Sequence
  ENSG00000198003_14 (sequence is synthesized)
caaggacaagttttttgacgaagagagtgaggaggaggacaacgaggtagtgacccgcgcatcactcaagatccgttcccagaaattaatcgaaagtcacaagaagcaccgtcgctctcg

SEQ ID NO: 723269 - DNA, 120 bp, Artificial Sequence
  ENSG00000198003_15 (sequence is synthesized)
gaggtcctagactcgtcctgacacccaccaggcggcccccttcggagcccccgatccctccgggtctagcgcaggccccacggggccccttcaggggctgaacgcggcccggaccgggaa

SEQ ID NO: 723270 - DNA, 120 bp, Artificial Sequence
  ENSG00000198003_16 (sequence is synthesized)
cggaggcggccagcggcgcccggaggggaggaaggggccgggccagacgttcccacagtaaatctccccagctgggtccgccccggcctcagagttgcgcaataaatgttaccgaccatg

SEQ ID NO: 723271 - DNA, 120 bp, Artificial Sequence
  ENSG00000198003_17 (sequence is synthesized)
cctcctccttcatttccagcctgggtcccctcaccactggactccaggctcaccctctccaatccttcctgcacactagctgccattcatgtgctcattcaattaaatctttattactca

SEQ ID NO: 723272 - DNA, 120 bp, Artificial Sequence
  ENSG00000198010_0 (sequence is synthesized)
ctgggcgccgagtgcgcaggcgccggccgtgaagaccgaccgtgcgccgggctcgagcgcggtctgagcgcgcggcgcctgcggcggcgaacggacggacggaccgcggacggacgtact

SEQ ID NO: 723273 - DNA, 120 bp, Artificial Sequence
  ENSG00000198010_1 (sequence is synthesized)
gaccccaacccgcgagccccgggagccgtcggtctgaggaggggccgcttcgccatgtcgccccgcacctgctgagcccggagcgtccgaggatgtccgcgctgaggaaggttttgcctg

SEQ ID NO: 723274 - DNA, 120 bp, Artificial Sequence
  ENSG00000198010_2 (sequence is synthesized)
gcattctgcagaagcattgctgtatcttaccagacaggaatacagagtcgcagtgcacgctctgcggggagccggaagaggaagaagctggagacttggtccagccgggcatcagctttc

SEQ ID NO: 723275 - DNA, 120 bp, Artificial Sequence
  ENSG00000198010_3 (sequence is synthesized)
cggggccggcagaggaggatctagacccgcagtactcatggtcgcccacgcagcacttcaatgaggagcgctactcgcccgcgcccaggagcatgaagggcctttccggaagtcggaccc

SEQ ID NO: 723276 - DNA, 120 bp, Artificial Sequence
  ENSG00000198010_4 (sequence is synthesized)
agccgccgctgtgttccgggcacacgtgtggtctggcgcccccggaggactgcgagcacctgcaccacgggcccgacgcgcggccgccctacctgctgagccccgccgacagctgccccg

SEQ ID NO: 723277 - DNA, 120 bp, Artificial Sequence
  ENSG00000198010_5 (sequence is synthesized)
gggggcgccaccgctgctcgccgcgcagctcggtgcactcggagtgcgtgatgatgccggtggtgctgggcgaccacgtgtccagcagcaccttcccgcggatgcactacagctcgcact

SEQ ID NO: 723278 - DNA, 120 bp, Artificial Sequence
  ENSG00000198010_6 (sequence is synthesized)
acgacacgcgcgacgactgcgctgtggcccacgcgggcgccaagatcaaccgcatcccggccaacctgctggaccagttcgagaagcagctgccgctgcaccgggacggcttccacacgc

SEQ ID NO: 723279 - DNA, 120 bp, Artificial Sequence
  ENSG00000198010_7 (sequence is synthesized)
tgcagtaccagaggacgtccgcggccgccgagcagcgcagcgagagccccgggcggatccgccacctggtacactccgtgcagaagctcttcaccaagtcgcactcgctggagggctcct

SEQ ID NO: 723280 - DNA, 120 bp, Artificial Sequence
  ENSG00000198010_8 (sequence is synthesized)
ccaaaagcaacgccaacggcaccaaggcggacggccgggcggacgaccaccaccacgcccaccacgccaagcacagcaagaggagcaagagcaaggagcgcaagccggagggcaagcccc

SEQ ID NO: 723281 - DNA, 120 bp, Artificial Sequence
  ENSG00000198010_9 (sequence is synthesized)
ggcccggcatgagcagctggtggagctcggacgacaacctggacagcgacagcacctatcggacgcccagcgtgctcaaccggcaccacctgggccccgtggcccactgctaccccgacg

SEQ ID NO: 723282 - DNA, 120 bp, Artificial Sequence
  ENSG00000198010_10 (sequence is synthesized)
cgctgcagagccccttcggggacctgtccctcaagacctccaagagcaacaacgacgtcaagtgctcggcctgtgaggggttggcgctgacgcccgacgccaagtacctgaagcgcagct

SEQ ID NO: 723283 - DNA, 120 bp, Artificial Sequence
  ENSG00000198010_11 (sequence is synthesized)
cctggtctacgctgacggtcagccaggccaaggaggcctaccgcaagagctcgctgaacctggacaagccgctgctgcaccaggacgccaagcccgccctgaggccgtgccactacctcc

SEQ ID NO: 723284 - DNA, 120 bp, Artificial Sequence
  ENSG00000198010_12 (sequence is synthesized)
aggtacctcaggatgagtggggagggtaccccaccggtggcaaagatgaggagattccctgcaggagaatgagaagtgggagttacattaaagccatgggggacgaggagagcggagagt

SEQ ID NO: 723285 - DNA, 120 bp, Artificial Sequence
  ENSG00000198010_13 (sequence is synthesized)
cagactccagccccaagacatcaccaaagtcggcaatcctaccagagccgctgctgaagtccatcggacagagaccgcttggagagcaccagacccagacctacctgcaagctgcaagcg

SEQ ID NO: 723286 - DNA, 120 bp, Artificial Sequence
  ENSG00000198010_14 (sequence is synthesized)
ctggaccccgctgcgaactacaactccccgaaattccgctcccggaaccagagctacatgagggccgtcagcaccctgagccaggccagctgcgtgagccaggtgagcgaggcggagatc

SEQ ID NO: 723287 - DNA, 120 bp, Artificial Sequence
  ENSG00000198010_15 (sequence is synthesized)
aatgggcaattcgagtccgtgtgcgagtccgtcttcagtgaagttgaatctcaggccatggatgccctcgacctcccgggatgtttccgaacaaggagtcacagctaccttcgagccatt

SEQ ID NO: 723288 - DNA, 120 bp, Artificial Sequence
  ENSG00000198010_16 (sequence is synthesized)
caagccggctactcccaagatgacgaatgtattcccatgatgacaccctctgacatcacctccaccatcaggtcaacagcagctgtctcatatacaaattacaagaaaacgcccccaccg

SEQ ID NO: 723289 - DNA, 120 bp, Artificial Sequence
  ENSG00000198010_17 (sequence is synthesized)
gtgccccctcggaccacctccaagcctctgatctcggtgacggcgcagagcagcaccgaatccacccaggacgcctaccaggacagccgcgcacagaggatgtccccgtggccccaggac

SEQ ID NO: 723290 - DNA, 120 bp, Artificial Sequence
  ENSG00000198010_18 (sequence is synthesized)
agccgcggcctctacaactccacggacagcctggacagcaacaaggccatgaacctcgcgctggaaacggccgctgcccagcgccacctgccagagagccagagcagctctgtgcggacc

SEQ ID NO: 723291 - DNA, 120 bp, Artificial Sequence
  ENSG00000198010_19 (sequence is synthesized)
agcgacaaggccatcctggtgtccaaggcggaggagctcctcaagagccgctgctcctccatcgggattcaggattctgaattcccagagcatcagccatacccaaggtcagatgtggaa

SEQ ID NO: 723292 - DNA, 120 bp, Artificial Sequence
  ENSG00000198010_20 (sequence is synthesized)
acggccacagattctgacacggagagccgcggtctgcgggaataccactctgtcggggtgcaagtggaagatgagaagcgacacggacgttttaaacgttctaacagcgtcacggccgcc

SEQ ID NO: 723293 - DNA, 120 bp, Artificial Sequence
  ENSG00000198010_21 (sequence is synthesized)
gtccaagctgacctggagctggaggggttcccaggccacatcaccacggaggacaaaggccttcagttcggctcatccttccagcggcactccgagcccagcacccccacccagtacagc

SEQ ID NO: 723294 - DNA, 120 bp, Artificial Sequence
  ENSG00000198010_22 (sequence is synthesized)
gcggtgagaactgtacggacccaggggctcttcagctatagagaagactatcggacccaagtggacacctccaccctgccccctccagacccctggctggagcccgccatcgacacggta

SEQ ID NO: 723295 - DNA, 120 bp, Artificial Sequence
  ENSG00000198010_23 (sequence is synthesized)
gagactgggaggatgtctccgtgccgcagggatggctcgtggtttttgaagctgctgcacgcagagacaaagaggatggaaggctggtgcaaagagatggagagagaggcggaggagaac

SEQ ID NO: 723296 - DNA, 120 bp, Artificial Sequence
  ENSG00000198010_24 (sequence is synthesized)
gacctctcggaggaaattctcggtaaaatcaggagtgctgttgggagtgcccagcttctcatgtcccagaaattccagcagttttattggctttgccaacagaatatggaccccagcgcc

SEQ ID NO: 723297 - DNA, 120 bp, Artificial Sequence
  ENSG00000198010_25 (sequence is synthesized)
atgccgaggccgacgtcgcaggacctggccggctactgggacatgctgcagctctccattgaggacgtcagcatgaagttcgacgagctgcagcggctgcggctcaacgactggaagatg

SEQ ID NO: 723298 - DNA, 120 bp, Artificial Sequence
  ENSG00000198010_26 (sequence is synthesized)
atggagtccccggaaagaaaggaagaaagaaaggtcccgcctccaataccaaagaagcctcccaaggggaagtttcccatcacaagagaaaaatccctggacctgcccgacagacaacgc

SEQ ID NO: 723299 - DNA, 120 bp, Artificial Sequence
  ENSG00000198010_27 (sequence is synthesized)
caggaagcccggaggcgcctcatggccgccaagcgagcggcgtccttccggcagaattccgcctccgagcgcgcggacagcatcgagatctacatccccgaggcccagacccggctctga

SEQ ID NO: 723300 - DNA, 120 bp, Artificial Sequence
  ENSG00000198010_28 (sequence is synthesized)
acgtcctcgctcccgcgctccccgcgccccggacacagcgggacgcggccggcggcctcagagtccacggagctcgcggcgaggacgacttctgcttttgttgttgttgttgttgttcac

SEQ ID NO: 723301 - DNA, 120 bp, Artificial Sequence
  ENSG00000198010_29 (sequence is synthesized)
gggtggcctggctcacacttggctctgagggacaggtgtggcgagacctgatttctcctgcgtgttctcagaggacggcgagaaatgcctctggagctggaacccagcttacattttgtt

SEQ ID NO: 723302 - DNA, 120 bp, Artificial Sequence
  ENSG00000198010_30 (sequence is synthesized)
atttctatttttataaattgtgtgataattagaggtaagaataacaagtaactataaacgggtgcatcccaccactccctggaggcattagacacccaagtggaaggtgctacaacctga

SEQ ID NO: 723303 - DNA, 120 bp, Artificial Sequence
  ENSG00000198010_31 (sequence is synthesized)
agcgcaggaaagaaaggcccattcccctcgcacagccgagcttttactccctgagcacgggccgctccgctcccctgctcctgtctgtctcggacagaaaacacgaggctccttgtgtca

SEQ ID NO: 723304 - DNA, 120 bp, Artificial Sequence
  ENSG00000198010_32 (sequence is synthesized)
agcttcctgtgatggaaagcgacctctccaaccaccacactccccgccgtacagttctccagaatcccaggcgatgacaagtctgaacccacgaaaatacccagcgcagcatctacacat

SEQ ID NO: 723305 - DNA, 120 bp, Artificial Sequence
  ENSG00000198010_33 (sequence is synthesized)
tcaaaagataagctgagtgttcccaccaggaagtcacgcgcagagaggagagtcttacggagggctgggagcttaaaaggaaaacaatgtccttacttgtaaacagttattgtatttttt

SEQ ID NO: 723306 - DNA, 120 bp, Artificial Sequence
  ENSG00000198010_34 (sequence is synthesized)
atttctttctaacttaaaatacgacacccagtattttctttaagtttcaccatttacgctacatgtgatttttttaatgtatgtatatatatatattctcaaattgctctatcagctgac

SEQ ID NO: 723307 - DNA, 120 bp, Artificial Sequence
  ENSG00000198010_35 (sequence is synthesized)
ttttcagggtatccttaaaaaaaaacacacacgaaaaacaaaagtttgcttgtttaaaatgacagttgtgatgtaaaaagtttaagaaatatgaatgtgagtggtaagtatatctcagtt

SEQ ID NO: 723308 - DNA, 120 bp, Artificial Sequence
  ENSG00000198010_36 (sequence is synthesized)
taaatggtaaagaagaaatgtagtttacatttgtatttttccagaattcttttgtcctatgcagtattgctaaagtcgagaatatattccttgcctgtgttagacatgaagggaaaaaga

SEQ ID NO: 723309 - DNA, 120 bp, Artificial Sequence
  ENSG00000198010_37 (sequence is synthesized)
ggtcacatattgtgatttccagctgtagcattcaaaaaaaaaattggtgttcatgactctgtggtcggtgccagaggaaaataggaacgactctaattaataggctttctgtgtatataa

SEQ ID NO: 723310 - DNA, 120 bp, Artificial Sequence
  ENSG00000198010_38 (sequence is synthesized)
ttaaatttagctgctgcaaccattgttctgacacgacttctgtttcacagttcagaccggtcttcaaaggaaaagcctgtccgatttttccatgggttccagtttcagagttctcattat

SEQ ID NO: 723311 - DNA, 120 bp, Artificial Sequence
  ENSG00000198010_39 (sequence is synthesized)
tactcaaagtaaaagcggactgcgatttaagatgtttccaccccaatacctggtcttccttcccggcttaaggagtaccatgtacttagccacaggcagaatagctttcgatgaccccat

SEQ ID NO: 723312 - DNA, 120 bp, Artificial Sequence
  ENSG00000198010_40 (sequence is synthesized)
agcactttgtttcttcgccttgatttgcactttacaatgtccccagcccctctgcagcccgtggctggcagggcgttcgatgtgcggttggcccccagcgcgccctccagagctgcggtg

SEQ ID NO: 723313 - DNA, 120 bp, Artificial Sequence
  ENSG00000198010_41 (sequence is synthesized)
tctccctgcctcattccccacatcccactgagcatgggaccattgggagcagagctgatattaaagcatgtttagcttcgaagttttacttttttaaagctgagtagttaagaattccct

SEQ ID NO: 723314 - DNA, 120 bp, Artificial Sequence
  ENSG00000198010_42 (sequence is synthesized)
gtaaaaacaaaaccctgtaaattgagcctcatgtctggtatatattttaccaaacagccttaaaatatatttggaagcaaaaatcagtacgaatgtatctccttgaaaaatgcaaaaaaa

SEQ ID NO: 723315 - DNA, 120 bp, Artificial Sequence
  ENSG00000198010_43 (sequence is synthesized)
aaaaaatccctgaaatattcttctataaatgaatcctatttccccagagtgttcaaggcatttttctacctaaatgaatacctaaatcttgagtagtgtacggtaatgacgcttcttcct

SEQ ID NO: 723316 - DNA, 120 bp, Artificial Sequence
  ENSG00000198010_44 (sequence is synthesized)
tcttattatgttaaaacaaatgtatttgcgagtattggcattttagactttaaaaatgctgtatgatttcagatgaactctgctgtttagaagtaaccacagaaaagcaaagtcagtgta

SEQ ID NO: 723317 - DNA, 120 bp, Artificial Sequence
  ENSG00000198010_45 (sequence is synthesized)
cactctgagtgaaaggaaatgtaatgtggataaaggcccgccacctcctcacattggtctatctactggcagctgatacgtttaactcatttccttgagcttatacaaaacatagaaaag

SEQ ID NO: 723318 - DNA, 120 bp, Artificial Sequence
  ENSG00000198010_46 (sequence is synthesized)
caaactgttaaagtagtcaataattatttgtctcagatcccagattctatgatccctgcttaaaagaaaatgttcactgcatgtaggttgatttcttatgttttgtagactcattgttat

SEQ ID NO: 723319 - DNA, 120 bp, Artificial Sequence
  ENSG00000198010_47 (sequence is synthesized)
ttttcaatccccaaaagtcttggcctaaaccatccctaggggagcagattaacctaccactacattgcacagggttggtgactcgacgtggtgaatgtgcacacgccctgcctggtccgc

SEQ ID NO: 723320 - DNA, 120 bp, Artificial Sequence
  ENSG00000198010_48 (sequence is synthesized)
catgttccaaagaagatgatttaatggtagaacggatacctgctgctagacctgatggaatgttacctgtccgtgttacataatcaagtgcaatatactcagttctcatgcaggtgacat

SEQ ID NO: 723321 - DNA, 120 bp, Artificial Sequence
  ENSG00000198010_49 (sequence is synthesized)
tctaccatgaaacgcagaagataagccatgtttctgtattgtacatgtaaagaaaaataaaactgtttatgatacttgtgttagtcactcgagctagcttatttcagccacttctagcag

SEQ ID NO: 723322 - DNA, 120 bp, Artificial Sequence
  ENSG00000198010_50 (sequence is synthesized)
atcatgccatggagctcacgacgtgtgaccatttcgtcatatttaaaatataacttcaagaaaagagtaaacatccattggagaacacggctgaaaattattgtgctgttctaggaacat

SEQ ID NO: 723323 - DNA, 120 bp, Artificial Sequence
  ENSG00000198010_51 (sequence is synthesized)
catcctagagagtgtgatgttcactataaccccatacctacattccctaatgatacagccaatgacaggtgaaacccagacactctccttagagccgacaggttgatcctgctgtgttga

SEQ ID NO: 723324 - DNA, 120 bp, Artificial Sequence
  ENSG00000198010_52 (sequence is synthesized)
aggctgtggttaataaaacacaagtatgataaacaggacctagcgtttagcccgggaaaggagaatgctgcttgtcacctagagtgctttccttgtgatgcgtctctcgcatcttcacgt

SEQ ID NO: 723325 - DNA, 120 bp, Artificial Sequence
  ENSG00000198010_53 (sequence is synthesized)
gttgttgtgtttgaagtaaaactagttgttatcgatgacaatttttaccatagttttctcagcaaatttatatcaccatcttagaatggtatataaaaaaattgaactgtttatgatacc

SEQ ID NO: 723326 - DNA, 120 bp, Artificial Sequence
  ENSG00000198010_54 (sequence is synthesized)
aaaaaaattacagttttgtttaaaaggaaatgttgatgttttcaactccaaatcaattctaaaaacttcaagcacttaatggaaaggtaaatggtcagataaaaatataattacctgtaa

SEQ ID NO: 723327 - DNA, 120 bp, Artificial Sequence
  ENSG00000198010_55 (sequence is synthesized)
ggttatctggttttaaaagaaaaaaaaaaagcctacaaactcagtgacctactacgcagagggaatttttccctgctgcttcttatgaaagtggccaggtttattattagaagacacagt

SEQ ID NO: 723328 - DNA, 120 bp, Artificial Sequence
  ENSG00000198010_56 (sequence is synthesized)
ggcagagcacacatgtgcacaggttctgattatttctcttggagcatatgtccttgtcttgatttttgccttttcgatgccatattaagcagccaccgtttccacccctttcattagaag

SEQ ID NO: 723329 - DNA, 120 bp, Artificial Sequence
  ENSG00000198010_57 (sequence is synthesized)
gccctgcatccgtaaattcgcgcatctctgtttttgttagatccttgtaagcatcgctacccgagtccaggatggaatttcacaggaaagtgaagggatactgcaggcctgtgtttgcag

SEQ ID NO: 723330 - DNA, 120 bp, Artificial Sequence
  ENSG00000198010_58 (sequence is synthesized)
cgcctgtggtaactgtggaatgagctctgttagggacagttgtctggtttgtgccaaaccttcgaggggcgagtagggagtgggggaggtgggtccaagtctccctcaggaaggcctttt

SEQ ID NO: 723331 - DNA, 120 bp, Artificial Sequence
  ENSG00000198010_59 (sequence is synthesized)
ctatcggcagcaattccatcaagccaagcctcctgtggtcctgagcatgaaggggccaggggacctcctgggagatgcagcttttgtttccgctgcgtttcatcagtcagccttgcttgg

SEQ ID NO: 723332 - DNA, 120 bp, Artificial Sequence
  ENSG00000198010_60 (sequence is synthesized)
aattctggcaggttccccggggtgtttcagtggacaggaggcccccgtgccgtggctgagtcagcctgggtaccccagtcaccagcagggccacccttgatgacagggccccccacgaac

SEQ ID NO: 723333 - DNA, 120 bp, Artificial Sequence
  ENSG00000198010_61 (sequence is synthesized)
ctgggaaaggcagcgggaaatgtgtgagagggtgtgcgctggtacggacataaaagcattgtccaaaacagcgctggttcggggagggcccctggatactgcctttggcccacactgaaa

SEQ ID NO: 723334 - DNA, 120 bp, Artificial Sequence
  ENSG00000198010_62 (sequence is synthesized)
actgaaattgccccacctgtgagcacagaaacacgcttctccaacacgggccgaaataactaaactccacatggttcctgcctgctcatttcccagccctcttcttctcaagcctgaact

SEQ ID NO: 723335 - DNA, 120 bp, Artificial Sequence
  ENSG00000198010_63 (sequence is synthesized)
tcatttttttttttagctgcaaatttaacaggctaatttaaaactgcagttttcagacgacagcccctgggaatgttccagggttctcttgttttgatctgcatgtctgtttacacttct

SEQ ID NO: 723336 - DNA, 120 bp, Artificial Sequence
  ENSG00000198010_64 (sequence is synthesized)
ctgtaggcgtgggttgaatacaagtttccaaaactttaaaatagaaaaccacgagcttaagaggtgaaaaagatgacccctttctgattaggatctgtaactctgtgggctgggtcaatg

SEQ ID NO: 723337 - DNA, 120 bp, Artificial Sequence
  ENSG00000198010_65 (sequence is synthesized)
cagtgtgcttcattcagggccatgtggcagccatgacacacaccacataaggtcagctcagagcccatggcttccctgcaggagccccatcttgtcgctattagttgggagttgcaatac

SEQ ID NO: 723338 - DNA, 120 bp, Artificial Sequence
  ENSG00000198010_66 (sequence is synthesized)
attgttggccataaacaaagtgctaaaggaaagggtttgcttctacacattcggctgaatgtcccccagtgcagggtggcagcagaatgttctggaaatgaaggagatattgctaggaat

SEQ ID NO: 723339 - DNA, 120 bp, Artificial Sequence
  ENSG00000198010_67 (sequence is synthesized)
ctctaggctgttaggcaacctggcttttattcatcctcagccggcaactcatctcaagtttatgtctcagtttttttcctctagaaaggggattacagttcctgtccctgtcttcctcca

SEQ ID NO: 723340 - DNA, 120 bp, Artificial Sequence
  ENSG00000198010_68 (sequence is synthesized)
ggacacactgtgaggattaatgacatattggctctaaagtcctttgagctcctgggaacaggtggtgaaagtgtgcgttactgctaaggattagtccctggcctcttctagaatgccgcc

SEQ ID NO: 723341 - DNA, 120 bp, Artificial Sequence
  ENSG00000198010_69 (sequence is synthesized)
ctcccagctctgcagggcacgctgccagaatccaggctggtcgtaaacatctcagagataatcagggaccaccagaggcagaggccatgagactgtctttggaaaggtttggaaatgcag

SEQ ID NO: 723342 - DNA, 120 bp, Artificial Sequence
  ENSG00000198010_70 (sequence is synthesized)
aaataactacaagggccattctccttagcttctggctttcaactgtttctagatgcttccaagaacaagaacccagcaccaaccagaattaggccacgttttcaccattacttaagctca

SEQ ID NO: 723343 - DNA, 120 bp, Artificial Sequence
  ENSG00000198010_71 (sequence is synthesized)
atcgcctcttagatgaaatgaggagataaactaaacattaaaatgatgaaggaaaaaaaattatttggaagccgaaaaccgcatgggtggggaaacatcaggaacgaaatcagacacact

SEQ ID NO: 723344 - DNA, 120 bp, Artificial Sequence
  ENSG00000198010_72 (sequence is synthesized)
gactcaaaccacgcaagggtttgagaagcccacccctctaattccaggcgtttgtaatttttctacttcgcacttgagagaaggcagaggtggtccgtgggaaagctccgggaaacagcc

SEQ ID NO: 723345 - DNA, 120 bp, Artificial Sequence
  ENSG00000198010_73 (sequence is synthesized)
gtctttcatccttgccacattgaaaaatgtccacaattttatgaattgctgtcctaaccctggcgtttttatccagtgttaaaataaattatttcaagtttcaatgtaaacacttaacag

SEQ ID NO: 723346 - DNA, 120 bp, Artificial Sequence
  ENSG00000198010_74 (sequence is synthesized)
atgacttctttgcagaagaaatgttcgttacctactatcaaactactttttaacagattttgtatatacacacacaagttgacagaggtttacctccctactttcttagattttatgtaa

SEQ ID NO: 723347 - DNA, 120 bp, Artificial Sequence
  ENSG00000198010_75 (sequence is synthesized)
ctcttttcattggtgcttattcagaacctgaaagccttgggcatccaagctttcacctactcaatggaggagaggtgataatgaatgaaaagattgacaccaggtttcttggacaaattt

SEQ ID NO: 723348 - DNA, 120 bp, Artificial Sequence
  ENSG00000198010_76 (sequence is synthesized)
aagttcaaatttatctctttcaagtagaccatggtctccctagagagtgtgttggcttgtgtctgccagtacgacaaaggacgctcccagcttgatcgtggtaccttatggaagccactc

SEQ ID NO: 723349 - DNA, 120 bp, Artificial Sequence
  ENSG00000198010_77 (sequence is synthesized)
acgcattctctgatttacccccaaaacactaccatgccccagccccactcatttaaataatacaatcatatcactttcaaagggctcagcacgaatgttcccctcactccactttttaac

SEQ ID NO: 723350 - DNA, 120 bp, Artificial Sequence
  ENSG00000198010_78 (sequence is synthesized)
tcgtttgctgaactcgacaaggcttccccttacgagcagtgagacctaggctactttcgaacgcttccttccgaacggtaagccacttcgctctcgggcaggacaggtcctccctgcaga

SEQ ID NO: 723351 - DNA, 120 bp, Artificial Sequence
  ENSG00000198010_79 (sequence is synthesized)
gagagacaactcatcccccgaccttccatactacagaccaaaatacccaggtgtggcctaaggactatattaaatgcctcctatagaaattcaaggaatgttagaaccaggaaactagct

SEQ ID NO: 723352 - DNA, 120 bp, Artificial Sequence
  ENSG00000198010_80 (sequence is synthesized)
gtttaaagttttaaagaagtatataaatatatatataaatataaatatgaaatcatatcgagtgtgaggatgagcagagtgccaaatattcagcatctgtacaaagtcattcactggaat

SEQ ID NO: 723353 - DNA, 120 bp, Artificial Sequence
  ENSG00000198010_81 (sequence is synthesized)
tcaactattttatgtcattctctttctcacgcttttatggttcttttgataaattctatttagtagcatgcaggatacctaatctgaatgtgcaatatgctattcatcaccacgacaatt

SEQ ID NO: 723354 - DNA, 120 bp, Artificial Sequence
  ENSG00000198010_82 (sequence is synthesized)
tcttacttcctcttaataacttaccagaatgttggtcattcctttaaggcagttaaggattgctttatttgtgttcttttttcccatgactttttttcactctcagctgactgtaagaaa

SEQ ID NO: 723355 - DNA, 120 bp, Artificial Sequence
  ENSG00000198010_83 (sequence is synthesized)
ctgtgcaccgtttccgccataaccgtcctgtgacgatgcctccatttgacttctgtatcgctgatgttcacctcctgtaaatagtttggcaattaaattttttgagaaaagtaatgttta

SEQ ID NO: 723356 - DNA, 120 bp, Artificial Sequence
  ENSG00000198010_84 (sequence is synthesized)
cttttttattggagtgaattctcgtgttattttaatctcagaaaaattatatagaccaaagagttttatccgaaaaaaaattacactcttcctccattatatatttcattgttgaaatat

SEQ ID NO: 723357 - DNA, 120 bp, Artificial Sequence
  ENSG00000198010_85 (sequence is synthesized)
tgaaatatcctcaatttctctatattttaagaagtaatggacatttattaaggttacagatttaatatgtatgcaaaatggtatagattaaatgagtttttaattaataaatcctacagt

SEQ ID NO: 723358 - DNA, 120 bp, Artificial Sequence
  ENSG00000198010_86 (sequence is synthesized)
gcctggcattctgcagaagcattgctgtatcttaccagacaggaatacaggcaatgctgtgaagcgtcagagggaattccgttggttactttcccatacggtcttgttcagctgcttgtt

SEQ ID NO: 723359 - DNA, 120 bp, Artificial Sequence
  ENSG00000198010_87 (sequence is synthesized)
ctcagaaaagtgtgtttgttggtggaggagaatgcgaccaaggagaccatccttttcatgaaggcacaaacgtgaatacatatgtgacttttaagcctttaaataaaaacccaaagcaca

SEQ ID NO: 723360 - DNA, 120 bp, Artificial Sequence
  ENSG00000198010_88 (sequence is synthesized)
ttccctagggcctcttaaatatcatttctcagtaatgcaaatatgcacatcacagcattagtggagaaaagttcctccctttggtattcaagtgaagggaaataaatgtgctttctagta

SEQ ID NO: 723361 - DNA, 120 bp, Artificial Sequence
  ENSG00000198010_89 (sequence is synthesized)
gggcctctgaagagcaccggcagcttccttcttagcagaggagaaaatctctgccatctcgtgctcgcctacctcgactcgccagacgccctggagcagaggaggagcagtggtcggcag

SEQ ID NO: 723362 - DNA, 120 bp, Artificial Sequence
  ENSG00000198010_90 (sequence is synthesized)
cacctgatggtccacctgggagaaccaggcaggaagccggaaagagtcgcagtgcacgctctgcggggagccggaagatacagacagcccaactaaatccttgaaatgcagcgtggcgtg

SEQ ID NO: 723363 - DNA, 120 bp, Artificial Sequence
  ENSG00000198010_91 (sequence is synthesized)
aaaatggagcggcattttagttaacgagggtctggatgccattcacaggaatgcagtttctacagggttctgctttgcagagacctctcctgataataataataaatttactcagaacaa

SEQ ID NO: 723364 - DNA, 120 bp, Artificial Sequence
  ENSG00000198010_92 (sequence is synthesized)
actgggcagaccttgctggccacggcctccacgtgcagtgaccgttctcttggcagcgtctcaggctgtctggaccagctgtcacagtctcgctgtgggtgagtcacctgaggcactgta

SEQ ID NO: 723365 - DNA, 120 bp, Artificial Sequence
  ENSG00000198010_93 (sequence is synthesized)
tggcggatagaaggattcattgccctgggaggttttgcctggcattctgcagaagcattgctgtatcttaccagacaggaatacagatgaagacccccaggcccagggaattcgatcact

SEQ ID NO: 723366 - DNA, 120 bp, Artificial Sequence
  ENSG00000198010_94 (sequence is synthesized)
ggctgagaactcacagctaaggagggggagcctgggattccttcctggtgctcacacccgagacccttttgtcactgtgttcaaaggcactgctgcacagacgtgattcttctttcaacg

SEQ ID NO: 723367 - DNA, 120 bp, Artificial Sequence
  ENSG00000198010_95 (sequence is synthesized)
aacatctccaggacttcctccggggtctgtgacctcatctataattaaagggaaagagatcttcctgagattagcccatttaacttgtttaactagatgcatgctgcaaaaactgttttc

SEQ ID NO: 723368 - DNA, 120 bp, Artificial Sequence
  ENSG00000198010_96 (sequence is synthesized)
aagaaatgaacaattgactatttaaaaagagccaagccttaaaagaagaccaggttttaatagggaaaacattcagtaaaatattattctgcagtaacttgtggaatgactgctgtacac

SEQ ID NO: 723369 - DNA, 120 bp, Artificial Sequence
  ENSG00000198010_97 (sequence is synthesized)
acagctctgggctgggtacctggaagctcacgagcttgtttggcctcccctcctggacacaggaggtgtcaaggctgtggtcagcagaatctacccagctggacactgagtggacgccct

SEQ ID NO: 723370 - DNA, 120 bp, Artificial Sequence
  ENSG00000198010_98 (sequence is synthesized)
gtggggtggctgtgaaatgggtccactttgtagtggcagcatccctgatagtacttctgaaagggacaagatagaaaagcaaaccaaactgaaactgagaagtcgtggatgataccaggg

SEQ ID NO: 723371 - DNA, 120 bp, Artificial Sequence
  ENSG00000198010_99 (sequence is synthesized)
tagtttgaccgagtcctggactagggaggggacccccaaagcatgcccagcatggcgctagtggggcccaggcaccccatgtcccaacgactagaaccaataatcaggttaacactcatt

SEQ ID NO: 723372 - DNA, 120 bp, Artificial Sequence
  ENSG00000198010_100 (sequence is synthesized)
aaataagaagtgtctgtgcctcctgggataaaaatcctttataacgatctgggacgcgagctcaagtccctgttcccttgtcctccacagcagtgtgcagcgtggaactcggcggttcgg

SEQ ID NO: 723373 - DNA, 120 bp, Artificial Sequence
  ENSG00000198010_101 (sequence is synthesized)
ggtccctgagtccctgagccactgtctaccccctgctccatcccaaatgcagagacccctgagcactcatgtggacatgccccaccatgccctggctgctccttcaggatggcgcagggc

SEQ ID NO: 723374 - DNA, 120 bp, Artificial Sequence
  ENSG00000198010_102 (sequence is synthesized)
caccgctatgggaggactctaaagggtgggtctcaagccctcctctgcttaccctaaatcaggagagcaaaccgaatgcactgccctcttccttcactcctgcatcccatcccccgctat

SEQ ID NO: 723375 - DNA, 120 bp, Artificial Sequence
  ENSG00000198010_103 (sequence is synthesized)
ggcctcactatcaggtctgctgtgtgccaaaatattttaccatgccctaaaagtgagatgttggaagtggacaaggaggaaatatttatgaatatttgagtctgttattctttatgttaa

SEQ ID NO: 723376 - DNA, 120 bp, Artificial Sequence
  ENSG00000198010_104 (sequence is synthesized)
gcattttggcttctgttgtactcctaaatcactactgagagcagagaaagagctctttgtagaaatgagatgtgttcctgtgtgctgcctgtgacgcatcccgttgtcaccggagtgccg

SEQ ID NO: 723377 - DNA, 120 bp, Artificial Sequence
  ENSG00000198010_105 (sequence is synthesized)
tggccctaaggaatgacagcattaaggcatggacgttaaagatggacaaaagaattgttcacggtgttgtattttaaaatgactatgtgtatgacaattaaactattgtgtcttcgttta

SEQ ID NO: 723378 - DNA, 120 bp, Artificial Sequence
  ENSG00000198010_106 (sequence is synthesized)
tttacaagaaaatgccttggcattatgccaaagagaagtcgatggaggtgacgatggacgccgaatgttggggagatgctgccttccacgtgacccacagtccccgcagcacggctgcat

SEQ ID NO: 723379 - DNA, 120 bp, Artificial Sequence
  ENSG00000198010_107 (sequence is synthesized)
ggggctggtgcaagtcagcacagccgtgttccgatcgttcacacggcgtttgcatttctcatggctggctggtaaatcagatccaaggaagagcagcctgtcttgaagtggatttgtgaa

SEQ ID NO: 723380 - DNA, 120 bp, Artificial Sequence
  ENSG00000198010_108 (sequence is synthesized)
cggcacaaggccccggtgttaagatgcccgacagacaaccttccatccttcttttcaagacagaaacaatgccaaagtgttatccgagttacttgcttttattaaaagttatgctttttt

SEQ ID NO: 723381 - DNA, 120 bp, Artificial Sequence
  ENSG00000198010_109 (sequence is synthesized)
gggctcccgaatgagacatcctgtgttgatcgcagccgtctcccagcatgtggagcaacactaggaccgtggtagatgttcagtcatgttcgctgaaggaagaagggagtgaatgaatgt

SEQ ID NO: 723382 - DNA, 120 bp, Artificial Sequence
  ENSG00000198010_110 (sequence is synthesized)
cttctctgaggatagctgagcatccgtgcatccgtctggccatgagaacttggttgcgctcacatgaggatcctgagcagagtcgcagtgcacgctctgcggggagccggaagggagaga

SEQ ID NO: 723383 - DNA, 120 bp, Artificial Sequence
  ENSG00000198010_111 (sequence is synthesized)
ctcagggtcacagaagctcaaccgtgtccattggaaaggctcttactcgtaatttaaaacacaaaaatgaaaaaaagatacagacagcccaactaaatccttgaaatgcagcgtggcgtg

SEQ ID NO: 723384 - DNA, 120 bp, Artificial Sequence
  ENSG00000198010_112 (sequence is synthesized)
ttgatatctaaaaatcactcattttctgcagcatcttccacccttgttagtatatgcctcaacttggccaaattgtcttaattataaaagggatttataatctttagcacaaagataaaa

SEQ ID NO: 723385 - DNA, 120 bp, Artificial Sequence
  ENSG00000198010_113 (sequence is synthesized)
tcggtgcggctgcaggacactgtcccattgctgcatggagcctctcgctgtctgagcctcacctgaagccggcccacaccattttcttactctatgcattggagcgaaaatgtttaattg

SEQ ID NO: 723386 - DNA, 120 bp, Artificial Sequence
  ENSG00000198010_114 (sequence is synthesized)
actacgatgggtgattcctaaagttatatttgactcagaaaaaaatgcattagtaaaactccctgtttgaatgtttctagtattcacagcccgggtcactgtctttctataacgattggt

SEQ ID NO: 723387 - DNA, 120 bp, Artificial Sequence
  ENSG00000198010_115 (sequence is synthesized)
atctgaaataagaacatgggctgcaacttacagccttgctctttctactatataaacttccctaatcaaatatttttcattaaaaaaatgtgtttttggaaataaacagttacaacctgg

SEQ ID NO: 723388 - DNA, 120 bp, Artificial Sequence
  ENSG00000198010_116 (sequence is synthesized)
gaaaaagagtcagccttggggaactcgggacacagccaaccccaggaatgtgcctttgggtcagagcccagcccagctctgcttccacagggagagatggggagagatgatcccaacgtg

SEQ ID NO: 723389 - DNA, 120 bp, Artificial Sequence
  ENSG00000198010_117 (sequence is synthesized)
aatgagaagttctccgcgaggcgctgagagggaggcacagatgcctgggggaatgaaaaggagccacagacggtggatggagagggaggaagtagttggtggagcagccagcagccctag

SEQ ID NO: 723390 - DNA, 120 bp, Artificial Sequence
  ENSG00000198010_118 (sequence is synthesized)
gagcttcgagttctttattcatcattcgaatgctgtgggtataaaaacgtgccggctcaccagatggagccttatccactccacagacacacttgcgtgtcctctaagatgatccaagat

SEQ ID NO: 723391 - DNA, 120 bp, Artificial Sequence
  ENSG00000198010_119 (sequence is synthesized)
aatagataaatacttgttattttccttgaggtcttaaaaaatcctgcacagagaaagctgggtatgttgagtgggccgccgtggggtcggccgtttcctgtccgggcggcgcggtgcggc

SEQ ID NO: 723392 - DNA, 120 bp, Artificial Sequence
  ENSG00000198010_120 (sequence is synthesized)
gtgtgattgccgcaggaagggccttcgcggccccaccacgggccgaccctgggcgcggtgtcaggtgcactttaattccccattcaacagccctgccttcttgtctaccttgcctggagc

SEQ ID NO: 723393 - DNA, 120 bp, Artificial Sequence
  ENSG00000198010_121 (sequence is synthesized)
cctctttctgagggtgggaagcttcggttgcctggcagatctgagtgaggatggaaccgcaccgctccacgtggggagtgagtggtacagcgtgggaggcctcagatcaggtgcctttcc

SEQ ID NO: 723394 - DNA, 120 bp, Artificial Sequence
  ENSG00000198010_122 (sequence is synthesized)
gagtcctcacggcagcctctgcagcaggcgtcccagccacacctgacaacctttcctggggctcactttgcgagaccctgacggatttcgtccactgtcactgccgtatcccgtcgccaa

SEQ ID NO: 723395 - DNA, 120 bp, Artificial Sequence
  ENSG00000198015_0 (sequence is synthesized)
gcgcagcgctgtttcgtgggaccaggattgaaacaagatggcgggttcgtggtgagaagccgtcaaggagtagaaattggtatgcttagaagcagattctaaaagcagtttctcttcaga

SEQ ID NO: 723396 - DNA, 120 bp, Artificial Sequence
  ENSG00000198015_1 (sequence is synthesized)
acatcttttttcataccacttgataagcatcttgaaacaccatggctgtagctgcagtaaaatgggtgatgtcaaagagaactatcttgaaacatttatttccagtccaaaatggagctt

SEQ ID NO: 723397 - DNA, 120 bp, Artificial Sequence
  ENSG00000198015_2 (sequence is synthesized)
tatattgtgtttgtcataaatctacgtattctcctctaccagatgactataattgcaacgtagagcttgctctgacttctgatggcaggacaatagtatgctaccacccttctgtggaca

SEQ ID NO: 723398 - DNA, 120 bp, Artificial Sequence
  ENSG00000198015_3 (sequence is synthesized)
ttccatatgaacacacaaaacctatccctcggccagatcctgtgcataataatgaagaaacacatgatcaagtgctgaaaaccagattggaagaaaaagttgaacaccttgaggaaggac

SEQ ID NO: 723399 - DNA, 120 bp, Artificial Sequence
  ENSG00000198015_4 (sequence is synthesized)
ctatgatagaacaacttagcaaaatgttctttactactaagcaccgttggtatcctcatggacggtatcacagatgtcgtaagaatctgaatcctccaaaagacagatgatgcggaggtt

SEQ ID NO: 723400 - DNA, 120 bp, Artificial Sequence
  ENSG00000198015_5 (sequence is synthesized)
cctgggggaatcaaagagaaatgtgcctcatttgccatttgagaaaatgcagtctggtgtattcagtaatatatagtaaagtaataatgataaaatatcttttcatatattagaatgtgt

SEQ ID NO: 723401 - DNA, 120 bp, Artificial Sequence
  ENSG00000198015_6 (sequence is synthesized)
acttttatataaagtaattctggatttgacattctcatttagagaaacctattttcttttttctttttctattttagtgtttcatttatgtgcggtctccaatttaggacttttccatag

SEQ ID NO: 723402 - DNA, 120 bp, Artificial Sequence
  ENSG00000198015_7 (sequence is synthesized)
tgccaaagccatacatattcagtagaacatcaataaattacatcagaaattcaacactttattataaaacgggcttcgtgttagataattttgctaaacagtaggctactgtaagtgttc

SEQ ID NO: 723403 - DNA, 120 bp, Artificial Sequence
  ENSG00000198015_8 (sequence is synthesized)
tgagcatatttaagacaggctagcattttcaatttacaatattttcaactgatagtaggtttattgggatgtaaccctatgataagttgagaaacatctctttttgtgtgtctactgtga

SEQ ID NO: 723404 - DNA, 120 bp, Artificial Sequence
  ENSG00000198015_9 (sequence is synthesized)
tttaagtatttttaatcatcagccaagcattgttagtagtataaatatgattaataaaaatgtgcatggctttcctgaaggagattttttaattgcctttgagaataaactcataaggtc

SEQ ID NO: 723405 - DNA, 120 bp, Artificial Sequence
  ENSG00000198015_10 (sequence is synthesized)
taccaagaaaataaatgttatgatgtttcagttggcttctaggaaataattaaattagtgatattttaatcaggttttactatctgctaggccccttccatcaattcttattaaattctc

SEQ ID NO: 723406 - DNA, 120 bp, Artificial Sequence
  ENSG00000198015_11 (sequence is synthesized)
aaaataatcctttgaaaagggagtataattacattttacagtgactcgaaccttacccaaacaagtgggagagccaggagccaaactatcaggctccaaagcttttttttagtgcatcac

SEQ ID NO: 723407 - DNA, 120 bp, Artificial Sequence
  ENSG00000198015_12 (sequence is synthesized)
aatgacaaaggggtggttttctttcacccaagaatgtgctttcctggaaatttttctagatagaatattatgtaatttgttttgaaggttttttttcctgactgtcttaaagattatgct

SEQ ID NO: 723408 - DNA, 120 bp, Artificial Sequence
  ENSG00000198015_13 (sequence is synthesized)
agctttagaacacatgcaaacagctgcagctctgtgattaaaatgttaaggtcactagaatagtgttaggaaaatgttaatagataattctgctgcctctattagcttatgtatgatcct

SEQ ID NO: 723409 - DNA, 120 bp, Artificial Sequence
  ENSG00000198015_14 (sequence is synthesized)
taatagcattgcttccccttcagtttctatttaggaggtgaagaatcttttaataaggtagaaagttgctttatttaaatttgtactgtagaatgtttgtgatacagtatttgtaaaatt

SEQ ID NO: 723410 - DNA, 120 bp, Artificial Sequence
  ENSG00000198015_15 (sequence is synthesized)
gatatgaaaaataatttctcaaagtctattgtttgatctagttattttaataaaggaactctagaagtttcaagtggccagtgaagtgtgaggaatagagagtaaaggaaataattaata

SEQ ID NO: 723411 - DNA, 120 bp, Artificial Sequence
  ENSG00000198015_16 (sequence is synthesized)
atggtgaccctctgttaagtggtttactttttccattaatataaatttcatttggaaagattaaaaaaacaagtttgattgaacttgataaatcagaaatatttaccagctttgtcgatg

SEQ ID NO: 723412 - DNA, 120 bp, Artificial Sequence
  ENSG00000198015_17 (sequence is synthesized)
gtgtattcttgaaaaatgtttggttttctttcaggttgacttatatccaaaattctacaaattcttagctatgttataaatgtagaaagaagtgaaaaatcaaaatatgattatgaagat

SEQ ID NO: 723413 - DNA, 120 bp, Artificial Sequence
  ENSG00000198015_18 (sequence is synthesized)
tttcttctcttccgagtacaaagctctgctaaataaggatttacccaagatgcccacatccacatacttatgtgtcagtgctttggagaattaactttgactttattctactggaagtat

SEQ ID NO: 723414 - DNA, 120 bp, Artificial Sequence
  ENSG00000198015_19 (sequence is synthesized)
agattaacactgtgctttctgggattttgcttttcatgggttgctgatttttaattttgctaaataagcacatagtccgtgatcaccagcatcacctgccctctgttcctcccccgtccc

SEQ ID NO: 723415 - DNA, 120 bp, Artificial Sequence
  ENSG00000198015_20 (sequence is synthesized)
ccagggataagaacctgttatccaccatcagtaacattttatgaaagatctacttatttgtctgttttgcagacattttaaaattcgtaaagtgggatgcttctttaatttaaatacatt

SEQ ID NO: 723416 - DNA, 120 bp, Artificial Sequence
  ENSG00000198015_21 (sequence is synthesized)
tagcttcatgaaaaactcactacacagttcttgttcaagcattattgggaaaccaccagagggcactctcacccagggcttaatttgaacatctcgcccaaaagtgacttttaaaagcac

SEQ ID NO: 723417 - DNA, 120 bp, Artificial Sequence
  ENSG00000198015_22 (sequence is synthesized)
ttaattagcagagaatttggatgttcattagttgagaatgactagtagaataaatggtaatagtgaaattaagtgctggaatattctgagtagaccaatagcaaaaactgattttttttt

SEQ ID NO: 723418 - DNA, 120 bp, Artificial Sequence
  ENSG00000198015_23 (sequence is synthesized)
ttttttaaagaaaaggtcttgctgtgtcgcccaggatggagtgcagtggcacaatcacattgcactgcaacctcaatatcctgggctcaagcaatcctcccaccgcagcctcccgaattg

SEQ ID NO: 723419 - DNA, 120 bp, Artificial Sequence
  ENSG00000198015_24 (sequence is synthesized)
ctgggctcaagcaatcctcccaccgcagcctcccgaattgctgagactacacatgtgtgctaccatgcctggctaattgttttaattttttttatagagacggggtttcgccatgttgcc

SEQ ID NO: 723420 - DNA, 120 bp, Artificial Sequence
  ENSG00000198015_25 (sequence is synthesized)
aggtgtgagccactgtgcccagccttattttttttttttaagataatattgttaacattttgtatttctctgcataaatatatttcaaaaataaaaatagagctcataatatatgctgtt

SEQ ID NO: 723421 - DNA, 120 bp, Artificial Sequence
  ENSG00000198015_26 (sequence is synthesized)
aaaaatagagctcataatatatgctgttttgtaatgcttttttcacttaataggaattttttccgtatcattaagtactctgatttaatgggtgcatattattctataatctggcttgtc

SEQ ID NO: 723422 - DNA, 120 bp, Artificial Sequence
  ENSG00000198015_27 (sequence is synthesized)
ataatttaattaactccctgctgttagacaaaatcattgtttctgttccatcttgtgaataatgctgttattaacatcctggtggattattaccattttctttttttattttttttttaa

SEQ ID NO: 723423 - DNA, 120 bp, Artificial Sequence
  ENSG00000198015_28 (sequence is synthesized)
atttatttcttcttttttttttcttataatctcatcagaagctggcaagatcattactgttttcttagatttgtttctgtaagtgcaatcgttgaatcaccatgtccggcatccatgttt

SEQ ID NO: 723424 - DNA, 120 bp, Artificial Sequence
  ENSG00000198015_29 (sequence is synthesized)
gtttatgtacatttttaaagtcagtggtttaaactgtatactttttgggttttggagatggaggtttgctctgcccaagctggaatgcaatggcgcgatcttggctcactgcagcctcca

SEQ ID NO: 723425 - DNA, 65 bp, Artificial Sequence
  ENSG00000198015_30 (sequence is synthesized)
aagtgattctcctgcctcagcctccttaagtagttgggattacaagtgtgcaccaccatactcag

SEQ ID NO: 723426 - DNA, 120 bp, Artificial Sequence
  ENSG00000198015_31 (sequence is synthesized)
cacaccttggcctcccaaagtgctgggtgggattataggtgtgagcctccatgcctggcctaaactgcatactcctaacatcagtatatagaaatattttctctttagttctattaaaat

SEQ ID NO: 723427 - DNA, 120 bp, Artificial Sequence
  ENSG00000198015_32 (sequence is synthesized)
tagaaatattttctctttagttctattaaaattttaaaaaatctttatcaatttagtaggcaaagactggaaaatgttttaatttgatcagccactttaatgtatgtctcatttcaaagc

SEQ ID NO: 723428 - DNA, 120 bp, Artificial Sequence
  ENSG00000198015_33 (sequence is synthesized)
atataaagtatacaagtttcaggtcctagcttaaacctataagaggccttattatgggcttatttcctttgcagccctttaccataatgtgtttcttctacctcccctgcacaacattgt

SEQ ID NO: 723429 - DNA, 120 bp, Artificial Sequence
  ENSG00000198015_34 (sequence is synthesized)
ttatatgccccctaaaatgtaacttctttagattctgttgttacgtgcaacactgtatatctctccatagcacttaatcagagtttgtaattaggcatctttttgtgtgattatttggta

SEQ ID NO: 723430 - DNA, 120 bp, Artificial Sequence
  ENSG00000198015_35 (sequence is synthesized)
aatgtccatatcccctactagcctataagctccatgacttctaggtaccctgtctgactacgtgtatcactgtttctaccgcctaacattgcctagcacattcattgcttcacaggcatc

SEQ ID NO: 723431 - DNA, 120 bp, Artificial Sequence
  ENSG00000198015_36 (sequence is synthesized)
tgaatatggttttataaaatacattgctctagtgcacaggattttaagctaaggatttcatgaatgggatttggggtaggggcatctatgaaattcctgaaattgtgtagaattttgaga

SEQ ID NO: 723432 - DNA, 120 bp, Artificial Sequence
  ENSG00000198015_37 (sequence is synthesized)
atatgtgttttcctggggatagagtatgtagtttctcagcaactcattacagtctgtcacatcatgccctaattctacttgcctgtagctaaacacctaataacattagaactgaaatga

SEQ ID NO: 723433 - DNA, 120 bp, Artificial Sequence
  ENSG00000198015_38 (sequence is synthesized)
tagtgatatgcaagatagcacgtgtggtttccacatattctaagaggcatcttcaattagattccaaaaatttttaagaaaaaaagatataatgtgccatcattttggatggttctgggc

SEQ ID NO: 723434 - DNA, 120 bp, Artificial Sequence
  ENSG00000198015_39 (sequence is synthesized)
acttcaggtaaacccttactcaaagaatactttttcagtttcaatgtgtatttttaaaatttccagaagatgagttgaatatcagcccacaaacactggtagtaagcaaactattttatt

SEQ ID NO: 723435 - DNA, 120 bp, Artificial Sequence
  ENSG00000198015_40 (sequence is synthesized)
tgctaaaggcataaataaatgtctcctttgcttttaggcaaagggaatgcttcttcagatttttttttttccccagaagttcaaaataacttgctcatagtcttcccaaaataattttca

SEQ ID NO: 723436 - DNA, 120 bp, Artificial Sequence
  ENSG00000198015_41 (sequence is synthesized)
aacattctaacaccaaagaaagatactcccaattgagctcagccatcagcctcctactattttttaatgtgctgtttaaccttgtgaatgtgagaatattttgaatgcactgggaaggaa

SEQ ID NO: 723437 - DNA, 120 bp, Artificial Sequence
  ENSG00000198015_42 (sequence is synthesized)
tactcaggaacaatatgtaatgtgctttctagttttgcacaaaggcattcattttgatttagtaacaacctcatacttacatagcatatccttctgcagaaatgcttcacagccatgact

SEQ ID NO: 723438 - DNA, 120 bp, Artificial Sequence
  ENSG00000198015_43 (sequence is synthesized)
gcttgaattcttgtcatgttgcttgtaaatgagctcctgtttttagatggagaaatggaggcagagtctcacaattacatgtgagaatagcaagtagaaccttatgattacttctgagtc

SEQ ID NO: 723439 - DNA, 77 bp, Artificial Sequence
  ENSG00000198015_44 (sequence is synthesized)
gtacagtggccagtggcatgatctcagcccactgcaacctccgcctcataggctcaagcaattctcctgcctcagcc

SEQ ID NO: 723440 - DNA, 70 bp, Artificial Sequence
  ENSG00000198015_45 (sequence is synthesized)
cactgcaacctccgcctcatgcgtgcaccagcatgcctggctgattttttgtattttcagtagagatggg

SEQ ID NO: 723441 - DNA, 120 bp, Artificial Sequence
  ENSG00000198015_46 (sequence is synthesized)
gacctcaggtgatctgcccaccttggccccccaaaatactgggattacaagggtgagccactgtgcccagcctcttctgagtcttcaattcagcaagaatgtctcttttttttttttttt

SEQ ID NO: 723442 - DNA, 72 bp, Artificial Sequence
  ENSG00000198015_47 (sequence is synthesized)
gtcttcaattcagcaagtgttgccttggctggagtgtagtggcacattctcagctcactgcaacctccacct

SEQ ID NO: 723443 - DNA, 120 bp, Artificial Sequence
  ENSG00000198015_48 (sequence is synthesized)
catgagccaccacgcccggccaagaatgtcttttctttataatgttgtctctaagcatgtaatcttttcggcaaattttattaagcacctatagagttcaagccactgtgggttcaaaga

SEQ ID NO: 723444 - DNA, 120 bp, Artificial Sequence
  ENSG00000198015_49 (sequence is synthesized)
ctatagagttcaagccactgtgggttcaaagatagccctcattcctgattgacaaagtatcttgctatgaccatcccttctttcccctctagtcaaaattagtctcttcttcactcataa

SEQ ID NO: 723445 - DNA, 120 bp, Artificial Sequence
  ENSG00000198015_50 (sequence is synthesized)
tgcaaagtacattggattactattatgccacttacttgaataattgtcttgatgagtaatatatgtagtcagtaacatggttaagtgtggcaatttggattgatcccattggacttttca

SEQ ID NO: 723446 - DNA, 120 bp, Artificial Sequence
  ENSG00000198015_51 (sequence is synthesized)
attgctgcatccaggtgtaattaccataagagcatagaagatagaatcgtaaagctgaaagacatcttaaagatgatttttggggactgatttggaaacagatccaaagacactaattga

SEQ ID NO: 723447 - DNA, 120 bp, Artificial Sequence
  ENSG00000198015_52 (sequence is synthesized)
cttgcccaagatcacagattgtggcagaaccaaccaatgtcttttttaaacattaaggacatcttatatgtatatttatgcatatacatactgatgaaatgtgcctttagcaatagatgt

SEQ ID NO: 723448 - DNA, 120 bp, Artificial Sequence
  ENSG00000198015_53 (sequence is synthesized)
gtccagtgatgtactaatgaagatttaacaactggttctaacttgtaatgtttgccagtttccatgactgggtcttacaagttgttgtgcactgactccatcattccactggatgtgccc

SEQ ID NO: 723449 - DNA, 120 bp, Artificial Sequence
  ENSG00000198015_54 (sequence is synthesized)
ctgaaatcatatatttactactaaaaccattagattgtttccttgttccagttatgcattcagagacactccaccttattttctgattacatttgcagggagaaataactccttacttgt

SEQ ID NO: 723450 - DNA, 120 bp, Artificial Sequence
  ENSG00000198015_55 (sequence is synthesized)
cagtttcagccttcacttttagtttctttttcttttcctttttccaacccagtataccttagaaactttcagtttcttttaaggatttaataacttgcttataagtgtttaaaatgactt

SEQ ID NO: 723451 - DNA, 120 bp, Artificial Sequence
  ENSG00000198015_56 (sequence is synthesized)
aatgggttctatcttttaagggaactttggatgaatccttgaatatcagttatctattgccaattaacaaatcaccccaaagctcattggcttaaaacaacaatctttcattagtttgcg

SEQ ID NO: 723452 - DNA, 120 bp, Artificial Sequence
  ENSG00000198015_57 (sequence is synthesized)
ttcttccaggtaattcttatagtctggatccagctcagcttatcttggctggacttgcccatgcagctgaggtcactagttgggttgttgaggctggctagtcctagatggtgtcactca

SEQ ID NO: 723453 - DNA, 120 bp, Artificial Sequence
  ENSG00000198015_58 (sequence is synthesized)
tatgtctggtattgagtgactgtcacctggggcattagggggactgtgtctctcatcatccagcaagctaggcctggattcttcacatggctttaggatttcaagagtatgagattgggg

SEQ ID NO: 723454 - DNA, 72 bp, Artificial Sequence
  ENSG00000198015_59 (sequence is synthesized)
cttcacatggctttaggatttcaagagtatgagattggggctgggcgggatttcttgagcccaggagttcaa

SEQ ID NO: 723455 - DNA, 84 bp, Artificial Sequence
  ENSG00000198015_60 (sequence is synthesized)
attacaggtgtgagccaccacgcctggtcttctacaaaaaaattttaaaaaattagctgggggtggggagggtggggtggtgca

SEQ ID NO: 723456 - DNA, 120 bp, Artificial Sequence
  ENSG00000198015_61 (sequence is synthesized)
gaacaagcacctgtatcaaaacaaacaaaaaagtgcaagattggaagcttcgaggcttcttgaggcctagtctcagaactggcacaatatcacttcataaggctatctcagattcaaggg

SEQ ID NO: 723457 - DNA, 120 bp, Artificial Sequence
  ENSG00000198015_62 (sequence is synthesized)
agtaagaggagagatgctacctattaaaaggagaagcagcaaatactatggccattctcttcacaatagttgtcaccaaaacgtaatcgatttgtttatgggtttacattgtcatgtctc

SEQ ID NO: 723458 - DNA, 120 bp, Artificial Sequence
  ENSG00000198015_63 (sequence is synthesized)
cacaggacaatgcacatggtatgtttgtcagaacccagttggagttttgtttcccagcatccaaaggaaatccctaactttcattttttcttcccgtaagcagccccgaacacttactta

SEQ ID NO: 723459 - DNA, 120 bp, Artificial Sequence
  ENSG00000198015_64 (sequence is synthesized)
taagccatctctacctgaattagcaatcatggataagctcaataactgatcatttccttatcagtttaaaccatatatattttaacactgtctctttttcacacacactagttagctaag

SEQ ID NO: 723460 - DNA, 81 bp, Artificial Sequence
  ENSG00000198015_65 (sequence is synthesized)
tttaacactgtctctttttcacacacactagttagctaagaatgagctggggggctgggcggaggtgggcggatcacttga

SEQ ID NO: 723461 - DNA, 90 bp, Artificial Sequence
  ENSG00000198015_66 (sequence is synthesized)
ctgccaaaacgctttttgcaaagtggttgtaccattttatattctcaccaccatgaatgaaagttccaattgctatattcttgccctcat

SEQ ID NO: 723462 - DNA, 120 bp, Artificial Sequence
  ENSG00000198015_67 (sequence is synthesized)
ccatgaatgaaagttccaattgctatattcttgccctcatttgataatatttttagttttagccattctaatggatatatagtaataatttgatggttttaatttgcatttctctgatga

SEQ ID NO: 723463 - DNA, 120 bp, Artificial Sequence
  ENSG00000198015_68 (sequence is synthesized)
tcaataacattaagttttgattcaggtacttgttgggcactcatatctttggtgaaatatctgttcaaatcatttgctcttttttttttcttagcacttaaaaaagactttttgccaggc

SEQ ID NO: 723464 - DNA, 120 bp, Artificial Sequence
  ENSG00000198015_69 (sequence is synthesized)
acagtggcacatgcctgtagacctagctactcaggaggctaagacaggaggatcacttgagtccagaagttctgggttgtagtgagctatgtcaatcaggtgtttgcactaagttcagca

SEQ ID NO: 723465 - DNA, 120 bp, Artificial Sequence
  ENSG00000198015_70 (sequence is synthesized)
taaatgtagtgacctcctgggtcactgggacccagagttgcctaaggagcgtcagaagtggagcaggtcaaaactcctgtgctgatcagtagtgggatcacacctgtgaatagccactgc

SEQ ID NO: 723466 - DNA, 120 bp, Artificial Sequence
  ENSG00000198015_71 (sequence is synthesized)
actgcagcctgggcaacatagtgagatcctcatctcctgaaaaaaaaaaaaaactttagtttttaaaagtagttttaggttctgagcaaaattgagaggagggtacagaaataacttata

SEQ ID NO: 723467 - DNA, 120 bp, Artificial Sequence
  ENSG00000198015_72 (sequence is synthesized)
tatcctcagtgctcccctcccccatgcctccctcatcaccatcccccagcagagtggcacattggttacaattgataaacctacactgacacatcattatcacccaaagcctattgtttc

SEQ ID NO: 723468 - DNA, 120 bp, Artificial Sequence
  ENSG00000198015_73 (sequence is synthesized)
cattagggttcactcttggtgctgtacaatctatgggtttgaacaaaggtacaatgacatgtatccatctttatagtcatgcagagtctacactgtcctaaaaacccttggctctgcctc

SEQ ID NO: 723469 - DNA, 120 bp, Artificial Sequence
  ENSG00000198015_74 (sequence is synthesized)
ttcgtcgtgtcctccccactgacccccggctaccactggtcttttcactgtctccgtaagtttttcctttttcagaacgccatatagttggaatcataaagtatatatagccttttcaca

SEQ ID NO: 723470 - DNA, 120 bp, Artificial Sequence
  ENSG00000198015_75 (sequence is synthesized)
ttggtttctttcactggataatatgcatttgtttcctctatgtcttttcacagtttgatagctcatttctttttagcatcgagtaatactccattgtctgggtgtacaacagtttatcca

SEQ ID NO: 723471 - DNA, 120 bp, Artificial Sequence
  ENSG00000198015_76 (sequence is synthesized)
ttccaagttttggcaattatgaataaaattgctatagatatccatgtgtaggtttttgtgtccatttaagctttcaactcctttgggtaaataccaaagagcacaattgttggattgaat

SEQ ID NO: 723472 - DNA, 120 bp, Artificial Sequence
  ENSG00000198015_77 (sequence is synthesized)
aaataccaaagagcacaattgttggattgaatgctaagagaatgtttcgttttgtaaaaaaccaccaaactgtcctacagagaggctgtaccattttgcattcccaccagcagtgaataa

SEQ ID NO: 723473 - DNA, 120 bp, Artificial Sequence
  ENSG00000198015_78 (sequence is synthesized)
gggttcctattgctcaacatccctgtcagcacttggtgttagtgttctgaattttggccattctaaaaggtgtgtagtggtgtctcacttgttttgtgtttttctctgctcagacagctc

SEQ ID NO: 723474 - DNA, 120 bp, Artificial Sequence
  ENSG00000198015_79 (sequence is synthesized)
atccacatcacatttattttaatttgcatttccctgataatatgtgatatggaacatctatttactcattattttttcttcttatgattgaagttataatatttctttaaatattttgga

SEQ ID NO: 723475 - DNA, 120 bp, Artificial Sequence
  ENSG00000198015_80 (sequence is synthesized)
taaatcttttgtcagatatatgcactggaaatatttttatgggggaccagtgttaagattagatctgtttaaagagaaaggagagaaagtttcaggcagggaatgcaatcgatgtgaagg

SEQ ID NO: 723476 - DNA, 120 bp, Artificial Sequence
  ENSG00000198015_81 (sequence is synthesized)
tttggggtaatttgtttcatttatctttaacaccatgttatggatggcaaaataacttcactggctttttttatcaagaaaagacttaccttttctgaatgcaacagtattagtaaacct

SEQ ID NO: 723477 - DNA, 120 bp, Artificial Sequence
  ENSG00000198015_82 (sequence is synthesized)
aatggtgacaataaaagcgattctgaataaatgaaaaccaatagattgttctagttttactcataaatataattcttcatatactgagttcagttttttagccataaatgaagacatggg

SEQ ID NO: 723478 - DNA, 120 bp, Artificial Sequence
  ENSG00000198015_83 (sequence is synthesized)
aaaaccataacatgttatttgctgagaagttctggcaaatgaagcaataaaataatcaaaactaaatcaacatttaaatacagaacataaagagataaatccaaaaccagaagatctctt

SEQ ID NO: 723479 - DNA, 120 bp, Artificial Sequence
  ENSG00000198015_84 (sequence is synthesized)
tgaaagaaaaacctaagtaattaaaaaactgaaagcacagatattcattatttcacaaataaacgttaatgctttttagacatctttaagcaactttagattgctaaaactaaaaaatgc

SEQ ID NO: 723480 - DNA, 120 bp, Artificial Sequence
  ENSG00000198015_85 (sequence is synthesized)
aattaagacaataatcttatatatagacaataattgtcttaataataatcagcatcaaagattcttagaaatgttgggagactgtgtggcaaagaaagtacttcaattaccagttaccaa

SEQ ID NO: 723481 - DNA, 120 bp, Artificial Sequence
  ENSG00000198015_86 (sequence is synthesized)
cacacaacaatttgaaatatccaggaagatcaacccatagaacaaagaaagctaataaattaccttttcttgcaattggtttgatgtaccattaatatatagatattactaatatggcaa

SEQ ID NO: 723482 - DNA, 120 bp, Artificial Sequence
  ENSG00000198015_87 (sequence is synthesized)
ttagtttatatgctatttgaatatgatagtaatatgaaggaagattctcttttttccacttcattgccaacaaacagctaactctaaacaacagtaaagtgtggaataaattactttgtt

SEQ ID NO: 723483 - DNA, 120 bp, Artificial Sequence
  ENSG00000198015_88 (sequence is synthesized)
aattaatgtggtttgaagctttgtaggaatccaattggatggatagcagcagtggtaagagaacattccggaataattacctaaattaaggagcttgccctagaatgtaaatcaacctac

SEQ ID NO: 723484 - DNA, 120 bp, Artificial Sequence
  ENSG00000198015_89 (sequence is synthesized)
tatatctttttatttgaaaaagtcttggtagaaaaagcatatcaactgaactgtacagtgtgttcagtgacttagtaaagaacataacttgtgtaaaggctaatgcaataagtttgagat

SEQ ID NO: 723485 - DNA, 120 bp, Artificial Sequence
  ENSG00000198015_90 (sequence is synthesized)
tgttctctttatgtaatagtttggaaaacaaacaactgtgattacatttagagatatgatgattatctagagggaaagttctgttgagcatatttgaacatttaattattgctgcaagaa

SEQ ID NO: 723486 - DNA, 72 bp, Artificial Sequence
  ENSG00000198015_91 (sequence is synthesized)
ctgttgagcatatttgaacatttaattattgctgcaagaagccagtttggtcccagctttataaagatatac

SEQ ID NO: 723487 - DNA, 120 bp, Artificial Sequence
  ENSG00000198015_92 (sequence is synthesized)
agattgtgccactgcacaccagcctggataaaaagagtgaaactctgcctcaaaataaaataataaaatgaaataaagatataaattggccagctagagttacctgaagttactatcttc

SEQ ID NO: 723488 - DNA, 120 bp, Artificial Sequence
  ENSG00000198015_93 (sequence is synthesized)
gctagagttacctgaagttactatcttcaattatctgaagacagttctgatagcttcagaattctttcatacaaggcaggaatgcaacttgttttttaatggcagataaaatcaaagagc

SEQ ID NO: 723489 - DNA, 120 bp, Artificial Sequence
  ENSG00000198015_94 (sequence is synthesized)
aaaagcaaaaggtagaagcttgaaagaccagagttgctacagattgttattacatgttccataatttaacaattgtcattgaagttggtgattgtcttgatattgcacatctgtaagaag

SEQ ID NO: 723490 - DNA, 120 bp, Artificial Sequence
  ENSG00000198015_95 (sequence is synthesized)
taatcaaactattgtgaatttgatagaatgctttaagttttattttccaacaaaagaatgtctacatacggcaaattcatagatctggaatccatttatgtcatcaaaagaggatttaaa

SEQ ID NO: 723491 - DNA, 120 bp, Artificial Sequence
  ENSG00000198015_96 (sequence is synthesized)
tttaattgtaagcttatatgatacattgttctaactggcaactaatgaaggattaaaaatgaattttgaaaataccacaccacttgcttcattttggataaaagttaaaagtgaatattc

SEQ ID NO: 723492 - DNA, 120 bp, Artificial Sequence
  ENSG00000198015_97 (sequence is synthesized)
tgagtatgctgaaattagtttaaaaacttttttttcccattccgaccattatccctttgtaaatctggtttcatcttatgaataatattttttaaaaaccatggaaacagtttagatata

SEQ ID NO: 723493 - DNA, 120 bp, Artificial Sequence
  ENSG00000198015_98 (sequence is synthesized)
agtttagatatacatcaatccatgaaagtagtagtattgtcaatctaccctggattacatattttaacgagaaagaaaccagctcatttgtgacatttagaatttttttttttttttttt

SEQ ID NO: 723494 - DNA, 89 bp, Artificial Sequence
  ENSG00000198015_99 (sequence is synthesized)
ggtgcaatcgtagctcactgtaaccttgaacttgcagctggagcttcaggtgtctgccatcacgcctggcaaatttattttttgtagag

SEQ ID NO: 723495 - DNA, 120 bp, Artificial Sequence
  ENSG00000198015_100 (sequence is synthesized)
gcctgcagctggagcttcaggtgtctgccatcacgcctggcaaatttattttttgtagagaccaagtctccttgtgttacccaggttggtatcaaactcctggtctcaagtgatcctccc

SEQ ID NO: 723496 - DNA, 120 bp, Artificial Sequence
  ENSG00000198015_101 (sequence is synthesized)
tgagatgacaggtgtgagccaccttgcttgacctaaaaacttttgaatattaatatgcattgtgtttattcaaagtatatctaatggtctaataaacagaatcactacttcaattataat

SEQ ID NO: 723497 - DNA, 120 bp, Artificial Sequence
  ENSG00000198015_102 (sequence is synthesized)
cttcagttataattgaagaatgacaaaaagttgagttatagaaattatattaatcttaaattcacattttcagtgaaagtttttaaataattttttctctttccgttttatgtgtgttcc

SEQ ID NO: 723498 - DNA, 120 bp, Artificial Sequence
  ENSG00000198015_103 (sequence is synthesized)
aattttatatccattaacataattaaaaattggggcttttaaaaaatgtttttcattctactaatttcattttataatttataaaagtactagaccacaatggattaaagaactatcctt

SEQ ID NO: 723499 - DNA, 120 bp, Artificial Sequence
  ENSG00000198015_104 (sequence is synthesized)
actagaccacaatggattaaagaactatcctttcatcacagatagttcaatgactcctgtttttttttagaccgagtcttgctctgtcaccccagctggagtgcagtggtgtgatcttgg

SEQ ID NO: 723500 - DNA, 120 bp, Artificial Sequence
  ENSG00000198015_105 (sequence is synthesized)
tggaatattattcagctttctcttgaattcttttagtaactaggagttcactacgtttccatggacctaactccaataatgattggacagttttctccctctgctttttctttctttctt

SEQ ID NO: 723501 - DNA, 68 bp, Artificial Sequence
  ENSG00000198015_106 (sequence is synthesized)
ctcctctgtcaatctcggttcattgcaacctccacctcccaagctcaagcgattcttgtgcctcagcc

SEQ ID NO: 723502 - DNA, 120 bp, Artificial Sequence
  ENSG00000198015_107 (sequence is synthesized)
caggcatgagccactgcacctggccattattggacagttttaatggaaagtgtttccttatattgagtggaaatcagtctgcttatggtttataatcctcagacttgattctccccctga

SEQ ID NO: 723503 - DNA, 120 bp, Artificial Sequence
  ENSG00000198015_108 (sequence is synthesized)
ttctccccctgaatctatatgaaataaatttactcctatttgaaaatatttgtcatattccttcttatttttctttaagctttattttttcttattatccatatgacatgtttccagaac

SEQ ID NO: 723504 - DNA, 120 bp, Artificial Sequence
  ENSG00000198015_109 (sequence is synthesized)
tctcccttatcctgattgtcctcctttagacacatgcttttaatgatatatttcttaaaatgtattacccaggacaacatatttttttttactgtggacagtatacttttacgaatggtg

SEQ ID NO: 723505 - DNA, 120 bp, Artificial Sequence
  ENSG00000198015_110 (sequence is synthesized)
ccaataatgcattacattttttagcagtcatgtcatcctcttgatttgcattgagtcatcatttcttaagagggaatcaggatatcaaaatagtctccaaactcagctgattccttctgc

SEQ ID NO: 723506 - DNA, 120 bp, Artificial Sequence
  ENSG00000198015_111 (sequence is synthesized)
agatacactctccacccttcttgattccttttcgggagaaaagaaaaaagtttattttcattgctaacctcactgatttttaattttaccatttaaatgttagtaacagctggtaatgta

SEQ ID NO: 723507 - DNA, 120 bp, Artificial Sequence
  ENSG00000198015_112 (sequence is synthesized)
accaaagaagatttttggcaggggatgatgcattcagagccttcactctggctacagggagaccatggaggatgggctggaacggaagcacgatggactcctgggcacaccgttaagtga

SEQ ID NO: 723508 - DNA, 120 bp, Artificial Sequence
  ENSG00000198015_113 (sequence is synthesized)
ctgatggagtcattcagctgacaaatgataatggcctggattaaggaaggagaagaggggaccaagaaatgccagagatacataggaagtaaaaattaataggccttggcaactattttt

SEQ ID NO: 723509 - DNA, 82 bp, Artificial Sequence
  ENSG00000198015_114 (sequence is synthesized)
agctgggactacaggtgtgcatcaccattcccaggtaatttttgtatttttagtatagatggagtttcgccatttcgcccgc

SEQ ID NO: 723510 - DNA, 120 bp, Artificial Sequence
  ENSG00000198015_115 (sequence is synthesized)
ccgcgtcggcctcccaaagggctgggattacagacatcagccactgcacctgggttggcaactaatttacacggaatggcagagagtgattaatgaaaaagcggggagaaaagctgctct

SEQ ID NO: 723511 - DNA, 120 bp, Artificial Sequence
  ENSG00000198015_116 (sequence is synthesized)
tgacatctgaaagctgacttggcattcacagctaggctatgttattttcctattgggcataagtctcacagaataccaacattaaacaagatgactctgaaaccttaataaagtgagaaa

SEQ ID NO: 723512 - DNA, 120 bp, Artificial Sequence
  ENSG00000198015_117 (sequence is synthesized)
aaacaagtccactttgtaattttgtctaagcacaggcaaaaagagggtcatggtgccatccagaaaataccaaaaatcaccctctctcagctaaaatgagcaactgctactttaccagtg

SEQ ID NO: 723513 - DNA, 120 bp, Artificial Sequence
  ENSG00000198015_118 (sequence is synthesized)
acagctttgtcccagctctagtctgccttccctatagagaagatgtattgagataatcatgaaattctccttctttctgatagtatccaatctggagcaaacccgtttccttagaccctc

SEQ ID NO: 723514 - DNA, 120 bp, Artificial Sequence
  ENSG00000198015_119 (sequence is synthesized)
tcccaatcccaaattctatactaggttcttctaaacactctcatactgagacaccccatggttccctatgttgtgtgttcttctttgctgcaatgagtaataaactcaacttgtttaact

SEQ ID NO: 723515 - DNA, 120 bp, Artificial Sequence
  ENSG00000198015_120 (sequence is synthesized)
acggtaagttttcttttcttttcttcaatccctactacatacagtaaaggaacacatggattttcttgcaataacaaacttctgaagtggtgttttgcatgaggaaattaaccctaagta

SEQ ID NO: 723516 - DNA, 77 bp, Artificial Sequence
  ENSG00000198015_121 (sequence is synthesized)
tctgaagtggtgttttgcatgaggaaattaaccctaagtagaatcacctactatgttgtactttttttttcttttcc

SEQ ID NO: 723517 - DNA, 120 bp, Artificial Sequence
  ENSG00000198015_122 (sequence is synthesized)
gaacaacttagcaaaatgttctttactactaagcaccgttggtatcctcatggacgaggcaaggtctcactcactgtgttgcgcaggctgattttaaactcctggactcaagtgatcctc

SEQ ID NO: 723518 - DNA, 120 bp, Artificial Sequence
  ENSG00000198015_123 (sequence is synthesized)
ctccctcagctgggattgtaagaatgagccactgccactgtacttttaaatttacatataatttagctaaaatgaaatagtacttctttttttctttattttaatgggggaatttaacca

SEQ ID NO: 723519 - DNA, 120 bp, Artificial Sequence
  ENSG00000198015_124 (sequence is synthesized)
gaaattatcctcaagatatgaaagaaaactatttcaaatgcttaatttaattaatagtcaacaacttagccacgtgtggtggtgtgcctgtagtcccagctactaggcagggtaaggtag

SEQ ID NO: 723520 - DNA, 120 bp, Artificial Sequence
  ENSG00000198015_125 (sequence is synthesized)
gaggagcccttgtgccaggagtttgaggctgtagtacactattattgagcttatgaataacctctgcacttcagcctgggcaataaagcaagacccagtctctagaaaaaaaaaatgatt

SEQ ID NO: 723521 - DNA, 120 bp, Artificial Sequence
  ENSG00000198018_0 (sequence is synthesized)
ccggctgggcaaggggccgcggggagcagctcgggactgaaccgagaggtgccgaaggaaccggcgggccgcttgatcccgctgcagacgtaggagatgcctgggacaaggaggccacct

SEQ ID NO: 723522 - DNA, 120 bp, Artificial Sequence
  ENSG00000198018_1 (sequence is synthesized)
tctcagggcaaaagaaaaagaaggtgacaggcgttgagaccaccgaagggaacccatggctaggatcagtttttcctacctctgcccagcctcctggtacttcactgtgcccacagtgag

SEQ ID NO: 723523 - DNA, 120 bp, Artificial Sequence
  ENSG00000198018_2 (sequence is synthesized)
tccatttctccgtcagcgggtggcattcctgggactcttcttcatatcctgtctccttttacttatgttaatcatagactttcgacattggagtgcttcattaccacgagataggcaata

SEQ ID NO: 723524 - DNA, 120 bp, Artificial Sequence
  ENSG00000198018_3 (sequence is synthesized)
cgaaaggtatttggctcgagtaggggagcttgaagctactgacactgaagacccaaatctgaattatggacttgttgttgactgtggcagcagtggttcccggatttttgtttatttctg

SEQ ID NO: 723525 - DNA, 120 bp, Artificial Sequence
  ENSG00000198018_4 (sequence is synthesized)
gccaagacataatgggaacccccatgacttgctggacatcaaacagatgagagaccgcaacagccaaccagtggttaaaaaaatcaagccaggaatctctgcaatggcagacactccaga

SEQ ID NO: 723526 - DNA, 120 bp, Artificial Sequence
  ENSG00000198018_5 (sequence is synthesized)
acatgccagtgattaccttcgtcctctgctgagctttgctgctgctcatgtgcctgtgaagaagcacaaggagacccctctttacatcctctgcacagcaggcatgaggcttctccctga

SEQ ID NO: 723527 - DNA, 120 bp, Artificial Sequence
  ENSG00000198018_6 (sequence is synthesized)
gaggaagcagttggctatcttggctgacctagtgaaagatttaccactggagtttgacttcctcttttcacagtctcaagcagaagtgatctctgggaagcaggaaggggtttatgcatg

SEQ ID NO: 723528 - DNA, 120 bp, Artificial Sequence
  ENSG00000198018_7 (sequence is synthesized)
gattggaatcaactttgttttgggaagattcgaccacgaggatgaatcagatgctgaggctacccaggaattggcagcaggacggagaaggacagtagggatactggatatgggaggagc

SEQ ID NO: 723529 - DNA, 120 bp, Artificial Sequence
  ENSG00000198018_8 (sequence is synthesized)
ctctctccaaattgcttatgaagttcctacctcaacctctgtccttcctgcaaagcaggaagaagctgccaagatcctgctggctgagttcaacctgggctgtgatgtgcaacacactga

SEQ ID NO: 723530 - DNA, 120 bp, Artificial Sequence
  ENSG00000198018_9 (sequence is synthesized)
acacgtgtacagggtttatgtcacaacttttctgggtttcggaggcaactttgcccggcagcgctacgaagaccttgttctgaatgaaactcttaacaaaaacagattgcttggtcagaa

SEQ ID NO: 723531 - DNA, 120 bp, Artificial Sequence
  ENSG00000198018_10 (sequence is synthesized)
gacaggtctgagtcccgacaatccatttctggatccctgcctgccagtgggactcacagatgtggtggagaggaacagccaagtcttacatgtccgaggaagaggagactgggtgtcttg

SEQ ID NO: 723532 - DNA, 120 bp, Artificial Sequence
  ENSG00000198018_11 (sequence is synthesized)
tggggcaatgctgagccccctgctggctcgctccaacaccagccaggcctcactcaatggcatatatcaatcgcctattgacttcaacaacagcgagttctacggcttctctgagttttt

SEQ ID NO: 723533 - DNA, 120 bp, Artificial Sequence
  ENSG00000198018_12 (sequence is synthesized)
ttattgtacagaggatgtgttgcgcattggtggccgctaccatgggccaacatttgccaaggctgctcaggattactgtggcatggcttggtcggtactaactcagagattcaagaatgg

SEQ ID NO: 723534 - DNA, 120 bp, Artificial Sequence
  ENSG00000198018_13 (sequence is synthesized)
cctcttttcatcacatgcagatgagcatcgactcaaatatcagtgttttaaatcggcttggatgtaccaagtcttacatgaaggattccactttccctatgactacccaaacctgcggac

SEQ ID NO: 723535 - DNA, 120 bp, Artificial Sequence
  ENSG00000198018_14 (sequence is synthesized)
agcccagctggtgtatgaccgagaggttcagtggacgctgggagccattctatataaaacacgattcttaccactcagggatcttcggcaggaaggtgtccgacaagcccatggtagctg

SEQ ID NO: 723536 - DNA, 120 bp, Artificial Sequence
  ENSG00000198018_15 (sequence is synthesized)
gttccgtctctcctttgtatacaaccactatctcttctttgcctgtatcctggtggtgctactggccatcttcctataccttctgcggctacgccgaattcaccaccgacaaacacgagc

SEQ ID NO: 723537 - DNA, 120 bp, Artificial Sequence
  ENSG00000198018_16 (sequence is synthesized)
ctcagctccattggacttgctgtggcttgaagaggtggtgcccatgatgggagtacaggtggggccgtgaggctggaccaggactagagaagcttgagcacccccgagttgctgctcatt

SEQ ID NO: 723538 - DNA, 120 bp, Artificial Sequence
  ENSG00000198018_17 (sequence is synthesized)
gaattcctccactttcttatatagcctcagatgctgtgatgtctgaccttgtggatatttgcccttggaatttctactttactttctaccgtaattccttctccgtacccaggtcttctc

SEQ ID NO: 723539 - DNA, 120 bp, Artificial Sequence
  ENSG00000198018_18 (sequence is synthesized)
tgagagaagctataatttaatctgtgaggaactaaatgacaggagattggtgctaatacgggggaccaagctttgtccaagtgaagcaggcttcgactccttctgagaggtctggtgtgt

SEQ ID NO: 723540 - DNA, 120 bp, Artificial Sequence
  ENSG00000198018_19 (sequence is synthesized)
tcctagaatctcaccttttcttcccttgctaaagcatgaagtttggcatttggcacactggaagcctggttgaaatgaaatttgtagcatctgatacaaagccagagacattctagcaag

SEQ ID NO: 723541 - DNA, 120 bp, Artificial Sequence
  ENSG00000198018_20 (sequence is synthesized)
tgcagcagccccttctttctctgtaacagagatatcatttatgtggagatccacaacctttaacagggatccaagatctttgcagttcaatcgaccacataggaatttccaggcaccaaa

SEQ ID NO: 723542 - DNA, 120 bp, Artificial Sequence
  ENSG00000198018_21 (sequence is synthesized)
atgatataacttccttgcttccttgacaaagaagccatcatgggtgtgatccaagatccctgtcgtagtgttgatgatgttagtacatgattttaaaggttagaaccccttctaaatgaa

SEQ ID NO: 723543 - DNA, 120 bp, Artificial Sequence
  ENSG00000198018_22 (sequence is synthesized)
tggtctgtggaagattttagtatcttatctgatgcctggtatgatgaggatagaaaatttttccatttttatgtgcctcacaggctgtttgggcattaattttgctttttgagccttaag

SEQ ID NO: 723544 - DNA, 120 bp, Artificial Sequence
  ENSG00000198018_23 (sequence is synthesized)
tgtgttagtaggatggagaaactgtgatggggactgggaacctggatttgtctgattttaggtcactgttccctgggcctgtttttgtgagcccttacacaggaagatataaagagagtt

SEQ ID NO: 723545 - DNA, 120 bp, Artificial Sequence
  ENSG00000198018_24 (sequence is synthesized)
ctttcatttcactgctaaaatcagtatgtagtatggggaatgtatttgggttgtttttaaagaaaaggggaacagaatcaggagagtgggcaaaggcaataaaatcaaagttcttattaa

SEQ ID NO: 723546 - DNA, 120 bp, Artificial Sequence
  ENSG00000198018_25 (sequence is synthesized)
ttatttctgagaaatagaagtttctcaatttatgactcttggaatgtctgaaagggagcaaatttggaatagatcaatctgttaataagccatctggcaactttcagaacctctattaag

SEQ ID NO: 723547 - DNA, 120 bp, Artificial Sequence
  ENSG00000198018_26 (sequence is synthesized)
agactgctgagtcacaaacagcacttccattaatgaagcgagaggaaaagccataataattacatcttcacccactacccttccagagctttgcttctcctccacatttagccattaaat

SEQ ID NO: 723548 - DNA, 120 bp, Artificial Sequence
  ENSG00000198018_27 (sequence is synthesized)
tgcatgaggatttctcttcatcagggtccgcatggaatctttcttatattttaccctttcctacatgtagccttgaatgtcctttccacgaatatgctcccacggctgggagcattttct

SEQ ID NO: 723549 - DNA, 120 bp, Artificial Sequence
  ENSG00000198018_28 (sequence is synthesized)
tttcttttcgtcacctttgatttttgggattagattaataggggaaaaagtccctggctttaaagaaaacaaaagtagaattcttcaaaaataaatttcatactgggaacagaaaggaac

SEQ ID NO: 723550 - DNA, 120 bp, Artificial Sequence
  ENSG00000198018_29 (sequence is synthesized)
taaatgcttcataaaacagggaaaaagaaattaagatcatcctagaaataaactaagataaaaataagtatactgacccttggttggtagataaaaagatgaccagtcttgtattgtttt

SEQ ID NO: 723551 - DNA, 120 bp, Artificial Sequence
  ENSG00000198018_30 (sequence is synthesized)
agatgaccagtcttgtattgttttaaaattagataaacatggattaagcatgcaaagactctgttcctttttttttttcttggagacagggcctcacgctgtcacccaggctggagtgca

SEQ ID NO: 723552 - DNA, 82 bp, Artificial Sequence
  ENSG00000198018_31 (sequence is synthesized)
cccaggctggagtgcagttgtgcaacatcatggctcaccgcagcctcaacctcctgggctcaaacagtcctcccaactcaga

SEQ ID NO: 723553 - DNA, 67 bp, Artificial Sequence
  ENSG00000198018_32 (sequence is synthesized)
acctgccctctgtttcctttggaaatctcttacctttcattagggtttctttcatagcaatttcctt

SEQ ID NO: 723554 - DNA, 120 bp, Artificial Sequence
  ENSG00000198018_33 (sequence is synthesized)
tcttacctttcattagggtttctttcatagcaatttcctttggtttttaagacttctacattgctttttcttttattatctgtgctccgtgaaccttatgaatgctgcttaaaaataatg

SEQ ID NO: 723555 - DNA, 120 bp, Artificial Sequence
  ENSG00000198018_34 (sequence is synthesized)
tcaaaatatgttttagctgcctactcaggtaacgttttcttttgctctcatcttggtttccatatactatttttggttttttgtgagatctaatcaatgatctagtcagaagctacttca

SEQ ID NO: 723556 - DNA, 120 bp, Artificial Sequence
  ENSG00000198018_35 (sequence is synthesized)
taaaaatgaacttgaaacacggaagtagtggttggtccagtttgaaagctcttattagtattcttcatcctggctgtaataatagccattatttgttatgcctttgttatgtagcagaca

SEQ ID NO: 723557 - DNA, 120 bp, Artificial Sequence
  ENSG00000198018_36 (sequence is synthesized)
ctcttaaggattttatgtgtattattcaaattgctattactgttctttttatagttgagaatctcaggatacctacatttatcactttttcaatatatatgtatttcttattcttatttt

SEQ ID NO: 723558 - DNA, 120 bp, Artificial Sequence
  ENSG00000198018_37 (sequence is synthesized)
gtcttggagtgtttaatgtgttatttcctgttcattactttaatattatggtatctaggcttgtctttattaccatgagcaaggtctccaggagttccacagtactgaaggaaaattttg

SEQ ID NO: 723559 - DNA, 120 bp, Artificial Sequence
  ENSG00000198018_38 (sequence is synthesized)
tcatatccctcagaagaactgaatatttattattggtatgggctcctttgtttattctcttctcccaattaatagattttaaatgaaatcttattagctagaaacaaaagccacttactc

SEQ ID NO: 723560 - DNA, 120 bp, Artificial Sequence
  ENSG00000198018_39 (sequence is synthesized)
cttgctgagagccaattacttaaatatatttcttccttataataaaataatttgcttctaggagcagaaatctatcttgccataccctttggtttttaaagatttctcttctatttgcat

SEQ ID NO: 723561 - DNA, 120 bp, Artificial Sequence
  ENSG00000198018_40 (sequence is synthesized)
ttctgcactttggtggttctcccatgaagataattatggtgtcataaaattcacattccactggttcctttgaatcttaccaaccactcttgttaacagagacaatgaacctgaactgtt

SEQ ID NO: 723562 - DNA, 120 bp, Artificial Sequence
  ENSG00000198018_41 (sequence is synthesized)
ttaggactcttgttattactgagacaggtcacaaacatcaaaataggagtccgtggcttgtagtgatgctttttagtcttgtgatagcacaatccatcactttccccaaaattcttgtca

SEQ ID NO: 723563 - DNA, 120 bp, Artificial Sequence
  ENSG00000198018_42 (sequence is synthesized)
tagaacataatgaaaaatatgtaaaatacccatttatgtggcatttcattcacttaagttgcagttaactctaagccaaattataccattttttctctctgtactttagctccttgaatt

SEQ ID NO: 723564 - DNA, 120 bp, Artificial Sequence
  ENSG00000198018_43 (sequence is synthesized)
tccttaatctgggaaacttttgttcccacaccaaggaacaaattcagggggtacaagtgcaggtttgttacatgagtatattgagtgatgctgaggtttggggtacagatcccatcacca

SEQ ID NO: 723565 - DNA, 120 bp, Artificial Sequence
  ENSG00000198018_44 (sequence is synthesized)
ggtggtgagcatagtacctaacagatagttctttaatccatgccctcctctctccctccctgctctagtagtccacagtgtctattctggtctgggaaattttcatcactttccaccaat

SEQ ID NO: 723566 - DNA, 120 bp, Artificial Sequence
  ENSG00000198018_45 (sequence is synthesized)
cttctatttattctccaaatgtcttccaaagtatcctgccccaccccctcctcatcctaagagattcctttaacttcaagatcatatccagtgattgctgaaaaatgtctgccatgcact

SEQ ID NO: 723567 - DNA, 120 bp, Artificial Sequence
  ENSG00000198018_46 (sequence is synthesized)
tgctaagctagtgtttttaggcattaacatttattatcacatccatatttatatttttgaaataatttatacttctcactgatatcatctaaacagatgcttctcacagttttatgtttt

SEQ ID NO: 723568 - DNA, 120 bp, Artificial Sequence
  ENSG00000198018_47 (sequence is synthesized)
gttttttgtcagggatgaaagacaagtgagtggtatcacttaagggaaagaacagtaggcttaacgaatagcagacctggattctagttctggctttgtcatttactagctctggtaccc

SEQ ID NO: 723569 - DNA, 120 bp, Artificial Sequence
  ENSG00000198018_48 (sequence is synthesized)
caggccagtcacttaccatctctggttcggttctcatctatcaaacaaagaggctagacaagattagaaactaaaggcagaagacaaggtagaaaaatcatatgattttgggaagagcat

SEQ ID NO: 723570 - DNA, 120 bp, Artificial Sequence
  ENSG00000198018_49 (sequence is synthesized)
tttgtcctttggtttagaagaccaggctgcccaaaagagcctcctattttatccataacccctgatgataaggttggtgggaacagagtttctaatagtaatcataataaatttcagaag

SEQ ID NO: 723571 - DNA, 120 bp, Artificial Sequence
  ENSG00000198018_50 (sequence is synthesized)
agttttaaagcttctggtcaacccccttgatttatatgggtgataaaactgaggcctagagcagttgtaatatgtgcaaagtcatagtgactggcctcctagcccaactactttgtcagc

SEQ ID NO: 723572 - DNA, 120 bp, Artificial Sequence
  ENSG00000198018_51 (sequence is synthesized)
tacaatgaaatgctcattaacagaatctttctgcaagtataaacagaatctattttttataaaacagctggccacaactaaccatgccccatctttacaactgcttctgacattcattta

SEQ ID NO: 723573 - DNA, 120 bp, Artificial Sequence
  ENSG00000198018_52 (sequence is synthesized)
tgactgctttgctcacatttaggaataaactttgaaaaaaatactttgtcagaaatagtgccaagttttcactacatctattcttgttcctgtatttcttttcgtacttttaaattttat

SEQ ID NO: 723574 - DNA, 120 bp, Artificial Sequence
  ENSG00000198018_53 (sequence is synthesized)
acatctttttaaaacaattttatacaatttcctttactacaacatccaagcaattcattagatgactacagcctagatgaaggtataaatgcctattacatctacctcattaaagaactt

SEQ ID NO: 723575 - DNA, 120 bp, Artificial Sequence
  ENSG00000198018_54 (sequence is synthesized)
cgttgtaattcttgggcagtttccagactctgttacagaaacagagggctgtttctttttgttgtctttaaacttttcaaattaattcaaaactagtatctaattgtcctttttgctgtg

SEQ ID NO: 723576 - DNA, 120 bp, Artificial Sequence
  ENSG00000198018_55 (sequence is synthesized)
gtatgtggtgtaatgttgattgggaataagaattatggtagaaatagcagatgtttcaaattctcccatattagtctcttagggacgctagctccagattccagcccctggggcaataac

SEQ ID NO: 723577 - DNA, 120 bp, Artificial Sequence
  ENSG00000198018_56 (sequence is synthesized)
ttgtgaggattttcctggtgttacaaaaaatattgctgttaaaaaactaagactcaaaaccaaaagttgtgattaataataacaggattattagtcaataatattttgattaatactata

SEQ ID NO: 723578 - DNA, 120 bp, Artificial Sequence
  ENSG00000198018_57 (sequence is synthesized)
gaatagcaacagtgaatatacctcaaattgaaaacttttaggttgtgttcttggctcattctctcataacctggatctaagttggaaagctgtggcaccctgtttgggtgtcccatctac

SEQ ID NO: 723579 - DNA, 120 bp, Artificial Sequence
  ENSG00000198018_58 (sequence is synthesized)
cctgttttctgtttctgcagatggcttgttcaagcttcattttaagcctgctctgtctacttatcttccttatatcctaatagacttctcttgtgttattacacatttctcttttgctct

SEQ ID NO: 723580 - DNA, 120 bp, Artificial Sequence
  ENSG00000198018_59 (sequence is synthesized)
aatatttcattattttccagtttgtcagtaccgttatcagagggacgaggaaggaataacacaccagttgaccattttgtttctctgaaaatctgagcaatacggagatccttttattag

SEQ ID NO: 723581 - DNA, 120 bp, Artificial Sequence
  ENSG00000198018_60 (sequence is synthesized)
taaaactgaatcattactcatactacaagggctttcacttttaaaatgtaatccatcattgcttgccatttttatgaaaaccaaagttgaaaagtcttctgaatcacaggctatgtatag

SEQ ID NO: 723582 - DNA, 120 bp, Artificial Sequence
  ENSG00000198018_61 (sequence is synthesized)
ccacacatgcatgacttcaggctagcataaagacatgtctgctcctgagcctcttcttttaaagggcaaccacttgtataccctctggtggccactcctccttctccactccaaggcagc

SEQ ID NO: 723583 - DNA, 120 bp, Artificial Sequence
  ENSG00000198018_62 (sequence is synthesized)
cctggtactttcctaagtggcccctcctacagagcacttgccggcatttggcctgctgctggtgaagacgccccttactagcttcataaatgtttttctgcaagcagggatcccagacac

SEQ ID NO: 723584 - DNA, 120 bp, Artificial Sequence
  ENSG00000198018_63 (sequence is synthesized)
atactttggtttctagtgtttcagttactatgttgtatttgaaattctcattccacaattaccctttagttgaagtcctgaagtacatgccatgtactccccctttatttctaccttgat

SEQ ID NO: 723585 - DNA, 120 bp, Artificial Sequence
  ENSG00000198018_64 (sequence is synthesized)
caatggcctctgcggagtgtagtgaaagacatctttttattatgatctacactttaaaaaaccaaaggctgcctgtattacattgctttggggagttgttaagactctgttttttctact

SEQ ID NO: 723586 - DNA, 120 bp, Artificial Sequence
  ENSG00000198018_65 (sequence is synthesized)
gcttcacattaaacaataattttgttgaattttgaattcttaaaattctcactgacaaacattttaggtcagtgttgaggaaaatgtgtgatgcatgttagagaggtgatgcattctccc

SEQ ID NO: 723587 - DNA, 120 bp, Artificial Sequence
  ENSG00000198018_66 (sequence is synthesized)
ttatgcagggacatgggtatatgtgttacatatgctgatatataacccaccattcatcccaggaccacaagggtagctgtagataaactggttatcctaaaatcatgattatcagtgttg

SEQ ID NO: 723588 - DNA, 120 bp, Artificial Sequence
  ENSG00000198018_67 (sequence is synthesized)
atctctgcaaccaacattgctttagggagttgctagtcattacccctgctacaatagatagtatttgtcagtctaagttacagacaaaaaattctaggttgactgattaagaaagccatg

SEQ ID NO: 723589 - DNA, 120 bp, Artificial Sequence
  ENSG00000198018_68 (sequence is synthesized)
tgttttaatttccttcatgttttaaaaacaatggacgtaagtgcagagagacctttgaaaatattaagggaaatctatttaatcctataggtatgtgatgacttgtttttttggaaaaag

SEQ ID NO: 723590 - DNA, 120 bp, Artificial Sequence
  ENSG00000198018_69 (sequence is synthesized)
gtatttggaacatcaatctgtaattatccattttccattcatgcattcactaattcaatatttgatatgtgtctgggagtgctgggaataacataaatacaaaaaaaaccctaagataat

SEQ ID NO: 723591 - DNA, 120 bp, Artificial Sequence
  ENSG00000198018_70 (sequence is synthesized)
cattcaccagaagctcatagatataatacagttatatagctaaatgcaaccagttgtttttccaaatgtactcatcatctgtaataaaagaaaaatgaagtaaaacatctgaaaccttaa

SEQ ID NO: 723592 - DNA, 120 bp, Artificial Sequence
  ENSG00000198019_0 (sequence is synthesized)
aatatcttgcatgttacagatttcactactcccaccagcttggagacaacatgtggttcttgacaactctgctcctttgggttccagttgatgggcaagtggacaccacaaaggcagtga

SEQ ID NO: 723593 - DNA, 120 bp, Artificial Sequence
  ENSG00000198019_1 (sequence is synthesized)
tcactttgcagcctccatgggtcagcgtgttccaagaggaaaccataaccttgcactgtgaggtgctccatctgcctgggagcagctccacacagtggtttctcaatggcacagccactc

SEQ ID NO: 723594 - DNA, 120 bp, Artificial Sequence
  ENSG00000198019_2 (sequence is synthesized)
agacctcgacccccagctacagaatcacctctgccagtgtcaatgacagtggtgaatacaggtgccagagaggtctctcagggcgaagtgaccccatacagctggaaatccacagaggct

SEQ ID NO: 723595 - DNA, 120 bp, Artificial Sequence
  ENSG00000198019_3 (sequence is synthesized)
ggctactactgcaggtctccagcagagtcttcatggaaggagaacctctggccttgaggtgtcatgcgtggaaggataagctggtgtacaatgtgctttactatcgaaatggcaaagcct

SEQ ID NO: 723596 - DNA, 120 bp, Artificial Sequence
  ENSG00000198019_4 (sequence is synthesized)
ttaagtttttccactggaattctaacctcaccattctgaaaaccaacataagtcacaatggcacctaccattgctcaggcatgggaaagcatcgctacacatcagcaggaatatcacaat

SEQ ID NO: 723597 - DNA, 120 bp, Artificial Sequence
  ENSG00000198019_5 (sequence is synthesized)
acactgtgaaagagctatttccagctccagtgctgaatgcatctgtgacatccccactcctggaggggaatctggtcaccctgagctgtgaaacaaagttgctcttgcagaggcctggtt

SEQ ID NO: 723598 - DNA, 120 bp, Artificial Sequence
  ENSG00000198019_6 (sequence is synthesized)
acatgggcagcaagaccctgcgaggcaggaacacatcctctgaataccaaatactaactgctagaagagaagactctgggttatactggtgcgaggctgccacagaggatggaaatgtcc

SEQ ID NO: 723599 - DNA, 120 bp, Artificial Sequence
  ENSG00000198019_7 (sequence is synthesized)
ttaagcacagccctgagttggagcttcaagtgcttggtgagaatgacgggaagccactggcacagaagaagggactcccttatctcccatgggactgaggtttgttcaagggtttttggc

SEQ ID NO: 723600 - DNA, 120 bp, Artificial Sequence
  ENSG00000198019_8 (sequence is synthesized)
ccagacaagaggggaaagtctcttcaggaaaagcccacaagcaggcctttccatccttgattcacaacatcactcttctcctcgcaaactgttaaatttcctttcctttctttttctttt

SEQ ID NO: 723601 - DNA, 120 bp, Artificial Sequence
  ENSG00000198019_9 (sequence is synthesized)
tcctttgcctttccttcctctatttctttccttcctccatttctttccttcattttctcctctgtccttcttttcttctccttcattttattttcccctccctcccactcttccctccac

SEQ ID NO: 723602 - DNA, 120 bp, Artificial Sequence
  ENSG00000198019_10 (sequence is synthesized)
tccatgacccctccttctctctctctctctctccctgcttccctgcctccctcctcctcaccaacaatctcaccaacaatttatcaagttcttcctatctgttgtcatacgtctggggat

SEQ ID NO: 723603 - DNA, 120 bp, Artificial Sequence
  ENSG00000198019_11 (sequence is synthesized)
ataaagacatttgagtatagttcttgcttcaaggagctcacaaggtggatttatcagacagtgattttgtaaactgcaaatcaccacctccccaagtatctctgtttaactgaggcagag

SEQ ID NO: 723604 - DNA, 120 bp, Artificial Sequence
  ENSG00000198019_12 (sequence is synthesized)
ggattgtgagctctagaacaaagtctccttgggggggaaaaaagttcatcttcaacccaaattcatttcaagtattaaatggcacagagatatcagttgtctctggaactagggagtaag

SEQ ID NO: 723605 - DNA, 120 bp, Artificial Sequence
  ENSG00000198019_13 (sequence is synthesized)
aatatcttgcatgttacagatttcactactcccaccagcttggagacaacatgtggttcttgacaactctgctcctttgggttccagttgatgggcaagtggtagacaccacaaaggcag

SEQ ID NO: 723606 - DNA, 120 bp, Artificial Sequence
  ENSG00000198019_14 (sequence is synthesized)
cagaggatggaaatgtccttaagcacagccctgagttggagcttcaagtgcttggtgagaatgacgggaagccactggcacagaagaagggactcccttatctcccatgggactgaggcc

SEQ ID NO: 723607 - DNA, 120 bp, Artificial Sequence
  ENSG00000198019_15 (sequence is synthesized)
aagaactgaaaagaaagaaaaagtggaatttagaaatctctttggattctggtcatgagaagaaggtaatttccagccttcaagaagacagacatttagaagaagagctgaaatgtcagg

SEQ ID NO: 723608 - DNA, 120 bp, Artificial Sequence
  ENSG00000198019_16 (sequence is synthesized)
aatatcttgcatgttacagatttcactactcccaccagcttggagacaacatgtggttcttgacaactctgctcctttgggttccagttgatgggcaagtgggtgagtgatctctaactc

SEQ ID NO: 723609 - DNA, 120 bp, Artificial Sequence
  ENSG00000198019_17 (sequence is synthesized)
agcttctccttctatgccactttcctacttccaaaggatgggtcctattaacctgcagaagagcatatagagaaagcagagaaagaagaaagatttataaattatgtaaaatctcccata

SEQ ID NO: 723610 - DNA, 120 bp, Artificial Sequence
  ENSG00000198019_18 (sequence is synthesized)
ttcagagcatgattttcataaaaactatgatttgtaggctttctttctaaagttttctgaatgagctctttcctctgagcgaaatgcctgaatgtatatataacagcaggaaagggccag

SEQ ID NO: 723611 - DNA, 120 bp, Artificial Sequence
  ENSG00000198019_19 (sequence is synthesized)
aattgcacaaacactaaagtagtctgctgacactgaagtagtctgctgggtttcccaacatcccctaaaccagtcccctttacaagaaagcagagtgggttttttctcctcagaaagagc

SEQ ID NO: 723612 - DNA, 120 bp, Artificial Sequence
  ENSG00000198019_20 (sequence is synthesized)
acagctccgcttggcttgcccaagtctaaaaccctgcttcattgctcccaacagaaaaacctacatcagtaatttaatcctcaggagccccagattcccaacacccagatgaggatttaa

SEQ ID NO: 723613 - DNA, 120 bp, Artificial Sequence
  ENSG00000198019_21 (sequence is synthesized)
taacaatgaacagaggtctctgcagcaggaggacactcttaaaggctggcttttgtaggtttccacttgcctatttttcaaataaatctaaatatgtatttttcccttgtgctatccaca

SEQ ID NO: 723614 - DNA, 120 bp, Artificial Sequence
  ENSG00000198019_22 (sequence is synthesized)
ctccccgtgagcactgcgtacaaacatccaaaagttcaacaacaccagaactgtgtgtctcatggtatataactcttaaagcaaataaatgaactgacttcaactgggatacatttggaa

SEQ ID NO: 723615 - DNA, 120 bp, Artificial Sequence
  ENSG00000198019_23 (sequence is synthesized)
atgtggtcatcaaagatgacttgaaatgaggcctactctaaagaattcttgaaaaacttacaagtcaagcctagcctgataatcctattacatagtttgaaaaatagtattttatttctc

SEQ ID NO: 723616 - DNA, 120 bp, Artificial Sequence
  ENSG00000198019_24 (sequence is synthesized)
agaacaaggtaaaaaggtgagtgggtgcatatgtacagaagattaagacagagaaacagacagaaagagacacacacacagccaggagtgggtagatttcagggagacaagagggaatag

SEQ ID NO: 723617 - DNA, 120 bp, Artificial Sequence
  ENSG00000198019_25 (sequence is synthesized)
tatagacaataaggaaggaaatagtacttacaaatgactcctaagggactgtgagactgagagggctcacgcctctgtgttcaggatacttagttcatggcttttctctttgactttact

SEQ ID NO: 723618 - DNA, 120 bp, Artificial Sequence
  ENSG00000198019_26 (sequence is synthesized)
aaaagagaatgtctccatacgcgttctaggcatacaagggggtaactcatgatgagaaatggatgtgttattcttgccctctcttttgaggctctctcataacccctctatttctagaga

SEQ ID NO: 723619 - DNA, 120 bp, Artificial Sequence
  ENSG00000198019_27 (sequence is synthesized)
caacaaaaatgttgccagtcctaggcccctgccctgtaggaaggcagaatgtaactgttctttttgtttaacgattaagtccaaatctccaagtgcggcactgcaaagagacgcttcaag

SEQ ID NO: 723620 - DNA, 120 bp, Artificial Sequence
  ENSG00000198019_28 (sequence is synthesized)
tggggagaagcggcgatatcatagagtccagatcttgcctccagagatttgctttaccttcctgattttctggttactaattagcttcaggatacgctgctctcatacttgggctgtagt

SEQ ID NO: 723621 - DNA, 120 bp, Artificial Sequence
  ENSG00000198019_29 (sequence is synthesized)
ttggagacaaaatattttcctgccactgtgtaacatagctgaggtaaaaactgaactatgtaaatgactctactaaaagtttagggaaaaaaaacaggaggagtatgacacacacagcaa

SEQ ID NO: 723622 - DNA, 120 bp, Artificial Sequence
  ENSG00000198019_30 (sequence is synthesized)
ctcactttaatttacaagtgaagaaactgggctccagagaggtaaactgcattactaaaggccacaccatgaccagtagctggaaccagaactgaggtctctgggtcctagtccaatact

SEQ ID NO: 723623 - DNA, 120 bp, Artificial Sequence
  ENSG00000198019_31 (sequence is synthesized)
ctttccagtgtaccgcaacccccatcaataatcacaggagctaatgtcaatgtcagggcataatggtgatccatttcatccatcattattttagttgtaaagaatacagactcactctag

SEQ ID NO: 723624 - DNA, 120 bp, Artificial Sequence
  ENSG00000198019_32 (sequence is synthesized)
gtagataggagagttagaaaataataccatggaatctcatggaagccccatagaaagagaaacctggaaaacatgaggaacgggctatactgtccatctacctctcagggacaaagcagc

SEQ ID NO: 723625 - DNA, 120 bp, Artificial Sequence
  ENSG00000198019_33 (sequence is synthesized)
ctctgtggtgccacttcttcctgagcatctgcaggctaagcagtttgcatatggccttgttctgaccctttcacggcctttcctcttaatacaatcactagcaacctttctctgtctgag

SEQ ID NO: 723626 - DNA, 120 bp, Artificial Sequence; identical to SEQ ID NO: 704301
  ENSG00000198021_0 (sequence is synthesized)

SEQ ID NO: 723627 - DNA, 120 bp, Artificial Sequence
  ENSG00000198021_1 (sequence is synthesized)
cagggagtggtcagcagtggggctttgtgatgtgaagccaccctagggctgccattggctgggacactgcctgtatgatcaaacaaagctcaagggtgtggctttgccttgtcaccagga

SEQ ID NO: 723628 - DNA, 120 bp, Artificial Sequence
  ENSG00000198021_2 (sequence is synthesized)
caatggacaaacaatccagtgccggcggggtgaagaggagcgtcccctgtgattccaacgaggccaacgagatgatgccggagaccccaactggggactcagacccgcaacctgctccta

SEQ ID NO: 723629 - DNA, 120 bp, Artificial Sequence
  ENSG00000198021_3 (sequence is synthesized)
aaaaaatgaaaacatctgagtcctcgaccatactagtggttcgctacaggaggaactttaaaagaacatctccagaggaactgctgaatgaccacgcccgagagaacagaatcaaccccc

SEQ ID NO: 723630 - DNA, 120 bp, Artificial Sequence
  ENSG00000198021_4 (sequence is synthesized)
tccaaatggaggaggaggaattcatggaaataatggttgaaatacctgcaaagtagcaagaagctacatctctcaaccttgggcaatgaaaataaagtttgagaagctgatggctgtgta

SEQ ID NO: 723631 - DNA, 120 bp, Artificial Sequence
  ENSG00000198026_0 (sequence is synthesized)
gggttcctccgcagcggaggaaagaggatggcgacctcgtcgatgccggagtcagagaggaacgtggctacgaaagcctcggagtgaagttcccagaccctacgccccgctgtcaggcag

SEQ ID NO: 723632 - DNA, 120 bp, Artificial Sequence
  ENSG00000198026_1 (sequence is synthesized)
cccgccgatcagatggaggagaacgaggtggagagcagcagcgacgcggcccctgggcctggccggcccgaggagccctctgagagcggcctgggtgtgggcacctcagaagccgtgtcc

SEQ ID NO: 723633 - DNA, 120 bp, Artificial Sequence
  ENSG00000198026_2 (sequence is synthesized)
gccgacagcagcgacgccgcggccgccccggggcaggcagaggccgatgactctggcgtggggcaaagctcggaccgcggcagccgttctcaggaggaggtatctgagagcagctcgagc

SEQ ID NO: 723634 - DNA, 120 bp, Artificial Sequence
  ENSG00000198026_3 (sequence is synthesized)
gcagaccccctgcctaatagctacctccctgattcatcgtctgtgtctcatgggccagtggcaggggtgacaggcggtcccccagcacttgtgcactctagtgcactcccagaccccaac

SEQ ID NO: 723635 - DNA, 120 bp, Artificial Sequence
  ENSG00000198026_4 (sequence is synthesized)
atgctggtgtccgactgcacagcttcctcctcggacctgggctcggccatcgacaagatcatcgagtccaccatcgggcccgacctcatccagaactgcatcactgtgaccagtgctgag

SEQ ID NO: 723636 - DNA, 120 bp, Artificial Sequence
  ENSG00000198026_5 (sequence is synthesized)
gatggcggggccgagaccacacggtacctgatcctacagggcccagatgatggagcccccatgacatcaccaatgtccagttccaccttggcccacagcctagcagccattgaggccctg

SEQ ID NO: 723637 - DNA, 120 bp, Artificial Sequence
  ENSG00000198026_6 (sequence is synthesized)
gcagatggccccacatccacatccacatgcctggaggcacagggtgggcccagctccccggtgcagctgcccccagcctccggtgccgaagagccggacctgcagagcctggaggccatg

SEQ ID NO: 723638 - DNA, 120 bp, Artificial Sequence
  ENSG00000198026_7 (sequence is synthesized)
atggaggtggtggtggtgcagcagttcaaatgcaagatgtgccagtaccggagcagcaccaaggccacactgctgcgccacatgcgggaacgccacttccgtccagtagcagcagccgca

SEQ ID NO: 723639 - DNA, 120 bp, Artificial Sequence
  ENSG00000198026_8 (sequence is synthesized)
gcagcagctggtaaaaaaggacgtctacggaagtggagcacctccaccaagagccaagaggaagagggaccagaggaggaggacgatgatgacattgtagacgctggagccattgatgac

SEQ ID NO: 723640 - DNA, 120 bp, Artificial Sequence
  ENSG00000198026_9 (sequence is synthesized)
ctggaggaggatagcgactataatccagctgaggatgagccccgaggccggcagcttcggctccagcgccccacccccagtaccccaaggccccgaaggagacctggccggccccggaag

SEQ ID NO: 723641 - DNA, 120 bp, Artificial Sequence
  ENSG00000198026_10 (sequence is synthesized)
ctgccccgcctggagatctcagacctcccagatggtgtggaaggagagcctctagtgagttcccagagtggacagagccctccagagccacaggatcccgaggctcccagctcctcaggc

SEQ ID NO: 723642 - DNA, 120 bp, Artificial Sequence
  ENSG00000198026_11 (sequence is synthesized)
ccaggacacctggtggccatgggcaaggtgagcaggacccctgtggaagctggtgtgagccagtcagatgcagagaacgcagccccctcctgcccggatgagcatgacactctgccccgg

SEQ ID NO: 723643 - DNA, 120 bp, Artificial Sequence
  ENSG00000198026_12 (sequence is synthesized)
cgccgaggtcgaccttccaggcgcttcctaggcaagaaataccgcaagtactattacaagtcgcccaaaccacttttgaggcccttcctgtgccgcatctgtggttctcgctttctgtcc

SEQ ID NO: 723644 - DNA, 120 bp, Artificial Sequence
  ENSG00000198026_13 (sequence is synthesized)
cacgaggacctgcgcttccacgtcaactcccatgaggctggcgatccccagctcttcaagtgcctgcagtgcagctatcgttcccgccgctggtcctcgctcaaggagcacatgttcaac

SEQ ID NO: 723645 - DNA, 120 bp, Artificial Sequence
  ENSG00000198026_14 (sequence is synthesized)
cacgtgggcagcaagccctacaagtgtgacgagtgcagctacaccagtgtctaccggaaggacgtcattcggcacgccgctgtgcacagccgggaccggaagaagaggccagatccgact

SEQ ID NO: 723646 - DNA, 120 bp, Artificial Sequence
  ENSG00000198026_15 (sequence is synthesized)
ccaaagctgagctctttcccctgccctgtgtgtggccgtgtgtaccccatgcagaaaagactcacgcagcacatgaagacgcacagcactgagaagccccacatgtgtgacaagtgtgga

SEQ ID NO: 723647 - DNA, 120 bp, Artificial Sequence
  ENSG00000198026_16 (sequence is synthesized)
aagtcctttaagaagcgctacaccttcaaaatgcacctgctcacgcacatccaggctgttgccaaccgcaggttcaagtgtgagttctgtgagtttgtttgtgaagacaagaaggcactg

SEQ ID NO: 723648 - DNA, 120 bp, Artificial Sequence
  ENSG00000198026_17 (sequence is synthesized)
ctgaaccaccagttgtcccacgtcagtgacaagcccttcaaatgcagcttttgtccctaccgcaccttccgagaggacttcttgctgtcccatgtggctgtcaagcacacaggggccaag

SEQ ID NO: 723649 - DNA, 120 bp, Artificial Sequence
  ENSG00000198026_18 (sequence is synthesized)
gtactgccacttcagcacacggcacaagaagaacctgcgcctgcacgtacggtgccgacacgcaagcagcttcgaggaatgggggaggcgccaccctgaggagcccccctcccgccgtcg

SEQ ID NO: 723650 - DNA, 120 bp, Artificial Sequence
  ENSG00000198026_19 (sequence is synthesized)
ccccttcttctctctgcagcagattgaggagctgaagcagcagcacagtgcggcccctggaccacctcccagttccccaggacctcctgagatacccccagaggcgacaactttccagtc

SEQ ID NO: 723651 - DNA, 120 bp, Artificial Sequence
  ENSG00000198026_20 (sequence is synthesized)
atctgaggctccctcattgctctgttctgacaccctgggcggcgccaccatcatctaccagcaaggagctgaggagtcgacagcgatggccacgcagacagccttggatcttctgctgaa

SEQ ID NO: 723652 - DNA, 120 bp, Artificial Sequence
  ENSG00000198026_21 (sequence is synthesized)
catgagtgctcagcgggaactggggggcacagccctgcaggtggctgtggtgaagtcggaagatgtggaagcagggttagcatcccctggtgggcagccctcccctgaaggtgccactcc

SEQ ID NO: 723653 - DNA, 120 bp, Artificial Sequence
  ENSG00000198026_22 (sequence is synthesized)
acaggtggtcaccctccacgtggcagagccagggggcggtgcagcagccgagagccagctaggccctcctgacctaccgcagatcaccctggcacctggtccatttggtgggactggcta

SEQ ID NO: 723654 - DNA, 120 bp, Artificial Sequence
  ENSG00000198026_23 (sequence is synthesized)
cagtgtcatcacagcaccccctatggaggagggaacatcagctcctggcacaccttacagcgaggagcccgcaggagaggcagcccaggctgtggttgtgagtgacaccctaaaagaagc

SEQ ID NO: 723655 - DNA, 120 bp, Artificial Sequence
  ENSG00000198026_24 (sequence is synthesized)
tggcacccactacatcatggctactgatggtacccagttgcaccacattgagctcaccgcagatggctccatctccttcccaagtccagatgctctggcctctggtgccaaatggcccct

SEQ ID NO: 723656 - DNA, 120 bp, Artificial Sequence
  ENSG00000198026_25 (sequence is synthesized)
gctgcagtgtgggggactgcccagagacggccctgagcccccatctccagccaagacccactgcgtaggggactcccagagctctgcctcctcacctcctgcaaccagcaaagccctggg

SEQ ID NO: 723657 - DNA, 120 bp, Artificial Sequence
  ENSG00000198026_26 (sequence is synthesized)
cctggcagtgcccccgtcaccgccatctgcagccactgctgcatcaaagaagttttcctgcaagatctgtgccgaggccttccctggccgagctgagatggagagtcacaagcgggccca

SEQ ID NO: 723658 - DNA, 120 bp, Artificial Sequence
  ENSG00000198026_27 (sequence is synthesized)
cgctgggcctggtgccttcaagtgccccgactgccccttcagtgcccgccagtggcccgaggtccgggcgcacatggcacagcactcaagcctacggccccaccagtgtagccagtgcag

SEQ ID NO: 723659 - DNA, 120 bp, Artificial Sequence
  ENSG00000198026_28 (sequence is synthesized)
ctttgcctccaagaacaagaaggacctgcgtcggcacatgctgactcacacaaaggagaagccttttgcatgccacctctgcgggcagcgtttcaaccgtaacgggcacctcaagttcca

SEQ ID NO: 723660 - DNA, 120 bp, Artificial Sequence
  ENSG00000198026_29 (sequence is synthesized)
catccagcggctgcacagtcctgatgggaggaagtcaggaacccctacagcccgggcccctacccagaccccaacccagaccatcatcctgaacagtgatgacgaaacactggccaccct

SEQ ID NO: 723661 - DNA, 120 bp, Artificial Sequence
  ENSG00000198026_30 (sequence is synthesized)
gcacactgcactccagtccagtcacggggtcctgggcccagagcggctacagcaggcactgagccaggaacacatcatcgttgcccaggaacagacagtgaccaatcaggaggaagccgc

SEQ ID NO: 723662 - DNA, 120 bp, Artificial Sequence
  ENSG00000198026_31 (sequence is synthesized)
ctacatccaagagatcaccacggcagatggccagaccgtacagcacctggtgacctccgacaaccaggtgcagtatatcatctcccaggatggtgtccagcacctgctcccccaggaata

SEQ ID NO: 723663 - DNA, 120 bp, Artificial Sequence
  ENSG00000198026_32 (sequence is synthesized)
tgttgtggtccctgaaggccatcacatccaggtacaggagggccagatcacacacatccagtatgaacaaggagccccgttccttcaggagtcccagatccagtatgtgcctgtgtcccc

SEQ ID NO: 723664 - DNA, 120 bp, Artificial Sequence
  ENSG00000198026_33 (sequence is synthesized)
aggccagcagcttgtcacacaggctcaacttgaggctgcagcacactcagctgtcacagcagtggctgatgctgccatggcccaagcccagggcctgtttggtacagacgagacagtgcc

SEQ ID NO: 723665 - DNA, 120 bp, Artificial Sequence
  ENSG00000198026_34 (sequence is synthesized)
cgaacacattcaacagctgcagcaccagggcatcgagtacgacgtcatcaccctggccgatgactgagccccgagggcccaacacagatcatggatttgcggccagctctcctgggggta

SEQ ID NO: 723666 - DNA, 120 bp, Artificial Sequence
  ENSG00000198026_35 (sequence is synthesized)
gggggccaccaggactcacctccctcttcatttaggatctccagatactggatagccagcatcctctcattcccagggagccagacctgtgctgttggggttaggggcagccatgggccc

SEQ ID NO: 723667 - DNA, 120 bp, Artificial Sequence
  ENSG00000198026_36 (sequence is synthesized)
cagccaggacatgctgggtgccccagcctgcaggcaggctttgggagagaaatttatttttgtttgggtggacccactggcctgtcagtctcaataaagggaccggagtccagtcctgaa

SEQ ID NO: 723668 - DNA, 120 bp, Artificial Sequence
  ENSG00000198026_37 (sequence is synthesized)
ccaaagtattgggattacaggcatgagccgtgacacatggtgctgtacccactttttgttaatgatatttatagaggctatagcacctcaaaaagccctgggatagtctgggaagccaac

SEQ ID NO: 723669 - DNA, 120 bp, Artificial Sequence
  ENSG00000198026_38 (sequence is synthesized)
caaaaagccctgggatagtctgggaagccaaccctaagaaagtggtgcaggagctggtcctttactttgagaagtttggagaggaaggaggacttcccaggtttggtggtcaaagcctgg

SEQ ID NO: 723670 - DNA, 120 bp, Artificial Sequence
  ENSG00000198026_39 (sequence is synthesized)
gcagctggtgtagctgtggcatcttgtgtaagtgtgggccggctgctgagtcagcatgtcacactagacctccagacagccctgccaggggagtcaactgaggctcaggggtgacacagc

SEQ ID NO: 723671 - DNA, 120 bp, Artificial Sequence
  ENSG00000198026_40 (sequence is synthesized)
tggtttgcagtcgcacatgggagccagaatgagtgtggaccagccctgctcacaggccaaagtggggcccatgggggtgggcctgttgctgggaccccctccccaggaggtgtgaccctt

SEQ ID NO: 723672 - DNA, 120 bp, Artificial Sequence
  ENSG00000198026_41 (sequence is synthesized)
ccccatctctgcccagactgcatcactgtgaccagtgctgaggatggcggggccgagaccacacggtacctgatcctacagggcccagatgatggtaagaccccaggtgccagaatcggg

SEQ ID NO: 723673 - DNA, 120 bp, Artificial Sequence
  ENSG00000198026_42 (sequence is synthesized)
gaggcctgcagtgggcagggggataggtgaggacaggttctgccgcggattccgtctgtggccctggctgggtatccactgctctgggtctcagttttcctactgacgggttggcctctg

SEQ ID NO: 723674 - DNA, 120 bp, Artificial Sequence
  ENSG00000198026_43 (sequence is synthesized)
gtggggaatttggttctgcactccctgggcctgcctgggaggggtagctatagctcatggccagtgctgccctccatttaaccaccctccaattgcctcacccatccccaggagccccca

SEQ ID NO: 723675 - DNA, 120 bp, Artificial Sequence
  ENSG00000198026_44 (sequence is synthesized)
catccctatgcccatctagacatactcactgagctttcacttggagggccagtaaagaggaattggcacagacacatccacaggtccctccagtataagacagaggaggttgtgctctgg

SEQ ID NO: 723676 - DNA, 120 bp, Artificial Sequence
  ENSG00000198026_45 (sequence is synthesized)
gaccaggacttctgtgtgcagttgtgcagggtgcacactggaaaagagcacagggggccctgttcacatttgccccacagaaatagaatacaagtaaaggtgcgagaggaggtcctcgcc

SEQ ID NO: 723677 - DNA, 120 bp, Artificial Sequence
  ENSG00000198026_46 (sequence is synthesized)
ctgttgctcagactggagtgtagcatcatgatcgttgctcactgttaccttgaattcctgagttcaagccatcttcccatctcagcctcccgagtagctagggctacaggtgcctgccag

SEQ ID NO: 723678 - DNA, 86 bp, Artificial Sequence
  ENSG00000198026_47 (sequence is synthesized)
ctcagcctcccgagtagctagggctacaggtgcctgccagcatgcctggctaattttttaatttttgtagaaacgggttctctgaa

SEQ ID NO: 723679 - DNA, 78 bp, Artificial Sequence
  ENSG00000198026_48 (sequence is synthesized)
aaatacaaaaattagcctgttgtggtatgtgtctgtaatctcaactacactgtaattgtgccactgcactccagcctg

SEQ ID NO: 723680 - DNA, 120 bp, Artificial Sequence
  ENSG00000198026_49 (sequence is synthesized)
tttagattgtccaaatggtttgcaagcatggaagtcacatctccctccttccctcccatcagccctccagctgcctgacctccctggggaatgccagtgttaaagcactcctattgcttc

SEQ ID NO: 723681 - DNA, 120 bp, Artificial Sequence
  ENSG00000198026_50 (sequence is synthesized)
ccgagccttagattgttctgtgaagtcaccaaagccgccattctggcctcccttggataaatggggcaaatgagactccgggagaggaatggctttgtctgtaggtgcacagcatgtcag

SEQ ID NO: 723682 - DNA, 120 bp, Artificial Sequence
  ENSG00000198026_51 (sequence is synthesized)
tgacagagccgtgcctggaacccaggtctcctgactgggaggtcccagctctcgccgttgctctaatccaggccaggtcctactgtgctgacagaatgtcggctgttgggcggtagtatc

SEQ ID NO: 723683 - DNA, 120 bp, Artificial Sequence
  ENSG00000198026_52 (sequence is synthesized)
catgctgccctctaaccacaggctgtctgtgtcatgtgactcaatgcacccatcagtggtctgtgatgagtgggtgggaggatattttggctggcctctggcccacttgtccacgtctgt

SEQ ID NO: 723684 - DNA, 120 bp, Artificial Sequence
  ENSG00000198026_53 (sequence is synthesized)
ttaccgtgctcctgctctgagccagccccatttgctgcacactacaggcatgagcagaaaggcagttcaccccagttcatttggcttagaacaggacagtaccaggccttgaggtcccca

SEQ ID NO: 723685 - DNA, 120 bp, Artificial Sequence
  ENSG00000198026_54 (sequence is synthesized)
gctcagcctcttacctcttgtgagctttagtttctcatcaaacggggacagttgttgaagggattgaaggaaattgtgtacctaaaggagttcagtaaatgatccaagatcttctggact

SEQ ID NO: 723686 - DNA, 120 bp, Artificial Sequence
  ENSG00000198026_55 (sequence is synthesized)
ccagatcctactcatctctcacagggctgagagtgcacctgagacagagaaacacaagttcttatgcacctaatgattgctcacaggattataattcgatcccgagcttcaggaaggagt

SEQ ID NO: 723687 - DNA, 120 bp, Artificial Sequence
  ENSG00000198026_56 (sequence is synthesized)
tcgcttcatgagaggtggtgtgtgagcagaggttggagacagatcccctgggacagtagctccagctgtgtgtgtggaaaagccagcccaagatactttaaggtttcttttttttaaatg

SEQ ID NO: 723688 - DNA, 120 bp, Artificial Sequence
  ENSG00000198026_57 (sequence is synthesized)
gtttggtccaggcccttgtggagggcacagtctggcatggaggctgttaaaaggcacaatgaaccccacagtggtgtggtgctggggacacaggcagctgcagcactgaggatgaagaag

SEQ ID NO: 723689 - DNA, 120 bp, Artificial Sequence
  ENSG00000198026_58 (sequence is synthesized)
tcctgacttggcctcaaagccagcattgacttcctagaagaggtaccagctaaatggtggtgagaaggctgggtaagatttagccatagggtgatgctgggaagagtttcaggcagaggg

SEQ ID NO: 723690 - DNA, 120 bp, Artificial Sequence
  ENSG00000198026_59 (sequence is synthesized)
aacgatttatgcaaaagcccaaagaaaatagctccccctggctgtggcttaggagtcccttctcttatttttgtgtattccctgatgagatccagggaccctgtgactttttcctggggg

SEQ ID NO: 723691 - DNA, 120 bp, Artificial Sequence
  ENSG00000198026_60 (sequence is synthesized)
actctgtgactggagggcctctctcactggtcctccgtggggctgagggcatgagtggctccactgaccatgtccttgggcctgagagctctgtctagcaagtgggagctggcaggctgc

SEQ ID NO: 723692 - DNA, 120 bp, Artificial Sequence
  ENSG00000198028_0 (sequence is synthesized)
agttctctcttttggtcgctggcgcctgtttcctcagagccactttttcctttgtgttgtctggtcgttcactactttgagggaaaagaattttgccgttcgcgttcgattgactccgtc

SEQ ID NO: 723693 - DNA, 120 bp, Artificial Sequence
  ENSG00000198028_1 (sequence is synthesized)
cccaagatcctgtagccccacggacctggcgactccaccgtgttcgggtctttctaggaacccaatctgccttcatgaagaaaagacagaggcagaaaggaagatggcttactgcctgac

SEQ ID NO: 723694 - DNA, 120 bp, Artificial Sequence
  ENSG00000198028_2 (sequence is synthesized)
aaattgttatcagtactccgtgacctttgaggatacagctgtggacttcacccaggaggagtggattttactggacccagttcagagaaacttatacagagatgtgatgctggagaatta

SEQ ID NO: 723695 - DNA, 120 bp, Artificial Sequence
  ENSG00000198028_3 (sequence is synthesized)
tgagaacgtggccaaagtaggatttcagctctttaaacccagtgtcatctcttggttggaagaagaagagttgagaaccttgcagcaaggagttctccaagactgggcaataaaacatca

SEQ ID NO: 723696 - DNA, 120 bp, Artificial Sequence
  ENSG00000198028_4 (sequence is synthesized)
aaccagtgtttcagcactgcagcaggagttttggaaaatacaaacttctaatgggatacaaatggacctggtaacctttgacagtgtggctgtggagttcacccaggaagagtggacttt

SEQ ID NO: 723697 - DNA, 120 bp, Artificial Sequence
  ENSG00000198028_5 (sequence is synthesized)
actggacccagctcagagaaacctgtacagtgatgtgatgctggagaactacaagaacctgtcctcagtaggttaccagctcttcaaacccagtctgatctcttggctggaggaagagga

SEQ ID NO: 723698 - DNA, 120 bp, Artificial Sequence
  ENSG00000198028_6 (sequence is synthesized)
agagttgagcacactgccaagagttctccaagaatggaaaatgtgcctgaaaaccaaagggccagccctttggcaagataatttttgtttaaaaacattaaatgggatacagttggcaag

SEQ ID NO: 723699 - DNA, 120 bp, Artificial Sequence
  ENSG00000198028_7 (sequence is synthesized)
aaaccaaaatggagaggaactctatgactgtaagcaatgtgaagatgtcttctgtaaacatccatgccttaagaccaacatgagtactcaaaatagaggcaacacgtctgaatgtattca

SEQ ID NO: 723700 - DNA, 120 bp, Artificial Sequence
  ENSG00000198028_8 (sequence is synthesized)
gtatgcaaaagacctcctttctctatacaataaaacctctaccataaggaaagtttctgtgttcagtaagcatggaaaatctttccgcctgattttaaatgttcaggtccagagaaagtg

SEQ ID NO: 723701 - DNA, 120 bp, Artificial Sequence
  ENSG00000198028_9 (sequence is synthesized)
tacacaagataaatcctttgaaggcactgactatgggaaagccttcatttatcagtcataccttgaagcacacaggaaaactcagagtggagaaaaactcaatgaatggaagcaatgtgg

SEQ ID NO: 723702 - DNA, 120 bp, Artificial Sequence
  ENSG00000198028_10 (sequence is synthesized)
ggaagcatttactcactccacaagccatgctgtaaatgttgaaacacacattattaaaaacccctatgaatgtaaggaatgtggaaaagattttagataccctacccaccttaataatca

SEQ ID NO: 723703 - DNA, 120 bp, Artificial Sequence
  ENSG00000198028_11 (sequence is synthesized)
ttcactgtgccgtcaggctttcttgaacatgtacgaactcacactggagagaagccctatgggtgtaaggaatgtggtaaagcctttggtacatctgcaggccttattgaacatataaga

SEQ ID NO: 723704 - DNA, 120 bp, Artificial Sequence
  ENSG00000198028_12 (sequence is synthesized)
tgtcacgccagagagaaaacctttaaatgtgaccactgtgggaaagcctttatttcttacccatctctttttggacatttgagagttcataatggagagaagccatatgagcataaggaa

SEQ ID NO: 723705 - DNA, 120 bp, Artificial Sequence
  ENSG00000198028_13 (sequence is synthesized)
tatgggaaggcctttggtacatcctcaggtgttattgaagatagaagaagtaacacaggacagaaacgctttgattgtgaccagtgtgggaaagtctttgtttctttctcatctcttttt

SEQ ID NO: 723706 - DNA, 120 bp, Artificial Sequence
  ENSG00000198028_14 (sequence is synthesized)
gctcatttgagaactcacactggtgagaagccctttaagtgttacaaatgtgggaaaccatttacctcttctgcctgtcttcgtattcacatgcgaactcacacagaagagagactctat

SEQ ID NO: 723707 - DNA, 120 bp, Artificial Sequence
  ENSG00000198028_15 (sequence is synthesized)
caatgtaagaaatgtggtaaagctttcactaagtgctcatatcttaccaaacatttacgaacacacgctggagagaaaccctatgaatgtatgaaatgtgggaaagccttcactgagcgc

SEQ ID NO: 723708 - DNA, 120 bp, Artificial Sequence
  ENSG00000198028_16 (sequence is synthesized)
tcataccttactaaacatttacgaagacacagtggagagaagccatatgaatgtaagaaatgtggaaaagccttcacagaacgctcagatcttactaaacatttacgaagacacactgga

SEQ ID NO: 723709 - DNA, 120 bp, Artificial Sequence
  ENSG00000198028_17 (sequence is synthesized)
gataagccctatgaatataaggactgtgggaaagcctttgttgtctcctccagtctagttgatcatttaagaactcacactggatataaaccctataaatgtaatgcatgtgaaaaagct

SEQ ID NO: 723710 - DNA, 120 bp, Artificial Sequence
  ENSG00000198028_18 (sequence is synthesized)
tacagtaggtcttgtgtactaactcaacacttaaaaactcatgcagcagagaagacctctgaatgtaacgcatgtggaaattcctttcgaaattccatgtgctttcatgatcgcttaaaa

SEQ ID NO: 723711 - DNA, 120 bp, Artificial Sequence
  ENSG00000198028_19 (sequence is synthesized)
actctcaccaaaataaaaccctataaatgtaaggactgtgggaaagccttcacttgtcattcagatcttactaatcatgtgcgaattcacactggagagaagccctataaatgtaaggaa

SEQ ID NO: 723712 - DNA, 120 bp, Artificial Sequence
  ENSG00000198028_20 (sequence is synthesized)
tgtgggaaggccttccgtacatcctcaggacgtattcaacatttaagaactcatatgggagagaaaccctttgaatgtgaccagtgtgggaaagcctttgcttctttctcagctcgtatt

SEQ ID NO: 723713 - DNA, 120 bp, Artificial Sequence
  ENSG00000198028_21 (sequence is synthesized)
gcacatttgaaaacacactagagagaagccctgtggatgtgaagaatgtggaaaaacctttgctgtttcctcaagcctaactgaacatgtaaaaattcacaggagaaagtaacactatca

SEQ ID NO: 723714 - DNA, 120 bp, Artificial Sequence
  ENSG00000198028_22 (sequence is synthesized)
atgtaaggaatgtgagaaagcctgaacagttgaatctttctagatatgtacaaactcacactgtagagaaaccctgtaaatgtaagggatgtaggaaaacactagttcttctctctctct

SEQ ID NO: 723715 - DNA, 120 bp, Artificial Sequence
  ENSG00000198028_23 (sequence is synthesized)
aagcttgaatgtgaatttcagaggtcagagataaccagtgtcttcagagaacagaaagatgggatatatgcaatttaagtgcttttcactgctttaattagaaacgtagtccctgtttca

SEQ ID NO: 723716 - DNA, 120 bp, Artificial Sequence
  ENSG00000198033_0 (sequence is synthesized)
gtcgttgggcgtgcgcagctgcagcggcggttgaggtcaagtagtagcgttgggctgcggcagcggaggagctcaacatgcgtgagtgtatctctatccacgtggggcaggcaggagtcc

SEQ ID NO: 723717 - DNA, 120 bp, Artificial Sequence
  ENSG00000198033_1 (sequence is synthesized)
agatcggcaatgcctgctgggaactgtactgcctggaacatggaattcagcccgatggtcagatgccaagtgataaaaccattggtggtggggacgactccttcaacacgttcttcagtg

SEQ ID NO: 723718 - DNA, 120 bp, Artificial Sequence
  ENSG00000198033_2 (sequence is synthesized)
agactggagctggcaagcacgtgcccagagcagtgtttgtggacctggagcccactgtggtcgatgaagtgcgcacaggaacctataggcagctcttccacccagagcagctgatcaccg

SEQ ID NO: 723719 - DNA, 120 bp, Artificial Sequence
  ENSG00000198033_3 (sequence is synthesized)
ggaaggaagatgcggccaataattacgccagaggccattacaccatcggcaaggagatcgtcgacctggtcctggaccggatccgcaaactggcggatctgtgcacgggactgcagggct

SEQ ID NO: 723720 - DNA, 120 bp, Artificial Sequence
  ENSG00000198033_4 (sequence is synthesized)
tcctcatcttccacagttttgggggtggcactggctctgggttcgcatctctgctcatggagcggctctcagtggattacggcaagaagtccaagctagaatttgccatttacccagccc

SEQ ID NO: 723721 - DNA, 120 bp, Artificial Sequence
  ENSG00000198033_5 (sequence is synthesized)
cccaggtctccacggccgtggtggagccctacaactccatcctgaccacccacacgaccctggaacattctgactgtgccttcatggtcgacaatgaagccatctatgacatatgtcggc

SEQ ID NO: 723722 - DNA, 120 bp, Artificial Sequence
  ENSG00000198033_6 (sequence is synthesized)
tgcgatttgacggggccctgaatgtggacttgacggaattccagaccaacctagtgccgtacccccgcatccacttccccctggccacctacgccccggtcatctcagccgagaaggcct

SEQ ID NO: 723723 - DNA, 120 bp, Artificial Sequence
  ENSG00000198033_7 (sequence is synthesized)
accacgagcagctgtccgtggctgagatcaccaatgcctgcttcgagccagccaatcagatggtcaagtgtgaccctcgccacggcaagtacatggcctgctgcatgttgtacagggggg

SEQ ID NO: 723724 - DNA, 120 bp, Artificial Sequence
  ENSG00000198033_8 (sequence is synthesized)
atgtggtcccgaaagatgtcaacgcggccatcgccaccatcaagaccaagcgcaccatccagtttgtagattggtgcccaactggatttaaggtgggcattaactaccagccccccacgg

SEQ ID NO: 723725 - DNA, 120 bp, Artificial Sequence
  ENSG00000198033_9 (sequence is synthesized)
tggtccctgggggagacctggccaaggtgcagcgggctgtgtgcatgctgagcaacaccacggccatcgcggaggcctgggctcgcctggaccataagttcgatctcatgtatgccaagc

SEQ ID NO: 723726 - DNA, 120 bp, Artificial Sequence
  ENSG00000198033_10 (sequence is synthesized)
gggcctttgtgcactggtacgtgggagaaggcatggaggagggggagttctctgaggcccgcgaggacctggcagctctggagaaggattatgaagaggtgggcgtggattccgtggaag

SEQ ID NO: 723727 - DNA, 120 bp, Artificial Sequence
  ENSG00000198033_11 (sequence is synthesized)
ccgaggctgaagaaggtgaagaatactgaggggagggtgtggtgggttctccactccactgccacccccagcgtggctgctttcaagttctttgcaattaaaggttctgtataaaaccaa

SEQ ID NO: 723728 - DNA, 120 bp, Artificial Sequence
  ENSG00000198034_0 (sequence is synthesized)
aatttctacgcgcaccggaagacggaggtcctctttccttgcctaacgcagccatggctcgtggtcccaagaagcatctgaagcgggtggcagctccaaagcattggatgctggataaat

SEQ ID NO: 723729 - DNA, 120 bp, Artificial Sequence
  ENSG00000198034_1 (sequence is synthesized)
tgaccggtgtgtttgctcctcgtccatccaccggtccccacaagttgagagagtgtctccccctcatcattttcctgaggaacagacttaagtatgccctgacaggagatgaagtaaaga

SEQ ID NO: 723730 - DNA, 120 bp, Artificial Sequence
  ENSG00000198034_2 (sequence is synthesized)
agatttgcatgcagcggttcattaaaatcgatggcaaggtccgaactgatataacctaccctgctggattcatggatgtcatcagcattgacaagacgggagagaatttccgtctgatct

SEQ ID NO: 723731 - DNA, 120 bp, Artificial Sequence
  ENSG00000198034_3 (sequence is synthesized)
atgacaccaagggtcgctttgctgtacatcgtattacacctgaggaggccaagtacaagttgtgcaaagtgagaaagatctttgtgggcacaaaaggaatccctcatctggtgactcatg

SEQ ID NO: 723732 - DNA, 120 bp, Artificial Sequence
  ENSG00000198034_4 (sequence is synthesized)
atgcccgcaccatccgctaccccgatcccctcatcaaggtgaatgataccattcagattgatttggagactggcaagattactgatttcatcaagttcgacactggtaacctgtgtatgg

SEQ ID NO: 723733 - DNA, 120 bp, Artificial Sequence
  ENSG00000198034_5 (sequence is synthesized)
tgactggaggtgctaacctaggaagaattggtgtgatcaccaacagagagaggcaccctggatcttttgacgtggttcacgtgaaagatgccaatggcaacagctttgccactcgacttt

SEQ ID NO: 723734 - DNA, 120 bp, Artificial Sequence
  ENSG00000198034_6 (sequence is synthesized)
atggatttctcttccccgaggaaagggtatccgcctcaccattgctgaagagagagacaaaagactggcggccaaacagagcagtgggtgaaatgggtccctgggtgacatgtcagatct

SEQ ID NO: 723735 - DNA, 120 bp, Artificial Sequence
  ENSG00000198034_7 (sequence is synthesized)
ttgtacgtaattaaaaatattgtggcaggattaatagcattttggttttgtgggttgtttttttttttaattcagtttcctgctattttactgtataacatgaacagtgattaagttctc

SEQ ID NO: 723736 - DNA, 120 bp, Artificial Sequence
  ENSG00000198034_8 (sequence is synthesized)
aggcaggcttaggcagtctgttattggctgggcttagttagtggtgggaagtagaagataccagacttgggaaaggaacagcaactaaccaaggagtagaaagagccaagaaatcccgga

SEQ ID NO: 723737 - DNA, 120 bp, Artificial Sequence
  ENSG00000198034_9 (sequence is synthesized)
gtatttatctcccccgccttgacttggccaagaacttctctacacagtggacccctctgccctgttaagttcccttggctttctaaaaatctgccctcattttcttctccagtctgtatt

SEQ ID NO: 723738 - DNA, 120 bp, Artificial Sequence
  ENSG00000198034_10 (sequence is synthesized)
gcactagcccatccacaagcctggctcatctgtttttcccactcctgtgcccatcttgccaaacgcaggatgaaaatctccagttgccattaaaggtggtcataaatgggctgttgatgt

SEQ ID NO: 723739 - DNA, 120 bp, Artificial Sequence
  ENSG00000198034_11 (sequence is synthesized)
tgcaaagcattgcagttccttggacttagtgcccttattctccagctgccgctgcagtcctcaactctgtttttcagaggacagagatgtagaacataaacttgttcttgcttgtccaaa

SEQ ID NO: 723740 - DNA, 120 bp, Artificial Sequence
  ENSG00000198034_12 (sequence is synthesized)
ccattgctgaagagagagacaaaagactggcggccaaacagagcagtgggtgaaatgggtccctgggtgacatgtcagatctttgagtctgtgagccacttcactacaagaacttggagt

SEQ ID NO: 723741 - DNA, 120 bp, Artificial Sequence
  ENSG00000198034_13 (sequence is synthesized)
ccaaattaggaggactgagccttcttcagtccctaattcaggagcaccacctctctgctttcccccacctctccctgaaaccccagccttgccgtggctgtttgtctgttgtgcccggcc

SEQ ID NO: 723742 - DNA, 120 bp, Artificial Sequence
  ENSG00000198034_14 (sequence is synthesized)
caagcaagctgggtctttactcagtatagttactttgttctaagggcctgcattgagtacgagtgctgcttgcaatgaggtgggtattgattagttaaaatctcatacctggaaatatct

SEQ ID NO: 723743 - DNA, 120 bp, Artificial Sequence
  ENSG00000198034_15 (sequence is synthesized)
agctaacaattcgatgagattctgtcttacatgtaactttttgtcatgttattaaaagtctggctgatagctgtagggcattgatggatacctaaaattggcccccatttgaagttaact

SEQ ID NO: 723744 - DNA, 120 bp, Artificial Sequence
  ENSG00000198034_16 (sequence is synthesized)
tcctcagcagattttctttttttgtggtagaaatgaattccagttgaaccgcgacttcctggtgtctcttaagagtcaaggagaatgatttctgggaacttgtttattgggtacctgacg

SEQ ID NO: 723745 - DNA, 120 bp, Artificial Sequence
  ENSG00000198034_17 (sequence is synthesized)
taggagccctttgccatgtctccatttgtgggagtagctttactttggggaggggaaggtgtcgatggaggaaacagacagtccttgaggcactagtttgaggtttaaaaaaagattaca

SEQ ID NO: 723746 - DNA, 120 bp, Artificial Sequence
  ENSG00000198034_18 (sequence is synthesized)
gtttgttttgatggttttacacaaaagtttagggctgtttggattattggctgtaaatgaaggttaatttaattgactgatgtggctcctaatttccttttgcacagccttgttaacagc

SEQ ID NO: 723747 - DNA, 120 bp, Artificial Sequence
  ENSG00000198034_19 (sequence is synthesized)
agactggagggcacgtccagtgggatctgtgattatttgatttacttcaaggatatcagggagtagagatccaaaattgaaatgctatgtgaagtatttgttgattggatgaactggtaa

SEQ ID NO: 723748 - DNA, 120 bp, Artificial Sequence
  ENSG00000198034_20 (sequence is synthesized)
tgtaattgctgtttgtgagacaaaactcagtcgtgatgtacagggagccattaagataaagttgagttgaagggaagaattcccagggccccataaggcttaaagagcctgggaaactgg

SEQ ID NO: 723749 - DNA, 120 bp, Artificial Sequence
  ENSG00000198034_21 (sequence is synthesized)
agtggcatttacattggaggagtggagggcaatggtggatgttaggaggacgagcctagagaagggctttatgcaacatacacttgagggtggaaagaacgatcagcgtcacaattaatc

SEQ ID NO: 723750 - DNA, 120 bp, Artificial Sequence
  ENSG00000198034_22 (sequence is synthesized)
tgcagcagttagggaacccatggttcctgtatagggttaaaaagtacatgtgagatggattgaatgtggctaacccttgtatttttctagtacaagttgtgcaaagtgagaaagatcttt

SEQ ID NO: 723751 - DNA, 120 bp, Artificial Sequence
  ENSG00000198039_0 (sequence is synthesized)
ggcttccgggatttggcggggcctttgtctctcgctgcagtcgcagctccaggtctcgtcttcactgctctatgtcctctgctcctagaggtccaccttctgtggccccgttacctgcag

SEQ ID NO: 723752 - DNA, 120 bp, Artificial Sequence
  ENSG00000198039_1 (sequence is synthesized)
aggtccaccttctgtggccccgttacctgcaggtattgggagatccacagctaagacgccaggactccctggaagcctagaaatgggaccactgacatttagggatgtggccatagaatt

SEQ ID NO: 723753 - DNA, 120 bp, Artificial Sequence
  ENSG00000198039_2 (sequence is synthesized)
cacagcagaatttgtataggaatgtgatgttagataactacagaaacctggtcttcctgggtattgctgtctctaagccagacctgatcacttgtctggagcaaggaaaagagccctgca

SEQ ID NO: 723754 - DNA, 120 bp, Artificial Sequence
  ENSG00000198039_3 (sequence is synthesized)
atatgaagagacatgcgatggtagccaaacccccagttgtgtgttctcattttgcccaagacctttggccaaagcagggcttaaaagattcttttcaaaaagtgatactgagaagatatg

SEQ ID NO: 723755 - DNA, 120 bp, Artificial Sequence
  ENSG00000198039_4 (sequence is synthesized)
gaaaatatggacatgagaatttacaattaagaaaaggctgtaaaagtgcggatgagcataaggtgcacaaaagaggttataatggacttaaccaatgtttgacaactacccagagcaaaa

SEQ ID NO: 723756 - DNA, 120 bp, Artificial Sequence
  ENSG00000198039_5 (sequence is synthesized)
tatttcaatgtgataaatatgttaaagtccttcataaattctcaaattcaaatatacataagaaaagacaaactggaaagaaacctttcaaatgtaaagaatgtggcaaatcatgttgca

SEQ ID NO: 723757 - DNA, 120 bp, Artificial Sequence
  ENSG00000198039_6 (sequence is synthesized)
tactttcacaactaactcagcataagaaaactgctactagagtgaatttctacaaatgtaagacatgtggaaaagcctttaaccagttctcaaatcttactaaacataagataattcatc

SEQ ID NO: 723758 - DNA, 120 bp, Artificial Sequence
  ENSG00000198039_7 (sequence is synthesized)
atgtggcaaagcctttaaccagtccttaactcttactaaacataaaaaaattcatactgaagagaaaccttacaaatgtgaagattgtggcaaagtctttagtgtattttcagtccttac

SEQ ID NO: 723759 - DNA, 76 bp, Artificial Sequence
  ENSG00000198039_8 (sequence is synthesized)
aattcatacaggaacaaaaccctacaattgtgaagaatgtggcaaaggctttagtatattctcaacccttcaatga

SEQ ID NO: 723760 - DNA, 120 bp, Artificial Sequence
  ENSG00000198039_9 (sequence is synthesized)
tgtgaagaatgtggtaaagcctttaaacggtccacaactcttactaaacataagagaatttatactaaagagaaaccatacaaatgtgaagaatgtggaaaagcctttagtgtattctca

SEQ ID NO: 723761 - DNA, 120 bp, Artificial Sequence
  ENSG00000198039_10 (sequence is synthesized)
acccttactaaacataagataattcatactggagcaaaaccttacaaatgtgaagaatgtggcagtgcctttagggcattctcaacccttactgaacataagagagttcatactggagag

SEQ ID NO: 723762 - DNA, 89 bp, Artificial Sequence
  ENSG00000198039_11 (sequence is synthesized)
ctcaacccttactgaacataatgcaatgaatgtggtaaagcctttaactggtcctcaactcttactaaacataagagaattcatactgg

SEQ ID NO: 723763 - DNA, 120 bp, Artificial Sequence
  ENSG00000198039_12 (sequence is synthesized)
cataagaaaattcatactggagagaaaccatacaaacctaaaagatgtgacagtgcttttgacaacaccccaaacttttctagacataaaagaaatcatatgggtgagaaatcctagaaa

SEQ ID NO: 723764 - DNA, 120 bp, Artificial Sequence
  ENSG00000198039_13 (sequence is synthesized)
catatgggtgagaaatcctagaaatgtgaagaatgtgacaaagcctttaagcggttgtcacacttgattgtatataagataattcatactggagaaaactcccagaagtggagttttcct

SEQ ID NO: 723765 - DNA, 120 bp, Artificial Sequence
  ENSG00000198039_14 (sequence is synthesized)
tattgcacaggaaagcatttatacttgagaaaaattgtataaagaatggaaaagtcattaatatctgctcatatcttaacatcagcgagttggtatttaataaaagcattatcaatgaaa

SEQ ID NO: 723766 - DNA, 120 bp, Artificial Sequence
  ENSG00000198039_15 (sequence is synthesized)
acaaggcgccagcggcgagcactggcttgcttcacagtgaacgccttcgttgcctggcgactagtccctgcggcttagcggagagggggcgtcggcgttgggctctcgcctgtcttctct

SEQ ID NO: 723767 - DNA, 120 bp, Artificial Sequence
  ENSG00000198039_16 (sequence is synthesized)
ggggggatcctcgggatactcccacgatctaggacagggcaggggcgagccagcctgaggaaacgtcaagggaaggcccagggatacaccgcgaaatccctaagaatccaaaaggatccg

SEQ ID NO: 723768 - DNA, 120 bp, Artificial Sequence
  ENSG00000198039_17 (sequence is synthesized)
ggcctggatctgttttctgcccctgaccagggggccgcgtcttcggcaaagtcttcggggtgagaggtccggctcctggaggacagcgggatgggagagtcccgttcacacccagccccg

SEQ ID NO: 723769 - DNA, 120 bp, Artificial Sequence
  ENSG00000198039_18 (sequence is synthesized)
cagagccggatagaaacgctgccactgccgactccatgctgccgggaagtgcactgtggaggccactttctggaaagaagaaaccgtctgaacacaaagttgctcaagccatgttcatct

SEQ ID NO: 723770 - DNA, 120 bp, Artificial Sequence
  ENSG00000198039_19 (sequence is synthesized)
tacatggtgaggtgctgacgattctggtccactggatcccaccatccctaggacagtaaataccgtcctagtcactacccagcaagttaccaccgcatcatttcctgcatgttccaaaat

SEQ ID NO: 723771 - DNA, 69 bp, Artificial Sequence
  ENSG00000198039_20 (sequence is synthesized)
agcaagttaccaccgcatcatttcctgcatgttccaaaatgaataaagacggatcaagctctgcctccc

SEQ ID NO: 723772 - DNA, 120 bp, Artificial Sequence
  ENSG00000198039_21 (sequence is synthesized)
gcatgagccaccgtgcccagccaaaaagctgatgtgttttaagcaaaataagcatacgcatcaatagtaaaatgcttctggtaaaataaaggttcattttgttgatttcttttttttttt

SEQ ID NO: 723773 - DNA, 69 bp, Artificial Sequence
  ENSG00000198039_22 (sequence is synthesized)
tttgctgatttctcttgagctcaggccagaaaaactgggaaaatcacaggctcttccacttactggatg

SEQ ID NO: 723774 - DNA, 120 bp, Artificial Sequence
  ENSG00000198039_23 (sequence is synthesized)
aaaaactgggaaaatcacaggctcttccacttactggatgtttgacaaaatattcttcttgggccaaaaacattggcattactgggaccactgacatttagggatgtggccatagaattc

SEQ ID NO: 723775 - DNA, 120 bp, Artificial Sequence
  ENSG00000198039_24 (sequence is synthesized)
aaaccagtagacttctgtggacgtgcatcgccgctggactctcacccgtcttctctgagagatccacgggatagtcccctgatcctagaattgggcagggccgacccagggtgaagaaac

SEQ ID NO: 723776 - DNA, 120 bp, Artificial Sequence
  ENSG00000198039_25 (sequence is synthesized)
ctcaagcggactcccagggctgcagatcgaaatccctaaggatcccaggggacccgcaggatgtgtcaggcatgcctaggcggtgtgggggcttgaaatcgcccttagacagcctctgag

SEQ ID NO: 723777 - DNA, 120 bp, Artificial Sequence
  ENSG00000198039_26 (sequence is synthesized)
acactttctcaacctcacctgccccggtgggatgccaactccaggtgtcagacctctgctccaccttggactagcctttgtcgtggttcctgcctttcccagacgaccgtgctgagaagc

SEQ ID NO: 723778 - DNA, 120 bp, Artificial Sequence
  ENSG00000198039_27 (sequence is synthesized)
aggagcccctgtgaggcccaggatgaaggaagacagtgagcttaaggacacaggaatcttccgctagcaccatcatccagaattttaactaaaattccatctcaaagagacccctcaaaa

SEQ ID NO: 723779 - DNA, 120 bp, Artificial Sequence
  ENSG00000198039_28 (sequence is synthesized)
actcacaagactgtatctccagcccaatgggacccgattcctacacacagcctttttcgggaatggaatcagaaacgcagtttccatggcccaactcacagtctcaaagcctgtcctcct

SEQ ID NO: 723780 - DNA, 120 bp, Artificial Sequence
  ENSG00000198039_29 (sequence is synthesized)
ccagcgggacagggccacggagacaaactaaggaagccctacggtgagcaacgttgggggcccgcagtacttgttgcaggcagcctatttcctgagaccaggcaggctctgcctgcacca

SEQ ID NO: 723781 - DNA, 120 bp, Artificial Sequence
  ENSG00000198039_30 (sequence is synthesized)
ttttccttgcttaggtaggctgaaaaccctgacagcctggtgaccgaaactgcctcatgcatgcaccagtggcggggcaccaggagcaagtagtgagcgcgggctcgagtcacagtgaat

SEQ ID NO: 723782 - DNA, 120 bp, Artificial Sequence
  ENSG00000198039_31 (sequence is synthesized)
gccttcgttgcatctcgacaagtctctgactcttggcaaagagggggtcctctgtgacgtgcgtcgaagttggacttccggttgtcttctctggggatccatgggatactcccacgatcc

SEQ ID NO: 723783 - DNA, 120 bp, Artificial Sequence
  ENSG00000198039_32 (sequence is synthesized)
tgccagagtccaagtcaccctgcaagagaaaactctggtggagcccagggtgtccagcccctgtccacccagccgccgtggtcaaggttaataagggcaaggggccaagcagaaccgcct

SEQ ID NO: 723784 - DNA, 120 bp, Artificial Sequence
  ENSG00000198039_33 (sequence is synthesized)
acaaggaaccgagtgtccacaaagcaggaagcgaagaacgtttctcctacctagagcgcagccgttttgcggaaggcacagtccgggctccgggagccaagcagggatccgggcctcgtt

SEQ ID NO: 723785 - DNA, 120 bp, Artificial Sequence
  ENSG00000198039_34 (sequence is synthesized)
gcggaggggacgcccgggctgagctgagctcacttgctggcggcggcagcccctgcagtcatggggtcaccggcttgtggagaggggctggcgctgttccttggccccgctccccgcccg

SEQ ID NO: 723786 - DNA, 120 bp, Artificial Sequence
  ENSG00000198039_35 (sequence is synthesized)
caaagggccgggaggtcgggctcccggcagtgtccaggctctcgcccgccggtgcctgagccgtacccaccgcgtcccctccgccccaacagctggtgctgagggtccggcccggggtca

SEQ ID NO: 723787 - DNA, 120 bp, Artificial Sequence
  ENSG00000198039_36 (sequence is synthesized)
tctggcagggccgtgcggctcctgcgggtgaccaggagcgcggagccccttcccactcgggctcgggtggcctcacctttcctggggctgcgtccccgcgggacgccaggttcccggttt

SEQ ID NO: 723788 - DNA, 120 bp, Artificial Sequence
  ENSG00000198039_37 (sequence is synthesized)
cttctaggtcgccctggttcctggcagctcctggtgccacgcggtcctctacggtctcctctgacctgagagggacagtgagatggggctggcggggatgggggtccccgcgctgttgga

SEQ ID NO: 723789 - DNA, 120 bp, Artificial Sequence
  ENSG00000198039_38 (sequence is synthesized)
aagcagcggggctgctgctgaccggagccgcctgggtctgttctggaaccgtcgccctggggcccctccgccccgcaaacgctcgggatgcggtttgggagtgtagctggacaccgagca

SEQ ID NO: 723790 - DNA, 120 bp, Artificial Sequence
  ENSG00000198039_39 (sequence is synthesized)
ccatccacgctcagccccacggggctccaggagtcccgagcccaagcccctgcacttgcattttatttaaaaaacctgagggttaaattcgggcaagtcagttgcctcagtgtttgtcgc

SEQ ID NO: 723791 - DNA, 76 bp, Artificial Sequence
  ENSG00000198039_40 (sequence is synthesized)
gtatttttatatttcagatcatatctactgaatgatttggtgacagaaatttgcattgcttttacctattggcttt

SEQ ID NO: 723792 - DNA, 120 bp, Artificial Sequence
  ENSG00000198039_41 (sequence is synthesized)
ttggctttcagtaacaatggtataataattatgggtatgaaaatgactcttcatatgaccacatatgtgaaagtatatatatgtgctgcattctattttactagtctccttttttttttt

SEQ ID NO: 723793 - DNA, 120 bp, Artificial Sequence
  ENSG00000198039_42 (sequence is synthesized)
acctttatacttgtagcaaattgttttaattctgtagctttgtaatatgttttaaaatcagaaactataatgcttccaacattgttcctttttttgaagattgttaggtactttattgtc

SEQ ID NO: 723794 - DNA, 120 bp, Artificial Sequence
  ENSG00000198039_43 (sequence is synthesized)
tcttgagattccatatactttaggggttgctgtttttatgtcttcaaaaatgcaatgagaaattgagaaaacattgcattaaatcttgtagattacattgagcagtatagacatcttccc

SEQ ID NO: 723795 - DNA, 120 bp, Artificial Sequence
  ENSG00000198039_44 (sequence is synthesized)
aatatttcaacttttgaacaaaagcatgctaaagaatgtggtttaatttactatatatttgtaaacttgttagcttttaatattgttttatattgtcattccatttttgttatagaaagt

SEQ ID NO: 723796 - DNA, 120 bp, Artificial Sequence
  ENSG00000198039_45 (sequence is synthesized)
aatccataaaatttcagttctaaaatactttttaagactcttttgacttatttggtggtctgtcaagaagaaagttgtataagctattgataagggtgtgtatcttaatgttgttgagtt

SEQ ID NO: 723797 - DNA, 120 bp, Artificial Sequence
  ENSG00000198039_46 (sequence is synthesized)
ttgtatacctatgttaggaatatttgttttatactgccttcaggtcctctgttctcttactaatgttctgtcttgttttattcttactatagaaaatgggatattaaaatagtctataat

SEQ ID NO: 723798 - DNA, 120 bp, Artificial Sequence
  ENSG00000198039_47 (sequence is synthesized)
tgcatcgccgttggactctcgcctgtcttctctgaaggatccatgggatagtcccgcgatcctagaagtgtgctggggcgacccagcctgaagaaacctcaagcggagcccaagggatac

SEQ ID NO: 723799 - DNA, 120 bp, Artificial Sequence
  ENSG00000198039_48 (sequence is synthesized)
agcgcaaaattcctaaggatccgcaggatgcttcaggcctgcctagacggtgtgggtgtgagtctccttgaaacttgcccccctgtgatttctagggcctattgaattcacttcgaaatc

SEQ ID NO: 723800 - DNA, 120 bp, Artificial Sequence
  ENSG00000198039_49 (sequence is synthesized)
aagcctgcaaagtgcagcagagtatttattttgaagagaaacattaaaagtacaaagaggtttgtagtacctttgtttgtatcatagatcttattgtacacattttgtaccagagaaaaa

SEQ ID NO: 723801 - DNA, 120 bp, Artificial Sequence
  ENSG00000198039_50 (sequence is synthesized)
ccctgaagcagttgttcaaactttgttcaataccaggaaatttatattggagaaaaaccctatgagtgtaatgaatttggaaaaatatttttttcaacaacagcttagaaaacatgggag

SEQ ID NO: 723802 - DNA, 120 bp, Artificial Sequence
  ENSG00000198039_51 (sequence is synthesized)
gaattacactaaaatatatttttgcaaatgcagcagtaaatatgaaagaaatgatccaaagttaggtttatataaatatcagagaattcacaatacagatatctaagatactgacacttc

SEQ ID NO: 723803 - DNA, 120 bp, Artificial Sequence
  ENSG00000198039_52 (sequence is synthesized)
agacattacacaaaatcagagtgctgagtacagaaagttatccaaaacaaaagttggtagataactaatagtgaacaagtttttggcagaggtatatttacattcagagtacacttttct

SEQ ID NO: 723804 - DNA, 120 bp, Artificial Sequence
  ENSG00000198039_53 (sequence is synthesized)
ttctttggaaaaaattacaggttttttgaaaagtgaataatgtaattcaactctcaaattcatggtttttttttttttggttttggttttgggttttttgtttgtttgtttgtttgtttt

SEQ ID NO: 723805 - DNA, 120 bp, Artificial Sequence
  ENSG00000198039_54 (sequence is synthesized)
attacaggcatgagccactgcacccggcgcatgttttttcttcattcctattgtattcacatgtgaaagcatgtgatcaacttgctgcatcaaagatatgagatttttttttttattagg

SEQ ID NO: 723806 - DNA, 120 bp, Artificial Sequence
  ENSG00000198039_55 (sequence is synthesized)
ttattaggtgggcattatttatgaccttttctgtggaagagtaagaacattaaaatgaaagatgcatgatgaaaatctaagtagagaggctcttgtggttaactgataatattgagtgat

SEQ ID NO: 723807 - DNA, 120 bp, Artificial Sequence
  ENSG00000198039_56 (sequence is synthesized)
gcatgaggtaggtgttcagagtaatattctgcattatagtgaaaaatttttaatattaaaattcaattatatcattttatgaattgtgcttttcataatgcagtacatttcaaaattttt

SEQ ID NO: 723808 - DNA, 120 bp, Artificial Sequence
  ENSG00000198039_57 (sequence is synthesized)
agattatgtatgaacttagatttttaaacatgttttaacatgttaagacttgtgcattcagtgaagcgttattatgccacaaactaacctacctcaccttactcaatggtgtaggtaaaa

SEQ ID NO: 723809 - DNA, 120 bp, Artificial Sequence
  ENSG00000198039_58 (sequence is synthesized)
gatgatagcaatatattatttggttacatagtggactaacatttttagtaatctcttttgccagtggctttaaactgcagataagttaaatattcccataggttttacatttatattttt

SEQ ID NO: 723810 - DNA, 120 bp, Artificial Sequence
  ENSG00000198039_59 (sequence is synthesized)
tcttatttaaatttattgttcttatttttcatgggtacatagtatgtttttatgctgtatatggcatgttttgatacaggtatataatatgtaataatcacatcagggtaaatgaggtat

SEQ ID NO: 723811 - DNA, 120 bp, Artificial Sequence
  ENSG00000198039_60 (sequence is synthesized)
cccttactagcatttatcctttgtattttattttaaaatgtacaactaaattgttatggactacagggttatttttatggtcataataaaaattacaaaagtatgaataaaatacataca

SEQ ID NO: 723812 - DNA, 120 bp, Artificial Sequence
  ENSG00000198040_0 (sequence is synthesized)
cgggaatggcgggggaggcgcgcgggagtggccgcggggagcttcggcttcaaggccctgggcgtccgcgcgcggatgcgggtctggggcgggttggggctgggccgggtcgtgaagatg

SEQ ID NO: 723813 - DNA, 120 bp, Artificial Sequence
  ENSG00000198040_1 (sequence is synthesized)
tgaagatgccgtgggccgcggagctgcgcggattctgggctgtggggcgggcacggcctttccggaggcgccgctcctgggcgtcctttcaggcgggcgtggaggcgccagcctcgggcg

SEQ ID NO: 723814 - DNA, 120 bp, Artificial Sequence
  ENSG00000198040_2 (sequence is synthesized)
cgtttagcctcgggcgcgtttagcctcgacctcgggccagcccgcttgccgcgccgtggccctaaggagcggctgccctgctggaccgcatccaccagcagcctggctctgccgctatcg

SEQ ID NO: 723815 - DNA, 120 bp, Artificial Sequence
  ENSG00000198040_3 (sequence is synthesized)
aaggaggcttttaaagcgctggggttacagtccacagatcctggtccctacaaataagcctgctcatgtgagataagaaaggagttcctggaaccaggaattcattctcagtgtagaaga

SEQ ID NO: 723816 - DNA, 120 bp, Artificial Sequence
  ENSG00000198040_4 (sequence is synthesized)
cctagctgagacctcactccacagttttggggcagaagcagaagagacgcacagtagaaccgatctcagccttgctgatcatctcgtacagcagcagaaaatgaccatgttacaggagtc

SEQ ID NO: 723817 - DNA, 120 bp, Artificial Sequence
  ENSG00000198040_5 (sequence is synthesized)
attctcatttgacgatttatctgtggacttcacccaaaaggagtggcagctactggatccctctcagaagaatttatacaaggatgtgatgttggagaactatagcagcctagtgtcact

SEQ ID NO: 723818 - DNA, 120 bp, Artificial Sequence
  ENSG00000198040_6 (sequence is synthesized)
ggggtatgaagttatgaaaccagatgtcatcttcaaattggagcaaggagaagagccgtgggtaggagatggagaaattccaagttcagattctccagaagtctggaaagtagatggtaa

SEQ ID NO: 723819 - DNA, 120 bp, Artificial Sequence
  ENSG00000198040_7 (sequence is synthesized)
catgatgtggcaccaggataaccaagacaagcttaaaattataaaaagaggtcatgaatgtgatgcatttggaaaaaatttcaatctgaacatgaactttgttcctttaaggaaatcaaa

SEQ ID NO: 723820 - DNA, 120 bp, Artificial Sequence
  ENSG00000198040_8 (sequence is synthesized)
cagtgaaggtgacttagatggattgattttaaaacatcatttagatttgcttattccaaaaggagattatggaaaagcagaatcagatgactttaatgtgtttgataatttttttctcca

SEQ ID NO: 723821 - DNA, 120 bp, Artificial Sequence
  ENSG00000198040_9 (sequence is synthesized)
ttccaagcctgaggatactgatacctggttaaaatactatgactgtgataaatataaagagagctataaaaagtcacagattatcatatatcatagaaatcgtttaggggagaaactcta

SEQ ID NO: 723822 - DNA, 120 bp, Artificial Sequence
  ENSG00000198040_10 (sequence is synthesized)
tgaatgcagtgaatgtaggaagcgcttcagtaagaaaccaagtctcattaaacatcagagcagacatataagagacatagcctttggctgtggtaattgtggcaaaacctttccccagaa

SEQ ID NO: 723823 - DNA, 120 bp, Artificial Sequence
  ENSG00000198040_11 (sequence is synthesized)
gtctcagtttattacacatcacagaactcatacaggagaaaaaccttataattgtagccagtgtgggaaagccttctcccaaaagtcacagctcacatcccatcagcggacacatacagg

SEQ ID NO: 723824 - DNA, 120 bp, Artificial Sequence
  ENSG00000198040_12 (sequence is synthesized)
agagaaaccttatgagtgtggtgaatgtgggaaagccttctcccggaagtcacatctcatatcgcattggagaacacacacaggagagaaaccctatggatgcaatgaatgtgggagggc

SEQ ID NO: 723825 - DNA, 120 bp, Artificial Sequence
  ENSG00000198040_13 (sequence is synthesized)
ctttagtgaaaagtccaatctcattaaccatcagagaattcataccggtgagaagccttttgaatgcagggaatgtgggaaagccttcagcaggaagtcacaactcgttacacatcacag

SEQ ID NO: 723826 - DNA, 120 bp, Artificial Sequence
  ENSG00000198040_14 (sequence is synthesized)
aactcacacaggaacaaaaccctttggatgtagtgattgtagaaaagcattctttgagaagtcagagcttattagacatcagacaattcatactggagagaaaccctatgaatgcagcga

SEQ ID NO: 723827 - DNA, 120 bp, Artificial Sequence
  ENSG00000198040_15 (sequence is synthesized)
gtgtaggaaagcatttagagagaggtcgagtctcattaatcatcagagaacacatacaggagagaaacctcatggatgcattcagtgtgggaaggccttctcccagaagtcacatctcat

SEQ ID NO: 723828 - DNA, 120 bp, Artificial Sequence
  ENSG00000198040_16 (sequence is synthesized)
atcacatcagatgacacacacaggagaaaaaccctttatatgcagtaaatgtgggaaagccttcagcaggaaatcacagctcgttagacatcagagaactcatacgggagaaaaaccgta

SEQ ID NO: 723829 - DNA, 120 bp, Artificial Sequence
  ENSG00000198040_17 (sequence is synthesized)
tgaatgcagtgagtgtgggaaagctttcagtgaaaaattaagtctcactaatcatcaaagaattcatacaggagaaaaaccatatgtatgcagtgaatgtgggaaagccttttgtcagaa

SEQ ID NO: 723830 - DNA, 120 bp, Artificial Sequence
  ENSG00000198040_18 (sequence is synthesized)
gtcacatctcatatcacatcagaggacacatacaggggagaaaccctatgaatgcagtgaatgtgggaaggcctttggtgagaagtcaagtcttgcaactcatcagagaactcatactgg

SEQ ID NO: 723831 - DNA, 120 bp, Artificial Sequence
  ENSG00000198040_19 (sequence is synthesized)
agaaaaaccgtatgaatgcagggactgtgaaaaagctttctcccagaaatcacagctaaatacccatcagagaattcacactggagagaaaccctatgaatgcagtctttgtaggaaagc

SEQ ID NO: 723832 - DNA, 120 bp, Artificial Sequence
  ENSG00000198040_20 (sequence is synthesized)
tttttttgagaagtcggagctaattagacatctgagaactcatacaggagaaaaaccttatgaatgcaatgaatgtagaaaagccttcagggagaagtcaagtctcatcaatcatcagag

SEQ ID NO: 723833 - DNA, 120 bp, Artificial Sequence
  ENSG00000198040_21 (sequence is synthesized)
aatacatacaggagagaagccttttgaatgcagtgagtgtggcaaagctttctctcggaagtcacaccttataccacatcaaaggacacatacgggtgagaaaccctatggatgcagtga

SEQ ID NO: 723834 - DNA, 120 bp, Artificial Sequence
  ENSG00000198040_22 (sequence is synthesized)
atgtaggaaggccttctctcagaagtcacagctggttaatcatcagagaattcatacaggagagaagccttatcgatgcattgaatgtgggaaagctttctcacagaagtcacagctcat

SEQ ID NO: 723835 - DNA, 120 bp, Artificial Sequence
  ENSG00000198040_23 (sequence is synthesized)
caatcatcagagaactcatacagtaaaaaaatcctaggaatacagttaatagtagtctttgacagatcatcttggacttcaggaaatgcaattatgataacgtttgtagacagtcacgtc

SEQ ID NO: 723836 - DNA, 120 bp, Artificial Sequence
  ENSG00000198040_24 (sequence is synthesized)
atgttaggtgtttgtactccatgaggatgagaactctaaatgaggtggtgtatggaaagccgatcataattcatagagtagagtgaacctatgactgcagtggatctcaaaaacttttaa

SEQ ID NO: 723837 - DNA, 120 bp, Artificial Sequence
  ENSG00000198040_25 (sequence is synthesized)
aaccatagacaagccttatagagtagaacattcacagcaaagaagaatcctgtgaatgtccaaaagccttccagaagtcaagtctcttaagctattagaaatattcccactggggatgag

SEQ ID NO: 723838 - DNA, 120 bp, Artificial Sequence
  ENSG00000198040_26 (sequence is synthesized)
ggaaaaccccatgaatgcgggaaatgaggcaatatttttaagaaatgacagttcattgtacataagaaaatgctcttaggaatgaagttctatgaaagtactaaatatgggacagtgcaa

SEQ ID NO: 723839 - DNA, 120 bp, Artificial Sequence
  ENSG00000198040_27 (sequence is synthesized)
caagtaacgagactattttgtattttggagaattcatattatggagaacctaacaatttaaagacactgggaacacttgcccctcagtatagtactgtcaagggaagccatacacttttt

SEQ ID NO: 723840 - DNA, 120 bp, Artificial Sequence
  ENSG00000198040_28 (sequence is synthesized)
gtagacatgggtaccaaaaatacccaattctaagtggttgacagatgttcactttgaagtgtgaagttttaaaaatacgtgaataaattggttattgaaacatctaagacatttcttagt

SEQ ID NO: 723841 - DNA, 120 bp, Artificial Sequence
  ENSG00000198040_29 (sequence is synthesized)
atgcatatgccttttagtgcctctgatgtctgtgaagacaacactacacaccactggtttttattttttaacaataatataaaaaatggaaactcatgtaacatgactacatgaataagt

SEQ ID NO: 723842 - DNA, 120 bp, Artificial Sequence
  ENSG00000198040_30 (sequence is synthesized)
accttaagtgataacccgtttcttttaacttatagacatacataaggggtcttttgtttttatggacctttctattcagtaactgaagccaacattgtgtaagtcttctgcatcctcaga

SEQ ID NO: 723843 - DNA, 120 bp, Artificial Sequence
  ENSG00000198040_31 (sequence is synthesized)
gtctgagtaacagtttatataaaataaatatgcaaaggcaggaaccacagaataaccatagtaatatataactgaatgagcaaaataaaggtgtgtgaactacattacaacacccaaact

SEQ ID NO: 723844 - DNA, 120 bp, Artificial Sequence
  ENSG00000198040_32 (sequence is synthesized)
aaatgaaataaagtagtgctgtattaaatctttttctcatttagtgaggtgcctccatatagtatatatatatgtatcttaagtgatatgtaacccaaatgtcactattttaatttactg

SEQ ID NO: 723845 - DNA, 120 bp, Artificial Sequence
  ENSG00000198040_33 (sequence is synthesized)
tgataaagtatcatggatattttgtgctgctgttatgctttttgtgttgcataaaatatcttgtaaaaattagatggataaatgaattattaaaaaatcacatttctgaagatgtaaagt

SEQ ID NO: 723846 - DNA, 120 bp, Artificial Sequence
  ENSG00000198040_34 (sequence is synthesized)
attagggaattttgtgctggaaaaacatttttgacattcaaggatgcctattttatcttctagcaaatttctgtggtccctggaaaagtacagatgatcctggacttacagtggggttac

SEQ ID NO: 723847 - DNA, 120 bp, Artificial Sequence
  ENSG00000198040_35 (sequence is synthesized)
ctcccaataaacccattgtaagttgaaaacattgtaagtcaaaaatgcatttaatacacccaacttaccaaacatcatagcttagcgtagcctaccttaaacattctcagaacacattct

SEQ ID NO: 723848 - DNA, 120 bp, Artificial Sequence
  ENSG00000198040_36 (sequence is synthesized)
aatgcatcatctattttataaaaaggtgttgaatatctgatgtaattattgaatactgaaggtgaaaaatagtagtgtatggataccattgtaatgttgagaaactgtaagtcacatcct

SEQ ID NO: 723849 - DNA, 120 bp, Artificial Sequence
  ENSG00000198040_37 (sequence is synthesized)
cttaagtcaggaactatctgtataaggaaacaagatttccattttatcatttgaaatgtatttgactttgtttcactagttgcattatccccatggaaaacttcacattgagaacttacc

SEQ ID NO: 723850 - DNA, 120 bp, Artificial Sequence
  ENSG00000198040_38 (sequence is synthesized)
attatatatttccataaaaatgcatgaaccatcccttagctaagtaaggattttgtaatgttctctcaataatgttgcttggcaaagttaatattttttgtatgctgatgaaatttagaa

SEQ ID NO: 723851 - DNA, 120 bp, Artificial Sequence
  ENSG00000198040_39 (sequence is synthesized)
aagtccaatattgagcttgattgcaaacttagaaaaactcaagacttctccttttatgttcaaattgttgtatcagtatggtattttgcacctttaccttaaacaatattttctccttta

SEQ ID NO: 723852 - DNA, 120 bp, Artificial Sequence
  ENSG00000198040_40 (sequence is synthesized)
attattgattttgcaacattttgggaaagttggaattttaaataaatgaataattttctaaaccagaataccagttcaacagccaaataattctgtctttccatgctgtaattttaaagc

SEQ ID NO: 723853 - DNA, 82 bp, Artificial Sequence
  ENSG00000198040_41 (sequence is synthesized)
agccaaataattctgtctttccatgctgtaattttaaagcatttaattttccaactttttgttcatactcaagtgtatgaac

SEQ ID NO: 723854 - DNA, 88 bp, Artificial Sequence
  ENSG00000198040_42 (sequence is synthesized)
acctcaagtatgttcatggccaacatggcaaaaccctgtcttaaattagccgggcatggttgtgcgtgcctgtaatcccagttactca

SEQ ID NO: 723855 - DNA, 120 bp, Artificial Sequence
  ENSG00000198040_43 (sequence is synthesized)
gcagaggttgcagtgagccaagattgtgcagcctgggcgacagagcgagcctctgtcaaaaaaagaaaagaaaaagaacttcctactttttaatatctcaaattcattttactagacgtg

SEQ ID NO: 723856 - DNA, 120 bp, Artificial Sequence
  ENSG00000198040_44 (sequence is synthesized)
atatctcaaattcattttactagacgtgggagaccaactaatgcaaatgaacagttacagggtgatgttgtactttgtgatttttgccctattttttctttccatctatcaccattctct

SEQ ID NO: 723857 - DNA, 120 bp, Artificial Sequence
  ENSG00000198040_45 (sequence is synthesized)
ttccaatcccagagattgatttattaggtcttggaaattctagattattccattaactattaagcagttaaacctgatacttcctacactagataatggaacttcaacattagcctattg

SEQ ID NO: 723858 - DNA, 120 bp, Artificial Sequence
  ENSG00000198040_46 (sequence is synthesized)
attgcccaagaacaaacatttttttctaaatgtcaggtgttatggggaggattgatgctgacagcagaggtctagttaaaaactgatgcagaggttcaaatacgttgtgcagtaatcact

SEQ ID NO: 723859 - DNA, 120 bp, Artificial Sequence
  ENSG00000198040_47 (sequence is synthesized)
agaactcaccttctaaagtgtcatgagagctctgattctgcaattagagattttttaatgtgtttttgaaattaccttgtaaaccacaaatctgtgtctctgcattgccccttattgttt

SEQ ID NO: 723860 - DNA, 120 bp, Artificial Sequence
  ENSG00000198040_48 (sequence is synthesized)
cctaccacaaattctacatcaagaagaaagttttaaagttagactggatttatttgtgattttatggagcacaataaggtacattgagatagcatactaaaggaggccaaatacaggaag

SEQ ID NO: 723861 - DNA, 120 bp, Artificial Sequence
  ENSG00000198040_49 (sequence is synthesized)
catcatcttttcttattctcttactgcctggattttcccactgacctggaattgtgcacagttctacaaaggacaattgacattgttttccttttactaagtagtgggttttccttaagg

SEQ ID NO: 723862 - DNA, 120 bp, Artificial Sequence
  ENSG00000198040_50 (sequence is synthesized)
tccagactgaattttgagacctgtatcaggattgccttctgtgtgactttttcttgcaggatctgacatcattacctatgggtccatatatttgtgatactttggtttcgggaacatcac

SEQ ID NO: 723863 - DNA, 120 bp, Artificial Sequence
  ENSG00000198040_51 (sequence is synthesized)
ttttagaatgttgacataaaatgcacccacagaatgccgtatttatcaaaagtaactttctagcaaaatctacagcagtaggcatttggaatctgcatttgagacctctgcagtcatttg

SEQ ID NO: 723864 - DNA, 120 bp, Artificial Sequence
  ENSG00000198040_52 (sequence is synthesized)
gtcattccagcaatctatgtccaggttgtcaatttcagaggtcttattagtctatacaggtaccaatgagctttcagatgttcaacacctacccctggcctaactgctgataaccaacca

SEQ ID NO: 723865 - DNA, 120 bp, Artificial Sequence
  ENSG00000198040_53 (sequence is synthesized)
taacccttgcagatgcatgcatgttttctgcaccttgctatcatttttcagtccatttttcacatgtatacatagtgattatttttaaatgcaaccctgatttcacatgcctcatgttga

SEQ ID NO: 723866 - DNA, 120 bp, Artificial Sequence
  ENSG00000198040_54 (sequence is synthesized)
aatatcgtgtggcttattgtggacttaaagtgtaacattctccttatggtatgtaaggacttttgtataaaccaatgcctatctatctatcatttctgaaaactttttcctcctatgcaa

SEQ ID NO: 723867 - DNA, 120 bp, Artificial Sequence
  ENSG00000198040_55 (sequence is synthesized)
tattttctggcctctgtgaacaacttgtagttccttgagatttctattatcacttatgtttttgcaaatctgcaattgaaatgcccttgttccttgttaatgcctattgaatctatatga

SEQ ID NO: 723868 - DNA, 120 bp, Artificial Sequence
  ENSG00000198040_56 (sequence is synthesized)
acctgtacgtgtgtttctcactgtgataatataatcattgcatgttttatctttcccactagaaagcttctagaaagctagtactatcttttttgtctgtgtaatttttgcatcacaagc

SEQ ID NO: 723869 - DNA, 120 bp, Artificial Sequence
  ENSG00000198040_57 (sequence is synthesized)
tatatttaaatgtgggtgcagtgagtggctgttttctgccacatggagaaacatggtctgcagtgagagagaagaatgaagccatgatgaaagcaaaatcaagaaagagtcccgattgtg

SEQ ID NO: 723870 - DNA, 120 bp, Artificial Sequence
  ENSG00000198040_58 (sequence is synthesized)
ttccagtacctggttcttctggtcttcatgttcaggtccacctctgcccttttcatgtcttgattgttgaattcttctgtgagatactccaaatatcctaataaattctcatgtttgctt

SEQ ID NO: 723871 - DNA, 120 bp, Artificial Sequence
  ENSG00000198040_59 (sequence is synthesized)
actcttggtaatgcttgcaggtggcccgttcttcctctttgtccttcgctgccacgtgagaggggagtgtacgcgtgtgcgcgcgtgcgagtgtgcgcgtgtgcagtccccgactcgtcc

SEQ ID NO: 723872 - DNA, 120 bp, Artificial Sequence
  ENSG00000198040_60 (sequence is synthesized)
cccgactcgtcccggcccgttcggagccgcccgggagcgcacaaaggccgacggtttgggcgcgtgcgcgggacacgggggacgggcggtgtcacgtgatcgcgaggccgcgggcgcgcg

SEQ ID NO: 723873 - DNA, 120 bp, Artificial Sequence
  ENSG00000198040_61 (sequence is synthesized)
cttttagacctaggcttccactgttccattttactatattctgtttccctgagagtgctgtttcagttatatagcaagcgtacctctggccttagatgatcgtgaattccaagttcctag

SEQ ID NO: 723874 - DNA, 120 bp, Artificial Sequence
  ENSG00000198040_62 (sequence is synthesized)
ccaatgcattgccttttatttttagttgctgggaagtttcagaagcctatagctaggcttctgaaatttttaatgattttagacctgaaacttagatcacagttgcttggactatgacac

SEQ ID NO: 723875 - DNA, 120 bp, Artificial Sequence
  ENSG00000198040_63 (sequence is synthesized)
caagaaagtatttgggtctcacctttcaataatgaagttgtaagtttgtcatgcagcctctgaaacttaagtagtaatagtttgagcagtagtgatagcacctaatgcatataacttact

SEQ ID NO: 723876 - DNA, 120 bp, Artificial Sequence
  ENSG00000198040_64 (sequence is synthesized)
gacctggaaagatgttcttcacataatgggaaaaaaacaaaaacagcttttaaatatgaccatatgcttccattgtatgaaaaatatcacaatagtttccatcatcctaagaatggttac

SEQ ID NO: 723877 - DNA, 120 bp, Artificial Sequence
  ENSG00000198040_65 (sequence is synthesized)
ggctgaggcaggaggatcccttgagcctggagttcaaagttgcagtgagctctgattgtgccactgcatgccagcctgggttagggagcaagaccgtaccaaaaaaaaaaaaaaaaaaaa

SEQ ID NO: 723878 - DNA, 120 bp, Artificial Sequence
  ENSG00000198040_66 (sequence is synthesized)
ggagcaagaccgtaccaaaaaaaaaaaaaaaaaaaaagaatgctgatgttgcagacttcatctaagataaaatagattttaaggcaaaaagcattattgggggtatgaagcgttgttaca

SEQ ID NO: 723879 - DNA, 120 bp, Artificial Sequence
  ENSG00000198040_67 (sequence is synthesized)
caatgattttttaaaacccctatttaaccttgacgcatcaaacaacatagccataagcatataatccaaacatcagcagaattataaggaaaaactgaccaatctctagtcatattgtga

SEQ ID NO: 723880 - DNA, 120 bp, Artificial Sequence
  ENSG00000198040_68 (sequence is synthesized)
gattttaacccatttccttctgaaatgggtagacaaaaatggcagacaaaagttaaggatatattaatagaagattttaataggaaattaggctcagaatggtgaaatttgtttgttttt

SEQ ID NO: 723881 - DNA, 120 bp, Artificial Sequence
  ENSG00000198040_69 (sequence is synthesized)
gccaaaagtcatctagctggtaaaggaaaaagttgattgaaactcaaatctgttttaatacagatcatataaactgtgtttttcctaacagcacctgttaaactgatttgcatttcagca

SEQ ID NO: 723882 - DNA, 120 bp, Artificial Sequence
  ENSG00000198040_70 (sequence is synthesized)
ccgtactggctgtagacaccttcgtctttctttacctccctggatacacatgtagtttactatggcacctgtcttctcatggcagtactctgttcccaaacaaacatcattttcttctgg

SEQ ID NO: 723883 - DNA, 120 bp, Artificial Sequence
  ENSG00000198040_71 (sequence is synthesized)
agaggctctctttaatctttaggttaacagttgtataaatggaaggatggaagaatgcacaatgacattttatcacacaaaatatgcaaaggtagagacatagtaggcattttgtataac

SEQ ID NO: 723884 - DNA, 120 bp, Artificial Sequence
  ENSG00000198040_72 (sequence is synthesized)
tatatcaactcatttagtcatcagagcaatcctatgtggcaagtacagtcattatccatttttcctgatgagaagatcgaggccaagagaggttaagtaactttcccaagaactaacagc

SEQ ID NO: 723885 - DNA, 120 bp, Artificial Sequence
  ENSG00000198040_73 (sequence is synthesized)
tagtaaattaaagagcctggatgtaaacccaggcttactggctccagagcctctgaagtgttcagtggctttgtactagaccctattagccaccaagggagaccgttactgtaactttga

SEQ ID NO: 723886 - DNA, 120 bp, Artificial Sequence
  ENSG00000198040_74 (sequence is synthesized)
gaattacttactctgttggggtacagcttcaccaggccaactttgatgtgaaaccttgctcaactttagaggccctaaaccccaagcagttgggcccaaggcctttgtgatttttccctt

SEQ ID NO: 723887 - DNA, 120 bp, Artificial Sequence
  ENSG00000198040_75 (sequence is synthesized)
ttctccagggacctccatagtatgacactactgctgcctgttcagttatttcttcctatctcccattcatgaagtctggaaagtagatggtaacatgatgtggcaccaggataaccaaga

SEQ ID NO: 723888 - DNA, 120 bp, Artificial Sequence
  ENSG00000198042_0 (sequence is synthesized)
agttgcacgctgagccgcggacaccatgcagtcggatgatgttatctgggatacactaggaaacaagcaattttgttccttcaaaataagaaccaagactcagagcttctgccgaaatga

SEQ ID NO: 723889 - DNA, 120 bp, Artificial Sequence
  ENSG00000198042_1 (sequence is synthesized)
atatagcctgactggactgtgtaatcggtcatcctgtcccctggcaaatagtcagtatgccactattaaagaagagaaaggacagtgctacttgtatatgaaggttatagaacgagcggc

SEQ ID NO: 723890 - DNA, 120 bp, Artificial Sequence
  ENSG00000198042_2 (sequence is synthesized)
ttttcctcggcgtctctgggaacgggtccggcttagtaaaaactatgagaaagcactggagcaaatagatgaaaatctgatttactggccccgtttcattcgacacaaatgtaagcagag

SEQ ID NO: 723891 - DNA, 120 bp, Artificial Sequence
  ENSG00000198042_3 (sequence is synthesized)
attcaccaagatcacccaatacctaattcgaattagaaaacttacactaaagcgacagaggaaacttgttcctttgagtaagaaggtggagcgtagggagaaaagaagagaggaaaaggc

SEQ ID NO: 723892 - DNA, 120 bp, Artificial Sequence
  ENSG00000198042_4 (sequence is synthesized)
attaatagctgctcagctggacaatgccattgagaaggaattactggagagactgaaacaagatacgtatggcgacatctacaacttccccattcatgccttcgacaaagccctggaaca

SEQ ID NO: 723893 - DNA, 120 bp, Artificial Sequence
  ENSG00000198042_5 (sequence is synthesized)
acaggaggcagagagtgactcttcagatactgaggaaaaagatgatgatgatgatgatgaggaagatgtggggaaaagagaatttgtcgaagatggtgaggtagatgagagtgacataag

SEQ ID NO: 723894 - DNA, 120 bp, Artificial Sequence
  ENSG00000198042_6 (sequence is synthesized)
tgattttgaggatatggataaactggatgccagcagtgatgaagatcaggatggtaaatcctccagtgaggaggaggaagaaaaggcccttagtgcgaaacacaaaggcaaaatgccctt

SEQ ID NO: 723895 - DNA, 120 bp, Artificial Sequence
  ENSG00000198042_7 (sequence is synthesized)
gagaggaccactgcagagaaaacgagcctatgtggaaatagaatacgagcaggagacagagcccgtggccaaagccaaaaccacgtgatttccctttcagcatttatacccaggactgaa

SEQ ID NO: 723896 - DNA, 120 bp, Artificial Sequence
  ENSG00000198042_8 (sequence is synthesized)
catgcagaactgttttttttttttttttatcttaaacacatacacacctccagtttttgctcttttgtgttgtactgaacacaatatttgtgtttttattatttatgccacgtcagtggg

SEQ ID NO: 723897 - DNA, 120 bp, Artificial Sequence
  ENSG00000198042_9 (sequence is synthesized)
gcaagaaatctggagtgagtgaagaaagctaagttgtgaacaagagtgtttttatagcatatgtgttgaagtaacagcttgtgcccgagaaacttaacagatgagttcttgaatctggga

SEQ ID NO: 723898 - DNA, 120 bp, Artificial Sequence
  ENSG00000198042_10 (sequence is synthesized)
tgagatgacggatgtaaatatttctaaattttaaatgctacattacttggtgtccttttttctcccaaactttatttagaaatggaaggagttcaattttttcttgttctactttcccta

SEQ ID NO: 723899 - DNA, 120 bp, Artificial Sequence
  ENSG00000198042_11 (sequence is synthesized)
ttcttatggaggtaaaaggaaaggaaggaaggaaaaagcagctttcacttacaaagtttcgtgtaaaaatatctttttttcttaaataactccattcatacaaattgggatgggaagaaa

SEQ ID NO: 723900 - DNA, 120 bp, Artificial Sequence
  ENSG00000198042_12 (sequence is synthesized)
atcctttcctcttgggaaagtaatacaagtcttaagttccattgtagggtgcgccttcagaaacctgctgcacttttctgatatagttcaccacttttctgtcttcacagctttggggaa

SEQ ID NO: 723901 - DNA, 120 bp, Artificial Sequence
  ENSG00000198042_13 (sequence is synthesized)
ttttggccaggagaccctgaaacatgaaaccaaacaggctttgatatttttttttttttaattactttccccttttgcttgattcttcttccttggtatcatattcaaaggaggaaagaa

SEQ ID NO: 723902 - DNA, 120 bp, Artificial Sequence
  ENSG00000198042_14 (sequence is synthesized)
tgtattgaaggtgctactttaaaaactgtgttaatgtacttgcaaatctcctgctggctcatgaaacagcagaattccagccaaggcaaattcagttggatctagggcttgaaaactgcc

SEQ ID NO: 723903 - DNA, 120 bp, Artificial Sequence
  ENSG00000198042_15 (sequence is synthesized)
caagattaaagagctaagatgaaatagtttgaataaactggtaaaataacaattcatactatctctacatatttttaggatatgaatttttttttcctgctgggtagattgtccagtgac

SEQ ID NO: 723904 - DNA, 120 bp, Artificial Sequence
  ENSG00000198042_16 (sequence is synthesized)
ttatggcatgaatttcttttcatgctaccttcaatcttcaactaaagatttctaaaaggggtaagaaatgaggcagtagtttattaaatacatagaagtacacagctattatatgctgtg

SEQ ID NO: 723905 - DNA, 120 bp, Artificial Sequence
  ENSG00000198042_17 (sequence is synthesized)
gctttgagaagttaacttttgtggaatatgaaaccaaaggaagaatttccatgtagataaattaagaatagggaaaaacatctacctaaaagatggttgtccctaaaaaactggaaacat

SEQ ID NO: 723906 - DNA, 120 bp, Artificial Sequence
  ENSG00000198042_18 (sequence is synthesized)
ctgaaatgctctatttatgttattattcctgggagcttatagcccattatttttactttttttttttaattcagaagactagaacagaacttaaattttacaaacttttgatcataatgc

SEQ ID NO: 723907 - DNA, 120 bp, Artificial Sequence
  ENSG00000198042_19 (sequence is synthesized)
ttttgcccatactgtctcgtccttagccccagtgacatgtgctgatcctcctgcctttagttctaaatggttctgaatagctttaaaagatgaataagaaaaaagatcaagctcttttga

SEQ ID NO: 723908 - DNA, 120 bp, Artificial Sequence
  ENSG00000198042_20 (sequence is synthesized)
ggctagagggctcatatggagatctaaaaccctccatgttcatttccagacttggtcaggcacatacatagtaaattataatcaatcatgggaattacataaggataatgaggcccaact

SEQ ID NO: 723909 - DNA, 120 bp, Artificial Sequence
  ENSG00000198042_21 (sequence is synthesized)
gaaaccaagtttcagtctgccttacctttacccgtccttgagaacagcggtccaggagaatcaggcagtctgtggcctcctgtagcagggcgctcttaacagactcaggtgtaaggtttg

SEQ ID NO: 723910 - DNA, 120 bp, Artificial Sequence
  ENSG00000198042_22 (sequence is synthesized)
gatcccttgctacatcacaaatcagtttcaagagggccttcagtaagaccacaagtctgcaggaaactctggaatcaggaagaaaagctatgttcatactctaaatctggatattaaaat

SEQ ID NO: 723911 - DNA, 120 bp, Artificial Sequence
  ENSG00000198042_23 (sequence is synthesized)
tggaagagacttcaaagactgtcaagtggaaagctatcatttcctaaattaaggaacttaggtcaaagttaaatgaaaaagacctaaaaacagaaccaaagacagcctctagatttctta

SEQ ID NO: 723912 - DNA, 120 bp, Artificial Sequence
  ENSG00000198042_24 (sequence is synthesized)
ccctcaagtctcctgttagcatactgcctatacacacagacacaccctctgccacactgctctcttccttccagaagcttggttctactgtaagcaacagctccttcatgggctgagaag

SEQ ID NO: 723913 - DNA, 120 bp, Artificial Sequence
  ENSG00000198042_25 (sequence is synthesized)
gggaaaccaggatctccccaaccaagggcctatacttttatttttcaactctattaactgaactatgcttggagagagccctgaatcctttaactttaatgccatcttaggcctggaagt

SEQ ID NO: 723914 - DNA, 120 bp, Artificial Sequence
  ENSG00000198042_26 (sequence is synthesized)
tagagtgagggaaatgagcttggcttctgggactgtgtcaagttgaattttctgtcatttaatttcagatcctagctcatcatcagtgaagtccagcctacttacttgtaactattaacc

SEQ ID NO: 723915 - DNA, 120 bp, Artificial Sequence
  ENSG00000198042_27 (sequence is synthesized)
tttctaaaagttttcatcgccttggtaaagctccagaaatggacaatgctagtgactgcacaatattgtgactgtacttaatgccactgaactgtacactttaaaatggaaaatttatat

SEQ ID NO: 723916 - DNA, 120 bp, Artificial Sequence
  ENSG00000198042_28 (sequence is synthesized)
gtatttttaccacaataaacaaaaaaccctaaaaaaactttaatgaaaggtggaaaataatttaacttacaatgtgaaaatacaatgtgaaatgtacaataaatcatatttatggacaga

SEQ ID NO: 723917 - DNA, 120 bp, Artificial Sequence
  ENSG00000198042_29 (sequence is synthesized)
ctctctttttatggagcttgttttgaagttgagaaattgtgaaacttcggggctttctattcaactttgtggagtctgttatgatgtactaaagagaaactttagctttgactaaaggtg

SEQ ID NO: 723918 - DNA, 120 bp, Artificial Sequence
  ENSG00000198042_30 (sequence is synthesized)
cttttcctcggcgtctctgggaacgggtaagccttacaacaaaactacagtgaccgctgatcaagagcatcaaagccacatgcttgaccatgatgcccaattccatgaccattaactttt

SEQ ID NO: 723919 - DNA, 120 bp, Artificial Sequence
  ENSG00000198042_31 (sequence is synthesized)
gaggccatcctcattaggccatgggtgtcactgacagtgaaaacctaatgaatcatttacacttgcccttcaaacttcctgtttctgtttggtaggtccggcttagtaaaaactatgaga

SEQ ID NO: 723920 - DNA, 120 bp, Artificial Sequence
  ENSG00000198042_32 (sequence is synthesized)
atgcagtcggatgatgtgagtctcctccggttgttcttacacccggggtttgcgcagggaattttgcccattttcggacacttagaaaacgcgtacgcagcgggtctgttgcctcgtgcc

SEQ ID NO: 723921 - DNA, 120 bp, Artificial Sequence
  ENSG00000198042_33 (sequence is synthesized)
gctctggatgtgaggcttccggaaccccgattttccaacataggttctcacgcgtgtctagcaggggtttactgcccgctgccccggccgggttgtgagcacaggactccgtcacctcag

SEQ ID NO: 723922 - DNA, 120 bp, Artificial Sequence
  ENSG00000198042_34 (sequence is synthesized)
gctccggacttggggtggggggcggcccgggatttggcgaagctgactccaagtttaagcgtccttctcatccatgtgcgcgttactcttccatctgcgtttcctgtgttatctgggata

SEQ ID NO: 723923 - DNA, 120 bp, Artificial Sequence
  ENSG00000198046_0 (sequence is synthesized)
gcagcgcgcggtcccggggtcccggaggggagtgcgcaggcgctgagtccctgctcggctgtctcggtggtcgccgccggggtctgagcccgggaagaccgagccctgccttaccagctc

SEQ ID NO: 723924 - DNA, 120 bp, Artificial Sequence
  ENSG00000198046_1 (sequence is synthesized)
tctgcccatctctcagtgtggaccctaaagggggaggaaaggatgccttctgcacgggggaaatccaaatccaaggcacctataacatttggggacttagccatctacttctcccaggag

SEQ ID NO: 723925 - DNA, 120 bp, Artificial Sequence
  ENSG00000198046_2 (sequence is synthesized)
gagtgggaatggctgagccccattcagaaggatttgtatgaagatgtcatgttggagaattaccggaacctggtctcgcttggtctttcctttcggagaccaaatgtgatcaccttattg

SEQ ID NO: 723926 - DNA, 120 bp, Artificial Sequence
  ENSG00000198046_3 (sequence is synthesized)
gagaaagggaaagcaccctggatggtagagccagtaagaagacgccgggctcctgactcggggtctaaatgtgagaccaagaagttacctccaaatcaatgcaacaaatctgggcaaagc

SEQ ID NO: 723927 - DNA, 120 bp, Artificial Sequence
  ENSG00000198046_4 (sequence is synthesized)
atctgccagaaactagtttctgcacaacaaaaagctcctacacgaaagagtggctgcaacaaaaattcagtcctagtaaaacctaagaaagggcattcagggaagaaacctttaaaatgt

SEQ ID NO: 723928 - DNA, 120 bp, Artificial Sequence
  ENSG00000198046_5 (sequence is synthesized)
aatgactgtggtaaaacctttagtcgaagcttctctcttaaacttcatcagaacattcatacaggagagaagccttttgaatgcagtaattgtagaaaagctttcagacagatctcatcc

SEQ ID NO: 723929 - DNA, 120 bp, Artificial Sequence
  ENSG00000198046_6 (sequence is synthesized)
atcctacttcatcagagaattcacagtggaaagaaaagccatgaatgcaataaatgtggggaaagcttcaatcaaagaacaacccttattctacatatgagaattcatgatggaaaggaa

SEQ ID NO: 723930 - DNA, 120 bp, Artificial Sequence
  ENSG00000198046_7 (sequence is synthesized)
attcttgactgtgggaaggccttgagtcaatgtcagtctttcaatatacatcagaaaattcatgttgttgggaatgtctgccagtgcagaaagtgcggaaaagccttcaatcagatgtca

SEQ ID NO: 723931 - DNA, 120 bp, Artificial Sequence
  ENSG00000198046_8 (sequence is synthesized)
tcccttttacttcataagaaaattcacaatggaaagaaaacacataaatataataaatgtgggagaggcttcaaaaagaaatcagtctttgttgtacataaaagaattcatgctggagag

SEQ ID NO: 723932 - DNA, 120 bp, Artificial Sequence
  ENSG00000198046_9 (sequence is synthesized)
aaaatccctgaaaatgcgaaggccttaagtcagagtctacagcaaagaagtcaccatttagagaatccttttaaatgcagaaaatgtgggaaattatttaataggatttcacccctgatg

SEQ ID NO: 723933 - DNA, 120 bp, Artificial Sequence
  ENSG00000198046_10 (sequence is synthesized)
cttcaccagagaattcacacttcagagaaaccgtacaaatgtgataaatgtgacaagttcttcaggcggctttcaacccttattctgcatctaagaattcataatggagaaaaactatac

SEQ ID NO: 723934 - DNA, 120 bp, Artificial Sequence
  ENSG00000198046_11 (sequence is synthesized)
agatgcaataaatgtgagaaggtctgcaatcggcattcatcccttattcaacatcagaaagttcatacaaagaaaaagaaactatttgagtgtaaggaatgtgggaagatgttttctgga

SEQ ID NO: 723935 - DNA, 120 bp, Artificial Sequence
  ENSG00000198046_12 (sequence is synthesized)
actgcaaaccttaaaatacatcagaatattcattctgaagagaaacctttcaaatgcaataaatgtagtaaagttttcggccgccaatcatttcttattgaacatcaaagaattcatact

SEQ ID NO: 723936 - DNA, 120 bp, Artificial Sequence
  ENSG00000198046_13 (sequence is synthesized)
ggagaaaaaccctaccagtgtgaggaatgtggaaaagccttcagccaccgaatatctctcacacgacataagagaattcatactgaagatagaccctatgaatgtgatcagtgtgggaag

SEQ ID NO: 723937 - DNA, 120 bp, Artificial Sequence
  ENSG00000198046_14 (sequence is synthesized)
gccttcagccagagtgcacacctcgcccaacatgaaagaattcacactggagagaagccatatacatgcaaaacatgtggtaaggcctttagtcagcgcacatctcttattctacatgaa

SEQ ID NO: 723938 - DNA, 120 bp, Artificial Sequence
  ENSG00000198046_15 (sequence is synthesized)
aatgtagtaaatgtgggaaggcatatagtcggagttcatccctgattcgacatcagaatacacattctgaagaaaaagcctaaggttgttttaaatctataaaatcaacgaatgaggcta

SEQ ID NO: 723939 - DNA, 120 bp, Artificial Sequence
  ENSG00000198046_16 (sequence is synthesized)
tcaaacatatggcaaatatgtatttgtctataatgtaaattttgtgtatatgggaccatttgatgatatgtcccactttgaaagccaaagagcaaaagtcattggtgattttgacctcag

SEQ ID NO: 723940 - DNA, 120 bp, Artificial Sequence
  ENSG00000198046_17 (sequence is synthesized)
gatttgaaattaactgaaggaaactcagaagtttggtcagtcattgtgaatgaagatcatttttcatttgataagaattactggctgggcgcagtggcttacacctgtaaccccagcact

SEQ ID NO: 723941 - DNA, 120 bp, Artificial Sequence
  ENSG00000198046_18 (sequence is synthesized)
aaaattaccgatattttacttccagcatagttttaaagataatttattggtcacatacaacaaaatagaattgtgaagtccattatagggctctgagcctgatttaaggtcacagaaaaa

SEQ ID NO: 723942 - DNA, 120 bp, Artificial Sequence
  ENSG00000198046_19 (sequence is synthesized)
agaatttgagtctgtttctcagatctagaattatcaaatataaggaacttctcggcaaaacagggtgccactttcagctgacaaacttgtgggtgagaataaagaaaagtgagtctttag

SEQ ID NO: 723943 - DNA, 120 bp, Artificial Sequence
  ENSG00000198046_20 (sequence is synthesized)
gtagataaagttgtcactcataatggtgtgtaacagtagaaaccttactttaccatctccacggatatgaggatatatgatcttcatggtgtgaacgtctaacttggctgagacaagcta

SEQ ID NO: 723944 - DNA, 120 bp, Artificial Sequence
  ENSG00000198046_21 (sequence is synthesized)
tcagtaaaagaaccaagatatagtgaagaatgaggatttcagagccaggagaaatcagtattgttttatttggaaataaatcatctatatttatatgagtaaacattggtattttcatgt

SEQ ID NO: 723945 - DNA, 120 bp, Artificial Sequence
  ENSG00000198046_22 (sequence is synthesized)
aacaatactggtatgcaataagtggtgtaatatgagttgttatggactgaatgtttatgtccctcccaaaactaattatgttaaaatcctcaccatcaatgtgatgttacttggaaatga

SEQ ID NO: 723946 - DNA, 120 bp, Artificial Sequence
  ENSG00000198046_23 (sequence is synthesized)
ggcatttgggaggcaattaggattagatgaggtcatgagggtggagccctcgtgatgggattagtgcctttataagaagagacatcaggctgagcccggtggctcatgcctgtaatccca

SEQ ID NO: 723947 - DNA, 61 bp, Artificial Sequence
  ENSG00000198046_24 (sequence is synthesized)
ggatcataaaatacaaaaaattagccaggcacagtggcatgtgcctgtagtcccagctact

SEQ ID NO: 723948 - DNA, 69 bp, Artificial Sequence
  ENSG00000198046_25 (sequence is synthesized)
gtcccagctactcgggaggctgaagggccactgtactccaccctgggcgacagagcgagactacgtctc

SEQ ID NO: 723949 - DNA, 120 bp, Artificial Sequence
  ENSG00000198046_26 (sequence is synthesized)
agactacgtctcaaaaagacatcagaaagcctgcttgctctctgcaccatgtgaggatgcaggaagaagccagctgtctacagaacaggaagagaaccctacgagaacctaaccatgctg

SEQ ID NO: 723950 - DNA, 120 bp, Artificial Sequence
  ENSG00000198046_27 (sequence is synthesized)
gcgacctgttctcagacttccagacttcagaactgtgagaagtaaattgttgtttaagccacccagtctatgatgttttgttatggcagccccagctaatatatggagtggaaagcctag

SEQ ID NO: 723951 - DNA, 120 bp, Artificial Sequence
  ENSG00000198046_28 (sequence is synthesized)
atttatctactgggttcttttcctgtcagcagttcaacatgtgtagtagctttcagtctctgctgtttgtgccaaatatataagaaataaaatcagataacttttttgtaattggatcat

SEQ ID NO: 723952 - DNA, 120 bp, Artificial Sequence
  ENSG00000198046_29 (sequence is synthesized)
gagtgcgcaggcgctgagtccctgctcggctgtctcggtggtcgccgccggggtctgagcccgggaagaccgaggttccagccgtcctcacctcaggaggacatagctttgtgcctttca

SEQ ID NO: 723953 - DNA, 120 bp, Artificial Sequence
  ENSG00000198046_30 (sequence is synthesized)
aagccctttctcatctatcatcagggactcggaagacgagccaggtttacagccctgccttgatgtgtagtgccgagttccttgaagaaaattattttatggacaatgtatgagtctgtt

SEQ ID NO: 723954 - DNA, 120 bp, Artificial Sequence
  ENSG00000198046_31 (sequence is synthesized)
ttcgtgctgctgataaagacatacccagactcacagttctacgtggctggggaggcctcacaatcgtgatggaaggtgaaagacacgtcttacatggccacagggagaatgagagtccct

SEQ ID NO: 723955 - DNA, 87 bp, Artificial Sequence
  ENSG00000198046_32 (sequence is synthesized)
agacacgtcttacatggccacagggagaatgagagtccctgtacagaaccatcagatcacatgagacttactcactgcattcagtta

SEQ ID NO: 723956 - DNA, 120 bp, Artificial Sequence
  ENSG00000198046_33 (sequence is synthesized)
aagatgagatttgagtggggacacagccagaccatatcagacaagaatcatcttctcaaatttggggtgcgtggctgagtgcacacacctgtgaaaactgcgggatgaatgcattacaac

SEQ ID NO: 723957 - DNA, 120 bp, Artificial Sequence
  ENSG00000198046_34 (sequence is synthesized)
cttggacgtctagatcagggcttaggttcagaattgtgtaggcagggtcctgggagggcagcattagggtagaggaggtggggtcaggaacaaaggatcttcctgatggagatgtcccta

SEQ ID NO: 723958 - DNA, 120 bp, Artificial Sequence
  ENSG00000198046_35 (sequence is synthesized)
gggagcccatggggtcaagaacagaactttgaagtgtcagggactaagggatgtttccatataacacatgggtctggaaatgtttctgtccagaccagtgtttcacagccttggcactgt

SEQ ID NO: 723959 - DNA, 120 bp, Artificial Sequence
  ENSG00000198046_36 (sequence is synthesized)
gacatttggggccagatagttttttgttgggaggtgggaggggctgctattctatgtattataggatgttgtgcagcaaccctgggctctatttaccaggccagtagcacaccgcgcctc

SEQ ID NO: 723960 - DNA, 120 bp, Artificial Sequence
  ENSG00000198046_37 (sequence is synthesized)
cctctgggttgtgacaagcgaaaaaaaaatgtctccagacactgtcagatgtcccctgcaggggcaaaatcactctgattgagaggaccgtgatgcaagcgcatggacagaccgaaggca

SEQ ID NO: 723961 - DNA, 120 bp, Artificial Sequence
  ENSG00000198046_38 (sequence is synthesized)
tgatgacagggagaagagtaagggagctggggaaggcggggcacggagagatgataaaaggatagtgttctgagatgagaagaaacggcctgcagcccgggtaagctccgagatgcattc

SEQ ID NO: 723962 - DNA, 120 bp, Artificial Sequence
  ENSG00000198046_39 (sequence is synthesized)
attcattcagccagtgagtgcctaccatggattgggcactgtgctagtctctcaacaaaacaggcaaggtttttactcagctggaacttgcatttagtaggagagacaaaaataaagtct

SEQ ID NO: 723963 - DNA, 120 bp, Artificial Sequence
  ENSG00000198046_40 (sequence is synthesized)
ataataggtgctgataggtactttgaaaagtaaagcagggtaaagggattacagggtgtttggcaggtgttctttttggagtcaacatccaggtctcccatgggcattttggtcaactcc

SEQ ID NO: 723964 - DNA, 120 bp, Artificial Sequence
  ENSG00000198046_41 (sequence is synthesized)
agagccaggaaggaccaccagcagtgaccctttggtatcacttgattggggaatctaagagtttgactttgatcttaaccaaagacttttctcttcactgaggtctggacttcaacagaa

SEQ ID NO: 723965 - DNA, 120 bp, Artificial Sequence
  ENSG00000198046_42 (sequence is synthesized)
agaggtcagatctctagccctgtccttgagactctgagactcgaacgttattctaaacgatgccttcaatgttactctcaccttggaatgctttatttaaaaaaagaaaaaaaagggcgg

SEQ ID NO: 723966 - DNA, 120 bp, Artificial Sequence
  ENSG00000198046_43 (sequence is synthesized)
gtcagactcaatccccagagattctgatttaattggtctggcatagtgaactgccatcagctgtgactatttattagaaagctcccaagagactaatgtacgcacagggttaagagctac

SEQ ID NO: 723967 - DNA, 120 bp, Artificial Sequence
  ENSG00000198046_44 (sequence is synthesized)
agctctgagtgcctgcagctcaggctcctttggggcctctgggaatgagataaattgatttggaggagtcagggggaggatgcaagtgacctctgcttggctatcttatcaaaaacagtc

SEQ ID NO: 723968 - DNA, 120 bp, Artificial Sequence
  ENSG00000198046_45 (sequence is synthesized)
ctcacagctgcacttccctgcagtaggggtattcctagccccatcctgcaagtgaggtaacctaatgtgttcccgggcaaagtggggaaatggcaggctagacatgcatatgcatagcct

SEQ ID NO: 723969 - DNA, 120 bp, Artificial Sequence
  ENSG00000198046_46 (sequence is synthesized)
gtgttcttcctgtgacagctgtgctgacgtctttggagaaattgcctacgtatgtccctggcctctggggctggcaggttcaggccaggagtgatttttgaatatttgacagctggtaca

SEQ ID NO: 723970 - DNA, 120 bp, Artificial Sequence
  ENSG00000198046_47 (sequence is synthesized)
gcaaaagctgactggcccaaaggaggcaatgaggctgtggcagtgcatttaatggctggttttcagtatatcaggaccctcccccaattcaatacccagcacagcccccaaggctcaaag

SEQ ID NO: 723971 - DNA, 120 bp, Artificial Sequence
  ENSG00000198046_48 (sequence is synthesized)
cctcaggaggacatagctttgtgcctttcaaagccctttctcatctatcatcagggactcggaagacgagccaggtttacagccctgccttgatgtgtgccgagttccttgaagaaaatt

SEQ ID NO: 723972 - DNA, 120 bp, Artificial Sequence
  ENSG00000198046_49 (sequence is synthesized)
acgaagccatggcagcaggtgctccttcatcttcaaggccagcagcatagcttccatcttgcaatttctttttctgtctgactctgatcctcctgcctccgttttataaagaggaccttt

SEQ ID NO: 723973 - DNA, 120 bp, Artificial Sequence
  ENSG00000198046_50 (sequence is synthesized)
gtaattatgttgagcccacttgggcaatccaggattgtgctattgagaaataactatttagcctttagcctgtttcctggcataaaactcctgaaatcttacaatttctaaagtgatgtc

SEQ ID NO: 723974 - DNA, 120 bp, Artificial Sequence
  ENSG00000198046_51 (sequence is synthesized)
tcaatttagaaagtttattttgccaaggctaaggacacacctgtgacacagcctcaggaggtcctgacatgtgcccaaggtggtcggggcacagctaggttttatatgtttttgggagac

SEQ ID NO: 723975 - DNA, 120 bp, Artificial Sequence
  ENSG00000198046_52 (sequence is synthesized)
gcacagctaggttttatatgtttttgggagacatgagacatcagccagtatgtgtgagatgtacgttggtttggtccagaaaggtgggacaactcgaagcaagggccctgcctttcaggt

SEQ ID NO: 723976 - DNA, 120 bp, Artificial Sequence
  ENSG00000198046_53 (sequence is synthesized)
cataggtagataagagacaaacagttgcattccttcaagtctctgatgagcctttcactgaacacacagtttacatgtgacaggagggtagaggagtagtcacttatgccttggtctggc

SEQ ID NO: 723977 - DNA, 120 bp, Artificial Sequence
  ENSG00000198046_54 (sequence is synthesized)
ttagtgaaatagggcaaagggagcaatcaggtatgcatttatctcatgagttctgtgtgtcctctgtccaaaaagaattttcttttgggcatattgtgagggaggtacgtggttagtaat

SEQ ID NO: 723978 - DNA, 90 bp, Artificial Sequence
  ENSG00000198046_55 (sequence is synthesized)
ttttcttttacatgtcttttgtatgctaatgagatggctggtggctggcagcccctgggtagcttcaggatagggttggtcaccaggaag

SEQ ID NO: 723979 - DNA, 120 bp, Artificial Sequence
  ENSG00000198046_56 (sequence is synthesized)
gcccctgggtagcttcaggatagggttggtcaccaggaagaccaaggcaggactagacagttgggacattgagctccacccttcaacctctggggaggggagaaagactaaaggttaagt

SEQ ID NO: 723980 - DNA, 120 bp, Artificial Sequence
  ENSG00000198046_57 (sequence is synthesized)
tgatcaccaagggccagtagtttaatcttgcctgtgtaatgaagccaccataaaaactcagaaggacagggtttgaagagcttctggatagctgaacacatggaggttcctggagggttc

SEQ ID NO: 723981 - DNA, 120 bp, Artificial Sequence
  ENSG00000198046_58 (sequence is synthesized)
ccaaggaaggcatggaagctccacaccacctcacacataccttgtatttctacacatttctttctctgtattcttcggaatagccttcataatcaaccagtaaatgtcagtatttgcctg

SEQ ID NO: 723982 - DNA, 120 bp, Artificial Sequence
  ENSG00000198046_59 (sequence is synthesized)
taaggttgctggattaaagagtacaacaggggtaaataacgtgtatcttcggtcttaaagacattgccaaattgccctccattgaatttacaccaatttatctcctccagcactggataa

SEQ ID NO: 723983 - DNA, 120 bp, Artificial Sequence
  ENSG00000198046_60 (sequence is synthesized)
gaattctaatctcagcctttttagtgggtctcagtcttcgttggtctcttggatgcttggtatgtggttgacccttgaacagtgcaggggttagtggtaccaaccccctgtactgtagaa

SEQ ID NO: 723984 - DNA, 120 bp, Artificial Sequence
  ENSG00000198046_61 (sequence is synthesized)
aatccacatagagttttcactccccaaagacttaagtactaatagtctactggtcaccttactgacacctaagcaataacctacacagtctattaacacatattttgtgtgttacatgta

SEQ ID NO: 723985 - DNA, 120 bp, Artificial Sequence
  ENSG00000198046_62 (sequence is synthesized)
aaaatgttattaagaaaatcataaggaaaatatatttactgttcatgaagtagagtggttttcatcgtcatggccttcaagttgagtaggctgaggaggaagaggaggagctggtcttac

SEQ ID NO: 723986 - DNA, 120 bp, Artificial Sequence
  ENSG00000198046_63 (sequence is synthesized)
agtaggctgaggaggaagaggaggagctggtcttactgtctcagaggtggaagaggtggaggagccggaagggggaggccggagaggtaggcacactcagtgtaacttctattgaaaaaa

SEQ ID NO: 723987 - DNA, 120 bp, Artificial Sequence
  ENSG00000198046_64 (sequence is synthesized)
atctgcatataagtggaccctcacaattcaaactaacatggctcaagggtcaactgtattgtgagttgaaaaggaaaaggaaggcaagcaatgaccatgttccagttaccgaagacatca

SEQ ID NO: 723988 - DNA, 120 bp, Artificial Sequence
  ENSG00000198046_65 (sequence is synthesized)
catgtaaatatcctaacagcagaggtgaggtaggttttctttaccccattgtatagatgagcaaacaggctttgtgtaactttttcacagccagtaattggcagaggcaagctttgaatc

SEQ ID NO: 723989 - DNA, 120 bp, Artificial Sequence
  ENSG00000198046_66 (sequence is synthesized)
tgagctcactgaggcctccccagaagccaaggaggtgccagcaccatgcttgtacagcctactgaaccaggagccaattgaacctcttttgtttataaattacccactcaagtatttatt

SEQ ID NO: 723990 - DNA, 120 bp, Artificial Sequence
  ENSG00000198046_67 (sequence is synthesized)
gagaccaaatgtgatcaccttattggagaaagggaaagcaccctggatggtagagccagtaagaagacgccgggctcctggctggactacaatgatggcatgatctcggctcactgcaac

SEQ ID NO: 723991 - DNA, 120 bp, Artificial Sequence
  ENSG00000198046_68 (sequence is synthesized)
tgcgtgggttctcggcccgccacggcgtggggtttgcgcccttcgctgctgtggttctcggggcttgtgcgcccaagtgtgaagttggcgccgcgtgtgaggcgagccgtgtgtgcctgt

SEQ ID NO: 723992 - DNA, 120 bp, Artificial Sequence
  ENSG00000198049_0 (sequence is synthesized)
gctccagccgctgctcaccaggcagagcgagcgggcttggctggggcttcctgccctgagcgcgacaccgactgccccggaccgcgcctccaagcaggctgaagggcttccgctcttggc

SEQ ID NO: 723993 - DNA, 120 bp, Artificial Sequence
  ENSG00000198049_1 (sequence is synthesized)
ttccagaaaagtttggagaaagagaatttgaggcggattggagggtggtagcccctccccagccttctttccctcccagaagcctcactctgcacagcgtcccccattcttcccgtcctg

SEQ ID NO: 723994 - DNA, 120 bp, Artificial Sequence
  ENSG00000198049_2 (sequence is synthesized)
attccccatcttcctgacccctccttctccctctcctgggtcgatcccagtcacattttctccttccgaatctcatcctccctcctcctctctatcccagtcctctgaacgatttccgcc

SEQ ID NO: 723995 - DNA, 120 bp, Artificial Sequence
  ENSG00000198049_3 (sequence is synthesized)
tatttgcaagccttctccctgtcattctcaacgcttctcctttctctccacctcccctgccactccattttatccatcaaacctctccacttgcatccacaccctcccttcatccttccc

SEQ ID NO: 723996 - DNA, 120 bp, Artificial Sequence
  ENSG00000198049_4 (sequence is synthesized)
tcccagcaaaccttgctcatggattctgggcctctgtgggatgccaaccccacccctcggggcaccctctctgcccccaatgccacaacaccctggctgggccgggatgaggagctggcc

SEQ ID NO: 723997 - DNA, 120 bp, Artificial Sequence
  ENSG00000198049_5 (sequence is synthesized)
aaggtggagatcggagtcctggccactgtcctggtgctggcgaccgggggcaacctggctgtgctgctgaccctgggccagctgggccgcaagcgctcccgcatgcacctgttcgtgctg

SEQ ID NO: 723998 - DNA, 120 bp, Artificial Sequence
  ENSG00000198049_6 (sequence is synthesized)
cacttagccctgacagacctggccgtggcgctcttccaggtgctgccacagctgctgtgggacatcacctaccgcttccagggccccgacctcctgtgcagggccgtcaagtacctgcag

SEQ ID NO: 723999 - DNA, 120 bp, Artificial Sequence
  ENSG00000198049_7 (sequence is synthesized)
gtgctcagcatgtttgcctccacctacatgctgctggccatgacgctggaccgctacctggctgtctgtcaccccctgcgcagcctccagcagccaggccagtccacctacctgctcatc

SEQ ID NO: 724000 - DNA, 120 bp, Artificial Sequence
  ENSG00000198049_8 (sequence is synthesized)
gctgctccctggctgctggccgccatcttcagcctccctcaagtcttcattttttccctgcgggaggtgatccagggctcaggggtgctggactgctgggcagacttcggcttcccttgg

SEQ ID NO: 724001 - DNA, 120 bp, Artificial Sequence
  ENSG00000198049_9 (sequence is synthesized)
gggccacgggcctacctcacctggaccaccctggctatcttcgttctgccggtgaccatgctcacggcctgctacagcctcatctgccatgagatctgtaaaaacctaaaagtcaagaca

SEQ ID NO: 724002 - DNA, 120 bp, Artificial Sequence
  ENSG00000198049_10 (sequence is synthesized)
caggcctggcgggtgggaggagggggctggaggacttgggacaggccctcaccttccaccttagctgccaccactcgggggctgccatctcgggtcagcagcatcaacaccatctcacgg

SEQ ID NO: 724003 - DNA, 120 bp, Artificial Sequence
  ENSG00000198049_11 (sequence is synthesized)
gccaagatccgaacagtgaagatgacctttgtcatcgtgctggcctacatcgcttgctgggctcccttcttcagtgtccagatgtggtccgtgtgggacaagaatgcccctgatgaagat

SEQ ID NO: 724004 - DNA, 120 bp, Artificial Sequence
  ENSG00000198049_12 (sequence is synthesized)
tccaccaatgtggctttcaccatctctatgcttttgggcaacctcaacagctgctgcaacccctggatctacatgggcttcaacagccacctgttaccgcggcccctgcgtcaccttgcc

SEQ ID NO: 724005 - DNA, 120 bp, Artificial Sequence
  ENSG00000198049_13 (sequence is synthesized)
tgctgtgggggtccccagcccaggatgcgccggcggctctccgacggcagcctctcgagccgccacaccacgctgctgacccgctccagctgcccggccaccctcagcctcagcctcagc

SEQ ID NO: 724006 - DNA, 120 bp, Artificial Sequence
  ENSG00000198049_14 (sequence is synthesized)
ctaaccctcagtgggaggcccaggcctgaagagtcaccaagggacttggagctggcagatggggaaggcaccgctgagaccatcatcttttaggaaagactcgctggggtctggtactgc

SEQ ID NO: 724007 - DNA, 120 bp, Artificial Sequence
  ENSG00000198049_15 (sequence is synthesized)
ccccaggactagtggaggttctctgcccacctcgggcactggaaatgagagctgggagggtaagggttggagttagaggagccctgtctaaagcggagcgaaaaggccagaatgggtccc

SEQ ID NO: 724008 - DNA, 120 bp, Artificial Sequence
  ENSG00000198049_16 (sequence is synthesized)
ctaccctggtgtcacagctgcccctagtgtgagggctgcctcataagctcccaatctcagacactggcagtcagggagaatcaaactgcctgtctccctggtcctgccatattcataggg

SEQ ID NO: 724009 - DNA, 120 bp, Artificial Sequence
  ENSG00000198049_17 (sequence is synthesized)
tgtccatgcacacatggtgtcccagatctaggcaggcctaggatggtgctgtctaggggtccacgggtggcaggaattcagaggctggccttgtgccctggctacctgtctccattctaa

SEQ ID NO: 724010 - DNA, 120 bp, Artificial Sequence
  ENSG00000198049_18 (sequence is synthesized)
cctgactggcacatctcagcctaaccaggagaggggagaagtgaaaaaccgtgaggaggactctatttggatcctggatttgttgttgttgttgttgttgttagagagaaaattgcttca

SEQ ID NO: 724011 - DNA, 120 bp, Artificial Sequence
  ENSG00000198049_19 (sequence is synthesized)
tgaagaaaagtgaatggatatgtagggattaccctgctgtgcccagctgtctgttgaagggagatggtctcatggagatgcaggattcagtatagtacctggtacctagcaggaactctg

SEQ ID NO: 724012 - DNA, 120 bp, Artificial Sequence
  ENSG00000198049_20 (sequence is synthesized)
agaaagagggagggaaggagaagatgaaaatggtcatcataaaattaacagcaagaataagcctcaagggcagcagggacttgtggccctccctcctttccccaacccaccccccaggga

SEQ ID NO: 724013 - DNA, 120 bp, Artificial Sequence
  ENSG00000198049_21 (sequence is synthesized)
atccagcctgctctttccccgggggctacacagaggagacctcctttgagaaaaggtgacatcatcatggctctggacaccctccaggctcttcagagcttccaccatgaaccatatgga

SEQ ID NO: 724014 - DNA, 120 bp, Artificial Sequence
  ENSG00000198049_22 (sequence is synthesized)
tgctgtgatccagttaggagcccgggtttgaatctcagctctgccttcagtatctgtgtgaccttgggtgagtcactctccctttccaggacccagtctcctcacctgtgtaataggtga

SEQ ID NO: 724015 - DNA, 120 bp, Artificial Sequence
  ENSG00000198049_23 (sequence is synthesized)
gatgatctctaaactccaaccttccatgactctgcaatactggaaatggtgttacagagaaacacaaaggatattataaccaacagggtctagaagagttgttgcatttttatgacaatg

SEQ ID NO: 724016 - DNA, 120 bp, Artificial Sequence
  ENSG00000198049_24 (sequence is synthesized)
gcattgatatactctttgactcaattctggtgacggtgggtcccaccatggccatactgtccacttttgtcctcatctgggatgctgaatcctcctccaaggctgggagaggctgcaggc

SEQ ID NO: 724017 - DNA, 120 bp, Artificial Sequence
  ENSG00000198049_25 (sequence is synthesized)
caaggtagaccgaggtagaggaagagcatggcacatgctcattatctccaggggacttttatcatggcatagcttccccaacccaattctgattccaattgaagagagagccttgctggt

SEQ ID NO: 724018 - DNA, 120 bp, Artificial Sequence
  ENSG00000198049_26 (sequence is synthesized)
ggaaaagacatcagctgaaacatcagcaaagctgcatcctggttctgccaccaccaatgacacacatcaataaaatgctggccagtccttgctagcttggttctgagaatcaaataggac

SEQ ID NO: 724019 - DNA, 120 bp, Artificial Sequence
  ENSG00000198049_27 (sequence is synthesized)
tgtggatataaaagtcatttgtaaagtcatgagctctatactaacgtaaggaattactaatctaattaagagctcctgagggaagctctagggaacactttcagtctctacccctgactc

SEQ ID NO: 724020 - DNA, 120 bp, Artificial Sequence
  ENSG00000198049_28 (sequence is synthesized)
ccagggaagctttgaggaatgactgtggctttgcggatatacttctttaagaggccactcagctctaagaagcctcctgaggctttctaaaaagaaaagagccttgctgaatgttgtgag

SEQ ID NO: 724021 - DNA, 120 bp, Artificial Sequence
  ENSG00000198049_29 (sequence is synthesized)
tgagcaaagcgtcccagtccttcagtgctagagaactggagagtgagaccctaatgggaccaaggctcaggcagatgggaggacccacagtctccctctcactgagttctgttgcccatg

SEQ ID NO: 724022 - DNA, 120 bp, Artificial Sequence
  ENSG00000198049_30 (sequence is synthesized)
tcagcccctgacatctaatacttcttccctgtctatctgccctggtgaagtgggcttagaagcctcccatgccagccagagctgttgaatctgctccttcccctgcttacaaaagcggcc

SEQ ID NO: 724023 - DNA, 120 bp, Artificial Sequence
  ENSG00000198049_31 (sequence is synthesized)
tccccacccccttgccccatctttagaccacagtttctgaccctaatgcctagagttggtaaatctttgttcttcatgatgactgggaggtagaaggaacaccagctgtgtgccccaaag

SEQ ID NO: 724024 - DNA, 120 bp, Artificial Sequence
  ENSG00000198049_32 (sequence is synthesized)
acctgggtttgcatcttgatctcaccccttttctacctgtatcaacttaagcaagttatccaatctcccccagcaatgctttcttcatttattaaatagaaatagcaatgcccactttgt

SEQ ID NO: 724025 - DNA, 120 bp, Artificial Sequence
  ENSG00000198049_33 (sequence is synthesized)
tgggagggatttgtaagattgtagactagagatagagcactcaacagatgttagagaggggaacaatggcctggctccagattgcatctggtagatgacctccagggtcctgacccaaaa

SEQ ID NO: 724026 - DNA, 120 bp, Artificial Sequence
  ENSG00000198049_34 (sequence is synthesized)
gagtctacagttcagagaggaaaagaggagacagacctgggatcaaggctgactaaagcactttcttgtctaccctttgccttctatagatcccctcttactactatgatattttctgtt

SEQ ID NO: 724027 - DNA, 120 bp, Artificial Sequence
  ENSG00000198049_35 (sequence is synthesized)
ttgcattgcacaagaataatttacttggggtggtggctttggagccctcattgttcctcccatggaaaggctacacttgatcttttccagaaagctggttctgtcctgtgatatggacag

SEQ ID NO: 724028 - DNA, 120 bp, Artificial Sequence
  ENSG00000198049_36 (sequence is synthesized)
tggggagcgactgcacactggctgagggcctcgggaacccattccaggaagctcctgaaggaaatggtggatctcatcggatctatgagtgaaagttctgcaggacctgtaggaggctcg

SEQ ID NO: 724029 - DNA, 120 bp, Artificial Sequence
  ENSG00000198049_37 (sequence is synthesized)
cctggacagtctgggccagtggaagggccttggatagggttcaaggaggaggggccctgtggaagcaagaaggaggctctgtgctctctggggtgaatcccatttctgacggctaacccc

SEQ ID NO: 724030 - DNA, 120 bp, Artificial Sequence
  ENSG00000198049_38 (sequence is synthesized)
aggagaaactgaacaatgccgtctctggctgggcacttgtgtaaattgtttatgccatcctgtgactgtgaatgacagtactttagtcccttaaaacctatgtacaagcaggacatgagg

SEQ ID NO: 724031 - DNA, 120 bp, Artificial Sequence
  ENSG00000198049_39 (sequence is synthesized)
ggcagacgggacagagaggaggacaggaggggttcatcggttgactacggggatttctcagaatcgttatgttgtttggcacaggccagtactttcccagataatgtgtctgtgttttgt

SEQ ID NO: 724032 - DNA, 120 bp, Artificial Sequence
  ENSG00000198049_40 (sequence is synthesized)
atgtaaatagatcacttatctactacagggctatagattcagcccaggctgtagcagttcattcctgggtcagaaacccaggttgaaattcaccaataaaaagatttaatatccaggaaa

SEQ ID NO: 724033 - DNA, 120 bp, Artificial Sequence
  ENSG00000198053_0 (sequence is synthesized)
gcggcccatggagcccgccggcccggcccccggccgcctcgggccgctgctctgcctgctgctcgccgcgtcctgcgcctggtcaggagtggcgggtgaggaggagctgcaggtgattca

SEQ ID NO: 724034 - DNA, 120 bp, Artificial Sequence
  ENSG00000198053_1 (sequence is synthesized)
agctgcaggtgattcagcctgacaagtccgtgttggttgcagctggagagacagccactctgcgctgcactgcgacctctctgatccctgtggggcccatccagtggttcagaggagctg

SEQ ID NO: 724035 - DNA, 120 bp, Artificial Sequence
  ENSG00000198053_2 (sequence is synthesized)
gaccaggccgggaattaatctacaatcaaaaagaaggccacttcccccgggtaacaactgtttcagacctcacaaagagaaacaacatggacttttccatccgcatcggtaacatcaccc

SEQ ID NO: 724036 - DNA, 120 bp, Artificial Sequence
  ENSG00000198053_3 (sequence is synthesized)
cagcagatgccggcacctactactgtgtgaagttccggaaagggagccccgatgacgtggagtttaagtctggagcaggcactgagctgtctgtgcgcgccaaaccctctgcccccgtgg

SEQ ID NO: 724037 - DNA, 120 bp, Artificial Sequence
  ENSG00000198053_4 (sequence is synthesized)
tatcgggccctgcggcgagggccacacctcagcacacagtgagcttcacctgcgagtcccacggcttctcacccagagacatcaccctgaaatggttcaaaaatgggaatgagctctcag

SEQ ID NO: 724038 - DNA, 120 bp, Artificial Sequence
  ENSG00000198053_5 (sequence is synthesized)
acttccagaccaacgtggaccccgtaggagagagcgtgtcctacagcatccacagcacagccaaggtggtgctgacccgcgaggacgttcactctcaagtcatctgcgaggtggcccacg

SEQ ID NO: 724039 - DNA, 120 bp, Artificial Sequence
  ENSG00000198053_6 (sequence is synthesized)
tcaccttgcagggggaccctcttcgtgggactgccaacttgtctgagaccatccgagttccacccaccttggaggttactcaacagcccgtgagggcagagaaccaggtgaatgtcacct

SEQ ID NO: 724040 - DNA, 120 bp, Artificial Sequence
  ENSG00000198053_7 (sequence is synthesized)
gccaggtgaggaagttctacccccagagactacagctgacctggttggagaatggaaacgtgtcccggacagaaacggcctcaaccgttacagagaacaaggatggtacctacaactgga

SEQ ID NO: 724041 - DNA, 120 bp, Artificial Sequence
  ENSG00000198053_8 (sequence is synthesized)
tgagctggctcctggtgaatgtatctgcccacagggatgatgtgaagctcacctgccaggtggagcatgacgggcagccagcggtcagcaaaagccatgacctgaaggtctcagcccacc

SEQ ID NO: 724042 - DNA, 120 bp, Artificial Sequence
  ENSG00000198053_9 (sequence is synthesized)
cgaaggagcagggctcaaataccgccgctgagaacactggatctaatgaacggaacatctatattgtggtgggtgtggtgtgcaccttgctggtggccctactgatggcggccctctacc

SEQ ID NO: 724043 - DNA, 120 bp, Artificial Sequence
  ENSG00000198053_10 (sequence is synthesized)
tcgtccgaatcagacagaagaaagcccagggctccacttcttctacaaggttgcatgagcccgagaagaatgccagagaaataacacaggacacaaatgatatcacatatgcagacctga

SEQ ID NO: 724044 - DNA, 120 bp, Artificial Sequence
  ENSG00000198053_11 (sequence is synthesized)
acctgcccaaggggaagaagcctgctccccaggctgcggagcccaacaaccacacggagtatgccagcattcagaccagcccgcagcccgcgtcggaggacaccctcacctatgctgacc

SEQ ID NO: 724045 - DNA, 120 bp, Artificial Sequence
  ENSG00000198053_12 (sequence is synthesized)
tggacatggtccacctcaaccggacccccaagcagccggcccccaagcctgagccgtccttctcagagtacgccagcgtccaggtcccgaggaagtgaatgggaccgtggtttgctctag

SEQ ID NO: 724046 - DNA, 120 bp, Artificial Sequence
  ENSG00000198053_13 (sequence is synthesized)
cacccatctctacgcgctttcttgtcccacagggagccgccgtgatgagcacagccaacccagttcccggagggctggggcggtgcaggctctgggacccaggggccagggtggctcttc

SEQ ID NO: 724047 - DNA, 120 bp, Artificial Sequence
  ENSG00000198053_14 (sequence is synthesized)
tctccccacccctccttggctctccagcacttcctgggcagccacggccccctccccccacattgccacatacctggaggctgacgttgccaaaccagccagggaaccaacctgggaagt

SEQ ID NO: 724048 - DNA, 120 bp, Artificial Sequence
  ENSG00000198053_15 (sequence is synthesized)
ggccagaactgcctggggtccaagaactcttgtgcctccgtccatcaccatgtgggttttgaagaccctcgactgcctccccgatgctccgaagcctgatcttccagggtggggaggaga

SEQ ID NO: 724049 - DNA, 120 bp, Artificial Sequence
  ENSG00000198053_16 (sequence is synthesized)
caccaccaccaccaccactaccaccaccacccaactggggctagagtggggaagatttcccctttagatcaaactgccccttccatggaaaagctggaaaaaaactctggaacccatatc

SEQ ID NO: 724050 - DNA, 120 bp, Artificial Sequence
  ENSG00000198053_17 (sequence is synthesized)
ctctggaacccatatccaggcttggtgaggttgctgccaacagtcctggcctcccccatccctaggctaaagagccatgagtcctggaggaggagaggacccctcccaaaggactggaga

SEQ ID NO: 724051 - DNA, 120 bp, Artificial Sequence
  ENSG00000198053_18 (sequence is synthesized)
caaaaccctctgcttccttgggtccctccaagactccctggggcccaactgtgttgctccacccggacccatctctcccttctagacctgagcttgcccctccagctagcactaagcaac

SEQ ID NO: 724052 - DNA, 120 bp, Artificial Sequence
  ENSG00000198053_19 (sequence is synthesized)
atctcgctgtggacgcctgtaaattactgagaaatgtgaaacgtgcaatcttgaaactgaggtgttagaaaacttgatctgtggtgttttgttttgttttttttcttaaaacaacagcaa

SEQ ID NO: 724053 - DNA, 120 bp, Artificial Sequence
  ENSG00000198053_20 (sequence is synthesized)
cgtgatcttggctgtctgtcatgtgttgaagtccatggttgggtcttgtgaagtctgaggtttaacagtttgttgtcctggagggattttcttacagcgaagacttgagttcctccaagt

SEQ ID NO: 724054 - DNA, 120 bp, Artificial Sequence
  ENSG00000198053_21 (sequence is synthesized)
cccagaaccccaagaatgggcaagaaggatcaggtcagccactccctggagacacagccttctggctgggactgacttggccatgttctcagctgagccacgcggctggtagtgcagcct

SEQ ID NO: 724055 - DNA, 120 bp, Artificial Sequence
  ENSG00000198053_22 (sequence is synthesized)
tctgtgaccccgctgtggtaagtccagcctgcccagggctgctgagggctgcctcttgacagtgcagtcttatcgagacccaatgcctcagtctgctcatccgtaaagtggggatagtga

SEQ ID NO: 724056 - DNA, 120 bp, Artificial Sequence
  ENSG00000198053_23 (sequence is synthesized)
agatgacacccctccccaccacctctcataagcactttaggaacacacagagggtagggatagtggccctggccgtctatcctacccctttagtgaccgcccccatcccggctttctgag

SEQ ID NO: 724057 - DNA, 120 bp, Artificial Sequence
  ENSG00000198053_24 (sequence is synthesized)
ctgatccttgaagaagaaatcttccatttctgctctcaaaccctactgggatcaaactggaataaattgaagacagccagggggatggtgcagctgtgaagctcgggctgattccccctc

SEQ ID NO: 724058 - DNA, 120 bp, Artificial Sequence
  ENSG00000198053_25 (sequence is synthesized)
tgtcccagaaggttggccagagggtgtgacccagttaccctttaacccccacccttccagtcgggtgtgagggcctgaccgggcccagggcaagcagatgtcgcaagccctatttattca

SEQ ID NO: 724059 - DNA, 120 bp, Artificial Sequence
  ENSG00000198053_26 (sequence is synthesized)
gtcttcactataactcttagagttgagacgctaatgttcatgactcctggccttgggatgcccaagggatttctggctcaggctgtaaaagtagctgagccatcctgcccattcctggag

SEQ ID NO: 724060 - DNA, 120 bp, Artificial Sequence
  ENSG00000198053_27 (sequence is synthesized)
gtcctacaggtgaaactgcaggagctcagcatagacccagctctctgggggatggtcacctggtgatttcaatgatggcatccaggaattagctgagccaacagaccatgtggacagctt

SEQ ID NO: 724061 - DNA, 120 bp, Artificial Sequence
  ENSG00000198053_28 (sequence is synthesized)
tggccagagctcccgtgtggcatctgggagccacagtgacccagccacctggctcaggctagttccaaattccaaaagattggcttgtaaaccttcgtctccctctcttttacccagaga

SEQ ID NO: 724062 - DNA, 120 bp, Artificial Sequence
  ENSG00000198053_29 (sequence is synthesized)
cagcacatacgtgtgcacacgcatgcacacacacattcagtattttaaaagaatgttttcttggtgccattttcattttattttattttttaattcttggagggggaaataagggaataa

SEQ ID NO: 724063 - DNA, 120 bp, Artificial Sequence
  ENSG00000198053_30 (sequence is synthesized)
ggccaaggaagatgtatagctttagctttagcctggcaacctggagaatccacataccttgtgtattgaaccccaggaaaaggaagaggtcgaaccaaccctgcggaaggagcatggttt

SEQ ID NO: 724064 - DNA, 120 bp, Artificial Sequence
  ENSG00000198053_31 (sequence is synthesized)
caggagtttattttaagactgctgggaaggaaacaggccccattttgtatatagttgcaacttaaactttttggcttgcaaaatatttttgtaataaagatttctgggtaataatgagtc

SEQ ID NO: 724065 - DNA, 120 bp, Artificial Sequence
  ENSG00000198053_32 (sequence is synthesized)
gcggccgctccaggcgcccgttccggagtcggggggaggcccagccgggaggggggaagggggggagccttagtcatttccccgctccagcctgctcccgcccgagcgcgcactcacggc

SEQ ID NO: 724066 - DNA, 120 bp, Artificial Sequence
  ENSG00000198053_33 (sequence is synthesized)
tccggcccgcacccacccccaagaggggccttcagctttggggctcagaggcacgacctcctggggagggttaaaaggcagacgcccccccgccccccgcgcccccgcgccccgactcct

SEQ ID NO: 724067 - DNA, 120 bp, Artificial Sequence
  ENSG00000198053_34 (sequence is synthesized)
tcgccgcctccagcctctcgccagtgggaagcggggagcagccgcgcggccggagtccggaggcgaggggaggtcggccgcaacttccccggtccaccttaagaggacgatgtagccagc

SEQ ID NO: 724068 - DNA, 120 bp, Artificial Sequence
  ENSG00000198053_35 (sequence is synthesized)
tcgcagcgctgaccttagaaaaacaagtttgcgcaaagtggagcggggacccggcctctgggcagccccggcggcgcttccagtgccttccagccctcgcgggcggcgcagccgcggccc

SEQ ID NO: 724069 - DNA, 120 bp, Artificial Sequence
  ENSG00000198053_36 (sequence is synthesized)
ggaccccagggtttggaaacaacctacagcatttgagcccctcacgtaggttttagagacgtacaatttttgtttgccctggctcagaaggagccggtgtaaggttgagataaaattcca

SEQ ID NO: 724070 - DNA, 120 bp, Artificial Sequence
  ENSG00000198053_37 (sequence is synthesized)
tatagacaactgagtttggatctcggctctgctgctttgtagctgtgggagttcaaacagcacctctttgagacttgggccccgcgtcggcacaatggggcaggaatagtccctgccagg

SEQ ID NO: 724071 - DNA, 120 bp, Artificial Sequence
  ENSG00000198053_38 (sequence is synthesized)
gtgactgtgtggattcaaggaggttggaagcactgagcccacgcttggcactgggtaggccatcactgaggcttgtgtctttccttcctgccctgaccctgcatagctgagtctcgtggc

SEQ ID NO: 724072 - DNA, 120 bp, Artificial Sequence
  ENSG00000198053_39 (sequence is synthesized)
ctctcaccactgatgggatctcggacacccggctcaccctcctcctggggcctcactttccttccccaccaaatgcagacatctaatgcttgtcctgtaatatccttgccagatgactga

SEQ ID NO: 724073 - DNA, 120 bp, Artificial Sequence
  ENSG00000198053_40 (sequence is synthesized)
tgtcaagtgctggtttatagtgggtgctcaataaatgttagtttcctttctatccctccattagatcattaatgatattagtgctaattatgtaataaagttaaggcataaatatgttaa

SEQ ID NO: 724074 - DNA, 80 bp, Artificial Sequence
  ENSG00000198055_0 (sequence is synthesized)
gaggccgcggcgcggtcactgcgagccgagccgagccgcgccgagccgcgccgatcgccatccggcctcggcactcgcgc

SEQ ID NO: 724075 - DNA, 120 bp, Artificial Sequence
  ENSG00000198055_1 (sequence is synthesized)
gcgatcccggccggcggcgcggcccggcgggccaggcggcgccacagcccatggagctcgagaacatcgtagcgaacacggtgctactcaaggcccgggaaggtggcggtggaaatcgca

SEQ ID NO: 724076 - DNA, 120 bp, Artificial Sequence
  ENSG00000198055_2 (sequence is synthesized)
aaggcaaaagcaagaaatggcggcagatgctccagttccctcacatcagccagtgcgaagagctgcggctcagcctcgagcgtgactatcacagcctgtgcgagcggcagcccattgggc

SEQ ID NO: 724077 - DNA, 120 bp, Artificial Sequence
  ENSG00000198055_3 (sequence is synthesized)
gcctgctgttccgagagttctgtgccacgaggccggagctgagccgctgcgtcgccttcctggatggggtggccgagtatgaagtgaccccggatgacaagcggaaggcatgtgggcggc

SEQ ID NO: 724078 - DNA, 120 bp, Artificial Sequence
  ENSG00000198055_4 (sequence is synthesized)
agctaacgcagaattttctgagccacacgggtcctgacctcatccctgaggtcccccggcagctggtgacgaactgcacccagcggctggagcagggtccctgcaaagaccttttccagg

SEQ ID NO: 724079 - DNA, 120 bp, Artificial Sequence
  ENSG00000198055_5 (sequence is synthesized)
aactcacccggctgacccacgagtacctgagcgtggccccttttgccgactacctcgacagcatctacttcaaccgtttcctgcagtggaagtggctggaaaggcagccagtgaccaaaa

SEQ ID NO: 724080 - DNA, 120 bp, Artificial Sequence
  ENSG00000198055_6 (sequence is synthesized)
acaccttcaggcaataccgagtcctgggcaaaggtggctttggggaggtgtgcgcctgccaggtgcgggccacaggtaagatgtatgcctgcaagaagctagagaaaaagcggatcaaga

SEQ ID NO: 724081 - DNA, 120 bp, Artificial Sequence
  ENSG00000198055_7 (sequence is synthesized)
agcggaaaggggaggccatggcgctgaacgagaagcagatcctggagaaagtgaacagtaggtttgtagtgagcttggcctacgcctatgagaccaaggacgcgctgtgcctggtgctga

SEQ ID NO: 724082 - DNA, 120 bp, Artificial Sequence
  ENSG00000198055_8 (sequence is synthesized)
cactgatgaacgggggcgacctcaagttccacatctaccacatgggccaggctggcttccccgaagcgcgggccgtcttctacgccgccgagatctgctgtggcctggaggacctgcacc

SEQ ID NO: 724083 - DNA, 120 bp, Artificial Sequence
  ENSG00000198055_9 (sequence is synthesized)
gggagcgcatcgtgtacagggacctgaagcccgagaacatcttgctggatgaccacggccacatccgcatctctgacctgggactagctgtgcatgtgcccgagggccagaccatcaaag

SEQ ID NO: 724084 - DNA, 120 bp, Artificial Sequence
  ENSG00000198055_10 (sequence is synthesized)
ggcgtgtgggcaccgtgggttacatggctccggaggtggtgaagaatgaacggtacacgttcagccctgactggtgggcgctcggctgcctcctgtacgagatgatcgcaggccagtcgc

SEQ ID NO: 724085 - DNA, 120 bp, Artificial Sequence
  ENSG00000198055_11 (sequence is synthesized)
ccttccagcagaggaagaagaagatcaagcgggaggaggtggagcggctggtgaaggaggtccccgaggagtattccgagcgcttttccccgcaggcccgctcactttgctcacagctcc

SEQ ID NO: 724086 - DNA, 120 bp, Artificial Sequence
  ENSG00000198055_12 (sequence is synthesized)
tgcaaggaccctgccgaacgcctggggtgtcgtgggggcagtgcccgcgaggtgaaggagcaccccctctttaagaagctgaacttcaagcggctgggagctggcatgctggagccgccg

SEQ ID NO: 724087 - DNA, 120 bp, Artificial Sequence
  ENSG00000198055_13 (sequence is synthesized)
ttcaagcctgacccccaggccatttactgcaaggatgttctggacattgaacagttctctacggtcaagggcgtggagctggagcctaccgaccaggacttctaccagaagtttgccaca

SEQ ID NO: 724088 - DNA, 120 bp, Artificial Sequence
  ENSG00000198055_14 (sequence is synthesized)
ggcagtgtgcccatcccctggcagaacgagatggtggagaccgagtgcttccaagagctgaatgtctttgggctggatggctcagttcccccagacctggactggaagggccagccacct

SEQ ID NO: 724089 - DNA, 120 bp, Artificial Sequence
  ENSG00000198055_15 (sequence is synthesized)
gcacctcctaaaaagggactgctgcagagactcttcagtcgccaagattgctgtggaaactgcagcgacagcgaggaagagctccccacccgcctctagcccccagcccgaggcccccac

SEQ ID NO: 724090 - DNA, 120 bp, Artificial Sequence
  ENSG00000198055_16 (sequence is synthesized)
cagcagttggcggtagcagctactccgagcgccgtttacagttttgcacagtgatcttccccattgtccactcaagtcgtggcctggggaacacagacggagctgtccccagtgtcctcc

SEQ ID NO: 724091 - DNA, 120 bp, Artificial Sequence
  ENSG00000198055_17 (sequence is synthesized)
gtccctcagcccctggcctggctgagtttggcagggcctgggccatccctgggacaaaggtgcgtcccttcagctcttctccgtggagctcggggctttctgtatttatgtatttgtacg

SEQ ID NO: 724092 - DNA, 120 bp, Artificial Sequence
  ENSG00000198055_18 (sequence is synthesized)
aatgtatatagcgaccagagcattcttaattcccgccgcagacctggcgcccccgccttggctcctgggggcagccagccctggctgggagagcgggagctggcagaggagccactgcca

SEQ ID NO: 724093 - DNA, 120 bp, Artificial Sequence
  ENSG00000198055_19 (sequence is synthesized)
aactcaaggctcctctggcccagcttggatggctgagggtggtcacacccctgagccttcagcactgtgctggccaccccggcctctgagtaagactcgtgcctccccctgctgccctgg

SEQ ID NO: 724094 - DNA, 120 bp, Artificial Sequence
  ENSG00000198055_20 (sequence is synthesized)
gctcaggctgctaccctctggggcccaaagctgtcccttctcagtgcttgtcagcgctgggtctggggcctctgtatgccctaggcctgtgccaaagtggccagagattgggctgcctgt

SEQ ID NO: 724095 - DNA, 120 bp, Artificial Sequence
  ENSG00000198055_21 (sequence is synthesized)
gatacccatcagcccactgccccggccggcccagataggtctgcctctgccttccagctcccacagcctggtccctgatactgggctctgtcctgcagacacctctttcagaaacgccca

SEQ ID NO: 724096 - DNA, 120 bp, Artificial Sequence
  ENSG00000198055_22 (sequence is synthesized)
agcccagcccctaggagggggtggggcatccctggtcaaccctcaaacattccggactcccctcataacaatagacacatgtgcccagcaataatccgccccttcctgtgtgcgcctgtg

SEQ ID NO: 724097 - DNA, 120 bp, Artificial Sequence
  ENSG00000198055_23 (sequence is synthesized)
gggtgcgtgcgcgcgcgtgtgtacctgtgtgggtgaaggggatagggcgaggctgtgcctgtgccccaggtcccagccctggcccttcccagactgtgatggccatcctggtcccagtgt

SEQ ID NO: 724098 - DNA, 120 bp, Artificial Sequence
  ENSG00000198055_24 (sequence is synthesized)
tagggtagcatgggattacagggccctgttttttccatatttaaagccaatttttattactcgttttgtccaacgtaagctgccacatgtctctgtgtgaatagtccgagcacaaacctg

SEQ ID NO: 724099 - DNA, 120 bp, Artificial Sequence
  ENSG00000198055_25 (sequence is synthesized)
tcagtcgccaaaggtgagcagtgtgggctccccgtgggttggccttgctgcctggcctcggggagccacgggcagcccttccatggcaaaggcaagatgtgggagaaagaagtctggtgc

SEQ ID NO: 724100 - DNA, 120 bp, Artificial Sequence
  ENSG00000198055_26 (sequence is synthesized)
agccagggctggggctcaggggctcttgtagtatcagccaggatgcttccagtgcaagtggcagaaaaaacaatctagtggcttagccacagaaataaagataattcacaaaaaggaaaa

SEQ ID NO: 724101 - DNA, 120 bp, Artificial Sequence
  ENSG00000198055_27 (sequence is synthesized)
gattggtcccgcccccgtacttctttgagcgagtccccagctgggggggcgggggaaaaaatgaagaggaagactaatgggaagacggcgcggggagcttctgcccggtgattggtcaaa

SEQ ID NO: 724102 - DNA, 120 bp, Artificial Sequence
  ENSG00000198055_28 (sequence is synthesized)
gtgtaaatcaggagacaatgcagggaggtggatggaggcctgggctctggagccagactcccggctgtgtgacactgagctagtcagttagcctctctgggcctcacagccccaaaacag

SEQ ID NO: 724103 - DNA, 120 bp, Artificial Sequence
  ENSG00000198055_29 (sequence is synthesized)
ctgtgcccacctgagggttgtggtgagggttctgaagaagattgtggctaccacactgcagagctggaagctgttgtgggggcccagggcctggtggtgtgggcacatgccccacccatg

SEQ ID NO: 724104 - DNA, 120 bp, Artificial Sequence
  ENSG00000198055_30 (sequence is synthesized)
ccgggttcctgtagccacacgacggggcgccgttagagcgccgggagcccggagccctggggcggaggggtcacccagccccacgcggcgcaccggcagaaggcgtggccgcccagtccc

SEQ ID NO: 724105 - DNA, 120 bp, Artificial Sequence
  ENSG00000198055_31 (sequence is synthesized)
agtgatcaaaggtctcctcccctacccctgcccctagcagttgtgcctaccctcgaactggtggccccagccggccacctggcagagcgtggtctcggagggtcgcgcggcgccgcttgg

SEQ ID NO: 724106 - DNA, 120 bp, Artificial Sequence
  ENSG00000198055_32 (sequence is synthesized)
caggcacaccggctgaacgtaaggcgacaggagcgcgcagctgccgtccgcatcctcctgaaggcgcaacagagctaacccgggcggagaggagcgtgaggcggggacgccggggcccca

SEQ ID NO: 724107 - DNA, 120 bp, Artificial Sequence
  ENSG00000198055_33 (sequence is synthesized)
cgagaacatcgtagcgaacacggtgctactcaaggcccgggaaggagcctgaagcaggagaagcacgtgtgtcctggaacgcagcaagggcgtgctggagcgtgcagagggaaggcctga

SEQ ID NO: 724108 - DNA, 120 bp, Artificial Sequence
  ENSG00000198055_34 (sequence is synthesized)
cccagtgtcctattgctcccacaggtggcggtggaaatcgcaaaggcaaaagcaagaaatggcggcagatgctccagttccctcacatcagccagtgcgaagagctgcggctcagcctcg

SEQ ID NO: 724109 - DNA, 120 bp, Artificial Sequence
  ENSG00000198056_0 (sequence is synthesized)
cttaccgtggcgagttccgcgctcaatggagacgtttgaccccaccgagctgcccgagctgcttaaactttattaccggaggctctttccctactctcagtactatcgctggctcaacta

SEQ ID NO: 724110 - DNA, 120 bp, Artificial Sequence
  ENSG00000198056_1 (sequence is synthesized)
cggtggagtgataaagaattactttcaacaccgtgaattttcattcacattgaaagatgatatttacattcgctaccaatccttcaacaaccagagtgatctggaaaaggagatgcagaa

SEQ ID NO: 724111 - DNA, 120 bp, Artificial Sequence
  ENSG00000198056_2 (sequence is synthesized)
aatgaatccatacaagattgatataggcgcagtatattctcacagacccaatcaacacaatacagtgaagctgggagctttccaggctcaggaaaaagaactggtatttgacattgacat

SEQ ID NO: 724112 - DNA, 120 bp, Artificial Sequence
  ENSG00000198056_3 (sequence is synthesized)
gacagactatgacgatgtgaggagatgttgtagttctgcagacatatgtcctaagtgctggaccctcatgacaatggccatacgcatcattgacagagcattgaaggaggactttggatt

SEQ ID NO: 724113 - DNA, 120 bp, Artificial Sequence
  ENSG00000198056_4 (sequence is synthesized)
taagcatcgtctctgggtatattctggaaggagaggtgttcattgttgggtctgtgatgaatcagttagaaaactgtcttctgcagtacgttctgggatagttgagtatttgagccttgt

SEQ ID NO: 724114 - DNA, 120 bp, Artificial Sequence
  ENSG00000198056_5 (sequence is synthesized)
gccttggttaatcaagatattctcgaaaataaagaaagctgggataagattttagcccttgttcctgaaacaattcatgatgaacttcaacaaagcttccaaaagtctcacaattcactt

SEQ ID NO: 724115 - DNA, 120 bp, Artificial Sequence
  ENSG00000198056_6 (sequence is synthesized)
cagcgttgggagcacttgaagaaagtagccagcagatatcagaataacatcaaaaatgacaaatatggaccctggctggagtgggagattatgctccagtactgttttccacggctggat

SEQ ID NO: 724116 - DNA, 120 bp, Artificial Sequence
  ENSG00000198056_7 (sequence is synthesized)
atcaatgtcagcaaaggaatcaatcatctactgaagagcccttttagtgttcatcctaaaacaggtcgcatatctgtgcctattgatttgcagaaagtggaccagtttgatccatttact

SEQ ID NO: 724117 - DNA, 120 bp, Artificial Sequence
  ENSG00000198056_8 (sequence is synthesized)
gttccgaccataagcttcatctgccgtgaattggatgccatttccactaatgaagaggaaaaagaggagaatgaagctgaatctgatgtcaaacatagaaccagagattataagaagacc

SEQ ID NO: 724118 - DNA, 120 bp, Artificial Sequence
  ENSG00000198056_9 (sequence is synthesized)
agtctagcaccttatgtgaaagtttttgaacattttcttgaaaatctggataaatcccgaaaaggagaacttcttaagaagagtgatttacaaaaagatttctgaagacagagctcctca

SEQ ID NO: 724119 - DNA, 120 bp, Artificial Sequence
  ENSG00000198056_10 (sequence is synthesized)
aaccattgtggatatcttctgccttcaaccacagatcaaatacttcaagagccatttaataaatatggcagaactatatatgtgtcttaaacctcaaagtaaattttccttgagaaataa

SEQ ID NO: 724120 - DNA, 120 bp, Artificial Sequence
  ENSG00000198056_11 (sequence is synthesized)
acgttaaaaagaaagttcacctaagtgaaaaaattcacccttttatcaggtctgttggaaaagtctccaagcactttaaggtgtctgatttaccggcatgtgcctttagagttaccttgc

SEQ ID NO: 724121 - DNA, 120 bp, Artificial Sequence
  ENSG00000198056_12 (sequence is synthesized)
tatcaattttcactgctgggtagcattttataataataatagctatggttaattgagtgcctattttatgctgcagtattcctaaaaggtgctttacagatgttctcattgctcttcaaa

SEQ ID NO: 724122 - DNA, 120 bp, Artificial Sequence
  ENSG00000198056_13 (sequence is synthesized)
aaaaccccacaagagacttgatggtatctccatttatagataaggaaaatgagttttagagagattttataatgagcttggcatcacacgacaagttagttgttaaatttaggattcatg

SEQ ID NO: 724123 - DNA, 120 bp, Artificial Sequence
  ENSG00000198056_14 (sequence is synthesized)
ccctggtctgcctgactgtaaagcctactccaatgctttttccactgaattcactacttctctaggatagtggaaaaagccttatattaggagtaaaaattcctattctgccacttacta

SEQ ID NO: 724124 - DNA, 120 bp, Artificial Sequence
  ENSG00000198056_15 (sequence is synthesized)
tgatcttgataaaatattgacaaaatattgctgcctccatttccttatctctatgatggggagaacagcatgcactctacctgtctcacagttgtatcaatgattaagtgaaagagtaaa

SEQ ID NO: 724125 - DNA, 120 bp, Artificial Sequence
  ENSG00000198056_16 (sequence is synthesized)
tctgctttagttctgcagacatatgtcctaagtgctggaccctcatgacaatggccatacgcatcattgacagagcattgaaggaggactttggatttaagcatcgtctctgggtatatt

SEQ ID NO: 724126 - DNA, 120 bp, Artificial Sequence
  ENSG00000198056_17 (sequence is synthesized)
aatactttcttccttgcagctgaatttattagtgcgaatcgaggagagaggggtggcattacatatttaaaatatttatgcatctgtttcatcttttgtaccgttccctagcaaatacgg

SEQ ID NO: 724127 - DNA, 120 bp, Artificial Sequence
  ENSG00000198056_18 (sequence is synthesized)
aatggtaactgctttcaaattagggactaggtcatgtggattttgttttgtttttcttttacatctaccacggtgttgagcatagggggctcattaaaaacatcttctcgggccgagtgc

SEQ ID NO: 724128 - DNA, 120 bp, Artificial Sequence
  ENSG00000198056_19 (sequence is synthesized)
agaaaatctataaacataataaaaaaatactttgaagaatatgccttggttaatcaagatattctcgaaaataaagaaagctgggataagattttagcccttgttcctgaaaaaagcttc

SEQ ID NO: 724129 - DNA, 61 bp, Artificial Sequence
  ENSG00000198056_20 (sequence is synthesized)
tcaatgtcagcaaaggaatcaatcatctactgaagagcccttttagtgttcatcctaaagc

SEQ ID NO: 724130 - DNA, 120 bp, Artificial Sequence
  ENSG00000198060_0 (sequence is synthesized)
acctcacaaaggtagctcctccgccggcagcaactcggcgcccgcggtccatggaccggaacctcgggccgacggacgggaacccgggccgcgatcgccgcctccccgcctcaggctcct

SEQ ID NO: 724131 - DNA, 120 bp, Artificial Sequence
  ENSG00000198060_1 (sequence is synthesized)
tcctcctcctcgctctccgccgcctccgccggactcccgcaggccctgcaccgccgccgccaggctagcggagctgccccgggaagctgggtgacgggttcgcggctgccgccggactgc

SEQ ID NO: 724132 - DNA, 120 bp, Artificial Sequence
  ENSG00000198060_2 (sequence is synthesized)
tactccgccgcctctcagtgctattgtccctgggcctggccttgagcgggtccactggggaaggccgtgtgcgccggctccgcggaagatgccggaccaagccctacagcagatgctgga

SEQ ID NO: 724133 - DNA, 120 bp, Artificial Sequence
  ENSG00000198060_3 (sequence is synthesized)
cagaagttgctgggtttgttttgctactgatgaagatgatagaacagctgaatgggtgagaccatgcaggtgcagaggatctacaaaatgggttcaccaggcctgtctacaacgctgggt

SEQ ID NO: 724134 - DNA, 120 bp, Artificial Sequence
  ENSG00000198060_4 (sequence is synthesized)
ggatgaaaagcaaagaggaaacagtacagccagagtggcatgtcctcagtgcaatgctgaatacctaatagtttttccaaaattgggtccagtggtttacgtcttggatcttgcagatag

SEQ ID NO: 724135 - DNA, 120 bp, Artificial Sequence
  ENSG00000198060_5 (sequence is synthesized)
actgatctcaaaagcctgtccatttgctgcagcaggaataatggtcggctctatctattggacagctgtgacttatggagcagtgacagtgatgcaggttgtaggtcataaagaaggtct

SEQ ID NO: 724136 - DNA, 120 bp, Artificial Sequence
  ENSG00000198060_6 (sequence is synthesized)
ggatgttatggagagagctgatcctttattccttttaattggacttcctactattcctgtcatgctgatattaggcaagatgattcgctgggaggactatgtgcttagactgtggcgcaa

SEQ ID NO: 724137 - DNA, 120 bp, Artificial Sequence
  ENSG00000198060_7 (sequence is synthesized)
atactcgaataaactacaaattttaaatagtatatttccagggataggttgtcctgttcctcgaattccagctgaggccaatcctttagcagatcatgtctctgctactcgaatcttgtg

SEQ ID NO: 724138 - DNA, 120 bp, Artificial Sequence
  ENSG00000198060_8 (sequence is synthesized)
tggagcccttgtctttcctactattgctacaatagttggtaaattgatgttcagtagtgttaactctaatttacaaaggacaatcttgggtggaattgcgtttgttgccataaaaggagc

SEQ ID NO: 724139 - DNA, 120 bp, Artificial Sequence
  ENSG00000198060_9 (sequence is synthesized)
atttaaagtttacttcaaacagcagcaatatttacgacaggcacaccgcaaaattctgaattatccagaacaagaagaagcataaaactgacttctggttgttctgcagttctctcatcc

SEQ ID NO: 724140 - DNA, 120 bp, Artificial Sequence
  ENSG00000198060_10 (sequence is synthesized)
ttatgaatctgttgtgttgttttgattccatcattaatgcacttgtggagacttgtgataagctgctgctcctatattttttaagaaatataataaagcacttagggcaggggaaatcat

SEQ ID NO: 724141 - DNA, 120 bp, Artificial Sequence
  ENSG00000198060_11 (sequence is synthesized)
ctcggtaatcatggaacctaaggatgtgatttgttttcattgtttgtatgtactacttttatggcagtcatatgaaccattatcttagcatggtaaacctgggttttgttcatattttct

SEQ ID NO: 724142 - DNA, 120 bp, Artificial Sequence
  ENSG00000198060_12 (sequence is synthesized)
ccagacagaaatgcaaagatcaaactgtgcaaatattaaaaaaatgcacatgctgttttattcaaatgcctcttttgtacatgttcatgtttagtgttttctcagaatcagcaactcaag

SEQ ID NO: 724143 - DNA, 120 bp, Artificial Sequence
  ENSG00000198060_13 (sequence is synthesized)
caaggtactatgaggatttttctcactgacataatttgattacatactaaataagaggatatgttaatatgaggaaatgtaaattaaattagttataaataaataaccaaaaatgtatgt

SEQ ID NO: 724144 - DNA, 120 bp, Artificial Sequence
  ENSG00000198060_14 (sequence is synthesized)
attcaaatgattatctgaacaaatgagattttgtggtgttttctttaacccatgtgatgtcctccaaaatgtgtagggtaaaaattcacagggcttccagatcactttttcaatattaaa

SEQ ID NO: 724145 - DNA, 120 bp, Artificial Sequence
  ENSG00000198060_15 (sequence is synthesized)
aaaattcacagggcttccagatcactttttcaatattaaattttatttacataatgttgacatctcatacttcatgaagtaattttgactcatgcagtcgtgtgtgtgtgtgtgtgtgtg

SEQ ID NO: 724146 - DNA, 120 bp, Artificial Sequence
  ENSG00000198060_16 (sequence is synthesized)
atgatttgcaaaaataaaaataaagttattttactctcctcttgcattgattcagttattgagatattcgttgatcacctcctatttcccaggcactgtgcagagtgctgtaggacatag

SEQ ID NO: 724147 - DNA, 120 bp, Artificial Sequence
  ENSG00000198060_17 (sequence is synthesized)
tggtgaacaagacagacttggtccaagctcttacagagttgacagtctagtttcagcacatagaaaaccagcagtgaataaaccaaggtgaggccttgagctctttgtttttatattaat

SEQ ID NO: 724148 - DNA, 120 bp, Artificial Sequence
  ENSG00000198060_18 (sequence is synthesized)
gaggagaaaagtatgaaaacaagaagtcttaagtaaatattgaggtcattgtttttggcttaagtttattatagaaaatcaacactaatgtttttagattttaattgtcctattgatgag

SEQ ID NO: 724149 - DNA, 120 bp, Artificial Sequence
  ENSG00000198060_19 (sequence is synthesized)
gctagcaccttaatcactgtttagttttgtattcatttttaaaagcaattattgaagccattttcaatagattggccattttaatgttcagcaacctgaatggttatttttgttaattaa

SEQ ID NO: 724150 - DNA, 120 bp, Artificial Sequence
  ENSG00000198060_20 (sequence is synthesized)
aattaaatttttaagagatattttcaaaaccctatttattttcttgttcacagtaatgcatgtcaataataaatgtttccccttactgataagcggccactttaggagtgtagcaaatat

SEQ ID NO: 724151 - DNA, 120 bp, Artificial Sequence
  ENSG00000198060_21 (sequence is synthesized)
agattgagctatgttagtttgcaataatatatgttaactttagtaattaaagactggtttctatagtatgaatgtcttaattttgagttatatgatgtttatttgaatgactgttgaaca

SEQ ID NO: 724152 - DNA, 120 bp, Artificial Sequence
  ENSG00000198060_22 (sequence is synthesized)
ttcaaatttgtattatttggagatgaagatttgactaacagtgagccttattaagaacactactacagttctgaaggggaaatataacatctatggttatatattttaaaaacttagatt

SEQ ID NO: 724153 - DNA, 120 bp, Artificial Sequence
  ENSG00000198060_23 (sequence is synthesized)
ataggctgtaattataaaatatattggcttttgttttcaatgtgaaagatacattaaatggacacatatcttgcaaaattttgttgtatagaacagtttttaggcagcctttactaaagt

SEQ ID NO: 724154 - DNA, 120 bp, Artificial Sequence
  ENSG00000198060_24 (sequence is synthesized)
tatgcaaacacacagttccccatttactacattaatgcccttgacagggagtagctgcttggttttataggtattagggctcatgaaggccggggaacaactctaatccttttggggcag

SEQ ID NO: 724155 - DNA, 120 bp, Artificial Sequence
  ENSG00000198060_25 (sequence is synthesized)
gagggagggtttttttagggttgcggggagggaactgcaagtgcctgaggaccagagtggcctctagccccgaattgaacacttttaaacctaaagagccttattattattagctcgaga

SEQ ID NO: 724156 - DNA, 120 bp, Artificial Sequence
  ENSG00000198060_26 (sequence is synthesized)
aataccacatgccagtcttcccaggaaggtgacctgcctgaccatgaagcaacaaaagagcataggcagacttaaagttggatagacctgggttcaaatcatagttcagctttcaataac

SEQ ID NO: 724157 - DNA, 120 bp, Artificial Sequence
  ENSG00000198060_27 (sequence is synthesized)
tgtatgtatgattttggctaaaggatttgactttctctcaactgcagttttcttaatctttgaaatgcaaataatgtttatctcagaagactatttctaggattaactgagagattaaag

SEQ ID NO: 724158 - DNA, 120 bp, Artificial Sequence
  ENSG00000198060_28 (sequence is synthesized)
gaacagcagcacttaggctcaaaatcgcccctacaaagcagtagttgtttcttaattgctaagtaatctgtttgcactctaggaaaagtaaatggagaggtaaaagaaaggcattgggga

SEQ ID NO: 724159 - DNA, 120 bp, Artificial Sequence
  ENSG00000198060_29 (sequence is synthesized)
caaatgaaagagatgatgtagatttttcggatgggtgggtatattttattttccagtttattttcatatttctttactgtgttatttctggaaactttaatgttttaaacctcttttata

SEQ ID NO: 724160 - DNA, 120 bp, Artificial Sequence
  ENSG00000198060_30 (sequence is synthesized)
aaattcaatgacgactactagaattcttttcaaaagttaacttatctccaaagtggctgaaaatattgtttaccattacatgattatgaaatgactgtgaagaatataaaattaaactta

SEQ ID NO: 724161 - DNA, 120 bp, Artificial Sequence
  ENSG00000198060_31 (sequence is synthesized)
gtgacttaattagtcactgccttgctaactttgctgtaatttttttaaacgtcttgtttttaatatagcaaactatctcaatactggctggattaggttaaataaagaatttttatgttc

SEQ ID NO: 724162 - DNA, 120 bp, Artificial Sequence
  ENSG00000198060_32 (sequence is synthesized)
gcctcattttacccagctcctattcaatcaagacggagttgctctggttcacatgcctctaatactgctatttcaactgaaagcctaactcctgataaaagttgctgggtttgttttgct

SEQ ID NO: 724163 - DNA, 120 bp, Artificial Sequence
  ENSG00000198060_33 (sequence is synthesized)
ccccctgggagttttcagtctaagatgatgctgacatggacagacataaaggatattgagacaactgaacaaacattgaacaagaacataaagtactaacattatgcacaagcaaagggg

SEQ ID NO: 724164 - DNA, 120 bp, Artificial Sequence
  ENSG00000198060_34 (sequence is synthesized)
ctatgcattaagcctctatttgagcctcactatcattcaatagcttgagtggaaataaaaagaggagaaaccactgcagcagttctggccttttggaactatgttgtaggtgctttctct

SEQ ID NO: 724165 - DNA, 120 bp, Artificial Sequence
  ENSG00000198060_35 (sequence is synthesized)
cctggcatatgcatgaatcatcacacctgtccctcttgccagtgggattacagtactttacgatcagaccacctggttcaaatcccatcacagaaattgtcttgctgtgaaatctaaatc

SEQ ID NO: 724166 - DNA, 120 bp, Artificial Sequence
  ENSG00000198060_36 (sequence is synthesized)
aaatgtctggactttttgttcctgtagtatggtgatggtaataatcaggattattgtgaggattgtataagtactagcacatagtaagcactcatgttgtttgctattattgttactccc

SEQ ID NO: 724167 - DNA, 120 bp, Artificial Sequence
  ENSG00000198062_0 (sequence is synthesized)
ggtagacgcgatctgctggctactaccggccttccctggctgttaaaagcagatggtggctgaggctggttcaatgccggctgcctcctctgtgaagaagccatttggtctcagaagcaa

SEQ ID NO: 724168 - DNA, 90 bp, Artificial Sequence
  ENSG00000198062_1 (sequence is synthesized)
ctgcctcctctgtgaagaagccatttggtctcagaagcaagatgggcaagtggtgccgccactgcttcgcctggacttctggagaccacg

SEQ ID NO: 724169 - DNA, 90 bp, Artificial Sequence
  ENSG00000198062_2 (sequence is synthesized)
caagatgggcaagtggtgctgccactgcttcccctggacttctggagaccacgacgattctgctatgaagacactcaggagcaagatggg

SEQ ID NO: 724170 - DNA, 78 bp, Artificial Sequence
  ENSG00000198062_3 (sequence is synthesized)
gggggagcggcaagagcaacgtgggcacttctggagaccacgacgactctcactgcttcccctgctgcagggggagcg

SEQ ID NO: 724171 - DNA, 85 bp, Artificial Sequence
  ENSG00000198062_4 (sequence is synthesized)
ggtgctgacaaagtgggcccttggggagactacgacgacagcgctttcatggagccgaggtaccacgtccgtcgagaagatctgg

SEQ ID NO: 724172 - DNA, 120 bp, Artificial Sequence
  ENSG00000198062_5 (sequence is synthesized)
ccagaaaggatctcatcgtcatgctcaaggacactgacatgaacaagaaggacaagcaaaagaggactgctctacatctggcctctgccaatggaaattcagaagtagtaaaactcctgc

SEQ ID NO: 724173 - DNA, 120 bp, Artificial Sequence
  ENSG00000198062_6 (sequence is synthesized)
agaagtagtaaaactcctgctggacagacgatgtcaacttaatatccttgacaacaaaaagaggacagctctgacaaaggccgtacaatgccaggaagatgaatgtgcgttaatgttgct

SEQ ID NO: 724174 - DNA, 120 bp, Artificial Sequence
  ENSG00000198062_7 (sequence is synthesized)
acaatgccaggaagatgaatgtgcgttaatgttgctggaacatggcactgatccgaatattccagatgagtatggaaataccgctctacactatgctatctacaatgaagataaattaat

SEQ ID NO: 724175 - DNA, 120 bp, Artificial Sequence
  ENSG00000198062_8 (sequence is synthesized)
tttaaatgcactggatagatatggaagaactgctctcatacttgctgtatgttgtggatcggcaagtatagtcagccttctacttgagcaaaacattgatgtatcttctcaagatctatc

SEQ ID NO: 724176 - DNA, 84 bp, Artificial Sequence
  ENSG00000198062_9 (sequence is synthesized)
tcataatgtaatttgccagttactttctgactacaaagaaaaacagatactaaaagtctcttctgaaaacagcaatccagaaca

SEQ ID NO: 724177 - DNA, 90 bp, Artificial Sequence
  ENSG00000198062_10 (sequence is synthesized)
gagggtggtgatagaaaggttgaagaagaaatgaagaagcacggaagtactcatatgggattcccagaaaacctgactaacggtgccact

SEQ ID NO: 724178 - DNA, 120 bp, Artificial Sequence
  ENSG00000198062_11 (sequence is synthesized)
tcatatgggattcccagaaaacctgactaacggtgccactgctgacaatggtgatgatggattaattccaccaaggaaaagcagaacacctgaaagccagcaatttcctgacactgagaa

SEQ ID NO: 724179 - DNA, 120 bp, Artificial Sequence
  ENSG00000198062_12 (sequence is synthesized)
tgaacagtatcacagtgatgaacaaaatgatactcagaagcaactttctgaagaacagaacactggaatattacaagatgagattctgattcatgaagaaaagcagatagaagtggctga

SEQ ID NO: 724180 - DNA, 120 bp, Artificial Sequence
  ENSG00000198062_13 (sequence is synthesized)
aaatgaattctgagctttctcttagttataagaaagaaaaagacctcttgcatgaaaatagtacgttgcaggaagaaattgtcatgctaagactggaactagacataatgaaacatcaga

SEQ ID NO: 724181 - DNA, 120 bp, Artificial Sequence
  ENSG00000198062_14 (sequence is synthesized)
gccagctaagagaaaagaaatatttggaggaaattgaaagtgtggaaaaaaagaatgataatcttttaaagggtctacaactgaatgagctcaccatggatgatgatactgccgtgctcg

SEQ ID NO: 724182 - DNA, 120 bp, Artificial Sequence
  ENSG00000198062_15 (sequence is synthesized)
tcattgacaacggctctggcatgtgcaaggccggctttgcaggtgacgatgccccccgggctgtcttcccttccatcgtggggtgccccaggcaccagaacatgatggggggcatgcgtc

SEQ ID NO: 724183 - DNA, 65 bp, Artificial Sequence
  ENSG00000198062_16 (sequence is synthesized)
cagctcactgcaacctcgacctcccgaagctcagatggtcctccaacctcaacctcagagagatt

SEQ ID NO: 724184 - DNA, 83 bp, Artificial Sequence
  ENSG00000198064_0 (sequence is synthesized)
actctggctgaccatcatcatcgtgggactgactttggtggaagtccttggttacatgtcattattgcgtttccgacaagtta

SEQ ID NO: 724185 - DNA, 64 bp, Artificial Sequence
  ENSG00000198064_1 (sequence is synthesized)
ctccactctcagcagatgataatatcaagatacctgctgagcgtctgcggattccgcttccacc

SEQ ID NO: 724186 - DNA, 120 bp, Artificial Sequence
  ENSG00000198064_2 (sequence is synthesized)
aatctcaagacacctcccttagctactcaggaggctgaggcagaaaaaccacgcaaacccaagaggcagagggcggctgagatggaaccacctcccgaacccaagaggcggagggtcggt

SEQ ID NO: 724187 - DNA, 120 bp, Artificial Sequence
  ENSG00000198064_3 (sequence is synthesized)
cgaacccaagaggcggaggttgagctgagaagaggccagtgcactcaagcctgagcaataagaataaaaccgagtagaacaaaataaaaaattcaaaaaacaaaacaaaacccacactcc

SEQ ID NO: 724188 - DNA, 89 bp, Artificial Sequence; identical to SEQ ID NO: 558026
  ENSG00000198064_4 (sequence is synthesized)

SEQ ID NO: 724189 - DNA, 120 bp, Artificial Sequence
  ENSG00000198064_5 (sequence is synthesized)
gctaaaaatatggtggacctggcattacagctattacaaatctcctaagatgtctcgggtagtgtattagttacttttcatactgctatgaagaaatactggaaactgggtaatttataa

SEQ ID NO: 724190 - DNA, 90 bp, Artificial Sequence
  ENSG00000198064_6 (sequence is synthesized)
aggctggagaggcctcagaatcatggtggaaggcaaggagcaaaaaggtatgatctcgtgaaaccttgagagaaactgaatgacgaatga

SEQ ID NO: 724191 - DNA, 64 bp, Artificial Sequence
  ENSG00000198074_0 (sequence is synthesized)
cctgagctcaggagtttgagaccagcctgtctctactaacaatataaaaattagctgggagtca

SEQ ID NO: 724192 - DNA, 120 bp, Artificial Sequence
  ENSG00000198074_1 (sequence is synthesized)
ctgcactctagccttggcaacagtgcaagactgtctcaaaaacagcaacagagagcaggacgtgagacttctacctgctcactcagaatcatttctgcaccaaccatggccacgtttgtg

SEQ ID NO: 724193 - DNA, 120 bp, Artificial Sequence
  ENSG00000198074_2 (sequence is synthesized)
gagctcagtaccaaagccaagatgcccattgtgggcctgggcacttggaagtctcctcttggcaaagtgaaagaagcagtgaaggtggccattgatgcaggatatcggcacattgactgt

SEQ ID NO: 724194 - DNA, 120 bp, Artificial Sequence
  ENSG00000198074_3 (sequence is synthesized)
gcctatgtctatcagaatgaacatgaagtgggggaagccatccaagagaagatccaagagaaggctgtgaagcgggaggacctgttcatcgtcagcaagttgtggcccactttctttgag

SEQ ID NO: 724195 - DNA, 120 bp, Artificial Sequence
  ENSG00000198074_4 (sequence is synthesized)
agaccccttgtgaggaaagcctttgagaagaccctcaaggacctgaagctgagctatctggacgtctatcttattcactggccacagggattcaagtctggggatgaccttttccccaaa

SEQ ID NO: 724196 - DNA, 120 bp, Artificial Sequence
  ENSG00000198074_5 (sequence is synthesized)
ggaggagctggtggatgaggggctggtgaaagcccttggggtctccaatttcagccacttccagatcgagaagctcttgaacaaacctggactgaaatataaaccagtgactaaccaggt

SEQ ID NO: 724197 - DNA, 120 bp, Artificial Sequence
  ENSG00000198074_6 (sequence is synthesized)
tgagtgtcacccatacctcacacaggagaaactgatccagtactgccactccaagggcatcaccgttacggcctacagccccctgggctctccggatagaccttgggccaagccagaaga

SEQ ID NO: 724198 - DNA, 120 bp, Artificial Sequence
  ENSG00000198074_7 (sequence is synthesized)
cccttccctgctggaggatcccaagattaaggagattgctgcaaagcacaaaaaaaccgcagcccaggttctgatccgtttccatatccagaggaatgtgattgtcatccccaagtctgt

SEQ ID NO: 724199 - DNA, 120 bp, Artificial Sequence
  ENSG00000198074_8 (sequence is synthesized)
gacaccagcacgcattgttgagaacattcaggtctttgactttaaattgagtgatgaggagatggcaaccatactcagcttcaacagaaactggagggcctgtaacgtgttgcaatcctc

SEQ ID NO: 724200 - DNA, 120 bp, Artificial Sequence
  ENSG00000198074_9 (sequence is synthesized)
tcatttggaagactatcccttcaatgcagaatattgaggttgaatctcctggtgagattatacaggagattctctttcttcgctgaagtgtgactacctccactcatgtcccattttagc

SEQ ID NO: 724201 - DNA, 120 bp, Artificial Sequence
  ENSG00000198074_10 (sequence is synthesized)
caagcttatttaagatcacagtgaacttagtcctgttatagacgagaatcgaggtgctgttttagacatttatttctgtatgttcaactaggatcagaatatcacagaaaagcatggctt

SEQ ID NO: 724202 - DNA, 120 bp, Artificial Sequence
  ENSG00000198074_11 (sequence is synthesized)
gaataaggaaatgacaattttttccacttatctgatcagaacaaatgtttattaagcatcagaaactctgccaacactgaggatgtaaagatcaataaaaaaaataataatcataaccaa

SEQ ID NO: 724203 - DNA, 120 bp, Artificial Sequence
  ENSG00000198074_12 (sequence is synthesized)
cccctgacaactgcgggctccacttccagatcgagaagctcttgaacaaacctggactgaaatataaaccagtgactaaccaggttgagtgtcacccatacctcacacaggagaaactga

SEQ ID NO: 724204 - DNA, 120 bp, Artificial Sequence
  ENSG00000198074_13 (sequence is synthesized)
tcccaagattaaggagattgctgcaaagcacaaaaaaaccgcagcccaggaggggtctttggagctgagtggaagcctgatgtcccctttccgcataggttctgatccgtttccatatcc

SEQ ID NO: 724205 - DNA, 120 bp, Artificial Sequence
  ENSG00000198075_0 (sequence is synthesized)
gccagtggacaaattcataaacaagagctccagttccctggaacctgagtcgggagacctgcagctcactttctccctgtttgctggccagcagggtttgtggccgcctctgctgtgacg

SEQ ID NO: 724206 - DNA, 120 bp, Artificial Sequence
  ENSG00000198075_1 (sequence is synthesized)
ccacagcctggtgaggagggggctgcagttcctcaggaaactgccagtggacaaagtcataaacaagagttccagttccctggaacctgagtcgggaggcctgcaactcactttctccct

SEQ ID NO: 724207 - DNA, 120 bp, Artificial Sequence
  ENSG00000198075_2 (sequence is synthesized)
gtttgctggcccagacaggcctgtgctagagggctggatagtgtggtagtgtggtggatagagtgctgcctctatccacaacgcagccatatgctgactgaagataactttgtgtctgga

SEQ ID NO: 724208 - DNA, 120 bp, Artificial Sequence
  ENSG00000198075_3 (sequence is synthesized)
agagccctctgatttcttacactaatggccttacacgacatggaggattttacatttgatggaacaaagcgcttaagtgtcaactacgtgaagggaattcttcaaccgacagacacctgt

SEQ ID NO: 724209 - DNA, 120 bp, Artificial Sequence
  ENSG00000198075_4 (sequence is synthesized)
gacatctgggataagatctggaacttccaagccaagcctgatgacctgcttatttctacctatcctaaagcaggaacaacatggactcaggagatagtggaattaatacaaaatgaaggt

SEQ ID NO: 724210 - DNA, 120 bp, Artificial Sequence
  ENSG00000198075_5 (sequence is synthesized)
gatgtggagaaaagtaaacgggcaccgactcatcaacgatttcctttcctcgaaatgaaaatcccatccttaggatctggtttggaacaagctcatgcaatgccctcaccacggatcctg

SEQ ID NO: 724211 - DNA, 120 bp, Artificial Sequence
  ENSG00000198075_6 (sequence is synthesized)
aaaacacatcttccctttcacttgctgccaccatccttgctagagaaaaactgtaagataatctatgtagcaagaaatcccaaggacaacatggtgtcctattaccatttccaaagaatg

SEQ ID NO: 724212 - DNA, 120 bp, Artificial Sequence
  ENSG00000198075_7 (sequence is synthesized)
aataaagctcttcctgctccaggaacatgggaagagtattttgagacttttctggctgggaaagtgtgctggggctcctggcatgaacatgtgaaaggatggtgggaagccaaagacaaa

SEQ ID NO: 724213 - DNA, 120 bp, Artificial Sequence
  ENSG00000198075_8 (sequence is synthesized)
caccgtattctctatctcttctatgaggacatgaagaagaacccaaagcatgaaattcagaagctggcagaatttattgggaagaaattagatgacaaagttctagataaaattgtccat

SEQ ID NO: 724214 - DNA, 120 bp, Artificial Sequence
  ENSG00000198075_9 (sequence is synthesized)
tacacttcgtttgatgtcatgaaacagaatccaatggcaaactattcatcgattcctgctgaaatcatggaccactccatttctccattcatgagaaaaggggcagtgggagactggaag

SEQ ID NO: 724215 - DNA, 120 bp, Artificial Sequence
  ENSG00000198075_10 (sequence is synthesized)
aaacacttcaccgtggctcagaatgagagatttgatgaagattacaagaagaaaatgactgataccagactaactttccacttccagttctagtaaggaagaaaaactgaaaatgtttta

SEQ ID NO: 724216 - DNA, 120 bp, Artificial Sequence
  ENSG00000198075_11 (sequence is synthesized)
tttgctcttattcactctactaaaaaattattttaaaaggctggaggcaaggtggtgacaggcagcagggtggcgacatggagagagggaagctcaataaatcactaggtacaatcctgg

SEQ ID NO: 724217 - DNA, 120 bp, Artificial Sequence
  ENSG00000198075_12 (sequence is synthesized)
tatcattgccaattatcatcatatttacattttctacaatcatgtgcttattaacatattggaaatgcttcagtcctcacatgataatacactaacattttcagattaagttttggttca

SEQ ID NO: 724218 - DNA, 75 bp, Artificial Sequence
  ENSG00000198075_13 (sequence is synthesized)
gggttcacgctaccaccactcccggctaatttttttttttgtattcttagtagagacgaggtttcaccgtgttag

SEQ ID NO: 724219 - DNA, 88 bp, Artificial Sequence
  ENSG00000198075_14 (sequence is synthesized)
gttcaagttaatttttaaatgcatcactaacgtgtaaatagtgactgtttgttccagcaattttttggtggtgaagtaaccatcaagt

SEQ ID NO: 724220 - DNA, 120 bp, Artificial Sequence
  ENSG00000198075_15 (sequence is synthesized)
ttgttccagcaattttttggtggtgaagtaaccatcaagtgattcaggttcctcttggaaccctccaagaaaaacttcagggtcctagtgtaatacatctgtccccatctctcactggcg

SEQ ID NO: 724221 - DNA, 120 bp, Artificial Sequence
  ENSG00000198075_16 (sequence is synthesized)
tatatatttaactggactcactctcccaccctcagctaatgctacaatcctggagtcacctcttgactcatctttcccattgccaccacaatccattctaatatgtcagaaaatctgtca

SEQ ID NO: 724222 - DNA, 120 bp, Artificial Sequence
  ENSG00000198075_17 (sequence is synthesized)
gttttaatctacgaaatctcttaaaatatttccgtctaaccattccttgttttccttctatttctatagccacccttctggttcacaaaccttttacttcttgcctcaactagtgtaata

SEQ ID NO: 724223 - DNA, 120 bp, Artificial Sequence
  ENSG00000198075_18 (sequence is synthesized)
gcttcctaacccatttctctctatttcagacagatggcaaggttattttccttaaaaagactcttattatgttgttccttagctcaaaatccttcaatggctgaactttcactgcctgaa

SEQ ID NO: 724224 - DNA, 120 bp, Artificial Sequence
  ENSG00000198075_19 (sequence is synthesized)
agataaatcccaagattttagccatgcattcaagagcagctataaccataatgactccagccttcacacttccagcttcaccttccaaaccacctccatattccagcaaattagcctact

SEQ ID NO: 724225 - DNA, 120 bp, Artificial Sequence
  ENSG00000198075_20 (sequence is synthesized)
tactgggtcctagtcacatcttaccacttcctaccctcccagttttatttataccaagcctcctcctgaaatttctcttcctttctttctacctacccaagacataccacgtgcttcaat

SEQ ID NO: 724226 - DNA, 120 bp, Artificial Sequence
  ENSG00000198075_21 (sequence is synthesized)
aaccagtcccttcctcctacaaacactacaacctggaaagcactcttgcttttctgaagtcctctatacttagtgtaactcttctgtgatgaagattaaagtgtattatggcaactctca

SEQ ID NO: 724227 - DNA, 120 bp, Artificial Sequence
  ENSG00000198075_22 (sequence is synthesized)
tggtgagtataaatagccacacttcactacagtcctaaaatgcacttaggatttttactgtctttgcacctttcgaaattataggctttcaaacaattattggtaagtttcatggttttg

SEQ ID NO: 724228 - DNA, 120 bp, Artificial Sequence
  ENSG00000198075_23 (sequence is synthesized)
taaattttgtttctctagttagaaattaattttacttcaaaagaataagctcaagtaagataatcctggtgaaagggtttgaattttttaggttcttatttatttggatgactgttatgg

SEQ ID NO: 724229 - DNA, 120 bp, Artificial Sequence
  ENSG00000198075_24 (sequence is synthesized)
ttaggaattgttctagtcaaaacatctattcataggctagacgtattctctcacaccagatctacagttacaatgttcttatagatgctttgaattgtagtagtaataatggaagcagca

SEQ ID NO: 724230 - DNA, 120 bp, Artificial Sequence
  ENSG00000198075_25 (sequence is synthesized)
agacttggaagcaaatagataaaaaaaaaatcgtagaaattgatcgaaaaccagttttgcaggtttggaacaagctcatgcaatgccctcaccacggatcctgaaaacacatcttccctt

SEQ ID NO: 724231 - DNA, 120 bp, Artificial Sequence
  ENSG00000198075_26 (sequence is synthesized)
tcacttgctgccaccatccttgctagagaaaaactgtaaggtaaaaaagcaaaaggaattcagagttgtactccttaaaacaaccttagtcttccatttcctcttaaaacacttcacttg

SEQ ID NO: 724232 - DNA, 120 bp, Artificial Sequence
  ENSG00000198075_27 (sequence is synthesized)
ttaaatatatatatatatacctcttcacaataatcaatatgcaaattaatatgaatcctagccaggcacgttggctcatgcctgtaatcacagcattttgggagactgagatgggtggat

SEQ ID NO: 724233 - DNA, 85 bp, Artificial Sequence
  ENSG00000198075_28 (sequence is synthesized)
ggatcagcggcgaaaccccatctctaccaaaaacacaaaattcacaggacgtggtgacacatgcctgtaatccaagctactcagg

SEQ ID NO: 724234 - DNA, 120 bp, Artificial Sequence
  ENSG00000198077_0 (sequence is synthesized)
ccctgggtcttcctagccccgagactttcaagtccatatgcctggagtcccccctcctgagacccttaaccctgcatcctccgcaacagaagacctccagatgcacagccacacttccat

SEQ ID NO: 724235 - DNA, 120 bp, Artificial Sequence
  ENSG00000198077_1 (sequence is synthesized)
ctcaccctaataaaacccagacctttggattcctctcccttggaatgcccaaatccacaactttggggtgcattctcactctcagaccccaaatccaaagcccaagtgctcccctatgca

SEQ ID NO: 724236 - DNA, 120 bp, Artificial Sequence
  ENSG00000198077_2 (sequence is synthesized)
aatattccaaactcttcagttctacagtttatcggttgccccctcctaaatccacagccctgcggcacccctcctgaagtaccacagatttagtctggaggccccctctctgttcagctg

SEQ ID NO: 724237 - DNA, 120 bp, Artificial Sequence
  ENSG00000198077_3 (sequence is synthesized)
ccctggggtccccttatcctcccttgctggctgtgtcccaagctaggtggcattcatggtggggcgtgtagttgggaggtgaaataaggtgattatgtaattagccaaagtccatccctc

SEQ ID NO: 724238 - DNA, 120 bp, Artificial Sequence
  ENSG00000198077_4 (sequence is synthesized)
tttttcaggcagtataaaggcaaaccaccccacccatcaccatctgtcatctcactaccaccatgctggcctcagggctgcttctggtggccttgctggcctgcctgactgtgatggtct

SEQ ID NO: 724239 - DNA, 120 bp, Artificial Sequence
  ENSG00000198077_5 (sequence is synthesized)
tgatgtctgtctggcagcagaggaagagcagggggaagctgcctccgggacccaccccactgcccttcattggaaactacctccagctgaacacagagcacatatgtgactccatcatga

SEQ ID NO: 724240 - DNA, 120 bp, Artificial Sequence
  ENSG00000198077_6 (sequence is synthesized)
agttcagtgagtgctatggccccgtgttcaccattcacttggggccccggcgggtcgtggtgctgtgtggacatgatgccgtcagggaggctctggtggaccaggctgaggagttcagcg

SEQ ID NO: 724241 - DNA, 120 bp, Artificial Sequence
  ENSG00000198077_7 (sequence is synthesized)
ggcgaggcgagcaagccaccttcgactgggtcttcaaaggctatggcgtggcgttcagcaacggggagcgcgccaagcagctcctgcgctttgccatcgccaccctgagggacttcgggg

SEQ ID NO: 724242 - DNA, 120 bp, Artificial Sequence
  ENSG00000198077_8 (sequence is synthesized)
tgggcaagcgaggcatcgaggagcgcatccaggaggagtcgggcttcctcatcgaggccatccggagcacgcacggcgccaatatcgatcccaccttcttcctgagccgcacagtctcca

SEQ ID NO: 724243 - DNA, 120 bp, Artificial Sequence
  ENSG00000198077_9 (sequence is synthesized)
tgtcatcagctccattgtctttggggaccgctttgactatgaggacaaagagttcctgtcactgctgagcatgatgctaggaatcttccagttcacgtcaacctccacggggcagctcta

SEQ ID NO: 724244 - DNA, 120 bp, Artificial Sequence
  ENSG00000198077_10 (sequence is synthesized)
tgagatgttctcttcggtgatgaaacacctgccaggaccacagcaacaggcctttaagttgctgcaagggctggaggacttcatagccaagaaggtggagcacaaccagcgcacgctgga

SEQ ID NO: 724245 - DNA, 120 bp, Artificial Sequence
  ENSG00000198077_11 (sequence is synthesized)
tcccaattccccacaggacttcatcgactcctttctcatccacatgcaggaggaggagaagaaccccaacacggagttctacttgaagaacctgatgatgagcacgttgaacctcttcat

SEQ ID NO: 724246 - DNA, 120 bp, Artificial Sequence
  ENSG00000198077_12 (sequence is synthesized)
tgcaggcaccgagacggtcagcaccaccctgcgctatggcttcttgctgctcatgaagcacccagaggtggaggccaaggtccatgaggagattgacagagtgatcggcaagaaccggca

SEQ ID NO: 724247 - DNA, 120 bp, Artificial Sequence
  ENSG00000198077_13 (sequence is synthesized)
gcccaagtttgaggaccggaccaagatgccctacatggaggcagtgatccacgagatccaaagatttggagacgtgatccccatgagtttggcccgcagggttaaaaaggacaccaagtt

SEQ ID NO: 724248 - DNA, 120 bp, Artificial Sequence
  ENSG00000198077_14 (sequence is synthesized)
tcgggattttttcctccctaagggcaccgaagtgttccctatgctgggctccgtgctgagagaccccagcttcttctccaaccctcaggacttcaatccccagcatttcctggatgacaa

SEQ ID NO: 724249 - DNA, 120 bp, Artificial Sequence
  ENSG00000198077_15 (sequence is synthesized)
ggggcagtttaagaagagtgatgcttttgtgcccttttccatcggaaagcggaactgtttcggagaaggcctggccagaatggagctctttctcttcttcaccaccgtcatgcagaactt

SEQ ID NO: 724250 - DNA, 120 bp, Artificial Sequence
  ENSG00000198077_16 (sequence is synthesized)
ccgcctcaagtcctcccagtcacctaaggacattgacgtgtcccccaaacacgtggtctttgccacgatcccacgaaactacaccatgagcttcctgccccgctgagcgagggctgtgcc

SEQ ID NO: 724251 - DNA, 120 bp, Artificial Sequence
  ENSG00000198077_17 (sequence is synthesized)
ggtgcaggtctggtgggcggggccagggaaaggcggggtcagggcggggttcgcggaagaggcgggtataagaatggggggaagatgcgggaaaggaaggggcgtggtggctagagggaa

SEQ ID NO: 724252 - DNA, 120 bp, Artificial Sequence
  ENSG00000198077_18 (sequence is synthesized)
gagaagaaacagaagcggctcagttcaccttgataaggtgcttccgagctgggatgagaggaagggaaaccttacattatgctatgaagagtagtaataatagcagctcttatttcctga

SEQ ID NO: 724253 - DNA, 120 bp, Artificial Sequence
  ENSG00000198077_19 (sequence is synthesized)
ctaaggtgctatcctccccaccccctagactacggggacttccagcccttctctgtgtccccagaatcctgcccccattagaagctttctactcactgtcccactccctcaatcagtcaa

SEQ ID NO: 724254 - DNA, 120 bp, Artificial Sequence
  ENSG00000198077_20 (sequence is synthesized)
ctgatacttccttaactaccaagcacccagtacctgcacccaggaaagcggaactgtttcggagaaggcctggccagaatggagctctttctcttcttcaccaccgtcatgcagaacttc

SEQ ID NO: 724255 - DNA, 120 bp, Artificial Sequence
  ENSG00000198081_0 (sequence is synthesized)
gtgttcacggccggctagacattctgtgctcgtgcaggaggagggctgctaccatcagggacgtgcacgatttcccccaccccgccccctccccaaactccaaaaaaaaatccaaaacac

SEQ ID NO: 724256 - DNA, 120 bp, Artificial Sequence
  ENSG00000198081_1 (sequence is synthesized)
actgccacccaccgtgcccccgcgccccgagcccctccggtcccggcctgcgtttgctagcgagcgcggggaacccacggcagtgtctgtgcctgtgccaggctgcaggatatgggtctg

SEQ ID NO: 724257 - DNA, 120 bp, Artificial Sequence
  ENSG00000198081_2 (sequence is synthesized)
caggatggagttcttccggtctggcgtgctcctgatcagagttactctgatctgaagattttggcgttcaaggcattaagataatagcctgagttgttcatggagtttttcatcagtatg

SEQ ID NO: 724258 - DNA, 120 bp, Artificial Sequence
  ENSG00000198081_3 (sequence is synthesized)
tctgaaaccattaaatataatgacgatgatcataaaactctgtttctgaaaacactaaatgaacaacgcctggaaggagaattttgtgatattgctattgtggttgaggatgtgaaattc

SEQ ID NO: 724259 - DNA, 120 bp, Artificial Sequence
  ENSG00000198081_4 (sequence is synthesized)
agagcacacagatgtgttcttgctgcctgcagcacttactttaaaaagcttttcaagaagcttgaggttgatagttcttcggtcatagaaatagattttcttcgttctgatatatttgaa

SEQ ID NO: 724260 - DNA, 120 bp, Artificial Sequence
  ENSG00000198081_5 (sequence is synthesized)
gaggtcctgaactacatgtacacagcaaagatttccgtgaaaaaagaagatgttaacttaatgatgtcatcgggtcagattcttggtatccgatttttggataaactgtgttctcagaag

SEQ ID NO: 724261 - DNA, 120 bp, Artificial Sequence
  ENSG00000198081_6 (sequence is synthesized)
cgtgatgtgtccagtcccgatgaaaacaatggtcagtccaaaagtaagtattgccttaaaataaatcgccccattggagatgctgctgacacccaggatgatgatgtagaggaaatcggg

SEQ ID NO: 724262 - DNA, 120 bp, Artificial Sequence
  ENSG00000198081_7 (sequence is synthesized)
gatcaggatgacagtccttctgatgacacagtagaaggcacacccccgagtcaggaggacggcaagtcgcccaccacaacgctcagggttcaggaagcgatcctgaaagagctggggagt

SEQ ID NO: 724263 - DNA, 120 bp, Artificial Sequence
  ENSG00000198081_8 (sequence is synthesized)
gaggaagttcggaaggtcaattgctacggccaggaagtagaatccatggagaccccagaatcaaaagacttggggtcccagacccctcaagccttaacatttaatgatgggatgagtgaa

SEQ ID NO: 724264 - DNA, 120 bp, Artificial Sequence
  ENSG00000198081_9 (sequence is synthesized)
gtgaaagatgaacagacaccaggctggacaacagccgccagtgacatgaagtttgagtatttgctttatggtcaccatcgggagcagattgcctgccaggcgtgtgggaagacgttttct

SEQ ID NO: 724265 - DNA, 120 bp, Artificial Sequence
  ENSG00000198081_10 (sequence is synthesized)
gatgaaggcagattgaggaagcatgagaaactccacacggcggacaggccatttgtttgtgaaatgtgcacaaaaggtttcaccacacaggcccacctgaaagaacacctaaaaatccac

SEQ ID NO: 724266 - DNA, 120 bp, Artificial Sequence
  ENSG00000198081_11 (sequence is synthesized)
acaggatataagccctatagctgtgaggtgtgtggaaaatcatttatccgtgccccagacttaaagaagcatgagagagttcacagtaatgaaagaccgtttgcgtgccacatgtgtgac

SEQ ID NO: 724267 - DNA, 120 bp, Artificial Sequence
  ENSG00000198081_12 (sequence is synthesized)
aaagccttcaaacacaagtctcacctcaaggatcatgaaagaagacacagaggggaaaagccttttgtgtgtggctcctgcaccaaggcatttgccaaggcatctgatctgaaaaggcac

SEQ ID NO: 724268 - DNA, 120 bp, Artificial Sequence
  ENSG00000198081_13 (sequence is synthesized)
gagaacaatatgcacagtgaaaggaagcaggttacccccagtgccatccagagcgagacagaacagttgcaggcggcagcgatggctgcggaagcagaacagcagctggagacgatagcc

SEQ ID NO: 724269 - DNA, 120 bp, Artificial Sequence
  ENSG00000198081_14 (sequence is synthesized)
ctgagatgacgtggatcataatgagtgaatgccagttacaatatttttgtggaaacgtatggaacattgtactcactggacttaaggcagtgcttggttagctatttttaagacttttca

SEQ ID NO: 724270 - DNA, 120 bp, Artificial Sequence
  ENSG00000198081_15 (sequence is synthesized)
aggaaatggtgttcctcagttctgaccaaaccgtttcactgtcttgtctggtgtctagtattaatgttgcccagtaagcacctctctcccttttttttttttattattttaatttgagaa

SEQ ID NO: 724271 - DNA, 120 bp, Artificial Sequence
  ENSG00000198081_16 (sequence is synthesized)
ctcctgtgtccagtttagaagtgagagacttccatttttagttcctttacactcaccaccctagcaagtgccctgcacagagtaataagtaaattgatttcctaatcacaattctatgtg

SEQ ID NO: 724272 - DNA, 120 bp, Artificial Sequence
  ENSG00000198081_17 (sequence is synthesized)
acttatggtcaaaagagcagttttaataactttaaaagtacttcagatagacgcagaaaattggtgagtggttgaccaagaacactgcacaaatataaaaaaagttctggaaatgcagaa

SEQ ID NO: 724273 - DNA, 120 bp, Artificial Sequence
  ENSG00000198081_18 (sequence is synthesized)
tggcgttagatttatatttggtttgttaattttatatcactgtttttcactgtttttgtggacaaataatggttgctttgctgaagtgttcttcctcaatcttgattgccctgtacctac

SEQ ID NO: 724274 - DNA, 120 bp, Artificial Sequence
  ENSG00000198081_19 (sequence is synthesized)
ccaaaagctgtagtcacacatcctaaaggccaagcaaacccaccgggatggtggggggtcttggagccaagctcttaggttcctcttatttggggcagtaccagtccataccagctgcga

SEQ ID NO: 724275 - DNA, 120 bp, Artificial Sequence
  ENSG00000198081_20 (sequence is synthesized)
tttgtgagtggacctgtggtaagaagaatagaaaaggctctcagagataaggttttttacatgtgtaacaatcccaagatttcctagattaaaatcttaattgattttgaaattggattt

SEQ ID NO: 724276 - DNA, 120 bp, Artificial Sequence
  ENSG00000198081_21 (sequence is synthesized)
ttatttagaatcaaaattaggacaagaacagataacttcttcagatacatttgtgtaactttacagaatgtcatcaagctttggggctctgtggggcacatgatttatccataaaggaga

SEQ ID NO: 724277 - DNA, 120 bp, Artificial Sequence
  ENSG00000198081_22 (sequence is synthesized)
tgcagtatgcttacttaaattaataaatttaaaatcttttaagtgtgtaaatagtagtgttggtcttacgtatttcaagtaaaaagtagacagctgcactttttttgcacattggattaa

SEQ ID NO: 724278 - DNA, 120 bp, Artificial Sequence
  ENSG00000198081_23 (sequence is synthesized)
aataacttccatcagcaacaaacatcagactgtttttaacaaatattaaagattgtcagaccaaatgtttatgttttcgaaatatatttcatcactggttacagttttaaatagaagttg

SEQ ID NO: 724279 - DNA, 120 bp, Artificial Sequence
  ENSG00000198081_24 (sequence is synthesized)
attgccttttcatagccgtaaatgagaattataaactctattccagttttggtatactaaatgttcttttaaccatctttaggaatatattgaaatgccaacaatagtttgaattgtgtt

SEQ ID NO: 724280 - DNA, 120 bp, Artificial Sequence
  ENSG00000198081_25 (sequence is synthesized)
ctgtaaaaaagtattagtcaattatttttcaaaatgtagaattgtagaaaatgtcaatttttcaaactcatttttcattgctaggatttcttttaaaaaaattaaagtaatttcacttca

SEQ ID NO: 724281 - DNA, 120 bp, Artificial Sequence
  ENSG00000198081_26 (sequence is synthesized)
tagcttgttgcattaacacctgtaattctattgtgaaagaaatttgattttttaattggtgtgtgttatgcccaagatgttaggatgaagatgctacctttttaaaaattttagttattg

SEQ ID NO: 724282 - DNA, 120 bp, Artificial Sequence
  ENSG00000198081_27 (sequence is synthesized)
gtaaaatgtttaattttacttaaaattaatttcttttcttgaaagttgtttattctgttctaaaagtagtcctgtcactgtgtttttatgctacttatagaaggggaactgattgccgtt

SEQ ID NO: 724283 - DNA, 120 bp, Artificial Sequence
  ENSG00000198081_28 (sequence is synthesized)
cctaggctgttttaaccaaagcaaaggaaaaataattttaacatcttgtcaatagctacttcaacaaaccatattttgggacttcattttttgtatataaaagaaaatatacttctatca

SEQ ID NO: 724284 - DNA, 120 bp, Artificial Sequence
  ENSG00000198081_29 (sequence is synthesized)
gtagtctccaacgaaagcgtcggcaagggcccggattaaccctttctttgctcgcccacttagagacccggtcgggttccgtgcctgcgcaagccggcggcgcgccttccccccagcccg

SEQ ID NO: 724285 - DNA, 120 bp, Artificial Sequence
  ENSG00000198081_30 (sequence is synthesized)
ctgtgtagccatcaatctctgtacaaatatggacatgagcttagtgtgtgaggagaaatcccttaatggttctccaacccctccttccagttcctagggcacagcccctttatgcccgag

SEQ ID NO: 724286 - DNA, 120 bp, Artificial Sequence
  ENSG00000198081_31 (sequence is synthesized)
tgctacagcccttatctgttctagtccatatctgttcagaactgcacttgatgtaccagctacctacctgccactctccccaacctgaaaatgcacaaaagagggaacaagaaagtttat

SEQ ID NO: 724287 - DNA, 120 bp, Artificial Sequence
  ENSG00000198083_0 (sequence is synthesized)
ccatgacccactgttgctccccttgctgtcagcctacctgctgcaggaccacctgctggaagcccaccactgtgaccacctgcagcagcacaccctgctgccagccctcctgctgtgtgt

SEQ ID NO: 724288 - DNA, 120 bp, Artificial Sequence
  ENSG00000198083_1 (sequence is synthesized)
ctagctgctgccagccttgctgccgcccagcttgctgtcaaaacacctgctgcaggaccacctgctgccagcccacctgtctgaccagctgctgccagccttcctgctgcagcacaacct

SEQ ID NO: 724289 - DNA, 120 bp, Artificial Sequence
  ENSG00000198083_2 (sequence is synthesized)
gctgccagcccatctgctgtgggtccagctgctgtggccaaaccagctgtgggtccagctgtggccagagcagctcctgtgcacctgtgtactgcagaagaacctgctactacccgacga

SEQ ID NO: 724290 - DNA, 120 bp, Artificial Sequence
  ENSG00000198083_3 (sequence is synthesized)
ctgtctgcctgcctggttgcctcaaccagagctgtggatccagctgctgccagccctgctgccgccccgcctgctgtgagaccacctgctgcaggaccacttgcttccagcccacctgtg

SEQ ID NO: 724291 - DNA, 120 bp, Artificial Sequence
  ENSG00000198083_4 (sequence is synthesized)
cttgctgctgatcaagtcccaagagaacaaccatcttcacacaacaaccttctgctcaactgacttatcttttggaggactaatttaccttactgctgacagcaaccatgttctcaccca

SEQ ID NO: 724292 - DNA, 120 bp, Artificial Sequence
  ENSG00000198083_5 (sequence is synthesized)
aatttttatgaattctctgcatatttaaaatcttgtgaatcagcttgagggagggcagaatacttcatcctgattctctttttcttataccttgtgaatcatgtgccagcttcatgtgtt

SEQ ID NO: 724293 - DNA, 120 bp, Artificial Sequence
  ENSG00000198083_6 (sequence is synthesized)
ctcaattttgagtcatggtctcagctttgactcaaaagtcaagagcttcattctcttcacttaagaaacttaagttgctgcaaatgattaagaatcttcacaactatgttttcttttcaa

SEQ ID NO: 724294 - DNA, 120 bp, Artificial Sequence
  ENSG00000198083_7 (sequence is synthesized)
tatactcatgattcttgtatcctgcttccttcttttaatgatcactttgggttatctccctataaccagggatcttacctatatatttcttaataaataaatttggaactattattcata

SEQ ID NO: 724295 - DNA, 120 bp, Artificial Sequence
  ENSG00000198087_0 (sequence is synthesized)
ctctgtctgggtccccaccttagtctacggtgtcgccttttctaactgcgagtgctaaggaagaggcgaggggcgggctccgaggctaggcgggcgctcggggttggagccgagggtctg

SEQ ID NO: 724296 - DNA, 120 bp, Artificial Sequence
  ENSG00000198087_1 (sequence is synthesized)
ggcaaaccggtgggtccctccccactgcgggagcggccagggtgggaaaaccgcggtcgggcgggcggggtagggccctcccgccgccgtggctcctggggaggccaggggtgaggagct

SEQ ID NO: 724297 - DNA, 120 bp, Artificial Sequence
  ENSG00000198087_2 (sequence is synthesized)
gtcgccgcctttgcctctgcctcgagggccgcgctgaagagactggtaggagagcgccgcgggcggatggaggcgactcttcgccccgcctgagctcaggaggggctagcgcggagcgcg

SEQ ID NO: 724298 - DNA, 120 bp, Artificial Sequence
  ENSG00000198087_3 (sequence is synthesized)
ggtcccgcctccagccgcgggagcggccgcgcgagccaccactggaggaggaggaggaggagcggacgtcggcttctccccgcgggagcccccagcatggttgactatattgtggagtat

SEQ ID NO: 724299 - DNA, 120 bp, Artificial Sequence
  ENSG00000198087_4 (sequence is synthesized)
gactatgatgctgtacatgatgatgaattaactattcgagttggagaaatcatcaggaatgtgaaaaagctacaggaggaagggtggctggaaggagaactaaatgggagaagaggaatg

SEQ ID NO: 724300 - DNA, 120 bp, Artificial Sequence
  ENSG00000198087_5 (sequence is synthesized)
ttccctgacaatttcgttaaggaaattaaaagagagacggaattcaaggatgacagtttgcccatcaaacgggaaaggcatgggaatgtagcaagtcttgtacaacgaataagcacctat

SEQ ID NO: 724301 - DNA, 120 bp, Artificial Sequence
  ENSG00000198087_6 (sequence is synthesized)
ggacttccagctggaggaattcagccacatccacaaaccaaaaacattaagaagaagaccaagaagcgtcagtgtaaagttctttttgagtacattccacaaaatgaggatgaactggag

SEQ ID NO: 724302 - DNA, 120 bp, Artificial Sequence
  ENSG00000198087_7 (sequence is synthesized)
ctgaaagtgggagatattattgatattaatgaagaggtagaagaaggctggtggagtggaaccctgaataacaagttgggactgtttccctcaaattttgtgaaagaattagaggtaaca

SEQ ID NO: 724303 - DNA, 120 bp, Artificial Sequence
  ENSG00000198087_8 (sequence is synthesized)
gatgatggtgaaactcatgaagcccaggacgattcagaaactgttttggctgggcctacttcacctataccttctctgggaaatgtgagtgaaactgcatctggatcagttacacagcca

SEQ ID NO: 724304 - DNA, 120 bp, Artificial Sequence
  ENSG00000198087_9 (sequence is synthesized)
aagaaaattcgaggaattggatttggagacatttttaaagaaggctctgtgaaacttcggacaagaacatccagtagtgaaacagaagagaaaaaaccagaaaagcccttaatcctacag

SEQ ID NO: 724305 - DNA, 120 bp, Artificial Sequence
  ENSG00000198087_10 (sequence is synthesized)
tcactgggacccaaaactcagagtgtggagataacaaaaacagataccgaaggtaaaattaaagctaaagaatattgtagaacattatttgcctatgaaggtactaatgaagatgaactt

SEQ ID NO: 724306 - DNA, 120 bp, Artificial Sequence
  ENSG00000198087_11 (sequence is synthesized)
acttttaaagagggggagataatccatttgataagtaaggagactggagaagctggctggtggaggggcgaacttaatggtaaagaaggagtatttccagacaattttgctgtccagata

SEQ ID NO: 724307 - DNA, 120 bp, Artificial Sequence
  ENSG00000198087_12 (sequence is synthesized)
aatgaacttgataaagactttccaaaaccaaagaaaccaccacctcctgctaaggctccagctccaaagcctgaactgatagctgcagagaagaaatatttttctttaaagcctgaagaa

SEQ ID NO: 724308 - DNA, 120 bp, Artificial Sequence
  ENSG00000198087_13 (sequence is synthesized)
aaggatgaaaaatcaacactggaacagaaaccttctaaaccagcagctccacaagtcccacccaagaaacctactccacctaccaaagccagtaatttactgagatcttctggaacagtg

SEQ ID NO: 724309 - DNA, 120 bp, Artificial Sequence
  ENSG00000198087_14 (sequence is synthesized)
tacccaaagcgacctgaaaaaccagttcctccaccacctcctatagccaagattaatggggaagtttctagcatttcatcaaaatttgaaactgagccagtatcaaaactaaagctagat

SEQ ID NO: 724310 - DNA, 120 bp, Artificial Sequence
  ENSG00000198087_15 (sequence is synthesized)
tctgaacagctgccccttagaccaaaatcagtagactttgattcacttacagtaaggacctccaaagaaacagatgttgtaaattttgatgacatagcttcctcagaaaacttgcttcat

SEQ ID NO: 724311 - DNA, 120 bp, Artificial Sequence
  ENSG00000198087_16 (sequence is synthesized)
ctcactgcaaatagaccaaagatgcctggaagaaggttgccgggccgtttcaatggtggacattctccaactcacagccccgaaaaaatcttgaagttaccaaaagaagaagacagtgcc

SEQ ID NO: 724312 - DNA, 120 bp, Artificial Sequence
  ENSG00000198087_17 (sequence is synthesized)
aacctgaagccatctgaattaaaaaaagatacatgctactctccaaagccatctgtgtacctttcaacaccttccagtgcttctaaagcaaatacaactgctttcctgactccattagaa

SEQ ID NO: 724313 - DNA, 120 bp, Artificial Sequence
  ENSG00000198087_18 (sequence is synthesized)
atcaaagctaaagtggaaacagatgatgtgaaaaaaaattccctggatgaacttagagcccagattattgaattgttgtgcattgtagaagcactgaaaaaggatcacgggaaagaactg

SEQ ID NO: 724314 - DNA, 120 bp, Artificial Sequence
  ENSG00000198087_19 (sequence is synthesized)
gaaaaactgcgaaaagatttggaagaagagaagacaatgagaagtaatctagagatggaaatagagaagctgaaaaaagctgtcctgtcttcttgagtggtgtggacctggtgttcataa

SEQ ID NO: 724315 - DNA, 120 bp, Artificial Sequence
  ENSG00000198087_20 (sequence is synthesized)
tgttccagggattcagaagcaacgctatgaacttcagctgacttgttacttaaaaattgtgaattctgttgttgtgataaatatgagcaaatgaagtgtaatatctatagaaaagtagag

SEQ ID NO: 724316 - DNA, 120 bp, Artificial Sequence
  ENSG00000198087_21 (sequence is synthesized)
tgagggtgaatttatatatatattttgttttgccaatatgaagaaaaagaggccttatttcttaactgtgctgggattgcaaacactttttaaaaaattgtttgcttgaaaatactactg

SEQ ID NO: 724317 - DNA, 120 bp, Artificial Sequence
  ENSG00000198087_22 (sequence is synthesized)
aatgtgcacagtagtttttttattgaaacttgtattatttttaaagagatctatactataaatatggtgatatatttacaagtaatctgttaagatatactatttgagagggacagatta

SEQ ID NO: 724318 - DNA, 88 bp, Artificial Sequence
  ENSG00000198087_23 (sequence is synthesized)
agtaatctgttaagatatactatttgagagggacagattagccttttagtaactatagtcactactttttccataatgcataagggat

SEQ ID NO: 724319 - DNA, 120 bp, Artificial Sequence
  ENSG00000198087_24 (sequence is synthesized)
cttttatcctcttaccgaaggttacactgttgtgcctgtttgtctgcaatgctgtttatattttgggtgatgaaataggagtttcctagctatataaaccagattactcacccatgcata

SEQ ID NO: 724320 - DNA, 120 bp, Artificial Sequence
  ENSG00000198087_25 (sequence is synthesized)
tagtaagaactaatgaataatcaaaataatttcatcaacttttagaatattttatgttgcttgcactataggagtcataaaaggaacttagttaaaatatgttggattgttaaacatttg

SEQ ID NO: 724321 - DNA, 120 bp, Artificial Sequence
  ENSG00000198087_26 (sequence is synthesized)
gggaaatatgaactgtattttaaatttgttaggtctgaagaatctaaaactgttaatttaacccttaacttgtgcctagaaactacagcacatataaaatatgtaaacaccagcctgttg

SEQ ID NO: 724322 - DNA, 120 bp, Artificial Sequence
  ENSG00000198087_27 (sequence is synthesized)
ctgtacttttctgcttattttacagcctcaaatatttctcattatcttgtcacttagttcttcatgtttctccttctgacttttaataatggtaataggaaaacaaaacccaaagctttt

SEQ ID NO: 724323 - DNA, 120 bp, Artificial Sequence
  ENSG00000198087_28 (sequence is synthesized)
cagaacttcagtgtgaggtttcctattttgacaagttaacttgtaaatactcaggttttacgatgtataatttacctaatagaccaaactaactcatggagatattttgaactattattt

SEQ ID NO: 724324 - DNA, 120 bp, Artificial Sequence
  ENSG00000198087_29 (sequence is synthesized)
aggtacaaactttataaagaatgttagtatgtcataaaatataacattacagcttatttaaaaccaaatatagttgaacatatttaaaatacattttcacagaatggatgaattagttgt

SEQ ID NO: 724325 - DNA, 120 bp, Artificial Sequence
  ENSG00000198087_30 (sequence is synthesized)
ttcttcagagttacttatgaacagttgaatgctttaaaatgttctgtctgtaggtaacatctaaaacacaagtgggtttatttaaatttttaaaatttgaaattttttatttgcaaaaaa

SEQ ID NO: 724326 - DNA, 120 bp, Artificial Sequence
  ENSG00000198087_31 (sequence is synthesized)
ttgttttatgctttattatatcgcaaatgagtgtcagatttttgagtaccaatgatcatgcttccattttttttagttttaaaccaccaaaccaatatttttcctttaaattttaatctt

SEQ ID NO: 724327 - DNA, 120 bp, Artificial Sequence
  ENSG00000198087_32 (sequence is synthesized)
ataatatagaaatcttatgtaaatgaaattttgtcatgtttcaaataaagagaactgaagtagaaaatagaaatgccagtaaacaacataatgtttaatttacaacttacattaggggtt

SEQ ID NO: 724328 - DNA, 120 bp, Artificial Sequence
  ENSG00000198087_33 (sequence is synthesized)
tgggggaatgctaattatatattgagaatatacattagaactcttcaaaatgggctcttctaatgaggtcactactgaacaaaattgttccctcttctgttaaatagaataggtttaaat

SEQ ID NO: 724329 - DNA, 120 bp, Artificial Sequence
  ENSG00000198087_34 (sequence is synthesized)
gactagtcaaatgaattattttcttcttgttaaataaattaaatcttactttcttttaatgaccaaccttaggtaaaacaaaaatattgtaatcctagaaattatcctccagctttctca

SEQ ID NO: 724330 - DNA, 120 bp, Artificial Sequence
  ENSG00000198087_35 (sequence is synthesized)
cctgaaaatctattgaagtgatccctggtcatcctaataatgggatgagggaagtttccagcagatttcaggctgttcttaaagtttttgttggtcattttctcaatagtacatgaaatc

SEQ ID NO: 724331 - DNA, 120 bp, Artificial Sequence
  ENSG00000198087_36 (sequence is synthesized)
aagatgcttatgagcatggaaatgtatttaaagtttttgcttgtgtcctcctcagtcagaatagaaaagtaactgaaatacttttacctttctgtccttgataaaatagtaaagaaaacc

SEQ ID NO: 724332 - DNA, 120 bp, Artificial Sequence
  ENSG00000198087_37 (sequence is synthesized)
aaacaaacccaggcctgatgggaaaaatgattcctttattctagcaacttactttctgttggtatgggaaatgttattaatttctattactaaagttcatatcacaaaatgatatttaat

SEQ ID NO: 724333 - DNA, 120 bp, Artificial Sequence
  ENSG00000198087_38 (sequence is synthesized)
aataaccttggggtaaatcatgaattttttttctacgtgtgagtataaaagacaaaagttgaacagcatggaatctcattgccaaattattagtgaatgtatagttcaggtattctttga

SEQ ID NO: 724334 - DNA, 120 bp, Artificial Sequence
  ENSG00000198087_39 (sequence is synthesized)
gacacacagtatcattaatttctgaattgtatttcagtgttattttttgtttgtgaccactaagcttctgtcttaatacaaagctgttaccttctacagaatttaagtctgaagatgtaa

SEQ ID NO: 724335 - DNA, 120 bp, Artificial Sequence
  ENSG00000198087_40 (sequence is synthesized)
agagagaacaggccttgtgtaacagaagatactcttttttatgctccttactgtgatcacagaaaaattaaaaatccaagtgctctctagatttgttgataaacattttatgcttgcatt

SEQ ID NO: 724336 - DNA, 120 bp, Artificial Sequence
  ENSG00000198087_41 (sequence is synthesized)
taaacttgaaatgtatgagcagaatgagacaatcagttaaatcagaaatgagaagtattataatgtaaaggccttgttttgctgtagcaataaaatgaccaagtgcaatgacttgattta

SEQ ID NO: 724337 - DNA, 120 bp, Artificial Sequence
  ENSG00000198087_42 (sequence is synthesized)
ataaaatcatattttaaaagttgctgctatgaatatttttggctataaaattttaccctgacttgctttcaataactgttacgtaatgcagttgatgttgtaacctaacattccaaaaaa

SEQ ID NO: 724338 - DNA, 120 bp, Artificial Sequence
  ENSG00000198087_43 (sequence is synthesized)
aaaattgagagggggaatctcaaaatagtatatacttcactaacttgtttacaggtgctgtatttaaaagcatgcttctctctcaaaaagaaaaattaaaggattttattgccagtcgtg

SEQ ID NO: 724339 - DNA, 120 bp, Artificial Sequence
  ENSG00000198087_44 (sequence is synthesized)
tcagtctttattggttattttttgttaactttagcatttgtgtatttcagagtatgatgaaaattatattacttcaatttccaaatacaagaataaatagtaaaccaaaaacattaaaaa

SEQ ID NO: 724340 - DNA, 120 bp, Artificial Sequence
  ENSG00000198087_45 (sequence is synthesized)
actgatttttaacaggtattcagtatgtatttaacaatgcttggagttttctgggagggagtagttcatttctcaaacagataacaatttacattcattaaaaaattaaactattcagta

SEQ ID NO: 724341 - DNA, 120 bp, Artificial Sequence
  ENSG00000198087_46 (sequence is synthesized)
tttgcaaacaagtttttttgcattattattgaataatttttatgaaggagtttcagatgtagctattcaggtaggagttatttgagttatagtaaaacaaaataatgtttcagttccgta

SEQ ID NO: 724342 - DNA, 120 bp, Artificial Sequence
  ENSG00000198087_47 (sequence is synthesized)
ctttattcttcctttgtttctttctcgactgtactgaaaaataaccttagacttctttattttataatttaagaagggctgtctatcctaataacataaattagtactttcctggaagaa

SEQ ID NO: 724343 - DNA, 120 bp, Artificial Sequence
  ENSG00000198087_48 (sequence is synthesized)
attgtatttttatttaatgttgttgaaaagctctagtttattttaaggtcttgtggatattgctgttatgctgttggtgcatttttttgggagggcaagagcactctgcctccttacaga

SEQ ID NO: 724344 - DNA, 88 bp, Artificial Sequence
  ENSG00000198087_49 (sequence is synthesized)
agaatttttttcaaaccatattaagtaaaaatctaatctgtggctgggtgtggtagttcgtttggaggattgcttgagtccaggagtt

SEQ ID NO: 724345 - DNA, 120 bp, Artificial Sequence
  ENSG00000198087_50 (sequence is synthesized)
ttagtcttttgtgagaactgttgtcactttttaaaaaaaatggtatagagtttctttactcatccttgctgtatttatatatgtatttgtatttcctgcctttaggaataaaaatgcccc

SEQ ID NO: 724346 - DNA, 120 bp, Artificial Sequence
  ENSG00000198087_51 (sequence is synthesized)
cttaaagctaaaaattaatgaaatctaagtagttaagaacgtaaacaagccttttctttgattctgaatttaccataggcaaaaagcagtgaaatagaaggaattttgccttagaaggaa

SEQ ID NO: 724347 - DNA, 120 bp, Artificial Sequence
  ENSG00000198087_52 (sequence is synthesized)
tacaaagcaaaatctttttaaacgctttgccttgtttgaattatcacattcaaatattaataaaaatactttcctatattttgatatcttagaatgggattttaaaatattttaaaaata

SEQ ID NO: 724348 - DNA, 120 bp, Artificial Sequence
  ENSG00000198088_0 (sequence is synthesized)
agtctcggttagcttcacttcagcgggaacctgcccactaaggaggccgattctttccggctcgagcaggtccggacccgcccctctggcgtctagcagtctcggaggcctgcccgtata

SEQ ID NO: 724349 - DNA, 120 bp, Artificial Sequence
  ENSG00000198088_1 (sequence is synthesized)
gttcagggccggacagcgagcggcggcgacttgccagtaagggtttggagtcatcagcaggtttaattttggaggaactttacaggtttggctccagcagctgctgttgccaccaccact

SEQ ID NO: 724350 - DNA, 120 bp, Artificial Sequence
  ENSG00000198088_2 (sequence is synthesized)
agttcaagcaccatgcagtttacctcaatatcaaattctttgacctccactgctgctattgggctctcatttacaacttcaacgactaccaccgccactttcaccaccaacactactacc

SEQ ID NO: 724351 - DNA, 120 bp, Artificial Sequence
  ENSG00000198088_3 (sequence is synthesized)
acaatcaccagtggctttactgtgaaccaaaaccaactgttatcaagagggtttgaaaaccttgtaccttatacttcaactgttagtgtagtagcaactcctgtgatgacatatggtcat

SEQ ID NO: 724352 - DNA, 120 bp, Artificial Sequence
  ENSG00000198088_4 (sequence is synthesized)
ctggagggtcttataaatgagtggaaccttgagctggaagatcaagagaagtactttcttctccaggccactcaggtcaatgcttgggaccatacattgattgagaatggtgagatgatt

SEQ ID NO: 724353 - DNA, 120 bp, Artificial Sequence
  ENSG00000198088_5 (sequence is synthesized)
cgtattttacatggagaagtgaacaaagtgaaactggatcagaaaagattggaacaagaattggattttatcctgtcacagcagcaggaactagaatttctgttgacttatttagaggag

SEQ ID NO: 724354 - DNA, 120 bp, Artificial Sequence
  ENSG00000198088_6 (sequence is synthesized)
tctacgcgtgaccagagtggacttcattatctgcaggatgcagatgaggagcatgtggagatctccaccagatctgcagaattctgaatgcccatatggactccctgcagtggattgatc

SEQ ID NO: 724355 - DNA, 120 bp, Artificial Sequence
  ENSG00000198088_7 (sequence is synthesized)
cacacaatgtcaacactgctttttagtgaatgaccatatcttcagcatgtcgtttctggattattacctacaaattctgatgttaaatagagtagtatttatacttaatatttcatcttg

SEQ ID NO: 724356 - DNA, 120 bp, Artificial Sequence
  ENSG00000198088_8 (sequence is synthesized)
atcataatgaattgtgcatcctttttttcatttaagtattgtactgttgagaattataccttagttttgtttttagtattagaaaatcaaaattatactagcccctttgtccagacagca

SEQ ID NO: 724357 - DNA, 120 bp, Artificial Sequence
  ENSG00000198088_9 (sequence is synthesized)
acctcttagatgctgactctatatgtgtaatttatgtcttactctccctggcatcagtacacatcatccttctcactccagttgaatcatagggtgatgtctgccaaaagtacatgccaa

SEQ ID NO: 724358 - DNA, 120 bp, Artificial Sequence
  ENSG00000198088_10 (sequence is synthesized)
cctatatagtgctagatactgtaaagtctcttctcctcaaaggaacctactgtctagtttgagatataattaatgcttgtctgcataaaaacaatatagataatataaagaagtgcagta

SEQ ID NO: 724359 - DNA, 120 bp, Artificial Sequence
  ENSG00000198088_11 (sequence is synthesized)
tgaattatagaaagtgtgttatagagattcagagcagggaggaaaagttagggtagattattattaaagggttaaggaaaggtaagtttcaaggaatttggttatttttaatgtatggat

SEQ ID NO: 724360 - DNA, 120 bp, Artificial Sequence
  ENSG00000198088_12 (sequence is synthesized)
agtttcaaggaatttggttatttttaatgtatggatatactggcattttatttggttttagcatatgatttatagttggtgatttccgtatatttgtttgtttttctttttttttgtttg

SEQ ID NO: 724361 - DNA, 120 bp, Artificial Sequence
  ENSG00000198088_13 (sequence is synthesized)
ggtttggaacagtctggtctcctgtgtttcatgtttcacctaagtcataaataaaggtaatgtcctaaaaaaaaacatgtaatactgaaattaactattaaaagtttttaagtgactaga

SEQ ID NO: 724362 - DNA, 120 bp, Artificial Sequence
  ENSG00000198088_14 (sequence is synthesized)
agattagcagaaagtatagatgctcagctgaaacaaatggcccaagatctcaaggacgttgttaatcacctgaatacatttgaaagttcttctgacactactgatccgctccaccagatc

SEQ ID NO: 724363 - DNA, 120 bp, Artificial Sequence
  ENSG00000198089_0 (sequence is synthesized)
gaggcgggcgtggaccgcgcgggagttaagaagcaggtcccggatcgccgtataccgccgggttttctcccaacgtcaggcccgatggctcggcttccccagttagaaggggaagataaa

SEQ ID NO: 724364 - DNA, 120 bp, Artificial Sequence
  ENSG00000198089_1 (sequence is synthesized)
agactttgattcatgaagaatctgctcactgagaagtgtatatcaagccacaatttccatcaaaaagtgattaagcagagaatggagaagaaggttgattccaggtattttaaggatggt

SEQ ID NO: 724365 - DNA, 120 bp, Artificial Sequence
  ENSG00000198089_2 (sequence is synthesized)
gcagttaagaaaccttattctgcaaagacactgtccaacaagaagtcttctgcatcctttgggatccggagggagttacctagtaccagtcatctagtgcagtatcgtggcacacatact

SEQ ID NO: 724366 - DNA, 120 bp, Artificial Sequence
  ENSG00000198089_3 (sequence is synthesized)
tgtacccgacagggccggttaagagaactgcgcatcagatgcgtggccagaaagttcttatatttatggattcgaatgacttttggaagagtatttccctctaaagccagattttactat

SEQ ID NO: 724367 - DNA, 120 bp, Artificial Sequence
  ENSG00000198089_4 (sequence is synthesized)
gagcagcgattactacggaaggtcttcgaagaatggaaagaggagtggtgggttttccagcacgagtggaaactctgtgttcgagctgactgtcactacaggtattacctgtacaacctg

SEQ ID NO: 724368 - DNA, 120 bp, Artificial Sequence
  ENSG00000198089_5 (sequence is synthesized)
atgttccagacgtggaagacctatgtgcgtcagcagcaggagatgaggaacaagtacattagagccgaggttcatgatgcaaagcaaaagatgcgacaggcctggaagtcctggttgatc

SEQ ID NO: 724369 - DNA, 120 bp, Artificial Sequence
  ENSG00000198089_6 (sequence is synthesized)
tacgtggttgttcgtaggaccaaacttcagatgcagactacagctctggagtttaggcaacggattatcttacgggtgtggtggagcacgtggaggcagcgactaggacaggtccgtgtg

SEQ ID NO: 724370 - DNA, 120 bp, Artificial Sequence
  ENSG00000198089_7 (sequence is synthesized)
agccgtgccctccatgcctctgctttgaagcacagggccctgagcctccaggtgcaggcttggtcacagtggcgggaacagctcctgtatgtccagaaggagaaacaaaaggttgtctct

SEQ ID NO: 724371 - DNA, 120 bp, Artificial Sequence
  ENSG00000198089_8 (sequence is synthesized)
gcagtgaaacatcatcagcactggcaaaaacggagatttctaaaggcctggcttgaatacctgcaagtccgcagagtgaagagacagcagaatgagatggctgagcgattccatcatgtc

SEQ ID NO: 724372 - DNA, 120 bp, Artificial Sequence
  ENSG00000198089_9 (sequence is synthesized)
actgtgctccagatatacttctgtgactggcagcaggcctgggagcggagggagagcttgtacgctcaccatgcccaggtggagaaactggccaggaagatggccctgcggcgcgccttt

SEQ ID NO: 724373 - DNA, 120 bp, Artificial Sequence
  ENSG00000198089_10 (sequence is synthesized)
actcactggaaacactacatgctgctgtgtgcagaagaagctgcccagtttgagatggcagaagagcaccacaggcacagccagctgtatttttgctttagagccctaaaagacaatgtg

SEQ ID NO: 724374 - DNA, 120 bp, Artificial Sequence
  ENSG00000198089_11 (sequence is synthesized)
acccacgctcatctccagcaaataagaaggaatcttgctcaccagcagcatggtgtcacgctgctgcacaggttctggaacctctggcggtctcagattgagcagaaaaaggaaagagag

SEQ ID NO: 724375 - DNA, 120 bp, Artificial Sequence
  ENSG00000198089_12 (sequence is synthesized)
ctgctccccttactgcatgctgcctgggaccactacagaatagcactgctgtgcaaatgtatcgaattgtggctacagtatactcagaagaggcggtacaagcagctgctacaggccaga

SEQ ID NO: 724376 - DNA, 120 bp, Artificial Sequence
  ENSG00000198089_13 (sequence is synthesized)
gcggatggtcatttccagcagagagccctgcctgctgccttccacacatggaacagactctggcgatggcgccaccaggaaaatgtcctcagtgcaagagcaacacgtttccacagggag

SEQ ID NO: 724377 - DNA, 120 bp, Artificial Sequence
  ENSG00000198089_14 (sequence is synthesized)
acattagagaagcaagtattttctctctggaggcagaagatgtttcagcatcgagaaaaccgcctggcagagagaatggccatccttcacgcagagcgacagcttctgtataggtcttgg

SEQ ID NO: 724378 - DNA, 120 bp, Artificial Sequence
  ENSG00000198089_15 (sequence is synthesized)
ttcatgtggcaccagcaggcagcagcacgtcaccaggagcaggagtggcaaacagtggcctgtgcccaccaccgccacgggcggctcaagaaagctttctgcctctggagggaaagtgcc

SEQ ID NO: 724379 - DNA, 120 bp, Artificial Sequence
  ENSG00000198089_16 (sequence is synthesized)
ggcctggagccagtggagggagtgcctggccctgcggggagcggagcggcagaagctgatgcgagcagacctgcaccaccagcacagcgtgctgcacagggcgctgcaggcatgggtgac

SEQ ID NO: 724380 - DNA, 120 bp, Artificial Sequence
  ENSG00000198089_17 (sequence is synthesized)
ttaccagggcagggtgcgaagcatcctccgggaggtggcagccagggagagccagcacaacaggcagctgctgcgcggggcattacgtcgctggaaagagaacaccatggcccgagtgga

SEQ ID NO: 724381 - DNA, 120 bp, Artificial Sequence
  ENSG00000198089_18 (sequence is synthesized)
tgaagccaaaaaaacctttcaagcaagtactcattacagaaggaccatatgttccaaggtcctggtccagtggcgggaagctgtgtcagtgcagatgtattaccgacagcaggaggactg

SEQ ID NO: 724382 - DNA, 120 bp, Artificial Sequence
  ENSG00000198089_19 (sequence is synthesized)
tgccatctgggaggcccagaaggtgctggacaggggctgtctgcggacctggtttcagcgctggtgggactgcagccggaggtcagcccagcagagactgcagctggagagggcagtgca

SEQ ID NO: 724383 - DNA, 120 bp, Artificial Sequence
  ENSG00000198089_20 (sequence is synthesized)
acaccaccaccggcagctgctgctggaggggctggcccggtggaagacgcaccatctgcagtgtgtcaggaagaggctcctgcacaggcagagcacccaactgctggcacagagactcag

SEQ ID NO: 724384 - DNA, 120 bp, Artificial Sequence
  ENSG00000198089_21 (sequence is synthesized)
ccggacctgcttccgccagtggagacaacagctggcagccaggaggcaggagcagcgggcgacagtgcgggccctgtggttctgggccttctcgctgcaggcaaaggtgtgggccacgtg

SEQ ID NO: 724385 - DNA, 120 bp, Artificial Sequence
  ENSG00000198089_22 (sequence is synthesized)
gctggcctttgtactggaaaggaggagaaagaaggcgcggctgcagtgggcgctccaggcctaccaggggcagctcctccaggagggtgccacgcggctcctgcgctttgcagccagcat

SEQ ID NO: 724386 - DNA, 120 bp, Artificial Sequence
  ENSG00000198089_23 (sequence is synthesized)
gaaggcctcccggcagcagctgcaggcccagcagcaggtccaggcggctcacagtctccatcgtgccgtccgccgctgtgccacgctctggaaacagaaagtgctgggccggggcgggaa

SEQ ID NO: 724387 - DNA, 120 bp, Artificial Sequence
  ENSG00000198089_24 (sequence is synthesized)
gcctcagcccctggcagccatcgcacccagcaggaaagtgacgtttgagggtccccttctcaaccgcattgctgctggggctggggatggcacccttgagaccaagaggccacaggcttc

SEQ ID NO: 724388 - DNA, 120 bp, Artificial Sequence
  ENSG00000198089_25 (sequence is synthesized)
tcggcctctgggagctctgggccgcctggctgctgaggagccccacgccctggagctcaacactgcccactcagcgaggaagcagccgcgacgcccacacttcctgttggagcctgcgca

SEQ ID NO: 724389 - DNA, 120 bp, Artificial Sequence
  ENSG00000198089_26 (sequence is synthesized)
gagccagaggcctcagaagccacaggaacatggcctaggcatggctcagccagcagccccctccctgacgcggcccttcctggcagaggccccgacagcactggtcccacacagccccct

SEQ ID NO: 724390 - DNA, 120 bp, Artificial Sequence
  ENSG00000198089_27 (sequence is synthesized)
gcctggggccctgtcaagcgcccctggcccgaagcagcccccgacggcaagcacaggcccggagctgctgctgctgcctctttcctccttcatgccctgcggggcggctgcaccagccag

SEQ ID NO: 724391 - DNA, 120 bp, Artificial Sequence
  ENSG00000198089_28 (sequence is synthesized)
ggtgtcagcacagcgggctactcctagggataagcccccggtcccctcatccctggccagtgtccctgacccccatctactccttcctggggacttctcagccaccagggctgggcctgg

SEQ ID NO: 724392 - DNA, 120 bp, Artificial Sequence
  ENSG00000198089_29 (sequence is synthesized)
actttcaactgcaggcagcctggaccttgaggctgaacttgaggagatccagcagcaactactgcactaccagaccaccaagcagaacctctggtcctgtcggcggcaagcgagcagcct

SEQ ID NO: 724393 - DNA, 120 bp, Artificial Sequence
  ENSG00000198089_30 (sequence is synthesized)
gcgcaggtggctggagctgaacagagaggagccggggcctgaggaccaggaagtagagcagcaggtgcagaaagagctggaacaggtggaaatgcagatccagctgctggcagaggagct

SEQ ID NO: 724394 - DNA, 120 bp, Artificial Sequence
  ENSG00000198089_31 (sequence is synthesized)
ccaggctcagcgccagcccattggcgcctgcgttgcccgcatccaggccctgcggcaggccctgtgctagcgtgttcgcaccaggaacgcaggtgctgggctgtcggggaggcctcaggc

SEQ ID NO: 724395 - DNA, 120 bp, Artificial Sequence
  ENSG00000198089_32 (sequence is synthesized)
cacctccaggaacagaacacagttttaagtttgattttttttatttcaaaatgctttgcaattaaatgaattactgttcagaagtctcccacttttcatacaaaaatactgtgctactga

SEQ ID NO: 724396 - DNA, 120 bp, Artificial Sequence
  ENSG00000198089_33 (sequence is synthesized)
agcaagctgagctcagagcgaagctggcgagccaaggagataaagaaccctcggtggggatgcccagagggtgcatgctccacgcccctcgaaaccgattctcattgctgctgctgcaaa

SEQ ID NO: 724397 - DNA, 120 bp, Artificial Sequence
  ENSG00000198089_34 (sequence is synthesized)
gcaacccgaagtgcgccacctacccgactgaggctgcgcaagccccggggtctgggcggggtggtcctcgtgcgcgccgcgtcgccgtggagacgagggcgggcccgcgcgagactggcg

SEQ ID NO: 724398 - DNA, 120 bp, Artificial Sequence
  ENSG00000198089_35 (sequence is synthesized)
ggaagtgagggagggaggactttcgtacgcagccgcctcccagctggaacctcatctttagtgctcggccgcgggcggcgtaactcggggttccgcctcggaatacctcccacttctctt

SEQ ID NO: 724399 - DNA, 120 bp, Artificial Sequence
  ENSG00000198089_36 (sequence is synthesized)
ctttctcttttccctctccacctgtacttcaccctgttttcctgcctctcctttgactgttgcctcttctctggttttcaggcttggtcacagtggcgggaacagctcctgtatgtccag

SEQ ID NO: 724400 - DNA, 120 bp, Artificial Sequence
  ENSG00000198089_37 (sequence is synthesized)
ggacttggcgaccgattagatgagagtgggaggagaaaaggtttgaaaataactccaaggtttttagctcaaatatctaactggattgtgatgccaaaacagagactatagaaaaaggag

SEQ ID NO: 724401 - DNA, 120 bp, Artificial Sequence
  ENSG00000198089_38 (sequence is synthesized)
cagattctgctttagatatggtgatttctaaatgtttactgaaattgatagcagtttatctcaggtattttttgcgtctcatctcatgggcattcaaggggaggaatgcaagaccagatg

SEQ ID NO: 724402 - DNA, 120 bp, Artificial Sequence
  ENSG00000198089_39 (sequence is synthesized)
cagaggtggacctcagcccacctggcacgtgtgttatccccgatagccacggcccttcaaggtggcttgctgagaatgcactgtgtaggggtcagaaccttgttgggactggaggccttc

SEQ ID NO: 724403 - DNA, 120 bp, Artificial Sequence
  ENSG00000198089_40 (sequence is synthesized)
ggctcacagtgcagagggaatgacagacaccctgtgagctgatctctgtgatatggtgtcataacattacaggaggggtttgaacagagtgctgagagtacacagctactcactctgttt

SEQ ID NO: 724404 - DNA, 120 bp, Artificial Sequence
  ENSG00000198089_41 (sequence is synthesized)
acattggagaaggttcaggcatttgccggccattttaggcaggaagaataatatgaacaaaagaattattatatgcgtggccagaaagttcttatatttatggattcgaatgacttttgg

SEQ ID NO: 724405 - DNA, 120 bp, Artificial Sequence
  ENSG00000198089_42 (sequence is synthesized)
cgagagccttgggcctcgggggagatgtcaggtgggtgcatggggcctgggtcccggtccctgctgtgctcctcactgtttgactgaccttgatgggatcctgaacgtctcagaggctgc

SEQ ID NO: 724406 - DNA, 120 bp, Artificial Sequence
  ENSG00000198089_43 (sequence is synthesized)
tcccctgtgacatggaccctggcgacctgtacaccagcgtcaccagggttgttctgcaggtcaaaagagacaatgtgggtgaagcagtcccctggcgtcaggtaccttttgtcggaactg

SEQ ID NO: 724407 - DNA, 120 bp, Artificial Sequence
  ENSG00000198089_44 (sequence is synthesized)
ctgggagctctatggcccaggcccaccccagcttacttgctgaccttggcctcgcctttcctgactttcagtctccctataaaattggagatcccacagagatctcagacccccctgcag

SEQ ID NO: 724408 - DNA, 120 bp, Artificial Sequence
  ENSG00000198089_45 (sequence is synthesized)
tggggtgcagcaccgtgggcaggcagggggagatggtcaggggtccccaaaggcagcgggcacctccatgtggggcctgtgttttggcagccctggggtgggtggccccctttccttctt

SEQ ID NO: 724409 - DNA, 120 bp, Artificial Sequence
  ENSG00000198089_46 (sequence is synthesized)
aaagtgctgggattacaggcgagagccactgcaccagccatctgctttctgcttgttgattttattcttcttttttttaatccaggaaaaaattacttttgaaagcagaatgtccctctt

SEQ ID NO: 724410 - DNA, 120 bp, Artificial Sequence
  ENSG00000198089_47 (sequence is synthesized)
cttgtgttaggctcccagttgaatctcaaagcagagaaacactcagggagatggaacagctacaagaagctgtgaccaagcttctccccgctgatttgaggcactgtttgccttcctcta

SEQ ID NO: 724411 - DNA, 120 bp, Artificial Sequence
  ENSG00000198089_48 (sequence is synthesized)
gagttaagaagcaggtcccggatcgccgtataccgccgggttttctcccaacgtcaggcccgatggctcggcttccccagataccgtgttttttacaaattgaaagtttgtagcaagcag

SEQ ID NO: 724412 - DNA, 120 bp, Artificial Sequence
  ENSG00000198089_49 (sequence is synthesized)
gctttgctgggatcttgctttttaaaaagccaagagggatcacacagagcagcatccacacgtccccagctccctcttcccgttctgttgtcctgttttcaccattccccggacctcagg

SEQ ID NO: 724413 - DNA, 120 bp, Artificial Sequence
  ENSG00000198089_50 (sequence is synthesized)
ccgctgcctccacgcatccccctgcaggagccctttgccaccttctttcatgaaggtcattcctcaggccacagatggagcgtgtgttgagcatctcaccgccaggcacaaggctggccc

SEQ ID NO: 724414 - DNA, 120 bp, Artificial Sequence
  ENSG00000198089_51 (sequence is synthesized)
ttcctagtggaggaagtgggagcctcgactagagagggagccaagagggacgagctgggcagggccccgtgatcaccacggcctccttgaaggggctatagggaaatgatctggtctttc

SEQ ID NO: 724415 - DNA, 120 bp, Artificial Sequence
  ENSG00000198089_52 (sequence is synthesized)
tacccgacagggccggttaagagaactgcgcatcaggtgagcttatgagtggccaccagtctatgggtactttgcttttgttctcctttcttggttaaaatgggggaatgattcttattc

SEQ ID NO: 724416 - DNA, 120 bp, Artificial Sequence
  ENSG00000198089_53 (sequence is synthesized)
ttccaccgcaattagtgggagatcttgatgcctgttcttggtagtagaatgttcagatgaaaaggatattcaggaacctgcagacataaaatctgtcattgagtgttttcatttctccac

SEQ ID NO: 724417 - DNA, 64 bp, Artificial Sequence
  ENSG00000198089_54 (sequence is synthesized)
tgcaaatgtatcgaattgtggctacagtatactcagaagaggcggtacaagcaggttactctcc

SEQ ID NO: 724418 - DNA, 120 bp, Artificial Sequence
  ENSG00000198089_55 (sequence is synthesized)
aggcatgagccactgcacccggcctgctataccattttatataagatacttgagtatccatggattttggtatctgagaggggccctggaaccagtcccccacaaataccaaaggatggc

SEQ ID NO: 724419 - DNA, 120 bp, Artificial Sequence
  ENSG00000198089_56 (sequence is synthesized)
cagtcccccacaaataccaaaggatggctctttgcagaatggcgaatgtttgctaactgttgaagcttgatggtagggtcatgggtattcattatactgtcggcttctacttttgtttac

SEQ ID NO: 724420 - DNA, 120 bp, Artificial Sequence
  ENSG00000198089_57 (sequence is synthesized)
atttgaaaatgcccataataaaaaatagaaaagcaatgtgtagatattatagaaaatttaggaagtataaaaagatataaagaagaaaaaataaaaccattcatgacatttgatgggtaa

SEQ ID NO: 724421 - DNA, 120 bp, Artificial Sequence
  ENSG00000198089_58 (sequence is synthesized)
cgtagttgacaaagggaacaagctcagctcctacccgtgcctgccggcctctcttctgctccatcacagccaagacactggctttttgtcagaagcccctctttcttgtgtgagctggca

SEQ ID NO: 724422 - DNA, 120 bp, Artificial Sequence
  ENSG00000198089_59 (sequence is synthesized)
agggcgtgggatgtagggggtggtgccagagatttgaactgaataaggaacctagaaaatgggtaactttcctccagcacacacacaaacatccatgtgggcacatgtttagttttttac

SEQ ID NO: 724423 - DNA, 120 bp, Artificial Sequence
  ENSG00000198089_60 (sequence is synthesized)
gtgggcacatgtttagttttttactgaattacaaaccaatatgcattaaatagaaacataacacatcataagtgaactagttcttatcagaaccagtattttctttttttcttttttttt

SEQ ID NO: 724424 - DNA, 120 bp, Artificial Sequence
  ENSG00000198089_61 (sequence is synthesized)
taagacccatgtatataatgacttcactactttatggcatggtatgatatgtaaatcctggtagaagagtcccagcagctgaaatgctgggcttcctgtgaggggctggggccctgtcct

SEQ ID NO: 724425 - DNA, 120 bp, Artificial Sequence
  ENSG00000198089_62 (sequence is synthesized)
attgctcagtggtctgcgtgcaaggcagttacttcctggaccgtgtgtgagaagcaaatggcaacagcttggccttgcctctccaggagccaccgtcacagacctggggtggacccggaa

SEQ ID NO: 724426 - DNA, 120 bp, Artificial Sequence
  ENSG00000198089_63 (sequence is synthesized)
ctcctgcacaggcagagcacccaactgctggcacagagactcagccggacctgcttccgccagtggagacaacaggcacatcagcttccttccgtctgcagtctgcataagaacagttac

SEQ ID NO: 724427 - DNA, 89 bp, Artificial Sequence
  ENSG00000198089_64 (sequence is synthesized)
tcagcttccttccgtctgcagtctgcataagaacagttacttcaaggccagtttctctctctacagtgttgtattaaaaaatacatcag

SEQ ID NO: 724428 - DNA, 120 bp, Artificial Sequence
  ENSG00000198089_65 (sequence is synthesized)
aggaacaagtacattagagccgaggttcatggtgagaaaaagaagtccatgtctgaagaagatgcccacatttactttgcagaaggtcataggaaggacaaacacattgtctcagagaga

SEQ ID NO: 724429 - DNA, 120 bp, Artificial Sequence
  ENSG00000198089_66 (sequence is synthesized)
gaggaactctaggccaaaggaagatttgtttgattctctttcatatttttcagaaagtgtgatctctgagtgggcacctgtatgattgatccctatggttttctccatatggcatggttt

SEQ ID NO: 724430 - DNA, 120 bp, Artificial Sequence
  ENSG00000198089_67 (sequence is synthesized)
gagcccttaaaactcatttaatcagaatttgtgtgaactggctgttcctggcctgctggttcagtgggctggctgtgactctcctgtggcacctggggctgccatctatcttgctgcgtc

SEQ ID NO: 724431 - DNA, 120 bp, Artificial Sequence
  ENSG00000198089_68 (sequence is synthesized)
cagcacaacaggcagctgctgcggtgagtctcccgggcgcctcccaagctccagctggggaacaaggaatgcactccaaaccccagccttttagggggtcctgctgagggccaggtcggg

SEQ ID NO: 724432 - DNA, 120 bp, Artificial Sequence
  ENSG00000198089_69 (sequence is synthesized)
gatgatcccgggttcctagtcgctaatatcatggtcttggcttttccacttcactcacgggttcgccttcatgtcttaagcccctgctgtgtgcagggcaggaccttggaaagcagctgt

SEQ ID NO: 724433 - DNA, 120 bp, Artificial Sequence
  ENSG00000198089_70 (sequence is synthesized)
tacctgcatgccttaaaggccacttgtcttgctcttctgagcactttttcctccctgcttcacgcctacaaaattcagctttgcaaggcaccttgtcatctcttccactccagaggcttc

SEQ ID NO: 724434 - DNA, 120 bp, Artificial Sequence
  ENSG00000198089_71 (sequence is synthesized)
agcgactccctttcctgtcaatttccaagtagtccccttccagcttgctctgcaggcctgtcactgactctccagcgtcacctctaggccctgtcagaccatctgcaccactcacccctg

SEQ ID NO: 724435 - DNA, 120 bp, Artificial Sequence
  ENSG00000198089_72 (sequence is synthesized)
ccctttcatttccttcctttgtatttgttcagcacatgatactcctggtggcctatggacagtgggtctcgtggactttaaacacctccatccttagctgggcgcggtggctcatgcctg

SEQ ID NO: 724436 - DNA, 120 bp, Artificial Sequence
  ENSG00000198089_73 (sequence is synthesized)
agtttcagaccagcctgggcaacatagcgagaccttgtctgtactaaatataaaaaaaattagctaggcacggtcatgtatgcctgtggttcaggtacttgggaggcttaggtgggaggg

SEQ ID NO: 724437 - DNA, 120 bp, Artificial Sequence
  ENSG00000198089_74 (sequence is synthesized)
taggcacggtcatgtatgcctgtggttcaggtacttgggaggcttaggtgggagggtcacttgaaccttgaaggtcaaggccacagtgagccgtgattatgccactgcactccagcctgg

SEQ ID NO: 724438 - DNA, 120 bp, Artificial Sequence
  ENSG00000198089_75 (sequence is synthesized)
agtaaataaataaaataaatgcctccatccctcatatggagtcccatagagcacccatcccgctcttcagacagggtggaataagcaagaactccctgagctaactcagcagcaagctga

SEQ ID NO: 724439 - DNA, 120 bp, Artificial Sequence
  ENSG00000198089_76 (sequence is synthesized)
ggcgtaggcaaccttcctccaggttccctgtctctccacacttctcttatcacagtgtgagtcacctgtgttgccactgcctggttatgccctgttatccccgtagcacctggagtttgg

SEQ ID NO: 724440 - DNA, 120 bp, Artificial Sequence
  ENSG00000198089_77 (sequence is synthesized)
tctccagcagtgctgggtccctcatgcactcttggtgcccagcccagagcagctgctcagtagccatttgttggacatagatgtgcaagtaaacataggtgttggtgaaacagacattct

SEQ ID NO: 724441 - DNA, 120 bp, Artificial Sequence
  ENSG00000198089_78 (sequence is synthesized)
taggtgtagagtccctgactcaggagtaggggaagaagtaggaatgattcacagaagcctcccttctctctctatcctggtgtcatctgccttcctcgcacccatgcatctgcagcgggg

SEQ ID NO: 724442 - DNA, 120 bp, Artificial Sequence
  ENSG00000198089_79 (sequence is synthesized)
cttctggtgctttctcatgccacagctgtactagtttctggaaaaccttggcacagggaggccactcatccatttgacaagcataggtagccactgcacaccaggtccaagggccacagc

SEQ ID NO: 724443 - DNA, 120 bp, Artificial Sequence
  ENSG00000198089_80 (sequence is synthesized)
agtgaacagccagccaagggccctgccatcctgaagcttatattctagtcagagacaagcaaagaaaaacccctgcctgcaggccagtaaagtggctgcagatcacgtagggtcctgcag

SEQ ID NO: 724444 - DNA, 120 bp, Artificial Sequence
  ENSG00000198089_81 (sequence is synthesized)
gccacagtgagaagtagcctgggatttgagaagagtaggaagtcggggaagggttttggcagggagcaccatgtcaggtttctgtgcaggctgtggtcaccatgaccacgtggtccaggc

SEQ ID NO: 724445 - DNA, 120 bp, Artificial Sequence
  ENSG00000198089_82 (sequence is synthesized)
aagtagtactggtggcctgggctcagcggttgccacagaggggacaggtactctcttggaggcagatgaggcaggatatgctgctctgagggagttgctgaatgaggggaaagaaggaat

SEQ ID NO: 724446 - DNA, 120 bp, Artificial Sequence
  ENSG00000198089_83 (sequence is synthesized)
tggcttgaataacttgggaaacagagttctttgactggaagaaggaactgggggtggggactggtttggggtgaagtgtcaagagtgttttgaaccaggctcttgatgtcaaatttgaga

SEQ ID NO: 724447 - DNA, 120 bp, Artificial Sequence
  ENSG00000198089_84 (sequence is synthesized)
gaaagcaaacgttgagtctgaccttcaaggaagaggtcagggccagagattgagaagaatcttcagcacaggccgaaggtaaccccagagccactgcggcctctaggaggagagtacagg

SEQ ID NO: 724448 - DNA, 120 bp, Artificial Sequence
  ENSG00000198089_85 (sequence is synthesized)
ggaaggagagaggggaggaggctccaagcagggagcctgggtggggatggccagggggtgtgagagctcagtaatggaagtgacagctgctctaaggccaccaaagcagctggttcctga

SEQ ID NO: 724449 - DNA, 120 bp, Artificial Sequence
  ENSG00000198089_86 (sequence is synthesized)
aaggggatgaggggacaggaaggaaccagttcctgtggtgagttaggccatgtggggccacttaccctggctggaatggtttgaatgtgggtttgaaagggttttgacccctgtccggtg

SEQ ID NO: 724450 - DNA, 120 bp, Artificial Sequence
  ENSG00000198089_87 (sequence is synthesized)
atggaaggggcaagtccactctcaccaggagaggagggcatggaaaaggctgtagagcagtggcctctcactgaccacttctcactgatgtcaaagctcagcaaggtcatgagcttagag

SEQ ID NO: 724451 - DNA, 120 bp, Artificial Sequence
  ENSG00000198089_88 (sequence is synthesized)
caggtgggggtggagggttgggtaaggcaaggctaggaacagctgctcaggcagtggaggcgtgaggcggactgtggtgacacggggtgctccctggttgcttgcgggactttcccctac

SEQ ID NO: 724452 - DNA, 120 bp, Artificial Sequence
  ENSG00000198089_89 (sequence is synthesized)
agtaccaggccctgtgtgcaggggcaggctagacactgagctggcacggccagtgcctgggaagcccagctcctgcagctgggagcctggtcttcccccacccctgcagggcaggcagtg

SEQ ID NO: 724453 - DNA, 120 bp, Artificial Sequence
  ENSG00000198090_0 (sequence is synthesized)
atggtcagctcctgttgtggttccgtctgctctgaccagggctgtggcctggagacctgctgccgccccagctgctgtcagaccacctgctgcaggaccacctgctgccgccccagctgc

SEQ ID NO: 724454 - DNA, 120 bp, Artificial Sequence
  ENSG00000198090_1 (sequence is synthesized)
tctgtgtgctgccagcccacctgctgccgtcccagctgctgtcccagctgctgtcagaccacctgctgcaggaccacctgctgccgccctagctgctgtgtatccagctgctgcagaccc

SEQ ID NO: 724455 - DNA, 120 bp, Artificial Sequence
  ENSG00000198090_2 (sequence is synthesized)
gctgccagtctgtgtgctgccagcccacttgctgccgtcccagctgcagcatctccagctgctgtcgccccagctgctgtgtgtccaggtgctgcaggtcccagtgctgccagtctgtgt

SEQ ID NO: 724456 - DNA, 120 bp, Artificial Sequence
  ENSG00000198090_3 (sequence is synthesized)
tgctgccagtctgtgtgctgccagccaacctgctgccgtcccagctgctgcatctccagctgctgccgcccctcttgctgtgaatccagctgctgccgcccgtgctgctgccgcccctgc

SEQ ID NO: 724457 - DNA, 120 bp, Artificial Sequence
  ENSG00000198090_4 (sequence is synthesized)
cacctgcccccgtcccttgtgctgtgcctcctcttgctgctgagctccttgcctgaaactatctcctccccttcagctcactcctcacagaagcagaccttgtgcatctcataaacaact

SEQ ID NO: 724458 - DNA, 120 bp, Artificial Sequence
  ENSG00000198090_5 (sequence is synthesized)
cagaagaggccattcccaccaactgtgtttccatatcctggacatatatctaggatatatgtcctggctatacatctagaatatatgttccccatgttgacccaagtgtgaaattagata

SEQ ID NO: 724459 - DNA, 120 bp, Artificial Sequence
  ENSG00000198090_6 (sequence is synthesized)
ttatttacagaaagaaattaatagaatttaccaaattttataccttatatttgtatttatggataccaagttcttctgtcccaaacatggaaattcttgcagggtaactcggggcaaggt

SEQ ID NO: 724460 - DNA, 120 bp, Artificial Sequence
  ENSG00000198090_7 (sequence is synthesized)
tgtctcactctcagatttgaaagtctgattgtttcaccctgtatttccttttacagcaatgtttctgtatcttatttttgctgcttctgaataaaactccacttttgtcgcatagaaata

SEQ ID NO: 724461 - DNA, 120 bp, Artificial Sequence
  ENSG00000198092_0 (sequence is synthesized)
gatacagatcagatggtgactgaatagaagctgccccagtcctgggttcatgatgtacgcacctgttgaattttcagaagctgaattctcacgagctgaatatcaaagaaagcagcaatt

SEQ ID NO: 724462 - DNA, 120 bp, Artificial Sequence
  ENSG00000198092_1 (sequence is synthesized)
ttgggactcagtacggctagctcttttcacattagcaattgtagcaatcataggaattgcaattggtattgttactcattttgttgttgaggatgataagtctttctattaccttgcctc

SEQ ID NO: 724463 - DNA, 120 bp, Artificial Sequence
  ENSG00000198092_2 (sequence is synthesized)
ttttaaagtcacaaatatcaaatataaagaaaattatggcataagatcttcaagagagtttatagaaaggagtcatcagattgaaagaatgatgtctaggatatttcgacattcttctgt

SEQ ID NO: 724464 - DNA, 120 bp, Artificial Sequence
  ENSG00000198092_3 (sequence is synthesized)
aggcggtcgatttatcaaatctcatgttatcaaattaagtccagatgaacaaggtgtggatattcttatagtgctcatatttcgatacccatctactgatagtgctgaacaaatcaagaa

SEQ ID NO: 724465 - DNA, 120 bp, Artificial Sequence
  ENSG00000198092_4 (sequence is synthesized)
aaaaattgaaaaggctttatatcaaagtttgaagaccaaacaattgtctttgaccataaacaaaccatcatttagactcacacctattgacagcaaaaagatgaggaatcttctcaacag

SEQ ID NO: 724466 - DNA, 120 bp, Artificial Sequence
  ENSG00000198092_5 (sequence is synthesized)
tcgctgtggaataaggatgacatcttcaaacatgccattaccagcatcctcttctactcaaagaattgtccaaggaagggaaacagctatggaaggggaatggccatggcaggccagcct

SEQ ID NO: 724467 - DNA, 120 bp, Artificial Sequence
  ENSG00000198092_6 (sequence is synthesized)
ccagctcatagggtcaggccatcagtgtggagccagcctcatcagtaacacatggctgctcacagcagctcactgcttttggaaaaataaagacccaactcaatggattgctacttttgg

SEQ ID NO: 724468 - DNA, 120 bp, Artificial Sequence
  ENSG00000198092_7 (sequence is synthesized)
tgcaactataacaccacccgcagtgaaacgaaatgtgaggaaaattattcttcatgagaattaccatagagaaacaaatgaaaatgacattgctttggttcagctctctactggagttga

SEQ ID NO: 724469 - DNA, 120 bp, Artificial Sequence
  ENSG00000198092_8 (sequence is synthesized)
tcatctataaagttgccacctaaaacaagtgtgttcgtcacaggatttggatccattgtagatgatggacctatacaaaatacacttcggcaagccagagtggaaaccataagcactgat

SEQ ID NO: 724470 - DNA, 120 bp, Artificial Sequence
  ENSG00000198092_9 (sequence is synthesized)
gtgtgtaacagaaaggatgtgtatgatggcctgataactccaggaatgttatgtgctggattcatggaaggaaaaatagatgcatgtaagggagattctggtggacctctggtttatgat

SEQ ID NO: 724471 - DNA, 120 bp, Artificial Sequence
  ENSG00000198092_10 (sequence is synthesized)
aatcatgacatctggtacattgtaggtatagtaagttggggacaatcatgtgcacttcccaaaaaacctggagtctacaccagagtaactaagtatcgagattggattgcctcaaagact

SEQ ID NO: 724472 - DNA, 120 bp, Artificial Sequence
  ENSG00000198092_11 (sequence is synthesized)
ggtatgtagtgtggattgcccatgagttatacacatggcacacagagctgatactcctgcgtattttgtattgtttaaattcatttactttggattagtgcttttgctagatgtcaagaa

SEQ ID NO: 724473 - DNA, 120 bp, Artificial Sequence
  ENSG00000198092_12 (sequence is synthesized)
gcccttcagacccagacaaatctaatatcctgaggtggcctttacatacgtaggaccaaaccctctctaccatgagggaagaagacacagcaaatgacagacagcacctattccttactc

SEQ ID NO: 724474 - DNA, 120 bp, Artificial Sequence
  ENSG00000198092_13 (sequence is synthesized)
acaagggaaactgcttgtgatacttcctaataagataaataagtggtttccctcaattgaagacaggaacatcattttccacaggatatgaagagctgccagtaatgccaaaatcttacc

SEQ ID NO: 724475 - DNA, 120 bp, Artificial Sequence
  ENSG00000198092_14 (sequence is synthesized)
tcatataatacctggagcatgtgagattcttctagtgaaaaagaacagtcttccctgaagactcagggcttcaacattctagaactgataagtggaccttcagtgtgcaagaatggagaa

SEQ ID NO: 724476 - DNA, 120 bp, Artificial Sequence
  ENSG00000198092_15 (sequence is synthesized)
gcatgggatttgcattatgacttgaactgggcttatatctaataatacagagcactatctctaacctcaacagttgacattttaaaagtttttaaatgtatctgaacttgctgttaacac

SEQ ID NO: 724477 - DNA, 120 bp, Artificial Sequence
  ENSG00000198092_16 (sequence is synthesized)
agtgttataactcaagcactagcttcaggaagcatgttgtgttgttaagaagcttttctgatttattctttaacagcatcttgccatctatatgttagtagcagttggcccagaaaggac

SEQ ID NO: 724478 - DNA, 120 bp, Artificial Sequence
  ENSG00000198093_0 (sequence is synthesized)
agaattgactcgcgccctcgtccgccgccataggccagtgccggggtttaagggccaggaaaggaagcattcagggaatttaggtgtagccagaagaaaatcaggtcctggctccccaga

SEQ ID NO: 724479 - DNA, 120 bp, Artificial Sequence
  ENSG00000198093_1 (sequence is synthesized)
agcaagagagttcaaatgaaggaaggaggaggttcctggatgtggatgtcatcatttctgggaacactcttaaatggagactcagatttcttagccaaaatttagggaggatccagaaga

SEQ ID NO: 724480 - DNA, 120 bp, Artificial Sequence
  ENSG00000198093_2 (sequence is synthesized)
aaccaaagacgaagcatcccagttcttgggtatttcctgaaacagaagaaaatgacaaaggcccaggaatcactgaccctggaggatgtggctgtggacttcacctgggaggagtggcag

SEQ ID NO: 724481 - DNA, 120 bp, Artificial Sequence
  ENSG00000198093_3 (sequence is synthesized)
ttcctgagccctgctcagaaggacctgtaccgggatgtgatgttggagaactacagcaaccttgtgtcagtggggtatcaagccggcaaacctgatgccctcaccaagttggaacaagga

SEQ ID NO: 724482 - DNA, 120 bp, Artificial Sequence
  ENSG00000198093_4 (sequence is synthesized)
gaaccactatggacactagaagatgaaatccacagtccagcccacccagaaattgagaaagctgatgatcatctgcagcagcccttgcaaaaccaaaaaatactgaagaggacgggacaa

SEQ ID NO: 724483 - DNA, 120 bp, Artificial Sequence
  ENSG00000198093_5 (sequence is synthesized)
cgctatgaacacggaagaactttgaaatcatatttaggtttaaccaaccagagcagaagatacaacagaaaggagcctgctgagtttaatggagatggagcttttctccatgataatcat

SEQ ID NO: 724484 - DNA, 120 bp, Artificial Sequence
  ENSG00000198093_6 (sequence is synthesized)
gaacaaatgcctacggaaattgaattccctgaaagtagaaaacccatcagcaccaagtcacaattccttaaacatcagcaaacacacaacatagagaaagcccatgaatgcactgactgt

SEQ ID NO: 724485 - DNA, 120 bp, Artificial Sequence
  ENSG00000198093_7 (sequence is synthesized)
gggaaagctttcctcaagaagtctcagctcactgagcataagagaattcatacaggaaagaaaccccacgtgtgtagcttgtgtgggaaagccttctacaagaagtacaggctcactgaa

SEQ ID NO: 724486 - DNA, 120 bp, Artificial Sequence
  ENSG00000198093_8 (sequence is synthesized)
cacgagagagctcacagaggagagaaaccccacgggtgtagcttgtgtgggaaagccttctacaagaggtacaggctcactgaacacgagagagctcacaaaggagagaaaccatacggg

SEQ ID NO: 724487 - DNA, 120 bp, Artificial Sequence
  ENSG00000198093_9 (sequence is synthesized)
tgcagtgaatgtgggaaagccttccccaggaaatctgagcttactgaacatcaaaggattcacacgggaattaagccccatcaatgcagcgaatgtgggagagctttctccagaaaatca

SEQ ID NO: 724488 - DNA, 120 bp, Artificial Sequence
  ENSG00000198093_10 (sequence is synthesized)
ctactcgttgtacatcagcgaactcatacaggagagaagcctcatacatgcagtgaatgtggaaaaggcttcattcagaagggcaatctcaacatacatcaacgaactcacactggagag

SEQ ID NO: 724489 - DNA, 120 bp, Artificial Sequence
  ENSG00000198093_11 (sequence is synthesized)
aaaccttatggatgcattgactgtggcaaggccttcagccagaagtcttgccttgtagcacatcagagatatcatacaggaaagactccctttgtatgtcctgaatgtgggcaaccctgt

SEQ ID NO: 724490 - DNA, 120 bp, Artificial Sequence
  ENSG00000198093_12 (sequence is synthesized)
tcacagaagtcaggactcattagacatcagaaaattcactcaggagagaaaccctataaatgcagtgactgtgggaaagccttccttacaaagacaatgctcattgtacatcacagaact

SEQ ID NO: 724491 - DNA, 120 bp, Artificial Sequence
  ENSG00000198093_13 (sequence is synthesized)
cataagagaatacactcaagggagaaacggggggattcagtgaaggtggaaaatccttccacagcaagtcacagcttaagtcctagtgaacatgtgcaggggaaaagccctgttaatatg

SEQ ID NO: 724492 - DNA, 68 bp, Artificial Sequence
  ENSG00000198093_14 (sequence is synthesized)
ggaatgctgagtttgtcatgtcccatgggcctttggctccctgcactaatatgtatagtagggtttac

SEQ ID NO: 724493 - DNA, 120 bp, Artificial Sequence
  ENSG00000198093_15 (sequence is synthesized)
gcctttggctccctgcactaatatgtatagtagggtttacaagatatgaaatatattttacttttttatatcttataaacctcactacccctcccacaatattgtttttcatttactatc

SEQ ID NO: 724494 - DNA, 120 bp, Artificial Sequence
  ENSG00000198093_16 (sequence is synthesized)
ttgatcatagagtttggctggggaggggggcagttttagaggcttccacttggtgttcctcagaatgatatctcttactccgggggccaaggtaggggttagcttttgttctctttgtag

SEQ ID NO: 724495 - DNA, 120 bp, Artificial Sequence
  ENSG00000198093_17 (sequence is synthesized)
tttagattgtatctcttgccttgttcaagttcacaaatctttttgtgtatacacatatgtacatgaaaatgatgttcatgctttttattattttacccttcattatttcattttttatag

SEQ ID NO: 724496 - DNA, 120 bp, Artificial Sequence
  ENSG00000198093_18 (sequence is synthesized)
ttctcatagctatgtctttcagttcactaatcttttttccacagtgtttaatctgtcattaatcccatccaaagtatgttttctctcagaaattgtaatttttaacctctaataatttga

SEQ ID NO: 724497 - DNA, 120 bp, Artificial Sequence
  ENSG00000198093_19 (sequence is synthesized)
catgggtttttccctgttatatctttcatatctttatttatcatggttttacttttaacctatttatgctttcatatttaaagtgggtgtttagtgggcaacatacagttgggccttcct

SEQ ID NO: 724498 - DNA, 120 bp, Artificial Sequence
  ENSG00000198093_20 (sequence is synthesized)
tttttatccagttaacaatctctgtctttttactggggtatttagatcatttacgttcaatgtattgatgtttttaggtttaaattactaacttactatttgttgtttattctatgtctt

SEQ ID NO: 724499 - DNA, 120 bp, Artificial Sequence
  ENSG00000198093_21 (sequence is synthesized)
ctttgttctccttttcttctttttctgctttcccttagagtagctgagtgtgtttatattacatattgtctcctttgttggcttattaactgtaaatccttgtcatttgattccttgaga

SEQ ID NO: 724500 - DNA, 120 bp, Artificial Sequence
  ENSG00000198093_22 (sequence is synthesized)
ttttatagcatacatcattgtgagggattgcatatttatgtcctctccaaatttacatgttgaagtcctaatccctaagggatggcattaggaagtgtgacctttggaaggtaattacat

SEQ ID NO: 724501 - DNA, 120 bp, Artificial Sequence
  ENSG00000198093_23 (sequence is synthesized)
cttgaaagtggaaccctcatgatgagattatgtgtcttatgagacaacacagaagagagtttgttttctctttctctgctctttgccatgtgaagacagaatgagatgaccatgcataaa

SEQ ID NO: 724502 - DNA, 120 bp, Artificial Sequence
  ENSG00000198093_24 (sequence is synthesized)
ccaggaaatggactctcactggacactagacctgccaacaccttgattgtgttttagagtccagttctagagactcctcagcctctggaacgtgagaaatgaatgtttgttaaggcagtc

SEQ ID NO: 724503 - DNA, 120 bp, Artificial Sequence
  ENSG00000198093_25 (sequence is synthesized)
agtcagtctatggtgtattttttctagtagcctgaactgactgaaagaaaatcatgaacttatcattctaacttcaaggacattatatcacttactgtataataaaataatcttacagta

SEQ ID NO: 724504 - DNA, 120 bp, Artificial Sequence
  ENSG00000198093_26 (sequence is synthesized)
cccagttcacatgtgaccagtgttggaatataatgtgcgactctgccagaccctgttggctacattaagtgtcagcttgtgtccaaaatctttggccaccatcacacccagagaatcatg

SEQ ID NO: 724505 - DNA, 120 bp, Artificial Sequence
  ENSG00000198093_27 (sequence is synthesized)
agaattgactcgcgccctcgtccgccgccataggccagtgccggggtttaagggccaggaaaggaagcattcagggaatttaggtgtagccagaagaaaatcaggagtttccttgagcaa

SEQ ID NO: 724506 - DNA, 120 bp, Artificial Sequence
  ENSG00000198093_28 (sequence is synthesized)
gtattctcaggatgtgaaactcgcttatacagagtaacataagcagattccactaggccaactgtaggtcatgagtatgcacaatttcggtatatgtggggcatcctgaaaccattccat

SEQ ID NO: 724507 - DNA, 120 bp, Artificial Sequence
  ENSG00000198093_29 (sequence is synthesized)
tgagtataccaagggacaactgtgcaggtgcagcttatgtggtgaaaatgggccgaacaacttcatatttcttccatgtcaataaaagagaaacatattaagcaggactgtgttattaca

SEQ ID NO: 724508 - DNA, 120 bp, Artificial Sequence
  ENSG00000198093_30 (sequence is synthesized)
aagtgagagagaaccagcaagaggggaaggcagcggaagtcacattctggtcatttagagaaggcatgacagttgtgaaagtgtctagggagacagaaacagctgccacatcttcttctc

SEQ ID NO: 724509 - DNA, 120 bp, Artificial Sequence
  ENSG00000198093_31 (sequence is synthesized)
ccctaggatacaagagctctttttcttataggaattcagagaagcatacatacccctttatctcttcttggaactgatccctattcatttcttcttagatgttgagttgcttcccctaag

SEQ ID NO: 724510 - DNA, 120 bp, Artificial Sequence
  ENSG00000198093_32 (sequence is synthesized)
ttcttcttgcttggattttcacatcttcccattcttcttcatcacttgtcagaggatcattttgtgtttctgaggcaaaaacgacaaactgtttttttctctgtcacatagtcactcaac

SEQ ID NO: 724511 - DNA, 120 bp, Artificial Sequence
  ENSG00000198093_33 (sequence is synthesized)
agctgccctgtgtcactcagagggtacccagtcagtggcctttgctttctcagcttctggaagctttggtatgtctgctgtgctcccaaatggcagatcctcaggcccgtctctggtccc

SEQ ID NO: 724512 - DNA, 120 bp, Artificial Sequence
  ENSG00000198099_0 (sequence is synthesized)
acggaactccctgggtaggagtttgaagctttcttaactcagaaagaaacttccaacacagtttcccaaagaaaaatgggcaccaagggcaaagttattaaatgcaaagcagccatcgcc

SEQ ID NO: 724513 - DNA, 120 bp, Artificial Sequence
  ENSG00000198099_1 (sequence is synthesized)
tgggaagcaggcaagcccctttgcattgaagaggttgaagtagctccccccaaggctcatgaagttcgcattcagatcattgctacctctctgtgccatactgatgccactgttatcgat

SEQ ID NO: 724514 - DNA, 120 bp, Artificial Sequence
  ENSG00000198099_2 (sequence is synthesized)
tctaaatttgagggcctagctttcccagtgatcgttggccatgaggctgcaggtattgtggaaagtattgggccaggagtgaccaacgtcaaaccaggtgacaaagtaattccactttat

SEQ ID NO: 724515 - DNA, 120 bp, Artificial Sequence
  ENSG00000198099_3 (sequence is synthesized)
gcacctctatgtagaaaatgcaagttttgtctgagtccactcacaaatttgtgtgggaaaatcagtaatctcaaaagtcctgctagtgatcaacaactaatggaagacaaaaccagcagg

SEQ ID NO: 724516 - DNA, 120 bp, Artificial Sequence
  ENSG00000198099_4 (sequence is synthesized)
tttacctgcaaaggaaaaccagtttaccatttctttggaaccagtacattctctcagtacactgtggtgtcagatatcaatcttgccaaaatagatgatgatgcaaatttagagagagtt

SEQ ID NO: 724517 - DNA, 120 bp, Artificial Sequence
  ENSG00000198099_5 (sequence is synthesized)
tgtctgcttggatgtgggttttcaactggctatggggctgcaatcaacaatgccaaggtcacccctggttcgacttgtgctgtctttggcctaggaggtgtgggtctttctgctgtaatg

SEQ ID NO: 724518 - DNA, 120 bp, Artificial Sequence
  ENSG00000198099_6 (sequence is synthesized)
ggttgtaaagcagcaggagcttccagaatcataggtattgacatcaacagtgagaagtttgtgaaggctaaagccctgggagccactgactgcctcaatcctagagacttacataaaccg

SEQ ID NO: 724519 - DNA, 120 bp, Artificial Sequence
  ENSG00000198099_7 (sequence is synthesized)
atccaggaagttatcattgaattgaccaagggaggtgtggattttgcccttgactgtgcaggtggatctgaaaccatgaaagcagccctggactgtacaaccgcaggctggggatcatgt

SEQ ID NO: 724520 - DNA, 120 bp, Artificial Sequence
  ENSG00000198099_8 (sequence is synthesized)
taaatggaacattctttggtggttggaaaagtgtagattctatcccaaagctggtcactgactataagaataagaaattcaatctggatgcactggtgacccataccctgccttttgaca

SEQ ID NO: 724521 - DNA, 120 bp, Artificial Sequence
  ENSG00000198099_9 (sequence is synthesized)
aaatcagtgaggcatttgacctaatgaaccaaggaaaaagcgtccgaacaatcctcatcttttgaagatgccaggagcaattcagaatactatctgattgaatgtgaacctgcctggtta

SEQ ID NO: 724522 - DNA, 120 bp, Artificial Sequence
  ENSG00000198099_10 (sequence is synthesized)
atttattacctgatttgatgaaccaaggaaagccatgagtttaaacaaatatttacatttaatatgggaacataaaagagctttaaatattatagactttgtacctgttatatatatgaa

SEQ ID NO: 724523 - DNA, 120 bp, Artificial Sequence
  ENSG00000198099_11 (sequence is synthesized)
tattccctatgttaaataataataataactagtgtttatgaatagaatcatatcatctttagaaattgtttaaaattagttctgggaagttgaaagtggggaatgaagagataataaata

SEQ ID NO: 724524 - DNA, 120 bp, Artificial Sequence
  ENSG00000198099_12 (sequence is synthesized)
aaactagattggccatatgtttataatttttttagattgggtaatgaatacatggagtttcattatacttttctctccacttttgtctatgttgaaaattttctgggagctaaatgatga

SEQ ID NO: 724525 - DNA, 87 bp, Artificial Sequence
  ENSG00000198099_13 (sequence is synthesized)
tgaaaattttcgatggggaacaacacacactggggcctgttgagggcagggagtcggcagagagagagcatcaggaagaatagctaa

SEQ ID NO: 724526 - DNA, 74 bp, Artificial Sequence
  ENSG00000198099_14 (sequence is synthesized)
taaaagttggaaatttttaaaaagaatgaataagacctggtatttgatagcacaacagggagactatagtcaac

SEQ ID NO: 724527 - DNA, 120 bp, Artificial Sequence
  ENSG00000198099_15 (sequence is synthesized)
acctggtatttgatagcacaacagggagactatagtcaacagcaatttaattgtatattttaatatgactaaaagagtataatggattgtttgtaacacaaataaatgcttgaggagatg

SEQ ID NO: 724528 - DNA, 120 bp, Artificial Sequence
  ENSG00000198099_16 (sequence is synthesized)
tttgaagctttcttaactcagaaagaaacttccaacacagtttcccaaagaaaaatgggcaccaagggcaaaattttgatttagtggatttgaggcagggctttcatctctaacaaattc

SEQ ID NO: 724529 - DNA, 120 bp, Artificial Sequence
  ENSG00000198099_17 (sequence is synthesized)
acggaactccctgggtaggagtttgaagctttcttaactcagaaagaaacttccaacacagtttcccaaagaaaaatgggcaccaagggcaaagtaagcaaattttgatttagtggattt

SEQ ID NO: 724530 - DNA, 120 bp, Artificial Sequence
  ENSG00000198099_18 (sequence is synthesized)
ccaagtgatgtgaataaatgcttgtccgaggaccacacttcgagttgcagagatgtaaaacacatctattctccagcaattatctgactcagagggaaaaacttgagacattatatcaag

SEQ ID NO: 724531 - DNA, 120 bp, Artificial Sequence
  ENSG00000198099_19 (sequence is synthesized)
agtttcccaaagaaaaatgggcaccaagggcaaaataaatttaataatgatgtaagcctcatttctcagacttttaatgaattctctggggatattgttcaaatgcagattttgatttag

SEQ ID NO: 724532 - DNA, 120 bp, Artificial Sequence
  ENSG00000198099_20 (sequence is synthesized)
ttctatttacagataacagcaagagaggggagactacaaagcccaaatttcatcgaacatcctaaaactttcaagatcagcaatttgacagcaaacatgaactttgtaatcaaacagact

SEQ ID NO: 724533 - DNA, 120 bp, Artificial Sequence
  ENSG00000198104_0 (sequence is synthesized)
atgaatgaaaacaatgaaaccttgaccagaggctttaccctcatggggctcttcactcacaataaatgctcaggattctttttcggtgtcatttgtgccgtcttcttcatggccatgata

SEQ ID NO: 724534 - DNA, 120 bp, Artificial Sequence
  ENSG00000198104_1 (sequence is synthesized)
gctaatggggtcatgatcttcctgattaacatagaccctcatctccacacccccatgtacttcctcctcagccacctctccgtcattgacacattatacatctccaccattgtgcccaag

SEQ ID NO: 724535 - DNA, 120 bp, Artificial Sequence
  ENSG00000198104_2 (sequence is synthesized)
atgctggtagattatctcatgggcgaggggaccatctctttcatcgcctgcactgctcagtgctttctctacatgggctttatgggggctgaattcttcctgctggggctcatggcctat

SEQ ID NO: 724536 - DNA, 120 bp, Artificial Sequence
  ENSG00000198104_3 (sequence is synthesized)
ttcggtggggctttggacagttttctcctcacccccattaccatgagtctcccgttctgtgcctctcaccaaatcaatcactttttctgtgaggcacccaccatgctgaggctggcctgt

SEQ ID NO: 724537 - DNA, 120 bp, Artificial Sequence
  ENSG00000198104_4 (sequence is synthesized)
ggggacaaaaccacctatgaaacagtgatgtatgtgtgctgcgttgcaatgctgctgatccccttctcggtggtgactgcatcctacaccaggattctcatcacagtgcatcagatgaca

SEQ ID NO: 724538 - DNA, 120 bp, Artificial Sequence
  ENSG00000198104_5 (sequence is synthesized)
tcggctgaagggaggaagaaggcctttgccacctgctcttcacacatgatggtggtgacattgttctatggggctgccttgtatacgtatacgcttccccaatcttaccacaccccaatc

SEQ ID NO: 724539 - DNA, 120 bp, Artificial Sequence
  ENSG00000198104_6 (sequence is synthesized)
aaagataaggtcttctctgccttttataccatcctcacacccttattaaaccctctcatctacagtctgaggaacagggatgtgatgggtgccttgaagagagttgtggcaagatgttag

SEQ ID NO: 724540 - DNA, 120 bp, Artificial Sequence
  ENSG00000198104_7 (sequence is synthesized)
aactcttccctctttggttcctggagctgtgtgcacagtgctgaagtatgacatccatgccttcagttaagtggtcatcttcaaatacctctaactggcactctctttttttttttgaag

SEQ ID NO: 724541 - DNA, 120 bp, Artificial Sequence
  ENSG00000198104_8 (sequence is synthesized)
cttttgccttttaacctggatctcctctcatcttttcaaggaaagatactaatatgaagacagaaaaaaagaagatcaagaaggttcccttttatctcttgtttctaaggtctcacctct

SEQ ID NO: 724542 - DNA, 120 bp, Artificial Sequence
  ENSG00000198104_9 (sequence is synthesized)
tgtgaagttgtttgtaaacaattttgtctttacctaatattcctctctctggatatattatacctgtaactccttctgattcatcaggtcctcacgaggagctcgttagatgagatgcta

SEQ ID NO: 724543 - DNA, 120 bp, Artificial Sequence
  ENSG00000198104_10 (sequence is synthesized)
ccacatcctgttcaggcatatatggggtcgtatcatggataccacggatgatgctgacaggaactttcaataccagctgtgctaaatggtgtatcaacagtacccccatcaaaaatggga

SEQ ID NO: 724544 - DNA, 120 bp, Artificial Sequence
  ENSG00000198104_11 (sequence is synthesized)
agttgctgtaacagtcacacacaaataatgccagagttctagaaacaccactcatgtttattcttcttttgtttctactgattccaagtcttctctcatatcacttctctgattgcagtt

SEQ ID NO: 724545 - DNA, 120 bp, Artificial Sequence
  ENSG00000198104_12 (sequence is synthesized)
tgtgtatatgaatgccccaaaatgttgagttaatattacatattctgcccattttcaatggctccataagaactggtgattttgactatattgtttaaacaatccatcaattggcttgtc

SEQ ID NO: 724546 - DNA, 120 bp, Artificial Sequence
  ENSG00000198104_13 (sequence is synthesized)
aaagatttagggatgccaaggtttgaaagacatatgaaagagactaaactgtcataaaactgtaaaagaaaaatctacatagacttacaccaagatttagaaaatccaaatatctcttct

SEQ ID NO: 724547 - DNA, 120 bp, Artificial Sequence
  ENSG00000198104_14 (sequence is synthesized)
ttgagtaaccactgaaaacactcctcctttatctacatttggagctaaaaaaaaatgaatcatgtgttttgtagaaatgccaagactaaatctttatgggggagggagtctgtaatgtta

SEQ ID NO: 724548 - DNA, 120 bp, Artificial Sequence
  ENSG00000198104_15 (sequence is synthesized)
gttttttaatatggtaactaactgttacattggaagacacagcaaaaggtagttgagaaagaaatgccctattaactagcagtttctgtaatcactttacagcttcttctccaattcact

SEQ ID NO: 724549 - DNA, 120 bp, Artificial Sequence
  ENSG00000198104_16 (sequence is synthesized)
agcatttttaaacttttgggatccctgtgcagatgttagtgttgttggagctatttctaccaacttttctcttttaaaaaagtagtagacagcgtcatatttttccttctctatagcact

SEQ ID NO: 724550 - DNA, 120 bp, Artificial Sequence
  ENSG00000198104_17 (sequence is synthesized)
gttagaaataaccaggaccacaaatgcttgtgtctttccacaatgtcaggattttattgatgctgtttcaatcacaaaagccaccatgagctacatagagttcccaagggggcaactctc

SEQ ID NO: 724551 - DNA, 120 bp, Artificial Sequence
  ENSG00000198104_18 (sequence is synthesized)
cttagtacttttcattcacttggtagtcagcgttgtgggcacacagactcaagccactccacaagtcagtcaatattgcaaaccatacataatagtatacttaatcaatatgtaaatgtt

SEQ ID NO: 724552 - DNA, 120 bp, Artificial Sequence
  ENSG00000198104_19 (sequence is synthesized)
ataggtttaacatttcacaacaaacaaactaacatttaacacaagaaggaaaagggataggagaaaggatcacaaaccagtccaaggggagagaagaagagaaaagcggtcctggtccag

SEQ ID NO: 724553 - DNA, 120 bp, Artificial Sequence
  ENSG00000198104_20 (sequence is synthesized)
gccgggtggtccactggtcttgcaagaaagagtctctgaggtggcagagacttcagcagcagatgccaagttttcatcaccagtgactgcaagatggcatcagttaacatggctatttcg

SEQ ID NO: 724554 - DNA, 120 bp, Artificial Sequence
  ENSG00000198104_21 (sequence is synthesized)
agctgctgaaggcctgctcttttacggttacagagtcctcccatgagaactgatcatggaagagtgtgcttgtttgagtccttatctggttggatacagtcttttattttttaatttgtt

SEQ ID NO: 724555 - DNA, 120 bp, Artificial Sequence
  ENSG00000198104_22 (sequence is synthesized)
tagtagacaacacatcttatccttgttggaaaagtgctctatgaaatataaaataaagtctttttctaagatggagttggctacgtcaagggtgttctatacacttagtatgatttcttt

SEQ ID NO: 724556 - DNA, 120 bp, Artificial Sequence
  ENSG00000198104_23 (sequence is synthesized)
ttaagtggctaagaactggagaaaaaatgtttggcctaaactgtagacacagtagtaaaaaccaggaccacatcccaaacccctcaggccacctctacaagctgctgtgccaggctttgt

SEQ ID NO: 724557 - DNA, 120 bp, Artificial Sequence
  ENSG00000198104_24 (sequence is synthesized)
actgtcattggtttaacaaaatccaagccgggttcagtgacgttctgcagcgactgaagatggtgggtgaatgaaagatagccacacctccttttgtactgaaaaaagctgctgggtatt

SEQ ID NO: 724558 - DNA, 120 bp, Artificial Sequence
  ENSG00000198104_25 (sequence is synthesized)
tgacaaaatatttagccaaatagaacagctcaacttggcattgggctgagcacttaatcaagaaaatagaccaggtcttgcctaacagagcagggttttcagttgaaatccaggaacagc

SEQ ID NO: 724559 - DNA, 120 bp, Artificial Sequence
  ENSG00000198104_26 (sequence is synthesized)
ttttccgaggctcttcagctggaggctcaacatctcctcaatcttgtcagactgtcttggacaacagtatgtgccagataatatgagggagcatttccaaccaagaagatgttgaggtac

SEQ ID NO: 724560 - DNA, 120 bp, Artificial Sequence
  ENSG00000198104_27 (sequence is synthesized)
aaaaaacacaacaaatcagaagagaaggagagggctggcccataagaactgatcatcagtttcagctccacgtaaacaccatgtgaatttctgtcaatcatacaatgcttctgaggacca

SEQ ID NO: 724561 - DNA, 120 bp, Artificial Sequence
  ENSG00000198104_28 (sequence is synthesized)
accaactttcttttttataaaatttgacttaatacatactttttttcttgtaagattttaaaatcaagtaaaatgatgaatgtaataaaaccttataaatgctagtcattatttcagcta

SEQ ID NO: 724562 - DNA, 120 bp, Artificial Sequence
  ENSG00000198104_29 (sequence is synthesized)
ttgaaaagatgattgacttttatattcagtttttacaatttctttcatttctatcgatccgttacagacaaaagcacactctcttgtacagccactttggaatacagtttgacagtttct

SEQ ID NO: 724563 - DNA, 120 bp, Artificial Sequence
  ENSG00000198104_30 (sequence is synthesized)
tacaatattgaacataatcttatcatatgatctggcaattgtgtttcttggtgttaactctgctgatttggaaacttatgttcacagtagatttttcatacattccaaaacatagactta

SEQ ID NO: 724564 - DNA, 120 bp, Artificial Sequence
  ENSG00000198104_31 (sequence is synthesized)
atcagaaagtccttcagaaattaaatggataaagtgtggcacatgcatacagtggaatattatttagtgttaaaaataaatgatttatcaagccattggaagacatggaggaaatttaaa

SEQ ID NO: 724565 - DNA, 120 bp, Artificial Sequence
  ENSG00000198104_32 (sequence is synthesized)
tgtatattgtgaagtgaaagaagccaatctgaaaaggctgcatactgtgtgattccagctgcatgacatcctggaaaaaacaaaactgtggatacaggaaaaagataagtgttgcaaggg

SEQ ID NO: 724566 - DNA, 120 bp, Artificial Sequence
  ENSG00000198104_33 (sequence is synthesized)
gtctgggggaagtatggatggatggacagagcacagaggacttttagagcagtgaaactattgtatatgacacagtaattaatgttacataagattatgctacatggtactatgtatttg

SEQ ID NO: 724567 - DNA, 120 bp, Artificial Sequence
  ENSG00000198104_34 (sequence is synthesized)
tggaaaaaaacatacaactctggaacagaaagactcatccttatgtaaaatatgaactattaataataatgtatcaaaattgattcatctattgtaacaaatgtactacactaatgccag

SEQ ID NO: 724568 - DNA, 120 bp, Artificial Sequence
  ENSG00000198104_35 (sequence is synthesized)
atgttaacaatagggaaaagagaggggatatataaaaactttctgaactatccattcaattttttggtaaacctcattgttctaaaatataaaatttcattttaaaacagttttctaaca

SEQ ID NO: 724569 - DNA, 120 bp, Artificial Sequence
  ENSG00000198105_0 (sequence is synthesized)
gctccaggcgagtccttccctggactccagtcccttgtgggaaacaatccctcgcctccggaggcggcgaggagcggcggaacctaaattggtaataaatcaataagaaatatttacatt

SEQ ID NO: 724570 - DNA, 120 bp, Artificial Sequence
  ENSG00000198105_1 (sequence is synthesized)
cactcagtgaaaagtgtcatgtctgagctcagcatatatcggagccacacatggacacctctccttcctccactaagagcggaaaatgaacaaatcccaggaacaagtgtcattcaagga

SEQ ID NO: 724571 - DNA, 120 bp, Artificial Sequence
  ENSG00000198105_2 (sequence is synthesized)
tgtatgtgtggacttcactcaggaagagtggtatctgctggaccctgctcagaagattctatacagagatgtgatcctggaaaattatagcaatcttgtctcagtagggtattgcattac

SEQ ID NO: 724572 - DNA, 120 bp, Artificial Sequence
  ENSG00000198105_3 (sequence is synthesized)
taaaccagaagtgatctttaagatcgagcaaggagaagagccctggatattagaaaaaggattcccaagccagtgccacccagaaaggaaatggaaagttgatgacgtgttagagagcag

SEQ ID NO: 724573 - DNA, 120 bp, Artificial Sequence
  ENSG00000198105_4 (sequence is synthesized)
ccaggaaaatgaagatgaccatttttgggagcttctattccacaacaacaaaacagtaagtgtagaaaatggagatagaggaagcaaaactttcaatttgggcacagaccctgtttcttt

SEQ ID NO: 724574 - DNA, 120 bp, Artificial Sequence
  ENSG00000198105_5 (sequence is synthesized)
aagaaattatccctataaaatatgtgactcatgtgaaatgaatttgaaaaatatttcgggcttaattattagtaaaaagaactgttccagaaagaagcctgatgagtttaatgtatgtga

SEQ ID NO: 724575 - DNA, 120 bp, Artificial Sequence
  ENSG00000198105_6 (sequence is synthesized)
gaaattgctccttgatattaggcatgagaaaatccctattggagagaagtcttataaatatgatcaaaaaaggaatgccattaattatcaccaggatctcagtcagccaagttttggcca

SEQ ID NO: 724576 - DNA, 120 bp, Artificial Sequence
  ENSG00000198105_7 (sequence is synthesized)
atcttttgagtatagtaaaaatggacaaggcttccatgatgaggcagcattttttacaaataagagatctcagataggagagacagtctgtaaatataacgaatgtggaagaaccttcat

SEQ ID NO: 724577 - DNA, 120 bp, Artificial Sequence
  ENSG00000198105_8 (sequence is synthesized)
tgaaagtttaaagctgaatatatctcaaagacctcatttggaaatggagccgtatggatgcagtatttgcgggaagtccttctgcatgaatttaaggtttggacatcagagagctcttac

SEQ ID NO: 724578 - DNA, 120 bp, Artificial Sequence
  ENSG00000198105_9 (sequence is synthesized)
aaaggacaatccttatgaatataatgaatatggggaaatcttctgtgacaattcagctttcattatccatcagggagcttacacaagaaagattctccgtgaatataaagtgagtgacaa

SEQ ID NO: 724579 - DNA, 120 bp, Artificial Sequence
  ENSG00000198105_10 (sequence is synthesized)
aacctgggaaaagtcagctctcttaaaacatcaaatagtacacatggggggaaagtcttatgattacaatgaaaatgggagtaatttcagcaagaagtcacatcttacccagcttcggag

SEQ ID NO: 724580 - DNA, 120 bp, Artificial Sequence
  ENSG00000198105_11 (sequence is synthesized)
agctcacacaggagaaaaaacctttgaatgtggtgaatgtgggaaaaccttctgggagaagtcaaacctcactcaacatcagagaacacacacaggagagaagccctatgaatgtactga

SEQ ID NO: 724581 - DNA, 120 bp, Artificial Sequence
  ENSG00000198105_12 (sequence is synthesized)
atgtgggaaagccttttgccagaaaccacacctgaccaaccatcagcgaacacatacaggagaaaaaccctatgaatgtaagcaatgtggaaaaacattctgtgtgaagtcaaacctcac

SEQ ID NO: 724582 - DNA, 120 bp, Artificial Sequence
  ENSG00000198105_13 (sequence is synthesized)
tgaacatcagagaacacacacaggggagaagccctatgaatgtaatgcatgtgggaaatccttctgccacagatcagccctcactgtgcatcagagaacacacacaggggagaaaccgtt

SEQ ID NO: 724583 - DNA, 120 bp, Artificial Sequence
  ENSG00000198105_14 (sequence is synthesized)
tatatgtaatgaatgtggaaaatccttctgtgtgaagtcaaacctcattgtacatcaaagaactcacactggggagaaaccatataagtgtaatgaatgtgggaaaaccttctgtgaaaa

SEQ ID NO: 724584 - DNA, 120 bp, Artificial Sequence
  ENSG00000198105_15 (sequence is synthesized)
atcagctctcactaaacatcagaggactcacacaggggagaagccgtatgagtgtaatgcatgtgggaagacctttagtcagaggtcagtgctcaccaaacatcagagaattcacacaag

SEQ ID NO: 724585 - DNA, 120 bp, Artificial Sequence
  ENSG00000198105_16 (sequence is synthesized)
ggtgaaagctctttcaacatcctgaatgttagaagccttcatacacttgtgaaattggttatacagtttcaaaaaaggagatcagagaaagccaaagaatgtcagaaatttgtagaaaat

SEQ ID NO: 724586 - DNA, 120 bp, Artificial Sequence
  ENSG00000198105_17 (sequence is synthesized)
gacttcttgtttgaatatgtaaaagctttcaagaaaaattaaaacttttcattagaaaatttgtactgaggggaattctattcatctaagtaatatggtgaaaatatttatctggaattt

SEQ ID NO: 724587 - DNA, 120 bp, Artificial Sequence
  ENSG00000198105_18 (sequence is synthesized)
atgttgtttagtgttatattccagacgtgataccaaaattttgttgcaaatataatggacaatatttatttatacccatattcacagtggaatctgaagcttataaaagttgaatgacag

SEQ ID NO: 724588 - DNA, 120 bp, Artificial Sequence
  ENSG00000198105_19 (sequence is synthesized)
gagaagatacgtacccttaattgagtaactactatggtatttgttaatattttctacactaaataccattggtgtctttataggttgacataattatatatgtgtatgtacatatgtttg

SEQ ID NO: 724589 - DNA, 120 bp, Artificial Sequence
  ENSG00000198105_20 (sequence is synthesized)
tgtgtatatgtaaatatatttctacacacatacttaaatatagtgatgtgctagtataacctcatactgacttaaaagttctgattgttaaattttaaggaattttgtgagccagttatt

SEQ ID NO: 724590 - DNA, 120 bp, Artificial Sequence
  ENSG00000198105_21 (sequence is synthesized)
aaaagcagtcattatttaaaatatgtaaacttacagttaaaaacaaaggtaataaatactcagcactcatcacttcctaattattttgctacatttcactattacctttgctgttttact

SEQ ID NO: 724591 - DNA, 120 bp, Artificial Sequence
  ENSG00000198105_22 (sequence is synthesized)
tatttaatctgtatgatgaaaatactgtataatagtgtgcactgcacatctgtctcttcccagctccacattcagtgctgtcttggtagcttggacttagtgggagtgtttacaccatgg

SEQ ID NO: 724592 - DNA, 120 bp, Artificial Sequence
  ENSG00000198105_23 (sequence is synthesized)
aaattgacaaactataaatcagggttttaattttctcagagaacctgctgtcaaatatttacagcacatcactgtgtatatatgaaaacgtatttggcaatacaaaccacataccccttc

SEQ ID NO: 724593 - DNA, 120 bp, Artificial Sequence
  ENSG00000198105_24 (sequence is synthesized)
tatttcctgacataaataaatggctatggccatttacagctgaaccacgtcttcaagaaagaagccaaaaatatttccgtgaggtttttaactacctctgaatctgtcctactctaaata

SEQ ID NO: 724594 - DNA, 120 bp, Artificial Sequence
  ENSG00000198105_25 (sequence is synthesized)
ctaccggagtctctttgtaggttggccagtatatgtttttagtgaaatattatttcacaaagaactatatcacgtacctttcctctgactgtttcctggcatatatgcatgaatatggcc

SEQ ID NO: 724595 - DNA, 120 bp, Artificial Sequence
  ENSG00000198105_26 (sequence is synthesized)
attattgaactatcacttcagtaaagaagttaaacagtacttttctgaggtttttcagctacctctgggtcattctgtaatgtaaatgttgttaataagaatggtttttacataaattat

SEQ ID NO: 724596 - DNA, 120 bp, Artificial Sequence
  ENSG00000198105_27 (sequence is synthesized)
gcaaaggttaacaagcagtaacactgcactcctcaaaaagtggcggtatgtaatgaaaggcccttttgatatccttgatttttcattgtgtatctgtttgggcacggtctatgtaacact

SEQ ID NO: 724597 - DNA, 120 bp, Artificial Sequence
  ENSG00000198105_28 (sequence is synthesized)
agttctgcgtattagtattttagagtatctctgcctcccttgtcctgttgtttcttttgcccccttggaacacattggtcagcagttctaagagacactgcccacatgatggccattccc

SEQ ID NO: 724598 - DNA, 120 bp, Artificial Sequence
  ENSG00000198105_29 (sequence is synthesized)
tacttcatccttgctgagctaaattttatatttttgtgcatccttctcccagatgacttaggtggtaagtccagattagtcaaagctaatcatggaagttccattttaatgattctgttg

SEQ ID NO: 724599 - DNA, 120 bp, Artificial Sequence
  ENSG00000198105_30 (sequence is synthesized)
gggtgaacttgggagcaatgagatgtttgggaagtattgtgtagtacttctgggaaagatctccttgatacaacattgtcatgacatgagaagagactctgctgggctttttcatgtctg

SEQ ID NO: 724600 - DNA, 120 bp, Artificial Sequence
  ENSG00000198105_31 (sequence is synthesized)
taacatggtattggcttatcgtttttatctctgaagggcagtagcctgaagataacagtgcacaaggtgggaaaagccagctcagaggtgacgttgccgagctactctgctctctatacc

SEQ ID NO: 724601 - DNA, 120 bp, Artificial Sequence
  ENSG00000198105_32 (sequence is synthesized)
tgttctctactgggactttttataaccctcaataactgttttttatttggtcttagggctgtctgatacttagagctgaaggcattccagctgacacagaggaatatttttctaagtgtt

SEQ ID NO: 724602 - DNA, 120 bp, Artificial Sequence
  ENSG00000198105_33 (sequence is synthesized)
aatgttctatatggtaattagggggaagaattatttcttttcacaagttaatatagggatggctgtttgtatcagccatggttctttctggtggaaaacagaattctccaactaaaaata

SEQ ID NO: 724603 - DNA, 120 bp, Artificial Sequence
  ENSG00000198105_34 (sequence is synthesized)
ttttaatggcagactgattacagtggtgtgggccagaaacaagggacagtgaaacacccagagacttgtatcagcaggaagccattgccattctgagccttgaagggcaaggagggaaac

SEQ ID NO: 724604 - DNA, 120 bp, Artificial Sequence
  ENSG00000198105_35 (sequence is synthesized)
agtgttaccagagcccagtaagaactgctgtcatgaaggaggggccaccttgtaagagacatcattactaccagaactgtggtgccaaattgctggtgtctctctttggagaaaccaacc

SEQ ID NO: 724605 - DNA, 120 bp, Artificial Sequence
  ENSG00000198105_36 (sequence is synthesized)
agatacatctgctggagagcccaggtgggcacagagaagggtggagagagaatctgggaagagaaatggagaataagcagcacagtgttattcatttctgtaaattcctatgtagaaggc

SEQ ID NO: 724606 - DNA, 120 bp, Artificial Sequence
  ENSG00000198105_37 (sequence is synthesized)
tcagtgttagaaataaagttattctactagttgcaagttaagtgtttctgtttgttctgctttcctgttagcataagtaaactccctttggaactacacaggtatgtctctccttcaaca

SEQ ID NO: 724607 - DNA, 120 bp, Artificial Sequence
  ENSG00000198105_38 (sequence is synthesized)
tgtgtgaagcagacattatattaaattacattattcatacctccctgtggtgtttcttattgtatgtggtgtaaggtaagcagctctgtattcttccaaataaatagccagttgtccctg

SEQ ID NO: 724608 - DNA, 120 bp, Artificial Sequence
  ENSG00000198105_39 (sequence is synthesized)
ggggctgcgggggagagcgactgcgccaggtccgcgacaaatgaattagacacaattatccacgggagactcggttttcctctctgtaaattacggatattaggaatacttgccgcctgg

SEQ ID NO: 724609 - DNA, 120 bp, Artificial Sequence
  ENSG00000198105_40 (sequence is synthesized)
ggttgttttgagcactttcattgtttaggtgctgtatttattgggtgtgcgttccctgggagagcccgagggagacggctcctgcaccggccccaagggcctctctgcccgtggagtgca

SEQ ID NO: 724610 - DNA, 120 bp, Artificial Sequence
  ENSG00000198105_41 (sequence is synthesized)
ggagcgaaggggctggcctagctgaccaccagggcccctgctggctctgaccgccctcctatcccaagtaattatttacacgtttcgcgttcgcttatgtattatgtgtaatcatggcac

SEQ ID NO: 724611 - DNA, 120 bp, Artificial Sequence
  ENSG00000198105_42 (sequence is synthesized)
aggctaacaggaacgtcacctctggagagtctgagggcagggacgggtgaaaggctcacggccacagcgaaagaaatgctgttatcacccctccgcgaacaccgggcacatccagatgag

SEQ ID NO: 724612 - DNA, 120 bp, Artificial Sequence
  ENSG00000198105_43 (sequence is synthesized)
ctgctgagcttcctcctctcttggcctgatatccccgccggatggtagtgcagtcaggtcatacttgggttatctgttttgaccttatttgaaagatggaaaaacaaaattgagtttgag

SEQ ID NO: 724613 - DNA, 120 bp, Artificial Sequence
  ENSG00000198105_44 (sequence is synthesized)
gaggtgagtagttcagatcttgtcattccttagaggcagaactgagattagaagtcaagtctgcagtttcccgagccactgctgcccattttgttactctatatcacagtttctcattaa

SEQ ID NO: 724614 - DNA, 120 bp, Artificial Sequence
  ENSG00000198105_45 (sequence is synthesized)
aagatccttttgaggaattgttagcaagttagaacaaacatttttaaacttgcatttaacatcctatccctttttttagaggtcttttgcattatctaacctcagggcattaatggtgtt

SEQ ID NO: 724615 - DNA, 120 bp, Artificial Sequence
  ENSG00000198105_46 (sequence is synthesized)
aacaggtaaacagataaacaatatggcctcagtttttttttttccctacaaggaattttgacaaacccatagtgttttttccttcagattactgttaacttgttaaactcatcttttcat

SEQ ID NO: 724616 - DNA, 120 bp, Artificial Sequence
  ENSG00000198105_47 (sequence is synthesized)
gtttttaatttttctgtgtcacagaacctaaattggtaataaatcaataagaaatatttacattcactcagtgaaaagtgtcatgtctgagctcagcatatatcggagccacacatggac

SEQ ID NO: 724617 - DNA, 120 bp, Artificial Sequence
  ENSG00000198105_48 (sequence is synthesized)
acgtaagtatcttgtgtgtggacctgtataggcaggtgaatctccgaactgcaaggccggcgaaggctctcctgacattcttcctttctaatccttcagctctccttcctccactaagag

SEQ ID NO: 724618 - DNA, 120 bp, Artificial Sequence
  ENSG00000198105_49 (sequence is synthesized)
aacacattgagaactgatgtgccttcacaggaaacttggcccgtgtgtttccaggattcttgatgtttcttctgagctccagggtcaggcagtatgattgaagtttctaagccagcatcc

SEQ ID NO: 724619 - DNA, 120 bp, Artificial Sequence
  ENSG00000198105_50 (sequence is synthesized)
ataaggagtagtccctaagaacccacgtggaaggtcacacttctgatctgagacctttcagcagagcctcagagcagagtggaaaaggccaggaaagagcatgtctggaactgcctgttc

SEQ ID NO: 724620 - DNA, 120 bp, Artificial Sequence
  ENSG00000198105_51 (sequence is synthesized)
actgaagacattcttggcactcctgtacagttaaataacacttggtgatgtcagcacatgcagaaaccatggcagactgtccagtggatgggctttcaggaagaattaggctgccagcat

SEQ ID NO: 724621 - DNA, 120 bp, Artificial Sequence
  ENSG00000198105_52 (sequence is synthesized)
gagcaaggggcaggcagcacaggagaggacacgtcactgcccactgtgaggactgtgaggacacagtctggggaaggcatcgcctagatggggaacttgtccctgtgctcctccataagc

SEQ ID NO: 724622 - DNA, 120 bp, Artificial Sequence
  ENSG00000198105_53 (sequence is synthesized)
ctgctcccttcctgtctactcactgtctttgcagcctgtggagatgcatcattgttcctattctgatgttacaaaaatcaagtgacagtgttgtataaaggtcaaaaaatgggcctagaa

SEQ ID NO: 724623 - DNA, 120 bp, Artificial Sequence
  ENSG00000198105_54 (sequence is synthesized)
gtataaaggtcaaaaaatgggcctagaaaatgtgacttatttaatcatttcatttgttagtggcatactcagaaaataactaattagggctgagctcggtggctcatgcctgtaatccca

SEQ ID NO: 724624 - DNA, 120 bp, Artificial Sequence
  ENSG00000198105_55 (sequence is synthesized)
agaccagcttgggcaacatagtgagacccggtctctacaaaaaaaaagtatctggctgtggtggtgcgcacttgtagttctcctacttaagaggccgagactggaggattacttgagctt

SEQ ID NO: 724625 - DNA, 87 bp, Artificial Sequence
  ENSG00000198105_56 (sequence is synthesized)
ctggaggattacttgagcttcatcataccactgtggtacagcccaggcaacagagccagaccctgtctcaaaacaaaaaacaaaaaa

SEQ ID NO: 724626 - DNA, 80 bp, Artificial Sequence
  ENSG00000198105_57 (sequence is synthesized)
tccctcgcctccggaggcggcgaggagcggcgggtgagccccggagcactgggcgagggccagggggtccccgcgctgcc

SEQ ID NO: 724627 - DNA, 120 bp, Artificial Sequence
  ENSG00000198105_58 (sequence is synthesized)
agggacccctggcgcctgcggcgacggtgggacgagggcgtctctgtcagaaggggatgaggtctggcgtgggaacgcgagttccggggctcccgggggtccgtatgcgtccagtccctg

SEQ ID NO: 724628 - DNA, 120 bp, Artificial Sequence
  ENSG00000198108_0 (sequence is synthesized)
actgacagggtggcagcctaggagcggacgcgttgccgccgccgctgctcctcctcctcctcctgcagctcctccagctgccgctgctgccgccgctgccgccaccgccgccgccgggag

SEQ ID NO: 724629 - DNA, 120 bp, Artificial Sequence
  ENSG00000198108_1 (sequence is synthesized)
aagtttcactcccgacccttgctcggagccccggcccagagctgagcgggagcccggcaggcagctgcagcccgcggcagtcgaggcgtccgcggcgcttcgacctccagccggtgtcgg

SEQ ID NO: 724630 - DNA, 120 bp, Artificial Sequence
  ENSG00000198108_2 (sequence is synthesized)
caaaggcggaggaggggcgggtgtgagccggggaaaccgcgtgccgcgccgcgacagcccagcgagcgtccgcgcccgggacagccgcgatggctgtgcgctctcgccgcccgtggatga

SEQ ID NO: 724631 - DNA, 120 bp, Artificial Sequence
  ENSG00000198108_3 (sequence is synthesized)
ccgcgatggctgtgcgctctcgccgcccgtggatgagcgtggcattagggctggtgctgggcttcaccgccgcgtcctggctcatcgcccccagggtggcggagctgagcgagaggaaga

SEQ ID NO: 724632 - DNA, 120 bp, Artificial Sequence
  ENSG00000198108_4 (sequence is synthesized)
gacgtggctccagcctctgctcctactacggtcgctctgctgctggcccccgcgccggcgctcagcagccgctcccccagccccagtcccgaccacggcaggagcagtcgccgccccccg

SEQ ID NO: 724633 - DNA, 120 bp, Artificial Sequence
  ENSG00000198108_5 (sequence is synthesized)
cgcgccaggatctccaggggccaccgctgcccgaggcagcacccgggatcaccagttttcgaagcagcccctggcagcagccacctccgctgcagcagcggcggcgaggacgcgagcctg

SEQ ID NO: 724634 - DNA, 120 bp, Artificial Sequence
  ENSG00000198108_6 (sequence is synthesized)
cctgagggcgcgacggggcttcccggtgctccagcggccgagggggagcccgaggaggaggacgggggcgcggctgggcagcggagagacggccggccggggagtagccacaacggcagc

SEQ ID NO: 724635 - DNA, 120 bp, Artificial Sequence
  ENSG00000198108_7 (sequence is synthesized)
acgggggcgctgccgccccgagcgcccgaccccgggacttcctgtacgtgggggtgatgaccgcgcagaagtacctgggcagccgcgcgctggccgcgcagcggacctgggcgcgtttca

SEQ ID NO: 724636 - DNA, 120 bp, Artificial Sequence
  ENSG00000198108_8 (sequence is synthesized)
tcccgggccgcgtggagttcttttccagccagcagccccccaacgccggccagcccccgccacccctgcctgtcatcgcgctaccgggtgtggacgactcctatcctccccagaaaaagt

SEQ ID NO: 724637 - DNA, 120 bp, Artificial Sequence
  ENSG00000198108_9 (sequence is synthesized)
ccttcatgatgatcaagtacatgcacgaccactacctggacaagtatgagtggttcatgcgcgccgacgacgatgtctacatcaaaggtgataaattagaagagtttcttagatcgctaa

SEQ ID NO: 724638 - DNA, 120 bp, Artificial Sequence
  ENSG00000198108_10 (sequence is synthesized)
acagcagtaagcctctctacctgggacagactggcctggggaatattgaagagcttggaaagctgggactggagcctggggaaaacttctgtatgggaggacctggcatgatctttagcc

SEQ ID NO: 724639 - DNA, 120 bp, Artificial Sequence
  ENSG00000198108_11 (sequence is synthesized)
gagaagttctcaggaggatggtgccacatattggtgaatgccttagagaaatgtacacgactcatgaggatgtggaagtaggaagatgcgttcgccgttttggtgggactcagtgtgtct

SEQ ID NO: 724640 - DNA, 120 bp, Artificial Sequence
  ENSG00000198108_12 (sequence is synthesized)
ggtcttacgagatgcaacaactgttccatgaaaattatgaacacaatcggaagggttacatccaagaccttcacaatagcaaaatccatgcagccataacacttcatcccaacaaaaggc

SEQ ID NO: 724641 - DNA, 120 bp, Artificial Sequence
  ENSG00000198108_13 (sequence is synthesized)
ctgcataccaatacaggctgcataattacatgctcagccgcaaaatttctgaacttcgctaccgcaccatccagctccacagggaaagtgccctgatgagcaagctcagtaacacagaag

SEQ ID NO: 724642 - DNA, 120 bp, Artificial Sequence
  ENSG00000198108_14 (sequence is synthesized)
tgagcaaagaggaccagcagctgggagtgataccttctttcaaccacttccagcctcgggagagaaatgaagtgatagaatgggagttcctgacagggaagcttctatactcagcagctg

SEQ ID NO: 724643 - DNA, 120 bp, Artificial Sequence
  ENSG00000198108_15 (sequence is synthesized)
agaaccagccccctcgacagagcctcagtagcattttaagaacagcactggatgataccgtcctacaggtgatggagatgatcaatgagaatgccaagagcagaggacggctcattgact

SEQ ID NO: 724644 - DNA, 120 bp, Artificial Sequence
  ENSG00000198108_16 (sequence is synthesized)
ggctaccgcagagttaaccccatgcacggggtggagtacattttggatttactccttttatacaaaagacacaagggaaggaaactgactgtgccagtgagacgtcatgcctatcttcag

SEQ ID NO: 724645 - DNA, 120 bp, Artificial Sequence
  ENSG00000198108_17 (sequence is synthesized)
cagttgttcagcaagcctttcttcagagagaccgaagagctagatgtcaacagtcttgtggagagtattaacagtgaaactcagtcattctcctttatatctaattctttaaagatatta

SEQ ID NO: 724646 - DNA, 120 bp, Artificial Sequence
  ENSG00000198108_18 (sequence is synthesized)
tcttcttttcaaggtgccaaagaaatgggagggcacaatgaaaagaaagtacacattctcgttcctctcatcggaaggtatgacattttcttgagattcatggagaactttgaaaacatg

SEQ ID NO: 724647 - DNA, 120 bp, Artificial Sequence
  ENSG00000198108_19 (sequence is synthesized)
tgtcttatcccaaagcagaatgtaaagttggtcattatccttttcagtagggattctggccaagactccagcaagcatattgagctgataaaagggtaccagaacaagtaccccaaagca

SEQ ID NO: 724648 - DNA, 120 bp, Artificial Sequence
  ENSG00000198108_20 (sequence is synthesized)
gaaatgaccctgatcccaatgaagggagagttttccagaggtcttggtcttgaaatggcttctgcccagtttgacaatgacactttgctgctattttgtgatgttgacttgatcttcaga

SEQ ID NO: 724649 - DNA, 120 bp, Artificial Sequence
  ENSG00000198108_21 (sequence is synthesized)
gaagattttctccaacgatgtagagacaatacaattcagggacaacaggtgtactatcccatcatctttagccagtatgacccaaaggtaacaaacgggggaaatcctcccactgatgat

SEQ ID NO: 724650 - DNA, 120 bp, Artificial Sequence
  ENSG00000198108_22 (sequence is synthesized)
tacttcatattctcaaaaaagactggattttggagagactatggatatggcatcacctgtatttacaaaagtgatcttctaggtgcaggtggatttgatacctcaatacaaggctgggga

SEQ ID NO: 724651 - DNA, 120 bp, Artificial Sequence
  ENSG00000198108_23 (sequence is synthesized)
ctagaagatgtagatctctacaataaagtcattctatctggcttaaggccattcagaagccaagaagtaggagtggtgcatattttccatccagttcattgtgatcctaacttggaccct

SEQ ID NO: 724652 - DNA, 120 bp, Artificial Sequence
  ENSG00000198108_24 (sequence is synthesized)
aagcagtataagatgtgcttaggatccaaggcaagtactttcgcctcaaccatgcaactggctgaactctggcttgaaaaacatttaggtgtcaggtacaatcgaactctctcctgacag

SEQ ID NO: 724653 - DNA, 120 bp, Artificial Sequence
  ENSG00000198108_25 (sequence is synthesized)
tccaggcaacacattttgccttttttaaggggagtttacctcattgttggttgttgttatttttattgtattattgttattttattattattattgttataattttattttgttgtcctg

SEQ ID NO: 724654 - DNA, 120 bp, Artificial Sequence
  ENSG00000198108_26 (sequence is synthesized)
gtcttaaactactcttggttgtcttcctaagggtgtttgttgacctcaagcaagaagagtctgcagttcactgatgtttcagatttctactgaagtcaatatgttattacttttatataa

SEQ ID NO: 724655 - DNA, 120 bp, Artificial Sequence
  ENSG00000198108_27 (sequence is synthesized)
ctttatttgagattgagttaaatcatagcaatcaaatgacttttgaaacgcattcatcacaagagacagcttagaagaatgttctcttggggcttaaagatgcaatatcgacttttattt

SEQ ID NO: 724656 - DNA, 120 bp, Artificial Sequence
  ENSG00000198108_28 (sequence is synthesized)
ggtttctcaaattcaatgtgatacaaatatttactggtgaaaggtaccacaaaagtgctttatgcttcctatggggaagggactctgtaacataaacttgagttttgtaatttatacaag

SEQ ID NO: 724657 - DNA, 120 bp, Artificial Sequence
  ENSG00000198108_29 (sequence is synthesized)
tatataaacaataattttcttcatctttagaatttttaaagtaaatgaatacctatgattgtatgtttattttttaaaaaaagttttaaaaattgaggagttttgttccacaagcaaccg

SEQ ID NO: 724658 - DNA, 120 bp, Artificial Sequence
  ENSG00000198108_30 (sequence is synthesized)
agcaaccggtactggctaccctggtcttatgacaattatgagctcctcacaactgtctgctataaatgcgaatgaactttattttctcaaggaaatatgatttaattaaatattcatgta

SEQ ID NO: 724659 - DNA, 120 bp, Artificial Sequence
  ENSG00000198108_31 (sequence is synthesized)
cattttagaagctttatgaaacaatgtccttcatttgctggcaagaagataaaatatgacagaacctgtttatttaaaataaaacacaggtatagcagtattctttttcaaaaacactga

SEQ ID NO: 724660 - DNA, 120 bp, Artificial Sequence
  ENSG00000198113_0 (sequence is synthesized)
actccggccggccgctccctggggacccacaggtgtcgctgcccctccaggccgaagctggcccaggaggcccctggcccaccccctcgccctgggaggcgcatttcctgcttggagtct

SEQ ID NO: 724661 - DNA, 120 bp, Artificial Sequence
  ENSG00000198113_1 (sequence is synthesized)
caggccccagcgtctggcacaggcaggggcctgcggagctgagggcagtggaccagctgcagggagggcgacctgtatgcggagcgccgttcctgcgacatggaccgcggccagcccagc

SEQ ID NO: 724662 - DNA, 120 bp, Artificial Sequence
  ENSG00000198113_2 (sequence is synthesized)
ctggagcctgctgccgcggccccccgagcctcgggccggtgcgtgatcgcgcccgtgcgcgctgtgctccgcctgcgccgccgggtgtgtgtcctacgcaaacggcgcctcctgcagccg

SEQ ID NO: 724663 - DNA, 120 bp, Artificial Sequence
  ENSG00000198113_3 (sequence is synthesized)
ggtggggggcccgacgtcgggaccggggcgcccaggccgggctgcagcccccgggcaccgcgcgcggacctggaccagccaaagttcttcaccttcgacagccccgcggagctaccctcc

SEQ ID NO: 724664 - DNA, 120 bp, Artificial Sequence
  ENSG00000198113_4 (sequence is synthesized)
aggacgccacgcaagaagcgccggcgcagccgcctggtgctttacccggagacctcgcgcaagtatcggccgcgcgtggagcacaggagccgcgcgcagcgctgccttctgctgctagtc

SEQ ID NO: 724665 - DNA, 120 bp, Artificial Sequence
  ENSG00000198113_5 (sequence is synthesized)
gccatcgtgggcttccaagttctcaacgctatcgagaacctggacgataacgcgcagcgctatgacctcgacgggctggagaaagcgctgcagcgcgcggtgttcggccagcccgctgcc

SEQ ID NO: 724666 - DNA, 120 bp, Artificial Sequence
  ENSG00000198113_6 (sequence is synthesized)
gtatcgcgcatcgtggcgctgatgcgggactacctggccacgcatgtgcacagtcgtccgctcctcctggcgctgcacgggcccagtggcgtgggcaagagccacgtgggccgcctgctg

SEQ ID NO: 724667 - DNA, 120 bp, Artificial Sequence
  ENSG00000198113_7 (sequence is synthesized)
gcgcgccacttccgctcggtgctggaggacagcgcgctcgtgctgcaataccatgcgcggcaccactgccccgaggcgcgcgccgcacaggactgccgcgaggagctggcgcggcgcgtg

SEQ ID NO: 724668 - DNA, 120 bp, Artificial Sequence
  ENSG00000198113_8 (sequence is synthesized)
gccgacgtggtggcgcgggccgaagcggaggagaagaccccactcttggtgctggacgacgtggagctcatgccgcggccgctgctggacgagctgcacggcttcctgcagccgcagcgc

SEQ ID NO: 724669 - DNA, 120 bp, Artificial Sequence
  ENSG00000198113_9 (sequence is synthesized)
tcccaccacttccacaacgccatctacgtgctcctcagtggcgcgggtggcgccgaggtcacgcgcttcgtgctgcagaacgcgtcccgcgcgctgcccctgcgccccgacggcttccgc

SEQ ID NO: 724670 - DNA, 120 bp, Artificial Sequence
  ENSG00000198113_10 (sequence is synthesized)
agtgccgaggccgcagcggcgcaggcggaagaagacctgcgcgccagcctgctggctgtgctgtcccgggagcatccgctgtggcaggccgcggccatcgtgccgtttctgctgctggac

SEQ ID NO: 724671 - DNA, 120 bp, Artificial Sequence
  ENSG00000198113_11 (sequence is synthesized)
aagcgggatgtggtcagctgcttccgggacgagatggcgggtgagggcttctttcctgaccaggcccgcgcggagaacctggccgcgcagctcagcttctaccgcgtggctggccgcgag

SEQ ID NO: 724672 - DNA, 120 bp, Artificial Sequence
  ENSG00000198113_12 (sequence is synthesized)
tttgccgtcaccggctgcaagcaggtggtggccacggtgaacctcctgtagtggaggcgcaggacgggacgtttgggttgatggcggcagtaggagggcgaccagggaccttgtgggctg

SEQ ID NO: 724673 - DNA, 120 bp, Artificial Sequence
  ENSG00000198113_13 (sequence is synthesized)
gtgcaggcccctgaggtttctagtgaatttgtggctgcccggctggtgggtgcggatcagcttggagctctgcttccaggtccacacccgcctcagagtccggagtctgtccctgggggc

SEQ ID NO: 724674 - DNA, 120 bp, Artificial Sequence
  ENSG00000198113_14 (sequence is synthesized)
ggcaggacagcagccacctccctcccaaacttgcccattgccctgctgggcgtcccaggcatggtctggtgcgttctccctgtggccccaagaggtgggttcccatggtacaaggatgat

SEQ ID NO: 724675 - DNA, 120 bp, Artificial Sequence
  ENSG00000198113_15 (sequence is synthesized)
ctcagggccaacaattcccggggtcacacagctgggacgtgaccccgcctcttgggggtggtcgcgtgttgctcagtgctgaagtggggttctcattccggcccccctggagatgacccc

SEQ ID NO: 724676 - DNA, 120 bp, Artificial Sequence
  ENSG00000198113_16 (sequence is synthesized)
ggaggaggccacagccaaccatgacagtgctggggctctggctgccttctccacccaccccacccctcactcaggtcgtgttttcaggagctcaaggctggagtgtcttgacagtaaggg

SEQ ID NO: 724677 - DNA, 120 bp, Artificial Sequence
  ENSG00000198113_17 (sequence is synthesized)
actgggtgaccgagagcccgcggggcaagcgggaggtgcctaggcctctccccatccccctcttctccgcacgtgggacccttagcccgtggccagtcccctggtcaccacgattgcgcg

SEQ ID NO: 724678 - DNA, 120 bp, Artificial Sequence
  ENSG00000198113_18 (sequence is synthesized)
acctccctttccctggggccttttgtgccccgagttccgcccacccgcaccctctgcgcagagcgccctccccacgccagtcgaccccacaccccacactccccacgcgccgcctcccgg

SEQ ID NO: 724679 - DNA, 120 bp, Artificial Sequence
  ENSG00000198113_19 (sequence is synthesized)
aagccctcctggacgcctcccgtggatgggcccaccgcgcccacgggggctttaggggaaggtgctttgggcgttttttgcgccatgtctcctcggggccggcggttgcctcgggacggt

SEQ ID NO: 724680 - DNA, 120 bp, Artificial Sequence
  ENSG00000198113_20 (sequence is synthesized)
cggttctcgcctcctcccacagccccggtgtctgggacgcacccggcagccccgctgctgccgccttgtggcgcgcccggcccagccggtggcttctgtggtcgccgggggctgagcgcg

SEQ ID NO: 724681 - DNA, 120 bp, Artificial Sequence
  ENSG00000198113_21 (sequence is synthesized)
ccctgagtcccccaggccgccccgatcctctgtccccgccgccggccccgctgcagtcccaacccgggcctgcccgggaggagcgcaggggcggcgatgaccagtcccgaaaggggctca

SEQ ID NO: 724682 - DNA, 120 bp, Artificial Sequence
  ENSG00000198113_22 (sequence is synthesized)
ctcagagggcagcgaggaggtttcacgccggtgcggggcgccgtcgaggtgggggcaccgcgaaggtggaggcggggccgcgccggaagccccgagtcgagcgcacacggcgggcgcccc

SEQ ID NO: 724683 - DNA, 120 bp, Artificial Sequence
  ENSG00000198113_23 (sequence is synthesized)
tggcaagtgggactcctccggccccgaggcctgaactcagcccggagaccgcgcccaccagcgccggtgtccccggaggggccccgctagttccctgagcagaggtcctgcggcttcccg

SEQ ID NO: 724684 - DNA, 120 bp, Artificial Sequence
  ENSG00000198113_24 (sequence is synthesized)
gagggtgtcctgttctctcccccgcctcgcatccattctcgccctggtggttggtgtctgtggtcgggggcgagggccgtctagtggagacggggattcaggccgcttgaaagtctggga

SEQ ID NO: 724685 - DNA, 120 bp, Artificial Sequence
  ENSG00000198113_25 (sequence is synthesized)
tctctgggcggatggcagcggctccgcggagctcgagctcggcgcgcaggtcctgggcccagggcgggagcgctagcgagagggctgccccgtcctgcccagagggtcctgaggactccc

SEQ ID NO: 724686 - DNA, 120 bp, Artificial Sequence
  ENSG00000198113_26 (sequence is synthesized)
gctgctcctggagtcttggggaggggtccggctccacggggtgggggtgggggctaccaggaaacctttgcctcctggggctgtgcaggaccggctagccagcgctgggaaccagggctg

SEQ ID NO: 724687 - DNA, 120 bp, Artificial Sequence
  ENSG00000198113_27 (sequence is synthesized)
agttcagcccagctctgtccaccccaaccccagggctaggggaaggagctgggagaaggagccccacctctcccaggcgagtatctgtcccaggagcccacacagagggacacccagctc

SEQ ID NO: 724688 - DNA, 120 bp, Artificial Sequence
  ENSG00000198113_28 (sequence is synthesized)
tggtctggccttcgtgttggcttcaaggtggtaacagagagagctgcagagtgggggtgtgtttgccagtccctgcatgggtgaatgttggggtgcccactgctccccaggcaggacccc

SEQ ID NO: 724689 - DNA, 120 bp, Artificial Sequence
  ENSG00000198113_29 (sequence is synthesized)
caggactgtcagctccccttcccacagagcacccacctggaggtgtcacctgccggcaagcgtgggccattcatccacctgtcagtcaacaacacccgctgagcatcggcttgtatcaaa

SEQ ID NO: 724690 - DNA, 90 bp, Artificial Sequence
  ENSG00000198113_30 (sequence is synthesized)
gtcagtcaacaacacccgctgagcatcggcttgtatcaaaaggtccagacctaaggggaaattttatccacagagttttgctcttgttgc

SEQ ID NO: 724691 - DNA, 79 bp, Artificial Sequence
  ENSG00000198113_31 (sequence is synthesized)
ggtaatttttttgtattgttggtagagacggtgattcactatgttggccaggctagtcacgaactcctgacctcgtgat

SEQ ID NO: 724692 - DNA, 120 bp, Artificial Sequence
  ENSG00000198113_32 (sequence is synthesized)
tattaccttgaggccaaattctgcgcttaaggagaatgtgcaccaagtgctggggtgggggctggtaataaacgaggccacaaatcatgcttgttaataaattgtgtggttcaaatctga

SEQ ID NO: 724693 - DNA, 120 bp, Artificial Sequence
  ENSG00000198121_0 (sequence is synthesized)
acggcgcgctgggctcacactgtcccgccgcggacgggctttgtggttgggggcgcgcgtgcgagtgccagtgagagtgtgggtgcgcgctgtgggccgcggcgcgggtgggtggccgtg

SEQ ID NO: 724694 - DNA, 120 bp, Artificial Sequence
  ENSG00000198121_1 (sequence is synthesized)
cgtgcgttcttgcgagccggcctgcaggaggcgaggctcccctggcctcccgcacccagcggcggaccgagcccctggagggaagttgccgcagccgcccgggccgccggccctcctgtc

SEQ ID NO: 724695 - DNA, 120 bp, Artificial Sequence
  ENSG00000198121_2 (sequence is synthesized)
gccaggtacacagcttctcctagcatgacttcgatctgatcagcaaacaagaaaatttgtctcccgtagttctggggcgtgttcaccacctacaaccacagagctgtcatggctgccatc

SEQ ID NO: 724696 - DNA, 120 bp, Artificial Sequence
  ENSG00000198121_3 (sequence is synthesized)
tctacttccatccctgtaatttcacagccccagttcacagccatgaatgaaccacagtgcttctacaacgagtccattgccttcttttataaccgaagtggaaagcatcttgccacagaa

SEQ ID NO: 724697 - DNA, 120 bp, Artificial Sequence
  ENSG00000198121_4 (sequence is synthesized)
tggaacacagtcagcaagctggtgatgggacttggaatcactgtttgtatcttcatcatgttggccaacctattggtcatggtggcaatctatgtcaaccgccgcttccattttcctatt

SEQ ID NO: 724698 - DNA, 120 bp, Artificial Sequence
  ENSG00000198121_5 (sequence is synthesized)
tattacctaatggctaatctggctgctgcagacttctttgctgggttggcctacttctatctcatgttcaacacaggacccaatactcggagactgactgttagcacatggctccttcgt

SEQ ID NO: 724699 - DNA, 120 bp, Artificial Sequence
  ENSG00000198121_6 (sequence is synthesized)
cagggcctcattgacaccagcctgacggcatctgtggccaacttactggctattgcaatcgagaggcacattacggttttccgcatgcagctccacacacggatgagcaaccggcgggta

SEQ ID NO: 724700 - DNA, 120 bp, Artificial Sequence
  ENSG00000198121_7 (sequence is synthesized)
gtggtggtcattgtggtcatctggactatggccatcgttatgggtgctatacccagtgtgggctggaactgtatctgtgatattgaaaattgttccaacatggcacccctctacagtgac

SEQ ID NO: 724701 - DNA, 120 bp, Artificial Sequence
  ENSG00000198121_8 (sequence is synthesized)
tcttacttagtcttctgggccattttcaacttggtgacctttgtggtaatggtggttctctatgctcacatctttggctatgttcgccagaggactatgagaatgtctcggcatagttct

SEQ ID NO: 724702 - DNA, 120 bp, Artificial Sequence
  ENSG00000198121_9 (sequence is synthesized)
ggaccccggcggaatcgggataccatgatgagtcttctgaagactgtggtcattgtgcttggggcctttatcatctgctggactcctggattggttttgttacttctagacgtgtgctgt

SEQ ID NO: 724703 - DNA, 120 bp, Artificial Sequence
  ENSG00000198121_10 (sequence is synthesized)
ccacagtgcgacgtgctggcctatgagaaattcttccttctccttgctgaattcaactctgccatgaaccccatcatttactcctaccgcgacaaagaaatgagcgccacctttaggcag

SEQ ID NO: 724704 - DNA, 120 bp, Artificial Sequence
  ENSG00000198121_11 (sequence is synthesized)
ctcagaccgctcggcttcctccctcaaccacaccatcttggctggagttcacagcaatgaccactctgtggtttagaacggaaactgagatgaggaaccagccgtcctctcttggaggat

SEQ ID NO: 724705 - DNA, 120 bp, Artificial Sequence
  ENSG00000198121_12 (sequence is synthesized)
aaacagcctccccctacccaattgccagggcaaggtggggtgtgagagaggagaaaagtcaactcatgtacttaaacactaaccaatgacagtatttgttcctggaccccacaagacttg

SEQ ID NO: 724706 - DNA, 120 bp, Artificial Sequence
  ENSG00000198121_13 (sequence is synthesized)
atatatattgaaaattagcttatgtgacaaccctcatcttgatccccatcccttctgaaagtaggaagttggagctcttgcaatggaattcaagaacagactctggagtgtccatttaga

SEQ ID NO: 724707 - DNA, 120 bp, Artificial Sequence
  ENSG00000198121_14 (sequence is synthesized)
ctacactaactagacttttaaaagattttgtgtggtttggtgcaagtcagaataaattctggctagttgaatccacaacttcatttatatacaggcttcccttttttatttttaaaggat

SEQ ID NO: 724708 - DNA, 120 bp, Artificial Sequence
  ENSG00000198121_15 (sequence is synthesized)
acgtttcacttaataaacacgtttatgcctatcagcatgtttgtgatggatgagactatggactgcttttaaactaccataattccattttttcccttacataggaaaactgtaagttgg

SEQ ID NO: 724709 - DNA, 120 bp, Artificial Sequence
  ENSG00000198121_16 (sequence is synthesized)
aattatcttttgtttagaaagcatgcatgtaatgtatgtatgcagtatgccttacttaaaaagattaaaaggatactaatgttaaatcttctaggaaatagaacctagacttcaaagcca

SEQ ID NO: 724710 - DNA, 120 bp, Artificial Sequence
  ENSG00000198121_17 (sequence is synthesized)
gtatttgtttaggtcatgaagcaaacaatgctctaatcacaatattaactgtttaattaaaatgttgtaacaagtataaaacagggaatgtaagtttattaccaaagtgatatgtattcc

SEQ ID NO: 724711 - DNA, 120 bp, Artificial Sequence
  ENSG00000198121_18 (sequence is synthesized)
aaaaaagtcatagaagatgaagcactataatattgttcccatatatttaaaatacccaagtacattctaattaccagtatatcagaggaaaattttcgtagtctttgtaaaataatatac

SEQ ID NO: 724712 - DNA, 120 bp, Artificial Sequence
  ENSG00000198121_19 (sequence is synthesized)
tcatcatagaaaacttgaaaaatgcagaaatgtataaaaaagcaaaaatgattactgataatatcacaacccagaagtaaccacctttaaaaagcaacccccatgtatgcctatatgtgt

SEQ ID NO: 724713 - DNA, 120 bp, Artificial Sequence
  ENSG00000198121_20 (sequence is synthesized)
attgtatactttttttacataattggagtcatactgtaaacagttttataagtagatctttttcattgcaaaattgccacattttcttatggcattaaaaattttacaaaaacataattt

SEQ ID NO: 724714 - DNA, 120 bp, Artificial Sequence
  ENSG00000198121_21 (sequence is synthesized)
taatggctatattatattccatttaatggatgcaactcagtttatttaaccattcccatgttgttaactatttaggttgtttctaattttcattattataaagttgcagaaatttggtgt

SEQ ID NO: 724715 - DNA, 120 bp, Artificial Sequence
  ENSG00000198121_22 (sequence is synthesized)
agaaagcagggctgcatggtgtggggatgctgctgctactcattcctgctcattccagtgttctggaaaatgaggtggacgtctgatttatgaagctccccatccacctatctgagtacc

SEQ ID NO: 724716 - DNA, 120 bp, Artificial Sequence
  ENSG00000198121_23 (sequence is synthesized)
ttcccatgaaggattctttttttaaaaaaatgtgaaatgtcatcttgtacttacacctttcatgaaaagggatttcctgcttttgtactgcatgggtggcagttgtgaggaaaagccagt

SEQ ID NO: 724717 - DNA, 120 bp, Artificial Sequence
  ENSG00000198121_24 (sequence is synthesized)
caaatgacctttttacaaaagaaatgcagtggtcacttcagttgagagtgactttttaatacaacaagatcaactagaagaattcaactgtctcaagaatcaaggtaccccaatatatct

SEQ ID NO: 724718 - DNA, 120 bp, Artificial Sequence
  ENSG00000198121_25 (sequence is synthesized)
cgcaattccaaactttgtttgagggactcgttatccagctcttggtagccacacctgcaatgtaaaatggaagaaaatgcaaagaaaccaaatgtgccgagtgaataaaggattgtcata

SEQ ID NO: 724719 - DNA, 120 bp, Artificial Sequence
  ENSG00000198121_26 (sequence is synthesized)
gagtgtgtcagtatgtggttggttactgtgtattcgccaggaatcaccccgataggctgccaccctattaggtgatacctgtttaatatgttgtccaggtagactagtagttgcatcagt

SEQ ID NO: 724720 - DNA, 120 bp, Artificial Sequence
  ENSG00000198121_27 (sequence is synthesized)
ttgctgtaacaagtaaccagtgaggtaacacagtggtgaagcaggtcaggggaggtcaggaggatgtctgagagaaagaagtccgggagatgaatggctgtctaggaaggaggatgtcag

SEQ ID NO: 724721 - DNA, 120 bp, Artificial Sequence
  ENSG00000198121_28 (sequence is synthesized)
tgcacggttagtgtttgagcagagggcagacttgtaaagtacctgtagtgaaaagaatgtggggacccgattagcagaaaggtgtttgcacgtactttatacaaaatacagaatacttta

SEQ ID NO: 724722 - DNA, 120 bp, Artificial Sequence
  ENSG00000198121_29 (sequence is synthesized)
tattggaagtgaaagaaatgaacgtggacttttacacatgtgcatatttttctggaggctatatggattatttgaaatgaaaagcatactaattggactttaataaatcattttcaatca

SEQ ID NO: 724723 - DNA, 120 bp, Artificial Sequence
  ENSG00000198121_30 (sequence is synthesized)
ctcaagggaacagctcctgcccaggtctgtgggcactcagcatggatttcagtctccctgtgagtgatgggaaagaactaacagaggtggacgtctgatttatgaagctccccatccacc

SEQ ID NO: 724724 - DNA, 80 bp, Artificial Sequence
  ENSG00000198121_31 (sequence is synthesized)
ctggcggctgacgctccctgagtggcgactccgtctccagccccgctgcggagcgcgggccggatctggggcggccaggg

SEQ ID NO: 724725 - DNA, 120 bp, Artificial Sequence
  ENSG00000198121_32 (sequence is synthesized)
gaagccagcccgggggcggcaggagagggacgcgcggcggcagcgagcgcaggtggacgtctgatttatgaagctccccatccacctatctgagtacctgacttctcaggactgacacct

SEQ ID NO: 724726 - DNA, 120 bp, Artificial Sequence
  ENSG00000198125_0 (sequence is synthesized)
gagcatgttggcctggtcctttgctaggtactgtagagcaggtgagagagtgagggggaaggactccaaattagaccagttcttagccatgaagcagagactctgaagccagactacctg

SEQ ID NO: 724727 - DNA, 120 bp, Artificial Sequence
  ENSG00000198125_1 (sequence is synthesized)
ggtcccaatcttgggcttggtatttcctcgctgtgtgactctggactgcgccatggggctcagcgacggggaatggcagttggtgctgaacgtctgggggaaggtggaggctgacatccc

SEQ ID NO: 724728 - DNA, 120 bp, Artificial Sequence
  ENSG00000198125_2 (sequence is synthesized)
aggccatgggcaggaagtcctcatcaggctctttaagggtcacccagagactctggagaagtttgacaagttcaagcacctgaagtcagaggacgagatgaaggcgtctgaggacttaaa

SEQ ID NO: 724729 - DNA, 120 bp, Artificial Sequence
  ENSG00000198125_3 (sequence is synthesized)
gaagcatggtgccaccgtgctcaccgccctgggtggcatccttaagaagaaggggcatcatgaggcagagattaagcccctggcacagtcgcatgccaccaagcacaagatccccgtgaa

SEQ ID NO: 724730 - DNA, 120 bp, Artificial Sequence
  ENSG00000198125_4 (sequence is synthesized)
caaggccctggagctgttccggaaggacatggcctccaactacaaggagctgggcttccagggctaggcccctgccgctcccacccccacccatctgggccccgggttcaagagagagcg

SEQ ID NO: 724731 - DNA, 120 bp, Artificial Sequence
  ENSG00000198125_5 (sequence is synthesized)
gggtctgatctcgtgtagccatatagagtttgcttctgagtgtctgctttgtttagtagaggtgggcaggaggagctgaggggctggggctggggtgttgaagttggctttgcatgccca

SEQ ID NO: 724732 - DNA, 120 bp, Artificial Sequence
  ENSG00000198125_6 (sequence is synthesized)
gcgatgcgcctccctgtgggatgtcatcaccctgggaaccgggagtggcccttggctcactgtgttctgcatggtttggatctgaattaattgtcctttcttctaaatcccaaccgaact

SEQ ID NO: 724733 - DNA, 120 bp, Artificial Sequence
  ENSG00000198125_7 (sequence is synthesized)
tcttccaacctccaaactggctgtaaccccaaatccaagccattaactacacctgacagtagcaattgtctgattaatcactggccccttgaagacagcagaatgtccctttgcaatgag

SEQ ID NO: 724734 - DNA, 120 bp, Artificial Sequence
  ENSG00000198125_8 (sequence is synthesized)
gaggagatctgggctgggcgggccagctggggaagcatttgactatctggaacttgtgtgtgcctcctcaggtatggcagtgactcacctggttttaataaaacaacctgcaacatctca

SEQ ID NO: 724735 - DNA, 120 bp, Artificial Sequence
  ENSG00000198125_9 (sequence is synthesized)
aatggcacctgccctaaaatagcttcccatgtgagggctagagaaaggaaaagattagaccctccctggatgagagagagaaagtgaaggagggcaggggagggggacagcgagccattg

SEQ ID NO: 724736 - DNA, 120 bp, Artificial Sequence
  ENSG00000198125_10 (sequence is synthesized)
gctataagacacctctccccacccccagccctggccgcttggctggaggctctgcgaggacagctggggagaaggggagctgtgactgcgccatggggctcagcgacggggaatggcagt

SEQ ID NO: 724737 - DNA, 120 bp, Artificial Sequence
  ENSG00000198125_11 (sequence is synthesized)
gagagcattgatgaggtcaggaagcctcctgttgggtagaggagcaactaagagactgaacttggcccccaccctgaggctcacaagcttgaattgcacctgagttccaaaggagaagtt

SEQ ID NO: 724738 - DNA, 120 bp, Artificial Sequence
  ENSG00000198125_12 (sequence is synthesized)
cttggctggaggctctgcgaggacagctggggagaaggggagctgtgcccagatttaccaaagggaattgtcagctgtccaagggctagcaaattcctaggtcacctagattggattttc

SEQ ID NO: 724739 - DNA, 120 bp, Artificial Sequence
  ENSG00000198125_13 (sequence is synthesized)
aaggtggaggctgacatcccaggccatgggcaggaagtcctcatcaggtaaaaggaagagattccattgcccctgccacccacaccctaagatcaagggtgttcagctgcaaggtggaaa

SEQ ID NO: 724740 - DNA, 120 bp, Artificial Sequence
  ENSG00000198125_14 (sequence is synthesized)
gccttatttctctgctggttgagcgaagggattgtcttccatggtctccgagatcccgtcccacgctcatgccctagaattctctgagtccttgatgcacttttgcctttggcgaggagg

SEQ ID NO: 724741 - DNA, 120 bp, Artificial Sequence
  ENSG00000198128_0 (sequence is synthesized)
gctaagcaaaggcagtgagtgtttggaaatgaggaaataataaaggaaagagcacacgaatgccccatggaaaattacaatcaaacatcaactgatttcatcttattaggattcttccca

SEQ ID NO: 724742 - DNA, 120 bp, Artificial Sequence
  ENSG00000198128_1 (sequence is synthesized)
ccatcaagaattggccttttcctcttcatcctcattgttttcattttcctaatggctctaattggaaacctatccatgattcttctcatcttcttggacacccatctccacacacccatg

SEQ ID NO: 724743 - DNA, 120 bp, Artificial Sequence
  ENSG00000198128_2 (sequence is synthesized)
tatttcctacttagtcagctctccctcattgacctaaattacatctccaccattgttcctaagatggcatctgattttctgtctggtaacaagtctatctccttcactgggtgtgggatt

SEQ ID NO: 724744 - DNA, 120 bp, Artificial Sequence
  ENSG00000198128_3 (sequence is synthesized)
cagagtttcttcttctcggcattaggaggtgcagaagcactacttttggcatctatggcctatgatcgttacattgctatttgctttcctcttcactatcccatccgcatgagcaaaaga

SEQ ID NO: 724745 - DNA, 120 bp, Artificial Sequence
  ENSG00000198128_4 (sequence is synthesized)
atgtgtgtgctgatgataacagggtcttggatcataggctcgatcaatgcttgtgctcacactgtatatgtactccatattccttattgccaatccagggccatcaatcatttcttctgt

SEQ ID NO: 724746 - DNA, 120 bp, Artificial Sequence
  ENSG00000198128_5 (sequence is synthesized)
gatgtcccagcaatggtgactctggcctgcatggacacctgggtctatgagggcacagtgtttttgagcaccaccatctttctcgtgtttcccttcattgctatttcatgttcctatggc

SEQ ID NO: 724747 - DNA, 120 bp, Artificial Sequence
  ENSG00000198128_6 (sequence is synthesized)
cgggttctccttgctgtctaccacatgaaatctgcagaagggaggaagaaagcctacctgacctgcagcacccacctcactgtagtaactttctactatgcaccttttgtctacacttat

SEQ ID NO: 724748 - DNA, 120 bp, Artificial Sequence
  ENSG00000198128_7 (sequence is synthesized)
ctacgtccaagatccctgcgatctccaacagaggacaaggttctggctgtcttctacaccaccctcactccaatgctcaaccccatcatctatagcctgaggaacaaggaggtgatgggg

SEQ ID NO: 724749 - DNA, 120 bp, Artificial Sequence
  ENSG00000198128_8 (sequence is synthesized)
gccctgacacgagtgagtcagagaatctgctctgggaaaatgtagaaacattttctacctaaggtctcaggactcagatacacatccatccagcagtgtatagtaattaaaatattattt

SEQ ID NO: 724750 - DNA, 120 bp, Artificial Sequence
  ENSG00000198128_9 (sequence is synthesized)
caatcctagagttcaggagctaaaagtaatcaaggtaagagaaaaaaatcactgatttctggacaaaattgttttacatatatatgtatatataactccaaacaaccttttttcttcatg

SEQ ID NO: 724751 - DNA, 120 bp, Artificial Sequence
  ENSG00000198128_10 (sequence is synthesized)
gcattgtttccataaattttgaaagcacctacttttactaatatgttgtcaatgagaatttttgtttttggtcatgcagaaatagaaatgaaattggtctaactgaagttggcactcagc

SEQ ID NO: 724752 - DNA, 120 bp, Artificial Sequence
  ENSG00000198128_11 (sequence is synthesized)
agtaattttaaatttacttttttgtttatgtctaaaacaaaacaaaaaataagtctcttgacttggtgtatctagttgaaagctgtaagatgttttgtctttcttatcttagacacttaa

SEQ ID NO: 724753 - DNA, 120 bp, Artificial Sequence
  ENSG00000198128_12 (sequence is synthesized)
cgtaccaattactcattctttcaatttagggaactcattacacagtttagcagagagctcatcagggattcttaagtcctgataccactctggatggcctatgacaagattatgttcttt

SEQ ID NO: 724754 - DNA, 120 bp, Artificial Sequence
  ENSG00000198128_13 (sequence is synthesized)
ataggggaatgaatcccaggaaatgatttaacattaggtatattttagatcaacaaaaggactggaacatgccagcagtaataaaaatgattacatttaggtctttaacctgttttgagt

SEQ ID NO: 724755 - DNA, 120 bp, Artificial Sequence
  ENSG00000198128_14 (sequence is synthesized)
tgatttggatatagtgtaatgactgggagtttattttcatttttctgcttaaaaatatccagttttgccagcaccttatattgaagacactgtctttttcccaatgaacagtcttgggtc

SEQ ID NO: 724756 - DNA, 120 bp, Artificial Sequence
  ENSG00000198128_15 (sequence is synthesized)
tgttgtcaaaaatcagttgcacagaaaggttttgcttgttctcactcctatgcgagagctagaatttttaaaaactgaactagtggaaatagagaagagactgatggtcaccagagggtg

SEQ ID NO: 724757 - DNA, 120 bp, Artificial Sequence
  ENSG00000198128_16 (sequence is synthesized)
ggaagggtacaggggagggacgataaagtggggatggctaatagttgcaaaaatataattagatagaatgaataagagtatttgatagcacaatagagtaactatagtaaacaataattt

SEQ ID NO: 724758 - DNA, 120 bp, Artificial Sequence
  ENSG00000198128_17 (sequence is synthesized)
attgtagaatttattgtatgtattaaagaataactgaaagagtggaattggaatgttcccaacacaaagaaataaccatatttgaggtgatggttaccccgattaacccgatttgatcat

SEQ ID NO: 724759 - DNA, 120 bp, Artificial Sequence
  ENSG00000198128_18 (sequence is synthesized)
tatgcattgtatgcctttatcaaagcatcacatacactccgcaattatatattactattatgtatccatagtaattaaaataaaagaaccagttcactgtagatatatggatttatttct

SEQ ID NO: 724760 - DNA, 120 bp, Artificial Sequence
  ENSG00000198128_19 (sequence is synthesized)
tgtgtctgtttttatgccagtaccattctgttttggttattccatgtttgtagtatagtttgaagtttggtactcatgcctccagttttttctttttattctacagtgctttgactattt

SEQ ID NO: 724761 - DNA, 120 bp, Artificial Sequence
  ENSG00000198128_20 (sequence is synthesized)
tttttattctacagtgctttgactatttgggttctttaatagttccatacaaatcttaaataatggtttttactatttatgtgcagaatgtcattggtattttgatagacattgcattga

SEQ ID NO: 724762 - DNA, 120 bp, Artificial Sequence
  ENSG00000198128_21 (sequence is synthesized)
atctgtagtttggttatttaaataatattaattcttccaatccatgagcattggatttctttccattcatttgtattcctcttcattttctttcaccagtgatttgtacaaatacattct

SEQ ID NO: 724763 - DNA, 120 bp, Artificial Sequence
  ENSG00000198128_22 (sequence is synthesized)
agtgttctcttccatgactaccgttaacggtaaagtattacatagtgcaatgctctttaaatgtcatttctatttctaagcctgtggatatttgttttaccatattgtagcagttaaaac

SEQ ID NO: 724764 - DNA, 120 bp, Artificial Sequence
  ENSG00000198128_23 (sequence is synthesized)
cagaagaaatgataacagctcctctttttacctctggtagaattcagctgtaatccatctgaacctgggctttttttcctttggaaagagcacacgaatgccccatggaaaattacaatc

SEQ ID NO: 724765 - DNA, 120 bp, Artificial Sequence
  ENSG00000198128_24 (sequence is synthesized)
gctaagcaaaggcagtgagtgtttggaaatgaggaaataataaagggtccaccattccactttccatctctgtgaatttcactactgtgggtacttcatgaaagagcacacgaatgcccc

SEQ ID NO: 724766 - DNA, 120 bp, Artificial Sequence
  ENSG00000198129_0 (sequence is synthesized)
cttccttcatcagctctccactgatgcctggagccatgaaaatatttgtctttattttggctgctctcattcttcttgctcaaattttccaagccaggacagcaattcatagagcactaa

SEQ ID NO: 724767 - DNA, 120 bp, Artificial Sequence; identical to SEQ ID NO: 679646
  ENSG00000198129_1 (sequence is synthesized)

SEQ ID NO: 724768 - DNA, 120 bp, Artificial Sequence
  ENSG00000198130_0 (sequence is synthesized)
gggcggggctcacgcgaggcgctggaacggtccgggagattctcgctctgctgctttagcttcggagtgtttggcgatggggcagcgcgagatgtggaggctcatgtcgaggtttaatgc

SEQ ID NO: 724769 - DNA, 120 bp, Artificial Sequence
  ENSG00000198130_1 (sequence is synthesized)
attcaaaaggactaataccatactgcaccatttgagaatgtccaagcacacagatgcagcagaagaggtgctattggaaaaaaaaggttgcacgggagtcataacactaaacagaccaaa

SEQ ID NO: 724770 - DNA, 120 bp, Artificial Sequence
  ENSG00000198130_2 (sequence is synthesized)
gttcctcaatgcactgactcttaatatgattcggcagatttatccacagctaaagaagtgggaacaagatcctgaaactttcctgatcattataaagggagcaggaggaaaggctttctg

SEQ ID NO: 724771 - DNA, 120 bp, Artificial Sequence
  ENSG00000198130_3 (sequence is synthesized)
tgccgggggtgatatcagagtgatctcggaagctgaaaaggcaaaacagaagatagctccagttttcttcagagaagaatatatgctgaataatgctgttggttcttgccagaaacctta

SEQ ID NO: 724772 - DNA, 120 bp, Artificial Sequence
  ENSG00000198130_4 (sequence is synthesized)
tgttgcacttattcatggaattacaatgggtgggggagttggtctctcagtccatgggcaatttcgagtggctacagaaaagtgtctttttgctatgccagaaactgcaataggactgtt

SEQ ID NO: 724773 - DNA, 120 bp, Artificial Sequence
  ENSG00000198130_5 (sequence is synthesized)
ccctgatgtgggtggaggttatttcttgccacgactccaaggaaaacttggttacttccttgcattaacaggattcagactaaaaggaagagatgtgtacagagcaggaattgctacaca

SEQ ID NO: 724774 - DNA, 120 bp, Artificial Sequence
  ENSG00000198130_6 (sequence is synthesized)
ctttgtagattctgaaaagttggccatgttagaggaagatttgttagccttgaaatctccttcaaaagaaaatattgcatctgtcttagaaaattaccatacagagtctaagattgatcg

SEQ ID NO: 724775 - DNA, 120 bp, Artificial Sequence
  ENSG00000198130_7 (sequence is synthesized)
agacaagtcttttatacttgaggaacacatggacaaaataaacagttgtttttcagccaatactgtggaagaaattattgaaaacttacagcaagatggttcatcttttgccctagagca

SEQ ID NO: 724776 - DNA, 120 bp, Artificial Sequence
  ENSG00000198130_8 (sequence is synthesized)
attgaaggtaattaataaaatgtctccaacatctctaaagatcacactaaggcaactcatggaggggtcttcaaagaccttgcaagaagtactaactatggagtatcggctaagtcaagc

SEQ ID NO: 724777 - DNA, 120 bp, Artificial Sequence
  ENSG00000198130_9 (sequence is synthesized)
ttgtatgagaggtcatgactttcatgaaggcgttagagctgttttaattgataaagaccagagtccaaaatggaaaccagctgatctaaaagaagttactgaggaagatttgaataatca

SEQ ID NO: 724778 - DNA, 120 bp, Artificial Sequence
  ENSG00000198130_10 (sequence is synthesized)
tgaggtgacaggcttttaaggtatattttgtagcatgggttggcaatctacagcatgtgggccaaatccagcctgctgcctgtttttatataccctgtaagctaagaatggtttccgcat

SEQ ID NO: 724779 - DNA, 120 bp, Artificial Sequence
  ENSG00000198130_11 (sequence is synthesized)
ttttaaatggttgggaaaagaaatcaaagactaataattcatgacgtgaaaattatcagaattcacaaataaagctttattggaactagctatactcatctgtttatatattatctgtgg

SEQ ID NO: 724780 - DNA, 120 bp, Artificial Sequence
  ENSG00000198130_12 (sequence is synthesized)
ctgctttgaaatgagtagttgcaatagagatggtaaagcctacaaagcctaattatttactgtctggtttttgtcagaaaaaagtttgtcaatccttgttttagaagatggaaaaatgtg

SEQ ID NO: 724781 - DNA, 120 bp, Artificial Sequence
  ENSG00000198130_13 (sequence is synthesized)
aagatctttggagattctcttgagtggtatatctaattgaaatgggatcttcgtttggcttgtatgttgatgaaatcaacttaggtatacaatataaaaaataaagaccctgaaaattgt

SEQ ID NO: 724782 - DNA, 120 bp, Artificial Sequence
  ENSG00000198130_14 (sequence is synthesized)
tttggatactgtgttaatgcctcatagaatttttgttttggatactgtgttaatgcctcatagaattttctccatatatgagtgtgttttaaagtaactgagttactgtagcagaagagc

SEQ ID NO: 724783 - DNA, 120 bp, Artificial Sequence
  ENSG00000198130_15 (sequence is synthesized)
tccttttataaacattagaaaccttgggcagagagaaaagatttttattaacgtccctcttcagtattaactcagacttggtcttccctaaaataatcagaataccatcccatggtgaaa

SEQ ID NO: 724784 - DNA, 120 bp, Artificial Sequence
  ENSG00000198130_16 (sequence is synthesized)
ctgaaaggattattttcttgttatttgtgatatttgttaatctggtagaatgagaaattaggaaactccaatctcttagatagagacactctgtttttttataatttacgtaagactttt

SEQ ID NO: 724785 - DNA, 120 bp, Artificial Sequence
  ENSG00000198130_17 (sequence is synthesized)
gtgtgataattatccttacaaacaaggttcaagtcaggagaaaaaaattaattgaaagcaagaagacttttgttcaaaagatatattcaataattgatattgttaatgaagtaagtactt

SEQ ID NO: 724786 - DNA, 120 bp, Artificial Sequence
  ENSG00000198130_18 (sequence is synthesized)
tttaaggtatgaaagaactaaaaggtattccagactcagaaccttaaagttctaggcaagaataatttttaaactaaaggtaagtttataaattaacaaagtaaacaaaatttatgattt

SEQ ID NO: 724787 - DNA, 80 bp, Artificial Sequence
  ENSG00000198130_19 (sequence is synthesized)
ggcctcgctgccggggcagggacctcgcaggccggcgcgcagaggcgaggaaccctcccggcgccatcgactcacctacc

SEQ ID NO: 724788 - DNA, 120 bp, Artificial Sequence
  ENSG00000198130_20 (sequence is synthesized)
ttttacattatttttctccccagtctcaccttctgtgtctctttgatctttgtcttttccagtctctctcttgctcattttcttcttttatttctctttctgtcatcccctgtttccttt

SEQ ID NO: 724789 - DNA, 120 bp, Artificial Sequence
  ENSG00000198130_21 (sequence is synthesized)
ttccctcaaactcagtttcttcctctttctctctctgggcatgagctgagccttaactgtgccctggctcccccgtgtctgacagacagttctgactctttttctctgggcaccagcaca

SEQ ID NO: 724790 - DNA, 120 bp, Artificial Sequence
  ENSG00000198130_22 (sequence is synthesized)
cctgcacagtgtcttacactgccttccctgtcttggctgcttagtccagtggctcccacacacacagctgtgcaccaggctttcccttgccttcagggtcagcagcttaactctttctct

SEQ ID NO: 724791 - DNA, 120 bp, Artificial Sequence
  ENSG00000198130_23 (sequence is synthesized)
ggccctctacgtttgctgtttcctcccctttatctttctgatttcctttcttttcatcgatgtttccccctttcttcttacagaaaccttctgagcttcccttagtaattccttaattgg

SEQ ID NO: 724792 - DNA, 120 bp, Artificial Sequence
  ENSG00000198130_24 (sequence is synthesized)
tttttcattccatccattaaccttttgcagtttcttagtaatatcaggccagcttttagtcagaaaattaacctttaaaattaaaggccttgccctactgggtcctctggatttaatcct

SEQ ID NO: 724793 - DNA, 120 bp, Artificial Sequence
  ENSG00000198130_25 (sequence is synthesized)
gaatattttcgcatttgatcactgagcctctgcagcaacacagagggagtctcctccttttttgttgttgaatctcaaatgcttttgagacattttatgtcctaggagtggactttttaa

SEQ ID NO: 724794 - DNA, 120 bp, Artificial Sequence
  ENSG00000198130_26 (sequence is synthesized)
tccctttaattattagttcccttaggtcctgcatttgggcccgatctctttattgttatcccatccaggatctgcatttaggaatttctgctcagttggcaggacttcttgcctgggagg

SEQ ID NO: 724795 - DNA, 120 bp, Artificial Sequence
  ENSG00000198130_27 (sequence is synthesized)
acgctgtctttcccaaatggttatggctgcccttataattattcccctctcttccccagtaaacacaatattcatgattgacatcatctcagcctaagtataaaaattgggtcctaaaaa

SEQ ID NO: 724796 - DNA, 120 bp, Artificial Sequence
  ENSG00000198130_28 (sequence is synthesized)
ttgatctagctgctaaaccgaggggatctctgctaagctgaggtttgctctgctaaaccgaggggatcttccaagaatggcctcatttcctttttaaaattcctaacctcagtacttgtt

SEQ ID NO: 724797 - DNA, 120 bp, Artificial Sequence
  ENSG00000198130_29 (sequence is synthesized)
agaggtgcattcacaaacccaactcctccctgtcccatagggacttctctaagagagtacttattagacgtctactgttcagaagaaatagggaaattctcaatgtccttcttacattgt

SEQ ID NO: 724798 - DNA, 120 bp, Artificial Sequence
  ENSG00000198130_30 (sequence is synthesized)
tctaattctttcctcaagtttggataaggatttaagggagcactgggtttagctccttcatgatccccagattcctctttcctcgaccttcctcttgcccccgatctccctgtcctctac

SEQ ID NO: 724799 - DNA, 120 bp, Artificial Sequence
  ENSG00000198130_31 (sequence is synthesized)
cttgtgagatgtttgggggaggggcaagcgtgttggggatcccagggcttttcactgggtgagggctctttactgtgctcttcctctttaagggggaacatggggttaaatcactaatcc

SEQ ID NO: 724800 - DNA, 120 bp, Artificial Sequence
  ENSG00000198130_32 (sequence is synthesized)
aacaaagaacataacccacatcctctgtgagtatgggttttatcattcacgtagagaattaaagcttggcacacccagtcctcatctgagccaaacttaggccaaaagaccaaaggctga

SEQ ID NO: 724801 - DNA, 120 bp, Artificial Sequence
  ENSG00000198130_33 (sequence is synthesized)
caaatgggctttttgggccagataaaacagcaatactctatcatcttttgcttttccttgttcctggtttggggattatccattcaaacctgcaacattctccccaagggactatctggg

SEQ ID NO: 724802 - DNA, 120 bp, Artificial Sequence
  ENSG00000198130_34 (sequence is synthesized)
agttcgctctttcctttgttctgtaggcctagaattcctgtttcccattttcacttagtctctgtgtcaggtttttgctgtgtactcagccccccttactggaggtttcttgcacactcc

SEQ ID NO: 724803 - DNA, 120 bp, Artificial Sequence
  ENSG00000198130_35 (sequence is synthesized)
gggttctctgaaaatgccccaataccaaggcagtactgataatccaactttcctaccttggatcatgcaggaggttggctggttgccatggtgcctgcttttctccttgtgtcacctccg

SEQ ID NO: 724804 - DNA, 120 bp, Artificial Sequence
  ENSG00000198130_36 (sequence is synthesized)
ctgtctcctgaacaagacttgggtttgtctgtggcttctgcggggagccaagatgtccagagcaggccacataaatcaagtggggtgcgtctcccttctcggctggagtcttaactccat

SEQ ID NO: 724805 - DNA, 120 bp, Artificial Sequence
  ENSG00000198130_37 (sequence is synthesized)
acaggcacagagatagccgtatgggccaccaggttgtgagaaacaattcacccgtccaaacccacagaatggactcagagacccggacagtagcaaaagcgagacttttaatgacggtct

SEQ ID NO: 724806 - DNA, 120 bp, Artificial Sequence
  ENSG00000198130_38 (sequence is synthesized)
tgcaagattgggtgtctggtgtgcaggcacacccggcacagttttaacaagcaacttaacctcctagtgcacaggtccctcccccggttccttataggctgagtcctatagggtcacagt

SEQ ID NO: 724807 - DNA, 90 bp, Artificial Sequence
  ENSG00000198130_39 (sequence is synthesized)
cccccggttccttataggctgagtcctatagggtcacagtcatcccggacgtcacctgttgagtgttaggtagcagctttaggtgttttt

SEQ ID NO: 724808 - DNA, 120 bp, Artificial Sequence
  ENSG00000198130_40 (sequence is synthesized)
acttatgacctaagtagctgggcaggatgataagaacagacaaagtgagctattttgcagactagtatctaggctaaacttctttggttcgggtgagggcagctaagtgggggaaaaggg

SEQ ID NO: 724809 - DNA, 120 bp, Artificial Sequence
  ENSG00000198130_41 (sequence is synthesized)
gggggaaaaggggacgaagcgggaggctgacaagcaggcattggctattgaagcaggggcctagtatcctgtttcttctgtagtttgctgacctatgccgattcaagacactttgtcccg

SEQ ID NO: 724810 - DNA, 120 bp, Artificial Sequence
  ENSG00000198130_42 (sequence is synthesized)
gaaatggaccactgtatgcgttattttctatactccatgaatatgattggtttgtaaggtgtgtattgattttatttaagtgtaattgctgtttgcttagccaattggcataatttatgc

SEQ ID NO: 724811 - DNA, 120 bp, Artificial Sequence
  ENSG00000198130_43 (sequence is synthesized)
taagcaaactacaaatatggatttattttattagtcacagctacagaatttattccacttgtggaatgatgttttgtttttgtagcagattagaaaagttttgtttggtgctttggcagg

SEQ ID NO: 724812 - DNA, 120 bp, Artificial Sequence
  ENSG00000198130_44 (sequence is synthesized)
attaagctagggtataatcttttatgagattttggcatattttaatattatttacatagacactctgcccatttattatagacaataaaggaactattggactaacagtagtaaattttt

SEQ ID NO: 724813 - DNA, 120 bp, Artificial Sequence
  ENSG00000198130_45 (sequence is synthesized)
agattatgcatcccaaatcctaaaatccaaaatgtaccaaaatctgaaactatttgagcaccaacatgacactcaaatgttcattggaccataagtataatgcaaatattccaaaatctg

SEQ ID NO: 724814 - DNA, 120 bp, Artificial Sequence
  ENSG00000198130_46 (sequence is synthesized)
gttgacccactggcagcatggcaccagtttgcaacttcaactgtagagagctgaagtgtgggcttgttagtggtggatccgtacaggtctgaagcaacttgattcttgcctccttgaagg

SEQ ID NO: 724815 - DNA, 120 bp, Artificial Sequence
  ENSG00000198130_47 (sequence is synthesized)
aaagaatttgtctaaggggcataaggcagagtgagagaccaaggccatttttactttctgcagaaagagtacacttgccggcagttttgctacaagagtacagcgaacaaaggggacagg

SEQ ID NO: 724816 - DNA, 120 bp, Artificial Sequence
  ENSG00000198130_48 (sequence is synthesized)
agggagttggtctctcagtccatgggcaatttcgagtggctacagaaaagtgtctttttgctatgccagaaactgcaatagagttacttgtcgatttcaacaaaaaagcctgcagatgaa

SEQ ID NO: 724817 - DNA, 120 bp, Artificial Sequence
  ENSG00000198130_49 (sequence is synthesized)
acactatcgagtcttttcagacctgtgggcaagatataattcttcatttatgactgttccctgatgtgggtggaggttatttcttgccacgactccaaggaaaacttggttacttccttg

SEQ ID NO: 724818 - DNA, 120 bp, Artificial Sequence
  ENSG00000198130_50 (sequence is synthesized)
gctagtatctgcaatgagtagacagacattctcagggctgtagaggatatgaaaaagaggaatatactttggggatgcgattagaagtgggtacaaaagataaataaccatctctctcat

SEQ ID NO: 724819 - DNA, 120 bp, Artificial Sequence
  ENSG00000198130_51 (sequence is synthesized)
ctggcagaggtaaagtatggtaagtgtaaaaacaatacaaagaaaatactcaaagaattgaaaggaggaagagcttacctgtaagaaaggactagaagcttttttatgaaggttgcagta

SEQ ID NO: 724820 - DNA, 120 bp, Artificial Sequence
  ENSG00000198130_52 (sequence is synthesized)
ccttgaacttttcctgtaccgaagtcatctgttcaaagctctggcaactgctgtgtaagatactgttctatccatttactctgttccttgaatctggttgccagaattaaggatgctaca

SEQ ID NO: 724821 - DNA, 120 bp, Artificial Sequence
  ENSG00000198130_53 (sequence is synthesized)
gcggaccagctccctgtgctggaggactccagtgtgaggcctgctgcttcctttctacattggcctgaaaccagcccaactcagtggtcataatcttctgggcctaccgaagagcaaaag

SEQ ID NO: 724822 - DNA, 120 bp, Artificial Sequence
  ENSG00000198130_54 (sequence is synthesized)
cctacttctagttcttccagttgccagttcaagggctttatctgtcacttcctttgggaacaggtagagtgctttgatttagaatgatggcaataaatgagaaaccaatttgaaattgga

SEQ ID NO: 724823 - DNA, 120 bp, Artificial Sequence
  ENSG00000198131_0 (sequence is synthesized)
agactggtcttctgaggacctctgccctctacacagcggcctcttcaggtgcagggaggaaatggaagcacgttctatgctggttccaccccaggcatctgtgtgcttcgaggatgtggc

SEQ ID NO: 724824 - DNA, 120 bp, Artificial Sequence
  ENSG00000198131_1 (sequence is synthesized)
tatggcattcacacaggaggagtgggaacagctggacctggcccagaggacactgtaccgagaggtgacactggagacctgggagcatattgtctccctggggcttttcctttccaaatc

SEQ ID NO: 724825 - DNA, 120 bp, Artificial Sequence
  ENSG00000198131_2 (sequence is synthesized)
tgatgtgatctctcagctggagcaagaagaggacctgtgcagggcagagcaggaggccccccgagactggaaagctacccttgaggagaataggttgaattctgaaaaagatcgagctag

SEQ ID NO: 724826 - DNA, 120 bp, Artificial Sequence
  ENSG00000198131_3 (sequence is synthesized)
ggaagaactatcccaccacgtggaagtgtacaggagtggaccggaggagccaccctctttggtattaggaaaagtgcaagatcagagcaaccagttaagggaacaccaggagaactcctt

SEQ ID NO: 724827 - DNA, 120 bp, Artificial Sequence
  ENSG00000198131_4 (sequence is synthesized)
gaggttcatggtactcacctcagagagactgtttgctcaaagggaacattgtgagcttgaacttgggggaggttattctctaccttctactttaagccttctacctacaacattacctac

SEQ ID NO: 724828 - DNA, 120 bp, Artificial Sequence
  ENSG00000198131_5 (sequence is synthesized)
aagtacaggtttccctaagcccaactcacaagttaaagagttgaaacaaaattcagctttcattaatcatgagaaaaatggagcagatgggaagcactgtgagagtcatcagtgtgctag

SEQ ID NO: 724829 - DNA, 120 bp, Artificial Sequence
  ENSG00000198131_6 (sequence is synthesized)
agctttctgtcagagtatttacttgagtaaacttggaaacgttgaaacaggaaagaaaaacccttatgaatatattgtcagtggtgactctctcaactatggttcctccctttgttttca

SEQ ID NO: 724830 - DNA, 120 bp, Artificial Sequence
  ENSG00000198131_7 (sequence is synthesized)
tggtagaactttttcagtgaagaaaagtgatgactgtaaggattatggaaacctcttcagtcacagtgtgtctctgaatgaacagaagccagtgcattttgggaaaagtcagtatgagtg

SEQ ID NO: 724831 - DNA, 120 bp, Artificial Sequence
  ENSG00000198131_8 (sequence is synthesized)
tgatgagtgcagggaaacctgttctgagagtctgtgccttgtacaaacagaaagaagtggccctggagagacccccttcagatgtgaggaacgctgtgctgccttccccatggcctcatc

SEQ ID NO: 724832 - DNA, 120 bp, Artificial Sequence
  ENSG00000198131_9 (sequence is synthesized)
tttttctgactgtaacatcattcagactacagagaagccatctgtgtgtaatcagtgtggaaaatctttcagctgttgtaagctcatacaccagagaacacacactggagaaaagccctt

SEQ ID NO: 724833 - DNA, 120 bp, Artificial Sequence
  ENSG00000198131_10 (sequence is synthesized)
cgaatgtactcagtgtgggaaatcttttagccagagctatgaccttgtcatacatcagaggacacacactggagagaagccctatgagtgtgacctgtgtgggaaatccttcacccagag

SEQ ID NO: 724834 - DNA, 120 bp, Artificial Sequence
  ENSG00000198131_11 (sequence is synthesized)
atccaaacttattacacatcagcgaattcacactggagaaaaaccgtatcagtgtattgaatgcagaaaatccttcaggtggaactctaacctcattgtacatcagagaattcatactgg

SEQ ID NO: 724835 - DNA, 120 bp, Artificial Sequence
  ENSG00000198131_12 (sequence is synthesized)
agagaaaccgtatgagtgcactcactgtggaaagtccttcagccaaagctatgagttagttacacataaaagaacgcacactggagaaaaacccttcaaatgtactcagtgtgggaaatc

SEQ ID NO: 724836 - DNA, 120 bp, Artificial Sequence
  ENSG00000198131_13 (sequence is synthesized)
tttcagccagaagtatgaccttgttgtacatcagaggacacacactggagagaagccctatgagtgcaacctgtgtgggaaatccttctcccagagttccaaacttattacgcatcagcg

SEQ ID NO: 724837 - DNA, 120 bp, Artificial Sequence
  ENSG00000198131_14 (sequence is synthesized)
ctcgtcatacatcagagaattcatactggagagaaaccgtacgattgcactcactgtggaaagtccttcagccaaagctatcagttagttgcacataaaagaactcacactggagaaaag

SEQ ID NO: 724838 - DNA, 120 bp, Artificial Sequence
  ENSG00000198131_15 (sequence is synthesized)
ccctatgaatgtaacgagtgtggaaaagccttcaatcgaagcactcagctcatcaggcatctgcaaattcacactggggagaagccgtacaaatgcaatcagtgcaataaagcctttgca

SEQ ID NO: 724839 - DNA, 120 bp, Artificial Sequence
  ENSG00000198131_16 (sequence is synthesized)
aggagctcctaccttgtgatgcatcagagaactcacactggtgagaaaccttttgagtgtagtcagtgtgggaaagccttttcagggagctctaaccttctttcccatcacagaattcat

SEQ ID NO: 724840 - DNA, 120 bp, Artificial Sequence
  ENSG00000198131_17 (sequence is synthesized)
tctggagagaaaccctatgaatgtagtgactgtgggaaatccttccggcagcaatctcaacttgtagtgcatcggcggacacatactggagagaaaccttaggagtgcagtcattgtggg

SEQ ID NO: 724841 - DNA, 120 bp, Artificial Sequence
  ENSG00000198131_18 (sequence is synthesized)
aaagctttcatccagaggtctcccctcatcatgcaccagaggacgcatgtcggtgggaagagctatcagtgtgacgtgtattaagccagcggttgtgactcattgaacatcagaggacat

SEQ ID NO: 724842 - DNA, 120 bp, Artificial Sequence
  ENSG00000198131_19 (sequence is synthesized)
atcctggagaaaagccctacgaatgcattgattgtgggaaagccttcaatgatcgctcaacccttagtaaacacgagaggacacacactggaggcaaaccctatgaatgtgaccattgcg

SEQ ID NO: 724843 - DNA, 120 bp, Artificial Sequence
  ENSG00000198131_20 (sequence is synthesized)
agaaagcctttagccaacggtgtcaacttactaggcagcagagaattcatactggagagaagccctgtgaatgttaacaaatgtggaaaagcttccagttatgatactttccttattcaa

SEQ ID NO: 724844 - DNA, 120 bp, Artificial Sequence
  ENSG00000198131_21 (sequence is synthesized)
tcaacatgagaaagctcatgggcaagaaactctatgaataaccaagatggagccgggtgcagttgccaacacttgtaatcccagcagtttgcgaggccgaggcaggtggatcacttgagc

SEQ ID NO: 724845 - DNA, 120 bp, Artificial Sequence
  ENSG00000198131_22 (sequence is synthesized)
atcacttgagcttgggaggcggtggttgcagtgagctgtgatcatgccatcacaccgctgccttgtgagagattgagacactctaaataaataataaccaagatgggaaatttccctgcc

SEQ ID NO: 724846 - DNA, 120 bp, Artificial Sequence
  ENSG00000198131_23 (sequence is synthesized)
agaccttgtttactagaaatcaggtggccaaaacatgactctcagagtggggcttcatgaccatgtgcatcagaattgcctggagtgtgcactgaaactgtgtattaccaagctcactct

SEQ ID NO: 724847 - DNA, 120 bp, Artificial Sequence
  ENSG00000198131_24 (sequence is synthesized)
actgtgtattaccaagctcactctagccaactaaataaaaatctctggcagtaaaatccaggagtctgcagtttctaaaatcacacaggtgagtgggcatggtggctcatgcctgtaatc

SEQ ID NO: 724848 - DNA, 86 bp, Artificial Sequence
  ENSG00000198131_25 (sequence is synthesized)
gaagtcagaagtttgagaccagcctggcaaacatggcaaaactgtctctattaaaaatacaggccaggggccgaggtaggccaagg

SEQ ID NO: 724849 - DNA, 120 bp, Artificial Sequence
  ENSG00000198131_26 (sequence is synthesized)
caggtggcagccaagagcctcctggcacagcggcaccaggcaggtgacgcctattggaccccagaggtcatcccagctccagacgtggacacattttcttccaatgatgtctacggatga

SEQ ID NO: 724850 - DNA, 60 bp, Artificial Sequence
  ENSG00000198131_27 (sequence is synthesized)
gcctggccctaattttgtatttttattagaggtggggtttctccatgttggtcaggctgg

SEQ ID NO: 724851 - DNA, 120 bp, Artificial Sequence
  ENSG00000198131_28 (sequence is synthesized)
ggccagaaggatctgagagagtgtggccagcttgagccctcaggagtcggccagaaggatctgagagagtgtggccagcttgagcccctcgggagtcagctcctccgtccccactggtaa

SEQ ID NO: 724852 - DNA, 120 bp, Artificial Sequence
  ENSG00000198131_29 (sequence is synthesized)
cgtcttcaccccttcaacacggtgtgaagggccatgtcatggttgatcttcagtccctcagactacaccatcagccccatgggggtgagcaaataacaagtaactatactgttccctgct

SEQ ID NO: 724853 - DNA, 120 bp, Artificial Sequence
  ENSG00000198131_30 (sequence is synthesized)
caggtggcagccaagagcctcctggcacagcggcaccaggcaggtgacgcctattggaccccagaggacactgtaccgagaggtgacactggagacctgggagcatattgtctccctggc

SEQ ID NO: 724854 - DNA, 120 bp, Artificial Sequence
  ENSG00000198131_31 (sequence is synthesized)
gtgcaggtgagtctggcggcctcaaggttggctcggaggtttcactgttagccgggtgcggccggagcgcaggaccaggccagagccgccccaagtgatctgggcgtgccggagaaacga

SEQ ID NO: 724855 - DNA, 120 bp, Artificial Sequence
  ENSG00000198131_32 (sequence is synthesized)
gcagggcctgcgggggtccctcatgcggcgaggccgagcaagggcaggggcctgatgggatcgggatctctccggcctcagggacggggaaggccggtccagtcaggtttcccctgcagg

SEQ ID NO: 724856 - DNA, 120 bp, Artificial Sequence
  ENSG00000198131_33 (sequence is synthesized)
cgtggagccagggtagaagtcacagtgcaaggaagatgtggtatgcctggtcagtctctgcatgggagttgaggagcatgtgggtgacatggctgaatgtggaggagggaatggcagtgg

SEQ ID NO: 724857 - DNA, 120 bp, Artificial Sequence
  ENSG00000198131_34 (sequence is synthesized)
cgcctgtaagttagggatcggggttccatttgtgttgggtgatatttgatggggaccgtacaaggcagtgctaatgaggaaggcatggggttggatttcaagagtctaagggagtaggga

SEQ ID NO: 724858 - DNA, 120 bp, Artificial Sequence
  ENSG00000198131_35 (sequence is synthesized)
aacatctgattgtggaaatgactccgtgtaaggagggatgccaaaagacaggaaggagtggaggaagactgtgtttctgtttccagcgtggagccagggtagaagtcacagtgcaaggaa

SEQ ID NO: 724859 - DNA, 120 bp, Artificial Sequence
  ENSG00000198131_36 (sequence is synthesized)
caagaagaggacctgtgcagggcagagcaggaggccccccgaggtacttcaggtctttcacaagtcacaggtgtagtggctgatgggagcttcaggttcccggtctgggacttcacataa

SEQ ID NO: 724860 - DNA, 120 bp, Artificial Sequence
  ENSG00000198131_37 (sequence is synthesized)
gagatgacagcgccgagccccataggcgctagtcccgccctggacgccgaccgccgcctccacagtctcggcttcggttgctggatgagaaccagcgtggcccgtttaagggggagggga

SEQ ID NO: 724861 - DNA, 120 bp, Artificial Sequence
  ENSG00000198131_38 (sequence is synthesized)
caggcgctgcaaggagcagagccgcgggaagcaactccctaagccacaatgctagtcgcgaacacaggaaaaagctcatcccgccgccgcggggccccatgctcccgccggcaatgacta

SEQ ID NO: 724862 - DNA, 120 bp, Artificial Sequence
  ENSG00000198131_39 (sequence is synthesized)
acagtggcaggtaatggagccagtactttgacagcaggttgcaaaagacggggttttgccatgttgcctaggcttgtcttgatctcctcggctcaagcagtccgcctgcctctgctgccc

SEQ ID NO: 724863 - DNA, 120 bp, Artificial Sequence
  ENSG00000198131_40 (sequence is synthesized)
tctcagctggagcaagaagaggacctgtgcagggcagagcaggaggccccccgaggaacgaggcccagcaaaaagcagagacggtacagggccagaaggatctgagagagtgtggccagc

SEQ ID NO: 724864 - DNA, 120 bp, Artificial Sequence
  ENSG00000198131_41 (sequence is synthesized)
tgaagaaatggtagaattggtgcattaagaatatgaagtcagtgttgatgtctgagatgcaattatgagatccagaagtggaacagaaactgatattctaggactaagcaccagttagga

SEQ ID NO: 724865 - DNA, 120 bp, Artificial Sequence
  ENSG00000198131_42 (sequence is synthesized)
gtctgtgtttgcttcctgtggctgctgtaaaaaatttccaccaacctgttggcttaaaacaatgcaaatttattctctaaaagttctggaggccacaagtccaaaatcaatgtcactgga

SEQ ID NO: 724866 - DNA, 120 bp, Artificial Sequence
  ENSG00000198131_43 (sequence is synthesized)
tcaaaatcaaggtgttgatatggttgtgctccctctggatgctccaaatggaaaacacatttctgtcttttccttctcctgttggttgcagcattctttccagtcttcagatatcttctg

SEQ ID NO: 724867 - DNA, 120 bp, Artificial Sequence
  ENSG00000198131_44 (sequence is synthesized)
ctgtgtcttctcatcacctcctctgtgtttcaaatctccctctgcctttctcctataggaacacttgtgattacatttagagcccccctggatagtacagaaaaaaaatccccatttaaa

SEQ ID NO: 724868 - DNA, 89 bp, Artificial Sequence
  ENSG00000198131_45 (sequence is synthesized)
agcccccctggatagtacagaaaaaaaatccccatttaaaaatttttagcagggtgtggtagcaggcacctgtactcccaggcgagctt

SEQ ID NO: 724869 - DNA, 63 bp, Artificial Sequence
  ENSG00000198131_46 (sequence is synthesized)
ccaccacacctggctaattttttttttatttttattagagatgaggttttaccatgttgacca

SEQ ID NO: 724870 - DNA, 120 bp, Artificial Sequence
  ENSG00000198131_47 (sequence is synthesized)
cacctggcccctccctgcttattcttattcttctgccctctatttggggactagtgttacttagtcacttctttattatgtttgcttgtattttgcactttaccactgataccatgtttg

SEQ ID NO: 724871 - DNA, 120 bp, Artificial Sequence
  ENSG00000198131_48 (sequence is synthesized)
ctgatccatccctccctttcacagcctgcatacggattacagtttgtagtttggaaacaaaccagagacacttccattaaacagttgtctccttcatctccccctccccctccccctctg

SEQ ID NO: 724872 - DNA, 120 bp, Artificial Sequence
  ENSG00000198131_49 (sequence is synthesized)
ctccctccccagccctgcagccagagggacttctgccagatcagccaccatacaggtccagtatgaggaacagatggggaattttatgtccaagtataatcactatgaatacatgtgttg

SEQ ID NO: 724873 - DNA, 80 bp, Artificial Sequence
  ENSG00000198133_0 (sequence is synthesized)
ggggggagccagagcgccgggcttgggggcggggagcaggcggtgcaggagagcgccccgagtcccggcgcgggaggagg

SEQ ID NO: 724874 - DNA, 120 bp, Artificial Sequence
  ENSG00000198133_1 (sequence is synthesized)
agcgggagccagccctggagacggcgctcctagccgcacctgcgcctggcaggcggccggctctgcccagcccctacccacggccccggccccgcaccgggacacatggaagctgccagc

SEQ ID NO: 724875 - DNA, 120 bp, Artificial Sequence
  ENSG00000198133_2 (sequence is synthesized)
cccccagccaaggatcagctgagccctagggctgatgcttgcctacgttgctgagaatggcactgaggcccagccaacaaaggttaacccaggacactcctggacagtgatcctgatgtc

SEQ ID NO: 724876 - DNA, 120 bp, Artificial Sequence
  ENSG00000198133_3 (sequence is synthesized)
tgttgtgagctgcacactcaagggtgtgataaccagccccagtcggcgccatggcgtctgccgagcccctgacggcgctgtcccgctggtacctgtatgccatccacggctacttctgcg

SEQ ID NO: 724877 - DNA, 120 bp, Artificial Sequence
  ENSG00000198133_4 (sequence is synthesized)
aggtgatgttcacagcggcctgggagttcgtggtgaacttgaactggaagttccctggggtcacgagcgtgtgggccctcttcatctacggcacctccatcctcatcgtggagcgcatgt

SEQ ID NO: 724878 - DNA, 120 bp, Artificial Sequence
  ENSG00000198133_5 (sequence is synthesized)
acctgcggctgcgcggccgctgcccgctgctcctgcgctgcctcatctacacgctctggacctacctgtgggagttcaccaccggcttcatcctgcgccagttcaacgcctgcccctggg

SEQ ID NO: 724879 - DNA, 120 bp, Artificial Sequence
  ENSG00000198133_6 (sequence is synthesized)
actactcccagttcgactttgacttcatgggcctcatcaccctggagtacgccgtgccctggttctgcggggccctcatcatggagcagttcatcatccgcaacaccctccgcctccgct

SEQ ID NO: 724880 - DNA, 120 bp, Artificial Sequence
  ENSG00000198133_7 (sequence is synthesized)
tcgacaaggacgctgagcccggggagcccagcggcgccctagccctggccaacggccatgtcaagactgactgagcaggaagcgggtggggggcctggggatctctcatggaactcatgg

SEQ ID NO: 724881 - DNA, 120 bp, Artificial Sequence
  ENSG00000198133_8 (sequence is synthesized)
acaaagagaccaagctggtgaggttgccccatccatgcagcaaaagccctgctccggccaagcctcagccctatagggcacacagagccccctaacgtccgcgggggccggtgttggggg

SEQ ID NO: 724882 - DNA, 120 bp, Artificial Sequence
  ENSG00000198133_9 (sequence is synthesized)
gccgtggtcaggtgttgggggatggggtgtggaggcagcagagggacattgggaagggtccatggatcgcggcccagttcaggggttggtaccaggaggcctgtggctgagcagcgatgg

SEQ ID NO: 724883 - DNA, 120 bp, Artificial Sequence
  ENSG00000198133_10 (sequence is synthesized)
actatgtagttgactttggaagcagcaggccctgtcctggccaagggacaatgagaatggggccgcaggtgggaggcaaggcctgacctccctccctccgatctggatttagttgagctt

SEQ ID NO: 724884 - DNA, 120 bp, Artificial Sequence
  ENSG00000198133_11 (sequence is synthesized)
tggctggttccattaggcaatattcaggtgcttgcttgcaaccaatacctccccaggggcctgctgagctgcagccgaggagagactgggcagccaggaggctgcgtggcagcaacgctg

SEQ ID NO: 724885 - DNA, 120 bp, Artificial Sequence
  ENSG00000198133_12 (sequence is synthesized)
gtctgcaagggctgggagaccctcccttggctcctctcccctcccccagggccctgcgctgctcccttggccttctggggcccccgtggtgctggattcccaccaaccttgggcttttgg

SEQ ID NO: 724886 - DNA, 120 bp, Artificial Sequence
  ENSG00000198133_13 (sequence is synthesized)
aggtttcaatccccgtgtgttcggtggcgtttcccccttttctgtcttgttttcaaagcctttaccactagcggctctttatccacgtcggtcgccacacctgccccaccccagctccct

SEQ ID NO: 724887 - DNA, 120 bp, Artificial Sequence
  ENSG00000198133_14 (sequence is synthesized)
agccagcacaggagctgccggagatgaagccctgagacacccccaaccctcacccccttgcagcccttccctccactgttccggctggcctgatgcctggggagttcctgagttacacct

SEQ ID NO: 724888 - DNA, 120 bp, Artificial Sequence
  ENSG00000198133_15 (sequence is synthesized)
ccctacccccggtctagtgggctgtggcagtgctcccttctcagtggctcagctgagaacaaatgatgccctccaatgcacaggcaggctgggttaggccctgtggatccacagtgggga

SEQ ID NO: 724889 - DNA, 120 bp, Artificial Sequence
  ENSG00000198133_16 (sequence is synthesized)
gagaagccaggtatccagcattggagactgatggagaatgagaggaagaaagagaggaggaccttgcagctgtggaaggctccttggagcctcctttgtgggagggtatcagttctggtt

SEQ ID NO: 724890 - DNA, 120 bp, Artificial Sequence
  ENSG00000198133_17 (sequence is synthesized)
ctgccagagcctcagccctggtagcagaacctcagggctgcccctctccccaaactcctcccagcaaggctgaccctttgagctcactccttaaacagtattaaccctgccacactcatg

SEQ ID NO: 724891 - DNA, 120 bp, Artificial Sequence
  ENSG00000198133_18 (sequence is synthesized)
ggcattggcaccttggttcccctgccccactttgtcctgtgacaggtccattgctggcagtggacaggtgaaatactcactccagcctacttccggctctgactctcactcctcaagggg

SEQ ID NO: 724892 - DNA, 120 bp, Artificial Sequence
  ENSG00000198133_19 (sequence is synthesized)
aagggtccgttagaaagtggcccaccccatggtacatggtctcttcttgaccacactaggactcttaggtagaaattagccttcccctttttatggatcattacaaagtgacggtatcac

SEQ ID NO: 724893 - DNA, 120 bp, Artificial Sequence
  ENSG00000198133_20 (sequence is synthesized)
ctgtggagagaatgtcctcttccctgctggctgccctgcccatactgtgcagggtgtggtggggtgcagggtgtggtggggtgggccacagttgtgtcctaggtctggagaaaagcttgc

SEQ ID NO: 724894 - DNA, 120 bp, Artificial Sequence
  ENSG00000198133_21 (sequence is synthesized)
agactctgcctttggcaggattttctgcagttagccccgtccagagcagaacgaagggtatttcctagcctatttcctgggcaggctcctcaaatccagggatgaactactttctgcagt

SEQ ID NO: 724895 - DNA, 120 bp, Artificial Sequence
  ENSG00000198133_22 (sequence is synthesized)
ggccagccctccttttgattttattgtggccccaattccagggctttgggggttacagagaatcaggcttccggtgggagtagattgttttccatctataggtggagaaaattccaggag

SEQ ID NO: 724896 - DNA, 120 bp, Artificial Sequence
  ENSG00000198133_23 (sequence is synthesized)
gagaatattgtctggcttccccgttctctctgggcaattgtttccttggttctctctccaactccatgttgtcttagtctcccagcaccccttcaggccttccatgtgggcccctagacc

SEQ ID NO: 724897 - DNA, 120 bp, Artificial Sequence
  ENSG00000198133_24 (sequence is synthesized)
acactacccaccttcacacttgcattccacaactcagtccagtggccagcttgttgatgcctccataattctcagccagagcaaatccttgattggcccaccaggtcttgctgctccaga

SEQ ID NO: 724898 - DNA, 120 bp, Artificial Sequence
  ENSG00000198133_25 (sequence is synthesized)
agttgccttgtgggcattccctggcaccatttcctctctgggtcctatactttcccaagtgcaggaggtcctgggggtatgcctgtgtgcctggcaacatccagcattgtgtttctgctc

SEQ ID NO: 724899 - DNA, 120 bp, Artificial Sequence
  ENSG00000198133_26 (sequence is synthesized)
catctaggtgtcccatttctccagttgcccctcataaggcatcaaacctccagcaaaggaaggcaacaacccatggcctgaccacgggatctacaggttcagatctcaccagggatagcc

SEQ ID NO: 724900 - DNA, 120 bp, Artificial Sequence
  ENSG00000198133_27 (sequence is synthesized)
cagacttcaattcttgcttttttgggtatcagggccccaatcccttagtggccagggactcaaagtttggaataatcccagccctgccaagcattaagggtgctggtggggagtgtttgc

SEQ ID NO: 724901 - DNA, 120 bp, Artificial Sequence
  ENSG00000198133_28 (sequence is synthesized)
tggctgttcatgaacctctggtgtcctgggcctctctccactagacatggcagcatctctgagttacagattgcaatgtgttgccctgcatggttgaactgcttcggacatctgctaggc

SEQ ID NO: 724902 - DNA, 120 bp, Artificial Sequence
  ENSG00000198133_29 (sequence is synthesized)
atcccatgtgccctgtcccctcttcaatgccagtgagtcacaatggcctatgcttattcacagcaataatacctagggagtccccatgaagcccttttgtcctggtccctcactctgcgt

SEQ ID NO: 724903 - DNA, 120 bp, Artificial Sequence
  ENSG00000198133_30 (sequence is synthesized)
gggtctcctggggaggcagctgctgagtgggtcagttcatgagaacctgcatttatgaagccctgggctgtgtaggcatcaccctgggatgcagacaggttagaggcccagcccttaggg

SEQ ID NO: 724904 - DNA, 120 bp, Artificial Sequence
  ENSG00000198133_31 (sequence is synthesized)
gagccatggcagggagagtgccttccaccctgaggccacccagacctggaggagatgcaggccccagctctgctaaagggcctttgaggtgggtgggactgtctcccagttgggcagctc

SEQ ID NO: 724905 - DNA, 120 bp, Artificial Sequence
  ENSG00000198133_32 (sequence is synthesized)
ttgagaaggacacacgaccggtttgtgcgcccattgcctgctctgtgtctccgttggtccctctgtctcttccttttcacatttgtgcacataaaatatactggtgtttgtgttccagga

SEQ ID NO: 724906 - DNA, 120 bp, Artificial Sequence
  ENSG00000198133_33 (sequence is synthesized)
aaggggtgaaagggagcgagcaccgatagcaaggtggcagcctgcacgtccgctccgagggcccttcccaggagcggctggatctgaccgatccccaagtccagggacacatggaagctg

SEQ ID NO: 724907 - DNA, 80 bp, Artificial Sequence
  ENSG00000198133_34 (sequence is synthesized)
cggctgcagccccccggaccccgcgccgccgcggcggacgccgacacacaatgcgggactaggcgcggcgcgggagtgcc

SEQ ID NO: 724908 - DNA, 120 bp, Artificial Sequence
  ENSG00000198133_35 (sequence is synthesized)
gtttctgttttagttctgacttgtgccgtggatgtggctgagggcctagggtggggagaagtctccacaggtgggattgaactccccaggcacatggtccttgtggtgctggtggagaga

SEQ ID NO: 724909 - DNA, 120 bp, Artificial Sequence
  ENSG00000198133_36 (sequence is synthesized)
gagtcccagagggttcggacatgctccgttaaaaccttttcctcaaggtgataggtacgtgtcaaggtgacccctgtccgccatccggcaggctggaagaagccgggacacatggaagct

SEQ ID NO: 724910 - DNA, 120 bp, Artificial Sequence
  ENSG00000198133_37 (sequence is synthesized)
ggtctgttggcaaagagtcggccacccagatttaccacatttctctgcagaacactcttttgttcaatataagcagagaccttccaccgggggcaggatttgtgatacctgcagtgagcc

SEQ ID NO: 724911 - DNA, 120 bp, Artificial Sequence
  ENSG00000198133_38 (sequence is synthesized)
cattacaacgttgaccaatcctccagaaaagaagctctaacagaggaccctggctgtctacggggttggtttccatctctccattcgtgagctccttgaaggcagagaacacttggcttt

SEQ ID NO: 724912 - DNA, 120 bp, Artificial Sequence
  ENSG00000198133_39 (sequence is synthesized)
tcttcctatacctccagtccctaatgcagggacatgagagatgcccatttgtgtttgatgaatgaatgagtgaataaatgaatgaatgagtgcctggagatcagagtacatgggatgagt

SEQ ID NO: 724913 - DNA, 120 bp, Artificial Sequence
  ENSG00000198133_40 (sequence is synthesized)
gttcggagttctacagactcaggaagccccagctgacattccaagaagaaggagacacgaaggtgaggggatgccatgcagttagcgtcacatgaagaaaaacaaaatttaaggtatcat

SEQ ID NO: 724914 - DNA, 120 bp, Artificial Sequence
  ENSG00000198133_41 (sequence is synthesized)
ccttagaagacggagggatgacagtttcaaggaggatttgttcatcagatgctgggaaggaatttcaacagatgaggaaactgaagagcagagaggttaagtacccccctaccctgcccc

SEQ ID NO: 724915 - DNA, 120 bp, Artificial Sequence
  ENSG00000198133_42 (sequence is synthesized)
ggtagagagtggaaggaatgaaggggtgggcgagggcatgaagaagcctccccagctctaatggccactgtctgaaagtgatgcagctcacttccacccacattcgccagatttcaatcc

SEQ ID NO: 724916 - DNA, 120 bp, Artificial Sequence
  ENSG00000198133_43 (sequence is synthesized)
atagcctcacttaactgtagggcaggctaggacatatcatctttccatgtgctgagaaaaaatagaaaagaccaagattggtgaaaaggagcaaactagtgacgagaaccttgccatagc

SEQ ID NO: 724917 - DNA, 120 bp, Artificial Sequence
  ENSG00000198133_44 (sequence is synthesized)
catttttttgccactcacagaagccggtctgtaccaagcgagaagtggctataggagaagtggtcctgaggctcatctgccttctcctggtcaccctcccaatatatccctcctgtgctg

SEQ ID NO: 724918 - DNA, 120 bp, Artificial Sequence
  ENSG00000198133_45 (sequence is synthesized)
agctagttttctattacttttcatcacctacatctaaaagagacctacctatctaacacagtctttgtcttactatcataatgctattaatgcaagctaaataataatctttcatcttct

SEQ ID NO: 724919 - DNA, 120 bp, Artificial Sequence
  ENSG00000198133_46 (sequence is synthesized)
ttttttctttatctttttcacttgaattgctttaaattcaaatcttcctgctatagtgtgaatgtttgtgttccccccaaatttatgtttaaactttaacctccaagctgatggtattag

SEQ ID NO: 724920 - DNA, 120 bp, Artificial Sequence
  ENSG00000198133_47 (sequence is synthesized)
gaagtggggcttggggaggtgattaggtcatgagggtggaatatttgagaatgagattagtgcccttgtgaattaggcctgagagagatcccctcatctcaccatgtaaggacacagcag

SEQ ID NO: 724921 - DNA, 120 bp, Artificial Sequence
  ENSG00000198133_48 (sequence is synthesized)
tgtaaggacacagcagaaggtgctatctttgaaccaggaagtgagcccttgccagacactgaacctgccgatacctcaatcttgtccttctcagtctccagaactgtgagaaataaattt

SEQ ID NO: 724922 - DNA, 120 bp, Artificial Sequence
  ENSG00000198133_49 (sequence is synthesized)
cagctgaaacctttctcctaacaagataagaaccttctgctggtgccttctgaaaacccagataggactgagaactgacctgtttaactcatcaactccttattagatacctgcagtgag

SEQ ID NO: 724923 - DNA, 120 bp, Artificial Sequence
  ENSG00000198133_50 (sequence is synthesized)
agccctggagacggcgctcctagccgcacctgcgcctggcaggcggccggctctgcccagcccctacccacggccccggccccgcaccgggcagtgggcagccatgccgagtcatgaagg

SEQ ID NO: 724924 - DNA, 80 bp, Artificial Sequence
  ENSG00000198142_0 (sequence is synthesized)
agacgcgtaggctggcagcccgctgagcccgccagactccgccgccgtcgggagccggccgctgggagcccgtcgctatg

SEQ ID NO: 724925 - DNA, 80 bp, Artificial Sequence
  ENSG00000198142_1 (sequence is synthesized)
tcgaggatggaggggccggcagagtggggccccgaggcggcgctgggccccgaggcggtgctgcgcttcctggcggagcg

SEQ ID NO: 724926 - DNA, 120 bp, Artificial Sequence
  ENSG00000198142_2 (sequence is synthesized)
aggggcgccctaggcggcgaaccggagcagcgcgcccgcgcccgcgcgcacttcaaggagctggtgaacgccgtggccactgtgcgcgtcgatcccgccgacggcgccaagtacgtgcac

SEQ ID NO: 724927 - DNA, 120 bp, Artificial Sequence
  ENSG00000198142_3 (sequence is synthesized)
ctcaagaagaggttctgtgaagggccgtccgagccctccggggacccgccgcgaatccaggtgaccgccgagcccgaggcccccgacggccctgccgggcccgaggcgcgcgatcggctc

SEQ ID NO: 724928 - DNA, 120 bp, Artificial Sequence
  ENSG00000198142_4 (sequence is synthesized)
gtcgctccctggacagggccgcgagctgggcgagggagagccccccgcccccgcgcactggccgcccctgagcgccggggctcgcaggaagaactcgcggcgcgacgtgcagcccctacc

SEQ ID NO: 724929 - DNA, 120 bp, Artificial Sequence
  ENSG00000198142_5 (sequence is synthesized)
cgcgacgtgcagcccctaccgcggactccagccccggggcccagcgaggacctggagctcccgccacatggctgcgaggaggcggacaggggcagctcccttgtgggggctaccgcacag

SEQ ID NO: 724930 - DNA, 120 bp, Artificial Sequence
  ENSG00000198142_6 (sequence is synthesized)
aggccggcccgccagaacctccgtgacctggtgatgggcagctccccgcagctgaagaggagcgtgtgtcccgggggcagcagcccgggcagctcctccgggggaggacgcggcagaggc

SEQ ID NO: 724931 - DNA, 120 bp, Artificial Sequence
  ENSG00000198142_7 (sequence is synthesized)
gggggcgactcagacagcgcatcggtggcctcgtcgtccgcggaggaggagagcagcggcggaggctccgtgacgctggaccccctggagcacgcgtggatgctctctgcctccgatggc

SEQ ID NO: 724932 - DNA, 120 bp, Artificial Sequence
  ENSG00000198142_8 (sequence is synthesized)
aagtgggacagcctggagggcttgctcacctgcgagcccggcctgctggtcaagcgggacttcattaccggcttcacttgcctgcactgggccgccaagcacggcaggcaggagcttctg

SEQ ID NO: 724933 - DNA, 120 bp, Artificial Sequence
  ENSG00000198142_9 (sequence is synthesized)
gccatgctagtcaacttcgccaacaaacaccagctgccggtgaacatcgacgccaggacgagcgggggttacaccgccctgcacttggcagccatgcacggccacgtggaggtggtgaag

SEQ ID NO: 724934 - DNA, 120 bp, Artificial Sequence
  ENSG00000198142_10 (sequence is synthesized)
ctgctggtgggggcctacgacgccgatgtggacatcagggactacagtgggaaaaaggcctcccagtacctgagtcggagcatcgccgaggagatcaagaacctggtgggagccctggac

SEQ ID NO: 724935 - DNA, 120 bp, Artificial Sequence
  ENSG00000198142_11 (sequence is synthesized)
gagggtgacggggaaagcgccgcgggtagcggcggcgggcgctggaggctttcaaaggtgcttccctcgcatctcatcacctacaaactctcacacgccctagaagatggaggggaccat

SEQ ID NO: 724936 - DNA, 120 bp, Artificial Sequence
  ENSG00000198142_12 (sequence is synthesized)
caccaccatcaccactcggctgaggggtgggtcggaggcaaagccaaggatccagggcgcaaagcctcgggcagctctagtggacgtataaaacccagactcaacaaaatccgattcaga

SEQ ID NO: 724937 - DNA, 120 bp, Artificial Sequence
  ENSG00000198142_13 (sequence is synthesized)
acccagatcgtccacaccacaccctctttcagggacccagagcagccgctggagggcaggggggaggagggagtgggggaggaacgacctgttaaaggccactcgcccttcacattgaga

SEQ ID NO: 724938 - DNA, 120 bp, Artificial Sequence
  ENSG00000198142_14 (sequence is synthesized)
ccaaagtccaatgtatttgggtaaaaattgcttcttttagaaaatgcaaaggtttatttgtcttaataaattgaatactaggtgttgtaaggaagtgagaccagaaggacaagctaaatt

SEQ ID NO: 724939 - DNA, 120 bp, Artificial Sequence
  ENSG00000198142_15 (sequence is synthesized)
atgcattcttacttgagggatcggaatggatggggcggagttctcttcaggctagccttctgggaaaagtggatgtctttttcagagattcatcataccttgacctgtacctcttctctg

SEQ ID NO: 724940 - DNA, 120 bp, Artificial Sequence
  ENSG00000198142_16 (sequence is synthesized)
ccctccacttccctgccctggagtccgtttctggagactagaaatgtatctaaattgggggaacagaatgaatgaattaatgaatgagagttcctttgctttaaccattcctggatgcct

SEQ ID NO: 724941 - DNA, 120 bp, Artificial Sequence
  ENSG00000198142_17 (sequence is synthesized)
gcaaagtaaggaataatgcagtttttatgtatctgattttataaggggttactctttcaagagtaacaaaaaaatgcaaactgtaatgaaactacattgtatttctaagtgtgaaaacga

SEQ ID NO: 724942 - DNA, 120 bp, Artificial Sequence
  ENSG00000198142_18 (sequence is synthesized)
caggctgccccgtttttactaattgcatttgcattttaaggtactactgaaggtcagatcaaagttgaaatgcaaaaatactaattagagaataatgtgaataaaatgggaatcttcttg

SEQ ID NO: 724943 - DNA, 120 bp, Artificial Sequence
  ENSG00000198142_19 (sequence is synthesized)
gaacaaaagaaacaggcaacattcacttctgtagtatggtttccacctatctctaacaccactattaaggtacaccagtgttaaggtacattaataactacacaaaattttatttaaaga

SEQ ID NO: 724944 - DNA, 120 bp, Artificial Sequence
  ENSG00000198142_20 (sequence is synthesized)
gaacacttagcagcctatgatagttttcaataaaatgttgcctctctttcggattctcactaacttttgttactattctaaaagtttgaatttgctggggtgtttattctgaggattatt

SEQ ID NO: 724945 - DNA, 120 bp, Artificial Sequence
  ENSG00000198142_21 (sequence is synthesized)
taaccattgttctatttggcataaccctatttaatggtgcttagagctgaattacctacagaaactgtttctggtttaaataattagcacaaattggcctaagtattcatgagcccatgt

SEQ ID NO: 724946 - DNA, 120 bp, Artificial Sequence
  ENSG00000198142_22 (sequence is synthesized)
ttctgtgaagtaattattaaaccaacttaatgattcttatgtaaggtacactttttattttaatacattggtagtctctatgacttgtagcaatgttttacaaatgtttaaaatgctaaa

SEQ ID NO: 724947 - DNA, 120 bp, Artificial Sequence
  ENSG00000198142_23 (sequence is synthesized)
cttaattttccaagcttttcttgacaattagatacctatcctgtagttactgaaaatctgggtagtaaatctacccaattaaaatggcactttataaaagggaatagagaagagatggga

SEQ ID NO: 724948 - DNA, 120 bp, Artificial Sequence
  ENSG00000198142_24 (sequence is synthesized)
ctatttctatatttaaatgctgctggctattcctttgtatataaatgaaaaataccattcattaaaattaagtactcgtttaagtatggttcttaattacatttcattcatttatattag

SEQ ID NO: 724949 - DNA, 120 bp, Artificial Sequence
  ENSG00000198142_25 (sequence is synthesized)
agtaaatggcttcataactactttaaaatttaacccacaagcatattaaatctgtttgttataagattggaaacaatttttgagagggactaatttaaacaagtcctcctttagtctttt

SEQ ID NO: 724950 - DNA, 120 bp, Artificial Sequence
  ENSG00000198142_26 (sequence is synthesized)
gggtcgcgtagttgctgaaacctaagtacctgcagcctacaggataaggaagttcacagcctgcggggtgaatgaacccatgtgtgaactgcacagagcaattcatagaaaatgcataga

SEQ ID NO: 724951 - DNA, 120 bp, Artificial Sequence
  ENSG00000198142_27 (sequence is synthesized)
ctgcacagagcaattcatagaaaatgcatagaaatttgtaacactttggtcacatctgtctctagatggtcattgaatttgtttaaagatggatgaaaggccaggcatggtggctcatgc

SEQ ID NO: 724952 - DNA, 90 bp, Artificial Sequence
  ENSG00000198142_28 (sequence is synthesized)
tatgagaggtggaggttgcagttgagccaagatcacgacactgcactccagcctgggcaacggagactctgtctcaaaaaaaaaaaaaaa

SEQ ID NO: 724953 - DNA, 120 bp, Artificial Sequence
  ENSG00000198142_29 (sequence is synthesized)
aaagatgaatgaaaatatgaaatatataaactagtatccatttatttgcatttattgtgggatttcagatatgaacggtgtaaatttgagaagcacttatgcatacatgtgggtgaaaaa

SEQ ID NO: 724954 - DNA, 120 bp, Artificial Sequence
  ENSG00000198142_30 (sequence is synthesized)
ccaatctaattttgtataaataaaaacaggctcctggaaggtgaaaagtagtcatttgttctaaatctatacatattacttgtatctagtgcagaataagctataacatcccattgagga

SEQ ID NO: 724955 - DNA, 120 bp, Artificial Sequence
  ENSG00000198142_31 (sequence is synthesized)
atcttaaatttcatagacatgtaaagctgaagtaactctaaagagcagatgcttcagaaccatcagaaggttctggtcaacagtcagtattatctcttaaatgtatatgttggtcactaa

SEQ ID NO: 724956 - DNA, 120 bp, Artificial Sequence
  ENSG00000198142_32 (sequence is synthesized)
ttgcacaaaatctataatttgccagggctttagagattgagtcaatatgtcatttaccatggttttcccactgaaggctttaacttttctgataaaataatattttaaattttcaaaaac

SEQ ID NO: 724957 - DNA, 120 bp, Artificial Sequence
  ENSG00000198142_33 (sequence is synthesized)
ccattcctgaggagaactacttctagcattccttttcatgatgtgcttttgtgcagtaagtagcattttcggctacttaactttacattcctcttatttttcagtttccagtcaagatta

SEQ ID NO: 724958 - DNA, 120 bp, Artificial Sequence
  ENSG00000198142_34 (sequence is synthesized)
taaaaagcaaatgattgatataatttgatattcatagagttgtgcctacctttaatggaaaaatacatgtcagatacttagatgtttattgatatgagactatgtggttaaaaaacccaa

SEQ ID NO: 724959 - DNA, 120 bp, Artificial Sequence
  ENSG00000198142_35 (sequence is synthesized)
gtatgtccatgtgtttcttataaggtacacttgaaactagtgagtgtttgtcacatttcactttcatggtatataaaatgcagtttgcatatataacttgaatatctggtactagttttt

SEQ ID NO: 724960 - DNA, 120 bp, Artificial Sequence
  ENSG00000198142_36 (sequence is synthesized)
tcacgcctgcaatcttggagtctaggttgccttgtctctcctatttttaaataagtgaaatttgggagattgtaaaatctgtaaagtttgttttgtgaaaataaaatgttcacagtagaa

SEQ ID NO: 724961 - DNA, 120 bp, Artificial Sequence
  ENSG00000198146_0 (sequence is synthesized)
gttgccgcgccggccctgcggacgtgcgcgcgctgccttcgcggcacctgggcctgaggtgcgtgcctcccgggccctcgccagctccagatgcgtgaggaggacttcagaaacccgact

SEQ ID NO: 724962 - DNA, 120 bp, Artificial Sequence
  ENSG00000198146_1 (sequence is synthesized)
gagaagtggagcgacccccagggagggtcggacctgcctcaataccgccaaggtctttcatttcttgttcgcttactttcgtgaaatcctcacatcgttttaatggtactagtcaagaca

SEQ ID NO: 724963 - DNA, 120 bp, Artificial Sequence
  ENSG00000198146_2 (sequence is synthesized)
agaaaatcaacaggctttcagccttgaggcaacattggatattattgagacatctgtggaatttaagaacagtatggagctcatcagagtatatcattgaagaatatgatggctgaaaac

SEQ ID NO: 724964 - DNA, 120 bp, Artificial Sequence
  ENSG00000198146_3 (sequence is synthesized)
aatttaaaaatgctaaagattcaacagtgtgtggtagccaacaaactacctagaaacaggccatatgtttgcaatatttgttttaagcactttgaaacaccatcaaaattagctaggcac

SEQ ID NO: 724965 - DNA, 120 bp, Artificial Sequence
  ENSG00000198146_4 (sequence is synthesized)
tatctcattcatactggtcaaaagccatttgaatgtgatgtgtgtcataaaacctttagacaactagttcatctggagaggcatcaactaactcatagtctgccttttaaatgtagtatt

SEQ ID NO: 724966 - DNA, 120 bp, Artificial Sequence
  ENSG00000198146_5 (sequence is synthesized)
tgtcagcgtcactttaaaaatctgaagacatttgtgaagcaccaacaacttcacaatgaaacctatcagaataatgttaaacaggtcagaagattgctggaggccaagcaagaaaagtca

SEQ ID NO: 724967 - DNA, 120 bp, Artificial Sequence
  ENSG00000198146_6 (sequence is synthesized)
atgtatggagtgtataatacttttaccacagaggaaagatgggcattacacccgtgctctaagtctgatcccatgtatagcatgaaaagaagaaagaatattcatgcatgtacaatctgt

SEQ ID NO: 724968 - DNA, 120 bp, Artificial Sequence
  ENSG00000198146_7 (sequence is synthesized)
ggcaagatgtttccatcacagtcaaaacttgataggcatgtacttattcatactggtcagaggccttttaaatgtgtcttgtgtactaaatcttttcgacagtcaactcacttaaaaatc

SEQ ID NO: 724969 - DNA, 120 bp, Artificial Sequence
  ENSG00000198146_8 (sequence is synthesized)
caccaacttacacattcagaagaaagaccttttcaatgttgtttttgtcaaaaaggatttaagattcaaagcaaacttctgaagcataaacaaatccatactaggaataaggcttttcgg

SEQ ID NO: 724970 - DNA, 120 bp, Artificial Sequence
  ENSG00000198146_9 (sequence is synthesized)
gctcttttattaaagaagaggcgtacagaatctcgccccctgcctaataagttaaatgcaaatcagggtggttttgaaaatggtgagattggtgaatctgaggagaataatccacttgat

SEQ ID NO: 724971 - DNA, 120 bp, Artificial Sequence
  ENSG00000198146_10 (sequence is synthesized)
gtccactcaatttatattgtcccttttcaatgtccaaagtgtgaaaagtgttttgaatcagagcagattctcaatgaacacagctgttttgctgctagaagtggcaaaattccaagcagg

SEQ ID NO: 724972 - DNA, 120 bp, Artificial Sequence
  ENSG00000198146_11 (sequence is synthesized)
ttcaaaagaagctacaactataaaaccattgttaaaaaaatcttggccaagcttaagcgtgctaggagtaaaaaattagataactttcaatctgagaaaaaagtatttaaaaagagtttc

SEQ ID NO: 724973 - DNA, 120 bp, Artificial Sequence
  ENSG00000198146_12 (sequence is synthesized)
ttgagaaattgtgatcttatttctggtgagcagagctctgaacaaacccagagaacatttgtgggttctcttggcaaacatggaacatataaaacaattggcaatagaaagaagaaaaca

SEQ ID NO: 724974 - DNA, 120 bp, Artificial Sequence
  ENSG00000198146_13 (sequence is synthesized)
ttgactttgccattttcttggcaaaatatgggaaaaaatttgaaaggcatccttacgacagaaaacatattaagcattgataattcagtgaataagaaagacttgtcaatctgtggttca

SEQ ID NO: 724975 - DNA, 120 bp, Artificial Sequence
  ENSG00000198146_14 (sequence is synthesized)
tcaggtgaggaattctttaataactgtgaggtacttcagtgtggtttttcagttccaagggaaaacatacgtactagacataagatatgtccttgtgacaaatgtgagaaggtatttcct

SEQ ID NO: 724976 - DNA, 120 bp, Artificial Sequence
  ENSG00000198146_15 (sequence is synthesized)
tctatatccaaactaaaaagacactatttaattcatactggacagaggccctttggctgtaatatttgtgggaaatcttttagacagtcagctcacttaaaaagacatgaacagactcat

SEQ ID NO: 724977 - DNA, 120 bp, Artificial Sequence
  ENSG00000198146_16 (sequence is synthesized)
aatgaaaagagtccttatgcatctctttgccaagtagaatttggaaacttcaacaatctttctaatcattcaggtaataatgttaactataatgcttcccaacaatgtcaggctcctggt

SEQ ID NO: 724978 - DNA, 120 bp, Artificial Sequence
  ENSG00000198146_17 (sequence is synthesized)
gttcaaaaatacgaggtctcagagtcagatcaaatgtcaggagttaaggcagagtcacaggattttattcctggtagcaccgggcaaccctgtcttcctaatgtacttttggaatcagag

SEQ ID NO: 724979 - DNA, 120 bp, Artificial Sequence
  ENSG00000198146_18 (sequence is synthesized)
caaagcaatcctttttgcagttattcagagcatcaggagaaaaatgatgtcttcctgtaccgatgcagtgtttgtgctaaaagtttccgatctccatctaaactggaaagacactaccta

SEQ ID NO: 724980 - DNA, 120 bp, Artificial Sequence
  ENSG00000198146_19 (sequence is synthesized)
attcatgcagggcagaaaccatttgaatgctcagtttgtggcaaaacattcagacaggctcctcactggaagagacatcagcttactcactttaaagaacgaccacaagggaaagtggtt

SEQ ID NO: 724981 - DNA, 120 bp, Artificial Sequence
  ENSG00000198146_20 (sequence is synthesized)
gccttagattcggttatgtaaattgtcgcaaccactaacaattgtggtctctggtgatcttatttttaaagcctgtattatttaaaatgcatttttattgaaaggcctgcattaaactga

SEQ ID NO: 724982 - DNA, 120 bp, Artificial Sequence
  ENSG00000198146_21 (sequence is synthesized)
atggtttcacaggcatttgcttgtcctgcatagtaaggaggtagaatacatagaaaattaatacaatgttttagaaacagccaagttaattttagaggcaagaacatgatttgatgctat

SEQ ID NO: 724983 - DNA, 120 bp, Artificial Sequence
  ENSG00000198146_22 (sequence is synthesized)
gtattgaaaaatataaatccatgatggctgtacaaataatttagcctcattcattttttaaaggaattattccttaagacatgccatctctttttagatatactcaaaagactgagaggc

SEQ ID NO: 724984 - DNA, 120 bp, Artificial Sequence
  ENSG00000198146_23 (sequence is synthesized)
aaaacttggcttttagctgcagcacatagccctgttatatttgatttattttacatttcatatgaaagcataattttgtccacatgtgactcaaattgcattggtaattttttttttttt

SEQ ID NO: 724985 - DNA, 120 bp, Artificial Sequence
  ENSG00000198146_24 (sequence is synthesized)
taattttttttttttttttgtaagttaaaaaaactacagagacactaaaggtgaaaatggatgagacaattatagtattattttcattggtctttttttttgagatggagtctcactctt

SEQ ID NO: 724986 - DNA, 63 bp, Artificial Sequence
  ENSG00000198146_25 (sequence is synthesized)
ggtctcgatctcttgaccttgtgactggtcttttcaaagctatttatttttaggactatgtgg

SEQ ID NO: 724987 - DNA, 120 bp, Artificial Sequence
  ENSG00000198146_26 (sequence is synthesized)
gacggtcttttcaaagctatttatttttaggactatgtggtaatttcaccttcaggtgataaggattttttttttctcccagctagtgctatctttctcaaaataatttaaaagtaggcg

SEQ ID NO: 724988 - DNA, 120 bp, Artificial Sequence
  ENSG00000198146_27 (sequence is synthesized)
agaggctaggatgtacctatatttaccatgtttacttaccaggaatattttctaagtgccatagtctttttcataatacgtatgagttttaccttttcagaggaataatttcaagtcatt

SEQ ID NO: 724989 - DNA, 120 bp, Artificial Sequence
  ENSG00000198146_28 (sequence is synthesized)
tatttgctcattaatgatagcagtagtcatagacttaagactattctagagatcttcatctccataagacttttacatttattttagtaaacttttctttctatgcctctttaatggagt

SEQ ID NO: 724990 - DNA, 120 bp, Artificial Sequence
  ENSG00000198146_29 (sequence is synthesized)
ggttctgttatttaagcctgttctaagtttgatcaaatggcaatgactaggtctagttttagtttttatttttgcaggagtctattgctaaagaattttattttgatgcttgttaaattt

SEQ ID NO: 724991 - DNA, 120 bp, Artificial Sequence
  ENSG00000198146_30 (sequence is synthesized)
ttattttaattaataaggtagtcattcctgtagagggataagatgcttgtagagttgtgggtatcattccaaatagaactgttatgatttgggaaatattctttactacaaaggacttat

SEQ ID NO: 724992 - DNA, 120 bp, Artificial Sequence
  ENSG00000198146_31 (sequence is synthesized)
ttcataattacaaattttccttcatatttgcctttgtttataaaatcttcaggaatgacattctctagcaataaaaggaatgaaccgttatgtttctaagctgaaaagaggaacaggtgg

SEQ ID NO: 724993 - DNA, 120 bp, Artificial Sequence
  ENSG00000198146_32 (sequence is synthesized)
gtaattatcctgccatacttaaatatagtggaaaatcctctattgagaatgtggataaatgaacaattgtaagttttgcatcataaactgagaactttcttttgacaggggggaggcggg

SEQ ID NO: 724994 - DNA, 120 bp, Artificial Sequence
  ENSG00000198146_33 (sequence is synthesized)
agggatagtaggtgggggtgatctgcttgcttcttttaccacaggtgatttttaagtaacttgggtttaatttacagagatgaaacatgacagtctgagtaaaatacccagtgatgtaga

SEQ ID NO: 724995 - DNA, 120 bp, Artificial Sequence
  ENSG00000198146_34 (sequence is synthesized)
agtgtgcctgtttattatgtagatacagacatccagcaaaaacaggagaatcacatgctttaaagaacactttctcttaggtttccttgagatatgttcctccagtgcaagcaagataat

SEQ ID NO: 724996 - DNA, 120 bp, Artificial Sequence
  ENSG00000198146_35 (sequence is synthesized)
ggtttacagaatttgctttacacaaaacttgtcaagaactcatctgttaaaagcaaggaataactagtttatattttccaataatgttcaaggttttctccttaatatgtttgaaattat

SEQ ID NO: 724997 - DNA, 120 bp, Artificial Sequence
  ENSG00000198146_36 (sequence is synthesized)
tgattttggcatttttctaagcaatttatgtaattttatttgaagaaaatgttttgtataatgtttttcccagcctaaacagggagagtcctaacagtgttgtgcttgtatgattctgag

SEQ ID NO: 724998 - DNA, 120 bp, Artificial Sequence
  ENSG00000198146_37 (sequence is synthesized)
actttatttgcgtaagtgatactactatactttatttttgacccatgcctttttaagctgtttcatattgaaaggtggaatattgtaaaaattttgtcaaagatgtactgtagtgctatt

SEQ ID NO: 724999 - DNA, 120 bp, Artificial Sequence
  ENSG00000198146_38 (sequence is synthesized)
tgaagtacctgtaacaaaacagttggccctctgtatccatgtactctgcatctgtggattaaaccaattgcagatcaaaaatattagaaaaaataaaaataatacaaataaaaatacagt

SEQ ID NO: 725000 - DNA, 120 bp, Artificial Sequence
  ENSG00000198146_39 (sequence is synthesized)
ataacagttatttaaatagcatttacattgcattaggtattagtctagggataaagtatacaggcggatgtgcgttggttatatacaaatatgtcattttatgtaagggacttgagtata

SEQ ID NO: 725001 - DNA, 120 bp, Artificial Sequence
  ENSG00000198146_40 (sequence is synthesized)
cttggatttttggtatctgtgggttggggggacggtccaggaaccaataccccatggataccaagggacaactgtacttatttacctttattgtcattgcaagcttcttatggaaacttt

SEQ ID NO: 725002 - DNA, 120 bp, Artificial Sequence
  ENSG00000198146_41 (sequence is synthesized)
ataggaatgaaaatatacatgttaagaagattaaacattagatagtagatggtttgttgcatgctagaactgttagtattgttgaatcaattactttggtttcatgaaaaaataaacgat

SEQ ID NO: 725003 - DNA, 120 bp, Artificial Sequence
  ENSG00000198146_42 (sequence is synthesized)
aaatatctttaaagagaactagaagaattttttgtttgagtgattccaggctgtagtatgatcatttactgaagtagtttgattggctggctaacttagaattattgtttcttgttttgt

SEQ ID NO: 725004 - DNA, 120 bp, Artificial Sequence
  ENSG00000198146_43 (sequence is synthesized)
actgcaataggggttataattgtaagataaaaatgtgtgtgtgtttaagggaagtaggtggtggttaaaattcttggaaaattttcagaatactttaaaaataaagttccaagttacaca

SEQ ID NO: 725005 - DNA, 120 bp, Artificial Sequence
  ENSG00000198146_44 (sequence is synthesized)
gtgcctcccgggccctcgccagctccagatgcgtgaggaggacttcagaaacccgactgagaagtggagcgacccccagggagggtcggacctgcctcaataccgccaagacatctgtgg

SEQ ID NO: 725006 - DNA, 61 bp, Artificial Sequence
  ENSG00000198156_0 (sequence is synthesized)
tttttttaaattatctaataggttggcactcatgatgagcccctgttctcattctgcaaat

SEQ ID NO: 725007 - DNA, 74 bp, Artificial Sequence
  ENSG00000198156_1 (sequence is synthesized)
aagctctctattgtcctgaccccacagttcctgtcgcatgaccagagccagctcaccaaggagctgcagcagca

SEQ ID NO: 725008 - DNA, 120 bp, Artificial Sequence
  ENSG00000198156_2 (sequence is synthesized)
acatggcaaaaccccatctccacaaaaattggataatttgataattatcattattgggtttctgagacgttacacatttaacattctcttctgcacaagttgcctttgtgtgtctttcct

SEQ ID NO: 725009 - DNA, 69 bp, Artificial Sequence
  ENSG00000198156_3 (sequence is synthesized)
tctcgaaatggacatgatggatccatggatgtacagcagagagcctggaggtccaaccgcagtagacag

SEQ ID NO: 725010 - DNA, 73 bp, Artificial Sequence
  ENSG00000198156_4 (sequence is synthesized)
tgcgcaagagttgcggcggcgctctttgcaactgggtcagaatggtggcagcggagcatcgtcattcttcagg

SEQ ID NO: 725011 - DNA, 87 bp, Artificial Sequence
  ENSG00000198156_5 (sequence is synthesized)
ataactccctgagcctcaagacacctacggatgataatatcaaggagtgtcctcttgctcctcttccaccctctcctcttccaccct

SEQ ID NO: 725012 - DNA, 120 bp, Artificial Sequence
  ENSG00000198156_6 (sequence is synthesized)
tcttccaccctcagtggatgataatctcaagactcctcccttagctactcaggaggccgaggtggaaaaaccacccaaacccaagaggtggagggtggatgaggtggaacaatcaccgaa

SEQ ID NO: 725013 - DNA, 120 bp, Artificial Sequence
  ENSG00000198156_7 (sequence is synthesized)
gggtggatgaggtggaacaatcaccgaaacccaagaggcggagggtggatgaggtggaacaatcgcccaagcccaagaggcagagggaggccgaggcacaacaattacccaaacccaaga

SEQ ID NO: 725014 - DNA, 120 bp, Artificial Sequence; identical to SEQ ID NO: 711859
  ENSG00000198156_8 (sequence is synthesized)

SEQ ID NO: 725015 - DNA, 88 bp, Artificial Sequence
  ENSG00000198156_9 (sequence is synthesized)
cacctctgtcctggccgcctcagggcaccctgaaaggatcatgacatgcggctgcgcttttggctcctcacccacccctgttatcaat

SEQ ID NO: 725016 - DNA, 120 bp, Artificial Sequence
  ENSG00000198157_0 (sequence is synthesized)
gatttttgacgattccttccctgagaagagggcgaggagaagaagaaagaaaaaggagaactgaattgaattagattagcatgaaggaccttttcacgcggagactaaaagtactgcgca

SEQ ID NO: 725017 - DNA, 120 bp, Artificial Sequence
  ENSG00000198157_1 (sequence is synthesized)
taacttcctgctcagaaatatatgcaaataagaagacagatcctgaaagagcaagctaggagagtacaggtcgtgctgcagttagttcattgaaaactcatttgctcttggagcagtcag

SEQ ID NO: 725018 - DNA, 120 bp, Artificial Sequence
  ENSG00000198157_2 (sequence is synthesized)
gcagtgactgccttcggctttttttctgctgactaagatctcctatagagagctacaacaatgcccaaaagaaaggctgcaggtcaaggtgatatgaggcaggagccaaagagaagatct

SEQ ID NO: 725019 - DNA, 120 bp, Artificial Sequence
  ENSG00000198157_3 (sequence is synthesized)
gccaggttgtctgctatgcttgtgccagttacaccagaggtgaagcctaaaagaacatcaagttcaaggaaaatgaagacaaaaagtgatatgatggaagaaaacatagatacaagtgcc

SEQ ID NO: 725020 - DNA, 120 bp, Artificial Sequence
  ENSG00000198157_4 (sequence is synthesized)
caagcagttgctgaaaccaagcaagaagcagttgttgaagaagactacaatgaaaatgctaaaaatggagaagccaaaattacagaggcaccagcttctgaaaaagaaattgtggaagta

SEQ ID NO: 725021 - DNA, 120 bp, Artificial Sequence
  ENSG00000198157_5 (sequence is synthesized)
aaagaagaaaatattgaagatgccacagaaaagggaggagaaaagaaagaagcagtggcagcagaagtaaaaaatgaagaagaagatcagaaagaagatgaagaagatcaaaacgaagag

SEQ ID NO: 725022 - DNA, 120 bp, Artificial Sequence
  ENSG00000198157_6 (sequence is synthesized)
aaaggggaagctggaaaagaagacaaagatgaaaaaggggaagaagatggaaaagaggataaaaatggaaatgagaaaggagaagatgcaaaagagaaagaagatggaaaaaaaggtgaa

SEQ ID NO: 725023 - DNA, 120 bp, Artificial Sequence
  ENSG00000198157_7 (sequence is synthesized)
gacggaaaaggaaatggagaagatggaaaagagaaaggagaagatgaaaaagaggaagaagacagaaaagaaacaggagatggaaaagagaatgaagatggaaaagagaagggagataaa

SEQ ID NO: 725024 - DNA, 120 bp, Artificial Sequence
  ENSG00000198157_8 (sequence is synthesized)
agatgaaggtggaaatgaggaagaagctggaaaagagaaagaagatttaaaagaagaggaagaaggaaaagaggaagatgagatcaaagaagatgatggaaaaaaagaggagccacagag

SEQ ID NO: 725025 - DNA, 120 bp, Artificial Sequence
  ENSG00000198157_9 (sequence is synthesized)
tattgtttaaaactgccctatgtagtttcataatttggtaacatgtaccttcatgttgtaaagttaatagagataaatatttttatcaaaaattttataaacacagcctttctttagcat

SEQ ID NO: 725026 - DNA, 120 bp, Artificial Sequence
  ENSG00000198157_10 (sequence is synthesized)
tgatttaatttcagaacatcttcatattgattattagccataaagtttctaacatgaaacatttatctataaattttgtgattatagtagtggaatacatagaaaaaaatatgctttcaa

SEQ ID NO: 725027 - DNA, 120 bp, Artificial Sequence
  ENSG00000198157_11 (sequence is synthesized)
ctttgtgagtgaatttcgtgttgtgtaagttatatgtcaaatctttgaattttaattttactcttttatacatgtgataatttcataaagtgagggatcccaaaaaaagagtttcatcca

SEQ ID NO: 725028 - DNA, 120 bp, Artificial Sequence
  ENSG00000198157_12 (sequence is synthesized)
acattcttgttctgcaggttgcttttataaagaaggtgaactattttcatgtaatgttaagagttaaacttatctttcccaaatataactttattattagcttgggaaaaatgaaattgt

SEQ ID NO: 725029 - DNA, 120 bp, Artificial Sequence
  ENSG00000198157_13 (sequence is synthesized)
attcccatttttaaaataaatacaaatgtttatttcagaagggcagttttgattatatgtgaatacacaaattttactggatttatcttaataaaaagactctgacgatgattgtgtttt

SEQ ID NO: 725030 - DNA, 120 bp, Artificial Sequence
  ENSG00000198157_14 (sequence is synthesized)
tctgacgatgattgtgttttgttatatcttcaaaaatatagctagtgaaatattgtgcttaatttttttctattgtgttattcatgaaaatatttaatattcactgacataaaattaata

SEQ ID NO: 725031 - DNA, 120 bp, Artificial Sequence
  ENSG00000198157_15 (sequence is synthesized)
taattataataaaaataaagtatataattcaatggttgtcagtatattcacaatgttgtgtccactgtttaattccagagaatttttatcacccaaataagaaacaaagcaccaattagc

SEQ ID NO: 725032 - DNA, 120 bp, Artificial Sequence
  ENSG00000198157_16 (sequence is synthesized)
agtctcttcccattttcgcccaacttatcccccacctccatcccttggcaaccactaatctgccttctatctctatggatttgcctattctgaacatttattataaatggaatcacataa

SEQ ID NO: 725033 - DNA, 120 bp, Artificial Sequence
  ENSG00000198157_17 (sequence is synthesized)
ataagaagacagatcctgaaagagcaagctatgcttcctgcccttgaacattggaatacaagttcttcagctttgggactcttggaccttcgaccacagactgaaggctgcactgtcggc

SEQ ID NO: 725034 - DNA, 120 bp, Artificial Sequence
  ENSG00000198157_18 (sequence is synthesized)
ttccctatttttgaggttttggaacttggactggctttcttgctcctcagcttgcagacagcctaatgtgggacttcatcttgtgatcgtaggagagtacaggtcgtgctgcagttagtt

SEQ ID NO: 725035 - DNA, 120 bp, Artificial Sequence
  ENSG00000198157_19 (sequence is synthesized)
taacttcctgctcagaaatatatgcaaataagaagacagatcctgaaagagcaagcttatgacatccctttcccttctcaagtggacactgctatgctctcacccctcactcagaactaa

SEQ ID NO: 725036 - DNA, 120 bp, Artificial Sequence
  ENSG00000198160_0 (sequence is synthesized)
gcggctcctgcgcgttcccgccgaggcagtggcggcgggagcggcagagacggcagcggccggagtcccgttgctgagtctcacatccgggttctggccgtgacccagctgcggccgccg

SEQ ID NO: 725037 - DNA, 120 bp, Artificial Sequence
  ENSG00000198160_1 (sequence is synthesized)
cggagatgtgacccggcagtacggcaaatatggcggagccatctgttgaatcttcaagtccaggaggttcagcaacatcagatgaccatgaatttgatccatcagctgacatgctggttc

SEQ ID NO: 725038 - DNA, 120 bp, Artificial Sequence
  ENSG00000198160_2 (sequence is synthesized)
atgattttgatgatgaacgaacattagaagaggaagaaatgatggaaggagaaacaaacttcagctctgaaatagaagatcttgcaagggaaggcgacatgccaattcatgaacttctca

SEQ ID NO: 725039 - DNA, 120 bp, Artificial Sequence
  ENSG00000198160_3 (sequence is synthesized)
gcctttatggttatggtagtactgttcgactacctgaagaagatgaggaagaggaagaagaggaagaagaaggtgaagatgatgaagatgctgataatgatgacaacagtggctgtagtg

SEQ ID NO: 725040 - DNA, 120 bp, Artificial Sequence
  ENSG00000198160_4 (sequence is synthesized)
gggaaaataaagaggagaatataaaggattcatcaggtcaggaggatgaaactcagtcttccaatgatgatccatcacaatctgttgcttctcaagatgcccaggaaataatccgcccac

SEQ ID NO: 725041 - DNA, 120 bp, Artificial Sequence
  ENSG00000198160_5 (sequence is synthesized)
gtcgatgtaaatattttgatacaaatagtgaagtagaagaagaatctgaagaagatgaagattatattccatcagaagactggaaaaaggagattatggtgggctccatgtttcaagcag

SEQ ID NO: 725042 - DNA, 120 bp, Artificial Sequence
  ENSG00000198160_6 (sequence is synthesized)
aaattccagttggcatttgtagatacaaagaaaatgaaaaagtatatgaaaatgatgatcagctcctgtgggaccctgagtacttaccagaagataaagtgattatatttcttaaagatg

SEQ ID NO: 725043 - DNA, 120 bp, Artificial Sequence
  ENSG00000198160_7 (sequence is synthesized)
catctagaagaacaggtgatgagaagggtgtagaagcaattcctgaaggatctcacataaaagacaatgaacaggctttatatgaattggttaaatgcaattttgatacagaagaagcat

SEQ ID NO: 725044 - DNA, 120 bp, Artificial Sequence
  ENSG00000198160_8 (sequence is synthesized)
tgagaagattaagatttaatgtaaaagcagctagagaggaattatctgtttggacagaggaagagtgtagaaattttgaacaagggctgaaggcctatggaaaggattttcatttgattc

SEQ ID NO: 725045 - DNA, 120 bp, Artificial Sequence
  ENSG00000198160_9 (sequence is synthesized)
aggctaataaagtccgaacaaggtcagttggtgaatgtgtagcattctattacatgtggaaaaaatctgaacgttatgatttctttgctcagcaaacacgatttggaaagaagaaatata

SEQ ID NO: 725046 - DNA, 120 bp, Artificial Sequence
  ENSG00000198160_10 (sequence is synthesized)
atcttcatcctggtgtaacggattacatggatcgtcttctagacgaaagtgaaagtgctgcatctagtcgagcaccatcccctcccccaactgcatcaaacagtagtaacagccagtctg

SEQ ID NO: 725047 - DNA, 120 bp, Artificial Sequence
  ENSG00000198160_11 (sequence is synthesized)
agaaagaagatggcactgtaagcactgctaatcaaaatggagtgtcatctaatggaccaggtgaaatattaaacaaagaggaagtaaaagttgaagggttacacattaatggaccaacag

SEQ ID NO: 725048 - DNA, 120 bp, Artificial Sequence
  ENSG00000198160_12 (sequence is synthesized)
gtggaaataagaaaccacttcatgcagatatggatactaatggttatgaaacagataaccttaccactgacccaaaacttgcccatatgactgcaagaaatgaaaatgattttgatgaaa

SEQ ID NO: 725049 - DNA, 120 bp, Artificial Sequence
  ENSG00000198160_13 (sequence is synthesized)
aaagtgagagacctgccaaaaggcgaagggtaaacagcaatggaaaagaaagtccaggttcttctgaatttttccaagaagcagtctcacatgggaaatttgaagaacttgaaaacacag

SEQ ID NO: 725050 - DNA, 120 bp, Artificial Sequence
  ENSG00000198160_14 (sequence is synthesized)
atgactaaattttagacctattttactttctttggagtaaattctggtgtgactaaaattttcagggttgatgggttaccttaaaaagttgatttccttgaagcagtttgaaaatttgaa

SEQ ID NO: 725051 - DNA, 120 bp, Artificial Sequence
  ENSG00000198160_15 (sequence is synthesized)
ttgagtcttaactttaggaaatgaggtttcataattctgccttttgcagatttttttactttaaagctgtcagactcttttaagggtattttaaaaattagtaaatttgaatgaactaaa

SEQ ID NO: 725052 - DNA, 120 bp, Artificial Sequence
  ENSG00000198160_16 (sequence is synthesized)
gatatatctctaccttctcatttgaatatctttagttcattcagatttactaattttggtaaatctgaatgaactaaagatgtatctgtaccttctcatttgatgtattaatcataaaat

SEQ ID NO: 725053 - DNA, 120 bp, Artificial Sequence
  ENSG00000198160_17 (sequence is synthesized)
ttcactacaaggtaatttttgcttagtttgatggatgaatgggaaactcaagtccaaatttctgcttaataccaatttctctgagtttcttgaaatgtctttaaaacagacatttttctc

SEQ ID NO: 725054 - DNA, 120 bp, Artificial Sequence
  ENSG00000198160_18 (sequence is synthesized)
accaaacagtttgagtatctttattaaggaaacccttacgaatcctgaaaattatgctagcatgatttttttatatatagaagtttaaaaataaaccaggtcaggtttgtatatgtaaaa

SEQ ID NO: 725055 - DNA, 120 bp, Artificial Sequence
  ENSG00000198160_19 (sequence is synthesized)
ttgttgacatcaatgatgtctttccatattcttatctgggcttaagaaatacattctgtatttttccagattctttgtagcctttgaaagatttttacagtacatatgtcttgactgagc

SEQ ID NO: 725056 - DNA, 120 bp, Artificial Sequence
  ENSG00000198160_20 (sequence is synthesized)
aagcgtgtataattttcttaacttgtacagttggtaaacttttatgagaggaattgttattctgagtctgtcagctttcattttattttgctaaggtttttctaatgaatttttaagtgt

SEQ ID NO: 725057 - DNA, 120 bp, Artificial Sequence
  ENSG00000198160_21 (sequence is synthesized)
attttgctaaggtttttctaatgaatttttaagtgtttgtgtagtaattaagtcatatttcttatccaggtggttaaagcattcataaaggattataaaatttttttttttttttttttt

SEQ ID NO: 725058 - DNA, 120 bp, Artificial Sequence
  ENSG00000198160_22 (sequence is synthesized)
tctgaaattaagcatgatgcttagattgcagtttgttttgcatttgctataattttcaaaattatttttgaagcaagacaaaagtttaatgtcagcttaagtgcttaaatatatcatgct

SEQ ID NO: 725059 - DNA, 120 bp, Artificial Sequence
  ENSG00000198160_23 (sequence is synthesized)
gaccagaatcctgttatttttatatgcatcataaaatttcccatttctgcattaaataaacagaggaggggggtcaagtgatacttagatattggcacacacaaggaacaactgttggca

SEQ ID NO: 725060 - DNA, 120 bp, Artificial Sequence
  ENSG00000198160_24 (sequence is synthesized)
ggcagtatcgattttatgaagagaaagtgaagtttgaaaacttttcaaacttttctagttacaatccaatttttcagatttgataatgcttttccaaagtgaaaataagatacacaataa

SEQ ID NO: 725061 - DNA, 120 bp, Artificial Sequence
  ENSG00000198160_25 (sequence is synthesized)
tcattgctctgtgtgattacagataggattatccatctgcatagccttgtaaaagtgccattttatttttagtgctaaattcttgttaaataatgtagttttatatagctgatagaccaa

SEQ ID NO: 725062 - DNA, 120 bp, Artificial Sequence
  ENSG00000198160_26 (sequence is synthesized)
cctatatccaaacttttataaaatattaattattcttgtttttctcacacaggcatactccaaatgcttcttccagttcatttttcagccatcagttcaagagccaatgcctttttaaaa

SEQ ID NO: 725063 - DNA, 120 bp, Artificial Sequence
  ENSG00000198160_27 (sequence is synthesized)
taaagcttctgtggtcttgtttttaatggctcaactgtctgatgtaattgagtgaaggtttgcactgagaaattagcattcaggccttacccccatgaagtattactgttaacatatgtt

SEQ ID NO: 725064 - DNA, 120 bp, Artificial Sequence
  ENSG00000198160_28 (sequence is synthesized)
cggactgcttcccttcaccaatgtgaacaactttttttcccaaacagtgttaaaagccactttgcaacacttgacttcatcttaatgtacattcactgttgttacatacatatctaagta

SEQ ID NO: 725065 - DNA, 120 bp, Artificial Sequence
  ENSG00000198160_29 (sequence is synthesized)
aatcaaagttttgggtggaagtgttgagaagtatgagttttttgttgtttttgttttacttaaaacttttaatttatccagaatggcagtagctttagcaagcagatggtcacaatctgt

SEQ ID NO: 725066 - DNA, 120 bp, Artificial Sequence
  ENSG00000198160_30 (sequence is synthesized)
tttctaaatcattttttattaaatgaatccaaagtatcctagctctttgtcaaagatggtctgtagaaatgtttttaaagattagggatgctgtactttttgaattgttgcagtgttgga

SEQ ID NO: 725067 - DNA, 120 bp, Artificial Sequence
  ENSG00000198160_31 (sequence is synthesized)
gatgccattttcacctttttaaaaagatgcattttatttgcaggtttgtgaagttcttgcaaactcttactacagaaatgttttaaatacattctcaggcatgtttgcaaaaatatggca

SEQ ID NO: 725068 - DNA, 120 bp, Artificial Sequence
  ENSG00000198160_32 (sequence is synthesized)
catgtatacattttaggaaatgttacttttgttaatctttaaaaaatacacctaatgaaagacattccactattatgcgtaatgctcagctttttgtaaagaaatatttaattgtatttt

SEQ ID NO: 725069 - DNA, 120 bp, Artificial Sequence
  ENSG00000198160_33 (sequence is synthesized)
gtgtttatacaggtatttcacacaataatttgttcttaatgcagccactataacttgataagtcattgcactatttaaaaagttttagtaatatcatgaatttaatttgcttaagattta

SEQ ID NO: 725070 - DNA, 120 bp, Artificial Sequence
  ENSG00000198160_34 (sequence is synthesized)
gtacatttcagaacttttgaacttttgacaaattgcattggaaaaagaagtctgttaatagtgatttagtctccccgcctcattcccacccccaacaaagcactatcattttcatttgga

SEQ ID NO: 725071 - DNA, 120 bp, Artificial Sequence
  ENSG00000198160_35 (sequence is synthesized)
atgggtattttctgtttcatgatgtattttcaaatagagttcaggatctgcaattcagttcaacacaagtttgttgagctttaaaatgtatttgaagtaatatttaaataggcatttaaa

SEQ ID NO: 725072 - DNA, 120 bp, Artificial Sequence
  ENSG00000198160_36 (sequence is synthesized)
atttcaaattagatgttaaatttatgcatagtaattttgcactgtaaaataattcccttctcccattccttgtctgccattctgaatatgcttattaaaatatttttttaaacatatttg

SEQ ID NO: 725073 - DNA, 120 bp, Artificial Sequence
  ENSG00000198160_37 (sequence is synthesized)
cctacataatactgtgtgaatattttcattagattaattcactaagattttattagagattgtttgaatgatgcatgttattgacaaggcaaatatatatatatacacagtctgtttctt

SEQ ID NO: 725074 - DNA, 120 bp, Artificial Sequence
  ENSG00000198160_38 (sequence is synthesized)
ctattcctagacatattgcactactttttcagtggttcttggtcccctttaccacatcttgggtgatgtatttttgtcttcttcccctttgccacaagagatcctttcagtccctagacc

SEQ ID NO: 725075 - DNA, 120 bp, Artificial Sequence
  ENSG00000198160_39 (sequence is synthesized)
tccattcactctgtttctcttctgctggattatataatttaaaaataatgtgttcccgtattttgtagtggagttcatatcacattatgttttgcaaaataaaacttgttttgtcacaat

SEQ ID NO: 725076 - DNA, 120 bp, Artificial Sequence
  ENSG00000198160_40 (sequence is synthesized)
aggagggcggaggcggaggggagggcagagggttggtggagctggaggaagctccggacgacgactggaagaaggaggcgggcggcccgggcctcaggcccctcccaggctctgagtctc

SEQ ID NO: 725077 - DNA, 120 bp, Artificial Sequence
  ENSG00000198160_41 (sequence is synthesized)
ccggctgcaggcggatggatggggcttcttcaggcggtggcggcagcagcgaaggtggcggcggcagcagcggcagcggctatggtgtggtcgctcgattctcccagtgcctggctgagt

SEQ ID NO: 725078 - DNA, 120 bp, Artificial Sequence
  ENSG00000198160_42 (sequence is synthesized)
gatagtaaggttttcccaactataatccatattcatgaaaaatgccagtgtggaaaaccatgtaacatacagaagaacaggagtttccaaattttaaccttttattctaaaaatgactct

SEQ ID NO: 725079 - DNA, 120 bp, Artificial Sequence
  ENSG00000198160_43 (sequence is synthesized)
cttctctcaaaatgactttttctgtatcacataattctactgatacaactttttaccgtaaaaattaactctcttctttaatatcaagttcatcctttgcagaatcttaaagggttttcc

SEQ ID NO: 725080 - DNA, 120 bp, Artificial Sequence
  ENSG00000198160_44 (sequence is synthesized)
acacatccatccacccacttacagactgatttcatgtatctgaatatctgattaacctttcttttctaataccagttttccataaactcttgtcatgtacccttagtattgtgctgatct

SEQ ID NO: 725081 - DNA, 120 bp, Artificial Sequence
  ENSG00000198160_45 (sequence is synthesized)
tttgccaactatacggacgtggagtttttccttttcagaatatgattattttcaatttgtctttagttagtataaagaattatagaatgtataatgtaattaaaatgtcattttgcttgc

SEQ ID NO: 725082 - DNA, 120 bp, Artificial Sequence
  ENSG00000198160_46 (sequence is synthesized)
ttcggacgtggttaagaaccaactggttgaggttcaatgcagacaagacggatgtgatgctgaaaatgtgcatcagatgtttatgtttaattggtttacagactgtctgtggactctttt

SEQ ID NO: 725083 - DNA, 120 bp, Artificial Sequence
  ENSG00000198160_47 (sequence is synthesized)
taacatgtagagctagggtatgaattggttatgacttttttgtggaaagggaagatctgaaattttgattctctgattaggagagaaattgtgttatatattaatgactgaaaaattttg

SEQ ID NO: 725084 - DNA, 120 bp, Artificial Sequence
  ENSG00000198160_48 (sequence is synthesized)
tgtgatcataggtgggatatttaaagtttgaaatgaaaggatttaaaaacaataactttattatgtgcaataacagaattcacatagttactttggtaaaacatagactgttaaatgatt

SEQ ID NO: 725085 - DNA, 120 bp, Artificial Sequence
  ENSG00000198160_49 (sequence is synthesized)
ctgctataaaggtctggtcaaaaatggactataaaaggattctacacggcctcatatatcctttgtccttccccagttaccatatcttttacttattctccttcagagccaaaaattctt

SEQ ID NO: 725086 - DNA, 120 bp, Artificial Sequence
  ENSG00000198160_50 (sequence is synthesized)
gaagtatcattttccattcactacataaagtgctctagattatctccactacataaagtgctctagattatctccacctcttcctatcaaggtgaccagtgaactttccttgttacatcc

SEQ ID NO: 725087 - DNA, 120 bp, Artificial Sequence
  ENSG00000198160_51 (sequence is synthesized)
atttttatattcacttttctctcactaccttactttttctcagcagtattcaatatagtttaacattcccttcttttacttgaattctggagtacaccactgtctggttttctttatctt

SEQ ID NO: 725088 - DNA, 120 bp, Artificial Sequence
  ENSG00000198160_52 (sequence is synthesized)
tttgtttctattcagtatcttttgcagactcttcttccgttactcaaggtttacatgttggcagtttgtgattctcagtttggaccttctttttttctctcctgtctctgtctggatcag

SEQ ID NO: 725089 - DNA, 120 bp, Artificial Sequence
  ENSG00000198160_53 (sequence is synthesized)
gagggtcagttgcatcagaatcaaccctgtacttattttaaaaagcagattttttggacctctcccccggcatactgaatcagaatctctggaggtggtgttcagatccacatcttcatt

SEQ ID NO: 725090 - DNA, 120 bp, Artificial Sequence
  ENSG00000198160_54 (sequence is synthesized)
aagtaagttggcattatatgtacaccaaatttgaaaatcactaagctgtgtgatttaatttattcccttggtgtgtatatccttagtattctttagtttatatttctagcattaacctat

SEQ ID NO: 725091 - DNA, 120 bp, Artificial Sequence
  ENSG00000198160_55 (sequence is synthesized)
ttcctgtctccagttttgtttgtccaccttgacatttctgcttgcttaactaaatggacatctctaaattataaatgtccaaaacagaactattgactgttgtttttttctctgcttgtt

SEQ ID NO: 725092 - DNA, 120 bp, Artificial Sequence
  ENSG00000198160_56 (sequence is synthesized)
ctttccctgtcctatcagtaaaaagtggtactactatttaccctgttgcctaagtcagaaaccagtgagtcattttccttctctttcaatatcttatttctaaataaacctatcatttgt

SEQ ID NO: 725093 - DNA, 120 bp, Artificial Sequence
  ENSG00000198160_57 (sequence is synthesized)
atccacaagaatatcccttagccgactcttgatccattgctgcctagattaccattctttctagcctaggctattgcagtagcttcctgactggtttccccatttcctcttttaccatct

SEQ ID NO: 725094 - DNA, 120 bp, Artificial Sequence
  ENSG00000198160_58 (sequence is synthesized)
ttctcctgatacatttccacccagcagctgtgatcttcttttcaaaatgtaaatcaattaatatcaacctcccagcttcctgttatatccaaagaaaacccaaactcctcaaccaggcca

SEQ ID NO: 725095 - DNA, 120 bp, Artificial Sequence
  ENSG00000198160_59 (sequence is synthesized)
gcaaggccacctgcatgataatggcctcttacccatgtatcacactacctctgttatagccacactagctgcttttgttgttaaataggctagtttcttctgcttcaagggttttcagct

SEQ ID NO: 725096 - DNA, 120 bp, Artificial Sequence
  ENSG00000198160_60 (sequence is synthesized)
cattctcactctctggtatatgcatcccaaggccggctccttatcctctgggttcggtgttgcctcctcagaatagcagcctttcctgtcccctaattaggttttaattagttttttgtt

SEQ ID NO: 725097 - DNA, 120 bp, Artificial Sequence
  ENSG00000198160_61 (sequence is synthesized)
ttatttttatttttttttaaccactgtcccctattcaatgctttctttagtgttaggacacaatttgtaattgtttgtttaatttattgtctgtacctccactggttttgagaagatgaa

SEQ ID NO: 725098 - DNA, 120 bp, Artificial Sequence
  ENSG00000198160_62 (sequence is synthesized)
ataaaatgactgttattcaccagtgtatttcatggtaccttgcaagagtgctcactcaaaagtattgtatgaatgaatggatatatcagtctggtatgttctaataaaatatatcatgca

SEQ ID NO: 725099 - DNA, 120 bp, Artificial Sequence
  ENSG00000198160_63 (sequence is synthesized)
gataaaatcgatgtaagcccttttatgacatttaaatgtttggtaaatgttcagattccttcttaacacatctaggttagattagaaatctacatttctggcggggtgtggtggctcacg

SEQ ID NO: 725100 - DNA, 79 bp, Artificial Sequence
  ENSG00000198160_64 (sequence is synthesized)
cctgttatcccagcacttgggaggctgaggcaggcgttgcgggaccctgtctcattttataaaacaaaacaaaaaataa

SEQ ID NO: 725101 - DNA, 120 bp, Artificial Sequence
  ENSG00000198160_65 (sequence is synthesized)
atgtgattaaataatccagatgctgaattattgtgcttttgatcaaataaatctgaggatttaaggatagcttgtgaagtaacagtaagtgcaaagcaacagtatatatctatttgttaa

SEQ ID NO: 725102 - DNA, 120 bp, Artificial Sequence
  ENSG00000198160_66 (sequence is synthesized)
atctgagggggaaaacaggttattgaagaagtatgtctccagagaaaaatccatctgttgaatcttcaagtccagaaatggatgaaaggtttgactgcccatgaaagtacaggaggttca

SEQ ID NO: 725103 - DNA, 120 bp, Artificial Sequence
  ENSG00000198162_0 (sequence is synthesized)
agacccgtgcggtagcaacagcggcggcggccgcggcggctggccggactcaggtgtttcggacgctattgcccttcgcgccagccgtcgagtgggcagcagcgggactcagccgggcgc

SEQ ID NO: 725104 - DNA, 120 bp, Artificial Sequence
  ENSG00000198162_1 (sequence is synthesized)
caggttcctgccaggcagcgccgggaagcgcgggcggccgagaactccttcctgctacttcgcccagcgccgctgcttcggcttcccagcgaagtgggagaccttcctccctgtttgcag

SEQ ID NO: 725105 - DNA, 120 bp, Artificial Sequence
  ENSG00000198162_2 (sequence is synthesized)
acgtccgtgggagacccttattttttccaccgctaaggttaagagattctggaatagaagcgtcgaaggagatcaagtgaaccttctacaactcctcggatgtcgccagtctccctttcg

SEQ ID NO: 725106 - DNA, 120 bp, Artificial Sequence
  ENSG00000198162_3 (sequence is synthesized)
gggcggaagactacgtttgagcatctcactgaggtgcaggaatggaagaacccaccttgcagcttttctgcagtgtggcttgcctgatctacccctaggaatgaagaggaggcttgtaat

SEQ ID NO: 725107 - DNA, 120 bp, Artificial Sequence
  ENSG00000198162_4 (sequence is synthesized)
aatccgatgaagtacagatgttgaagaggatatcgcaggacctaaacttgtgatcgtttgggggaggtcacacacgtttctgagtgggaatggatgggcgtgaatgacgtgccctcttaa

SEQ ID NO: 725108 - DNA, 120 bp, Artificial Sequence
  ENSG00000198162_5 (sequence is synthesized)
aaagcacaacagtcctttaagaggagcaaaattgagttttcccattttggccaagattttgaagacagttcaatgtattctacatttgacataagatgagaactttctaaagtattctct

SEQ ID NO: 725109 - DNA, 120 bp, Artificial Sequence
  ENSG00000198162_6 (sequence is synthesized)
ccaagagcgtaaacgatgactaccccagccctgctgcccctctctggacgtaggataccacctctgaacctggggccgccttccttcccacatcacagggctaccttgagactttctgag

SEQ ID NO: 725110 - DNA, 120 bp, Artificial Sequence
  ENSG00000198162_7 (sequence is synthesized)
aagtttattcttctccttattcttagtgccttcatcactctgtgttttggggcattctttttccttccagactcttcaaaacacaaacgctttgatttgggtttagaagatgtgttaatt

SEQ ID NO: 725111 - DNA, 120 bp, Artificial Sequence
  ENSG00000198162_8 (sequence is synthesized)
ccacatgtagatgccggtaaaggggctaaaaaccccggagtcttcctgatccatggacccgatgaacatagacacagggaagaggaagaacgtctgagaaataaaattcgagctgatcat

SEQ ID NO: 725112 - DNA, 120 bp, Artificial Sequence
  ENSG00000198162_9 (sequence is synthesized)
gagaaggccttggaagaagcaaaagaaaaattaagaaagtcaagagaggaaattcgagcagaaattcagacagagaaaaataaggtagtccaagaaatgaagataaaagagaacaagcca

SEQ ID NO: 725113 - DNA, 120 bp, Artificial Sequence
  ENSG00000198162_10 (sequence is synthesized)
ctgccaccagtccctattcccaaccttgtaggaatacgtggtggagacccagaagataatgacataagagagaaaagggaaaaaattaaagagatgatgaaacatgcttgggataactat

SEQ ID NO: 725114 - DNA, 120 bp, Artificial Sequence
  ENSG00000198162_11 (sequence is synthesized)
aggacatatgggtggggacataatgaactcagacctattgcaaggaaaggacactcccctaacatatttggaagttcacaaatgggtgctaccatagtagatgctttggataccctttat

SEQ ID NO: 725115 - DNA, 120 bp, Artificial Sequence
  ENSG00000198162_12 (sequence is synthesized)
atcatgggacttcatgatgaattcctagatgggcaaagatggattgaagacaaccttgatttcagtgtgaattcagaggtgtctgtgtttgaagtcaacattcgatttattggaggccta

SEQ ID NO: 725116 - DNA, 120 bp, Artificial Sequence
  ENSG00000198162_13 (sequence is synthesized)
cttgcagcatattacctatcaggagaggagatattcaagattaaagcagtgcaattggctgagaaactccttcctgcctttaacacacctactgggattccttgggcaatggtgaatttg

SEQ ID NO: 725117 - DNA, 120 bp, Artificial Sequence
  ENSG00000198162_14 (sequence is synthesized)
aaaagtggagtagggcgaaactggggctgggcatctgcaggtagcagcattctggctgaatttggtacactacatatggagttcatccacctcagctacttgacaggggacctgacttac

SEQ ID NO: 725118 - DNA, 120 bp, Artificial Sequence
  ENSG00000198162_15 (sequence is synthesized)
tacaaaaaggttatgcacattcggaaactacttcagaaaatggatcgtccaaatggtctttatccaaattatttgaaccccagaacagggcgctggggtcagtatcatacatctgtcggt

SEQ ID NO: 725119 - DNA, 120 bp, Artificial Sequence
  ENSG00000198162_16 (sequence is synthesized)
ggcctgggagacagtttttatgaatacttactgaaagcatggttgatgtcagataaaacagaccatgaggcaagaaagatgtatgatgatgctattgaggctatagaaaaacatcttatt

SEQ ID NO: 725120 - DNA, 120 bp, Artificial Sequence
  ENSG00000198162_17 (sequence is synthesized)
aagaagtctcgtggaggtcttacctttattggagaatggaagaatgggcacttggaaaaaaagatggggcatttggcctgctttgctgggggaatgtttgcactaggagcagatggttcc

SEQ ID NO: 725121 - DNA, 120 bp, Artificial Sequence
  ENSG00000198162_18 (sequence is synthesized)
agagcagataaagctggtcattatttagagctaggggcagaaattgcacgtacttgtcatgagtcatatgacagaactgcattaaagctaggtcctgaatcattcaagtttgatggtgca

SEQ ID NO: 725122 - DNA, 120 bp, Artificial Sequence
  ENSG00000198162_19 (sequence is synthesized)
gtggaggctgtggctgtccggcaggctgaaaagtattatatcctccgtccagaagtaattgaaacctattggtacctatggcgattcactcacgatccaagatacaggcagtggggctgg

SEQ ID NO: 725123 - DNA, 120 bp, Artificial Sequence
  ENSG00000198162_20 (sequence is synthesized)
gaagcagcactggccattgaaaagtattgccgagttaatggtgggttttctggagtcaaagatgtatattcctctactcctacacatgatgatgtacagcagagcttttttcttgctgaa

SEQ ID NO: 725124 - DNA, 120 bp, Artificial Sequence
  ENSG00000198162_21 (sequence is synthesized)
acattaaaatatttgtatctgctgttctccggtgatgaccttttacctttagaccactgggtgtttaatacagaggctcaccctctgcctgtgttacatttagccaacaccacactttca

SEQ ID NO: 725125 - DNA, 120 bp, Artificial Sequence
  ENSG00000198162_22 (sequence is synthesized)
ggtaatcctgctgttcgatgaaagcagttccagaaggaccattctcacctgtgttttgtttacatggaccactacagaaattagtttgaaggggcggcttttgaaaacctggacctctat

SEQ ID NO: 725126 - DNA, 120 bp, Artificial Sequence
  ENSG00000198162_23 (sequence is synthesized)
gtcaacatgacagggtgaaactattccccctaagactgttcaacttgtagatacatcaactttgaaattattccattttatacctgaccaaaacatgttctgatatgtgtaggacagaga

SEQ ID NO: 725127 - DNA, 120 bp, Artificial Sequence
  ENSG00000198162_24 (sequence is synthesized)
cctggatgtgctttgatcgttaatgaggtggtcacatgagaaatgatacctgttactactgtattgtttttagagtcctgaagtctggaggctagacttcctgaaagcaagtcaagaata

SEQ ID NO: 725128 - DNA, 120 bp, Artificial Sequence
  ENSG00000198162_25 (sequence is synthesized)
tagagcaccttgcaggagttcaagatggcctttggaaccaattatgtatttgtttcctcctacagtggagcagcattcaaatcaaatatttacatattgcttatcactttttctccattt

SEQ ID NO: 725129 - DNA, 120 bp, Artificial Sequence
  ENSG00000198162_26 (sequence is synthesized)
taataatggaatgaactaaaataaacaagaacaaaagaatagtataattatatcagtaacaagaagactcaaaaaagaaacaggagtacctatccctatctgaattttcaagttccccat

SEQ ID NO: 725130 - DNA, 120 bp, Artificial Sequence
  ENSG00000198162_27 (sequence is synthesized)
tggatgaccagactggcaaccatttcaaatcccagtctatttcattgaaatttcttggttaagtttaattttctctgggggcatgatctcacaaagaatactcaagtctttttcttctta

SEQ ID NO: 725131 - DNA, 120 bp, Artificial Sequence
  ENSG00000198162_28 (sequence is synthesized)
tggaatcatcgaaactgctatttatcataatcaccacttatgagcctgggtttgggattttgtgcatgtagttcagtctagtgttggtagcatgacagaaagtggggaaaatgccgcagt

SEQ ID NO: 725132 - DNA, 120 bp, Artificial Sequence
  ENSG00000198162_29 (sequence is synthesized)
ttgttgccttgaaacctaagagcaatccttggttttgttgctacattatttttccagaccaacacatctaccaagtaaattttattcactttaatttcataataaagttagtagagtcac

SEQ ID NO: 725133 - DNA, 120 bp, Artificial Sequence
  ENSG00000198162_30 (sequence is synthesized)
tcaacttacaactttatttatgtggcttggcaaaaatcactataaggcagctctaaatttgccttgataagctaaataaattacttttataacttactaaagcagaacaaacagtgaaac

SEQ ID NO: 725134 - DNA, 120 bp, Artificial Sequence
  ENSG00000198162_31 (sequence is synthesized)
tttctaaaatattctatctggaatagggacaggggatcttttatttataatctcatcagatgagtgagttgttcacagatattttatgtttttttaattttctccaagaatatttataga

SEQ ID NO: 725135 - DNA, 120 bp, Artificial Sequence
  ENSG00000198162_32 (sequence is synthesized)
attccaaagaatcagaatagtttcaaaataattttcagtgataaaagagtgttgtaattaatcatattacactaaaattgggatacatctaaggaactttatcttactatcagtaggttt

SEQ ID NO: 725136 - DNA, 120 bp, Artificial Sequence
  ENSG00000198162_33 (sequence is synthesized)
tgcattgatatttctttttaaataaactactagttctttatattttgacaaaaagaacttaaattttatcaggaactgtaagataaatatctagtgcttataaattttctgtccttaaat

SEQ ID NO: 725137 - DNA, 120 bp, Artificial Sequence
  ENSG00000198162_34 (sequence is synthesized)
ttatgtgacagtgcaagatacttttgctcttttcatttaatataggcatcttccattgacattaataaaacttagaaacagtataattagtataacatttactctgaatttgaagatttc

SEQ ID NO: 725138 - DNA, 120 bp, Artificial Sequence
  ENSG00000198162_35 (sequence is synthesized)
gtttgataagcttttcttttaaacttaggttttaagttggggaaagacttaattaactaatatagtattttctaaggttgatcatcttataccacgaatcgttaattttgacagttctac

SEQ ID NO: 725139 - DNA, 120 bp, Artificial Sequence
  ENSG00000198162_36 (sequence is synthesized)
tgatccgtaaatgataaccactgcaaattttttcagtataaaatttttcactgcaaaaaaatttcagtagaaaataaggatgcagggccagttacaatagtccttaagagagttaaatta

SEQ ID NO: 725140 - DNA, 120 bp, Artificial Sequence
  ENSG00000198162_37 (sequence is synthesized)
tagcacatgttttgacattgtaatatcttttactacttgaacatttaaatttctaaatgagaaaggtatatatattactgtaactgtagaagggaaaagggaaagtatttggttctaaaa

SEQ ID NO: 725141 - DNA, 120 bp, Artificial Sequence
  ENSG00000198162_38 (sequence is synthesized)
aatgttagccttcctcgtaaaagtagcacaagcccacttatgaatcactgagaaaaagtgaaaaacttgagttggcaaagatgcagagcagcagtgcagatggcaatgaactctctgaat

SEQ ID NO: 725142 - DNA, 120 bp, Artificial Sequence
  ENSG00000198162_39 (sequence is synthesized)
tctcttttaccttatttagaagaatgcagagtaaagggaccttcttggttctgcaggaacttctcaagggatgaggagacagaacccctacttccaagtgctctatttgtattacccaga

SEQ ID NO: 725143 - DNA, 120 bp, Artificial Sequence
  ENSG00000198162_40 (sequence is synthesized)
tgactgaagcttaagagaaggcagggaagtatacaagcagagccagttctggtacaaacaaagaatttgacagggacaatggaagggtcttcttcaccactccttaccttctatgtgatg

SEQ ID NO: 725144 - DNA, 120 bp, Artificial Sequence
  ENSG00000198162_41 (sequence is synthesized)
gaaagactagagcttataaaagtacttccatttttttattctcctgaataccaaaggcaattaaagtcagctacaaatgacttgccagtgtcatgttttatttttgttatagatttttaa

SEQ ID NO: 725145 - DNA, 120 bp, Artificial Sequence
  ENSG00000198162_42 (sequence is synthesized)
attatttccttcaagatcaattcttatcccatataatgcttagcttccaagaatattctttactttcttctgtcttttacagctctttgcattttgtagaccttaatactcaggttaaat

SEQ ID NO: 725146 - DNA, 120 bp, Artificial Sequence
  ENSG00000198162_43 (sequence is synthesized)
attcattgcatttataagatcttctgcaaaaagcccagaaatggtccttttcaggtgcctcttcaaagagctgacaccttaccttgtgcctttggcacaaatgtgcagaatagatacatc

SEQ ID NO: 725147 - DNA, 120 bp, Artificial Sequence
  ENSG00000198162_44 (sequence is synthesized)
agttggtgcataatcgaaaaaaataggaattttgaacactgttcttccttctacatttatttctcttcattttagaatcacactttttatgttaaaccagattattattattattattat

SEQ ID NO: 725148 - DNA, 120 bp, Artificial Sequence
  ENSG00000198162_45 (sequence is synthesized)
tcaaccagtattaagttgttaaaaccaagggaatggggccctaaccaaaaagaagtctcaactcagaaaaataagtccccagtcaggtggttcttactttcttgtgggttgcacattttg

SEQ ID NO: 725149 - DNA, 120 bp, Artificial Sequence
  ENSG00000198162_46 (sequence is synthesized)
tatctctctaacatcagcgtattcctgactttaagcaggtgtttatatgtaaaataaaacctgggtatcgaagggaaatgcattctttttatggagtattgaccctgatcctctatgatg

SEQ ID NO: 725150 - DNA, 120 bp, Artificial Sequence
  ENSG00000198162_47 (sequence is synthesized)
tcatatagagcaactcagggctatacttgctagattttaaccaagcagtttgaaatattaatcatcatcctctcatcttctccactctccattgccaaagtctttgtcaaaactccaaat

SEQ ID NO: 725151 - DNA, 120 bp, Artificial Sequence
  ENSG00000198162_48 (sequence is synthesized)
ttgttgataaaagattgtgtttgccattctcatttataatgcagtttctccttaagcctggagttttttgaatgagtgcatgagtaaatgagagaatgtgtgaacgaacatttatgaagt

SEQ ID NO: 725152 - DNA, 120 bp, Artificial Sequence
  ENSG00000198162_49 (sequence is synthesized)
atctaacatgtgccaagcattgtgcctggcactttcaatcattagaatgttttatgtgattccacagcattttctgtatgagagtagctcacaacattttaaatgtttccaatatgaatc

SEQ ID NO: 725153 - DNA, 120 bp, Artificial Sequence
  ENSG00000198162_50 (sequence is synthesized)
agaggaaaaagaaaaggtttataatatattttaaaacaatgtgttactgtataatacaactataattgtagttaataactaaaacctcttgaaaatgtcaaagaaatacttgatttctga

SEQ ID NO: 725154 - DNA, 120 bp, Artificial Sequence
  ENSG00000198162_51 (sequence is synthesized)
aaaacctcttgaaaatgtcaaagaaatacttgatttctgatgcaactttgactaaaatatttactttagaaataaaaacgttcttattttgctatatcactttaattgcataattaaaaa

SEQ ID NO: 725155 - DNA, 120 bp, Artificial Sequence
  ENSG00000198162_52 (sequence is synthesized)
gcagtgttttatagaaatgctggttattttatattcaaaaagattttgtcacataattcatgggtaaaacttgcagttgtaaattgtgtctgctctggtatgggccctattaatagtccc

SEQ ID NO: 725156 - DNA, 120 bp, Artificial Sequence
  ENSG00000198162_53 (sequence is synthesized)
atgctgttaaatataaagaaaaatatactaaaatattcaaagttccaaataacagttcctagtaatagtattttgagttatttttctttaggtttccttatactcaaattggctaggtcc

SEQ ID NO: 725157 - DNA, 120 bp, Artificial Sequence
  ENSG00000198162_54 (sequence is synthesized)
atataaatacaattatacacagataatttttaatactctttgttaacaaacacagttgaaaactggtttcggctgcacaaataagcagaatatttgagtaactatatatgatatggagat

SEQ ID NO: 725158 - DNA, 120 bp, Artificial Sequence
  ENSG00000198162_55 (sequence is synthesized)
attttaatccatttatcctggctcaagaacactgataaagatgattttctgttactttagctcattcagatcaggatggacatgctctttttgatctataactgttcagccagcttccag

SEQ ID NO: 725159 - DNA, 120 bp, Artificial Sequence
  ENSG00000198162_56 (sequence is synthesized)
ataatattttaggctatgagagctatacagtctctcttattactcatttctgctgttgaagtatcgaaaacagatagagatactatgtaaagaatgggcgtagctatgttccaggaaaac

SEQ ID NO: 725160 - DNA, 120 bp, Artificial Sequence
  ENSG00000198162_57 (sequence is synthesized)
tttatttacaaaagcagatggagggctggatttggtccatgggtcatagttagtgaccctgatcccaagtttattttgtgttagaccctctaacctttgatctgcgtcttttctgttttg

SEQ ID NO: 725161 - DNA, 120 bp, Artificial Sequence
  ENSG00000198162_58 (sequence is synthesized)
atttacataattcatttttaaatcaaaaagatgtgcgtatatatggttgtgtgtatctgtataacctaaagctataatattttgttgtcttgaaagcagatacactcttcctggagtctg

SEQ ID NO: 725162 - DNA, 120 bp, Artificial Sequence
  ENSG00000198162_59 (sequence is synthesized)
ttcaggtttcaggacgattgactataatgaaagagacagaatagggtaagggaagatgggtatgctatcagccattttctttgccttgtcatttaatgccataatttcagattctctatg

SEQ ID NO: 725163 - DNA, 120 bp, Artificial Sequence
  ENSG00000198162_60 (sequence is synthesized)
taaaaagaaggtctgtgtattgtcaaaataatatactctccaagttctcctgctcattgacccttgaaccaggattctggattgctagagctgcagaaattcacccacttgggtactctt

SEQ ID NO: 725164 - DNA, 120 bp, Artificial Sequence
  ENSG00000198162_61 (sequence is synthesized)
agagctctacagcaagaatatgatagaatgtctgatctttgtgctgcagaaagcaaacttttgaagaattctaagcaacagaaaatgggttatgtgactcatctgctatttggcagccac

SEQ ID NO: 725165 - DNA, 120 bp, Artificial Sequence
  ENSG00000198162_62 (sequence is synthesized)
tattccttttttagactgcagaacggtactgcccctgttacctctagaatagcctgagtctgaggagtgcagagaaaagatatatccaaaaggagaatccctttctcttgcataactctc

SEQ ID NO: 725166 - DNA, 120 bp, Artificial Sequence
  ENSG00000198162_63 (sequence is synthesized)
aatcctttacaagtaagtagcattatttcagaatgtctatatgcatcattttcaactaaagcatacctcatccttaaacttccactatttaacagctaatccatttcaaacttggtttga

SEQ ID NO: 725167 - DNA, 120 bp, Artificial Sequence
  ENSG00000198162_64 (sequence is synthesized)
gcctagcaattgcagaactcataaaattgcttgtgaaattacacaccatattactagcatatacattgcagtgctccaatcatgctaacagataatagatttttctttaagaattttatc

SEQ ID NO: 725168 - DNA, 120 bp, Artificial Sequence
  ENSG00000198162_65 (sequence is synthesized)
aaatatttcactatttggggaaattttagaggaggggaagcctgtattcaggatgatagagggagcagagacttactgtctctcttccacattataaatgaactgcctttccaggtccaa

SEQ ID NO: 725169 - DNA, 120 bp, Artificial Sequence
  ENSG00000198162_66 (sequence is synthesized)
catgctgtcaggttgcttcagctcggtgtgaatgtaagtgtggggatcaaacacacacacctatacacatacatattaatatgcagaggattttaaataattgcaaatgtcttgtggctg

SEQ ID NO: 725170 - DNA, 120 bp, Artificial Sequence
  ENSG00000198162_67 (sequence is synthesized)
ttttatttctacaaaattctgtaagatgtataccagaaaacataataaagataagctcagttcttcattgggaaaaaatatttttaaagaaaatttagaagtttttgctgaattaaagta

SEQ ID NO: 725171 - DNA, 120 bp, Artificial Sequence
  ENSG00000198162_68 (sequence is synthesized)
tcttcaattttaattactggatttggaagttgaaatgccatccttcaatatcactggtctcaaattcattgatagaattttttcttaaactaataagtggggtaagtataatctcctaaa

SEQ ID NO: 725172 - DNA, 120 bp, Artificial Sequence
  ENSG00000198162_69 (sequence is synthesized)
ttggtacccactggctgctcctaaactggtttccagtcatgtcctccagtatgtgatttttataaattaaaggtaatattgtatattaaagttcaaataaagatgttctttaagtgaaaa

SEQ ID NO: 725173 - DNA, 120 bp, Artificial Sequence
  ENSG00000198162_70 (sequence is synthesized)
ccatgagagaactgtttttccagctggatgaaaagagtagcatcaagtcccctattctgctgttttctgctcacttactcctggagacaagctaagtcaaatcaatatgtacttataagt

SEQ ID NO: 725174 - DNA, 120 bp, Artificial Sequence
  ENSG00000198162_71 (sequence is synthesized)
acctgctttctcagagttgtatttgagaattaaagtatatgaaatgtatactctacccataaatagcttggagtctggtttagaaatctcttacctttaggcatggacaaatttaataaa

SEQ ID NO: 725175 - DNA, 120 bp, Artificial Sequence
  ENSG00000198162_72 (sequence is synthesized)
agtacaaagtatatatgcagttggccctccatgtcaatgggttcatggattcaaccaaacatggattgaagatatagttttttaaaaattacatctgttttgagcatgtatatacctttt

SEQ ID NO: 725176 - DNA, 120 bp, Artificial Sequence
  ENSG00000198162_73 (sequence is synthesized)
tcttgtcattattccctaggcaatataacaactatttacatagatttaaagtatgtgggagcatatgcattggttatatgaatatactataccattttatatcaaggatttgagcattca

SEQ ID NO: 725177 - DNA, 120 bp, Artificial Sequence
  ENSG00000198162_74 (sequence is synthesized)
aggatttttgtatctgcgagaggtcctggaaccaatcccccatagatactgagggacaactgtattcagtgctaaatagaaaataaatgttttagaaattcagagaagggaattttggtg

SEQ ID NO: 725178 - DNA, 120 bp, Artificial Sequence
  ENSG00000198162_75 (sequence is synthesized)
caggccagagtagtcatgaagaaagactaaaatgatgctgaattagtaagatgttaataggtggggtaaaacagaaagtagctttgtgaaaagaaggattcagcctgaaaaaataccttt

SEQ ID NO: 725179 - DNA, 120 bp, Artificial Sequence
  ENSG00000198162_76 (sequence is synthesized)
aaaaaaacactaaagaaactagaccgactaaagtacattcactaggagaagtagtaggaaataagagctctagaatcaaaatcagggaagcagcatggatgacccttgaggacattatgc

SEQ ID NO: 725180 - DNA, 120 bp, Artificial Sequence
  ENSG00000198162_77 (sequence is synthesized)
taagtgaaataagtcagccataaaaagacaaatatggggtgattccacttctatgaggtctctaaagtagtcacatttatggaaacaaagtagaatgttggttaccagggacctggggag

SEQ ID NO: 725181 - DNA, 120 bp, Artificial Sequence
  ENSG00000198162_78 (sequence is synthesized)
gggaatggaaatgagttttagttttgcaaagaacagtgtgaatatacttaatactactgaactatacgctgaaaaatggtgaagatggtaaactttatgtcatgtgtttattaccacaat

SEQ ID NO: 725182 - DNA, 120 bp, Artificial Sequence
  ENSG00000198168_0 (sequence is synthesized)
agcgccgcctggcctgggccggacccggtcagggttctcaagctgtcgtccctatggggctgtgttttccttgtcccggggagtccgcgcctcccacgccggacctggaagagaaaagag

SEQ ID NO: 725183 - DNA, 120 bp, Artificial Sequence
  ENSG00000198168_1 (sequence is synthesized)
caaagcttgcagaggctgcagagagaagacaaaaagaggctgcatctcggggaattttagatgttcaatctgtgcaagaaaagagaaagaaaaaggaaaaaatagaaaaacaaattgcta

SEQ ID NO: 725184 - DNA, 120 bp, Artificial Sequence
  ENSG00000198168_2 (sequence is synthesized)
catccgggcccccaccagaaggtggacttaggtggacagtttcataaagcataacatgagtagaagaatctactgccaataactgtttattatctgcaatcaagtgggcttcatcaattt

SEQ ID NO: 725185 - DNA, 120 bp, Artificial Sequence
  ENSG00000198168_3 (sequence is synthesized)
aatttcttctctttgagtaaatgaagattcagactttgtaatattattgcccttaagtgcaatgctaaaaaaacgttgattttcaagcttagagaatggctagacttttcattaaatact

SEQ ID NO: 725186 - DNA, 120 bp, Artificial Sequence
  ENSG00000198168_4 (sequence is synthesized)
gattttcctacatttgctcttctgcagttagtgggtgatttgctatttttcttagtagttaaaaaatggaactaaatagtgaatatacatacactgcatgtaaacattctgcatatacct

SEQ ID NO: 725187 - DNA, 120 bp, Artificial Sequence
  ENSG00000198168_5 (sequence is synthesized)
ctaagattaaaattcgcagttgtcttttcatcctttataaaatgatctaactacttatatttgtgctgcatcgcgttacatctgtttttatttcactatgaagatgtttgattaaactta

SEQ ID NO: 725188 - DNA, 120 bp, Artificial Sequence
  ENSG00000198168_6 (sequence is synthesized)
tggacttagtgcctttaaactgatcatcagggagaatcttgaaaaaatcatttgaagggctgatgtgaaggagcactgtaaatttttataacttagtaatgagtattcttaggcagatgt

SEQ ID NO: 725189 - DNA, 120 bp, Artificial Sequence
  ENSG00000198168_7 (sequence is synthesized)
ttttttccaatttatttttatttatgtagcttataaaattaacataccctgttttactttatgataaaggattttttgtttgctgaatttaaaattatatattagtgataccatcagagg

SEQ ID NO: 725190 - DNA, 120 bp, Artificial Sequence
  ENSG00000198168_8 (sequence is synthesized)
gagggcagtgatgttctattgtatattaaattcagctctgtaaggatctttgtagtaattgaatgagttaaactaataatctggatgggttataatgagtagtaatatatttgtccatat

SEQ ID NO: 725191 - DNA, 120 bp, Artificial Sequence
  ENSG00000198168_9 (sequence is synthesized)
ttcataagtagtgttaatcttgtgtacttattagagaacgatcataagatttatacagatgtgaaactgcgaaggcaagtatgaatgtatgaaaaaaacatgtaggtactgtacttacaa

SEQ ID NO: 725192 - DNA, 120 bp, Artificial Sequence
  ENSG00000198168_10 (sequence is synthesized)
aaggtctacttcagatataaaaatattaggtaattctatacaatgcatagtcataaaccttaacatttttgttcattagaaacatgaattttatagcattttttgtttctcctatataat

SEQ ID NO: 725193 - DNA, 120 bp, Artificial Sequence
  ENSG00000198168_11 (sequence is synthesized)
acactgaaataaaagaatttgtgttagctattaaggctgatagctcttttaaatggcaaggccacatgttgagccctaaattaaaatttgcagatattaagtgctaatagaaattttaag

SEQ ID NO: 725194 - DNA, 120 bp, Artificial Sequence
  ENSG00000198168_12 (sequence is synthesized)
ttaaatcgaccaagttcacttgctttacacaaaggaaactgagccactatcttcatctacccctccaacaaaaattatgttatactgcagtgtattgtacatgttaatttttaaaagttt

SEQ ID NO: 725195 - DNA, 120 bp, Artificial Sequence
  ENSG00000198168_13 (sequence is synthesized)
gaactattatataatacaggtctcttgacttctcatggaaaaattattttttctattatggtgtgaaatattgtgtgaatatctaggcaaaacataacaatttggctcaattttcttctt

SEQ ID NO: 725196 - DNA, 120 bp, Artificial Sequence
  ENSG00000198168_14 (sequence is synthesized)
tagaggattcgtgctgtttttgttcataaagggtagtgaaatcattgaactatattttagaatgaaaatttttgattttattaaaatgattttttcaaggcagaaagtaaaaggaatgat

SEQ ID NO: 725197 - DNA, 120 bp, Artificial Sequence
  ENSG00000198168_15 (sequence is synthesized)
tgatagcggagtgcatatagagctagagcatatcatccttgaactctgcaaatcctttcttccattttaatatagcaagaacaattttgtctttactacatcttaaagaattagaacttg

SEQ ID NO: 725198 - DNA, 120 bp, Artificial Sequence
  ENSG00000198168_16 (sequence is synthesized)
ggttggtgtaagtgacttacttccagggaatcatgccctatttctaccagcaggtcatacccaaatgtcacactatctattgttaaccatgaatgatattcagatctattacttttcgtg

SEQ ID NO: 725199 - DNA, 120 bp, Artificial Sequence
  ENSG00000198168_17 (sequence is synthesized)
aaaagtggaacatgttacttccaaccatggcctgtcaccgtgagtgtgatcagctttctccaaaaccacatgggtcgcaggagctaaggggtggtacccaaatgttaggaacagtgttag

SEQ ID NO: 725200 - DNA, 120 bp, Artificial Sequence
  ENSG00000198168_18 (sequence is synthesized)
agggcaagggaaaagaagtgactggatgtcttatgagaaaccggtaaatgactaaaaaaaaaagcaaatgactaaaaacatgactaaaaaattatatatatatataatatatatattata

SEQ ID NO: 725201 - DNA, 120 bp, Artificial Sequence
  ENSG00000198168_19 (sequence is synthesized)
tctaatttatatatgtgtgtgtatatacacacacacacatgcacatacacacatacgtccagacatctccctcataaaataaccatcagtttctatgaaaaccttaagtggaagccaatt

SEQ ID NO: 725202 - DNA, 120 bp, Artificial Sequence
  ENSG00000198168_20 (sequence is synthesized)
tcccatagtaaataatttaggagaaaattataatgcttaaaatgttgctcaaacccctgacctattactaaactataattggaacagtaaaatgcatatatgtaactatcatatcatgat

SEQ ID NO: 725203 - DNA, 120 bp, Artificial Sequence
  ENSG00000198168_21 (sequence is synthesized)
ttaaaattgcttaaaccattgctgcttaatactaatcaaacttaacggctgctaacaaaagttgtgaattattacacggcctctttgtaacgtgctgcatgttttttaaaacatctctgt

SEQ ID NO: 725204 - DNA, 120 bp, Artificial Sequence
  ENSG00000198168_22 (sequence is synthesized)
gtttctgtttgttccactgctggtatttggaatgtaatttaacagttctcacacatggtttggttataaattctgtattgccttttagggatataaatatacatttttttctatgtaaaa

SEQ ID NO: 725205 - DNA, 120 bp, Artificial Sequence
  ENSG00000198168_23 (sequence is synthesized)
attagctttagctgtctctttaacaaaattttatctttactacatcctaaatacttagaacctgagttggtggttagggaaacctcaggaacattttaatcacattgggattcagaagag

SEQ ID NO: 725206 - DNA, 120 bp, Artificial Sequence
  ENSG00000198168_24 (sequence is synthesized)
caacagaaccaaaggttgtttggtgtgttcatacaatccctggatttataggtggattttctataaaggaaaaatgatgtaattagtatcctgttttttcctaaagaaataatactatca

SEQ ID NO: 725207 - DNA, 120 bp, Artificial Sequence
  ENSG00000198168_25 (sequence is synthesized)
taaaaattctgtctatcctttgtaccccaggaaaatggacatgaactttgaattttccctttctccaaatgtttgactttttattttcactgataagcattatgctatgttcttagaaga

SEQ ID NO: 725208 - DNA, 120 bp, Artificial Sequence
  ENSG00000198168_26 (sequence is synthesized)
caaaagcagctcttgccagttttgaataatttctgcatgaatagaccagtaagaggtaagtagccatgactgcctatatgtgttgagacataaggtatatttctttaacatctccaagca

SEQ ID NO: 725209 - DNA, 120 bp, Artificial Sequence
  ENSG00000198168_27 (sequence is synthesized)
agcatttcaaattctcttaactactaaacatgctctaagctaattcaaatatagtattgtggcttttttcttcaattttctcaaaagctacagacacaaggcatttgtatgtataacaga

SEQ ID NO: 725210 - DNA, 120 bp, Artificial Sequence
  ENSG00000198168_28 (sequence is synthesized)
ctttgatgaagttttggttccagtaactcaaaacactaagtttcccatttgatatggctttttattgttctagtctccctcttctagttatgcttcatcttgcaaatattgactttgaat

SEQ ID NO: 725211 - DNA, 120 bp, Artificial Sequence
  ENSG00000198168_29 (sequence is synthesized)
gtgataactattgcctacaaattaagtattcatacattactcctgtggatatcatacttttttgttattatatcctgaattgcattggctttttttggttttgttttgttttttgagatg

SEQ ID NO: 725212 - DNA, 120 bp, Artificial Sequence
  ENSG00000198168_30 (sequence is synthesized)
caggcatgagccaccgcgcccggcctgcattggctatatttataataccaaatttgtgttgagttttgagttaatgtcttctagttatcaaaacaggtttgatccattctttgcaagtac

SEQ ID NO: 725213 - DNA, 120 bp, Artificial Sequence
  ENSG00000198168_31 (sequence is synthesized)
ctttgcaagtacctctaacttatctcaagtggaactaattagttttgcacacagattggtgctctctaggctatttccctgaaatttatcttgttacataagtcagatatcaaggagtta

SEQ ID NO: 725214 - DNA, 120 bp, Artificial Sequence
  ENSG00000198168_32 (sequence is synthesized)
tgctaaactccttttcctatcaaactcctaaaatgcccttttctctgtctatatttcttagacatagttacattataaatgtaacagatatatttaaagtaggttaataccaagtgtctc

SEQ ID NO: 725215 - DNA, 120 bp, Artificial Sequence
  ENSG00000198168_33 (sequence is synthesized)
aggtagaaaattctcagaggttccacaaaaacttctggaactaataaatgactttagtaatcttgcagaatgaaaagtatatgaaagtcaattctatgtttatatgcaagcaatgaaaaa

SEQ ID NO: 725216 - DNA, 120 bp, Artificial Sequence
  ENSG00000198168_34 (sequence is synthesized)
tctgtaattgaaagtgggaaaatttaaattacaatatcaacaaataaaatatttaggaaaaataaaactgtagacattaaaaatgacaaaacattgccaataaattaagatctaaatgaa

SEQ ID NO: 725217 - DNA, 120 bp, Artificial Sequence
  ENSG00000198168_35 (sequence is synthesized)
attccgggggatgtggtagatggaattcggcgcgaaaagacattgctttctccgggagctctttagtcgtctaggagatgtgcgttttcaactgtgtctaccatcttttaaaagaaggaa

SEQ ID NO: 725218 - DNA, 120 bp, Artificial Sequence
  ENSG00000198168_36 (sequence is synthesized)
gcgaggacgggtggacgcgtcaggagggtcgttgggtcctgtcagagcgacctaggccgtcgcctccgtgtagatctccacttttgtaacaaaaagttgtcgaaaggcggctgtggcgtc

SEQ ID NO: 725219 - DNA, 120 bp, Artificial Sequence
  ENSG00000198168_37 (sequence is synthesized)
tttctaccttccactgactttagctgcgccggatcttcatagggcgccggcgcacgcagagggcgttacgcgtgggacattccgggggatgtggtagatggaattcggcgcgaaaagaca

SEQ ID NO: 725220 - DNA, 120 bp, Artificial Sequence
  ENSG00000198168_38 (sequence is synthesized)
gtcactaagaagggagaaaagggtgctgatgtttacttggaattttggctttaatttctaggacaccagagtcccatctcataaaaaaaggtagcatgaactacccagagctgtaccact

SEQ ID NO: 725221 - DNA, 120 bp, Artificial Sequence
  ENSG00000198168_39 (sequence is synthesized)
gatgtgaagaaagaagacgggtcatagagatgctacattgctgattttgaagatggaggaaggaaatcatggagcttaggaatgcaggtggcctctagaagatggaaaaggaaaggaaat

SEQ ID NO: 725222 - DNA, 120 bp, Artificial Sequence
  ENSG00000198168_40 (sequence is synthesized)
ggatgctcccctagactcttcaggaaggaaaacagccttggtgacactctgattttagcctattgaaaccatgttgaatgactgcagaaatgtgagataataaacatgcttattcagcta

SEQ ID NO: 725223 - DNA, 120 bp, Artificial Sequence
  ENSG00000198169_0 (sequence is synthesized)
ctcttcatcctagcccgccccctccccggctctggacccggttctgtgggagggtccgttccgggctcggtgcgactgcgcagctcctcggcgcttcctcggtggcttccccgggtcgag

SEQ ID NO: 725224 - DNA, 120 bp, Artificial Sequence
  ENSG00000198169_1 (sequence is synthesized)
caaacaggtaagttcggggagacttcaggccagggcagtctcctgtcttctcttggaaaccacagcagcccatgcacacagaatggcagccacattccagcttccagggcaccaggagat

SEQ ID NO: 725225 - DNA, 120 bp, Artificial Sequence
  ENSG00000198169_2 (sequence is synthesized)
gccgctgaccttccaggatgtggccgtgtacttctctcaggcggaggggcggcagctgggcccccagcagcgggcgctctaccgggatgtgatgctggagaactatgggaacgtggcctc

SEQ ID NO: 725226 - DNA, 120 bp, Artificial Sequence
  ENSG00000198169_3 (sequence is synthesized)
tctgggattccctgtccctaagccggagttgatctcccagctggagcaggggaaggaactttgggtcctgaatcttctgggagctgaggaaccagatatcttgaaaagctgccagaaaga

SEQ ID NO: 725227 - DNA, 120 bp, Artificial Sequence
  ENSG00000198169_4 (sequence is synthesized)
ttctgaggttgggaccaagaaggaactatctattttaaaccaaaaattttccgaagaagtaaaaaccccagaatttgtatcaagaagactcttaagggataatgcacaggccgctgagtt

SEQ ID NO: 725228 - DNA, 120 bp, Artificial Sequence
  ENSG00000198169_5 (sequence is synthesized)
tcgggaagcatggggccgtgagggcaaactcaaagagcgcgtgggaaattctgccgggcagagtttgaacaaacccaatattcacaagagagttttaacagaagctaccgtgggcaggga

SEQ ID NO: 725229 - DNA, 120 bp, Artificial Sequence
  ENSG00000198169_6 (sequence is synthesized)
aagatctttgggagaaagaacccaagagtgtagtgcatttgatagaaacttgaatctggaccaaaatgttgttagacttcaaagaaataaaacaggagagagggtctttaaatgtgatat

SEQ ID NO: 725230 - DNA, 120 bp, Artificial Sequence
  ENSG00000198169_7 (sequence is synthesized)
atgcagcaaaaccttcaaatataattcagacctaagtagacaccagagaagtcacactggggagaagccgtacgaatgtggccggtgtgggcgagcctttactcacagctcaaatcttgt

SEQ ID NO: 725231 - DNA, 120 bp, Artificial Sequence
  ENSG00000198169_8 (sequence is synthesized)
tctgcaccatcacattcacactggaaataaaccatttaaatgtgatgaatgtgggaaaacttttggactcaattctcacctccgtcttcatcggagaattcacactggagaaaaaccctt

SEQ ID NO: 725232 - DNA, 120 bp, Artificial Sequence
  ENSG00000198169_9 (sequence is synthesized)
tggctgtggtgagtgtgggaaggctttcagtcgaagctcaactcttattcaacatcggatcattcacacaggagagaaaccctacaagtgtaatgaatgtggaagaggctttagccagag

SEQ ID NO: 725233 - DNA, 120 bp, Artificial Sequence
  ENSG00000198169_10 (sequence is synthesized)
cccccagttaactcagcatcagagaattcacactggagagaagccgcatgaatgcagtcactgtgggaaggccttcagtcgaagctccagccttattcagcatgagagaattcacactgg

SEQ ID NO: 725234 - DNA, 120 bp, Artificial Sequence
  ENSG00000198169_11 (sequence is synthesized)
agagaagccccataaatgcaatcagtgtgggaaggccttcagtcagagctcaagccttttcctccatcatcgggttcatactggagagaaaccctatgtatgtaatgaatgcggcagagc

SEQ ID NO: 725235 - DNA, 120 bp, Artificial Sequence
  ENSG00000198169_12 (sequence is synthesized)
tgcggcaaagcctttcgtcggagttccactcttgttcagcatcgaagagttcacactggggagaagccctaccagtgcgttgaatgtgggaaagctttcagccagagctcccagctcacc

SEQ ID NO: 725236 - DNA, 120 bp, Artificial Sequence
  ENSG00000198169_13 (sequence is synthesized)
ctacatcagcgagttcacactggagagaagccctatgactgtggtgactgtgggaaggccttcagccggaggtcaaccctcattcagcatcagaaagttcacagcggagagactcgtaag

SEQ ID NO: 725237 - DNA, 120 bp, Artificial Sequence
  ENSG00000198169_14 (sequence is synthesized)
tgcagaaaacatggtccagcctttgttcatggctccagcctcacagcagatggacagattcccactggagagaagcacggcagagcctttaaccatggtgcaaatctcattctgcgctgg

SEQ ID NO: 725238 - DNA, 120 bp, Artificial Sequence
  ENSG00000198169_15 (sequence is synthesized)
acagttcacactggtgagaaatcctttggatgtaatgaatatggaaaagctttcagtcccacctcacgacccactgaagatcagataatgcatgctggggaaaagccctataaatgtcaa

SEQ ID NO: 725239 - DNA, 120 bp, Artificial Sequence
  ENSG00000198169_16 (sequence is synthesized)
gaatgtggaaacgccttcagtggaaagtcaacccttattcaacatcaggtaactcacactggtcagaaaccatgtcattgcagtgtgtatgggaaagccttcagccagagttcacagctc

SEQ ID NO: 725240 - DNA, 120 bp, Artificial Sequence
  ENSG00000198169_17 (sequence is synthesized)
acaccacctcagcagactcgtgttggagagaaacctgctttaaatgatggctctaaaagatactttattcatatcaagaagattttccaagaaagacatttttaatgtgataaatgcaga

SEQ ID NO: 725241 - DNA, 120 bp, Artificial Sequence
  ENSG00000198169_18 (sequence is synthesized)
agacagtttagcaactgttcacttgacattagaagataagatggcataatgaaagatatataaggtctaaatattactggcaaagtaaaataaatagttcagatgactactaaagtcaaa

SEQ ID NO: 725242 - DNA, 120 bp, Artificial Sequence
  ENSG00000198169_19 (sequence is synthesized)
gtcattaaatctggaagtaaacacgagaattcattctgggaaatcaggctgtctgtgtaaaggttactgctgtgctcaggagttgaaccgtgtggtgctgtatccggatactcatgacga

SEQ ID NO: 725243 - DNA, 120 bp, Artificial Sequence
  ENSG00000198169_20 (sequence is synthesized)
atggatggagggcgtgaaaagtgagcccagctggtgctctgggtctaccctacctgacatccttccagtcttatcctttgtttcctatccaggcccaggcttgtggctgagaacatccac

SEQ ID NO: 725244 - DNA, 120 bp, Artificial Sequence
  ENSG00000198169_21 (sequence is synthesized)
tttcagtcccatatacctgcctccaagtgtggtacagagaacttgggcctgctgggggcgcttagccttactctctccaccacctctcccaccaacccccagatgaactgcaggtagacg

SEQ ID NO: 725245 - DNA, 120 bp, Artificial Sequence
  ENSG00000198169_22 (sequence is synthesized)
tttcttccttgcttggagccccagtttttgcatttcattttcattaaaatgaaaggtggtttggttttggttctaaggagctctacagtttaacagagagagggaccttaggggccaaga

SEQ ID NO: 725246 - DNA, 120 bp, Artificial Sequence
  ENSG00000198169_23 (sequence is synthesized)
aagcaggggcctaccaagtatctccacttttgaaaattgtaattactgataaaaaattttttaaaggcaggtttattgaagcataatttataaacaataaaatttactctttttagtgta

SEQ ID NO: 725247 - DNA, 120 bp, Artificial Sequence
  ENSG00000198169_24 (sequence is synthesized)
tattttttcaaccatgctttattgtgtaggggccaaagggaaagttcctctttgccctctgaaggttcactgaaagccaactcataaaaggcagatttttggagaaaaggcaaataaatg

SEQ ID NO: 725248 - DNA, 120 bp, Artificial Sequence
  ENSG00000198169_25 (sequence is synthesized)
ctacagacgcccgccaccacgcccggcctttaccgccagttttcacacagaaaagcggggggaacatcagagtcgtgtttttaggttttgtggctggctttgggggtctggcctctggga

SEQ ID NO: 725249 - DNA, 120 bp, Artificial Sequence
  ENSG00000198169_26 (sequence is synthesized)
gctggctttgggggtctggcctctgggactcgccttgggtaaaagggattcactctgtgaggagcctcgcgggagaaaagaactgagactggaggcctgggaaggtcagagggaaactgc

SEQ ID NO: 725250 - DNA, 120 bp, Artificial Sequence
  ENSG00000198169_27 (sequence is synthesized)
ctcccaggccttcattttggggcgttgtgttctgagccccgataattgtaacatcttcataagcgactttctggtggttatggtgaatcgggacacacgatgtatggtgaccgacggggg

SEQ ID NO: 725251 - DNA, 120 bp, Artificial Sequence
  ENSG00000198169_28 (sequence is synthesized)
agccgggagcccagcggggttagggttcaggtgagggtttagggtcggggcgagcgcggcgcggcccggatgcgcagcgtcaccgcgccagaccctccgctcagctgccgtgggctctcc

SEQ ID NO: 725252 - DNA, 120 bp, Artificial Sequence
  ENSG00000198169_29 (sequence is synthesized)
ccctccccgaccatagacggcgcaggcctccagtcatcccagagcggccccggaagaatccgggcggaaccgcggctggcttccggttcccggcgttctcggaggcgtactgaggccccg

SEQ ID NO: 725253 - DNA, 120 bp, Artificial Sequence
  ENSG00000198169_30 (sequence is synthesized)
gctgcagaggccgggaggaggcgaccgcggcgcggccctagaaggctggactgaggaccacagctggcttccggcctctccccggagcctggggccttcggcagcatccccgcggcctcc

SEQ ID NO: 725254 - DNA, 120 bp, Artificial Sequence
  ENSG00000198169_31 (sequence is synthesized)
ttctcacgtcctcagccttggtgaggctgcaccctcacgtggctctttgccccaggttggccaggcaggtagaacggccctgcaccccatttccagggccttcagcaggtctggaccacg

SEQ ID NO: 725255 - DNA, 120 bp, Artificial Sequence
  ENSG00000198169_32 (sequence is synthesized)
ggaactgccagctttcaccccttagccgggcgtccctggatccccccgggctctggctctggccgttctgggatttcaggagtcactgagcagtagggcacgtcggcccgtgctgcatag

SEQ ID NO: 725256 - DNA, 120 bp, Artificial Sequence
  ENSG00000198169_33 (sequence is synthesized)
tgacctgcctcccgcgacccaggaggccacagcagcaatcagcttctgcctcctggccatccttccacacccctggttgaatggggctgagcctgagttctccccactgaaggtaagttc

SEQ ID NO: 725257 - DNA, 120 bp, Artificial Sequence
  ENSG00000198169_34 (sequence is synthesized)
ggggagacttcaggccagggcagtctcctgtcttctcttggaaaccacagcagcccatgcacacagaatggcagccacattccagcttccagggcaccaggtgagttaaccctccttcct

SEQ ID NO: 725258 - DNA, 120 bp, Artificial Sequence
  ENSG00000198169_35 (sequence is synthesized)
gcccacctcttcatcttcatccccatcccagtcagaagctactctcctctggagccgtgagcccggcaactggtaaggccagccaggggctcatagcaaccgtgaggaaagggttctgag

SEQ ID NO: 725259 - DNA, 120 bp, Artificial Sequence
  ENSG00000198169_36 (sequence is synthesized)
aggtagactcgccctcctgcagggagaggggctctgagctcagctgggtccccgtgtagctgaagttggctggtcctcagcgctctcagctgccccatcagggacctgctgatacacagt

SEQ ID NO: 725260 - DNA, 120 bp, Artificial Sequence
  ENSG00000198169_37 (sequence is synthesized)
gaacgggcctaccaagtatctccacttttgaaaattgtaattactgataaaaaattttttaaaggcaggtttattgaagcataatttataaacaataaaatttactctttttagtgtata

SEQ ID NO: 725261 - DNA, 120 bp, Artificial Sequence
  ENSG00000198169_38 (sequence is synthesized)
ggggcagtctcacagatacagcccctctacaaatgtgagcatgtgcacatgctttagaagttttatcttgctggtctgtttctttgctttaaaaatatatatatactacttctgatcata

SEQ ID NO: 725262 - DNA, 120 bp, Artificial Sequence
  ENSG00000198171_0 (sequence is synthesized)
ctatgagatcccggcctcagggtggacgcagtggttctgcactgaggccctcgtcatggtggcgcctgtgtggtacttggtagcggcggctctgctagtcggctttatcctcttcctgac

SEQ ID NO: 725263 - DNA, 120 bp, Artificial Sequence
  ENSG00000198171_1 (sequence is synthesized)
tcgcagccggggccgggcggcatcagccggccaagagccactgcacaatgaggagctggcaggagcaggccgggtggcccagcctgggcccctggagcctgaggagccgagagctggagg

SEQ ID NO: 725264 - DNA, 120 bp, Artificial Sequence
  ENSG00000198171_2 (sequence is synthesized)
caggcctcggcgccggagggacctgggcagccgcctacaggcccagcgtcgagcccagcgggtggcctgggcagaagcagatgagaacgaggaggaagctgtcatcctagcccaggagga

SEQ ID NO: 725265 - DNA, 120 bp, Artificial Sequence
  ENSG00000198171_3 (sequence is synthesized)
ggaaggtgtcgagaagccagcggaaactcacctgtcggggaaaattggagctaagaaactgcggaagctggaggagaaacaagcgcgaaaggcccagcgtgaggcagaggaggctgaacg

SEQ ID NO: 725266 - DNA, 120 bp, Artificial Sequence
  ENSG00000198171_4 (sequence is synthesized)
tgaggagcggaaacgactcgagtcccagcgcgaagctgagtggaagaaggaggaggagcggcttcgcctggaggaggagcagaaggaggaggaggagaggaaggcccgcgaggagcaggc

SEQ ID NO: 725267 - DNA, 120 bp, Artificial Sequence
  ENSG00000198171_5 (sequence is synthesized)
acagagttcatcaactacatcaagcagtccaaggttgtgctcttggaagacctggcttcccaggtgggcctacgcactcaggacaccataaatcgcatccaggacctgctggctgagggg

SEQ ID NO: 725268 - DNA, 120 bp, Artificial Sequence
  ENSG00000198171_6 (sequence is synthesized)
actataacaggtgtgattgacgaccggggcaagttcatctacataaccccagaggaactggccgccgtggccaacttcatccgacagcggggccgggtgtccatcgccgagcttgcccaa

SEQ ID NO: 725269 - DNA, 120 bp, Artificial Sequence
  ENSG00000198171_7 (sequence is synthesized)
gccagcaactccctcatcgcctggggccgggagtcccctgcccaagccccagcctgaccccagtccttccctcttggactcagagttggtgtggcctacctggctatacatcttcatccc

SEQ ID NO: 725270 - DNA, 120 bp, Artificial Sequence
  ENSG00000198171_8 (sequence is synthesized)
tccccaccatcctggggaagtgatggtgtggccaggcagttatagattaaaggcctgtgagtactgctgagcttggtgtggcttggtgtggcagaaggcctggcctaggatcctagataa

SEQ ID NO: 725271 - DNA, 120 bp, Artificial Sequence
  ENSG00000198171_9 (sequence is synthesized)
gcaggtgaaatttaggcttcagaatatatccgagaggtggggagggtcccttggaagctggtgaagtcctgttcttattatgaatccattcattcaagaaaatagcctgttgcacattta

SEQ ID NO: 725272 - DNA, 120 bp, Artificial Sequence
  ENSG00000198171_10 (sequence is synthesized)
ggtgggcctacgcactcaggtaagccctggaacgtggcctgctgtgtgcagtgtggccaggggtctgtggctagcagagaggacctgccctaaagatagagtcttgatgcaccgtctacc

SEQ ID NO: 725273 - DNA, 120 bp, Artificial Sequence
  ENSG00000198171_11 (sequence is synthesized)
ttgtccccaaccaagagtgagtagtgcacagaagtctcctggcaccctgggaatcctgcatttttaatggacgaacaggcaggaaagaaaaaaaaaacccaaaccccatcactctgccag

SEQ ID NO: 725274 - DNA, 120 bp, Artificial Sequence
  ENSG00000198171_12 (sequence is synthesized)
cccctgtgaccaaagcagcccaaatcagttaccttgacaactctcatgcacagactgcaccagcctgtgttgcaaacatcactgccccgcttctaacaggaagagatactcttttggggg

SEQ ID NO: 725275 - DNA, 120 bp, Artificial Sequence
  ENSG00000198171_13 (sequence is synthesized)
catgagagggaaataaagagatttggctgtagtgggagggaggtttcagtgctttttctggggacattggtgcctatctctattctgagagttgttctcctcataggacaccataaatcg

SEQ ID NO: 725276 - DNA, 120 bp, Artificial Sequence
  ENSG00000198173_0 (sequence is synthesized)
cagcgagggccaccatgggggaccagaggccgcaggaccggcccagttccccgggcatggactccacgccctggtactgtgacaaaccgccttccaagtacttcgcgaagcgcaagcaca

SEQ ID NO: 725277 - DNA, 120 bp, Artificial Sequence
  ENSG00000198173_1 (sequence is synthesized)
ggcgcctgaggttcccgcctgtggacacccagaactgggtatttgtgacggagggcatggacgacttccgctacggctgtcagtctcctgaagatacgcttgtttgtcgccgtgacgagt

SEQ ID NO: 725278 - DNA, 120 bp, Artificial Sequence
  ENSG00000198173_2 (sequence is synthesized)
ttttactccccaaaatatctctcagaggtccccaagctgaccccaaaagcaggaagaaaaagctgctcaagaaagcggccctgttttccaagctctcgccagcacagccagcacggaagg

SEQ ID NO: 725279 - DNA, 120 bp, Artificial Sequence
  ENSG00000198173_3 (sequence is synthesized)
cgttcgtagaggaagtggaagcccagctgatgaccaagcatcccttggccatgtaccccaatctgggagaagatatgcctccagatctcctactacaggtactgaaaccgctggaccctg

SEQ ID NO: 725280 - DNA, 120 bp, Artificial Sequence
  ENSG00000198173_4 (sequence is synthesized)
agaggaagctggaggacgcaggctcttgtgagggccaggagaagacaactgacgaacccacggagcctggtaaatacccctgtggggaattctcccctcggcctcccgagactcgggtgt

SEQ ID NO: 725281 - DNA, 120 bp, Artificial Sequence
  ENSG00000198173_5 (sequence is synthesized)
cctgtctccccccggagcctcccaagactccggtgtccagtctccgcccggagcctccagagactggagtgtcccatctccgcccacagcctcccaagactcaggtgtccagtctccacc

SEQ ID NO: 725282 - DNA, 120 bp, Artificial Sequence
  ENSG00000198173_6 (sequence is synthesized)
tggagcctccagagactggagtgtcccatctccgcccagagcctcccaagactcaggtgtccagtctccacctggagcctcccgagactggagtgtcccatctctacctggagcctcctg

SEQ ID NO: 725283 - DNA, 120 bp, Artificial Sequence
  ENSG00000198173_7 (sequence is synthesized)
ggactggagtgtctcatctctgcccagagcctcccaagactcgcgtatctcatctccatcgggagcctcctgagactggagtgcctgatctctgcctggagcctcccaagtcacgcgtat

SEQ ID NO: 725284 - DNA, 120 bp, Artificial Sequence
  ENSG00000198173_8 (sequence is synthesized)
ctcatctccgcccagagccttctgagactggagtgtcccatctccacccagagcctcccaagactctggtgtccagtctccacccagagcctcccgagactggagtgtcccatctctgcc

SEQ ID NO: 725285 - DNA, 120 bp, Artificial Sequence
  ENSG00000198173_9 (sequence is synthesized)
cggaacctccagagactcgcgtatctcctctccgccagctgcctcccgaggctggagtgtcccatctctgcccggaacctcccaagactcgcgtacctcctctccgcccagagaccccca

SEQ ID NO: 725286 - DNA, 120 bp, Artificial Sequence
  ENSG00000198173_10 (sequence is synthesized)
agaatggagtgtctcctctcttcccggagcctcccaagactcgcatatctaatctccgctcggagcctcccaagattggagtgtcccatctctgcctggagcctcccaagactcgcggat

SEQ ID NO: 725287 - DNA, 120 bp, Artificial Sequence
  ENSG00000198173_11 (sequence is synthesized)
ctcatctccgcccggaacctcctgagactggagtgtcccatctccgcccagagcctcccaagactcgggtgtccagtctccacctggagcctcctgagactggagtgtcccatctctgcc

SEQ ID NO: 725288 - DNA, 120 bp, Artificial Sequence
  ENSG00000198173_12 (sequence is synthesized)
cggagcctccagagaaggacgtatctcatctccgcccagagcctcccgacactggagtgtcccatctctgcccagagccccccaagacacgcgtatctcatctccgcccagagccttctg

SEQ ID NO: 725289 - DNA, 120 bp, Artificial Sequence
  ENSG00000198173_13 (sequence is synthesized)
ctcccaagattctggtgtccagtctccaccaggcacctcctgagagtagcgtatctcatctccgcccagagcctcctgagactggagtgtcccatctccgcccagagcctcccaagactc

SEQ ID NO: 725290 - DNA, 120 bp, Artificial Sequence
  ENSG00000198173_14 (sequence is synthesized)
ggatgtacagtctccgcccggagcctcccgatactggagtgtcccatctctgcccagagcctcccaagactcgggtgtccagtctccccccggagccccccgagactggagtgtcccatc

SEQ ID NO: 725291 - DNA, 120 bp, Artificial Sequence
  ENSG00000198173_15 (sequence is synthesized)
tctgcccggagcctccagagactcgcgtatctcatctccgcccagagcctcctgagactggagtgtcccatctccgcccagagcctcccaagactcggatgtacagtctccgcccggagc

SEQ ID NO: 725292 - DNA, 120 bp, Artificial Sequence
  ENSG00000198173_16 (sequence is synthesized)
ctcccaatactggagtgtcccatctctgcccagagcctcccaagactcgggtgtccagtctccccccggagccccccgagactggagtgtcccatctctgcccggagcctccagagactc

SEQ ID NO: 725293 - DNA, 120 bp, Artificial Sequence
  ENSG00000198173_17 (sequence is synthesized)
gcgtatctcatctccgcccagagcctcctgagactggagtgtcccgtctccacccagagcctcccaagactcgggtgtccagtctccacgcggagcctcctgagagtcgcgtatctcatc

SEQ ID NO: 725294 - DNA, 120 bp, Artificial Sequence
  ENSG00000198173_18 (sequence is synthesized)
tctgcccggagcctcctgagactggagtgtcccatctccgcccagagcctcccaagcctcgggtttccagtctccgcccagagcctcttgagactcgcgtatctcatctccgcccggagc

SEQ ID NO: 725295 - DNA, 120 bp, Artificial Sequence
  ENSG00000198173_19 (sequence is synthesized)
ctcctgagactggagtgtcccatctccacccagagcttcccaagcctcgggtatccagtctccacctggagcctcccaagactcgtcgagtgtccagtctccgcctggagcctcccaaga

SEQ ID NO: 725296 - DNA, 120 bp, Artificial Sequence
  ENSG00000198173_20 (sequence is synthesized)
ctggtcgggtgtccagtctctgcccggagcctaccaagaccggagcgtcccatctaaaagaactgtttcaggaaggtacatcaagcacaatggagtgtgtttctgactctcttcaacgta

SEQ ID NO: 725297 - DNA, 120 bp, Artificial Sequence
  ENSG00000198173_21 (sequence is synthesized)
gacacacatcgagaaaactccgtgacttcaagtgggctggagacctaggagttaatgaagaatccatcagcagtctgtttgactttacccctgagtgcagagcaacctatcaagaccaaa

SEQ ID NO: 725298 - DNA, 120 bp, Artificial Sequence
  ENSG00000198173_22 (sequence is synthesized)
agaataagaaggcaaacgagtgttcctcagggctgaagtacagcatggagctagacgaaatggatgaggtcaaattcttctcacaggaaaaagacttggacgggaaaatccagaatgcac

SEQ ID NO: 725299 - DNA, 120 bp, Artificial Sequence
  ENSG00000198173_23 (sequence is synthesized)
caaattctcatagtgcacagcatgtgaagatggggtatggagcatggtacctcaagcctaagttggggaaaaagctaagaagtgatgaacctttgattgaccccaagctcgtacttgaaa

SEQ ID NO: 725300 - DNA, 120 bp, Artificial Sequence
  ENSG00000198173_24 (sequence is synthesized)
agcctgatgaacccgacattcttgacggtctttatggaccaatcgcctttaaggatttcattctaagcaagggctatgaaatgcctggcatcattcaaaggctgtttgccaggaggggat

SEQ ID NO: 725301 - DNA, 120 bp, Artificial Sequence
  ENSG00000198173_25 (sequence is synthesized)
ggacttatgactctgttaagactcctattcaacgtgcaatgcaagtttacaagtacaaagaagacgtcacagatgcatcggaagaagattagatggttttgaatttactagttaattggg

SEQ ID NO: 725302 - DNA, 120 bp, Artificial Sequence
  ENSG00000198173_26 (sequence is synthesized)
tatttcttgctctcattttaaacatcagtcagaatttatgatgactggccccaggaatgtacaacgttggcaacatctgtaaattcaatacctaatgtttataaatatttcttaatgacc

SEQ ID NO: 725303 - DNA, 120 bp, Artificial Sequence
  ENSG00000198176_0 (sequence is synthesized)
ccggcccggccccagcccgcgcctctccgcgccgccccgcgctccgcaccgcgccctctccgcgtccccgcccgcgcggccggaccgggcagccagaaaaatcatttttcttctctggga

SEQ ID NO: 725304 - DNA, 120 bp, Artificial Sequence
  ENSG00000198176_1 (sequence is synthesized)
cggaccgggcagccagaaaaatcatttttcttctctgggaaggtgaacatttgtagcattgatttcccggatctggtaacatggcaaaagatgccggtctaattgaagccaacggagaac

SEQ ID NO: 725305 - DNA, 120 bp, Artificial Sequence
  ENSG00000198176_2 (sequence is synthesized)
tcaaggtcttcatagaccagaaccttagtcccgggaaaggcgtggtgtccctcgtggccgttcacccctccaccgtcaacccgctcgggaagcagctcttgccaaaaacctttggacagt

SEQ ID NO: 725306 - DNA, 120 bp, Artificial Sequence
  ENSG00000198176_3 (sequence is synthesized)
ccaatgtcaacattgcccagcaagtggtaattggtacgcctcagagaccggcagcgtcaaacaccctggtggtaggaagcccacacacccccagcactcactttgcctctcagaaccagc

SEQ ID NO: 725307 - DNA, 120 bp, Artificial Sequence
  ENSG00000198176_4 (sequence is synthesized)
cttccgactcctcaccttggtctgccgggaagcgcaacaggaaaggagagaagaatggcaagggcctacggcatttctccatgaaggtctgcgagaaggtgcagaggaaagggaccactt

SEQ ID NO: 725308 - DNA, 120 bp, Artificial Sequence
  ENSG00000198176_5 (sequence is synthesized)
cctacaacgaagtggcagacgagctggttgcggagttcagtgctgccgacaaccacatcttaccaaacgagtcagcttatgaccagaaaaacataagacggcgcgtctacgatgccttaa

SEQ ID NO: 725309 - DNA, 120 bp, Artificial Sequence
  ENSG00000198176_6 (sequence is synthesized)
acgtgctaatggccatgaacatcatctccaaggagaagaaggagatcaagtggattggtctgcccaccaactcggctcaggaatgtcagaacttagaggtggaaagacagaggagacttg

SEQ ID NO: 725310 - DNA, 120 bp, Artificial Sequence
  ENSG00000198176_7 (sequence is synthesized)
aaagaataaaacagaaacagtctcaacttcaagaacttattctacagcaaattgccttcaagaacctggtgcagagaaaccggcatgcggagcagcaggccagccggccaccgccaccca

SEQ ID NO: 725311 - DNA, 120 bp, Artificial Sequence
  ENSG00000198176_8 (sequence is synthesized)
actcagtcatccacctgcccttcatcatcgtcaacaccagcaagaagacggtcatcgactgcagcatctccaatgacaaatttgagtatctgtttaattttgacaacacatttgaaatcc

SEQ ID NO: 725312 - DNA, 120 bp, Artificial Sequence
  ENSG00000198176_9 (sequence is synthesized)
acgatgacatagaagtgctgaagcggatgggcatggcttgcgggctggagtcggggagctgctctgccgaagaccttaaaatggccagaagtctggtccccaaggctctggagccatacg

SEQ ID NO: 725313 - DNA, 120 bp, Artificial Sequence
  ENSG00000198176_10 (sequence is synthesized)
acaagctccaatgggtctcagtacagcggctccagggtggagactccggtgtcctacgtcggggaggacgacgaggaggacgatgacttcaacgagaatgacgaggacgactgacgtcct

SEQ ID NO: 725314 - DNA, 120 bp, Artificial Sequence
  ENSG00000198176_11 (sequence is synthesized)
ccccacttcagattcggcttcaggaaaacgtttagcgaaaagaaactttttttttaatgtgggttttctgtttccttttggcctactcccaagaagatattggtaagctattgaatttag

SEQ ID NO: 725315 - DNA, 120 bp, Artificial Sequence
  ENSG00000198176_12 (sequence is synthesized)
atatgcacctctgataagcaaggattgtttcccgtaggattaggacgtgctgtggatgtgtgttttgataccagtgtgctgatgcagagcgtttatttacttgttaggattttgtgtttt

SEQ ID NO: 725316 - DNA, 120 bp, Artificial Sequence
  ENSG00000198176_13 (sequence is synthesized)
catttgctatttttctttaagtgcagagttcatttttgcccctgaaaagtttttgctgagtttgctgaagaaattgtatttcaaccacatccatgaaaataaaacacctcctgttgtgga

SEQ ID NO: 725317 - DNA, 120 bp, Artificial Sequence
  ENSG00000198176_14 (sequence is synthesized)
tggtgagcccctgatgccgcttatttgccgtgagtttggacggcacccctgctggcggatagcaagactctgtggagtttgttcagtggtacggtgtccaagcaaacagcagaatgcaac

SEQ ID NO: 725318 - DNA, 120 bp, Artificial Sequence
  ENSG00000198176_15 (sequence is synthesized)
tttctaaacagccccaagcaaacagcagaattcaactttttaaacaataaacaccatcaaccttattgactttattgtcccttaaattatattgactgttgtgattccatcaagtttgta

SEQ ID NO: 725319 - DNA, 120 bp, Artificial Sequence
  ENSG00000198176_16 (sequence is synthesized)
cactcttttctctccctgttttgcagcaacaaattgcgaagtgcttttgtttgtttgttttcgtttggttaaagcttattgccatgctggtgcggctatggagactgtctggaaggcttg

SEQ ID NO: 725320 - DNA, 120 bp, Artificial Sequence
  ENSG00000198176_17 (sequence is synthesized)
gaatggtttattgcttatggtaaaatttgcctgatttcttacaggcagcgtttggaaaccttttattatatagttgtttacatacttataagtctatcatttaaagacatgtactgaaac

SEQ ID NO: 725321 - DNA, 120 bp, Artificial Sequence
  ENSG00000198176_18 (sequence is synthesized)
agacatgtactgaaacaaatgtatttgtttcataagcatcttcctgtaatctattataaaattgaaattaaatatagagaatgttttaacaattttttaactcaaaatttgtcaatcatt

SEQ ID NO: 725322 - DNA, 120 bp, Artificial Sequence
  ENSG00000198176_19 (sequence is synthesized)
ttataaaaagaaaaaggaatttaaggacaggcagtagtctcttttaaaatttattcacaaaacccattaactgcacagttgctattagctgcctgttctaaaacgatagtctttttattg

SEQ ID NO: 725323 - DNA, 120 bp, Artificial Sequence
  ENSG00000198176_20 (sequence is synthesized)
aaacacaaataaacttttctgtaatattttatggtatataaagagactttaattgtttgacttgtttaacttggcactgttagtttttattaataaaacgcgcatgggcattttaaacaa

SEQ ID NO: 725324 - DNA, 120 bp, Artificial Sequence
  ENSG00000198176_21 (sequence is synthesized)
agcttttgttgaaggagctttttttctgttctggtgaattctttccttgggggccgtagggtcccagccactgacagcaggatggctttaagaaatggctcagggaactgttggaggcgt

SEQ ID NO: 725325 - DNA, 120 bp, Artificial Sequence
  ENSG00000198176_22 (sequence is synthesized)
cggatctggtaacatggcaaaagatacttttaaagcgtctgaagcgggatgaaggtgaaagatggaaggatctgatctctgaagctgcggtcaccacccacaagttgtggccttggatac

SEQ ID NO: 725326 - DNA, 120 bp, Artificial Sequence
  ENSG00000198176_23 (sequence is synthesized)
cacactgcagttgggtggtgatggggtggtgccttctgactttttccttatctttaccgactgtgttaattgataattttaaataaacgccttaattaaattgaggtggagggtgttgca

SEQ ID NO: 725327 - DNA, 120 bp, Artificial Sequence
  ENSG00000198176_24 (sequence is synthesized)
gtgcggaggcggcccgaggcctagtgacaggcgcgcggcgcggaccccggaagcccacctgtcagagttaccggtcagccgggcgggcgccgccggggtctggggtggacgccgcgagcc

SEQ ID NO: 725328 - DNA, 120 bp, Artificial Sequence
  ENSG00000198176_25 (sequence is synthesized)
tgtggaactgcgcgtcattttgttggttgcctgtgcgtcttgtgttgtttctgtttcatgaccattcgcttattttctttcccttttcagaaatggctcagggaactgttggaggcgtgt

SEQ ID NO: 725329 - DNA, 80 bp, Artificial Sequence
  ENSG00000198176_26 (sequence is synthesized)
ggcgctgcgccctggctcctggggctcggccccaccctcggccgctgggcgggccgtcggggacctgggggtagtggtgg

SEQ ID NO: 725330 - DNA, 120 bp, Artificial Sequence
  ENSG00000198176_27 (sequence is synthesized)
tgaccctgcgggcccgcgggccacttttccgcagggggcatttccgtctggcgaggcgactgaaaatcctgagtgtgggagtcggtttggccagctccgctctcaggatggagggtgcct

SEQ ID NO: 725331 - DNA, 120 bp, Artificial Sequence
  ENSG00000198178_0 (sequence is synthesized)
actgcagagtctcctaagtcacatctcttcctttgcaagagtaggcgaagaaggatctaagggcttggcttgtttgaaagaaccacaccccgaaagtaacatctttggagaaagtgatac

SEQ ID NO: 725332 - DNA, 120 bp, Artificial Sequence
  ENSG00000198178_1 (sequence is synthesized)
aagagcttctgcacccacctgatagaggaagtccaaagggtgtgcgcacacacaatggtgcctgaagaagagcctcaagaccgagagaaaggactctggtggttccagttgaaggtctgg

SEQ ID NO: 725333 - DNA, 120 bp, Artificial Sequence
  ENSG00000198178_2 (sequence is synthesized)
tccatggcagtcgtatccatcttgctcctcagtgtctgtttcactgtgagttctgtggtgcctcacaattttatgtatagcaaaactgtcaagaggctgtccaagttacgagagtatcaa

SEQ ID NO: 725334 - DNA, 120 bp, Artificial Sequence
  ENSG00000198178_3 (sequence is synthesized)
cagtatcatccaagcctgacctgcgtcatggaaggaaaggacatagaagattggagctgctgcccaaccccttggacttcatttcagtctagttgctactttatttctactgggatgcaa

SEQ ID NO: 725335 - DNA, 120 bp, Artificial Sequence
  ENSG00000198178_4 (sequence is synthesized)
agagtcaaaagaactgttctgtgatgggggctgatctggtggtgatcaacaccagggaagaacaggatttcatcattcagaatctgaaaagaaattcttcttattttctggggctgtcag

SEQ ID NO: 725336 - DNA, 120 bp, Artificial Sequence
  ENSG00000198178_5 (sequence is synthesized)
atccagggggtcggcgacattggcaatgggttgaccagacaccatacaatgaaaatgtcacattctggcactcaggtgaacccaataaccttgatgagcgttgtgcgataataaatttcc

SEQ ID NO: 725337 - DNA, 120 bp, Artificial Sequence
  ENSG00000198178_6 (sequence is synthesized)
gttcttcagaagaatggggctggaatgacattcactgtcatgtacctcagaagtcaatttgcaagatgaagaagatctacatataaatgaaatattctccctggaaatgtgtttgggttg

SEQ ID NO: 725338 - DNA, 120 bp, Artificial Sequence
  ENSG00000198178_7 (sequence is synthesized)
gcatccaccgttgtagaaagctaaattgattttttaatttatgtgtaagttttgtacaaggaatgcccctaaaatgtttcagcaggctgtcacctattacacttatgatataatccattc

SEQ ID NO: 725339 - DNA, 120 bp, Artificial Sequence
  ENSG00000198178_8 (sequence is synthesized)
cctcccaaagtgctgagattataggcacgagccactacacctggccacaaaattctttaaagaagccaatcccatcctccctcaagagccaaggggccacctcaccctcttgttacagca

SEQ ID NO: 725340 - DNA, 120 bp, Artificial Sequence
  ENSG00000198178_9 (sequence is synthesized)
agagccaaggggccacctcaccctcttgttacagcagatcctgcctcccacagtcaccctgctcccaagtgcaacctctgtctgaccctgcatggtgtgcggtgccctcctgcctcaggc

SEQ ID NO: 725341 - DNA, 120 bp, Artificial Sequence
  ENSG00000198178_10 (sequence is synthesized)
ttgctttctgtgctgtgcaagctttgttctttcgctgtttgggtccacggttcttttatgagctgtgataccgcggaagtctgtagcttcactcctgaagctagcaagaccacaagctcg

SEQ ID NO: 725342 - DNA, 120 bp, Artificial Sequence
  ENSG00000198178_11 (sequence is synthesized)
ccgagagaaacgagtaactctagacgtgccatcttaaaagctgtaacaccgcgaggcagatcctgcctcccacagtcaccctgctcccaagtgcaacctctgtctgaccctgcatggtgt

SEQ ID NO: 725343 - DNA, 120 bp, Artificial Sequence
  ENSG00000198178_12 (sequence is synthesized)
gaagaagagcctcaagaccgagagaaaggactctggtggttccagttgaaggtctggtccatggcagtcgtatccatcttgctcctcagtgtctgtttcactgtgagttctgtggattgg

SEQ ID NO: 725344 - DNA, 120 bp, Artificial Sequence
  ENSG00000198182_0 (sequence is synthesized)
ggccactcccagaagtctccggggctcgagcggtgggtgggaggcgcggtccaagtggtcgctgccgtatttctcgtaggtttttaggattctggactccatttctcaccggtacctgcg

SEQ ID NO: 725345 - DNA, 120 bp, Artificial Sequence
  ENSG00000198182_1 (sequence is synthesized)
gtcctgactgttctggcttggactacatattacaaaggcaacggagaaaacttggacccctggctccggttccgggaccttttggttccacctgaagaaggcggcgcaggtcactgcggg

SEQ ID NO: 725346 - DNA, 120 bp, Artificial Sequence
  ENSG00000198182_2 (sequence is synthesized)
tctgcagccccagcccgccgcccgcgtggtaccctgcgtggcggtgagagtggggctgcaggaggcgctcagagcgcggaggcccccaggcgggccgggcgagtctcccgcctcctcagg

SEQ ID NO: 725347 - DNA, 120 bp, Artificial Sequence
  ENSG00000198182_3 (sequence is synthesized)
caggccctagggtgctggagctgcggaggaggggcccgtctctaggagacaggcggggagcgtgagagaccgcgcagcggcgacaggaccggcttgcctgtgtgacgtgggtgcagttgc

SEQ ID NO: 725348 - DNA, 120 bp, Artificial Sequence
  ENSG00000198182_4 (sequence is synthesized)
gggactgtgaggggtcttggttcttttgactttgctcttctggtagagaaacgccaaggactgatcaactcttgccagtctcaaaccatgtcctatggatcaataacattcggggatgtg

SEQ ID NO: 725349 - DNA, 120 bp, Artificial Sequence
  ENSG00000198182_5 (sequence is synthesized)
gccatagacttctctcatcaggagtgggaatatctcagcctggttcagaagaccttgtaccaggaggtgatgatggagaactatgacaacttagtctcattggcaggacattccgtatct

SEQ ID NO: 725350 - DNA, 120 bp, Artificial Sequence
  ENSG00000198182_6 (sequence is synthesized)
aagccagatttaatcaccttattggagcaaggaaaagagccatggatgattgtgagggaagaaacaagaggagagtgtacagatttggattcaagatgtgaaataatcagcgatgggaaa

SEQ ID NO: 725351 - DNA, 120 bp, Artificial Sequence
  ENSG00000198182_7 (sequence is synthesized)
atgcagctttataggaaacactcatgtgttactctccatcagagaattcataatggacagaaaccatatgagtgtaagcaatgtcagaagtcctttagtcatcttacagaactcatggta

SEQ ID NO: 725352 - DNA, 120 bp, Artificial Sequence
  ENSG00000198182_8 (sequence is synthesized)
catcaaacaattcatactagtgaggaacctgatcaatgtgaaaagtttaggaaggcatttagccatcttacagaccttagaaagcatcagaaaattaatgctcgtgagaaaccttatgaa

SEQ ID NO: 725353 - DNA, 120 bp, Artificial Sequence
  ENSG00000198182_9 (sequence is synthesized)
tgtgaagaatgtgggaaggtcttcagttatcctgcaaaccttgctcaacatgggaaagttcatgttgagaaaccctatgaatgtaaagagtgtggggaagcttttaggactagccgtcaa

SEQ ID NO: 725354 - DNA, 120 bp, Artificial Sequence
  ENSG00000198182_10 (sequence is synthesized)
cttactgtacatcatagatttcattatggtgagaaaccctacgaatgtaaggaatgtggcaaggcctttagtgtgtatggacgacttagtcgacatcagagtattcacactggtgagaag

SEQ ID NO: 725355 - DNA, 120 bp, Artificial Sequence
  ENSG00000198182_11 (sequence is synthesized)
ccctttgaatgtaacaaatgtgggaagtcctttaggctcaaagcaggccttaaagtacatcagagtattcatactggagagaagccacatgaatgtaaggaatgtggaaaggcctttcgt

SEQ ID NO: 725356 - DNA, 120 bp, Artificial Sequence
  ENSG00000198182_12 (sequence is synthesized)
cagttttcccaccttgtgggtcataaaagaattcatactggagaaaaaccctatgaatgcaaggaatgcgggaagggctttacatgtaggtatcaacttaccatgcatcagagaatttat

SEQ ID NO: 725357 - DNA, 120 bp, Artificial Sequence
  ENSG00000198182_13 (sequence is synthesized)
tcaggggagaaacactatgaatgtaaagaaaatggggaggcttttagtagtggccatcaacttactgcacctcatacatttgaaagtgttgagaaaccttataagtgtgaggaatgtggg

SEQ ID NO: 725358 - DNA, 120 bp, Artificial Sequence
  ENSG00000198182_14 (sequence is synthesized)
aaagcctttagtgtgcatggacgacttactcgacatcagggtattcatagtggtaagaaaccctatgaatgtaacaaatgtgggaagtcctttaggctcaattcatcccttaaaatacat

SEQ ID NO: 725359 - DNA, 120 bp, Artificial Sequence
  ENSG00000198182_15 (sequence is synthesized)
caaaatattcataccggtgagaaaccctacaaatgtaaggaatgtgggaaggccttcagtcagcgtgcacaccttgcccatcataacagaattcatactggttacaaaccctttgaatgt

SEQ ID NO: 725360 - DNA, 120 bp, Artificial Sequence
  ENSG00000198182_16 (sequence is synthesized)
aaagaatgtgggaagtcctttcgttgtgcctcatatcttgttatacatgagagaattcatacaggagagaaaccctatgtatgtcaagagtgtgggaagggttttagttatagccataaa

SEQ ID NO: 725361 - DNA, 120 bp, Artificial Sequence
  ENSG00000198182_17 (sequence is synthesized)
ctcactatacatcgcagagttcatactggtgagaaaccttatgaatgtaaggaatgtgggaaggcctttagtgtatctggacaacttactcagcatctgagtattcacagtggtaagaaa

SEQ ID NO: 725362 - DNA, 120 bp, Artificial Sequence
  ENSG00000198182_18 (sequence is synthesized)
aatgcaacaaatgcgggaagtcttttaggttcatttctgtacttaaagcccatcagaatattcatagcgctgagaaaccctacgaatgtaaggaatgtggcaaggcctttcgtcatgcca

SEQ ID NO: 725363 - DNA, 120 bp, Artificial Sequence
  ENSG00000198182_19 (sequence is synthesized)
caagcctcatatatcatgaccgaactcatgctggtgaaaagtcctatgaatgtaaagaatgtggggaaacttttagtcatgcttcacatcttattattcatgagagaattcataccagtg

SEQ ID NO: 725364 - DNA, 120 bp, Artificial Sequence
  ENSG00000198182_20 (sequence is synthesized)
ataaaccctatgaatgtaaaagatgtgggaaggcatttcactgtgcctcatatcttgttagacatgaaagcgttcatgctgatggaaatccctatatgtgtgaagagtgtgggaaagctt

SEQ ID NO: 725365 - DNA, 120 bp, Artificial Sequence
  ENSG00000198182_21 (sequence is synthesized)
ttaatagtagccatgaacttagtatacatcatagagttcatactggtgagaaaccctttaaatgtaacaaatgcagaaggtcctttaggcttagatccatccttgaagtacatcagagaa

SEQ ID NO: 725366 - DNA, 120 bp, Artificial Sequence
  ENSG00000198182_22 (sequence is synthesized)
ttcatatttgatagagaaattgtggcatatacaggtagtaaagaaagcacattgtgtcaatggatttatcccactgaacaatttgaatgaagacaatgtggaatggctttgagatacagt

SEQ ID NO: 725367 - DNA, 120 bp, Artificial Sequence
  ENSG00000198182_23 (sequence is synthesized)
tcagtttttattaggcatcaatttgtattggtgtgaacttttcaaaatgtaaatcatatatgcagtttctttggtatgacctgtgttaactcagattcagagaatttataatgtattttt

SEQ ID NO: 725368 - DNA, 120 bp, Artificial Sequence
  ENSG00000198182_24 (sequence is synthesized)
ttaataacataagaaaacttttctgatattcctctagttttggattgccaaaatattcacagtagaggaaaactgagaaaacgtaggaaaccattctttatacttgcatgtaaacatctt

SEQ ID NO: 725369 - DNA, 120 bp, Artificial Sequence
  ENSG00000198182_25 (sequence is synthesized)
ccagcaacaatcatttattgttaaacctggaaaaagccattacacaggaaacctctgttgatataagcgatgatgggaaaggctatttagccactctgcatatttaatgctcatgatcaa

SEQ ID NO: 725370 - DNA, 120 bp, Artificial Sequence
  ENSG00000198182_26 (sequence is synthesized)
catctgcttcctatagctgggatgatatgggggaagatatttatcccttctggggatcatatataaatgatgatagtagtacctacagtatagtgctgttagaattacatgagttagatg

SEQ ID NO: 725371 - DNA, 120 bp, Artificial Sequence
  ENSG00000198182_27 (sequence is synthesized)
tggaggtcagagtggaagcaggtgtgagagggtcccgcagaagaaaacatggctgccaaagtgtttgagtccatcggcaagtttggcctggccttagctgttgcaggaggcatggtgaac

SEQ ID NO: 725372 - DNA, 120 bp, Artificial Sequence
  ENSG00000198182_28 (sequence is synthesized)
tctgccttatgtaatgtggatgctgggcacagagctgccatctttgaccaattccgtggagtacagaacattgtggtaggggaagggactcactttctcatcccatgtgtacaaaaacca

SEQ ID NO: 725373 - DNA, 120 bp, Artificial Sequence
  ENSG00000198182_29 (sequence is synthesized)
attatctttgactgctgttctcaaccacgtagtgcgccagtcatcactggtagcaaagatttacagaatgtcaacatcacactgtgcatcctcttccggcccatcactagccagcttcct

SEQ ID NO: 725374 - DNA, 120 bp, Artificial Sequence
  ENSG00000198182_30 (sequence is synthesized)
cgcatcttcaccagcattggagaggactacgatgagtgtgtgctgccgttcattaccacggagatcctcaagtcactggtggctcgctttgatgctggagaactaatcacccagagggag

SEQ ID NO: 725375 - DNA, 120 bp, Artificial Sequence
  ENSG00000198182_31 (sequence is synthesized)
ctggtctccagccaggtgagcaacaaccttatggagtgagcagccacctttgggctcattctggacgacgtgtctttgacacatctgaccttcttgaaggagttaacagacaggtggccc

SEQ ID NO: 725376 - DNA, 120 bp, Artificial Sequence
  ENSG00000198182_32 (sequence is synthesized)
cccaggaagcagagagcgccagatttgtggtggaaaaggcggccatcatctctgctgagggtgactccaaggcagctgagctgatcgccaactcactggccactgcaggggacggccaga

SEQ ID NO: 725377 - DNA, 120 bp, Artificial Sequence
  ENSG00000198182_33 (sequence is synthesized)
gcgagctgtgcaagctggaagctgcagaagacattgcataccagctctcatgctctcggaacatcacctgcctgccggcagggcagtccgtgctcctccagctgccctagtgaggcccca

SEQ ID NO: 725378 - DNA, 120 bp, Artificial Sequence
  ENSG00000198182_34 (sequence is synthesized)
gcctacctgcacctccgtgaggcaactgggccacagccccgatgattcgtaacaccacctttcgccctcaccccagaaatcactgaaatttcatgattggcttaaagtgaaggaagtaaa

SEQ ID NO: 725379 - DNA, 120 bp, Artificial Sequence
  ENSG00000198182_35 (sequence is synthesized)
ggtaaaatcacttcagatctctaaaaaacaaagaattacatgagttagtacatgaaaaaattatgggaaactacatgaaatatactgttacgttcaataaacattagcttctgtatataa

SEQ ID NO: 725380 - DNA, 120 bp, Artificial Sequence
  ENSG00000198182_36 (sequence is synthesized)
attgacccttggctccaggttccctgctgcttcctgtgccttcctcagcctagtacgactacaacagagaaatggtcccaatgggaaatcagatactgagtcttagatgaagatttccag

SEQ ID NO: 725381 - DNA, 120 bp, Artificial Sequence
  ENSG00000198183_0 (sequence is synthesized)
gagtgggggagagagaggagaccaggacagctgctgagacctctaagaagtccagatactaagagcaaagatgtttcaaactgggggcctcattgtcttctacgggctgttagcccagac

SEQ ID NO: 725382 - DNA, 120 bp, Artificial Sequence
  ENSG00000198183_1 (sequence is synthesized)
catggcccagtttggaggcctgcccgtgcccctggaccagaccctgcccttgaatgtgaatccagccctgcccttgagtcccacaggtcttgcaggaagcttgacaaatgccctcagcaa

SEQ ID NO: 725383 - DNA, 120 bp, Artificial Sequence
  ENSG00000198183_2 (sequence is synthesized)
tggcctgctgtctgggggcctgttgggcattctggaaaaccttccgctcctggacatcctgaagcctggaggaggtacttctggtggcctccttgggggactgcttggaaaagtgacgtc

SEQ ID NO: 725384 - DNA, 120 bp, Artificial Sequence
  ENSG00000198183_3 (sequence is synthesized)
agtgattcctggcctgaacaacatcattgacataaaggtcactgacccccagctgctggaacttggccttgtgcagagccctgatggccaccgtctctatgtcaccatccctctcggcat

SEQ ID NO: 725385 - DNA, 120 bp, Artificial Sequence
  ENSG00000198183_4 (sequence is synthesized)
gtccttggtgactgcacccattcccctggaagcctgcaaatttctctgcttgatggacttggccccctccccattcaaggtcttctggacagcctcacagggatcttgaataaagtcctg

SEQ ID NO: 725386 - DNA, 120 bp, Artificial Sequence
  ENSG00000198183_5 (sequence is synthesized)
cctgagttggttcagggcaacgtgtgccctctggtcaatgaggttctcagaggcttggacatcaccctggtgcatgacattgttaacatgctgatccacggactacagtttgtcatcaag

SEQ ID NO: 725387 - DNA, 120 bp, Artificial Sequence
  ENSG00000198183_6 (sequence is synthesized)
gtctaagccttccaggaaggggctggcctctgctgagctgggtcttcccccaacagaactatttcttgctgctcaatccatttcctctggcccagcttcccagtgctcacagatggctgg

SEQ ID NO: 725388 - DNA, 120 bp, Artificial Sequence
  ENSG00000198183_7 (sequence is synthesized)
cccatgtgctggaagatgacacagttgccttctctccgaggaacctgccccctctcctttcccaccaggcgtgtgtaacatcccatgtgcctcacctaataaaatggctcttcttctgca

SEQ ID NO: 725389 - DNA, 120 bp, Artificial Sequence
  ENSG00000198185_0 (sequence is synthesized)
cttccgggtgagggtcctgcagcccgtgaatccctggtcccgccgagacttggacctggtgcgaactggaggcgaagcgggtgcacccacaacctataggaagggctggcggcgagctct

SEQ ID NO: 725390 - DNA, 120 bp, Artificial Sequence
  ENSG00000198185_1 (sequence is synthesized)
gagcactcgggcgtcggagggaacgctctgctttcaacactcttggccctttctcaagagaacatgaaaatgaaaaaatttcagataccagtttcattccaggacctgactgtgaacttc

SEQ ID NO: 725391 - DNA, 120 bp, Artificial Sequence
  ENSG00000198185_2 (sequence is synthesized)
acccaagaggaatggcagcaactggaccctgctcagaggctcctgtacagggatgtgatgctggagaactacagcaacttggtctctgtggggtatcatgttagcaaaccagatgtgatt

SEQ ID NO: 725392 - DNA, 120 bp, Artificial Sequence
  ENSG00000198185_3 (sequence is synthesized)
ttcaaattggagcaaggagaagagccatggatagtggaggaattctcaaatcagaactacccagacattgatgatgccttagagaagaacaaggaaatccaagataaacatttgacacaa

SEQ ID NO: 725393 - DNA, 120 bp, Artificial Sequence
  ENSG00000198185_4 (sequence is synthesized)
actgtattcttcagcaacaaaacactgattacagaaagagagaatgtatttgggaaaacacttaatctgggcatgaatagtgttccctcaagaaaaatgccctataaatgtaatccagga

SEQ ID NO: 725394 - DNA, 120 bp, Artificial Sequence
  ENSG00000198185_5 (sequence is synthesized)
ggaaacagtttgaaaactaattcagaagtaattgttgcaaagaaaagcaaagaaaacagaaagattcctgatggatacagtggatttgggaagcatgagaaaagtcatttgggaatgaaa

SEQ ID NO: 725395 - DNA, 120 bp, Artificial Sequence
  ENSG00000198185_6 (sequence is synthesized)
aaatacagatacaatccaatgaggaaagccagcaatcaaaacgaaaatcttattctgcaccagaacattcagattttgaaacaaccgtttgactataataaatgtgggaaaaccttcttc

SEQ ID NO: 725396 - DNA, 120 bp, Artificial Sequence
  ENSG00000198185_7 (sequence is synthesized)
aagagggcaattctcattacacaaaaggggagacagactgaaaggaaaccaaatgaatgtaatgaatgtaggaaaaccttttctaagagatctaccctcattgtacatcagagaattcat

SEQ ID NO: 725397 - DNA, 120 bp, Artificial Sequence
  ENSG00000198185_8 (sequence is synthesized)
acaggggagaaaccgtatgtttgtagtgattgtaggaaaacttttcgtgtgaagacaagcctcactcgacaccgaagaattcatactggagagagaccctatgaatgcagtgaatgcagg

SEQ ID NO: 725398 - DNA, 120 bp, Artificial Sequence
  ENSG00000198185_9 (sequence is synthesized)
aaaaccttcattgacaaatctgcccttattgtacaccagaaaattcatggaggggagaaatcctatgagtgtaatgaatgtggaaagaccttttttcggaagtcagccctggctgaacat

SEQ ID NO: 725399 - DNA, 120 bp, Artificial Sequence
  ENSG00000198185_10 (sequence is synthesized)
ttcaggtcacacacaggggagaagccttacgaatgcaaggaatgtggaaatgccttcagcaagaaatcgtatcttgttgtacatcaaagaactcacagaggagagaagccaaatgaatgt

SEQ ID NO: 725400 - DNA, 120 bp, Artificial Sequence
  ENSG00000198185_11 (sequence is synthesized)
aaggaatgtgggaaaaccttcttctgtcagtcagcccttactgcgcatcagagaattcacacaggggaaaaaccctatgaatgtagtgaatgtgagaaaaccttcttttgtcaatctgcc

SEQ ID NO: 725401 - DNA, 120 bp, Artificial Sequence
  ENSG00000198185_12 (sequence is synthesized)
ctcaatgtgcatcgaagaagtcatacaggagagaagccctatgaatgcagtcaatgtggaaaatttttatgtacgaaatcagccctcattgcacatcagataactcatagaggaaagaag

SEQ ID NO: 725402 - DNA, 120 bp, Artificial Sequence
  ENSG00000198185_13 (sequence is synthesized)
tcttatgaatgtaatgaatgtgggaaatttttctgccataagtcaacactcactatacatcagagaacacacacaggagagaaacatggtgtgtttaataaatgtggtagaatctccatt

SEQ ID NO: 725403 - DNA, 120 bp, Artificial Sequence
  ENSG00000198185_14 (sequence is synthesized)
gtgaagtcaaactgcagtcagtgtaagagaatgaacacaaaggagaatctttatgagtgtagtgaacatgggcatgccgtcagcaaaaactcacacctcattgtacatcagagaactata

SEQ ID NO: 725404 - DNA, 120 bp, Artificial Sequence
  ENSG00000198185_15 (sequence is synthesized)
tgggagagaccatatgaatgcaatgaatgtgggagaacctactgcaggaagtcagccctgactcaccatcagagaacacacacaggacagagaccctatgagtgtaatgaatgtgggaaa

SEQ ID NO: 725405 - DNA, 120 bp, Artificial Sequence
  ENSG00000198185_16 (sequence is synthesized)
ggagaaaccatatgaatgtaatgaatgtgggaaatccttctgccataagtcagccttcagagtccatagaagaattcacacaggagagaaaccatatgaatgtaatcaatgtgggaaaac

SEQ ID NO: 725406 - DNA, 120 bp, Artificial Sequence
  ENSG00000198185_17 (sequence is synthesized)
ctaccgtcgcctgtggactctcactgaacatcagaaaatacacacaggagagaaaccttatgaatgtaacaaatgtgagaaaacatttcgccacaaatcaaactttcttttacatcagaa

SEQ ID NO: 725407 - DNA, 120 bp, Artificial Sequence
  ENSG00000198185_18 (sequence is synthesized)
atcccacaaggaataagttccaacaaagtaataaattccaacaaagcaacaaatcaaataacttacacaatgctaaactgtgagtatgtatagaggagtaaaatcttataaatgtaatga

SEQ ID NO: 725408 - DNA, 120 bp, Artificial Sequence
  ENSG00000198185_19 (sequence is synthesized)
atatggaaaatttttctgccataagtcaaccctcaatgtaacatcagagaaatcatgtaggaaagaaataatttgtttaataaatgtattattcattgtgaactatgaaaatattcaaca

SEQ ID NO: 725409 - DNA, 120 bp, Artificial Sequence
  ENSG00000198185_20 (sequence is synthesized)
gcaattcaaaggttatgccaaatgtgcctcccttttaaaataatgaaacaaacattgtttaagttaaattgttacttggttcctccccacagtgttacttgatagtgtatgttacgaggt

SEQ ID NO: 725410 - DNA, 120 bp, Artificial Sequence
  ENSG00000198185_21 (sequence is synthesized)
gtgaggatctgaccttcatttcaaatcaataccattgtttgatagttgagtaagttacagtttctcaatttatggtgtattttcagatttggcagattttttgttgtctgctaactccat

SEQ ID NO: 725411 - DNA, 120 bp, Artificial Sequence
  ENSG00000198185_22 (sequence is synthesized)
agtcttctagtagtggactgtatacctttatctgcaaaggtgacaactcaggagaactaaccattgtactctatgcacccatggtaattataccccaggtgagcattttgtaaagctgag

SEQ ID NO: 725412 - DNA, 120 bp, Artificial Sequence
  ENSG00000198185_23 (sequence is synthesized)
ccagtgaaagcccttcctaagacctttctaatggaagataggcacaggataactagttcatgatcctgaagctttcagctaagtcaagaagacggcaattgcagtaggaaaaacatggga

SEQ ID NO: 725413 - DNA, 120 bp, Artificial Sequence
  ENSG00000198185_24 (sequence is synthesized)
aaataagcattcttgaacaacaaagagaatttggatgatggttgaatccaaaaagtgtttatttctctggttttagtattctgtaatatccactcaaccccatctaccagtggtttatgt

SEQ ID NO: 725414 - DNA, 120 bp, Artificial Sequence
  ENSG00000198185_25 (sequence is synthesized)
caattagtatgttttcaaaaatctcttggatttcctaatcaacatgttcattagaggtattgtttagaagtcactgatcaaattctgagaacaaaaggcgcctgggatgctgattaggat

SEQ ID NO: 725415 - DNA, 120 bp, Artificial Sequence
  ENSG00000198185_26 (sequence is synthesized)
tacattatatggatatatatgatgaggtaggattgccacttttatggggttattgggaaatgtttacctttcaagttctgatttccatgagtgggattttccctatacccattcctagct

SEQ ID NO: 725416 - DNA, 120 bp, Artificial Sequence
  ENSG00000198185_27 (sequence is synthesized)
tctctgccacattatgcattctgccccaggcatgaggaagtgggcttatctagttggtaagatagtgatgggtaactgggtttgctcagctgaactccctcttcattgtgggctgacctg

SEQ ID NO: 725417 - DNA, 120 bp, Artificial Sequence
  ENSG00000198185_28 (sequence is synthesized)
caagtataatttcttgtcacagatattgcctgtgattggtaaattggtctaattctgtcattcagctaattggcccattagctgaatggtcacactaagttgcatcctccaactcaattt

SEQ ID NO: 725418 - DNA, 120 bp, Artificial Sequence
  ENSG00000198185_29 (sequence is synthesized)
gatcagtaataaaagtttcatcctgccccctgtctgctacttaattttttatcgtttagatggggggaaattgtgctatttatttggggcccttcagagaacccaatatgaacatgattt

SEQ ID NO: 725419 - DNA, 120 bp, Artificial Sequence
  ENSG00000198185_30 (sequence is synthesized)
atctatttattcagtttttatgtccttcaggacagataaatgtatgtatacacacatatacatgtgttaatatatgtaagtatatacatatgtttaaatgtatgtgtatgtgtatactga

SEQ ID NO: 725420 - DNA, 120 bp, Artificial Sequence
  ENSG00000198185_31 (sequence is synthesized)
tcttgctcttttcctgtgaaatgtattaatagtcacttcaaagatttggttgctattgtgaaagaaattaagttacctttcactttgaaactaatagagtaaagaaaaacaaaaatacct

SEQ ID NO: 725421 - DNA, 120 bp, Artificial Sequence
  ENSG00000198185_32 (sequence is synthesized)
tcttccgggtgagggtcctgcagcccgtgaatccctggtcccgccgagacttggacctgctctgctttcaacactcttggccctttctcaagagaacatgaaaatgaaaaaatttcagac

SEQ ID NO: 725422 - DNA, 120 bp, Artificial Sequence
  ENSG00000198185_33 (sequence is synthesized)
ttggatgaaaccacacaccatgaggtgtggtaccagcttcctgaggggccagatggtggagccagatgatgcaacctggaagtgtgcgcaagttaactcaccgtgggtgaaccttgaatg

SEQ ID NO: 725423 - DNA, 120 bp, Artificial Sequence
  ENSG00000198185_34 (sequence is synthesized)
gtgggtttttttgtttttttgagatgaggtcttgcactgtcacccaggctgctggagtacagtggcacaatctgagctcactgcaacctctgactcccagactcaagtgatcctcttgcc

SEQ ID NO: 725424 - DNA, 84 bp, Artificial Sequence
  ENSG00000198185_35 (sequence is synthesized)
ttttttttatactgatcttgagcttctgagctccagcgatcagcctacctcaacctctcagagtgctgggattataggtgtgcg

SEQ ID NO: 725425 - DNA, 120 bp, Artificial Sequence
  ENSG00000198185_36 (sequence is synthesized)
ctacctcaacctctcagagtgctgggattataggtgtgcgccaccacacctggccatgtgtgttttcttacatctcctttcttacataaaagataccagtttcattccaggacctgactg

SEQ ID NO: 725426 - DNA, 120 bp, Artificial Sequence
  ENSG00000198185_37 (sequence is synthesized)
cgaggcagccagggcaggattgggctcctgacctgcaggccacgggcgagctctctctagggccctgatttgcccgaagaaggcgcttggtgaaggtgaaaggtttacgcatccaagtag

SEQ ID NO: 725427 - DNA, 120 bp, Artificial Sequence
  ENSG00000198185_38 (sequence is synthesized)
ctagaacctctttccagaacttctgctgatgcacttagtcttgcagccattgattattatagctcagcaaagttcagttcaactttcggaagaaggatgtgagctggaatgggcagggtc

SEQ ID NO: 725428 - DNA, 120 bp, Artificial Sequence
  ENSG00000198185_39 (sequence is synthesized)
aagatttgacaggaaaagacacttcactggaggtatctgcgagagtcctgggttggagggaaggagtactggttataaataaggaaatgatgtcttcatcacttcctaaacacatacatg

SEQ ID NO: 725429 - DNA, 120 bp, Artificial Sequence
  ENSG00000198185_40 (sequence is synthesized)
tcattccctaccatctccaccctctgtttattcagagctgcaccaaccatgttcatcacctcacctgggatttactgagtttaccccttacagagctacacgataggggtaaaggaaaga

SEQ ID NO: 725430 - DNA, 120 bp, Artificial Sequence
  ENSG00000198185_41 (sequence is synthesized)
ctaaaaaccaatttatcttatattaaaattacgacttagtaaatatttttttcagtaatgcagtttgctagtgacagatccaataactgaattctggtcctttgagtaccaggtcagggc

SEQ ID NO: 725431 - DNA, 120 bp, Artificial Sequence
  ENSG00000198185_42 (sequence is synthesized)
ttttgtcatctaccacatttacgttacctaccacaagaagtttcttagtaaaaggtcctcttgtgaaactgcagctaagggaaaccaaactgtcaaaaagacaaacaccttaaagcactt

SEQ ID NO: 725432 - DNA, 120 bp, Artificial Sequence
  ENSG00000198185_43 (sequence is synthesized)
tcattcattctctctggattctgtcatctcaagtggctaaacacattagtaggaaaacagctctgctttcaacactcttggccctttctcaagagaacatgaaaatgaaaaaatttcaga

SEQ ID NO: 725433 - DNA, 120 bp, Artificial Sequence
  ENSG00000198185_44 (sequence is synthesized)
tataggtgtgcgccaccacacctggccatgtgtgttttcttacatctcctttcttacataaaaggtaatatattatagatattctttaatactttgcttttttcacttcatatcagttca

SEQ ID NO: 725434 - DNA, 120 bp, Artificial Sequence
  ENSG00000198185_45 (sequence is synthesized)
tggagaccttcctcattatttatgctttcaaatattgcttctgatcactgtggtatctctcctgtgagctccagaaccatatatcaaactgccagctagatatctgtacttctttactca

SEQ ID NO: 725435 - DNA, 120 bp, Artificial Sequence
  ENSG00000198185_46 (sequence is synthesized)
acagacacttcaagcacagcatggtaaagatcagtgccttcatttcctatgctcgattctcttttttgttttgttttcctaatctccacatatactactagcgtcagcccagctgatcat

SEQ ID NO: 725436 - DNA, 120 bp, Artificial Sequence
  ENSG00000198185_47 (sequence is synthesized)
gtgaaataatatgcacattacatctactgcacatcaagtagtggtcaactctccttgcctcccgttatgtaggactgattctctccttcccatttcccaggaactacctgtgctcatgtc

SEQ ID NO: 725437 - DNA, 120 bp, Artificial Sequence
  ENSG00000198185_48 (sequence is synthesized)
ctgtagtagtgtcttagttttcttcccttctaatttgacctttaagccagtttccatttttctagagtaggggacagcaaatgttttctttagaggacaaggtcaaaatttttggctttg

SEQ ID NO: 725438 - DNA, 120 bp, Artificial Sequence
  ENSG00000198185_49 (sequence is synthesized)
ctggccctgtggtctctgttggatttccttggcacagctgttgtgacatgaaagcagtcatagactgtgtgtaacaaatgagcgtgaccacgtttggctcccagtggcctagattttgcc

SEQ ID NO: 725439 - DNA, 120 bp, Artificial Sequence
  ENSG00000198185_50 (sequence is synthesized)
cacggactgaagtttgccaactcttatgctctagagcattgtttcaaaatacacatttggtcacaaatctccagtccttgcttacaaataactctttatggatttccattatttataaca

SEQ ID NO: 725440 - DNA, 120 bp, Artificial Sequence
  ENSG00000198185_51 (sequence is synthesized)
gtgatctccaaagtggaggatagggagcaccccagcaattcactggacttctattcttgtatttcagccaaaagaatgaaaaaataattaagctttattgatattagtgtatagctggaa

SEQ ID NO: 725441 - DNA, 120 bp, Artificial Sequence
  ENSG00000198185_52 (sequence is synthesized)
ctcacttggaaatatactacaattcctaagtaaatgtacgttagcgtatatgcaagaatgttttactgatgtgccgtactatctaaatttcaagactactaattagagaaaagagttcct

SEQ ID NO: 725442 - DNA, 120 bp, Artificial Sequence
  ENSG00000198185_53 (sequence is synthesized)
gtctgtgtatattcttaatggctacagtcctataaaacatactgtttatatttcaggactaaaattattatgctctcaaggaaggggtaacaaaaatggagcaagctttcttcttttgtg

SEQ ID NO: 725443 - DNA, 120 bp, Artificial Sequence
  ENSG00000198185_54 (sequence is synthesized)
atcacccttcatcttgtgtatatgtccagcattgctctttaaagatgtacatttctatttttgtcaccctgtcagaatgtatgctcctaaagagtaagattagtattttatgtgattagt

SEQ ID NO: 725444 - DNA, 120 bp, Artificial Sequence
  ENSG00000198185_55 (sequence is synthesized)
aatccaggcaattggaatagctccaggacatggtataagctcagcacatttttaaaattcattttaaaaaatgaacacagtgacagatttttaattttctgccctcccacaattacatct

SEQ ID NO: 725445 - DNA, 120 bp, Artificial Sequence
  ENSG00000198185_56 (sequence is synthesized)
ctctatagctttccattagccatggcagtggtcttcttatagtttatgttaccatacatttgatatcactcaattttggtcacccaagattaaacattttctttcagataccagtttcat

SEQ ID NO: 725446 - DNA, 120 bp, Artificial Sequence
  ENSG00000198189_0 (sequence is synthesized)
agttcctccttgctctcgcccctactctttctggtgttagatcgagctaccctctaaaagcagtttagagtggtaaaaaaaaaaaaaaacacaccaaacgctcgcagccacaaaagggat

SEQ ID NO: 725447 - DNA, 120 bp, Artificial Sequence
  ENSG00000198189_1 (sequence is synthesized)
gaaatttcttctggacatcctcctgcttctcccgttactgatcgtctgctccctagagtccttcgtgaagctttttattcctaagaggagaaaatcagtcaccggcgaaatcgtgctgat

SEQ ID NO: 725448 - DNA, 120 bp, Artificial Sequence
  ENSG00000198189_2 (sequence is synthesized)
tacaggagctgggcatggaattgggagactgactgcctatgaatttgctaaacttaaaagcaagctggttctctgggatataaataagcatggactggaggaaacagctgccaaatgcaa

SEQ ID NO: 725449 - DNA, 120 bp, Artificial Sequence
  ENSG00000198189_3 (sequence is synthesized)
gggactgggtgccaaggttcatacctttgtggtagactgcagcaaccgagaagatatttacagctctgcaaagaaggtgaaggcagaaattggagatgttagtattttagtaaataatgc

SEQ ID NO: 725450 - DNA, 120 bp, Artificial Sequence
  ENSG00000198189_4 (sequence is synthesized)
tggtgtagtctatacatcagatttgtttgctacacaagatcctcagattgaaaagacttttgaagttaatgtacttgcacatttctggactacaaaggcatttcttcctgcaatgacgaa

SEQ ID NO: 725451 - DNA, 120 bp, Artificial Sequence
  ENSG00000198189_5 (sequence is synthesized)
gaataaccatggccatattgtcactgtggcttcggcagctggacatgtctcggtccccttcttactggcttactgttcaagcaagtttgctgctgttggatttcataaaactttgacaga

SEQ ID NO: 725452 - DNA, 120 bp, Artificial Sequence
  ENSG00000198189_6 (sequence is synthesized)
tgaactggctgccttacaaataactggagtcaaaacaacatgtctgtgtcctaatttcgtaaacactggcttcatcaaaaatccaagtacaagtttgggacccactctggaacctgagga

SEQ ID NO: 725453 - DNA, 120 bp, Artificial Sequence
  ENSG00000198189_7 (sequence is synthesized)
gcgtttcctggcagttttaaaacgaaaaatcagtgttaagtttgatgcagttattggatataaaatgaaagcgcaataagcacctagttttctgaaaactgatttaccaggtttaggttg

SEQ ID NO: 725454 - DNA, 120 bp, Artificial Sequence
  ENSG00000198189_8 (sequence is synthesized)
atgtcatctaatagtgccagaattttaatgtttgaacttctgttttttctaattatccccatttcttcaatatcatttttgaggctttggcagtcttcatttactaccacttgttcttta

SEQ ID NO: 725455 - DNA, 120 bp, Artificial Sequence
  ENSG00000198189_9 (sequence is synthesized)
gccaaaagctgattacatatgatataaacagagaaatacctttagaggtgactttaaggaaaatgaagaaaaagaaccaaaatgactttattaaaataatttccaagattatttgtggct

SEQ ID NO: 725456 - DNA, 120 bp, Artificial Sequence
  ENSG00000198189_10 (sequence is synthesized)
cacctgaaggctttgcaaaatttgtaccataaccgtttatttaacatatatttttatttttgattgcacttaaattttgtataatttgtgtttctttttctgttctacataaaatcagaa

SEQ ID NO: 725457 - DNA, 120 bp, Artificial Sequence
  ENSG00000198189_11 (sequence is synthesized)
acttcaagctctctaaataaaatgaaggactatatctagtggtatttcacaatgaatatcatgaactctcaatgggtaggtttcatcctacccattgccactctgtttcctgagagatac

SEQ ID NO: 725458 - DNA, 120 bp, Artificial Sequence
  ENSG00000198189_12 (sequence is synthesized)
ctcacattccaatgccaaacatttctgcacagggaagctagaggtggatacacgtgttgcaagtataaaagcatcactgggatttaaggagaattgagagaatgtacccacaaatggcag

SEQ ID NO: 725459 - DNA, 120 bp, Artificial Sequence
  ENSG00000198189_13 (sequence is synthesized)
caataataaatggatcacacttaaacttttggtgtttccatctttttgtcttaaacagaacatgacaaccttcaaattaaaggaaaataaattgtgcaatctttttttaaaaactggaaa

SEQ ID NO: 725460 - DNA, 89 bp, Artificial Sequence
  ENSG00000198189_14 (sequence is synthesized)
tttgctaaacttaaaagcaagctggttctctgggatataaataagagtctcgcactgttgcccggactggtgtgcggtggcaaaattca

SEQ ID NO: 725461 - DNA, 120 bp, Artificial Sequence
  ENSG00000198189_15 (sequence is synthesized)
cagcatggactggaggaaacagctgccaaatgcaagggactgggtgccaaggttcatacctttgtggtagactgcagcaaccgagaagatatttacagctctgcaaagaaggtgaaggca

SEQ ID NO: 725462 - DNA, 120 bp, Artificial Sequence
  ENSG00000198189_16 (sequence is synthesized)
tgactgagcagaagatgatttttattccatcttctatagcttttttaacaacattggaaaggtaagtgacagttaagaaaccttagaaatgaaaggtaaaataacaattatctattgcat

SEQ ID NO: 725463 - DNA, 120 bp, Artificial Sequence
  ENSG00000198189_17 (sequence is synthesized)
tttttactgacatttaaatcaggcagttgataaagtacagttaaatggaattgacttaataaaaataacaggctcaataacattgaggcaagattgatacagctcttgggtaaatgaacc

SEQ ID NO: 725464 - DNA, 120 bp, Artificial Sequence
  ENSG00000198198_0 (sequence is synthesized)
gccgaggtagcgaggtcaggggtcaagagtggaacaccctcactggcccgggccggcgcgggagggctgtgtgatggcctcggagcgcccggagccggaggtggaagaagctgggcaggt

SEQ ID NO: 725465 - DNA, 120 bp, Artificial Sequence
  ENSG00000198198_1 (sequence is synthesized)
gttcctgttaatgaaaaaggattatcgaatctcccgaaatgttcgcctggcttggttcctcagtcatctgcaccaaactgtgcaggccacaccccaggagatgctgcttcagtctgaaca

SEQ ID NO: 725466 - DNA, 120 bp, Artificial Sequence
  ENSG00000198198_2 (sequence is synthesized)
ggaattggaagtcctcagtgtcctgccccctgggtggcagccagatgaaccagtggtcccaaggccattcctcctggtaccttccacccgggtcaccttcctggcttggcagtatcggtt

SEQ ID NO: 725467 - DNA, 120 bp, Artificial Sequence
  ENSG00000198198_3 (sequence is synthesized)
tgtcattgagttggaccttagcccatctactggcattgtggatgattccacaggggagatcttgtttgatgaagttttccatgccctgtcccgctgcttaggcgggctgcttcggccctt

SEQ ID NO: 725468 - DNA, 120 bp, Artificial Sequence
  ENSG00000198198_4 (sequence is synthesized)
ccgagtgcctggatcttgcatcgacttccagcctgagatctatgtaactatccaggcctactcctccatcattggactgcagtcccaccaggtgctggtacagggctgcctcttggaccc

SEQ ID NO: 725469 - DNA, 120 bp, Artificial Sequence
  ENSG00000198198_5 (sequence is synthesized)
ttcccagcgggaggtgttcctgcagcagatatatgagcagctctgcctctttgaggataaggtggccaccatgctgcagcagcagtacgatccccagagccaggcagaagaccagtcccc

SEQ ID NO: 725470 - DNA, 120 bp, Artificial Sequence
  ENSG00000198198_6 (sequence is synthesized)
agactcaggggacctactgggccggaaggtaggcgtctccatggtgacagctgatcttgggctggtcagtatgattcgtcagggcatcttggcactgcagttactaccctcgaactctag

SEQ ID NO: 725471 - DNA, 120 bp, Artificial Sequence
  ENSG00000198198_7 (sequence is synthesized)
tgcagggattatcgtgatcacggatggggtgaccagtgtacctgatgttgctgtctgtgagacactgctgaaccagcttcgcagtggcactgtggcttgttcctttgtccaggtgggagg

SEQ ID NO: 725472 - DNA, 120 bp, Artificial Sequence
  ENSG00000198198_8 (sequence is synthesized)
agtttactcttatgactgcagttttggccatgtgcccaatgtggaattaatgaagttcatcgcaatggcaacatttgggtcctacctgtccacttgtcctgagccggagccaggcaacct

SEQ ID NO: 725473 - DNA, 120 bp, Artificial Sequence
  ENSG00000198198_9 (sequence is synthesized)
gggtctgactgtctaccaccgggcatttctcctctattccttcctgcgcagtggggaagcactgaaccctgaatattactgcggctctcagcaccgcctatttaatgagcacctggtctc

SEQ ID NO: 725474 - DNA, 120 bp, Artificial Sequence
  ENSG00000198198_10 (sequence is synthesized)
tgcaagcagcaaccctgccctggccttgcgccggaagaagcacactgagaaggaggtgccagccgacttggtcagcactgtgtccgtacggcttcgagagggctacagtgtccgagaggt

SEQ ID NO: 725475 - DNA, 120 bp, Artificial Sequence
  ENSG00000198198_11 (sequence is synthesized)
cacactggccaaaggagggtcccaattggaggtaaagctggtgctgctgtggaaacacaacatgcgcattgagtatgtggctatggcaccctggcccctggagcctgagggccctcgagt

SEQ ID NO: 725476 - DNA, 120 bp, Artificial Sequence
  ENSG00000198198_12 (sequence is synthesized)
aacacgggtggaagtgacgatggaaggcggctacgacattttgcatgatgtgtcctgtgcactaaggcagcccattcgttcattgtatcgtacccatgttatccggcgtttctggaacac

SEQ ID NO: 725477 - DNA, 120 bp, Artificial Sequence
  ENSG00000198198_13 (sequence is synthesized)
gctgcagagcatcaaccagacagaccagatgcttgcccaccttcagtccttctcctcagtgcctgagcatttcacgcttcctgacagcaccaagagcggagtgccactcttctacatccc

SEQ ID NO: 725478 - DNA, 120 bp, Artificial Sequence
  ENSG00000198198_14 (sequence is synthesized)
tccaggctccaccaccccggtgctctccctccagcccagtggttctgactcatcccatgcccagtttgctgcctactggaagccagtgctgtccatggatgcaaattcctggcagcgatg

SEQ ID NO: 725479 - DNA, 120 bp, Artificial Sequence
  ENSG00000198198_15 (sequence is synthesized)
gctgcacatgcatcgcctggtgctaatcctggagcatgacacaccaatccccaagcacttgcacaccccgggcagcaatgggcgctacagcactatccagtgcaggatctcccactcctc

SEQ ID NO: 725480 - DNA, 120 bp, Artificial Sequence
  ENSG00000198198_16 (sequence is synthesized)
cctgacctctctgctgcgggactggagcagcttcgtactagtcgagggctattcttatgttaagctgctctccagtgccccagaccagccccccaattccttctacatggtccgtatcat

SEQ ID NO: 725481 - DNA, 120 bp, Artificial Sequence
  ENSG00000198198_17 (sequence is synthesized)
ttccaaggccccatgcatggttcttcgcctgggttttcccattggcacaccagcaccggcccggcacaagattgtgtcaggcttgagggaagagatcctgcggctgcgtttcccccaccg

SEQ ID NO: 725482 - DNA, 120 bp, Artificial Sequence
  ENSG00000198198_18 (sequence is synthesized)
ggtacaaagcaaggagccaacgcccaaggtgaaacgaaaagggctagggggtgctggtgggggcagctctccctccaagtcaccccccgtgctggggccacagcaggccctgtctgaccg

SEQ ID NO: 725483 - DNA, 120 bp, Artificial Sequence
  ENSG00000198198_19 (sequence is synthesized)
gccctgccttgtggtcctgcataagccactggacaaactgctcatcaggtatgagaagctgcccttggactaccgggcacccttcttgctgacattggagccaccaggtccactgccctt

SEQ ID NO: 725484 - DNA, 120 bp, Artificial Sequence
  ENSG00000198198_20 (sequence is synthesized)
ggtgtcaggccgctcagcctcttctagcctggcgtcactgtcccgctacctctaccatcagcgctggctttggagtgtcccgtcaggactggcccctgcgctgcctctcagtgccattgc

SEQ ID NO: 725485 - DNA, 120 bp, Artificial Sequence
  ENSG00000198198_21 (sequence is synthesized)
ccagctcctctccatcctcactgaagtccgactttctgaaggattccacttcgcctgcagtggggaaggaatcatcaacatggttctggagcttccaattcagaatgaaccaccagggca

SEQ ID NO: 725486 - DNA, 120 bp, Artificial Sequence
  ENSG00000198198_22 (sequence is synthesized)
ggctgcagctgaagagaagcacacctgtgttgtccagtacatcctcttccccccacactctacctccaccaaagacagcttctcgacagatgatgacaatgatgtggaagtggaggccct

SEQ ID NO: 725487 - DNA, 120 bp, Artificial Sequence
  ENSG00000198198_23 (sequence is synthesized)
ggagggagactcagagctcaatctggtcactgaggtgtgggtggagccacagtatgggcgagtgggacctggccctggaatctggaagcacctccaggacctgacgtattctgagatccc

SEQ ID NO: 725488 - DNA, 120 bp, Artificial Sequence
  ENSG00000198198_24 (sequence is synthesized)
gcaagctctccacccacgggatgctgcctgcataggctccatgctgagctttgaatacctgatacagctgtgtcagagcaaggaatggggtcctctgcccccagagccgagggtctctga

SEQ ID NO: 725489 - DNA, 120 bp, Artificial Sequence
  ENSG00000198198_25 (sequence is synthesized)
tggattggatcagggaggagacacctgcgtccatgagatccctttccattttgacctaatgggattgctgccacagtgccagcagctccagatgttcttcctcttgcttgccagaggtgc

SEQ ID NO: 725490 - DNA, 120 bp, Artificial Sequence
  ENSG00000198198_26 (sequence is synthesized)
cgaggggccactgctgggggttcatgggatcccgaaggagcaagcagtcggcagcacccaggccacaggagactccgcttttacttccctgagtgtaggtcttcctgaaactctcaagcc

SEQ ID NO: 725491 - DNA, 120 bp, Artificial Sequence
  ENSG00000198198_27 (sequence is synthesized)
tctcatctctgcccagccccctcagtggcgctgctatgcaaggcttgtgaacccccagcatgtgtttctgacttttctcccagctaccttctcagatgtccagcgtctggctgcctgtgg

SEQ ID NO: 725492 - DNA, 120 bp, Artificial Sequence
  ENSG00000198198_28 (sequence is synthesized)
cctggagggaccccctcaagaggagacaaagcctaagtttggggattggagtggggctcccagtctgaaagatctaggaggaactgggatcaaagctacaaagtcccacgtccctgtcct

SEQ ID NO: 725493 - DNA, 120 bp, Artificial Sequence
  ENSG00000198198_29 (sequence is synthesized)
cagtgtgaccctggctagtgacaatgcccagaatcaaggagagctaagtccaccattccgtcgagacttacaggcttacgctgggcgtcaggcttcccagacagagagtgcggatgggcc

SEQ ID NO: 725494 - DNA, 120 bp, Artificial Sequence
  ENSG00000198198_30 (sequence is synthesized)
ccggacccggtgtcctgtctacatctacagctgttcactggaagcgctgagggaacaaatggttggcatgcagccccctcaggcgccccgagacctcatcttccggactcagttcctcga

SEQ ID NO: 725495 - DNA, 120 bp, Artificial Sequence
  ENSG00000198198_31 (sequence is synthesized)
ccacccctccccatcctcagcctggatggaaccccggtacaaggaggcagctaaccactgtgccctgctgcaggagcatgcacagcggtgctatgtccgtgggctattccgcagcttgca

SEQ ID NO: 725496 - DNA, 120 bp, Artificial Sequence
  ENSG00000198198_32 (sequence is synthesized)
gcaagcacagagtgtgacctcccaggatttgctgacagcggtagatgcctgtgaggagctactacaagaaatagacatcaccccatttctccttgcattgtgtggccacacttggggttt

SEQ ID NO: 725497 - DNA, 120 bp, Artificial Sequence
  ENSG00000198198_33 (sequence is synthesized)
gcctcatgcacccccaagtcctggtcctctcagccctgggcccttcagcagcagcatggaggagggtgctgaacctcgggaacgagctatcctagcttctgaatccagcatagagaccga

SEQ ID NO: 725498 - DNA, 120 bp, Artificial Sequence
  ENSG00000198198_34 (sequence is synthesized)
ggacctaagcgagcctgagtttcagagcacccgtgtccctggcattccagaccctgggccagagatctctctgacagatgtctgccagctcagaggagaggcccatggtgcccttcatag

SEQ ID NO: 725499 - DNA, 120 bp, Artificial Sequence
  ENSG00000198198_35 (sequence is synthesized)
cgtcatccaggagaagttcctagagatcagtcgtctccacttccgcacagtgccttccaatccccactacttcttctattgccctccatccagcaggcgagaagatgaggggcctcggga

SEQ ID NO: 725500 - DNA, 120 bp, Artificial Sequence
  ENSG00000198198_36 (sequence is synthesized)
cacagtagacagaaaaatcagtgacctggagttttcagaggctgagcttatgggagaagaaggagacacatctgcctgctgtgtggtcactgagagtgacccagagctagaggtagaata

SEQ ID NO: 725501 - DNA, 120 bp, Artificial Sequence
  ENSG00000198198_37 (sequence is synthesized)
ccgggagagccgtgaatcagacctggggcctgctgggctagactctgcctcgctgtcagacgtagacactgtgaatcctgatgaagactccttcagtatcttggggggcgactcacccac

SEQ ID NO: 725502 - DNA, 120 bp, Artificial Sequence
  ENSG00000198198_38 (sequence is synthesized)
tgggcctgagagcttccttcatgacctgccaccgctcttcctgcacctcacgtgctccgtgcggctacgtgggcagcacagctcagtacctgtgtgcagcctgcctacctgcctgggcca

SEQ ID NO: 725503 - DNA, 120 bp, Artificial Sequence
  ENSG00000198198_39 (sequence is synthesized)
ggtgctttccagtctggagggccccccagttggaggccgagttcccttgagggacctcagtgtgactctggatgtcttcatgctgactttgcccctggaagtggagctccccacggcctc

SEQ ID NO: 725504 - DNA, 120 bp, Artificial Sequence
  ENSG00000198198_40 (sequence is synthesized)
ggaccctcagcaccaccggtcaacatctgaaagcagtgcttcatttccacgatccccagggcagccatcatctttaaggtcagatgatggcctcgggcccccactgccacccccagaaga

SEQ ID NO: 725505 - DNA, 120 bp, Artificial Sequence
  ENSG00000198198_41 (sequence is synthesized)
ggagaggcacccaggactatccaatttggccacgccccacagactggctattgagaccaccatgaatgagatccgctggttgttggaagatgagatggtgggggcactccgaagaggggg

SEQ ID NO: 725506 - DNA, 120 bp, Artificial Sequence
  ENSG00000198198_42 (sequence is synthesized)
catcccacagagtcctgccctgcaccgcgcagctgcccatatccatagttctcctggacgctccacctgccttcgccaaactctgccactgagttttgtatttgggccagagcgttccct

SEQ ID NO: 725507 - DNA, 120 bp, Artificial Sequence
  ENSG00000198198_43 (sequence is synthesized)
cacacaattcaaggaggagttccgccgcctccatctccctggccatgttcttcttgaagaccctgacagtggcttcttctttgtggcagctggccaacagccaggtgggtcccatgggga

SEQ ID NO: 725508 - DNA, 120 bp, Artificial Sequence
  ENSG00000198198_44 (sequence is synthesized)
gccttcttcagcggcctgggcttggcacagtcatgaggacagggctgaaggcatcgaaggggagaccctgacagccagcccccaagcacctgggtccccagaggattctgagggtgtccc

SEQ ID NO: 725509 - DNA, 120 bp, Artificial Sequence
  ENSG00000198198_45 (sequence is synthesized)
cctcatcagcctgccccgcgtgccacagggagggagtcagcctgggcccagccggggattaagtctcatgtccagtcagggcagtgtggactcagaccacctaggttatgatggtggcag

SEQ ID NO: 725510 - DNA, 120 bp, Artificial Sequence
  ENSG00000198198_46 (sequence is synthesized)
cagtggctcagacagtgagggtcccaatgacacccttggtgagaaggcccccttcacattgcggactccacctgggccagcacctccacagccttcactctcaggcctccctgggccctg

SEQ ID NO: 725511 - DNA, 120 bp, Artificial Sequence
  ENSG00000198198_47 (sequence is synthesized)
cctgcctgacttctggctcattgtccgggtcctgcaggaccgtgtggaagtgtatgcacatgcacggagcctgattcgggaggatggggggccgggcactgagtgtcgccacctgcagca

SEQ ID NO: 725512 - DNA, 120 bp, Artificial Sequence
  ENSG00000198198_48 (sequence is synthesized)
gctcctggtgaggcgagttggggagatctgcagggaggtcaaccagcgactgcttcttcaagaccttcatgacagccacgtgtgtaactctcttctggtggccgagagtgaagaagatct

SEQ ID NO: 725513 - DNA, 120 bp, Artificial Sequence
  ENSG00000198198_49 (sequence is synthesized)
gtggcgcagtgagactcccttccactcccgtcagcgggcaccactgcccagtgatgattatgctgctgatgagagctgtgcgccccgtgggtacctggcagccacaatgcagtttgtccc

SEQ ID NO: 725514 - DNA, 120 bp, Artificial Sequence
  ENSG00000198198_50 (sequence is synthesized)
tggccatttctcctgtgacgttgtgtggggaactgtgatccgagtccattcacgcctcaaaatggggcccagcatgggggtctctcgggccatccaggccctgcgctctgtgctcaatgc

SEQ ID NO: 725515 - DNA, 120 bp, Artificial Sequence
  ENSG00000198198_51 (sequence is synthesized)
cttctctgtggtgaaccggaaaaacatgtttgtttaccaggagcgagcaacaaaggctgtgtactatcttcggctcctagagacatcctgcagtgaccggccatggaaaggggatgcgct

SEQ ID NO: 725516 - DNA, 120 bp, Artificial Sequence
  ENSG00000198198_52 (sequence is synthesized)
gcccccttccctcgctctgtcccgaagccaagagcccatctactctgaggaagcctcgggtcctcgttctcccttagacatggtctctagccgcagttcagatgctgctcgtcctgtggg

SEQ ID NO: 725517 - DNA, 120 bp, Artificial Sequence
  ENSG00000198198_53 (sequence is synthesized)
ccaagtggacagacatatccagctgctggtccatggtgttgggcaggcaggtcctgagatcacggatgagctcgtgcgagttctatgtcggcgcctggatgaggccacgctggacgtcat

SEQ ID NO: 725518 - DNA, 120 bp, Artificial Sequence
  ENSG00000198198_54 (sequence is synthesized)
cacagttatgcttgttcggaactgcaagctgacaccagctgatgtggagttcatccagccccctggaagtctcccctcagaggtgctgcatctggccctacccacctcctgcaggccctg

SEQ ID NO: 725519 - DNA, 120 bp, Artificial Sequence
  ENSG00000198198_55 (sequence is synthesized)
gcttccagccctggcatggtacctacggcagaacttgctcatcttcctgcactctcccaagtacacagatagcaacagccggaaccacttccaacatccactcccaccacagggtggcct

SEQ ID NO: 725520 - DNA, 120 bp, Artificial Sequence
  ENSG00000198198_56 (sequence is synthesized)
ccctgacttggacatctacttgtataacaagcctggtggacagggcactgggggcaaaggggttgcctgcatcactctagcctttgtggatgaaggaggggcccccttgtcactggcgtt

SEQ ID NO: 725521 - DNA, 120 bp, Artificial Sequence
  ENSG00000198198_57 (sequence is synthesized)
gtggcccccctcctctccggggcccccagacccactgcgagaggaggaatttgagcaactgacccaggtcatccgctgcccggttgttgtggacagttcttcagctcagaatggggcccc

SEQ ID NO: 725522 - DNA, 120 bp, Artificial Sequence
  ENSG00000198198_58 (sequence is synthesized)
gctggaggagaaactccgaggagcagctcgccaggccctggccgatgccatcatcgagcttcagctgctgccagcttcactatgtacagaggacacacccacaggaagtctcaggaacgg

SEQ ID NO: 725523 - DNA, 120 bp, Artificial Sequence
  ENSG00000198198_59 (sequence is synthesized)
atcgttggaaactaagagctctgcaggccgagctagcacctttccccctgcccctgtccctggggagcctgtgactccacccagcaaagcgggccggcgtagcttctgggatatgctgag

SEQ ID NO: 725524 - DNA, 120 bp, Artificial Sequence
  ENSG00000198198_60 (sequence is synthesized)
taaaacagaatgtggggatttgggttcccccaaaacaactgatgacattgtcctggatcggccagaagacactcggggccggaggcgtcacaaaaccgagagtgttcggactcctggtgg

SEQ ID NO: 725525 - DNA, 120 bp, Artificial Sequence
  ENSG00000198198_61 (sequence is synthesized)
agctgagcgggcgccaggctcagattctggagcccagagacaaaagcgccggacaacacagctagaagagggtgaggtggggacccttcatcctgtgtttgcccgtgttgctcagcgctg

SEQ ID NO: 725526 - DNA, 120 bp, Artificial Sequence
  ENSG00000198198_62 (sequence is synthesized)
gatggagtttatggttcagattggttgtgcctcagtgtccagaagctctgcccacatggtgtcccggttcctccttccatccatcctgtctgagttcaccgcactggtcacctcaatggc

SEQ ID NO: 725527 - DNA, 120 bp, Artificial Sequence
  ENSG00000198198_63 (sequence is synthesized)
tggagacaccagtgtccgcatctttgagcagcatttgggttcagagccagagatcttcggcccttgttcccctgggcaactgggcccctctccccgccctgcagctgagcggcatctgct

SEQ ID NO: 725528 - DNA, 120 bp, Artificial Sequence
  ENSG00000198198_64 (sequence is synthesized)
gcttctgggaaggaacttcttgcagtggaggagaccaacacagcaggctgccaaagccatgcagcgcttcgagccaggaggtgatgggagctcagggcgaaatgctccccggcagaggct

SEQ ID NO: 725529 - DNA, 120 bp, Artificial Sequence
  ENSG00000198198_65 (sequence is synthesized)
cttgctactagaggttgtggacaagaagctacagctgctgacctacaactgggctccagacctgggggcagcattgggccgagcgctggttcgcctggtgcagtggcagaatgcacgagc

SEQ ID NO: 725530 - DNA, 120 bp, Artificial Sequence
  ENSG00000198198_66 (sequence is synthesized)
ccatctcatcttctgcctactcagccagaagcttggcctcttccatcattatggccagttggacttccccgtgcgagatgaaaaggagccaaacccattcctgctgccgaccatggaagt

SEQ ID NO: 725531 - DNA, 120 bp, Artificial Sequence
  ENSG00000198198_67 (sequence is synthesized)
ggagaccctcatccggagtgcaagtcccccgctgagccgtgagcagggccgactgagtgggtcctctcgtggtgggggtcctcttcccctggacacattcccctttgacgaggccctaag

SEQ ID NO: 725532 - DNA, 120 bp, Artificial Sequence
  ENSG00000198198_68 (sequence is synthesized)
ggatatcacggctgcccgccccagctccgtacttggtcctgtgcccagacctcctgatcctgtcacctaccatggacaacagttcctagagatcaagatggcagagcgcagagagctgga

SEQ ID NO: 725533 - DNA, 120 bp, Artificial Sequence
  ENSG00000198198_69 (sequence is synthesized)
gcgccagatgaagatggaaaacctgtttgtaacctggcagcagcgttctaccccagccaccatgcccatcagtgctggagagctggagaccctgaagcagtcatcccgcctggtgcatta

SEQ ID NO: 725534 - DNA, 120 bp, Artificial Sequence
  ENSG00000198198_70 (sequence is synthesized)
ctgtgcaacagccatgctcttcgacccagctgcctggctgcatgggcccccagagacctctggaccccctgacgggcagcggcgccatcgccctgagtcagggtctgggagccgagaggc

SEQ ID NO: 725535 - DNA, 120 bp, Artificial Sequence
  ENSG00000198198_71 (sequence is synthesized)
ccccacaagctgtgaatccttggatgtgtcgcccccgggagcccgtgaggagccttggctgaaggagctgagcttggctttcctgcagcaatatgtgcagtatctgcagagcataggttt

SEQ ID NO: 725536 - DNA, 120 bp, Artificial Sequence
  ENSG00000198198_72 (sequence is synthesized)
tgtgctggtaccactgcggcccccctcacccgcccgcagcaccagccggccacgggccatggctatccttggaacagagggtcgaggctccttctcctgccctaaaaccaagactgatgg

SEQ ID NO: 725537 - DNA, 120 bp, Artificial Sequence
  ENSG00000198198_73 (sequence is synthesized)
gagccccaagagcactagctctccggtaaccacctaccacctgcagcgggcactgcctgggggcatcatcctcatggaactggcattccagggctgttacttctgtgtcaaacagtttgc

SEQ ID NO: 725538 - DNA, 120 bp, Artificial Sequence
  ENSG00000198198_74 (sequence is synthesized)
cctggaatgttcccgaatcccaatggggcaggctgtcaactcacagctgtccatgctgttcacagaggagtgtgacaaggtgcgggacctgatgcacgtgcactcgttcagctatgactt

SEQ ID NO: 725539 - DNA, 120 bp, Artificial Sequence
  ENSG00000198198_75 (sequence is synthesized)
ccatctgcgcctcgtgcatcagcacgtgctaggtgcccatctggtgctgcggcacggctaccacctcaccacctttctgcgacacttcctggcccaccaccctgacggaccccactttgg

SEQ ID NO: 725540 - DNA, 120 bp, Artificial Sequence
  ENSG00000198198_76 (sequence is synthesized)
ccgcaatcacatttaccaagggacattggagctccccacaccactcattgctgcccaccagctatacaactacgtggctgatcacgccagctcttaccacatgaagccattgcgaatggc

SEQ ID NO: 725541 - DNA, 120 bp, Artificial Sequence
  ENSG00000198198_77 (sequence is synthesized)
ccggccagggggcccagaacacaacgagtatgccctggtgtcggcatggcacagttctggctcctacctggactctgagggacttcgacaccaggatgactttgatgtgtctctgcttgt

SEQ ID NO: 725542 - DNA, 120 bp, Artificial Sequence
  ENSG00000198198_78 (sequence is synthesized)
ctgtcactgtgctgcaccctttgaggagcaaggagaggctgagcggcacgttctgcggctacagttcttcgtggtgctcaccagccagcgagagctcttccccaggctcactgctgacat

SEQ ID NO: 725543 - DNA, 120 bp, Artificial Sequence
  ENSG00000198198_79 (sequence is synthesized)
gcgccgcttccggaagccacccagactgccccctgagccagaggctcctgggagttcagctggcagccctggggaggcctcagggcttattctagcgcctggaccggctcctctgttccc

SEQ ID NO: 725544 - DNA, 120 bp, Artificial Sequence
  ENSG00000198198_80 (sequence is synthesized)
accactggctgcagaggtgggcatggcacgagcacggctggctcagctggtgcggctggctggagggcactgccgtcgggacaccctttggaagcgcctcttcttgctggagccaccggg

SEQ ID NO: 725545 - DNA, 120 bp, Artificial Sequence
  ENSG00000198198_81 (sequence is synthesized)
gcctgatcgactgcggctaggggggcgcctggccctggcagagctggaggaactcctagaagcagtccatgccaaatccattggggacatcgacccccagctggactgcttcctatccat

SEQ ID NO: 725546 - DNA, 120 bp, Artificial Sequence
  ENSG00000198198_82 (sequence is synthesized)
gacggtctcctggtaccagagcctgatcaaagttctcctaagccgcttcccccagagctgtcgccatttccaaagcccagacttgggaactcagtacctggttgtgctgaatcagaagtt

SEQ ID NO: 725547 - DNA, 120 bp, Artificial Sequence
  ENSG00000198198_83 (sequence is synthesized)
cactgactgctttgtgctagtgtttctggactcccacttaggaaagacgtctctgacagtggttttccgagagcccttcccagtacagccccaggacagcgagagcccccctgcccaact

SEQ ID NO: 725548 - DNA, 120 bp, Artificial Sequence
  ENSG00000198198_84 (sequence is synthesized)
ggtctccacctaccaccacctggagtctgtcatcaacacagcctgtttcaccctctggacccgcctcctctgagggagtggactggaccactgaatgtcactgttccttgaatcatgggc

SEQ ID NO: 725549 - DNA, 120 bp, Artificial Sequence
  ENSG00000198198_85 (sequence is synthesized)
ctaccagattgcctgccagaggcaggactgaccagcccttctgggccccagggcaagccagacactgagtgacaccaaaggctttgtaactatgtcttgagggtctgctgccccagcctg

SEQ ID NO: 725550 - DNA, 120 bp, Artificial Sequence
  ENSG00000198198_86 (sequence is synthesized)
gcagcaggaaccgccctccccaaacacccacagccactgacccatccaggactccagagagtcaggtcaaccccgaggaccccttgggcccttctggggtactcctttcggcccccctgg

SEQ ID NO: 725551 - DNA, 120 bp, Artificial Sequence
  ENSG00000198198_87 (sequence is synthesized)
tagagtctcgggagttcacacagggtggcaaacaccccctagagctcctctgcctgaatcctgccccctagcctttgaccactgtcagccacctgtgtcccttgagccttcgggtcttca

SEQ ID NO: 725552 - DNA, 120 bp, Artificial Sequence
  ENSG00000198198_88 (sequence is synthesized)
cttcccacttggacatcactgctggacattcccatcgagatgacacctgggttccaatcccagctctgcctttgaagcacttgtggccaccgtcaagtccctttgctctcggaccctggg

SEQ ID NO: 725553 - DNA, 120 bp, Artificial Sequence
  ENSG00000198198_89 (sequence is synthesized)
tttctcatcctttaatgaggtgggttcagaagctctcccatcttcacagcaaccctggcactggcttctcaatgggagggaagcagcagagaaactgaagtgttagacactatgtgtccc

SEQ ID NO: 725554 - DNA, 120 bp, Artificial Sequence
  ENSG00000198198_90 (sequence is synthesized)
accaccccattacagagacatatgacaatgttcagcaggtcatctttaatgcagaggaggagatgggatgtcactcgctgtctggaggcacgtgggtggtgtgcgggccctcactggcca

SEQ ID NO: 725555 - DNA, 120 bp, Artificial Sequence
  ENSG00000198198_91 (sequence is synthesized)
gcctctgggtggccccgcctatcccagtatgaacgtagccaactcaagccctctactgtgtctcctgcagggagagggaggcctcggcacctcagcccacaaggagaaaacagcccctgt

SEQ ID NO: 725556 - DNA, 120 bp, Artificial Sequence
  ENSG00000198198_92 (sequence is synthesized)
ccgggtccctccagagctcccttccccagggccacgcctcacctcgaggctgatactcacagcccacgaagcctttgtagccttcatcttccagcagttgaaacagataggggaaattca

SEQ ID NO: 725557 - DNA, 120 bp, Artificial Sequence
  ENSG00000198198_93 (sequence is synthesized)
gctctccggggctgctgggctcccctcggcctgggacctgtgccacctgcacatgccctggggacagatgtggacaaatgtggggtccaggctcctgccagggcctgaaggacagatgtg

SEQ ID NO: 725558 - DNA, 120 bp, Artificial Sequence
  ENSG00000198198_94 (sequence is synthesized)
gggattgaaagggtgggagggcaaaggaaggtcctctcaccaacaatgggcaggaactcccggatgtttcctgtcaggttcccatccatgatctgccagtggaatatgtcctagggaaga

SEQ ID NO: 725559 - DNA, 120 bp, Artificial Sequence
  ENSG00000198198_95 (sequence is synthesized)
ggatactacattccgagaccccgcaggccccgccctccttccgatctgcgaagtacccccttccacttaccatttgtaattggaggttgggtcttcctaccttctgtaagatggctgccg

SEQ ID NO: 725560 - DNA, 120 bp, Artificial Sequence
  ENSG00000198198_96 (sequence is synthesized)
ctgtaagagaagccagggaggggaccgtgagcctcaagagcacaggaatcaaaagggacagaaggagagacagggctggggtcgtaccctgctggggcgtgtccaggaagtactgggggt

SEQ ID NO: 725561 - DNA, 120 bp, Artificial Sequence
  ENSG00000198198_97 (sequence is synthesized)
cagtgatgcgggtgttgatgggctccagcagtcccacgaggtcctcctagcagcatgtcgggtgctgtgaatagagctccttcccaagtttgtcccccatcagtcagtcactggtcaagg

SEQ ID NO: 725562 - DNA, 120 bp, Artificial Sequence
  ENSG00000198198_98 (sequence is synthesized)
ccctcacctgttcctctgacctaggctggcagcctcacgtgctgtccccactgtgcacccccttctccgcacacccacagagacatgtaagtacgtgtgtgtttccacctttctcacctg

SEQ ID NO: 725563 - DNA, 120 bp, Artificial Sequence
  ENSG00000198198_99 (sequence is synthesized)
agccaaaaccccagctgcatgcctcaggttctccagaaaaacggcctccatctcagccttgactgctattcgatcagctccctggggtactcggccagccatcaggtggatcctgtgggg

SEQ ID NO: 725564 - DNA, 120 bp, Artificial Sequence
  ENSG00000198198_100 (sequence is synthesized)
aagatggactggaggccttgcctcccttggctctctctgcacctcttccaggattccctgactgtgccagccctcgtccgtctccccaggtctccagtccatggcacctgggtcacgatg

SEQ ID NO: 725565 - DNA, 120 bp, Artificial Sequence
  ENSG00000198198_101 (sequence is synthesized)
cccaggtatcccagcactttcagagacacttcagtgatggctgaggggcaagccctttcccagacatctcagtgtccacccaccgcctcctgcctccagtactttccaaaacctttcctt

SEQ ID NO: 725566 - DNA, 120 bp, Artificial Sequence
  ENSG00000198198_102 (sequence is synthesized)
ccctcggtccttctccgcaacctgtaacctgctaaattctcacctttaaaaattgtcctgacctttgcttgcccttctcaggtattccatgctgctgtctctacttcctctcctcgcatc

SEQ ID NO: 725567 - DNA, 120 bp, Artificial Sequence
  ENSG00000198198_103 (sequence is synthesized)
tacttagccttttcccatctgttttctgcccccaccattgaccagtagtgatcccctcttgccagttccttctgagcctgtttggcctctgcaggatttgacatttgaatcagccccact

SEQ ID NO: 725568 - DNA, 120 bp, Artificial Sequence
  ENSG00000198198_104 (sequence is synthesized)
ttgagccgtccacctcctcccatcatcccctgatcttagccacatccagctccaagcagacattccaggcctccccatcccaacaggctacatacatgtccagcctcaggaacgctgcca

SEQ ID NO: 725569 - DNA, 120 bp, Artificial Sequence
  ENSG00000198198_105 (sequence is synthesized)
aatacaccaggcctcctcttgccacagcacccttgcaaggaacactcaacttcctgcccatcaagcaatgcccactccttgaagacagtccaagcatcactacctgtaagcagctttctc

SEQ ID NO: 725570 - DNA, 120 bp, Artificial Sequence
  ENSG00000198198_106 (sequence is synthesized)
tgatccagacagggttaggtgcctaccctgctcccacagcttcctggaataggcctgtcctcaaatgcatcactgtatatatttactctcctatctgcctaggcagactgagctcccagc

SEQ ID NO: 725571 - DNA, 120 bp, Artificial Sequence
  ENSG00000198198_107 (sequence is synthesized)
atgggatcccagcatggggtgagcatgaaagagtggcaaacagagtggcataagacagataaaatacaaaaggcaatttacaaaggaccaggaccgcagaggcagagataaaccagtggg

SEQ ID NO: 725572 - DNA, 120 bp, Artificial Sequence
  ENSG00000198198_108 (sequence is synthesized)
ctcagacttctgagcgtctcagatctggcgtcctcgactccctgaacctgcatcagggtcatgggtcacaggggtgggggtggggtggagcggggtacctgggacagcccagggctttgg

SEQ ID NO: 725573 - DNA, 120 bp, Artificial Sequence
  ENSG00000198198_109 (sequence is synthesized)
cataccgcacggcctgctccagtccctctcggaaggccgcctgtctcccggggacggcccccagccccatttcccccttctcttggtctcctgcagagagaacgggcctcagcccccggc

SEQ ID NO: 725574 - DNA, 120 bp, Artificial Sequence
  ENSG00000198198_110 (sequence is synthesized)
agagaacgggcctcagcccccggctcggacactcccctgcccgcgccccggcaccccccagccctcccagccctcccggcccgcgacgcacccgggggcgtgttgatcagtacaagccgc

SEQ ID NO: 725575 - DNA, 120 bp, Artificial Sequence
  ENSG00000198198_111 (sequence is synthesized)
gccagcgcctcaggcgtctccgcgtacggccaggccacctcgacggcctcgaagcccgagctgcccgcggcccgcacccgcgcggggaggccggagagctcggggaatagccaggacaga

SEQ ID NO: 725576 - DNA, 120 bp, Artificial Sequence
  ENSG00000198198_112 (sequence is synthesized)
ggagagctcggggaatagccaggacagattggcggagaagcgcagcggcgccatgcctggggaggccgggccgggcggagtccgcgggatccaaaggcggcgggcggcgggcggcgggcg

SEQ ID NO: 725577 - DNA, 120 bp, Artificial Sequence
  ENSG00000198198_113 (sequence is synthesized)
gccctgcgaacgaacgagcactgttcgtggttagaaaagcgaagtgctgtaaaaacccgggccttcacgaaaagcgcctacggttagcgagagagggatcacggggagaggcgaaggggc

SEQ ID NO: 725578 - DNA, 120 bp, Artificial Sequence
  ENSG00000198198_114 (sequence is synthesized)
ggagcgagggcggccggaaaaggagcaggacccgcgcctggagaaggtagggaggccgagctccagggcctgagagccggacgcgaagcaagagagagctggctgcccgagggcccggtt

SEQ ID NO: 725579 - DNA, 120 bp, Artificial Sequence
  ENSG00000198198_115 (sequence is synthesized)
gcaatgatgggacgcgcactttaatactgagtctttcctctgattataaaaatgctatctgttcgttaagcaacatttgaaagctgtatgaccaaataaagaagcacttttataccgcca

SEQ ID NO: 725580 - DNA, 120 bp, Artificial Sequence
  ENSG00000198198_116 (sequence is synthesized)
tgagttttgaagaaagaattgaggttaaccattcaaagaaggggaaatggacttttctgacagagggaccagcaaaagcaaatacatggtactatgaacctgtactctcaatcacaggtg

SEQ ID NO: 725581 - DNA, 120 bp, Artificial Sequence
  ENSG00000198198_117 (sequence is synthesized)
ttttagggaactacatattattcagtgtcaacagagtaaaatttgaatgtggaaagggatggtaaagaggagactgtagacataagtgggagctggttatgaaaggccatgaatgtgaca

SEQ ID NO: 725582 - DNA, 120 bp, Artificial Sequence
  ENSG00000198198_118 (sequence is synthesized)
ctaaggactttgtgctttattctatgggggagttcagtgtggaggataagagcactggatctggaatcacattgcctgtgtttgcttcctggcagtaccacttactggttgtgtgtcctt

SEQ ID NO: 725583 - DNA, 120 bp, Artificial Sequence
  ENSG00000198198_119 (sequence is synthesized)
gagcaagttacttaacctttctgtgcatctgtgacctttttccaaaggggatattaacattgcttatatcatatggtgattgaattaatacatgtcaagcacttagaactgtgcttgcca

SEQ ID NO: 725584 - DNA, 120 bp, Artificial Sequence
  ENSG00000198198_120 (sequence is synthesized)
gggtgtccctttcgccgaggggtcctgtcctgccaacgacatggtgctgtgcctgctgcacagctgcctggggcaggagctgagtgaccgggagatcccactgacccccgttgaccaggc

SEQ ID NO: 725585 - DNA, 120 bp, Artificial Sequence
  ENSG00000198198_121 (sequence is synthesized)
gtagcagaggcttagtctccacctccccactgagcactgtttttgcctcccttgaagcagcagctgctatggagagagcccagccttgcagtctagacctggactccaagcccagccttg

SEQ ID NO: 725586 - DNA, 120 bp, Artificial Sequence
  ENSG00000198198_122 (sequence is synthesized)
ccactcacagtggcagctttgtgggtctgtttcctcccttgcaaaatgattccatataaaacagattctgggtctgatcaccatgactgcatgccactagcctgcctcatcctcttatcc

SEQ ID NO: 725587 - DNA, 120 bp, Artificial Sequence
  ENSG00000198198_123 (sequence is synthesized)
gaggagcaaggagaggctgagcggcacgttctgcggtcagcagatcccctaccttgaacatgcccatttcccagcctgccccaccctgccctgtgtgtctcttgctacaaccaccactct

SEQ ID NO: 725588 - DNA, 120 bp, Artificial Sequence
  ENSG00000198198_124 (sequence is synthesized)
cctgcaccctcatgctcccattaacctcttctctctgctcccacagtacctctctccagtgttgttagaagtaagacttgggactgagagcttgggtagagatccaacttgtattcttag

SEQ ID NO: 725589 - DNA, 120 bp, Artificial Sequence
  ENSG00000198198_125 (sequence is synthesized)
gttggtggttcccgatcacttcccacatcttacagctaagcacatcacattcaactgtcttatagatgagagtcgaaaagctgatggggattttggcttctcgctgagcattaacaacat

SEQ ID NO: 725590 - DNA, 120 bp, Artificial Sequence
  ENSG00000198198_126 (sequence is synthesized)
ttggcttctcgctgagcattaacaacatctaaggatcagagcagctttagaagttcgtgtataaaaataaagcataataaggctgggcgtggtagctcatgcccgtaatcccagcacttt

SEQ ID NO: 725591 - DNA, 89 bp, Artificial Sequence
  ENSG00000198198_127 (sequence is synthesized)
gagattgtgccactgcactccagctgtaataaggcataatagctaatatttatcaagtgcatactatgtggtaggcactgttctggtgc

SEQ ID NO: 725592 - DNA, 120 bp, Artificial Sequence
  ENSG00000198198_128 (sequence is synthesized)
ttatcaagtgcatactatgtggtaggcactgttctggtgcttacatgaatccactcatttatctacataaccctacggcgtattaatgtccttatcatatgggtgaagaaactgaagcac

SEQ ID NO: 725593 - DNA, 120 bp, Artificial Sequence
  ENSG00000198198_129 (sequence is synthesized)
aggccagttaaatacttgcccaaggccacagtaagtgacagagccaggattcctgcataggcatcagttcactactgctctcatctcgggtgggtggcatatgcagggtaaggtggggct

SEQ ID NO: 725594 - DNA, 120 bp, Artificial Sequence
  ENSG00000198198_130 (sequence is synthesized)
gagaagaaaggaagaccaccattctgaagaagacttgagaagaaagaagaggtgcacagcataaaggagcctcagtgtggtacccgtatgggagctggtgaagcaagcgtggagcctcgg

SEQ ID NO: 725595 - DNA, 120 bp, Artificial Sequence
  ENSG00000198198_131 (sequence is synthesized)
catccagaactgctcttgagaattccgtctcttccatttcccaccaggtttacctctgtccaagcctgctcccttttcatggtttctcttggccccacctccatgactttctctccccct

SEQ ID NO: 725596 - DNA, 120 bp, Artificial Sequence
  ENSG00000198198_132 (sequence is synthesized)
cgtgatacgtataactgcagttatgtcatatacatatcatgccattacatataactcctccccactgcagttctggtcagattatccttccttcccaggagcctgattcgggaggatggg

SEQ ID NO: 725597 - DNA, 120 bp, Artificial Sequence
  ENSG00000198198_133 (sequence is synthesized)
gacacatgttaagtgagccataaatactagctggaggctccagaccctctgggacttctcttagaacctcctattactctgccctgggtccctcctctagttcctgctgtgctcgggtct

SEQ ID NO: 725598 - DNA, 120 bp, Artificial Sequence
  ENSG00000198198_134 (sequence is synthesized)
gggtagggggaccactaagcgaatctagagcacttggggactaaggagaccttgaggagtccaagaatgaagtaaggaggaggccctggtaggatagtaactcctgacctttgacttgtt

SEQ ID NO: 725599 - DNA, 120 bp, Artificial Sequence
  ENSG00000198198_135 (sequence is synthesized)
aatcaccaatcactaagtcttgtcccagtttccttgaggtttaaatgggacattttttccaccagaggttttgacccccagcaagaattctggcagtttatagccccttggcgtgagtgg

SEQ ID NO: 725600 - DNA, 120 bp, Artificial Sequence
  ENSG00000198198_136 (sequence is synthesized)
gtccccccaaccccttctgttctgtcccttcttcccagtccctcccctgcttcccttctcccctatcctctgcactaaactgtaacgagcagtaggcctctgaaagcctggaactgccat

SEQ ID NO: 725601 - DNA, 120 bp, Artificial Sequence
  ENSG00000198198_137 (sequence is synthesized)
cccccccaatcaaaagacagcagctttgccctttcagaggaaggtacctaaccaggcatcaagcatctccttgaattttcctaatcaaattgtagacaggcatcaccttcccccttctct

SEQ ID NO: 725602 - DNA, 120 bp, Artificial Sequence
  ENSG00000198198_138 (sequence is synthesized)
caggtgggaagcttgggtgagggtagaagaggtgttagagtcctgcctgtgcagagggacaggattctctcctgggcggggggtatgcatgtgtcctgctctagggtagggagtagtatc

SEQ ID NO: 725603 - DNA, 120 bp, Artificial Sequence
  ENSG00000198198_139 (sequence is synthesized)
cattgagttggaccttagcccatctactggcattgtggtaaaggattgaagggagactgtgggaagaaaggatggggtggggtgtgaggagagggagaggcctgtggggaagtgaaaaat

SEQ ID NO: 725604 - DNA, 120 bp, Artificial Sequence
  ENSG00000198198_140 (sequence is synthesized)
ggtcccagcctaccattttggagagaagacaggcttataaaggaatgatgggtgtttaaaaagagcactgggccagctgtggtgactcatgcctacaatcccagtgctttgggaagccaa

SEQ ID NO: 725605 - DNA, 120 bp, Artificial Sequence
  ENSG00000198198_141 (sequence is synthesized)
atgcctacaatcccagtgctttgggaagccaaggcgggctgattactcgagctcaggagttcgagactagcctgggccacatggcaaaactccctctctataaaaaatacaaaaattagc

SEQ ID NO: 725606 - DNA, 120 bp, Artificial Sequence
  ENSG00000198198_142 (sequence is synthesized)
ccaggaggtcgaggctacagtgagccgggatcaggccactgcgctctagcgtgggcaacaaagcaagaccctggttttgttgtttttgtttccaaaaaacaccccagaaactgttccatg

SEQ ID NO: 725607 - DNA, 120 bp, Artificial Sequence
  ENSG00000198198_143 (sequence is synthesized)
tttccaaaaaacaccccagaaactgttccatgtgtggcactgtatttgggtgtgcgatcatccataagttaagtgtcctactgacccatggaagctgcatgtttctgccctctggttagg

SEQ ID NO: 725608 - DNA, 120 bp, Artificial Sequence
  ENSG00000198198_144 (sequence is synthesized)
tgtttgtccccaaagtcccgagctctgctggcttcttgaacctgttttctagtcatcctcatgagtctctctctccttgagaagaaccagttcctctggacttaaagggctttcctatag

SEQ ID NO: 725609 - DNA, 120 bp, Artificial Sequence
  ENSG00000198198_145 (sequence is synthesized)
acttcgggtcagttggtgttgattggacacctgcctttttcactgctcctgtaaatctctttgattctgaccactggatgtctgttttctccattcccctcttctcctttagttctgttg

SEQ ID NO: 725610 - DNA, 120 bp, Artificial Sequence
  ENSG00000198198_146 (sequence is synthesized)
gatggtttgctgatgcgctggctctggctagtaccctcaggagatggtcttttggaatagttttgtgattttgaaagacagcacataacccagaaatgtaattggtttcaaggatagagg

SEQ ID NO: 725611 - DNA, 61 bp, Artificial Sequence
  ENSG00000198198_147 (sequence is synthesized)
gcacataacccagaaatgtaattggtttcaaggatagaggagggtcattttttgttgttgt

SEQ ID NO: 725612 - DNA, 74 bp, Artificial Sequence
  ENSG00000198198_148 (sequence is synthesized)
attctcctgcctcagcctcccaagtaacggggatgataggcactcaccaccaggcccagcttatttatttattt

SEQ ID NO: 725613 - DNA, 81 bp, Artificial Sequence
  ENSG00000198198_149 (sequence is synthesized)
gtgggtcattttttttttgagggccatgtgaactgttggttataatgctgaccacacagataattacagggcttatccagc

SEQ ID NO: 725614 - DNA, 120 bp, Artificial Sequence
  ENSG00000198198_150 (sequence is synthesized)
ataatgctgaccacacagataattacagggcttatccagcactcaaggaggctatcacaagacactccttttggagaatggccaagtctgttactggaatatctgtttatgacttagata

SEQ ID NO: 725615 - DNA, 120 bp, Artificial Sequence
  ENSG00000198198_151 (sequence is synthesized)
agcattggcccagtttcccctcatctgcttttaactacccttaactcattggtaaaggctttccctgaaactgtccgtgatggctgcattgtcaccttagctatcaaactggatttgaga

SEQ ID NO: 725616 - DNA, 120 bp, Artificial Sequence
  ENSG00000198198_152 (sequence is synthesized)
gataagatattgggaacatgatctaagggtctgaaacatacagcaacaaaattggtgcatacctggatcccagggcagggattgccagccctctgccctagtttaaagtgctttcctagt

SEQ ID NO: 725617 - DNA, 120 bp, Artificial Sequence
  ENSG00000198198_153 (sequence is synthesized)
atagccgttaggactatcagttgtgggctgcatccccagatgggggccaggttttgcaggcactgatagccaaggcagggagagcatggatgttaggtaatcactcaaaacttggttcag

SEQ ID NO: 725618 - DNA, 120 bp, Artificial Sequence
  ENSG00000198198_154 (sequence is synthesized)
gttggcaaacacttaatgaagcctgagctataccaggcctgagcaggtcctgaagacacagatgaatcagaccttgtctttctcctgatgtgaagagttgagattttagtgggggagata

SEQ ID NO: 725619 - DNA, 120 bp, Artificial Sequence
  ENSG00000198198_155 (sequence is synthesized)
agagacttgagcttgtttatattctatagggaaagagccaggggagggggagaggttgaagaatacagaagaggagagatcactgaaggggcaccaggccatgatctgtcttcctaagag

SEQ ID NO: 725620 - DNA, 120 bp, Artificial Sequence
  ENSG00000198198_156 (sequence is synthesized)
tctgcttctgcctggccctgtcttgttaaccagaatgaccgtctttccctggcagggaaatagtcaggaatgaggagtttgggagagtgagaacaagcgggccagttcccaagtaagaga

SEQ ID NO: 725621 - DNA, 120 bp, Artificial Sequence
  ENSG00000198198_157 (sequence is synthesized)
aatccagaggggaggagcctgaaggccagtagaattgccttctgattggctgttcctccagacaggcagccacaggactgctttgggatttctagtcatggtaagggaacatgataatcc

SEQ ID NO: 725622 - DNA, 120 bp, Artificial Sequence
  ENSG00000198198_158 (sequence is synthesized)
actcaagatggtaactgaagtctcgacacttctcccttctcttactcctgatgacctctcacccagacggatagaggaaaagctgaaccataacattcctttgcagttctcctctggttt

SEQ ID NO: 725623 - DNA, 120 bp, Artificial Sequence
  ENSG00000198198_159 (sequence is synthesized)
aaaagtaaaatcagaccactccttatttttaacattctcagcaagtctgtagacaaacgtttctgatatctccaggagaatgcatctctcagcacatcctgggatctcctccatatcgaa

SEQ ID NO: 725624 - DNA, 120 bp, Artificial Sequence
  ENSG00000198198_160 (sequence is synthesized)
gcagagtccccatagttagtggattcccatggtttcaaaggcatcttctgcaaattgaagatgagctaggacaggtgaacaattttacttcagaatgacttccggcagcctaagatgtaa

SEQ ID NO: 725625 - DNA, 120 bp, Artificial Sequence
  ENSG00000198198_161 (sequence is synthesized)
gaccagtcagaacccagacacagcccttcctcattttagtctctccagaatttttccctgaaacccttagcaaccagcattccattccagagcctctgcctttacacagaaacttcagcc

SEQ ID NO: 725626 - DNA, 120 bp, Artificial Sequence
  ENSG00000198198_162 (sequence is synthesized)
tcctgggtagcctgtgtgctgttcacacttgacagcagcttctctgagaaaactgccactttgattcaccagaaggctccctggaaacctgaaaagggtcgaaggaggcattgtactgtg

SEQ ID NO: 725627 - DNA, 120 bp, Artificial Sequence
  ENSG00000198198_163 (sequence is synthesized)
gccatgggctcctgtgtactgccacactaccctttgggtttattggcgtttctgtcttccaaagcccaggacaaagtttatccctcctctgcagctggtgtgcataagcagccataccct

SEQ ID NO: 725628 - DNA, 120 bp, Artificial Sequence
  ENSG00000198198_164 (sequence is synthesized)
gtgttagagtgctactgacatatattatgacagggtcagaatctcttggcatgatcttgaggatttcctcatgctttgcctgccttgatacctctcattagctccttctctaagtctcct

SEQ ID NO: 725629 - DNA, 120 bp, Artificial Sequence
  ENSG00000198198_165 (sequence is synthesized)
tgagatagttctggaagcctttgtgctatatgacctgtgttcctaagggcatgcatctgcctggccctgtcgtgttacccagaatgatcatcatttctctgcaatagtcagggatgagtc

SEQ ID NO: 725630 - DNA, 120 bp, Artificial Sequence
  ENSG00000198198_166 (sequence is synthesized)
tggaggagtgaggacaagtaggccagttcccaggtgagaagtctgtggagggcagagggtggtgtgtcccatttctaatccctgctccccctcacccagattatgctgctgatgagagct

SEQ ID NO: 725631 - DNA, 120 bp, Artificial Sequence
  ENSG00000198198_167 (sequence is synthesized)
gggtctctcggggtatgtgattggcatgagagggcaggtgagcattggaaggatctggaaaaggcagtttcctgagcccatgttattcccccagccatccaggccctgcgctctgtgctc

SEQ ID NO: 725632 - DNA, 120 bp, Artificial Sequence
  ENSG00000198198_168 (sequence is synthesized)
aatgccttctctgtggtgaaccggaaaaacatgtttgtttaccaggagcgagcaacaaaggctgtgtactatcttcggtatgtggcccttggaaggtgggtagggcatgaattaaggatg

SEQ ID NO: 725633 - DNA, 120 bp, Artificial Sequence
  ENSG00000198198_169 (sequence is synthesized)
gcctgggaggaggcatgtccaaagacatgctgctctttcccaggctcctagagacatcctgcagtgaccggccatggaaaggggatgcgctgcccccttccctcgctctgtcccgaagcc

SEQ ID NO: 725634 - DNA, 120 bp, Artificial Sequence
  ENSG00000198198_170 (sequence is synthesized)
aagagcccatctactctgaggaagcctcggcatgtatcactcccactctctgatgcccctgtgttcctcttgcactttgctctctggaaccggggccctgaccacagttttccctgtagg

SEQ ID NO: 725635 - DNA, 120 bp, Artificial Sequence
  ENSG00000198198_171 (sequence is synthesized)
gatacaaaatcaacatacagaaaatcagtagcatttctgtatgtcagcagcagacaatgtgaagaagaaatcaagaaagtaatcccatttacgatagtttaaaataaaatacctaggaat

SEQ ID NO: 725636 - DNA, 90 bp, Artificial Sequence
  ENSG00000198198_172 (sequence is synthesized)
atggtattgttaaaatgcccacactgcctaaagcagtctacagattcagtacaattcctatcaaaataccaatgacattcttcatagaaa

SEQ ID NO: 725637 - DNA, 84 bp, Artificial Sequence
  ENSG00000198198_173 (sequence is synthesized)
taaaatgcccacactgcctaaagcagtctacagattcagtacaattcctatcaaaataccaatgacattcttcatagaaataga

SEQ ID NO: 725638 - DNA, 86 bp, Artificial Sequence
  ENSG00000198198_174 (sequence is synthesized)
acccagaatagccaaagctattctgagcaaaacagattatactacaaagctatagtaaccaaaaacagcatggtactggcataaaa

SEQ ID NO: 725639 - DNA, 120 bp, Artificial Sequence
  ENSG00000198198_175 (sequence is synthesized)
agccatatatctacaatgaactcatttttgacagatgccaagaacatacattggggaaagaacagtctcttcaataaatggttctgggaagactggatattcatatgcagaagaatgaaa

SEQ ID NO: 725640 - DNA, 80 bp, Artificial Sequence
  ENSG00000198198_176 (sequence is synthesized)
gttctgggaagactggatattcatatgcagaagaatgaaactagactcctatctgccaggcgcagtggctcacacctgta

SEQ ID NO: 725641 - DNA, 120 bp, Artificial Sequence
  ENSG00000198198_177 (sequence is synthesized)
ccggcgacttcatccactgtctgtccgcttcctgtgtaaggccgaccacccagcccccaaacaacccttaaaatgagacccaaaccaaagacctaacatataagcctcaaatcagtaaac

SEQ ID NO: 725642 - DNA, 120 bp, Artificial Sequence
  ENSG00000198198_178 (sequence is synthesized)
ctctcctgaaacaggcagaggaactgcctgcccagaaatactcacaataggctgtgcagattgtaaagagatcaacagcttcacccacgctctgcataaactctggtactggctgtgttc

SEQ ID NO: 725643 - DNA, 70 bp, Artificial Sequence
  ENSG00000198198_179 (sequence is synthesized)
tcacccacgctctgcataaactctggtactggctgtgttctccatagaaggtctcgctggatctcttggg

SEQ ID NO: 725644 - DNA, 120 bp, Artificial Sequence
  ENSG00000198198_180 (sequence is synthesized)
accacaggtgcatttcaccactcagctaatttttagtttttttgtagagatgaggtctctaccaagctggtctctaactcctgggctcaagcgatcttcccatcttggcctcccaaagtg

SEQ ID NO: 725645 - DNA, 88 bp, Artificial Sequence
  ENSG00000198198_181 (sequence is synthesized)
atgtgaaccactatgcttggctcaaagatttattgataataccctgcaagcacaagcgtgcaaagcaaaaatggacaaataggatcac

SEQ ID NO: 725646 - DNA, 120 bp, Artificial Sequence
  ENSG00000198198_182 (sequence is synthesized)
gcacagcaaaggaaacaataaacaaagtgaggaaacaaccacagaatgggagaaaatatttgcaaaccacccatctgacaagggattaattaccagaatatataaggagctcaaacaact

SEQ ID NO: 725647 - DNA, 120 bp, Artificial Sequence
  ENSG00000198198_183 (sequence is synthesized)
ggcgtgggcaggtaagttgctgccatatcctgctggctccttgcttgatttccctcagcaaacccttgaacttgctaggccatgaatacacttgatatgtgtctatagatgatccattgg

SEQ ID NO: 725648 - DNA, 120 bp, Artificial Sequence
  ENSG00000198198_184 (sequence is synthesized)
aagtccctataaacaaggaccttccagtccaggggaatgactgtgcaaggtagtatctaagcacctgagaagcagtagtgctttgtcgccggctcacggactcccatgcagccttcctca

SEQ ID NO: 725649 - DNA, 120 bp, Artificial Sequence
  ENSG00000198198_185 (sequence is synthesized)
ccaatttggcacaggcagcagtctccctcccaggctctccccatctcccctgctttggtgttgagtgatgagctgagtcagggatagggagtcccctggtgctaaccgtgaacgtagaga

SEQ ID NO: 725650 - DNA, 120 bp, Artificial Sequence
  ENSG00000198198_186 (sequence is synthesized)
cttgttctgaggacatccacacaatagtaggaatctccccaaccaatctgtgaatttcatgggggccaaaactgtattttgctcactgctaagtccccagctcaccttaggggctcagca

SEQ ID NO: 725651 - DNA, 120 bp, Artificial Sequence
  ENSG00000198198_187 (sequence is synthesized)
ggtccctgttgaagggaggaaggggaggagagaaggagaaaggcaagcaggcagacagctatgggtctagcatctgcagtgtgttagcgttggggaaacagaagaactagaaggatggat

SEQ ID NO: 725652 - DNA, 120 bp, Artificial Sequence
  ENSG00000198198_188 (sequence is synthesized)
atgctgatgactcctagattggaactccggtccggttctttctctggagctctagatactcactttttgtgccccccaaatgaatgcattttcttcccactaacccttgatttttcttca

SEQ ID NO: 725653 - DNA, 120 bp, Artificial Sequence
  ENSG00000198198_189 (sequence is synthesized)
ttcatggtgaaaaatatcaccctcaatctagtgatccaagtcagaaaactgggagttatcgctactctgtttcatagaaatccccatccatcaagaaatatgaaagttaaggctgtaata

SEQ ID NO: 725654 - DNA, 61 bp, Artificial Sequence
  ENSG00000198198_190 (sequence is synthesized)
caggggagaccttgtttctacaaaagaatttaaaaattagctgggcgtggtggcatatgcc

SEQ ID NO: 725655 - DNA, 89 bp, Artificial Sequence
  ENSG00000198198_191 (sequence is synthesized)
caagaccagcctgagcaaccaggggagaccttgtttctacaaaagaatttaaaaattagctgggccagaaggcaagtggtgatggcgcc

SEQ ID NO: 725656 - DNA, 120 bp, Artificial Sequence
  ENSG00000198198_192 (sequence is synthesized)
aggagcactgagtggagacagccagacccacctgtctctcgccttcctgatctcatcttcaccttccctccagggctgttacttctgtgtcaaacagtttgccctggaatgttcccgaat

SEQ ID NO: 725657 - DNA, 120 bp, Artificial Sequence
  ENSG00000198198_193 (sequence is synthesized)
cccaatggggcaggctgtcaactcacaggtatgtgaatgagctgcgggcacagtcagtgcaccccagtgtgctgtgggcagcatggctccatgtcccatttgctgggcagtagagtaatg

SEQ ID NO: 725658 - DNA, 120 bp, Artificial Sequence
  ENSG00000198198_194 (sequence is synthesized)
cagtaggcgggctggcccagtgattgattcactgctatggcctggctaggtcagtgctcattctggtgccatgactgcactcactacaaggctgaccccatcggtcatccaaagcgtgtt

SEQ ID NO: 725659 - DNA, 120 bp, Artificial Sequence
  ENSG00000198198_195 (sequence is synthesized)
cagctgtagccctgaggcagcacagtgcctggtctggcctgtagtcatctagagtctgtggcagaccctgatggaatctgggatagagcaaaatggcccagtttctgaaaatggccctag

SEQ ID NO: 725660 - DNA, 120 bp, Artificial Sequence
  ENSG00000198198_196 (sequence is synthesized)
tttcatggagatagttacaatacagtatgaaaaagggaggctagaatggggaggccttcccacagaaaccattctggcagagggcgttccactaggccacagcagcaggggaaatcttgt

SEQ ID NO: 725661 - DNA, 120 bp, Artificial Sequence
  ENSG00000198198_197 (sequence is synthesized)
gcttcttcccacggaaggagggaaatgtgttttgggcagccagtgcagccataccttaaccctgtctcctgctgctgcctccccagctgtccatgctgttcacagaggagtgtgacaagg

SEQ ID NO: 725662 - DNA, 120 bp, Artificial Sequence
  ENSG00000198198_198 (sequence is synthesized)
gggaaacacagcagaaatcctcaccaaacagatgtgcccctcagcctgaccaaacaagctctgctctggagggaggcctagacagaacgggactacacagatacatgtaaaacccttcca

SEQ ID NO: 725663 - DNA, 120 bp, Artificial Sequence
  ENSG00000198198_199 (sequence is synthesized)
gtaccgggcatcgagctacagcatgtgattctctgagcagctctgccctcaaagactcaccaagaatacaagccttggcttgagatcctgagggccaggctctggaactgacaacccaag

SEQ ID NO: 725664 - DNA, 120 bp, Artificial Sequence
  ENSG00000198198_200 (sequence is synthesized)
gagctgtcagaactttgtcagtaggctggagccccagaaaggaccccttggactttgaagccttgttacttaaagtgtggtccacagaccagcagccgcagcacctgggagcttgctgaa

SEQ ID NO: 725665 - DNA, 120 bp, Artificial Sequence
  ENSG00000198198_201 (sequence is synthesized)
atgcaggctctccggccacatttcagactgttgactcgggatctgcaggttgacagtctccccaggtgatttgtgtgcacactgaggcgtgaaagcactgctgtaaaggacaggtagaga

SEQ ID NO: 725666 - DNA, 120 bp, Artificial Sequence
  ENSG00000198198_202 (sequence is synthesized)
gaactgtggtggtggacacgagcacagggcattaaggagcccacagagatgggcccagccagagctgaggttcaagagaggaggcattacaagagaagacttcaagtgagaaagtaggag

SEQ ID NO: 725667 - DNA, 120 bp, Artificial Sequence
  ENSG00000198198_203 (sequence is synthesized)
gtggagccaggtgaggggtcctgcagcacagtgcttgtgcagaggattcatttcagggtgcaggaagggtctcccagagaagccaaggtcagttaggatgaggctgcagtagtgtcggcg

SEQ ID NO: 725668 - DNA, 120 bp, Artificial Sequence
  ENSG00000198198_204 (sequence is synthesized)
gttgtgaatggaggcaggtgctcctgcgggtggtgggaaggctggagcaggagtgggttttggggaagggtgacaagcccagcttggggcaagctgagtctggggtccataggcccttca

SEQ ID NO: 725669 - DNA, 120 bp, Artificial Sequence
  ENSG00000198198_205 (sequence is synthesized)
ctgtctgcaaggtctgtgggcatcagggattcgagctcaggagagtcctaggcagcagctctgtgaacaggcggtaactgaagccttgggagagcaaatcatcccgggatggatcaccaa

SEQ ID NO: 725670 - DNA, 120 bp, Artificial Sequence
  ENSG00000198198_206 (sequence is synthesized)
gcagagcgttagggagcagatggacataaggggacgacaagacaatcccaggggtggtcagagaggagtcccaggacaggaggcaaggaggttgtgccaggggtacagcactctctgttg

SEQ ID NO: 725671 - DNA, 120 bp, Artificial Sequence
  ENSG00000198198_207 (sequence is synthesized)
attggcttcagtgtgccaggctctgtgtggggcctccaggatcaactgttacccctcattctgatgcagctcagacaggctgaccagcaagccagcgaggatgaggactgaggctcaatt

SEQ ID NO: 725672 - DNA, 120 bp, Artificial Sequence
  ENSG00000198198_208 (sequence is synthesized)
tggagacacggtcctatgtgacctcagggtgcaggcggggtgaggtgtggagatggaagtaggcctctcctcatcctcccttcacctcaggatgccctgtgggagggtctgtagggtctg

SEQ ID NO: 725673 - DNA, 120 bp, Artificial Sequence
  ENSG00000198203_0 (sequence is synthesized)
acactgaagctgagagcctcccaaagtgctggctacctgctgagcgcccccgtaactctgacacagtagtaatttgagcctctgcaattgccgtctgcttcctgtgaaagtcctttccgt

SEQ ID NO: 725674 - DNA, 120 bp, Artificial Sequence
  ENSG00000198203_1 (sequence is synthesized)
gcccactgacccttgagtgggcctttgagctgctgactttcagctggaacttgaagggaccccaaccctgagacactatggccctgacctcagacctggggaaacagataaaactgaaag

SEQ ID NO: 725675 - DNA, 120 bp, Artificial Sequence
  ENSG00000198203_2 (sequence is synthesized)
aggtggaggggaccctcctgcagcctgcaactgtggacaactggagccagatccagagcttcgaggccaaaccagatgatctcctcatctgcacctaccctaaagcagggacaacgtgga

SEQ ID NO: 725676 - DNA, 120 bp, Artificial Sequence
  ENSG00000198203_3 (sequence is synthesized)
ttcaggaaattgtggatatgattgaacagaatggggacgtggagaagtgccagcgagccatcatccaacaccgccatcctttcattgagtgggctcggccaccccaaccttctggtgtgg

SEQ ID NO: 725677 - DNA, 120 bp, Artificial Sequence
  ENSG00000198203_4 (sequence is synthesized)
aaaaagccaaagcaatgccctctccacggatactaaagactcacctttccactcagctgctgccaccgtctttctgggaaaacaactgcaagttcctttatgtagctcgaaatgccaaag

SEQ ID NO: 725678 - DNA, 120 bp, Artificial Sequence
  ENSG00000198203_5 (sequence is synthesized)
actgtatggtttcctactaccatttccaaaggatgaaccacatgcttcctgaccctggtacctgggaagagtattttgaaaccttcatcaatggaaaagtggtttggggttcctggtttg

SEQ ID NO: 725679 - DNA, 120 bp, Artificial Sequence
  ENSG00000198203_6 (sequence is synthesized)
accacgtgaaaggatggtgggagatgaaagacagacaccagattctcttcctcttctatgaggacataaagagggacccaaagcatgaaattcggaaggtgatgcagttcatgggaaaga

SEQ ID NO: 725680 - DNA, 120 bp, Artificial Sequence
  ENSG00000198203_7 (sequence is synthesized)
aggtggatgaaacagtgctagataaaattgtccaggagacgtcatttgagaaaatgaaagaaaatcccatgacaaatcgttctacagtttccaaatctatcttggaccagtcaatttcct

SEQ ID NO: 725681 - DNA, 120 bp, Artificial Sequence
  ENSG00000198203_8 (sequence is synthesized)
ccttcatgagaaaaggaactgtgggggattggaaaaaccacttcactgttgcccagaatgagaggtttgatgaaatctatagaagaaagatggaaggaacctccataaacttctgcatgg

SEQ ID NO: 725682 - DNA, 120 bp, Artificial Sequence
  ENSG00000198203_9 (sequence is synthesized)
aactctgagcaagatgtaaataaaattaaaaggtggatggcaagagtgcaaatactatcttcaatccttcagtcccagccagaagaatctctgaaagcatattgtgaatgtatacaatgt

SEQ ID NO: 725683 - DNA, 120 bp, Artificial Sequence
  ENSG00000198203_10 (sequence is synthesized)
atgattaacagtatgtcaccacttcattttttaaaaaggatcacgtctaatgcccattttcccaactattctttccaaagtaagatataaggtagcttaataaactaagtaaaacgtatg

SEQ ID NO: 725684 - DNA, 120 bp, Artificial Sequence
  ENSG00000198203_11 (sequence is synthesized)
acttgagtacaaaaggattgttttaatccccattattctggaaagtgcatcctagtctcccagtctataacatcataataccttgagtataagtccaaatattaggttatatctatatta

SEQ ID NO: 725685 - DNA, 120 bp, Artificial Sequence
  ENSG00000198203_12 (sequence is synthesized)
aaaacaaaatttctgtcatctgtcctggccattcaggcaactccagcctgggctcaatcctggagttctgtctggtcactatcagaaggaacactttgagggaaaccctggtgcagccag

SEQ ID NO: 725686 - DNA, 120 bp, Artificial Sequence
  ENSG00000198203_13 (sequence is synthesized)
ccctgaggaaacatggcctgagtgccctcactggtgggtgggaataaaatggaagtgcacagaggagatgtcagaagaccaaaacttggtgaatagtcccagtgctaggtcatataggaa

SEQ ID NO: 725687 - DNA, 120 bp, Artificial Sequence
  ENSG00000198203_14 (sequence is synthesized)
acagaaagcatgacagtggccttttgggaacccaagttacgtcctggtgaaagcagaaaggaggagacaggatggctgtcaacaacgtcagcatgggcatggctcccaggcatggaggta

SEQ ID NO: 725688 - DNA, 120 bp, Artificial Sequence
  ENSG00000198203_15 (sequence is synthesized)
attgggtcttggcttcaatgccacccttttgggaagccctaaaccaagtgaggtgttcttttcccttgcttcccatatttgtcccagttgcagccctgttgttatgtatttactcttcaa

SEQ ID NO: 725689 - DNA, 120 bp, Artificial Sequence
  ENSG00000198203_16 (sequence is synthesized)
tttcttatttatacctctcactcaattgttaattctttgggttcagtctcatgccatatttactcctagtacctaatgcagtgcctggcacacagcaagtgcccttgagaacttgtagag

SEQ ID NO: 725690 - DNA, 120 bp, Artificial Sequence
  ENSG00000198203_17 (sequence is synthesized)
ggagtaaaaaagtgcatggataaatgactgcagcaaatcacaaattttgaactttgacccttttcttttagtcccaaatagtggcattccatagctgagggtagtaggagcagttcaccc

SEQ ID NO: 725691 - DNA, 120 bp, Artificial Sequence
  ENSG00000198203_18 (sequence is synthesized)
gttcaccctgggagcagacaataagaggaagaatgaagccaactaaaattctgaatgctttttgttggatttcgtagggtattttttttaaaatagggtcttgctatgttgcccaggctg

SEQ ID NO: 725692 - DNA, 120 bp, Artificial Sequence
  ENSG00000198203_19 (sequence is synthesized)
tatgttgcccaggctggtcttaactgactgctttttattattaccatgcactggcaattccaaacaatgtcagtgttaaaatgcttctccctgaaaaagagaaaaaaaaaaggaaaaaaa

SEQ ID NO: 725693 - DNA, 120 bp, Artificial Sequence
  ENSG00000198203_20 (sequence is synthesized)
tcttattggcctaagttctaaataatagctaggttaccactgagttttaactatatgtatatgagcttcaaataagcacctttttattatgtaaataaataaaagttatctgtatcccca

SEQ ID NO: 725694 - DNA, 120 bp, Artificial Sequence
  ENSG00000198203_21 (sequence is synthesized)
tctcaagaaagcctctttttctgcacccagaggcgaggcaaggaaattaccttacctctctttggcagtaggtgatctttttctctctcacctttcactgaggtagcagacatttgagtt

SEQ ID NO: 725695 - DNA, 120 bp, Artificial Sequence
  ENSG00000198203_22 (sequence is synthesized)
tctccggctaatgcatgggtctctgttcctaatctgtgcctcactaaagtccagggctaccagcctcttccctgagcagaggtcactgaactgagcactgggtgtccagagggtgaaccc

SEQ ID NO: 725696 - DNA, 120 bp, Artificial Sequence
  ENSG00000198203_23 (sequence is synthesized)
actcagggcagctgtcatcaaagcctttgcccacttctccatcttgcagctccctccctcttcactttcgtccctggagggtccccttattttcttatgagcctgattatgcacttaaat

SEQ ID NO: 725697 - DNA, 120 bp, Artificial Sequence
  ENSG00000198203_24 (sequence is synthesized)
gatacgtttggtgttttaatcagaatctgcaggtgtgtgattaacaggaaagatcttcataatgttcaggccaccatgtctccagcagtgaaagtacttggagagacccttgaagagtga

SEQ ID NO: 725698 - DNA, 120 bp, Artificial Sequence
  ENSG00000198203_25 (sequence is synthesized)
gtgggactgtccagatgtgtagaaatgagagccggagggagccacaggggcgtggggcagcaggaccagggcatgtggaaggtcagagtgtgagctggcgtagaggtggagctgagaaaa

SEQ ID NO: 725699 - DNA, 120 bp, Artificial Sequence
  ENSG00000198203_26 (sequence is synthesized)
gagactagaggcaggagagctttgcagttcttctaaggaatatggacttcaaaaatggttaaaggtggttttccaacttttctttttagtaccaaaacacttttttatttaacaaaaatt

SEQ ID NO: 725700 - DNA, 120 bp, Artificial Sequence
  ENSG00000198203_27 (sequence is synthesized)
accatgactacatgatccagcaattccacttctgggtatatatcccaaagaaataaaaacagggtctgaaacagatacctgtacatctacattcaaaataacattattcacaatagccaa

SEQ ID NO: 725701 - DNA, 120 bp, Artificial Sequence
  ENSG00000198203_28 (sequence is synthesized)
aaggtggcaacaacccaagtgtccaccaatggctgaattgataaacaagatgtggatatacaatggaacattactcagtcttaaagaggaaggagattttctgcactaacttgacccagc

SEQ ID NO: 725702 - DNA, 120 bp, Artificial Sequence
  ENSG00000198203_29 (sequence is synthesized)
tcctctgacatgattcgcatgagcctctgattcccacactagagtggaagctccttagggagaaggcctgtgtttttcttgtctttgttgccttttcccctaacctcagcttaacacgat

SEQ ID NO: 725703 - DNA, 120 bp, Artificial Sequence
  ENSG00000198203_30 (sequence is synthesized)
ttgttgccttttcccctaacctcagcttaacacgatgattgcacaaagtgctcgttaaggcttttaaatgagagagtagaggccgggcaccgtggctcatgtctgtaatcccagcacttt

SEQ ID NO: 725704 - DNA, 120 bp, Artificial Sequence
  ENSG00000198203_31 (sequence is synthesized)
gatcgcaccactgcactccagcctggtgatggaccaagactccgtctcaaaaaaaaaatgagacagtagaaatcatgactcacaggccagcaagtatacatgtttttagagatgaaacaa

SEQ ID NO: 725705 - DNA, 120 bp, Artificial Sequence
  ENSG00000198203_32 (sequence is synthesized)
ggccagcaagtatacatgtttttagagatgaaacaagtgattgcaaacaggccgggtacatgagacagcctgctgcaggcacatgggggtcatctctggctggcaggaaggtgagggagt

SEQ ID NO: 725706 - DNA, 120 bp, Artificial Sequence
  ENSG00000198203_33 (sequence is synthesized)
cctctcttctctggtcctggctgactctgcctcagcaggacttcacttgaccattctcaccttctgtcacctcatccttaaagtgacagagtaaattaactctaaggccccatccaggac

SEQ ID NO: 725707 - DNA, 120 bp, Artificial Sequence
  ENSG00000198203_34 (sequence is synthesized)
tcaagctgtgtgattttacaaaaatgaaaattatattaataatcccattgtaaaatcccaaaagaaagtcaagagactagcagaaagacaggtgggtgatgggatgtcctggacagagcc

SEQ ID NO: 725708 - DNA, 120 bp, Artificial Sequence
  ENSG00000198203_35 (sequence is synthesized)
cattcgtgatcacctttgcctctccactgtctctgatgcttaccagcaaagagaaaacataaagttctacattcagcaggacattcacctgaacagtttcaaataggacatgaaggcagg

SEQ ID NO: 725709 - DNA, 120 bp, Artificial Sequence
  ENSG00000198203_36 (sequence is synthesized)
atccagattgaatgtttggagggaactagagacatggggaggcagtgagtgcagtaagcgtagctgtgaaatgaaggggagaagatggtggtcccaggctgcaggccatggggaggtttt

SEQ ID NO: 725710 - DNA, 120 bp, Artificial Sequence
  ENSG00000198203_37 (sequence is synthesized)
gaagatggtggtcccaggctgcaggccatggggaggttttctaacagaccagggagggaagaatgagaggaaaaaagctaaagctctccccaaaggaggccaggcgcggtggctcacgcc

SEQ ID NO: 725711 - DNA, 62 bp, Artificial Sequence
  ENSG00000198203_38 (sequence is synthesized)
ttctccccaaagggtaaacagatgaatcaggcagagcaacgctcttgaggacaccccacctc

SEQ ID NO: 725712 - DNA, 120 bp, Artificial Sequence
  ENSG00000198203_39 (sequence is synthesized)
tgaatcaggcagagcaacgctcttgaggacaccccacctctgcctctggtagactctgagttcttcgttttatttattctgtgactttattcgtatgcaccccagtgcctaataagttcc

SEQ ID NO: 725713 - DNA, 120 bp, Artificial Sequence
  ENSG00000198203_40 (sequence is synthesized)
tggcacatagagggcattagacacgtccttgctgagtaaatacggaagtggctgtagagcaggtggagtcaagggtacaaactgagccgccagccttggtgagaaagtggggcactgctt

SEQ ID NO: 725714 - DNA, 120 bp, Artificial Sequence
  ENSG00000198203_41 (sequence is synthesized)
ccttaaaggcaggaatgaaggggaaagaagggctaagaaagatatgttgctaggggactggagtgaagttggaggactcaaatgacttcactccttttagtaataatgttggataagggg

SEQ ID NO: 725715 - DNA, 120 bp, Artificial Sequence
  ENSG00000198203_42 (sequence is synthesized)
acaaaaacttccatttccagaattatggcaaactaggtgttctgaacccctgaagcccttatatgtagaacatccaggattactgcataaaaaaatcacaagtttccttttaatgcataa

SEQ ID NO: 725716 - DNA, 120 bp, Artificial Sequence
  ENSG00000198203_43 (sequence is synthesized)
tcaaaataaagtccctaagtttagaaactgcagaggaaactgaaactcagagaggcaaattgagactgggactctccaggggaaatctgatgacctggataatccagcaatttaagtttt

SEQ ID NO: 725717 - DNA, 120 bp, Artificial Sequence
  ENSG00000198203_44 (sequence is synthesized)
aatggctgcacagggacagggtcaaagcccatggcacaaggaaccagaagaatgaggagccaaagctgggaccactgaagggctacatcctcaatggatgggtggaggaggcagagaaag

SEQ ID NO: 725718 - DNA, 120 bp, Artificial Sequence
  ENSG00000198203_45 (sequence is synthesized)
accttagggaaccactctgccttgacctaggcgctcagctcccttgagaatgtatagccacaggtttactccctcggggtttgagattgaaaattgcactccttgcattgtccaagaaac

SEQ ID NO: 725719 - DNA, 120 bp, Artificial Sequence
  ENSG00000198203_46 (sequence is synthesized)
tacaagcagagacattccacaaggtggtccccacagccagtgttcccaggtccgctctggagggacacagctgcaactcagacccccataggatccccacttgagctcaccatcccacat

SEQ ID NO: 725720 - DNA, 120 bp, Artificial Sequence
  ENSG00000198203_47 (sequence is synthesized)
tacaaaatacacaaaagaacaagccaccatgagatgcagtcttcagaaagaacccatggaagagtcagacctcaagaacttcagacaatgtaattatcaactctagaaataagagaaggt

SEQ ID NO: 725721 - DNA, 120 bp, Artificial Sequence
  ENSG00000198203_48 (sequence is synthesized)
aggttcaagttgtgtgaataaatgaaaaagtgtatcaaaaataaaataaagaaataagatgctacttttagacacagaaatattaagtaaataaatggaatttctataacaaaaaaatat

SEQ ID NO: 725722 - DNA, 120 bp, Artificial Sequence
  ENSG00000198203_49 (sequence is synthesized)
tcatggaaattaaaaactcaagcataggataaagtgcagaacagctgcatagagaattagtgaactcagacaggaaggtttgagggtaaaggtttgaggagagaggagagacctgtgtct

SEQ ID NO: 725723 - DNA, 120 bp, Artificial Sequence
  ENSG00000198203_50 (sequence is synthesized)
ggagctaagagccaagagatggagcacgggagggattaataaaaggattatcaagcagcaatgaagaggaagaaaactgagcataaaaaatttagaaactaggggaattttttaaatcag

SEQ ID NO: 725724 - DNA, 120 bp, Artificial Sequence
  ENSG00000198203_51 (sequence is synthesized)
catttcttaaaaccttctttactggtgcttggcagcttggtaagttggagaagagaagatggggagtaggacttagtagacagtaacagagtcaacgctttcaggagcagggtttctcaa

SEQ ID NO: 725725 - DNA, 120 bp, Artificial Sequence
  ENSG00000198203_52 (sequence is synthesized)
ccttagcacttgctctaaagggcctgggacttgatataatcaggcatggcaagacatgcaggtacagtggtgactgtcataaggaagaagtgtgtcctcgcagatacctagaacaggagg

SEQ ID NO: 725726 - DNA, 120 bp, Artificial Sequence
  ENSG00000198203_53 (sequence is synthesized)
catggcatgtcacacagagcctcacagggaagcaatgggataggtcaggaggaagagacagtgagtagaagacatgggcaagagccttgatgtggtttctttgggaaggaatagttgagg

SEQ ID NO: 725727 - DNA, 120 bp, Artificial Sequence
  ENSG00000198203_54 (sequence is synthesized)
caaggtaggcaggcttgggattggccagtttgaaccactggagcaggctttcagccacaggggcttggcctagtggtctggtatctgaccctggggtgtcagggcaggtgaataatggcc

SEQ ID NO: 725728 - DNA, 120 bp, Artificial Sequence
  ENSG00000198203_55 (sequence is synthesized)
cagtgtgtaaaagcccaacagtggaagtgttgggggtataggctctggggtgttgtaggcagttcctccagagtcagcaaagccccaggatgtcaaagcatcagatacagaatataaaag

SEQ ID NO: 725729 - DNA, 120 bp, Artificial Sequence
  ENSG00000198203_56 (sequence is synthesized)
acataattaatacagcactcctgacatttggggcagatttttctttcttgtgggtgggagcaaggggactcttctatgtattgtagaatgttgaacagcatacttggcccctgcatggat

SEQ ID NO: 725730 - DNA, 120 bp, Artificial Sequence
  ENSG00000198203_57 (sequence is synthesized)
gccagtagcaccactactccaagctgtgcaaccaaaaatgtctccagacattgccaaatgtcccctagtggatacaatcatcccatcatccccaattgagaaccacttaaaagtgaaaga

SEQ ID NO: 725731 - DNA, 120 bp, Artificial Sequence
  ENSG00000198203_58 (sequence is synthesized)
ataaaaaagcacagcattgaaatagctggtcatagatctgagatgcatagtcaagaggcccatttggcattgatgccattaaaatgtgaactgagtactggataaaaggtcagatttggt

SEQ ID NO: 725732 - DNA, 120 bp, Artificial Sequence
  ENSG00000198203_59 (sequence is synthesized)
aaaatgaaaggttgggagagtgcagggatgtgaaattgtgggcaaagtggaacttgaaggaatgtttgtaggggcagagctgaaatgattagagatggaaatcattcaagccgaggaggc

SEQ ID NO: 725733 - DNA, 120 bp, Artificial Sequence
  ENSG00000198203_60 (sequence is synthesized)
caggagaaaaataggagctattttcttgctgtgtggctcaaactcttaaacatgaagcttctgtgcatctttgggagggtgcgcgaggggtcatcagtttacgttgatactgtggaagtc

SEQ ID NO: 725734 - DNA, 120 bp, Artificial Sequence
  ENSG00000198203_61 (sequence is synthesized)
tcctattcaagtggcaggtcatagtttacagaaaaagattttgctcctgataccaaaggggcaatcaggcaatctaatcctcaccaatccctaattgattagctaattaaaaggactgag

SEQ ID NO: 725735 - DNA, 120 bp, Artificial Sequence
  ENSG00000198203_62 (sequence is synthesized)
tttgaagtagagagcagacttggtgacaaagcagagacagaaagaagagggaggtcacaaggccaagtcgcagggccagcactgcagaactgagccagagtgcacagcaaccctcaggat

SEQ ID NO: 725736 - DNA, 120 bp, Artificial Sequence
  ENSG00000198203_63 (sequence is synthesized)
agcttcgaggccagtgggaggagggaggggccaggcagctgagggccaggaaagatgtgaaaaactctagctggtgaccgagaggaggagtagagtgtgcccttagttcatatgaactag

SEQ ID NO: 725737 - DNA, 120 bp, Artificial Sequence
  ENSG00000198203_64 (sequence is synthesized)
agggagttggtatttgcacagcagtcagggtcacatgagtgatcatggtacagtgagaagttctccctcccagggccaggtcacagggtttgtttctgttcaatccggattcttccagta

SEQ ID NO: 725738 - DNA, 120 bp, Artificial Sequence
  ENSG00000198205_0 (sequence is synthesized)
ctgggaggggctggcgtgtgtttatttgggtatatacaatgagtcacggattaaaattgcttttaccagatagatacctaggtgttccacagcattattgaacaagatgtcgtcatttcc

SEQ ID NO: 725739 - DNA, 120 bp, Artificial Sequence
  ENSG00000198205_1 (sequence is synthesized)
ccattacttcagaagacctccttaattacttatattaattgtagaatatatttatgcataccaggctctacctctgggctttctattccgttccagagacccagtaccagaatatttaaa

SEQ ID NO: 725740 - DNA, 120 bp, Artificial Sequence
  ENSG00000198205_2 (sequence is synthesized)
tcactgtggcgttgaatacattttaatatctgatagggccagtttctgcgcattgcacatttttttttcccctttcaggaacgtgttcaggcccgcggcagggggcgggatcgcgcctcc

SEQ ID NO: 725741 - DNA, 120 bp, Artificial Sequence
  ENSG00000198205_3 (sequence is synthesized)
tcctcggctctggttccagccgagcctctcggacgcagagatggaaatcccgaagctgctcccggctcgcgggacactacagggcggcggcggcggcggtatccccgcgggtggcggccg

SEQ ID NO: 725742 - DNA, 80 bp, Artificial Sequence
  ENSG00000198205_4 (sequence is synthesized)
agtccaccgaggccctgactcgccggctggccaggtccccacgcgccgcctcctgctgccccggggcccccaagatggcg

SEQ ID NO: 725743 - DNA, 120 bp, Artificial Sequence
  ENSG00000198205_5 (sequence is synthesized)
gggccctggcccaagcctgttcgcgccgaggccccatcaacctagcggcggcggcgacgacttcttcctggtgctgcttgacccggtgggtggcgacgtggagaccgcgggctccggtca

SEQ ID NO: 725744 - DNA, 120 bp, Artificial Sequence
  ENSG00000198205_6 (sequence is synthesized)
gtcaggccgcagggcctgtgttgagggaggaggccaaggcgggcccggggctccagggggacgagagcggcgcgaaccccgcgggctgctctgcgcagggcccccactgcctgtccgcgg

SEQ ID NO: 725745 - DNA, 120 bp, Artificial Sequence
  ENSG00000198205_7 (sequence is synthesized)
cactccggccccgatctccgcccccggccccgccgcggccttcgcgggcacagtcactatccacaaccaggacctgctgttgcgctttgagaacggcgtcctcaccctggccacgccccc

SEQ ID NO: 725746 - DNA, 120 bp, Artificial Sequence
  ENSG00000198205_8 (sequence is synthesized)
accacacgcctgggagccaggggccgctcctgcccagcagcccaggtgtctgatcgccccccaagctgggttcccgcaagccgcgcacccgggtgactgcccagagctgcggtccgacct

SEQ ID NO: 725747 - DNA, 120 bp, Artificial Sequence
  ENSG00000198205_9 (sequence is synthesized)
ctagccgagcccgcagaacccgcgcctgctccggcgccccaggaggaggcggagggcctggccgccgccctgggcccccgcggactgctgggctctggtccaggcgtggtgctgtacctg

SEQ ID NO: 725748 - DNA, 120 bp, Artificial Sequence
  ENSG00000198205_10 (sequence is synthesized)
cctgtgccccgaggcgctgtgcgggcaaaccttcgccaagaagcaccagctgaagatgcacctgctgacgcacagcagcagccagggccagaggcccttcaaatgccccctgggtggctg

SEQ ID NO: 725749 - DNA, 120 bp, Artificial Sequence
  ENSG00000198205_11 (sequence is synthesized)
cggctggaccttcaccacctcttacaagctcaagaggcacctgcagtcgcacgataaactgcggcccttcggctgccctgcggagggctgtggcaagagcttcaccaccgtgtacaacct

SEQ ID NO: 725750 - DNA, 120 bp, Artificial Sequence
  ENSG00000198205_12 (sequence is synthesized)
caaggcgcacatgaagggccatgagcaggagaactcgttcaaatgtgaggtgtgcgaggagagcttccccacgcaggccaaactcggcgcccaccagcgcagccacttcgaacccgagag

SEQ ID NO: 725751 - DNA, 120 bp, Artificial Sequence
  ENSG00000198205_13 (sequence is synthesized)
gccttaccagtgcgcgttttctggctgcaagaagacatttatcacagtgagtgctctgttttcccataaccgcgcccatttcagggaacaggaactgttttcctgctctttccctggctg

SEQ ID NO: 725752 - DNA, 120 bp, Artificial Sequence
  ENSG00000198205_14 (sequence is synthesized)
cagcaagcaatatgacaaggcttgtaggctgaaaattcacctgcggagtcacaccggcgagagacctttcctttgtgactttgatggctgtggctggaacttcaccagcatgtccaaact

SEQ ID NO: 725753 - DNA, 120 bp, Artificial Sequence
  ENSG00000198205_15 (sequence is synthesized)
cttaaggcacaaaaggaagcacgacgatgaccggaggttcatgtgccctgtggaaggctgtgggaaatctttcacgagggccgaacatctgaaaggccacagcattacccacctgggcac

SEQ ID NO: 725754 - DNA, 120 bp, Artificial Sequence
  ENSG00000198205_16 (sequence is synthesized)
aaagcctttcgtgtgtcctgtggcaggctgctgtgccaggttctctgctcgcagtagcctctacattcactccaagaaacacctgcaggatgtggacacttggaaaagccgttgcccgat

SEQ ID NO: 725755 - DNA, 120 bp, Artificial Sequence
  ENSG00000198205_17 (sequence is synthesized)
cagcatgaagacgcacatggttaaaaggcataaggtgggccaggatctcttagctcagctagaagcagcaaattctcttacacccagcagtgaacttaccagccagagacagaatgatct

SEQ ID NO: 725756 - DNA, 120 bp, Artificial Sequence
  ENSG00000198205_18 (sequence is synthesized)
cagtgatgcagagatagtgtctctcttctctgatgtacctgacagtacttctgctgcattgctggacacagcattggtgaactctggaatcttgactattgatgtggcttctgtgagctc

SEQ ID NO: 725757 - DNA, 120 bp, Artificial Sequence
  ENSG00000198205_19 (sequence is synthesized)
gactctggcagggcacctccctgctaataataataattccgtagggcaggctgtggaccctccgtccttgatggccaccagcgaccctcctcaaagtctggatacctctctcttttttgg

SEQ ID NO: 725758 - DNA, 120 bp, Artificial Sequence
  ENSG00000198205_20 (sequence is synthesized)
aacggcggccactggttttcagcagagctccttaaatatggatgaggtctcaagtgtaagtgtggggccattgggatctctggactctttggccatgaaaaactccagtccagagcctca

SEQ ID NO: 725759 - DNA, 120 bp, Artificial Sequence
  ENSG00000198205_21 (sequence is synthesized)
ggctttgacacccagcagtaagctaacagtggacacagatactctgactccttcgagcaccctttgtgaaaacagtgtctcagaactactgacaccagccaaagcggagtggagcgtaca

SEQ ID NO: 725760 - DNA, 120 bp, Artificial Sequence
  ENSG00000198205_22 (sequence is synthesized)
tcctaactctgacttctttggacaggagggagaaacccagtttggattccccaatgcagcaggaaaccatggttctcagaaagaaagaaatcttatcactgtgactggcagctcattttt

SEQ ID NO: 725761 - DNA, 120 bp, Artificial Sequence
  ENSG00000198205_23 (sequence is synthesized)
ggtatgaagcaactctattcattccttgccatgtggctaacttttattacagtcaattttgaggatattctggactaaatatttaagtgcagtcatttctttttggtttgcaaaaagagc

SEQ ID NO: 725762 - DNA, 120 bp, Artificial Sequence
  ENSG00000198205_24 (sequence is synthesized)
acagccctggactatgagtttggagatctaaattctgatcttgagtctggaactgacaagttgtgtgaccctcagcaagtcacttaacctatctgagccttaatttccttatttataaat

SEQ ID NO: 725763 - DNA, 120 bp, Artificial Sequence
  ENSG00000198205_25 (sequence is synthesized)
tgtggtggtttgaacacattgctcataaggtcttttcagttttgttttgttttgttttgtgattttgtgctttttcttgaaaattttcgggcattttgcaattattattgtttgtacttg

SEQ ID NO: 725764 - DNA, 120 bp, Artificial Sequence
  ENSG00000198205_26 (sequence is synthesized)
taatcagaagcggtttgagccctgtagcactaaataatgaaagattgaggaactggtgttttacattaaaaatttaatggaaattttacacagtacgaaaatctaatgatagagctcaaa

SEQ ID NO: 725765 - DNA, 120 bp, Artificial Sequence
  ENSG00000198205_27 (sequence is synthesized)
aaaaaagagctaaaaataggagttggttcttcttagctgtttatccttctaaccttttttttaaatgatgaaggtatgtttttgttgtggaaaatacaagggcttttgttatcactcaga

SEQ ID NO: 725766 - DNA, 120 bp, Artificial Sequence
  ENSG00000198205_28 (sequence is synthesized)
cccagagtgaaatgtttgctttgtggttttgaataagttggcctttaataagttatttagtctctcttagcctcagttttctatctgtaaaatggtcatagcaatgtgaacatatgtgtt

SEQ ID NO: 725767 - DNA, 120 bp, Artificial Sequence
  ENSG00000198205_29 (sequence is synthesized)
acatcctagacttatttttctaccccagtaggttgtattgaaaggaaaatgttatatgtgtttcagcatgttttggtgaatcttcattccctttcctgccccttgttttccctcctcaaa

SEQ ID NO: 725768 - DNA, 120 bp, Artificial Sequence
  ENSG00000198205_30 (sequence is synthesized)
ggggagaaattagcacaaattagtatcaggattgtgcaggaaataaacatttgtgaaggttaagaaagaggaaaaggaagttatttcttcaacagattaaggatttttctacacacagtt

SEQ ID NO: 725769 - DNA, 120 bp, Artificial Sequence
  ENSG00000198205_31 (sequence is synthesized)
cttttgtggcattggccacatgtccattagaccaatttgatagtatcttcggtctgcattcaaagccagctcatgcaatgagtattcagcctattcttccaagacaatctggacatagac

SEQ ID NO: 725770 - DNA, 120 bp, Artificial Sequence
  ENSG00000198205_32 (sequence is synthesized)
cagagggagatttttctcccctctgtgccctagagagctcattgctggcttactcttagagttgaaatgagagggttttgtctgcattttgagtagataccatctatcttatgtgagtat

SEQ ID NO: 725771 - DNA, 120 bp, Artificial Sequence
  ENSG00000198205_33 (sequence is synthesized)
agcattttacaatttagcactttcacaactattatatttgatcctcacaatcctgtgaggtaattatggcaaagtcagatctacaattcatattaaaatttacctagctcagattacaaa

SEQ ID NO: 725772 - DNA, 120 bp, Artificial Sequence
  ENSG00000198208_0 (sequence is synthesized)
gaggggtcctcactcgctgaccacactgacctcaggaccaagggaacaaaacacagcaggggcaatccatccggtccacggagaagtgctaaaccccaaagggtaaatgagattcccaca

SEQ ID NO: 725773 - DNA, 120 bp, Artificial Sequence
  ENSG00000198208_1 (sequence is synthesized)
ggaggagcagggaggagacaacaggcagggtggagggaacagcatgaggaacagcatttgagcccagcgtgtgtggcctccatgtgctgaatgcgtactggataccaagcttgctctacg

SEQ ID NO: 725774 - DNA, 120 bp, Artificial Sequence
  ENSG00000198208_2 (sequence is synthesized)
gaggccctgtgaaggtggctgtggatcacagatatcctcagctctctccagagctcaacacagtaccagatgctccagaaatgtttgctgaactgaatttgactggaaaggaaaacagag

SEQ ID NO: 725775 - DNA, 69 bp, Artificial Sequence
  ENSG00000198208_3 (sequence is synthesized)
atgtttgctgaactgaatttgactggaaaggaaaacagagccccaggcctgcgcggtggctcacgtcta

SEQ ID NO: 725776 - DNA, 120 bp, Artificial Sequence
  ENSG00000198208_4 (sequence is synthesized)
cagccatgagcctggtggcctgtgagtgcctgcccagccccggcctggagcctgagccttgctcacgagcacggtcccaagctcacgtgtacctggagcagattcgcaacagggtggctc

SEQ ID NO: 725777 - DNA, 120 bp, Artificial Sequence
  ENSG00000198208_5 (sequence is synthesized)
tgggagtgcctgacatgacaaaacgtgactatctggtggatgcggccacgcagatccggctggccctggagcgcgatgttagtgaggactatgaggcggccttcaaccactatcagaatg

SEQ ID NO: 725778 - DNA, 120 bp, Artificial Sequence
  ENSG00000198208_6 (sequence is synthesized)
gcgtggacgtgctgctccgtggcatacacgttgaccccaacaaggagcgacgtgaggctgtgaagctgaaaattaccaaatacctgcggcgggcagaggagatcttcaactgccacctgc

SEQ ID NO: 725779 - DNA, 120 bp, Artificial Sequence
  ENSG00000198208_7 (sequence is synthesized)
agcggccgctgagcagtggagccagccccagcgcgggtttcagcagcctgaggctccggcccattcgcacgctgagctctgccgtggagcagctgaggggctgcagggtggtcggggtca

SEQ ID NO: 725780 - DNA, 120 bp, Artificial Sequence
  ENSG00000198208_8 (sequence is synthesized)
tcgagaaggtgcagctggtccaggacccggcaaccggagggacctttgtggtgaagagcctacccaggtgccacatggtgagcagggagcggctgaccatcatcccacacggagtcccct

SEQ ID NO: 725781 - DNA, 120 bp, Artificial Sequence
  ENSG00000198208_9 (sequence is synthesized)
acatgacgaagctgctcaggtactttgtgagcgaggactccatcttcctgcacctggagcatgtgcaaggaggcactctctggtcccacctgctctcccaggcgcactcccgacattctg

SEQ ID NO: 725782 - DNA, 120 bp, Artificial Sequence
  ENSG00000198208_10 (sequence is synthesized)
ggctcagctctggctctacccaggagaggatgaaggctcagctcaacccccacctcaacctcctgaccccagcgaggcttccctcaggccatgcccctggccaggacagaatcgccctgg

SEQ ID NO: 725783 - DNA, 120 bp, Artificial Sequence
  ENSG00000198208_11 (sequence is synthesized)
agcctcctaggacttctccgaaccttctcctagctggggaggccccatccaccagaccccagagggaggctgaaggtgaacccacagccaggaccagcacctctggctcctcggaccttc

SEQ ID NO: 725784 - DNA, 120 bp, Artificial Sequence
  ENSG00000198208_12 (sequence is synthesized)
caaaggccccaggtggccacctgcaccttcaagctaggagggctggccagaactcagacgctgggccccctcgggggctcacttgggttcctgagggggccggcccggtgctagggggct

SEQ ID NO: 725785 - DNA, 120 bp, Artificial Sequence
  ENSG00000198208_13 (sequence is synthesized)
gtggccgaggcatggatcagagctgcctgtcagcagatggggccggccggggctgtggcagggccacctggagtgtgagagaggagcaggtgaagcagtgggcggcagagatgctggtag

SEQ ID NO: 725786 - DNA, 120 bp, Artificial Sequence
  ENSG00000198208_14 (sequence is synthesized)
cgctggaggcgctgcacgagcagggggtgctgtgccgggacctccaccccgggaacctgctcctggaccaggcaggtcacatccggctcacatattttggccagtggtcagaggtggagc

SEQ ID NO: 725787 - DNA, 120 bp, Artificial Sequence
  ENSG00000198208_15 (sequence is synthesized)
cccagtgctgcggggaggccgtggacaatctctacagcgccccagaggtgggtgggatttccgagctgacggaagcctgtgactggtggagctttgggtctctactgtatgaactgctga

SEQ ID NO: 725788 - DNA, 120 bp, Artificial Sequence
  ENSG00000198208_16 (sequence is synthesized)
cgggaatggcactgtcccagagccacccttcaggaatccaggcccacacccagctccagctgcccgagtggctcagtcgcccagcggcctctctgctgactgagctgctgcagttcgagc

SEQ ID NO: 725789 - DNA, 120 bp, Artificial Sequence
  ENSG00000198208_17 (sequence is synthesized)
ctacccggcgcctgggcatgggagaaggtggtgtcagcaaactcaagtcccatccctttttcagtaccatccaatggagcaagctggtggggtaagagggcagagcgggtgacggaagca

SEQ ID NO: 725790 - DNA, 120 bp, Artificial Sequence
  ENSG00000198208_18 (sequence is synthesized)
gctggcctggtctggatcgcctctcctccttgcctgacacccaacccagggctggccctctatcagcgggctttgggcgaggaatggagggcactgtctgtcctgctgggctcccactgg

SEQ ID NO: 725791 - DNA, 120 bp, Artificial Sequence
  ENSG00000198208_19 (sequence is synthesized)
ggcctcagaattatggccaccacccaggaagggccagctcctggaaaagctggaggtgggggcagtcaaggcttgccctgctaagcagcttgaaccatctacccatcagtcaacagaccc

SEQ ID NO: 725792 - DNA, 120 bp, Artificial Sequence
  ENSG00000198208_20 (sequence is synthesized)
gttgagcatgtggactcaccatgttaaaggttgccttctgtggcactggcgctgagctgttgaccacctgctgcaccctactgtgaggttctgtgactcactcactgccatgttgtgccc

SEQ ID NO: 725793 - DNA, 120 bp, Artificial Sequence
  ENSG00000198208_21 (sequence is synthesized)
ctgatccactggctcagtggacccaaaccagactgtcctggctagtcctcttagtcacacagcgagtaggcctcttccaccagaagctgttcgtgcagctggggaggcccagaagcaggg

SEQ ID NO: 725794 - DNA, 120 bp, Artificial Sequence
  ENSG00000198208_22 (sequence is synthesized)
atgccatctgttgtgcagggagggatgaggtaggggacaggatgacccccacccccacccccccacccccgattcctgaccatgccccctatcttgtgatttcagacttgggagagcaaa

SEQ ID NO: 725795 - DNA, 120 bp, Artificial Sequence
  ENSG00000198208_23 (sequence is synthesized)
agggaggggaagaaaataagagtaatggggggaggaaggaatgcatgggtctgccccttagagcaagtctgaaaccagaatcaagagtcctcctccccagtgggcctgtgtgggggaaga

SEQ ID NO: 725796 - DNA, 120 bp, Artificial Sequence
  ENSG00000198208_24 (sequence is synthesized)
ggggcagcctgccccaggggtgcaagaggacagcaattcagcttccaggccaaagcagtttagacaaggtgtgcccatcaggactccctctcaggccctggctgtttaccatgtcactgc

SEQ ID NO: 725797 - DNA, 120 bp, Artificial Sequence
  ENSG00000198208_25 (sequence is synthesized)
ctactgtgacttcatgcccttttgggataagaaaccacaaaacgcatggaacaactatccatggctcttagccagaaatgtcttgcctctggtctctgaaaagctggggtgagtggttac

SEQ ID NO: 725798 - DNA, 120 bp, Artificial Sequence
  ENSG00000198208_26 (sequence is synthesized)
ctcaaagacaattgcctccagtttgggggctcctctcagggttcaccctgtcaccggggcgtgggaccgacctgggaaatttccactagagttttgccctcagctcctccctgccagcat

SEQ ID NO: 725799 - DNA, 120 bp, Artificial Sequence
  ENSG00000198208_27 (sequence is synthesized)
cccagtcaccaccaggtggcgcttctgacacggtccacgtgcctggctctgaaggcccaactgtcagaccagacccctcactcatggtggggagacttgacttcctcgggctcttcagga

SEQ ID NO: 725800 - DNA, 120 bp, Artificial Sequence
  ENSG00000198208_28 (sequence is synthesized)
gactgagacagagaagacaagtgaaagcgcagcctgtacatgactctctgtggtccacgtcctgcctctccctggggtttacacggccccaataaagcctgctctggcctacggtgttct

SEQ ID NO: 725801 - DNA, 120 bp, Artificial Sequence
  ENSG00000198208_29 (sequence is synthesized)
cgcttcttccatgcaatgaccacggctcattggggcaggttggaaggctcccctgtagaagctccagagtgaagtcaagagcgagcttggggctgccaggaagtaggacgcagggctggt

SEQ ID NO: 725802 - DNA, 120 bp, Artificial Sequence
  ENSG00000198208_30 (sequence is synthesized)
ggtgagcagcatgccatgtgggcctcaggggaaggggtggggtcggggaggaccaggttctgtggggaagaggatgaagaagccttggaagaggctcatggtgcctgggggaataccagt

SEQ ID NO: 725803 - DNA, 120 bp, Artificial Sequence
  ENSG00000198208_31 (sequence is synthesized)
ttcatcctcacagtgaccccttgcaacagacggtagctcctgagaaaactgaagctcaaaaaggttaaggacacaacctagccagagttgcaagttagtgttccttctgctactctccct

SEQ ID NO: 725804 - DNA, 120 bp, Artificial Sequence
  ENSG00000198208_32 (sequence is synthesized)
aagtcaggctggaccacttccaaccaccgcttcatgaagcacaagtcccttctggaacttctgtgcttcatccacccaaagctacacatctgacactttgttgggccctgagtttagaat

SEQ ID NO: 725805 - DNA, 120 bp, Artificial Sequence
  ENSG00000198208_33 (sequence is synthesized)
actgtgggtcccagctcttacagtcgacctcctttcgataaaatggggtaaataatgcctattttgcaggtttaccagatagataaattaaagcttctaacaccaaatcctgttcttcct

SEQ ID NO: 725806 - DNA, 120 bp, Artificial Sequence
  ENSG00000198208_34 (sequence is synthesized)
ttcattcaacctaatttgtttttctatctactagagctctagttctactctctgggacccacttccctcctgtgacagaccttcacagagggatggcctcactgcaagagctcagcagac

SEQ ID NO: 725807 - DNA, 120 bp, Artificial Sequence
  ENSG00000198208_35 (sequence is synthesized)
agggactctggaaaagacaaggctgtgtttaagcctggactccatcacacctgccacctgcagtctaggttagctacccaccctgtacactcacgctcactgaccactgctcctaggtca

SEQ ID NO: 725808 - DNA, 120 bp, Artificial Sequence
  ENSG00000198208_36 (sequence is synthesized)
tcaaccctcacctgttcatgtgtattgaccttgagcatcttggtccacaaggctatcaaatccaaatgaaatgagatgcccccactcctcccaaatccatcactgaaataatgtaagccc

SEQ ID NO: 725809 - DNA, 120 bp, Artificial Sequence
  ENSG00000198208_37 (sequence is synthesized)
acacaaaaaatgcaagtctactggtgttttgaaagggcttcacaaagatggtgaccccaaattctctattctagagtatggcttgacaggctcaaggaaggtggggcactaagagactat

SEQ ID NO: 725810 - DNA, 120 bp, Artificial Sequence
  ENSG00000198208_38 (sequence is synthesized)
gatgctttatggaaacaaaacaaaaaacatcctaagccccccaaccatctgtatggacccctcgtctcagtcaagggtattccaaagttaacctgaaacgctagttcgggccatggtggg

SEQ ID NO: 725811 - DNA, 120 bp, Artificial Sequence
  ENSG00000198208_39 (sequence is synthesized)
aagagggagccagccattcctcattatactcccctcccttttggaattactgttaaaacaggctccttaagtctgatgagaagcatttacaatctattttctctgaagcctgctggctgg

SEQ ID NO: 725812 - DNA, 84 bp, Artificial Sequence
  ENSG00000198208_40 (sequence is synthesized)
aagcatttacaatctattttctctgaagcctgctggctggaggcttcatctgcataaaaccttggtctccacaaccccttactg

SEQ ID NO: 725813 - DNA, 120 bp, Artificial Sequence
  ENSG00000198208_41 (sequence is synthesized)
tttgattctgcctatgacaacatccccaggtcttgagctgtcctgcctctccagaccaaaccactgtacatcttacatgtactgactggtatcttatgtctccctaaaatgtattaaatg

SEQ ID NO: 725814 - DNA, 120 bp, Artificial Sequence
  ENSG00000198208_42 (sequence is synthesized)
aatgtataaaactaagttgtagccagacgaccctggacacatgttctcaggatctcctaagagttgtatcacaggccatcagtcactcacacttggctcagaataaatctcttcaaatat

SEQ ID NO: 725815 - DNA, 120 bp, Artificial Sequence
  ENSG00000198208_43 (sequence is synthesized)
ggctggccccgcacgctggatgccggaaagcagcggcccgcggcgcgctctggcgtgaagggccggtacgtgagggggaggcctggcccgcggacccggctcccagctcgggcagttctt

SEQ ID NO: 725816 - DNA, 120 bp, Artificial Sequence
  ENSG00000198208_44 (sequence is synthesized)
ttttcatttttccgggttgtgccgatcccttgggagtggccagacagggtggtggtgactgaagttatgaggacaggaactgggccatgtagcagatactgatggttgtattgatgactt

SEQ ID NO: 725817 - DNA, 120 bp, Artificial Sequence
  ENSG00000198208_45 (sequence is synthesized)
tttaaagtgaggtgcacatctggggtcatgacatatagtcatcataagtgtgtgcctgacttttctttaaatttctttatatcggtctccctaaaaacagtgttcacactagtgaaccca

SEQ ID NO: 725818 - DNA, 120 bp, Artificial Sequence
  ENSG00000198208_46 (sequence is synthesized)
ccacccaaaccacagacactgatagtgctggacatctctcggtggtgtgccagtttgtaaggctgggcccactttagttgggtcaagaggagggcagagggcattctaagctgaggggtg

SEQ ID NO: 725819 - DNA, 120 bp, Artificial Sequence
  ENSG00000198208_47 (sequence is synthesized)
ggagggagcagaggtgaggggctgaactaggccaggacacccagaggcggaaagtctgcgcccaagacagaagggaggcaggagtgggagccggccctggcatccatactctttttctcc

SEQ ID NO: 725820 - DNA, 120 bp, Artificial Sequence
  ENSG00000198208_48 (sequence is synthesized)
gggacctccaaggttgtctgctcctccctggccccagccagcctttcagggggcctaggctggagtctgttggccgaggctcctgggagtaccctgtgggctctgtgggcctcagagtgc

SEQ ID NO: 725821 - DNA, 120 bp, Artificial Sequence
  ENSG00000198208_49 (sequence is synthesized)
tgtgcctctgtggagggtgctgtgcccctgccgagtttctgcccagcaaggccattggctcctaccgcatgactgttgggggaagccctgcaaccccctcccctgtatcagctgtcctca

SEQ ID NO: 725822 - DNA, 120 bp, Artificial Sequence
  ENSG00000198208_50 (sequence is synthesized)
ctgactgaggtgaggtgtagcccggccagaggaagcagctgcctagcctgaggaaggtgctgggaggggcacagaactgtgtctgaaccacgtgtgcttcgtgctcagtgtctgatgtgg

SEQ ID NO: 725823 - DNA, 120 bp, Artificial Sequence
  ENSG00000198208_51 (sequence is synthesized)
gtgcagagggcagtaggggcaacacatttctatatgttggtggccaaccaccaccaatgttcccagggtaaaatgggggttctgtgggccaggctgccagggagcaggccccctagaggc

SEQ ID NO: 725824 - DNA, 120 bp, Artificial Sequence
  ENSG00000198208_52 (sequence is synthesized)
accatcatcccacacggagtcccctacatgacgaagctgctcaggtactttgtgagcgaggactccatcttcctgcacctggagcatgtgcaaggtcacatccggctcacatattttggc

SEQ ID NO: 725825 - DNA, 120 bp, Artificial Sequence
  ENSG00000198208_53 (sequence is synthesized)
agctgaggggctgcagggtggtcggggtcatcgagaaggtgcagctggtccaggacccggcaaccggagggacctttgtggtgaaggcaggtgccaccctgcccctgccactctgcattc

SEQ ID NO: 725826 - DNA, 120 bp, Artificial Sequence
  ENSG00000198208_54 (sequence is synthesized)
cccttggatctttctcagggctcttggaaactcctacccagaacctgcatttgaagcctgcactccctcccacaaaagctggttgttctgcctgaacatgccccactttccagatggaca

SEQ ID NO: 725827 - DNA, 120 bp, Artificial Sequence
  ENSG00000198208_55 (sequence is synthesized)
cacatgcatgcacacacacacatacacatacacatacacatacacacaaacacacatgcacacacactgccccctctttggctagagggtggaggacccagattctacaggggcagtggg

SEQ ID NO: 725828 - DNA, 120 bp, Artificial Sequence
  ENSG00000198208_56 (sequence is synthesized)
agaaaacagaatcctgagctggttatgattctatcattaccaccacttaggaaggacctggatccatgaaaagaccttacccactttagctctgaccccttcagtctttggaggtgaata

SEQ ID NO: 725829 - DNA, 120 bp, Artificial Sequence
  ENSG00000198208_57 (sequence is synthesized)
acctggagcatgtgcaaggtgagcaggcctggggccccctgtcagctccccaggcctttggggtatgtcgtcaacccttaaaatgcggagccctggcagggcgtggtggctcacgcctgt

SEQ ID NO: 725830 - DNA, 120 bp, Artificial Sequence
  ENSG00000198216_0 (sequence is synthesized)
gctgctgctgcctctccgaagagctcgcggagctccccagaggcggtggtccccgtgcttgtctggatgcggctctgagtctccgtgtgtctttctgcttgttgctgtgtgcgggtgttc

SEQ ID NO: 725831 - DNA, 120 bp, Artificial Sequence
  ENSG00000198216_1 (sequence is synthesized)
ggccgcgatcacctttgtgtgtcttctgtctgtttaaacctcaggatggctcgcttcggggaggcggtggtcgccaggccagggtccggcgatggagactcggaccagagcaggaaccgg

SEQ ID NO: 725832 - DNA, 120 bp, Artificial Sequence
  ENSG00000198216_2 (sequence is synthesized)
caaggaacccccgtgccggcctcggggcaggcggccgcctacaagcagacgaaagcacagagggcgcggactatggctttgtacaaccccattcccgtccggcagaactgtttcaccgtc

SEQ ID NO: 725833 - DNA, 120 bp, Artificial Sequence
  ENSG00000198216_3 (sequence is synthesized)
aacagatccctgttcatcttcggagaagataacattgtcaggaaatatgccaagaagctcatcgattggccgccatttgagtacatgatcctggccaccatcattgccaactgcatcgtc

SEQ ID NO: 725834 - DNA, 120 bp, Artificial Sequence
  ENSG00000198216_4 (sequence is synthesized)
ctggccctggagcagcatcttcctgaggatgacaagacccccatgtcccgaagactggagaagacagaaccttatttcattgggatcttttgctttgaagctgggatcaaaattgtggcc

SEQ ID NO: 725835 - DNA, 120 bp, Artificial Sequence
  ENSG00000198216_5 (sequence is synthesized)
ctggggttcatcttccataagggctcttacctccgcaatggctggaatgtcatggacttcatcgtggtcctcagtggcatcctggccactgcaggaacccacttcaatactcacgtggac

SEQ ID NO: 725836 - DNA, 120 bp, Artificial Sequence
  ENSG00000198216_6 (sequence is synthesized)
ctgaggaccctccgggctgtgcgtgtcctgcggcctttgaagctcgtgtcagggatacctagcctgcagattgtgttgaagtccatcatgaaggccatggtacctcttctgcagattggc

SEQ ID NO: 725837 - DNA, 120 bp, Artificial Sequence
  ENSG00000198216_7 (sequence is synthesized)
cttctgctcttctttgccatcctgatgtttgctatcattggtttggagttctacagtggcaagttacatcgagcatgcttcatgaacaattcaggtattctagaaggatttgacccccct

SEQ ID NO: 725838 - DNA, 120 bp, Artificial Sequence
  ENSG00000198216_8 (sequence is synthesized)
cacccatgtggtgtgcagggctgcccagctggttatgaatgcaaggactggatcggccccaatgatgggatcacccagtttgataacatcctttttgctgtgctgactgtcttccagtgc

SEQ ID NO: 725839 - DNA, 120 bp, Artificial Sequence
  ENSG00000198216_9 (sequence is synthesized)
atcaccatggaagggtggaccactgtgctgtacaataccaatgatgccttaggagccacctggaattggctgtacttcatccccctcatcatcattggatccttctttgttctcaaccta

SEQ ID NO: 725840 - DNA, 120 bp, Artificial Sequence
  ENSG00000198216_10 (sequence is synthesized)
gtcctgggagtgctttccggggaatttgccaaagagagagagagagtggagaaccgaagggctttcatgaagctgcggcgccagcagcagattgagcgtgagctgaatggctaccgtgcc

SEQ ID NO: 725841 - DNA, 120 bp, Artificial Sequence
  ENSG00000198216_11 (sequence is synthesized)
tggatagacaaagcagaggaagtcatgctcgctgaagaaaataaaaatgctggaacatccgccttagaagtgcttcgaagggcaaccatcaagaggagccggacagaggccatgactcga

SEQ ID NO: 725842 - DNA, 120 bp, Artificial Sequence
  ENSG00000198216_12 (sequence is synthesized)
gactccagtgatgagcactgtgttgatatctcctctgtgggcacacctctggcccgagccagtatcaaaagtgcaaaggtagacggggtctcttatttccggcacaaggaaaggcttctg

SEQ ID NO: 725843 - DNA, 120 bp, Artificial Sequence
  ENSG00000198216_13 (sequence is synthesized)
cgcatctccattcgccacatggttaaatcccaggtgttttactggattgtgctgagccttgtggcactcaacactgcctgtgtggccattgtccatcacaaccagccccagtggctcacc

SEQ ID NO: 725844 - DNA, 120 bp, Artificial Sequence
  ENSG00000198216_14 (sequence is synthesized)
cacctcctctactatgcagaatttctgtttctgggactcttcctcttggagatgtccctgaagatgtatggcatggggcctcgcctttattttcactcttcattcaactgctttgatttt

SEQ ID NO: 725845 - DNA, 120 bp, Artificial Sequence
  ENSG00000198216_15 (sequence is synthesized)
ggggtcacagtgggcagtatctttgaagtggtctgggcaatcttcagacctggtacgtcttttggaatcagtgtcttgcgagccctccggcttctaagaatatttaaaataaccaagtat

SEQ ID NO: 725846 - DNA, 120 bp, Artificial Sequence
  ENSG00000198216_16 (sequence is synthesized)
tgggcttccctacggaatttggtggtctccttgatgagctcaatgaagtctatcatcagtttgcttttcctcctcttcctcttcatcgttgtctttgctctcctaggaatgcagttattt

SEQ ID NO: 725847 - DNA, 120 bp, Artificial Sequence
  ENSG00000198216_17 (sequence is synthesized)
ggaggcaggtttaactttaatgatgggactccttcggcaaattttgataccttccctgcagccatcatgactgtgttccagatcctgacgggtgaggactggaatgaggtgatgtacaat

SEQ ID NO: 725848 - DNA, 120 bp, Artificial Sequence
  ENSG00000198216_18 (sequence is synthesized)
gggatccgctcccagggtggggtcagctcaggcatgtggtctgccatctacttcattgtgctcaccttgtttggcaactacacgctactgaatgtgttcttggctatcgctgtggataat

SEQ ID NO: 725849 - DNA, 120 bp, Artificial Sequence
  ENSG00000198216_19 (sequence is synthesized)
ctcgccaacgcccaggaactgaccaaggatgaacaggaggaagaagaggccttcaaccagaaacatgcactgcagaaggccaaggaggtcagcccgatgtctgcacccaacatgccttcg

SEQ ID NO: 725850 - DNA, 120 bp, Artificial Sequence
  ENSG00000198216_20 (sequence is synthesized)
atcgaaagagacagaaggagaagacaccacatgtcgatgtgggagccacgcagcagccacctgagggagcggaggcgccggcaccacatgtccgtgtgggagcagcgtaccagccagctg

SEQ ID NO: 725851 - DNA, 120 bp, Artificial Sequence
  ENSG00000198216_21 (sequence is synthesized)
aggaagcacatgcagatgtccagccaggaggccctcaacagagaggaggcgccgaccatgaacccgctcaaccccctcaacccgctcagctccctcaacccgctcaatgcccaccccagc

SEQ ID NO: 725852 - DNA, 120 bp, Artificial Sequence
  ENSG00000198216_22 (sequence is synthesized)
ctttatcggcgacccagggccattgagggcctggccctgggcctggccctggagaagttcgaggaggagcgcatcagccgtggggggtccctcaagggggatggaggggaccgatccagt

SEQ ID NO: 725853 - DNA, 120 bp, Artificial Sequence
  ENSG00000198216_23 (sequence is synthesized)
gccctggacaaccagaggacccctttgtccctgggccagcgggagccaccatggctggccaggccctgtcatggaaactgtgacccgactcagcaggaggcagggggaggagaggctgtg

SEQ ID NO: 725854 - DNA, 120 bp, Artificial Sequence
  ENSG00000198216_24 (sequence is synthesized)
gtgacctttgaggaccgggccaggcacaggcagagccaacggcgcagccggcatcgccgcgtcaggacagaaggcaaggagtcctcttcagcctcccggagcaggtctgccagccaggaa

SEQ ID NO: 725855 - DNA, 120 bp, Artificial Sequence
  ENSG00000198216_25 (sequence is synthesized)
cgcagtctggatgaagccatgcccactgaaggggagaaggaccatgagctcaggggcaaccatggtgccaaggagccaacgatccaagaagagagagcccaggatttaaggaggaccaac

SEQ ID NO: 725856 - DNA, 120 bp, Artificial Sequence
  ENSG00000198216_26 (sequence is synthesized)
agtctgatggtgtccagaggctccgggctggcaggaggccttgatgaggctgacacccccctagtcctgccccatcctgagctggaagtggggaagcacgtggtgctgacggagcaggag

SEQ ID NO: 725857 - DNA, 120 bp, Artificial Sequence
  ENSG00000198216_27 (sequence is synthesized)
ccagaaggcagcagtgagcaggccctgctggggaatgtgcagctagacatgggccgggtcatcagccagagcgagcctgacctctcctgcatcacggccaacacggacaaggccaccacc

SEQ ID NO: 725858 - DNA, 120 bp, Artificial Sequence
  ENSG00000198216_28 (sequence is synthesized)
gagagcaccagcgtcaccgtcgccatccccgacgtggaccccttggtggactcaaccgtggtgcacattagcaacaagacggatggggaagccagtcccttgaaggaggcagagatcaga

SEQ ID NO: 725859 - DNA, 120 bp, Artificial Sequence
  ENSG00000198216_29 (sequence is synthesized)
gaggatgaggaggaggtggagaagaagaagcagaagaaggagaagcgtgagacaggcaaagccatggtgccccacagctcaatgttcatcttcagcaccaccaacccgatccggagggcc

SEQ ID NO: 725860 - DNA, 120 bp, Artificial Sequence
  ENSG00000198216_30 (sequence is synthesized)
tgccactacatcgtgaacctgcgctactttgagatgtgcatcctcctggtgattgcagccagcagcatcgccctggcggcagaggaccccgtcctgaccaactcggagcgcaacaaagtc

SEQ ID NO: 725861 - DNA, 120 bp, Artificial Sequence
  ENSG00000198216_31 (sequence is synthesized)
ctgaggtattttgactatgtgttcacgggcgtgttcacctttgagatggttataaagatgatagaccaaggcttgatcctgcaggatgggtcctacttccgagacttgtggaacatcctg

SEQ ID NO: 725862 - DNA, 120 bp, Artificial Sequence
  ENSG00000198216_32 (sequence is synthesized)
gactttgtggtggtcgttggcgcattggtggcctttgctctggcgaacgctttgggaaccaacaaaggacgggacatcaagaccatcaagtctctgcgggtgctccgagttctaaggcca

SEQ ID NO: 725863 - DNA, 120 bp, Artificial Sequence
  ENSG00000198216_33 (sequence is synthesized)
ctgaaaaccatcaagcgcttgcccaagctcaaggccgtcttcgactgcgtagtgacctccttgaagaatgtcttcaacatactcattgtgtacaagctcttcatgttcatctttgctgtc

SEQ ID NO: 725864 - DNA, 120 bp, Artificial Sequence
  ENSG00000198216_34 (sequence is synthesized)
atcgcagttcagctcttcaagggaaagttcttttattgcacggacagttccaaggacacagagaaggagtgcataggcaactatgtagatcatgagaaaaacaagatggaggtgaagggc

SEQ ID NO: 725865 - DNA, 120 bp, Artificial Sequence
  ENSG00000198216_35 (sequence is synthesized)
cgggaatggaagcgccatgaattccactacgacaacattatctgggccctgctgaccctcttcaccgtctccacaggggaaggatggcctcaagttctgcagcactctgtagatgtgaca

SEQ ID NO: 725866 - DNA, 120 bp, Artificial Sequence
  ENSG00000198216_36 (sequence is synthesized)
gaggaagaccgaggcccaagccgcagcaaccgcatggagatgtctatcttttatgtagtctactttgtggtcttccccttcttctttgtcaatatctttgtggctctcatcatcatcacc

SEQ ID NO: 725867 - DNA, 120 bp, Artificial Sequence
  ENSG00000198216_37 (sequence is synthesized)
ttccaggagcaaggggataagatgatggaggagtgcagcctggagaagaatgagagggcgtgcatcgacttcgccatcagcgccaaacctctcacccgctacatgccgcagaacagacac

SEQ ID NO: 725868 - DNA, 120 bp, Artificial Sequence
  ENSG00000198216_38 (sequence is synthesized)
accttccagtaccgcgtgtggcactttgtggtgtctccgtcctttgagtacaccattatggccatgatcgccttgaatactgttgtgctgatgatgaagtattattctgctccctgtacc

SEQ ID NO: 725869 - DNA, 120 bp, Artificial Sequence
  ENSG00000198216_39 (sequence is synthesized)
tatgagctggccctgaagtacctgaatatcgccttcaccatggtgttttccctggaatgtgtcctgaaggtcatcgcttttggctttttgaactatttccgagacacctggaatatcttt

SEQ ID NO: 725870 - DNA, 120 bp, Artificial Sequence
  ENSG00000198216_40 (sequence is synthesized)
tcatcaccgtgattggcagtatcacagaaattatcctgacagacagcaagctggtgaacaccagtggcttcaatatgagctttctgaagctcttccgagctgcccgcctcataaagctcc

SEQ ID NO: 725871 - DNA, 120 bp, Artificial Sequence
  ENSG00000198216_41 (sequence is synthesized)
tgcgtcagggctataccatacgcattttgctgtggacctttgtgcagtcctttaaggccctcccttatgtctgccttttaattgccatgcttttcttcatttatgccatcattgggatgc

SEQ ID NO: 725872 - DNA, 120 bp, Artificial Sequence
  ENSG00000198216_42 (sequence is synthesized)
aggtatttggaaacataaaattagacgaggagagtcacatcaaccggcacaacaacttccggagtttctttgggtccctaatgctactcttcaggagtgccacaggtgaggcctggcagg

SEQ ID NO: 725873 - DNA, 120 bp, Artificial Sequence
  ENSG00000198216_43 (sequence is synthesized)
agattatgctgtcatgccttggggagaagggctgtgagcctgacaccaccgcaccatcagggcagaacgagaacgaacgctgcggcaccgatctggcctacgtgtactttgtctccttca

SEQ ID NO: 725874 - DNA, 120 bp, Artificial Sequence
  ENSG00000198216_44 (sequence is synthesized)
tcttcttctgctccttcttgatgctcaacctgtttgtggccgtcatcatggacaactttgagtacctgactcgggactcctccatcctggggcctcaccacttggacgagtttgtccgcg

SEQ ID NO: 725875 - DNA, 120 bp, Artificial Sequence
  ENSG00000198216_45 (sequence is synthesized)
tctgggcagaatatgaccgagcagcatgtggccgcatccattacactgagatgtatgaaatgctgactctcatgtcacctccgctaggcctcggcaagagatgtccctccaaagtggcat

SEQ ID NO: 725876 - DNA, 120 bp, Artificial Sequence
  ENSG00000198216_46 (sequence is synthesized)
ataagaggttggtcctgatgaacatgccagtagctgaggacatgacggtccacttcacctccacacttatggctctgatccggacagctctggacattaaaattgccaaaggtggtgcag

SEQ ID NO: 725877 - DNA, 120 bp, Artificial Sequence
  ENSG00000198216_47 (sequence is synthesized)
acaggcagcagctagactcagagctacaaaaggagaccctagccatctggcctcacctatcccagaagatgctggatctgcttgtgcccatgcccaaagcctctgacctgactgtgggca

SEQ ID NO: 725878 - DNA, 120 bp, Artificial Sequence
  ENSG00000198216_48 (sequence is synthesized)
aaatctatgcagcaatgatgatcatggactactataagcagagtaaggtgaagaagcagaggcagcagctggaggaacagaaaaatgcccccatgttccagcgcatggagccttcatctc

SEQ ID NO: 725879 - DNA, 120 bp, Artificial Sequence
  ENSG00000198216_49 (sequence is synthesized)
tgcctcaggagatcattgctaatgccaaagccctgccttacctccagcaggaccccgtttcaggcctgagtggccggagtggatacccttcgatgagtccactctctccccaggatatat

SEQ ID NO: 725880 - DNA, 120 bp, Artificial Sequence
  ENSG00000198216_50 (sequence is synthesized)
tccagttggcttgtatggaccccgccgatgacggacagttccaagaacggcagtctctggtggtgacagaccctagctccatgagacgttcattttccactattcgggataagcgttcaa

SEQ ID NO: 725881 - DNA, 120 bp, Artificial Sequence
  ENSG00000198216_51 (sequence is synthesized)
attcctcgtggttggaggaattctccatggagcgaagcagtgaaaatacctacaagtcccgtcgccggagttaccactcctccttgcggctgtcagcccaccgcctgaactctgattcag

SEQ ID NO: 725882 - DNA, 120 bp, Artificial Sequence
  ENSG00000198216_52 (sequence is synthesized)
gccacaagtctgacactcaccgctcagggggcagggagcggggacgatcaaaagagcgaaagcatcttctctctcctgatgtctcccgctgcaattcagaagagcgagggacccaggctg

SEQ ID NO: 725883 - DNA, 120 bp, Artificial Sequence
  ENSG00000198216_53 (sequence is synthesized)
actgggagtccccagagcgccgtcaatccaggtcacccagtgagggcaggtcacagacgcccaacagacagggcacaggttccctaagtgagagctccatcccctctgtctctgacacca

SEQ ID NO: 725884 - DNA, 120 bp, Artificial Sequence
  ENSG00000198216_54 (sequence is synthesized)
gcaccccaagaagaagtcgtcggcagctcccacccgtcccgccaaagccccggcccctcctttcctacagctccctgattcgacacgcgggcagcatctctccacctgctgatggaagcg

SEQ ID NO: 725885 - DNA, 120 bp, Artificial Sequence
  ENSG00000198216_55 (sequence is synthesized)
aggagggctccccgctgacctcccaagctctggagagcaacaatgcttgcctgaccgagtcttccaactctccgcacccccagcagagccaacatgcctccccacagcgctacatctccg

SEQ ID NO: 725886 - DNA, 120 bp, Artificial Sequence
  ENSG00000198216_56 (sequence is synthesized)
agccctacttggccctgcacgaagactcccacgcctcagactgtggtgaggaggagacgctcactttcgaagcagccgtggctactagcctgggccgttccaacaccatcggctcagccc

SEQ ID NO: 725887 - DNA, 120 bp, Artificial Sequence
  ENSG00000198216_57 (sequence is synthesized)
cacccctgcggcatagctggcagatgcccaacgggcactatcggcggcggaggcgcggggggcctgggccaggcatgatgtgtggggctgtcaacaacctgctaagtgacacggaagaag

SEQ ID NO: 725888 - DNA, 120 bp, Artificial Sequence
  ENSG00000198216_58 (sequence is synthesized)
atgacaaatgctagaggctgctcccccctccgatgcatgctcttctctcacatggagaaaaccaagacagaattgggaagccagtgcggcccgggggggaggaagagggaaaaggaagat

SEQ ID NO: 725889 - DNA, 120 bp, Artificial Sequence
  ENSG00000198216_59 (sequence is synthesized)
ggaaggacaccatgcattatcagagaagaggaagtaaaggacaatcagaacaccagtcaaacccaccaaattgctttattcccctttgcaagatgggcactgccatagttctgcctcttt

SEQ ID NO: 725890 - DNA, 120 bp, Artificial Sequence
  ENSG00000198216_60 (sequence is synthesized)
gctggggaaagaaaccaggaacgtggagggttattactgcgggagaagggacacgaggatggctttgcttccccttgccccttcccacttttctaaaagctgtggagggatctagctggc

SEQ ID NO: 725891 - DNA, 120 bp, Artificial Sequence
  ENSG00000198216_61 (sequence is synthesized)
ctatgtctacactcagtgccctgagaagcctggaagactttctggctcttaactggggagtagtggagaccataggagaggactctcctccctcaccagctcttacgcctcagccagcac

SEQ ID NO: 725892 - DNA, 120 bp, Artificial Sequence
  ENSG00000198216_62 (sequence is synthesized)
cactgccaccagggcaactgcagcagcatctcatgcataaccctgtggcttgcttcccccagggcagcacaggctaagtcaggaacatcggatgccagggagggaggagaaagccgaagc

SEQ ID NO: 725893 - DNA, 120 bp, Artificial Sequence
  ENSG00000198216_63 (sequence is synthesized)
gaaaggggtcagggtgctgaggcaacagcagcaagggctggtctggacaagaaaagccatagcccggcagcccctaccatgagggagacagagaaacagaactggtggtgctggggggta

SEQ ID NO: 725894 - DNA, 120 bp, Artificial Sequence
  ENSG00000198216_64 (sequence is synthesized)
tagccccccatccttgaggcctgtcacccacacagtaggtgctgagagttaggacaggtcaggaagtcccccagggtccacaaaggtgcctgaggctctggtaagggtgaagataaaagt

SEQ ID NO: 725895 - DNA, 120 bp, Artificial Sequence
  ENSG00000198216_65 (sequence is synthesized)
atttaacaaccgctatggcatcaatgtaagtggagtttggtcctagtgccggagcccatgctattccaggcattggctctttagatgccagtcatgggggaaccctgagggtgtgggtag

SEQ ID NO: 725896 - DNA, 120 bp, Artificial Sequence
  ENSG00000198216_66 (sequence is synthesized)
agtagcaggggccacctaagagattaaaaacagtctgttttccaaccagtgtggaagcaattaaatatgcgtaacagtgctacggccacaccagcacctcctggctgaaggtcagcccac

SEQ ID NO: 725897 - DNA, 120 bp, Artificial Sequence
  ENSG00000198216_67 (sequence is synthesized)
actctggtccatgaggcagcaaggccagtgctgtgccaagcccggtaaggccaagtgccgaggcccagccttccctgccactcctctgagagggcagaacacacatatccaagtaggcta

SEQ ID NO: 725898 - DNA, 120 bp, Artificial Sequence
  ENSG00000198216_68 (sequence is synthesized)
cccaccactgggtagggatttctgtaaagatgggaaaggctgatagattgaaataagcttctgtgaaagtctggatttactgaggacctcccctgaggagggaccgttgggaccgcagat

SEQ ID NO: 725899 - DNA, 120 bp, Artificial Sequence
  ENSG00000198216_69 (sequence is synthesized)
tctgcagctggtgtggggttcaggtcagtttgtcaggatgctttaaggtgattagtaaatatacctcagcttagacttgggctgctccttctagcaaagcaggctccagtggggcctcat

SEQ ID NO: 725900 - DNA, 120 bp, Artificial Sequence
  ENSG00000198216_70 (sequence is synthesized)
catacaggatgacaagactggggccctgttcaccttgaacatgcccctgggccaagatggggcttcacccctccccagagtaagagctggggctgacagtcccaccctgtcattcctaat

SEQ ID NO: 725901 - DNA, 120 bp, Artificial Sequence
  ENSG00000198216_71 (sequence is synthesized)
agcccaaacgcagaagcactgagcaagagagccctttcttgccaagccagtgctcttttggtatatggcatacagctccattggaggggacacatcactggctttatctggtggaaatgt

SEQ ID NO: 725902 - DNA, 120 bp, Artificial Sequence
  ENSG00000198216_72 (sequence is synthesized)
acctttcccttaagttcctccttagtgccatcacagcaggtgaatgggtgccctacggggccctccttcccccaccaggaacagatggaacctgccacccaggatcctgatctgccctgc

SEQ ID NO: 725903 - DNA, 120 bp, Artificial Sequence
  ENSG00000198216_73 (sequence is synthesized)
actgagcactcagtggataaacactcctccagcccagacacactcctcctcttgggcaggagcaatccagagttgttatttttcttagaaggagcctcttttccctctattttttaaatt

SEQ ID NO: 725904 - DNA, 120 bp, Artificial Sequence
  ENSG00000198216_74 (sequence is synthesized)
gaaatataatagctgcatcagccctgaaaagccaaattcaaccacatggctggagaatcatttgtcatggccccgccttctcttctgatactaatggagcttcatgacccacggtcagcc

SEQ ID NO: 725905 - DNA, 120 bp, Artificial Sequence
  ENSG00000198216_75 (sequence is synthesized)
cccaaaccaaagttgtcccaacagaggaggccagtgaggcagagacagagctctcccactctcagaccctcttttgtcttcattttcctctcccacttagcacatgtgtgcttgagggtg

SEQ ID NO: 725906 - DNA, 120 bp, Artificial Sequence
  ENSG00000198216_76 (sequence is synthesized)
gctgggaatgtgatatacagcaccctgatcctaacaggtgtgattgttacgtaagacgctgatactgggccttgtattgcttttaaagtttcctctgctcagcatcatttcatgccaaag

SEQ ID NO: 725907 - DNA, 120 bp, Artificial Sequence
  ENSG00000198216_77 (sequence is synthesized)
tgctgctatgggctgctttgtgtgcacaaaattgctttttccacctcggaaatgcagctttccctagggggaggcctacaacaggacgaccattctgagccagtgagtctattgcatggt

SEQ ID NO: 725908 - DNA, 120 bp, Artificial Sequence
  ENSG00000198216_78 (sequence is synthesized)
gttttgagaaagggaattttagtgacaccttatgccatttcaagaggagaaatgcaggctggcagagcaatttccagaaatggaatttgcctgcaaatagtataaacaacactaaattta

SEQ ID NO: 725909 - DNA, 120 bp, Artificial Sequence
  ENSG00000198216_79 (sequence is synthesized)
ctgtgccaggaaatcttcctgaactccttgaactcatacacacaggtatttgagtcctgaataaagtgttggaaagcactgcagatgcggtcacctgactgaccacctgggttttctatt

SEQ ID NO: 725910 - DNA, 120 bp, Artificial Sequence
  ENSG00000198216_80 (sequence is synthesized)
accagtgaatttcttttattcaccttcccttgaccaagaaattgggtttcttttccctcagcctgcacttactcttctattaagaccagaaaataaaataattttccgttgagtcacaaa

SEQ ID NO: 725911 - DNA, 120 bp, Artificial Sequence
  ENSG00000198216_81 (sequence is synthesized)
tgacggacagttccaagaacggcagtctctggagccagaggttagtgaattaaaaagcgtgcagccctctaaccatggcatctaccttccttcggacacccaggagcatgcgggatctgg

SEQ ID NO: 725912 - DNA, 120 bp, Artificial Sequence
  ENSG00000198216_82 (sequence is synthesized)
aagtgaatgccagccttcccttgctgggtgtcagagtctgcctcccttgaaaagaggcccctgtagaccccaacacctattcttttctctggttaattacagcagcatctgagaaattcc

SEQ ID NO: 725913 - DNA, 120 bp, Artificial Sequence
  ENSG00000198216_83 (sequence is synthesized)
atgcaaaagaagactacaaccagtgtttcagatataccacaagatcaaatttgggcactggtggtccacctcagaagactcttgagtcatatattcagtttctcttgctaatatatgact

SEQ ID NO: 725914 - DNA, 120 bp, Artificial Sequence
  ENSG00000198216_84 (sequence is synthesized)
cgtcttcaccatctcctcaaaacaagagcaaagccaagatagaggaaggtaaaaggaggaggaaaggaaaccaaggcagggagatgttctaagtaggtttgcatttagttacccctcatt

SEQ ID NO: 725915 - DNA, 120 bp, Artificial Sequence
  ENSG00000198216_85 (sequence is synthesized)
tcacttaaggctccagacagactccaggtagggaatgcatgctgtctctttctctgtgtctgtctccccatctcctagaggacagagtgccagcgacctctggacaggggcagggctcca

SEQ ID NO: 725916 - DNA, 120 bp, Artificial Sequence
  ENSG00000198216_86 (sequence is synthesized)
gccaaggtgcccctgagccagggtcaacatagaatttcctgccccgtgaagggctggcaccagctagcatccccttggctccacatgagtcatgaacacaattgtcagtgggggtctctg

SEQ ID NO: 725917 - DNA, 120 bp, Artificial Sequence
  ENSG00000198216_87 (sequence is synthesized)
ctgctcttctggctgaagaatctgtttttcttctgggcttcacttgtagttcctattcaatgtctccatagggcactgagatcaccaagaacattacccagaagctgaagtccaaatgtt

SEQ ID NO: 725918 - DNA, 120 bp, Artificial Sequence
  ENSG00000198216_88 (sequence is synthesized)
ctagattttgacctctcttgactctggggccacaaagagaaggccccataatccacctctcagccagtatctcccttctttgcacagattcctcccaaccccatagagcctatgtggtga

SEQ ID NO: 725919 - DNA, 120 bp, Artificial Sequence
  ENSG00000198216_89 (sequence is synthesized)
gcatgagggtcgtcttccctctgttctcccatcccagcctctgttttgctgcatgttagcgctgatccagctcctgagatggttaattccacccaatccaagcttatttgcttgcctgac

SEQ ID NO: 725920 - DNA, 120 bp, Artificial Sequence
  ENSG00000198216_90 (sequence is synthesized)
tgactccaccactctctcagctatgggggaatattgcattctaatgaaatagggtttggaactcacctggtgctcctcgcaagacaactgacacaaggtgtagggtgtgggggtggacaa

SEQ ID NO: 725921 - DNA, 120 bp, Artificial Sequence
  ENSG00000198216_91 (sequence is synthesized)
aatgcccacctactggataaaagctcactgcaggaaaatgaggtctcctggcataatgcaacaaaaatctcatataattttgatttttaaaaagttgttctcaatttttcattacatcct

SEQ ID NO: 725922 - DNA, 120 bp, Artificial Sequence
  ENSG00000198216_92 (sequence is synthesized)
acttctcagccctctggatgtttcatttttttggacaaagtgtttctttagtggttggggccagggacaggttgagggatatttctcggctcatttataagatataaatattatgaggtt

SEQ ID NO: 725923 - DNA, 120 bp, Artificial Sequence
  ENSG00000198216_93 (sequence is synthesized)
gtatgtaaagaaagggcaaacgtacagcagaaggggagcaaatagctacctttcaaggattttgagatttgaaggttaaggaatttttactgctatttttgttcatcagtttcatgtctg

SEQ ID NO: 725924 - DNA, 120 bp, Artificial Sequence
  ENSG00000198216_94 (sequence is synthesized)
ttatgttttgagatcctcagaggcctagggttagcgtataccaagaatcctggtgagaggcgttgccatgccttggggtgaattcttccccactagctctctcacccagcctacaagtcc

SEQ ID NO: 725925 - DNA, 120 bp, Artificial Sequence
  ENSG00000198216_95 (sequence is synthesized)
ttctctcatagatcccagagcaatgggcaccgtccaggaggtacaggagaggactttatgatgcaggaaagaaggaagaagtgggtcccttgcaagtggccagacagggaatgatggttt

SEQ ID NO: 725926 - DNA, 120 bp, Artificial Sequence
  ENSG00000198216_96 (sequence is synthesized)
gactccagaaatcaggaatcaggttcaggtttggataacttctctttaaaatatctccacattgagactcttattttaacaaaatccaaacaaaattaactcagggcttgtgacctaacc

SEQ ID NO: 725927 - DNA, 120 bp, Artificial Sequence
  ENSG00000198216_97 (sequence is synthesized)
tttgtaagaaggtgatcaaagagatcctacattaataagcactgcctgtagcaccagctttgtctttttgtcttttgttgtttctttcctgaaccaccctgtacatcatagccaggtcta

SEQ ID NO: 725928 - DNA, 120 bp, Artificial Sequence
  ENSG00000198216_98 (sequence is synthesized)
ccccaaatagagcagcagctgatggcttctctgctgtctgtggagggagggctcggctgcagacctatggtgttttgtcagctgttaggtgctacagcccacccagtcagagtacataga

SEQ ID NO: 725929 - DNA, 120 bp, Artificial Sequence
  ENSG00000198216_99 (sequence is synthesized)
catagcgctttaagggacaaaggacaaacagaactatctttgctttccggaggccatctttttctttccttgaatcctttctgctttaaacttctgaggtttatgcatcccagagaggtc

SEQ ID NO: 725930 - DNA, 120 bp, Artificial Sequence
  ENSG00000198216_100 (sequence is synthesized)
acaccaagccaaagagaaaaaattcatagattgtcccagcctacccaaagggcctgaaaagcctctctaaacaaaactcaagatagctgagaagtatgaatggggttcacagcaaagtcc

SEQ ID NO: 725931 - DNA, 120 bp, Artificial Sequence
  ENSG00000198216_101 (sequence is synthesized)
aattgatggcttttgaggctgggacacccccaaactgcccttctgtttttgtagttttgctttcttccacccaccctctctccgcatgctgtaagttaggggagttagtatcttgaactt

SEQ ID NO: 725932 - DNA, 120 bp, Artificial Sequence
  ENSG00000198216_102 (sequence is synthesized)
ctaaatgcaaaaggagattttataataagccatgctacctgtaaatacattattgaggtttgcatttttatttttggaggtatgaaagagttgagtagaccaagtcaaaagaggtgtggg

SEQ ID NO: 725933 - DNA, 120 bp, Artificial Sequence
  ENSG00000198216_103 (sequence is synthesized)
gatttatgtttatttttatttgtttggggttgtttggttggtggctgggtttcttgtaacagacctattctggaatagcaaagaaggataccttggtgatctgcaatgtttctgaatctg

SEQ ID NO: 725934 - DNA, 120 bp, Artificial Sequence
  ENSG00000198216_104 (sequence is synthesized)
tttctctttaggaagtgattgccatcaaatttagtgatatgatatttgagtcaaaaatctgaggttatagtaccagctgtcttttctctctggtctcctttttgtcgtctttctctttct

SEQ ID NO: 725935 - DNA, 120 bp, Artificial Sequence
  ENSG00000198216_105 (sequence is synthesized)
gtctaaattggcctctgtcttttcctaaggacttaaaatataacccaaattaatgaagaactgccccaaaacttcagtgaaagccaaggaggtacagaattttttcaggacatctttaac

SEQ ID NO: 725936 - DNA, 120 bp, Artificial Sequence
  ENSG00000198216_106 (sequence is synthesized)
caatacaaaatttatgtcttaagaagataatttttacaatagtgtagtaatctgataaatgaaaactattggaagtcaatagttttttatattccagctttctgtattcaaacttgtgcc

SEQ ID NO: 725937 - DNA, 120 bp, Artificial Sequence
  ENSG00000198216_107 (sequence is synthesized)
ttcagcaagcatctcttcactttctttcccttgtcaattgaaacatgaatgtttggctaactcatgatgtaaagtgtctgttaagttaataatacataatttaaagcacttagtctccac

SEQ ID NO: 725938 - DNA, 120 bp, Artificial Sequence
  ENSG00000198216_108 (sequence is synthesized)
aaagcaatttagaaaaatcttcacttgttagatcccatgaagtacctatgaaattctcagcattgctataagcatttgattttttttaaggaaacttcctgtttaatggaatctgaatcc

SEQ ID NO: 725939 - DNA, 120 bp, Artificial Sequence
  ENSG00000198216_109 (sequence is synthesized)
aagatttgctttaatttcactctattcttcccattttcccttattcttcttgttgtctctctaattaaaaaaaaaaaaaacctaggcttttttttttctatccagaaagttgggttttca

SEQ ID NO: 725940 - DNA, 120 bp, Artificial Sequence
  ENSG00000198216_110 (sequence is synthesized)
tgatctgagcttccttatgtctccttctctttgtgcaaacttaaaccagtcatagattgtcacccagacatattctccaacccagcattggaaatctgaacgaatcttttctctttttgt

SEQ ID NO: 725941 - DNA, 120 bp, Artificial Sequence
  ENSG00000198216_111 (sequence is synthesized)
cctacaagtttgtcagagatgagaatggattgctgtctacattctacaaccagaccctagactttataccaggctgtgccacttcctcttcacttcactcagaggatggccccaaaactg

SEQ ID NO: 725942 - DNA, 120 bp, Artificial Sequence
  ENSG00000198216_112 (sequence is synthesized)
aaaaggaaatgaaataatcaaatataccaaatccgaatttgactttatttgatgactcaatattttccttccagtactctaatttttttttatggcaatggcctatatggcacaagaacc

SEQ ID NO: 725943 - DNA, 120 bp, Artificial Sequence
  ENSG00000198216_113 (sequence is synthesized)
accacttaaagcaaatctgttgaacatttttataagggatgagcaagaaaaacacactccaaaattttaaagtgccattaatcaatttttaagaataaaggtaatatgaaatgagggcta

SEQ ID NO: 725944 - DNA, 120 bp, Artificial Sequence
  ENSG00000198216_114 (sequence is synthesized)
aacaatgtaatataactgccagttaaggtagacagtagttgtggtcttagttacatttgatatggagttgtgtaatattaagcagatcccagtggagttagtaaaaacataggtattgag

SEQ ID NO: 725945 - DNA, 120 bp, Artificial Sequence
  ENSG00000198216_115 (sequence is synthesized)
ttttaatggctaccaattgggatatatacttagcctgcaggctgaactttagtcagtgtttttctatcatgttgttttgtgaacaagtcaaaatttatacaaagctaccctaagtgctgc

SEQ ID NO: 725946 - DNA, 120 bp, Artificial Sequence
  ENSG00000198216_116 (sequence is synthesized)
aattgcagaggaacttgcctcttcgtgatattagagggcagtccaactccgctcaaactgagtccaagatttgaattcatccagaaaaacaaatggaggagaaaagcctaatgcaccaca

SEQ ID NO: 725947 - DNA, 120 bp, Artificial Sequence
  ENSG00000198216_117 (sequence is synthesized)
tgtgtttggcatttcatggctgggacaatggagtagagggtaggaagacaagctgtagaacaaaagcaaagtgaggtagaaagtaacaggtcccagacgaggacagacttagagatgtgt

SEQ ID NO: 725948 - DNA, 120 bp, Artificial Sequence
  ENSG00000198216_118 (sequence is synthesized)
aaccttggatcctctttttcacttagaatatgggtaaacttcttagcacaagactggattaagagaagttctttctgttaaactcacctagggtagtggctttgaaggcctcagaggatt

SEQ ID NO: 725949 - DNA, 120 bp, Artificial Sequence
  ENSG00000198216_119 (sequence is synthesized)
aatagattcccaaaattttcttccagacctgggagatggagagaaagaggttcttgctttaaagcggctcgaagacaatctttatgacttcagcaactcttcaacatagtagcaccaata

SEQ ID NO: 725950 - DNA, 120 bp, Artificial Sequence
  ENSG00000198216_120 (sequence is synthesized)
aaggagagattatgttaacttcctagtggtgagaataccatgggatgggagaagggccagtgagtgggatgggaatgagcttcatcaggaacagatttcagactctgcagggtgcaccgg

SEQ ID NO: 725951 - DNA, 120 bp, Artificial Sequence
  ENSG00000198216_121 (sequence is synthesized)
ttctagcctcaaataacaacattgcaaggaggtggactacagggtccacaccctctgtccttcggggcccatggtcaggccattccctctttgttttgctcctagaggatgagcatgtaa

SEQ ID NO: 725952 - DNA, 120 bp, Artificial Sequence
  ENSG00000198216_122 (sequence is synthesized)
gatgagatcaggagggaaattgggtgctctgcctcaggctgttaaaatgctgctacctgcattctaaaacgtgcaagtcatgccccacaagacacctccttagggcagcatccactgtgg

SEQ ID NO: 725953 - DNA, 120 bp, Artificial Sequence
  ENSG00000198216_123 (sequence is synthesized)
tgtgccagcctgacacccctgcagtcacggtgtttgaatggcagctgatgctggcccacccagagtatcggtgcatctctcctaaagccacagttcagcactgcatgttgaccaggcgga

SEQ ID NO: 725954 - DNA, 120 bp, Artificial Sequence
  ENSG00000198216_124 (sequence is synthesized)
tatcctataatatagatgctcgtttggatccaaaaggaaaaccattaaaaataaaagaaagatgaaaaactttaatgttttgggggggataaaagaaaagaataaataaaaccttgttgt

SEQ ID NO: 725955 - DNA, 120 bp, Artificial Sequence
  ENSG00000198216_125 (sequence is synthesized)
agcaggctctgcagctgcacttagttggggtctgctcagaccagtcaggaggaattcaggaggctttcaaagtcccaaggacatcctggctctgaaaggttttcttttgttaaaaaatgc

SEQ ID NO: 725956 - DNA, 120 bp, Artificial Sequence
  ENSG00000198216_126 (sequence is synthesized)
actttgtgctgtgtgtggtagctcgtatgtgttaccccagctattcaggaagctagggcagaaggattgcttgaggctaggaattcaagactggcctggatgacagagtgaaaccctcat

SEQ ID NO: 725957 - DNA, 120 bp, Artificial Sequence
  ENSG00000198216_127 (sequence is synthesized)
ctcttaaaaaaaaaaaaaaggaataaaaatgttctctgccttggataacatttttttttaaagattccatacaaactcattccctgaaagagaaaaacagattttctaatcaggacattg

SEQ ID NO: 725958 - DNA, 120 bp, Artificial Sequence
  ENSG00000198216_128 (sequence is synthesized)
tcctgatctgcaagcgaggagtttaacaaggtaggcagagaacttccttatggaacaacagggctctgtgaccagaaaaactatgaccagcctcctctgaaaaaaggtggggggattata

SEQ ID NO: 725959 - DNA, 120 bp, Artificial Sequence
  ENSG00000198216_129 (sequence is synthesized)
gggcaccagctcagccgccaagttcaggaagcagctgattcccaagactcttaggagatactgtccattcttcctcctgtccacatcactccccatttaactgcaattgctcccttgcca

SEQ ID NO: 725960 - DNA, 120 bp, Artificial Sequence
  ENSG00000198216_130 (sequence is synthesized)
cagggaaagcagcaagccccaggcccaggcctccatttgatttgccactccgagaactgtctgcttcattctgcttgaggagatatcttcacctaatcctagtgttaattattttaatct

SEQ ID NO: 725961 - DNA, 120 bp, Artificial Sequence
  ENSG00000198216_131 (sequence is synthesized)
gagcaacgcttttatcaattagatagaaaccagcattccaaaataagtcccctaagtttgtagtttgagccaagatattttcttgagccctaagatatatgactttattagctaggattt

SEQ ID NO: 725962 - DNA, 120 bp, Artificial Sequence
  ENSG00000198216_132 (sequence is synthesized)
ttcttatgattaaaaacatccaaaaatgtgatatgtggtcatctctcagggaggtctaggtccttgcaggctggattttagaaatttctaagattctctacaacttttaaattttatgtt

SEQ ID NO: 725963 - DNA, 120 bp, Artificial Sequence
  ENSG00000198216_133 (sequence is synthesized)
atttttcaatcataatttctttcctgtggcttctatcaccattggagttagaatctgacaacctttaacttcacacttttatgagataataagttggtttcttgggcaaaggttggtttg

SEQ ID NO: 725964 - DNA, 120 bp, Artificial Sequence
  ENSG00000198216_134 (sequence is synthesized)
taagccatttacatggattgatgatttctgttcttgttttcttctaacctagaactcaggtccacagttttccacaggctaatggcactatgaaacagatataaagaaaaatagacactg

SEQ ID NO: 725965 - DNA, 120 bp, Artificial Sequence
  ENSG00000198216_135 (sequence is synthesized)
tcccttgccgcctcgcgcgtgccgcccgtgtctggacagcgctatcttctgctgtctggatatagctctcttccctcctcctttgttagtccctggtctgccctctcgggtggtgggcat

SEQ ID NO: 725966 - DNA, 120 bp, Artificial Sequence
  ENSG00000198216_136 (sequence is synthesized)
gtatgcgagttctctttctgattgccagaaatttcttttccactgtgtgagcaagagacagatttttttaaattgtctctcttctcttttatttattttgttctccatttgtggccctca

SEQ ID NO: 725967 - DNA, 120 bp, Artificial Sequence
  ENSG00000198216_137 (sequence is synthesized)
cctccgcctgccttccttccccattctttctgtggattcctccttcttcccccttcaatttcaccatttctcctcccccgtcttcgccctcccatccccacccctttccccttttaaaat

SEQ ID NO: 725968 - DNA, 120 bp, Artificial Sequence
  ENSG00000198216_138 (sequence is synthesized)
aattcagtgatgtctcgggaatactagcacaccctcttcattcagctgagcgcgggactctgcattaattcaagagcaatgttctgtgatggtgcccgagatgcgtggactgagcccaga

SEQ ID NO: 725969 - DNA, 120 bp, Artificial Sequence
  ENSG00000198216_139 (sequence is synthesized)
gtggactgagcccagaccgcaggctgcccgagcccgccccctgcccggctgcggggagccctgagcccaggtccgcgggccgccgccaacgccacgtcctggccctgccggaagaagagg

SEQ ID NO: 725970 - DNA, 120 bp, Artificial Sequence
  ENSG00000198216_140 (sequence is synthesized)
gtgcgctctgctcgaggccgacgcctcggacgaggtgggcatgctgccggcttccccgcgcgccgcctctggcttcgacaacttcttccaggtgcaggagggcgagggccagggctggga

SEQ ID NO: 725971 - DNA, 120 bp, Artificial Sequence
  ENSG00000198216_141 (sequence is synthesized)
gggcgccatggcactggaggcgggctccagccctttcctgccggtgagccccgaggtcatgaagcggcggcgcgggggcctcatcgagcagcgcgacatcatcaaggcccacgaggcgca

SEQ ID NO: 725972 - DNA, 120 bp, Artificial Sequence
  ENSG00000198216_142 (sequence is synthesized)
ggtgcctgcctctctccctgaactaggtggtgcgtctgccagaagaggagctatgtttgaagagcagcctactccacccctctcctctctggtccctgaacaccaccacacactggcatt

SEQ ID NO: 725973 - DNA, 120 bp, Artificial Sequence
  ENSG00000198216_143 (sequence is synthesized)
tctcctctctggtccctgaacaccaccacacactggcattttgaaaaaaatattttcctccagaaactgggcacccccaagccctaccacccgctttttttttcttttttcttttttttt

SEQ ID NO: 725974 - DNA, 120 bp, Artificial Sequence
  ENSG00000198216_144 (sequence is synthesized)
ctaatgcctcctgactcatggcagattcattcatttaaccttcatttagaagacacttacctagcagttcctctgtgccaaatgctttctagatgctgggaatgcagtagtgaaccatca

SEQ ID NO: 725975 - DNA, 120 bp, Artificial Sequence
  ENSG00000198216_145 (sequence is synthesized)
ttctaataatcttgattattctcaggaattaaaaagtcttgatgtcaggcacaacactgaacacagtatgtagtgagagttcatttattcatccatgctttcattcagtaactcagcagt

SEQ ID NO: 725976 - DNA, 120 bp, Artificial Sequence
  ENSG00000198216_146 (sequence is synthesized)
cagagacctatgtcaaacacggtgctggttgttagggaaataaaattgaactagacacaggctgtgcctcaaaagtttcttactctgtagtgttttggggatcaagtctcatatttgtgg

SEQ ID NO: 725977 - DNA, 120 bp, Artificial Sequence
  ENSG00000198216_147 (sequence is synthesized)
cttgaattagtttatacaaatctgcaactatttggggtccaataccatggtaagcatcgccaggagcacacaaagtataaggtgtggttcctctccttaggaaacatgttttgccaagaa

SEQ ID NO: 725978 - DNA, 120 bp, Artificial Sequence
  ENSG00000198216_148 (sequence is synthesized)
gatgatacacatgaaacagagaataggagttcttttactgacttatacaaggtataatcatttgttttggggaaaggacaaatctatgtaatctgaagtcatcagggatagtttcatcaa

SEQ ID NO: 725979 - DNA, 120 bp, Artificial Sequence
  ENSG00000198216_149 (sequence is synthesized)
gggtggcttgcaagaggttggtcctgatgaacatgccagtagctgaggacatgacggtccacttcacctccacacttatggctctgatccggacagctctggacattaaaattgccaaag

SEQ ID NO: 725980 - DNA, 120 bp, Artificial Sequence
  ENSG00000198218_0 (sequence is synthesized)
gagggttgaatgtaagatggcgcccagggagctgtgaggagaaaaccctgtcggtcttggagcgacgacggcagaaccagggtccctggcggtgcggcggggccggcgggtgcagcggag

SEQ ID NO: 725981 - DNA, 120 bp, Artificial Sequence
  ENSG00000198218_1 (sequence is synthesized)
gcggcggcggcggcggcagtgacgtcgccggaatattagaagtcttaagaactcaggacaagcagcagaaatacatgcaacatggtgactggaaccctaaggactctgcaatatgaataa

SEQ ID NO: 725982 - DNA, 120 bp, Artificial Sequence
  ENSG00000198218_2 (sequence is synthesized)
ttccctagagaacaccatctcctttgaagagtacatccgagtaaaggcacggtctgtcccgcaacacaggatgaaggaatttctggactcactggcctctaaggggccagaagcccttca

SEQ ID NO: 725983 - DNA, 120 bp, Artificial Sequence
  ENSG00000198218_3 (sequence is synthesized)
ggagttccagcagacagccaccactaccatggtgtaccaacagggtgggaactgcatatacacagacagcactgaagtggctgggtctttgcttgaacttgcctgtccagtcaccaccag

SEQ ID NO: 725984 - DNA, 120 bp, Artificial Sequence
  ENSG00000198218_4 (sequence is synthesized)
tgttcagccacaaacccagcaagaacagcagatccaggttcagcagccgcagcaggttcaggtccaggtgcaggtacagcagtctccgcaacaggtctcggctcagctctccccacaact

SEQ ID NO: 725985 - DNA, 120 bp, Artificial Sequence
  ENSG00000198218_5 (sequence is synthesized)
caccgttcaccagcctactgagcaacccatccaggtccaggtgcagatccaaggccaggcaccacagtcagcagccccctccattcagaccccgtctctgcagagtcccagtccctcgca

SEQ ID NO: 725986 - DNA, 120 bp, Artificial Sequence
  ENSG00000198218_6 (sequence is synthesized)
gctgcaagcagctcagatccaggtgcagcacgtgcaagcagcccagcagatccaggctgcagaaatcccggaggagcacatcccacatcagcaaatccaggctcagctggtggctggcca

SEQ ID NO: 725987 - DNA, 120 bp, Artificial Sequence
  ENSG00000198218_7 (sequence is synthesized)
gtctcttgctggtggtcagcagatccaaatccagaccgtgggtgccctttccccaccaccatcccagcagggctcaccccgggaaggggagcggcgggttggcacggccagtgtcctcca

SEQ ID NO: 725988 - DNA, 120 bp, Artificial Sequence
  ENSG00000198218_8 (sequence is synthesized)
accagtgaagaagcgcaaagtggacatgcccatcactgtgtcctacgccatctcagggcagccggtggccaccgtgctggccattccacagggccagcagcagagttatgtgtctttgag

SEQ ID NO: 725989 - DNA, 120 bp, Artificial Sequence
  ENSG00000198218_9 (sequence is synthesized)
gccagacttactgacagtagacagtgcccacctgtacagtgccactgggaccattactagccctacaggagaaacctggaccatccctgtttattctgcccagccccggggggaccctca

SEQ ID NO: 725990 - DNA, 120 bp, Artificial Sequence
  ENSG00000198218_10 (sequence is synthesized)
gcagcagagcattacccacattgccattccccaggaagcctacaacgcagttcacgtcagtggctcacccacagccctggcagctgttaagctggaggatgacaaggagaagatggtggg

SEQ ID NO: 725991 - DNA, 120 bp, Artificial Sequence
  ENSG00000198218_11 (sequence is synthesized)
caccacatctgtagtgaaaaactcccatgaagaggtagtgcagacccttgcaaactctctctttccagcacagttcatgaatggcaacatccacattccagtggctgtgcaggctgtggc

SEQ ID NO: 725992 - DNA, 120 bp, Artificial Sequence
  ENSG00000198218_12 (sequence is synthesized)
caccaccaccacagcagcagcagcagcaactccaagttacttgttcagctcaaactgtccaggttgctgaagttgaaccacagtcacagccacagccttccccagaacttctgcttccaa

SEQ ID NO: 725993 - DNA, 120 bp, Artificial Sequence
  ENSG00000198218_13 (sequence is synthesized)
attctttgaagccagaagaagggcttgaagtatggaaaaactgggcccagaccaagaatgctgaactagagaaggatgctcagaacagattggcacccattgggaggcgccaactgctgc

SEQ ID NO: 725994 - DNA, 120 bp, Artificial Sequence
  ENSG00000198218_14 (sequence is synthesized)
gattccaggaagatctcatctcctctgctgtggcagagttgaattatgggctctgtctaatgacacgggaagctcgaaatggagaaggtgaaccctatgacccagatgtgctctactata

SEQ ID NO: 725995 - DNA, 120 bp, Artificial Sequence
  ENSG00000198218_15 (sequence is synthesized)
ttttcctgtgtattcaaaagtatctttttgaaaatggaagggtagatgacattttctccgatctttattatgttcggttcacggagtggctacatgaagttctgaaggatgttcagcccc

SEQ ID NO: 725996 - DNA, 120 bp, Artificial Sequence
  ENSG00000198218_16 (sequence is synthesized)
gggtcactccacttggctatgtcttgcccagccacgtgactgaggagatgctatgggagtgcaagcagcttggggctcactccccctccaccttgctgaccaccctcatgttctttaata

SEQ ID NO: 725997 - DNA, 120 bp, Artificial Sequence
  ENSG00000198218_17 (sequence is synthesized)
ccaagtacttcctattgaagacagtggaccagcacatgaagctggccttctccaaggtcttgcgacagacaaagaagaacccctctaatcccaaggataaaagcacgagtatccggtact

SEQ ID NO: 725998 - DNA, 120 bp, Artificial Sequence
  ENSG00000198218_18 (sequence is synthesized)
tgaaggcccttggaatacaccagactggccagaaagttacagatgacatgtatgcagaacagacggaaaatccagagaatccattgagatgtcccatcaagctctatgatttctacctct

SEQ ID NO: 725999 - DNA, 120 bp, Artificial Sequence
  ENSG00000198218_19 (sequence is synthesized)
tcaaatgcccccagagtgtgaaaggccggaatgacaccttttacctgacacctgagccagtggtggcccccaacagcccaatctggtactcagtccagcctatcagcagagagcagatgg

SEQ ID NO: 726000 - DNA, 120 bp, Artificial Sequence
  ENSG00000198218_20 (sequence is synthesized)
gacaaatgctgacgcggatcctggtgataagagaaattcaggaggccatcgcagtggccaatgcaagcactatgcactgagatgccttggccatggcacaagagaaaccagccaggaaaa

SEQ ID NO: 726001 - DNA, 120 bp, Artificial Sequence
  ENSG00000198218_21 (sequence is synthesized)
accagacagactttcacactaaagaagaggcctccatttttttttttcttttttttattggtgtagttacgaagcctttcaggctgcttctgtttaaaatataaaagaaaactttgcccc

SEQ ID NO: 726002 - DNA, 120 bp, Artificial Sequence
  ENSG00000198218_22 (sequence is synthesized)
ctttgcatcttcataaacctgctgcggcagactcctcagccgatggtggctctgggtttccttgagtgtcatatgtcctagaaagttgctggctgactcttttttgtctggggcctgggg

SEQ ID NO: 726003 - DNA, 120 bp, Artificial Sequence
  ENSG00000198218_23 (sequence is synthesized)
aaagggcttggactgtgaaaagaaatgtggcccctttccatcttcaagagagatggaattaatgatggatggaccctggagggaatctccccagccgacttccactgggctgacagactt

SEQ ID NO: 726004 - DNA, 120 bp, Artificial Sequence
  ENSG00000198218_24 (sequence is synthesized)
tgctgaccacaggggaacgatgttcttttctttcttcatgatcagacataaacttagcatcttaatggaagaaaaatgaggggaacttcaattatgatttattaaagacaatttctatta

SEQ ID NO: 726005 - DNA, 120 bp, Artificial Sequence
  ENSG00000198218_25 (sequence is synthesized)
ctgtgcctgatggaattcttgtaacatacacttgtgtatcatataaagataccactctgtttctcttatgtattcttactctagttgtttattaagaatgacaagcacgtcttttcaaca

SEQ ID NO: 726006 - DNA, 120 bp, Artificial Sequence
  ENSG00000198218_26 (sequence is synthesized)
cgcgttcccggcccggatatctctgctctaggagctgtggcccgtgggcaaccgcggctttctggagcgcgcgcccgtgacgacccccagttttggggcgcgcgctctgatatcgggtgg

SEQ ID NO: 726007 - DNA, 120 bp, Artificial Sequence
  ENSG00000198218_27 (sequence is synthesized)
cggtgctgcctcgagagcgcgcaggaggcttctgctgagcagagggccggccgcggctcgttgcgctgggaaggttgaggattgggtcctttctggtctggtgacgttcccgggcatccg

SEQ ID NO: 726008 - DNA, 120 bp, Artificial Sequence
  ENSG00000198218_28 (sequence is synthesized)
tggcctcggcctggagagaaaccaaccagctttgctgtctggcttgcggttccgctcctctgtgaggggggcgagattgcccgttctcctcgaagaatgccgttacttgaggcccaaaat

SEQ ID NO: 726009 - DNA, 120 bp, Artificial Sequence
  ENSG00000198218_29 (sequence is synthesized)
cgagccgctccataccctaggatccactatccgctctagcggccagaagcgcggccaccttcccctgctgaagcgttcactttaattttggccggaaccctaaggactctgcaatatgaa

SEQ ID NO: 726010 - DNA, 120 bp, Artificial Sequence
  ENSG00000198218_30 (sequence is synthesized)
cagcagtctccgcaacaggtctcggctcagctctccccacaactcaccgttcaccagcctactgagcaacccatccaggtccagcacagttcatgaatggcaacatccacattccagtgg

SEQ ID NO: 726011 - DNA, 120 bp, Artificial Sequence
  ENSG00000198218_31 (sequence is synthesized)
ctctgacatatatttgagaaactgggctactgaaagccctaaccccacttggctgcattttatttggtaaccagtgaggcaaacacccttgccagacccctaccatccatcttgatgtgg

SEQ ID NO: 726012 - DNA, 120 bp, Artificial Sequence
  ENSG00000198218_32 (sequence is synthesized)
ttcctgcactggacactgcttgggtacgggcctgcccagatcttgggaatgtgggcagtggctcctctgaagcaccagtgggcagaggatgagtcatggtatcctcccggcacccctccc

SEQ ID NO: 726013 - DNA, 120 bp, Artificial Sequence
  ENSG00000198218_33 (sequence is synthesized)
ggccggccttgctttttagagacagttgagatgagagaagacttggtaagggcaaacgggcgtgcatgccagttctttgggtcctggaccacctttgaaaatatgcaaagctctgtacac

SEQ ID NO: 726014 - DNA, 120 bp, Artificial Sequence
  ENSG00000198218_34 (sequence is synthesized)
tctcagagaattatgcatatatgcagagtttggtttatagttttctgtacttcactgtctctgagggcagtctttttgccctgtgttagccttggattagagggtaacaacaatcatgta

SEQ ID NO: 726015 - DNA, 120 bp, Artificial Sequence
  ENSG00000198218_35 (sequence is synthesized)
aggctgtggttctcaagtgtggtgttagaagtgctcatcatcaggttccacctcagaaacagattgggacccagctatctgtgttttaagaagctttccagatgatttttgccacacttt

SEQ ID NO: 726016 - DNA, 120 bp, Artificial Sequence
  ENSG00000198218_36 (sequence is synthesized)
agggagagtcccctgatgaaatttatactcctgtgtggtccttatgcttcacacatcccatattgtacctttgagagaccacctgccatcctcttgttgtgacagtactctattcctcct

SEQ ID NO: 726017 - DNA, 120 bp, Artificial Sequence
  ENSG00000198218_37 (sequence is synthesized)
gctagtgataagtgtaaaggttgggatttgctggataaaattctccactcccttctccccagccaaaaattccaaactttcctcctagaagcagagaagccccagacagaatagctgcct

SEQ ID NO: 726018 - DNA, 120 bp, Artificial Sequence
  ENSG00000198218_38 (sequence is synthesized)
cttcccttagtagtcactgcccatgcctcataccttccctcccccgaccctgtatttcctagttgggctggctgaaagcctaagtttcctgatctgggcctgaggtaaggcagtctgatg

SEQ ID NO: 726019 - DNA, 120 bp, Artificial Sequence
  ENSG00000198223_0 (sequence is synthesized)
ggagctactcagaagcgggagtctccgagagaagaaaagcaggtggaaggagaggaagcggatgccgtggggtttacagcaggaaaatccgtggagacagcagatccgagaagcggcgat

SEQ ID NO: 726020 - DNA, 120 bp, Artificial Sequence
  ENSG00000198223_1 (sequence is synthesized)
gtttgcgtagaaccctgtacgtgcttccttcggcctgtcgctcttcccttctctctgaccagcaccatgcttctcctggtgacaagccttctgctctgtgagttaccacacccagcattc

SEQ ID NO: 726021 - DNA, 120 bp, Artificial Sequence
  ENSG00000198223_2 (sequence is synthesized)
ctcctgatcccagagaaatcggatctgcgaacagtggcaccagcctctagtctcaatgtgaggtttgactccaggacgatgaatttaagctgggactgccaagaaaacacaaccttcagc

SEQ ID NO: 726022 - DNA, 120 bp, Artificial Sequence
  ENSG00000198223_3 (sequence is synthesized)
aagtgtttcttaactgacaagaagaacagagtcgtggaacccaggctcagtaacaacgaatgttcgtgcacatttcgtgaaatttgtctgcatgaaggagtcacatttgaggttcacgtg

SEQ ID NO: 726023 - DNA, 120 bp, Artificial Sequence
  ENSG00000198223_4 (sequence is synthesized)
aatactagtcaaagaggatttcaacagaaactgctttatccaaattcaggaagggagggtaccgctgctcagaatttctcctgtttcatctacaatgcggatttaatgaactgtacctgg

SEQ ID NO: 726024 - DNA, 120 bp, Artificial Sequence
  ENSG00000198223_5 (sequence is synthesized)
gcgaggggtccgacggccccccgtgacgtccagtattttttgtacatacgaaactcaaagagaaggagggagatccggtgtccttattacatacaagactcaggaacccatgtgggatgt

SEQ ID NO: 726025 - DNA, 120 bp, Artificial Sequence
  ENSG00000198223_6 (sequence is synthesized)
cacctggataacctgtcaggattaacgtctcgcaattactttctggttaacggaaccagccgagaaattggcatccaattctttgattcacttttggacacaaagaaaatagaacgattc

SEQ ID NO: 726026 - DNA, 120 bp, Artificial Sequence
  ENSG00000198223_7 (sequence is synthesized)
aaccctcccagcaatgtcaccgtacgttgcaacacgacgcactgcctcgtacggtggaaacagcccaggacctatcagaagctgtcgtacctggactttcagtaccagctggacgtccac

SEQ ID NO: 726027 - DNA, 120 bp, Artificial Sequence
  ENSG00000198223_8 (sequence is synthesized)
agaaagaatacccagcctggcacggaaaacctactgattaatgtttctggtgatttggaaaatagatacaactttccaagctctgagcccagagcaaaacacagtgtgaagatcagagct

SEQ ID NO: 726028 - DNA, 120 bp, Artificial Sequence
  ENSG00000198223_9 (sequence is synthesized)
catcttgaattggagctcctggagtgaagccattgaatttggttctgacgacgggaacctcggctctgtgtacatttatgtgctcctaatcgtgggaacccttgtctgtggcatcgtcct

SEQ ID NO: 726029 - DNA, 120 bp, Artificial Sequence
  ENSG00000198223_10 (sequence is synthesized)
cggcttcctctttaaaaggttccttaggatacagcggctgttcccgccagttccacagatcaaagacaaactgaatgataaccatgaggtggaagacgagatcatctgggaggaattcac

SEQ ID NO: 726030 - DNA, 120 bp, Artificial Sequence
  ENSG00000198223_11 (sequence is synthesized)
cccagaggaagggaaaggctaccgcgaagaggtcttgaccgtgaaggaaattacctgagacccagagggtgtaggaatggcatggacatctccgcctccgcgacacgggggaactgtttt

SEQ ID NO: 726031 - DNA, 120 bp, Artificial Sequence
  ENSG00000198223_12 (sequence is synthesized)
tctccgcctccgcgacacgggggaactgttttcttgatgatgctgtgaacctttatatcattttctatgtttttatttaaaaacatgacatttggggccaggcgcggtggctcacgcctg

SEQ ID NO: 726032 - DNA, 74 bp, Artificial Sequence
  ENSG00000198223_13 (sequence is synthesized)
ggactaaaaatgcagaaatttacccaggcacggcggcggacgcccatcatcccagctacttgggaggctgaggc

SEQ ID NO: 726033 - DNA, 120 bp, Artificial Sequence
  ENSG00000198223_14 (sequence is synthesized)
aggttgtagtgagccaagatcgcaccattgcacaccaacctgcgtgacagagcaagattgcatctcaaaacaaacaataataataaataataaaaacctgatatttggctgggcgccgtg

SEQ ID NO: 726034 - DNA, 77 bp, Artificial Sequence
  ENSG00000198223_15 (sequence is synthesized)
tgcgtgacagagcaagattgcatctcaaaacaaacaataataataaataataaaaacctgatattaggattgctgga

SEQ ID NO: 726035 - DNA, 90 bp, Artificial Sequence
  ENSG00000198223_16 (sequence is synthesized)
catagcaagaccctgtctctacaaaaaaggcaaaaattagctgggcgtggtggcttgtgcctgtagtgccagctatcttcaagctgacag

SEQ ID NO: 726036 - DNA, 120 bp, Artificial Sequence
  ENSG00000198223_17 (sequence is synthesized)
gcaccgttgcactccagcctgggtaacaaactaagaccccatctctctgtctcaaaaaaagtgatacttcgcaaagatgcttagactccaagaagcttttgcatctctttccaacccaac

SEQ ID NO: 726037 - DNA, 120 bp, Artificial Sequence
  ENSG00000198223_18 (sequence is synthesized)
actccaagaagcttttgcatctctttccaacccaactactgaggtactgtgtagcctcctccttgaataactaacctggtgagctgagattgcgccattgcaatccagcctgggcaacaa

SEQ ID NO: 726038 - DNA, 120 bp, Artificial Sequence
  ENSG00000198223_19 (sequence is synthesized)
ctccgagagaagaaaagcaggtggaaggagaggaagcggatgccgtggggtttacagcaggaaaatccgtggagacagcagatccgagaagcggcgatgtttgcgtagaaccctgtcagc

SEQ ID NO: 726039 - DNA, 76 bp, Artificial Sequence
  ENSG00000198223_20 (sequence is synthesized)
gatccgagaagcggcgatgtttgcgtagaaccctgtcagctgagccatgacccatgaaccatggaagcttgactct

SEQ ID NO: 726040 - DNA, 120 bp, Artificial Sequence
  ENSG00000198223_21 (sequence is synthesized)
ttctccaaggttggggtcagagtcatctctgtgagctccatcaggagaaactgaggcagggtggtggtcaagaaaaggaggagaagacggtagagagggccaggcacggtggctcatgcc

SEQ ID NO: 726041 - DNA, 63 bp, Artificial Sequence
  ENSG00000198223_22 (sequence is synthesized)
gaagatcagagctgcagacgtccgcatcttgaattggagctcctggagtgaagccattgaatt

SEQ ID NO: 726042 - DNA, 120 bp, Artificial Sequence
  ENSG00000198223_23 (sequence is synthesized)
agagaagaaaagcaggtggaaggagaggaagcggatgccgtggggtttacagcaggaaaatccgtggagacagcagatccgagaagcggcgatgtttgcgtagaaccctctgttgcaaaa

SEQ ID NO: 726043 - DNA, 120 bp, Artificial Sequence
  ENSG00000198223_24 (sequence is synthesized)
aagtgaaaccacagaccctactgacaaccctcagcgtaaccctacggtcccctactcaccacacctagtgtaactctacagtcccctactcatgacccctacagtcccctaccgacgacc

SEQ ID NO: 726044 - DNA, 120 bp, Artificial Sequence
  ENSG00000198223_25 (sequence is synthesized)
gggtctcactctgtcacccaggttgtagtgagccaagatcgcaccattgcacaccaacctgcgtgacagagcaagattgcatctcaaaacaaacaataataataaataataaaaacctga

SEQ ID NO: 726045 - DNA, 120 bp, Artificial Sequence
  ENSG00000198223_26 (sequence is synthesized)
gtggaacccaggatggagtttccctcttgttgcccagatcgcaccattgcacaccaacctgcgtgacagagcaagattgcatctcaaaacaaacaataataataaataataaaaacctga

SEQ ID NO: 726046 - DNA, 66 bp, Artificial Sequence
  ENSG00000198223_27 (sequence is synthesized)
gaaattctgaacccagtgcccgctccttgcagatctgcgaacagtggcaccagcctctagtctcaa

SEQ ID NO: 726047 - DNA, 120 bp, Artificial Sequence
  ENSG00000198223_28 (sequence is synthesized)
tttttgtacatacgaaactcaaagtaagtgttcacctcatgtgaagaattatgaggaatgcagggatgggagaaaaaatcatgctggttttctttttttcctttttctttttttaagaca

SEQ ID NO: 726048 - DNA, 90 bp, Artificial Sequence
  ENSG00000198223_29 (sequence is synthesized)
tttttttcctttttctttttttacaatgcaatggtgccacctcggctcactgcaacctcgacctcctgggttcaagcaattttcctgcct

SEQ ID NO: 726049 - DNA, 120 bp, Artificial Sequence
  ENSG00000198225_0 (sequence is synthesized)
atgggcaggcaacgcgctgagggactaggcagagccgtggaaccgccgccaggtcgctgtcggtccacgccgcccgtcgcgctgcccgcccgctcggcgtcggccgccgccatgggagtg

SEQ ID NO: 726050 - DNA, 120 bp, Artificial Sequence
  ENSG00000198225_1 (sequence is synthesized)
cacgtggaaaccatctccccaggagactggcgcaccttcccgaagcgcagccagacctgcgtgatgcactacaccgggatgcttgaagatggaaagaaatttgattcctcccgggacaga

SEQ ID NO: 726051 - DNA, 120 bp, Artificial Sequence
  ENSG00000198225_2 (sequence is synthesized)
aacaagccctttaagtttatgctaggcaagcaggaggtgatccgaggctgggaagaaggggttgtccagatgagtgtgggtcagagagccaaactgactatatctccagattatgcctat

SEQ ID NO: 726052 - DNA, 120 bp, Artificial Sequence
  ENSG00000198225_3 (sequence is synthesized)
ggtgccactgggcacccaggcatcatcccaccacatgccactctcgtcttcgatgtggagcttctaaaactggaatgacaggaatggcctcctcccttagctccctgttcttggatctgc

SEQ ID NO: 726053 - DNA, 120 bp, Artificial Sequence
  ENSG00000198225_4 (sequence is synthesized)
catggagggatctggtgcctccagacgtgtgcacataaatccatatggagcttttcctgatgttccactccactttgtatagacatctgccccaactgaatgtgttctgtcactcagctt

SEQ ID NO: 726054 - DNA, 120 bp, Artificial Sequence
  ENSG00000198225_5 (sequence is synthesized)
tgcttccgacacctctgtttcctcttcccctttctcctggtatgtgcgtttacctaaactatatgccataaacgtcaagttattcattttactttttcattttggggtgaagattcagtt

SEQ ID NO: 726055 - DNA, 120 bp, Artificial Sequence
  ENSG00000198225_6 (sequence is synthesized)
tttccaattaagtacatggtcaagtgttaacagcacaagtgataagttaacgttaggataggaattggtgttgagggggttgcaagaatattttattttaattttttggatgaaattttt

SEQ ID NO: 726056 - DNA, 120 bp, Artificial Sequence
  ENSG00000198225_7 (sequence is synthesized)
atctattatatattaaacattcttgctgctgcgctgcaaaaccatagcagatttgaggcactgttgaggactgaattattctccaagttgagagatgtccttgggttaaattaaaagccc

SEQ ID NO: 726057 - DNA, 120 bp, Artificial Sequence
  ENSG00000198225_8 (sequence is synthesized)
tacctaaaactgaggtggggatggggagaggctttgcctccaccattcccaccccaccctccccttaaaccctctgcctttgaaagcaggtcatgttcactgcgatgctggacactacag

SEQ ID NO: 726058 - DNA, 120 bp, Artificial Sequence
  ENSG00000198225_9 (sequence is synthesized)
gtatctgtccctgggccagcagggacctctgaagccttctttgtggccttatttttttttttttttttttcatcctgtggtttttctaacggactttcaggaattttgtaatctcataac

SEQ ID NO: 726059 - DNA, 120 bp, Artificial Sequence
  ENSG00000198225_10 (sequence is synthesized)
tttccaagctccaccacttcctaaatcttaagaactttaattgacagtttcaattgaaggtgctgtttgtagacttaacacccagtgaaagcccagccatcatgacaaatccttgaatgt

SEQ ID NO: 726060 - DNA, 120 bp, Artificial Sequence
  ENSG00000198225_11 (sequence is synthesized)
tctcttaagaaaatgatgctggtcatcccagcttcagcatctcctgttttttgatgcttggctccctctgctgatctcagagtttcctggcttttcctccctcagccacttctcacccct

SEQ ID NO: 726061 - DNA, 120 bp, Artificial Sequence
  ENSG00000198225_12 (sequence is synthesized)
ttgctgtcctgtgtagtgatttggtgagaggaatcgttgctgcccccttcccctagcaccatatatgagtctcaagttttattattgcaataaaagtgctttatgctggcttttctcaaa

SEQ ID NO: 726062 - DNA, 80 bp, Artificial Sequence
  ENSG00000198231_0 (sequence is synthesized)
gttcccctccccccttcagcaacgggccgtgaggcggtggcggtggtggcggtggcggcggcggtggtggtggtggcggc

SEQ ID NO: 726063 - DNA, 120 bp, Artificial Sequence
  ENSG00000198231_1 (sequence is synthesized)
accgggccgggacagcgcgtactttgggctccgggattcgctccgcgcccgcggttgtagcagctgccgctgcagccatagcagcaggtcagtcattggcaccatgaactggaataaagg

SEQ ID NO: 726064 - DNA, 120 bp, Artificial Sequence
  ENSG00000198231_2 (sequence is synthesized)
tggtcctggcactaagcgaggatttggctttggaggttttgccatcagtgctgggaaaaaggaggaacccaaactcccacagcagtcccacagtgcctttggggcaaccagctcttcttc

SEQ ID NO: 726065 - DNA, 120 bp, Artificial Sequence
  ENSG00000198231_3 (sequence is synthesized)
tggatttggaaagtcagctccaccacagcttccttctttctacaaaattggatctaagcgggccaactttgatgaagaaaatgcctattttgaagatgaggaagaagattctagcaacgt

SEQ ID NO: 726066 - DNA, 120 bp, Artificial Sequence
  ENSG00000198231_4 (sequence is synthesized)
tgatttaccttacattcctgctgaaaactcaccaactcgccagcaattccattccaagccagtagattctgacagcgatgatgatcccttggaggcattcatggctgaagtggaggatca

SEQ ID NO: 726067 - DNA, 120 bp, Artificial Sequence
  ENSG00000198231_5 (sequence is synthesized)
ggcagctagagacatgaagaggcttgaagaaaaggacaaggaaagaaaaaacgtaaagggtattcgagatgacattgaagaggaagatgaccaagaagcttattttcgatacatggcaga

SEQ ID NO: 726068 - DNA, 120 bp, Artificial Sequence
  ENSG00000198231_6 (sequence is synthesized)
aaacccaactgctggtgtggttcaggaggaagaggaagacaatctagaatatgatagtgacggaaatccaattgcacctaccaaaaaaatcattgatcctcttccccccattgatcattc

SEQ ID NO: 726069 - DNA, 120 bp, Artificial Sequence
  ENSG00000198231_7 (sequence is synthesized)
agagattgactatccaccatttgaaaaaaacttttacaatgagcatgaagagataaccaacctcactccacagcagttaatagatctccggcataagctcaatcttcgggtctctggtgc

SEQ ID NO: 726070 - DNA, 120 bp, Artificial Sequence
  ENSG00000198231_8 (sequence is synthesized)
tgcacctcctagaccaggaagtagctttgctcattttgggtttgacgaacaacttatgcaccagattcggaaatctgaatacacacagcccactccaatacagtgccagggtgtgcctgt

SEQ ID NO: 726071 - DNA, 120 bp, Artificial Sequence
  ENSG00000198231_9 (sequence is synthesized)
ggcattaagtggtagagacatgattggtattgccaaaacaggtagtgggaaaactgcagccttcatttggcccatgttgattcatataatggaccagaaggagttggaaccaggtgatgg

SEQ ID NO: 726072 - DNA, 120 bp, Artificial Sequence
  ENSG00000198231_10 (sequence is synthesized)
accaattgcagtgattgtgtgtcctaccagggagctttgccagcagatccatgcagaatgtaagcggtttggaaaagcatataatcttcgatcagtggccgtatatggaggagggagtat

SEQ ID NO: 726073 - DNA, 120 bp, Artificial Sequence
  ENSG00000198231_11 (sequence is synthesized)
gtgggagcaggccaaggcccttcaggagggggcagagattgttgtgtgtaccccaggtcgactgatagatcatgtgaaaaagaaagctaccaatcttcaaagagtctcttaccttgtgtt

SEQ ID NO: 726074 - DNA, 120 bp, Artificial Sequence
  ENSG00000198231_12 (sequence is synthesized)
tgatgaagcagatcgaatgtttgacatgggatttgagtaccaagttcgatccatagcaagtcatgttcgtcctgacaggcagactctcttatttagtgcaacttttcggaagaagattga

SEQ ID NO: 726075 - DNA, 120 bp, Artificial Sequence
  ENSG00000198231_13 (sequence is synthesized)
aaagttggccagagacatcctgatcgaccctattcgagtggtgcagggagatattggagaggcaaatgaagatgtgacacagattgtggagattctccattctggacctagtaaatggaa

SEQ ID NO: 726076 - DNA, 120 bp, Artificial Sequence
  ENSG00000198231_14 (sequence is synthesized)
ctggcttacccggcgtctggtagaatttacctcttcagggagtgtcctcctctttgttactaaaaaagccaatgctgaagagctagcgaataaccttaaacaggagggtcataatcttgg

SEQ ID NO: 726077 - DNA, 120 bp, Artificial Sequence
  ENSG00000198231_15 (sequence is synthesized)
gctgctccatggggatatggatcagagtgagagaaacaaggtcatttcagactttaagaaaaaggacatcccagtcctggtggccacagatgttgcagcccgtggtctggacattccttc

SEQ ID NO: 726078 - DNA, 120 bp, Artificial Sequence
  ENSG00000198231_16 (sequence is synthesized)
acagcaattttgctggtgacctggtccggaacttggaaggagccaatcaacacgtttctaaggaactcctagatctggcaatgcagaatgcctggtttcggaaatctcgattcaaaggag

SEQ ID NO: 726079 - DNA, 120 bp, Artificial Sequence
  ENSG00000198231_17 (sequence is synthesized)
ggaaaggaaaaaagctgaacattggtggaggaggcctaggctacagggagcggcctggcctgggctctgagaacatggatcgaggaaataacaatgtaatgagcaattatgaggcctaca

SEQ ID NO: 726080 - DNA, 120 bp, Artificial Sequence
  ENSG00000198231_18 (sequence is synthesized)
agccttccacaggagctatgggagatcgactaacggcaatgaaagcagctttccagtcacagtacaagagtcactttgttgcagccagtttaagtaatcagaaggctggaagttctgctg

SEQ ID NO: 726081 - DNA, 120 bp, Artificial Sequence
  ENSG00000198231_19 (sequence is synthesized)
ctggggcaagtgggtggactagtgcagggagcttgaattctgttccaactaactcagcacaacagggccataacagtcctgacagccccgtcaccagtgccgccaagggcatcccaggct

SEQ ID NO: 726082 - DNA, 120 bp, Artificial Sequence
  ENSG00000198231_20 (sequence is synthesized)
ttggcaatactggcaacatcagtggtgcccctgtgacctacccgtctgccggagcccaaggagtcaacaacacagcttcagggaataacagccgagaagggactgggggcagcaacggga

SEQ ID NO: 726083 - DNA, 120 bp, Artificial Sequence
  ENSG00000198231_21 (sequence is synthesized)
aaagagagagatatactgagaaccggggcagcagccgtcacagtcacggagagactggcaatcggcatagcgatagtccacgtcacggagatggtggtcgccatggagatggataccgcc

SEQ ID NO: 726084 - DNA, 120 bp, Artificial Sequence
  ENSG00000198231_22 (sequence is synthesized)
atccagaaagcagcagccgtcatactgatggccatcggcacggggagaacagacatggaggaagcgcaggccggcatggggagaaccggggtgcaaatgatggtcggaatggggaaagca

SEQ ID NO: 726085 - DNA, 120 bp, Artificial Sequence
  ENSG00000198231_23 (sequence is synthesized)
ggaaagaagcttttaatcgtgagagcaagatggagcccaagatggaacccaaagtggacagcagcaagatggacaaggtggacagcaagacagataagacagctgacggctttgctgtcc

SEQ ID NO: 726086 - DNA, 120 bp, Artificial Sequence
  ENSG00000198231_24 (sequence is synthesized)
cagagccgcctaaacgcaagaaaagtcgatgggacagttagaggggatgtgctaaagcgtgaaatcagttgtccttaatttttagaaagattttggtaactaggtgtctcagggctgggt

SEQ ID NO: 726087 - DNA, 120 bp, Artificial Sequence
  ENSG00000198231_25 (sequence is synthesized)
tggggtccaaagtgtaaggaccccctgcccttagtggagagctggagcttggagacattaccccttcatcagaaggaattttcggatgttttcttgggaagctgttttggtccttggaag

SEQ ID NO: 726088 - DNA, 120 bp, Artificial Sequence
  ENSG00000198231_26 (sequence is synthesized)
cagtgagagctgggaagcttcttttggctctaggtgagttgtcatgtgggtaagttgaggttatcttgggataaagggtcttctagggcacaaaactcactctaggtttatattgtatgt

SEQ ID NO: 726089 - DNA, 120 bp, Artificial Sequence
  ENSG00000198231_27 (sequence is synthesized)
agcttatattttttactaaggtgtcaccttataagcatctataaattgacttctttttcttagttgtatggccaggcagtccccattttaggagttggcttctgcaaattcaatccattg

SEQ ID NO: 726090 - DNA, 120 bp, Artificial Sequence
  ENSG00000198231_28 (sequence is synthesized)
agctaactgttggggagcaatttggtagttgtagacatttgcagggaagggagatgtctgattctaaatgggagttgatgctcaggtccccagccaggtttgcatccagccctgagacat

SEQ ID NO: 726091 - DNA, 120 bp, Artificial Sequence
  ENSG00000198231_29 (sequence is synthesized)
gtaggaaacacctttcagacccaggctctgaagattcccagaagccacaaggattgaagggaaaaggtgatcctggtaactgttccaggattgctccaggtttgagatggtattgctaaa

SEQ ID NO: 726092 - DNA, 120 bp, Artificial Sequence
  ENSG00000198231_30 (sequence is synthesized)
tttaaaattaaacaagaaacccaacaacagcttttaaagtgtcttctatctcattgtattttttttaacttgccccaatgatagaaaagtcttttgctgaaatgattttgatgatttttg

SEQ ID NO: 726093 - DNA, 120 bp, Artificial Sequence
  ENSG00000198231_31 (sequence is synthesized)
tttatcgtttataaaaaggaaaagaaatatacaaactttgacttttgtgactttgtgaaggtttctttaagatgtgcattcctttctgcttgctctctagtaaatgttttactaccggga

SEQ ID NO: 726094 - DNA, 120 bp, Artificial Sequence
  ENSG00000198231_32 (sequence is synthesized)
caagagtgtcgctctagtagtatatgcaacagtttaaactataggcatgttcatgtaaatatggtttctgtccaacccgttttctcttgggatttttggctagccccttgacgccacttt

SEQ ID NO: 726095 - DNA, 120 bp, Artificial Sequence
  ENSG00000198231_33 (sequence is synthesized)
ttcttcattcgcagacccactttctagatgggtcatgaacactgtccacccaactgcagtttcccgtcagagtatctgaggagcctgtgaggcgttctggagctttaaggtcaggcgcct

SEQ ID NO: 726096 - DNA, 120 bp, Artificial Sequence
  ENSG00000198231_34 (sequence is synthesized)
tggaagtgtttatgtaaatacatgatcaactttgggcataatctgattgcatttctgtttaatagggttaatttccagaaatagaatttctgggttgagggcataagcatttttaaatga

SEQ ID NO: 726097 - DNA, 120 bp, Artificial Sequence
  ENSG00000198231_35 (sequence is synthesized)
ttgtcactgtgtcttttctcacaaagcagtagcagctttctaaaagtatccagttcctttgtagctcccacttcaagggttttcataatgaggcctagtctatagcagtgagctttcctg

SEQ ID NO: 726098 - DNA, 120 bp, Artificial Sequence
  ENSG00000198231_36 (sequence is synthesized)
tctgaaataagcatttcattaaaagcactttcagcagtaactcttgggcagtgacagaggggcttagttttcctggttgtagctgggcgcctaggcttgatgctagatttagggtcttca

SEQ ID NO: 726099 - DNA, 120 bp, Artificial Sequence
  ENSG00000198231_37 (sequence is synthesized)
cgctgcttggattttgaatataaacctaacagtagcttagttggaaatgcaagttgatctagagaaccccttgtgctggtctactttgagtcacacttggggcctgggattgttgtcctg

SEQ ID NO: 726100 - DNA, 120 bp, Artificial Sequence
  ENSG00000198231_38 (sequence is synthesized)
agccacagcatgtgttctatggctctgggcagggttgatagacaccccactccaggaaggctgtggaacagacagatttgtaagtcttctattaaacaagttgcaacatttaatagtact

SEQ ID NO: 726101 - DNA, 120 bp, Artificial Sequence
  ENSG00000198231_39 (sequence is synthesized)
aactgtttaattcatttcttctgattgttcttctgaatattgctattattaaaggaatcattgctagtaaggatcttgccttacttggtaggtatgttaactgtgcaattatctggtaca

SEQ ID NO: 726102 - DNA, 120 bp, Artificial Sequence
  ENSG00000198231_40 (sequence is synthesized)
gacaaggaaagaaaaaacgtaaagtaagttgttttcttctccctcacaaaggttacgtgaaaactgctgaagtattgcaaagtctattcccccaaagtttatagagaaaaaatattgacg

SEQ ID NO: 726103 - DNA, 120 bp, Artificial Sequence
  ENSG00000198231_41 (sequence is synthesized)
ctaaggtgaatcgatagaatgagttcaaggcaggttttgctgtcaaacttaaattgcagtatgaaaattttttttaagttttcagaactttttggttttgaatgcagataaatgtgctaa

SEQ ID NO: 726104 - DNA, 120 bp, Artificial Sequence
  ENSG00000198231_42 (sequence is synthesized)
atacatagatgctttattctagccaatcaggctataaaagtacatttcagaacactgggggtccatctctccacagagatccacaagttttcctttatagcacaagaacaaaagggacca

SEQ ID NO: 726105 - DNA, 120 bp, Artificial Sequence
  ENSG00000198231_43 (sequence is synthesized)
tactgtggggccatcaggacactaaactcacagtgccaggatagcacagagtttctgtaaacctcatcatttgccaagttgtatattcaagtttcttgaacttgctatcttacctactcc

SEQ ID NO: 726106 - DNA, 120 bp, Artificial Sequence
  ENSG00000198231_44 (sequence is synthesized)
ttaggaatattctcatctacccaggaaagcctcagtgagtttaaagccctgtctagaagggaatttgtatttaatctgatttgagtcaatgcagtgctcattcttatggtaactttctat

SEQ ID NO: 726107 - DNA, 120 bp, Artificial Sequence
  ENSG00000198231_45 (sequence is synthesized)
tgaagaagcatctttgtgtacttggttgactaggcttgctcaggaaattattctagattagcagtgatctcacactgtggtccctggaccagcagcacatgcaaactcatccccaacccc

SEQ ID NO: 726108 - DNA, 120 bp, Artificial Sequence
  ENSG00000198231_46 (sequence is synthesized)
atagatgcaacatgcttgagattgggtattttgcaagttgtggggatagacgtaacaagactggcaaaatgttgggaatcattgaagctaggtgatgggtatgagttgattttgttcatt

SEQ ID NO: 726109 - DNA, 120 bp, Artificial Sequence
  ENSG00000198231_47 (sequence is synthesized)
ttgtgttttttttgttttattgaatgtctcaaaacttacaattgttttaaaaaggcttcaaagagacaaaaagatgtgcctggaagcatcagcgtattaggttggaactgacgttttaat

SEQ ID NO: 726110 - DNA, 120 bp, Artificial Sequence
  ENSG00000198231_48 (sequence is synthesized)
tattgtggtaggggcctacgcaggagggaaagggtgacctggaaggcctggaaaaaatcaggtttcatttcttacctgtacatatgcgctatgtgaaaaattactctgaattgggacttg

SEQ ID NO: 726111 - DNA, 120 bp, Artificial Sequence
  ENSG00000198231_49 (sequence is synthesized)
gaattcagttatggctgcttagagaatccttcagttgcttgccatggttattgttaaggaaagctctacaaagtagtggggcatacaaattaggtatgtacaccaggtggagagcaaggt

SEQ ID NO: 726112 - DNA, 120 bp, Artificial Sequence
  ENSG00000198231_50 (sequence is synthesized)
gattggaaaggagaggtgagttttgagctgcacttgacttgctgaaggcccaaggagaactgggattgttcaaggtcttctcgatgcaggtagaaatataatgcctagtccttgttcagg

SEQ ID NO: 726113 - DNA, 120 bp, Artificial Sequence
  ENSG00000198231_51 (sequence is synthesized)
gcctggcctggggtttctaattttcttaattcttacaacttcttatgaagacttttactaatatggctttttccaggcttcccaaactgtatttcaggttataataattttattgttctg

SEQ ID NO: 726114 - DNA, 120 bp, Artificial Sequence
  ENSG00000198231_52 (sequence is synthesized)
ggtgcagggagatattggagaggtaaccctaagcagggctggatgggaccttaatgggtttatttctcatattatggaacacagaattaatttctcactattgagataaaaaaaaaagat

SEQ ID NO: 726115 - DNA, 120 bp, Artificial Sequence
  ENSG00000198231_53 (sequence is synthesized)
atgcgagcggctcgtcagcgcctgcgcgcagcctgcggggcgggacgcaaccccggggaaagcgcgagacctccctctctcccgcccggctgaggcgaggtggggcttttgggaaaatta

SEQ ID NO: 726116 - DNA, 120 bp, Artificial Sequence
  ENSG00000198231_54 (sequence is synthesized)
cataatccccgcccctgggccggaactgccctcgcctatcccaatcctcctacctaggattccgtcaagttgacgtcacacggaaccggtgctccggaagctaaaggtggccatgctgtg

SEQ ID NO: 726117 - DNA, 120 bp, Artificial Sequence
  ENSG00000198231_55 (sequence is synthesized)
tttgaaatgaagataaacttgtctgtcaaattacatatagtatgctttattttaaaaattagaataaactaataccttttaaaaatatgcatgtactaatttcagaatggtttaaactgc

SEQ ID NO: 726118 - DNA, 120 bp, Artificial Sequence
  ENSG00000198231_56 (sequence is synthesized)
ctgcctaccagaaagttttgggctgcacattggctacattggtttaaggtgctgatagatggtaaatgaaacacacagaaaaaatatgctatgctatctactctaatatagacaactttc

SEQ ID NO: 726119 - DNA, 120 bp, Artificial Sequence
  ENSG00000198231_57 (sequence is synthesized)
tcgcctgtgtgcaccttatcagttgctacacgatgtttaaactcctgttttccaggaggggtgtgtatttgtgtgtgtacacttgtctgttttccaagaggttactcatctccccagtga

SEQ ID NO: 726120 - DNA, 120 bp, Artificial Sequence
  ENSG00000198231_58 (sequence is synthesized)
cccaagaaaaattttaagtaaaacccctgaaatcctgattggaaatatcaacatcaccagagaagcattgaaaggttaccactttgggggacaaaatggagattataagccccattcttc

SEQ ID NO: 726121 - DNA, 120 bp, Artificial Sequence
  ENSG00000198231_59 (sequence is synthesized)
acctaggtgcagtttgaacagggcttgacagtggctggaccatcactaagtgagactttaattcatcaagcataactgaaaatggaggcagtagattatatcttggtagccagcatgtgt

SEQ ID NO: 726122 - DNA, 120 bp, Artificial Sequence
  ENSG00000198231_60 (sequence is synthesized)
agacttgtcttatttggagcccacttggaattttcatttcaagagtaagatacattaatttttttctaccatctggttaatacttaatgcaaaatggcaaaagaacagttatggcttccc

SEQ ID NO: 726123 - DNA, 120 bp, Artificial Sequence
  ENSG00000198231_61 (sequence is synthesized)
aattcattgaacaattttttttccgttttatttgttatgagaaaattaattttgagttaagaaatttttaatcatttaaaattgtatgacaattatcttgggaatatttatcatggagtt

SEQ ID NO: 726124 - DNA, 120 bp, Artificial Sequence
  ENSG00000198231_62 (sequence is synthesized)
tttaatatgaggtttatatttgttaccatttgaggtttttccttttcattgtatgattttggcttacagacttgtatttttacttcatactccagctaaaatgctagatccaggtaagta

SEQ ID NO: 726125 - DNA, 65 bp, Artificial Sequence
  ENSG00000198242_0 (sequence is synthesized)
attggagacccttttcacaagatggcgccgaaagcgaagaaggaagctcctgcccctcctaaagc

SEQ ID NO: 726126 - DNA, 120 bp, Artificial Sequence
  ENSG00000198242_1 (sequence is synthesized)
agccacaaaaagaagaagatccgcacgtcacccaccttccggcggccgaagacactgcgactccggagacagcccaaatatcctcggaagagcgctcccaggagaaacaagcttgaccac

SEQ ID NO: 726127 - DNA, 79 bp, Artificial Sequence
  ENSG00000198242_2 (sequence is synthesized)
agagcgctcccaggagaaacaagcttggccatgaagaagatagaagacaacaacacacttgtgttcattgtggatgtta

SEQ ID NO: 726128 - DNA, 120 bp, Artificial Sequence
  ENSG00000198242_3 (sequence is synthesized)
aagaagctgtatgacattgatgtggccaaggtcaacaccctgattcggcctgatggagagaagaaggcatatgttcgactggctcctgattacgatgctttggatgttgccaacaaaatt

SEQ ID NO: 726129 - DNA, 120 bp, Artificial Sequence
  ENSG00000198242_4 (sequence is synthesized)
aaactgagtccagctgcctaattctgaatatatatatatatatatcttttcaccatatacatgcctgtctgtcaatttctggttgggctgggaggccacacacacacactgacatgacag

SEQ ID NO: 726130 - DNA, 120 bp, Artificial Sequence
  ENSG00000198242_5 (sequence is synthesized)
ggcttgggcaagactcctgttctacttatccttttgaaatacctcaccctgccactccaccatgtatgatcattccagagatctttgtgactagagttagtgtcctaggaaaaccagaac

SEQ ID NO: 726131 - DNA, 120 bp, Artificial Sequence
  ENSG00000198242_6 (sequence is synthesized)
tcagaacttgcctccatggttgagtaacaagctgtacaagaaccccttttatccctggaagaggctgtgtatgaaaccaatgcccagggtttgaagggtgttagcatccatttcagggga

SEQ ID NO: 726132 - DNA, 120 bp, Artificial Sequence
  ENSG00000198242_7 (sequence is synthesized)
gtgtggattggctggctctctggtagcattttgtcctcacacacccatctactatgtccaaccggtctgtctgcttccctcaccccttgcccaataaaggacaaggacttcagaggagta

SEQ ID NO: 726133 - DNA, 120 bp, Artificial Sequence
  ENSG00000198242_8 (sequence is synthesized)
tgggtccctacttctattgggaaaggcaactagagtgcgacacgtggcagattaccttggtttaagtcttaatgtggcctgtggtgtttcccataagagaattggctttgtggcttcatg

SEQ ID NO: 726134 - DNA, 120 bp, Artificial Sequence
  ENSG00000198242_9 (sequence is synthesized)
acaaaggaaccactgaagtgccggaggactggaggaggaagggggagggtgtgggggcagtgagggtggcagggactaaggcttccttctctaccctaggcctgatggagagaagaaggc

SEQ ID NO: 726135 - DNA, 85 bp, Artificial Sequence
  ENSG00000198242_10 (sequence is synthesized)
cgcaaattgtgtccagtgtgcttctctaattggaagtatgaggagattgtttctgctgcatttacaaaactggcaggatcagccc

SEQ ID NO: 726136 - DNA, 83 bp, Artificial Sequence
  ENSG00000198242_11 (sequence is synthesized)
cttgaggtcaggggttcgagaccagcctgagtgacatggagaaaccccgcgtctattaaaaatagaaaattcgcccgggaggc

SEQ ID NO: 726137 - DNA, 120 bp, Artificial Sequence
  ENSG00000198242_12 (sequence is synthesized)
ccgcagagcgaacgaattgggaacacggctgctgggctaagccctgagggctctgctccggggctgctccctgcgtttcggacacgctgcagtatacgtgggccgcgtgggcccagcctc

SEQ ID NO: 726138 - DNA, 120 bp, Artificial Sequence
  ENSG00000198242_13 (sequence is synthesized)
ggccagacattcggttctgggaagctacatgcatccactggttggagctccatgtccccgggcctcgtggttttgcgatgggctcctgcccctcctaaagctgaagccaaagcgaaggct

SEQ ID NO: 726139 - DNA, 120 bp, Artificial Sequence
  ENSG00000198242_14 (sequence is synthesized)
aggcatcatccgccagggagggccagacattcggttctgggaagctacatgcatccactggttggagctccatgtccccgggcctgtaaggaattagtgccctcagctttaaccattttc

SEQ ID NO: 726140 - DNA, 120 bp, Artificial Sequence
  ENSG00000198242_15 (sequence is synthesized)
gggtgcaaatgatgcatatgttagcgaccaaagcctgatctttgctgattagtcataattaactgactgcacccctatccttgacaaaccttatcctcacattcctcattttgctttcta

SEQ ID NO: 726141 - DNA, 120 bp, Artificial Sequence
  ENSG00000198242_16 (sequence is synthesized)
tttaatctcctgacacttgtgatgtcttcaaaggaaccactgatgcacctgtggccagggtggcccactgcagttcttggggccggaagtgaccgatttctaaatcccgcacccacgttt

SEQ ID NO: 726142 - DNA, 120 bp, Artificial Sequence
  ENSG00000198246_0 (sequence is synthesized)
agtggtcctggccgtgcgccggaggcagcggcggcgtggcgcagcggcgacatggccgttgtctcagaggacgactttcagcacagttcaaactccacctacagaaccacaagcagcagt

SEQ ID NO: 726143 - DNA, 120 bp, Artificial Sequence
  ENSG00000198246_1 (sequence is synthesized)
ctccgagctgaccaggaggcactgcttgagaagctgctggaccgcccgccccctggcctgcagaggcccgaggaccgcttctgtggcacatacatcatcttcttcagcctgggcattggc

SEQ ID NO: 726144 - DNA, 120 bp, Artificial Sequence
  ENSG00000198246_2 (sequence is synthesized)
agtctactgccatggaacttctttatcactgccaaggagtactggatgttcaaactccgcaactcctccagcccagccaccggggaggaccctgagggctcagacatcctgaactacttt

SEQ ID NO: 726145 - DNA, 120 bp, Artificial Sequence
  ENSG00000198246_3 (sequence is synthesized)
gagagctaccttgccgttgcctccaccgtgccctccatgctgtgcctggtggccaacttcctgcttgtcaacagggttgcagtccacatccgtgtcctggcctcactgacggtcatcctg

SEQ ID NO: 726146 - DNA, 120 bp, Artificial Sequence
  ENSG00000198246_4 (sequence is synthesized)
gccatcttcatggtgataactgcactggtgaaggtggacacttcctcctggacccgtggcttttttgcggtcaccattgtctgcatggtgatcctcagcggtgcctccactgtcttcagc

SEQ ID NO: 726147 - DNA, 120 bp, Artificial Sequence
  ENSG00000198246_5 (sequence is synthesized)
agcagcatctacggcatgaccggctcctttcctatgaggaactcccaggcactgatatcaggaggagccatgggcgggacggtcagcgccgtggcctcattggtggacttggctgcatcc

SEQ ID NO: 726148 - DNA, 120 bp, Artificial Sequence
  ENSG00000198246_6 (sequence is synthesized)
agtgatgtgaggaacagcgccctggccttcttcctgacggccactgtcttcctcgtgctctgcatgggactctacctgctgctgtccaggctggagtatgccaggtactacatgaggcct

SEQ ID NO: 726149 - DNA, 120 bp, Artificial Sequence
  ENSG00000198246_7 (sequence is synthesized)
gttcttgcggcccatgtgttttctggtgaagaggagcttccccaggactccctcagtgccccttcggtggcctccagattcattgattcccacacaccccctctccgccccatcctgaag

SEQ ID NO: 726150 - DNA, 120 bp, Artificial Sequence
  ENSG00000198246_8 (sequence is synthesized)
aagacggccagcctgggcttctgtgtcacctacgtcttcttcatcaccagcctcatctaccccgccatctgcaccaacatcgagtccctcaacaagggttcgggctcactgtggaccacc

SEQ ID NO: 726151 - DNA, 120 bp, Artificial Sequence
  ENSG00000198246_9 (sequence is synthesized)
agcaaggcgctcccagggttcgtgctcctccggacctgcctcatccccctcttcgtgctctgtaactaccagccccgcgtccacctgaagactgtggtcttccagtccgatgtgtacccc

SEQ ID NO: 726152 - DNA, 120 bp, Artificial Sequence
  ENSG00000198246_10 (sequence is synthesized)
gcactcctcagctccctgctggggctcagcaacggctacctcagcaccctggccctcctctacgggcctaagattgtgcccagggagctggctgaggccacgggagtggtgatgtccttt

SEQ ID NO: 726153 - DNA, 120 bp, Artificial Sequence
  ENSG00000198246_11 (sequence is synthesized)
tatgtgtgcttgggcttaacactgggctcagcctgctctaccctcctggtgcacctcatctagaagggaggacacaaggacattggtgcttcagagcctttgaagatgagaagagagtgc

SEQ ID NO: 726154 - DNA, 120 bp, Artificial Sequence
  ENSG00000198246_12 (sequence is synthesized)
aggagggctgggggccatggaggaaaggcctaaagtttcacttggggacagagagcagagcacactcgggcctcatccctcccaagatgccagtgagccacgtccatgcccattccgtgc

SEQ ID NO: 726155 - DNA, 120 bp, Artificial Sequence
  ENSG00000198246_13 (sequence is synthesized)
aaggcagatattccagtcatattaacagaacactcctgagacagttgaagaagaaatagcacaaatcaggggtactcccttcacagctgatggttaacattccaccttctttctagccct

SEQ ID NO: 726156 - DNA, 120 bp, Artificial Sequence
  ENSG00000198246_14 (sequence is synthesized)
tcaaagatgctgccagtgttcgccctagagttattacaaagccagtgccaaaacccagccatgggctctttgcaacctcccagctgcgctcattccagctgacagcgagatgcaagcaaa

SEQ ID NO: 726157 - DNA, 120 bp, Artificial Sequence
  ENSG00000198246_15 (sequence is synthesized)
tgctcagctctccttaccctgaaggggtctccctggaatggaagtcccctggcatggtcagtcctcaggcccaagactcaagtgtgcacagacccctgtgttctgtgggtgaacaactgc

SEQ ID NO: 726158 - DNA, 120 bp, Artificial Sequence
  ENSG00000198246_16 (sequence is synthesized)
ccactaaccagactggaaaacccagaaagatgggccttccatgaatgcttcattccagagggaccagagggcctccctgtgcaagggatcaagcatgtctggcctgggttttcaaaaaaa

SEQ ID NO: 726159 - DNA, 120 bp, Artificial Sequence
  ENSG00000198246_17 (sequence is synthesized)
gagggatcctcatgacctggtggtctatggcctgggtcaagatgagggtctttcagtgttcctgtttacaacatgtcaaagccattggttcaagggcgtaataaatacttgcgtattcaa

SEQ ID NO: 726160 - DNA, 120 bp, Artificial Sequence
  ENSG00000198246_18 (sequence is synthesized)
gtggcgcagcggcgacagtaagtgcgggccggctcgggctcttccggctacggtcccggccgcccccagactcgcgctcagcgacctccctcccgggccctgggggcggctgcgggctgc

SEQ ID NO: 726161 - DNA, 120 bp, Artificial Sequence
  ENSG00000198246_19 (sequence is synthesized)
gctgcgggctgccaggggagccgcaggaccctaccccatccgtggtcccttccccaccgtccctcctctctctccttgctctctgccacccctctttctgggtctctatcttctcttccc

SEQ ID NO: 726162 - DNA, 120 bp, Artificial Sequence
  ENSG00000198246_20 (sequence is synthesized)
caaatcctctcccctcctcctccctgagactggacctcaccgcctgtatggtgggggcctggtatggacccgtcggcccgaagtatccagacggtggctgattctctcggtcccagctgc

SEQ ID NO: 726163 - DNA, 120 bp, Artificial Sequence
  ENSG00000198246_21 (sequence is synthesized)
ggggcctgaggctggggctgtttacaccgcaaagccggttctgccgcggccagtaggcggtgccctgcgcttcccagtgccttcccacagtggccgttgtctcagaggacgactttcagc

SEQ ID NO: 726164 - DNA, 120 bp, Artificial Sequence
  ENSG00000198246_22 (sequence is synthesized)
tctagaaggctcccaaaagcctattccttggaaaacagcatggcacgggaatcagagagagaaaggaaccagatcagacgaggagctctctctcaagagtcctgcagaaagaacagaact

SEQ ID NO: 726165 - DNA, 120 bp, Artificial Sequence
  ENSG00000198246_23 (sequence is synthesized)
tacccccaagatgtggcaacccttggagccgtgaatcagccctttgcttctctgcagaagcgcactggctcattggtgccctgcagaggctgatgaaacagaagcagtcagtaatccagc

SEQ ID NO: 726166 - DNA, 120 bp, Artificial Sequence
  ENSG00000198246_24 (sequence is synthesized)
cggtggcagcagttcatgctccccaccgtctcagcctagtacacattccctctccttggccgaagaattaaagaggacaccttgaaagggtttctgaactcgatacctaccaaaaagaaa

SEQ ID NO: 726167 - DNA, 120 bp, Artificial Sequence
  ENSG00000198246_25 (sequence is synthesized)
aagttctcccttccctttgcaggagcctgaagtctcccccttggttttttcattgactttagtgctgcggatgatttgggatgttggtctagctggtgactcatctcaaccacaagtgtt

SEQ ID NO: 726168 - DNA, 120 bp, Artificial Sequence
  ENSG00000198246_26 (sequence is synthesized)
ctcctttcctatgaggaactcccaggcactgatatcagaggacctgctatgtcctggggatgcaaagatgaacaagcaccagtcccctcggagctgatggctcagtgaataaactctcac

SEQ ID NO: 726169 - DNA, 120 bp, Artificial Sequence
  ENSG00000198246_27 (sequence is synthesized)
ccccagcacccccaagctttggtatcccgtgggtatgcctgtgcacgacgtgggccgacccctctagctgatgtttgatgctgatgttgatgagcctgttccggaggccttggcactttt

SEQ ID NO: 726170 - DNA, 120 bp, Artificial Sequence
  ENSG00000198246_28 (sequence is synthesized)
gagtatgccaggcaaggaaatggagaatcaggcaggaatccccaaaccccagagtggtataagctgacatttaggaagaacacagacggctgtctcccctgaaagccaaacagatactca

SEQ ID NO: 726171 - DNA, 120 bp, Artificial Sequence
  ENSG00000198246_29 (sequence is synthesized)
tgggccagggatccagttttgttgtgaggagtgctataggctggacactttggaaaaatcccgagtgcactttgtggacactgctggcctgaaatagtggggcacactggcctgagagct

SEQ ID NO: 726172 - DNA, 120 bp, Artificial Sequence
  ENSG00000198246_30 (sequence is synthesized)
ccctggctcccagtgcctaaggtcctttaccccatactccctcaaggtccatccctataccctccagcccacagcatgtgaccaagcatgtgccccttaacctggagctggaacccttcc

SEQ ID NO: 726173 - DNA, 120 bp, Artificial Sequence
  ENSG00000198246_31 (sequence is synthesized)
tttcacagatacctggaaattgagccagatctgcatccgagggacactagaagggatggggaggagcgcttacccctgaactctgttttgtctcatgtttggaggcccaaggtcatttgg

SEQ ID NO: 726174 - DNA, 120 bp, Artificial Sequence
  ENSG00000198246_32 (sequence is synthesized)
ttcttcagatttccagcaaactatagctctcactcccttcccgcatgccctcaccccacggcttttacacttaagaggaatggccctgccttctctgggcccacagctcctgtggcttga

SEQ ID NO: 726175 - DNA, 120 bp, Artificial Sequence
  ENSG00000198246_33 (sequence is synthesized)
gaatgatggctgtgttaacaggtcggggggcggttggggagacactaacaagatgataaaccttggtatttggctctgctgctgactttgagcgagtccttttttacctctcagagcctt

SEQ ID NO: 726176 - DNA, 120 bp, Artificial Sequence
  ENSG00000198246_34 (sequence is synthesized)
atttttctcatctgtaaagtggggagtcctgctcccctcccctgaggttgttctaatgaggccgtgctcatagtaggtaaataatgtacacacacaacatgggcatgcacagcgatgggt

SEQ ID NO: 726177 - DNA, 120 bp, Artificial Sequence
  ENSG00000198246_35 (sequence is synthesized)
gcaggttgcaattgggacttccctctgttccctccatcacaattgatgagggactttggggctgatcttgacttctccaggatcctggtctcccagtaggttgctagtgatgctcaaaag

SEQ ID NO: 726178 - DNA, 120 bp, Artificial Sequence
  ENSG00000198246_36 (sequence is synthesized)
gtaggggtctctccccaggacactgccagcctgcccttctgggaggaaggagacagaaagggttactttggcaatcacgaggcttaaggatgccccaatgcttcaccctgtcccaaaccg

SEQ ID NO: 726179 - DNA, 120 bp, Artificial Sequence
  ENSG00000198246_37 (sequence is synthesized)
accccctactcccacccccaagtctaaagtgggtccctctacaataatctctcatcacgccattcattcttcctttgtggcacttattataagtgctaattatttatcaatatttgtttt

SEQ ID NO: 726180 - DNA, 120 bp, Artificial Sequence
  ENSG00000198246_38 (sequence is synthesized)
tttaaacaaaactttattatgaaaagtttccaacatttaccagaaaaacccaaaacagaacagtatcacagactccatatacctatcacccagcttcaacaatgatcaactcgaggtcaa

SEQ ID NO: 726181 - DNA, 120 bp, Artificial Sequence
  ENSG00000198246_39 (sequence is synthesized)
tcttgttttatctctacccctactcactcctgcctcctagtattaatttgaggcaacacatttgtaaatgttttggtaggtattgctaaaaataagggctcttgtataaaacataaccac

SEQ ID NO: 726182 - DNA, 120 bp, Artificial Sequence
  ENSG00000198246_40 (sequence is synthesized)
aaatacatgtcattatacatttatccaaacccacagaatgtacaacaccaagagtgaaccctaatgtgagctatggacttggggtgatgatggtgtgtcagtgcaggctcactactgtat

SEQ ID NO: 726183 - DNA, 120 bp, Artificial Sequence
  ENSG00000198246_41 (sequence is synthesized)
caaatgctctgctctgctgggggatgttgatactgtggcaggctgtgcacaacgtgggggcagtctctgtaccatcttctcaattttcctgtgaacttaaaactactctaaaaaagttaa

SEQ ID NO: 726184 - DNA, 120 bp, Artificial Sequence
  ENSG00000198252_0 (sequence is synthesized)
ggttgtcgggctggttcctgtgctggatcctgggcggcctgaggggtacggagactctgggggagggagacggcagcggcatggcggccgggtgtaagacgcccgaccctcctcttccct

SEQ ID NO: 726185 - DNA, 120 bp, Artificial Sequence
  ENSG00000198252_1 (sequence is synthesized)
gtcttcgccgccgccgctgctggagtcactgggaccctgtagtctgcgtgtgttagttgtaatcccgccgccctcctgtcagccctccgctccgccggccctccttccttccgccgccgc

SEQ ID NO: 726186 - DNA, 120 bp, Artificial Sequence
  ENSG00000198252_2 (sequence is synthesized)
agccagcccgagggtcggccggctgtgtaacactctcccaccccacccaccagcccgcgggccagcaccatggaggacgtgaagctggagttcccttcccttccacagtgcaaggaagac

SEQ ID NO: 726187 - DNA, 120 bp, Artificial Sequence
  ENSG00000198252_3 (sequence is synthesized)
gccgaggagtggacctaccctatgagacgagagatgcaggaaattttacctggattgttcttaggcccatattcatctgctatgaaaagcaagctacctgtactacagaaacatggaata

SEQ ID NO: 726188 - DNA, 120 bp, Artificial Sequence
  ENSG00000198252_4 (sequence is synthesized)
acccatataatatgcatacgacaaaatattgaagcaaactttattaaaccaaactttcagcagttatttagatatttagtcctggatattgcagataatccagttgaaaatataatacgt

SEQ ID NO: 726189 - DNA, 120 bp, Artificial Sequence
  ENSG00000198252_5 (sequence is synthesized)
tttttccctatgactaaggaatttattgatgggagcttacaaatgggaggaaaagttcttgtgcatggaaatgcagggatctccagaagtgcagcctttgttattgcatacattatggaa

SEQ ID NO: 726190 - DNA, 120 bp, Artificial Sequence
  ENSG00000198252_6 (sequence is synthesized)
acatttggaatgaagtacagagatgcttttgcttatgttcaagaaagaagattttgtattaatcctaatgctggatttgtccatcaacttcaggaatatgaagccatctacctagcaaaa

SEQ ID NO: 726191 - DNA, 120 bp, Artificial Sequence
  ENSG00000198252_7 (sequence is synthesized)
ttaacaatacagatgatgtcaccactccagatagaaaggtcattatctgttcattctggtaccacaggcagtttgaagagaacacatgaagaagaggatgattttggaaccatgcaagtg

SEQ ID NO: 726192 - DNA, 120 bp, Artificial Sequence
  ENSG00000198252_8 (sequence is synthesized)
gcgactgcacagaatggctgacttgaagagcaacatcatagagtgtgaatttctatttgggaaggagaaaatacaagagaaaattataatgtaaaatggtaaaaacataagtagtttttt

SEQ ID NO: 726193 - DNA, 120 bp, Artificial Sequence
  ENSG00000198252_9 (sequence is synthesized)
tttcaattacatgttgcttccagacatacttctctgcaacttgttgagcaacattttaagatgttggacttctgcaatagatgacactgatggttttactcctttttttaaaaacacatg

SEQ ID NO: 726194 - DNA, 120 bp, Artificial Sequence
  ENSG00000198252_10 (sequence is synthesized)
cgcgcgcacacacacatgctttacaagttttattataaaccaagaattttggacttgcaaagaggtattattgcaataatgcacttttcatacttgaaatttatttgtatgatataaagt

SEQ ID NO: 726195 - DNA, 120 bp, Artificial Sequence
  ENSG00000198252_11 (sequence is synthesized)
tattactttaaacaaaatgcaagtatggggggattgtttataaagtttgggtaatttataacaaaatttgctaaggtttgctaaaaattcatttttctgttctatatattacatttttaa

SEQ ID NO: 726196 - DNA, 120 bp, Artificial Sequence
  ENSG00000198252_12 (sequence is synthesized)
cataattttacagttcaattttatgatggagcctcttacagaaacattaacaaaatgcaggaatctgccacatttcttttttagtataacttaatagcttaattaccattttatttttta

SEQ ID NO: 726197 - DNA, 120 bp, Artificial Sequence
  ENSG00000198252_13 (sequence is synthesized)
tacttcttccattattaatctttaaatcatgatcctaattagctgtccttactttaacttgatctaattattgcttcctttcttattactttcctaatttttctatattttaaaaactac

SEQ ID NO: 726198 - DNA, 120 bp, Artificial Sequence
  ENSG00000198252_14 (sequence is synthesized)
agtttccatgataaaaggaaaacgttttgatttatagtaccaagtgcttaaacacaaggatagtgttagattttcgagtgactttcctttttgcattttttggcagtaaaagccaaacgt

SEQ ID NO: 726199 - DNA, 120 bp, Artificial Sequence
  ENSG00000198252_15 (sequence is synthesized)
tgtatttgttcttttcagagttgtccagcccttttttcctttgtccaaaatgattctaaatagaatctaataaaccaatgtagcattatttttttctaaatgaagccccaaaaaagaaaa

SEQ ID NO: 726200 - DNA, 120 bp, Artificial Sequence
  ENSG00000198252_16 (sequence is synthesized)
gtgccttgcatcatttaaaaaaaataattaaatcctcatggcctctaaattagtatgtagaacactgaaaagttcttaacatttttgtgtaatttcctttctttttaaaccataaattag

SEQ ID NO: 726201 - DNA, 120 bp, Artificial Sequence
  ENSG00000198252_17 (sequence is synthesized)
tttaaactgaaagtacgaggctggaagaaatattagtaaattatttggaatatagaatgtttactctttctttttatgttgtcttaatgattctgtgagattgttccggctcaaacagaa

SEQ ID NO: 726202 - DNA, 120 bp, Artificial Sequence
  ENSG00000198252_18 (sequence is synthesized)
gcttttctttggggaaggtgatttgtgggagactagtgtattttaaattagcattttaatccattcttgacattcagttagtccagatctgccccataatttgctttagtaaagtcactt

SEQ ID NO: 726203 - DNA, 120 bp, Artificial Sequence
  ENSG00000198252_19 (sequence is synthesized)
tatggatttttggctatgttttagtttgtgtgtataaaagttctaagaaaacatttttgctattttaagtatgtaagggaagagaggagtgtttttaactttttatagttgatgacttta

SEQ ID NO: 726204 - DNA, 120 bp, Artificial Sequence
  ENSG00000198252_20 (sequence is synthesized)
aatgggaatgatttctgtatgttcccttggtaccaagaggtactatgcaaagtaacctattacaccaagttacttgctttgctttcctctctatgatgtgataatacagtaaaagctttc

SEQ ID NO: 726205 - DNA, 120 bp, Artificial Sequence
  ENSG00000198252_21 (sequence is synthesized)
ttacccagcatagtgggagagtggagattaattaaaattgttaattaagagttaattcctattgacccaggtgatatttctcttctgatttccctccccttcccttctcttatcttacca

SEQ ID NO: 726206 - DNA, 120 bp, Artificial Sequence
  ENSG00000198252_22 (sequence is synthesized)
ctgtgaaaacagcatattgttaatctcgttgtcgtccagtattctgctttgtgattaggtcttttgatgtacagtggtctagtggagtcaagattcgcattgggttttctaaaattccag

SEQ ID NO: 726207 - DNA, 120 bp, Artificial Sequence
  ENSG00000198252_23 (sequence is synthesized)
ttgataaaagttccagataacacagctttcctgtatatagatcactattgggcaggtcagcaaagatctcttacagtgtaataataatctatgatgcttcatttagcagaaactctgctt

SEQ ID NO: 726208 - DNA, 120 bp, Artificial Sequence
  ENSG00000198252_24 (sequence is synthesized)
aaaagaatcttcataatagtaagtttaggttttaaaaacttgtttcataaatatacatatatcctctctagtagtctggccaaaagaacagattttgttattgataatttgtagctggta

SEQ ID NO: 726209 - DNA, 120 bp, Artificial Sequence
  ENSG00000198252_25 (sequence is synthesized)
attttccacattttctatccactgtaatttttatgttgtcactgaagtgcctgcccagtactgtatattacagtctctcacaaacactgggaaaagggactgtcatcatcttgagtactc

SEQ ID NO: 726210 - DNA, 90 bp, Artificial Sequence
  ENSG00000198252_26 (sequence is synthesized)
caaacactgggaaaagggactgtcatcatcttgagtactctgtgtgtatatatatatatatagatagatataatgtcacccaggctggag

SEQ ID NO: 726211 - DNA, 120 bp, Artificial Sequence
  ENSG00000198252_27 (sequence is synthesized)
tttattatttcatataagaacattacaggtttgttttttcttgcatgtctgtccacctaatgtttaagtagttctggtagctcttcctattctttattctatttgattccatttctgtga

SEQ ID NO: 726212 - DNA, 120 bp, Artificial Sequence
  ENSG00000198252_28 (sequence is synthesized)
ttcttttattaccactgatgttttgtgatagttaactatgataaatttaactgatcatgatttatcttctagagtatttaaataatgtatgagtgaccacccaattccaacattaaaagt

SEQ ID NO: 726213 - DNA, 120 bp, Artificial Sequence
  ENSG00000198252_29 (sequence is synthesized)
gtaatctgggcccataatttatagtgaaattgtatcaaaacatagggaaactgtattactgtccattttgaaaatatgaaacttgagtattgaaaatattcaaacatggaatggcagtat

SEQ ID NO: 726214 - DNA, 120 bp, Artificial Sequence
  ENSG00000198252_30 (sequence is synthesized)
tctaatttcagttagttggttcatgttaatttcttacctgttagatgtttaaactgcagtgacctttacttgtatctactctgtggtggaaatgttaaaccatgatagcttttgctacca

SEQ ID NO: 726215 - DNA, 120 bp, Artificial Sequence
  ENSG00000198252_31 (sequence is synthesized)
actcaaccacttaacttttagagcagttttggggagagtttatgcttcatctgagtttagaagtaatgtcagaaaatgttaagcatgtctgtattaagaaaatataaggtttctaattgt

SEQ ID NO: 726216 - DNA, 120 bp, Artificial Sequence
  ENSG00000198252_32 (sequence is synthesized)
ttaatatggtaattcaagtgaattagaaatatttaactgcaatcttgaattataaagttgagatatatatatatatgtatcaagatctcaacttgatgtaaagtaaatgagcagttacct

SEQ ID NO: 726217 - DNA, 120 bp, Artificial Sequence
  ENSG00000198252_33 (sequence is synthesized)
acctggcggatttttttttttttaaataactgatttaatccataatcccataacaaacatagcttcacctcagtattttctttctttctttgttcaacagtgctccgataagggaatgct

SEQ ID NO: 726218 - DNA, 120 bp, Artificial Sequence
  ENSG00000198252_34 (sequence is synthesized)
agaaaatagatgagaagtactgaaagacctttttttttaattgattagaaaagtaagtctctagggtctttgaatgctggaatttttttttttttttttgtctttcccatctgtggcagc

SEQ ID NO: 726219 - DNA, 120 bp, Artificial Sequence
  ENSG00000198252_35 (sequence is synthesized)
taaaacaaaaatcactcaaaatattcaggtttacatgttagctctctctcatagggagctgccatacctcacagttcaaagtgtattctatagatcagtaacattatactgacatgtaat

SEQ ID NO: 726220 - DNA, 120 bp, Artificial Sequence
  ENSG00000198252_36 (sequence is synthesized)
tgcaatttactatgcagcaaaaatgattcaagaagaaaaataacctacagtgtctgtatacctttgtatacacaattgcttaagttactctgcttttaacatttgtacttggataaaatg

SEQ ID NO: 726221 - DNA, 120 bp, Artificial Sequence
  ENSG00000198252_37 (sequence is synthesized)
cttatgtctgtataggaatgtcacagtgcaagatgctgctagcccaggcacaaagtattaaaattattttgtgaagattggtggttgtattaaaactgctgtgccattatacctccaaaa

SEQ ID NO: 726222 - DNA, 120 bp, Artificial Sequence
  ENSG00000198258_0 (sequence is synthesized)
aacttccgcttccggttcctagcgttaactgcgaccggggttcagcgctcgggtgaggagctggtggcgtcggcaggttcgaggcgattcgaggtgagggggtcaagcggagaggctcgg

SEQ ID NO: 726223 - DNA, 120 bp, Artificial Sequence
  ENSG00000198258_1 (sequence is synthesized)
agtcggagaaagctgtcgcgacccagccacccagggtctggggtcggtgggagctccagctaggatgatcgaggttgtttgcaacgaccgtctggggaagaaggtccgcgttaaatgcaa

SEQ ID NO: 726224 - DNA, 120 bp, Artificial Sequence
  ENSG00000198258_2 (sequence is synthesized)
gattgcagcccaaactggtacccgttggaacaagattgtcctgaagaagtggtacacgatttttaaggaccacgtgtctctgggggactatgaaatccacgatgggatgaacctggagct

SEQ ID NO: 726225 - DNA, 120 bp, Artificial Sequence
  ENSG00000198258_3 (sequence is synthesized)
ttattatcaatagatgagaatcctcatcttcctgccccgctttcctctcccatcctcatcccccacactgggatagatgcttgtttgtaaaaactcaccttaataaagacttagatgttg

SEQ ID NO: 726226 - DNA, 120 bp, Artificial Sequence
  ENSG00000198258_4 (sequence is synthesized)
aacttccgcttccggttcctagcgttaactgcgaccggggttcagcgctcgggtgaggagctggtggcgtcggcaggttcgaggcgattcgagctccagctaggatgatcgaggttgttt

SEQ ID NO: 726227 - DNA, 120 bp, Artificial Sequence
  ENSG00000198258_5 (sequence is synthesized)
cgcgttaaatgcaagtatccactggcagccgagaggcagtggtacccgcaggggtgcttggcgtgaggcaggcaactcaatctgtgttgtcggatggttttagttaaacccgggagaggg

SEQ ID NO: 726228 - DNA, 120 bp, Artificial Sequence
  ENSG00000198258_6 (sequence is synthesized)
tgtatcctttgtgtgactttttgaggaagcatctacatacccagcctcggttatctgttcaaaactaaagtctgcatgagcttatgcatattaagtgtttaacttaatacgtggcacatg

SEQ ID NO: 726229 - DNA, 120 bp, Artificial Sequence
  ENSG00000198258_7 (sequence is synthesized)
cggtagagccactgggtggactggactaggccggaaggttttggttgggggagcgctgcaggcagccctttgcttaggcttggctacctcatttggcctacagactgaagagcctcctta

SEQ ID NO: 726230 - DNA, 120 bp, Artificial Sequence
  ENSG00000198258_8 (sequence is synthesized)
actgacctccacctgagtgctggacagtaggtcagggtggggtgagactcaggcatatctattgtgcaaaaggagcagaaactttttacaatttttattttatttatttatttttttgag

SEQ ID NO: 726231 - DNA, 76 bp, Artificial Sequence
  ENSG00000198258_9 (sequence is synthesized)
attcttttgtaaagttttggttctctccaaataaaaatggcctggtccaaaatgggcttccttagccctgggctga

SEQ ID NO: 726232 - DNA, 120 bp, Artificial Sequence
  ENSG00000198258_10 (sequence is synthesized)
atggcctggtccaaaatgggcttccttagccctgggctgagacctcaggccacctgacccggctgtgaatggatgagaggggtggggacggaagtcagagtcaggattccttaacacctt

SEQ ID NO: 726233 - DNA, 120 bp, Artificial Sequence
  ENSG00000198258_11 (sequence is synthesized)
tccttcagatgaaatccacgatgggatgaacctggagctttattatcaatagatgagaatcctcatcttcctgccccgctttcctctcccatcctcatcccccacactgggatagatgct

SEQ ID NO: 726234 - DNA, 120 bp, Artificial Sequence
  ENSG00000198265_0 (sequence is synthesized)
gtggggacgttgacaagtggatccaagatggcgtagaaagtaatgacaggatttggatgaagtaatggatcactaatgaactacagtgctggtgagatgtgtaagaaattataaagagct

SEQ ID NO: 726235 - DNA, 120 bp, Artificial Sequence
  ENSG00000198265_1 (sequence is synthesized)
ctgatgggctatttgggtgatacccagtgcagtgaactgcaggatttttgtccctgagtcatggaagacagaagagctgaaaagtcatgtgaacaagcatgtgaatcacttaagaggcag

SEQ ID NO: 726236 - DNA, 120 bp, Artificial Sequence
  ENSG00000198265_2 (sequence is synthesized)
gactatgaaatggccctcaagcactgcacagaggcccttctttctcttggccagtactccatggcagacttcacagggccttgtccattggaaatagaacgcatcaaaatcgagagtctt

SEQ ID NO: 726237 - DNA, 120 bp, Artificial Sequence
  ENSG00000198265_3 (sequence is synthesized)
ctctacagaattgcctcatttttgcaactgaaaaattatgtgcaagctgatgaagattgtagacatgtgctgggagaaggactggccaagggagaagatgcctttcgggcagtgctttgc

SEQ ID NO: 726238 - DNA, 120 bp, Artificial Sequence
  ENSG00000198265_4 (sequence is synthesized)
tgcatgcagctgaaagggaagctccaacctgtatccaccattcttgccaagtcactcacaggagagtccctgaatgggatggtaacaaaggatttgacaagactaaaaacacttctctca

SEQ ID NO: 726239 - DNA, 120 bp, Artificial Sequence
  ENSG00000198265_5 (sequence is synthesized)
gaaacagagacagcaactagtaacgccctctctggatatcacgtggaagacttagatgaggggtcttgtaatggttggcatttccgcccaccacctaggggaatcacaagcagcgaggaa

SEQ ID NO: 726240 - DNA, 120 bp, Artificial Sequence
  ENSG00000198265_6 (sequence is synthesized)
tatactttgtgtaaaagatttttagaacaaggaatctgtaggtatggtgcccagtgtacttcagcacattcccaggaagaactagcagaatggcagaaaagatatgcttcacggctgata

SEQ ID NO: 726241 - DNA, 120 bp, Artificial Sequence
  ENSG00000198265_7 (sequence is synthesized)
aaattgaaacagcaaaatgagaataaacagctctcaggcagttacatggaaaccttgatagaaaagtggatgaattcattgtctcctgagaaagtgcttagtgaatgtatagaaggagta

SEQ ID NO: 726242 - DNA, 120 bp, Artificial Sequence
  ENSG00000198265_8 (sequence is synthesized)
aaggtagagcacaatcctgacctgtcagttactgtcagcaccaaaaaatcccaccagacatggacctttgctctcacttgtaagcctgcaagaatgctgtatcgtgtagcattgctttat

SEQ ID NO: 726243 - DNA, 120 bp, Artificial Sequence
  ENSG00000198265_9 (sequence is synthesized)
gatgctcatcgtcctcattttagtatcattgcaatatctgccggagatagtactacccaggtatcacaagaagtcccagaaaactgtcaagaatggataggaggaaagatggcccaaaat

SEQ ID NO: 726244 - DNA, 120 bp, Artificial Sequence
  ENSG00000198265_10 (sequence is synthesized)
ggattagatcattacgtgtataaagtcgggatagcatttaacacagaaatatttggaacttttcgccaaaccatagttttcgactttggattggaaccagtactcatgcaaagagtaatg

SEQ ID NO: 726245 - DNA, 120 bp, Artificial Sequence
  ENSG00000198265_11 (sequence is synthesized)
attgatgcagcttctacagaagatctcgaatacctgatgcatgcaaaacagcagctagtaaccacagctaaacgttgggattcttcctctaagactattatagattttgaacctaatgaa

SEQ ID NO: 726246 - DNA, 120 bp, Artificial Sequence
  ENSG00000198265_12 (sequence is synthesized)
actactgatttggagaagagccttcttatcagataccaaattcccctctctgctgaccagctatttactcagtccgttttagacaaatcattgaccaagagcaactatcagtcacggtta

SEQ ID NO: 726247 - DNA, 120 bp, Artificial Sequence
  ENSG00000198265_13 (sequence is synthesized)
catgaccttctttatattgaggagatagcccagtataaagaaatcagcaagttcaaccttaaagtgcaattgcagattctggcaagcttcatgctcactggtgtttctggaggtgcaaag

SEQ ID NO: 726248 - DNA, 120 bp, Artificial Sequence
  ENSG00000198265_14 (sequence is synthesized)
tatgctcagaatggacaactttttggtcgctttaagcttactgaaacactttctgaagatactttggctggacgactggtgatgaccaaagtcaatgctgtttatttattaccagtccct

SEQ ID NO: 726249 - DNA, 120 bp, Artificial Sequence
  ENSG00000198265_15 (sequence is synthesized)
aaacagaagttagtacagacccagggaaccaaagagaaggtttatgaagctactattgaagaaaaaacaaaggaatatatatttttaaggctatctagggaatgctgtgaagaacttaat

SEQ ID NO: 726250 - DNA, 120 bp, Artificial Sequence
  ENSG00000198265_16 (sequence is synthesized)
cttcggcctgactgtgacacacaggttgaacttcagtttcaattaaatcgattacccctctgtgaaatgcactatgcactagacaggatcaaggacaatggggttttgtttccagacatc

SEQ ID NO: 726251 - DNA, 120 bp, Artificial Sequence
  ENSG00000198265_17 (sequence is synthesized)
agtatgactcccaccataccatggagtcctaacagacaatgggatgaacagttggatcctcgactaaatgcaaaacagaaagaggctgttctggccattaccactccacttgcaatccag

SEQ ID NO: 726252 - DNA, 120 bp, Artificial Sequence
  ENSG00000198265_18 (sequence is synthesized)
ctgccgcctgtgcttatcatcggaccctatgggacaggcaaaacgttcactctagctcaggctgtcaaacatattctgcagcaacaggagactaggattctcatttgcacccattctaat

SEQ ID NO: 726253 - DNA, 120 bp, Artificial Sequence
  ENSG00000198265_19 (sequence is synthesized)
agtgctgctgatctctacataaaggattatttacatccatatgtagaagcaggcaatccccaggcaagacctctcagggtatatttcagaaatcgctgggtaaagactgtccacccagtt

SEQ ID NO: 726254 - DNA, 120 bp, Artificial Sequence
  ENSG00000198265_20 (sequence is synthesized)
gtgcatcagtactgtttgatctcaagcgcacattccacctttcagatgccccagaaagaagatattcttaaacatcgagtggtggttgttaccttgaatacttcccagtacctctgtcag

SEQ ID NO: 726255 - DNA, 120 bp, Artificial Sequence
  ENSG00000198265_21 (sequence is synthesized)
ttggaccttgaacctgggttttttacacacattctattagatgaagctgcccaggccatggagtgtgaaaccattatgcctctagcattagcaactcaaaacactcggattgtcttggct

SEQ ID NO: 726256 - DNA, 120 bp, Artificial Sequence
  ENSG00000198265_22 (sequence is synthesized)
ggtgatcacatgcagctcagtccttttgtttacagcgagtttgccagggagagaaaccttcacgtttcattacttgaccgactctatgagcattaccctgctgagttcccatgtaggatt

SEQ ID NO: 726257 - DNA, 120 bp, Artificial Sequence
  ENSG00000198265_23 (sequence is synthesized)
ctcctgtgtgagaactaccgctcccatgaagctatcatcaattatacctctgagcttttctatgagggcaaactgatggccagtgggaagcagccagcacacaaagatttctacccacta

SEQ ID NO: 726258 - DNA, 120 bp, Artificial Sequence
  ENSG00000198265_24 (sequence is synthesized)
actttctttacagcacgaggagaagatgtacaagaaaaaaatagcacagctttttataataatgcagaggtgtttgaagtggtggaacgtgtagaagagttaagaaggaagtggccagta

SEQ ID NO: 726259 - DNA, 120 bp, Artificial Sequence
  ENSG00000198265_25 (sequence is synthesized)
gcgtgggggaagttagatgatggcagtattggtgtggtgactccatatgctgatcaagtgtttagaatacgtgctgaacttcgaaaaaagagattatctgatgttaatgtagaaagggtg

SEQ ID NO: 726260 - DNA, 120 bp, Artificial Sequence
  ENSG00000198265_26 (sequence is synthesized)
ctaaatgttcaaggaaagcaattcagagttttgtttcttagcacagtacgtacaagacatacttgtaaacataaacagacaccaattaaaaagaaagagcaacttctggaagattccaca

SEQ ID NO: 726261 - DNA, 120 bp, Artificial Sequence
  ENSG00000198265_27 (sequence is synthesized)
gaggacttagattatggttttttatctaactacaagcttctcaatactgccatcacaagagcacaatccctggttgctgtggtgggtgatcccattgctctgtgctctattggaagatgc

SEQ ID NO: 726262 - DNA, 120 bp, Artificial Sequence
  ENSG00000198265_28 (sequence is synthesized)
aggaaattttgggaacggtttattgccctgtgtcatgaaaacagtagcctacatggaatcacttttgaacagatcaaagcccagttagaggctttagaactaaagaagacatatgtgttg

SEQ ID NO: 726263 - DNA, 120 bp, Artificial Sequence
  ENSG00000198265_29 (sequence is synthesized)
aatccgctggcacctgaatttatcccccgggctctaagactgcagcattcaggaagtaccaacaaacagcagcaatcaccacccaaggggaaaagtcttcatcatacccagaatgatcac

SEQ ID NO: 726264 - DNA, 120 bp, Artificial Sequence
  ENSG00000198265_30 (sequence is synthesized)
ttccagaatgatggaattgttcagcccaatccttctgtacttattggcaatcctattagagcatatactcctccaccccctcttggacctcacccaaatttgggaaaatctccaagccct

SEQ ID NO: 726265 - DNA, 120 bp, Artificial Sequence
  ENSG00000198265_31 (sequence is synthesized)
gttcaaagaatagatcctcacactgggacaagtattctttatgtacctgctgtctatggagggaatgtagttatgtcggtgcctttacctgtaccatggacaggataccagggtaggttt

SEQ ID NO: 726266 - DNA, 120 bp, Artificial Sequence
  ENSG00000198265_32 (sequence is synthesized)
gcagttgatcctcgaattattacacatcaggcagcaatggcctataacatgaacctattacagacacatggacgaggatctcctattccttatggccttggacatcacccacctgtcacc

SEQ ID NO: 726267 - DNA, 120 bp, Artificial Sequence
  ENSG00000198265_33 (sequence is synthesized)
ataggccagccacaaaatcagcatcaggagaaggatcaacatgagcaaaatcgaaatggtaaaagtgatacaaataattccggacctgaaattaataagattcgaacaccagagaaaaag

SEQ ID NO: 726268 - DNA, 120 bp, Artificial Sequence
  ENSG00000198265_34 (sequence is synthesized)
ccaacagaaccaaaacaggttgatttggaatcaaatccacagaacagaagtcctgaatcacgtcctagtgttgtttatcccagtaccaaatttcctcgcaaagataatctcaacccaaga

SEQ ID NO: 726269 - DNA, 120 bp, Artificial Sequence
  ENSG00000198265_35 (sequence is synthesized)
cacataaatcttccccttcctgctccccacgcacagtatgcaatccctaatcgccactttcatccccttccccagctaccaagaccaccctttccaattccacagcagcacaccttgtta

SEQ ID NO: 726270 - DNA, 120 bp, Artificial Sequence
  ENSG00000198265_36 (sequence is synthesized)
aatcagcagcagaataatttgcctgaacaaccaaatcagataccacctcagccaaatcaggtagtccagcagcaaagtcagttgaatcagcagcctcagcagccacctcctcagctttct

SEQ ID NO: 726271 - DNA, 120 bp, Artificial Sequence
  ENSG00000198265_37 (sequence is synthesized)
cctgcatatcaggcgggacccaacaatgctttttttaatagtgcagttgctcatcggccacagtctcctcctgcagaagctgtaattccggagcagcagccccctcccatgctgcaagaa

SEQ ID NO: 726272 - DNA, 120 bp, Artificial Sequence
  ENSG00000198265_38 (sequence is synthesized)
ggccacagtcctctgagagccattgcacaacccggccccattcttccttcacatctgaatagcttcattgatgagaacccctcgggattacctataggggaggctttagatcgtatacat

SEQ ID NO: 726273 - DNA, 120 bp, Artificial Sequence
  ENSG00000198265_39 (sequence is synthesized)
gggagtgtcgctctggaaacattaaggcagcagcaggcacggttccagcagtggagcgagcatcatgcctttctcagtcagggcagcgctccatacccacaccatcaccatcctcacctc

SEQ ID NO: 726274 - DNA, 120 bp, Artificial Sequence
  ENSG00000198265_40 (sequence is synthesized)
cagcatcttcctcagccgcccctgggattacatcagccgccagtgagggcagactggaagctcaccagcagtgccgaagatgaagtggagaccacatactcaaggtttcaagacttaatc

SEQ ID NO: 726275 - DNA, 120 bp, Artificial Sequence
  ENSG00000198265_41 (sequence is synthesized)
agagaactgtctcatcgtgatcaaagtgaaacacgggaactagctgaaatgccaccacctcaatcaagacttttgcaatatagacaagtacagagtagaagcccaccagcagtcccatct

SEQ ID NO: 726276 - DNA, 120 bp, Artificial Sequence
  ENSG00000198265_42 (sequence is synthesized)
cccccatccagtacagaccacagtagccacttttctaactttaatgataacagcagagacattgaagtagccagcaacccagcatttccacagcgcctcccaccccagatattcaactca

SEQ ID NO: 726277 - DNA, 120 bp, Artificial Sequence
  ENSG00000198265_43 (sequence is synthesized)
cctttctcgttgccatctgaacaccttgcccctcctcccttgaaatacctggcacctgatggagcatggacttttgctaacttgcaacagaatcacctaatggggccaggttttccctat

SEQ ID NO: 726278 - DNA, 120 bp, Artificial Sequence
  ENSG00000198265_44 (sequence is synthesized)
ggcctacctccattgcctcacaggccaccgcagaacccttttgtacaaatacagaatcatcaacatgctattggtcaagagccatttcacccattgtcatctcgaacagtatcttcttct

SEQ ID NO: 726279 - DNA, 120 bp, Artificial Sequence
  ENSG00000198265_45 (sequence is synthesized)
tcgctccctagcttagaagagtatgagcccagaggacctggtcggcccttgtaccaaagaagaatctcatctagctcagttcaaccttgttctgaagaagtaagcactcctcaagacagt

SEQ ID NO: 726280 - DNA, 120 bp, Artificial Sequence
  ENSG00000198265_46 (sequence is synthesized)
ctggctcagtgtaaagagcttcaggaccacagtaaccaatcttctttcaacttttcatccccggagtcctgggtaaacaccacctcatctactccttatcagaacattccgtgcaatgga

SEQ ID NO: 726281 - DNA, 120 bp, Artificial Sequence
  ENSG00000198265_47 (sequence is synthesized)
tccagcaggacagctcagcccagagagttgatagcgccacccaagactgtcaaaccccctgaggatcaactgaagtcggagaacctcgaggtgtccagttccttcaactacagtgtgctg

SEQ ID NO: 726282 - DNA, 120 bp, Artificial Sequence
  ENSG00000198265_48 (sequence is synthesized)
cagcatcttggccagtttccaccccttatgcctaacaagcagatcgcggagtcggccaatagcagtagcccccagagctctgcggggggcaagcccgccatgtcctatgccagcgctctg

SEQ ID NO: 726283 - DNA, 120 bp, Artificial Sequence
  ENSG00000198265_49 (sequence is synthesized)
cgggcccctccaaagcccaggccccctcctgagcaggccaagaagagtagcgaccctctgtctctcttccaggaactgagcctagggagctcatctggcagcaatggcttttactcatat

SEQ ID NO: 726284 - DNA, 120 bp, Artificial Sequence
  ENSG00000198265_50 (sequence is synthesized)
tttaaataatcactttttttttccctcaagggagaatgttttaatttctgtttgtatcagtagaattaaggtagttggacttcatctatagatgcacagttccctttgttttaatattaa

SEQ ID NO: 726285 - DNA, 120 bp, Artificial Sequence
  ENSG00000198265_51 (sequence is synthesized)
atatgttctcacttaattgctttgctgctagacttgcaactaatttttttaaagtatattccattattttgcatttttgatgtgtcaaaactttgacagcttttatgtagaataaaaaaa

SEQ ID NO: 726286 - DNA, 120 bp, Artificial Sequence
  ENSG00000198265_52 (sequence is synthesized)
tttttaaatttgtgtattgttacatatgtttgcatcaagctagcagccaagaggttaattgtgcaactataaaaaaaaaaaaaaaaagaaaagtttgtctaaaatgtatttaaaaagaaa

SEQ ID NO: 726287 - DNA, 120 bp, Artificial Sequence
  ENSG00000198265_53 (sequence is synthesized)
aaaaaattgtaagtagcatttacatttattcaataatattaccacatgctgggtttctgtaccagaaatggccagttgatgtacaaatgtatgttatttttgcttaaattcatttaaatt

SEQ ID NO: 726288 - DNA, 120 bp, Artificial Sequence
  ENSG00000198265_54 (sequence is synthesized)
ttttttaaaataaaggggcagcatcttctaaataagttttatcagctttttttttttttttggtgacacgatgctgcattctaaaacttttatagttttagactatgtatgatgtgttgt

SEQ ID NO: 726289 - DNA, 120 bp, Artificial Sequence
  ENSG00000198265_55 (sequence is synthesized)
tgtaatctccatccaccataggatagagttaaaggcattctttgcaggcatattttgtatgccactgttttttgaaatgtgaaaaaaacgttggcatacttagttattttttggacaagc

SEQ ID NO: 726290 - DNA, 120 bp, Artificial Sequence
  ENSG00000198265_56 (sequence is synthesized)
tacacttcaagcttgtttttaatgttaatttgatagtgtgtgtttttttttttaaacaaatcaagaagctgaaaaatttttaggattgttggtgcttagtagacttgataactattttaa

SEQ ID NO: 726291 - DNA, 120 bp, Artificial Sequence
  ENSG00000198265_57 (sequence is synthesized)
aaaattctttttttctcactatgcatgtgtaaatgtttgtaacctggcttccctcttctccagtggtataaagaattgtgccgctttaaggtttgggtttttttctctccagtaaaaatt

SEQ ID NO: 726292 - DNA, 120 bp, Artificial Sequence
  ENSG00000198265_58 (sequence is synthesized)
ttggtaccttatttgatgtttacattaaaatgtgacattatacgtggcaattcaaatattttgctagctgtcttgtttgaggaacaccattaaagaagaaatataatgtttgtcaaaaat

SEQ ID NO: 726293 - DNA, 120 bp, Artificial Sequence
  ENSG00000198265_59 (sequence is synthesized)
gtatcaaaattcatcagaatctggggcagaaaactacccttgtttttcatgtctttcaattcttctaaaataccccttattgaacttgtacacaatataaaatttaaatagccatcttaa

SEQ ID NO: 726294 - DNA, 120 bp, Artificial Sequence
  ENSG00000198265_60 (sequence is synthesized)
atattctaccatctaaaaattgctttgaatgaattttggtaaaatccaaaggaagatgtttaccctcttgaaacttatggtcttgtcacacatttaaagcaatatatgtccttattttcc

SEQ ID NO: 726295 - DNA, 120 bp, Artificial Sequence
  ENSG00000198265_61 (sequence is synthesized)
tgaccttgtaatactacttttatatttcagaggtatctcgaaactacaatataaacttttaaaaaaaaataagatgaggctggggaacctttcgaatgaacccaatcttcctgatgatcc

SEQ ID NO: 726296 - DNA, 120 bp, Artificial Sequence
  ENSG00000198265_62 (sequence is synthesized)
attcaaaaacaggtttttggaagaccactttcgataggcaatcctataatcaaagtacatttttaaaatcaggttgtaaaatggcaaaggtaaagaaaaattactgacatttcttctatg

SEQ ID NO: 726297 - DNA, 120 bp, Artificial Sequence
  ENSG00000198265_63 (sequence is synthesized)
attggagtttagtttatgttggccagctacaaccccttttaatcctcagacagtttgggataaaagagtgcctttggttaatggttagcaagctccaggataagcgctgcgtgcctcttg

SEQ ID NO: 726298 - DNA, 120 bp, Artificial Sequence
  ENSG00000198265_64 (sequence is synthesized)
tattcagctctacctttctgctaagagtgcggttcatttgtgtgtggctttgcgttccaggctgtgggtctctgtgtaaggtggcagacatagacttgtaaactgcagacgtgttaatgg

SEQ ID NO: 726299 - DNA, 120 bp, Artificial Sequence
  ENSG00000198265_65 (sequence is synthesized)
ttagcataaatcacagctggaaaactgagccggcaagttacagcaccactctttctctgtatgatgtcagatcaccacatttagcaatgtcaaattttactcaacattctttagtaggaa

SEQ ID NO: 726300 - DNA, 120 bp, Artificial Sequence
  ENSG00000198265_66 (sequence is synthesized)
gaaaagaagaaaaagttttgccacgtagctatgtgcttttaagtctgtgacaaaactcaagacatatccgaatgaaaattagatctctctgatgtgaggatgttatggaaaataattttc

SEQ ID NO: 726301 - DNA, 120 bp, Artificial Sequence
  ENSG00000198265_67 (sequence is synthesized)
ccatcagtgattatccaccccccagcccccatatacaggactacaacgcaagctagataaatgttcaaaagcaatctgataatatgaagacagaattgtcaagtcagggctttcagttga

SEQ ID NO: 726302 - DNA, 120 bp, Artificial Sequence
  ENSG00000198265_68 (sequence is synthesized)
ccccttgtcatgaggttattgcctaattttctgttttctatacttgaatctttaaaaaatatcagtttttaaattatttatatttatatttagttaagggtcatggggtcgtgtatgcac

SEQ ID NO: 726303 - DNA, 120 bp, Artificial Sequence
  ENSG00000198265_69 (sequence is synthesized)
cccatcaccttatataaatatgttgatgatggaagctttggataaggaagctattaagttgtcatgacatccttgttctaagcagttatttctaaaaactaaaaataatagctacttatt

SEQ ID NO: 726304 - DNA, 120 bp, Artificial Sequence
  ENSG00000198265_70 (sequence is synthesized)
ggcccaccgctctgctgtgagtatatgagtacttctcattccttatttccatagccagtcaaggattctaacgctgcttccatctgatactcttcttagattctgcatcaaatgcttatt

SEQ ID NO: 726305 - DNA, 120 bp, Artificial Sequence
  ENSG00000198265_71 (sequence is synthesized)
ttgacttacaacaagcttactcttcctcagcattacataatgccatctttccaaccatgctttaaagaacctgctctttacgcatagtatcttataacattttgaacacgtcttgtgtaa

SEQ ID NO: 726306 - DNA, 120 bp, Artificial Sequence
  ENSG00000198265_72 (sequence is synthesized)
gaatcattgcaagtttccatcaaaatgaggcgtgtcttctgagtacagctgatgttctttgggtattacttgagtagtagtagcaagtacccataaatcagatttatgaaacataactta

SEQ ID NO: 726307 - DNA, 120 bp, Artificial Sequence
  ENSG00000198265_73 (sequence is synthesized)
tatgctaggttcaacccttatatatgcatatatatgtatagtatatgtatataaaatttttttccagaaaacttgatgatagctctcagataataccaagtattaccagcttccatttct

SEQ ID NO: 726308 - DNA, 120 bp, Artificial Sequence
  ENSG00000198265_74 (sequence is synthesized)
tcagagcagatttttttctaagtgaggttaattgttcacataatgtctttttacatctttgtcctttgtatcactctgaagttttctttttcttgccagaatatttgtttcactttttaa

SEQ ID NO: 726309 - DNA, 120 bp, Artificial Sequence
  ENSG00000198265_75 (sequence is synthesized)
tttcagtgctacttgagattttctttttttttaacctgaaagacgatattttggatgatagagtttgtaaagtgagccttcatgctgaaaaaattcttttcatgatctaaaaatggtctt

SEQ ID NO: 726310 - DNA, 120 bp, Artificial Sequence
  ENSG00000198265_76 (sequence is synthesized)
ttgttacgatttgaagaacctcattccgtgtaacatggatattttcttgtgtgtctttaaagggggttttggttgtcatttgggcatatgctttgccaaattgttatagcagaactttgt

SEQ ID NO: 726311 - DNA, 120 bp, Artificial Sequence
  ENSG00000198265_77 (sequence is synthesized)
ttttgattaatcagtagttaattattgaccatttaaactaacatgaccttaattttcctttcctcacacagatgtgctttctatccaggtcattttttacacgtgaaataacaaactgct

SEQ ID NO: 726312 - DNA, 120 bp, Artificial Sequence
  ENSG00000198265_78 (sequence is synthesized)
ttgtgtagattttttttttttttaaatcatcagattttagaataagtttaggtttaatgtaaacatcaactggtcttttcagttcagagaactgcagaataagtaaaataagcagaattc

SEQ ID NO: 726313 - DNA, 120 bp, Artificial Sequence
  ENSG00000198265_79 (sequence is synthesized)
ccactgaataagcattacctaattaaacatagcaacatctaagaccaatttatgaaaatactctccttttttatggaggcattggagctgctgagaaagctaatgaatttcccaactttg

SEQ ID NO: 726314 - DNA, 120 bp, Artificial Sequence
  ENSG00000198265_80 (sequence is synthesized)
ggataattaatatatagtattgtgttgctctagtgtagttgattttatgtgtttaatatttttcatgtcaagagcaaagctgcagacgtaaaagatgtttctctagcccccttagctaga

SEQ ID NO: 726315 - DNA, 120 bp, Artificial Sequence
  ENSG00000198265_81 (sequence is synthesized)
gcgagccacctttgttaagagtcagggtgtgaagaacaatttcaagataaattttagtatttcaaccattgttattaagaaaattagacttactgaaatactcatttaaaaacagacacc

SEQ ID NO: 726316 - DNA, 120 bp, Artificial Sequence
  ENSG00000198265_82 (sequence is synthesized)
ttctatagcattgttttatagtggagttatttttaaaaagggaatcccagaaagaatctataaaaatacaaggttaaaactttaaatgtattgaaagatacaaattggtgctttcaaatg

SEQ ID NO: 726317 - DNA, 120 bp, Artificial Sequence
  ENSG00000198265_83 (sequence is synthesized)
tcatgtaagctagccattgtgtttttttttttccctccagctcctcaatggtagtaatttgtcttttatgatttaccgtacattatttcttgctcaccatccccttaacatatgaaaatc

SEQ ID NO: 726318 - DNA, 120 bp, Artificial Sequence
  ENSG00000198265_84 (sequence is synthesized)
cttaatttctactgccgcgctatatgtcttcctgaatctcaaggtataaatgtcttaatggatctgatttgtctccactctttgccatctgatccacattcaaaccgcctagaaattaga

SEQ ID NO: 726319 - DNA, 120 bp, Artificial Sequence
  ENSG00000198265_85 (sequence is synthesized)
aagaataggtaatgttctatctacgatttcttgttcaaaatatcacgtagtggtgccaatcacttacaaagacaccatctccatcttgaaagagtaactggcatgttagtcttgaaaatg

SEQ ID NO: 726320 - DNA, 120 bp, Artificial Sequence
  ENSG00000198265_86 (sequence is synthesized)
ctcattatgatatgctcctcacatttcccatctgcttgaggatggacatttattagctgagactttaaagctgctaaattcacactttctactttcatacctttttaatcagtaatgtca

SEQ ID NO: 726321 - DNA, 120 bp, Artificial Sequence
  ENSG00000198265_87 (sequence is synthesized)
agaccattgttgcaaggagtgaatcttactaaacacatcctgttattactttaaactagaatatgagattcaagagatttaaaaacaattttaatgtaacgtttaaaatttttgaaccaa

SEQ ID NO: 726322 - DNA, 120 bp, Artificial Sequence
  ENSG00000198265_88 (sequence is synthesized)
ttgagaatgtctactttggagtgaagtttaaggaaacagtcaccagagtttctaaaaattttttggagggaggtacctaatagaagaatctagacttagaaatgtgaactgtggttaaat

SEQ ID NO: 726323 - DNA, 120 bp, Artificial Sequence
  ENSG00000198265_89 (sequence is synthesized)
accaaacccagttccgcagtggtcgtctaaagcgtctaaaactggagtgttaagaaaacccagagacattcatatagtttcagttatcagagtattagaccagactttatttgcaatttg

SEQ ID NO: 726324 - DNA, 120 bp, Artificial Sequence
  ENSG00000198265_90 (sequence is synthesized)
ttcaacagagagattttattttgatacagatattaagcataaagcatagtaagttttatataattctatgagttcattaaacaatattatgaaattttcattatgttcgtggggagtctt

SEQ ID NO: 726325 - DNA, 120 bp, Artificial Sequence
  ENSG00000198265_91 (sequence is synthesized)
tttaactgtttctacctcatatatgaggtctcttctgtattttactttgcatactagcatgtgattgcctgccttagaactatgtagaggaggggaaatcgatattaccttttaagaaat

SEQ ID NO: 726326 - DNA, 120 bp, Artificial Sequence
  ENSG00000198265_92 (sequence is synthesized)
ttttgattttatgaagtgttttcattaatacttttttaatgtttgagaagtaaaggggaaagggtggcaaattacataggttgcaacacagagtagaagtcacatagtactatttacaga

SEQ ID NO: 726327 - DNA, 120 bp, Artificial Sequence
  ENSG00000198265_93 (sequence is synthesized)
tctgtcctgttttaagatttgagaattgtgaacaggatggagcaatggttctcaaacttcagccagtatcagaattgcctcgaggtcttgttaaaattcagatagctggacccaccccca

SEQ ID NO: 726328 - DNA, 120 bp, Artificial Sequence
  ENSG00000198265_94 (sequence is synthesized)
gcatttctgattttggtctggagcctgatgatttgcatttccaacaagtttccaggcgatgctgatgctgccagtccaggaaccacactttgaaaatcactgggtctgattctcgcagtt

SEQ ID NO: 726329 - DNA, 120 bp, Artificial Sequence
  ENSG00000198265_95 (sequence is synthesized)
tgaaagtctcagagaccttcagagtctgaacgtcttttcaaccatgtatttatttactcagtgtaaaaaactgatctctggagacatttttataaatctggtgccatgactggaacattt

SEQ ID NO: 726330 - DNA, 120 bp, Artificial Sequence
  ENSG00000198265_96 (sequence is synthesized)
gtggagaaaggtctccatggagcgacaggccctttggattggccaccacccctcctcactctcacccctgctggggtctgcactgctcttccgcagtagggtgaaggagctctttggttt

SEQ ID NO: 726331 - DNA, 120 bp, Artificial Sequence
  ENSG00000198265_97 (sequence is synthesized)
tagggtgagtttgcttttgtgtacgctgctgcctggacatcagtctggaagctgtgcatttgtttggtgtgcttagggtcaatcttgatccacatgcatggaagtgagaatcctggaaag

SEQ ID NO: 726332 - DNA, 120 bp, Artificial Sequence
  ENSG00000198265_98 (sequence is synthesized)
aagccatcagaatgccatgagagtgcacctagcatgtatcgaggcactaagtgcaggagtccctgtcctaagatggcagtgacatggagcatcgaaaaccacagataatccttaaataat

SEQ ID NO: 726333 - DNA, 120 bp, Artificial Sequence
  ENSG00000198265_99 (sequence is synthesized)
gacatggagcatcgaaaaccacagataatccttaaataataaaataatagttttgtttttttttcttcggggcagagtctcgctctgttgccctggctggagtacagtggcatgatctcg

SEQ ID NO: 726334 - DNA, 120 bp, Artificial Sequence
  ENSG00000198265_100 (sequence is synthesized)
attacaggcatgagccactgcgcctggcaaatgttttagtttttatggttattattattttttttttttgtgggggagggtggtgagggcaaaggatttgtttttcaaattatgtgtttc

SEQ ID NO: 726335 - DNA, 120 bp, Artificial Sequence
  ENSG00000198265_101 (sequence is synthesized)
tggtgagggcaaaggatttgtttttcaaattatgtgtttctcaggttaacaaagttattttagattctctgccatgccagcaggtgttagagagagcctgaagtgttacatatggcagaa

SEQ ID NO: 726336 - DNA, 120 bp, Artificial Sequence
  ENSG00000198265_102 (sequence is synthesized)
aataaatgtctctgattactttgctacctttaaaaaaatctatatgtgtttgcaaaacagcctagggggatctaccacctacacagcatgaattattcataagtcataggtgcacatgta

SEQ ID NO: 726337 - DNA, 120 bp, Artificial Sequence
  ENSG00000198265_103 (sequence is synthesized)
tgagcaagttatttttgagaaagaaactgcctataatataataaacctgtcaggtctttgggtattgtttaatttgtgtgttgttgctgttttatctggactgcatcttggggggtactg

SEQ ID NO: 726338 - DNA, 120 bp, Artificial Sequence
  ENSG00000198265_104 (sequence is synthesized)
ggctctgcttctggtttttagtttgcctttgaatttactgagctactagaaagacaaaaaaaagctatttttatggtaatagaatacagaatgacttaggtgtaaaagtacacgtgaaga

SEQ ID NO: 726339 - DNA, 120 bp, Artificial Sequence
  ENSG00000198265_105 (sequence is synthesized)
ccatcgtagaatatacagctttggagttttcttaagacacagtccttcctactgaaaaggcttgctcacctttggagaggattgtttatattttcagcctgggttcctttatgcagtccc

SEQ ID NO: 726340 - DNA, 120 bp, Artificial Sequence
  ENSG00000198265_106 (sequence is synthesized)
aacttagaggggagcttcggtttatttacactttgctttgcacgataacttgtatgcgaagacctctttatatctttcagtaggtcagagggctctttgtcctggttgaagtcccaaagt

SEQ ID NO: 726341 - DNA, 120 bp, Artificial Sequence
  ENSG00000198265_107 (sequence is synthesized)
gtcagtgcagctgagaatgtttctcagcctccccctttacagaggaagggtcctggattttcataaatccagaccatgcctgcttcctataaatccatgtatatgacattgtactgtatc

SEQ ID NO: 726342 - DNA, 120 bp, Artificial Sequence
  ENSG00000198265_108 (sequence is synthesized)
tgatttctgtgccagtcatctgacctgattctttaaaccccataaaggtactggctatatgtagtagttgtatcctaggtaaatatggtgattaaaatacttctcttctaaattataaag

SEQ ID NO: 726343 - DNA, 120 bp, Artificial Sequence
  ENSG00000198265_109 (sequence is synthesized)
ataatgagttttgcattttattaaagggtcctgttattagtgacacaggatttttttttaatgcttcatacatatagttcttatctaaacttgttcagctaacttcatagatcagttact

SEQ ID NO: 726344 - DNA, 120 bp, Artificial Sequence
  ENSG00000198265_110 (sequence is synthesized)
tagcaaattcatactgagtcttattttgggaagtcttcctgagggaagctgtacaaaactgaggtggtcaggttcatctcttcaaagtaccagttatacagccatctaaataggcataac

SEQ ID NO: 726345 - DNA, 120 bp, Artificial Sequence
  ENSG00000198265_111 (sequence is synthesized)
ttatggcaaaattataacaattttttttctttgcagtaaatgatacctcatctaagaggctctaatacctaaagagtttatccttaaaagtaaaagtgactttgtaccataaaataaccc

SEQ ID NO: 726346 - DNA, 120 bp, Artificial Sequence
  ENSG00000198265_112 (sequence is synthesized)
caaagccactctctagggtttttattttcttctttctttgtctttatcttttctaacttagttttggaattacgttagctactttggttccatagaacaagttttcaacttggggtctac

SEQ ID NO: 726347 - DNA, 120 bp, Artificial Sequence
  ENSG00000198265_113 (sequence is synthesized)
agttcctacagtgtgctcattgtctcagtgaagttcttttgttttcaaagattcatggtaacaaaatgtattttactgctacaactaaaatgtatttataataaaatgcctttttaataa

SEQ ID NO: 726348 - DNA, 120 bp, Artificial Sequence
  ENSG00000198265_114 (sequence is synthesized)
gactcaatctgtctagtaagcattatgtattaaaatttggaaaaccattgtggcatcagccagaaggcgaggctgtgaaggtggggcagtgggactgccagccttccctcgtaaccccca

SEQ ID NO: 726349 - DNA, 120 bp, Artificial Sequence
  ENSG00000198265_115 (sequence is synthesized)
taacccacagtcccatcgtgggaatgctgcttctccacatgtctcctctgtgtgccagggcttatcttctgtccctagtggacagaactggtatcttattagctgtctctggacaacaaa

SEQ ID NO: 726350 - DNA, 120 bp, Artificial Sequence
  ENSG00000198265_116 (sequence is synthesized)
tgggaagatgattgggaaattttagtttttaactacttctggctactagaaaatgaaatgctatcattaaaaatgagatatcctcaagccttatttatttattatttgtttatttgagac

SEQ ID NO: 726351 - DNA, 120 bp, Artificial Sequence
  ENSG00000198265_117 (sequence is synthesized)
gcagccggcgccccggattacctgccccggagtcacagtccgcagcccggacgctcccagggtggctccgcggagcctggagccacattcctaggggaggggtccccacctagagggtcg

SEQ ID NO: 726352 - DNA, 120 bp, Artificial Sequence
  ENSG00000198265_118 (sequence is synthesized)
gtgctcttctttctctagctagtctaagtgacttattttccagataaggaaatataggcctgaagaaattaaatgagttgctcaaggtcacacagctcagtagtagcaacattaaaccaa

SEQ ID NO: 726353 - DNA, 120 bp, Artificial Sequence
  ENSG00000198265_119 (sequence is synthesized)
gcttgtttttaatctttggaggcttatctcaagactcttggtctagtgctggtcatgctacattttattgaactagtgtggaccaaaagaccatatgctgggaatattggatacaaatgc

SEQ ID NO: 726354 - DNA, 120 bp, Artificial Sequence
  ENSG00000198265_120 (sequence is synthesized)
ttttcgccaaaccatagttttcgactttggattggaaccagtactcatgcaaagagtaatgattgatgcagcttctacagaagttttcttttttaggtatatgtatgtttcactcaatag

SEQ ID NO: 726355 - DNA, 120 bp, Artificial Sequence
  ENSG00000198265_121 (sequence is synthesized)
aaaagtaatacgcactacatatagagtgagccaacccagtgctcagagtttatgttactatggatttcatcttgtgctggtattgtgctactttttttcccctgatctcgaatacctgat

SEQ ID NO: 726356 - DNA, 120 bp, Artificial Sequence
  ENSG00000198265_122 (sequence is synthesized)
gatgcagcttctacagaaggtaatatttagacttttttcccccgatacaatgtgttaaaaagcaacattcaaagatatgtattggcccctgaatatattccatggataggaagagaatag

SEQ ID NO: 726357 - DNA, 120 bp, Artificial Sequence
  ENSG00000198265_123 (sequence is synthesized)
gatagcccagtataaagaaatcagcaaagatgggattttgccatgttgcccagggaagatctggaactcctgggctcaagtgatccacccgctctggcctcccaaggtgctgggattaca

SEQ ID NO: 726358 - DNA, 120 bp, Artificial Sequence
  ENSG00000198265_124 (sequence is synthesized)
cctggcccagtttgtgtgatctatctggagagctgtttggcagtttgtatccaggaccttaagtttgaatcttttggtgtggaaattccacatatgggggatcataagcaataatcagag

SEQ ID NO: 726359 - DNA, 120 bp, Artificial Sequence
  ENSG00000198265_125 (sequence is synthesized)
tcaaagatgtctggacacatgtcttgcaaagagtagtgaagaataagttaattatgatatagctatatgattgaatgttatacaacttgaaattatgttcttgaagaatttttaatgcag

SEQ ID NO: 726360 - DNA, 120 bp, Artificial Sequence
  ENSG00000198265_126 (sequence is synthesized)
gtagacatggtatgtttaaaaatgagactcgaattattgaattgaacaatgtttaaggtttgatttttttttttggctaatttcaaaaatgatgataatgtttgaaaagcccaccttact

SEQ ID NO: 726361 - DNA, 120 bp, Artificial Sequence
  ENSG00000198265_127 (sequence is synthesized)
aaacttcgcagaagtgccaaaggtttattgggatgcaagttactttaagtgttggaattgaaggttacatttggcggcaagcggtttctgcaaggagcttgtttagtgtggacatgggaa

SEQ ID NO: 726362 - DNA, 120 bp, Artificial Sequence
  ENSG00000198270_0 (sequence is synthesized)
gcatggggacgctatagcaattcgtttgctgtccttcctctccttcgaagatgacaaggcctaccatcgtttcttcctgcctttgggccgtcaggcagttggttgggacccgctccaacc

SEQ ID NO: 726363 - DNA, 120 bp, Artificial Sequence
  ENSG00000198270_1 (sequence is synthesized)
ctcggttcttcctgcaatacagtggatacaatttgtcatggctactctgagataagaccacttttttatctgagcttctgtgacctgctcctgggactttgctggctcacggagacactt

SEQ ID NO: 726364 - DNA, 120 bp, Artificial Sequence
  ENSG00000198270_2 (sequence is synthesized)
ctctatggagcttcagtagcaaataaggacatcatctgctataacctacaagcagttggacagatattctacatttcctcatttctctacaccgtcaattacatctggtatttgtacaca

SEQ ID NO: 726365 - DNA, 120 bp, Artificial Sequence
  ENSG00000198270_3 (sequence is synthesized)
gagctgaggatgaaacacacccagagtggacagagcacatctccactggtgatagattatacttgtcgagtttgtcaaatggcctttgttttctcaagcctgatacctctgctattgatg

SEQ ID NO: 726366 - DNA, 120 bp, Artificial Sequence
  ENSG00000198270_4 (sequence is synthesized)
acacctgtattctgtctgggaaatactagtgaatgtttccaaaacttcagtcagagccacaagtgtatcttgatgcactcaccaccatcagccatggctgaacttccaccttctgccaac

SEQ ID NO: 726367 - DNA, 120 bp, Artificial Sequence
  ENSG00000198270_5 (sequence is synthesized)
acatctgtctgtagcacactttatttttatggtatcgccattttcctgggcagctttgtactcagcctccttaccattatggtcttacttatccgagcccagacattgtataagaagttt

SEQ ID NO: 726368 - DNA, 120 bp, Artificial Sequence
  ENSG00000198270_6 (sequence is synthesized)
tcaactggctttctggggagtgaacagtgggcagtgattcacattgtggaccaacgggtgcgcttctacccagtggccttcttttgctgctggggcccagctgtcattctaatgatcata

SEQ ID NO: 726369 - DNA, 120 bp, Artificial Sequence
  ENSG00000198270_7 (sequence is synthesized)
aagctgactaagccacaggacaccaagcttcacatggccctttatgttctccaggctctaacggcaacatctcagggtctactcaactgtggagtatatggctggacgcagcacaaattc

SEQ ID NO: 726370 - DNA, 120 bp, Artificial Sequence
  ENSG00000198270_8 (sequence is synthesized)
caccaactaaagcaggaggctcggcgtgatgcagatacccagacaccattattatgctcacagaagagattctatagcaggggcttaaattcactggaatccaccctgacttttcctgcc

SEQ ID NO: 726371 - DNA, 120 bp, Artificial Sequence
  ENSG00000198270_9 (sequence is synthesized)
agtacttctaccattttttgaaactacaatactggaacatccaggaactggagttattctacgctaatggattggaaagaatgttgggaaaggacatcttaaatcttttctaactatgcc

SEQ ID NO: 726372 - DNA, 120 bp, Artificial Sequence
  ENSG00000198270_10 (sequence is synthesized)
ctaaactgcagaactcaaaggaaatatagtgccattgttagtagtcattctagatgaattgggagtatctctccagttattcccagattcactagtgatccttaaagtctctattcaggg

SEQ ID NO: 726373 - DNA, 120 bp, Artificial Sequence
  ENSG00000198270_11 (sequence is synthesized)
agaggaagacactttccatctcagagatagactcgtgttaccttgatggatattggatttgtctaagtctcttctagaaaaaataaattctagattattatttatatgtgtcatttcaaa

SEQ ID NO: 726374 - DNA, 120 bp, Artificial Sequence
  ENSG00000198270_12 (sequence is synthesized)
ggacatcatctgctataacctacaagcagttggacagttctggaggctggaaggtccaagattaagataatcagcagatctggtgtctggggagacggggtttcgccatgtttgccaggc

SEQ ID NO: 726375 - DNA, 120 bp, Artificial Sequence
  ENSG00000198270_13 (sequence is synthesized)
gtgtgagccactgcacctggcctccttaaatgtatctttatggcctaattttcacctttgcacccagttgatattctacatttcctcatttctctacaccgtcaattacatctggtattt

SEQ ID NO: 726376 - DNA, 120 bp, Artificial Sequence
  ENSG00000198270_14 (sequence is synthesized)
gacccaggcgggcagtggctccgcggcttccctgagctttttggccaggcttggcggtcagtgtggcaagcagggccctcttaggcccgatctgaggtgagcgcctcccctgggagacgc

SEQ ID NO: 726377 - DNA, 120 bp, Artificial Sequence
  ENSG00000198270_15 (sequence is synthesized)
caggctcctgggatccgcccagccaaggcccaccctccaggaaccccagacgcaattctaatcattctgttccgcaggtagtcactcggtccctggcttgtgccagactctggctttgcc

SEQ ID NO: 726378 - DNA, 120 bp, Artificial Sequence
  ENSG00000198270_16 (sequence is synthesized)
tgcggggctacggaataagcagaaacaagaccgttgtgtgctgaaggcacgcactttgttgggggaggaggcggcataggaataatgatctaaacagtgcagtgtaattgctgtaaaata

SEQ ID NO: 726379 - DNA, 64 bp, Artificial Sequence
  ENSG00000198270_17 (sequence is synthesized)
agttggggtgagccgagatttcgccattgcacttcagcctaggtgacagagcgagactcagtct

SEQ ID NO: 726380 - DNA, 120 bp, Artificial Sequence
  ENSG00000198270_18 (sequence is synthesized)
cattgcacttcagcctaggtgacagagcgagactcagtctcaaaaagaaaaaaaaagaccgtattttcttattgtaaagagacagagattcagccatccctgctcaggagcatcagagga

SEQ ID NO: 726381 - DNA, 120 bp, Artificial Sequence
  ENSG00000198270_19 (sequence is synthesized)
agttgtagacaggaggtgacttttgagctggaccttgaaataagagggggcgtgcatgaggcaaagagaaacagggcatttctaacaatgggaaaattatgcacaggcatgttggggaac

SEQ ID NO: 726382 - DNA, 120 bp, Artificial Sequence
  ENSG00000198270_20 (sequence is synthesized)
tggttgagatgaatctatgtaaaggcgaactggcgcaacagctgctgccgctcttttttattttgattgattattactgagcttccatggggcggattcgaaagggtctcaccaagctaa

SEQ ID NO: 726383 - DNA, 120 bp, Artificial Sequence
  ENSG00000198270_21 (sequence is synthesized)
agggtttggagtcaccagaagttttaactaggagagtgaggttagatttgtgtgtagaaacagcacccaggtcagcctgggcaacgtaatgaaacctcgtctctacaataagtagaaaaa

SEQ ID NO: 726384 - DNA, 120 bp, Artificial Sequence
  ENSG00000198270_22 (sequence is synthesized)
tagccatgtgtggtagtgcatgcctgtggtcccaggtacttgggaggctgaggcagcaggatcacttggacctgaggggtcgaggctgcagtcagccctgattgctgccactgcactcca

SEQ ID NO: 726385 - DNA, 120 bp, Artificial Sequence
  ENSG00000198270_23 (sequence is synthesized)
gtctgggcaacagagaagactgtctcaaaacaaaaacaacattactcaggaatgaaggaaatggattggaattgagaagacgggactaaagccaattaatggggtatggcaatagtctag

SEQ ID NO: 726386 - DNA, 120 bp, Artificial Sequence
  ENSG00000198270_24 (sequence is synthesized)
ttggaagaggttaaggtcatgcagtaggacataatagggctgaagaagtatggatggaattgacaaacttttaaagggtagaattcacaagatttgatgaacaaatgcatgtaagagaac

SEQ ID NO: 726387 - DNA, 120 bp, Artificial Sequence
  ENSG00000198270_25 (sequence is synthesized)
atatacaatgcattgtaagggacttactgctataattaaccattgtatgtttccaaaatgtatgtgtataaatagtcaacagtgataacaggatccaatcatggacaaccagtttgattg

SEQ ID NO: 726388 - DNA, 120 bp, Artificial Sequence
  ENSG00000198270_26 (sequence is synthesized)
gatataaattttgaaagaaagtgtgtgtgtgtttgtgtgtgtgtatgtgtgaatgtgtctggggaagttaagaaaaattttgagtttgccctattgatggcagccagctgcagcagggag

SEQ ID NO: 726389 - DNA, 120 bp, Artificial Sequence
  ENSG00000198270_27 (sequence is synthesized)
gtgtgactggggctgcacactccatggagcctgtgggagccccgccccttctgagttgaggcaggagcccctggtgccattgtggctgccctcccaggtgcaggacctgggcatctctgc

SEQ ID NO: 726390 - DNA, 120 bp, Artificial Sequence
  ENSG00000198270_28 (sequence is synthesized)
agcctgcacccttgggggaccagcaagacaccctactgcaatccctgcaggctcaggagtgtctgttcccaccgcctggactctctctactcccggggcctgctccaatctcagagcggg

SEQ ID NO: 726391 - DNA, 120 bp, Artificial Sequence
  ENSG00000198270_29 (sequence is synthesized)
cttggggccaagaatggcaatgggaggcagattgattccagggtagaagtgggtgagtccccagtaagaccccaccttcaggtcagggagggcctgaagacaggggtccaggctgccagt

SEQ ID NO: 726392 - DNA, 120 bp, Artificial Sequence
  ENSG00000198270_30 (sequence is synthesized)
cctgcagactggagtagggactcgtggtgcatcttctggcctgcccatggaccaatcggcatgtacttcctcccctcggaggtccataaaaaccctgggttcagccagagtagggcagag

SEQ ID NO: 726393 - DNA, 120 bp, Artificial Sequence
  ENSG00000198270_31 (sequence is synthesized)
gactgccagaggaccaagagggcagagacctatgggtcaacaagcctaagagaggagctaccctctctgctgatagttggagatgatggaacagccagttgcaaaaaggacctaccctcc

SEQ ID NO: 726394 - DNA, 120 bp, Artificial Sequence
  ENSG00000198270_32 (sequence is synthesized)
ctgctgacagctgcagagacaacctgtgggcagagaagagccaccctctccagggcctcctctcttctgagagctgcagacattaggacgatcagttgcagagaggagccatcctctcca

SEQ ID NO: 726395 - DNA, 120 bp, Artificial Sequence
  ENSG00000198270_33 (sequence is synthesized)
gggcctcctctctactgagaactgaatacctgatggacaacctgcctacagagaggaaatacccactggaggtctctgagctgttgtaacactcaataaagttcatctttgtcttgttca

SEQ ID NO: 726396 - DNA, 120 bp, Artificial Sequence
  ENSG00000198270_34 (sequence is synthesized)
tctccagaggtgagtgatttctctttgtgttggatttgaactttttattgacctagtctctgaaacaaataacagatgttacctgtaagtggtgaaataattctatgaattacttttaaa

SEQ ID NO: 726397 - DNA, 120 bp, Artificial Sequence
  ENSG00000198270_35 (sequence is synthesized)
tttgtcatgatgatacaatgagatatttttggcatggtcagtagggctcccttttcttctaggtaattattttagctataactttgaattctgagagattaactattttttttttttttt

SEQ ID NO: 726398 - DNA, 120 bp, Artificial Sequence
  ENSG00000198270_36 (sequence is synthesized)
gtacagagcaggattcagtataggaggagcccagctgggataggggtggagccacctgttcactgcttcaggattcagaacctgactaggaaggatcggctgctcaagggtagctgggac

SEQ ID NO: 726399 - DNA, 120 bp, Artificial Sequence
  ENSG00000198270_37 (sequence is synthesized)
tgaagtccctatgacctttccactagacgctagcattctggaggacagttgggacttgttttctctcccaggtttcttttttcttaaactcctggcctcaagtgatcgtcttacctcagc

SEQ ID NO: 726400 - DNA, 120 bp, Artificial Sequence
  ENSG00000198270_38 (sequence is synthesized)
gattacaggttcttcctgcaatacagtggatacaatttgtcatggctactctgagtgttataggttcaagttcacttattgcctatgctgtattccataatatacagaaatctccagaga

SEQ ID NO: 726401 - DNA, 120 bp, Artificial Sequence
  ENSG00000198270_39 (sequence is synthesized)
actagacgctagcattctggaggacagttgggacttggtaaggtcagaagctctccctgtcttcctttgtattttccctttcttctttcctgttctgcatttttcactcacaatctcttt

SEQ ID NO: 726402 - DNA, 120 bp, Artificial Sequence
  ENSG00000198270_40 (sequence is synthesized)
tcatactactaacttttcttcagtttctctgttttactagtctatctttcctctttctacctatcagtgaactctagtatttgtctcttctgttacctattctttccacacatctctgta

SEQ ID NO: 726403 - DNA, 120 bp, Artificial Sequence
  ENSG00000198270_41 (sequence is synthesized)
tggggcagagaggcacttcttgtggtcctagaactaagaaagtagctaggagatcttgacaatataattactgcctcagacttttgcacttccccaaatcaaatgataagagagagaaaa

SEQ ID NO: 726404 - DNA, 120 bp, Artificial Sequence
  ENSG00000198270_42 (sequence is synthesized)
gagcttgtatttattaggtgaaaattatgctcactctacaactagtataggcttcatcaatcccctatggccagaaaactcatatgtgccaaatatatcctttacatagttaggatgaca

SEQ ID NO: 726405 - DNA, 120 bp, Artificial Sequence
  ENSG00000198270_43 (sequence is synthesized)
ctctgaaacatagaacatatgctttgatttaattttccaaataataaaataattttcttttttaaattctacatttggccataaatttgcatttatgctatgtctaactggggctaaagt

SEQ ID NO: 726406 - DNA, 120 bp, Artificial Sequence
  ENSG00000198270_44 (sequence is synthesized)
gctaagtggctcatgaagttttcagatactcatttgatatcatcaggatgatatacaattagaataattagccaggggatagtaagttacataactgcctcatacaaaagcagtaaatga

SEQ ID NO: 726407 - DNA, 120 bp, Artificial Sequence
  ENSG00000198270_45 (sequence is synthesized)
gcaaatatgcctttgtatttcccatatctatttttcagtatcattttctcctctttttatatttcagttcaagaattacaaggtatctacctgcagatcaaatgtgtcccactagcacct

SEQ ID NO: 726408 - DNA, 120 bp, Artificial Sequence
  ENSG00000198270_46 (sequence is synthesized)
ccactagcacctgtgaactagatacagttatggggaatttcctttggcaattcaaacataagttatagagatggcttggtttgcctgggcacaatggctcatacctgtaatcccagcact

SEQ ID NO: 726409 - DNA, 83 bp, Artificial Sequence
  ENSG00000198270_47 (sequence is synthesized)
caggaggcacacagtaagctgagatcgtgcccctccagcctgggcaacagaggatactctgtctcaaaacacacacacacaca

SEQ ID NO: 726410 - DNA, 120 bp, Artificial Sequence
  ENSG00000198270_48 (sequence is synthesized)
atggctcagttcaaatcaacaggttgtaaagagtacacaataactagttcatattaaaatgggtttgatggtttacgtttggaactgactaacaagagagacaggtcccaaatcctggca

SEQ ID NO: 726411 - DNA, 120 bp, Artificial Sequence
  ENSG00000198270_49 (sequence is synthesized)
ccctgaggattcctgattgcttctttagaatagcccaggtttcagtgtatattcagaattagcattctagattctttaaaaatcagcagatggcggccgggcatggtggctcatgcctgt

SEQ ID NO: 726412 - DNA, 120 bp, Artificial Sequence
  ENSG00000198270_50 (sequence is synthesized)
agagcaagactccatctctaaaaaaataaataaatcaacagatggtgaactgattcttttagacgttaagttttctcaaactcaagtctccttttgatgcttatgtagggaaaagagact

SEQ ID NO: 726413 - DNA, 120 bp, Artificial Sequence
  ENSG00000198270_51 (sequence is synthesized)
atgtacatggctgaacttgattaagtaatgaggttattaatttagagagtagatctggattagggaaaagattcagatttgttaccaagagtgttatctaatttaatttttgcaaaaaaa

SEQ ID NO: 726414 - DNA, 120 bp, Artificial Sequence
  ENSG00000198270_52 (sequence is synthesized)
cacattggacttttgaactgatttatatttgtttcatgagctaaaccttattcagacagctgacaatagggaaaaagcaatttgttttccatctaaaggcaagaagtgactttctttctt

SEQ ID NO: 726415 - DNA, 75 bp, Artificial Sequence
  ENSG00000198270_53 (sequence is synthesized)
tcctgagtagctggaattaaaggcactttcaccatgctggtcaggctgtcttgaactcctgacctcgtgatctgc

SEQ ID NO: 726416 - DNA, 120 bp, Artificial Sequence
  ENSG00000198270_54 (sequence is synthesized)
ggattataggcgtgagccaccgcaccgggtgcaaagtgactttctaaaacttctgttgcttagagttgagaatttaagctcagccatggtgctgaagtgttaagcatagaacactttcta

SEQ ID NO: 726417 - DNA, 120 bp, Artificial Sequence
  ENSG00000198270_55 (sequence is synthesized)
taagcatagaacactttctaacaaaatctctaataaagtgttttaagaggaactagttagagcttacttttaacttcctgggtaaactgtgattagcctcagtggggggaaatgcccaga

SEQ ID NO: 726418 - DNA, 120 bp, Artificial Sequence
  ENSG00000198270_56 (sequence is synthesized)
ggttgatgtaaggttcatgtgttaaacgtgatacacaagtttggctagttacctgtccatttccctagcctagtaaaagttcactctgaaggtaattttctcttaaaaaaaagcctgatc

SEQ ID NO: 726419 - DNA, 120 bp, Artificial Sequence
  ENSG00000198270_57 (sequence is synthesized)
tcagaaagtaaagacaagagaatggggtcgttcctgttgtgagattctaagagaataatctttttaaaatgataggaggatagacctggggcattttactaagctttaagcaaactgctc

SEQ ID NO: 726420 - DNA, 120 bp, Artificial Sequence
  ENSG00000198270_58 (sequence is synthesized)
ctcaaggtaaaattttttctttacttcttagcgaggtgtagactctcattattctggtgttcaggtgggaacaaataggacagtgccctttatttccattgtcagtcctaagtcctcaca

SEQ ID NO: 726421 - DNA, 120 bp, Artificial Sequence
  ENSG00000198271_0 (sequence is synthesized)
caaacttgagaacctcattcttctagaaatccacccagaacctccaccctctgacaccatggtcagctcctgttgtggctctgtcagctctgagcagagctgtggcctggagaactgctg

SEQ ID NO: 726422 - DNA, 120 bp, Artificial Sequence
  ENSG00000198271_1 (sequence is synthesized)
ccgccccagctgctgccagaccacctgctgcaggaccacctgctgccgccccagctgctgcaagccccagtgctgccagtctgtgtgctaccagcccacctgctgccaccctagctgctg

SEQ ID NO: 726423 - DNA, 120 bp, Artificial Sequence
  ENSG00000198271_2 (sequence is synthesized)
catctccagctgctgccgcccctattgctgtgaatccagctgctgccgcccctgctgctgccagaccacctgctgcaggaccacctgctgcaggaccacctgctgctgccccagctgctg

SEQ ID NO: 726424 - DNA, 120 bp, Artificial Sequence
  ENSG00000198271_3 (sequence is synthesized)
gtcccagctgctgcatctccagctgctgccacccctcttgctgtgaatccagctgctgccgcccctgctgctgcgtgcgtccagtctgtggccgagtctcctgccacaccacttgctatc

SEQ ID NO: 726425 - DNA, 120 bp, Artificial Sequence
  ENSG00000198271_4 (sequence is synthesized)
gcccaacctgtgtcatctccacctgcccccgccccttgtgctgtgcctcctcttgctgctaatgtctccttgtgatatttgtcatactatgaatgtcttcattagtcatttaaaatgcac

SEQ ID NO: 726426 - DNA, 120 bp, Artificial Sequence
  ENSG00000198271_5 (sequence is synthesized)
tgtagccagccagtcactggaaaaatgaacacttccctgccagtttgtctcatgtggcattcagagtggacattcagctcttctaggaaatgacagacaatcacattcattaaaatatgt

SEQ ID NO: 726427 - DNA, 120 bp, Artificial Sequence
  ENSG00000198271_6 (sequence is synthesized)
tatgccaggccccaatgcagttatttttagatgagcagtgtcttcattcgaaggggacactaactgtgatgatctcatataatattgttttcatgtattaataaacagccacttccctaa

SEQ ID NO: 726428 - DNA, 120 bp, Artificial Sequence
  ENSG00000198276_0 (sequence is synthesized)
agtacggtggaggcttcaagggcctcctagctgctgtgcctctgctgacatttggcaggcagcttctgccagccaagggtctcaccccagccacccggctctgcacccactgtgctgccc

SEQ ID NO: 726429 - DNA, 120 bp, Artificial Sequence
  ENSG00000198276_1 (sequence is synthesized)
acaggagtggtcctgcccatggaagggccagttcaggtggccggagctcctgagctgccctaggggactgctgtgggtctgaggtggtgatgtcccccacggctgcctgcgcctgagccc

SEQ ID NO: 726430 - DNA, 120 bp, Artificial Sequence
  ENSG00000198276_2 (sequence is synthesized)
ccacgcatccacccctggggccactctgctgttcaggagcacccacccgtgtcctcgaccatgagcagccccccagcttaccctggcatcaggatctcagggtgccgggcccttggagca

SEQ ID NO: 726431 - DNA, 120 bp, Artificial Sequence
  ENSG00000198276_3 (sequence is synthesized)
gaaggcagcagcaatgcagagtccctggacaggctcctgccacctgtgggcactgggcgctctccccggaagcggaccaccagccagtgcaagtcagagcctcccctgctgcgtacaagc

SEQ ID NO: 726432 - DNA, 120 bp, Artificial Sequence
  ENSG00000198276_4 (sequence is synthesized)
aagcgtaccatctacaccgccgggcggccgccctggtacaatgaacacggcacgcaatccaaagaggccttcgccatcggcttgggaggcggcagtgcctctgggaagaccactgtggcc

SEQ ID NO: 726433 - DNA, 120 bp, Artificial Sequence
  ENSG00000198276_5 (sequence is synthesized)
agaatgatcatcgaggccctggatgtgccctgggtggtcttgctgtccatggactccttctacaaggtgctgactgagcagcagcaggaacaggccgcacacaacaacttcaacttcgac

SEQ ID NO: 726434 - DNA, 120 bp, Artificial Sequence
  ENSG00000198276_6 (sequence is synthesized)
cacccagatgcctttgacttcgacctcatcatttccaccctcaagaagctgaagcaggggaagagtgtcaaggtgcccatttatgacttcaccacgcacagccggaagaaggactggaaa

SEQ ID NO: 726435 - DNA, 120 bp, Artificial Sequence
  ENSG00000198276_7 (sequence is synthesized)
acactgtatggtgcaaacgtcatcatctttgagggcatcatggcctttgctgacaagacactgttggagctcctggacatgaagatctttgtggacacagactccgacatccgcctggta

SEQ ID NO: 726436 - DNA, 120 bp, Artificial Sequence
  ENSG00000198276_8 (sequence is synthesized)
gggacatcgagggtgtcatcaagcagtacaacaagtttgtcaagccctccttcgaccagtacatccagcccaccatgcgcctggcagacatcgtggtccccagagggagcggcaacacgg

SEQ ID NO: 726437 - DNA, 120 bp, Artificial Sequence
  ENSG00000198276_9 (sequence is synthesized)
tggccatcgacctgattgtgcagcacgtgcacagccagctggaggagcgtgaactcagcgtcagggctgcgctggcctcggcacaccagtgccacccgctgccccggacgctgagcgtcc

SEQ ID NO: 726438 - DNA, 120 bp, Artificial Sequence
  ENSG00000198276_10 (sequence is synthesized)
tgaagagcacgccgcaggtacggggcatgcacaccatcatcagggacaaggagaccagtcgcgacgagttcatcttctactccaagagactgatgcggctgctcatcgagcacgcgctct

SEQ ID NO: 726439 - DNA, 120 bp, Artificial Sequence
  ENSG00000198276_11 (sequence is synthesized)
ccttcctgccctttcaggactgcgtcgtacagaccccgcaggggcaggactatgcgggcaagtgctatgcggggaagcagatcaccggtgtgtccattctgcgcgccggtgaaaccatgg

SEQ ID NO: 726440 - DNA, 120 bp, Artificial Sequence
  ENSG00000198276_12 (sequence is synthesized)
agcccgcgctgcgcgctgtgtgcaaagacgtgcgcatcggcaccatcctcatccagaccaaccagcttaccggggagcccgagctccactacctgaggctgcccaaggacatcagcgatg

SEQ ID NO: 726441 - DNA, 120 bp, Artificial Sequence
  ENSG00000198276_13 (sequence is synthesized)
accacgtgatcctcatggactgcaccgtgtccacgggcgcggcggccatgatggcagtgcgcgtgctcctggaccacgacgtgcctgaggacaagatctttttgctgtcgctgctcatgg

SEQ ID NO: 726442 - DNA, 120 bp, Artificial Sequence
  ENSG00000198276_14 (sequence is synthesized)
cagagatgggcgtgcactcagtggcctatgcatttccgcgagtgagaatcatcaccacggcggtggacaagcgggtcaatgaccttttccgcatcatcccaggcattgggaactttggcg

SEQ ID NO: 726443 - DNA, 120 bp, Artificial Sequence
  ENSG00000198276_15 (sequence is synthesized)
accgctactttgggacagacgcggtccccgatggcagtgacgaggaggaagtggcctacacgggttagctgcccagtgagccatcccgtccccaccaccctcctcctgcctcctgaccca

SEQ ID NO: 726444 - DNA, 120 bp, Artificial Sequence
  ENSG00000198276_16 (sequence is synthesized)
atccttcgcccacgtcgccacctacggcccgagacacaccaggccggcaggctgagaaaagcgagaccgcgtgcgaggaccgcttgcttttctcccctgaccatgctctgaggatgccgt

SEQ ID NO: 726445 - DNA, 120 bp, Artificial Sequence
  ENSG00000198276_17 (sequence is synthesized)
tccctgtccgcacctgtgttctgtgtcgttttcgggcgtaactggcatctgtggagcgttccatttcctgtggaactccggagcgcggtggacagactgtgccgctgcaggaagctacaa

SEQ ID NO: 726446 - DNA, 120 bp, Artificial Sequence
  ENSG00000198276_18 (sequence is synthesized)
atgcgcgccgcccggccaggcccgcaaagaggcctccgagcgccatggctgcgcccccggcccgcgcggacgctgatccttcgcccacgtcgccacctacggcccgagacacaccaggcc

SEQ ID NO: 726447 - DNA, 120 bp, Artificial Sequence
  ENSG00000198276_19 (sequence is synthesized)
ctttagttcccccggggagaggctggggacaagctacccattctggggtatgacacctatcagcacgtgtgagcccgccctgtgcccggcccacttctgcttcctcttagcgcaggaggg

SEQ ID NO: 726448 - DNA, 120 bp, Artificial Sequence
  ENSG00000198276_20 (sequence is synthesized)
gtcccgcactgggaggggccctcacagcctaccccgctagctttctgcctgatggtgagcttgccccgttgttcgccgccatctttcgcctttgcctgacagctcaggtagggcgacgtc

SEQ ID NO: 726449 - DNA, 120 bp, Artificial Sequence
  ENSG00000198276_21 (sequence is synthesized)
tccccccagctcagccccaggcagaagtcaggcccgctctgcacctcgtgctgtgcctggcccgtgtgttcccctcacagtgacgcacagccgtcctgtggggagggagggctctgggaa

SEQ ID NO: 726450 - DNA, 120 bp, Artificial Sequence
  ENSG00000198276_22 (sequence is synthesized)
gattgtgcagcacgtgcacagccagctggaggagggctgcgctggcctcggcacaccagtgccacccgctgccccggacgctgagcgtcctgaagagcacgccgcaggtacggggcatgc

SEQ ID NO: 726451 - DNA, 120 bp, Artificial Sequence
  ENSG00000198276_23 (sequence is synthesized)
tgtgccctgggtggtcttgctgtccatggactccttctacaaggtgggcccccgcccagctcccccgaggacccctttgtcctctccctgaccctggaccccctgcaaaagtaggtccct

SEQ ID NO: 726452 - DNA, 120 bp, Artificial Sequence
  ENSG00000198283_0 (sequence is synthesized)
atggagaatagcacagaagtgacagagtttatcctcttgggattaacagatgaccccaatcttcagatacccctcctcctggcatttttattcatctacctcatcaccctgcttgggaat

SEQ ID NO: 726453 - DNA, 120 bp, Artificial Sequence
  ENSG00000198283_1 (sequence is synthesized)
gggggaatgatggtgatcatccactcagactcccatctccacactccaatgtactttttcctcagtaacctctcccttgtagacttgggttactcatcagctgtagcccccaaaacggtg

SEQ ID NO: 726454 - DNA, 120 bp, Artificial Sequence
  ENSG00000198283_2 (sequence is synthesized)
gctgcattgcggtcaggggacaaggccatctcctacgatggatgtgcagctcagttcttcttctttgtggggtttgccactgttgagtgctacctcctggcctccatggcctatgatcgc

SEQ ID NO: 726455 - DNA, 120 bp, Artificial Sequence
  ENSG00000198283_3 (sequence is synthesized)
tcctcaatgcctctatccatgcagcaggcaccttcagactctccttctgtggttctaatgagattaatcatttcttctgtgacattcccccactcctggctctctcatgctctgacacac

SEQ ID NO: 726456 - DNA, 120 bp, Artificial Sequence
  ENSG00000198283_4 (sequence is synthesized)
gcatcagcaagttggtggtctttgtggcaggcttcaacgtctttttcaccctcctggtcatccttatttcttacttcttcatatgcatcaccattcagaggatgcattctgctgaagggc

SEQ ID NO: 726457 - DNA, 120 bp, Artificial Sequence
  ENSG00000198283_5 (sequence is synthesized)
agaagaaagtcttctccacctgtgcttcccatctcactgctttgtccatcttctatggcacaatcatcttcatgtacttacagcccaactccagccagtccgtggacacagacaaaatag

SEQ ID NO: 726458 - DNA, 120 bp, Artificial Sequence
  ENSG00000198283_6 (sequence is synthesized)
cctctgtgttttacacagtggtgattcccatgctgaatcccttgatatacagccttaggaacaaagaagtgaaaagtgctctctggaaaatactcaacaaactttacccccaatattaaa

SEQ ID NO: 726459 - DNA, 120 bp, Artificial Sequence
  ENSG00000198286_0 (sequence is synthesized)
agtctcatttcctgtcgggttttgcatttccctcccccgcccctcccagcctatgacatactttctctccttttttctctcctgcctcctctggccttcggactcctgcccgcgccgccc

SEQ ID NO: 726460 - DNA, 80 bp, Artificial Sequence
  ENSG00000198286_1 (sequence is synthesized)
cccctcggaggacggctccgggcccggggggacggagggcctggtcgcctggaggaagccggaggcctgcgtggaggagg

SEQ ID NO: 726461 - DNA, 120 bp, Artificial Sequence
  ENSG00000198286_2 (sequence is synthesized)
cgccccgcgcagctggctggcggagcatgagcgccccagatcccaagcactgcaagtccagatgcaacgggagcctggctcaagggacgacaagatccagccggaaagtgtagaagtcac

SEQ ID NO: 726462 - DNA, 120 bp, Artificial Sequence
  ENSG00000198286_3 (sequence is synthesized)
accccaatggcgggatagcagcccctgtgtgtgagcacccctccatgccaggaggagggccagagatggatgactacatggagacgctgaaggatgaagaggacgccttgtgggagaatg

SEQ ID NO: 726463 - DNA, 120 bp, Artificial Sequence
  ENSG00000198286_4 (sequence is synthesized)
tggagtgtaaccggcacatgctcagccgctatatcaaccctgccaagctcacgccctacctgcgtcagtgtaaggtcattgatgagcaggatgaagatgaagtgcttaatgcccctatgc

SEQ ID NO: 726464 - DNA, 120 bp, Artificial Sequence
  ENSG00000198286_5 (sequence is synthesized)
tgccatccaagatcaaccgagcaggccggctgttggacattctacataccaaggggcaaaggggctatgtggtcttcttggagagcctagaattttattacccagaactgtacaaactgg

SEQ ID NO: 726465 - DNA, 120 bp, Artificial Sequence
  ENSG00000198286_6 (sequence is synthesized)
tgactgggaaagagcccactcggagattctccaccattgtggtggaggaaggccacgagggcctcacgcacttcctgatgaacgaggtcatcaagctgcagcagcagatgaaggccaagg

SEQ ID NO: 726466 - DNA, 120 bp, Artificial Sequence
  ENSG00000198286_7 (sequence is synthesized)
acctgcaacgctgcgagctgctggccaggttgcggcagctggaggatgagaagaagcagatgacgctgacgcgcgtggagctgctaaccttccaggagcggtactacaagatgaaggaag

SEQ ID NO: 726467 - DNA, 120 bp, Artificial Sequence
  ENSG00000198286_8 (sequence is synthesized)
agcgggacagctacaatgacgagctggtcaaggtgaaggacgacaactacaacttagccatgcgctacgcacagctcagtgaggagaagaacatggcggtcatgaggagccgagacctcc

SEQ ID NO: 726468 - DNA, 120 bp, Artificial Sequence
  ENSG00000198286_9 (sequence is synthesized)
aactcgagatcgatcagctaaagcaccggttgaataagatggaggaggaatgtaagctggagagaaatcagtctctaaaactgaagaatgacattgaaaatcggcccaagaaggagcagg

SEQ ID NO: 726469 - DNA, 120 bp, Artificial Sequence
  ENSG00000198286_10 (sequence is synthesized)
ttctggaactggagcgggagaatgaaatgctgaagaccaaaaaccaggagctgcagtccatcatccaggccgggaagcgcagcctgccagactcagacaaggccatcctggacatcttgg

SEQ ID NO: 726470 - DNA, 120 bp, Artificial Sequence
  ENSG00000198286_11 (sequence is synthesized)
aacacgaccgcaaggaggccctggaggacaggcaggagctggtcaacaggatctacaacctgcaggaggaggcccgccaggcagaggagctgcgagacaagtacctggaggagaaggagg

SEQ ID NO: 726471 - DNA, 120 bp, Artificial Sequence
  ENSG00000198286_12 (sequence is synthesized)
acctggagctcaagtgctcgaccctgggaaaggactgtgaaatgtacaagcaccgcatgaacacggtcatgctgcagctggaggaggtggagcgggagcgggaccaggccttccactccc

SEQ ID NO: 726472 - DNA, 120 bp, Artificial Sequence
  ENSG00000198286_13 (sequence is synthesized)
gagatgaagctcagacacagtactcgcagtgcttaatcgaaaaggacaagtacaggaagcagatccgcgagctggaggagaagaacgacgagatgaggatcgagatggtgcggcgggagg

SEQ ID NO: 726473 - DNA, 120 bp, Artificial Sequence
  ENSG00000198286_14 (sequence is synthesized)
cctgcatcgtcaacctggagagcaagctgcggcgcctctccaaggacagcaacaacctggaccagagtctgcccaggaacctgccagtaaccatcatctctcaggactttggggatgcca

SEQ ID NO: 726474 - DNA, 120 bp, Artificial Sequence
  ENSG00000198286_15 (sequence is synthesized)
gccccaggaccaatggtcaagaagctgacgattcttccacctcggaggagtcacctgaagacagcaagtacttcctgccctaccatccgccccagcgcaggatgaacctgaagggcatcc

SEQ ID NO: 726475 - DNA, 120 bp, Artificial Sequence
  ENSG00000198286_16 (sequence is synthesized)
agctgcagagagccaaatcccccatcagcctgaagcgaacatcagattttcaagccaaggggcacgaggaagaaggcacggacgccagccctagctcctgcggatctctgcccatcacca

SEQ ID NO: 726476 - DNA, 120 bp, Artificial Sequence
  ENSG00000198286_17 (sequence is synthesized)
actccttcaccaagatgcagcccccccggagccgcagcagcatcatgtcaatcaccgccgagcccccgggaaacgactccatcgtcagacgctacaaggaggacgcgccccatcgcagca

SEQ ID NO: 726477 - DNA, 120 bp, Artificial Sequence
  ENSG00000198286_18 (sequence is synthesized)
ggatgatgacagtcacgaacgctactccttcggaccctcctccatccactcctcctcctcctcccaccaatccgagggcctggatgcctacgacctggagcaggtcaacctcatgttcag

SEQ ID NO: 726478 - DNA, 120 bp, Artificial Sequence
  ENSG00000198286_19 (sequence is synthesized)
gaagttctctctggaaagacccttccggccttcggtcacctctgtggggcacgtgcggggcccagggccctcggtgcagcacacgacgctgaatggcgacagcctcacctcccagctcac

SEQ ID NO: 726479 - DNA, 120 bp, Artificial Sequence
  ENSG00000198286_20 (sequence is synthesized)
cctgctggggggcaacgcgcgagggagcttcgtgcactcggtcaagcctggctctctggccgagaaagccggcctccgtgagggccaccagctgctgctgctagaaggctgcatccgagg

SEQ ID NO: 726480 - DNA, 120 bp, Artificial Sequence
  ENSG00000198286_21 (sequence is synthesized)
cgagaggcagagtgtcccgttggacacatgcaccaaagaggaagcccactggaccatccagaggtgcagcggccccgtcacgctgcactacaaggtcaaccacgaagggtaccggaagct

SEQ ID NO: 726481 - DNA, 120 bp, Artificial Sequence
  ENSG00000198286_22 (sequence is synthesized)
ggtgaaggacatggaggacggcctgatcacatcgggggactcgttctacatccggctgaacctgaacatctccagccagctggacgcctgcaccatgtccctgaagtgtgacgatgttgt

SEQ ID NO: 726482 - DNA, 120 bp, Artificial Sequence
  ENSG00000198286_23 (sequence is synthesized)
gcacgtccgtgacaccatgtaccaggacaggcacgagtggctgtgcgcgcgggtcgaccctttcacagaccatgacctggatatgggcaccatacccagctacagccgagcccagcagct

SEQ ID NO: 726483 - DNA, 120 bp, Artificial Sequence
  ENSG00000198286_24 (sequence is synthesized)
cctcctggtgaaactgcagcgcctgatgcaccgaggcagccgggaggaggtagacggcacccaccacaccctgcgggcactccggaacaccctgcagccagaagaagcgctttcaacaag

SEQ ID NO: 726484 - DNA, 120 bp, Artificial Sequence
  ENSG00000198286_25 (sequence is synthesized)
cgacccccgggtcagcccccgtctctcgcgagcaagcttcctttttggccagctccttcagttcgtcagcaggtccgagaacaagtataagcggatgaacagcaacgagcgggtccgcat

SEQ ID NO: 726485 - DNA, 120 bp, Artificial Sequence
  ENSG00000198286_26 (sequence is synthesized)
catctcggggagtccgctagggagcctggcccggtcctcgctggacgccaccaagctcttgactgagaagcaggaagagctggaccctgagagcgagctgggcaagaacctcagcctcat

SEQ ID NO: 726486 - DNA, 120 bp, Artificial Sequence
  ENSG00000198286_27 (sequence is synthesized)
cccctacagcctggtacgcgccttctactgcgagcgccgccggcccgtgctcttcacacccaccgtgctggccaagacgctggtgcagaggctgctcaactcgggaggtgccatggagtt

SEQ ID NO: 726487 - DNA, 120 bp, Artificial Sequence
  ENSG00000198286_28 (sequence is synthesized)
caccatctgcaagtcagatatcgtcacaagagatgagttcctcagaaggcagaagacggagaccatcatctactcccgagagaagaaccccaacgcgttcgaatgcatcgcccctgccaa

SEQ ID NO: 726488 - DNA, 120 bp, Artificial Sequence
  ENSG00000198286_29 (sequence is synthesized)
cattgaagctgtggccgccaagaacaagcactgcctgctggaggctgggatcggctgcacaagagacttgatcaagtccaacatctaccccatcgtgctcttcatccgggtgtgtgagaa

SEQ ID NO: 726489 - DNA, 120 bp, Artificial Sequence
  ENSG00000198286_30 (sequence is synthesized)
gaacatcaagaggttcagaaagctgctgccccgacctgagacggaggaggagttcctgcgcgtgtgccggctgaaggagaaggagctggaggccctgccgtgcctgtacgccacggtgga

SEQ ID NO: 726490 - DNA, 120 bp, Artificial Sequence
  ENSG00000198286_31 (sequence is synthesized)
acctgacatgtggggcagcgtagaggagctgctccgcgttgtcaaggacaagatcggcgaggagcagcgcaagaccatctgggtggacgaggaccagctgtgaggcgggcgccctgggca

SEQ ID NO: 726491 - DNA, 120 bp, Artificial Sequence
  ENSG00000198286_32 (sequence is synthesized)
gagagactctgtggcgcggggcatcctatgaggcaggcaccctgggcagagagatgcagtgggtgcggggggatcctgtggcccacagagctgccccagcagacgctccgccccacccgg

SEQ ID NO: 726492 - DNA, 120 bp, Artificial Sequence
  ENSG00000198286_33 (sequence is synthesized)
tgatggagccccggggggacagtcgtgcctggggaggagcagggtacagcccattcccccagccctggctgacctggcctagcagtttggccctgctggccttagcagggagacagggga

SEQ ID NO: 726493 - DNA, 120 bp, Artificial Sequence
  ENSG00000198286_34 (sequence is synthesized)
gcaaagaacgccaagccggaggcccgaggccagccggcctctcgagagccagagcagcagttgaatgtaatgctggggacaggcatgctgccgccagtagggcggggacccggacagcca

SEQ ID NO: 726494 - DNA, 120 bp, Artificial Sequence
  ENSG00000198286_35 (sequence is synthesized)
ggtgactaccagtcctggggacacactcaccataaacacatccccaggcaggacagatcggggaaggggtgtgtaccaggctatgatttctcttgcattaaaatgtattattatttcttt

SEQ ID NO: 726495 - DNA, 120 bp, Artificial Sequence
  ENSG00000198286_36 (sequence is synthesized)
ccgggcaggaggagggagctggaaggtggtcagaccgtcggcattgttgggcccttctctccccagctccccgcccatgcttctgcatcctgcaagctcccagggtgcaggcaggaggca

SEQ ID NO: 726496 - DNA, 120 bp, Artificial Sequence
  ENSG00000198286_37 (sequence is synthesized)
ggtgcacccccctgaacaagatgctttttccccctgttggcactgagctagtctttgttcagggagagatggtttttttcccaatgtacagagagcggtctcgctcccgcagctctgctg

SEQ ID NO: 726497 - DNA, 120 bp, Artificial Sequence
  ENSG00000198298_0 (sequence is synthesized)
gtggtgcgagcgctgcaccagcccctggctggtggttactgtccgaacggcgtggtgtggtcgctgactctctgggcgtgcagctccgcagccctgccggctcggttcgattgacttacg

SEQ ID NO: 726498 - DNA, 120 bp, Artificial Sequence
  ENSG00000198298_1 (sequence is synthesized)
caggattctcagcccttgcctgggagaacagttcaggagacagatggccccaagagcccagatccagggaccgctgacatttggggatgtggctgtggcctttacccggattgagtggag

SEQ ID NO: 726499 - DNA, 120 bp, Artificial Sequence
  ENSG00000198298_2 (sequence is synthesized)
acacctggatgctgctcagcgggccctgtacagggatgtgatgctggagaactatgggaatctggtgtctgtggggcttctctcttccaaaccaaaactaattactcagttggagcaagg

SEQ ID NO: 726500 - DNA, 120 bp, Artificial Sequence
  ENSG00000198298_3 (sequence is synthesized)
ggcagagccctggactgaggtgcgagaggctccatcaggcacacatgcagtcgaggattactggtttgaaacaaagatgtcagccctaaagcaaagcacttctgaagcatctgttctggg

SEQ ID NO: 726501 - DNA, 120 bp, Artificial Sequence
  ENSG00000198298_4 (sequence is synthesized)
agagcgaacgaaaagtgtcatgatggaaaaaggcctggactgggagggcagaagctccacagagaagaactataagtgcaaggaatgtgggaaagtcttcaaatacaattcgtcctttat

SEQ ID NO: 726502 - DNA, 120 bp, Artificial Sequence
  ENSG00000198298_5 (sequence is synthesized)
tagccaccagagaaatcacaccagtgagaaaccacataaatgtaaagaatgtgggatcgcctttatgaacagttcatcccttttaaatcaccataaggttcatgcaggcaaacagcctta

SEQ ID NO: 726503 - DNA, 120 bp, Artificial Sequence
  ENSG00000198298_6 (sequence is synthesized)
tagatgtattgaatgtgggaagttcctgaagaagcactcaacgtttatcaaccatcagagaattcattctagggagaaaccccacaaatgcattgaatgtggaaaaactttcagaaagaa

SEQ ID NO: 726504 - DNA, 120 bp, Artificial Sequence
  ENSG00000198298_7 (sequence is synthesized)
ctcaatccttttaagtcatcagagaattcatactggccagaaaccctacaaatgtaatgactgtgggaaagccttcgctcagaatgcagctcttactcgtcatgaaagaatacatagtgg

SEQ ID NO: 726505 - DNA, 120 bp, Artificial Sequence
  ENSG00000198298_8 (sequence is synthesized)
atgaatgtggaaaagcctttaggaagagctcaactcttattagtcaccaaagaatgcatactggggagaaaccctatcactgcagtaaatgtggaaaatctttcaggtatagctcatcct

SEQ ID NO: 726506 - DNA, 120 bp, Artificial Sequence
  ENSG00000198298_9 (sequence is synthesized)
ttgctggtcatcagaaaactcacagtggaaataaaccgtatcagtgtcgtgactgtgggaaggcctttacaaagagctcaacccttactggacatcagagaattcatactggagaaaaac

SEQ ID NO: 726507 - DNA, 120 bp, Artificial Sequence
  ENSG00000198298_10 (sequence is synthesized)
cctatcactgtaagaaatgtgggaaagcctttcggcacagctcaggccttgttgaacatcagagactccatactggggaaaaaccttataaatgtaatgaatgtgggaaagcttttcccc

SEQ ID NO: 726508 - DNA, 120 bp, Artificial Sequence
  ENSG00000198298_11 (sequence is synthesized)
gaagttcagcccttaagcaacataagaaaattcataataaagaaagagccatgaaatgtagttagtgtggcaaattgtgcagagtagtttattccttctgaccatcatagaggagacatt

SEQ ID NO: 726509 - DNA, 120 bp, Artificial Sequence
  ENSG00000198298_12 (sequence is synthesized)
aaataaattatgcatttaacagaaatactctgtacttctgagagaacacatcacttgtgaggatattcattgtgaggttctactagtgaaatatttgaagaaactaaatgtatgtcagta

SEQ ID NO: 726510 - DNA, 120 bp, Artificial Sequence
  ENSG00000198298_13 (sequence is synthesized)
tgtcagtatggaagtagttatagcatactgtgtgctaattgaaaagaatgaggtggagctgtaaatactgtacaaagccaggcatggtggcatatgcctgtagtcccagttacttgggag

SEQ ID NO: 726511 - DNA, 78 bp, Artificial Sequence
  ENSG00000198298_14 (sequence is synthesized)
tagtcccagttacttgggaggctgagacaggattgcttaagcccaggagtttgagtctgtaatgcactatgattgtgc

SEQ ID NO: 726512 - DNA, 120 bp, Artificial Sequence
  ENSG00000198298_15 (sequence is synthesized)
agtagaaatatacccatgataatatacccaatatacccttgttaaagaagcaagtttcaggaaatctatattatatgcattcaaaaagacctggacaaataaagaccaatcttaacagca

SEQ ID NO: 726513 - DNA, 120 bp, Artificial Sequence
  ENSG00000198298_16 (sequence is synthesized)
gtgtgtggacaaagctacccgaaccaatcctggatgggtcccgcgatttccgtcctgtctacccattacgtagtcattcaccaagtagattattgctacccatgttttctagagtgctag

SEQ ID NO: 726514 - DNA, 120 bp, Artificial Sequence
  ENSG00000198298_17 (sequence is synthesized)
aaacagaaaagtgctttgcaaactggcagacgatgaaaaaaatacacgttagcatgtaaagacgtaggccataaagacatagggtgatagcagtgctctcttgacctttagtgtgtggta

SEQ ID NO: 726515 - DNA, 120 bp, Artificial Sequence
  ENSG00000198300_0 (sequence is synthesized)
gcagaagtctgggcagctgcgggaggagaggtttgggaggcgcgggagatgtccaccctgggctggtggcgccgccgggcgccgggcgccatgagggtgcgctaggcggctgttcgtgcc

SEQ ID NO: 726516 - DNA, 120 bp, Artificial Sequence
  ENSG00000198300_1 (sequence is synthesized)
cgaggctgcgcagcactgaggtgagctttgccttcttgatcttccgtccttcttggagacgactggcgagaggaagagggactaggtccaaacgctaggtggctgggtccagatacctgt

SEQ ID NO: 726517 - DNA, 120 bp, Artificial Sequence
  ENSG00000198300_2 (sequence is synthesized)
gttttgactctgttcctgtggatagctgcttggtctgaagttccagaaaggatcctgttcccagacaggtccctgagtactgacggtcacaggctgccgcgtctttcctgttgactcatg

SEQ ID NO: 726518 - DNA, 120 bp, Artificial Sequence
  ENSG00000198300_3 (sequence is synthesized)
tttggttcctccagtgaaaattttacttagagaaatgctgcctccaaagcacttgtctgccaccaaacctaagaagtcctgggccccaaatctgtatgagctagacagtgacttgactaa

SEQ ID NO: 726519 - DNA, 120 bp, Artificial Sequence
  ENSG00000198300_4 (sequence is synthesized)
ggagccggatgtcatcataggagaaggtccaactgactctgagttttttcatcagaggtttcggaacctaatctatgtggaatttgttgggcctcggaagaccctgatcaaactccgaaa

SEQ ID NO: 726520 - DNA, 120 bp, Artificial Sequence
  ENSG00000198300_5 (sequence is synthesized)
cctctgcctcgattggttgcagccggagacccgcaccaaggaggagatcatcgagctcttggtccttgagcagtacctgaccatcatccctgaaaagctcaagccttgggtgcgagcaaa

SEQ ID NO: 726521 - DNA, 120 bp, Artificial Sequence
  ENSG00000198300_6 (sequence is synthesized)
aaagccggagaactgtgagaagctcgtcactctgctggagaattacaaggagatgtaccaaccagaagacgacaacaacagtgacgtgaccagcgacgacgacatgacccggaacagaag

SEQ ID NO: 726522 - DNA, 120 bp, Artificial Sequence
  ENSG00000198300_7 (sequence is synthesized)
agagtcctcaccacctcactcagtccattctttcagtgaccgggactgggaccggaggggcagaagcagagacatggagccacgagaccgctggtcccacaccaggaacccaagaagcag

SEQ ID NO: 726523 - DNA, 120 bp, Artificial Sequence
  ENSG00000198300_8 (sequence is synthesized)
gatgcctccgcgggatctttcccttcctgtggtggcgaaaacaagctttgaaatggacagagaggacgacagggactccagggcttatgagtcccgatctcaggatgctgaatcatacca

SEQ ID NO: 726524 - DNA, 120 bp, Artificial Sequence
  ENSG00000198300_9 (sequence is synthesized)
aaatgtggtggacctcgctgaggacaggaaacctcacaacacaatccaggacaacatggaaaactacaggaagctgctctccctcgtgcagcttgctgaagacgatggccactcccacat

SEQ ID NO: 726525 - DNA, 120 bp, Artificial Sequence
  ENSG00000198300_10 (sequence is synthesized)
gacgcagggccactcatcaagatccaagagaagtgcctacccaagcaccagtcgaggtctaaaaactatgcctgaagccaaaaaatcaacccaccggcgggggatttgtgaagatgaatc

SEQ ID NO: 726526 - DNA, 120 bp, Artificial Sequence
  ENSG00000198300_11 (sequence is synthesized)
ttcccacggagtgataatggaaaaattcatcaaggatgtgtcacgcagttccaaatcgggaagagcaagggagtcaagcgaccggtcacagagattccccagaatgtcagatgataactg

SEQ ID NO: 726527 - DNA, 120 bp, Artificial Sequence
  ENSG00000198300_12 (sequence is synthesized)
gaaggacatttcattgaacaagagggagtcagtgatccagcagcgggtttatgaagggaatgcatttaggggaggctttaggtttaattcaacccttgtttccagaaagagagttcttga

SEQ ID NO: 726528 - DNA, 120 bp, Artificial Sequence
  ENSG00000198300_13 (sequence is synthesized)
aagaaagaggcgctatcattttgacacagatgggaagggctcgattcacgatcaaaaaggctgtcccaggaagaagccctttgaatgtggtagtgagatgagaaaagccatgagcgtgag

SEQ ID NO: 726529 - DNA, 120 bp, Artificial Sequence
  ENSG00000198300_14 (sequence is synthesized)
cagcctgagcagcctcagctccccctcctttaccgagtcacagccaattgattttggggcaatgccatatgtatgtgatgagtgtgggaggtcgttcagtgtcatctcagaatttgttga

SEQ ID NO: 726530 - DNA, 120 bp, Artificial Sequence
  ENSG00000198300_15 (sequence is synthesized)
gcaccagatcatgcatactagagagaacctctatgagtatggtgagtcctttatccacagtgtggctgtcagtgaagttcagaaaagtcaggttggagggaaacgttttgaatgtaagga

SEQ ID NO: 726531 - DNA, 120 bp, Artificial Sequence
  ENSG00000198300_16 (sequence is synthesized)
ctgtggagagaccttcaataagagtgccgccttggctgaacatcggaagattcatgctagaggttatcttgtggaatgtaagaatcaggaatgtgaggaagccttcatgcctagccccac

SEQ ID NO: 726532 - DNA, 120 bp, Artificial Sequence
  ENSG00000198300_17 (sequence is synthesized)
ctttagtgagcttcagaaaatatatggcaaagacaaattctacgagtgcagggtgtgtaaggaaaccttccttcatagttctgccctgattgagcaccagaaaatccactttggggatga

SEQ ID NO: 726533 - DNA, 120 bp, Artificial Sequence
  ENSG00000198300_18 (sequence is synthesized)
caaagataatgagcgtgaacatgaacgtgaacgtgaacgtgagcgcggggaaacctttaggcccagcccagcccttaatgagtttcagaaaatgtatggtaaagagaaaatgtacgaatg

SEQ ID NO: 726534 - DNA, 120 bp, Artificial Sequence
  ENSG00000198300_19 (sequence is synthesized)
taaggtgtgtggggagactttccttcatagctcatccctgaaagaacatcagaaaatccatactagagggaacccatttgaaaacaagggtaaagtgtgtgaggaaacctttattcctgg

SEQ ID NO: 726535 - DNA, 120 bp, Artificial Sequence
  ENSG00000198300_20 (sequence is synthesized)
tcagtcccttaaaaggcgtcagaaaacttacaataaggagaagctctgtgactttacagatggccgggatgccttcatgcaaagctcagagctcagtgagcatcagaaaattcattctcg

SEQ ID NO: 726536 - DNA, 120 bp, Artificial Sequence
  ENSG00000198300_21 (sequence is synthesized)
aaagaacctctttgaaggcagagggtatgagaaatctgtcattcatagtgggccattcactgaatctcagaagagtcatactataacaagacctcttgaaagtgatgaggacgaaaaggc

SEQ ID NO: 726537 - DNA, 120 bp, Artificial Sequence
  ENSG00000198300_22 (sequence is synthesized)
gttcaccattagctctaacccctatgaaaaccagaagattcccactaaggaaaatgtctatgaggcaaaatcatatgagaggtctgttattcatagcttagcctctgtggaagctcagaa

SEQ ID NO: 726538 - DNA, 120 bp, Artificial Sequence
  ENSG00000198300_23 (sequence is synthesized)
aagtcacagtgtagcagggcccagtaaaccaaaagtaatggcagagtctaccattcagagcttcgatgctatcaaccatcagagagttcgtgctggagggaacacctctgaaggaaggga

SEQ ID NO: 726539 - DNA, 120 bp, Artificial Sequence
  ENSG00000198300_24 (sequence is synthesized)
atacagtaggtctgttatccatagcttagtggcttccaaacctccaagaagtcacaatggaaatgaattggtggaatctaatgagaagggagaatcctccatttatatctcagaccttaa

SEQ ID NO: 726540 - DNA, 120 bp, Artificial Sequence
  ENSG00000198300_25 (sequence is synthesized)
tgataagcgacagaagattcctgccagagagaacccttgtgaagggggcagtaagaatcgcaactatgaagactctgtcatacagagtgtattccgtgccaaacctcagaaaagtgttcc

SEQ ID NO: 726541 - DNA, 120 bp, Artificial Sequence
  ENSG00000198300_26 (sequence is synthesized)
tggagagggatctggtgagtttaagaaggatggcgaattctctgttcccagctcaaatgtccgtgaataccagaaggctcgtgctaaaaagaaatacattgagcataggagcaatgagac

SEQ ID NO: 726542 - DNA, 120 bp, Artificial Sequence
  ENSG00000198300_27 (sequence is synthesized)
ctctgtaattcactctctgccttttggtgaacaaacatttcgccctcgagggatgctctatgaatgtcaggagtgtggggagtgctttgctcatagctctgacctcactgagcaccagaa

SEQ ID NO: 726543 - DNA, 120 bp, Artificial Sequence
  ENSG00000198300_28 (sequence is synthesized)
gattcatgatagggagaagccctctggaagcagaaactatgaatggtctgtcattcgcagcttggcccctactgaccctcaaacaagttacgcccaagagcagtatgctaaagagcaagc

SEQ ID NO: 726544 - DNA, 120 bp, Artificial Sequence
  ENSG00000198300_29 (sequence is synthesized)
gcggaacaaatgtaaggacttcagacaattttttgctaccagcgaagacctcaacacaaaccagaaaatctatgaccaagagaagtctcatggcgaggagtctcaaggcgagaatactga

SEQ ID NO: 726545 - DNA, 120 bp, Artificial Sequence
  ENSG00000198300_30 (sequence is synthesized)
tggggaggagacccacagcgaggagacccatggtcaggagacaattgaagaccctgtcattcaaggctcagacatggaagaccctcagaaggatgaccctgatgacaaaatctatgaatg

SEQ ID NO: 726546 - DNA, 120 bp, Artificial Sequence
  ENSG00000198300_31 (sequence is synthesized)
tgaggactgtggcctgggctttgtggatctcacagacctcacagaccatcagaaagtccacagcaggaagtgcctggttgacagtcgggagtacacacattctgtaattcacacccattc

SEQ ID NO: 726547 - DNA, 120 bp, Artificial Sequence
  ENSG00000198300_32 (sequence is synthesized)
catcagcgagtatcagagagattacactggagagcagctgtatgaatgtccaaagtgtggggaatcttttattcatagctcattccttttcgagcatcagagaatccatgaacaagacca

SEQ ID NO: 726548 - DNA, 120 bp, Artificial Sequence
  ENSG00000198300_33 (sequence is synthesized)
gttgtattccatgaaggggtgtgatgatggttttattgccctcttgcccatgaagccacggaggaatcgtgctgcagagaggaatcctgctcttgctgggtcggccattcgatgcctttt

SEQ ID NO: 726549 - DNA, 120 bp, Artificial Sequence
  ENSG00000198300_34 (sequence is synthesized)
gtgtggacaaggcttcattcatagctctgcccttaatgagcatatgagacttcatagggaagatgatttactggagcagagccagatggctgaggaagctatcattccaggcttagccct

SEQ ID NO: 726550 - DNA, 120 bp, Artificial Sequence
  ENSG00000198300_35 (sequence is synthesized)
cactgagtttcagagaagtcagaccgaagagagactctttgaatgtgcagtctgtggagaatctttcgtcaacccagcagaacttgcagatcacgtaactgttcataagaatgagcccta

SEQ ID NO: 726551 - DNA, 120 bp, Artificial Sequence
  ENSG00000198300_36 (sequence is synthesized)
cactaaacataaggagcttcatctggaagaagaagaagaagatgaagcagcagcagctgcagcagcagcagcccaggaagttgaagccaatgtccatgttccacaagtagttctgaggat

SEQ ID NO: 726552 - DNA, 120 bp, Artificial Sequence
  ENSG00000198300_37 (sequence is synthesized)
tcagggcttaaacgtagaggctgctgagccagaagtggaggctgccgagccagaagtggaggctgctgagccagaagtggaggctgctgagccaaacggagaggctgaagggccagatgg

SEQ ID NO: 726553 - DNA, 120 bp, Artificial Sequence
  ENSG00000198300_38 (sequence is synthesized)
agaggctgcagagcccattggagaggctggacagccaaatggagaggccgagcagccaaatggggatgctgatgagccagatggtgcaggtattgaagacccagaagaaagagctgaaga

SEQ ID NO: 726554 - DNA, 120 bp, Artificial Sequence
  ENSG00000198300_39 (sequence is synthesized)
gccagagggaaaagctgaagagccagagggagatgccgacgagcctgacggtgtgggaattgaagacccagaagaaggtgaagatcaagagattcaggtagaagaaccatactatgactg

SEQ ID NO: 726555 - DNA, 120 bp, Artificial Sequence
  ENSG00000198300_40 (sequence is synthesized)
ccatgaatgcacagaaaccttcacttccagcacagcattcagtgaacacctgaaaactcatgccagcatgatcatatttgagcctgcaaatgcctttggggagtgctcaggctacatcga

SEQ ID NO: 726556 - DNA, 120 bp, Artificial Sequence
  ENSG00000198300_41 (sequence is synthesized)
acgtgccagcaccagcacaggtggtgccaatcaagctgatgagaagtacttcaaatgtgacgtctgtgggcagctcttcaatgaccgcctgtccctcgccagacaccagaatacccacac

SEQ ID NO: 726557 - DNA, 120 bp, Artificial Sequence
  ENSG00000198300_42 (sequence is synthesized)
tggctgagggcatggggtaaaggttagaaaaccttcacctaggacttgacccttaccaaaccacagagaatccaaaccaatccatgataatgtcagtaggagacttaaccttagtgtgtt

SEQ ID NO: 726558 - DNA, 120 bp, Artificial Sequence
  ENSG00000198300_43 (sequence is synthesized)
acacacctgacttaacatctctaaactcagattgaaaagagaccgaatgtgcagattccacagtcttaagctttccccttcagatgtcagtgtctgcatgtgggaaagccatagcacaca

SEQ ID NO: 726559 - DNA, 120 bp, Artificial Sequence
  ENSG00000198300_44 (sequence is synthesized)
tcttacctttccaagtaatcagattgagaaaaccctatgagtattccagactacagagtttgcccaaatcaactgtaaatgacacttgtgtaacgtatatatagtgtttcatgaggtgta

SEQ ID NO: 726560 - DNA, 120 bp, Artificial Sequence
  ENSG00000198300_45 (sequence is synthesized)
tataaaatagcaaattatgacagaacagtgatcacatatatttggatttatatgatatacagttacagtttactctgcagaggtaccttacctggtattctttgaatttttttttttttt

SEQ ID NO: 726561 - DNA, 120 bp, Artificial Sequence
  ENSG00000198300_46 (sequence is synthesized)
ggaggaggaagagagcaacaaatttgattatatttttaagtgtcttagatcctgagaaagatttattgtgcattatttgaaccctgtcaatatctttttgagtaattgttttgtttctta

SEQ ID NO: 726562 - DNA, 120 bp, Artificial Sequence
  ENSG00000198300_47 (sequence is synthesized)
cccttaaatagtcttgtgaagctgtaggcatgatagataacatggcttttactccttactgtttgaaaagataagtactttagcttctttctgcagccatttcatctgcgccaacacttt

SEQ ID NO: 726563 - DNA, 120 bp, Artificial Sequence
  ENSG00000198300_48 (sequence is synthesized)
ggaacctaatactgtgtaaggctttacaatatacggattggctttttgtgacccagattgattggttgccacatgttatgtttgttgaagtggttctcatgcaaaaatattacacatttg

SEQ ID NO: 726564 - DNA, 120 bp, Artificial Sequence
  ENSG00000198300_49 (sequence is synthesized)
tgttctgggttttttttttttttaaccaactcaatatgtgtttgatgatagtgaattgataaaacccgaagcttttccctgtaaatcttacatctttgcctttaaagaatgggttacaac

SEQ ID NO: 726565 - DNA, 120 bp, Artificial Sequence
  ENSG00000198300_50 (sequence is synthesized)
catcactagatcacagtagtgcctaatgaaggttgagaaccgtaggagaggctctcatgctgtaaataatgttgcaggctaataacctttcatcacttcctttgtgcgcttcctgcctta

SEQ ID NO: 726566 - DNA, 120 bp, Artificial Sequence
  ENSG00000198300_51 (sequence is synthesized)
agtgacaagtagcaacatggcttgggtcccctgtgcagcatcagcttatgctgccacaagtcagtttgcaccctaggtgcccaggagctagtatccttagatctttctatcgctaactta

SEQ ID NO: 726567 - DNA, 120 bp, Artificial Sequence
  ENSG00000198300_52 (sequence is synthesized)
attctcttcgttatttatctgaccctctaactccatgtctaacttgcattaaaaaaaaaaaaattctttacagtcaacccaagcttaacatggactcaggttccccagcagccttaattt

SEQ ID NO: 726568 - DNA, 120 bp, Artificial Sequence
  ENSG00000198300_53 (sequence is synthesized)
gttttgttaacatctgttccttctttttcagctctcctagagtatttctgagtgttgtgttcatctaatcttagtattcttttaattacaaattgacctcacagcttgaggtttcttgtg

SEQ ID NO: 726569 - DNA, 120 bp, Artificial Sequence
  ENSG00000198300_54 (sequence is synthesized)
tcctattctgtggactacctgtgctcctttgcttcccctcccctcgcataataactatattaagaaattttttttggccttgagttggctggaaaaaaaatataaaatttaaaaaattta

SEQ ID NO: 726570 - DNA, 120 bp, Artificial Sequence
  ENSG00000198300_55 (sequence is synthesized)
aaaaaaaagatttgcaaaatgtaagtgtagatcatttgaacaagcaaaattaaagtacccactgggggaaatgtgtctgaatcttactcttctggatctgcaggattagggcttggaagt

SEQ ID NO: 726571 - DNA, 120 bp, Artificial Sequence
  ENSG00000198300_56 (sequence is synthesized)
atgtcaaagatgcagggagtgtcaaagtttaggaagattgtagagctgagagcaagaagcagaaatgagtgagtcaaagaagggagtcctaatatatcaccagatctaggaggggagagg

SEQ ID NO: 726572 - DNA, 120 bp, Artificial Sequence
  ENSG00000198300_57 (sequence is synthesized)
agacagacagaagaaaacaccagaggcaagaactgtagaaggccaggtttctgagaatgaattgagcggggtgtcctgagcagtttggaaaaggagtttttgatggtatggtgtaggtga

SEQ ID NO: 726573 - DNA, 120 bp, Artificial Sequence
  ENSG00000198300_58 (sequence is synthesized)
gggctggctgcataggaaggactgaggttggaacggacatcgggaaagctgaggggcagtgaggtttactacatgggaaaaggactcttgaaacgagaatcagtgttgatgtcggggtga

SEQ ID NO: 726574 - DNA, 120 bp, Artificial Sequence
  ENSG00000198300_59 (sequence is synthesized)
actttgtgggtacattacttggtgttaacattgttggcagtggtagccccttttcagaaagcaacttgctgtaagtcagggtgtccgttccaaccttcagctagtgaaaaggtagtaaca

SEQ ID NO: 726575 - DNA, 120 bp, Artificial Sequence
  ENSG00000198300_60 (sequence is synthesized)
aatggtaaacaagagaatgattgtttaaacctatctgtggacacttaatgcaactgtttaaaaatgataatcacgagttatgtagcaacgtggaaatatatttacagaacattaagtgga

SEQ ID NO: 726576 - DNA, 120 bp, Artificial Sequence
  ENSG00000198300_61 (sequence is synthesized)
gaaagcaggacacgaaagtatatttatactacagttataactcaacagttcatttatatgctgttcatttaacagttcatttaaacagttcattataactgtttaaaaatatatatgctt

SEQ ID NO: 726577 - DNA, 120 bp, Artificial Sequence
  ENSG00000198300_62 (sequence is synthesized)
atagtcaaaagctgttgtggtgttgttgttgtaggcttatagttgagcattattttcttaaatttcttgaatgttctttatggtagtgttactaaaaagtttatgatcacattttcattg

SEQ ID NO: 726578 - DNA, 120 bp, Artificial Sequence
  ENSG00000198300_63 (sequence is synthesized)
tgaacataatttgaactcattatcacacacttggaaaatacagaaaagtggaggaaaaaaaatcatatccccaccatccaaagacatatactctcctcttatcttgttcattcttgtttc

SEQ ID NO: 726579 - DNA, 120 bp, Artificial Sequence
  ENSG00000198300_64 (sequence is synthesized)
tgtgcacaggtttatgattataactgtgtcaaaatgtatattcaaaatagctgttacattacctttgtggaattatggttaaatactttcactttaattttttcaaatgttccctataat

SEQ ID NO: 726580 - DNA, 120 bp, Artificial Sequence
  ENSG00000198300_65 (sequence is synthesized)
aatgtcctgataacagtgtattatgtgtgtctccattggtgtgcataatacatacccagaggaaaaattagaaaataaagtaaattattttaaaaaattacctatattcccaacacctaa

SEQ ID NO: 726581 - DNA, 120 bp, Artificial Sequence
  ENSG00000198300_66 (sequence is synthesized)
caactactgctaacatcttgatctgtttcctctatcttgtttcagtgcacacgcttgtgataacagtgttaaatatgtgtgcataaagtcttaaatgaaaagatgtggaaaataactaaa

SEQ ID NO: 726582 - DNA, 120 bp, Artificial Sequence
  ENSG00000198300_67 (sequence is synthesized)
atagtgttgtcattgtgggaatttggttaaatattttgtctcaaattccttaaataatctttggtgttttggtaataaattttatgtatgtattttccattacaaatataatacatactc

SEQ ID NO: 726583 - DNA, 120 bp, Artificial Sequence
  ENSG00000198300_68 (sequence is synthesized)
atacaaaactttggaaattcagtaaagaaaattcacacatattcccaacacccaacaacaattaactgttaacatcttgatctgtgcactagtctgtgattattagggtgttagtgataa

SEQ ID NO: 726584 - DNA, 120 bp, Artificial Sequence
  ENSG00000198300_69 (sequence is synthesized)
gtatgcataaatgtcaaagatgggaagaaagatgaaaaacaagaaatagttgtgtggttgttgtgggattatggttattttgtttcggtttccttgaaaggtcatcattctagtgttttg

SEQ ID NO: 726585 - DNA, 120 bp, Artificial Sequence
  ENSG00000198300_70 (sequence is synthesized)
gtagtccacctttactacatatatttccattatatatgaaatgtgttcattatagaaactttgaagttacagaaatgtagaagagaaactcacccatgttttcaccatccaaagagtgtg

SEQ ID NO: 726586 - DNA, 120 bp, Artificial Sequence
  ENSG00000198300_71 (sequence is synthesized)
gttaacatcttgatatattttcttcatcttgtttctgtgcacaggtttttggtttgttaatatggttgtggtcattctatctgtaatagtgtcaacaataaaaataaagttaaaaataaa

SEQ ID NO: 726587 - DNA, 120 bp, Artificial Sequence
  ENSG00000198300_72 (sequence is synthesized)
accagactggataccttagagcagtggttctcaaagaacagctcctggagtgattgtaggaatgcttctttcctggggaaccacagacctcctgagtcatcccacctggaaagagagagg

SEQ ID NO: 726588 - DNA, 120 bp, Artificial Sequence
  ENSG00000198300_73 (sequence is synthesized)
caggagaatggagcaaacaagaagagagacgagaccacacaccacgctgtccctgggagacgaagagagtaacctcctcggttcctgactttaaagttctcaattccagcccccttttaa

SEQ ID NO: 726589 - DNA, 120 bp, Artificial Sequence
  ENSG00000198300_74 (sequence is synthesized)
gtggctgttgccatggagaagctggcctggggaagtgggggccaagtgggcagagcagttatgcttttgattggccagactcgctgtcacagaaggtcacgtgggatctggtcttcccca

SEQ ID NO: 726590 - DNA, 120 bp, Artificial Sequence
  ENSG00000198300_75 (sequence is synthesized)
atccaccttgtgacaagatacatatgggcattcaagtggtcacaaaattaattgtaggaagtcctccatctcttttctgtgctctggaatggtttttataacacgatacctgtgttttga

SEQ ID NO: 726591 - DNA, 120 bp, Artificial Sequence
  ENSG00000198300_76 (sequence is synthesized)
cagtgagatgctatcaaggaacttctacactttgcattcctaaacatcacagaagggtgcacccctccaagtcccactgtccttcttatggggactagggagtatttacatttggggttt

SEQ ID NO: 726592 - DNA, 120 bp, Artificial Sequence
  ENSG00000198300_77 (sequence is synthesized)
acttctagggcattagacaagttgcccacagtcccaagttagtagcccaagttagtagccgagctaactcctcgagtaggtctctgtgaagcccagaggtcatgcttgtaactgctgtgc

SEQ ID NO: 726593 - DNA, 120 bp, Artificial Sequence
  ENSG00000198300_78 (sequence is synthesized)
tgaggccaactttgtgcggttgtttgcctatttactggggactcccatatcccaaaagcattgtcgatgcctctggtaaggtggcctccactgctgcctggtcttcaacttctgggacat

SEQ ID NO: 726594 - DNA, 120 bp, Artificial Sequence
  ENSG00000198301_0 (sequence is synthesized)
atacccggaaacacgagtccaagctgcagctggcagggattgcggggtgccggccgtctgagtttttttaaaactgctcgccgcgaagtctgtctgcagccaaaatgtccaacagaaaca

SEQ ID NO: 726595 - DNA, 120 bp, Artificial Sequence
  ENSG00000198301_1 (sequence is synthesized)
acaacaagcttcccagcaacctgccgcagttacagaatctaatcaagcgagacccgccggcctacatcgaggagtttctacagcagtataatcactacaaatccaatgtggagattttca

SEQ ID NO: 726596 - DNA, 120 bp, Artificial Sequence
  ENSG00000198301_2 (sequence is synthesized)
aattgcaaccaaataaacccagcaaagaactagcagagctggtgatgtttatggcacagattagtcactgctacccagagtacctaagtaattttcctcaagaggtgaaagatcttctct

SEQ ID NO: 726597 - DNA, 120 bp, Artificial Sequence
  ENSG00000198301_3 (sequence is synthesized)
cctgcaatcataccgtattggatccagatctgcgaatgacattttgcaaagctttgatcttgctgagaaataagaatctcatcaatccatcaagcctgctagaactcttctttgaacttt

SEQ ID NO: 726598 - DNA, 120 bp, Artificial Sequence
  ENSG00000198301_4 (sequence is synthesized)
ttcgttgccatgataaacttctgcgaaagactttatacacacatattgtgactgatatcaagaatataaatgcaaaacacaagaacaataaagtgaatgtagtattgcaaaatttcatgt

SEQ ID NO: 726599 - DNA, 120 bp, Artificial Sequence
  ENSG00000198301_5 (sequence is synthesized)
acaccatgttaagagatagcaatgcaaccgcagccaagatgtctttagatgtaatgattgaactctacagaaggaacatctggaatgatgcaaaaactgtcaatgttatcacaactgcat

SEQ ID NO: 726600 - DNA, 120 bp, Artificial Sequence
  ENSG00000198301_6 (sequence is synthesized)
gtttctctaaggtcaccaagatattagttgccgctttgacattctttcttgggaaagatgaagatgaaaaacaggacagtgactccgaatctgaggatgatggaccaacagcaagagacc

SEQ ID NO: 726601 - DNA, 120 bp, Artificial Sequence
  ENSG00000198301_7 (sequence is synthesized)
tgctagtacaatatgctacagggaagaaaagttccaaaaacaagaaaaagttggaaaaggcaatgaaagtgctcaagaaacaaaaaaagaagaaaaaaccagaggtgtttaacttttcag

SEQ ID NO: 726602 - DNA, 120 bp, Artificial Sequence
  ENSG00000198301_8 (sequence is synthesized)
ccattcacttgattcatgatccccaagattttgcggaaaaactactaaagcagcttgagtgctgtaaggagaggtttgaagtgaagatgatgctcatgaaccttatctccagattggtgg

SEQ ID NO: 726603 - DNA, 120 bp, Artificial Sequence
  ENSG00000198301_9 (sequence is synthesized)
gaattcatgagcttttcctcttcaatttctatccctttttgcaaaggtttctgcagccccaccaaagagaagtaaccaagatccttctgtttgctgcacaagcatctcatcacctagtac

SEQ ID NO: 726604 - DNA, 120 bp, Artificial Sequence
  ENSG00000198301_10 (sequence is synthesized)
ccccagagattattcaatcattgcttatgactgtggcaaacaattttgttaccgacaagaactctggagaagtcatgacagtaggaatcaatgctataaaggagataacagctcgatgtc

SEQ ID NO: 726605 - DNA, 120 bp, Artificial Sequence
  ENSG00000198301_11 (sequence is synthesized)
ctctggccatgactgaagaacttctccaagacctggctcagtataaaacacacaaggataagaatgtaatgatgtctgctagaactttgattcacctcttccgaacactgaatcctcaga

SEQ ID NO: 726606 - DNA, 120 bp, Artificial Sequence
  ENSG00000198301_12 (sequence is synthesized)
tgcagaagaaattccggggtaagcctacagaggcctccatagaagcaagagtacaagaatatggagaattagatgctaaagattacattccaggagcagaagttctggaagttgagaaag

SEQ ID NO: 726607 - DNA, 120 bp, Artificial Sequence
  ENSG00000198301_13 (sequence is synthesized)
aagagaatgctgaaaatgatgaagatggatgggaaagtaccagtctcagtgaggaggaggatgctgatggtgaatggattgatgtgcaacactcttccgatgaagaacagcaagaaatct

SEQ ID NO: 726608 - DNA, 120 bp, Artificial Sequence
  ENSG00000198301_14 (sequence is synthesized)
ccaagaagctgaacagcatgcccatggaggagcggaaggccaaagctgcagccatcagcactagccgagttttaactcaggaagacttccagaaaatccgcatggcccaaatgagaaaag

SEQ ID NO: 726609 - DNA, 120 bp, Artificial Sequence
  ENSG00000198301_15 (sequence is synthesized)
aacttgatgctgcccccgggaaatcccagaagaggaaatacattgaaatagacagtgatgaagagcccaggggtgaattactttctcttcgggacattgaacgccttcataaaaagccaa

SEQ ID NO: 726610 - DNA, 120 bp, Artificial Sequence
  ENSG00000198301_16 (sequence is synthesized)
agtctgacaaagagacaagactagcaactgcaatggctggaaagacagaccgaaaagaatttgtgaggaagaaaaccaaaacaaatccattttccagttcgacaaataaagagaagaaaa

SEQ ID NO: 726611 - DNA, 120 bp, Artificial Sequence
  ENSG00000198301_17 (sequence is synthesized)
aacagaagaactttatgatgatgcggtatagccagaatgtccggtcaaaaaataagcgttccttccgagaaaaacagttggcactacgagatgcacttttgaaaaagagaaaaagaatga

SEQ ID NO: 726612 - DNA, 120 bp, Artificial Sequence
  ENSG00000198301_18 (sequence is synthesized)
agtaacttcctggcaagttttccattcctagaagaatgctaagtttgtgtccttgctctgaaaattggtaaatcaagcatgtttgtttacattaaaaagtccagacacactgtattgtga

SEQ ID NO: 726613 - DNA, 120 bp, Artificial Sequence
  ENSG00000198301_19 (sequence is synthesized)
aaactgctgaacatgtggcagcaattttgtgtttttattttggagacggctaatggtaggaatgttaatgtaaatagtggtggtaatgtaaaatcatttcatttatcattcatgcaaaaa

SEQ ID NO: 726614 - DNA, 120 bp, Artificial Sequence
  ENSG00000198301_20 (sequence is synthesized)
aaagtatgtattgagtgcctattcattgtcactgtagatgcaaaacgaatgagctgtaaccccttcactcaaggcattgacagcttagctgtgagggtggacacacatatgtgtatttac

SEQ ID NO: 726615 - DNA, 120 bp, Artificial Sequence
  ENSG00000198301_21 (sequence is synthesized)
agtgcagtgtaaatagttctgtagtagaggttaactccatatttctgtgaggtcactgaggccttatggactaactctgtgaggataggagttatatattcttataagacaaaacaaaac

SEQ ID NO: 726616 - DNA, 120 bp, Artificial Sequence
  ENSG00000198301_22 (sequence is synthesized)
aggacaatgttacaagagtaagaggttcttacttgtacataggctttcctgctgaaaacaggcccctgctgtacagattttgggtacataatttagctcttttagtcaatccaagagatt

SEQ ID NO: 726617 - DNA, 120 bp, Artificial Sequence
  ENSG00000198301_23 (sequence is synthesized)
taagtgacccccccccccccgtgttttttttgtttttgtttttgttttgaatgccatgtaaaggctttttggttaagacctcacttttaaaactgccttaagtataaatagtacctttgg

SEQ ID NO: 726618 - DNA, 120 bp, Artificial Sequence
  ENSG00000198301_24 (sequence is synthesized)
aatatatttagttcatcatttgagctgccttcatactggtttcctcagccttccttcagcctgtaatattttcagcccactgtttaccttgtctcaataaaaggtttctaatgccaaata

SEQ ID NO: 726619 - DNA, 120 bp, Artificial Sequence
  ENSG00000198301_25 (sequence is synthesized)
ctaagtttgtgtccttgctctgaaaattgcccctcccggccgcagcctacactccttcggcccaagcaggtgcgctggaaccggcagttggtgagaagccggctgccggcagccccaacc

SEQ ID NO: 726620 - DNA, 120 bp, Artificial Sequence
  ENSG00000198301_26 (sequence is synthesized)
cttagcggccccgcggtcagggacctccaggcccgatggagagtcggggcgggctagtggatgcgcggcggggacgggaggtgtcgccgctccggcttgccggtgacaggggcgggcggg

SEQ ID NO: 726621 - DNA, 120 bp, Artificial Sequence
  ENSG00000198301_27 (sequence is synthesized)
tcgtgcgcgggccccacctccagcgatcgcagcccagccccagctcctcctcctccacggcttacccgggctccgacagcggctgcaggtctccaagttgcggccgctggagcccgagcc

SEQ ID NO: 726622 - DNA, 120 bp, Artificial Sequence
  ENSG00000198301_28 (sequence is synthesized)
accaaataaacccagcaaagaactagcagagctggtgatgtttatggcacagaacatcctaaatgtatgcatctgaattataggagagaaagagagcaacttcagaagagcctttgcttt

SEQ ID NO: 726623 - DNA, 120 bp, Artificial Sequence
  ENSG00000198301_29 (sequence is synthesized)
aaacccagcaaagaactagcagagctggtgatgtttatggcacaggagagaaagagagcaacttcagaagagcctttgctttgttacagattagtcactgctacccagagtacctaagta

SEQ ID NO: 726624 - DNA, 120 bp, Artificial Sequence
  ENSG00000198315_0 (sequence is synthesized)
gttgtgcctccgcagatttagaagttagtggccggaggggcctggtccgagtacagctttcatcgcctttactccccgaccttccttcgagtctgtttatccgttgcagcctcccttccc

SEQ ID NO: 726625 - DNA, 120 bp, Artificial Sequence
  ENSG00000198315_1 (sequence is synthesized)
cacgacggggcgcctctgcaactcacaaagtacccttagaaagaggccctcagaagagtcttctcttaagaagataaagaaggtagtggaaacgaacttcctgagcttttcaggctctaa

SEQ ID NO: 726626 - DNA, 120 bp, Artificial Sequence
  ENSG00000198315_2 (sequence is synthesized)
tggctgaagaatcaagaaagccttcagccccatccccaccagaccagactcctgaagaggatcttgtaatcgtcaaggtagaggaggatcatggttgggaccaggaatctagtctgcatg

SEQ ID NO: 726627 - DNA, 120 bp, Artificial Sequence
  ENSG00000198315_3 (sequence is synthesized)
aaagtaaccctcttggccaagaagtgttccgcctgcgcttcaggcagttacgctaccaggagacactaggaccccgagaagctctgatccaactacgggccctttgccatcagtggctga

SEQ ID NO: 726628 - DNA, 120 bp, Artificial Sequence
  ENSG00000198315_4 (sequence is synthesized)
ggccagatttgaacaccaaggaacagatcctggagctgctggtgctggagcagttcttgaccatcctacctgaggagctccagacactggttaaggaacatcagctagagaacggagagg

SEQ ID NO: 726629 - DNA, 120 bp, Artificial Sequence
  ENSG00000198315_5 (sequence is synthesized)
aggtggtgaccctattagaggatttggaaaggcagattgatatactaggacgaccagtctcagctcgcgtacatggacatagggtactctgggaggaggtagtacattcagcatctgcac

SEQ ID NO: 726630 - DNA, 120 bp, Artificial Sequence
  ENSG00000198315_6 (sequence is synthesized)
cagagcctccaaatactcagctccaatctgaggcaacccaacataaatctccagtgccccaagagtcacaagagagagccatgtctacttcccagagtcctactcgttcccagaaaggaa

SEQ ID NO: 726631 - DNA, 120 bp, Artificial Sequence
  ENSG00000198315_7 (sequence is synthesized)
gttctggagaccaggaaatgacagctacacttctcacagcagggttccagactttggagaagattgaagacatggctgtgtcccttattcgagaggagtggcttcttgatccatcacaga

SEQ ID NO: 726632 - DNA, 120 bp, Artificial Sequence
  ENSG00000198315_8 (sequence is synthesized)
aggatctgtgtagagataacaggccagaaaatttcagaaacatgttctccctgggtggtgagaccaggagtgagaacagggaattagcttcaaaacaggtaatatctactggaatccagc

SEQ ID NO: 726633 - DNA, 120 bp, Artificial Sequence
  ENSG00000198315_9 (sequence is synthesized)
cacatggagagacagctgccaaatgcaacggggatgttatcaggggtcttgagcatgaagaagcccgagaccttctgggcagattagagaggcagcggggaaatcccacacaagagagac

SEQ ID NO: 726634 - DNA, 120 bp, Artificial Sequence
  ENSG00000198315_10 (sequence is synthesized)
gacataaatgtgatgaatgtgggaaaagctttgctcagagctcaggccttgttcgccactggagaatccacactggggagaaaccctatcagtgtaatgtgtgtggtaaagccttcagtt

SEQ ID NO: 726635 - DNA, 120 bp, Artificial Sequence
  ENSG00000198315_11 (sequence is synthesized)
acaggtcagcccttctttcacatcaggatatccacaacaaagtaaaacgctatcactgtaaggagtgtggcaaagccttcagtcagaacacaggcctgattctgcaccagagaatccaca

SEQ ID NO: 726636 - DNA, 120 bp, Artificial Sequence
  ENSG00000198315_12 (sequence is synthesized)
ctggggagaagccatatcagtgcaatcagtgtgggaaggctttcagtcagagtgcgggccttattctgcaccagagaatccacagtggagagagaccctatgaatgtaatgagtgtggga

SEQ ID NO: 726637 - DNA, 120 bp, Artificial Sequence
  ENSG00000198315_13 (sequence is synthesized)
aagctttcagtcatagctcacacctcattggacatcagagaatccacactggggagaagccctatgagtgtgatgagtgtgggaaaaccttcaggcggagctcacatcttattggtcatc

SEQ ID NO: 726638 - DNA, 120 bp, Artificial Sequence
  ENSG00000198315_14 (sequence is synthesized)
agaggagccacactggggagaaaccctacaaatgcaatgagtgtgggagggccttcagtcagaagtcaggccttattgaacatcagagaatccacactggagaaagaccctataaatgta

SEQ ID NO: 726639 - DNA, 120 bp, Artificial Sequence
  ENSG00000198315_15 (sequence is synthesized)
aagaatgtgggaaagctttcaatgggaacactggtctcattcaacacctgagaattcacacaggggagaagccctaccaatgtaatgagtgtgggaaagcctttattcagaggtcaagtc

SEQ ID NO: 726640 - DNA, 120 bp, Artificial Sequence
  ENSG00000198315_16 (sequence is synthesized)
tcattcgacatcagagaatccacagtggtgaaaaatctgaatccataagcgtttaggaacaacatcagttagagtttgagcattattcagcattagggaaaccacacactggtgagaggt

SEQ ID NO: 726641 - DNA, 120 bp, Artificial Sequence
  ENSG00000198315_17 (sequence is synthesized)
ctttcagtgtactaaaaggcagaaaggtcatcacaactttagtgtcagaatctatagtggtggcaaagttaggatagctctttagtaatttgggcccagtgccttggtgaaggttgatta

SEQ ID NO: 726642 - DNA, 120 bp, Artificial Sequence
  ENSG00000198315_18 (sequence is synthesized)
gcttgactgtctttgaaagtatctgatggagctcctgatgacctaatgtatcctttagaaatttaaaatagcattagagcaagttgcttgtcatggcttgaagagcttaactttgtcttt

SEQ ID NO: 726643 - DNA, 120 bp, Artificial Sequence
  ENSG00000198315_19 (sequence is synthesized)
tgggtgagtagctataggtttgagagaggctggctactcctagttcctgtgcttcttcccatctcctgtgatccccctctcccatttattcccttgaaggtgcccttgtattcctaatct

SEQ ID NO: 726644 - DNA, 120 bp, Artificial Sequence
  ENSG00000198315_20 (sequence is synthesized)
gatctaagaagctgctgtagagtcagaagtagcttctgtgtgaaacttatatttgtatgtagctttctaggaaaattttacagacacttaaagtatttatgcttaagtgtgcattttttt

SEQ ID NO: 726645 - DNA, 120 bp, Artificial Sequence
  ENSG00000198315_21 (sequence is synthesized)
attctaatattccttctagtcagtggaaatttgtattcccatacaaactcagaatgctatatttttaacagcactccagcatttttcttcatgtatcaccttcactgactccattgagtc

SEQ ID NO: 726646 - DNA, 120 bp, Artificial Sequence
  ENSG00000198315_22 (sequence is synthesized)
attgagcatctgtacatatccttcaccacccccagtcccagcacctgtgtcagtaaagaaagtggacacattagtaatggttatgggagtaatacagagaaagaggtgagtggagactca

SEQ ID NO: 726647 - DNA, 120 bp, Artificial Sequence
  ENSG00000198315_23 (sequence is synthesized)
gcccagctgctcttgagcttggatagttatacattttggtgacttctgactctccttccacctccccactgtacactgtggtacagatagttggcactatcctagttatggcatcaggta

SEQ ID NO: 726648 - DNA, 120 bp, Artificial Sequence
  ENSG00000198315_24 (sequence is synthesized)
ggagaaggagacgaagatgctttaggaagataaaaaccttacaaagaatgtatactcatcttttttggcccattacaatactgctttctcaggttcttaacagcctgtgcaaactccctg

SEQ ID NO: 726649 - DNA, 120 bp, Artificial Sequence
  ENSG00000198315_25 (sequence is synthesized)
actagatggtctgtcactcctatcattaccttgcacccatctctttagatggcctcagcacctcactcgttattctccatctgtttcttgccattagtttatatgactttaatatccaca

SEQ ID NO: 726650 - DNA, 120 bp, Artificial Sequence
  ENSG00000198315_26 (sequence is synthesized)
gtggtaatctaataccttacctcacaggttttcattcttttgaactctggtgcactccatctgtaatccatgtctataatctaccaacaaagatgtactcttaaactcagtatcaccagg

SEQ ID NO: 726651 - DNA, 120 bp, Artificial Sequence
  ENSG00000198315_27 (sequence is synthesized)
cactatatttcatctttgaggcttttgttataccaaggaatactatataaagtaatgagactggtttaaagtaacatgccagaacttacgcatccaatgtgggttgtcacttgttattcc

SEQ ID NO: 726652 - DNA, 120 bp, Artificial Sequence
  ENSG00000198315_28 (sequence is synthesized)
caagtactattattccatactactatattcttccaaatatttggaacactcttagaattcccatttaataaaccatatgagaaaaccctctattactcttacactttagttttaccattt

SEQ ID NO: 726653 - DNA, 120 bp, Artificial Sequence
  ENSG00000198315_29 (sequence is synthesized)
gagtagccacttattcaccagagttggaattgagaaattttgggctttccaaaattaacctttaaacttaaaattgattacattgagcctattcagaaaaaaaattatataggttctgat

SEQ ID NO: 726654 - DNA, 120 bp, Artificial Sequence
  ENSG00000198315_30 (sequence is synthesized)
aggaccaccttttggatcataaattctttccctataacattccttctctgcctctctatggcccactttgaccactaacaacatcagaattatctacatcaatttcattgagccattggt

SEQ ID NO: 726655 - DNA, 120 bp, Artificial Sequence
  ENSG00000198315_31 (sequence is synthesized)
gaatgaagacacccatcacttgtcatgttggtttccaacagtcctttcgattatcctttattttcttatcctcccttctcttgtttcttttatttataagttaccattcctagtttcttt

SEQ ID NO: 726656 - DNA, 120 bp, Artificial Sequence
  ENSG00000198315_32 (sequence is synthesized)
gtacttgaaattttaagaaaccagaaacaagtaaatctggttgtatctagatctttgctctgtgtttcagttgtgccttaccctctgtaagatactgattcttcctggggccagtattac

SEQ ID NO: 726657 - DNA, 120 bp, Artificial Sequence
  ENSG00000198315_33 (sequence is synthesized)
cttgtatgcaaatattacatatgatgggtgcattgtcagagggaaaatatatgtgtatgtacacatgtgtatgtacacacacacacacacctgccatacactttagaagaacgcttctct

SEQ ID NO: 726658 - DNA, 120 bp, Artificial Sequence
  ENSG00000198315_34 (sequence is synthesized)
tctattccaataaaaagtccttttagcaatgcaacatattaacaaaattgggtgcattcagggtggtatggccatagaccagagcaacacattgaaatgtatacagatgtactagctaaa

SEQ ID NO: 726659 - DNA, 120 bp, Artificial Sequence
  ENSG00000198315_35 (sequence is synthesized)
gtctctttatgtgtcagtattaagagtaatatgtagccagattacttaaatctcagaattactaagcatgtggcataaatttggagaaaataatatgactagaaaaattagtgttatatt

SEQ ID NO: 726660 - DNA, 120 bp, Artificial Sequence
  ENSG00000198315_36 (sequence is synthesized)
gggtgtgagaaaagactgtgtcttgaaagaattatcaaagctgatacagcacatatacagaattagccaaatggtataagacaatagaaaaaggctgtggattctttgaggacatcacta

SEQ ID NO: 726661 - DNA, 120 bp, Artificial Sequence
  ENSG00000198315_37 (sequence is synthesized)
gaaatcattctttgtctcaagttcacactcttagcatagaatattattgactaggctgtatgacattttgagctcttaactgtgaatggcattcattaagctcctttatcctatagattc

SEQ ID NO: 726662 - DNA, 120 bp, Artificial Sequence
  ENSG00000198315_38 (sequence is synthesized)
tatctttatgttcatctgaaatgaactattcatcagtactttctcctcccatcctaagcttctcattttaggaactgacatgataaggtggttctttcataactctaatgccatccaaca

SEQ ID NO: 726663 - DNA, 120 bp, Artificial Sequence
  ENSG00000198315_39 (sequence is synthesized)
tagccctgggagaggcatgttaggtttcagagattttctccatggagcaaggtgcagtgctagaatatggtggttgattcccaaacagagcagttaactttactcttggttctgagtctc

SEQ ID NO: 726664 - DNA, 120 bp, Artificial Sequence
  ENSG00000198315_40 (sequence is synthesized)
caaataataatagccgacgtttattgagcacttactatgtgcccaaccctgttatgcctttctcaggctcatgataaatgtattagtctgttctcatgctgctattaaagacatacctga

SEQ ID NO: 726665 - DNA, 80 bp, Artificial Sequence
  ENSG00000198315_41 (sequence is synthesized)
gttccacatggctggggatgtcttatacatggatggcagcaggcaaagagagaacttgtgcaggggaactctttataaaa

SEQ ID NO: 726666 - DNA, 85 bp, Artificial Sequence
  ENSG00000198315_42 (sequence is synthesized)
gcaaggaggagcaaatcatgtcttatacatggatggcagcaggcaaagagagaacttgtgcaggggaactctttataaaaccgtc

SEQ ID NO: 726667 - DNA, 120 bp, Artificial Sequence
  ENSG00000198315_43 (sequence is synthesized)
ctacaattcaagatgagatttggatgggacacagccaaaccatatcaataggtattattttatcccccattttataaatgaggaaacggaggcttagttgagtgagctgaccaatatcac

SEQ ID NO: 726668 - DNA, 120 bp, Artificial Sequence
  ENSG00000198315_44 (sequence is synthesized)
aacggaggcttagttgagtgagctgaccaatatcacccagccagtatgtgataaaactgattctgacccacacagtttgattctagagcctgttctgactactgtgctaaggtgtgtata

SEQ ID NO: 726669 - DNA, 120 bp, Artificial Sequence
  ENSG00000198315_45 (sequence is synthesized)
atgaacatggtaattctaaccagctttttaaaaatatgtagcgcttgtcatgagaggtactggggaaaagaatgtgcagtagagtgcaaatacattacaattactggaaaattggtggaa

SEQ ID NO: 726670 - DNA, 120 bp, Artificial Sequence
  ENSG00000198315_46 (sequence is synthesized)
aatgctttttggggttacaattatatcatttttaagtgttgatgctttgtagtactacaaagctaaattgtgcaaacaaaacatatttaacagagtaattgggaggataaagcaataata

SEQ ID NO: 726671 - DNA, 120 bp, Artificial Sequence
  ENSG00000198315_47 (sequence is synthesized)
aattcaaatatatttttctccaaactgccaaagggaaagtagaattgtggagggaaatgaaatatccatgtaccaggccaggcagatggtcagttaggatgacaatagtaagttcatcta

SEQ ID NO: 726672 - DNA, 120 bp, Artificial Sequence
  ENSG00000198315_48 (sequence is synthesized)
cagcataaaatgtgaaatgctttcatcctcattgcccatttccaactaccattctgtttctcctctattgttcatggtttttcaaacatatctttgatttttcaacccccctttttcatt

SEQ ID NO: 726673 - DNA, 120 bp, Artificial Sequence
  ENSG00000198315_49 (sequence is synthesized)
aatctgttcttaaaacttctttttactggctttcatacttagcattccagtgaaatgttcttagactcaccagtggacaaataataaggcctttttttattattatttcttgtctttttt

SEQ ID NO: 726674 - DNA, 120 bp, Artificial Sequence
  ENSG00000198315_50 (sequence is synthesized)
gatctaatttatattttatattgttgaattctccctcctttggcttgtgggatcctttttctctaatatctgtctttctttttttagttgatctttccacccactcccctttctcctctt

SEQ ID NO: 726675 - DNA, 120 bp, Artificial Sequence
  ENSG00000198315_51 (sequence is synthesized)
ctccactgagaataatctccctgtcttttattcacttcattttctatactcctatttatccattttgattgtttatacctactatttgtattcgaatgacttcatttttcccaccctgtg

SEQ ID NO: 726676 - DNA, 120 bp, Artificial Sequence
  ENSG00000198315_52 (sequence is synthesized)
ggtcagtttgtgacttttggaattttccacaggtacctgtacaacttgatatttgaaaacaggattcatcaccatatatccccagcccccgttttctttttaaacaggcctcattgcgta

SEQ ID NO: 726677 - DNA, 120 bp, Artificial Sequence
  ENSG00000198315_53 (sequence is synthesized)
attcctttgccctgaaaagtgtcaccacctttatatttttaccccagccttggagttatctttttctgctctccattctccatgtccaaaaacttgctgtcagtccagtttttaatcagt

SEQ ID NO: 726678 - DNA, 120 bp, Artificial Sequence
  ENSG00000198315_54 (sequence is synthesized)
tttctccttgaggcttgatctcccatttctctcatcccattatagcttttcatgtagatctgaggcccaggttactgtaattcttttttttccaatttccttgctcccaggatccccatc

SEQ ID NO: 726679 - DNA, 120 bp, Artificial Sequence
  ENSG00000198315_55 (sequence is synthesized)
ttgtataaagtttctaaggtgctcctcctcaaactccatttttacaatatccgtattgtaaaattttcattttcagtaacacccagtagataatttttcaaagacgatcctcctcaaaca

SEQ ID NO: 726680 - DNA, 120 bp, Artificial Sequence
  ENSG00000198315_56 (sequence is synthesized)
cccatttttacaatatctctattgtaaaatttcattttcactaagtaacacccagtagataattcctatggagcagtggtgttccaaattctccattacctctatgcctaatattcatca

SEQ ID NO: 726681 - DNA, 120 bp, Artificial Sequence
  ENSG00000198315_57 (sequence is synthesized)
gccttcattactctctagcatattcaccttgattcaacagattcaaacttcctacagccttctactgatgtcttacaagctcttgcctctgtgcctttctcatgctattctttttgctta

SEQ ID NO: 726682 - DNA, 120 bp, Artificial Sequence
  ENSG00000198315_58 (sequence is synthesized)
gattgctctttggtcccagctcatgttcatcactcccttcaaagcctttcttcctttatatcttctgactgagctctccctgattgacatcacctcatgcgatgacctccctcattctgt

SEQ ID NO: 726683 - DNA, 120 bp, Artificial Sequence
  ENSG00000198315_59 (sequence is synthesized)
gctgcctcagcacttatcttttgagtttgtactgtggtccatgtacttactaatatgttgctttgtaattattttctagcactctgtgttacagtttcatatttgtatttatttccaaaa

SEQ ID NO: 726684 - DNA, 120 bp, Artificial Sequence
  ENSG00000198315_60 (sequence is synthesized)
ttaaattgtaagctccttgagggcaggaataataacttttacatttgtatctctgcacccccgagtgcctagtatagtgctgagcacatagtaggcgtttaataaatgcttgttgaagta

SEQ ID NO: 726685 - DNA, 120 bp, Artificial Sequence
  ENSG00000198315_61 (sequence is synthesized)
gctttcatcgcctttactccccgaccttccttcgagtctgtttatccgttgcagcctcccttccccacgacggggcgcctctgcaactcacagttgaagagtctataaaccaacccccct

SEQ ID NO: 726686 - DNA, 120 bp, Artificial Sequence
  ENSG00000198315_62 (sequence is synthesized)
ctttttgcgagggaaccttttatgaagctttcttcatagataatcgtgttgtggttgaagagtctataaaccaacccccctcgccccgtgccacaactccaaaaactgaaaagataagca

SEQ ID NO: 726687 - DNA, 120 bp, Artificial Sequence
  ENSG00000198324_0 (sequence is synthesized)
attcctctgaaatgtctggcatgcagcaggaactcacaacattatttcagggatacaggagggccccaggctcccctccaggccccgcgattgccaccatgaagctgaacgagcgcagcc

SEQ ID NO: 726688 - DNA, 120 bp, Artificial Sequence
  ENSG00000198324_1 (sequence is synthesized)
tggccttctacgccacctgtgacgccccggtggacaatgcaggcttcctgtacaagaagggtgggcggcacgcggcctaccaccggcgctggttcgtgctgcgcgggaacatgctcttct

SEQ ID NO: 726689 - DNA, 120 bp, Artificial Sequence
  ENSG00000198324_2 (sequence is synthesized)
acttcgaggacgctgccagccgtgagcccgtgggcgtcatcatcctggagggctgcactgtggagctggtggaggccgccgaggagttcgccttcgctgtgcgctttgcggggacccggg

SEQ ID NO: 726690 - DNA, 120 bp, Artificial Sequence
  ENSG00000198324_3 (sequence is synthesized)
cgcgcacctacgtgctggccgctgagagtcaggatgccatggagggctgggtcaaggccctgtcgcgtgccagcttcgactacctgcggctggtggtgcgcgagctggagcagcagctgg

SEQ ID NO: 726691 - DNA, 120 bp, Artificial Sequence
  ENSG00000198324_4 (sequence is synthesized)
cggctgtacgtggcgggggtggcatggccctgccccagccccagccccagtccctgcccttgcccccgtccctgccctctgccctggccccagtcccatccctgccttctgccccagccc

SEQ ID NO: 726692 - DNA, 120 bp, Artificial Sequence
  ENSG00000198324_5 (sequence is synthesized)
cggtcccagccctgcccctgccccgccggcccagtgccctcccgcccaaggagaatggctgcgctgtctggagcactgaggccaccttcaggcctggacccgagccccctccaccaccgc

SEQ ID NO: 726693 - DNA, 120 bp, Artificial Sequence
  ENSG00000198324_6 (sequence is synthesized)
ctcgccgccgggcctcggcaccccacgggcccctggacatggcccccttcgcccggctgcacgagtgctatggccaggagatccgggccctgcgtggccagtggctcagcagccgggtcc

SEQ ID NO: 726694 - DNA, 120 bp, Artificial Sequence
  ENSG00000198324_7 (sequence is synthesized)
agccctgaggccaccagggcgcctgttttagggggacacaagctctatgccctctgggacaggccgggtcctggagagactgggggagcagatcctgagggaaatcatgggcaaggctgg

SEQ ID NO: 726695 - DNA, 120 bp, Artificial Sequence
  ENSG00000198324_8 (sequence is synthesized)
cccccaggccctgagtggcctggttttgggggatgcaggctctgagaaggtgctggattctgagtgggcctttaggaccatgtgacccagaaggcctacccttgaggggaacgtcacgtg

SEQ ID NO: 726696 - DNA, 120 bp, Artificial Sequence
  ENSG00000198324_9 (sequence is synthesized)
caacactaaggagaatccagggcctgagggggaggtttcctgagaactccggccccaggctggcctgagctgccgggcagaggcctgtgctggcaacaggcattgccgggcctgcagctc

SEQ ID NO: 726697 - DNA, 120 bp, Artificial Sequence
  ENSG00000198324_10 (sequence is synthesized)
agagggtcactgggactgagggcgatctgtggcctgaaaagcaaatgcacagttagtgcagctcctgaccaggccttcagggtggacagagggaggatcggtcatggcagccacacctgg

SEQ ID NO: 726698 - DNA, 120 bp, Artificial Sequence
  ENSG00000198324_11 (sequence is synthesized)
tagtgactggggacacaggtgcaggtgttagtgcaggaccggaagggtgaggtggcctggtcctcggggctcctggcctgggctggctgaggcaggactctgccaaaagtcccctgccag

SEQ ID NO: 726699 - DNA, 120 bp, Artificial Sequence
  ENSG00000198324_12 (sequence is synthesized)
gcctcatggtggtgctcctggtggcagtggctctctggccgcgggccctgtctgtgtctccgtggtggctctcacagggctctccagacactccttgactgcatccttcagtcttggccc

SEQ ID NO: 726700 - DNA, 120 bp, Artificial Sequence
  ENSG00000198324_13 (sequence is synthesized)
ctaggcctggggccccttgggagcttgcctgacctcccttcctgggctgggtagccatggcccgaggtgaccttctagcaggttcccccagggaggggaggccaccagctgactcaccgc

SEQ ID NO: 726701 - DNA, 120 bp, Artificial Sequence
  ENSG00000198324_14 (sequence is synthesized)
ctaggaaggcccaggtgctgacctagtggcggagaaaaagccgcacaccgagtgtggcttccagagcccctcttcagctccaggcagccccctctaacatgtcccctcctgagctcagcc

SEQ ID NO: 726702 - DNA, 120 bp, Artificial Sequence
  ENSG00000198324_15 (sequence is synthesized)
cccacccccatactcctggtggggaccaggtcttgcttggcttcggggctgaccgccggtcccctttcttctcaccacagtgcccatttttcatccagggagaacctcggggctgggaca

SEQ ID NO: 726703 - DNA, 120 bp, Artificial Sequence
  ENSG00000198324_16 (sequence is synthesized)
cctcctggccctcaccctgggtcatgtttacagtcctcagtgccccacaccggtggccccctgaggacacctccaccctgaccttgattttcccaaacgctgcctcttggtgacagactc

SEQ ID NO: 726704 - DNA, 120 bp, Artificial Sequence
  ENSG00000198324_17 (sequence is synthesized)
agcccaaaaccccttccttctgtctctggagacccttgagcttggggaaatatggaggggtgtgtgtctgcaatcaaggcctctgcagctcacggctggcccggtgggctgggacttccg

SEQ ID NO: 726705 - DNA, 120 bp, Artificial Sequence
  ENSG00000198324_18 (sequence is synthesized)
tctgaattttaaatacttagggttcatttttttttctctggcaacaaagcttgatgttttcactgctttagtttcctgtttgctggtgggaggggatacggtctgtgactctggacttgc

SEQ ID NO: 726706 - DNA, 120 bp, Artificial Sequence
  ENSG00000198324_19 (sequence is synthesized)
tctgggggaacagttgtcactgcccccggggagaggggcagcttgggctggagaagcacagccagagacagagcccctcgagagggatccttggctgcttcattgtcttccccccagcaa

SEQ ID NO: 726707 - DNA, 120 bp, Artificial Sequence
  ENSG00000198324_20 (sequence is synthesized)
gccctgctctccacaggcacctctggggtcttggtatggtccccgctcacctccttccagagtcctgagtggtgtgggtgtgggtggcacaggatctggggcatgggaggggttcagagc

SEQ ID NO: 726708 - DNA, 120 bp, Artificial Sequence
  ENSG00000198324_21 (sequence is synthesized)
ttcccagagccccgtgtcctggcagactcagctggtgggctggggtgttaaccccagtcctggcgtaggtttacagactctcaaggtacgttggccctggtctcctgggagagaggggtg

SEQ ID NO: 726709 - DNA, 120 bp, Artificial Sequence
  ENSG00000198324_22 (sequence is synthesized)
agggatgtcccctaccaaagcacaaggtgggatcaggctgcctcctgggttgggtgtcgggggagctgtccggcagcctggcagggagatgcaagggctaaagtaaaattttgtcaagta

SEQ ID NO: 726710 - DNA, 120 bp, Artificial Sequence
  ENSG00000198324_23 (sequence is synthesized)
aacattatttcagggatacaggagggtaggaggttatgaggctgtctggggaggcccgtgagacccaggccccaggctcccctccaggccccgcgattgccaccatgaagctgaacgagc

SEQ ID NO: 726711 - DNA, 120 bp, Artificial Sequence
  ENSG00000198324_24 (sequence is synthesized)
gcccgtgggtcgcggactgtccggttgctcccgcctccttccgtcggatccgcgctctcccgcggctgcgccggcccggccgcccaggagacaaagcgctgccgccgccgtcgccgccac

SEQ ID NO: 726712 - DNA, 120 bp, Artificial Sequence
  ENSG00000198324_25 (sequence is synthesized)
gccgccaccgggccagtcccgaaccatggccgggccaccccgcaacctcgcgcctcccgtcccgtcgccgccctaggcctgcgctgcgagatgcagaaacagaggcccagagagatgaat

SEQ ID NO: 726713 - DNA, 120 bp, Artificial Sequence
  ENSG00000198324_26 (sequence is synthesized)
agcctgcctggggtcccccagcccagatgctgcagagctgacatttgaatccagagaagagcgagctgaggctggagctgagcagagggcagggaggcaagtggtggcctgagagtttgc

SEQ ID NO: 726714 - DNA, 120 bp, Artificial Sequence
  ENSG00000198324_27 (sequence is synthesized)
ggacatgatctcattcctttttatggctggatagttttccatggccccaggctcccctccaggccccgcgattgccaccatgaagctgaacgagcgcagcctggccttctacgccacctg

SEQ ID NO: 726715 - DNA, 120 bp, Artificial Sequence
  ENSG00000198326_0 (sequence is synthesized)
agatgagagtggggacttggatctgcctgccaggccgtcctgggcgctgcaggaagcaacatgacttaggtaactgcccagaggtgcaccagacatgatgcagcagccgcgagtggagac

SEQ ID NO: 726716 - DNA, 120 bp, Artificial Sequence
  ENSG00000198326_1 (sequence is synthesized)
agataccatcggggctggcgaggggccacagcaggcagtgccctggtcagcctgggtcacgaggcatggctgggtgcgctggtgggtgagccacatgcccccgagctggatccagtggtg

SEQ ID NO: 726717 - DNA, 120 bp, Artificial Sequence
  ENSG00000198326_2 (sequence is synthesized)
gcactcttcaccactggctcccacctgctgagctccttgtggcctgtcgtggccgcggtgtggcgccacctgctaccggctctcctgctgctggtgctcagtgctctgcctgccctcctc

SEQ ID NO: 726718 - DNA, 120 bp, Artificial Sequence
  ENSG00000198326_3 (sequence is synthesized)
ttcacggcctccttcctgctgctcttctccacactgctgagccttgtgggcctcctcacctccatgactcacccaggcgacactcaggatttggatcaatagaagggcaaccccatccca

SEQ ID NO: 726719 - DNA, 120 bp, Artificial Sequence
  ENSG00000198326_4 (sequence is synthesized)
acaaaggggctcctctggggagggtgggggtagatgagagtggggacttggatctgcctgccaggccgtcctgggcgctgcaggaagcaacatgacttaggtaactgcccagaggtccca

SEQ ID NO: 726720 - DNA, 120 bp, Artificial Sequence
  ENSG00000198326_5 (sequence is synthesized)
ttggcagggcccagacccctagtccctaacaggtagactggcctgaccccggactccttcctcaagtcaatgctgcaggttcctggtgtgaggggctgggggctttgagaagagggggca

SEQ ID NO: 726721 - DNA, 120 bp, Artificial Sequence
  ENSG00000198326_6 (sequence is synthesized)
agacagatggcttagccattggtgaaaattgcttagccaggggcagagcttgaccaagccactgatagcgcccatatggatgtgatgatacccgtggggcccccttggcaactgacagca

SEQ ID NO: 726722 - DNA, 120 bp, Artificial Sequence
  ENSG00000198326_7 (sequence is synthesized)
tctttttctcatagccactcagctgtctcagcttcagactcactgagaacttctacctgggtaccactggccttgccattcctcccaccaatcccctctttccacttccaggagaaccac

SEQ ID NO: 726723 - DNA, 120 bp, Artificial Sequence
  ENSG00000198326_8 (sequence is synthesized)
agactctagagagggtcccagtgacaaaaatctatcagggagaaggctggccagaagccccaggagacctcaactcactcgctctccaaaccttgcagcccacgcatcctcctccctaga

SEQ ID NO: 726724 - DNA, 120 bp, Artificial Sequence
  ENSG00000198326_9 (sequence is synthesized)
cttcctacttcctgcctcagtctgcatccccaagtctgagaaatgggccaactggggtcagacagcacctactcactctctaagaatcccaaggtctgttatggaaaaatgatcaagaaa

SEQ ID NO: 726725 - DNA, 120 bp, Artificial Sequence
  ENSG00000198326_10 (sequence is synthesized)
tcccatttcacccacttacacaatgtgtggccttggccaattaattcatttgagcctcaatgttacgtgggccacttctgtcatggggttgttgtgagtcaaagacaatatctatttgtg

SEQ ID NO: 726726 - DNA, 120 bp, Artificial Sequence
  ENSG00000198326_11 (sequence is synthesized)
aagcattttgtagaagccaaaaacctgtaagatgttgttttgagctctaagaactttctgtaggcgcataagatcttttgaccccaaagactgttgaaggaacaggaagcttctctgggc

SEQ ID NO: 726727 - DNA, 120 bp, Artificial Sequence
  ENSG00000198326_12 (sequence is synthesized)
tttcagatcaactctctgtcctggatagaattttggccctaaaatggtaaacaagaggtcggttaagtgtgtacaagatgtaaaaggtcatgtgccatgaaatctcaaaatgtgcagatg

SEQ ID NO: 726728 - DNA, 120 bp, Artificial Sequence
  ENSG00000198326_13 (sequence is synthesized)
ttgaactattttgattatgaaatgcttgggcctggggctgggtgccagatgcttgcacagctgtgtgagtggggacagcacagccccagggtttccaaaactgacccagcaagccgctca

SEQ ID NO: 726729 - DNA, 120 bp, Artificial Sequence
  ENSG00000198326_14 (sequence is synthesized)
ggcaccagaagggctttggaaagggcaatcctttgatgccctgaatgctggccgttcgttcacttgctggcccctccaacaaaacattgagtgatcggtaattaccaagtaaggtacatg

SEQ ID NO: 726730 - DNA, 120 bp, Artificial Sequence
  ENSG00000198326_15 (sequence is synthesized)
ctcctgcccagttctgatccctgctttatgtataaccctaaaatccttgctcttgaagccccagacccaaggtccccctcttttgtcccataaatactcagggccttggggctagcccct

SEQ ID NO: 726731 - DNA, 120 bp, Artificial Sequence
  ENSG00000198326_16 (sequence is synthesized)
agaaccctggttcatttttgccttagacttttgcaaccctccatgccacggattagatgccttcagcatcagtgccaaaacccaaggtccagtccttcctttctgtttctttgtatttct

SEQ ID NO: 726732 - DNA, 120 bp, Artificial Sequence
  ENSG00000198326_17 (sequence is synthesized)
cccgcattatggcatggtagtgagagcgaggtaggacatggggctgatgtggtctcatggttggatgggttttggtgcatgagctgaggctgggcgtgagtcccagcactctcacttact

SEQ ID NO: 726733 - DNA, 120 bp, Artificial Sequence
  ENSG00000198326_18 (sequence is synthesized)
aactccatgcccttagtggaaatcgctaaaccttcctcaacttcactttcctcatgggtaaaactaaggcaagaacccctgtcttagggctctggcatgtgagtgaaggacctgggacca

SEQ ID NO: 726734 - DNA, 120 bp, Artificial Sequence
  ENSG00000198326_19 (sequence is synthesized)
ctcctagcaccacaaattatagctatgctgtgaccatcccattttagagatgagaagtcaggcccaggatagccagttgccagtggcaaggccaggccatctgagtcctaccaggctact

SEQ ID NO: 726735 - DNA, 120 bp, Artificial Sequence
  ENSG00000198326_20 (sequence is synthesized)
caagggaaggtgaagggggcaaaggaaacacaaacaacctaactaactgaagaccccaaggcttctcaagagctcctatcagagctaaagcccaggcctagggaagtcatgagtcaagcc

SEQ ID NO: 726736 - DNA, 120 bp, Artificial Sequence
  ENSG00000198326_21 (sequence is synthesized)
aatctagatggcaagctgaggattcaggatcccatgtggtgagggcagagaccaggctgcctggcctagatccatcattgacttggccatgcattgctagccagggacgttgctctggag

SEQ ID NO: 726737 - DNA, 120 bp, Artificial Sequence
  ENSG00000198326_22 (sequence is synthesized)
ccttgggtccattccaatgaagggagagaggagtttggggccctgaccagatgctctagtggatgggatgtgggcagcagcaaggagaagaccttcttcctttccccacagactatatac

SEQ ID NO: 726738 - DNA, 120 bp, Artificial Sequence
  ENSG00000198326_23 (sequence is synthesized)
cttttaccctcctgcccagctggtatggggtaaggaggtgcacccagactagagagctgatgggcaatactcatcaaattagatccacatataccctaggacccagaaccccagaatgaa

SEQ ID NO: 726739 - DNA, 120 bp, Artificial Sequence
  ENSG00000198326_24 (sequence is synthesized)
ttttcacagaggtccataagggccttgcccctcaaaatgtagtcccagaatcagcaacacaggcatcacctggaagctggttggaaatacagtctcaggccctgctccagacaggccgaa

SEQ ID NO: 726740 - DNA, 85 bp, Artificial Sequence
  ENSG00000198326_25 (sequence is synthesized)
gcctgcattttaacaagattcccaggtgatacattgtaccctgtttgagaagtgaagcataagggggtattatgagaatgcctat

SEQ ID NO: 726741 - DNA, 120 bp, Artificial Sequence
  ENSG00000198326_26 (sequence is synthesized)
tgagaagtgaagcataagggggtattatgagaatgcctattgcactgttactagtgggagcaggataggtaaagggaagggtaaaacaaggcagatgggcccaaggggcagtaattagaa

SEQ ID NO: 726742 - DNA, 120 bp, Artificial Sequence
  ENSG00000198326_27 (sequence is synthesized)
ggggcagaaggtacatgaaccaatcttaaaatcttagcattgaaaaagaaatggaatgagaatacaattcctcttacacaaatttaaaagcatgtcagcaaaacaagacaatttttggca

SEQ ID NO: 726743 - DNA, 120 bp, Artificial Sequence
  ENSG00000198326_28 (sequence is synthesized)
agaacacataaaaacgaaagataaacagaatggaatggacaactctaggggcaggcaagtgggagtagggtatagagataacaggcaataaagctagagagcttgcagaggcgaaacgtg

SEQ ID NO: 726744 - DNA, 120 bp, Artificial Sequence
  ENSG00000198331_0 (sequence is synthesized)
gagcgagactctgtctcaaaaaaaaaagagtggttaacaagcatgatgatacaaccagttgaaagcaatatttgagttcataaagaagttgatgagttgataaaccaacaacacctaatt

SEQ ID NO: 726745 - DNA, 120 bp, Artificial Sequence
  ENSG00000198331_1 (sequence is synthesized)
aattggggaaagcataaggaagagagctgtgttgcaatcaaaaggttttttttttacttgaatgtaaataccaatcaagatacattgaaataaggacctgaaggtggcaagacagtagaa

SEQ ID NO: 726746 - DNA, 120 bp, Artificial Sequence
  ENSG00000198331_2 (sequence is synthesized)
agcaggagtaagagtggaaatgaaagcagaaggtcctacagtgtaggggaagcaatggaagaacttctacctgatggacaaatatgggctaatatggatccagaagaacgaatgttggca

SEQ ID NO: 726747 - DNA, 120 bp, Artificial Sequence
  ENSG00000198331_3 (sequence is synthesized)
gctgctacagcttttacccacatctgtgcagggcagggtgaaggagatgtcaggagagaagcccaatctatccaatatgatccctacagtaaagcttcagtagccccagggaagcgacct

SEQ ID NO: 726748 - DNA, 120 bp, Artificial Sequence
  ENSG00000198331_4 (sequence is synthesized)
gctcttcctgtgcaactacagtacccacatgtagaaagtaatgtcccttcagaaacagtctctgaggcctcccaaagactccgaaagccagtgatgaagagaaaggtgctgcgcagaaag

SEQ ID NO: 726749 - DNA, 120 bp, Artificial Sequence
  ENSG00000198331_5 (sequence is synthesized)
aagtattagtaacagatgagtcgattatcagtgaatcagaatctggtacagaaaatgatcaggatctctgggacttaagacaaaggctgatgaatgtacagttccaggaagacaaggaat

SEQ ID NO: 726750 - DNA, 120 bp, Artificial Sequence
  ENSG00000198331_6 (sequence is synthesized)
cttcatttgatgtttcacaaaaatttaacctaccacatgaataccaaggaatttctcaagatcagctcatttgctctctacaaagagaaggaatgggctctccagcttacgaacaagacc

SEQ ID NO: 726751 - DNA, 120 bp, Artificial Sequence
  ENSG00000198331_7 (sequence is synthesized)
tgattgttgccagcagacccaagtcctttattctcccaaagctggaccagttaagccgaaaccggggcaagacagaccgggtagcccggtattttgagtacaaacgggactgggactcaa

SEQ ID NO: 726752 - DNA, 120 bp, Artificial Sequence
  ENSG00000198331_8 (sequence is synthesized)
tacgtttacctggtgaagatcatagaaaggaattacgctggggtgtccgagagcagatgctttgtcgagcagaaccccaatccaaacctcagcatatatatgtcccaaacaattatctag

SEQ ID NO: 726753 - DNA, 120 bp, Artificial Sequence
  ENSG00000198331_9 (sequence is synthesized)
taccaacagagaagaaaaggtctgcactccgttggggtgttcgttgtgaccttgcaaatggtgtcatacccaggaagcttcccttccctctttctccttcttaaatctttttaaacttct

SEQ ID NO: 726754 - DNA, 120 bp, Artificial Sequence
  ENSG00000198331_10 (sequence is synthesized)
ttcacaggattgtttgagataacctagctctttatatcttcccttttaaatagaaacaactgtcttgagaagctcttcgaaacattttatggtaaggacttcacctatcattggtctttc

SEQ ID NO: 726755 - DNA, 120 bp, Artificial Sequence
  ENSG00000198331_11 (sequence is synthesized)
ctagctatatatcacattggtatcagatgatacttccaaattgccactcaaatccagcaattgcaagataaatcatatcagagaaagaacaacagacctggtctttctattttgtcaaat

SEQ ID NO: 726756 - DNA, 120 bp, Artificial Sequence
  ENSG00000198331_12 (sequence is synthesized)
tagtaagggccctttgtgtcctgtaactttttttacctatcaatatgagttgctgtgcttcagtgtgtgttttttaagttgctgggcattacacttaccaattaaagaattttggaaatt

SEQ ID NO: 726757 - DNA, 120 bp, Artificial Sequence
  ENSG00000198331_13 (sequence is synthesized)
gcagccacgggtcacgccagggccctgcacaccatgcagaggaaaggaagagctcagtgcgccagggtttcatacagccgctctctcaggccccaaggaaacgtctagagcgcacaggcg

SEQ ID NO: 726758 - DNA, 120 bp, Artificial Sequence
  ENSG00000198331_14 (sequence is synthesized)
gactcaccccagactgttcgaaccgtccctgagcgcccgccctcgtctcccggcaccactggccccgcagcagccagttgagaagggcggaggctgattccaatgaagtggcagaccgtt

SEQ ID NO: 726759 - DNA, 120 bp, Artificial Sequence
  ENSG00000198331_15 (sequence is synthesized)
aggcggcctctccaaaaagccagctatgtcgccgttagccaaggtttgagggtcttctccttctcttcgagggcccaacctcccctccagatttagtacaccagaggcgtcgcagcaacg

SEQ ID NO: 726760 - DNA, 120 bp, Artificial Sequence
  ENSG00000198331_16 (sequence is synthesized)
gctgctgcctgcgcgcctcagctaggcgggctcggatatttttaaggccacattggaaatcccgggcatgctcccgccggcggagaaggcccagacaaaatgtgcgccaatcaggataca

SEQ ID NO: 726761 - DNA, 120 bp, Artificial Sequence
  ENSG00000198331_17 (sequence is synthesized)
gacttggaggacgtttaccctcaggaccaataagagggagggcggaccgggccaagggtgccggttcgctctccggatttaaacctcagcggtcggcggttaaccgcaggctcggcgcgt

SEQ ID NO: 726762 - DNA, 120 bp, Artificial Sequence
  ENSG00000198331_18 (sequence is synthesized)
gggccggcagtgcgcctgcgcaagttacgcgaaagctaacagaatctgcggtgctctgctggcgactggcaggacgcggtgcagagagcggacttccgcgacgcgggttttttttttact

SEQ ID NO: 726763 - DNA, 120 bp, Artificial Sequence
  ENSG00000198331_19 (sequence is synthesized)
ccggaagcggagggacgcggggacctggtggctgccggcccactgcggcgggagccctcgctccttttcccaccgtcgggacggtgcagagtggcagcttccctccgtggattccaggtc

SEQ ID NO: 726764 - DNA, 120 bp, Artificial Sequence
  ENSG00000198331_20 (sequence is synthesized)
ctgcctggcgagccgtccccaacgtctgcgttcctgagggaggcggccggggcagcgtgagctacaggcgatgtgcgcggcgggccgcagcccctggaggtcacggtgtgcgctggccgc

SEQ ID NO: 726765 - DNA, 120 bp, Artificial Sequence
  ENSG00000198331_21 (sequence is synthesized)
cgccgcggtctttgccccggtggcctttctgagctcctgggccgcgcccctgggaccaggcggaggccggggacggccccagggctggaggggagtcccgaaggccgctagcgacctggg

SEQ ID NO: 726766 - DNA, 120 bp, Artificial Sequence
  ENSG00000198331_22 (sequence is synthesized)
tccaagccacgcccacggccaggcggggcgactgcgagctttgccgttgaaaggcggagcgtgtcttgtcgccttctagctgcaccttttgtggactgcagcatggaaccgtccaaggtg

SEQ ID NO: 726767 - DNA, 120 bp, Artificial Sequence
  ENSG00000198336_0 (sequence is synthesized)
ctctctggctgctccggcatatttgagaaggtctgtttccctggtccttctgggtttccaccaattggcaagaagggatcagcctgtcctagagatcactcctctgccaaagatcccaac

SEQ ID NO: 726768 - DNA, 120 bp, Artificial Sequence
  ENSG00000198336_1 (sequence is synthesized)
aagacaacatggctcccaagaagcctgagcctaagaaggaggcagccaagccagctccagctccagctccagcccctgcaccagcccctgccccagctcctgaggctcccaaggaacctg

SEQ ID NO: 726769 - DNA, 120 bp, Artificial Sequence
  ENSG00000198336_2 (sequence is synthesized)
cctttgaccccaagagtgtaaagatagacttcactgccgaccagattgaagagttcaaagaggccttttcattgtttgaccggaccccgactggagagatgaagatcacctacggccagt

SEQ ID NO: 726770 - DNA, 120 bp, Artificial Sequence
  ENSG00000198336_3 (sequence is synthesized)
gcccaagcctgaagagatgaatgtcaagatgctggactttgagacgttcttgcccatcctgcagcacatttcccgcaacaaggagcagggcacctatgaggacttcgtggagggcctgcg

SEQ ID NO: 726771 - DNA, 120 bp, Artificial Sequence
  ENSG00000198336_4 (sequence is synthesized)
tgtctttgacaaggagagcaatggcacggtcatgggtgctgagcttcggcacgtccttgccaccctgggagagaagatgactgaggctgaagtggagcagctgttagctgggcaagagga

SEQ ID NO: 726772 - DNA, 120 bp, Artificial Sequence
  ENSG00000198336_5 (sequence is synthesized)
tgccaatggctgcatcaattatgaagcctttgtcaagcacatcatgtcagggtgaagcagagtcttccaggtgcctggcccttggctttagccataccagggtgagttaaagagaggccc

SEQ ID NO: 726773 - DNA, 120 bp, Artificial Sequence
  ENSG00000198336_6 (sequence is synthesized)
cggctgggtgagctgagatggagtcctcgacttatcaccacaccactgccccaaggaccttacaggccctccctgttaataaacagctctaacacggccaggctgggctctgggattctg

SEQ ID NO: 726774 - DNA, 120 bp, Artificial Sequence
  ENSG00000198336_7 (sequence is synthesized)
tggttgtcttagcatcctgcattctagtctcaggtcggtcataactcagtgtgacgttgggcaagtcacccccttctctctggacctctgaagttccttgtagctgttagcatatctggg

SEQ ID NO: 726775 - DNA, 120 bp, Artificial Sequence
  ENSG00000198336_8 (sequence is synthesized)
ccatgtgccctagaaggcatctgtcccagccctgaccccttaagaggaaacctcttgggatcaggaagtgaggacagccctgctcactcaccatctcctgtctcctgcctgcccttgcct

SEQ ID NO: 726776 - DNA, 120 bp, Artificial Sequence
  ENSG00000198336_9 (sequence is synthesized)
gttcaccctgtcttgaccctatcagtcacatcctcttgcctctcccaggatctctcaaggcaatgcccttccctcaggcctggggcctcctgtacaggctcctgggagtgagaaagccga

SEQ ID NO: 726777 - DNA, 120 bp, Artificial Sequence
  ENSG00000198336_10 (sequence is synthesized)
tcccaagtggaagagaaggtccctggcctgtgctcttgaccccgttcttcctcacttctttccctaggttttccctgggatccccctgggtgtggtaaggggctgggtctaggagggtga

SEQ ID NO: 726778 - DNA, 120 bp, Artificial Sequence
  ENSG00000198342_0 (sequence is synthesized)
ggagctttctacacccctctgagctcccgctcctggctctgtagctgagagaagccctggcaggtcagtggcaggcactgtcacgctgagtcctatgctggcagcggggaaccttgggga

SEQ ID NO: 726779 - DNA, 120 bp, Artificial Sequence
  ENSG00000198342_1 (sequence is synthesized)
gaacacgggacaccgcggaagccgggaaatgattgtgcggctgtaaccggcacaggttcgcggtccgagtcactgcaccgagactccaaggcctgcagcagaaacagtttaataggggga

SEQ ID NO: 726780 - DNA, 120 bp, Artificial Sequence
  ENSG00000198342_2 (sequence is synthesized)
gaggagagaagaccccagttccgcctccatgagaggtttggggatgggggtgtttaggggtctggacaggggcggctgaagtgtggggtcgctggttggtggggaagtgacaggcgaatc

SEQ ID NO: 726781 - DNA, 120 bp, Artificial Sequence
  ENSG00000198342_3 (sequence is synthesized)
ctgggacgggaggtgaagaaaccgcattctcctgctgagtgggttccctcgtggggttttcaccctgcttggcgccagcctttccgttggaattcaagatctgagaaagaacttgggcaa

SEQ ID NO: 726782 - DNA, 120 bp, Artificial Sequence
  ENSG00000198342_4 (sequence is synthesized)
ctcgagcagctctccgagatcttatccccaggcacaatgcagaagccggcggtcagtgtcttctgtgacctgactctcaggaaggcggcccccgcgaggcagtggggctcaggtttccat

SEQ ID NO: 726783 - DNA, 120 bp, Artificial Sequence
  ENSG00000198342_5 (sequence is synthesized)
tccttggggacacacggctggtcagccagttgaatgattgtatttgggggagaagacagaagtgatctcttccttcctgactctcagactaatgaagagagaaaacaatatgattcagta

SEQ ID NO: 726784 - DNA, 120 bp, Artificial Sequence
  ENSG00000198342_6 (sequence is synthesized)
gcctttgaggatgtggcggtgaacttcacccaggaagagtgggctttgctgggtccatcacagaagagtctgtacagagatgtgatgtgggaaaccattaggaacctggactgtatagga

SEQ ID NO: 726785 - DNA, 120 bp, Artificial Sequence
  ENSG00000198342_7 (sequence is synthesized)
atgaaatgggaagacacaaacattgaagatcagcacagaaatcccaggaggagcctaagatgtcatatcatagagagatttagtgaaagtcgccagccagatagtactgtgaatgaaaaa

SEQ ID NO: 726786 - DNA, 120 bp, Artificial Sequence
  ENSG00000198342_8 (sequence is synthesized)
cctcctggagtagatccatgtaaaagcagtgtgtgtggagaaatcatgggttgttcattccttaattgctatatcacatttgatgctggacacaaaccagatgagtgtcaggaatatgga

SEQ ID NO: 726787 - DNA, 120 bp, Artificial Sequence
  ENSG00000198342_9 (sequence is synthesized)
gagaagccacatacacataaacaatgtgggacagccttcaattatcaccactcctttcaaacacaggaaagacctcacactggaaagaaacgctatgattgtaaggaatgtgggaaaacc

SEQ ID NO: 726788 - DNA, 120 bp, Artificial Sequence
  ENSG00000198342_10 (sequence is synthesized)
ttcagttcttcgggaaaccttcgaagacacataatagtacaacgtggaggtggaccttatatatgtaagttgtgtgggaaagcctttttttggcctagtttatttcgtatgcatgaaaga

SEQ ID NO: 726789 - DNA, 120 bp, Artificial Sequence
  ENSG00000198342_11 (sequence is synthesized)
acactggagagaaaccgtatgaatgtaagcagtgttgtaaagccttccctatttacagttcctatctaagacatgaaagaacacacactggggagaaaccatatgaatgcaagcactgtt

SEQ ID NO: 726790 - DNA, 120 bp, Artificial Sequence
  ENSG00000198342_12 (sequence is synthesized)
tgttccaaagccttccctgattacagttcctatgtaagacatgaaagaactcacactggagaaaaaccctataaatgtaaacgatgtggaagagccttcagtgtttccagttcccttcga

SEQ ID NO: 726791 - DNA, 120 bp, Artificial Sequence
  ENSG00000198342_13 (sequence is synthesized)
atacatgaaagaactcacactggagagaaaccctatgaatgcaagcaatgcgggaaagcatttcatcatctgggaagctttcaaagacacatgataaggcacactggagatggacctcat

SEQ ID NO: 726792 - DNA, 120 bp, Artificial Sequence
  ENSG00000198342_14 (sequence is synthesized)
aaatgtaagatatgtgggaaaggctttgattgtcctagttcactgcaaagtcatgaaagaactcacactggagagaaaccctatgaatgcaagcagtgtgggaaagcgttatctcatcac

SEQ ID NO: 726793 - DNA, 120 bp, Artificial Sequence
  ENSG00000198342_15 (sequence is synthesized)
tcaagctttcgaagtcatatgataatgcacactggagatggacctcacaaatgcaaggtatgtgggaaagccttcatttatcccagtgtatttcaaggacatgaaaggactcatactggt

SEQ ID NO: 726794 - DNA, 120 bp, Artificial Sequence
  ENSG00000198342_16 (sequence is synthesized)
gagaaaccctatgaatgtaaagaatgtggtaaagccttccgtatttctagttcccttcgaagacatgaaacaactcacactggagagaaaccctataaatgtaaatgtgggaaagccttt

SEQ ID NO: 726795 - DNA, 120 bp, Artificial Sequence
  ENSG00000198342_17 (sequence is synthesized)
attgatttctattcctttcaaaatcatgaaacaactcacactggagagaagccatatgagtgtaaggaatgtgggaaagcattcagttgtttcacatacctttctcaacatagaaggact

SEQ ID NO: 726796 - DNA, 120 bp, Artificial Sequence
  ENSG00000198342_18 (sequence is synthesized)
cacatggctgaaaaaccttatgaatgtaaaacatgtaagaaagccttcagtcattttggtaacttaaaagtccatgaaaggattcacactggagagaagccatatgaatgtaaggaatgc

SEQ ID NO: 726797 - DNA, 120 bp, Artificial Sequence
  ENSG00000198342_19 (sequence is synthesized)
aggaaagcattctcttggctcacttgccttctgcgacatgaaagaattcacactggaaagaaatcttatgaatgtcaacaatgtggtaaagccttcactcgttctcgtttccttcgagga

SEQ ID NO: 726798 - DNA, 120 bp, Artificial Sequence
  ENSG00000198342_20 (sequence is synthesized)
catgaaaaaactcacactggagagaagatgcatgaatgtaaggaatgtgggaaggcactgagttctctcagttccttgcatagacataaaaggactcactggagagatactctataaatg

SEQ ID NO: 726799 - DNA, 120 bp, Artificial Sequence
  ENSG00000198342_21 (sequence is synthesized)
tggaaaagcattcattaattttatttcatttcagaaacgtgaaagaaatcacataggagataagcctcatgaatgcaaacacatggtaaagccttaagatgtttcttttgaatatggtta

SEQ ID NO: 726800 - DNA, 120 bp, Artificial Sequence
  ENSG00000198342_22 (sequence is synthesized)
tcccctaaccatatgcaggggattggttccagaccccctaagcatacctaaatccacagatgctgtgttccttttataaaaggacatttgcatgtaacctatccacatcctcctgcatcc

SEQ ID NO: 726801 - DNA, 120 bp, Artificial Sequence
  ENSG00000198342_23 (sequence is synthesized)
cataaatcatgcctagattacttaatttttcaccaacccaaagcttttgtaaaagtaaaaataaaaagtaggttactaaaatacctcatgtgttgtaaaagctatgtaaacagtcatttt

SEQ ID NO: 726802 - DNA, 120 bp, Artificial Sequence
  ENSG00000198342_24 (sequence is synthesized)
attgtattttttttagagaatcgtgatatgaaaataatcctgtgctgttgagaacagacccaaccatcacaggcctgcctacatagtacatgtcacctagaatgttacagtttctttttt

SEQ ID NO: 726803 - DNA, 120 bp, Artificial Sequence
  ENSG00000198342_25 (sequence is synthesized)
gtgctgggattacaggcatgagcctgtaatctacagtttcttttttttcaacaatcatagattgcttttatttaatgacctggaatcgtgtgttaacacttatgaaaatcctgatccttc

SEQ ID NO: 726804 - DNA, 120 bp, Artificial Sequence
  ENSG00000198342_26 (sequence is synthesized)
gatccttcttgcttgataacccaaggatgatgatgatgatcatgatcatgatgatgctgattacagtatggtgcctaatatgattcactgaggtgactagatgggtggcactgtagataa

SEQ ID NO: 726805 - DNA, 120 bp, Artificial Sequence
  ENSG00000198342_27 (sequence is synthesized)
acagtgagacatcaggctcacttgaatcttgacaggatgtcaggatgatcatctgtgttggatgaaccaggttctgattgcagatgctgagtttggaagagactaaataatactaatgtc

SEQ ID NO: 726806 - DNA, 120 bp, Artificial Sequence
  ENSG00000198342_28 (sequence is synthesized)
agaatctgttcagcatgagggctgaagatgtgtacacactgaaggatctgtcttcatatttgcagatatttagttagaaacattgttgtaggaagctggttctttttctttaaatatcct

SEQ ID NO: 726807 - DNA, 120 bp, Artificial Sequence
  ENSG00000198342_29 (sequence is synthesized)
tgcagtgtttgttggcatgttatcccttgggtgacacagaggttttgttccattgaaggatcttacttgaggatggcaatctttattttatttttatttttatttatttatttatcattt

SEQ ID NO: 726808 - DNA, 120 bp, Artificial Sequence
  ENSG00000198342_30 (sequence is synthesized)
tgagattacaggcatgagccaccgtgccctgcgaggattgtaatctttaatacttttcaccttgcagaggctgtagatgccccaaaaactgctgcacatgtttcaagtgtcacatctttg

SEQ ID NO: 726809 - DNA, 120 bp, Artificial Sequence
  ENSG00000198342_31 (sequence is synthesized)
catctttgatattacctcttctaagtcttctgcatcatcattatcatcattatctgcagagaatttcagtatatcttcgagttccttgttagtatttatgctctcttatttgtgttggga

SEQ ID NO: 726810 - DNA, 120 bp, Artificial Sequence
  ENSG00000198342_32 (sequence is synthesized)
tagaaagattaaggaaaggagagatgagaaggtggctcaacagttgagacagttttattgggagtaaacctgagaagggcttccagcggcagggtcaggtgcaaacttctcttacagcct

SEQ ID NO: 726811 - DNA, 120 bp, Artificial Sequence
  ENSG00000198342_33 (sequence is synthesized)
gaggcttttttaaagggcccagtggagaagtgtgctttgaaacaaaattctgttagggaggggttggggaagtcctggctgttctgttacagttagggccgttattctctgttgaagtta

SEQ ID NO: 726812 - DNA, 120 bp, Artificial Sequence
  ENSG00000198342_34 (sequence is synthesized)
tgggcggggctgacattttcagttttggccaggtggccaaatagaaacttaaagcttaggatggtggagtgttataaagatggcggtgctcttgtcctgtcaatgtgttcctcaataaag

SEQ ID NO: 726813 - DNA, 120 bp, Artificial Sequence
  ENSG00000198342_35 (sequence is synthesized)
tcttcaagcatgtcatagattgttttccccaccaacctcccttgcagcatttgagatattcctgatacttcatcaatagtggagaagctcctgaaatcattgacttcctcactccataat

SEQ ID NO: 726814 - DNA, 120 bp, Artificial Sequence
  ENSG00000198342_36 (sequence is synthesized)
ggtttccaacacccaatgaagtagtaggaggaaaacatgggtttcttctcctggaagcctccagaagaaggtatttcaatatggggagagtggtcagctgtgtcacaggtcactgagaat

SEQ ID NO: 726815 - DNA, 120 bp, Artificial Sequence
  ENSG00000198342_37 (sequence is synthesized)
ttgaataagacaaggaaaaagggttgactgtagattttggcaagtatttggtcactgggggccttgataagagctgtttcattgaagtattcatgagaataacttgtagtgaaatatatc

SEQ ID NO: 726816 - DNA, 120 bp, Artificial Sequence
  ENSG00000198342_38 (sequence is synthesized)
tcaaatagacctccacgatgttgcctagagggcagtgttaccctttgaactaccaacattaaccactggaactgctcatctggaagcctcttacagtgctggtacaaactagaatacaca

SEQ ID NO: 726817 - DNA, 120 bp, Artificial Sequence
  ENSG00000198342_39 (sequence is synthesized)
aaggaagggatcattttatacgtgttactgtgctacttgctctatctacttagtgttccatacatgtaattacctattccatcctatcccaaagtactgaaaatctccattctactttct

SEQ ID NO: 726818 - DNA, 120 bp, Artificial Sequence
  ENSG00000198342_40 (sequence is synthesized)
ctgtctgtgaatttgactattcatagagagagagatatgtggaagtatgcatgtgtccttccatgtctggcttatttcacttagaacgttttcaaggtttatccatgtggtagcatgtat

SEQ ID NO: 726819 - DNA, 120 bp, Artificial Sequence
  ENSG00000198342_41 (sequence is synthesized)
caggaactcattgtttttgtgtctgaataaatttccactgtatggttaaagcatactttgtttatccatttttatgttgataaacatgggttgtttccacagtaataatttgactgctat

SEQ ID NO: 726820 - DNA, 120 bp, Artificial Sequence
  ENSG00000198342_42 (sequence is synthesized)
caataaggctgctgtggatgtggtatgtctatgtctgtgtgagtccctgctttcaattcttttggatatatgtatccctaggagtgtaattgctggttcacagaataattggtgtaaacc

SEQ ID NO: 726821 - DNA, 120 bp, Artificial Sequence
  ENSG00000198342_43 (sequence is synthesized)
tttttcaggaacaggtatattgctttacaaagtggctacaatgttttacattctctccagcaatgcataagggtttctattttccacattgtcacatatactggttgtcgtatttttttc

SEQ ID NO: 726822 - DNA, 120 bp, Artificial Sequence
  ENSG00000198342_44 (sequence is synthesized)
ggttttgatttgcatttccctaatgaccaataataatgcacattggtttttgtttttgttggttgtttatatattttttgaaccagtttgttttaaaatcctttgctcattaaaattgag

SEQ ID NO: 726823 - DNA, 120 bp, Artificial Sequence
  ENSG00000198342_45 (sequence is synthesized)
aaccagtttgttttaaaatcctttgctcattaaaattgagtcatttgtgttttgttgttgagttataggaattcttatttaaaatttttagtttttaatatttagaaaatttctttcttt

SEQ ID NO: 726824 - DNA, 120 bp, Artificial Sequence
  ENSG00000198342_46 (sequence is synthesized)
tttcagctcccaagtgcttggaagagagttgtaggaattctttatacactgtgggtattaagcccttatttgatatgtgatatgcagatgtgttctccctttctgtaggttttcttttca

SEQ ID NO: 726825 - DNA, 120 bp, Artificial Sequence
  ENSG00000198342_47 (sequence is synthesized)
tcttgagattgtcctttggtgcgcaaaagtttttaatttcgatgtagtccagtttatcttttattggttgtctgtgccttaaatgtcgtatccaataaatcactgccaaatttaacaaaa

SEQ ID NO: 726826 - DNA, 120 bp, Artificial Sequence
  ENSG00000198342_48 (sequence is synthesized)
aaatcccaggaggagcctaaggtaatttgcactcacaagagaaagacatatatctgtggagcaattcttaggatgacaggaaattatacaactaggcaaagaaaatgaacgagcccagta

SEQ ID NO: 726827 - DNA, 120 bp, Artificial Sequence
  ENSG00000198342_49 (sequence is synthesized)
caaacttatttattcctatacaattttctccagaaacatatacttaaatgtgatataactattcagtgtttgcaaaaatagttcccttagaaacaatattaagaattcggctgggcacgg

SEQ ID NO: 726828 - DNA, 120 bp, Artificial Sequence
  ENSG00000198346_0 (sequence is synthesized)
gcagattcgcgaaaacccggaagcggatcgcgtggagtgacggtcccacggcagcgcgattgacttctaaagactcttggtatgtgaggaagaaacctggaagaggaagaggaaagcaaa

SEQ ID NO: 726829 - DNA, 60 bp, Artificial Sequence
  ENSG00000198346_1 (sequence is synthesized)
tatgtgaggaagaaacctggaagaggaagaggaaagcaaaggagtcagggatggctcttc

SEQ ID NO: 726830 - DNA, 120 bp, Artificial Sequence
  ENSG00000198346_2 (sequence is synthesized)
gagaattataggaacctggtctccctggatatctcttccaaatgcatgatgaaggagttctcatcaacagcacaaggcaatagagaagtgatccacacagggacattgcaaagacatgaa

SEQ ID NO: 726831 - DNA, 120 bp, Artificial Sequence
  ENSG00000198346_3 (sequence is synthesized)
tgaaagtcatcacactggagactttcgctttcaggaaattgataaagatattcataacttagagtttcagtggcaagaagatgaaagaaatagccatgaagcacccatgacagaaatcaa

SEQ ID NO: 726832 - DNA, 120 bp, Artificial Sequence
  ENSG00000198346_4 (sequence is synthesized)
aaagttgactggtagtgcagaccgatatgatcaaaggcatgctggaaacaagcctattaaagatcagcttggatcaagctttcattcgcatctgcctgaactccacatgtttcagaccca

SEQ ID NO: 726833 - DNA, 120 bp, Artificial Sequence
  ENSG00000198346_5 (sequence is synthesized)
agggaaaattggtaatcaagtggagaagtctatcaacgatgcttcctcaatttcaacatcccaaagaatttcttgtaggcccaaaacccatatttctaataactatgggaataatttccg

SEQ ID NO: 726834 - DNA, 120 bp, Artificial Sequence
  ENSG00000198346_6 (sequence is synthesized)
gaattcttcgttactcacacaaaaacaggaggtacacatgagagaaaagtctttccaatgtaatgagagtggcaaagcctttaattatagctcactcttaaggaaacatcaaataatcca

SEQ ID NO: 726835 - DNA, 120 bp, Artificial Sequence
  ENSG00000198346_7 (sequence is synthesized)
tttaggagagaaacaatataaatgtgatgtatgtggcaaggtctttaatcggaagcgaaacctagtgtgccatcgtagatgtcacactggggagaaaccttacaggtgtaatgagtgtgg

SEQ ID NO: 726836 - DNA, 70 bp, Artificial Sequence
  ENSG00000198346_8 (sequence is synthesized)
gtcacactggggagaaaccttacaggtgtaatgagtgtggcaagactttcagtcagacgtattcccttac

SEQ ID NO: 726837 - DNA, 120 bp, Artificial Sequence
  ENSG00000198346_9 (sequence is synthesized)
caaaccttaaaagacataggagaattcatgctggagaaaaaccatacaagtgtaatgaatgtggcaagacctttagtcagacgtcatcccttacatgccatcgtagacttcatactggag

SEQ ID NO: 726838 - DNA, 120 bp, Artificial Sequence
  ENSG00000198346_10 (sequence is synthesized)
taatgagtgtggcaagacctttagtcggaagtcatcccttacatgccatcatagacttcatacgggagagaaaccttataagtgtaatgaatgtggcaagaccttcagtcaggagttaac

SEQ ID NO: 726839 - DNA, 87 bp, Artificial Sequence
  ENSG00000198346_11 (sequence is synthesized)
aaaaaggcaaaccttgcacgtcatcatagacttcatagtggagagaaaccctacaagtgtactgagtgtgtcaagacgttcagtcga

SEQ ID NO: 726840 - DNA, 120 bp, Artificial Sequence
  ENSG00000198346_12 (sequence is synthesized)
accctacaagtgtactgagtgtgtcaagacgttcagtcgaaattcagcccttgtaattcataaggctattcatattggagagaaacgttacaagtgtaatgagtgtggcaagacgttcag

SEQ ID NO: 726841 - DNA, 69 bp, Artificial Sequence
  ENSG00000198346_13 (sequence is synthesized)
agaaacgttacaagtgtaatgagtgtggcaagacgttcagtcgaatttcagccctcgtaattcatactt

SEQ ID NO: 726842 - DNA, 78 bp, Artificial Sequence
  ENSG00000198346_14 (sequence is synthesized)
taatgaatgtggcaaggtttttaatcgaaaaacacaccttgcacatcatcatagacttcatactggagaaaaagcaca

SEQ ID NO: 726843 - DNA, 120 bp, Artificial Sequence
  ENSG00000198346_15 (sequence is synthesized)
ttcatactggagagaaaccttacaagtttaatgagtgtggcaaagcttttaattgaaaagcaaagcttgcacatcatcatacaattcatactggaaagaaacaagtgcaatgagtgtggc

SEQ ID NO: 726844 - DNA, 120 bp, Artificial Sequence
  ENSG00000198346_16 (sequence is synthesized)
agtgtggcaagaccttctgtcacaattcagtccttgtaattcataagaattcatactggagagaaacaagtgtaatgaacgttgcaaaatttttaatcaacaagcacaccttccacgtca

SEQ ID NO: 726845 - DNA, 120 bp, Artificial Sequence
  ENSG00000198346_17 (sequence is synthesized)
tcatagacttcatagtggagagaaaccttagaaatgtgaagcatgtgacaaagtttacagtggcaaatcgagcctcaaaagacaggagaattcatactggagagaaagcttacaaaggtg

SEQ ID NO: 726846 - DNA, 120 bp, Artificial Sequence
  ENSG00000198346_18 (sequence is synthesized)
aagaatatcacagagttttcagtcacaagtcaaaccttgaaagacataaaataaatcatactgcagagaaaccataaaattgtaagagttcgtgacaaggctttcgggcatgactcacac

SEQ ID NO: 726847 - DNA, 120 bp, Artificial Sequence
  ENSG00000198346_19 (sequence is synthesized)
gagagaaaccttacaagtgtaatgagtctggcaaagccttaatgagcagtcaacacttactcaccatcaggcaatccatggtgaaggaaacttgactaatgtaatgattgtcaccaagtc

SEQ ID NO: 726848 - DNA, 120 bp, Artificial Sequence
  ENSG00000198346_20 (sequence is synthesized)
tgactaatgtaatgattgtcaccaagtcttcagtaacgctacaaccattgcaaatcattggagaacccataaggaagagagatcatacaagtgtaataatcggcaaatttttcagacatc

SEQ ID NO: 726849 - DNA, 120 bp, Artificial Sequence
  ENSG00000198346_21 (sequence is synthesized)
gtccataccttgcagttcattggcgaactcatactggagacaaaccttataaatgtcatgattgaggcaaggtcttcagtcaagcttcatcctatgcaaaacataggagaattcatacag

SEQ ID NO: 726850 - DNA, 120 bp, Artificial Sequence
  ENSG00000198346_22 (sequence is synthesized)
gagagaaacctcacgtgtgatgattgtggcaaagcctttacttcacgttcacacctccttagacatcagagaatgcacactggacggaaatcttacaaatgtcatcagtgtggcaaggtt

SEQ ID NO: 726851 - DNA, 120 bp, Artificial Sequence
  ENSG00000198346_23 (sequence is synthesized)
ttcagtctgacttcactccttgcagaatatcagaaaattcattttgagataattgttccaaatgcaatgagtagagcaaaccatcaagcagtaattgacattaaagtgtttatgttaaga

SEQ ID NO: 726852 - DNA, 120 bp, Artificial Sequence
  ENSG00000198346_24 (sequence is synthesized)
gcgggtagatcacttgaggtcaggagtttcagatcagtctggccaacaaacatgagccacttttcccagtttgctttttgttctttaacaaaaactgatagggatttttatgggtaccgt

SEQ ID NO: 726853 - DNA, 120 bp, Artificial Sequence
  ENSG00000198346_25 (sequence is synthesized)
gatagggatttttatgggtaccgtgttgaatctaaatcacattgggttatataatcatttaacaatattaatttttccaatccatcaatatgggttatatgtctgtatatgtttttaatc

SEQ ID NO: 726854 - DNA, 120 bp, Artificial Sequence
  ENSG00000198346_26 (sequence is synthesized)
atattgatgtatatttgtagatttcaaggtacaaacttctcacctttttacttttatttctatttctttaagttctctagcaaatggaagtgtttttaaattttcttttaaaattgttta

SEQ ID NO: 726855 - DNA, 120 bp, Artificial Sequence
  ENSG00000198346_27 (sequence is synthesized)
ttgttacaaacttctcatctttttgcttttattcctaagtatttcttactttaagttctctagcaaatggaagtgtttttaaattttcttttaaaattgtttattgttaatgtatggaaa

SEQ ID NO: 726856 - DNA, 120 bp, Artificial Sequence
  ENSG00000198346_28 (sequence is synthesized)
ttcagctaatttttggtgctgatattgtactgtgcagatacactgaatctgtttattacttccagtagtattttggttgagtctttgtgattttctacacagaagatcatgtcatctaca

SEQ ID NO: 726857 - DNA, 120 bp, Artificial Sequence
  ENSG00000198346_29 (sequence is synthesized)
aacacatataattttacttctttctttctgatttggatgggtttgatttcttttgctatttcattgctctggctaggacagccagtatttattgaatagaaggggtgagagcattcttcc

SEQ ID NO: 726858 - DNA, 120 bp, Artificial Sequence
  ENSG00000198346_30 (sequence is synthesized)
atcatgtgagatcctacaggaaaatcattccatgttccctgcttcgttatctactcgttggtcatttcatggatggcctttctattgttgaggtaaatttccttttctgtctattttgtt

SEQ ID NO: 726859 - DNA, 120 bp, Artificial Sequence
  ENSG00000198346_31 (sequence is synthesized)
cagaatttctatgatgagtggattttgaattttgtgaaatactttttctccatctattgagatgatgtggttttcatctttcattctgttcaagtggcatatcacattgatttgcttgac

SEQ ID NO: 726860 - DNA, 120 bp, Artificial Sequence
  ENSG00000198346_32 (sequence is synthesized)
tatgttgaaccatccttgcatcccagaaataagtggcacttgagtatctacagtcctttttacatcctcttgaatacagctttttagtacaaggggtcttcaagaagttcatggaaaaat

SEQ ID NO: 726861 - DNA, 120 bp, Artificial Sequence
  ENSG00000198346_33 (sequence is synthesized)
acatattttgcatattatgagaaaattgtgtatgaatttcccagtttttgcaccaaaataaactggtacgaatctgttatgtctgaacaggtcctagtttgaggcacccagaaggataag

SEQ ID NO: 726862 - DNA, 65 bp, Artificial Sequence
  ENSG00000198346_34 (sequence is synthesized)
gtctgaacaggtcctagtttgaggcacccagaaggataagacatgagttttaaaagagactttct

SEQ ID NO: 726863 - DNA, 63 bp, Artificial Sequence
  ENSG00000198346_35 (sequence is synthesized)
ctggctctatcaaagcaatataaatcctgctaaaattgaaacaaaaaggagcatcaaatttac

SEQ ID NO: 726864 - DNA, 120 bp, Artificial Sequence
  ENSG00000198346_36 (sequence is synthesized)
aagaaaagaaaagaaaagagactctatcaaagcaatataaatcctgctaaaattgaaacaaaaaggagcatcaaatttacagtgagaccagatgcagtggctcaggcctgtaatcccagc

SEQ ID NO: 726865 - DNA, 90 bp, Artificial Sequence
  ENSG00000198346_37 (sequence is synthesized)
cccccttgcggtagcacatgcatgcagggccagctgctgtggagtctgtggtaggaggatagctcgagcctgggaggttgaggctgcagt

SEQ ID NO: 726866 - DNA, 120 bp, Artificial Sequence
  ENSG00000198346_38 (sequence is synthesized)
gagctatgatcatgccactgcattccagcatgggtgatggagcgagatactggctcaaaaaaaaaaatacttcttgtaaagtttgggtagaggaataatgaaatcattgatgctttatga

SEQ ID NO: 726867 - DNA, 120 bp, Artificial Sequence
  ENSG00000198346_39 (sequence is synthesized)
agaggaataatgaaatcattgatgctttatgaaaagattatggagatgatgcccagaagaaataaacagtttgtaaatggataacttagtttgagttgggacaagacaatgttgaaggtg

SEQ ID NO: 726868 - DNA, 120 bp, Artificial Sequence
  ENSG00000198346_40 (sequence is synthesized)
ggtgatgcatggagtggcaggcacaccatccacatcagtttttttgtttgtttttgttgttgttgtttttttgagatggtgtctcgctctgtctcccaggctggaatgcagtggtgcaat

SEQ ID NO: 726869 - DNA, 88 bp, Artificial Sequence
  ENSG00000198346_41 (sequence is synthesized)
tggagattacaggcatgagccaccatgccccttgcacatcagttttacaaaaaaatttatcttgtttgtgccacaatgaagaggactg

SEQ ID NO: 726870 - DNA, 120 bp, Artificial Sequence
  ENSG00000198346_42 (sequence is synthesized)
agttttacaaaaaaatttatcttgtttgtgccacaatgaagaggactgacaggtaacagcagaaacaatagtcaggagtttgagaacaggctgattaacatggtgaaaccccgtctctac

SEQ ID NO: 726871 - DNA, 85 bp, Artificial Sequence
  ENSG00000198346_43 (sequence is synthesized)
agttactcaggaggctgaggctgcattatcgctttggggcaataagagcaaaactttgtctcaaaaaaaaataaataaataaaaa

SEQ ID NO: 726872 - DNA, 120 bp, Artificial Sequence
  ENSG00000198346_44 (sequence is synthesized)
aaaaaataaataaataaaaaataaaatatgtcaagccccttctcttcctgtctcctctcgtggtgtgtacttgactccccttctcgccagatctcacaggactttcagatttaagcaata

SEQ ID NO: 726873 - DNA, 120 bp, Artificial Sequence
  ENSG00000198346_45 (sequence is synthesized)
actttcagatttaagcaatacctggccaagaaacaaaagcaaaatcattccattcccccagtggattcagatcaaaactggtaataaaatcaggtacgactccaaaaggagacattggag

SEQ ID NO: 726874 - DNA, 120 bp, Artificial Sequence
  ENSG00000198346_46 (sequence is synthesized)
aagaacgaagcggggtctataaggaattgcacgtgagatggcacacatatttatgctgtgtgagcattacaatcgcgttaccatatcaagctgaaaatgtcaccactatctggagtgttg

SEQ ID NO: 726875 - DNA, 120 bp, Artificial Sequence
  ENSG00000198346_47 (sequence is synthesized)
gaaatgttttattgggaatatgttttttctctgaatctgctatgaacacgtcagttgggtgggttcagtaataaatatgtgagacttttcatttcaaaataaaaaaggcaaatgatgtaa

SEQ ID NO: 726876 - DNA, 120 bp, Artificial Sequence
  ENSG00000198353_0 (sequence is synthesized)
acctgccctgggcgctcccttcattagcagtattttttttaaattaatctgattaataattatttttcccccatttaattttttttcctcccaggtggagttgccgaagctgggggcagc

SEQ ID NO: 726877 - DNA, 120 bp, Artificial Sequence
  ENSG00000198353_1 (sequence is synthesized)
tggggagggtggggatgggaggggagagacagaagttgagggcatctctctcttccttcccgaccctctggcccccaaggggcaggaggaatgcaggagcaggagttgagcttgggagct

SEQ ID NO: 726878 - DNA, 120 bp, Artificial Sequence
  ENSG00000198353_2 (sequence is synthesized)
gcagatgcctccgcccctcctctctcccaggctcttcctcctgcccccttcttgcaactctccttaattttgtttggcttttggatgattataattatttttatttttgaatttatataa

SEQ ID NO: 726879 - DNA, 120 bp, Artificial Sequence
  ENSG00000198353_3 (sequence is synthesized)
agtatatgtgtgtgtgtgtggagctgagacaggctcggcagcggcacagaatgagggaagacgagaaagagagtgggagagagagaggcagagagggagagagggagagtgacagcagcg

SEQ ID NO: 726880 - DNA, 120 bp, Artificial Sequence
  ENSG00000198353_4 (sequence is synthesized)
ctcgcgggggctcaacccccagacctccagaaatgacgtcagaatcatttgcatcccgctgcctctacctgcctggtccagctgggaccctgcctcgccggccgcatggccagagggttg

SEQ ID NO: 726881 - DNA, 120 bp, Artificial Sequence
  ENSG00000198353_5 (sequence is synthesized)
gaaattaatgatcatgagctcgtatttgatggactctaactacatcgatccgaaatttcctccatgcgaagaatattcgcaaaatagctacatccctgaacacagtccggaatattacgg

SEQ ID NO: 726882 - DNA, 120 bp, Artificial Sequence
  ENSG00000198353_6 (sequence is synthesized)
gtatagctgcaccagtctccaggggcccggcaattcgcgaggccacgggccggcccaggcgggccaccaccaccccgagaaatcacagtcgctctgcgagccggcgcctctctcaggcgc

SEQ ID NO: 726883 - DNA, 120 bp, Artificial Sequence
  ENSG00000198353_7 (sequence is synthesized)
ctccgcctccccgtccccagccccgccagcctgcagccagccagcccccgaccatccctccagcgccgccagcaagcaacccatagtctacccatggatgaaaaaaattcacgttagcac

SEQ ID NO: 726884 - DNA, 120 bp, Artificial Sequence
  ENSG00000198353_8 (sequence is synthesized)
ggtgaaccccaattataacggaggggaacccaagcgctcgaggacagcctatacccggcagcaagtcctggaattagagaaagagtttcattacaaccgctacctgacccgaaggagaag

SEQ ID NO: 726885 - DNA, 120 bp, Artificial Sequence
  ENSG00000198353_9 (sequence is synthesized)
gatcgagatcgcccactcgctgtgcctctctgagaggcagatcaaaatctggttccaaaaccgtcgcatgaaatggaagaaggaccaccgactccccaacaccaaagtcaggtcagcacc

SEQ ID NO: 726886 - DNA, 120 bp, Artificial Sequence
  ENSG00000198353_10 (sequence is synthesized)
cccggccggcgctgcgcccagcaccctttcggcagctaccccgggtacttctgaagaccactcccagagcgccacgccgccggagcagcaacgggcagaggacattaccaggttataaaa

SEQ ID NO: 726887 - DNA, 120 bp, Artificial Sequence
  ENSG00000198353_11 (sequence is synthesized)
cataactcacacccctgcccccaccccatgcccccaccctcccctcacacacaaattgactcttatttatagaatttaatatatatatatatatatatatatataggttcttttctctct

SEQ ID NO: 726888 - DNA, 120 bp, Artificial Sequence
  ENSG00000198353_12 (sequence is synthesized)
gtgatgttgtcttagcatggtacctgctgggtgtttttttttaaaaggccattttggggggttatttattttttaagaaaaaaagctgcaaaaattatatattgcaaggtgtgatggtct

SEQ ID NO: 726889 - DNA, 120 bp, Artificial Sequence
  ENSG00000198353_13 (sequence is synthesized)
ggcttgggtgaatttcaggggaaatgaggaaaagaaaaaaggaaagaaattttaaagccaattctcatccttctcctcctcctccttccccccctctttccttaggccttttgcattgaa

SEQ ID NO: 726890 - DNA, 120 bp, Artificial Sequence
  ENSG00000198353_14 (sequence is synthesized)
aatgcaccaggggaggttagtgagggggaagtcattttaaggagaacaaagctatgaagttcttttgtattattgttgggggggggtgtgggaggagagggggcgaagacagcagacaaa

SEQ ID NO: 726891 - DNA, 120 bp, Artificial Sequence
  ENSG00000198353_15 (sequence is synthesized)
gctaaatgcatctggagagcctctcagagctgttcagtttgaggagccaaaagaaaatcaaaatgaactttcagttcagagaggcagtctataggtagaatctctccccacccctatcgt

SEQ ID NO: 726892 - DNA, 120 bp, Artificial Sequence
  ENSG00000198353_16 (sequence is synthesized)
ggttattgtgtttttggactgaatttacttgattattgtaaaacttgcaataaagaattttagtgtcgatgtgaaatgccccgtgatcaataataaaccagtggatgtgaattagtttta

SEQ ID NO: 726893 - DNA, 120 bp, Artificial Sequence
  ENSG00000198353_17 (sequence is synthesized)
cacaatatatttacatcatatataatcttaactgtccagccacgcagctgctggtgaggtttaatgctaggacagagggcctggcagttagaggggattacggcgctggggacgatggtg

SEQ ID NO: 726894 - DNA, 120 bp, Artificial Sequence
  ENSG00000198353_18 (sequence is synthesized)
agagaggttacatcttcgcaaatgaatcccaggcgaacgctgaagagcagactctggtgccctctcccaggccagaccctgaagcctccgatggccccttctccgactttcccgtttttg

SEQ ID NO: 726895 - DNA, 120 bp, Artificial Sequence
  ENSG00000198353_19 (sequence is synthesized)
gaaatgacgtcagaatcatttgcatcccgctgcctctacctgcctggtccagctgggaccctgcctcgccggccgcatggccagagggttgggtgagtgtgtatggggaagaggggctgg

SEQ ID NO: 726896 - DNA, 120 bp, Artificial Sequence
  ENSG00000198353_20 (sequence is synthesized)
actctggtatccttggatggggggcactccaggctctccagcctcctcggctcagcctgggcccctccccatccaacatccactccagtcctcattcaacttcctcttcctgcgaaagag

SEQ ID NO: 726897 - DNA, 120 bp, Artificial Sequence
  ENSG00000198354_0 (sequence is synthesized)
acactgacttcgctcccgcagccatccagacagacactcttcccgctctcgcctaggtctgcaccgccactgccgcccttgccgccgcgcttcgccccggctctgctacgtcaggccgcg

SEQ ID NO: 726898 - DNA, 120 bp, Artificial Sequence
  ENSG00000198354_1 (sequence is synthesized)
catctctggccaggacgaccgctgccgccgccgccgccgccgagcctcagactgaagtctgggcgcccgcgatcgcaccagcttcttggtcttagagatcctgagctctcggctgacgcg

SEQ ID NO: 726899 - DNA, 120 bp, Artificial Sequence
  ENSG00000198354_2 (sequence is synthesized)
gtcttagagatcctgagctctcggctgacgcggaagcgcagccatccccaccaccgccgccacggccaacacgggtgccacgcgccgccaccgccgccgggccgccgccgccgccgccgc

SEQ ID NO: 726900 - DNA, 120 bp, Artificial Sequence
  ENSG00000198354_3 (sequence is synthesized)
ccaccatggcccagcagcaaacaggtagcaggaaacggaaagcgcccgcggtcgaggcgggagccgggagctcgtcgtcgcagggtttagcggcggcggacggagaggggcctctgctac

SEQ ID NO: 726901 - DNA, 120 bp, Artificial Sequence
  ENSG00000198354_4 (sequence is synthesized)
ccaagaagcagaagcggccggcgacgcgtcgcaggctggtgcactatctgaagggccgggaggtaggagcgcggggcccagccgggctccagggcttcgagggcgagctgcggggctacg

SEQ ID NO: 726902 - DNA, 120 bp, Artificial Sequence
  ENSG00000198354_5 (sequence is synthesized)
ccgtccagaggctgcccgagctgctgacggagcgccagctggacctgggcaccctcaacaaggtgttcgcgtcacagtggctgaacgccaggcaggtggtgtgcggcaccaagtgtaata

SEQ ID NO: 726903 - DNA, 120 bp, Artificial Sequence
  ENSG00000198354_6 (sequence is synthesized)
cgctgtttgtggtggacgtgcagtcaggccacatcacgcgcatccccctcatgcgggacaaggaggccgggctggcccaggcccaccagggctgcggcatccatgccatcgagctgaatc

SEQ ID NO: 726904 - DNA, 120 bp, Artificial Sequence
  ENSG00000198354_7 (sequence is synthesized)
cctccaagacgcttctggccaccggcggcgaaaaccccaacagcctggccatctaccagctgcccaccctggaccccctgtgcctgggcgaccgccatggccacaaggactggatcttcg

SEQ ID NO: 726905 - DNA, 120 bp, Artificial Sequence
  ENSG00000198354_8 (sequence is synthesized)
cagtcgcctggctgagtgacaccgtagctgtgagcggctcccgcgacggcaccgtggctctgtggcggatggacccagacatgtttaatggcagcattgcctggcacagcgaggtgggtc

SEQ ID NO: 726906 - DNA, 120 bp, Artificial Sequence
  ENSG00000198354_9 (sequence is synthesized)
tcccagtatatgcccacatccgtccgagggatgtggaggccatccccagggccagcaccaaccccagcaaccgcaaggtacgggccctggccttcagcggcaagaaccaggagctgggag

SEQ ID NO: 726907 - DNA, 120 bp, Artificial Sequence
  ENSG00000198354_10 (sequence is synthesized)
cggtgtccttggacggctacttccacctgtggaaagcccggagcacactatccaggctcctgtccatcaggctgccctactgccgagagaatgtgtgcctgacctactgtgatgagttgt

SEQ ID NO: 726908 - DNA, 120 bp, Artificial Sequence
  ENSG00000198354_11 (sequence is synthesized)
ctccttcctggatccgcgccagcgccagcagaacatccggcccctgtgctctcgagagggtggcacaggcgtgcggtcgctgagcttctaccagcacatcatcactgtgggcaccggcca

SEQ ID NO: 726909 - DNA, 120 bp, Artificial Sequence
  ENSG00000198354_12 (sequence is synthesized)
tggttccctgctcttctatgacatccgcgcccagaagttcctggaggagagggcctcttccagcctggactccatgccggggcccgcagggaggaagctcaagcttgcctgcggcagagg

SEQ ID NO: 726910 - DNA, 120 bp, Artificial Sequence
  ENSG00000198354_13 (sequence is synthesized)
ctggctcaaccaagatgacgtctgggtgaactactttggtggcatgggagagttccccaatgcgctctacacccactgctacaactggccggagatgaagctctttgtggctggggggcc

SEQ ID NO: 726911 - DNA, 120 bp, Artificial Sequence
  ENSG00000198354_14 (sequence is synthesized)
tctcccttcaggcctccatgggaactacgcaggcctctggagttaaggatggacgccttgttctcaaagtgcacaggtttacctttcagttccgcctgactttccttcttcatgctgcat

SEQ ID NO: 726912 - DNA, 120 bp, Artificial Sequence
  ENSG00000198354_15 (sequence is synthesized)
ttgtgcttttaactttgtgtggcttttgtcttccaggtggaaccagtccaacttacgtgtgcttaatgtattaggcagagaaagaaagagagagagcgggagcgagagagcacaagtggt

SEQ ID NO: 726913 - DNA, 120 bp, Artificial Sequence
  ENSG00000198354_16 (sequence is synthesized)
cctttcggcagtcaaaactttggctttaaaactctcattcacgtttcccaacagcagtatatttttgccttctcattcaaagagttttggctaaaccttaattgtgttctgtctttcagt

SEQ ID NO: 726914 - DNA, 120 bp, Artificial Sequence
  ENSG00000198354_17 (sequence is synthesized)
gattcacataccctccttctttaggttgatgtagtcatagtcttcactactattcagtacgttagttttatcaatattgcaatagtgttcagatcttttacacatgttagatgtgtggtg

SEQ ID NO: 726915 - DNA, 120 bp, Artificial Sequence
  ENSG00000198354_18 (sequence is synthesized)
ttttggggaaatgtgagctacaaagcatctttggggttgttttgaggaactacccatcatttatagccttactctaattacaaaatgcagttcaggttctagattgccaccattctagag

SEQ ID NO: 726916 - DNA, 120 bp, Artificial Sequence
  ENSG00000198354_19 (sequence is synthesized)
tgtggcacacaccattctagggcgtgattcatttggatgttggaaactcaatgtctgttgtttgtatagtgttgatgtgtaaaatgctttaaaaatatgttctgttagttagaaatctta

SEQ ID NO: 726917 - DNA, 120 bp, Artificial Sequence
  ENSG00000198354_20 (sequence is synthesized)
caatgttgttcatactattaatcaacatttttggttattcagtaaaactttactatcctcaggccctccgtgttcttatttaaagccgctgtattatggcctgcttttctatgctacaga

SEQ ID NO: 726918 - DNA, 120 bp, Artificial Sequence
  ENSG00000198354_21 (sequence is synthesized)
ttttcagaactactcaattctggtctatatatgtggtagtgcaatcagggaggtatttttgggggtatatggggtacacatctctttaaattcaggtagctatttacagtgaaaagccag

SEQ ID NO: 726919 - DNA, 120 bp, Artificial Sequence
  ENSG00000198354_22 (sequence is synthesized)
ttgtggcagttgtgctcagagtaggtgttgattttttattactgtatacatggataattctggatccagtatgtgatgtgttgcagaaaaataaataaaatgtgttcatcatcttagcaa

SEQ ID NO: 726920 - DNA, 80 bp, Artificial Sequence
  ENSG00000198355_0 (sequence is synthesized)
gggtgaggcgctccgcctgctgcgcgtctacgcggtccccgcgggccttccgggcccactgcgccgcgcggaccgcctcg

SEQ ID NO: 726921 - DNA, 120 bp, Artificial Sequence
  ENSG00000198355_1 (sequence is synthesized)
cggcttcggcgcctggggctcggggctccggggaggccgtcgcccgcgatgctgctctccaagttcggctccctggcgcacctctgcgggcccggcggcgtggaccacctcccggtgaag

SEQ ID NO: 726922 - DNA, 120 bp, Artificial Sequence
  ENSG00000198355_2 (sequence is synthesized)
cggtgaagatcctgcagccagccaaggcggacaaggagagcttcgagaaggcgtaccaggtgggcgccgtgctgggtagcggcggcttcggcacggtctacgcgggtagccgcatcgccg

SEQ ID NO: 726923 - DNA, 120 bp, Artificial Sequence
  ENSG00000198355_3 (sequence is synthesized)
acgggctcccggtggctgtgaagcacgtggtgaaggagcgggtgaccgagtggggcagcctgggcggcgcgaccgtgcccctggaggtggtgctgctgcgcaaggtgggcgcggcgggcg

SEQ ID NO: 726924 - DNA, 120 bp, Artificial Sequence
  ENSG00000198355_4 (sequence is synthesized)
gcgcgcgcggcgtcatccgcctgctggactggttcgagcggcccgacggcttcctgctggtgctggagcggcccgagccggcgcaggacctcttcgactttatcacggagcgcggcgccc

SEQ ID NO: 726925 - DNA, 120 bp, Artificial Sequence
  ENSG00000198355_5 (sequence is synthesized)
tggacgagccgctggcgcgccgcttcttcgcgcaggtgctggccgccgtgcgccactgccacagctgcggggtcgtgcaccgcgacattaaggacgaaaatctgcttgtggacctgcgct

SEQ ID NO: 726926 - DNA, 120 bp, Artificial Sequence
  ENSG00000198355_6 (sequence is synthesized)
ccggagagctcaagctcatcgacttcggttcgggtgcgctgctcaaggacacggtctacaccgacttcgacggcacccgagtgtacagccccccggagtggatccgctaccaccgctacc

SEQ ID NO: 726927 - DNA, 120 bp, Artificial Sequence
  ENSG00000198355_7 (sequence is synthesized)
acgggcgctcggccaccgtgtggtcgctgggcgtgcttctctacgatatggtgtgtggggacatccccttcgagcaggacgaggagatcctccgaggccgcctgctcttccggaggaggg

SEQ ID NO: 726928 - DNA, 120 bp, Artificial Sequence
  ENSG00000198355_8 (sequence is synthesized)
tcgctggatcagattgcggcccatccctggatgctgggggctgacgggggcgtcccggagagctgtgacctgcggctgtgcaccctcgaccctgatgacgtggccagcaccacgtccagc

SEQ ID NO: 726929 - DNA, 120 bp, Artificial Sequence
  ENSG00000198355_9 (sequence is synthesized)
agcgagagcttgtgaggagctgcacctgactgggagctaggggaccacctgccttggccagacctgggacgcccccagaccctgactttctcctgcgtgggccgtctcctcctgcggaag

SEQ ID NO: 726930 - DNA, 120 bp, Artificial Sequence
  ENSG00000198355_10 (sequence is synthesized)
cagtgacctctgacccctggtgaccttcgctttgagtgccttttgaacgctggtcccgcgggacttggttttctcaagctctgtctgtccaaagacgctccggtcgaggtcccgcctgcc

SEQ ID NO: 726931 - DNA, 120 bp, Artificial Sequence
  ENSG00000198355_11 (sequence is synthesized)
ctgggtggatacttgaaccccagacgcccctctgtgctgctgtgtccggaggcggccttcccatctgcctgcccacccggagctctttccgccggcgcagggtcccaagcccacctcccg

SEQ ID NO: 726932 - DNA, 120 bp, Artificial Sequence
  ENSG00000198355_12 (sequence is synthesized)
ccctcagtcctgcggtgtgcgtctgggcacgtcctgcacacacaatgcaagtcctggcctccgcgcccgcccgcccacgcgagccgtacccgccgccaactctgttatttatggtgtgac

SEQ ID NO: 726933 - DNA, 120 bp, Artificial Sequence
  ENSG00000198355_13 (sequence is synthesized)
cccctggaggtgccctcggcccaccggggctatttattgtttaatttatttgttgaggttatttcctctgagcagtctgcctctcccaagccccaggggacagtggggaggcaggggagg

SEQ ID NO: 726934 - DNA, 120 bp, Artificial Sequence
  ENSG00000198355_14 (sequence is synthesized)
gggtggctgtggtccagggaccccaggccctgattcctgtgcctggcgtctgtcccggccccgcctgtcagaagatgaacatgtatagtggctaacttaaggggagtgggtgaccctgac

SEQ ID NO: 726935 - DNA, 120 bp, Artificial Sequence
  ENSG00000198355_15 (sequence is synthesized)
acttccaggcactgtgcccagggtttgggttttaaattattgactttgtacagtctgcttgtgggctctgaaagctggggtggggccagagcctgagcgtttaatttattcagtacctgt

SEQ ID NO: 726936 - DNA, 120 bp, Artificial Sequence
  ENSG00000198355_16 (sequence is synthesized)
gtttgtgtgaatgcggtgtgtgcaggcatcgcagatgggggttctttcagttcaaaagtgagatgtctggagatcatatttttttatacaggtatttcaattaaaatgtttttgtacata

SEQ ID NO: 726937 - DNA, 120 bp, Artificial Sequence
  ENSG00000198356_0 (sequence is synthesized)
gagccagttccaaaatggcggcaggggtggccgggtggggggttgaggcagaggagttcgaagatgctcctgatgtggagccgctggagcctacacttagcaacatcatcgagcagcgca

SEQ ID NO: 726938 - DNA, 120 bp, Artificial Sequence
  ENSG00000198356_1 (sequence is synthesized)
gcctgaagtggatcttcgtcgggggcaagggtggtgtgggcaagaccacctgcagctgcagcctggcagtccagctctccaaggggcgtgagagtgttctgatcatctccacagacccag

SEQ ID NO: 726939 - DNA, 120 bp, Artificial Sequence
  ENSG00000198356_2 (sequence is synthesized)
cacacaacatctcagatgcttttgaccagaagttctcaaaggtgcctaccaaggtcaaaggctatgacaacctctttgctatggagattgaccccagcctgggcgtggcggagctgcctg

SEQ ID NO: 726940 - DNA, 120 bp, Artificial Sequence
  ENSG00000198356_3 (sequence is synthesized)
acgagttcttcgaggaggacaacatgctgagcatgggcaagaagatgatgcaggaggccatgagcgcatttcccggcatcgatgaggccatgagctatgccgaggtcatgaggctggtga

SEQ ID NO: 726941 - DNA, 120 bp, Artificial Sequence
  ENSG00000198356_4 (sequence is synthesized)
agggcatgaacttctcggtggtggtatttgacacggcacccacgggccacaccctgaggctgctcaacttccccaccatcgtggagcggggcctgggccggcttatgcagatcaagaacc

SEQ ID NO: 726942 - DNA, 120 bp, Artificial Sequence
  ENSG00000198356_5 (sequence is synthesized)
gaggagacgctgcccgtcatccgctcagtcagcgaacagttcaaggaccctgagcagacaactttcatctgcgtatgcattgctgagttcctgtccctgtatgagacagagaggctgatc

SEQ ID NO: 726943 - DNA, 120 bp, Artificial Sequence
  ENSG00000198356_6 (sequence is synthesized)
caggagctggccaagtgcaagattgacacacacaatataattgtcaaccagctcgtcttccccgaccccgagaagccctgcaagatgtgtgaggcccgtcacaagatccaggccaagtat

SEQ ID NO: 726944 - DNA, 120 bp, Artificial Sequence
  ENSG00000198356_7 (sequence is synthesized)
ctggaccagatggaggacctgtatgaagacttccacatcgtgaagctgccgctgttaccccatgaggtgcggggggcagacaaggtcaacaccttctcggccctcctcctggagccctac

SEQ ID NO: 726945 - DNA, 120 bp, Artificial Sequence
  ENSG00000198356_8 (sequence is synthesized)
aagccccccagtgcccagtagcacagctgccagccccaaccgctgccatttcacactcaccctccaccctccccaccccctcggggcagagtttgcacaaagtcccccccataatacagg

SEQ ID NO: 726946 - DNA, 120 bp, Artificial Sequence
  ENSG00000198356_9 (sequence is synthesized)
gggagccacttgggcaggaggcagggaggggtccattccccctggtggggctggtggggagctgtagttgccccctacctctcccacctcttgctcttcaataaaatgatcttaaactgc

SEQ ID NO: 726947 - DNA, 120 bp, Artificial Sequence
  ENSG00000198356_10 (sequence is synthesized)
gcccagccagcaggggtgggggctgcctggggaaggggaagagcggacacagagggcctgacccctgtctcccctcaggctggtgaagggcatgaacttctcggtggtggtatttgacac

SEQ ID NO: 726948 - DNA, 120 bp, Artificial Sequence
  ENSG00000198356_11 (sequence is synthesized)
gggagtagcctagaccgtaccgatgtgttcattaggtagggggaacccttggaaaattatagaccagaggttgacaaagtgaaccctggaagcaaagaatagtgaaaatataatttatat

SEQ ID NO: 726949 - DNA, 120 bp, Artificial Sequence
  ENSG00000198363_0 (sequence is synthesized)
agtcacaggttcgtacacgcgaggccgggcgcgcgcagccggcaggcgggtgaagtcttcccaggtgctgcaggcggtgctgaggcacagggtctgctgcaggagcagcggcccgaaccc

SEQ ID NO: 726950 - DNA, 120 bp, Artificial Sequence
  ENSG00000198363_1 (sequence is synthesized)
gctccagcggcccgccgccgccagcggttcccgcgtcgcgtgtgtacccccgcgcactgaaggaggtccgccagccctcaccagcccccgcggaccgtgcaatggcccagcgtaagaatg

SEQ ID NO: 726951 - DNA, 120 bp, Artificial Sequence
  ENSG00000198363_2 (sequence is synthesized)
ccaagagcagcggcaacagcagcagcagcggctccggcagcggtagcacgagtgcgggcagcagcagccccggggcccggagagagacaaagcatggaggacacaagaatgggaggaaag

SEQ ID NO: 726952 - DNA, 120 bp, Artificial Sequence
  ENSG00000198363_3 (sequence is synthesized)
gcggactctcaggaacttcattcttcacgtggtttatggtgattgcattgctgggcgtctggacatctgtagctgtcgtttggtttgatcttgttgactatgaggaagttctaggaaaac

SEQ ID NO: 726953 - DNA, 120 bp, Artificial Sequence
  ENSG00000198363_4 (sequence is synthesized)
taggaatctatgatgctgatggtgatggagattttgatgtggatgatgccaaagttttattaggacttaaagagagatctacttcagagccagcagtcccgccagaagaggctgagccac

SEQ ID NO: 726954 - DNA, 120 bp, Artificial Sequence
  ENSG00000198363_5 (sequence is synthesized)
acactgagcccgaggagcaggttcctgtggaggcagaaccccagaatatcgaagatgaagcaaaagaacaaattcagtcccttctccatgaaatggtacacgcagaacatgttgagggag

SEQ ID NO: 726955 - DNA, 120 bp, Artificial Sequence
  ENSG00000198363_6 (sequence is synthesized)
aagacttgcaacaagaagatggacccacaggagaaccacaacaagaggatgatgagtttcttatggcgactgatgtagatgatagatttgagaccctggaacctgaagtatctcatgaag

SEQ ID NO: 726956 - DNA, 120 bp, Artificial Sequence
  ENSG00000198363_7 (sequence is synthesized)
aaaccgagcatagttaccacgtggaagagacagtttcacaagactgtaatcaggatatggaagagatgatgtctgagcaggaaaatccagattccagtgaaccagtagtagaagatgaaa

SEQ ID NO: 726957 - DNA, 120 bp, Artificial Sequence
  ENSG00000198363_8 (sequence is synthesized)
gattgcaccatgatacagatgatgtaacataccaagtctatgaggaacaagcagtatatgaacctctagaaaatgaagggatagaaatcacagaagtaactgctccccctgaggataatc

SEQ ID NO: 726958 - DNA, 120 bp, Artificial Sequence
  ENSG00000198363_9 (sequence is synthesized)
ctgtagaagattcacaggtaattgtagaagaagtaagcatttttcctgtggaagaacagcaggaagtaccaccagaaacaaatagaaaaacagatgatccagaacaaaaagcaaaagtta

SEQ ID NO: 726959 - DNA, 120 bp, Artificial Sequence
  ENSG00000198363_10 (sequence is synthesized)
agaaaaagaagcctaaacttttaaataaatttgataagactattaaagctgaacttgatgctgcagaaaaactccgtaaaaggggaaaaattgaggaagcagtgaatgcatttaaagaac

SEQ ID NO: 726960 - DNA, 120 bp, Artificial Sequence
  ENSG00000198363_11 (sequence is synthesized)
tagtacgcaaataccctcagagtccacgagcaagatatgggaaggcgcagtgtgaggatgatttggctgagaagaggagaagtaatgaggtgctacgtggagccatcgagacctaccaag

SEQ ID NO: 726961 - DNA, 120 bp, Artificial Sequence
  ENSG00000198363_12 (sequence is synthesized)
aggtggccagcctacctgatgtccctgcagacctgctgaagctgagtttgaagcgtcgctcagacaggcaacaatttctaggtcatatgagaggttccctgcttaccctgcagagattag

SEQ ID NO: 726962 - DNA, 120 bp, Artificial Sequence
  ENSG00000198363_13 (sequence is synthesized)
ttcaactatttcccaatgatacttccttaaaaaatgaccttggcgtgggatacctcttgataggagataatgacaatgcaaagaaagtttatgaagaggtgctgagtgtgacacctaatg

SEQ ID NO: 726963 - DNA, 120 bp, Artificial Sequence
  ENSG00000198363_14 (sequence is synthesized)
atggctttgctaaagtccattatggcttcatcctgaaggcacagaacaaaattgctgagagcatcccatatttaaaggaaggaatagaatccggagatcctggcactgatgatgggagat

SEQ ID NO: 726964 - DNA, 120 bp, Artificial Sequence
  ENSG00000198363_15 (sequence is synthesized)
tttatttccacctgggggatgccatgcagagggttgggaacaaagaggcatataagtggtatgagcttgggcacaagagaggacactttgcatctgtctggcaacgctcactctacaatg

SEQ ID NO: 726965 - DNA, 120 bp, Artificial Sequence
  ENSG00000198363_16 (sequence is synthesized)
tgaatggactgaaagcacagccttggtggaccccaaaagaaacgggctacacagagttagtaaagtctttagaaagaaactggaagttaatccgagatgaaggccttgcagtgatggata

SEQ ID NO: 726966 - DNA, 120 bp, Artificial Sequence
  ENSG00000198363_17 (sequence is synthesized)
aagccaaaggtctcttcctgcctgaggatgaaaacctgagggaaaaaggggactggagccagttcacgctgtggcagcaaggaagaagaaatgaaaatgcctgcaaaggagctcctaaaa

SEQ ID NO: 726967 - DNA, 120 bp, Artificial Sequence
  ENSG00000198363_18 (sequence is synthesized)
cctgtaccttactagaaaagttccccgagacaacaggatgcagaagaggacagatcaaatattccatcatgcaccccgggactcacgtgtggccgcacacagggcccacaaactgcaggc

SEQ ID NO: 726968 - DNA, 120 bp, Artificial Sequence
  ENSG00000198363_19 (sequence is synthesized)
tccgaatgcacctgggcttggtgattcccaaggaaggctgcaagattcgatgtgccaacgagaccaagacctgggaggaaggcaaggtgctcatctttgatgactcctttgagcacgagg

SEQ ID NO: 726969 - DNA, 120 bp, Artificial Sequence
  ENSG00000198363_20 (sequence is synthesized)
tatggcaggatgcctcatctttccggctgatattcatcgtggatgtgtggcatccggaactgacaccacagcagagacgcagccttccagcaatttagcatgaattcatgcaagcttggg

SEQ ID NO: 726970 - DNA, 120 bp, Artificial Sequence
  ENSG00000198363_21 (sequence is synthesized)
aaactctggagagaggctgcctttctggttccatctccttgggtgtgaggatagaatttcgaacaccaagagtcaattcccttgacttgcagcccgagtaattcaaagcctcctcctagg

SEQ ID NO: 726971 - DNA, 120 bp, Artificial Sequence
  ENSG00000198363_22 (sequence is synthesized)
tatttgcctcgctgcaattcatttaggaaacaccctgctgtgtgtcatctcatgacagcactggtcttctgccagtatttaaggtgaacatttgatagcttctaccttaccagccaaaga

SEQ ID NO: 726972 - DNA, 120 bp, Artificial Sequence
  ENSG00000198363_23 (sequence is synthesized)
tattttttccacatagaataggtctaattcaatgtataatgagaacatatgtagaaactgtgaatggattgctttagtttgtaatttttctatgcagttatatttttctagtgtagctag

SEQ ID NO: 726973 - DNA, 120 bp, Artificial Sequence
  ENSG00000198363_24 (sequence is synthesized)
actattttgtcatcatgtaccactacatttttgtttattttaatgacaagctgtataaatgctttacttctagctatttaatggtagcattactggggaactcagacttccctcttttaa

SEQ ID NO: 726974 - DNA, 120 bp, Artificial Sequence
  ENSG00000198363_25 (sequence is synthesized)
ttcttcttagtaaaagatactcatgaaaaaagcagttttattttcctaacaaaaaagaaagagctcattatgtcagtgtctatgaactgtacccatcccaactctcaaatcgtttggttt

SEQ ID NO: 726975 - DNA, 120 bp, Artificial Sequence
  ENSG00000198363_26 (sequence is synthesized)
tttttatcttgattgagatcctcttctcactatgctagtggtggagatattgacaaaatcctatttctttcaaagaggaacttttcacaccgaaaaaagagcatggaattattttatatt

SEQ ID NO: 726976 - DNA, 120 bp, Artificial Sequence
  ENSG00000198363_27 (sequence is synthesized)
gttataaaaatcccagatgcaaatttttttaatgccaattattagagcttctggggaaaaagtatagttcacggaaataaaactatgttctttcagggttgggtggataggtggctgcta

SEQ ID NO: 726977 - DNA, 120 bp, Artificial Sequence
  ENSG00000198363_28 (sequence is synthesized)
gggtgtctggctcctggcggctttgccatccatgaggcaagggctgggaacacagtgtctttgcctatggtagatccatgtgaatgtcaggaagccagctcttcagtcttggagatgatt

SEQ ID NO: 726978 - DNA, 120 bp, Artificial Sequence
  ENSG00000198363_29 (sequence is synthesized)
tctgctacaattctgtagaaagattaaggatggcagagtaaaaggttaccaagaatgccaggatgtttttcttgggcgtaggaggtccagattactttcctttttgatgaaagagtttgg

SEQ ID NO: 726979 - DNA, 120 bp, Artificial Sequence
  ENSG00000198363_30 (sequence is synthesized)
aagactgtcccatctctctggcttgagaaatctctgccattttaaacatcactgtgaaatagcaattattatcatctgtatttagttttaacattacccacaacatagaaataataggta

SEQ ID NO: 726980 - DNA, 120 bp, Artificial Sequence
  ENSG00000198363_31 (sequence is synthesized)
aaaatcgtcttgcctactcattccaaagatgatcaagtcattaatctagcaaagtattcatgtatcagattttgtatattttgaatcaaagctaactaggaatgttagatataagaatgt

SEQ ID NO: 726981 - DNA, 120 bp, Artificial Sequence
  ENSG00000198363_32 (sequence is synthesized)
aatgatattcatgcactgaattctaagccaatatgaacaaaaatgctgcatgaatggcacatataggtcaccaaagttcattcacaggtagaaaaaacttgtgctttcttttccatctaa

SEQ ID NO: 726982 - DNA, 120 bp, Artificial Sequence
  ENSG00000198363_33 (sequence is synthesized)
aaacaaaaggagactttctttatctcatttaaagaacagctctttgaaattgaaattgaccctttttgcttgaccttaaggagattagcttccagtagatgagtttgcaaaatacttttc

SEQ ID NO: 726983 - DNA, 120 bp, Artificial Sequence
  ENSG00000198363_34 (sequence is synthesized)
ctgttcttttgttttgctggtattgaaaacatcccactaaatcagatgaagaggcatgggaggaaaaatatccaaattaattactaaaatcgagaagagaaggcaaactcttgaaaagta

SEQ ID NO: 726984 - DNA, 120 bp, Artificial Sequence
  ENSG00000198363_35 (sequence is synthesized)
aaaaggtgtttgtgaccttcagtatttattgaacagaggaaataactgacaagggcaatacaattcaatgttcatgtagtaacattcatgtcacttgttgaatttggttctcatatgtat

SEQ ID NO: 726985 - DNA, 120 bp, Artificial Sequence
  ENSG00000198363_36 (sequence is synthesized)
attgcatacacataaattcaaactataagtcgtcatttttgagccatcatcttacattcatgtaatgaaattatggaagagagtaaaaactagctcttaacttagtaaatataatatggt

SEQ ID NO: 726986 - DNA, 120 bp, Artificial Sequence
  ENSG00000198363_37 (sequence is synthesized)
atttaaaatcaggtcactacagtaaggttctaagtattgccaattgaaaagctagaaatggtattactgttgcaaagtgttgtcaataattgactccaatagcattgtaaatacttgtat

SEQ ID NO: 726987 - DNA, 120 bp, Artificial Sequence
  ENSG00000198363_38 (sequence is synthesized)
cccacaactattttaaacccaagcaataaaatggattttctaattcacttcaattctttatttctcttacctatctatgtcttggtacataagaaaagtgtttccatcactgcattggta

SEQ ID NO: 726988 - DNA, 120 bp, Artificial Sequence
  ENSG00000198363_39 (sequence is synthesized)
ggtagaattatttcagtgttattatttttgtgatttcgtatgtctacacaaaaatgaattagtttaatttatattgtgatacagttgtttgagaaatatttttaattctgtttcaacttt

SEQ ID NO: 726989 - DNA, 120 bp, Artificial Sequence
  ENSG00000198363_40 (sequence is synthesized)
ctccaagtgtataatataaaaattacttctgttattgttctctaccaataggggaaaaaattaaaacattagatccattgagaaagagatgatgtaataaataattaagattagtaataa

SEQ ID NO: 726990 - DNA, 120 bp, Artificial Sequence
  ENSG00000198363_41 (sequence is synthesized)
tattatcaggggtgattatgaccagttgaataatctctttcccttgaattatttagctaacaaattaactctcccaaatatttaaaataatgtaaaatcatattttactgcccattatta

SEQ ID NO: 726991 - DNA, 120 bp, Artificial Sequence
  ENSG00000198363_42 (sequence is synthesized)
actaaaatatttttgtttgactttgagcaccaactggtaatactaataaatacccatgtcatgcagatggctgggcgaataagagatgtctaaaaatatgcactggtcttggaaaacatg

SEQ ID NO: 726992 - DNA, 120 bp, Artificial Sequence
  ENSG00000198363_43 (sequence is synthesized)
gcacaagtaaggatatcatatatgatgtctgtttattttatgtctgatttcttttgaatgagtagttggggactccatttctaaggagactaggtaaataaaatgacctttgacatttca

SEQ ID NO: 726993 - DNA, 120 bp, Artificial Sequence
  ENSG00000198363_44 (sequence is synthesized)
aagctctggtaggcaagtgcatgcagtgtgcctaaaacctgccagcagtacttttgagtttttttttttgttttgttttactttagcatttattattcatggattgaagaaatcaaaatg

SEQ ID NO: 726994 - DNA, 120 bp, Artificial Sequence
  ENSG00000198363_45 (sequence is synthesized)
gttttatggtttcctctcatttctctatgatataatgactccttttgaaatgctagaagaagaagaagaagaaagcgaaaccgcagatggtgttgatggtacgtcacagaatgaaggggt

SEQ ID NO: 726995 - DNA, 120 bp, Artificial Sequence
  ENSG00000198363_46 (sequence is synthesized)
tcagggaaagacttgtgtcatattggatttacataaccagtaaccttgattcagggactgaagtcattggctaatgaacacctgaagcagcctcctttttcttttctttccttggcttat

SEQ ID NO: 726996 - DNA, 120 bp, Artificial Sequence
  ENSG00000198363_47 (sequence is synthesized)
gcagggcttaatgtgcagtggggtggttgtgatcttaccgtgcaagtcaaccatgtgatcttgcccagtacagctactagctagtcccttgctcgctcagctcccccaacttctattgaa

SEQ ID NO: 726997 - DNA, 120 bp, Artificial Sequence
  ENSG00000198363_48 (sequence is synthesized)
agtgaggctgaaaggggatatgaagaaggttaccttggagtattgtcttttgaactctttaaatgtgacctgtaggtttttgaaaaaaggctttatattgtatgtctgtcacacagggag

SEQ ID NO: 726998 - DNA, 120 bp, Artificial Sequence
  ENSG00000198363_49 (sequence is synthesized)
aagttttatcaaacagtactcattctcactatatgcagtactttttgatttctattcaattttgttatattataaattttaaaaatacttgatcatgagccattacatttatttaaggac

SEQ ID NO: 726999 - DNA, 120 bp, Artificial Sequence
  ENSG00000198363_50 (sequence is synthesized)
ttgctaatggatcataaccacacaatatgcaaaactcttccttagagagggttttcaaagtacacccttctgtgtctctgttgggatgggatgagtacgtgtgcacacatataggtactg

SEQ ID NO: 727000 - DNA, 84 bp, Artificial Sequence
  ENSG00000198363_51 (sequence is synthesized)
aagtgcagtggcacagtctcggctaactggaacctctgcttcctgagtttaagcagttctcctcctgagtagctgggattacag

SEQ ID NO: 727001 - DNA, 120 bp, Artificial Sequence
  ENSG00000198363_52 (sequence is synthesized)
tcatagaagtgcaagtttttaattttatagctccttgatgcaaaaagaaaaactaggtcagtccattactcaggatagtaattggtagatgaaatgacattcttcttacttagggttaac

SEQ ID NO: 727002 - DNA, 120 bp, Artificial Sequence
  ENSG00000198363_53 (sequence is synthesized)
ctcatgcacctccagttttcagggtaccttatttatattttaatttgtcgatatatttgaaatattacttgcatttctttatagatattacaattttgagaacaataaattgaaactgga

SEQ ID NO: 727003 - DNA, 120 bp, Artificial Sequence
  ENSG00000198363_54 (sequence is synthesized)
ggaccagcctaaccatacgctccaaaagatggctgtgatagatcttgtgaagcaattactgagcagatcaagatctttgggaaggaacactaaagatgttttgaatgaattatagtccac

SEQ ID NO: 727004 - DNA, 120 bp, Artificial Sequence
  ENSG00000198363_55 (sequence is synthesized)
tggcattttagtgtatttttttttctttttagaaacacacatttctaaaaatgtcatgttacattcctgcatgtcccttttgatagcattagtggatccattggatttcttttttctttt

SEQ ID NO: 727005 - DNA, 120 bp, Artificial Sequence
  ENSG00000198363_56 (sequence is synthesized)
tgtgagacagcttttagtcttacctgaatttatgtgtgtttttccgacagtggttaataattatattggtgatgtagcagcaattgtgttggcagggttttcatatattattagtaatta

SEQ ID NO: 727006 - DNA, 120 bp, Artificial Sequence
  ENSG00000198363_57 (sequence is synthesized)
acactaactgttggactgacttgtgtacactgtgttaaacatgatttaaaagctattaagagtactttgtgttagcactcttaaaaacgctaacagagatcatcattagctgtgaagatt

SEQ ID NO: 727007 - DNA, 120 bp, Artificial Sequence
  ENSG00000198363_58 (sequence is synthesized)
tgagttgtatatacctgcactgatattcttatcaaaaatttctacattagctttaagtgttcagattaacacttttgaaatttttgtagcttttagctgattaattagaaaaatttaata

SEQ ID NO: 727008 - DNA, 120 bp, Artificial Sequence
  ENSG00000198363_59 (sequence is synthesized)
agttttaaattatcatttatttatttttttaaatgagaggggaaagctgaaattccttgttaagacacaaggaaaaagaatggccctactattatcatgcaaaaatgctttgttggcacc

SEQ ID NO: 727009 - DNA, 120 bp, Artificial Sequence
  ENSG00000198363_60 (sequence is synthesized)
tcagattaatcatataatagctatagtctcttcagcatttgtttaaattttagaaaacctgtataaattactggtgcataacttaaagattattctgcctttggctaattgagtaattcc

SEQ ID NO: 727010 - DNA, 120 bp, Artificial Sequence
  ENSG00000198363_61 (sequence is synthesized)
cctccagcactagagaccgctcagtgctcttactagatgaactcagtaacgccttgagctgggttgattgaggatgtgtgaaaagctcacagagcccgatgcctgctgctatttcacggc

SEQ ID NO: 727011 - DNA, 120 bp, Artificial Sequence
  ENSG00000198363_62 (sequence is synthesized)
aatgagcctttttctttctacactgaagattttcttcttatttaatgtggtttattttgggctcagaaataattgctctgttgaaaataatcctttgtcagaaaagaaggtagctaccac

SEQ ID NO: 727012 - DNA, 120 bp, Artificial Sequence
  ENSG00000198363_63 (sequence is synthesized)
atcattttgaaaggaccatgagcaactataagcaaagccataagaagtggtttgatcgatatattaggggtagctcttgattttgttaacattaagataaggtgactttttccccctgct

SEQ ID NO: 727013 - DNA, 120 bp, Artificial Sequence
  ENSG00000198363_64 (sequence is synthesized)
tttaggattaaaatcaaagatacttctatatttttatcactatagatcatagttattatacaatgtagtgagtcctgcatgggtactcgatgtgtaatgaaacctgaaataataagataa

SEQ ID NO: 727014 - DNA, 120 bp, Artificial Sequence
  ENSG00000198363_65 (sequence is synthesized)
taagaaaagcaataattttctaaagctgtgctgtcggtgatacagagatgatactcaaattataataaaactcttcattttgtgaattatagaagctactttttataaagccatattttt

SEQ ID NO: 727015 - DNA, 120 bp, Artificial Sequence
  ENSG00000198363_66 (sequence is synthesized)
ttagggaaactaaggagtgacatagaactgatgaatgagtaaaagtaagttttgctggatttttgtagaactctggacgttgaggattcattatgctgtggttaactttaaatatttttg

SEQ ID NO: 727016 - DNA, 120 bp, Artificial Sequence
  ENSG00000198363_67 (sequence is synthesized)
aattccaaatatctgaattaatgagccttgtctttacaaatatgtgccattgtgcaacatcggtggattttctaaaaataatgtaaatgtcttctattaaatgttgagtgcaataaaata

SEQ ID NO: 727017 - DNA, 120 bp, Artificial Sequence
  ENSG00000198363_68 (sequence is synthesized)
tttgaagtataaggtatttttaatttgttacataataaaatcagttcattttatccttactagtattttagaagattatagcatttttgataactaaaatcacaaaggaataccttcagc

SEQ ID NO: 727018 - DNA, 120 bp, Artificial Sequence
  ENSG00000198363_69 (sequence is synthesized)
actaaaatcacaaaggaataccttcagccagttaacgtatttctaacagataatgcttattttgcatttactatcatgctacattgccaggaagcaagattaaaattaaatagcccctgc

SEQ ID NO: 727019 - DNA, 120 bp, Artificial Sequence
  ENSG00000198363_70 (sequence is synthesized)
agccatcctttgtagattttgtcctgcacctagaagttttgattattccctggacagcctgctccaccttttttccccaaatttttaatttttgtgagtatataatagatgtataaattt

SEQ ID NO: 727020 - DNA, 120 bp, Artificial Sequence
  ENSG00000198363_71 (sequence is synthesized)
atatgagatatttcgatacagatatagaaaatgtacaataaattattgttggctatagtaactctgttttgctatcaaatactagatcttattcattgtatataactatatttttgtacc

SEQ ID NO: 727021 - DNA, 120 bp, Artificial Sequence
  ENSG00000198363_72 (sequence is synthesized)
tacccattaaccatcttcacctcctgctcccctctcccctcactacccttcccaacctctggtaaccatccttctaccctctacctctgtgagttcaattgttttaatttttagcaccca

SEQ ID NO: 727022 - DNA, 120 bp, Artificial Sequence
  ENSG00000198363_73 (sequence is synthesized)
ctacctctgtgagttcaattgttttaatttttagcacccacaaattagtgagaacatgtgatgtttatctttctgtgcctggcttatttcacctaacataatgacctccagttccatcca

SEQ ID NO: 727023 - DNA, 120 bp, Artificial Sequence
  ENSG00000198363_74 (sequence is synthesized)
gagtagtactccattatatatgtaccacattttcttcattcgtctgttgacagacccttaagttgattccaaagcttagctattgtaaatagtgcaataaacatgagagtgcgtaaattt

SEQ ID NO: 727024 - DNA, 120 bp, Artificial Sequence
  ENSG00000198363_75 (sequence is synthesized)
atcttgtaaaggagtaggaatggattgtgctgtttcacttttctgtccttttctctctggctaagaatatggaatggtttagggggagatattttcttctgtgtgttaacagagttttta

SEQ ID NO: 727025 - DNA, 120 bp, Artificial Sequence
  ENSG00000198363_76 (sequence is synthesized)
agattctgcagaaatgaaatgggacggagaaaaggatttggctacatttttatgtgatttcattaagttgtttatgtgctctgcctttggaaagagagacaaagcatggaggacacaaga

SEQ ID NO: 727026 - DNA, 120 bp, Artificial Sequence
  ENSG00000198363_77 (sequence is synthesized)
ttattaggtaatttgcattgtatatagatgatcgtctcaaaatttcacaatgagagactgatgaaattgacataaatcaatcagcatgaacacttgaattaatccagaggactacttaag

SEQ ID NO: 727027 - DNA, 120 bp, Artificial Sequence
  ENSG00000198363_78 (sequence is synthesized)
actaaggctaaagttaaagaactcactaaagaagagctcaagaaggagaaagagaaacctgagtcaaggaaggaaagtaagaatgaagagagaaaaaaggggaagaaagaggatgtccga

SEQ ID NO: 727028 - DNA, 120 bp, Artificial Sequence
  ENSG00000198363_79 (sequence is synthesized)
aaggataagaaaattgctgatgcagacctatccaggaaggagtctcctaagggtaaaaaggacagagaaaaagagaaagtggacctagaaaaaagtgctaaaaccaaggaaaataggaaa

SEQ ID NO: 727029 - DNA, 120 bp, Artificial Sequence
  ENSG00000198363_80 (sequence is synthesized)
aaatcaacaaatatgaaggatgtttctagtaaaatggcatcccgagacaaagatgacagaaaggaaagtagaagttctaccagatatgcacacttaacaaagggaaatacccagaaaaga

SEQ ID NO: 727030 - DNA, 120 bp, Artificial Sequence
  ENSG00000198363_81 (sequence is synthesized)
aacggctaaagctctggcatcatcatcccagaacatggtcatgttccagattgcagtttgttacaaaaaagcatggaaaatgtaatattgctctgattggtgagggtgtgtaaattagcc

SEQ ID NO: 727031 - DNA, 120 bp, Artificial Sequence
  ENSG00000198363_82 (sequence is synthesized)
ttcatgtgttgacccttcttaaagaatggaagggggaactgaataaagaagataacagcttctagctaagaaggatgatgcattagtttgccaaatatataggctccttttgtgtgctat

SEQ ID NO: 727032 - DNA, 120 bp, Artificial Sequence
  ENSG00000198363_83 (sequence is synthesized)
aacaccaaggaggaaatgacacactgctggcaggagatggaaagcaactggagtcttcatggagcgatgacatttgagctggtcctcaagtagtgggtgaggattacatccatgcaagag

SEQ ID NO: 727033 - DNA, 120 bp, Artificial Sequence
  ENSG00000198363_84 (sequence is synthesized)
ccctgtgaacccagatactgaagtatgtctaatgacaaggatgataagttgatatggaaaaaaaatcacaggtgtttctgctcacagcaagcccagcagtactccaagagcagtacttaa

SEQ ID NO: 727034 - DNA, 120 bp, Artificial Sequence
  ENSG00000198363_85 (sequence is synthesized)
cttgggtgtcatgggctatgctctctatacagaagattacattagagtcttgtcttaaaaaccctttttgggaaaattatcataattcatttttttctaatatccaatgacttttacgct

SEQ ID NO: 727035 - DNA, 120 bp, Artificial Sequence
  ENSG00000198363_86 (sequence is synthesized)
tttgctactttgattcatcagtacgttgatgataccttctcctctttgtcccattcctgcttcatgataatttaatgaaattaaagtaatggatttaattagcacctacatctatgatta

SEQ ID NO: 727036 - DNA, 120 bp, Artificial Sequence
  ENSG00000198363_87 (sequence is synthesized)
tatgtatatattatttatctgaaacctttggggtgggccagctaccacaattaaaatatcaacttgattcaagttgtgtgaagcacactttaaacttgaaataaaagtgaataaaatcta

SEQ ID NO: 727037 - DNA, 120 bp, Artificial Sequence
  ENSG00000198363_88 (sequence is synthesized)
aacttcagaggtcctcataatgatacttggataataaagattccccatagacacttccattgaaaaagaaaagaagtaaacaagtgtcatttgtaatttgaaatgttttaagttaactgt

SEQ ID NO: 727038 - DNA, 120 bp, Artificial Sequence
  ENSG00000198363_89 (sequence is synthesized)
catgttactgtccatgaaatggatctggtgacttaggctctatctcctgacattgatttctttctcctgtgtcctcaattatttcttctcctgttaatgcccactggtaataattctcaa

SEQ ID NO: 727039 - DNA, 120 bp, Artificial Sequence
  ENSG00000198363_90 (sequence is synthesized)
aatcgattgctcagaatattccattgtaaaatgcaccttggaaatggttgttttcctcatttgtaaattgaagacaatgcctattcctcaaggtggttgtgagaaccagtcaatgttgca

SEQ ID NO: 727040 - DNA, 120 bp, Artificial Sequence
  ENSG00000198363_91 (sequence is synthesized)
tatgtgtaaacagccagcacatggttgggcattcagtttccctttatcattggtagaataagaatagtaatactcaaccaaaacgtctcagtcaggggttaaaaacttggaagcactgaa

SEQ ID NO: 727041 - DNA, 120 bp, Artificial Sequence
  ENSG00000198363_92 (sequence is synthesized)
actgtgcttcctattcctacttaggtcaacagattgcaaaacaaatatttcagtcctttatcctttgtaatgaatgtgtctttgtgaaatgagtatagtggagcctgatttattctattg

SEQ ID NO: 727042 - DNA, 120 bp, Artificial Sequence
  ENSG00000198363_93 (sequence is synthesized)
agatcattgagggggcaaatgcaaataattataaatgttgcacatgagtgaagccgtaagaatgcttaatttttaaaagaatattgtgacaacctgaaaacacaagatatgaaggctaga

SEQ ID NO: 727043 - DNA, 120 bp, Artificial Sequence
  ENSG00000198363_94 (sequence is synthesized)
aaaaaagttatgaaataaactatagccttaagtatatggtacaatcgagaagcctaataaccagcctaattgtgaaaaacttatgtttgttttgtattcagaacacatttttccatagat

SEQ ID NO: 727044 - DNA, 120 bp, Artificial Sequence
  ENSG00000198363_95 (sequence is synthesized)
gagattttatggtcttcagagattttttttttactctggtccacaaaaattgatttaattctaatatccatttctgcaactctcattgtaactatgtttctatggaaaatgcatttatca

SEQ ID NO: 727045 - DNA, 120 bp, Artificial Sequence
  ENSG00000198363_96 (sequence is synthesized)
ttctgccttgggatattaggaatatatttagttttacttctgaatgttctccagaatttctttggttacatccatggtgttaaatccattcagataccttacatggacaaaaatcatgga

SEQ ID NO: 727046 - DNA, 120 bp, Artificial Sequence
  ENSG00000198363_97 (sequence is synthesized)
ttggctcacataattgtaaagcccaggagtagttttggcttttttcttttgttatgctggatctaggtgcttgaacagtgttctcaacatccatctgtctatggaccctcaggaatgttg

SEQ ID NO: 727047 - DNA, 120 bp, Artificial Sequence
  ENSG00000198363_98 (sequence is synthesized)
gctttcttctcgggcagagtctcgtgtgctcatcttcaaccctactccttatggggtgggagataagaaagctgtgattggtgacaccctgggatatgtgagtgcccacttttaaactgt

SEQ ID NO: 727048 - DNA, 120 bp, Artificial Sequence
  ENSG00000198363_99 (sequence is synthesized)
tgggtaaagaaaaattggagtcctctaaggaagttagtgtgtttttaccagaaggaggaggaattgatgcactgaaagcaggcagatgatggagtttgtttcccctttttctacccatcc

SEQ ID NO: 727049 - DNA, 120 bp, Artificial Sequence
  ENSG00000198363_100 (sequence is synthesized)
cattcctacttctccccctgcccaaatacagagaggtgaatgggatgggccaaaataggtatttcaaaataagaagctgtggagctaaacattgggtactcatgggcataaagatggaaa

SEQ ID NO: 727050 - DNA, 120 bp, Artificial Sequence
  ENSG00000198363_101 (sequence is synthesized)
caggagacactagaacttctagagaggggagagagggagggagacaagggttgaaaaactaactattggatactatgctcattacctgagtgatggaatcattcatattctaaatttcaa

SEQ ID NO: 727051 - DNA, 120 bp, Artificial Sequence
  ENSG00000198363_102 (sequence is synthesized)
tatcacgcaatatacccatgcagcaaacttgcacgtgctccttgaatctaaatagaagttgaagttatatttaaaaattaaaaaaaaaaaagctagggagaagagagagatctcattcca

SEQ ID NO: 727052 - DNA, 120 bp, Artificial Sequence
  ENSG00000198363_103 (sequence is synthesized)
aacaattattggtcaacaatagttttagaccattgaaagaatataagagaatgttgacttgataataaatattgccatttagatgtcaggtgataaagtttattttgttgttaagctctc

SEQ ID NO: 727053 - DNA, 120 bp, Artificial Sequence
  ENSG00000198363_104 (sequence is synthesized)
tccattttgccccattcagtttaaaaggaaagtttttgtgtttaggaaactaaaggatgggtgatatgtagcagacccataaggttattttcatgaaaaacctagcttgggctaatctga

SEQ ID NO: 727054 - DNA, 120 bp, Artificial Sequence
  ENSG00000198363_105 (sequence is synthesized)
aagattcctcaataacagtctttggtgtcttatcctttcttctccatttgcctaagaatataattgtataagctggatgtttattccttggctatcgtttttacctaggaatcaatttct

SEQ ID NO: 727055 - DNA, 120 bp, Artificial Sequence
  ENSG00000198363_106 (sequence is synthesized)
gcaagagctctgtaagccttacaaagcagaaagtcatccatttcttttttctttgttctcatttagtgcctcatttgatttcactttgtgtatctatttattgctccatgttaagtcagg

SEQ ID NO: 727056 - DNA, 120 bp, Artificial Sequence
  ENSG00000198363_107 (sequence is synthesized)
tatgcatacatcatagaagtctgcctctcatttccatcttctttgccttatgtatcacttctcttgtgtcctattagagggagatgatctatgcttaaagctgttgggttatttttgata

SEQ ID NO: 727057 - DNA, 120 bp, Artificial Sequence
  ENSG00000198363_108 (sequence is synthesized)
ggggatacaagagattgaggtggctgcaatccctccagtgaaatgctgcaaaataagcaaggggctgagagagaaagtaatgagactgaaacgattgtcagtacagcccactagtccctc

SEQ ID NO: 727058 - DNA, 120 bp, Artificial Sequence
  ENSG00000198363_109 (sequence is synthesized)
tgcctagaacgtgctcctgaatgtgctcctgctctgtgtggtgggctgcctttgtctctcccacgggacccagcccagtcatcacctctgcactcagacatctctgaccctcccaagtgg

SEQ ID NO: 727059 - DNA, 120 bp, Artificial Sequence
  ENSG00000198363_110 (sequence is synthesized)
ctgcatcccacacactccagttatcgcactcatcaccttgcctcattcttggactttgctgccagactacgatttatctcgagcacctatcctagtaactgacactaataggcattcatt

SEQ ID NO: 727060 - DNA, 120 bp, Artificial Sequence
  ENSG00000198363_111 (sequence is synthesized)
gtttgtttattgaatggtgactatacaaaataaattatctaaaaatatttcaggtgtatatatactgttgaagaatattaggaagaagaaaaccgtgtgtgtgtgtttttgaagaaccca

SEQ ID NO: 727061 - DNA, 120 bp, Artificial Sequence
  ENSG00000198363_112 (sequence is synthesized)
aaagattgttcagtaattgcagtgttttaactaccttggaagttacctgtgactggcagggaggggggtgtaaagattttttttagaagaaattaatgaaatggtaaatttttggaaaaa

SEQ ID NO: 727062 - DNA, 120 bp, Artificial Sequence
  ENSG00000198363_113 (sequence is synthesized)
tacttatttaaattatctcatttaattcttaaagcccttcttaggggtcctgttttgtcccctttttgcatttgtggaaaccaaaaagtgtagctgtggttaacactgagatagaattca

SEQ ID NO: 727063 - DNA, 120 bp, Artificial Sequence
  ENSG00000198363_114 (sequence is synthesized)
aatggaattcaaaggcatcctcttgtcccaggtgcctgaacttacacaccatgctgagttgcatgtccttgaactgtatttttcatgatgttaaagtgagtccactctcaccagtctttg

SEQ ID NO: 727064 - DNA, 120 bp, Artificial Sequence
  ENSG00000198363_115 (sequence is synthesized)
ttgagtcccttcattggtgctgaaaccaggctcttgggaaccttattggcagtgtttaattcttttgtaatttatgtctgtttgaaatctgtctgtccagcttgggttacttgaagatgc

SEQ ID NO: 727065 - DNA, 120 bp, Artificial Sequence
  ENSG00000198363_116 (sequence is synthesized)
tttgaatctggaatggctcttactgcatatcatggggcagctttgagtacctggtagtctcagaattttggtaagttccgagactgctgttggtatactgaggaagatctgtattcactg

SEQ ID NO: 727066 - DNA, 120 bp, Artificial Sequence
  ENSG00000198363_117 (sequence is synthesized)
attacacaagccaggagcgacaacgaggattaacgtggttacctagtatgcatgcctttctggtgtattgattttccagaatatttctcaaatttcatatacctatgagccttattcttg

SEQ ID NO: 727067 - DNA, 120 bp, Artificial Sequence
  ENSG00000198363_118 (sequence is synthesized)
ggataaattgatttatactgctagactccttgcaattgaaacagtaccacttctgagcactcaccctgagcacagataaccatagctggagtaacctggattagtaaggacacgttttct

SEQ ID NO: 727068 - DNA, 120 bp, Artificial Sequence
  ENSG00000198363_119 (sequence is synthesized)
ttcatctgtacacctttgaattagtaaaccaaagattaaaacactaattttaaaaaactttttagctttttaatgggctaggtgtatgaaattgtatgaaacaaagtaagtttataattg

SEQ ID NO: 727069 - DNA, 120 bp, Artificial Sequence
  ENSG00000198363_120 (sequence is synthesized)
tttcccaggttttgttgagggagtggcttgcttataactcttaggagaagtaaatcctttgtgttccctcaagtcacagcccttggatccagcatccagggcctttctgatatgcacacc

SEQ ID NO: 727070 - DNA, 120 bp, Artificial Sequence
  ENSG00000198363_121 (sequence is synthesized)
tctcttggtgcctcagtcacctttcttttccttggtgccaaatatgtgcccagttgaggaatttcgtacagtcacatgcctcatgctatcattttggttaaggatggactgcatgtatga

SEQ ID NO: 727071 - DNA, 120 bp, Artificial Sequence
  ENSG00000198363_122 (sequence is synthesized)
tagtggtcccataagatcatagtgtcatatttatactgtaccttttctgtgtttagatacacaaacactttgtgttacaattgtctacagtattcggtacagtacgtgctgtacagtttt

SEQ ID NO: 727072 - DNA, 120 bp, Artificial Sequence
  ENSG00000198363_123 (sequence is synthesized)
gtagcctgggaacaataggatgttgcatacagtctaggtttgtggcaggctataccttctaagtttgcctgggcacactgcaatgttcccacagtggtaaaatttcctaatggcacattt

SEQ ID NO: 727073 - DNA, 120 bp, Artificial Sequence
  ENSG00000198363_124 (sequence is synthesized)
caacatgtatttccacacattcctcagaatgtatcgctgttgttaagcaacacatgactgaacttgcagttccctacccgaaacacacgtgtaacttacatagccacatccctgatttcc

SEQ ID NO: 727074 - DNA, 120 bp, Artificial Sequence
  ENSG00000198363_125 (sequence is synthesized)
ttcagggtctgttcacatgttatcagtgagtccttttgccaaagtattatgaatagtccccacccccacttttccctaatgtgctccctgttctgtgtcttccccgtactatctgtcccc

SEQ ID NO: 727075 - DNA, 120 bp, Artificial Sequence
  ENSG00000198363_126 (sequence is synthesized)
atccaatatactctaaatagttcatgtttcttattttttaagtttctctctcccccggaaggtaggtgtgttgttttcatttactgtagaataatgccttgaattaataggtgctaaata

SEQ ID NO: 727076 - DNA, 120 bp, Artificial Sequence
  ENSG00000198363_127 (sequence is synthesized)
tttgttgaacgattaaatacaacatacaatttagtaagtttacaactactgcatatttatggaaagaaatatattgattctttctcattatgggcagcagtgaataaagtaagctaatcc

SEQ ID NO: 727077 - DNA, 120 bp, Artificial Sequence
  ENSG00000198363_128 (sequence is synthesized)
tgggcttgggtatttgtgtcactcatatttgctatgagtggttgatttaaagtgctgatttcatttgcatttcatagcttcatctaattttaattaaaattggaggggcaattatatagt

SEQ ID NO: 727078 - DNA, 120 bp, Artificial Sequence
  ENSG00000198363_129 (sequence is synthesized)
gattaaatgcaaatgttttataatttccaaatttatctgattaacctaaagaactaaaaccaaggtatgttttaagggaattaatgtgttttccaaatcatgttgtggccattgctgtgg

SEQ ID NO: 727079 - DNA, 120 bp, Artificial Sequence
  ENSG00000198363_130 (sequence is synthesized)
actggcagtatctattcaccatacataatgactggaaggcggctgtggacaccctgttcctcttggcagcacaggaatggaagtgggtcccagtcctgatgattaacactgaaaagggag

SEQ ID NO: 727080 - DNA, 120 bp, Artificial Sequence
  ENSG00000198363_131 (sequence is synthesized)
actgctggtagcttctggaaaaaatttcctcaagcctaagaaagaagcagagcaagagatgctccttttgcttctggacatcgccttgtctgaaaaagaagcttgcagctggggagctct

SEQ ID NO: 727081 - DNA, 120 bp, Artificial Sequence
  ENSG00000198363_132 (sequence is synthesized)
gattgccagcctgagggtgaagcttgacctgcgatgcagtcagccgcctccgcacttcttgtttagttagatgataaatttccttcctacccaaccattataagctggcagtttggtaac

SEQ ID NO: 727082 - DNA, 120 bp, Artificial Sequence
  ENSG00000198363_133 (sequence is synthesized)
tgcagccccaggaacatcgaaaccgacacatctcatgtcataacctaattttgaatatttatttcattgctacttcattgccacttgtacctcataataaatccatttttgaaaaccttt

SEQ ID NO: 727083 - DNA, 120 bp, Artificial Sequence
  ENSG00000198363_134 (sequence is synthesized)
gaggataatcctgtagaagattcacaggtaattgtagaagaagtaagcatttttcctgtggaagaacagcaggaagtaccaccaggctatttgatggagaatatggaatcagaattgcct

SEQ ID NO: 727084 - DNA, 120 bp, Artificial Sequence
  ENSG00000198363_135 (sequence is synthesized)
ccaggctgcccagtgcttgtcagtgtcccagggtgtttccttttagttcactgcattacatacttttccctgttttttcctactttcctctacctgagccctcttgtcaccagttaatat

SEQ ID NO: 727085 - DNA, 120 bp, Artificial Sequence
  ENSG00000198363_136 (sequence is synthesized)
gtgtgattgaattttttactcctcactattttccctttctaatttctctacagaatcagtttctcatgtatatgcataagcaagaaatacaattatcactattgcatgctgctgaattta

SEQ ID NO: 727086 - DNA, 120 bp, Artificial Sequence
  ENSG00000198363_137 (sequence is synthesized)
agaaacaagtcattttgcttttaataaggctcttttttaaatacaaatctgagcctgagttttctttaaaaatcttattgaaagtattttaatgcttaagtctgttgacagaataaaaca

SEQ ID NO: 727087 - DNA, 120 bp, Artificial Sequence
  ENSG00000198363_138 (sequence is synthesized)
aattttacatatctaccatgtttgccaacacagaacaaaaaaatgtaagctgatagagaaggcatgcagagttgcttagtcaaatatattcattttaatgtgtatgtaccaatgtcatat

SEQ ID NO: 727088 - DNA, 120 bp, Artificial Sequence
  ENSG00000198363_139 (sequence is synthesized)
tattattcatggattgaagaaatcaaaatggctgaagataaagaatcaatgtgaaaccagttactgtcttgtactgaagattatttgaaggactgtcagggattctgcctgaaagtttca

SEQ ID NO: 727089 - DNA, 120 bp, Artificial Sequence
  ENSG00000198363_140 (sequence is synthesized)
tcaccactctgttgctttgactcattgggttagattgtgtctgaaatgtagagttttgtgcatagagctagaaaacttaattgaagttgttagaatcacatctaaaataaaaatgtaaac

SEQ ID NO: 727090 - DNA, 120 bp, Artificial Sequence
  ENSG00000198363_141 (sequence is synthesized)
tcagaggatgagagtttgttacaacacagttgtgttcctttggattacttatcttcttttgtagctgaagtagactggagcaaagtgatattaatccaaactcttaagtctatatccctt

SEQ ID NO: 727091 - DNA, 120 bp, Artificial Sequence
  ENSG00000198363_142 (sequence is synthesized)
cttggtgctttctattagcctggagacattgcccagctctagggctgccctcctccattatttctcggcagagtacttatctagttgaggagctgccttgtttctctctctgggtagaca

SEQ ID NO: 727092 - DNA, 120 bp, Artificial Sequence
  ENSG00000198363_143 (sequence is synthesized)
gatgtgcattcagagtcagccaacatgcattgagccctgcagatgttatgcattgtgcttcctgctttgcaacttgacttattcatgactacaagaagtacccctaactgaagaactcac

SEQ ID NO: 727093 - DNA, 120 bp, Artificial Sequence
  ENSG00000198363_144 (sequence is synthesized)
cccatgatatttatacgttttgatatagaggagatggtatggtgcaatggaagctggctgcctttttcaaatcccagctctaacacctaacctgtgtaaccttggctagttacttaatcc

SEQ ID NO: 727094 - DNA, 120 bp, Artificial Sequence
  ENSG00000198363_145 (sequence is synthesized)
gtatatatcttacaggagacttttctcccttaaatcatatatttcattactgttaaaattttaaatggcttatttttccacactctttcatgtcaatttacttttatcaatgaataagtg

SEQ ID NO: 727095 - DNA, 120 bp, Artificial Sequence
  ENSG00000198363_146 (sequence is synthesized)
tatatctcttacacatatatcttttgataagtataataatttcatgtgtgtttccagatttaaagtacttcttattctgaacttagaatttgaatagataatatcctagtctgtttttag

SEQ ID NO: 727096 - DNA, 120 bp, Artificial Sequence
  ENSG00000198363_147 (sequence is synthesized)
atatggtaattatagccatttttcattaacattacacattcacttccatttcaaaatgtaaatttctacaggcttacataaattaatgatgaaataaaagtgataataaacatcttaaaa

SEQ ID NO: 727097 - DNA, 120 bp, Artificial Sequence
  ENSG00000198363_148 (sequence is synthesized)
accgtctcatacttctaaatgtaaaaacattttaaaaatgtcatagaatatgatgtaataacttctatttattgatcatgtattcagataaatgtatatgtatcatgaatttttatggat

SEQ ID NO: 727098 - DNA, 120 bp, Artificial Sequence
  ENSG00000198363_149 (sequence is synthesized)
atattgaatactttcattgacgttaaataagaatattaagattttaaatgttatttctgtgcataatgccttgtaactttttcaagtatgctaaatactcagggagatggatttgctcgt

SEQ ID NO: 727099 - DNA, 120 bp, Artificial Sequence
  ENSG00000198363_150 (sequence is synthesized)
tgttttcttccctccttccccttcctgcttccctgtttttctctttcgtggacacctccccaggctcatgtgccaccaccttccctcctctccagccctcccagccctcccgcagccttt

SEQ ID NO: 727100 - DNA, 120 bp, Artificial Sequence
  ENSG00000198363_151 (sequence is synthesized)
cttgtagtcagctacaaagtacactgaaaatgatgttcttggtggtataattggtttctgtatcgttttgtttcaactcatgtattcactgaactaaatttggacacttaacagcaaatt

SEQ ID NO: 727101 - DNA, 120 bp, Artificial Sequence
  ENSG00000198363_152 (sequence is synthesized)
gtgttgtggttaacccttgatgcttgtctttctaacacactattaattatgatgattctaatggatttcattataaaaatatttctggcatgatttttaagttaaatgcttctctgttct

SEQ ID NO: 727102 - DNA, 120 bp, Artificial Sequence
  ENSG00000198363_153 (sequence is synthesized)
ttaacatgactgatgtataaaatgatggttctttactaagctgatattttttattgtaatttgtttaggtttgtcagataggttcatacaaatttctatgtaaaattctgtgttaatggt

SEQ ID NO: 727103 - DNA, 120 bp, Artificial Sequence
  ENSG00000198363_154 (sequence is synthesized)
gcttttaaaataatttaaaaataactccatgtttttgccttagagtaagttaacttactgttttcagatagtagcatgacatatttctgtctgtgaaagcaaaatttattttaaatttta

SEQ ID NO: 727104 - DNA, 120 bp, Artificial Sequence
  ENSG00000198363_155 (sequence is synthesized)
tttccaaatatacatccagagaaagtaatttgtattttttttaaagtaggcatattacacaagagggaacatgtgaatatgtatcttaatgttgtacatattaaaattattcatcctaaa

SEQ ID NO: 727105 - DNA, 120 bp, Artificial Sequence
  ENSG00000198369_0 (sequence is synthesized)
gcactccaccacctctggccgctgggaagacgtcatcgcttccgccctacttcctcctcctgttggcggcggtgagaatccaatatggagtaaatcggtggagtcgagagatggggctcg

SEQ ID NO: 727106 - DNA, 120 bp, Artificial Sequence
  ENSG00000198369_1 (sequence is synthesized)
agtaaatcggtggagtcgagagatggggctcggacggggcgccctgcaccgcctcccaggcgcacctcccccggccgccgaccgctccccggaaccgtgattggcccggccccccggggg

SEQ ID NO: 727107 - DNA, 120 bp, Artificial Sequence
  ENSG00000198369_2 (sequence is synthesized)
ggcgctctcctcctcctcgcagcagtccctgccgctccgaggcgcgcttgtttttctcctgctctcccccaccgccgtccccttcccaaatctcgccccctctgcccgctcccgagcccc

SEQ ID NO: 727108 - DNA, 120 bp, Artificial Sequence
  ENSG00000198369_3 (sequence is synthesized)
cggagcctccgcccgcctctccccacggcgctgcggcgttcactccccgcgcagcctgcctttgcaccccttcccccaaaccctatcccgcgccctgcttccccttctgctgcggcgccc

SEQ ID NO: 727109 - DNA, 120 bp, Artificial Sequence
  ENSG00000198369_4 (sequence is synthesized)
tcttcatctctagccgccccccctccccaaatcaggcgatctccggagatgtgaagaaggggggcgagcggacaggaagatgaagggagcaaagctgcccgccgcgggacaggcgtctag

SEQ ID NO: 727110 - DNA, 120 bp, Artificial Sequence
  ENSG00000198369_5 (sequence is synthesized)
gtgaacaagaaaatgaccgaagaaacacacccagacgatgacagctatattgtgcgtgtcaaggctgtggttatgaccagagatgactccagcgggggatggttcccacaggaaggaggc

SEQ ID NO: 727111 - DNA, 120 bp, Artificial Sequence
  ENSG00000198369_6 (sequence is synthesized)
gggatcagtcgcgtcggggtctgtaaggtcatgcaccccgaaggcaatggacgaagcggctttctcatccatggtgaacgacagaaagacaaactggtggtattggaatgctatgtaaga

SEQ ID NO: 727112 - DNA, 120 bp, Artificial Sequence
  ENSG00000198369_7 (sequence is synthesized)
aaggacttggtctacaccaaagccaatccaacgtttcatcactggaaggtcgataataggaagtttggacttactttccaaagccctgctgatgcccgagcctttgacaggggagtaagg

SEQ ID NO: 727113 - DNA, 120 bp, Artificial Sequence
  ENSG00000198369_8 (sequence is synthesized)
aaagcaatcgaagaccttatagaaggttcaacaacgtcatcttccaccatccataatgaagctgagcttggcgatgatgacgtttttacaacagctacagacagttcttctaattcctct

SEQ ID NO: 727114 - DNA, 120 bp, Artificial Sequence
  ENSG00000198369_9 (sequence is synthesized)
cagaagagagagcaacctactcggacaatctcctctcccacatcctgtgagcaccggaggatttataccctgggccacctccacgactcataccccacagaccactatcacctcgatcag

SEQ ID NO: 727115 - DNA, 120 bp, Artificial Sequence
  ENSG00000198369_10 (sequence is synthesized)
ccgatgccaaggccctaccgccaggtgagcttcccggacgacgacgaggagatcgtgcgcatcaacccccgggagaagatctggatgacggggtacgaggattaccggcacgcacccgtc

SEQ ID NO: 727116 - DNA, 120 bp, Artificial Sequence
  ENSG00000198369_11 (sequence is synthesized)
aggggcaagtacccggacccctcggaggacgcggactcctcctacgtgcgcttcgccaagggcgaggtccccaagcatgactacaactacccctacgtggactcctcagactttggccta

SEQ ID NO: 727117 - DNA, 120 bp, Artificial Sequence
  ENSG00000198369_12 (sequence is synthesized)
ggcgaggaccccaaaggccgcgggggcagcgtgatcaagacgcagccctcccggggcaagtcgcggcggcggaaggaggacggagagcgctcgcggtgcgtgtactgcagggacatgttc

SEQ ID NO: 727118 - DNA, 120 bp, Artificial Sequence
  ENSG00000198369_13 (sequence is synthesized)
aaccacgaggagaaccgccggggccactgccaggacgcgcccgactccgtgagaacttgcatccgccgggtgagctgcatgtggtgcgcggacagcatgctctatcactgtatgtcggac

SEQ ID NO: 727119 - DNA, 120 bp, Artificial Sequence
  ENSG00000198369_14 (sequence is synthesized)
cccgagggagactatacagacccttgctcgtgcgatactagcgacgagaagttttgcctccggtggatggctcttattgccttgtctttcctggccccctgtatgtgctgttacctgccc

SEQ ID NO: 727120 - DNA, 120 bp, Artificial Sequence
  ENSG00000198369_15 (sequence is synthesized)
cttcgggcctgctaccactgcggagtgatgtgcaggtgctgtggcgggaagcacaaagcggccgcgtgactcagtttccctcccttctccctccatccgcagccacaggggaactcgtct

SEQ ID NO: 727121 - DNA, 120 bp, Artificial Sequence
  ENSG00000198369_16 (sequence is synthesized)
cttacatactctcatcttctcccccgctcccttccactccaaggagcgaggagggcaagcggcctcccagctccctggtacctcgaggcaccattccagccagggacgctgccgggtaga

SEQ ID NO: 727122 - DNA, 120 bp, Artificial Sequence
  ENSG00000198369_17 (sequence is synthesized)
ctctccactccccctgccgcccacactgcagcagccacatccatacacacacgctcgcacagtgttctgaggaaggaaccttcgccacagactcctgtactattaacaatctgtaaccaa

SEQ ID NO: 727123 - DNA, 120 bp, Artificial Sequence
  ENSG00000198369_18 (sequence is synthesized)
actgctgattttcggtgggttttgtagttgatttttccaagagcgtcgaagactctctttctcttggttcaccttgcctgtcgctagcaagcatctggttcagcggaaatgggatgtgag

SEQ ID NO: 727124 - DNA, 120 bp, Artificial Sequence
  ENSG00000198369_19 (sequence is synthesized)
aatgatgaaacccgacagaagtatctcagcctgcagtcagttattatgtataggaggtgagctagttaacaaacttgtaccacaaaacaatatcgctttaacttttctaaagccaaattt

SEQ ID NO: 727125 - DNA, 120 bp, Artificial Sequence
  ENSG00000198369_20 (sequence is synthesized)
cccatgtaagctgcagtttctatctttagcccatcatcattttctgcccccccaaaatctgttgaaatgattcactgatgcaaaacattcacccgtaatagactgagaattgagccttaa

SEQ ID NO: 727126 - DNA, 120 bp, Artificial Sequence
  ENSG00000198369_21 (sequence is synthesized)
cttcagattaacttgtgagaatcaggaaaattccttcaactgcattgcatcctcttggaccagggctagaatggggatttcaggtttctatgagcctccccattacccctaaagtagaac

SEQ ID NO: 727127 - DNA, 120 bp, Artificial Sequence
  ENSG00000198369_22 (sequence is synthesized)
attttttaaattgtgttgccaccacttctaaaaatttagcaatattagaataggatactagtgaagtaagaaattttgcttgttgttttgcaaaccaaatagtttcctcaaacacaaatc

SEQ ID NO: 727128 - DNA, 120 bp, Artificial Sequence
  ENSG00000198369_23 (sequence is synthesized)
agtgttcccacgaacaagttccagttgagaaacactaaggttatggtgaataaaaccatagggagcttcttccccccaacccctggctattttatattaatggggagaggggatttttaa

SEQ ID NO: 727129 - DNA, 120 bp, Artificial Sequence
  ENSG00000198369_24 (sequence is synthesized)
atgtcataaatttgaagagtggtgggttgcattttcttcatgggtttatgttttcgtttcattttggactcaatttcacatcaccaaattcctcatttatacttggggaaaaaacaaggc

SEQ ID NO: 727130 - DNA, 120 bp, Artificial Sequence
  ENSG00000198369_25 (sequence is synthesized)
catatgtaaaaacccttccaatgcctaagtgtctttctcctgcaactccaaacccagactcgccactttgggtgcacaggtggttaggtcagccaactggttctgcctgtcgccttgcca

SEQ ID NO: 727131 - DNA, 120 bp, Artificial Sequence
  ENSG00000198369_26 (sequence is synthesized)
cggaggaggcttctaattagctggaaaagagtatttttctaatacgttgcaaggattagccaaatcttcttattgaagaaagaagaaaagtgaagagtggttacctatacctagcatagt

SEQ ID NO: 727132 - DNA, 120 bp, Artificial Sequence
  ENSG00000198369_27 (sequence is synthesized)
acaatcagaacctcgtggagaccaccggggacaggcttgcggacgccggctgttcttcccgccacgatctttctgtggtagcggccagcagaagacatggcctgctccccactccctttc

SEQ ID NO: 727133 - DNA, 120 bp, Artificial Sequence
  ENSG00000198369_28 (sequence is synthesized)
cccactccttctttattgcacacaggacaccagtcttcaaggaaagggacttttttccagtctgccaatcatattgggaaagtgctagctgtgctcaccttcatggggctgtttccagct

SEQ ID NO: 727134 - DNA, 120 bp, Artificial Sequence
  ENSG00000198369_29 (sequence is synthesized)
cgtccacaagctcatcgattttctttagtagattaccggtgtaaatacccagtgtgcttatgagtcagttagtagacgtcttcattcattggagtaactggtttaggctttccagtttgg

SEQ ID NO: 727135 - DNA, 120 bp, Artificial Sequence
  ENSG00000198369_30 (sequence is synthesized)
aaaaggagcagagagctgtccatctggattgatggaagaaaagagaacctcatccatgcctggagaacatctagaaaaccttcagccagcctccagtgctgtcgagagaccaccttcccc

SEQ ID NO: 727136 - DNA, 120 bp, Artificial Sequence
  ENSG00000198369_31 (sequence is synthesized)
cgacccggaggcacttccttggggtctttctctagggtctcttctctacaaagcacaacactaatgttcgtttccttagacctcagttcaagtgcccctatttatttcaataagaacgca

SEQ ID NO: 727137 - DNA, 120 bp, Artificial Sequence
  ENSG00000198369_32 (sequence is synthesized)
catatcccagctgttttttgtttgtcacctctatttagttgttacctgtttctctcttctttcaccccttgtccttttccacccttttaagagttacgctagcagatcttactccacgta

SEQ ID NO: 727138 - DNA, 120 bp, Artificial Sequence
  ENSG00000198369_33 (sequence is synthesized)
tactttttggtttgtgaaggcatcggttaagggcacaaagacagccatggggacatttatgtaaatacgtctctaattgccacactgcagctgaacagtgtgtagtattttcccagtcag

SEQ ID NO: 727139 - DNA, 120 bp, Artificial Sequence
  ENSG00000198369_34 (sequence is synthesized)
ctttgccatactgacgtcaatcatttgagagaaattattcagattttatttttgtatctgtggtaacaaaacattaaccaaaagattttctgtccagaagcctccccgaccccccaagct

SEQ ID NO: 727140 - DNA, 120 bp, Artificial Sequence
  ENSG00000198369_35 (sequence is synthesized)
atttgctcacattaacaaattaaagtgcctgaagcataattcattctttacctgtatactaaaaaccctgttgtattgatttttttataataagcctttttacctctgtgtaaaaaatat

SEQ ID NO: 727141 - DNA, 120 bp, Artificial Sequence
  ENSG00000198369_36 (sequence is synthesized)
atatacaagtgtatgatgtacattttagttcttaacttttttttatggtttctaatatgtatgaccaatgtagccattgctttaaaatgtaccgtgtaaatataaacacatcctatcaga

SEQ ID NO: 727142 - DNA, 120 bp, Artificial Sequence
  ENSG00000198369_37 (sequence is synthesized)
aaggagactgaatcatatatgggggaaaccacttctcaggcagccagctggttctcaggtcagcaagagacgatccatttttatcggaagctttatagtagcaataatgctaatacccag

SEQ ID NO: 727143 - DNA, 120 bp, Artificial Sequence
  ENSG00000198369_38 (sequence is synthesized)
agaatggattctggcgggcccagaaggctcctggcctacccactgtcctcctgtaatcagaggcccagggtgtacagctgccactgaaaaggaaagggatctgtgacctctggagccctg

SEQ ID NO: 727144 - DNA, 120 bp, Artificial Sequence
  ENSG00000198369_39 (sequence is synthesized)
tcggtttaggccttggtctatggcagcgagtgcagaagtttgagagattaattgggaacaacagcaggcaaagttaatttagggagcatcctggcaagaatcaattaaagaagagtaaat

SEQ ID NO: 727145 - DNA, 120 bp, Artificial Sequence
  ENSG00000198369_40 (sequence is synthesized)
tcatgcaccccgaaggcaatggacgaagcggctttctcatccatggtgaacgacagaaagacaaactgcttcaaaagttagaaccccggagctggtgccaaattgtaaaacgtgactgtc

SEQ ID NO: 727146 - DNA, 120 bp, Artificial Sequence
  ENSG00000198369_41 (sequence is synthesized)
gtattcaaaacaaaagtgtactcttttattattatgaatcacattgtactgagctgtgaagtcagtgttttaaaaatgtagagtttattcatggagcatgccattgaggtttggatggtg

SEQ ID NO: 727147 - DNA, 120 bp, Artificial Sequence
  ENSG00000198369_42 (sequence is synthesized)
gcaggtaaaacagaaaggcaagatgtcatctgacattaggctacttataaataaatgtttatctagcttttatttcatgccctaatgaataaaacatgcttggaaaaagaaagtaacaag

SEQ ID NO: 727148 - DNA, 120 bp, Artificial Sequence
  ENSG00000198369_43 (sequence is synthesized)
cttctccctttttttcggtcgcaagtaggaagctttttgcactccaccacctctggccgctgggaagacgtcatcgcttccgccctacttcctcctcctgttggcggcggcgatctccgg

SEQ ID NO: 727149 - DNA, 120 bp, Artificial Sequence
  ENSG00000198369_44 (sequence is synthesized)
ccaggacttgtgttctgatggaaggaccagccaacacccacacagccttcctttccttggtgtgcagatggctctatgcagtcttatctccagctgggcatctgggttcaggtcagacga

SEQ ID NO: 727150 - DNA, 120 bp, Artificial Sequence
  ENSG00000198373_0 (sequence is synthesized)
gcgcggtcacgtgacccggcccgagtgcgggcggtggaaggcggaagtaggagaggagttcggcgccgcttctgtggccacggcagcttcacggtgatgatatggcatctgccagctcta

SEQ ID NO: 727151 - DNA, 120 bp, Artificial Sequence
  ENSG00000198373_1 (sequence is synthesized)
gccgggcaggagtggccctgccttttgagaagtctcagctcactttgaaagtggtgtccgcaaagcccaaggtgcataatcgtcaacctcgaattaactcctacgtggaggtggcggtgg

SEQ ID NO: 727152 - DNA, 120 bp, Artificial Sequence
  ENSG00000198373_2 (sequence is synthesized)
atggactccccagtgagaccaagaagactgggaagcgcattgggagctctgagcttctctggaatgagatcatcattttgaatgtcacggcacagagtcatttagatttaaaggtctgga

SEQ ID NO: 727153 - DNA, 120 bp, Artificial Sequence
  ENSG00000198373_3 (sequence is synthesized)
gctgccataccttgagaaatgaactgctaggcaccgcatctgtcaacctctccaacgtcttgaagaacaatgggggcaaaatggagaacatgcagctgaccctgaacctgcagacggaga

SEQ ID NO: 727154 - DNA, 120 bp, Artificial Sequence
  ENSG00000198373_4 (sequence is synthesized)
acaaaggcagcgttgtctcaggcggagagctgacaattttcctggacgggccaactgttgatctgggaaatgtgcctaatggcagtgccctgacagatggatcacagctgccttcgagag

SEQ ID NO: 727155 - DNA, 120 bp, Artificial Sequence
  ENSG00000198373_5 (sequence is synthesized)
actccagtggaacagcagtagctccagagaaccggcaccagccccccagcacaaactgctttggtggaagatcccggacgcacagacattcgggtgcttcagccagaacaaccccagcaa

SEQ ID NO: 727156 - DNA, 120 bp, Artificial Sequence
  ENSG00000198373_6 (sequence is synthesized)
ccggcgagcaaagccccggtgctcggagccggcaccgccagcccgtcaagaactcaggccacagtggcttggccaatggcacagtgaatgatgaacccacaacagccactgatcccgaag

SEQ ID NO: 727157 - DNA, 120 bp, Artificial Sequence
  ENSG00000198373_7 (sequence is synthesized)
aaccttccgttgttggtgtgacgtccccacctgctgcacccttgagtgtgaccccgaatcccaacacgacttctctccctgccccagccacaccggctgaaggagaggaacccagcactt

SEQ ID NO: 727158 - DNA, 120 bp, Artificial Sequence
  ENSG00000198373_8 (sequence is synthesized)
cgggtacacagcagctcccagcggctgcccaggcccccgacgctctgcctgctggatgggaacagcgagagctgcccaacggacgtgtctattatgttgaccacaataccaagaccacca

SEQ ID NO: 727159 - DNA, 120 bp, Artificial Sequence
  ENSG00000198373_9 (sequence is synthesized)
cctgggagcggccccttcctccaggctgggaaaaacgcacagatccccgaggcaggttttactatgtggatcacaatactcggaccaccacctggcagcgtccgaccgcggagtacgtgc

SEQ ID NO: 727160 - DNA, 120 bp, Artificial Sequence
  ENSG00000198373_10 (sequence is synthesized)
gcaactatgagcagtggcagtcgcagcggaatcagctccagggggccatgcagcacttcagccaaagattcctctaccagtcttcgagtgcttcgactgaccatgatcccctgggccccc

SEQ ID NO: 727161 - DNA, 120 bp, Artificial Sequence
  ENSG00000198373_11 (sequence is synthesized)
tccctcctggctgggagaagagacaggacaatggacgggtgtattacgtgaaccataacactcgcacgacccagtgggaggatccccggacccaggggatgatccaggaaccagctctgc

SEQ ID NO: 727162 - DNA, 120 bp, Artificial Sequence
  ENSG00000198373_12 (sequence is synthesized)
ccccaggatgggagatgaaatacaccagcgagggggtgcgatactttgtggaccacaatacccgcaccaccacctttaaggatcctcgcccggggtttgagtcggggacgaagcaaggtt

SEQ ID NO: 727163 - DNA, 120 bp, Artificial Sequence
  ENSG00000198373_13 (sequence is synthesized)
cccctggtgcttatgaccgcagttttcggtggaagtatcaccagttccgtttcctctgccattcaaatgccctacctagccacgtgaagatcagcgtttccaggcagacgcttttcgaag

SEQ ID NO: 727164 - DNA, 120 bp, Artificial Sequence
  ENSG00000198373_14 (sequence is synthesized)
attccttccaacagatcatgaacatgaaaccctatgacctgcgccgccggctctacatcatcatgcgtggcgaggagggcctggactatgggggcatcgccagagagtggtttttcctcc

SEQ ID NO: 727165 - DNA, 120 bp, Artificial Sequence
  ENSG00000198373_15 (sequence is synthesized)
tgtctcatgaggtgctcaaccctatgtattgtttatttgaatatgccggaaagaacaattactgcctgcagatcaaccccgcctcctccatcaacccggaccacctcacctactttcgct

SEQ ID NO: 727166 - DNA, 120 bp, Artificial Sequence
  ENSG00000198373_16 (sequence is synthesized)
ttataggcagattcatcgccatggcgctgtaccatggaaagttcatcgacacgggcttcaccctccctttctacaagcggatgctcaataagagaccaaccctgaaagacctggagtcca

SEQ ID NO: 727167 - DNA, 120 bp, Artificial Sequence
  ENSG00000198373_17 (sequence is synthesized)
ttgaccctgagttctacaactccattgtctggatcaaagagaacaacctggaagaatgtggcctggagctgtacttcatccaggacatggagatactgggcaaggtgacgacccacgagc

SEQ ID NO: 727168 - DNA, 120 bp, Artificial Sequence
  ENSG00000198373_18 (sequence is synthesized)
gtttcacccgaggcgtggaagagcagaccaaagccttcctggatggcttcaacgaggtggccccgctggagtggctgcgctactttgacgagaaagagctggagctgatgctgtgcggca

SEQ ID NO: 727169 - DNA, 120 bp, Artificial Sequence
  ENSG00000198373_19 (sequence is synthesized)
tgcaggagatagacatgagcgactggcagaagagcaccatctaccggcactacaccaagaacagcaagcagatccagtggttctggcaggtggtgaaggagatggacaacgagaagagga

SEQ ID NO: 727170 - DNA, 120 bp, Artificial Sequence
  ENSG00000198373_20 (sequence is synthesized)
tccggctgctgcagtttgtcaccggtacctgccgcctgcccgtcgggggatttgccgaactcatcggtagcaacggaccacagaagttttgcattgacaaagttggcaaggaaacctggc

SEQ ID NO: 727171 - DNA, 120 bp, Artificial Sequence
  ENSG00000198373_21 (sequence is synthesized)
tgcccagaagccacacctgcttcaaccgtctggatcttccaccctacaagagctacgaacagctgagagagaagctgctgtatgccattgaggagaccgagggctttggacaggagtaac

SEQ ID NO: 727172 - DNA, 120 bp, Artificial Sequence
  ENSG00000198373_22 (sequence is synthesized)
cgaggccgcccctcccacgccccccagcgcacatgtagtcctgagtcctccctgcctgagaggccactggccccgcagcccttgggaggcccccgtggatgtggccctgtgtgggaccac

SEQ ID NO: 727173 - DNA, 120 bp, Artificial Sequence
  ENSG00000198373_23 (sequence is synthesized)
actgtcatctcgctgctggcagaaaagcctgatcccaggaggccctgcagttcccccgacccgcggatggcagtctggaataaagccccctagttgcctttggccccacctttgcaaagt

SEQ ID NO: 727174 - DNA, 120 bp, Artificial Sequence
  ENSG00000198373_24 (sequence is synthesized)
tccagagggctgaccctctctgcaaaactctcccctgtcctctagaccccaccctgggtgtatgtgagtgtgcaagggaaggtgttgcatccccaggggctgccgcagaggccggagacc

SEQ ID NO: 727175 - DNA, 120 bp, Artificial Sequence
  ENSG00000198373_25 (sequence is synthesized)
tcctggactagttcggcgaggagactggccactgggggtggctgttcgggactgagagcgccaagggtctttgccagcaaaggaggttctgcctgtaattgagcctctctgatgatggag

SEQ ID NO: 727176 - DNA, 120 bp, Artificial Sequence
  ENSG00000198373_26 (sequence is synthesized)
atgaagtgaaggtctgagggagcgggccctggggcgaggccatctctgcctgcctccctagcaggcgccagcggtggaggctgagtcgcaggacacatgccggccagttaattcattctc

SEQ ID NO: 727177 - DNA, 120 bp, Artificial Sequence
  ENSG00000198373_27 (sequence is synthesized)
agccaatgaaggtttgtctaagctgcctgggtatccacgggacaaaaacagcaaactccctcagactttgtccatgtataaacttgaagtggttgtgttgtagggttgcaggttttttgt

SEQ ID NO: 727178 - DNA, 120 bp, Artificial Sequence
  ENSG00000198373_28 (sequence is synthesized)
tacgctgctgtcactttctgtccaggagctggcaccccaggtgttctgagaccttgagggacccagacctttgggtccaagagtttcccaaacagccacgcctctcaggaacccacctgg

SEQ ID NO: 727179 - DNA, 120 bp, Artificial Sequence
  ENSG00000198373_29 (sequence is synthesized)
cggttccgtgagctcaggcaggcctgacccggcggcacagcctggcagggacctcgtccccaagcctggcagaatgagaggggttgaggtcccgagcgccactcctagccttgccgcctt

SEQ ID NO: 727180 - DNA, 120 bp, Artificial Sequence
  ENSG00000198373_30 (sequence is synthesized)
caatagagaagaaatccctttgctagatagggtcccccaggcagtccccagtggcgggacacaggggtccggctgtggagctcccctgccagcccctggagctccaggagggcctgttgg

SEQ ID NO: 727181 - DNA, 120 bp, Artificial Sequence
  ENSG00000198373_31 (sequence is synthesized)
tcccctgttcagaatggagtgcagcccgccagcggaaagtgttcattctgcataggtgtgaggctttatctgcacacaggacatgaaaaccagcagaaaggccctgagctgctgcatagc

SEQ ID NO: 727182 - DNA, 120 bp, Artificial Sequence
  ENSG00000198373_32 (sequence is synthesized)
cccatctgatttctgcagttcccgccagcctccaacacggggactctgccgtaactggaatcttcataggtcatattgaaatcttcaaggtgaccatgccccaccggggtgctggggcag

SEQ ID NO: 727183 - DNA, 120 bp, Artificial Sequence
  ENSG00000198373_33 (sequence is synthesized)
tagtcatggcagactcccggcctgggcccccaggattctaggacccccaggcagccccttggactggtcccgggtgccttccaagcacagtctccatgctcccagattctcgaccttccc

SEQ ID NO: 727184 - DNA, 120 bp, Artificial Sequence
  ENSG00000198373_34 (sequence is synthesized)
ccggcccgggaggtgcagcctgcgtctgcctctgtcgtgtgtgctgatttgagtggcttagcttgccacagcgcagcctcttctgtccctttcagtcatttgctgtacttccctgtggca

SEQ ID NO: 727185 - DNA, 120 bp, Artificial Sequence
  ENSG00000198373_35 (sequence is synthesized)
cgttaccatggaagccgctccagggtgggtcagggtgcaagctgctggtgaggtttggaagcatcaggctcacgggtgttcatgtgtgttcgtgcgtgtgtgtgcgtacgtgtatataac

SEQ ID NO: 727186 - DNA, 120 bp, Artificial Sequence
  ENSG00000198373_36 (sequence is synthesized)
tgaagtgtctgtacggaatgccctttgctagccatgggctggtcaccagattgttttgtaatgcccgccccttgcctcgatattgccagtttcttgtgcaataaacaatcagcagctgtg

SEQ ID NO: 727187 - DNA, 120 bp, Artificial Sequence
  ENSG00000198373_37 (sequence is synthesized)
catcaactgagaagacctgagactctggaactgacaccatgagtcacccaatggcttcttgaaacggtccctttctgcggaggtagcatagcacagtgacgtttattccgggtcacttga

SEQ ID NO: 727188 - DNA, 120 bp, Artificial Sequence
  ENSG00000198373_38 (sequence is synthesized)
ggaaacaaaaggcgcatgggaggccaagatttagagtgttgatgcattccgccgtaccctatgcccagcctgtccctaaaggcagagtgcttcttattcggcagggcttcgtgagaatgc

SEQ ID NO: 727189 - DNA, 120 bp, Artificial Sequence
  ENSG00000198373_39 (sequence is synthesized)
cgccaagttatccaaaaccaaaggatgagagaggcttccaagagagggaagactgtccaagttcaaggagaaggggtttggttccctgtctgccagggacagaaagttctttccacatgt

SEQ ID NO: 727190 - DNA, 120 bp, Artificial Sequence
  ENSG00000198373_40 (sequence is synthesized)
gtctcctggtcccgagagctttcaaaaggggatgtattctgctccaagaaagaatcacctcccagtaaagtagccatgaagggctcctgtataaaatatgcacacttcccctgccctgag

SEQ ID NO: 727191 - DNA, 120 bp, Artificial Sequence
  ENSG00000198373_41 (sequence is synthesized)
tttgtggagggaaaggctgtcggaagtagggactcttaggagagcccgtgtgccctgtttggttcagctgtcaggcgtgtgccacacacatcccacctcatcttctggtcccataattct

SEQ ID NO: 727192 - DNA, 120 bp, Artificial Sequence
  ENSG00000198373_42 (sequence is synthesized)
ccatggatgggctgcttttagctccagttttccagtagaatgcttgagttttccttttttccgtacctcctggaggatgaaactcataacctgtcatcatcagtactcactgtgttttcc

SEQ ID NO: 727193 - DNA, 120 bp, Artificial Sequence
  ENSG00000198373_43 (sequence is synthesized)
actttgacttgaagtcaaatgaagttaccaaagttaaacatggacttctcaaattagaaaaaaacaaacaacaaaaaaacaggttaagtgttttgttatgaaaattatgaaaatgttctt

SEQ ID NO: 727194 - DNA, 120 bp, Artificial Sequence
  ENSG00000198373_44 (sequence is synthesized)
attattatggaaaatttcaaatagatatagagagaataatgttacaaacccccacatactcaacatttagcttcaaaaattatcaactcatggcgggttttgtttcatctgtacaaacta

SEQ ID NO: 727195 - DNA, 120 bp, Artificial Sequence
  ENSG00000198373_45 (sequence is synthesized)
gtcggcacactatgatggcctgtggacaaaatccggccctctgactgtttttgtaaataaggttttattggaacacagccacacatatttgttgacttattgtttttggctgtttttgta

SEQ ID NO: 727196 - DNA, 120 bp, Artificial Sequence
  ENSG00000198373_46 (sequence is synthesized)
cttcattggcagagttgagtaattgcagcagactctatggcttgcaaaacctaaaataattactttgtgtagcgctttatagaaaaaatttgctaactcccgatctgtaacccccaacct

SEQ ID NO: 727197 - DNA, 120 bp, Artificial Sequence
  ENSG00000198373_47 (sequence is synthesized)
atccgccgcaccctgatctaggtaattttgaagcaaatcccaaatgtcacatcatctatccatatttcactatgtatttctaaaacatattcttttattcaaaataaaactctaatatca

SEQ ID NO: 727198 - DNA, 120 bp, Artificial Sequence
  ENSG00000198373_48 (sequence is synthesized)
attttatagaaacgtttagtactcaccaaggccctcagtggaactggctgaaaatagcagcagactcactcagaaaagaattggagagatccatggcagggaagagagattaagggaagg

SEQ ID NO: 727199 - DNA, 120 bp, Artificial Sequence
  ENSG00000198373_49 (sequence is synthesized)
tgtctccaccctgagttaaggcagtagcctcctgtcctgtctctcggcttctgcactttgccctccttcagtctgttggtcacacagcagccagtgatcttgttaaaaggtaaactgggg

SEQ ID NO: 727200 - DNA, 68 bp, Artificial Sequence
  ENSG00000198373_50 (sequence is synthesized)
cacacagcagccagtgatcttgttaaaaggtaaactggggccaggtgtggtgactcatgcctgtaata

SEQ ID NO: 727201 - DNA, 120 bp, Artificial Sequence
  ENSG00000198373_51 (sequence is synthesized)
accatgctttttctcccgcagccattggctgccccgtctgtttcctgcctccgagtggaattaattgaggagggatgttttctggatctttcggatttgccatctcctctacccccctgc

SEQ ID NO: 727202 - DNA, 120 bp, Artificial Sequence
  ENSG00000198373_52 (sequence is synthesized)
ccaattatggatatccagaggcactctcttgagatggcccttaagacactatcaaggacgacagccttatgggaacagcgagagctgcccaacggacgtgtctattatgttgaccacaat

SEQ ID NO: 727203 - DNA, 120 bp, Artificial Sequence
  ENSG00000198373_53 (sequence is synthesized)
gagaaagttggaggtggtggtgatttcagtcgccttggccgccttgagccggagctgagcggaggcactgggccgagcctgcttcccgggccttcctaccatgccagggctgctccctgc

SEQ ID NO: 727204 - DNA, 120 bp, Artificial Sequence
  ENSG00000198373_54 (sequence is synthesized)
ctccgccaccctggcacaccttcacccgcgtaccgcctcctccccgtcgctctgccttttccaaaactcacttgggccctccgtgcgcagggttcttttttggtttttctgtaaaaatca

SEQ ID NO: 727205 - DNA, 120 bp, Artificial Sequence
  ENSG00000198373_55 (sequence is synthesized)
gggctgtgaaagaggccagagggaagcagatacgagagttgaatgccaggtggtgactctggaaacgcatcgctgctagttattatcgccgtgtagatttctcctcgcgcttggtagccg

SEQ ID NO: 727206 - DNA, 120 bp, Artificial Sequence
  ENSG00000198373_56 (sequence is synthesized)
gatatatgtgggtgtctgcctgttttggttccccctccccaagatgtcagcagtttagtttaaatgttttcttctaagttataggaatgatctgcttggatgtaatgaatcaggtatttg

SEQ ID NO: 727207 - DNA, 120 bp, Artificial Sequence
  ENSG00000198373_57 (sequence is synthesized)
cagctaagccccagcaacctctgtgacagggcctgcccggctgtgctaggcatcctgagacttttctagaattgggggatgggagtggggtggtcattatattcattctgaggttcctat

SEQ ID NO: 727208 - DNA, 120 bp, Artificial Sequence
  ENSG00000198373_58 (sequence is synthesized)
tcaaagactccggtgtctgcaggtcactgtgaggttttcagggcctcactctaggtcctccagcaggctgggtctgggtgtgcgaagtgggctctgctgatctggtggtcctgcgcggta

SEQ ID NO: 727209 - DNA, 120 bp, Artificial Sequence
  ENSG00000198373_59 (sequence is synthesized)
atggggaaagagagagggtgctccgagggggttgtgggaggtacagattccctgtggcacctccgactttttctacctatggtacccaaggaatgtcacggcacagagtcatttagattt

SEQ ID NO: 727210 - DNA, 120 bp, Artificial Sequence
  ENSG00000198373_60 (sequence is synthesized)
tttattttttattgattgattgattttttcaccagtggctttttgtaacctctgtgttctgctgtgtttcttgtgtttagtcttcgagtgcttcgactgaccatgatcccctgggccccc

SEQ ID NO: 727211 - DNA, 120 bp, Artificial Sequence
  ENSG00000198373_61 (sequence is synthesized)
gagtgcgggcggtggaaggcggaagtaggagaggagttcggcgccgcttctgtggccacggcagatgaaacagaaaggctaaagagggctggagtcaggggacttctcttccaccagatg

SEQ ID NO: 727212 - DNA, 120 bp, Artificial Sequence
  ENSG00000198373_62 (sequence is synthesized)
aaagagggctggagtcaggggacttctcttccaccagatggagtctcactctctcccccaggctggggtgcagcggcgtgatctcagctcactccaacctctgcttcccaggttcaagcg

SEQ ID NO: 727213 - DNA, 120 bp, Artificial Sequence
  ENSG00000198373_63 (sequence is synthesized)
attctaagtctggcagatcgagcagcccagggaagccgattcccctccctcatcctgccagaggctgaaacacgtttctgagatgggaacagcgagagctgcccaacggacgtgtctatt

SEQ ID NO: 727214 - DNA, 120 bp, Artificial Sequence
  ENSG00000198373_64 (sequence is synthesized)
ccacactgcagactttccagggcgtgagtcttggtgactgtgtctgctggatattgggccttagagtcccctgtccctcccgcccctgcctgctgtggaagggagagtggcaggctggcc

SEQ ID NO: 727215 - DNA, 120 bp, Artificial Sequence
  ENSG00000198373_65 (sequence is synthesized)
cgatgctctgtcttcccagatcatgaacatgaaaccctatgacctgcgccgccggctctacatcatcatgcgtggcgaggagggcctggactatgggggcatcgccagagagtggttttt

SEQ ID NO: 727216 - DNA, 120 bp, Artificial Sequence
  ENSG00000198373_66 (sequence is synthesized)
aggagaagggaatatgatgacttaggtaggaaacacttctgtccttttcacagtgacttatgtctgtctgctttctactttgaacccccaggacgcacagacattcgggtgcttcagcca

SEQ ID NO: 727217 - DNA, 120 bp, Artificial Sequence
  ENSG00000198373_67 (sequence is synthesized)
aggaagagtacatcatgtgagtctcaggcgccgggggctccgctccaggggtggcgtggagatctagtgggttgcagagaaagatgggcccccacctgtggcccatcggtcactgtggat

SEQ ID NO: 727218 - DNA, 120 bp, Artificial Sequence
  ENSG00000198373_68 (sequence is synthesized)
gccatttgcatttgccttgatggtggctgctggtgggcggtcatgtgatggcgcgagctgggggaaccaaagccgaggtccttagttaccgactcccagctgtgctttttcgccatgtgg

SEQ ID NO: 727219 - DNA, 120 bp, Artificial Sequence
  ENSG00000198373_69 (sequence is synthesized)
gagacttcaagcctgcagcgtggaatttctttgaagtggcatcaagctgagacatctgcatctttctccgggccgaaaggatctctgtggcctgtgtgcctagacccaccgtctcacgtg

SEQ ID NO: 727220 - DNA, 120 bp, Artificial Sequence
  ENSG00000198373_70 (sequence is synthesized)
ctacggcttgagagatttaccaagacggatgaaatctttgtatcttgttttaagaggatccacagctggttcccgagactccttctggggtaccttgttactggagaacatgcagctgac

SEQ ID NO: 727221 - DNA, 120 bp, Artificial Sequence
  ENSG00000198373_71 (sequence is synthesized)
tttcccccaggactaggggctgcagtacctctgttctccttggatgctgtctttggagttttgggaaggctgagggctcctctctgcctccactacagagtttagccctctttgtccagg

SEQ ID NO: 727222 - DNA, 75 bp, Artificial Sequence
  ENSG00000198373_72 (sequence is synthesized)
ttacgtttactaggagttcaagaccagtctggacaacttggtttgatgaagagtggacaatcgtggagaaatacg

SEQ ID NO: 727223 - DNA, 120 bp, Artificial Sequence
  ENSG00000198373_73 (sequence is synthesized)
acttggtttgatgaagagtggacaatcgtggagaaatacgattggacaaaaggggtatgattgactgatgaaacagaaaggctaaagagggctggagtcaggggacttctcttccaccag

SEQ ID NO: 727224 - DNA, 120 bp, Artificial Sequence
  ENSG00000198380_0 (sequence is synthesized)
tggcggagcccgggaggcggagaaggctgtcgttgccttggccgtcgcatccccgagggagtcgtgtcggcgccaccccggcccccgagcccgcagattgcccaccgaagctcgtgtgtg

SEQ ID NO: 727225 - DNA, 120 bp, Artificial Sequence
  ENSG00000198380_1 (sequence is synthesized)
cacccccgatcccgccagccactcgcccctggcctcgcgggccgtgtctccggcatcatgtgtggtatatttgcttacttaaactaccatgttcctcgaacgagacgagaaatcctggag

SEQ ID NO: 727226 - DNA, 120 bp, Artificial Sequence
  ENSG00000198380_2 (sequence is synthesized)
accctaatcaaaggccttcagagactggagtacagaggatatgattctgctggtgtgggatttgatggaggcaatgataaagattgggaagccaatgcctgcaaaatccagcttattaag

SEQ ID NO: 727227 - DNA, 120 bp, Artificial Sequence
  ENSG00000198380_3 (sequence is synthesized)
aagaaaggaaaagttaaggcactggatgaagaagttcacaagcaacaagatatggatttggatatagaatttgatgtacaccttggaatagctcatacccgttgggcaacacatggagaa

SEQ ID NO: 727228 - DNA, 120 bp, Artificial Sequence
  ENSG00000198380_4 (sequence is synthesized)
cccagtcctgtcaatagccacccccagcgctctgataaaaataatgaatttatcgttattcacaatggaatcatcaccaactacaaagacttgaaaaagtttttggaaagcaaaggctat

SEQ ID NO: 727229 - DNA, 120 bp, Artificial Sequence
  ENSG00000198380_5 (sequence is synthesized)
gacttcgaatctgaaacagacacagagacaattgccaagctcgttaagtatatgtatgacaatcgggaaagtcaagataccagctttactaccttggtggagagagttatccaacaattg

SEQ ID NO: 727230 - DNA, 120 bp, Artificial Sequence
  ENSG00000198380_6 (sequence is synthesized)
gaaggtgcttttgcacttgtgtttaaaagtgttcattttcccgggcaagcagttggcacaaggcgaggtagccctctgttgattggtgtacggagtgaacataaactttctactgatcac

SEQ ID NO: 727231 - DNA, 120 bp, Artificial Sequence
  ENSG00000198380_7 (sequence is synthesized)
attcctatactctacagaacaggcaaagacaagaaaggaagctgcaatctctctcgtgtggacagcacaacctgccttttcccggtggaagaaaaagcagtggagtattactttgcttct

SEQ ID NO: 727232 - DNA, 120 bp, Artificial Sequence
  ENSG00000198380_8 (sequence is synthesized)
gatgcaagtgctgtcatagaacacaccaatcgcgtcatctttctggaagatgatgatgttgcagcagtagtggatggacgtctttctatccatcgaattaaacgaactgcaggagatcac

SEQ ID NO: 727233 - DNA, 120 bp, Artificial Sequence
  ENSG00000198380_9 (sequence is synthesized)
cccggacgagctgtgcaaacactccagatggaactccagcagatcatgaagggcaacttcagttcatttatgcagaaggaaatatttgagcagccagagtctgtcgtgaacacaatgaga

SEQ ID NO: 727234 - DNA, 120 bp, Artificial Sequence
  ENSG00000198380_10 (sequence is synthesized)
ggaagagtcaactttgatgactatactgtgaatttgggtggtttgaaggatcacataaaggagatccagagatgccggcgtttgattcttattgcttgtggaacaagttaccatgctggt

SEQ ID NO: 727235 - DNA, 120 bp, Artificial Sequence
  ENSG00000198380_11 (sequence is synthesized)
gtagcaacacgtcaagttcttgaggagctgactgagttgcctgtgatggtggaactagcaagtgacttcctggacagaaacacaccagtctttcgagatgatgtttgctttttccttagt

SEQ ID NO: 727236 - DNA, 120 bp, Artificial Sequence
  ENSG00000198380_12 (sequence is synthesized)
caatcaggtgagacagcagatactttgatgggtcttcgttactgtaaggagagaggagctttaactgtggggatcacaaacacagttggcagttccatatcacgggagacagattgtgga

SEQ ID NO: 727237 - DNA, 120 bp, Artificial Sequence
  ENSG00000198380_13 (sequence is synthesized)
gttcatattaatgctggtcctgagattggtgtggccagtacaaaggcttataccagccagtttgtatcccttgtgatgtttgcccttatgatgtgtgatgatcggatctccatgcaagaa

SEQ ID NO: 727238 - DNA, 120 bp, Artificial Sequence
  ENSG00000198380_14 (sequence is synthesized)
agacgcaaagagatcatgcttggattgaaacggctgcctgatttgattaaggaagtactgagcatggatgacgaaattcagaaactagcaacagaactttatcatcagaagtcagttctg

SEQ ID NO: 727239 - DNA, 120 bp, Artificial Sequence
  ENSG00000198380_15 (sequence is synthesized)
ataatgggacgaggctatcattatgctacttgtcttgaaggggcactgaaaatcaaagaaattacttatatgcactctgaaggcatccttgctggtgaattgaaacatggccctctggct

SEQ ID NO: 727240 - DNA, 120 bp, Artificial Sequence
  ENSG00000198380_16 (sequence is synthesized)
ttggtggataaattgatgcctgtgatcatgatcatcatgagagatcacacttatgccaagtgtcagaatgctcttcagcaagtggttgctcggcaggggcggcctgtggtaatttgtgat

SEQ ID NO: 727241 - DNA, 120 bp, Artificial Sequence
  ENSG00000198380_17 (sequence is synthesized)
aaggaggatactgagaccattaagaacacaaaaagaacgatcaaggtgccccactcagtggactgcttgcagggcattctcagcgtgatccctttacagttgctggctttccaccttgct

SEQ ID NO: 727242 - DNA, 120 bp, Artificial Sequence
  ENSG00000198380_18 (sequence is synthesized)
gtgctgagaggctatgatgttgatttcccacggaatcttgccaaatctgtgactgtagagtgaggaatatctatacaaaatgtacgaaactgtatgattaagcaacacaagacacctttt

SEQ ID NO: 727243 - DNA, 120 bp, Artificial Sequence
  ENSG00000198380_19 (sequence is synthesized)
gtatttaaaaccttgatttaaaatatcaccccttgaagcctttttttagtaaatccttatttatatatcagttataattattccactcaatatgtgatttttgtgaagttacctcttaca

SEQ ID NO: 727244 - DNA, 120 bp, Artificial Sequence
  ENSG00000198380_20 (sequence is synthesized)
ttttcccagtaatttgtggaggactttgaataatggaatctatattggaatctgtatcagaaagattctagctattattttctttaaagaatgctgggtgttgcatttctggaccctcca

SEQ ID NO: 727245 - DNA, 120 bp, Artificial Sequence
  ENSG00000198380_21 (sequence is synthesized)
cttcaatctgagaagacaatatgtttctaaaaattggtacttgtttcaccatacttcattcagaccagtgaaagagtagtgcatttaattggagtatctaaagccagtggcagtgtatgc

SEQ ID NO: 727246 - DNA, 120 bp, Artificial Sequence
  ENSG00000198380_22 (sequence is synthesized)
tcatacttggacagttagggaagggtttgccaagttttaagagaagatgtgatttattttgaaatttgtttctgttttgtttttaaatcaaactgtaaaacttaaaactgaaaaatttta

SEQ ID NO: 727247 - DNA, 120 bp, Artificial Sequence
  ENSG00000198380_23 (sequence is synthesized)
ttggtaggatttatatctaagtttggttagccttagtttctcagacttgttgtctattatctgtaggtggaagaaatttaggaagcgaaatattacagtagtgcattggtgggtctcaat

SEQ ID NO: 727248 - DNA, 120 bp, Artificial Sequence
  ENSG00000198380_24 (sequence is synthesized)
ccttaacatatttgcacaattttatagcacaaactttaaattcaagctgctttggacaactgacaatatgattttaaatttgaagatgggatgtgtacatgttgggtatcctactacttt

SEQ ID NO: 727249 - DNA, 120 bp, Artificial Sequence
  ENSG00000198380_25 (sequence is synthesized)
gtgttttcatctcctaaaagtggtttttatttccttgtatctgtagtcttttattttttaaatgactgctgaatgacatattttatcttgttctttaaaatcacaacacagagctgctat

SEQ ID NO: 727250 - DNA, 120 bp, Artificial Sequence
  ENSG00000198380_26 (sequence is synthesized)
taaattaatattgatatattcagtattctcttcaactttgtcacgaggaagaatttcctgtagttaattttaactttccttcattacattgttgcataaaactagtcccttagtgccagt

SEQ ID NO: 727251 - DNA, 120 bp, Artificial Sequence
  ENSG00000198380_27 (sequence is synthesized)
ttggaagttacttgcaattgtttggaagatttgcaggtcgctgacctcatcatttcactctaagtatatgtggtaggctaagctcagaaaaaggtatgtatgctttacactgataggcac

SEQ ID NO: 727252 - DNA, 120 bp, Artificial Sequence
  ENSG00000198380_28 (sequence is synthesized)
caaatttagtattgtatcctaagtatttttcctcttctgtattttctgtgctctacccctgaaatatatttaggaataaagaagatataaataaagtgatattggggtatgttcagcttg

SEQ ID NO: 727253 - DNA, 120 bp, Artificial Sequence
  ENSG00000198380_29 (sequence is synthesized)
taagtgtcagaaatggaagttgacaatttggattaaaatatttaaagtagaatgttattatttgatacccccaaaattgtgagtaataatttcttaatggagcttttctggccagatctt

SEQ ID NO: 727254 - DNA, 120 bp, Artificial Sequence
  ENSG00000198380_30 (sequence is synthesized)
cagggctataggagagtgtgtttgtttttggtgaagtccttctttttcaaaggtttttacttttaaattgtgaagataagctatttagcacaattatttaagtaagctgttttttccttt

SEQ ID NO: 727255 - DNA, 120 bp, Artificial Sequence
  ENSG00000198380_31 (sequence is synthesized)
cttttctttcttttcttgttttaacttctgggtgaggttaagattttctaatagttattgttgttgccagagaagcatagaattctgcttgtgtcttagggttagagaaagatttgttat

SEQ ID NO: 727256 - DNA, 120 bp, Artificial Sequence
  ENSG00000198380_32 (sequence is synthesized)
attttgaggtaatttggaaggactttcatacatggtgactagaaacctgatctttttaagaataaaatagggtcactatttacattatatataatatatggctattatagctatattaat

SEQ ID NO: 727257 - DNA, 120 bp, Artificial Sequence
  ENSG00000198380_33 (sequence is synthesized)
ctactttaattgtttctaagattattttgtgtaagtcagctagcgtgtgtatagtgtcatttcttatgttttgtatattaacgttttacaaacacaatttgtgtgggtttgtagcatttc

SEQ ID NO: 727258 - DNA, 120 bp, Artificial Sequence
  ENSG00000198380_34 (sequence is synthesized)
ttatagtttaaagtatgattcagcattctaagttaaaactaatatgtgaagtcagtcattagtctgcataatctctgtctccctctgtgtgtgtctttctataaagcacatgtgtacaca

SEQ ID NO: 727259 - DNA, 120 bp, Artificial Sequence
  ENSG00000198380_35 (sequence is synthesized)
gcagtggctcagcctgtaataccagcctccactttgggagtctgaggtgggagtattgcttgagctcaagagttggagaacagcctgggcaacatggtgagacctggtctttacaaaaat

SEQ ID NO: 727260 - DNA, 120 bp, Artificial Sequence
  ENSG00000198380_36 (sequence is synthesized)
aagactctctcaaaaaaaaaaaaaaaaaattttttttttaaatgggctgggcatggtggcttgtgcctgtagtctcagcaacttgggaggcttaagtagtaggatcgcttgagcctggga

SEQ ID NO: 727261 - DNA, 120 bp, Artificial Sequence
  ENSG00000198380_37 (sequence is synthesized)
ctgcagtgagctgtgattgtgccactgtgcttcagcttgagtgacagagtgagaccctcctgactcaaaacaaaaaacatggtttctcctctctctcctgtcttcttactctctatccca

SEQ ID NO: 727262 - DNA, 120 bp, Artificial Sequence
  ENSG00000198380_38 (sequence is synthesized)
ggtttctcctctctctcctgtcttcttactctctatcccatttgatgtagtgatttttaaatgcttttgtaagttaattcttaacacaaaagagacattgtaatgaggcacaccactaaa

SEQ ID NO: 727263 - DNA, 120 bp, Artificial Sequence
  ENSG00000198380_39 (sequence is synthesized)
gtgagcatgcccaattaaaaccagtgtaatataggataagaaaatctgatttttcaaaaaagatactctacataaagaatccttcatataaaaagttctttcttgtagtacatttaaagt

SEQ ID NO: 727264 - DNA, 120 bp, Artificial Sequence
  ENSG00000198380_40 (sequence is synthesized)
tttaattcactcatgtataactgagagttcctttgagccctttttaggcagggaggcatgtctgtcatctagcgtgtggcccagtaagtgattattacattggaatcagtttttcagtct

SEQ ID NO: 727265 - DNA, 120 bp, Artificial Sequence
  ENSG00000198380_41 (sequence is synthesized)
tttaaaataaattctgtgccataagaataaaagataaagagaaaaattaatgttaactatttttagcttattataactatgtcaacaagtgtttattaatacctattatgggaaagtcac

SEQ ID NO: 727266 - DNA, 120 bp, Artificial Sequence
  ENSG00000198380_42 (sequence is synthesized)
tgtggttggcattgaaaattacatcatctttaaagcagtatttgtccccagatggactcatcactagcaaagactaggttcattggaaggcatagggtgagagaatgggaagatgaagtg

SEQ ID NO: 727267 - DNA, 120 bp, Artificial Sequence
  ENSG00000198380_43 (sequence is synthesized)
gaggcgggttgttaaagtgctgtcagtgagtgattttgtctacttgaataatggtccatgtttgggggcatattgtgtttcataagaagtgaaaggtatttgcaaagtaagctacaaatg

SEQ ID NO: 727268 - DNA, 120 bp, Artificial Sequence
  ENSG00000198380_44 (sequence is synthesized)
acccataaatctgttaacaacagtccttaatatgcaaagatgaaaaacaagcattactgctacccaaagggaactggtgcttggtgatgtgcagatggggctgttggttaagagagctat

SEQ ID NO: 727269 - DNA, 120 bp, Artificial Sequence
  ENSG00000198380_45 (sequence is synthesized)
tacaggttttctctcttaggtttcataggaggtagttactgagatgagattgttttatctttttgaatacagatctcttgtcttgagttagttctgaggatgggagtaataaaggagttt

SEQ ID NO: 727270 - DNA, 120 bp, Artificial Sequence
  ENSG00000198380_46 (sequence is synthesized)
tttgtttttttgtttgtttgtttgttttggctccttagtaatactcctctgacatttatttctattattcttcaaagaaaggaaaccaactgaaatgtttgctttaacaaacattttaat

SEQ ID NO: 727271 - DNA, 120 bp, Artificial Sequence
  ENSG00000198380_47 (sequence is synthesized)
aagttctctgggtttttttttccccttttaaaaaaattagcatataccatagcaataaaagaactaatgttaactattgtatgctacaacttaagtgatttttctaaagaagcacaatgt

SEQ ID NO: 727272 - DNA, 120 bp, Artificial Sequence
  ENSG00000198380_48 (sequence is synthesized)
cattgaaagtattattgaaaaggatcatagtcacattgaatttgtgaaggccaaagaaattgaagggagtgatattttcattttatgatattcacatatttagtaaattttgtgtacaag

SEQ ID NO: 727273 - DNA, 120 bp, Artificial Sequence
  ENSG00000198380_49 (sequence is synthesized)
aataccaggcagagtgttttacccatggaaacaggtttcagattactttatttttactgttagagtctcaagtttagaaatgctaacacttaaatcagtttttttctcactatacttgaa

SEQ ID NO: 727274 - DNA, 120 bp, Artificial Sequence
  ENSG00000198380_50 (sequence is synthesized)
gattgttaatattttgatatcttcctagcttgatgaatttaaacatatcttcagatctgtgacagtgacagccaataggactgataatattagcttcaaaccaataatatccagggttaa

SEQ ID NO: 727275 - DNA, 120 bp, Artificial Sequence
  ENSG00000198380_51 (sequence is synthesized)
aataaaaatcatagtgaaagtacgattgtaaaattatgctatattaacttttaagtctgtaataacttgacatcaaaatgttatgtaattaccataaataatggctagcgagaacatctt

SEQ ID NO: 727276 - DNA, 120 bp, Artificial Sequence
  ENSG00000198380_52 (sequence is synthesized)
tggaaattctcaaattacctttcttactacactgtttgcagaatgaatgtagaaatgatcctgttagctttctgaatgttctgtggttgaatgtgtttttgcttaaataaagcttttggt

SEQ ID NO: 727277 - DNA, 120 bp, Artificial Sequence
  ENSG00000198380_53 (sequence is synthesized)
atttgtttaaattacacttcttgagaagtggaaattttaggatcatctttgctttgtttcagttttgtgatttttgaaatgaatgtttagtttactgagccagttggtcatttcttcctc

SEQ ID NO: 727278 - DNA, 120 bp, Artificial Sequence
  ENSG00000198380_54 (sequence is synthesized)
atgtcgttaagtccagtgagtaagcctgaactgtgaataaattaccaaaaacttgcttagaatttcattttgaagcaatttgctaatatttgaagtgtatacacatttgtagttatgtta

SEQ ID NO: 727279 - DNA, 120 bp, Artificial Sequence
  ENSG00000198380_55 (sequence is synthesized)
gaaattgtattgtactaagaatgtaatcaatgtctactttagttgtaaacatttctgatgtcaaaactttattcattactgttgattttaagaataagaaatcactgcctaaatattacc

SEQ ID NO: 727280 - DNA, 120 bp, Artificial Sequence
  ENSG00000198380_56 (sequence is synthesized)
aaaagccactgtctctacccgaacttcccagtttgggaaagaatcgttagataaaacaaaggctctgccctttctgataccaaactccacagatactttctcacatcttttaaaacattt

SEQ ID NO: 727281 - DNA, 120 bp, Artificial Sequence
  ENSG00000198380_57 (sequence is synthesized)
tgcaataacatattgtttataggaagtttacggggtatgcaatgattaaaacttttaagtgaattgatagttgcaaaagaaaggataatatttaaggtcagtgagtagcaagacaatcta

SEQ ID NO: 727282 - DNA, 120 bp, Artificial Sequence
  ENSG00000198380_58 (sequence is synthesized)
aagtttctgtaatatctggctctctgttaattatagagcaaagtttcccttacagaatccttttatgaacagcaagctagagtctatccctagtggttatagcacctgctgcgtttttca

SEQ ID NO: 727283 - DNA, 120 bp, Artificial Sequence
  ENSG00000198380_59 (sequence is synthesized)
ggagacagttaggccagggtgatttgaatggatagatgtgctgttttgcctgcttgtagaattcagcccagtctttggtctctctctctctctccctcctccacctctccctctctcttc

SEQ ID NO: 727284 - DNA, 120 bp, Artificial Sequence
  ENSG00000198380_60 (sequence is synthesized)
tctctctctccctcctccacctctccctctctcttcttctgcaccagagcctaaggctgcgccaccaagatgcgtcattttttccagaggcttcttttttttttttttgagatggagttt

SEQ ID NO: 727285 - DNA, 120 bp, Artificial Sequence
  ENSG00000198380_61 (sequence is synthesized)
ctgttgcccaggctggcatgcagtgctgcaatcttggctgactgcaacttccacctcccgtgttcacacgagtcttttgcctcagcctctggattagctgggattacaggcacgtgccac

SEQ ID NO: 727286 - DNA, 120 bp, Artificial Sequence
  ENSG00000198380_62 (sequence is synthesized)
tatcaaatttgacaggtattgtataccctttggatctttaggaattaatttttgcctctgtcactcagctttgtatattttgaaatggagataagtatagggaggtcttggaaggaaaat

SEQ ID NO: 727287 - DNA, 120 bp, Artificial Sequence
  ENSG00000198380_63 (sequence is synthesized)
tgccagaattcccaaaccatgtaacactcattgagaattccagatccattatatctaaagggcaagtgaaggaaacagtattgtgaactgggtataactccttggttcttaactagtaca

SEQ ID NO: 727288 - DNA, 120 bp, Artificial Sequence
  ENSG00000198380_64 (sequence is synthesized)
ttcttaatctgtgagacccaaaggttgataaacaataatttaagattgtacagtactctaaacgtctgcaaaggtctagatgttatcagtatcactagtttttatttctgccagtagctc

SEQ ID NO: 727289 - DNA, 120 bp, Artificial Sequence
  ENSG00000198380_65 (sequence is synthesized)
ccttttaggttacattgttgtcctctttccagtgtcgcatctgtcattggtttttcactatggcaagttcattaaaaagcttgctccattgttatcttcaagtaatgcccataaggagat

SEQ ID NO: 727290 - DNA, 120 bp, Artificial Sequence
  ENSG00000198380_66 (sequence is synthesized)
ggaagatatctgagacaattaaggctttagcttctaggcaagagaaataacgttgcattaaatttcaagtttctttctgctagacttgaatgtgtctagccactctaatttatgggggct

SEQ ID NO: 727291 - DNA, 120 bp, Artificial Sequence
  ENSG00000198380_67 (sequence is synthesized)
tttggttttttcctattgtactttgtatgtagaattgttttgaaatatcaagcatatttactttgaatttgaactctttcttaattttgtatttatcctttgaataaaatgtaaatccaa

SEQ ID NO: 727292 - DNA, 120 bp, Artificial Sequence
  ENSG00000198380_68 (sequence is synthesized)
actggagtacagaggatatgattctgctgatttatctcccaagctgtattctaggcctcctacaagtttcttcctagatagaccatgatattttaaactttgcatgttcaaaaattgaac

SEQ ID NO: 727293 - DNA, 86 bp, Artificial Sequence
  ENSG00000198380_69 (sequence is synthesized)
gtgggatttgatggaggcaatgataaagattgggaagccaatgcctgcaaaatccagcttattaagaagaaaggaaaagttaaggc

SEQ ID NO: 727294 - DNA, 120 bp, Artificial Sequence
  ENSG00000198382_0 (sequence is synthesized)
ggtaatatggctcttccttagccagcggcggcaacggcggcagcggcggcagcggcggcggctactgtctgggctgagcagtagtgcctctcgggtggcgggtttctaggctgcaggggc

SEQ ID NO: 727295 - DNA, 120 bp, Artificial Sequence
  ENSG00000198382_1 (sequence is synthesized)
ttggtaggtggtggcaagggggcggcggcggatgccggaagagtgcccgccccgccgcttggcggcccctggatcgagatgagcgcctccgcgtcggtcgggggccccgtcccccagcca

SEQ ID NO: 727296 - DNA, 120 bp, Artificial Sequence
  ENSG00000198382_2 (sequence is synthesized)
cccccgggcccggccgctgctctgcctcccggttctgccgcgcgggccctgcatgtggagctgccgtctcagcagcggcgtcttcgacatcttcggaacattgctgcccggaacattgtt

SEQ ID NO: 727297 - DNA, 120 bp, Artificial Sequence
  ENSG00000198382_3 (sequence is synthesized)
aatagaaatggccatcagctccttgatacctactttacacttcacttgtgtagtactgaaaagatatataaagaattttatagaagtgaagtgattaagaattccttgaatcccacgtgg

SEQ ID NO: 727298 - DNA, 120 bp, Artificial Sequence
  ENSG00000198382_4 (sequence is synthesized)
cgaagtctcgattttggaattatgccagaccgtcttgatacatctgtgtcttgtttcgtggtgaagatatggggtggaaaggagaacatctaccagctgttgattgaatggaaagtctgt

SEQ ID NO: 727299 - DNA, 120 bp, Artificial Sequence
  ENSG00000198382_5 (sequence is synthesized)
ttggatgggctgaaatacttgggtcagcagattcatgcccgaaaccaaaatgaaataatttttgggctgaatgatggatactatggtgctccatttgaacataagggttattcaaatgct

SEQ ID NO: 727300 - DNA, 120 bp, Artificial Sequence
  ENSG00000198382_6 (sequence is synthesized)
cagaagactattcttctgcaggtggatcagaactgtgttcgcaattcttacgatgtcttctctttgctacggcttcatagagcccagtgtgcaattaaacagactcaggtaactgttcag

SEQ ID NO: 727301 - DNA, 120 bp, Artificial Sequence
  ENSG00000198382_7 (sequence is synthesized)
aaaattggaaaggaaattgaagaaaaactaagactcacatctacaagcaatgaactgaaaaaaaaaagtgaatgcctgcagttaaaaattttggtgcttcagaatgaactggaacggcag

SEQ ID NO: 727302 - DNA, 120 bp, Artificial Sequence
  ENSG00000198382_8 (sequence is synthesized)
aagaaagctttgggacgggaggtggcattactgcataagcaacaaattgcattacaagacaaaggaagtgcattttcagctgagcacctcaaacttcaactccagaaggaatccctaaat

SEQ ID NO: 727303 - DNA, 120 bp, Artificial Sequence
  ENSG00000198382_9 (sequence is synthesized)
gagctgaggaaggagtgcactgcaaaaagagaactcttcttgaagactaatgctcagttgacaattcgttgcaggcagttactctctgagctttcctacatttaccctattgatttgaat

SEQ ID NO: 727304 - DNA, 120 bp, Artificial Sequence
  ENSG00000198382_10 (sequence is synthesized)
gaacataaggattactttgtatgcggtgtcaagttgcctaattctgaggacttccaagcaaaagatgatggaagcattgctgttgcccttggttatactgcacatctggtctccatgatt

SEQ ID NO: 727305 - DNA, 120 bp, Artificial Sequence
  ENSG00000198382_11 (sequence is synthesized)
tcctttttcctacaagtgcccctcagatatcctataattcataaggggtctagatcaacaatcaaagacaatatcaatgacaaactgacggaaaaggagagagagtttccactgtatcca

SEQ ID NO: 727306 - DNA, 120 bp, Artificial Sequence
  ENSG00000198382_12 (sequence is synthesized)
aaaggaggggagaagttgcagtttgattatggtgtctatcttctgaacaaaaatatagcacagctaagatatcaacatggactagggactccagacttgcggcaaacccttcccaacctg

SEQ ID NO: 727307 - DNA, 120 bp, Artificial Sequence
  ENSG00000198382_13 (sequence is synthesized)
aaaaacttcatggagcatggactaatggtcaggtgtgacagacatcacacctccagtgcaatccctgttcctaagagacaaagctccatatttgggggtgcagatgtaggcttctctggg

SEQ ID NO: 727308 - DNA, 120 bp, Artificial Sequence
  ENSG00000198382_14 (sequence is synthesized)
gggatcccttcaccagacaaaggacatcgaaaacgggccagctctgagaatgagagacttcagtacaaaacccctcctcccagttacaactcagcattagcccagcctgtgaccaccgtc

SEQ ID NO: 727309 - DNA, 120 bp, Artificial Sequence
  ENSG00000198382_15 (sequence is synthesized)
ccctccatgggagagaccgagagaaagataacatctctatcctcctccttggatacctccttggacttctccaaagaaaacaagaaaaaaggagaggatctagttggcagcttaaacgga

SEQ ID NO: 727310 - DNA, 120 bp, Artificial Sequence
  ENSG00000198382_16 (sequence is synthesized)
ggccacgcgaatgtgcaccctagccaagaacaaggagaagccctctccgggcaccgggccacagtcaatggcactctcctacccagcgagcaggccgggtccgccagtgtccagcttcca

SEQ ID NO: 727311 - DNA, 120 bp, Artificial Sequence
  ENSG00000198382_17 (sequence is synthesized)
ggcgagttccacccagtctcagaagctgagctctgctgtactgtggagcaagcagaagaaatcatcgggctggaagccacaggtttcgcctcaggtgatcagctagaagcatttaactgc

SEQ ID NO: 727312 - DNA, 120 bp, Artificial Sequence
  ENSG00000198382_18 (sequence is synthesized)
atcccagtggacagtgctgtggcagtagagtgtgacgaacaagttctgggagaatttgaagagttctcccgaaggatctatgcactgaatgaaaacgtatccagcttccgccggccgcgc

SEQ ID NO: 727313 - DNA, 120 bp, Artificial Sequence
  ENSG00000198382_19 (sequence is synthesized)
aggagttccgataagtgaagtgagcaggtcaacagtaggactggggcagaagctctgcctaaaatgaagtgaaagctgcacttaaccctttgtgataatgatgacacaaaatgaatatta

SEQ ID NO: 727314 - DNA, 120 bp, Artificial Sequence
  ENSG00000198382_20 (sequence is synthesized)
atggaggatattcctcggaaaaacagactttgggaatgaaggagggactcaggatcattgttatcagtgggccaaagttagattttgctttcaagatttgcttttcgggcctgatgattt

SEQ ID NO: 727315 - DNA, 120 bp, Artificial Sequence
  ENSG00000198382_21 (sequence is synthesized)
cccttgtatgttatcctcagagggaagatgataatatataaataatataatgaacacacccttagtttctcataagcatttgccctcaccatggtttataaaactttgggaaaacggaat

SEQ ID NO: 727316 - DNA, 120 bp, Artificial Sequence
  ENSG00000198382_22 (sequence is synthesized)
attcagaaataggtttccgccatgtactgaaaggtctgtggccatctgtgaggtagatgaagaagcagcatagtggtctccttacatctaggcctaactgtccctcttcctgcccccggg

SEQ ID NO: 727317 - DNA, 120 bp, Artificial Sequence
  ENSG00000198382_23 (sequence is synthesized)
taccacagtccacctttagaccctactgtcgccccatcttctccgtggatgggccatgcgtcctgaaaacaggacatcagattcactggttctgtaacccagtagctgtgacgttccatc

SEQ ID NO: 727318 - DNA, 120 bp, Artificial Sequence
  ENSG00000198382_24 (sequence is synthesized)
tcttctaaccagccatggccttcccctcctctgccatacccttaatgcggccctcagattagatgaaaaacttgctcctggtggatcccaagggaccctcaaggacctcgaggttactgc

SEQ ID NO: 727319 - DNA, 120 bp, Artificial Sequence
  ENSG00000198382_25 (sequence is synthesized)
agtcagatgccatctcatcccctgtgggggccaaagtttttatgtgggcagatgctgtggtcaggaactaggcatgctttctggcaatgcactcaccagacaaaaatcccttgatgtaaa

SEQ ID NO: 727320 - DNA, 120 bp, Artificial Sequence
  ENSG00000198382_26 (sequence is synthesized)
tcccatgttaatttattaaatttcagtcagaaggtcagcatttacatgacagaatgtatgtagagagttggggtgtctggtaggcaaactgcaaggcagttgagatagttggattaagag

SEQ ID NO: 727321 - DNA, 120 bp, Artificial Sequence
  ENSG00000198382_27 (sequence is synthesized)
gctagacgagacatagaatactattggtatgtgtgcaatttcatgaatattaaattatgtttcgaagtccagttgtcattcccgcattcagatttcatttgctgttgctttatacgttac

SEQ ID NO: 727322 - DNA, 120 bp, Artificial Sequence
  ENSG00000198382_28 (sequence is synthesized)
gtacccaaggacattgcctcagggttgcaaactctttaaaggaaaatttatccatatatccatgtattatatagaagaataaaaattgagtttacttcacccgacctgatttttttttac

SEQ ID NO: 727323 - DNA, 120 bp, Artificial Sequence
  ENSG00000198382_29 (sequence is synthesized)
cagcttggaaattcctcttgaacctacgtctccatatgtcacatcatgacaggactagcctgaacaaaagccatgtctatctaagcggaggctgttgacttcattcagtttgcatattgt

SEQ ID NO: 727324 - DNA, 120 bp, Artificial Sequence
  ENSG00000198382_30 (sequence is synthesized)
atatagcaacacaaacacttgacaggtatatactccagtcgccacatttgtcctgcataacagcttcactcacaggcctcaccgtcactttattttgtgtccaagcattcctgggctcaa

SEQ ID NO: 727325 - DNA, 120 bp, Artificial Sequence
  ENSG00000198382_31 (sequence is synthesized)
gtttaatgtatagctacattgttgttttccatgtagagaactcacaggatgactacatcacaaataaacccaactctcaggcagtcgaaagctttaactggatctgcagaagcccatctt

SEQ ID NO: 727326 - DNA, 120 bp, Artificial Sequence
  ENSG00000198382_32 (sequence is synthesized)
cctccacatgaagaagtggggctccttcacctagagcaggagcttctctgcagtgtactgtctgtcgctcattttggagtcagtgtgggtggagacagcatcgtggatatgcacgtgctg

SEQ ID NO: 727327 - DNA, 120 bp, Artificial Sequence
  ENSG00000198382_33 (sequence is synthesized)
cggggccctccagggaagtaacatttaccaaaaaaaaagaaaagttctgaagggcagtgttaggattgcagaatggaaggtcaaccccgtgggacttacgattgccccaggtgcgggatg

SEQ ID NO: 727328 - DNA, 120 bp, Artificial Sequence
  ENSG00000198382_34 (sequence is synthesized)
gacttaaatgtcacaccaaactcaaagtaggtacactgggttgcagggcatccagcctggcgctggcaccaccaaggagcaggactcctcatgattacagtgtccatctcaggcccacac

SEQ ID NO: 727329 - DNA, 120 bp, Artificial Sequence
  ENSG00000198382_35 (sequence is synthesized)
aaccatgagagcctggactctggggtctacccgtcagtgccccccaccgctgtgcagactccctggttgatcctgggcttgtggcttttcaccgcacggcggggagccctgctcttgaat

SEQ ID NO: 727330 - DNA, 120 bp, Artificial Sequence
  ENSG00000198382_36 (sequence is synthesized)
gtcatcgggctgctcagagctgattgctaggtgcctacacatttgcctcgacccacacagccccgtggtgatgcctcaaaacaccacttaggtttgggttcgtttagttcgagtttgggg

SEQ ID NO: 727331 - DNA, 120 bp, Artificial Sequence
  ENSG00000198382_37 (sequence is synthesized)
ttttcatttgaacttgtttgatgtctgcagtttctgccatgacctgggtagaacctatgggattacccgtctcctggaataactgtttgacgttttccaaagttgtagagttagtatggc

SEQ ID NO: 727332 - DNA, 120 bp, Artificial Sequence
  ENSG00000198382_38 (sequence is synthesized)
ctctgtttaaagtggctggggccaaaataagggatgagttattatctcctactaaccttttagttttgtaaatcactaagaaaattgtttgcttggaagatataagttgaattggaaact

SEQ ID NO: 727333 - DNA, 120 bp, Artificial Sequence
  ENSG00000198382_39 (sequence is synthesized)
cattactatctatttctgaactgctaagaaccctttcagttttcttacagctgagacacttttaaacagcgggcaaatgttatcaaatgaatatttgattgtgttttttctcttcacttc

SEQ ID NO: 727334 - DNA, 120 bp, Artificial Sequence
  ENSG00000198382_40 (sequence is synthesized)
cccttaaccactttagaaattccagagatttttttcccctcagaatattagttttggaagattgtgcccagctatatattttttagcagttctaatggtgcccatttatcctgacctaac

SEQ ID NO: 727335 - DNA, 120 bp, Artificial Sequence
  ENSG00000198382_41 (sequence is synthesized)
cagttatttaaataattttttaaaccaccacgaataataaatggcatgtgaaactgatctgttggtaactggaagaaaactcagcatctgtatttatacaataaaattgattagtattta

SEQ ID NO: 727336 - DNA, 120 bp, Artificial Sequence
  ENSG00000198382_42 (sequence is synthesized)
ttcttctgcaggtggatcagaactgtgttcgcaattcttacgatgtcttctctttgctacgaaatatcctgcttttgccagtttaataagtggaagtatggtggaaaataaagggctttg

SEQ ID NO: 727337 - DNA, 120 bp, Artificial Sequence
  ENSG00000198382_43 (sequence is synthesized)
gtccttcacctaaattccagtcctaaaactgccatgtgtaggtagactggatgcaagactttgagcaagtaacgtcaactttttgtataccttagtctgcttttgtaaaatggggctaat

SEQ ID NO: 727338 - DNA, 120 bp, Artificial Sequence
  ENSG00000198382_44 (sequence is synthesized)
tcctctttacttacctggtcttggatatagctttctcctctaagccagtattccttttccttgttaccactagcttttctacttttcagcatattttccctttctctccccagcattcta

SEQ ID NO: 727339 - DNA, 120 bp, Artificial Sequence
  ENSG00000198382_45 (sequence is synthesized)
gtgttttccatatctgcttttataactgcatgatggattcttcttgctcactgcccagaaaagtcaatgcattgagaacaggttttgcagcaaagaaagagtttaattattacagggcca

SEQ ID NO: 727340 - DNA, 120 bp, Artificial Sequence
  ENSG00000198382_46 (sequence is synthesized)
gccaaatggaaggatgggagataattctcagatccgcttcctcagaattcacaggctagagtgtttcaaggatagtttggtaggcagaggtctaggaaatggggaaacctgattagttgg

SEQ ID NO: 727341 - DNA, 120 bp, Artificial Sequence
  ENSG00000198382_47 (sequence is synthesized)
gtatgcggtgtcaagttgcctaattctgaggacttccaaggcatgatttcttggaaaggagagtccatatgtcaaacaatgtctcattgagaacatggaatgattccatagatgctgtgg

SEQ ID NO: 727342 - DNA, 120 bp, Artificial Sequence
  ENSG00000198382_48 (sequence is synthesized)
cagtgattagagtcttaaatattttgtcctgtctggatcagtgggtgcttggttccttaacaaatcagctgcctcagtgattgggaaggcaggatgcaaaagatgatggaagcattgctg

SEQ ID NO: 727343 - DNA, 120 bp, Artificial Sequence
  ENSG00000198382_49 (sequence is synthesized)
aattctattttttcaccttcacagctaagatatcaacatggactagggactccagacttgcggcaaacccttcccaacctgaaaaacttcatggagcatggactaatggtcaggtggaca

SEQ ID NO: 727344 - DNA, 120 bp, Artificial Sequence
  ENSG00000198382_50 (sequence is synthesized)
tctgctttacaagaacacagcaaactaagaaagggtatagtggccactgcgggcaggggcactgattcaaccacccacagcgccagaggggactcgaagaacccacgccaggcttacctc

SEQ ID NO: 727345 - DNA, 120 bp, Artificial Sequence
  ENSG00000198382_51 (sequence is synthesized)
cagacctgcgtcctacagaacagacaccactgaacatcctgtagtccccttattgtgtcatcgctcagtaatgttcatatcagtggcccagaggcaacgagaaaatgccttttcttgttc

SEQ ID NO: 727346 - DNA, 120 bp, Artificial Sequence
  ENSG00000198382_52 (sequence is synthesized)
tcaaatagtcattttttgtgtaaatacagtcacacatcacttaatgacagggatatattctggaaatgcatcctttggtgatttccttgctgagctgccatcatagagtatgtttacaca

SEQ ID NO: 727347 - DNA, 120 bp, Artificial Sequence
  ENSG00000198382_53 (sequence is synthesized)
agctcagatggtataaactactactacacacctaggctatatggctgtaaacttgtacagcatgttaccatactgaatactgtaggcaactataacacaatggtgagtatttatgtatct

SEQ ID NO: 727348 - DNA, 77 bp, Artificial Sequence
  ENSG00000198382_54 (sequence is synthesized)
ccctctgagccaggcgcgggatataatcttctggtatgctgtttgctaagaccgggtgcgattttccaggtgccgtc

SEQ ID NO: 727349 - DNA, 120 bp, Artificial Sequence
  ENSG00000198382_55 (sequence is synthesized)
gcgattttccaggtgccgtctgtcgtggcttcccttggctgggaaagggagttccccgaccccttgtgcttccctggtgaggcgatgccttgccctgctttggctcacggtccgtgggct

SEQ ID NO: 727350 - DNA, 120 bp, Artificial Sequence
  ENSG00000198382_56 (sequence is synthesized)
gcacccactgtcctacaagccccagtgagatgaacccggcacctcaattggaaatgcagaaatcatccatcttctgcgtcgctcacgctggaagctgtagactggagctattcctattcg

SEQ ID NO: 727351 - DNA, 120 bp, Artificial Sequence
  ENSG00000198382_57 (sequence is synthesized)
agtgctcagctcccttgccatgcgataccctgcaagtcctcaccagcaaaaaggctctcaccagaggctgcccctcggcctgtgttatcagattttttgcggcgtcttcgacatcttcgg

SEQ ID NO: 727352 - DNA, 120 bp, Artificial Sequence
  ENSG00000198390_0 (sequence is synthesized)
atgcaaactcagaatcttctcagtgtaactcagctgaactcacatctcccatcaacatgtcctacaactgctgctctggaaacttctcctcccgctcctgtggtggctacctgcactacc

SEQ ID NO: 727353 - DNA, 120 bp, Artificial Sequence
  ENSG00000198390_1 (sequence is synthesized)
cagcctcctcctgtggcttttcctaccccagcaaccaggtctacagcactgacctctgctctcccagcacgtgccagctgggttcctctctctataggggctgtcagcagacctgctggg

SEQ ID NO: 727354 - DNA, 120 bp, Artificial Sequence
  ENSG00000198390_2 (sequence is synthesized)
agcccaccagctgccagacatcctatgtggagtccagcccctgccagacctcctgctaccgtcccagaacctccttgctctgcagtccctgccagacaacttactctgggtctctaggct

SEQ ID NO: 727355 - DNA, 120 bp, Artificial Sequence
  ENSG00000198390_3 (sequence is synthesized)
gcttcagatccctgggttatggaggctgtggcttcccttccctgggctatggcgttggattctgccgcccaacctacttggcttctaggagctgccagtcttcttgctacagaccaactt

SEQ ID NO: 727356 - DNA, 120 bp, Artificial Sequence
  ENSG00000198390_4 (sequence is synthesized)
gtggatcaggcttctactattgatcatcttgttaaattgctgattttgttggctaatgccttcaatgcctctactcataacctttattgtcttcatcatgtacagaaagaattagcctct

SEQ ID NO: 727357 - DNA, 120 bp, Artificial Sequence
  ENSG00000198390_5 (sequence is synthesized)
tattctataattatcaagttctcagtttgtctttgtccccaaatactggctggcaggcttcatctgaaaaactgtaattggagaactagctcaaaataaatcttgaaatacacattaaaa

SEQ ID NO: 727358 - DNA, 120 bp, Artificial Sequence
  ENSG00000198393_0 (sequence is synthesized)
actcccggccttagtcgggtgcgcgcgtgcagggctgtttccggcttagactcagtggaccggaatctggccagcgggtgtacctggctgagtctctgtggccgcggaggcgcggagcta

SEQ ID NO: 727359 - DNA, 120 bp, Artificial Sequence
  ENSG00000198393_1 (sequence is synthesized)
agcggctcggattatcctgggcagaccagagacttgaccagctaaacacttccgtcggtccggggcgtggacggggccagatcagcctcctgctctcccgagtcagggccacggaaaggc

SEQ ID NO: 727360 - DNA, 120 bp, Artificial Sequence
  ENSG00000198393_2 (sequence is synthesized)
acaaatccatccgtgcgactcctggtacccagaccgggaggttgtctagtcacgcgcggtctgtgttgggcgagagctgaggagccggcgtccctgccaacgactcggccccgggacggt

SEQ ID NO: 727361 - DNA, 120 bp, Artificial Sequence
  ENSG00000198393_3 (sequence is synthesized)
caggagcctggggccctggtcccgcacctgtcttcgggcggacgcatccctcacggtctctccgcagcccgcgggtcctgcccccgcaggcagcgcgcgaacgtgggcgtggggatggcc

SEQ ID NO: 727362 - DNA, 120 bp, Artificial Sequence
  ENSG00000198393_4 (sequence is synthesized)
accagtttccggacagcttcgtgctggggattattgtcattcaaggatatatctatggagttcacctgggatgaatggcagctactggattctacacagaagtacctgtacagagatgtg

SEQ ID NO: 727363 - DNA, 120 bp, Artificial Sequence
  ENSG00000198393_5 (sequence is synthesized)
atattggaaaactatcataacctgatatcagtggggtatcatggtaccaagcctgacttaatcttcaagttggaacaaggagaagatccatggataataaatgccaaaatttccaggcag

SEQ ID NO: 727364 - DNA, 120 bp, Artificial Sequence
  ENSG00000198393_6 (sequence is synthesized)
agctgtccagatggctgggaagaatggtaccagaacaatcaagatgagcttgagagtattgaaagaagctatgcttgtagtgtgttgggaagacttaatctgagcaaaacccatgattct

SEQ ID NO: 727365 - DNA, 120 bp, Artificial Sequence
  ENSG00000198393_7 (sequence is synthesized)
tcaagacagagactctataacacacgtggaaaaagtttgacacaaaactcagctccaagcagaagttatttaagaaagaatcctgataagtttcatggttatgaagaaccatattttctt

SEQ ID NO: 727366 - DNA, 120 bp, Artificial Sequence
  ENSG00000198393_8 (sequence is synthesized)
aagcatcaaagagctcatagcatagaaaaaaactgtgtgtgtagtgaatgtgggaaagcttttcgttgtaagtcacagctcattgtacatctcagaattcatacaggagagagaccttat

SEQ ID NO: 727367 - DNA, 120 bp, Artificial Sequence
  ENSG00000198393_9 (sequence is synthesized)
gaatgcagtaaatgtgaaagagccttcagtgccaagtcaaaccttaatgctcatcagagagttcatacaggagaaaaaccctactcatgtagtgagtgcgagaaggtcttctctttcagg

SEQ ID NO: 727368 - DNA, 120 bp, Artificial Sequence
  ENSG00000198393_10 (sequence is synthesized)
tcacagctcattgtccatcaggaaattcacacaggagggaaaccctatggctgcagtgaatgtgggaaagcctacagttggaaatcacagcttcttttacaccagagaagtcacacagga

SEQ ID NO: 727369 - DNA, 120 bp, Artificial Sequence
  ENSG00000198393_11 (sequence is synthesized)
gtgaaaccgtatgaatgcagcgaatgtgggaaagcctttagtttgaagtctccattcgttgtacaccagagaactcatacaggagtgaaaccccataaatgcagtgaatgtgggaaagcc

SEQ ID NO: 727370 - DNA, 120 bp, Artificial Sequence
  ENSG00000198393_12 (sequence is synthesized)
tttaggagtaagtcctatctccttgttcacatccgaatgcatacaggagaaaaaccctatcaatgcagtgattgtgggaaagccttcaatatgaagacacaactcattgtacatcaggga

SEQ ID NO: 727371 - DNA, 120 bp, Artificial Sequence
  ENSG00000198393_13 (sequence is synthesized)
gttcacacaggaaataatccttatcaatgcggtgaatgtgggaaagcctttggtaggaaggaacagctcactgcacatctgagagctcatgcaggagagaagccctatggatgcagtgaa

SEQ ID NO: 727372 - DNA, 120 bp, Artificial Sequence
  ENSG00000198393_14 (sequence is synthesized)
tgtgggaaggctttcagcagcaagtcataccttgttatacataggagaacacacaccggagagagaccctatgaatgtagtttgtgtgagagagccttttgtggaaaatcacagctgatt

SEQ ID NO: 727373 - DNA, 120 bp, Artificial Sequence
  ENSG00000198393_15 (sequence is synthesized)
atacatcagagaactcattcaactgagaagccctatgaatgcaatgaatgtgaaaaagcctaccctaggaaggcatcacttcagatacaccagaaaactcattcgggagagaaacctttt

SEQ ID NO: 727374 - DNA, 120 bp, Artificial Sequence
  ENSG00000198393_16 (sequence is synthesized)
aaatgcagtgaatgtggaaaagccttcactcagaagtcatctctcagtgaacatcagagagttcacaccggagagaaaccatggaaatgctctgaatgtgggaaatccttctgttggaat

SEQ ID NO: 727375 - DNA, 120 bp, Artificial Sequence
  ENSG00000198393_17 (sequence is synthesized)
tcagggcttcgtatacatcggaagactcataaatgagaaatcagaatgatgcaatgtgagaaactgatgttcaggagacttcggataatatagacaggatttacaagcaggaggccctaa

SEQ ID NO: 727376 - DNA, 120 bp, Artificial Sequence
  ENSG00000198393_18 (sequence is synthesized)
aattacactcatgtcaaaaatcagagaggagagagaccaaccatatttgggatgagtgtaaaagctttcagaaataagttacaaatctttgtagatgaaaataatggaaggaatgtggag

SEQ ID NO: 727377 - DNA, 120 bp, Artificial Sequence
  ENSG00000198393_19 (sequence is synthesized)
caataaatgtatcaaatgttgtagtatcatcatgaagattcagagaatttacactaggaacaccttataagttgaataaattaaggaagcattttcccattgaaagtgtgttccatggaa

SEQ ID NO: 727378 - DNA, 120 bp, Artificial Sequence
  ENSG00000198393_20 (sequence is synthesized)
agtcacattccagatttgaagctgtgtttttgtaaaataaaatcttggtatgaacagttgacttcatggtggagtataaagttgtttttttaaaaatatgtaaataatgttcaggaaaaa

SEQ ID NO: 727379 - DNA, 120 bp, Artificial Sequence
  ENSG00000198393_21 (sequence is synthesized)
cgcagggaacagagtcttaaagttaatggatatttaatgtgactttcctgagttaacactgaatagtatttctaaaattttttgtactttattttttaatgtaacttgttctatctatct

SEQ ID NO: 727380 - DNA, 120 bp, Artificial Sequence
  ENSG00000198393_22 (sequence is synthesized)
atatatatatttgatagtttgtggaataatatcccccagtattttccatattaaatgctaattatcttttgatttctttttcataagcagatctggcatttattacagggctgccgctta

SEQ ID NO: 727381 - DNA, 120 bp, Artificial Sequence
  ENSG00000198393_23 (sequence is synthesized)
agagaactcattataatgaacgtttattatattttgcagttccatgcctgttgtccattgattgacatgagcacccctgttttctctggagaaatacctcccctctctggggtgcttcct

SEQ ID NO: 727382 - DNA, 120 bp, Artificial Sequence
  ENSG00000198393_24 (sequence is synthesized)
gtggtagtgtctttcaggtatccgttccactagctacaggtgagcattttacccattgttggataatggtaatctctttttcagaattttgagtctgtaattcatttgtacatgaaccag

SEQ ID NO: 727383 - DNA, 120 bp, Artificial Sequence
  ENSG00000198393_25 (sequence is synthesized)
aaaatgtgggaactcattcattcttgtcccagaattctgttgagaacatccattcattctggctaattgattacaagaataactgtggatacgatccctttagaacctgcttctctgatc

SEQ ID NO: 727384 - DNA, 78 bp, Artificial Sequence
  ENSG00000198393_26 (sequence is synthesized)
aactgtggatacgatccctttagaacctgcttctctgatctgtgtgtttcctcacttctcaataaaaatgtcttttgc

SEQ ID NO: 727385 - DNA, 82 bp, Artificial Sequence
  ENSG00000198393_27 (sequence is synthesized)
catgggattacaggtgtgagccaccgagcccggccagctttctatttcttataacctaagggctttaactgatcagttgttg

SEQ ID NO: 727386 - DNA, 120 bp, Artificial Sequence
  ENSG00000198393_28 (sequence is synthesized)
tatttcttataacctaagggctttaactgatcagttgttgccttggtagcatgtagttaacaaagtggggtatatgatttaggtttgtttgtttttcctgagacaagaaaatcacattct

SEQ ID NO: 727387 - DNA, 120 bp, Artificial Sequence
  ENSG00000198393_29 (sequence is synthesized)
tgtttatatttgaagatagcaacttttagccatcatgtgaaatatggttattgtttctgtacacctggaacgttgtagtgcctgatactgaaattttggaaacactgaagaattatagca

SEQ ID NO: 727388 - DNA, 120 bp, Artificial Sequence
  ENSG00000198393_30 (sequence is synthesized)
ttataagaattttaaatttatgagaaaatctgagacaggggcagagatggctgattttgatcttgctggatcttagaccatgagaatgacaggcctgaagccctgaaatctcacctcagg

SEQ ID NO: 727389 - DNA, 120 bp, Artificial Sequence
  ENSG00000198393_31 (sequence is synthesized)
gtggagtgtcagacttggcaactttgacattgctgaaaaagtttcttacagctgtaggagtgaggtggtgggaatcaaatagtatatttggcttggtgaattaaagtcagttcacctcaa

SEQ ID NO: 727390 - DNA, 120 bp, Artificial Sequence
  ENSG00000198393_32 (sequence is synthesized)
atgtttactaaatcccttaatgtaaacatgtgttgaaaaagttatcctcacccttccccccctcaaaaagttatcccttgataatttgaataggaatatctgggaagaacctgaggactc

SEQ ID NO: 727391 - DNA, 120 bp, Artificial Sequence
  ENSG00000198393_33 (sequence is synthesized)
agcctagcaagctcttgtgatagactttgaatagcagtatctgcgaagaacctgaggcctcagcctagcaaactcttctgatagactttgaataggaatgtctgggaagaacctgaggac

SEQ ID NO: 727392 - DNA, 120 bp, Artificial Sequence
  ENSG00000198393_34 (sequence is synthesized)
tcagcctagcaaactcttctgatagactttgaataggagtatctgggaagaacctgaggactcagcctagcaaactcttctgatagactttgaataggaatgtctgggaagaacctgagg

SEQ ID NO: 727393 - DNA, 120 bp, Artificial Sequence
  ENSG00000198393_35 (sequence is synthesized)
actcagcctagcaaactcttctgatagactttgaataggagtatctgggaagaacctgaggactcagcctagcaaactcttctgatagactttgcactgcagatgcttcatttaaggcta

SEQ ID NO: 727394 - DNA, 120 bp, Artificial Sequence
  ENSG00000198393_36 (sequence is synthesized)
tagagtagatgttggcaatatataaaattcaaacttgagtgtccataaataactgttgttggaacatggctaaatatatttgtgtattatttgactgcttttgcacagccatggcacagt

SEQ ID NO: 727395 - DNA, 120 bp, Artificial Sequence
  ENSG00000198393_37 (sequence is synthesized)
tgagtagttgaggtataaaaaacctgccacctcctgatacagatagaaccccttcccttttctgggaaaatgtggaatttgccttgcaggaggaagcttattctgccagttccccatggc

SEQ ID NO: 727396 - DNA, 120 bp, Artificial Sequence
  ENSG00000198393_38 (sequence is synthesized)
ttatttttaccagtttggtaacaataatctacactaaacatgccctgggatgggattgctcatttaggaaaatatgtagaattcatagagcattgcaggaatgagtaatgtatcaaaact

SEQ ID NO: 727397 - DNA, 120 bp, Artificial Sequence
  ENSG00000198393_39 (sequence is synthesized)
atgagtaatgtatcaaaacttctcagcatgacaacacccagggcaacgtgacaaaaccctgtctacaaaagtttcttaaaagctggttacagcggtgcacacctgcaatcccagctactc

SEQ ID NO: 727398 - DNA, 86 bp, Artificial Sequence
  ENSG00000198393_40 (sequence is synthesized)
tgtactccagtgttgggggagggggtagatacttgtgaaatcctttgagggtgttcagtgaagggcaattacttacagcatatact

SEQ ID NO: 727399 - DNA, 120 bp, Artificial Sequence
  ENSG00000198393_41 (sequence is synthesized)
acttgtgaaatcctttgagggtgttcagtgaagggcaattacttacagcatatacttggtgcactgacacccagcagtgatgatggttttgctttctgtttttttttttgttttgttttg

SEQ ID NO: 727400 - DNA, 120 bp, Artificial Sequence
  ENSG00000198393_42 (sequence is synthesized)
ttacaggcgtgagccaccatgcctgaccatgatgatggttttaaaagttagctgtagcagctaaggcaagaccagatccaacactggcttatggcaaggggaagaacaaaagtcaggaac

SEQ ID NO: 727401 - DNA, 120 bp, Artificial Sequence
  ENSG00000198393_43 (sequence is synthesized)
aaagtcaggaactttgccataatctagaagaaagaatgataatgctttgtgacatgctggattgtatccattatgtgttcctaagaccctcagccctctccctccaccaagacccaataa

SEQ ID NO: 727402 - DNA, 64 bp, Artificial Sequence
  ENSG00000198393_44 (sequence is synthesized)
ctaagaccctcagccctctccctccaccaagacccaataaaagtgtgttattgaaagtagtagc

SEQ ID NO: 727403 - DNA, 120 bp, Artificial Sequence
  ENSG00000198393_45 (sequence is synthesized)
gacacaatcctaactgtggcatgtatctatgtcttcacttgcatcggcctcaattatcaacttgtggcaaaagaataagaaagagaactaaaaaatgaaaaaaaataagatgctttccta

SEQ ID NO: 727404 - DNA, 120 bp, Artificial Sequence
  ENSG00000198393_46 (sequence is synthesized)
gctacttgggaggctgaggcaggagtgtcgcttcagcccagaaggttgaggatgcagtgagccatgattgtgtttcagcctggatgacagggcaagacctcatatctgtaaaaagtaaaa

SEQ ID NO: 727405 - DNA, 120 bp, Artificial Sequence
  ENSG00000198393_47 (sequence is synthesized)
aagtaaaaataaataaacaaactatataataataatacagaagacaaatgtcaatgttgctgaaaagccaaaagaagccaagaggacagtcttctgagtagagggcataggagttcccaa

SEQ ID NO: 727406 - DNA, 120 bp, Artificial Sequence
  ENSG00000198393_48 (sequence is synthesized)
agaggaaagtccagtctgagatcaggctggaggccaaaaggaactcttgacctgagacagttggaaatattacttctactggcaaataaaagtgcttcaagcagacgtttatttagaaat

SEQ ID NO: 727407 - DNA, 120 bp, Artificial Sequence
  ENSG00000198393_49 (sequence is synthesized)
tcatgctgcatgtttattgatggaatgtttgtgtgactctttaatagaagtctgaactaggtatgccatatatttccatatatcttcatttgtcttgggggtaagtgttgagagaaggaa

SEQ ID NO: 727408 - DNA, 120 bp, Artificial Sequence
  ENSG00000198393_50 (sequence is synthesized)
tttgtcttgggggtaagtgttgagagaaggaagtggcttttggttttgtgagtgtcttgaagatctaaggtttattgtgaaaaagtgtaggggtaatttttttttttttttttttttgag

SEQ ID NO: 727409 - DNA, 120 bp, Artificial Sequence
  ENSG00000198393_51 (sequence is synthesized)
cccggccagagcatccttaatttttaaaaacaatttagctactttttttttttttttttaactattttaagagcatcacagtaaaaggaaaataacagctcactttggggccaaagtcta

SEQ ID NO: 727410 - DNA, 120 bp, Artificial Sequence
  ENSG00000198393_52 (sequence is synthesized)
ggtgcagtggcttatgcctataatcccaacactttgggaggcaggaggatcacttgagctcaggaatttgagaccagtctggacaacaaagcaaaaccccatctctgaaaaaaaaaaaat

SEQ ID NO: 727411 - DNA, 89 bp, Artificial Sequence
  ENSG00000198393_53 (sequence is synthesized)
cttgagctcaggaatttgagaccagtctggacaacaaagcaaaaccccatctctgaaaaaaaaaaaataccccgggatggtggcttagg

SEQ ID NO: 727412 - DNA, 120 bp, Artificial Sequence
  ENSG00000198393_54 (sequence is synthesized)
cagcctgggtgacagagcaagaccttgactcaaaaaaaaaaaaaaattctactctcttggtatttgtaatatgttatgagataccatcattggaggttgtaaggatgggaatattagttg

SEQ ID NO: 727413 - DNA, 120 bp, Artificial Sequence
  ENSG00000198393_55 (sequence is synthesized)
ttgtaaggatgggaatattagttgaaagtctgatattttatcattgagttgcccttttccaattttacatgcttaggttgacttctcaatagcaacagtaaaaatcagaagacagtaaaa

SEQ ID NO: 727414 - DNA, 120 bp, Artificial Sequence
  ENSG00000198393_56 (sequence is synthesized)
gaatgtcttcaatgttctgaaagaaaatatctacctagaagggttattcacaaaccagggtgaaataatgtcattttaaacaaaatatttaataccaagaaagttggaaacataaaaaaa

SEQ ID NO: 727415 - DNA, 120 bp, Artificial Sequence
  ENSG00000198393_57 (sequence is synthesized)
taaaaagtcatgctcggccaaatctaaacagacttaaaaattataagatgtaatttgatggtacaaaaatatggaaataagccccagaaaataacagtatgtaacattggaagaagtcta

SEQ ID NO: 727416 - DNA, 120 bp, Artificial Sequence
  ENSG00000198393_58 (sequence is synthesized)
ataatttttaggggagtagagattctgattatcccacatggcagggcattagacaaggagacccactttaccacagataaggttcagtggtggtcccatgactgatctattggtcacacc

SEQ ID NO: 727417 - DNA, 120 bp, Artificial Sequence
  ENSG00000198393_59 (sequence is synthesized)
ttatgcttaccccaccacctagaagcggctggtgtgacagagcattggatgacctgctgaaggtggtttgaagtaccagcttagtggcagtacttgacaagcacagggcaccgtcctcca

SEQ ID NO: 727418 - DNA, 120 bp, Artificial Sequence
  ENSG00000198393_60 (sequence is synthesized)
agatgcagtcctggaatcacagacttttatctggtagtgattcctcaatagggagtgtacacaggtccaagagccaaggagtgggaacgggatcagctccacttaacatcatttccagtg

SEQ ID NO: 727419 - DNA, 120 bp, Artificial Sequence
  ENSG00000198393_61 (sequence is synthesized)
atcagtttggagactgaagagcaacagtctgaggaatgaccccaggcagtaatttgtttccacagaaaaaacaaagagcaccagtaaagggtaattatgtaataataaaagatagtgcaa

SEQ ID NO: 727420 - DNA, 80 bp, Artificial Sequence
  ENSG00000198393_62 (sequence is synthesized)
gccactaacagcaacaaaaaaagcaattatataaaacaatatgcagtactgtttggactataacatacagaagtgtaata

SEQ ID NO: 727421 - DNA, 120 bp, Artificial Sequence
  ENSG00000198393_63 (sequence is synthesized)
atgcagtactgtttggactataacatacagaagtgtaatatgtctaccaataacaccacaaaggaggaggatgggagaagagtcgtgttggggtaaggaaatggctctagatggcaactt

SEQ ID NO: 727422 - DNA, 120 bp, Artificial Sequence
  ENSG00000198393_64 (sequence is synthesized)
caaaagctgttaatatatactttctcttcatctctcagcctctttaaattataaaatatataaagcaatatttatagcaatgtgttgttgcatttgtaacatagatatatatatcaatac

SEQ ID NO: 727423 - DNA, 120 bp, Artificial Sequence
  ENSG00000198393_65 (sequence is synthesized)
cagcacaaaagtcggggtgggggctagaactatataggaataatgggtttataaaagtcttattggaattaaggtagtataaatctgaagtagactctgataagttaatgtgtatttaac

SEQ ID NO: 727424 - DNA, 120 bp, Artificial Sequence
  ENSG00000198393_66 (sequence is synthesized)
acttcctagaacaaacactaaagaaataactgcaaaaatattgtaaggaatcattaaataaataaaatattacattacaaaatatgcacttaagacaaaagtgaaggagaaatagatgaa

SEQ ID NO: 727425 - DNA, 120 bp, Artificial Sequence
  ENSG00000198393_67 (sequence is synthesized)
gaaatagatgaacaaaagatacatgagacataaaatacaaaagggaaagcagcatatgtaaatctaactatatcaataataacttttttttaagagggtcttgctctattgcccaggctg

SEQ ID NO: 727426 - DNA, 90 bp, Artificial Sequence
  ENSG00000198393_68 (sequence is synthesized)
gcaattctcccacctcccacctggcagagatggaggtatcaaactccagggctcaagcaatcctcccattctggtctctcgaagcatcaa

SEQ ID NO: 727427 - DNA, 120 bp, Artificial Sequence
  ENSG00000198393_69 (sequence is synthesized)
gctcaagcaatcctcccattctggtctctcgaagcatcaagattataggcatgagccagcgcacctggccagtaataacattaaatgtgaatagattaaactatcaaaagacacagattg

SEQ ID NO: 727428 - DNA, 120 bp, Artificial Sequence
  ENSG00000198393_70 (sequence is synthesized)
tcaaagtggtgataaaaaaaaatccaaccatgtacagaagacatacatacatactcaaagatacaattggattagaagtaaaggatggaaaaagatataaaacgcaaacagcaaccataa

SEQ ID NO: 727429 - DNA, 120 bp, Artificial Sequence
  ENSG00000198393_71 (sequence is synthesized)
taaatctccagtggctttctaatatcagacacaatagagtttaaaacaaaagttttactagagataaagaaaagtattttgtaaagataagtcatcaagaagatgtaacaattataaata

SEQ ID NO: 727430 - DNA, 120 bp, Artificial Sequence
  ENSG00000198393_72 (sequence is synthesized)
gacaattgggattacatcaagctgggaagcttccatactgccgaggaaataacaaaataaagagacaacccacagattgggagaaaatatttgcaaactatccatttgacaaggggttaa

SEQ ID NO: 727431 - DNA, 120 bp, Artificial Sequence
  ENSG00000198393_73 (sequence is synthesized)
aaacaaagaaaaataacaaaaaaaaaaccccaaactccagatattccaattataaagtaggcaaaagatccaaacagacgtttctcagagaagacatgcaaatgtctaacaggtatatga

SEQ ID NO: 727432 - DNA, 120 bp, Artificial Sequence
  ENSG00000198393_74 (sequence is synthesized)
tttctcagagaagacatgcaaatgtctaacaggtatatgaaaaaatgctcaatatcaccacttatcagagaaatgcaaattaaccacaatcagatatcatccctcttcagttaaaatggc

SEQ ID NO: 727433 - DNA, 120 bp, Artificial Sequence
  ENSG00000198393_75 (sequence is synthesized)
ttgtatcagaaagacaggaaagaacagatgctggtgaggatatggaggaaggacagccctcgtacactgttggtgggagtggaaattagtacagccactatggagaacagtatggaggct

SEQ ID NO: 727434 - DNA, 120 bp, Artificial Sequence
  ENSG00000198393_76 (sequence is synthesized)
cctcaaagcaactgaaaatagaactattatacgatccagcaaccccactactgggtgaaaagccaaaagaaaggaaatcagtacatcaaagagacacctgcactctcacgtttcctgcag

SEQ ID NO: 727435 - DNA, 66 bp, Artificial Sequence
  ENSG00000198393_77 (sequence is synthesized)
gtacatcaaagagacacctgcactctcacgtttcctgcagcactatccacaagagccaaaaaatga

SEQ ID NO: 727436 - DNA, 120 bp, Artificial Sequence
  ENSG00000198393_78 (sequence is synthesized)
gaggcggaggttgcagtgagttgagattgaactgctgccctccagcctgggcgacagagtaaagctccatctcaaaaaacaaaacaaaaaaaaaatcagagcccatcaacaaatggataa

SEQ ID NO: 727437 - DNA, 120 bp, Artificial Sequence
  ENSG00000198393_79 (sequence is synthesized)
agaaagtgtgatatatataaacacagtcaatatgtctattcagtcataaaaataaaatcctgtcatttgcagcaactgggatggaactgaaagccattataataagtgaaataagccaag

SEQ ID NO: 727438 - DNA, 120 bp, Artificial Sequence
  ENSG00000198393_80 (sequence is synthesized)
gacaaatattgcatgttctcactcatatttgaaagctaaaaaagtagacctcatgaagatagagttgatggtggttaccagaagctgggaagagggggaaggatgaaggggaaaaatatg

SEQ ID NO: 727439 - DNA, 120 bp, Artificial Sequence
  ENSG00000198393_81 (sequence is synthesized)
ggatgaaggggaaaaatatgaatgtatctattattgctgaactgtacacttaaaaatggtaatgatgataatatttataatatatttacattttgtttatatatttatattttgcctcaa

SEQ ID NO: 727440 - DNA, 120 bp, Artificial Sequence
  ENSG00000198393_82 (sequence is synthesized)
agaagatataataattataaacatgtatgtacctaataacagcaccaaaatacatgaagcaaaatctgacagaaatgaagagagacaactcaacaatactagttggagacttaatatccc

SEQ ID NO: 727441 - DNA, 120 bp, Artificial Sequence
  ENSG00000198393_83 (sequence is synthesized)
actttcaatattagaacaatcgtataagttgtctaggactgtcgtaacaaagaaccacaaactggatggcttaaacaacacagatatattgtcttactgttctggagcctccatgtttga

SEQ ID NO: 727442 - DNA, 120 bp, Artificial Sequence
  ENSG00000198393_84 (sequence is synthesized)
aatcaaggcattgacaggttttggttccttctgagggctctgagggaaggatctgttccaggcctctctccttggcttgtagatggctgtcttctcactgtctcatcacataatctccct

SEQ ID NO: 727443 - DNA, 120 bp, Artificial Sequence
  ENSG00000198393_85 (sequence is synthesized)
tctatatgcacatatctctgtgcaaacgtcccctttttatagggacatcagtcatattgactcctaagtcctcattttaacattgttaactctgtacagaccctctctccaaataaggcc

SEQ ID NO: 727444 - DNA, 120 bp, Artificial Sequence
  ENSG00000198393_86 (sequence is synthesized)
tcactctgaggtatggaaattaggaccccaacatatctctttgagttggggggacactactcaacactgaagtgtttagggatgtcgagaaattatgcctccaacctatgctcatacatt

SEQ ID NO: 727445 - DNA, 120 bp, Artificial Sequence
  ENSG00000198393_87 (sequence is synthesized)
cctgggtgacagagtgaaactgtctcagaaaaaagaaagaaagaaaaacgtttatttgtagagaaagctaacatggtaaaaatttgaggaatattggtaaagaatatttacaaattcatt

SEQ ID NO: 727446 - DNA, 120 bp, Artificial Sequence
  ENSG00000198393_88 (sequence is synthesized)
tgaggaatattggtaaagaatatttacaaattcattatcattgtgtaaattctatattactttttaaactttcatgttttgtggagtcatttctaaatcaaatcattaaaaagaggccag

SEQ ID NO: 727447 - DNA, 61 bp, Artificial Sequence
  ENSG00000198393_89 (sequence is synthesized)
tagcccctgtttaccaaaaatacaaaaattagccagggtggtgacgtgcacctgtaattcc

SEQ ID NO: 727448 - DNA, 82 bp, Artificial Sequence
  ENSG00000198393_90 (sequence is synthesized)
cagggtggtgagggagtatcacttgaactcgaaaggtggaggttgcagtgagccgggatcacatcactgcactccagcctgg

SEQ ID NO: 727449 - DNA, 120 bp, Artificial Sequence
  ENSG00000198393_91 (sequence is synthesized)
ctgggtgacagagtgagaccctgtcacacacaaaaaattaaagtcattaaaaagaaaaactgaattttgcaaaattattggatgtcagtatattcaaatcaattttatttctatatatca

SEQ ID NO: 727450 - DNA, 120 bp, Artificial Sequence
  ENSG00000198393_92 (sequence is synthesized)
atatatcagaaaaataatataaaatgggatttaacaaattgaatcaattttcagtggcatcaaaatacaaaatagatacaaatcttatggtgttggaactgttcagcatcttgaaggtgg

SEQ ID NO: 727451 - DNA, 120 bp, Artificial Sequence
  ENSG00000198393_93 (sequence is synthesized)
ttgttgatacatgaacctacactggtgataacattgaacagaacttaatatacacacatacaaagtataagtaaaactggggaaatgttaagtattgtgtgtcagtattctggctgtgat

SEQ ID NO: 727452 - DNA, 120 bp, Artificial Sequence
  ENSG00000198393_94 (sequence is synthesized)
atactgtagtgttgcaaaatgttagcattgggggaaactgggaaaagtgtataagggatctctgcattattttgtatactctaggtgaaactatctcaatacaaatttaattaaaacaaa

SEQ ID NO: 727453 - DNA, 120 bp, Artificial Sequence
  ENSG00000198393_95 (sequence is synthesized)
ataaatctgataaagatgtaaaagaataaagagactattatccagttgataaaatatgcaactatgaaataaactgaataaattgaacaagcttgaacaaattgaatcatcaatatgttc

SEQ ID NO: 727454 - DNA, 120 bp, Artificial Sequence
  ENSG00000198393_96 (sequence is synthesized)
aagtcctagacatttaatagtgataaatgttattccccaaatactgtatgtagtataacatctttgttaaaggccaagataaagcaaaatggagttatatattgtttaggcatatgtgtt

SEQ ID NO: 727455 - DNA, 120 bp, Artificial Sequence
  ENSG00000198393_97 (sequence is synthesized)
tatgtgacaaaacaacggggaaaaaaagctagaaaatgataatcaaaatctttaggatagtgtctacaccctgtggaagaagcagtgagttggaaaaagggaacactaagtagaggcttc

SEQ ID NO: 727456 - DNA, 120 bp, Artificial Sequence
  ENSG00000198393_98 (sequence is synthesized)
aagttatttttaattttctgtttgggtgaaagattcaagagcattcgtgagaatgtacttgtaactagtatttgatgaacaggggctatacaacagtttagattttaaaaaattatggga

SEQ ID NO: 727457 - DNA, 120 bp, Artificial Sequence
  ENSG00000198393_99 (sequence is synthesized)
gaatactaaggataaccatacgccagtcaaataaaaatagataacacatttttcagttttctagaatactgcacattatcaaaactgaccaaagcagaaaaagcaagactgaataaaatc

SEQ ID NO: 727458 - DNA, 120 bp, Artificial Sequence
  ENSG00000198393_100 (sequence is synthesized)
aacaataaataacaaaattgaattggagtatcaaaagcttccctcagtgaaatatagcaaagcccagatggatgtccaataaaattttagcaaacattaaggacttgattatcattatgt

SEQ ID NO: 727459 - DNA, 120 bp, Artificial Sequence
  ENSG00000198393_101 (sequence is synthesized)
aagcagtattagagaatttttaaaatatagattacttccaaattcacctagaaattcttttataacctttacaccaaatcaggatagagacagtagaagaaaaaataaatacaggtcaat

SEQ ID NO: 727460 - DNA, 120 bp, Artificial Sequence
  ENSG00000198393_102 (sequence is synthesized)
ctaatatatgaaaattttctgagtaaatgaaatccaggtctctttcgccatacatttgtatatgaggttgaaccataggaaattacaataatcaaccatgttttacatatgtggcagatt

SEQ ID NO: 727461 - DNA, 120 bp, Artificial Sequence
  ENSG00000198393_103 (sequence is synthesized)
ttattttctgaagtgggctatgacagtagcttccatctcatctcctcttctacagtgtgatcttgccactcctcccacttatagtcttgccccatcctttgagttttgttggcttgtgag

SEQ ID NO: 727462 - DNA, 120 bp, Artificial Sequence
  ENSG00000198393_104 (sequence is synthesized)
tcacttgtagccaaaagaatgtggaggaagtgatcatgtaacttcgcaggatataaaaagccatgcggcttctgccttgattgcagagatccttcatttgccatgtaagcagtccttgaa

SEQ ID NO: 727463 - DNA, 120 bp, Artificial Sequence
  ENSG00000198393_105 (sequence is synthesized)
gctgcagtactaggaggaaatctcaaataatccatatagagaaaccacatagagaggctctgagattacataaagagatgcttgttcagccccatatgctcccgttccatgcctttctgg

SEQ ID NO: 727464 - DNA, 120 bp, Artificial Sequence
  ENSG00000198393_106 (sequence is synthesized)
ctccatgagaaattctgacccagaacggctcagtcagacctctcctgaatccctgacaaacaggaaccatcagaaataataacgtctttgttgctatttgtgctataatgttttgaggtg

SEQ ID NO: 727465 - DNA, 120 bp, Artificial Sequence
  ENSG00000198393_107 (sequence is synthesized)
atacgttagactacagtagtgattggaatagaaatttagtgttggaagtggggttctacttacatgcatcactggccttggcactggatgatgagcagaatctgaaaggcccttgagtaa

SEQ ID NO: 727466 - DNA, 120 bp, Artificial Sequence
  ENSG00000198393_108 (sequence is synthesized)
aatatcagtaaaacccagtgggctttggggatggtattagcagagtctaaaagtcatcaaggaggttgctggtgagagcttgaaggaacacaaggaaagcattattgaaacatggagaaa

SEQ ID NO: 727467 - DNA, 120 bp, Artificial Sequence
  ENSG00000198393_109 (sequence is synthesized)
atgagacttttttatgtagtgacaggtgtatcaacactgtcacctaatgtaaatggaaaatagaagatgtacctcatgacctcagtgatagagctaagtgttttctagacccagtgttca

SEQ ID NO: 727468 - DNA, 120 bp, Artificial Sequence
  ENSG00000198393_110 (sequence is synthesized)
ggatgctacctggctcctcattgcttataataaaatgagaggaaagagaactaaaaaatgaaccattccatggaggaaatggtaaacagtcttttcagcttgtaaagcattctcaaagta

SEQ ID NO: 727469 - DNA, 120 bp, Artificial Sequence
  ENSG00000198393_111 (sequence is synthesized)
cgaaagctcctcagggaaaagatgtaatccaaggctggctataatacccttatgtaagattccagaaagatctgaagcggtgcctcctgacccccttcaatgaataaacaaaaaggactt

SEQ ID NO: 727470 - DNA, 120 bp, Artificial Sequence
  ENSG00000198393_112 (sequence is synthesized)
ctaaggacttgagagaatgcttctgtgagccctctctcataagcaacagaactgctaagaattttaagggtgaggtcccacaaaaggcccactgagagcccatagtagagaaagtcttat

SEQ ID NO: 727471 - DNA, 120 bp, Artificial Sequence
  ENSG00000198393_113 (sequence is synthesized)
taagagatttttggggtgtggcttttgtctaatggaatgggttgtacacagatagctaaaaatcccacacgttcttaaaaacagtgatgctaactttacagataaggacaaactgtataa

SEQ ID NO: 727472 - DNA, 120 bp, Artificial Sequence
  ENSG00000198393_114 (sequence is synthesized)
aaaaagatatttgaactctcaacctttttgctcaggaaggaggttgagaaggatactcacttgcaaacatggtcacattttatgaaaaaccatggatgactcagagagcagaactaagat

SEQ ID NO: 727473 - DNA, 120 bp, Artificial Sequence
  ENSG00000198393_115 (sequence is synthesized)
ccagagggtagagcaaagagccatggaggagaagtccaagaaagcagaaccaaaccctaatcaccgaactggtaatgggtacccagtaggatttatggatttctatggaacagtgactac

SEQ ID NO: 727474 - DNA, 120 bp, Artificial Sequence
  ENSG00000198393_116 (sequence is synthesized)
tctgtgcctcctcttgtccccatttttgaataggagtattggtaacagtttttctgtgtctgccccactgttacgttctgggtgtgtaagatgaaaataacttgtctcatatttcacagg

SEQ ID NO: 727475 - DNA, 120 bp, Artificial Sequence
  ENSG00000198393_117 (sequence is synthesized)
cattcagattgggagaaatagcacctcaggaactgcatcctcaagagtcccatctgcacctgtagcagagtttgacgatgagatcctggtcttcaatctgatattataacgggatgagac

SEQ ID NO: 727476 - DNA, 120 bp, Artificial Sequence
  ENSG00000198393_118 (sequence is synthesized)
attgggatcttgggggaggagatggctgtactttgcatgggggggatgtgaattgttacagccagagggcagaccgtggtaatcccaaacatggccaaaacagtatctcctatcacacat

SEQ ID NO: 727477 - DNA, 120 bp, Artificial Sequence
  ENSG00000198393_119 (sequence is synthesized)
tctcttccacagtgtgcctgctatatatttctcccatgagagttgaggtcgacaccagctccttgaacctgggtggacttgtaatttgcctgtagccaacagaatgcagcagaaataggc

SEQ ID NO: 727478 - DNA, 63 bp, Artificial Sequence
  ENSG00000198393_120 (sequence is synthesized)
aggccaaggccgtttctatttaagaaagaaaaaaaagaatgcagcagagatgaagctgtgtaa

SEQ ID NO: 727479 - DNA, 120 bp, Artificial Sequence
  ENSG00000198393_121 (sequence is synthesized)
gaaagaaaaaaaagaatgcagcagagatgaagctgtgtaacttccaaagctaggtcataaaaggtgatgcagcttccatcttgtcactggaattcacactcttgaaccattcagcagcca

SEQ ID NO: 727480 - DNA, 120 bp, Artificial Sequence
  ENSG00000198393_122 (sequence is synthesized)
tataagcagtccaatggccctgagctgccctgcagtaagaaagcccaaactagctcacacacagactacatcaagagtgagagatgcctaaaacacccccaggcattccagccccttctg

SEQ ID NO: 727481 - DNA, 120 bp, Artificial Sequence
  ENSG00000198393_123 (sequence is synthesized)
ttctagatctagccttagaaaaagctgcctagctgagcctatcttgaatttctgacccaggaaactattagatataataagtcacttttttttttttttgagatgcactctcactctttc

SEQ ID NO: 727482 - DNA, 120 bp, Artificial Sequence
  ENSG00000198393_124 (sequence is synthesized)
gccactgcgcctggccaataagtctctttttttaggtaatcaagttaaaataataagtcactaaattttgaggtgttctgttatgtagaagagtgactggaccaacccataaaaaggaca

SEQ ID NO: 727483 - DNA, 74 bp, Artificial Sequence
  ENSG00000198393_125 (sequence is synthesized)
ttgattcagctcatggcaacctccgcctccaaggttcaagtgattatcatgcctcagcctcccaagtagctgag

SEQ ID NO: 727484 - DNA, 87 bp, Artificial Sequence
  ENSG00000198393_126 (sequence is synthesized)
ggcaacctccgcctccaaggttcaagtgattagggcacctgccaccacgcctggataatgtttgtatttttagtagaggtggggttt

SEQ ID NO: 727485 - DNA, 120 bp, Artificial Sequence
  ENSG00000198393_127 (sequence is synthesized)
atgtagaaatagagtgatatgaaacataaatacctatataggttaagaaaaatattcaataaattggaacaattctttgttataaaattcttaagaaactcagaataaaatgcaacacct

SEQ ID NO: 727486 - DNA, 120 bp, Artificial Sequence
  ENSG00000198393_128 (sequence is synthesized)
tataaaattcttaagaaactcagaataaaatgcaacacctttttacgattataaacccctcagcaaacatacttcaagcagaaccttacgaacagtataattaaaatgaggaaccgctga

SEQ ID NO: 727487 - DNA, 120 bp, Artificial Sequence
  ENSG00000198393_129 (sequence is synthesized)
tatgttctgctgatttcagtgctcaccgttgtatccagcttcccaccaattctttctgtgtcttaatgttgtctctatagggtgtaattttttttttttagagacagagtctggttctgt

SEQ ID NO: 727488 - DNA, 120 bp, Artificial Sequence
  ENSG00000198393_130 (sequence is synthesized)
gagacagagtctggttctgttgcccagtgtaaagtgcagtggcatagtcatggccaactacagcctcaaactcctgtgctcaaaccatccttccacctcagcctcctgagtaactgggac

SEQ ID NO: 727489 - DNA, 120 bp, Artificial Sequence
  ENSG00000198393_131 (sequence is synthesized)
ggactacaggcgtgcaccactatgcccacacatttttttgttatttgtagagatgaggtctaactatgtgacccaggatagtctgaaactcttggcctcaagtgatcctcccgcctcagc

SEQ ID NO: 727490 - DNA, 120 bp, Artificial Sequence
  ENSG00000198393_132 (sequence is synthesized)
atgaggtaccacatttgatggatataaattttccaggtgctagtatatttgaaaatgtcttttattttcccttatttttgctttttagtttggctggtataagatttcagaatcagcatt

SEQ ID NO: 727491 - DNA, 120 bp, Artificial Sequence
  ENSG00000198393_133 (sequence is synthesized)
attttttctcagtactttatttctctcccactttcaagaagcattgttctttccttttagttggttatcaggtgttctctttatactttattttcagacatttcattaccatctgcttaa

SEQ ID NO: 727492 - DNA, 120 bp, Artificial Sequence
  ENSG00000198393_134 (sequence is synthesized)
atttggaccttttttttgtttgttaacttatcttgtatttcaattggtaggtttttctcatgtgaactcctgtatttgtcttcactccaagagaattttcaggccgcatttctttgaaca

SEQ ID NO: 727493 - DNA, 120 bp, Artificial Sequence
  ENSG00000198393_135 (sequence is synthesized)
aggccgcatttctttgaacattgccctattatttctcttatttatataaacctacattggtaattcttctataaaccaggaaaatcattccaggtttatttatttatttatttttttgag

SEQ ID NO: 727494 - DNA, 120 bp, Artificial Sequence
  ENSG00000198393_136 (sequence is synthesized)
agccaccacacccggccaggtttattttgtagtctagctcttacctgttcacctgttgtagccatcgctgtggtttgagtgtatcttccaaatttcatgtgttggaaatttaattcctaa

SEQ ID NO: 727495 - DNA, 120 bp, Artificial Sequence
  ENSG00000198393_137 (sequence is synthesized)
atttatttgttgatggtatttggaggtgggacctttgggaggtatttaggatttgataaagtcatcagggcagggcccctatgatgggattagtagccttaaaaggataggaagagagac

SEQ ID NO: 727496 - DNA, 120 bp, Artificial Sequence
  ENSG00000198393_138 (sequence is synthesized)
ctgagctggcatgctgtctgtctctcatcatgtattgccttccaccaagttatgacatagcaagaaggccctcaccagatgccagcaccatgcttatggacttcctggcctccagaacct

SEQ ID NO: 727497 - DNA, 120 bp, Artificial Sequence
  ENSG00000198393_139 (sequence is synthesized)
tgagctaaatgaacatttttctttataaattacccagtttctggtattctgttataaaaatagaaaacaaagacagcagtcttttcggtgtctgaaatatttgttgttccttgaattgac

SEQ ID NO: 727498 - DNA, 120 bp, Artificial Sequence
  ENSG00000198393_140 (sequence is synthesized)
caggctctaccatgtgttctgtgtgatgcttgcttctggtacagggactgcaaattatgttccatctatttttttttctttctttcataatagatttgccagtttttcagttgggcatat

SEQ ID NO: 727499 - DNA, 120 bp, Artificial Sequence
  ENSG00000198393_141 (sequence is synthesized)
acagaaactccatttctgaatttccctgctgttccctcccagcccccactctttgctgttgcttagaatgcagatgtgatgactagagccatcttagactgggttgccctggaagtggaa

SEQ ID NO: 727500 - DNA, 120 bp, Artificial Sequence
  ENSG00000198393_142 (sequence is synthesized)
gccatgtaaggtggagcaagagatggaagccccagaccaattgccttcagactcctgcaagtagaaggataaactctcttgtttatccccctgttctcagctgaacctcgtccaaacacc

SEQ ID NO: 727501 - DNA, 120 bp, Artificial Sequence
  ENSG00000198393_143 (sequence is synthesized)
tcctgaattgccctttctaccccaacttcttgaacacatcatgaatcttctaagactacttgagtggctctcttcatttctgtacaaaatgtaccctggatgtttttaccaaggactcag

SEQ ID NO: 727502 - DNA, 120 bp, Artificial Sequence
  ENSG00000198393_144 (sequence is synthesized)
aacaccttattttgtttgcatgtataaatgttcattcccatctacaagatagaaagtttcttgaagacagaactggattttattcatcctgaaatcttcaggacccaagagagtaccggc

SEQ ID NO: 727503 - DNA, 61 bp, Artificial Sequence
  ENSG00000198393_145 (sequence is synthesized)
gagtgcagtggcacgattttggcttaggattacaagtgcctgccactgcgcccagctaatt

SEQ ID NO: 727504 - DNA, 120 bp, Artificial Sequence
  ENSG00000198393_146 (sequence is synthesized)
tgctggcgtgagccaccgtgcctggcactccttgattgatttttaattctctcacaaagtaaatgctgaaccagccacaggaaatagttggtagaggaacatttatcccttcccagttcc

SEQ ID NO: 727505 - DNA, 120 bp, Artificial Sequence
  ENSG00000198393_147 (sequence is synthesized)
gacagcttcgtgctggcctgtaactcacatgggaggtctaaactggaaatacataaagacaccttattgtattcgtggaagctcagagtgtgaccaactggaaccctcaagaggaccgag

SEQ ID NO: 727506 - DNA, 120 bp, Artificial Sequence
  ENSG00000198393_148 (sequence is synthesized)
tctggaattgttttttcagctttactaaaggtatatctgacaatttaaaattgtgtctagggagtggctggagtggcagctgggcagcaagactaactctggatccaccaggccaggtgt

SEQ ID NO: 727507 - DNA, 120 bp, Artificial Sequence
  ENSG00000198393_149 (sequence is synthesized)
cgtgtacagaggctggggcagccatccccaactccaatgcccagtgcccagcacaccagcactttctggtgatgttgcacatttatggtgattctgagtgtgggagcagacttctgccag

SEQ ID NO: 727508 - DNA, 120 bp, Artificial Sequence
  ENSG00000198398_0 (sequence is synthesized)
agttctgagaaagaaggaaataaacacaggcaccaaaccactatcctaagttgactgtcctttaaatatgtcaagatccagacttttcagtgtcacctcagcgatctcaacgatagggat

SEQ ID NO: 727509 - DNA, 120 bp, Artificial Sequence
  ENSG00000198398_1 (sequence is synthesized)
cttgtgtttgccgctattccagttggtgctctcggacctaccatgcgaagaagatgaaatgtgtgtaaattataatgaccaacaccctaatggctggtatatctggatcctcctgctgct

SEQ ID NO: 727510 - DNA, 120 bp, Artificial Sequence
  ENSG00000198398_2 (sequence is synthesized)
ggttttggtggcagctcttctctgtggagctgtggtcctctgcctccagtgctggctgaggagaccccgaattgattctcacaggcgcaccatggcagtttttgctgttggagacttgga

SEQ ID NO: 727511 - DNA, 120 bp, Artificial Sequence
  ENSG00000198398_3 (sequence is synthesized)
ctctatttatgggacagaagcagctgtgagtccaactgttggaattcaccttcaaactcaaacccctgacctatatcctgttcctgctccatgttttggccctttaggctccccacctcc

SEQ ID NO: 727512 - DNA, 120 bp, Artificial Sequence
  ENSG00000198398_4 (sequence is synthesized)
atatgaagaaattgtaaaaacaacctgattttaggtgtggattatcaatttaaagtattaacgacatctgtaattccaaaacatcaaatttaggaatagttatttcagttgttggaaatg

SEQ ID NO: 727513 - DNA, 120 bp, Artificial Sequence
  ENSG00000198398_5 (sequence is synthesized)
tccagagatctattcatatagtctgaggaaggacaattcgacaaaagaatggatgttggaaaaaattttggtcatggagatgtttaaatagtaaagtagcaggcttttgatgtgtcactg

SEQ ID NO: 727514 - DNA, 120 bp, Artificial Sequence
  ENSG00000198398_6 (sequence is synthesized)
tacttttatgctacacaaccaaattaatgcttctccactagtatccaaacaggcaacaattaggtgctggaagtagtttccatcacatttaggactccactgcagtatacagcacaccat

SEQ ID NO: 727515 - DNA, 120 bp, Artificial Sequence
  ENSG00000198398_7 (sequence is synthesized)
tttctgctttaaactctttcctagcatggggtccataaaaattattataatttaacaatagcccaagccgagaatccaacatgtccagaaccagaaccagaaagatagtatttgaatgaa

SEQ ID NO: 727516 - DNA, 120 bp, Artificial Sequence
  ENSG00000198398_8 (sequence is synthesized)
ggtgaggggagagagtaggaaaaagaaaagtttggagttgaagggtaaaggataaatgaagaggaaaaggaaaagattacaagtctcagcaaaaacaagaggttttatgccccaacctga

SEQ ID NO: 727517 - DNA, 120 bp, Artificial Sequence
  ENSG00000198398_9 (sequence is synthesized)
agaggaagaaattgtagatagaaggtgaaggagattgctgaagatatagagcacatataatgccaacacggggagaaaagaaaagttccccttttacagtaatgaatgtggcctccatag

SEQ ID NO: 727518 - DNA, 120 bp, Artificial Sequence
  ENSG00000198398_10 (sequence is synthesized)
tccatagtgtttctctggagcctcagggcttggcatttattgcagcatcatgctaagaaccttcggcataggtatctgttcccatgaggactgcagaagtagcaatgagacatcttcaag

SEQ ID NO: 727519 - DNA, 120 bp, Artificial Sequence
  ENSG00000198398_11 (sequence is synthesized)
tggcattttggcagtggccatcagcagggggacagacaaaaacatccatcacagatgacatatgatcttcagctgacaaatttgttgaacaaaacaataaacatcaatagatatctaaaa

SEQ ID NO: 727520 - DNA, 120 bp, Artificial Sequence
  ENSG00000198399_0 (sequence is synthesized)
gcttcggacccgaccgactcggagcagaccttcagggttcaatgccccggaactcctggggcgaggagccacgcccgggcagtttcgggctccggagggtggggagtcggtgcccggcag

SEQ ID NO: 727521 - DNA, 120 bp, Artificial Sequence
  ENSG00000198399_1 (sequence is synthesized)
cagctgcccggcccggcgcctacctccccgccccccggcttcctgcggaggccgcggccgccatgttgttgtggggctgaggcggcgccggcggagccctgagcggctgtgacaggctac

SEQ ID NO: 727522 - DNA, 120 bp, Artificial Sequence
  ENSG00000198399_2 (sequence is synthesized)
gtgacaggctacgcaacaggttcgcgggcggcggcctgacgaccaagccagctgcagtggcggcgacggcggcagagcagggtctccccgcgcctgcccgcgcccaggctgccggtgctg

SEQ ID NO: 727523 - DNA, 120 bp, Artificial Sequence
  ENSG00000198399_3 (sequence is synthesized)
agggacgcggagtcgcgctgtgacgagcgggaggcgcggcgagggcgccagatggctgagagctagcaaggaaaactcaggaccatgatggctcagtttcccacagctatgaatggaggg

SEQ ID NO: 727524 - DNA, 120 bp, Artificial Sequence
  ENSG00000198399_4 (sequence is synthesized)
ccaaacatgtgggctattacctctgaagaacgtactaagcatgacaggcagtttgataacctcaaaccttcaggaggttacataacaggtgatcaagcacgtaattttttcctacaatca

SEQ ID NO: 727525 - DNA, 120 bp, Artificial Sequence
  ENSG00000198399_5 (sequence is synthesized)
ggtctgccggcccctgttttagctgaaatatgggctttatcagacctaaacaaggatgggaagatggatcagcaagagttctccatagctatgaaactcatcaaactgaagcttcaaggc

SEQ ID NO: 727526 - DNA, 120 bp, Artificial Sequence
  ENSG00000198399_6 (sequence is synthesized)
caacagttgcctgtggttctccctcctattatgaagcaaccccctatgttttctccattaatttctgctcgttttggaatgggaagcatgcccaatctgtccattcctcagccattgcct

SEQ ID NO: 727527 - DNA, 120 bp, Artificial Sequence
  ENSG00000198399_7 (sequence is synthesized)
ccagctgcacctataacatcattgtcttctgcgacttcagggaccaaccttcctcccttaatgatgcccactcccctagtgccttctgttagcacatcatcattaccaaatggaaccgcc

SEQ ID NO: 727528 - DNA, 120 bp, Artificial Sequence
  ENSG00000198399_8 (sequence is synthesized)
agtctcattcagcctttacccattccttattcttcttcaacattgcctcatgggtcatcttatagtctgatgatgggaggatttggaggtgctagtatacagaaagcgcagtctctgatt

SEQ ID NO: 727529 - DNA, 120 bp, Artificial Sequence
  ENSG00000198399_9 (sequence is synthesized)
gatttaggatctagtagctcaacttcctcgactgcttcactctcagggaactcacccaagactgggacctcagagtgggcagttcctcagcctacaagattaaaatatcggcaaaaattt

SEQ ID NO: 727530 - DNA, 120 bp, Artificial Sequence
  ENSG00000198399_10 (sequence is synthesized)
aatactcttgacaaaagtatgagtggatatctctcaggttttcaagctagaaatgcccttcttcagtcaaatctttctcaaactcagctggctactatttggactctggctgacgttgat

SEQ ID NO: 727531 - DNA, 120 bp, Artificial Sequence
  ENSG00000198399_11 (sequence is synthesized)
ggtgatggacagctaaaagcagaagagtttattcttgcaatgcaccttactgacatggccaaagctggacagccattaccactgactttacctcctgagcttgttcctccatctttcaga

SEQ ID NO: 727532 - DNA, 120 bp, Artificial Sequence
  ENSG00000198399_12 (sequence is synthesized)
ggaggaaagcaaattgattccattaatggaactctgccttcatatcagaaaatgcaagaagaggagcctcagaagaaattaccagttacttttgaggacaaacggaaagccaactatgag

SEQ ID NO: 727533 - DNA, 120 bp, Artificial Sequence
  ENSG00000198399_13 (sequence is synthesized)
cgagggaacatggagctggaaaagcgacgccaagccttgatggagcagcaacaaagggaggcagaacgtaaagcccagaaagaaaaggaagagtgggaacgaaaacagagagaattacaa

SEQ ID NO: 727534 - DNA, 120 bp, Artificial Sequence
  ENSG00000198399_14 (sequence is synthesized)
gaacaagaatggaagaaacaacttgaattagaaaaacgcttagagaagcaacgggaattggagagacaacgagaggaagaaaggagaaaagacatagaaagacgagaggcagcaaaacag

SEQ ID NO: 727535 - DNA, 120 bp, Artificial Sequence
  ENSG00000198399_15 (sequence is synthesized)
gaacttgaacgacaacgtcgcttagaatgggagagaattcggcgacaggagcttctcaatcaaaagaatagagaacaagaagaaattgtcaggttaaactctaaaaagaagaatcttcat

SEQ ID NO: 727536 - DNA, 120 bp, Artificial Sequence
  ENSG00000198399_16 (sequence is synthesized)
cttgagttggaagcactgaatggcaaacatcagcagatctcaggcagacttcaggatgtccgactcaaaaagcaaactcaaaagactgagctggaagttctggataagcagtgtgacttg

SEQ ID NO: 727537 - DNA, 120 bp, Artificial Sequence
  ENSG00000198399_17 (sequence is synthesized)
gaaattatggaaatcaagcaacttcaacaggaacttcaggaatatcagaataagcttatctatctggtacctgagaagcaattattaaatgaaagaattaaaaacatgcagttcagtaac

SEQ ID NO: 727538 - DNA, 120 bp, Artificial Sequence
  ENSG00000198399_18 (sequence is synthesized)
acacctgattcaggggtcagtttacttcataaaaaatcattagaaaaggaagaattatgccaaagacttaaagaacagttagatgctcttgaaaaagaaactgcatctaagctgtcagaa

SEQ ID NO: 727539 - DNA, 120 bp, Artificial Sequence
  ENSG00000198399_19 (sequence is synthesized)
atggattcttttaacaatcaactaaagtgtgggaatatggatgactctgttcttcagtgccttttgtctctgctaagctgtctcaacaacctcttcctcttacttaaggaactgagagaa

SEQ ID NO: 727540 - DNA, 120 bp, Artificial Sequence
  ENSG00000198399_20 (sequence is synthesized)
acctacaacacacagcagttagcccttgaacagctttataagatcaaacgtgacaagttgaaggaaattgaaaggaaaagattagaactaatgcagaaaaagaaactagaagatgaggct

SEQ ID NO: 727541 - DNA, 120 bp, Artificial Sequence
  ENSG00000198399_21 (sequence is synthesized)
gcaaggaaagcaaagcaaggaaaagaaaacttatggaaagaaaatcttagaaaggaggaagaagaaaaacaaaagcgactccaggaagaaaaaacacaagaaaaaattcaagaagaggaa

SEQ ID NO: 727542 - DNA, 120 bp, Artificial Sequence
  ENSG00000198399_22 (sequence is synthesized)
cggaaagctgaggagaaacaacgtaaggataaggatactttgaaagctgaggagaaaaaacgtgagacagctagtgttttggtgaattatagagcattatacccctttgaagcaaggaac

SEQ ID NO: 727543 - DNA, 120 bp, Artificial Sequence
  ENSG00000198399_23 (sequence is synthesized)
catgatgagatgagttttaattctggagatataattcaggttgatgaaaaaaccgtaggagaacctggttggctttatggtagttttcaaggaaattttggctggtttccatgcaattat

SEQ ID NO: 727544 - DNA, 120 bp, Artificial Sequence
  ENSG00000198399_24 (sequence is synthesized)
gtagaaaaaatgccatcaagtgaaaatgaaaaagctgtatctccaaagaaggccttacttcctcctacagtttctttatctgctacctcaacttcctctgaaccactttcttcaaatcaa

SEQ ID NO: 727545 - DNA, 120 bp, Artificial Sequence
  ENSG00000198399_25 (sequence is synthesized)
ccagcatcagtgactgattatcaaaatgtatctttttcaaacctaactgtaaatacatcatggcagaaaaaatcagccttcactcgaactgtgtcccctggatctgtatcacctattcat

SEQ ID NO: 727546 - DNA, 120 bp, Artificial Sequence
  ENSG00000198399_26 (sequence is synthesized)
aaagataaccacttgaacttctcaaaacatgacattattactgtcttggagcagcaagaaaattggtggtttggggaggtgcatggaggaagaggatggtttcccaaatcttatgtcaag

SEQ ID NO: 727547 - DNA, 120 bp, Artificial Sequence
  ENSG00000198399_27 (sequence is synthesized)
atcattcctgggagtgaagtaaaacgggaagaaccagaagctttgtatgcagctgtaaataagaaacctacctcggcagcctattcagttggagaagaatatattgcactttatccatat

SEQ ID NO: 727548 - DNA, 120 bp, Artificial Sequence
  ENSG00000198399_28 (sequence is synthesized)
tcaagtgtggaacctggagatttgactttcacagaaggtgaagaaatattggtgacccagaaagatggagagtggtggacaggaagtattggagatagaagtggaatttttccatcaaac

SEQ ID NO: 727549 - DNA, 120 bp, Artificial Sequence
  ENSG00000198399_29 (sequence is synthesized)
tatgtcaaaccaaaggatcaagagagttttgggagtgctagcaagtctggagcatcaaataaaaaacctgagattgctcaggtaacttcagcatatgttgcttctggttctgaacaactt

SEQ ID NO: 727550 - DNA, 120 bp, Artificial Sequence
  ENSG00000198399_30 (sequence is synthesized)
agccttgcaccaggacagttaatattaattctaaagaaaaatacaagtgggtggtggcaaggagagttacaggccagaggaaaaaagcgacagaaaggatggtttcctgccagtcatgtt

SEQ ID NO: 727551 - DNA, 120 bp, Artificial Sequence
  ENSG00000198399_31 (sequence is synthesized)
aaacttttgggtccaagtagtgaaagagccacacctgcctttcatcctgtatgtcaggtgattgctatgtatgactatgcagcaaataatgaagatgagctcagtttctccaagggacaa

SEQ ID NO: 727552 - DNA, 120 bp, Artificial Sequence
  ENSG00000198399_32 (sequence is synthesized)
ctcattaatgttatgaacaaagatgatcctgattggtggcaaggagagatcaacggggtgactggtctctttccttcaaactacgttaagatgacgacagactcagatccaagtcaacag

SEQ ID NO: 727553 - DNA, 120 bp, Artificial Sequence
  ENSG00000198399_33 (sequence is synthesized)
tggtgtgctgatctgcaaaccctggacacaatgcagccaattgagaggaaaagacagggctatattcatgagctgattcagaccgaagagcggtacatggctgaccttcagctcgtcgtc

SEQ ID NO: 727554 - DNA, 120 bp, Artificial Sequence
  ENSG00000198399_34 (sequence is synthesized)
gaggtttttcagaaacgcatggcagagtcaggctttctcactgaaggggagatggccctgatttttgttaactggaaggagctcatcatgtccaacacaaagctgctgaaggctttgcgg

SEQ ID NO: 727555 - DNA, 120 bp, Artificial Sequence
  ENSG00000198399_35 (sequence is synthesized)
gtgcggaagaagaccgggggcgagaagatgccggtgcagatgattggggacatcctggccgctgagctgtcccacatgcaggcttacatcaggttctgcagctgccagcttaatggagca

SEQ ID NO: 727556 - DNA, 120 bp, Artificial Sequence
  ENSG00000198399_36 (sequence is synthesized)
gctctgttacagcagaagacagatgaagacacagatttcaaagaatttttaaagaagctggcatctgacccgcggtgtaaaggaatgcccctctccagcttcctgctgaaacccatgcag

SEQ ID NO: 727557 - DNA, 120 bp, Artificial Sequence
  ENSG00000198399_37 (sequence is synthesized)
aggatcacccgctacccactgctcatcagaagtattctggagaacaccccggagagccatgcagaccattcctccctaaagctggccctcgagcgggcagaggagctgtgctctcaagtg

SEQ ID NO: 727558 - DNA, 120 bp, Artificial Sequence
  ENSG00000198399_38 (sequence is synthesized)
aatgagggagttcgggagaaggaaaactcggaccgactggagtggatccaggcgcacgtgcagtgtgaaggcctcgcggagcaacttattttcaactctctcaccaactgcctggggccc

SEQ ID NO: 727559 - DNA, 120 bp, Artificial Sequence
  ENSG00000198399_39 (sequence is synthesized)
cggaagctcttacacagtgggaaattatacaagaccaagagcaacaaggaactgcacggattcctcttcaatgacttcctgcttcttacctacatggtcaagcagtttgctgtttcctct

SEQ ID NO: 727560 - DNA, 120 bp, Artificial Sequence
  ENSG00000198399_40 (sequence is synthesized)
ggctctgagaaacttttcagctcgaagtccaatgctcaattcaaaatgtataaaacgcccattttcctgaatgaagtcttggtgaaactgcccacagacccttccagcgatgagcctgtc

SEQ ID NO: 727561 - DNA, 120 bp, Artificial Sequence
  ENSG00000198399_41 (sequence is synthesized)
ttccacatttcccacattgatcgggtctacaccctccgaacagacaacattaatgagaggaccgcctgggtgcagaagatcaaggcggcgtctgagcagtacatcgacaccgagaagaag

SEQ ID NO: 727562 - DNA, 120 bp, Artificial Sequence
  ENSG00000198399_42 (sequence is synthesized)
aagcgtgagaaagcttaccaagcccgctcccaaaagacttcaggcattgggcgcctgatggtgcatgtcattgaagctacagaattaaaagcctgcaaaccaaatggaaagagcaaccca

SEQ ID NO: 727563 - DNA, 120 bp, Artificial Sequence
  ENSG00000198399_43 (sequence is synthesized)
tactgtgaaatcagcatgggctcccagagctacaccaccaggaccatccaggacacactcaatcccaagtggaattttaactgccagttctttattaaggatctctaccaagacgtgctg

SEQ ID NO: 727564 - DNA, 120 bp, Artificial Sequence
  ENSG00000198399_44 (sequence is synthesized)
tgtctcaccctgtttgacagagaccagttttcaccagatgatttcctgggtcgtactgaaattccagtggcaaaaattcgaacagaacaggaaagcaaaggccctatgacccgccgactg

SEQ ID NO: 727565 - DNA, 120 bp, Artificial Sequence
  ENSG00000198399_45 (sequence is synthesized)
ctgctgcatgaggtccccaccggggaggtctgggtccgttttgacctgcagctttttgagcaaaaaactctcctgtaggggttctaaaggacagcaccagcgggacagcccacaaggctg

SEQ ID NO: 727566 - DNA, 120 bp, Artificial Sequence
  ENSG00000198399_46 (sequence is synthesized)
gggctggagaatgagagactgcgctctcttggggctgagggagcaccatgcagcttcacccctcacaaagccatgcacgctgggggctctgttttcctgcacactaaatagctagcaatc

SEQ ID NO: 727567 - DNA, 120 bp, Artificial Sequence
  ENSG00000198399_47 (sequence is synthesized)
tatgcaaacacctttcccataaagaaaccaaaccccatagtacagtgccttgtcctagtgttcacatgttcagctctgtttgtttagatgccaaggtttccattttcagggctataaaaa

SEQ ID NO: 727568 - DNA, 120 bp, Artificial Sequence
  ENSG00000198399_48 (sequence is synthesized)
gtattacttggaaatgaggcatcagaccaccagatgttaccgctcggttgaatgtgtccaccgtggagtggtttggtgacgctgtaaccattccacgccagtgacctctgctgggtcaca

SEQ ID NO: 727569 - DNA, 120 bp, Artificial Sequence
  ENSG00000198399_49 (sequence is synthesized)
gccactcaggaggggaagggtcaggatgagaggctgcagcctcgacacttggcgcggcctgatactgaaatagcgtctactcgtgcactgaataaaaacagaaacttgatcattttattc

SEQ ID NO: 727570 - DNA, 120 bp, Artificial Sequence
  ENSG00000198399_50 (sequence is synthesized)
ctgattagattttatcactctctgctaagacaatatagtctggagtataagtgggaaagcttgatttaaatactgtgaactctaataatgtggaaaatatttttcaactttaattttctg

SEQ ID NO: 727571 - DNA, 120 bp, Artificial Sequence
  ENSG00000198399_51 (sequence is synthesized)
aagtataaattatttatgtaaattcattgtttttgcatatttcttaggacatgcatctttaagctttatcattgcccatatgtacagaaagagaataaagacatatgtttatggatggaa

SEQ ID NO: 727572 - DNA, 120 bp, Artificial Sequence
  ENSG00000198399_52 (sequence is synthesized)
ggattgtcatcttcctttctcctaaggagagaacactgggattttttgttttgagttctttgaattcagctggtagaatcagtgttctgtggctagaagtaatgattttcactgggccag

SEQ ID NO: 727573 - DNA, 120 bp, Artificial Sequence
  ENSG00000198399_53 (sequence is synthesized)
tttggactctgaagagtaatgtatttaaggatctttcatgcaaagtgaatgattctagccacattcccacctagaaaactccaccacagtatcctcaggcccagggcactggcctctcag

SEQ ID NO: 727574 - DNA, 120 bp, Artificial Sequence
  ENSG00000198399_54 (sequence is synthesized)
tcggggtatctgctgtctctcatgagagatggtgggcatcagactcagggctgcctccacgcagagtcaaagcaaggcatcacttttgatgtgtgaattcacaaatagtgacggaagctc

SEQ ID NO: 727575 - DNA, 120 bp, Artificial Sequence
  ENSG00000198399_55 (sequence is synthesized)
tcacatcctccaaatgctgtctctgcctgccggataatgcttgagattgaaagtctctaatgagctctttcccccagatgaggtcactcagagtgaagcgggagaacaagagggcattcg

SEQ ID NO: 727576 - DNA, 120 bp, Artificial Sequence
  ENSG00000198399_56 (sequence is synthesized)
catggcttcgttggatgtggcaggagccccatcaaggaaggacggggatagagtggatgggaagggcctatggcagaccgtagcttccttggatatttgcctaatatctgttttaacatc

SEQ ID NO: 727577 - DNA, 120 bp, Artificial Sequence
  ENSG00000198399_57 (sequence is synthesized)
tgacattttcataaactggtatctctggaggaactgtgaaacagtgaaagtgttcacctcatggttgtatcagtttggaaaacccaatgggagcatattgtaaaatagttcccaaatatc

SEQ ID NO: 727578 - DNA, 120 bp, Artificial Sequence
  ENSG00000198399_58 (sequence is synthesized)
atatagctactgtttgtttataccagtgacctctacgctgatgacagctatccttattcgagtagcactttaaaatgatttgtgcttgagtgaacaaaagaagactttccatttctacta

SEQ ID NO: 727579 - DNA, 120 bp, Artificial Sequence
  ENSG00000198399_59 (sequence is synthesized)
aacagtccatgctctaccctggctcctgtctggcagaggagacagacattacacacgatttcagacccagcaggctgtgggctgctcataagcgagggatactggatgcagaggagggaa

SEQ ID NO: 727580 - DNA, 120 bp, Artificial Sequence
  ENSG00000198399_60 (sequence is synthesized)
gggatctgggaggtagatgtgggatcagacctgcatcttgaaggatgagtaggatgctgacgggcagagaaagcaggcagggcagaaagagcaagcaggggcttcctagcaggcaacaca

SEQ ID NO: 727581 - DNA, 120 bp, Artificial Sequence
  ENSG00000198399_61 (sequence is synthesized)
gcctggggaaaggcacagggcagccagatgctgggctgttgggcccagggcagtggcagatggggacagggagccggtagtgttatggttggtttgaaagacagggtctgcatccttgga

SEQ ID NO: 727582 - DNA, 120 bp, Artificial Sequence
  ENSG00000198399_62 (sequence is synthesized)
aggggcttcagctgtgtgcagaccccatgccacttcagggaagtgacacaggcctgtgtcatctcgctttggcagcaggtgggtggccttcctcaggggaggaggtggcctgagatgtgt

SEQ ID NO: 727583 - DNA, 120 bp, Artificial Sequence
  ENSG00000198399_63 (sequence is synthesized)
ttcaggtctttgacccatcactccctacacacacgacgtgaacaccactcctggagcattctcagaatggagatttgaattccatgtggcagcttctcacacacaaacctgccatcattc

SEQ ID NO: 727584 - DNA, 120 bp, Artificial Sequence
  ENSG00000198399_64 (sequence is synthesized)
cgcctgggtgcagaagatcaaggcggcgtctgagcagtacatcgacaccgagaagaagaagcgtgagaaagcttaccaaggtttcccccattttgttatatactcctaaaagcccgctcc

SEQ ID NO: 727585 - DNA, 120 bp, Artificial Sequence
  ENSG00000198399_65 (sequence is synthesized)
gacccaatgttgtcttccagttgtgaaagcaccccagagacccactatccaagtttcactctagcgtggaggcagggcaggcagccctgatcaaatatctcctacacaattcgtttactt

SEQ ID NO: 727586 - DNA, 120 bp, Artificial Sequence
  ENSG00000198399_66 (sequence is synthesized)
cgtttgaatgttagagccacttgtgattatttttttgtgtttctaacttacagtttaaatttatttgtaaaaagttaaaggatagtgggtctttgtgtggctttccctgctgttcactct

SEQ ID NO: 727587 - DNA, 120 bp, Artificial Sequence
  ENSG00000198399_67 (sequence is synthesized)
ccctgctgttcactctggcatctttagcatttttcttcttttttaatttgataattgtaggtcattagcatgcatattgagtttgcccttatgtggtgggagttcaaacacacaaagacc

SEQ ID NO: 727588 - DNA, 120 bp, Artificial Sequence
  ENSG00000198399_68 (sequence is synthesized)
tgccatgcttttttaatgttattgcaacatgtgtattcatttacagaattcagataaaatttgcttatgttctgctattatgtttgatctaatcctaatcacagtgagctcttaattagc

SEQ ID NO: 727589 - DNA, 120 bp, Artificial Sequence
  ENSG00000198399_69 (sequence is synthesized)
aatcacagtgagctcttaattagctcaatatgtggtttgccctcaagtgtgcactgtttattactttgtaatatgccactatgagtactgacatttagatttgtttaaaggccaagaact

SEQ ID NO: 727590 - DNA, 120 bp, Artificial Sequence
  ENSG00000198399_70 (sequence is synthesized)
ggaaacagccatgccctgttttctgtgtatttgggatgggaataacaacattttgggggagctttttaaatctcagagaagaggaaagtggcctgctctggcaggtatgtgcagtgtttc

SEQ ID NO: 727591 - DNA, 120 bp, Artificial Sequence
  ENSG00000198399_71 (sequence is synthesized)
atttgttccagtcccaagaatgagcactgtcctatggtagttcgcttaggatctttatgtgctctgggctaatgaaggtactgcatcatgtgctgcagcgtgtgtattctttttcgatga

SEQ ID NO: 727592 - DNA, 120 bp, Artificial Sequence
  ENSG00000198399_72 (sequence is synthesized)
cctataaagggattatttttgaggaatgaaaggctcccatcattgactgtgagatgggaaaaacctttcctagcttagagcatttatatcttaatccattttaaagtcagagttcattgt

SEQ ID NO: 727593 - DNA, 120 bp, Artificial Sequence
  ENSG00000198399_73 (sequence is synthesized)
tacctgttttaatcaggtgactacatgtcccagtatacaaaggggcactggttgacattcttcttaatgtatttagtaaatatcataagaaatcctttaagagtttaaatgtccccaaaa

SEQ ID NO: 727594 - DNA, 120 bp, Artificial Sequence
  ENSG00000198399_74 (sequence is synthesized)
atgaattagagtgaaggaaagctgtgtaacacctggcattcctctgtgttcatggagcttctttgaggctctaagattgattttaccatcagacttctctaatacctgttcttcaaccat

SEQ ID NO: 727595 - DNA, 120 bp, Artificial Sequence
  ENSG00000198399_75 (sequence is synthesized)
ctctaatacctgttcttcaaccatattggctactttgacataagaatttacttcttttcctggaatggaaaacactttaaaaaataataacaaacattattataaactaatatatgtgag

SEQ ID NO: 727596 - DNA, 120 bp, Artificial Sequence
  ENSG00000198399_76 (sequence is synthesized)
aggagttttagtagacagtattatactatatttgaaaatcaaggagaattttatgcaacttaaaatgtttacaaactgcagtgcaatctactgtttgtgaatgtcaaagtatcaggaaaa

SEQ ID NO: 727597 - DNA, 120 bp, Artificial Sequence
  ENSG00000198399_77 (sequence is synthesized)
ttgtgaatgtcaaagtatcaggaaaagtgtatatacaatcacagagtcatatttcctcacaaagttatttacaaagagtgaaatatgtttttgtacctctcagtttcagttagaggcata

SEQ ID NO: 727598 - DNA, 120 bp, Artificial Sequence
  ENSG00000198399_78 (sequence is synthesized)
atgaattatttcagtcatacattgcctaaatcataactttatgatgcttgggaaagaatcaacagttaaaacttcataaagttataatgtctgtgttccaaaatacatcacattattagg

SEQ ID NO: 727599 - DNA, 120 bp, Artificial Sequence
  ENSG00000198399_79 (sequence is synthesized)
gtctgtgttccaaaatacatcacattattaggatgtagggagataagtatgtgtgctccctagggtggcaatttctagttactagaccacctctatttttagcatttggcatcctcatga

SEQ ID NO: 727600 - DNA, 120 bp, Artificial Sequence
  ENSG00000198399_80 (sequence is synthesized)
aataatttcattttacagatagaataacagatttgcctgcattcactgaaagagtgcaaagactgggtccttgtgaattcaactgactctcccaaattgtattaattacctgttcttgcc

SEQ ID NO: 727601 - DNA, 120 bp, Artificial Sequence
  ENSG00000198399_81 (sequence is synthesized)
ttttattttctgaacttgctgcttttgcattcttttgagttcaaagacagttactttaaatccatttttaaaccctcggggtagaaatcataccactgttaatcagccacattatttggt

SEQ ID NO: 727602 - DNA, 120 bp, Artificial Sequence
  ENSG00000198399_82 (sequence is synthesized)
ctaaggttttttctttataattctgaaactgagtttatctaatacattgatgaattatttcaaacgtatttttatagttcaaatcacttcacttttacactgataaatataaattactgg

SEQ ID NO: 727603 - DNA, 120 bp, Artificial Sequence
  ENSG00000198399_83 (sequence is synthesized)
gaatgaccttcagacagcgtttagcatctgtaaccaacctgaaaataatatgttcatcaggtacctatggattaaatcatatactggcgtatttaagctgaatgtcagtctggaaaataa

SEQ ID NO: 727604 - DNA, 120 bp, Artificial Sequence
  ENSG00000198399_84 (sequence is synthesized)
atttactatattaactgaaataccactctttgtgtaggtattttgtcatgtatttaagaaaaagataaaaagaatggaaatcatatgacataataacttaagtctttcttaaaagtgcat

SEQ ID NO: 727605 - DNA, 120 bp, Artificial Sequence
  ENSG00000198399_85 (sequence is synthesized)
gctgtcttttgcaatacctcattcagccaagtatttgttctcttcctcattcagtataagtcagctttcaatttgcttagaaggcaacattagaaggttagagttcatcagaaacataga

SEQ ID NO: 727606 - DNA, 120 bp, Artificial Sequence
  ENSG00000198399_86 (sequence is synthesized)
attttaaaatgtgagttcaactgaataaatttgaatttctgtaggaggtaaagaatcaaaatacctgtttaaagattgcaattgcaatgtataataatcacttttaaattatttgattaa

SEQ ID NO: 727607 - DNA, 86 bp, Artificial Sequence
  ENSG00000198399_87 (sequence is synthesized)
caatgtataataatcacttttaaattatttgattaaaccttttaggttttccagaaatgaaaaaaattgagaatgtaaatcagccc

SEQ ID NO: 727608 - DNA, 120 bp, Artificial Sequence
  ENSG00000198399_88 (sequence is synthesized)
taactattaaaaatgtaactgatatttaaatgttttgaaataaaacattttaaaatataaatactgtagtttaaaagaaagaaactgggggaaagaaaagtagagaaagaaataccaatt

SEQ ID NO: 727609 - DNA, 120 bp, Artificial Sequence
  ENSG00000198399_89 (sequence is synthesized)
tagagaaagaaataccaattccagtccaaagctttatttgccaggttttcttagaatgacttttaccagtttatgaattcttgtaaacagaatctataatggaaatactgaaagactttt

SEQ ID NO: 727610 - DNA, 120 bp, Artificial Sequence
  ENSG00000198399_90 (sequence is synthesized)
gcctaaagtggcattattgaatgctgctgtgatgctactgtaatgtaataaattattaaattgttgcaaagtgctgtttttgccttaaaattttattttgtgtgtcttgaaaattatagt

SEQ ID NO: 727611 - DNA, 120 bp, Artificial Sequence
  ENSG00000198399_91 (sequence is synthesized)
attaaaggtattgagattgtgcaaatgctgggcacgcttggcatgagataatctgtttttatttttacaaaattgtaatataactatgcaagtgtgtttattaaaagaacacaaactata

SEQ ID NO: 727612 - DNA, 120 bp, Artificial Sequence
  ENSG00000198399_92 (sequence is synthesized)
aaaataaaatagtaatgattgtggtatgacttcatatcttgatgatatttttatgtatataattgaaacatcaaataaagtgttagactataagatataaatttggctctaacacaagac

SEQ ID NO: 727613 - DNA, 120 bp, Artificial Sequence
  ENSG00000198399_93 (sequence is synthesized)
agactacatgtgcattttgaaaagtcctgcactgattttaaagaactgttcaggaggaggctttatggtggggccgcacctgggattctagggtgttagcgtgcagcagtcataggctta

SEQ ID NO: 727614 - DNA, 120 bp, Artificial Sequence
  ENSG00000198400_0 (sequence is synthesized)
cccgcctgagcgaggcgggcgccgccgcgatgctgcgaggcggacggcgcgggcagcttggctggcacagctgggctgcggggccgggcagcctgctggcttggctgatactggcatctg

SEQ ID NO: 727615 - DNA, 120 bp, Artificial Sequence
  ENSG00000198400_1 (sequence is synthesized)
tactggcatctgcgggcgccgcaccctgccccgatgcctgctgcccccacggctcctcgggactgcgatgcacccgggatggggccctggatagcctccaccacctgcccggcgcagaga

SEQ ID NO: 727616 - DNA, 120 bp, Artificial Sequence
  ENSG00000198400_2 (sequence is synthesized)
acctgactgagctctacatcgagaaccagcagcatctgcagcatctggagctccgtgatctgaggggcctgggggagctgagaaacctcaccatcgtgaagagtggtctccgtttcgtgg

SEQ ID NO: 727617 - DNA, 120 bp, Artificial Sequence
  ENSG00000198400_3 (sequence is synthesized)
cgccagatgccttccatttcactcctcggctcagtcgcctgaatctctccttcaacgctctggagtctctctcctggaaaactgtgcagggcctctccttacaggaactggtcctgtcgg

SEQ ID NO: 727618 - DNA, 120 bp, Artificial Sequence
  ENSG00000198400_4 (sequence is synthesized)
ggaaccctctgcactgttcttgtgccctgcgctggctacagcgctgggaggaggagggactgggcggagtgcctgaacagaagctgcagtgtcatgggcaagggcccctggcccacatgc

SEQ ID NO: 727619 - DNA, 120 bp, Artificial Sequence
  ENSG00000198400_5 (sequence is synthesized)
ccaatgccagctgtggtgtgcccacgctgaaggtccaggtgcccaatgcctcggtggatgtgggggacgacgtgctgctgcggtgccaggtggaggggcggggcctggagcaggccggct

SEQ ID NO: 727620 - DNA, 120 bp, Artificial Sequence
  ENSG00000198400_6 (sequence is synthesized)
ggatcctcacagagctggagcagtcagccacggtgatgaaatctgggggtctgccatccctggggctgaccctggccaatgtcaccagtgacctcaacaggaagaacgtgacgtgctggg

SEQ ID NO: 727621 - DNA, 120 bp, Artificial Sequence
  ENSG00000198400_7 (sequence is synthesized)
cagagaacgatgtgggccgggcagaggtctctgttcaggtcaacgtctccttcccggccagtgtgcagctgcacacggcggtggagatgcaccactggtgcatccccttctctgtggatg

SEQ ID NO: 727622 - DNA, 120 bp, Artificial Sequence
  ENSG00000198400_8 (sequence is synthesized)
ggcagccggcaccgtctctgcgctggctcttcaatggctccgtgctcaatgagaccagcttcatcttcactgagttcctggagccggcagccaatgagaccgtgcggcacgggtgtctgc

SEQ ID NO: 727623 - DNA, 120 bp, Artificial Sequence
  ENSG00000198400_9 (sequence is synthesized)
gcctcaaccagcccacccacgtcaacaacggcaactacacgctgctggctgccaaccccttcggccaggcctccgcctccatcatggctgccttcatggacaaccctttcgagttcaacc

SEQ ID NO: 727624 - DNA, 120 bp, Artificial Sequence
  ENSG00000198400_10 (sequence is synthesized)
gtggacactaacagcacatctggagacccggtggagaagaaggacgaaacaccttttggggtctcggtggctgtgggcctggccgtctttgcctgcctcttcctttctacgctgctcctt

SEQ ID NO: 727625 - DNA, 120 bp, Artificial Sequence
  ENSG00000198400_11 (sequence is synthesized)
gtgctcaacaaatgtggacggagaaacaagtttgggatcaaccgcccggctgtgctggctccagaggatgggctggccatgtccctgcatttcatgacattgggtggcagctccctgtcc

SEQ ID NO: 727626 - DNA, 120 bp, Artificial Sequence
  ENSG00000198400_12 (sequence is synthesized)
cccaccgagggcaaaggctctgggctccaaggccacatcatcgagaacccacaatacttcagtgatgcctgtgttcaccacatcaagcgccgggacatcgtgctcaagtgggagctgggg

SEQ ID NO: 727627 - DNA, 120 bp, Artificial Sequence
  ENSG00000198400_13 (sequence is synthesized)
gagggcgcctttgggaaggtcttccttgctgagtgccacaacctcctgcctgagcaggacaagatgctggtggctgtcaaggcactgaaggaggcgtccgagagtgctcggcaggacttc

SEQ ID NO: 727628 - DNA, 120 bp, Artificial Sequence
  ENSG00000198400_14 (sequence is synthesized)
cagcgtgaggctgagctgctcaccatgctgcagcaccagcacatcgtgcgcttcttcggcgtctgcaccgagggccgccccctgctcatggtctttgagtatatgcggcacggggacctc

SEQ ID NO: 727629 - DNA, 120 bp, Artificial Sequence
  ENSG00000198400_15 (sequence is synthesized)
aaccgcttcctccgatcccatggacctgatgccaagctgctggctggtggggaggatgtggctccaggccccctgggtctggggcagctgctggccgtggctagccaggtcgctgcgggg

SEQ ID NO: 727630 - DNA, 120 bp, Artificial Sequence
  ENSG00000198400_16 (sequence is synthesized)
atggtgtacctggcgggtctgcattttgtgcaccgggacctggccacacgcaactgtctagtgggccagggactggtggtcaagattggtgattttggcatgagcagggatatctacagc

SEQ ID NO: 727631 - DNA, 120 bp, Artificial Sequence
  ENSG00000198400_17 (sequence is synthesized)
accgactattaccgtgtgggaggccgcaccatgctgcccattcgctggatgccgcccgagagcatcctgtaccgtaagttcaccaccgagagcgacgtgtggagcttcggcgtggtgctc

SEQ ID NO: 727632 - DNA, 120 bp, Artificial Sequence
  ENSG00000198400_18 (sequence is synthesized)
tgggagatcttcacctacggcaagcagccctggtaccagctctccaacacggaggcaatcgactgcatcacgcagggacgtgagttggagcggccacgtgcctgcccaccagaggtctac

SEQ ID NO: 727633 - DNA, 120 bp, Artificial Sequence
  ENSG00000198400_19 (sequence is synthesized)
gccatcatgcggggctgctggcagcgggagccccagcaacgccacagcatcaaggatgtgcacgcccggctgcaagccctggcccaggcacctcctgtctacctggatgtcctgggctag

SEQ ID NO: 727634 - DNA, 120 bp, Artificial Sequence
  ENSG00000198400_20 (sequence is synthesized)
tctcaaagtatctaattcaccctcagcatgtgggaagggacaggtgggggctgggagtagaggatgttcctgcttctctaggcaaggtcccgtcatagcaattatatttattatcccttg

SEQ ID NO: 727635 - DNA, 120 bp, Artificial Sequence
  ENSG00000198400_21 (sequence is synthesized)
caggagagaaggactgagacgggaatgtggaatgcactgggcaaatggtcactgacacagagtgcagatgcctgcttctgggactcaatgcactgcaccctggtcatctgcggactcagc

SEQ ID NO: 727636 - DNA, 120 bp, Artificial Sequence
  ENSG00000198400_22 (sequence is synthesized)
ctgagcttccagagggcctaggagcagtaagggagtgagtgggcaactcggcgcatgaaggaggccgccctcatctgcctggcaccctctgtacccccgatcttgacggtgaagtcctgg

SEQ ID NO: 727637 - DNA, 120 bp, Artificial Sequence
  ENSG00000198400_23 (sequence is synthesized)
cggcaagcagccctggtaccagctctccaacacggagacctaagcaggaattatcagagtggaagggaccagcacgggaagaggaacccagcacaagaaggcccaacactgcagcaggac

SEQ ID NO: 727638 - DNA, 120 bp, Artificial Sequence
  ENSG00000198400_24 (sequence is synthesized)
tgggagttggggaggacacccagacttgggctgctaatgggcttggctgtccccggggaatgattgcgaggagggcccaagcctggtcagggaagtcacctcaccattctcctggggctt

SEQ ID NO: 727639 - DNA, 120 bp, Artificial Sequence
  ENSG00000198400_25 (sequence is synthesized)
cctcccatctccctcagggatggcatgctctcgcccctgacagctagaggtcctccttgccatctcacttccatggtccatgctgcaaggacacttctcataggtgcctgccctatcttt

SEQ ID NO: 727640 - DNA, 120 bp, Artificial Sequence
  ENSG00000198400_26 (sequence is synthesized)
taccagggactcaccagccctcaacagaaagtgcgagaagatgccaaacagctcatggaccaggggaggagcttccacagtgcgtccacactgggccaagggcaaggtccaaagtgtcta

SEQ ID NO: 727641 - DNA, 120 bp, Artificial Sequence
  ENSG00000198400_27 (sequence is synthesized)
gaagcccctaggcctgaacgatccctccctttctcccacccctccccagccctattccagccataggccctgtcatattcttctcaggctgagtccagcctggctcttagctgcatcccc

SEQ ID NO: 727642 - DNA, 120 bp, Artificial Sequence
  ENSG00000198400_28 (sequence is synthesized)
tgcccagagtcacagctagcccaaaccatgtcctctcggggcaggtgcagccccacactatgacatggggcttgctgaaggggtgcaggttgaattttagcccccatgcagtccctcgtc

SEQ ID NO: 727643 - DNA, 120 bp, Artificial Sequence
  ENSG00000198400_29 (sequence is synthesized)
tgggcagccttgtgcagcacacagccctgccaagacagtccccgctacaaccccagccctcccaagactggggctaccgtctgaccctgcaagccccctcaggtgttcaccacatcaagc

SEQ ID NO: 727644 - DNA, 120 bp, Artificial Sequence
  ENSG00000198400_30 (sequence is synthesized)
tccgtccttgtcggctggctgaggagacagccatgcagcagggcatcctggcccagctggaaaagggtcacatgcatcttcttccttgaggcccagcagcccacctccatcccccctcgt

SEQ ID NO: 727645 - DNA, 120 bp, Artificial Sequence
  ENSG00000198400_31 (sequence is synthesized)
cccatgaaggaatgagtcccagagtaggcaggggactcactgctttcctcctccctctgactgctttctctcctccctctgactgctttctctcctccctcctgctgcagtctccttctc

SEQ ID NO: 727646 - DNA, 120 bp, Artificial Sequence
  ENSG00000198400_32 (sequence is synthesized)
gccggtgggtgagtagcccaaggtggagggcaggttctgcctggtctctggagctgaggctggggcagagggtacagctgaactgatccctgagagaccagctggggccagggttggggg

SEQ ID NO: 727647 - DNA, 120 bp, Artificial Sequence
  ENSG00000198408_0 (sequence is synthesized)
gcggataaacaggaagcgggcggtggaggcagcagcagagggagagctcggggcttggaggggaaacagcggaagacctaagattatcgggagggcagcagaggcagagaacgaggacag

SEQ ID NO: 727648 - DNA, 120 bp, Artificial Sequence
  ENSG00000198408_1 (sequence is synthesized)
gacccttggccgtcttcttccagggaacgagaggtcacagcctcgctctccgcttaggcttctggcgccccagcttaaagccgaggctgcggctgacaaagggctcgcgccggtgccgcc

SEQ ID NO: 727649 - DNA, 120 bp, Artificial Sequence
  ENSG00000198408_2 (sequence is synthesized)
gcccttctcatccgggcattcgggtccctgcggagagggagggggaagggcagagggggaggggaaggagccggaggggcgcacacttggagctgaagccctctccagggctccgggccg

SEQ ID NO: 727650 - DNA, 120 bp, Artificial Sequence
  ENSG00000198408_3 (sequence is synthesized)
gtgccccaacggacagaggtcgaggaggacccgcagaggtggcagcggccgggggcaggaggatggtgcagaaggagagtcaagcgacgttggaggagcgggagagcgagctcagctcca

SEQ ID NO: 727651 - DNA, 120 bp, Artificial Sequence
  ENSG00000198408_4 (sequence is synthesized)
agctcagctccaaccctgccgcctctgcgggggcatcgctggagccgccggcagctccggcacccggagaagacaaccccgccggggctgggggagcggcggtggccggggctgcaggag

SEQ ID NO: 727652 - DNA, 120 bp, Artificial Sequence
  ENSG00000198408_5 (sequence is synthesized)
tcctctgcggtgtggtggaaggattttatggaagaccttgggttatggaacagagaaaagaactctttagaaggctccagaaatgggaattaaatacatacttgtatgccccaaaagatg

SEQ ID NO: 727653 - DNA, 120 bp, Artificial Sequence
  ENSG00000198408_6 (sequence is synthesized)
actacaaacataggatgttttggcgagagatgtattcagtggaggaagctgagcaacttatgactctcatctctgctgcacgagaatatgagatagagttcatctatgcgatctcacctg

SEQ ID NO: 727654 - DNA, 120 bp, Artificial Sequence
  ENSG00000198408_7 (sequence is synthesized)
gattggatatcactttttctaaccccaaggaagtatccacattgaaacgtaaattggaccaggtttctcagtttgggtgcagatcatttgctttgctttttgatgatatagaccataata

SEQ ID NO: 727655 - DNA, 120 bp, Artificial Sequence
  ENSG00000198408_8 (sequence is synthesized)
tgtgtgcagcagacaaagaggtattcagttcttttgctcatgcccaagtctccatcacaaatgaaatctatcagtacctaggagagccagaaactttcctcttctgtcccacagaatact

SEQ ID NO: 727656 - DNA, 120 bp, Artificial Sequence
  ENSG00000198408_9 (sequence is synthesized)
gtggcactttctgttatccaaatgtgtctcagtctccatatttaaggactgtgggtgaaaagcttctacctggaattgaagtgctttggacaggtcccaaagttgtttctaaagaaattc

SEQ ID NO: 727657 - DNA, 120 bp, Artificial Sequence
  ENSG00000198408_10 (sequence is synthesized)
cagtagagtccatcgaagaggtttctaagattattaagagagctccagtaatctgggataacattcatgctaatgattatgatcagaagagactgtttctgggcccgtacaaaggaagat

SEQ ID NO: 727658 - DNA, 120 bp, Artificial Sequence
  ENSG00000198408_11 (sequence is synthesized)
ccacagaactcatcccacggttaaaaggagtcctcactaatccaaattgtgaatttgaagccaactacgttgctatccacacccttgccacctggtacaaatcaaacatgaatggagtga

SEQ ID NO: 727659 - DNA, 120 bp, Artificial Sequence
  ENSG00000198408_12 (sequence is synthesized)
gaaaagatgtagtgatgactgacagtgaagatagtactgtgtccatccagataaaattagaaaatgaaggcagtgatgaagatattgaaactgatgtactctatagtccacagatggctc

SEQ ID NO: 727660 - DNA, 120 bp, Artificial Sequence
  ENSG00000198408_13 (sequence is synthesized)
taaagctagcattaacagaatggttgcaagagtttggtgtgcctcatcaatacagcagtaggcaagttgcacacagtggagctaaagcaagtgtagttgatgggactcctttagttgcag

SEQ ID NO: 727661 - DNA, 120 bp, Artificial Sequence
  ENSG00000198408_14 (sequence is synthesized)
caccctctttaaatgccacaaccgtagtaacaacagtttatcaggagcccattatgagccagggagcagccttgagtggtgagcctactactctgaccaaggaagaagaaaagaaacagc

SEQ ID NO: 727662 - DNA, 120 bp, Artificial Sequence
  ENSG00000198408_15 (sequence is synthesized)
ctgatgaagaacccatggacatggtggtggaaaaacaagaagaaacggaccacaagaatgacaatcaaatactgagtgaaattgttgaagcgaaaatggcagaggaattgaaaccaatgg

SEQ ID NO: 727663 - DNA, 120 bp, Artificial Sequence
  ENSG00000198408_16 (sequence is synthesized)
acactgataaagagagcatagctgaatcaaaatccccagagatgtccatgcaagaagattgtattagtgacattgcccccatgcaaactgatgaacagacaaacaaggagcagtttgtgc

SEQ ID NO: 727664 - DNA, 120 bp, Artificial Sequence
  ENSG00000198408_17 (sequence is synthesized)
caggtccaaatgaaaagcctttgtacactgcggaaccagtgaccctggaggatttgcagttacttgctgatctattctaccttccttacgagcatggacccaaaggagcacagatgttac

SEQ ID NO: 727665 - DNA, 120 bp, Artificial Sequence
  ENSG00000198408_18 (sequence is synthesized)
gggaatttcaatggcttcgagcaaatagtagtgttgtcagtgtcaattgcaaaggaaaagactctgaaaaaattgaagaatggcggtcacgagcagccaagtttgaagagatgtgtggac

SEQ ID NO: 727666 - DNA, 120 bp, Artificial Sequence
  ENSG00000198408_19 (sequence is synthesized)
tagtgatgggaatgttcactcggctctccaattgtgccaacaggacaattctttatgacatgtactcctatgtttgggatatcaagagtataatgtctatggtgaagtcttttgtacagt

SEQ ID NO: 727667 - DNA, 120 bp, Artificial Sequence
  ENSG00000198408_20 (sequence is synthesized)
ggttagggtgtcgtagtcattcttcagcacaattcttaattggagaccaagaaccctgggcctttagaggtggtctagcaggagagttccagcgtttgctgccaattgatggggcaaatg

SEQ ID NO: 727668 - DNA, 120 bp, Artificial Sequence
  ENSG00000198408_21 (sequence is synthesized)
ccacctccactgactcctacctccaaagtttatactatcagaccttattttcctaaggatgaggcatccgtgtacaagatttgcagagaaatgtatgacgatggagtgggtttacccttt

SEQ ID NO: 727669 - DNA, 120 bp, Artificial Sequence
  ENSG00000198408_22 (sequence is synthesized)
caaagtcagcctgatcttattggagacaagttagtaggagggctgctttccctcagcctggattactgctttgtcctagaagatgaagatggcatatgtggttatgccttgggcactgta

SEQ ID NO: 727670 - DNA, 120 bp, Artificial Sequence
  ENSG00000198408_23 (sequence is synthesized)
gatgtgaccccctttattaaaaaatgtaaaatttcctggatccccttcatgcaggagaagtataccaagccaaatggtgacaaggaactctctgaggctgagaaaataatgttgagtttc

SEQ ID NO: 727671 - DNA, 120 bp, Artificial Sequence
  ENSG00000198408_24 (sequence is synthesized)
catgaagaacaggaagtactgccagaaactttccttgctaatttcccttctctgataaagatggacattcacaaaaaagtaactgacccaagtgtggccaaaagcatgatggcttgcctc

SEQ ID NO: 727672 - DNA, 120 bp, Artificial Sequence
  ENSG00000198408_25 (sequence is synthesized)
ctgtcttcactgaaggctaatggctcccggggagctttctgtgaagtgagaccagatgataaaagaattctggaattttacagcaagttaggatgttttgaaattgcaaaaatggaagga

SEQ ID NO: 727673 - DNA, 120 bp, Artificial Sequence
  ENSG00000198408_26 (sequence is synthesized)
tttccaaaggatgtggttatacttggtcggagcctgtgacatttgttgacactgtgaactgtccaaaagtctcttaactgcaccttgtgaatggtagttgaggtcttcatacagttcagc

SEQ ID NO: 727674 - DNA, 120 bp, Artificial Sequence
  ENSG00000198408_27 (sequence is synthesized)
ctctagaatggtaacaaatcagccaattggattcgaaacaaagaagactatgtaaaactcacccatcacactttgagactactcactggttggaagaatatagtattgcagcaaatcctg

SEQ ID NO: 727675 - DNA, 120 bp, Artificial Sequence
  ENSG00000198408_28 (sequence is synthesized)
tatgaaagagagatgtgggcttcctttttgagtcttgtgttaggtgctgagaccttttacatgggcttatacagggagagagtcttcaataaatgtagtcagcactattttctgcatcca

SEQ ID NO: 727676 - DNA, 120 bp, Artificial Sequence
  ENSG00000198408_29 (sequence is synthesized)
gtgtggttgcgtttctcacctgagagtaatcaagataacatctgtcatcttccttggtttattgagtgaaatgcctctcagtcttaggggacatggcagagatgaaagaaagaaagagtg

SEQ ID NO: 727677 - DNA, 120 bp, Artificial Sequence
  ENSG00000198408_30 (sequence is synthesized)
ggtttcagaagtgtcagggtggagtgattccaagtgggatggttgtggcattagtttaagctgaataaataatttcaatttggggcagttattctgctttttgtaaagccgtggccaatt

SEQ ID NO: 727678 - DNA, 120 bp, Artificial Sequence
  ENSG00000198408_31 (sequence is synthesized)
gtctcctgtaatgactgttggttcaggcatgttgtactttgtagggacaaatgtgcatttgtttgtggcaaaagcctacaattgacaaacttgtaaatttctttgtatataaactagctg

SEQ ID NO: 727679 - DNA, 120 bp, Artificial Sequence
  ENSG00000198408_32 (sequence is synthesized)
taacctgactatcctttgtgtttactgtttttgtaaatttttttcctctataaatgaaagggtgttggttcagaatggcactttgaataatgtaaaccagtgaaaagtggattttcttta

SEQ ID NO: 727680 - DNA, 120 bp, Artificial Sequence
  ENSG00000198408_33 (sequence is synthesized)
cttttgtctttgggtttggggttgtttttgttctttttgaagttttattatttttaaagtgcctcccacctaggcgtaggccatgaccatttggggtacgagagcctaattttgtaggac

SEQ ID NO: 727681 - DNA, 120 bp, Artificial Sequence
  ENSG00000198408_34 (sequence is synthesized)
ttaatctgttgaaaagtgcagttacttctggaaattaacctcaatattaggtcagcatgtgaaatgttggatttgacatgtcaggtagggttcagggactgattggtcccatttgccctc

SEQ ID NO: 727682 - DNA, 120 bp, Artificial Sequence
  ENSG00000198408_35 (sequence is synthesized)
aggtcagttgtttaatctcaagacctgttactactgattttattaaatcagagtctttaattcttgcatgtttgtatctaatttctgaatgaatgagcacactttaaccagttatttaca

SEQ ID NO: 727683 - DNA, 120 bp, Artificial Sequence
  ENSG00000198408_36 (sequence is synthesized)
gttacctttttcctttaaccggattgtgaaagcttcatgtattttaatttagattctgtgtttttaagggttctgagcatgaagctggcagatagtcggcaggactcattttttcatcat

SEQ ID NO: 727684 - DNA, 120 bp, Artificial Sequence
  ENSG00000198408_37 (sequence is synthesized)
ggctggctgatttctccatagattgataacagtattttgttatcttgcttctctgtagttttgcatcagctgtttaactttgagctgagtgaggggagaggggtaaagagaaagaaactt

SEQ ID NO: 727685 - DNA, 120 bp, Artificial Sequence
  ENSG00000198408_38 (sequence is synthesized)
aagttttctttcacagaactccaccattgtgggctttgagagagccctaaagcattgtacctagtggtacctagtgacttccaaccaaagcctttgagtatgcactaaataggtgagaag

SEQ ID NO: 727686 - DNA, 120 bp, Artificial Sequence
  ENSG00000198408_39 (sequence is synthesized)
aaaggagagaaggtttttaggttagaaacctttaaccgatagaaggatatggtatgttgtaaagctggaaccaagtttgcatttttgagggcttgagatgaagggaagactcttaccaga

SEQ ID NO: 727687 - DNA, 120 bp, Artificial Sequence
  ENSG00000198408_40 (sequence is synthesized)
tagtaagacagctgagttttcctcagttttctcgtcttaacactagtggacaattctagcattttgtttggaggatttcagagttaacctcatggaattcaggattttttagcaagtttg

SEQ ID NO: 727688 - DNA, 120 bp, Artificial Sequence
  ENSG00000198408_41 (sequence is synthesized)
cttttggttttatcttggcttttagtaatcatgttggctggtctggtcacaggtgactgtgaaacagatgccctggtcttgctttcatcactctaggatcatgaagtgctatgctatttc

SEQ ID NO: 727689 - DNA, 120 bp, Artificial Sequence
  ENSG00000198408_42 (sequence is synthesized)
ctggttatgaatattaaggttggaattacatttttattgattgtttggatcagagctcagttcctgtagaaaacgaactgtaaaagaccatgcaagaggcaaaataaaacttgaagtgaa

SEQ ID NO: 727690 - DNA, 120 bp, Artificial Sequence
  ENSG00000198408_43 (sequence is synthesized)
tataatgtctatggtgaagtcttttgtacagtggttagtaatttctgaaggagatgctgccaatcccccccgcgcctgcgaagcgcagcggctctagcgtttgctgccaattgatggggc

SEQ ID NO: 727691 - DNA, 120 bp, Artificial Sequence
  ENSG00000198408_44 (sequence is synthesized)
cagcgtttgctgccaattgatggggcaaatgatctcttttttcagccacctccactgactcctacctccaaagtttatactatcagaccttattttcctaaggatgagaaaataatgttg

SEQ ID NO: 727692 - DNA, 120 bp, Artificial Sequence
  ENSG00000198408_45 (sequence is synthesized)
aaggatgaggtaattgtctctctacctaccaacttggtgtatgggtatggtgcacacttaaaacttaaccttttaactcactggttaaaggaatccttctgtcttaaaactgcaaacttt

SEQ ID NO: 727693 - DNA, 120 bp, Artificial Sequence
  ENSG00000198408_46 (sequence is synthesized)
agatggagaaagttcattaaaacattcagtgtatcttgagaaatttaaggagtttagacttttaacatcttgtgccaagttctttaatttctcccttgagaaagtcagatgaaatgtatt

SEQ ID NO: 727694 - DNA, 120 bp, Artificial Sequence
  ENSG00000198408_47 (sequence is synthesized)
tttcactgtgtcagccaggatggtcttgatctctggcccaagcttttaaaagtgaaaacggtggccaggcacggcagcacacacttgtaattctagcacttcaggaggccgagatagaag

SEQ ID NO: 727695 - DNA, 120 bp, Artificial Sequence
  ENSG00000198408_48 (sequence is synthesized)
ccgagatagaaggatcactcgagcccaggaattcgagaccagccctgacgatataaatagggaaagagagagagagagagagagagcgcgtgcacgcgagggagaatgcctgcccctctc

SEQ ID NO: 727696 - DNA, 120 bp, Artificial Sequence
  ENSG00000198408_49 (sequence is synthesized)
cagcctggccaacagaaggagatcctgtctcaaagaaagtgaaaatgcttcagctagaattataggataatcctgtgtgagataatttacatagtgactggaagagttattaaatattgc

SEQ ID NO: 727697 - DNA, 120 bp, Artificial Sequence
  ENSG00000198408_50 (sequence is synthesized)
gattatattttcaggcatccgtgtacaagatttgcagagaaatgtatgacgatggagtgggtttaccctttcaaagtcagcctgatcttattggagacaagtatgtgataagtatttgga

SEQ ID NO: 727698 - DNA, 120 bp, Artificial Sequence
  ENSG00000198408_51 (sequence is synthesized)
tttgagagtagacctttcatagtgaggcttatcaggttgaggggaggtgatgactggaaatatatttatttattttaaatcccactttggctttagtaaaatctgaatatgtgtgcattt

SEQ ID NO: 727699 - DNA, 120 bp, Artificial Sequence
  ENSG00000198408_52 (sequence is synthesized)
ctagtttcttacaccaaatgtaggttccgtaagttcatgcaagtacagtgggtcttggatcactgaagtctgaattttatattagcaactgaaaagtttactgtggcctctttccttctg

SEQ ID NO: 727700 - DNA, 120 bp, Artificial Sequence
  ENSG00000198408_53 (sequence is synthesized)
atttccaagtctcttcaattcgttgcctaggtttctttcaaaaataggcattattgaagacttgagatgcaagtcttagtaaatacatcaagcacattaatttttctcccttgggctaat

SEQ ID NO: 727701 - DNA, 120 bp, Artificial Sequence
  ENSG00000198408_54 (sequence is synthesized)
tcagcataagtatcttaaaagtatgttagaaagtactgactttaacttgctctgactgaatgctttctggatggaaccctgtataccacttttatctgatttggagatgagacactatga

SEQ ID NO: 727702 - DNA, 120 bp, Artificial Sequence
  ENSG00000198408_55 (sequence is synthesized)
aatgtgactccacaagctttctgctgcttgctgtgtcttgataacattaatgctatgtttaacagaacaattgctgaaatgacctaaagggcctggcaagaggaagccatcctcccagcc

SEQ ID NO: 727703 - DNA, 120 bp, Artificial Sequence
  ENSG00000198408_56 (sequence is synthesized)
ctgtgcgcatgcgagctttagtgtaaggctattctggtgctattcagtattatttcacgtggctttttctttatccttctaccaagtattggttttaccaggggatagaaattgtaatcc

SEQ ID NO: 727704 - DNA, 120 bp, Artificial Sequence
  ENSG00000198408_57 (sequence is synthesized)
cctaaacatctctgctacattaaatggacttttgtatgtctcctttgaacactgattttttttttttaaattgtcaaacttggtaaaaagcaccagcatggccaagtttctctagggact

SEQ ID NO: 727705 - DNA, 120 bp, Artificial Sequence
  ENSG00000198408_58 (sequence is synthesized)
tcatttcattttcaggttttcaatccagctataaggaatatgtaatggacttatatacagcacacagcaggcagcaaggctgactgacatgtcatagttttcatagtagtcacaaatact

SEQ ID NO: 727706 - DNA, 120 bp, Artificial Sequence
  ENSG00000198408_59 (sequence is synthesized)
atgatgggtttcatggtcttggttgtgaaatagatatctgaaacaccgtgagcttagaataaaaagtagtagtgagattttccactttctgcctgtatacctttgagctcttaaatattt

SEQ ID NO: 727707 - DNA, 120 bp, Artificial Sequence
  ENSG00000198417_0 (sequence is synthesized)
atcaaagcagcggccggctgttggggtccaccacgccttccacctgccccactgcttcttcgcttctctcttggaaagtccagtctctcctcggcttgcaatggaccccaactgctcctg

SEQ ID NO: 727708 - DNA, 120 bp, Artificial Sequence
  ENSG00000198417_1 (sequence is synthesized)
gcaagaagagctgctgctcctgctgccccgtgggctgtagcaagtgtgcccagggctgtgtttgcaaaggggcgtcagagaagtgcagctgctgcgactgatgccaggacaacctttctc

SEQ ID NO: 727709 - DNA, 120 bp, Artificial Sequence
  ENSG00000198417_2 (sequence is synthesized)
ccagatgtaaacagagagacatgtacaaacctggattttttttttataccaccttgacccatttgctacattccttttcctgtgaaatatgtgagtgataattaaacactttagacctga

SEQ ID NO: 727710 - DNA, 120 bp, Artificial Sequence
  ENSG00000198417_3 (sequence is synthesized)
ggaagggcgggcaggagggcagggaagccgctcacccaggcacaaagcgcctcccgcttgagcggactccaaagggacggtccgcggtgtgcagcgagctgcgctcaggggaccttgcgc

SEQ ID NO: 727711 - DNA, 120 bp, Artificial Sequence
  ENSG00000198417_4 (sequence is synthesized)
ggaacgccgggttccgtgcctggggatgctcgattcccagacaccatagagagtgttcctgggtttgagaaggtcgtattttgagatctcaactgtaggggactccttgacttagtccag

SEQ ID NO: 727712 - DNA, 120 bp, Artificial Sequence
  ENSG00000198417_5 (sequence is synthesized)
tgctttcctcttggccaagatcctgagagcatttccttcctctctgtgcctctgtgtcagcgttgagggtactgaggctcaaggctgtcctgctccacgtcatgcggtttgtcccagggc

SEQ ID NO: 727713 - DNA, 120 bp, Artificial Sequence
  ENSG00000198417_6 (sequence is synthesized)
tgttggctgagccccagtgctctgaccaggctttgagcagcaggattagataggaggcaggggacattgcctcttcggggttcaggacagaaagtcgaagtcgccgtcttcccaggctgt

SEQ ID NO: 727714 - DNA, 120 bp, Artificial Sequence
  ENSG00000198417_7 (sequence is synthesized)
gactttcctttggagtgcaaacaggaggctgcttggccttcccagcatgaagggagaggacatggggcttctcttcctctgctctgagtgggaaaggagctctgagggctggccccgcac

SEQ ID NO: 727715 - DNA, 120 bp, Artificial Sequence
  ENSG00000198417_8 (sequence is synthesized)
agaggagggggcaatggagactcattaactcactgctgtacctcctgcaggtcactcgccgctcactggcttttttttctctttctcgcaggtgtctcctgcacctgcgctggttcctgc

SEQ ID NO: 727716 - DNA, 120 bp, Artificial Sequence
  ENSG00000198417_9 (sequence is synthesized)
aagtgcaaagagtgcaaatgcacctcctgcaagaagagtgagtgtgaggccatctccatggtctggggctgtggctaaggttgggatggaacccaaggctggccctgagtgcatgcttct

SEQ ID NO: 727717 - DNA, 120 bp, Artificial Sequence
  ENSG00000198417_10 (sequence is synthesized)
ggggaactggccttcctttgtccccgtaggttgtcactgcctttctagtcttctgccctgtgcagggcgcctgggcagctttctcataggaagacccaccccagatatttcccagttgtc

SEQ ID NO: 727718 - DNA, 120 bp, Artificial Sequence
  ENSG00000198417_11 (sequence is synthesized)
tcctgacaaagccataccctcctgaactgagggtcctttgtggctggaggctctgttgggggcctctgttggggagggaggtccctgggcaagttggctgtgacctctcatgctcctctt

SEQ ID NO: 727719 - DNA, 120 bp, Artificial Sequence
  ENSG00000198417_12 (sequence is synthesized)
accttgacccatttgctacattccttttcctgtgaaatatggcagcaaagtgactggagatgtggaggaaagcgtcatctcggcaacgcagagtcatgagaaggactgggtgcagatgaa

SEQ ID NO: 727720 - DNA, 120 bp, Artificial Sequence
  ENSG00000198417_13 (sequence is synthesized)
ggagtcaccctggtgactggtagttaggccaacagtaggttccactggctactggttcgagaattgctatctgatgttcaatcacagaggaagaggagttaagtggcccaggagtcagga

SEQ ID NO: 727721 - DNA, 120 bp, Artificial Sequence
  ENSG00000198420_0 (sequence is synthesized)
gcctaagactttccaagtcctgtagtttcgagcccgctgccctttgcctcctgggcggagaagctgcttcctcctgggaacaaccgcctcccgctcctagcaggttgctactgccccgaa

SEQ ID NO: 727722 - DNA, 120 bp, Artificial Sequence
  ENSG00000198420_1 (sequence is synthesized)
cccgcgctgcagggaacagcggggcaaacagtgagtggggttcagcgtagactctggaccaggagaggcccgcggtgaccgaggcctgggccccggaaaccaatagagccatggcgactc

SEQ ID NO: 727723 - DNA, 120 bp, Artificial Sequence
  ENSG00000198420_2 (sequence is synthesized)
cctctgctgccttcgaggcccttatgaatggtgtgacaagctgggatgtacccgaagatgctgttccatgtgaactgcttcttattggagaggcttcatttcctgtgatggtgaatgaca

SEQ ID NO: 727724 - DNA, 120 bp, Artificial Sequence
  ENSG00000198420_3 (sequence is synthesized)
tgggccaggtcctcattgctgcctcctcctatggccgtggccgcctggtggtcgtgtcccatgaggactacttggtggaagcccagctcacgccctttctcctgaacgcagtggggtggc

SEQ ID NO: 727725 - DNA, 120 bp, Artificial Sequence
  ENSG00000198420_4 (sequence is synthesized)
tttgctcttcccctggggctcccattggtgtacacccatccctggcacctttggccaaaatcctcgagggctctggagtggatgcaaaggttgagccagaagtgaaagactccctggggg

SEQ ID NO: 727726 - DNA, 120 bp, Artificial Sequence
  ENSG00000198420_5 (sequence is synthesized)
tttactgtattgatgcctacaatgaaaccatgacagaaaagctggtcaagttcatgaaatgtggtggcggcttgctcataggaggacaagcctgggattgggccaaccagggggaggatg

SEQ ID NO: 727727 - DNA, 120 bp, Artificial Sequence
  ENSG00000198420_6 (sequence is synthesized)
aaagggttctgttcacgttccctgggaacctcgtgaccagtgtggctggcatttactttactgacaacaaaggggacacgagtttctttaaagtctccaagaagatgcccaagatcccag

SEQ ID NO: 727728 - DNA, 120 bp, Artificial Sequence
  ENSG00000198420_7 (sequence is synthesized)
tgttggttagttgtgaagatgacctctccgacgacagagaagagcttctgcatgggatttcagagctggacatcagcaactcggattgtttcccatcccagctgctagtgcatggggctt

SEQ ID NO: 727729 - DNA, 120 bp, Artificial Sequence
  ENSG00000198420_8 (sequence is synthesized)
tagcctttcctctagggttagattcctaccatggctgtgttatagcggctgcccgctatggccggggccgggtggttgtgactggccataaggtattattcactgttggtaaactgggcc

SEQ ID NO: 727730 - DNA, 120 bp, Artificial Sequence
  ENSG00000198420_9 (sequence is synthesized)
cctttctgctcaatgctgtccgctggctggatgggggccgcagaggcaaggttgtggtgcagacagagctgagaaccctgagtggcctcctcgcagtggggggcatagacaccagcatcg

SEQ ID NO: 727731 - DNA, 120 bp, Artificial Sequence
  ENSG00000198420_10 (sequence is synthesized)
agcccaatctgaccagtgatgcaagtgtctactgctttgaacccgtgagtgaagtgggggtcaaggaactgcaggagtttgtagcagagggtggcgggctatttgttggagcccaagcct

SEQ ID NO: 727732 - DNA, 120 bp, Artificial Sequence
  ENSG00000198420_11 (sequence is synthesized)
ggtggtgggccttcaagaaccccggagtgtcccctttggctcgattcccaggaaacctcctcctcaacccctttggcatcagcattacaagccaaagcctcaatccagggccctttcgta

SEQ ID NO: 727733 - DNA, 120 bp, Artificial Sequence
  ENSG00000198420_12 (sequence is synthesized)
ctcctaaagcagggataaggacctatcacttccgctccaccttggccgagttccaggttataatgggcaggaagagaggaaatgtggaaaagggctggttggcaaagctgggaccagatg

SEQ ID NO: 727734 - DNA, 120 bp, Artificial Sequence
  ENSG00000198420_13 (sequence is synthesized)
gtgcagctttcctgcagattcccgcagaagagatccctgcctacatgtctgtgcatcgactcctgaggaagctgctaagtcgatatcggcttccagtagcaacccgagagaaccctgtta

SEQ ID NO: 727735 - DNA, 120 bp, Artificial Sequence
  ENSG00000198420_14 (sequence is synthesized)
tcaatgactgctgcagaggtgctatgctttccctggccacagggctggcccactctggaagcgacctctctctgttagtcccagaaattgaagatatgtacagcagcccctatctgcgcc

SEQ ID NO: 727736 - DNA, 120 bp, Artificial Sequence
  ENSG00000198420_15 (sequence is synthesized)
cctcagaatctcctatcaccgtcgaggtcaactgcaccaatccaggcaccagatattgctggatgagtactgggctctacatacctggaaggcaaattatagaagtctcactgcctgaag

SEQ ID NO: 727737 - DNA, 120 bp, Artificial Sequence
  ENSG00000198420_16 (sequence is synthesized)
ctgctgcctctgccgacctgaagatacagattggctgccacacagatgacctgaccagggccagcaagcttttccgaggcccactcgtaattaaccggtgctgcttggacaaacccacaa

SEQ ID NO: 727738 - DNA, 120 bp, Artificial Sequence
  ENSG00000198420_17 (sequence is synthesized)
aatcgatcacgtgcctctggggtggactcctctatataattgtgcctcagaacagcaaactgggttctgtgcctgtcaccgtgaagggggctgtgcatgctccatactacaagctggggg

SEQ ID NO: 727739 - DNA, 120 bp, Artificial Sequence
  ENSG00000198420_18 (sequence is synthesized)
agaccaccctggaggagtggaagaggcgtatccaggagaatccagggccctggggagagctggccacggacaacatcattctgaccgtgccgaccgcaaatcttcgtactctggagaacc

SEQ ID NO: 727740 - DNA, 120 bp, Artificial Sequence
  ENSG00000198420_19 (sequence is synthesized)
ctgagccgctgctccgcctctgggatgaggtgatgcaggctgtggcgcgactgggagctgagcccttccctttgcgcctgcctcagaggattgttgccgacgtgcagatctcagtgggct

SEQ ID NO: 727741 - DNA, 120 bp, Artificial Sequence
  ENSG00000198420_20 (sequence is synthesized)
ggatgcatgcagggtaccccatcatgtgccatctggagtcagtgcaggagctcatcaacgagaagctcatcagaaccaaggggctgtggggccccgtccatgagctgggccgcaaccagc

SEQ ID NO: 727742 - DNA, 120 bp, Artificial Sequence
  ENSG00000198420_21 (sequence is synthesized)
agcggcaggagtgggagttcccaccacacaccaccgaggccacctgcaacctgtggtgtgtgtatgtgcatgagacggtcttgggcattcctcgaagccgtgccaatattgctctgtggc

SEQ ID NO: 727743 - DNA, 120 bp, Artificial Sequence
  ENSG00000198420_22 (sequence is synthesized)
ccccagttcgggagaagagagtcagaatctacctgagcaagggtcccaatgtgaaaaactggaatgcatggaccgcactggaaacgtatttacagctccaggaagcctttggttgggagc

SEQ ID NO: 727744 - DNA, 120 bp, Artificial Sequence
  ENSG00000198420_23 (sequence is synthesized)
ctccgttctttgaggcctgggcctggcccatccagaaggaagtggctaccagcctggcctatctgcctgaatggaaggaaaatattatgaaattgtacctcctcacacagatgccccact

SEQ ID NO: 727745 - DNA, 120 bp, Artificial Sequence
  ENSG00000198420_24 (sequence is synthesized)
gaaattgaagtcaagaaatgcaaaaaggaactgacacatctcagcaaagaaaactgaagggatttggttataagtggagaggatctcagcatatttctggaagatagaaagtggatgaag

SEQ ID NO: 727746 - DNA, 120 bp, Artificial Sequence
  ENSG00000198420_25 (sequence is synthesized)
catgataatgaaagagtgaagaacctttcagataaaatgtaagctgatctgaacaacataaccccaaagagacttgcgcacctgaaaagcttgtctactgaagaattactccagttgtaa

SEQ ID NO: 727747 - DNA, 120 bp, Artificial Sequence
  ENSG00000198420_26 (sequence is synthesized)
gattgagccctctcctactctcccccaactcttatgcacagaacacaggcagtctccactattgataccagttaaaaatttcttgttattgttgctgttgttgtttgtataaaggaattg

SEQ ID NO: 727748 - DNA, 120 bp, Artificial Sequence
  ENSG00000198420_27 (sequence is synthesized)
aacaggctgcttgcagagagataagagttggtgctccagaaaaaaatttctcttctagtggaaataagtgcccctacccccagccggtcagctaattctctactgacagctgagacctcc

SEQ ID NO: 727749 - DNA, 120 bp, Artificial Sequence
  ENSG00000198420_28 (sequence is synthesized)
tactcaagtgcctgttgccttcaggtatagaagaggtttcctgaagaaacagacctaactgtacaacagcagaggaaacccatgccaactgttatacaagttaacagttatgttgatttt

SEQ ID NO: 727750 - DNA, 120 bp, Artificial Sequence
  ENSG00000198420_29 (sequence is synthesized)
taaatgggaatggtgagttagaaattcccagacatgggcgatggggagggaagaggaataagaaaagtcacgaggtagaattaggggccttgaaaatatgacaaactctgagggaaacaa

SEQ ID NO: 727751 - DNA, 120 bp, Artificial Sequence
  ENSG00000198420_30 (sequence is synthesized)
agacaatgtggaaagaataacttaattttaattccatctccagagagatttgaggtgtatttaagatgaaaaacaggatactacaaagaaacggaaaactcaggagttcgagaccagcct

SEQ ID NO: 727752 - DNA, 120 bp, Artificial Sequence
  ENSG00000198420_31 (sequence is synthesized)
aaagaaacggaaaactcaggagttcgagaccagcctaggcaagatggcaacatcccgtctctacaaaataatttttaaaaattagccaagcatggtggcatgtgcctgtggtcctagcta

SEQ ID NO: 727753 - DNA, 86 bp, Artificial Sequence
  ENSG00000198420_32 (sequence is synthesized)
ttaaaaagcaagaaaagaaagagaagactgagaataagaagatctctttgaaaataaaataagactgctaaaagtatttggtatac

SEQ ID NO: 727754 - DNA, 120 bp, Artificial Sequence
  ENSG00000198420_33 (sequence is synthesized)
tttgaaaataaaataagactgctaaaagtatttggtatacagtctggaaaataaagttgagggaatctctccagataaagagcaaaaagaaatagatagaaaaatataaagaaagaaaaa

SEQ ID NO: 727755 - DNA, 120 bp, Artificial Sequence
  ENSG00000198420_34 (sequence is synthesized)
agacatagacaatcaatatgtaatgttaggagttcctggaagagagaacagagacagtgtaggtgaagaaataaaaagaaaaagaattgaagaacagagcaagctaagtctccagattga

SEQ ID NO: 727756 - DNA, 120 bp, Artificial Sequence
  ENSG00000198420_35 (sequence is synthesized)
gagggcccaatacaatctacatctagacacaatattgtaaaattttggaatattaaggatagaaggaagatattaaagtggccagggagaaaacaaatgaggtcatcacgattagctcaa

SEQ ID NO: 727757 - DNA, 120 bp, Artificial Sequence
  ENSG00000198420_36 (sequence is synthesized)
cacaaaaatggatgagaaatagactgctaacagatttgtcatcagcaacactgaatgccagaagtcaatggatcaacatcttcagagcttaaggaaaatttttgtacctagaatttcata

SEQ ID NO: 727758 - DNA, 120 bp, Artificial Sequence
  ENSG00000198420_37 (sequence is synthesized)
gtaaggcagactgtcaagaagaacatcaaagtgaagacattttctgtcaggcaaattttcagaaagtctcctttgcacccttactgaggaagtatcttgaggaaattctccagcaaaatg

SEQ ID NO: 727759 - DNA, 120 bp, Artificial Sequence
  ENSG00000198420_38 (sequence is synthesized)
aggatgaaaaccaggaaagaagaagaaatgggatccataaaacagtggaccttacttaggatgtctcattctagagtgacagccaaaagggtatctcaccctagagtgacagctatccag

SEQ ID NO: 727760 - DNA, 120 bp, Artificial Sequence
  ENSG00000198420_39 (sequence is synthesized)
cagactaatttcagatgagagcatactgtctcgggctttctgggaagaatgtgcattcagtgccatagatagtatcattgaagagctgggatgcttgagaagattatttagtcaagaaaa

SEQ ID NO: 727761 - DNA, 120 bp, Artificial Sequence
  ENSG00000198420_40 (sequence is synthesized)
aagaaagacaaatcaacaatatgtcaaaaaattcaggtccaattatagagcaaaataaaatgaggcatgattttgagttattcatgaagaataagaagaggcttgataggtacatttcct

SEQ ID NO: 727762 - DNA, 120 bp, Artificial Sequence
  ENSG00000198420_41 (sequence is synthesized)
tttctatggcacaggcatgatgatattgggtgtgtagggaagaaaatatcctagcttatactaggctcccagtaagaagtatttaaatagccaaaataatgtggatatcatttattagta

SEQ ID NO: 727763 - DNA, 120 bp, Artificial Sequence
  ENSG00000198420_42 (sequence is synthesized)
ttcaatgttcagatcagcctattaacaaagtgtgaaaggtttcattttttattcagaactgaagttgaaagtaattaatgctgacaaagggaaagaaagcagaaagagattgagaattag

SEQ ID NO: 727764 - DNA, 120 bp, Artificial Sequence
  ENSG00000198420_43 (sequence is synthesized)
aggaagagaagtggaatcaaaggtagagatacttatatattcaaagtggggatgaaaagatcttcagttaatggaacaagaactagaggattagtgtattgttcaaagctataaaatcaa

SEQ ID NO: 727765 - DNA, 120 bp, Artificial Sequence
  ENSG00000198420_44 (sequence is synthesized)
accaatagatgtattaaaaagtgatgtaactatcagacatttggagagagatggacaaaggaaagtggcgatagtgtaagttaaatccttatcttttgtaatggggaattattaaagatg

SEQ ID NO: 727766 - DNA, 120 bp, Artificial Sequence
  ENSG00000198420_45 (sequence is synthesized)
ttgtaaagtcagtaagtcaagaaattattgctcaaacatattatttaaagttagaaagttaccagacgatctaaaataaatattgttaaaagcattacctctagggaatgggatttagat

SEQ ID NO: 727767 - DNA, 120 bp, Artificial Sequence
  ENSG00000198420_46 (sequence is synthesized)
ttaaaaagggtgggatgggaaactgtgtttttcattttaagtccttctgtactatttaattttttaccttgtgcatgtattactttgaaaaaatttttaataaacccaaataaaaatctt

SEQ ID NO: 727768 - DNA, 120 bp, Artificial Sequence
  ENSG00000198420_47 (sequence is synthesized)
ctgggcggagaagctgcttcctcctgggaacaaccgcctcccgctcctagcaggttgctactgccccgaacccgcgctgcagggaacagcggggcaaacaaaaccaatagagccatggcg

SEQ ID NO: 727769 - DNA, 120 bp, Artificial Sequence
  ENSG00000198420_48 (sequence is synthesized)
gactcccgtggaaacccctcctctcctccagctccagcctcctccccgctcccaaatcccggctcggtcgcccagtcactggtacagggaagcctcttccctgtgcattcctctctgcgc

SEQ ID NO: 727770 - DNA, 120 bp, Artificial Sequence
  ENSG00000198420_49 (sequence is synthesized)
aaccgtctgcactgcagcccacctccccccacacgcctcctcctagccacttcactaccaatttgcaaattcccaaggcgtctgccccagcgccttcccacatctctgtggaagactccc

SEQ ID NO: 727771 - DNA, 120 bp, Artificial Sequence
  ENSG00000198420_50 (sequence is synthesized)
cactccaaagtagcctggtgtggaaattgctggacgaaaggactggctttgggcctgggaggaaagaagagagtggagccccgccagactccaagctgagtgctgacagcctctgggagt

SEQ ID NO: 727772 - DNA, 120 bp, Artificial Sequence
  ENSG00000198420_51 (sequence is synthesized)
accccccacccccgcagtctccgcctaagactttccaagtcctgtagtttcgagcccgctgccctttgcctcctgggcggagaagctgcttcctcctgggaacaaccgcctcccgctcct

SEQ ID NO: 727773 - DNA, 120 bp, Artificial Sequence
  ENSG00000198429_0 (sequence is synthesized)
actgttcctccagacactgagggggtcgcattccttacctcacctttgtccctgcgcgggctgcggctgggatccggtctttccagccccgagagggacctggttcctctgcccaggctt

SEQ ID NO: 727774 - DNA, 120 bp, Artificial Sequence
  ENSG00000198429_1 (sequence is synthesized)
ctgtcactctgtcacctacgctatgccctgctgtagtcacaggaggtgtagagaggaccccgggacatctgaaagccaggaaatggacccagtggcctttgatgatgttgctgtgaactt

SEQ ID NO: 727775 - DNA, 120 bp, Artificial Sequence
  ENSG00000198429_2 (sequence is synthesized)
cacccaggaggagtgggctttgctggatatttcccagaggaaactctacaaggaagtgatgctggaaactttcaggaacctgacctctgtaggaaaaagttggaaagaccagaacattga

SEQ ID NO: 727776 - DNA, 120 bp, Artificial Sequence
  ENSG00000198429_3 (sequence is synthesized)
atatgagtaccaaaaccccaggagaaacttcaggagtctcatagaaaagaaagtcaatgaaattaaagatgacagtcattgtggagaaacttttacccaggttccagatgacaggctgaa

SEQ ID NO: 727777 - DNA, 120 bp, Artificial Sequence
  ENSG00000198429_4 (sequence is synthesized)
cttccaggagaagaaagcttctcctgaaataaaatcatgtgacagctttgtgtgtggagaagttggcctaggtaactcatcttttaatatgaacatcagaggtgacattggacacaaggc

SEQ ID NO: 727778 - DNA, 120 bp, Artificial Sequence
  ENSG00000198429_5 (sequence is synthesized)
ctatgagtatcaggaatatggaccgaagccatgtaagtgtcaacaacctaaaaaagccttcagatatcacccctcctttagaacaccacaaagggatcacactggagagaaaccctatgc

SEQ ID NO: 727779 - DNA, 120 bp, Artificial Sequence
  ENSG00000198429_6 (sequence is synthesized)
ttgtaaagaatgtggaaaaacttttatttcccattcaagcattcaaagacacgtggtaatgcacagtggggatggaccttataaatgtaaattttgtgggaaagccttccattgtctcag

SEQ ID NO: 727780 - DNA, 120 bp, Artificial Sequence
  ENSG00000198429_7 (sequence is synthesized)
gaaaccatatgaatgtaaacaatgtggtaaatcctttagttattctgctacccttcgaatacacgaaagaactcacactggagaaaagccttatgaatgtcagcaatgtgggaaagcatt

SEQ ID NO: 727781 - DNA, 120 bp, Artificial Sequence
  ENSG00000198429_8 (sequence is synthesized)
aaagccttatgaatgtcagcaatgtgggaaagcatttcatagtcccagatgctatcgtagacatgaaaggattcacacgggagagaaggcttatcaatgtaaggaatgtggaaaagcatt

SEQ ID NO: 727782 - DNA, 120 bp, Artificial Sequence
  ENSG00000198429_9 (sequence is synthesized)
cacgtgtccccagtatgttcgtatacatgaaaggacccactctaggaaaaaaccctatgaatgtacgcagtgtgggaaagcattatcctctcttacaagttttcaaacacacataagaat

SEQ ID NO: 727783 - DNA, 120 bp, Artificial Sequence
  ENSG00000198429_10 (sequence is synthesized)
aaggcttttgttctgccaattcatttcaaagacatgaaaaaactcacagtggagagaaaccctataaatgcaagcaatgtggtaaagccttcattcattccagttcccttcgttatcatg

SEQ ID NO: 727784 - DNA, 120 bp, Artificial Sequence
  ENSG00000198429_11 (sequence is synthesized)
cctatgagtgtaagcaatgtgggaaggccttcagatcttcctcacaccttcaattgcatggtaggactcacactggagagaagccctatgaatgtcaggaatgtgggaaagccttcagat

SEQ ID NO: 727785 - DNA, 120 bp, Artificial Sequence
  ENSG00000198429_12 (sequence is synthesized)
aggaatgtgggaaagccttcagatctatgaagaaccttcaaagtcatgaaaggacacaaacacacgtaagaatacactctggagaaagaccttataaatgtaagctatgtgggaaaggct

SEQ ID NO: 727786 - DNA, 120 bp, Artificial Sequence
  ENSG00000198429_13 (sequence is synthesized)
tttattgtcccaaatcattgcaaagacatgaaaaaactcacactggagagaaactctatgaatgcaagcaatgtggtgaagccttcagtagttccagttcctttcgataccatgaaagga

SEQ ID NO: 727787 - DNA, 120 bp, Artificial Sequence
  ENSG00000198429_14 (sequence is synthesized)
ctcacactggagagaaaccctataaatgcaagcaatgtgggaaagccttcagagctgcctcagtccttcgaatgcatggtaggactcaccctgaagataaaccctatgagtgtaagcaat

SEQ ID NO: 727788 - DNA, 120 bp, Artificial Sequence
  ENSG00000198429_15 (sequence is synthesized)
gagggaaagccttcagatctgcctcacacctttgaatgcatggtaggacacacaatcaagagaaaccatgaatgtaaagaatgtgggaaacccttcaggtctgcccagaaccttcgaatt

SEQ ID NO: 727789 - DNA, 78 bp, Artificial Sequence
  ENSG00000198429_16 (sequence is synthesized)
atgtgggaaacccttcaggtctgcccagaaccttcgaattcagtaaaggacacaagcacacataagaatgcattctgg

SEQ ID NO: 727790 - DNA, 120 bp, Artificial Sequence
  ENSG00000198429_17 (sequence is synthesized)
gtcctcccagcatggagtttgagatctaagaatggacagtctgcctcctcaagtgggtccctgatctccaagtagcctaactgggaggcacttcccagtaggggccaactgacacctcat

SEQ ID NO: 727791 - DNA, 79 bp, Artificial Sequence
  ENSG00000198429_18 (sequence is synthesized)
agtaggggccaactgacacctcatacggccgtgtgcccctctgtgacgaagcttccagaggaaggatcaggcactgctg

SEQ ID NO: 727792 - DNA, 120 bp, Artificial Sequence
  ENSG00000198429_19 (sequence is synthesized)
gcctcccaaaatgctgggattacagatatgagccatcatgcccagccgcaaccctaatttttcattcagtcataataccaacagttatctcatgtacctctgagtgccttcttcccaaaa

SEQ ID NO: 727793 - DNA, 120 bp, Artificial Sequence
  ENSG00000198429_20 (sequence is synthesized)
ctcatgtacctctgagtgccttcttcccaaaagccagcagtaccatacctgctgtcagcaagtgtgtaatataccatagtgataaatatgaccaaaagccataaatgactgtgagatgta

SEQ ID NO: 727794 - DNA, 120 bp, Artificial Sequence
  ENSG00000198429_21 (sequence is synthesized)
tgagaatgacacgtcacattagtaagaagagaaaaattttggccatgtttatgatttgaaatatgttttcctctatcacatttagaaatatagttacaaaatgcccttagttttatcctg

SEQ ID NO: 727795 - DNA, 120 bp, Artificial Sequence
  ENSG00000198429_22 (sequence is synthesized)
ccttagttttatcctgattcatcatggtcactgaggagcatcgtctcatatgcctggtatgtgacatgtgtctcttcaacagtaaaagacttggcattggctgggcatggtggctcacgc

SEQ ID NO: 727796 - DNA, 70 bp, Artificial Sequence
  ENSG00000198429_23 (sequence is synthesized)
atatgatgctcctgtaatcctagctattcaggaggctgacgcaggagacttgcttgaatataggaggcag

SEQ ID NO: 727797 - DNA, 120 bp, Artificial Sequence
  ENSG00000198429_24 (sequence is synthesized)
tgctcctgtaatcctagctattcaggaggctgacgcaggagacttgcttgaatataggaggcagacgttgcagtgagccgaggtcacaccattcactccagcctgggcaacaagagcgaa

SEQ ID NO: 727798 - DNA, 120 bp, Artificial Sequence
  ENSG00000198431_0 (sequence is synthesized)
agaccctcacgtgatgacaacagctagcaaagttctgtagctactgccttagggcatagtctaatttcttcagtaaaaacacacttattccaaatttggttccagaattgccttaaattg

SEQ ID NO: 727799 - DNA, 120 bp, Artificial Sequence
  ENSG00000198431_1 (sequence is synthesized)
tttttgctctgttcttaggttgggggcggctatgagcaggcagaggatgtggtgtcacccaattaggagctctcagcttacgaggcaattagcataggttgccagggctgcacgaggagt

SEQ ID NO: 727800 - DNA, 120 bp, Artificial Sequence
  ENSG00000198431_2 (sequence is synthesized)
ggatttctgctttgtcattctgactctggcagttagcccgcccgctcggcgcagggcgtggcttctcgtagccattaggaaacagcaaccctttcacctcagttttcttcactccggcat

SEQ ID NO: 727801 - DNA, 120 bp, Artificial Sequence
  ENSG00000198431_3 (sequence is synthesized)
ttgcagcagagcgaaaggtggtcgagtcctgaaggagggcctgatgtcttcatcattctcaaattcttaggacggtcgggccctggaaggaacgctctcggaattggccgcggaaaccga

SEQ ID NO: 727802 - DNA, 120 bp, Artificial Sequence
  ENSG00000198431_4 (sequence is synthesized)
tctgcccgttgtgtttgtgaaacagagaaagataggcggccatggtccaaccttgaaggcttatcaggagggcagacttcaaaagctactaaaaatgaacggccctgaagatcttcccaa

SEQ ID NO: 727803 - DNA, 120 bp, Artificial Sequence
  ENSG00000198431_5 (sequence is synthesized)
gtcctatgactatgaccttatcatcattggaggtggctcaggaggtctggcagctgctaaggaggcagcccaatatggcaagaaggtgatggtcctggactttgtcactcccacccctct

SEQ ID NO: 727804 - DNA, 120 bp, Artificial Sequence
  ENSG00000198431_6 (sequence is synthesized)
tggaactagatggggtctcggaggaacatgtgtgaatgtgggttgcatacctaaaaaactgatgcatcaagcagctttgttaggacaagccctgcaagactctcgaaattatggatggaa

SEQ ID NO: 727805 - DNA, 120 bp, Artificial Sequence
  ENSG00000198431_7 (sequence is synthesized)
agtcgaggagacagttaagcatgattgggacagaatgatagaagctgtacagaatcacattggctctttgaattggggctaccgagtagctctgcgggagaaaaaagtcgtctatgagaa

SEQ ID NO: 727806 - DNA, 120 bp, Artificial Sequence
  ENSG00000198431_8 (sequence is synthesized)
tgcttatgggcaatttattggtcctcacaggattaaggcaacaaataataaaggcaaagaaaaaatttattcagcagagagatttctcattgccactggtgaaagaccacgttacttggg

SEQ ID NO: 727807 - DNA, 120 bp, Artificial Sequence
  ENSG00000198431_9 (sequence is synthesized)
catccctggtgacaaagaatactgcatcagcagtgatgatcttttctccttgccttactgcccgggtaagaccctggttgttggagcatcctatgtcgctttggagtgcgctggatttct

SEQ ID NO: 727808 - DNA, 120 bp, Artificial Sequence
  ENSG00000198431_10 (sequence is synthesized)
tgctggtattggtttagacgtcactgttatggttaggtccattcttcttagaggatttgaccaggacatggccaacaaaattggtgaacacatggaagaacatggcatcaagtttataag

SEQ ID NO: 727809 - DNA, 120 bp, Artificial Sequence
  ENSG00000198431_11 (sequence is synthesized)
acagttcgtaccaattaaagttgaacaaattgaagcagggacaccaggccgactcagagtagtagctcagtccaccaatagtgaggaaatcattgaaggagaatataatacggtgatgct

SEQ ID NO: 727810 - DNA, 120 bp, Artificial Sequence
  ENSG00000198431_12 (sequence is synthesized)
ggcaataggaagagatgcttgcacaagaaaaattggcttagaaaccgtaggggtgaagataaatgaaaagactggaaaaatacctgtcacagatgaagaacagaccaatgtgccttacat

SEQ ID NO: 727811 - DNA, 120 bp, Artificial Sequence
  ENSG00000198431_13 (sequence is synthesized)
ctatgccattggcgatatattggaggataaggtggagctcaccccagttgcaatccaggcaggaagattgctggctcagaggctctatgcaggttccactgtcaagtgtgactatgaaaa

SEQ ID NO: 727812 - DNA, 120 bp, Artificial Sequence
  ENSG00000198431_14 (sequence is synthesized)
tgttccaaccactgtatttactcctttggaatatggtgcttgtggcctttctgaggagaaagctgtggagaagtttggggaagaaaatattgaggtttaccatagttacttttggccatt

SEQ ID NO: 727813 - DNA, 120 bp, Artificial Sequence
  ENSG00000198431_15 (sequence is synthesized)
ggaatggacgattccgtcaagagataacaacaaatgttatgcaaaaataatctgtaatactaaagacaatgaacgtgttgtgggctttcacgtactgggtccaaatgctggagaagttac

SEQ ID NO: 727814 - DNA, 120 bp, Artificial Sequence
  ENSG00000198431_16 (sequence is synthesized)
cacaacattgtctgtgaccaagcgctctggggcaagcatcctccaggctggctgctgaggttaagccccagtgtggatgctgttgccaagactgcaaaccactggctcgtttccgtgccc

SEQ ID NO: 727815 - DNA, 120 bp, Artificial Sequence
  ENSG00000198431_17 (sequence is synthesized)
aaatccaaggcgaagttttctagagggttcttgggctcttggcacctgcgtgtcctgtgcttaccaccgcccaaggcccccttggatctcttggataggagttggtgaatagaaggcagg

SEQ ID NO: 727816 - DNA, 120 bp, Artificial Sequence
  ENSG00000198431_18 (sequence is synthesized)
cagcatcacactggggtcactgacagacttgaagctgacatttggcagggcatcgaagggatgcatccatgaagtcaccagtctcaagcccatgtggtaggcggtgatggaacaactgtc

SEQ ID NO: 727817 - DNA, 120 bp, Artificial Sequence
  ENSG00000198431_19 (sequence is synthesized)
aaatcagttttagcatgacctttccttgtggattttcttattctcgttgtcaagttttctagggttgaatttttttcttttttctccatggtgttaatgatattagagatgaaaaacgtt

SEQ ID NO: 727818 - DNA, 120 bp, Artificial Sequence
  ENSG00000198431_20 (sequence is synthesized)
agcagttgatttttgtccaaaagcaagtcatggctagagtatccatgcaaggtgtcttgttgcatggaagggatagtttggctcccttggaggctatgtaggcttgtcccgggaaagaga

SEQ ID NO: 727819 - DNA, 120 bp, Artificial Sequence
  ENSG00000198431_21 (sequence is synthesized)
actgtcctgcagctgaaatggactgttctttactgacctgctcagcagtttcttctctcatatattcccaaaacaagtacatctgcgatcaactctagccaaatttgcccctgtgtgcta

SEQ ID NO: 727820 - DNA, 120 bp, Artificial Sequence
  ENSG00000198431_22 (sequence is synthesized)
catgatggatgattattattttaaggtctgtttaggaagggaaatggctacttggccagccattgcctggcatttggtagtatagtatgattctcaccattatttgtcatggaggcagac

SEQ ID NO: 727821 - DNA, 120 bp, Artificial Sequence
  ENSG00000198431_23 (sequence is synthesized)
atacaccagaaatgggggagaaacagtacatatctttctgtctttagtttattgtgtgctggtctaagcaagctgagatcatttgcaatggaaaacacgtaacttgtttaaaagtttttc

SEQ ID NO: 727822 - DNA, 120 bp, Artificial Sequence
  ENSG00000198431_24 (sequence is synthesized)
tggtagctttagctttatgctaaaaaaaataatgacattgggtatctatttctttctaagactacattagtaggaaaataagtcttttcatgcttatgatttagctgttttgtggtaatt

SEQ ID NO: 727823 - DNA, 120 bp, Artificial Sequence
  ENSG00000198431_25 (sequence is synthesized)
gctttttaaaggaagttattaatatcataagttattattaatattttgaacacaggtggatgtgaaggattttcatttaaaaaccaagtggttttgactttttctgttgaatgaacaact

SEQ ID NO: 727824 - DNA, 120 bp, Artificial Sequence
  ENSG00000198431_26 (sequence is synthesized)
gtgccttgtggaatttttgcagaagtgtttatgctttgttagcatttcaacttgcattattataaagaggtattaatgcctcagttatgtgtttgtcaatgtactggctgaggattctat

SEQ ID NO: 727825 - DNA, 120 bp, Artificial Sequence
  ENSG00000198431_27 (sequence is synthesized)
ctcagctgtcttttctaactgtgtaggttgagttttgaacacgtgcttgtggacatcaggcctcctgccagcagttcttgaagcttctttttcattcctgctactctacctgtatttctc

SEQ ID NO: 727826 - DNA, 120 bp, Artificial Sequence
  ENSG00000198431_28 (sequence is synthesized)
agttgcagcactgagtggtcaaaatacatttctgggccacctcagggaacccatgcatctgcctggcatttaggcagcagagcccctgaccgtcccccacagggctctgcctcacgtcct

SEQ ID NO: 727827 - DNA, 120 bp, Artificial Sequence
  ENSG00000198431_29 (sequence is synthesized)
catctcatttggctgtgtaaagaaatgggaaaagggaaaaggagagagcaattgaggcagttgaccatattcagttttatttatttatttttaatttgtttttttctccaagtccaccag

SEQ ID NO: 727828 - DNA, 120 bp, Artificial Sequence
  ENSG00000198431_30 (sequence is synthesized)
tctctgaaattagaacagtaggcggtatgagataatcaggcctaatcatgttgtgattctcttttcttagtggagtggaatgttctatccccacaagaaggattatatcttatagacttg

SEQ ID NO: 727829 - DNA, 120 bp, Artificial Sequence
  ENSG00000198431_31 (sequence is synthesized)
tcttgttcagattctgtatttacccattttattgaaacatatactaagttccatgtatttttgttacaaatcttctgaaaaaaaacaaaacaatgtgaaacattaaaattaaaaggcatt

SEQ ID NO: 727830 - DNA, 120 bp, Artificial Sequence
  ENSG00000198431_32 (sequence is synthesized)
gcacgcgggggacggcctgccggcggggacgacagcattgcgcctgggtgcagcagtgtgcgtctcggggaagggaagatattttaaggcgtgtctgagcagacggggaggcttttccaa

SEQ ID NO: 727831 - DNA, 120 bp, Artificial Sequence
  ENSG00000198431_33 (sequence is synthesized)
acccaggcagcttcgtggcgtgtgcggtttcgacccggtcacacaaagcttcagcatgtcatgtggcttatcaggagggcagacttcaaaagctactaaaaatgaacggccctgaagatc

SEQ ID NO: 727832 - DNA, 120 bp, Artificial Sequence
  ENSG00000198431_34 (sequence is synthesized)
agttcccacagggccttgtgcgacatgggctgcgccgagggcaaggcagtggcggcggccgccccaacggagctgcagacgaaaggcaagaacggcgatggccgccgtaggtcagctaaa

SEQ ID NO: 727833 - DNA, 120 bp, Artificial Sequence
  ENSG00000198431_35 (sequence is synthesized)
gatcatcaccctggtaaaactttgccagagaacccagcaggattcaccagcacggccactgcagactccagagccctgcttcaggcctatatagatggtcactctgtggtcatcttcagt

SEQ ID NO: 727834 - DNA, 120 bp, Artificial Sequence
  ENSG00000198431_36 (sequence is synthesized)
aggtccacatgcacacgctgtactgaggtaaagaagttatttaaatctctgtgtgttccttattttgtgcttgaacttgatcaaacagaggacggtcgggccctggaaggaacgctctcg

SEQ ID NO: 727835 - DNA, 120 bp, Artificial Sequence
  ENSG00000198431_37 (sequence is synthesized)
taggcggccatggtccaaccttgaaggggtaggggacccggaaaccccagggtctggaggagagcaaccaggaagctcttggggtgacttcgttttccttcaggcttatcaggagggcag

SEQ ID NO: 727836 - DNA, 120 bp, Artificial Sequence
  ENSG00000198431_38 (sequence is synthesized)
ccattatgggaaaggcactgtgccagatgccaggagacaaggtcttgctatgttgtacacactagtcttgaactgctggcctgaagcaatcctcctgcctcagcctcccaacatgctggg

SEQ ID NO: 727837 - DNA, 120 bp, Artificial Sequence
  ENSG00000198431_39 (sequence is synthesized)
gctttaagtggagtacagaatatgtggacagctaggttcagcaagggtgggccttgccatgtcaacgcgactgagaagcttggacttcatattgagggccctagagagctactgaaggtt

SEQ ID NO: 727838 - DNA, 120 bp, Artificial Sequence
  ENSG00000198431_40 (sequence is synthesized)
cggaaaccgatctgcccgttgtgtttgtgaaacagagaaagataggcggccatggtccaaccttgaaggtaggagagagtaacgtatctttttaaacgggggatgagctcgttgagctca

SEQ ID NO: 727839 - DNA, 120 bp, Artificial Sequence
  ENSG00000198431_41 (sequence is synthesized)
gacgaaaaacgctcgtgggctagcgcatgtgttaatcgaagttgatgagacgttggacaaatttcacatctcgggaaacttgaaatttctaacgctttttatcttttaaaatagcttttt

SEQ ID NO: 727840 - DNA, 120 bp, Artificial Sequence
  ENSG00000198431_42 (sequence is synthesized)
aaaaatgtcctttttctcctatttccccttcctctttccctcccagttgtaaataacattttttagcagcaatgtaatctgctaaatgttagttgtttagggaagtcctgagaaaagggg

SEQ ID NO: 727841 - DNA, 120 bp, Artificial Sequence
  ENSG00000198431_43 (sequence is synthesized)
acacaaagcttcagcatgtcatgtggtaggtgaggccggcgcctgtaggctggcggtttccttcctcttggtctttgtagagacagtttgcagaacagcggagaaaatggaggacggtcg

SEQ ID NO: 727842 - DNA, 120 bp, Artificial Sequence
  ENSG00000198431_44 (sequence is synthesized)
ccataatgccagttgatgactactggctgtgtttaccagcctcttgtgctagaccttttgtgcagactgtcagagtggtgcagtcttgcccccactgttgctggtttccaggtgttctcc

SEQ ID NO: 727843 - DNA, 120 bp, Artificial Sequence
  ENSG00000198431_45 (sequence is synthesized)
gaagaagctaaatcaagcctctgagtttcaccttggaagggcctggcaggacctggcagtggttgcctgtttgtttagagggagtgtggcttctgctggctgttaggagcccgcaacgct

SEQ ID NO: 727844 - DNA, 120 bp, Artificial Sequence
  ENSG00000198431_46 (sequence is synthesized)
tttaatttgtcttccttgaggtttttattgtttagtgagcacttgctagctgattcttctttttggtcttttagacagggtactctcctggagctaatcatattcacctttagcctttac

SEQ ID NO: 727845 - DNA, 120 bp, Artificial Sequence
  ENSG00000198431_47 (sequence is synthesized)
agtgtgcggatttgccggggtcagactccaagcttgattgtgagttctagcctttgtcagaaatgcagcaagtcatgctaacttgcaagggagtcaacagagggcacgcggtgcctgcgg

SEQ ID NO: 727846 - DNA, 120 bp, Artificial Sequence
  ENSG00000198431_48 (sequence is synthesized)
ggccgggacggaagccccgcccccggcgcagttcccgcctgttagcgggggagaagcaccttacacgctccgctctgcttttgtgccacacagaggacggtcgggccctggaaggaacgc

SEQ ID NO: 727847 - DNA, 82 bp, Artificial Sequence
  ENSG00000198431_49 (sequence is synthesized)
gtggtgtgatctcagttcactgcagccttgacctttcaagctcaagcgatgattcacaacattgtctgtgaccaagcgctct

SEQ ID NO: 727848 - DNA, 120 bp, Artificial Sequence
  ENSG00000198431_50 (sequence is synthesized)
cctccttcacattgctccaccgcacccccttccacatcccaagaaccttcttcttccgctgaccccaagctctgcctttcaccccctacatctgatagtaggcaagagagaaatgtgcag

SEQ ID NO: 727849 - DNA, 120 bp, Artificial Sequence
  ENSG00000198431_51 (sequence is synthesized)
tttaatgaaagtctacttattaaagagtctctactgtctttcaccatatatgtttgacagacttaatgtttaaaataatgggtctaaattttgcttttgtatcttcttaggtttaccata

SEQ ID NO: 727850 - DNA, 80 bp, Artificial Sequence
  ENSG00000198435_0 (sequence is synthesized)
agtgctgcggcgcgtggggaggcgccttgggaccgcgtgggagccgcagccgaaccgagtagggaccgggaccgcgcggc

SEQ ID NO: 727851 - DNA, 80 bp, Artificial Sequence
  ENSG00000198435_1 (sequence is synthesized)
ggcccgcggcccgcgcccggcggcagcatgagccaggccgagctgtccacctgctccgcgccgcagacgcagcgcatctt

SEQ ID NO: 727852 - DNA, 120 bp, Artificial Sequence
  ENSG00000198435_2 (sequence is synthesized)
gtccacctgctccgcgccgcagacgcagcgcatcttccaggaggctgtgcgcaagggcaacacgcaggagctgcagtcgctgctgcagaacatgaccaactgcgagttcaacgtgaactc

SEQ ID NO: 727853 - DNA, 120 bp, Artificial Sequence
  ENSG00000198435_3 (sequence is synthesized)
gttcgggcccgagggccagacggcgctgcaccagtcggtcatcgacggcaacctggagctcgtgaagctgctggtcaagttcggcgccgacatccgcctggccaaccgcgacggctggag

SEQ ID NO: 727854 - DNA, 120 bp, Artificial Sequence
  ENSG00000198435_4 (sequence is synthesized)
cgcgctgcacatcgccgcgttcggtggccaccaggacatcgtgctctatctcatcaccaaggcgaagtacgcggccagcggccggtgatgcccgccgggaccccggaccccggccctgcg

SEQ ID NO: 727855 - DNA, 120 bp, Artificial Sequence
  ENSG00000198435_5 (sequence is synthesized)
cccgcgtcgtctctgctgtaccttcccgccaactacctcggtgcgcgcccggctcgcaggccccgccagaaggcccgtggccacggcgaatacggcgcgtgcgtcccggccccagggtcc

SEQ ID NO: 727856 - DNA, 120 bp, Artificial Sequence
  ENSG00000198435_6 (sequence is synthesized)
ggcccggccgggccggagcagcttcccacggcccccacccgctcgcctgcccgccgcctcgcgggtgggggcggggcgcgggctccagccccttttgaaatttgagtctcgcaaccagca

SEQ ID NO: 727857 - DNA, 120 bp, Artificial Sequence
  ENSG00000198435_7 (sequence is synthesized)
ggctccagccccttttgaaatttgagtctcgcaaccagcaagttcggaatcccgagataccggatcctctgcgcaaaatgttttctcccgaaggtgaaaggcgggcggcgggagccgaag

SEQ ID NO: 727858 - DNA, 120 bp, Artificial Sequence
  ENSG00000198435_8 (sequence is synthesized)
tcaggacccgcccgcaggcccgggacgcgccgatgccggctgcagccgaggagcagccccgaggtccgaggtccgcgccgctggcgcgcggccgaggagacgctcggctgttcgctgttg

SEQ ID NO: 727859 - DNA, 120 bp, Artificial Sequence
  ENSG00000198435_9 (sequence is synthesized)
cgaggagacgctcggctgttcgctgttgctggtgttctaaactatttatcttgtgtgtgtacatttgtgggtggagtttgtgcgcctggtttttttgtttggaaaacactgcgtggtcaa

SEQ ID NO: 727860 - DNA, 120 bp, Artificial Sequence
  ENSG00000198435_10 (sequence is synthesized)
gtggttatgggggggagtgatgcatttttttctagtcttaaaactaaaaacttgagtctaccatttcttggttgcactgaaaataccgcccagcctgatggtgttcccgtgctgtccctc

SEQ ID NO: 727861 - DNA, 120 bp, Artificial Sequence
  ENSG00000198435_11 (sequence is synthesized)
ccccttcccttctccccgcgtctacctccccaccccgttctgttccccctccctccttctccctctccctcaaatccgtgagttttggaagccccagggcctctctcccccgcccctcct

SEQ ID NO: 727862 - DNA, 120 bp, Artificial Sequence
  ENSG00000198435_12 (sequence is synthesized)
ggatgaggccaccatcccccaaaccggcttgttttgcagtttccccaggatcctggaagctcgctggcgctcgagggtggcggggacacgggggggtgggtgaaggttcgttaccttttc

SEQ ID NO: 727863 - DNA, 120 bp, Artificial Sequence
  ENSG00000198435_13 (sequence is synthesized)
tagtgcgttctatcatagttaacggttgcacacttttttaaaaaaagtaaatggatttgccacaattaaatgtcataacatttatgacagaatataaaatattaacatattttaagccaa

SEQ ID NO: 727864 - DNA, 120 bp, Artificial Sequence
  ENSG00000198435_14 (sequence is synthesized)
gttttaggtgtattttttgaatcttggttataaacccaattttaaagggcgatgtatccagcgttgtgaaggcaacagagtgtacccatatttatatttttataaaatacctataagact

SEQ ID NO: 727865 - DNA, 120 bp, Artificial Sequence
  ENSG00000198435_15 (sequence is synthesized)
gtgaatctcttgtgctaatggctgagttaattgaaggatcgttttgcccctttttagcctcccagagcttcgaggactcaattcgaacccgaaatcctgccgtgggggaggggttgcgtc

SEQ ID NO: 727866 - DNA, 120 bp, Artificial Sequence
  ENSG00000198435_16 (sequence is synthesized)
gagacctgggcccggggaggttctcctgcgtcactttctgtcctgaaaggcgcccttcctggtttctgtggctccaattttctatgcagccccacaccccttgttgttttgatcctgaga

SEQ ID NO: 727867 - DNA, 120 bp, Artificial Sequence
  ENSG00000198435_17 (sequence is synthesized)
aataaaagggaggctgaattattcaaatttaaatgaggtttccccttcatggaagtgctgctgacccttcgtgcagaaatggggagcacttgaggacacaggtgggtggaggccctttgt

SEQ ID NO: 727868 - DNA, 120 bp, Artificial Sequence
  ENSG00000198435_18 (sequence is synthesized)
gcgtggctggtcgtattcgggcagccctccgtcgctttttataaaactttgtgtgagaagaatatattgataatgtcagtgaaacaagcagacattgaaatggaggcacagattactcca

SEQ ID NO: 727869 - DNA, 120 bp, Artificial Sequence
  ENSG00000198435_19 (sequence is synthesized)
caaggagttcttctgtatattttttctagatgcaaatacctttttaattatgttaattaatgttaagactttctaggcttatatcgaagctgtgtgtgggtcacggggtgatcactgcta

SEQ ID NO: 727870 - DNA, 120 bp, Artificial Sequence
  ENSG00000198435_20 (sequence is synthesized)
actggataaagtttgtgcagcacattcctgagtgtacgatattgacctgtagcccagcgtgaaaaatttataaataaatttttcattgatctttttatattaaaaaaaagtttcttggtc

SEQ ID NO: 727871 - DNA, 120 bp, Artificial Sequence
  ENSG00000198440_0 (sequence is synthesized)
actgcgcgtgcgcctcaccgcgctggcaccccggcctggcagcctttggggacctgaaccagctgcgcctgcgcagctcgactttctcaggatactgtccctctcccacagaggagctga

SEQ ID NO: 727872 - DNA, 120 bp, Artificial Sequence
  ENSG00000198440_1 (sequence is synthesized)
aggagtaggacagaagaactgtcaaattctggaatccttaaagccatgtccaaggatttggtgacatttggggatgtggctgtaaatttctctcaagaggaatgggaatggctgaaccct

SEQ ID NO: 727873 - DNA, 120 bp, Artificial Sequence
  ENSG00000198440_2 (sequence is synthesized)
gctcagaggaatttgtacaggaaagtgatgttggagaactacaggagcttggtatcattgggagtttctgtttctaagccagatgtgatctcattattggagcaaggaaaagagccctgg

SEQ ID NO: 727874 - DNA, 120 bp, Artificial Sequence
  ENSG00000198440_3 (sequence is synthesized)
atggtgaagaaggagggaacaagaggcccatgccctgattgggagtatgtatttaaaaacagtgaattttcatcaaagcaagagacatatgaagaatcatccaaagttgtgacagtggga

SEQ ID NO: 727875 - DNA, 120 bp, Artificial Sequence
  ENSG00000198440_4 (sequence is synthesized)
gcaagacatcttagttatagccttgactatcccagtttgagagaagactgtcaaagtgaggactggtataagaaccagctgggaagtcaagaggtacatcttagtcaattaatcatcact

SEQ ID NO: 727876 - DNA, 120 bp, Artificial Sequence
  ENSG00000198440_5 (sequence is synthesized)
cataaagaaatccttccagaagttcaaaataaagaatataacaaatcttggcaaacattccaccaggatacaatctttgatatacaacagagttttcccaccaaagaaaaagcacataag

SEQ ID NO: 727877 - DNA, 120 bp, Artificial Sequence
  ENSG00000198440_6 (sequence is synthesized)
catgaaccacaaaagaaaagttaccgaaaaaaatctgttgaaatgaaacataggaaagtctatgtagaaaagaaacttttgaaatgtaatgattgtgagaaagtcttcaaccagagctca

SEQ ID NO: 727878 - DNA, 120 bp, Artificial Sequence
  ENSG00000198440_7 (sequence is synthesized)
tcccttactcttcatcagagaattcatactggagagaaaccctatgcatgtgttgaatgtgggaaaacgttcagccagagtgcaaacttggcgcaacataagagaatacatactggagag

SEQ ID NO: 727879 - DNA, 120 bp, Artificial Sequence
  ENSG00000198440_8 (sequence is synthesized)
tggcgcaacataagagaatacatactggagagaaaccctatgaatgtaaagaatgtaggaaagccttcagccagaatgcacacctggcccaacatcagagagttcatactggagagaaac

SEQ ID NO: 727880 - DNA, 120 bp, Artificial Sequence
  ENSG00000198440_9 (sequence is synthesized)
agccagattgcacacctgactcagcatcagagagttcatactggagagagacctttcgaatgtattgaatgtggaaaggcctttagtaatggttcatttcttgctcagcatcagagaatt

SEQ ID NO: 727881 - DNA, 120 bp, Artificial Sequence
  ENSG00000198440_10 (sequence is synthesized)
tatgtgtgtaatgtgtgtgggaaagcctttagccatcgtggatacctaattgtacatcagagaattcatactggagagagaccctacgaatgtaaggaatgtaggaaagccttcagccag

SEQ ID NO: 727882 - DNA, 120 bp, Artificial Sequence
  ENSG00000198440_11 (sequence is synthesized)
tatgcacaccttgctcaacatcagagagttcatactggagaaaaaccttatgaatgtaaagtatgtaggaaagccttcagccaaattgcataccttgatcaacatcagagggttcatact

SEQ ID NO: 727883 - DNA, 120 bp, Artificial Sequence
  ENSG00000198440_12 (sequence is synthesized)
ggagagaaaccctatgaatgtattgaatgtgggaaggcctttagcaatagttcatcacttgcacaacatcagagaagtcatactggagaaaaaccctatatgtgtaaggaatgtaggaaa

SEQ ID NO: 727884 - DNA, 120 bp, Artificial Sequence
  ENSG00000198440_13 (sequence is synthesized)
agaattcatactggagagaaaccttatgaatgtaatgtttgtgggaaagcatttagctatagtggatctcttactctacatcagagaattcatactggagaaagaccctatgaatgtaaa

SEQ ID NO: 727885 - DNA, 120 bp, Artificial Sequence
  ENSG00000198440_14 (sequence is synthesized)
agaattcatactggagaaagaccctatgaatgtaaagattgcaggaaatctttcaggcagcgtgcacatcttgctcatcatgagagaattcatactatggagtcattcttgactctttcc

SEQ ID NO: 727886 - DNA, 120 bp, Artificial Sequence
  ENSG00000198440_15 (sequence is synthesized)
tctccctcaccctccacatcaaatcagttgccaagacctgtaggtttcatctcctgaatatttctggaatccacctcttgaatccatttccatcccatcatccttgtccaatgcacatta

SEQ ID NO: 727887 - DNA, 120 bp, Artificial Sequence
  ENSG00000198440_16 (sequence is synthesized)
atatatttgacatgggatactcgagtagctttctaattggtctccttgtactcaccattgtctctgtcagatgtccacattgcaaccaaatttgtatttttaaaaatatgtttaatctca

SEQ ID NO: 727888 - DNA, 120 bp, Artificial Sequence
  ENSG00000198440_17 (sequence is synthesized)
tttctccctcattaaaatccctcagtggcatcccatggtttttaagttaaagcacacattcttcaaaatagcctaaaaacctagcctctaacaccttgttccaggttaccttccaaagtt

SEQ ID NO: 727889 - DNA, 120 bp, Artificial Sequence
  ENSG00000198440_18 (sequence is synthesized)
tctatcttgtgtcactatccatctcattctctgaatacttatccaggattaagatacatattccaggatcaaaaagacctgggttccaatctttgcacttccatttcctgccctctaatt

SEQ ID NO: 727890 - DNA, 120 bp, Artificial Sequence
  ENSG00000198440_19 (sequence is synthesized)
tgggggcagcagtttgtgctttgtaagcttcagtcttatttatagtgtgggaataataatggttctacctcagaagttaatagaagaatgaaataatgcatgtaaattgctcagcagcgt

SEQ ID NO: 727891 - DNA, 120 bp, Artificial Sequence
  ENSG00000198440_20 (sequence is synthesized)
gcctagcataaagtaattactcaaaccataatgtaaagtaaaaagataaccatactatacatagaaagccaatcatctcagccatgattatctcagaaataaaaagagatgcagcagctc

SEQ ID NO: 727892 - DNA, 120 bp, Artificial Sequence
  ENSG00000198440_21 (sequence is synthesized)
ctgcggcgcctttgtgagcgcggccgccggccaggatcgagccctggcccgggccctggcccagccccggcctccaaggaccgcgccgaaggaggtgcccactggagggaggaggcgctc

SEQ ID NO: 727893 - DNA, 120 bp, Artificial Sequence
  ENSG00000198440_22 (sequence is synthesized)
taaaagtaggtgaggagggtatctaacagtaggatttacattagagtccatgatatagggtaagatggtggcttgtatcagcattcactggatatttaacagttctaagatgctaatgtc

SEQ ID NO: 727894 - DNA, 79 bp, Artificial Sequence
  ENSG00000198440_23 (sequence is synthesized)
gcattcactggatatttaacagttctaagatgctaatgtcttattttaaaagtgagtgcagtagtgcaatcttggctca

SEQ ID NO: 727895 - DNA, 65 bp, Artificial Sequence
  ENSG00000198440_24 (sequence is synthesized)
acatgtcggccaggcttttctctaactcctgacgtccggtgatccgcctgccttggcctcccaaa

SEQ ID NO: 727896 - DNA, 120 bp, Artificial Sequence
  ENSG00000198440_25 (sequence is synthesized)
caaagtgctgggattacatgcgtgagctaccgtgcctggcctaaaaagtcatttttaataagacagtttactgagatgtattcatcatttacatgtaaacaaaggcaaaatcgaaattaa

SEQ ID NO: 727897 - DNA, 120 bp, Artificial Sequence
  ENSG00000198440_26 (sequence is synthesized)
aaacaaaggcaaaatcgaaattaaaaagaaatcttgaaacaagtcagtaaccaatgatgagtagaaaataaagtataagtttgaacccctgttctaaatctgggtgaatgaattatatca

SEQ ID NO: 727898 - DNA, 120 bp, Artificial Sequence
  ENSG00000198440_27 (sequence is synthesized)
aatctatgtcatttaaaataataaaggttgttaaattactaaaatttcaaaactagtgaagaaaagaaaccaaaactgtaggtcagttctcataaactggcccacaaacatgtttgattc

SEQ ID NO: 727899 - DNA, 120 bp, Artificial Sequence
  ENSG00000198440_28 (sequence is synthesized)
tgtatgcattaagtttaaaatacatatgaataccttcagcagaccatgtgttttccctttctccaacattcaaaccactccctgattctttacatctgacctcttttaatattacttcct

SEQ ID NO: 727900 - DNA, 120 bp, Artificial Sequence
  ENSG00000198440_29 (sequence is synthesized)
gaccccagaattcttttggcatataatcaatgcagtgatcaattcacatgtgactatagatacaaacagaatgacgaaagtttaatggaggatgaaaaagaagacaaataaatattttat

SEQ ID NO: 727901 - DNA, 120 bp, Artificial Sequence
  ENSG00000198440_30 (sequence is synthesized)
cctttatatggtaagacagattcactatcatactgatgtcagtagcccatgaattaatttacagattctacctaacaaaattctaataaattttgtaaggttttaacatgtatgtgtgaa

SEQ ID NO: 727902 - DNA, 120 bp, Artificial Sequence
  ENSG00000198440_31 (sequence is synthesized)
catacatattcatgctgttacacatataaagaaaattataacaaaagtgacctataccatcagtggtttaacagttttggaaaaatttatcgtgctctatacaacaattcattccatatg

SEQ ID NO: 727903 - DNA, 120 bp, Artificial Sequence
  ENSG00000198440_32 (sequence is synthesized)
tgaaagttactttcaagtgctttatctaaatgtggaacaaacagtgattagaggagtctgtgacacactctaatcatggaatgagactggccttcctaaacatgagattcagaagcctcc

SEQ ID NO: 727904 - DNA, 120 bp, Artificial Sequence
  ENSG00000198440_33 (sequence is synthesized)
ccacctcctgtcaacaagtcatagatttgactgtataagaactttataaagcttttatatgatcaaagatagtaaaagatacaatattttttaaacctaagaatgggagaaaattattgc

SEQ ID NO: 727905 - DNA, 120 bp, Artificial Sequence
  ENSG00000198440_34 (sequence is synthesized)
agcacatataaactatggaattcatatccttaacataaaattgctcataaaaatcccttaggaaatgacgcttttctccagctcatagtcaaaggatatgaagaggcaacaggtgaccaa

SEQ ID NO: 727906 - DNA, 120 bp, Artificial Sequence
  ENSG00000198440_35 (sequence is synthesized)
taaatatgtggtaagtactaaatctccctaggatcagaagaaatacagtttaggccaatgaaatactatttttttcaatatcagattaataaaactgcattgaaagcatacaaaaagaga

SEQ ID NO: 727907 - DNA, 120 bp, Artificial Sequence
  ENSG00000198440_36 (sequence is synthesized)
tactatgcactaatttaaaagagcatgagtttgtacaaactctggtaggcaatttgtcaacttcagaattttaattgggaaaagtagaattttattttgaagttcaaaaactcggcacac

SEQ ID NO: 727908 - DNA, 120 bp, Artificial Sequence
  ENSG00000198440_37 (sequence is synthesized)
aatgtctttccctccagattctattatacacatagaacaatgtaaatgattcttaaaaaaaaaaaaaaggtgaggcttttgagtggatgaaataattttgtaaaaggcaaaacagggaag

SEQ ID NO: 727909 - DNA, 120 bp, Artificial Sequence
  ENSG00000198440_38 (sequence is synthesized)
agtgttcatgaattgtagcagaagatgctgcatgttatatgcgaatgaccgaagggttttaaaaatggaatctagtctgcccaaaggatccctagagaagttcaggcttggagttggctt

SEQ ID NO: 727910 - DNA, 120 bp, Artificial Sequence
  ENSG00000198440_39 (sequence is synthesized)
atgtacaggctgtggcttctaagaagacatgatgaaaagcctcttgaagcctttgtatgtgaaagttatgtcagtagcccttgccaaaagcctcctcactctcccctctcttgtataagt

SEQ ID NO: 727911 - DNA, 120 bp, Artificial Sequence
  ENSG00000198440_40 (sequence is synthesized)
aaattgaatgggatccttatttcacaccattaacaagtataagttctaactgaataaaaatctaaatgtaaattactaaagcaaaagtattagaaaaaatatagtgggatatgttaacga

SEQ ID NO: 727912 - DNA, 120 bp, Artificial Sequence
  ENSG00000198440_41 (sequence is synthesized)
aatttgtacaggaaagtgatgttggagaactacaggagcttggtatcattgggtaaggacatgtccccttaattcagaatctgtacatgggactgagctccaatgtaatatttgggaaac

SEQ ID NO: 727913 - DNA, 120 bp, Artificial Sequence
  ENSG00000198440_42 (sequence is synthesized)
ctctgacgtgcttcactaaatttccttttcttgtgcttcccaaaataggttgaatttgtagaattggcagcttcatcttccccattcttattcctcagctccctcccattattctcccac

SEQ ID NO: 727914 - DNA, 120 bp, Artificial Sequence
  ENSG00000198440_43 (sequence is synthesized)
cttcttgatgatgcagaaacttgatcttatttatagacctgcctaattccccttttgttttttgtaagcaggagtttctgtttctaagccagatgtgatctcattattggagcaaggaaa

SEQ ID NO: 727915 - DNA, 120 bp, Artificial Sequence
  ENSG00000198440_44 (sequence is synthesized)
taaacaaatccagaattataattggagatttcagcatgcctctcaatagaacatataaatagaaaaaatagtgaggatattgaagacttgaatattatcaccaacttgacctaactgaca

SEQ ID NO: 727916 - DNA, 120 bp, Artificial Sequence
  ENSG00000198440_45 (sequence is synthesized)
tttgtggaactattcaccccaagaagagtaaaacacacattcttttcaaatgaacccagaacattcacccagacagacaataattccagaccttaaaacacatatcagtaaactgaaaag

SEQ ID NO: 727917 - DNA, 120 bp, Artificial Sequence
  ENSG00000198440_46 (sequence is synthesized)
gactgaagtcatacaaaatatgttttctaaccagaatggatttaaatcaataacagaaaagtaattagaaaacacccaaatatttagaacaaaagagcacacttttcagtaaccatattt

SEQ ID NO: 727918 - DNA, 120 bp, Artificial Sequence
  ENSG00000198440_47 (sequence is synthesized)
ctaagaagaaatcaaaagggaaaataaatattttgagttgaatgaaacttagagaaaagtacatcaaaatgtatgggatgtaccacagtacttggaaagaaatacagtggcactaaatgc

SEQ ID NO: 727919 - DNA, 120 bp, Artificial Sequence
  ENSG00000198440_48 (sequence is synthesized)
caatgttacaaaacaaatgactcaaatcagtgactcctatttccacctaacaaattagaaatagaagagcaatgaaacccaacgttaacacaagaatggaaataataaaaatcagaatgg

SEQ ID NO: 727920 - DNA, 120 bp, Artificial Sequence
  ENSG00000198440_49 (sequence is synthesized)
aagccaatgaaatagaaacctgaaaaacaaaagctggttctttgagaaggtcaatgaaataaacaaaaaaattgcagacaattaaaaaagagattatacaagttatcactatctggaatg

SEQ ID NO: 727921 - DNA, 120 bp, Artificial Sequence
  ENSG00000198440_50 (sequence is synthesized)
attaaatgaataaaagaatgttatgaactttatgcaaataatttgacaatttaaaaattcttgaaagaagctaacaaggtttactgaagaaatactcagttctatattagaaaaatggaa

SEQ ID NO: 727922 - DNA, 120 bp, Artificial Sequence
  ENSG00000198440_51 (sequence is synthesized)
cagagcaagactctgtctcaaaaaaaaatggaatttgtaatttaagccttccaaatattttcagatgtctgtgtttactgcaactgtaattctggtatagtcaaggaacatagtttgcaa

SEQ ID NO: 727923 - DNA, 120 bp, Artificial Sequence
  ENSG00000198440_52 (sequence is synthesized)
tggtatagtcaaggaacatagtttgcaaaataatttttttaatttatcaatatttatactctgtcttggtaaatgtttcatgaacacttaaaaggaatgtgtaccctgcctggattgttt

SEQ ID NO: 727924 - DNA, 120 bp, Artificial Sequence
  ENSG00000198440_53 (sequence is synthesized)
ggaatattttatattaacaaatgtcaaccaggtcaagttggttgattatgttgttgaggtcttctatatcttttttttttgtctacttgttctattaattaccaagaggagtgatgaagt

SEQ ID NO: 727925 - DNA, 120 bp, Artificial Sequence
  ENSG00000198440_54 (sequence is synthesized)
ctccaatgacaattgtcagtttgtctttctctcttttcagttctatcatttttccttgcaattcaatgtgtactcatttagaattacattttcccggccaggcgtggtggctcatgcctg

SEQ ID NO: 727926 - DNA, 72 bp, Artificial Sequence
  ENSG00000198440_55 (sequence is synthesized)
cagctacttgggaggttgaagcaggaaaattgcttgaatccgggtggtggacgagtgagacgaaactctgtc

SEQ ID NO: 727927 - DNA, 120 bp, Artificial Sequence
  ENSG00000198440_56 (sequence is synthesized)
cgaaactctgtcttaaaaaaatcaatcaataaataaatacattttcccagtaaacagaacttttatcattatgtaatctcactctttatccctgattgtattccttgttctgaagtctac

SEQ ID NO: 727928 - DNA, 120 bp, Artificial Sequence
  ENSG00000198440_57 (sequence is synthesized)
ttcatctgatagtaatatagtcatttctgcttttttgttaatgtttgcgtggtgtatctttttcccaccatttttctatgcctttatatttaaagtatgtttctggtagacagcatatag

SEQ ID NO: 727929 - DNA, 120 bp, Artificial Sequence
  ENSG00000198440_58 (sequence is synthesized)
ttggatactgctttttcattcaatcatagaatctctgtcgtttaactggtatatttagaccatttacatttgatatttttaaatatatagttagattaaaatctccaccttgttaactct

SEQ ID NO: 727930 - DNA, 120 bp, Artificial Sequence
  ENSG00000198440_59 (sequence is synthesized)
ccatgttgtatgttccttgctgtacacgtggttgacaaagaaaagggaagatggagctgcgatgttggacatgcctggcccccagctcgactttctcaggatactgtccctctcccacag

SEQ ID NO: 727931 - DNA, 120 bp, Artificial Sequence
  ENSG00000198440_60 (sequence is synthesized)
gtgagcgcggccgccggccaggatcgagccctggcccgggccctggcccagccccggcctccaaggaccgcgccgaaggagctcgactttctcaggatactgtccctctcccacagagga

SEQ ID NO: 727932 - DNA, 120 bp, Artificial Sequence
  ENSG00000198440_61 (sequence is synthesized)
gtgagtgagagagaaatagggagacagaagccattgccaggaaaagctcagcaattctgaaagatttcagttcataattgacgtttcctgggtagctcttcttaaagactcaaagcctgg

SEQ ID NO: 727933 - DNA, 120 bp, Artificial Sequence
  ENSG00000198440_62 (sequence is synthesized)
gaagaaatattgaggcatctttagtatgagctcctcaatttgttctctctgtctatattctctcacaagttacagtcttctctgacagtaatcttctctgataacccattttcctattgt

SEQ ID NO: 727934 - DNA, 120 bp, Artificial Sequence
  ENSG00000198440_63 (sequence is synthesized)
tggatccagatgtcacagcatctccctgtccttgccttttagttttatacaagttgcttggtttcattttttaaaaatccaggtgcctgtaatcccagctctttgggaaaccagagtggg

SEQ ID NO: 727935 - DNA, 120 bp, Artificial Sequence
  ENSG00000198443_0 (sequence is synthesized)
atttctgctgttttcttctagttgtttcacagtttatttttctcagaagaatcttcagaaaacaagaaacatcatcccatttgaggactgctgtgagacacacagttttcaggatgacac

SEQ ID NO: 727936 - DNA, 120 bp, Artificial Sequence
  ENSG00000198443_1 (sequence is synthesized)
acagaatgctgagttccaagtgatctgtcacctgacaatcgactggatgagtaagattacaagtctttgaaattaaatgacacactaaattaactgaagacaagaggaggaggaaagact

SEQ ID NO: 727937 - DNA, 120 bp, Artificial Sequence
  ENSG00000198443_2 (sequence is synthesized)
ggattggctaaactctaacacagagaaagaataaaagtgcattccaccttttatacagatattttcccacaattagctaacttgataattgcctatctattaagataaacaataacaagg

SEQ ID NO: 727938 - DNA, 120 bp, Artificial Sequence
  ENSG00000198443_3 (sequence is synthesized)
aaatagcttttatgtggtgacaacagctcctcagctgagtataaaagtggacatgggataaggagattcccacattcgaaaaactcactgtcttggaaacctacctagaacctccaccct

SEQ ID NO: 727939 - DNA, 120 bp, Artificial Sequence
  ENSG00000198443_4 (sequence is synthesized)
ctgacaccatggttaactcttgttgtggctctgtctgctctgaccagggctgtgatcaaggcctctgccaagagacctgctgccgccccagctgctgccagaccacctgttgctgcccca

SEQ ID NO: 727940 - DNA, 120 bp, Artificial Sequence
  ENSG00000198443_5 (sequence is synthesized)
actacctgctgccagaccacttgctgtcgccccagctgctgccacccagtctgttgtcagaccacctgccgccccagctgtggtgtgtccagctgctgccgcccactctgctgtcagacc

SEQ ID NO: 727941 - DNA, 120 bp, Artificial Sequence
  ENSG00000198443_6 (sequence is synthesized)
acctgccaccccagctgtggtatgtccagctgctgccgtccactctgttgtcagaccacctgccgccccagctgtggtgtgtccagctgctgccgtccactctgctgtcagaccacctgc

SEQ ID NO: 727942 - DNA, 120 bp, Artificial Sequence
  ENSG00000198443_7 (sequence is synthesized)
tgccgtgcaacttgctgccgccccagctgctgtggatcctcttgttgaacctcatattggactatcaaccatgagccagtcaccatcccatgatatgaaagtgtcatttatatcaacttg

SEQ ID NO: 727943 - DNA, 120 bp, Artificial Sequence
  ENSG00000198443_8 (sequence is synthesized)
tccatgtgttaaatggccatcagctttattatcctgttattccactaagtaactggtgaaagggcatccatctacatttaataccactcatttttcccatggatctcttcccagcagcat

SEQ ID NO: 727944 - DNA, 120 bp, Artificial Sequence
  ENSG00000198443_9 (sequence is synthesized)
tcagacctcagatgcatgatgcagttagactaagcctctaagtttctgactgttatgcttgatttgaccttcaaaattacatattaactgttcttcaataaatattatcttaatatcagt

SEQ ID NO: 727945 - DNA, 120 bp, Artificial Sequence
  ENSG00000198445_0 (sequence is synthesized)
gttgagaggccccaagacccagttcctttacagaatcaaccctggggtggctttaggactgggctctttggagctcatccttggacccacagtggagtgctggtccgtgctgatgtcttc

SEQ ID NO: 727946 - DNA, 120 bp, Artificial Sequence
  ENSG00000198445_1 (sequence is synthesized)
agataccaatcaatgggcatttggctccttgcttccactgacctcttgagtactttcaacgatcggtgtcaggagtgccccagctgctgtttctagagcatctctgcaacccacggtggc

SEQ ID NO: 727947 - DNA, 120 bp, Artificial Sequence
  ENSG00000198445_2 (sequence is synthesized)
ctctcctctctctgcgggccatggacagcacagtcccttcagccctggagctgccccagcggctggcactgaacccaagggagagcccgaggagtccagaagaggaggagccccacctgc

SEQ ID NO: 727948 - DNA, 120 bp, Artificial Sequence
  ENSG00000198445_3 (sequence is synthesized)
tgagcagcttggctgcagtccagaccctggccagtgtcatccggccttgctatggcccccacggccggcagaagttcctggtgaccatgaaaggagaaacagtgtgcacggggtgtgcca

SEQ ID NO: 727949 - DNA, 120 bp, Artificial Sequence
  ENSG00000198445_4 (sequence is synthesized)
ctgccatcctcagggccctggagctggagcacccagcagcatggctcctccgggaagcaggacaaacccaggcagagaatagtggggacggcacagccttcgtggttctgctgacggaag

SEQ ID NO: 727950 - DNA, 120 bp, Artificial Sequence
  ENSG00000198445_5 (sequence is synthesized)
ccttgctggaacaggcagagcagctgctgaaggctggcctgcctcgcccgcagctccgggaggcctacgccacggccactgcagaggtcctggccacactgccctccctggccatccaat

SEQ ID NO: 727951 - DNA, 120 bp, Artificial Sequence
  ENSG00000198445_6 (sequence is synthesized)
ctctggggcctttggaagatccatcctgggccctccattctgtgatgaatacccacaccctgtcccccatggaccacttgaccaagctggtggcccacgcctgctgggctatcaaggaac

SEQ ID NO: 727952 - DNA, 120 bp, Artificial Sequence
  ENSG00000198445_7 (sequence is synthesized)
tagacggcagcttcaagcctgagcgtgttggggtgtgcgcgctgcccggggggacactggaggattcctgcctcctcccggggttagcaatatctgggaagctctgtgggcaaatggcca

SEQ ID NO: 727953 - DNA, 120 bp, Artificial Sequence
  ENSG00000198445_8 (sequence is synthesized)
gtggctctctttgcttgcccctttggtcctgcccatccaaatgcaccagcaacggcccgtctttctagtcctgctgatctagctcaatttagtaaaggaagcgatcaattactagaaaag

SEQ ID NO: 727954 - DNA, 120 bp, Artificial Sequence
  ENSG00000198445_9 (sequence is synthesized)
caagtaggccagctagcagctgcaggaattaatgtggcagtggtgttgggggaggtcgacgaggagaccctcacactggcggacaagtatggcatcgtggtgattcaagctaggtcttgg

SEQ ID NO: 727955 - DNA, 120 bp, Artificial Sequence
  ENSG00000198445_10 (sequence is synthesized)
atggagatcatttacctgagtgaggtgttggacacacctctgctgcctcgtctgctccctccccagaggccaggcaagtgccagagggtttacaggcaggagctgggagatggtttggct

SEQ ID NO: 727956 - DNA, 120 bp, Artificial Sequence
  ENSG00000198445_11 (sequence is synthesized)
gtggtatttgaatgggaatgtacaggcacacctgccctcactgtggttctcaggggagccaccacccaggggctgcggagtgcagagcaggccgtctaccacggcattgatgcctatttc

SEQ ID NO: 727957 - DNA, 120 bp, Artificial Sequence
  ENSG00000198445_12 (sequence is synthesized)
cagctatgtcaagatcccagactgattccaggagctggggccacagaaatggctttggcaaaaatgctttctgataaaggaagcagattggaagggcccagtgggcctgcattcctagca

SEQ ID NO: 727958 - DNA, 120 bp, Artificial Sequence
  ENSG00000198445_13 (sequence is synthesized)
tttgcctgggccctgaagtatcttcctaaaactttggcagagaatgcaggcttagctgtctcagacgtgatggcagaaatgagtggagtgcaccaaggtgggaacctcctaatgggtgtg

SEQ ID NO: 727959 - DNA, 120 bp, Artificial Sequence
  ENSG00000198445_14 (sequence is synthesized)
ggaactgaagggataataaatgtggcccaggaaggggtgtgggacaccctaatagtcaaagcccaaggatttcgagcagtggctgaggtggtgctacagctcgtgactgtagatgaaatc

SEQ ID NO: 727960 - DNA, 120 bp, Artificial Sequence
  ENSG00000198445_15 (sequence is synthesized)
gtagtggccaagaaaagtcccacacatcaggagatctggaatcctgactctaagaagacaaagaaacacccacctcctgtggaaacaaaaaaaatccttggattgaataactagtgatac

SEQ ID NO: 727961 - DNA, 120 bp, Artificial Sequence
  ENSG00000198445_16 (sequence is synthesized)
cctcaataaaacagggattgccaagaagggaacaatcaccccaaaaatgaatgtttgcctttattccgtgtttggtacttgattcactttctttaaataaaaacatgaaggaacataaaa

SEQ ID NO: 727962 - DNA, 120 bp, Artificial Sequence
  ENSG00000198453_0 (sequence is synthesized)
gttgtcctcggaaacgtcgctggcgcggagggatggttcggcgctttaggcgtctgtcacagacctatctgcgggtcgccttcacccagcatctcagaaactgcgcgcgggatgaacatt

SEQ ID NO: 727963 - DNA, 120 bp, Artificial Sequence
  ENSG00000198453_1 (sequence is synthesized)
cgggtgtttccggcaggtgacgctgccgagtccccgcagcagggggcgagcaagggactcgcggttgacgggacacggatcctctaaggcccagagtgtcccgagtagcggcagtgggga

SEQ ID NO: 727964 - DNA, 120 bp, Artificial Sequence
  ENSG00000198453_2 (sequence is synthesized)
gtgctcagggtacgctaatgatctgtgtcttgtaaagagcatattgctgggcttacatccgtttatcttgtttgactgttattttaataggtcctggttccacaaggataaaacacatct

SEQ ID NO: 727965 - DNA, 120 bp, Artificial Sequence
  ENSG00000198453_3 (sequence is synthesized)
gcagtgcaaatagaagtctgaggaacaggtgtcttatcatggaaggagacctgacctgagacctgccttagaggctggagagtcctgaaagagagtggaccctggagttgctggagcttg

SEQ ID NO: 727966 - DNA, 120 bp, Artificial Sequence
  ENSG00000198453_4 (sequence is synthesized)
tcttgacccttctgcccagagcaggcagggtctgaatgacatctcaatcttcagtgatcagcaatagctgtgtgacaatggagcgtttgagccacatgatggaaaggaaagcttggtgtt

SEQ ID NO: 727967 - DNA, 120 bp, Artificial Sequence
  ENSG00000198453_5 (sequence is synthesized)
ctcaagagtctgccctttccgaggaagaagaggatacaaccaggcctcttgaaacagtgacatttaaggatgtggctgttgaccttacccaggaggagtgggagcaaatgaaacctgctc

SEQ ID NO: 727968 - DNA, 120 bp, Artificial Sequence
  ENSG00000198453_6 (sequence is synthesized)
aaagaaacttgtatcgagatgtgatgctggagaactacagcaacctagtcacagtgggctgtcaagtcaccaaaccggatgtgatattcaagttggagcaagaagaggagccctgggtga

SEQ ID NO: 727969 - DNA, 120 bp, Artificial Sequence
  ENSG00000198453_7 (sequence is synthesized)
tggaggaagaaatgtttgggaggcactgtccagaagtttgggaagttgatgaacagatcaagaagcaacaggaaacacttgtgaggaaagtcacatccatctccaagaaaattctgataa

SEQ ID NO: 727970 - DNA, 120 bp, Artificial Sequence
  ENSG00000198453_8 (sequence is synthesized)
aggaaaaagtcattgaatgtaaaaaagttgcgaaaatatttcctctgagttcagacattgttacttcaagacaaagcttctatgactgtgactcacttgataagggtttggaacataatt

SEQ ID NO: 727971 - DNA, 120 bp, Artificial Sequence
  ENSG00000198453_9 (sequence is synthesized)
tagacttacttagatatgagaaaggctgtgtaagagagaaacagagtaatgagtttgggaaaccattttaccattgtgcatcctatgttgtaaccccctttaagtgtaatcagtgtggac

SEQ ID NO: 727972 - DNA, 120 bp, Artificial Sequence
  ENSG00000198453_10 (sequence is synthesized)
aagacttcagtcataaatttgacctcattagacatgagcgaattcatgctggagagaaaccttacgaatgtaaagaatgtggaaaagccttcagtaggaaggaaaatcttattacacatc

SEQ ID NO: 727973 - DNA, 120 bp, Artificial Sequence
  ENSG00000198453_11 (sequence is synthesized)
agaaaattcatactggggaaaaaccgtataagtgtaatgaatgtggaaaagctttcattcagatgtcaaaccttattagacaccacagaattcatactggggagaaaccttatgcatgta

SEQ ID NO: 727974 - DNA, 120 bp, Artificial Sequence
  ENSG00000198453_12 (sequence is synthesized)
acagaattcatactggggagaaaccttatgcatgtaaggattgttggaaagccttcagtcagaaatcaaatctcattgaacatgagcgaattcacactggagagaaaccctatgaatgta

SEQ ID NO: 727975 - DNA, 120 bp, Artificial Sequence
  ENSG00000198453_13 (sequence is synthesized)
ttattgagcacgagaaaattcatactggggagaaaccttatgcatgtaatgaatgtggtagagctttttctcgaatgtcatctgttacgctacatatgagaagtcacacaggggagaaac

SEQ ID NO: 727976 - DNA, 120 bp, Artificial Sequence
  ENSG00000198453_14 (sequence is synthesized)
cctataaatgtaataaatgtggaaaagctttctctcaatgctcagtatttattatacatatgagaagtcacactggtgagaaaccctatgtatgtagtgaatgtgggaaagccttctctc

SEQ ID NO: 727977 - DNA, 90 bp, Artificial Sequence
  ENSG00000198453_15 (sequence is synthesized)
aaaagccttcagcaggaaagaaaatctcattacacatcagaaaattcacactggagagaaaccttatgaatgcagtgaatgtgggaaagc

SEQ ID NO: 727978 - DNA, 120 bp, Artificial Sequence
  ENSG00000198453_16 (sequence is synthesized)
ctggagagaaaccttatgaatgcagtgaatgtgggaaagcttttattcagatgtcaaacctcattcgacaccagagaattcatacgggtgagaaaccctatgcatgtacagtatgtggaa

SEQ ID NO: 727979 - DNA, 120 bp, Artificial Sequence
  ENSG00000198453_17 (sequence is synthesized)
atcaaacctcactgaacatgagaaaattcatactggagagaaaccttatcattgtaatcaatgtgggaaagctttcagtcagagacaaaatcttcttgagcatgaaaaaattcatactgg

SEQ ID NO: 727980 - DNA, 120 bp, Artificial Sequence
  ENSG00000198453_18 (sequence is synthesized)
agagaaaccattcaaatgtaatgaatgtggtaaagccttctctcgaatctcatccctcactcttcatgtgagaagtcacacaggggagaaaccctatgaatgtaataaatgtgggaaagc

SEQ ID NO: 727981 - DNA, 120 bp, Artificial Sequence
  ENSG00000198453_19 (sequence is synthesized)
cttttctcagtgctcattacttattatacatatgagaagtcatactggtgagaaaccctttgaatgtaatgaatgtgggaaagcattctctcaaagagcatccctttctatacataagag

SEQ ID NO: 727982 - DNA, 120 bp, Artificial Sequence
  ENSG00000198453_20 (sequence is synthesized)
aggtcatacaggtgagagacaccaagtatattaaatgaaagaaggcctcttaaattcaacccatgttttacttaaaatatcttggcataagctcaaaaaagccaggatctttatggaaaa

SEQ ID NO: 727983 - DNA, 120 bp, Artificial Sequence
  ENSG00000198453_21 (sequence is synthesized)
attttaatactttgttaaaaggtgtaagactggaataaatggaaagaaataccatatacatagatggaaaaacccagtattataaaaacctcaattctgaaaatctatagactgaatgca

SEQ ID NO: 727984 - DNA, 120 bp, Artificial Sequence
  ENSG00000198453_22 (sequence is synthesized)
gttccaaacaaaatcaactaagaattttctaggatctttcaaaaatgattataaaattcatgtgaaatagaagtgtatgaattgctgcgacaattttgaaaagaatagaggaaacaccct

SEQ ID NO: 727985 - DNA, 120 bp, Artificial Sequence
  ENSG00000198453_23 (sequence is synthesized)
cactgtatgatataaagttatagtcatttaaaaatgtgtgatattagtacattagtaggtaaatgagcagattttaaagaatagaatatccagaagcagattcatgaatatatgtgaact

SEQ ID NO: 727986 - DNA, 120 bp, Artificial Sequence
  ENSG00000198453_24 (sequence is synthesized)
cagtgtatgttagacctgacatcatgaattagtagggaaatgatgacctagtcaataaaattgctgggaatatttgactctccgtattggagaaaataaaattacaacattacgacatac

SEQ ID NO: 727987 - DNA, 83 bp, Artificial Sequence
  ENSG00000198453_25 (sequence is synthesized)
tgaactcctgacttcaaaagtgatcgccctctttggcctcccaaagtgctggggtttacaggcttgagccactgcacctggcc

SEQ ID NO: 727988 - DNA, 120 bp, Artificial Sequence
  ENSG00000198453_26 (sequence is synthesized)
aggcttgagccactgcacctggccaaaaaattaacattctaaaggatttaaatactggaatttgaaaagccaaactgtgaaaccattgggagaaaatagatgatattgtctatgacgttg

SEQ ID NO: 727989 - DNA, 120 bp, Artificial Sequence
  ENSG00000198453_27 (sequence is synthesized)
tctatgacgttgaggccaaggagctttttttttttttttttcaagacaaaaggactctgtaattccacttctaggtatatatacatcctatagaaactcacaaataatgcataagaaata

SEQ ID NO: 727990 - DNA, 78 bp, Artificial Sequence
  ENSG00000198453_28 (sequence is synthesized)
gcataagaaatatatatataatatatgtatgtatgtatagccagatgagaagaagataacttgaggtcaggagttcaa

SEQ ID NO: 727991 - DNA, 120 bp, Artificial Sequence
  ENSG00000198453_29 (sequence is synthesized)
aaacatagcaagaccccatctcttaaaaaaaaagaaatatatagacatatatctgcattgaaaacaacctaaatattcatcagtggggtaatggatgaataaaatatgatatattcaaat

SEQ ID NO: 727992 - DNA, 120 bp, Artificial Sequence
  ENSG00000198453_30 (sequence is synthesized)
gatagaatagtatacagcacttaaaagcagtgaaccagatccatattgtgtaacatggatagttaaaacaatgttgaatgaaaaaaatcaaaatacaaatgaaacattgtgtaataatat

SEQ ID NO: 727993 - DNA, 120 bp, Artificial Sequence
  ENSG00000198453_31 (sequence is synthesized)
ttatgtaaattggaatgaaatcatttataaagaacaactgtttctattattgaaaattgtatgtaaaactatttaaaatagaatagaaggatacacacccaattattgatagcattgtct

SEQ ID NO: 727994 - DNA, 120 bp, Artificial Sequence
  ENSG00000198453_32 (sequence is synthesized)
ctggagattgaatttgaggctgttgattaaaaggagactttagctttgcttgtagtttttataccttaaaaagactggtagcatataaaataaatcttaaaagctaattatacacaatga

SEQ ID NO: 727995 - DNA, 120 bp, Artificial Sequence
  ENSG00000198453_33 (sequence is synthesized)
ggagcggtctgggaatgttaggaggtctagggtatcgcggccctgcgtcctcttgtctggactaaaagtccgggcagttctccccggacctggattgtgggcccagcgacaggtgcttgg

SEQ ID NO: 727996 - DNA, 120 bp, Artificial Sequence
  ENSG00000198453_34 (sequence is synthesized)
cgatctgtgcccgctgtgcctgcggggctgtggtgggagtcctgtctgcacggtattctgtgtggctgtgcataacccagaagaggagagaactgctgtgcgtctgaagtgatggcggag

SEQ ID NO: 727997 - DNA, 120 bp, Artificial Sequence
  ENSG00000198453_35 (sequence is synthesized)
gacagggctttctgatactaagccaaatgtgatctccttattggagcagaagaaagagccctggatggttaagaggaaggagacaaaagaatggtgtccagattgggagtttggaagaga

SEQ ID NO: 727998 - DNA, 120 bp, Artificial Sequence
  ENSG00000198453_36 (sequence is synthesized)
aaccaagaatttatctccaaaggaaaacatttatgaaattagatcaccacaacaggagaaggccagagttatcagagaaatcagatgccaggtggagagacaacagggtcatcaggaggg

SEQ ID NO: 727999 - DNA, 120 bp, Artificial Sequence
  ENSG00000198453_37 (sequence is synthesized)
gaaagcaaagggctggaacgtcccgggctgcggagctcgctgggttgggatggactcgttcagacctgagtgctaggacgccgaagggggcggtgaggcgtcccggcgaggagctggggt

SEQ ID NO: 728000 - DNA, 120 bp, Artificial Sequence
  ENSG00000198453_38 (sequence is synthesized)
gggagaacccagaagaggagagaactgctgtgcgtctgaagtgatggcggagggcttgaagttcaaagatgtggtcatttacttctctcaaaaggagtgggaatgcttgcactctgctca

SEQ ID NO: 728001 - DNA, 120 bp, Artificial Sequence
  ENSG00000198453_39 (sequence is synthesized)
aacacccatgttaagaggtagaatgctaatgttagaaatcccatgtgtgctttgatcttcccaatctaaatccccttctttagctgtcagaggtatctgttattccgaatcttgtgtttg

SEQ ID NO: 728002 - DNA, 120 bp, Artificial Sequence
  ENSG00000198453_40 (sequence is synthesized)
gcatttccttgtttttctttacagtcttaaccatatgtgtttattttcctgttctaatttgatgtcaagaaatcatactgtttggatttttctgcaactctattacttgtcctccaacga

SEQ ID NO: 728003 - DNA, 120 bp, Artificial Sequence
  ENSG00000198453_41 (sequence is synthesized)
gtgttcaagagatccattcacattgcaaacttatcctactgtatagccatccattgtaagaatacattttttcatttatattgtgtacattactccagtgaacattcttgaactcctctt

SEQ ID NO: 728004 - DNA, 120 bp, Artificial Sequence
  ENSG00000198453_42 (sequence is synthesized)
tttgtatcctgtgcaagaatttctgtatgtaactaaaaaaggaattgctagctcataggttatatgcattttcagccttactcaacattgcccagttgttttctaaagtgtttattatac

SEQ ID NO: 728005 - DNA, 120 bp, Artificial Sequence
  ENSG00000198453_43 (sequence is synthesized)
tcatttactattccttttacttcgtatcctcaccaacacttggtattattaaattttaaatttttacgcacttgggtatgagttgatatgtattattttgatttcaaatttgcatatttt

SEQ ID NO: 728006 - DNA, 120 bp, Artificial Sequence
  ENSG00000198453_44 (sequence is synthesized)
ggtactaaatgaggttgagccccccacccccgcaactttcatgctcattggcattcatgttttctcttttctgaagtacaattttatgtcatttctaatttttctattgatttttatatt

SEQ ID NO: 728007 - DNA, 120 bp, Artificial Sequence
  ENSG00000198453_45 (sequence is synthesized)
tccagagtttttgttccttttaatgctttgtatgcatttcttaaatattgtggattgtcgtccttgccggttatatgtgctgtgcatgctttcttactttaacctttaaatgatggtaga

SEQ ID NO: 728008 - DNA, 120 bp, Artificial Sequence
  ENSG00000198453_46 (sequence is synthesized)
tattctcaattttaatgccttcaaatttaatgctgttttctttaatttatttacatcttgtgtatgaaatctctcctctcctaagagtaaagatattatccctattttctataaatgata

SEQ ID NO: 728009 - DNA, 120 bp, Artificial Sequence
  ENSG00000198453_47 (sequence is synthesized)
gccagtatggcctgttttcctaatggaacttccctattgaattgctttctccattttcttttatgttgtcttaaagattttgtccatgaatttcacaaatggtgtatttatttttggttt

SEQ ID NO: 728010 - DNA, 120 bp, Artificial Sequence
  ENSG00000198453_48 (sequence is synthesized)
ttactgggtaactttatctgcccctccgtacaccccctgccccgccaaacacacaattggccttctggaattcttatgttcttttttctgagtttgtcccaagtgcttttcaagtacctg

SEQ ID NO: 728011 - DNA, 120 bp, Artificial Sequence
  ENSG00000198453_49 (sequence is synthesized)
gatgagttaatgtttcttgctcaccaaaagaatggtttgtctcttgtgaagttggaaattggctgttccagcaggcacctttatcttcattattttcatacctcccttcttggagctgtg

SEQ ID NO: 728012 - DNA, 120 bp, Artificial Sequence
  ENSG00000198453_50 (sequence is synthesized)
atttgatgaagtggaaatgaatggttaagtggaatcacatattgcaaactttttttctaattagacaagaaaggaattaatgttgatttattgtggtgctctgaccctcactccttcttc

SEQ ID NO: 728013 - DNA, 120 bp, Artificial Sequence
  ENSG00000198453_51 (sequence is synthesized)
tacttccatgcagtgcacagcccatagagaatatcagtggcttcatactggagagaaatcctgtgaatgcaggaaatgtaagaatgcttttaggtaccagtcatgtcctattcaacatga

SEQ ID NO: 728014 - DNA, 120 bp, Artificial Sequence
  ENSG00000198453_52 (sequence is synthesized)
aataattcataataaggaaaaagaacctgaatgtggagaatgtaggaaaatctttaatagtggatcagacttgattaagcatcagacgcttcatgaaagcaaaaaacatagtgaaaataa

SEQ ID NO: 728015 - DNA, 120 bp, Artificial Sequence
  ENSG00000198453_53 (sequence is synthesized)
caaatgtgcctttaatcatgattctggaattactcaacctcagagcattaatactggagagaaacctcataaatgtaaggaatgtgggaaagcctttcgttccagctcacaaattagtca

SEQ ID NO: 728016 - DNA, 120 bp, Artificial Sequence
  ENSG00000198453_54 (sequence is synthesized)
gcatcagaggatgcatcttggtgagaaaccctataagtgtagggagtgtgggaaagcctttccatccactgcacagcttaatctacatcagaggatccatactgatgagaaatactatga

SEQ ID NO: 728017 - DNA, 120 bp, Artificial Sequence
  ENSG00000198453_55 (sequence is synthesized)
aagtaaggcgtgtgggaaggcctttacccgtccctcacacctttttcgacatcaaagaatccatacgggtgagaaaccccataaatgtaaggaatgtggaaaggcttttcgttatgacac

SEQ ID NO: 728018 - DNA, 120 bp, Artificial Sequence
  ENSG00000198453_56 (sequence is synthesized)
tgtggaaaggtgtacagttgtgcctcacagctgagtctacatcaaagaattcatactggtgagaaaccccatgaatgtaaggaatgtgggaaagcctttatctctgattcacatcttatt

SEQ ID NO: 728019 - DNA, 120 bp, Artificial Sequence
  ENSG00000198453_57 (sequence is synthesized)
cgacatcagagtgtccatactggggagaaaccctgtaagtgtaaggaatgtgggaagtcctttcgtcgtggctcagaacttacccgacatcagagagctcatactggtgaaaaaccctat

SEQ ID NO: 728020 - DNA, 120 bp, Artificial Sequence
  ENSG00000198453_58 (sequence is synthesized)
gagtgtaaggaatgtgaaaaggcctttacttgtagcacagaacttgttcgacatcaaaaagttcacactggggagagaccccataagtgtaaggaatgtgggaaggctttcattcgaagg

SEQ ID NO: 728021 - DNA, 120 bp, Artificial Sequence
  ENSG00000198453_59 (sequence is synthesized)
tcagaactcacacatcatgagagaagtcacactggtgagaaaccctacgagtgtaaggagtgtgggaagccctttggtggtggctcagaacttagttgacaccagaaaattcatactggt

SEQ ID NO: 728022 - DNA, 120 bp, Artificial Sequence
  ENSG00000198453_60 (sequence is synthesized)
gagaaaccatatgaatgtcagcagtgtggaaaggccttcattcgggcctcacaccttagtcaacatcaaagaattcattcaggacagaggagtgaatgaagaaatgagggatggctcaga

SEQ ID NO: 728023 - DNA, 120 bp, Artificial Sequence
  ENSG00000198453_61 (sequence is synthesized)
atttgattgacatgagaaagttcatactgatttggaaaaaaaaacttatgattctaagtgtgagacaccttataaatgttaggaattagcagggatttatttatgtttcagaatttatta

SEQ ID NO: 728024 - DNA, 120 bp, Artificial Sequence
  ENSG00000198453_62 (sequence is synthesized)
cacatcatgatacaactggtgaaaaattgaagacctccatgaatgtaaagaaagtagggaggcctttttggtggctcagaacgaagtcaacctcagggaattcaaatgggggagaggagg

SEQ ID NO: 728025 - DNA, 120 bp, Artificial Sequence
  ENSG00000198453_63 (sequence is synthesized)
gcagtgaatatgctgagaggagttaatcattcagacctttatcagcagcagagtcattagcccttaggggaaatcagatgattcaaaatataaatgcaggccgggcccggtggctcccgc

SEQ ID NO: 728026 - DNA, 120 bp, Artificial Sequence
  ENSG00000198453_64 (sequence is synthesized)
ttgggaggccgaggtgagtggattgcttgagtcctggagtttgagaccaacatgggcaacatggtgaaacactgtctctacaaaaaatatttaaaaaattagccaggtgtggtggtgcat

SEQ ID NO: 728027 - DNA, 120 bp, Artificial Sequence
  ENSG00000198453_65 (sequence is synthesized)
ccctgagtaccagctaaacaagttcttgtatgttgtgatcacaatgcctaattttgatgacttcaaattaattagcattatgtttttacaggaaacagtgacatttaaggatgtggctgt

SEQ ID NO: 728028 - DNA, 120 bp, Artificial Sequence
  ENSG00000198453_66 (sequence is synthesized)
ttttaatagcttggtgttctcaagagtctgccctttccgaggaagaagaggatacaaccaggcctcttagatggagtctcactatgttaccaaggctgttctcgaactcctggcctcaag

SEQ ID NO: 728029 - DNA, 87 bp, Artificial Sequence
  ENSG00000198453_67 (sequence is synthesized)
gattataggaaacagtgacatttaaggatgtggctgttgaccttacccaggaggagtgggagcaaatgaaacctgctcaaagaaact

SEQ ID NO: 728030 - DNA, 120 bp, Artificial Sequence
  ENSG00000198455_0 (sequence is synthesized)
gggctggggtgtgtttatttgggtatatacaatgagtcatggattaaaattgcttccagcggatagatacctaggtgttccacagcattactgaacaagctgtcgtcatttccccattac

SEQ ID NO: 728031 - DNA, 120 bp, Artificial Sequence
  ENSG00000198455_1 (sequence is synthesized)
ctcagaagacccccttaattacttacttatattaactgtagaacgtatttatgcataccaggctctacctctgggctttctattctgttccagagacccagtaccagaatatttaaatca

SEQ ID NO: 728032 - DNA, 120 bp, Artificial Sequence
  ENSG00000198455_2 (sequence is synthesized)
ctgtggcgttaaatacgttttaatatctgatagggccagtttctgcgcattgcacatttttttttcccctttcaggaacgtgttcaggcccgcggcagggggcgggatcgcgcctcctcc

SEQ ID NO: 728033 - DNA, 120 bp, Artificial Sequence
  ENSG00000198455_3 (sequence is synthesized)
tcggctctggttccagccgagcctctcggacgcagagatggaaatcccgaagctgctcccggctcgcgggacactacagggcggcggcggcggcggtatccccgcgggtggcggccgagt

SEQ ID NO: 728034 - DNA, 80 bp, Artificial Sequence
  ENSG00000198455_4 (sequence is synthesized)
ccaccgaggccctgactcgccggctggccaggtccccacgcgccgcctcctgctgctccggggcccccaagatggcgggc

SEQ ID NO: 728035 - DNA, 120 bp, Artificial Sequence
  ENSG00000198455_5 (sequence is synthesized)
ccctggcccaagcctgttggcgccgaggaccgatcaacctagcggcggcggcggcggcggcggcgacgacttcttcctggtgctgcttgacccggtgggtggcgacgtggagaccgcggg

SEQ ID NO: 728036 - DNA, 120 bp, Artificial Sequence
  ENSG00000198455_6 (sequence is synthesized)
ctccggtcaggccgcagggcctgtgttgagggaggaggccgaggagggcccggggctccaggggggcgagagcggcgcgaatcccgcggggcccactgcgctaggcccccgctgcctgtc

SEQ ID NO: 728037 - DNA, 120 bp, Artificial Sequence
  ENSG00000198455_7 (sequence is synthesized)
cgcggttcccactccggccccgatctccgcccccggccccgccgcggccttcgcgggcacagtcactatccacaaccaggacctgctgttgcgctttgagaacggcgtcctcaccctggc

SEQ ID NO: 728038 - DNA, 120 bp, Artificial Sequence
  ENSG00000198455_8 (sequence is synthesized)
cacgcccccaccacacgcctgggagccaggggccgctcctgcccagcagcccgggtgtctgatcgccccgcaagctgggttcccgcatgccgcgcacccgggtgactgcccagagctgcc

SEQ ID NO: 728039 - DNA, 120 bp, Artificial Sequence
  ENSG00000198455_9 (sequence is synthesized)
tcccgcatgccgcgcacccgggtgactgcccagagctgccgccagacctcctgctagctgagccggccgaacccgcgccagctccggcgcctgaggaggaggcggagggcccggccgccg

SEQ ID NO: 728040 - DNA, 120 bp, Artificial Sequence
  ENSG00000198455_10 (sequence is synthesized)
ggtgctgtacttgtgccccgaggcgcagtgcgggcaaaccttcgccaagaagcaccagctgaaggtgcacctgctgacgcacagcagcagccagggccagaggcccttcaaatgccccct

SEQ ID NO: 728041 - DNA, 120 bp, Artificial Sequence
  ENSG00000198455_11 (sequence is synthesized)
gggtggctgcggctggaccttcaccacctcttacaagctcaagaggcacctgcagtcgcacgacaaactgcggccctttggctgcccggcagagggctgtggcaagagcttcaccacagt

SEQ ID NO: 728042 - DNA, 120 bp, Artificial Sequence
  ENSG00000198455_12 (sequence is synthesized)
gtacaacctcaaggcgcacatgaagggccatgagcaggagaactcattcaaatgcgaggtgtgcgaggagagcttccccacgcaggccaaactcagcgcccaccagcgcagccacttcga

SEQ ID NO: 728043 - DNA, 120 bp, Artificial Sequence
  ENSG00000198455_13 (sequence is synthesized)
accggagaggccttaccagtgcgcgttttctggctgcaagaagacatttatcacagtgagtgctctgttttcccataaccgcgcccatttcagggaacaggaactgttttcctgctcttt

SEQ ID NO: 728044 - DNA, 120 bp, Artificial Sequence
  ENSG00000198455_14 (sequence is synthesized)
tcctggctgcagcaaacaatatgacaaggcttgtaggctgaaaattcacctgcggagtcacaccggcgagagacctttcctttgtgactttgatggctgtggctggaacttcactagcat

SEQ ID NO: 728045 - DNA, 120 bp, Artificial Sequence
  ENSG00000198455_15 (sequence is synthesized)
gtccaaactcttaaggcacaaaagaaagcacgacgatgaccggaggttcatgtgccctgtggaaggctgtgggaaatctttcacgagggcggaacatctgaaaggccacagcataaccca

SEQ ID NO: 728046 - DNA, 120 bp, Artificial Sequence
  ENSG00000198455_16 (sequence is synthesized)
cctgggcacaaagcctttcgtgtgtcctgtggcaggctgctgtgccaggttctctgctcgcagtagcctctacattcactccaagaaacacctgcaggatgtggacacttggaaaagccg

SEQ ID NO: 728047 - DNA, 120 bp, Artificial Sequence
  ENSG00000198455_17 (sequence is synthesized)
ttgcccgatctcctcttgtaataaactcttcacatccaagcacagcatgaagacgcacatggttaaaaggcataaggtgggccaggatctcttagctcagctagaagcagcaaattctct

SEQ ID NO: 728048 - DNA, 120 bp, Artificial Sequence
  ENSG00000198455_18 (sequence is synthesized)
cacacccagcagtgaacttaccagccagagacagaatgatctcagtgatgcagagatagtgtctctcttctctgatgtacctgacagtacttctgctgcattgctggacacagcattggt

SEQ ID NO: 728049 - DNA, 120 bp, Artificial Sequence
  ENSG00000198455_19 (sequence is synthesized)
gaactctggaatcttgactattgatgtggcttctgtgagctcgactctggcagggcacctccctgctaataataataattccgtagggcaggctgtggaccctccgtccttgatggccac

SEQ ID NO: 728050 - DNA, 120 bp, Artificial Sequence
  ENSG00000198455_20 (sequence is synthesized)
cagcgaccctcctcaaagtctggatacctctctcttttttggaacggcggccactggttttcagcagagctccttaaatatggatgaggtctcaagtgtaagtgtggggccattgggatc

SEQ ID NO: 728051 - DNA, 120 bp, Artificial Sequence
  ENSG00000198455_21 (sequence is synthesized)
tctggactctttggccatgaaaaactccagtccagagcctcaggctttgacacccagcagtaagctaacagtggacacagatgctctgactccttcgagcaccctttgtgaaaacagtgt

SEQ ID NO: 728052 - DNA, 120 bp, Artificial Sequence
  ENSG00000198455_22 (sequence is synthesized)
ctcagaactactgacaccaaccaaagcggagtggaacgtacatcctgactctgacttctttggacaggagggagaaacccagtttggattccccaatgcagcaggaaaccatggttctca

SEQ ID NO: 728053 - DNA, 120 bp, Artificial Sequence
  ENSG00000198455_23 (sequence is synthesized)
gaaagaaacagatcttatcactgtgactggcagctcatttttggtatgaaccaactctattcattcctcatcatgtggcttacttttattacagtcaattttgaggatattctggactaa

SEQ ID NO: 728054 - DNA, 120 bp, Artificial Sequence
  ENSG00000198455_24 (sequence is synthesized)
tcatttctttttggtttgcaaaaagagcacagccctggactacaagtttggagatttaaattctgatcttgagtttggaactgacaagttgtgtgaccctgagcaagtcagttaacctat

SEQ ID NO: 728055 - DNA, 120 bp, Artificial Sequence
  ENSG00000198455_25 (sequence is synthesized)
ctgagccttaatttccttatttataaattgaggtggtttgaatagattgcttttaaggtctttctgctctgtgattccttgataatacatttctttccttgaaaaatatgaggacgtttt

SEQ ID NO: 728056 - DNA, 120 bp, Artificial Sequence
  ENSG00000198455_26 (sequence is synthesized)
tcagtgatgtggcatgcgtttttttttaactgcccccccagccctgacatgttctttttttggcaaacatacataatgttacatcatactatgatgaacatccatgtacttttcactcaa

SEQ ID NO: 728057 - DNA, 120 bp, Artificial Sequence
  ENSG00000198455_27 (sequence is synthesized)
tttcagcaattatgaatccatgaacaatcttttttaacttagcctcactcactccccatgttctagtattattttgtaacaaatagcagacatctgatcattttatccataaatattctt

SEQ ID NO: 728058 - DNA, 120 bp, Artificial Sequence
  ENSG00000198455_28 (sequence is synthesized)
tatatatctctgaaagctatgggatgatatggaaaaaaatgataattccattatcgcaagtgatatttacagtaattctttaatatcagtaaatatccagtgagggttcaaacttccaat

SEQ ID NO: 728059 - DNA, 120 bp, Artificial Sequence
  ENSG00000198455_29 (sequence is synthesized)
tgcctcataaatgctacttgttttattatttttaattagtagaatcccgtaaatctcctaagtgtcttcttaatccgtatgtttccctttcatctttctttttttccttgcgattttgtt

SEQ ID NO: 728060 - DNA, 120 bp, Artificial Sequence
  ENSG00000198455_30 (sequence is synthesized)
tatgaaatgaggttgtttcacatgtagcatttgccacaatttaagttttgctaattgcatccctatggtaatgtttgctttcctctatcctctgtttctttaatttgctagttatgtcta

SEQ ID NO: 728061 - DNA, 120 bp, Artificial Sequence
  ENSG00000198455_31 (sequence is synthesized)
gagacttgatgagattgaaacatggcttttggcatgaatgtttcataggttatgttgtgttcatttagtaggtggcgcataatctgtggttttctctctttttgtggtattagcagctgc

SEQ ID NO: 728062 - DNA, 120 bp, Artificial Sequence
  ENSG00000198455_32 (sequence is synthesized)
tgcagataaatgcattaattcatgatgcttctgatatgatgagtcatctttgtagagttactaagcattagcaaaggaggaaatgctatgtaatagaaatattattcaatgccaaaatat

SEQ ID NO: 728063 - DNA, 120 bp, Artificial Sequence
  ENSG00000198455_33 (sequence is synthesized)
tttcttaaatagtcatagaactaacaagaaaaaatagatagcaaaaaaatgtgttggctgttctcactgtttatcttcctaacttcttttgatgatggaaggcagttttgtggaaattgc

SEQ ID NO: 728064 - DNA, 120 bp, Artificial Sequence
  ENSG00000198455_34 (sequence is synthesized)
cagccaggactttgacatgaaacagacccagggctaaattttggctctgtggtgttggataagtggccttgaataaattagttattaagcttcagttttctagcttttaactgattataa

SEQ ID NO: 728065 - DNA, 120 bp, Artificial Sequence
  ENSG00000198455_35 (sequence is synthesized)
caatgcacacacatacctgacacactgttaaattttcttctcttcctgtttcttatgttaaggaaagatactctgtgttttggcatatgttggtgaatttgtaccatttttatcctctca

SEQ ID NO: 728066 - DNA, 120 bp, Artificial Sequence
  ENSG00000198455_36 (sequence is synthesized)
gtccttccttttataagacaataattggagtagtttaatcttattcatgtgcagataaaagaggtttatgaagtttagggtgaagtaggcaagggaatctgtttactccctcttccctct

SEQ ID NO: 728067 - DNA, 120 bp, Artificial Sequence
  ENSG00000198455_37 (sequence is synthesized)
actgaataattttccctctactgaataattttccctctaagaattgctgtgggtaataccaggagtggggacattgcccacatgcataagagcgtatctctccattcgatcagtttgtca

SEQ ID NO: 728068 - DNA, 120 bp, Artificial Sequence
  ENSG00000198455_38 (sequence is synthesized)
ccatctttgctctgttttgaaagtcaggcttctctgtgactgtgaagcctgctgttccctgaaaatctgataatggagcagtggaggtttttttctttctgtgctctgtagatctcattg

SEQ ID NO: 728069 - DNA, 120 bp, Artificial Sequence
  ENSG00000198455_39 (sequence is synthesized)
tttgcacttgtaatttcccagagttgaaaggaaagattgaactggaatattgtgtaaactatctgtcttacattagtgtagcattttgcaatttggggaacatcttcacaatttgtgtct

SEQ ID NO: 728070 - DNA, 120 bp, Artificial Sequence
  ENSG00000198455_40 (sequence is synthesized)
cgttgttcagaacaaccctgtgaagtagttttggcaatgtctgtgttacatttcatgtaatttagccaactcccattccaactaggctttggctaaatctgacaattttatatatagctt

SEQ ID NO: 728071 - DNA, 120 bp, Artificial Sequence
  ENSG00000198455_41 (sequence is synthesized)
aaaacaaagaatatacattcttttcacccctcccagtctacccatccagccttcatgattcattcctgtgtcaaggttagtcgctgttttccatttgaattggtttcttttatggtcagt

SEQ ID NO: 728072 - DNA, 120 bp, Artificial Sequence
  ENSG00000198455_42 (sequence is synthesized)
ttactttcttccctctcccctccctttcctgcacatccccatccttgctatgcctttctgtcctcttttataatggatatatctttttcctgccattatccctcagacattctcctcatg

SEQ ID NO: 728073 - DNA, 120 bp, Artificial Sequence
  ENSG00000198455_43 (sequence is synthesized)
gcacattttcttcaaatgctaacatttactgagtgtacattgaagttctgtgcatacaggaagaagttattttctgagcttagataatactatgtgtatatgtgattaaaatgaagatta

SEQ ID NO: 728074 - DNA, 120 bp, Artificial Sequence
  ENSG00000198455_44 (sequence is synthesized)
ttttctaaagccttcaaattagaagtggatttctgtttcattacttccgttttaaaagtttttgccagagagttttgctaaatactctcttatttgctctagtgtactagtccagtagtg

SEQ ID NO: 728075 - DNA, 120 bp, Artificial Sequence
  ENSG00000198455_45 (sequence is synthesized)
tttgcatgtggatgtctgtggatgacagttattgtagcactttggcagtgcactaaaattttgccactatgaaatgtttctttattgtgtgtgcgtgtgtgttttgaaatacgcacacag

SEQ ID NO: 728076 - DNA, 120 bp, Artificial Sequence
  ENSG00000198455_46 (sequence is synthesized)
ccacacccacatatatattaaaagtggttgtattcatttagtgaaaaacaaaaagtagatgtacttctgtaaatcagataaatgcttggaatttgattgtctacccaatcaacagttttc

SEQ ID NO: 728077 - DNA, 120 bp, Artificial Sequence
  ENSG00000198455_47 (sequence is synthesized)
cctctttgctctggaaatatttgtactcatatagcatatttcaaaaatgttgtcattcattaaggcctcttaaatagaccactattttttgtgtctggcagatgagtatgtcaaggattg

SEQ ID NO: 728078 - DNA, 120 bp, Artificial Sequence
  ENSG00000198455_48 (sequence is synthesized)
agatgaacacataagtcttggaaattaaataaatttataaacataaagataatttaatgctgtgacttcattttttaaattctttaaaccaactttctcccaataaaaaattataaacta

SEQ ID NO: 728079 - DNA, 120 bp, Artificial Sequence
  ENSG00000198464_0 (sequence is synthesized)
agtttcccacaaacccggaagcggatcgcgtggagtgaaggtcacgccgcggcgcgattgacttctaaagagtcatgctgtgtgatgaaaaagcccagaagagaaggaagaggaaagcaa

SEQ ID NO: 728080 - DNA, 120 bp, Artificial Sequence
  ENSG00000198464_1 (sequence is synthesized)
aggagtcagggatggctcttcctcagggacacttaacattcagggacgtggccatagaattctctcaggcggagtggaaatgcctggaccctgcacagagggctttatacaaggatgtga

SEQ ID NO: 728081 - DNA, 120 bp, Artificial Sequence
  ENSG00000198464_2 (sequence is synthesized)
tgttggagaactacaggaacctggtctccctgggaatctctcttcctgacctgaatattaactccatgttggagcaaaggagggagccctggtctggtgagagtgaagtgaaaatagcaa

SEQ ID NO: 728082 - DNA, 120 bp, Artificial Sequence
  ENSG00000198464_3 (sequence is synthesized)
aaaattcagatgggagggagtgcatcaaaggtgtgaacacagggagcagctatgcattgggaagcaatgcagaagacaaaccaattaaaaaacaacttggagtatcctttcacttacatc

SEQ ID NO: 728083 - DNA, 120 bp, Artificial Sequence
  ENSG00000198464_4 (sequence is synthesized)
tgtctgaactggagctatttccagatgaaagggtaataaatggatgtaatcaagttgaaaactttatcaaccacagttcctctgtttcctgtcttcaagaaatgtcttccagtgtcaaaa

SEQ ID NO: 728084 - DNA, 120 bp, Artificial Sequence
  ENSG00000198464_5 (sequence is synthesized)
cccccatttttaataggaatgattttgatgattcttcatttctcccacaagaacagaaagtacaccttagagaaaaaccttatgaatgtaatgagcatagcaaagtctttagagtatctt

SEQ ID NO: 728085 - DNA, 120 bp, Artificial Sequence
  ENSG00000198464_6 (sequence is synthesized)
ccagccttactaaacatcaagtaatccatactgtagagaaaccttacaaatgtaattcatgcggcaaggtctttagtcgcaattcacaccttgcagaacattgtagaattcatactggag

SEQ ID NO: 728086 - DNA, 120 bp, Artificial Sequence
  ENSG00000198464_7 (sequence is synthesized)
agaaaccttacaaatgtaatgtctgtggcaaggtttttagttacaattcaaactttgcacgacatcaaagaattcataccagagagaagccgtatgaatgtaatgaatgtggtaaagtct

SEQ ID NO: 728087 - DNA, 90 bp, Artificial Sequence
  ENSG00000198464_8 (sequence is synthesized)
agagagaagccgtatgaatgtaatgaatgtggtaaagtcttcagtaataattcttaccttgcacgacatcaaagaattcatgctgataaa

SEQ ID NO: 728088 - DNA, 120 bp, Artificial Sequence
  ENSG00000198464_9 (sequence is synthesized)
atcattggagaatttatactggagagaagccttacaaatgtgatgaatgtggcaaggccttctataggattgcgctccttgtacgacatcagaaaattcatactggagagaaaccttaca

SEQ ID NO: 728089 - DNA, 88 bp, Artificial Sequence
  ENSG00000198464_10 (sequence is synthesized)
agaaaccttacaaatgtaatgaatgtggaaaggtctttattcaaaattcgcacctagcacaacattggagaattcatacaaaaagtat

SEQ ID NO: 728090 - DNA, 120 bp, Artificial Sequence
  ENSG00000198464_11 (sequence is synthesized)
gacatcgaagaattcatactggagagaagccttacaaatgtaatgaatgtggtaaagcatttagtgagtattcaggcctttcagcccatcttgtaatccacactggagagaagccttaca

SEQ ID NO: 728091 - DNA, 120 bp, Artificial Sequence
  ENSG00000198464_12 (sequence is synthesized)
ggagagaagccttacaaatgtagtgaatgtggcaaggcattcagacacaagttatcactaaccaatcatcagagaatccatactggagaaagaccttacaaatgtaatgaatgtggcaag

SEQ ID NO: 728092 - DNA, 120 bp, Artificial Sequence
  ENSG00000198464_13 (sequence is synthesized)
accttacaaatgtaatgagtgtggcaaggcctttagtcgcatttcatacctagcacaacattggacaattcatatgggatagaaactacaaatgcaacaaatgcgtcaaagaatttagtg

SEQ ID NO: 728093 - DNA, 120 bp, Artificial Sequence
  ENSG00000198464_14 (sequence is synthesized)
agaaactacaaatgcaacaaatgcgtcaaagaatttagtgtgcactcaagccttactacccatcttttattccatactgcaaagaaattttgcaaatgtaaagaatatgacaaggtcttc

SEQ ID NO: 728094 - DNA, 120 bp, Artificial Sequence
  ENSG00000198464_15 (sequence is synthesized)
aaacacaagtttttctaataactcattagagaatttatactggagagacttcacaattataataaatgtgtggaaaagtcttcaaaaaaatttcacaccttgcaaaaggagatctaaaaa

SEQ ID NO: 728095 - DNA, 120 bp, Artificial Sequence
  ENSG00000198464_16 (sequence is synthesized)
acacaatcagaaatgacaaaggggacattaccaccaaccccacagaaatacgaaaaaccctcaaagattactataaacacctgtatgcacacaaactagaaaacctagaaaaaattaata

SEQ ID NO: 728096 - DNA, 120 bp, Artificial Sequence
  ENSG00000198464_17 (sequence is synthesized)
aattccttgaaagatataaccccccaagattgaaccaagaagaaattgcatccctgaacagaccaataatgagttccaaaatttaatcactaattaaaaatctatcaaacaaaactctgg

SEQ ID NO: 728097 - DNA, 120 bp, Artificial Sequence
  ENSG00000198464_18 (sequence is synthesized)
accagacagatttatagttgaagcctacgagatgtataaagaaaagctgttaccaatcttactgaaactgttcaaaaacatggatgcagagggactcctccctatctgattctatgaggc

SEQ ID NO: 728098 - DNA, 120 bp, Artificial Sequence
  ENSG00000198464_19 (sequence is synthesized)
tgacgaatataggtgccaaaatcctcagcaaaatactagtaaaccaaatccatctgcacatcaaaaagctaatccaacattatcaagcaggctttagtgttgggctgcaaggttggttca

SEQ ID NO: 728099 - DNA, 120 bp, Artificial Sequence
  ENSG00000198464_20 (sequence is synthesized)
gtatacacaaatcaataaatgtgatttatcacatacacagaactaaaaacaaaaaccacatgaccatgatcatctctttagatgcagaaaggtttttaataaaattcaacatcccttcat

SEQ ID NO: 728100 - DNA, 120 bp, Artificial Sequence
  ENSG00000198464_21 (sequence is synthesized)
tttaaaaaccctcaacaaattacacattgagggaacatacttcaataagaaccatctatgctggactcacagccaaattaatactgaacaagcaaaagctggaagcattccccttgagaa

SEQ ID NO: 728101 - DNA, 120 bp, Artificial Sequence
  ENSG00000198464_22 (sequence is synthesized)
ctggaaaatgacagggatgaccactctcaccactccgattcaacatagtactggaagtcctaagcttagtgatcaggcaagataaagatatgaaaggcatatataaataggaagagggga

SEQ ID NO: 728102 - DNA, 120 bp, Artificial Sequence
  ENSG00000198464_23 (sequence is synthesized)
agtcagtttctcttgcagaagatataattctgtatttagaaaacctgttgtctctgcccaaaggctcctagatctgataaacaacttcaaaaaagtttcaggatacaaaatctgtgtaca

SEQ ID NO: 728103 - DNA, 120 bp, Artificial Sequence
  ENSG00000198464_24 (sequence is synthesized)
aaaattagttgcatttctatacaccagtaatgtccaagctatgaaccaaatcaagaatggaatcccattcacagtagccacaaaaagtataaaatacctaggaatacagccaaccaggta

SEQ ID NO: 728104 - DNA, 120 bp, Artificial Sequence
  ENSG00000198464_25 (sequence is synthesized)
agtgaaagatttctacaatgagaattacaaagcagtgcacaaagaaatcagaaacaataaaaattgaaaaatatctcatgctcatggataggaagaatcagtattgttaaaatactgccc

SEQ ID NO: 728105 - DNA, 120 bp, Artificial Sequence
  ENSG00000198464_26 (sequence is synthesized)
aaagcaatttacagagccaatgctatttctatcaaactaccaatggcatttttcacagaatcagaagaaaacattctgaaatttatttggaaccagaaaagcccaacctaaatagcaaaa

SEQ ID NO: 728106 - DNA, 120 bp, Artificial Sequence
  ENSG00000198464_27 (sequence is synthesized)
gcaatcctaagcaaaaagagcaatgtttgaggtatcacactacccaactttaaaccatactacaaggctacagcaactaaaacagcatggtactggtataaaaaaagacacatagatcaa

SEQ ID NO: 728107 - DNA, 120 bp, Artificial Sequence
  ENSG00000198464_28 (sequence is synthesized)
tggaataggtaagagaacccagaaataaaggcatatacctacaaccatgtgatcctcaacaaaactgacaagcaatgaagtaagaacttcattcaataagtggtgctggcataactggct

SEQ ID NO: 728108 - DNA, 81 bp, Artificial Sequence
  ENSG00000198464_29 (sequence is synthesized)
taagaacttcattcaataagtggtgctggcataactggctagccatatgcaggatattgaaactggacccctatccttcac

SEQ ID NO: 728109 - DNA, 120 bp, Artificial Sequence
  ENSG00000198464_30 (sequence is synthesized)
atataaaacctaaaagtattaaattcctagaagaaaacccaggaaatgccattctggacataagtgctggaaaagacttaatgatgaacaccccaaagcaattgcaacaaaaacaaaaat

SEQ ID NO: 728110 - DNA, 120 bp, Artificial Sequence
  ENSG00000198464_31 (sequence is synthesized)
gcaaaagaagctatttgcagactacagaatgggagaaaatgtttacaaactgcatctgacaaagatctaatccagaatctataaagaactcaaacaaatcaacaatgagaaaaacaaccc

SEQ ID NO: 728111 - DNA, 120 bp, Artificial Sequence
  ENSG00000198464_32 (sequence is synthesized)
cattaaaaactgggcaaaggccatgaatagacctttctcaaaagaatacatacatgtggcaataagcatatgaaaaaaatggttaatatcgctaatcattaaggaaatgcaatcaaagcc

SEQ ID NO: 728112 - DNA, 120 bp, Artificial Sequence
  ENSG00000198464_33 (sequence is synthesized)
acaatgagataccatctcagacctgtctgaatgggtattatcagaatgggtattattaaaaaatcaaaacatagatgctagtgaggctgcagagaaaagcaaatacttatacactgctgg

SEQ ID NO: 728113 - DNA, 120 bp, Artificial Sequence
  ENSG00000198464_34 (sequence is synthesized)
tgggaatgtaaattaattcagccattgtggaaagcactgcagcgatttctcaaagacataaaagaacatagcattcaacccagcatcccattactgggtgtatacctaaaggaatataat

SEQ ID NO: 728114 - DNA, 120 bp, Artificial Sequence
  ENSG00000198464_35 (sequence is synthesized)
cattccaccataaagacaaacacttgtatgttcattgcagcactattctcaatagcaaagatgtggaatcaacgtaaatgcccatcagcagtagaccagataaagaaaatttggtacata

SEQ ID NO: 728115 - DNA, 120 bp, Artificial Sequence
  ENSG00000198464_36 (sequence is synthesized)
tactatgcagccataaaaaagaacaagactgtgtcctttacagcaacatagatggagctgaggctcttatcctaagtgaattaatgcaggaacagaaaatgaaatatcccatgttctcac

SEQ ID NO: 728116 - DNA, 120 bp, Artificial Sequence
  ENSG00000198464_37 (sequence is synthesized)
tcacttataagtgggagctaaacattgattacacatggactcaaagaagggaacagtagacacgggcttatgggtggaggttgggaagaggatgaagattgaataactgcctgttgggta

SEQ ID NO: 728117 - DNA, 120 bp, Artificial Sequence
  ENSG00000198464_38 (sequence is synthesized)
gttgggtactatgctgattacctggggacaaaattaactgtacaccaaactcctgcaacatgcagttgacccatgtacacatactccttgaacctaaaataaaacatgaaaaaaagcaaa

SEQ ID NO: 728118 - DNA, 68 bp, Artificial Sequence
  ENSG00000198464_39 (sequence is synthesized)
gagcagctatgcattgggaagcaatgcagaagacaaaccaattaaaaaacaacttggagtatcctttc

SEQ ID NO: 728119 - DNA, 120 bp, Artificial Sequence
  ENSG00000198464_40 (sequence is synthesized)
gattgacttctaaagagtcatgctgtgtgatgaaaaagcccagaagagaaggaagaggaaagcaaaggagtcagggatggctcttcctcaggaatctctcttcctgacctgaatattaac

SEQ ID NO: 728120 - DNA, 120 bp, Artificial Sequence
  ENSG00000198466_0 (sequence is synthesized)
agtagcggctgtgtatcggcgatgcgggtgtttccccagtttgtggcccctgagtgctgggtgggaccgcggtgactgaacctagaaggtggagaggaatcgtcctcggtgcccagaggc

SEQ ID NO: 728121 - DNA, 120 bp, Artificial Sequence
  ENSG00000198466_1 (sequence is synthesized)
ggctctgcagccccgtgacggcgaccactgctcccgggccgtgcttccccaagtagtccgatggcagcggctgtgccgaggcgcccaactcagcagggcactgtgacctttgaagatgtg

SEQ ID NO: 728122 - DNA, 120 bp, Artificial Sequence
  ENSG00000198466_2 (sequence is synthesized)
gctgtgaacttttcccaggaggagtggtgtcttcttagtgaggctcagaggtgcttgtaccgtgatgtgatgctagagaacctggctctcatatcctcgctgggttgttggtgtggatca

SEQ ID NO: 728123 - DNA, 120 bp, Artificial Sequence
  ENSG00000198466_3 (sequence is synthesized)
aaagatgaggaggcaccttgtaagcagagaatttctgtacaaagagagtctcagagcaggactcctagggcaggtgtttctcctaagaaggctcacccctgtgaaatgtgtggcctcatc

SEQ ID NO: 728124 - DNA, 120 bp, Artificial Sequence
  ENSG00000198466_4 (sequence is synthesized)
ttggaggatgtttttcactttgctgaccaccaggaaactcatcacaagcagaagctgaacaggagtggagcatgtggaaaaaacttggatgacactgcataccttcatcagcaccagaag

SEQ ID NO: 728125 - DNA, 120 bp, Artificial Sequence
  ENSG00000198466_5 (sequence is synthesized)
cagcatattggagagaaattctacagaaagagtgtcagagaagcatcgtttgtaaagaaacgtaagctcagggtgtcacaggagccatttgtcttccgcgagtttgggaaggacgttctg

SEQ ID NO: 728126 - DNA, 120 bp, Artificial Sequence
  ENSG00000198466_6 (sequence is synthesized)
cccagttcaggattgtgccaagaagaagctgctgtagagaagacagacagtgaaactatgcatggcccaccctttcaggagggaaaaactaattacagttgtggaaaacgcacaaaagcc

SEQ ID NO: 728127 - DNA, 120 bp, Artificial Sequence
  ENSG00000198466_7 (sequence is synthesized)
ttcagcaccaaacactcagttattccacaccagaaacttttcactagagatggatgttatgtgtgcagtgattgtggaaaatcctttagcagatatgtcagcttcagtaatcatcagcga

SEQ ID NO: 728128 - DNA, 120 bp, Artificial Sequence
  ENSG00000198466_8 (sequence is synthesized)
gatcacactgcaaaaggaccttatgattgtggagagtgtgggaaatcttatagtcgaaagagcagccttattcaacatcagcgagtccacactggacagacagcttatccctgtgaggag

SEQ ID NO: 728129 - DNA, 120 bp, Artificial Sequence
  ENSG00000198466_9 (sequence is synthesized)
tgcgggaaatcttttagtcagaagggcagccttattagccatcagcttgttcacactggagaagggccttatgagtgtagagaatgtgggaaatcttttggtcaaaagggtaacctcatt

SEQ ID NO: 728130 - DNA, 120 bp, Artificial Sequence
  ENSG00000198466_10 (sequence is synthesized)
caacatcagcaaggtcacactggagagagagcttatcactgtggggaatgtgggaaatcttttcgtcagaagttctgctttattaaccatcagcgtgttcacactggagaaaggccttac

SEQ ID NO: 728131 - DNA, 120 bp, Artificial Sequence
  ENSG00000198466_11 (sequence is synthesized)
aagtgtggagaatgtgggaaatcttttggtcaaaagggcaacctcgttcaccatcagcgaggtcatactggagaaaggccctatgagtgcaaggaatgtgggaaatcatttaggtacaga

SEQ ID NO: 728132 - DNA, 120 bp, Artificial Sequence
  ENSG00000198466_12 (sequence is synthesized)
tcccacctcactgaacaccagagacttcacactggggaaagaccttacaattgtagggaatgtgggaaattatttaacaggaagtatcatcttctggttcatgagagagttcacactgga

SEQ ID NO: 728133 - DNA, 120 bp, Artificial Sequence
  ENSG00000198466_13 (sequence is synthesized)
gaaaggccatatgcgtgtgaggtatgtgggaaattatttggcaataagcacagcgtgactatacatcagaggattcacactggagaaaggccgtatgaatgcagtgaatgtgggaaatca

SEQ ID NO: 728134 - DNA, 120 bp, Artificial Sequence
  ENSG00000198466_14 (sequence is synthesized)
tttctttccagctctgcgcttcatgttcataaaagagttcattctggacaaaagccttataagtgcagtgaatgtggaaaatccttttctgaatgttccagtctcattaaacacaggaga

SEQ ID NO: 728135 - DNA, 120 bp, Artificial Sequence
  ENSG00000198466_15 (sequence is synthesized)
attcacactggagaaaggccttatgaatgcaccaaatgtggaaaaacatttcagcgaagctctaccctccttcatcatcagagttcacacaggagaaaggccttatgagtgcagtgaata

SEQ ID NO: 728136 - DNA, 120 bp, Artificial Sequence
  ENSG00000198466_16 (sequence is synthesized)
tgggaaatcgtttgctgaagcatcccgtctcgttaaacacaggagagttcatactggagaaaggccttatgagtgctgtcaatgtggaaaacatcagaatgtctgctgtcctcggtctta

SEQ ID NO: 728137 - DNA, 60 bp, Artificial Sequence
  ENSG00000198466_17 (sequence is synthesized)
acttcgtctgcaacttgggcctcctgggttcatgcaatcctcctacctcagcctcctgag

SEQ ID NO: 728138 - DNA, 120 bp, Artificial Sequence
  ENSG00000198466_18 (sequence is synthesized)
aagtgctgaaattacaggcatgagcctctgcacctggccttcattcttttcgtattgcttagaatatgacatgctgaaccaggcatggtggctcatgcttgtaaacctgatgctttggga

SEQ ID NO: 728139 - DNA, 120 bp, Artificial Sequence
  ENSG00000198466_19 (sequence is synthesized)
acctgatgctttgggaggacaaggtggttcattggaggccaggagttagagatcagcctgggcaacatagccagacctcctctctacaaaaagaaaaaagaatgacatgcttcttgtttt

SEQ ID NO: 728140 - DNA, 120 bp, Artificial Sequence
  ENSG00000198466_20 (sequence is synthesized)
tgtctgttataaatgaaactgctatatttgaatgcagttgttcatgtaggtatgtttcactatggtaatatggtggtgtgcagtgcctgagtcacgtgatagattaaagtacaactcttt

SEQ ID NO: 728141 - DNA, 120 bp, Artificial Sequence
  ENSG00000198466_21 (sequence is synthesized)
gattaccggtgtgcaccaccatgcctggataacttttttttttatttctattagcaatggggtttcaccatgctggccaggcttgttatgaactgacctcaagtgatctgcctgcctcag

SEQ ID NO: 728142 - DNA, 120 bp, Artificial Sequence
  ENSG00000198466_22 (sequence is synthesized)
cttctcaggtgtgacctactgtgcttggcctaatgtacaactttttaagcaatgccaaactatgacttaagaatgaaattattgctcatttgtatatctatctaccatcagtgtccaaga

SEQ ID NO: 728143 - DNA, 120 bp, Artificial Sequence
  ENSG00000198466_23 (sequence is synthesized)
atttctgttctatcttaccaagagggagtatggttagtatttgaaattgtttattattttaataagtggttataacttttgagtcagtggtttatgttttgcattttttttgttttgaga

SEQ ID NO: 728144 - DNA, 120 bp, Artificial Sequence
  ENSG00000198466_24 (sequence is synthesized)
caatctcagctcattgcaacctctgcttcctgggctcaagcactctgcccacctcagcctccagagtagctggaaatacaggtatgcaccaccacaactggataacttttgtattttctg

SEQ ID NO: 728145 - DNA, 120 bp, Artificial Sequence
  ENSG00000198466_25 (sequence is synthesized)
ggtatgcaccaccacaactggataacttttgtattttctgtagagagggttttacctttttgcccagtctgatcgcgaactcctgggctcaggcgatccacttgcctaggctccaaaagt

SEQ ID NO: 728146 - DNA, 120 bp, Artificial Sequence
  ENSG00000198466_26 (sequence is synthesized)
gcttgttttttaaaatgaattttatctatttcccatttcattaatatatttaaaaataatgaaataacaaagacgtatgttggacttcattcattcttcagtgatgtcactttgctgcaa

SEQ ID NO: 728147 - DNA, 120 bp, Artificial Sequence
  ENSG00000198466_27 (sequence is synthesized)
tgtcactttgctgcaaggaatatttggttttcttttttttttttttttccagatggagtctagctctgtctcctaagctacagtgaagtggcatgatctcggcccactgcaacctccacc

SEQ ID NO: 728148 - DNA, 77 bp, Artificial Sequence
  ENSG00000198466_28 (sequence is synthesized)
tagctgggactacaggcatgtgccattatacctggctaattttatttactctctaccttctgagctcaagtgatcca

SEQ ID NO: 728149 - DNA, 120 bp, Artificial Sequence
  ENSG00000198466_29 (sequence is synthesized)
tgctgggattacaggtgtcagccactgtacctggctgaatacttggttttcagtaccacaagaactatgagctggttatccacttcatgtggaatcataagcgtcccaaagtgacaatac

SEQ ID NO: 728150 - DNA, 120 bp, Artificial Sequence
  ENSG00000198466_30 (sequence is synthesized)
cacttcatgtggaatcataagcgtcccaaagtgacaatacatatagattgccaggcagtgaaacagttaagatgccaccatagctttcttttcaacatctttctaagattaccttactat

SEQ ID NO: 728151 - DNA, 120 bp, Artificial Sequence
  ENSG00000198466_31 (sequence is synthesized)
ttcttttgttccaagtttgtacttcctcacagttctcacatatggaaaggatacacactttgtagaaacaagaactttatgttatccaagttctaggatagccatgagctccaattatct

SEQ ID NO: 728152 - DNA, 120 bp, Artificial Sequence
  ENSG00000198466_32 (sequence is synthesized)
cagagctctgagtcctctactcaatacccattgagatttatgtgttctgaggcttttgtcttctagctacttacttcattctccatgggtaacgtcattcatccacattaactaatttcc

SEQ ID NO: 728153 - DNA, 120 bp, Artificial Sequence
  ENSG00000198466_33 (sequence is synthesized)
tcactccaagctcttttctagagataatctccagtccctgtgcagaaactgtcattgcactttctgctgaaatggcagtttcttctcagcaaggtgagattatggaatccagaatctttt

SEQ ID NO: 728154 - DNA, 120 bp, Artificial Sequence
  ENSG00000198466_34 (sequence is synthesized)
ttcaggggtcacatgcccatttccccacttgcatgaatgtcgacactgcagccacagttttggccgtaaatgtgaatttggcaagtaaccactgttcccagggaaatgtcccaatcagaa

SEQ ID NO: 728155 - DNA, 120 bp, Artificial Sequence
  ENSG00000198466_35 (sequence is synthesized)
gaagattatctgggacactgatactgacagggagatgggacattctgagggacccggaggcagggtgccacctcctcaacttccctgagggctgcctagaatctgtttcctctcactctg

SEQ ID NO: 728156 - DNA, 120 bp, Artificial Sequence
  ENSG00000198466_36 (sequence is synthesized)
aattattcttcctcttatggctgaccaaaaacatggaacctcacaaagtccactgtaacagctttatatttgtgaagtgaagaacatgaagacagtttcaagcaaagttattgagtggac

SEQ ID NO: 728157 - DNA, 61 bp, Artificial Sequence
  ENSG00000198466_37 (sequence is synthesized)
agaacatgaagacagtttcaagcaaagttattgagtggacactttgtgttttttttgagcc

SEQ ID NO: 728158 - DNA, 90 bp, Artificial Sequence
  ENSG00000198466_38 (sequence is synthesized)
tttttgttttgtttcttggagtgccgtgtcgcaatctcagctcactgcaacttctacctcctggattcaagcacttctccttgcctcagc

SEQ ID NO: 728159 - DNA, 87 bp, Artificial Sequence
  ENSG00000198466_39 (sequence is synthesized)
ccaggttggagtgccgtgtcgcaatctcagctcactgcaacttctacctcctggattcaagcacttctccttgcctcagccacctct

SEQ ID NO: 728160 - DNA, 60 bp, Artificial Sequence
  ENSG00000198466_40 (sequence is synthesized)
tattcttttctttagtagagacggggttttactgtatttgccaggatggtctcgatctcc

SEQ ID NO: 728161 - DNA, 60 bp, Artificial Sequence
  ENSG00000198466_41 (sequence is synthesized)
cacgccctggccacttcttgtctttgcaacattttttagatatgtatttgtgttttttgg

SEQ ID NO: 728162 - DNA, 120 bp, Artificial Sequence
  ENSG00000198466_42 (sequence is synthesized)
tctttgcaacattttttagatatgtatttgtgttttttggggagcttaatttgctaatggaatctctgttattttcctaacatgcttggtggatacaagagttaagacttcctgtcccgt

SEQ ID NO: 728163 - DNA, 120 bp, Artificial Sequence
  ENSG00000198466_43 (sequence is synthesized)
ttagtgtaacaaaagaaagttaagaaatgtggataaaagattgtaagttagaaatggcaagataatcagctatatgaagaatcttggccaggtgtggtggctgaggcctgtaatcccacc

SEQ ID NO: 728164 - DNA, 120 bp, Artificial Sequence
  ENSG00000198466_44 (sequence is synthesized)
ccagctactcgggaggctgaggccagaaaatcggttgaacctgggaggtggaaggtgcactgagccaatatcacaccagtgcactccaacctggtgacagagagacacatcatctcaaaa

SEQ ID NO: 728165 - DNA, 120 bp, Artificial Sequence
  ENSG00000198466_45 (sequence is synthesized)
atcatctcaaaaaaaaaaaaaaaactcaatccataaatgttatactttataactttataacagcatgttatatgggcttagatattatccctaaatttttttttttttttttttttttga

SEQ ID NO: 728166 - DNA, 65 bp, Artificial Sequence
  ENSG00000198466_46 (sequence is synthesized)
tcttgcctcagcctcccgagtagctgggcctataggtacgttagccaggctggtctcaaactcct

SEQ ID NO: 728167 - DNA, 120 bp, Artificial Sequence
  ENSG00000198466_47 (sequence is synthesized)
ctgggattacaggcatctgccaccgcactcggcttatccctagaaatcctatgatagcatgatgtataggcacctaaaggcatggcacttgagaaatgtgaataagattgtaagttacaa

SEQ ID NO: 728168 - DNA, 120 bp, Artificial Sequence
  ENSG00000198466_48 (sequence is synthesized)
atagcaaggtacagtcagatgttaacagtctcagcccctaaatgtcaccttgtattacagcatgttatataagcacatacaggcacatacatgaaatagtgatacttcattctcagtaat

SEQ ID NO: 728169 - DNA, 120 bp, Artificial Sequence
  ENSG00000198466_49 (sequence is synthesized)
atcttcatccttctcactggaaagatctttgatgatttttaatcaacataggagtttcaatgatatctagaagtttaaaagggctcgttcaaacaaattatgaccacacacactgaagag

SEQ ID NO: 728170 - DNA, 120 bp, Artificial Sequence
  ENSG00000198466_50 (sequence is synthesized)
tatgtttgtctcttgtggtgtaaatttttttttattacaccaaattatgttcacacaaaacctttgtaatcagggggaattaaagagccttcctggaaaatggaggttgcaatcagccga

SEQ ID NO: 728171 - DNA, 120 bp, Artificial Sequence
  ENSG00000198466_51 (sequence is synthesized)
gatggtgccatcgcactctagcctggggaatagagtgagatcctgcctcaaaaaaaacaaaaaaattctttattttctccataaactacagtttatataagcaaaagtttcagtactaag

SEQ ID NO: 728172 - DNA, 120 bp, Artificial Sequence
  ENSG00000198466_52 (sequence is synthesized)
caattttagtctctgcagtctcttgtcttgaattaatacaacttttgttaattctcttatgaagttaatcttcctgcttgtatgtgaattaaatatatgtcaaactttttttgtacaaaa

SEQ ID NO: 728173 - DNA, 78 bp, Artificial Sequence
  ENSG00000198466_53 (sequence is synthesized)
ccacagcactgaccaggctagtcttgaactcctgaccgggtgatctgcctgcctcggcctcaaagtgctggaattgca

SEQ ID NO: 728174 - DNA, 120 bp, Artificial Sequence
  ENSG00000198466_54 (sequence is synthesized)
ggtgatctgcctgcctcggcctcaaagtgctggaattgcaggcgtgagccactgtgcctggccagttgtaactatttatcactgtctggactcataaacattttgagatgactttgggag

SEQ ID NO: 728175 - DNA, 120 bp, Artificial Sequence
  ENSG00000198466_55 (sequence is synthesized)
ggcaccagtggatgtggtttcaactccgtgttggggaccttgggaggaggatgggcaagggtgggtgtgtgggagaggtgggttgtggtacctcagcagaggggctgcttgtggtttcat

SEQ ID NO: 728176 - DNA, 120 bp, Artificial Sequence
  ENSG00000198467_0 (sequence is synthesized)
cccggccgggccgtgcttctgcccctacaaggtttgggccgaggtgggggagggtcctggttgccggccccgcccggtccctccccgccttttaggcgcccgcgtggccgggacgtccca

SEQ ID NO: 728177 - DNA, 120 bp, Artificial Sequence
  ENSG00000198467_1 (sequence is synthesized)
cgggacgtcccagtcccgctccgtcctcctcgcctgccaccggtgcacccagtccgctcacccagcccagtccgtccggtcctcaccgcctgccggccggcccaccccccaccgcagcca

SEQ ID NO: 728178 - DNA, 120 bp, Artificial Sequence
  ENSG00000198467_2 (sequence is synthesized)
tggacgccatcaagaagaagatgcagatgctgaagctggacaaggagaacgccatcgaccgcgccgagcaggccgaagccgacaagaagcaagctgaggaccgctgcaagcagctggagg

SEQ ID NO: 728179 - DNA, 120 bp, Artificial Sequence
  ENSG00000198467_3 (sequence is synthesized)
aggagcagcaggccctccagaagaagctgaaggggacagaggatgaggtggaaaagtattctgaatccgtgaaggaggcccaggagaaactggagcaggccgagaagaaggccactgatg

SEQ ID NO: 728180 - DNA, 120 bp, Artificial Sequence
  ENSG00000198467_4 (sequence is synthesized)
ctgaggcagatgtggcctccctgaaccgccgcattcagctggttgaggaggagctggaccgggcccaggagcgcctggctacagccctgcagaagctggaggaggccgagaaggcggctg

SEQ ID NO: 728181 - DNA, 120 bp, Artificial Sequence
  ENSG00000198467_5 (sequence is synthesized)
cgagagaggaatgaaggtcatcgaaaaccgggccatgaaggatgaggagaagatggaactgcaggagatgcagctgaaggaggccaagcacatcgctgaggattcagaccgcaaatatga

SEQ ID NO: 728182 - DNA, 120 bp, Artificial Sequence
  ENSG00000198467_6 (sequence is synthesized)
agaggtggccaggaagctggtgatcctggaaggagagctggagcgctcggaggagagggctgaggtggccgagagtaaatgtggggacctagaggaggagctgaaaattgttaccaacaa

SEQ ID NO: 728183 - DNA, 120 bp, Artificial Sequence
  ENSG00000198467_7 (sequence is synthesized)
cttgaaatccctggaggcccaggcggacaagtattccaccaaagaagataaatatgaagaggagatcaaactgttggaggagaagctgaaggaggctgagacccgagcagagtttgccga

SEQ ID NO: 728184 - DNA, 120 bp, Artificial Sequence
  ENSG00000198467_8 (sequence is synthesized)
gaggtctgtggcaaagttggagaaaaccatcgatgacctagaagatgaagtctatgcccagaagatgaagtacaaggccattagcgaggaactggacaacgcactcaatgacatcacctc

SEQ ID NO: 728185 - DNA, 120 bp, Artificial Sequence
  ENSG00000198467_9 (sequence is synthesized)
cctctgagccccacgccagcgtggccacctcagctctcttctctcctctcctttccattctctctatggggaggggagcaggcaggaggagcagaaattgccaacattgcacagccaggc

SEQ ID NO: 728186 - DNA, 120 bp, Artificial Sequence
  ENSG00000198467_10 (sequence is synthesized)
tgggagcagcctagggagagcccccatcatgcccaccacccactctggcactggcttcatcctttacctatccccttccaccctcctttgctgcttaataaattctgaacttggtctcca

SEQ ID NO: 728187 - DNA, 120 bp, Artificial Sequence
  ENSG00000198467_11 (sequence is synthesized)
tcgagattcaccagaccttggaccagaccctgctggaactcaacaacctgtgagggccagccccacccccagccaggctatggttgccaccccaacccaataaaactgatgttactagcc

SEQ ID NO: 728188 - DNA, 120 bp, Artificial Sequence
  ENSG00000198467_12 (sequence is synthesized)
ctcctgacaccctggcacttactgacacccccagcccctgcactgagcccacccacaaaacaccatggcccacgctgaaacccctctgcacaggcactccctggctgtcgctctctgatt

SEQ ID NO: 728189 - DNA, 120 bp, Artificial Sequence
  ENSG00000198467_13 (sequence is synthesized)
caccactgcatgtgggcacgtgtggccccatcaaaccatgaccgcctctggtgccaatccctgacctcagagcacttagctggggttccaggatcaaacagagtgactggaaaggaagta

SEQ ID NO: 728190 - DNA, 120 bp, Artificial Sequence
  ENSG00000198467_14 (sequence is synthesized)
gggtggtgaggtgcaggacaggggcaagaaggttgcaaaaggtctggaatggagcttggaaaaatgttggatatcagcaacatggggctttcactgcagcagcaggtctgttttctacct

SEQ ID NO: 728191 - DNA, 120 bp, Artificial Sequence
  ENSG00000198467_15 (sequence is synthesized)
caagtctgtctgtctggcccttcctttcctggcgcagtctttgtcttaccttctgtctccaacttccttaaaccttctaaagaagaggataaagtagtttatgactcagccctccccacc

SEQ ID NO: 728192 - DNA, 120 bp, Artificial Sequence
  ENSG00000198467_16 (sequence is synthesized)
ccacctctatgaccccaaggccttgagtgaggcatccacgtccgtcctgttcccctcatcctagtcagtccatctgtttgtccctgccaaggggccctgaggtccgtgaatgcatgtgtc

SEQ ID NO: 728193 - DNA, 120 bp, Artificial Sequence
  ENSG00000198467_17 (sequence is synthesized)
agatacccgggggtgacaagtgagcccattggccctggggccttccacacagtgggaaggtagcatcctaggcttggggctgtagggacaggccctgttctctgacccctgcccgctgcc

SEQ ID NO: 728194 - DNA, 120 bp, Artificial Sequence
  ENSG00000198467_18 (sequence is synthesized)
gagccgagccagacagctggaggaggaacttcgaaccatggaccaggccctcaagtccctgatggcctcagaggaggaggtagtgacccctctgaacctttctgggcaatggcgccttct

SEQ ID NO: 728195 - DNA, 120 bp, Artificial Sequence
  ENSG00000198467_19 (sequence is synthesized)
ctcagctcaccttccctccgtctcagcaccgcaggctgctctttctcagctgctggggatcaggaagggcctggggcttctgagccctgcctgctgtcactctcacaactttgctcttct

SEQ ID NO: 728196 - DNA, 120 bp, Artificial Sequence
  ENSG00000198467_20 (sequence is synthesized)
cttctctcctccacccgtcccctgctgtgccatctccactgtctggcttcgctgtgccctcacaccctgccccccccgccacacaccccctgcagtaaatgtggggacctagaggaggag

SEQ ID NO: 728197 - DNA, 120 bp, Artificial Sequence
  ENSG00000198467_21 (sequence is synthesized)
ctgaaaattgttaccaacaacttgaaatccctggaggcccaggcggacaaggtagaggggagcagaggggcagtgaggatggggtcccacaggggagggaggtgaggggcccaaggcagg

SEQ ID NO: 728198 - DNA, 120 bp, Artificial Sequence
  ENSG00000198467_22 (sequence is synthesized)
gaggggctgggtgttcaacggaggcaagatgaccaggagcctacggggtacaatggagaaatgaaggatctgtggtagcgctgtactgatggcgtgtgtgtgtccccaaaagtattccac

SEQ ID NO: 728199 - DNA, 120 bp, Artificial Sequence
  ENSG00000198467_23 (sequence is synthesized)
ggcaaagttggagaaaaccatcgatgacctagaaggtaaaagaagcctttataagtaggtccacacctgccgtgattatcagtctgtcctgtaccttctcatcccattttatttgccacc

SEQ ID NO: 728200 - DNA, 120 bp, Artificial Sequence
  ENSG00000198467_24 (sequence is synthesized)
aataaactagggttgggccacctaggaccctaccaactccccaactctgtgggccatgtctacaattcaagtaattgtagctgcccacggcgcaacaactccagtgcttctcaaacttca

SEQ ID NO: 728201 - DNA, 120 bp, Artificial Sequence
  ENSG00000198471_0 (sequence is synthesized)
ctagggtgtcgtacttaccatagcacatgatgtggagaatgctagaagagcagttgggtgaagcagggccaccaaatagtccttgcctcctggagacctctggaaatccagatgagtgtg

SEQ ID NO: 728202 - DNA, 120 bp, Artificial Sequence
  ENSG00000198471_1 (sequence is synthesized)
gtctgaggttgggcctcccactgtgcttgctcctctcaggcctacccagcgctgcctctgaagcctaactcagggccctgaaactcccccttggggcttcccttctccccagccctcact

SEQ ID NO: 728203 - DNA, 120 bp, Artificial Sequence
  ENSG00000198471_2 (sequence is synthesized)
cttggtgccctgcctggctaccatggtaacaggttccagggtaacagaggagggagctgggtcctgtttactcccagtcctgccgatgaggattctgaccgtagacactgaattgtcccg

SEQ ID NO: 728204 - DNA, 120 bp, Artificial Sequence
  ENSG00000198471_3 (sequence is synthesized)
tacctatccgtgctctttctgtgttctcaccagggctgagctcgaactgccacctctgccagcaggaccatgtgtaccagcttgaccacttgtgagtggaagaaagtcttctatgagaag

SEQ ID NO: 728205 - DNA, 120 bp, Artificial Sequence
  ENSG00000198471_4 (sequence is synthesized)
atggaggtggcaaagccagcggacagctgggagctcatcatagaccccaacctcaagcccagtgagctggcccctggctggaagcagtacctggagcagcacgcctcaggcaggttccac

SEQ ID NO: 728206 - DNA, 120 bp, Artificial Sequence
  ENSG00000198471_5 (sequence is synthesized)
gtctgcccatgtggtcatcctcttccacatgttcctggaccgcgcccagcgggcgggctcggtgcgcatgcgcgtcttcaagcagctgtgctatgagtgcggcacggcgcggctggacga

SEQ ID NO: 728207 - DNA, 120 bp, Artificial Sequence
  ENSG00000198471_6 (sequence is synthesized)
gtccagcatgctggaggagaacatcgagggcctggtggacaacctcatcaccagcctgcgcgagcagtgctacgaggaggatggtggccagtaccgcatccacgtggccagccgcccgga

SEQ ID NO: 728208 - DNA, 120 bp, Artificial Sequence
  ENSG00000198471_7 (sequence is synthesized)
cagcgggccgcatcgtgcagagttctgtgaggcctgccaggagggcatcgttcactggaagcccagcgagaagctgctggaggaggaggtgaccacctacacctctgaagcctccaagcc

SEQ ID NO: 728209 - DNA, 120 bp, Artificial Sequence
  ENSG00000198471_8 (sequence is synthesized)
gagggcccaggcgggatccggctacaacttcttgtctcttcgctggtgcctcttctgggcctctctctgcctgctcgttgtttacctgcagttctccttcctcagtcctgccttctttta

SEQ ID NO: 728210 - DNA, 120 bp, Artificial Sequence
  ENSG00000198471_9 (sequence is synthesized)
gtggagctggttaagggtgggagagggcacatgggcttgagagtggggaggacacagtctggacttgatcctgctacagattcaacatatgactggacaatccggtcacctctctgggcc

SEQ ID NO: 728211 - DNA, 120 bp, Artificial Sequence
  ENSG00000198471_10 (sequence is synthesized)
tcagttaatgcatctgcggaatgagaggattgcattagaagataggcaatgattctttcactggatgtgacaataattgggggaaggggaaaagggtgtaataaaggttttagagcttgc

SEQ ID NO: 728212 - DNA, 120 bp, Artificial Sequence
  ENSG00000198478_0 (sequence is synthesized)
agatcccagcgatcttccccgacggcagcgctttacccagaggctgccggcggctcgtagctgggttcagctctgcgtccacgccagcccggagcccggggggcaaggggtctgtcccgg

SEQ ID NO: 728213 - DNA, 120 bp, Artificial Sequence
  ENSG00000198478_1 (sequence is synthesized)
gcgcagcgagaggatggtcatccgcgtgttcatcgcctcttcctcgggcttcgtggcgataaagaagaagcagcaagatgtggttagatttctggaagccaacaagatagagtttgagga

SEQ ID NO: 728214 - DNA, 120 bp, Artificial Sequence
  ENSG00000198478_2 (sequence is synthesized)
ggtggatatcacaatgtcagaagaacagaggcaatggatgtacaaaaacgtccccccggaaaagaaacccactcagggcaaccccctgccacctcagatatttaatggcgaccgatactg

SEQ ID NO: 728215 - DNA, 120 bp, Artificial Sequence
  ENSG00000198478_3 (sequence is synthesized)
tggagattatgacagtttttttgaatccaaggaaagcaacacagtcttttcatttttaggcctgaaaccacggttggcatcaaaggcagaaccttagagaagaagagtggaagatgacgg

SEQ ID NO: 728216 - DNA, 120 bp, Artificial Sequence
  ENSG00000198478_4 (sequence is synthesized)
agatgcattttgaagcacccctggtactcagcacacacatgcttacctaatgcatcactgtgacaaaagccacacgcattatcagtaactttgcttgccacggaaaaggtgtttttgaaa

SEQ ID NO: 728217 - DNA, 120 bp, Artificial Sequence
  ENSG00000198478_5 (sequence is synthesized)
gatgtggctataatgagaattgcatgattgctttaaaccaaatcaggtggtggattttttttttcttattctatttgcctgcagttgcctcactcacctggaaataccgtcacctgttac

SEQ ID NO: 728218 - DNA, 120 bp, Artificial Sequence
  ENSG00000198478_6 (sequence is synthesized)
aggtgtactttcttaatgactgaaagataagtgggtagcaccgtcagagagaaaatgttggatctgccctaggttatagtagatgccggaattgcgtaaacccacttctctttaagctgc

SEQ ID NO: 728219 - DNA, 120 bp, Artificial Sequence
  ENSG00000198478_7 (sequence is synthesized)
ctggattgcacctttgaaatatgtctgccaagttgttagaatctttgaatcagaaggaaaaaaagcagcgctggttgacaaagggtgttgaagatttttgctgcagaatcagttacaaac

SEQ ID NO: 728220 - DNA, 120 bp, Artificial Sequence
  ENSG00000198478_8 (sequence is synthesized)
atcacagttcccatgctttgtaataacacctggtgaaaaagttagatattctagacttgttttagtaatggaaactcttacctccacatattatcctacagatgtttccagaaatccctg

SEQ ID NO: 728221 - DNA, 120 bp, Artificial Sequence
  ENSG00000198478_9 (sequence is synthesized)
ttgtaacatcaagtgatcagaactaagttactgggatgacaataattgctatttgaaatatatgcttctttatttcttgcaaggggcaagtttcacccaaatgcctgagactgcttgaaa

SEQ ID NO: 728222 - DNA, 120 bp, Artificial Sequence
  ENSG00000198478_10 (sequence is synthesized)
gatatattttaagtggtgcactaattagtgaatatataggaaaattatctgacgagtatctgaaggcattttcagctctagcaatttatttataatatataagttcatatattttttaat

SEQ ID NO: 728223 - DNA, 120 bp, Artificial Sequence
  ENSG00000198478_11 (sequence is synthesized)
ccagctcccctaacagacagctgctgcttctattttgtgaagggactatattttttgagaaaggaaaatctcagttagatatattttgtgaacccttgattagacatattaaaatatacc

SEQ ID NO: 728224 - DNA, 120 bp, Artificial Sequence
  ENSG00000198478_12 (sequence is synthesized)
aatgttgtagtaaaatttaatttttccttttgttacttttcatttgcctctaattttgcttgctcatatttctggccaatgtacagcctcatatttttcagagtaatacagatacttgtt

SEQ ID NO: 728225 - DNA, 120 bp, Artificial Sequence
  ENSG00000198478_13 (sequence is synthesized)
ctcattccgtatatgagcacaagtaaggtttcagagcaacacacatgagaaagagagtaacccggaattgtacttgtcaagcaaaatctatactcctattggagtggatgctgatgaaca

SEQ ID NO: 728226 - DNA, 120 bp, Artificial Sequence
  ENSG00000198478_14 (sequence is synthesized)
tcgaacatatctacttcattagagcagaggctatttttctgcattcttgtccctataacagggatgcttaattttttttttaacttagagttttaaattgccaaacatgggaacagcctt

SEQ ID NO: 728227 - DNA, 120 bp, Artificial Sequence
  ENSG00000198478_15 (sequence is synthesized)
gaataggataaattttcagagggctgcctaaaatattttatttctagcatcctgattctggacttttcattataattctgagcaggaaatttataagaaattgaaagagcagaagaatta

SEQ ID NO: 728228 - DNA, 120 bp, Artificial Sequence
  ENSG00000198478_16 (sequence is synthesized)
cagccctgtcacatgtgcccagcactccgccccatgccttgctaaatgtagactaaagaacttgttgaatgctaaggctgaaatcccaacctgagatttgtagtccaggattacaaccag

SEQ ID NO: 728229 - DNA, 120 bp, Artificial Sequence
  ENSG00000198478_17 (sequence is synthesized)
aaggaaagtatgacagatttctacttaactagaatggacacatgatccacaattttctcttcaagggaagctgttgtcaaattatggatattactggttagttgtcattaagtaagatcc

SEQ ID NO: 728230 - DNA, 120 bp, Artificial Sequence
  ENSG00000198478_18 (sequence is synthesized)
aggtcaaattccatttgacaaatcccagggactatccaggaatttttttttaactggatattgtgtttgagtatgtgagtcttctgataaaactcagaatttctttttaagcagttgtaa

SEQ ID NO: 728231 - DNA, 120 bp, Artificial Sequence
  ENSG00000198478_19 (sequence is synthesized)
actcttgctagtgagtgccaagaaccaacttggtaaggttgaggctttgcaagttaactgctggggttataggatcaataccatacttgctagacaaagctacccagatttgtcttatat

SEQ ID NO: 728232 - DNA, 120 bp, Artificial Sequence
  ENSG00000198478_20 (sequence is synthesized)
tataatttttgagttaaccgtagtatacctattatgattatagtaaacagactagtgggtagtaatgctaaattaccatcacagttatgtgccatctccccaccccattttttttttttt

SEQ ID NO: 728233 - DNA, 120 bp, Artificial Sequence
  ENSG00000198478_21 (sequence is synthesized)
ttttttgatcagcaaagaaatacaggagaccagtctcgagtggtgctgtacttgttatgagtgaggcagcagcacagtgtgtggcatttacatggtacccaggctccacagagtaccaag

SEQ ID NO: 728234 - DNA, 120 bp, Artificial Sequence
  ENSG00000198478_22 (sequence is synthesized)
atgttgccctctgggaccacacttagctcagagaatatggggtccttacttgtattcttttatcagctgattttgaaacatataataatgattttcttgttcccttctttaactagctgc

SEQ ID NO: 728235 - DNA, 120 bp, Artificial Sequence
  ENSG00000198478_23 (sequence is synthesized)
ctttagattttgataatcacagtcttaaaatactaggaaagaagtggatgggaattgtaggcatagatttcatatcaagggcatttcaagacagaatttttatttcctgtagtaggcttg

SEQ ID NO: 728236 - DNA, 120 bp, Artificial Sequence
  ENSG00000198478_24 (sequence is synthesized)
ctggagcaaaggaaatgtgctgctaaaaatcaacttatgccattttaaaattagataaaatatggagtgccatcctgctaggtgagtacagaccagaagaaaatttagttgggaaaatac

SEQ ID NO: 728237 - DNA, 120 bp, Artificial Sequence
  ENSG00000198478_25 (sequence is synthesized)
ttgtttttccaaattccggtgttttattacaatcaaagaagaggaaagcaaggtattttttcacctcagattctaatatattctagatttgtttctgttttatagatttaattcaatacc

SEQ ID NO: 728238 - DNA, 120 bp, Artificial Sequence
  ENSG00000198478_26 (sequence is synthesized)
tccacatagatgtttttatattacatgaatttaataataaactaaacttttttttgtctcccgttattgaaaagtaccaaagcttctttctgttgtgtttgattttactataggggtttt

SEQ ID NO: 728239 - DNA, 120 bp, Artificial Sequence
  ENSG00000198478_27 (sequence is synthesized)
gctttttctagagatacttttcatttaacagcttttgttaagtgtcaggctgcactttgctccatataattattgttttcagatttcaacttgtatgtgtttgtctcttaaagcattggt

SEQ ID NO: 728240 - DNA, 120 bp, Artificial Sequence
  ENSG00000198478_28 (sequence is synthesized)
gaaatcacatattttatattcagcataaaggagaataaattccagaaaacacatattctgaaaatggagtgtttgttccctgccatttttcacacctctcttaattttagttctgtttag

SEQ ID NO: 728241 - DNA, 120 bp, Artificial Sequence
  ENSG00000198478_29 (sequence is synthesized)
ttgagaggctgtgattttactcttgcctgtgaacctcatgcatgaaagcagcacattaaattgtaaaaatacaaacagatcgtgtgatcattcaaggagccagacatgaggtcctgcacg

SEQ ID NO: 728242 - DNA, 120 bp, Artificial Sequence
  ENSG00000198478_30 (sequence is synthesized)
agggtgttgggaggacaccacagattcatctcagacagtgatcaggactgaggatggagttaaatcactcagcccctgggtggggtggggtggttcaaatggatgactgatctcctgagt

SEQ ID NO: 728243 - DNA, 120 bp, Artificial Sequence
  ENSG00000198478_31 (sequence is synthesized)
acactgaagccacaggctggtggccatgttctctgaattgggtgcagaagacaagggcagagtggctgcggcccctattacctttgtagcagccacatcagaaagcagaagaaaacagta

SEQ ID NO: 728244 - DNA, 120 bp, Artificial Sequence
  ENSG00000198478_32 (sequence is synthesized)
tttctgaaggcattgtttgaggttgatctcagcactgaacgatttcaagccctacgcaccagaacagaaggagggtggaggaagtgatcagagggaacgagctgtaggtttgcagaaatg

SEQ ID NO: 728245 - DNA, 120 bp, Artificial Sequence
  ENSG00000198478_33 (sequence is synthesized)
tgtgaaaccaaaatgatcactgcctacttgtgattcaaatcttcagagttttcctagttcttctagaaatacatgtcaggtttgtttgttcatcctttctgtcagcatggatcaagcccc

SEQ ID NO: 728246 - DNA, 120 bp, Artificial Sequence
  ENSG00000198478_34 (sequence is synthesized)
taaaatgtggtaagtgttgtcagagcagggcaatatctctactctcaagtatgaggggaatagaaacaaagcagcagttttagccagggttcaatgatagagtggaggtaaattaagagc

SEQ ID NO: 728247 - DNA, 120 bp, Artificial Sequence
  ENSG00000198478_35 (sequence is synthesized)
ctccaggctgtgattcaccatttgagacattatacataatttgtttttgttataagccatttgaatttttaaaaaatttcatacatgcaatggaatatagatatgtatatacacatataa

SEQ ID NO: 728248 - DNA, 120 bp, Artificial Sequence
  ENSG00000198478_36 (sequence is synthesized)
tatatatgctaaagtataaagagtaataataatgacaataaacaaacccctgtgtgcctaccacccaccttattgcctttcctttgaggtaccgtgtgcggtttcctgaacctatctcta

SEQ ID NO: 728249 - DNA, 120 bp, Artificial Sequence
  ENSG00000198478_37 (sequence is synthesized)
tccctgtctgatagagggaacccctgtactgaactttgtgttgaccatagccttcttgtctttcatcactttatctccatgtatgtatccttaaagaataataaatggaattaaactgaa

SEQ ID NO: 728250 - DNA, 120 bp, Artificial Sequence
  ENSG00000198482_0 (sequence is synthesized)
aaacccggaagcggatcgggtggagtgaaggtcacgtcgccatgatatctcttccaaatgcttgatgaaaaaggtggaagggtcacttgacccagggagttgaaggctgcagtgagccct

SEQ ID NO: 728251 - DNA, 120 bp, Artificial Sequence
  ENSG00000198482_1 (sequence is synthesized)
gtttttgccaccacactccagcctgggattgatttctaaagactcatgttacgtgaggaagcagctcagaagaggaaaggaaaggagtcaggcatggctcttcctcagggacgcttgact

SEQ ID NO: 728252 - DNA, 120 bp, Artificial Sequence
  ENSG00000198482_2 (sequence is synthesized)
ttcagggatgtggctatagaattctcattggcagagtggaaattcctgaaccctgcacagagggctttgtacagggaagtgatgttggagaactacaggaacctggaggctgtggatatc

SEQ ID NO: 728253 - DNA, 120 bp, Artificial Sequence
  ENSG00000198482_3 (sequence is synthesized)
tcttccaaacacatgatgaaggaggtcttgtcaacagggcaaggcaatagagaagtgatccacacagggacattgcaaagacatcaaagttatcacattggagacttttgcttccaggaa

SEQ ID NO: 728254 - DNA, 120 bp, Artificial Sequence
  ENSG00000198482_4 (sequence is synthesized)
attgagaaagaaattcataacattgagtttcagtgtcaagaagatgaaagaaatggccatgaagcacccacgacaaaaataaaaaagttgactggtagcacagaccaacatgatcacagg

SEQ ID NO: 728255 - DNA, 120 bp, Artificial Sequence
  ENSG00000198482_5 (sequence is synthesized)
catgctggaaacaagcctattaaagatcagcttggatcaagcttttattcacatctgcctgaactccacatatttcagatcaaaggtgaaattgctaatcaacttgagaagtctaccagt

SEQ ID NO: 728256 - DNA, 120 bp, Artificial Sequence
  ENSG00000198482_6 (sequence is synthesized)
gatgcttcctcagtttcaacatcccaaagaatttcctgtaggccccaaatccatatttctaataactatgggaataatcccctgaattcttcattactcccacaaaaacaggaagtacac

SEQ ID NO: 728257 - DNA, 120 bp, Artificial Sequence
  ENSG00000198482_7 (sequence is synthesized)
atgagagaaaaatctttcccatgtaatgagagtggcaaagcctttaattgtagctcactcttaaggaaacaccagataccccatttaggagacaaacaatataaatgtgatgtatgtggc

SEQ ID NO: 728258 - DNA, 90 bp, Artificial Sequence
  ENSG00000198482_8 (sequence is synthesized)
gatgagagtgtggaaagtccttcagttacaagtcatcccttacatgccatcatagacttcatactggagtaaaaccttacaagtgtaatg

SEQ ID NO: 728259 - DNA, 89 bp, Artificial Sequence
  ENSG00000198482_9 (sequence is synthesized)
tggaaagtccttcagttacaagtcatcccttacatgccatcatagacttcatactggagtatctttcgtcaaaattcagcccttgtaat

SEQ ID NO: 728260 - DNA, 120 bp, Artificial Sequence
  ENSG00000198482_10 (sequence is synthesized)
aatgaatgtggcaaggcttttaatcaacaatcacacctttcacgccatcaaagacttcatactggagtgaaaccttacaaatgtaagatttgtgagaaggcttttgcgtgtcattcctat

SEQ ID NO: 728261 - DNA, 120 bp, Artificial Sequence
  ENSG00000198482_11 (sequence is synthesized)
ctggcaaaccatactagaattcatagtggagagaaaacatacaagtgtaatgagtgtggtaaggcttttaatcatcaatcaagccttgcacgtcatcatatacttcatactggagagaaa

SEQ ID NO: 728262 - DNA, 70 bp, Artificial Sequence
  ENSG00000198482_12 (sequence is synthesized)
cttgcacgtcatcatattcagtcagaaatcaacccttgagagacataagagaattcatactggagagaaa

SEQ ID NO: 728263 - DNA, 120 bp, Artificial Sequence
  ENSG00000198482_13 (sequence is synthesized)
tgtaattcacagctggcacgacatagaagaattcacactggagagaaaacttacaagtgtaatgagtgtcgcaagaccttcagccgcaggtcatcccttctatgccatcgtagacttcat

SEQ ID NO: 728264 - DNA, 120 bp, Artificial Sequence
  ENSG00000198482_14 (sequence is synthesized)
tgtacggtttgtaacaaggttttcatgcgtaattcagtcctggctgtacatactagaattcacactgcaaagaaaccttacaagtgtaatgaatgtgggaaagcttttaatcaacaatca

SEQ ID NO: 728265 - DNA, 88 bp, Artificial Sequence
  ENSG00000198482_15 (sequence is synthesized)
ctggagagaaaccttacaaatgtgaagcatgtgacaaagtttttggtcagaaatcagctcttgagttacagatgtcaggtttgtgaca

SEQ ID NO: 728266 - DNA, 120 bp, Artificial Sequence
  ENSG00000198482_16 (sequence is synthesized)
aaaccatacagatgtcaggtttgtgacacagctttcacgtggaattcacagctggcacgacatacaagaattcacactggagaaaaaacttacaagtgtaatgagtgtgggaagaccttc

SEQ ID NO: 728267 - DNA, 120 bp, Artificial Sequence
  ENSG00000198482_17 (sequence is synthesized)
agaaaaaacttacaagtgtaatgagtgtgggaagaccttcagttacaagtcatcacttgtatggcatcgtagacttcatggtggagagaaatcttacaaatgtaaggtttgtgacaaggc

SEQ ID NO: 728268 - DNA, 120 bp, Artificial Sequence
  ENSG00000198482_18 (sequence is synthesized)
cacagtggaatgaaaccttacaagtgtaatgagtgcagcaagaccttcagtaacaggtcatcccttgtatgccatcgtagaattcatagtggtgagaaaccttacaagtgtagtgagtgc

SEQ ID NO: 728269 - DNA, 120 bp, Artificial Sequence
  ENSG00000198482_19 (sequence is synthesized)
agcaagacgttcagtcagaaggcaacccttctatgccatcgtagacttcatagtggtgagaaaccttacaagtgtaacgactgtggcaataccttccgtcactggtcatcccttgtatac

SEQ ID NO: 728270 - DNA, 120 bp, Artificial Sequence
  ENSG00000198482_20 (sequence is synthesized)
catcgtagacttcatactggagagaaatcttacaaatgtacggtttgtgacaaggctttcgtgcgtaattcatacctggcaagacatattagaattcacactgcagagaaaccttacaag

SEQ ID NO: 728271 - DNA, 77 bp, Artificial Sequence
  ENSG00000198482_21 (sequence is synthesized)
tttcacgtcatgtgacaaagttttcagtcgcaaatcacaccttaaaagacataggataattcatactggagagaaac

SEQ ID NO: 728272 - DNA, 84 bp, Artificial Sequence
  ENSG00000198482_22 (sequence is synthesized)
accggtcaacacttattcaccatcaggcaattcatggtatagggaaatttgattaatataatgattgtcacaaagtcttcagta

SEQ ID NO: 728273 - DNA, 120 bp, Artificial Sequence
  ENSG00000198482_23 (sequence is synthesized)
aaatttgattaatataatgattgtcacaaagtcttcagtaacactacaacaattgcaaatcattggagaatccatgatgaagagaaatcttctgagtgtaataaatgtggcatgtttttc

SEQ ID NO: 728274 - DNA, 120 bp, Artificial Sequence
  ENSG00000198482_24 (sequence is synthesized)
agacattgttcatacattgcagttcattggcaacctcatactggagagaaaccttacaaatgtcatgattgaggcaaggtcttcagtcaagcttcatcctatgcaaaacaggagaattca

SEQ ID NO: 728275 - DNA, 120 bp, Artificial Sequence
  ENSG00000198482_25 (sequence is synthesized)
tacaggagagaaacctcacaagtgtgatgattgtggcaaagcctttacttcacattcacacctcgttggacatcagagaatccatactggacagaaatcttgcaaatgtcatcagtgtgg

SEQ ID NO: 728276 - DNA, 120 bp, Artificial Sequence
  ENSG00000198482_26 (sequence is synthesized)
caaggtcttcagtccgaggtcactccttgcagaacatgagaaaattcatttttgagataactgttcccaatgcagtgagtatagcaaaccatcaagcattaattgacattggagtcaatt

SEQ ID NO: 728277 - DNA, 120 bp, Artificial Sequence
  ENSG00000198482_27 (sequence is synthesized)
ttggagtcaattcagcattgacttgagtttgtgttgacttaacattgagttcaagccttaattgacattcaagtgtttatgttaagaggatggggccaggtgtggtggctcaggcctgta

SEQ ID NO: 728278 - DNA, 120 bp, Artificial Sequence
  ENSG00000198482_28 (sequence is synthesized)
tggaagaccaaggcacataggtcacttgaggtcagaagtttgaaaccaccatggccaacagatgtcggccactttcgccatcctgttttttgtttcttattttcttatttatttatttat

SEQ ID NO: 728279 - DNA, 120 bp, Artificial Sequence
  ENSG00000198482_29 (sequence is synthesized)
atggtgagttttgctctgtgttgcattaagtctccgcttcccaggtccccgccgcttctgtccctgggacgtggggtccccacagacctggaaattctcgcccgtcttccttcgcccaga

SEQ ID NO: 728280 - DNA, 120 bp, Artificial Sequence
  ENSG00000198482_30 (sequence is synthesized)
gcaaattgagacagcccagtgagaggccgggtgtcgcttcctttcgggtttaaagtcgtctggaggctggtcccgtcccggatatctcttccaaatgcttgatgaaaaaggtggaagggt

SEQ ID NO: 728281 - DNA, 120 bp, Artificial Sequence
  ENSG00000198482_31 (sequence is synthesized)
tagctgggaatgatggcacatgcctgcagtatcaactactgtggagtctgcagtgggaggatggcttgagcctgggaggtcaagactatagtgagctgtaatcatgctactgcactccag

SEQ ID NO: 728282 - DNA, 120 bp, Artificial Sequence
  ENSG00000198482_32 (sequence is synthesized)
catggttgacagagcaagatgctgtctaaaaaagaatacttattgtaaagtttgggtacaggaataatgaagtcattgatagtttatgaacaggctatggagttgatgcccaaaagaaat

SEQ ID NO: 728283 - DNA, 120 bp, Artificial Sequence
  ENSG00000198482_33 (sequence is synthesized)
aaacagtttgtaaatgaataacttattttgagttgtgacaagacaatgttgaaagtgatgcatgaagcggcaggcagaccatccacatcagttttacagaaaaaaagttaatcttgttcg

SEQ ID NO: 728284 - DNA, 120 bp, Artificial Sequence
  ENSG00000198482_34 (sequence is synthesized)
tttacagaaaaaaagttaatcttgttcgtgctgcagtgaagagaacagcaaacaggagaaacaatagtcaggaattcaataatagcctggttaacatgatgaaaccccgtctctactaaa

SEQ ID NO: 728285 - DNA, 120 bp, Artificial Sequence
  ENSG00000198482_35 (sequence is synthesized)
aacctctgtctaaaacaaacaaacaaaaaggtctagccccctctcctcctttgtctgccatcatggtgtgtgcttgactccacttcttgtcatgtcttctcacaagactttcaggattaa

SEQ ID NO: 728286 - DNA, 120 bp, Artificial Sequence
  ENSG00000198482_36 (sequence is synthesized)
gcggtttctggccaacaaccaaaagtaaaatcgtccgatttcccagtggattcgaatgaaaactggcaataaaatcaggtccaactttaaaaggagacattggagaagaaccaagctggg

SEQ ID NO: 728287 - DNA, 120 bp, Artificial Sequence
  ENSG00000198482_37 (sequence is synthesized)
tctataaggaattgcacgtgagatggcacacatatttatgctgtgtgagcatcataatcacgttacttaagctgaaaatgtcactaccatctggagacttggacatgttttattgggaat

SEQ ID NO: 728288 - DNA, 120 bp, Artificial Sequence
  ENSG00000198482_38 (sequence is synthesized)
atatttttttctctctgaatctgttatgaacgcattggttgggtgggttcagtaataaacatgtgagacctttcatttcaaaaaaaaaattttaatgacataatagattacctaaatttc

SEQ ID NO: 728289 - DNA, 120 bp, Artificial Sequence
  ENSG00000198483_0 (sequence is synthesized)
gctttttgacagctgtctcttgcacagccgcagccaagtccggtgggttcgggaacctgtggcccggctctctgcgcgtccccatcccccgtggccccgaccccggccatgaagcgtatc

SEQ ID NO: 728290 - DNA, 120 bp, Artificial Sequence
  ENSG00000198483_1 (sequence is synthesized)
ttctcctgctccagcacacaggtggcggtggagagatggaaccgccatgatcagaagctgctggaggcagtgcacaggggggatgtgggacgcgtggctgccctggcctccaggaaatct

SEQ ID NO: 728291 - DNA, 120 bp, Artificial Sequence
  ENSG00000198483_2 (sequence is synthesized)
gcccgacccaccaagcttgactcgaatggccagtccccgtttcatctggcagcctccaaaggcctgacagaatgtctgactatcctgcttgcaaatggggctgacatcaacagcaagaat

SEQ ID NO: 728292 - DNA, 120 bp, Artificial Sequence
  ENSG00000198483_3 (sequence is synthesized)
gaggatggaagcactgccctacacttggccaccatctcctgccagccacagtgtgttaaggttctgcttcagcatggtgctaatgaagatgctgtggatgcagaaaaccgtagtccattg

SEQ ID NO: 728293 - DNA, 120 bp, Artificial Sequence
  ENSG00000198483_4 (sequence is synthesized)
cactgggcagcctcctctggctgtgcctcaagtgtgctcctgctgtgtgaccacgaagccttcctggacgtgttggataatgatggacgtacacccctgatgatcgcatcgctgggtggg

SEQ ID NO: 728294 - DNA, 120 bp, Artificial Sequence
  ENSG00000198483_5 (sequence is synthesized)
cacgcagctatctgctcacagctgctgcagcgaggcgcccgagttaatgttacagacaagaatgacaaatcggctttgatcctggcctgtgagaaaggcagtgccgaggtggctgaactg

SEQ ID NO: 728295 - DNA, 120 bp, Artificial Sequence
  ENSG00000198483_6 (sequence is synthesized)
ctcctgagccacggagctgacgcgggggctgtggacagcacagggcatgatgctctgcactatgctctgcacacacaagacaaggcactgtggaggcacctacagcaggccctgagccgg

SEQ ID NO: 728296 - DNA, 120 bp, Artificial Sequence
  ENSG00000198483_7 (sequence is synthesized)
cggcggcggggcggtcagaggctagtccagcacccagatctcgcatcccaggcctctccatctgagccccaggcaggttctcctcctaagagctcatggagagcagagcctgaagaggag

SEQ ID NO: 728297 - DNA, 120 bp, Artificial Sequence
  ENSG00000198483_8 (sequence is synthesized)
caagaggagaaggaggatgaagacccgtgctcggaggagtggaggtggaagtatgaagaggagcggaggaaagttgttcggctggagcaggagctggtgcaaaagacagaagagtgtaag

SEQ ID NO: 728298 - DNA, 120 bp, Artificial Sequence
  ENSG00000198483_9 (sequence is synthesized)
actcaagctgcagcctatctggaccttgagaaccagattcgagagcaggcgcaggagctaggggtcctcctatcctgggagcccagagcttcaggaaagcaaggctctagtctccggcct

SEQ ID NO: 728299 - DNA, 120 bp, Artificial Sequence
  ENSG00000198483_10 (sequence is synthesized)
ggaggggatggcatggagcagggttgtcctaaggacctgctggctgagagtacacaagagctaaagaagcagcagcaggcagcagccacagtaaatccagtattagctccaaagaaggct

SEQ ID NO: 728300 - DNA, 120 bp, Artificial Sequence
  ENSG00000198483_11 (sequence is synthesized)
gaggactcagccccaggaaagatccagtatgaagtccatggaaggtcccaaccagaagaacaggggccaccccagagcccagcgtctgagaccatcaggaaagccacaggacagcaactg

SEQ ID NO: 728301 - DNA, 120 bp, Artificial Sequence
  ENSG00000198483_12 (sequence is synthesized)
actaccaatggggcacagacctttggccctgatcatgctgaccagctgcctgctggtcagaaggagagttcccaggttctaggagttgaaccaggaggcacagtggctgaaccagtgggc

SEQ ID NO: 728302 - DNA, 120 bp, Artificial Sequence
  ENSG00000198483_13 (sequence is synthesized)
tccccgtgctgaggcagcagcagctgcctgggagaagatggaagcccgactggagcgggtgctggcaaggctggaatgggcaaaggcaggactacaggtgaaacctgaggttccttccca

SEQ ID NO: 728303 - DNA, 120 bp, Artificial Sequence
  ENSG00000198483_14 (sequence is synthesized)
ggagtccagagagggagccctaaaggcagccccagggagcatcaaacaggatgaagagaaggagaaaagggttcctggggctcaaggagagcctctaggggcccttggaggggaaaaggc

SEQ ID NO: 728304 - DNA, 120 bp, Artificial Sequence
  ENSG00000198483_15 (sequence is synthesized)
cctaggaggcctggcaaagggacagctggagaaggagatgtcagtactgagactgagcaacagtaacttgctggaggagttaggggagttggggcgggagcggcagaggttgcagaggga

SEQ ID NO: 728305 - DNA, 120 bp, Artificial Sequence
  ENSG00000198483_16 (sequence is synthesized)
gctacagtccctgagccagcggctgcagcgggagtttgtgcccaagccacaggcgcaggtccagctacagcagttgcgacagagtgtggggctgctgacaaatgaactggccatggagaa

SEQ ID NO: 728306 - DNA, 120 bp, Artificial Sequence
  ENSG00000198483_17 (sequence is synthesized)
ggaggccacagagaagctgcggaagctcctggcctcccagagcagcggtctccgagggctgtgggactgcctgcccgcagacctagtgggcgagaggagtgcacaaagcaaagcagcgga

SEQ ID NO: 728307 - DNA, 120 bp, Artificial Sequence
  ENSG00000198483_18 (sequence is synthesized)
gtccctggaggagctgcgggcctgcatcagcaccctggtggatcggcaccgggaggcccagcaggtgctggctcggctgcaagaagaaaaccagcagttgcgggggtccttgtccccgtg

SEQ ID NO: 728308 - DNA, 120 bp, Artificial Sequence
  ENSG00000198483_19 (sequence is synthesized)
tagggagccaggcacctccttaaaggccccagcatccccccaagtggccgctctggagcaagacctggggaagctggaggaagagctgcgggcagttcaggccacgatgagcgggaagag

SEQ ID NO: 728309 - DNA, 120 bp, Artificial Sequence
  ENSG00000198483_20 (sequence is synthesized)
ccaggagatcggaaagctgaagcagctgctctaccaagccacagaggaagtggctgagctaagggcccgggaggcagccagcctacggcaacacgagaaaactcggggttcgctggtggc

SEQ ID NO: 728310 - DNA, 120 bp, Artificial Sequence
  ENSG00000198483_21 (sequence is synthesized)
ccaggctcaggcttggggccaggagctaaaggctctgttggaaaagtataatacggcctgccgggaagtgggtcggctgcgggaggcggtggccgaggagcgccgccggagcggggacct

SEQ ID NO: 728311 - DNA, 120 bp, Artificial Sequence
  ENSG00000198483_22 (sequence is synthesized)
ggccgctcaggcagccgaacaagagcgccaggccagcgagatgcgggggcgctccgagcagtttgagaaaacggcagagctgctgaaagagaagatggagcatctcattggggcttgccg

SEQ ID NO: 728312 - DNA, 120 bp, Artificial Sequence
  ENSG00000198483_23 (sequence is synthesized)
agacaaggaagccaagatcaaggagttgttgaagaagctggagcagctttcagaagaggttctagcaattcggggagaaaatgctcgccttgccctgcagctgcaggattcccagaagaa

SEQ ID NO: 728313 - DNA, 120 bp, Artificial Sequence
  ENSG00000198483_24 (sequence is synthesized)
ccatgaagagatcatctccacctacaggaatcatctactgaatgctgctcggggttacatggaacatgaagtgtacaatatcctgctgcaaatccttagcatggaagaggagtgaggcag

SEQ ID NO: 728314 - DNA, 120 bp, Artificial Sequence
  ENSG00000198483_25 (sequence is synthesized)
cctcactgtgtgccctcagggatacgagattctctgttggaataagaaaccctggttgacagaggcttcatcaggctgtggtgggcgggggtgttggccactaggcaatggtatgggcag

SEQ ID NO: 728315 - DNA, 120 bp, Artificial Sequence
  ENSG00000198483_26 (sequence is synthesized)
ggcttcacctgacattatggacctcagacctgagaacctggaccctggaatcagcatggatgagaccagaggaggtatggatggaaacaagctctatggaaaataaagcatgaggcagga

SEQ ID NO: 728316 - DNA, 120 bp, Artificial Sequence
  ENSG00000198488_0 (sequence is synthesized)
agtgtgtgaagtaaagggattaaaggctagtctcaggctggggatggctcctgtctatttcttctctctcagagactgcagatggcttttccctgccgcaggtccctgactgccaagact

SEQ ID NO: 728317 - DNA, 120 bp, Artificial Sequence
  ENSG00000198488_1 (sequence is synthesized)
ctggcctgcctcctggtgggcgtgagtttcttagcactgcagcagtggttcctccaggcgccaaggtccccgcgggaggagaggtccccgcaggaggagacgccagagggtcccaccgac

SEQ ID NO: 728318 - DNA, 120 bp, Artificial Sequence
  ENSG00000198488_2 (sequence is synthesized)
gctcccgcggctgacgagccgccctcggagctcgtccccgggcccccgtgcgtggcgaacgcctcggcgaacgccacggccgacttcgagcagctgcccgcgcgcatccaggacttcctg

SEQ ID NO: 728319 - DNA, 120 bp, Artificial Sequence
  ENSG00000198488_3 (sequence is synthesized)
cggtaccgccactgccgccacttcccgctgctttgggacgcaccggccaagtgcgccggcggccgaggcgtgttcctgctcctggcggtgaagtcggcgcctgagcactacgagcgacgc

SEQ ID NO: 728320 - DNA, 120 bp, Artificial Sequence
  ENSG00000198488_4 (sequence is synthesized)
gagctcatccggcgcacgtgggggcaagagcgcagctacggcgggcggccagtgcgccgcctctttctattgggcaccccgggccccgaggacgaggcgcgcgcggagcggctggcggag

SEQ ID NO: 728321 - DNA, 120 bp, Artificial Sequence
  ENSG00000198488_5 (sequence is synthesized)
ctggtggcgctggaggcgcgcgagcacggcgacgtgctgcagtgggccttcgcggacaccttcctcaacctcacgctcaagcacctgcacttgctcgactggctggctgcacgctgcccg

SEQ ID NO: 728322 - DNA, 120 bp, Artificial Sequence
  ENSG00000198488_6 (sequence is synthesized)
cacgcgcgctttctgctcagcggcgacgacgacgtgttcgtgcacaccgccaacgtagtccgcttcctgcaggcgcagccacccggccgccacctgttctccggccagctcatggagggc

SEQ ID NO: 728323 - DNA, 120 bp, Artificial Sequence
  ENSG00000198488_7 (sequence is synthesized)
tccgtgcccatccgcgacagctggagcaagtacttcgtgccgccgcagctcttccccgggtccgcttacccggtgtactgcagcggcggcggcttcctcctgtccggccccacggcccgg

SEQ ID NO: 728324 - DNA, 120 bp, Artificial Sequence
  ENSG00000198488_8 (sequence is synthesized)
gccctgcgcgcggccgcccgccacaccccgctcttccccatcgacgacgcctacatgggcatgtgtctggagcgcgccggcctggcgcccagcggccacgagggcatccgacccttcggc

SEQ ID NO: 728325 - DNA, 120 bp, Artificial Sequence
  ENSG00000198488_9 (sequence is synthesized)
gtgcagctgcctggcgcacagcagtcctccttcgacccctgcatgtaccgcgagttgctgctagtgcaccgcttcgcgccctacgagatgctgctcatgtggaaggcgctgcacagcccc

SEQ ID NO: 728326 - DNA, 120 bp, Artificial Sequence
  ENSG00000198488_10 (sequence is synthesized)
ctgggtaccttacgtcctgcccagctctgtgcacctgaaccccagctgcgcactgaaatcagctggggtggggggtgtggaaaatgcctacatcctggctccatctcccgaagtttcgat

SEQ ID NO: 728327 - DNA, 120 bp, Artificial Sequence
  ENSG00000198488_11 (sequence is synthesized)
ttgattagtctggggtggacccagacatgttaagtattttttaagttcctccagtgatgcgaatgtgcagctaggcctgaggaccactcggctagactatctcttcatcctcgcaaagcc

SEQ ID NO: 728328 - DNA, 120 bp, Artificial Sequence
  ENSG00000198488_12 (sequence is synthesized)
agctccaccgccctctctgcaagaattccgggcccctcgctcccacactcgggtcctcttgagcagtggagcaagggagacctgggagcgtgggagccaggatcagcgccccctgccatg

SEQ ID NO: 728329 - DNA, 120 bp, Artificial Sequence
  ENSG00000198488_13 (sequence is synthesized)
tgcctacaaatgtcagttgtgatttccactgtttacaagtgagtggagctggagctgggctgacagtatcaggtggatcccgcttccccctcccccaagaagtcagccaacacgcagctg

SEQ ID NO: 728330 - DNA, 120 bp, Artificial Sequence
  ENSG00000198488_14 (sequence is synthesized)
aggcgcatgtggtggccttcttcccaccactaccccagtacaccgtgaggtagaaatcttcaccgtgcaaagtggaaaccagaggcccggtcagacagtgactaatccagggccgtggca

SEQ ID NO: 728331 - DNA, 120 bp, Artificial Sequence
  ENSG00000198488_15 (sequence is synthesized)
ttcccagacagcacaccactgtggtcccctccacactcaccccaaccaaagctaatggcctagttgggtcctgcccgccaataatcacccccacgggtcagagacaggctccttgccggg

SEQ ID NO: 728332 - DNA, 120 bp, Artificial Sequence
  ENSG00000198488_16 (sequence is synthesized)
gtctgggcctcaggctcagtgggccttggacaacccagcagggagttccggggagtccgaagtggagaaaggctggtgggaacatggaggccagtgttggggagcctgtggaggcaggtg

SEQ ID NO: 728333 - DNA, 120 bp, Artificial Sequence
  ENSG00000198488_17 (sequence is synthesized)
ggccagtgttggggagcctgtggaggcaggtgtgtagaattgtgttcgggaggtgggggatctgagaccgaagtggacagtggttaagattgtggggccgggcgaggtggctcacgcctg

SEQ ID NO: 728334 - DNA, 61 bp, Artificial Sequence
  ENSG00000198488_18 (sequence is synthesized)
ggccaatatggtgaaaccccgtctctattgggagtacaaaaattagccggccatagtggct

SEQ ID NO: 728335 - DNA, 120 bp, Artificial Sequence
  ENSG00000198488_19 (sequence is synthesized)
agtgtgtgaagtaaagggattaaaggctagtctcaggctggggatggctcctgtctatttcttctctctcagagactgcagctgcgggaggggagaggtcggccgagagcaagatggtgt

SEQ ID NO: 728336 - DNA, 120 bp, Artificial Sequence
  ENSG00000198488_20 (sequence is synthesized)
gtagagacaccaagcaggacgctacttcatgtgaggcgggaatgttagtttggatcaacctgttgatagagggaatgaaagcagatggcttttccctgccgcaggtccctgactgccaag

SEQ ID NO: 728337 - DNA, 120 bp, Artificial Sequence
  ENSG00000198492_0 (sequence is synthesized)
agagcgtcgccgagtcggagccggagcctgagccgcgcgctgtgtctccgctgcgtccgccgaggcccccgagtgtcagggacaaaagcctccgcctgctcccgcagacggggctcatct

SEQ ID NO: 728338 - DNA, 120 bp, Artificial Sequence
  ENSG00000198492_1 (sequence is synthesized)
gccgccgccgccgcgctgaggagagttcgccgccgtcgccgcccgtgaggatctgagagccatgtcggccagcagcctcttggagcagagaccaaaaggtcaaggaaacaaagtacaaaa

SEQ ID NO: 728339 - DNA, 120 bp, Artificial Sequence
  ENSG00000198492_2 (sequence is synthesized)
tggatctgtacatcaaaaggatggattaaacgatgatgattttgaaccttacttgagtccacaggcaaggcccaataatgcatatactgccatgtcagattcctacttacccagttacta

SEQ ID NO: 728340 - DNA, 120 bp, Artificial Sequence
  ENSG00000198492_3 (sequence is synthesized)
cagtccctccattggcttctcctattctttgggtgaagctgcttggtctacggggggtgacacagccatgccctacttaacttcttatggacagctgagcaacggagagccccacttcct

SEQ ID NO: 728341 - DNA, 120 bp, Artificial Sequence
  ENSG00000198492_4 (sequence is synthesized)
accagatgcaatgtttgggcaaccaggagccctaggtagcactccatttcttggtcagcatggttttaatttctttcccagtgggattgacttctcagcatggggaaataacagttctca

SEQ ID NO: 728342 - DNA, 120 bp, Artificial Sequence
  ENSG00000198492_5 (sequence is synthesized)
gggacagtctactcagagctctggatatagtagcaattatgcttatgcacctagctccttaggtggagccatgattgatggacagtcagcttttgccaatgagaccctcaataaggctcc

SEQ ID NO: 728343 - DNA, 120 bp, Artificial Sequence
  ENSG00000198492_6 (sequence is synthesized)
tggcatgaatactatagaccaagggatggcagcactgaagttgggtagcacagaagttgcaagcaatgttccaaaagttgtaggttctgctgttggtagcgggtccattactagtaacat

SEQ ID NO: 728344 - DNA, 120 bp, Artificial Sequence
  ENSG00000198492_7 (sequence is synthesized)
cgtggcttccaatagtttgcctccagccaccattgctcctccaaaaccagcatcttgggctgatattgctagcaagcctgcaaaacagcaacctaaactgaagaccaagaatggcattgc

SEQ ID NO: 728345 - DNA, 120 bp, Artificial Sequence
  ENSG00000198492_8 (sequence is synthesized)
agggtcaagtcttccgccacccccgataaagcataacatggatattggaacttgggataacaagggtcccgttgcaaaagccccctcacaggctttggttcagaatataggtcagccaac

SEQ ID NO: 728346 - DNA, 120 bp, Artificial Sequence
  ENSG00000198492_9 (sequence is synthesized)
ccaggggtctcctcagcctgtaggtcagcaggctaacaatagcccaccagtggctcaggcatcagtagggcaacagacacagccattgcctccacctccaccacagcctgcccagctttc

SEQ ID NO: 728347 - DNA, 120 bp, Artificial Sequence
  ENSG00000198492_10 (sequence is synthesized)
agtccagcaacaggcagctcagccaacccgctgggtagcacctcggaaccgtggcagtgggttcggtcataatggggtggatggtaatggagtaggacagtctcaggctggttctggatc

SEQ ID NO: 728348 - DNA, 120 bp, Artificial Sequence
  ENSG00000198492_11 (sequence is synthesized)
ttaagagctactctgaggacgatattcaccgttccattaagtataatatttggtgcagcacagagcatggtaacaagagactggatgctgcttatcgttccatgaacgggaaaggccccg

SEQ ID NO: 728349 - DNA, 120 bp, Artificial Sequence
  ENSG00000198492_12 (sequence is synthesized)
tttacttacttttcagtgtcaacggcagtggacacttctgtggcgtggcagaaatgaaatctgctgtggactacaacacatgtgcaggtgtgtggtcccaggacaaatggaagggtcgtt

SEQ ID NO: 728350 - DNA, 120 bp, Artificial Sequence
  ENSG00000198492_13 (sequence is synthesized)
ttgatgtcaggtggatttttgtgaaggacgttcccaatagccaactgcgacacattcgcctagagaacaacgagaataaaccagtgaccaactctagggacactcaggaagtgcctctgg

SEQ ID NO: 728351 - DNA, 120 bp, Artificial Sequence
  ENSG00000198492_14 (sequence is synthesized)
aaaaggctaagcaggtgttgaaaattatagccagctacaagcacaccacttccatttttgatgacttctcacactatgagaaacgccaagaggaagaagaaagtgttaaaaaggaacgtc

SEQ ID NO: 728352 - DNA, 120 bp, Artificial Sequence
  ENSG00000198492_15 (sequence is synthesized)
aaggtcgtgggaaataaaaggcagttctacacagactgcagcaacggttgcatctgcatatcctaagaggaaaaaatgaccttcaagagaattaggacttttttcttaatttcactgact

SEQ ID NO: 728353 - DNA, 120 bp, Artificial Sequence
  ENSG00000198492_16 (sequence is synthesized)
taggacttttttcttaatttcactgacttcagagacgattgcagacttgcagtttaagtattggaatttcacaaaagacataggacttaactggaaaatgaaaaaaaaaagaaaaagaaa

SEQ ID NO: 728354 - DNA, 120 bp, Artificial Sequence
  ENSG00000198492_17 (sequence is synthesized)
tttaggtgaaaaatgtcccttttattttggctttggttgtgatttcagagcataatgctatgtttttttgtctttttactatgtttttcggatttttaagtccgtaagtgcatacagttt

SEQ ID NO: 728355 - DNA, 120 bp, Artificial Sequence
  ENSG00000198492_18 (sequence is synthesized)
tctctaatttttaaaccctttcctcctcccattttgacatttgcacttggagaacacttgagttgtgaaggttttgggcatccaccccagaaagtgggaatttgattttatccttccgaa

SEQ ID NO: 728356 - DNA, 120 bp, Artificial Sequence
  ENSG00000198492_19 (sequence is synthesized)
ctggaagaacatttttatgaagaatttttgtctaggagaatataacagtgttacccaaggttgtgtctttaagggtggttcattttctctgaccttttgttactcaaagtaaagtactag

SEQ ID NO: 728357 - DNA, 120 bp, Artificial Sequence
  ENSG00000198492_20 (sequence is synthesized)
gagtcctaagaaatgttctgttcttgtacattatactgattaagtcaggattaatttgatttcaaagctgagaacagtggtaaaaactcgtttacagaaatgcattttggaagagaaaaa

SEQ ID NO: 728358 - DNA, 120 bp, Artificial Sequence
  ENSG00000198492_21 (sequence is synthesized)
tactgtaaaacgtgtcgtgaatgtttcttcagtttcttgttcagccaatgaggaaagggcattgcctttctttttaccattaatcacttctcaataaacgtgagatcctgttgagcatca

SEQ ID NO: 728359 - DNA, 120 bp, Artificial Sequence
  ENSG00000198492_22 (sequence is synthesized)
agtctttccaggtgttagtcgaaacctcgtggtgcgaccctggtcgtcccaaaccccctaggccttaatcctggggcggtgggggcggggaggccgtgagcacggcttccgctcctccaa

SEQ ID NO: 728360 - DNA, 120 bp, Artificial Sequence
  ENSG00000198492_23 (sequence is synthesized)
gaaggcgggaagatctcttgagcccagaagtttgaagctgcagtgagctatctacgatcatacctgtgaaaagccactgcgctccagccttggtgacagaacaagatctgcttgagcatg

SEQ ID NO: 728361 - DNA, 120 bp, Artificial Sequence
  ENSG00000198492_24 (sequence is synthesized)
tgggagcctgccagttcaggtacagacattcaactgtgtcttggcataacctgtgatattaagtgcatttgatttttctttctcagaataatgcatatactgccatgtcagattcctact

SEQ ID NO: 728362 - DNA, 120 bp, Artificial Sequence
  ENSG00000198492_25 (sequence is synthesized)
gaaggagcccgactaggcccgggcccgccgctcctgggcaggccgagccgagccgaggcgtcgtctcttgcgggccaggtttcgggcctctcaggccggccgcgcccggcgcctctccct

SEQ ID NO: 728363 - DNA, 120 bp, Artificial Sequence
  ENSG00000198492_26 (sequence is synthesized)
cagcctgttcttcccgcttctcctcgggcctcggagcccacgggccgggccgcgccgcgttcccttctctcggcgggcctcgttttccttccttgtttccttccccttccttaaagccct

SEQ ID NO: 728364 - DNA, 120 bp, Artificial Sequence
  ENSG00000198492_27 (sequence is synthesized)
gggttcctcgcgtcgccggtggcgcgtctgccgcgttttctcccctgccccacgggcctggcgctttcccccgcctcccattttcagcctcttcctcactaccattcctgacgcctcccc

SEQ ID NO: 728365 - DNA, 120 bp, Artificial Sequence
  ENSG00000198492_28 (sequence is synthesized)
tcgggcctgctcctttattctcccttcgggccctgccttaatttgttcttccttttccatttctcctttggacaacttgctgctcggcgacgtttccttcccctgcagagaccaaaaggt

SEQ ID NO: 728366 - DNA, 120 bp, Artificial Sequence
  ENSG00000198498_0 (sequence is synthesized)
aggcgccacgtgggattcggcccgggtgctcttgtgagctgctgctcctgcggttggtgagattacctgggtctagagtgcggagctgctccgtggccacgaggacgtcaccatgcccaa

SEQ ID NO: 728367 - DNA, 120 bp, Artificial Sequence
  ENSG00000198498_1 (sequence is synthesized)
agcaccaaagggaaaaagtgcaggacgggaaaaaaaagtcatccatccatatagtagaaaagcagctcaaattacgagagaggcccacaaacaagaaaaaaaggaaaaattgaagaatga

SEQ ID NO: 728368 - DNA, 120 bp, Artificial Sequence
  ENSG00000198498_2 (sequence is synthesized)
aaaggccttgcgtctcaaccttgttggtgaaaaactgcaatggtttcaaaatcatcttgatccccaaaaaaagagatattcaaagaaagatgcttgtgaactaattgaaaggtacttaaa

SEQ ID NO: 728369 - DNA, 120 bp, Artificial Sequence
  ENSG00000198498_3 (sequence is synthesized)
tcgattcagcagtgagctggagcagattgagttacataacagtatcagggacaggcaggggaggcggcactgttcccgggagaccgtcatcaagcagacgatggagcgggagcgacagca

SEQ ID NO: 728370 - DNA, 120 bp, Artificial Sequence
  ENSG00000198498_4 (sequence is synthesized)
gtttgagggatatggccttgagattccagacattctaaatgcaagtaatctgaaaacatttagggaatgggactttgatctgaagaaattaccaaacattaaaatgagaaaaatttgcgc

SEQ ID NO: 728371 - DNA, 120 bp, Artificial Sequence
  ENSG00000198498_5 (sequence is synthesized)
taatgatgcaattcccaagacgtgcaagaggaaaactattataactgtagaccaagatttgggggaattggaactaaacgatgaatcaagtgattcagatgaggaaatgactgcagtggc

SEQ ID NO: 728372 - DNA, 120 bp, Artificial Sequence
  ENSG00000198498_6 (sequence is synthesized)
ctaattgtcttcacttgaattgaaaataaataatttgagagcttcaaattatattcattgattatggtacctaattgtcatgatacaaaaatttgatactgacattctcttatatgatga

SEQ ID NO: 728373 - DNA, 120 bp, Artificial Sequence
  ENSG00000198498_7 (sequence is synthesized)
attaagttgctaaaatagatagatgtgatctgcagaagttgtttagtcttcatctgaatttcaggctgggagggagcaatataactaaggacaaaaaatgttttgtttttcttgtgtatt

SEQ ID NO: 728374 - DNA, 120 bp, Artificial Sequence
  ENSG00000198498_8 (sequence is synthesized)
tatgatcacctaatttcacgttttgtgaaatggacagtaacctgtttcctgaaagattcctgtgggtactttttgagctgtgataatagcaaaattgtttttcggtaataatatcacact

SEQ ID NO: 728375 - DNA, 120 bp, Artificial Sequence
  ENSG00000198498_9 (sequence is synthesized)
aatgcttcttttaaacattaaacctattttccttttttacagaataagggaaaatgtgataagaagtttgtatacatttctggattatagattattatttatcttttgaaccagagctaa

SEQ ID NO: 728376 - DNA, 120 bp, Artificial Sequence
  ENSG00000198498_10 (sequence is synthesized)
atggtaaaagaaaaaaaatcagtgatgattgttatgttgatctcccacaattaatttatcttttgacaaaggggataaagagtttcagtttagctccttttgattgtatattattttttg

SEQ ID NO: 728377 - DNA, 120 bp, Artificial Sequence
  ENSG00000198498_11 (sequence is synthesized)
cttttttattgtgaaaagaggtaggttttatttgtggagagagagttgaagattagggaaccagtgattttaattatgctactttttcttctaagagataaattgatatatcattcagtg

SEQ ID NO: 728378 - DNA, 120 bp, Artificial Sequence
  ENSG00000198498_12 (sequence is synthesized)
tcatgaaaaacatgaatgttgtacaattttcttcctcaaaaaactttttaaatgtaagtatccttattttttttttaaaagagcacaatgtaggtgtatttgagtattttcaagaaaaga

SEQ ID NO: 728379 - DNA, 120 bp, Artificial Sequence
  ENSG00000198498_13 (sequence is synthesized)
ataaaaacattaatgcagtattaggttaactggatatcaactaagccttgttaacagttaaagtattataactttttttacttctgaaaattaaaaataaaatttatttctgcaatttca

SEQ ID NO: 728380 - DNA, 120 bp, Artificial Sequence
  ENSG00000198498_14 (sequence is synthesized)
cagtatcaatttgtgattgatttcaaaggttttattttagatcttgtttatttcatttgattttcttcctttgatgtctttttctttgtgagggtttagaaaaattttggattctttttt

SEQ ID NO: 728381 - DNA, 120 bp, Artificial Sequence
  ENSG00000198498_15 (sequence is synthesized)
tttcccctacattcccaacaaaactatcaagtttgtgacagtgatgtgacatcatgtcttttttaccgtgatagtaatactgattactttcacattgatcttgtcaaccctaacttgtct

SEQ ID NO: 728382 - DNA, 120 bp, Artificial Sequence
  ENSG00000198498_16 (sequence is synthesized)
ccagaactccaaatttgcagtatcacatatggatttctcaaactctctacttgcatgtcttttgggcatctcagacttgacatgtcatgaaacaaaggccagcttttctcctaaaacttg

SEQ ID NO: 728383 - DNA, 120 bp, Artificial Sequence
  ENSG00000198498_17 (sequence is synthesized)
ctcctcctgcaggtttcttattccagtcagtggcattaccacctgcccagttgctcagatcagaaactctacagtcactttcatagtccacatccaacccgtcagcaaagcgtttagaat

SEQ ID NO: 728384 - DNA, 120 bp, Artificial Sequence
  ENSG00000198498_18 (sequence is synthesized)
ctgatgactttgactactactactaccatctcccacttccctggttcaggccactatcgtctcacctgtactatggtaatagcctcccagttgctctctgtacctccactctttcctgct

SEQ ID NO: 728385 - DNA, 120 bp, Artificial Sequence
  ENSG00000198498_19 (sequence is synthesized)
cagacattctaaatgcaagtaatctgaaaacatttaggtgagtctgtcttgtattgttcccctgaagctgtgtgtaaagtacctgacaggtgaactttcttcccctttgagtctagccgg

SEQ ID NO: 728386 - DNA, 120 bp, Artificial Sequence
  ENSG00000198498_20 (sequence is synthesized)
atttaaaagatgacagtagtgcattttgatcttggtggcagtactcagtcttccagaaggtttgcattactcttgtgctcaagtattctgcatattacagaacccatctgaatgttcaca

SEQ ID NO: 728387 - DNA, 120 bp, Artificial Sequence
  ENSG00000198498_21 (sequence is synthesized)
attcagaaaagctttcagttgtgttttcaaaactggtttgttctataggcttcctttagacattgaggtgcttaaaggaagtttctgataaaattctagtgattcaaaagagaagcatag

SEQ ID NO: 728388 - DNA, 120 bp, Artificial Sequence
  ENSG00000198498_22 (sequence is synthesized)
tatttaatgtttctgttaacaaaattattctcaaatttgtaaaagaatgaccttttaattagagttctttaggcagtttttcttttcgttgttattgtcagagttttaaaacttgctttg

SEQ ID NO: 728389 - DNA, 120 bp, Artificial Sequence
  ENSG00000198498_23 (sequence is synthesized)
gcgcctggcctaatagctttgttttatttcatggattctatgctagaatttatcatttaataggatttttcttaagtcatcttaaactaaccccttttgcaaatttttcatgttaattac

SEQ ID NO: 728390 - DNA, 120 bp, Artificial Sequence
  ENSG00000198498_24 (sequence is synthesized)
gggccggaagcgtgtagcgtctccacccgggctccaatccccagcctcgcactcagcaccaggcagagttcagcctcccgccgcaagctcccttccgccgctcccggcgagcacgcagcc

SEQ ID NO: 728391 - DNA, 120 bp, Artificial Sequence
  ENSG00000198502_0 (sequence is synthesized)
atagttctccctgagtgagacttgcctgctcctctggcccctggtcctgtcctgttctccagcatggtgtgtctgaagctccctggaggttcctacatggcaaagctgacagtgacactg

SEQ ID NO: 728392 - DNA, 120 bp, Artificial Sequence
  ENSG00000198502_1 (sequence is synthesized)
atggtgctgagctccccactggctttggctggggacacccgaccacgtttcttgcagcaggataagtatgagtgtcatttcttcaacgggacggagcgggtgcggttcctgcacagagac

SEQ ID NO: 728393 - DNA, 120 bp, Artificial Sequence
  ENSG00000198502_2 (sequence is synthesized)
atctataaccaagaggaggacttgcgcttcgacagcgacgtgggggagtaccgggcggtgacggagctggggcggcctgacgctgagtactggaacagccagaaggacttcctggaagac

SEQ ID NO: 728394 - DNA, 120 bp, Artificial Sequence
  ENSG00000198502_3 (sequence is synthesized)
aggcgcgccgcggtggacacctactgcagacacaactacggggttggtgagagcttcacagtgcagcggcgagttgagcctaaggtgactgtgtatcctgcaaggacccagaccctgcag

SEQ ID NO: 728395 - DNA, 120 bp, Artificial Sequence
  ENSG00000198502_4 (sequence is synthesized)
caccacaacctcctggtctgctctgtgaatggtttctatccaggcagcattgaagtcaggtggttccggaacagccaggaagagaaggctggggtggtgtccacaggcctgattcagaat

SEQ ID NO: 728396 - DNA, 120 bp, Artificial Sequence
  ENSG00000198502_5 (sequence is synthesized)
tggagaggtttacacctgccaagtggagcacccaagcgtgacgagccctctcacagtggaatggagagcacagtctgaatctgcacagagcaagatgctgagtggagtcgggggctttgt

SEQ ID NO: 728397 - DNA, 120 bp, Artificial Sequence
  ENSG00000198502_6 (sequence is synthesized)
gctgggcctgctcttccttggggccgggctattcatctacttcaagaatcagaaagggcactctggacttcacccaacaggactcgtgagctgaagtgcagatgaccacattcaaggggg

SEQ ID NO: 728398 - DNA, 120 bp, Artificial Sequence
  ENSG00000198502_7 (sequence is synthesized)
aaccttctgccccagctttgcatgatgaaaagctttcctgcttggctcttattcttccacaagagaggactttctcaggccctggttgctaccggttcagcaactctgcagaaaatgtcc

SEQ ID NO: 728399 - DNA, 120 bp, Artificial Sequence
  ENSG00000198502_8 (sequence is synthesized)
atccttgtggcttcctcagctcctgcccttggcctgaagtcccagcattgatggcagtgcctcatcttcaactttagtgctcccctttacctaaccctacggcctcccatgcatctgtac

SEQ ID NO: 728400 - DNA, 120 bp, Artificial Sequence
  ENSG00000198502_9 (sequence is synthesized)
tccccctgtgtgccacaaatgcactacgttattaaatttttctgaagcccagagttaaaaatcatctgtccacctggctccaaagacaaaaaataaaaagaaaagaaaaagggaagatta

SEQ ID NO: 728401 - DNA, 120 bp, Artificial Sequence
  ENSG00000198513_0 (sequence is synthesized)
agggagggtgtgacgctggtatctgtgtgaactcgggcttgtgatgctgagcttggttcatctgctttctcctcccttttcctccccactccttcccaccagcgccacagcaacatcctc

SEQ ID NO: 728402 - DNA, 120 bp, Artificial Sequence
  ENSG00000198513_1 (sequence is synthesized)
agagtctgagcgaactgcgcccagcgcgggcacggagcctcccaccgccagcaacctgcggccccggagaaggcagcgagcgcagtgacagcgcctcaccgccaccagctcctggaccac

SEQ ID NO: 728403 - DNA, 120 bp, Artificial Sequence
  ENSG00000198513_2 (sequence is synthesized)
catggccaagaaccgcagggacagaaacagttggggtggattttcggaaaagacatatgaatggagctcagaagaggaggagccagtgaaaaaggcaggaccagtccaagtcctcattgt

SEQ ID NO: 728404 - DNA, 120 bp, Artificial Sequence
  ENSG00000198513_3 (sequence is synthesized)
caaagatgaccattcctttgagttagatgaaactgcattaaatcggatccttctctcggaggctgtcagagacaaggaggttgttgctgtatctgttgctggagcatttagaaaaggaaa

SEQ ID NO: 728405 - DNA, 120 bp, Artificial Sequence
  ENSG00000198513_4 (sequence is synthesized)
atcattcctgatggacttcatgttgagatacatgtacaaccaggaatcagttgattgggttggagactacaatgaaccattgactggtttttcatggagaggtggatctgagcgagagac

SEQ ID NO: 728406 - DNA, 120 bp, Artificial Sequence
  ENSG00000198513_5 (sequence is synthesized)
cacaggaattcagatatggagtgaaatcttccttatcaataaacctgatggtaaaaaggttgcagtgttattgatggatactcagggaacctttgatagtcagtcaactttgagagattc

SEQ ID NO: 728407 - DNA, 120 bp, Artificial Sequence
  ENSG00000198513_6 (sequence is synthesized)
agccacagtatttgcccttagcacaatgatcagctcaatacaggtatataacttatcccaaaatgtccaggaggatgatcttcagcacctccagcttttcactgagtatggcagactggc

SEQ ID NO: 728408 - DNA, 120 bp, Artificial Sequence
  ENSG00000198513_7 (sequence is synthesized)
aatggaggaaacattcctgaagccatttcagagtctgatatttcttgttcgagactggagtttcccatacgaattttcatatggagccgatggtggtgccaaattcttggaaaaacgcct

SEQ ID NO: 728409 - DNA, 120 bp, Artificial Sequence
  ENSG00000198513_8 (sequence is synthesized)
caaggtctcagggaaccagcatgaagaactacagaacgtcagaaaacacatccattcctgtttcaccaacatttcctgttttctgctacctcatcctggcttaaaagtagctaccaatcc

SEQ ID NO: 728410 - DNA, 120 bp, Artificial Sequence
  ENSG00000198513_9 (sequence is synthesized)
aaactttgatggaaaattgaaagaaatagatgatgaattcatcaaaaacttgaaaatactgattccttggctacttagtcccgagagcctagatattaaagagatcaatgggaataaaat

SEQ ID NO: 728411 - DNA, 120 bp, Artificial Sequence
  ENSG00000198513_10 (sequence is synthesized)
cacctgccggggtctggtggagtacttcaaggcttatataaagatctatcaaggtgaagaattaccacatcccaaatccatgttacaggccacagcagaagctaacaatttagcagccgt

SEQ ID NO: 728412 - DNA, 120 bp, Artificial Sequence
  ENSG00000198513_11 (sequence is synthesized)
gccaaggacacatacaacaaaaaaatggaagagatttgtggtggtgacaaaccatttctggccccaaatgacttgcagaccaaacacctgcaacttaaggaagaatctgtgaagctattc

SEQ ID NO: 728413 - DNA, 120 bp, Artificial Sequence
  ENSG00000198513_12 (sequence is synthesized)
cgaggggtgaagaagatgggtggggaagaatttagccggcgttacctgcagcagttggagagtgaaatagatgaactttacatccaatatatcaagcacaatgatagcaaaaatatcttc

SEQ ID NO: 728414 - DNA, 120 bp, Artificial Sequence
  ENSG00000198513_13 (sequence is synthesized)
catgcagctcgtaccccagccacactgtttgtagtcatctttatcacatatgtgattgctggtgtgactggattcattggtttggacatcatagctagcctatgcaatatgataatggga

SEQ ID NO: 728415 - DNA, 120 bp, Artificial Sequence
  ENSG00000198513_14 (sequence is synthesized)
ctgacccttatcaccctgtgcacttgggcatatatccggtactctggagaataccgagagctgggagctgtaatagaccaggtggctgcagctctgtgggaccagggaagtacaaatgag

SEQ ID NO: 728416 - DNA, 120 bp, Artificial Sequence
  ENSG00000198513_15 (sequence is synthesized)
gctttgtacaagctttacagtgcagcagcaacccacagacatctgtatcatcaagctttccctacaccaaagtcggaatctactgaacaatcagaaaagaaaaaaatgtaatgcaaattt

SEQ ID NO: 728417 - DNA, 120 bp, Artificial Sequence
  ENSG00000198513_16 (sequence is synthesized)
taagaaatacaggtgcatgaccaattgtcaattaaatattcagttttatgtctccatgcaaacattcaaagtgcttccatcagaacggagtaaaatactaaacacctctgaagactgcaa

SEQ ID NO: 728418 - DNA, 120 bp, Artificial Sequence
  ENSG00000198513_17 (sequence is synthesized)
actggattagttcttttacttcagtgtttaataagcagatgtatgtatgcatggttatactattttgttaacatgtacaatttcctgatttttcttcaaaaatgctgttataaagtattt

SEQ ID NO: 728419 - DNA, 120 bp, Artificial Sequence
  ENSG00000198513_18 (sequence is synthesized)
gtctatttatgataacagtacacgtgttctgcttgaatttactaaattctactactgggttataattaaatcatgtgatattccacgtttggatatgctcatttaatttctacagaaaaa

SEQ ID NO: 728420 - DNA, 120 bp, Artificial Sequence
  ENSG00000198513_19 (sequence is synthesized)
attttaaattatttcacattagccatttgttaaaacacagcatcataactcagcaggctggatttaatctgtatcatcttatatatatcacaatcttatttttaagcacattttagagtt

SEQ ID NO: 728421 - DNA, 120 bp, Artificial Sequence
  ENSG00000198513_20 (sequence is synthesized)
ccttagttgctttatcaaaaaccagatattgcttttacatggtttaatagaatataaacctcttgataaaaaatgcacaaaaaatcactttgtatatgtgagtttcactgcattgtatat

SEQ ID NO: 728422 - DNA, 120 bp, Artificial Sequence
  ENSG00000198513_21 (sequence is synthesized)
tttttcatttggtacacaaagaatgtattcttcataggtttattcttttaatatgtgaactattattaaagtttactctggttcctaagattaaaaacaaatgcttactgaatttgaaaa

SEQ ID NO: 728423 - DNA, 120 bp, Artificial Sequence
  ENSG00000198513_22 (sequence is synthesized)
agtcccggcacaccctactgcaccttcctgttttgcaaaccgatcccggtggtaccagtttgaggctgcactgcacacctgcacaacctgccttctacttagttcttctgagacatttct

SEQ ID NO: 728424 - DNA, 120 bp, Artificial Sequence
  ENSG00000198513_23 (sequence is synthesized)
gaaagtctgaattcctaggactgctcaatgacctttgtccctgttgggcacacgcagtgtctcatcgctggtattgcacctttaatgagaccaggagttccgcaaaagtaaaacaaaggg

SEQ ID NO: 728425 - DNA, 120 bp, Artificial Sequence
  ENSG00000198513_24 (sequence is synthesized)
gtcacagactggttctggttctaccacttcctcagtatgtgctctgggacaaaacagcatatttggcaacatctcggtgtccttatctgcagcttgaagaggcgccacagcaacatcctc

SEQ ID NO: 728426 - DNA, 90 bp, Artificial Sequence
  ENSG00000198513_25 (sequence is synthesized)
tttgtacaagctttacagtgcagcagcaacccacagacatctgtatcatcaagctttccctacaccaaagtcggaatctactgaacaatc

SEQ ID NO: 728427 - DNA, 120 bp, Artificial Sequence
  ENSG00000198513_26 (sequence is synthesized)
atctttgcaaatctagtgggaaattttacccagtggatattgagttacagatcgtaatgaatctacagctttcatttatcttgatcttcttgatataaattttgctattctaattttaag

SEQ ID NO: 728428 - DNA, 120 bp, Artificial Sequence
  ENSG00000198513_27 (sequence is synthesized)
acaaactactcagtatacatatacaaaaatgcatgataccctctttactaacatgaccttgcttttaaaatggaaaaaaaaatgggtgcctcgtagataaatgcacattattttagctac

SEQ ID NO: 728429 - DNA, 120 bp, Artificial Sequence
  ENSG00000198513_28 (sequence is synthesized)
tttctacatacatgttataattagataaacaacagaaattgggaatcatatatattgtttgactcaattagcatacgagttctcgtgatttctgtgagagtggaattgtttttgttactg

SEQ ID NO: 728430 - DNA, 120 bp, Artificial Sequence
  ENSG00000198513_29 (sequence is synthesized)
agaagactacaagtatagatttgggaatcatcagcatggaggtcctgtctgaagccatcatagtaaattacattgagagagtgtagcgtgaggagttgcttaccatgaggaattagcaga

SEQ ID NO: 728431 - DNA, 120 bp, Artificial Sequence
  ENSG00000198513_30 (sequence is synthesized)
cgccactcagccgctgcacggcgcgtcctctcgggggcggcggaggcgcgtacagtcgccgccgccgccgccgccgcaccacgttccccacccggggctgcgtcaccgggagacacgttc

SEQ ID NO: 728432 - DNA, 120 bp, Artificial Sequence
  ENSG00000198513_31 (sequence is synthesized)
acacgttcccagccagcatgggtcggcgcccagcggcccgcccgagcactccggccgcagaaccagagtgccgccctgaggcctgctgagaacacaacaccctcccgaccgcgccaccgc

SEQ ID NO: 728433 - DNA, 120 bp, Artificial Sequence
  ENSG00000198513_32 (sequence is synthesized)
agaaacagttggggtgagtagcaaatgagaacttctgcagcctgcacggggtcttctggccctccactttctgcttctgtggagacagggagggccaagggctgctaggtgcctgcgtcc

SEQ ID NO: 728434 - DNA, 120 bp, Artificial Sequence
  ENSG00000198513_33 (sequence is synthesized)
acggctgggagacgggccgtagccgagccgctccctgtttgggcggaggaaccatggccgagcggtacccgcgtcaccgaatcgcgctgtcggggtggattttcggaaaagacatatgaa

SEQ ID NO: 728435 - DNA, 120 bp, Artificial Sequence
  ENSG00000198515_0 (sequence is synthesized)
agggcctggattttgacaatgtcaagatttaccgtatatccctgtttgtttggatacaccagtgacgtccacttctagaagacaaagttatattacttaaacaaccaaagatatgaaact

SEQ ID NO: 728436 - DNA, 120 bp, Artificial Sequence
  ENSG00000198515_1 (sequence is synthesized)
atccatgaagaacaatattatcaatacacagcagtcttttgtaaccatgcccaatgtgattgtaccagatattgaaaaggaaatacgaaggatggaaaatggagcatgcagctccttttc

SEQ ID NO: 728437 - DNA, 120 bp, Artificial Sequence
  ENSG00000198515_2 (sequence is synthesized)
tgaggatgatgacagtgcctctacatctgaagaatcagagaatgaaaaccctcatgcaaggggttcctttagttataagtcactcagaaagggaggaccatcacagagggagcagtacct

SEQ ID NO: 728438 - DNA, 120 bp, Artificial Sequence
  ENSG00000198515_3 (sequence is synthesized)
cagaaagggaggaccatcacagagggagcagtacctgcctggtgccattgcactttttaatgtgaacaacagcagcaataaggaccaggaaccagaagaaaaaaagaaaaagaaaaaaga

SEQ ID NO: 728439 - DNA, 120 bp, Artificial Sequence
  ENSG00000198515_4 (sequence is synthesized)
aaacgacccagagaagaaaaagaagaaaaaggacaaagagaagaaaaagaaagaggagaaaagcaaagataagaaagaagaggagaagaaagaagttgtggttattgatccctcgggaaa

SEQ ID NO: 728440 - DNA, 120 bp, Artificial Sequence
  ENSG00000198515_5 (sequence is synthesized)
cacatattacaactggctgttttgcatcacattacctgttatgtacaactggacaatggttattgccagagcatgttttgatgaacttcaatctgattacctagaatattggctcatttt

SEQ ID NO: 728441 - DNA, 120 bp, Artificial Sequence
  ENSG00000198515_6 (sequence is synthesized)
ggattacgtatcagacatagtctatttaatcgatatgtttgtacgaacaaggacaggttacctagaacaaggactgctggtaaaggaagaacttaaactcataaataaatataaatccaa

SEQ ID NO: 728442 - DNA, 120 bp, Artificial Sequence
  ENSG00000198515_7 (sequence is synthesized)
cttgcaatttaaacttgatgttctgtcactgataccaactgatttgctgtattttaagttagggtggaactatccagaaattagattaaacaggttgttacggttctctcgtatgtttga

SEQ ID NO: 728443 - DNA, 120 bp, Artificial Sequence
  ENSG00000198515_8 (sequence is synthesized)
gttcttccagagaacagaaacaaggacaaactatccaaacatcttcaggatttccaaccttgttatgtatatcgtcatcattatccactggaatgcatgtgtgttctactctatttctaa

SEQ ID NO: 728444 - DNA, 120 bp, Artificial Sequence
  ENSG00000198515_9 (sequence is synthesized)
agctattggatttggaaatgatacatgggtctaccctgatattaatgatcctgaatttggccgtttggctagaaaatacgtatacagcctttactggtctacactgactttgactaccat

SEQ ID NO: 728445 - DNA, 120 bp, Artificial Sequence
  ENSG00000198515_10 (sequence is synthesized)
tgatttccaacatgaatgcagccagagcagaatttcaagcaagaattgatgctatcaagcaatatatgcattttcgaaatgtaagcaaagatatggaaaagagggttattaaatggtttg

SEQ ID NO: 728446 - DNA, 120 bp, Artificial Sequence
  ENSG00000198515_11 (sequence is synthesized)
actacctgtggaccaacaaaaaaacagttgatgagaaagaagtcttaaagtatctacctgataaactaagagcagaaattgccatcaacgttcacttagacacattaaaaaaggtacgca

SEQ ID NO: 728447 - DNA, 120 bp, Artificial Sequence
  ENSG00000198515_12 (sequence is synthesized)
tttttgctgattgtgaagctggtctgttggtggagttggtcttgaaattgcaaccccaagtctacagtcctggagattatatttgcaagaaaggggatatcggacgagagatgtacatta

SEQ ID NO: 728448 - DNA, 120 bp, Artificial Sequence
  ENSG00000198515_13 (sequence is synthesized)
tcaaggaaggcaaactcgctgtggtggcagatgatggagtcactcagtttgtggtattgagcgatggcagctacttcggtgagatcagcattcttaacattaaagggagcaaagctggca

SEQ ID NO: 728449 - DNA, 120 bp, Artificial Sequence
  ENSG00000198515_14 (sequence is synthesized)
atcgaagaacggccaatattaaaagtattggctactcagacctgttctgtctctcaaaagatgacctcatggaagctctaactgagtacccagatgccaaaactatgctggaagagaaag

SEQ ID NO: 728450 - DNA, 120 bp, Artificial Sequence
  ENSG00000198515_15 (sequence is synthesized)
ggaagcagattttaatgaaagatggtctactggatctaaacattgcaaatgctggcagtgatcctaaagatcttgaagagaaggttactcgaatggaggggtcagtagacctcctgcaaa

SEQ ID NO: 728451 - DNA, 120 bp, Artificial Sequence
  ENSG00000198515_16 (sequence is synthesized)
ccaggtttgcccgaatcttggctgagtatgagtccatgcagcagaaactgaaacaaagattaaccaaggttgagaaatttctgaaaccgcttattgacacagaattttcaagtattgagg

SEQ ID NO: 728452 - DNA, 120 bp, Artificial Sequence
  ENSG00000198515_17 (sequence is synthesized)
gacctggagcggaaagtgggcccatcgactctacatagaaccgaaaagctggtcattaacagggacatgcctcatgatccttttgatcctatgactgacatcaactaaaatttaaaagaa

SEQ ID NO: 728453 - DNA, 120 bp, Artificial Sequence
  ENSG00000198515_18 (sequence is synthesized)
gaggaagactcagttgggaaatttttccatgaggaaaatgtgctttggtgcaaggtacaaggcccacaccctctctgagagatactatgattaaaaaagctttatatcttgggatttttc

SEQ ID NO: 728454 - DNA, 120 bp, Artificial Sequence
  ENSG00000198515_19 (sequence is synthesized)
acaactgataatgtgcaaagatataaactgattaacttgtcagtgtctgtattttctgattttttcacatacgctcattttatgtaatattcttcataaaaatgaataagtagccctcac

SEQ ID NO: 728455 - DNA, 120 bp, Artificial Sequence
  ENSG00000198515_20 (sequence is synthesized)
tttcatgccatttccattgttgagtgaagcgtatttgaagtaactgagaattaccatgtacatcatatttgggataacatttttaaaaattagactgcaataaagtaaaattaattatgc

SEQ ID NO: 728456 - DNA, 120 bp, Artificial Sequence
  ENSG00000198515_21 (sequence is synthesized)
tttttcctgcttcttgaatggtagagagcagtctatagccagagactcgtccctagctcgagctgagctttcgcttgccgtccaccactgcccaccactgtcgtttgctgccatcgcaga

SEQ ID NO: 728457 - DNA, 120 bp, Artificial Sequence
  ENSG00000198515_22 (sequence is synthesized)
tggcaggagtagcagctgccccttggcgcgactgctggagccgcgaactagagaaacacagacacgcctcatagagcaacagcgtctctcggagcgtggagcccgccaagctcgagctga

SEQ ID NO: 728458 - DNA, 120 bp, Artificial Sequence
  ENSG00000198515_23 (sequence is synthesized)
aaaaatcagcatgtttattatttttaaaaaattagggcctggattttgacaatgtcaagatttaccgtatatccctgtttgtttggatacaccagtgacgtccacttctagaagacaaag

SEQ ID NO: 728459 - DNA, 76 bp, Artificial Sequence
  ENSG00000198515_24 (sequence is synthesized)
gtttggatacaccagtgacgtccacttctagaagacaaagttatattacttaaacaaccaaagatggagtctcgct

SEQ ID NO: 728460 - DNA, 120 bp, Artificial Sequence
  ENSG00000198515_25 (sequence is synthesized)
atagaaggaaattgtgatgggttttagatgcagggatgattttccataatacaaagtagaaagaaactttatagtaaagagccctgtgtaaagactaaatgtctttaaatattgaaaaat

SEQ ID NO: 728461 - DNA, 120 bp, Artificial Sequence
  ENSG00000198515_26 (sequence is synthesized)
aaacatttaacataaattatcagaagtgaattaaaactttttccaatttccctaaaattagcaatggtagcattattcttaattctctcaagaattttcactgctagggttaattctctt

SEQ ID NO: 728462 - DNA, 120 bp, Artificial Sequence
  ENSG00000198517_0 (sequence is synthesized)
gtgcggtggcggcgggcggcgcgggggcacttgttgttcttcgcgaagtcggagcccgagcgccaggcggcggcggcggccgaggggagcgcgacagtgagcgccggcgcgaggacagcg

SEQ ID NO: 728463 - DNA, 120 bp, Artificial Sequence
  ENSG00000198517_1 (sequence is synthesized)
gacagtgagcgccggcgcgaggacagcgcgtgcccgcgaggagccgccgcgcgcccgcgccctccgcgcgacgccagctacgagttccagggagctctgtcctggtgaccgtgcccgggt

SEQ ID NO: 728464 - DNA, 120 bp, Artificial Sequence
  ENSG00000198517_2 (sequence is synthesized)
tatgacgactaatcccaaaccgaataaggcattaaaggtcaagaaggaggcgggcgagaacgccccggtgctcagcgatgatgagctggtgtccatgtcggtgcgggagctgaaccagca

SEQ ID NO: 728465 - DNA, 120 bp, Artificial Sequence
  ENSG00000198517_3 (sequence is synthesized)
cctgcggggtctcaccaaggaggaggtgacccgcctgaagcagcgtcggcgcacactcaagaaccgcggctacgcggccagctgccgcatcaagcgggtgacgcagaaggaggagctgga

SEQ ID NO: 728466 - DNA, 120 bp, Artificial Sequence
  ENSG00000198517_4 (sequence is synthesized)
gcggcagcgcgtggagctgcagcaggaggtggagaagctggcgcgtgagaacagcagcatgcggctggagctggacgccctgcgctccaagtacgaggcgctgcagaccttcgcgcgcac

SEQ ID NO: 728467 - DNA, 120 bp, Artificial Sequence
  ENSG00000198517_5 (sequence is synthesized)
cgtggcccggggacctgtggcgccctccaaggtggccaccaccagcgtcatcaccatcgtcaagtccaccgagctctcctccacctccgtgcccttctcggctgcatcctagtgccggcc

SEQ ID NO: 728468 - DNA, 120 bp, Artificial Sequence
  ENSG00000198517_6 (sequence is synthesized)
gggggcggggggtggcgggcggcgggcggcgggcaggcgggtgggggcacacccctcgtacctgtcactgggatgcagactctcgacatccgagtccaagcgcaggcccctcgggcgcag

SEQ ID NO: 728469 - DNA, 120 bp, Artificial Sequence
  ENSG00000198517_7 (sequence is synthesized)
gcagctcacaccaggaagagactgtattgcagggtgaagagtgggctcccgtgggcccagagctgcacgccggtccacagacacactcacgcccgccacctgctccccgcaggatgtgtc

SEQ ID NO: 728470 - DNA, 120 bp, Artificial Sequence
  ENSG00000198517_8 (sequence is synthesized)
tgtgtgtgggaattggtatcttgcacccgtgggagtcgggacatataatggaaaggccctcgggaagttccgcgtcctctgtgggggctgccggaagacacggccccaggagtcaggccc

SEQ ID NO: 728471 - DNA, 120 bp, Artificial Sequence
  ENSG00000198517_9 (sequence is synthesized)
ctgtggtcaggtctagcatggggcttgttttccactcctgctgtaagcagccttcgacacctgtcctgccacggcctcccagccggtgcgggagcccctcactgccctgaccgactccgc

SEQ ID NO: 728472 - DNA, 120 bp, Artificial Sequence
  ENSG00000198517_10 (sequence is synthesized)
agtccccggggaggagcatggatggtgtgtcggcagctccgtccttccagctgtcccgttgcagtgcccgtgatccgcgtctgccttagcaggggcctgcgtgagtgggcacggtgtggg

SEQ ID NO: 728473 - DNA, 120 bp, Artificial Sequence
  ENSG00000198517_11 (sequence is synthesized)
aggtcgcctgcgtggggtggtgtctgtgtgtgtgcacgcacgcctgccatcaaagcagcagggctgagggggtgcagcttgctggtgttcactgggggagggcctgtgggcacacatggc

SEQ ID NO: 728474 - DNA, 120 bp, Artificial Sequence
  ENSG00000198517_12 (sequence is synthesized)
agagagagtggctcacacgtcgtgaggtctcccctgtgctctggtgacccgaggaggtcgtgcagcacagcgcagaagcccctgcccacgggatccggccccccagacaccgaccccaca

SEQ ID NO: 728475 - DNA, 120 bp, Artificial Sequence
  ENSG00000198517_13 (sequence is synthesized)
ggccgtcccggatctcagcggacacaggcaggagcgccccatcatttgacggtgagcaggactcaggctgtgtgtcctggagctacttctcaccaactgtggtcagtgcagggggaacga

SEQ ID NO: 728476 - DNA, 120 bp, Artificial Sequence
  ENSG00000198517_14 (sequence is synthesized)
gcgaggggaagggctgctgcagtctagggagagggggtgcagcctgggggatgttggtggacatggatgtggaggtggaaggaggaggacgttgcgtggagtggtgggaggaggcgggag

SEQ ID NO: 728477 - DNA, 120 bp, Artificial Sequence
  ENSG00000198517_15 (sequence is synthesized)
ccgtgtgcgagagcaggtggaaagccttgaggggcaggaccaggatgcagctggcttgtagaagagctcaggagtgagcctggcactccagagggcgcggcgggtggggaggcagcaggc

SEQ ID NO: 728478 - DNA, 120 bp, Artificial Sequence
  ENSG00000198517_16 (sequence is synthesized)
accagtccaggagagcttcgtggacgtggctcctgcgcgcacacccccaggagcacagccacgggctgcaggtgtggctggcctcagcactcagtcctcacccggagcctttgcctgctc

SEQ ID NO: 728479 - DNA, 120 bp, Artificial Sequence
  ENSG00000198517_17 (sequence is synthesized)
ctccttccaagagcactgaggcaccagtgggcttggcactccaccttgggcttccttttcctggagagccgccttgagggtccctcctgtgactggggtctctgcagcgagagccgcggg

SEQ ID NO: 728480 - DNA, 120 bp, Artificial Sequence
  ENSG00000198517_18 (sequence is synthesized)
ggttgcggagcccctgcctgggggagctggcggaatgtgagccgccggccgggggccgccacataagacctgcaaggtggtgcctggggccctggctccttctcggctgcccctgcccac

SEQ ID NO: 728481 - DNA, 120 bp, Artificial Sequence
  ENSG00000198517_19 (sequence is synthesized)
ccagtaacagcccccaccagctacagagcccaggcgggtgccagccacgctgggagggcagaggacagacagccccggggctgcgacttggttctgtgtctactgttagaagttgagtgg

SEQ ID NO: 728482 - DNA, 120 bp, Artificial Sequence
  ENSG00000198517_20 (sequence is synthesized)
gaagctgcaggcccgccaggaccactgggtccctacagagcaaaggcctgcgtgttcccaaacagccgttgcccccgtggccgtggtaggtaatccatattggatgtcataaggaccagg

SEQ ID NO: 728483 - DNA, 120 bp, Artificial Sequence
  ENSG00000198517_21 (sequence is synthesized)
gggatatttaaagagagaaacagaaaatatatagagatataaaattatattcacagtttatctacagatttttcgtaacaatctttcttttccagtttgatactgtaaatctatcagagc

SEQ ID NO: 728484 - DNA, 120 bp, Artificial Sequence
  ENSG00000198517_22 (sequence is synthesized)
agagccgggggcacgggcacaggtgggagttgggagcaaagcggaggcccgggctgcccgccgtcccccttcatctccccacggactgtaccaggcagctgggccccgcaggacaggccg

SEQ ID NO: 728485 - DNA, 120 bp, Artificial Sequence
  ENSG00000198517_23 (sequence is synthesized)
cagcgggtggccggttctgtcccgtcttggggttcttggtgtccacgtcttgtgggccgtgggcttctacctgcccttggcctgcagtgctttgctggagaagggactccctggtcccca

SEQ ID NO: 728486 - DNA, 120 bp, Artificial Sequence
  ENSG00000198517_24 (sequence is synthesized)
gggtggacggagccgctgtcaccgcccagagctgggccggggaagcacggtgtgttctgcttttcttttcagattgttgaaatttcattgtcatgatttaatatatggatttttttattt

SEQ ID NO: 728487 - DNA, 120 bp, Artificial Sequence
  ENSG00000198517_25 (sequence is synthesized)
aagaaaaagacgagggactctttgtcacgtgggtttgttttctgtctccgtgcctccggcttcccaaagagatccaggtctttgcgtttccagggcgtggggaccccggccccctatgcc

SEQ ID NO: 728488 - DNA, 120 bp, Artificial Sequence
  ENSG00000198517_26 (sequence is synthesized)
gccacgccgccacaccgcctcaccctggcttctgtgctacttggcagttccatttcattatttattttttgtgctgctttttatcatgatataaattattgaaaacagatcacatgtggg

SEQ ID NO: 728489 - DNA, 120 bp, Artificial Sequence
  ENSG00000198517_27 (sequence is synthesized)
cccgtgtctggccgccgccgccctgccccgtccctgcggccaccacctaatttattgccgtgcgtcctgctgctgtgactgcttttgtacctttgcaataaagaattttctggtttcaga

SEQ ID NO: 728490 - DNA, 120 bp, Artificial Sequence
  ENSG00000198517_28 (sequence is synthesized)
tttgcaggtccccacggtggcggaggcagctgggccccagcctctccactgtcaccctcaccccaggacgtggtgcgaaggagcctggagcccacctggccgtccccgggaccggctggt

SEQ ID NO: 728491 - DNA, 120 bp, Artificial Sequence
  ENSG00000198517_29 (sequence is synthesized)
gccatcctgtgccatctacgtcagcgccctgagatcagctggccttggcaggggcagcggactcggcagcctggcgcaggaccctgtctcacctgtgcggccctcttgttgtgggggttt

SEQ ID NO: 728492 - DNA, 120 bp, Artificial Sequence
  ENSG00000198517_30 (sequence is synthesized)
gtgggttgcgggggtggggcccccatcggaggcagggctggagggtggagggatttgggcccgagggctccctggcccagggtgtggggagggtcctgggctggcagggaggacgggatg

SEQ ID NO: 728493 - DNA, 120 bp, Artificial Sequence
  ENSG00000198517_31 (sequence is synthesized)
cggtcacccgcccccatgatgcccatgtccagtggaggtgctgaccaaggacaccccccaccgccgtgtgctgctctgatgttcctgtgggaacctgtgtctggtatttggggtatggga

SEQ ID NO: 728494 - DNA, 120 bp, Artificial Sequence
  ENSG00000198517_32 (sequence is synthesized)
gtgggtgctgtgaacccctgtcccgcgagctgcccggcgccttctgcccgcccgtcccggccgccgggtgcaaatgggtttgttgactgcctgccggcctcgtgatgtctgtgcaacctg

SEQ ID NO: 728495 - DNA, 120 bp, Artificial Sequence
  ENSG00000198517_33 (sequence is synthesized)
acctgaagtcaggatcgcgtttgggcttctcggtttccatgacaaccgtgggggctggctcggtcccaaggtcgccatggcaactatcggagggctcatgccggggatgctttggctggg

SEQ ID NO: 728496 - DNA, 120 bp, Artificial Sequence
  ENSG00000198517_34 (sequence is synthesized)
tttttcatgaatgattagaatgtgtgacacaatgcagacgtgaggacggcgggggcggcggcggggacgactcccgccagacggtcaaatgctcggcagggcggcggctcccccacctcc

SEQ ID NO: 728497 - DNA, 120 bp, Artificial Sequence
  ENSG00000198517_35 (sequence is synthesized)
ctggtctctggctgcggcccccggacctgccgcccctcaggaaccccacacccccttgggccgcagggtcctcgctcgggggcagcttaggtggaggtggtgatgtcacagccgcagcgg

SEQ ID NO: 728498 - DNA, 120 bp, Artificial Sequence
  ENSG00000198517_36 (sequence is synthesized)
ggggcaccttgtgctgtgcaggtgcagacgtcttctctgacctcagggagagtcagaacaggaagcagccactgccggcgcctgctggtcaccccacagtgccggcggctgcagcccagc

SEQ ID NO: 728499 - DNA, 120 bp, Artificial Sequence
  ENSG00000198520_0 (sequence is synthesized)
tgtaggtgagaggcggctgaagagttgctgtattctgggaatgggcagggtcactcgtccgaacagagtcctatcctacgcggcggaagagtgtgccctttgacttgcatcgtctaccta

SEQ ID NO: 728500 - DNA, 120 bp, Artificial Sequence
  ENSG00000198520_1 (sequence is synthesized)
cctctgccatcctctaccagccgcaactgcgagggctggaggttggtccgcagtcattcacctggttcttaaggccagctagatttcgtggttatctccatcctggaggctgcgtggacg

SEQ ID NO: 728501 - DNA, 120 bp, Artificial Sequence
  ENSG00000198520_2 (sequence is synthesized)
cccttctggaagcacgcatcccatgtcctctggggagtagtagagccaacttcaggactgattgatcatgacttctataaaggagcaggcagcaattagcaggctcttaagttttttaca

SEQ ID NO: 728502 - DNA, 120 bp, Artificial Sequence
  ENSG00000198520_3 (sequence is synthesized)
ggagtgggacaacgctggcaaagtcgcaaggagtcacatcctcgacaagttcattgaaaccaaccaaggcaagactgcccctgaactggagcaggagttttcccagggagccagtttgtt

SEQ ID NO: 728503 - DNA, 120 bp, Artificial Sequence
  ENSG00000198520_4 (sequence is synthesized)
cctggtacgcttgaccacctcgcttagaatcacctatatgactgactcatgtttagaaaagcttctcaggtccattggcatcttcttatcagctgtaagcagtaatcggtaccttataga

SEQ ID NO: 728504 - DNA, 120 bp, Artificial Sequence
  ENSG00000198520_5 (sequence is synthesized)
atttcttgaggttggaggtgtcctaaccctcttggaaatacttgggctagagaagatcaaggaggaggccaagaaggaatctgtcaaactacttcaggttattgcgaactctggcaggac

SEQ ID NO: 728505 - DNA, 120 bp, Artificial Sequence
  ENSG00000198520_6 (sequence is synthesized)
atacaaggaactcatttgtgaaagctatggtgtacgatccatagcagaatttttggcaaagtctaagtcagaagagacccaggaggaagtgcaggttctgttggattctttggtccacgg

SEQ ID NO: 728506 - DNA, 120 bp, Artificial Sequence
  ENSG00000198520_7 (sequence is synthesized)
tcaagtgtataaaggtctaatagctttgctgccctgcgagtccccaaaagcccagcagctgtccctgcagactctcaggactgcccagccaatcattgggaccacacaccccagcatcgt

SEQ ID NO: 728507 - DNA, 120 bp, Artificial Sequence
  ENSG00000198520_8 (sequence is synthesized)
ggactgcgtgctgaaggtgctgggcacgatgcacctggaagtccagtatgaagccatcgagttgatcaaagacctggtcggttacgatgtgcgccaggcgctgctcaagggcctcgtggc

SEQ ID NO: 728508 - DNA, 120 bp, Artificial Sequence
  ENSG00000198520_9 (sequence is synthesized)
gctgctgataccgtcggtcaaggagatctccaaactgcaggccaagatcctcagtgacccctcggttctccagctcacccccagcctgccgatgtttttgcagcaggccgcggccgccaa

SEQ ID NO: 728509 - DNA, 120 bp, Artificial Sequence
  ENSG00000198520_10 (sequence is synthesized)
ggccatcggggtcctggcgcgcaacgacatgagcatcgccgaggagctgctgtacctgcgcgtggtgcgtggcctaatggccgccatgggcaacacggaccacagcaacagccagcggct

SEQ ID NO: 728510 - DNA, 120 bp, Artificial Sequence
  ENSG00000198520_11 (sequence is synthesized)
ggccagcctcacgctggagtgcttcgtgcagatgttccccttggtggcggagcacgtgcgcaagtgcatgggggaggaactctaccagctcttcctgagcaacgctgaggacttgtacat

SEQ ID NO: 728511 - DNA, 120 bp, Artificial Sequence
  ENSG00000198520_12 (sequence is synthesized)
gaaaatagacagcattcaggcggacatcttggcggccaacacagtcaatgttaccaaagccctgtgcctccatggcagctcctacagcatgaacactctctatggctcgcgcgattcggc

SEQ ID NO: 728512 - DNA, 120 bp, Artificial Sequence
  ENSG00000198520_13 (sequence is synthesized)
tcagatggcctacctcacacacttcgaggaggatgtagaatcaaaggagtaacagcccctgtggcaaaccaggaaggccaaggctgcggggcagggaagcctggcaagaggaaggcgcct

SEQ ID NO: 728513 - DNA, 120 bp, Artificial Sequence
  ENSG00000198520_14 (sequence is synthesized)
ggggtcaagctcagagccactccacttggctccaggggggagacggggattaggcatcccagaggggcagaggaagagccgctggctgcgaagagtcaataaacagccttgatacctgtc

SEQ ID NO: 728514 - DNA, 120 bp, Artificial Sequence
  ENSG00000198520_15 (sequence is synthesized)
gctgccgacccgccccccacctgcaacatccctctgccaagcccaactccaagtccagactgccctggcaccccagccgggtcccccttgctcctgtcctcagagcaacgctgaggactt

SEQ ID NO: 728515 - DNA, 85 bp, Artificial Sequence
  ENSG00000198520_16 (sequence is synthesized)
ggcgcgatctcggctcactgcaacccgcctcccgggttcaagggatttctcctgcctcagcctcccaagcaacttcaggactgat

SEQ ID NO: 728516 - DNA, 120 bp, Artificial Sequence
  ENSG00000198520_17 (sequence is synthesized)
cctctgccatcctctaccagccgcaactgcgagggctggagtgacataaccccgctgaagaaatataaaaaagcattcagtcacaaaagttcatggaaggaggcaacaggagatgaaaga

SEQ ID NO: 728517 - DNA, 120 bp, Artificial Sequence
  ENSG00000198520_18 (sequence is synthesized)
attcaacaaatatttggaaggcagaaggcaggtgcagggaggctaaccggcttgaagcagaggaaattgcaagcaactgccaacaaggggagcttaccaacaagaaaccagtcaattcag

SEQ ID NO: 728518 - DNA, 120 bp, Artificial Sequence
  ENSG00000198520_19 (sequence is synthesized)
tggattcctccaaggcgaaggcccccctctctggggtctcagcctccagcgctgacatcctaggccgcctcgacagctcccccacgccctgcacagtgctgatcagtaaaagaggaggac

SEQ ID NO: 728519 - DNA, 120 bp, Artificial Sequence
  ENSG00000198520_20 (sequence is synthesized)
tggtaaggacctgctcaaatggggctgcctgggccacgggagggcggtctcttgcctcacggctgccccctcctcagacccctcggttctccagctcacccccagcctgccgatgttttt

SEQ ID NO: 728520 - DNA, 120 bp, Artificial Sequence
  ENSG00000198520_21 (sequence is synthesized)
tgcccaggctggagtgcagtggcgggatcatagatcactgcagccccgacctggtctcattcgatcttcccacctcagccaccttagcctcccaagtagctgaaactacaagctagagtg

SEQ ID NO: 728521 - DNA, 120 bp, Artificial Sequence
  ENSG00000198520_22 (sequence is synthesized)
tccatgaaacctggattcctccaaggcgaaggcccccctctctggggtctcagcctccagcgctgacatcctaggccgcctcgacagccatcgagttgatcaaagacctggtcggttacg

SEQ ID NO: 728522 - DNA, 120 bp, Artificial Sequence
  ENSG00000198520_23 (sequence is synthesized)
ggcgaaggcccccctctctggggtctcagcctccagcgctgacatcctaggccgcctcgacaggtgggctcaccatccaacccttcctcctcccccttcagccccctcctcctgctcttc

SEQ ID NO: 728523 - DNA, 120 bp, Artificial Sequence
  ENSG00000198520_24 (sequence is synthesized)
cgtgcgcaagtgcatgggggaggaactctaccagctcttcctggtaagtgcgcccttcctgccccgccgcaatgagcagatggcggctcggacagtgtgatgccccttcagacagtcccc

SEQ ID NO: 728524 - DNA, 120 bp, Artificial Sequence
  ENSG00000198520_25 (sequence is synthesized)
cagggtcactcgtccgaacagagtcctatcctacgcggcggaagagtgtgccctttgacttgcatcgtctacctacctctgccatcctctaccagccgcaactgcgagggctggaggtgt

SEQ ID NO: 728525 - DNA, 120 bp, Artificial Sequence
  ENSG00000198521_0 (sequence is synthesized)
ggcttccgggatgtggcggggcctttgtctctggctgcagttggagctctgcgtctcgtcttcgttcttctgtgtcctctgctgctagaggtccagcctctgtggctctgtgacctgcgg

SEQ ID NO: 728526 - DNA, 120 bp, Artificial Sequence
  ENSG00000198521_1 (sequence is synthesized)
gtattgggggatccacagctaagacgccaggaccccccggaagcctagaaatgggaccattgacatttatggatgtggccatagaattctgtctggaggagtggcaatgcctggacattg

SEQ ID NO: 728527 - DNA, 120 bp, Artificial Sequence
  ENSG00000198521_2 (sequence is synthesized)
cacagcagaatttatataggaatgtgatgttagagaactacagaaacctggtcttcctgggtattgctgtctctaagccagacctgatcacctgtctggagcaagaaaaagagccttggg

SEQ ID NO: 728528 - DNA, 120 bp, Artificial Sequence
  ENSG00000198521_3 (sequence is synthesized)
agcctatgaggagacatgaaatggtagccaaacccccagttatgtgttctcattttacccaagacttttggccagagcagcatataaaagatcctttccaaaaagcgacactgagaagat

SEQ ID NO: 728529 - DNA, 120 bp, Artificial Sequence
  ENSG00000198521_4 (sequence is synthesized)
ataaaaactgtgaacataaaaatgtacatttaaaaaaagaccataaaagtgtggatgagtgtaaggtgcacagaggaggttataatggatttaaccaatgtttgccagctacccagagca

SEQ ID NO: 728530 - DNA, 120 bp, Artificial Sequence
  ENSG00000198521_5 (sequence is synthesized)
aaatatttctatttgataaatgtgtgaaagcctttcataaattttcaaattcaaacagacataagataagccatactgaaaaaaaacttttcaaatgcaaagaatgtggcaaatcatttt

SEQ ID NO: 728531 - DNA, 120 bp, Artificial Sequence
  ENSG00000198521_6 (sequence is synthesized)
gcatgcttccacatctagctcaacataaaataattcataccagagtgaatttctgcaaatgtgaaaaatgtggaaaagcttttaactgcccttcaatcatcactaaacataagagaatta

SEQ ID NO: 728532 - DNA, 81 bp, Artificial Sequence
  ENSG00000198521_7 (sequence is synthesized)
ctttaattggtcctcacgccttactacacataaaaaaaattatactagatacaaactctacaaatgtgaagaatgtggcaa

SEQ ID NO: 728533 - DNA, 120 bp, Artificial Sequence
  ENSG00000198521_8 (sequence is synthesized)
gcaaagcttttaacaagtcctcaatccttactacccataagataattcgcactggagagaaattctacaaatgtaaagaatgtgccaaagcttttaaccaatcctcaaaccttactgaac

SEQ ID NO: 728534 - DNA, 71 bp, Artificial Sequence
  ENSG00000198521_9 (sequence is synthesized)
tgtgccaaagcttttaaccaatcctcaaaccttactgaacataagaaaattcatggccctcaactcttact

SEQ ID NO: 728535 - DNA, 120 bp, Artificial Sequence
  ENSG00000198521_10 (sequence is synthesized)
agaatgtggcaaagcctttaaccagttctcaaaccttactacacataagagaatccatactgcagagaaattctataaatgtacagaatgtggtgaagcttttagccggtcctcaaacct

SEQ ID NO: 728536 - DNA, 77 bp, Artificial Sequence
  ENSG00000198521_11 (sequence is synthesized)
aaatgtacagaatgtggtgaagcttttagccggtcctcaaaccttactaaacataagaaaattcatactgatggtcc

SEQ ID NO: 728537 - DNA, 83 bp, Artificial Sequence
  ENSG00000198521_12 (sequence is synthesized)
ccctcaacccttactaaacataactatgtggcaaagcctttaaccagttctcaaaccttactacacataagagaattcatact

SEQ ID NO: 728538 - DNA, 86 bp, Artificial Sequence
  ENSG00000198521_13 (sequence is synthesized)
ttcatactgcagaaaaaccgggtcctcaaaccttactaaacataagaaaattcacattgaaaagaaaccctacaaatgtgaagaat

SEQ ID NO: 728539 - DNA, 77 bp, Artificial Sequence
  ENSG00000198521_14 (sequence is synthesized)
taagaaaattcacattgatggtcctcaaagcttactgaacataagataactcatactggagagaaaccctacaaatg

SEQ ID NO: 728540 - DNA, 74 bp, Artificial Sequence
  ENSG00000198521_15 (sequence is synthesized)
tgaagaatgtggcaaagcttttaaccatttctcaatccttaccaaacataagaggcttttacccaatcctcaaa

SEQ ID NO: 728541 - DNA, 76 bp, Artificial Sequence
  ENSG00000198521_16 (sequence is synthesized)
aatgtgaagaatgtggcaaagcttttacccaatcttcaaaccttactacacataaaaaaattcatactggaggtct

SEQ ID NO: 728542 - DNA, 77 bp, Artificial Sequence
  ENSG00000198521_17 (sequence is synthesized)
tgaagaatgtggcaaagcttttaaccagttctcaactcttactaaacataagataattcacactgatggtcctcaac

SEQ ID NO: 728543 - DNA, 89 bp, Artificial Sequence
  ENSG00000198521_18 (sequence is synthesized)
gcaaagcttttaaccgatcctcaaaccttattgaacataagaaaattcatactggagagcaaccctacaaatgtgaagaatgtggcaaa

SEQ ID NO: 728544 - DNA, 86 bp, Artificial Sequence
  ENSG00000198521_19 (sequence is synthesized)
tacaaatgtgaagaatgtggcaaagcatttaactattcctcacaccttaatacacataagagaattcatactaaagagccaaccaa

SEQ ID NO: 728545 - DNA, 120 bp, Artificial Sequence
  ENSG00000198521_20 (sequence is synthesized)
tactggagagaaactctacaaacctgaagatgtgacagtgattttgacaacacctcaaactttttcaaacataaaataaattatactggtgagaaattctagaaatgtaaagaatgtgat

SEQ ID NO: 728546 - DNA, 120 bp, Artificial Sequence
  ENSG00000198521_21 (sequence is synthesized)
aaaggctttacatggttgtcacacttgattgtaggtaagataatttacattggagtaaacttctacaagtgtgaagaatgtggcaaaacttttaattaatgctcgtaccttattgcacag

SEQ ID NO: 728547 - DNA, 120 bp, Artificial Sequence
  ENSG00000198521_22 (sequence is synthesized)
gaaagaatttttacttggaaaaaggtatatacacaaagaatgtggaaaagccattaatatgtgctcatatcttactcaacatcagagagtctgtacttaataaaaccattatagatgcaa

SEQ ID NO: 728548 - DNA, 120 bp, Artificial Sequence
  ENSG00000198521_23 (sequence is synthesized)
tttgtctccagctcccgctagaccttgggacccgcctctgcttttccgcgttctccaactcgggaatccccggtgactttgtcgcagcctccgttaccctgtgatctgcaagtcctggga

SEQ ID NO: 728549 - DNA, 120 bp, Artificial Sequence
  ENSG00000198521_24 (sequence is synthesized)
accattacttgcatcacagatcttattgtacacattttgtactaaagaaaaccctgaagcagttgctcaaatactgttcaacatcagaaaatttatattggaaaaaacccctggaaaatg

SEQ ID NO: 728550 - DNA, 120 bp, Artificial Sequence
  ENSG00000198521_25 (sequence is synthesized)
taataaatttgtaaaaacagttttgaaaaactacagcttataaaacatgagggtctataatgcttggttgatagtacaaagtttattcaacatcagggaatttatattggagaaaaaccc

SEQ ID NO: 728551 - DNA, 120 bp, Artificial Sequence
  ENSG00000198521_26 (sequence is synthesized)
tacaaatgtaatcagtttggaaaaacatttttaaaaaaaccacagcatagaaaacaccacagggttcatactaaaatatgtttttgcagatgcagtaaaaatgaaaaaaatttaatccga

SEQ ID NO: 728552 - DNA, 120 bp, Artificial Sequence
  ENSG00000198521_27 (sequence is synthesized)
aattaagtttatgtaaatatctgagaattcacagtagaaatatctaaggcgcggacacttcagacattacactaaatcagtgctaagtacagaaaacaacacaaaataaaacttggtgga

SEQ ID NO: 728553 - DNA, 120 bp, Artificial Sequence
  ENSG00000198521_28 (sequence is synthesized)
tgctaagtacagaaaacaacacaaaataaaacttggtggataaattatttgtatataacattaaaagaagtagaagattttcagttataattacaattaaagtatacttttatcttgaaa

SEQ ID NO: 728554 - DNA, 120 bp, Artificial Sequence
  ENSG00000198521_29 (sequence is synthesized)
aactctcaaataactttatgctcttttttcattcctgctatattcacatgtgaaagcatgtgaccaattgttgctgcaccaaagatatgagagattcttttattaggtgggcattattta

SEQ ID NO: 728555 - DNA, 82 bp, Artificial Sequence
  ENSG00000198521_30 (sequence is synthesized)
aaagatatgagagattcttttattaggtgggcattatttaaaacattttttatggaacagtaaggatattaaagtgtaagat

SEQ ID NO: 728556 - DNA, 89 bp, Artificial Sequence
  ENSG00000198521_31 (sequence is synthesized)
cctgtctttactaaaaatacaaaaatttaccaggcacctataatcccagctacttcaaaaagtggaggtctcagtgagccgaaatcata

SEQ ID NO: 728557 - DNA, 120 bp, Artificial Sequence
  ENSG00000198521_32 (sequence is synthesized)
gctgaagcaggagaatcacttgaacctggaaagtggaggtctcagtgagccgaaatcataccattgcactccaacctgggcaacaaaagtcaaactccatctcaaaaagaaaaaaaaaaa

SEQ ID NO: 728558 - DNA, 120 bp, Artificial Sequence
  ENSG00000198521_33 (sequence is synthesized)
tggagaggctctttgtggttaacttataaaggagtgatgcaggagataggttttcagagtaatattcttctgcattatagtgacaaaagttttttattttagttaaaattggttaaatta

SEQ ID NO: 728559 - DNA, 120 bp, Artificial Sequence
  ENSG00000198521_34 (sequence is synthesized)
attaaatgtacatttttaaatttttagattacatgtaaatataacttttaaaaaaatgtgttaagaccattgtacattcaatgaagcattattatgcttctaactttaacctatttcacc

SEQ ID NO: 728560 - DNA, 120 bp, Artificial Sequence
  ENSG00000198521_35 (sequence is synthesized)
ttattatgcttctaactttaacctatttcaccttactcaagagtgtatgtaaaagatggtaacaatatactatttggtaacataatggactaacatttctattaatctatttcaccagtg

SEQ ID NO: 728561 - DNA, 120 bp, Artificial Sequence
  ENSG00000198521_36 (sequence is synthesized)
gctttcaactgcaaataagttaaagaatatttttctataggttaaatattcttttttgtcttatttaaacttactgttcttaatttctgtgggtacatagtatgattttaattaccttat

SEQ ID NO: 728562 - DNA, 71 bp, Artificial Sequence
  ENSG00000198521_37 (sequence is synthesized)
taatttctgtgggtacatagtatgattttaattaccttattttattctttgtgctattcatagcccaggct

SEQ ID NO: 728563 - DNA, 74 bp, Artificial Sequence
  ENSG00000198521_38 (sequence is synthesized)
gagttctgggaccacaggcatgagccactgcacctggccaaatgtgtatatatttatgcaatatataacatgtt

SEQ ID NO: 728564 - DNA, 120 bp, Artificial Sequence
  ENSG00000198521_39 (sequence is synthesized)
tggccaaatgtgtatatatttatgcaatatataacatgttttgatacaggcatataatatgtattagtcacatcaggataaagtatctattaccttcagcatttatcctttgtattacaa

SEQ ID NO: 728565 - DNA, 120 bp, Artificial Sequence
  ENSG00000198521_40 (sequence is synthesized)
gccaattctacacttcattattttaatgtacaattaaattgttattgactacagggtcattttaattataaaaattatatagaagtataaataaagtccatacattcctgagtcatgaat

SEQ ID NO: 728566 - DNA, 120 bp, Artificial Sequence
  ENSG00000198521_41 (sequence is synthesized)
tctccaactcgggaatccccggtgactttgtcgcagcctccgttaccctgtgatctgcaagtcctgggagacgcacagctaagatgcccggacatcctggaagctgggaaatgacagacc

SEQ ID NO: 728567 - DNA, 120 bp, Artificial Sequence
  ENSG00000198521_42 (sequence is synthesized)
caacatacaggaggtgttgaccctcatacctggaacctggacatgtgtggaatttctaatctcattcctggactttcctgcaggtgatgtgactcttcttcagcctgcaccctgccaaaa

SEQ ID NO: 728568 - DNA, 120 bp, Artificial Sequence
  ENSG00000198521_43 (sequence is synthesized)
gaggattgtgatgtatcactggacccagcacctagatgacgtaactctcatcttttgcctggaccttgcatattttgggtgtgattgtgacacatacctctgctcagaatgtgagcgatt

SEQ ID NO: 728569 - DNA, 120 bp, Artificial Sequence
  ENSG00000198521_44 (sequence is synthesized)
tgactctcctgcctgggcccagtacacagatgggattgtgacatatcgctggacccagcatgtagatcatgtgaccctatactcttgccttggtgctgtcgcagagggcattgtgacata

SEQ ID NO: 728570 - DNA, 120 bp, Artificial Sequence
  ENSG00000198521_45 (sequence is synthesized)
aatggtgggttggttactctcagaccaagattcagtacacatgtgaggctgtgactgcactgaaaagcacagtccgcagacaaaattgtggctctcttgcaataccgtcaaccattgaga

SEQ ID NO: 728571 - DNA, 120 bp, Artificial Sequence
  ENSG00000198521_46 (sequence is synthesized)
gtgatctgcaagtcctgggagacgcacagctaagatgcccggacatcctggaagctgggaaatggtgatgtgactcttcttcagcctgcaccctgccaaaagaggattgtgatgtatcac

SEQ ID NO: 728572 - DNA, 120 bp, Artificial Sequence
  ENSG00000198521_47 (sequence is synthesized)
agctcttgcctgggccctgtctgtgggaagcaccttgtgacatatctgtgcatccattactttggaggtgtgactctcctcttccatctgcaccatgcccagagaaagattgtgttgcat

SEQ ID NO: 728573 - DNA, 120 bp, Artificial Sequence
  ENSG00000198521_48 (sequence is synthesized)
ctctgggttcagcaaccaggtgctgtgtttcttgtgcccaggccttgcctgcagagagaattgtgacatagctgggtccagtaccaagtaacgtgactttgttgtctgtgccttgctttc

SEQ ID NO: 728574 - DNA, 120 bp, Artificial Sequence
  ENSG00000198521_49 (sequence is synthesized)
gagaaggaattgtaacataaccctggacaggcaaccaggtaatatgactctcctgcctggtccttgtcctgaaaaattgtgacatatttccgactcagcatgcaggtgatgttactctcc

SEQ ID NO: 728575 - DNA, 120 bp, Artificial Sequence
  ENSG00000198521_50 (sequence is synthesized)
catttactttctactcacaggttagattgtgacatacactttagcccagttcacagttgcgatgatgatactcataccacaaaccagtccatagcagagatactggtgctggtagctaga

SEQ ID NO: 728576 - DNA, 120 bp, Artificial Sequence
  ENSG00000198521_51 (sequence is synthesized)
cttagagaaacaggtaaagtcctggattaccattctttcacattttgtataaagtctttggacggtacagagagtgttatcatagggccaagcacacaggtgagactgtttctcaaatgc

SEQ ID NO: 728577 - DNA, 120 bp, Artificial Sequence
  ENSG00000198521_52 (sequence is synthesized)
acaacctaccaaatgttagcattgtcaccctcacacgaatttcacacgtgaatggagtccacagtaaaaattgtgactgtcatatgtaatcatgtgacaacagttaagatggtgactcat

SEQ ID NO: 728578 - DNA, 120 bp, Artificial Sequence
  ENSG00000198521_53 (sequence is synthesized)
ttctaaacctagctcataggcaggtgagaactcttttctctagacccagccaattggagagatgttgactctaatgcatgagcctaggtccacaggtatgattatgagtttgtattagaa

SEQ ID NO: 728579 - DNA, 120 bp, Artificial Sequence
  ENSG00000198521_54 (sequence is synthesized)
aaaaaagtctcagagcaaattgtgaccatcatggatattgtataaagccctcaggtagtatagagagttctataacagggcctagcacccaggtgacattgtgacactcgtatgcaaacc

SEQ ID NO: 728580 - DNA, 120 bp, Artificial Sequence
  ENSG00000198521_55 (sequence is synthesized)
gaaaattgacaactttccacatgaacacagctcactgttgaagttctgaatctcacacctggaggtggttggaaaattgactctcaaacgtggattcggttcacacgtgggctggtgact

SEQ ID NO: 728581 - DNA, 120 bp, Artificial Sequence
  ENSG00000198521_56 (sequence is synthesized)
ctcaaaccaagattcagcatacctgtgaggctgtgactccactaaggggacacagtccacggcaaagattgaggctctcatggatgtatccagtccaccgttgagattgtgacttgtgta

SEQ ID NO: 728582 - DNA, 120 bp, Artificial Sequence
  ENSG00000198521_57 (sequence is synthesized)
cttggactcaacatacaacatgtgttgactctaatactaagaaatgggatgtgtgggattgttcattcctacatttttttgtgactgtgattgtaacatacacctttgcccagcacctga

SEQ ID NO: 728583 - DNA, 120 bp, Artificial Sequence
  ENSG00000198521_58 (sequence is synthesized)
gtgatttgactctcctgcctggtgcctagtgcacagatcggattgtgacacattgctgaatccaacatctaggtggtgtgactctgtacttttgcctcagcactgcccacaggggggcat

SEQ ID NO: 728584 - DNA, 120 bp, Artificial Sequence
  ENSG00000198521_59 (sequence is synthesized)
tgtgacatatcactggaccccacaccctggttatgtgactcttctgcctgtgccctatcttcatgggccattgtgacattgctatgtgcaacatccaggtgatgtaactttccttgctgg

SEQ ID NO: 728585 - DNA, 120 bp, Artificial Sequence
  ENSG00000198521_60 (sequence is synthesized)
atcctgcttgcaggaagcattataatctatctgcatccatcacccaagtaatgtgactctctttctaccaggttgctgcttacagaaagaattgttacctatcactgggccagcacctag

SEQ ID NO: 728586 - DNA, 120 bp, Artificial Sequence
  ENSG00000198521_61 (sequence is synthesized)
ctgttgtgatgcttctttttctacctacattcagctcacaatgtagattttgacatactgctgggctaaacaccaaaaatgaagttacgtttttcctcagcactttcctcatcaggcatt

SEQ ID NO: 728587 - DNA, 120 bp, Artificial Sequence
  ENSG00000198521_62 (sequence is synthesized)
gtgacatattgtttggcccagaactaaggtaatgtgagcctcctgcctgaaccctgcccatagtgggcatagtgacatatttgtgaacccatcatccatataatgtgactttcttacttg

SEQ ID NO: 728588 - DNA, 120 bp, Artificial Sequence
  ENSG00000198521_63 (sequence is synthesized)
gcttttccctataggagagattgtgacatatatttgagcccagaaaccaaataatttgacccttctttcctgctatggccatgctcccataaaagagagtgacttattgctgcgattagc

SEQ ID NO: 728589 - DNA, 69 bp, Artificial Sequence
  ENSG00000198521_64 (sequence is synthesized)
ttgtggggaggcagccaaatatgcaggttcactgagccagactaaattgtattcagttgaatgcttatc

SEQ ID NO: 728590 - DNA, 120 bp, Artificial Sequence
  ENSG00000198521_65 (sequence is synthesized)
cactgagccagactaaattgtattcagttgaatgcttatcaaggactcaagaatccagacttttatctcttatttacttatgacctggaagccctcacctcaagttgtcctgcattactg

SEQ ID NO: 728591 - DNA, 76 bp, Artificial Sequence
  ENSG00000198521_66 (sequence is synthesized)
ctggaagctgggaaaagacctcaggtcatacgcccgcctcagcctcccaaaagtcctgggattacaggcgtgagcc

SEQ ID NO: 728592 - DNA, 120 bp, Artificial Sequence
  ENSG00000198522_0 (sequence is synthesized)
aggaggaagatggcggcgtccgcagctgccgctgagctccaggcttctgggggtccgcggcacccagtgtgtctgttggtgttgggaatggcgggatccgggaaaaccacttttgtacag

SEQ ID NO: 728593 - DNA, 120 bp, Artificial Sequence
  ENSG00000198522_1 (sequence is synthesized)
aggctcacaggacacctgcatgcccaaggcactccaccgtatgtgatcaacctggatccagcagtacatgaagttccctttcctgccaatattgatattcgtgatactgtaaagtataaa

SEQ ID NO: 728594 - DNA, 120 bp, Artificial Sequence
  ENSG00000198522_2 (sequence is synthesized)
gaagtaatgaaacaatatggacttggacccaatggcggcatagtgacctcactcaatctctttgctaccagatttgatcaggtgatgaaatttattgagaaggcccagaacatgtccaaa

SEQ ID NO: 728595 - DNA, 120 bp, Artificial Sequence
  ENSG00000198522_3 (sequence is synthesized)
tatgtgttgattgacacacctggacagattgaggtattcacctggtcagcttctgggacaattatcactgaagcccttgcatcctcatttccaacagttgtcatctatgtaatggacaca

SEQ ID NO: 728596 - DNA, 120 bp, Artificial Sequence
  ENSG00000198522_4 (sequence is synthesized)
tcgagaagtaccaacccagtgaccttcatgtccaacatgctctatgcctgcagcatcttatacaaaaccaagctgcctttcattgtggtcatgaataaaactgacatcattgaccacagc

SEQ ID NO: 728597 - DNA, 120 bp, Artificial Sequence
  ENSG00000198522_5 (sequence is synthesized)
tttgcagtggaatggatgcaggattttgaggctttccaagatgccttgaatcaagagactacatacgtcagtaacctgactcgttcaatgagcctggtgttagatgagttttacagctca

SEQ ID NO: 728598 - DNA, 120 bp, Artificial Sequence
  ENSG00000198522_6 (sequence is synthesized)
ctcagggtggtgggtgtctctgctgttctgggtactggattagatgaactctttgtgcaagttaccagtgctgccgaagaatatgaaagggagtatcgtcctgaatatgaacgtctgaaa

SEQ ID NO: 728599 - DNA, 120 bp, Artificial Sequence
  ENSG00000198522_7 (sequence is synthesized)
aaatcactggccaacgcagagagccaacagcagagagaacaactggaacgccttcgaaaagatatgggttctgtagccttggatgcagggactgccaaagacagcttatctcctgtgctg

SEQ ID NO: 728600 - DNA, 120 bp, Artificial Sequence
  ENSG00000198522_8 (sequence is synthesized)
cacccttctgatttgatcctgactcgaggaaccttggatgaagaggatgaggaagcagacagcgatactgatgacattgaccacagagttacagaggaaagccatgaagagccagcattc

SEQ ID NO: 728601 - DNA, 120 bp, Artificial Sequence
  ENSG00000198522_9 (sequence is synthesized)
cagaattttatgcaagaatcgatggcacaatactggaagagaaacaataaataggagactttagcacacttcacttgtttctagaagtccagaattttggacctccacgtgaaagaactg

SEQ ID NO: 728602 - DNA, 120 bp, Artificial Sequence
  ENSG00000198522_10 (sequence is synthesized)
agagtagcaaagtttctcttattagagaaatcttgtgactcagatgaagtcagggatagaagacccttggacctggcaggttaatgctgattattccttggcctttcccttgtatttatg

SEQ ID NO: 728603 - DNA, 120 bp, Artificial Sequence
  ENSG00000198522_11 (sequence is synthesized)
caaggaaggatatactgagctgatactcttccaagcctacaacttcaagttttatcatttgaactcaagtacttttgctgctgaggaatggaatcaaaagaacgtagtctcctggtgacc

SEQ ID NO: 728604 - DNA, 120 bp, Artificial Sequence
  ENSG00000198522_12 (sequence is synthesized)
acctcagatctctattattaggctagatgtatagcctctactcccccagcttcttgctcttgaccctgcactgtaagttgcccttctattagcagccaaggaaaagggaaacatgagctt

SEQ ID NO: 728605 - DNA, 120 bp, Artificial Sequence
  ENSG00000198522_13 (sequence is synthesized)
atccagaacggtggcagagtctccttggcaatcaaccaacgttgctatgaaatatgcctcacactgtatagctcattataggacgtcaggtttgttgaaaaaagtgggcaagacatgatt

SEQ ID NO: 728606 - DNA, 120 bp, Artificial Sequence
  ENSG00000198522_14 (sequence is synthesized)
aatgaatcagaatcctgtttcattggtgacttggataaagactttttaattttaactttgttctaagactgcttgtcatgatttcaaattagaaaattatataattgcaaacagcttcac

SEQ ID NO: 728607 - DNA, 120 bp, Artificial Sequence
  ENSG00000198522_15 (sequence is synthesized)
ttctcctgttcaacagaggcttaaggccagatgtccaaacttgtctcaataaggaggtgatattttactaaagtttcccacgtgcacatactgactaaatacagagctaggcccagtttg

SEQ ID NO: 728608 - DNA, 120 bp, Artificial Sequence
  ENSG00000198522_16 (sequence is synthesized)
tattgtactctgaacttaatgcaaagtctccttggtgattttcgcaaagtccgtggatttgggtcagaggcacatttcatacataacagcccttataaacgtttgccctgcctccacatt

SEQ ID NO: 728609 - DNA, 120 bp, Artificial Sequence
  ENSG00000198522_17 (sequence is synthesized)
ttacagtatcttaaaacagtacatttctttcaaagaattttatctctatgagtcagtactccaacttagtggttctcacattgtggaccaggagcatcagcatcatctggggaattgttc

SEQ ID NO: 728610 - DNA, 120 bp, Artificial Sequence
  ENSG00000198522_18 (sequence is synthesized)
aacttacctcttataacctatgaactcagaaaccctgggggtgggctgagcagtctgttttagaaagccctccatgtgattctgatgcatagtagcctatgacataattccagaccaggt

SEQ ID NO: 728611 - DNA, 120 bp, Artificial Sequence
  ENSG00000198522_19 (sequence is synthesized)
gaatctcaagatactaatcctcacatcatttgccttctcatatttccctcgtcttgaccatctggtgcctgttatgcagtttaacattctgcagcaataaaagtgttttattataaagta

SEQ ID NO: 728612 - DNA, 120 bp, Artificial Sequence
  ENSG00000198522_20 (sequence is synthesized)
agtaatgaaacagtatccttttccatctactttggtcttgactcattcctggcttcttgtctgtgtattttgtggcttgaaagagtgtttttgccttttccttgtgaaatatacaagcaa

SEQ ID NO: 728613 - DNA, 120 bp, Artificial Sequence
  ENSG00000198522_21 (sequence is synthesized)
agagcagagagtatgataggataactgacagctacctgggtcccacaaggtagtattttgccttggaggatcatctgttggtcaccacctctttagactgggaaactcagaaatgagtga

SEQ ID NO: 728614 - DNA, 120 bp, Artificial Sequence
  ENSG00000198522_22 (sequence is synthesized)
gtttagttggattaactcttagtaaattgctgtatgaaatgtgtactctctccgtaggcaagtctaagtaggaagactaatcataatcagcagattgcttggtttatttatgaggatcag

SEQ ID NO: 728615 - DNA, 120 bp, Artificial Sequence
  ENSG00000198522_23 (sequence is synthesized)
agccggaggtgttatacaggtggccttaatgaccaatgccagtgggctgtcactgcctgatgcacctgtattacattttggtcactttgctttcttcattttgcctgaccactccttaaa

SEQ ID NO: 728616 - DNA, 120 bp, Artificial Sequence
  ENSG00000198522_24 (sequence is synthesized)
agggaagaggatttggagggtaccggcgcatggctttcgggggcttcccatcaactttagttccttccccggcaaagcctcctcgggccctagccaggttaattaaggctctcttctgcg

SEQ ID NO: 728617 - DNA, 120 bp, Artificial Sequence
  ENSG00000198522_25 (sequence is synthesized)
gagcagccggtcctccagtggctccgctccccgttctctgtgggctcaaaatgacagggcatactcggtccagcttaccacgttgtacaggaattgtcttgctgataaaattgcgtttct

SEQ ID NO: 728618 - DNA, 120 bp, Artificial Sequence
  ENSG00000198522_26 (sequence is synthesized)
actgtttgcagctacaaagggtcacagaaacagactgggtggtcaggagtagaaataattttctaggctctttcatcatctttcctgagtttctgagggaccttcagtgactggagggga

SEQ ID NO: 728619 - DNA, 120 bp, Artificial Sequence
  ENSG00000198522_27 (sequence is synthesized)
ggaagctcccctccagtacctacttgcacctggaatccaagcattcatcctgaaggtcacggcaactgtgtagttcactgagggtgactgccaaggaatgagcgctagcatcaggaacct

SEQ ID NO: 728620 - DNA, 120 bp, Artificial Sequence
  ENSG00000198522_28 (sequence is synthesized)
ttcggtgctcaaagggtctcggtgctgcccagcaaccctggagactgcaccctgctccagtcccggctggtccagccctgaactgtttaaccgcctcggctaccgaataagcccgagcag

SEQ ID NO: 728621 - DNA, 120 bp, Artificial Sequence
  ENSG00000198523_0 (sequence is synthesized)
ataaactgggtgacagagtcagaaaactccccagctaaacacccgtaagacttcatacaacacaatactctatactgtgatgatcacagctgccaaggctacctaaaagaagacagttat

SEQ ID NO: 728622 - DNA, 120 bp, Artificial Sequence
  ENSG00000198523_1 (sequence is synthesized)
ctcatatttggctgccagctttttatctttctctcgaccacttaaaacttcagacttcctgtcctgctggtatcatggagaaagtccaatacctcactcgctcagctataagaagagcct

SEQ ID NO: 728623 - DNA, 120 bp, Artificial Sequence
  ENSG00000198523_2 (sequence is synthesized)
caaccattgaaatgcctcaacaagcacgtcaaaagctacagaatctatttatcaatttctgtctcatcttaatatgtctcttgctgatctgtatcatcgtgatgcttctctgaagttctg

SEQ ID NO: 728624 - DNA, 120 bp, Artificial Sequence
  ENSG00000198523_3 (sequence is synthesized)
ctacaacctctagatctgcagcttgccacatcagcttaaaatctgtcatcccatgcagacaggaaaacaatattgtataacagaccacttcctgagtagaagagtttctttgtgaaaagg

SEQ ID NO: 728625 - DNA, 120 bp, Artificial Sequence
  ENSG00000198523_4 (sequence is synthesized)
tcaagattaagactaaaacttattgttaccatatgtattcatctgttggatcttgtaaacatgaaaagggctttattttcaaaaattaacttcaaaataagtgtataaaatgcaactgtt

SEQ ID NO: 728626 - DNA, 120 bp, Artificial Sequence
  ENSG00000198523_5 (sequence is synthesized)
gatttcctcaacatggctcacaaatttctatcccaaatcttttctgaagatgaagagtttagttttaaaactgcactgccaacaagttcacttcatatataaagcattatttttactctt

SEQ ID NO: 728627 - DNA, 120 bp, Artificial Sequence
  ENSG00000198523_6 (sequence is synthesized)
ttgaggtgaatataatttatattacaatgtaaaagcttctttaatactaagtatttttcaggtcttcaccaagtatcaaagtaataacacaaatgaagtgtcattattcaaaatagtcca

SEQ ID NO: 728628 - DNA, 120 bp, Artificial Sequence
  ENSG00000198523_7 (sequence is synthesized)
ctgactcctcacatctgttatcttattataaagaactatttgtagtaactatcagaatctacattctaaaacagaaattgtattttttctatgccacattaacatcttttaaagttgatg

SEQ ID NO: 728629 - DNA, 120 bp, Artificial Sequence
  ENSG00000198523_8 (sequence is synthesized)
agaatcaagtatggaaaagtaaggccatactcttacataataaaattccttttaagtaattttttcaaagaatcacagaattctagtacatgtaggtaaatcataaatctgttctaagac

SEQ ID NO: 728630 - DNA, 120 bp, Artificial Sequence
  ENSG00000198523_9 (sequence is synthesized)
atatgatcaacagatgagaactggtggttaatatgtgacagtgagattagtcatatcactaatatactaacaacagaatctaatcttcatttaaggcactgtagtgaattatctgagcta

SEQ ID NO: 728631 - DNA, 120 bp, Artificial Sequence
  ENSG00000198523_10 (sequence is synthesized)
gagttacctagcttaccatactatatctttggaatcatgaaaccttaagacttcagaatgattttgcaggttgtcttccattccagcctaacatccaatgcaggcaaggaaaataaaaga

SEQ ID NO: 728632 - DNA, 120 bp, Artificial Sequence
  ENSG00000198523_11 (sequence is synthesized)
tttccagtgacagaaaaatatattatctcaagtattttttaaaaatatatgaattctctctccaaatattaactaattattagattatattttgaaatgaacttgttggcccatctatta

SEQ ID NO: 728633 - DNA, 120 bp, Artificial Sequence
  ENSG00000198523_12 (sequence is synthesized)
actgataacataaacagtaaattaacacatattttgcgtgttatatgtattatacactatattcctacaataaagtaagctagagaaaatgttatttagaaaatcataagaaagagaaaa

SEQ ID NO: 728634 - DNA, 120 bp, Artificial Sequence
  ENSG00000198523_13 (sequence is synthesized)
ctattcattaaatggaagtgggtcaacataaaagtcttcattctcattgtcttcacattgagtaggcagaggaggagaaagatggggaggaagagaaggcgttggtcttgcagtcttgtc

SEQ ID NO: 728635 - DNA, 120 bp, Artificial Sequence
  ENSG00000198523_14 (sequence is synthesized)
ttaggggtgtggggagtgggggaaagaatattcatgtataagtggacccttgcaattcaagcccttgttgttcaagggtcaactgtaataggatatagctatttttcttcctctatcaac

SEQ ID NO: 728636 - DNA, 120 bp, Artificial Sequence
  ENSG00000198523_15 (sequence is synthesized)
caaatggtaagcatctattttgcagtccactctactgagctaaattatagatccagctatgctatttataattattttcttgatgaataaattttcaatttctcctctgaccatttcaga

SEQ ID NO: 728637 - DNA, 120 bp, Artificial Sequence
  ENSG00000198523_16 (sequence is synthesized)
acatcttccaataactcataaaacaactgaagtaaaattgagtgctggaaaatatattcaccaaactttggtaatttaagttgactaaagtttaaaattaagtctaaaatagtttacacc

SEQ ID NO: 728638 - DNA, 120 bp, Artificial Sequence
  ENSG00000198523_17 (sequence is synthesized)
tatactgcataatccaacaattttaatttcagttgaagacatgttactaatataactattattaaaagagtagaggatgtgtaattaaccatatcttctaaaacatggttactaaaagaa

SEQ ID NO: 728639 - DNA, 120 bp, Artificial Sequence
  ENSG00000198523_18 (sequence is synthesized)
tatgtaacatcaatattgaccttggtttcttacacaagtgttgctaactcaatagtgaaggagacactattaaattttctgaacccatgagagatactagagatggggagtggaaagtgt

SEQ ID NO: 728640 - DNA, 120 bp, Artificial Sequence
  ENSG00000198523_19 (sequence is synthesized)
ttggttcagggatatctgaagaacagaagggcagagatttcttaagtgacgcctcatctacaagctggaaattcctaaaaacaagtagaaagcttataaacaacaggtgatacactcacc

SEQ ID NO: 728641 - DNA, 120 bp, Artificial Sequence
  ENSG00000198523_20 (sequence is synthesized)
tcactggttttagtaaattaccaatacagaaagtatccctagtcttaaaaacaagtggaaaatttgaactgattagtcatattcctttgattacactgtttgttacaatatttttctcag

SEQ ID NO: 728642 - DNA, 120 bp, Artificial Sequence
  ENSG00000198523_21 (sequence is synthesized)
tttctcagtaaacagaaataactaatttttttgttcttcattctttgatagaaattaaaatcttattctgtgaggattacagaatactataactcaaattataaagtagaataaactctt

SEQ ID NO: 728643 - DNA, 120 bp, Artificial Sequence
  ENSG00000198523_22 (sequence is synthesized)
gaaaacaatttatttttaaaatttaatatactaaatgctcaaatatgttctactatagaataagttcttatcttaatttacagggcactaaaaacaattttaaaatgcttaatgttgcct

SEQ ID NO: 728644 - DNA, 120 bp, Artificial Sequence
  ENSG00000198523_23 (sequence is synthesized)
gcactaaaaacaattttaaaatgcttaatgttgccttttatattttaattggttaagaatatatatttgtttaatgcaaatcagaatcactatattaaaatgaatgttcttgaaaactca

SEQ ID NO: 728645 - DNA, 120 bp, Artificial Sequence
  ENSG00000198535_0 (sequence is synthesized)
actggtgctgaaccccgccgcgcgcgctttgaatttcccagccgctaagcgcctctcctggtcggtgtcccaggcagaaaggtgcagagacccatctgacgcaggactccaggtagacaa

SEQ ID NO: 728646 - DNA, 120 bp, Artificial Sequence
  ENSG00000198535_1 (sequence is synthesized)
gctccagcagagagtggccagatgtggtgcctggagcgactccgcttgggtcctgagtgccttcggcggagcggagactggcttctcccgggtcgggcccgcggagccaagtctcgcacc

SEQ ID NO: 728647 - DNA, 120 bp, Artificial Sequence
  ENSG00000198535_2 (sequence is synthesized)
accgccgcgtgcgcaaatgtgctcactccggaccgcatccctgagttctgcatcccgccacggctcatgccccgcctggccttggctgcgctccggaattcttgggtcgaagaagcaggg

SEQ ID NO: 728648 - DNA, 120 bp, Artificial Sequence
  ENSG00000198535_3 (sequence is synthesized)
atggacgagggcgccggccgcacagactgggacccgcgctcgcaggccgcgctgtcactgccgcacctgccccgtgtgcgcaccgcctacggcttctgcgcgctgctcgagagcccgcac

SEQ ID NO: 728649 - DNA, 80 bp, Artificial Sequence
  ENSG00000198535_4 (sequence is synthesized)
gagagcccgcacacgcgccgcaaggagtcgctcctgctcgggggcccgcccgcgccccggccccgggcccacacctacgg

SEQ ID NO: 728650 - DNA, 80 bp, Artificial Sequence
  ENSG00000198535_5 (sequence is synthesized)
cgcccggcggccccgcggctgccgcctcctgcgcgtccccgacgggctgctgagtcgcgcgctgcgggctgggaggagtc

SEQ ID NO: 728651 - DNA, 120 bp, Artificial Sequence
  ENSG00000198535_6 (sequence is synthesized)
cgggctgggaggagtcgccgcctgacccgcgtccgctccgtctccagcgggaacgaggacaaggagcgccgcgcgggctcccagtccccggcccgggccccctccacgagcccgccgtcg

SEQ ID NO: 728652 - DNA, 120 bp, Artificial Sequence
  ENSG00000198535_7 (sequence is synthesized)
cacgagcccgccgtcgtcccgggtcccgtttcccgagcgcctggaggccgagggcaccgtggctctgggccgcgccggcgacgccctgcgcctggccgccgagtactgtccgggaaccgg

SEQ ID NO: 728653 - DNA, 120 bp, Artificial Sequence
  ENSG00000198535_8 (sequence is synthesized)
gagagcccggccggaggcgcccccgggccccgagccgtcagctgtcgcctcagcctcgtcctgcggccgccgggcaccgcgcttcggcaatgcagcactgtggtggggcgcagccgcaag

SEQ ID NO: 728654 - DNA, 120 bp, Artificial Sequence
  ENSG00000198535_9 (sequence is synthesized)
cgcagccgcaaggcctcctttgaccaggacttctgcttcgacggcctctcggaggacgaagtgcgccgcctggccgttcgagtcaaggcccgggacgagggccgcggccgggagcggggc

SEQ ID NO: 728655 - DNA, 120 bp, Artificial Sequence
  ENSG00000198535_10 (sequence is synthesized)
cgcctgctgggccagggtgagctgtccctgggcgccctcctgctgctctgagggcccagccctccccggggcgctctgcccgggggactccggacactgacagccgcgtggtacaaaata

SEQ ID NO: 728656 - DNA, 120 bp, Artificial Sequence
  ENSG00000198535_11 (sequence is synthesized)
aacgtgtatttgttgttcttatcagtcccgtttcagtacaacactggcagagatgattctagattaactatcccagtaaaagatatgatattttccatagatacctccagaatttttttc

SEQ ID NO: 728657 - DNA, 120 bp, Artificial Sequence
  ENSG00000198535_12 (sequence is synthesized)
agcaaatggaatggttctacagtgtttcccaatatagacagccatttgcataccatatgtaccacacacgcctaggaaataatgaatcacatgaagtgttagaactagaaagtgtcttgg

SEQ ID NO: 728658 - DNA, 120 bp, Artificial Sequence
  ENSG00000198535_13 (sequence is synthesized)
cgatctgtttgctccaatcacctcattttaaaattggtgctttccacaacatgcatggagaccatcttggagcatttacttttgaagcattttgtttaagaccccggataagaaaatgag

SEQ ID NO: 728659 - DNA, 120 bp, Artificial Sequence
  ENSG00000198535_14 (sequence is synthesized)
cctagctatatctcactggaaaagcattggagaaaatgaaaccattttaatattctaagcttaaataatagttataataggctaggtgtggcggctcacgcctgtaatcctggcactttg

SEQ ID NO: 728660 - DNA, 120 bp, Artificial Sequence
  ENSG00000198535_15 (sequence is synthesized)
agatggcttgagcccaggaatttgagaccaggctgggcaacatgggaagaccgcgtctccataaaaaatacaaaatttagccggacgtggtggcacgcacctgtagttccagctactctg

SEQ ID NO: 728661 - DNA, 74 bp, Artificial Sequence
  ENSG00000198535_16 (sequence is synthesized)
cggagtgagaccctgtctgcaaataataataataataataaatagttttacaagcgttaatttatgttttaacc

SEQ ID NO: 728662 - DNA, 120 bp, Artificial Sequence
  ENSG00000198535_17 (sequence is synthesized)
ataataaatagttttacaagcgttaatttatgttttaacccccaaaaggaggcactgctatgcccattttacagatgaggatattgaggcacagaataaagagcagagccagaatttgaa

SEQ ID NO: 728663 - DNA, 120 bp, Artificial Sequence
  ENSG00000198535_18 (sequence is synthesized)
cctagacaatcagcatttcactcattactcttatgtaggtaataccacagtgtctaaagggctcgctattaaagttgcgagtattgtgcaacttctctctgaaactgttgacactgaagt

SEQ ID NO: 728664 - DNA, 120 bp, Artificial Sequence
  ENSG00000198535_19 (sequence is synthesized)
tcgtgtctacttgtattcctcatcctgcttttggtgaaaaaacaaattgcttgaaatgaataatttattatctcatgctaataacttcaggcattgagatgagctgatgggtctaaagct

SEQ ID NO: 728665 - DNA, 120 bp, Artificial Sequence
  ENSG00000198535_20 (sequence is synthesized)
ctgaggaggaagctaaccggcctcagaatcatagaaatgggtgccagccttgttgtaaccaggtgagtttatctgctggaacaggcagtggagagtgtacagatagcatggttttacctc

SEQ ID NO: 728666 - DNA, 120 bp, Artificial Sequence
  ENSG00000198535_21 (sequence is synthesized)
tggcttctgataataattccagatttaacaatcctgttttagaggacgattttccctcatcccttgaattcactgccagcagggcatttttttcttttttttatgcaaataggaaaatgc

SEQ ID NO: 728667 - DNA, 120 bp, Artificial Sequence
  ENSG00000198535_22 (sequence is synthesized)
atcctaaatgagggtttaaaaaattgaaaatatttaaatatacaggatggtgttaaatatgactccattatcaatctggattcagaaatggtttctgctttattttatttcattttatct

SEQ ID NO: 728668 - DNA, 64 bp, Artificial Sequence
  ENSG00000198535_23 (sequence is synthesized)
acctcctgacacaagctgtcatcccgctttggcttctcaaagtgctaggattataggcgtgagc

SEQ ID NO: 728669 - DNA, 120 bp, Artificial Sequence
  ENSG00000198535_24 (sequence is synthesized)
gattataggcgtgagccaccatgcccgaccagtttctgcttttattaaaattgttcacagttttatacattcatgttcattaaaaatgctatttagaaaagagtttgataaaataaatat

SEQ ID NO: 728670 - DNA, 120 bp, Artificial Sequence
  ENSG00000198535_25 (sequence is synthesized)
tatacaaaattcgaagaaaaaagaaaagagtttctgtttcagtcacaaattagggttattgtgatgtgtatttatgatgaccattgaacaaatgtgaagaatactgtgaattctatgact

SEQ ID NO: 728671 - DNA, 120 bp, Artificial Sequence
  ENSG00000198535_26 (sequence is synthesized)
ttatcaaaatcagccacatccaggagcttgcagttgttgaccaaatgaatgatgacatagagtagttcagatctatcatgtgctcttctatctaatcagtcaatatttccttggccctca

SEQ ID NO: 728672 - DNA, 120 bp, Artificial Sequence
  ENSG00000198535_27 (sequence is synthesized)
agccaacattcattttttatgtataaccttcttcatgattttgaaattttgatagggtaactgctaatgagttcacaaatgtagcactttaaaaggaaaataaatggagagtgaaaacaa

SEQ ID NO: 728673 - DNA, 120 bp, Artificial Sequence
  ENSG00000198538_0 (sequence is synthesized)
agaccaggaagcggatcccgtggaatgacggtgacgccgcggcgggcggattgacttctaaagaatcttggtacgtgaggaagaaacccagaagaggaagaggaaagcaaaggagtcagg

SEQ ID NO: 728674 - DNA, 76 bp, Artificial Sequence
  ENSG00000198538_1 (sequence is synthesized)
aagaaacccagaagaggaagaggaaagcaaaggagtcagggatggctcttcctcagggtctattgacattcaggga

SEQ ID NO: 728675 - DNA, 120 bp, Artificial Sequence
  ENSG00000198538_2 (sequence is synthesized)
ttataggaacctggtctccctggatatctcttccaaatgcatgatgaagacattcttctcaacagggcaaggcaatacagaagcgttccacacagggacattgcaaagacaagcaagtca

SEQ ID NO: 728676 - DNA, 120 bp, Artificial Sequence
  ENSG00000198538_3 (sequence is synthesized)
tcacattggagatttttgcttccagaaaattgagaaagacattcatggcttccagtttcagtggaaagaagatgaaacaaatgaccatgcagcacccatgacagaaatcaaagagttgac

SEQ ID NO: 728677 - DNA, 120 bp, Artificial Sequence
  ENSG00000198538_4 (sequence is synthesized)
tggtagtacaggccaacatgatcaaaggcatgctggaaacaagcatattaaagatcagcttggattaagctttcattcgcatctgcctgaactgcacatatttcagcctgaagggaaaat

SEQ ID NO: 728678 - DNA, 120 bp, Artificial Sequence
  ENSG00000198538_5 (sequence is synthesized)
tggtaatcaagttgagaagtctatcaacaatgcttcctcagtttcaacatcccaaagaatttgttgtaggcccaaaacccatatttctaataagtatggaaataattccctccattcttc

SEQ ID NO: 728679 - DNA, 120 bp, Artificial Sequence
  ENSG00000198538_6 (sequence is synthesized)
attactcacacaaaaacggaatgtacacatgagagaaaaatctttccaatgtattgagagtggcaaatcctttaattgtagctcacttttaaaaaaacatcagataacccacttagaaga

SEQ ID NO: 728680 - DNA, 120 bp, Artificial Sequence
  ENSG00000198538_7 (sequence is synthesized)
ccacttagaagagaaacaatgtaaatgtgatgtatatggcaaggtatttaatcagaagcgataccttgcatgccatcgtagatctcacattgatgagaaaccttacaagtgtaatgagtg

SEQ ID NO: 728681 - DNA, 120 bp, Artificial Sequence
  ENSG00000198538_8 (sequence is synthesized)
tggtcacaatacatccctcttccttcacaaggcgcttcatactgcagacaaaccttatgaatgtgaagaatgtgacaaagttttcagtcgcaaatcacaccttgaaacacataagataat

SEQ ID NO: 728682 - DNA, 90 bp, Artificial Sequence
  ENSG00000198538_9 (sequence is synthesized)
acataagataatttatactggaggagctttcacatgtaattcatacctagcaaaacatactataattcacactggagagaaaccttacaa

SEQ ID NO: 728683 - DNA, 120 bp, Artificial Sequence
  ENSG00000198538_10 (sequence is synthesized)
tggcaaggtttttaatcgactgtcaacccttgcacgccatcgtaggcttcatactggagagaaaccttatgaatgtgaagaatgtgaaaaagttttcagtcgcaaatcacatcttgaaag

SEQ ID NO: 728684 - DNA, 82 bp, Artificial Sequence
  ENSG00000198538_11 (sequence is synthesized)
acaaatgtaaggtttgtgacaaggcttttgcatataattcatacctggcaaaacatagtataattcacactggagagaagac

SEQ ID NO: 728685 - DNA, 120 bp, Artificial Sequence
  ENSG00000198538_12 (sequence is synthesized)
aatgaatgtggcaaggtttttaatcaacaatcaactcttgcacgccatcatagacttcatactgcagagaaaccatacaaatgtgaagaatgtgacaaagttttcaggtgcaaatcacac

SEQ ID NO: 728686 - DNA, 87 bp, Artificial Sequence
  ENSG00000198538_13 (sequence is synthesized)
cggagtgattcatgccttacagaacatcagagagttcatactggagagaaaccatacatgtgtaatgaatgtggcaaggtttttagt

SEQ ID NO: 728687 - DNA, 120 bp, Artificial Sequence
  ENSG00000198538_14 (sequence is synthesized)
gaaaccatacatgtgtaatgaatgtggcaaggtttttagtacaaaagcaaaccttgcatgtcatcataaacttcatactgcagagaaaccgtacaaatgtgaagaatgtgagaaagtttt

SEQ ID NO: 728688 - DNA, 120 bp, Artificial Sequence
  ENSG00000198538_15 (sequence is synthesized)
gaaaccgtacaaatgtgaagaatgtgagaaagttttcagtcgcaaatcacacatggaaagacataggaggattcatactggagagaaaccgtacaaatgtaaggtttgtgacaaggcttt

SEQ ID NO: 728689 - DNA, 120 bp, Artificial Sequence
  ENSG00000198538_16 (sequence is synthesized)
gtaatgagtgtggcaagaccttcagtcagatgtcaaaccttgtataccatcatagacttcatagtggagagaaaccttaaaagtgtaatgagtgtggcaacaccttccatcacaattcaa

SEQ ID NO: 728690 - DNA, 84 bp, Artificial Sequence
  ENSG00000198538_17 (sequence is synthesized)
ttaaaagtgtaatgagtgtggcaacaccttccatcacaattcaacccttgtaagtcacaaagccattcatactggagagaaact

SEQ ID NO: 728691 - DNA, 120 bp, Artificial Sequence
  ENSG00000198538_18 (sequence is synthesized)
gagaaactttacaaataggaagaatgtgacaaagttttcggttgcaaatcaaaccttgaaacacataagaaaatgcatgctgaagagaaaccacacagatgtaaggtttatgacaagatt

SEQ ID NO: 728692 - DNA, 120 bp, Artificial Sequence
  ENSG00000198538_19 (sequence is synthesized)
tttgaatataattcatacctggcaaaacatattagaattcaaactggagagaaaccttacaaatgtgatgagtgtggcaacacctttggtcaaaattcataccttgtaattcaaaaggca

SEQ ID NO: 728693 - DNA, 120 bp, Artificial Sequence
  ENSG00000198538_20 (sequence is synthesized)
attcgtattggagagaaaccctacaagtgtaatgaatgtggcatagtttttaatcaacagtcacaccttgcaagtcatcatagtcttcatactgcagagaaatcttacaaatgtgaagac

SEQ ID NO: 728694 - DNA, 120 bp, Artificial Sequence
  ENSG00000198538_21 (sequence is synthesized)
tgtgacaaagttgtcagtcacaaatcacagcttgaaagacaggagaattcatactggagaaaaaacatacaaatgtaaggtttgtaacaaggcttttgggagtgattcacacctggcaca

SEQ ID NO: 728695 - DNA, 120 bp, Artificial Sequence
  ENSG00000198538_22 (sequence is synthesized)
acaagtgcaatgagtgtggcaaagcctttagtgggcagtcaccacttattcaccatcaagcaatccatagtatagggaaacttgactaatataatgattgtcacaaagttttcagtaatg

SEQ ID NO: 728696 - DNA, 120 bp, Artificial Sequence
  ENSG00000198538_23 (sequence is synthesized)
atataatgattgtcacaaagttttcagtaatgctacaaccattgcaaatcattggagaatccataatgagagatcttacaagtgtaataaatgtgacagatttttcagatatcgttcata

SEQ ID NO: 728697 - DNA, 120 bp, Artificial Sequence
  ENSG00000198538_24 (sequence is synthesized)
tattgctattcatcatcgaactcatgctggagagaaaccttataaatgtcatgattgtggcaaggtcttcagtcaagtttcatcctatgcaaaacataggaggattcatacaggagagaa

SEQ ID NO: 728698 - DNA, 120 bp, Artificial Sequence
  ENSG00000198538_25 (sequence is synthesized)
actcacaagtgtgatgattgtggcaaagcgtttacttcacattcacacctcaatagacatcagagaatccatgctggacagaaatcttacaaatgtcatcagtgtggtaaggtcttcagt

SEQ ID NO: 728699 - DNA, 120 bp, Artificial Sequence
  ENSG00000198538_26 (sequence is synthesized)
ccgagatcactccttgcagaccatcagacaattccttttggagacagttgtttcaaatgccattagtatagcaagccatcaagcattaattgacattacagttaaatgagcactgacctg

SEQ ID NO: 728700 - DNA, 120 bp, Artificial Sequence
  ENSG00000198538_27 (sequence is synthesized)
agtttgagttgacttaacattgagtttaagcattaattgacattaaactgtttatgttaagaggactgggctgggcactgtggctcacgcctgcaatgccagcactttgagaggccaaga

SEQ ID NO: 728701 - DNA, 120 bp, Artificial Sequence
  ENSG00000198538_28 (sequence is synthesized)
ggccaagactggtaggtcactggaggttaagagtttgagaacagcctggccaacagacgggagccacttttcccagcctgtgttttcatttctattctttctttcttttttctttttttt

SEQ ID NO: 728702 - DNA, 120 bp, Artificial Sequence
  ENSG00000198538_29 (sequence is synthesized)
tgtatttttagtagagactgggtttcgctgtgttagcctggatggtctcgattttctgatcttatgattcacccacctctacctcccgaagtgctgagattatgggcgtgagccaccgtg

SEQ ID NO: 728703 - DNA, 120 bp, Artificial Sequence
  ENSG00000198538_30 (sequence is synthesized)
acctcccgaagtgctgagattatgggcgtgagccaccgtgactggcctgttttttgtttctttaacaaaaagttatggggatttctatgagtattgtgttgaatctaaatcacattcggt

SEQ ID NO: 728704 - DNA, 120 bp, Artificial Sequence
  ENSG00000198538_31 (sequence is synthesized)
tatataatcattgagcaatactaatttttccaatcagtatggattgtatgtgtatttatatgtttttaatcattttgatcaatgtttgtagatttcaaggtacaaacttctcacctttat

SEQ ID NO: 728705 - DNA, 120 bp, Artificial Sequence
  ENSG00000198538_32 (sequence is synthesized)
atgtttattcctaaatatttcttactttaagctctttagcaaatggaagtggtttttaattttattttaaaattatttaatgttaatgtatggaaattcaactaatttttggtgctatta

SEQ ID NO: 728706 - DNA, 120 bp, Artificial Sequence
  ENSG00000198538_33 (sequence is synthesized)
ttctattctgcaaatacactgaatatgtttattagttccagttgtattttggttgactgtgattttcttcacagatcatgtcatctacaaacaaataaaatttgacttctttctttctga

SEQ ID NO: 728707 - DNA, 120 bp, Artificial Sequence
  ENSG00000198538_34 (sequence is synthesized)
ctatatatgcaaaccctttgggatggccactaaatttgtcacagagtatggtaacgtggttgactgaaccacagccatgaaagtgagcttccagctcttctgctgttgcaccgcagtcca

SEQ ID NO: 728708 - DNA, 120 bp, Artificial Sequence
  ENSG00000198538_35 (sequence is synthesized)
ctcctggggatgtgcccttgtgtatctttgtattttctcttgttgcctcttgggagccacatccttacttgactaaaatggaagccgtattgattttgaaatgaaaagcttcatgatgta

SEQ ID NO: 728709 - DNA, 67 bp, Artificial Sequence
  ENSG00000198538_36 (sequence is synthesized)
acagaatgctgggattacagacacgagccatcatgcccagccccaccaattgttattaaatatatat

SEQ ID NO: 728710 - DNA, 120 bp, Artificial Sequence
  ENSG00000198538_37 (sequence is synthesized)
gtggaatgacggtcacgccgcggcgggcggattgacttctaaagaatcttggtacgtgaggaagaaacccagaagaggaagaggaaagcaaaggagtcagggatggctcttcctcagatt

SEQ ID NO: 728711 - DNA, 77 bp, Artificial Sequence
  ENSG00000198538_38 (sequence is synthesized)
gaggaaagcaaaggagtcagggatggctcttcctcagattttcggtctgtcacccaggctaaagtgcagtggtgtca

SEQ ID NO: 728712 - DNA, 84 bp, Artificial Sequence
  ENSG00000198538_39 (sequence is synthesized)
tgtatctgtccttttattaattaattactttatgtatttatgagactgagttttgctgttgtcacccaggctgaagtacgatgc

SEQ ID NO: 728713 - DNA, 90 bp, Artificial Sequence
  ENSG00000198538_40 (sequence is synthesized)
cagctcactgcaacctctgcctctcgggtacaaccgattctcctgcctcaggcccctgagaagctgggattacagatatgcaccaccaca

SEQ ID NO: 728714 - DNA, 80 bp, Artificial Sequence
  ENSG00000198538_41 (sequence is synthesized)
gcccaggatgcttggcctatctgtttttactacctttactggagaactttatttatttatttatttatttatttttatta

SEQ ID NO: 728715 - DNA, 66 bp, Artificial Sequence
  ENSG00000198538_42 (sequence is synthesized)
ctccttcctcagcctcccgagtagctgcaactacaagtgtgcaccactggccaggatagtctcaat

SEQ ID NO: 728716 - DNA, 120 bp, Artificial Sequence
  ENSG00000198538_43 (sequence is synthesized)
ctcagcctcccaaagtgctgggattattggcgtgaaccaccacaccaggcctggagaactttatatatgcttgtgggttggagttactctttagccttctttcatttctttttttttttt

SEQ ID NO: 728717 - DNA, 78 bp, Artificial Sequence
  ENSG00000198538_44 (sequence is synthesized)
atgtcaaaccttgtataccatcatagacttcatagtggagagaaaccttgaaagtgtaatgagtgtggcaagaccttc

SEQ ID NO: 728718 - DNA, 120 bp, Artificial Sequence
  ENSG00000198542_0 (sequence is synthesized)
aattgcaactccggctggagccccggacctgcaagcctgggtgtccgtgggtccgtctgcccagccatctgctggtggcacctctccctcctgccgcctccctcggtgaaccccaccttg

SEQ ID NO: 728719 - DNA, 120 bp, Artificial Sequence
  ENSG00000198542_1 (sequence is synthesized)
cagaagtgcagctcgcccggagcagcccaggagctcagcatgcgtcccccaggcttcaggaacttcttgctgctggcgtcctcccttctctttgctgggttgtcagctgttcctcaaagc

SEQ ID NO: 728720 - DNA, 120 bp, Artificial Sequence
  ENSG00000198542_2 (sequence is synthesized)
ctcaaagcttctcgccatctctgaggagctggccgggcgccgcctgcaggctgtcccgggccgagtcggagcgacgctgccgcgcacctgggcagcccccgggggccgcgctgtgccacg

SEQ ID NO: 728721 - DNA, 120 bp, Artificial Sequence
  ENSG00000198542_3 (sequence is synthesized)
cgctgcgactgcggcgtctgcatctgccacgtgactgagccgggcatgttcttcgggcccctgtgtgagtgccatgagtgggtgtgcgagacctacgacgggagcacctgtgcaggccat

SEQ ID NO: 728722 - DNA, 120 bp, Artificial Sequence
  ENSG00000198542_4 (sequence is synthesized)
ggtaagtgtgactgtggcaagtgcaagtgtgaccagggatggtatggggatgcttgccagtacccaactaactgtgacttgacaaagaagaaaagtaaccaaatgtgcaagaattcacaa

SEQ ID NO: 728723 - DNA, 120 bp, Artificial Sequence
  ENSG00000198542_5 (sequence is synthesized)
gacatcatctgctctaatgcaggtacatgtcactgtggcaggtgtaagtgtgataattcagatggaagtggacttgtgtatggtaaattttgtgagtgtgacgatagagaatgcatagac

SEQ ID NO: 728724 - DNA, 120 bp, Artificial Sequence
  ENSG00000198542_6 (sequence is synthesized)
gatgaaacagaagaaatatgtggaggccatgggaagtgttactgtggaaactgctactgcaaggctggttggcatggagataaatgtgaattccagtgcgatatcaccccctgggaaagc

SEQ ID NO: 728725 - DNA, 120 bp, Artificial Sequence
  ENSG00000198542_7 (sequence is synthesized)
aagcgaagatgcacgtctccagatggcaaaatctgcagtaacagagggacttgtgtatgtggtgaatgtacctgtcacgatgttgatccgactggggactggggagatattcatggggac

SEQ ID NO: 728726 - DNA, 120 bp, Artificial Sequence
  ENSG00000198542_8 (sequence is synthesized)
acctgtgaatgtgatgagagggactgtagagctgtctatgaccgatattctgatgacttctgttcaggtcatggacagtgtaattgcggaagatgtgactgcaaagcaggctggtatggg

SEQ ID NO: 728727 - DNA, 120 bp, Artificial Sequence
  ENSG00000198542_9 (sequence is synthesized)
aagaagtgtgagcacccacagtcctgcacgctgtcagctgaggagagcatcaggaagtgccagggaagctcggatctgccttgctctgggaggggtaaatgtgaatgtggcaaatgcacc

SEQ ID NO: 728728 - DNA, 120 bp, Artificial Sequence
  ENSG00000198542_10 (sequence is synthesized)
acttgtgagtgtgatgatcgccgctgtgaagacctcgatggtgtggtctgtggaggccacggcacatgttcctgtggtcgctgtgtttgtgagagaggatggtttggaaagctctgccaa

SEQ ID NO: 728729 - DNA, 120 bp, Artificial Sequence
  ENSG00000198542_11 (sequence is synthesized)
catccgcggaagtgtaacatgacggaagaacaaagcaagaatctgtgtgaatcagcagatggcatattgtgctcggggaagggttcttgtcattgtgggaagtgcatttgttctgctgaa

SEQ ID NO: 728730 - DNA, 120 bp, Artificial Sequence
  ENSG00000198542_12 (sequence is synthesized)
gagtggtatatttctggggagttctgtgactgtgatgacagagactgcgacaaacatgatggtctcatttgtacagggaatggaatatgtagctgtggaaactgtgaatgctgggatgga

SEQ ID NO: 728731 - DNA, 120 bp, Artificial Sequence
  ENSG00000198542_13 (sequence is synthesized)
tggaatggaaatgcatgtgaaatctggcttggctcagaatatccttaacaattacatgagagaggtctggattcttattttttctgggccattagaacagataaatgcgaaggaaaccat

SEQ ID NO: 728732 - DNA, 120 bp, Artificial Sequence
  ENSG00000198542_14 (sequence is synthesized)
gtatattcaccactaggacaggttaaaaagaccattgtatgtttttctatttctgaattacgaatgaaatccgagtacctattagaaatgagttatgcaaatttagatgcaaataacatt

SEQ ID NO: 728733 - DNA, 120 bp, Artificial Sequence
  ENSG00000198542_15 (sequence is synthesized)
agaaaaaaaagattcttccataattaacataagtggttcctaacgagagcaatttttccacccaaaagtcatttggcaacatctacagacaattttgattgtcacactgggtcgggtagg

SEQ ID NO: 728734 - DNA, 120 bp, Artificial Sequence
  ENSG00000198542_16 (sequence is synthesized)
aaggtatgctgcagacatttggtgggtagaggccagggatgctgctgagcatcccgcagtgtacaggacagcccccaaacaaggaattatccagccccaaatgccaatagggctcaaact

SEQ ID NO: 728735 - DNA, 120 bp, Artificial Sequence
  ENSG00000198542_17 (sequence is synthesized)
gagaaacattgagttatatggctattagaaatccacattcttacacaagaaagaccatattagaatctaaggaaaacatgcatattcacattaattaatcgatcagatttttccagaatt

SEQ ID NO: 728736 - DNA, 120 bp, Artificial Sequence
  ENSG00000198542_18 (sequence is synthesized)
ccgtatcagtcaccattttaatatggggacaatgaagacaagcacacaggaggtagaatatcagagtggggctggatcaagggcaaaaactggtcattaagtcatctgacattaaatcat

SEQ ID NO: 728737 - DNA, 120 bp, Artificial Sequence
  ENSG00000198542_19 (sequence is synthesized)
ttagccactaagttatttgtctactctcactttaaactcaccaaagaagattctcttaaagaaattatgaaaaatgtacaatttaacattttaaataaatagtgacagaagttgtttata

SEQ ID NO: 728738 - DNA, 120 bp, Artificial Sequence
  ENSG00000198542_20 (sequence is synthesized)
ctggcttggctcagaatatccttaacaattacatgagagagcaattttgatgacgtattcgctgatgcacagacattggaattcattacattatctagccatcgtaatacaaatgacctt

SEQ ID NO: 728739 - DNA, 120 bp, Artificial Sequence
  ENSG00000198542_21 (sequence is synthesized)
ttaaactttacggaccacgtacgtccctgtctcatattcttctttgttggtttctgtttaatactttaaagctgtaaaaaaaatttaaaaaattccttctgagctcccaggccatacaaa

SEQ ID NO: 728740 - DNA, 120 bp, Artificial Sequence
  ENSG00000198542_22 (sequence is synthesized)
agcaacttaagggtggatttggctggcagctgggcagtactttgtcagcctcagctccactggaactgcccttgattctctatagctcatcacaaaacctcaggtatgtcttatttttct

SEQ ID NO: 728741 - DNA, 120 bp, Artificial Sequence
  ENSG00000198542_23 (sequence is synthesized)
tataatcctctgtatgttattatcctttttattaacaacaacaactacaacaaaagtgctgctctttttcatagtctcatgtaagaagagtgtcaaaaatgtcctcggcatttgttttct

SEQ ID NO: 728742 - DNA, 120 bp, Artificial Sequence
  ENSG00000198542_24 (sequence is synthesized)
cagaaaaagaatttagatattggagaaattatcataccataaaaagttcaaaatgtgattcatctaaaattttggacaaagatgaaaatatagtcagctctgttctagtgttcatttagt

SEQ ID NO: 728743 - DNA, 120 bp, Artificial Sequence
  ENSG00000198542_25 (sequence is synthesized)
tagaaaccatagtaccggaactgtattatagtagaagttaatggtacctaaactctaaggaatgctttttctttgaaaacagaaatatttttacttatttctgtccactatgtttgtgtg

SEQ ID NO: 728744 - DNA, 120 bp, Artificial Sequence
  ENSG00000198542_26 (sequence is synthesized)
tatgtgtgtgtttgtgtgtgtatgtgtggttttgatgccagcaatgcaaacaccaatatatctattaagaagtgattgaatttagattggaaaaaataaaatagttacatgtaaagacat

SEQ ID NO: 728745 - DNA, 120 bp, Artificial Sequence
  ENSG00000198542_27 (sequence is synthesized)
gtaacctttctcatagctgtatgctacctgcatgcaacttgctttacctgcctttgttattctactgactcttgctttttcaattgctgttaaaaataagataaacagaaagcaatatac

SEQ ID NO: 728746 - DNA, 120 bp, Artificial Sequence
  ENSG00000198542_28 (sequence is synthesized)
cattgaacctaaaagcaatatacaattaggtttgtaatgacttttatttccctgaactctttatttagcaggtatgtgaaagtacgcagtacactatcaataaaagatcattgaatctaa

SEQ ID NO: 728747 - DNA, 120 bp, Artificial Sequence
  ENSG00000198542_29 (sequence is synthesized)
ctcattggctcattcctgtttttaggaagttgcagtgggattaatgtcaattggaagggatgcagcaagtttagagaaggtgttggcactaacgctgcttgtttggcaaatcatcatcac

SEQ ID NO: 728748 - DNA, 120 bp, Artificial Sequence
  ENSG00000198542_30 (sequence is synthesized)
tgaggtattccacccagagactttttcaaaaaagtcaactaaagtgctaagtcataagaggagagccattatacccgttgtctttctgggctccttgagtttatctggattccaacagca

SEQ ID NO: 728749 - DNA, 120 bp, Artificial Sequence
  ENSG00000198542_31 (sequence is synthesized)
cttggaaagtaccgccctccactacctcaaatgcaaacacaatctctgccagtagacattggaattagacttagtgaaaaccaggaaaaaaaaaaaaaactaaaatataactcagcctta

SEQ ID NO: 728750 - DNA, 120 bp, Artificial Sequence
  ENSG00000198542_32 (sequence is synthesized)
gtttgcagactcaactgtcaacactttgaaaccctactccatattcaagagagtcaacaggccctatgtcacattgtaggctaagaaacctcagctatgactactatttcactcaaagta

SEQ ID NO: 728751 - DNA, 120 bp, Artificial Sequence
  ENSG00000198542_33 (sequence is synthesized)
agaccatgtacatcctggattttgatatgcctgcattttggaaaaaaaaattgaggatttagcccagtcgctttcccttgatatagccttgttctgaattaaaatggaaaaaatatttca

SEQ ID NO: 728752 - DNA, 120 bp, Artificial Sequence
  ENSG00000198542_34 (sequence is synthesized)
attattttcatcttgttctcaactggatgttagtcaatgtggtctctttttgaatatgtatcaaatattaatgatccataatattagggagataattttaaatgaagtgatacgtgtcta

SEQ ID NO: 728753 - DNA, 120 bp, Artificial Sequence
  ENSG00000198542_35 (sequence is synthesized)
acttacttaaagaataagtttttggtttttgcttttaaagacaaccaaatctgatattgttcatcctgataaaaataacaacttttagtgcttaaagcattaattaagcaagtggctagg

SEQ ID NO: 728754 - DNA, 120 bp, Artificial Sequence
  ENSG00000198542_36 (sequence is synthesized)
tatgataaagaacttctgcttgctccccaagaggcaaactattagaagaactggagcgggagtcctttggacccatcgtggatctctttaagccactgctacccaaaaacattcaggaca

SEQ ID NO: 728755 - DNA, 120 bp, Artificial Sequence
  ENSG00000198542_37 (sequence is synthesized)
agcaaacatttagagcaagaatctccaaattcttcaggatttgtaatgaaatgatgttcagttccattttgctctttacatagggtggagaattgtcatgtcttctctaatttttccaag

SEQ ID NO: 728756 - DNA, 120 bp, Artificial Sequence
  ENSG00000198542_38 (sequence is synthesized)
taaagtggtagcaaaatgttttaaaaagcaatcttatattagaaaacaaaaatgttgtcacttgaaataccaaaacaacatttctgagcgttgttgagggactggcaaagcaatcagcta

SEQ ID NO: 728757 - DNA, 120 bp, Artificial Sequence
  ENSG00000198542_39 (sequence is synthesized)
ctataacaaatcagtagaaataaccctcccacaccagatatgcatgcagaaggaatggagtattatagagacttgatacaatggacatatgcacatggaggtacaaaacacacagtctaa

SEQ ID NO: 728758 - DNA, 120 bp, Artificial Sequence
  ENSG00000198542_40 (sequence is synthesized)
atacaaatgaattccatcagatttactatacggaacatcagtagtgacagattgcacttcttacttaataacagcaaacttaatttctgaggggaaaaaaatggcgaagtcttatcccaa

SEQ ID NO: 728759 - DNA, 120 bp, Artificial Sequence
  ENSG00000198542_41 (sequence is synthesized)
acaaatagcaagagaggtatcatcaaagagctaaaattttctttggcatggtaaagggggaaattgagtttaccaacttatttacatgacatttctctatattggtgagtaatgcaatgc

SEQ ID NO: 728760 - DNA, 120 bp, Artificial Sequence
  ENSG00000198542_42 (sequence is synthesized)
cattttgttacataaagttgtttgatgttttttaatatgccttcatataaatattttattcaatatgttgtatttgtgaatttaacaaatgatattaaacacaaactacaatgcagacag

SEQ ID NO: 728761 - DNA, 120 bp, Artificial Sequence
  ENSG00000198542_43 (sequence is synthesized)
acaaactctttgtatgcaaattagcaatacataccaacagttcttgatacacaggtacctactacatgcagctcatcattgctgtcctcttcccatgctacaggtgagaccagacacaaa

SEQ ID NO: 728762 - DNA, 120 bp, Artificial Sequence
  ENSG00000198542_44 (sequence is synthesized)
gtaaatgacctaactcaattacaaataacaaggacccctctgcaatatgtctaaacatatattagaagaaagtatttgacatccttcatagggataaatgcccttatagacaccccatat

SEQ ID NO: 728763 - DNA, 120 bp, Artificial Sequence
  ENSG00000198542_45 (sequence is synthesized)
ataaaacacaacagagatacacatttacataaatctcagtcatttacaaaaataaatcttgtcttaatttaaaccaataaacagacttgcaggggaaaaagaaaccagcaagtagggcta

SEQ ID NO: 728764 - DNA, 78 bp, Artificial Sequence
  ENSG00000198542_46 (sequence is synthesized)
tgtgtgaagtgaagtgttgctgctgtaagtagtgtccataagcccatttgactgtattacaagttagttaattactca

SEQ ID NO: 728765 - DNA, 120 bp, Artificial Sequence
  ENSG00000198542_47 (sequence is synthesized)
taagcccatttgactgtattacaagttagttaattactcatatagttggccacatattatgggatctatgttttctgaaaataattggttaatggaagttatctaatatattttaactgt

SEQ ID NO: 728766 - DNA, 120 bp, Artificial Sequence
  ENSG00000198542_48 (sequence is synthesized)
tcctgttaaaaacaataggcttcaagatgacataacaccaaatcaaaaatgaccaaaggaatcattttgtttgttagatttgtaatttagcatcattggcaataaatctactcaaacgtt

SEQ ID NO: 728767 - DNA, 80 bp, Artificial Sequence
  ENSG00000198546_0 (sequence is synthesized)
ctcgctgcggggcccggggcggcggagccgctgcctgtagagcgggatcccgcggctggggccgcgccctttcgcttcgt

SEQ ID NO: 728768 - DNA, 120 bp, Artificial Sequence
  ENSG00000198546_1 (sequence is synthesized)
gccgcgccctttcgcttcgttgcgcgccccgtgcgcttcccgcgggagcaccagttcttcgaggatggggacgtgcagcgccacctctacctccaggacgtgatcatgcaggtggccgac

SEQ ID NO: 728769 - DNA, 120 bp, Artificial Sequence
  ENSG00000198546_2 (sequence is synthesized)
gtgcctgagaagcccagggtgcccgcgtttgcctgccaggtggccggctgctgccaggtgttcgatgccctggacgactacgagcaccactaccacacgctgcacggaaatgtttgctcc

SEQ ID NO: 728770 - DNA, 120 bp, Artificial Sequence
  ENSG00000198546_3 (sequence is synthesized)
ttttgcaagcgggccttcccttccggacacctgctggacgcccacatcctggagtggcacgattcgctcttccagatcctgtctgagaggcaggacatgtatcagtgcttggtagaaggc

SEQ ID NO: 728771 - DNA, 120 bp, Artificial Sequence
  ENSG00000198546_4 (sequence is synthesized)
cagagaagttcaagaccagcagagaccggaaggatcacatggtgaggatgcacctgtaccccgcggacttccggtttgataagccaaagaaaagcagaagcccagcctcagcagaagccc

SEQ ID NO: 728772 - DNA, 120 bp, Artificial Sequence
  ENSG00000198546_5 (sequence is synthesized)
caggggacagtggagagcggtcagaaggggaggccatggaaatctgctctgagcctgtggcagcctcccctgcaccggcaggtgagaggcggatctacagacatagaataccctctacca

SEQ ID NO: 728773 - DNA, 120 bp, Artificial Sequence
  ENSG00000198546_6 (sequence is synthesized)
tctgctttggtcagggtgccgctcgaggatttaaaagcaacaagaagaaaaccaaacaatgctgatagactcagaaaaggagtggggggcagtcaccactgctgggcgtggcatccgcct

SEQ ID NO: 728774 - DNA, 120 bp, Artificial Sequence
  ENSG00000198546_7 (sequence is synthesized)
tgggcctttctccgaccttctggtgtggccgccctgggggccaggccctcgccatcctccccatccttgttcctcagcaaatggcattagcagctgtcatcagaagctgtgagggaccca

SEQ ID NO: 728775 - DNA, 120 bp, Artificial Sequence
  ENSG00000198546_8 (sequence is synthesized)
cagattttggaaacgacctggacacactattgggaaggagatgtggacggcctgtctcctcctgcagggcccaccctaagaatgtatttttaaacacatgaaataagtatttttcactga

SEQ ID NO: 728776 - DNA, 120 bp, Artificial Sequence
  ENSG00000198546_9 (sequence is synthesized)
atgtgttcggtgctgaggattctgggctgcacctgggccgcagctcttctcatactgaattcagaaaggtaacgctgggtaagaaaatcggcttccgccagagaagaaagtccagatatc

SEQ ID NO: 728777 - DNA, 120 bp, Artificial Sequence
  ENSG00000198546_10 (sequence is synthesized)
tcaggtcctgtgaataacttagtttctctcgcatactctgtttttgagccattgaagcgcaggaatgccaagcaccactcacttttcctcattgtctgagtgggatggaaagagtctcac

SEQ ID NO: 728778 - DNA, 120 bp, Artificial Sequence
  ENSG00000198546_11 (sequence is synthesized)
ctgcgtttctagcgtcacctgtgccgtctgccttcctagcatgacctgtgccgtctgcctttctagcatgacctgtactgtctgcctttctagcgtcacctgtgccgtctgcctttctag

SEQ ID NO: 728779 - DNA, 120 bp, Artificial Sequence
  ENSG00000198546_12 (sequence is synthesized)
ttaaagttgattttaaattaatttgggaaaaacggtgaacaagtggggaaaaacatcaccaaagactccaaacaggtggaacgatgaacttaatgttccctgcaccctccttacagatgc

SEQ ID NO: 728780 - DNA, 120 bp, Artificial Sequence
  ENSG00000198546_13 (sequence is synthesized)
ctggactttggcctgtgaatgagccccggggggctgggacagtaggggttttcatggaatggacatggggtagcaggaagtctcagccccagagggcttggcaggagccgccctctctgc

SEQ ID NO: 728781 - DNA, 120 bp, Artificial Sequence
  ENSG00000198546_14 (sequence is synthesized)
ggagttcttcccagcgggtgtgcgttggtggctggcggggaccccccacaggaactaggtctcaggctgtggaaagggagctgccccagggcccaggagggccggctctgcattccgcat

SEQ ID NO: 728782 - DNA, 120 bp, Artificial Sequence
  ENSG00000198546_15 (sequence is synthesized)
cagcacgtgtctgcttttgattttaggaaaaggtttccaactagccggaatgcatagacggtcagacttattaagcacttgtgtgtcacctaatggggtgttcacctgcaggtacctgaa

SEQ ID NO: 728783 - DNA, 120 bp, Artificial Sequence
  ENSG00000198546_16 (sequence is synthesized)
gccctggcaacacagctacaggtggttgtgccagcggccaccctgccgaagggaggctggaggggagcccctggctgcccagctctgtgccggtggaggcagcagagggggtgtgggaat

SEQ ID NO: 728784 - DNA, 79 bp, Artificial Sequence
  ENSG00000198547_0 (sequence is synthesized)
gccagactgcagctgccacatgaagagagagagggtctcctatgtttcctaggcctgtcttgaatgctggatcacaggc

SEQ ID NO: 728785 - DNA, 120 bp, Artificial Sequence
  ENSG00000198547_1 (sequence is synthesized)
agtggccacctcgcctggccagttttccctttacaaaaactggaatgctgagccgggccacatcagtcttggctggactcactgcccacctctgggaccttggcggtggggcgggaagga

SEQ ID NO: 728786 - DNA, 120 bp, Artificial Sequence
  ENSG00000198547_2 (sequence is synthesized)
ccaggcccttatcaggaaaggatttgggttggtggggaggggtggggggaagttggaggcctcaggctcagcaaggtgggtcggagagatagggaagtggggagggggctgcgggcccct

SEQ ID NO: 728787 - DNA, 120 bp, Artificial Sequence
  ENSG00000198547_3 (sequence is synthesized)
gctgggcgggggagggcaatgggagggatgcccagaatgggcacggtgggggactttggccaagctctgtcctcgctggcctggacctcaacatgtttccaggacttctgcctcccatcc

SEQ ID NO: 728788 - DNA, 120 bp, Artificial Sequence
  ENSG00000198547_4 (sequence is synthesized)
ttgccaggcaagttgcctgcacctttaattagcaagcagcagtttctctccaattcatcacggtcgctgtttaattagccgagcccagggcgcccccacccccagctctgcctgcctgtc

SEQ ID NO: 728789 - DNA, 120 bp, Artificial Sequence
  ENSG00000198547_5 (sequence is synthesized)
acatagccagtgggtctgagctgacttttcttcccaagcctgtgtgatccccaaaacccttggctgcccccactctgccccccgcctcccagcccttccagctgcagccttttcactcat

SEQ ID NO: 728790 - DNA, 120 bp, Artificial Sequence
  ENSG00000198547_6 (sequence is synthesized)
tccaccaccactcagctctgagtggctacgctggcgggctctctgctttgcgtcggagacatcacagtgagcaaaggcagatatgttttatgtgcccttgaagaatctcccagacaaacg

SEQ ID NO: 728791 - DNA, 120 bp, Artificial Sequence
  ENSG00000198547_7 (sequence is synthesized)
tgtcattgcagtcggagccaaatggccggggcaggtggcacagatgaatgccgggcagaggagcctgcagactggggtccccttaaaggcagagtgaatctcagattcatcttagtccct

SEQ ID NO: 728792 - DNA, 120 bp, Artificial Sequence
  ENSG00000198547_8 (sequence is synthesized)
tcctggggtcttgttcaggaccctgcatccagtagatgctcaacaaatgtcaacataggaatccaggtcccatcctctcctcactcaagggatccaaggctgcctcttcctcttccgtag

SEQ ID NO: 728793 - DNA, 120 bp, Artificial Sequence
  ENSG00000198547_9 (sequence is synthesized)
ctaccaaggccaccaccacctcagggtgtcccctgttaccaccccccacaatcattctgctccccagagtgggggatgggcccggcacgcccagctgaaacctcaaggagattctgggca

SEQ ID NO: 728794 - DNA, 120 bp, Artificial Sequence
  ENSG00000198547_10 (sequence is synthesized)
ccggcgcttgtattcaaggcattcagcaaacatgattagggaccgaggctgtgccaggctggctctgggtagaaccccggccggacatgcggggcaggctctggtcctgtccagctgctg

SEQ ID NO: 728795 - DNA, 120 bp, Artificial Sequence
  ENSG00000198547_11 (sequence is synthesized)
gagaatggcttctcccttgggaggcgctggcacatctctctggcttggtccctgagtgctgggaggaggctgcagtactcctgtgtgtcactcccaccccacatccggaaagggacacca

SEQ ID NO: 728796 - DNA, 120 bp, Artificial Sequence
  ENSG00000198547_12 (sequence is synthesized)
tgtcttcctcttcctctctcttccagagcccagaaagctcctctgagaatgctggacctcaggacaggggcccatgctctgcacccggccctcagcagccagatcctagaggcccagtcc

SEQ ID NO: 728797 - DNA, 120 bp, Artificial Sequence
  ENSG00000198547_13 (sequence is synthesized)
aagctgtgggccaagggagcggggcgggctgaggcctgctttgtgtcggcagggtctggggaattgggagcactggcgggagcccatggtccggggccgaaccagcccccttctgtttcc

SEQ ID NO: 728798 - DNA, 120 bp, Artificial Sequence
  ENSG00000198547_14 (sequence is synthesized)
ctgaagaagggtgaggctgagggccctcggaacagagcccctgtgtcattctgtgcagggccgggatagccactagtcactgtgggcagaagcaagaagcagaggctcaggctccatccc

SEQ ID NO: 728799 - DNA, 120 bp, Artificial Sequence
  ENSG00000198547_15 (sequence is synthesized)
aagcctgtgctcctgctgggctgtgggaggtgtgacccttccactgtttcgtagactgagaacatggagggactggcatttgctgtgttaccctgtggtgccatcagcgtgttgtgacag

SEQ ID NO: 728800 - DNA, 120 bp, Artificial Sequence
  ENSG00000198547_16 (sequence is synthesized)
gggcaggaggagtgtgctagaacccacccactctggtactgcccatctctgtggccttgggccagccaccaaaccgtaccatgccttagttcccctatgattcatagctgcttcatgggc

SEQ ID NO: 728801 - DNA, 120 bp, Artificial Sequence
  ENSG00000198547_17 (sequence is synthesized)
gggctgatgtgaggattaaacagcttactatgtgttgggtctggttttgtttggctttgttttgttttttgagacaaggtctcactctgctgctcaggctggagtgcagtggtgcaatca

SEQ ID NO: 728802 - DNA, 88 bp, Artificial Sequence
  ENSG00000198547_18 (sequence is synthesized)
ggagtgcagtggtgcaatcacagctcacagcaggctccacctctctgagtctcgctcttttgcccaggctggatggagtgcagtggcg

SEQ ID NO: 728803 - DNA, 120 bp, Artificial Sequence
  ENSG00000198547_19 (sequence is synthesized)
gcctcctgagtagctgggattacagactccagcataaccttctccaggaagcttttccagagcccccaggctaggaacctccccccaacccctgaactcaagccccagcagcccgtgcct

SEQ ID NO: 728804 - DNA, 120 bp, Artificial Sequence
  ENSG00000198547_20 (sequence is synthesized)
ggtctctgggtaacaagtgccatttctttgttgttttctgtgtcccccaaggacaaagctcaggctggattcatctcggaattcccaacaccggggtagaactggctcatttcaatttca

SEQ ID NO: 728805 - DNA, 120 bp, Artificial Sequence
  ENSG00000198547_21 (sequence is synthesized)
gtcaatgtttgttgaggaaaggagtgaagagttggacacatgaatgaacgcatgaaacagtccggagtggggaagctgaagctcaggcatcaggatccgggagaagcatccagtccaggc

SEQ ID NO: 728806 - DNA, 120 bp, Artificial Sequence
  ENSG00000198547_22 (sequence is synthesized)
ggacggggtggaaggttcagagcaggggccccaagtcaggagtagggaggcagacggcaagacctccttccatgaaaggaggctgggaccaggggaccaggtagtgcaacgcggtgaggg

SEQ ID NO: 728807 - DNA, 120 bp, Artificial Sequence
  ENSG00000198547_23 (sequence is synthesized)
ggctgtcagggcgactggccggaggagtcagaggcaggaggcaccaccaggttacagacaaggaccttctacaagagggaaacgtgtcatgggctctggagcccctgtccaggttcaaat

SEQ ID NO: 728808 - DNA, 120 bp, Artificial Sequence
  ENSG00000198547_24 (sequence is synthesized)
tgtgaccctgtgccagggacagcttctttgtgcctcagtttttcccataaaatgaggataataatacttcattcatgcctttttttcccctcaacaaacatttgttgtatgtctgctgtg

SEQ ID NO: 728809 - DNA, 120 bp, Artificial Sequence
  ENSG00000198547_25 (sequence is synthesized)
ggcccaggacaggaggctgagaaggagctgaccacagtggtcacacagccaagccctgctgctgagatctgaccccagttcgcctgtcacaagttctatctgtgcctcgttgtctgcctc

SEQ ID NO: 728810 - DNA, 120 bp, Artificial Sequence
  ENSG00000198547_26 (sequence is synthesized)
ctggggctgttatgagggctgaagaaggggcaggcacagaggagacacttactatatgatcattgtcctcctagagtatcatcaccatcaggtggacttcagtggccatcccaggcctcc

SEQ ID NO: 728811 - DNA, 120 bp, Artificial Sequence
  ENSG00000198547_27 (sequence is synthesized)
acggatcaaccacaagatcttggagaatgtccttaccctccaagcctcagtttacctttagggtgaccaaccatcctggtttgtccaaaactgagggttttcctggcacagtcccaggca

SEQ ID NO: 728812 - DNA, 120 bp, Artificial Sequence
  ENSG00000198547_28 (sequence is synthesized)
aactgggatggtgagtcactgatatagtttgactctgtgtccccaccaaatctcaccttgaattttaataatccctaggtgtcaagagcaggaccaagtagagataattgaataatggtg

SEQ ID NO: 728813 - DNA, 78 bp, Artificial Sequence
  ENSG00000198547_29 (sequence is synthesized)
ctcacgagatctgatggttttataagcagcttccccctttgctcagtatcactctccctcctgccgccctgtgaagag

SEQ ID NO: 728814 - DNA, 74 bp, Artificial Sequence
  ENSG00000198547_30 (sequence is synthesized)
ccacagtctcgggcatttcttcacagcagcgtgagaacagactaatcccgtcaccctggtttcctcatctctaa

SEQ ID NO: 728815 - DNA, 120 bp, Artificial Sequence
  ENSG00000198547_31 (sequence is synthesized)
gaacagactaatcccgtcaccctggtttcctcatctctaacacagggaccacctgcctcccagggctgttgtgcagaacagaaataagcctatggaaaaggcagaaaaccatggagccag

SEQ ID NO: 728816 - DNA, 120 bp, Artificial Sequence
  ENSG00000198547_32 (sequence is synthesized)
aattctagatctggttacatgaatactaaagacttttgcatgccatggaattctaggcatgaaaaagaacgaggcggtcccgtgtactgctgtggaagaagctctgagatacatgttttt

SEQ ID NO: 728817 - DNA, 120 bp, Artificial Sequence
  ENSG00000198547_33 (sequence is synthesized)
tttgtgaaaaaggccagatacagcgcactttgtggggagcgcttctgttagtaccaaggagggggcaggaacacacgtgcatgtgctccagtgcgcacatgggttctcccgggcggggac

SEQ ID NO: 728818 - DNA, 120 bp, Artificial Sequence
  ENSG00000198547_34 (sequence is synthesized)
tgggggctgaggagaaaagacttgtttttcactgtacatccctttgctttgtttgaattattttacccctttgttttcagtagctggccgaaaaacttcccaagcttccatgtgtcaaaa

SEQ ID NO: 728819 - DNA, 120 bp, Artificial Sequence
  ENSG00000198547_35 (sequence is synthesized)
agaactcactgaacgagatttaaaggccaaagttagggagtaggaaatgtgtctagctcagggcccagcatctaaggagtgctccatgaaaggccttctcccctctcccactcctgacct

SEQ ID NO: 728820 - DNA, 120 bp, Artificial Sequence
  ENSG00000198547_36 (sequence is synthesized)
tgctgactgctgggagtgcaggggcacagacgggctgttgcctcccccagtgcggtatttgtgaggctcaaatgcaagcccaggctggggagactgctctgggttccacgcggcatcctg

SEQ ID NO: 728821 - DNA, 120 bp, Artificial Sequence
  ENSG00000198547_37 (sequence is synthesized)
cctaagccctgggggtcctagaggtcactggctcccttctctgcctgcatgtctcaggtcgccctctggccaattctgaagtcctgccctgcctcaaggagcagaggtggcagaggtggg

SEQ ID NO: 728822 - DNA, 120 bp, Artificial Sequence
  ENSG00000198547_38 (sequence is synthesized)
cccaccgcacagggtaaatgtcccggtgtcacatacctccagattgcagggacctgcgtatgctactgctgctgtggaaaccagctctctctggctctggccttggggagagggagccac

SEQ ID NO: 728823 - DNA, 120 bp, Artificial Sequence
  ENSG00000198547_39 (sequence is synthesized)
agtggatttaggaagagtctccagatgtagcttgagactaccaaacaggcctgacccccacagaccctgcctcttatgagcgcccagactgagccctgcttcaggctcccagccatgtgg

SEQ ID NO: 728824 - DNA, 120 bp, Artificial Sequence
  ENSG00000198547_40 (sequence is synthesized)
ccagctgcttttcttctttaatttttagcatcagacgaatatttcaggaaaatattctcattgtaaaatctcaaacattaataaaatgtagtgaataaaaggccatgtaattcctcttta

SEQ ID NO: 728825 - DNA, 120 bp, Artificial Sequence
  ENSG00000198551_0 (sequence is synthesized)
gtttctggcgaccgtccccacccgggctcgcgtctccgtttctccgagaggcccaaggtgtctccgccgcagcctctgtcgcgccgtgacctgtacaggtcgcgggagtcgtagggagga

SEQ ID NO: 728826 - DNA, 120 bp, Artificial Sequence
  ENSG00000198551_1 (sequence is synthesized)
cgccgggacacctggaagccgagaaatggattcagtggcctttgaggatgtggctgtgaacttcaccctggaggagtgggctttgctggatccttcccagaagaatctctacagggatgt

SEQ ID NO: 728827 - DNA, 120 bp, Artificial Sequence
  ENSG00000198551_2 (sequence is synthesized)
gatgcgggaaaccttcaggaacctggcttctgtaggaaaacaatgggaagaccagaacattgaagacccattcaaaattcccaggagaaatataagtcatattccagagagactctgtga

SEQ ID NO: 728828 - DNA, 120 bp, Artificial Sequence
  ENSG00000198551_3 (sequence is synthesized)
aagtaaagaaggtggtcaaggtgaagaaaccttcagccagattccagatggtattctgaacaagaaaactcctggagtaaaaccgtgtgaaagcagtgtgtgtggagaagttggcatggg

SEQ ID NO: 728829 - DNA, 120 bp, Artificial Sequence
  ENSG00000198551_4 (sequence is synthesized)
tccttcatcacttaataggcacatcagagatcacactggacgtgaaccaaatgaatatcaggaatatggaaagaagtcatatacacgtaaccagtgtggacgagccttgagttatcatcg

SEQ ID NO: 728830 - DNA, 120 bp, Artificial Sequence
  ENSG00000198551_5 (sequence is synthesized)
ctcttttccagtacgtgaaaggactcatcctggaggaaagccctatgattgtaaggaatgtggagaaacctttatttctcttgtaagcattcgaagacacatgttaacgcataggggagg

SEQ ID NO: 728831 - DNA, 120 bp, Artificial Sequence
  ENSG00000198551_6 (sequence is synthesized)
tgtaccttacaaatgtaaggtgtgtgggaaagcctttgattatcccagtttatttcgtatacatgaaagaagtcacactggagagaaaccttatgaatgcaagcaatgtgggaaagcctt

SEQ ID NO: 728832 - DNA, 120 bp, Artificial Sequence
  ENSG00000198551_7 (sequence is synthesized)
cagttgttccagttacattagaatacatgaaaggactcacactggagataaaccctatgaatgcaagcagtgtgggaaagctttcagttgttccaagtacattcgaatccatgaacgaac

SEQ ID NO: 728833 - DNA, 120 bp, Artificial Sequence
  ENSG00000198551_8 (sequence is synthesized)
tcacacaggagagaaaccctacgaatgtaaacagtgcggtaaagcctttaggtgcgccagttctgttcgaagtcacgagaggactcacaccggagagaaactttttgaatgtaaggaatg

SEQ ID NO: 728834 - DNA, 120 bp, Artificial Sequence
  ENSG00000198551_9 (sequence is synthesized)
cgggaaggctttgacttgtcttgcaagtgttagaagacacatgataaagcacactggcaatggaccttataaatgtaaggtgtgtgggaaagcctttgatttccccagttcatttcgaat

SEQ ID NO: 728835 - DNA, 120 bp, Artificial Sequence
  ENSG00000198551_10 (sequence is synthesized)
ccatgaaaggacccacactggagagaaaccctatgattgtaagcaatgtgggaaagccttcagttgttccagttcgtttcgaaaacatgaaagaattcacactggagagaaaccctataa

SEQ ID NO: 728836 - DNA, 120 bp, Artificial Sequence
  ENSG00000198551_11 (sequence is synthesized)
tatgaatgtaagcaatgtgggaaagccttcagtcgatccacttactttcgagtacatgaaaaaattcatactggagagaaaccctatgagaaccctaaccctaacgcttcagttgtccca

SEQ ID NO: 728837 - DNA, 120 bp, Artificial Sequence
  ENSG00000198551_12 (sequence is synthesized)
tatgagaaccctaaccctaacgcttcagttgtcccagttctttcatgagcatgaaaggagtcacatagagaaaccccatgaaagtaagaaatttgggaaagccttcagtcctttctgttt

SEQ ID NO: 728838 - DNA, 120 bp, Artificial Sequence
  ENSG00000198551_13 (sequence is synthesized)
ctttcaactacgtgaaaggattcacagtggagaaagaccctgtaagataattggctttaaattacgagagacttgtgataggacagtaaaacctagagttggagttggatctctggattg

SEQ ID NO: 728839 - DNA, 120 bp, Artificial Sequence
  ENSG00000198551_14 (sequence is synthesized)
tgttatgtcagtgttggtaggttaggaactagatttcccagaatccattccatttgtgattccatgatacaattcaccagtaacctatcttacatgagattcggaagtaagttaagaagg

SEQ ID NO: 728840 - DNA, 120 bp, Artificial Sequence
  ENSG00000198551_15 (sequence is synthesized)
cattagtcatggtttggaagcaccatacagggagacagctgtgtgaatacaggctgtatggacacttgcttccatcccattttcctgcttctttgggttgccaatcaagagtatcctcaa

SEQ ID NO: 728841 - DNA, 120 bp, Artificial Sequence
  ENSG00000198551_16 (sequence is synthesized)
aacgacttgactttaattttctcggaggtgataggcttccacacaggtctccagaagccctgcattgaatatccatccacactttggttttccttcagacattattatgtctgtactagg

SEQ ID NO: 728842 - DNA, 120 bp, Artificial Sequence
  ENSG00000198551_17 (sequence is synthesized)
caactaattcagactgtcctggttgggaatattctgtgatgctctgactcccctagtctgtagacggaattggcatacggtctaatttgtgtagtaagcacctttgttcatactagtagt

SEQ ID NO: 728843 - DNA, 120 bp, Artificial Sequence
  ENSG00000198551_18 (sequence is synthesized)
gactgtattcttgattcagcctgatagctaccatgctgctgtcaaaaccaaccagaggggagcttgttcttctgctgtagtgtgcagtgactggcctcacccaggactttgatgtgagaa

SEQ ID NO: 728844 - DNA, 120 bp, Artificial Sequence
  ENSG00000198551_19 (sequence is synthesized)
tgagcactttcctctatcaggaaatttcaagtgtttcctgttattcgtagctcaatgtaatgcctcagttcattttcagttgtttgattatatgtgactaatatgtattttttattcaaa

SEQ ID NO: 728845 - DNA, 120 bp, Artificial Sequence
  ENSG00000198551_20 (sequence is synthesized)
caagacttctgtacatgtttcttcaaaacagtttattaactgtcttcagtcttggattacatcaagtttataattttggcaaattgttaagacactgtgaagtcagcgttaaccatgtgc

SEQ ID NO: 728846 - DNA, 120 bp, Artificial Sequence
  ENSG00000198551_21 (sequence is synthesized)
atacaacttaaggaattttttcctcctcatgtaaattttacttttcatgcttatatagtttcaacttttatcttcatagtaatttctcatctactcataataccaaaagttaagtcatgc

SEQ ID NO: 728847 - DNA, 120 bp, Artificial Sequence
  ENSG00000198551_22 (sequence is synthesized)
tgttttgtgtgctctcttgctaaagaccgcagagaccatacctgttgtcaaagagggtgtaataaactgtaataataatcatgaccacaaaccataaaggactgtgtgatgtatcagtaa

SEQ ID NO: 728848 - DNA, 120 bp, Artificial Sequence
  ENSG00000198551_23 (sequence is synthesized)
ggcaagtgaggaatatgaaataaccttatggctgaatcagggtgaaggggaagcttgtaagcatggaagacgctctactcaaactaaaaagttcaagttctgatccagcagatgaagagg

SEQ ID NO: 728849 - DNA, 80 bp, Artificial Sequence
  ENSG00000198551_24 (sequence is synthesized)
aaactaaaaagttcaagttctgatccagcagatgaagagggaggcctgagaggctgctgttctaactcgctcccagccga

SEQ ID NO: 728850 - DNA, 90 bp, Artificial Sequence
  ENSG00000198551_25 (sequence is synthesized)
gggccttactctgctgcctgattgcagcctcaaactcctgggctcaagcgaaactcccacgtcagcctcctgagtacctgggactacagg

SEQ ID NO: 728851 - DNA, 120 bp, Artificial Sequence
  ENSG00000198551_26 (sequence is synthesized)
agcctcccaagtagctggaattacaggtactgaggatggaggacaaggggtcagtggagacccagctttgagcagagccctgcctaaggtccagggctcgatctggccctaaccacagag

SEQ ID NO: 728852 - DNA, 120 bp, Artificial Sequence
  ENSG00000198551_27 (sequence is synthesized)
ggccctaaccacagagtcaccttgaggtatgtaacccctcctggcttcaatttcctgacttttaggagtgtattaatcctatttcataggtagagcacttagtaagaaattggtggccag

SEQ ID NO: 728853 - DNA, 120 bp, Artificial Sequence
  ENSG00000198551_28 (sequence is synthesized)
gatggaggacaaggggtcagtggagacccagctttgagcagagccctgcctaaggtccagggctcgatctggccctaaccacagagtcaccttgaggattcagtggcctttgaggatgtg

SEQ ID NO: 728854 - DNA, 120 bp, Artificial Sequence
  ENSG00000198553_0 (sequence is synthesized)
gatttcctaagtgtggctgatggtagcctctagtttgaagtgagggaagaatgagtagtcaggaactggtcactttgaatgtgggagggaagatattcacgacaaggttttctacgataa

SEQ ID NO: 728855 - DNA, 120 bp, Artificial Sequence
  ENSG00000198553_1 (sequence is synthesized)
agcagtttcctgcttctcgtttggcacgcatgttagatggcagagaccaagaattcaagatggttggtggccagatttttgtagacagagatggtgatttgtttagtttcatcttagatt

SEQ ID NO: 728856 - DNA, 120 bp, Artificial Sequence
  ENSG00000198553_2 (sequence is synthesized)
ttttgagaactcaccagcttttattacccactgaattttcagactatcttaggcttcagagagaggctcttttctatgaacttcgttctctagttgatctcttaaacccatacctgctac

SEQ ID NO: 728857 - DNA, 120 bp, Artificial Sequence
  ENSG00000198553_3 (sequence is synthesized)
agccaagacctgctcttgtggaggtacatttcctaagccggaacactcaagcttttttcagggtgtttggctcttgcagcaaaacaattgagatgctaacagggaggattacagtgttta

SEQ ID NO: 728858 - DNA, 120 bp, Artificial Sequence
  ENSG00000198553_4 (sequence is synthesized)
cagaacaaccttcagcgccgacctggaatggtaactttttccctcctcagatgaccttacttccactgcctccacaaagaccttcttaccatgacctggttttccagtgtggttctgaca

SEQ ID NO: 728859 - DNA, 120 bp, Artificial Sequence
  ENSG00000198553_5 (sequence is synthesized)
actggagtcaggtatgtttctataaaacctgataaccgaaaattggccaacggaacaaatgtcctcggcttactgattgacactttattaaaggaaggctttcatttggtcagcactaga

SEQ ID NO: 728860 - DNA, 120 bp, Artificial Sequence
  ENSG00000198553_6 (sequence is synthesized)
acagtatcttctgaagacaaaactgaatgctatagctttgaaaggataaaaagccctgaagtgctcatcacgaatgaaacaccaaaaccagagactatcatcataccagagcaatctcag

SEQ ID NO: 728861 - DNA, 120 bp, Artificial Sequence
  ENSG00000198553_7 (sequence is synthesized)
ataaagaaatgaagttgtctatcctcttttaaagagaaattgccatttttcttgtttcattacgtatttagggcatacatgttagccaaatctacactcagcctaactcttggcttcatc

SEQ ID NO: 728862 - DNA, 120 bp, Artificial Sequence
  ENSG00000198553_8 (sequence is synthesized)
tgctgccatgccgtctctgggcaaccaggccccaactgtgcttaagccataatgcctgctgctctctagacaactccatgtacttggtgctttggtatatgttctaccttcaatacatct

SEQ ID NO: 728863 - DNA, 120 bp, Artificial Sequence
  ENSG00000198553_9 (sequence is synthesized)
gctttggtatatgttctaccttcaatacatctttccctttctcttcttcatgaatgcttatgagccgagattgcgccactgcacactagcttgggtgacagaggaagactgtctcaaaaa

SEQ ID NO: 728864 - DNA, 120 bp, Artificial Sequence
  ENSG00000198553_10 (sequence is synthesized)
agtaccctgacttgatcattacaccttctatgcatgcaacaaaatgccacgtgtaccccataaatatgtagaaatattatatgtaaataaatagttgggccttccgtattttcccactta

SEQ ID NO: 728865 - DNA, 120 bp, Artificial Sequence
  ENSG00000198553_11 (sequence is synthesized)
agttcctcatctgttgctttttcattttgtatactgcaagttcccaggcaactcgaatttgcaaacacagccatggatacactatttaccttacagtagtttcctgggaatctaagtctg

SEQ ID NO: 728866 - DNA, 120 bp, Artificial Sequence
  ENSG00000198554_0 (sequence is synthesized)
agtgtggtgagcgagccgaagcgcgggaagcagctcttgtggatcctcagtggcggaggctcggtcacccggataggtaaaggaaaacatgcctgccacacggaagccaatgagatatgg

SEQ ID NO: 728867 - DNA, 120 bp, Artificial Sequence
  ENSG00000198554_1 (sequence is synthesized)
gcatacagagggacacacggaggtctgttttgatgattctgggagttttattgtgacttgtggaagtgatggtgatgtgaggatttgggaagacttggatgatgatgatcctaagttcat

SEQ ID NO: 728868 - DNA, 120 bp, Artificial Sequence
  ENSG00000198554_2 (sequence is synthesized)
taatgttggagaaaaggcatattcatgtgctttgaagagtggaaaactggtcactgcagtttctaataatactattcaagtccacacatttcctgaaggagttccagatggtatattgac

SEQ ID NO: 728869 - DNA, 120 bp, Artificial Sequence
  ENSG00000198554_3 (sequence is synthesized)
tcgcttcactacaaatgcaaaccatgtggtctttaatggggatggtactaaaattgctgctggatctagtgattttctagtcaaaattgtggatgtgatggatagcagccaacagaaaac

SEQ ID NO: 728870 - DNA, 120 bp, Artificial Sequence
  ENSG00000198554_4 (sequence is synthesized)
atttcgaggacatgatgcccctgttttaagtctttcctttgatcctaaggacatctttctggcatcagctagttgtgatggatctgtcagagtgtggcaaatttcagatcagacatgtgc

SEQ ID NO: 728871 - DNA, 120 bp, Artificial Sequence
  ENSG00000198554_5 (sequence is synthesized)
tattagttggccactgctacaaaaatgcaacgatgtgataaatgcaaaatcaatctgcagacttgcttggcagccaaaaagtgggaagttactggcaattcctgtggaaaaatctgttaa

SEQ ID NO: 728872 - DNA, 120 bp, Artificial Sequence
  ENSG00000198554_6 (sequence is synthesized)
gctatatagaagagaatcttggagtcatcaatttgatctttcagataatttcatctctcagaccctcaatatagtaacctggtctccctgtgggcaatatttagctgcaggtagtattaa

SEQ ID NO: 728873 - DNA, 120 bp, Artificial Sequence
  ENSG00000198554_7 (sequence is synthesized)
tggtctaatcatagtttggaatgtggaaaccaaagactgcatggaaagggtgaaacatgagaaaggttatgcaatttgtggtctggcatggcatcctacttgtggtcgaatatcgtatac

SEQ ID NO: 728874 - DNA, 120 bp, Artificial Sequence
  ENSG00000198554_8 (sequence is synthesized)
tgatgcggaaggaaatctagggcttctagagaatgtttgtgaccccagtggaaagacatcaagcagtaaggtatctagcagagtggaaaaggattataatgatctttttgatggagatga

SEQ ID NO: 728875 - DNA, 120 bp, Artificial Sequence
  ENSG00000198554_9 (sequence is synthesized)
tatgagtaatgctggtgattttctaaatgacaatgcagttgagatcccttctttttcaaaagggattataaatgatgatgaggatgatgaagacctcatgatggcttcaggtcgtcctag

SEQ ID NO: 728876 - DNA, 120 bp, Artificial Sequence
  ENSG00000198554_10 (sequence is synthesized)
acagcgaagtcacatcctagaagatgatgaaaactcagttgatatttcaatgctaaaaactggttctagtcttctcaaagaggaggaggaagatggtcaagaaggcagcattcacaatct

SEQ ID NO: 728877 - DNA, 120 bp, Artificial Sequence
  ENSG00000198554_11 (sequence is synthesized)
accacttgtaacatcccaaaggccattttatgatggacccatgccaactccccggcaaaagccatttcagtcaggttctacaccgttgcatctcactcacagattcatggtgtggaactc

SEQ ID NO: 728878 - DNA, 120 bp, Artificial Sequence
  ENSG00000198554_12 (sequence is synthesized)
tattggaattattcgctgctataatgatgagcaagacaatgccatagatgtggagttccatgatacctccatacaccatgcaacacacttatcaaacactttgaattatacaatagcaga

SEQ ID NO: 728879 - DNA, 120 bp, Artificial Sequence
  ENSG00000198554_13 (sequence is synthesized)
tctttcccacgaagctattttgttggcatgtgaaagcactgatgaactagcaagcaagcttcactgcctgcactttagttcttgggattcaagcaaagagtggataatagacttgcctca

SEQ ID NO: 728880 - DNA, 120 bp, Artificial Sequence
  ENSG00000198554_14 (sequence is synthesized)
gaatgaggatattgaagccatatgtctcggtcaaggatgggctgctgccgctactagtgccctgcttcttcgattgtttactattggaggggttcaaaaagaggtattcagccttgctgg

SEQ ID NO: 728881 - DNA, 120 bp, Artificial Sequence
  ENSG00000198554_15 (sequence is synthesized)
acctgtggtgtcaatggcaggacatggagaacagcttttcattgtttatcacagaggtacaggatttgatggggatcagtgccttggagttcaactgctagagctggggaaaaagaaaaa

SEQ ID NO: 728882 - DNA, 120 bp, Artificial Sequence
  ENSG00000198554_16 (sequence is synthesized)
acaaattttgcatggtgaccctcttcctcttacaaggaaatcctaccttgcatggattgggttttcagctgaaggtaccccttgttacgtggattcagaaggaattgttcgaatgcttaa

SEQ ID NO: 728883 - DNA, 120 bp, Artificial Sequence
  ENSG00000198554_17 (sequence is synthesized)
cagaggacttggtaatacgtggactcctatatgtaatacaagagagcactgcaaaggaaaatctgatcactactgggtggttggtatccatgaaaatccccagcaactaaggtgcattcc

SEQ ID NO: 728884 - DNA, 120 bp, Artificial Sequence
  ENSG00000198554_18 (sequence is synthesized)
ttgtaaaggttctcggtttcccccaacccttccacgccctgctgttgctatattatcctttaagcttccttactgtcagattgcaacagagaaaggacaaatggaggagcaattttggcg

SEQ ID NO: 728885 - DNA, 120 bp, Artificial Sequence
  ENSG00000198554_19 (sequence is synthesized)
ttcagttatatttcacaaccaccttgattatttagctaaaaatggttatgaatatgaagagagcactaaaaatcaagcaacaaaagagcaacaggaacttttaatgaaaatgcttgcgct

SEQ ID NO: 728886 - DNA, 120 bp, Artificial Sequence
  ENSG00000198554_20 (sequence is synthesized)
ttcttgtaaactggagcgagaattccgttgtgtggaacttgctgatctaatgactcaaaatgctgtgaatttagccattaaatatgcttctcgctctcggaaattaatactggctcaaaa

SEQ ID NO: 728887 - DNA, 120 bp, Artificial Sequence
  ENSG00000198554_21 (sequence is synthesized)
actaagtgaactggctgtagagaaggcagccgaattgacagcaacccaggtggaagaggaagaagaagaagaagatttcagaaaaaagctgaatgctggttacagcaatactgctacaga

SEQ ID NO: 728888 - DNA, 120 bp, Artificial Sequence
  ENSG00000198554_22 (sequence is synthesized)
gtggagccaaccaaggttcagaaatcaagttgaagaagatgctgaggacagtggagaagctgatgatgaagaaaaaccagaaatacataagcctggacagaactcgttttccaaaagtac

SEQ ID NO: 728889 - DNA, 120 bp, Artificial Sequence
  ENSG00000198554_23 (sequence is synthesized)
aaattcctctgatgtttcagctaagtcaggtgcagttacctttagcagccaaggacgagtaaatccctttaaggtatcagccagttccaaagaaccagccatgtcaatgaattcagcacg

SEQ ID NO: 728890 - DNA, 120 bp, Artificial Sequence
  ENSG00000198554_24 (sequence is synthesized)
ttcaactaatattttagacaatatgggcaaatcatccaagaaatccactgcacttagtcgaactacaaataatgaaaagtctcccattataaagcctctgattccaaagccgaagcctaa

SEQ ID NO: 728891 - DNA, 120 bp, Artificial Sequence
  ENSG00000198554_25 (sequence is synthesized)
tatttccagaaaagaaattctcaaactaataaaactgaggaagtgaaagaagaaaatcttaaaaatgtattatctgaaaccccagctatatgtcctcctcaaaacactgaaaaccaaagg

SEQ ID NO: 728892 - DNA, 120 bp, Artificial Sequence
  ENSG00000198554_26 (sequence is synthesized)
ccaaagaccgggttccagatgtggttagaagaaaatagaagtaatattttgtctgacaatcctgacttttcagatgaagcagacataataaaagaaggaatgattcgatttagagtattg

SEQ ID NO: 728893 - DNA, 120 bp, Artificial Sequence
  ENSG00000198554_27 (sequence is synthesized)
tcaactgaagaaagaaaggtgtgggctaacaaagccaaaggagaaacggcaagtgaaggaactgaagcaaagaagcgaaaacgtgtggttgatgaaagtgatgaaacagaaaaccaggaa

SEQ ID NO: 728894 - DNA, 120 bp, Artificial Sequence
  ENSG00000198554_28 (sequence is synthesized)
gaaaaagcaaaagagaacctgaatttgtctaaaaagcagaaacctttagatttttctacaaatcagaaactatcagcttttgcatttaagcaggagtaaaggaagaaagtgaccctaggg

SEQ ID NO: 728895 - DNA, 120 bp, Artificial Sequence
  ENSG00000198554_29 (sequence is synthesized)
aagtaatggatttttttttactcatctttgaatatagactcgagtctttgggaaactcattatatatatattttttaaagagtttgaagcaactgtttgtctttataagataatgtagta

SEQ ID NO: 728896 - DNA, 120 bp, Artificial Sequence
  ENSG00000198554_30 (sequence is synthesized)
attatattggtgtaggtaacaggacatatgtaaaaactatcatctttgcagattactctgcctccaaatgcagggcctttcagagatgcattgtgattgtaattactgagttgaagctcc

SEQ ID NO: 728897 - DNA, 120 bp, Artificial Sequence
  ENSG00000198554_31 (sequence is synthesized)
aaccaatttgaatttgtttcttaaccttgaaaaatcattaaagccaaggtattaaaacctttgtgcattaataccttctaggggtttggttcatttggtttttgtcatgtgcaaggaagg

SEQ ID NO: 728898 - DNA, 120 bp, Artificial Sequence
  ENSG00000198554_32 (sequence is synthesized)
acaatagtcctctttccaagtgtgttagcatagacttctctatatgtttctactagacctaggggatgacgtcttttaataatactggccctaaacatgtaaataatcttgtaggtgaga

SEQ ID NO: 728899 - DNA, 120 bp, Artificial Sequence
  ENSG00000198554_33 (sequence is synthesized)
ctttttcttttgtgtttcggaaatttcctatgtggctttcagttgtctgtttgtatagcctggatttttttgaggtaaatgaaactttctcatttgtatatttggcttgatatggtctta

SEQ ID NO: 728900 - DNA, 120 bp, Artificial Sequence
  ENSG00000198554_34 (sequence is synthesized)
atattatctttccacgaaatggatatatttctagaaaatatatatttactaccataatttctaccaccacccccattttgctctgcattatacacagtagagaagaactgaagacactgc

SEQ ID NO: 728901 - DNA, 120 bp, Artificial Sequence
  ENSG00000198554_35 (sequence is synthesized)
tgtgacagtattgcagtccaaggcatcatgtgctcttggtgggatactctgattatcagcatcaacagtactttactgagcaagactttgaaggcctgagaagagagcaaagttatggaa

SEQ ID NO: 728902 - DNA, 120 bp, Artificial Sequence
  ENSG00000198554_36 (sequence is synthesized)
agtatttaactcttattttatattgaacaaacaaggtttaatcatgtcatacatttttggttttctaagcagagactaatacaaatgcagccacataaaggcagtgtactgggggtggga

SEQ ID NO: 728903 - DNA, 120 bp, Artificial Sequence
  ENSG00000198554_37 (sequence is synthesized)
gggaaggaaacaatcacataaaatcagctgactcaaaattgaggatagttaataggttgaaagggaaaaagtatgttgaaaatttagacataaatgaaccaagaatattccttatctggt

SEQ ID NO: 728904 - DNA, 120 bp, Artificial Sequence
  ENSG00000198554_38 (sequence is synthesized)
gatgattaaagttaggaaaacatacattttttattttttaattagtagctgctatcagagacattatagcacagtggttatgagcacagattccaaagccagattacctaggttcggaga

SEQ ID NO: 728905 - DNA, 120 bp, Artificial Sequence
  ENSG00000198554_39 (sequence is synthesized)
cccgcttctctacctactactaatagttgggtcatgttgggccggtgacccaaattctagccttcattcactcatctgtaaaatggatataatgatagtacctactttataggttgttat

SEQ ID NO: 728906 - DNA, 120 bp, Artificial Sequence
  ENSG00000198554_40 (sequence is synthesized)
gagaattgaatgaaatgaaagcccttagtttctgacacatagtaatcttttatataaatgttagttactattctgataatgatgatgctgttggttatttcatcttgctttgtcattagg

SEQ ID NO: 728907 - DNA, 120 bp, Artificial Sequence
  ENSG00000198554_41 (sequence is synthesized)
tttgattctgaatactatacaaactaattttgatttcaagatcttaagtaaaggtttatttatagtacattggaaagcatgtttgtagacatgtattttgtgtttggttcctcaacttgc

SEQ ID NO: 728908 - DNA, 120 bp, Artificial Sequence
  ENSG00000198554_42 (sequence is synthesized)
tttgtatatattttataatactaggttgatataaaagtaaatgcagtttcgccatttcagtggcaaaaaccgcgatttcttttgtgccaacctaatgcttaaggatataatctgtgtata

SEQ ID NO: 728909 - DNA, 120 bp, Artificial Sequence
  ENSG00000198554_43 (sequence is synthesized)
ttgtatttcagattcatagcaacctaataacaaggatttacaaaagggtttttacttccctacttttttttggctgaaggaaggtttttgtattgacttggtttaacttacaaatcagaa

SEQ ID NO: 728910 - DNA, 120 bp, Artificial Sequence
  ENSG00000198554_44 (sequence is synthesized)
ctttgaaaccaagaaacattatccttatttctctgctatataatagtaaacctgtttttttccagtgttcttttttttttttccagagaattgggactgaatagtatgaaagtgaaaatg

SEQ ID NO: 728911 - DNA, 120 bp, Artificial Sequence
  ENSG00000198554_45 (sequence is synthesized)
gaaataaattaattattaatcatcatcatatcaataatattgcctacttgagcttattgtatactatagaaaattgacatatacttaattttattctccaaaagcaaaaactcctcacag

SEQ ID NO: 728912 - DNA, 120 bp, Artificial Sequence
  ENSG00000198554_46 (sequence is synthesized)
gaggttactttacagatttattttggagaacaagtgaataggcactggggttatgtgcagctctggggactgtgctatgatctaaagcctctcatatctgtgcagcaacctggggtgagt

SEQ ID NO: 728913 - DNA, 120 bp, Artificial Sequence
  ENSG00000198554_47 (sequence is synthesized)
cactgtcactaacatggaacagatgccaggtagtccctttggacaaaaggatgaggcccatccatgtagaaagcatcttaatcagtgactgtcttatgggccctctttgtttcccatctg

SEQ ID NO: 728914 - DNA, 120 bp, Artificial Sequence
  ENSG00000198554_48 (sequence is synthesized)
ttttattatcagaatatataattttcccccaagttttcatcttgaatctctcaaacctacagaaaatttgaaatttgacagtaagcacctgtatatccttcctctagtttgtcttattgt

SEQ ID NO: 728915 - DNA, 120 bp, Artificial Sequence
  ENSG00000198554_49 (sequence is synthesized)
tgacattttatcatgtatgctttatagacaggatttttcctgaaccatttggaatatgcatatacttcatccctcagttcccagcatgtaccctaagaataaagattttcttctgcataa

SEQ ID NO: 728916 - DNA, 120 bp, Artificial Sequence
  ENSG00000198554_50 (sequence is synthesized)
attaacaagtgtaactgtgtcttccttactttatataatagatgtcagagacttatggttgattactaacttaaaatcatgaggcactttaaactctgtcttaagtataaaatgttttca

SEQ ID NO: 728917 - DNA, 120 bp, Artificial Sequence
  ENSG00000198554_51 (sequence is synthesized)
aggcgcagtgtggtgagcgagccgaagcgcgggaagcagctcttgtggatcctcagtggcggaggctcggtcacccggttttattgtgacttgtggaagtgatggtgatgtgaggatttg

SEQ ID NO: 728918 - DNA, 120 bp, Artificial Sequence
  ENSG00000198554_52 (sequence is synthesized)
agtggcggaggctcggtcacccgggtgagtccccactccggctgcccgcgtccaccaaggagatgcgtgttccctttccggcttattgtctgacagaccctctgccttatcccgctggtg

SEQ ID NO: 728919 - DNA, 120 bp, Artificial Sequence
  ENSG00000198554_53 (sequence is synthesized)
tcactcgggtgggggaaaccgggctgcggagaacgggccctagaggagactaagctctcttcctatccctagcctcgctgcttttctcttttgaaataataagactggcttttataaaac

SEQ ID NO: 728920 - DNA, 120 bp, Artificial Sequence
  ENSG00000198556_0 (sequence is synthesized)
agcgagaggctctgaggctgccagagtggttgtgtctgttcctccggtaaggggtgattcgccgaggggcgcggaccagacagacctcgggtcaggcccgggaaccccgagaggagagcc

SEQ ID NO: 728921 - DNA, 120 bp, Artificial Sequence
  ENSG00000198556_1 (sequence is synthesized)
cagcccctggtggaggcggcttggcggagattcggagccgtcagcagctcagccagacgtccaggatcccaccccttgcaaaagaccaggccgtggaagccatgttcccaccagccaggg

SEQ ID NO: 728922 - DNA, 120 bp, Artificial Sequence
  ENSG00000198556_2 (sequence is synthesized)
ggaaggagctgctctcgtttgaggatgtggcgatgtacttcaccagagaggagtggggccacctcaactggggtcagaaggacctctaccgagatgtgatgttggagaactacaggaaca

SEQ ID NO: 728923 - DNA, 120 bp, Artificial Sequence
  ENSG00000198556_3 (sequence is synthesized)
tggtcttgctgggatttcagtttcccaaacctgagatgatctgtcagctggagaactgggacgagcagtggatcctggatctaccgagaactgggaataggaaggcttccggtagtgctt

SEQ ID NO: 728924 - DNA, 120 bp, Artificial Sequence
  ENSG00000198556_4 (sequence is synthesized)
gcccaggttctgaagccagacacaagatgaaaaagctaactccaaaacagaaattttctgaagatttagagtcatataagatatcagtggtaatgcaggaatcagctgagaaactttcag

SEQ ID NO: 728925 - DNA, 120 bp, Artificial Sequence
  ENSG00000198556_5 (sequence is synthesized)
aaaagttacataagtgtaaagaatttgtggacagttgcaggcttactttccctactagtggtgatgaatacagcaggggcttccttcaaaaccttaaccttattcaagatcagaatgcgc

SEQ ID NO: 728926 - DNA, 120 bp, Artificial Sequence
  ENSG00000198556_6 (sequence is synthesized)
tctttgcttttggggcatgagcgaattctcacaagagcaaagtcttatgaatgcagtgaatgtggaaaagtcattaggcgtaaggcatggtttgatcaacatcaaagaattcacttttta

SEQ ID NO: 728927 - DNA, 120 bp, Artificial Sequence
  ENSG00000198556_7 (sequence is synthesized)
gagaatccttttgagtgtaaggtctgtgggcaagccttcagacagcggtcagctcttacggtccataaacagtgtcacctgcaaaacaagccatacagatgtcatgactgtggaaagtgt

SEQ ID NO: 728928 - DNA, 120 bp, Artificial Sequence
  ENSG00000198556_8 (sequence is synthesized)
tttcggcagctcgcgtatcttgttgaacataagaggattcacaccaaagaaaaaccttataaatgtagcaaatgtgaaaaaacgtttagtcagaattcaacccttattcgacatcaggtg

SEQ ID NO: 728929 - DNA, 120 bp, Artificial Sequence
  ENSG00000198556_9 (sequence is synthesized)
atccatagtggagaaaaacgccataaatgccttgagtgtggaaaagcctttggccggcattcaacccttctatgtcatcaacagattcacagtaaaccgaacacccataaatgcagtgaa

SEQ ID NO: 728930 - DNA, 120 bp, Artificial Sequence
  ENSG00000198556_10 (sequence is synthesized)
tgtggacagtcctttggtaggaatgtggatctcattcagcatcaaagaatccatacaaaggaggaattctttcaatgtggagaatgtgggaaaacgtttagttttaagaggaatcttttt

SEQ ID NO: 728931 - DNA, 120 bp, Artificial Sequence
  ENSG00000198556_11 (sequence is synthesized)
cgacatcaggtcattcacactggaagccaaccctaccaatgtgtcatatgtggaaaatctttcaagtggcacacaagctttattaagcaccagggcactcacaaaggacagatatccaca

SEQ ID NO: 728932 - DNA, 120 bp, Artificial Sequence
  ENSG00000198556_12 (sequence is synthesized)
tgatgttaattggaaagcagtcattggagaactagaacttataaacctctacttcaagtgtgtatcacgtaattgtttccatgaaaagcaataaatgtaacaaagggtttttctatggga

SEQ ID NO: 728933 - DNA, 120 bp, Artificial Sequence
  ENSG00000198556_13 (sequence is synthesized)
ggatttttaatatctgcctaatacttatgccttcatcgcattaatgtgctacgcttgatttaattgttcccttttgatattcagtttatttccagtttgatgctgcaataccactgtgct

SEQ ID NO: 728934 - DNA, 120 bp, Artificial Sequence
  ENSG00000198556_14 (sequence is synthesized)
gaacgtctctggcacattcatcttggttgcaattgtactttaggctatatttctaagagtgaaatgaccacagccaaaggtatgaacattgttcaggctttcaataaagactgccagata

SEQ ID NO: 728935 - DNA, 120 bp, Artificial Sequence
  ENSG00000198556_15 (sequence is synthesized)
tttacaaagattgtgccaatctctattctcaccaccgcttttgattattgtccttatctctgcttgccactgagccccgggccatgtctctgtaactcactaacggccacatcccattta

SEQ ID NO: 728936 - DNA, 120 bp, Artificial Sequence
  ENSG00000198556_16 (sequence is synthesized)
gtcttgctgggtaggacacggcttgaagattgggctttgtctgtgttctgagtgtctgtgcaagcccttagtcccttatctgcaattccagaatcagaaaaagcggtgaaaaccgaaagg

SEQ ID NO: 728937 - DNA, 120 bp, Artificial Sequence
  ENSG00000198556_17 (sequence is synthesized)
tttttttataactcgtgtggctacaagccctgaccagacatcaccacagtgaaacctgacttcatcctataggaaaccatttattgtctttatttttccaacttggtgtgcatatctgta

SEQ ID NO: 728938 - DNA, 71 bp, Artificial Sequence
  ENSG00000198556_18 (sequence is synthesized)
ttattgtctttatttttccaacttggtgtgcatatctgtatacccaacttcagaaataacagtccgaggcg

SEQ ID NO: 728939 - DNA, 73 bp, Artificial Sequence
  ENSG00000198556_19 (sequence is synthesized)
acactctacttaagatgcgaaaattagcctggtgtggtggtgcacgcttgtagtcccagttacttgggaggct

SEQ ID NO: 728940 - DNA, 120 bp, Artificial Sequence
  ENSG00000198556_20 (sequence is synthesized)
caacaaaaataacagtgtatttgagggcaccactccaaaccctactggggatgatacgttatgtaaaatatttacaccaggtcacctttctgaaatgggaaaaattctgactcctgaaac

SEQ ID NO: 728941 - DNA, 120 bp, Artificial Sequence
  ENSG00000198556_21 (sequence is synthesized)
acatctggtcctaagggtttcacataagggactggggacagtgaatagtcgtgttgtgttagggctcagaccgagacacttcatgcattcttcactctcacctcgtgttcctcatctgta

SEQ ID NO: 728942 - DNA, 120 bp, Artificial Sequence
  ENSG00000198556_22 (sequence is synthesized)
agacctccaggagttgagaattatggtagatttacattccaaaggctcacttcttatgctcttgaaagtctttttctttcttttctctggaaatgggtaacttcttggtgtgtaacatta

SEQ ID NO: 728943 - DNA, 120 bp, Artificial Sequence
  ENSG00000198556_23 (sequence is synthesized)
gtgggtgctcaggaaatgattttcaaccaacttcatttctgaaccttcactgcttccattcttttcaggagcctaccctgtcctagtccactgtagtctcccactgtgggagttgccttg

SEQ ID NO: 728944 - DNA, 120 bp, Artificial Sequence
  ENSG00000198556_24 (sequence is synthesized)
ctaaatagttttctttccggggtcacatgtttaacccttgcactgacactcttagcacagagtcttgaccacctctgtgggactgtccacccacctctggatttttataattttaatttt

SEQ ID NO: 728945 - DNA, 120 bp, Artificial Sequence
  ENSG00000198556_25 (sequence is synthesized)
ccctttaaaagcattacaggagcatacataagtacatggaaggcatagaaaaggaggagaagaggaaagtgttcatgggtaacactgttaatattttggaaggtttcctgccagtctttt

SEQ ID NO: 728946 - DNA, 120 bp, Artificial Sequence
  ENSG00000198556_26 (sequence is synthesized)
tttcctatgcctttacaaaagtagctgagcatattctatgtgcaatcctgtaatctgttttaaatgtaacattattgtatcagcatttccccacataatcagtaaacgagcataatataa

SEQ ID NO: 728947 - DNA, 120 bp, Artificial Sequence
  ENSG00000198556_27 (sequence is synthesized)
ttccattgtgtggtccataaaaatatttcattgttttcccatgtggggacattgagcttgcctttgtttgttcgttggtttgcttgtgtatttataatgtttgaatagatgtttgagtat

SEQ ID NO: 728948 - DNA, 120 bp, Artificial Sequence
  ENSG00000198556_28 (sequence is synthesized)
aatgagatggcactttaatctttattgattactgaatgattcttcaacaaactttgtactgttttgcatatccaatagtaacattttagagtgcttctttttttttttgagacagagttt

SEQ ID NO: 728949 - DNA, 120 bp, Artificial Sequence
  ENSG00000198556_29 (sequence is synthesized)
acaggtgtgagccactgcacccagctgagagtgcttctttactatatcactgccttcttttatggattttactagttctaaaaataattttcattacagaaattttggaaaatacatcag

SEQ ID NO: 728950 - DNA, 120 bp, Artificial Sequence
  ENSG00000198556_30 (sequence is synthesized)
tcagtaaatagagtagataataaaaatcacctgcaggcctactttccagaagtaactcttgttattaacattttggtttactttttcccagtccgtctatgtgtctattacagggaaaga

SEQ ID NO: 728951 - DNA, 120 bp, Artificial Sequence
  ENSG00000198556_31 (sequence is synthesized)
atcccttatccaaaatgctggggaccaaaagtgttttggatttcggatttttcttttttggattttggaatactcataaatatataataagataatttgaggatctgacaagaaattcac

SEQ ID NO: 728952 - DNA, 120 bp, Artificial Sequence
  ENSG00000198556_32 (sequence is synthesized)
ctggcacattcatcttggttgcaattgtactttaggctatatttctaagagcgaaatgaccacagccaaaggtatgaacattgttcaggctttcaataaagactgccagatatttacaaa

SEQ ID NO: 728953 - DNA, 120 bp, Artificial Sequence
  ENSG00000198556_33 (sequence is synthesized)
ttattgtagcggctcatgcatttcatcacatgttccaacaccaaacacagggactttgtattaagctttgtctgtgtgccccgttggaattccgggtcccagatctgccaaccaagagag

SEQ ID NO: 728954 - DNA, 120 bp, Artificial Sequence
  ENSG00000198556_34 (sequence is synthesized)
gatttcagtttcccaaacctgagatgatctgtcagctggagaactgggacgagcagtggatcctggatctaccgagaactgggaataggaaggcttccggtagtgcttgcccaggcggac

SEQ ID NO: 728955 - DNA, 120 bp, Artificial Sequence
  ENSG00000198556_35 (sequence is synthesized)
ctggattacaggcgtgagccgctgcgcccagttggaaaaagttttgttttttttttaaaactaagtgcttccatgtacatcagatgttaacgactttgatcctaacaaacaaacaaaaaa

SEQ ID NO: 728956 - DNA, 120 bp, Artificial Sequence
  ENSG00000198556_36 (sequence is synthesized)
ctgtttttcacatccaaggtttctcctccatggcactactgacgttttgggctgacgaattctttggggacaggatggggcatgtcctgtgcattttaggatgttgagtagcagccctgg

SEQ ID NO: 728957 - DNA, 120 bp, Artificial Sequence
  ENSG00000198556_37 (sequence is synthesized)
atggcagcgcagctctggtaaaagagtgacactctggataatggtgagaaagggcctgcaaccgtagcagtggaactcaggtttgataggcaggaaagaaagtccgtataatttgggagg

SEQ ID NO: 728958 - DNA, 120 bp, Artificial Sequence
  ENSG00000198556_38 (sequence is synthesized)
ttctggtgcctgcctgcagaggggagctacgtgaagcttctcaggatggtctcaggatgggggtgggcatttcctgttactgaccacttataggacagcgaacgtttgccctttccctgc

SEQ ID NO: 728959 - DNA, 120 bp, Artificial Sequence
  ENSG00000198556_39 (sequence is synthesized)
acacatcccctctgaacccatgcagtgtcttgtgagagcaaggagtgtgtagacagccgctgggcccctttgcccagagggctgcagtggtgtgggagggagagtgtggcagcttcagtg

SEQ ID NO: 728960 - DNA, 120 bp, Artificial Sequence
  ENSG00000198556_40 (sequence is synthesized)
ctcagcccactggagggggcagtcacttgcagatgtaatgtcccctgtgctcactgtgctgtgtccactgttgcccactctggatatgctccccaggcgtctgcgccttggtctgtacct

SEQ ID NO: 728961 - DNA, 120 bp, Artificial Sequence
  ENSG00000198556_41 (sequence is synthesized)
tttatattctccagcaacgggctcccctggtctctggcatctgcttggcttgtggcaatgggatgaagagggttggaggacaggggacagggcgccggaggcctggggaaaactgaggtt

SEQ ID NO: 728962 - DNA, 120 bp, Artificial Sequence
  ENSG00000198556_42 (sequence is synthesized)
gggtttctcttcccacggctccctccccactgggctgtgggatgggtgtggctgcatcctgttcagccgcagctggtcttgctccccttccagcagccttctgggctccagcagccctcc

SEQ ID NO: 728963 - DNA, 120 bp, Artificial Sequence
  ENSG00000198556_43 (sequence is synthesized)
ccaccttaccccttcagacctagcaggccctggttccccagggtggccaggacctgcgagcttccacatttcttgttcatgttcattgagactattcatccctttgtaaatagtctgcac

SEQ ID NO: 728964 - DNA, 120 bp, Artificial Sequence
  ENSG00000198556_44 (sequence is synthesized)
attaaccaaccccccagtgacctcatctctttcctaaggaacctggggcagaagcaataggttatttttatagagcagcggtcagcaaactgccctggaccgcttggtaaagtttccctg

SEQ ID NO: 728965 - DNA, 120 bp, Artificial Sequence
  ENSG00000198556_45 (sequence is synthesized)
aaacacagctgtgcccattcgcttacttgtccacggctgcttttgtgctccaacacaaaggctgttcctcagattgttgatttgctgttcctctaatcaacagcagatttgaggaactgg

SEQ ID NO: 728966 - DNA, 120 bp, Artificial Sequence
  ENSG00000198556_46 (sequence is synthesized)
aacagagaccagagggcctgaaaagcctaaaatatttaccatctggccctttagagattaattgtgtcgaccccgtggtatggaagccagcacatgtctggcctgagggccatcaggcct

SEQ ID NO: 728967 - DNA, 120 bp, Artificial Sequence
  ENSG00000198556_47 (sequence is synthesized)
gaaaggagccctgaatatattccttatgaattgggtgcccttggcccacactctacctcccaaaccttggtttcctcagctgtggaataatcattgagcgtaagttattttaagaattgc

SEQ ID NO: 728968 - DNA, 120 bp, Artificial Sequence
  ENSG00000198561_0 (sequence is synthesized)
ctgccagatcagtttgtcaccacccaggctcccttgcctttggctgggtgcaacttccattttaggtgttggatctgagggggaaaaaaaagagagagggagagagagagaaagaagagc

SEQ ID NO: 728969 - DNA, 120 bp, Artificial Sequence
  ENSG00000198561_1 (sequence is synthesized)
aggaaagatcccgaaaggaggaagaggtggcgaaaaatcaactgccctgctggatttgtctttctcagcaccttggcgaagccttgggtttctttcttaaaggactgatttttagaactc

SEQ ID NO: 728970 - DNA, 120 bp, Artificial Sequence
  ENSG00000198561_2 (sequence is synthesized)
cacatttgaggtgtgtggcttttgaagaaaatgtatgtactgacgggaaaaggaggataagcaagtcgaatttttgtcttacgctctctccttcctgcttcctccttgctgtggtggctg

SEQ ID NO: 728971 - DNA, 120 bp, Artificial Sequence
  ENSG00000198561_3 (sequence is synthesized)
ggatgcttcttccatgattttttgaatctagactgggctgttctctgtgttaaaccaatcagttgcgaccttctcttaacagtgtgaagtgagggggtctctctccctccttctccttcc

SEQ ID NO: 728972 - DNA, 120 bp, Artificial Sequence
  ENSG00000198561_4 (sequence is synthesized)
tctgtgattcaccttcctttttaccctgccctgcggcggctccgccccttaccttcatggacgactcagaggtggagtcgaccgccagcatcttggcctctgtgaaggaacaagaggccc

SEQ ID NO: 728973 - DNA, 120 bp, Artificial Sequence
  ENSG00000198561_5 (sequence is synthesized)
agtttgagaagctgacccgggcgctggaggaggaacggcgccacgtctcggcgcagctggaacgcgtccgggtctcaccacaagatgccaacccactcatggccaacggcacactcaccc

SEQ ID NO: 728974 - DNA, 120 bp, Artificial Sequence
  ENSG00000198561_6 (sequence is synthesized)
gccggcatcagaacggccggtttgtgggcgatgctgaccttgaaagacagaaattttcagatttgaaactcaacggaccccaggatcacagtcaccttctatatagcaccatccccagga

SEQ ID NO: 728975 - DNA, 120 bp, Artificial Sequence
  ENSG00000198561_7 (sequence is synthesized)
tgcaggagccggggcagattgtggagacctacacggaggaggatcctgagggagccatgtctgtagtctctgtggagacctcagatgatgggaccactcggcgcacagagaccacggtca

SEQ ID NO: 728976 - DNA, 120 bp, Artificial Sequence
  ENSG00000198561_8 (sequence is synthesized)
agaaagtagtgaagactgtgacaacacggacagtacagccagtcgctatgggaccagacgggttgcctgtggatgcttcatcagtttctaacaactatatccagactttgggtcgtgatt

SEQ ID NO: 728977 - DNA, 120 bp, Artificial Sequence
  ENSG00000198561_9 (sequence is synthesized)
tccgcaagaatggcaatgggggacctggtccctatgtggggcaagctggcactgctacccttcctaggaacttccactaccctcctgatggttatagtcgccactatgaagatggttatc

SEQ ID NO: 728978 - DNA, 120 bp, Artificial Sequence
  ENSG00000198561_10 (sequence is synthesized)
caggtggcagtgataactatggcagtctgtcccgggtgacccgcattgaggagcggtataggcccagcatggaaggctaccgggcacctagtagacaggatgtgtatgggccccaacccc

SEQ ID NO: 728979 - DNA, 120 bp, Artificial Sequence
  ENSG00000198561_11 (sequence is synthesized)
aggttcgggtaggtgggagcagcgtggatctgcatcgctttcatccagagccttatgggctagaggatgaccagcgtagtatgggctatgatgacctggattatggtatgatgtctgatt

SEQ ID NO: 728980 - DNA, 120 bp, Artificial Sequence
  ENSG00000198561_12 (sequence is synthesized)
atggcactgcccgtcggactgggacaccctctgaccctcgtcggcgcctcaggagctatgaagacatgattggtgaggaggtgccatcggatcaatactactgggctcctttggcccagc

SEQ ID NO: 728981 - DNA, 120 bp, Artificial Sequence
  ENSG00000198561_13 (sequence is synthesized)
atgagcgaggaagtttagcaagcttggatagcctgcgcaaaggagggcctccacctcctaattggagacagccagagctgccagaggtgatcgccatgcttggattccgcttggatgctg

SEQ ID NO: 728982 - DNA, 120 bp, Artificial Sequence
  ENSG00000198561_14 (sequence is synthesized)
tcaagtccaatgcagctgcatacctgcaacacttatgctaccgcaatgacaaggtgaagactgacgtgcggaagctcaagggcatcccagtactggtgggattgttagaccatcccaaaa

SEQ ID NO: 728983 - DNA, 120 bp, Artificial Sequence
  ENSG00000198561_15 (sequence is synthesized)
aggaagtgcaccttggagcctgtggagctctcaagaatatctcttttggacgtgaccaggataacaagattgccataaaaaactgtgatggtgtgcctgcccttgtgcgattgcttcgaa

SEQ ID NO: 728984 - DNA, 120 bp, Artificial Sequence
  ENSG00000198561_16 (sequence is synthesized)
aggctcgtgatatggaccttactgaagttattaccggaaccctgtggaatctttcatcccatgactcaatcaaaatggagattgtggaccatgcactgcatgccttgacagatgaagtga

SEQ ID NO: 728985 - DNA, 120 bp, Artificial Sequence
  ENSG00000198561_17 (sequence is synthesized)
tcattcctcattctggttgggagcgggaacctaatgaagactgtaagccacgccacattgagtgggaatcggtgctcaccaacacagctggctgccttaggaatgtaagctcagagagga

SEQ ID NO: 728986 - DNA, 120 bp, Artificial Sequence
  ENSG00000198561_18 (sequence is synthesized)
gtgaagctcgccggaaacttcgggaatgtgatggtttagttgatgccctcattttcattgttcaggctgagattgggcagaaggattcagacagcaagcttgtagagaactgtgtttgcc

SEQ ID NO: 728987 - DNA, 120 bp, Artificial Sequence
  ENSG00000198561_19 (sequence is synthesized)
ttcttcggaacttatcatatcaagttcaccgggagatcccacaggcagagcgttaccaagaggcagctcccaatgttgccaacaatactgggccacatgctgccagttgctttggggcca

SEQ ID NO: 728988 - DNA, 120 bp, Artificial Sequence
  ENSG00000198561_20 (sequence is synthesized)
agaagggcaaagatgagtggttctccagagggaaaaaacctatagaggatccagcaaacgatacagtggatttccctaaaagaacgagtccagctcgaggctatgagctcttatttcagc

SEQ ID NO: 728989 - DNA, 120 bp, Artificial Sequence
  ENSG00000198561_21 (sequence is synthesized)
cagaggtggttcggatatacatctcacttcttaaggagagcaagactcctgccatcctagaagcctcagctggagctatccagaacttgtgtgctgggcgctggacgtatggtcgataca

SEQ ID NO: 728990 - DNA, 120 bp, Artificial Sequence
  ENSG00000198561_22 (sequence is synthesized)
tccgctctgctctgcgtcaagagaaggctctttctgccatagctgacctcctgactaatgaacatgaacgggtggtgaaagctgcatctggagcactgagaaacctggctgtggatgctc

SEQ ID NO: 728991 - DNA, 120 bp, Artificial Sequence
  ENSG00000198561_23 (sequence is synthesized)
gcaacaaagaattaattggtaaacatgctattcctaacttggtaaagaatctgccaggaggacagcagaactcctcttggaatttctctgaggacactgtcatctctattttgaacacta

SEQ ID NO: 728992 - DNA, 120 bp, Artificial Sequence
  ENSG00000198561_24 (sequence is synthesized)
tcaacgaggttatcgctgagaacttggaggctgccaaaaagcttcgagagacacagggtattgagaagctggtgttgatcaacaaatcagggaaccgctcagaaaaagaagttcgagcag

SEQ ID NO: 728993 - DNA, 120 bp, Artificial Sequence
  ENSG00000198561_25 (sequence is synthesized)
cagcacttgtattacagacaatctggggatataaggaactgcggaagccactggaaaaagaaggatggaagaaatcagactttcaggtgaatctaaacaatgcttcccgaagccagagca

SEQ ID NO: 728994 - DNA, 120 bp, Artificial Sequence
  ENSG00000198561_26 (sequence is synthesized)
agaaattcagatgagcaatatgggatcaaacacaaaatcactagataacaactattccacaccaaatgagagaggagaccacaatagaacactggatcgatcgggggatctaggcgacat

SEQ ID NO: 728995 - DNA, 120 bp, Artificial Sequence
  ENSG00000198561_27 (sequence is synthesized)
ggagccattgaagggaacaacacccttgatgcaggacgaggggcaggaatctctggaggaagagttggatgtgttggttttggatgatgaggggggccaagtgtcttacccctccatgca

SEQ ID NO: 728996 - DNA, 120 bp, Artificial Sequence
  ENSG00000198561_28 (sequence is synthesized)
gaagatttagcaccactatctccgttccatctgggcttatatgtacttttattttttggtggtgaaattgactgatgattttcctttttcttcgctggactattgtgccaactgccaggc

SEQ ID NO: 728997 - DNA, 120 bp, Artificial Sequence
  ENSG00000198561_29 (sequence is synthesized)
tgcctcctgcccttacagccctaagtggctgccttctttccatcaactcccaacttcttcctgtgaagtttaattgtctcaacgcctccccctcccccattccctccatttttctcccaa

SEQ ID NO: 728998 - DNA, 120 bp, Artificial Sequence
  ENSG00000198561_30 (sequence is synthesized)
gaaacctgactcaattatttgcatattttgagaaactgctgcagattagttctttttgccagttttccctggaactcctggccttttgtggaggggagggatggagagaataggaatctt

SEQ ID NO: 728999 - DNA, 120 bp, Artificial Sequence
  ENSG00000198561_31 (sequence is synthesized)
cactagaagccgtgggaagaattggaagttacatgctgtatatgcaatgtccagcagtctgataaactgacgattcttaatcaagatttttttcctgatggggaagggacttttattttc

SEQ ID NO: 729000 - DNA, 120 bp, Artificial Sequence
  ENSG00000198561_32 (sequence is synthesized)
ttttagagaggggaaagtgtgagctcttcccttattcctaatggctatttttgaagcaaagaaggccagcaacattggcacatgccacctggcaaaggacccttgagtaagtgaaggtct

SEQ ID NO: 729001 - DNA, 120 bp, Artificial Sequence
  ENSG00000198561_33 (sequence is synthesized)
cctaaaactgggattaagaaaccttgctctcctcatctccaaggcagggaccatcaagaacctacagactccatctcttctgcaagcctcatgccaaccctgggctattgctgctgcccc

SEQ ID NO: 729002 - DNA, 120 bp, Artificial Sequence
  ENSG00000198561_34 (sequence is synthesized)
ttaaacacaggctgtccttaacccacctctcctgccctgtgatatgtctgctgagttggcctggccatttccaagaggctgtagaaaggggagaatgtcaaggaagacttttggtagaga

SEQ ID NO: 729003 - DNA, 120 bp, Artificial Sequence
  ENSG00000198561_35 (sequence is synthesized)
aggagcagaaagatgtgtttttgggaagaagaagacctctaggaggagctagtaggaatgtacatgaagcaattagtctgaaactggcttccccactcccccgtttctccttttcctatc

SEQ ID NO: 729004 - DNA, 120 bp, Artificial Sequence
  ENSG00000198561_36 (sequence is synthesized)
cttataggcctgtcccttgcctctgccctggattggttggcaaactaaaggacttgatgtacataactcctgtcccttttcccttacaaggtggggattgcccctggctttgcctcttct

SEQ ID NO: 729005 - DNA, 120 bp, Artificial Sequence
  ENSG00000198561_37 (sequence is synthesized)
ttgtgcctttggcctggggtgcatctcctcccgcccttccatgtgcctttctttgcctctgcagtctcatttctcataattttgcaaattatattttgttgctttcttacctactattgg

SEQ ID NO: 729006 - DNA, 120 bp, Artificial Sequence
  ENSG00000198561_38 (sequence is synthesized)
ccctaaatagcagaaagaagagaagtgaccgagagaacctcagattcttcattgaggattggtatagccatgatttcagtcatagcaagcttttgctcaacagcatatgggtgggatttt

SEQ ID NO: 729007 - DNA, 120 bp, Artificial Sequence
  ENSG00000198561_39 (sequence is synthesized)
gcaaaaatcctattctgatgaatctcaaagtaaggctggtaagagaagtgagtggtgtgactcttactccttaggtgcccagaatttaccatcatctctgaaggagttacagggaagtgg

SEQ ID NO: 729008 - DNA, 120 bp, Artificial Sequence
  ENSG00000198561_40 (sequence is synthesized)
tctccccaattctcccctccctccagtattgccccctctcactttagcatatattaattagcaggttgggctagagaaatcagctgctatgcgggttgattattattattatttctaatc

SEQ ID NO: 729009 - DNA, 120 bp, Artificial Sequence
  ENSG00000198561_41 (sequence is synthesized)
cttttccttatttgccttctactccccttaatctaatctaaaagctctgttccatgcaactggagttccttatccctctcttccccttcccttatatattgaggctatggggtaggagaa

SEQ ID NO: 729010 - DNA, 120 bp, Artificial Sequence
  ENSG00000198561_42 (sequence is synthesized)
aagtgcacaacccaccaccccctttactcgtgcattaaaatttcttatttacccttttcccccttcccatttcttcccactttcatctaccttttctggcaaaaaggagccttttgctct

SEQ ID NO: 729011 - DNA, 120 bp, Artificial Sequence
  ENSG00000198561_43 (sequence is synthesized)
ctgtgaccctaagagcacactgcacagggaaaattgccccatccagacctggctccactcttgatctctcttgtcctcttctgctcttttcctggtgctcttttttctcggtggggtgtg

SEQ ID NO: 729012 - DNA, 120 bp, Artificial Sequence
  ENSG00000198561_44 (sequence is synthesized)
ggtaatagaacagccgtgggcttttggggacctttaacttttttttctctcttttgtttataaaaaacactaaacattcaattccagagaaccaaaaatcccaccttcccaccgaacact

SEQ ID NO: 729013 - DNA, 120 bp, Artificial Sequence
  ENSG00000198561_45 (sequence is synthesized)
actaaggggcttgtgttctgctccataccttttctcttttctttctgtcttgttaatgcttttaaaaacaaatgagttttttatataaataaagtttttaaagtgtgtatgtggggggtc

SEQ ID NO: 729014 - DNA, 120 bp, Artificial Sequence
  ENSG00000198561_46 (sequence is synthesized)
tgtgtcatttcttcacttcaagctgttatttcttccctgctttgcatctttgttacttccttatgtatcagtgtcctttccagagcaaccagaaggaggttataccaggatttattttga

SEQ ID NO: 729015 - DNA, 120 bp, Artificial Sequence
  ENSG00000198561_47 (sequence is synthesized)
gctcagccccaactctttatcaagcaacattcttgttaactatatgtgaaacattttttcttctgaagattcttaaaaattgaatgtggctgaagttgaacatgggagcttattgctaat

SEQ ID NO: 729016 - DNA, 120 bp, Artificial Sequence
  ENSG00000198561_48 (sequence is synthesized)
ttagagataggaaactgaagcataaagaattaatgacttactttaattactggaattcttctgcaacatttgacaaaactaaccttgaataaggcccactgtaatacgtagctctcttaa

SEQ ID NO: 729017 - DNA, 120 bp, Artificial Sequence
  ENSG00000198561_49 (sequence is synthesized)
atataacacttaggactagaagattagaaactaccaatcccaactacgtaataggaaaatgtaggatcaaaaggcccatgtatataagtactgaccactgggccataatgttgcttctca

SEQ ID NO: 729018 - DNA, 120 bp, Artificial Sequence
  ENSG00000198561_50 (sequence is synthesized)
ggctatatgcagtcctttagtcagaagtcaataggcctatttattaatattttacagaccatattacctggattaccagggactatctttgctgcagagatcaagggttaagatctatgg

SEQ ID NO: 729019 - DNA, 120 bp, Artificial Sequence
  ENSG00000198561_51 (sequence is synthesized)
gaagatacttatttttctgaggtccttatgtcctgtcatataattaaagactcaagagaatttatgtgaaatgctttctgtatgcccaaatctttagattaaaattatatagctgctcct

SEQ ID NO: 729020 - DNA, 120 bp, Artificial Sequence
  ENSG00000198561_52 (sequence is synthesized)
gagggctgagggaagatggctgggctgcaagaggcagggggatgggcccgtcagggaggaattcttgtgaaagccgtcgtctgcctcagcacttgatgaaaacacaccgaaaaagaggct

SEQ ID NO: 729021 - DNA, 120 bp, Artificial Sequence
  ENSG00000198561_53 (sequence is synthesized)
aaaaaaaaattaaaattctttagcctattctttagcctccattcctatctgtattgcatactgtaactccaacctttctatctttgttgctattctctcatgtataccacatgtacctat

SEQ ID NO: 729022 - DNA, 120 bp, Artificial Sequence
  ENSG00000198561_54 (sequence is synthesized)
aaggctagttctattttgaagcctatgtgttttgtgaaacacaaaaaaaagtacagagaaagatcgcatccttttctggtaggggttttcaggaaaaagtaagagttctgactcatgttg

SEQ ID NO: 729023 - DNA, 120 bp, Artificial Sequence
  ENSG00000198561_55 (sequence is synthesized)
ggatttcttgggccgttattctgcagtggtcaaaatgggggaagcatgtctgtaaaagtgttactgatatgactaacactaactgatctactttcaaacattacctttttcctctccctc

SEQ ID NO: 729024 - DNA, 120 bp, Artificial Sequence
  ENSG00000198561_56 (sequence is synthesized)
cctgtttatgaatgttttgcccttctcttactattatatcttgttttgtttgagtttacaaattttcagagtttccctagctctggcacacactcatgaggttcctgtctctactcatac

SEQ ID NO: 729025 - DNA, 120 bp, Artificial Sequence
  ENSG00000198561_57 (sequence is synthesized)
taacaaattgcatgtgttcacagcaggacgaggggcaggaatctctggaggaagagttggatgtgttggttttggatgatgaggggggccaagtgtcttacccctccatggtatgtcctt

SEQ ID NO: 729026 - DNA, 120 bp, Artificial Sequence
  ENSG00000198561_58 (sequence is synthesized)
caatgaaggttctttagatccttataatttttaagactgtaaaacggccttgagaccaaataatttgaaaactgctagtttagatggaattgttttttgatttaagagtctgtaggggcc

SEQ ID NO: 729027 - DNA, 120 bp, Artificial Sequence
  ENSG00000198561_59 (sequence is synthesized)
aagatggctgggctgcaagaggcagggggatgggcccgtcagggaggaattcttgtgaaagccgtcgtctgcctcagcacttgatgaaaacacaccgaaaaagagggagctatgaagaca

SEQ ID NO: 729028 - DNA, 120 bp, Artificial Sequence
  ENSG00000198561_60 (sequence is synthesized)
agaacaggaggagcgctttgggcgggaggctaagtctcgagggacttgagggctgagggaagatggctgggctgcaagaggcagggggatgggcccgtcagggaggaattcttgtgaaag

SEQ ID NO: 729029 - DNA, 120 bp, Artificial Sequence
  ENSG00000198561_61 (sequence is synthesized)
ccgtcgtctgcctcagcacttgatgaaaacacaccgaaaaagagggtagggatgctgtagtagagcaggcgccaaggcggttaagggtcatgtccgtcttccctttgaagaggcagtaga

SEQ ID NO: 729030 - DNA, 120 bp, Artificial Sequence
  ENSG00000198561_62 (sequence is synthesized)
tcctgtcttgttttattgaactaggacttgggtatgaaaactttcatgggctagtgagaccaggaaatcaactagcttttaaagcttgatttgtgtctaacaattgtagtgttagattag

SEQ ID NO: 729031 - DNA, 120 bp, Artificial Sequence
  ENSG00000198561_63 (sequence is synthesized)
aggttgaagtacaaagccaaaaagctattaagagtttactttccaaagagttttgatagccctgcttgagatgatttttatctaaatagaaaagcctggctgcttgtcagcaacacttta

SEQ ID NO: 729032 - DNA, 120 bp, Artificial Sequence
  ENSG00000198561_64 (sequence is synthesized)
tttccctgttatgttcttatcctttggcattgagctagatacaaaccctactcttctctcttccttctggattggtccatttgtttatctcattcaataaatatttgccaagcacctcct

SEQ ID NO: 729033 - DNA, 120 bp, Artificial Sequence
  ENSG00000198561_65 (sequence is synthesized)
agtggtggtgatttgggtctagctttaaatagtgggctttgtgtagctgaagtgagcatcctagttaacctagtgtccaggactatttccacgaactaagggttgttttgactggtgtgt

SEQ ID NO: 729034 - DNA, 120 bp, Artificial Sequence
  ENSG00000198561_66 (sequence is synthesized)
agtacagagcctttggggtgataagatggaagatttgtcttttacctcacctccactggttctttcaggaattataagggatgcagataagtaaatcttttattttttaaattttttgtt

SEQ ID NO: 729035 - DNA, 120 bp, Artificial Sequence
  ENSG00000198561_67 (sequence is synthesized)
ccgggcgctggaggaggaacggcgccacgtctcggcgcagctggaacgcgtccgggtctcaccacaagatgccaacccactcatggccaacggcacactcacccgccggcatcaggatca

SEQ ID NO: 729036 - DNA, 120 bp, Artificial Sequence
  ENSG00000198561_68 (sequence is synthesized)
gttttgattttagcttccctagtatgtccttgcctaacctttccctgtctatgcatgtaggaaagttcagttgaggaagacactgaaacaagtttagctctttggagctaatagctcacg

SEQ ID NO: 729037 - DNA, 120 bp, Artificial Sequence
  ENSG00000198561_69 (sequence is synthesized)
gcatgctgtttctgggcagcagtccccattatcagaactcaggacaatagcatcaacagtggtcatcctcatcttacctatctgctgcctgttttctatccttgtttctgaatagtcccc

SEQ ID NO: 729038 - DNA, 120 bp, Artificial Sequence
  ENSG00000198561_70 (sequence is synthesized)
tgctggaacaagttgccctcacctgccccttttcccctcgtggtgcatctgtgatcaaaaggttctgactgaaggatgaaaaatgtgccaggtggaatcttttcttttttaaactggctt

SEQ ID NO: 729039 - DNA, 120 bp, Artificial Sequence
  ENSG00000198563_0 (sequence is synthesized)
agatttccctccttcgtcgctgttgctgccgccatacgcgctctccctgtttagctcttctgttagaaatagtatctttgttttcctttgctgttcctcaatcccctactcttcacccct

SEQ ID NO: 729040 - DNA, 120 bp, Artificial Sequence
  ENSG00000198563_1 (sequence is synthesized)
tgttttcacctattttgcgagaacccatccagatcccccttcccttcttcccctgccggcccagttatggcagagaacgatgtggacaatgagctcttggactatgaagatgatgaggtg

SEQ ID NO: 729041 - DNA, 120 bp, Artificial Sequence
  ENSG00000198563_2 (sequence is synthesized)
gagacagcagctgggggagatggggctgaggcccctgccaagaaggatgtcaagggctcctatgtctccatccacagctctggctttcgtgacttcctgctcaagccagagttgctccgg

SEQ ID NO: 729042 - DNA, 120 bp, Artificial Sequence
  ENSG00000198563_3 (sequence is synthesized)
gccattgtcgactgtggctttgagcatccgtcagaagtccagcatgagtgcatccctcaggccattctgggaatggatgtcctgtgccaggccaagtcgggcatgggaaagacagcagtg

SEQ ID NO: 729043 - DNA, 120 bp, Artificial Sequence
  ENSG00000198563_4 (sequence is synthesized)
tttgtcttggccacactgcaacagctggagccagttactgggcaggtgtctgtactggtgatgtgtcacactcgggagttggcttttcagatcagcaaggaatatgagcgcttctctaaa

SEQ ID NO: 729044 - DNA, 120 bp, Artificial Sequence
  ENSG00000198563_5 (sequence is synthesized)
tacatgcccaatgtcaaggttgctgttttttttggtggtctgtctatcaagaaggatgaagaggtgctgaagaagaactgcccgcatatcgtcgtggggactccaggccgtatcctagcc

SEQ ID NO: 729045 - DNA, 120 bp, Artificial Sequence
  ENSG00000198563_6 (sequence is synthesized)
ctggctcgaaataagagcctcaacctcaaacacattaaacactttattttggatgaatgtgataagatgcttgaacagctcgacatgcgtcgggatgtccaggaaatttttcgcatgacc

SEQ ID NO: 729046 - DNA, 120 bp, Artificial Sequence
  ENSG00000198563_7 (sequence is synthesized)
cccacgagaagcaggtcatgatgttcagtgctaccttgagcaaagagatccgtccagtctgccgcaagttcatgcaagatccaatggagatcttcgtggatgatgagacgaagttgacgc

SEQ ID NO: 729047 - DNA, 120 bp, Artificial Sequence
  ENSG00000198563_8 (sequence is synthesized)
tgcatgggttgcagcagtactacgtgaaactgaaggacaacgagaagaaccggaagctctttgaccttctggatgtccttgagttcaaccaggtggtgatctttgtgaagtctgtgcagc

SEQ ID NO: 729048 - DNA, 120 bp, Artificial Sequence
  ENSG00000198563_9 (sequence is synthesized)
ggtgcattgccttggcccagctactagtggagcagaacttcccagccattgccatccaccgtgggatgccccaggaggagaggctttctcggtatcagcagtttaaagattttcaacgac

SEQ ID NO: 729049 - DNA, 120 bp, Artificial Sequence
  ENSG00000198563_10 (sequence is synthesized)
gaattcttgtggctaccaacctatttggccgaggcatggacatcgagcgggtgaacattgcttttaattatgacatgcctgaggattctgacacctacctgcatcgggtggccagagcag

SEQ ID NO: 729050 - DNA, 120 bp, Artificial Sequence
  ENSG00000198563_11 (sequence is synthesized)
gccggtttggcaccaagggcttggctatcacatttgtgtccgatgagaatgatgccaagatcctcaatgatgtgcaggatcgctttgaggtcaatattagtgagctgcctgatgagatag

SEQ ID NO: 729051 - DNA, 120 bp, Artificial Sequence
  ENSG00000198563_12 (sequence is synthesized)
acatctcctcctacattgaacagacacggtagaagactcgcccattttggaatgtgaccgtctgtccttcaggagaggacaccagggtgggggtgaaggagacactactgcccccacccc

SEQ ID NO: 729052 - DNA, 120 bp, Artificial Sequence
  ENSG00000198563_13 (sequence is synthesized)
tgacagcccccaccccatggcttccatcttttgcatcaccaccactcctgaacccccatttctgatttgtcagaatttttttttaacaaaactaaaaatgaaacacatgtgtctgtggta

SEQ ID NO: 729053 - DNA, 120 bp, Artificial Sequence
  ENSG00000198563_14 (sequence is synthesized)
ctcagctagggcctgccggttcctagtgcgtgcccagcagtcctcaggtcaccttcactaccgggccaaggaccccgtgggaactcgcagccttcgccacactcgttcctcgcgcatcca

SEQ ID NO: 729054 - DNA, 120 bp, Artificial Sequence
  ENSG00000198563_15 (sequence is synthesized)
tggaggggtgcctacagagaagacctgcgtggcaaaaacctaaacgaagagatgaggggcatggagaggagtaggataagagaataaagataacagtgggggggagacgttagtttcctt

SEQ ID NO: 729055 - DNA, 120 bp, Artificial Sequence
  ENSG00000198563_16 (sequence is synthesized)
tatatcttttgttactggcggtagcagtgaagttagaaacggttttaaaacaaatttcagacaggcattttccaaaggcaagcctggagcgcacggatctgtataaccgcggaaggccct

SEQ ID NO: 729056 - DNA, 120 bp, Artificial Sequence
  ENSG00000198563_17 (sequence is synthesized)
gtttccggtcccttgcgcctgcgctcttgcagccaagaaggcgggaggctggagtagagggaagcctgcaaccggaagtgaaggcagatttccctccttcgtcgctgttgctgccgccat

SEQ ID NO: 729057 - DNA, 120 bp, Artificial Sequence
  ENSG00000198563_18 (sequence is synthesized)
cgcccgctgcctcctccccttcctcgccctcttcctcagactcccttgtcattcaagtgccaagaaggcggcttgtgcccaactgggagtaatgactccttgaagagacatacagaagca

SEQ ID NO: 729058 - DNA, 120 bp, Artificial Sequence
  ENSG00000198563_19 (sequence is synthesized)
gagacagctagtgttagggcctgcgcgggtgccagggaaactccggaagacttggtcgggttaatgtgagagcgggtagtgttcgactttttcataaatcacaacatttttgaacctctt

SEQ ID NO: 729059 - DNA, 120 bp, Artificial Sequence
  ENSG00000198563_20 (sequence is synthesized)
ctccctttgggggagggcaggatttttctgccctaccacccacccatccatcgtctcttacatgcaccctacagccacgcaccctcaaggtggcatcgagcgtacagctggagccttctg

SEQ ID NO: 729060 - DNA, 120 bp, Artificial Sequence
  ENSG00000198563_21 (sequence is synthesized)
ctcaccaaaactcctacttcccggtggcaggagagcaagagagggacagacagatggcagggcatgtccaaaagaagagcatcagcacaaatgaatcctccccttccccacctccagggg

SEQ ID NO: 729061 - DNA, 120 bp, Artificial Sequence
  ENSG00000198563_22 (sequence is synthesized)
tgggggcctttggcacctcaatccccgataccctactccttcccacccacatctccttgcacccatctggaacctcggttgatgtgagccggcaacagagaagcaccgtggcgcggcgag

SEQ ID NO: 729062 - DNA, 120 bp, Artificial Sequence
  ENSG00000198563_23 (sequence is synthesized)
ggaatgcagacggcacccagcggtggatggcggcagcggaggccgcggggaaacctgaccaggaagctgaggaccaaaccagcctctttttccgttcccggtttttttcctgaacccaac

SEQ ID NO: 729063 - DNA, 120 bp, Artificial Sequence
  ENSG00000198563_24 (sequence is synthesized)
gcgtgccgtgccccgtttcccccaatatgtgttggggaggggtgtcctgaatggggtggtagattttttttcttaaaaaaatttttttgttttttttaatactcagaggagagggacata

SEQ ID NO: 729064 - DNA, 120 bp, Artificial Sequence
  ENSG00000198563_25 (sequence is synthesized)
ggaaaggtaaagtggatgtaatcgggtggttgttagggtttggggctaggtggggccaattgcataagcagtggagtgtgttcttcccctccctgcagtgttccttcccgtgggatgatc

SEQ ID NO: 729065 - DNA, 120 bp, Artificial Sequence
  ENSG00000198563_26 (sequence is synthesized)
actctttagctgtatttggggctagaatgagatttgaaggaggccatggaacttctctttagaaagcctgccttggctgggcctggtggctcacctctaatcccagcactttgggaggcc

SEQ ID NO: 729066 - DNA, 120 bp, Artificial Sequence
  ENSG00000198563_27 (sequence is synthesized)
ccagctacttgggaagctgaggcaggagggtttgcttgagcccgggacgtggaggtggcagtaagctgtaattgtgccactgtactccagcctgggtgatagagagagaccctgtatcaa

SEQ ID NO: 729067 - DNA, 120 bp, Artificial Sequence
  ENSG00000198563_28 (sequence is synthesized)
tgtactccagcctgggtgatagagagagaccctgtatcaaaacaaaacaaaaaacaaaacctgccttctgggattgggcttctggtttttttcccatgacacacgcatcctttcctattt

SEQ ID NO: 729068 - DNA, 120 bp, Artificial Sequence
  ENSG00000198563_29 (sequence is synthesized)
tgtcctctgggtcttcatattaactatcttcccccaggatagtataaaaagtgttaggaaagttgggctttggagttgtggtaatttctgtctttgttactttcctccccttcagggggt

SEQ ID NO: 729069 - DNA, 120 bp, Artificial Sequence
  ENSG00000198563_30 (sequence is synthesized)
ttactttcctccccttcagggggttttttaattttaaagatgaatgcagtgaggtataatggtgtgtgcctgtagtcccagctattcaggagactgaagcaggaggatcacttgagccca

SEQ ID NO: 729070 - DNA, 120 bp, Artificial Sequence
  ENSG00000198563_31 (sequence is synthesized)
gcctgggcaacatggtgagatcctgtcccttaaaagtgtatctgctgctctgaatttggtattttaacaccacttactgatacctttcctgtaaacctgtagatggtttaattcttagtc

SEQ ID NO: 729071 - DNA, 120 bp, Artificial Sequence
  ENSG00000198563_32 (sequence is synthesized)
ctgtaaacctgtagatggtttaattcttagtcaagagaccagtctcatctaaaactatcctgttgtggtctgacggcaagtaactcatcttgagtaatttttgtttctccttaagtggca

SEQ ID NO: 729072 - DNA, 120 bp, Artificial Sequence
  ENSG00000198563_33 (sequence is synthesized)
ttttgactgtccattgcagcattctgatcttaaaagacatccactttgctaatgcacacgagattctcttagttgaagtaggagaatcaaatggagcagttgtcctccccccaccccatg

SEQ ID NO: 729073 - DNA, 120 bp, Artificial Sequence
  ENSG00000198563_34 (sequence is synthesized)
ttcttagaagcacctctgatggagttattctgaccttgagtcactgcctcccatcatttcccagatgtttggtccttgctctccctttgagaatcatctcccattttctttcctctccca

SEQ ID NO: 729074 - DNA, 120 bp, Artificial Sequence
  ENSG00000198563_35 (sequence is synthesized)
cctctatttgaggtaatggcatctgtgccattgggtggtttcactgctccttgacttcatttgcagtttctttcccatgatagtttttagttgggcagtcttaaaactcatctgatagga

SEQ ID NO: 729075 - DNA, 120 bp, Artificial Sequence
  ENSG00000198563_36 (sequence is synthesized)
aggaaattagatgtaatgtgagagagaccacagtaaaatgtgggtatttttgggagtggggtggggttttcaatcttctctttcctccccatccccccatggggtgtattggagatcaac

SEQ ID NO: 729076 - DNA, 120 bp, Artificial Sequence
  ENSG00000198563_37 (sequence is synthesized)
atttccctccttcgtcgctgttgctgccgccatacgcgctctccctgtttaggtaagctttggccttcgctacaatccgtttccatctgcgcttctccgcacccatcccgtcacatgggt

SEQ ID NO: 729077 - DNA, 120 bp, Artificial Sequence
  ENSG00000198563_38 (sequence is synthesized)
tcctgatacccttttcacaggcgatggtctggtcgctggggcctagttggttcgctatttccttagcttgcatccctttcgagagcaaagagctcctgggggaaggaagggaagctaagg

SEQ ID NO: 729078 - DNA, 120 bp, Artificial Sequence
  ENSG00000198563_39 (sequence is synthesized)
ggggacccaatccaagatggtgtcctcggcgccattgtgttcgttttgctcccttcttccaatgggttcttctcatattggaggcctcagcatcaatgagaggcggcgctcggcgtccct

SEQ ID NO: 729079 - DNA, 120 bp, Artificial Sequence
  ENSG00000198563_40 (sequence is synthesized)
tggtcttggtatttgcggagggcggggctcttctcaccttccttgtcctttcttgagctctttctcggccctcggtgggactgggaggaggagctggtttctgggcccagttggattttt

SEQ ID NO: 729080 - DNA, 120 bp, Artificial Sequence
  ENSG00000198563_41 (sequence is synthesized)
ctcaccttgacttgcccaacttaatttggagtgccttccaagtgtttacgatacgattggtgtcattgtatgtttctccaaaaggagtctcaccttcgtagcgtaacagtgatgtgagac

SEQ ID NO: 729081 - DNA, 120 bp, Artificial Sequence
  ENSG00000198563_42 (sequence is synthesized)
cacttggtaaagatcctgttaaagcctgggcggggattgcctttctctgtcacctattagctttcttattgtagggtggagacatgaattttgtttttttgtggccgagccatttgtctt

SEQ ID NO: 729082 - DNA, 120 bp, Artificial Sequence
  ENSG00000198563_43 (sequence is synthesized)
gcaccgcccctcccccccatgctaattacacaaggcttgcttaaacagcggaagggaggatactgagaagtgggaggctgagagctatgggaggtggacggcggccatatgatgttttct

SEQ ID NO: 729083 - DNA, 120 bp, Artificial Sequence
  ENSG00000198563_44 (sequence is synthesized)
tttcgaaaggtgagcgctttgcgcagtgatgaccctcatctatcacccttgactgatggctgctgagttaggcatccataacggtgggattataatagggaaagcggagtcttcctttga

SEQ ID NO: 729084 - DNA, 120 bp, Artificial Sequence
  ENSG00000198563_45 (sequence is synthesized)
ggacttttcaggactctacttgtcatctccattttccactttactaagttattagtcgtattttaccttttattatctattctatttcctcactgttactttcagatcaagaatttataa

SEQ ID NO: 729085 - DNA, 120 bp, Artificial Sequence
  ENSG00000198563_46 (sequence is synthesized)
gttggtcttccccttccaacttttctggtttccgctactgtgattgctaatcttgttgggaacctctgtcctaaccactttccctggtactgctttttctgttctgttatatttgctttt

SEQ ID NO: 729086 - DNA, 120 bp, Artificial Sequence
  ENSG00000198563_47 (sequence is synthesized)
cgtttttatgttttgtatctgtttttctttccaggtaaaagtttcctggtttagggaaagtgggaactggggatggaaaagaggtggtgaaggctgtgctcgtgattaagtcttgctttt

SEQ ID NO: 729087 - DNA, 120 bp, Artificial Sequence
  ENSG00000198563_48 (sequence is synthesized)
agacgtccagtagggggatgagcattggagcactccagctgtagcagaaacctggatattaagtacacttttattgaggaaatcacatgtgtgatgtgggagagaataatgagggtataa

SEQ ID NO: 729088 - DNA, 120 bp, Artificial Sequence
  ENSG00000198563_49 (sequence is synthesized)
atatcttaggggctgagcatgagtaaggtgggagctgcttttctattctatggctggcacgggtatgtcctcaataacctcaaggaaaataaacttcaaaaattaagatccttggccagg

SEQ ID NO: 729089 - DNA, 86 bp, Artificial Sequence
  ENSG00000198563_50 (sequence is synthesized)
caaggaaaataaacttcaaaaattaagatccttggccaggcacggtggcttatgtgtgtaatcccagcacttggggaggctgaggg

SEQ ID NO: 729090 - DNA, 120 bp, Artificial Sequence
  ENSG00000198563_51 (sequence is synthesized)
tttggtgagcaggaatatcagttacccctccagatcttaattctagttttttatcactttttcatgaggtgatctcatcctcatctcctagcatgtctggcaattttgatttctgaactc

SEQ ID NO: 729091 - DNA, 120 bp, Artificial Sequence
  ENSG00000198563_52 (sequence is synthesized)
tgtgctacctcagaggccagcttccttagggaaaaatcagtgctgaagtaaagttatatttccttttctgctctaaatatatagtgggggaataagagaaatgaagaggaattcctgaga

SEQ ID NO: 729092 - DNA, 120 bp, Artificial Sequence
  ENSG00000198563_53 (sequence is synthesized)
acgtaattactagaaactcccctctcccacgtaatgtctctcacacaccatggacccctattcccccaatttgcgaccccccaccccaccccacaacaggtggtgatctttgtgaagtct

SEQ ID NO: 729093 - DNA, 120 bp, Artificial Sequence
  ENSG00000198563_54 (sequence is synthesized)
ccaagtgtttacgatacgattggtgtcattgtatgtttctccaaaaggagtctcaccttcgtagcgtaacagtgatgtgagaccacttgctcttctgttagaaatagtatctttgttttc

SEQ ID NO: 729094 - DNA, 120 bp, Artificial Sequence
  ENSG00000198563_55 (sequence is synthesized)
cattgtgttcgttttgctcccttcttccaatgggttcttctcatattggaggcctcagcatcaatgagaggcggcgctcggcgtcccttggtcttgttatggcagagaacgatgtggaca

SEQ ID NO: 729095 - DNA, 120 bp, Artificial Sequence
  ENSG00000198563_56 (sequence is synthesized)
cttcgctacaatccgtttccatctgcgcttctccgcacccatcccgtcacatgggttcctgatacccttttcacaggcgatggtctggtcgctggggcctagttgctcttctgttagaaa

SEQ ID NO: 729096 - DNA, 120 bp, Artificial Sequence
  ENSG00000198563_57 (sequence is synthesized)
tccctccaggtggccagagcaggccggtttggcaccaagggcttggctatcacatttgtgtccgatgagaatgatgccaagatcctcaatgatgtgcaggatcgctttgaggtcctccct

SEQ ID NO: 729097 - DNA, 120 bp, Artificial Sequence
  ENSG00000198563_58 (sequence is synthesized)
gttccttagtgtgtttgtccgaaatcccatcacataggtcatgggcatctgatgcataatggacacttgactggttcatgccccctggtctttgatgctgtgttgggatgtttttctgac

SEQ ID NO: 729098 - DNA, 120 bp, Artificial Sequence
  ENSG00000198563_59 (sequence is synthesized)
gtcttctctcatcatattacatcccttccctcacccccacgtccgtcctctgaacccaggcagtacaccagtgtctgcatgtgtgccgtgtgttcctgcctcactttccccttttcatgc

SEQ ID NO: 729099 - DNA, 120 bp, Artificial Sequence
  ENSG00000198569_0 (sequence is synthesized)
acacaggtaggagctcctaggaccaggctgaggcccagggacagtgaggccgaggctgggtggcctccaggccaagggcttgggccccatcctgagtctccaggacccaagggcaagaga

SEQ ID NO: 729100 - DNA, 120 bp, Artificial Sequence
  ENSG00000198569_1 (sequence is synthesized)
cgccaggcttgggcagcaggagggaggatctagacctgggcctgggtctgtccctgcccgaaatccatgccgagttcccttcccggcagccaggtcccccaccccactctggacgcggtt

SEQ ID NO: 729101 - DNA, 120 bp, Artificial Sequence
  ENSG00000198569_2 (sequence is synthesized)
gacctagtggaaaagactctgaggaatgaagggacctccagttctgctccagtcttggaggaaggggacacagacccctggaccctccctcagctgaaggacacaagccagccctggaaa

SEQ ID NO: 729102 - DNA, 120 bp, Artificial Sequence
  ENSG00000198569_3 (sequence is synthesized)
gagctccgcgtggccggcaggctgcgccgcgtggccggcagcgtcctcaaggcctgcgggctcctcggcagcctgtacttcttcatctgctctctggacgtcctcagctccgccttccag

SEQ ID NO: 729103 - DNA, 120 bp, Artificial Sequence
  ENSG00000198569_4 (sequence is synthesized)
ctgctgggcagcaaagtggccggagacatcttcaaggacaacgtggtgctgtccaaccctgtggctggactggtcattggcgtgctggtcacagccctggtgcagagttccagcacgtcc

SEQ ID NO: 729104 - DNA, 120 bp, Artificial Sequence
  ENSG00000198569_5 (sequence is synthesized)
tcctccatcgtggtcagcatggtggctgctaagctgctgactgtccgggtgtctgtgcccatcatcatgggtgtcaacgtaggcacatccatcaccagcaccctggtctcaatggcgcag

SEQ ID NO: 729105 - DNA, 120 bp, Artificial Sequence
  ENSG00000198569_6 (sequence is synthesized)
tcaggggaccgggatgaatttcagagggctttcagcggctcggcggtgcacgggatcttcaactggctcacagtgctggtcctgctgccactggagagcgccacggccctgctggagagg

SEQ ID NO: 729106 - DNA, 120 bp, Artificial Sequence
  ENSG00000198569_7 (sequence is synthesized)
ctaagtgagctagccctgggtgccgccagcctgacacccagggcgcaggcgcccgacatcctcaaggtgctgacgaagccgctcacacacctcatcgtgcagttggactccgacatgatc

SEQ ID NO: 729107 - DNA, 120 bp, Artificial Sequence
  ENSG00000198569_8 (sequence is synthesized)
agcagctgtggcgccttcggcccgtgcacagagaagaacagcacagccccggcggacaggctgccctgccgccacctgtttgcgggcacggagctcacggacctggccgtgggctgcatc

SEQ ID NO: 729108 - DNA, 120 bp, Artificial Sequence
  ENSG00000198569_9 (sequence is synthesized)
ctgctggccggctccctgctggtgctctgcggctgcctggtcctcatagtcaagctgctcaactctgtgctgcgcggccgcgtggcccaggtcgtgaggacagtcatcaatgcggacttc

SEQ ID NO: 729109 - DNA, 120 bp, Artificial Sequence
  ENSG00000198569_10 (sequence is synthesized)
cccttcccgctgggctggctcggcggctacctggccgtcctcgcgggcgccggcctgaccttcgcactgcagagcagcagcgtcttcacggcggccgtcgtgcccctcatgggggtcggg

SEQ ID NO: 729110 - DNA, 120 bp, Artificial Sequence
  ENSG00000198569_11 (sequence is synthesized)
gtgatcagtctggaccgggcgtaccccctcttactgggctccaacatcggcaccactaccacagccctgctggctgccctggccagccccgcagacaggatgctcagcgccctgcaggtc

SEQ ID NO: 729111 - DNA, 120 bp, Artificial Sequence
  ENSG00000198569_12 (sequence is synthesized)
gccctcatccacttcttcttcaacctggccggcatcctgctgtggtacctggtgcctgcactgcggctgcccatcccgctggccaggcacttcggggtggtgaccgcccgttaccgctgg

SEQ ID NO: 729112 - DNA, 120 bp, Artificial Sequence
  ENSG00000198569_13 (sequence is synthesized)
gtggctggggtctacctgctgctcggattcctgctgctgcccctggcggccttcgggctctccctggcagggggcatggagctggccgctgtcgggggtcccctggtggggctggtgctc

SEQ ID NO: 729113 - DNA, 120 bp, Artificial Sequence
  ENSG00000198569_14 (sequence is synthesized)
ctcgtcatcctggttactgtcctgcagcggcgccggccggcctggctgcctgtccgcctgcgctcctgggcctggctccccgtctggctccattctctggagccctgggaccgcctggtg

SEQ ID NO: 729114 - DNA, 120 bp, Artificial Sequence
  ENSG00000198569_15 (sequence is synthesized)
acccgctgctgcccctgcaacgtctgcagccccccgaaggccaccaccaaagaggcctactgctacgagaaccctgagatcttggcctcccagcagttgtgacgggcagttgctgagcag

SEQ ID NO: 729115 - DNA, 120 bp, Artificial Sequence
  ENSG00000198569_16 (sequence is synthesized)
accgccccaccctccccggctgggagggctctggagggccctggagggggggtccccgcggcagctgacctccggtcacctgcttccccttctgtgcaaataaaccaggctgttatctgg

SEQ ID NO: 729116 - DNA, 120 bp, Artificial Sequence
  ENSG00000198569_17 (sequence is synthesized)
atggagacaaggcctaggggccttggggccaggagggtacccccgtgagggcctgggctcctgggtaaacattaatgggctcagtacccagcaggtcatgtgcgcgatcaggggatcttt

SEQ ID NO: 729117 - DNA, 120 bp, Artificial Sequence
  ENSG00000198570_0 (sequence is synthesized)
ttcatgcccattacagtattcccatgcccctcacagggcagtgtgcatctgttttagtgctacctaatgtctgttaggtgcaagctggcccacacatggcttctaggcagaacagtctac

SEQ ID NO: 729118 - DNA, 120 bp, Artificial Sequence
  ENSG00000198570_1 (sequence is synthesized)
aagtgacagcgtgaccagagagcagagacaggaaggaggcccagacatgagtgtgggatgctgcagaacagcaacaggatgcttctgctatccccaaatgttatctcaaatacctcaacg

SEQ ID NO: 729119 - DNA, 120 bp, Artificial Sequence
  ENSG00000198570_2 (sequence is synthesized)
tcaatgctttctgttccatgttcctcttctccctggacagcccctccttctgaaagtcagaactgtctgctcttgagcttgccttgagggaaggaaataatttagataagcagagaggaa

SEQ ID NO: 729120 - DNA, 120 bp, Artificial Sequence
  ENSG00000198570_3 (sequence is synthesized)
gacaggcaagggatgtggtggggcaaaggcggagatgtatcttcacaggtccctgtcctcagcacccagaatcaccccttccctgtaggagggagctgatagaaagaggggatctccatc

SEQ ID NO: 729121 - DNA, 120 bp, Artificial Sequence
  ENSG00000198570_4 (sequence is synthesized)
caggagccacccaccaggcagctggaaacatttgccaacagcaggtacacctagggctcagcagagggttgggtgagaatggtcttgcccagtttgtgccacactgagcaccggctggag

SEQ ID NO: 729122 - DNA, 120 bp, Artificial Sequence
  ENSG00000198570_5 (sequence is synthesized)
gaggaagcggacagaatgccatctggacacaagtgctccctcactgcctgggcctgggtcgcctcaggcttttgtgtcagatcagccactccctctacagataatgctgctccaggcaaa

SEQ ID NO: 729123 - DNA, 120 bp, Artificial Sequence
  ENSG00000198570_6 (sequence is synthesized)
gaggcttaggtgggtctccagggcaaccgcagctcaggagctggcccgcctccatggttcatcagggaagctgtggctccagcctcgcgggatacatacacgcatacacacacacacaca

SEQ ID NO: 729124 - DNA, 120 bp, Artificial Sequence
  ENSG00000198570_7 (sequence is synthesized)
cacacacacacacacacacacctacacaccccacaaacaatagtccaggctggatctctcctcctgtctcttctcttggtaaaacttctcagagaaccaaagagaggcaaaatttgaggc

SEQ ID NO: 729125 - DNA, 120 bp, Artificial Sequence
  ENSG00000198570_8 (sequence is synthesized)
tttgaggccagccggcagcagcagagaagctgagggagacttgaggatgtagactgccctgccctgctgtggctgctcaactttctttttttttcctgaaaatatccagacactctcttc

SEQ ID NO: 729126 - DNA, 120 bp, Artificial Sequence
  ENSG00000198570_9 (sequence is synthesized)
tcccagactgggaagcagaacgcaggccccctgctgtgacgctgcacctgagcagaggctgacctcagagcagggccaggggctatgtctctcatctcatggcttcggtggaacgaggcc

SEQ ID NO: 729127 - DNA, 120 bp, Artificial Sequence
  ENSG00000198570_10 (sequence is synthesized)
ccatcccggctgtccaccaggagccctgctgagatggtgctggagacgcttatgatggagctgacggggcagatgcgagaggctgagaggcagcagcgggagcgcagcaatgcggtcaga

SEQ ID NO: 729128 - DNA, 120 bp, Artificial Sequence
  ENSG00000198570_11 (sequence is synthesized)
aaggtctgcaccggtgtggactacagctggctggccagcacaccccggtccacctatgacctcagccccattgagcggttgcagctggaagatgtctgcgttaagatccacccatcctat

SEQ ID NO: 729129 - DNA, 120 bp, Artificial Sequence
  ENSG00000198570_12 (sequence is synthesized)
tgtgggcctgctatcctcaggttccggcagctgctggcggagcaggagcccgaggtgcaggaggtgtcccagctcttccgctcggtgctgcaggaggtcctggagaggatgaagcaggaa

SEQ ID NO: 729130 - DNA, 120 bp, Artificial Sequence
  ENSG00000198570_13 (sequence is synthesized)
gaggaggcccacaagctgacgcgccagtggagcctgcggccccgcggcagcctggccaccttcaagacccgcgcgcgcatctcgcccttcgccagcgacatcaggaccatctccgaggac

SEQ ID NO: 729131 - DNA, 120 bp, Artificial Sequence
  ENSG00000198570_14 (sequence is synthesized)
gtggagcgggacacaccgccgccactgcggtcctggagcatgcccgaattccgggcgcccaaagccgactgaccccggccgcttccctgcccagaagcggagccttctgcagggggaatg

SEQ ID NO: 729132 - DNA, 120 bp, Artificial Sequence
  ENSG00000198570_15 (sequence is synthesized)
ataggccggtgaccggagcgccgggccctggaacctccccacctaggcctgacgaggagacccaagaggcggccccatcccaagacgctgctataaaatgaagcgactccctgccccatc

SEQ ID NO: 729133 - DNA, 120 bp, Artificial Sequence
  ENSG00000198570_16 (sequence is synthesized)
ctcttcctctggccacaaagctgagttaggtcgtagagcggcaccgccctctccctctcctgcgctagtctgcaggagcagccccttccctaactggcagattcaaggttttggaagaca

SEQ ID NO: 729134 - DNA, 120 bp, Artificial Sequence
  ENSG00000198570_17 (sequence is synthesized)
gacctaggttctcaccccaatttcagggatgtcccattcacccccctacccccatccccaatgagaagggacctgttggctggtatgccttcttgctagtgactggctgagctcaccact

SEQ ID NO: 729135 - DNA, 120 bp, Artificial Sequence
  ENSG00000198570_18 (sequence is synthesized)
gcaggtgggtcacacacagcctcataggcaggcacagctggaagggaccagagagacatttagatccactctcttcagctagtaaatgtggaacttgaggctcagagagggacacttctt

SEQ ID NO: 729136 - DNA, 120 bp, Artificial Sequence
  ENSG00000198570_19 (sequence is synthesized)
ctgcctttaactgcagccagctcctcatgaacagtgagattgttcctgcatgaatagtgtctgttcctgagtttggaatcctgggctatgaagggacaggtccaaaggctacatctctac

SEQ ID NO: 729137 - DNA, 120 bp, Artificial Sequence
  ENSG00000198570_20 (sequence is synthesized)
ctacctgtggcctgatccatctcttaccttggcagtgggatgagaatctaagctgctctccaagaagtgtagctaggggtggaggtaggttactcattaccccacgccacaatgtcatcg

SEQ ID NO: 729138 - DNA, 120 bp, Artificial Sequence
  ENSG00000198570_21 (sequence is synthesized)
catgggctgtggccagtccctaacagcttcttccagaggctcagctccaaggacttcagatgctgccctaaagagcccaggtttctcaattccagggttccgctttctgcagctggtcac

SEQ ID NO: 729139 - DNA, 120 bp, Artificial Sequence
  ENSG00000198570_22 (sequence is synthesized)
acctgctctctggctttctccagaaagtgatgcccaaacccctgactgaccttgaggcagctgagtgaaatgttctagaagagcttcctgcagcttcattgtccttcccttttctaacat

SEQ ID NO: 729140 - DNA, 120 bp, Artificial Sequence
  ENSG00000198570_23 (sequence is synthesized)
ggttaggccttgatgatgggcatgtggattacccaatgtgtggatcacccatggaaaatctggaaggccaggaggccttcccacacactctggggttgaagtggggtgtaagggggatgg

SEQ ID NO: 729141 - DNA, 120 bp, Artificial Sequence
  ENSG00000198570_24 (sequence is synthesized)
gtggggaagtgtctaccctcaactaccagcacacatgcagaaaatgcaagtggaccttaatagtagcctaaataaaatacccggaggagatataatcaacaggggggaaaagtgtgtatt

SEQ ID NO: 729142 - DNA, 120 bp, Artificial Sequence
  ENSG00000198570_25 (sequence is synthesized)
ccctcagtggaaaaaagtttttttgaatgatttggttttgaacttcccttttgaagtttttttggattttcacttgaatctggacagagaatcataggatggtggaaaacctctgatcca

SEQ ID NO: 729143 - DNA, 120 bp, Artificial Sequence
  ENSG00000198570_26 (sequence is synthesized)
acactatcaagatgaaagagttgattggcttattaatgtaattggtagaagttgagaatcacttaaaatatacatcttaaacatcttacgtattttatttgaagacataaaaagttcact

SEQ ID NO: 729144 - DNA, 120 bp, Artificial Sequence
  ENSG00000198570_27 (sequence is synthesized)
tacagacatgagccactgtgcctggctgccaaacttttgatgtgggtccaagctgtgcttttttgtgacctatatgttttgtctggtgggagttctacacttaagttttcttggtttgca

SEQ ID NO: 729145 - DNA, 120 bp, Artificial Sequence
  ENSG00000198570_28 (sequence is synthesized)
gtctggtgggagttctacacttaagttttcttggtttgcactttaatcataacaataagaacaactggcgtaaaagagttttggaacaagcagaagtgacccttggtaagcagactgctc

SEQ ID NO: 729146 - DNA, 120 bp, Artificial Sequence
  ENSG00000198570_29 (sequence is synthesized)
agctggtaggggcaaaagtgttgggggaggattagaaaaaggcctccacattgtgggctttccgggtgccctggatgtgggtcagcaaatgttttagaggaagtagttaacctggaggga

SEQ ID NO: 729147 - DNA, 120 bp, Artificial Sequence
  ENSG00000198570_30 (sequence is synthesized)
gattcaaaggaggctggataagagaatgtctatttttctccttccctatcaccttacatgtacctattctccccaaagagaaggaagaccttaggctttcaatgtggtgttctttcttaa

SEQ ID NO: 729148 - DNA, 120 bp, Artificial Sequence
  ENSG00000198570_31 (sequence is synthesized)
gtttaagtaactggctgccaatgaaaaccttcccttcgagccgcaggcatgtggacagaatccaccaccctccttagacactcctcagactactacaggctatccccagctggtggctct

SEQ ID NO: 729149 - DNA, 120 bp, Artificial Sequence
  ENSG00000198570_32 (sequence is synthesized)
caaattcatgagggtccagaagttgttcctctggattcaggttgttaaagggactaatgaggtctgcttccattactattattgaaacctcaataaccacaaataaaagaacaaaaagtt

SEQ ID NO: 729150 - DNA, 120 bp, Artificial Sequence
  ENSG00000198573_0 (sequence is synthesized)
actgcgaagattcaaaacctacaaaagcctgccgctgacattgaagaaccaatatatacaatggacaaacaatccagtgccggcggggtgaagaggagcgtcccctgtgattccaacgag

SEQ ID NO: 729151 - DNA, 120 bp, Artificial Sequence
  ENSG00000198573_1 (sequence is synthesized)
cctgctccgaaaaaactaaaaacatctgagtcctcgaccatactagtggttcgctacaggaggaacgtgaaaagaacatctccagaggaactggtgaatgaccacgcccgagagaacaga

SEQ ID NO: 729152 - DNA, 120 bp, Artificial Sequence
  ENSG00000198573_2 (sequence is synthesized)
atcaaccccctccaaatggaggaggaggaattcatggaaataatggttgaaatacctgcaaagtagcaagaagctacatctctcaaccttgggcaatgaaaataaagtttgagaagctga

SEQ ID NO: 729153 - DNA, 120 bp, Artificial Sequence
  ENSG00000198574_0 (sequence is synthesized)
agaggaagaggtagctccacaggaggtacagctgcttacacatctctcctcagagctgtcccttgacttgggggtgaatttcaggccaacagggcttcctgggatacaagagcgttctcc

SEQ ID NO: 729154 - DNA, 120 bp, Artificial Sequence
  ENSG00000198574_1 (sequence is synthesized)
atggatctgccttactaccatggacgtctgaccaagcaagactgtgagaccttgctgctcaaggaaggggtggatggcaactttcttttaagagacagcgagtcgataccaggagtcctg

SEQ ID NO: 729155 - DNA, 120 bp, Artificial Sequence
  ENSG00000198574_2 (sequence is synthesized)
tgcctctgtgtctcgtttaaaaatattgtctacacataccgaatcttcagagagaaacacgggtattacaggatacagactgcagaaggttctccaaaacaggtctttccaagcctaaag

SEQ ID NO: 729156 - DNA, 120 bp, Artificial Sequence
  ENSG00000198574_3 (sequence is synthesized)
gaactgatctccaaatttgaaaaaccaaatcaggggatggtggttcaccttttaaagccaataaagagaaccagccccagcttgagatggagaggattgaaattagagttggaaacattt

SEQ ID NO: 729157 - DNA, 120 bp, Artificial Sequence
  ENSG00000198574_4 (sequence is synthesized)
gtgaacagtaacagcgattatgtggatgtcttgccttgaagataaggctgccggacaaagcaagttgaagagatgagtaacagttctcactgatgacccacttctgcaggcataggtcca

SEQ ID NO: 729158 - DNA, 120 bp, Artificial Sequence
  ENSG00000198574_5 (sequence is synthesized)
gagcaccaaactctagtggacaattcagactctcctggttgtgtaactgaagatgttctgcccaccagcaccagaggtcactctccacatccccgcctcccagacatataccaggagcaa

SEQ ID NO: 729159 - DNA, 120 bp, Artificial Sequence
  ENSG00000198574_6 (sequence is synthesized)
tttcaaaaccctctccagtttcactcttctttcttggaatgggacagcctgaacattttccctttgacttgttaaaggtaccaccctacatcatggttgacaccctcctttggaccatgc

SEQ ID NO: 729160 - DNA, 120 bp, Artificial Sequence
  ENSG00000198574_7 (sequence is synthesized)
agtcagaggggcagctttatacagaggaggggcacacttgtctgtgagtttgaagccctgagttccagtcctgtggctgtgtgactttgaacacgtttctgcccatctccaggtcttagt

SEQ ID NO: 729161 - DNA, 120 bp, Artificial Sequence
  ENSG00000198574_8 (sequence is synthesized)
ttctttgtctctgtggttgggtgggatgataaacattgccccagtctctctgttgagcctgcttgtgtcaggtgaaggtgagggatcgggagtgatggagatgcatacagatcagcacct

SEQ ID NO: 729162 - DNA, 120 bp, Artificial Sequence
  ENSG00000198574_9 (sequence is synthesized)
tctctgtacctgctggacccccatgtgcacccttctccctccagcctgggctactctcctcctggttctttctaatcttaaacttcctggtgagcattgccccagccacactttctccct

SEQ ID NO: 729163 - DNA, 120 bp, Artificial Sequence
  ENSG00000198574_10 (sequence is synthesized)
attccacttatgcatcagtcatttcaacagcatgaatgtggttctgtacagtgatgtatgtggagatttctaaaatattctatgtgtgatttctgttcccaactaggttctaagtgccat

SEQ ID NO: 729164 - DNA, 120 bp, Artificial Sequence
  ENSG00000198574_11 (sequence is synthesized)
caaagcacggttgggtctcccttgtatcttccacagtgtgtagaaatttgtgctgcccagagctgtgcctagttcatagaaactgactggaagcacattgctgagggaggtttgttgaat

SEQ ID NO: 729165 - DNA, 120 bp, Artificial Sequence
  ENSG00000198574_12 (sequence is synthesized)
tggtttttaaggtttactgaaattgatttgctgaatttttctgctagttcaaaatgtgaattaggacctggtcagtttgaaatataccaaattctatgccctttctcttacctatcatca

SEQ ID NO: 729166 - DNA, 120 bp, Artificial Sequence
  ENSG00000198574_13 (sequence is synthesized)
aattgtagtaatgtatttcaccccactggacttatcttcagagttttaaaagagaggagctctcgacttagaggtaatatgaacagatgaacagacactgtggctggagccccaaagtgt

SEQ ID NO: 729167 - DNA, 120 bp, Artificial Sequence
  ENSG00000198574_14 (sequence is synthesized)
ggagcattgtgagatttggggtcacagcaatttatggctactattccctgggtctggtaggtaggacaaatgtcctcttttacttttcaaaactggcttaggtattcatggaccttgatt

SEQ ID NO: 729168 - DNA, 120 bp, Artificial Sequence
  ENSG00000198574_15 (sequence is synthesized)
cttctatatacattttataataaatacgtgaaattgcttaaaacctctttttggaatttttaatgaacttgcaacaaatttgtaaataggagagaactgacgttcttgtgatgttttccc

SEQ ID NO: 729169 - DNA, 120 bp, Artificial Sequence
  ENSG00000198574_16 (sequence is synthesized)
atgcataaacatgccacatccatgttcttgggtcatcttttttgccctttcatggagtcataaattttcccaactgaagtcttgtatattctgttagattaattcctatttctagttgct

SEQ ID NO: 729170 - DNA, 120 bp, Artificial Sequence
  ENSG00000198574_17 (sequence is synthesized)
gtaaatgatatcttatgttttattacatttctaataggatatggtgttggtgaaatgttaaccctctcattagatctactagtttacctgttgattctattgtgttttctatgtaaatga

SEQ ID NO: 729171 - DNA, 120 bp, Artificial Sequence
  ENSG00000198574_18 (sequence is synthesized)
ttttgtcagctataaataataacattttattttctctttccttgcaatacctatgctcatttattttttatgtttacccattggttagggcctcctgtatacattaaacagttcatagtc

SEQ ID NO: 729172 - DNA, 120 bp, Artificial Sequence
  ENSG00000198574_19 (sequence is synthesized)
atgatagtgagtattcttacactgttcccagtattacagggaatgcttagaaattttctttatttaaacattatgtttgttgtagccttgttaaaggctattttataatttttactagaa

SEQ ID NO: 729173 - DNA, 120 bp, Artificial Sequence
  ENSG00000198574_20 (sequence is synthesized)
atattttgacatttattgtgatttttttctatctctaatctattgagatagtcacattccttttgtcttcactccattataaaggtaagttaccttaataaaattgttgatatcatttca

SEQ ID NO: 729174 - DNA, 120 bp, Artificial Sequence
  ENSG00000198574_21 (sequence is synthesized)
caacaacaacacaaaagttgggggagaagaacctgggaacatgtcttttacctgagccatgactgtgcgaaagcattctaaaaaggaaagcacaatgcagagatgagagtcagatcgagt

SEQ ID NO: 729175 - DNA, 120 bp, Artificial Sequence
  ENSG00000198574_22 (sequence is synthesized)
gtcagatcgagttaacctggtttttccctgaagagaaataggaaggttctaggcttgggttctactttttttgttgttgttttgttttttttagacggagtctcgctctgtcgtccaggc

SEQ ID NO: 729176 - DNA, 80 bp, Artificial Sequence
  ENSG00000198576_0 (sequence is synthesized)
gccggcccgcagcgacagacaggcgctccccgcagctccgcacgggacccaggccgccggaccccagcgccggaccaccc

SEQ ID NO: 729177 - DNA, 120 bp, Artificial Sequence
  ENSG00000198576_1 (sequence is synthesized)
cacgggacccaggccgccggaccccagcgccggaccaccctctgtccgccccgaggagtttgccgcctgccggagcacctgcgcacagatggagctggaccaccggaccagcggcgggct

SEQ ID NO: 729178 - DNA, 120 bp, Artificial Sequence
  ENSG00000198576_2 (sequence is synthesized)
ccacgcctaccccgggccgcggggcgggcaggtggccaagcccaacgtgatcctgcagatcgggaagtgccgggccgagatgctggagcacgtgcggcggacgcaccggcacctgctggc

SEQ ID NO: 729179 - DNA, 120 bp, Artificial Sequence
  ENSG00000198576_3 (sequence is synthesized)
cgaggtgtccaagcaggtggagcgcgagctgaaggggctgcaccggtcggtcgggaagctggagagcaacctggacggctacgtgcccacgagcgactcgcagcgctggaagaagtccat

SEQ ID NO: 729180 - DNA, 120 bp, Artificial Sequence
  ENSG00000198576_4 (sequence is synthesized)
caaggcctgcctgtgccgctgccaggagaccatcgccaacctggagcgctgggtcaagcgcgagatgcacgtgtggcgcgaggtgttctaccgcctggagcgctgggccgaccgcctgga

SEQ ID NO: 729181 - DNA, 120 bp, Artificial Sequence
  ENSG00000198576_5 (sequence is synthesized)
gtccacgggcggcaagtacccggtgggcagcgagtcagcccgccacaccgtttccgtgggcgtggggggtcccgagagctactgccacgaggcagacggctacgactacaccgtcagccc

SEQ ID NO: 729182 - DNA, 120 bp, Artificial Sequence
  ENSG00000198576_6 (sequence is synthesized)
actacaccgtcagcccctacgccatcaccccgcccccagccgctggcgagctgcccgggcaggagcccgccgaggcccagcagtaccagccgtgggtccccggcgaggacgggcagccca

SEQ ID NO: 729183 - DNA, 120 bp, Artificial Sequence
  ENSG00000198576_7 (sequence is synthesized)
gcagatcttcgaggaccctcgagagttcctgagccacctagaggagtacttgcggcaggtgggcggctctgaggagtactggctgtcccagatccagaatcacatgaacgggccggccaa

SEQ ID NO: 729184 - DNA, 120 bp, Artificial Sequence
  ENSG00000198576_8 (sequence is synthesized)
gaagtggtgggagttcaagcagggctccgtgaagaactgggtggagttcaagaaggagttcctgcagtacagcgagggcacgctgtcccgagaggccatccagcgcgagctggacctgcc

SEQ ID NO: 729185 - DNA, 120 bp, Artificial Sequence
  ENSG00000198576_9 (sequence is synthesized)
gcagaagcagggcgagccgctggaccagttcctgtggcgcaagcgggacctgtaccagacgctctacgtggacgcggacgaggaggagatcatccagtacgtggtgggcaccctgcagcc

SEQ ID NO: 729186 - DNA, 120 bp, Artificial Sequence
  ENSG00000198576_10 (sequence is synthesized)
caagctcaagcgtttcctgcgccaccccctgcccaagaccctggagcagctcatccagaggggcatggaggtgcaggatgacctggagcaggcggccgagccggccggcccccacctccc

SEQ ID NO: 729187 - DNA, 120 bp, Artificial Sequence
  ENSG00000198576_11 (sequence is synthesized)
ggtggaggatgaggcggagaccctcacgcccgcccccaacagcgagtccgtggccagtgaccggacccagcccgagtagagggcatcccggagcccccagcctgcccactacatccagcc

SEQ ID NO: 729188 - DNA, 120 bp, Artificial Sequence
  ENSG00000198576_12 (sequence is synthesized)
gccccctcgagctccgggcggactcgcacacactcgtgtcatccagatgtgagcaccgcacccagcggcaaagagccctcccccctgcagggctccacccatcaccctccctccgtctgt

SEQ ID NO: 729189 - DNA, 120 bp, Artificial Sequence
  ENSG00000198576_13 (sequence is synthesized)
ctttccggcctggaccccaccctccacactctcaggccatcacagaacaccccagcttcctcattctgctacaacacccaggccctctggacatccagaaaaccaagtgtccggatggca

SEQ ID NO: 729190 - DNA, 120 bp, Artificial Sequence
  ENSG00000198576_14 (sequence is synthesized)
ggggccagcggccaccaagctcatgggacacccagagcagaagctagggcagagccaatgctgagggagcctcgacttccggcgccgccgccctctcccggcatccgcagagccagctga

SEQ ID NO: 729191 - DNA, 120 bp, Artificial Sequence
  ENSG00000198576_15 (sequence is synthesized)
cgccctccctgcctcccagggcagctggccagcctcgggcagcgcggccccctcctcccaggggagagtagaagtcgcacacgcagcagagcagacctgatgtcccggtgcttcctggcc

SEQ ID NO: 729192 - DNA, 120 bp, Artificial Sequence
  ENSG00000198576_16 (sequence is synthesized)
cctcagctccagtgattcacgcccgcctggagaagaatcagagctcagctcatgactcacccatggcaggcggagggtcccagaggggctgagtcctcaaatccggctgaggcagcagct

SEQ ID NO: 729193 - DNA, 120 bp, Artificial Sequence
  ENSG00000198576_17 (sequence is synthesized)
ggcaccatcagagccaggagagtgacaacaggtctcaaggttcccacaaagtctttgctgctgtgctgggcaccacccacccctcaccttgcaggctgcctgcgtgggaggcgaagtccc

SEQ ID NO: 729194 - DNA, 120 bp, Artificial Sequence
  ENSG00000198576_18 (sequence is synthesized)
aggacagcccagaggggggctacagagaggagtcggctgcagcagagggcaggagccccagcttagccctgagcgccagcgcgaggaccagggcctgccactaagcccgccccgctggcc

SEQ ID NO: 729195 - DNA, 120 bp, Artificial Sequence
  ENSG00000198576_19 (sequence is synthesized)
gccagctgcccgtccccagagccactgcagcaggagtcgggccctgcctccctcccagcagggaaaccccgcccgctgccaggccatcctctctgccagaggctttcatgagccccaagg

SEQ ID NO: 729196 - DNA, 120 bp, Artificial Sequence
  ENSG00000198576_20 (sequence is synthesized)
ctggggccacagctcctacccctgcccagcagccctgagctcagctgcaggaaggacatcccagaagccatggctcctggggcgcttccaggcattctgccctgccccgacaccagaacc

SEQ ID NO: 729197 - DNA, 120 bp, Artificial Sequence
  ENSG00000198576_21 (sequence is synthesized)
ctggtgctggtgggccactagcgtctgcagcctaagcaggtgctggctcagggttcatcgttctgccttgtccactgggggaccagccctgcagaccactctgacaagtcttcagcccac

SEQ ID NO: 729198 - DNA, 120 bp, Artificial Sequence
  ENSG00000198576_22 (sequence is synthesized)
accctgccagccccacagattttatttttgcacataagccataaccaatcctcaaggctggcacaggctttggggaagccctggagcctgtgaagaccctggaaacctcatgaggctgtg

SEQ ID NO: 729199 - DNA, 120 bp, Artificial Sequence
  ENSG00000198576_23 (sequence is synthesized)
gccaacccctgccccttgccccacacagaccaggccttaaatgtcggtccaggccctgtgcaccttaccccagagacagactctttttgtaagattttgttaataaaacactgaaacttc

SEQ ID NO: 729200 - DNA, 120 bp, Artificial Sequence
  ENSG00000198585_0 (sequence is synthesized)
cttcgggacagcagaggagcagtgtccggccatggccggagcccgcaggctggagctaggcgaggccctggcgctggggtcgggctggcgtcatgcgtgccacgctctcctctacgcgcc

SEQ ID NO: 729201 - DNA, 120 bp, Artificial Sequence
  ENSG00000198585_1 (sequence is synthesized)
ggaccctgggatgctcttcggccgcatcccgctgcgctacgccatactgatgcagatgcgcttcgatggacgcctgggcttccccggcggattcgtggacacgcaggacagaagcctaga

SEQ ID NO: 729202 - DNA, 120 bp, Artificial Sequence
  ENSG00000198585_2 (sequence is synthesized)
ggacgggctgaaccgcgagctgcgcgaggagctgggcgaagcggctgccgctttccgcgtggagcgcactgactaccgcagctcccacgtcgggtcagggccacgcgttgtggcccactt

SEQ ID NO: 729203 - DNA, 120 bp, Artificial Sequence
  ENSG00000198585_3 (sequence is synthesized)
ctatgccaagcgtctgacgctcgaggagctgttggctgtggaggccggcgcaacacgcgccaaggaccacgggctggaggtgctgggcctggtgcgagtgcccctgtataccctgcggga

SEQ ID NO: 729204 - DNA, 120 bp, Artificial Sequence
  ENSG00000198585_4 (sequence is synthesized)
tggtgtaggaggcctgcctaccttcctggagaattcctttattggctctgcgcgggagcagttacttgaagctctccaggacttgggactgctgcagtctggctctatttcaggccttaa

SEQ ID NO: 729205 - DNA, 120 bp, Artificial Sequence
  ENSG00000198585_5 (sequence is synthesized)
gattccagctcatcactagaggcagccctccatggacccatgaaaactgagatgaggaccttggtactagggagggagggaaggacgtgggaatgttttcttattggatctgagagatga

SEQ ID NO: 729206 - DNA, 120 bp, Artificial Sequence
  ENSG00000198585_6 (sequence is synthesized)
tacatgataccagatgaaaagaaggagaagtgtgtaccatatgttttgagcagaggaccctccaacttatggcatcaggggcaaaaagtcacagcttatcccaggcaccctggcaggttc

SEQ ID NO: 729207 - DNA, 120 bp, Artificial Sequence
  ENSG00000198585_7 (sequence is synthesized)
tcagagcctgcctcctccctgtttatatgcgtacagcctggtaacccccaggcatgcaaatatacaatctgtaacaacacacagcctgacaccttcccctggtcatgtccagtttaacct

SEQ ID NO: 729208 - DNA, 120 bp, Artificial Sequence
  ENSG00000198585_8 (sequence is synthesized)
tgaagtggcatttgtcacactaccctggtccctgattgcaaggagcttctgaagcaagggtgaatccttcccacactcctccatggttgccctccagggtctagcccagcctatttgtta

SEQ ID NO: 729209 - DNA, 120 bp, Artificial Sequence
  ENSG00000198585_9 (sequence is synthesized)
gggaggatagagaaacagagcaccccctgtgctttctgaaaatagacttgctcttgtcttgagtggtgaccaaagcagttggctcttaaaaggtgggagagcagcccaaccaatccccaa

SEQ ID NO: 729210 - DNA, 120 bp, Artificial Sequence
  ENSG00000198585_10 (sequence is synthesized)
tccttttcttctgaaactgagcaggaagggtaaggaagtggctaggtctccttggactgagcatggacatgagtcctgtgaggactggtgtctctcctctagagctttcatctttgggat

SEQ ID NO: 729211 - DNA, 120 bp, Artificial Sequence
  ENSG00000198585_11 (sequence is synthesized)
gcctgagactccgagactatcagaagggaattgacccaccccagtctagcaccaccctgccttcacttcatctacataaaggtggtataaaaacatagactggaggaggtaatccatgga

SEQ ID NO: 729212 - DNA, 120 bp, Artificial Sequence
  ENSG00000198585_12 (sequence is synthesized)
gagagaaaaagaagagggctcaggacaaggccctgaggaggcccaatcctaaaagtttgggcagagggaaccaggcacgttaaagaagacagaaagcggactatgcagagtgcttgtgag

SEQ ID NO: 729213 - DNA, 120 bp, Artificial Sequence
  ENSG00000198585_13 (sequence is synthesized)
ggtttcactaaaacagaggcaaaactgtccattgaattcagtaacatgaagtgtttgatgactatgatggcagcagtttcaggaagggcggtatggaaggcaggctgtactggttgagtg

SEQ ID NO: 729214 - DNA, 120 bp, Artificial Sequence
  ENSG00000198585_14 (sequence is synthesized)
aatggaaagttggggagtagaacgtgtgagaagttggccttcaaggggctcaggttaataatagagagctatggagtcaaggcatgtttaagatgggaggtagagcatgccaatattgat

SEQ ID NO: 729215 - DNA, 120 bp, Artificial Sequence
  ENSG00000198585_15 (sequence is synthesized)
ggcaacagtcaagatggtgtgatgagagagatgggaggggcacaaagaggaggacccctgaaggagcagagtccatgagaaagaaggagggatgggacctttgtaggaagagacacagtc

SEQ ID NO: 729216 - DNA, 120 bp, Artificial Sequence
  ENSG00000198585_16 (sequence is synthesized)
ctgcagcctcatatggctcaataaaacagaaaggggcaagtatagaagattaggatgactaaattaatggggaaatgatgaaggagtttgaatctcttctttgtgaaatgaagtgagact

SEQ ID NO: 729217 - DNA, 120 bp, Artificial Sequence
  ENSG00000198585_17 (sequence is synthesized)
atcagctagttgtgggtggagtgtgttctcagaaggtatgaagtagatgttttcctaggtgttggaaaacaggttgattaaggcaacagcagaagggcagggcaaggctgagctctgaga

SEQ ID NO: 729218 - DNA, 120 bp, Artificial Sequence
  ENSG00000198585_18 (sequence is synthesized)
tggtcagtttagagtaggatgctgggcactcaggtgtgtgtgtgttgagtggggctctgcacacacctgtcttcccctcatcaggattcaggagctgggatgggtacacttactgcagtg

SEQ ID NO: 729219 - DNA, 120 bp, Artificial Sequence
  ENSG00000198585_19 (sequence is synthesized)
ttggggttttgccagggaagtaaaaggagttgagagaaagatgggtcagttcagaagacatacacaggagaaattgtagtgatgaaatgtgcagtctaaggtttaatctgaccaagaaat

SEQ ID NO: 729220 - DNA, 120 bp, Artificial Sequence
  ENSG00000198585_20 (sequence is synthesized)
tggaattgaaaacaggaggtgactagggagggattaggaaattagaggtcttgacaagatagaaactccagcatggtgaggggttgggcagggaggtatatttgagccagacaggagtgc

SEQ ID NO: 729221 - DNA, 120 bp, Artificial Sequence
  ENSG00000198585_21 (sequence is synthesized)
tttggaaattgagaggtggagcaatctcaggtaaaggcaaaatagagggtatgacctggggttgctggccagagccagggaggagccttaagaagtgaaatctagggttggcgaggctgg

SEQ ID NO: 729222 - DNA, 120 bp, Artificial Sequence
  ENSG00000198585_22 (sequence is synthesized)
agggcagggtgagcctccacatgggtgctgaagcaagaaaccgacagatgttgaggagaatggtgtgacctaggagtcagcatccttggtgaacaagaggagtggccacaaggccagtgg

SEQ ID NO: 729223 - DNA, 120 bp, Artificial Sequence
  ENSG00000198585_23 (sequence is synthesized)
cacctgccagaggggaaagcaggcatgacaggatagcatctcccaggtgagagccttttgaggaagggagggtgggcagtggtctggaagcttgatgcagagcagtgtgggtcccactgg

SEQ ID NO: 729224 - DNA, 120 bp, Artificial Sequence
  ENSG00000198585_24 (sequence is synthesized)
cagcccttggtcttagaagaatgggagtacccagtgggggagcagctgtacaatgaggtagactcctagaggttaattatcatctcctaatcttaccctgacccttttgtcaaacgttat

SEQ ID NO: 729225 - DNA, 120 bp, Artificial Sequence
  ENSG00000198585_25 (sequence is synthesized)
tcatctctgcaagggaccctgacgcctgggagatcagagccactgaccctttatggcactgctaacagaccccttccctcaggtaattctggatccagaactcattatgggatgtaatcc

SEQ ID NO: 729226 - DNA, 120 bp, Artificial Sequence
  ENSG00000198585_26 (sequence is synthesized)
aggtcaacactaataccacttggaaggttccgctctgtctcactctgcttgagtatcccactgatcagtctctcagtgcctgcctactgggcagctcatctgtccacttattcgtattaa

SEQ ID NO: 729227 - DNA, 120 bp, Artificial Sequence
  ENSG00000198585_27 (sequence is synthesized)
atttgctttttatttaggtctctggagatggttgcgtggggaagagcccatgactttcctatatgatcccttgaacatactctccaagtcagtagattacctctcaggcagccttcataa

SEQ ID NO: 729228 - DNA, 120 bp, Artificial Sequence
  ENSG00000198585_28 (sequence is synthesized)
aagtgtttcactgtactggggtttgtgttcatctcactcacatagacagtctctgggtaggcaggtggggggtgatacaagttcacactctgtgtttctcctcctgttagccattcccac

SEQ ID NO: 729229 - DNA, 120 bp, Artificial Sequence
  ENSG00000198585_29 (sequence is synthesized)
cctgctgatgtttaaggaaagccagggatgatgacccacttaagctttccttggccttgttaagtccaatcatctggggcaggaagaagagaaatgctcattgcaatctttgacccccac

SEQ ID NO: 729230 - DNA, 120 bp, Artificial Sequence
  ENSG00000198585_30 (sequence is synthesized)
taactgctgtggtgactttgacccaagcccttgacctccttttccttatctgaaatgttgctgtgattcctgtggtgagatcagatgaggcagcacttgggataagcttgcagagatgca

SEQ ID NO: 729231 - DNA, 120 bp, Artificial Sequence
  ENSG00000198585_31 (sequence is synthesized)
ttgagcggtatgaaagtacaggatgctatgtactttcctgcttcacagcacattttgtttcttgcaaggtgagtggcccagccgcctctccacaaacacgtgtttctgcctttctcagca

SEQ ID NO: 729232 - DNA, 120 bp, Artificial Sequence
  ENSG00000198585_32 (sequence is synthesized)
taatcagcaagatgttcccacttctcagcattgcacttttctgctggtgcagaataaaaacactttgagccccaccctgtcctgagacaaagtcctctgtggtcacttggcatatggcaa

SEQ ID NO: 729233 - DNA, 120 bp, Artificial Sequence
  ENSG00000198585_33 (sequence is synthesized)
agctgctgctgtgggctggaacatttgaggcaacagtgacttcctcctttcctagttaccggaacccttagagctgggagccggccagtgaaacagacaaggggaggggaagagaagagg

SEQ ID NO: 729234 - DNA, 120 bp, Artificial Sequence
  ENSG00000198585_34 (sequence is synthesized)
gaaggcatgtttcctatatgagtttcagtttgttgcacagaaatgtttttgaaacctttatctccaatagaatcacaaacgggtgtcagagagtcaaaactagaggaaaaagtttagtct

SEQ ID NO: 729235 - DNA, 120 bp, Artificial Sequence
  ENSG00000198585_35 (sequence is synthesized)
gtaaacaaatcattagatggcatcagaatttgaaccaaagtaaaagatgctggaccttggcacttatcagagaagtatagaagagccaggtaggggattttatttacaacatgttcaatt

SEQ ID NO: 729236 - DNA, 120 bp, Artificial Sequence
  ENSG00000198585_36 (sequence is synthesized)
ctgaggaagaggagtatgggcagggcagaggaaaaaggaaaaatgggaaacccccatggacttagggcccccacaaagagaaaccatgtgccttctccccacttcccttctggcttgggc

SEQ ID NO: 729237 - DNA, 120 bp, Artificial Sequence
  ENSG00000198585_37 (sequence is synthesized)
aaatgaggctccctttaggggtagaggtactctacaggggctatgttccctttaggggtagaggtagtctacaggggccagctgggcagagatgaaatcttgcaaaggaacccttcttac

SEQ ID NO: 729238 - DNA, 120 bp, Artificial Sequence
  ENSG00000198585_38 (sequence is synthesized)
actcgaaaagcaagaatagcaaagggactttgggaaggacataaaacaagaaaaggaagctcctcaccaacagctcccagatggagggagtttgtgtgtctagcattttcaccaaagtgc

SEQ ID NO: 729239 - DNA, 120 bp, Artificial Sequence
  ENSG00000198585_39 (sequence is synthesized)
tgctcatcctgatgcacagatgcagattggagctgctgcctgtgccctcaccatgggtatgtacccaccacaggcattcccaggtgatgcgggggcagaggattccctctttccactcag

SEQ ID NO: 729240 - DNA, 120 bp, Artificial Sequence
  ENSG00000198585_40 (sequence is synthesized)
gataacaacccctcgatggggttttcaacaagtatagaaagctcctggactcagccaagaccctcacctacagtcccagtcctcccaccttcttcaggtctctagaagacagaactgatg

SEQ ID NO: 729241 - DNA, 120 bp, Artificial Sequence
  ENSG00000198585_41 (sequence is synthesized)
ggtttacaacatcctattatccagcactagtcctaggttgtggatgtagggaaaggccaggtaaacaaggaagggagaacaggtgaatgaccccaattgtttgaaaccaaaagagcagaa

SEQ ID NO: 729242 - DNA, 120 bp, Artificial Sequence
  ENSG00000198585_42 (sequence is synthesized)
ttgcccctaattgatttaagtaaacagcaagtaacataggtctgttaaatagaagaggatgtgagcaccagatgcacgtgataaagaccatgctctggaagattcattccaaggagtaga

SEQ ID NO: 729243 - DNA, 120 bp, Artificial Sequence
  ENSG00000198585_43 (sequence is synthesized)
agtggtatttactcagggcatttaaggagagcagggactctgaaatgaggtgagagaaaagataagacatgcaggaacagctggcaacaccaagaaagaatttaaggagagggatctctc

SEQ ID NO: 729244 - DNA, 120 bp, Artificial Sequence
  ENSG00000198585_44 (sequence is synthesized)
tgttagagaacttaacattaccctaggaacagcaagagcatcatcagccccaggaaaatctacctctgatatggagaccaggcttaagaaaatcccctagaacccagagaaaaagtgcaa

SEQ ID NO: 729245 - DNA, 120 bp, Artificial Sequence
  ENSG00000198585_45 (sequence is synthesized)
aacaaggaaaatggccaaagagaatatcatagatacagagatcagacaatgagaatccagagtcttgttaagtgatagaaggaaaatactaacagaacacatgtaacaggaacaacattt

SEQ ID NO: 729246 - DNA, 120 bp, Artificial Sequence
  ENSG00000198585_46 (sequence is synthesized)
tagaggaaacaggacaaaaacttccctaaactcaagatactacaccagaagtgggcagtactcactatgttcaggggaacaaaaagataaaaactaaaaagcatcagactgttttttgtg

SEQ ID NO: 729247 - DNA, 120 bp, Artificial Sequence
  ENSG00000198585_47 (sequence is synthesized)
tgaaggaaatttgtaaggtaggagaattaggtcacttactacagcacaaattgcatgtctatctaaattgacgtttaagtgcaaaagcatggatattactcatgcagttttactggaaaa

SEQ ID NO: 729248 - DNA, 120 bp, Artificial Sequence
  ENSG00000198585_48 (sequence is synthesized)
ccatacagatgtttttcaggaatgtacagaatgaatcaaaggaaataactgatcgacaggaaaactgtaggaaatttgtgggctggctgtgaggcagtggctcctattatgtacaatttt

SEQ ID NO: 729249 - DNA, 120 bp, Artificial Sequence
  ENSG00000198585_49 (sequence is synthesized)
agtgctaagtactgtgttaatgatggctatcaaacaatatgttaacatctgaaaggaaatatgtatattgagcataataaatattttataaataacaataaatcatttgattttatgcta

SEQ ID NO: 729250 - DNA, 120 bp, Artificial Sequence
  ENSG00000198585_50 (sequence is synthesized)
aggcgcctaggttcctccccttatccctgcagggattgggccttgcagcaccgcccaggctcggattggtccgagatgcagatgcgcttcgatggacgcctgggcttccccggcggattc

SEQ ID NO: 729251 - DNA, 120 bp, Artificial Sequence
  ENSG00000198585_51 (sequence is synthesized)
ctttctctcccccaagaaagcatccctggagaaaagtctttgcccctctgaccttgccctctccccagctttcttggtggagttgggatcgtgatcatctatactctgaattagtactgc

SEQ ID NO: 729252 - DNA, 120 bp, Artificial Sequence
  ENSG00000198585_52 (sequence is synthesized)
caacctgggctttctgtaaaggtctttcccaccctttaccaggagagatcctttctagaacacactcatccatgtctctctgctgttccctattgacagtgtgatagattatcacattat

SEQ ID NO: 729253 - DNA, 120 bp, Artificial Sequence
  ENSG00000198585_53 (sequence is synthesized)
caaaatttggcaggtagcagaatcatcggggcgtcttattaaaatagcgatttctctcagcattcctgcattggtggtggggcggggggagaggaaacctgagaatttgtagttttcaaa

SEQ ID NO: 729254 - DNA, 120 bp, Artificial Sequence
  ENSG00000198585_54 (sequence is synthesized)
agttcccaaataatgctgatgcaaataatctgaggaccacattttgacaaccactggtgaaagggtatgaatacatctttgaggcagtagccactagaggtttagaagcagatgtgggaa

SEQ ID NO: 729255 - DNA, 120 bp, Artificial Sequence
  ENSG00000198585_55 (sequence is synthesized)
agattaattgatagagctagataatatgttttgggtcattttcctgcagaaggttgggccactaggctttagtgaggtgtgagccttgggcctggttctgctggagtattaaggggtgag

SEQ ID NO: 729256 - DNA, 120 bp, Artificial Sequence
  ENSG00000198585_56 (sequence is synthesized)
gcctgatctgctggagaaaggatggagttaagggaatgagccacctggggccctagtgtctcctgtctccttccttttacaggtgctgggcctggtgcgagtgcccctgtataccctgcg

SEQ ID NO: 729257 - DNA, 120 bp, Artificial Sequence
  ENSG00000198586_0 (sequence is synthesized)
gcagaggttaccccaccgcctcagccgccacccacagcccgccgccgccgcctcccgggcgacgccgggggccgacgcactgcagaggtgccggcaggttccgcccgcggaagtgtcctc

SEQ ID NO: 729258 - DNA, 120 bp, Artificial Sequence
  ENSG00000198586_1 (sequence is synthesized)
cagcccgcgctccgcccgcgctccgaccccggcccggctggcaccccctcgacgcctccgccgccgcgctcctttcctcctcctctcctctggcgcgcccgctcgctccctcgcttctcc

SEQ ID NO: 729259 - DNA, 120 bp, Artificial Sequence
  ENSG00000198586_2 (sequence is synthesized)
gcttctccccctttccctcctccctgtcccctctccttccctcacctctttcctccccacctcccctcttctcggtttcctcccccatccccttgactctcccctcccagccctcgctct

SEQ ID NO: 729260 - DNA, 120 bp, Artificial Sequence
  ENSG00000198586_3 (sequence is synthesized)
ctcgctcgccctcagcgcggcccccgccatgacggaggcgggtgccggtgccgttgccgccgctgccgtcgcagggggggagtcgggttcccagaaagtagcttgatgagtgtccaaagt

SEQ ID NO: 729261 - DNA, 120 bp, Artificial Sequence
  ENSG00000198586_4 (sequence is synthesized)
agcagtggaagtttggaggggccgccatcttggtcccagctctccacgtctccaaccccgggctcggcggcggcggccaggtccctgctgaatcacacgccgccatccgggaggcccagg

SEQ ID NO: 729262 - DNA, 120 bp, Artificial Sequence
  ENSG00000198586_5 (sequence is synthesized)
gaaggtgcaatggatgagcttcatagtctggatccaagaaggcaagagttattggaagctagatttactggagttgcaagtgggagcactggaagtacgggcagttgcagtgttggagct

SEQ ID NO: 729263 - DNA, 120 bp, Artificial Sequence
  ENSG00000198586_6 (sequence is synthesized)
aaagcctcaacaaataacgaaagctctaatcacagttttggaagcttgggatctttaagtgacaaagaatcagagacaccggagaagaaacaatcggaatcatccaggggaagaaagaga

SEQ ID NO: 729264 - DNA, 120 bp, Artificial Sequence
  ENSG00000198586_7 (sequence is synthesized)
aaagcagaaaaccagaatgaaagtagtcagggaaaaagtattgggggacgtggccacaaaattagcgactattttgaataccagggtggaaatggctcaagtccagtaagaggcatacct

SEQ ID NO: 729265 - DNA, 120 bp, Artificial Sequence
  ENSG00000198586_8 (sequence is synthesized)
cctgcaatccgttctcctcaaaattcacattcacattccactccttcctcatctgttcgaccgaatagcccttctcctactgcattagcatttggggaccaccctattgtacaaccaaag

SEQ ID NO: 729266 - DNA, 120 bp, Artificial Sequence
  ENSG00000198586_9 (sequence is synthesized)
caattatcctttaaaattattcagactgatctcacaatgctgaaattagcagcattagaaagtaataaaatccaggacctggaaaagaaggagggacgtatagatgatttgctcagggct

SEQ ID NO: 729267 - DNA, 120 bp, Artificial Sequence
  ENSG00000198586_10 (sequence is synthesized)
aactgtgatctcagacggcaaatagatgaacaacaaaaattacttgaaaaatacaaagaacgattaaataagtgcatatcaatgagcaagaaacttcttattgaaaagagtacacaagaa

SEQ ID NO: 729268 - DNA, 120 bp, Artificial Sequence
  ENSG00000198586_11 (sequence is synthesized)
aagctgtcaagcagagagaagagtatgcaagatcgattacgcctcgggcactttacaacagttagacatggcgcttcatttactgaacaatggacagatggttttgcatttcagaatctt

SEQ ID NO: 729269 - DNA, 120 bp, Artificial Sequence
  ENSG00000198586_12 (sequence is synthesized)
gtgaagcaacaagaatgggtgaatcagcaaagggaagatattgaaaggcaaaggaaacttctagccaaacgcaaacctcccacagctaataattctcaggcaccctctaccaattctgaa

SEQ ID NO: 729270 - DNA, 120 bp, Artificial Sequence
  ENSG00000198586_13 (sequence is synthesized)
ccaaaacaaaggaaaaacaaagcagtcaatggagcagagaatgatccctttgttagaccaaatttaccacaactgttgactttggcagaatatcatgaacaggaagaaattttcaaactt

SEQ ID NO: 729271 - DNA, 120 bp, Artificial Sequence
  ENSG00000198586_14 (sequence is synthesized)
agactaggacatctcaaaaaggaagaggcagaaatccaggcagaacttgaacgtttggaaagagtcagaaatcttcacatacgtgagctgaaaagaataaacaatgaagataattcacag

SEQ ID NO: 729272 - DNA, 120 bp, Artificial Sequence
  ENSG00000198586_15 (sequence is synthesized)
ttcaaagatcacccaacattaaatgaaagatatttattacttcatctgcttggtagaggtggctttagtgaagtgtataaggcttttgacctttatgaacaaagatatgctgctgtgaag

SEQ ID NO: 729273 - DNA, 120 bp, Artificial Sequence
  ENSG00000198586_16 (sequence is synthesized)
atacatcagcttaataaaagctggagagatgagaagaaagaaaactaccacaaacatgcctgcagagagtatagaatacacaaagaactggatcaccccagaatagttaaactctatgat

SEQ ID NO: 729274 - DNA, 120 bp, Artificial Sequence
  ENSG00000198586_17 (sequence is synthesized)
tatttctccttggatacagatacgttttgtacagtgttagaatactgtgaaggcaatgacttggatttctatctgaagcaacacaagttaatgtcagagaaagaagctcggtctattgta

SEQ ID NO: 729275 - DNA, 120 bp, Artificial Sequence
  ENSG00000198586_18 (sequence is synthesized)
atgcagattgtaaatgcactaagatatctcaatgagatcaaaccccctattatacattatgatcttaagccaggaaacatcctactggtagatggaacagcatgtggtgaaatcaaaatc

SEQ ID NO: 729276 - DNA, 120 bp, Artificial Sequence
  ENSG00000198586_19 (sequence is synthesized)
actgattttggtctgtccaagattatggatgatgatagctatggtgtagatggaatggatctaacttcccagggggcaggcacttactggtatttacctcctgagtgttttgtagttgga

SEQ ID NO: 729277 - DNA, 120 bp, Artificial Sequence
  ENSG00000198586_20 (sequence is synthesized)
aaagagccaccaaagatttccaacaaggttgatgtatggtcggttggagtcatcttctttcagtgtctttatggtagaaagccatttggtcacaatcaatctcaacaagacattcttcaa

SEQ ID NO: 729278 - DNA, 120 bp, Artificial Sequence
  ENSG00000198586_21 (sequence is synthesized)
gaaaatacaatattaaaagccacagaagtccagttccctgtaaaaccggttgtaagcagtgaagccaaggcatttataagacgctgtttggcatatcgaaaagaagatcgatttgatgtg

SEQ ID NO: 729279 - DNA, 120 bp, Artificial Sequence
  ENSG00000198586_22 (sequence is synthesized)
caccagctggcaaatgacccataccttctcccacacatgagaagatcaaattcttcaggaaacctacacatggctgggctgacagcatcccctacacccccttcttcaagcataattact

SEQ ID NO: 729280 - DNA, 120 bp, Artificial Sequence
  ENSG00000198586_23 (sequence is synthesized)
ttttttttttttttttttttttacacaagacgtggttaagaactgtttgtgaactgaagttcctcatagtgtcatttgtatgagagaggatcatggacaatgaataaatgcacacttctg

SEQ ID NO: 729281 - DNA, 120 bp, Artificial Sequence
  ENSG00000198586_24 (sequence is synthesized)
tgcacacttctgactataattttgagcagtgaaggaaggatgactgcctgttacacagaaacaggaataccatgttaagatagaggaaaaaaattttgtttatttgggggaacactgtaa

SEQ ID NO: 729282 - DNA, 120 bp, Artificial Sequence
  ENSG00000198586_25 (sequence is synthesized)
ataacgtttataatacttaaatacatttggttgttactagagagttctaatatgaagggtagtttttcattatttaaaaacacatggaaaaatatgagacatatttctaacatacgaact

SEQ ID NO: 729283 - DNA, 120 bp, Artificial Sequence
  ENSG00000198586_26 (sequence is synthesized)
atagtgcctggatacattcttcagcatttggcagttaatctgctgaaaccaaagtaagaactgaatgacagtgacagttgtgttttatagtaatagaatgtgagagttagaatctttgga

SEQ ID NO: 729284 - DNA, 120 bp, Artificial Sequence
  ENSG00000198586_27 (sequence is synthesized)
caaagttaggctttgtcatttgcctattcagacttttaccaagttgtacctcgagatcacatgtccgttttctttcactggttatattaaagggagagctattatttctaaatactttac

SEQ ID NO: 729285 - DNA, 120 bp, Artificial Sequence
  ENSG00000198586_28 (sequence is synthesized)
acctttgacaaaatgagctgcttgtgttgaaatcagttgaattcactaaattataatattgccagtgttttcaacacgttagaattgataacaggtatttttcttttgttaccaggcctt

SEQ ID NO: 729286 - DNA, 120 bp, Artificial Sequence
  ENSG00000198586_29 (sequence is synthesized)
gttcatcaaaacaggtgacagtgagtaaccaaatgcagaccagttctatgcaggataatgataaattcccttctagctctattgtaaattgttgtacagatgtcatatttcaattactaa

SEQ ID NO: 729287 - DNA, 120 bp, Artificial Sequence
  ENSG00000198586_30 (sequence is synthesized)
gtttcagcagcttattcttgtacaaatgtttaaaatatggcttttctaattggatattgtattttttttaagtcttcttgaaggcactctaattgctgctaaatgatgttgcttctttgc

SEQ ID NO: 729288 - DNA, 120 bp, Artificial Sequence
  ENSG00000198586_31 (sequence is synthesized)
taaaaaattaaatgacctagaaggtgcaagttgactgtacatcatagatattaaaaagcagacagtcattaacaatcaagatgtaaaagtgatccatgttggacataattgagtttttaa

SEQ ID NO: 729289 - DNA, 120 bp, Artificial Sequence
  ENSG00000198586_32 (sequence is synthesized)
atcagtttattgggttctagggctgtagaacacatagatactagatttttaatttgttcatggttattctacatttctagaaagttcttatcagcaagatggtcccataagcaaatttct

SEQ ID NO: 729290 - DNA, 120 bp, Artificial Sequence
  ENSG00000198586_33 (sequence is synthesized)
tgtggtttgtacagatttgttaaaatgtgaacgttttctaactgcctcgtagggtagaaaccaatatttttcaggatgctgtatttcactcctgtaaggactttttctttattgtcacat

SEQ ID NO: 729291 - DNA, 120 bp, Artificial Sequence
  ENSG00000198586_34 (sequence is synthesized)
tcataatgctgatacttacatgtaagttgttcatgttgcagaaaaaggttatacgtaccacggattctctttaatattgtacagttaaactgtatttctgatgttgcaagccattttgtt

SEQ ID NO: 729292 - DNA, 120 bp, Artificial Sequence
  ENSG00000198586_35 (sequence is synthesized)
ttttcattgtacatagacacattgtctctttaaaatgctgctgaaattgtagagagtatagccaaaacagtaataaacaatgacagttaaaatgtaaagactatgaaaattacattggaa

SEQ ID NO: 729293 - DNA, 120 bp, Artificial Sequence
  ENSG00000198586_36 (sequence is synthesized)
gggagctttcaagatggtaggatattgactaactgagctccttcacttaaaaatcagctgaataaattccttaagtatacttcaagacaagtgtaaattgtttcaagctgttaaagttaa

SEQ ID NO: 729294 - DNA, 120 bp, Artificial Sequence
  ENSG00000198586_37 (sequence is synthesized)
acctaataaccattatcaaggcaactcctgggtaagtaacacttagaaccatcaagagtggtttaaggggctggctatacccattcctctgtagagcacagagaaatcctattaaaaaaa

SEQ ID NO: 729295 - DNA, 120 bp, Artificial Sequence
  ENSG00000198586_38 (sequence is synthesized)
aaatactacatggtaatgaaatcttagcattgattgagtgctttacgtgctgcctgcaagttttcagttttgttgttagagttttcgtctttatgaatgataaagtcctatgttcataaa

SEQ ID NO: 729296 - DNA, 120 bp, Artificial Sequence
  ENSG00000198586_39 (sequence is synthesized)
gtaacatttaaattcctgaactaaaaggaaatgcctgttgtgcttaaaattttggggagatacgaagtgaatgtgtaaatctaactttgaggttcagtaagttaagtagtatagacctag

SEQ ID NO: 729297 - DNA, 120 bp, Artificial Sequence
  ENSG00000198586_40 (sequence is synthesized)
agatcactgctttaccattttactttcaaatgaatgagagcgactgctagtggcagaacgcagaaaaggggaaaaacaagccatgaaatgaagttgctttcctgacctgggtttaggtca

SEQ ID NO: 729298 - DNA, 120 bp, Artificial Sequence
  ENSG00000198586_41 (sequence is synthesized)
tcattttaaaatcaaagatgtgtaggagatgaatcaacttatagacccatattttccttctaaaagtttcccaaagaaatgttatagattttgaataacatgccagtgacccagcaggtc

SEQ ID NO: 729299 - DNA, 120 bp, Artificial Sequence
  ENSG00000198586_42 (sequence is synthesized)
caagatggctaaccaagatggctaatttagccacattgaataacttacttttaccctcacatggaaagttggtatctattgctaaatgatttcaaggtcactctgacagtctttgacact

SEQ ID NO: 729300 - DNA, 120 bp, Artificial Sequence
  ENSG00000198586_43 (sequence is synthesized)
gttttttttagggttttattgttttctggtctcctggtgtctgtcctcagaattaaagcatgtcctgcatccctaagatgatagccaaggcctctcttttattaagagtcagcactgatg

SEQ ID NO: 729301 - DNA, 120 bp, Artificial Sequence
  ENSG00000198586_44 (sequence is synthesized)
tagggtaaaatcaacagtttttgcatatgattttaaaatctttctttgatttgaatttgctttagtgtgtgcatgttgagaggaagtaagtgtagaaaccaccctaatttgtaagttggg

SEQ ID NO: 729302 - DNA, 120 bp, Artificial Sequence
  ENSG00000198586_45 (sequence is synthesized)
agttggagatacttggtggtttttcaaaaataaagactcaatcttttttttttttttaaacactcactaccatctccttctaaaacaactctgtcagtttaaatggcatataaaatgtga

SEQ ID NO: 729303 - DNA, 120 bp, Artificial Sequence
  ENSG00000198586_46 (sequence is synthesized)
acaaacacctcattacatgaagtcaaaatggtgaagagcttcagtgaaacatttaaagagtatattgtgtgttgttttgctgttcatcattacttattaaatgcagtaatgttgattgcc

SEQ ID NO: 729304 - DNA, 120 bp, Artificial Sequence
  ENSG00000198586_47 (sequence is synthesized)
aagagaagagagggagaaggcacactgaggaatgccaaggactgccagcagcaccagaagctaggagagaggcacagaacagactcctagcttctcctaggctccctctgagcctccagg

SEQ ID NO: 729305 - DNA, 69 bp, Artificial Sequence
  ENSG00000198586_48 (sequence is synthesized)
tccgtctcacccccccgccatcccatgcttattatatcattcctttgagattcaaacttctggggaaga

SEQ ID NO: 729306 - DNA, 120 bp, Artificial Sequence
  ENSG00000198586_49 (sequence is synthesized)
actttgcgagctttgctgcccgggacctggaggatgcccctcgcttgctgggtttctcctttggggagagacgctgaaattatctgggcagactttgatcccctgtgtggccccctagag

SEQ ID NO: 729307 - DNA, 120 bp, Artificial Sequence
  ENSG00000198586_50 (sequence is synthesized)
attctctgctgcaagtgcaatggatgagcttcatagtctggatccaagaaggcaagagttattggaagctagatttactggagttgcaagtgggagcactggaagtacgggcagttgcag

SEQ ID NO: 729308 - DNA, 120 bp, Artificial Sequence
  ENSG00000198586_51 (sequence is synthesized)
accaccctattgtacaaccaaagcaattatcctttaaaattattcaggtaaatgataattaaaatgtttttttctatggcttctaagaaaccattgactaacttactaacaactaagatg

SEQ ID NO: 729309 - DNA, 120 bp, Artificial Sequence
  ENSG00000198586_52 (sequence is synthesized)
tctgtttgttttatatgtagtcataaagcagaattacacatcaagaaagataacttactaaacaaaaacaacagaatttgtaggaaggagtgagaaactgaaacacacaatttactatca

SEQ ID NO: 729310 - DNA, 120 bp, Artificial Sequence
  ENSG00000198586_53 (sequence is synthesized)
gctttttaaacaaccgttaacatgtcagttctgtttactgattctttctgaacttaatttccaagtatatgtaattgatattttgtgaaactgctgtattttttagaagtggacattaaa

SEQ ID NO: 729311 - DNA, 120 bp, Artificial Sequence
  ENSG00000198586_54 (sequence is synthesized)
gcctctcatttgactgtatttattaaatacgtatatgtgacaaattataaacattatttgaattatttgtatattttctatacttatttagtttcatgaatttgagcactaagtttttca

SEQ ID NO: 729312 - DNA, 120 bp, Artificial Sequence
  ENSG00000198586_55 (sequence is synthesized)
ttttaattttttacatgtgacagtttctgagtggcactttctcagactggggtttgggagagtagatcttactcttcaagctcagcttgacagtttatttctattagactgtatttgtga

SEQ ID NO: 729313 - DNA, 120 bp, Artificial Sequence
  ENSG00000198586_56 (sequence is synthesized)
ggtcatatccaaactgttgtgcatgtatcaaaacctctttctttggatgatcctgaggctaggattagaagtacattcctttcagccactgagtagatcatgaaaggttttgctgcatga

SEQ ID NO: 729314 - DNA, 120 bp, Artificial Sequence
  ENSG00000198586_57 (sequence is synthesized)
gatgttggtcaaaggacataaaattttagttggaaagtaagttcaagggaactattatacatcataggggctacagttaaaaacaatattttgtgtatatgaaaattgctaagagagtag

SEQ ID NO: 729315 - DNA, 120 bp, Artificial Sequence
  ENSG00000198586_58 (sequence is synthesized)
attttattcacaccacaaaaaaaagatatgtgttaaataacttgatttagccattccacattgtatatacatatatcaaaacatcgtgttgtgtaccataaatagataggtttttactta

SEQ ID NO: 729316 - DNA, 120 bp, Artificial Sequence
  ENSG00000198586_59 (sequence is synthesized)
tcaatttaaaaaaggtcttgcaaaattcaaaaaaatcaactagaggaacgtatagcacaaagcagcggatatattgaattataatgaggaacatcagtattctaagtaattggcctttct

SEQ ID NO: 729317 - DNA, 120 bp, Artificial Sequence
  ENSG00000198586_60 (sequence is synthesized)
agatgtttcttggtaagtctgtagcatttatacacttgaagttattaaaactgcactaaaactttttgagattcactttacatatacacacaaatatatttttctttaccttttgaattt

SEQ ID NO: 729318 - DNA, 120 bp, Artificial Sequence
  ENSG00000198586_61 (sequence is synthesized)
ccaaatttaccacaactgtaagcctccatttaaaatttttcttttttaaaattgttgccagtgagcgtgaatgttactaatggatgttatttataattaatacttagatagcaaaaatga

SEQ ID NO: 729319 - DNA, 120 bp, Artificial Sequence
  ENSG00000198586_62 (sequence is synthesized)
ttaagaccaggaaggaaggcagtattgaaaatttagctctaaattaatagccccaaatatctgaattctaccgttttaagcagagatttaacaattctcttttaaaacagagacctaggt

SEQ ID NO: 729320 - DNA, 120 bp, Artificial Sequence
  ENSG00000198586_63 (sequence is synthesized)
agctaagaggttaccagaattcacccttctgtgtctgaatcagttaggaatcaattaaaagttttggattattctaattcaacgtttccattcacattcctttgtctgagagaatgaagt

SEQ ID NO: 729321 - DNA, 120 bp, Artificial Sequence
  ENSG00000198586_64 (sequence is synthesized)
aatgtaactaccatttatatgttttctcagcctgtgaaagcagttcattagtgggttataggtattgtttttccctttctgcttttctttgttttctggattttctttgttaatgaatta

SEQ ID NO: 729322 - DNA, 120 bp, Artificial Sequence
  ENSG00000198586_65 (sequence is synthesized)
ttctttataatttaaaggacaaagacattttttaaaagaaaatttggaaaataggacaagaataataatatagaccatgatcccatttcacagagaacaccattgttaaaatttcaatat

SEQ ID NO: 729323 - DNA, 120 bp, Artificial Sequence
  ENSG00000198586_66 (sequence is synthesized)
cattgttaaaatttcaatatacagatgtatccaaacttacataaattttctgttctagaagaacttacgtaaactcacgtgagtagaaaatacatagaccgggcacggtggctcatgcct

SEQ ID NO: 729324 - DNA, 72 bp, Artificial Sequence
  ENSG00000198586_67 (sequence is synthesized)
ctttgggaggccaaagtgggtggatcacgtgaggtcagtaaattctcagatcaggcacttgtaattccggct

SEQ ID NO: 729325 - DNA, 75 bp, Artificial Sequence
  ENSG00000198586_68 (sequence is synthesized)
ggctgaggcaggagaattgcttgaacttagcctgggggacaagagtgagactttctcaaaaaaaaaaaaaaaaaa

SEQ ID NO: 729326 - DNA, 120 bp, Artificial Sequence
  ENSG00000198586_69 (sequence is synthesized)
ggaacagtggagcaacaatggaactcgcaacagctaacaacaatggaaagaagtagttagttttgagaatttaaagtggactacagggacatattttttggggaggtggagataaattct

SEQ ID NO: 729327 - DNA, 120 bp, Artificial Sequence
  ENSG00000198586_70 (sequence is synthesized)
gtagattcttacgatgagtgctattggattagtgacttaaggcttcatccaatttaaaaatatgaggaagcagataatttgcacaggctttcactgtaagacagttgggcccaaaattca

SEQ ID NO: 729328 - DNA, 120 bp, Artificial Sequence
  ENSG00000198586_71 (sequence is synthesized)
attacaagcactttcaaaatgccaacatttccagaataaattatctgaaagtgttacttcccaacccccacccttcagcagttgttctaaatggctgttttattcttgtatgatttgaaa

SEQ ID NO: 729329 - DNA, 120 bp, Artificial Sequence
  ENSG00000198586_72 (sequence is synthesized)
aaaagagataacagtatagcaacaactctgccactgaaatcctgttctctgaccgatattggcacctgcaaagagaaacaaccagtaacaggcagcagcagcatcagtattaatcttcca

SEQ ID NO: 729330 - DNA, 120 bp, Artificial Sequence
  ENSG00000198586_73 (sequence is synthesized)
tgatgaaatctttacaggtcaagaacaagtacacagctcttttctcactccttcacagtggaccatgcaactagttgaaatggaagacaatggattgtctacaagccttttgaacagtgg

SEQ ID NO: 729331 - DNA, 120 bp, Artificial Sequence
  ENSG00000198586_74 (sequence is synthesized)
tggaagcttgggatctttaagtgacaaagaatcagagaaacaactggcaggcagctgaaaggactgtgcaagtgacgggactttatctgcagtaggttcccttgagacaccggagaagaa

SEQ ID NO: 729332 - DNA, 120 bp, Artificial Sequence
  ENSG00000198589_0 (sequence is synthesized)
agcactcggcgctgtcatggcggccgggagcagcttcagtgggcacacgacagccgcgcgacccgtggcggggcgagctgtggcagtagcatcctcaccactcgcagcagcctcagccgc

SEQ ID NO: 729333 - DNA, 120 bp, Artificial Sequence
  ENSG00000198589_1 (sequence is synthesized)
ggcgcccgtagcgccagcagcggctgcttttgcaaaggctgagcgcaggggcggggcgggccaggaagccatggagttctgtgcagccgcggactcccggggagcggactagggaaactt

SEQ ID NO: 729334 - DNA, 120 bp, Artificial Sequence
  ENSG00000198589_2 (sequence is synthesized)
ggaggctgcgaccagggtttggcgttgttgtcagcctcggggagagagattggacaaatattctccaagaggaggagggcgacgccaaggactttccacatcaactgctttggggtatct

SEQ ID NO: 729335 - DNA, 120 bp, Artificial Sequence
  ENSG00000198589_3 (sequence is synthesized)
ccacaagttggaagagggaccctttcgttttgcattgcgtgtgttgtgctcattaccagtgcagcgactgccgtcccagggtgactctgagttgtcctttatcgtgagctagcaatggct

SEQ ID NO: 729336 - DNA, 120 bp, Artificial Sequence
  ENSG00000198589_4 (sequence is synthesized)
agcgaagacaatcgtgtcccttccccgccaccaacaggtgatgacgggggaggtggagggagagaagaaacccctactgaagggggtgcattgtctctgaaaccagggctccccatcagg

SEQ ID NO: 729337 - DNA, 120 bp, Artificial Sequence
  ENSG00000198589_5 (sequence is synthesized)
ggcatcagaatgaaatttgccgtgttgaccggtttggttgaagttggagaagtatccaatagggatattgtagaaactgtctttaacctgttggtaggaggacagtttgatctggaaatg

SEQ ID NO: 729338 - DNA, 120 bp, Artificial Sequence
  ENSG00000198589_6 (sequence is synthesized)
aatttcattatccaagaaggtgagagtattaactgcatggtggacctactggaaaaatgtgacattacgtgccaagcagaagtctggagcatgtttacagccattctgaagaaaagcata

SEQ ID NO: 729339 - DNA, 120 bp, Artificial Sequence
  ENSG00000198589_7 (sequence is synthesized)
cggaatcttcaagtctgcactgaagtaggccttgttgaaaaagtgcttgggaaaattgaaaaagttgacaatatgatagcagatcttttggttgacatgttgggagtgctggctagctat

SEQ ID NO: 729340 - DNA, 120 bp, Artificial Sequence
  ENSG00000198589_8 (sequence is synthesized)
aatttgacagttcgcgagctaaagcttttcttcagtaaacttcaaggagataaaggacgatggcctccacatgctgggaagttgctgtctgtgttaaagcatatgcctcagaagtatggt

SEQ ID NO: 729341 - DNA, 120 bp, Artificial Sequence
  ENSG00000198589_9 (sequence is synthesized)
cctgatgccttttttaactttccaggaaagagtgctgcagctattgcattacctcctatagccaaatggccataccagaatggttttacatttcatacatggcttagaatggatcctgta

SEQ ID NO: 729342 - DNA, 120 bp, Artificial Sequence
  ENSG00000198589_10 (sequence is synthesized)
aataacatcaatgtagataaggataaaccatatttgtattgtttcagaaccagcaaaggtcttggctattctgctcattttgttggaggctgtttgattgtaacatcaataaagtcaaaa

SEQ ID NO: 729343 - DNA, 120 bp, Artificial Sequence
  ENSG00000198589_11 (sequence is synthesized)
ggaaaaggctttcaacactgtgtgaaatttgatttcaagccacaaaagtggtatatggttaccatagtacacatctataaccgatggaagaatagtgaacttcgatgttatgtgaatggt

SEQ ID NO: 729344 - DNA, 120 bp, Artificial Sequence
  ENSG00000198589_12 (sequence is synthesized)
gagctggcttcctatggagagataacatggtttgtcaacactagcgatacctttgacaaatgtttcctgggctcatcagaaacagcagatgctaatagagtattctgtggtcagatgact

SEQ ID NO: 729345 - DNA, 120 bp, Artificial Sequence
  ENSG00000198589_13 (sequence is synthesized)
gcagtttaccttttcagtgaagctctaaatgcagctcagatatttgctatttatcagttgggcctgggatacaagggtacatttaaattcaaagcagaaagcgaccttttccttgctgag

SEQ ID NO: 729346 - DNA, 120 bp, Artificial Sequence
  ENSG00000198589_14 (sequence is synthesized)
catcacaaacttttattgtacgatgggaaactctctagtgccattgcattcacgtacaatccacgggctacagatgcccagctttgtcttgaatcatctcctaaggacaacccttcaatt

SEQ ID NO: 729347 - DNA, 120 bp, Artificial Sequence
  ENSG00000198589_15 (sequence is synthesized)
tttgttcattcaccacatgcactcatgctccaggatgtaaaggcagttttaacacattccatccaaagtgcaatgcattcaattggaggagtacaagtactatttccactttttgcacag

SEQ ID NO: 729348 - DNA, 120 bp, Artificial Sequence
  ENSG00000198589_16 (sequence is synthesized)
ttggattacaggcaatatttgtctgatgagattgatttgactatatgttcaaccttgctggcctttatcatggaattgttgaagaactcaattgctatgcaggaacagatgcttgcctgt

SEQ ID NO: 729349 - DNA, 120 bp, Artificial Sequence
  ENSG00000198589_17 (sequence is synthesized)
aagggcttcttggtaataggatatagccttgaaaagtcttccaaatctcatgttagcagagcagtacttgaactttgccttgcattttcaaaatatctgagtaatctgcagaatgggatg

SEQ ID NO: 729350 - DNA, 120 bp, Artificial Sequence
  ENSG00000198589_18 (sequence is synthesized)
cccctgctcaagcaattgtgtgatcacgttcttcttaatcctgccatatggattcataccccagccaaggttcaactgatgctctatacttatctgtccacggaattcattggtacagtc

SEQ ID NO: 729351 - DNA, 120 bp, Artificial Sequence
  ENSG00000198589_19 (sequence is synthesized)
aacatatataacaccattcggagagttggaacagtgcttctcatcatgcacacgctgaagtactactactgggcagtgaatcctcaggatcgaagtggtatcaccccaaaaggattagat

SEQ ID NO: 729352 - DNA, 120 bp, Artificial Sequence
  ENSG00000198589_20 (sequence is synthesized)
ggaccgcgacctaatcaaaaagaaatgctttctctacgagcattcttgttgatgttcattaagcaattagtgatgaaggattctggagtaaaggaagatgaattacaggccattcttaat

SEQ ID NO: 729353 - DNA, 120 bp, Artificial Sequence
  ENSG00000198589_21 (sequence is synthesized)
tacctactgactatgcatgaggatgacaatctaatggatgtcctacagctgcttgttgcattaatgtcagaacaccctaactctatgattcctgcttttgaccaaaggaatgggttacgt

SEQ ID NO: 729354 - DNA, 120 bp, Artificial Sequence
  ENSG00000198589_22 (sequence is synthesized)
gttatctacaaacttctggcatcgaaaagtgaaggaatcagggtacaagctcttaaggcaatgggttattttttaaaacatctggccccaaagaggaaagcagaagtcatgcttggacat

SEQ ID NO: 729355 - DNA, 120 bp, Artificial Sequence
  ENSG00000198589_23 (sequence is synthesized)
ggattgttttcattgctagctgaaaggctcatgcttcagacaaatttaatcacaatgaccacatataatgtgctgtttgagattcttatagaacagattggtactcaggtgatacataaa

SEQ ID NO: 729356 - DNA, 120 bp, Artificial Sequence
  ENSG00000198589_24 (sequence is synthesized)
cagcatccagatcctgattcttcagtgaagatacaaaaccctcagatactaaaagtaattgcgaccctacttcgaaattctccccagtgcccagagagcatggaggttcgcagagccttt

SEQ ID NO: 729357 - DNA, 120 bp, Artificial Sequence
  ENSG00000198589_25 (sequence is synthesized)
ctttctgacatgattaaactttttaataacagtagagaaaacaggaggagcttgctacaatgctctgtgtggcaagaatggatgctttctctctgctattttaatcctaagaattcagat

SEQ ID NO: 729358 - DNA, 120 bp, Artificial Sequence
  ENSG00000198589_26 (sequence is synthesized)
gagcaaaagataacagaaatggtatacgccatattcagaatcctgctttaccatgcagtcaaatatgagtggggtggctggcgtgtatgggtagacactttatcaatcactcattcaaag

SEQ ID NO: 729359 - DNA, 120 bp, Artificial Sequence
  ENSG00000198589_27 (sequence is synthesized)
gtcacttttgaaatacacaaagaaaaccttgccaatatatttagggaacagcaaggaaaagttgatgaagaaatagggctgtgttcttcaacttcagttcaagcagcctctggcattaga

SEQ ID NO: 729360 - DNA, 120 bp, Artificial Sequence
  ENSG00000198589_28 (sequence is synthesized)
agggatattaatgtttcagtaggatcccagcaaccagatacgaaggattctcctgtctgtcctcatttcaccacaaatggtaatgaaaattcaagtatagagaagacaagttcactagaa

SEQ ID NO: 729361 - DNA, 120 bp, Artificial Sequence
  ENSG00000198589_29 (sequence is synthesized)
tctgcatctaatattgaactgcaaactactaatacatcttatgaagaaatgaaagctgagcaagaaaatcaggagttaccagatgaaggcactttggaagaaacactgacaaatgagaca

SEQ ID NO: 729362 - DNA, 120 bp, Artificial Sequence
  ENSG00000198589_30 (sequence is synthesized)
aggaatgcagatgatttagaagtatcttctgacataatagaagctgtggctatttcctctaattcttttataacaactggcaaagattcaatgactgtcagtgaagtaactgcttctata

SEQ ID NO: 729363 - DNA, 120 bp, Artificial Sequence
  ENSG00000198589_31 (sequence is synthesized)
agttctccttcagaagaggatgcctcagagatgccagaattcttggataaatctatagtagaggaagaggaagatgatgattatgtggaactgaaagtagaaggcagtcctactgaggaa

SEQ ID NO: 729364 - DNA, 120 bp, Artificial Sequence
  ENSG00000198589_32 (sequence is synthesized)
gctaatctacccacagagctccaagataacagtttgtctccagctgcatctgaagccggtgaaaaactggacatgtttggtaatgatgacaaattaatatttcaagaaggaaaacctgtt

SEQ ID NO: 729365 - DNA, 120 bp, Artificial Sequence
  ENSG00000198589_33 (sequence is synthesized)
actgaaaagcaaactgatactgaaactcaagattctaaagattctggaattcagactatgacagcatcagggtcttcagctatgtcaccagaaactactgtttcccaaatagctgtagaa

SEQ ID NO: 729366 - DNA, 120 bp, Artificial Sequence
  ENSG00000198589_34 (sequence is synthesized)
tcagaccttggtcagatgctggaggaagggaagaaagcaactaacctcactagagaaaccaaattaattaatgattgtcatggtagtgtctctgaggcttcttctgagcaaaagattgcg

SEQ ID NO: 729367 - DNA, 120 bp, Artificial Sequence
  ENSG00000198589_35 (sequence is synthesized)
aagttggatgtttccaatgttgctacagatactgagaggctggagttgaaggccagtcccaacgtggaagcacctcaacctcatcgacatgtgcttgagatatcaaggcaacatgagcag

SEQ ID NO: 729368 - DNA, 120 bp, Artificial Sequence
  ENSG00000198589_36 (sequence is synthesized)
ccagggcaaggaatagcaccagatgcagttaatggacaaaggagggattccagatctactgtgtttcgtattcctgagttcaactggtctcagatgcatcaacgtttgctcactgatcta

SEQ ID NO: 729369 - DNA, 120 bp, Artificial Sequence
  ENSG00000198589_37 (sequence is synthesized)
ttattttcaatagaaacagatatacagatgtggagaagccattcaacaaagacagttatggacttcgtgaatagcagtgataatgtcatctttgtacacaacacaattcatctcatctct

SEQ ID NO: 729370 - DNA, 120 bp, Artificial Sequence
  ENSG00000198589_38 (sequence is synthesized)
caagtgatggacaatatggtcatggcttgtgggggtatactgccattgctttcagctgctacatcggctacacatgaactggaaaatattgaacctactcaaggcctttcaatagaagcc

SEQ ID NO: 729371 - DNA, 120 bp, Artificial Sequence
  ENSG00000198589_39 (sequence is synthesized)
tctgtgacatttttgcagaggctaattagccttgtggatgtgcttatatttgcaagttctcttggctttactgaaattgaagctgaaaaaagtatgtcatctggaggaattttgcggcag

SEQ ID NO: 729372 - DNA, 120 bp, Artificial Sequence
  ENSG00000198589_40 (sequence is synthesized)
tgtctccgactagtttgtgcagtcgcagtaaggaattgcttggagtgtcaacagcattcacaactgaaaactaggggagataaagccttgaaaccaatgcatagccttattcctttaggg

SEQ ID NO: 729373 - DNA, 120 bp, Artificial Sequence
  ENSG00000198589_41 (sequence is synthesized)
aaatctgcagcgaagagcccagtggacattgtgactggcggtatatctccagtaagagatcttgacaggcttctacaggacatggatattaatcggcttagggcagttgttttcagagac

SEQ ID NO: 729374 - DNA, 120 bp, Artificial Sequence
  ENSG00000198589_42 (sequence is synthesized)
atagaggatagcaaacaagctcaatttttagccttggcagtagtatactttatctctgttcttatggtctccaagtacagagacattttggaaccccaaaatgaaaggcatagccagtca

SEQ ID NO: 729375 - DNA, 120 bp, Artificial Sequence
  ENSG00000198589_43 (sequence is synthesized)
tcactctctgaaatcacaccagcagcattcagcactttaactacggcatcagtggaagaatctgaaagcacatcatctgctcgaaggagggactcaggcattggggaagaaacagccact

SEQ ID NO: 729376 - DNA, 120 bp, Artificial Sequence
  ENSG00000198589_44 (sequence is synthesized)
ggtttaggaagccatgtggaagtaactcctcacacagcacctcctggtgtcagtgcaggcccagatgcaatcagcgaggtgctatctactctttctttagaagtcaataagtctccggaa

SEQ ID NO: 729377 - DNA, 120 bp, Artificial Sequence
  ENSG00000198589_45 (sequence is synthesized)
accaaaaatgatagaggaaatgacttggacactaaggctacaccgtcagtttcagtttcaaaaaacgtcaatgtgaaagacattctccgaagcttggttaacataccagcagatggagtc

SEQ ID NO: 729378 - DNA, 120 bp, Artificial Sequence
  ENSG00000198589_46 (sequence is synthesized)
acagtggatcctgcccttctgccaccagcctgccttggagcccttggtgatctatctgtggaacaacccgtgcagttcagatcttttgacagaagtgtcattgttgcagcaaaaaagtca

SEQ ID NO: 729379 - DNA, 120 bp, Artificial Sequence
  ENSG00000198589_47 (sequence is synthesized)
gcagtctcaccttccacctttaatacaagcatacctaccaatgctgtcagtgtggtttcctcagtagattcagcccaagcctcagatatgggaggagaatcaccaggcagtagatcatct

SEQ ID NO: 729380 - DNA, 120 bp, Artificial Sequence
  ENSG00000198589_48 (sequence is synthesized)
aatgcaaaattgccctcagttccaacagttgattcagtttcacaagatccggtttcaaatatgagtattacagagaggcttgaacacgctttggaaaaggcagctcctctccttcgtgag

SEQ ID NO: 729381 - DNA, 120 bp, Artificial Sequence
  ENSG00000198589_49 (sequence is synthesized)
atttttgtggattttgcaccttttctttctcggacacttttgggtagccatggacaagaactgcttatagaaggaacaagtctggtttgcatgaagtcgagtagttcagttgtggaattg

SEQ ID NO: 729382 - DNA, 120 bp, Artificial Sequence
  ENSG00000198589_50 (sequence is synthesized)
gttatgctactgtgttctcaggagtggcaaaattctattcagaagaatgcaggccttgcttttatcgaacttgtcaatgaaggaaggttgcttagccagacaatgaaggatcatctagta

SEQ ID NO: 729383 - DNA, 120 bp, Artificial Sequence
  ENSG00000198589_51 (sequence is synthesized)
agagtagcaaatgaagctgaatttatcctgagcaggcagagagcagaagatattcacagacatgcggaatttgagtcactgtgtgcccagtattctgcagacaaacgagaagatgagaag

SEQ ID NO: 729384 - DNA, 120 bp, Artificial Sequence
  ENSG00000198589_52 (sequence is synthesized)
atgtgtgatcatttgataagagcagcaaaatatcgtgaccacgtgacagcaactcaactaatccagaaaattatcaacattctcacagacaagcatggagcctggggaaattctgcagtg

SEQ ID NO: 729385 - DNA, 120 bp, Artificial Sequence
  ENSG00000198589_53 (sequence is synthesized)
agtcgtcctcttgagttctggcgccttgactactgggaagatgacttgcggcgccggcgacgatttgtgcgtaaccctctaggatcgacacatcctgaagcgacactaaaaacagccgtg

SEQ ID NO: 729386 - DNA, 120 bp, Artificial Sequence
  ENSG00000198589_54 (sequence is synthesized)
gaacatgtgtgcatttttaaattgagagagaacagcaaagccacagatgaagatatccttgctaaaggaaaacagtccatcaggagtcaggctttaggaaatcagaactcagaaaacgag

SEQ ID NO: 729387 - DNA, 120 bp, Artificial Sequence
  ENSG00000198589_55 (sequence is synthesized)
atcctcctggaaggcgatgatgatactctgtcatccgtggatgagaaagatttagagaatcttgccggtcctgttagcctgagcacaccagctcagcttgtggccccctctgttgtagta

SEQ ID NO: 729388 - DNA, 120 bp, Artificial Sequence
  ENSG00000198589_56 (sequence is synthesized)
aagggcactctttctgtcacctcctccgaactctattttgaggtggatgaagaggatcctaacttcaaaaaaatcgaccccaagatcttggcatatacagaagggctgcatggaaaatgg

SEQ ID NO: 729389 - DNA, 120 bp, Artificial Sequence
  ENSG00000198589_57 (sequence is synthesized)
ctgttcacagagatacgatcaatcttttctcgtcgttatcttttgcaaaatacagccctggagatctttatggcaaacagagttgctgtgatgttcaacttcccagaccctgcaacagta

SEQ ID NO: 729390 - DNA, 120 bp, Artificial Sequence
  ENSG00000198589_58 (sequence is synthesized)
aagaaagtggttaactatctacctcgtgttggcgttggaacaagttttggattgcctcaaaccagacgtatttcattagctagtccacgtcagctttttaaggcttctaatatgacccag

SEQ ID NO: 729391 - DNA, 120 bp, Artificial Sequence
  ENSG00000198589_59 (sequence is synthesized)
cgatggcaacacagagagatatctaattttgagtacttgatgtttctcaacacgatagcaggacggagttataatgacttaaatcagtatccagtgtttccttgggtcatcactaattat

SEQ ID NO: 729392 - DNA, 120 bp, Artificial Sequence
  ENSG00000198589_60 (sequence is synthesized)
gaatcagaagaactggatcttaccttgcccaccaacttcagagatttgtccaagccaataggagctctgaacccaaaaagagcagcattcttcgctgagcgttatgaatcatgggaagat

SEQ ID NO: 729393 - DNA, 120 bp, Artificial Sequence
  ENSG00000198589_61 (sequence is synthesized)
gatcaagttccaaagtttcactatggtactcattactcaactgcaagttttgttcttgcatggctgctaagaatagaaccctttacaacttatttcctaaatttgcaaggaggcaaattt

SEQ ID NO: 729394 - DNA, 120 bp, Artificial Sequence
  ENSG00000198589_62 (sequence is synthesized)
gatcatgcagatcgaactttttcatcaatttccagagcttggcgaaacagtcagcgtgatacctctgatattaaggagttgatccctgaattttattatctccctgagatgtttgtcaac

SEQ ID NO: 729395 - DNA, 120 bp, Artificial Sequence
  ENSG00000198589_63 (sequence is synthesized)
ttcaataattataatcttggagtgatggatgatgggacagtagtgtctgatgtcgaacttcctccttgggccaaaacctcagaagaatttgttcacataaacagattggccctggagagt

SEQ ID NO: 729396 - DNA, 120 bp, Artificial Sequence
  ENSG00000198589_64 (sequence is synthesized)
gaatttgtttcctgccagcttcaccaatggattgatctcatttttggctataaacagcaaggaccagaagctgtccgagccctcaatgtgttctattacttgacctatgaaggagctgtc

SEQ ID NO: 729397 - DNA, 120 bp, Artificial Sequence
  ENSG00000198589_65 (sequence is synthesized)
aatctgaattcaataactgatcctgtgttgagagaggctgttgaagctcaaatccgaagttttggacagactccttctcaactactcatagagccccatcctcccagaggttctgccatg

SEQ ID NO: 729398 - DNA, 120 bp, Artificial Sequence
  ENSG00000198589_66 (sequence is synthesized)
caagtgagtccattgatgttcacagacaaagcccagcaggatgttatcatggtcctcaagtttccctccaactcccctgttactcacgtggcagccaacacccagcctggtttggcaact

SEQ ID NO: 729399 - DNA, 120 bp, Artificial Sequence
  ENSG00000198589_67 (sequence is synthesized)
cccgctgtgatcacagtcactgctaacaggttatttgcggtgaacaaatggcacaaccttcctgctcatcaaggtgctgtacaagaccagccataccagctgccagtggaaatcgatcct

SEQ ID NO: 729400 - DNA, 120 bp, Artificial Sequence
  ENSG00000198589_68 (sequence is synthesized)
ctcatagccagcaatacaggaatgcacaggaggcaaatcactgaccttttagaccaaagtattcaagtgcattcccagtgctttgtcatcacttcagacaaccgctatattctcgtctgt

SEQ ID NO: 729401 - DNA, 120 bp, Artificial Sequence
  ENSG00000198589_69 (sequence is synthesized)
ggcttctgggataaaagtttcagagtctattctacagacacaggaagattgatccaagtggtgtttggccattgggatgtcgtcacttgccttgctcgttctgagtcatatattggggga

SEQ ID NO: 729402 - DNA, 120 bp, Artificial Sequence
  ENSG00000198589_70 (sequence is synthesized)
aattgctacattctctcagggtcacgtgatgcaactcttttgctgtggtattggaatggaaaatgcagtgggattggagataacccaggcagtgagactgctgctcctcgggccattttg

SEQ ID NO: 729403 - DNA, 120 bp, Artificial Sequence
  ENSG00000198589_71 (sequence is synthesized)
accggccatgactatgaggtcacatgtgctgcggtgtgtgcggagctaggcctggtgttgagtggttcacaagaaggaccatgtctcatacattccatgaatggagacttgttgaggacc

SEQ ID NO: 729404 - DNA, 120 bp, Artificial Sequence
  ENSG00000198589_72 (sequence is synthesized)
ttggagggtcctgaaaactgcctgaaaccaaaactcattcaggcttcaagagagggtcattgtgtcatattctatgaaaacggcctcttctgtacattcagtgtgaatggaaaactccag

SEQ ID NO: 729405 - DNA, 120 bp, Artificial Sequence
  ENSG00000198589_73 (sequence is synthesized)
gccacgatggaaacagatgataacataagagccatccagctgagccgagatgggcagtacctgctcacaggaggagacagaggagtggtcgtggtccggcaggtgtcggacctcaagcag

SEQ ID NO: 729406 - DNA, 120 bp, Artificial Sequence
  ENSG00000198589_74 (sequence is synthesized)
ctctttgcctatccaggatgtgacgctggaatccgggccatggcgctgtcttacgaccagaggtgcatcatttctggcatggcttcaggaagcattgtgctattttacaacgactttaac

SEQ ID NO: 729407 - DNA, 120 bp, Artificial Sequence
  ENSG00000198589_75 (sequence is synthesized)
cggtggcatcatgaataccaaacccgctactgatggtgacagctgtacatcaactctgcccctaggatgagcagaagtacctggagcatcattctcttctaccacatctgaatgtaactt

SEQ ID NO: 729408 - DNA, 120 bp, Artificial Sequence
  ENSG00000198589_76 (sequence is synthesized)
aaatttgctcaaagaagcaaaatattttttaaagttattaataattgctatttttgtagtctttgcttgacttttttgggggggattagcaaagcagaaaactggctgctgggttctgta

SEQ ID NO: 729409 - DNA, 120 bp, Artificial Sequence
  ENSG00000198589_77 (sequence is synthesized)
gttttaaaaaatctatatttttagtcataatgagaagtctattttcaccaattatggaaacatacagtggagcaagtaaaccacttattccagctataatattatgaagaacatttccca

SEQ ID NO: 729410 - DNA, 120 bp, Artificial Sequence
  ENSG00000198589_78 (sequence is synthesized)
tgcatctacaagcttgagaaataggattttcacagtggggaagtgggttacaatattggaataggaaaatttgatgctgtaatttgggtcctgtatttttccaaacaactgtgcttcttc

SEQ ID NO: 729411 - DNA, 120 bp, Artificial Sequence
  ENSG00000198589_79 (sequence is synthesized)
agcactaatatttctgggatttaaatagtaatgtttaaattatggtaaatgtaatttaaaacatctcaattaagtctgtctatcaatattgttcttcaagcatgttttagacctagaaaa

SEQ ID NO: 729412 - DNA, 120 bp, Artificial Sequence
  ENSG00000198589_80 (sequence is synthesized)
gtatggtttgggggaggctattttattgtgtggttagcacaaggaatctaatttatagcaagtgtgaaatagttaccattttttcctgatctgtcatcttcatagcacaacaaaacgaaa

SEQ ID NO: 729413 - DNA, 120 bp, Artificial Sequence
  ENSG00000198589_81 (sequence is synthesized)
tgatggaaatgctcttgagctcacaacatttgtttttcttttaaagtaaatgcaagtaccaaagctcactactgcggtttgcctgtgcctggacaatgaggcggagccactgttgttttg

SEQ ID NO: 729414 - DNA, 120 bp, Artificial Sequence
  ENSG00000198589_82 (sequence is synthesized)
ttggggcacccccttccctccccgggtttgcaaatagaggctaccgggtgctgtattcagcaacacctgttttactatttgttattaaactatcatctccaccttccttttgattagcaa

SEQ ID NO: 729415 - DNA, 120 bp, Artificial Sequence
  ENSG00000198589_83 (sequence is synthesized)
tttgtactaagaaacgaaacaatgttatttggtggtgtataattctacttttctagtagattactgtgtggaattctgtgaaaaatatttgagaaaaggcctgtattgcataaataaatt

SEQ ID NO: 729416 - DNA, 120 bp, Artificial Sequence
  ENSG00000198589_84 (sequence is synthesized)
ctttgtatgttgtgaactttgatctctatttctcttgcaacagacttcaagtggtccctctttttttcctacacactcagctcttctctaaaagcaaggatttggaatgaacaattcagt

SEQ ID NO: 729417 - DNA, 120 bp, Artificial Sequence
  ENSG00000198589_85 (sequence is synthesized)
ttgacagaaaaagctgaataaaatggcatctgtaattgaattgttggaaatgccttttttgctcctaaattttaaacatcattaataaaataatgattcacaaagaaagaaaatgtcaaa

SEQ ID NO: 729418 - DNA, 120 bp, Artificial Sequence
  ENSG00000198589_86 (sequence is synthesized)
aggtctgtcacttccttctctctttgcgattcattaagctctgtatggtggccctgaagtgtagattacagttgtttttcacttgctggttgctgggaatggaattttcctgataaacca

SEQ ID NO: 729419 - DNA, 120 bp, Artificial Sequence
  ENSG00000198589_87 (sequence is synthesized)
tttgcatgcaaattggaatgcaatgagctgtggctatgctggtatttcatcaactccccctcgttggtttgcctaatttgaacaggcctaggacgcgtgtcactgaaaattaatatggat

SEQ ID NO: 729420 - DNA, 120 bp, Artificial Sequence
  ENSG00000198589_88 (sequence is synthesized)
gctgtaataatgtgtgattgagaatgcgcatgaagtactgtcaggataatattggatcttttcatcactcagacttgttgatgagcaggagcaaggcacgttatgatgaattggtgcacc

SEQ ID NO: 729421 - DNA, 120 bp, Artificial Sequence
  ENSG00000198589_89 (sequence is synthesized)
ggtaatgtgatggagctcctttgctaggaaaattttcataataacagtggggttcttagcagcactgcgttatgaaaaataaaactgtagtgccagggtttcatcattaaaggagatcaa

SEQ ID NO: 729422 - DNA, 120 bp, Artificial Sequence
  ENSG00000198589_90 (sequence is synthesized)
tcctttcttcctagaccttctgttcagtctgaggggattaatgtgcaattgcagagcagtttcaaagttgaaatatattgcccagccaatggtagtgttaagatatttgtattcattttc

SEQ ID NO: 729423 - DNA, 120 bp, Artificial Sequence
  ENSG00000198589_91 (sequence is synthesized)
ctagggtcctacagcccaataaattgccattggaggttaaatttgttcaggggagaaaaaaatagggaggcgaccagaaagagccattgggatgaaatgagcatctgcagcagatgactt

SEQ ID NO: 729424 - DNA, 120 bp, Artificial Sequence
  ENSG00000198589_92 (sequence is synthesized)
agaatatttaattgctgttaggctttttgagtagattagtcgaaatctctagtttagcatttttcatccttacgtgtggggatttcaaatgtggcatcactaagaatgttaagcctcgat

SEQ ID NO: 729425 - DNA, 120 bp, Artificial Sequence
  ENSG00000198589_93 (sequence is synthesized)
ctcttttcagtgggttggggaacaagatcttaaagctggagccatgtggtttactcacactgatggtgacttttttcgtgtatagggacacaaaattctactcacctaaatgaaacaatt

SEQ ID NO: 729426 - DNA, 120 bp, Artificial Sequence
  ENSG00000198589_94 (sequence is synthesized)
tcatctgttttttagattgaagggaattgtgcaaacttagatgatccaggttttgtgaaagtgaacacatcacttttgtgctaaggaaataattgttgctatggaagtattggggggagg

SEQ ID NO: 729427 - DNA, 120 bp, Artificial Sequence
  ENSG00000198589_95 (sequence is synthesized)
ttctagcggaggagttatctctaattttttttttcttggcttgtatgcctaagtctgcgtttccctttaccactttaaataatttcttgtgacctttttttggacttgagaattaatgtc

SEQ ID NO: 729428 - DNA, 120 bp, Artificial Sequence
  ENSG00000198589_96 (sequence is synthesized)
tgtcgaagttatgttttgctacaataagtttaaaaatttgtttgtagtgctgatgcaagattaatttgctgcaaagttagtatttttaattttgactagttttatttttagacataacta

SEQ ID NO: 729429 - DNA, 120 bp, Artificial Sequence
  ENSG00000198589_97 (sequence is synthesized)
acaaaagttaaattggtgatgaatttaggattgcatttaaagtaatcttgtgaaaattgaatggcaatatgaaaaaaggaattgaagcagatacagtataatttttatgtgttttataaa

SEQ ID NO: 729430 - DNA, 120 bp, Artificial Sequence
  ENSG00000198589_98 (sequence is synthesized)
ttcatgtctagcaggaaagcatagttagtcattggaagttgctgattatactaagatgagctatgaatgctttttttcgggtgggggtgggagggggatgaggcctctctatgttgccca

SEQ ID NO: 729431 - DNA, 120 bp, Artificial Sequence
  ENSG00000198589_99 (sequence is synthesized)
ggctgttctcaaactcctaagttcaagctatcctcctgcttcagtcttatgagtagttgtggctataggcatgcatcactgtatagggcttaaattgtttttaaattgaggtataattca

SEQ ID NO: 729432 - DNA, 120 bp, Artificial Sequence
  ENSG00000198589_100 (sequence is synthesized)
tatattatacaattctacctttaattaattcattaacttatttatttagagatgaggtctcactctgttgcctaggctagttttgaattcctgggttcaggcgattctcccctcttgtct

SEQ ID NO: 729433 - DNA, 120 bp, Artificial Sequence
  ENSG00000198589_101 (sequence is synthesized)
cctaagtagctggaactactggcatgcgccattgtgcctggcttggttatcatttataatggagactttttagatttctttattccagcctctcttgcccatcaacttaaagaatcaaaa

SEQ ID NO: 729434 - DNA, 120 bp, Artificial Sequence
  ENSG00000198589_102 (sequence is synthesized)
ggaaatctggccctaaaatacttcccccttttctacctacccacctgtgttagaggataacaggaccaaatataaacatgcagttaattgtaataactgtttagcacctttccctttgcc

SEQ ID NO: 729435 - DNA, 120 bp, Artificial Sequence
  ENSG00000198589_103 (sequence is synthesized)
tcttttcaaggttaggcttgttttattctggggcagttaattatttctttcactagaccttctctaatggtctggtcacctgcagtacaacttctagaataagaaagtagctagatggaa

SEQ ID NO: 729436 - DNA, 83 bp, Artificial Sequence
  ENSG00000198589_104 (sequence is synthesized)
ggaattctctcaggaagccgaggcgggcacatcacttgaggttaggagtttgagactggcctagtcaacatggtgaaacccca

SEQ ID NO: 729437 - DNA, 60 bp, Artificial Sequence
  ENSG00000198589_105 (sequence is synthesized)
cgcttgcttgtacccatgccaatgcactccagcctgggtggcagagtgagagactgtttc

SEQ ID NO: 729438 - DNA, 120 bp, Artificial Sequence
  ENSG00000198589_106 (sequence is synthesized)
gttagtcactgtgtgcccagtattctgcagacaaacgagaagatgagaagatgtgtgatcatttgataagagcagcaaaatatcgtgaccacgtgacagcaactcaactaatccagaaaa

SEQ ID NO: 729439 - DNA, 120 bp, Artificial Sequence
  ENSG00000198589_107 (sequence is synthesized)
aggagataatgggagtcaaatgcttgcacacattttacagccgttcctctttatcctcctctcttatcagtagcaaagaagaaaaagagtttatatagaagggactctcctggagatggc

SEQ ID NO: 729440 - DNA, 120 bp, Artificial Sequence
  ENSG00000198589_108 (sequence is synthesized)
tggaataacgcgagggagagtagcaatggttcagaaaggttcactttttttttttttaaatgattctatcaacattgtgtagtagaaggtgcaaactgtaacaaaattactttggcttga

SEQ ID NO: 729441 - DNA, 120 bp, Artificial Sequence
  ENSG00000198589_109 (sequence is synthesized)
aggcaaatgggaagcgaaaggggaatctgggaaaggacctaatttttccaggttttttcctcctttaaagtcatcctcctttctcttcccctcccctcccattgttgccaagaatcagag

SEQ ID NO: 729442 - DNA, 120 bp, Artificial Sequence
  ENSG00000198589_110 (sequence is synthesized)
gacgctggaatccgggccatggcgctgtcttacgaccagaggagaccaagaagcttgcagaagttcttatcttcagtgatttcggtgcatcatttctggcatggcttcaggaagcattgt

SEQ ID NO: 729443 - DNA, 120 bp, Artificial Sequence
  ENSG00000198589_111 (sequence is synthesized)
agcttaataatcggatgcagaagtttgtttgttctgatttctggtacaatcaaatttctttagcagcatcagaatccttacttgtactggagagatgatggtgaaataacccttagatca

SEQ ID NO: 729444 - DNA, 120 bp, Artificial Sequence
  ENSG00000198589_112 (sequence is synthesized)
ctagaaacaaagctttctatttggttggcctcaatgccaaaaaagtcatctcagtgaagattccgtttctgataatggcacagtcgatggtgtatttctggacgattattactcttccca

SEQ ID NO: 729445 - DNA, 120 bp, Artificial Sequence
  ENSG00000198589_113 (sequence is synthesized)
tgtgctcggtgttgctctatgtctgacctttttcttggtgacaaaccccgtctcaggtgcaccgtagcactttgaaacacactgccaaggctgtcttgttttattgcttaaataaggagt

SEQ ID NO: 729446 - DNA, 120 bp, Artificial Sequence
  ENSG00000198589_114 (sequence is synthesized)
aagaaagtggcagtctgctgtgctttgactttttcaattacaggaatctttaataaacagtcattctaccctttccttacatgcaagtgcagttgtaaacaggggaaatgggagttccca

SEQ ID NO: 729447 - DNA, 120 bp, Artificial Sequence
  ENSG00000198589_115 (sequence is synthesized)
tctagtcaaattaaagacccgttaaagccaaagtagtacaagatgctacaatatttcaaatatatgacatttaaatcctaatatctcttccttgtgacaaaatgttaaaggtaatagatt

SEQ ID NO: 729448 - DNA, 120 bp, Artificial Sequence
  ENSG00000198589_116 (sequence is synthesized)
gtcacaacatgaaccattctcatgacaataaatgtaatgagattgtcagaaacacaaacctaactgtgatgcaatctggagattgtaatctagtttggttctgcccaagagctagaaagc

SEQ ID NO: 729449 - DNA, 120 bp, Artificial Sequence
  ENSG00000198589_117 (sequence is synthesized)
atgttctgtgaattgtgttctatttttaaatagtagtgtgttattctttctttcctctaagcaaaatttttaactgagatattgaatttagctacccacatttttccagcaattggatat

SEQ ID NO: 729450 - DNA, 120 bp, Artificial Sequence
  ENSG00000198589_118 (sequence is synthesized)
gttttcctactcggtttttcaattattatacttagaattaaggatcaagtactcttatctgggaatgtgtctcctcttctccctcactatagaatttctttgcccatgtggatttaatag

SEQ ID NO: 729451 - DNA, 120 bp, Artificial Sequence
  ENSG00000198589_119 (sequence is synthesized)
tttttaaagctttggtatattgcaagacatgcttgaagctgactaatggaatttttagttgagtgtttgagaaattatttaaagtatattcatgaaggtaacgtgtttatcaacttctgg

SEQ ID NO: 729452 - DNA, 120 bp, Artificial Sequence
  ENSG00000198589_120 (sequence is synthesized)
tgggcagaaagtagtgagggcagcggcggcactgcaggcaggagatgagctgcagcaggatgccgttgagccggtcgcccaggcacgactcgtcccagtccgtttctcgtgggtgtttct

SEQ ID NO: 729453 - DNA, 120 bp, Artificial Sequence
  ENSG00000198589_121 (sequence is synthesized)
cgcactcgtacagcagcagcgtcttcatgtggtagttgttgagcggctggccgggtagctccaggtggcggtcccgcagagtcttcagcactgagaggcacttgtttcggcagccgccca

SEQ ID NO: 729454 - DNA, 120 bp, Artificial Sequence
  ENSG00000198589_122 (sequence is synthesized)
tcagcaggcggttctccgcctccccgaactgtagcacccaggcgtcgctctctgccgagctctgcttgccggtcagcgagtagcactccttcgagagcaagttgaacccttcggccttga

SEQ ID NO: 729455 - DNA, 120 bp, Artificial Sequence
  ENSG00000198589_123 (sequence is synthesized)
cctcggccacccgattggggccgggccaagggatgtggggcataggccactgtgccgcgctgcgaggccagatcccggtgcacttgaacgccggagtgatttgcaccacatagcgctccc

SEQ ID NO: 729456 - DNA, 120 bp, Artificial Sequence
  ENSG00000198589_124 (sequence is synthesized)
tgatgcgcaacttgacctcgctggtgtccgcgatcatcttgaccacatcccgatagctgcacttgtccaccgcctgggccaccagcgtctggaaacgcgagcggatcttacgcgctgaga

SEQ ID NO: 729457 - DNA, 120 bp, Artificial Sequence
  ENSG00000198589_125 (sequence is synthesized)
gatagcccgacgccgtgatgaactcgacccagagagacatgctccgcttccgcccatcgctcagtttgagcactgcgcagccgggcagcgagccgtcgtccacgaagttgaagacgccca

SEQ ID NO: 729458 - DNA, 120 bp, Artificial Sequence
  ENSG00000198589_126 (sequence is synthesized)
tctggtttaggtagagcaccacctcaaattcggtgggcgaaatgacctcgagcccctcgtagcgggcatcgatctcgctcaaggagctgatgaagcgaggctcctgcacctccacttcct

SEQ ID NO: 729459 - DNA, 120 bp, Artificial Sequence
  ENSG00000198589_127 (sequence is synthesized)
tgagcacgtccgagaccaccttacagacctctcggatggttttggcgatggccgccttgcgcgcctgacagcgctcagtgtagtacttattgagctggtaaaccagcttggcctgagcgg

SEQ ID NO: 729460 - DNA, 120 bp, Artificial Sequence
  ENSG00000198589_128 (sequence is synthesized)
cgatcatgttggggcacaggtccgggctatacaccggcgtctcgcaatacgttgagggatccaaggctcacgcactggtggtggcccagcggctttcgaaagaggcggtgcgctccccgt

SEQ ID NO: 729461 - DNA, 120 bp, Artificial Sequence
  ENSG00000198589_129 (sequence is synthesized)
taagccctactttcactctcgttttccacctgggctgaccggctgataccgtagccggcttgttttttccttttccctctttcgaaacctcttttcttctgcagaagaattaggggagaa

SEQ ID NO: 729462 - DNA, 120 bp, Artificial Sequence
  ENSG00000198589_130 (sequence is synthesized)
aaggtgattttctaaaaagaaaagtacctcttggaacctttttgctttctcttgatatgtaaagatgaccgtgtgcgagagaagcggggtgggcgtgaggaaggagaaggagagggaaaa

SEQ ID NO: 729463 - DNA, 120 bp, Artificial Sequence
  ENSG00000198589_131 (sequence is synthesized)
aactcaggataccaaaaggttaggcttagatgtctgcagccgagattgtccagaaatctggaaatgaggttttttaagtgccaaagtaaatttaaaaataaaagcgaaacattcagtggt

SEQ ID NO: 729464 - DNA, 120 bp, Artificial Sequence
  ENSG00000198589_132 (sequence is synthesized)
taagtattaacaattagtctcatttttaccattagtttctatttacaggcatgcctcattttactgtgctttgctattgcatgttgccgattactggattttttacaaattgatggtttt

SEQ ID NO: 729465 - DNA, 120 bp, Artificial Sequence
  ENSG00000198589_133 (sequence is synthesized)
tggcaactctgtgttgaactagtctatccatgccatttatccaacagcatgtactttatgtctttatgtcatatattggtaattcttacaatatttcaaaccttttcattattattattt

SEQ ID NO: 729466 - DNA, 120 bp, Artificial Sequence
  ENSG00000198589_134 (sequence is synthesized)
atctgtcatgctgatctgtcatcagtgatctttggtattactattgtaattgtcttggggcaccacaaaccacacccatttaagacagtgaacttaataaatgtctgactgtgctacaaa

SEQ ID NO: 729467 - DNA, 120 bp, Artificial Sequence
  ENSG00000198597_0 (sequence is synthesized)
gattttgctgaggccagctttggaacaggggaggtgagtctggagaagagagtttccacgttgtcatcataggatctggactcaagtgaccaaaaccttgcttggatttttacctgatga

SEQ ID NO: 729468 - DNA, 120 bp, Artificial Sequence
  ENSG00000198597_1 (sequence is synthesized)
agtttgtcttgaaaagtgaaaatggttccatttccattttccctgttctcaagggatggaagaagcgagcctgtgccttggagtgtcttcggcggagccggaagctgagccccacctgag

SEQ ID NO: 729469 - DNA, 120 bp, Artificial Sequence
  ENSG00000198597_2 (sequence is synthesized)
tggccccgtcctcaacggccagtatgccatgagtcagaagctgcaccagatcacctcccagctcagccatgccttccccgagctccatccccggcccaaccccgaggagaagccccccgc

SEQ ID NO: 729470 - DNA, 120 bp, Artificial Sequence
  ENSG00000198597_3 (sequence is synthesized)
atccctggaggagaaggcccacgtgcccatgagcggccagcccatgggcagtcagatggcgctcctggccaaccagctgggccgggaggtggacaccagcctcaacgggagggtggactt

SEQ ID NO: 729471 - DNA, 120 bp, Artificial Sequence
  ENSG00000198597_4 (sequence is synthesized)
gcagcagttcctcaacgggcagaacctgggcatcatgtcccagatgagcgacatcgaggacgacgcccgcaagaaccgcaagtacccgtgcccactctgcggcaagcgcttccgcttcaa

SEQ ID NO: 729472 - DNA, 120 bp, Artificial Sequence
  ENSG00000198597_5 (sequence is synthesized)
cagcatcctctccctgcacatgcgcacgcacacgggcgagaagcccttcaagtgcccgtactgcgaccacagggcggcgcagaaggggaacctcaagattcacctgcggacccacaagct

SEQ ID NO: 729473 - DNA, 120 bp, Artificial Sequence
  ENSG00000198597_6 (sequence is synthesized)
gggcaacctgggcaaggggcgtgggcgtgtgcgcgaggagaaccgcctgctgcacgagctggaggagcgcgccatcctgcgggacaagcagctgaaaggcagcctgctgcagccccggcc

SEQ ID NO: 729474 - DNA, 120 bp, Artificial Sequence
  ENSG00000198597_7 (sequence is synthesized)
ggacctgaagcccccgccgcacgcccagcaggccccgctggccgcctgcaccctggccctgcaggctaaccacagcgttcccgacgtggcccacccggtgccctcgcccaagcctgccag

SEQ ID NO: 729475 - DNA, 120 bp, Artificial Sequence
  ENSG00000198597_8 (sequence is synthesized)
cgtgcaggaggacgcggtggccccggcggcgggcttccgctgtaccttctgcaagggcaagttcaagaagcgcgaggagctggaccgccacatccgcatcttgcacaagccctacaagtg

SEQ ID NO: 729476 - DNA, 120 bp, Artificial Sequence
  ENSG00000198597_9 (sequence is synthesized)
cacgttgtgcgacttcgcggcttcgcaggaggaggagctcatcagccacgtggagaaggcacacatcacggccgagtcggcccagggccagggccccaacggcggtggcgagcagtcggc

SEQ ID NO: 729477 - DNA, 120 bp, Artificial Sequence
  ENSG00000198597_10 (sequence is synthesized)
caacgagttccgctgcgaggtgtgcggtcaggtgttcagccaggcgtggttcctcaagggtcacatgcgcaagcacaaagactcctttgagcactgctgccagatctgcggccggcgctt

SEQ ID NO: 729478 - DNA, 120 bp, Artificial Sequence
  ENSG00000198597_11 (sequence is synthesized)
caaggagccctggttcctcaagaaccacatgaaggtccacctcaacaagctgtcggtgaagaacaagtcccccagcgaccccgaggtgcctgtgcccatgggcggcatgtcccaggaggc

SEQ ID NO: 729479 - DNA, 120 bp, Artificial Sequence
  ENSG00000198597_12 (sequence is synthesized)
ccacgccaacctgtactccaggtacctctcctgcctgcagagtggcttcatgaccccggacaaagccggcctgagcgagcccagccagctctatggcaagggcgagctgcccatgaagga

SEQ ID NO: 729480 - DNA, 120 bp, Artificial Sequence
  ENSG00000198597_13 (sequence is synthesized)
gaaggaagcgctggggaagctgctgtctcccatctccagcatggcccacggcgtcccggagggggacaagcactccctcctgggatgcctcaatctcgtgccgccgctgaaatccagctg

SEQ ID NO: 729481 - DNA, 120 bp, Artificial Sequence
  ENSG00000198597_14 (sequence is synthesized)
catcgagcggctgcaggcggctgccaaggctgcggagatggaccccgtgaacagctaccaggcttggcagctcatggccaggggcatggccatggaacatggcttcttgtctaaagagca

SEQ ID NO: 729482 - DNA, 120 bp, Artificial Sequence
  ENSG00000198597_15 (sequence is synthesized)
tccgctgcagcgcaaccacgaagacactttggcaaacgccggggttctgtttgataaggagaagcgggagtacgtgttagtgggagcagatggctccaagcagaaaatgcctgctgattt

SEQ ID NO: 729483 - DNA, 120 bp, Artificial Sequence
  ENSG00000198597_16 (sequence is synthesized)
ggttcacagcactaaagtgggcagccagagagacctgccaagtaagctcgaccctttagaaagcagtcgggattttttgtcacacgggctgaaccagactctcgagtataacctgcaggg

SEQ ID NO: 729484 - DNA, 120 bp, Artificial Sequence
  ENSG00000198597_17 (sequence is synthesized)
tcctgggaacatgaaggagaagcccaccgagtgccccgactgcggccgggtgttccgcacttaccaccaggtggtcgtgcactcccgtgtccacaagcgggaccgcaagggcgaggagga

SEQ ID NO: 729485 - DNA, 120 bp, Artificial Sequence
  ENSG00000198597_18 (sequence is synthesized)
tgggctgcacgtgggcctggatgagcggcgtggctcgggcagtgaccaggagtcccagtcggtgagccgctccaccacgccgggctcctctaacgtcaccgaggagagcggggtcggagg

SEQ ID NO: 729486 - DNA, 120 bp, Artificial Sequence
  ENSG00000198597_19 (sequence is synthesized)
cggcctctcccagaccgggagtgcccaggaggacagcccgcacccctcctcgccatcctcctcagacattggcgaggaggctgggagatctgccggcgtccagcaaccagcgctgcttcg

SEQ ID NO: 729487 - DNA, 120 bp, Artificial Sequence
  ENSG00000198597_20 (sequence is synthesized)
tccggacatcccatcaccttaaggtgcacctgaggatacacacaggtgagaaaccctacaagtgtccgcactgtgactatgccggcacgcagtcagcatccttaaaataccacttagagc

SEQ ID NO: 729488 - DNA, 120 bp, Artificial Sequence
  ENSG00000198597_21 (sequence is synthesized)
gacaccatcgggagcggcagaacggggctgggccgctgtctgggcaacccccaaatcaagaccacaaggatgagatgtcaagcaaagcttctctgttcatcaggccagacatcctgaggg

SEQ ID NO: 729489 - DNA, 120 bp, Artificial Sequence
  ENSG00000198597_22 (sequence is synthesized)
gggccttcaagggtctccctggaatcgacttcagaggaggccctgcatctcagcagtggacatcaggggttctctcctctggagatcactcggggcaggccacgggcatgtcttcggagg

SEQ ID NO: 729490 - DNA, 120 bp, Artificial Sequence
  ENSG00000198597_23 (sequence is synthesized)
tcccctcagatgctctgaaaggcactgaccttccttccaaaagcacccacttctctgagatcggaagagcttatcaaagcattgtgagcaacggtgtgaatttccaagggtccttgcaag

SEQ ID NO: 729491 - DNA, 120 bp, Artificial Sequence
  ENSG00000198597_24 (sequence is synthesized)
ctttcatggacagttttgtcctcagttccttgaagaaggagaaggacatgaaggacaaagccctggctgaccccccttccatgaaagtccacggagtggatggtggtgaggagaaaccca

SEQ ID NO: 729492 - DNA, 120 bp, Artificial Sequence
  ENSG00000198597_25 (sequence is synthesized)
gtggcaagtcctcccagaggaagtccgagaaatctcagtatgaacccctggacttgtctgtgcggccagatgccgcctccctcccgggctcctcggtaactgtgcaggacagcattgcat

SEQ ID NO: 729493 - DNA, 120 bp, Artificial Sequence
  ENSG00000198597_26 (sequence is synthesized)
ggcacggctgcttgttttgtgctttcacaacgtcctccatggagctcatggcccttcatctccaggccaaccacctgggcaaagcgaaacgcaaagataacaccatcggggtcacagtca

SEQ ID NO: 729494 - DNA, 120 bp, Artificial Sequence
  ENSG00000198597_27 (sequence is synthesized)
actgcaaagaccaagcccgggaggcgagtaagatggccctgctgccctcgttacaatcaaacaaagacctgggcctctccaatatgatcagctctctagactctgcttctgagaagatgg

SEQ ID NO: 729495 - DNA, 120 bp, Artificial Sequence
  ENSG00000198597_28 (sequence is synthesized)
cccaaggtcagctcaaggagactctgggagagcagaagagcggtgcatggaccggccacgtggaccctgcattttgtaacttcccatcagacttctacaagcagtttggtgtttacccag

SEQ ID NO: 729496 - DNA, 120 bp, Artificial Sequence
  ENSG00000198597_29 (sequence is synthesized)
gcatggttggctcaggggcctccagttcctgccccaacaaggagcctgatggaaaggcccactctgaagaggatgtccccatcctgatccccgaaaccacgagtaagaacactactgatg

SEQ ID NO: 729497 - DNA, 120 bp, Artificial Sequence
  ENSG00000198597_30 (sequence is synthesized)
acctctctgacattgcctcctcagaggacatggactcctccaagggggagaacaacgatgaagaggatgttgaaaccgaaccggaaatgatgaccaagccactgtctgccctcagcaaag

SEQ ID NO: 729498 - DNA, 120 bp, Artificial Sequence
  ENSG00000198597_31 (sequence is synthesized)
acagcagcagcgatggcggggacagcctgcagcccacaggcacctcccagcccgtccagggactggtctcacctttatcccaagcaccggagaagcagtggcacagccagggtcttctcc

SEQ ID NO: 729499 - DNA, 120 bp, Artificial Sequence
  ENSG00000198597_32 (sequence is synthesized)
aagcccaggaccccttggcgggcctgccaaagccggagcgggggccccagagcctggacaagccgatgaacatgctgtcggtcctcagggcctacagttctgatggcttagcagccttta

SEQ ID NO: 729500 - DNA, 120 bp, Artificial Sequence
  ENSG00000198597_33 (sequence is synthesized)
acggacttgcaagtagcacagcaaattctggatgtatcaagaggccagacttgtgtggtaagtgacactccctgtcctagtcggtctatctggacttgcccttgtctgttcgtggtcctc

SEQ ID NO: 729501 - DNA, 120 bp, Artificial Sequence
  ENSG00000198597_34 (sequence is synthesized)
ggtggttatctgcagcttgttaatcgtgtaaagtcaagagaagaatgtatacacatatgtgtgttgaataattactattggcataggtatgtgtatacacacggtgcaccaatctacagt

SEQ ID NO: 729502 - DNA, 120 bp, Artificial Sequence
  ENSG00000198597_35 (sequence is synthesized)
atatatagcagagaatcagaggctaaaaatattaccccatatgttccagtattagtcatggattgcaaaggcttagtaacttgagcaggagagaaaactccctcaaagtcataaatcctg

SEQ ID NO: 729503 - DNA, 120 bp, Artificial Sequence
  ENSG00000198597_36 (sequence is synthesized)
agtgacaactgctgctggatgacagatcccttcacctgtggacaacctggctgggggtggggggctgttccaccagctcacctgagcatgtagaggtgggtcctgcagtggtctcgtggg

SEQ ID NO: 729504 - DNA, 120 bp, Artificial Sequence
  ENSG00000198597_37 (sequence is synthesized)
tattactgcttgtgtctgattgtcctgtattttgtaacactttagaagaatacagaaaagtgcagtaattctctttctccatagtatttaagcagaaatattgctagtttaatattgtgt

SEQ ID NO: 729505 - DNA, 120 bp, Artificial Sequence
  ENSG00000198597_38 (sequence is synthesized)
caggtcgtcctattaaccaggagcagatgacagtaaaatttcagtgaatagcaccttgacatctacaacttaaaaatggtgattgaagcaaaatatgtaaacttgtacggggtgatcgtg

SEQ ID NO: 729506 - DNA, 120 bp, Artificial Sequence
  ENSG00000198597_39 (sequence is synthesized)
tgctttggaacagagtattgttgaagtaattagaagatatattaaggtgttcctggtaatgaaggcatgtaagttataataattgtagctttctgaataagtgtcaaactatatctttaa

SEQ ID NO: 729507 - DNA, 120 bp, Artificial Sequence
  ENSG00000198597_40 (sequence is synthesized)
gtgtgctgtatgctgagttacaagttaggtcatttatgaatggaatgtaaaataatactaaaaatgcttcaataacttatcttggtattgctaataaaaaaaaaaagctgtgaaacatta

SEQ ID NO: 729508 - DNA, 120 bp, Artificial Sequence
  ENSG00000198597_41 (sequence is synthesized)
ggaaaaagaggggggcggccagaagagggaaggagaggcgtggggacagggcccccgcccccgccggggtcgggtttgatggtgaaatagtaaacccacgcacggagggtcgccaggaaa

SEQ ID NO: 729509 - DNA, 120 bp, Artificial Sequence
  ENSG00000198597_42 (sequence is synthesized)
gtggacattaccgctttaattaacttcgagatgctccggcggcgggacctggcgtagccgtgacgcgcccccataaatctgcccggcccggggctgctccgagaactcgtacagtagcgg

SEQ ID NO: 729510 - DNA, 120 bp, Artificial Sequence
  ENSG00000198597_43 (sequence is synthesized)
cgtcagatccatcccgcgcctcccagtccggagtccatttgcataattggattttttttttttgcctccttctttctccctgaaacttgtttgaaaacccaagtgaaaaccgcgacgatc

SEQ ID NO: 729511 - DNA, 120 bp, Artificial Sequence
  ENSG00000198597_44 (sequence is synthesized)
gagatccattgctttaagacttgcctgagatgagtatttgatgctaccttccagactgacagtgtccaggaaagcagctgcagtggaggtggaagggcagtaggattccctgattgaacc

SEQ ID NO: 729512 - DNA, 120 bp, Artificial Sequence
  ENSG00000198597_45 (sequence is synthesized)
ggccctgtggaggtacagactgggcaccttcggccgcagtgcatgcagtggctgcagccagcctcgttatggaaaagaattgcccagtgggttgagggaatgggcaacagcacactagaa

SEQ ID NO: 729513 - DNA, 120 bp, Artificial Sequence
  ENSG00000198597_46 (sequence is synthesized)
tcatgaggctgaaaggaatattgccgactggaggtcatttttcccaactgaggggcaatagtttgccactataaactgcacattgcagtcagtatatgttttattaaaccatttaaggaa

SEQ ID NO: 729514 - DNA, 120 bp, Artificial Sequence
  ENSG00000198597_47 (sequence is synthesized)
cgccccctcttgcaatctgtcagtgcctgcaccaactttatcctttctggggcattttctcaccagactgacagtccttaagacaagtatgcagttaagctgctaagggatggaagaagc

SEQ ID NO: 729515 - DNA, 120 bp, Artificial Sequence
  ENSG00000198597_48 (sequence is synthesized)
gcaagtagcacagcaaattctggatgtatcaagaggccagacttgtgtggtcacaggcctttccagtgccgctactgtccctacagtgcctctcagaaggggaacctgaagacccatgtc

SEQ ID NO: 729516 - DNA, 120 bp, Artificial Sequence
  ENSG00000198597_49 (sequence is synthesized)
ctctgcgtccatcgcatgccttttgacaacagccagtatcccgaccgcaggttcaagcgctccagggtcgactcagaggcttctgggaatttcgaggagcctacagctgtcaaggcgggg

SEQ ID NO: 729517 - DNA, 120 bp, Artificial Sequence
  ENSG00000198597_50 (sequence is synthesized)
agctctgcagacctcacggaagagggcggcaagggccaggaggagaccaactgagcagaccaacctgtatattgcaatagtattttacacagttttaacattatgcatctggtaaaagtt

SEQ ID NO: 729518 - DNA, 120 bp, Artificial Sequence
  ENSG00000198597_51 (sequence is synthesized)
tgctaactgcattccaaggggaaaaaatcatgtacaaccccccaatagtgtatagaacatttaaaaaattttaaaagatatctatatatatattaaaaaaaaaaaattccccagcccttg

SEQ ID NO: 729519 - DNA, 120 bp, Artificial Sequence
  ENSG00000198597_52 (sequence is synthesized)
aaaatggctgctaaactgttacccggcaacaagtacttccaaaacaatgcaggtgggagaaaagtgatttcaaaaattcttggtgccctctgagctggagagagctgggggcccttccaa

SEQ ID NO: 729520 - DNA, 120 bp, Artificial Sequence
  ENSG00000198597_53 (sequence is synthesized)
ctcgaaagtcgtctttgtccaaaaataatgctcttaactgaaaaacgataccatctaaacgatttagtgttgcgttgaagatggaggggctgtgttttcgttgttgaaaacacctctata

SEQ ID NO: 729521 - DNA, 120 bp, Artificial Sequence
  ENSG00000198597_54 (sequence is synthesized)
atctgacaccagctgctgtaattcgcctagaaccctaatgagatgtgtcgggaggcagctgcggtgccagtcagactggagcggtcactgcagagaaaatcaattcacgtggtgttgtaa

SEQ ID NO: 729522 - DNA, 120 bp, Artificial Sequence
  ENSG00000198597_55 (sequence is synthesized)
ctgcactcttggagaaaccttagacggcccgcagccagcgccggggctgaccggcactgcagaggattgagatcttaaatgcgcatttttacaaaatacacagccaaatgaaatcaatga

SEQ ID NO: 729523 - DNA, 120 bp, Artificial Sequence
  ENSG00000198597_56 (sequence is synthesized)
tcaggaagtgtctgcagacaaatgtccattgcaggtttgatgagtaattcctttttttagatcaaattgttctcggtagccttttcttcttttttaaaaaaaaattttggatgaagaagg

SEQ ID NO: 729524 - DNA, 120 bp, Artificial Sequence
  ENSG00000198597_57 (sequence is synthesized)
aagttgctattaaaaaaaagtagggtacattatataaaatgttgttagaaaaactagctaaccccatccatagaagatgctggtgagcaattaaaatttaggtaataatagaaagatttt

SEQ ID NO: 729525 - DNA, 120 bp, Artificial Sequence
  ENSG00000198597_58 (sequence is synthesized)
tttactatgatttttaaaattttacttgaatgaaggctgctccggtccttattatcggattttttttcatgtgttggtttttataagtgtcacagacatgaagcaagattttcttctcca

SEQ ID NO: 729526 - DNA, 120 bp, Artificial Sequence
  ENSG00000198597_59 (sequence is synthesized)
actgtttgagttaaaaatgtctgtttttgtaaaacaaatgtgttctatatttttgtagattttagattttctactgattggatactccaaatttatcaagttctgcaccacacagaagga

SEQ ID NO: 729527 - DNA, 120 bp, Artificial Sequence
  ENSG00000198597_60 (sequence is synthesized)
gattttgagtgtcaataatgaaacacttaactcattaaaaaaatgatttaagaagactagttaaaggtttattcttgaatctgctagcatggtgtaaagttgagccttttaacatacttc

SEQ ID NO: 729528 - DNA, 120 bp, Artificial Sequence
  ENSG00000198597_61 (sequence is synthesized)
ctttgagtgacatgaaattggtgctgttgcttgtggtggtagagaagtatgaaagtattaacttcttctaaaacaaaatcattcagacttaaaaaaaaaaaaaaggtcaatatttccttg

SEQ ID NO: 729529 - DNA, 120 bp, Artificial Sequence
  ENSG00000198597_62 (sequence is synthesized)
caggctgggagcacagattaaaccccagggccttaaaaacttcagctctgcctacagcagtttacaaaaatactaaactgcaatcaatgtaaataaaattcttagtgctatcctgagacc

SEQ ID NO: 729530 - DNA, 120 bp, Artificial Sequence
  ENSG00000198597_63 (sequence is synthesized)
agaaagaatctcaggctaataaggaatccggtttgcatatgctgtcaaaagggtgtcatctaaccgaggtttcagtgtaaatgaggtcgctgtgcaacttggacccatctggcatagagc

SEQ ID NO: 729531 - DNA, 120 bp, Artificial Sequence
  ENSG00000198597_64 (sequence is synthesized)
aagctgctttcttgtttttctagtatagttctcactgccttacttaaatcgagttgataaacttaatgcaactgtttctatgatcctagagaaaggactgaaatgttattgaaaactttc

SEQ ID NO: 729532 - DNA, 120 bp, Artificial Sequence
  ENSG00000198597_65 (sequence is synthesized)
cgactgtagtaagctttaggattttgactgcactactgtgtttggtgactgtgccagtcccttgctttctgtgtttgctctgcctttggtatcttagcaaagaaaaataaaaaaagaaaa

SEQ ID NO: 729533 - DNA, 120 bp, Artificial Sequence
  ENSG00000198597_66 (sequence is synthesized)
aaaaaagaaaaaaaagaggaaaaaaaagtgggggaaaaaatgagagccacattccatttctagcactttgggagctctttcagtatttttttgtgtcttttcagcatcctcagatgcgac

SEQ ID NO: 729534 - DNA, 120 bp, Artificial Sequence
  ENSG00000198597_67 (sequence is synthesized)
tcagcatcctcagatgcgacaggcaataattctgtttgtgacactgggaacatcccctcttctttgtggtgtgtgttgattccattttgtccagtgctgctgtccttcctccccctctga

SEQ ID NO: 729535 - DNA, 120 bp, Artificial Sequence
  ENSG00000198597_68 (sequence is synthesized)
cacaggccttctttccagaacatttgtaacttgtaatacaaacaagtgacagccacagtgatgcagcgtcagtttctgaatgtcatcaggttctcatatctaaacatgtcaagttttttc

SEQ ID NO: 729536 - DNA, 120 bp, Artificial Sequence
  ENSG00000198597_69 (sequence is synthesized)
cctgtaacttctgtagtctgtgatgctggtcataatactgtctacattcctacgcaaagaaaaaaaaatctatcttggaggaaatctgagatcaataggagtagaggattttgttgctat

SEQ ID NO: 729537 - DNA, 120 bp, Artificial Sequence
  ENSG00000198597_70 (sequence is synthesized)
gcttgtaacaagtagaaaactttgtatttaaagtttattcttggtcattatttattattataatacatcagttgacagaactttattctggtatagaaagtattaaaagttgttttttca

SEQ ID NO: 729538 - DNA, 80 bp, Artificial Sequence
  ENSG00000198598_0 (sequence is synthesized)
tgcggaacgcgaagcggagggcgcgggaccctgcacgccgcccgcgggcccatgtgagcgccatgcggcgccgcgcagcc

SEQ ID NO: 729539 - DNA, 80 bp, Artificial Sequence
  ENSG00000198598_1 (sequence is synthesized)
ctggggacccgcgggggctgcgccgcgcccgcacccgcgccgcgcgccgaggacctcagcctgggagtggagtggctaag

SEQ ID NO: 729540 - DNA, 120 bp, Artificial Sequence
  ENSG00000198598_2 (sequence is synthesized)
gaggacctcagcctgggagtggagtggctaagcaggttcggttacctgcccccggctgaccccacaacagggcagctgcagacgcaagaggagctgtctaaggccatcacagccatgcag

SEQ ID NO: 729541 - DNA, 120 bp, Artificial Sequence
  ENSG00000198598_3 (sequence is synthesized)
cagtttggtggcctggaggccaccggcatcctggacgaggccaccctggccctgatgaaaaccccacgctgctccctgccagacctccctgtcctgacccaggctcgcaggagacgccag

SEQ ID NO: 729542 - DNA, 120 bp, Artificial Sequence
  ENSG00000198598_4 (sequence is synthesized)
gctccagcccccaccaagtggaacaagaggaacctgtcgtggagggtccggacgttcccacgggactcaccactggggcacgacacggtgcgtgcactcatgtactacgccctcaaggtc

SEQ ID NO: 729543 - DNA, 120 bp, Artificial Sequence
  ENSG00000198598_5 (sequence is synthesized)
tggagcgacattgcgcccctgaacttccacgaggtggcgggcagcgccgccgacatccagatcgacttctccaaggccgaccataacgacggctaccccttcgacggccccggcggcacc

SEQ ID NO: 729544 - DNA, 120 bp, Artificial Sequence
  ENSG00000198598_6 (sequence is synthesized)
gtggcccacgccttcttccccggccaccaccacaccgccggggacacccactttgacgatgacgaggcctggaccttccgctcctcggatgcccacgggatggacctgtttgcagtggct

SEQ ID NO: 729545 - DNA, 120 bp, Artificial Sequence
  ENSG00000198598_7 (sequence is synthesized)
gtccacgagtttggccacgccattgggttaagccatgtggccgctgcacactccatcatgcggccgtactaccagggcccggtgggtgacccgctgcgctacgggctcccctacgaggac

SEQ ID NO: 729546 - DNA, 120 bp, Artificial Sequence
  ENSG00000198598_8 (sequence is synthesized)
aaggtgcgcgtctggcagctgtacggtgtgcgggagtctgtgtctcccacggcgcagcccgaggagcctcccctgctgccggagcccccagacaaccggtccagcgccccgcccaggaag

SEQ ID NO: 729547 - DNA, 120 bp, Artificial Sequence
  ENSG00000198598_9 (sequence is synthesized)
gacgtgccccacagatgcagcactcactttgacgcggtggcccagatccggggtgaagctttcttcttcaaaggcaagtacttctggcggctgacgcgggaccggcacctggtgtccctg

SEQ ID NO: 729548 - DNA, 120 bp, Artificial Sequence
  ENSG00000198598_10 (sequence is synthesized)
gatgcaccgcttctggcggggcctgccgctgcacctggacagcgtggacgccgtgtacgagcgcaccagcgaccacaagatcgtcttctttaaaggagacaggtactgggtgttcaagga

SEQ ID NO: 729549 - DNA, 120 bp, Artificial Sequence
  ENSG00000198598_11 (sequence is synthesized)
caataacgtagaggaaggatacccgcgccccgtctccgacttcagcctcccgcctggcggcatcgacgctgccttctcctgggcccacaatgacaggacttatttctttaaggaccagct

SEQ ID NO: 729550 - DNA, 120 bp, Artificial Sequence
  ENSG00000198598_12 (sequence is synthesized)
gtactggcgctacgatgaccacacgaggcacatggaccccggctaccccgcccagagccccctgtggaggggtgtccccagcacgctggacgacgccatgcgctggtccgacggtgcctc

SEQ ID NO: 729551 - DNA, 120 bp, Artificial Sequence
  ENSG00000198598_13 (sequence is synthesized)
ctacttcttccgtggccaggagtactggaaagtgctggatggcgagctggaggtggcacccgggtacccacagtccacggcccgggactggctggtgtgtggagactcacaggccgatgg

SEQ ID NO: 729552 - DNA, 120 bp, Artificial Sequence
  ENSG00000198598_14 (sequence is synthesized)
atctgtggctgcgggcgtggacgcggcagaggggccccgcgcccctccaggacaacatgaccagagccgctcggaggacggttacgaggtctgctcatgcacctctggggcatcctctcc

SEQ ID NO: 729553 - DNA, 120 bp, Artificial Sequence
  ENSG00000198598_15 (sequence is synthesized)
cccgggggccccaggcccactggtggctgccaccatgctgctgctgctgccgccactgtcaccaggcgccctgtggacagcggcccaggccctgacgctatgacacacagcgcgagccca

SEQ ID NO: 729554 - DNA, 120 bp, Artificial Sequence
  ENSG00000198598_16 (sequence is synthesized)
tgagaggacagaggcggtgggacagcctggccacagagggcaaggactgtgccggagtccctgggggaggtgctggcgcgggatgaggacgggccaccctggcaccggaaggccagcaga

SEQ ID NO: 729555 - DNA, 120 bp, Artificial Sequence
  ENSG00000198598_17 (sequence is synthesized)
gggcactgtccgccagggctgggcaggctcaggtggcaaggacggagctgtcccctagtgagggactgtgttgactgacgagccgaggggtggccgctccagaagggtgcccagtcaggc

SEQ ID NO: 729556 - DNA, 120 bp, Artificial Sequence
  ENSG00000198598_18 (sequence is synthesized)
cgcaccgccgccagcctcctccggccctggagggagcatctcgggctgggggcccacccctctctgtgccggcgccaccaaccccacccacactgctgcctggtgctcccgccggcccac

SEQ ID NO: 729557 - DNA, 120 bp, Artificial Sequence
  ENSG00000198598_19 (sequence is synthesized)
agggcctccgtccccaggtccccagtggggcagccctccccacagacgagccccccacatggtgccgcggcacgtcccccctgtgacgcgttccagaccaacatgacctctccctgcttt

SEQ ID NO: 729558 - DNA, 120 bp, Artificial Sequence
  ENSG00000198598_20 (sequence is synthesized)
aagagacaagaggtgccttgtgggcagatagggggctgggagggggcctgcccggaagcagtggtggcccgtggcaggcttctcactgggtaggaccgggccctctgttgcaccccctca

SEQ ID NO: 729559 - DNA, 120 bp, Artificial Sequence
  ENSG00000198598_21 (sequence is synthesized)
ccaccctggcctcccaaagtgctggggttacaagtgtgagccaccacacccagccaaccctatttccaaaccaggtcatattctaaggttccggatggacgtgaatttggcgggacacta

SEQ ID NO: 729560 - DNA, 120 bp, Artificial Sequence
  ENSG00000198598_22 (sequence is synthesized)
ggacactatgtgacccactcaccttctgctgtcccccggagtcaaaactatctcagatgggccctggctagtgtgagggctggtgaaccgagagagccccttcagtggggagcaggggga

SEQ ID NO: 729561 - DNA, 120 bp, Artificial Sequence
  ENSG00000198598_23 (sequence is synthesized)
tggggcagacgggacgcaccgttgagggccctggggctgatggctccacgcgggagctgacgtttgcctgtggcctgggggtctcagcctgcctgggctctcatttccctccctccgtca

SEQ ID NO: 729562 - DNA, 120 bp, Artificial Sequence
  ENSG00000198598_24 (sequence is synthesized)
tctatcccagtgaactactggaaccgccgtgagtgcatcggatgactcctggcgtggggaggaaggcggaagatgggggagaccctcataggggcacccccgggctgaggaggggcgttc

SEQ ID NO: 729563 - DNA, 120 bp, Artificial Sequence
  ENSG00000198598_25 (sequence is synthesized)
acgaggacaaggtgcgcgtctggcagctgtacggtgtgcgggagtctgtgtctcccacggcgcagcccgaggagcctcccctgctgccggagcccccagacaaccggtccagcgccccgt

SEQ ID NO: 729564 - DNA, 120 bp, Artificial Sequence
  ENSG00000198598_26 (sequence is synthesized)
aagccctgggcccacggtcaccacccgctggggtctgtctgtcctcatccctgtcccacgcaacatttgccccaaatcgtggctcagagtcctgggaaacgcacagctgtgtggccgact

SEQ ID NO: 729565 - DNA, 120 bp, Artificial Sequence
  ENSG00000198598_27 (sequence is synthesized)
gagcccccagtgacattttgtcttttcttaaaccccatctaataccggccctcccctgccaggggtcctgcacagaaatgagaacttcagacaaggtttcctctccccctcgtccctgtc

SEQ ID NO: 729566 - DNA, 120 bp, Artificial Sequence
  ENSG00000198598_28 (sequence is synthesized)
gtttcatcaagctcatggattcccagcatcaggaagtcaggcagggcctgcgagtgtctggcctgtgcccccagcgggagggatgttcactgccggggcccacatctggtgccagggctg

SEQ ID NO: 729567 - DNA, 120 bp, Artificial Sequence
  ENSG00000198598_29 (sequence is synthesized)
ggcccaactgggacggccactggggctgctccacgaggcatgaccctcccacagcaactggattcccagtgaagttgtcttgagagctggtattgccagaggccggtagaagctgtgacc

SEQ ID NO: 729568 - DNA, 120 bp, Artificial Sequence
  ENSG00000198598_30 (sequence is synthesized)
ttgtgccacccagccccagatgtcacaggaccgtacgtgtaaccctcccggttaaagctgcgaaggagccacgctctgtgtcgagtcgtctctcggtggacatgcaccttgtccctgacc

SEQ ID NO: 729569 - DNA, 120 bp, Artificial Sequence
  ENSG00000198598_31 (sequence is synthesized)
agctcctgccctccccgcagctccctggcgctctgtatgctcagagcgtagatctcggcccccgcccgctgaagcggtggacaggcacccccgttttaatttgcctttagcagacctcta

SEQ ID NO: 729570 - DNA, 120 bp, Artificial Sequence
  ENSG00000198598_32 (sequence is synthesized)
ggcaaggataggggctccacacaaggatgcctgtcccatgccgctcaggtcaggggctctgccgcaggatgccctgtcccgcgctgcccaggccccgcctcccagcccacctggctctct

SEQ ID NO: 729571 - DNA, 120 bp, Artificial Sequence
  ENSG00000198601_0 (sequence is synthesized)
atggcatgggagaatcagaccttcaactccgacttcatcctccttggaatcttcaatcacagcccaccacacacgttcctcttctttctggtcctgggcatctttttagtggccttcatg

SEQ ID NO: 729572 - DNA, 120 bp, Artificial Sequence
  ENSG00000198601_1 (sequence is synthesized)
ggaaactctgtcatggttctcctcatctacctggacacccagctccacacccccatgtacttcctcctcagccaactgtccctcatggacctcatgctcatctgcaccaccgtacccaag

SEQ ID NO: 729573 - DNA, 120 bp, Artificial Sequence
  ENSG00000198601_2 (sequence is synthesized)
atggccttcaactacctgtctggcagcaagtccatttctatggctggttgtgtcacacaaattttcttctatatatcactgtctggctctgaatgttttcttttggctgttatggcttat

SEQ ID NO: 729574 - DNA, 120 bp, Artificial Sequence
  ENSG00000198601_3 (sequence is synthesized)
gaccgctatattgctatttgccaccctctaagatataccaatctcatgaatcctaaaatttgtggacttatggctaccttctcctggatcctgggctctacagatggaatcattgatgct

SEQ ID NO: 729575 - DNA, 120 bp, Artificial Sequence
  ENSG00000198601_4 (sequence is synthesized)
tgcaatgacacatcaatatttgaagaggttattttcatctgctgtatagtaatgcttgttttccctgttgcaatcatcattgcttcctatgctcgagttattctggctgtcattcacatg

SEQ ID NO: 729576 - DNA, 120 bp, Artificial Sequence
  ENSG00000198601_5 (sequence is synthesized)
ggatctggagagggtcgttgcaaagctttcacgacctgttcctctcacctcatggtggtgggaatgtactatggagcagctttgttcatgtacatacggcccacatctgatcactcccca

SEQ ID NO: 729577 - DNA, 120 bp, Artificial Sequence
  ENSG00000198601_6 (sequence is synthesized)
acgcaggacaagatggtgtctgtattctacaccatcctcactcccatgctgaatcccctcatctacagcctccgcaacaaggaggtgactagagcattcatgaagatcttaggaaagggc

SEQ ID NO: 729578 - DNA, 120 bp, Artificial Sequence
  ENSG00000198601_7 (sequence is synthesized)
aagtctgagagtgagttacctcataaactttatgttttgctgtttgctaaattcttctttctaatatccatctttttctatgatgtcaaaatactagcattgattatgtacattgcctaa

SEQ ID NO: 729579 - DNA, 120 bp, Artificial Sequence
  ENSG00000198601_8 (sequence is synthesized)
ggaacctaaaatcacattgaaaatacacactattcagatcagtactaagagagattgctattctatctcatgagtgtcacataaggaggttccttctctaccttcccagcactgaagagg

SEQ ID NO: 729580 - DNA, 120 bp, Artificial Sequence
  ENSG00000198604_0 (sequence is synthesized)
cttcagagccgaaagtagatcagaaacttcccaggagctccgagaggcggggaagtggcggtgggacgcaattccccgcgcggagtcgggcagtggcagcgggagaagcggcagccaggg

SEQ ID NO: 729581 - DNA, 120 bp, Artificial Sequence
  ENSG00000198604_1 (sequence is synthesized)
gcgcggcggggccggagagaggcggtcccctgggaggacggggtctcccctcgttgcctttgtagtggagaaggtggacaagtggcagtcggcgtgatcgcagggaagcggggccggcgc

SEQ ID NO: 729582 - DNA, 120 bp, Artificial Sequence
  ENSG00000198604_2 (sequence is synthesized)
gggcggccgagggtccaggcgagcccgcgggcggacgggagatgccgctgctacaccgaaagccgtttgtgagacagaagccgcccgcggacctgcggcccgacgaggaagttttctact

SEQ ID NO: 729583 - DNA, 120 bp, Artificial Sequence
  ENSG00000198604_3 (sequence is synthesized)
gtaaagtcaccaacgagatcttccgccactacgatgacttttttgaacgaaccattctgtgcaacagccttgtgtggagttgtgctgtgacgggtagacctggactgacgtatcaggaag

SEQ ID NO: 729584 - DNA, 120 bp, Artificial Sequence
  ENSG00000198604_4 (sequence is synthesized)
cacttgagtcagaaaaaaaagcaagacagaatcttcagagttttccagaaccactaattattccagttttatacttgaccagccttacccatcgttcgcgcttacatgaaatttgtgatg

SEQ ID NO: 729585 - DNA, 120 bp, Artificial Sequence
  ENSG00000198604_5 (sequence is synthesized)
atatctttgcatatgtcaaggatcgatattttgtcgaagaaactgtggaagtcattaggaacaatggtgcaaggttgcagtgtaggattttggaagtcctccctccatcacatcaaaatg

SEQ ID NO: 729586 - DNA, 120 bp, Artificial Sequence
  ENSG00000198604_6 (sequence is synthesized)
gttttgctaatggacatgttaacagtgtggatggagaaactattatcatcagtgatagtgatgattcagaaacacaaagctgttcttttcaaaatgggaagaaaaaagatgcaattgatc

SEQ ID NO: 729587 - DNA, 120 bp, Artificial Sequence
  ENSG00000198604_7 (sequence is synthesized)
ccttactattcaagtataaagtgcaacccactaaaaaagaattacatgagtctgctattgttaaagcaacacaaatcagccggagaaaacacctattttctcgtgataaactaaagcttt

SEQ ID NO: 729588 - DNA, 120 bp, Artificial Sequence
  ENSG00000198604_8 (sequence is synthesized)
ttctgaagcaacactgtgaaccacaagatggagtcattaaaataaaggcatcatctctttcaacgtataaaatagcagaacaagatttttcttatttcttccctgatgatccacccacat

SEQ ID NO: 729589 - DNA, 120 bp, Artificial Sequence
  ENSG00000198604_9 (sequence is synthesized)
ttatcttcagtcctgctaacagacgaagagggagacctcccaaacgaatacatattagtcaagaggacaatgttgctaataaacagactcttgcaagttataggagcaaagctactaaag

SEQ ID NO: 729590 - DNA, 120 bp, Artificial Sequence
  ENSG00000198604_10 (sequence is synthesized)
aaagagataaacttttgaaacaagaagaaatgaagtcactggcttttgaaaaggctaaattaaaaagagaaaaagcagatgccctagaagcgaagaaaaaagaaaaagaagataaagaga

SEQ ID NO: 729591 - DNA, 120 bp, Artificial Sequence
  ENSG00000198604_11 (sequence is synthesized)
aaaagagggaagaattgaaaaaaattgttgaagaagagagactaaagaaaaaagaagaaaaagagaggcttaaagtagaaagagaaaaggaaagagagaagttacgtgaagaaaagcgaa

SEQ ID NO: 729592 - DNA, 120 bp, Artificial Sequence
  ENSG00000198604_12 (sequence is synthesized)
agtatgtggaatacttaaaacagtggagtaaacctagagaagatatggaatgtgatgaccttaaggaacttccagaaccaacaccagtgaaaactagactacctcctgaaatctttggtg

SEQ ID NO: 729593 - DNA, 120 bp, Artificial Sequence
  ENSG00000198604_13 (sequence is synthesized)
atgctctgatggttttggagttccttaatgcatttggggaactttttgatcttcaagatgagtttcctgatggagtaaccctagaagtattagaggaagctcttgtaggaaatgacagtg

SEQ ID NO: 729594 - DNA, 120 bp, Artificial Sequence
  ENSG00000198604_14 (sequence is synthesized)
aaggcccactgtgtgaattgctttttttcttcctgactgcaatcttccaggcaatagctgaagaagaagaggaagtagccaaagagcaactaactgatgctgacaccaaagatttaacag

SEQ ID NO: 729595 - DNA, 120 bp, Artificial Sequence
  ENSG00000198604_15 (sequence is synthesized)
aggctttggatgaagatgcagaccccacaaaatctgcactgtctgcagttgcatctttggcagctgcatggccacagttacaccagggctgcagtttgaaaagtttggatcttgatagct

SEQ ID NO: 729596 - DNA, 120 bp, Artificial Sequence
  ENSG00000198604_16 (sequence is synthesized)
gcactctttcagaaatcctcagactgcacatcttagcttcaggtgctgatgtaacatcagcaaatgcaaagtatagatatcaaaaacgaggaggatttgatgctacagatgatgcttgta

SEQ ID NO: 729597 - DNA, 120 bp, Artificial Sequence
  ENSG00000198604_17 (sequence is synthesized)
tggagcttcgtttgagcaatcccagtctagtgaagaaactgtcaagcacctcagtgtatgatttgacaccaggagaaaaaatgaagatactccatgctctctgtggaaagctactgaccc

SEQ ID NO: 729598 - DNA, 120 bp, Artificial Sequence
  ENSG00000198604_18 (sequence is synthesized)
tagtttcaactagggattttattgaagattatgttgatatattacgacaggcaaagcaggagttccgggaattaaaagcagaacaacatcgaaaagagagggaagaagcagctgccagaa

SEQ ID NO: 729599 - DNA, 120 bp, Artificial Sequence
  ENSG00000198604_19 (sequence is synthesized)
ttcgtaaaaggaaggaagaaaaacttaaggagcaagaacaaaaaatgaaagagaaacaagaaaaactgaaagaagatgagcaaagaaattcaacggcagatatatctattggggaggaag

SEQ ID NO: 729600 - DNA, 120 bp, Artificial Sequence
  ENSG00000198604_20 (sequence is synthesized)
aaagggaagattttgatactagcattgagagcaaagacacagagcaaaaggaattagatcaagatatggtcactgaagatgaagatgacccaggatcacataaaagaggcagaaggggga

SEQ ID NO: 729601 - DNA, 120 bp, Artificial Sequence
  ENSG00000198604_21 (sequence is synthesized)
aaagaggacaaaatggatttaaagaatttacaaggcaagaacagatcaactgtgtaacaagagagcctcttactgctgatgaggaagaagcattaaaacaggaacaccaacgaaaagaga

SEQ ID NO: 729602 - DNA, 120 bp, Artificial Sequence
  ENSG00000198604_22 (sequence is synthesized)
aagagctcttagaaaaaatccaaagtgccatagcctgtaccaatatctttcccttgggtcgcgaccgcatgtatagacgatactggattttcccttctattcctggactctttattgaag

SEQ ID NO: 729603 - DNA, 120 bp, Artificial Sequence
  ENSG00000198604_23 (sequence is synthesized)
actaaaactggagagcctttgatgtctgaatctacctccaacattgaccaaggtccacgtgaccattctgtgcagctgccaaaaccagtgcataagccaaatcggtggtgcttttacagt

SEQ ID NO: 729604 - DNA, 120 bp, Artificial Sequence
  ENSG00000198604_24 (sequence is synthesized)
tcttgtgaacagctagaccagcttattgaagctcttaattctagaggacatagagaaagtgccttaaaagaaactttgttacaagagaaaagcagaatatgtgcacagctagcccgtttt

SEQ ID NO: 729605 - DNA, 120 bp, Artificial Sequence
  ENSG00000198604_25 (sequence is synthesized)
tctgaagagaaatttcatttttcagacaaacctcagcctgatagcaaaccaacatatagtcggggaagatcttccaatgcatatgatccatctcagatgtgtgcagaaaagcaacttgaa

SEQ ID NO: 729606 - DNA, 120 bp, Artificial Sequence
  ENSG00000198604_26 (sequence is synthesized)
ctaaggctgagagattttcttttagatattgaagatagaatctaccaaggaacattaggagccatcaaggttacagatcgacatatctggagatcagcattagaaagtggacggtatgag

SEQ ID NO: 729607 - DNA, 120 bp, Artificial Sequence
  ENSG00000198604_27 (sequence is synthesized)
ctgttaagtgaggaaaacaaggaaaatgggataattaaaactgtgaatgaagacgtagaagagatggaaattgatgaacaaacaaaggtcatagtaaaagacagacttttggggataaaa

SEQ ID NO: 729608 - DNA, 120 bp, Artificial Sequence
  ENSG00000198604_28 (sequence is synthesized)
acagaaactccaagtactgtatcaacaaatgcaagtacaccacaatcagtgagcagtgtggttcattatctggcaatggcactctttcaaatagagcagggcattgagcggcgttttctg

SEQ ID NO: 729609 - DNA, 120 bp, Artificial Sequence
  ENSG00000198604_29 (sequence is synthesized)
aaagctccacttgatgccagtgacagtgggcgttcttataaaacagttctggaccgttggagagagtctctcctttcttctgctagtctatcccaagtttttcttcacctatccaccttg

SEQ ID NO: 729610 - DNA, 120 bp, Artificial Sequence
  ENSG00000198604_30 (sequence is synthesized)
gatcgtagcgtgatatggtctaaatctatactgaatgcgcgttgcaagatatgtcgaaagaaaggcgatgctgaaaacatggttctttgtgatggctgtgataggggtcatcatacctac

SEQ ID NO: 729611 - DNA, 120 bp, Artificial Sequence
  ENSG00000198604_31 (sequence is synthesized)
tgtgttcgaccaaagctcaagactgtgcctgaaggagactggttttgtccagaatgtcgaccaaagcaacgttctagaagactctcctctagacagagaccatccttggaaagtgatgaa

SEQ ID NO: 729612 - DNA, 120 bp, Artificial Sequence
  ENSG00000198604_32 (sequence is synthesized)
gatgtggaagacagtatgggaggtgaggatgatgaagttgatggcgatgaagaagaaggtcaaagtgaggaggaagagtatgaggtagaacaagatgaagatgactctcaagaagaggaa

SEQ ID NO: 729613 - DNA, 120 bp, Artificial Sequence
  ENSG00000198604_33 (sequence is synthesized)
gaagtcagcctacccaaacgaggaagaccacaagttagattgccagttaaaacaagagggaaacttagctcttctttctcaagtcgtggccaacaacaagaacctggaagatacccttca

SEQ ID NO: 729614 - DNA, 120 bp, Artificial Sequence
  ENSG00000198604_34 (sequence is synthesized)
aggagtcagcagagcacacccaaaacaactgtttcttctaaaactggtagaagcctaagaaagataaactctgctcctcctacagaaacaaaatctttaagaattgccagtcgttctact

SEQ ID NO: 729615 - DNA, 120 bp, Artificial Sequence
  ENSG00000198604_35 (sequence is synthesized)
cgccacagtcatggcccactgcaagcagatgtatttgtggaattgcttagtcctcgtagaaaacgcagaggcaggaaaagtgctaataatacaccagaaaatagtcccaacttccctaac

SEQ ID NO: 729616 - DNA, 120 bp, Artificial Sequence
  ENSG00000198604_36 (sequence is synthesized)
ttcagagtcattgccacaaagtcaagtgaacagtcaagatctgtaaatattgcttcaaaactttctctccaagagagtgaatccaaaagaagatgcagaaaaagacaatctccagagcca

SEQ ID NO: 729617 - DNA, 120 bp, Artificial Sequence
  ENSG00000198604_37 (sequence is synthesized)
tcgcctgtgacactgggtcgaaggagttctggccgacagggaggagttcatgaattgtctgcttttgaacaacttgttgtagaattggtacgacatgatgacagctggccttttttgaaa

SEQ ID NO: 729618 - DNA, 120 bp, Artificial Sequence
  ENSG00000198604_38 (sequence is synthesized)
cttgtttctaaaatccaggtcccagactactatgacatcatcaaaaagcccattgccttaaatataattcgtgaaaaagtgaataagtgtgaatataaattagcatctgagtttattgat

SEQ ID NO: 729619 - DNA, 120 bp, Artificial Sequence
  ENSG00000198604_39 (sequence is synthesized)
gacattgagttaatgttttcgaactgctttgaatacaaccctcgtaacacaagtgaagcaaaagctggaactaggcttcaagcattttttcatattcaggctcaaaagcttggactccac

SEQ ID NO: 729620 - DNA, 120 bp, Artificial Sequence
  ENSG00000198604_40 (sequence is synthesized)
gtcacacccagtaatgtggaccaagttagcacaccaccggctgcgaaaaagtcacgaatctgactttgtccttctaaaggatatatttgaagaaaaacaaattgttcatgaaaatggaac

SEQ ID NO: 729621 - DNA, 120 bp, Artificial Sequence
  ENSG00000198604_41 (sequence is synthesized)
attaaatcatgctgtataaagcaataacaattgattgaccacatgaaagtgtggcctgcactatattctcaattttaatattaagcactcaggagaatgtaggaaagatatcctttgcta

SEQ ID NO: 729622 - DNA, 120 bp, Artificial Sequence
  ENSG00000198604_42 (sequence is synthesized)
cagttttgttcagtatctaataagtttgatagatgtattggatacagtactggtttacagaggtttttgtacatttttgagatcattcatgtgtccagagatcttggaaaatattttttc

SEQ ID NO: 729623 - DNA, 120 bp, Artificial Sequence
  ENSG00000198604_43 (sequence is synthesized)
acccacgatttattttgttattgatgatttttttttaaagtggtggtattaagggagagttatctacatggatgagtcttccgctatagcacagtttagaaaaggtgtttatgtcttaat

SEQ ID NO: 729624 - DNA, 120 bp, Artificial Sequence
  ENSG00000198604_44 (sequence is synthesized)
taattgtttgagtacattctttcaacactacacatgaatgaatccaatcttataaccttgaagtgctgtaccagtgctggctgcaggtattaagtccaagtttattaactagatatttat

SEQ ID NO: 729625 - DNA, 120 bp, Artificial Sequence
  ENSG00000198604_45 (sequence is synthesized)
ttagtattgagagtaatttgtgaatttgttttgtatttataaaatttatacctgaaaaatgttccttaatgttttaaaccttttactgtgtttttattcctctaacttccttaatgatca

SEQ ID NO: 729626 - DNA, 120 bp, Artificial Sequence
  ENSG00000198604_46 (sequence is synthesized)
atcaaaaaaagtaacaccctccctttttcctgacagttctttcagctttacagaactgtattataagtttctatgtataactttttaactgtacaaataaaataacattttttcaaataa

SEQ ID NO: 729627 - DNA, 120 bp, Artificial Sequence
  ENSG00000198604_47 (sequence is synthesized)
cggcggggcgtcctgccccattgtgaggcggcggcaggacgagaggaggtagggcgcgctcggggggcaggggcggcggcggctccgctcgctcgacacccgggcagcggcaggaacgaa

SEQ ID NO: 729628 - DNA, 120 bp, Artificial Sequence
  ENSG00000198604_48 (sequence is synthesized)
cagcggcaggaacgaactcggctccggtagcggccgcggcgcgtcagtcacacaaaaggcagccgagcttctcccagcgcgcggaccggcccacgctgccgccgagggctccccacctta

SEQ ID NO: 729629 - DNA, 120 bp, Artificial Sequence
  ENSG00000198604_49 (sequence is synthesized)
taaaagaagaggttacaggctggaagagaacccttctgacatcagaatatgaacaattatgaaggatatggacatttgatgttgagaaggaagtcaaagagcctaagtgaagatctcttc

SEQ ID NO: 729630 - DNA, 120 bp, Artificial Sequence
  ENSG00000198604_50 (sequence is synthesized)
ttgataatcttaaaaacttgagatgttttcatttttaaatgagttcttttaaggtgagatttatttttagaataatacagtcttttgtgaagagtttcatcaaaagaaagattaccagct

SEQ ID NO: 729631 - DNA, 65 bp, Artificial Sequence
  ENSG00000198604_51 (sequence is synthesized)
tcttttgtgaagagtttcatcaaaagaaagattaccaatcgcttgagcccaagagtttgagacca

SEQ ID NO: 729632 - DNA, 120 bp, Artificial Sequence
  ENSG00000198604_52 (sequence is synthesized)
ttttatttttaattttataaaggcacatttacattgctgagtatttattgtttatattctaaatgactatttcatttttaacaactataggctgcagtttgaaaagtttggatcttgata

SEQ ID NO: 729633 - DNA, 120 bp, Artificial Sequence
  ENSG00000198604_53 (sequence is synthesized)
cataaaagattggagtatctttaaatagattccaattttcaaggtagacttttctaaggttatattgagtgaggagatttgtttttaattctaaagtgcattttatcttttgggggaatg

SEQ ID NO: 729634 - DNA, 120 bp, Artificial Sequence
  ENSG00000198604_54 (sequence is synthesized)
tttatgtgcgtctcattggtaatttggaaattgtcttttctgttaatttacagaaatgtcagtgtgtagtgcttggtttaggatttatagctgtaggtggtgatgaagcagaatgtgaat

SEQ ID NO: 729635 - DNA, 120 bp, Artificial Sequence
  ENSG00000198604_55 (sequence is synthesized)
attgcttgtacctagtgtttgttcttttgaggttccgaatgttaaggcgtttgctgtttctttcatcatttaaaacgggcattattcccaaatattcaagctttgatttgcactagaata

SEQ ID NO: 729636 - DNA, 120 bp, Artificial Sequence
  ENSG00000198604_56 (sequence is synthesized)
tgggtttcccctgttaacagccaaataatgaagttgatctacaatcacaaattctctggaatctgaactaaattgatagacagtcctgactcagacagtcactagttttccatctgattt

SEQ ID NO: 729637 - DNA, 120 bp, Artificial Sequence
  ENSG00000198604_57 (sequence is synthesized)
tagtagccagatgtgccaggtataggaagaaaaaagatgcaattgatcccttactattcaagtataaagtgcaacccactaaaaaagaattacatgagtctgctattgttaaagcaacac

SEQ ID NO: 729638 - DNA, 120 bp, Artificial Sequence
  ENSG00000198604_58 (sequence is synthesized)
aaaatgtattcctgtatattatctgatttagtccacgtgataactttgaagtagtcaaaacacctgttactcactgtctagttttttttgttgttgttgttttttcctgagacagtctca

SEQ ID NO: 729639 - DNA, 120 bp, Artificial Sequence
  ENSG00000198604_59 (sequence is synthesized)
cttttcccatcgtgtagtcaagagtctgtgccagacttgaaggctttactttgttagccatgtgtttatgaacccccagcgctttccctagatcttttggctgataatctcaaacatgga

SEQ ID NO: 729640 - DNA, 120 bp, Artificial Sequence
  ENSG00000198604_60 (sequence is synthesized)
ggatgcttctgaatcttcacgaggggttgctccattaattaataatgtagttctcccaggctctccgctgtctcttcctgtatcagtgacaggctgtaaaagtcatcgagtagccaataa

SEQ ID NO: 729641 - DNA, 120 bp, Artificial Sequence
  ENSG00000198610_0 (sequence is synthesized)
aggatctgcttagtgaaagaagtggcaagcaatggatcccaaatatcagcgtgtagagctaaatgatggtcacttcatgcccgtattgggatttggcacctatgcacctccagaggttcc

SEQ ID NO: 729642 - DNA, 120 bp, Artificial Sequence
  ENSG00000198610_1 (sequence is synthesized)
gaggaacagagctgtagaggtcaccaaattagcaatagaagctggcttccgccatattgattctgcttatttatacaataatgaggagcaggttggactggccatccgaagcaagattgc

SEQ ID NO: 729643 - DNA, 120 bp, Artificial Sequence
  ENSG00000198610_2 (sequence is synthesized)
agatggcagtgtgaagagagaagacatattctacacttcaaagctttggtgcactttctttcaaccacagatggtccaaccagccttggaaagctcactgaaaaaacttcaactggacta

SEQ ID NO: 729644 - DNA, 120 bp, Artificial Sequence
  ENSG00000198610_3 (sequence is synthesized)
tgttgacctctatcttcttcatttcccaatggctctcaagccaggtgagacgccactaccaaaagatgaaaatggaaaagtaatattcgacacagtggatctctctgccacatgggaggt

SEQ ID NO: 729645 - DNA, 120 bp, Artificial Sequence
  ENSG00000198610_4 (sequence is synthesized)
tgcaaccaggtagaatgtcatccttacctcaaccagagcaaactgctggatttctgcaagtcaaaagacattgttctggttgcccacagtgctctgggaacccaacgacataaactatgg

SEQ ID NO: 729646 - DNA, 120 bp, Artificial Sequence
  ENSG00000198610_5 (sequence is synthesized)
gtggacccaaactccccagttcttttggaggacccagttctttgtgccttagcaaagaaacacaaacaaaccccagccctgattgccctgcgctaccagctgcagcgtggggttgtggtc

SEQ ID NO: 729647 - DNA, 120 bp, Artificial Sequence
  ENSG00000198610_6 (sequence is synthesized)
ctggccaagagctacaatgagcagcggatcagagagaacatccaggtttttgaattccagttgacatcagaggatatgaaagttctagatggtctaaacagaaattatcgatatgttgtc

SEQ ID NO: 729648 - DNA, 120 bp, Artificial Sequence
  ENSG00000198610_7 (sequence is synthesized)
atggattttcttatggaccatcctgattatccattttcagatgaatattagcatagagggtgttgcacgacatctagcagaaggccctgtgtgtggatggtgatgcagaggatgtctcta

SEQ ID NO: 729649 - DNA, 120 bp, Artificial Sequence
  ENSG00000198610_8 (sequence is synthesized)
tgctggtgactggacacacagcctctggttaaatccctcccctcctgcttggcaacttcagctagctagatatatccatggtccagaaagcaaacataataaatttttatcttgaagtaa

SEQ ID NO: 729650 - DNA, 120 bp, Artificial Sequence
  ENSG00000198610_9 (sequence is synthesized)
aggaagaagtgaatagaagaaaagagggtgttgcaaatcaaaagcacatagagatatcatcttacaccagtcagaatggctattcttaaaatgtcagacaacaacagatattggattgcc

SEQ ID NO: 729651 - DNA, 120 bp, Artificial Sequence
  ENSG00000198610_10 (sequence is synthesized)
ttctttattgagggtcaccactaaaaaaaaatgctcactggtcattcttttgaatactgtctgagagaaagatgtaagatggttgattatttcaaatgacagaagataaagatgggatat

SEQ ID NO: 729652 - DNA, 120 bp, Artificial Sequence
  ENSG00000198610_11 (sequence is synthesized)
gagtttatcagacagacagagagagagattgattgattctgaatagaaaatttcactttagaaaaaaatattttgactatataataatgtatgtaaaaattctctttgataagaaacgag

SEQ ID NO: 729653 - DNA, 120 bp, Artificial Sequence
  ENSG00000198610_12 (sequence is synthesized)
tgaactggattcaattttcctcacagcctgtgtaatacaccatcacttgcttcctcctacatgccattgattagccccagggagcagtgcagcactgcctgcccatgttttacataaccc

SEQ ID NO: 729654 - DNA, 120 bp, Artificial Sequence
  ENSG00000198610_13 (sequence is synthesized)
ctgaatataaatgccagatgttgctgaaggaaacaggatctgcttagtgaaagaagtggcaagcaatggatcccaaatatcagcgtgtagagctaaatgatggtcacttcatgcccgtat

SEQ ID NO: 729655 - DNA, 120 bp, Artificial Sequence
  ENSG00000198612_0 (sequence is synthesized)
atcgcgggcgcgacgcctgagggacagtctggggtttggctgtccggacggtgcagcggcgaggccggccgcgaagatgccagtggcggtgatggcggaaagcgcctttagtttcaaaaa

SEQ ID NO: 729656 - DNA, 120 bp, Artificial Sequence
  ENSG00000198612_1 (sequence is synthesized)
gttgctggatcagtgcgagaaccaggagctcgaggcccctggaggaattgctacacccccagtgtatggtcagcttctagctttatatttgctccataatgacatgaataatgcaagata

SEQ ID NO: 729657 - DNA, 120 bp, Artificial Sequence
  ENSG00000198612_2 (sequence is synthesized)
tctttggaaaagaataccacctgctataaaatctgcaaattctgaacttgggggaatttggtcagtaggacaaagaatctggcagagagatttccctgggatctatacaaccatcaacgc

SEQ ID NO: 729658 - DNA, 120 bp, Artificial Sequence
  ENSG00000198612_3 (sequence is synthesized)
tcaccagtggtctgagacggtccagccaattatggaagcacttagagatgcaacaaggagacgcgcctttgccctggtctctcaagcgtatacttcaatcatcgccgatgattttgcagc

SEQ ID NO: 729659 - DNA, 120 bp, Artificial Sequence
  ENSG00000198612_4 (sequence is synthesized)
ctttgttggacttcctgtagaagaggctgtgaaaggcatattagaacaaggatggcaagctgattccaccacaagaatggttctgcccagaaagccagttgcaggggccctggatgtttc

SEQ ID NO: 729660 - DNA, 120 bp, Artificial Sequence
  ENSG00000198612_5 (sequence is synthesized)
ctttaacaagtttattcccttatcagagcctgctccagttcccccaatacccaatgaacagcagttagccagactgacggattatgtggctttccttgaaaactgatttatcactctgag

SEQ ID NO: 729661 - DNA, 120 bp, Artificial Sequence
  ENSG00000198612_6 (sequence is synthesized)
ttcaagattcatcttcagaatcctgtatactgacaaacgtagaaatgtaaagtttgtattttcaatttattggatggcttaagcacctcagcattccttactatgtgataaaatacatat

SEQ ID NO: 729662 - DNA, 120 bp, Artificial Sequence
  ENSG00000198612_7 (sequence is synthesized)
agaatataagatatactatatacattttgtccataaacgttatgctgaatagttgttgaaacagttctcattttgtagtatttaataatctggatggagcctgtcagtattacagttagt

SEQ ID NO: 729663 - DNA, 120 bp, Artificial Sequence
  ENSG00000198612_8 (sequence is synthesized)
tttctagtgactcataaaataagatttcctgtttcatgtagaatagtgtttgtcaactgtcttttctctgtcccagcacatgccgtactcttatatgtaccattggttgataattataat

SEQ ID NO: 729664 - DNA, 120 bp, Artificial Sequence
  ENSG00000198612_9 (sequence is synthesized)
gattcatttggacttgaagaaagattgtccccaggcacagtatctgaatcactggggattatgattcaccctctttggagaacatgctctcttttcaccccccacctcctgagagccact

SEQ ID NO: 729665 - DNA, 120 bp, Artificial Sequence
  ENSG00000198612_10 (sequence is synthesized)
aatgtaagatacagaaacatagctgaggaacaaatagaccatttccatactaaaccagtttgttaactttagattttttccaatagtgtgagtatatccattgctggcagtggagggctt

SEQ ID NO: 729666 - DNA, 120 bp, Artificial Sequence
  ENSG00000198612_11 (sequence is synthesized)
gccatgaaaatgcaacttatttaagacatttatgagacatattaacttgtgctgtcgccttttagaaggagaaacttaagtgtggaatgcattatatgggcaaagaagctatgaagatac

SEQ ID NO: 729667 - DNA, 120 bp, Artificial Sequence
  ENSG00000198612_12 (sequence is synthesized)
atgatacactttgtacaactatcctgcagcccattggttgcttatatttatcgcttggctcaagttctgccctttggagaaatactgagcaagtctttcattctctgtgtgacagccctc

SEQ ID NO: 729668 - DNA, 120 bp, Artificial Sequence
  ENSG00000198612_13 (sequence is synthesized)
tgaatatttgaagttgtttgttgtaacttaaggttataacagcccttagttcatttactctgcatttgttcaataaatatttaactgaattcttcaattatttcatctaagatagtttct

SEQ ID NO: 729669 - DNA, 120 bp, Artificial Sequence
  ENSG00000198612_14 (sequence is synthesized)
agttgtatggtgaatctgtgtagtgataattatataatttatttattttgaatgcattttagtggctatttcagtttttcttaacatatatgggaatactttttgaattgcaattttatt

SEQ ID NO: 729670 - DNA, 120 bp, Artificial Sequence
  ENSG00000198612_15 (sequence is synthesized)
taacccggataggtaagtcatattaaaattccttgttttacagttgaggaaatgggaattcaagaagtcagaggatcaggagagtgatcaagagaatgacagtgccagtttttttaactt

SEQ ID NO: 729671 - DNA, 120 bp, Artificial Sequence
  ENSG00000198612_16 (sequence is synthesized)
ccaggtattaagtacaaattgtatccatggttattttttaaaagcagattagagtcaatccaaatattcattaataggggattgtttgaataaacagcagtgtagactacgcaggtgtaa

SEQ ID NO: 729672 - DNA, 120 bp, Artificial Sequence
  ENSG00000198612_17 (sequence is synthesized)
aaggagtgaagatctctatactaaactggaatgatctccagagtgagaacatagaaagcacatgtagtttatatggttattttgagggtaacaaaaggagaatgattacaattatatata

SEQ ID NO: 729673 - DNA, 120 bp, Artificial Sequence
  ENSG00000198612_18 (sequence is synthesized)
tgtacatatttccttatatttcaaaactaagcaattgggggatatatacaaaatgaatataatagttccctaaagaggaaggagaggacagtgaactactacatagagaaaaaataatct

SEQ ID NO: 729674 - DNA, 120 bp, Artificial Sequence
  ENSG00000198612_19 (sequence is synthesized)
caagtgatcaaacacaatatttcaattttacattgtcagtgggatatacactaaggacagaaaaaaatcttagactaatgaatgtggtttttcatgattaatttcacaaaatcttgatat

SEQ ID NO: 729675 - DNA, 120 bp, Artificial Sequence
  ENSG00000198612_20 (sequence is synthesized)
ttattaaaagtatagattaaattaataatcatgtaacattagaccccagtaatcttaaatttgacatggaaacctcattatatgctttatttttctttgtaaacagtaaatatttcccac

SEQ ID NO: 729676 - DNA, 120 bp, Artificial Sequence
  ENSG00000198612_21 (sequence is synthesized)
tttcccactcctgtctacatgaaaaggtctagagtaattacagttcagtaacaatgagcaccactagtacccagatggtgttctttcattttcatttgcaattaaaaggaatcagaactt

SEQ ID NO: 729677 - DNA, 120 bp, Artificial Sequence
  ENSG00000198612_22 (sequence is synthesized)
atttgcaaaacagctaatagttccagggcagtaagtgtacaagttcatatctggtacaagatgtccaggattcaaggaggctcttaaagacttgggattctgtcaaagggttatacaagc

SEQ ID NO: 729678 - DNA, 120 bp, Artificial Sequence
  ENSG00000198612_23 (sequence is synthesized)
caacttgaagggatttctacaggccatgtaaaaatgagacagtttgagcatgaaatatttgtatatgtgtctgtttttaactcttaataacctcatcactgtacaagaaaggcagggtaa

SEQ ID NO: 729679 - DNA, 120 bp, Artificial Sequence
  ENSG00000198612_24 (sequence is synthesized)
gtgcttgatttcacttccctttattatcagttctcaggacaaattgatatgctgccaatctctaaagcaacaaaatcgaacctgtagggtagtcaaaaagctcatgctggaaaattccac

SEQ ID NO: 729680 - DNA, 120 bp, Artificial Sequence
  ENSG00000198612_25 (sequence is synthesized)
cgaataaagataaaagttagaaaaacggtacttgcagcccttaatgaaacaaagaagggatcatggaaatatatatcaatgctgttgagaccacagggtaagaaattgagattgagcatg

SEQ ID NO: 729681 - DNA, 120 bp, Artificial Sequence
  ENSG00000198612_26 (sequence is synthesized)
aaatatgtccagtacatccatcagcctgtctttgtgctctggctatttctgagccagccatctgtgtacaagtgtagcctgacagcaccctgtttcagatccattggatatctctaaaat

SEQ ID NO: 729682 - DNA, 120 bp, Artificial Sequence
  ENSG00000198612_27 (sequence is synthesized)
ttgctctgggacttaccctggcactactatcaggatgcccacacaaacctgattgggcagcccatcagcagttgtgaacatgacatggtgaataaacactctcttccttgtctcagggca

SEQ ID NO: 729683 - DNA, 120 bp, Artificial Sequence
  ENSG00000198612_28 (sequence is synthesized)
ccattgcataaacatactgcattttcttagggttagagccttgtgtttagtaacctttttccatctttgtaattttcattatctgagatttttcatccaagaggaagtgtaagaaatgta

SEQ ID NO: 729684 - DNA, 120 bp, Artificial Sequence
  ENSG00000198612_29 (sequence is synthesized)
tttttttccagcaatatttgaaccccccgtacatactgggcatatgtatttgtatctataagcacagaaatctttgggttcatctggccttgcttatgaaaactagacaaggacagtggt

SEQ ID NO: 729685 - DNA, 120 bp, Artificial Sequence
  ENSG00000198612_30 (sequence is synthesized)
gaattataatggagcacagttgttatccctgtttgagaaataaatggccgttaaatgcatgttgtgctgaaaatagcatgttctatgaaagatctttacaatgacttctgtaaattgagc

SEQ ID NO: 729686 - DNA, 120 bp, Artificial Sequence
  ENSG00000198624_0 (sequence is synthesized)
ccggcgggcgcggagcgggcagcggggcccggatcgcaggctcctctgggggccccggagttgggaagcggcgtccgggagcccccggaggaggatgggctgcagacacagcaggctgag

SEQ ID NO: 729687 - DNA, 120 bp, Artificial Sequence
  ENSG00000198624_1 (sequence is synthesized)
ggatgggctgcagacacagcaggctgagcagctgcaaacccccgaaaaagaagcgccaagaaccagaaccagaacagccacccagaccagagccccatgaattaggtcccctcaatgggg

SEQ ID NO: 729688 - DNA, 120 bp, Artificial Sequence
  ENSG00000198624_2 (sequence is synthesized)
acacagctataactgtccagctctgtgcatcagaggaggctgagcggcaccagaaggatataaccagaattctccagcaacatgaggaggaaaagaagaaatgggcacaacaggtggaga

SEQ ID NO: 729689 - DNA, 120 bp, Artificial Sequence
  ENSG00000198624_3 (sequence is synthesized)
aggaaagggagctagagcttcgagacagactggatgagcagcaaagggtcctggaaggaaagaatgaagaggccctgcaagtcctccgggcctcatatgaacaggagaaagaagcgctta

SEQ ID NO: 729690 - DNA, 120 bp, Artificial Sequence
  ENSG00000198624_4 (sequence is synthesized)
cccactctttccgggaggccagttctacccagcaggagaccatagacagactgacctcacagctggaggctttccaggccaaaatgaagagggtggaggagtccattctgagccgaaact

SEQ ID NO: 729691 - DNA, 120 bp, Artificial Sequence
  ENSG00000198624_5 (sequence is synthesized)
ataagaaacatatccaggattatgggagccccagccagttctgggagcaggagctggagagcttacactttgtcatcgagatgaagaatgagcgtattcatgagctggacaggcggctga

SEQ ID NO: 729692 - DNA, 120 bp, Artificial Sequence
  ENSG00000198624_6 (sequence is synthesized)
tcctcatggaaacagtgaaagagaaaaatctgatattggaggaaaaaattacgaccctgcaacaggaaaatgaggacctccatgtccgaagccgcaaccaggtggtcctgtcaaggcagc

SEQ ID NO: 729693 - DNA, 120 bp, Artificial Sequence
  ENSG00000198624_7 (sequence is synthesized)
tgtcagaagacctgcttctcacgcgtgaggccctggagaaggaggtgcagctgcggcgacagctccagcaggagaaggaggagctgttgtaccgggtccttggggccaatgcctcgcctg

SEQ ID NO: 729694 - DNA, 120 bp, Artificial Sequence
  ENSG00000198624_8 (sequence is synthesized)
ccttccctctggcccctgtcactcccactgaggtctctttcctcgccacatagggtgcagggcctgggcccaccacgacgcctgaagtcacagctccttccaaggtttttctggagaaga

SEQ ID NO: 729695 - DNA, 120 bp, Artificial Sequence
  ENSG00000198624_9 (sequence is synthesized)
cagcaggagcctctcagttcttttccaggaaggaacgagggtgggagcgagatggagatcctgggtgtgtgcccagtgagccctggggccttgagttacatggaatcacccacagggttt

SEQ ID NO: 729696 - DNA, 120 bp, Artificial Sequence
  ENSG00000198624_10 (sequence is synthesized)
tggaggccccgagaagcgtcttcccttgagttggccaagggaataagcaagaggagacatttcctccctgccccagcactctgtcccaatccgagaagttccgaggctttcccaggggca

SEQ ID NO: 729697 - DNA, 120 bp, Artificial Sequence
  ENSG00000198624_11 (sequence is synthesized)
gtctgtgtcacgctggccatttgacataaaggagacagcccctggtcccagcttgtcagctctgctgccgacttgctgacttatcaacttcctctaggtgtttccactccaccctggcct

SEQ ID NO: 729698 - DNA, 120 bp, Artificial Sequence
  ENSG00000198624_12 (sequence is synthesized)
gctcagagcctcagtttacccctgcattaaaatggtggggggactggtcaaaggactcttatgtcactgcagtgtcccattctaggattgtctgaaggccagagtaggggttggggggag

SEQ ID NO: 729699 - DNA, 120 bp, Artificial Sequence
  ENSG00000198624_13 (sequence is synthesized)
tgtggacaaaccccgcaaatcagagtggggaaggtgagtggtagagagggggtctctgaaggcccttggggctgacagggccaggcagcctccccagctgaggcatcattcctgggccag

SEQ ID NO: 729700 - DNA, 120 bp, Artificial Sequence
  ENSG00000198624_14 (sequence is synthesized)
tcctttaccaggcaaggtgcatcccctcagccctcctggcccttcagtcttggtgccacctgggcacaggggcaagcttggtggttgtgagtccattcatctatcagagctggaacctca

SEQ ID NO: 729701 - DNA, 120 bp, Artificial Sequence
  ENSG00000198624_15 (sequence is synthesized)
tccctgcacagatgaggaaaccaaggcatggagcagttcccagagtcgaatctagatctcatctgtcatccgggtcttatcctttgctctgtttttctcttcaggctctggaaaatcaga

SEQ ID NO: 729702 - DNA, 120 bp, Artificial Sequence
  ENSG00000198624_16 (sequence is synthesized)
tctgtgacttaatcttcctctccctggccctcacccacttagtttctttttcattcctgctccctgccttaactcctcctcccactgcccctgatcccaggcccaggcttttacaacctg

SEQ ID NO: 729703 - DNA, 120 bp, Artificial Sequence
  ENSG00000198624_17 (sequence is synthesized)
gtgctcagcttccccatcagtgaaaaggggtggctagagtaactaacctcagcaggccgtccagtcctgatagtctgtggatttcggatccttctcaggaagcttcatgtctaatggaga

SEQ ID NO: 729704 - DNA, 120 bp, Artificial Sequence
  ENSG00000198624_18 (sequence is synthesized)
ctataattataactcctgttctgcatagagcatttgcatcaaaggctttccatacccctccctcccctggtcctcataagatccttgaagcaggttcctattcctcattggcaacatggc

SEQ ID NO: 729705 - DNA, 120 bp, Artificial Sequence
  ENSG00000198624_19 (sequence is synthesized)
aaacagatcacaggagtcaaagggccttgctcaaggtccccagcttcagccccaggccctaagccagcgtcagaacagtcaatctgcatttttcatcagtcattctatagtgacatcatc

SEQ ID NO: 729706 - DNA, 120 bp, Artificial Sequence
  ENSG00000198624_20 (sequence is synthesized)
ccagactgccttctgtattcccctgtgtacagtctccttctgtttctaggtttagaagttcagaggtgactgtgtttctccatttccacagccaaatgggggaagaggtgaggctagggg

SEQ ID NO: 729707 - DNA, 120 bp, Artificial Sequence
  ENSG00000198624_21 (sequence is synthesized)
agtgctgtgctgattctccagccatggtcagacaggtcacccaggagcctcgaggaaagccctggagggaatcacatgtgtactttttcatgaagctttttgcaaagcacatctgcgata

SEQ ID NO: 729708 - DNA, 120 bp, Artificial Sequence
  ENSG00000198624_22 (sequence is synthesized)
cactagtttattgaactaatgtccaggagtagacatgattggtggccaagttatttggggacacctaaacagatcagtgacctgaatgacttctcagaacctttaatatgccaatgtgtg

SEQ ID NO: 729709 - DNA, 120 bp, Artificial Sequence
  ENSG00000198624_23 (sequence is synthesized)
tggcaaacttacaagaagggagctaagtatccagcctctcccaaacctctttgaacaaagcttctgtccctcccacacctctcacctcacaggcacatcaggctgcagaatgcgctttag

SEQ ID NO: 729710 - DNA, 89 bp, Artificial Sequence
  ENSG00000198624_24 (sequence is synthesized)
aaaaaagaaagcattgttttaattgagaggggcagggctggagaaggagcaagttgtggggagccaggcttccctcacgcagcctgtgg

SEQ ID NO: 729711 - DNA, 120 bp, Artificial Sequence
  ENSG00000198624_25 (sequence is synthesized)
caagttgtggggagccaggcttccctcacgcagcctgtggtggatgtgggaaggagatcaacttctcctcactctgggacagacgatgtatggaaactaaaaagaacatgcggcacctta

SEQ ID NO: 729712 - DNA, 120 bp, Artificial Sequence
  ENSG00000198624_26 (sequence is synthesized)
gggggtgcttccttctggccccacctgcccagttcacctgggcactcccactgttccctccctgtctgtctgatccacaagcaattgactcaaatctacaggatccttggccctagaggg

SEQ ID NO: 729713 - DNA, 120 bp, Artificial Sequence
  ENSG00000198624_27 (sequence is synthesized)
cttttgaggctactgatgttgctgtagcttgggtgacactagggcaggtagcattgagaacacgggaggacagaagcctcagaaaccctagggttgaatctaagcagagattatgttgct

SEQ ID NO: 729714 - DNA, 120 bp, Artificial Sequence
  ENSG00000198624_28 (sequence is synthesized)
gtagaagtctccctggcctcctgtgtgccttacaacttataattaaaaaaataaaactaaggagttaacaaaaagctgctgacttttaattttgccacatgagaatgtttaaaaaaaaag

SEQ ID NO: 729715 - DNA, 120 bp, Artificial Sequence
  ENSG00000198624_29 (sequence is synthesized)
tcttacaggcactaccatctcatgtcaccatccgttcttttctcaggaaggaaagagggtaggagggagatggggagccagggtgtgtgcccagggagccctgggggcttgagtcacgtg

SEQ ID NO: 729716 - DNA, 120 bp, Artificial Sequence
  ENSG00000198624_30 (sequence is synthesized)
acatggaatcacccacagggctttattttaatcagatcatctcaaacattccgtatagattttgttcgctcatttttgtggaaacacataacagacaaacttaattttatttatatagat

SEQ ID NO: 729717 - DNA, 120 bp, Artificial Sequence
  ENSG00000198624_31 (sequence is synthesized)
catatccttctgacttttggagaacaaaacatattctttcttccatgaactcatggtgaaatgagatggtagggcctgtaatttttttttaccattctcctgtggcaaaaagccgcagcc

SEQ ID NO: 729718 - DNA, 120 bp, Artificial Sequence
  ENSG00000198624_32 (sequence is synthesized)
ctttgttaactttttagttttacttttttctaagttaccttattgctccatgaaatgtaacatctagtctagaatgaatcagtgctttcagtgaccacagataagagggaggtgacagca

SEQ ID NO: 729719 - DNA, 120 bp, Artificial Sequence
  ENSG00000198624_33 (sequence is synthesized)
caatcccgccctctcttttacaaccacccttacactgtctgctgaagaacaggggatggtgtggagggctccaggttctcacccaggcctcctgagcaagggaccctcctttcctgctct

SEQ ID NO: 729720 - DNA, 120 bp, Artificial Sequence
  ENSG00000198624_34 (sequence is synthesized)
cttgagcatgtaagatgtctcgaacatacagatgcctgtgttgggggcaggcatgtaataggtagcactaggttattttagttgggttttgacctagcaaatttgccaacatttttttaa

SEQ ID NO: 729721 - DNA, 120 bp, Artificial Sequence
  ENSG00000198624_35 (sequence is synthesized)
atttgccaacatttttttaaaaagtgataatattccacattggcaaggttgcagtgaaactggtctttttcttttttcttgagacagtcttgctctgtcacccagggtggagtgcagtgg

SEQ ID NO: 729722 - DNA, 120 bp, Artificial Sequence
  ENSG00000198624_36 (sequence is synthesized)
taccacacctagctgaaactgatcttcttgcgtgccatttgaagaagcgccaagaaccagaaccagaacagccacccagaccagagccccatgaattaggtcccctcaatggggacacag

SEQ ID NO: 729723 - DNA, 120 bp, Artificial Sequence
  ENSG00000198625_0 (sequence is synthesized)
attactcgccatttcaaaatgctgccgaggccctaggatctgtgactgccacccctccccccacccgggctcggcgggggagcgactcatggagctgccgtaagttttaccaacagactg

SEQ ID NO: 729724 - DNA, 120 bp, Artificial Sequence
  ENSG00000198625_1 (sequence is synthesized)
cagtttcttcactaccaaaatgacatcattttccacctctgctcagtgttcaacatctgacagtgcttgcaggatctctcctggacaaatcaatcaggtacgaccaaaactgccgctttt

SEQ ID NO: 729725 - DNA, 120 bp, Artificial Sequence
  ENSG00000198625_2 (sequence is synthesized)
gaagattttgcatgcagcaggtgcgcaaggtgaaatgttcactgttaaagaggtcatgcactatttaggtcagtacataatggtgaagcaactttatgatcagcaggagcagcatatggt

SEQ ID NO: 729726 - DNA, 120 bp, Artificial Sequence
  ENSG00000198625_3 (sequence is synthesized)
atattgtggtggagatcttttgggagaactactgggacgtcagagcttctccgtgaaagacccaagccctctctatgatatgctaagaaagaatcttgtcactttagccactgctactac

SEQ ID NO: 729727 - DNA, 120 bp, Artificial Sequence
  ENSG00000198625_4 (sequence is synthesized)
agatgctgctcagactctcgctctcgcacaggatcacagtatggatattccaagtcaagaccaactgaagcaaagtgcagaggaaagttccacttccagaaaaagaactacagaagacga

SEQ ID NO: 729728 - DNA, 120 bp, Artificial Sequence
  ENSG00000198625_5 (sequence is synthesized)
tatccccacactgcctacctcagagcataaatgcatacattctagagaagatgaagacttaattgaaaatttagcccaagatgaaacatctaggctggaccttggatttgaggagtggga

SEQ ID NO: 729729 - DNA, 120 bp, Artificial Sequence
  ENSG00000198625_6 (sequence is synthesized)
tgtagctggcctgccttggtggtttttaggaaacttgagaagcaactatacacctagaagtaatggctcaactgatttacagacaaatcaggatgtgggtactgccattgtttcagatac

SEQ ID NO: 729730 - DNA, 120 bp, Artificial Sequence
  ENSG00000198625_7 (sequence is synthesized)
tacagatgacttgtggtttttgaatgagtcagtatcagagcagttaggtgttggaataaaagttgaagctgctgatactgaacaaacaagtgaagaagtagggaaagtaagtgacaaaaa

SEQ ID NO: 729731 - DNA, 120 bp, Artificial Sequence
  ENSG00000198625_8 (sequence is synthesized)
ggtgattgaagtgggaaaaaatgatgacctggaggactctaagtccttaagtgatgataccgatgtagaggttacctctgaggatgagtggcagtgtactgaatgcaagaaatttaactc

SEQ ID NO: 729732 - DNA, 120 bp, Artificial Sequence
  ENSG00000198625_9 (sequence is synthesized)
tccaagcaagaggtactgttttcgttgttgggccttgaggaaggattggtattcagattgttcaaagttaacccattctctctccacgtctgatatcactgccatacctgaaaaggaaaa

SEQ ID NO: 729733 - DNA, 120 bp, Artificial Sequence
  ENSG00000198625_10 (sequence is synthesized)
tgaaggaaatgatgtccctgattgtcgaagaaccatttcggctcctgtcgttagacctaaagatgcgtatataaagaaagaaaactccaaactttttgatccctgcaactcagtggaatt

SEQ ID NO: 729734 - DNA, 120 bp, Artificial Sequence
  ENSG00000198625_11 (sequence is synthesized)
cttggatttggctcacagttctgaaagccaagagaccatctcaagcatgggagaacagttagataacctttctgaacagagaacagatacagaaaacatggaggattgccagaatctctt

SEQ ID NO: 729735 - DNA, 120 bp, Artificial Sequence
  ENSG00000198625_12 (sequence is synthesized)
gaagccatgtagcttatgtgagaaaagaccacgagacgggaacattattcatggaaggacgggccatcttgtcacttgttttcactgtgccagaagactaaagaaggctggggcttcatg

SEQ ID NO: 729736 - DNA, 120 bp, Artificial Sequence
  ENSG00000198625_13 (sequence is synthesized)
ccctatttgcaagaaagagattcagctggttattaaggtttttatagcataatggtagtacgaacataaaaatgcatttattccgttcacttaccacattatttgaaaatcaatccttta

SEQ ID NO: 729737 - DNA, 120 bp, Artificial Sequence
  ENSG00000198625_14 (sequence is synthesized)
tttaattttatttccaacctgtcagagaatgttcttaggcatcaaaatccaaggtagctgtaagaaaaatactggagctaacaatgaagaacagaagtaatctgattagtcaaattatta

SEQ ID NO: 729738 - DNA, 120 bp, Artificial Sequence
  ENSG00000198625_15 (sequence is synthesized)
agtgccatggattactttatgcagcagtcaggtacatagttaggtgaacccaaaagaaaaactcttgaaaacaagagatttcttccatgcacatttacaatattgaggtataattaacat

SEQ ID NO: 729739 - DNA, 120 bp, Artificial Sequence
  ENSG00000198625_16 (sequence is synthesized)
gataaagtgtttccttctaacgagttgtagaaatctgagtaaccacccaaaaaagcaatagaatgtttctgtcaccccaaaacactcccttctgcccctcttcagacagtccttcagcta

SEQ ID NO: 729740 - DNA, 120 bp, Artificial Sequence
  ENSG00000198625_17 (sequence is synthesized)
tttcatggctctcaccctagttttttttttttttgcacttttttttttccgggggtataggggaggtgtggggcgacagggtctgtcttgttctgtctcccaggctgaagtgcagtgcag

SEQ ID NO: 729741 - DNA, 120 bp, Artificial Sequence
  ENSG00000198625_18 (sequence is synthesized)
tggtatgatcatggctcactgcagccttggtttcctgggcataagtggtcttcccacttcagcctcctgagtagctgagactatagactagcataaccacactggctaattttttgtgga

SEQ ID NO: 729742 - DNA, 120 bp, Artificial Sequence
  ENSG00000198625_19 (sequence is synthesized)
tcgaactcctgggctcaaacaatcctcccgcctcagccttccaaattgctgggattatagtcatgaggcacctagtctggcccttttgcaagactttaatctgaaatctaaatttttaaa

SEQ ID NO: 729743 - DNA, 120 bp, Artificial Sequence
  ENSG00000198625_20 (sequence is synthesized)
caagactttaatctgaaatctaaatttttaaaatttaagtacttacaaaggatatactatccaacatattgcatattatatatgtgctttaaagtttttttttttttttgagagacggtc

SEQ ID NO: 729744 - DNA, 88 bp, Artificial Sequence
  ENSG00000198625_21 (sequence is synthesized)
tatgtgctttaaagtttttttttttttttgagagacggtctcactttgtcatccaagctggagtgcagtggtgcaaacacggcccact

SEQ ID NO: 729745 - DNA, 120 bp, Artificial Sequence
  ENSG00000198625_22 (sequence is synthesized)
gcccaggctggtctcgaactcctgggtttaagtgattcccccgcctcagcctcccaaagtgttgggcttacagccttgagccactatgcttggctcaaagatatttttatgaaagccctg

SEQ ID NO: 729746 - DNA, 120 bp, Artificial Sequence
  ENSG00000198625_23 (sequence is synthesized)
gctcaaagatatttttatgaaagccctgggactatagatttagctgattaaatttatagaaaaagtcctgtcatataaactggcaaagtctgttcttaatttaattagccaaatcagact

SEQ ID NO: 729747 - DNA, 120 bp, Artificial Sequence
  ENSG00000198625_24 (sequence is synthesized)
ccaaatcagacttaacttccgtcagaacatgtcttggttttaattcagataaacacacaaacatacttctctggcacagccttcagaagcatcagtttttgttttgttttgttttgtttt

SEQ ID NO: 729748 - DNA, 88 bp, Artificial Sequence
  ENSG00000198625_25 (sequence is synthesized)
ctctgtcgcccaggctggagtgcactggcacaatcacagttcactgcagcctcgacctcccagatccaagcatctataggcgcgtgcc

SEQ ID NO: 729749 - DNA, 120 bp, Artificial Sequence
  ENSG00000198625_26 (sequence is synthesized)
tgccaccaccatgcccagctgaattttgtattttttgtacagacagcattttgccatgttgcccaggctggtcccaaacttctagcctcaagcaaccctcctgcctcagcctctcaaagt

SEQ ID NO: 729750 - DNA, 120 bp, Artificial Sequence
  ENSG00000198625_27 (sequence is synthesized)
gctaggattgcagtcctgagctactgccccctaccctctttgcgtcttaggagtcatttagattttttttgatccttttgtttagtgcctctggagctgcttacaccaaggcaatacgcc

SEQ ID NO: 729751 - DNA, 120 bp, Artificial Sequence
  ENSG00000198625_28 (sequence is synthesized)
ttttttttttttttttttttttttggaggatagggagtatggctgttgtgaaaagggaggtaaagagaaatggtagatctgaagaggcctcatcagagcacatattttaggacaacacat

SEQ ID NO: 729752 - DNA, 120 bp, Artificial Sequence
  ENSG00000198625_29 (sequence is synthesized)
aggcctcatcagagcacatattttaggacaacacatatggaaattggacatctttaagttggtttccatagagctatgcatgtatccttacccccatgggaaaatgttggtgtgttctca

SEQ ID NO: 729753 - DNA, 120 bp, Artificial Sequence
  ENSG00000198625_30 (sequence is synthesized)
agggtatgcatgtgtcattttgaagaccaaggccctagaattgtcaaacttaaggatcataaaaatcatgagggttgcttgttaaaaatgtccaaacgtgcagagactgatctttgagat

SEQ ID NO: 729754 - DNA, 120 bp, Artificial Sequence
  ENSG00000198625_31 (sequence is synthesized)
agatctggaccaggaatttgcatttgaacaagtgttcctggaatctctatgcaagttttatacagaacatacttttggaatccttgccctagacaggggtgtccaatcttttggcttccc

SEQ ID NO: 729755 - DNA, 90 bp, Artificial Sequence
  ENSG00000198625_32 (sequence is synthesized)
tgaacctgagagggggagacccagcctgggcaacaatagcgaaactgtctcagaaaaaagaaaaaaaaaatcgcaaaaagaaaaatctca

SEQ ID NO: 729756 - DNA, 120 bp, Artificial Sequence
  ENSG00000198625_33 (sequence is synthesized)
ccattgcaccccagcctgggcaacaatagcgaaactgtctcagaaaaaagaaaaaaaaaatcgcaaaaagaaaaatctcataatgtcgttgttggtttttttttttttttttgagacagt

SEQ ID NO: 729757 - DNA, 90 bp, Artificial Sequence
  ENSG00000198625_34 (sequence is synthesized)
gtctcgaactcctgacctcatgatccacacacctcggcctcccaaagtcctgcaagttgtaatttttaataaaacttaagaagtaaacat

SEQ ID NO: 729758 - DNA, 120 bp, Artificial Sequence
  ENSG00000198625_35 (sequence is synthesized)
tttttaataaaacttaagaagtaaacattttacttatgtttataggtatttgatcctaaatttgacacatcattgcccatgaaagaatcctcttaggctgctcagcttcactcttcctgc

SEQ ID NO: 729759 - DNA, 120 bp, Artificial Sequence
  ENSG00000198625_36 (sequence is synthesized)
ttgcccaccggggtttttcactgcttctgttagcactaagtacttagacgatcctaagatatgtgcttgagccgaatttcatctttacttgtaggaaactttaaactatttcttttcttt

SEQ ID NO: 729760 - DNA, 86 bp, Artificial Sequence
  ENSG00000198625_37 (sequence is synthesized)
cctcagcctcgcccagcttaaactattttcttggtctgtttttgattttcttttttccttgccactgcggtacagattttttttac

SEQ ID NO: 729761 - DNA, 120 bp, Artificial Sequence
  ENSG00000198625_38 (sequence is synthesized)
tttcttttttccttgccactgcggtacagattttttttactcactgccactaaactaaagcaaggcatagtttatatgtgaagtgttcagagtttactgctataaggaaacttccaaata

SEQ ID NO: 729762 - DNA, 120 bp, Artificial Sequence
  ENSG00000198625_39 (sequence is synthesized)
ctgacatttaccttttagctgtagttattgggaccatgtgctctggttttctggagactgccaaattgctcccatttttctgcatcccacctggtttctttctgcatgtcccctttcact

SEQ ID NO: 729763 - DNA, 120 bp, Artificial Sequence
  ENSG00000198625_40 (sequence is synthesized)
ttcaaacctcttcatttggatgttaaattatatggtcacctagttataggtaagccttgttcgagttgatatcttgattgtgaggaaggatctgtgtcattggagcttgtttctgctgca

SEQ ID NO: 729764 - DNA, 120 bp, Artificial Sequence
  ENSG00000198625_41 (sequence is synthesized)
acgtgctgtagactatgaataatgaaatcacaccacattaccatcagatttcttgttttagttgtcaaattaatatttatgattgttatcttgggcgaaaagttcagagcagagatgaca

SEQ ID NO: 729765 - DNA, 120 bp, Artificial Sequence
  ENSG00000198625_42 (sequence is synthesized)
aatcattagaacaacgatgaatttcagtattacggctaaaaagttcttctgtctgaatattaactcactctccttccagtgtacttcacagtaattggtatgcttttttatttaatgctt

SEQ ID NO: 729766 - DNA, 120 bp, Artificial Sequence
  ENSG00000198625_43 (sequence is synthesized)
aaatcaaactttataaaaatcttagaccagatctttaatatggtatgccatttccccagtctaccaatggaatagtatgggtttctaatcctaggcttgtacaatggattggagttgagc

SEQ ID NO: 729767 - DNA, 120 bp, Artificial Sequence
  ENSG00000198625_44 (sequence is synthesized)
catgccagcctccacactgccactaacttctgtaatgtaagattgagtcactgccaagcatttgaaatatgcagttgtgttttaattataatttatgtatagttagatgtatgtagtgca

SEQ ID NO: 729768 - DNA, 120 bp, Artificial Sequence
  ENSG00000198625_45 (sequence is synthesized)
ttgtgtggtattatttggtttgtaagaatttatttttaagggtcaaggtcatttgtaacattttgtgtgtgtcaattcaatgcaatgttggctgccttttgaagtctttgatatattggt

SEQ ID NO: 729769 - DNA, 120 bp, Artificial Sequence
  ENSG00000198625_46 (sequence is synthesized)
gaatattcttctgatctataatacaaagctatgtaatgttacctcttgactcgcttttgaaaggaagacaattgttaactagatatttgagttttttcccctcagaattatgtgaatttc

SEQ ID NO: 729770 - DNA, 120 bp, Artificial Sequence
  ENSG00000198625_47 (sequence is synthesized)
tgatatatggctttagatactgtgaatctgttttccatttagtcagttatctgcttaaattgttcagaactatatcctaacgagcaattagttctgatggttctcccagtcatgagtgtg

SEQ ID NO: 729771 - DNA, 120 bp, Artificial Sequence
  ENSG00000198625_48 (sequence is synthesized)
catgtgtgcaagcatgttttgatcctgatgctacctttgctaaaaatggccatagattaggaactagctatgtttttagaatcaaagatgaaccggtaagctgtctcatgtaccaaacgt

SEQ ID NO: 729772 - DNA, 120 bp, Artificial Sequence
  ENSG00000198625_49 (sequence is synthesized)
gaaatttacagtgtttacaaatgtctggaattttgcactgccatagggaatgttaaggttacttggctggaatttatcagacttgtgagtaaacaagttgaagtttagcagatgaggggg

SEQ ID NO: 729773 - DNA, 120 bp, Artificial Sequence
  ENSG00000198625_50 (sequence is synthesized)
aatattgaggcccctaaggctaaacaaaataatcagtatctgagatagtggctaatgtggctccccaggcctaatttgggaacagtttttcctgattgctttgagaagtactttcttttg

SEQ ID NO: 729774 - DNA, 120 bp, Artificial Sequence
  ENSG00000198625_51 (sequence is synthesized)
acagaaattttcattctgcttgccattgctatattctccctttataggagccattggatttctttccttttgtgggaaatgtcccattagcattttcagatcttttgatgtgcactaatg

SEQ ID NO: 729775 - DNA, 120 bp, Artificial Sequence
  ENSG00000198625_52 (sequence is synthesized)
ccattattggtaatgccgttattggtgaatacagcatagttaaataaactgttacagtaaatctacacttggatttgctgcacctctaccaatagccttttgaatgactgaaagtgttaa

SEQ ID NO: 729776 - DNA, 120 bp, Artificial Sequence
  ENSG00000198625_53 (sequence is synthesized)
cagagaaagaggcatgtctgcagaaagagatagctaatattttttggtactttatctgaaatccaagatgctgcttcccctgcaggttgttttccttcttacgatcctcattgaatcccc

SEQ ID NO: 729777 - DNA, 120 bp, Artificial Sequence
  ENSG00000198625_54 (sequence is synthesized)
acgatcctcattgaatcccctctgggagcacaggacagttagtagaactctccatttctttttttttttttttagacggagtctctctctgtcgccccggctggagtgcagtggcgcgat

SEQ ID NO: 729778 - DNA, 63 bp, Artificial Sequence
  ENSG00000198625_55 (sequence is synthesized)
tctccatttcttaaggtaaagagggtcaaggatacctaaaaagggtcaaataatgctagaaga

SEQ ID NO: 729779 - DNA, 120 bp, Artificial Sequence
  ENSG00000198625_56 (sequence is synthesized)
ggtcaaggatacctaaaaagggtcaaataatgctagaagagcaattcctctttcagagcagttgctgtaatttggcaaatgctttatcgaagattgatattaggctaggggcggtggctt

SEQ ID NO: 729780 - DNA, 120 bp, Artificial Sequence
  ENSG00000198625_57 (sequence is synthesized)
ggtgacagagactctgtctcaaaaaaaaggacatttatcattataacatcttattagagcccctaatttcttatctgaaggcactgtttttttttttaaacagttaagtactgatgtcaa

SEQ ID NO: 729781 - DNA, 120 bp, Artificial Sequence
  ENSG00000198625_58 (sequence is synthesized)
cagacaaatatttctgatcagatagtcccctgtcaacagtagcaaatgtggtttcataaagtgggaagaaaacagcattttaaagtaactttttgggagactgatttgagtaataataaa

SEQ ID NO: 729782 - DNA, 120 bp, Artificial Sequence
  ENSG00000198625_59 (sequence is synthesized)
actctggtctcccttaagaaaaaaaaacccttccacctttactgtgtcatttatatccccttagttccaaagttaattatcttatttctggatattgcttttataccaaagacccttatc

SEQ ID NO: 729783 - DNA, 120 bp, Artificial Sequence
  ENSG00000198625_60 (sequence is synthesized)
agcccttgtaactacagtatctttagataagattcctctttccagtcagtcctgggaaatgtttctgttgcagagttaggcggtagatgggaagctgtgatggcagagctactatctaat

SEQ ID NO: 729784 - DNA, 120 bp, Artificial Sequence
  ENSG00000198625_61 (sequence is synthesized)
aaagtaacaactcgtagttgaggcttcctttctgtgtgtgatgggggatagggagttagctcccctgttgtctcagcactaagaaattgaggtcaggccaggcgcggtggttcactcctg

SEQ ID NO: 729785 - DNA, 120 bp, Artificial Sequence
  ENSG00000198625_62 (sequence is synthesized)
aagaaattgaggtcaggccaggcgcggtggttcactcctgttattccagcactggggtggccaaagtgggcagattgcttgcgctctggagctcgagaccagcctgggcaacatggtgaa

SEQ ID NO: 729786 - DNA, 120 bp, Artificial Sequence
  ENSG00000198625_63 (sequence is synthesized)
gacgctgtctcaaagaaattgaggtcaggcttccttcttacagaattatttttttctctgtagtttgcctcattttttcactttcttttcaatgagaatcgaagtgtttcttttgggttt

SEQ ID NO: 729787 - DNA, 120 bp, Artificial Sequence
  ENSG00000198625_64 (sequence is synthesized)
ttttttcccccttttaaaatcaacaggaaatgtttcaaaggagggatgaaatgcttcttggcttcctcagcacttggcaaggtagacctcatagcaaccttgaatatgactttctttagt

SEQ ID NO: 729788 - DNA, 120 bp, Artificial Sequence
  ENSG00000198625_65 (sequence is synthesized)
ctctagctatgcactattaagtgcctcttgggtagaggtagagttaagtattgagtgccagtcttgacgtccgtatgcctcagtttttctcatatataaaaagcagtatacatacctacc

SEQ ID NO: 729789 - DNA, 120 bp, Artificial Sequence
  ENSG00000198625_66 (sequence is synthesized)
cttttctacctcatcatttgttgtagggattaaatccgggagagcaattctgaagcctataaatttccttgaagagatctaagaacctattatgctcttggtgtaccaagctctggggta

SEQ ID NO: 729790 - DNA, 120 bp, Artificial Sequence
  ENSG00000198625_67 (sequence is synthesized)
tatattcagaatacctcatgttctggaagctgagcactagctcccctttattgcctgcctggcagagcctgtttgattactgcaggcccttttacccatgcttctagtttaggtattctt

SEQ ID NO: 729791 - DNA, 120 bp, Artificial Sequence
  ENSG00000198625_68 (sequence is synthesized)
tctttgatatgaggctcttgaccagaaaagagttctttctctaggtgttctgagagaagtttgtaaatttggatagtacattctatcctgataaaaccaccttgctgtggtcttgatgta

SEQ ID NO: 729792 - DNA, 120 bp, Artificial Sequence
  ENSG00000198625_69 (sequence is synthesized)
caaagtactgggattacaggcgtgagcaactgctcctggcccaaaacatctctttctacatacacttgagtaggtggcataaaatgcactgtcaatatatagaaaacatgaaattttcca

SEQ ID NO: 729793 - DNA, 120 bp, Artificial Sequence
  ENSG00000198625_70 (sequence is synthesized)
agaaaacatgaaattttccaaatatttccgatcagagaatcacaagagcagcaaatgtggtttcatcaagtgggaagaaagcagcaatttaaaataactttttgggagactgaattgagt

SEQ ID NO: 729794 - DNA, 120 bp, Artificial Sequence
  ENSG00000198625_71 (sequence is synthesized)
aataataaaacttcagtctttcgctaataataataataataataataataacaacaacttattgaatgtggccagctcactagatgaggaaagaggaaggcattttctgcattcttgcct

SEQ ID NO: 729795 - DNA, 120 bp, Artificial Sequence
  ENSG00000198625_72 (sequence is synthesized)
agttttccttataagcaccactaagttaatagctctgtctttttggtgtttgcactatgtaatgcttttaatactttttaattgtgcttttttatgtattaaatgtttttccttttgcca

SEQ ID NO: 729796 - DNA, 78 bp, Artificial Sequence
  ENSG00000198625_73 (sequence is synthesized)
taaaaaaaaaaaaaaaaaaaatcgtggacctcacctaggtcgggagtttgagaccagcctgaccgacatggagaaacc

SEQ ID NO: 729797 - DNA, 120 bp, Artificial Sequence
  ENSG00000198625_74 (sequence is synthesized)
tcttggtacgtggcgagggtttcatatgttttctgaattatgcctaattttgtagtagactggagggtttatacagatagcctgtttttaacagtagattttggcctttgtgcagaggtt

SEQ ID NO: 729798 - DNA, 120 bp, Artificial Sequence
  ENSG00000198625_75 (sequence is synthesized)
ttttttccccccaggtttgggattcttctagctttgctcacagtgggttgaggagaggtgttgcctttatttgatgactgttgtgaacttgagttctctttcttgtgtgtaacccattgt

SEQ ID NO: 729799 - DNA, 120 bp, Artificial Sequence
  ENSG00000198625_76 (sequence is synthesized)
ggggaaactttatagtcatcttggtacgtggcgagggtttcatatgttttctgaattatgcctaattttgtagtagactggagggtttatacagatagcctgtttttaacagtagatttt

SEQ ID NO: 729800 - DNA, 120 bp, Artificial Sequence
  ENSG00000198625_77 (sequence is synthesized)
tcgctttagatgaagatgctattgttttatgaagcaaacggggaaaaatccagatttcaagatcccataaccctgtatgacttaacacttgaaagttgaaattaaatgtaaaaagccata

SEQ ID NO: 729801 - DNA, 120 bp, Artificial Sequence
  ENSG00000198625_78 (sequence is synthesized)
tcaagggggcaaatgatgggaaaacaaagaagatgaaggtggaaatggaatgctatctttggcatgactgggagaaatacatactacctgtcacacagaatgttatgttattaacttttt

SEQ ID NO: 729802 - DNA, 120 bp, Artificial Sequence
  ENSG00000198625_79 (sequence is synthesized)
actgaaaaatcaaacatagagtagaaggatttccactttctagacgtactgttaacgttttgtcatattgcttcatctagacacacttttaaaaatctctagcagataaggacttttttc

SEQ ID NO: 729803 - DNA, 120 bp, Artificial Sequence
  ENSG00000198625_80 (sequence is synthesized)
tccaaacattcaatatcattattacacataacaaatttaacatgtaattccataatcctatttcatagccagtttatgtatcatttcccccagttatctcaaaaataccttgtatttttg

SEQ ID NO: 729804 - DNA, 120 bp, Artificial Sequence
  ENSG00000198626_0 (sequence is synthesized)
gatgatgaagtggttctgcagtgcaccgcaaccatccacaaagaacaacagaagctatgcttggcagcagaaggatttggcaacagactttgtttcttggagtccacttccaattccaag

SEQ ID NO: 729805 - DNA, 120 bp, Artificial Sequence
  ENSG00000198626_1 (sequence is synthesized)
aatgtgcccccagacctctccatctgcacctttgtgctggagcagtccctctctgtccgggcgctgcaggagatgctggctaacaccgtggagaaatcagaagggcaagttgatgtggaa

SEQ ID NO: 729806 - DNA, 120 bp, Artificial Sequence
  ENSG00000198626_2 (sequence is synthesized)
aaatggctcttctctctaaagactgctcaaggtggtggtcatcgaacactcctctacggacatgccatattgctgcgccattcctatagtggcatgtatctgtgctgcctgtccacctcc

SEQ ID NO: 729807 - DNA, 120 bp, Artificial Sequence
  ENSG00000198626_3 (sequence is synthesized)
cggtcttcaactgataagctggcttttgatgttggcttgcaagaggacaccacaggggaggcttgttggtggaccatacaccctgcctctaagcagcgatcagaaggagaaaaagtacga

SEQ ID NO: 729808 - DNA, 120 bp, Artificial Sequence
  ENSG00000198626_4 (sequence is synthesized)
gttggagatgacctcatcttagttagcgtgtcctctgaaaggtacttgcacttgtcttatggcaacggcagcttacacgtggatgccgctttccagcagactctctggagcgtggcccca

SEQ ID NO: 729809 - DNA, 120 bp, Artificial Sequence
  ENSG00000198626_5 (sequence is synthesized)
atcagctcaggaagtgaggcagcccaagggtatctcattggtggtgatgtcctcaggttgctgcatggacacatggacgagtgtctcactgtcccttcaggagaacatggtgaagagcag

SEQ ID NO: 729810 - DNA, 120 bp, Artificial Sequence
  ENSG00000198626_6 (sequence is synthesized)
cggagaactgttcattatgaaggtggcgctgtgtctgttcatgcacgttccctttggagactagagacgctaagagttgcgtggagtggaagccacataagatggggacagccattccga

SEQ ID NO: 729811 - DNA, 120 bp, Artificial Sequence
  ENSG00000198626_7 (sequence is synthesized)
ctacgccatgtcacaacaggaaaatacttgagtctcatggaagacaaaaaccttctactcatggacaaagagaaagctgatgtaaaatcaacagcatttaccttccggtcttccaaggaa

SEQ ID NO: 729812 - DNA, 120 bp, Artificial Sequence
  ENSG00000198626_8 (sequence is synthesized)
aaattggatgtaggggtgagaaaagaagtagatggcatgggaacatctgaaataaaatacggtgactcagtatgctatatacaacatgtagacacaggcctatggcttacttaccagtct

SEQ ID NO: 729813 - DNA, 120 bp, Artificial Sequence
  ENSG00000198626_9 (sequence is synthesized)
gtggacgtgaaatccgtgagaatgggatctatacaacgtaaggctattatgcatcatgaaggccacatggatgatggcataagtttgtcgagatcccagcatgaagaatcacgcacagcc

SEQ ID NO: 729814 - DNA, 120 bp, Artificial Sequence
  ENSG00000198626_10 (sequence is synthesized)
cgagttatccggagcacagtcttccttttcaatagatttataaggggccttgatgctctcagcaagaaagcgaaggcttccacagtcgatttgcctatagagtccgtaagcctaagtctg

SEQ ID NO: 729815 - DNA, 120 bp, Artificial Sequence
  ENSG00000198626_11 (sequence is synthesized)
caggatctcattggctacttccaccccccagatgagcatttagagcatgaagacaaacagaacagactacgagccctgaagaatcggcaaaatctcttccaggaagagggaatgatcaac

SEQ ID NO: 729816 - DNA, 120 bp, Artificial Sequence
  ENSG00000198626_12 (sequence is synthesized)
ctcgtgcttgagtgcatagaccgtttgcacgtctacagcagtgcagcacactttgctgatgttgctgggcgagaagcaggagagtcttggaaatccattctgaattctctgtatgagttg

SEQ ID NO: 729817 - DNA, 120 bp, Artificial Sequence
  ENSG00000198626_13 (sequence is synthesized)
ctggcggctctaattagaggaaatcgtaaaaactgtgctcaattttctggctccctcgactggttgatcagcagattggaaagactggaagcttcttcaggcattctggaagttttacac

SEQ ID NO: 729818 - DNA, 120 bp, Artificial Sequence
  ENSG00000198626_14 (sequence is synthesized)
tgtgttttagtagaaagtccagaagctctaaatattattaaagaaggacatattaaatctattatctcacttttagacaaacatggaagaaatcacaaggttctggatgtcttgtgctca

SEQ ID NO: 729819 - DNA, 120 bp, Artificial Sequence
  ENSG00000198626_15 (sequence is synthesized)
ctctgtgtttgccacggggttgcagtccgttctaaccagcatctcatctgtgacaatctcctaccaggaagagacttgttattgcagacacgtcttgtgaaccatgtcagcagcatgaga

SEQ ID NO: 729820 - DNA, 120 bp, Artificial Sequence
  ENSG00000198626_16 (sequence is synthesized)
cccaatatttttctgggcgtcagtgaaggttctgctcagtataagaaatggtactatgaattgatggtggaccacacagagccctttgtgacagctgaagcaactcacctgcgagtgggc

SEQ ID NO: 729821 - DNA, 120 bp, Artificial Sequence
  ENSG00000198626_17 (sequence is synthesized)
tgggcttccactgaaggatattctccctaccctggagggggcgaagagtggggtggaaatggtgttggagatgatctcttctcctatggatttgatggccttcatctctggtcaggttgt

SEQ ID NO: 729822 - DNA, 120 bp, Artificial Sequence
  ENSG00000198626_18 (sequence is synthesized)
attgctcgtactgtaagctcaccaaaccaacatctgttaagaactgatgatgtcatcagttgctgtttagatctgagtgccccaagcatctcgttccgaattaatggacaacctgttcaa

SEQ ID NO: 729823 - DNA, 120 bp, Artificial Sequence
  ENSG00000198626_19 (sequence is synthesized)
ggaatgtttgagaatttcaacatcgatggcctcttctttccagtcgttagtttctctgcaggaataaaagtacgctttctgcttggagggcgacatggagaattcaaatttcttcctcca

SEQ ID NO: 729824 - DNA, 120 bp, Artificial Sequence
  ENSG00000198626_20 (sequence is synthesized)
cctgggtatgctccttgttatgaagctgttctgccaaaagaaaagttgaaagtggaacacagccgagagtacaagcaagaaagaacttacacacgcgacctgctgggccccacagtttcc

SEQ ID NO: 729825 - DNA, 120 bp, Artificial Sequence
  ENSG00000198626_21 (sequence is synthesized)
ctgacgcaagctgccttcacacccatccctgtggataccagccagatcgtgttgcctcctcatctagaaagaataagagaaaaactggcagagaatatccatgaactctgggttatgaat

SEQ ID NO: 729826 - DNA, 120 bp, Artificial Sequence
  ENSG00000198626_22 (sequence is synthesized)
aaaattgagcttggctggcagtatggtccggttagagatgacaacaagagacaacacccatgcctggtggagttctccaagctgcctgaacaggagcgcaattacaacttacaaatgtcg

SEQ ID NO: 729827 - DNA, 120 bp, Artificial Sequence
  ENSG00000198626_23 (sequence is synthesized)
cttgagaccctgaagactttgttggcattaggatgtcatgtgggtatatcagatgaacatgctgaagacaaggtgaaaaaaatgaagctacccaagaattaccagctgacaagtggatac

SEQ ID NO: 729828 - DNA, 120 bp, Artificial Sequence
  ENSG00000198626_24 (sequence is synthesized)
aagcctgcccctatggacctgagctttatcaaactcaccccatcacaagaagcaatggtggacaagttggcagaaaatgcacataatgtgtgggcgcgggatcgaatccggcagggctgg

SEQ ID NO: 729829 - DNA, 120 bp, Artificial Sequence
  ENSG00000198626_25 (sequence is synthesized)
acttatggcatccaacaggacgtaaagaacagaagaaatcctcgccttgttccctacactcttctggatgaccgaaccaagaaatccaacaaggacagcctccgcgaggctgtgcgcacg

SEQ ID NO: 729830 - DNA, 120 bp, Artificial Sequence
  ENSG00000198626_26 (sequence is synthesized)
ctgctggggtacggctacaacttggaagcaccagatcaagatcatgcagccagagccgaagtgtgcagcggcaccggggaaaggttccgaatcttccgtgccgagaagacctatgcagtg

SEQ ID NO: 729831 - DNA, 120 bp, Artificial Sequence
  ENSG00000198626_27 (sequence is synthesized)
aaggccggacggtggtattttgaatttgagacggtcactgctggagacatgagggttggttggagtcgtcctggttgtcaaccggatcaggagcttggctcagatgaacgtgcctttgcc

SEQ ID NO: 729832 - DNA, 120 bp, Artificial Sequence
  ENSG00000198626_28 (sequence is synthesized)
tttgatggcttcaaggcccagcggtggcatcagggcaatgaacactatgggcgctcttggcaagcaggcgatgtcgtggggtgtatggttgacatgaacgaacacaccatgatgttcaca

SEQ ID NO: 729833 - DNA, 120 bp, Artificial Sequence
  ENSG00000198626_29 (sequence is synthesized)
ctgaatggtgaaatccttcttgatgattcaggctcagaactggctttcaaggactttgatgttggcgatggattcatacctgtgtgtagccttggagtggctcaagtgggtaggatgaac

SEQ ID NO: 729834 - DNA, 120 bp, Artificial Sequence
  ENSG00000198626_30 (sequence is synthesized)
tttggaaaggatgtcagcaccttgaaatatttcaccatctgtggcttacaagagggctatgaaccatttgccgttaatacaaacagggatattaccatgtggctgagcaagaggcttcct

SEQ ID NO: 729835 - DNA, 120 bp, Artificial Sequence
  ENSG00000198626_31 (sequence is synthesized)
cagtttcttcaagttccatcaaaccatgaacatatagaggtgaccagaatagacggcaccatagacagttccccatgtttaaaggtcactcagaagtcttttggttctcagaacagcaac

SEQ ID NO: 729836 - DNA, 120 bp, Artificial Sequence
  ENSG00000198626_32 (sequence is synthesized)
actgatatcatgttttatcgcctgagcatgccgatcgagtgcgcggaggtcttctccaagacggtggctggagggctccctggggctggcctttttgggcccaagaatgacttggaagat

SEQ ID NO: 729837 - DNA, 120 bp, Artificial Sequence
  ENSG00000198626_33 (sequence is synthesized)
tatgatgctgattctgactttgaggttctgatgaagacagctcatggccatctagtgcccgatcgtgttgacaaagacaaagaagctactaaaccagagtttaacaaccacaaagattat

SEQ ID NO: 729838 - DNA, 120 bp, Artificial Sequence
  ENSG00000198626_34 (sequence is synthesized)
gcccaggaaaagccctctcgtctgaaacaaagatttttgcttagaagaacaaagccagattacagcacaagccattctgcaagactcaccgaagatgtccttgctgatgatcgggatgac

SEQ ID NO: 729839 - DNA, 120 bp, Artificial Sequence
  ENSG00000198626_35 (sequence is synthesized)
tatgatttcttgatgcaaacgtccacgtactattactcagtgagaatctttcctggacaagaacctgctaatgtctgggtgggctggattacatcagatttccatcagtatgacacaggc

SEQ ID NO: 729840 - DNA, 120 bp, Artificial Sequence
  ENSG00000198626_36 (sequence is synthesized)
tttgacttggacagagttcgcacagtaacagttactctaggagatgaaaaaggaaaagtgcatgaaagcatcaaacgcagcaactgctatatggtatgtgcgggtgagagcatgagcccc

SEQ ID NO: 729841 - DNA, 120 bp, Artificial Sequence
  ENSG00000198626_37 (sequence is synthesized)
gggcaaggacgcaacaataatggactggagattggctgtgtggtggatgctgccagcgggctgctcacattcattgccaatggcaaggaactgagcacatactatcaggtggaaccgagt

SEQ ID NO: 729842 - DNA, 120 bp, Artificial Sequence
  ENSG00000198626_38 (sequence is synthesized)
acaaaattatttcctgcggtttttgcacaagctacaagtcccaatgttttccagtttgagttgggaagaataaagaatgtgatgcctctctcggcgggattattcaagagtgagcacaag

SEQ ID NO: 729843 - DNA, 120 bp, Artificial Sequence
  ENSG00000198626_39 (sequence is synthesized)
aaccccgtgccgcagtgccccccgcgcctccacgtgcagttcctgtcacacgtcctgtggagcagaatgcccaaccagtttttgaaggtagatgtgtctcgaataagtgaacgccaaggc

SEQ ID NO: 729844 - DNA, 120 bp, Artificial Sequence
  ENSG00000198626_40 (sequence is synthesized)
tggttggtgcagtgtttggatcctctgcagttcatgtctcttcatatccctgaggaaaacagatctgttgacatcttagagttgacagagcaggaggaattgctgaaatttcactatcac

SEQ ID NO: 729845 - DNA, 120 bp, Artificial Sequence
  ENSG00000198626_41 (sequence is synthesized)
actctccggctctactcagccgtctgtgctcttgggaaccaccgggtggcccatgccctgtgcagccatgtggatgaacctcagctcctctatgccattgagaacaagtacatgcctggt

SEQ ID NO: 729846 - DNA, 120 bp, Artificial Sequence
  ENSG00000198626_42 (sequence is synthesized)
ttgctgcgtgctggctactatgacctgctgattgacatccacctgagctcctatgccactgccaggctcatgatgaacaacgagtacattgtccccatgacggaggagacgaagagcatc

SEQ ID NO: 729847 - DNA, 120 bp, Artificial Sequence
  ENSG00000198626_43 (sequence is synthesized)
accctgttccctgatgagaacaaaaaacacggccttccagggatcggcctcagcacctccctcaggccacggatgcagttttcctcccccagttttgtaagcattagtaatgaatgttac

SEQ ID NO: 729848 - DNA, 120 bp, Artificial Sequence
  ENSG00000198626_44 (sequence is synthesized)
cagtacagtccagagttcccactggacatcctcaagtccaaaaccatacagatgctgacagaagctgttaaagagggcagtcttcatgcccgggacccagttggagggactactgaattc

SEQ ID NO: 729849 - DNA, 120 bp, Artificial Sequence
  ENSG00000198626_45 (sequence is synthesized)
ctctttgtacctctcatcaagcttttctataccctgctgatcatgggcatctttcacaacgaggacttgaagcacatcttgcagttgattgagcccagtgtgtttaaagaagctgccact

SEQ ID NO: 729850 - DNA, 120 bp, Artificial Sequence
  ENSG00000198626_46 (sequence is synthesized)
ccggaggaggagagtgacacgctggagaaagagctcagtgtggacgatgcaaagctgcaaggagctggtgaggaagaagccaaggggggcaagcggcccaaggaaggcctgctccaaatg

SEQ ID NO: 729851 - DNA, 120 bp, Artificial Sequence
  ENSG00000198626_47 (sequence is synthesized)
aaactgccagagccagttaaattgcagatgtgcctactgcttcagtacctctgtgactgccaggtccggcaccggatagaagccattgtagccttttcagatgattttgtggctaagctc

SEQ ID NO: 729852 - DNA, 120 bp, Artificial Sequence
  ENSG00000198626_48 (sequence is synthesized)
caagacaatcaacgtttccgatacaacgaagtcatgcaagccttaaacatgtcagctgcactcacagccaggaagacaaaggaatttagatcaccacctcaagaacagatcaatatgctt

SEQ ID NO: 729853 - DNA, 120 bp, Artificial Sequence
  ENSG00000198626_49 (sequence is synthesized)
ctcaattttaaggatgacaaaagtgaatgtccatgtccagaagaaattcgtgaccaactattggatttccatgaagatttgatgacacattgtggaattgagctggatgaagatgggtct

SEQ ID NO: 729854 - DNA, 120 bp, Artificial Sequence
  ENSG00000198626_50 (sequence is synthesized)
ctggatggaaacagtgatttaacaattagagggcgtctgctatccctggtagaaaaggtgacatatctgaagaagaagcaagcagaaaaaccagttgagagtgactccaaaaagtcctcc

SEQ ID NO: 729855 - DNA, 120 bp, Artificial Sequence
  ENSG00000198626_51 (sequence is synthesized)
actctgcagcagctgatttctgagaccatggtccgatgggctcaggagtctgtcattgaagaccccgagctggtgagggccatgtttgtgttgctccatcggcagtatgacggcattggg

SEQ ID NO: 729856 - DNA, 120 bp, Artificial Sequence
  ENSG00000198626_52 (sequence is synthesized)
ggtcttgttcgggccctgccaaagacctacacgataaatggtgtgtccgtggaggacaccatcaacctgctggcatcccttggtcagattcggtccctgctgagtgtgagaatgggcaaa

SEQ ID NO: 729857 - DNA, 120 bp, Artificial Sequence
  ENSG00000198626_53 (sequence is synthesized)
gaagaagagaagctcatgattcgtggattaggggatattatgaataacaaagtgttttaccagcaccctaatctcatgagggcactggggatgcacgagactgtgatggaggtcatggtg

SEQ ID NO: 729858 - DNA, 120 bp, Artificial Sequence
  ENSG00000198626_54 (sequence is synthesized)
aacgtccttggaggtggagagtccaaggaaatcacctttcccaagatggtggccaactgttgccgttttctctgttacttctgtcgtataagtaggcagaatcaaaaagctatgtttgat

SEQ ID NO: 729859 - DNA, 120 bp, Artificial Sequence
  ENSG00000198626_55 (sequence is synthesized)
catctcagttatttactggaaaacagcagtgttggtcttgcctccccagctatgagaggttcaacaccactggatgtggctgcagcttcggtgatggataataatgaactagcattagct

SEQ ID NO: 729860 - DNA, 120 bp, Artificial Sequence
  ENSG00000198626_56 (sequence is synthesized)
ctgcgtgagccggatctagaaaaggtagttcgttatttggctggttgtggactgcaaagttgccagatgctggtgtctaagggctatccagacattgggtggaacccagttgaaggagag

SEQ ID NO: 729861 - DNA, 120 bp, Artificial Sequence
  ENSG00000198626_57 (sequence is synthesized)
agatatcttgactttcttagatttgctgtcttctgtaatggggagagtgtggaggaaaatgcaaatgtcgtggtgagattgctcattcggaggcctgagtgttttggtcctgctttgaga

SEQ ID NO: 729862 - DNA, 120 bp, Artificial Sequence
  ENSG00000198626_58 (sequence is synthesized)
ggagaaggtgggaatgggcttcttgcagcaatggaagaagccatcaaaatcgccgaggatccttcccgagatggtccctcaccaaatagcggatccagtaaaacacttgacacagaggag

SEQ ID NO: 729863 - DNA, 120 bp, Artificial Sequence
  ENSG00000198626_59 (sequence is synthesized)
gaggaagatgacactatccacatggggaacgcgatcatgaccttctattcagctttgattgacctcttgggacgctgtgctcctgagatgcatttgattcatgccgggaagggagaagcc

SEQ ID NO: 729864 - DNA, 120 bp, Artificial Sequence
  ENSG00000198626_60 (sequence is synthesized)
atcagaattaggtccattttgagatccctcattcccctgggagatttggtgggcgttatcagcatcgcttttcagatgccaacaatagccaaagatgggaatgtggtggaacctgacatg

SEQ ID NO: 729865 - DNA, 120 bp, Artificial Sequence
  ENSG00000198626_61 (sequence is synthesized)
cttcttgaggttggctttctgccagatctccgggcggctgcttctttagatacggcagctttgagtgctacagacatggccttggccctcaatcggtacctttgcacagccgtcttgcca

SEQ ID NO: 729866 - DNA, 120 bp, Artificial Sequence
  ENSG00000198626_62 (sequence is synthesized)
ttgttaacaagatgtgctcctctctttgctggcacagagcaccacgcttctctcattgactcattacttcatactgtgtatagactttctaagggctgttcacttaccaaagctcagcgg

SEQ ID NO: 729867 - DNA, 120 bp, Artificial Sequence
  ENSG00000198626_63 (sequence is synthesized)
gattccatagaagtttgtttactctctatttgtggacaactgagaccttctatgatgcagcacttactcagaagattagtatttgatgttccattattaaatgaacacgcaaagatgcct

SEQ ID NO: 729868 - DNA, 120 bp, Artificial Sequence
  ENSG00000198626_64 (sequence is synthesized)
cttaaactgctgacaaatcattatgaaagatgctggaaatattactgcctgcctggagggtggggaaactttggtgctgcctcagaagaagaacttcatttatcaagaaagttgttctgg

SEQ ID NO: 729869 - DNA, 120 bp, Artificial Sequence
  ENSG00000198626_65 (sequence is synthesized)
ggcatttttgatgccctgtctcaaaagaaatatgaacaagaacttttcaaactggcactgccttgcctgagtgcagttgcgggagctttgcctccagactacatggagtcaaattatgtc

SEQ ID NO: 729870 - DNA, 120 bp, Artificial Sequence
  ENSG00000198626_66 (sequence is synthesized)
agtatgatggaaaaacagtcatcaatggattctgaagggaactttaacccacaacctgttgatacctcaaatattacaattcctgagaaattggaatacttcattaacaaatatgcagaa

SEQ ID NO: 729871 - DNA, 120 bp, Artificial Sequence
  ENSG00000198626_67 (sequence is synthesized)
cactcccatgacaaatggtcaatggacaagttggcaaatggatggatttatggagaaatatattcagactcttctaaggttcagccattaatgaagccatataagctattgtctgaaaag

SEQ ID NO: 729872 - DNA, 120 bp, Artificial Sequence
  ENSG00000198626_68 (sequence is synthesized)
gaaaaagaaatttatcgctggccaatcaaagaatctttaaaaactatgctggcttggggctggagaattgaaagaactcgggagggagacagcatggccctttacaaccggactcgtcgt

SEQ ID NO: 729873 - DNA, 120 bp, Artificial Sequence
  ENSG00000198626_69 (sequence is synthesized)
atttctcagacaagccaggtttctgtggacgctgcccatggttacagtccccgggccattgacatgagcaatgttacactatctagagacctgcatgctatggcagaaatgatggctgaa

SEQ ID NO: 729874 - DNA, 120 bp, Artificial Sequence
  ENSG00000198626_70 (sequence is synthesized)
aactaccataatatatgggcaaagaaaaagaaaatggagttggagtccaaaggaggaggaaaccatcctctgctggtgccctatgatacactgacagccaaagagaaagccaaggataga

SEQ ID NO: 729875 - DNA, 120 bp, Artificial Sequence
  ENSG00000198626_71 (sequence is synthesized)
gaaaaagcacaggacatcctcaagttcttgcagatcaatggatatgctgtatccagaggatttaaggacctggaactggacacgccttctattgagaaacgatttgcctatagtttcctc

SEQ ID NO: 729876 - DNA, 120 bp, Artificial Sequence
  ENSG00000198626_72 (sequence is synthesized)
caacaactcattcgctatgtggatgaagcccatcagtatatcctggagtttgatggtggcagcagaggcaaaggagaacatttcccttatgaacaagaaatcaagttctttgcaaaagtc

SEQ ID NO: 729877 - DNA, 120 bp, Artificial Sequence
  ENSG00000198626_73 (sequence is synthesized)
gttcttcctttaattgatcagtatttcaaaaaccatcgtttatacttcttatctgcagcaagcagacctctctgctctggaggacatgcttccaacaaagagaaagaaatggtgactagc

SEQ ID NO: 729878 - DNA, 120 bp, Artificial Sequence
  ENSG00000198626_74 (sequence is synthesized)
ctattctgcaaacttggagttcttgtcaggcataggatttcactatttggcaatgatgcaacatcaattgtcaactgtcttcatattttgggtcagactttggatgcaaggacagtgatg

SEQ ID NO: 729879 - DNA, 120 bp, Artificial Sequence
  ENSG00000198626_75 (sequence is synthesized)
aagactggcctggagagtgttaaaagtgcactcagagcttttctggacaacgctgcagaggatctggagaagaccatggaaaacctcaagcagggccagttcactcacacccgaaaccag

SEQ ID NO: 729880 - DNA, 120 bp, Artificial Sequence
  ENSG00000198626_76 (sequence is synthesized)
cccaaaggggttactcagattatcaattacaccacagtggccctgctgccaatgctgtcttcattatttgaacatattggccagcatcagttcggagaagacctaatattggaagatgtc

SEQ ID NO: 729881 - DNA, 120 bp, Artificial Sequence
  ENSG00000198626_77 (sequence is synthesized)
caggtgtcttgttatagaattctgactagcttatatgctttgggaaccagcaagagtatttacgtggagaggcaacgttctgcattaggagaatgtctagctgcctttgctggtgctttt

SEQ ID NO: 729882 - DNA, 120 bp, Artificial Sequence
  ENSG00000198626_78 (sequence is synthesized)
cctgtagcatttttggaaactcatctggacaaacataatatttactccatctacaataccaagtcttcacgagaaagagcagctctcagtttgccaactaatgtggaagatgtttgtcca

SEQ ID NO: 729883 - DNA, 120 bp, Artificial Sequence
  ENSG00000198626_79 (sequence is synthesized)
aacataccgtctttggagaaactcatggaagaaatcgtggaattagccgagtccggcattcgctacactcaaatgccacatgtcatggaagtcatactgcccatgctttgcagctacatg

SEQ ID NO: 729884 - DNA, 120 bp, Artificial Sequence
  ENSG00000198626_80 (sequence is synthesized)
tctcgttggtgggagcatggacctgagaacaatccagaacgggccgagatgtgctgcacagccctgaactcagagcacatgaacacacttctagggaacatattgaaaatcatatataat

SEQ ID NO: 729885 - DNA, 120 bp, Artificial Sequence
  ENSG00000198626_81 (sequence is synthesized)
aacttggggattgatgagggagcctggatgaagaggctagcagtgttttcccagcctataataaataaagtgaaacctcagctcttgaaaactcatttcttgccgttaatggagaaactc

SEQ ID NO: 729886 - DNA, 120 bp, Artificial Sequence
  ENSG00000198626_82 (sequence is synthesized)
aagaaaaaggcagctacggtggtgtctgaggaagaccacctgaaagctgaggccaggggggacatgtcggaggcagaactcctcatcctagatgagttcaccacactggccagagatctc

SEQ ID NO: 729887 - DNA, 120 bp, Artificial Sequence
  ENSG00000198626_83 (sequence is synthesized)
tatgccttctaccctctcttgattagatttgtggactataacagggcaaagtggctaaaggagcctaacccagaagcagaggagctcttccgcatggtggctgaagtgtttatctactgg

SEQ ID NO: 729888 - DNA, 120 bp, Artificial Sequence
  ENSG00000198626_84 (sequence is synthesized)
tcgaagtcccataatttcaaaagagaagagcagaacttcgttgtacagaatgaaatcaacaatatgtctttccttattactgataccaagtcaaagatgtcaaaggcagctgtttctgat

SEQ ID NO: 729889 - DNA, 120 bp, Artificial Sequence
  ENSG00000198626_85 (sequence is synthesized)
caggaaaggaagaaaatgaagcgcaaaggagatcggtattccatgcagacctctctgattgtagcagctctgaagcggttactgcccattgggttgaacatctgtgcccctggggaccag

SEQ ID NO: 729890 - DNA, 120 bp, Artificial Sequence
  ENSG00000198626_86 (sequence is synthesized)
gagctcattgctctggccaaaaatcgatttagcctgaaagataccgaggatgaagtacgagatataatccgcagcaatattcatttacaaggcaagttggaggatcctgctattagatgg

SEQ ID NO: 729891 - DNA, 120 bp, Artificial Sequence
  ENSG00000198626_87 (sequence is synthesized)
caaatggctctttacaaagacttaccaaacaggactgatgatacctcagatccagagaagacggtagaaagagtattggatatagcaaatgtgctttttcatcttgaacagaagtctaaa

SEQ ID NO: 729892 - DNA, 120 bp, Artificial Sequence
  ENSG00000198626_88 (sequence is synthesized)
cgtgtgggtcggagacattactgtctggtggaacatcctcagagatctaaaaaggctgtatggcataaactactgtccaagcagaggaaaagggctgttgtagcctgcttccggatggcc

SEQ ID NO: 729893 - DNA, 120 bp, Artificial Sequence
  ENSG00000198626_89 (sequence is synthesized)
cccttatataatctgccaaggcatcgggctgtcaatctctttcttcagggatatgaaaagtcttggattgaaacagaagaacattactttgaagataaactgatagaagatttagcaaaa

SEQ ID NO: 729894 - DNA, 120 bp, Artificial Sequence
  ENSG00000198626_90 (sequence is synthesized)
cctggggctgaacctccagaagaagatgaaggcactaagagagttgatcctctacatcagctgatccttctgtttagtcggacagctttaacagagaaatgcaaactggaggaagatttt

SEQ ID NO: 729895 - DNA, 120 bp, Artificial Sequence
  ENSG00000198626_91 (sequence is synthesized)
ttatatatggcctatgcagatattatggcaaagagttgtcatgatgaggaagatgacgatggtgaagaggaagtgaagagttttgaagaaaaagaaatggaaaagcaaaagcttctatac

SEQ ID NO: 729896 - DNA, 120 bp, Artificial Sequence
  ENSG00000198626_92 (sequence is synthesized)
cagcaagcccgactccacgatcgtggcgcggctgagatggtgctacagacaatcagtgccagcaaaggtgaaactggaccaatggtagcagctactctgaaacttggaattgctatttta

SEQ ID NO: 729897 - DNA, 120 bp, Artificial Sequence
  ENSG00000198626_93 (sequence is synthesized)
aatggtgggaactccacagtacagcagaaaatgcttgactacctcaaggagaaaaaggatgtgggcttctttcagagcctggccggcctgatgcagtcatgtagtgtccttgacctaaat

SEQ ID NO: 729898 - DNA, 120 bp, Artificial Sequence
  ENSG00000198626_94 (sequence is synthesized)
gcatttgagcgacaaaacaaagctgaaggtcttgggatggtgacagaggaaggatcaggagaaaaggttctgcaggacgatgagttcacctgtgacctcttccgattcctgcaactactc

SEQ ID NO: 729899 - DNA, 120 bp, Artificial Sequence
  ENSG00000198626_95 (sequence is synthesized)
tgtgagggacacaactcagattttcagaattatctgagaactcagactggcaataatacaactgtcaacataattatctccactgtagactacctactgagagttcaggaatcaattagt

SEQ ID NO: 729900 - DNA, 120 bp, Artificial Sequence
  ENSG00000198626_96 (sequence is synthesized)
gacttttattggtattactctgggaaagatgttattgatgaacaaggacaacggaatttctccaaagctatccaagtggcaaaacaagtctttaacactcttacagagtatattcagggt

SEQ ID NO: 729901 - DNA, 120 bp, Artificial Sequence
  ENSG00000198626_97 (sequence is synthesized)
ccttgcactgggaatcaacagagtttggcacacagcaggctgtgggatgctgtggtcggctttcttcatgtgtttgcccatatgcagatgaagctgtcgcaggattccagtcaaattgag

SEQ ID NO: 729902 - DNA, 120 bp, Artificial Sequence
  ENSG00000198626_98 (sequence is synthesized)
ctattaaaagaattaatggatctgcagaaggatatggtggtcatgttgctgtccatgttagaaggtaatgttgttaatggaacgattggcaaacagatggtggatatgcttgtggaatct

SEQ ID NO: 729903 - DNA, 120 bp, Artificial Sequence
  ENSG00000198626_99 (sequence is synthesized)
tccaacaacgtggagatgattctcaaattttttgacatgttcttaaaactaaaggatttgacgtcgtctgatacttttaaagaatatgaccccgatggcaagggagtcatttccaagagg

SEQ ID NO: 729904 - DNA, 120 bp, Artificial Sequence
  ENSG00000198626_100 (sequence is synthesized)
gacttccacaaagcgatggagagccataagcactacacgcagtcagaaacggaatttcttttgtcttgtgcggagacggatgagaatgaaaccctcgactacgaagagttcgtcaaacgc

SEQ ID NO: 729905 - DNA, 120 bp, Artificial Sequence
  ENSG00000198626_101 (sequence is synthesized)
ttccacgaacctgcgaaggacatcggcttcaacgtcgccgtccttctgacaaacctctctgagcacatgcccaacgatacccgacttcagacttttctggaattagcagagagcgtcctg

SEQ ID NO: 729906 - DNA, 120 bp, Artificial Sequence
  ENSG00000198626_102 (sequence is synthesized)
aattatttccagccctttctgggccgcatcgaaatcatgggaagcgccaaacgcatcgagagggtctattttgaaatcagtgagtccagccgaacccagtgggagaagccccaggtcaag

SEQ ID NO: 729907 - DNA, 120 bp, Artificial Sequence
  ENSG00000198626_103 (sequence is synthesized)
gagtccaaaagacagttcatatttgacgtggtcaacgaaggcggagagaaagagaagatggaactctttgtgaacttctgcgaggacaccatctttgaaatgcagctggcggctcagatc

SEQ ID NO: 729908 - DNA, 120 bp, Artificial Sequence
  ENSG00000198626_104 (sequence is synthesized)
tcggagtcggacttgaacgagaggtcagcgaataaggaagaaagcgagaaggagaggccggaagagcaggggccgaggatggctttcttctccattctgacggtcaggtcggccctgttt

SEQ ID NO: 729909 - DNA, 120 bp, Artificial Sequence
  ENSG00000198626_105 (sequence is synthesized)
gcgctcaggtacaatatcttgacccttatgcgaatgctcagtctgaagagcctgaagaagcagatgaaaaaagtaaaaaagatgaccgtgaaggacatggtcacggccttcttttcatcc

SEQ ID NO: 729910 - DNA, 120 bp, Artificial Sequence
  ENSG00000198626_106 (sequence is synthesized)
tactggagtattttcatgaccctcttgcacttcgtggccagcgttttcagaggctttttccgcatcatttgcagcctgctgcttgggggaagcctcgtcgaaggtgctaaaaagatcaaa

SEQ ID NO: 729911 - DNA, 120 bp, Artificial Sequence
  ENSG00000198626_107 (sequence is synthesized)
gttgcagaactgttagccaacatgccagaccccactcaggatgaggttagaggagatggggaggagggagagaggaaacccctggaagccgccctgccctccgaggatctgaccgactta

SEQ ID NO: 729912 - DNA, 120 bp, Artificial Sequence
  ENSG00000198626_108 (sequence is synthesized)
aaggagctgacagaggaaagtgaccttctttcggacatctttggcctggatctgaagagagaaggaggacagtacaaactgattcctcataatccaaatgctgggctcagtgacctcatg

SEQ ID NO: 729913 - DNA, 120 bp, Artificial Sequence
  ENSG00000198626_109 (sequence is synthesized)
agcaacccagtccccatgcctgaggtgcaggaaaaatttcaggtaatttatctcgtcacagcagcattctctcggagagcttatgttttgtttgtttgttttcataggggagaagatgga

SEQ ID NO: 729914 - DNA, 120 bp, Artificial Sequence
  ENSG00000198626_110 (sequence is synthesized)
gaaaaagaagagaaagccaaggaagacaagggcaaacaaaagttgaggcagcttcacacacacagatacggagaaccagaagtgccagagtcagcattctggaagaaaatcatagcatat

SEQ ID NO: 729915 - DNA, 120 bp, Artificial Sequence
  ENSG00000198626_111 (sequence is synthesized)
caacagaaacttctaaactattttgctcgcaacttttacaacatgagaatgttagccttatttgtcgcatttgctatcaatttcatcttgctcttttataaggtctccacttcttctgtg

SEQ ID NO: 729916 - DNA, 120 bp, Artificial Sequence
  ENSG00000198626_112 (sequence is synthesized)
gttgaaggaaaggagctccccacgagaagttcaagtgaaaatgccaaagtgacaagcctggacagcagctcccatagaatcatcgcagttcactatgtactagaggagagcagcggctac

SEQ ID NO: 729917 - DNA, 120 bp, Artificial Sequence
  ENSG00000198626_113 (sequence is synthesized)
atggagcccacgttgcgtatcttagctattctgcacacggtcatttctttcttctgcatcattggatactactgcttgaaagtcccattggttatttttaagcgagaaaaggaagtggca

SEQ ID NO: 729918 - DNA, 120 bp, Artificial Sequence
  ENSG00000198626_114 (sequence is synthesized)
cggaaattggaatttgatgggctttatattacagaacagccttcagaagatgatattaaaggccagtgggatagactcgtaatcaacacacagtcatttcccaacaactactgggacaaa

SEQ ID NO: 729919 - DNA, 120 bp, Artificial Sequence
  ENSG00000198626_115 (sequence is synthesized)
tttgttaaaagaaaggttatggataaatatggagagttctacggccgagacagaatcagtgaattacttggcatggacaaggcagctctggacttcagtgatgccagagaaaagaagaag

SEQ ID NO: 729920 - DNA, 120 bp, Artificial Sequence
  ENSG00000198626_116 (sequence is synthesized)
ccaaagaaagacagctccttatcagctgtactgaactccattgatgtgaagtatcagatgtggaaactaggagtcgttttcactgacaactccttcctctacctagcctggtatatgact

SEQ ID NO: 729921 - DNA, 120 bp, Artificial Sequence
  ENSG00000198626_117 (sequence is synthesized)
atgtctgttcttggacactataacaactttttttttgccgctcaccttctcgacattgctatgggattcaagacattaagaaccatcttgtcctcagtaactcacaatggcaaacagctc

SEQ ID NO: 729922 - DNA, 120 bp, Artificial Sequence
  ENSG00000198626_118 (sequence is synthesized)
gtattaaccgttggcttattagctgttgttgtatacctatacactgtggtggcattcaattttttccgaaaattctacaataaaagtgaagatggtgatacaccagatatgaaatgtgac

SEQ ID NO: 729923 - DNA, 120 bp, Artificial Sequence
  ENSG00000198626_119 (sequence is synthesized)
gatatgctaacatgctatatgttccacatgtatgttggagttcgtgctggaggagggatcggggatgaaatcgaagacccagcaggagatgaatatgagatctatcgaatcatctttgac

SEQ ID NO: 729924 - DNA, 120 bp, Artificial Sequence
  ENSG00000198626_120 (sequence is synthesized)
atcactttcttcttctttgttattgtcattctcttggccataatacaaggtctaattattgatgcttttggagaactaagagaccaacaggaacaagtcaaagaagacatggagaccaaa

SEQ ID NO: 729925 - DNA, 120 bp, Artificial Sequence
  ENSG00000198626_121 (sequence is synthesized)
tgcttcatctgtgggataggcaatgattacttcgacacagtgccacatggctttgaaacccacactttacaggagcacaacttggctaattacttgttttttctgatgtatcttataaac

SEQ ID NO: 729926 - DNA, 120 bp, Artificial Sequence
  ENSG00000198626_122 (sequence is synthesized)
aaagatgaaacagaacacacaggacaggaatcttatgtctggaagatgtatcaagaaaggtgttgggaatttttcccagcaggggattgcttccggaaacagtatgaagaccagctaaat

SEQ ID NO: 729927 - DNA, 120 bp, Artificial Sequence
  ENSG00000198626_123 (sequence is synthesized)
atttgagcgacaaaacaaagctgaaggtcttgggatggtgacagaggaaggatcagcctctcactttgaaagtcacagactgcggactggagaaaaggttctgcaggacgatgagttcac

SEQ ID NO: 729928 - DNA, 80 bp, Artificial Sequence
  ENSG00000198626_124 (sequence is synthesized)
acttgctcggaggagccggggccgagcggaccgccggctgcaggcagcgagcgcggctgggctgcggggctgcttccccg

SEQ ID NO: 729929 - DNA, 80 bp, Artificial Sequence
  ENSG00000198626_125 (sequence is synthesized)
gagcagggaggccccgcgcctcgaccacccgcgcccgagcgtccgcgcctcctcctccgctctgcaggcggggaccgccc

SEQ ID NO: 729930 - DNA, 120 bp, Artificial Sequence
  ENSG00000198626_126 (sequence is synthesized)
agaagcagaaggcagcgccaggggccgccgccgccgccgagctccgcggggctcgggagccggccccggcgaggaggcgcggaaccatggccgatgggggcgagggcgaagacgagatcc

SEQ ID NO: 729931 - DNA, 120 bp, Artificial Sequence
  ENSG00000198626_127 (sequence is synthesized)
aaaaccaaaaccctacccctctctctccctctctcaatttctctgctctcttggaaacattttgctgattttgtgaattgccagcgttgtgtgttttctgggagcatcgaagctctgttt

SEQ ID NO: 729932 - DNA, 120 bp, Artificial Sequence
  ENSG00000198626_128 (sequence is synthesized)
cggaagagctgtttcctccccccaccttttgtatttactttgagactaaagactgaagaataatctaaattcatactcagacaaaaaaaggaattctggaaagaaaaccattctggacac

SEQ ID NO: 729933 - DNA, 120 bp, Artificial Sequence
  ENSG00000198626_129 (sequence is synthesized)
tgtcataacacacatagatagattttcttctgagactcccggagtcttctcgagctacgagaccttcacagagacacgtggcagccacactcacccagcctctttatttcaccatcctgg

SEQ ID NO: 729934 - DNA, 120 bp, Artificial Sequence
  ENSG00000198626_130 (sequence is synthesized)
aaggaaactgtctgtctaatggtcacagagcactgtagcacttaacagattgccatggacaccagttgcgaagggaaatagtgccttactatatgtgggttgagctatgcagaagatacg

SEQ ID NO: 729935 - DNA, 120 bp, Artificial Sequence
  ENSG00000198626_131 (sequence is synthesized)
tgcatgaaaaaacatctttattttctttatgtcgacctttcttttcttagattgattttgtgaggttttttttttttcctttagtcttttctttagtgggggagggtaagaaaagcagtt

SEQ ID NO: 729936 - DNA, 120 bp, Artificial Sequence
  ENSG00000198626_132 (sequence is synthesized)
tgcacttaaaaagaaaaaaaaaaaacgggtggtgtgtctcaggacaaaaggaggctcttctcattcagctaaattcacatttgccccccccccccgcccccgcccccatatgctcctgct

SEQ ID NO: 729937 - DNA, 120 bp, Artificial Sequence
  ENSG00000198626_133 (sequence is synthesized)
attattttggtaatgctctgatgcaacattgcaactttatgaaatctttgtatgaaaacaaaaagactgcaaaaaatacactttcaaaagaaaccattcattgcatgtttattatgcaag

SEQ ID NO: 729938 - DNA, 120 bp, Artificial Sequence
  ENSG00000198626_134 (sequence is synthesized)
tttaaatgaacaaagaaaaccttcagaaacaagttgatcaacgtgagagaaatttcatgataattattcatagtaataaagtgtcgtgggcttaattgtatatctggagccagtgtcatc

SEQ ID NO: 729939 - DNA, 120 bp, Artificial Sequence
  ENSG00000198626_135 (sequence is synthesized)
caccaacaatgtgatacaatatgaacttgacagtagttttgggttttgctcattctttcagccacctgtgatcagttttgttgattaaggacttcttgtcaggccattttttaatatcaa

SEQ ID NO: 729940 - DNA, 120 bp, Artificial Sequence
  ENSG00000198626_136 (sequence is synthesized)
agctgaagcaatatccattcagggatttcatcagttgcatcacaaaacacggatgataatatacatcactccattttttccattttgagtccttttaaatgtaatgctaacctttacaat

SEQ ID NO: 729941 - DNA, 120 bp, Artificial Sequence
  ENSG00000198626_137 (sequence is synthesized)
taaaaagtcagattcagaatggaaacaaggtcattttgcaaacattggagctcttttattacaagtctgcttgttaattttagaactgtaaaaccgctctgattaaactatttaactaac

SEQ ID NO: 729942 - DNA, 120 bp, Artificial Sequence
  ENSG00000198626_138 (sequence is synthesized)
aactgtagatgggatgtctcatagcttggtatttgatttggccttttctaaaggaaagtaatctgtacctattcccccttggtcgtccgactttgtttgggtgggtactaagtttgtagt

SEQ ID NO: 729943 - DNA, 120 bp, Artificial Sequence
  ENSG00000198626_139 (sequence is synthesized)
ttcagttgaagacacagttaatcctgcttagataactttagtcaatgtcatgaacaagagttgatcactaagcctggacattttcacctaggctagagaaaggaagagacgttgcttttc

SEQ ID NO: 729944 - DNA, 120 bp, Artificial Sequence
  ENSG00000198626_140 (sequence is synthesized)
agccatcatcatcatcatcttgttccctgtctgcgtctgctacttcttgctgctggtacctgtgtcatttaagccaacaccaagatatagttacagcgacagttccatttatattcgtgg

SEQ ID NO: 729945 - DNA, 120 bp, Artificial Sequence
  ENSG00000198626_141 (sequence is synthesized)
ggtggggtcagcctcaccgaaacaaacagcatggctgccacctacggactgaactccattgatgtgaagtatcagatgtggaaactaggagtcgttttcactgacaacgtaagcctactt

SEQ ID NO: 729946 - DNA, 120 bp, Artificial Sequence
  ENSG00000198626_142 (sequence is synthesized)
cattatcacaaaagaaaatgcactctgattagataagactgtgggagttctgcagatggaaggctggttatttagaaaatgtttcgaataccaattcatttcatacagaccagatctgga

SEQ ID NO: 729947 - DNA, 120 bp, Artificial Sequence
  ENSG00000198626_143 (sequence is synthesized)
aaaactgagatgcagatttgtgagtacgttcattaaggttttaattggacaatggcatacttcagttttatagatgttaaaaagaaactcctaaataattttaaaagaacattaattgtg

SEQ ID NO: 729948 - DNA, 120 bp, Artificial Sequence
  ENSG00000198626_144 (sequence is synthesized)
ctaaatttaggttttccccaaattaagtacattaacttatggagttttattttattttttttattctccttttaccaaagagcctttggagactaaatatagggccgtaatatatatcca

SEQ ID NO: 729949 - DNA, 120 bp, Artificial Sequence
  ENSG00000198633_0 (sequence is synthesized)
ctttcaaagagacatattatgcaaggaagcaactcggaagaggaaagaaaggaagtcaggaatggcccttactcaggggcaattgtcattcagcgatgtggccatagaattctctcagga

SEQ ID NO: 729950 - DNA, 120 bp, Artificial Sequence
  ENSG00000198633_1 (sequence is synthesized)
ggagtggaaatgcctggaccctgggcagaaagctttatacagggacgtgatgttagagaactacaggaacctggtctccctaggtgaggataatgtccgtccagaagcctgcatctgctc

SEQ ID NO: 729951 - DNA, 120 bp, Artificial Sequence
  ENSG00000198633_2 (sequence is synthesized)
tggaatctgtcttcctgacctgagtgttacctccatgttggagcaaaagagagatccctggactctgcagagtgaagtgaaaataataaacaatccagatggcagggagtgcatcaaagg

SEQ ID NO: 729952 - DNA, 120 bp, Artificial Sequence
  ENSG00000198633_3 (sequence is synthesized)
tgtgaacacagagaagagttctaaattgggaagcagtgcaggaaacaagtcacttaaaaatcaacatggattaactcttcagttacatctgactgaatggcagccatttcaagctgtaag

SEQ ID NO: 729953 - DNA, 120 bp, Artificial Sequence
  ENSG00000198633_4 (sequence is synthesized)
gaatatttatggatgtaagcatgttgagaaatctatcagtgacaattcttcagtttcaccagttcaaataagttttttcagtgtcaaaacccatatttttaataactacagaaatgattt

SEQ ID NO: 729954 - DNA, 120 bp, Artificial Sequence
  ENSG00000198633_5 (sequence is synthesized)
tcttttttctacattactcccacaagaacagaaagtacacattagggaaaagccttatggatgtaatgagcatgggaaagtcttcagagtgtcttcaagccttactaaccgtcaagtaat

SEQ ID NO: 729955 - DNA, 120 bp, Artificial Sequence
  ENSG00000198633_6 (sequence is synthesized)
ccacattgcagataaaacttacaaatgtagtgactgtggcgagatctttagtagcaattcaaactttgcacaacatcaacgaatccatactggagagaagccttacaaatataatgaatg

SEQ ID NO: 729956 - DNA, 120 bp, Artificial Sequence
  ENSG00000198633_7 (sequence is synthesized)
tggcaaagtcttcaatcagaattcacaccttgcacaacatcagaaaattcatactggacagaaaccttacaataacaaagaatgtgggaaagtctttagtcaccatgcctaccttgcaca

SEQ ID NO: 729957 - DNA, 120 bp, Artificial Sequence
  ENSG00000198633_8 (sequence is synthesized)
tgtggcaaagcatttagtgtgtgttccagtcttactgctcatcttgtaatccatactggagagaaaccttatgattgtaaggaatgtggcaaggtcttcaggcataagtcttccctaacc

SEQ ID NO: 729958 - DNA, 120 bp, Artificial Sequence
  ENSG00000198633_9 (sequence is synthesized)
actcatcagacagttcatactggagagagaccatacaaatgtaatgaatgtggcaaggggtttagtcgaattgcattccttgcaaggcatcggaaagttcatactggagagaaaccttac

SEQ ID NO: 729959 - DNA, 120 bp, Artificial Sequence
  ENSG00000198633_10 (sequence is synthesized)
aaatgtaatgagtgtggcaaggtctttattggcaattcacgccttgcacgacataggaaaattcatactggggggaggcgttacaaatgtaatgaatgtggcaaagcatttagaacgtgt

SEQ ID NO: 729960 - DNA, 120 bp, Artificial Sequence
  ENSG00000198633_11 (sequence is synthesized)
tcagatctcactgcccatcttctaatccatactggagagaaaccttacgaatgtatagactgtggcaaggtcttcaggcacaagtcttccctaacctatcactgtagaattcatactgga

SEQ ID NO: 729961 - DNA, 120 bp, Artificial Sequence
  ENSG00000198633_12 (sequence is synthesized)
gagaagccttacaaatgtaacgaatgtggcaaggtcttcagtcagaattcaaaccttcaacgacataggaaaattcatactggagagaagctttacaaatgtaatgaatgtggcaaggtc
